United States Patent Application Publication US 2008/0008996 A1 - sequence listing, part 10

SEQ ID NO: 61628 - DNA, 391 bp, Zea mays
  unsure (1)..(391): unsure at all n locations
agcttgtacttcgcctcaacatggcttgtttgttgattancgcgtcgtttcagtgcatgttgacgcactcaccgttaacccgccttcggtcacgccaactgccatatctgtccccgcggctaactgacccgtggcccccacacctagtggtttcgtcgggccacgcgcggggcacctcgatactgctgcattggttttaaaaattccttctgccttctgccgtggccccgaggaggcgcagtaccggcgcgagcggcggttcgttctttccgcacccgggatccggcacccaaggagtatgactcgtgggcctgggccctcgtgtcatagactgagctgttgttcttgcggtggagatgaagaagcgcgctaccgcgggcggtgggttgct

SEQ ID NO: 61629 - DNA, 390 bp, Zea mays
ctgcaagcttttctccgaatcggaacaatattgtctcatatgttgtaccaccaaaccacagctcctccacatgttgtgtctatcggccgttctcctccatccttgcatcctctgctctcgaccctatcgcaagtcaagacctataaggacatgcttgcccaacttaatcaaaaacaattaccttctaaatatgagcaactattggaaaccaacctatcttttacttctaatagatatttagcaacctgggagacatgactttatcaaacacatttttaagggtccaaaatatcctttaaaaattggccccaccaccttcttattggggctgtttgaaaataatcctcaaaaattatgaatccacaacagattgctaataacatgtcacta

SEQ ID NO: 61630 - DNA, 394 bp, Zea mays
agcttgaaaggcacaagaacggagaattggtttgttatgcatgcaattgaacaaacgtcgccttcaacttcagcgacgaaagcagcagttcctgcagatgccgaagatgctggcaaagccgaagctgaagactttgcagtcataatgtcagaaattgacaaacttgtatcagatgtggttgcagatgtagttgcagagaagacaagtgtagttgcagaagaaaacatggccacagggtgagataaatgaatcaaaattgacaatactcctttggacgagaaagaatttgatcttcggcacctggggggccaaaaaccttttaaggaggacaagttagaattaaaagaatttgctatatcttgtgggtattaatacgggtccatgctcttcggcg

SEQ ID NO: 61631 - DNA, 297 bp, Zea mays
  unsure (1)..(297): unsure at all n locations
gcaagcttaatcggaaggaaaatgacaatagttcttatttacccataatgatacaaattgatcatctttatttcactgtaccctntctatatttatctagcgtttagttcgaaccagacgtggtgtttgttcaccaaacaaaattagacatatctttgattcttggttaactggtctgaaacatataattagaaagacactttattctaataacctttggctatatgctggacaatctggttgagccataatgatgcacagtttgtaaatgctccaaaaaaatattctctgcgggtg

SEQ ID NO: 61632 - DNA, 381 bp, Zea mays
agcttcggcctcatcgccgattcatctaatgatcccatcacgatcaccacagataaaacttcgctccgtggaaaatgcaccaactttggcaaagttattcttcaatttattacaacactccatggcaacattgtaacattcttctttttctcggcgaaactcctcgacatttttcttaactttgagcccgttaatatcagaaatttggcgttttgtttgctcaacattaaaattttcagtcacttcgtcgagcttcttttctaattcttggacttcagatctgtgaatcccactcgaataatagcgcgtacctcacgcaacaatgcgcttcgatctttcagtacttctttcaagctccttactttctgcttgctttagaaa

SEQ ID NO: 61633 - DNA, 390 bp, Zea mays
agcatggcagacatcatattataaaaatgatcatgctacaattagcagagggacattctagcaaatatacatatgaagctcactatgctctaacatgaaaagccatgtgctaacgaaacacaaaactataatgaccaagacgatgcatattaaaaatgagtcccttagcttaaaaggcaaacacacatccaactcctctcgcaaatgtgcaacagtggactgatcaaggggtgttgttaaaatatctgtaagctatctatggggattgacattaataaaaacaatgtcctctctctcgtaatgatctctgtgaaaatgaaagtggacatcgatgtgcttgagcttataatgcaacacaggaattttggcaacactgaagtcactagggct

SEQ ID NO: 61634 - DNA, 88 bp, Zea mays
agcttgtttcacggtggcggttaatatatttgttgaaaacccgaattctagctcactggtggatgattgtggccgattatccgcggct

SEQ ID NO: 61635 - DNA, 467 bp, Zea mays
  unsure (1)..(467): unsure at all n locations
agctggtgcatgcataaaacaagcataagcataatttctcaccgaaggtgtaccttgtttcagcatccactagcctccggctaaagtaggtcgcaacatgctccttcccttcggtctcctaagtcaggacaactccgattactttatcttcggctccaatgtataacctaaatggtactcttgcttttggtgctttcaatattggagccgaagacaaatagttntttaataaaatcaaatgcttcatgttgttctgcatcccaggtaaaatcagcattatttttaagccaaatattatgagtgaaagcatgaaccttcctggctaagttggaaataaaccttcacaaataatttaccttgccgagaaacttctgcatctcgagcttacaagttggagtccccanattccgaatggacttaattcggtcgggatctatctctatgccatgctcatgaatatagaatca

SEQ ID NO: 61636 - DNA, 444 bp, Zea mays
  unsure (1)..(444): unsure at all n locations
ctcagcttctgcacatacatgagttgctgtcnanacannaaccctgggtaatgaacagtatcacaaccaatttggctgctacagcttcggctcccggtctgggtcaagctgccccgtgccgacctttcgaaagagatggcctggcgactggatgacaaaatggttttacgtgaagaatgacttgaaatcacgagaagatataaagaagatcattatgcgtcccatctggcaacgcttcggcctgcggaggccgaaggtggaaatgaatgaagcatccgaagaatgccagagagccttcggtgttgtttgctcttttattgngatgagggatttggccaagaacacattgccttagagtatggcacttgtggaaaatggaaatgccgatgagacattaagaactgataagtggctagtcagctaaatcacattcagttgaataat

SEQ ID NO: 61637 - DNA, 359 bp, Zea mays
  unsure (1)..(359): unsure at all n locations
gggagagcacattttaggattaacttatgtttatttngagaaagacaggatttgtagcgcatgcccagcatggaagcacagtggtgttcatcattcacacaagaacatcatgacgactaacaggccactcgagctccgacacatggacctattcggcccgataacttacataagcatcggcgggagtaagtactgtctaattattggggatgattattctcgcttcacttgggtgttctttttgcaggaaanatctcatacccaagagaccttaaagggattcttgagaccggctcaaaatgagttctgcttaggatcaagaaaattagaagcgacaacgggacgaagttcaagaactc

SEQ ID NO: 61638 - DNA, 466 bp, Zea mays
  unsure (1)..(466): unsure at all n locations
tgctgcctccctttgcacaaactatgaagagacaggttatgttatctttgaacacattggcacagattttaactggcatatgttggtaagacatgacgtttatttggaatcttgcagcatgatacacaattacacacagcagctcttaagtacttcattcataccaaattataagatgtgttatgtattatgaggtgctctgggttgtctagatacatagattntactacgcatctagacatgtgatatatctaagtgcatggcataaattaatgtctatcatagccaaatcatcttatatattggaatgtgaagagtacaanactatgagggaactgtatctattactagaactagagatcgcaatctgacatgtccaattctgcaacgtggaggctattttaatgcgccttcgttactttctggataacaagcagtacggtcaatgttacagcaggtctgttgt

SEQ ID NO: 61639 - DNA, 345 bp, Zea mays
  unsure (1)..(345): unsure at all n locations
cttcgtcgggtgcccatcattcctcggctttcaaggttggtcctcacaaagaaatagctctgcatatgacgcggcccaagaatggtgttcgtctcgtcactgatccagacataatggttcatcctgctgacggcgatgcgtggaaagcatttgaccagtatgatcccgaatttgcatacgaccctangagtgtactgcttgatctatcgactgacggattcacacctttcaataccactgccagcccgtactcgtgttggcctgtcttcattgtgccatataatcttcctcctgagttgggaaaaaagaagagatcatgtttcttgcactagtcattccaggccc

SEQ ID NO: 61640 - DNA, 447 bp, Zea mays
  unsure (1)..(447): unsure at all n locations
tgtgaagggtcttcattctcacatgtgctaagctgcgatgccatatttatcccatgctagtcttagcaattaagcatgcatctagaccggcctcttctttgcaaaatcaactaaataaagtttgccgtctaatacacccttaaaagctaatgaaccatcacttcttctaaagacagacacatctatattagtaaataaacaattatatcccatattacatagttgactaacagatagcaaattatatccaagggactcaactaaaaacacattagagatagagtgctcatttgaaattgcaatcttgcctaagcctttcaccttgccttggttcccatcanccaatatgattgaatcttagagtccttattcttgacgtaggaggtgaacatcttcttctcacccgcatatgggtagtgcattcgctgtcgataatccagcttgaac

SEQ ID NO: 61641 - DNA, 383 bp, Zea mays
atgcaagcttctcccaacctctaagaatgaactcgcagcatctccgttctgagatgagggtggggactccaggaatttgtcgcccgagctcgtgcgccgctgcgtggcctccatgcaccgtgtaccgaggtcactgctacacgtcccatggtaactcgcccttccctttgctcgccacggtacccgcgtcatttatcgcctcgccacgctaggaattgcgttcaaaatcggcggatgcccttgctctggcaaccacgccaccgcacgcactgggcggcgccgcctctgtgcggatcctgggggaagaaggcttggcaccgttggatctaagtgcgcgggcaggattataagtaaccatacctcttggaagctctaaatcggaa

SEQ ID NO: 61642 - DNA, 468 bp, Zea mays
  unsure (1)..(468): unsure at all n locations
agcttatgaagattcttcatcccaacatgggcttgtcggcggtgccagagtcaacccatgttagtcttagcaattaaacatgtgtcgagctcagctctatcaaaatctactaagtatagctgaccctctaacacacccttaaatgctattgaatcatcacttcttctaaagacagtgacacctatatcagtaaaaagacagttgtagcccatttgacataattgggaaacagaaagcaagttgtaatctaatgaatcaacaagaaaaacattggaaatggaatggtcaggtgaaatagcaattttacccaaacctttgaccaacccttgatttccatccccaaatgtgatagctcggtggggatcttngtttttctcatatgaagagaacatccttttctccccggtcatgtggtttgtgcacccgtgtcgagtatccacttgagcccccgatgcataacctacaaac

SEQ ID NO: 61643 - DNA, 398 bp, Zea mays
tcgactgtgagctcggatgggactccgaatcggcaaacaatattttgccagaagaacttctgggcagtcttcgacgttattgtggatactgcccttgcctctatccacttggtaaaatattcgacagcaacgaaggtgaacttgaggttcccttgagccatgggtagtggcccgacaatatccagcccccatcgttgaagtggccatgtgtgggcaatcatcttggtgaactgtgaaaggttgcccgagcggtgagaaaacttctggcaggcttcgcatgaccttgtgactcgattcacggcgcagattatatcacgccagtagaacccttgacggatcaccttgtgagtgagggccctaggtcccgagtgagagccacaagttccgcttgtgactta

SEQ ID NO: 61644 - DNA, 464 bp, Zea mays
  unsure (1)..(464): unsure at all n locations
agcttcttgctntgcgggtagtcggtggctagcacgactgcgagggagggtgcgtgagcggcgagcggcgcgggcaatgcattgtgtgggcgcacatggaggcttcacgtggcgcacctatgctacgcgacatctccattgggtgtccagtagatcgtggtcggtgagtgcccaattaatgctagattatcaaataacttcaagaggtggattattgcaatctcatcactttctgttgctccctcccatagcccctactccacgcatncttcatcgtcttcgtggacatcccgacgccttgcacgacttcgcctcatggaactctctcctcaactcgctctcctatcaccacctcgtcgtcacgctatcccatttccgctctatgatgtacttatcgagaaccattctcccttgccgcactcttctctattgcgttcactatttgtcggcgttcgaccccgggg

SEQ ID NO: 61645 - DNA, 428 bp, Zea mays
  unsure (1)..(428): unsure at all n locations
tgccagtacttgtcaaagcaacaacatctaccagcacagcaactgttgaccataccagtaacttggtcgttcgcatgctgcggactagatatgattggacctttcaagaaagctcaaggaggatacactcatgtactggtagcaatcgacaaattcactaaatggatagagttcaaacccattgcttctttaacctcagctaaggccgtggaattcatacaagacataatattcagattcggaataccgaacagtatcataactgacctaggatccaacttcacaagttcagagttcttcgatttctgcgagcaaaagagcattcagatcaagtatgcttcggtggcacacccaagagccaacgggcaggttgaacgagctaacgggatgatattggaggcactcangaagaaagtcttcgataaaaa

SEQ ID NO: 61646 - DNA, 445 bp, Zea mays
tagcttctaaagggagaacacatgatatgtctaacttatgtaactttcgaaaaaaatagaccttgtgcagctcgtcaagcaggtaaacaggtgggaagctctcatcatgccaaaaatgtgatgacaacatcaagacccctggagttacttcatatggacctcttcggacccgtcgcctatctaagtataggaggaagtaagtatggtcttgttatagttgatgatttttcccgcttcacttgggtattctttttgcaggataaatctgaaacccaagggaccctcaagcgcttccttatgagagcccaaaacgagtttgagctcatagtgaagaagataaggagcgacaatgggtccaagttcaagaaccttcaagtggaggagtatcttgaggaggaaggaatcaagcacgagttctccgctccctatacaccacagcaaaatg

SEQ ID NO: 61647 - DNA, 496 bp, Zea mays
  unsure (1)..(496): unsure at all n locations
tccttgagaaggagggcatcaagcatgagtttctcttctccctatacgccacaacaaaatggtgtagtggaaaggaagaatataactctattggacatggcaaggaccatgcttgatgagtacaagatttcggatcggttntgggccgaggcggtcaacaccgcttgctacgccatcaaccggttatatcttcaccgaatcctcaagaagacatcgtatgaactcctaaccggtaaaaagcccaatgtttcatattttagagtctttggtagcaaatgctttattcttgttaaaagaggtagaaaatctaaacttactcctaaggctatagaaggctntttactangttatgattcanacacaagggcatatagagtctttaacaagtcctctggactagttgaaggttcttgtgacattgtgnttgatgagactaacggctctcaagtagagcaagttgatcttgatgagctagatgatgaagaagctcatgcgt

SEQ ID NO: 61648 - DNA, 467 bp, Zea mays
agctggcttacttgtgaagatgaccaatgcgccctctacgggtttaccggagaggacgagagatttattggaactcatacatactgatgtgtgcggaccaatgagtacgacagctaggggaggattccaatacttcataaccttcactgatgattttagtagatatgggtatgtctacttaatgaaacacaagtctgaatccttagaaaagttcaaagagtttcagaatgaagtagaatatcagcgcggcaagaaaattaaagcactgcgatcagatcgtggaggtgaatatttgagtcatgaagttaacaatcatctaaagagttgtggaattgttccacagcttacgccgcctggaacgcctcagaggaatggcgtgtctaagcgacgtaatccgactttattggatatggttcgatcaatgatgagccaatcggacctacctttgtcgttgtgggatacgctct

SEQ ID NO: 61649 - DNA, 320 bp, Zea mays
  unsure (1)..(320): unsure at all n locations
tttcttcttcgactgcaatatgtgtaatgttgctcccatactgactgtcttttgtgtaggagacgatnaaaatgctagttgtgagagatacgtctatataaaagaggtgatgcatacaatagagtctaatagactatcgggacagaagatacgttgtggatctcacttcgtccattcatacattaaagatctgataatgagatcagtaggttctgggaatctacgtggttcgaagcccgatgcgtgttgagctaatgatattgtatgcggaaatgcgaatagagcacatgatgcaccggtatggaaggtggctagagctg

SEQ ID NO: 61650 - DNA, 379 bp, Zea mays
  unsure (1)..(379): unsure at all n locations
atctttcaaagtgtcggccacaactctatgtcttctacaagacagaagaccttgctccaaccacacagccaaagtctaaattacagttgctcgagaaccacaagcacaaaaatatcttattgctgttgtttcacagtaacattgcagaaactaataagtcatgctgaaatttaatggcaagaacaaaaacgtatattttccctaccgcaggaaacggcgactcgctggactcnaataaaatcccacttattatatcatacaccaggggcggacctattaaagtacatgggtgtatacatgtacacccgataaatttggcaaaacaatcggagctagtgcgcattatatatgcatatgcacttgtaattataccagatcc

SEQ ID NO: 61651 - DNA, 431 bp, Zea mays
  unsure (1)..(431): unsure at all n locations
tataaaactcagctaatcctgaaagtggtcttcgggtgccccaggcatgcttctaggttcatcgtctctgagcgaggcatcgaggccaacccggagaagatcgcggccatcaccagcatggggcccatcaaggacttaaaaggggtacagagggtcatgggatgcctcgcggccctgagccgcttcatctcacgcctcggcgaaagaggtctgcccctgtaaccgcctttaaggaaagccgagtgtttcgtttggacccctgaggccgaggaagccctcggcaacctaaaggcgctccttacaaaggcgccagtcttggtgccgccggcggacggagaaaccctcttggtctacgtcgccgcgaccactcangtggttagcgccgcgattgtggtcgaaaggcaggaggaagggcatacattgcccgttca

SEQ ID NO: 61652 - DNA, 463 bp, Zea mays
  unsure (1)..(463): unsure at all n locations
agctngccgnctagtacacccttaatagctagtgtaccatcacatcttctaaagacagacacatctacatttgtaaacaaacagttatatcccatattgcataattgactaatagatagcaaattatatccaagactctctactagaaacacattagagatagaatgctcattggagattgcaattttacctagcccttttaccttgccttgattcccatcaccgaatattattgaatcttgggaatctttgtttttgacgtaggaggtgaacatcttcttctcccccgtcatatggtttgtgcatccgctgtcaataatccagcttgaacccccggatgcataaacctgcaaggcaaatttaggcttgggtcttaagtacccaactcatgttggtcctgcagggtagcacaaataccttagggaacaaatgcaagtttgtctccttgcatctgccctaattt

SEQ ID NO: 61653 - DNA, 280 bp, Zea mays
gccagcgaaatgaggaccagtagagaacaagcgctcaacgactgaggctatcatgtcatgagctacataaagtctgatgaccacaatgcaggcgctatcagttattacatttcaccggtaagggactatgctcatgacttatggtcatgttgacctcgatgtacatgttagctatatgcgcgtctcagtaatgctatgggattattgcatgacaatactcgagacctacgtgctcatgccctatattacctcacattccaatagacattcagagagttat

SEQ ID NO: 61654 - DNA, 458 bp, Zea mays
  unsure (1)..(458): unsure at all n locations
agcttcacgggctactggcggagcttgcagaagctctggcttgcccagagggtggctggagtgggctggccaccatggccgaagctctggcggcaatggcgggcggaattaaactcgccgaagctatggaaaagtggctggccggtgagggtgagtgcggggcgaatagaggtgcgcccggtgagactttataggcgagggcgggcaccgccganggcgtgggcgcgcggcggacttgaccggacgccggggtgagcgcgcgcgcgggttgggcgagctctggcgtgccgactatggttgaacacgtgtgcccgtgcgttctgcccaagatctggcgcgtgtggtcgctcatccgaacctgctctcgccttggtcagtgcacaaaacctcttctcctccctacaaactaccattcttgtgtgggggtcataagaatttgcctactggttgagagatat

SEQ ID NO: 61655 - DNA, 362 bp, Zea mays
  unsure (1)..(362): unsure at all n locations
tattacggacctataaaactcagctgccttccttagatatcacctgcaatctactgttcgttttcgcgccaacacaagatnttactgccatcaaaaaggcttctcgacgacaggaagggaaatgggtcgccagctgcctaaagtagtctgggcactcaacacaaacgaatgccgggcaactggattcactccattttgactgctatatggatcagaggccatgaccccgcangaaataaagcacgggtcccctcgaacaagtgcatctgtcatccccgacgtcgacgaacccacatccaaagacctcatcgacgaataccacgtcttcaccctgcaggccctcaacaaataccaagctcaaa

SEQ ID NO: 61656 - DNA, 483 bp, Zea mays
  unsure (1)..(483): unsure at all n locations
gctttgatcaacggattgcgaatcgccatcgagctatgggtccgatgcctcgacgctcgcggcgactcgcagctcgtcatcgactaagtcatgaagaactcccactgccgcgacccgaagatggaggcatattgtgatgaggttcaacgcctggaagacaagttctacgggctcgagcttaaccacatcgcccggcgctacaacgagactgcggacgagctggcaaagatagcctcggggcgaacgacagttcccccggacgtcttctcccgggatctgcaccaaccctccgtcaagatcagcgacaaccccgagcccgaggcgccctcggccccgtctgaggtgacctcggcccagcccgagccatcctcggttcagcccgaggaaccctcngcccccgagggcgaagcgctgcgcatcgaggaggagcggagcggngtcacgcctgatcgagaatggcggccccgtacctgcaatatctcg

SEQ ID NO: 61657 - DNA, 394 bp, Zea mays
agcttcactggaaaagaaaaaagaaaagactaaactgctatggttctgtttcagcccaggcggcccaacaacacaggaaaccggggcgcgcccgcgcccgcggtggatgctttgcagaacgccctcggggtgttggcgtaccataactgggttctattactattacacggagtccctgacggtttgaagaagagccctccggtttctatttcttcgcaagggaaggtccacgacgacggtgagcgcggtggagcttctgcgagctatcagaccgcctaacggggcaatgactcgcgttcccgagcggcggacaccaaatccgacctaccccgagcattttccctaagctaattgtacggttggagagctatcaagctcttgtcactggaaccga

SEQ ID NO: 61658 - DNA, 430 bp, Zea mays
  unsure (1)..(430): unsure at all n locations
ccgcaggcgcaccgtcgatggcgacgtgcggatggcacggttaggatggcaccctggtgaggaattcaccgcgctccgaggacgtccaagccagcacaaggtccccaaacgcttcccggcgcctcggcgatactcacagggccagcgacggcgctaattccccccctctctgcgctcagctctctctctcttggtggcggcacaagcggcggcgcttttgtcactgtggacgcgcanggaggtagtggaagtaatggaggggaagagggggtatccctacttatcccccgaagactctgctcgggatggggataacgacgtgcccgagtccggcaatggtggcgagcttctcgcgccggtcgttgtcgcgagcagcatgatgactagtgggaccgactaaccatngacttaagcagcgggcgcggatgat

SEQ ID NO: 61659 - DNA, 455 bp, Zea mays
tgacattgcctccctgttggaagccaatgccatccttaatgccatttcgtcttcctctatagagcatgcttctagcagatgtaaacttttcgttttctaagtcatgctcggcaattatagcatctaactttgctatatgatcattttgttgtttaattaaaaccatgtgatcatgaatagcattaatgttaacatctctacatctagtgcaaataatagtgtgttcaatggtagatgtatagggtctgcaagaatcaagttcaataatcttagcacacaatatatcattcttatccctaagattggaaatatgaatattgcaaacatcaagttctttagccatagcaagcaatttttcattctcattcctgaggctagcaagagtaatgtttaattcttcaatcttagcaagcaaattatcactatcatttctaagagtgtgaattgaacattac

SEQ ID NO: 61660 - DNA, 448 bp, Zea mays
accgcacccgcatccttatcacattctatggctcaacaatagtggtaaggtcaaggtaaccaagctggtacgaattaattttgctattggttcatatcgtgatgttgttgactgtgatggtgcgcctatggatgctcgtaatattctgctacgtagaccatggcaatttgattcagatcgtatgcattatggtagatcaaatcaatattctctcatacaccatgataagaaaattattttgcttcccatgtcccctgaggctattgtgcgtgatgatgttgctaaagctaccaaagctaagactgagaacaacaagaatattatagctgttggtaataacaaagatgggatgaaatttgaaggacattgcttgcttgcaacataaactgatgtaatgaattatttgttccactactgtgcctacgccttgtatgcagtgtgctttgat

SEQ ID NO: 61661 - DNA, 455 bp, Zea mays
tactaagcttctcaccatgtcgctgctagccaagatgatgcagcttacctccatcattgatcaaacgacatgaacgctccttaatgacacactctgtttgaaacaacgtatgtcgctgattctgctctgccttctccatttgtgcactaagcacacgctgtacaatgaggctctcataatgctctgcatcatctgcaccaatctgttcttcgggtggttccttagtgcctacatcatcagccgcaagcaaagcaagtgtagcttcatccaaatcactagcagaggaatacccaccatcgtcttttaccaccataacacgctgattaggacaataacgctgcacgtgtccatagcccttgcatcgataacacagaacatctcttgttctacctgtggaagctactgaagaggcactacctgcgggtttctgggcagatttggttgctgaatttgtg

SEQ ID NO: 61662 - DNA, 397 bp, Zea mays
agcttatgaagggtcttcatcccaacatgtgctatactgcgattgccaagccagcccatattggtcttagctattaagcatgtatctagatcggcattctctttctaaaaatctactaaatagagttctgccgtctaatacacccttaaaggctaattaaccataacttcttctaaagacagatacatcaatatttgttaataaacaattgtagcccatgtgacataattgacttatagacagtaaatggtgcccgagcgactctactaaaaataccattgatattgagtgcctcgttgtgatggcaatcttgcgcaatcctttaaccttgccttggttccatctcaaagaagataaagtccagcgaatcctgttcttgacgtaagaggagaacatt

SEQ ID NO: 61663 - DNA, 499 bp, Zea mays
  unsure (1)..(499): unsure at all n locations
ngagtgagccatanatacaaagcgcagtataagataaactagcctataccacatgtagaactgggtgaagacacagccncccctcaatcaagcatagcagaaaagaagtcttcagctgctgaataacataaataaatctaagtgaatacactaggtattccgcaagcccaccccgctcccgtaaagagaaagagacctatatcgtacaagctttatatggtgtggttgaagtcactcttctatttctcagagaaagacagtactttttagggtttccttcccgaagaaatagaaataacacattgctcaaccaccactgagcttcccgctcccgtggcatcattttcttttccagagacacactcacacagacatgtttccctgttcacggatattgtaaaacactaattatcataccacaccagactcgtncattccagtggacacggactatactaatangttngaactctgcacagatgggtacactatacccact

SEQ ID NO: 61664 - DNA, 359 bp, Zea mays
  unsure (1)..(359): unsure at all n locations
gatgaccacgaggtggttaaggttattctaagatcacttattttccttaaccccactcaagtacaattaattcgtggcaatccaagatatacactaatgactcccgaggaagtaatctagaattttgtgagctttgaatttatgatcaagggctcacgaagatcaacgagcttgacggtccttctacgttcgaagctcaaccggtcgcattcaaagcgacagaggagaagaaggaggagtctacaccgagtagaacacccatcgacgcctncaagctcgacaacgaggaaatggcgcttgtcgtcaaaagctttcaccatatcctctagcaaaggagggngaaagatacaagccccgct

SEQ ID NO: 61665 - DNA, 392 bp, Zea mays
cctcgagtgtctcttgataccatactagcataattaacacattatcttgagtttgactctctataacacttaaactcgggtgtgtgctcttacccttctaacttaaactaacactaacggacatgcttggcacactagtagtcatacttctttacggatgagataacatcacttagtcaaaactatatatgaacataagagatcttactttaattgtatatgttctggcctagagaaaactgacaccatacttttacataaattagatagctcattcaccattgttgcactgacactatcgatatattgagagaaggagagaatgatacctctagaccatctcattgtaacggtgctaacgccctgtttgctatactagagattactaaaat

SEQ ID NO: 61666 - DNA, 454 bp, Zea mays
  unsure (1)..(454): unsure at all n locations
gcttctaaagggagaacacattntgggactaacctatgttcattntgagaaagacagggtttgtagcgcatgtcaagcagggaagcaagttggtacccatcatccacacaagaacatcatgacgaccgacaggccgattgagttactccacatggatttatttggcccgatcgcttacataagcatcggcgggagtaagtattgtcttgtaattgtggatgactattctcgcttcacttgggtattctttttgcaggaaatatctcaaacccaagaggctttaaagggattcttgagatgggctcaaaatgagttcggattaaggatcaagaanataagaagcgacaacgggatggagttcaagaactctcaaatngaaggttttcttgaggaagagggcatcaagcatgaagtctcttctccctacacacctcaacaaaatggtgtcgtggag

SEQ ID NO: 61667 - DNA, 448 bp, Zea mays
  unsure (1)..(448): unsure at all n locations
tgagttatctnncccctacaccccgcaacanaatggtgtagtggtaaggaagaatagaactctattggacatggccagaaccatgcttgatgagtacaagacttctgatcaggtntgggccgaggcggtcaacaccgcttgctacgccatcaaccggttatatcttcactgaatcctcaagaagacatcatatgaactcctaaccggtaaaaagcccaacatttcatattttagagtctttggtagcaaatgctctattcttgttaaaagaggtagaaaatctaaatttgctcctaagactgtagaagggcttttactaggatatgattcacacacaagggcatatagagtctttaacaagtcctctagacaagttgaagtttcttgtgacgttgtgtttgatgagactaacggctctcaagtagagcaagtngatcttgatgagata

SEQ ID NO: 61668 - DNA, 388 bp, Zea mays
  unsure (1)..(388): unsure at all n locations
agctngaaggactgcttcggcaggagagcttcctagcgtgatgactcgttcggtccacggagtcgctttatccgagcgcaagttacttatcgcagaaggtgatgagtgaggtatccgtatcccggaggcgtaggagtccctcggctcggtcagccttggctgcttacgtgtacctcgtcgtttccaggatccgctttccgaagtagtcaagaagcacgaaagaaatcctgctaaaaagagatcctttttcgaggaaaaaattcgacgcagagggggtctccccccttttagcccccgagggagggtcgggctttgtcgaggctatgccgacccttccttgacgactaaacattgcgtaagtgcgatgtatatgaacaacttgataaca

SEQ ID NO: 61669 - DNA, 489 bp, Zea mays
  unsure (1)..(489): unsure at all n locations
tgacattgtctccctgttggaaaccaatgccatccttaatgccattgtgtatcccattatagagcatacttctagcaaatttaaattttttattttctatctcatgctcattaattntactagttagttgtgctatgtgatcattttgttgtttaattaaagctagatgatcatgaatagcatcaacattaatatctctacatctcatgcaaatagaaacatgatcaacagtggatgtagagggtttgcaaacatttaattcatcaatcttagcatgtaaaatagcattctcatttctaagattggaaacaatatcattgcaaacatttaaattcttagccttagcaattaatttatcattctcaatcctaaggctagcaattgattcatttaactttgcaatcttagtaattaaactagcattatcatttctaagactaataattgaatcatacagactttagcttctcacctttagaatcaattaca

SEQ ID NO: 61670 - DNA, 458 bp, Zea mays
gcttctaattctgagtcagcaactatgttttgatcatggttattatgtcacctctagagaattcttggtttgtttagatccgatttcaaattctttgtgacacgagcttgctatcttgcattcttggtgagatcccgaagttgtcaggagagtttaagatttgcgggatgacagcttatgtcagccagtcagcatggatacagagtggtaaaattcatgacaaagagcgttggttcttgttacaacctcatacaagacggcgactctattatttgacaagatgcacatgtccatattcagagcttctatgtattttttttattccactagtgggcgcatcttgaatatggtaagtgatcattgtggacattttgtgcaggttctgcttatttttatagactgtgctaatagatggtccaaacgtttcaggcttccactgatcaaagtgaggtggacac

SEQ ID NO: 61671 - DNA, 489 bp, Zea mays
  unsure (1)..(489): unsure at all n locations
tcacatttctggactaactcggctgcgtcactctttgctgttgtataatagaaaccagacctgaaatctttcccgaccagagttctgaatgttgcgtgtattccacactgtccggcgtggatctcatctagtagctgtttcccagtaaccgaggaaatgcacttcatgaggactcctgtcgcaccccttctatacagtgcaccccctataagggtgtagtggtccgactgtctcgcgattatttctgctgcagccttatcatctggttcttcttcattccttatgtacctgatgataggccctctccagtcattanggttcgattctggttggctcaaggtattgcattctttcgcctgatctganggaatacttggacgtggcacttcctgaatgaaaaactcaggtgggacctgtgttcgactggatcctanctttgacaacgtgtctgctgcggcgttgcgatctcttttcacgtgatggaattct

SEQ ID NO: 61672 - DNA, 417 bp, Zea mays
  unsure (1)..(417): unsure at all n locations
agcttagctgtagttgaagaagttcatctgcttttcatcaagaaaactctaggtttctcaaacctaaccatggtcaaccatagaatgttaaagtgatttttggttttcaaaaatagcttttgaatttgggaactttagctataacaaacaccattacctgtgcgaaaaatactaaggaagaattacatcatgcaactcaagatttacataaaattttatatgtccgttgcatgaagtccttgttgcttccttgagttcctgttgctttctaatcatacactgggaacaaaaactgttagtacccttatttgttgtgtcattaaatcaccaaaaccctaactaggggttgattgcacttacaatccccccctttttggtgatngatgccaaaacaattaaggtcaaaaggataaacat

SEQ ID NO: 61673 - DNA, 411 bp, Zea mays
  unsure (1)..(411): unsure at all n locations
tggtacctgttntgtgtgtcacgtgatgttattcaacccacttttctcttgctctcgagtgagtatagctggccttctcgacactccttattaactcacaatattaatgaattatctatgcccatattcatgccatgcaattaagatgagatcatgaatgataaaaaagacaagcatcaatgtgcgctcatgggttatgggtattctattctttctggttagaaacaacttggtttgacttttattacctctcttttctttacaacagttgtcactgttaacttttagggtgtaacttcgagacacacactaatatttctaagtacatatattccgtgggtaccattgctggcagtcctaacagaggttaattcacactattgaaccatatatctagaaaataagtttaat

SEQ ID NO: 61674 - DNA, 400 bp, Zea mays
  unsure (1)..(400): unsure at all n locations
gcttcngctgatcaaccgaagcccatgctgctgtgtgaggatatagcaaaagcacaaggtgctattgggctcgcaattatctgaagatcaagagaaaaccttgataaggtttttattcaacaataaagatgtttttgcatggtcagccaatgatctttgtggagtgaatcgggatgttattgaacattcgctcaatattgacccatccttcagaccccgcaagcagaggcttcggaaaatgtctgatgacaaggccgaaggggctcgcaacgaagtaaaaagactcctaagtgcaggagttatcagagaagtgaagtatccagaatggctagctaacacntgtatggtgaagaaggctaatggaaagtggagaatgtgtattgatttcacagatctcaac

SEQ ID NO: 61675 - DNA, 347 bp, Zea mays
ctctagcgatctatggctctagatctatcttggccttgcagcctggattgccataaggctggtgtgcacactgatgcgagctggaactgaatgctgacatcactagaggagctgaggaaccatcatacacatgacgacgttgcgtgcgctcagtcctgaactgagcgagctcagcgcgagccctacttaaatcgtctagtgcatggtccaactacgtgtatagcactgatgatatgttgactgcgctggtgaatctaggattgacctcacggacaggcgatacgatgacgcatactatgctgacatatggacagcggaggtaatacttcacgtcgagaccgccagct

SEQ ID NO: 61676 - DNA, 321 bp, Zea mays
ttcagttttgagaaagacaaggcttgtagcgcatgtcaagcagggaagcatattggagctcatcatccacacaaaaacatcatgatgactcacaggtcgcttgagctactccacatggacctattcggcccgatagcttacataagcatcagcgggagtaagtattgtcttgtaattgtggatgattcttctcgcttcacttgcgtggtctttctgacgaaaaatcacaacctcagaacgttaacgggtcttgagacggctcaaacgagttcgactaaggataaaaagattaaagcgacacgggacgagtcaagacttaca

SEQ ID NO: 61677 - DNA, 483 bp, Zea mays
  unsure (1)..(483): unsure at all n locations
atgcaagcttacatgtctcgtatgattcaaaatcaaacgaattttaatgcccatcagaatgaagcttcttcatgcgattctcacttatatgacccaaacgacagtgccacatgtaggtaggacttaaatcattaggccgaggccttttagcactaatattacagataggtgcatcatcaagatttaaaatgaataacccattcataatggatgcaaaagccacaaacatgccattcttagagatcacacaaccattgttttcactcgcaaatgaataaccatccttcatcaaacatgaaggagacataatgtttcgactcatactaggaactagataacaattatttaactccaaaataaatcctgatgggaggtggagttgcatcgtcccgacagtcaacgcagcaactcttgcattattgcctacccggaaatcaacttctnctcttttcacgcttctaggtcttatcattccctgcatcg

SEQ ID NO: 61678 - DNA, 388 bp, Zea mays
tctaggaacccaaatattctttgtggtagcacttggtaaactcattacctcttctagcacaagttgcaattttgggttgcctagttacatgtgaattaattgacaagctagaagcgggataactaccaatgggacaatccttgcattgatgtcctttcttttggcatatgtagcatatgcgatcttcaagtcttgaagatttcttcttttcttgtttcttgctcgctacatgggtaataaataatttcttttcaaaaatgataccttcttgttttacatggggacaagacttaattaagtgtcccttctttgagcatttaagacaaagtttatcatccttgttaataatcaagccatttttaatatatggacatgacctaattgagtg

SEQ ID NO: 61679 - DNA, 393 bp, Zea mays
ctaagcttgaggactgcttcgcaagagagcttccgagcgtgatgactctttctgtccacggagacgctatattcgagcgcaagttacttatcgcaaaaggtgatgagtgaggtatccgtatcccggaggcgtacgagtccctcggctcggtcagccttggctgcttacgtgtacctcgacgttactaggacccgcttttccgaagtagtgaggaagcatcgaaagaaatcctgctaaaaagagatcctttctcgaggataaattcgacgcagagggggtctccccccttttatgccccgagggagggtcaggctttgcacaggctatgccgacccttccttgatactaaactatgcgtatgtgctacgtatataaacaacttgacaacatctt

SEQ ID NO: 61680 - DNA, 447 bp, Zea mays
  unsure (1)..(447): unsure at all n locations
agctntatanatggacgtgaaaagggccttccttaatggactaatcattgatgaggtctatgnngagcaacctcccggctctgaagatagtaagtaccctaaccatgtgtataaactctctaaggcgctttatgggctcaagcaagccccaagagaatggtatgaatgcctaagagattttcttatcactaatggcttcaaagtcggaaaagccgatcctactttatttactaagactcttgacaatgatttgtttgtatgccaaatatatgttgatgatattatatttgggtctactaacgaatctacatgtgaggaatttagtaggatcatgacaaagaaattctagatgtcgatgatgggggagttgaattacttcttgtgatttcaagtgaagcaactcctagagggcaccttcattagccaaacatagtatattcatgacat

SEQ ID NO: 61681 - DNA, 503 bp, Zea mays
  unsure (1)..(503): unsure at all n locations
tgtgttggtcacgtgttctcaaatactatgaattaagaacaaggtttcacatatgttaatggttaaagaccttctgccttcgaagcattatcttccttaggatataatgatcttcaaacgaaggtcatgaaggacataccttcatcatttcaatatgtaagaatataaacagggacgtatgaaacataggaagaacatgggtaattatattaaatcattagattattcatattgtcattatataatcatgaacaaacattaatgatattaaattacatttgtaccttcgggttgacagaaggtaaaagtccgagaatgacatacgagcgattacaagtcagcgtgaacagtatggtggtactgttcatctatttatatgcacaggacgcagcctgtngcaaattacattcatgtccctgacatttactattagccaaatggtaagttgtcgaggactaagcaaatctttctctttatgtcggtttcattctccatcactgtct

SEQ ID NO: 61682 - DNA, 476 bp, Zea mays
  unsure (1)..(476): unsure at all n locations
agctntatgaagatcaagcttcggtcatcgcacgctgacagtttcagctgaagctgcttcttccttcaagaccttcggcgcgacgaagcatagtcccaacagtagcccctttcgcggcgctagatcgtttttcgtaacgagcttgatccgtgaaaagaaaaagtctcttaagcttcgggaagccgaaggtctaaaaacaccttccctgagctcgttgccgagaaacgattcagtttccgagcgcgtagcggtcccaccttgcagagttactgtttggtctctgtggtccaccgcgcagcgagtgcaagcggctgtccgcctggtgtaaaaatcctggcgcttcgccttcttacctgcagtactatataaacagacgagtaggtgtgaagttaccacagcattcattgctattggcactggtntgctgccaanattataaccatagccgaagcttgactctcggaatcgaacgaagc

SEQ ID NO: 61683 - DNA, 491 bp, Zea mays
ctaagcttcttagggagaacacgtgataggtttgactaacgtgcatttctaataagatagaccttgtgcagcttgtcaagcaggtaaacaggtgggaggagcacatcacagcaagaatgtgatgaccacttcaagacccctggagctgctgcatatggacctcttcggacccgtcgcctatctaagcatagggggaagtaagtatggtctagttattgttgatgacttttcccgcttcacttgggtgttctttttgcaggataagtctgaaacccaagggaccctcaagcgcttcctcaggagggctcaaaatgagtttgagctcaaagtgaagaagataaggagcgacaacgggtccgagttcaagaaccttcaagtggaggagttccttgaagaagaagggatcaagcacgagttctccgctctctacacaccacagctaaatggtgtggtagagaggaagaacatgacgctcatctacatggcgagga

SEQ ID NO: 61684 - DNA, 477 bp, Zea mays
agcttgaacacgtggttagggtctttggggtcctcataaccgggaggttgttcaacatacactagttcactaatcttaccatttagaaaggcactctttacatctatttggtaaagcttgatattatgagcacaagcataagcaagaagaatccggattgcttccaatcttgccacgggagcaaatgtctccccaaaatccaatccctctatttgagtatatcctcgtgcaactaatcttgccttgtttcttactactaccccatcttcatggtgcttgttgcgaaacacccattttgtaccaataacattttggttctttggtctctcaacaagctcccaaacttcattttgagtgaagttatttaattcttcatgcattgcattcacccaatcaacatcaagtagagcttcatctacacggttaggttccatacaagatacaaaagagaaatgttcacaaaatgaagctatgcga

SEQ ID NO: 61685 - DNA, 471 bp, Zea mays
tagaacatggaaaggacaactttgccctcactatgtatgacatttttaatgtatatgttctacggaatggttgcaaatgcgctaaagttgtacttcgctcctataaatagatgaacagtgccatggattgtttatggatttctttctctcgatcagagctagacacatctttcttcatacgaagctataccttcttcactccctctggtgtaatcttacgaagctcaatgtcctcgtataaatctttaagttaataaaagagagagagagcgctacataaaagcgttgtctatatttgaatcatgtaactttcattgaatcttcatcttacatcattactgttctaactataaatatttcatttgttcatatatacacttgtcttcacccctagcttctctctgagaatgaagagatgatacggtaaagatgatgcttgatctaactgtgttgctttgatatttaatacat

SEQ ID NO: 61686 - DNA, 472 bp, Zea mays
agcttcatgaagaggaaccttcggttattacatgttggctgcttcagccgaagctggttcttcctacaagaccttcggcgacgaagcatagtcccaacaatagcacactgatatattctgagcaagttccttctatatgtagatgacacttaagaaagtatggaatgccacttaagaaaatccatttatgaattaaaccaaactttctaggcagtggtacctcaagtttgatgaaaatataaagaaatatggttctgacgaaaatgaggataattgtatttatgcaaagttcaagaatggaaaatatattttccttattcagaatgtagattacataatattagctagggagtataagaacttattgaaaaaaacaaaagtttcttttctcaaatcttcatatgaacgacatgggagaagccccatatatgcttagaatagaaatccacagagatatagataggataatatt

SEQ ID NO: 61687 - DNA, 477 bp, Zea mays
tcggtatccttggttggccctactttgtgagcccttggcgtctattttacaatgaagactactatcgcctgtgattaaattgaagatctatgcacataatcaatggtgaaatcattgagctctgcaatccacttttcaaccctatcagtagcttctctgctcctcataatatccttcagaggctgtgaccaatgaacaattatatggtaagcctggaaataatgccgaagctttctggaagccattaacacagcatacaacactttctccaattctgtgtaatttttctttgacaagctcaacacttcgaagacagaatatactgggacttgctcttattttgtcttcaagcttctctgacaagtgccgactcactgaaagtgcgaagctgcacatacaatagcagatgacccctgcgtgggggagtagcgtcgtaggctattaagactgcttagctcttcgaagcttctgctgact

SEQ ID NO: 61688 - DNA, 350 bp, Zea mays
ctgtcaagctggttccactctgaaattcagatgttcagtgtaacagagtcaactttgggtgtgaattcaagcttgatttattaagaattgaaccatggttgttatgacaaacttgtagctagtttatagctctacaatattgctgcagaaagttaattgagttgccatttgaaattgggagtaaatcagcgctaaacctgctctgtcaggcgctctgatgaagtagtgccatggtacagtgtccgataaggatcagactgccagcgttggatcctcatcgccagtgacctccctacgcaaggattcgtgctgccgccgcccggattcgcgctagagactaacggataaca

SEQ ID NO: 61689 - DNA, 444 bp, Zea mays
  unsure (1)..(444): unsure at all n locations
tcttccttcttggatcattagcttggtttcttgctaagntgcaccaagtctgaaatcaactcanaattctggagcagaaagacgctaaaaatgccagattgcgtacgctntgtgaaacgtgagaacttgaccgccttcaatgtttgaacgcagagcatcttccgaaccagtaaaaaaaagcggtttcatctcatttgtggacgaagttacatganacatttcgattcacataaagtctacagtctagcgtgccaggacgtctcgaatttcttccaaaatattccaaaatgggctatcagcatccgaattccgaaggcacgatgaatttgcacttcatatttgggagctggaactacagtccctcaccctgttcattcattcagaaaagtgcggtggtttctcgtgaacgagcaacccagaaaaagtacacctgtcgcgtaagcg

SEQ ID NO: 61690 - DNA, 421 bp, Zea mays
  unsure (1)..(421): unsure at all n locations
agcttgttccaatggctgaagactcttgtatctttgttntgtaattatcnacaaaaaacttaggatctcttttgcattatntgacaaaagaatgtaattattagttgaacaaaacattgtacattctcgtccataccttggaatataattttacctcttttgtccatgtgtgaattgctttgctgtggacgaaacccacatttacaagtttttgagccgatggcgaaaaacaccttcccttcttttcgttcacatcaaagcatttttttcattaagaacgaagtgcctccacacaccatgaagtttttatctgatacgaagcatcctcgtattcaacgaagcattttgtcaccacagacaggcatcttnttcctttcctcgtaacacctgtgctttatgtcatgatgatgatgatgatgat

SEQ ID NO: 61691 - DNA, 470 bp, Zea mays
  unsure (1)..(470): unsure at all n locations
tctaaagggagaacacattctgggactaacaaatgttcatttttagaaagacacggtttgtagcgcatgtcaagcangaagcaagttggctcccatcatcttcacaagaacatcatgacgatcgacaggccgcttgagctactccacatggatctattcggcctgatcgcttacataagcatcggcgggagtaattattgtcttgtaattgtggatgattattctcgcttcacttgcgtattctttntgcagtanaaatctcaaacccaagagaccttaaagggattcttgagatgagctcaaaatgagttcggattaagaatcaagaagataagaagcgacaatgggacggagttcaagaactctcaaattggaggctttcttgaggatgagggcatcaagcatgagttctcttctccctacacacctcaacanaatggtgtagtggagaggaagaatagaactctact

SEQ ID NO: 61692 - DNA, 439 bp, Zea mays
  unsure (1)..(439): unsure at all n locations
agcctggncatattattgctaactgtcccgacattgatagttatcaggatcaagggaacacgagggagaagaagataaactattagaaggctaagggcgaggcgcatctaggcaaggagtgggactcggactgctcctcttctgactccgacaatgaaggactcgccgcccaccgccttcaacaagtcattcctcttccccaacgagcgtcacacatgccttatggcaagggagaagaaggtgagtactcgagactccacttatgcttcttctagtgataatgagtctagtgatgatgatgacatatactattcatgcttattcaaaggcttagattgatctaagatatataagattaatgagttgattgatgctttgaatgacaagaatagtatactatataaacacgaagatcttttatatgaggagcatgattaat

SEQ ID NO: 61693 - DNA, 482 bp, Zea mays
tctaaagggagaacatgtgatatgtctaaccaatgttcatttcttaatagatagaccttgagcagcttgtcaagctaggaaacaggtgggaggagcgcatcacagcacgaatgtgatgaccacttcaagacccctggagctgctgcatatggatctcttcggacccgtcgcctatctaagcatagggggaagtaagtatggtctagttattgttgatgacttttcccgcttcacttgggtgttctttttgcatgataagtctgaaacccaagggaccctcaagcgcttcctcaggagggctcaaaatgagtttgagctcacagtgaagaagataagaagcgacaacgggtccgagttcaagaaccttcacgtggaggagttctttgaagaggaagggatcaagcacgagttcttcgctccctacacaccacagcacaatggtgtggagagaggaagacaagacgctcattgcatggcgagga

SEQ ID NO: 61694 - DNA, 334 bp, Zea mays
  unsure (1)..(334): unsure at all n locations
gagaccggagcactcggaacatcacaccttccaaaatgttgtagactattatggtgacttccccttgactcgccaaaaacaatttgtccggcccgcactctttctcccggggggaggtttaacgagcggaccatgtatatatgggaaaacccccgcaaaacagcgcgaaaaagacggacacngcttcacattcacaattcagtcccggagctaacctaccacctccgtgcacaatcgtcagaagccctaaggggcagcgaaaaccaacaaggcgaaaacacaagcatccgaaacatccccaaatccctatgggcgtcgatacacacaggcaaaa

SEQ ID NO: 61695 - DNA, 373 bp, Zea mays
  unsure (1)..(373): unsure at all n locations
tgcacacatagctcatttaaatacctatgatcatatctcttttatatgctatgactaatgtgttttcaagtttatttcaaaccaagtcataggtatattgaaagggaattggagtcttcggcgaagacaaaggcttccactccgtaactcatgcttcgccatcactccgagcaactccctcttcttcaggggagaaatgagcatcaaggaaaaggacttcatccttggnggagagagtaaaagctcaaacgcaaaaggacttcgtctttggtataatcttaactcacttatttatgaccaaaggggaagattgcacacccagggctctaatgattcccgttttggcgattcatgccaaaaagggggagaaatg

SEQ ID NO: 61696 - DNA, 273 bp, Zea mays
ttaaaatatgactaacctttctgcatattacctctatggtttaccaaaaccactcattttattaagttcaacacctgaagatccaaaacaacaaaagaacccaggggtgtgttggttcaaaaaatgtaacgcaaatggtaatggtaatggtttctgctcgattactggccggtaacaaattgaataggctggtatcaaaatttagtgtgggtattgattacgggtggactaaaacaaacatgaattatacgtatcccgtacccattacgttac

SEQ ID NO: 61697 - DNA, 521 bp, Zea mays
  unsure (1)..(521): unsure at all n locations
ccttagagactcaagctatacgaatgcgtgaggtgtcataattagaggtgctcngactaccaccctaaaatgcgctaaagcccaagaccagcgacacacactcaccgaggtcgacagagtgtctaccatgactcgaccgcagctactctgagtggtcactcataactatggcttgcccgagcctgccctcggacctagcatgtactcatggaaatgcttgncccgcctaaggtaccactttcactgaaccgtcgttgcctgctagaccgagcaccgcttgacaacatagacaatctcgagccaagcatcactcatagggtgcaagagacatgagccttcaatgcgcgtacctaccccgagtgacattacacgacacacaggaccatgagccctttggctctacgcactacgatgacacacgctgatagataacgactatacgctccccacgatgcttcgcaactctggatggacacacatacgacaaagagtgtgctgggacacacatacctcaccctccg

SEQ ID NO: 61698 - DNA, 365 bp, Zea mays
agcttctaaaagaagagctcattttatgattaactaatgttcattctgagaaagacaggacttgtagcgcatgccaagcaggaaagcaagttggtgctcatcattcacacaagaacatcatgacgactgacagaccactggagctcctacacatggacctattcggcccgatagcttatataagcatcggcgggagtaagtactgtctagttattgtggatgattattctcggttcacttgggtgttctttttgcaggaaaaatctcatacccaagagaccttaaagggattcttgagacgggctcaaaacgagttcggcttaatgatcaagaaaattataagcgacaacgggacggagttaaga

SEQ ID NO: 61699 - DNA, 477 bp, Zea mays
  unsure (1)..(477): unsure at all n locations
actatanaatacttcagctntgagaactatgcccgtatacgatctggctgatctcttactattatagctngccagatgcccacgttcctgtcaaccacatccagcacccaacataaaactttcctagttatttagcccagaacagagccatgattagtttcatggttgcactggtttaccgggtggtcactccatggtccaaataatatgcaataatctcgattaaccgttgggttaacaacctataaagtatcttaccattggaacattgatatatatcacaggagtgactgttacaattaaagtgtagcagtagcaagctacttggtagatcaaatccatgctaaacaacgagttagggtggatagttatctaatacgtaacccgtaagtttgctattatatccaaagattaacgttataaatgattgtttgggtaaacacatcagaaaggagaagacactgccggcttatgaaa

SEQ ID NO: 61700 - DNA, 485 bp, Zea mays
  unsure (1)..(485): unsure at all n locations
gcaagctngcactcaacaggtgaagatgtacatgagaacacactttcttaagagtataattcagggtacttattatggtcatatctggtgtgaatatcttctacgatgcaaaaaattaagtgcatacataatacacctttgcttgcattcaaatgaaatctttctgtaatactttcttcttttgccagggaaaagacagcaatagaattgtctgtgcggaggagaatcgatattttaaaagaggtgttgcttcacacaacttacaagaataatagaatgaatagagaggtcaacattagtaccatgtgctataagaagaccaccaagtgctttccaccagtttgacgaataatctttaccacgcccatgcatttgtagtttatcataattggtggcaacaatcttcttggcctacaaaatgagaaatatttgaaattcgccatctacttagaaaagacaatntagtaaccaagactaaattctac

SEQ ID NO: 61701 - DNA, 330 bp, Zea mays
  unsure (1)..(330): unsure at all n locations
agcttatgaagattcttcatcccaacatgggctagtctgcggtgccagagccaacccatgttagtcttaacaattaagcatgtgtcgagttcagctatatcaaaatctactaagtatagctgaccctttaacatacccttaaatgctattgaatcatcacttcttctaaagacagtgacacctacatcagtaaagagacagttgtagcccattntgcataattgagatacagaaagcaaattgtaatctaaagaatctacaaaaaaaacattggaaatagaatggtcaggagatatatactatttaccaagacctttgaccaaaccttga

SEQ ID NO: 61702 - DNA, 409 bp, Zea mays
  unsure (1)..(409): unsure at all n locations
ctaacattcatgcatcttagatttatgatgaaggcccncactatctttagtagtggacagagtcccaattcaccagatgatantttttattattactttctccataccacagtaatctcttcctataacccaattcaccagatgatattntttattattacttcctccataccacagtaatctcttcctatagatatccatcttcttcagaacagaggagggagctataagtaaacatgaagcatataaggagaatactccctcagttttttagttgtcgctgcataattcaattntgcactattcagcgacaactaaaacgaaacgaatggagtattagacaagctactatntataaagcatcatcatcatgtagtgcagtactgtaccatctaaacaggctgactct

SEQ ID NO: 61703 - DNA, 426 bp, Zea mays
tgctgaaaagaggtttatttcagcattgtacaagcaatctgtcgtacctcctaactaatagagagggttctatttcagcatcatggtggcggctttatggaactaaaacaccagctctacagaagatggctaccaagatcttatctctaacatcaaattcttctggttgtgaaaaaaattggagtgggtttgatggggttagtacctatctgttatcaacattacagcagcattacaataaagatgcagaactaacagtgctcttatttttaacttataggtgcacactaagaagagaaataggctaggcttactacagaccgcctcaacaagttggtctacattcaattcaacaacatgctgattaataagagaacacagatcaagtccaagagaattaccgatgttctattgtctattgataca

SEQ ID NO: 61704 - DNA, 486 bp, Zea mays
  unsure (1)..(486): unsure at all n locations
tgtgaagaatcttcatcccaacatgggctagccggcgatgccatatccaacccatattagtcttagcaattaagcaagtatcgagttcagctctattgaaatcaactaagtatatctgaccctctaatactcccttaaatgctactgaatcatcacttcttgtaaagacagtgtcggtaccctgaatcagaggtaccccttactacattatgaagacacggtgctcgcgcggctatctctagtcgcacggtgaacatcacctgacccctccatgtgggcggctccggagccgccatgtggccagaggagacgatatactccaaggtggcgacagtggctcctgaccccactagaaagtgctggacccctgtatgcacagtccggacctcctgcgaggttcaagactccaacttacataccatacccctggactggatgtggccaggctctcacagtgggtccnggattcaacgcaataataccatg

SEQ ID NO: 61705 - DNA, 482 bp, Zea mays
  unsure (1)..(482): unsure at all n locations
agcttgcaatgaggaaatggcgctcgtcatcaatagctttcttcaaatcctcaaacataggagagggaaagactacaagtcccgctccaagaaggtttgctacaaatgtggtaagcccggtcactttattgctaaatgtcctatatcaagagacagtgatcgaggcgacgacaagaaggggagaagaaaggagaagaagaggtactacaagaagaagggcggcgatgcccatgtttgtcgggagtgggattccgacgaaagctcaagcgactcctccgacgacgaggacgccgccaacatcgccgtcaccaagggtcttctcttcccaaacgtcggccacaagtgcctcatggcaaaggacggcaaaaggaagaaaggtaaatcaagatcctccactaaatatgaaacctctagttgatgaaatgctagtgatgaggaggataacttgcgtactctttntgccaatcttaacatggaacaaa

SEQ ID NO: 61706 - DNA, 500 bp, Zea mays
  unsure (1)..(500): unsure at all n locations
ngaagccatggtaagtagcataggccaataatatgcgaattgactcttgcctagctacgggtgcataggtttcaccgaaatccaaaccttcgacttgggagtatcccttggccacaagtcgagctttgttccttgtcaccacaccatgctcatcttgtttggtgcggaagacccatttggttcctacaacattttgattaggacgtggaactaaatgtcatacctcattcctagtgaagttgttgagctcctcttgcatagccaccacccaatccgaatcttttagtgcttcctctaccctgtgtggctcaatagaggaaacaaaagagtaatgctcacaaaaatgtgcaactcgagatctagtggttacccccttatgaatgtcgtcgagaatggtgtcgacggggtgatcttagtgaattgcttggtggactcttgggtgtggcggccatggntcttcatcctccttgtcttgatcacttgtttctaccccttgatca

SEQ ID NO: 61707 - DNA, 363 bp, Zea mays
  unsure (1)..(363): unsure at all n locations
agcttaccgcatntgaagcatgagcgccttcccttgttcttggtcctgcttggctgtccctcgcgaacctttancgccgtcttgaatcttttgatgatgagggccatctcttcatcattaagtccggctgcctcaatttgcgccaccttgctatgtagcgcctccttgctccttggtggcttgagagcaatggggtgaggctcatggattggaccattcaacggcgcggtcacgtacctcgcctccttaatcatcattcgcccgcttacaaattttccaaggacttcttcgggcgaacatttggtgtacctgggattctacgaatattattcaccaaatgaggatcaagaacggtaaaggacc

SEQ ID NO: 61708 - DNA, 457 bp, Zea mays
  unsure (1)..(457): unsure at all n locations
actcatgctnggtcatttattgctaactgtcctgactatgataatgatcaggatcaagggaacaatggggagaagaagaagaactataagaaggcatatgacgaggcacatcttggccaagagtgggattcggactgctcctcgtccgactccgacaatgaaggactcgccgccaccgcctacaacaagtcatccctcttccccacgatcgtatacatgcatcttgggaaggcacaacaaagaatgtactcgagactctacttatgcttcttcaagtgaggatgaatctagtgatgacgatgaaatagattattcatgtttatttaatggcctacatagaaccaacgtagataaaattaatgaattaatagatgccttgaatgataagaataggtttctataaaaacaagaagaattgttgtatgaagaacatgactaatttgtcaagcacaaaatc

SEQ ID NO: 61709 - DNA, 385 bp, Zea mays
  unsure (1)..(385): unsure at all n locations
agctngaagccatggtaagtagcatatgccatttttatacgaattgactcaagcctagctacgggtgcatagggttcaccgaaatccaaaccttcgacttgagagtatcctttggccacaagtcgagctttgttccttgtcaccacaccatgctcatcttgcttgttgtggaacacccatttggttcctacaacattttggttaggacgtggaaccaaatgtcataccttattcctagtgaagttgttgagctcctcttgcatcgccaccacccaattcgaatcttgtagtgcttcctctatcctgtgtggctcaatagaggaaacacaagaataatgttcacagaaatgagcaacacgagatctatagttaccctctatgaatg

SEQ ID NO: 61710 - DNA, 492 bp, Zea mays
tctcgctaaatgggccttctctatcttgaaacttctggagttctatgttggctgcttgttcttgcatttcgtcgtcatgataataaatagtctccacacaactgataaaaccttctgttattttgggaacatcaaagattgatgggtcagcataactgtagagtggattcaacaattaagctgtctaatgcaatggagaatcaagtccttcagccatcttcttctcaataacaacaacaccctccttgaaacggcctcaacattgccaagggcctctttgacctgtctctatgccttcaatagttctccatatacaaagcccatggatggcttcacatctccaaccaaacggagaactttgaacaatggcgcataacagccaatgtcaacttcacatccttccaaaagcttggattcaagtatagtgctgtggcattttgccttctttgattcacatccttcagtgagtcccacctactatgaaccaccatc

SEQ ID NO: 61711 - DNA, 310 bp, Zea mays
agcttggtctggtgaacaaatccttcacagcgatcttgccctaattcgcgaagaattgctcccaatcaacgcttgaacaggggcagaggcaacgggaacacgtgttcgaccgtggctgacacccccggttcacgcccgttcgcgcaccgcgccttccagtgcacgcccgcgcgcactcgccggtccacgaccgcccgtgcaccgcgccgtgcctataaagctcttccaggcgcgccccactttgtcccgcacttaccctcaccggccgaccactttttcttagcttcggcgagcttatttccgcccgtca

SEQ ID NO: 61712 - DNA, 413 bp, Zea mays
gcttaatcctgagaagtgtgtcttctgagtgccccgaggcatgctcttatggttcatcgactccgatcgaagcatagaggcctaccaccatatgatcgaggtcatcaccagcatgggacccatcacggacttaatatgggtacagaaggtcatgggatgcctcgcggtcctgagccgctatatctcacgccttggcgaaagaggtctgcctctgtaccgccttttaagaaggccgaatgtttcgcttgtacccctgatggcgatgaagccctcagcaacctgaaggcgcttcttacaaaggcgccggtcttggtgccgccggcggacggagaagccctattggtctacgtcgtcgcgaccactcaggtggttagcgccgcgattgtggtcgaaaggcatgaggaacggcatac

SEQ ID NO: 61713 - DNA, 411 bp, Zea mays
  unsure (1)..(411): unsure at all n locations
gtgcaagcttgttccagtgcacgcaagactatctttattatccccaggcgtatgtccgaaggttcttgcgtctgagagcataagcgcccacagtgcccaatgaaattgtcattgaggccatgatcaaagggcttctaccaaggcctatggctcaatactttgccaggaaaccccctcagaccctatagaagcttcttcagaagatggatgagtacatccgggctgataatgatttccgccagagaagggaagaagcttatatgttttctgagatgactaggggctttggaggaagaatccatcctatgcatgtcagatcaattgacaactccagccagagtgatgacagaggaagccagcttcaagggccacaacatagctcataatcctcanggcaacaataaacctctt

SEQ ID NO: 61714 - DNA, 466 bp, Zea mays
  unsure (1)..(466): unsure at all n locations
agctttaccaaatggacgtgaaaagtgccttccttatctgatctatcaaggaggaggtctatgttgagcaacctcccagctttgaagatagtgagtatcctaatcacgtttataaactctctaaggcgctctatgggctcaagcaagccccaagagcatggtatgaatgcctaagagattttcttatcactaatggcttcaaagtcggaaaggcggatcctactttatttactaaaactcttgagaatgatttgtttgtatgccaaatttatgttgatgatattatatttaggtctactaatgaatctacatgtgaggaatttagtaggatcatgacacanaaattcgagatgtctatgatggcggagttgaagtacttcttgggatttcaagtgaaacaactccaagagggcaccttcattagccaaacgaagtatattcaagacattctagacaagtttgaatg

SEQ ID NO: 61715 - DNA, 317 bp, Zea mays
ccttccacttgtgaatatcctgtggcaacaagaacggctatgtaccttgacaccacaccatgctcatcttgcttgctgcagaacacccacttgcgtactacatcattatgtgtacgatgtgcaactaagtgccctacctcactccttgagaagtagaggagtctctcttgcataaccaacacccaatccgaatctcttactgcactctctaccatgtatggctcaaaagaagagacataagagtgctgttcacaaaaatgagcgactcaagatcgagtagccacccccttatgaatatcgccgaagatggagattac

SEQ ID NO: 61716 - DNA, 468 bp, Zea mays
  unsure (1)..(468): unsure at all n locations
agcttatgaagattcttcgttccaacatgcacttgtcggcgatgccagagccagcccatgttagtcttagcaattaagcaagtgtcgagttcagctctatcaaaatctactaagtatagctgaccctctaacactccattaaatgctattgaatcatcacttcttctaaagacagtaacacctatatctgtgaaaagacagttgtagcccattttgcataattgagaaacggaaagcaaatggtaatctaaagaatctacaagaaaaacattggaaatggaatggtcaggtgaatatagcaatttacccagtcctttgaccaaacctcgatttccattcccgaatgtgatagctctttggggatcttggtttttctcataggaggagaacatcttcttctccccggtcatgtggttggtgcacccgctatcgataatccaacttgagcccncggatgcataaacctac

SEQ ID NO: 61717 - DNA, 149 bp, Zea mays
gacgaccatctcgttcacaataacggcttaccccatgttgcacaactgactaacagataggcgatccgtgccgacagactctactagcacacattgcaaatacaatgctcattgtacattgcaataccacctaacccttctaccttgtc

SEQ ID NO: 61718 - DNA, 357 bp, Zea mays
agctttagtgttaagtgagagagatatgttgtgttcttttgagctcttgcgcttggattgcttctttctttcattctttcttgagatcatctcatttgtaagcaaggcaagagacaccaattgtgtggtggtccttgcgagaaatttgattcccaattgatttgagaagagaagctcactcggtccgagggaccgtttgagagagggaaagggttgaaagagacccggtctttgtgaccacctcaacggggagtaggtttgcaagaaccgaacctcggtaaaacaaatccgcgtgtcacactctttattcgcttgcgatttgttttgcaccctctctctcggactcgattatatttc

SEQ ID NO: 61719 - DNA, 469 bp, Zea mays
  unsure (1)..(469): unsure at all n locations
cacacacacatcacctagctgcctacctttgtagtgcatgtcatccaatgacacaaggcaatgcagatgctacgaagtgaggcagtgaagtgtatgaaagttcaaacttcnattcacaagcatgcacgcttgggaaaagaagagtatttggtatgatcaaaaaacgtatggaaccgtttgaggttggtcgtcaaacctgaagctggagacgaagacgaggaagcgcagtgggtgctaaaagtgcagccgtgtaggtgacatgattattagggttgcacttgcctgattatgtgtgtntacagacgaataattgcttaacccatgagcactggagttaaacggctaaacgaggcttcacatccaccaagtagttttcgacaccattgactctgtattcgcgagagcttcgctgaggagtgcggtgagtacacaagtctttgggagaaatggattacacaacctatttcat

SEQ ID NO: 61720 - DNA, 361 bp, Zea mays
agcttataaagccgacaatgaagaccttctggatattacttgtctaatctaatgaaaatattgaacttgcaaaacctaagcaagaaataagtgaatggtccaacactatgctggagaataatgttgaggagattcacaaatccaatgagaggtgcttcgagaaatccttggattgcgtaagaaaattgagaaccagctttgctagggtgggtgcttaatctctcgaagagaatttcattcgaggtgaccccgatggtgttattgattggataagcggggaagctgaaacttttgaagagatcctcagtgatcgcggggacatttgtgctctcaccggcgctcgagggattgcggcaattct

SEQ ID NO: 61721 - DNA, 432 bp, Zea mays
  unsure (1)..(432): unsure at all n locations
ttgtcatcttaagttaagttctatccctctaatccctatttatggttaagcttcctatccagggtcctatttgcaaaacattaaaacaatacaacttgtttgaaattcttgcctagtgaatgcactctangtgtatcaaacatatgcaatgccaatgctatgatgtcatgctcaangtttagatatagtaacaccacgggtgttacatccttctccccataaaagaatctcgtcccgagattaaaaatcctagggtaggtaatggtaaaggaaacacatcacatntttatttccttatttctagtacaagataggggtgatgtgggggtcacttctttattacacagctatacagactctacaatttatatgaagctaggaagcctgggaaattcttattcaagaagtctttgagtttccatgtagcctcat

SEQ ID NO: 61722 - DNA, 413 bp, Zea mays
  unsure (1)..(413): unsure at all n locations
gcatgcagctcgcacttattgctactctaccgattccttgtttcaatccgcaaggaagctcgcaacgcctgggactgaattgaagatctatgcacatattcaatacttgaattcgtaagctccacaggccacttttcaatcctttcaggagcttctcagtttctcataatatccttcagaggctgtgatgaaggaacaattatgtggtatgcttgaaaataatgccggaactttctagaggccattaacacagcatacaccaccttctctaattctgtataggttttctttgataaactcagaacttcggaaacaaagtatactggngcttgcttttaatttgcccttaagcttctcctgacatgcgccgcactcactgcagagtgcanagctgacacttacaatatgaatgg

SEQ ID NO: 61723 - DNA, 427 bp, Zea mays
  unsure (1)..(427): unsure at all n locations
actatacacaactcaagcttagaaagtctaagaaaccaagcaagcgttcgtaggcaagagcttataaattgattcttcaaagcacgcggcagaatagcgtatcanatgtgctcggagtgggttcttatttatacgcccagtgcgctccaagttggagggccccgtctgtcattaactattgctattctagcaaagggaaagtgtttttttggaccttcagcttatggcctttcgccatatcacattctaaattctttattctaacatattaaccttgcgaggggctactgttgggggccttcatcttcagaaggtcctcaaaaacatgatttaataatggtttcggagattaatacatgaacaggtaccttcagatttcaattagaaccataacaagagaagcacaatggatacgaatgttgatgta

SEQ ID NO: 61724 - DNA, 313 bp, Zea mays
  unsure (1)..(313): unsure at all n locations
accctaagaataaactttaatcactcttggaccccngggataccagaaaccctaattggaaccctggaaaccctaaaccaaccctaggacttatgtgcaaaatatgaacctttggataaagtgtaaaatactatgtttgaatataaagcatttggtcacaaatatgtaatttacagccaaccctagtttggattaaatgcanaatggacctatttgagtctatccaagtctgaaattaatgtaaaggctcacttggggctttgattttcaagcatagggtttgcctagtcaccacatcaagtgaagactacat

SEQ ID NO: 61725 - DNA, 444 bp, Zea mays
  unsure (1)..(444): unsure at all n locations
ntatcanatggacgtganaagtgccttcctcaatggaccaatctttgtagaggtctatgttgagcaacctcccggctttgaagacagtgagtaccctaaccatgtctataaactctctaaggcgctntatgggctcaagcaagccccaagagcatggtatgaatgccttagagatttccttattgctaatggcttcaaagtcggaaaggccgatcctacgctcttcactaaaactcttgaaaatgacttgtttgtatgccaaatatatgttgatgatatcatattttggtctactaacgagtctacatgtgaagaatttagtaggatcatgacacaaaagttcgagatgtctatgatgggggagttgaagtatttcttaggatttcaagtgaagcaactccaagaaggcacctttcttagccaaacaaagtacactcaagatat

SEQ ID NO: 61726 - DNA, 476 bp, Zea mays
tgagttatgctattacagaccacactataagtgagtgcagagttattttattatacaaaccaagggaggcacagactcctcccgataagtataaaacaaaagatcctacgtggaggaccgagtcctcccgcactttagtcttctttttcttcgtttggtaccaccttggagcagaagcaacataagtttgtcgcttcctcacctaaaaacaacaaagcgataaaccctgagtatggaatactcagcaagtcttacccgactaaggaaaagactctcaagggtatgctggataaataggagtcaacgagaggctttatcacaaatcaacttatacttttgcataagtagcttactaaagtgagtccttactttcaatcctttaacgccatgttaagtattaatagactccatttcatctattctaattcacatcacataagacaacatcattttatcatcgtgtcacatcctgctct

SEQ ID NO: 61727 - DNA, 449 bp, Zea mays
  unsure (1)..(449): unsure at all n locations
atcctctgagtcacctgcngcatcaagcttggcgtattcaagccctattgtggttttaaaaatatgaatgaaatgaatgaatagtttctaagtgtgtgttcctctaaggagtcctacgtagcatgggtttaccccttcttgtaagacctctctctcatatatatatatactatatgtatttagagccctgtgctctatttagctagaggaagccccagccaaatatgaacgcacatgcattcacagccgaccgactttcagtttccatataaatactgactgctccgcgattagctccttgctcccgctcanttccataccgcaaaccccaccccgcatgactcgggaattttgtgactcttcatccacgcgactccgctcccttttcgagactcttncacccctcgccgtcgctgtcatccatcacaacgacattgagcgtgcgtctc

SEQ ID NO: 61728 - DNA, 449 bp, Zea mays
  unsure (1)..(449): unsure at all n locations
agctntagtgataagtgagagagatatgttgtgttctttngagctcttgcgctcggattgctttctttctcattctttcttgagatcaatactcacttgtaaccgaggcaagagacaccaattatgtggtggtccttgtggggaagttttgttcccggttgatttgagaagagaaagctcactctgcccgagggatcgtttgagagagggaaggggttgaaaaagacctgtcctttgtggcctcctcaacggngagtatggttgcaagaaccgaacctcggtaaaacaaatccgcgtgtcacactctttattcgcttgcgaattgttttgcaccctctctctcggactcgattatatttctaacactaacccggcttgtagttgtgattaactttgtaaatttcaggttcgccctattcacctcccctctatgcgactttcaccaatca

SEQ ID NO: 61729 - DNA, 467 bp, Zea mays
gagacgcataggactggtccatgttatatgagagcaatcatcaagaataataaggtagtatttaaaaccagaaacactgagaataggagatgtccacaaatcacaatgtatcaaatcgaagtttttgacagctctagagtgtgaaggaacaaaaggaagccgagtatgacgacctagcttacatgcatgacggagactctcaagctcatttttattacatgcacggatcaacttggataaagcctcaaatcctagatgaccaagacgttgatgccaaagcgtggttggtgtagcgccagctagcaatgcatggtgcgggtgatgcgttgggagatgaagaggatacaatcgcccggtactattgcacctgacgatcaggttcctggtgtccagatcctttacagatagaccagaaggatcgaattctacggatacattattatcagtagtaaattaccgaacagaaa

SEQ ID NO: 61730 - DNA, 457 bp, Zea mays
  unsure (1)..(457): unsure at all n locations
agctntatctgatggacgtgaagagtgtttcttttatggaccaatcaaggaagaggtctatgttgagcaatcttccggctttgaagatagtgagtaccctaaccatgtttataaactctcaaaggctctttatgggctcaagcaagccttaagagcatggtatgaatgcctacgagattttcttataactaatggcttcaaagtcgacaaagccgatcctactctctttactataacaattgcaaaggatttgtttgtatgccaaatttatgttgatgatatcatatttgggtctactgacaaatctacttgtgaagagtctagtaggatcatgatttagaaattctagatgtctatgatggcggagttgaagtattttctaggatttcaagtcaaacaacttcaagatggcaccttcatcagccataccaagtacattgaagacatacttaacaag

SEQ ID NO: 61731 - DNA, 387 bp, Zea mays
tgcttcagcgtccttgttacttcttcttcgtgagcccctggctgtttattatgtatgaagtctgctaacgcttgggactggaatgaggatctatgcacatcatcaatggtgaattcattaagtgctgctgctcattatccaacacttccaacagcgttctctgttgctcataatatccttcagaggctgtgacaaaggaacaattatgtgatattgcttgaaaataatgctcgaactctctggaagccattaacacagcatatagcaccttttctaattctgtgtaatttttctttgacggactcaaaacttcggagacgaagtacactggagcttgctctttgacttggctgctaacctctcctggaccaatgctgcactcactgc

SEQ ID NO: 61732 - DNA, 432 bp, Zea mays
  unsure (1)..(432): unsure at all n locations
agcttgaaactgtctccctgtgggaagccaatgttcttcttattaccagggcgnctcccactataaagcatgctacgagcaaatttaaatttctcattttctagttcatgctcgacaattttaccatctaattntgctatatgatccatttgttggttaatcatagtaatgtgatcatgaatagcatcaatgttaatatctctacatctagtgcaaatagtgacatgctcaacgctagatgtagagggtttgcaagaatttagttcaacaatcttagcatgcaaaatgtcattcccatctctaagattggaaatagaaatattgcaaacatctaattccttagccctagcaattaatttatcattctcatttctaaggctagcaagagaggcatttcaatttntaatcttaacaattgaactagcattatca

SEQ ID NO: 61733 - DNA, 460 bp, Zea mays
acacaagaaactcagctttaagggaaacacgtgaatgtttactaacgcgcattttataggatagaccttgcgcagcttgtcaagcatgtaaacaagtgggaggagctcatcacagcatgaatgtgatgaccacctcaagacctctggagctgctgcatatggacctcttcagacctgtcggtgaccataattaggggtaccctcaagactcataattctcagctggtaacccccatcagcataaagctgcaaaggcctcatgggtgcgattaagtcagggatcagtccattcgagcgactcgatcacgcctcgcccgagcctagcctcggacaagggcagtcgaccccagagggttttcgtctcgcccgaagcccccctccaacgtgagacacatcttcggctcgcccgaggcactgccttcgctaagaagcaaccctgactatatcgccgcaccgaccg

SEQ ID NO: 61734 - DNA, 421 bp, Zea mays
  unsure (1)..(421): unsure at all n locations
nntgcagctgtggaggttcttcatccacacatgtgctaatcggcgatgccacagccagcccatgcaggtcttagccattaagcatgcatctagaccggtctttttttttgcaaaatcaactaaatacaggttgccgtctaatacacccttaagagctagtgaaccatcacttcttctaaagacagacacatctacatttggaaacagacagttatatcccatatggcacaattgactaacagatagtaaattatatcctagtgactctactaaaaacacattagagatagagtgctcattagaaattgcaattttacctaacccttttaccttgccttgattcccatcaccgaatatgattgaatcgtgggaatccttattcttgacgtaagaggagaacatcttcttctccccgtcatat

SEQ ID NO: 61735 - DNA, 396 bp, Zea mays
tggttgaccaacatatggacttaccatcatgtgcgactcatggtattaacctacccatatgtcagtgattaatttcatgttattttgcaatggtgttatgttcttccataagtcaagggatgcaactagtaaatcataggatgcgaactaccaatacaaggtaatttcattactcgctttatggtttgaaaggtcccttgtgggttttgatggtttggatgacaacacaattaaaggtttgaccaaggtgttaagtgttgaataggtgctaagtgataagcctaaatagttcaacacatggagacaaatgtgaaggctcattatactgagttgactatggttgtgaacatcacaaagtctaaggacggacattgattaagtggtattaatgacatg

SEQ ID NO: 61736 - DNA, 250 bp, Zea mays
agcttaagctgatatgaggaggtggtctattctcttatattatattccaataatccctcacatcgagcctcttttgggtcttagacgtgaaatagaagcgagcaacaattatattatttaattgcgctagccaagattcgactcatgatctctgtatttgataccatattaagttgcatgtaccaaccatatcaatctaaaagcttaagctgatagaaggaggtagtcaattcacctatattatgggggt

SEQ ID NO: 61737 - DNA, 249 bp, Zea mays
ctgggtgaaatgactgcaggcggttgatgttgtatcaatgagcaccaagcactttctagacgctgctacatctctgccaaccgctgaccgatcgctcactgccacggactgtacaacatgtgcacataaacgactggaaactcattgatcattacaaagcgggataaaagactgtactaccatttaatgcgcttatcatgataacaatggaatctctgactgcctaccgtcgcactagacggccgagag

SEQ ID NO: 61738 - DNA, 403 bp, Zea mays
  unsure (1)..(403): unsure at all n locations
agcttcgcaaagatgaacgaanatatatatttgttgaatggaattagggttcaaatgagtcaggttgatgtgataaaaatcaaggatgccacggaaaaaaggagatatgggaaggccgaggccgcgaagaaggaaaggagtgtaaactactgactcgtgggtatcttcggttggaacagtagtcccgtggcaagcccgccaagaacagagttcccgcggaggaagaaccccgatggagacaaggcggagaagctcagcttcagaaattacagacatgtggttacctgcgaagggtaactggctgttggggtcgattgcggngatcactgcagcagacgagttcgcagtttttctcttgggcgccatcttgcttctcactggcgaaacagagtangaagcgggt

SEQ ID NO: 61739 - DNA, 363 bp, Zea mays
ggaggccttccttgtcttgactacgatgtcatcgacgtatgccttcactgtgcgaccgatgtgttcgccgaacacatggttcatgcaccgctggtacgtcgcgcccgcattcctcaaaccgaacggcatggtgacatagcagtacatgccgaacggcgtgatgaaagaagtcgcgagctggtcggactctttcatccggatctggtgataccctgagtaggcatcgaggaaggacagggtttcgcacccagcggtggaatccacgaattggtccatgcgatgcaaaggtagggaccttcgacatgctcgttgaaacaggtattctaccacatcggcatttccccttttttcctccagccaggg

SEQ ID NO: 61740 - DNA, 464 bp, Zea mays
  unsure (1)..(464): unsure at all n locations
agcttattaaaaccaccatgagtttcaatacattctatccaattatactcatgtgaagcttctatcccatttaatgccgcaatattcctgaaattactaatgtgcttcataacttttttaccaccgtttttgtgttttatttgggggattgccacctgagaaggatcggaaataaaagcacccttcttaaactttgaccttcggtacttctggacatgttcactgagcatcgcacgggagtgatcctccatcattntgttactataggcatctgcatgatcatcatcgccggcaccatcagggtgcttttttcgcttccgatgcaagccatgggaagcatcatgtacaccattgtactgatccaacaaggatccttgaccctaaaaggagaagctgaatacatgancaatggtacagagtgctcaactgcagatgatttaaaacagctctattcaaaatacttt

SEQ ID NO: 61741 - DNA, 481 bp, Zea mays
  unsure (1)..(481): unsure at all n locations
tcaaactaagcttttaccatactctggatatttgggaggtgagcaatgtttttctccttagttgctttgcgttcgtgttcctaagcaactttctttctgatcctacaacttatttctcaatcaaagattgactttcttttgagcaacatgggttagcacatggtgatatattgtctaaaagcacacatgtgcaagaatgaggttcacataaagttaaactcgcaattacaacctcatgagcaacatcaagcatgatatgactatccataagattatcatgagaataacacaacatatcatattttttactaagagcaacgttctcaagatttatcaattctacttgactcttaagcatggcatttntcaatgttaagttgagcaacataagataaagcatcatcaatatttcttttctaattaaaatcaaatcatatcgttggaccaagtcatcatgagagcacctaagctcctcatgttc

SEQ ID NO: 61742 - DNA, 464 bp, Zea mays
tgtggaggaccagatcatcatagcatataagcttctggatgacatgtggtcactccagttccggtgatgaagcaccatatgaccaatcaaggaaggaatccatgtgggagttcgcgagagataggtcgcatgttggcatcgttgcttcttcaataagctagctgccaagcgaaagctacaagcctgaagatgatctttgattatccagaatcagtgtttgcaatatgcaaccggatgctccgcaagggccagattttgttgaagttccatctcctcgaagagtccgcacagtgaagatatgttgctgaagtaaatctatacacataacccttctaagccgaatctcgaggacgagattccttctaagtggggtagaattgtagcatcccatatattcaaaatctgaaatattctcaaactcgctctcaaatcaaaatgaatttcatatttttttcataatgttt

SEQ ID NO: 61743 - DNA, 431 bp, Zea mays
  unsure (1)..(431): unsure at all n locations
agcttgacatgcttcccttgtgagaaccaatgtctttcttattgccagngcatcccccactatagagcatgcttccagcatatttaaatttttcattctctatctcatgctcaataattttagccgttacgttaactattggaacatttttgttgctaaataaagcaaggggatcatggatagcatcaactattacatctctacatctagtacaaatagagacatgactaacagtagatgtagagggtttgcaacatttaattcatcaaccttagcatgtaaaatagcattctcatttctaagattggagataacatcatcgacaacatttacatctttagccttacaaattaatcttgcattctcagtataaggctagacattgatccattcaattatcaatcttgcaatatactagcttttcattttta

SEQ ID NO: 61744 - DNA, 458 bp, Zea mays
actaagcttccaaggagacatctttaaactggtctgataactatctatatatttttacttagcataacgggaacttttatcccaacttcctccatgctgaagggcacaagctctcaacatatcttccaatacttgattagtcctttaagtcttgccatcagtctgggggtgataagtcgtactaaaattcaactttgtactcatattctcatgaaagcttctccaatattttgaggtaaattgtgaacctcgatcagacacgatcttctttggtactccatgtaaacacacaatccgagccatatataactctgtcaattgagaacctttataagtagtcttgacaggaatgaaatgtgccactatagtcaatctatccatgatcacccatataacatcatatcctctcttggtgcaacgcagtccagtaatgaaattcataccaatctcttcccact

SEQ ID NO: 61745 - DNA, 384 bp, Zea mays
  unsure (1)..(384): unsure at all n locations
aacttgtgttacaagaaggagagagggagcgctcttgttttcttatcttgcacgnggaagacacactaatgattgtgaatgacatccccatgctggaaattttattgcttcactgaaaaagagactttctatgaaggactcacgggaagcaccatatatttcgggcataatgatccatagaaaaagggccgaagaggcctactagattcagccaaatacctacattgacaacgttcgaaacgggcaacatggaacagcccagaagggttactcctacgcaatggaaacccctaaccaatcaatgtctgcgcgggaaagaccagagcccatgagagggccatcgcctatccatggaacaacaagtgccctgataaaccccccaaa

SEQ ID NO: 61746 - DNA, 132 bp, Zea mays
  unsure (1)..(132): unsure at all n locations
catgatntacatctcaccacttctaacaatattgttgacaccctcaatgacccataaccctgagctatggcagaatgcataatacgctcggattatggtaaatggaagttagcaaccaatgttgacatgacc

SEQ ID NO: 61747 - DNA, 357 bp, Zea mays
  unsure (1)..(357): unsure at all n locations
agcnngngaaagagcaacaaccacacatgtgcttattctgccatgccacagccagcccacgctagtcttagctataaagcatgcaactagaccggcctcctctattgcaaaatcaactaagaaaaggggagcgcgctaacacacccttaaaagctagagaaccatcactttttctaaagacagacacatccacatttgtaaatagacagacataccccatgtggcataattgactaacagatagcagattataaccaagagactcaactagaaacacattagagatagagtgctcattagaaactgcaattttacctaaccctgttaccgtgccttgatacccatcaccgaatataa

SEQ ID NO: 61748 - DNA, 429 bp, Zea mays
  unsure (1)..(429): unsure at all n locations
agcttgacattgtctcnctggtagaagacaatgtctttcttaatcccagggcgtctcccattatagagcatgcttctagcaaatntaattttttcattttctaagtcatgctgattaattttggcactaagttgagctatgtgatcattttgttgtttaattaaagctaggtgatcatgaatagcatcaacattaatgtctctacatctagtacaaatagtaacatgctcaacggtagatgtagagggtttgcaaacatttaattcatcaatcttagcatgtaacatgacattttcatttctaagaatggaaacaatatcattgcaaacatttaaatttttagccttagtaatcagtttatcattntctatcttaaggctaccaatggattcattcaacttgtcaatcttagcaatcaaattagcatta

SEQ ID NO: 61749 - DNA, 413 bp, Zea mays
  unsure (1)..(413): unsure at all n locations
tgaagccatggtaagtagcataggccaataatatacgaattgtctcattctttgctacgggtgcataggtgtcgccaaaatccagaccttcgacttgggagtatcctttggccacaagtcgggctttgtttcatgtcaccacaccatgctcatcttgcttggtgcggaaatcccacttggttcctacaacattttgattacgacgtggaaccaaatgccatacctcgctcctagtgaagttgttgagctcctcttgcatcgccatcacccaatccaaatcttgaagtgcttgctctaccctgtgtggctcaatagaggaaacanaagagtaatgctcacaaaaatgtgcaacacgatatctagtggttacccacttatggatgtcgccgacgatggtatcgacngggtgatct

SEQ ID NO: 61750 - DNA, 458 bp, Zea mays
  unsure (1)..(458): unsure at all n locations
agcttttcttaacatggaattaatatatggtatttatattatggcaatataaacatttaggtcattagatgatttatctctgattattattagtgatactttcttttagaaagaaaatataaaactaaaagaatatcactagtcgtaacaaaaattggtttttactacccaaaataaatgtggccataagtggagcatttaacttcttaggattaggaaaatactggtttatgtcaaaataaccatgtttatgttataaaaagtccaactagcgatttatattgattcttaaaatattaatgttagtagagtcatgaatgaaccattnttagctatacgcataaattctacttagatataaaaaggaactatcgttagtaataaagaagatacttagcctttattttcatagagaatggtaatacatattaatacctaaataaactagggatgaaaac

SEQ ID NO: 61751 - DNA, 444 bp, Zea mays
  unsure (1)..(444): unsure at all n locations
cgggggcatatgaaanacaataaaatatctctgatttcagtaatttaatcttgtgaagcattcacgacatagcgatatgtagtgtgaaaataatgcgattacacaatgtaacatttcaagatgagcacaccttgctaacatacaaactacacacttttgtagaaaatagtcaactcctaaggctatctctggcaagagcgcgcatgtngacgagcaaaacatagtttacattgtatatgcactgtgtacatagcgaagttttaaataatgagtgagataaagagtgagaaattaatgatgctgaatatagcctaagacatggagttattccaacatctaaaataactattttttctattcttaaatcgatcaagcctaattaaagtctattacaatatatatcgaatacaagacatatcagctagttaagcactaataatttaa

SEQ ID NO: 61752 - DNA, 428 bp, Zea mays
  unsure (1)..(428): unsure at all n locations
agcttgtgaaggttcttcatccncacatgtgctaatcggcgatgccacagctagcccatgctagtcttagcaattaagcatgcatctagaccggcctcctcttttgcaaaatcaactaaataaaggttgtcgtctaatacacccttaaaagctaatgaaccattacttcttctaaagacagacacatctacatttgtgaatagacaattatatcccatattgcataattgactaacagataacatattatatccaagagatccaactaaaaacacattagatatagagtgctcggatgaaatagcaattttacctaacccttttaccttgccttgattcccattaccgaatattattgaatcttgggaatccttggttttgacgtaggaggtgaacatcttcttctcccccgtcatatggtttgtgca

SEQ ID NO: 61753 - DNA, 413 bp, Zea mays
  unsure (1)..(413): unsure at all n locations
tgtgaaggttcttcatccccacatgtgctaagcggcgatgccttattctgtccatgctagtcttagcaattaagcatgcatctagaccgacctcttcttttgcaaaatcaaccaaataaagtttgtcgtctagtacacccttaaaagctagtgaaccatcacatcttctaaagacagacacatttacatttgtaaatagacaattatatcccattttgcataattgactaacagataacagattatatccaagcgactcgactaaaaacacattagaaatagagtgctcagatgaaatagcaattttacctaacccttttaccttgccttggttctcatcaccgaatataattgaatcatgggaatcctcattgttgacgtaggaggtgaacatcttcttctccnccgcatat

SEQ ID NO: 61754 - DNA, 394 bp, Zea mays
  unsure (1)..(394): unsure at all n locations
agcttgaaggactgcttcggcaggagagcttcctaacgtgatgactcngttcggccacggagtcgctttatccgagcgcaagttacttatcgcagaaggggacgagtgaggtatccgtatcccggaggcgtaggagtccctcggctcggtcagccttggctgcttacgtgtacctcgtcgtttccaggatccgctttccaaagtagtcaagaagcacggaagaaatcctgctaaaaagaggtcctttttcgaggaaaaaattcgacgcagagggggtctccccccttttagccaccgagggagggtcgggctttgccgaggctaggccgacccttccttgacaactaaactttgcgtatgtgcgaggtatgtgaacaacttgaaaacatcttaa

SEQ ID NO: 61755 - DNA, 320 bp, Zea mays
  unsure (1)..(320): unsure at all n locations
tatgaagattcttcatcccaacatgggctagtcggcggtgtcatatccaactcatgttagtcttagcaattaagcaagtgtcgagttcagctctatcaaaatctactaagtatagctgaccctctaacactcccttaaatgctatngaatcatcacttcttctaaagacagtgacacatacatcagtaaaaagacagttgtagcccattggacataattgagatacngaaagcaaatgtaatctatagagtctacaagaaaaacattggaaatggaatggtcaggtgaatatagcaatttacccaatcctttgaccaaac

SEQ ID NO: 61756 - DNA, 334 bp, Zea mays
  unsure (1)..(334): unsure at all n locations
agccaacccatgttagtcttagcaactaagcaagtgtcgagttcagctctatcataatctaccaagtatagctgaccctctaatactcccttaaatgctattgaatcatcacttcttctaaagacagtgacacctacatcagtgaatagacagttgtagcccatttgacataattgggaaacagaaagcaaattgtaatctaaagaatctacaagaaaaacatcggaaatggaatggtcacgagatatagcaattntacccaatcctttgaccaaaccttgatttccatccccgaatgtgatagctcgttggggatcttgtgttttctcatatg

SEQ ID NO: 61757 - DNA, 272 bp, Zea mays
  unsure (1)..(272): unsure at all n locations
gagcactacacgactgatgagctntatcgactcttactaggcaccaaatcatggttgatatgcgttcnggaccgactgtcactcactacatccttatgtagcaaggcgcagctactctctaaactgatacacattgaacagcttatggtgggtcactatagatgtctatgagactaacgtgggtctctatacacacgttcctatagatcttatgactgaacgtacattcatgagggacaagggaatgaacatttcaagtgctaatgactcaa

SEQ ID NO: 61758 - DNA, 455 bp, Zea mays
  unsure (1)..(455): unsure at all n locations
agcttgacaacaaggagatggctcttatcattaatagctcntcgacaatcctcaaacaaaggagggggaaagactacaagcctcgcttcaaaagggtttgctacaggtgtggtaagtccggtccttttataactaaatgtccatattctagtgaaagtgacagggacaaagacaagaaggggaagaagaagatggagaagaaaaagtactataagaagggtggtgaggcgcacatggtgcgagaatgggactccgacaagagctccaccgactcctcctctgacgaggacgccaccaacattgccatcaacaaaggtctcctcttccccaacgtcggtcacaagtgcctcatggcaaaggaaggcaaatagaagaagtacattctagagataccccaaatacactacatccgatgatgaaggtagctctagtgataatgaagatgacttaacttc

SEQ ID NO: 61759 - DNA, 435 bp, Zea mays
  unsure (1)..(435): unsure at all n locations
ctaagctttctgccatactcatgatcggtcatccttctttacgattgtcttccattncagtcaagcttcgtcttgaccatgcttttgtatatccgcaacctgattccgaagatacctgctcgcatacttggaaaacattgcaaattatgtttgtgaggaccttcggaacccgaaagcccccaacagtagcccctcgcaatattaatttgctgtaagataatatcatattgcgatatggacgaaggccttaagccgaatgtcctgaaaaacaccttctctttgctagaatagcaacagtctttgacaagcggaactctccatgtttcaacgcactgggtgtataataagagctcatcccgagtttatttgcacgctctcttgcaactgctttactcactcactatagcctgcgcccacaacacttgtttggccttt

SEQ ID NO: 61760 - DNA, 468 bp, Zea mays
  unsure (1)..(468): unsure at all n locations
tatagattaagagcatgtttggatacatttgacaaatagctagtttactggctaattttagcactttggactccacacggactcactaatcagttagctaattattagttagagggctgacaaattgtttgccaattagccattagcccttgctaataggtgttaaaggaacataaaaagagaaaaagacatctattagttaagacttcaaatataccctggctaattgtttgcctagccatgaggatctaaagagagcctatgttttctattgagttaagatcatcctaatatttatgagtcaccacactagccaaaanataactagcgatttttttttgagattgacataatgacataccatttttggaggatgtctgtcttgaanaatatagcctattttcccagatggacttcataagaggaccaccccataatataggaccgaagccccaccaacacatcaca

SEQ ID NO: 61761 - DNA, 427 bp, Zea mays
agcttaccgcatatgaagcacgaacgcttccctttgtttttgtctgtctggcttgcccttgcgacctttaagcgccgtcttgaatcttttgatgatgagggccatctcttcatcattaagtccggctgcctcaatttgtgccaccctgctaggtagcgcctccttgcttcttgttgccttgagagcaagggggtgaggctcgttgattggtccattcaaggccgtcgccacgtatcttgccttcttgaacatcattcgcccgcttacgaattttccgagtacctcctcgggcgtcatcttctggtacctgggattctcacgaatatggttcacgagatgaggatcaagaacggtaaatgaccttatcattaagtggacgacgtcgtgatccggtcatcgcgtgctttcgtagcttcttattttgttg

SEQ ID NO: 61762 - DNA, 407 bp, Zea mays
  unsure (1)..(407): unsure at all n locations
tatannnatactcaagctcaaggtatctattgaactaacgttagataaagtcgataanattctcttttgctaatactatgtctccttcagcacatatattatcttatccttcagttcgatgaaccatagtatatgttaaactccttcattataaaacgttcaatagtgcatatatttatgacatcaaccatatgtgtgcactatgtcaaaacgagattatctattcttatgaacaccacgaatgaagatacatcagccatccacatataggatcatcacttgtgaaaccctaccttgtgttataatgctctctattctaagtgttttaataacggccttccaagagcatctagaaaggattcaatacccacataaatatgagttttggccttcaacattgactccaa

SEQ ID NO: 61763 - DNA, 472 bp, Zea mays
agcttgtgaaggttcttcatccccacatgtgctatgcggcgatgccacattcagcccatgcaagtcttagccattaagcatgcatctagaccggcctcttctttggcaaaatcaactaagtaaagcttgccgtctagtacacccttaaaagctagggaaccatcacattttctaaagacagacacatctacatgtggaaataagcagttatatcccatattacataactgactaacagatagcaagttatatccaagagactctactaaaaacacattggagatagagtgctcattggagatttgcaatttacctagcccttttaccttgccttgattcccatcaccgaatataattgaatcttgggaatctttattcttgacataggaggtgaacatcttcttctcccccgtcatatgtgttgtgcatccgctgtcgataatccagcttgaacccccggatgcataaacct

SEQ ID NO: 61764 - DNA, 486 bp, Zea mays
  unsure (1)..(486): unsure at all n locations
acttcaaactaagcttcaataatgataaattngagaaactcatgagataatacactctatgagttgttnttgcatggcatttctcatgcagaatatcaatcttcatgcttgttgacctctgcaacactttcaaattatagtggcgatcccatttagcctttattataccagatcggaatgatggatttatcaaccatcattgttgactgagattaatgacacttgatgtggtattattattagctgtatggatatgctacccaaatttctgttctttagactatttccagcagcttacccatcctcattcctatattcaaacttcaatctgcacacagtgcattctacagtgcagaacagtgtaaaacagtgttttgtgaaacatataataaactactggacacggcttactagactttacaattcaatcacatacctttctgggcttgaatgttcaattgttgcttgtgttcactattatacttc

SEQ ID NO: 61765 - DNA, 456 bp, Zea mays
agcttaatagcaatgactccacgactttccaatgcagttgttctggcttgagctgtggtgagatccacatggagcttacggttgagcttctctgcatcttctgctcgggcaatcatctgacggtggtgccgagccaagaaatcatattgtgcatccagggtgagcaggtatgcagtgaggtacacgactgtggggtcatcctcaaacagctgctgtccttccaatgcacgcatcctggccatccaaacaggacgggttctctgaaagggcggaaagaatctgagcggtgtgtcggccacttcttcttcatagatctgacatagggtcctcaatgccttgcgagcgacgacttggcaggtgtctttaaatctgtgccagcagcagtgacactccattccacatggcgtggactgggtccaatgtatacagtcatgacacacttcttcatgccatgct

SEQ ID NO: 61766 - DNA, 473 bp, Zea mays
  unsure (1)..(473): unsure at all n locations
tatgtccacctactgancctgtttaaaatgctaaacctctctgtttaacccattaagttagttnttaccacttattttacaatatgcttaaggttaataaaaatagaaaatgtaatttaaataatgaaccagaaggcactcttatttttgttagggtacttattcaatgtagttcactggaaaaatctatcataccctgttttagtataaaataagaaggataacttttattttaagacaacaaggaaaacttagaataaccctacaaaaataaccccaaggtgaaaacaccccaacccttgggataactaatgttttgttaataagaacttagcaaaaatatgaaatcttctgtgtgacatttttcaaataacaatgtagtataaagtagccttttgacatttaactttagaaaatcataactaaatgaccatcccttagctttctgtcgattttagcatagaaagcatata

SEQ ID NO: 61767 - DNA, 393 bp, Zea mays
  unsure (1)..(393): unsure at all n locations
agcttgatattctttngaaggaggtttgagcatgctactattgttcccttctcaagcgnnancaccatattatcacggttatcttgagaagggtgagcatgatactttctcttcaattgaatcaagctcctttttaacctctcattntcttccctgagcttattgttttcttttgcataggaaacattacttggtcctgaaaattctaactcaatggaagattggctttcttgagagcaacatttggtaacacatgataatataagttctatntgagtacatgtgcatatgtgaggttgggatgatttcaaattagttaacataacctcatgagccatttctaacatgatatgtgaatcccataatttattatgagagcacaccagcatatca

SEQ ID NO: 61768 - DNA, 391 bp, Zea mays
  unsure (1)..(391): unsure at all n locations
tgctcactgcttcctcaaccgaagctatttatattgctcaagctttttatcctgaaagagctgcggcaaagatttaaaaaacaaaaaattcaatcatcagatggctagagtacgctcaacggctatggatactcacgactgagatgaagccgaatgtgccgaaactgctccaatctctaaagtgatgaatcattcanggctggtagtatcggaggatgcaccttgccgctgagctgagcatgctgatgccgatgaaattgagtctgaagatgaatacagcgcagtgccaactatacccagccacatggagtgtgttgaatccaccatgtccgaaggtgatatgcctaagctgatgaatttgggctatttcagagaagcgaataacgagctg

SEQ ID NO: 61769 - DNA, 363 bp, Zea mays
ctcttccgcatatcttcatctccgatgttctgtaatgtctacaagatgggtgacacgttcctggtaaggtaaggaaagataccgaacttgtcaagtagttcatgggcatctacaaggttgtctgatgtctttgagacgaggacaactgtaggtgggccctaattacttgggaggttccgtcacatacttcccgccaacggtcgactgcatgcgcattgaatgcgcgccagcgcgcgcagaagtcatagcacgcgcgggtggcacaccggacagcctacaaggcttgtccggtgcaccaccggacagccatgcgggcccacacgttagagctccaacggtcggaacccaacggcctgatgacgt

SEQ ID NO: 61770 - DNA, 403 bp, Zea mays
  unsure (1)..(403): unsure at all n locations
tcagcttcggccttcngaagccgatagttgaaatgaatgaatccgtcttttagtgcctaagagccttcggcgttgtctgcttctttatatgaacaatggactcactacaagagcatattgccttcatggtgtggccgcttgcggagaaatgggaaatgcctctagaaaccattaaagaggccgacgaaggtggacttatcacgtttaagtacacttttaaatttggagattaatttattgagccacatgatgagtggttgataagcattgacaatctaagtgatgagctgcttgggacctactcgaatgccgaagataatgcaatgtcagcagcctttggaggccgaaagaagaagagactgaatcgggtattcgacgccatcagtgttgtctaccctgacta

SEQ ID NO: 61771 - DNA, 131 bp, Zea mays
  unsure (1)..(131): unsure at all n locations
tatttctaattctccctatagagaggtcgcntggacaattgcaatggccgcctgtactacaacagacagtgactaggcgataaccctcggcgtataccgcatctgtaatctgtacttgcagacacatctca

SEQ ID NO: 61772 - DNA, 450 bp, Zea mays
  unsure (1)..(450): unsure at all n locations
ncaagctgtgaagccaatcacaagtttgttgaagattgacattaagttcagcngggcttctaagtgcaatgaagcctttgagcaactaaagacactattgaccactgctccggtattggctcaaccggacatcaccaaaccttttgacgtctattgtgatgcatctggcagtgggctcggctgtgtactgatgcaagagggccgagtgattgcgtatgcttcaaggcagttgcgccggcatgaggagcactatccaactcatgatctggagctagctgctgtggttcatgccctatagaattggcgtcactatctgctgggaaatatctgtcacatatatacagatcataaaagtttgaagtacatcttcacccagtcagagttgaatatgagacaacgacgatggcttgagctcattaaagactatgaactggagatccattatcaccc

SEQ ID NO: 61773 - DNA, 417 bp, Zea mays
tgtgaaggttcttcattctcacatgtgctaagcggcgatgtcttattcaacctcatgctagtcttagcaatgaagcatgcatctagaccggcctcctcttttgcaaaatcaactaagtaaagtttgtcgtctaatacacccttaatagctaatgaaccatcacttcttataaagacagacacatctacatttgtgaatagacaattatattccatattgcataattgactaacagataacaaattatatccaagagactcaactaaaaacacattagatatagagtgctcggatgaaatagcaattctacctaaccctttaaccttgccttgatatccatcacctaatattattgaatcttgggaatgcttgattttgacgtacgaggggaacatcttcttctcccccgtcatatgg

SEQ ID NO: 61774 - DNA, 436 bp, Zea mays
agcttgcagcataagataagagtatataaatctctctcatctctgaacagatgagcatcttcactgatctccaacacagaccacacagcttctcatataaaaggaaaggagaataatgggcttcccaactatataactaactttattgacatattaagtaaaccaaaatgcatgtgatacccacactctggtgacaatcattacaaagatccaaatcaaacatagttcatcatgacaaacataaatgctcaggatatagcaaactaccctgtctaactaaaactaactaagaccgatactaacgctaagactgacgcttccatgtatatatttactttcgattaatcacaagatccaactctaacgatctatggttctaggtttatcttggtctcgcacgcgggattgccataagactggtgtccacgctgacgtg

SEQ ID NO: 61775 - DNA, 486 bp, Zea mays
  unsure (1)..(486): unsure at all n locations
ctgaacacagtgccattgatcagaaatgctagcagctctctgtgattatgggtctctggacgttggtacggcatctaagagcttctatgaaatgtgacctgtgatctaatgcaaaccgtacaccctcgactgagcggctaagatctgtccataccccttcacttgggtctttttatttaaacaacctcggtgaactctatttttaacctgtagtcccatatacccattaaatcgtcaccagcgggatccaaataattacgccttacccctgtactgctgggaaagcaaacctgcatcccaagaactctataagatttctgaataaatgtggaaaataagttttcttatataaattagagcctaacccttcattaatgcataacttctatgttcttactccaaattgacccaattcagntgcaatgaactcaaataatattgttatcattantaaccttatttattatgtacatgtggctaaatcat

SEQ ID NO: 61776 - DNA, 448 bp, Zea mays
  unsure (1)..(448): unsure at all n locations
agcttcggaaatcccatacttttagccatctcccggtagacagatatctctttgttgtctgggagacagtataagaaatcatcttcgtctgtaccattgaacaccaaggccccttttgggtatttcagttttcgggcatagtgattggcctcttcaatctctccttcagataacctctttcccgaagcatgtcgaataataaaatcaagattctcgaacattgcttcgggattaagagatttagctttttcggctatttatttctccgtagctatgccaatacctggagattcttttccaaccccttcctcagttataacgggcttcgtctcagcagacactgaaggcccagcttcggcttcaacttgggccataatagcttcggcgactttcttcgcggnggcaggagttaatgcctttgtggttccatgacagcgtctagcacgct

SEQ ID NO: 61777 - DNA, 487 bp, Zea mays
  unsure (1)..(487): unsure at all n locations
ntaggttgaactagcggtccagctatgggggtctataagctgttcangtgtaaattcaagggtgttacacgagggccagaaaacacgaacaccatcatgattntntaagaggtttcactcgctaaactcaagggttgttggattggggtctttttatgaacaaaacagacaacattttttttgtaaaaagggttgaacaattacaataccacctagatagcaagaccagataaacacatagcacgacctaacaagacttatcaatctgacatgaggtaaagcatttctaatatagcagtacatcacattattcacaagttcttattattggaataagggtgagggaagcatgttggtgcacaagaaacaatgatgcgacaatcatgatgcatgctcattctagtcgtcttctcagacctaactactttntcgggtgcttctacaacatccttattaatagtagtagtaacctttatggcctaaataa

SEQ ID NO: 61778 - DNA, 419 bp, Zea mays
  unsure (1)..(419): unsure at all n locations
agcttagaccggatttcaaagatcttgtctggaataattggtctcttccggncagaagtcgatcaagtatcgatatttggaaagagaaaattaagagattgaacaaaacgttgaaagggtggaacatcaatgtggaaggaagatattctagacttaaaaagatttattgcaaaaaattgatagcttaaataaaaaagtgaaagtactggtatttcagtctcggaaagacttgaaaagcttgatatggaatggaatttaaaaaatatgatggctgaagaaggtgtaagaaaaagcaaatggcgagagaaaaatctattaatgagggtgatgagaattctaggtactttcatctgagagcacctagagggggggtgaataggtgatccttgtaaacttgaacttaatgccacacaaacttg

SEQ ID NO: 61779 - DNA, 426 bp, Zea mays
  unsure (1)..(426): unsure at all n locations
tcgtagtcaaccaagtcttctcctaataggtcgtcctcctccatgggcgttggcacgtctttagaggtgtcctggtgtattgcggacggtccggactcgagagtcggacggtccgtgtcatctgcgaatggtccagcctttatagccggacagtctatcatacctgcagagagctgtgaagttgctgtctcattttctgtcttcgtggntgatggatttatcccaacagcctttggcctccacctcttttgcggtggtgggtattgtggatgtgtgtcattaacatatttttctgcctccttttcctggttctccttcgctctaaggtgatgtaatgttcgctnttgggaccgtgtcaatcccgatgggcaccatcgaggcatggagtattntggaccgactattttgatggcagccatatcttct

SEQ ID NO: 61780 - DNA, 449 bp, Zea mays
  unsure (1)..(449): unsure at all n locations
agctngagctcataatgtaaatagatgaaggctttntcatagtaataaaaactagttntattttggctcgggtgtagctataagcttaacacaaacaacgaacattgtctttggggagttaggtaggagaaaaagagacttttagaaaaaggtgtctattactacatcaatactatacgggacaagggaataaacaacacaacttgagattccattcattacatttagtaagaagctctctcaagtatgttaatttgtactagagttagtttactcaagtttactaacttcatgcatagggacttgatcatcaatcccttcttgtgatgagctatgattgagaaggcctatcaactcctaataaaaaccatttctcccatattagaaacttaaaactccccttcccaagaatctatttgagtcacctaagactaatcaactaaagaatc

SEQ ID NO: 61781 - DNA, 404 bp, Zea mays
  unsure (1)..(404): unsure at all n locations
ttctggacgccatcaatacaacatatagtaccttctccaactttgtgtattttntctttgatgggctaagtacttcgaagatgaagtatactggcacttgcttctttgcttggccatcctgtattttcttgtaccagcgctgcactaactgtagcgtgggaagcagccatgtataacaacaatggagttcctgacgaaagtggggttaagattgtcaattctatcaagtactgcttcagttctttgaaagccttttgctgaattggtccccattggaagacttcggctgattttagtacttcgaaatatggcaagatcctctctgctgatcctggaatagaactatacaacgatttcatccttctatcacactctgggcacctttcatgctttagtggctcatt

SEQ ID NO: 61782 - DNA, 463 bp, Zea mays
  unsure (1)..(463): unsure at all n locations
gcttatctcaacctgagaggaaagcttatcctaatgggtgatgtgttagtttgagctttgtcaagtgagatattcatatgcttcttgcagtattatatgtgttgcatcatatggactggtgattccgctgcgatgaattatttggcttctatagtgtaatagatagtcatgtgattgctttaaattagtgtcttagtttaaattggtattagtttgaattggtatcttaatgatgagtagtggtaggttgatattcctgtgatatatccactaaatngaatgatgtttaactctgattacatgcatttgtgtgttatagcatcatggtttgattcttgacacaatgcatcctanaaggtgctaaggtgtagaaatgcttcgtattgcctaagtatgtgcatgtaaggccaaanatatgtatttgaagtacgcacatatttatgggggagcattctataactta

SEQ ID NO: 61783 - DNA, 418 bp, Zea mays
  unsure (1)..(418): unsure at all n locations
agctttaccctacatacaactagtctactttagctcaatgggtcatttactgagnacgttgatgtgtactcacacttgctaaaacaccaaacactagggtgtccccattgcaacctctgtttatgagaagatgaaggcaacatagagaacttttatgaagttcaggactccgatgagttctaaagtatattagcggcaaatcctcagtcagctgcttgtgaaggccttatcttactatggtttgtttagcactttgatttatgtttaagttaatgactatgtgaatgtttccgacatcatgatgtaataaaataatactcctttcggctactaatttgagcatcgtgtgatgatgtccaattatgtaatcgatgtgtacgtgaatttctgatcctggtacgaacatggttcgcattga

SEQ ID NO: 61784 - DNA, 124 bp, Zea mays
cttaacaattaaaaggactaaccatccagacatagttcattagaaacagacataatgctcttcttatccagagaccatactcccggagaacatcctaaagtacatgacctgcaagagttaacat

SEQ ID NO: 61785 - DNA, 399 bp, Zea mays
  unsure (1)..(399): unsure at all n locations
ctttacctngattcccaataaaccagcatacccttgagagtctnttttttagtcgtttaagtcttgctgagtaattgcgtactcatggttttataccctgttgtttttcaggttataattttgttctgttgtggatgctgctaagtgccggtgggctcggccttcttatataggtgtatcccatctgtagcttctttattgaggattgtcacttaagctagcttgtatattaacacctatatatattgtatacattatagattgtaattcttttgaatcactttcttttgtaatcactccgataattgtataatgtaaacttattgtaacatgtaatcattttgtaataaagaatttaattgcgctgcaaatgttggtgtgtgatttgtgtctacttaa

SEQ ID NO: 61786 - DNA, 467 bp, Zea mays
  unsure (1)..(467): unsure at all n locations
agctntatcaaatggacgtgaaaagtgccttccttattggacttttcaaggaagagggctatgntgagcaacctcccggctttgaagacagtgagtaccctaaccatgtctataagctctctaaggcgctttatgggctcaagcaagccccaagagcatggtatgaatgccttaaagatttccttattgctaatggcttcaaagtcggaaaggccgatcctacactctttactaaaactcttgagaatgatttgtttgtatgccaaatttatgttgatgatattatatttgggtctactaacgaatctacatgtgaagagtttagtaggattatgacacagaaattcgagatgtctatgatggnggagttgaagtacttcttatgatttcaagtgaagcaactccaagagggcaccttcattagccaaacgaagtatactcaagacattctaaacaagttggggatg

SEQ ID NO: 61787 - DNA, 461 bp, Zea mays
  unsure (1)..(461): unsure at all n locations
tgttggagattagtggttgaatttacaggatcacctattcacccctcctctatgtgctctcagcggagcctcttttcccagcgtttgtccggttgctggctcatatcccaccgcggtgcgggcggtgcagatattgcgccttcgatgaggtcctgggcccgctcatccgcggtgatgtagatggctgcttccctgaacaattgtttggaggtggctggcgcctcttgaagtatggcccggacgaaggccgggtcgttggatccccgatagaagtcttcaattacagccgcctcagtgacttcggagatgtggttcctcatcgttngaaaccttttgaggaacgatcagagagactcatcattctggcgcctaatggatatgaggtgccatggttgtgtcggtttattggagagagactggaagattgcgataaaccggcgactgaagtcaccctagtcgtc

SEQ ID NO: 61788 - DNA, 429 bp, Zea mays
  unsure (1)..(429): unsure at all n locations
agcttgtgaacagtacatattcatatgagagaattcttcttcagcagaccagccgaagcctatgctcttatgtgaggacatagcagaacataatgtgctgttgggctctcaattatctgaagagcaggagaaaaccttgataaggtttttgttcaacaacaaagatgtttttgcatggtcagccaatgatctctgcggagtaaatagggatattattgaacacttcctcaatggtgacccatccttcagacccagaanacagaggcttcggaaaatgtctgatgataaggccgaaggtgctcgtaacgaagtcaaaagactcctcactgcaggagttatcagagaagtaaagtacccagaatggctagctaacactgttatggtaaaaaaggccaatggcaagtggcgaatgtgtattcgatttacata

SEQ ID NO: 61789 - DNA, 404 bp, Zea mays
  unsure (1)..(404): unsure at all n locations
cgcgacacttaaaactcagcttnggaacccctacctctggcatctcccggtttatgttaattcatcgttgtccggaaagcaatacaagaagtcatcttaatctgttccattgaacactatagccccctttgagtacttcacttcttgggcgtagtggttagcttcaaaaatttcttcttcagataatctttttcctgaagcgagtcggataatataaactacagctttcgaaggcgcttcaggagtatgagtggcagctctttcacgcagaatctgttctacagcttcttctttcgctgttttctccgggtatcaaggatttctccttggcgggctctgaatgcccacacttcgtgcgtggcgctggctcaatatagcatttggcttcggtcagctttgtcttg

SEQ ID NO: 61790 - DNA, 192 bp, Zea mays
  unsure (1)..(192): unsure at all n locations
agctcgaggcagtattacttaatggtctcatgttttccnacagacanactctatgtcatcatatatatgcactaaagaaccatgtaaagcctttaatgtccatacaatctatgttatggaccacactcattcttttaaaaaccattcatagaacttaaccaattcatatcagattttaaaataagagggact

SEQ ID NO: 61791 - DNA, 298 bp, Zea mays
acaaacagggacctacacaaccaaaatgttaccaccactcgttggagagctcggctccaaacggattactccctagagtagcggtggaatgacaagcaggcgaatcacgcgacgaccgcgagaagagaaaagacaacaggccaagttacatatcgatagtatcacgaaagaaatcaccctctctctatcaggccatcgtcagcaaggcgtgcatgtgggaatgcataacattgtttccagcaaagagcgaatgtgggagttcgaactaggagtacgatagggaggctttaggcacaac

SEQ ID NO: 61792 - DNA, 416 bp, Zea mays
  unsure (1)..(416): unsure at all n locations
agcttacaacacccttaacatctaagtttttcttatatttatattcaaagggcaggtggnggtggggttntgggttacgtatcgactcctttgggcagaaagtcggggaagcgagaacgcagaaaatcctcagtctcctaggtagcttcttctaatgaatggtgactccactgaaccttatacattctgatcgactttgcccgcgttgatctcttcttntgatccaatactttgatggggtgctcttgataagacaagtctggttctatctcaatttccggttcaggtagtacttcagtgggtaagcggacacattttcgtagctgggatacatggaacacatcatgaactgctgacatgaggggtggcaacttcaattgatatgctacgggtccacaatntgctttgatctcata

SEQ ID NO: 61793 - DNA, 494 bp, Zea mays
  unsure (1)..(494): unsure at all n locations
tccataatctntgntgtcgcttatttagtatactttaatgtttataattgtcccaagccatgattctatattcttcatactctnttgctctttctcttgaattatgtttatagggctcaattagggtttttattggggttgcacaatttgcctttttgaaaaacccatttgttntgaacatgatacttttaagtataagcttagtggatcctttattcttaagtcaatntgatgctcatgctcaattttggttcacataagatgatggttcttgagttagcaattgagagaaaccctaggtgacactggtgtgtcacaatttagtacgtagaaaatatattctagtagctggtcataaactgaaggatcttangctcagctntgatccgctcatttgngtctatatcggaataactatgcttataagatgaatctccaaagataagatagaatctgtcagataagattattcatgacactagattattttaatg

SEQ ID NO: 61794 - DNA, 450 bp, Zea mays
  unsure (1)..(450): unsure at all n locations
gcttaggacatgctgattaccatctttctatgtttcagacgaagccgattactgctcaggcattgttccaatgcactcaagaccaagatgaataccttcaggcgtatgtctgaaggttcctgcgactaatagcacaagcacccatagtgcctaatgaaatcgtcattgaggccatgatcaagggactcatgccaggacccacaactcattatttcgctaggaagccacaaactttggagaagctgcttcaaaagatggatgagtatatccgggctgacaacgattttcgccaaagaagggaggggcctacaggttttctgagatgaccggnggcttcggagggaggcttcatcctatgcatgtccgctcaattcataactccaattccaatgatgaaagggccagcaatgcttagcatatatcactcaaattttagtcatcaagtatgac

SEQ ID NO: 61795 - DNA, 421 bp, Zea mays
  unsure (1)..(421): unsure at all n locations
tctactgtacaagtgctgcacttaccgctgaatgcgaagctgccacatataataacaaaggagcccctggcattggtggagttaatgttgttaaatctatcaaatattgcttcagttcctcgaaggctttntgttggcttggtccccattgaaagacttctgctgatttcagcacttcgaagaatggtaaatttctctctgctgatctggatatgaatctattgagagatgccagcctccctgtcaatctttgggcccccttttttgtagatggtggctccattcgaagtatagcttcaattttacttggattagcttcaattaccttttgtgaaaccaagcatccaagaagattcccctttcttactccgaagacacatttntctggattcaactatagaccaacttgcctaaactggtg

SEQ ID NO: 61796 - DNA, 470 bp, Zea mays
  unsure (1)..(470): unsure at all n locations
agcttgtgaagatactncatcccacatgggcttttctgtgatgccagagccaacccatgttagtcttagcaattaagcaagtatcgagttcagctctattgaaatcaactaagtatagcagaccctctaatactcccttaaaagctactgaatcatcacttcttctaaagacaataacacctggatccgtgaaaagacagttgtagcccattttacataattgggaaacagaaagcaagttgtaatataaagaatctacaagaaaaacattggaaatagaatggtcaggtgatatagcaattttacccaatcctttgaccaaaccttgatttccatccccgaatgtgatagctcgttggtgatcttggtttttttcataggaggagaacatctntttctcccctgtcatgtggttggtgcacccgctatcgatgatccaactngagcccccggatgcataaacctacaaa

SEQ ID NO: 61797 - DNA, 424 bp, Zea mays
  unsure (1)..(424): unsure at all n locations
tctttataaaaatagtaatattgaagatacataatccgtctcttactctggagaggaaacatttaaatggatttattataccttttttgcagataccgattgatgtccaatattatatactccatcccgcccaaaataaatttcgatttacattttaatggattcatacaatacctaatgtatggattctatataagtgnctatatttatcggcatcctatttgaatatagatatacaaattggtaagcccaaacaaataatattttggaacggagagagtattattatagtacggtcatattacaatttcaaggatttcgatattggcatttcgtttcatatgtacaccagcttgcttcccaagaaggtcatttggacaactttctaaattactaaattataaacattacacttaattttcac

SEQ ID NO: 61798 - DNA, 430 bp, Zea mays
  unsure (1)..(430): unsure at all n locations
agcttgtgaagattcttcattccaacatgtgctattcggcgatgccagagccagcccatgttagtcttagcaattaagcaaatgtcgattttatctctatcaaaatctactaagtatagctgaccctccaacactcccttaaatgctattgaatcatcacttcttctaaagacagtaacacctatatctgtaaaaatacagttgtaacccattttgcataattgcgaaactgaaagcaagttataatctaaagaatctacaagataaacattggaaatggagtggtaaggagataaagcaattttacccaatcctttgaccaaaccttgatttccatccccgaatgtgatagctcgttggggatcttggttnttctcgtaagaggagaacatcttcttcttccctgtcatatggtttgtgcacccgctat

SEQ ID NO: 61799 - DNA, 382 bp, Zea mays
  unsure (1)..(382): unsure at all n locations
tgaagccatggtaagtaacataggccaataatataccgattgtctcaagcctagctacgggtgcataggtttcaccgaaatccaaaccttcgacttaggagtatcccttggccacaagtcgtgctctgttccttgtcaccacaccatgctcgtcttgcttgttgcggaacacccatttggttcctacaacattttgattaggacgtggaactaaatgccatacctcattcctagtgaagttgttgagctcctcttgcattgccaccacccaatccaattcttgaagtgcttcctctaccctgtgtggctcaatagaggaaacaaaagagtaatgctcacaanaatgtgcaacacgagatctagtggttacccccttatgaat

SEQ ID NO: 61800 - DNA, 365 bp, Zea mays
agcttctgccggccgtctgctggccgcccatcctctacccatggctggcgtcgaagaagacgctgcggcgtctgcagatcccgccgccgcgtccgatcccgccgctggtgagtaccctcctcgcgctcggccactactaccgcccctaccccactcgtggctggctggtgctcaatgaatcgggtgctggtggcttgctcatacgttctgttggggattctggccatttgggagatttgggccgcggttactttacaacaaggcagtttcggatcccaccacacccgcggcttgccaattcctgccgcactacactacactttcctgaattgcagtgtggctatagacgataagattcgggatct

SEQ ID NO: 61801 - DNA, 467 bp, Zea mays
  unsure (1)..(467): unsure at all n locations
tggaccacttatcaaaattgaacggggcaaatgagcttatatgtggcattgattgccgggagctattttagaacctgcaacttttactggtgtagttcttgcacattaatcatacatctactacaganttgttattgcatgatctgctattatttgtgttattcttcctttattgttntgttccatctaatactgcaggatcgaaatatcttcagatgtagagtcttatgcaagatattacaatcattatgatgttgtcaaggtactccagagacttgcactctcagatgcatatgtggatatatgcaggcaaataatggaatacttgaaacaattactcggtagagttcagagtgagagatcaacaatattgaaagaagttggtacaagacatactccacaatccagcatgttgagttttactccaacaatgtcaggagatggatgtggctggcaactttaaagat

SEQ ID NO: 61802 - DNA, 445 bp, Zea mays
  unsure (1)..(445): unsure at all n locations
agctcgagactggaacaatcgtggcatgtactatatctccttgaagaaaatgtcaaggacttgaggatngccaagaggagggaacaaaagaagagaatcaatacctcttccaaaagcctcaaccacgcctccataaaaggtaacatccaaggtaatgatcaagccacacatcacactaagaaaagtagaaggtgtaatgaatgctttgagaaaggacacttgattagatcatgtccctatattaaaaatggcttgactattaacaaggatgataaactntgttttaagtgcttcaagaagggacacttgtgtaggtcttgtccccatttaaaacaaaaaagtcatattcactaaccatgtagcaagaaagaaacaaggaaagaagaaatcttcaagaattgaggatcgtctgtgctacatatgccgaaagaagggacatcaatgc

SEQ ID NO: 61803 - DNA, 448 bp, Zea mays
  unsure (1)..(448): unsure at all n locations
ntatatggacgacgatgtcgtactccgctaacatggtctaatcttagtgaaaggtacttcttcaggcctgatatggtgaaagagaccgaagaaagagttcaaagaataattcataatttgaagaaagctcatgctcatcagaagagttatgcagacaaacgacgaatgcccttatatttccttgagggagactatgtctacctaaaggtttcgccaatgaaggacgtatcacgtttctgggctaaaggaaagcttgcaccacgatatattggtccttttcttattattgaaagatatgggacagtggcataccgactntagttacccaaaaccttgtctggtgtgcataatgtgttccacgtgtcacaattgaagaagtgtttcgggttcccgtcgaccatngaagtgacagatgttgtcttgaacagacttaacatattcgaacatc

SEQ ID NO: 61804 - DNA, 447 bp, Zea mays
  unsure (1)..(447): unsure at all n locations
tcgggcctcgtcaccagccaaatctcgaccacgccttcgctcctaatttgtgttataaatctgctccctatgcttcgggcctcgctgggaatgtcaaccaaatctgttgaagatagactaaaagttggtctattgacaatcttgccatgcgtacagccagcttttaaaaatgctgcagctgtgccgcgaanagctagcagggcatagaagtcactgtgccccactattacttcgtcaagcgcctcgacttcgccttcaatgtgttcgaaggtgcttgatatgttattcgccgaaggggtaaactattcagcgctggctccaactgagttgaaaaccttcttcaatcgctgtacgcagcggctggcaaaacccagacacatgttccaaagctctttcaaagattgttgtagctttgattttcgacaacttcagattcgtatttcatct

SEQ ID NO: 61805 - DNA, 402 bp, Zea mays
atgtgcgagtctgctctttctaccgacgtctatgtttagacggcgtcaccgtcaccggagctcatttggagctgaccctctcctctcttttagtggacgaggccggtgtctaaagttgtactgatatgagaaatttgctgtagacacgagtgtggtattatgcaaaaactctgttaaaatgatacaaatgtcctgagatgggcatgatctgatgtaattccaaacacaaattacattatctttatctatattacacacaaatgactgtcatagatgatggcagtcgctcctgctagtacggttgcacacctgatggctgcttgtactgaaaaagatcagaatatgccgtctcatctttcatagatcacaagtcaactttacgaacagaaccgacatatctaa

SEQ ID NO: 61806 - DNA, 345 bp, Zea mays
tcgtctgtcccatagaacactcatgcccccttctgatatttcaattctctggcctagggattaacttcataatctcttcttagatatttcttcccgagcctgtccacacatgtatcgcgttaggtggaaggtgcttccgcggcggccgtgttcatatctttaaccaaaaatggctctgacatttatccggctgcctatgtcacctttgctttttcgggtttcaaaggttgttccttggtgggctctgaaggcccagcttctgctataagttgttgcttctaagcttcagccgccaatgcttcagtagacactacataagattcaatcgttttctttagagttatg

SEQ ID NO: 61807 - DNA, 346 bp, Zea mays
cttgtctctgcaacttgagtaaaacaatgcgggagccattggtgataatagtagacaggaccacaacacatttagatgggttacctatagccacgaacattccagcaaacaagcttaaacgacctatgcatcattatttatagaaacaacactcacaccatcattacagactaggaggtcggcatcccgacagtgcataggtccaaccttaacgggggcaagatggcacctcatatgagagacaacgacataacatttacagcccactaaaccgctagccctattggagacactaatggtgtgtttggttagagagtggagccgctccgctcaaatttctagtgtt

SEQ ID NO: 61808 - DNA, 458 bp, Zea mays
gagcacttacaactaacttgccctttgtttaatgtcaaacaacaaatttggtattcttcctagattcttcttagcacaagagcaatcattccataggttgggactttatcccttcagggatgatttttgtaacacccaaaaattctattttgggatttataaaagattctccaaatggtttgagttaaaaaaacaacataaaataaaatagaaagaacctcaatttaatctgtaaaactattcttttgtattatgtgttgggaaaccttcaaaaaaatttaagcgaaagtatatcatagagattaccattaaaaaaatatattttctatttaaaacagataagaaataaaaaaatacattttcaattatgtgactcttgctttattatatgcatatcaacaatcatggtgcctgatgaagacaattaatagttaaataaaaaaacgaatgtgcatcat

SEQ ID NO: 61809 - DNA, 306 bp, Zea mays
agttagcttttcaatttgtagttagtgaactattaattgcttgaagctttgattgtattttttttagcacgaatctctatatcagtaagaaccgtgagcccatttccttatggggaccgtggcaaatgtattatagatctcaagaaaacatcgtatatctggtagggattacaatattcttaaacttgacgaactgattcatctcgatggtagattgagggtcaggtttctattggggaactcttattcctgtaaaggttggtacactgtacatcattggcctcgatgtaaccaaaaaagtttttt

SEQ ID NO: 61810 - DNA, 469 bp, Zea mays
tcagttccatctatattatggattgcttgtgagtctgtctaatttccttcggcccttctggcagcttcttgactttcatggatagcaatgggcccttggtccgaaggtatcttcatgcaaagataagctggatgcataattgcttctaaggcattaagagtaccatgaccaatgattgcattgtaagggtactccatgtcaacgatatcaaacataacttgttcagtccttgtgttgttgatgaatccgaaggccactgacattgagattttgccgagtgctacaatctgccttcctacgaagccgcagaggggatgtgtggcatcaagaattatatcttcgggctcttgcatctgtctgaaggccttatcaaatatgatatcagctgcattgcctgtatcaaccacaacattgtggaccagaaatcctttgataacacaagagataaccatagcatcattgtgtgggt

SEQ ID NO: 61811 - DNA, 467 bp, Zea mays
  unsure (1)..(467): unsure at all n locations
ngtggcgcactacggcgtcttgtcgcagctggagtaccatttctcccacttggaagcctcggggccgaacccttcgggcgtggtagcgtcgcaaagactgctggtaccatgccgagtgtagtaaggctacgtcccgagcttcttctagctggtccaatgaatcctcgcggctggtctggttgttttggtcgtcgtatgcctttgtcctcggggaaccgtattccaagtccatgggtaagatggccttggccccatagactaggaaaaacagcgagaagcccgtggcccgacttggcgtcgttctcagactccaaaccactgaggatagttcttttatccaccgcttgccaaacttgttgaggtcattgtagatcctcagttttagtccctgcaagatcatgccattggcgcgctccacctgcccatttgtcatctggtgagccacggcggcccagtcacacggatgt

SEQ ID NO: 61812 - DNA, 420 bp, Zea mays
  unsure (1)..(420): unsure at all n locations
aacatactctgtacacaaactatacttgttttaaaacatcttcgttattaaaaacaatgaaagtcaaagagaggtcgtttaccttgaaattggaataaaataaactaccgacgatgtgctgtcgtcggtagcggctgatatctgtttcgagcttcgggaaaccaatactctttgatagagtaccgataaccttcgcaccagtttgatcccgcacgcagcccaaccttttgttatcaatgccaccgaagagaagtgctccaggccgatatccgcaagatatagcatattctttcagctcttctttttcagcctttgtcatctcttgaccaactaagttntgaaagttaaaagcttcatctttcgaagggtcttcgactatttctttctctctctctctcgggctctgaggccgtaatctct

SEQ ID NO: 61813 - DNA, 489 bp, Zea mays
  unsure (1)..(489): unsure at all n locations
gctgccttccttagttatatccgagtccaacgngtctggaacgctccaatgggaaaatcttcacagctgtcaagaagatgctccttgatgaaaaaagggcaaatggaccgatctgttacccgaggcagtctgggcactaaacacgaccgagtgcagagcgactgggtttactcccttccgccttctatacggatcggaggccatgaccccgcaagaaataaagcatgggtccccgcgaacagttccgtcagccgttctcgacgtggacgagccaacttcaaaggatctcattgacggagaccgagtcttcaccctacaggccctaaacaaataccaagcccagaccaaagcatggcgcgaccacacagtcattccgagggagttcagcgaaggggacctcgtactcgtccgaacagctcggacggagtccaatggcaagctggagcccaagtgggagggcctctttatagtcaagacaaaagcttccct

SEQ ID NO: 61814 - DNA, 363 bp, Zea mays
  unsure (1)..(363): unsure at all n locations
taatcctgagaagtgtgtcttcngtgtgccacgaggcatgctcttatggttcatcgattctgagacaggcatcgaggccaaccctgagaagatcgcggccatcaccagcatggggcccatcaaggacttaaaaggggtacagagggacatgggatgcctcgcggccctgagccgcttcatctcacgcctcggcgaaagaggtctgcctatgtaccgcctcttaaagaaagccgagtgtttcgtttggacccctgaggccgaggaagccctcggcaacctacaggcgctccttacaaatgcgccagtcttggtgccgtcggccgacggagaaaccactttggtctacgttgtcgcgaccactca

SEQ ID NO: 61815 - DNA, 452 bp, Zea mays
gagcagcttctcctaagttaagtactatcaatttgttcggtataccgatgttttatatgatgttacaacataaaaataaaactactagattcatttatgacttgaactactataatatgtagctattctagtttaaaataatttaatcttatatatattgttggtcaaagtttacatagtttgacttaggacaaatctaaaacaactaaatcacgtgaacgaagggagtagtctatactctatgcaaatctattaagaatctaatgtgggcaccggtgatgccacgacttcaccctacgcgctaccacaccatgcagaatatagtaaatcatacttctgcctaaaaattgtaatattattatgtaaatctatatctataatctctactactctataagaaggtaaggtgggtgttcaccaggctttaccatgcctccacccctcacgccatg

SEQ ID NO: 61816 - DNA, 332 bp, Zea mays
  unsure (1)..(332): unsure at all n locations
ttgttcggccttagctcccatattgttgaaacctcacaccggtcgacaaccacgagtgcaacttgggacatggctttaagagagacttctatgctacatttgtcgacaccatgtatgcgtcctaagagatcgtacacgaattgacgtggcagcactgcacctgcggtaaggtatgtttgggaagtggtagaccccagcccatggggcgaaaggacagcacatatgtggaagagcgggacaacgctgaataatggttgagcncagacaggggtacagcattgcctgtgcatcagtacttggggtgggaccggatctggtaattcatgcatctc

SEQ ID NO: 61817 - DNA, 478 bp, Zea mays
  unsure (1)..(478): unsure at all n locations
nngtacttgcctaacatgacctgatcgatgattgacatggcgttttagcgcgtctactgacgcgcccgctgtcaatccgccttcagtcacgtcaactgccataactgtccccacggttgactgacccacggcccccacgcctggtggtttcgtcgggccacgcatggggcgccttgttgccgctgccttggtttaaaagataaccttatgtcttctgcagcggccccgaggcggtgcactatcgcacgcggcggttcgcccttttcacacccgaagtccggcgcacaacctatatgacttgtggacctgtgcccccgtgtcatagagtgggttgcctgggtcctaagtgcgcgtcgggcgggatttcttgcggcgattcaagggcgcgtggaagggtttccctgaacaaggactcacgtttccttgaaaaaggattcaccccgcgtgcagcagatacctattcgcattctctcacaat

SEQ ID NO: 61818 - DNA, 454 bp, Zea mays
  unsure (1)..(454): unsure at all n locations
ngctgctagtgctagtgctagtggtatcgatgaggagactccagatatcctgcacgaacctgactctctcagtaactgtgtcaagactactacttcaccgaacggaaaacgggtctcgccgccacataacgcgctcggcagctccccgaaccgaataggtggcaggaagttgatactcaagtcaattcccttgttcccgtcactcacgggagacacaaacagcggctctgcaatgaacagcactgatagcgcattctgcgcgtcacctctcactttaggtaagccttgtttttctttttggtatagaatgcactagcgttatgtgagttatcttgacatcgttagaagcgtctcattcataccgttgtccactgaaccaggaccatcttaaagctgtgaagtttgtggccatgtgaccggagtacgacttgtagtccgaacacgtgtgcctcgt

SEQ ID NO: 61819 - DNA, 437 bp, Zea mays
tcgcatagaaactacctgtccatctgagtatgaggttgaatttgaatgatctgaacaagatgttgaggcataacaggattggtaaccaggatttggtggcgatccgttcttgatgggacgctctgaatccttgaagagatcaagtggtggtgccaaccatgcctgatttgtgctaacgtcacccatcgtagcatcttccccataatctgtaatatgagggtgccgaacctcttcatcaaccgagtgtatggtggaaaacttgcgggttataggcagagatgaaggagatctctcatccagaggattgctactctcataagataagtacttattcactgagtccatcttaggtggaaaatcctcctcagtgctgccaaacagctgcagtgacaagtatggtccggattcttgttctgtctgcttgtatctatgagtat

SEQ ID NO: 61820 - DNA, 458 bp, Zea mays
tccaattatgtgtgttgtgctatttatccaccaaaatcaattaggagaaggtgtaagcctatttccctttcaaatgggtttggagtctttgatcataagttcaaagctcacaaacttgccaataacctcatcgggggacatctgtttgtatctaggatctccacaaattaattgaacttgagtaggattacgaaaaacgagagatcttagaataaccttgaccattttatggtcatcccattttgtgctcccgaggttgcgtacttggttgaccattgctatgagtcggttgtacatcgcttgtggctcctctcctttgttcaggatgaatcgaccgagctctccctcgatcgtctcgcgcttggtgatcttggtcacctcgtccacttttgcaccgtcttgatacatcccaaaataattagcattttaactcttgcccttatatacttctctcacac

SEQ ID NO: 61821 - DNA, 424 bp, Zea mays
  unsure (1)..(424): unsure at all n locations
caccattatattacaaacatcatgcagtgataagcggaacaagctctcgcagtcatattctttaccaacataagtaccattgtttgacacaacacatttatttgactcaataacaactctgtacccatctcgacatagcatagaagcactaacgagattcttcttgatagagggcacatgttgcacgctcttcaatgccaccgtctttcccgaagtaaacttcagaatgaccataccaacaccaagaacatgagcacgcgacacaattcccattaacaaggcgccaaaccttccgacctggtaggaagagaacatatagacattagcacacacatgaatgttngcaccactatccatccaccactcacgtgaattacaaactgaaagaacaaatggtaagaatacaataccagatgttcatctc

SEQ ID NO: 61822 - DNA, 477 bp, Zea mays
tcttctttccaatgctatgtcatttcgttttatatggtgacaagatttaaataagtgtcccgtctttgcacaattataacaaagtctatcatccttgttaataatcaagccattcttaatatatggacaagacctaatcaagtgtccctcttcaaagcattcactacacttcttattttcatagtgtgaagtgtggcttgatcattaccttggatgttaccatttatggaagcatggatgaggcatttgaaagaggtattgattttcttcttttgcttcctcctcttggcaatcctcaagtccttgatattatcttcaaaggatttagtgcatgcttctgttgttcccgtctcaagcttcttcaccatgtgatcaccgctatcttgagaaggttgagcaatgcacttccctttaagttgtgtcaagctcatcttgagcctctcattatctttctttgagctttgatgtgtatcatca

SEQ ID NO: 61823 - DNA, 434 bp, Zea mays
tctaaagggagagcacatctcgggactgagcaatgtttatattgatagagacacgatttgtagcgcatgccacacagggaagcaagtaggtgttcatcatccacacaagaacatcatgatgactgacaggccactggagctactccacatggatttattcggcccgattgcttacataagcatcggcgggagtaagtactgactagttatagtggatgattatactcgcttcacttgggtagtctttttacaggaataatctcatacccaagagacttataagggattcttgagacgggctcaaaatgagttcagtatgagaaccaagataataagatgcgacaacggaacggcgttcaagaactcacaaatagaaggctgtcttgaggaggagggcatcaagcatgagttctcttcttcctacacgccacaac

SEQ ID NO: 61824 - DNA, 476 bp, Zea mays
tctcagggagaacacgtgataggtctaactaatgtaactttctaaaaagatagaccttgtgcagcttgtcaagcaggtaaacaggtgggaagctctcatcatgccaaaaatgtgatgacaacatcaagacccctggagttacttcatatggacctcttcggacccgtcgcctatctatgtataggaggaagtaagtatggtcttgttatagttgatgatatttcccgcttcacttgggtattctttttgcaggataaaactgaaacccaagggaccctcaagcgcttcctaaggagagcccaatacgagtttgagctcacagtgaagaagataatgagcgacaatgggtccgagtacaagaaccttcaagtggaggagtatcttgaggagaaaggaatcaagcacgagttctccgctccctacacaccacagcaaaatggtgtggtagagaggaagaacaggacgctactagacat

SEQ ID NO: 61825 - DNA, 472 bp, Zea mays
  unsure (1)..(472): unsure at all n locations
agataatatgggagcatgttactttttatgttgaaaagggcagacgtattgcatcgctcgaagctgagctggagcgagcaaaggaagaatatgaggcagaaactactaagataaggcaagcatccgacgaagcagttattgatcttagtgcttctcaagtgaagataggagatctaatgatgagataaaccatacgagatagctcaatgaaaactatcggatcttgataccagctgctacactgtcggcaacaggtgctgcaatgaattgacaaagaccttctcctctatcagagcaaaatctcgagagataaactntgtggatggtgacttataaggaatgatgcggtggatccttaacgaaagtcatgcttacaagagtgttctctcaactcgagaggactactgcgcatggataggcacctgaagcactgcttcgattctattgaaggctggctgcaaccatgtgaaag

SEQ ID NO: 61826 - DNA, 471 bp, Zea mays
acggacctataaaactaagcttccacttctaaccacttactagagccaggcatttaattctatactcattcaaagagatcaaatcctctccaattccacacaaaaccctagtgactagagagagagattcgccgtgttcatttgagctcttgcgctcggatagcttcatttctttctcatttggtcttgcgatcacaactctcattgtatcaaagctagaggcaccaattgtgtggtggcccttgcggcgaagatttgatcccggctttgatatgagaagagaagcttacttcgtccgatggaccgtttgatagaaggaaaggtttaaagaaacccggcctttgtggcctcctcaacggggagtaggtttgcaagaaccgaacctctgataaacaaatctccgtgtctcacatgcttatatcgttgggactcgttatgtgcctctcttccgactcgttatattttaacgct

SEQ ID NO: 61827 - DNA, 324 bp, Zea mays
atatcacgcaactggggggacacacgtcgatcttctcatatgtgatcccaagacccgccaacatctatcttgcgatgtacatattctttgggcccttatgatatctccgggagaacctcgcccataagtttgacgatggcgttgaagcactgttggaatggtggcttcactttatcgccttagtctcggagaggtccagaactccatccggtgtgctcgtgcagtatcttttgcggggcgagagccggaagaatcttggcatctcgggagctgcccggctctcttcgtatttaacctccctacataatatgcactaacgtcatc

SEQ ID NO: 61828 - DNA, 446 bp, Zea mays
  unsure (1)..(446): unsure at all n locations
attattgtctctattgtcaaagtaggtttcttttgtgtataaagtngaatatgggaaatagggggagtttgtgaaatctttgatcaatctcctttagaatgactctctttatgcctcaacatgtgtgtttgacatacaaatagagatttgaatttgattngcaaaaacaaaccaagtggtggcaaaggatgatccatatatgccaaaattgaatcaaaaccaatctgagttttcatttgaagtgatattgcccttgttctagatgctatatgtcgtgttggcataaatcaccaaaaagggggagattgaaagggaaatgtgcccttgggccaattctaagtatattggtgattgagtgccaactcaagtgcttaaatgtgaatatatgcgatggatgaacaaagtggcaatctatagcaaaggtatgtttctaagtcttagtacat

SEQ ID NO: 61829 - DNA, 435 bp, Zea mays
  unsure (1)..(435): unsure at all n locations
tgnaggaacacgtacgtggatgagctctgttgttccattataacaagttactttgctgcaactttccctctctcttcatccatgtgcatttgacatgctgcaaggtatgtaacccatatcacaccatcagctctgaatggtaactggtcaataacttcttgagccttttgaaggtgaccaccacgctcaagtagatcgatgagacatgcatagtgatctactctgggtactataccataaacttggctcatagaatcgaagaaatgtaagccttcggaaattaaaccatcatggctacaagcaatcagaacaccaaggagtgtgacatcatcacgctttatttgcgattcttgcatcttctggaagagaagacgtgcctcatttgcataaccatatttcgcaaaaccaacaatcatggagttccatggcataata

SEQ ID NO: 61830 - DNA, 485 bp, Zea mays
  unsure (1)..(485): unsure at all n locations
tcttgctgtatatcagtgaggaatgcattttcaagtggtataatggtgatgaactaagtgggctgaagcaccaactggagggtcaacctgcttgtaattataaagatgagagaattgttaggagaaattcagttataaaatctctactatctattaagtaagcaatagtagtctgccgttctgccctcctccgtttcgcgcgcagaanaaaaattaaaccatggttgctcaggaatcgaaccttggatctactaagcagaatacctagccttccaccctctagccaacatgactcatgttgaattgtgtacaatttcaactaagacgtctttntgtgtttaacccgccgtccactctgtatgctcactgagtctagaaaaacatttatagcttagcccctgatctttctggaatttgggacgcagtccacgaaataaagaanatagggaaaatgaatttagaaattgattttagttaaaaataat

SEQ ID NO: 61831 - DNA, 387 bp, Zea mays
gcatgtcacgcctggaagcaagttggaacccaacattcacactagaacatcatgacgaccgacaggccgcttgagctacttcacatggatctattccgcccgattgcttacataagcatcggcgggagtaagaatagtcttgttatagtggatgattattctcgcttcacttgggtgttatttttgcaggaataatctcaaacccaagagaccttacagggattcttgagacgggctcataatgagttcggcttaaggatcatgaatattacaagcgactacggtacggagttcaagaacttctcaattgatggctaccttgatgacgagggcatagagcatgagttctattctacctacactccacaacataatggtgtcatagag

SEQ ID NO: 61832 - DNA, 477 bp, Zea mays
tctaaagggagaacacgtgataggtttgactaacgtgcaatttgaaaaagatagaccttgtgcagcttgtcaagcaggcaaacaagtgggaggagcgcatcacagcaagaatgtgatgaccacatcaagacccctggagctgctacatatggacctcttcggacccgtcgcctatctaagcatagggggaagtaagtatggtttagttattgtggatgactattcccgcttcacttggatattctttttgcaggataagtctgaaacccaagggaccctcaagcgcttcctaaggagagctcaaaatgagtttgagctcaaggtgaagaagataaggagcgacaacgggtccgagttcaagaaccttcaagtggaggaatttcttgaggaggaagggatcaagcatgagttctccactccctacacaccacaacaaaatggtgtggtagagaggaagaacaggacgctcatcgatat

SEQ ID NO: 61833 - DNA, 453 bp, Zea mays
  unsure (1)..(453): unsure at all n locations
tcagcttagacttagagacaagatactgggctggttaattatttgccttctaatatctcatgcacaagcgccgcactcactgcagagtgcgaagctgccacatataatagtaacagagcccctggcgcaggtggagttaatgttgttagatcaatcatgtattgcttcagctcttcgaaggttatctgttgagctgggccccactgaaagacttctgctgactttagtatttcaaagaatggcaagattntttctgctgatctagatataaatctgttcaatgaagccaatctttctgccaaccattgggcccccttctttgtacttggcggatccattcaaagtatggcttcgatattgtatggattggcttcgatcctcttcgttgaaactatgcaaccaaggaacttacccttctttacttcaaagacacattatttatgatnntaattt

SEQ ID NO: 61834 - DNA, 249 bp, Zea mays
cttctgtgcttggacagtctatgactctctgcttggatcgttttttataaccaagcgacttggcgcggttcattttgttcttagtatgtttacatgtttctgattctgaactttccatggtgcgtttcgcacaaatcctggattaaacaccatgatggtgaatttctcggggggcggggggcagcaacttgcccccccagttttacgatatttattattgagcatttccctcaggacagttctattctt

SEQ ID NO: 61835 - DNA, 477 bp, Zea mays
  unsure (1)..(477): unsure at all n locations
gatctcgcaacattatgaggcgtggtggcgagcattgtgatgcactatacacaagccgctgttgccttcctgtggccggnggcgcttattgcgctcgccccggccccctgtcgtggctactacaaccggggcggctgactgcggattctcatggccacagttcttcttctttttgccatcctaaacgatggcacccgagccacccgccggggctgccccggtctgtggcgccaagtgccacgcacgggccttagcagccctggcgcacttatcggtcaaagcgaagagagtggagacagattccacgtcgtgcgtggccaacttctccaacatcttttcatcacgcactctctggcggaaagctatgatgatggaagcatctgagatacgacggattgtcccacgtaccttggtgaagcgggaaatgaacgcccagagggtctcccccgcgttctgcctcactgcatggaggtgagc

SEQ ID NO: 61836 - DNA, 461 bp, Zea mays
  unsure (1)..(461): unsure at all n locations
ataccaaatggacgtgaagagtgccttcctaatggacttatcaggaagaggtctatgttgagcaacctcccggctctgaagacagtgagtatcctaaccatgtttataggctctctaatgcgctatatgggctcaagcaagccccaagagcatggtatgaatgcctaagagatttccttattgcaaatggcttcaaagtcggcaaggccgatcctactttattcactaaaactcttgacaatgatttgtttgtatgccaaatttatgttgatgatattatatttgggtctactaacgaatctacttgtgaagaatttagtatgatcatgacacagaaattccagatgtctatgatggtggagttgaagtattttctangatttcatgtcaagcaactccaagaatgcaccttcattatccaaacgaagtatactcaagacattctaaccacgttcggaatg

SEQ ID NO: 61837 - DNA, 461 bp, Zea mays
tttgtgaattggcgctactcctagctgatcgtgtatgttcatcgtactcactcggaccaatcttgtgtcccaacatatccaatgcaatatacgcatctctacaacacttagttattggtaggggtggataacgagccagctcggctcggctcgttaagctaacgagccacagagtcagctcggctcggctcgtttacgagcttgagctggcttgtttagctcgcgagccagagcagaaaaaaattatatgtacataataattattttttagttaatttcaaactaatttaacaatagaaaatagtaattatactcatagtttcacaaaccacgtcaatgtaacaccaaattagcataattcatcactccttaattcacaattcacgtacatcttcatcagtttaacccataattatattcgcatagaccaaattaacacatagatatagtcattaatcatt

SEQ ID NO: 61838 - DNA, 347 bp, Zea mays
  unsure (1)..(347): unsure at all n locations
ttctgcgtctgagggcacaggcgccaacagtgcccaatgaaattgtcattgaggccatgattaatggactccggccaggaccttcagcgcaatactttgccaggaagccaccacaaactttggagaagctgctcctgaagatggacgagtatattcgagctgacaatgacttcttgccaagaagggaggaggcattcatgttctctgaaatggccaggggcttctgaggaagatatcatccgaggcacgtcaggtcaattcataattccactcaaagtgatgatagagggagccaacagcaaaggccacaatactcttcgcaagcttcggngcaacagcaaagctct

SEQ ID NO: 61839 - DNA, 401 bp, Zea mays
  unsure (1)..(401): unsure at all n locations
tcaggagtttgacttcccaccttatcatgggctgggcaatggtaccgctgcttacgggtgggactatgggatcggaggttttcttatcgtgagaaggtcacattctattttaagcagaatatccgggatctgtctacccccacagatcgttttttctttcaaatccattaatcatttaaattagatgctggaatcagaaatagaactccacgtagttccaggctagtcatgtacccaatacagagttcacataatttcaggacttctcatgcaataataaatgggactggagaatgaggacattcaaatcatgtgtgcataagattagccattaaaacactantattgtaattaatgagaaggtaaccagcagagaagtctacattatgtggaactatatt

SEQ ID NO: 61840 - DNA, 381 bp, Zea mays
taagctttgtatccactagcatatgcttagtagattatttatattatccagaagccagaccaactacccaaaaatgcaatcgtatttacaagcataataacttaagacatgttactaactcttaccgggcgcaaggtggcctaaggactcatgcacaatgggagacgaattattcctcccgtgatgatggacttgctacagacaaattacagctcggcttatataaatgacttaggtggtcagctcttgaaaaaattctcccttgactgataagccaaccgacaaactgtggtagagaaaattctgacgcttatatacatttgcggacatatattgacactcaggtcgtgtgtctcacatagaacaatcctcaattgaaaa

SEQ ID NO: 61841 - DNA, 482 bp, Zea mays
  unsure (1)..(482): unsure at all n locations
ntaccttgattcccaatagccagcatatccttgagagttttattttttagacgcggaagacttgcgaacgtacactttttactaagggttttcgaacccatgtagttgcaggtactaagtttgtgctgctatggatggtgttaaccgccggtgggcacgaccttcttataagtctaagtacctctattatacttcttgttgaggattgtcactaagctagcatatatttcaaacttataaataatttataacacttcaaagtttattcctttgaaacacttttgtaccactccgataaacataatgtaaatttggtgtaacttgtaagttttttgtaataaagaaattccgctgctaaacgttagtgtgtgatttgtgatacttaatcttgtggtcctggttgtaagtggattatccggtgtccatgggacactcagacggatcctgttaagttatcttgtgcacatgcatagacgtctgac

SEQ ID NO: 61842 - DNA, 360 bp, Zea mays
  unsure (1)..(360): unsure at all n locations
cacgctatttaaaaccaacttcttgcattcgctacaacttggaccaattgctcctaaaattgctaggcatcattagtcaaaacatcgcaaccatatgtgtacgatctacgtacgtttatacacacaccgccattctggctataacccccaagttaatacttgatctcttgccttgaaaagaggatagagttctatagacccatgctttggtagctttctcagtaacatagagcatacaagccccgctagtgagcttaaccacaagataaacacacttgtttttgtgtctaaccattcgtgtggngctacactattgtgttggttgtgtacttacgtatggctaccgaactacacatatat

SEQ ID NO: 61843 - DNA, 448 bp, Zea mays
  unsure (1)..(448): unsure at all n locations
actagcttcagcctcgacctgcaaacttaccgttgctctattcaccctcgccggacttcggacgcccgcccccgcacgtggactgggcactccggtgagccattcttcaatatctcgcgcataccccttccttgatccctggtgaagctctctgacccgtttgattggtcaattgtgccctggataaaccggacgtctcgccgccgacgagctcccccgccttcgcacgcggaccagccaactccgaccatccccgacggcgacccgcacatcgccgtgaccctcaggaccttccctacaccctcggccacctcaccggagcaatctcgctgccggtaagcccctccgccctttctttcgccgcnggtactgtttaatttgcgggaaggacctctggttaagattagaagaatccagcgtggtttctgagatgtcagngactcaattg

SEQ ID NO: 61844 - DNA, 368 bp, Zea mays
  unsure (1)..(368): unsure at all n locations
gcaattttttcaaggtctgagggggtttcctggcgaaatattggaccgaatgtcctggccgaagcccctctatcatggcctcaatgacaatctcattgggcactgttggcgcttgtgccctcaaacgcaagaacctatcaacatacgcctgaaggtattcctcgagatcctgtgtgcactggaacaaagcttgagcattaaccggctttctcttgaacccttggaaactagtgatcagcatgttcttcagcttctgccatgatgtaattgttcctggccgaagagaggagtactcatgttgtgcaacantttngaccaccatgactaaggaattcgccatgactgcggtgtgccaccatatgaagata

SEQ ID NO: 61845 - DNA, 435 bp, Zea mays
actaagctatgaaatcttatccaacatgggctattctttggtgttctagccaacccatgttagtcttagcaatcaagcaagtgtcgagttcagctctatcaaaatccaccaagtatagctgaccctctaacactcccttaaatgctattgaatcatcacttcttctaaagacagtgacacctatatcagtgaatagacagttgtagcccatttgacataattgagatacggaaagcaaattgtaatctaatgaatcaacaagaaaaacattggaaatagtatggtcaggtgatatagcaattttacccaatcctttgaccataccttgatttccatccccgaatgtgatagctcgttggggatcttggtttctctcatatgaggagaagcatcttttcttccctgtcatgtggtttgtgcacccgctgtcgagta

SEQ ID NO: 61846 - DNA, 486 bp, Zea mays
  unsure (1)..(486): unsure at all n locations
tactccccctgtgaagggccattcatcatcgccaagattttgtatcccgggacatacaagctggccaacgatcaaggtgaggtctacaacaacgcttggaacattcaacagctatgtncgttttacccttaaaatgtttcaagtcgttcatgtatctcgcttttctctacatgcataagcaaagtctaaccatcaaggaaggatcagccttgcctcggcaaagcccgaccctccttcgggggctagaaggggggcaccccctctgcgtcaaaattttcctcagaaaagtcttttactagaacgtctttcgtgcttttcgactatgtcgataacaaaatcctaaagacgagcgagagagaccttgaatggcaaggccgaccgagccgaggaactcctacgcctctaggatacggatacctcactcatcaccttccgcgaanagtagctcacgctcggataagcgattctgctaccgaacaagtccta

SEQ ID NO: 61847 - DNA, 446 bp, Zea mays
  unsure (1)..(446): unsure at all n locations
tcttgatggcctcacaagatgaattgtcatttcatgcaatattttagagatatgcccttgcgagccattagattcatcaaatgtcacatctaccgctatttcaacaagaccagtggtattgttgaaaacacgatatccgtgcgcatttgatgcatagccaagcaagaaaccctcgttcactttagaagcaaactttgagctcttgactttcttcttaagaataaaacatctacaaccaaaaactctaaattaaacaactttaggtttgttaccagtgagaagttcgtaagcagtcttcttatatatcttgtgaaggtataggaggttgattgcatgacanagcggtgtgaccgcctctgtccagaagttgtcaggtgtcttatattcatctaacatagttcttgtggcttcaataagtgtttgggtctttctctccacaacaccat

SEQ ID NO: 61848 - DNA, 472 bp, Zea mays
  unsure (1)..(472): unsure at all n locations
tcggtggaagattcaactcccaaccaagaaggttggtttgtttattctgtggagaagataagggacatacaacaaggacatgccaagtcacgatccagaagcagaaagaaatagctgaagctgaagcacgagagaatcagcctaagcaggtcctacataccgcttcgtgctattccccatacatccccgagtatgtgggcaaccagcggtccacatcatcagttgcttcggcaagccactcacaagctgcatggaccccgctaccaccaccaccacccatggctccaatcttgtctcacaatcagcagtcagaaggacaccgccaggcacaatagtgtgatacatgtgaagagtctgaagctcggatagcaacaacactgtgccagagtcgagacacatttactaaaacaatatagggggctcaataacaaaattcatattcaatggtaatcttgcttntcttatctttatg

SEQ ID NO: 61849 - DNA, 468 bp, Zea mays
  unsure (1)..(468): unsure at all n locations
tcgtcttgaccatgcttctgtatacccgcaacctgattcctaagatacctgcttgcatacttagaaaacattgtcaaatcacgttnttgaggaccttcggaagccgaaggcccccaacagtagcccctcgcaatattaatttgctgtaatgataaattcatattgcgatatggacgaaagccttaagccgaaggtccgaanaaacaccttctctttgctagaatagcaacagtctttgacaagcaggaccctccagtttcaacgctctatgcgtataaataagagctcatcccgagtttatttggtacgctctcttgccaattgcttttactcacccaacttttagcctacgcgcaacaacacttgcttggccttttagaatttaaagcttcggtttagagagcactttctcagcgtttgcaaggatgtctgaagataaaaaagctgtggtgattcgagctaagtctt

SEQ ID NO: 61850 - DNA, 371 bp, Zea mays
aagaagatgctcctcgacgaataaagggcacgtggcctgaatagatacccgaagcggtctgggcgctaaacacgactaaatgcaaggcgactgggatcaccccttatccgacatcaatatggaacaggaggccaatggccccacaaaaaataaaacatgggtacccacggacagacacgtcagctgaccccgacgtggacgaacccacttcgaaggaactcatcgatggagaccgcgacttcgccctacaagctcttaataaataccaagctcagaccaaagcattgcgcgaccacgcagtcatcccgagtgaaatcagcaaacgggacctcgtacacgaccgaacagctctgacagagaccacgggcaag

SEQ ID NO: 61851 - DNA, 475 bp, Zea mays
tctaatggagaacacacgatacgattgactaacttttattttctatgaacgaacacactgtgcagcgtgtatagcatgtaaacaagtgggacgagcgcatcacggcaagaacgtgatgaccacttcaagacccctggagctgctgcatatggacctcttctgacctgtcgcctatctgagcataagatgaagtaagtatggattacttattgttgatgatttattccgcttcacttgggtgatctttttgcaggataagtctgatacccaatggaccctcaagcgctttctcacgagagctcataatgagtttgagctcaaggtgaagaatataatgagcgactacgggtccgaatacaagatccttcaagtggaggaatttcttgaggaggaatggatcaagcacgagatctctcgttcctacacaccacaacataatggtgtggtagagagaatgaacaggacgctattctat

SEQ ID NO: 61852 - DNA, 468 bp, Zea mays
  unsure (1)..(468): unsure at all n locations
tgaagctgatatcagcggctaccaacgacaacatatcatctgcagtttgttttactccaacttcgaggtaaaattctactatctgaatttcttttatttttgtgatgaagcaaggttttttgatgtcggcttatctctatagagcatgctgctgagtaaggcgctgagaatgcaacaagacctaatgaaatcataattgagggcttggaaagcaaaattaaagattacgaagcctcgcttgaaaagaaagacttcctgcttcaggcaacggagggctccctcgtagagcttcaaactgaaaatgccagattaaccaaggagcttctccaggctcaagaaattttaaagaaaaattcagaatgcttcgagcaagagaaacaagaactgcangcaaaatgcatagccgaagctgataacgattcgaagctgcagaagtctttgaaagagcttcanaataagtgtctagaa

SEQ ID NO: 61853 - DNA, 427 bp, Zea mays
ttgacttgtgggcctgccggggtgtccggtgcactattgacatgcactggttgatgtccggtgcaccggtatgggcagccctgacgtatgcgcgcgctgcgcgcgcatttaatgctccgcatggagccgttggcgccgcagagagccgatgctccgctggcacaccggacagtccggtgcacaccggacagtccggtgaattatagcggagcggctgtcgtgaaaacccgatgatgacgagttccggaggccgcggttcgttggcgcaccggacatgttcggtgcacaccggacagtccggtgaattatagcgcgccggccttcgcgaattcccaagggcgaagggttgaagtcgaagtcctctggcgaatggtagaatacgaagtctactggcgcaacggacactgttcggtgcacaccggacagt

SEQ ID NO: 61854 - DNA, 381 bp, Zea mays
  unsure (1)..(381): unsure at all n locations
tcagctcgtcattcttcggcttcatcatcctgtacatattatatctgaatgagaaaggtgcaaaattcaacgagaaggttaaagtaacaagtataagtttctcaccggcttaaggtggctccgagcttcgtcaccagccatttttcgcccaccgtttattcaaatctgggtcataaacctgtttcctatgcttcgggctaagcttgggatgtcaaccaaatatgtcggtgacaagctgaagtttggcctatttacaatttttccgtgcgtgcagccagccttcatgaaagaggtagctgtgcctcgagaagctagcanggcgcagaaatcaacatgcccagcaataacttcgtcaagtgcatcaactttcccctcaatgta

SEQ ID NO: 61855 - DNA, 451 bp, Zea mays
  unsure (1)..(451): unsure at all n locations
actcagctcgcctttaaaataaaggtgcttcttattttattctaatgtaacataacacccttctatggtaattcatttagtgagagtacaatgaagttggcaatgatgggtttgcctcgtgccgatgacgacgacgacgagttgcagcccgcaatgcgtgcttccagagaggagaaactcacgaggcatgctcgtgcgaatggtggcatgtatgagacaggtggtggctcctcccataagcggtgttcatggcatgtttgggagaactccctctatgaaggagaagccacacatgatccagccaaggattgataagggcccgtttccaaggcagganagaatgtggtccatttcattggtagcaataagctaagtagttntatgttgaggcaattacagtgcataaagctaacgatccatatttcattaacacatttatagatacaaaaca

SEQ ID NO: 61856 - DNA, 378 bp, Zea mays
tgggataaatagctgcggagacaatggaagctgcaaaagaatcctacggaacgaggcaagtcgggctgcaactggaacctgcaagagaagaagattgcgaagtgtgctggctactgtctgacagcgtaacggcaagtgacacgtgccgatggcgctggtgtcctagagggaggggagctggccagtcatggctggagtactgacctggaggcaacagacgagtgacgaatgccctgcaccgagatgtacttctgacctcatcatcacgggtagcatgatccaccatctgcgtgagactaccggtgagcaaagaacacgcacatacgccctctatatctcactcatttcgagagggaatgagaaagcacaatacacacg

SEQ ID NO: 61857 - DNA, 475 bp, Zea mays
  unsure (1)..(475): unsure at all n locations
gcatacggacacttaaaactcaagcttagctgattagagtcccttgttggattatccccaggtttatctnttccatctcttgacacacagtgttgtcagaggtcttcaccataagacagtggcaggaagccttacggctcagtgcatctgccaccacattggctctgcctgcgtgataatggatctccagttcatagtccttaataagctcaagccatcgtctttgcctcatatttaattctgactgggtgaaaatgtacttcaaacttttatgatctgtatatatgtgacagatatttcccaccagatagtgacgccaaattttcagggcatgaaccacagcagctagctccagatcatgagttgggtaatgctcctcatgtcggcgcaactgccttgaagcatatgcaattactcggacctcttgcattaatacacagccgagtccactggctgacgcatcacaatatacatc

SEQ ID NO: 61858 - DNA, 432 bp, Zea mays
  unsure (1)..(432): unsure at all n locations
tctccgncgacgagaccgtcagcgccacccgcggacctacctatggctcattggctataatatctggttctcgtccctcgagtggggacgcaaacgagggccttccagcggtagcgtcctccctaggaccatcgctgctgctgcagaggtcaccagcgagtcacccggagtttgtcgtcccacaggctctccgatgtggaggttgttcatacccgcgggagtggaaccggagttccgtttgtaatggcaccttgagtgccggtgtatgttcattgtggctgtcggggcctgaacatctaggtattatgggtataataccgtgtttcttcctcatttcgaccaccaggtctcgcctgtcggctagctgaatcgcttaactaagtgtgagttgccctgagcggaacgtgacgagtgaggtatccgtatcccgga

SEQ ID NO: 61859 - DNA, 472 bp, Zea mays
  unsure (1)..(472): unsure at all n locations
tgagaagcagaagtctttgaagtcctggctgttttattgtatgctgatgacaactgtgagctcggacgggactccgaatcggcaaacaatgttttgccagaagaatatctgggcagtcttcgatgttatcgtggatactgccatcgcctcgatccacttggtaaaatactcaacggcgacgaaggtcaactatatggcggaactgcccgaattattccaacttaagtgcctaagtcctgcctcataggctagaccacacttaaatgggaataacccgtcaatccctcggatctagtccgacaaggccactgacaggatcaagtaccacaatctcactcgacggtgagtcacagagcanatacaataaagcataaaaccatacattaaggagtattaacttattacatcatcatcgggtttcagcaaaagtagtcatcattgttcgaagtgcagcataataaaactaatgata

SEQ ID NO: 61860 - DNA, 486 bp, Zea mays
ggcttcggccgaggcggtccttgtattatcaatggagatgtagtttctgcctgtgccaaggttttaacatgttcacatcctaccttctccagaacggctgcaactcccctagcaccagagaaagcacagacgtccccgcggtcactcaaaatctcctcaaaggcttggtcttcgctgctgatccactcgattacgccctcaggatcgcccaaaatgaagttgtcttcgcttgagtacgcgcccacgttggcgaagctagtctttatcttttttacgcactccacaaatttttcaaaacatctctcttttgatgcgcgaagctctgcaactgttttttcacaatattatttccagtaatcactggcatctcgttcagcttcggcaacaacgcattataatttggcttcagccagttgtttccgaaggtcttcaatatcacatttcgcttcagctcgggccttggaagatcctcgtcttctttaattt

SEQ ID NO: 61861 - DNA, 433 bp, Zea mays
  unsure (1)..(433): unsure at all n locations
tcgcacctctgaactaactcggctgcatcacttatcgctgttggtcaatanaatcccgacctgatgtcacacccggctttaaggaacaaagccaggtgcatctcatacatgcgccaagaagacaacatatataataacagagtgtatagagataaatgtcatacaacatcagagtatttattacatagcggaagacttattacaaaataaaagataaaagtaaaacgaactaaggatcgtcggcgccaatgtcaactgagaaacgccacctagatcagatcatactcctcgccttgtggctcctcctgaaccacctgctcttatactgtggnggggtgtgagacagcaagagtgagctcacacatgatcatcgctcaacaagttgtggggaataatgtgacatgaactcaccanaggtgggagctcatggagt

SEQ ID NO: 61862 - DNA, 464 bp, Zea mays
  unsure (1)..(464): unsure at all n locations
actaagctagtccgcttggccgatttacanagcttttagaatgtattgagccttcgtcagaggagaaacctgctgggcagaaaaaacgaaggattattcacgtggccgaagtcattcatcagacaccttcgcaggcgtcggtgccgaagataccagatattgttagcactgctgcctccgaagccacagcaaccgaagctgaaggtgccgaagctgaagataccgaagctgaaggtgccaaagatgtgaatctggaggccgcacttgctgaaattgataccatgcttctgggtgcgatcgcagaagaaactgccgcagctgctgaaaaaggaaaaggtaaagccgaagacatattctaagaggaggagtttaattttcaagatatacttgggcaagagttatcaaaagatgaataagaagaactgaagaaatatgctatatcttgtggatacaaacacggagct

SEQ ID NO: 61863 - DNA, 489 bp, Zea mays
  unsure (1)..(489): unsure at all n locations
ntccaagaagggcatgagcaaaattcatggtaagattatttatgctcatactatntgctctaacaatgtacctatgtgcttcaacaaagaaagatcaaagagaagcgatagaaggtgctatggatgcaaggagaagggtcatgaaattgattcatgcccccacatgaagaaccaaaaccttgcacgatcaagaaagatgaccatcaaaaaggatgaaagcaaaaggcaaatgcattgtcaggacaagcaccacatttgttacaattgccgtganaagggtcatctattcaaggtttgtccaaagggtaaaactcctaagcctaacttggcaatacattcaaatatgcttaggagacccaaatttgactcttgtgctagaaaggtgatgagttcaccacattctaggaccaaggctatntgggtgcctaagtccttattggctagccttgatggacccatcatgagatgggtaccaaaatgtacttaata

SEQ ID NO: 61864 - DNA, 416 bp, Zea mays
gaagaggccggtctatatgcattcttaattgctaagactagcatgggctggttgtggcatcgccgcttaacacatgtggggatgaagaaccttcacaagcttctaaagggagaacacgtgataggtttgactaacgtacaattcgaaaaagatagaccgtgtgcagcttgtcaggcaggtaaacaggtgggaggagcgcatcacagcaagaatgtgatgaccacatcaagacccctcgagctgctacatatggacctcttcggacccgtcgcctatctaagcataggaggaagtaagtatggtttagttattgttgatgacttttctcgcttcacttgggtgttctttatgcaggataagtctgaaacccaatggaccctcaagcgctttctaaggagagctcaaaatgagtttga

SEQ ID NO: 61865 - DNA, 353 bp, Zea mays
aactagcttcctgttcaaagccgcgatccttattatgtttttcttctttgataggtaagacttgcgaaagtacactccgttctcacggttttcgaacccatgttgttgtatgtgatgaaatagctgagttctgttgtttctgcaccaaggtggtgcccaagcacgaggaagaacactaaacttatttggggatgatgttttgcctcctaacaatgtaataataatattcgcactcgaaaacccggttatataatatttactctttctatattcttatatgaatgtaagttatattatcgtaatcttggtcgctcattctctactccaattatgtgtaatgtctgcgtgatggg

SEQ ID NO: 61866 - DNA, 415 bp, Zea mays
  unsure (1)..(415): unsure at all n locations
cattacggacctataaaactaagcttcttgaactgctgaaagcctcgagagtatcatttatgcattatataagccgatacgtattttgccaacaattgacaaatctacgcacattcttagtcattaaccaatcttgtatatgttttccgatactggtacgacaataattttatgagttgtacatatgatttttaaggcatataattgtacagttcaacgactaatggtcgcttnttattgaattgtttcacccaattccgacataaaattatgacgattaacaaacaattttatgattcacactagcatagcttacacgtatccacaacaacatccgctaattgtaactaccataaaaagatctcctaaatctatgcgcttgcacgatctgccgatctgggagcactgacgtggt

SEQ ID NO: 61867 - DNA, 460 bp, Zea mays
tgtaagcagtacgaccaattcgctgcagcactgtatattgttcgaaataccgaaaactgagtatgtggttggctcttgtagccactgaagactgaacatatagctgtagtttaaggaataccgaatctcccaccttgaactcacgatccgtccttcccttatcagcctgagccttagtccgttgttgagcccgtaagagatgttgcctgaccagcctcaccatcaattcacggtcttgcaaccaagactgaaggtccaaggaagaaggagcatcatttgcagtcaaaccaaaatgacgtggggcatacccatataacacttcaaaaggtgtcctgcccaatgaagaatgaatgctcgtattgaccaatattctgccagggataaccaagaatgccatattaaagggcatgcatgtacaaagctgcgaagaacatctcgagaatcggttgacacgtctgtc

SEQ ID NO: 61868 - DNA, 467 bp, Zea mays
tatgaagaatcttcatcccaacatgtgctagtcgacgatttctgagccagcccatgttagtcttagcaattaagcaagtgtcgagttcagctctatcaaaatctactaagtatagctgaccctctaacactcccttaaatgctattgaatcatcacttcttctaaagacagtaacacctacatcagtgaaaagacagttgtaacccattttgcatagttgagatacggaaagcaaattgtaatccaatgaatctacaagaaaaacattggaaatagaatggtcaggagatatagctattttaccaagacctttgaccaaaccttgatttccatccccgaatgtgatagctcgttggggatcttggtttttctcataggaggagaacatcttttcctcccctgtcatgtggtttgtgcacccgctatcgatgatccaacttgagcccctagatgcataaacctacaaa

SEQ ID NO: 61869 - DNA, 465 bp, Zea mays
  unsure (1)..(465): unsure at all n locations
ctataaatggacgtgaagagtgccttcctcaactgactctatcatgaagaggtctatgttgagctacctctcggctttgaagacagtgagtaccctaaccatgtctataggctctctaaggcgctttatgggctcaagcaagacccaagagcatggtatgaatgcctaaaagatttccatattgctaatggctttaaagtctgcaaggccgatcctactttatttactaagactcttgcaaatgatttgttcgtatgccaaatttatgttgatgatattatatttgggtctactaacgaatctatatgtgaggaatttagtaggatcatgacatagaaattctagatgtctatgatgggggagttgaagtatttattgggatttcaagtaaagcaacttcaggaaggcaccttcattatccaaacgaagattctcaagacattctanacaagtttgggatgaaag

SEQ ID NO: 61870 - DNA, 490 bp, Zea mays
  unsure (1)..(490): unsure at all n locations
ctaagcttctaagggagagcacattttaggattaacaaatgttcattttgttaaagacaggatntgtagcgcatgccaggcggngaagcaagttggagtccatcatccacacaagaacatcatgacgaccgacaggccgcttgagctactccacatggatctattcggcccgattgcttacataagcatcggcgggagtaagtattgtcttgtaatagtggatgattattctcgcttcacttgggtattctttttacaggaaaaatctcatacccaagagactttaaagggattcttgagacgggctcaaaatgagttcggcttaaggatcaagaaaatcagaagcgacaatgggacggagttcaagaattctcanattgaagggttccttgaggaggaaggcatcaagcatgagttctcttctccctacacaccatcaacaaatggtgtagtggagaggaagaatcngaactcttttgacatggcaaga

SEQ ID NO: 61871 - DNA, 329 bp, Zea mays
agctacaagaatttaaatcagatatggccatcctttttggaagatgtctcagggcttgtaaaaatcgctattgacttatataatgaaaatttcattcccctttgtgggatcctaaaaagatccgatggctattcttatgcgtatctcacagatgtcgcctttaatgcacttctttcaatacaaggattggtattgtacgtatccctggttgctatccaacatgcccaacagtctgggaagactcgttcgcgggaaacgacgatttgttttgaccataacagatttcaaactgcagccgaggtttcttgattcaccgcatcgttcgatac

SEQ ID NO: 61872 - DNA, 429 bp, Zea mays
  unsure (1)..(429): unsure at all n locations
ctcaactcttantgagaggaactatgagttgtgtgccttttatatgaagactcatttaaccagtgtacatcctagtatttgggacattgttaatatatgtatgaacaagcccactccacgagaagagatgacgccggaaatgatgcaagaagtgcatctcaatgctcaagtcatgagcattataaaaggaagcctatgttcacaagagttccataaagtccaagtaatagaagatgctcatgacatttggaatattctaaaaatgttacatgaaggagatcccaaagcttatagacatataattgatgctttggaaagtgagctcgcgagatacaattggactaatggtgagtctctccaaatactctttgatcggatgatgggcttggctacaaaataagagtactacgaagtgaagattggagtgac

SEQ ID NO: 61873 - DNA, 447 bp, Zea mays
tctcagcttctaagggagaacacattatgtgactaaccaatgtttatattgagaaagacagggtttatagcgcatgtcaagcatggaagcaagttggtgttcatcatccacacaagaacatcatgatgatcgacaggccacttgacctactccacatggatctattcgacccgattgcctacataagcatcgacaggagtaagtattgccttgtaattgtggatgattattctcgcttcacttgggtgttctttttgcaggagaaatcacacacccaagagaccttaaagggattcttgagacgggctcaaaatgagttctgcttaaggatcaaaaagattacatgcgacaacgggacggagttcaagaactctcaaatacagggctttcttgaggatgagggcatcaagcatgacttctcttcttcctacactaccacaacaaatg

SEQ ID NO: 61874 - DNA, 467 bp, Zea mays
cacacatttgaactaatgctcgggtatcttcttatatttacggacagactggaagactaatcaattctaaagatgtgttgcagcctgagcctagcaagacatgtcacgatgggacataaggttaccttatgcataatactcctataacaatagttaccaggccagcttgaagatgtcgccatttcaggcactctatgggcggagttgtatgactccgctgcattgtgaccagactgtagagagacaggtgtatggccccgacatcttattcgaagccgaagagaatatcaaaatggttcgggagaatctgaagatagcacagtcaagacagcgaagctatgcggaccgaaggagaagagaactgagtttctaagtgggagattacgactatctgaaggtgtcacctatcatgggagtacaaagttcggagtaatggcaagttagcaccccggtacgtcggaccatat

SEQ ID NO: 61875 - DNA, 448 bp, Zea mays
  unsure (1)..(448): unsure at all n locations
ccgcgagaccttttctcgtttctttctattatattgaangcgacatcgaatgtcatacttgatgcatatccactttatttgttcccttgtatgatgtactgtatgcttcccaatttgaatggatgtatgtatgtatgcttgcaatcgcatatagaacgatccggttgaagagcccgaggaactcgcatgagaagcccctgagcagcagtctgttggtggaggcaagtgtcccttgacctatctatgtcctattcattatttaattcacctcccgctgtatacatttatgcctaaggattgactagttntgttatccctgtccttgcttacctaattgggttggattattattgtttagctntatgctattgctcaaccataatcaatgaacatgatgagaatatctatgatacgctgttttccctcttcttattatgaatgtatactt

SEQ ID NO: 61876 - DNA, 459 bp, Zea mays
  unsure (1)..(459): unsure at all n locations
tcttaccccaacatgtgctagacgacggtgtatattcagcccacantagtcttagcgagtaagcgtgcatctagatcggcattctcttctgagaaatcaactaagtagagcttgccatctaatacacccttaaaagctaatgaaccatcacttcttctaaagacaaaaacatcaatatttgtaaataagcaattattacccatatgacataattgtcttacagacaacaaattgtacccgagtgattctactagaaacacatttgaaatcgaatgctcggttgtgatggctattttgcctaagcccttgaccttgccttggttcccatctccaaagaagatagtggtttgggaatccctattcttgacataggacgtgaacattttcttctccctcgtcatgtggattgtgcattcgctatcaatgaaccagctcgagccctccgatgcataaacctgc

SEQ ID NO: 61877 - DNA, 408 bp, Zea mays
  unsure (1)..(408): unsure at all n locations
tgaagtatatcttcacccagtcagaattgaacattatatattgcgatggctcgagcttattaaggactatgaattggaaatgcattatcacccaggcaaggccaatgtggtagcagatgcactcagccataaggctacctgtcactgtcttacgataaagacttctgatactacgttatgccacgagatggagaagttaaacctgtgaatgatccaacatggaaccttanatcaactacagcttgagtcagtccttttacaacggataatggatgctcaaaaggataatgagggtatgaaacacatccgtgagaaaatagaggccgaaagagccagatgtttctgacaagacgatcaaggcattatatggtttaacaaccgcatagttgtgctaaagaatgaagtgat

SEQ ID NO: 61878 - DNA, 360 bp, Zea mays
ccaccgatccagacttgtccatctggaacatgtaacactttgagacttgaaccatgccccacaaatgaatagtgattataatttatgacggacatgcacacacgcccgtcgctgctatgctgggcgtacaagcagccgcagtgaacgaacatatatggcatcgatcgcgcgaccggctagatctgtcgtcgttggtcaaccaccgacttcgtctcgcgtacagtgtcggctcccctccctggtatgcggcattgttctgtcaatgctgatgtcaaatggcgcgctattgacgcgaaaagtgcataaagtctgatctccaaactgtcgaaagatgaggtatctctctggggccgtgatgtg

SEQ ID NO: 61879 - DNA, 231 bp, Zea mays
  unsure (1)..(231): unsure at all n locations
taagcatgtgtcgagttcagctctatcaanatctaccaagtatagctgaccctctagcacaccctctaaggctattgaatcatcacttcttctaaagacagtgacacctatatcagtaaagagacagctgtagcccactttgcatacgtgagatacagaaagcagattgttatctaatgaatcaacaagataaacatttgacatggaatggcatgcgatatagtctattta

SEQ ID NO: 61880 - DNA, 214 bp, Zea mays
acagtatctggtcacagaagacatccacccaaccaccctctggagcattagtattatccgaactagagctgttcaatcaggaggtaaaatgtgtacatctgaaactctcgatacaagattatttgcttcacataaatgccaatcaaacagagccttagcgctaattggaaaaacgacccaattccaatatctacgctcttgcactgtcgcggac

SEQ ID NO: 61881 - DNA, 193 bp, Zea mays
  unsure (1)..(193): unsure at all n locations
acccatcatccacacaagaacatcatgatgaccgacattgccgttgagctactccacatggatctattcggcccgatagcttacataagcatcggcgggagtaagtatntgctcgtaatagtggatgattattctcgcttcacttccgtagttcttttgcaggagagatctcaaacccaagagatcttaaagg

SEQ ID NO: 61882 - DNA, 345 bp, Zea mays
tactccacatggattattcggctaatgctacatagcatggcggagtagactgttattatgggagatatctcctcacttggattctttgcagaaatccaacccagagacttaaaggattttgaaccgctcaaatgatctgatgaaataagagatataacgatatggatgagtcagactctatcgtgctttgagagagctcacatatcttctctccattacaatgggaggaagaaataacttatgcatgtagcctctgtatcaaccaacgattggcaaatacatgtgtctctaatgttactctgatctagaaattatatctatgtaaccagtctttaagttgaaagt

SEQ ID NO: 61883 - DNA, 230 bp, Zea mays
  unsure (1)..(230): unsure at all n locations
tgcagcttagtctcgtcccctcacgctcaaccctgcagtagaacgcactctgttcatntaatatgaacttgtgngaacgtaatactntcttcctccgaagcangtatcanactggagcttcgttcgattccgacagacaagcttcggcgacnggtannaaatttggcagcanaacagtgcanatagcaatgaatgctgtggtaacttcacacctactcgtctctttatat

SEQ ID NO: 61884 - DNA, 273 bp, Zea mays
tgtgctattccctcaagcaacatgttgagaagcttgtcactcacaataattgtgatcaacttgctttgggcttccaagtaaatgcatgggataaaagggcggccttaaactgatctcaagtatttctggcatgtgacagagtgcaacaagaacccaactgaaaaaccgaccagtcaagctgactttttaagttttgcaaatatcacagaaaacaccctgtcgttccatccacaagggtgcttcttcgagattttgaaataaacgcttgtgact

SEQ ID NO: 61885 - DNA, 194 bp, Zea mays
  unsure (1)..(194): unsure at all n locations
catgtatcgctatggctgatgccnctttactttggacctatgagactgctacatgtctcacacggtagatatttctgattatcaagttataagtatagatataaatggtttattcctataatgctagagccgatggagaatcngcttattctatataaagttatatgatgagtcacacataatgaacatgtgtc

SEQ ID NO: 61886 - DNA, 125 bp, Zea mays
ctccgacaatgaaggactcgtctgcaccgccttcaacaagtcattccttctcctcaacgagcgtcacacatgccttatggcaagggagaagaaggatgtactcgaactctcttatgctcttcaag

SEQ ID NO: 61887 - DNA, 135 bp, Zea mays
  unsure (1)..(135): unsure at all n locations
tcttccactgagtggtgacttcactgaaccttatacatnctgatcgacctcgcccgtgttgatctctcattatgatccactaccttgatggagtgctctcgatacgataagtctggttctatcttcaattctggt

SEQ ID NO: 61888 - DNA, 166 bp, Zea mays
  unsure (1)..(166): unsure at all n locations
cacacattgtgagtgtatagatggcgagagtagcgtgtaccctccgtggcaagaggctagacggtggtgtatctgtgctctcggntggcgtgaaccccgtctagtcttaagaaacccggtggcgagttgacatatgcaagggttaagtgctacatatgtcgtgtga

SEQ ID NO: 61889 - DNA, 249 bp, Zea mays
  unsure (1)..(249): unsure at all n locations
gcatgcatctagaccggcctcctctttttgcaaatcaactaaataaagtttgccgtctagtacacccttannagctagtgaaccatcacatcttctanagacagacacatctacattagtgaatagacaaatatatcccatattgcataatngactaacagataacannatatatccaagcgactcaactaagaacacattatatatagagtgctgagaatgaaatagcaatttacctaaccctttacc

SEQ ID NO: 61890 - DNA, 321 bp, Zea mays
  unsure (1)..(321): unsure at all n locations
agcaccgagctcagcttataatgacgtataggcctcctatggccatcacgatagtcttgtgacacctccacttgagatggagacctacctgttataactctctagccttatggctcagcagcccaagacatggttaatgcctaaaatttttattgtaatggttcaagcggaaagccgacctactctttactatacaatgcaatgattgttgatgccaatatgtgagaatcatattggcactacaatctactggaaagttagangatatgatcataatcgtatgtttgatgggagtgatacttttagattaaggaacactca

SEQ ID NO: 61891 - DNA, 107 bp, Zea mays
acaatctagtagtacagtacacaggtcagtttctcactttcagtaaatacacaattctcattcatcaatcaaggaacattatgaatagtaagtgtcaaatagaattc

SEQ ID NO: 61892 - DNA, 165 bp, Zea mays
  unsure (1)..(165): unsure at all n locations
caccacaccatgctcatcttgnttgttgcgaaagacccactctgttcctacaantatttggttaggacgtggaactaaatgccatacctctgtcctagtgaagttggtgagctcctcttgcatagccaccacccaatacgaatcttgtagtgcttcctctaccct

SEQ ID NO: 61893 - DNA, 345 bp, Zea mays
gtactgagctcagctgctgtgctcaatgttcactctgctttgcttgtctaccatgctcaagatgccctttatgatggaatgcattgaacctgcagtcaaggaagtggttgttaatgaaatactctgtgcaatataatggtcagcttgagcaccccggattgtgggactatcaagtgaaacatacataatttccttgccccggaagaaagtgaaagattgagctagttgtttctgatttgttccgtgagctggcaaagaattgtttcatccttactgccaagaagaataagtgactacgcgatctttttgaaagtgttatgcgtcaaagttaaataatatggctgc

SEQ ID NO: 61894 - DNA, 244 bp, Zea mays
  unsure (1)..(244): unsure at all n locations
ttctgagtgtctgctttcagttctttcgtctgactggcacacaagctgatggagcagatatcatctcatgacactctggttctctgggctggatcttggatgttcttcttgaaacttgaattatcactgcagtgctttgatgaagaattgctttagtgtcttgggaacatttgctgttatccaaaataaacccgtctctgtttgagttacttcgttgctgacgcacangattctttctcacaca

SEQ ID NO: 61895 - DNA, 155 bp, Zea mays
  unsure (1)..(155): unsure at all n locations
tgctatgagtccagatggcacatgtggcggtctgggacccgcttgcggtggtctatacatcatacgttgaggcttaagaaccacctgttggtgccagacttatagtagtagtcagtggacaattcacccctangacaatancaacaccggaccta

SEQ ID NO: 61896 - DNA, 175 bp, Zea mays
  unsure (1)..(175): unsure at all n locations
atttgatctgcgtctagttgtcaaaacatatacaagtgagaagactgttctgctgaggctcagaactcgatatttacttcactaatgncttttaaccttgaaaattatagaaccaaacccacgaagattggaaatggctgccagctaatgaatttgattcaatatgtcatagatc

SEQ ID NO: 61897 - DNA, 299 bp, Zea mays
tttttggtttgttccctctgacccattatgtaattacctactccaggtttattgcaaaatgcatatcatacaacctgttgaactttgctaggaagcttctaggttaaacacatgaatgctagctatgatgttctcagttataacgaacccagggtgtacacacatggcactgcacactgcgcacacgcggagcatgcgcaggcacacacatgcactgcgtgacgatggcacgtacgtgcgggaacgtatggctcaagcacgtacatgcaacacacactgacgcatgacatgcacacgaa

SEQ ID NO: 61898 - DNA, 341 bp, Zea mays
ctgcctgcccgacgatacatcgctacgtttaaaccgcgcccgggcggtactcgccgttcatcgtgccaggcttcgcccggactcttgccttatgaaatccgcgggtggcgacagaccacacaccccgcgctggtcgggcaggatgtcacactcacgcgaccgacaccgcggaccgttgactccgcgcgtgacaccgcgacttatgccggaccacgctatttgcgggtcgtagcgcagaggggtaattagtagtcaggggttggctgtatgccagcatatgaccagctgttggaaagaagagaacccaggctacgaactgtttttcattcatatttctgtta

SEQ ID NO: 61899 - DNA, 189 bp, Zea mays
  unsure (1)..(189): unsure at all n locations
atatcaaccaaaatgtcatgcaatccatcctttctagccttcgtctgatagtgcagctcatgaactcagcaaaagctgttcgcanacggcttcaccgcttggcttngagggcccagatataaacgctaagcctaacgatagcgctaggagtcaactgatgaaagtagataccaaacctcttcagtacct

SEQ ID NO: 61900 - DNA, 232 bp, Zea mays
  unsure (1)..(232): unsure at all n locations
aaccccaagtattataccaaaaggtactcncttcaagaagaaatacaagaatctgtagttataatcaacatagaggtatccataatatctcttatcanaggagctcccaaggctactcataaccgtgagcatggctgatatactaagttctaaccctctgcagaggtcgcaaactttacccatgagccgtgattcccgttatactcggngatcatgaactcccattgatcac

SEQ ID NO: 61901 - DNA, 112 bp, Zea mays
  unsure (1)..(112): unsure at all n locations
ctacagcaacgcttggaacatncgacagctacgtcacttttacacttaagatgtnttctagtcgttcatatactctcgtttctatacatacacaaattaagtctaaccgtca

SEQ ID NO: 61902 - DNA, 155 bp, Zea mays
  unsure (1)..(155): unsure at all n locations
catgtgcgagtcaccctatcaaatctactaagatagctgacccctacacaccttaaagctatgatcatacttctttaaaacagtgaccctacatagnaagaacaggtgtagccattttcataattgagaacaaaagcaaatgaatcaatgaacta

SEQ ID NO: 61903 - DNA, 142 bp, Zea mays
gcaactaaccgacgcagaaaaactaacgcagttgagatcagttgctccttcacactgtccaccaataaattgtcggaatacgaactaaacatatatcgttgcaagagttcctgatcgacgccaaactcaatttactagacat

SEQ ID NO: 61904 - DNA, 306 bp, Zea mays
ctaaatgtccttgtagcaatctctgtgtagtacaggtcttttcctacgtatccacacaaatagaaatacttagagctcttggttatatgctttgataaggagcttatctagcacacctcttatgctaaaaaacctatgctaatgactcattataaacttgagctcttgttactcaatagcaaagtgcaattgggataaccagctaaactggttgaccagcgtgttatgaaggccaacgtgtctaaacagcaactgtgagtatctcgggtatgaatatcggccacctatggaaagtgttctaaaact

SEQ ID NO: 61905 - DNA, 133 bp, Zea mays
actgggctggaatagtagccgccctctttactgtacctcatgtacacggcacacacggattcccgctggacaggtcggggctgccgtcaagtatggcttgccgacatctagtaactggcgccgcacttaccga

SEQ ID NO: 61906 - DNA, 218 bp, Zea mays
  unsure (1)..(218): unsure at all n locations
cttagtagcctagatgcattngatgtagaatctcatcgtcttcgtgtagaacctacaagctcagcagaactagcaacagcagcatgcaccacatccaactatgagacaaacataggagaattcatgagtcgtcacccgccaacttattcacaattagaagattccttagataatgatgactagctaaagttcatcaacaagaagctagacatcactta

SEQ ID NO: 61907 - DNA, 283 bp, Zea mays
  unsure (1)..(283): unsure at all n locations
tcttattcacatgntntgatgcatacacttncatactcgtacccaagtgtcccaactaattaatcgtacttttgacttaaggcgcatccatggttcggaggtgttcagtgngagaagttgtatcatatgaaagctgctctcataccagaagttaatggagagttggatactcagaatcttgagaatttcgaggaggtaatactctactctcncagttggttacttctgcanatatctgcatcaatatatttgctacagataagaatcggtggtggtatccaca

SEQ ID NO: 61908 - DNA, 438 bp, Zea mays
tctaaccattagcatgcatctagaccgcctcttctttgcataatcaactaataaagatggccgtctaatacacccttataagctaatgaaccatcgctgcttctatagacagacacatctatatttgtaatagaaattatattcatatgactaattgctccagatagagattgttccacactctctcttaaatcatttagaaaatgtcatagaatcgaatctactaacctttacctgctgattcatcaccatacattgatctgggatcttatcttgcgaggagtgacatctttttcactggatggttggcatcgtgcatatcacctgaccccgatctaactgcaggaatatgttggactagccaacttgtggctcaggtagacattcttagaccaacaattatacttgattgcctactcacatatttatctctcaatg

SEQ ID NO: 61909 - DNA, 177 bp, Zea mays
  unsure (1)..(177): unsure at all n locations
catcatccacacaagaacatcatgacgactgacaggccactatagcttctacacatggatctattcnngccgatagcttacataatcatcagcgngagtaagtactggctacgtatagtggatgattattctcgcttcacctgcgtattccttttgaanggaaaatctcatacccaa

SEQ ID NO: 61910 - DNA, 186 bp, Zea mays
  unsure (1)..(186): unsure at all n locations
caagtgggaggagcgcatcacagctagaatgtgatgaccacttcaagacccctggatgtactacatatggacctcttcngacctgtcgcctatctaagcataggaggaagtaagtatggtctagttattggtgatgactcttcccgcttcacttgngtattctttttgcaggataaatctgaaacc

SEQ ID NO: 61911 - DNA, 280 bp, Zea mays
  unsure (1)..(280): unsure at all n locations
gctcatctntctgntgtggtctccttctctgctgaaggtcttcagaatgaaagacaccatntttaattcntcattaatagatatgacanaggactgaatgtcgaagctatatcagatgcacacaggatataacagagcttctatcaaaaatagagcttctgcttaatgtaaccccgaacggtatacaagaaaccacatcaacagtataaagacccatntatccttagtatatgtattagagcaatgtatatgcattagggtcataattgtactcttattt

SEQ ID NO: 61912 - DNA, 112 bp, Zea mays
  unsure (1)..(112): unsure at all n locations
atcacagcaagaatgtgatgaccacatcaagacctctggagctgctacatatggacctcttcngacccgtcgcctatctaagcataggaggaagtaagtatggactagttat

SEQ ID NO: 61913 - DNA, 219 bp, Zea mays
  unsure (1)..(219): unsure at all n locations
gctcatctttagcctctcagtttcttctttgagctcttgacatgtatcatcttntgttcctagacattcttgctcacatgaggatatgctngttaacgaacaacaagcattatcacatgcgtaaatagtttcatctgaatacatgtgcatgagtgagggtgttgtgaatttanatattctatcgcaacctcatgagcaatacttaacatgatatgatca

SEQ ID NO: 61914 - DNA, 144 bp, Zea mays
taatacactctctaaaagctagtgaaccatcactttctctaaagacagacacatctatgtgtgtgaataaacaattgtatcccatattgcagtatggactaacagatagtagattatatcccagagactcaactacaaacacat

SEQ ID NO: 61915 - DNA, 241 bp, Zea mays
  unsure (1)..(241): unsure at all n locations
tctgacctantatgtctcatttacttataantcatcaacncgcataccatgatcaacctaaggattgactagctttgtatttaccttgtcctcgattacctcttcnggtactatgagtagaatcatgctagttgcttactttaatcaatgaacatgatgtgaacacttatgatacgatgttgtcattatgattatgaatattgactgtgtgatacttangtggctcgagcggttctcgagt

SEQ ID NO: 61916 - DNA, 390 bp, Zea mays
caacacgagagcactggcaaactaaaaaccaatttctttggtttttgggatcgatcaaatctataactggcaagacacggtccctgtcctataatcaaggccatacaaaagtgtaatacccttgctgtctaagatgctgaacccacctaacacaaaacctgattgctcggtgacagaacaacaattccgctatatttgcacgatcaatcttacccaccaatggatgtaggagaaagttgtactacaggtacagttatggaccccccccactgcaacgacgaaattcactgcgtgcggtgccaccccccctgccgagtgaatccgcgctgctgctgtacgcatatctcgcgctattccatactccgaccccttatcgagttacccctgcca

SEQ ID NO: 61917 - DNA, 376 bp, Zea mays
  unsure (1)..(376): unsure at all n locations
atagagacagacaaggctanacttgcagcggacataacgagcaacaagaaagacgacactactataagcactagttgtggtgaccgagatcattagttaataattgatctcagtctacgtaaaactagatcgactaatgtntaacttggtgaaacaaaattgcaagagagatcaagtgttctcttgtatttattgaaccatcaacattattcttgaatgcacctacagctatgttgaataccgacacacactttgaaataaacaccatagctctctatggttggtcttgatattactactaatctaactcaaaacaatagtatggtatgtacatattatagtaggagaattgactttatattgaatagtagctaca

SEQ ID NO: 61918 - DNA, 306 bp, Zea mays
acactagctcactatccattactttacttctcataagagtattgcttatatctgaaacctcaataacttttatacctgcatccaaagacttatacttgaccatctttgtgctccaactatatctactatcttcctggtccattaattcacatcgtaacatattctaaatagcacttcttcatcaaattacacttaagtttgctcagtggtgcacaacttttagatacctaatatttattgttttatcgaagaataattgtccatatacaccaactgccgatttcatatctttcatatcaaagatgt

SEQ ID NO: 61919 - DNA, 235 bp, Zea mays
  unsure (1)..(235): unsure at all n locations
gattgtaaaaaaaaaccatgttttcaattaagtgcctatctcaaacggacttgctactatctctgagacttgcttgataatcctactagaatcatcccagaacttntaattgctaagaaacccctctaaggacgtctacatcctcctttctacctgctggataatttttcaacttaccacccctcttgtagattgacctgtaagcttttacacattgtggagaaaaaaagtgtat

SEQ ID NO: 61920 - DNA, 204 bp, Zea mays
  unsure (1)..(204): unsure at all n locations
ctcacacctacacaccacaaggtgacagacatgtgtgcacaacacataactcacactctagntagtccacgactcaacttgagaccctacctattgacaatcactntgcatcaacctataccacaatggacacatcaacctctgtgtcgcaaatctctncttgatgagtgcattcgcaacaccaccatcatatgatctatatga

SEQ ID NO: 61921 - DNA, 192 bp, Zea mays
gcctgtaaagctcaacattatctatctgttatttatgatggttgcgacaaccatcttctcagacatttatagcaattagaacacgttgattgcttgcgtggggggtggtggagagcaaacttcactgctaaacatgtactatctctggatggtgccacttaaacatcacttgcactgcccccaatgttcccc

SEQ ID NO: 61922 - DNA, 435 bp, Zea mays
aactaagctgtgttcaagacgaaggaccttcatcttctacgatcatgctgtgcaatatgatgcaagttttcattatatctccaatgtgttgtggagaccaaccatatgcaggaccacgaactatggcccatcgcttctatagtactccaaatgttcgttcaatgtcttttctagcggactcttgaatagtggcaaagtgttgtgtcctcacatcatactgatgactgattgtcttgacaaacgctggccagtccggataaataccatctgctaggtaatatcccatgttgtacgtgtgtccattgacggagaaagtgactggtggactatcaccggtaagatgcgaatcaaacaggtttgaaagctgaagaacattgatgtcgttacagctaccaggcatgccgaagtatgcatgccaaatccataggtcatatg

SEQ ID NO: 61923 - DNA, 276 bp, Zea mays
  unsure (1)..(276): unsure at all n locations
gtctggtnaaagatcgttcatcaagtggcttgtgaaaatatcggctcattgatctttcgtattaatgtaagacatcttgatctcctccctttgttggtgatccctaagaaaatgataccgaatggctatgtgcttaatgcggctatgctcgacgggattgtcagtcatcttaattgcactctcattattacatagcatagggactttggttaattttgtaccgtattcctgcatggattgcctcatccaaagcaaatgcgcgcaacaatgtactgc

SEQ ID NO: 61924 - DNA, 450 bp, Zea mays
  unsure (1)..(450): unsure at all n locations
ctcaagcttgaaaatatctggatatgggtcgaagaggtgaagctggcttctaatggttntctgtcaaaaatatccctcggggacaaaatgagcatgctgatttgctagctaagtcagcagcacaggggctgcccctaccttcggatgtgttcttcgaaacaataaaagcaccttcggtggaacttcttgaaagagcagacctcaacatatctcctgtntataacgacgattggagaactgagatcatgtcttaccttcagggaaaattcctttcagatgacgaagcttataacaggaggatagaggcaagagctcgtccatatgtcatgatagaaggagagttgtacaagcatggagtttgtgctccgctactcaagtgtntatccagaaccgaacgtatagagtngatgaaagaaatacatgcangcctttgtggatctcacattggat

SEQ ID NO: 61925 - DNA, 112 bp, Zea mays
  unsure (1)..(112): unsure at all n locations
tcaatggtcagaatccaacgactaggtgatgtggctggcgcactttactttnttctttggcgcactgaactggccggtgcgccatgcgacataagccacaaccaaccgcata

SEQ ID NO: 61926 - DNA, 399 bp, Zea mays
  unsure (1)..(399): unsure at all n locations
acatgtgctaatcttttatgccacagccagcccatgcgagtcttagcaattaagcatgcatctagaccggcctcttcttttgcaaaatcaaccaaataaagtttgttcgctagtacacccttaaaagctagtgaaccatcacaccttctaaagacagacacatctacatttgtgaatagacanttatatcccatattgcataattgactaacagataacaaagtatatccaagagactcaactaaaaacacattagatatagagtgctcggatgaaatagcaatattacctaacccttttaccttgccttggttcccatcaccgaatattattgaatcttgggaatacttggttatgacgtaggaggtgaacatcttcttctacaccgtcatatggatt

SEQ ID NO: 61927 - DNA, 475 bp, Zea mays
  unsure (1)..(475): unsure at all n locations
cttataanatcagagacgtcggattccgatcctatggctgcccttgcgttcttgttcacaagaaggccgatttaattcgatccgttggattgggatccaacagccgatattcacccgtaccccttcggccaacgctttatgcataagagtccctctattctcaataaatcaacctgcaatccactgaaactgcacactgagtctagtatctcttgcgcagaggaccctgcgctatttaataattgtgcgcccagcacagagagttggaaaatcagagaaaatagattagaaatggattgttagcgcaaaaataaatgctagaactcgtattaatcatagaaaattcatatgatgtccagattaggtcattccaacttctataattctataatattatcggctatcacatagtacctctgttttgatatgaaagtcacatcacaacttatattctatttaatctagtataaataca

SEQ ID NO: 61928 - DNA, 363 bp, Zea mays
cctgagctgcagctttataatgtctttaaatataacctgttcttctatattgtacctggcaacaatacattctatctctcttgaggacataccagtatcttctttgctcacagtgaataaataacctatcttgatgaatatagaagatgatgtgcactaagaaaatgccctaagcacgtcgtacttcgccccaatattgaatataacagtggaaggacttggtatacatgatctagcacataagatattttccagattaccgagctcaagaagatcatcaaactcaatatagccccacgtatttaaagaacagagcagatttatttttcagttacgatcgcaatacaaatacatgtttctttt

SEQ ID NO: 61929 - DNA, 360 bp, Zea mays
ttccaatccgagcccgcatctgatcgttgtgatcgtcacaagttggtgttcttctgcagtccgaatccaacatgttcaaatccttttccctttctgtcttctccctgattcctaagcaaaacaagagtgcacgggtctccatggtctaaatatgatggacatgaactcaagagtgtaatcacctgatggttgagttgacgagcacgaccgcgagtaatgggaccagaaattggtacttgtattggtatacatgcatcagtagtgtggatgtcttcatcataagttctatacaaaaatgtggcataccacctatggcaccccctggaaaaagttgagaccgagaccttgacacttgacatg

SEQ ID NO: 61930 - DNA, 458 bp, Zea mays
  unsure (1)..(458): unsure at all n locations
atctcttgtttacaactcttgttatatgaccagaaataacttgngaatcggttatgagaaccgcccttcttatccacattgccttcaacttccaaagccccaatagcaaagcttcgtatttagcaatattatttgtgtagctgaaatcaagcttcactgcatagcatgttctaactttggaaggtgcaactaaaacagcagctgcacctgccccgaaggttccccaggaaccgtcgcagaacactgtccaagcttcggcatatttacttgcttcttcctcctgagcccctggcgtccagtcagtgatgaagtctgctaatgcctgcgactgaatcgaagatctatgcacataatcgatgtcgaattcgttgagttccgcagcccactttccaattctttcagtagcttctctgttcctcataatatccttcaaaggctgtgatgaacgaacaattata

SEQ ID NO: 61931 - DNA, 385 bp, Zea mays
ctatgaaactcagcttctcgctaaatcgggacagggcctcatggactgttgaaagtactcgtaagcggcaaggccgaccgagccgagggattcccacgcctctgggatacggatacctcactcgtcccttccgcgaaaagcaactctcgctcacacaaacatccctattaccgacagaggccagatgctcgaaacaagaggaaaaaaggacgcagcttcgcaagcgcggcgagggcgtgttcttctggcctcggcggccgcagaaaacacacgctacaagacgatctgatcctgcaggctcgggtcttcacgccgaggggagccgtagcaccctcggcatcgacgacgtctacagcaaagcccgacccagcctcgggcggcgccg

SEQ ID NO: 61932 - DNA, 145 bp, Zea mays
cagcacaccggggcatgaggagcactatttattgcgtggctcatgaccggttccagagcggaacctgacgcgcacgctgactaatgaatctgtcaaagcgaacaccatgtggtcgtccgggccgatgaccaaatctcatgtaaga

SEQ ID NO: 61933 - DNA, 481 bp, Zea mays
  unsure (1)..(481): unsure at all n locations
agctatagaaatatgtagagaaatgctaaaattgttaaactaattttcctaggcttgntattttccctagaatataataaaaatagtcttgtgattcttagtggaaataagaacatttacggtatttaaagtagttaaaagtattagttatggatntttagaaaataattggtaagtccaataattcccaaactttgtgtgggaatttaaaacaatatttacgagccttgggtagagtttgaattgttttggaccttgtttgatcaccaaaccccaaaacacccccctgccctatgaactcctttaccgactccggaaaccctaagttcccggaactccgtgaaggaaagttgtattcaagacataaataataagtttatactatctttgcatcctcatgagcatcccatggcatccattcttatacctatgtatggtatgggtagaacgtgaagaagaaatcgaagtacctgaagaggag

SEQ ID NO: 61934 - DNA, 432 bp, Zea mays
  unsure (1)..(432): unsure at all n locations
nntactgaaaaagaaaaagaaaaggtttaaacagagctgggcctgttctggcccaaacggcccaggaccagtgcaaaacgcgcccgcgcgcgcccgcgccctggcggttttgcagaacggcccccgcgtttctggttaatccgaagtgagttcgattactattgcactgagtcgctgatggtttgcagaaaaacccttcgcgttctattcttttaccacaccaagtccccgacggtgttccgcacgggaggccgagctccggcgagctataccggccggacgacgtgacggctgaagttcccaagcgacaggaacacaattgaactcctacggatcatttcccccaaatcaattttatgggtgggactacgaatcaatcggtccacggtgaccgagcggatgggtaagaggatgaacgcattccgagcaaac

SEQ ID NO: 61935 - DNA, 426 bp, Zea mays
  unsure (1)..(426): unsure at all n locations
cttaatacacngcagcatgcaacttggtggccagaaaaccgtcattatcttatcatatcttgaagaacaaaggcgtatatagattctactaaatcaccaagagcaattattgggtctatgtttaagcctcctgtgattctataatgatagaatacgtgtcgtactgttattgatcaaccaaaagcaacatgaggcaaacttttatgtctatgaatttctgtcgtaatacctatgacatgggtttaaatagagatatattgcggattttattgtcccatgataataaatatcttgtgccgaaaaatgaattcccgtataaatagtgcaaacatacttagcatcgccagatggtgaaactacatgaagaagctcctgtggagttgagcctggaaccaattcataacacctcttgggagcatcacgagc

SEQ ID NO: 61936 - DNA, 451 bp, Zea mays
  unsure (1)..(451): unsure at all n locations
acctaagaaactcagcttacttattgatttgcaaagagaggctggtctttatcttgtntttggctaagactgcatgggctggctgtggcatcgtcacttagcacatgtagggatgaataaccttcacaagcttctaaagggagaacacgctgatacgttaactaacgtgcaattctaaaaagatagaccttgtgcagcatgtcaagctaggtaacaggtgggaggagcacatcacagcacgaatgtgatgaccacatcaatgcccctggagctgctacatatggatctcttctgacccgtcgtctatctaagcataagaggaagtaagtatgggttaattattggggatgactttttccgcttcacttgggtggtatttcttgcaggattaatctgaaactccagggaccctcaagcgcttcttaaggagagcttanaatgagttagagct

SEQ ID NO: 61937 - DNA, 517 bp, Zea mays
gatcttaagtcacctgcggcatgcaagcttcttcttgagttcctcacagacctttatattatatataggatggaattgatatcatagaaggtagaaaaggtaaaaatgagctagtaatcaccaagaaagcaaaaatatctaaacactgtgaaattttggaaaggcttacagtgtccacacgaaattaacatgggtgcaccaaagggtcaggaagttattccaaagggagtgcttccagaagaaacagttgtttgtccaaaagatggtgaagaaccaaaactgaacatgctaattgatgtgccaaatgaaggtgagcttgaagatccaaaacccgaagtagtacgactcacaccaaatgttgtagttcccctgtgtaccgagtaatcaaaccaatacggctgtcagtatatagctctgaatccaatcagaggttaattaaatctgaagagggaacgaagagacctaataaatatcacgatttcagatgttgtaacaatgcggatttgtaatttacaaa

SEQ ID NO: 61938 - DNA, 467 bp, Zea mays
  unsure (1)..(467): unsure at all n locations
gggttataaagatgttagtgcaatcgaaccaagtggttatatttcgagatcttgcaaatcacaataatcacagagaaagacaacacaagagacacagtggtttatcccatggttcggccaagtataacacttgcctacctccacgttgtggcgtcccaatggacgagggttgcactcaacccctttcaagtgatccanagatcaacttgaataccatgacttttcttccttatatcttttcccgtttgcgaggaatctccacaatatggagcctctcgcccttacaatattgatcacaaagaaagcacaagagtaaggttggggagcaacacacacaaatccgcagcacacgcacgcagacaagccaagacttgacctcaaaatgaaacatagagagntcacaactagaacggagctcatatcactaacacgatcgatcaagtgcgcggagacggagtgtgggagta

SEQ ID NO: 61939 - DNA, 474 bp, Zea mays
  unsure (1)..(474): unsure at all n locations
agctttaccatttttgtaaaaggaagatatatttattctatgtgcattacanaatanagtcttgaaacaaacatcttcaacacgcagactgggtgaagctttagctacggtgacaaattgcgctgccctttgttgtcccaatttgtattaagctatcacgttaggaagcaatatttttacaattagtaataagctggtgacaaaatatgctgatatgggcttttggaaataccggcttagctaaattctagaaataacctcactggttttaacactgtacatcatgaaaactagcaaaatcggtctagctagatttcaaaaccagcttagctgatntctatgcaaaaattgctaattcatctacttcgttntataaacttgatgaggctgaggttggtgctattgggatgcgtattgttgtttatccatataaccccatgtgccagaatngatatgcaatcggcattaaatata

SEQ ID NO: 61940 - DNA, 371 bp, Zea mays
tttctggatccattgagaccccttctgcagatattacatgtcctaggtaagaggatattgagcgagctccaaaaatgcacttggaacgcttgacaaacaaactgtgagaacagagtgtatccaggactgctgccacatgcctcaaatgtactgtccaagatgtgctgaagatcaacatgtcgacgaagaataccaagacaaaacgacgtatgaagggctgaagtacttcattcattaaactctgaaagggtgatggtgcatttgttaagccaaatggcataaccaagaattcaaagtgaccatgatgagtgcataaagccgtcttttcaatatcatcagggtgtactcggacttgatggtacccggagcgt

SEQ ID NO: 61941 - DNA, 439 bp, Zea mays
tatgcaacatcgcttgagatggtgtggacatatccaatttattacttgaagaggcaccagtgcatatcggaataattaggcgtcccgaaaatgtgaagagaggtagaggtcgaccaactatgacgtggacagaggctgtgaagagagacctgtaagagtggaatattgacaaagagctcgtcgcagataggaaggggtggaagtgtgcaattcacgtgccagaaccctgattgatagtttcgcttttcctccttaatcgtttgaccttttcttgtgtccattctagatcttgctggtccttgtgggttttatctcttttatgtgtttccccgtttcggtgctttcggctctcctttgcctttgtttcccttatctgttctttgggggttgagctctgaggttatcatatacggggtttcatctctaacctaccccaacg

SEQ ID NO: 61942 - DNA, 407 bp, Zea mays
  unsure (1)..(407): unsure at all n locations
tatcataagagaatagcggcaagagcccatccatatgtaataatatatggtgagttatataatcatggagtctgttctccattactcaaatgtttatccagagccgaaggtatatagctaatgaaagaaatacatgtaggcctgtgtggatctcacattggatctaggcctttgttgggtaaagttnttcgtcaaggatattattggccgaacgcagcttcngatgcagcagaattagtccaaaagtgcgaaggttgtcaaaaatgtgcaagagaccaaaaacaaccttcatctctaactcaattaatacagcccacttggccattgcaaaggtggggccttgatttgctatgcccacttccaccggcacaagggaatntaaaatatgttgtggtggcagtagaata

SEQ ID NO: 61943 - DNA, 441 bp, Zea mays
  unsure (1)..(441): unsure at all n locations
ctaagcnttatgcgaagcgcacgactgtnngagacaggatctgcgattgctctgtttctactcgaagagncctctcagtacactgcgtactaagtctgcgagtagagtaagaatatcagttttaaagtaataagtgtttattcgcctattcaccccccccctctaagcgacatccagatcctgttcacgggtcacatggaagtttcaattggtatcggagctaagactctccagtgggggctgacgcggccgcagataacgatgtcgtcacaactcacaagaggtaactgtagaactgggctcaggcgatggggctaataacagagcttggtgtgtctctgttgatatagctacatgactgttgatcctgatttgaggcagatctttaggagaagtatctttccatctgatattagtaaaaatccctctaatgatgaacta

SEQ ID NO: 61944 - DNA, 432 bp, Zea mays
aatggcacgcgctcgagaattctttttactactgatacatctatgccgatacaagtaccaattactggtcccattacatctggtcccatatactatgctcgcgctcgtaacccaaccattcgagataacactcttgagtgcatgtccatcatatttataccatggagacccatgcactcttggtttgcttaagaaccagggaatataccgatagggaaaatgatctgaacatgatggattcatactgcataataacaccaacttgtgacggtcaccacggtcacatgcgggctcggaatggaatgtcaagcacaacatggaaagcctatcatgtcaactttcatatggatccggaattatagtcatatctgttatgacgcccgcgcaatcatcgtctccttaccaagacatattctgcactttcatgccatg

SEQ ID NO: 61945 - DNA, 443 bp, Zea mays
  unsure (1)..(443): unsure at all n locations
acactataaacnactcaagctnctccaccatgtcgctgctagccaagttgatgcagctaccttcatctatgatcatacgacatgaacgctccttaatgacacactttgtctgaaacaacagatgtcgctgattctgctctgccttctccatttgtgcactaagcacacgctgtacaatgaggctctcataatgctctgcatcatctgcaccaatctgttcttcgggtggttccttagtgcctgcatcatcaaccgcaaacaaagcaagtgtatcttcatccaaatcactagcagaggaatacccaccatcgtcttttaccaccaaaacacgctgattatgacaatcacgctgcacgtgtgcatagcccttgcatcgataacacagaacatctcttgttctacccgtggaggctactgaagaggcactacctgctgagttctgg

SEQ ID NO: 61946 - DNA, 467 bp, Zea mays
gcttggtctggtgaacatatactagcagcgatcttgttcaattcgcgaagatttgctcccaatcggcgcttgaacaggggcagaggcaacgggaacacatgttcgaccgtggctgacacccctggttcacgcccgttcgcgcaccgtgcctaccagtgcacgcccgcgcgcactcgccggtacacgaccgaccgtgcaccgcgccgtgcctataaagccttcccaggcgccccccacttcgtcccgcactcaccctcaccggccagccactttcccttagctccggcgagcttaattccgcccgccattgccgccagagcttcggccaccgtggccagcccactccagccatcccctgggcaagccagtgcttcggctagctccgccagtagcccgtgaagcttgcaagccctcgacccgacagacttaccggggcccgagacgactcacggacttcgtttcgcgcg

SEQ ID NO: 61947 - DNA, 476 bp, Zea mays
  unsure (1)..(476): unsure at all n locations
tctanagggagaacacattntaggactaacaaatgttcattttgagaattactggatttgtagcgcatgccaagcacgaaagcaagttggtgccaatcatccacacaagaacatcatgacgaccgacaggccgcttgagctactccacatggatctattcagcccgattgcttacataagcatcggcgggagtaagtattgtcttgaatagtggatgattattctcgcttcacttgggtgttctttttgcaggaaaaatctcaaacccaagacaccttaaagggattcttgagacgggctcaaaatgagttcggcttaaggatcgagaaaatcagaagcgacaacgggacggagttcaagaactctcaaatcaaaggctttcttgaggaagagggcatcaagcatgagttctcttcttcctacacgccacaacanaatggtgtagtgaagaggaagaatcgaactctattggacat

SEQ ID NO: 61948 - DNA, 378 bp, Zea mays
  unsure (1)..(378): unsure at all n locations
agcttctggagtangagcatcagactgttaacgcattatctgttctataactatcatcctccgctcgccttatcttcaatttccgaggatttctctctgatgggctctgatagcccatattcagcatcgacccggctcattgtagcttcagcctcggtcagctatgtctcggtttcaacttgggctttcgaagccttgacaattcttcctggagaatagcctgaaagttttatcngttccagcacatctaacacactggccatcctttntctctatggngttgctgccagatctttttgtacctttggcgcctccacctctaccgaagggcttacagtatctgatgtttttgtctcttcgggtctcggttcttcaatt

SEQ ID NO: 61949 - DNA, 500 bp, Zea mays
  unsure (1)..(500): unsure at all n locations
actcaagctgtggctttcatactcttcgtcgtgatgtagcttattgtggtcgttatataccggaagtgggcgccaatgctggtcactngttttcaattgctacatggcataaaaaacaaggcaacacaagttgagaagtntggacattcgtccttaagttatcacttcttcnaagagttagcttgaggacgaacgtttttaaaagaagatgcgaataatacaatattgaacaaaatgacaatgaacaataaagtatgaaactcatctcttgtgccttagcatttntttattccacattccttcgtattgtacaagtttacaaaaatgcattcggcttctttgcacaagatagctagaagatacttccaagactgagcgaaatgaagcttaattaaggccctcataaaaggtgaattatgtatggcaccgctcacctatttatactgggaagttgaatagtctctgttagagaatacaaacatgtctacaaagttacacac

SEQ ID NO: 61950 - DNA, 434 bp, Zea mays
  unsure (1)..(434): unsure at all n locations
gcttctaaagggagaacacgtgatangtatgactaacgtgcatttcgaaaaagatagaccttgtgcagtttgtcaagcatgtaaacaagtgggaggagcgcatcacggctagaatgtgatgaccacttcaagacctctggagctgctgcatatggacctcttcggacccgtcgcctatctgagcataggagggagtaagtatgggttatgtatcgttgatgactatatccgcttcacttgggtgttcttttcgcaggataagtctgaaacccaagggaccctctagcgcttcctcaggagagctcaaaatgagtatgagctctaggtgaagaagataatgagcgacaacgggtccgaattcaagaaccttcaagtggaggaatttcttgaggaggaagggatcaagcacgagttcttcgctccctacacaccac

SEQ ID NO: 61951 - DNA, 438 bp, Zea mays
  unsure (1)..(438): unsure at all n locations
tgactcgcgattggcgtgctgctttcgtgcgttggctgacgttatcactgccagnccgctttcggtcacgctaactgccacgtctgtccccgcggttgactgacccgcggcccccatgcatgatggttttgtcgggccatgcacgaggcgcctcgatacgctgcattggtttgaaaaattaccttctctgtcttctgtgatagcctcgaggagacgcagtactggcgcgtgcggtggttcgccttcttcgcacccaggaaccgacacccaaggagtatgactcgtgggcccgggcctttgtgccagagactgggtcgtttgtttcttgcggcggagatgaagaggcacactaccgcgggaggcggttcgctnttctggtgcgcgcggtgattcgccttctccgcacccagggaccaacccccaaggagtatgactcgt

SEQ ID NO: 61952 - DNA, 469 bp, Zea mays
  unsure (1)..(469): unsure at all n locations
agttacctgccgcatgcagcttgaagccatggtaagtagcataggctaatattattctatatgactcaagcctagctacgggtgcatatgttttaccgaaaaccaaaccttcgacttgggagtatcccttggccacaagtcgggttttgttccttgtcaccacaccatgctcatcttgcttgttgcggaaaacccactnggttcctacaacattttgattaagacgtgggaccatatgcactacctcatttctcgtgaagttgttgagctcctcttgcatcgccaccacccaatctgaatcttgaagtgcttcctctatcctgtgtggctcaatagaggaaacaaaagagtaatgctcacataaatgtgcaatatgagatctagtatgtactcccttatgaatgtctccgacgatggtgtcgacggcgtgatctcattggattgcttggcggactcttgggtgtggcag

SEQ ID NO: 61953 - DNA, 474 bp, Zea mays
  unsure (1)..(474): unsure at all n locations
aaatttgttatgtttgcacaataatctattttgttttttatgttgctctgaaagaagatgctttacaaataattctcatgctaacaaattgcatgcaaccatcttaacaacaaaagaggctcgtacaatcgcagctgcaactgctaaaccacttgtgcatgcaaagtatcaaaaaggaggccagacacatattgatgaaaaatctaaaaaggtaagcaacttgaaccactatgttctcaagatcccttctggtaaccaaaaattattaatacagtaaacatggctgctgcttgatgataaataataaaaaaatgcttctccgaaattggctgatatatattaataaaaactttgtccgaccagatgtcgcggtaaagctatttaattagcatatacaactctgccgcttntctcttcagcacaaacagaaaagaaagaaaagaaaacaataggtttgattgatcgttgatatta

SEQ ID NO: 61954 - DNA, 401 bp, Zea mays
atgccacagccagcccatgctagtcgtagctattaagcatgcatctacaccggcctcttcttttgcaaaatcaactatatacagtgtgccgtctaatacacccttaacagcaagtgaaccatcacttcttctaaagacagacacatctacattggtaaatagacagttataccccatatgacataattgactaacagatagcaaattatatccaagactctctactaaaaatacattatatatagaatgctcattagaaattgcaatctctacctaacccttttaccttgccttgatgcccatcaccgaatataattgaatcctgtgaatccttattcttgacgtaggaagtgaacatcttctactccccgtcaaatggtatggcatccgctgacgataat

SEQ ID NO: 61955 - DNA, 433 bp, Zea mays
  unsure (1)..(433): unsure at all n locations
tctaaaaggagagcacattctatgatgaacacacgttcatnttgtataagacaaggnntgtagcgcatgccacgcatggaagcaagaaggagtccatcattcacacaagaacatcatgacgaccgacaggccgcttgagctactccacatggatcttttcggcccgaatgcttacataagcatcggcgggagtaagtattagcttgtaatagcggatgattattctcgctcaacttgggtattctttttacaggaaaaatctcaaacccaagagactttaaagggattcttgagacgggctcaaaatgagttcggcttaaggatcaagagaaatagaagcgacaacgggacggagttcaagaactctcaaatngaaagcttccttgaagaggagggcatcaagcatgagttctcttctcctacacacctcaac

SEQ ID NO: 61956 - DNA, 447 bp, Zea mays
agcttggtgccgatggagatacacaaatccttgatttcttggctgtcaaactgcttgccgatgtcaactgataattcagacggtactccgaagcggcaaacaatgtattgccagaagaattattgggtagtctttgacgttattgtagaaacagccctcgcctcgatccatttggtgaagtattctacggcgacgaatgcgaatttaaggttcccctgatcggtgggcaggggcccgacaatgtccaggccccagcgctggagaggccatgtatgggcgatcagctttgtatactgcgaggggctgtctgaccgaggagaaaacttctggcatgcttcgcaggaccttgagacctgtttgcggcgcagatcattgtgtccagtaaaaccctgcggatcacctgcagtaaggccttggcctgcggcgaccgcactgccactgggactt

SEQ ID NO: 61957 - DNA, 485 bp, Zea mays
  unsure (1)..(485): unsure at all n locations
cttaaatgggagaatccagcaaatatgctactctaacatatgaattctatcttccttgataagggcgatattactntaccaagatggattgacatgtagtagcatacttcatgagaaacttattcttatacttgagactatatgagattactacgataaagtgttagtctcaatataattaagatttagaaatatgcccccctaaagataagcatcaagaaaagcataagtgttaattgaagttattcaatgatcaaacacacaacagatgcgatcaaaagaacaacatagtcattatatcattaaacaagcttaaaatgggagaatccagtaaatatgctactgtaacaatgaaagctacaatccttgataaaggtgatattactttaccaagatggattgacatgtagtagcatacttcatgagaaacttattcttatacttgagactatatgagattactaagataaactggtagtctcaat

SEQ ID NO: 61958 - DNA, 279 bp, Zea mays
  unsure (1)..(279): unsure at all n locations
tatcttcctacnctttctacgaatagcagaggaggcatttcaagcacgacaaattgatcaacgtacattaactcccctaggaacattaacaacagtttctcctagccatattatgaacaacatctgttctaccaactatcgtatcaggcaccacagaggaacgagaacgcgacatgttatgagaatcaaaagcactctatgcatatacactcctattagcattctagaacggccctatcatggacataaaggcatggctcattgccactactagccata

SEQ ID NO: 61959 - DNA, 481 bp, Zea mays
tatgaagattcttcatcccaacatgtgctagtcggctatgccttatccagcccatgttagtcttagcaattaagcatgtgtcgagttcagctctatcaatatctaccaagtatagctgaccctctagcacacccttaaatgctattgaattatcacttcttctaaagacagtgacacctacatcagtaaagagacagcgggagcccattttgcataattgagatacggacagcaaattgtatatctaatgaatcaacaagaaaaacgttggaaatggaatggtcacgggatatagctatcttacccaaaactttgaccaaaccttgatttccatccccgaatgtgatagctcgctcgggatcctggttattctcgtacgaggagaacatcttcttctcccctggcatgtggattgcgcccccctatcgatgatccaacttgagcctccggatgctaatcctacatacatgttagttctgac

SEQ ID NO: 61960 - DNA, 479 bp, Zea mays
  unsure (1)..(479): unsure at all n locations
agactatctccgacagtgagagtaatgatttatgttttccctaactctataatccacatacttcctattttagaccgaaaccaacatgaataaccaattgatagatcacaaaaaaagataggtttttgtatttgatatactttgggtttgctttggtccacaaatttctatccctttagaatcaaacaccaaaaaggaagacatgcttaagcatatagaagtaacaaaatagttgtgggcctaaaaatcatctcctttagaaaaagttctccctattgggtgaaataacctccactctaaggtgaaaaagatatacttcgtccgacggaaaactctttcccttttgggaaacattgacttgaaaagcaaaagtgggacctcaaacatgttgaatagactatagtccncatatttctatgtatattntaaatgaataaggatattctatgggtaccaattgaaacaattctataaacata

SEQ ID NO: 61961 - DNA, 326 bp, Zea mays
  unsure (1)..(326): unsure at all n locations
tagagcaatcatcttcatccaagtgcattgtcttgaccttcaatccttcatgatcaaggtgccatatcattgtcaataaggttgttagtgagaataaattgccatgctcttccttatggtcaagtgaaatccaagtgtgtgatgtgtgtcaacacgtgaagagtcatcaattacctttacctaagtcggttagtatgccccaagctcctctagaaactgggttttagatgtatggagtcctaccgctcttcaaatgaaaaacaatgttactatgtgagtttttatgatgattataataaatttagttagctntttccatttgacat

SEQ ID NO: 61962 - DNA, 468 bp, Zea mays
  unsure (1)..(468): unsure at all n locations
nacttctgaggaagatgcgcatctctctctctatgttcagaacacaaggcctcatctagaagacctccatcaggagggcttcgtcaacgaagacgactggtatgataattatcatcacggaaatttctttttgatgatgcttctactctgtctgctgagctgcaagctacaccttggccctcatcctataagccaccccagcatccacatgtttgacggccactccgacccgaagcaattcttgatgagctacgaagcaacagtgtcttcgtatggtggcaacactgcaatcatggcgaagtctttcgtcatggccgacangaatgttgctcaaacctggtattcctccctctggccaggaacaatcacttcatggcagaagctgaacgatatgttactgaccatctttcaatgatatcaaacgaagcctggtacagctcaagccctcttccagtgtattcatgatca

SEQ ID NO: 61963 - DNA, 462 bp, Zea mays
  unsure (1)..(462): unsure at all n locations
ttgtgaaccncatacttctggccatctcccgtctgacttattatttctgntgactgggagacaggataagaagtcatcttcgtctatgccattgaacactaaggcccctttcggatacttcagttctcgggcatagtgtttagcttcaaaaatctcttcttcagataatcttttccccgaagcgtgttgtataatataatcaagagcttcggaaagtgcttcgggagtatgagtgacagctttttaagcaaaatttgttctacagcttctttttccgctgctttttctccggtttccaaggatttctccttgacgggctttgaaggcccaacttctgtgttggcctggctttatgtagcttctgcttcggtcagccttgtatcagtctgcgtttttgaagcctcgacagttttcccttgaatagagcttgaagttttatctgtctcagcacatctagtacac

SEQ ID NO: 61964 - DNA, 456 bp, Zea mays
  unsure (1)..(456): unsure at all n locations
ctttcaccggcaatttccagtggacgtacgtgcgccctgtttattcctgtgacctctgaagctgccgacagcagccgggagagtctctctgggactacatccggcgattctcgaagcagcgcaccgagctgcccaacatcaccgactcggatgtcatcgacgcgttcctcgccggcaccacctgccgcgacctggtgagcaagctgggtctcaagacccccaccagggcgagcgagctgatggacatcgtcaccaagttcgcctccggccaggaggcggtcgaggctatcttccgaaaggacaagcagccccagggccgcccatcggaagatactcccgaggcgtcgactcagcgtggcgccaanaagaaaggcaagaagaagtcgcaagcgaaacgcgacgcctgcgacgcggaccttgtcgccgccgtcgagtacaataaccctcggaaacccc

SEQ ID NO: 61965 - DNA, 436 bp, Zea mays
  unsure (1)..(436): unsure at all n locations
gcgcgagaccttatcccgttcctttctaccataactgatgcganatcgaatgtcatacttaatgcatattcactttatttgttcccttgtatgatgtactgtttgtttcccaatttgaatggatgaatgtatgtatgcttgcaatcgcatagagaacgatccggtctaagagcccgaggagctcgcangagaagcccctgaacagcagacggttggtggaggcaagtgtcctttgacctatctatgtcctattcattatttaattcacctcccgctttacacatttatgcctaaggattgactagcttnntgtatccatgtccttgttcacctatctgggttggattattactcgttagctctatgctattgcttaactctaatcaatgaacatgatgagaatatctatgatacgctgttgtcccttctcttatta

SEQ ID NO: 61966 - DNA, 405 bp, Zea mays
ccgctcagtcagaggaccgaccgtgagaaacaaacactgcccctgagtcaaagtaaataggaaacgaggacaaaacgagttatacaccacacagagaggccaagactcttggaacacacagaccacaaatatcaagggcgtagagcccaccaacgtccccgtgccaccacaacgcgtgcccgactccatgcacactaccatcgtcacatgccccccttatgcagcgcactaccgacgaccacgccacctttgaagcgcacacaccaccaccatcatcgccggcaagacacagcccccctccccttatccaaccgctgtcgagagcacctactgcgtaaacactactccgcaacacgacacccccgctcgcctatagaaccccgcaaccagctacctcaactcaca

SEQ ID NO: 61967 - DNA, 483 bp, Zea mays
tatccataatccttctatatctcatctagttgttagctgttacagaatgttataccttattaatgcagacattctagttgttagcttccaaatgcataccacactaaaaaaaaagttcggccaatgaaatattcagatagcatcaatgcagccatcaatacagcattgcaaggaccatcgtattccctttacgtaaaagtaaccagaaaactgtgcttaactactttcaaatatttcaaactaaactggtccaggaaagcacatggttgacaaggatcccatatctaccattatgcattgaagttgacgcagaaaggaactatttttagaggaacacaatgttgtttcaataaatcagaaatggggaacttgcatactctgtgatagaccgacaaacacagttctctggacccatatcacgatataagacataacattgtctgctataatgttttggacgacagaaaccactacaagttgaca

SEQ ID NO: 61968 - DNA, 493 bp, Zea mays
  unsure (1)..(493): unsure at all n locations
ctaagcttaataggaatacanaggccatatgagtacatgagatgaactttttttttgttctcctctcatcggagggcagnggaagactttcatggtccaagttcaccttttnccttttaaacctcctttgagactaaacaagcaaactcaagcacacggttagtctcacagggtcaagttgtatcacaactccgcttaaatttgtgcatcccttgccaatggactcgaaaggtccggggagtgcttgtacaacttgagcaccataaataaacaacaaaatgcataacgaacatgatcaaaggcataaacacatgtatgctataattcaatccaagttccgcgaatctaagacacttaactcactacgcaacttacaaaaggtctgctcatctaaaagcttggtaagatatcggctagctggttctcggagctaacatgaaacactttgaatctcccttttgctggtggtctttcaaaagtgatgccggatgtc

SEQ ID NO: 61969 - DNA, 445 bp, Zea mays
  unsure (1)..(445): unsure at all n locations
gcttccctttaccccgaaatatgatacaccctttatctttgagattntcaaatagacataatccccaactagaaagtacatgggtgtccgtcgttggtctgcgtaactcttctaacgagcttgagctntcttcanatgatgaattattcgccaaactttctcttcagtctcctttaccatatctggcctgaagaaactcctttcacctggttcagaccagttcaacggagtacgatactatcggccatacaaagcttcgaagggtgccatcttaatgctttcttaatagctattattgtatgagaactccgctaatggtaaataatcatcccatttctgtgggaattccagaacacatgctcgcaacatgtcttcaagtatctgatttaccctctcagtttgcccactgggttgaggatgataggccgaactatggangcaatta

SEQ ID NO: 61970 - DNA, 456 bp, Zea mays
  unsure (1)..(456): unsure at all n locations
ggtttcctgaacaaacaaattaatatcattgcacagataatatattacttattggttgaatgtacggaaagtctactcatccgctattctgaaatcaacaacacatctagaacctcgatactgaaaacctgcaacatgtaatgagaggcccgcaggcatttcataccaccaaagaatccatacaaattgtcttcgtctcgtccgtgtccaacaataaattatgtgttcgggttcgtctagtcaagacatatctataaaataataatgataagtctatgtgtggttgcatgaagcgattcaaaacacaccctanatcacgctacatgcatcatgcgcatgtatagctatcgattgacataaatatcgaatatgtacgctgctcatctctctctcgagagattntcgtgttctcacttncttcatttttgttgctcactacagtanacacagtatttt

SEQ ID NO: 61971 - DNA, 499 bp, Zea mays
  unsure (1)..(499): unsure at all n locations
ctacaattaataatttttactaataaactcagccggatgatcatgatacatgcagaccggatcttacagcacctgaagcatgcaactaattgagtggcgagagagccttccttaattccctgatgcacgacaccacgtgctatattgatgactgtgcccagttcttcaactaacattggattccgaatattactgcttccgcttcaaaaggatgatctttgaagggctctgaaagcccaccttcagcttcagcttgatgagccgaagcttccgtacaaccttcgtaacatgacactctntctccgaagtgcgcgtgaagactcaatcatctccaaacagtcaaacataaccattcttttctttttgggaactaatggcccttgtgcggttgctgcccaacattgctgaggactcacactctatgatttggaccccgctgctctctacttccgcaatttttctgggcggcgctcggttctctttgttctacacaaatgtt

SEQ ID NO: 61972 - DNA, 316 bp, Zea mays
atatgggtcactttcttcacacggacagtcttctttgtcatatctatcgacatgcatgtagccctcgtctctacctggatcgtgagctacttcggtgaacgagcgcgtttgtttgagttattggtggagtggaaaccctgcgctaagcttacccacatatactctgaaatgcggaatatctttatatgtattaaaacaaaataaagtttatgcccaatatatgtcggagggtgttcacacaacgggattgtggccatctaccggcccggtaacttggtccaccccacctcgtgcatgtgcagcacgcaacaacatg

SEQ ID NO: 61973 - DNA, 485 bp, Zea mays
  unsure (1)..(485): unsure at all n locations
ntatcaaatggatgtgaagagtgctttcctcaatggactcaatctttgaagaggnctacgntgagcaacctcctggctcttaagatagtgagtaccctaaccatgtgtataaactctctaaggcgctttatgggctcaagcaagccccaagagcatggtatgaatgcgttagagatttccttatcactaatggattcaaagtcggaaaggccgatcctacagtctttactaaaactcttgaaaatgatttgtttgtatgccaaatttatgttgatgatattatatttgggtctactaacgaatctacatgtgaagagtttagtaggatcatgacacacaaattcgagatgtctatgatgggggagttaaagtaattcttgggatttcaagtaaagcaactccaagaaggcaccttcctaagccaaacgaagtatactcaagatattctaagcaagtttgggatgaaggatgccaaacccatcaag

SEQ ID NO: 61974 - DNA, 485 bp, Zea mays
  unsure (1)..(485): unsure at all n locations
agctngngttcgccccttgtggaggagtgctatgtatttatgaaacctaacgggcggctacagccccggagaatctttgtaaaggcttcttaatgatgccttgctggaccacctangcagtggtcaatggggagtagctctctccgggcataaagggaatcacggcttgtgggtaaagtgcacaacctctgcagagtgtttgaaaactgatatatcagccgtgctcgcggttatgagcggtcaagggagctccaatgattagtggtacttgatcagagatgttcggattacaggtggcaatgagattgttggtattggtattgactctgttaatggtaagtggtactctatccggttggaaaggagtacggttgggttaataacgtgggttaattctaacacttggctgtctctattagtaataataatctaaccaactaaaagcaactgctcgactttaccccacattaagctagtccactaca

SEQ ID NO: 61975 - DNA, 496 bp, Zea mays
  unsure (1)..(496): unsure at all n locations
cttttcttgaagatccatttgcaacctataggttgacaaccatattgtttatcatcgacctcccaagttccattagacataataaattccatctcactccttactgcttccttccataagtcagcatcaggagaggaatatgcctcactaatggtaattggtgtgtcttccacaaggtacactataaagtcattaccaaaggaatttgcaaccctctgtctcttgctctttcgagtgactatagtgtcatcctcctcagggatgtgcacgtgagaatcctcagcatgatctataggaatcgacagttcgtgctcatggagaattatagtctcatgacttatatcactaggtgtattcttcatgggaaactcattctcaaaaaatgctgcgtctcttgattccatgatagtatcaacatacatattangcacatcagactttataattaagaacctatacccagtgctgtgaaaagagtacccaacgaatatacagc

SEQ ID NO: 61976 - DNA, 417 bp, Zea mays
cgcagcgcgctggcgtagccattgttctggattggtgagacgcggcgagaccgcgctcgccttcttctcaaacgcgaggtctacgcccaacgcgccccccgttggggtgctagggacgtcgactcgctcgacagccgacgaggccgcggctcctgcttggccttggttgccccgcctcctcctccgctggcaggggagaggacggggcgagctcgaatgttgatcttccgccacgcggggaagacgacgtcgattccgccgacggcgggcgggctgtcagccgacattgtcgatgcccgcggcggtggaggagatcatgtctagctgctgctagggacatgaatcaagactcccgaaacgggcaccgtcccgcgtggagaggtgatggaactgcccactgcgggcttcgaaccgggg

SEQ ID NO: 61977 - DNA, 476 bp, Zea mays
  unsure (1)..(476): unsure at all n locations
tcaatagaggccaagngcctccatctcaagtctactttacctttatatgatctgcagccttatggttgctatagtagctagttacaatagctctggatttgaagagtagctctggatttgaagttataggattattttcaattaagcttaatgtttaattccttgagttgaagttataggattttctttggatcttatgtaaaaggatttgtagatatatgntttgaagttatatgattctttgttggatgaaatatttgtgttaaacaaattcataagatattttggttgtgatgtgtaatattctatgacgatatgaatttatatgacatgttccttctgatgacgattgtatctatcataaatgcttcgccacatcacttgccatttcatcatattttatgatgaaattnttcgtcacanatgcattgtcacgtcatctgccacgtggctntccacgtgatcaaatctatgac

SEQ ID NO: 61978 - DNA, 341 bp, Zea mays
tgcaactacatagtccgctagacagcatacacgatggctggcctaatataagcacacgtctggacaccacatgttaaacaaacactcaacgaaatcgactgccgtgtaacatgagatggcttgtcacaggtgaagacctagcaaacgcagtttagacatcgtatcacaacaacatgggtcggagcacgatgatcagtgttctcagccatcgctcaacttgaagtagttgacacacaagtcacctaaatacacattatgttgggcaatcgggagggtctaccatggcgaaactcataagacacatatgtactgcaccacaattcctaccgagcatatcacca

SEQ ID NO: 61979 - DNA, 441 bp, Zea mays
ttacggacctatgaaactcaactgccgaaaaatgggatttgaagtggcgtaagctatacattatttctttgaatggactagcgcaagattgctaaacaatgtagatgagcttccggaatcgaaagagaggtattatgataagtccttggattgtgctaataagttgaaagatagttttgctaacgtgggtgcatactcatttgaactaatatttattataggcgatccctaatgaatcatcgaatggatcggcaaataagctgaagcttttgacgaaatacttagcgaccgtggtgatttctgcgccttcgccggtgctcgaggggttgtagcgattctggacaatagtggctgtgaccacgttaaagctacagtccaagcaaaaaccctctccatagaggacacgaatgagcctttgtctgagctactctaatgggcgag

SEQ ID NO: 61980 - DNA, 440 bp, Zea mays
  unsure (1)..(440): unsure at all n locations
agcttcagttccatctatattatggattgctttttagtctgtccaatntccttcggcccttctggcagcttcttgacttacatgaatagcaatgggcccttggtccgaaggtatcttcatgcaaagataagctggatgcagaattgcttcgaaggcattaagagtaccacgaccaatgattgcattgtaagggtattccatgtcaacgatatcaaacataactggttcagtccttgtgttgttgatgaatccgaaggccactgaaatttagatattaccgagtgctacaatctgcctttctccgaagccgcagaggggatgtgtggcataagaatttatcttcggctcttgcattgctgaaggcctacaaaatgatatagctgcctgctgtaaaccaaaattgggccaaaatctttgtaccagagataccatacatattg

SEQ ID NO: 61981 - DNA, 432 bp, Zea mays
ctatgaaactaagcttatagccaaacaacaaatagagaaaaattgcttttgtagcctcgaatgggttacccaacagggttagcccgaccaatataatctcgatatggttaccctaatcagcgcaactatgacctaagcccctcccccacaaaaccactaacagaaaaatacctaacatcctgtttttaaatgttataaatgtatatactttcatatttaatttaacatataattaacatagcaaatttgtgatgacatatatgtgtatatttgtaatagcaacactcatagctagagatggcaatgggtaaatacccaccgggtatgactaccccatacccatacccacaacacaaaaataacctcatcgggtcacccatatacactggcgggtatgaatttacccccatacccatacccatgtgggtatgg

SEQ ID NO: 61982 - DNA, 368 bp, Zea mays
agcttgaagccatggtaagtagcatatgctaatattatacaaatggactccagcctagctacgggtgcataggtttcaccgaaatccaaacacttcacttgggagtatcccttggccacaagacgggctttgttccttgtcaccacaccatgctcgtcttgcttgttgcggaagacccacattggtcctacaacatattggataggacgtggaactaaatgtcatacctcgttcctagtgagattgttgagctcctcttgcatcgccatcacccaatccgaatcatggagtgctatctctaccctgtgtggctcaatagaggaaacaaaagagtaatgttcacagaaatgtgcaacacgagatcgagt

SEQ ID NO: 61983 - DNA, 489 bp, Zea mays
  unsure (1)..(489): unsure at all n locations
tcacttcctgaattgtctatccaccagagatgattccattgttttgtggtcagccntattctctcttatcctctgtttggctgctaatttcattatgctcatggatttttactgatgtttataattcacaaccattcacacaccatgatattgggaatagatgcaaaattccaactgtaattttctggatatgacaaccggtcataatcttaatagagcaagtcattatcactcaagacaaaattgatggcctaggtaaaaataaatcgatattgaaccgtgatcaagatgtcaattatgatgagtgcatatgtcgttcagcagatgtcgtcgaggaagctaacaaacctgtaaaaaagaccactgtcctttcaaagaagcctgtcatagcagttggtaatggttcanaacatgttaagcttgatagcagcagctctgaaagtagctcataagaggatgaagtaagaaaatttgaggtctagatctcat

SEQ ID NO: 61984 - DNA, 355 bp, Zea mays
gaccacttgagccctcgaccctttacgaacaacatgcaagacctgtctaacacaggcatatctgttaaaatcctaccgaagaaatggttttaccaccgaatggcatatgggccgaaccattaaacgcgcagctattgtgtaagcccgcacacttgtctctattcattgtgccttgcccagaaatgggagagctttcatacaactctcggtgcactctgttcgtgagaacatacacgcatcggcatagtgagaggatctagaacatgaaggcggtcttctccagctatggactgcacacaatgactatgcacgaacttgcctgtcgacgtgcagagcccttaaatagtttcgggca

SEQ ID NO: 61985 - DNA, 300 bp, Zea mays
gcttcctaattcaacatgcccaactacgggacccacatcttcattgtttgcattttatgaaggcatcaaagcccaaaccaacgccatccctattttacgtagcgcctattggtgccgatctatgcgccaaacaccggaagataaaccgcctggtggtgctatctgcggaggcacggattggccacagccctaagtcggacagtctgtgacctaacgtaggagcaactccttttctgcttacgtccggacggtccgcgcctgaggctcggacgatccacgatggcgcatagggtcatcttc

SEQ ID NO: 61986 - DNA, 493 bp, Zea mays
  unsure (1)..(493): unsure at all n locations
agctatacacagaccaaagtcattgacccctcttaatagtacggacacggtcatctagcctactaatccggtcaaatatcttctctaaactcctggagaccggcaaaaacaaaaacctatttatacctttgccttcacttgatccacaactaatgcttataagtctccaagattttctgttctctgtggtacaacctgcattcttatttctccaagaaccattagtccacaaatagttgtcattaattaccaaaacatcactaaggggcctagatgattcacaatctccccctttntggtaattgatgacaacactacacattttatccataagaggttntgattttcaaatcttcctcataccttaggtataagaaggattttagagatgagtttcgtaagacttatcttgatttgaagttccatccgagagatagataagtctcaacaaacatcagagtgtaggaatagctccctctatatgtgtgcatga

SEQ ID NO: 61987 - DNA, 438 bp, Zea mays
gaagcatggccaagctcatcaagtaattcttcaatcactttaactggataggtggacttgactgtgatagcatttaaatgtctaaaatccacacaaaaacgccacgactgatccttcttcttgaccagcaagacagaagaagaaaaggggctggtactgggtttaataatgcctgactgtagcataacaacaatctgattttcaatttcatctttaatggctggaggatagcgatagggcctaacttgaaaaggtgtagcacctagtaccaaaggaatcgcatgatcacaatcccgtgatggaggcagcccagtaggaggagcaaacacaacggcaaactccttcaataaatttataaaggactcaggcaaccccagctctgcaaaaggaggcacagactgtactacaaatacctcgacaacagacccaggtggaaca

SEQ ID NO: 61988 - DNA, 365 bp, Zea mays
caaatctcttcggagatgcgcttgaagactttattgttttcaacacatgcagtatgttaaccatacttctcctcttgggcgtcatcatcggcattggcattggcacctccattcttgctgaaggacttagaatttctgatgactatgtttcatcagacctctgttcttctaattttaccgtcgctggcactttggtcggcccttcaatattcggcaggagagatggctccttggctttcgtggccgatgaggtctcatcgacatatacaggcactgtggccgtgtcaatgtagcgtatccggggtgtgagaaaccttatatttatcctcttcggcgccggctcactaggagcggctgaagcaact

SEQ ID NO: 61989 - DNA, 432 bp, Zea mays
  unsure (1)..(432): unsure at all n locations
taagcaccatctctcaacatttattttctatgtataaactcaacacaagagatggaattagtagcacaagcactagtttcttatttagcaaccctttatatgtgaaagtcaaacgagttgctaaaatagagaaacctcataatatggactaaatttcccttgagccctcatgcacaantatatttgaatgatatggataatatgcatgggtattcaataaagtctaaagggctgacttaatccatattatggtgagtgtctaatatagaagaatcaaatccaaattaactagagagagtacatcacataagtttggatttgttgaccatatgataatattcatttatcttccaattggacctttatttcataatcaataactgatgtatatcctcaagtgcttcttttcccttagtggctacacaagtcaca

SEQ ID NO: 61990 - DNA, 204 bp, Zea mays
catgtatctcagctacggagatgtgtactcctaaccactgaagtgctgtcacaaccatatattgagatagaaccagactcgtcctaccaagagtacccatcaaggtattagatcaaaatgaaagatcaacatcgggcatgacggacaaaatgtatatggatcagtggagtcaccattcagcagaagaagctacatgggagactg

SEQ ID NO: 61991 - DNA, 401 bp, Zea mays
  unsure (1)..(401): unsure at all n locations
tatatctgatatgactcctgagataggtgaaacatccactgatttagcttcttaggacacaaatttggacctatgacacctgtgtggtcaggaactgtctgacgaagacatttccgagttgaaagaattcacccttgctggcggatacaaacctggttctgtactatttggtggtgtagacgaagaaattttgggatgtatccctgaccgggctggggcaaagattgttagagaaaactattggatttccgaagcttgggcgggaccttagtaattataggagacaacacattattggaagtttattctactcaaattntaaggtataaactcttatgtccgtccctttgaatttttaaagtttaaatttcagaatttgcggctaacttcttttcctggca

SEQ ID NO: 61992 - DNA, 398 bp, Zea mays
atctattatcgacccataaggatggtcgctgtatgttcttcctaaggcttaacaccgacatcttttgcgatcgaccattgtgctaatattgtacatttatcaaccaattgtgggttgctgcactataaatttagcaaccaaccgtgagtctccatactatacatttagcaactaacacaaagccgccctttttacattggttattaataataacatacttttaattaagcagcacacatcacagatttttatacacacatcataaaaatatacacagttaatctgtataccacaaccatagatccatcacatatgcacagaagcaccacgattatatattctcaaaagcatcacaattataatatcattcacgactagatcatgtacagatagctagc

SEQ ID NO: 61993 - DNA, 463 bp, Zea mays
ctaagggtttcataccaagccagtcatagctcaacctttgtttattgtgcctcttaaccaaacaagtaccatcaaagctatgtacaaatatttcttcaattatgatcagagcacaagtaccaagtgtaccagacgatattgtctttaaggcaatcgccaaggggcttcgaccacgaccatgttgtcaatactttgctaggaagacatcctaaaccttggaaatactactctaaaatggtatcaacacatataaggacttctggtagcgttgagaagaaatccataagtatgcagaacgaccaaggagctttggcagggatttgagacatgttcaaagcatccataatacatggcatgctgaggaatagcacatgcaaccccaagggtgatgccaatcctcaagcaatactctgtagacctagtagagcaactttcaatgtggaccacaaccaataagggaaag

SEQ ID NO: 61994 - DNA, 433 bp, Zea mays
  unsure (1)..(433): unsure at all n locations
tatatctcccatagctctgggtgtgcaaaaaatacatgcatgttcgattcatngnattcngcatcgnggcgattttgagaacgcatcaagatgcccagattgccacgtcagtcgatacaagaagagctacaatcaagactgtgtaaaaaaattcccgaagaaaaataaaaacaagaaatccactattggacctgaaagtgacgatgacacttttgatgacatggatgggaaaaagaagtcaaagaacccagctttggtgatgtggtatcttccagtaattgatcgcttaaaacgtttgttctcaaatcctagggaggctgagcttatgcgttggcatgctgaaaattgcaagcagaataacgaacagattcgacaccctgctgatgcatcancaatgtgaaaattcgatcttatgtatcctgagttggcaaag

SEQ ID NO: 61995 - DNA, 469 bp, Zea mays
  unsure (1)..(469): unsure at all n locations
tcgtattcagcaatattatntgtgcaactganatcttgtttcttctgtgtagcatgttctgactttggaaggtgcaattaaaacggcagctacacctgccccgaagattcaccaggaaccatcgcagaacactatccaagcttcagcatctttacttgcttcttcctcctgagcccctggcgtccagtcggcgatgaagtctgctagcgcctgggactgaatcgaagatctatgcacataatcaatactaaactcgttgagttccgcagccactttccaatccttccagtagcttctctgtttctcatgatatccttcaaaggctgtgatgacggaacaattatatggtatgcttgaaaataatgtcgaagcttcctggaggccattaaaacagcatacatcaccttctccaattatgtatagtttttctttgataaactgagaacttcagagacgaagtatactggag

SEQ ID NO: 61996 - DNA, 423 bp, Zea mays
  unsure (1)..(423): unsure at all n locations
atctcatcgaaggatgcagatgcatgaataatttcttctgtggtgtaataacacagggcgtcatattgagaccactcatatcactcgaagcgccacacggttggtcacaataatcatatacaggactaatggaactgctatctggtattcctggagctaatccacccatgacatactatgaagcgaagaanaccactcctgactgacgacatcgatactagagagaccattcttgccccaaagaatgcattctgttatcgaggagagatgagcccaacaagatttctgtcacacgtgtgagaactctcgatggaaagacgacaacaaagaatcacatgcctctgtatcgaaaactatgggaaaggaaccaccaaaggcgcgtcaatcatcgactcaggaacaaggtattccacaccaaactca

SEQ ID NO: 61997 - DNA, 390 bp, Zea mays
tgtacttcgcctaacatggcttggttggtgataggtacgttgttttattgcgtgctgacgcactcaccgtcaatccgtctttggtcacgccaactgccatatctgtccccacagctgactgactcgtggccctcacgcctggtgatttcaccgagccacgcacggggcacctcgataccgctgcattggttttaaaaaatattcttctgccttctgccatggccccgaggaggcgcactaccgacacgggcggcgggtcactctttctgcacctgaaatccgactcgcaaagtgtcatatactgtgctgcttggatcctaagtgcctatcgcgcgtgatctcctgcggcgattgaggggcacacggaagggtttccttgagcggggactc

SEQ ID NO: 61998 - DNA, 377 bp, Zea mays
  unsure (1)..(377): unsure at all n locations
agcttatagccacanaactggagtaagtgttagctcaatgaaatcaagtggctaaggagagctcttgtgaaacacaatagacacagtgagaacaagcacaagagacacgaggatttatcccatggttcgaccaagtataacacttgcctacttcatgttgtggcgtcccaatggacgagagttgcactcaacttctctcaagtgatccaatgatcaacttgaataccacggggttcttctatactttactctttcctggttgtgaggaatctccacaacttggagtctctcgcccttacaataaggatcaaagtgaaagcactatagttagagagggaagcaacacactctaattcacagcaatacgcacacacaca

SEQ ID NO: 61999 - DNA, 485 bp, Zea mays
  unsure (1)..(485): unsure at all n locations
tatgaagattcttcattccaacatgggctagtcggctgtgctttatccaacccatgttagtcttagcaattaagcaagtgtcgagttcagctctatcaaaatctactaagtatagctgaccctctaacactcccttaaatgctattgaatcatcacttcttctaaagacagtgacacctacatcagtgaatagacagttgtagcccatttgacataattgtgaaacggaaagcaaattgtaatctaaagaatctacaagaaaaacattggaaatagaatggtcaggagatatagcaattttaccaagtcctttgaccaaaccttgatttccatccccaaatgtgatcgctcgttggggatcttnggttttctcatatgaggagaacatctttttctcccctgtcatggtggttgtgcacccgctgtcgagtatccaacttgagcccccggatgcataaacctacanaaacaatttagttcttgac

SEQ ID NO: 62000 - DNA, 383 bp, Zea mays
  unsure (1)..(383): unsure at all n locations
agctatntcctctcctaacttgtccgctgctggataggggaatacattgagtatctttcatccggacaacagctttattattgcataatatacatgccatttccaaaggattacccaaagcaatgttttttatgtgctattttttttctcttgtaacaaaatatccccccccccaaaaaaaaaagatggagccatgaaggcgtcgccatgttaatggacagctaatcgctccagagagttcgctgcttagcccagccggcccaagacacggttccaggtgaagtaaaatttacctgacggtaacatgtggagcctgtctggaccataagaagagtccaaacaaacacccgtggacggcgacgctaacaacttcattgacagtt

SEQ ID NO: 62001 - DNA, 483 bp, Zea mays
  unsure (1)..(483): unsure at all n locations
ttatcaaatggacgtgaaaagggccttcctctatggactaattaatgaagaggnactatgtgagcaacctcccggctttgaagatagtgagtaccctaaccgccaaagctgagtatattgccgctggccattgttgcgcgcaattgctttagatgaggcaaacccttatggactatggttacaaattaaccaaagttcctcttctatgtgataatgagagtgaaatccgcatggcggataatcccattgagcatagccgcactaaacacatagccattcggtatcacttttttaagggatcaccaacaaaaggggatatcgagattgcatatgttaacaccaaagaacaattagacgatatctttaccaagccattagatgagcaaacatttaccanacttagacatgagctaaatattcttgactctangaagtttgatngatattttgcacacatagctcatttatataccttngatcata

SEQ ID NO: 62002 - DNA, 467 bp, Zea mays
  unsure (1)..(467): unsure at all n locations
tcactagaccagctggacctactccgtcacgttacagttagcttattcagagctcctttcaggccccctcggttgcaagcaaccagccgtcagcaaatgcctgttggcactgcggagaccccagtcacttcaagaataactgcccctagttgaaggcacccggacctacctactccaactcggtcaatggccccaagattccctcggcacctacctccaaggcatctccctccaacagtcagcagagcatgacccagtaccagggcagagcacgagtcaaccacgtcgacgctcaagaggcccagcaagctccaggagtagtgcttggtgagttccttgttgaatttactcccgctactgtgccttntgattcatgagcatcccattcatttatagccactaagtttgcggaaaagcatggcatcccctctacacccctagaaatttctttagtcacccgaaccccg

SEQ ID NO: 62003 - DNA, 468 bp, Zea mays
agcttctaaagtgagaacatgtgttactgatagtcttctataggtggggtgaatagggcgaaactgaaatttacaaatataaacacaactacaagccgggttagcgttagaaatataaacgagtccgtgaaagagggcgcaaaacaaatcgcatgcaaatgaagagtgtgacacgcggatttgttataccgaggttcggttcttgcaaacctactccccgttgaggaggccacaaaggccgggtctctttcaacccttccctctctcaaacggtccttccgaccgagtgagcttctcttctcaaatcaaagccgggaacaaaacttcctcgcaagggccaccacacaattggtgcctcttgccttgattacaagtgagtgttgatcacaagagcaagtgtgaaagaaaagaagcaatccaagcgcaagagctcgaaagaacacaagcaaatctctctctctaatcact

SEQ ID NO: 62004 - DNA, 382 bp, Zea mays
  unsure (1)..(382): unsure at all n locations
ntangggaatagtcataaaatgttcccaagaatgaacttgaatcatatttatacccttgagataccaaaaaccccatttgaatcctggaaaaccctaagtccaaaccctatgggcttatgtgcaaaaacagtgcacatttggactaaagtgtaaaaattacaatggtaaggcatattaagtcctttggttcacaaatatgtgaatttgcaagtaaaaccctaagtnttgggtctatttgcaaaaatcacctcttaagccctatatagcctaagtctgaatttcagacctttgggctcaactttggagccttgcaactttcaaagtatagggtttttaccctaggtcaccacattaaacttgtagacctattaatggataaca

SEQ ID NO: 62005 - DNA, 480 bp, Zea mays
  unsure (1)..(480): unsure at all n locations
agcttcttcaccatgtgatcacggatatcttgagtatgtttgtcaatgcatttcccttttaggtgtgtcaagctcttctttagcctctcattttctcctttgagcttttgatatgaatcatcatttgttcctgcatattttagctcacaggaagatttgcttgttgacaaacaacaagcattagcacatggtaatatagtatcaaatttgatacatgtgcacgaatgagggtgttgggatttgaagttctctatcacaacctcatgagcaatgtttgatatgatatgtttatccataagattttcatgagaacatagaagcatatcatatttatcttgaaagctagattgtcaactttagctnttctacttggtccttgagcaaggtattcctatttactaattgagcgatacaatgtgaagcgttatcttgctcaattgaaatagtttcatacctttggaccacatcaacatgagagca

SEQ ID NO: 62006 - DNA, 492 bp, Zea mays
  unsure (1)..(492): unsure at all n locations
ntgacaaacttctntcttaggagaaaaatgaaatgtctagagtgtgtcttacagaatgctctcctatatcaatggcggtagccataggatctttagcttcaggaatatactgccataataaaatagatatgtaagtaacattaaccctacctgcaaacttatcaattgaaattaaattgatagtttatgtaagataccgttatgtcttgattgacgtcctctctctcttcattcagacgtgcatatagctcttcctttgtgatcattatcccatgctgagagggagacaaagatatcaaataagaattcatgactcctgatagctacccaggattgacatttattcttgtcatgtcatactactaaatgcacttaatagtaaaggttatacagcagttatgactntgcagatgataacattacaaacatggttatgatagatcttatccaagcaagtccaaataatgagttcagcagaagtgctatctcata

SEQ ID NO: 62007 - DNA, 463 bp, Zea mays
  unsure (1)..(463): unsure at all n locations
ggagaacacgtgataggtctaactaatgttcatattcaanaagatagaccttgtgcagattgtcaagcatggaaacaggtgggaggctctcatcacaccaaaaatgtgatgacgacatcaagaccattggagatgctgcatatggacctttttggacccgtcgcctatctgagcataagaggaagtaagtatggtttatttattggtgatgacttatcccgcttcacttgggtgttctttntgcaggaaaagtccgaaacccaagggaccctcaaacgcttcctcaggagagctcaaaatgagtttgagctcaaagtgaagaagataatgagcgacaacggatctgagttcaagaaccttcaagtggaggagttcctcgaagaagaagggatcaagcacgagttcttcgctacctacacaccacagcataatggtgtggtagagaggaagaacatgacactca

SEQ ID NO: 62008 - DNA, 435 bp, Zea mays
  unsure (1)..(435): unsure at all n locations
gacactataacaactcaagcttgtgaaggttcttcatccncacatgtgctaagcggcgatgccacagccagcccatgctagtcttagctattaagcatgcatctagaccggcctcttcttttgcaaaatcaactaaataaagtttgccgtctaatacacccttaaaagctagtgaaccatcacttcttctaaagacagacacatctacatttgtaaatagacaagtatatcccatattgcataattgactcacagatagcagattatatccaagagactcaactaaaaacacattagatatggagtgctcattagaaattgcaattttacctaaaccttttaccttgccttgattcccatcaccgaatataattgaatcttgggaatctttattcttgacgtaggaggtgaacatcttcttctcccccgtcatat

SEQ ID NO: 62009 - DNA, 447 bp, Zea mays
  unsure (1)..(447): unsure at all n locations
agatgctactggacttcactaccaacaaccaaagactaagcaaaataaaatttggcagcatcttctttggaattataagcatcgcagaagcaaaagagatatatcaatacaaaatgaatcatactagtatgatataaattctcatcaaggacaattaaccacgaatgaaccagcttatgactacatcatactctagagtatgaacctcacaagtcaataacccaagataattatttggttctttaagcaatgtgcgcaacgtgccgctacttcccactccccttgataagcatcaagtacctacattgagtaatgcaagagtgagatgaaacatctcagagagcaaaatgttttgatgagatatntaaaccacaagataaattaatcaatattctacaggaatcacaattaagatcagaaatactcgtagatatagaactcagtagt

SEQ ID NO: 62010 - DNA, 461 bp, Zea mays
  unsure (1)..(461): unsure at all n locations
tagacccaattagagattgcctccaagctacatttatgttatctaatnttaatattgnttcaactgtctcgaatttgcttcaaacaatgttatataaagaggggtactgggtttttaaagctatgccgcctaaccaccagtcttcccagaatcttacttgtgatccattcttgatttcgaaggttccaaagcgaagaaagtcttgcttcaccttcatcagccccgaccagaaatgtgagtcccctagtttccattcaacatgtactagtggtttggatccaaggtatttgtttctaagcaattgttgtcacgttccttccgtagttaggagtgtaaacaaccatttacttagcagggccctattctttaaattgagatccatgatgcccanacccncttggtccttangttgatagatgatagtccatttagctaggcggtatttntttattctcatcact

SEQ ID NO: 62011 - DNA, 387 bp, Zea mays
  unsure (1)..(387): unsure at all n locations
gcaagcttatttatttgcagatgtatagtgctcagattggatcttaatgggaccccagttcacccgtccgtcacaatctggacaaaccccaaacaccaacgaaacacaagtataattttgtagtatatttactttaatttacgaatatcatcatgcatacttttatttggttatagggctctgaaacccgacaaggaaacccacagatggacattcagaggaccatgcctcctagaggacagattcttcctccttcacaaccaggtatgggatattggccgccaccaccatggggatatcctacacatccaatggggccttggggacgccccccatggccaacacagccactttcatcaccagcggnacattcctgaatttaatgct

SEQ ID NO: 62012 - DNA, 106 bp, Zea mays
tgttcctcataatcttatggcaggatataacatacttactttgttctatttctatatacttactcagctttcttgctttatggcttgtttgagggttagaggggat

SEQ ID NO: 62013 - DNA, 375 bp, Zea mays
  unsure (1)..(375): unsure at all n locations
tgagcgctccgcaatcatcttatagatttctggactttctatattaacaagattagtttaatctgatttaaaggggttgttagcaatatctttattgtttgggttgtcatagtgaaaaaaaagggnttatgcccctgctaagtatatcatactatcaacaattatgaaggagtacaaaaaaacggaaaagaagaagaagggggctgaatctctaaatctgttgattctacttgtgctgcgctagttgatctttatcagggactacctttgtgcctaggctcacgtctctagcctgttctaccctacgaccatcacagtaccaccgttgaacgattatctatctagcttttgtaactaacgtggtactagtgtatt

SEQ ID NO: 62014 - DNA, 444 bp, Zea mays
  unsure (1)..(444): unsure at all n locations
actaagctataacagagaaggngtgtgaataacctcccttgtattatacccacctacagntgtccttgtccatcgaacctcggacaaacctgtaggcgcacctgatcactcgatgtggcagaacctcccaagttattgtgcccacatgcacctgtccttgtctcaaagacctcaaacgactatacatgtgcaccagataacttaacaggatccgtccgagtgttccaaggaccccgaataaaccacttacaaccaagatcgcaagattaagtaaacacaaatcacacaccaacatttttgcagcggaaatcttattaccaaattctacaagttacatcaagtgtacattatatttaccagagtgattacaaaagtgattcaaagaaataaactttgaaatattataaattatctataagtttggaatatatatgctagctcaat

SEQ ID NO: 62015 - DNA, 372 bp, Zea mays
ttagctattaagcatgcatctagaccccccttctcttttacaaaatcaactaaatcaagtgtgtccgctaatgcacccataaaagcctatgaaccgtcacttcttctaaagacagacacatctatgtttgcgaaaaaacagtaatattccatattgccaattgactacagataataattatatcccagagactaactaagaacacattaaaatagagtgtgcatttgagattgcaatctacctaaccctttaccttgccttgggacgctcaccgaaattattgaaacttgggaatcttggtttgacgatgagggaacatcttttctccacgcataggttggcatcgcttcaaaaccacttgacccccgagca

SEQ ID NO: 62016 - DNA, 485 bp, Zea mays
  unsure (1)..(485): unsure at all n locations
cttgaaggaggaggagatnggtatgaagctctgggtgcttgagttagtctattcaatttttgttgactcaagctatcaatcttcaatgttccatatccaaaattgacccaaagttatattgaattattatatctaaaactcatttcatctcggggaagatattgatgttgtaggaattaaagaattatcatgtgcggaaagaccaaggcctacaacatggaggaaagtcaaaggatggtaacacttatgttcttaagtgcaattatcttaaaattatcatatggcttgtgtagtcacatagaaatcggaagcacttaagatgtctttaaattacgtcactattctntgaagaaattcctctcatatagtagattgtgtattcatcatttctatattatgacaatctacatactttaaattgttgcaagttcccatggcatgtntntattattctagtattgccatgttctagagatagagagata

SEQ ID NO: 62017 - DNA, 467 bp, Zea mays
  unsure (1)..(467): unsure at all n locations
agcttcggcatagctcatttcttcatagtttgcttttctttgaangccagaaattcctgcaccanatccctagtgccaatgtgctgtgcaagaattctgaattcagccaacgccgtttgggttggaccttctggtgtcatattgcattggggtcgggtttctccgaagattagttcaagcggactctgtacaagcttctctttgtcgtcatcaactgtgacgtagaaccattccgatttccagcctgccggccacttgcttcgatagccgatcacaggaaattttgtagttttccgatatgcaaagttgtaacaaccacaaatttcatgtagcccatcctttctggccttagtttggtagtgtagctcgtgtactcggcagaaaccttcggcaaatggctccgctgcttggcttcggagagcccaaatataaacactaagtctaacaatagcgttaggagctagttg

SEQ ID NO: 62018 - DNA, 481 bp, Zea mays
  unsure (1)..(481): unsure at all n locations
tcacgacctcccagnggagctatccgatggcttggatcgagctaaggagggcgggaaaagggttggccatggtggcttccctcgggcggctctggcgggtcgcggggaggtcgccggagctatgggcgagctctggggagttaggcatggtacggaggaggcaacggggaagatagccgagcactgggacgggctttatagccgtggcgcgggcgtggtcacgggcggcctcgggcgcgcggaggttcgcgcacgggcgtgctctgagcgcgcccccgagtgtcagaccgcgtcgaacacgtgggagctcgcttctgccatgggtcaacgacggatttgagcaccttagcgtgcgtatcttggcaaaaccactgtgtacgatctcttccctgctccatatacctaccttttgctttgaagttcaagccaagatacggtcggggtanggagatagaggggtgagaaagtgcctatgtcatac

SEQ ID NO: 62019 - DNA, 442 bp, Zea mays
  unsure (1)..(442): unsure at all n locations
acctcttagtcacctgangcatgcaacttactgcttcagccttgtacctgcttcttaacgtaaaaagagccggtattggaccgacatggctcgtatactgatcatgggccactcacatatcagtgtcgtaatagacttcgacaaatgaatacacgtgccctttttaagaggagattaccactactgtccatcaaatggggtggcccgtgctaaggcccggctgcgcgctgaagattaatacggatcataacgtgctttacattttactagctcagagtcatggcgttacaacgggatcatattatatctcgataacttatatatacaaacgtgcgttatattgttatgagatggatgacgactttcacgagccgtccgggatgacgatgaagagaaattcgtgcctgttactcactagcactcacctagtatgtgtttatac

SEQ ID NO: 62020 - DNA, 421 bp, Zea mays
  unsure (1)..(421): unsure at all n locations
taaatactcaacttactttgttcattcgagataaacaagaggtgctaagttatattggtaaacagcgngatgttatcttaaatgctgaatgacctctgatcatgtatgatgcatggttatgcactttgcttggctatgcttgaattacatttttttcacattcatacttaaatctatatagaatatacagccaagagtactagctaagagtactgttgaattacgattgctctaatgtttggttcgagggtttgacgaaaaagttttgaagggacatggatatcatatatgggtatgtatatggagaaaatctggtgtgttttgaatgccttgggcgtatataatcatcttattagaccaactccaacagactccctctcactatccctatttagcacggccaacagtttctctctcctct

SEQ ID NO: 62021 - DNA, 421 bp, Zea mays
tctcaatatgacgatgcagtgaactggggtacgtggatcttgctgttcgaaaggcgtggcgatataaatctatgatgagcgcatcgagcttcacatatagatgctgcacatcaccaaggacatacctatgaatctggctggtcccatccaacatgttagccttgtcattgattacctacataacggttcacacgaattgctctaacttctcatatagatgaagcaacttgaggaaccatcactgatattacccaatatacatatcggcttggcctatgatctgtcggcattatcacttatattacaggtgcttacagcacctggtgcgcgcaccagttcatagtgacatataagcgtgatcactttctctcttgatagagaaccctacaggatgcaagtgttggtccctgcactctaacgt

SEQ ID NO: 62022 - DNA, 456 bp, Zea mays
  unsure (1)..(456): unsure at all n locations
agcttgnggctgacttgccgaagcaacatatactgtgggatgnatgcccacatattctgggatgtagggcgaatgatacgaagctgtgtgcatgacctgcttcggctgagcttggtgtgctgctgcttcagctatttccttttgcttctgaatagtaacatggcacatcctggtagtatggcctttgttctcaccgcagaataagcaaaagattcttcttggttgatcgccaaatcttcctccaaagcccctggcgcctctgcctcttggagctggtggacggaaggagctttgctgttgccctgaagcctgtgaggaacattgtggcctttgctgttggcttcctctatcatcattntgtgtagagttatgaattgatctcacgtgcctcgggtagaacctccctccgaagcccctggtcatttcagaaaacctgaaagcctcctcccttctttg

SEQ ID NO: 62023 - DNA, 474 bp, Zea mays
tcttgggctcagcctgcaccaccaccaccgctactacctgctctgacccaagccagcagctagaagggcaccagcacgctcaacagcaacgtgacttccaggaggagtctgaagcttgcacagtaacaacactgtgactgaatccaagcacatccactaagaaaatatcctactcttggtgtatctttatctctcctaccattttattttttgtatgaaaaacaagccacgaaggattgaattttaatttcatgtaataattgtgccagcatcaacgagtaagatctgccttcctaacagacttacgaagttacagaagtcgttcttaatggagcgcagagtaagttccgaagctacaaaagtctttcctaagagagcgcagagtaagttccgaagctcagaagtcgttcctaatggaatgcagagccaaaaattccaccgaaatagaaggtgaagaagctccaaagtcgttcc

SEQ ID NO: 62024 - DNA, 429 bp, Zea mays
agctgagagtaataagtgagaaagataagaaagttaattctttctaactagagcaacaagaaatacaagtgatcctcttacaagtcctaatgcgctagaattgaattgtggactttgattggatcgatggctatgatttgtgtcttggagtgttgcactttgctcttgtattgaatagagattgttgaatgcttggatggttggagtggaggtggttagagggtatttatagccctcaaccaccaaaacaaccgttgggggtggctgctgtcgatgggcgcaccatactgtcttgtgcgccagccacgtcacccaatcgttagggttctgacggtttctatcgttggagctttgtcttcttgtggcaccggacaatctggtgcgcctctggcggatgctctgacttctgcgcaaactgttcgtgcactg

SEQ ID NO: 62025 - DNA, 431 bp, Zea mays
  unsure (1)..(431): unsure at all n locations
tgtgaacagtacanattcagaagggagaaagcagcttcagcagatcagtctaatcccatgctcttatgcgaggacgtagcggagcagaaggtggctgtgggctcccaattattcgaagaacaagagaaaaccttgataaggtttttgttcaacaacaaagatgtttttgcatggtcagccaatgatctttgcggagttaacagggatgttattgaacactcgctcaatgttgacccatccttcagacctaaaaagcagaggcttctgaaaatgtctgaagacaaggccaaaggagctcggaatgaagtcaaaagactcctcagtgcaggagttatcagagaagtaaagtacccagaatggctagctaacacttgtatggtaaaaaaggccaatggcaaatggcgaatgtgtatcgattntacggatctcaa

SEQ ID NO: 62026 - DNA, 389 bp, Zea mays
actaaaaaatgagcatgagaaactgcattatttctcaacagaattgcaagctcgcattgctgagatttgtagaggcaaaggcgactcacactcccacgaataattagcaaagccacagcgagcggatcagaactaaagcaattgcaccaaagtaattgcaagaatacaaacaacatgttatgagcaggaaagaaccatcacaggcatgatacaaagatgcctagacgaattacgtaggacattagttgagtacagcacccatgataaaacgagaaaattacaaatggaacttattagactgactgcggtggagcaaaagttgagaggtgaaattcgatcttgaatcttgaagtaaacctctcagacaagagaacattgcacttcttaat

SEQ ID NO: 62027 - DNA, 424 bp, Zea mays
atttattcgaaggcctaaaatatcttgttgatctctcagtgaagcttgttcaaacaaagagacataaagcttatgacttagtatacatgcttctcagattaatattacttctgtctgtggcaacagcgggtgtgagagggcattttctgtgatgacattcatcagaagtaagccgagaaataagatgggtgatagacctttggatgactgtctactcacatttattgagagagatgttttctttcaactggacgaagaagatgtaatcaagactttttttaccatcagacaccgcaggccaaagaaaacaagtaatcttctagtacgtactgccatgagtaagtgaatattatgcatatgttgaactgcataaaatattatcatgtgtataacaaatattatattggaaccaatattatatata

SEQ ID NO: 62028 - DNA, 279 bp, Zea mays
ccccgggaatctttgtaaggctacgtagtgagaccctgcttattcaccttgggagtggtcaaaggtccgtacaacccgaggcaaaaagggaatcacggctcatgggtaaagggtgcaacctctacagagtgtttgaaaactgatatatcatcctgctcgccgtatgagcggccaaggagcttcagtgattagtggtacttgatcagagatgttcggattacaggtggcaatgagatagatggttcttggtgttgactcgggtaatggtaagtggtactc

SEQ ID NO: 62029 - DNA, 489 bp, Zea mays
  unsure (1)..(489): unsure at all n locations
ttaatcacctgcggcatgcaagcttcgcacctttgaactaactcgaccgcatcgttcttcttcgtcggccaatanaatcctgtcccgactagtggtctggatgctgcatgtattccacattgcccagcatggacctccttcagaagttgcttcccggtggacgggagaacgcacttcatgaggacgcccgatgcaccccttctgtataatgtctccccaatgagagtatagtgagccgactgcctggcaatacgctctgccgagttcttgtcgtgtggctcttcttcattctttatatgcttaatgatcggccttctccagtcatcagagtctgactcgggttgatctatgatgttgcactcttctgtttgatccattgagatactcggttgcagaatttcttgacgaagactccgggtgggacctgagttcgactggatccgagcatggaccgttattagctgctgtgttccgatctctttccacatg

SEQ ID NO: 62030 - DNA, 487 bp, Zea mays
  unsure (1)..(487): unsure at all n locations
ctcagcttgtcaagcatatttggtatccatctcttgatggatccatcaatgttatttaacaaagatctatggacccaaatgtcctttgtgttagcacttggtaaactcattacctttctagcacaagttgcaattttgggttgcctagttacatgagaagtaattgacaagctaggagtgggatagttattagtgggacaatccctgcattgatgtcccttctttcggcaagtgtagcatagggcgttttcaagttttgaggatttcttctttcctaacgctatgcctttttgtttcaaatggggacaagatttgattaagtgtcccttctttgagcatttaaaacaaagtttatcatccttgttaataatcaagcccattttaatgtanggacaagacctaatcaagtgtccctcttcaaagcattcactacacttcttatntntcttagtgtgaagtgtagcttggtcattaccttggatgtacc

SEQ ID NO: 62031 - DNA, 478 bp, Zea mays
  unsure (1)..(478): unsure at all n locations
gcttcacgaagaggaaccgttggccatcttatattactgtcttagccgaagaccgcttcttcctataagaccttcggcgacgaagcatatacccaacaggcttggtttggaagccttgaaagcttgtaaggagcatgtccttcagcttctgccacaaagtgacagtccatggtcgaagagatgaataccatgtttgagccacacttctgaccgccatgacaaatgactttgccatgactgttgtgttgccaccataggagggtatggtggcttcgtaactcatcagaaactacttcaagttcgataggccatcatatactggcaatgtgggaggcctgtagagtgatggccacagtgtggcttgcagttctagtgtcaatggngaagcttttcatatgcgcggccagtggcggagctctgtataattaatgcccccggccactctacacatgtaatgatgtactacttcgtcttttat

SEQ ID NO: 62032 - DNA, 484 bp, Zea mays
  unsure (1)..(484): unsure at all n locations
ttgtcagtatgatgtcngtagcctggacacctcggcatgtggttgtattggtggtagtgtaggagtaaaaggttggttggtgtggcggtggcctatgcacacctatgtgtgagcctagcggtggcgggcaatattgagtaagccatgaagaaggagaagcttgcgaggacgagaggaggttgaagacagaagacattctctcgtcttattttttaaaacagatgtaattattgatatagcatattataataaataatagcaattttataattatgatcagtacgttttatgatgtgtcgtgtgaattgacgaataacatattctctaatgtcgcacaaacaaaatttaataatataaactaatgttattattggctatgttcaaattaacgcatttttagacgagggacacattcncaaggaattcgacctcattttataatagaaagaaaacattcacctaatataaatacggggagaagata

SEQ ID NO: 62033 - DNA, 364 bp, Zea mays
aagataatcagtgtcctattactagactcggactggtcattggactgagcataacatggagatgaattaacccacttaactctatataacttagcaaattcacgtacctctattgacataaaagaagttccatgaactgaatacaaggtctgggaaatgccaaaactatggataacatgctcagttatgaactcaaatacctgcttgtgtgtcatgtccattagagcaacggattcacttcatgtgagaaaatagtcagtggcaactaacacgaaccgatgcccctatgatgatgaaggatgaatttctactataaattcagatccccatcctctgaaaggccaggcttgatatatgatgtaat

SEQ ID NO: 62034 - DNA, 465 bp, Zea mays
  unsure (1)..(465): unsure at all n locations
tgaacagatntatgtntttgtacaatatggcgcattcttttctcattcttgagtttggtttcttaattttccatatttattttccttgtccagcttgcaaagaagggagaacaattcattgatgtcccttatgttgtgaagagtatggatgtgtcatttattggcatattgagctttattgaagctgcggcgattgaaaagcttaaaaataatgagtgcacacctgcggacctatgctactcattgcaggtacttgcatgctcttaaactcttcccccttgtggataataattggttatgctttcttgacagtggcactgatgaaagtcctaatatctcaggaaactatctttgccatgcttgtcgaaattactgaaagtgccatggcacactgtgattcaaaggacgttcttatcgttggtggcgtcnngttgctacgaacgttacaggagatgatgaagatat

SEQ ID NO: 62035 - DNA, 445 bp, Zea mays
agcttctaaagggagagcacattgtaggatttatattatgttcatctttagaaagacgggagttgtaatgcatgccaagcacggaagcaaattggtgcccaccatccacataagaacatcatgacgactgacaggccactagaactcttacacatggatctattcggcccgatagcttacataagcatcggcgggggaagtactgtctaattattgtggatgagtattctcgcttcacttgggtgttctttttgcaggaaaaatctcacacccaagaaaccttaaagggattcttgagacgggctcaaaacgagttcggcttaaggatcaagaaaataagaagcgacaacgggacggagttcaagaactcacaaattgaagggctccttgatgaggagggcatcaagcatgagttctcctcttcctacacgccacaacaaaatgg

SEQ ID NO: 62036 - DNA, 368 bp, Zea mays
acctataaaactcagcttagactggctactgacccagtggttgggctatctgttttatttgagcaaaaccatatcaccgacttgaaagtggcgttcggtccggagacaatctgccttcatcttcatgcggttctaggctgctgcaagctgctccctcaacatcaaggtgaattgagccctttctactaacagatgtgccacatcaacgacggcatcagatggaatatgaggtgctgctgcaaacggagggtcataaccgtacatcactttgaaaggagaacaagccacggaagtgtggtatgtggtattgtaccaaaattctgccaaaggcaaccaattcttccatttagtgggttgagcatggactg

SEQ ID NO: 62037 - DNA, 454 bp, Zea mays
  unsure (1)..(454): unsure at all n locations
agctatatcaaatggacgtgaaaagtgcctttcttattggaccaatcaaggaagaggtctatgttgagcaacctcccggctttgaagatagtgagtaccctaaccatgtttataaactctctaaggcgctttatgggctcaagcaagccccaagagcatggtatgaatgccttagagattttcttatcactaatggcttcaaagttggaaaggccgatcctacactctttactaaaactcactcttgaaaatgacttgtttgtatgccaaatttatgttgatgatattatatttgggtctactaacgagtctacatgtgaagaatttagtatgatcatgacacanatgttcgagatgtctatgatgggggagttaaaatatgtcttatgatttcaagtagagcaactccaagagggcaccttcctaagccaaacgaagtatactcaagacattc

SEQ ID NO: 62038 - DNA, 478 bp, Zea mays
  unsure (1)..(478): unsure at all n locations
tattttagcctctcattntcttctttgagctnttgatatgtttcatctgttgctcctgcaaattctagctcaaaagaagatttgcttgtcgacggacaacaagcattagcacatggtaatatagtatcaatttgaatacatgtgcatgagtgaggctgttgagattttaagttttctatcacaacctcatgagcaatgtttaatatgatatgatcatccataagaatttcatgagaacatagaaacatatcatatttttcttgaaaagctagattttcattttttagcttttctacttggtatttaagcaaggtattcttatttactaattgagcgatacaatgtaaagcgttatcttgctcaattgaaatagtttcatacctttggaccaaatcaacatgagagcatattagctcctcatgttctttagttaactcgtcaaagcattgcatcttcatggagagaatactttctagcc

SEQ ID NO: 62039 - DNA, 351 bp, Zea mays
agcttctaaagggagaacacgtgataggtttgactaacgtgcaattcgaaaaagatagaccttgtgtagcttgtcaagcaggtaaacaagtgggaggagcacatcacagcaagaatgtgatgaccacttcaagacctctggagctgctgcatatggacctcttcggacccgtcgcctatctgagcataagaggaagtaagtatggtctagttattgttgatgacttttcccgcttcacttgggtgttctttttgcaggataagtctgaaacccaagggaccctcaagcgcttcctcaggagagttcaaaatgagtttgagctcaaggtgaagaagataaggagcgacaaca

SEQ ID NO: 62040 - DNA, 476 bp, Zea mays
  unsure (1)..(476): unsure at all n locations
tataatgcagtgcaggagaaacagcgggacaagcaagctgctgttgaggcgaagctatagaagctgcagcaggaactctccgacaaggccagtgatattgctcgcgttgagggaaacctcaaggcgagggaagcttccctggcgaaacgaacaactgacctcacttggcaggaggaggacctcgtctttatggaggagatgtgggcaaggcggaacaagctgctggatgagcttgagctcgaggcagaggagaaagtgaagcgtctagaagggaaagtgcggacgctggaggggcaggtccgtcagttccaggcagcgcaggcgacacagtcggccccgggcccccaggcagtggaggtgttgaggaagacacttgacgacctccaggcagagcaacgcgccaaagctcagcgcatcaccgcttgggctggcgaggcaagcacgacgctagtaccattgnggatgagtcccatcct

SEQ ID NO: 62041 - DNA, 489 bp, Zea mays
  unsure (1)..(489): unsure at all n locations
ntaacttctanngaattgtgaaagggcctctagccgagttgtttatgttgtcttagtagcgctcctcgggttctgagttcgacttcctgtgggtgcaaatttcacgctgtggttaaaaaaaatcttcttgtctgtcccacgccaaagcacaggtctaaggctcagcctcggtcgcgattgttctcacatgggcttcgatgccgctgtgtatgggtggggcaagggttcanggttttctcgacctgtgtgagaaggtcttcttcttagtacaatactcggggatgtcttacccccgcaggtcgagttttttttaatttctaggaatttctaaatcagggtttgttcgttttgctctctatccatgtggattgngtggaattgagtgggtttcaatcccaaacaagtcaaaatcttttataattntttccaatctcatccaatccacatgagatangaataaccgaacaaggcctcaactggaacgttggg

SEQ ID NO: 62042 - DNA, 496 bp, Zea mays
gtcacctgctgcatgcaagcttcatatgactgaatctacacatcttatctattttttttaatcaaatccttccctgcaaatagtagtacctcttagactttagtaaaatcctttacattatctaatacacacagtatgcttgttcttatctatcttgcacgtagttcaacatgagcgaactgcttatgagagaagacgggataaacaagtggaggagaatataaagaagatgcaagatttgggtctgaacaaatatacttctgttctaaataattctgtctcaccatctgcattaacaaaggggaaacatgcagcatacaagataaattatagttcagattcggattcatatgtctctctctatctcctcgacgatgatgatcaaggagatactgatgatgacagtgaatattatgagcagccacaacccctgcaatgaaggtgtcctttatcttcaagtagtggatgcaaatagtgcattgatttaatgtttaat

SEQ ID NO: 62043 - DNA, 476 bp, Zea mays
  unsure (1)..(476): unsure at all n locations
ctcaagcctaatatgatatttaaatcctatgagtgaagtttgcattgctttttacattgnttgattcctaaacccaaaaccctagctccgtatggtaaaaatgtctaatcctactaaggaactgacctagaaaaactatagtttccctcgtgcaccgtgaaagaaagttgtatgcaagatacaacttaatgtagcttctctattattgcattntcataaacattacatgagtattcatgggtatatatggttatgtatagagaacgaggaagaaataactgttgaagaggaagagactaccccatcgacagaaaatccacctgccgggaactgtttctattntgatatttgtggaacagagcccgactctcctacaacacaaggcaagccccgatgcatttgccacctccttgttgttntagactctttatcacttaaatgatgcattangtgataggagttgggtggtaaaccta

SEQ ID NO: 62044 - DNA, 474 bp, Zea mays
  unsure (1)..(474): unsure at all n locations
gctactaccaacgcgaggacgaacaggatcctttgattgctttgttatagtttaacacgcacgagagcgttggcttgaacaagcccctaacccctgtttatatcgcgcgaggtggtcgttaacctcctcccttaaatctcatccctttcggttaagggccgagtggatgaaattctaacaattgtaaggcatttcagcgtgaatgctaatcaatagcactgttctagatataaatagngttaacttttgatgtttcaaacaatagcatcaaatagcaatggtttaagatactattttagcatgacctctccaaaacactccggaggaacagctgcgaagccctaccatattaagattatcttcggtaattgtataaaatagaggacacgtgttgcagatgatactgtttctaaagtgaagttngagatagataacagataggagagctatcacagacaacttataattgtatgt

SEQ ID NO: 62045 - DNA, 445 bp, Zea mays
  unsure (1)..(445): unsure at all n locations
agcttaaagccatggtaagtagcataggccaataatatgctaattgactcaagcctagctacgggtgcataggtttcaccgaaatccaaaccttcgactngggagtatcccttggccacaagtcgagccttgttccttgtcaccacaccatgctcatcttgcttggtgcggaaaacccacttggttcctacaacattatggttaggacgtggaactaaatgccatacctcattcctagtgaagttgttgagctcctcttgcatcgccaccacccaattcgaatcttgtagtgcttcctctaccctatgtggctcaatagaggaaacaaaagagtaatgctcacaaaaatgtgcaacacgagatctagtggttacccncttatgaatgtcgccgaggatggtgtngacggggtgatctcgttggatggcttggtgtactcttgggt

SEQ ID NO: 62046 - DNA, 479 bp, Zea mays
  unsure (1)..(479): unsure at all n locations
tctanagggagaatatatgttatgactaacccatgtatattntgagatatacataacttctgcagctggtcaagcaggaaaacaggtgggaacaagtcattcgagcaataacataataatgacatcaagaccactggagttgctacatatggatctcttcgggcccgttgcttatcttaacatcggaggaatcagtatgggcttgttattgttgatgactattctctcttcacatgaatattatttttgcaggataaatttgaaacccaagaaaccctcaagcatttcttaaggcgagctcaaaatgagtttgagctaaaggtgaaaaagataaggagcgataacggatcaaaattcaagaacctttaagtggaagagtaccttgaggaggaaggaatcaagcatgagttctccgccccttacactccacaacaaaataggttggtggagaggaagaacangacgctcattgacatggc

SEQ ID NO: 62047 - DNA, 251 bp, Zea mays
ctacttgctgcttaagggcctcacttggctccgcttgtcttgttttcgccgaacgtccgacaagggcaagtcccctctgctgaattacctccggatgactgtgtggacccccatgccctcgtctgggcttcgccttagtttacggccgtgagggcgaagactctgtctccgtcaatgagatcccttcgagatggctcgttcacatccgggacggctgacggaactgcacactggggacccacgctttattt

SEQ ID NO: 62048 - DNA, 391 bp, Zea mays
gatcataagctactcagcagcaactttaaaatatcatcgagctcagttactttatcgttgatactaaatgtaaggcacttcaaagaatatctatggaccacccctaaaatggatgctcatcaaggataatcaagcctctcagcaaaagcacgttgttcaaaaatatgcttctgcgcttttgtcagatgagtgatgaaacacaaaacatattgatctcagcaattaacttgcgttgaagggccatctaccctagagaacttcaattccttaattaccttctgctcttaggcagccggacattacaccttatcatacttatgagcagctacaaagatacccttggacctgacacattacaatctagagtatagagcgaaacctctctatatac

SEQ ID NO: 62049 - DNA, 474 bp, Zea mays
  unsure (1)..(474): unsure at all n locations
ggctgcagcttgcctcacaatgatatactatatgttttttattaagccatgaaggataccacttgtatatcatgaaagatactcatgagtaggagttcctcataagattatttctcctaaatgagtattctcctttggaaagagtttttctccccctttagagatgaagaaatactccccttgacagagatcctctacttaggaaaaagcatgtgataattagaggtgcaagacatgatttgaaaagactgacttcccttatgcataggtaacagaatatgagttaactacttatgcatatttagcaacatggaagcatatgatatgaaatatagtctaatcatatattggagaagacatgtaaatggtactgaatgtagtctcacaagataccaattgangaccaattgtaggtcaatggcgagcttgagagacatgagaagtcttggagattatgcagtggaagattgttgt

SEQ ID NO: 62050 - DNA, 481 bp, Zea mays
tctcctggacaagtgctgcactcaccgctgagtgctatactgttcttataataacaaaggagcccctggcgttggtggagtcaatgttgataaatctatcagatattgcttcaactcctcgaaggctttttgttggcttggtccccattgaaagacttcggctgatttcagcacttcgaagaatggtagattcctttctgctgatctggatataaatctattaagagatgccaacctccctgttaatctttgggcccccttttttgtggatggtggctccattcgaagtatagcttcaattttacttggattagcttcgattccctttgttgaaaccaagcatccaagaaatttccccttctttactccgaagacacatttttctggattcaactctaagccagcttgtctgaaactagcgaaggtctcctgcaaatcagcaatatgatattcctgtttcgtgctttttacaatgatgtca

SEQ ID NO: 62051 - DNA, 461 bp, Zea mays
  unsure (1)..(461): unsure at all n locations
agctgatgtancaacctcatgtgatgatttgatttatgaagagcaaactagtctacatgatgaattgactgaaaaagttgaagtcctgactttagacaaccaataattgaagaattatttgactgatgcaactactagaggaaaagttgctattgagaacaatgatttcaacaatgagttggcagtggataatcaaaggcttaagaatgaggtcaagatactaaaaagtgaatatgaacatcttgcaacaagtgtgcaaaagttcaacaagggtcaatacctccaaaatgagctgcttatgaacactgttatgaaaaataacaagagtggtattggatacaatgcttttgtgcaaaagaaagctatcactcaatacaagccaatgcagactcgcatgcctatcatatgctttgagtgtggaaatgaaggtcattttgccacaactgctaagctaaaccacc

SEQ ID NO: 62052 - DNA, 482 bp, Zea mays
  unsure (1)..(482): unsure at all n locations
ntntaccctagcatatcgccaagtttctgcagctgtctgcattctatgatngnnatgatacaagcacgccagtacacccacacatatcaaataaaacaagataaaaccaagaaggcgatttttttttctcagggtacgaaatcctcaggatcccgaaaagcaacagagagccaaccagcaacttttcaaccgctcgcgtcgtctccaggaaaagcttcagagcctttttacactgctctaccctaccaggcagggcaccaggtactcgtccgtgctggtcagcgtcagcgatgagcgagcggagcgatcgatcaaagatgcatgctcagttttctcgaaagtaaccgaggctgactggctgaggcatgcatgcagatcacacagtgggtttgcatggcgatgcaacacaggacaggacgcgtatatatatgcaaacaagtgtttctgggtcatcatggtaaatagtccctggtgagcgtctg

SEQ ID NO: 62053 - DNA, 279 bp, Zea mays
tgaccaactgaagacactatggaccactgctacgcgataggctcaaccggacatacatgacaccttagatgtataatgtgaagcaattcggcactggacgcggctgagtctaatgcaagagggacgagtgattgtgacgcttaaagcagtcgcacctacatgaggagcactattcgactgatgaaccggaactagctgatgcggtaacgccctaagaattggcgtactatctgctggagaaatctgcacgaataacagatcaataagactgaatacatg

SEQ ID NO: 62054 - DNA, 468 bp, Zea mays
actcagctgtcagtacttgattggaccaaaactccattcatgttattttgactgctagagttccacggccaattcgaggagggctcacgaccgttctaactcacaataaagcatggggtagactgagatgggcacagtaccactcatcacttacacacgagaaccattagcggcattatccgcttgcggtcgactcctatgaatggctgactcataggatttcatgaagagaattagtgagtcattggttccggacaaatggaatcgacaactatatgagtcggggtctgggtgaaagtgcaatcatgccttctatgagttgaggtgaattggataacaacacatctaaacgtctaacaagaacgctaagtgttgaacatgacattcagtatgaggaacatactttgatagtgtataatgatcagtgcacaaacgatcagcgcgaggtgtaatgaccagtgagacact

SEQ ID NO: 62055 - DNA, 414 bp, Zea mays
  unsure (1)..(414): unsure at all n locations
tggttcacgaatattacagacagtggacgtggttctattcatacatatgcttnggagcctgcagagtacaaactatccacctttttggagaatattaatgttatccacgactcctgttacagttttgtatcaaatcgcatcatatggagattcgacaaaaggataagagcttctgggacactctggtaccgaagcaatactattactagtatcatatcttctacctatgtaatgatctaatgaatttttccatctcaaagaaatgatgtcatacacatttactctttttccctgtaagattggtccgatggagctatctcacagcctcagttggttcttggagatctcatagaaattttcttcccaacggggaactacataacaatttacttcatgaatcttgcaaaggcatga

SEQ ID NO: 62056 - DNA, 397 bp, Zea mays
agccatggtagagagcatacgccattattatgccaattgactcaagcctagctacggttgcatatgtatcaccgatatccaaaccttcaacttgagagtatcccttggtcacaagtcgagctatgttccttgacaccacaccatgctcatcatgcttgttgcggaagacccatatgtgtcctacaacatattggttacgacgtggaactaaatgccatacattattcctagagaaattgttgagctcctcttgcatagccaccacccaatccgaatcttgtagtgcttcctctaccctgtgtggctcaatataggaaacataagagtaatgctcacaaaaatgtgcaactcgaggtctaagtgttacccacctattaatgtccgcgacgatggtgtc

SEQ ID NO: 62057 - DNA, 466 bp, Zea mays
  unsure (1)..(466): unsure at all n locations
tgcgattntcttcacttccaagccagtcatcccgaggtacttttgtgctgctgtaacattatctggccctggaaatggaggcggtaacgttaaacagttcctatcagacaaccaagtgcacaatagctatccaagtttacaataatcttaccaaaagctcgtcataaagctcattacaaagagaacagcgcttgataagaaacggtatcacatagtagcagtaggaaacagagaacaagaaatggaagtacctttcgttaactggaaaacatgaagggcgcagcgttccgcagctagacgtacaggcatgctagagtccttcanagcttcagcaattgccgggcccaatatagagtgatgtgtagcaagagctgaatgattngtctacaggaaggaatcattataataccaccatgtcaccatgaattaagataccacgtacattgagataaagaggctccaatga

SEQ ID NO: 62058 - DNA, 482 bp, Zea mays
agacttgttgaataatatttagtgcatgagtatgtatacttgtcgaccgcggaattcgatcattcaaacatgactagggacatattcccattgctctatatggatcgtagtggttcctagcccatagtttgttgacattgtcttcttcgtggtcacaaagacattcatatcagtactcactaatagaattgatcatgagcacaaattggcctttcattaagtttctcttatataaacccttagttaagcaaccagagtttggctaggcctacttggtgaatctgggctcaacctattgagtttatggtgagaacattttctagggatgcttgagatctctcgcctccccatccttaaggtgactctatatgagggcatctattaggacatcactttggtctgcatcacttgggattcggcgatgtcgtaccctcctctatcatatgtgtagaactatctcacgtccgcttctatggttatta

SEQ ID NO: 62059 - DNA, 471 bp, Zea mays
  unsure (1)..(471): unsure at all n locations
tctcagaaaatananaactgaatcaaacagacccaatctcttctatccatgtcttacgtcagggcggcagagngattattctctaatctttttttaaatgagtgcttttatgaatcgatcgagtttacattcagatgccattagctcataacacaactaagtgtgatttgttcgctttgtcaattgagctaccaattacggtgttgtttggttcgtataactgtaacgtgacgagtaataaataaagttaaatcatgtttatttaagttcaaccgtaattagatatcatactagaaactgataccagcctattcaaatttattatcgctgtcagtcgagcgtgaatcattaccgttaaattcatgaatcacacaacacctatatttcggtcaccttccatataacaataacaattaacaaatcacaggtacatataagcgagttgcatttnttatgggacaacgtctctgt

SEQ ID NO: 62060 - DNA, 413 bp, Zea mays
  unsure (1)..(413): unsure at all n locations
tcccgataagtgtgtctgtgcgggaccccgatgnnnnctcttggtgatcatcgtctccgagcggtgcatcgaagccaacccgaagaagatcgccgccatcaccagcatggggcccatcaaggacttgaaacgcgtgcagagggtcatatgatgtcttgcggctctgagccgcttcatctcactcctcggcgaatgatgtctgtctctgtaccgcctcttaacgaaggccgagttgcttacttggacccctgaggccgaggaagcactctggaacctgaaggcgctcctcacgaatgcgcctatcttggtgcccccancanccggagaagccctcttgatctacgttgccgcgaccactcangtggttagcgccgctattgtggtcnataggcaataataggtgcatgcattgc

SEQ ID NO: 62061 - DNA, 412 bp, Zea mays
  unsure (1)..(412): unsure at all n locations
agcttgatgaagngactcacagagatgtgctcgtatatatatcttttactattacaatgcctangaaacttaacaactactctcgcaacgacactctttaattgtgattagatattgagaccttgaatatcgtcaaatagcacgaaactacataaaatacgaactttatattatattctgcattaataatagatagatagatgtgacaagtgaaccatgtacttacggaggatagggactcaaggctgcaactgtactatattggtaagtgtaactgatgtcattgatcctataggatcgatcatgacatcattgcaaagatacatatatcatgaaatggatatgatgagataacatgaaaacaataagagtgtaacacatggaagatttttattgtaaaatcgcacattac

SEQ ID NO: 62062 - DNA, 504 bp, Zea mays
  unsure (1)..(504): unsure at all n locations
gtcacctgcgggcatgcaagcttagctnctgtcacacccggtattggaggtatatctaatgcgaaccatgtacgtgccaggatcagtaattcacgtacacggcgattacataaatgactcatcatagcacaatgcttcgaattacaataaagagtaagtaataatattacagactagagccatttacataatataaatcagagtacacagaatcgaaacgtagccaacgtaaacaacccaccacaggcagctgactggnggaggtcgctagcctaatcctcgaactcgtcgaagtcctagaactcctggagatccgcctcgacgacttcttctttacctgagcatagattacaccaaaggcaacctggtgttttgtgaaagcaagggtgagtacacctcaacgtactcagcanatggtcccgttggctgtagtggactagctatatgtggcgttaagctcaagcagttgctttagttggcagatattaatatagtggaagcaag

SEQ ID NO: 62063 - DNA, 391 bp, Zea mays
  unsure (1)..(391): unsure at all n locations
tctaaaggggagaacacatttgngaataacaaatgttcattntgagaattacaagattngtagcgtatgccaagcagggaagcaagttggtgttcatcatccacataagaacatcatgacgaccgacatgccacttgagctactccagatggacctattcggtccgatagcttacataagcatcgacgggagtaagtactgtctagttattgtggatgattattctcgcttcacttgggtgttctttctgcaggataaatctcaaacccaagagaccttacagggattcttgaaacgggctcaaaatgagtttggcttaaggataaaaaagattagaagcgacaatggaactgtgacaaccctnctgttggggacttgtccttaaatgcta

SEQ ID NO: 62064 - DNA, 455 bp, Zea mays
  unsure (1)..(455): unsure at all n locations
agcttcacgaaatgaggtgaggggtgtgctctgttcactggcggngctctaagaagggagctgggcgtgtgggcgggcgttatggccgagacatccggctacgtgtgcgagtgcgcacgcgctggtccacggcgagcgcgaagagggtggaactgacatgttaggttcatggtgtatagagaggataatggggcgtgcggtgcaacgactcggcgactggtggaccgggcccacgagacagagatctagagggagcgcacggtgaagaaaactattgccgacaggctggccccactgggcattgagcgagggagggagggcgcgcgcaatggataactgtcgctgacaggcgggatcctgctgtcataagcgcgggcgctcggtctggctgggcgactgggctggtttgggctgctttctncttttcttttctctgaaattctaattccttttca

SEQ ID NO: 62065 - DNA, 407 bp, Zea mays
  unsure (1)..(407): unsure at all n locations
tcgtcttgaccatattcctgtatactcgtggtccaattccgtttatacctactcacatatttcacttggaaaacattgtcaaattatatttttgaggaccttcagaagccgaaggcccccaacaatatattttaacaacctatgcatttatagcaacatgggaagcataggatatgaaatatagtatagtcaaaatctggagaagacatataaatgataccgatagtagaatgaaaccacttgcggaacgaattgcagtggaagcttattgtctttctccggngactccattttcattcaatgggactactacacataatagaattgagaacaagtattagtctcaaggacttagattatagagtaacctccccctaaaagtgtgcatacacagtttgaatacttgt

SEQ ID NO: 62066 - DNA, 478 bp, Zea mays
  unsure (1)..(478): unsure at all n locations
cagcatgcagctttagagattagagagagtgaatngtcttgtttatttgagctcttgcgcttggagagcttacttctttctcaatcctcttgcgatcaaactcatttgtaatcgatgctagagacaccaattgtgtggtggtccttgcgggaactatgtgttccgattgattgagaagagaagctcactcggtctacgtgacacgttgagagaaggatagggttgaaagagacccggtctttgtgaccacctcaacggagagtaggtttgcaagaaccgtacctctgtaaaacaaatcatcgtgtctcgctctttattcgctcacgatttgttntgcgcgcactctctcggactcgtatatatttctaacgctaacccggcttgtatgtgtgattaagtttgtaaatttcagattcgccctattcaccctcctctctaggcgactttcaattggtatcacagcccggtgcttcgtaga

SEQ ID NO: 62067 - DNA, 423 bp, Zea mays
tatcagcagtataagcacaaaagagagaaggctgcctcagcatatcatccgaagcctatgctcttgtgtgaagacatatcagatcaaaaggtactgctgagatcttatctatctggtgaacaagaaaagactctgctaaggttcttattcaacaacaaagatgtcttcgcttggacagctaatgatctatgtggtgtcaatagagacgttattgagcattcactcaatgtggacccatccttcataccaagaaagcagaggcttcggaaaatgtctaatgataaagctgaaggtgcacgaaataaagtaaagagacatctcagtgccggtgttatcagagaagtaacatatccagagtggttggctaacaccgttatggtgatgatagctaatgggaaatggagaatgtgcatcgacttcaca

SEQ ID NO: 62068 - DNA, 481 bp, Zea mays
  unsure (1)..(481): unsure at all n locations
agctatgccaaatagggcgcataattatactctttatatcttctcgtattgacagatcattcttcacataaaaccattctgtcatccagtcgccgggccatctcttccgaaaggttggcacggtgcaacttgacccggaccgggaaacgaaactgtagcagccaaaattattgtgatactgttccttaccccaagggttatgtctcgtatgataattcgtgtatattacagaagtcttttgcatcaggcttcagaccttggcttctcacggcccacacgaagatattcagctttataattgcctcgggggtaagttgatgcagatagatttcgaatattntcagtaccttcacaacgaagctgctcaagggaaatcgcagtccagctttcataaagcttcggtacactacgacttcattctcttcgggatgggggcaagattattccccttcgtccgcctcacaatgacaaatcccggaat

SEQ ID NO: 62069 - DNA, 353 bp, Zea mays
  unsure (1)..(353): unsure at all n locations
ngcacnctgttccaccctctgtgtgtntctcgggtactccccttaccacaaggagtaccgctgccttgacctctcctctcgccggatcctcatctctcactatgtggtgtttgatgagtccgcatttccctactcctccacaccgccctcctccgaccctgaccttgacctcttcactctctttccgcctgacgtggtggtcgagccacctattcttcctctctctgcaggtcctcgctcaccgcctgtcggtcctactcccggcctggtgccttgctcgggtccggtggtgtcgcctacggtggtgtcacctctccgcggcgccccatccccgatcgcccccgggccgagcg

SEQ ID NO: 62070 - DNA, 486 bp, Zea mays
  unsure (1)..(486): unsure at all n locations
agctggggtgcatttctttactcagcacctgatggttctctggactattgaatgggccaaaaagttcctctgctctggggcacccttggccctcattgacaaggacattgattatgtgcacttgccaatccctaaaaagtgccctacaaaggttggtcggtaagaggataatatataagaccaaggtccttcacaaaagaagattgtaatagttgacacagaggtcagaagaagcaccaggtttcgtgaaaaatttgggggctatgtgcatcctgtacaccttcatagtgcctgccctcctatagaatcccctctattaatccaaaaatcattaagaagttaggagtgtgagtctgtaagctggataaagatatgtgctatgaagatgctctctctgtcagcatgtcaaaactaggagcgantcagcgcccatgcaagcctttcctcagttccaataccaagcctattaaaatgaagatgacacga

SEQ ID NO: 62071 - DNA, 500 bp, Zea mays
tacggacctatgaaactaagcttgtaagcatattttggtacccatcgcttgatgggtccatcattgttagtcagcaaagatctatgaacccaaaagtcctttgtgttagcgcttggtaaactcattacctttctagcacaagttgcaattttgggttgcctagttacatgtgaaataattgacaagctagaagtggggttgttaccaatgggacaatccttgcattgatgtcccttctttcggcatatgtagcaaaggcgagcttcaagtcttggagatttcttctttccttgtttcttgcttgctacatggttagttaatattttcttttctaacactatgcctttttgtttcaaatagggacatgacttaattaagtgtcccttctttgagcatttaaaacaaagtttatcatccttgttactaatcaagtcatttttaatataaggacacgacctaatcgagtggtccttttcataacattcactacacttcttact

SEQ ID NO: 62072 - DNA, 360 bp, Zea mays
tctgacttgtgggcccgcctgggtgtgcggtgcacaccggttttcttctgttcattgtccggtgcgccggaatgggcgcgcctgccttctgcgcgcgcatagcgcgcattaaatgcgctgcatgtagccgttggcgccgagtagccgttgctccggggtcgcaccggacagttcggtgcacaccggacatgtccggcgacatttagcggactatccggtggagttttccgaagctggcgagttcctgaggccgttctccgtggtgcaccggacactgtccgtgtgacaccggacagtccggtgaattatactgcgagtgcctttagaaatatccgaaggttggcgagtttgcgttggaat

SEQ ID NO: 62073 - DNA, 447 bp, Zea mays
  unsure (1)..(447): unsure at all n locations
agcttctatgattggtgttctagccttcctcaatctctctgttgctcgtagacccgttcgattaagctagactgcaccaaatcgtcgtgaacaccttggattacctcggattcatgcaattagttgagggattagggtcgccaggggtagaatttagtgtcgaccgagtatgaagcttagcctttgcatattccggccggtacaggctcgctggagagtgtgttcaccgctgtcggtggtcggtgacatgatcttgcgaagaagcaaaaagggaggggcctcggtgcaaatgtcagagacacatgtgaatagtgcgcanggattcttaattagttatttaaaaggtcggggtcctctatgcgaattgagcatcgcgggcgcgtntncctgttcatgggctggctcgggttggttngagcccgttactattcattccttttctttttc

SEQ ID NO: 62074 - DNA, 477 bp, Zea mays
  unsure (1)..(477): unsure at all n locations
tagcatttgcaatgattcaatttcttgtcttataactaataatgataatntaattgctaagatagaagaattgaatgttagtaatatttctacatctactattgagcatgtcactatttgcactagatgtagagatgttaatgttgatgctatgaaggatcacattgccatgattaaagaacaaaatgatcacataactaagttaaatgctaaaattgccgagcatgagttagagaatgaaaattttaaatttgctcgtagcatgctttataatgggagacgccctggcattaatgatggtattggcttccaacaacggagccaaagtaacatcaaacttaatgcccctaaggacaggctntctaattntgttaagggtaaggctcccatagttcatgatagagagggttacaatttatatcctgagaactatcctaagcacaacattaggaanattcatgctagaaaatctcatac

SEQ ID NO: 62075 - DNA, 471 bp, Zea mays
agcttgaaggggccaggcaaggggtgatggtcgttcctgtacgtgtggctggcccacagcgacactcgcacgctcgcatggctagcccgcaacagcgacggcgcttgcacggcgcccgtgctctctgacgcggctaggcaaacgtgtgtgcatgaggcaccacaacagaggcaaggaggcgagggcgccatatctggtgcagggaggcggtggcgccagagaagacctagctcttataccatgtaacagattgagattacacttccattgcatagagaatggttacatatatacacctatggaaaccctaatccaatagagaatggttacatatatacacctatggaaaccctaatcctaatggagcggcaaccacatacatggataatataggaacacactataacaggaagggcatcaacaggttgaatgtctagttaagagctcatctatttccccttcatctgagta

SEQ ID NO: 62076 - DNA, 473 bp, Zea mays
  unsure (1)..(473): unsure at all n locations
ngtgaagagtgttgtggcctntgctgctggctccctctgtcatctagttgagcagagttatggattgacctaacatgcctcgggtgaaatcttcctccgaagcccctggtcatttcagagaacctgaatgctttctcccttctttggcggaagtcattgtcagctcgaatgtattcgtccatcttctggagcagcttctccaacgtttgtggtggcttcctggcgaagtactgcgctgatggtcccaatttcattgggcactgtttgcacttgtgccctcaggcgcagaaacctccggacatacgcctgaaggtactcttcatggtcctgngtacactggaagagagcctgagcggtgactggcttcgtctgaaacccttggaaactagttatcagcatatccttcaacttctgccaagaagtgattgtccctggccgaagagaagagtaccaagtctgggcgacgctcctga

SEQ ID NO: 62077 - DNA, 396 bp, Zea mays
  unsure (1)..(396): unsure at all n locations
agctntgtgatcttctttgatcctttaatcatacatttcaagctcacaaaattcccgataacttcctcggnggtcattgatgtatatctaggattaccacgaattaattgaacttgagtggggttaaggaagatgagtgatctaagaataaccttaaccacctcgtggtcatcccatttcttgctcccgaggttgcgcactaggttcaccaaggttttgagccggttgtacatatcttgtggctcctccccttggcgaagacggaagcgaccgagctccccctcgatcgtctcccgcttggtaatcttggtgagttcatcaccctcgtgcgtggtcttgagtaagtcccaaatctcctttgcattcttcaacccttgcactantgtgtattcctcc

SEQ ID NO: 62078 - DNA, 462 bp, Zea mays
tacggacctataaaactcagcttcccacgcttgccctagtggtcggctaagcatgtctgaatttctctctgataagtagctccagcggttttgaggccgaacgacatggaggtatagcagaaagctccgaacgaagtgatgaatgctgttttttcctcgtcttcttttgccaagataatttgatgatacccagagtagcaatccaagaaagacaacacagaacatccggcagttgagtccaccacctggtctattctatggagtccgaagggatccttctgacagtgtttgttgagatctgtatagtcgacgcacatgcgccaatccactttattctttttgagtacaagaatgggattagctaaccactcacgatgcaacacctctctaatgaaccctgtcgtgaccaagcaagccagctcagcacagatggcttctctcttgtcgggcgtgaagcgacgt

SEQ ID NO: 62079 - DNA, 474 bp, Zea mays
  unsure (1)..(474): unsure at all n locations
aactcaacttatcaatggtctgaaagagccttccttcaaggaccaatctttgatgtaatttatgttgagcaaccttccggctttgaagacagtgagtaccctaactatgtttactaactctctaagggactatatgggctcaagccagccccaagagcatggtatgaatgcctaagagatntccttatcactaatggcttctaagtcggaaaagtcgatcctactctattcactaaaactcttgacaatgatatgtttgtatgccaaattaatgttgatgatattatctttgtgtctactaacgaatctacatgtgaggaacttagattgatcatgacacagataatctagatgtctatgatgggggagttgaagtacttcttgtgatttcaagtgaagcaacttcaagacgcaccttcttagccaaatgaagtatattcatgacattctaaacaagttttggtatgaaggatg

SEQ ID NO: 62080 - DNA, 443 bp, Zea mays
cagctttatgtcacatcaggccactagagttacttcacatggatctatttgtaccaacaacttatgctagtgccggtggcaacctctattgtctggtaattgttgatggtttttcaagatatacttgggcgttctttcttcatgacaagtctgagattgcatcaatattcaagaaatttgccaataaagctcacaatgaatttgactggcaaatcaagaaaataagaagtgacaatggaaaagaatttgacaacaccaatatttatgagtattgtgatgaaatcgggatcaagcatgaagtttctgcaacatgtacacctcaacaaaatggagttgttgaaagaaagaacagaactttgataactcttgcaaggacaatgattgatgagtataacacaccagagaggttttgggctgaagctatcaacactgcatgctatgca

SEQ ID NO: 62081 - DNA, 473 bp, Zea mays
  unsure (1)..(473): unsure at all n locations
tcccatcgnntttgtgctcatcagaagcatgccagctcataagtctggcatcctcaggattagcgaacaaacacctcaatcgatcgacaacggtgaggtaccacatcaccaaagcaggaatctttttgagcgcataatagtctacttctttttctttgctcgtggattttgaaagtcttttttgggctttctttcgcttcttccctttagacacagatgcaacacactcttcgtcctctcgatagtatttattcgtcttgtacctacttgcaccgcactttgggcagctctccaagtctttataatcatcacctcgataaaagatacagtgatttctacacgcgtggatcttctccacacccatagtgagcggactgattagtntctttgcatagtacgtgttagcaggcacattgttctcctttggaagcatgtctgcgataatactcaaagaacgcatcgaagccagcatc

SEQ ID NO: 62082 - DNA, 395 bp, Zea mays
  unsure (1)..(395): unsure at all n locations
tctggatgctgcatgtcttccacattgcccagcatggacctcctccagaagttgctttccagtggacgggaaaacgcacttcatgaggagcccgagcacccnttctgtataatggcttctcaatgagtgtgtagtgagccgattgcctggcaatacgctctgccgagttattgtcgtctggctcttcttcattctttatatacttaatgatcggccttctccaatcatcagagtctgactcgggttgatctatgatgttgcactcttctgnttgatccattgaaatactcggctgtaggatttcttgcacgaagacttccagtgggacctgagttcgactggatccgagcttggacaagatatcaacttgctgtgttcccggtctctttccacat

SEQ ID NO: 62083 - DNA, 294 bp, Zea mays
atacaacttttctttacttccactgctttcccgagggaaagctataatcacggtatacgaaaccaatgacctcaaaaactttattcaatattcttctgcctcaacccttgaaagccaaaggcctagcatcatctttggcccttgagtaagccccaagcgaatcgtcactggttgcccaatactgctaaccactcaaaattggctcgcaaactggctttatatctgaaggtgatttcaagtaaccaagccacccttgcttgacccgacagacatttccttccgcatttcccactc

SEQ ID NO: 62084 - DNA, 401 bp, Zea mays
  unsure (1)..(401): unsure at all n locations
gctattacggacctatgaatactaagcttctaagggagaacacgtgataggttggactaatgtgcaattctaaaaagatagaccttgtgcagctggtcaagcagggaaacaggtgggaagcgctcatcacaccaaaaatgtgatgacaacatcaagacccctggagctgctacatatggacctcttcggacccgtcgcctatctgagcataggaggaagtaagtatggtctagttatcgttgatgacttttcccgcttcacttgggtgttctttntgcaggataaatctgaaacccaagggaccctcaagcgcttcctcaggagatctcanaatgagtttgagctcaaggtgaagaagataaggagcgacaacgggtccgagttcaagaaccttcaagtgg

SEQ ID NO: 62085 - DNA, 427 bp, Zea mays
tctaagggagaacatgtgataggtttgactatacgtgcatttctaataagatagaccttgtgcagcttgtcaggcacgtaaacaggtaggaggagcacatcacagcaagaatgtgatgaccacctcaagacctttggagctgctgcatatggacctcttcggacccgtcgcctatctgagcataggaagaagtaagtatggtctagttatttgtgatgacatttcccgcttcacttgggtgttctttttgcaggataagtctgaaacccaagggaccctccagcgcttcctcaagagagctcaaaatgagtttgagctcaaagtgaagaaaataaagagcgacaacgggaccaaattcaagaatcttcaaatagaggagtttcttgaagaggaagggatcaagcacgaagttttccgcttcctacac

SEQ ID NO: 62086 - DNA, 466 bp, Zea mays
  unsure (1)..(466): unsure at all n locations
actcaagcttcagctccatctatgttatggattgctnttgagtcagtccaattgcctttggcccttcttgcagcttcctgacttccatggatagcaatgggtccctgatccgaaggtatcttcatgcaaagataggcaggatgaaggattgcttcgaaggcattgagggtaccacgaccaataattgcattgtaagggtattccatgtcaacaatgtcaaacacaacttgctcagttctagtgttgttgatgaacccgaaggtcactgacatggtgatcttgcccagtgctacaatttgtcttcctccgaaaccacagagaggatgtgtagcatcatgaatcttatcttctggctcttgcatttgtctgaaggccttagcaaatatgatgtcagctgcactggctgtgcaaccaagacatttgggaccagaaattctttgataacacaagagataaccatggcatc

SEQ ID NO: 62087 - DNA, 309 bp, Zea mays
cctttgttgacacggactggacaagtgcgccgatctgaatatgagcctggcgccgcctaccagtggagtggacacgacacatcaaatgctgacggggcgcaatacactggtagcagggcggacaagcagtgtgatctctcggcaataaatgcaaagaccgtgcggtctagagaccttacgtcaagctccgctcgctggcttatgtcatgggctacaagccacgcggcagcagcgggtctccgtctgagcggggagtgcaagcgcacatgataatgcctgacacatgtcagcaccggacccttgcctatg

SEQ ID NO: 62088 - DNA, 355 bp, Zea mays
  unsure (1)..(355): unsure at all n locations
ttaccaaatggacgtgaagagtgccttcctcaatggaccaatctttgaagaagtctatgttgagcaacctcccgggtttgaagatagtgagtaccctaaccatgtgtataaactctctaaggcgctntatgggctcaagtaagccccaagagcatggtatgaatgccttaaagatttccttatcactaatggattcaaagtcggaaatgccgatcctacgctctttaccaaaacacttgaaaatgatttgtttgtatgtcaaatttatgttgatgacattgagagcacctagagggggggtgaataggtgatcctaataaaactttaaacttaagccacaaaacttggttagacg

SEQ ID NO: 62089 - DNA, 432 bp, Zea mays
  unsure (1)..(432): unsure at all n locations
tgtgaacaatacaaattcagaagggagaaagcagcttcagcatatcatccgaagcccatgctcttatgtgaagacatagcagagcagaatgtgctgttgggctctcaattatccaaagaacaagagaaaaccttgataaggttnttgttcaacaacaaagatgtttttgcatggtcagccaatgatctctgtggagttaacagggatgttattgagcactcgctcaatgttgatccattcttcagacctataaagcagaggcttcggaaaatgtcagatgataaggccgaatgtgctcgtaacgaagtcaaaagactcctcagtgcatgagttatcagagaagtaaagtacccagaatgtgtagctaacacttgtattggtaaaaaggccaatggcaagtggcgaatgtngtatcgatttacagatcttaac

SEQ ID NO: 62090 - DNA, 294 bp, Zea mays
  unsure (1)..(294): unsure at all n locations
catggtatgaatgcctaatggattntcatattgcttatggcttcaaaatcggaatagccgatcctactctatttaactaaacacttgcanatgatttgtttgtatgccaaattatgtcgatgatatcatatttgggtctactaaccaatctacatgtgaagagtgtagtaggatcatgactcaaaaattcgagatgactatgatgggcgagttgaagtatttcttaagatttcaagtgaagctacttcaagaaggcaccttcattagccagactaagtatattcaagacattct

SEQ ID NO: 62091 - DNA, 395 bp, Zea mays
  unsure (1)..(395): unsure at all n locations
ngaagccatggtaagtagcataggctaataatatgcgaattgactcatgcctagctacgggtgcataggtttcaccgaaatccaaaccttcgacttgtgaataccccttggccacgagtcgagctttgttccttgtcaccacaccatgctcctcttgcttgttgcggaagacccacttggttcctacaacattntgattaggacgtggaactaaatgccatacctcattcctagtgaagttgttgagctcctcttgcatcgccatcacccaatccgaatcttggagtgcttcctctaccctgtgtggctcaatagaggaaacaaaagagtaatgctcacaaaaatgtgcaacccgagatcgagtggttacccccttatgaatgtcgccgaggatg

SEQ ID NO: 62092 - DNA, 278 bp, Zea mays
  unsure (1)..(278): unsure at all n locations
tagtggcgcctgccctactaaactctatactgacttcaataatcctcaactcctcgagtactcgtgaagaacaattgaattccagaccttatatgaagtactctngttatctttgcattttcataagcattgcatgagcattcatggtaatctatgatatatatagaagaccacgaagacgttgaacaataaagagcttcaccaccacctgaagacccacctgccaggaactgctttatatttcgatattagtggagcagagcccaactcttctataa

SEQ ID NO: 62093 - DNA, 431 bp, Zea mays
  unsure (1)..(431): unsure at all n locations
tgcgagacctttcccgcgttctttctaaccatggttaatgcaatatcgcatgtcatattctatgcatgtttaatatacttgctctcttgtatggagtgctgtttgtttcctaatttgaatggatggatgtatgtatgtttgcactcgcatagagaacgattctgttgaagagcctgaggaactagcaggagaagcccctgaacagcagtcggttggtggaggcaagtgtcccttgacctatctctgtcctattcattctttaattcacctcccgcattacacatttatgcctaaggatntactagctttgttatccatatccttngttacctattcgggttggattattattcgttagctttatggtattgctcaactattatcaatgaacatgatgagaatatctatgatacgctgttttcccctcctta

SEQ ID NO: 62094 - DNA, 427 bp, Zea mays
  unsure (1)..(427): unsure at all n locations
ttaactganttagagtccgatgttggatgatccccacgtttatcttttccatttcttgacacaaagtgttctcggaagtcttcgccataagacagtggcaagaagtcttacgactcaacgcatctgccaccacattggccttgcctgtgtgataatggatctccagttcatagtctttaatgagctcaagccatcgtctatgcctcatatttaattctgactgggtganaatgtacttcaaacttttatgatctgtatatatgtgacagatattacccagcagatagtgacgccaaatctttagggcatgaaccacagcagctagctccagatcatgagttggatagtgctcctcatgtcggcgcaactgccttgaaacatactcaatcactcgggccttttgcattagtacacagccgagcccact

SEQ ID NO: 62095 - DNA, 422 bp, Zea mays
tgtaacctcttttgcctacctgcttggagttgggctctacaactattttctgaaggaaggtgctctgaggaagatatttcttgtgacaaccattatatggtcaactcttgggatgacacacgtgctctttatattgtgttctcgattggtgctgtaattcttttctatcctttaaacatactgcattgtatatatttacgtgcttcttgtaactgggctaaatccgcagcttgggatcagcgatgagtggttttctattggtgattcattaatcatcacagtccttggtcaggtatgtaacatgactgcaatgcttagtaatagtagaggtttgtttacatgattacgttaaaagtaaaaaaacaattaactgatcatggtcccccttacctgacataatggccctggtatatttgtcttat

SEQ ID NO: 62096 - DNA, 360 bp, Zea mays
  unsure (1)..(360): unsure at all n locations
attcttgtattgcatctagggcttgtctaacctagtttagataactgccaacaaagcgtgtgaaaaagcttaactcgggctcaaacttgacaagtcttagttttaagcttttagtacttaaattcctatttactatgcaaattggtggttcttgagatatgcatgaggtactgcacttatggggagtattcaaaactcaaatcgttcatgaaaacccctagtgcaaagccaaaatgcaaatctcaccatttgcctattttctcanaaaattatctagtctatggcaaaatattttgaaattatgagaaaatatatgagggtgcccatacctggtccaacaagtgttcttttgtgtgatta

SEQ ID NO: 62097 - DNA, 187 bp, Zea mays
ctctcactctctttggtggtactaagtaacttattagtatgctatctctaaccctgttgcacaaggtaaggcaggcatagtcatcactgttatgaatcaatcactcctatgaatcaatacgacacaagattgattaaacacatagaagacacagatttaatatagaaaacccctccaaagcgaaagg

SEQ ID NO: 62098 - DNA, 324 bp, Zea mays
  unsure (1)..(324): unsure at all n locations
actcaaccctcttcttgtcgtcatcgactntgacgtagaaccattccgatcttcattctgtctgccacttgcttcgatagctgatcacaggagaatttgtagttttccgatatgcaaaattgtaacaaccaaaattctcatgtagcccattctttctggccttagtttggtagtgtagctcgtgtactcggcagaaacccttcgcaaatggctccactgcttggcttccgagagcccaaaataaacactaagcctaacaatagcgttaggagttagttggtgaaaatagatcccaaatttcttcaacacattggcaatcatcct

SEQ ID NO: 62099 - DNA, 251 bp, Zea mays
ttcgtccagatatcggctatgaatctatcttccatgcttcacgctagactacggatgtctagtaaatctgctggagaacagctaaagatttgcctattcacgatcttcccatgcgtgcaaccaggcttcatgaaagtaagcagcttgtgccctcgagaagctagcatggcacagaagtcaccatgctcagctataacttgcgcaagagcatcaacttccgcctcataatgatcgaaggtgcctggcaggtc

SEQ ID NO: 62100 - DNA, 460 bp, Zea mays
  unsure (1)..(460): unsure at all n locations
tagagacattacgtttaggcggtcgcggaacagtatgccgatccagtaaggtatagacatgccgatggtgaccccgaccatgatgatcaggaagccgaaaccgtagccgaaaactattccggttagccacattggtggaccggagggcagcaacaccaccgggaagaccgctagagaaacgactatcaccaccgctaacacggtgaggccgaaagattntgcttcccattcaataattggcatgatcacctgcattgtcaagcgcacataaaatagaacacagagcatgaccacgacaaatggtgcggaaaacttaaatgtcatccgctgcacaaattaggaggaaaaaactgaagtacagtaacagctagcatgacanatgtgatgtgataacccatcatctgcttgataatatgacatgtgaaacttgtctgctggattgtgagattaagcacgcaca

SEQ ID NO: 62101 - DNA, 322 bp, Zea mays
taatgctgagactaagcactttcattgtggcttccgaaactaatggcaatggaaataagaatgggcatcctaaagactgatgttcaagttattgctggccatgtggataagagcatcaaggcacgagatccgaagcttgtaaaatatctggatgccgtccgaacgttggaagcatccttcgaaggttttcccgtcaagaatattccaagaggtgaaaatgagcatgcagatttgctatccaaatcagcggctcaagggctcccctaccctccgaagtatgtattgaagcaaatagaagcacccgtctgtcgaactcatggag

SEQ ID NO: 62102 - DNA, 223 bp, Zea mays
actaaatagagctggcttctaattacacccttataatgctatatgaacacatctcctctttcgtaagacagattcctcaccatttgtaacaaacaattgaacctatgtggccaattgactacagacaggggttgatcctttgactctactaaaatacattgaataagtgctgcttggaggctattttccaaaccttgaccttgcttgatcccatctcaaatat

SEQ ID NO: 62103 - DNA, 472 bp, Zea mays
  unsure (1)..(472): unsure at all n locations
ntatcaaatggacgtgaaaagtgccttcctcaatggtctcttttangaagaggtctatgttgagcaacctcccggctttgaagacagtgagtaccctaaccatgtctataagctctctaaggcgctttatgggctcaagcaagccccaagagcatgtgatgaatgccttagagatttccttattgctaatggcttcaaagtcggaaaggccgatcctacgctctttatcaaaacacttgagaatgatttgtttgtattgccaaatttatgttgatgatattatattcgggtctactaacaaatctacatgtgaagagtttagtatgatcatgacacaaaaattcgagatgtttatgatgggggagttgaagtacttcttgcgatttaagtgaagcacttcatgatgcaccttcatagccaacgaatatcctcagacattctaaacaagttgggatgaaagatgccatgccca

SEQ ID NO: 62104 - DNA, 403 bp, Zea mays
  unsure (1)..(403): unsure at all n locations
actagcttagaactacgntgacatgacatctaagccacccgtgttaacataagacagacacagatgttatttatgatatgatatggaaactggaataagtcaaacgaaagacgcacaggtaggctacctaaactcttcaatgtaagctgatggaagcttctcatcttcagcaggcctcaggtttgtacaggtcttttatcatgagaagacaggacaatacagattaatttgaagggtcatctacaattgagtggtcacataaaaccagttaaactacagaaaggccttacatgcatataactttacaataaaacatgtcaccaaatactgtaatgtttgtcattatccaggcttaacacaatgtttggatcaatacgccacacaaaaacatgtgactaacaac

SEQ ID NO: 62105 - DNA, 474 bp, Zea mays
  unsure (1)..(474): unsure at all n locations
taacttaatntatataataaaacaattacatttataataccatataagcctaattaaattctacattaattatatttttacactatatatatttaatgtgaaaaatctttataatcctttttttataatttaagtcaaacttgagatgagttgactctcaaaaaaagttggaataactgatgatttagagtgagggggtactacttagtgtagttaaaaatagtcatcacttaagaaacacggcatgtgtataaatagaagcgtagaactgacattgcctagtaattatcaccacaggaagaacaataatagtagtatttggtgctaacttgctatcgctaagcatggctagcactagaacaagtccaacaccgtgaccccgatgattggcactcacatcgtgaaacgagctaccgcaaagttatattaacaagcttgttagctcatgggcattccaccaaacaccccacatgc

SEQ ID NO: 62106 - DNA, 281 bp, Zea mays
acatgggctagtcggcgatgccagagccaacccatgttagtcttagcaattaagcaagtgtcgagttcagctctatcaaaatctaccaagtatagttgaccctctaacactcccttaaatgctattgaatcatcacttcttctaaagacagtgacacctacatcagtgaatagatagttgtagcccatttgacataattgagatacagaaagcaaattgtaatctaatgaatctacaagaaaaacatttgaaatagaatggtcaggagatatagctaattt

SEQ ID NO: 62107 - DNA, 368 bp, Zea mays
tgtcgtattcctgtaccagacatatttcttgtttcaaacatcatattttaacacacactcactatgagacactgtgcgtgcattaagagccaaactttacaaatcttaactaataatttgcccaactatctttttaatctctactattattaaggctgcaagagtagtcggcattccgtctgccatcattccttgtctgacatttccgttctgccactggttccattcccatgtctatcattcccattctatattctggctttctcattcccgacaacccacgtctagctaatattaaaaaaacacatgtcggggaccataattagcggtaccctcaagactcctaatctcagcttgtaacccccatc

SEQ ID NO: 62108 - DNA, 490 bp, Zea mays
cactcagcttccacctctgaactaactccgctacgtcactatacgctggtggccaatagaatcctgacctaaagaccttcccgactagcgtcttggatgctgcgtggattccacatagcccagcgtggacctcatctagaagacgcttcctagtagatgagagaatgcacttcatgaggacgcctgacgcaccccttctgtataatgtctccccaatgagtgtgtagtgagctgactgtctagcgatgcgctcggctgcatttatgtcatctggttcctcttcattctttatatatctgatgatcgaccttcttcagtccttagagtctgactctggttgattcacgatattacactcttctgcctgaaccattgagatgcttggttgtggtatttcttgtacaaagactccgggtgggacctgagctcgactggaccctagcttggacagtacatcggcttgccgtgtttcgatccctttctacgtgat

SEQ ID NO: 62109 - DNA, 468 bp, Zea mays
  unsure (1)..(468): unsure at all n locations
aaactcagcttagtttcgtccccctcacgctcaaccctagctgttgagcgaactctggccatttaattatgaacttgtgaaactctgatacttttttctccgaagcaagcttcaagatggagcttcgttcaaatctgacaaacaagcttcggcgatggttaaaaattttggcagcaaaacagtgcaaatagcagtaaatgctgtggtaacttcacacctactcgtctggttatatagtgccgcaggtaagaaggtgaagtgccatgagttttacaccatgcggacacccgctcgcactcgctgtacggtggaccgcagtgaccgaacagtaactcttgcaagtggggccgctgcgcgcanggaaatccaatcgtttctcgacaacgagctcaaggaaggtggtttttgagaccttctgcgctttgaagcttaagaaacttttttcaccgatcaagcttcgtacgaaaa

SEQ ID NO: 62110 - DNA, 334 bp, Zea mays
tggaacgttctcatccacatgtgctgagcgggagcctctgccacctttgctttctaaccataaggctgcattagacggcctttttttgcaaacaacaaataagttggcgctatcaccctaaagcaggaacctactctttaagacgacctttctttgtaataacagcatttccattgacaattgctacagaagcaattttatcaaactctccctaaaaacataagataaagctcattaaaatgcatttaccaccctttaccttgctgattcctcaccgaatatcgatttgggatcctattttgaagggagggacacttttttcccccatatggtt

SEQ ID NO: 62111 - DNA, 464 bp, Zea mays
tctcagcctttaagggagaacacgtgataggttgactaacgcgctattcttaaatgatagaccctgcgcagcttgtcagcaggtatacatagtggaggagcgcattatagcaagaatgtgatgaccacatcaagacctctggagctgctgacatggacctcttcggacccgtcgcctatctgagcataggaggaagtaagtatggtctaggtattgttgatgactattcccgcttcacttgcgtgttctatctgcaggataagtctgatacctcagggaccctctagcgcttcctcacgagaactcaatatgagcttgagctcaaggtgaagaatataatgagcgacatcgggtccgagttcaagaaccttcaagtggaggagttccttgaggaggatgggatcaagcacgagttctctgctccctcacaccctacaaaattgtgggtatagaggaagacatga

SEQ ID NO: 62112 - DNA, 484 bp, Zea mays
  unsure (1)..(484): unsure at all n locations
ttacggacctatgaaactcagcttagggtatagttctaaatatccctaaaataacttgaatcacatttatcccctaagtaccaaaaaccctaattggaaccctggaaaaaccctgaaaccaaaccctaagggtctatgtgcaaaaatagtgcacatttggactaaggtgtgaaaacaactatgttaaagcatgttaattcatatggttcacaaaattagggatttgcaagtgaaaccctaagttttgggtttatttgcaaaaagtaccacttgacctctatatagcctaagtctgaaatcagtgttgtgagcacaactttgagcccttgtaactttcaaattaatgaaaatatgccctatgtcaccacatatnacttatagaccanacatagggagaacaatttgcttaagagtgntaagcaggctgctatgaagaatntgggagataatccaacttaaagtcggctgtcaggctgactgataa

SEQ ID NO: 62113 - DNA, 463 bp, Zea mays
tgagcaggctcacggtctcaccaggaagctatctggtggcttgaatctaacggagggggactggagagggggtggccaccgcggtggctcttggtcggcactggccggctgcggggaggtcgcccgaggcaacggctggctcgtgcgagtcccgcgaggtacggagggagcaatggggaatgcaaccgagtgctggggtgggttatataggcgcggacgcggccggtgcgccggctcaaccgtttggcacgacgcgggcacgctgtgcgcgcgcgggcgtgctctggcgagctcagagcgcgtcgaacacgtggcgcgttgcttctgcgcgtgttcttcgctctgctgagcgggcaggcgtacgaatctcgccctaccgcctgtgggagaactcttccctgcacctagggctacctagttcatgtaaagtccaaagagtagatgtggtctggttgacgagata

SEQ ID NO: 62114 - DNA, 420 bp, Zea mays
  unsure (1)..(420): unsure at all n locations
tatntcaaggagaacctaccgtactccggattgctanctacatctaaattgcacaccatgctngcgactttcaacatatcattccggcctatagcctgtgaaaacaaacatttcgaacgctggattcttccccgatcctcgtcagggagcccatgcttggtttctcatcaacaccaatagccatgacatcatgcttgcgaagagcaattcttccaacactcatgaaactgacatatacgtctcctaaccaaacgcttcaactgacccaatatacccggttgatcacctggctgaaaagatgaggctccttccaactcacttcacctgaatgctcaacctttgttgaagagaacacatccttactttgccttcacatgattcttcagtctaaatatcgaactgggaatttgactcacattg

SEQ ID NO: 62115 - DNA, 164 bp, Zea mays
ccataatctagtcaagtgatctaaagtgcttattgacttgataaagggtgatttgcggttcattcgatgccctagaagcttaagtacctttatccatccctctccaaactttcccagtgataggaaagcttgcaagagacacctaagtgtgtggtgatccttgc

SEQ ID NO: 62116 - DNA, 376 bp, Zea mays
  unsure (1)..(376): unsure at all n locations
gaccctcggcgactaagcatatgcccaacacaccccatcatgagctggcaccattcgccccgatgaccatcgagcagatgtttctaacgccgactcacgcagtccaagccattggtcatactttggtcgccattcagcagcaacaccagccagcacactagactcaaatgcctcagatgcccagagacaagcatgctgaattcatgagaggcgcttcctcagtgttcgctcactcttctgacnccatggatgctgaagattggctgcgcactgtggagcgggagtcgcacatcggctattgtgaccatagggagaaagatcttgatgggtccagtctggagagaagagcagaccagtcttggtgtggagtcctatt

SEQ ID NO: 62117 - DNA, 378 bp, Zea mays
ggttgaactgattatcgcgttcactcaaacagttggtatgggtttttataaattgtaacgctttcttatagcaagctctgtgtcaatattttagaggtcattaatcattattttaagtccatgggatccttcaggtctaatgtcatgattcttctcattctttcaggtggaaaacactttatgctggagatggaaccacccatggtcggtttcttggtacatctgaccaaactgcaaaactaaatgtgcaatgtcttgaaatcaaggtgcatgtggagctatttactcgacaatctgaagtcaaggcgtgtgaaaaaaaagcccaactgcattcactaaccgcagatgttctctgccactataatatagagtagggag

SEQ ID NO: 62118 - DNA, 381 bp, Zea mays
ggccaaacttgaatcgaggacccccgccaccggaatagcgcaatcgtgtctccctgagttcggaaccgtcccggagcacgtggaccgggttgagtcttcgcaccattttccaattctttgtacgtatgacctctacatcaccccgtggagctccttgtgccgtttaattgaactatattgccatggataggccggagctctcgacgtcgacgaattcctgcgactgcgcacgtggaccggtcgatttcggtcaccaccgacgtcaagtcgtacctcgctgtgaccgcaagaacctgccagagacaaccccagccttcggcggacctggctcgacagcggtatgccacagccgcctttttacttccgcgaagactaatcaaa

SEQ ID NO: 62119 - DNA, 434 bp, Zea mays
  unsure (1)..(434): unsure at all n locations
atactcaagctngaccccgatatcttcactccatctgtcttcaatctcaatgcttcatttgattcttcatctcccctatgaggcacgaatgggacggcccgcgcatggacattggagtatcccatccatagatgtcttaagactattctaaagaaatgttgaaataaatgcaaaatcgatgcttccattgcagaggcatacattctacaggaggtctctaacttcacaacaacttaatatggagacaaactgccgagcgagcataatccacctactcgttacaatgatggtgacaatgaaatcgaccttaccataattcgaggccaacttggaagcgcaagtggctcgaccacacataccctgacacatgaagagtggcggcatatcatgctattactattgaccaacctctaagaggtgaagccatacatgga

SEQ ID NO: 62120 - DNA, 456 bp, Zea mays
  unsure (1)..(456): unsure at all n locations
ttgtatgcaagccatgcatagtgacagaagcacatggtatactttgntaaatgtgtggagggctgtggtaccttcagtattaattcaactccatctttttggagatattatactgacataataggtcattatattcagggaccacggctatcttcatgagccaattacacagttctgcctatgattgcttctcaaaagtaaacttagaattccgtgcattgtaactaacctattgagatggtcttgaactcttgttcaatgctgccctctcttttatatggttatgcgataatactgtaatatgaaacaaagaatctgattcgtgcctgcagcttagaaattnggtatgggcaacgttcaagcacgacatctacctagtatctcattactcattcgtcactggtcagcatcgagtggtgtggaactgaacttacaacgtcaatgacatgttgcacc

SEQ ID NO: 62121 - DNA, 441 bp, Zea mays
  unsure (1)..(441): unsure at all n locations
ccatanatactcactgaggccagccaaagcaggtccagatactntgcatctgatttactagcatatcaacgagaaactacaccgaattagagaaagtgttatatgctgctttgatggcatccaggaagcttcagcactaatttcaagcttaccacataattgttccttcttcacaacctctgaaggatattatgaagaaccgagaagctactggaaggaatggaaaatgggccgcagagctcaacgaatctctgattgaatatggtcatagatcttcgatacagtcccaggcgttagcagacttcattgctgactggacgccatgggctcatgaggaagaaacacataaagacgccgaagcatggacagtggtntgtgatggatcctggggaaacctttggagccggaacatctgctgtgctgggttaaccttccaaagta

SEQ ID NO: 62122 - DNA, 475 bp, Zea mays
  unsure (1)..(475): unsure at all n locations
actcagcttgggattgtgatcggaacctgctctcgcgtgttcgacctggttcggcggatctggccgttgagggggatcggtcggaccgggtggacgtgtgacttcaccggtactttttcataagggaccccggataatatgataactaacccgccgtccatccaggttagggagtatctgagtttaaacccttagatttacaaatttaacccggagctttctggtaattatgtgtgcaacccagaaacagataagctgatggcaataatgtagaanatgaacttttgtataaaaaataatttcaataacttgctaaattcataagtaatataattcaattcctttttaatccattctagttgcaataattctgtattaatattgcttatcaaccggtaactctggttatccatgaaacatagactaaaattattcatttgccttaatctgtatcacccacttaataacttcataa

SEQ ID NO: 62123 - DNA, 455 bp, Zea mays
  unsure (1)..(455): unsure at all n locations
tatcatgatcccttggttntaggcgttagttgttagagggaggtatctcttagcagtcagctaaggaggagcgagttatcccttgaatttacgctgcagatggtagagggaattatcccttaacagtcgactaaagagtcagttctctattcaataaagaggactagtagtttggatcatggatttcatcgaagaagtaaagttccggcttggagctcttcgaccatggtgtctatgtcccagcgcagccctatgacgacgccccctgccgttctccgtatccccacattccaattcccaattccacctacatctccactctccactgagatctccctgatacccacgcccacgccatatcaatctagtatcagagaactctagagcatcgacaaccatgtcctgcactgatgacgatccttggaacctatccaatttagcaaaaatggatcgca

SEQ ID NO: 62124 - DNA, 122 bp, Zea mays
  unsure (1)..(122): unsure at all n locations
tttggtggaaattgggagaggatctgatctctttaatttgtctataattgnacgcctcactcttgtaacagcgtggaaacgtgaaaacttggatgccttgaatgtggcggtggatccaattt

SEQ ID NO: 62125 - DNA, 336 bp, Zea mays
aacgtgggctagtcggcgatgccttagccaacccatgttagtcttagcaattaagcaagtgtcgagttcaactctattgaaatcaactaagtataactgaccctctaacactcccttaaaagctattgaatcatcacttcttctaaagacagtaacacctatattcggtaaaagacaattggcagccactttgcataattgagaaacagaaagcaaggtattatctaaagaatctacaagaaaaacattggaaatagaatggtcaagtgatatagcgaatttaccaagtccttcgaccaaacattgatttccatccccgaatgtgatagctctttg

SEQ ID NO: 62126 - DNA, 391 bp, Zea mays
  unsure (1)..(391): unsure at all n locations
ctcaagcttactacaagtggatccttaagccatcttgtaagagcacaattcttttttttcatcanccagancnncctggactagagcattcactagtcctatactaactatctttactacattctgattccacttattatctacaatgcaagggcagtgatccaatcctcatattcgataagaacggcgatctgaatcgattaatacccaactggggatctcctaccacacgacatatgtagcacttaacccttgcatatgtctaccattcccacatatcctgcactacgtgaaccggtctgcgccacccgagagcacaatactccccatccaacctttggccagggtggacacgctacttctcgcattatttcactccccaatgcgctat

SEQ ID NO: 62127 - DNA, 369 bp, Zea mays
ctttaaactcaacttgatgatcttacttgctattttgattacaagcatgcactgttcactatatttgaaaaatgtttctcaatggatgctcaatataatgacttggagacagtctgattcggtgaaaacagacaaataaagggccttcaaggactaagcgaaggtgaatgtcaagaagatggcttatgaatcgaggtaccatggcttaggtgaagaagagagtactttcaagatgttgatgggctaatcagattctgaagagtcatacattgatgaagatcacaacattcgaagatttgatttgaagtcatcagtttaactcatttgtgatgagacggttcaaattgtaatactcgagggtttctaact

SEQ ID NO: 62128 - DNA, 429 bp, Zea mays
  unsure (1)..(429): unsure at all n locations
taaaactaagcttacatgtctcgtatgattcanaatcacacgaagtctaaagcctatctttatgaagcttcttcatgcgattctcacttatatgacccaaacgacagtgccacatgttggtaggacttaaatcattaggccgaggccttttagcactaatattacagataggtgcatcatcaagaattaaaatgaataacccattcataatggatgcaaaagccacaaacatgccattcttagagatcacacaaccattggtntcactcgcaaatgaataaccatccttcatcaaacatgaaggagacataatggttcgactcatactangaactagataacaattatttaactctcaaataaaatcctgatgggaggtggagttgcatcgttccgacggtcaacgcaacaactcttgcatttattgct

SEQ ID NO: 62129 - DNA, 381 bp, Zea mays
  unsure (1)..(381): unsure at all n locations
tgtggaggttcttcatccccacatgtgctaagcggcgaggcctcatcctgtccatgcaagttntagccattaagcatgcatctagaccggcctcttctattgcaaaatcaactaaatacagtttgccgtctaatacagccttaaaagctagtgaaccatcacttcttctaaagacagacacatctacatttgttaacagacagttatatcccatattgcacaattgactaacagatagtaaattatatcctagtgactctactaaaaacacattagagatagagtgctcattagaaatggcgattttacctaacccttttaccttgccttgattcccatcaccgaatatgattgaatcttgggaatccttattcttgacgt

SEQ ID NO: 62130 - DNA, 426 bp, Zea mays
ggctcaagaatgctggaggtagcgttcgcaggatgactgccaaagtcgttcactcccacattggtagatatgtgctgacatatgttgatgatatcatagtagagagcacaaagcaagaaaccacgttgctgatttgcaagaaacatttgccaacttcagacggaccgatcttaaactaaatccagagaaatgtgtcttccgagtgaagaacggcatacttcttggatgcttggtataaccaaagggtatcgaaactaatccaagtaagatagacgccatacttcgaatggagccaccaaagtcaagaaagggtgcccaaagggtgataggaaggctggcatcattgaatagattcattgcaaggtcagcagagaggaacttgcaattcttcgaagtgctgaagtcagccgaagtctttcaatgggg

SEQ ID NO: 62131 - DNA, 360 bp, Zea mays
  unsure (1)..(360): unsure at all n locations
ctacatctctgaactaattcgggcggatcgctctttttcttttgtcattanaatcctgaccggaagaccttcttgacttgtgttctggatgctgcatgtatcccacatttgcccgcatggacttccttcataagttgtttcccagtggacgagagaacgcacttcatgaggatgcctgacgcgctccttctgtataatatctttcccaatgagtgtgtagtgagccgacttgcctgcaatgcgctctgccgagttcttgccatctgggtcttcttcattctttatatacttaataattgggcttcttcagtcatcagaatctgactcgagttgagttatgatgtgtcnttcttctgtttg

SEQ ID NO: 62132 - DNA, 365 bp, Zea mays
  unsure (1)..(365): unsure at all n locations
accatanaaactcagctaacacattgaacatgagcgcttgcgcttatcttggtcttgtcttggtgccccttgcgaccttgtagcgccgtcttgaatatctcgatgatgagagccatctcttcatcattaagtccggccgcctcaatatgtgccaccttgctatgtagcgtctccttgcttcttgatgccttgagagcaagagggtgagggtcattgattggaccattcaatgcgtcggccacgtatatagctaccttgatcatcattcgcccgctcacgaactttccaagtatctcctcgggcgtcatattggtgtacctatgattctcacgaatattgatcacaagatgacgatcaaggacagt

SEQ ID NO: 62133 - DNA, 439 bp, Zea mays
  unsure (1)..(439): unsure at all n locations
tgaagggcaaaccanaaagcaagccccaatatacttcgtcttctaagtccttagtttatcaaagaaaaactatatatgaatggagaaggtgttgtatgctgttttgatggcttccaggaagcttcgacattattttcaagcataccatataattgtctttcttcacagcctttgaaggatattatgagaaatagagaagctactggaaggattgaaaagtgggctgcggaactcaatgagttctgcattgattatgtgcatagatcttcgattcagtctcaggcgttagcagacttcattgctgactggacgccaggggctcatgaagaagcaagtaaagatgccgaagcttggacagtattctgcgatggttcttggggaaccttctgtgtaggtgcagcttgccgtcttaattgcaccttccaaaatcagaacatgc

SEQ ID NO: 62134 - DNA, 399 bp, Zea mays
  unsure (1)..(399): unsure at all n locations
tgaccttgaggcatgggaaacaaaaagaacatgttatatgatatatatattcagttataaaatttcaacaaagaatgatgtacgataagcaaactctcacaattccaaagaanaatcaccatgcgttggtttctccaaagaccagaaatttataacctgcagcaaccacatggtacttcaggaacatgatgagaaagcacggtttaataactacaggcaaatactctaaggccccgtttgtttcgttgtaattgaaattcattttaataattataatttagacaaaactaattaagttaatatatttgtatatgtaatatatttgtatattatcttaaatcataaacgaaagaatagtatacactatatttatgttatagagaagcaagtaaaagagta

SEQ ID NO: 62135 - DNA, 448 bp, Zea mays
  unsure (1)..(448): unsure at all n locations
actcagcttctaagggagaacacgtgataggtctaaccaatgtacatttcttaatttatataccttgtgccgcttggccagcacggaaacaagtgggaggctctcatcacaccaaaaatgtgatgacaacatcaagacccctggagctgctacatatggacctcttctgactctgtccctatctgagcataagaagaaataaggatggtctatgtattggcgatgacctatccccgcttcacttggatgctcttnttgcatgataagtctgaaacccataggaccctcaagcgccttctcatgagagctcataatgagtctgagctcaaggtgaagaagataatgagcgacaacgggtccgaaattaagaatcttcaagtggaggagttccttgaggaggacgggatccagcacgagttctccggtccctacacacctcaacaaaatg

SEQ ID NO: 62136 - DNA, 372 bp, Zea mays
cagctagtcaagcaggtaaacaagtgggaagagcacatcacagctcgaatgtatgaccacttcaagacctctggagctgctgcatatggacctcttcggacctcgtcgcctatctgagcataagaggaagtcaggatggtctagttatattggagacttttcttgcttcacatgggtggttcttttgcaggataagtctgaaacccaatggaacctcaagcgctttctcaggagagctcaaaatgagtttgagctcattgtgaaaaagataatgagcgacaaccggtccgaattcaaaatcttcaaatggggagtttctgaggaagatggatcaagccgaattcttcgctcctacacacacagcaaaatggt

SEQ ID NO: 62137 - DNA, 366 bp, Zea mays
ggtcaactcacagctccactcagagcgatgacagaggaagttagctacagaggccgcattatactacacaatctattgggcaacaacaaagctctttacggccgccagctccaagaggcagaggcggcatgggcttctgaggaaaatatggggaccagcccacgaagatctactgcctattttgtggtgaagacaaaggccatactacatgaatgtgctaaatcaccatccaacagcagaaggagatcgcagaagccgaagcccggcacagtcaaccgaagcaggttcagcacactgcttcgtggcactcaccctacataccagactatgagggtaatcatcctacagcttcatgtggcttcggct

SEQ ID NO: 62138 - DNA, 438 bp, Zea mays
  unsure (1)..(438): unsure at all n locations
ttgtcaagtctggtctgcaatggtagcagaggaactcttngtttgttgttaattctggggcagccattggacttatatctttgcttggatgtgctgatgttgatatagctgatcttttggaattatcagaggaattcatngtggtgcctaaccctgatcaaattgcattagagaggctattcagagttgatgatatcacggttggtgcaacttctagaaaatctattcctcttcttgttgatctacttaaacccattcctgaaagacctggtgctcctttcttggccttgggtcttctgacccagttagcccgtgattgccccccaaacatgctgctaatggctgaagctggaatcctagaagcacttaccaaatacttatctcttagtccacaagaatccacataaaaagctaccactgaattgcttggcattcttt

SEQ ID NO: 62139 - DNA, 351 bp, Zea mays
acaagaccatgaggaatacctaccagcctatgtccgaaagtatctttggcttcaagctcaagcaccaacagtccctaacgtgatagtcacacaagccatgatcaagggacttcatccatgacatgtggctcaatacttacgcataaagacatcgggcttagagtagcttcttcagaatatggacaagttatggtggataatgatttccgtcaaagaagagaagaagcccagatatatgcataaatgactaagggcatcacgggaagatataacccaaggcatgtctagagcattcacaacccacctcataatgaagacaaaatcatccataatctggggcaacaaaatcaa

SEQ ID NO: 62140 - DNA, 489 bp, Zea mays
  unsure (1)..(489): unsure at all n locations
acctataaaactcagcttnttagttcataatcatactttaggtcgattggtttatttctgcactntaaacctattttggacatgggaatttctatagacgcaatgttacatctgtattctgacttaagtgtaagaccgtctccaacagttctcatatcttatcctctattttaaacttcactttataaatagcgtcacgtcctctattttacacacgatccaccatagacaccataacaatccaacaccacaaagcctagcaatccaacaccacataacacggtgtgggaagacttacttaacgacctcaaactggctttgctcagttgaatggtgtgttcaaagttccaactttagaaatcacacatttgtatgtatagaaaaatatgctgcacagacatgaccattacttgagaaacactncttgccgttctgggtaactcgcacccgaatcattattcatccgaacagatcatttttgttaaacag

SEQ ID NO: 62141 - DNA, 397 bp, Zea mays
  unsure (1)..(397): unsure at all n locations
tagagaaatctggtatgaatctgcgataatacccatctagttcttgataactccggacttggtgaacagttggtgggggtttccactccagaatatccttgaccttgctaggatctaccgcaattcctttagctgataacacgtgccccaaaaattgaatttcttccagccagaacgcgcacttgctgaactnggcatatagctggtgttcccttaagcgcgtcaatacaatccgtaaatgctgagcatggttntcttcattctcggaatatatcaagatatcatcaatgaagactaccacgaacttgtccaattcaggcattgaataccgagtcattagataagtgaaatgggcagggagcatttgtgagccccgaacgacattaccacggtattc

SEQ ID NO: 62142 - DNA, 451 bp, Zea mays
  unsure (1)..(451): unsure at all n locations
ntaccctgtagtctggactataagttggttacggtttgtgtgttttatgcagnttgaccatttccagcattggcgtaatgaggactctagggagaagcctcgtagtgagaccctggccattcacctcggaagtgaatacgggtctagctaacccgggctagaagggaatcgcgactcatgggtaaagatgcgccacctctgcagagtgtaaaactgatatatcagccgtgctcacggttatgagcagcctggactcctcacatgataattgaacttgaagatggaaataaatcgagatccgatgatctgccaatggtttgcttaagtggtttcacttatgtgttnttgatatactcttgtacctttgtttaatgggaatacctgtgattcacacttattagtaagacaggtgttgttaataaaatgtggaccatctaaaaggttactgctc

SEQ ID NO: 62143 - DNA, 449 bp, Zea mays
  unsure (1)..(449): unsure at all n locations
ctgggctaagattccctgttacgagattgtgtggagatactgaagaggtttggcatctaccttcatcagttaacttctaacgctatcgntaggcttagcgtttatatttgggccctccgaagccaagtagtggagccttttgctgacagtttctgtcgagttcatgaattgcattatcaaacaaaggccagaaaagatgggcttcatgaaaactttcggtgctacaattttgcctaccggaaaaccgcanagtttcctgtaatcagctaccgaagcaaatggccggcatgctggaaatcagaatggttctatgtcaaggttgatgaagacaatgagaagctcgtgcaaaggtcactctagctaacttttcgagagactcgaccccactgcaacatgacaccagagggtcaaacttcaccgggcgatgggatgaaattcagaatcgttgc

SEQ ID NO: 62144 - DNA, 480 bp, Zea mays
  unsure (1)..(480): unsure at all n locations
attacggacctataaaactcagcttatactcggctgcgttgttagaggccgggaatagcaattggatagcgtacttgaggtgttcgcctcccggtgcagtgaagagaattcctgctcctgctccctgcagcttcagcgagccatcaaaatacattcgccatacttctgcggtttctggattatccggcacttgctgttctgtccattctgatacgaagtcgaccaatgcttgagttntgatggcagtgcgaggtcggaactcgatatcatgggaccccaactcgcaagcccacttggctattcggccaatggcttccttgttgtgaagaatgtcccctattggaaaaccagtaactactatgactntgtggtcgtcaaagtagtgacgcaacttgcgggcagttagaagtactgcatataatagcttctgaacttgaggatactttttctttgatgggcctagaacctcactgatgaaat

SEQ ID NO: 62145 - DNA, 476 bp, Zea mays
tctaaagggagagcacattgtaggattaacaaatgttcattttgagaaagacaggatttgtagcgcatgccaggcggtgaagcaaagtggagtccatcatccacacaagaacatcatgacgaccgacaggccgcttgagctactccacatggatctattctgcccgattgcttacataagcatcggcgggagtaagtattgtcttgtaatagtggatgaatattctcgcttcacttgggtattcttcttacaggaaaaatctcaaacccaagagaccttaaagggattcttgagacggactcaaaatgagttcggcttaaggatcaagaaaataagaagcgacaatgggacggagttaaagaactctcaaattgaaggatttcttgaggaggagggcatcaagcatgaggtctcttcttcctacacccttaacaaaattttgtagtggagaggaagaatccaactctattggacat

SEQ ID NO: 62146 - DNA, 413 bp, Zea mays
  unsure (1)..(413): unsure at all n locations
ttagctgattcagagtcccttggtggatcatccccatgtttacttttccatttcctgacacaaagtgttgtcaggggtcttcactataagacagtggcaggaagccttactgcttagtgcctctgccaccacattggctctgcctgggtgataatggatctccagttcatagtccttaataagctcaagccatcgtctttgcctcatatttaattctgactgggtgaagatgtacttcaagcttttatgatcttgatatatatgacaaatatttcccagcagatagtgacaccaaatnttcaaggcatgaaccacagcagctagcttcagatcatgagttgggtaaatgctctcatgtcagcgcaactggcttgaagcatatgccattactcgaccctcttgcatttatacac

SEQ ID NO: 62147 - DNA, 364 bp, Zea mays
  unsure (1)..(364): unsure at all n locations
agagcacattntaggactaaccaatgttcaatttgagaaagacaggatttgtagcgcatgccacgcaggaaagcaagttggagcctatcatccacacaagaacatcatgacgaccgacaggccgcttgagctactccacatggatctattcggcccgaatgcttacataagcatcggcgggagtaagtattgtcttgtaatagtggatgattattctcgcttcacttgggtattctttttacaggaaaaatctcaaacccaagaaaccttaaagggattcttgagacgggctcaaaatgagttcggcttaaggatcaagaaaataagaagcgacaacgggacggagttcaagaactctcaaatc

SEQ ID NO: 62148 - DNA, 389 bp, Zea mays
  unsure (1)..(389): unsure at all n locations
ttgaacatttcaaagcagaggagatcaaataacatccacaggtttcaaaaatccctaaacactaacttaaatatatttattattttttttcttgctactaattttgagctttataggtgcttcctaaggagacaaactgggacggatgtaccctttttgtgcagctctgcaatctggagttcaattctgctaactctgtgggggccatgccgtatggtctctttgcgatgggcgcagtgccaggaatgagatctatatagaactccactcctctttctggtggcattccacgcaactcttnccgatatacattcaccaattcttctattacggatatggtttcctgctgccagattaaacattattggattaattggcggcggttgggc

SEQ ID NO: 62149 - DNA, 368 bp, Zea mays
agtatgggaagcgccaatcacttatatccatgcacgcctgatctggctctggatttactaatgtggattccaattgtaagcgtgagctaaaacatacgtcatgagtactaaatttatacgtagaatctatatctgttttataacacgcaactgatgccaaaattacggcgacaaaatcatgtgctgatagatcgtgcgtgggttctggctcgggctgactccaaccgataatgtgagctatacacatcgtaaatgagtatgatatttagcggaaattctatattatgtttgaacagctaacaaacacaaaattacgggagaaattacgtgcagccatcgtcttgggtattaggttcgtgcgattttac

SEQ ID NO: 62150 - DNA, 296 bp, Zea mays
  unsure (1)..(296): unsure at all n locations
tggcagagcgagccgcatacaccgagccccattgacggcacgacggctttgcatactacaccctggttcctctaattattcagctaagggcattccattccaccctcatggttgcactgttttcccgggcggtcatccaacgaacaggtccttacagagaggcactcgattaaccgctcgagccctcttgaataccacaagtaccacatcataataaaggagaaaaacagngnatcaatgataattctcatcatgttcattgattagagttgagcaatagcataaagcttaacaat

SEQ ID NO: 62151 - DNA, 414 bp, Zea mays
  unsure (1)..(414): unsure at all n locations
tgacaatgaagagaaggcgcgcgtcatcaagagcctcctccttatcctcaaacaaaggaggggaanagactacaagccccgctccaagaacggtgctacaaatgtggatagcccggtcattttattgctatatgtcctatgtctagtgacagtgaccgaggcaacgacaagaaagggagaagaaaggagaagaaacagtactacaaaaagaacggcggcgatgcccatgtttgtcgggaatgggatttcgacgaaagctcaagcgactccttcgacgacgaggacgccgcaaacatcgccgtcaccaagggactcctcttacccaacgtcggccacaagtgcctcatggcaaaggacacgcaacggaaaaaggataaatctaactccttcactaaatatgaatcctctagcgat

SEQ ID NO: 62152 - DNA, 455 bp, Zea mays
gcttggagactgagttccaccgcccttcgtcgtgctgcctgacatgttctacgagcaacttgtcctcctggctggtccaaggcccctttctccacccgtacaccacctactactggcgccagtcccagccgagcgggccctcctccatttgcctctccgacagcggccggctgtgctggtttcctggagatttttgttctgcccggccccgtggcagctagctagctagctatttgccggcgtgcgtgggagcatgcagcctttctttccgctgatgctgcctgccacccgcactgagtgagggcgtggagcgagcgagtaaccgctgccgcgttatatcggaccggcgtggctctctttcccccagcgctcgccagcggcatcgccaaggccgcgtcgctgtcggtggaattcatactccccaccagctaccctactgccgaataggattgatt

SEQ ID NO: 62153 - DNA, 434 bp, Zea mays
  unsure (1)..(434): unsure at all n locations
gcttaatgatgaattggctagtcttaatgctcaacttaagactatcttaatgatctccataaactaaaatttgcaagggatgcctacacaattggtagacacccctcaattaaagatggacttggcttccagagagaagccaagaacttaacaagccataaggctcccatttccgccaaggagaaagggaaggcccctatggctagtagtgtgcaaaagaaccatgtctttatgtatcatgataggagacaaactataaacgcttataggagntttaatgcttatgatgattttgactctcattgccatgttgcttctagatcttcctatatgcatgtgagaaatatgtctaggaanaatgctattcatcatatgcctagacagaatgttattcatgctcccaggaaagtagtgaatgaaccttctacaattta

SEQ ID NO: 62154 - DNA, 409 bp, Zea mays
tgcttgtcttcccaacgatcttatccgtatgctcgtgcgattctacactcgatggcaaggggggagaaccgctattactttaacagtggtgccatgttataatctcttgcacgagctttaacatgtgactaataggatataaatatttcgatggataaagatcgagaaggggctccaagcagcatataagatccaatttggatcaacgaacactctgatgtagatcttcgaagaaggcatatatgtattcggtctagggtatcatcctatagtgcacaaataggtctttgatgactagttaaatgagttactatatagagaccacgatgcttagagaagaggggttaattgtacacttaagaacctacttcttatactagaataactaatgttcacatatgcaaaacga

SEQ ID NO: 62155 - DNA, 382 bp, Zea mays
tcacgggctactggcggagctagccgaagcactggtttggctttatggtggccggagtgggctggccactgcggccgtatctctggctgcaatggcgggcggaatttgaacttctccgagctaatgaacggtggctggccaatgagggtgagtgctgtgctaatagaggtgcgcccggtgaggctctatatgctctggctggcactgcctatggcgtgggcgcgcggcggacttgaccggacgccggtgtgagcgcgcgcggtggatgggcgagctctggcgtgccgaccagtgtcgaacacgtgtgcccgtgcgttctgcccaagttctggcgcgtgtggtcgctcatacgagccttgtctcgccttggtcagtgcacaaa

SEQ ID NO: 62156 - DNA, 364 bp, Zea mays
  unsure (1)..(364): unsure at all n locations
tgttgtaacaaagagacataaagtgtctgatatggcttatattcttctcaaacnggtattgcgtttgccggcggcgacagcaagtgttgaaagggcattttctgcaatgagtttggtgaagactacattgagaaacaagatgtgtgatagtcttttggatgattgtcttgttacatacatcgagagggatattttcttccaagtgaatgaagaagatataattgaaacttttatggcgttgaggaagcgcaggccagataagtagtattattgcaatctttatgcttaatgtatgcaatttttatgcttaatgtatgcaattntcatgcttatattgtgagtgtcaaacttatatctatatatc

SEQ ID NO: 62157 - DNA, 473 bp, Zea mays
  unsure (1)..(473): unsure at all n locations
tgccagaatatagaanattatttattcatgaacggatggagtatcttattattatgtgtgaaacattcttgaagtaaattattagcttgctatataccaatcacttgatatataccaatcatgtaccaatcacttgatatataccagtcatgtactaataacatcattagctaagtaaacacatgtatccaacgatatatactntctccatgtttcaatgaaaaggtagaaattnggtttttttacaagtgaaaagtgttggggggcttcgctttcgaaagtctaaaaaacacggctaaccatttgttatcagcatgttaataagtgttacaacagcttcgttaccagaaaagctttggcgtagaacaatagaagtgcaacgaagtaaacttcgatgatgtacaaagacgatgcaaggagaatgtgttattcatgctgctaagagcaaatgacaatattaccactgtaatatt

SEQ ID NO: 62158 - DNA, 92 bp, Zea mays
ctctattatggctacacacaatttcttcgttggaacaccggttcggcacaaaccggcgcaacatataccaggtgtggacagctaccatatat

SEQ ID NO: 62159 - DNA, 374 bp, Zea mays
  unsure (1)..(374): unsure at all n locations
cttctgcggttcgaatctaactagctcatatccttttccctttcnggcttctccctgggtcctaagcaaaacaagagtggacgggtcttcatggtcttaatatgatggacatgaactcaagagtgtattcacctaatggctgagatgacaaacatgaatgtgagtaatgggacataaattgagactcatatggacatggatatatcagtggtgtggatgtcctcatcatactacacttcttgcattagagtcatacttgaatgagggcgacacatcggtcaagctatgtgagtatgaaggctatacacattggagttagtaaagaagccagcanatccatatcatgtnttctcttcataagagacgtggatcta

SEQ ID NO: 62160 - DNA, 371 bp, Zea mays
  unsure (1)..(371): unsure at all n locations
accagcnggaagtctcacccacaggcaagcggagcccggcagccatgtagctaacgataagctgcattgaccgggctctcttttgtaaaacaactaaatacagattgccgtctaagacacccttaaatgctagtgaaccatcatatcttctaaagacagacacatctacatttgtaaatagacaattatatcccatattacataatngactgacagatagtaaattatatcccagagactcaactaaaaacacattagaaatagagtgctcatttgagaatgcacatttaccttgccttggttcccatcaccgaatattattgaatcttgagaatccctttgtttgacgtaggaggtgaacatattcttct

SEQ ID NO: 62161 - DNA, 371 bp, Zea mays
  unsure (1)..(371): unsure at all n locations
atgatgaacgtgatttttgtcctcatccttgaaagggaaatgtacccttatgccattccgagtatattttggtgattaaatgccctacacatatngagtgagtaattatatgccaaatgatggatgaagtgcanatcgacaagaaggtatggttctagacttagtacattggtttttgtgtactaatatatttgtctaagtgctanaatcacgaaaagaanaggattggaaaagagttggctgtgtacagccaactgcagctcagtctggcacaccggactgtccggtggtgcaccagacagtgtccgatgcaccangctggactccggcgaactgccactctcgagaactgtgctgcgtcaactatattc

SEQ ID NO: 62162 - DNA, 435 bp, Zea mays
  unsure (1)..(435): unsure at all n locations
ctgaccttgctcggcagcgcgctgactctggtgcgtcactgccagngccactntgctccaccggtccacctctatcttcttgcttgttgaatttctaattctataacttgtgaagtgtgattntatctttattgattattgtatatcaattgattgtattcaatgtgtgtttctttcaaattatagaaaatgaggagattcttggtttctagaagttcagcgtcggaaccacaatgtggtgcacaaccaacacaaccaaatccaccatatactcaatctagagggggcggcgagatcaatatgcactaccccagaatcgctcacaggtggcatgactgtcttgtgacactagctaanaacacgtcactaacaaaattatncttatgatgtctgttgtaaaaacacgtcattagcacaatatggtaataacacagt

SEQ ID NO: 62163 - DNA, 251 bp, Zea mays
tcccttggtcaccagtcgtgctttgttccttgacaccacaccatgctcgtcttgcttgttgcaaaagacccatatgtgtcctacaacattttgattacgacgtggaactaaatgccatacctcattcctagtgaagttgttgacctctcttgcatcgcaccacccaatccgaatcttgaagtgcttcctctatcctgtgtggctcaatagaggacacaaaagagtgatgctcacacaaatgtgcaacacga

SEQ ID NO: 62164 - DNA, 371 bp, Zea mays
  unsure (1)..(371): unsure at all n locations
taatatactaatggactcaagcctagctaccggtgcataggtttcaccgaaatccaaaccttcgacttgggagtatcccttggccacaagtcgggctttgttccttgtcaccacaccatgctcatcttgcttggtgcggaaaacccacttggttcctacaacattntggttaggacgtggaactaaatgtcatacctcattcctagtgaagttgttgagctcctcttgcatcgccaccacccaatctgaatcttgtagtgcttcctctaccctgtgtggctcaatagaggaaacaaaagagtaatgctcacaaaaatgtgcaacacgagatctagtggttacccncttatggatgtcgccgaggatggtgt

SEQ ID NO: 62165 - DNA, 272 bp, Zea mays
  unsure (1)..(272): unsure at all n locations
ataatgaggggtacattntatatcctgctggntattctgagcataatattacgagaattcattctatgaagtctcattctggttctcatcatgctttatgtataagaatgagacatctagttctaggcattctactcattgttaaaatgcctcaaaagaaatctcctgttgcatcaaatgagcctaatgtttcatttaagacttctgatacttcttatgttttaactaacaaatcaggcaatgtagttgccatatatggtgggggcaaacac

SEQ ID NO: 62166 - DNA, 472 bp, Zea mays
  unsure (1)..(472): unsure at all n locations
tggtgaactacaatcttgcaaactctctacatttaccattgagcatgttacaatctgcactagatgtagagatgttaacattgatgctattcatgatcacatggccttgattaaacaacaatatgatcatatatgcaaattagatgctaaaattgccgagcatgagttatataatgaaaaatttaaatttgctcgtagcatgctttatagtgggagacgccctggcatcaaggatggcattggcttccaaaagggagacaatgtcaaatataatgcccctcctaaaaaattgtcaaactatgttaagggtaagactcatgtggctcaagataacgagggttacattctataccctgccggttatcccgagcataatattaggagaattcattctangaagtctcactctggctctnaatcatgctctatgtataagggtgaggcatctagttctatgcaatcaacccgtgat

SEQ ID NO: 62167 - DNA, 391 bp, Zea mays
  unsure (1)..(391): unsure at all n locations
tgagcaagnctcacggcttcaccaggaagtctaatttttggcctggatcgaacggaggatgacgggagacgggctggccatcgtggttgctctcaggcggcactggcgggtcgcggagaggtcgccggagctaatggctggctcgggcaagtccggcaaggtacggaggaggtaacggngaaggcagccaagcactgtggcgggctttatatccgtggcgcgggcgtggtcacnggcggccgcgggcgcgcggtggttcgcgcacgggcgtgctctgagcgcgccctcggatgccagctcgcgtcgaacacgtggaagcttgcttctgccatggttcaacggccgattagagcgccatatcgtgcgtatctcggcaaagtcactgtgtacg

SEQ ID NO: 62168 - DNA, 326 bp, Zea mays
acctcaacaagagtaccacatgcattgatcatgacctccacacaaatggtgagccaagggcttcctttcccaatgaactgtcgcccctgaagctgaaattgcgccgaacaggcttcaaaccatacaagagaatgtctgtggaagcgaacgagaatatggtgccggctagcgactaggttgtgaccaagaggattcgtcttgatagtgtagcatcaacatgagcgatttctacattggtaccgctcggactttctctgccgccatgaagtttatgacaaagttgtatttacatctatactattataggacttaaagaccttgcaatg

SEQ ID NO: 62169 - DNA, 482 bp, Zea mays
  unsure (1)..(482): unsure at all n locations
tctaaagggagaacacattntgngactaaccaatgttcattntgagaaagacagggtttgtagcgcatgtcaagcanggaagcaagttggtcccaccatccacacaaaaacatcatgacaacagacaggccactggagctactccacatggatctattcggcccgatagcttacattagcatcggtgggagtaagtattgtctagtaattgtggatgactattctcgcttcacttgggtattctttttacaggaaaaatctcanacccaagagaccttaanaggattcttgagatgagctcanaatgagttcggattgaggatcaagaaaataagaagcaacaatgggacagagttcaagaattctcacattgaaggctntcttgaggatgaaggcatcaagcatgagttctcttctccctacacacctcagtanaatggtgtagtggagaggaagaatagaactctactggacatggcaag

SEQ ID NO: 62170 - DNA, 462 bp, Zea mays
  unsure (1)..(462): unsure at all n locations
tagctacattagtgtagtatatcagcatgccggntatgtctaatatntcaataatatgctattgctgnggagtagcaggtttgttatcagcctccttaaagtcctgngtttgaatcagcctcaaataaacaagggtaaggttgcctanggattccgtttcctagatccacctgtgcgggagttttaagcacttgctaccttgcctttttgtttgatcttgtantttgagaagtgattgtagttgcagccttgactaattatattatgcacatccatctcagacaatcaggaatcacacatgaagtatggatagtctaggtgctatttgtgtgtgtacttatttaagaagcagagntcttttcactactaaatttcgtcttttcttataccaaggtaatattgcaaactatttgagcctggcagaggttgattccatatatcttccgatccctgtgaacttca

SEQ ID NO: 62171 - DNA, 411 bp, Zea mays
  unsure (1)..(411): unsure at all n locations
aacatgtgggaggagcgcatcacaacaagaatgtgatgaccacttcaagacccctggagctgctgcatatggacctcttcngacccgtcgcctatctaagcatatggggaagtaagtatgggctaattattggtgatgacttttcccgcttcacttgggtgttctttttgcaggataagtctgaaacccaacggaccctcaagcgcttcctcaggagggctcaaaatgaagttgagctcacagtgaagaagataatgagcgacaacggatccgagttcaagaaccttctagtggaggaagtccttgaagaggaatggatcaagcacgagttctccgcttcctacacaccacagcanaatggtgtggtatagaggaagaacaggacgctcatcgatatggcgaggacgatgc

SEQ ID NO: 62172 - DNA, 425 bp, Zea mays
  unsure (1)..(425): unsure at all n locations
ctaagcttacctgagagatcacttgaggccgctaaagaatntaagatatttgaagtatactccctatattggtctatggtatcccaaaggtgctcactttgagttaattggatattcggattcggactatgcggngtgcaaagttgatagaaaaagcacctncagttgttgtcaatttcttggtagatctcttgtttcatggtcttctaagaaacaaaanttcggtgctctatctaccgccgaggcggaatatatatcggccggaaattggtgtgctcaactattatggatgaaacaaaccttattggattatggaattattttcaagaatgtgtctctcatgtgtgataatgagagtgcggtaaaattggctaccaatccggtccaacactcaagaactaagcatattgatatacggcatcact

SEQ ID NO: 62173 - DNA, 479 bp, Zea mays
  unsure (1)..(479): unsure at all n locations
tcatgcaactgctgccaganatgagaggtgaactgcgttcctctgtctgacactatcnttcttggcacaccatgaagacaaacgatccgagacatatacaattctgccaatacgacactgctatagttggtcttgacaggtatgaagtgggctgacttggtcaagcggtccactactacccaaatggaatcgtagccggctcgagtgcgaggcaatccgactataaaatccataccaatttcatcccatttccactgagggatctgcaacggctgcaacaatccagcaggtctctggtgctctgccttaattcttcgacaactatcacacatagccacatgccctgcgattcccctcttcattccgtaccaccagaatttcttcttcagatcctgatacatcttctcactgccagngtgaatcgaataggctgtctcatgaagcttctttgagaatcaactccgaatggactggacatt

SEQ ID NO: 62174 - DNA, 366 bp, Zea mays
agctgcatcacttttcgccgttgtgtcatataatcctgacctgaaaaccttcccatctaacgtcctagacattgtatgtattccacattgcccagcatggacctcctccagaagtcgcttcccagtggatgggagaatgcacttcattacgacgcctgatgcaccccttctgtataatgtctccccaatgagtgtgtaatgagccgactgtctggcaatgcgctcggccgcatttatgtcatctggttcctcttcattctttatatacctgatgattggccttctccagtcatcagagtctgactctggttgatctataacattacactcctctacttgatccattgagatgctcggctgtagtat

SEQ ID NO: 62175 - DNA, 435 bp, Zea mays
  unsure (1)..(435): unsure at all n locations
cgagcaaatactcaacctgaatcgccccacagacgtgcctgatactggattgctctgngatcttctttggtctgatccttccaatgaagcaacaggctgggccatcaatgatcgtggtgtttcattcacatttggtcctgataaagattctgaatatcttgagaagcatgatttggaccttatctgccgagcacatcatgttgttgtgttcttaaagatgtgacctacttattaccttataaactacaaagtgtatcaatagtttacttatgcttctgcattgttgagattcacgttgtcgaagatggatacgaagttttcgctagccgtcaactcgtaacaatattttcagcccctaactactgtggagaattcgacaacgctggtgccatgatgagtgtagatgatacattgatgtgctcgttccaaatattg

SEQ ID NO: 62176 - DNA, 257 bp, Zea mays
cacatcatgcagtgattagccgaacatggcctcgctatcatatcctttaccatacaaagtgccatgtttcggcacaacacatttattagactccataacaactttatatccattctcgacatacatacgagcgctaaccagaatcttcttgattgatggcacatgctgcacgctcttcaatggcaccggctttcctgaagaaacttctgaatgaccgtcgcacaccgagaacatgatcacgcgacccatttccatca

SEQ ID NO: 62177 - DNA, 430 bp, Zea mays
tggaggcgtctattggttgtcgacttggtgtagactcctccttcttctcttccgacgccttgcatgcgacggggtgagcttcggatgtatatggatcatcaagctcgttgatcttcctcgagccttcgatcatgcactcaaaacttacaaaatgcccgattacttcctcgggggtcattctagtatatctaggattaccacgaattaattgaacttgtgtagggttaaggaaaataagagatcttagaataaccttaaccacctcatggtcatcccactttacgctcccgaggttgcgcactttggtcaccaatgtcttgagccgtgtgtacatgtgttgtggctcctcccttttgcgaagccagaaccgaccgagcttcctctcgatcgtttaccgcttggtgatcttggtaagctcatctccctcgtg

SEQ ID NO: 62178 - DNA, 515 bp, Zea mays
  unsure (1)..(515): unsure at all n locations
tctcacaatttccttgaggtcattgtgagaggtcttgagctcctcataagacactnggagggttttatacaattccttcaaggccttaaattnttctttntctttgtgcatgtagtcatcggcctcacctaacattctaacaagatcatcatatgaatagccatcatcatcaacatcatcgatatcatcatcatcatttaaatcggtgatgatttttaccttagcatctccctttgccatgaggcaatgggggatgagaagagtgagggagcttccttgatggcaattccggcattaagcttggatgaggtgtcatcatcatcatcatccgagctatcatccgagtcccattcaactaagtaggctntgccatctttcttcttgtntatagatttctttntcttcttgtcactntcatctttgcccttcttcttcttgcttggacaattcatggcaatgtgaccgggttccccacacnntcaaacatttctatcattgaaagcatntcttctaga

SEQ ID NO: 62179 - DNA, 453 bp, Zea mays
  unsure (1)..(453): unsure at all n locations
tacactggtccattccctatacttgagcaatgtggaccagtggcgtatcgacttcaactacccgaaaccttgtctgtacataatgtgttccacgtgtcccaattgaagaagtgtcttctggttccagatcgaaccgttgaagtaacagatgttgtccttaaaccatacttgacatattccgaacatcccattcgagtcttggaccanaaggacaggattaccggagaaaaattctcaagttttataagatacagtggaaccgacattccgaagatgatgctacatgggaaactcaagacttcttaaataagaatttcccaggcttnttagcctcatgtaatttgtaaagtgtgtatagttattgtaataaaggagtgagccccaaaccacccctgccttgaccanaactcaggaaataaaaatgtgaagcatttccttttccactacttaccc

SEQ ID NO: 62180 - DNA, 497 bp, Zea mays
  unsure (1)..(497): unsure at all n locations
ctaagcttgtcaagaacgacaccttcacaaacccttgtgcaacattaggattgttcatcaaataaaaatagtacttagccttgtgctcaagctcaaaaccaggaagactatccacaacttcaaacaaacctggtggaatgctctctttgatgctgcatctcgtataacaccagctatggtttgagtaccaagttcaaaggcgtgaaccaaaggatcaactacattttcatccttcttagctctcttggagggcctattgcctgatcctgctgtgtcttctttgtcaatggaagtactggatggtgttccaacattcaattcatcctcttcaacatcaacagcaagaggttcactngaggtcttcacaaattgacctgttgccaatttgttggttgatcctaatgtacttntttcaatggtttcaagtggttgccaatttgttcacgagttctattgatcttataatgaatggtcatagctttagcacaagcactgag

SEQ ID NO: 62181 - DNA, 372 bp, Zea mays
  unsure (1)..(372): unsure at all n locations
ctcagcttctaagggagagcnacatttaggattaacaaatggttcatttgagaaagacagggattgtagcgcatgccaagcagggaagcaagttggtgctcatcatccacacaagaacatcatgacaaccgacaggccactggagctcctacacatggatctattcgacccgattgcttacataagcatcggcgagagtaagtactgtctagttattgtggatgattattctcgcttcactngggtgttctttntgcaggaaaaatctcacacccaagagaccttaaagggattcttgagacaggctcaaaacgagttcgacttatggatcaagaaaattagaagcgacaacaggacggagttcaagaactc

SEQ ID NO: 62182 - DNA, 353 bp, Zea mays
  unsure (1)..(353): unsure at all n locations
ctcaagcttacanaggtgaacganaatagagaattggagaatggagttatggttcaagtgagtcaggttgatgtgataaaaatcaaggatgccacggaaaanaggagatatgggaaggccgacgccgcgaagaatgaaaggagtgtaaaccactgactcgtgggtatcttcggttgggacagtagtcccgtggcaagcccgccaagaacagagttcccgtggagggagaaccccgatggagacaaggcggagaagctcaacttcagaaattacagacatatggttacctgcgaagggtaactgactgttgnggtcgatagcggggatcactgcggcagacgagttcgcagtct

SEQ ID NO: 62183 - DNA, 507 bp, Zea mays
tcgcttcgccccgacccaggctcggacacaggctaagtcccggtagactgcgaactccgctccgcccaacccagggctcggactcgggctaagtcccggaagacggcgaactccgctccgcccgacccagggctcggactcgggctaagtcccggaagacgacgaactccgctccgcccgacccagggctcggacttgggctcagccccagaagacgacgaactccgctccgcccgaccccagggctcggactccgccatggcctcagccgacggcctccgcctcgcccgaaccaggggctcggactcgacctcggtcacagaagacagactcgacttcggcttcggaggagacttcacatcgcccaacctagggcgcagaccagccacgtcaacaggaagcgtcatcatcaccctaccccgagctgactcgggcctcagggaacaagaccggcgtcccatctgggctcgctccgcagataggcaatgatggcgccccgcatactct

SEQ ID NO: 62184 - DNA, 471 bp, Zea mays
  unsure (1)..(471): unsure at all n locations
gacctatgaaactcagctgagaagggacaaccgtagcatgcacaanaccccttcataataatatcaagctttccaagaaaggcatgagcaaacatcaagagaagaaagacaaagctcatgacaagtacctcaaccacgcctccacatgctccacacaaggtaacaaacaagccactctttcaaataagagaagatgcactagaaagtgttatcaatgtcatgagaagggacatgagattaagtcatgtccctacataaaagatagtggcttaaatttggaaagaaagaggctcactaaccatgtagcaaacaagaagcaaggcaagaaggagtcttgcanaattaaaaatcatatttgctacacttgccgaagaaagggacaccttngcaaggattgtcccatgagtaagtatcctaagcctaccatgtcaattcattcatactcgcttaggagaacccaaaatgacactt

SEQ ID NO: 62185 - DNA, 453 bp, Zea mays
  unsure (1)..(453): unsure at all n locations
ctctaggacaacgagaagncaactgtggtggagtgatataaatctaatgtgacaaacactgagctatcaatctaattgctattgtaatgcaagctagtgaagtctttattttacaattgataacgttgatgccttgctgttgctggataactgcaggagtgttggagtcatggtgtgggcgtgtggcattatacaagctgcaattcgcttgggcttggtaacaataaacagttggaggcatcatggagtcccagacgaccagatttttaaatatgtttgtgaattgtgatggattgatgaacctattaaattatttcttgtggtgaatgaacttgcatgtagttggcaatttcttaataaattgtactgcatttgtatgcacttctatgcatttatgtgaaccacaaactattataaatatatgtctggtactgtcgggtggcaaaaccaata

SEQ ID NO: 62186 - DNA, 480 bp, Zea mays
  unsure (1)..(480): unsure at all n locations
tggtctcntttgtgngtagaccttgtgaatatgatactgatgcatgtcaccatggtaggagtaatacatacacttttaggcataaagataaaaacattatattgctacctctgactcttactgaaattgtacaagctgataaagatagagatgcaagtacccataaagaaccaactaatgaaacaaaaattcagcaacaaattaaattgaaagctcctgtcatgattgctactaaatctgatcttcttgaacctcatgctactgatgcttgttgctatgccttggtttgaaagatgctttcttttctattgatgatattgctagcactttgcctgcatctgtgactaaccttttgcagcagntccgagatgttttccctctgagtacctctngacttctcccttctaggatgagcacagatgattgattctacagcagctgccaacggagctgacattatattcaataagctattggaaa

SEQ ID NO: 62187 - DNA, 524 bp, Zea mays
  unsure (1)..(524): unsure at all n locations
ttagcgacctataaaactcagcttgtaggtgctaaccttacaaaagcataacagcttctctataacatggtgtgtcatggtaatgtgtttctagaccatgtcaagggttgtgtaccctcgggtagctggaccgcagctatgtagttcgtagccgtcggtcgtcttctccggcgaggtaaatcctcggctgcaggcttagtgaagacagggagataggagattagagctaatatctttcttgacctccaaagtgcatatatatatatagcccatggccccaactaatcaaccctatactttagaatctaagctaacactaatccttatctttcctaacttctctccttgcggntacctgacctatccaaccaggccggctgcttccaacgtgttggtgcgctcggcctctgcctgtgccgcacgcttcagccgccaccgtacatncctagccctacggatcctggcatacttgagtcccacatgacatctctnctcctctcgagagacagctcatatgcgagcta

SEQ ID NO: 62188 - DNA, 336 bp, Zea mays
catggcttctctggaagcgatccatgggctattgcgaagctggagttcaacaaaaagggggtggccactatggacaagcctgagcagggatggcgggcggcggtgctcgctttacacgactaactccggtgatctttggctcgggcggtgctcggtgtgagcggtgccaacagctaaggactcttggatgcatttatatgcgagggcaccacacaggtgcgtggggcggtgcgaccatgcgcggagcgcgcgctgccgcggccagtccgcgctctgacggtcaggcaagcgatcgaacacgtgactttttgcttctgcacgagttcaagcgcccat

SEQ ID NO: 62189 - DNA, 428 bp, Zea mays
  unsure (1)..(428): unsure at all n locations
taatgatgaattgactagtcttaatgctcaacttaagactagcatgaatgatttctataaactaaaanttgcaagggatgcctacacaattggtagacacccctcaattaaggatggacttggcttcaagagagaagccaagaacttaacaagccataaggctcccattcccgccaaggagaaagggaaggcccctatggctagtagtgtgcaaaagaaccatgcgtttatgtaccatgataagagacaaactagaaatgcttataggagttacaatgcttatgatgattntgattctcatcacatgnttgcttctagttcttcctatatgcatggtagaaatatgtctaggaagaatgctattcatcatatgcctagaaagaatgtcattcatgctcctaggaaagtagtgagtgaaccttctacaa

SEQ ID NO: 62190 - DNA, 463 bp, Zea mays
  unsure (1)..(463): unsure at all n locations
ctcagctgctttatgatgagatatggttggcttttagtgcttcttatcagattttcacaagcctgngtatgggttacatgtatgcaaatgagaaagctcaagtcaatatgccaaaggaactaatatccactgacccttccctcgttttgtcaatcattatagtctttagtacttatttcagaactcatattaatattccatttattgcangtgaggacagtgaaggtcaccaatgtctctcttagtgcaactgtgcaagacattaaggagttcttttcccttttaggagatattaatcatgtggagatgcaaaggttcgtanaacctgtccaactaggctgccccttctgttttcatgtccatactaattaaatntgtaccgcaggttagctagatctctacatcagtgcttgatttgatttgttaacttcccatcgtanaagtgctcagatctctacgtcag

SEQ ID NO: 62191 - DNA, 484 bp, Zea mays
  unsure (1)..(484): unsure at all n locations
actcagcttctaagggggaacacgttntaggattaacaaatgttcattttgtgaaagacatgatttgtaccgcatgccacgcgggaaagcaagttggcactcatcatccgcataaaaacataatgacgaccgacaggccactggagctcctacacatggatctattcggcccgatcgcttacataagcatcggcgggagtaagtactgtctagttattgtggatgattattctcgcttcacttgggtattctttttacaggaaaaatctcaaacccaagagacattaaagggattcttgagacgggctcaaaatgagttcggattaaggatcaagaaaataagaaacgacaacgggacggagttcaagaactctcantatgaaagctctcttgaggaagagggcatcaagcatgagttctctttctcctacactcccacaacaaatggtgttgtggagaggaagaatcgaactctattggacat

SEQ ID NO: 62192 - DNA, 57 bp, Zea mays
ctcagctgagtagctatacagatatacctctgcatgaaatccagtccgcaggagtat

SEQ ID NO: 62193 - DNA, 398 bp, Zea mays
  unsure (1)..(398): unsure at all n locations
agaagcataagtctttgaagtcctggctgtcttattgcttgccgttgttaactgcgagctcggacgggactccgaatcggcaaacaatgttttgccagaagaatttctggacagtcttcgatgttatcgtggatactgctctcgcctcgatccacttggtaaaatactcgacggcgacgaatgtgaacttgaggttcccttgggccgtgggtagcggcccgacaatgtccaggccccagcgctgaatgggccacgtgtgggcgattatctntgtgaactgcgaagggtttctcgagcgtggagaaaatttctgacaggcttcgcacgacctcgtcacccgattcgcggcgcanatcatagcagaccagtaagagccttaacgaatcactttggcagct

SEQ ID NO: 62194 - DNA, 461 bp, Zea mays
  unsure (1)..(461): unsure at all n locations
ggctactctgctagctatctagcagctcatgatgccatgcttgtttgtataactgaatagtcatcaaactattntaagtaactggtatgttggtctttgcacttagtgttgtattgtgcactttaattgtacaataagcactatgcaagcttcttgccctttatttatttggtgatattgggataggatattcgactggaaatggactttcagtgacatgattatgagagtgctcagaactaaataatctggctccatttccgagcaggatgctacctatcagtcatggccagttgacgctcatggaggggtgctccangacgagctggtagaagctnttctacatatatatgaatgcagctacattagaaataattgtaatgcaaattatctttacctataggcacttgngtatttatttctacataaacattgtctgaatttgcatatttctacttcag

SEQ ID NO: 62195 - DNA, 456 bp, Zea mays
  unsure (1)..(456): unsure at all n locations
tcagcttgtcagcagcagaattgggtgatatcccaagcctagcccgaagcatcggaaatagaattatgacccagatttgggtaaatggcgggcganaaatggctggtgacaaagctcgaagccaccttaagccggtgagaaagttatatttgttacttttaccttctccttgaaatttgcacctttcttattctgctttttaatgtgtgaaggatgacgaagctgaagtatgacgggctgaagcttaatagttgctataatagactttcctgcaaaaaattctggagaaatctttgtaatataattatggaaaaaacttatgtaaatttgtacataccttgtaatatatcttgtctcttttatccgtgtacaatctgctntgctgtgaacaaaactacacctttgagccgaanggcgaaaacaccttcccttcttttcgtacacaacgaagcatga

SEQ ID NO: 62196 - DNA, 460 bp, Zea mays
  unsure (1)..(460): unsure at all n locations
tattctccggcgggtctgctatgcggagtagagttccctctgcatccgctatgaacgagatggntcctaagcagaacatggtcacggggtgaagggtgatcttgcacttggaggtgatggccattgagctagcttggatcaacgacacaccacctacctggcgtgccacctgtcattgtttagagtccgaccgcacacccacggttaccccttgcggtgcttttgggtaggacggtgttgttgattataactcaatggtcgtgttggacgcacgagagagggacatgcgattttctacaggttcgggccgcttagagaggcgtaataccctacttcccggngtggatctatatgtggtgggttacaagcaagatctcttgaatggagaaaagctaatgagatatgtagatggtcgatgcacatgatggcgtaccccctgngccttatatacaccgacagt

SEQ ID NO: 62197 - DNA, 423 bp, Zea mays
  unsure (1)..(423): unsure at all n locations
ngagacgggaacaaccgcggcatgcactacatgcctcgaagaatattgttaggatttgaggattgcccagaggaagaaactaaagaagaaattcaacacctccttcaatagcctcaaccacgcctccacaaaaggtaacatccaaggtaatgatcaagccacacttcacattaagaggtgtagtgaatgctttgaagaggggcacttgattaggtcatgtccctacattaaaaatggcttgattattaacaaggatgatagactttgttttaaatactctcaaaagggacacttgcttagatcttgtccccatttaaaacaaanaggcataaggttagaaaagaaagttttactaaccatgtagcaaacaacaagcatggaaagaagaaagcttcaatatttgnaaacgcctatgctacacat

SEQ ID NO: 62198 - DNA, 370 bp, Zea mays
  unsure (1)..(370): unsure at all n locations
ggctacaggccttcttctttttcttcacagcaggaactttactataacactaccccacttaaaatgaatgagggtagatctcttgaatcttggggatttgaactcctttgagtaccacataacaaaggtgttacgggtccttctgctgctgttgctgcttgagcangctgcggagggatgactagcacagggttgattctgggagaaccttcttcttatcttatcttcactatcttcttttctcttctcacttttcacttttcactgcctctttctttctctttgctcttcccactggaggattctatcgatgagtattaccatcatacagaggaggaaaccaaagactatgaaccatgtacaacagtct

SEQ ID NO: 62199 - DNA, 445 bp, Zea mays
  unsure (1)..(445): unsure at all n locations
cgtgggttagctgccatgggtcgttcatgcctangatggtggtaagtatttaaacctctcttgtccataccaagtagtaaatgctgttttactgtgttgattagagaactttgttgacaggtgattcctccaggaatggatttcagcaatgttgtggttcatgaagacattgatggggatggtgacagcaaagatgatatcgttggtttggagggtgcttcaccgaagtcaatgcccccaatttgggccgaggttggtggttgatcccaggttcttctgcataccgacaataactgccttcacatatcgtaagtcttaaggtcactgcatgataacttcgtcacaggtgatgcggntcctaaccaatcctcacaagccgatgatcctggcgctgtcgaggccgacccgaaaagaacatcactaccctcgtcanagcctttggaga

SEQ ID NO: 62200 - DNA, 396 bp, Zea mays
  unsure (1)..(396): unsure at all n locations
ntcatctntcttcttcacaaacaagggtggacatcctcaaggctaagtacttgggcgaataaaacctttgtccaacaattcttgcaattgtttcttcaattctgccaactcagcgggtggcatccggtaaggcctcttggaaacaggtgtcgttcccggttgcaactcgatggcaaattcaatgtcccggtctgggggcattcctggtaattcatcangaaaaacatctgcatactcacagaccactggaatcttcttcacaggtgactccatcatagcaaaagcacatgatcgagtagaatcttggcggggtagatacaacacaaggtctccggatgtatgagaacagatctccagagctcttgtagctacatccaacactactcgatgttgagt

SEQ ID NO: 62201 - DNA, 348 bp, Zea mays
tgactgtgatcctgctccaacaccttatgaccccagcgtgctattaagaaagaatcagagaataacaagggatcaattgacatactcccagatcattggctcgctcatgtaccttgccagtgcaacaagaccagacatctcttatgctgcgagtaagttaagtcggtttgtgtcgaaaccaggagatgatcactggcgtgctcttgagagagtgttgcggtatttgaaaggtactatgacatacggtattcattataccggaaacccaaaagtgctggaaggctattgtgatgccaactggatttctgatgctgatgagctatatgccacaagcggatatgtgtttct

SEQ ID NO: 62202 - DNA, 336 bp, Zea mays
accctggagtgcataaagagaaacacatactgtatctcaactggactaagggccataagaatgagcgccaccattggtttatggagtatcgtcaagcaccactgcatatggcgagcaaccttattcgaccttttgttgccttatacaaatgacaggatatgattttacatttccgcacacagtaccataggtgaggtggcagccagccaccacatgaggacaattgatggcacatccatccatccccgagcccaataagcatcagcagcagctaacactccagaggtcattaacttttgagagaaacggaacattgacctctgaataaaccaaact

SEQ ID NO: 62203 - DNA, 411 bp, Zea mays
  unsure (1)..(411): unsure at all n locations
tcaggaaaccgacactcttcnatagagggcagattatctttgcccaagcgctatcgcgaatacatcctaaggctccttcgtcaattccaccaaagagcatagctcctggctggtagccacaggatatcccatattcctgtagctccttgttctcagcctcggacaagtcttgacccaccagcatcagcaatctttntcctttatcccatattcctgtagtccctttcttctgcagcagcatcagcaatctttttccctttgtcaagcactgcggccatgaccttctccgctgccgcagctgcctctttcacagccatatccggaagaatnttatcaatccctgacagcgtactttcaagattggtagcttcggcagaggtatcaacttcngcagtggcctcggcacttgca

SEQ ID NO: 62204 - DNA, 253 bp, Zea mays
aagaaacctggcagtgcacagaacatggagactatacacaaaggagacacctagacttgagcgtgattgacctcgaccgcggacaattagggcctcaataaatctactggaaccatacataacgcaagctaggggcaaacaggaagcatcacgatgaaccctgcaccagccgaaaggaccaccaaggtcgctcccagccctaacgaaaattcgtcgcagctgctctaaacaccgtatgcgccacacatcagac

SEQ ID NO: 62205 - DNA, 370 bp, Zea mays
  unsure (1)..(370): unsure at all n locations
cttactgagcacctggtgttatgggtggtgctttcggttaccagaagaattctagtcgggtaattctggatttaaaaatcttgggtgttgagaatcgatacccgaaattacaacgcggtttgtaatacccgaaaattccggacccggaatctcaggttcgggttcgggtattaccgaactacccgaattattgtgtcggctttataaaaacacatacaccctattaaattagtataacaatatagcntgaataatgatatacatggatatataaaacacaagctatctacaatcacaagttatgaacacttacacataattatagatgtacacattaataattaagcatgacatgagtacatgacacatg

SEQ ID NO: 62206 - DNA, 410 bp, Zea mays
  unsure (1)..(410): unsure at all n locations
taattaccttgccggttatgcatccggaggctcatgctggattattgatagcggatgcacaaaccgcatgacggcggagaagaaaatgttcacctcctacgtcaagaacagggacttccaagacaccatcatctttggagatgggagtcaagggaaggttaaaggcttatgcaagatagccatcacaaccgagcattcaatctctaatgtgtntttagtagaatcgctcgggtacaacttgttgtctgtaagccaattatgtcacatgggctataattgtttatttacaaatattgatgtatctgtccttacaaggagtgatggttcattagcctttaagggtgtatagacgacaagctctatttaattgatatctcacaagagaatgtcgatctatatgcatgcttaat

SEQ ID NO: 62207 - DNA, 278 bp, Zea mays
  unsure (1)..(278): unsure at all n locations
gcgaggcgcatctatgcaaggagtgggatttggattgcttctcttccgactccgacaatgaaggactcgccgcctctgccttcaacaagtcatccctcttcctcaacgagcgtcacacatgccttatggcaagggagaagaaggatgtactcgaaactctacttacgcttcttcaagtaaggacgaatctagtgatgaggatgaaatagattattcatgtttatntacaggcctacatagaacccaggtagatataatttatgaattgattgatgcct

SEQ ID NO: 62208 - DNA, 400 bp, Zea mays
  unsure (1)..(400): unsure at all n locations
tcagaggacgaggccttcatgtntcanaatatagttggagaataattgtcaaaaaccgaaatagaagagcttaaagagtatgccaaatcttgcggatataaaccaggagcactcctcttcggaggtattgatgatgaaaaattagactgtatccgggatcaaactggagctaagggtatcggtactctgtcaaagagtatcggctttccgaagctagaaacggacattagccgctaccgacgacaacatatcngtggtagtttattttattccaatttcaaggtgaactactnttcccttgacttttattgtttttaataatgaagacatgtctaacgaaggttgttttcatgcagagtatgtntgtgagcanagctttgaaaatgcaacaagatctgga

SEQ ID NO: 62209 - DNA, 439 bp, Zea mays
  unsure (1)..(439): unsure at all n locations
actcagcttctaagggagaacacgtgataggtttgtctaacgttcaattctaataagatagaccttgtgcagcttgtcaagcaggtaaacaagtgggaggagcacatcacagcaagaatgtgatgaccacttcaagacctctggagctgctgcatatggacctcttcggacctgtcgcctatctgagcttangaggaagtaagtatggtctagttattgttgatgacttttcccgcttcacttgggtattctttttgcaggataagtctgaaacccaagggaccctcaagcgcttcctcaggagagctcanaatgagtttgagctcaaagtgaagaagataaggagcgacaacgggaccgaattcaaaaccttcagtagaggagtccttgaaaggaagggataagcacgagttctcgctccctaacaccacagcaaaat

SEQ ID NO: 62210 - DNA, 345 bp, Zea mays
gatgcgagtgctcctggccgaagagaggagtaccaagtttgcgcaacactcttgactgccatgacgaaagatttcgccatgactgaagtattgccaccatatgaagatatggttgcttcgtagctcatcagaaactgtttcggatctgagtgttcgtcatacatgggaagctggggtggcttgtagactggggccaaggtgtaacctgcagttctgctgacagaggtgaggcatcatcaaaagcaaaaacttcatgatggaaatcttcataccactcatcctcgctgtagaagccttcttggtgaagctttctatgatggggcctctgctcatgctcatcttgag

SEQ ID NO: 62211 - DNA, 473 bp, Zea mays
  unsure (1)..(473): unsure at all n locations
nnggtaagccganntggtaagttattttggtgccttactgattttcctttaatgtcttantgagagcncattaagggttctagctaaatcattaaagtgagatttattattctccctttttctcttttatttcttttatgctcttaaggtgggtttgaactacaagacaacttaataaatttccaaaaattctgcaaaaattacagcggcttcttactggtgtataattctctgtctcaaaatttggggtttaaaaagtgaatagttctttctatataaaattatcaattattacggcagagggcggtgtttgaactacaactcctttaaaacatatatttgctggcatttagatgttataacatgactntgtacaaatntctagccactaatacttatttagtattttgctatgactttctacagctctagtcacagggggctttctactacactatacttgaaaatatcaa

SEQ ID NO: 62212 - DNA, 380 bp, Zea mays
  unsure (1)..(380): unsure at all n locations
attgctaactgtcctgataatgaaagtgaccagtataagggttacaagagggaaaagaagaagcattataagaaggcacagggtgaggcacatctatgcaaggagtgggactcggattgctcctcgtccaactccgacaatgaaggactcgccgccaccgccttcaacaaatcaaccctcttccccaacgagcgtcacacatgccttatggcaagggagaagaaggtatgtactcgcaactctacctatgcttcttcaagtgaggacgaatctagtgatgaggatgaagtagattattcatgtttgttcaagggcttagatagatctaagatagacaaaattaatgaattaattgatgccttgaatganaagaatatact

SEQ ID NO: 62213 - DNA, 315 bp, Zea mays
  unsure (1)..(315): unsure at all n locations
ctcaagcttgtggaggaccagatcaccaaagcttataagtggctgcatgagttgtggtcttccaagntcccgtgatgaagcaccagaagaacaatctatgaagaaatccatgtgggagttcgcaagagaaagggttgtgtgttggcatctatgctccttcaataagcaagctgccaagcgaaagctataagcctgaagatgatctttgagtagccagaatcagttgtttcaatcagcaaccagatgttcctcanaggccagactttgttgaagattcatctcctcgaagagttgcatagtgaagatatgtatctg

SEQ ID NO: 62214 - DNA, 430 bp, Zea mays
  unsure (1)..(430): unsure at all n locations
atatcgcatgtcatattctatgcatgtctaatctacttggtctcttgtatggtggactgtttgttatctaattagaatggatggatgtatgtatgtttgcactcgcatagagaacggtccggttgaagagcccgaagaactcgcatgagaagcccctgagcagcagttgttgggtctatgcttcgtcgccgaatgtcttatagaaagaagtggtcctcggctgaagctgttagcataagatagccgaatggtcctcttcgtgaagcttcgtcattacaaaccgacttaaacatagaatgaccttntagtccatataggtctgagtcaatgttgaaagctcttgtaaggagcatacttgtaattcttcacaggctgcgtcctgtgtctataaatagtgaacaatatttcattactgttcacgcattctgat

SEQ ID NO: 62215 - DNA, 352 bp, Zea mays
  unsure (1)..(352): unsure at all n locations
tctcttccacgtcacaaagcttcgaacaagagaagcataagctctatgcataatntgaggccgagatccagaaaaattcagatttgaaaaaatcattgactggccttcaaaacaaatgtctggagttcagtaatcgatgtattcaacgactgaagcaggtcttctattcggttggagccagcagcgagaaaattaatccttcgactgaagacctgccagaggccttcgaaaatatcgaaggtgaaattgatgaccttgataaagttatagctggacatggtgacttttgtgccctggtagcttctcggggcacagctgtcgccttcctgaaatctggttgcgaacatggaaa

SEQ ID NO: 62216 - DNA, 486 bp, Zea mays
  unsure (1)..(486): unsure at all n locations
cgtgaagaatactgcggcctgtgcagntgacttcctctgtcatcactctgagtggaantgggaatggacctgacatgcctcgggtggattcttcctccgaagcccctggtcatctcagagaacctgtaagcttcctcccttctttggcggaagtcattgtcagccttgatgtattcatccatcttttgaagcagcttctctagagtctgtggaggctntctagtgaagtactaagcagtaggtcctagacgaagccccttaatcatggcctcaatgacaatttcattgggcactataggcgcttgtgctctcagacgcaagaaccttcggacatatgctngaagatactccacatggtcttgtgtgcactgaaacaaggactgagctgtgactggcttcgtctgaaagccttagaaacttgtaactagcatatncttngagttctgccatgaagtaatagtccctggccgaagagaagataccatg

SEQ ID NO: 62217 - DNA, 453 bp, Zea mays
  unsure (1)..(453): unsure at all n locations
tctncagaaaatggacgaatacattcgggtcgacaatgactttcgccaaagaagggaggaggctttcagattttctgaaatgaaccagggcttcggagggaggttttacccgaggcatgtgagatcaattcacaattctacgcaaaatgatgacagaggaagccaacagcaaaggccacaatgctcctcgcaggcttctggacaacagcaaagctccttccggccaccagctccaagaggcagaggcgccaggggcttctgaggaagatttggcgatcaaccaagaagaatcttttgcttattctgcggtgagaacaaaggccatactaccaggatgtgccatgttactatacagaagcanaaggaaatagctgaagcagcagcacaacaagcccagccgaagcaggtcatgcatacagcttcgtatcattcgccctacattccagaatatgt

SEQ ID NO: 62218 - DNA, 420 bp, Zea mays
  unsure (1)..(420): unsure at all n locations
ctcagcttnccagctgacctcccttttggagcggccatcatgctcggggaggctgctgacgcggccacggccctgagcccgcctgacttgttgtcggcgccagcatcgaccccctccgggtccgtcgctgattcgcctgcggagccgcccgttgctgctgacgtcgggatggttgaggtgacgctgcccgtggtcatccccgacctccccgttctcggccacgaggagagggcgaccgtcgttgccgaggctggtgatcggaggcccgccaccttagccgaggagaggcccagtacgtcgacggcggtggtacccaatgcatcagctgcaaggggacccgacgcctcggtggacgggcgtgccgaaccgtggcctgtccagtggagcaagcggcttattcctgcacagctcaatccaatg

SEQ ID NO: 62219 - DNA, 241 bp, Zea mays
  unsure (1)..(241): unsure at all n locations
actccgtaacttatgcttcgccaacaactccgaacaacctctctcttctttgggggagaaatgagcatcaggaaaaggactttatccttgggggagagagtaaaagctcaaaagcaaaaggaccggacctcgtctttggtataatcttaactcatttacttatgaccaaaggggaggaacttacttcgagggctctaatgattccgtttntggcgattcatgccaaaaagggggagaaatg

SEQ ID NO: 62220 - DNA, 349 bp, Zea mays
  unsure (1)..(349): unsure at all n locations
ctaagcttctcgactagtcgggacanggcctcatggacggacgaaagtacgtgttatccgcaaagccgaacgagccgagggactcccacgcctctatgataccgatacctcactcatcaccttccgcgagaagcaactctcgcccacacaaacatccctgttaccaacggaaagtccagatgctcgaaacaagaggaaaaaagacgcagcttcacaagcgcagcgagggtgtgttttctggcctcggcggccgcagaaagcacacgctacaagacaatctgatcctgcaggctcggatcttcacgctgaagggggccgtagcaccctcggcatcgacgacgtcttcagc

SEQ ID NO: 62221 - DNA, 427 bp, Zea mays
  unsure (1)..(427): unsure at all n locations
ttacaacantggatatatgttcttaataataaattgtagagtatctgatatgcaaatnggtaccattatgaaggcctgaaatgctatatttttgaaactaaatttcctacggataatgcacataacacgtcttctcatgagcatgtaataccccatgatcattctattccgatagaacatattgaggaatcccatacacaaaatcctatggaggatgactatgtagtagctcacaacagtaagagactgttgagttcatgatccaaattttggaaaagaggccgagttggcgagcggagcggaggcccatcgccggaggctagttgcataaggtcttagtcaaataccacgaattgattatgatgaatgtttctcttcagctgtaaagcatagttctgcgaaatcttgagcttgaacaattagatgt

SEQ ID NO: 62222 - DNA, 476 bp, Zea mays
  unsure (1)..(476): unsure at all n locations
ctaagcttgtcaagcatatttgatacccatcgcttgatgggtccatcaatgttagtcaacaaagatctaggaacccaaaagtcctttgtgttagcacttggtaaactcattacctttctagcataagttgcaatttttggttgcctagttatatgtgaaataattgacaagctagaagtggggttgttaccaatgggacaatccttgcattgatgtcccttctttcggcatatgtagcaaaggcgatcttcaagttttgaagatttcttctttccttgtttcttgcttgctacatggntagttaatattttcttttctaacactatgcctttntgtttatatagggacaagacttaattaaatgtcccttttttgagcatttataacaaagtttatcatcctttgtagtaatcaagtcatttttgatatatggacatgacctaaatcagtgttccttttcaaagcattcactacac

SEQ ID NO: 62223 - DNA, 404 bp, Zea mays
  unsure (1)..(404): unsure at all n locations
ctaagcttcacaacttcacaagacaatccatcgcgggcgatgtctctagcgttagctatggatagcanctggcgcaaactaagcgcgagaatgatctctgagataatagcacgcaaaggtgctgttgtctgctcgacaatgtaactggacttgcaagcagagaattcatggctctgaagtcagatgaaaggacacgcttaactgcactcgcaagcatacgttctgaaatgtcttcaggagctttctctgctangaatggccgaatgggcttaccacgaacgcgtggaagttggcgtagacccgtacaggcaaactctatgcccagatagagaaacacgccagtaggccacagagattcttgtgggacagacagtgactcacccatccncactagcaatgggcca

SEQ ID NO: 62224 - DNA, 362 bp, Zea mays
ataaaaagttgttctcttcatcaccttcgtacactaaggaccctcgaggatatttcagttccttagcataatgttaggcctcggcaatttgcctctgtgtcagttgctttcccaaagcgtgacggataatgaattcaagatcttcggtcgacgctgtttcgggtatcggtaatgataacttctctggcagactttcgtttatttgctctgttggcctagtttccgaaggtctggccttagtgcaatcaggagtagcacttgcagtgacagcttcttccaattcttcaattgtgtctttggaaaccctagaaggagcagaagtagccatcttcgaaggtctcagaacagcatctagaaacgct

SEQ ID NO: 62225 - DNA, 385 bp, Zea mays
  unsure (1)..(385): unsure at all n locations
actcagcttcacactatnttcaatgccacaacatcattgcttgtacatttatctcagccacttaaggatatcataagaaacagagtggcttcgggctgaattggaaaatgggcagtagagcccaatgagtttgtcatcgattttgttcacagatcatctatctaatcccaagcactagcagacttcattgcttatttgtaacaccgcgaatctatgggtataaaatttcttttctaatacctaccaaattcaggggttacctcttttcttctttctatagatttctttctcttccaattaacagaggttttattatttatttggagatgtattaatactctaggaggttaaaacctaaagggatgtgaagtgttgcatcatgctg

SEQ ID NO: 62226 - DNA, 351 bp, Zea mays
aactaagcttagatgctggtcaagtctagcaatctatgtatttattttatagccgcgaaaagaagcataggtattatgttatactcctaagtatgggctttgataccccaagggatctacctttgatttaatcgggtattctgatgccaactatgccggatgtaaaaatgattgaaagagcacatcatggactctgtagtttctgggaagatccttggcgtcttgagcttcatagaaacaaaactctgttactctctccaccgcctaagccgagtacattggcgcagaacattgttgtgcgcaattactttgtaagaggcaacccttacggactattgcaacaaattgagc

SEQ ID NO: 62227 - DNA, 365 bp, Zea mays
  unsure (1)..(365): unsure at all n locations
nggccttgttccgacatgttagataatttatttaaattgtgacaatgggtntntggttactacatttcttaccatgttntaactctaatttgtgaactatctgtgattatagggaatcaatctacctttgttgcactgatggcttgtctcgaagaggaggatgaagacatggtgacattatttatttatgagccattcaatttgattnttctccattgctaattgattgattcaacacttgaactaaaatgtaatgtgttctctttatttctaggatgaagttggaccaaccgatgtgaattaagatgtgagcgtgagtagtttcctgcgaccgagctcctcttgtgtctattgttgtactctca

SEQ ID NO: 62228 - DNA, 488 bp, Zea mays
  unsure (1)..(488): unsure at all n locations
ctatgttctcaacattgtttaagcctgctgataacaggggctgttacttaagatggagggagcacgctttccatatatgttgatgatgtaatcctctttataaagtctgtgtggtattttttgttaagtctgtcgagaattgtgtacgaacgattgctctggtatatcctatggactggtaactaatatgtataagctttctctcattctaataacgtgtaatgagcaggctctgcangaggactataatgttctgcaatgtaatttgacctcttttccatgcacttatctaggatatncgattcagacaagaagttaacaacgaatgaactcatggtttgcgttgagaagattgttgatcgactttctaattggaaggctcgagtacttaaccaatggtaagacgactatggcgccgtntgtgcttggccatgctgatttatctcctcattgccatggatnatcctaanggatgttcagttatgagt

SEQ ID NO: 62229 - DNA, 395 bp, Zea mays
  unsure (1)..(395): unsure at all n locations
gtgacaatgcactgaagcanatncgtagcaagctcaaattgtatgggagacagggggtcaccttgtgaccttgtctgactccacgacaacagtggaaatgactgccaggaaccccgctcaaaaggagtgacgatgaaccagtagcaagaatcctctcaatccatacaatgcaagtttcagaataccgcaggctcttcatcattagcaagattctaatgtgctcaattgaagcggnggatgtaactggataattgtgttaattttttcatccatcagcatacaatcatacttgttgcatgtgattggacaattgtattgttaaagctatttaaggtacccaagctaattttgaaccacacattacgaacttctgtttaactcctgtttatcttacc

SEQ ID NO: 62230 - DNA, 416 bp, Zea mays
  unsure (1)..(416): unsure at all n locations
agagaagagtacaacatgtaggggtacaatgacccttcatcaaatcaagatggtctcacattccgattaccttctctcaagaggatcttcagctcaaggattacccacacaatgaagctatggttatctcttgtgtgatcaaaggatttctggtccacaatgttttggttgatataagaagtgcggcggatattatatttgctaaggccttcagatagatgcaagagcccgaagacaagatccatgatgccacacatcccctttgtggcttctgaggaaggctgattgtagcacttggcaagatcacaatgccagtaaccttcggatttatcaacaacacaangactgaacaagtatgtgttgatatttgtgacatggaatacccttacaatgcaatcattggtcgtggtactctc

SEQ ID NO: 62231 - DNA, 383 bp, Zea mays
  unsure (1)..(383): unsure at all n locations
tccagctttgaagatagtaagtatcctaatcacgtatataagctctctaaggcgctttattggctcaagcaagccccaagagcatggtatgaatgcctaagagattttcttatcactaatggcttcaaagtcggaaaggccgatcctactctattcactaaaactcttgacaatgatttgtttgtatgccaaatatatgttgatgatattatattngggtctactaacgaatctacatgtgaggaatttagtaggatcatgacacanaaattcgagacgtcgatgatgggggagttgaagtacttcttgggatttcaagtgaagcaactcanagagggcaccttcattagccaaacgaagtacattcaagacattctatacaa

SEQ ID NO: 62232 - DNA, 410 bp, Zea mays
  unsure (1)..(410): unsure at all n locations
gaaactcaagcttgaacgggttgagccgagctggctaatatctatcgctatctttatatattattatgttcaacccacacttaactgtacatatgagctttggccctgcaccttggagggctggccactcatgccatttattcagacccatttctaactgtttaaatacccatcatcatcttcacgatggctaacgccaagctataagctaatcactctctctaatactctcatttagcgttatgtaatcaaggtcaaggtactaataacttgttagtatagaaaactatttttctctcaattccaacacgtgcaagaacgttttgtggagaccatntagtgacaccataatagtcacagagatattaacgccaacgctaatgcttacgctcacattatagagtaccaca

SEQ ID NO: 62233 - DNA, 445 bp, Zea mays
  unsure (1)..(445): unsure at all n locations
tccgttgtagttagcactacaagtgtatcagttcgcattgaacagaaaacaagaagcatggtataatgtacctaccagactacgaactacgagatgaactgtttccatttccttctggaaatgttacaactacggtctacttgggaatggagtaagaaggaaatcagagagagcacaggtaggagaagaacagatgtgatttctagagaataattgtttgttcagttgttcgatgtaccaggatcttgacggcgcgcgtacttattcagcgccacagcccaacacagacacacgcaacctttacacgctattctgggccaagacgaagcggactgtgggcctttggatgcgttacatttgctcggcctcttgcacactggtatttngcacaacagaaactatcgccggactctgaaagtatcttcatcagctacttgctcgtctt

SEQ ID NO: 62234 - DNA, 418 bp, Zea mays
  unsure (1)..(418): unsure at all n locations
tatatatgcgagggggctctattattcacttgagacatataattggctatggagcctgccacacgcgcgctcgctcgctcgcgtntcatgacttgtgaattacgacgatgcgtgatcgtgtcgtgacgtgttctaaaaggcagtttaaatattgccttttgttttttttgtttatcaaatatcacctatactgctacgtcaaccaacattaatggcatgtacgttacgtgctagatctccaggcggttgcacgtagagatattccangcgacgggcctgtaatttagcagatcgaatcaaggtgttgcggcggcccatctataaagggcagacgtctttcagtcggaggacacaggcgaatagcaaccaactcgtcctcttcgtctcaattctctgcgtcgtcgcttctatgccctac

SEQ ID NO: 62235 - DNA, 371 bp, Zea mays
  unsure (1)..(371): unsure at all n locations
gcttaatcccctaaaatgtgtcttctgagtaccatctacgaaagttgctctggtttattgtcagccaccggggaatttgaaccaatacagagaaaatcgaggctatcatgaggatggaagcaccacgatcacagaagaaagtacaaagacttaccagatgtatggcagctctgagcagaatcatatcaaggctgggctgaaaaggcttaccattctataagttgctcaagaaggtagacaaataccagtggacttcagaagcacaagaagctctagatgcgctgaaanaattcttgacaacaccaccagtgctaataccgccgcgccgtgccacgccgactcaaccagctgaagatctgctattgacatct

SEQ ID NO: 62236 - DNA, 415 bp, Zea mays
  unsure (1)..(415): unsure at all n locations
atgtgttgaagataaagttattttaacaagaagattgtcatgatcaaatntaatttgagtatagtcttccttgatctttactagtctattttgcaactccctaatagcttcatttaatttgtcatatttttccttagcatcttttaaggagtttgtgagctcatttacagttgatgacatagttttattttcttcttttatttcatcactatcctttataactatgtcatacttggcatttaaagattcattntcatttttcaacctatcacatttagcttttgactttctaatgatttgagtatattctttaagtaagtcagctaactcatcatatgaaggtgaagcaaattcttcatcactatcactatcactatcatcagcaatattaatatcattntgtacctttcgttca

SEQ ID NO: 62237 - DNA, 311 bp, Zea mays
  unsure (1)..(311): unsure at all n locations
tgcctcacgataacgagggttacattntataccctgccggttatcccgagcacaacattaagagaattcactctaggaagtctcactctggctctcgtcatgcttttatgtataagagtgaggcatcttgttctaggcaattcactcaagctaaattgcctaagaagaaaactcctattgcatcaaatgaacctaatatttcatttaagacttttgatgcatcttatgttntaactaacaaatcangcaaagtagttgcaaaatatgttggaggcaaacataatgggtcaaagacttgtgtttgggtaccc

SEQ ID NO: 62238 - DNA, 290 bp, Zea mays
  unsure (1)..(290): unsure at all n locations
tataccctgagaatactgtgagctgttgataatataagggcactaatgttattntacaccggctggcgtccgcgcctataaatagatgaacagtactcccgtactgttcacgctgacttagcattctctttatgcgtcacacttgtattatcactcctttaagcccaaggtgacatatggtatctaataatgttttgacaaataagataaatggaaatagattaataatatatggtacacaagatgatattaccttctgttctttgcacgaatgtgtttcatctctcatc

SEQ ID NO: 62239 - DNA, 362 bp, Zea mays
  unsure (1)..(362): unsure at all n locations
tggagcgaaaagaaggtggtcatgtgcgatcccagctatctttgaccaaggaagttctccacaggctagaaatggctcangatgttagagtgctcaaccaagctgaggtatggctcanaaaccgacttataaagcaagccttactgttatcctctttccagcgcaccatggcaaggctaagatctagaattttctggctaaaggagggagatgctaatacaaaactgtttcaccttcatgctcgacattgcaagaggaagatttttgtgtccaagctggtggatggngatcataccctaaccagccatgatgaanaggctgcctgtgtggatctcttttcaccaacctcattggaaaatgtg

SEQ ID NO: 62240 - DNA, 483 bp, Zea mays
  unsure (1)..(483): unsure at all n locations
tgtgacagagntcttttatttttaggtgtgtntccatatggataaacaaaacaagattgcgagaacaaagtggtggaaactgaaaggagatacatcaaaagtctcaagaaaagggccatcaaagaagacacttggaaggaagaagatgacataaacaacatgtggaagaagatggcaccctatatttgcgaggtgtgtggagcaactaaagggagtggatgcgaagctaaaggtacttggtagtggaagtacatggatgatttgatacttgtcaatacagtgtattagcgcaacagtgtttttcagcctctcgcaatanggtacagtgcgggggtatttataggtaaccaggggacgatttcaccctctcanatacagttatgcccctggttacctacgttatccctgaaatattcccctctcaggggttattacagtcattacaacatgattaggtatttcacggacggacacaccattaac

SEQ ID NO: 62241 - DNA, 323 bp, Zea mays
ggagttatgaagctggtctttggctcatcctctttcttcatccaaatttgatgatagcccgagtagcagtccaatatgctcataagttctaaagaaggtgctgcatctacaagggagtctattcttggtaaaggaaactcgtccttcgaacatgcctcgttaaggtctgtgaaatcaatgcacaatctccatttcccattagctttcttcaccataacggtgttagccagccactctggatatgttacttctctgataacaccgacactgagaagtctctttacttcatttcgtgcaccttcgactctatcattagatatttt

SEQ ID NO: 62242 - DNA, 391 bp, Zea mays
ttctgatgtgtggatgcgttctgcagatgtatataacttgcgtagaggaggaaggcgtgctcagcatgagcgagccgctccgcatgatgaggtgccccatcatcagcacctgccgcccccgcccccgatgtcgattgagcagatgtttctgatgcagactcatgcagttcaagctatcggtcagactttggccggcattcatcagctgcagcagcagcagcagcaagcaccaccccagcctcagatgcctcagatgcctagagataagcgtgctgaattcatgagaggtcatccaccaacgttcgctcattcttctgaccccatggatgctgaatatcggctgcgcactgtggagcgggagttgcataccgctcattgcgatgacagggag

SEQ ID NO: 62243 - DNA, 361 bp, Zea mays
ttcacccttcttgtgtccaatccgcccgtgactgatagctttttgggtcttttagtgcgaacttctgctgaagaggtccatactttggttgctacgctcggtgaaatacctgatgatgaacggcagatttattttgaagtgcccctgaaccctaatgatgcatacataaatgacatgcttgatctgctagctgaggattcatctgatgctgctcctgatggtacgttggcagtggtgacccttccatatgttgatacaaccttggatgttccgaaacctgtcattactcgcccgatgcgccctattcgaactagtcatcctaagccttctgctgatgagcagaagaagaagagaagacgcc

SEQ ID NO: 62244 - DNA, 469 bp, Zea mays
tcttaactagggttaagttttacccttctaacctctatttatgtttaagacctctaaccatggctctatttgcaaatacattaaaacaatacaacttgtttgaaatttttacctattgaatgtactctatgtgtatcaaacatatgcaatgccaatgcttatgatgccatgctcaagttttatttatagtaacaccaggggtgttacatccttccccccataaaagaatctcgtcccgagattaagatcctatggtagataatggtaaaggaaacacatcacatttttatttcctaagttttggtgcaaagcatgggtgatgtgggggttacttctttattacaacagctatacatgctgtacaatttacatgatgctacgaagcctgcgaaattcttattcaagaagtctctgagttcccaagtatcttcatcttcagaatgctggttccacagtatcttgtataact

SEQ ID NO: 62245 - DNA, 466 bp, Zea mays
gtcttactacaaaatgtcttaatatctatcttaggagttcttaaacatttctatatgaataaatgcataattcatgcaacttgatggctccgaccataaaggctttttacgtcttataaatgattcttattttaaaagcctacttgaagcacctctggttttaataaatgatgttcaggggctatcacatgtaatatattattcatgaatctgatatgaactatgcttacaaatgatgttcataaatctggttttaacgtgctgatatataaatgcgatgcccataaatctaatataatcatgcattcatatatcccactcagtctggatgtcactttaagagtactatgcttttggccccggtgctataaatacctagatgactaatcctagctaggtagaattggtgtcccttagtggaaggatggtggttatacctacatggttctattaccatcccgatcaa

SEQ ID NO: 62246 - DNA, 371 bp, Zea mays
agagtatataatgtctccatcagcacttttcatatgttcatatacactgatcttcattctataccacacagcttctcagataaagatgataggagaattatgggtttcccatctatataactagctttattgacatagtattgaaaccaaaatgcatgtgtatcccacactttggtgacaatcattactaagatccaatcctaacatatttcatcatgtacaacatatatgcacatgatattgcatactaccctgtctaacttaaactaactaataccgagactaacgctaagactgatgcttccatgtatatatctatttctgattaattacaagatccaactctaacgatctatggttctagattgatc

SEQ ID NO: 62247 - DNA, 432 bp, Zea mays
  unsure (1)..(432): unsure at all n locations
tctaaagggagaacacatgttgngactaacatatgttcattttgatgaagacagggnttgtagcgcatgtcatgcatggaagcaagttggtgttcatcatccacacaagaacatcatgacgactgatatgccactcgagctcctacacatggatcttttatgtccgattgcttacataagcatcggcgggagtaagtactgtctagttattgtggatgactattctcgcttcacttgggtgttctttttgcatgataaatctcatacccaagagaccttaaagggattcttgagacgagctcaaaacgagttcggcttattgatcaagaaaataagaagcgacaacgggatggagttcaagaactctcatattgaaggctttcttgatgatgaaggcatcaagcatgagttctcttctcctacacaccacaa

SEQ ID NO: 62248 - DNA, 431 bp, Zea mays
  unsure (1)..(431): unsure at all n locations
ctaagcttagataacgaagcctttgcgttccanaacttatttggatatcatctaacaaaagctgatattgaagagcttaatgagtatgcccaatcctgtggatacaaacctggggcactcctcttcggaggcattgatgatgagaaattagagtgtattcgagaccaaacaggggccaaagttattagtactttgtccaagagtattggattcccgaagcttgaatcagacatcagccgctaccgacgacaacatgtcgttggtagtttattttactccaacttcaaagtaaatgacttgtcccttaacttttattgcttctaataaaagcatatctgacgaaggttgtgttttgagtttgtgtaaagtatgctattgagcatagccttgcaaatgcagcaagatctcgaagataaaagcatgaagttata

SEQ ID NO: 62249 - DNA, 378 bp, Zea mays
ctctaaggcatgaaaccgttgagcaactgagacactttgaccactgctacggttttggctcaaccggacatcactaaaccttttgacgtatattgtgatgcatcgggcaatgggctcggctgtgtactgatgcaagaaggccgagtgattgcgtatgcttcaaggcagtttgcgccgcatgatgagcactatccaactcatgatctggaactagctgctgtggttcatgccctaaagaattggcgtcattatctgctgggtaatatctgtcacatatatacagatcataatagtgttgagtacatctttacccagtcagagttgaatatgatgcaaagacgatggcttgagctcattaagactatgaaatggtaatca

SEQ ID NO: 62250 - DNA, 440 bp, Zea mays
tatgagtaccaatatagcagtctattgaccttatgctgccaattatcttaatcatcaccagaatccataaaggggcaataatgcatactttcacctcttagtgcttatagataattcatgacacatattacaggcctgtctaatttctaacatgtaatctacaaatcctatgctagggttgtgagaaaagattttctgtgcagaatccataccatgaaatgcacaagttaatgcagtgatgttgctaacagtaacaggtcgtgcaactatctaagtatgatatcttgagcatatttagttgatggagcaattaaatctttttcattatatcagatcagatgaacagggaaacatgatttattgatgactcatgactagtgtccactatctcaaacaagaacagcatacaacacttctttttctgtacttcatcaacaaac

SEQ ID NO: 62251 - DNA, 463 bp, Zea mays
tgcccctatacaagtcattgattcgagcattatcaatgctgacgttgagccaccgaatgtccttgagatgattgcaaaagatcatattgatatggatgaagaaatggaccggttgatcatactcgctggcaagatagacatcacatgcaatggatagtctttaactggaacaggtaatcacgagtcaaatgataaatatactcatttgactttgtcaattatagctgctaagtgaagcagcaagttgaacctgcatattactatatgcaaaaaaggcactcctgtagaccttgtttggtgttcctgcagtcctactaatatgaacaactccatcttcttgtgaatcttaagtatatttggaaaatgtggaaaacacaaaaacctgtaccagcacaagaatgcttaaacttctcaatgatacctgaaccttggactataaacttatcgacctgaatacattcct

SEQ ID NO: 62252 - DNA, 366 bp, Zea mays
aatactaagcttagcgtctgttagcagtttccttggaagaaagatatgatctcattcctccaatcttcactatgaataggacatatattgagtactgctctttcaagaagttccaccgaatgtgctcttatcgtatctaagaatacttccgaaggtaaacgcagcccctgtgctgctgacttggctagcagatcagcgcgctcattttgtccatgaggaatattcttgatagaaaaactttcgaaagatgcttaagcctctcaacttgatccaggtatttctcaagcttctgatctctggctctataactcttatcaacatgaccagaaataacttgagaatcagctttaatgaccgaccttctta

SEQ ID NO: 62253 - DNA, 231 bp, Zea mays
  unsure (1)..(231): unsure at all n locations
tcgggaaacaatactctttgatagagtatcgataaccttcactccggtttgatctcggacgcagcctaacgtttcatcgtcaacaccaccaaagagtagtgcacctggttgatatccacaagatatggcatattcngttaattcttctttctcatacttcgtcaactcttgtgcaactaagttttggaagttgaaaatttactcttccgaagcatcttcagctattttctt

SEQ ID NO: 62254 - DNA, 472 bp, Zea mays
acgtgacactatagatttgtataccttggaagcgccgattggttgccgacttgatgtggactcctccttcttttcctccgttgccttgaatgcgtctggttgagcttcagatgtggaaggatcatcaagctcgttgatcttcctcgacccttcgatcatgcactcaaaacttacaaaattcccgataacttcctcgggggtcattttagtatatctaggattaccacgaattaattgaacttgagtggggttaagaaaaataagagatcttagaataactttaaccatttcgtggtcgtcccacttcttgctcccgaggttgcgcacttggttcaccaatgtcttgagccggttgtacatgtgttgtggctcttaccctttgcgaagccggaaccgaccgagctccccctcgatcgtttcccgcttggtgatctttgtgagctcatctccctcgtgcgcggttttgagtaca

SEQ ID NO: 62255 - DNA, 458 bp, Zea mays
gctgtcgtcgtacgtactcctcttcgtctataggcgggtgcgtctacctccttcttatatggatgtggtacgtcttggaccgacgtcttcaaaattttatttaataaggctatattacttactaacataaatttcattttgcaggtttcgcataccagttggtcgaccacgtgttttccatcctagaccctgaccatggatgatttatggaaatgaacgtcttcgaccgacgtatgcttatatttgggaccaagtggcagctccttttgcgagagctaagatggcatacatggagtatgttaacgagtttgacaccctttctgcctctaccgtatgtactcaacatgtatatcttatcgttatgaaatttgttgtattatacttaacatagaatgcttcattgttgttttatgtcacatggcaggcatacaacgcacctgagtatgctgggatgatct

SEQ ID NO: 62256 - DNA, 453 bp, Zea mays
ccgtcaagcacacccttgatgtgtgcgtcatgcttcggcgccactttcacatatgcctggccaccgtcttaatgtggcttggcccacaacatctactagaatgaggaccacatcgcatatgaatttcccgatgtacacgactgcttcatgatctacggtgggcaagtggcgagtgcctcggctcggcgccgcatgcaatatcgtctgaatgtctgctcggtaaaggtggcggcgccagtctacctatactagtccgacaagcccatcatcttctaccatggcgaccacccctaccgcgtgccgagcccggtgaaatatccgctcgttgtcgaccccgtcatcggcaacgtcatgctcaccaatgtcctcatagactgatgcagcagcctcatcatcatctacaccgagaccctctggctcctgcatatcggtctgtcctcgatccgggcatgc

SEQ ID NO: 62257 - DNA, 388 bp, Zea mays
tcggcatgacagcagataagggaaaccgacttaaagaggattatcctaattagacctcgaagaattactatagagttattgataaatgtaaagggcatgatagtcgcctagagggggggtgaatagggcgaaactgaaatttacaaatattaacacaactacaagccgggttagcattagaaatataaacgagtccgcgagagagggtaaaaaacaaattgcaagcaaatgaagagtgtgacacgcggatttgttttaccgatgttcggttcttgcaaacctactccccgttgaggatgccacatatgccgggtctctttcaacccttccctctctcaaacggtccctcggaccgagtgagcttctcttctcaaatcacttgggaatc

SEQ ID NO: 62258 - DNA, 384 bp, Zea mays
actctacagtccaacccggtggctttttggacggtcaagtcactccaacaaccatgtcctccataaaacctgtaaaattatgccacaagcaatgctgagtatactaatactcacctagacttacccggtgtgaggagtctactcctctacctctagacatgaagctgtttggcagaggcgtttggttgccaaaagcactagctgagtttctaattcaagttttaacatttgtcaatgttagtgagactctcttaatgactaaagggctctatctactcatacatagtagcaagcattattagcaatcaacatcttatatcaactcatcatatttccacttgttactcaatgcaatgacatggatcatcaatctcattactgcga

SEQ ID NO: 62259 - DNA, 311 bp, Zea mays
gattgcgctactatactaatagatagctttgccaagctgggtgtatactcatcacagcattagtttatatggggcgatcctcaacgagtcattgaatggattggcgaacacggtgaagcttttgaaaatattcttatcgaccgcatggacttttgcgccctcactggtgcccgatgggatgtaaaattctacggatagctggctgtgaacatgttaaagctgcagtctagacggaaaccgcctctccctagacaacaataaggagccttcggttgaagctccttgatgggcgataaatcctactccaatgt

SEQ ID NO: 62260 - DNA, 156 bp, Zea mays
  unsure (1)..(156): unsure at all n locations
ccttcaacggtcataatccaacggcaatggngacttggcagattctccttactgtacggtgtgcaccggactgtacggtgcgccatcgaacagacgctgccaccaacagtcacttttggtggttaaattatagcaatatatacaatacatgcaatg

SEQ ID NO: 62261 - DNA, 426 bp, Zea mays
tcggcatgacggcagaaaagaggaaccaacttattgatgatatgccaaattagacctcaaagaattattatagagttattgataaacgtaaatggcagtaatgtaattctacactggctgcgtcccgcgcctataaatatatgaacagtactcccgtactgttcacgctgacttggcattcgcttttggcatcacgcctgtacctctacttttcatcaattcgaaggtacatttgtaatttgtcatcatgaatttgataatgcaaataaaaataagttgatgataatatatgggttattggttgtatctcatacatgtattcttccttgttatctatcgaagtcacgaaggtcttttccttcgtaaccttcatccagaactcattatatccgataggacataatgtcttgacgacgaacgatttta

SEQ ID NO: 62262 - DNA, 428 bp, Zea mays
  unsure (1)..(428): unsure at all n locations
tctgttcggtgatgaatcaataacaccggatgattcaagtatgggctcaataaggaccttagcttcaatagaagatgaagataattgtaaaataacaaaggataccatagaatggattatgctccaagcagtagatcacatcaataaatatcagaccgaaataattaaatggcgagatcggaaggtaaaactgaagaacatcacgccatggcatctagtactttggagggtcgctaacccggatacagtagggaagcttcaatttaagtgggaaggtcccttcttggtgatatcttcgtcaagacctggatcatacaggttgaaggacttggacgacaatgacattccaaggtcttggaatgcatatgagcttcgaagatattatgtgtaaattatgtaattntcttattttcccctatggacccttt

SEQ ID NO: 62263 - DNA, 377 bp, Zea mays
atgctactctctacatcctaaatagccattctattttgttagaatactaatgtcatggttaaatgcactagaacatatagttaactgttaaaattaactgaagacatccaaacaatatatcttatagtttagctattagctacttttatcaaactagcttatagttaactagctaattttactaataatttttaaactaactaactattagctataatgcattcaaacaccctttaatagcctatgtggatccatgagttaaaacaaatgactaatgtgtatgcattataaaagctaagaaaatccaaacaaaatatagctgatagtgactaaaatggtaataatatcattctggacaattttagttcttactgttt

SEQ ID NO: 62264 - DNA, 348 bp, Zea mays
  unsure (1)..(348): unsure at all n locations
tctaaagggagaacacgtgatatgttngactaacgtgcatttcataaaagatagaccttgngcagactgtcaagcatgtaaacaagtgggaggagcacatcacagcatgaatgtgatgaccacttcaagacctctggagctgctgcatatggacctcttcggacccgtcgcctatctgagcatatgaagaagtaagtatggtctagatattggtgatgacttttctcgcttcacttgggtgttctttttgcaggataagtctgacacccaagggaccctcaagcgcttcctcatgagagctcaaaatgagtttgagctcaaagtgaagaagataaagagtgacaatgg

SEQ ID NO: 62265 - DNA, 468 bp, Zea mays
  unsure (1)..(468): unsure at all n locations
tgagtggcggnactctaatccacagcacacaattgtggtggtcaattgcagtggaactctaagccagggcacataataaaggctattatgttcatatgttcagtgaaatctacagtttgtcattgtgtaactggtagttttcatatgtgaagcttgccatatttcacgcaagaagtatagtttcagttagtgagacatgccttttctagcagttttttatgctccttggtcgtcgaggagcgagcaagcaacgcttcattgctggcctgaattatagtttctgtaaacacggtgcactcgaccacgtaaactcaaaaaatgggaggtagaagtctggaaaggtgctaactgaccaacctgctgaaatgcacaagtgacctgctgaagactcccgcaacagtaacctacataagaatgtagcatacattacaacaagcaactggtaatagtttgtgatgagctcatgta

SEQ ID NO: 62266 - DNA, 469 bp, Zea mays
ttctagcggccaactctgcagccgccatggattatttaatttcagcggccaaactccgctgcggtcaaaacttacaaataattttcggtggctaatggcatgtttgtttacccccaattatataatcttgattaaataatcctaagaggcaaacaaacagtccagcttatttgcccatattatataatctaaccctttggattatgataatccataagcaagtgaggaggtgcttatttcagattattgttttcccacttccccactaccctttcaagtttcctagaaattacccactaatgccattataatccaccgaatcgtttttgcgcctatccgacatccagcgaccagcatatccagcataattcctcctcgactccttctaaccctatccgccatgctccatgtgcccttgtctggttcgacctattacaaatatagaggacattcttgtcttcctcataca

SEQ ID NO: 62267 - DNA, 422 bp, Zea mays
  unsure (1)..(422): unsure at all n locations
tctactgaagcttcngctcaacaagctgaagctgaagctgtgccttcatatcccttcaaagaacatccttttgaagccgaagcagtaaaaattccggaaccaatattatttgaagaaactgacaccgtcatccccgaagcacctgccggcatgcatgattacatcatacgacatgcttcggggaaaaagctatctgaggaagaaactcatgatgccaaccattatgcaaaggagctgaaatatccgaatggggcagtaatattcaatggaacaaatgaagatgacttcttatactgcctgcctgataacaaagagctatccgtctgccgagagatggcgagaagcatatgctttccgaagcttgaagctgggttaagtgccatgacgaaagaagatctcgcagacagcctcgcgtacaacag

SEQ ID NO: 62268 - DNA, 410 bp, Zea mays
tatctgatagtgagagagatctggtgtgttcttttgagctcttgcgcttggatcgcttattattctcattctttgtggcgatctaaattgttaacaagacaagagacaccaattgtgtggtggtccttgcgggatgtttggttcccaattgatttgagaagagaagctcactcggtccgatggaccgtttgatagatggaaagggttgaaagagacccggtctttgtgaccacctcaacggggagtaggtttgcaagaaccgtacctctgataaacacatccgcgtgtcacactctttttcgcttgcgatgtgttttgcaccctctctcgcggactcgattatatttctaacgctaacccgacttgtagttgtgattaagtttgtaaatttcatattcgccctattcacc

SEQ ID NO: 62269 - DNA, 388 bp, Zea mays
attttcgaaggtagctgccccgcgttggactccaccatctcgtatgacgtgctcaagggacatatttaaaacttattttgaggagactttatgctccacctgatgcaatatcaccatccaatgattcttatgaagtatgacagtccaaatgcggaaggatgaagtccttaattgcacaataactataacaacacaactatggcggtggcaacaacaaatctgaacttgaaaaataccttgctgaagatactgaactagaagataataagtttgatattttatgatggtggatgtgaattcctcaagattcccggattaacacgcttggctcgtgatgtgctatgcaatcacgtgtcaatcggtggttagaataagtgtttacacattc

SEQ ID NO: 62270 - DNA, 403 bp, Zea mays
catatgttttctgagatgactatgggcttcttatgacgaattcaccctaaacatgtgagatcaatccacaactccagtcataatgatgacagaggaagtcagcttcagatgccacaacaaagctcacaatcttcaatgcatcagcagagctctttcatgccgccagctccaatgggcaaaaatagcaagggcttccgatgaagatatgtggatcaacccacgaaaaaatattgcttattctgtggtgaagataaaggtcacactacaacaacgtgccagattaccattcagaagcaaataaaattgctgaaggagaagctcggcagaaccagccgaagcataatttacacactgcttcgtgctactctgcttacataccagaatatatgagcaatcaacctgc

SEQ ID NO: 62271 - DNA, 349 bp, Zea mays
accattaaaatgcatctagaccggcctattcttttgcaaaatcaactatataaaatttgccgtctaatacaccctttatagctagtgaaccatcactttcttctaaagacagacacatctacaattgttaataaacaattatatcccatttgacataattgactgacagatagcaaattatatccaatactctccacttagaatacatttgatatagaatgctcattagaaattgcaattttacctagcccttttaccttgccttgattcccatcaccgaatataattgaatcttgggaatccttatttttgacgtatgatgtgaacatcttcttcttccccgtcatat

SEQ ID NO: 62272 - DNA, 375 bp, Zea mays
tcctagaattctctgcgtgcttgcagagttctgcctagcgtctttcgtacatatacgtctcctcctctctgcaagcattcgtagatcattactcatttactcgtatttgggatacacagtgtatatacttatataaatagcaagcgaagctattaattaattcggtctccacaaatatttctactattataaatcaccaatatcgacggtctgcatcacacgtgaagcgcatatgtttatttctattattattgcgtggcatcgtgcacgtttaacgttcaaaagtcgcataggtatgcgcctatcttgtgttctccaaataatattttgaccattaattagttcacttatatacactatcggaatcgggctctt

SEQ ID NO: 62273 - DNA, 358 bp, Zea mays
gtatgaatgttttatagcgttttccccttcacaagatgtttgttgatgtcctgataaggtctgagatatttctccatcaactcactcctggagcattaatacaagttggagtcttcatctatgtagtgatgaccaacggatggagccaaatgtcaattgttattgtaatattcatgagctctcttaccatacgaaggctaccatataagaacaatatcacaataaatttggttggtattcactcgtatatcgatctagcgcaaggcgtcccgtcccaaccttttgggaaaaatggacacggtcatggatgaagcaatggttctacgttaagaatgacctaggtgagagggaggatgtc

SEQ ID NO: 62274 - DNA, 388 bp, Zea mays
  unsure (1)..(388): unsure at all n locations
atcgaactcttcgagtctacgagatctttaccctgacatctggtggtaatgcaatgtcctctgacccattatgcccattactttataatacactgtcccgcatactatgaacaacctatggattactagctntctatttacctggtccttgatttacctttttggttactatggtcagctacatgctagcgctttattttaatcaatgaacatgatgagatacaatgatgatactatgagtttattctggatatgatgatatacttgtggcatttaaggggactcgggctgtttcccgagtacctctccgtaaggacctgttcgttgagagaccacccgtgataacagtgcaaccatgagggtggaatggggtgcccttatctaatta

SEQ ID NO: 62275 - DNA, 421 bp, Zea mays
  unsure (1)..(421): unsure at all n locations
tatagcacanataagtattgaagtgctgatataaaaacgagttatacagagagtcaggatagaacagagcacacagacgcaatggtttatcccgaggttcggccaagcctgaaatgcttgcctaatcctcgttggaattagccacacctgggcttggagtctatttcaactccttcctccgtttgctcagatctgtcaatatgacagatagagcctttcactattgagtggggttacaacagaaccgcggctgcttacaaacttcttggcagcacctcggcagagtaacgatatgctcaagaccttgctctagctcttagcagcactactcctctctctaaaggcttatagctgtgccttctacacatactatagagttacacacaagaaggagagcgagaatngattcgagtgatgtcta

SEQ ID NO: 62276 - DNA, 398 bp, Zea mays
  unsure (1)..(398): unsure at all n locations
gagtcgcgaaggggcgcttgttcgaggtgataatntctttcatgcttcgcacgaatgggttaccctgttggtcgtgcacacaattgctgaccaatataagccttgacgtatgactttatcagcaatggcccttggtcccgaatgtgatccacgtatacccctgtggacttcacggagaagttcttttcctttggcttcagttatgcatttcaacatgggttgacttatccccaatttgtagagatgtccagtgactatagcaaagactatgcttctgtgtttaatcttttagcttcgatatggtcaaaagggtggtagtggccctgaagatatatggtgattggtgcccgccagtcttcggccattatcatgttgactatctgatgcccgtcttcgtc

SEQ ID NO: 62277 - DNA, 440 bp, Zea mays
  unsure (1)..(440): unsure at all n locations
tctatagagagaacacattctgggactaacttgttgttattttgttgaaagacagggnaggtagtgcatgtcaagcacgatagcaagttggcgctcaccatccacacaagatcattatgacgattgacaggccgctcgagttactccacatggatttattcggcacgattgcttatataagcatcgatgggagtaagtgctgtctagttattgtggatgactattctcgcttcacttgggtattctttttgcaggataaatctcagacccaagataacttgaagggattcttaagacgggctcaaaatgagttcggattaatgatcaagaaaataagaagcgataatggaacgaagttcaagaactctcaaatcgaacgctttcttgaggatgaaggcatcaagcatgagttctcttctccttacacaccttaacaaaat

SEQ ID NO: 62278 - DNA, 410 bp, Zea mays
  unsure (1)..(410): unsure at all n locations
atcagttctgatgtgtgggtgcgttctgcagatttcttataacangcgtagatgatgaatgcgtgctcatcatgagcgagccgctccgcatgatgatgtgccccatcatcatcacctgccgcccccgcccccgatgtcgattgagcagatgtttctgatgcagactcatgcagttcaagccatcggtcatactctggccgccattcatcagcatcagcatgcagctacagcagctagcaccaccccatcctcatatgcctcagatgcctatagacaagcgtgctgaattcatgagaggtcatccaccaacgttcgctcactcttctgaccccatggatgctgaatattggctgcgcactgtggagcgggagttgcataccgctcaatgcgatgaccgggagaaagtcttg

SEQ ID NO: 62279 - DNA, 453 bp, Zea mays
  unsure (1)..(453): unsure at all n locations
ctctaggtgaagagtacgatgtgttgtcatattctcatattataataattgatgatcatatcatgcttaatgttgctcatgaggttataattacgaacttaaattcatgtgaacctcattctcgcacgtgtgcgcatttgaattgtatatcaccatgtgctaacccctgttgttcaaaagaaagccaatgtttgaataagcatcaagatgcatggtcacaaaagaaattgtgtgggaacaagaagaaaagacaactaatgagaagacgcattgctcaactctctcaagatatccacgggcgcgtggtgaagaagcttgagaaaggaaaaactgcagcaagtgttgagcttcataaaaagattgttcctaaagatgaagaaatcaacatgagcttggaaaaaggtaaagatttacttaatcatgtngtttgcactgaccttttctctatgtcat

SEQ ID NO: 62280 - DNA, 386 bp, Zea mays
tcatcataaaacaatcttcatatcaaagcagatttaaagtgattaaattgtaccttaaagttagcataaaatatgctaccgatgatatgctgccgccggtacctgctgatgtctgtctcaaccttcgggaagccaacactctttgatagagtgccgacaaccttcgccccagtgtgatctcgaatgcatcctaagctttctttgttgactcccctgaagagtaaggcacctggtctgtacccgcaagatatagcatactctttcagttcttctttttcagcacttgacaattcttgcccaagtatatcttggaaattgaagtcctcatcttccgaagtatcctcagctctctactttgcttttccagccactgtgcccgggatctc

SEQ ID NO: 62281 - DNA, 161 bp, Zea mays
tgtcgagttcttttgttctcttgcgcgtggattgctttcttctttctcattcttttcttgtgatcaaaactcaattgtaaccgatgcatgagacaccaattttgtggtggtccttgccgggaaattttgtttcccggtgatttgagaatagaaaactcact

SEQ ID NO: 62282 - DNA, 228 bp, Zea mays
ttacgaaccatctagtcctgtttctcaatcagagacatggtatgaccccacactttttctggcgtgccgtgcttcgaggatatcatcattagacaatgcatttatgctccgctctgactccgtcaaaaagaacataacgcgtgggtatataattttcttctctgaattcgtatggggttgtaatatgaaacttgaattctacgtaaaaataccatcttacttgatttt

SEQ ID NO: 62283 - DNA, 467 bp, Zea mays
  unsure (1)..(467): unsure at all n locations
agggatcgtcctacttataacatcgcactctagacatatatgcaatataaacaagtttaacaataagaatggcattcacacaacagttgtgattcggtatggcttgctgtcacatggtgatccccatctccaataatctgtccatcacgatgatctccatctccatgatatagatatgccatcctccaagtgatgagtccttcaagacctatctaacgtatgctggtaaacaaattacatatacgctttggatcatcacatgttgacacgcaggtcattacattaaatttggacaatacatgtggctccagccgtattgccctggtcacgacacgcatgtcatgaataatttattaacatgcatcatatacacaatagccataccgatcacatgtcctgcanaaatatgttagacaaacacgtttctatacgttcgccactacagcagatagccacggcggtcccat

SEQ ID NO: 62284 - DNA, 440 bp, Zea mays
  unsure (1)..(440): unsure at all n locations
gcacaaatgagagaatgctgcttcatctgatcttcctttacctatgctcttgtgtgaagacatagcaaaccatatggtattgcggggatctcatctatccggtgaacaagataagactctgcttagattcttgttcaacaacgataatgtcttcgcttggacagctaatgatctctatggtgtcaatagagacgtcattgagcattcactcaatgtggacccatccttctgaccaagatagcagaggcttccgaaaatgtctgatgataaagccgaatgtgcacgaaatgaagtaaagagaattctcagtaccagtgttatcagagaagtaacatatccatagtggccggctaacaccgtcatggtgaagaaagctaatgggaaatggataatcgagagcacctacagggggngtgaatatgtgatcctgtaataacttg

SEQ ID NO: 62285 - DNA, 451 bp, Zea mays
tggactctgcgctatgacgaaagacgatcttgctgtatcctttttataatagtctaaaggtgtgagaatagtatatttggaaattcacaatctttgaatcattcttttattcttatactaattctttcttcatatatggtttaatactgagcaacgctttgagagcacaaaagaatgccgaagacgagagctataatattgctttcaacaacctacgagcagaggttatcaagctgatgaacgaagctttggaaaaagataaaattctgcttacactagtggataaaataaaggaagacgaagctacctctaaggctcaagctgaagcccaaaaacgcgatattcaggatcttcagaaacaactagccagagctaatgaagaacacatactatatgaaacaaaacgagaacttagtgatcaatgggcaaatcatttggaaataaatgttga

SEQ ID NO: 62286 - DNA, 422 bp, Zea mays
gcttacttggtaagatgaccaatgcgcccttcacgggtttctctgagatttctttaaatttattggaactcatacatactgatgtgtgcggaccaatgattacgacagctatgggaggattccaatacttcataaccttcactgatgattgtagtagatatgggtatgtctacttaatgaaacacaagtctgaatccttagaaaagttcaaagaatttcagaatgaagtagaaaatcagcgtggcaagaaaattaaagcactgcgatcagatcgtggcggtgaatatttgagtcatgagtttagcaatcatctaaagagctgtggaattgttccacagcttacgccgactggaacgcctcatatgaatggcgtgtctgagcgacgtaatcggactttattggatatggctcgatcaatgatg

SEQ ID NO: 62287 - DNA, 438 bp, Zea mays
ctctgatcctatagggcttagcatggcgaaaggttttgattctttcattacgtccaagatatttgttatgccaatggatgatgccgaatgagtctcgatagagcgcttcggcggagaagactttctctctttatcacgtctcgactccacatatttccgcttcttagatacgaaggtttcgacgacatcttggaagcttcagtttctttaaaaacttttgatgtttctgtagtcttttctttttatccttctcaatggatcttatcgcttgtctttttaggatacttacaactctcttcttcctcactcccacagactcttcgtcaagtctatcataaatggtatattcgaagccgagggcatccatcactcgtgttatccatcactttctccgtgtaccgaaggcggcagtcatcaactggtcttccttcttagtat

SEQ ID NO: 62288 - DNA, 414 bp, Zea mays
cattcggaccttcatactaactttgcactataattcaacctggttttgagctttgcggaccaaggggccataatgacttcttatatcttctctgcttcaaatatttttacgtaaaaccattcttcatacaagcttcggccaccttttcggatgttggcaccgatggttgtgtggggcgagcgataataataacaccaaaatgtatgatattgtctttgccatggccttcgtctatatacaagttcggcatactgcggcgttcaacccacgtggaccctcaccgactaggatttgtcgctgcgtatccctgccacatgggtgatgcaagatggacacaagaggaggtgaggttatttacttgaccgggtgctcgtataatgtcaacgttcagaagaagaagaagtcggcctgagg

SEQ ID NO: 62289 - DNA, 473 bp, Zea mays
  unsure (1)..(473): unsure at all n locations
cataatgaatacaaactcanaagactccatgttctcaagctaccccgcagctggagaaggaccaccaatatctttgtcaaccatctcaagcacctcagttgttgagtcccacattagctccaatcggataagggttatgtgatgtgaaccccatctagtgtccccaggtctagcaagactggtctgttgatgttttcatgtacccaattcaatctccaaggaatcaagttgtcgcataatgttgttatgatggctttcaaccaatgcatctcttcttttgcatgaagcgcttgttgtggtcacaattaaagagacatactcaaagaaatcatgaatagccgagcaacaactataaacagaaacaatgactaactgcaaccgatgggcaaaacaatggacataaaaagcatgtggattgtcatctaaaatctttttctgtagcccattaaattcacccctcatatttgaagctc

SEQ ID NO: 62290 - DNA, 406 bp, Zea mays
  unsure (1)..(406): unsure at all n locations
actagtggaactttggaaatgcccggcaatggatccctacctgtngggggtctgcttcgtccccgatggtcccataataagaaacaccttcggaagattgacacataaccgaagctatcattcagaaggcttcggagtatatttccaaaggcactgactttaagatgaaatgaccaatcgacccattgataatttgtattataattgtatacctttgtaaatggcatgaatggaatttcccacaagctgcgtcctgtgcctattaatagatgaacagtatccctgtactgttcacgctatcctgtaattgtcacgtgcactacttggattctggccttctgtcaagacgaaggtataatgtaatatatattatattcattatccaatttatataatgttacatatg

SEQ ID NO: 62291 - DNA, 316 bp, Zea mays
tagtgaccgtgatcctgctccaacaccttatgagcccagcgcgctatttataattaatctgtagaataccaagggatgtattgacattctcacatttcattggctcgctcatgtaccttgctagtgcacaatgccagacaacgcttatgctgtgagtaagctaagtacattcgtgtcttaaccaagagacgatcactggcgtgctcttgaaatagagtggcataattgaaatgttctagacatactgcattcatataccaaatccctaattgctggatgctttgtgagccactggattctgttctgtgagatcatg

SEQ ID NO: 62292 - DNA, 345 bp, Zea mays
gtccactaaccatgtttatacactctctaaggcgccctatgggcttcttcacgcccacattgctcggaatgactgcctactactgctcttatgcctaatggcctggacggcggaatgccggtcctctttattgacgcacatcctcgtaaacaattgcgtgttcgccaaagttatgaacacgatattatattggggtgtgcctacgcatctccatgtcaagtatgtactgagagcatgtaacaggaatttccgatcacaattacgagggacctgaacactcatacgaatgtatactgatctattcaacaaggcctgtcgattacgatgacaatactatcaaatatt

SEQ ID NO: 62293 - DNA, 153 bp, Zea mays
atcactaaattttctacatattaggcagagtttatgatgaggggacagggcaaacgttctatggttgggatgcgattatcccaggcgtgaaataaaaaccgcttgcaagatgtgaatttacaaggaggttgttcgaactaggaagcttctcat

SEQ ID NO: 62294 - DNA, 285 bp, Zea mays
acccatgataagtgcagctcatttgtcatttgagagtgctggaacctgaataacaccacgagcatatttttggccacccacgtattttcctctctctaatttatactaagatcatgtgttccaaagaataaaatcacaataattcgagattggacatgtgttatactattacttaaataaaggtacttttgagcgtgatgttttgggacattctattttcagtcaaccatcatgaccaattagaattaattagaatgccactcatgttgtgatttgaacaaatat

SEQ ID NO: 62295 - DNA, 456 bp, Zea mays
  unsure (1)..(456): unsure at all n locations
ctgggtacaactcacataatgttattcctagcatatagcataaggggtggagatcccccaagttcatatatggaaccaccctatatgatgccttggggaggattcattcctcaaataacaagtcaactcaagcaaaggtaaacttgagttacacaaaaggcaagacgaatgatgtggtctccacaagtggagaaaagnttagagctcccatttcgcatttttacctttgtgattatatgttgacttgggattcaggaaaactagttgttaaatatgtgggtgcctacactaaaagaaaagtcatgaaaataagtgtgtgggtacccaaagctataactaacactgcatgacccaattcaatttgggtacctaaaagcatatcctaaatctgttttggaggtctactcctccggtgggtcaagctgggtgcttgacagtggatgtacaaatcacatg

SEQ ID NO: 62296 - DNA, 427 bp, Zea mays
  unsure (1)..(427): unsure at all n locations
gacattaaaactaagcttctccggcttctgatcccctcagcatccgaagtagcttatgtcccactacgggttatgaatcttgttttgggcttgtcctccttcttcatccaaatttgatgatagcatgaatagcaatccaatatactcatgagctctgaagtggctgcgaccactacaggaaacacctaaattttcgtgggccaaaaacccacgaaaataatcctaaaccgacgaaaatagagtattttcgtcggcaggccgacgaaaatagccgccgaaaataagttcgacgaaaataggcggctattntagtcggtaccgacgaaaataacttattttcgtcggctttcccaaggccggcgaatatagtcagtcgaccatttattttcgtcggcccggtggtggtctacgaaaatacatgtccaac

SEQ ID NO: 62297 - DNA, 478 bp, Zea mays
  unsure (1)..(478): unsure at all n locations
tcttcaccacgcgtctgtggatatctngaggaggttgagcatttcgtcttctccttagttgctttgctttcttgttcctttctttattgatgagcaactnttcttttgatcctgcagcttgatgctcattcaaaaattggctttcttttgagcaacaggggttagcacatggtgatatattatctaaatgcgcacgtgtgcaagaatgaggttcacatgaatgtaagttcgcaattacaacctcatgagcaacatcaagcatgatatggtcatcaactaattcattatgagaataagatagcatatcatatttttcacttggagcaagtttttctaaattaatcatttctacttgactcttaagcatagaattctcagttctaatgtgagcaacatcagataatacatcatgattatttcttttctcaaataaaacagattcataccattggaccatattatcatgatagcactttat

SEQ ID NO: 62298 - DNA, 484 bp, Zea mays
  unsure (1)..(484): unsure at all n locations
gcttgaagaacaaactaaaaagcatgtcccacgatattgttgtcttcttagtatttagcttatcaaagaataattacacagaattggaataagtgttgtatgctgtgttaatggcctccaagaagcttctgcattattttcaggcttaccatataattgttccctcgtcacagcctttgaaggatattatgaggaacagagaagctactggaagggttggaaagtgggccgcgaagctcaatgaattcaccattgactacgtgcacagatcttcaattcaatcctatgcgctagcagacttcatcgctgactggacactatgggctcatgaagaatggacaagcaagggtaccgaagcttggacggtgttctacgatggttcttggtgaaccttcggtgtaggagcagctgcagtcctagtagcaccttctaaagtcaataacatgtttngctgtcaaactcgatttcagttgcacaaataata

SEQ ID NO: 62299 - DNA, 285 bp, Zea mays
gccaaggtatcacatttagaggggcattgtttgacttggtagaactcgtcagatagccttctatgtggttgatttttcagaatatgtgtgaggagctttcggacctcattaccgatgggccttcagatgctatactgactatattggctgcccttcactatccttagggtgctcttctaatcaattggagtattcttgtttgttgtacgtattatgcttttagtagtttggcctgaaactcacatgtagcttggacaaaggcatcctggtgtggatgatactacg

SEQ ID NO: 62300 - DNA, 321 bp, Zea mays
gggaatctcaagcttgacaataactgatggaaaaaacaacatcccttggtgattatattctatgttagttgaaaaatggttgtattttcgaattgtcttcccacttttattgagactctccttatttattcaggagctttcgcaaaattatcaattgcttgctataaaagactgttgctacttctatccttttgaaaatgacgatactgtattctttgtgttatgaaaacaaaaaatatatcggtatccaataattgtcgtatacttatgtttatcttcttctgacattacccctatctctccttatccttgaagaaaatt

SEQ ID NO: 62301 - DNA, 473 bp, Zea mays
  unsure (1)..(473): unsure at all n locations
tggtgactcctttattacttaagttattntggtactcatgcctactttagttcacatataataatggtccttggtttggctttttaagagaaaccctatgtgacactggggtgtcacagaaagacccttcgagtatgttgcagcggaattgaagttcctgtcttaaaataccctgcacttcgaagatagcttgtaccacatataaatatagaagtgcaagtataaacagcacacatcacatagcatagcacacagacacatggatttatcccgaggttcggccaagcctgaaatgcttgcctagtcctcgttggagttagccacaccttggcttggagtctatttcaactccttcctccgtttgctcagatctgtcggtgcgacagatagagccttccactatgttgatatcagttacaacgatgtcgtggctacttacaatcttatcgatagcactccgacatagtaacaat

SEQ ID NO: 62302 - DNA, 430 bp, Zea mays
tcgctgttctctttatgctgatgatgcaagtgtgtttttttttcataaaaagacgaattgaaagttctgaaaaggatcctggaaattcttgaacggtgttcatggctgaatataattttgataaaactgaaatttttcctatttgttaccctgagactctctggccagatctgatgtatgtgttcccgggcaaattctcataatttccggggaagtatcttggtctgccgcttcatttcaagactgttaggaaagtggatttctaccattaatcgataatattactaatatgctatcaagatggaaagacacgatgctctctaacgtatgtagggaaaccttggtttaagcggtgctatctgctcagcctatttaccatctgacgatctttcggcacagaagtggcttcttaaaaaaatgacaaattatt

SEQ ID NO: 62303 - DNA, 419 bp, Zea mays
gagaacacatgttatgatgaacatttgttcattttgagaaagacaggatttgttgcgcatgccatgcaagatagcatgctggagctcatcatccacacaagaacatcatgactaccgactggccactatagctcttacacatggacctattcggcccgattgcttacataagcatcggcgggagtaagtgctgcctatttattgtggatgactattctcgcttcacttggagattctttttgcaagaaaaacctctaacccaatataccttaaagggattcttgagacgggctcaaaaagagttcggcttaaggatcaagaaaattagaagcgattacgggacggagttcaagaactctcatattgaaagcttccttgaggaggagggcatcaagcatgatgtctcttctccctacacg

SEQ ID NO: 62304 - DNA, 362 bp, Zea mays
ttctgcaagagacttagcttcctccagtcttatctccgtcttgtttagcgtgctgttctttgtagcgatggagttggatcacagcgtcagcgacaactccctcgtcgacaccgcggacgcgttggctccactgcatgcggtgagcgggtattggaggcctccctcgttggagagcccggccccggcgaggtggtatgtgtcatgggccggcacggttactgatacgccggcgctggtacagatattgtacgacttcttggatgacgaccataccgccatgtgccctgattggctgttgcaccgcaagctcgccacgacgtggctgtcgcatgcggcgacaccgtatagctcgtctgtcatct

SEQ ID NO: 62305 - DNA, 338 bp, Zea mays
tggcgactgtcatttcgacctctgatagtagtcctacgttgtctcatgcgccgctattgacgacaagattctgcacatccgtcgcttggacgcggtacatatcaggctgcactgcgttgtccatcgttaagcatgaggacctcatggtcatcaccaatgtcggtgactctcgggttgttctgggcaccgcattcgatgatggcgccatcacgaccgtccagatcatcgtccacctgaagctcaacctgccacgtaagtacgttctgatcgaacatgaatatctgtgcgctggtacaacgactcttgctgaggttgtgtgaatgtcctcgaatatgatg

SEQ ID NO: 62306 - DNA, 485 bp, Zea mays
  unsure (1)..(485): unsure at all n locations
tcaatntattatcagtgggtaaactctgtgatcttggacttctatgcttattcactccaacagaggttattgtaacaaagatggatgatgaatcaatggtgttcaaaggatttatgtacaacaacctctacttagtggatttcacttcagaagatgcagacttaagaacttgcctcttcaccaaagcttcacttggatggctctggcatangaggcttgcacatgttgggatgagcacactcaagaaggtattaaagaaagacatggttagatgattaaaagatgtggtgtttgaaaaagataagccatgcagtgcttgtcaagctggaaagcaagttgctaatacacatcctactaaagctntcatgtcaacatcaatgccactggaactacttcatatggatttatntggacctacaaattatgtaagtgccggtggcaacctctactgtctagtgattggtgatgacttctcaagatacact

SEQ ID NO: 62307 - DNA, 458 bp, Zea mays
cttcatccacacatgtgctaagcggcgatgtctatccagtccatgctagtcttagctattaagcatgcatctataccggcctcttcttttgcaaaatctactaaataaagtttgtcgtctaatacacccttaaaagctagtgaaccatcacttcttctaaagacagacacatctacatttgtaaatagacagttatatcccatattgcataattgactcacagatagcagattatatccaagagactcaactaaaaacacattagatatggagtgctcattagaaattgcaattttacctaaaccttttaccttgccttgattcccatcaccgaatataattgaatcttgagaatctttattcttgacgtaggaggtgaacatcttcttctcccccgtcatatggtttgtgcatccgctgtcgataatccatcttgaacccccggatgcataatacct

SEQ ID NO: 62308 - DNA, 352 bp, Zea mays
ctaagctttaaaggagaacacgtgatggtctaacaatgtaccttcttaaatatgaccttggcagcttgtcagcaagtaacaaggggggagcgcatccaccaagaatgtgatacaacatcaagacccctggagctgctacatattgacctcttctgacccgtcgcctatctaagcataagaggaagtaagtatggtttagttattgttgatgacttttcccgcttcacttgggtgttctttctgcaggataagtctgaaacccaagggaccctcaagtgcttcctaatgagagctcattacgatgttgatctcaaggagaaaaagataatgagcgacaatgggtccgaattca

SEQ ID NO: 62309 - DNA, 439 bp, Zea mays
acgacatgcttcggtgaaagagatgacttttaaagattagcaagaggctcagttctatgcctataaactgaaatatccaaagggggcgttaatattcaacggcagcggagaagaagacttcttgtattgtctccctgacaacaaggagatctctgtctgtcgggagatgagcaaaagcttcggattcccaacactagaagacgggctctcagtgttgttaaagaacgagctggccgacagcttatcatacaatagtttaaaggtgaaaaaacgagatctttgtattttttctataaaccaatttttttttgcttaaacttattaacacatattttttccagggccttatacttatcaatgccctcatggcacaaaaagatgctgaagacgaatggtgtaccatagccttgagcaaccttcgtttcgaagtaattgaact

SEQ ID NO: 62310 - DNA, 433 bp, Zea mays
gatactttactgagaatccatacctatgttggtggcgcaaggatccctgaccacgtacagcgcgacgctagatgcatggcgcctgcaccggcgagcgattcttccctgatatggttgaaatccgattcgataggactccgccccggattctccacgcagcggtgatgcctcccccgctgattcttcgaccgcccaacgctgtatcccgggggattctcacgacgcgcggatgtggaccaatggaggtggtcgcgcgacttcgcccttcttcctcacggtgacagtggcggtcatgattaatggaaaacaacgagagaaggaagaacccgtgacccacaccttaatatcctggagatgtctgttgggcgcagctgcgctcgatctgccggtgaaattggcgagcaagtgactgggaagatctacagtgctcgct

SEQ ID NO: 62311 - DNA, 459 bp, Zea mays
  unsure (1)..(459): unsure at all n locations
ntagctnttcttgttcgaagttntctgactgttataaaatcttcgaatttaattctgttattgtggcttcagcatccgctaataagccttcggttgtttgaagctcgaaatctttcttttcgatagcaactgattgctcttttatcttgttctctaagttctcaattataacttcgtgttttttatcctctaagtcctgctgcatgtttaaagccttgctcaacagcatactctgcgaacaaataaccttcgttagaaaacatctatgttattaaaaacaataaaagttagagaaaagttgtttaccttgaaatcggaataaaatagactaccgacaatgtgttgtcgtcggtagcggctgatatctacttcgagcttctggaagccggtactctttgatagagtaccgataactttngcgccggtctgatctcgtatgcagcccaacctttcgtcatc

SEQ ID NO: 62312 - DNA, 474 bp, Zea mays
  unsure (1)..(474): unsure at all n locations
taagcttacatgtctcgtatgattcnaaatcaaacgatgtttaaatcccatcagaatgaagcttcttcatgtgattctcacttatatgacccaaacgatagtgccacatgtaggtaggacttaaatcattaggccgaggccttttatcactaatattacagataggtgcatcatcaagatttaaaatgaataacccattcataatggatgcataagccacaaacatgccattcttagagatcacacaaccattgttttcacttgcaaatgaatatccatccttcatcaaacatgaaggagacataatgtttcgactcatactangaactagataacaattatttaactccaaaataaatcctgatgggaggtggagttgcatcgtcccgacggtcaacgcatcaactcttgcattattgcctacccggaaatcaacttctcctcttttcacgcttctacttcttatcattccct

SEQ ID NO: 62313 - DNA, 384 bp, Zea mays
  unsure (1)..(384): unsure at all n locations
ttctcttaatgtagctttggagaaactttgtctttgactatttngcgttgntttcattatgcaaggacaaatgctaagtaaagacttgagagtactatatgaaaaataagatgaagagctatcaaagatatatgacgaagctggaaagctctgaaattctttgagggaaaaagatgaggagatagcgtctttaaaagaaaaaatagccgaagctgacaaggcaaaaaggcgagcagaaatacttcataaggatgacgtgacgaagatagaagaacatgaaaattctattaaaaaacttcatatcagccttgatgcgacaaaaaggaatattgctaacaaagtcgctgagaatcagaatatattgggaactctagaccaactttg

SEQ ID NO: 62314 - DNA, 370 bp, Zea mays
gttctccacaacatgctcttcccattctgatggacaaactgaagtggtgaatcgtacattgtcaatgctgctgcgaacaatggtgaagaaggatttgaaggattgggaggaatgtttgccacacgtgaagtttgcttataacagggcagtacattctacaactaatttatgccccttcaaaattgtatatgggttcaaacctattgctccgatagatatgttgccccttccattgcaggatagaaccaatatggaagctttcgagcgtactgcatacataaaatagatacatgagaagactaaggaagcaattgagctcaaagcattgcgcaaggctacaagcatgaacaagcatatgaagatagtgtta

SEQ ID NO: 62315 - DNA, 440 bp, Zea mays
tctaaagggtgaacacgtgatatgtctaactaacgtgcatttcttataagatataccttgtgcagattgtcaagcacgtgaacaagtgggaggagcacatcacagcaagaatgtgatgaccacttcaatacccctggagctgttgcatatggacctcttcggacccgtcgcctatctgagcataggagggagtaagtatgggttaattattgtggatgacttttcccgcttcacttgggtgttctttttgcatgataaagctgaaacccaatggaccctcaagcgcttcctcaagagagctcataatgagtttgagctcaatgtgaagaatataatgagcgacaacgggtccgagttcaagaaccttcaagtggaagagctccttgaggaagaacggatcaagcacgaagtctcctgtacctatacaccacagcaaaatg

SEQ ID NO: 62316 - DNA, 206 bp, Zea mays
tcaataaatgtctatttttatttgatgtcaatccatatgtctgatctaacaaatcatgcaaactttttaacaatcgtttgctcatcctgtacatgtcataacattgtatatgatcactacatgttctcatcacccaatcatatgcagtcgtctaaggttctgatctcacaaatttgttcagtaagttttggtgtaaacataccatg

SEQ ID NO: 62317 - DNA, 394 bp, Zea mays
actacaaatctacaagaattttcattcggttccacaagtggttccatccaacaattggtatcttttacatgtcttctcctgactttgattatactaaatttcatatcttatgcttcccatgttgctataaatgcatatgttgtcaaaatatatctttcacctatgcataagggaagttagtctaatcataccatagcttgcacctctctttctcatgtgcttttcctaaatagaggatctccgtcagggggtatttctttgtctttgacaaagggggagaatattctttcaaaagggataacactcttttatggggagtaatcttttagaacttcaattgttaaatctgttagagggcaagtcttatttgcttcctatatgctcttaatgtcat

SEQ ID NO: 62318 - DNA, 473 bp, Zea mays
  unsure (1)..(473): unsure at all n locations
gccggaattgccatcaatgaagctccctcactcttctcattcnccctttgtctcatnggcaaaggagatgcttaggtgaaaatcatcaccgatttaaatgatataaaagatgatgatgatatcgatgatgttgatgatgatggctattcatatgatgatcttgttagaatgttaggtgaggccgatgactacatgcacaaagaataagaaaaatttaagaccttgaaggaattgtataaaaacctccaagtgtcttttgatgagctcaagacctctcacaatgacatcaaagaatattgtgagaagcttgcggatgctcaaaaattatctattgtgcatgaagttgaggtggtcactaaggatgttggagtcacttgtgacttacttgatagtcttacaagtgaaccactacctactaactctatttgtgataaatgcaaaatttctctcaatgataacatatgctcttgatg

SEQ ID NO: 62319 - DNA, 453 bp, Zea mays
  unsure (1)..(453): unsure at all n locations
tgtcaattcttatcaaagcagcagcatttaccagcacagcttctgtctaccatacccgtaacatgaccatttgcgtgttgtggactagacatgattggacccttcatgatagctcatggaggatacactcacgcggtggtcgccattgacaaattcactaaatggatagagtacaaaccaattgcttctctgacttcatctaaggcagtggaattcacacaagatataatattcaggtttggaataccgaatagcattataactgatttgggatccaatttcactagctctaaattctttgatttatacgaacaaagaagcatccagatcaaatatgcgttagtagcacacccaagagccaacgattaggtagaaagggctaatggaatgatattggaagcactcangaatgaagtcttcgacaagaatgaanagttcgcgggaaagtggatc

SEQ ID NO: 62320 - DNA, 417 bp, Zea mays
  unsure (1)..(417): unsure at all n locations
ntatcaaatggacgtgaaaagtgccttgctcaatgaaccaatctatgaagatgtctatgttgagcaagctcccggctctgaagatagtgagtatcctaatcacgtatattaaactctctaatgcgctttatgggctcaagcaagccccaagagcatggtatgaatgcctaagagatttccttatcactaatggtttcaaagtcggaaaggtcgatcctacactctttaccaaaacacttgaaaatgatttgtttgtatgccaaatttatgttgatgatatcatatttgggtctactaacgaatctacatgtgaagatgaaagttgcctagaggggggggtgaatatgcaagttaaaactttttcaacaaaaactagaagcaaactgggtaaaactaaattgatctcgaaattcaccc

SEQ ID NO: 62321 - DNA, 343 bp, Zea mays
  unsure (1)..(343): unsure at all n locations
ctcatanggagtctttttgntcatagactttgtgggtgatctgttgatgatatacactgcagntctcacttgctcaccccaaaatattgatggaactctcatcgatttcaacaggcacctggccatttcaaccacagactggttccttctctcaacaaccccatttttcacaatacttgtagagcatttcctttccccctacacaaaggctagcctacataatgcaatccgcacgtagaatatgtgatacattaataaaggctccatgtagtgcctgtaaagttagaactattttcaagttagatgctgaattctcatatatactaacgtgtgctgaatcatc

SEQ ID NO: 62322 - DNA, 353 bp, Zea mays
ctgaccaaagattgtctccttctgtctgcgtcaacacctgaagttaagaataacacttgaaaacccccttatctttacacaactcattccctgtttcttatatgaactctttatcatatagggcctcgacctaaacaacgcactaagagcccaaaagagcgccgaagatgaaagctattaaattgcggttaataatttacgctccgaagttatcagactgataatcgaatctttggaaatagataataatctgcttacactggtagataatatgtaaatagacgaaactgcttcaaatgcccatgcggtagctcaaaaacgcgataataaagatcctctaaaacggctggcta

SEQ ID NO: 62323 - DNA, 436 bp, Zea mays
  unsure (1)..(436): unsure at all n locations
ctcaagcctgcacccttcttgttacctcagtaaanaatacatgtgcctctcatatctctatcacatgtaagtttttgcacttatattgttgccttagttacatgctttatctttcgaacttagttatagactagttgataggactagaacctagttgcataacttcttttgtggtatggataacaacacttggtcaaagccttaattacacatataaacgcttgattatctacataggttctgattaagagataaatataggcaataggttagagtaaaaatagattgcctaattcaccctcctattaacatcattctttctaacatcatagtcatcattcactaatggtagctattataattccttgctgagtcttatcctaatttacatggcctctggtaatgagatttgcatagtggcctaacgtattcctgg

SEQ ID NO: 62324 - DNA, 419 bp, Zea mays
tcaaccatgggcaagaacaacaagcgcaagcgttatccgactcctccatcggaggaagttggtgactctgaatactcggaggaggagttctcctccgagtccgaggggtctccggctcccgtctctcccctggcgtcgtgcgatgattcggacgactcccatgggatagccgcggaggtctggacgtatatcctggccgtcgagcgcgccgggctcgaatgctcggatgagtcggagtactcctcggatgatgaggactcggacggcggcgacgagggtgaatacgacgacgacgacgacgacgacgatgacgatggcgactgcgacggcagcggcagtggcatgggcggcggcgacggcagcatggacagcaccaatggcagcatcatgggcagcaccaatggcagcatcatgggcat

SEQ ID NO: 62325 - DNA, 269 bp, Zea mays
tgcctcaccaacatcagcgttgagaggttgttcactctggcttccgtgtttgataatttttgatatgctgaaccattcccgcggtaactcgtactattattccatgacacattccttgttagtcatggcctatattcttagtaaagctctattagctcaaatagatgttgatgatgaaaactacctgattgctattggaaaccttctaactgacgttttaactttgatgaacgaaactcttgaaataggataagattcttgctctcttg

SEQ ID NO: 62326 - DNA, 237 bp, Zea mays
tactaaaatggcccagggccattctcttcacccttgacaaaaacttgacaacttagctgaaccatatcttgatcaagaatctttgttaatgacacatgcctcgaatccctagactgtgcttatatcgatacaagggttctaatccgtcaaccagcataagtgatgaaaggattgagcttcggaaaaaagcttccttcgaaaaatcttgcgtgttcaaaatataaatttgggaaaaca

SEQ ID NO: 62327 - DNA, 447 bp, Zea mays
  unsure (1)..(447): unsure at all n locations
agcttgaagctgngaataaactaccgccctcttaatgctttgactattaagaaacaatatcccttgcctcgtattgatggtcttttcgaccagtgggcagagccgaagtgatttccaagatagaacttcgctctcgctatcatcagatcaagatacgggcaagtgatattccaaagacagctttctcaaccagatatgggctaaatgaattcttggtgatgtctttcgggctgaccaatgcaccaacatattttatgtatttgatgaattctgttttcatgcctgaattggacaaaattgtagtggtttacatcgatgatattctggtgtactcaaagaacgaaaaagagcatgctggcatttgcatgtagtgttcaacgtctgcagagcaccccttatgcaagtgtaaaatgaatttttttaaaaagacaaatctcggtacactat

SEQ ID NO: 62328 - DNA, 405 bp, Zea mays
catttccttcaccaaagccatcgtgcacacttcgcccataaaaaagatcaattatcatccttcattgcatgtctacaagacaagtgataattgccataagataaattatcatcctacaattatataatctagactacccaacagctacatatagacatatagtagactaaccaacagcttggtatgctatctgctgcaacgagccaatgatgtacaggatgttttatggtctacaactaccagtcatggtcatcccattctgattgccaaaatcaaattgttggcatcaataattgattctaaatagctacatagaggggcatttgttaacatccacggaagataaaaagatactaaagtgccttcttgccccagaaacactatgtatatgccaacctatcattt

SEQ ID NO: 62329 - DNA, 363 bp, Zea mays
gcttatggaatgcttttttatctattttactctcgcgcccaacacttttacttttagttttagcccagctttaaaacagtttttttcatttcgaaattctgaagaaaaaggctgctatgaatgaaggtgagctttctaagaaaaacttgggtttttggaacaatgtcgaaaccaatacagaaaaatcaccaagaattttaaatgttatttgagaactgatgacaacatagtatgatgcgtagggtggtgaaactctgagatcgccaggcgaccagcctgcggtttcggcaatcaagattaagatatcatttgccacataggggaaaatatccggatcggcgctgtgaggcgaccaagaaaaac

SEQ ID NO: 62330 - DNA, 267 bp, Zea mays
ccatcaacatgaaacaagacaaaggtcacgatctaacatagtcttgttggccgcactaacaatctctctgcgtcatcctaacagtaaaacgagaagagcgaaacacaagattgcttccactgccatagcaactaggccacctcacacaattttgtcgtcaatgacaaggacgaagggacaaggagatgctttggacgcgacaataacgaccacatgatcaatccatgtcccgtcctgaagaatcaaaaacgtgccttctccagaaga

SEQ ID NO: 62331 - DNA, 332 bp, Zea mays
  unsure (1)..(332): unsure at all n locations
cataagcttctgccacactctgtgtgacacgtgttgcgtancacattactcgatcagtgctgagcactcagctcagtagacggcttcttagtgggcacgtgacgaccgatgtcgctgacgtcctcctcgtccgcgtccttgccgaagagcttcacggtgtcctccaggctcttgcccatcgtctccggcaggaagaagtacatgaacacccaccctgcggcggcgatgcatgcgtagaggtagaagctgtcggagatggtgatggtgttggagagcgagaggaaggacatggtggtggcgccgctcatgatcccgttcaaccccgtgccgat

SEQ ID NO: 62332 - DNA, 394 bp, Zea mays
acaattcgcaaaagatagaacctgtgcagctagtcaagcatgttaacaagtgggaggagcacatcacaacaagaatgtgacgaccacatcaagacccctggagctgctacacgcctatctgagcatacgaagaagtaagtatgcgctagttattgctgatgacttttcccgcttcacttgggtgttctttttgcaggataagtctcgaaacccacaggaccctcaagcgcttcctcaggagagctcaaaatgagtttgagctcaaggtgaaaaagataaggagcgacaaccggtcagagtcaagaaccttcagtggaggagttcttgaggagaagggacaagcctagttctcgctcctacacacacaaaaaatgtgtgttaatggaaaacagac

SEQ ID NO: 62333 - DNA, 439 bp, Zea mays
agcttctaaagggagagcacattatatgactattctatgtttatattgagaaagacaggatttggtacgcatgccaagccaggaagcaagttggctctcatcatccacataagaacattatgacgaccgacaggccactggagctcctacacatggatctattcggcccgatcgcttacataagcatttgcgggaagaaagactggctagctattgaggatgaatatactccgctcacttgggtattcttcttacaagagaaatctcaaacccaagagaccttaaagggattcttgagacgggctcaaaaagaagtcggcttaatgatcaagaaaataagaaccgacaaccgaacggagttcaataactcttaaattcaaagctttcttgaggaggagggtataaagcatgaattctctctctcctacactccacaaca

SEQ ID NO: 62334 - DNA, 306 bp, Zea mays
gaaactgatctgtcattttggcagcacaccttataaatatttaaccttgaacatgctaaccaccagggatgttataataattgtagaacttttttagcttccaaaagctagacaattgttggatgctgatctcattataattttaaatccaagctgatctgtcaaattggcagagtgctggatgcctttgacctgctaatgtaatcagctggataaaaaccaaatgtgagccttttaacttcaaaaactagttgttcttggttatattaaagtatataaacaaggatgtggctgtgtctaaaactg

SEQ ID NO: 62335 - DNA, 444 bp, Zea mays
agcttatgaagattcttcatcccaacgtgggctactgcgatgccagagccaacccatgttagtcttagcagttaagcaaatgtcgagttcagctctattaaaatcaactaagtatagctgaccctctaacactcccttaaatgctactgaatcatcacttcttctaaagacaataacagctatatccataaaaagacaattgtagcccattttgcataattgagaaatagaaagcaagttgtgatctaaagaatctacaagaaaaacattggaaatagaatgggtaggtgatatagcaattttaccaagtcctttgaccaaaccttgatttccatccccgaatgtgatagctctctgcggatcatggttgttctcataggaggagaacatacttttctcccagtcatgtggcttgtgcacccgctatcaattatccaacttgag

SEQ ID NO: 62336 - DNA, 421 bp, Zea mays
ccggaccttaagcgactgagctgcaacttgacaaatgaaatcttgtgtttcattctatagcaagctcctgctatggtcaaatatttggcagcaaaacagtgcaataacaatgaatggtgtggtaacttcacacctacccgtttgtttatatagtgccgcaagtgggaaggttaatcgtcaactcttccgcaccggacaaacagcctgccgcacccactgaacggtgggccacagagcccgagaaggtgaaacgccaggacgcgtgtaactcctgcatggaggggccacctcgcgctcggattattttaatcgcttctcggcaacgaattcagggaaagtggttttcggatcttcggcatcccgaagcctaagagactatttcacggatcaagctcggtactaataacgatctagcaccgcg

SEQ ID NO: 62337 - DNA, 463 bp, Zea mays
  unsure (1)..(463): unsure at all n locations
agcttganaatatctatacatggtccgaagagttaatcctccttcgaaggattttctgtcaaaaatatccctcgaggacaaaatgagcatgctgatttgctatctaagtcagcagcacaggggctgcctttaccttcggatgtgttcttcgaaacaataaaggcaccttcagtggaactccttgaaagagcagtcctcaatatatcttctgtttatagcgaagattggagaactgagatcatctcttacctacagggtaaattcctttcagatgacgaagcttataacaggaggatagaggcaagagctcgtccatatattatgatagaaggggagttgtacaagcatggagtttgtgctccgctactcaagtgtttatctacaaccgaaggtatatagttaatgaaagaaatgcatgcaggcctgtgtggatctcacattggatctcggccgtactcggaaa

SEQ ID NO: 62338 - DNA, 431 bp, Zea mays
agcttgccaattcttgttaaagcaacaacaattaccattttagtagctgcagaccatacctataacatggccatttgcgtgctggggattggacatgattggatccttcaagaaagctcacggaggctatactcacgtattgatcgccatcgacaaaatcaccaaatggatagagtacaaacccattacttctttaacttcagccaacgtagtataattcatacaagacataatattcacagttgggataccgaatagcattataactgacctgagatccaacttcactagctctgaattcgttgatttatacgaacaatgaagtatccagatcaagtatgcatcagtagcacacccaagagctaatggtcatgtggaaagggctaatggaatgatactggaagcactcacgaagaaagtattcaacaaga

SEQ ID NO: 62339 - DNA, 387 bp, Zea mays
agcttcctgtccatgatcccggctggtatatggtttttctctaaagctgccctaaactccctccactccatctctcggtcctctggctgcatatcaagaaaatgatcccaccaagtccttgcacgcccgcgaagctgctgggcggcgaacctgactatggagacctctgaacacactccatgaagcagtgggaatttggattctaccaccctcaaccacacatctgcatcaattgtgtcctccgccctggtaaacaatggaggttgagtgctgaagaactcctgataggtaacagcgacggtgtgacgctgatggtcatcaccataatgctgaggtggaggctgacgctgagccagctgcctcaagatctcattctgctgagccata

SEQ ID NO: 62340 - DNA, 387 bp, Zea mays
  unsure (1)..(387): unsure at all n locations
gtcagtagaagccaagaacttccaaccttatgtgtgcttcagccaaattgaaatgagccccaaatattggcttgtctgacatttccttctagagggattggtgatataaaagaacaagatgcttatggcaggtgcaatccctagcaaagaggccctcactaccacatttgtgcaaactttattgcccttaagtggtggaggcttgcgcttacccttttcttttcctctcttatggaaattgcgcttggtgaatatgcgaagtccattggaattcttgaaatttttcttgaatcccttcttactatctgacttatgaacattggaataaaccggcagtgcagcataacccggagggcgctgctgatcattatntataagaaactcatg

SEQ ID NO: 62341 - DNA, 331 bp, Zea mays
  unsure (1)..(331): unsure at all n locations
gcttctggactaatcggccacctcctttcttttctatagtgcacttctcttcaccacgcgcacatgtgacatgcctcatggtcgtcgccgcttcaggcacccttccgtggcctcacctccctctcccttnctcctaccaccacgtgtgacgcctctaacgtcgccgcagcagcaacagacgccaccacctccacgtatgacatccagatcttcgagcccacctccatcgaagagcgtcactgcctcctgctccagcggcgtcgcctccgactcgccgcctnccatgcctcgcggnttgccattgcctcgcacgtctccttcaaactcatcg

SEQ ID NO: 62342 - DNA, 333 bp, Zea mays
agcttgcttctcgagaaactgggcctcggcttatctttgtctgtccgatgcttgaagaggccctctcgcgatacatgaatcctcccgggtcagctgcccttgccccaagctgggctatggcgaagcgagatctcgtccctttggtggaccgagcctttgacttaatcgcaccaattaagcctttgcagctttgtgctgatgggggttaccaccttgaaattatgagtcttgggggtacccctaattatgggccccgacacttccgctctgtcaactgaaggcccgccgtcagataagagtcatgccatccttgcttatatgctcctgcgatac

SEQ ID NO: 62343 - DNA, 453 bp, Zea mays
gcagcttaaatgtgtggcatcaatcactatataggggagatcgaaagtgcattcatgccttttgtgagtattggtgatttggataacaacacatttaaaggtctaacaagtttgctaagtgttaaacacgaaaattagtatgatgaacatacttgaatagtgtataatgatcagtgaacaaggttcaacacaaggtcaaataaccagtgagacaatgcaaatggatataatatgggctctatattgcgttgaatatatggacaagccctgagaaataactatgcataaatatgatcataatagaggctgaagtgattaagaggattggtcaagccaaagtgaataagatatgaggaatcgtgaattggcttgaccatattactattaggtcatatatgaatatgtgagaatcatactagagcttgattgatcttatcagtgatatctagatga

SEQ ID NO: 62344 - DNA, 364 bp, Zea mays
  unsure (1)..(364): unsure at all n locations
agctctgcatgaaggagaggtgtctgcatgcattgtttcatgcaccactttagatgcatacttgcatgcatgatgcgtgtgcacgtttacgggttgcatgcacactgagactggctgcatgctaggaaagagcggnggcataaatatggtctacattatactcttaatagttagtagagatagtgggtcaaatgcatctttggtatgtgcttattcagccatgcatgcagaagccatgggtaaaactatattatagagtgcgagacaatgcattataaaataaaatctactgcacgggtcgccatcacgtcagatgtcaaggcatctcttctccgaatacaagactcagcttcattacaaacgc

SEQ ID NO: 62345 - DNA, 381 bp, Zea mays
  unsure (1)..(381): unsure at all n locations
accttcatttcctaaagaatgactttttttctttgtcggttacttttcggctgcaccggttattttccgtgaagttatgcattccctaaggaacgtcttttgaacttcttcgccttctatttcggcggtatttgcgttgacttttcgtgcttcaccttatatttccgcggtatttggctctgcattccctaaggaatgacttttgagcagaaaacttacgctgcgctcccttaggaacggcttttcgaagcatcggcaaacttacgctgcgttctttaagaacgactatttgtagcttcggtgaaactcttactgcgagttttagcactgcattctcgaaggaatatctncttgtagcttcggtactctcgtgagtctatg

SEQ ID NO: 62346 - DNA, 268 bp, Zea mays
  unsure (1)..(268): unsure at all n locations
cgagcagcaccgacangccggacgggagaacctgattgggacacagccacaggctgcagagaaagtccggccgaaaaagaccaaaaggcacaaacgacgcagaaaagaaacccagacgcaggggccccacagaaaaaggtgcccgagccaacaaaacgcgcaacagaagcccacaacagggagcgggggccgaagagggggctggcgaccagcatccgcgcaaaggaacacaaaaagcaaatccagaggaacacaacatcacacacga

SEQ ID NO: 62347 - DNA, 82 bp, Zea mays
ctgcgtacaaccagcgtttaaggcaccataactgcttaatagatacccccccctgcatcatgcaaactgtgtattcttaaca

SEQ ID NO: 62348 - DNA, 343 bp, Zea mays
acttattagggtaaagaagttacctacatctagaattctttctatactagatcaagcacttggcctatactagccatcttttatcatccctggagttcacttgtcactacatggaggttagtgatcaagtcttcatatccaagaagaaacagcgatctgaatcgatcgatacccagttggggatctccaaccacacaacatatgtagcacttaaccctcgcatatgtcaactcgcacctggatttcttaagacacagaatgggtcatgccaaccgagagaacatatactccaccgttctgcctctttgcacgaaggggacacgctactctcgccatacttcac

SEQ ID NO: 62349 - DNA, 417 bp, Zea mays
cagcttctcacaaatgaacgtgaatagatattttctttatttatttgggattcacgtgggtcaagttaaagcgactaaaatctaagaggccgcggaataagggagaaatggggagagcgagaccgccgagaagaaaaagaaccgtaatcacagattcatgggtatcctctggcgggacagtgaccccatgacaaatccgccaagaacaaagctccctctggggaaggacccccatggacatgaggtggagaaagtcgggctccgagacaacagacatatggttacctgcgaaaggccactatctgttggggtcgatgggaggaatcaccgtagcagatgaactcgaggcctttctcttgtgcgccatctcaactctactggcgaacagagcgagagccgaatttgctagaggatctg

SEQ ID NO: 62350 - DNA, 439 bp, Zea mays
  unsure (1)..(439): unsure at all n locations
cagcatcaagctngcagaatgtttgaaaactactattttgtttccactgcaccaatattggtaatgccagacattcacaagggatttgatgtgtattgcgatgcatcacatcttggacttggatgtgtgctaatgcaagaaggaaaagtgatatcttatgcctcaaggcagttgatgaaacatgaaaagaattatcctacgcatgatttggatctatctgctgtagtgcatgctttgaagatttggaggcactatatgattggaacaagtgctaaatcttcacggatcacaaaagcttgaaatacatattcactcataaagaactcaacctcagacagagaagatggcttgagttgattaaggactatgaattggaaatacatatcactccggaaaacaaatgttgatctgatgcttgagccgtagggtcagtgaacaa

SEQ ID NO: 62351 - DNA, 484 bp, Zea mays
ttaagtcacctgcggcatgcaagcttaaacatttatgagggatgcgcctacttatatcatcgcacacaaagacatatatgctatatgaacaagttgaacatttagaatggcattcacacaacagttgtgattcggtatggcttgctgtcacatggtgatccccatctccaataatctgtccatcacgatgatctccatctccatgatataggtatgccatccttcaggtgatgagtccttcaagacctatctaacgtatgctggtgaacaaattacatatacgctttggatcatcacatgttgacacgcaggtcattacattaaatttggacaatacatatggctccagccgtattgtccaggtcacgacacgcaggtcctgagtaattcattaatatgcatcatatacacaatagccataccgatcacaagatgccctgcaaaaacaggttagacaaacatgtttctatatgttcgccactac

SEQ ID NO: 62352 - DNA, 426 bp, Zea mays
  unsure (1)..(426): unsure at all n locations
agcccgcacacctagcactttagaatatctttgattctatctctcttatacgctaagactaatgtggtttcaagtttatttcacaccaagtcataggtatattgaaagggaattggagtcttccgcgaagacaaaggcttccactccgtaacttatactttgccatcactccgagcaactctcttctctntggcggagaaatgagcatcctcgaaaagaacttcattcttgtgggagagagtaaaagctcaaacgcacaacgacttcgcctttggtataatcttaactcacttatttatgaccaaagggaaagattgcacttcaagggctctaatgattccgcttttggcgaatcatgcccaaaagggggagaaatgagccctaagcaaaacgaccgccccaccccaccaaatcaaaaaactatta

SEQ ID NO: 62353 - DNA, 376 bp, Zea mays
  unsure (1)..(376): unsure at all n locations
cgcatgccagcttcacgccctagatgaccggacgttgtttttttctgaagngggcgccgcgaggaaagcgcaggctctcgtggatggtgtatacaactggtagaggtttccggagctattgcacctggcgatcactctcctggtttgctaatctcttctccagaatgctcaaaggatcaaactccatggagcagttattgtcggtggtgaaacgacggatagaaatcaaattcttactattttgggagacactaaacattattgataacaagattgcgatgccgtaagaaaatgttgagatccgtggcagtgcatgaagcaaagcccatttccacatgatgaataagcgtaatgaaaacgctgcgaaggtggaagt

SEQ ID NO: 62354 - DNA, 368 bp, Zea mays
cttcgttttctcaacgaacatgcccaatccactactttaggtccaaaactcattttggggtggtttcgcgcaatttcgttgccgcacgttacccattccaaaaacgggtgtcggggtgcatacaaacaccagtttttgcaacccgaaccatttcttcgttttttacaacgaacatgcccattccactactttatgtccaaaactcatgtttggggtggttttgcgcaatttctgatgcggacatcaacaccaacacgagcacatgtacaccagcagcaccttcttcagcccatgcgccaccccttccacctgtgccagtgactcgggcccgtgcaagagaattgaactacatcatgttgttaaagaac

SEQ ID NO: 62355 - DNA, 439 bp, Zea mays
  unsure (1)..(439): unsure at all n locations
agcttagcactccattagtttagccacacgcatattctttcatgtacacataggggagagctcggcgccgtcaaaatgaccttttagttgggacgggtgcttccgcccaatagttggagtacctgcagtagcacagtacgcgcgcgtcatcttcttttcgcagcactattttttatggggaaaagggcaattaatgaggcgatcatacagatattgtgggctatatagtactccttctggtcattacgccaattccatatacatgcatgtacttcaaaagcagagaatgatccgaaggtcggcatgattaaccggccggtgtaggtgcagccctacttcacaactaattaatggccacactaatatatattgcctctcttttntattggttactagttagtgtacatatctttngatggaattgttccatgctaatctc

SEQ ID NO: 62356 - DNA, 358 bp, Zea mays
cccatgctagtcttagctattaagcatgcatctagaccggcccggttctttgcgaaatcaactaaataaagtttgtcggctaatacacccttaaaagctagggaaccatcacttcttctaaagacagacacatctacatttgtaaatagacagttataccccatgttgcataattgacttacagatagcaaattatatctcagagactctactaaaaacacattagatatggagtgctcattagaaaatgcaattttacctaacccttttaccttgccttgattcccatcaccgaatataattgaatcttgggaatacttgtcttgacgaggaggtgacatctcttctccccgtatat

SEQ ID NO: 62357 - DNA, 346 bp, Zea mays
  unsure (1)..(346): unsure at all n locations
cattgagtagatgtccctcgccagtctttttgatcttctcaggaaatatggggacaccttataaagggagttctgaagcaccttataaaatgctcgcgcgtagtgtgatctgtggcaactgtttgcttgtaatgaacttgtgtgatgaataaaataacgtgtttgaaaaaaatatggcatatgcatagtaataatccttttcccctagcagatggcttcggataaaaccacgcctaccacctcagggattggaccaaggtcttccctangtgctgaaggagaagtcggtggagaagggagtgaaacccacctccccacaccttcggagttgacattagacttagcc

SEQ ID NO: 62358 - DNA, 482 bp, Zea mays
  unsure (1)..(482): unsure at all n locations
atcctctcagtcacctgcggcatgcaagcttctggcctctaatactatggatttgttgtgtaatgatttactctctttaacgactaatgtttatgtttcggagaaataacctctatgttatgtcttaaagaatgaagataaagaagtgtcctcaagtgttgatcaaggacaacttggcacatatggctaataatatagtttggagaatcatgattcacgagatagcattatgccacagagaacgacaatcaagacatttcctagggcccatgacaagaatcaagttagtgaactgtgtttctctatcgtcaggagatattcataagtgtatggagtgcaagtctgctacctaaagctgaccaagatgtctatttatagacctttaatgaattctaacacttatactttggtggaataatattggnggcaccacacatatctgatgcactgctggtgtctacaatagacacatatgatgatct

SEQ ID NO: 62359 - DNA, 447 bp, Zea mays
  unsure (1)..(447): unsure at all n locations
gcttatcttggatgattcatcatatcctattcttttttttatctcatcctanagcaataacaagggttctaatccaaaataatgagatcttatctagtctaatctagtcacgcgaagataacttaaatgtgatagaatgatctaacctaacaaaagctaacctcaagttaagctaatctaatgtaagttgcttaagcaagttggattatgctagtgacataaattataccctactcctataaacatgattaacctaaaccgcgtccctataccaactcagccatatactagtacttgactgatgcgttgggttgcataatctgtatagatcaacatattaatatataaacatccaaaattttcactatcataacttatcctactcacatctacctacttgttcctaattcggataacaactctcaggatgaagaccaaagatgatcg

SEQ ID NO: 62360 - DNA, 424 bp, Zea mays
  unsure (1)..(424): unsure at all n locations
agctagacaatgacatcatgatggaagccaatgctattcttattgctanggcggacctccaatataaagcatgctactagcaaattaaaatttacaatttccattccacgctcattgactctactaactagacgcgccacgtgaacattttggcttttaaataaacgcaggtgatcacggatagcatcaacattaatatctctacacaccatgcatataaaaacatgatcaacacgggaagtagagggcttgcaagattttaaaccatcaatctcaacatgcaaaataacactcttatctctaagactataaatagaaacattgcaaacatctaaatcgctaacttttgaaataaaactagcatcttcaatcatagggctagagattgaaccattcaatatatcaatccttaatatcaaactag

SEQ ID NO: 62361 - DNA, 431 bp, Zea mays
  unsure (1)..(431): unsure at all n locations
gcttgtgaagaatcttcattccaacatgtgctattctgtgatgccacagccaccccatgttagtcttaacaattaagcaagtgtcgagttcaactctatcaaaatctactaagtataaatgaccctctaacgcttccttaaatgctattgaatcatcacttcttctaaagatagtaacacctatatcttgtaaaagatagttgtagcctattntacataattgcgaaactgagagcaagttataatcttaagaatctaccagaaaaacattggaaatggaatgggcgggagatataacaattttacccaatcccttgaccaaaccttgatttccatccccgaatgtgatagctcggtggggatcttgggttttctataagaggagaacatcttctcccctgtcatatggttcgtgcacccgctatcgatga

SEQ ID NO: 62362 - DNA, 457 bp, Zea mays
  unsure (1)..(457): unsure at all n locations
agcttgacattgtctcccttttggaatccaatgtctttcttaatgccaggcgtcttccactatagagcatgcttttagcaaatttaaaattttcattttctaaggcatgctcacttaatttagcactaagatgagctatgtgatcattttgttgtttaattaaggctaggtgatcatgaatagcatcaacattaatatctctacatctagtgcaaatagtaacatgctcaacggtagatgtagaacgtttgcaagtatttaattcaacaatcttagcatgtaaaatagcattctcatctctaagattggaaatagagacattgcaaacatttaaatctttagccttagcaattaatcttcattctcaattntaacgctagagagagaagcattcaatttgtcaatcttagcaatcaaattagcattatcattgttaagactaacaattgaatcatca

SEQ ID NO: 62363 - DNA, 434 bp, Zea mays
  unsure (1)..(434): unsure at all n locations
agcttgtatgatgtacgagagtatgcgtcatgcttgcattgttccaaatggaaagatgtgttgcattntatacattggcaatgacaggggtgattgtggtgattcttagaaagcgagaggtgtaacataatttcataattttcacagagatttattaacttgatgaaggggcttctctatgatggctgaatggctctgagctctccagtgcaagacacactggttgctccatttgtttcctccactttcacactgccatcatatggacaaggaatggaaagctgttgtatattcttttgtgggaaggcattatgctacgcgccagatttagtttgttaagaagtactaaaagttacgcaatatttaaggaggcttatcctnccgggagagtatcttatcccctagaaatctgtatatggtaggcacctaactat

SEQ ID NO: 62364 - DNA, 394 bp, Zea mays
gagaaagacaggggttgtagcgcatgccaagcaagaaagcaagttggtgcccatcatccacacgagaacatcatgacgaccgacaggccactagagctcctacacatggatctattcggcccgattgcttacataagcatcggcgggagtaagtattgtctaggtattgtggatgattattcttgcttcacttgggtgttctttttgcaggaaaaatctcatacccaagagaccttaaagggattcttgagacgggctcaaaatgagtttggcttaaggatcaagaaaattagaagcgacaacgggacggagttcaagaactcacaaattgaaggcttccttgaggaggagggcatcaagcatgagttctcttctccctacactccacaacaaa

SEQ ID NO: 62365 - DNA, 371 bp, Zea mays
  unsure (1)..(371): unsure at all n locations
cagcatgcaagctngctggacgncaccctcgaacctgagacatggttctgtcagtccccgacgngactatatggacgctcgtcgaccaagagggactgactgattcccatcccacgtcatttggattcagcctcaacccggctagcgaccccgctttggcgggcgctctccgagaggcgagtccaaaccctctggggtatcgaatgcggtcaccttgggaccggctgacggacatctcgacctacgggccctccgggttcgaggaagacgacgagcccaacttctggtgtgaattctatggacttgggaaccccagagccatgcgggacttcatgaccgcatgtgactgctgtctctcccactgtaccaac

SEQ ID NO: 62366 - DNA, 430 bp, Zea mays
  unsure (1)..(430): unsure at all n locations
cgcagcatgcaactggcaatcactccccagacacctcctgttattgtacatcccactcnaccatccaacccggtggcaaggtggaaggccaagtcacaccatcaaccatatcttgcaaaatacctggaaaagaggtgtcacaagcaagactatgtatactaatactcaagtagacttacatggtgtgaggaagctactccttacctctagaccatgaagctattcggctgaaggggtaggtttcccaaaagcactacctgagactaaatctagtgtaacttttcaagtccaagagattctttaactaacttagcatccttctagccacacatggtaaagagcatttattgcaaacaacactttatatcatgaaacctcaatacacttcttagtcgatgcagcaccacttatcaagaagtctcattatcta

SEQ ID NO: 62367 - DNA, 444 bp, Zea mays
  unsure (1)..(444): unsure at all n locations
agcttctaaagggagagcacattttaggattaacttatgttcattntgagaaagacagggattgtagcgcatgccacgcggggaagcaagttggagtccatcatccacacaagaacatcatgtcgaccgacaggccgcttgagctactccacatggatctattcggcccgattgcttacataagcatcggcgggagtaagtattgtcttgtaatagtggatgattattctcgcttcacttgggtattctttttgcaggagaaatctcatacccaagagaccttaaagggattcttgagacaggctcanaatgagttcggcttaaggatcaagaaaattagaagcgacaacgggacggagttcaagaactctcatattgaaagcttccttgaggaggagggcatcaagcatgagttctcttctccctacactccacaacanaatg

SEQ ID NO: 62368 - DNA, 430 bp, Zea mays
  unsure (1)..(430): unsure at all n locations
cctgcagcatgcaagcttggaaggttcttcatcctcacatgttctattcttgtatgccacagccagcccatgctagtcttagcgattaagcatgcatctataccggccttctcttatgcaaaatcaactaaataaagattgccgactagtacacccttaaatgctaatgaaccatcacttcttctaaagacagacacatctacatttgtaaatagacaattatatcccatattacataattgactgacagatagtaaattatatccaagagactcaactaaaaacacattagagatagagtgctcattggatattgcaatcttgcctaaacctttcaccttgccttggttcccatcaccgaatatgatngaatcttgagaatccttattcttgacgtaggaggtgaacatcttcttctccctcgtcatat

SEQ ID NO: 62369 - DNA, 358 bp, Zea mays
  unsure (1)..(358): unsure at all n locations
agcttggatgttctttatgaagaatggagattctctcaaagcatattcttctttacgaagcatganaaaaagggaaggtgttttttcgccgaaggctcataaacgatatgtacataaagtttcatgcatcgcaaagaactgaattaaaaaacaacttacatattagattcaaaactatacacattaaatattacagacttagttcagcaaatgttacattgataacctaaaaatatttctacaataactactattcttccttcagaactttctctgcaacttcgttaagcaatttgttaacaacttcatcaacaatagcttcggccggatggaaatttctattgtntctttgttctgg

SEQ ID NO: 62370 - DNA, 459 bp, Zea mays
  unsure (1)..(459): unsure at all n locations
agctntcatccttcttcttcacagatagtgtttgtctatccccaagcaaagtgcttgngcgaatgaaacccttatccaacaattcttgcgactgcttcttcaattctgccaactcagcgggtggcattcggtagggcctcttggaaattggggccgttcccggttgcaactcgatggcgaattcgatatcccggtccggtggcattcctggcaattcatcaaggaagacatctgcatactcacagaccactgggatcttcttcaggggtaactccgtcatagagaaagcacatgactgagaagaaccctgactaggcagaattaaagtgaaattcccgcagaatggagaattaacttccacggttcggctggctacatcaagcgcaacttggtgcaaggtcatccaatttgcccctagaataatgttcacattttccactcccaacacaagaagagtgg

SEQ ID NO: 62371 - DNA, 440 bp, Zea mays
gcttggtgccaatggagaagcaaatattcttgttgtttggctgtcaaattgtttgccatagtcaactgtgagttctgacgggactctgaagcggctaacaatgtgttgccagaagaatttctgggcagtcttctatgttatagtggatacagccctcgcctcgatccatttggtaaaatattcgacagcgacgaaggtgaacttgaggttcccctgggccgtgggtaggggcccgacgatgtccatgccccaacgctgaagaggccatgtgtgggcgattaacttcttgaactgcgaaaggcttcccgatcgtggagaaaatatctggcaggcttcgcaggaccttgtgactcgatttgctgcgcatatcatggcgggctagtagaaaccttgacggattacctctgcggctagtgccctacgccctacttgagagccgc

SEQ ID NO: 62372 - DNA, 406 bp, Zea mays
  unsure (1)..(406): unsure at all n locations
gtactcatccattntctgaagcagcttctctagagttnggggaggtttcctaacgaagtattgaaccgtaggtcctaaccgaagacccttgatcatggactcaatgataatttcattgggcactgtgggcgcttgtgctcttaatcgcaagaaccttcggacatacgcctgaaggtattcctcatggtcttgtgtgcactggaacaaggtctaagctgtgattggcttcgtctgaaagccttgaaaactggtaaccagcatgtccttgagcttctgccatgacgtgattgtccctaaccgaagagaaaataccatgtctgggccacgtttcggactgccatgacgaaggactttgccatgacagctgtgttgccttcgtatgaaggatattgtgcatcatagctca

SEQ ID NO: 62373 - DNA, 434 bp, Zea mays
agcttgcacttacgaccaaaccgcacgcgcatccatattatattctttggctcaacaatagtggtgaggtcaaggtaaccaagctggtacaaattatatttgctatcggatcatatcgtgatgttgtcgactgtgatgatgtgcctattggatgcttgtaataatctgctacgtagaccatggccatctgattcagatatgatgcatcatgggagatcaaatacatattctctcatataccatgataagaaaattattttgctttccatgttccctgaggctattgtgcgtgatgatgttgcctaatctaccaaagcttaaactgagaacaacaagaatattaaagtttgtggctataacaaagatgggatataattagaggacattgttgcttgaacaaatactgatgttatgaattattgcttcactactgt

SEQ ID NO: 62374 - DNA, 433 bp, Zea mays
  unsure (1)..(433): unsure at all n locations
accttaagtcaccgcggctgcagctattttctggtcgtgccgggcctatttttttgttcgtgcgccatgggcgaacccctcattttcggtccagacgcaaggccgaacagccatgccggccgtcgccttgcgcctccgtgccgttttccctccggatcgccatgcccttcacccaagacatacatattaccttcggtgtctttccacacgctnggacttagcttactttcggggccatgcccgaacctcggtttttcggccctgcgccatgggcgaacccctcgttatcgggccaaacgcaaggccgaacagccatgccaccccgtcgccatcctgcccttcacccaaggcatacgtcgcagcttcggtgttcttgcacacgcttggtactggcttttttatggtcggcacgaacccacagcggcttcggcac

SEQ ID NO: 62375 - DNA, 448 bp, Zea mays
  unsure (1)..(448): unsure at all n locations
catgcaagcantctctncaacttgtgtgtaagaacaatctcttattcactaaggagacttaatcaccaacatatggtatgtaatacccctatatattctacagcccaaaacctcatggattaagcacaattgagctccaaaaacagctatatatattgaaatctcagtttcagtcactgttccaaatctgaaaacacaaaagtctgtcaaccccactttggatcacctcttctcctaaatgtatatagttccagcgctgccacacttaataaaagtgttcttctatacgtatcccacaatttttctatagtggtcattaaccaaaacctcttggattccaactacaatagcccaaaagttgctccaattgctgaaattcagactccgaattctacccagtctgaaatcgagaaactctgttagctctactctggaccagcatttctct

SEQ ID NO: 62376 - DNA, 296 bp, Zea mays
ctgccgcatgcaagctatgatcctctgaagtggtgaacatgttttttttgctaataatcgaactaaaccttagagtccctagaattacaaatgtactgatacaaatatatccctcggctagcattgaccagacgctacctaaccaaggatggaaacaatgtttctcctctcgtaaaatatatctaccattcccagataaactggggcttactccccttattctacaaaaataagactctcagctagctatctttgaactaaaacgtgagacataaaaaaacggaggaagtaatttg

SEQ ID NO: 62377 - DNA, 451 bp, Zea mays
  unsure (1)..(451): unsure at all n locations
ggatcttaagtcaccgcagctgcagcttgttccttacttaaaggagcgctttctttttttatgtgagaccgcgcgnccacatggcgttagatatttgaagtgcatttttttgggtggtaatatgactccactattcacatgaatcagttaaaagtttggggccagctagttcgtgtttcatatttgagcaaaaactgccaactctgtagcaaattatttcattgnttctggatgtatgctgcactgcaaccccttggtcattgttttgtatttatgcacgtaaggggcatgaattattcttaccattccagcccgcctatcattcatcgagattaaaatcatctaaccttttggtcgacaagaactggattgtgaaggtaacattgcggtttatttgtcttccaaatatgatgaattttcctgcttgcctggtctcatttcttctgactca

SEQ ID NO: 62378 - DNA, 421 bp, Zea mays
  unsure (1)..(421): unsure at all n locations
agcttatgaagatacttcatcccatcatgttctatttctcggngccggagccaacccatgttagtcttaacaattaagcaaatatcgagttcagctctatcaaaatctactaagtatagctgaccctctaacactcccttaaatgctattgaaacatcacttcttctaagacagtgacacctacatcagtaaatagacagttgtagcccatttgacataattgagaaacggaaagcacattgttatctaaggaatctacaagaaaaacattggaaattgaatggtcaagagatattgtaattttacccaatccttngaccaaaccttggtttccatccccgaatgtgatagctcggtagggatcttgtgttttctcataagaggagatcatttatctctcccctgtcatgtggtttgtgca

SEQ ID NO: 62379 - DNA, 273 bp, Zea mays
  unsure (1)..(273): unsure at all n locations
ccttagccaacccacgtgagttttagtcactaagcaagtgtcgagtctatctccatctaaatctaacaagtgtagctgacgctctaacactcccttagaagctattgaatgatcacctcttgtaaagacagagacacctacaatcattaatagacagaggaaacccatttgacatattcgggaaacagaaagcccgtggtgatcttaatactttacacaaaaacatctgaaacacaagggttaggagatatnccaatttacacgaatctttga

SEQ ID NO: 62380 - DNA, 466 bp, Zea mays
  unsure (1)..(466): unsure at all n locations
agctgngaagggtcttcatccacacatgtgctatgtttctatgtcacagccagcccatgctagtcttagctattaagcatgcatctagaccggcctcttcttttgcaaaatcaactaaataaaggttgccgtctaatacacccttaaaagctagtgaaccatcacttcttctaaagacagacacatctacatttgtaaatagacagttatatcccatatgacataattgactaacagatagcaaattatatccaagactctccactaaaaacacattagagatagaatgctcattagaaattgcaattttacctaaccctttttaccttgccttgattcccatcaccgaatataattgaatcttgggaatccttattcttgacgtaggaggtgaacatctntcttctccccgtcatatgggttgtgcatccgctgtcgataatccagcttgaacccccggatgcat

SEQ ID NO: 62381 - DNA, 449 bp, Zea mays
  unsure (1)..(449): unsure at all n locations
agcttatgaagattcttcatcccaacatgggctattttgttattccatagccaacccatgttagtcttagcaattaagcaagtgcctaattcagcttgattaaaatcaactaagtatagctgaccctctagcactcccttaaaagctattgaatcatcacttcttctaaagacagtaacacctatatcagtaaaaagatagttgtaacccatcttgcacaattgagaaacagaaagcaaattttaatctagagaatctacaagaaaaacattggaaatagatgggtaggagatatagctattttacccaaacctttgaccagaccttgatttccatcccanaatgtggtagcttgttggggatcttctnntttctaataagaagagaacattcttttcttccctgtcatgtgggttgtgcacccgctatcgattattccaacttgaaca

SEQ ID NO: 62382 - DNA, 419 bp, Zea mays
gcaagctgctcatacctgacaaagcaacaacatttgttgtttcatctctgcagaccataccagtgacttggcctttcgcgtgctggggactaaaatgattggacctttcaagaaagctcaaggaggatacactcacgccttgggagcaaacgacaaattcactatacggatagaagtccagcccattgcttctttaacctcagctaaggccggggaattcatactagacataatattcagattcgggataccaaacagcattataactgacctacgatccaaccttacaaggtcagagttcttctacttctgcagcaaaatacattctgataagtatgcatctgtgcacatccaaagccaacggcatgtgagcgacgcacgggatataccagaggactcacgaaaaagttccgatagaa

SEQ ID NO: 62383 - DNA, 334 bp, Zea mays
cacgggaacatacctgggaagcgcgtccagccccttcggcgactcaacctcccagtctggtactggacaccctccaacttccgaagggagaccctgacgttcgaagtggtcgcggtcccgaggaacctaccaccccgcgctagggaggccatgctacgcgaagttcatggccgtccccaactacacctacctgaaactcaagatgccgggccccaacggagtcatcaccgtcgggcccacgtacaaacacgcgttcgaatgcgacgtggagtgcagggagacgccgaggccctcgccgagttcgaggccctcatcgccgacctcgagaacctct

SEQ ID NO: 62384 - DNA, 329 bp, Zea mays
gaaaacacaacacggggcttttgtgggcccaccccccacgggggcggaacaaaaacgcaagaacgagtccaccacaaacaaaaacaacaacaatacgcgatcagcgaacacgacccatcaaacgccacagaagcaacaactcagcgaaagacagaacacccacaccgcaaaagacaaacggacccaaccgcaaaaagggaaacaaaagcacagggaaccaaagaacgacacacaaacacggaaaaaaaaggggcgcgaatagcaagcgaccaagccgcgaccaaacccgaaggcaccccgaaggaagcccgggggacacgacccccaag

SEQ ID NO: 62385 - DNA, 448 bp, Zea mays
  unsure (1)..(448): unsure at all n locations
ngacttgggttttaaatgattcaactgagacctgttttgtgtcttgcacgagaaaggagtctcgggtgagtgtctccgtctgagtcgaataaagaccgtgtcgatgtaagcttgatgaccgaggaccctttaactggtcacatgcctcgtcatgggtaagccttgcctcgggcagactaagaccagaataagataacacggaatgggcgtggagcggtggcgggagtaacgtgtaccctccgtggcaagaggctggacggtggtgtatctgtgctctcggttcacgtgaacctgatctggtcttaagaaccccggtggcgggttgacatatgcaagggataagtgctacatatgtcgcgtgattggagatcctcagctgagtataatcgattcggatcgcctgaccttcgctggtatggagacttggccctgacctatacgtagaact

SEQ ID NO: 62386 - DNA, 434 bp, Zea mays
agcttctaaaaagagaacacatgttgggacttattttgttcattttgagaaagacagggtttgtagcgcatgtcaagcacggaagcaagttggtgcccatcatccatacaagaacatcatgacaatcgacatgccacttgaactactccacatggatctattccgcccgatagcttacataagcatcggtgggagtaagtactgtccagacattggggatgattattctcgcttcacttgggtgttcttgttgcaggaaaaatcacaaacccaagagaccttaaacggattcttgagatgggctcataatgagttcggattaaggatcaagaaaacaagaagtaacaacgggacgaagttcaagaactctcaaattgaacggcttcttgaggaggagggtatcaagcatgagttctcttcttgctacacaactc

SEQ ID NO: 62387 - DNA, 415 bp, Zea mays
cgcagcagcagctgccaccaaggaaggcacagaccattgtgtgtcttataacgccataaatacaccggtgaaacatgatatcatgaccagtcgctatgacacaaatcgacgagcaccagactaaagggcgacacaattcaaaagaagagtaaaccataaccaaactgaaatacccaaagagagaaagaaagcaacgaaaacactatggtgacatccagcagcccctcctatgcagaaagcacgaagaccacaccctcaacaatactcttttgcgcaagagccaaaaatgctggtggcaagacataaaacgtggaaaaaacctgaccggacctgcagcaagaatttacaaaactggaggcacacaaaaatgcatacaggacaggcccccaagaaacagacgcatagcctgacacaa

SEQ ID NO: 62388 - DNA, 424 bp, Zea mays
  unsure (1)..(424): unsure at all n locations
atccttaaagtcacctgcggcatgcaagcttgaagccatggtaagtagcatatgcctatattatacgaattgactcgagcctagctacgggtgcatatgtttcaccgaaatccataccttctacttgggagtatcccttggccacaagtctagctttgtttcttgtcaccacaccatgctcatcttgcttgttgtggaagacccatttggttcctacaacattttgattaggacgtggaactaaatgtcatacctcattcctagtgaagttgttgagctcctcttgcattgccaccacccaatccgaatcttgtagtgcttcctctaccctgtgcggctcaatagaggaaacanacgagtaatgttcacaaaaatgtgcaacacgagatctattggttacccccttatgaatgtcttcgaagat

SEQ ID NO: 62389 - DNA, 442 bp, Zea mays
cagcatgcaagctaaagaagagctatgaccatcttcttttgttttagtccaagaccatcacggcacaagcgggggattaaagcacacaggagccaaatgaggaccttcagccgggtgtccgaaggagtctcacgcttcaagcgtaagcatccgaaggctaggatgacatcatcatcgacgctatggacaaagggctgaagctatgagcagctgctcagcaatttgaaggaagcatcctcactcacttgaaaagacgcagcgaaaatggacgagtacataaggggtgacaatgaatcacgcccaagaacggaggaagaccacagatacactgaagacgctaggggaaaccgaggaaagtatcatcccacgcatgtgtgaagactacataaccccgggcaaggagacgagaagaggcccagcattagaggcagaccgggcagca

SEQ ID NO: 62390 - DNA, 453 bp, Zea mays
  unsure (1)..(453): unsure at all n locations
atgcagcttctaagggagagcacatttaggactaaccaatgttctttttgagaaagacaggaattgtagcgcatgccaagcagggaagcaagttggcactcattatccacacaagaacataatgacgactgacaggccgctagagctcctacacatggatctattcggcccgatcgcttacataagcatcggcgggagtaagtactggctagttattggggatgattattctcgcttcacttgggtattctttttacaggagaaatctcatacccaagagaccttagagggattcttgagacgagctcaaaatgagttcggcttaaggatcaagacaataagaagcgacaatgggacggagttcaagaactctcagagtgaaagcttccttgaggagganggcatcaagcatgagttctcttctccctacacgccacaacaaaacggtgtagt

SEQ ID NO: 62391 - DNA, 448 bp, Zea mays
agcttcgcacctctgaactaactcggctgcatcgttctttgctgttggccaatagaatcctgacctgaagaccttcccgactagtgttctggaggctgcatgtatcccacattgcccaacatgaacctcctccagaagttgctttccagtggacgggaggatgcacttcatgaggacgcctgatgtaccccttctatacaatgtatccccaatgagtgtgtagtgagccgactgtctggcaatgcgctcggccgagttcttgacatctggttcttcttcattctttatatacttgatgattggccttctccagtcatcagagtctgactcgggttgatatataatgttgcactcttctgcttgatccattgagatactcggctgtagtatttcttgcacaaagacttcgggtgggacctgagtttactggatcctacttggacataca

SEQ ID NO: 62392 - DNA, 434 bp, Zea mays
  unsure (1)..(434): unsure at all n locations
gctgtgagcagtacaagtacagaagagagaatgctgcttcttctgatcaaccgaagcccatgcttctatgtgaagacatagcagagcaaaaggtactgctggggtctcaattatctgaagagcacgaaaaaactttgataaagtttttattgaacaacaaagatgttntcgcatggtcggccaatgatctctgtggtgtcaacacggatgtcattgaacattcacttaatgtcaatccatccttcatgcccacaaagcaaaggctttataaaatgtctgatgataaagccgaaggtgctcggaatgaaataaaaagacttctcagtgctggtgtcatcaaagaagtaaaatatccacaatggctagccaatactgttatggtgaagaaggccaatggcaaatggagaatgtgtattgatttcacagatctcaac

SEQ ID NO: 62393 - DNA, 482 bp, Zea mays
  unsure (1)..(482): unsure at all n locations
gtcacctgcggcatgcaagcttggagccttggacgtgatttactagtttggctggttatctgcatactactgccatgtgtcccaaggcctatgtacatattatgcggcgacgactggttatctgcatactactgccatgtttccactatatgtttcccacagagggcgacgggggtggtaagtgcattggaccgcacggtcacctacctattgtgtgagtgcttatgcggcgacgactgggaaagcgcttgagcggcgacggcggcggagtgtagcctccttttctggcttcaacagcgcacgagcgtgctccctctctcagctcangcagcgacgctcgtggcgacgtgcgggcgtgatccctttctcagctcacgcgacacgcgggcatggagcanttgggtgtatgtgtgcttcctcttgcctctcttgctcagcacagatggcactcactctctctcatgcatggtcgtgcaacccct

SEQ ID NO: 62394 - DNA, 419 bp, Zea mays
  unsure (1)..(419): unsure at all n locations
agctngngaagggtcatcatccccacatgtgcttatctgtgaagccacagccagcccatgctagtcttagccaataagcacgcatctaaaccggcatcttcttctgcaaaatcaactaagtaaagctagccgtctaatacacccttaaaagctagtgaaccatcacttcttctaaagacagacacatctacatcttgtaatagacagntatatcccatatgacataattgactaacagataacaaattatacccaagagactctacttaaaacacattagagatagagtgctcattagaaattgcaattttacctaacccttttaccttgccttgattcccatcaccgaatataattgaatcttgggaatccttattcttgacgtaggaagtgaacatcttcttctcccccgtcatatg

SEQ ID NO: 62395 - DNA, 417 bp, Zea mays
  unsure (1)..(417): unsure at all n locations
cgtcatctgataagaagataccctgtttgttatttatgatttcacgtctccaatcttcactgtaaacaggagatatgttgaggactgctctttccagaagctccaccgaaggtgcctttattgtttcgaagaatacatccgaaggtaagggcagcccctgtgctgcagacttggctagcaaatcagcatgctcattttgtcctcgaggtatattcttgacagataatccttcgaaggaggcttcgatccttcggaccgtgtctagatatctttcaagcttcggatctttagccttgcaacttttgtcaatatgacccgaaacaacctgagaatcagttttaagaatcgcccttctgattcccactgcctctaattntcgaagacccaagagcagggcttcgtactcagtaatgttgt

SEQ ID NO: 62396 - DNA, 455 bp, Zea mays
  unsure (1)..(455): unsure at all n locations
agctntatcaaatggacgtgaagagtgcctttctatatggtccaatcaaggaggaggtctatgttgagcaacctcccggctttgaagatagtgagtaccctgaccatgtttataaactctctaaggcgctctatgggctcaagcaagccccaagagcatggtatgaatgcctaagagattatcttatcgctaatggcttcaaagtcggaaaagccgatcctactctatttactaaaactattgcaaaagatttgtttgtatgccaaatttatgttgatgatatcatatttgggtctactatcaaatctacttgtgaagaatttagtaggatcatgattcaaaaattcgagatgtctatgatgggggagttgaagtatttcttaggagttcaagtgaagcaactccaagagggcaccttcaatagctaaacgaagtacattcaagacattctcacc

SEQ ID NO: 62397 - DNA, 454 bp, Zea mays
  unsure (1)..(454): unsure at all n locations
agctntatcaaatggacgtgaatagtgcctttcttttttgccaatcaacgaagaggtctatgttgagcaaccttccggctttgaaaacagtgagtaccctaaccatgtctataagctctctaaggcgctttatgggctcaagcaagccccaagagcatggtatgaatgccttagagatttccttattgctaatggcttcaaagtcggaaaggccgatcctacactctttactaaaactcttgaaatgacctgtttgtatgccaaatatatgttgatgataatatatttgggtctactaacgagactacatgtgaagaggttagtaggatcatgacacaaaaatacgagatgtctatgatgggcgagttgaagtattntctatgatgtcaagtcaagcatctccaagaagggccctttattagccaaacaaagatcactcaagaattcttgctaa

SEQ ID NO: 62398 - DNA, 393 bp, Zea mays
accataatttttggtacccccaacacatccaatctcagctggtaacccacaatagcataaaactgcaaaggcccgatgggtgcgattaaatcaagactccgtccactcaagggacacgaactcacctcgcccgagcccaaactcgggcaagggcagccgaccccggaggattcacgtctcgcccgaggaccccctcaaacgacagacacaccttccgctcgcccgaagacccgtcttctccgagaagcaacctttggccagatcgccacaccgaccgaccgtattgcaagagcatttaatgcaaagatggcctgacaccttatactaacacgcgcccttcagtcgacagagccgaagtgaccggaagcacttcgccgctccactgaccggcca

SEQ ID NO: 62399 - DNA, 438 bp, Zea mays
  unsure (1)..(438): unsure at all n locations
agcttgtatcatttagtattggaacaattggttttataccattaaaagatccaaactttagatatataccatggaccccacatgtcattgactcatgtggacccacatgtaagtgagatagtaatggtatgaatccaaagtggtgatcttttaatggtatggatccaaatttcccttctgtattttatgttatgcaaaggaaagatatcttatnntgtggcaattaataacaaaaactattcattggcctatgatgtcctggctcctaagatggtgatgtccttgcccaagacttaatagaattaatagagtatccataccaataaggtgcatcttttttataagcctatctcgaaagaaccttccagttaagcgtgcttgacttggagctaattggatgggtgaccgactgagaagttttctcagntgcgcatgagt

SEQ ID NO: 62400 - DNA, 430 bp, Zea mays
  unsure (1)..(430): unsure at all n locations
agcttacccatgatacggcatgtggtcagttaatatgtcctcgatcatcaagcctacatcggctcggtccttaaacgactcaaacggagacactacaccgagactcccttctcatgcaaggcacccgcccggtctcgtctttattacttaaattccaaagtttggtacctgatagaggtacacttttcagatgttgaacccatcacagccatgatggattcaccatcataattcttttctttgtaaaaatgtccatccagagtgaagcatcaccttttgtntaaaacataatattttgttntctaaagcatgtctaagcatcataaaaatccttttcataaaagaggtatcaaggaatgttaatcaattcttcaaggaagggaatgcataattatttaacacacaattcctatcacctaatgcatcatat

SEQ ID NO: 62401 - DNA, 457 bp, Zea mays
  unsure (1)..(457): unsure at all n locations
agctctatcaaatggacgtgagaagtgctcttcttattggaccaatcaaggaagaggtctatgttgtgcaacctcccggctttgaagacagngagtaccctaaccatgtttataagctctctaaggtgctttatgggcttaagcaagccccaagagcatggtatgaatgccttagagacttttttattgcaaatggattcaaagtcggagaggccgatcctacactctttactaaaactcttgaaatgactttgttgtatgccaaatatatgttgatgatattatatttgggtccactaacaagtctacatgtgaagagtttagtaggatcatgacacaaaagttcgagatgtctatgatggcggagttgaagtatttcttgggatttcaagtgaagcaacttcaagacggcgaccttattagccaaacgaagtacactcaagacattctaaacaag

SEQ ID NO: 62402 - DNA, 315 bp, Zea mays
ccaaacacgagcagcacagtgagtctaaccacaggtatcggatcccaacgcccagcacttagtataacagcattaacggctcttttgcaaaaacaaaaagttgcactaacccctaaagctagacatcctttttaaaacaacacattacttggaaaacattatcaataccagtgatacgacacagatccagcgactacaaacacataaataaggtgataatacatttctaccttactgcttgtcctacgaatataactgtgtctgtctacaaaaaaaacctttcccgcagggtggcatcctgcaaatcactacccc

SEQ ID NO: 62403 - DNA, 243 bp, Zea mays
ataaacacagaccatgtgcatcttgccaggcgtggaaacaggtggcaagcactcatcacagcgagatatgtgatgacgacatcatgagcactcgttctttttcacatggatctcttctgccccgtcgccaatgtcatgataggacgatgtgagaatggtcttgtgataatagatgatgattcccggtccacttgtgttatactttatccggacaaatacgacacccattggaccctcgagcgc

SEQ ID NO: 62404 - DNA, 454 bp, Zea mays
ccttctcaagcgaacacttcatcatttagagttaactttgtcatttctgctaaaaaagaaatggtgacttctgaagaaccactacaaatccatcagatggccatagtactttctactgcaatggataaactgacgaaggtactactactgccgagagtacgttcgactgaggccaccgagacagcgccaatatccgaagttatgaaacagtcatgtctagttgagacggatggaaaaactgacgaatgtactgctactgccgaagctgaatagactgttgtcgaagaagaatatattgaagaggacgaagaagactatagtattttgatcccatcgaaacccagccatctagattttgaaagatctactgtgtctgaagctgacatgcccatgatgatgaacgctggctactctgtggaagctgaaaggaaacttgcccgatatgcctgaaaga

SEQ ID NO: 62405 - DNA, 505 bp, Zea mays
  unsure (1)..(505): unsure at all n locations
catgcaagctagaaatgggttntcctccatcattgtgtgtatgctagtacaccnaatcatacatcntcgggatcagataaaaatattatggccactatatttacatcatatgtttatttggagcgatacctgagagtattaaaaggttatgtgcgaaatcgcgctcacccacaggggtcaatcatggagggatacactacagaagaagtgattgagagctgtatattatacattagtgaccgaacaatgataggtgtgcctgtacctaaacatgagggtaaactatgtgggagagggagaatgggcattataacttttcgcgtttaggattacaagctagtacattgtgctcatggtagtgtactacaacatcttacgatagccgagccttacatagaggaacacctatatgagcttcttaaatgaaattcataaccggacatacgactggattatgagggagcacacacatcgctacaacgaatggttaatggacaacaacatt

SEQ ID NO: 62406 - DNA, 490 bp, Zea mays
  unsure (1)..(490): unsure at all n locations
agcttctcttgtccggaacaatctacggtattcctgacagtctatttagaatagttgtagatgaacctttggcacctgtagtacatataatgtagagcaaactagttagtccaattatttgtgttgggcaattcaaccaccaaaatcatttaggaaaaggtttgagcctatttccctttcaatctccccccttttttgtgattgatgccaacacaaaccaaagcaaatatataagtgcataattgaactagtttgcattaggtaagtgcaaaggttgcttggaattaaaccaatttacattttcagaagatatgcatggattgctttcttcattntaacattttggaccacgctcgcaccacttgttnntgttttgcaaatggtttttgaaattctnttcanagtctttntgcacacagtcaaaagtgtatgaataagaatttgagtagcattttcaagaaattgaaatttctcccnctgtttcaaatgc

SEQ ID NO: 62407 - DNA, 470 bp, Zea mays
tgatagagtaccgataaccttcgcttctggttgatctcttgacgcacctaacatttcatcgtcaacaccaccgaagagtaatgcccctggttgatatccacatgatatggcatattcttttaactcttctttatcagcctttgttaactcttgaccaactaagctctgaaaattgaaaattttctcttccgaagcatcttcaggcatttccttctccttctcaggcactgaagccatggcttcttcagcggctgcagcagcttcttctgtggccatgtccataagtatcttatcaatgttagaaagtgcgctttctaagttgacatcttctagccgtggcagcttctgcagttgcagcttcagtaagtgcagcttccgtatctggtgcgctctcaacagcttgagccatctaagccgaagctgactgtgagtgtccttctataacttctgccacagaataattcttcgtt

SEQ ID NO: 62408 - DNA, 499 bp, Zea mays
  unsure (1)..(499): unsure at all n locations
agctttagtgattagagagagagaattgntgtgttcattngagctcttgcgcttggattgcttctttctttctccattcttgtgatcaaactcaattgtaaccaaggcaagagacaccaattgtgtggtggtccttgcggngactttgtgtcccgtttgattgagaagaagaagctcactcggtctaagtgaccgtttgagagaggtaagggttgaaagagacccgatctttgtgaccacctcaacggggagtaggtttgcaagaaccgaacctcggtaaaacaaatcatcgtgtctcgctctttatttgctcacgattatgtttgcaccctctctctcagacttgtttctatttctaacgctaactcggcttgtagttgtgcttaagtttataaatttcagatttgccctatctcaccccnctctaggcgactttcacttttgatatattacacttgtgatgtcaacatatgtgtggaaaatggatcctcgcacacat

SEQ ID NO: 62409 - DNA, 467 bp, Zea mays
  unsure (1)..(467): unsure at all n locations
tcagctcgtaccnctactacgagcaccccggtgcaagataatataagtctcatcctccctcttgtgtttcatcttgcatcaatccatctgggcagggacacgcagcgtcaaattcactggtcggttgagggtcctcgcgggtccaaaacgccgacagttggcgcgccaggtagggggtccagctgcgtgttggcaatactttcccgttgagttccagatggacaatcttcagcagcctcttcagcccgggacggtgctccgctttgggagtctcgagttcatgtcctgcgacggtagctacgacatggtactcctctctctgcagcacgacaacaacgactgtcgtcggctcgcccggcagaggcgaactcgacgacgacatctcctcgtggcagaagaggaacatccgggtttgccccgccaccctcctcgccggaggaggagaagacagacaaccatgccaggca

SEQ ID NO: 62410 - DNA, 291 bp, Zea mays
  unsure (1)..(291): unsure at all n locations
gaatacatgcacacctctcataagacatacaattacatggaaagggagggtgcaaactggcaaatagcatccttcagtcctttcgaacgcgagtttgagacaaaatccttgaactacataaaactaacaaatggagtctcaattgatgctttatatacagctgacacgccaacagcaaatctgtattgtttcattgtaagtctgttcaccacaaccagaaatgtaccagtccatttgaagatttntttgacagaattgattatacttgatcagcgaacaccactaacaacc

SEQ ID NO: 62411 - DNA, 432 bp, Zea mays
  unsure (1)..(432): unsure at all n locations
tccacactactgaatttacctatgggcttacaatggnngatggttcgtcttggcattcaaaatgatatccataaaggatatgatgaatctgtgatagattcgaaaatttcagatcattaatgaccatcagtaatgaattggcatttccaaccgggtatggttggagtcaagaagttttgcacacttctaacttgttgataactgcatgtactgtatgtacaagttcccctaatggttttagtacgtgggaatccgtgacagatttcccatgcgtacattgggtatgtcccaatctcaccaccgcagcgtacatatatgggcacacagaatactggggatctatgcgagaattcattctccgtcgatcattacgtcttagaatctcttcatgagaatctatgtatggcccgtacgcttgctctgatcatgagc

SEQ ID NO: 62412 - DNA, 377 bp, Zea mays
aagggagatcacgagttctgactaatctgtgtccgttctgataaagacagaccatgtgcattatgccaggcagggaaacaggtgggaagcactcatcacagcgagcaatgtgatgacgacatcatgaccactcgtacttcttcacatggatctcttctgccccgttgcctatctcatcatagggggatgtgagaatggtcttgtgataattgatgatgattcccggttcacttgtgttatcttattgcagacaaatacaacacaccagggaccctcaagcgcttcttaaagagaggtcataatgagtttgagcttccagtgaacaacataagatgctacattgggttcgagttcaagaatttgcaatttgaatagta

SEQ ID NO: 62413 - DNA, 450 bp, Zea mays
tagcaagtgcgagttctagatcagcgaagtcctgttcttgggtcacattaaaaaccgagagggattggctgtggatccgaagaaggtagcagctattctggactagaaagcaccgaaagatgtccaaggaatcaagagtttcactggaatggcctgttactatcgatgtttcattgaaggtttctctaagattgtaaggccaatgatggccttgttggcaaagaaggttgagttcaagtgaccccaacgtgccaaggtcctttgagacattgaagaagaaactgacaacatcgctgatattgattctgccagatgttcacaagtcattcttagtatattgtgatacttcgtacactggactatgatgtgtttaatgcataggggaagtagtgcatactcatctcacagttgagatcatgagaacataccccctcatattgggagtacact

SEQ ID NO: 62414 - DNA, 463 bp, Zea mays
cctatgatatgtcaaaacttggtttactttgactttatgttggactagatgaattaggcaacccatcacgtatgtcaagtagttgtgtatggccgagttcatctgaggcatcaatttaggttaaaatatgtttataggggtagggtctaatctatctcacaagtatcactaatccgcttaagtagaccacattagattagatcgcattagatcagatctaagttatatttgtgtgactagattagaccagataatatctaattactttggattagatcatggttgttacactagtgcgggataaatatgcttatcgtggtaagatgaatccataagactaaggtagaatcttttgatgtcagttagatctattaagataagatgaatctataaaggtaatagagtaccttcttaagataagatggatccattacgctagatatgttagaatagttaggatctt

SEQ ID NO: 62415 - DNA, 454 bp, Zea mays
  unsure (1)..(454): unsure at all n locations
tcttctacaanaantgtgtcacgaccgccaccgtgtatcgaagggaatgagggcccgcggcgtttcagccggaagctcgatagtggagacggcggtgagcgtccgagaggagctggaagcggaccaccacttgcacgtggagaaggcctgcggctctctacggagttactcgaccgaggtgcttggccctcgcgtgggcttccctttgcgtagggacaccaacgaggattagtcgggaccttgcgcggttccggatacctcggtaaaaataccggcttcatccacgagagtttgcatctctaccttctctttagcttcctcatttacattaagcatttaagtttcaatcttgtctttctagttagattgtttagatggaaacttaactntcacggtagagatagcaacacttagactaaacctactttgcacattgtgaatngattatttgcgt

SEQ ID NO: 62416 - DNA, 479 bp, Zea mays
agcttgcatgtctcttggaatattgaaatataccttattaccaatttaagattaaatggttatgcgcatgatgagtttattaaaaatccatcggtgtcactggtgttaagttgaggtttatttgcgcgtgtaaagtaataatgtgattaatacttataacttttagtcgatagtagaaattgttttggcttatatagagaggtggtgacatgccaaagtagtcatcgcttcctctatatcttgagtagggtcaatacgcgcgatgtgttcatgaattgtgaagtaagcacatgatggtttcgagttagagaatagtggtttacgggtcatatgaattggtggatgtgtgaaaatacatgtgaatatgtatagttatataaatgttgtggcatatgttgtgtctcagaatttgataataatatgctatccgacgagtatgttgtatagcggcctatgttgttgtcacgttaatcaacttg

SEQ ID NO: 62417 - DNA, 481 bp, Zea mays
  unsure (1)..(481): unsure at all n locations
tcgcacctctgaactaattcagctgcatcactcttcgctgntggtcaatataatcctgacctgaagaccttcccgactagtgtcctggatgctgcatgtattccacattgcccagcatggacctcctccagaagtcgcttcccagtagatgagagaatgcacttcatgaggacgcctgatgcaccccttctatataatgtttccccaatgagtgtgtagtgagctgactgtctggcaacacgctcggccgcatttctgtcatccggttcctcttcattctttatatacctgatgattggccttctccagtcatcagagtctgactctagttgattcacaatattacactcttctgcttgatccattgagatgctcggctgtagtatttcttgtacanaaactccaggtgggacctgagttcgactggatcctagcttggacagtacatccgctgccgtgttccgatctctttctacatgat

SEQ ID NO: 62418 - DNA, 476 bp, Zea mays
  unsure (1)..(476): unsure at all n locations
agcttgcttctgccatggttcaacggtcgattatagcgccatagcgtgcgtatcttggcaaagtcaatgtgtacggtcgcttctctgctccaaatcctatcttttcgctgtgagttccaagtcgagatatggtcggggtagggagatagagaggggagaagtttgctgtgtcagctgagcccgaaccgagacaaaaggggtgtcaagtcgtgtctagcgccctagggtaggtgtcatctctttccagggtgttctagggttaatttggcgccattntgtcaattgggtcgaaaggttttgaaaaggggattaaggtgaacatgtggagtctttgtgcaagggttagtttttgtacttaggcaaaaactgaatttcctccttgtgctaaatcttaggtgaactggttagggcttttctganaactttnntggggtacttccttactattaatngtaggttattaagtatattacaac

SEQ ID NO: 62419 - DNA, 258 bp, Zea mays
  unsure (1)..(258): unsure at all n locations
tgaagccatggtaagtagcataggccaataatatacgaattgactcaagcctagctacgggtgcataggtttcaccgaaatccaaaccttcgacttgngagtatcccttggccacaagttgggctntgttccttgtcaccacaccatgctcatcttgcttgttgcggaacacccatntggttcctacaacattttgattangacgtggaactaaatngccatacctcgtcctagtgaagttgttgagctcctcttgca

SEQ ID NO: 62420 - DNA, 432 bp, Zea mays
agcttgcacgtaacgttgcaagtacagtgagggtatctcttcattcaggtattcaggtagtattggagatgcgttgctgtggctagtgttttctgcagaaaaagtctactgctttatgcctggcaaatcatatgcagttatatattttagaaattctacgtggcttaaccgtaacgtgagaatcactctttacacggtagcgttcagtgcttggctccaaaagcactatgcatacagatgcatcaccctttacgcgtaacacacgtacgcaactggcaattgtttccgtaaattatagtattttttttctttctataaattatgtaattctcttagcttcggaagatatgtaattttcatttatggttttatcaaatgtttggtttatctggttaattatggactcatatgatctttttattttaataaagc

SEQ ID NO: 62421 - DNA, 451 bp, Zea mays
  unsure (1)..(451): unsure at all n locations
ggacgacgaagattgtcgtcagtctccctctgacgccttgccagctcatgtacatctgcagaaatattccggcacatagaanagaatgctgcaatcccatgggccaagcgggcacccatccctcggccatgacctcgaccatgaccacgtggcgtgggagatccgcggccaggggagggacgcgaggcaccggcagcagaagtatgtgcacaggagctggaaggggctntcctcaaacgccctgctggattgtttggatcaatctagaagggggtataagatagatgtctagtacctttctcatagaggaactgcgtcacaacttcaatcatcttcattatgaaaggtgcatgtagacatcccttaagtggaaagcaggcagcatggataatctcctgccagatcatatcanaaatgttgatgctctctgaactgttgggcttcatgaatg

SEQ ID NO: 62422 - DNA, 341 bp, Zea mays
  unsure (1)..(341): unsure at all n locations
ccaacaagagctggatacctaatacccaagcctaaattgccttgcaggtttatgcatnccggggctcaagctggattatcgacagcggatgcacaaaccacatgacggnggagaagaagatgttcacctcctacgtcaagaacaaagattcccaagattcaatcatattcggtgacgggaatcaaggcaaggttaaaggactacggaagattgctatttcatccgagcactccatttcaaatgtgtttttagttgagtcgctcgggtataactcgttgtccgctagtcaactctgtaatatgggttataaatnngctatcacaaatgtagatgtgtctgtc

SEQ ID NO: 62423 - DNA, 460 bp, Zea mays
  unsure (1)..(460): unsure at all n locations
tgtggtagtagtgtgctatgtaatgtaatggcttgatgtaatgtataaaataactagaaaaaaaatggcatgtgcataatagcaactctcttcccatggcatatggcttcggatagaaccacgcctaccgcctccgggattggagcaagacttcctctatgagctgagggagaggctggcggagaatggggtgagacccacctccccgcacctccagaactaccactagacctagcccaaattctggccaatcaaaccagactcattgaagtcctcactcgaagcctggagaaccagcgcccaggcggtggaaggccccaggacaggatgggagaattcctgagactgaagccgcccacgttcgcggggtccagcaatcccctcgatgcagatgactggcttcgcacaatcaagagggaagtggaagccatcgcttgtnctgagaatcaacgtgttcagc

SEQ ID NO: 62424 - DNA, 439 bp, Zea mays
tagatgaagatgttgagcctaacgatagcgtgaggggtcaactgatgaagatagatttcataattatccacaacttctataatcatctcgtgaagcggaaaccgcaatgctgctttgaaagagctgttgaaaactactactttgtcattatcagctttagagtgagatcttctccggcgaaacgaataagcttcttcttagttgcccttaagtaacctagcttcatcatcatgggcatgttagactcagacacagtaaatctttcacaatccaagtggctgggttatgttgggatcagcgtgttatagccttactattgttcatcaacattatcttgctcgacatcatgcttgatcagcttacgcagtaggtgcaccttcgtcaatggtgctcttgatcacaactaagtccgattggctatgacatcagagatcggagc

SEQ ID NO: 62425 - DNA, 428 bp, Zea mays
  unsure (1)..(428): unsure at all n locations
atacaaaccacaggaggcacagactgcttccgataagttataagcaaaagaccctaagtggaggaccgagacctaccgcactatcatcttgtttgtcttctttgggaaccacctaggcacagaagcagcataagtctgatagcttctcacctaaaaacaacgaagggataaaccctgagtatggaattactcagcaagtcttacccgactaaagaaaagactctcaagggtatgctggctatatgggagtcaaggtaaggcttttcaataatcaaagactctgtttagataaaggcttactaaagcggatccttaaaaatccaattntatntgtcatagtaaataagagtacctgcactagagttcttctaccctagccaatcactggtcctgactagccaattctacaaaagccatcatcttatgga

SEQ ID NO: 62426 - DNA, 430 bp, Zea mays
attggaactcatacatactgatgtgtgcagaccaatgagtacgacagctaggggaggattccaatacttcataaccttcactgatgattctagtagatatgggtacgtctacttaatgaaacacaagtctgaatccttataaaagttcaaagagtttcagaatgaagtataacatcatcgtggcaagaaaattaaagcactgcgatcggatcgcggatgtgaatattcgagtcatgagtttagcattcatgtaaggagttgtggaattgttccacagcttacgccgcctggaacgcctcataggaatggcgtgtctgagcgacataattcgactttattggatatggttcgatcaatgatgagccagtctgacctacctatgtcgctatggggatacgctctagacacagcagctttcacactaaatatg

SEQ ID NO: 62427 - DNA, 496 bp, Zea mays
  unsure (1)..(496): unsure at all n locations
agctntatcaaatggacgtgaagagtgcctccctttatggaccgatcaaggaggaggtctatgttgagcaacctcccagctgtgaagatattgagtaccctaatcatgtctataaactctctcaggcgctntatgggcttaagcaagccccaagagcatggtatgaatgcctaagagatttccttatcgctaatggcttcaaagtcagaaaagccgatcctactctctttactaaaactattgcaaatgatttgtttgtatgccaaatttatgttgatgatatcatnattgggtctactaacaaatctacttgtgaagagattagtaggatcatggctcacaaattcgagatgtctatgatgggggagttgaagtatttcctatgatctcaagtgaagcaactncaagagggcaccttcattagccaaacgaaagacattcaagacatactcaccaagtntgggatgaatgatgccaagcccatcaagacacccat

SEQ ID NO: 62428 - DNA, 407 bp, Zea mays
  unsure (1)..(407): unsure at all n locations
taataatagacgaattgactttatcctatctactgttgcatanngttcaccgaaatccaaaccttcgacttgggagtataccttggccacaagtcgggctttgttccttgtcaccacaccatgctcatcttgcttgtagcggaatacccacttggtttctacaacattttgaataggacgtggaaccaaatgccatacctcgttcctagtgaagttgatgaactcctcttgtatcgccaccacccaatccgaatcttgaagtgcttcctctaccctgcgtggctcaatagaggaaacaaacgagttatgctcacaaaaatgtgctacacgagatctagtggttacccccttatgaatgtcgccgaggatggtgtcacagggtgatctcgtggattgatagtggactc

SEQ ID NO: 62429 - DNA, 494 bp, Zea mays
  unsure (1)..(494): unsure at all n locations
agcttcggcaccctggccgtttcaatgtacctatgccggtgcgtcaaaaccttgatctttntccccttcggtgtagcagagatggccgaagtagcaacttttcttttctttccctgctttcgcgagggatagcaatagtcgggatatacaaaaccaattacatctaaaactctatttaaccttttcttgcctcgtcctccgaaggctgaggtcatggcatcatcttcgacccttgtgtaggccccaagaaactcatcgctcgttgcctcaacataactcagtcagtcatcattcgactcatcaactgatctctgtatctgaagatgaatttcagataaaccaagtcgccttgactagacacgacagcagcttccttcgacatctcccagtcactcacaagaggccatactctataagcaatgtgctcttggactaagtctctggtaggaccaannattgtntaagaacaaaatatataataaaataaatatatg

SEQ ID NO: 62430 - DNA, 499 bp, Zea mays
  unsure (1)..(499): unsure at all n locations
actcaagcttctcttgacaagcgccgcacttactgcagagtgcgaagctgccacatataatatcaatggagcccctagcacgggtggagttaatgttgttaaatcgatcaggtattgcttcagctcttcgaaagctttctgttgagttgggccccattgaaaaactttagctgactttagtactttaaagaatggtaaatttctttctgctgatctagatataaatcgattcaaagatgccagtcttcctgtcaatcgttggtccccttctttgtgcttggtggctccattcgaaggatagcttcgatcttgcttgggttggcttcgatcccctttgttgaaactagacagccaaggaacttgcccttctttactccgaagacacatatttctggatttaatttcaggccagcttgcctaanattagcaaatggtttctgcaaatcagtaatgtgggtttcttgcttcgtggtcttcactatgatatcatcaacatatg

SEQ ID NO: 62431 - DNA, 464 bp, Zea mays
  unsure (1)..(464): unsure at all n locations
agctngcaccccggtgcatntggtcctttcctgttcttgaacaatgcggaccagtggcttaccgactccagttacccgaaacattgtctgttgtgcataatgtgttccacgtatctcaattgaagaagtgtcttcgggttccagatcgagctgttgaagtaacgaaggttgccttataaccagacttgacatattccgaacatcctattcgagtcttggactaaaaggacaggattacccgaaggagaactctcaagttgtataagatacagtggaaccaacacacggaagatgaggctacttgggaaactcaagattntctagaaaagaatttcccagactttttagcttcatgtaaattatgaaatatgtacaattgttgtaaaggaggaataaaccccgccatccctgccttgtacaagaaagaaggaaataaaaatatgtcgcgtttcctttttcactac

SEQ ID NO: 62432 - DNA, 498 bp, Zea mays
  unsure (1)..(498): unsure at all n locations
cggcatggatcatggatgcatgtgtccatgtcccaaaaatacatgtgccatcccacagcctataacgtgagcacaatcctcgaactccatgcgccaccgttcaaactctgcatgaaagacgctaacagactcagcacacaccgagggatgaacgcgcaggaacaccacgacatgctgacaacaaacccttctaaacttagacactaagtgcaaaagattatctttgaaactctcccctttaatcttgttgctctggttcgatactggtgacaccacttcaaaaccgcaactcatgaaggcactcgcgtgtaagtgggttcgtgagcaaatcttccatctgatctctcgttcggacaaaatccatctccaaagagccattgctgatgtagctgcgaatgatatggaaacaaatgtcgatgtgcttaagccattccaatagaatttccgctctccagnttatactcaatttagtggtgtcttcatcttcttcatataatg

SEQ ID NO: 62433 - DNA, 449 bp, Zea mays
ggaaccacactctttatagagtgctgttatcttcgccccactgcgggctcgaatgcatcctaaggctttctcattgattccaccacagaacatggctgctggctcctaaccacaggatgcagcatactcctgcagctcctccttggccttggataattcttgaccaactagaatctgaaaactggagcctttatcttccgaaatgtattcggctattcctttctctttctcacgcactgcgaccatgacttcttctgtagtcgcagcagtctcctctgcggccatatgcaagagcactgtatcaatagcagataacatactctccagattggtagcttcggcggacgcagcttcgacagaagtatctgcttcggcagctggagtcatctatgatgctaaggccggcagtggcgtttcctcaatggcttgcataacagtaataattcttc

SEQ ID NO: 62434 - DNA, 457 bp, Zea mays
  unsure (1)..(457): unsure at all n locations
catagattaccgcccacttaatggtgtaactatcattaaccaaatatccttgcctcttattgatgttattttttatcaattggtcggagccaaagtgttttccaagatagaccttcgctccgactatcatcagatcaagatacgggcaagcgatttttcgaagaccactttctcaaccagatatgggctgtatgaatttttggagatgtcatttgggctgaccaatgcaccagcatatttcatgtatctgatgaattctatatttatgcctaaactggacaagtttgtagtggttttcatcgatgatatcttggtgtactcgaagaatgaagaagagcatgccagtcatttgcatgtagtgcttcaacgtctacgagagcaccgtctntatgccanattatcacaatgtgagttntggctgaaggaaatcaactccttggtcacactatatctcatg

SEQ ID NO: 62435 - DNA, 436 bp, Zea mays
agcttctaaagggagaacacgtgataggtctaacttatgttcatttcgaaaaagatagaccttgtgcagcttgtcaagcaggtaaacaagtgggaggagcacatcacagcaagaatgtgatgaccacgtcaagacctctggagctgctacatatggacctcttcggacccgtcgcctatctgagcacaggaggaagtaagtatggtctagttattgttgatgacttttcccgcttcacttgggtgttctttttgcaggataagtctgaaacccaagggaccctcaagcgcttcctaaggagagctcaaaatgagtttgagctcaaggtgaagaagataaggagcgacaacgggtccgaattcaagaatcttcaagtggaggagttccttgaggaggaggaggggatcaagcacgagttctccgctccctacacacc

SEQ ID NO: 62436 - DNA, 387 bp, Zea mays
  unsure (1)..(387): unsure at all n locations
tgaagctatgctgcacattgttgaagttatgaagtgttngatttgtttcagttntagtcttaatgcacatctgaacatttgaaaaggggtctgtagtaatgtacttttcacattgaactgagttgttttgatggtcgtgtgcctaggactacagtcctttgttcctgaactagactttgagctacatttgtctattcagaccactcacatgattgtgaaaaatgacaaattaatggaatcaatttggttatcgaattttgtgtcattaatattaatcatcattngatatattacatttaatatatatatctacatctctactaactattaaggcaatagtgtagaccatctcttgtgcccncnnctnnccccttgtcgcaacgccca

SEQ ID NO: 62437 - DNA, 265 bp, Zea mays
  unsure (1)..(265): unsure at all n locations
gcttcttaccatgtgatcacggttatcttgataatggtgggcaatgcatttcccttttagttgtgtcaagctcttctttagcctctcattttcttctttgagcttttgatatgaatcatcatntgttcctgcaaattctatctcaaaggaagatttgcttgttgacanacaacaagcattagcacatggtaatatagtatcaatatgaatacatgtgcacgaatgaggttgttgggatattaaggtctctatcacaacctcatga

SEQ ID NO: 62438 - DNA, 432 bp, Zea mays
  unsure (1)..(432): unsure at all n locations
ggtggcgccctcnggcgtcttaccgcagccgaagtaccaagtcttccacctggaagaccttgggccgaacccctcgggcgtggtagcgtcgcagagactgctgataccgcgctgagtgtagcaaggccacgtcctgagcctttctagctggtccagtgagtcttctcggctggtctggttgcttcggtcgtcgtacgcctttatcctcggggaaccgtattctaagtctgtgggcaagatagcctcgaccccatatactagaaagaacgacgagaaacccgtggctcggctcggcgtcgtcctcagactccagactaccgagggtagctccttcatccaccgcttgctgaacttgttgaggtntgtgtagatcctcangttaagttcctgcagaagcatacccgtggcatgctccacctgcccattcgtcat

SEQ ID NO: 62439 - DNA, 493 bp, Zea mays
  unsure (1)..(493): unsure at all n locations
agcttgggaaggttcttcatccacacatgtgctaatcggcgatgccacagccagcccatgctagtcttagcaattaagcatgcatctagaccggcctcctcctttgcaaaatcaactaaatagagtttgtcgtctaatacacccttataagctaatgaaccatcacttcttctaaagacagacacatctacattggtgaatagacaattatatcccatattacataattgacttacggataacaaattatatccaagcgactcaactaagaatacattagaaatagagtgctcatttgagattgcaatcttgcctaagcctataatcttgccttggttcccatcaccgaatatgattgaatcttggggatccttgttctcgacgtatgaagagaacatcctctcttcccccgtcatgtggtttgtgcatncgcttgcgataatccagctagagcccncggatgcataaacctgcatggcaaattatgcttggg

SEQ ID NO: 62440 - DNA, 336 bp, Zea mays
aactaagcttatacacgaggatataggcaagagctcgttcatatgtcatgatttaatgtgagctctacacgcgtggaggttgtgctccgctgctcaagtgcttatctagaaccgaaggcgtaaagttgatgaaagaaatacatgcacgcctgtgtggatctcacattggatctacgccgctacttggaagagttcttcgtcatgagttttatatgccgatagcagcttatgacgcggtcggaataaatcataagtgcgaatgttgtcacatatgtgcaagatatcaaagacaaccttcgttcttaacacagcttatacaacccatcttgtcattgc

SEQ ID NO: 62441 - DNA, 445 bp, Zea mays
  unsure (1)..(445): unsure at all n locations
agcntctatgtatatatttatttcgtatttatttcttgatcccactctaacgatctatgggtctagatttatcttggtcttgcaggcgggattgccataagactggtgtccacgctgaggtgagcggtacgggtgctgagtcccaacgggagcgggggaaccaccgttcagataacgacgttccgcgcgctcagcccgcagctgggcgatctcagcacgagccctactcagctcgtctagtgcatggtccagctccgtgtttagcacggcggctatgttgactgtgctgctcaacctatgattgccctcaccgacaggtgagacaatcacgcctcctgtgctgccagatgaacggcggnggtaatacttcatgtcaagaccgtcagctgtcccaccgaaaaccgagcagtattgcgatagcgcacgccgtgcagcatcttgcatg

SEQ ID NO: 62442 - DNA, 367 bp, Zea mays
  unsure (1)..(367): unsure at all n locations
ttctcgactaagttggagacagggcctcatggacggacgaaagtactcgtaagccggcaggccgaccgagccgagggactcctacgcctccgggatacggatacctcactcatcaccttccgcgagaagcaactctcgcccgcacaaacatccctgttaccgacggaaagtccagatgctcggaataaggggaaaagagacgcagctttacaagcgcagcgagggtgtgttntctggcctcaacggccgcagaaggcacgcgctacaagacgatctgatcctgcaggctcgggtcttcatgctgaagggggccgtagcaccttctgcatcgacgacgtcttcagcaaggtccgaccaagcctcggac

SEQ ID NO: 62443 - DNA, 389 bp, Zea mays
  unsure (1)..(389): unsure at all n locations
agcttcttgcgtcaggcttcagaccttgactcctctcggcccacacgaagatatttagccttataattgcctcgggagtaagttgatgaagatagacttcgaagattttcaacacctccacgacgaagctgctcaaggggaatcgcaatccagctttcaaaaagcttcggtacaccacaacttcattttcttcagggtgtggacaagttttttccccttcgtccgccctcacaatggacagatcccggaaataccttcctctcatattaacaagatgattctctntgatagttgatttaccataaactgaatggcttggtcgccaggggcgatcttcggagtcttcgccaccgctgtccatatcataactttcactgtcaccagtatct

SEQ ID NO: 62444 - DNA, 476 bp, Zea mays
  unsure (1)..(476): unsure at all n locations
tcaactccatctatattatggattgccttggaatcagtccatctttcttcggcccttctggcagcttccttgatagtgcattcatcccttttgtgagttttggtgatttggataacaacacatttaaaggtctaacaacgttgctaagtgttgaacaggaaattcagtatgatgaacatacttgaatagtgtataatgatcagtgaacaaggttcaacacaaggtgaaataaccagtgagacaatgcanatggatataatatggtctctatattggtttgaatatatggacaagtcctgagaaatcactatgcataaatatgatcataatagaggttgaagtgattaagaggattggtcaagccaaagtgaataagatatgaggaatcgtgaattggcttgaccatattactattagtccatatatgaatatatgagaatcaaactaaagcttgattaatcttaatagttatatct

SEQ ID NO: 62445 - DNA, 476 bp, Zea mays
gcttcaagccttctaactgtatctatgtatttctcaagcttcgggtctcttgctctccaactcttgtcaacatgaccagaaataacatgggaatcggtgttaaaaaccgcccttattatccccattgtctttaactttcgaagccccaaaagcaaagcttcgtattcagcaatattatttgtgcagctaaaatctagttttactgcatagcatgttctgacattggaaggtgcaaccaagacagcagctgcacctgccccgaaggtttcccaagaaccgtcgcagaacaccgtgcaagcttcagcatctttaattgcttcttcttcctgagtccctggcgttcagtcagtgatgaagtctgctaacgcctatgactagatcgaggatctatgcacataatcaatggtgaattcgttgagttctgcagcccacttttcaatcctttcagtagcttctttgttctcataatatctttc

SEQ ID NO: 62446 - DNA, 415 bp, Zea mays
tcctagcatttaccagaattcacgtcaggcctaagatagagtgtaagcttcagcagcagttcgcagcgcaggaggcatcccttctcccacaacaacctcccgggctcatcctcccatgtaaccacagatccttccaccgagttcgtccatccactctcagatacaacaaatcgaatctccccagtggctgcatccatgtggcctcctaccaagccatggctcgctgccacaccaaacagcagctccctcagtgcccgagcctgctccagtgcgcgagtgacgtccgcatcagaaccctctccccccacgagcagcgcccctatgatgtcgaaaccgcgtggcagcaacccccggatttcgtctgcggaaggcatagaagtatatggacatcgtcaggactcatgcggaatcatga

SEQ ID NO: 62447 - DNA, 462 bp, Zea mays
catgcaagctagccacaattatggcaggtgtcgactcgtggcggctattgtgttgtggctactccgccctaagcgcctttgcaagcaccgccctcggcacgttatcgtgttctgccctgtgtgcctccgcgccccttctgcgacttgccacgtttgcggccaccttttgagaaagaggactaccccttcttcctgtcaccctagcaagtctctcactgcttctgagtgagatgtatcttctcgccgatggtgataggccccaagagattgttgtgtgtcattctcaataactctaaggtgacttatcgcctcttcagtcaacatcgtggagaggtcttcagagactcgatcgagcgagcgatgtgcttgtacttctcggggatgcagcataagagcttctcgacagctctcttctcattgtaggtgtctatgtcgagttgcaccaccttctgcagtagagtg

SEQ ID NO: 62448 - DNA, 494 bp, Zea mays
  unsure (1)..(494): unsure at all n locations
gcttgggagcctgtagacagcttagagtcacttagaccgtcttcatcagtttatttataggatcatctcaaacactatctntataatatagactgcattgtttgcagagtgaaatctaaatgtatggatggaaatagataaactggtggagatataaatagacaaaaaaaaatgagagagcaagtttccacattcactgtgataggtaggaaaagatggataaaataaggttgagaaattntagctctctaaaattggatatatgtnttttaatcgaaacagacatgcttatagtgtgaatgagtcgagaatatcatagtgctatacttttaagattctattttttataaaagatctaaaggtttgaaatgaactattccacgtggactgctaaaggtggatgatgagccaagcactttttttttgttttctttgaattgacgtaaccttattttaagattcctgaattgtgaatctactctagctgagttact

SEQ ID NO: 62449 - DNA, 499 bp, Zea mays
  unsure (1)..(499): unsure at all n locations
agcttgaaccaagagcncgcgtcaccggagaagtcttatcgttctcaccggagttcaagaactcgccggcgcacgtggaccgggtaaaccccttcaccatttcccgattcgttgcgcgcacggcctctgtgtccccccgtgaagctcctcgtgcaccctaattgacctatgccaccgtggtttggccggagcaggcgtcgccgtcgatccccgccacctgtgttcgtggccaggggagcttcgaccacctcgccggacctccctcgccgccggtaagccgcgccaccctttcctttcccgcggctactgtntcagttaagggagggactgctggtgtgagggagagaaagtcatggtggtaagtgaaaagtcacagactcaagtgaatagtggcgtaagggtagatctgcgagggttgattcattttatacccaaggacctcggcgcaaactgtgtttccagattaacttaattaanacctcgattaaattcaaacaga

SEQ ID NO: 62450 - DNA, 354 bp, Zea mays
agcttgtgaatgttcttcatacccacatgagctaatttgtgatgtcccagcctgtccatgctagtcgtagcagataaacatgcatctagaccagcctcctcttttgcataatcaactaattaaagtttgccgtctactacacccttaaaggctaatgaaccatcacttcttctaaagacagacacatctacattagtgaatagacaggtatatcccatattgcataattgactaacagatatctaattatatcctagagactcaactcagaacacattataaatagagcgctcatttgagactgcaaattcgcctaagtctttcaccttgccttgattcccatcaccgaatatg

SEQ ID NO: 62451 - DNA, 446 bp, Zea mays
tcgacgagctcacttgtccttgtttccttatttctgtacaccctcggagggcgaaaccttgagataacatgatctcccaccacctactgtacaggctctcgcctcttgtcctgaaacctccttcgcctggtctgatcaccttctaagttctcctagataattctaacctttgcttcagccatatggaccacaacctgacccatggaatttccctctctccagctagagaccacttcagtgccgaactacactctttgccctataaggcatctaaatgtgcacaacttcccgctggactgcgagccgttattataatcaaactctgccatagagagacacttatttcaattctttccataatgtagagttcatgcacacagcatgtcttccagcaaatgtttaccatttctgacagccatttgtcagagatggttgttcactcatat

SEQ ID NO: 62452 - DNA, 476 bp, Zea mays
  unsure (1)..(476): unsure at all n locations
agcttgacattgtccccccttttggaagccaatgttatccttaatcccagggcatctcccactatagagcatgcttctagcaaatttaattnttttcattttctaagtcatgctcattaattntagcactaagttgagctatgtgatcattttgttgtttaattaaagctaggtgaccatgaatagcatcaacattaatatctctacatctagtacaaatagtaacatgctcaatggtagatgtagaagatttgcaagcatttaattcatcaatcttagcatataacatgacattttcatttctaagattggaaataacatcattgcaaacatttaaatctttagccttagcaattattntttcattctcaantttaaggatagagagtgatgcattcaacttgtcaatcttagtaatcaaactagcattatcatttctaagactaacaagagaatcatcacaaacatttatattc

SEQ ID NO: 62453 - DNA, 478 bp, Zea mays
  unsure (1)..(478): unsure at all n locations
tgcggcatgcaagcttcggcgacgggttaaaattgtggcagcatatcagtgcaattagcaatgaatgctgtggtaacttcacacctactcgtctgtttatatagtgttgcaagtaagaaggcgaagcgccaggatttttacaccaggcggacacccgctcgcactcgctgcgtggtggaccgcagagaccgaacagtaactctgcaaggtggggccgctacacgctgggaaattgaatcgnttctcgacaacgagctaagggaaggtgttttttagaccttcggcgctccgaagcttaagagactnntttcacggatcaagctcgttacgaaaaacgatctagcaccgcgaaaggggctactgttgggcctatgcttcgtcgccgaaggtcttctatgaagaagcggctttcggctgaagctgtttgtataagatggccgaaggttcctcttcatgaagcttcggtattacaaaccga

SEQ ID NO: 62454 - DNA, 489 bp, Zea mays
gacgtgaaaagagccttcctcaatggaccaatcaagatagtggtctatgttgagcaacctcccggctctgaagatagtgagtaccctaactatgtatataaactctctaaggcgctttatgggctcaagcaagccccaagagcatggtatgaatgcctaagagatttccttatcactaatggcttcaaagtcggaaaggtcgatcctactttatttactaaaacacttgcaaatgatttgtttgtatgccaaatttatgttgatgatattatatttgggtctactaacgaatctacatgtgaggaatttagtaggatcatgacacaaaaatccgagatgtctatgatggggaagttgaagtacttcttgggatttcaagtgaagcaactccaagagggcaccttcattagccaaacgaagtatattcaagacattctataacaagttgggatgaaggatgtcaagcccatcaaatcacccatgggaacc

SEQ ID NO: 62455 - DNA, 442 bp, Zea mays
  unsure (1)..(442): unsure at all n locations
ttcattattcnnattatntaataatatacttcagtctgataaattttaatgcatggncaaattcagtcatcacagagtaacaaataccagttcaacaaccaactggaactttagaatcattgctctctataagaaccaacctacatccgagttacaaccaatagagctggttaggaggtcgacaacgtaaaggttcaactcaatttctatttcagactgattcaagcaaaaatctgcgtatgtgagagcacatagaggggggtgaataggtgatcctgtataatcaaacactaaatagccacaaaacttagttataaaagtgttagtgtgactaagtagttttgagacgagttattgtggacaaaccaatcacagagaatgcaacacaagagacacgttgatttatcccgtggtcggctaattacacttgctacttcacgtt

SEQ ID NO: 62456 - DNA, 356 bp, Zea mays
  unsure (1)..(356): unsure at all n locations
taaaaatctggactgattactcgaattgcattcgtgtcgagaantaaaagttttaacaggctccanattcggccttccatgacactgaataacttcgaatccggtgaaatgagaatgaatagtctggatagtcagagacatgcgcgagtgagaaatataaattnttactgagcatccgagattatgataaatctcccgacataacgcgaaagagacacctgnggtgtcatagagaacatcatgttcgacgtcacggaagttaacctccccttcaatgccatcatcggcaggccgaccctgtaccggttcatggccatttgccattatgggtatttggtcctcaagatgtcgtcccc

SEQ ID NO: 62457 - DNA, 486 bp, Zea mays
  unsure (1)..(486): unsure at all n locations
tnctccagcattcttgagcccctcaggcatccgaaggtaacagtatgtaccactgtgggtgatgaagcttgtttttggctcgtcttcctttttcatccaaatttgatgatagcctgaataacaatctagtagactcatgagctctgatgaagctgttgtatctactaaagaatctatcctcggtaatggaaactcatccttcggacaagccttgttgagatcagtaaaatcgatgcacattctccatttaccattggccttcttcaccatgacagtgttagctagccattctgggtattttacttctctgatgactccagcgctaagaagtctttttacttcattccgagcaccttcggctntgtcatcagacattttccgaagcctctactttctgggtctgaaggatggatcaacattgagcgagtgttcaataacatccctgttgacaccacagagatcattagctaaccatgtgaagacatc

SEQ ID NO: 62458 - DNA, 388 bp, Zea mays
ggatgacgaatacagaggttgtgaaccattcaatctcgtgatgaacagttaaacaacgcagattctaattataccctaagttgtacgaaagatcccagcattgccaagacactggaacttaccacgcactcctcaacgcatcgggtgaatgcagcatacctccttttgaccggtgcagcgttcacactggactccgcctctgtgctcggtaacgcagccaggtccatacctgaacctcggaagaagcgcgcctgccctccctgcgactagagctgtgactgctctccgtccaccacgaacacagggaacacgcccatctgctggaatcgcagacacaatccaacggatacgggtgaatgcgggaacaaataaaatcgaacatgcagta

SEQ ID NO: 62459 - DNA, 485 bp, Zea mays
  unsure (1)..(485): unsure at all n locations
nggcgattcaggctctgttgagcatatcacagaatatctctattatttatttggntataatttagagaagatgcagcctagtaccctgaagtaattgcctaattgatatcaatagtgttttatttagagaagcaaataacatattagacacataccctagcaacttctccaaaaaatggttttccagtatattaaaatgtatataaaatacctgattcaacagaccaccaaatctatttttaactccatcattntctcaagacccttctctaaagttgctgggaactgaagcaaccgcaatgtatgccctgtatgagcagtatcaaaaactacaacagagtaatccattgtttggactaatctgcagtgaggaaaatataatattcaaaaagttgctgaaagccaagaaatgcaaggaagtaccattttcaggataacaatggtaatcaaaatctaactctcttgacatattggagacattgaac

SEQ ID NO: 62460 - DNA, 449 bp, Zea mays
ggacttctatgcttattcactccaacagagattattgtaacaaagatggatgatgaatcaacggtgttcaagggttttaggtacaacaacctctacttaatggatttcacttcaaaagatgcagacttaagaacttgcctcttcaccaaagcttcacttggatggctctggcataggaggcttgcacatgttgggatgagcacactcaagaatgtattaaagaaagatatggttagaggattaaaggatgtggtgtctgaaaaagacaagccatgcattgcatgtcatgctggaaagcaagctgctaatacacatcctactaaagctttcatgtcaacatcaaggccactggaactacttcatatggatgtatttggacctactaattatgtatgtgccagtggcaacctctactgtctagtgagttgtgatgacttcatcagatacac

SEQ ID NO: 62461 - DNA, 424 bp, Zea mays
  unsure (1)..(424): unsure at all n locations
actcagcttcaggtaccagtgcacgggagaagtaaggaggctgngaatttatatccaagggaagaagaagcttgcaagtcaaggtgatcgagttggaacagctatagcacatcaaggatcctacataaggacgcgacttacaaccaatgaggtgacagctacagttatgtggtgtaagtcataaggctcaagaccaagctctaagaaggagatcaaggtcactataaggagaactagtgtcaaaaccagaactggaagcagcccacaagagctaagatcaccttgatctttagtttgggttgttcctatgtttggagatgatctatgtgatctttgcaggatgttggagctaagaaatgtcaatctagatcaagtcaagcagacttgatgagttatgagtccaacatcgaaactcaagcatgtg

SEQ ID NO: 62462 - DNA, 494 bp, Zea mays
atctctaagtcacctgcggctgcagcttcctaatcttatgggagcttatttagtatatttcaatggttatatttggcctaagccatgattttatgtttttcatggtcttttaccccttttctttatttctacttaattagctcaattagggttggtattagggtttcaacacttttccctttttgaagaatcttatttgtttggaacatgattctttatatatatacttagtaagtcttctcttctcaagttaatatgatgcttcatgcttaatttggctcacataaaatgttaattcttgggttagcactgagagaaaccctatgtgacactggggtgtcacaccttatttatttaaataattggtgaagaaaccctggctactatttactgtctcattgacctttgcagaaaaaccccctcctttatgtttcttcaccgtgctatgtccatggcggaaccgcgtcgagcaccacgccggagccgcgattcta

SEQ ID NO: 62463 - DNA, 491 bp, Zea mays
  unsure (1)..(491): unsure at all n locations
tctaaagggagaacacgtgataggtctaaccaatgttcatttcgatatatatagaccttctgcagcttgtcaagcaggttaacaagtgggaggagcacatcatagcaagaatgtgatgaccacgtcaagacctctggagctgctgcatatggacctcttcggacccgtcacctatctgagcataggaggaagtaagtatggtctagttattggtgatgacttttcccgcttcacttgggtgttctttttgcaggataagtctgaaacccaagggaccctcaagcgcttcctcaggagagctcanaatgagtttgagctcaaagtgaagaagataaggagcgacaacgggtccgaattcaagaatcttcaagtggaggagttccttgaggaggaggggatcaagcacgagttctccgctccctacacacctcagcaaaatggtgtggtagagaggaagaacaggacactcatagatatggcgaggactatgc

SEQ ID NO: 62464 - DNA, 186 bp, Zea mays
  unsure (1)..(186): unsure at all n locations
ctcgaccgggatctctaagaactgcngctgcagattgaaacacttgagaaaacatacaacagaggctcttggactatcttgagacgtgccttgggtgagttaccaccccagcactgcatatgactgggcatggcagtgggtcatagctgcatggctggagccgcaactggcactgtgtgggatatc

SEQ ID NO: 62465 - DNA, 376 bp, Zea mays
atgatgtgattgttcctggccgaagagaggagtccaggttcgtgcaacattctttactgccttcgacaaagatcttgccatgactgcagtattgccttcatatgaagatatggtagcttcataactcatcagaaactacgtcggatctgagtgccagtcgacattggaagctgatgtggtttgtgagatggaggccaaggtgtagcctgcagatctgttgacagaggagaagcatcatccaatgcaatatctccatgatgggaatcattataccatccatcatcatcatacaattcttcttgatgaacctccctgtgctggggccttcgttcatgctcatcgtgagcaagatggtgttctatttcaatggcttcgt

SEQ ID NO: 62466 - DNA, 356 bp, Zea mays
atcacctattcacccctctccccctctaggtgctctcaccctgatgataggggcaccgctccttgagcatcttgtcgaagaggttggcaccttcggagggcttccgagggttcttgtactcggcggcagcgacaaagtccgcgtcggcggcgtcgcgtttcgcttgcgacttcttcctgcctttcttcttggcgccgcgctgagtagacgcctcgggagcatcttccgatgggcggccctggggctgcttgtcctttcggaagatagcctcgaccgcctcctggccagaggcgaacttggtggcgatgtccatcagctcgctcgccctggtgggggtcttgcgacctaacttgctc

SEQ ID NO: 62467 - DNA, 479 bp, Zea mays
tgtgttcatagacgaaggtccttcatcttctacgatcatgttgttcaatatgatgcatgttttcatgatatctccaatgtgttgtggagaccaaccatatgcatgaccacgaactatggcccatcgcttctgtagtactccaaatgttcgttcaatgtcttttctagcagactcttgaacagtggcaaaatgttgggtcctcacatcatacggatgacggattgtcttcacaaacgctggccagtccggataaataccatctgctaggtaatatcccatgttgtaggtgtgtccattgacggagaaactcactggtggactatcaccatgaagatgcgaatcgaacaagttagaacgctgaagaacattgatgtcgttacagctacctggcatgccgaagtatgcatgccaaatccataagtcatatgaggcaacagcttcgaggatcattgtagggtgtttaccacgaccggtaaaca

SEQ ID NO: 62468 - DNA, 402 bp, Zea mays
  unsure (1)..(402): unsure at all n locations
aatactatcttctttggaatgccatgcaagcatacaatccgagacatgtatagttctgccaacattgaactgttatangtggtcttgattggtatgaaatggactgcctttgttaaatggtccactaatacctagatggagtcataaccagttcgagtgcgaggcagaccgactataaagaccatcctaatctcatcccatattcactgaggaatctgcaatggctgcaacaaacctgcgggcctctgatgctctgtcttgattctctgacaactgccacatctggcatatactctactatctcgctttcataccgaccaccagatcttttctangtctttgtcatttctcctgcaggtgatggaaacgtgctatgacttcttaaatagtttaataattgcg

SEQ ID NO: 62469 - DNA, 431 bp, Zea mays
  unsure (1)..(431): unsure at all n locations
tcacaagtttattaaagaatgatacacaatttatcttgttctcaagatgcaaccaagccttcgagtagctgaaggtattattgaccactgctccggtatttgctcaaccggacattgaaaagccttttgatgtgtattatgacacatcgggcagtggcctccgatgtgtcttaatgccagagggacgagttatagcatatgcttcaagacagttgcgcccgcatgaggaacattatccaactcatgacttagaattagctgctgtgggtcatgcccttaaaatatggcatcattatctgctgggaaatatctgtcatatatatacagatcataaaagtttgaagtacattnttacccagtcagaactaaatatgatgcagaggagatggctcgagctgattaanggattatgaatanaaattcactatcac

SEQ ID NO: 62470 - DNA, 418 bp, Zea mays
  unsure (1)..(418): unsure at all n locations
tgtaatggtgaagagattaggctgcaatcaaactctattgccgcactggcactctctacaaacatgtatgaagacagtacactgctacaactcataattaggcataagagaagggatttataactgattcagcatagaaacttggaactcanataaatgaatggatcagaattattgaggagttgcagcttttctaagcgtatgatacagtcatggatcataaagttatgaagcatacagtacaagtagtgacctatnttcctgcttaaatggattgcaagtatctaaccatagaaacttaattgtaacaacaaaatgctaaacatacaacatgaattgtggccgtgaatcttttcctcagattctcaatcaaaaatagaaatggaatcaaaaccagcgagtataagtgcagcaacta

SEQ ID NO: 62471 - DNA, 468 bp, Zea mays
  unsure (1)..(468): unsure at all n locations
catgaagcttctcaccatgtcgctgctagccaagatgttgtagctaccttcatcaatgatcaaacgacatgaacgctccttaatgacacactttgtttgaaacaacgtatgtcgctgattctgctctgccttctccatttgtgcactaagcacacgctgtacaatgaggctctcataatgctctgcatcatctgcaccaatctgttcttcgggaggttccttagtgtctgcatcatcagccgcaagcaaagcaagtgtagcttcatccaaatcactagcagaggaatacccaccatcgtcttttaccaccaaaacacgctgattaggacaatcacgctgcacgtgtncatagcccttgcatcgataacacagaacatctcttgttctacccgtggaggctactgaagaggcactacctgctggttctgggcagatatggttgctgaatatgtagaagatgcacgtggt

SEQ ID NO: 62472 - DNA, 418 bp, Zea mays
  unsure (1)..(418): unsure at all n locations
tgagctncggtttacagtcacgttttaccatgtctgatgattatatgtccattgattaaaaggttgttgcggagatgaagctgactgatgagacgaagctgtctgatgagaacgctgtggatccttatattagtggatttattgaatcgatggcaaagactaacctagagaagattactaaagagatactggaagatttatctgaagatactggtgacagcgatagctatgatgtgtgaagtggagacgaagattctgaagatcggccctggcgggcaagccatacaatcttcttaaaatcaaccattaaacagagtcatcttgacaacatgagacgaaggtactttccagacttgtctatcgtgagagttggtggatacaacaacgccccttgccctgaagaaaatgaagttgttat

SEQ ID NO: 62473 - DNA, 459 bp, Zea mays
  unsure (1)..(459): unsure at all n locations
agcttcannatttcatgtacaagagaagagatcttatatcatatcaagataaaaggtgggaaaagacccaactatgaagcttgatccttatgtcgtttggaacttttttaatggaaagagttgaacctgaggaaataaatcctcatgtttttacttatttcttattatattgctctttagtacttcctttgattgtgcttccccctaggtctactttttagttgtgcacgttaccatgtttgctggtccaagttagtggcggaggacctgttatgacatagtatgagagctaccatacctcgaagacatgtgtggtgcaatagttattgtataatgttttctttcaatatatngatagntcaaatcttgttatctattttctctctctcatccatacctcacttttatcttatgccttcaccgtgctccatancctcagattatgttatcctccaacat

SEQ ID NO: 62474 - DNA, 494 bp, Zea mays
  unsure (1)..(494): unsure at all n locations
ntaccanatggacgtgaaaagggccttcctcaatggaccaatcaatgaagaggtctatgttgagcaacctcttggctttgaaaatagtgagtaccctaaccatgtctataaactctctaaggctctttatgggctcaagcaagccccgggagcatggtatgaatgcctaagagattttcttatcactaatggtttcaaagtcgaaaaagccgatcctactctctttactaaaacaattgctaatgaattgtttgtatgccaaatttatgttgatgatattatatttgggtctactaacaaatctacttgtgaagagtttagtaggataatggttcaaaaattcgagatgtcaatgatggnggagttgaagtatttcttaagatttcaagtcaagcaactccaagagggtaccttcattagccaaacaaagtacattcaagacattcttaccaagtttggaatgaaggatgccaagcccatcaagacacccatgg

SEQ ID NO: 62475 - DNA, 475 bp, Zea mays
  unsure (1)..(475): unsure at all n locations
agcttgcagtgctgctaattgtctcaccaagtttctttaatcagcatcttctattattattgatatctctntcctgaacattagctatctgaatttgaaataccgtttagtattaatttacaatgttctctacaatgaagtcttgtttggtggaacataataggtactaacgatgtctgaattaaccaaagggtgttcaatcaaatcaaaatgttagaaagtgtaggacattgcatctttctcctttnttatattaatattatgattgttcgagagagaaaaaaagtgtagccatgatggattctcatgctagttgtatcgaaaggacaagaaaaaaaaaggataatataaattgtgtacttggcgactcctacgtacgtagtttctttggtatcattactaccaaatctgcanagccgattttggaccgttgcagttccttgtcaacgcggccacgaaatactgcgttgagcta

SEQ ID NO: 62476 - DNA, 467 bp, Zea mays
  unsure (1)..(467): unsure at all n locations
tatgaaggttgttcatccccatgtgctaaacgacggtgccagagccagcccatgttagtcttagcaagtaaacatgcatctagatcagcattctctttagtaaaatcaaccaagtaaagtttgtcgtcagatacaactttaaatgctaatgaaccatcacttcttctaaagacatttacatcaacttttgtaaacaagcaattatgttccatatgacataattgtctagcagaaagcanattataaccaagcaattctatcaaaaagatattagaaatagagtgctcagtggtaatcgctattttacctatcccctntaccttgcctgggttcctatctccaaagataatcgtgtcatggaaatccttattcttgacgtaggaggtgaacatcttcttctccgccgtcatgtggattgtgcatccgctatcaatgatccacattgagcctcggatgcataaacctac

SEQ ID NO: 62477 - DNA, 311 bp, Zea mays
ctgatgctttgaatgcgacgtggcgcacctctggtgtggaggaggctccttgctccaagtttacaatgtgtttggagtctttgatcaaaagatcagagctcacaaacttgccaataacctccttgggagatatctattctgatctaagatctccacgaattaattgaactagagtggaattacggaaaataatagatctatgaataaccatgaccacttcatggtcatcccacttggtgctctctaagttgcgcacttgagtgaccattcgtttgagtcagatgtacattagctcgtggctcctctccttt

SEQ ID NO: 62478 - DNA, 432 bp, Zea mays
  unsure (1)..(432): unsure at all n locations
cggtgccgatggagaagcaaaaaaccttgaagtcttggctgtcttactgcttgccgntatcaactgttagttcggacggtactccgaagcggcaaacaatgttttgccaaaagaatttttgggcaatatttgatgttattgtggaaacagcccttgcctcgatccatttggtgaagtattcgacagcgatgaaggcgaacttaaggttcccctgagccgtgggcaggggcccgacgatgtccaggccccagcgctggagaggccatgtgtgggcgatcaactatgtaaattgtgaggggctgcctgatcgaggagaaaacttctggcaggcttcgcaagaacttgtgacccgatttgcggcgcagatcattgccggccagtaaaaaccttggcggatcaccttagcagctatggcccttggccctgcgtgag

SEQ ID NO: 62479 - DNA, 476 bp, Zea mays
  unsure (1)..(476): unsure at all n locations
agccttcgcatgactgcaagaaagatgtaccgtcttattgatgataaatcaaattaaacctccgaggattgctataaagttattgtcaaatgcaaagggtatcaatgtaattttacacgggctgcgtcccgtgcctataaatagatgaacagtactcccgtactgttcacgctgacttggcatacactttttcgcatcacctctgtacctttactttccgtcgatctgaaggtacatttgtaatttgtctttatgaatttggtaataaaaataagtcgatgataatactcgtatcattactcatgttgtatatatgtttgctcctttntaccatctatcaatcatacgaaaatctcttcttttgaaccttcgccaagatcattatatccgagggacataatgtcttaatgacaaggagttaacatttacacttttatgtcgcctgtctaattctaacattgaaacaagccccacat

SEQ ID NO: 62480 - DNA, 477 bp, Zea mays
  unsure (1)..(477): unsure at all n locations
ccttgtaacgaggataagcgtaccttgttccttatgtggattgttcttaagncctcttgaaatccttaagggaaatgcttaaatngttcataacatgctttcataagtgcataaactgacacaaatgcacttcacattctgtatgatatagatatgttcttattaacctaattatgtgcaattggcatttaaggccaaaatatgtgtttctctccatgcacatatttagggggagcaatctatgttatatagaactatgatcatgcttatattgatatatccttttgatcatgtctcttttatatatgctatgactaatgtgtttttaagtgtatttcaaaccaagtcatatgtatattgaaagggaaatggaatcttcggcgaagacaaaactntcactccactctatcggtattatctacccttcgccatcacttcacaatgtctctccacattgggtataatcttcactcatat

SEQ ID NO: 62481 - DNA, 233 bp, Zea mays
  unsure (1)..(233): unsure at all n locations
agcttgttgattatattaacaagaatattcctacactgggtaacacaacaaacaaaatcggacgggtggattgtgacatcaacacacatcgcataacactacacggctagggactgacagaaatgcattaaaagagcactctgatgtggctgtccangtaaatcgtgccttaaactcttgcttgactgggcataaacaaaagaagactaatatatggcgacacgattacttat

SEQ ID NO: 62482 - DNA, 488 bp, Zea mays
caaactcaagcttctaagggagagcacattatgggactaacagatgtttattttgtttaatacacgatttgtagcgcatgccaagcaagaaagcaagttggcactcatcatccacacaagaacatcatgactagtgacagaccactagagcttctacacatggacctattcggcccgatcgcttacataagcatcggcgggagtaaagactgtctaattatagtggatgagtattctcgcttcacttgggtgtgtcttttgcaggaaaaatctcatacccaagagactttaaagggattcttgagacgagctcaaaatgagttcgacttaaggatcaagaagattataagcgataacgggacggagttcaagaactctcatattgaagatatccttgaggaggagggcatcaagcatgagttctcttcttcctacaccccacaacaaaatggtgtagtggagaggaagaaattaacatctttggacat

SEQ ID NO: 62483 - DNA, 375 bp, Zea mays
  unsure (1)..(375): unsure at all n locations
cctcaaccgtgcctccatgcaaggttacatccaatgttatgattaagccacatttcacactattagaagtaaaaagtgtagcgaatgctttgaaaagggatactcgattaggtcatgtccctatattaaaaatggattgattattaacaaggatgataaactttgttttatatgctcaaagaagggacatttaattaagtcttgtccncatttaaaacaaaaatgcatagtgttagaaaagaaaatactatctaaccctgtcgcaagcaagagacaaggaanaaagatatcttcaagacttgaagatcgccattgctacatatgccgatagaagggacatcgaatgcaggattgcccattgataactatctcact

SEQ ID NO: 62484 - DNA, 487 bp, Zea mays
  unsure (1)..(487): unsure at all n locations
ntatgataatcgcanagagctttctatacctcatgctgacttgttatgctcgacacgagtaagtatcttcttccaagtccttgaacgattaagtttcttgtctcgctatttttatccatatccgtctggttagtttcattaacttgattatacacctaaaaaggattagcaaccttttccaatatacccatccttgtgcttagatttacgcctcaatctttgccttccaaatctgagatatcacatccatcaaaaataacatggttttgtgaatatctatccatagctttgaaatctaatcaccaactaagctcaattagattataaatacggctccgataccacttgtagaatcgtatgacgctagaataagcaatcagaaaatggttgaatgattgcagaagcttataaataaatatcccaactcctcttaatcacaagaccgaaataatgcactctttattaatcttgtcgcattattgttatg

SEQ ID NO: 62485 - DNA, 478 bp, Zea mays
  unsure (1)..(478): unsure at all n locations
agcttgtaccttgcctcaacatgacctgattggtgattggcgtgccgttntagcgcgtctgctgacgcgctcgctgtcaatccgccttcagtcacgtcaactgccatatctgtccctgtggctgactgacccgcggcccacacgcctggtggtttcgtcgggccacgcatggggcgcctcgttgtcactgccttggtttaaaagataaccttttgtcttttgcagcggccccgaggaggtgcgctatcgcacgcggcggttcgcgtggcggttcgctctttccgcacccgaagtccggcacacaacatgtatgacttgtggacctgngcccacgtgtcatagagtgggctgcctgggtcctagatgcgcatcgggcgggattttctatggcgattcangggcacgcggaagggtttccctgaacaaggactcattgtttcttgataaaggattcaccccgcgtgcagcagttaccttt

SEQ ID NO: 62486 - DNA, 481 bp, Zea mays
  unsure (1)..(481): unsure at all n locations
tataaagaacaatcgatttcatattcttgtggcacaaggcctgttttcttggttgaactgctacaaatatatggtgaatatatcatatgagccttgaagcttcattgaaagttatggccttctcctttatctgctgttgcctgacatatttctatgcagnttcatggtgtaatttatagctgctggatgagtgttattttggacaccagcattaactgtctgtgagggttcattagtgttattngtcaactatcgttggaaggactgaatgagatgtgataatggttagcgtctcatgccactggtgacggatcatccatatacagggacgttacatgcctgagtttgaattggttttgactactggctccttggcagtgttcagtgtttatttgtngaatgatgaatgcagtgtaaatctanggtagtgctgctaatnggacaattgtagtatgcctccaacggagtatatattgctact

SEQ ID NO: 62487 - DNA, 325 bp, Zea mays
  unsure (1)..(325): unsure at all n locations
gcttcgcacctcttaattaactctgctgcatcattcttngctgtgggccaatagaatcctgatctgaagaaccttccgactagtgttctggaagctgcgtgtattccacattgtccagcatgaaccttctccagaagtngcttcccagtggatgggagaatgcacttcatgaggacgcctgatgcaccccttctgtacaggactccccaatgagtgtatagtgagctgactgtctggcaatgcgctctgccgaagtcttgtcgtctggttctttctcattctttatatacttaatgatcgaccttctccagtcatcatagtctga

SEQ ID NO: 62488 - DNA, 395 bp, Zea mays
tctgagatgactgtgggcttcataagaagactccatcctatgcatgtcagaacaattcacaatttcacttatagtgatgacagaggaagccagtttcacaggccacaacatagctcacaatctttatggcaacaacaaagctctttcaggccaccaattccaaagggcagaggcggcaagggcttcaaatgtagatactgtgatcaacccacaaaactctattgcttattctgtggtgaagacaagggccacactacaagaacatgctatgtaaccattcagaagcaaaaagagattgtcgaagcacaagcgcggcagaatcagccgaagcaggttttacatactgcttcatgctactcttcctacatacaagaatatgtgggcaatcaacctgc

SEQ ID NO: 62489 - DNA, 291 bp, Zea mays
cagcatctaagccggctgtccctaaagcatgcttacaataaaattcattccaattcagccgaatttacaggagcaacatggacattgtgttataaaacaaggagcatgatgcttaacattacttctacttagacaaaaggaatgctacagatatgttagggttgcagcattaattatcaacttacatgaaaaagcatctcattctaaatggaaagatactgaacattaagcttacctacaaataatctgcatctcaggttaagcttgaaaaggatcttctatttatcaatc

SEQ ID NO: 62490 - DNA, 507 bp, Zea mays
  unsure (1)..(507): unsure at all n locations
atctctaagcaccgcngcatgcagctttnagggagagccatttatgattaactaatgttcantttgagaaagacanggattggagcgcatgccaagcagggaagcaagttggagtccatcatccacacaagaacatcatgacgaccgacaggccgcttgagctactccacatggatctattcggcccgattgcttacataagcatcggcgggagtaagtattgtcttgtaatagtggatgattattctcgcttcacttgggtattctttttacaggaaaaatctcaaacccaagagactttaaagggattcttgagacgggctcaaaatgagttcggcttaaggatcaagaaaataagaagcgacaatgggacggagttcaagaactctcaaatngaaggctttcttgaggaggagggcatcaagcatgagttctcttcttcctacacacctcaacaaaatggtgtagtggagaggaagaatcgaactctattgtacatggcaagaa

SEQ ID NO: 62491 - DNA, 420 bp, Zea mays
  unsure (1)..(420): unsure at all n locations
atttgtttcgtatttcctctggaaactaatgtttctacaatgtttgtccagcggatataaaattaagcttttgtcatttttgtatgatgccaacgttatagagagagtagtgtctgcaagatttgcagaaatagaaaacaaagagtggatatgataacttggtgatccaagtcatgcctaaatgtttggatgttcttattatcttctagatgagatatgcatcaacttgcatatatactttgaactactcatgaccaattagtgaccatatacttattatattatggagggtggatcttggtatgtaatcacattggatattttcttttaattacatgcttgtatggcaccctttgtggctatcgcattgccatatgtacaaaaatgctgaanagtatatcacagaatntaaacgtcatg

SEQ ID NO: 62492 - DNA, 495 bp, Zea mays
  unsure (1)..(495): unsure at all n locations
acctgcggcatcaagcttctaagggagacacgtgatggtttgtttatttgcttttcgaanaagatagaccttgtgcagcttgtcaagcaggtaaacaagtgggaggagcgcatcacggcaagaatgtgatgaccacttcaagacctctggagctgctgcatatggacctcttcggacccgtcgcctatctgagcataggagggagtaagtatggtttagttattgttgatgacttttcccgcttcacttgggtgttctttttgcaggataagtctgaaacccaatggaccctcaagcgcttcctcaggagagctcataatgagtttgagctcaaggtgaagaagataatgagcgacaacgggtccgaattcaagaaccttcaagtggaggaatctcttgaggaggaagggatcaagcacgagttctccgctctctactcaccacagtanaatggtgtggttgagaggaagaacacgacgctaatctatatggcga

SEQ ID NO: 62493 - DNA, 487 bp, Zea mays
  unsure (1)..(487): unsure at all n locations
atcccttgctcccaccttcaagcggaacaaattgtttttttgtgttttttcgcttcaaaaggggcggggaaacctgcctcatcacaataaaggttgttcaaacttcattttgaaattgtgtttagttgtcagcatgtgttttcttattgaaacattgagttgagcatgatatatggaacttttatgggatgctgcaggtctaaatgatgtaaactctagcggagctacctcggtttttgaatctcttccattggcaattaaatggctaagggaaactgctcaacaaaatcaatcgattcagtttcaagtgaaagcatatgcttcattctctaatggtcttccannatgtccatagcacttagacatcttatcttttgcatctagtgttagaatcatgattcgctcaatactagggttagctctcaacctcatggactcgcagaaatgagtgccagcgtatcacatcatctgtagtaatcatcactga

SEQ ID NO: 62494 - DNA, 429 bp, Zea mays
  unsure (1)..(429): unsure at all n locations
catgcaagcattaagctctttgacgatataattactttatctagtnttaacataaatgttataatgaatgtctgagaagtaaactatgtgtgaagcacggttaaatgcatgatcttgctttctctttcttttatacaagatatgcaagacatgtatgaagatttatgtacatgaatgaataagaatgaatagttttaccctctttgacctttacatagcgatgctctcttcattgagcctacgccttatacttattgagatatcctaagacctatactcaagacaatgtatgaaaatatcttgcacaagagagagttctacaactagtgatccttctctaagtcattgtgttagatatcaagaagatcacacattccataaagatatcatgaagtcttctgttaacttagagcataccaatatatatat

SEQ ID NO: 62495 - DNA, 383 bp, Zea mays
  unsure (1)..(383): unsure at all n locations
tgtaccgntccctgatggaaggaganaaatgatgttcagtgctgttgtcttgtggngttggagatttgtagtctcattctgtctgtcttcacccctgagctccccattagtgtggattttggagccatgacagaaggtggtagaaaaagctagatttggcttgtgcgcattgcatgattgttgtattgtctgataggttgtttggaatggatgataaaaaatgatcgagtgcattcttcacgtatgtagctggattgcattttagtgcttatttgcatccagganaatctggtgattgtttggatccctactaaaactttgcatgtacacatgtcttgtgaactgaggaatcgtagctgtattacattatccctatcatattg

SEQ ID NO: 62496 - DNA, 373 bp, Zea mays
  unsure (1)..(373): unsure at all n locations
gctatgcctaagctggaaaagaatggcatcaagtggcttggtaaagatatcggctaattgatctttagtattaatgtaagacatctcgatatcccccttttgttggtgatccctaagaaaatgataccgaatggctatgtgcttagtgcggctatgctcgacgggattgtcggccatcttaattgcactctcattatcacatagcanagggactttggtaatttgaaccgtntcccgcgggtttgctcatcaaacaattggcgcacaatgcctgggaatgactcggttcggggtggaaagcgacgatttgcttttgaaccaaacaccagatttcaagactggcagtccatggtttctatgattgacccgcatc

SEQ ID NO: 62497 - DNA, 477 bp, Zea mays
tcggctccatctataatatggattggctttgaatctgtccagttgtcttcagccttcctggcatcttcctgactttcgtgaatagcaataggcccttgatccgaaggtatcttcatgcataaatatgatggatgaagaattgcttcgaaagcattgagtgtcccacgaccaatgattgcattgtaaggatactccatgtcgacaatatcaaacacaacttgctcagtccttgtattgttgacaaatccgaaggtcaccgacatcgtgatcttgccaagtgctacgatctgccttcctccgaagccacaaagagggtgtgtagcatcatgaatcgtatcatctggctctttcatctgtctgaaggccttggcaaatataatatccgctgcactgcctgtatcaaccagaacattgtggaccaggaatcccttgatgacacaagaaatgaccatagcatcattgtgagggtaatccttg

SEQ ID NO: 62498 - DNA, 463 bp, Zea mays
  unsure (1)..(463): unsure at all n locations
gagcgtccacgagagcatcagcaaggcataaacttctgcatcttttctgctcaanncatacattagtgcaagagaaactgtctttcactctgaacacatgctatcaatatgacgtttgcattggtctattttagacctttttcttcttaatatatatgatgtgtagctctcctacgctttcgagagagacaaagaaatatgattcagagaaacaactttttttcgtgagcgcgcaggagagctgtgcatcattaaattaagagaagagaacagtccaaaatggaccaaagtacaatgccaaagtatgccaaacacaagaccaccaattcctgctacgcacagaactgcagcctccttttgcgcatgaagacagcagcacgcataataagaacagcaaatgtgccagcatgccacacacccacacaactgctcttcactaagcgnccaatagaacccttgatct

SEQ ID NO: 62499 - DNA, 484 bp, Zea mays
  unsure (1)..(484): unsure at all n locations
tcagcttaatcttgaggacctaagcagatccaggccactgttattgtctttcttatgctagtngctcctgccagcagcaatgatgatgagcccaggtcttctgaggaccaggcaggggaccctctctttgctgatgatgatgatgcagaatctagtgcctaggcggngttgtaagggctttgcctcccccttttgggccttgttgtgtcttttgtgccccggttggtggatattctggtggtttcccatgtatagcaacatgataactattggtgttggcgcgcatgtggcgctntnttggtttaccgaaactaactctaatggagtcgatgactctctgattttcggcatggataattntggtgtctggaacacctgttatttgttatgtgggctccgtttggaatcttctagttgggcccctttcaagtatatttccctcgcgtcatgcttattttttggttctctggatacttctgtttat

SEQ ID NO: 62500 - DNA, 399 bp, Zea mays
  unsure (1)..(399): unsure at all n locations
agcttctcctgaacaagcgtcgcacttactgcatagtgcgaagctgccacatacagcagcagaggagcccctggcgctggtggagttagagttattaaatctatcaaatactatttcagctctttgaaggctttntgctgagctgatccccattgaaaaacttcggctaacttcaacacttcaaagaatggtgaaattctctctgctgatctagatataaatcgatttaaagatgctagtcttcctgttagaccgtgagcccctttctttgtgcttagcggctccatccgaaagatagcttcgattttatttggattagcttcgatcccttttgttgaaaccaaactaccaaggaatttccccttctttactccgaagacacatttttctggattcagc

SEQ ID NO: 62501 - DNA, 426 bp, Zea mays
  unsure (1)..(426): unsure at all n locations
tagaagcactntcgtttcttagtcccctcgacatgatctnttcctcacgtggttaagcgttagaacgaggattatgctccgataccaattgaaagttgcctagaggggggtgaatatgcaagttaaaactttttcaacaaaaactagaagcaaactaggtaaaactgaattgatctcgaaattcacccagttaactttggaaatgagatgttctaaatgatccactgggtttaaagtagtagatctgagaagggcacttctcaaaatccacacaccacaaggatataaacaaatcttccacgaaatggtgagagaacgaagagcacatacaaacacaatgaacaagaacacaagagacacaagatttatcccgaggttcggtcacaccaccaaggtgccctactttctcgttgaggcgcccacaaa

SEQ ID NO: 62502 - DNA, 468 bp, Zea mays
  unsure (1)..(468): unsure at all n locations
tctaagtgacctgcggcatgcagcttgcanaaaggctgctgacatcattgatcttattgagaatcttattgcataccttcaagngntttcctaatgcagatgtaccattgacttttgcctcacacttgataataatcttgcaataattgcaccttgcttccttcacaacactagaatctttgtctatgatcttggtgaaactctgccatacctctgatctgggtgccatagctattcttttcttcacctctttctctgcaagtgcctctgcaataccttcctcgggttcttgagttgagttgtctcgcatcggaacattctcaatcaattctagttgaggcattctntcttcatgttgtgccatctgcaaatgagatgtccttaagcaacattggacacacattcatatttgaaacaatcatcatctaagcaacattggcgagtgtgaacaacactcatatttgcatg

SEQ ID NO: 62503 - DNA, 265 bp, Zea mays
tggagaacatactaacaacaagcgtgaaatacgaagagctgtaaagagttatgtcccacatccatgtggatacgaaaccttgggtgcactacctacttcggtaagcgtttgatgacgcagagatatatagtgtagttctggaccaatacacgggccataagttatcagtactctgtccaagagtattggattcccgaagctagaaacagacatcaaccgctagcgacgacaacatgtagttggtaatctattctactccaactac

SEQ ID NO: 62504 - DNA, 467 bp, Zea mays
  unsure (1)..(467): unsure at all n locations
cgtgggcgccctcggcgtnctgccgcaaccggagtattaagtcttctatctggatgcctcagggccgaacccctcgggcgtggtagtgtcgttgagaatgctgataccgcgcctagtgtatttaggccacgtcccgagcctcttcgagctggtctagagagtcttctctgctggtctggttgcttcggacgtcgtacgcctttgttcttgtggaaccgtattctaagtctgtgggcaagaaagcctcggccccatatactttatagaacggcgagaaacccatggctcggctcggcgtcgttctcagactccagaccaccgagggtagctctttcatccatcgcttgccaaacttgttgaggtcgttgttaatcctctgtttatagtcctgagaaacataccgttggcacgctccacttgcccattcgtcatggggtgagctactgcatgccaattcacacagatgt

SEQ ID NO: 62505 - DNA, 456 bp, Zea mays
  unsure (1)..(456): unsure at all n locations
ngctngagaaggaagaactatagcatacaccatgtgtggtggatagatatcccctaggtcaccgcgacacagattcggactatgggctgattaaaggacctcaatgcgtcaaacaaatgggcttcattggctaatcagccagccccaactagaggatgatatggaactcgaagacgtgggcatgaaggcttcttaaccacattctgcacctgcagaggcgaaaagtaacatagagtcacacgctctttcctaaaatggagaaatattttgttgtatatnggcgtanacctagtggaatgagccctataggggctttggttgttgcattcatgccgttgcatgatgtttctatgtgcaaaatgtggttgaaacatgttaatatatcctatataagctctcggtagattttcatatttttcggaatatatattcagttntcagaaaccaaaatctatt

SEQ ID NO: 62506 - DNA, 343 bp, Zea mays
  unsure (1)..(343): unsure at all n locations
catggcatgaccggagattggggcgccatcttaacacgcctactgacgcgccacattaattcagcgcatatgtcaacgcacgcactgtcaatctgccttcggtcacatcaactgccatatctgtccccgcgaccgactgacccatggcctccacgtcttgcggtttcatcaagccatgcgcggggcgcctcgttgccaccgccttggttaaaaatatcctttngtaagcggcccaatgcggcgcacgatcgtgcgcggcggttcgctctttttgtactcgaagaccggcacaccagctgcatgacttgtgggccctggcccccgtgtcatagactgggtcgtc

SEQ ID NO: 62507 - DNA, 396 bp, Zea mays
  unsure (1)..(396): unsure at all n locations
tccangaaggtcaccttgatgcatagagtaagagcgattaaccttatccatgacagacatgtctgatttcaccttctatgtattggcatgaagttactgctaatggattactctccatgtgatgaacactcaaaccttttgggtacaacttcagactaagagacatggttaggtgttataagtaccacaggtgagtacgagtctcttcaagtgagtacgaatcacagtggaaacgaattttagactaagattaaaaaaagtcacttgctggtactcttagttgtgtgtacatgagatagactgatctattgtgaggacagactatgagggctcaaatcacgaataaagatctactactccggtgtactattagttgttgttagtacagcgagactg

SEQ ID NO: 62508 - DNA, 418 bp, Zea mays
  unsure (1)..(418): unsure at all n locations
agcttgtggaggttcttcatccccacatgtgctaagcggcgatgccacagccagcccatgcaagtcttagccattaagcatgcatctagaccggcctcttcttttgcaaaatcaactaaataaaggttgccgtctaatacacccttaaaagctagtgaaccatcacttcttctaaagacagacacatctacatttgtaaataaacaattatatcccatttgacataattgactgacagatagcaaattatatccaagactctccactaagaatacatttgatatagaatgctcattagaaattgcaattntacctagcccttttaccttgccttgattcccatcaccgaatatgagtgaagtctgggaatccttattcttgacgtaggaggtgaacatcttcttctcccccgtcatat

SEQ ID NO: 62509 - DNA, 472 bp, Zea mays
  unsure (1)..(472): unsure at all n locations
taacgacgatgagtgtgtctctcagcttgaattgaaggagatgatgcgcgtgatgactgaagcttttaaaaaataccaggactctgcggcaacatcctatgagcagcttgatcgacgagttgctgaacttgttacacgcatggacgtactggaggctcattcccccaccaactccagcaccagctcactctcctgtggacgacagcggcggcggcggcggtgatgtttatgcaccactgcgacaacacctcacacgtaatcgacaaggtatgggaggtaatggtagacgtcggcatcataatcttgaaccagaccatgattcatttgctaagattaagttctctattccaccgttcatgggttcttatgatgctgaagcttacttagactgngagatgacggtagaacaaaaatttaattcccatcttgttcctgagcagcatagggttagacaagccactagtgaatttaa

SEQ ID NO: 62510 - DNA, 501 bp, Zea mays
agcttgtccgaatcggtgcagcactctccgacaagcaagaaggcgcccttatcgacttcctatgggccaatcatgatgtctttgcttaaaagcccgtggatatgctaggaatctcgagggaggatgctgaacactcgctgaaaatcaaggctacagctaggccggtgacccagcggcttcgccgttttgatgaagaaaagagcaaggccataggtgaagaggtggcaagactcctagcgatgggaattgtaagggaagtacaccaaccagtgtggatcgcaaatcccgtgcttgtcaagaagaagaatgggagttggaggatgtgtgtcgactacacatggctcaataagcggtgccccaaggaccctttttctgtacaacgtattgatcaagtcgtagattcgaccgatgggtgtgagttcctttccttactagatgcatactcgggctatcaccaaatcatcatgaaggagtctaaccaatacgccaccaccttcatta

SEQ ID NO: 62511 - DNA, 463 bp, Zea mays
  unsure (1)..(463): unsure at all n locations
tctccctgtggaagccaatgccatccttaatgccatggtgtctcccactatagagcatactacgagcaaatttaaatttttcattctctaattcatgctcggcaattntagcatctagtttagctatatgatcattttgttgtttaatcatagcaaggtgatcatgaatagcatcaacattaatatctctacatctagtacaaatagaaacatgctcaacgatagatgtagagggtttgcaaacatttagttcatcaatcttagcatgtaacatggcattttcatttctaagattggaaataacgtcattgcaattatttaattctttagccttagcnaattaattttcattctcaatcttaagggctagcagagattcattcaacatgtcaatcttagcaattaaactagcattatcatttctaagaataacaattgaatcatcacaaacatttgatttctc

SEQ ID NO: 62512 - DNA, 480 bp, Zea mays
  unsure (1)..(480): unsure at all n locations
agctngaagctanntggaagagcataggcaagtgttatacgtttctgctcaagcctagctacgggtgcataggttacaccgaaatccaaaccttcgacttgtggataacccttggctacaagtcgggctatgttccttgtcaccacaccatgctcgtcttgcttgttgcggaagacccacttatttcctacaacattttggttaggacgtggaactaaatgccatacctcattcctcgtgaagttattgagttcctcttgcattgccaacacccaatctgaatcccttaatgcgtcttccaccctgtatggctcaatagaagacacaaaggagtagtgttcacaaaatggcaacacgagatcgagtggtacccccttttgaatatcgcagaatatgttcacagcgtatctcggtgattgcttgtggactcttggtgtggcggcttggacctcatatcttcttgcttgacatatcacctcc

SEQ ID NO: 62513 - DNA, 351 bp, Zea mays
taggagaacaacaagaactctatgaaggctataggcgatgcacatcttggcaaggagtgggactctgattgctcctcctacgactccgacaatgaaagactcgacgccaccgtcttcaacatatcatccctcttgcccaacgatcgtgacacatgccttatgctagggagaagaaagatgtacttatactctacctatgcttcttatgtgatgacgaattgagtgataggataaatacatattcatgttatttacggcctatatgaacctcgagatatattaagattgatgatgcctgatgataagaaatgctttaaatacaaaggattgttgatgaaaaatacaatttta

SEQ ID NO: 62514 - DNA, 495 bp, Zea mays
  unsure (1)..(495): unsure at all n locations
agcttatggcanaactngaggctgaagtccacaatagttcaaagctgaaaaaatcattgacaagccttcagaataaatgtctggagttcagcaatcgatgcgttcaacggctgaagcaggtgttctattntgttgcagccagcaacgagaaatttactccttcggctgaagacctgcctggtgccttcgagcatattgaaggtgaaattgatgatcttgacgaagttatagctggacatggtgacttatgtgccctggtagcttctcggggcacagctgttgcctttctgaagtctggctgtgaacacggaaaggttatcaatagacccaacttcagcttatcaccagcagacttggataacattcccaaccttgcccgaagtattgcanatagatntataaaattagtatggacaaagggtggacaaagcanagctggtgacgaagctcgaagccaccttaagccggtaacaaaatcatacctcatgcttacct

SEQ ID NO: 62515 - DNA, 464 bp, Zea mays
  unsure (1)..(464): unsure at all n locations
ntagactatacttggctgtagttcccccgcctttgcattgcgagcaggacagagaacctgggccgagttggctgatttgttggtgctcacaactcggtgagctagtccagcgttggttcactagaagtgccaatacgctcacccaacaacggttaagagcaggacagagaatcatcgactatgactagctcaccgcccttcgacacactctgctcattntctgttggtgctcgatcgatgggaaatccatggccttcatttcagactagtccatcagcagctacctgatcaatctccaaccttcctcagttccctgatcaagcttactgatacctctccagactcatgcatgtgtggatggcctgcaactaaatccgtccactgaacctncacgcagatctcttcgtcaatggatgtgtggatgggaggggcacccgngtgagtgggtgggatagagtcatgga

SEQ ID NO: 62516 - DNA, 362 bp, Zea mays
  unsure (1)..(362): unsure at all n locations
agctggccaagccctcggacccggccagacttcaccggaggttctagatcgacctcaccggacttcggtcttccgccgccgcacgtggaccgagctatccagtgagtctccgaccaattccttgcgcccacatcttctctggcgtcccatgaacctctctgacccatccaattgctctatctcgccgtgaccaggccggactcctcgccggcgacgagcatncccgcctacgcgcgtggaccgaccgactccggccatctccgacggcgacccgcacaccgttgtgatccccgagacctcccctacgtcctcgaccacttcaccggagcaatctcgccgccggtaagcccctncaccctttc

SEQ ID NO: 62517 - DNA, 377 bp, Zea mays
  unsure (1)..(377): unsure at all n locations
gcttcaagctctactccagagaatattgccaattcttcttagtgcaaattganaccgaaacaaaactgaccgaagccgaagctacaatgagccaggctagcaccgaagctgggccttcagagcccgccaaggagaaaccctcggaaattggagaaaaggcagcggaggaagaagctatataacagatattgcctgaaaaagctgccgctcctactcccgaagcgccttccgtagtccttgaatatattattcgacacgctctgggaaaaagattatctaaagaagaaatttttgaagctaaacactatgcccgagaactatagtacccgaaaggggccttagtgtttaatggcatacatgaagatgacttcttgtat

SEQ ID NO: 62518 - DNA, 425 bp, Zea mays
  unsure (1)..(425): unsure at all n locations
agataaccgccaacaaagcgagtgaataagcttaattctgatcaaacttgacaagtctttagtcttaagcctttcgcacttaaattcttactttctatgcaattgttggttcttgaaatatgtatgaggtactgcacttagggggagtattcaaaactcatatcactcatgaaaacccctagtgcaaggccaaaatacaaatttcaccatttgcctattttctctaaaaattatctagcctatggcaaaatattttgaaaattatgtgaaaatatatgagggtgccaatacctgtcccaacaagtgttattctgtgtgattataagttgggaattggtttggttgaaacctggatagacaaattcaaaaatntcagaactttcctctgtctgggctcacaggacagtccggtgtgcacctgacac

SEQ ID NO: 62519 - DNA, 405 bp, Zea mays
  unsure (1)..(405): unsure at all n locations
agcttgctcaggccttcttctttttctccatattatgaactntactggaatactaccccacttaaaagagaatgagggtggaactattgaatcttgnggatttgaactctttggagtacctcataacaagggtgttacggngccttctgctgatgttgctgcttgagcaggctgcggagagatgactagcacagggttgattttgggagaaccttcttctcatcttctcttcgctatcttcttttcactgaccctttctttctctttgctcttcccactggaggattctatcaaagagtattaccatcatacactggaggaagccaaagactatgaaccatgtacaacagtcttcaacccaagaatcaccaagcattgtgatcttatgggtgagggagtgggaaa

SEQ ID NO: 62520 - DNA, 445 bp, Zea mays
  unsure (1)..(445): unsure at all n locations
ctaagcttctaagggagaatatatgttatgactaacccatgtatattttgataaagacataacttctgcagcttgtcaagcaggaaaacaggtgggaacaagtcattcgagcaataacataataatgacatcaagaccactggagttgctacatatggatctcttcgggcccgttgcttatcttaacatcggaggaatcagtatggtcttgttattggtgatgactattctctcttcacatgaatattatttttgcaggataaatttgaaacccaagaaaccctcaagcatttcttaaggcgagctcaaaatgagtttgagctaaaggtgaaaaagataaggagcgataacggatcanaattcaagaacctttaagtggaagagtaccttgaggaggaaggaatcaagcatgagttctccgccccttacacttccacaacaaaat

SEQ ID NO: 62521 - DNA, 441 bp, Zea mays
  unsure (1)..(441): unsure at all n locations
agcttaccgcatatgaagcacgaacgcttcctcttgtctttggtcttgctgggctgtcccttgcgacctttaagcaccgtcttgaatcttttgatgatgagggccatctcttcatcattaagtctggccgcctcaatttgtgccaccctgctaggtagcgcctacttgcttcttgttgccttgagagcaaggggttgaggctcgttgatcggtccattcaaggcgtcatccacgtatcttgcctccttgatcatcatccgcccgcttacgaattttccgagtacctcctcgggcgtcatcttcgtgtacctgagattctcacgaatattgttcacgagatgaggatcaagaacggtaaatgaccttatcattatgcgtgcgacgtcgngatccgtccatcgcgtgcttccgtagctccttatttatgtgataaagatcttg

SEQ ID NO: 62522 - DNA, 392 bp, Zea mays
ctggcgaccatgtgatcaagctctgtgagtgctatgaggctgaatatcctgagcatctgtttggtgaaggcaagtgtcctctgacctattatgtcccattcactgtgctgcactacttaattgaaacctaaggagttactagctttctaattaccttgtccttgatttaccttttgggttactatggttagctacatgctagcgctttactttaatcaatgaacatgatgagatacaacgatgatactatgattttattctggatatgatgatatacttgtggcatttaaggggactcgggctgtttcccgagtacctcttcgtaaggacctgttcgttgagagaccacccgggataacagtgcaaccatgagggtgaaatgggatgccctt

SEQ ID NO: 62523 - DNA, 479 bp, Zea mays
  unsure (1)..(479): unsure at all n locations
cgctgtgctgcatcaaattggcgcttatgcgatgtctctaagtttctctctttcnccctagccccaggttgcaccacctcaagttcttcagcacgcttggctcatcatgtctagaccatcagttaaaagcatcccgatgcgctcattggcaagtaactctggtgggaaaaggcccttccatcccttataccagttcattatctcattgaaatcacgatttggtgagcacaaccagaggtaaagaacctgctgccacttgctgaagaaatcgacttccaacatatggaccatgagctgtactgggattgcagatgtccacaacatcacccagttgaactgatcgagcttctgggttgctgggttgatctgaaagtcttgcaacgcccatctcagtttacgaatgatataccgcacaatcatgtcttcccagcttgccgaatatacacagttttcacggagaaacactgatatgctgaaca

SEQ ID NO: 62524 - DNA, 473 bp, Zea mays
  unsure (1)..(473): unsure at all n locations
agcttcatctcccgaagtattttcggtcatttctaccttctcgggttntgcggccgtagtctcttcggtggctgcggcagcttcttccgtgaccatgtttagtagcattttgtctatatcagcaaccatgccttctaagtttatatcttcgaatttagcatcctcggctctggcctcttctgcggcagcttccgaaggtacaacttcagtagctatcatactttcaatagctggcgtcttcagagctgaggctcctggtggtgttgcttcaatgacttctgtcacagtaacgattctttgcctctntggcctaggtgctttcgtttttgtgggctccttttccttctgaanaagcttcgtcagatgtagtcccagtggacttagttggacagggcaaagttcagtcattacctttatgatttcctncacttcggcggcagaggatgtcgcagaagtcctttctttttcatcga

SEQ ID NO: 62525 - DNA, 489 bp, Zea mays
  unsure (1)..(489): unsure at all n locations
ggaggttgactcgccgaagcaacaganactgcagggtgggtgcctacatattctgggatgtaaggcgaatgatacgaagcagtgtgcatgacctgcttctgctgagcctgttgtgctgcagcttcggctatttccttttgcttctggatggtaacatggcacatcctggtggtatggcccttgttctcaccacagaacaagcaaaaaattcttcttggttgatctccaaatctttcgccgaagcccctagcacctctgcctcttggagctggtggtcggaaggagccttgctgttgccccgaagcctgtgaggagcactgtggcctttgctgctggctccccctatcatcatnttgagtagagttgtgaattgacctaacgtgcctcggatagaatcttcctccgaagcccctggtcatttcagaaaacctgaaagcctcctcccttctttgacgaanatcattatcggcccgaatatactcgtccatc

SEQ ID NO: 62526 - DNA, 309 bp, Zea mays
agcttatcgtggttctcgacggggcacgggcactacggtggccacggaacaaacggtggacgtcggcgggcggcggccgatgttctcggttcacgtgggcagagcgagagagagggcaagagctgggtttagggcgcatatggaataggggaggtgagcgagcagggcgcgaggttcaaaaggggcgcgagggctctgtcgtggccggagaacgcgcggacgtgggcgcgtcaactacggggagatcatgtgcgggaggattaggactgctgacaagtgaggacggcgggacatatacagggatagagc

SEQ ID NO: 62527 - DNA, 304 bp, Zea mays
ctgtagaacttgactgaagtttgtgaaggtggttagtcttgactctatatgtgctttgcgacatcggagtgaattatgattcatacgcctttaaaaggaaagctattcgctattcgggggcctttttcttagtacatactttttatgtggcgatggtatgccatccttgttatgttgatctgcatgcgactcatcatcatgtcattaagtggatcacaattgtcaaatcatgttgctactttaaattagaagttcaataaatcagtagttatgtcctctcccctttctattgcagatagaaaac

SEQ ID NO: 62528 - DNA, 477 bp, Zea mays
  unsure (1)..(477): unsure at all n locations
agcttcatcactctcagnggatcttatgttaccttctgangcccagagggctcaagaatgctggaggaagcttcagtataatgacagtcaaggttcttcactctcaaatatgcaggaatgtgctaacttatgttgatgacatcatagtaaaaagcacgaaacaagaaaatcatatcgtcgatttacaagagacgtttgccatattcaggcaagctggtctcaagttaaatacaaaaaagtgtgttctcggagtaaagaatggcaagttccttggctgtctggtatcaacaaagggtatcacagctaacccaagtaagatcgatgctattctttggatggagctgccaaattcatagaaagggctcaacgattgtgacgaatgctggcatcactgaatatattatatcaagatcagcagagagtaatctgcccttctttgaatactaaagcagccgaacttttcaatgggtctgctca

SEQ ID NO: 62529 - DNA, 365 bp, Zea mays
  unsure (1)..(365): unsure at all n locations
ctaatgaatcaaagattgttcccaatattacccgaagcatcggcttcctagacaattaagagaaaccctggcgggttacaaagaggaagttttcccataagttggcttaaactagcatcaagataccaagaatatttattttggtgcagcttcagaaaactcttgtattctgactaaaccattcttaatgcaagggttgatgctaagtaacgcgttgagaatgcaacaagagacagaggaanaagagctttccgctctttatgacgaagttgctgaacttcgtaaatctttggaggaaaaatatgcacagatagcatctttgaatgaataggtatataaagctgtaaagcagaatgactgagcca

SEQ ID NO: 62530 - DNA, 428 bp, Zea mays
  unsure (1)..(428): unsure at all n locations
agcttgtgaagggtcttcatcctcacatgtgctattcggcgatgccacagccagcccatgctagtcttagcaattaagcatgcatctagaccggcctcctcttttgcaaaatcaactaaataaagtttgccgtctagtacacccttaaaagctaatgaaccatcacttctttgaaagacaggcacatctacatttgtgaataaacagttatatcccatattacaaagntgactcacagacaacaagttatatccaagtgactcaactaagaacacattataaatagagtgctcggatgaaatagcaattnttcctaaccctatcaccttgccttggttcccatcaccgaatatgattgaatcttggggatccttgttcttgacgtangaagagaacatcctcttttcccccgtcatgtnggttgtgca

SEQ ID NO: 62531 - DNA, 477 bp, Zea mays
  unsure (1)..(477): unsure at all n locations
atatcatagcatgatgcatatgcgagtaggatacggatggcttccagtctagcaaccggtgcaaaggtctctccaaaatctaagccttcaacttgagagaatccctttgcaacaagtcttgccttgttccttacaatcacgccttgatcatcttgtttgtttctgaacacccactttgttccaatgattcttgcatcttgtgggggcttctccagggtccaaacttggttacgggagaagttgttaagttcttcatgcatggcgttcacccagtccggatcctgtagcgcctcatctatacatgtaggctcgacacaagaaacaaaggagtgatgttcaataaaagaagcatgtctatgtgatcgagtaataaccccttgtgaaagactcccaatgatttggtntgaggatgagctngaagtagtgatgaatttctcttgcaaccacttgggaagaagatcctggagcatcaacatc

SEQ ID NO: 62532 - DNA, 478 bp, Zea mays
  unsure (1)..(478): unsure at all n locations
agctnngtgttcatattataacgcaaattaattagttgctctcttcactgagggcagaatagtcagacacccatcatagtcaatgaataatcctatgcatgcaatcctgtgcatgcaaagaacttcgattcacctggacaccataactgccattagagtttactggaaactctactgaaaaatagattactgctcttctcatacaagcgcgggacaatgtgctgatggggcacaagggtaacacatgctcaagtcttaacatgtttggcttccgagcaaactttcttcagacccccaaggaaatataatatccgatccgatatgtgtcgatgctcatccaagcatactcccgttgcaactcacgggcacacacctagtntanacaaaagagcacaaaatactaactccgaactaccgtctgaacgaagtataatagaatngtaccgtcacaatacgggtcggngatacatgagataat

SEQ ID NO: 62533 - DNA, 468 bp, Zea mays
  unsure (1)..(468): unsure at all n locations
actccatctatattatggattgccttggaatcagtccagctttcttctgttcttctggcagcttcctgactcccatgaatagcaataggcccttggtccgaaggtatcttcatgcagagataagctgggtgaagaattgcttcaaaagcatttagggtaccacgaccaatgatggcgttgtatgggtattccatgtcaacaatatcaaacacaatttgctcagtccttgtgttattaacaaatccgaaggttaccggcatggtaatcttcccgagtgccacaatctgccgccctccgaagccacaaagagggtgcgtagcatcatgaatcttgtcttcaagctcttgcatctgtctgaaggctntggcaaatataatgtcagctgcactgcctgtgtcaactatgacattgtgaaccagaaaccctttgatcacacaagaaatgaccatagcatcattgtgaggatag

SEQ ID NO: 62534 - DNA, 477 bp, Zea mays
cacctgcggcatgctagctagagtatgacggaaggcgatcatgacgattgatatgatgatcacgaagctatgcgcacaaaaagctttggcatgactgcagaaaatgggaaccgacttgtatgatgaaaagccaaattagacctcgaagaatcactatagagttattgataaatgtaaagggcattaatgtaattctccacgggctgcgtgctgtgcttataaatagatgaagcagactcccgtatcgttcacgctgatctggcatttgcttttcacatcacgcctgtacctttactttatgacaatccgaaggtacatttataatttgttattatgactctgatgatacaaaataaaaatatgctgatgataatattcgtattattatctggatttcatgtacgtactcttcgtcatcatccatcgaacttacgaaagactgcttctttataaccttcgacctgaattcattatatc

SEQ ID NO: 62535 - DNA, 478 bp, Zea mays
  unsure (1)..(478): unsure at all n locations
caatctatcacagaanacccacattgttcttcctcgcttgtgtctctaatgatgtctgggtcgtacacacacccagacaaacaataagaaatgacgaaatgccgccaacctacattggaatgaatgggaggtgagaatgaattacgaggggatcatcggggagtatcttggacatgatcttaaggaaggcgacgtggaacaccctgtagccttgctcgaagctggtgaaggctgagcaagaggcccctcctcatcatcatctgtctcaaggtgggagagggcctattcgtcatcaccatggaggatgtggccctgcagggattcaatgtgtgctctcgctgctgatcgtcgagaccttcctcctcgagtcttcgtcgttcgagttgtagtcgcgggcccatgggtgcttcagttgctatggaagttgttttataataatactcagatgttcacactcactcgcgtaccacatcttgaa

SEQ ID NO: 62536 - DNA, 504 bp, Zea mays
agtcacctgaggcatgcacgctcgagtcagctcttctacaaagaagtattgatgcccaatgtaccgacaaaggtttgaaacacattcatgagataatagaagccaacaaagctaattgtttcagaaaatacgaccaaggaatattgtggttcaataatcgcatagttgtgcctaaagatgctgaggcccgccaccaaattttggatgaagctcatcttagtcgatattccattcatcccggaagtactatgatgtaccaacacttaaagcaacattattggtggacaaaaatgaagcttgagattgcacgctatgtggcaagatgtgacgcctgtatacgtgtcaaggcagtgcacatgaagaccgctggaccactgcaatctttacccatcccaacttggaaatgggaagacattaacatggatgttattgtgggatctcccacaatagttaaaggttttgattctgtatgggttataattgatcggctacaaagatcgccac

SEQ ID NO: 62537 - DNA, 456 bp, Zea mays
gcttctgccatgacatgactgtccctggccggagagaagaataccatgtctttgctctttttcggactgccataatgaaggacttcgccatgactgcggtgttgcccccgtaccaagatattgttgcttcgtagctcatcagaaactgcttcggatctgagtgcccatcatatatgggcagctgaggtggcttgtatgatgggggccatggagtaacttgcacttctggtgataaaggagaaacatcgcctaaagaaaattttccatgatgcaaatcgtcataccaatcatcaccattgtatgaactgacctgacgaacctcttcttgtggaggtcttcggtcctggtcatcttgagtgagatgacagatttctttagcaacttcatcgatcttcttctgtagatcggaaagacgaagcattttctctctattctttcaacctgctgatggatagc

SEQ ID NO: 62538 - DNA, 443 bp, Zea mays
  unsure (1)..(443): unsure at all n locations
gagctcggacaaatctggaataaatcggcggtaataaccagccattccaaggaaacttcggacttgatgtatagtggttaggggtttccactccaaaatatccttgactntgctgggatccaccgcaatcccgttagagagacaacacgtgtcccacaaattggatcccctctagccagaacgcgcacttactgaacttagcatataaatggtgctcccttaagcgcgttaatactatccgcaaatgtcgagcatgctcctcttcattcttggaatatgtgaatatatcatggatgaataccaccacgaatttatgcaactctggcgtgaataccgagttcataatatatgtgaagtgggcaggagcatgtgttagtccgaaagacatatccacatattcaaataatccataccgcgtagtgaatgtccgcgtgtgtatatct

SEQ ID NO: 62539 - DNA, 342 bp, Zea mays
gcatgtcaagcagggaagtaagttggagctcatcatccacacaataacatcatgaccaccgacacaccacttgagctactccacatggatctattcggcacgataccttgcataagcatctgggggaggtcagaatgtcttgtaattggggatgaatattctcgcttcacttgggtattctgtttgtagggataaatctcatacccaagaggccttaaagagattcttaagacgggctcaaaatgagtttatattgagaatcacaaagattagaagtgacaatggaatggagttcagaactctcaaattgaaagattcttgatgaggagggcataagcatga

SEQ ID NO: 62540 - DNA, 362 bp, Zea mays
  unsure (1)..(362): unsure at all n locations
cacaacaaactccgaaagagtgttagatacacagtacgactggtgcacgccggttcaacagctacgtgcgcaagtngaaccactctgaaccaatccaactgttaaaaaccttagactaaaagctactcgaaaagtacttcacaagttcttgaaagaagtaagatatagcttagtgacgatgaaaagatgtatatgtaaaggctatatttacttctatataaactctacagagaaatctttatgtcaatcttgcaatgaaaagaatatctcaagttgaaacaagcaagaacacaagacacaagaattaatccgaggttcggccacaccacataggtgtcctactccaccgtgaggagcccaca

SEQ ID NO: 62541 - DNA, 466 bp, Zea mays
agcttgccaagccctcggacccgaccggacttcatcggaggcccgagatcaacctcaccggacttcggtcttccgccgccgctcgtggaccgagctatccagtgagtctccgaccaattccttgcgctcatagcttctctggcaacccgtggacctccctgacctatttgattgaactatctcgccgtgaccaggccggtctcctcgccgccgacgagcatccccgcctgcgcgcatggaccgaccgactccagccatctccgacggcgttccgcacaccgttgtgatccccgcgacctccccttcatcctcgaccacttcaccggaacagtctcgccgccggtaagcccctccgcccttttcttcgccgcggctactgtttgaggtagaagaaagacctcgggttaggttttgtagaacccgaggggttttctgtaatgtcagcgactcatgtaaatagtaacct

SEQ ID NO: 62542 - DNA, 424 bp, Zea mays
  unsure (1)..(424): unsure at all n locations
ctntcactgcattctcgagcgaaccatctctgttgtattagcttctgttaaagaaagagcttcatcaaaactataaaaatcatcagcttcgtaaaaaccgtaaaaaattcatcatcagatggcgagagtacgctcgactgcgagggtgacccgtgaaggggaggagactgaagccactgagacagctccgatctccaaagtcatgagacaatcaggattagttgtgacagagggagccattgacaaaggtgcacctactgccgaagctgaataagctgatatcgaggaagaaaatgttgatgaagaagaggaagactattgtcgacgtttcgaccccggtgggtccctggaccaacgagtaaattgtcgctgcgtgtcccagcccagatgggtcggcgcaagactgaacacaatggggagcaat

SEQ ID NO: 62543 - DNA, 480 bp, Zea mays
  unsure (1)..(480): unsure at all n locations
agcttgccaatacttgtcaaagcaacaacacctgtcagcacagcaactgcagaccataccagtaacttggcctttcgcatgttggggactggatatgatcggacctttcaagaaagctcaggggggatacactcatgtattggtagtgatcgacaaattcactaaatggatagagttcaagcccattgcttctttaacctctgctaaggccgtggaattcatacaggacataatattcagattcgggataccaaacagcatcataactgacttatgatccaacttcacaagttcagaattcttcgacttctgcgagcaaaagtgcattcagatcaagtatgcatctgtagcacatccaagagccaacgggcatgttgagcgagccaacgggatgatattggaggcactgaggaanaaggtcttctataagaatgaanagttcgcaggaaagtggataagggaactgccttatgtcgtttg

SEQ ID NO: 62544 - DNA, 482 bp, Zea mays
  unsure (1)..(482): unsure at all n locations
ctatctaatanaacccgttgtcagaattaccaactctaaaactttcatgacaatcttaataacaacaccatgaaactcatcaataagactagtattactacctcattatgagtcgtagaattatagtctatgaaacaaaagattgaaatagttcattgagagaggtggtacatctatgttttattgcattttatgttttaaacgaatgaagttctccactaagaatgcccttacatcccgtttggatcattggaattgaattccattctagaaatagtaatttagtcatatatcattaagccaattcgattttatacaaaatatatttgtatactattattagcaagatgttaagatatttatgtgctacatttntactataaaggagtgagacaaagagtgtcatgtgatgttcagagtataaacaaattctactaatgcttaaatcatttccatcccacccatgaattgagaacgctatt

SEQ ID NO: 62545 - DNA, 370 bp, Zea mays
  unsure (1)..(370): unsure at all n locations
tgcatgcttaatggctaatacttgcatgggctggctgtggcatcacccgttaacacatgtggggatgaagaacctccacatgcttctaaagggagaacacgtgatacgtctaaccaatgttcatttcgaaaaagatagaccttgtgcagctcgtctagcacggaaacaggtgggaagctctcatcactccacaaatgtgatgacaacatcaagacccctggagctgctacatatggacctcttcagacccgtcgcctatctgagcataggaggaagtaagtatggtctagttatcgttgatgactattcgcgcttcacttgggtgttctttttgcaggataagtctganacccaagggaccctcaagcgc

SEQ ID NO: 62546 - DNA, 490 bp, Zea mays
gacactaaaaactcagctgcttgctcttaagatgctttttgccatccttttctgatatatattccatgagttcatccagaaacagcccacaatgaagatatctaaagcactgggtctattttttccttacaagcacgcctcattcctgatattccaaagagaccaaagcacagcactgcaaccaactgttagtatattcctattatctttgtgaaaaagcgggagccaatgactaaacatctcttcgggattattaggaatagaaagtggatgcaatgcgacctgaataattctccaagtgaacttcgcgatttgacagccaaagaaaatgtcttgggttgtttcaggacaagcacaccaagtgcagtttacatttccttgccagcttcttatttataaggttcaccttagactgaatcctgtctctcagtaagagccatagaaaagactttattctttggtgaatgttagttttccaaatgaacatata

SEQ ID NO: 62547 - DNA, 399 bp, Zea mays
cgcaagctatgaagagttcttattccaacatgggctattcggcggggccagagccaacccatgttagtcttagcaattaagcaagagtcgagttcagctctatcaagaactaccaagtatagctgaccctctaacactcccttaaatgctattgaatcatcacttcttctaaagacagtgacacctacatcagtgaatagacagttgtagcccatttgacataattgtgaaacggaaagcaaattgtaatctaaagaatctacaacaaagacattggagatagaatggtcaggagatatagtcaatttaccaagacctttgaccaaaccttgatttccattcccaaatgtgatagctcggtgggaatcttggcttttctcgtaagaggagaacatcttc

SEQ ID NO: 62548 - DNA, 317 bp, Zea mays
  unsure (1)..(317): unsure at all n locations
atatttgatatctgctccatacctaattccattttctttgtttgttgattctatattaatggtttntctttgaggtctctttntttctttccttcanatatagaatatagacctcagaaaagatgacattttacctgtgctattgtgcagaacccgccctgatggcaggaaattcttacatacttncgtgggtctgaacttcagaactacttcacacgcatatttgaagaataacttgaaggtcctgttttccacttcaggaaatcttacatacttncttgtgactaccactatgctctgggtatttcatatgctct

SEQ ID NO: 62549 - DNA, 329 bp, Zea mays
  unsure (1)..(329): unsure at all n locations
aggtcgggtatgatgctattcggtattccgaacctgaatattatggcttgtatgaattccactggcttacccgaagttatagaagcgatgggcttgtgctctatccacttagtgaatgtgtcaatagcaaccacgacatgagtgtatccnccttgagcttcttgaaggtccaatcatatacaagccccagcatgcgaatggccatgtcacacgtatgggttgcagttgttgtgctggtagatgctgctattatgataagtattaacaagcttcacatctctagactaactcaatggcattactctttgctgttggccgtagaaaccaga

SEQ ID NO: 62550 - DNA, 368 bp, Zea mays
ggaccgtgacacgcgtcaccgggatatgttaaaccttcctctcaaacttcatcccccaccggcgctcgtgatcgcgtgaattaccttacccatgttttattcatgtcacaatagcctctaccgctccccaagaagcttaccgtgccctttgattggacttaggccccgtcgatggtcggcacacacgccgtcgacgaggacacccgactgcgcacgttgaccgagcgattcctgtcatctgccgcaacgagcccgacgtcgttgtgaccgccagaacctcccccagcttaccctacccctcgtcggacttttctcgtctgcggtaagcgcgcgcacccctttcttctctgtggatactgtttacacct

SEQ ID NO: 62551 - DNA, 157 bp, Zea mays
  unsure (1)..(157): unsure at all n locations
acaacatggatgtatagcagaaggcaccgaatggagtgatgaacgctgttctttcctcatcttctttcngtaggctaatctggtgatacccagagtagcagtccaagagagacagcacagaacatacagcggtggaatctaccacctgatctatcct

SEQ ID NO: 62552 - DNA, 461 bp, Zea mays
  unsure (1)..(461): unsure at all n locations
cctatgaaactcagctgagttttcctttacaaaggataatggttgctcataaggataatgaggggatgaaacacatccatgagaaaatagaggccgganaagccacatgcttctttatgatgatcaaggcgttgtatggttcaacaaccgcatagttgtgccgacaaatgaagagctccgccagcaaattatggatgaagcacctcttagtcgctattctattcatcccggaagcactaagatgtatcaagatctgaaacaacattattggtggacgaagatgaaaattgaaatcgcatgctatgtggcaaggtgtgacacatgcaaacgtgtcaaagccatacatatgaagactgcaggtccattacaatctttaccaataccaacatggaaatgggaagatataagcatggacttcattgtgggattgcccaggactgcanaagggtatgattctatct

SEQ ID NO: 62553 - DNA, 484 bp, Zea mays
gcttcggctgcatctatattatggattgcctttgaatctgtccagtttcctttcagctttctggcagcttcctggctcccgtgaatagcaataggcccatgatccaaaggtatcttcatgcaaagatatgctggatgaagaattgcttcgaaagtagtgagtgttccgcgaccaatgattgcattgtaggggtactccatgtcgacaatatcaaacacaacttgcttagttcttgtattgttaacaaatccgaaggttactggcattgtgatcttgccaagtgctacaatctgccttccttcgaagccacaaagagggtgtgtagcatcatgaatcttgtcttcgggctcctcgcattgtctgaaggccttagcaaatataatgtccgctgcactgcatgtatcaaccagaacattgtggaccagaaaccctttgataacataagaaataaccatagcatcattgtgagggtaatccttgagct

SEQ ID NO: 62554 - DNA, 472 bp, Zea mays
  unsure (1)..(472): unsure at all n locations
cttctgcacatagcttcgtgaccgtcttatccttcgtcatgatctgttttcattccagtcaagcttcgtcttaaccctgctcttatatatccgcgacctgactccgaaggtgcatgttcacatattacactcggaaaacattgtcaaactatgtttttgaggaccttcgggagccgaaggcccccaacacatatcaaaatacataattntcaatattttttctaacaaatcattatttcacaaatggagtttttgtatcacaaaatttgaacccaaaggttggttctacaaattagtcaaacaaaatgtgtgcatcgacatgagtgcatcaaacacttaacaaaatgtgtgcatcgacatgaatgcatcaaacacttaacaaaattntatctaatcaggaaatcatcatttcattatttgaaaacatatatttttttctttctgctagagattaataatataaactatagta

SEQ ID NO: 62555 - DNA, 299 bp, Zea mays
agctcgaggtgctccaatggagtgagacaagaagagagagctattggtcgtagttgggaagagaatggtccggatgaccgctggcgactaagagaggggaaagaaatacccctttctgccaatggtcagattttaagtcacgacaatactctagtccctacttcagaaggagaaggatcgccaaatgataatgatgggttgtatgaagaatgagtcagtcgctatgaacgtgttcctgaaaaacagccgtagattcattactagaactacgttatagatgctgccttggatctattttc

SEQ ID NO: 62556 - DNA, 477 bp, Zea mays
  unsure (1)..(477): unsure at all n locations
tctanagggagaacacattntaggattaacaaatgttcattttgagaaagacaggatttgtagcgcatgccaggcagggaagcaagttggtgctcatcatccacacaagaacatcatgacaacggacaggccactggagctcctacacatggatctattcggcccgattgcttacataagcatcggcgggagtaagtactgtctagttattgtggatgagtattctcgcttcacttgggtattctttttacaggaaaaatctcaaacccaagagatcttatagggattcttgagacgggctcaaaatgagtttggattaaggatcaagaaaataagaagcgacaacgggacggagttcaagaactcacaaattgaaggctttcttgaggaggagggcatcaagcatgaagtctcttctccctacacacctcaacanaatggtgtagtagagaggaagaatcgaactctattggacat

SEQ ID NO: 62557 - DNA, 411 bp, Zea mays
ggcgtcccggacaaattgatgtcctaacgcgaaatgaaagcatagacctaatttaacatactagaattataataatagtatgtaataacatattgttataaaacataaaggcgtgaacttattattatacacggcacataatattcactcgaatatagacaatctctctgtgttctttgaaatgaaaccctcaggaatatattcataatcaatattatctagcatatctccctcaactgctatgacatccaatgcattaagtctttcttgagacattgtagagcgtacgtatgactttaatagcttatcaatgggtcattatctctatcagataattgaagatgagccttctgaatatctgcacattgaaacctggtagctataacactatgaatacgactgctccaatga

SEQ ID NO: 62558 - DNA, 491 bp, Zea mays
  unsure (1)..(491): unsure at all n locations
ctatctanattcatgtaaacttctgaaaataatgacaatagaaattgtcgctatttatatggcgagattntgcaatagattaattgctttgttgctttagctcaaccctctatctttattctaataattaatggtcacattcatcttttaatgaggccaagaccttttattcatcgtcttgataaaacaagacttcccttaagaaggtaaattacaggcatatgtacacatggtaaccatgcagccatgcaccaactattttaggcatntgagcaaatatcaagtgagaaagaaaacaacatacataattgcgtgccgctgtctccttgagacactgcaccaaatcatatgtctcctgcaaacagaactatgtggtgttacataaaagcactgatgtaagaaattgtatgtaacacacnaaaacactgatgcttgactgaataattaatactatgatatggagatccataaccaagatgcctaacaacaca

SEQ ID NO: 62559 - DNA, 466 bp, Zea mays
  unsure (1)..(466): unsure at all n locations
agcttcttcctccnctccggccgccaacgcatcgtggtcaaattgagagccaccgctctcggagtctataaattgagccccccctcggcttcgctatgtattttactagctatcgcacccgctcccacacccgattgtccaccagctcgcctgaattttgcacttccccaaaatcggttctccgccgccgtagaagtgaactcaccgtcgccagcccaactccggtcagtgcccgcccttttcttcctcgtttgagcattctcatgcctctgtgatgctccccgacccctttaattgaactagaccggcgcccatcgccgggaacacgatcatgttgccgttgtgcttacggccaccgtggccggagctccctagtccaccgatagtgtaatttagttagtggaaaacgtcatagtgaactcgaattgggctcagccgaagattagcaccagtcttagcctcaatc

SEQ ID NO: 62560 - DNA, 503 bp, Zea mays
  unsure (1)..(503): unsure at all n locations
ccttacatactcagcttggtcaccagcggctnggtgcaccctccaacctgaaagcaagaataggacgactgtgtggcagcgtttgagtcatcgtggtccacggccttcggtgtggcagaggctgtccatcatggattgggccactccatcgagggaggtgttccagtggaagacaccagtttggagaagaattgctccaccactggatgcggtggctttggcaagtgatgaagaacaggtgatcgtccacaataagagaaagagaagacattcgaagaaaggtcgtggagctttggagcataaaatcttgggcgcccaagttttcgaggctctgcacgtccctccttgctctcctgctgctgctcctgtgggggggggccctcccatgctcccgtgacaaatacacccttctgtgtggttgaattctcaattgccatggctacggaggaggtcaatcttcgacgatgtgttggaggaagtggcatgcaattttggcatccaca

SEQ ID NO: 62561 - DNA, 471 bp, Zea mays
  unsure (1)..(471): unsure at all n locations
agctntagtagttattgtttgcatcacacatggatatgtaaggattcatatgtattgtacgctatcgatgaaggtaaaccttgcttaaccaaaccaaatccaagtaagtaactccacatttttaaactttacaattcttccgatctgaacctttacctgaactatgaactactgattactgtagaaaacgagtcatctaatgttttcttacattctccttgactatgggccctaagtatcacatctctcaggtgagtctctaactntgaactttttagcatgattgattgttacagggctatcgtttattgtatacatcttatctatcattgcacatttcagaaagtttccgaactgtatttataatcttgccaataataaattcataatccctgcaaaatcttgaccaanatgaatccctcaacgtggccagaattgagcaacatanagctgatgaacggacactacaac

SEQ ID NO: 62562 - DNA, 452 bp, Zea mays
accctttgtcacacaatgatatgatctgtacggaaatattctgacaacatcaaatatgaaactttgtttcacgcagctaccagagaaacacatgctcttattgaactagcaaattaactctcaaaagaaatgatgcatccatctcacaggagctacttacctttgttggatgtgtccatatactgatccgcccatgaaaatttgccactaacgatgcacgatggcaggaccgatgacaccattcaatgaactgaacaaagcttcgtggagaatctgatcaattgacaataccattacggtgaaacatgctgagtatatctcagatgagcaaacaacagagtatcatacttgattggcatctgcttgtacaagtcataagctgggtacaagtacaccactaaatataacaagattgaaatttgcgcatgtgtgtctagcaaagaacaacatgc

SEQ ID NO: 62563 - DNA, 412 bp, Zea mays
  unsure (1)..(412): unsure at all n locations
gcttaaatagccaacatgaagcctctgttatttttataggattctcggaaatntctagaacagaagcgcagttcaacctacctgttgcggacttgtcctcagatgctatgagttaagaacaagacaacacaacatgtttaaggttaatgcccttcgtccttcaaagcattttttccttaggatataatgatcttcagacgaatgttatgaaggacgaaccttcatcatcacagtgtatattaatgaaagaataagcatatgaagtacaaaagataacatgaataatcatataacattattaatatatatattctgttcattatcatggataaacaganacaatacatttgtaccttcggcttgacagaatgtaaagtccaagcgtgacgcacgggtgaatacaagtcagcgt

SEQ ID NO: 62564 - DNA, 369 bp, Zea mays
  unsure (1)..(369): unsure at all n locations
gtgcctggctactggattcctcgagcgcgcgccctcctttctgctcggctgccatggacggctccctgccatgtgacgtcgtcgaggtgcgccacgcgcccggattaccttccattcattcatagctgcctggccgtctacctccccaagctccgagtacctgcagtactgctctgcgccgtgctatactcgcggaggtccttcgcggcgatcatctccctgcgtcagctcgctgcgccgaactgcccagcacctccttgctcgctgttcgtcctagcgcgtgcacttgagcttgccgatgatgcttnggctggggagacctgctccctgctcgccagcatttggcctctactctagctcgcagacgct

SEQ ID NO: 62565 - DNA, 398 bp, Zea mays
  unsure (1)..(398): unsure at all n locations
agctnttaagggtgtattagatggcaagctctatttagttgatttctcanaggagaatgccgatctagatgcatgcttaatcgctaagactaatatgggctggctttgacatcgccgtctagcacatgttgggatgaagaacattcataaacttctaaagggagatcatgtgttagtactaaccgatgtctattttgagaaagacagaccttgtgcagcgtgccaagcagggaaacaggtgggaagcactcatcacagcatgaatgtgatgacaacgtcaaaaccactggaactccttcacatggacctcttcggcccgttgcctatctcagcatcgggggaagtaagtatggtcgtgtgatagttgatgattnttcccgcttcacttgggtattctt

SEQ ID NO: 62566 - DNA, 480 bp, Zea mays
  unsure (1)..(480): unsure at all n locations
tatgagagaagattagcaatctacttatacacttcaacacataaatcccatacaaccaggtgacccaacctaaaccaaagattatgacattaactactacacattgtcaaagtaaaaccattgttaaggctacaacagcaccacaatacacacaggtacacgataagaaatacaagggttcaatcactcctagaataggctattctagagtaagtacataatacaaccctttgccctgcgctctacgggcctatttggttcgctgcctaacttgccacactttgcctaacttttctgtctaaggttagttctntaattcaagcgactaaccttatgcaaaatgtggcacagttagctacgaaccanacaggctctacatctttcataatcctctcatactcagttagaattcctttcatagattgtatatgcccttaataatgagacattntcttaatgtcagatatttcaaatggacaa

SEQ ID NO: 62567 - DNA, 470 bp, Zea mays
  unsure (1)..(470): unsure at all n locations
agcttactgggtgatctacttgtattttatatggtatgggtncatgtggggcaacataacattggttgtcatcagacagacgacgctattcaaccaacaatatagatcccttaaccaaagaattaaactgaaatattatacagtagagattttgaaatatatgttagtcacaaaaaaagtagtgtgccttttcaattgaaaatgccactacattttttttctccacagtcacagaggagaatattgatctgcgtgcacatggacatacatcgtccacatgccacgttactaagggctcctttgatagggcttatttttcaccttcggctctggctcatgcaaanaatgtgccaaacacctctttttcaaatggcttcaccagtgaagtgcttttccaaaatgaactanagggcattgagccaaaaaaagtggctcacccggcttcagctcatgtcattnttgcacaatag

SEQ ID NO: 62568 - DNA, 444 bp, Zea mays
tccgtccagcattttaagccacttgggcatccgaattgtgcaatatgtcccactacgggttatgaagctgggtttcgggtcatcctccttcttcatccagattttattatattctgaatagcaatccagcaaactcataagctctgatgaagctgctgcatcgactaaagaatctatccttggcaatggaaactcatccttcggacaggccttattgaggtcaggaaaatcgatacacattctccatttaccattggccttcttcaccataacagtgttagccaaccattctgggtattttacctctctaataactccggcactgaggagacttttcacttcatttcgagcaccttcggccttgtcatcagacatcttacgaagcctctgcttcctgtgtctgaaggatggatcaacattgagcgagtgctcaataacatccct

SEQ ID NO: 62569 - DNA, 424 bp, Zea mays
tgcaagcacacctaatcatacatctcgtggagcagatgaaaatattagggccactatatttacatcatatgtttcagatggagcgatacctgtgagtatcaaataggtttgtgcgaaatctcgctcacccagagggttcaatcatggagggatacactacatataaagcgattgagagctggatagaatacatcagtgacggaacaatgataggtgtgcctgtccctaaacatgagggtaaactatgtgggagatggagaatgggcacgaaaacttttcgcgtcgaggattacaagctagtacattgtgctcatggtagtgtactactacatttcacgatagccgagccttacatagaggaacacctgaatgagcttcgaaagacaccacaaccacacagagacttgatcatgaggagctaaca

SEQ ID NO: 62570 - DNA, 484 bp, Zea mays
  unsure (1)..(484): unsure at all n locations
tcgaaatgactcanaaaagacttcctttgaagtctcgagattattctttccaagagcagctaacttgagaaacttggataaatgaaggaacaacacaccatcacaccatcatggcaccccttcaaaggactctacctaaaatctcaggacgagattccttaaaagggggagggctgtaacacctcaagtgttactcaaagtattacactcaaggctacacaagtaagcccatcatcacatgtgacttaagttgggaaagtaccccatacttgcaactcaaggtgctaactcagtgcaacccatcttagaagtcatacattggcttgtcatgcacatataatggggaaaagttcccataccctaagtcatacctccttggacaagaggagcactagatgtaagtatgatcaaaagtctatgtaaaccacatgatcatgacttgagccaattatacaagatgtagtacactctataccctacaaat

SEQ ID NO: 62571 - DNA, 340 bp, Zea mays
agcttggctatgtatcagcagcattcatagcctattggcaacattcagagcctgcctgcaagtaacagcagcacaagcagccaggagtcgtcgatgcctacctcccggagcagttgagacaggtgcgatgaggacgaccccgccttgtacccatcagtttcggcggtggcaacatccgcttccttgtcgccggccttgtgatggggttggggctggtcaccggcgacagcggtgtcgctgggtgggggtgctggcgctggctgggaaggcggcgaggggttccaatatgatgaatcacgaagccacaaaccatgggagtccgcgtcgtcggtgagggggg

SEQ ID NO: 62572 - DNA, 454 bp, Zea mays
  unsure (1)..(454): unsure at all n locations
gaacctttcttgttgcttattaaatatacttcacattttataatnggctcaagtcataattttaaatatttcatacccttttccttattttcttgaattttgctcatggggctcacttatggtttttgttagggttacaacattcttaccttttttgaaagacccaattgttttgatcatgatacttttaagtatatacttggtgaattctttattacttaagttaatttgatgctcatgcttactttggttcacatgaaataatggttcttggtttggcatttgagagaaaccctatgtgacactgtggtgtcacagccttccccccttaaagaaatttcgtcccgagattcgggccacagtcctcccacggtgaagcgaagggtgagactttatatgaaatgggtgattgttgttattattagggtaaaactgctcttctaatgtcattctc

SEQ ID NO: 62573 - DNA, 475 bp, Zea mays
  unsure (1)..(475): unsure at all n locations
agcttgtgttacaagaaggatagtgggagcgctgttgtatttctaatcttgtatgtggatgacatattattgnatgggaatgacattcctatgctggagtccatcaaggcttcactgaaaaagagtttttctatgaaggacttatgggaagcagcatatattttgggcataaggatctatatagataggtcgaagaggcttataggattaagtcaagatacgtacattgacaaggttttgaaatggttcaacatggaacagtccaagaaagggttcatacctatgtcacatggtaaacaccttagccagatgcaatgtcctgcgacggctaatgagcgggagcgcatgagtaaggtaccatacgcctcagcaattggatcaatcatgtatgccatgataagtacacgcccagatgtttcatacgctatatgtgctacgagtaggtaccagtgctgatccangtgaggatcactgg

SEQ ID NO: 62574 - DNA, 423 bp, Zea mays
  unsure (1)..(423): unsure at all n locations
agctngatgtcttcttcagcatcaagtgaattgatgtattcaatgggttcatcactgaatggctcacgggcttggggccagtagagccactcaaatgtaacatcttcaaactgcatagcataggacaacatgagttattaatcagcccaatgaaccaaatacataatgtaatagagaaataatgaccttctctggcgagcaataaccatgatncaatggaatcagcttgtagttgccaccttctccctccttgcacactagaatattcccagcatgacgatcagcattagctaacctaatatctagtactgctatgttgtgaacctccttgacaggataagatcgaggacccatatcttcagtgctgtcattggttctcatgaacatctgcagtgaaccaatcttgaagctcttcccnctatg

SEQ ID NO: 62575 - DNA, 467 bp, Zea mays
  unsure (1)..(467): unsure at all n locations
tgtggaggttcttcatccncacatgtgctaagcggcgatgccatattcagcccatgcaagtcttagccattaagcatgcatctagaccggcctcttcttttgcaaaatcaactaaataaagtttgccgtctagtacacccttaaaagctagtgaaccatcacatcttctaacgacagacacatctacatttgtaaataaacaattatatcccatttgacataattgactgacagatagcaaattatatccaagactctccactaagaatacatttgatataaaatgctcatttgaaattgcaattttacctagcccttttaccttgccttgattcccatcaccgaatataattgaatcttgggaatccttatttttgacgtaagaggtgaacatcttcttctcccccgcatatgggtagtgcatccgctgtcaataatccagcttgaacccncggatgcataaacct

SEQ ID NO: 62576 - DNA, 391 bp, Zea mays
gatccccatgctgttcccattcatcaatataatcacggtggtgggtctcgaagtccgagaccttcttctctctctatctgtcgaacctgcgaaagtcagacacatatattagtaactcattgaatatttgaaataattattagaataacaagttgaaatagcactcacttatgaagttctattgaagtccagaagggctccaccggacactcctgttgcaatccgaactatcgagcaactctatggtgcaagtggtactcaacagcataaatacaaatgaggggacacctcattaggtagatgtcctcgtctattgagcacatgctgctcaactgtatgctggcacaatatggatcaagatacggctgccagcgcacatggaaaagttcta

SEQ ID NO: 62577 - DNA, 449 bp, Zea mays
  unsure (1)..(449): unsure at all n locations
gcagtgattaaatctgtctctcaagtcatcacagtctctgatngacaaaagtagtaaggctagggacccgaagcttgaaaaataccttgacacagtccgaaggatggaagcctccttcgaaggatttttagtgaaaatatcccaagagagacaatgaatgacagattactagctaaatcagcggcacatgggctcccgcttctcccagaagtattttttgaaattctgaaagcaccttcggtcgaactcatggaaagagcggtgcttacaatttcacctgtgcatagcgaagattggagaacataattgtatcttttctctacggcaactatcttttggatgatgaagtttacgtaaaaaggatgcatgccagaacaaggccacatgtgactatagagggggaaatgttcaaacaaggagtatgctccccattactaanatgcctatcc

SEQ ID NO: 62578 - DNA, 307 bp, Zea mays
  unsure (1)..(307): unsure at all n locations
gcctgggcatccccttntatatatacaatgggatggtccagctgtacatattggggtgcagctatgtgctaacgtggcccgccgataaatgcttgacccctgtataaacgtagctggcggtgcagacctgcgtcctgctgacgattctttgccttcgtagagagctgagaacaatcgacatcatggacgcatgcatggaaccatcattgcctgttgccagagtaatctatatgtgacaccagtcttggtccttcatagactgaggcggctagctagaggtatggtaatgatgtatcccctatagcgt

SEQ ID NO: 62579 - DNA, 476 bp, Zea mays
  unsure (1)..(476): unsure at all n locations
cagcataagaaaagagtatagaattctccaacagcactttacagatgagcatcttcactgatctccaacacagaccacacagcttctcagataaagaggaaaggagaataatgggtttcccaactatataactaactntattgacatagtatgtaaaccaaaatgcagggggtacccacactctggtgacaatcattacaaagatccaaaccaaacatagttcatcatgacaaacataaatgcacaggatatagcaaactaccctgtctaactaaaactaactaagaccgagactaacgctaagactgaagcttccatgtatatatttatttcgtattaattacaagatccaactctaacgatctatggttctagatttatctnggtcttgcaggcgggattgccataagactggtgtccacgctgaggtgagcggtacgggtgctgagtcccaacgggagcatgggaaccaccgt

SEQ ID NO: 62580 - DNA, 242 bp, Zea mays
ccgctttatatgccagcgttcccgctctcctatgttttggctctgttgatggcacctgtatttgctcctgctgggtcaatgcgaactgcttctggtggcgaccctatgcctagtcatcaattgatctcttacaatttgggagtcccttcgttcttctccaacctccatgtactgtgatatattctagcctgacttttattccgtacgaactgctgtcattacactcatctgttctccatatt

SEQ ID NO: 62581 - DNA, 452 bp, Zea mays
cttccaagctgacccctctgtcggtgcggacatcgtgccttaagagaccctgacgcagccgtggccccaagcccgcctgacctgttgctggcgtctgcgtcgactcccaccagggccgtcgctgattcgctcgtggagccgcccgtcgcttctgacgtcgggatggtcgaggtgccaccgctcgtggtcgtccacgacctccccgttcttggccacgaggagaaggcgtccgccgtcgccgaggttggtgattgggggcccaccaccttatccgaggggaggcccagtacatcgacaacgatggcgttcgacgcgtcgactgcagggggacccgatgccttagtggaggggcacgcagaaccgtgacccgtcttgtggagcagcgtgcttgtcctcgcgcagcgcaaccccaatgagtggagcggtaagccgctcctgttctggagccgcgg

SEQ ID NO: 62582 - DNA, 381 bp, Zea mays
acttgggtggatgaaaccctctgctaacaattcttgcaaattgattctttcaatctgccaattcagcgggtggcaatccggaaaagcctcttggaaataggtgtcgtttccagttgcaactcgatcgcaaattcaatatctcggtctagtggcatttctgtgtaatcatcatgaaaaacatctgcatactcacagaccactggaatcttattcaagggtaactctattatagcaaaagcacatgatcgagtagtttcttggctgggcagaaataatgtgaaatttccacagaattgggtttggatttcaacgatgcgatttgctacatctagcaccacttggtgctatgtcattcaattggctcccaaaataatatccaca

SEQ ID NO: 62583 - DNA, 388 bp, Zea mays
tcttacggcagctactagactatcatgaatagcaatatgcccttgtccgaaggttcttatgcacagaatgctggggaagaatagcttcaaagcattgagtgtcccacgaccaatgaatgcgctgttacgggttttcattgcaacgatattcaacacaacgttgtcagttcttgtattatcgatacattcgaaagtcactggcatcatgatcttgccgagcgcttcaatctgccttccttcgaagccacaatagggatgccgtacatcatggatcttatctatcggctcttgcatctgtctgaaggccttaacacatataatatccgctgcactgcttgtgtcatccagaacattggggaccagagattctttgataacataggaaata

SEQ ID NO: 62584 - DNA, 448 bp, Zea mays
  unsure (1)..(448): unsure at all n locations
tttcactatattatcacagttatcttgagaaggttgatcatgacactttcccttcanacgagttaagctccttcttagcattccaacttcttccttgagctcttttatttcttgtgtgatagaaatatcactaattcctgaaatttctagctcaatggaagaatggctttcttgagagcaacatttgttagcacatgataatatagtttctacttgagtacatgtgcgtatgtgaggttggtatgatttcatattagttaacacaacctaatgagccatttctaacatgatatgtgaatccataaatttattatgagatcacacaagcatatcatgtttttcttgcaaagctagatttttaatatttaacttttctatcatgttcttgagcataacatttttattttctaatcgagcaatatatgatgaatgattaatagctctaatt

SEQ ID NO: 62585 - DNA, 447 bp, Zea mays
  unsure (1)..(447): unsure at all n locations
ttaaagtttaccccattaattcctatatagggttaagtttcctatccagtgtcctatttgcaaaacacttaaaacaatacaacttgtttgaaatttttgcctagtgaatgcactctaggtgtgtcaaacatatgcaatgccaatgctatgatgccatgctcaagttttagttacagtaacacccagggtgttacaccggacatgtacccggaccgtccgtgattatatgcagaccgcctgtcgttgtatgcggacggtccgactgggtagtttagattctgtgccatatgtggtggctcgggtgcctgtctgggtaactcattaaaagtaggtccggctattgttggcccggacggtccgcgctcacgtgcggacggtccgggcatgtgcagatcggctggttactgcggatatgtggtcgtcaaggtatgagtnatcggcatccat

SEQ ID NO: 62586 - DNA, 479 bp, Zea mays
  unsure (1)..(479): unsure at all n locations
cttctanagggagaacacatcttgggactaacaaatgttcattttgatatagacatggtttgtagcgcatgtcacgcaaggaagcaagttggtgttcatcatccacacaagaacatcatgacgactgacaggccactcgagctcctacacatggatctattcggcccgatagcttacataagcatcagcgggagtaagtactgtctagttattgtggatgactattctcgcttcacttgggtgttctttttgcaggaaaaatctcatacccaagagaccttaaaggtattcttgagacgagctcaaaatgagtttggcttgaggatcaaaaagattagaagcgataacgggacagagttcaagaactctcaaatcgaaagctttcttgaggaggagggcatcaaacatgagttctcctctccctacactccacaacaaaatggtgtagtggaaaggaagactcgaactctattggacat

SEQ ID NO: 62587 - DNA, 336 bp, Zea mays
ttccctgacaatacacatgtctcgtataaacctccccctcatggcatcaagatgactctggttaatgctcgattttccgaagactgtgtgacttggtcgccatggtcgatcattcagattcttcacacccactttctacatattagctatcactgtcaccagtgtcttcagataagccctctagggtctccctagtgatcttctctgtattggtctttgctattgactgaagaaagccgagatgcatctcctcagaaaggattagcttcgattcagcaacaggcttcttatcttcaagcatcctcgcatacgctgagaaagtgctcttgaaaccga

SEQ ID NO: 62588 - DNA, 463 bp, Zea mays
aagattcttcatcccaacatgtgctagagacgatgtctatccagcccatgttagtcttagcaattaagcaagagtcgagttcagctctatcaaaatctactaagtatagctgaccctctaaccttcccttaaatgctattgaatcatcacttcttctaaagatagtgacacctacatccataataagacagctgtaacccattttacataattgcgaaactgaaagcaagttataatctaaagaatctacaagaaaaacattggaaatggagtggtcagaagatatagaaattttacccagtcctttgaccaaacctcgatttccatcctcgaatgtgatagctcgatggggatctcggttttattcgtatgaggagaacatcttcttctcccctgtcatatggtttgtgcacccgctatcgatgatcctacttgagccccccgatgcataaacctacaaaac

SEQ ID NO: 62589 - DNA, 433 bp, Zea mays
  unsure (1)..(433): unsure at all n locations
tgccatatgtgctggcgacgtatttatctgttaagccgttttcatangcattgcagaatgctagtacaggtgcaaagatgtggtaccacttgatctgatggataatgagacggagacagccgatcgatatatctgccataacataacatagccacccaatgcaactgcctcgggaatctggtcctttacgaaatagctcaatgcgacgctttgccatcaaatgacccagtttcatttggggccggaggtggtgtcccattgtccgacacagcaagtgtgttggcatgtttcttccaatacattgatacctacgaatgtgcataaatactttcaagaagttgtacatgccgtccccaagatatacggctatgtgtataaacacctgcaattgttatacctcgccgttctacttctagatttgcgaaaggcgaaa

SEQ ID NO: 62590 - DNA, 395 bp, Zea mays
  unsure (1)..(395): unsure at all n locations
tcctgagcacaacggttctgtctatgagactgcgntccatctcactgagccgatcattggatcctgcggcagcgacaaacagatcttccttggggaactntaagtgactatggcagtggctggcatacccaatgccagaggctcccacatcactgggatgttcttgtgacacttcgatgaggagaaaaagaggcactgacattcccattccttcgcctgaaaatcggaatactcagtttggctgatcacgatttgtcatttgtagattgtcttagcctgtttagcccagttgttgacaaaccgctccatggctttgtactctctgactttccgaccttaaacttgatgcggngcttgaagatcacccgattgaatgtactgtgtctagaacctca

SEQ ID NO: 62591 - DNA, 419 bp, Zea mays
gacacaaaaactcaccttcctggacaagagctatctttatgggtcgagatttttctcttcttccggagctaacagttctggatgatcggatccctcttccacttattatacatagataataacaatacatcaaatatagcgccctctgtggcgtgagcatacttctatactccattatttgtgcgccctaatatcttatttacacaatatttggcgcattatatattatctatctaaatacatatgggaaaatgaaatacgaacatatgaaaagacaatgacaaggaattctccatctaactgggccacgggtgaaatttgggccactctgtgcgcggtcgtgggtgcgcttgctgtctactcggtccatttgctatgtgacggctgtatggactgtgcctttactcctgtccaccatc

SEQ ID NO: 62592 - DNA, 442 bp, Zea mays
tgctgtggtcttcctcttccgaatgtcctaaagacgtgactaaccatatgttgtcagcataattatgaatagttacaggaagcttcatctttgggatgaagaacttctcttatgacggaatgaatggagataaagagtgggcgacgaagctaatagccaaggaccttcgacttaacatattgacgaagcttcagcatgaagatgactgaaaggggctgaagaccttatagtcctcaataattcatgttatgattataggcagataccaatgacataaatgtaattttatccgggctacgtctcgtgcctattaatagatgaacagtaacaccgtactgttcccgctggattgaatcgctctcgcggcattcttgccctctcaccttttggcaagctgagggtccatataatatgagtatcgttatgctattcatgtttgatg

SEQ ID NO: 62593 - DNA, 441 bp, Zea mays
  unsure (1)..(441): unsure at all n locations
taanagatactattcaactaaagtatgaagaagntgattatatgccaaggtatgaaaacttcctctccttcagctgctttagtattttatcctttgtggaatgtaccatagtatacggtaatttccttgcaatataaaatgttcaatagtgcatgtaactttgacatcaaccaaatgtgtgcacttaattaaaggaatttaatctatccttatgggtttcaagaatgatgattcattngccatccacatataaggatcatttgtgaaaccctctcttgtgtnttaatgctctcttttctaagtgtttaaacagggcctaccaagttcttttaagatggattccaaatctacaaatataagagacttggttctttcaatcatgggggttcaatgggtctcatatcaagtatgatcgaaccaagcaaagatgaatgaagttca

SEQ ID NO: 62594 - DNA, 467 bp, Zea mays
gagaacacgtgataagttcgactaatgtgctattcgtaaaagatagaccttgtgcagcatgtcaagcaggtaaacaggtgggaggagcacatcacaacaagaatgtgatgaccacatcaaggcccctagagctgctacatatggacctcttcggacccgtcgcctatctaagcatatggggaagtaagtatggtttagttattgtggatgacttttcccgcttcacttgggtattctttttgcaggataagtctgagacccaaggaaccctcaagcgcttcctaaggagagctcaaaacgagtttgagctcaaggtgaagaagataaggagcgacaacgggtccgagttcaagaaccttcaagtggaggagtaccttgaggaggaagggatcaagcacgagttctccgctctctacacaccacagcataatggtgtggtagagaggaagaacacgacgctaatcgat

SEQ ID NO: 62595 - DNA, 481 bp, Zea mays
  unsure (1)..(481): unsure at all n locations
actccgcttgnggaagaccagatcatcaaagcatataagtttctggatgagaagtgatcacccatattttgttgatgaagcaccagaagaccaatcaaggaaggaatccatgtgggagttctcaagagataggtttgcgtgttagcatcgatgcttcttcaataagctagctaccaagcaaaagctagaagcctgaagatgatctntgagtagccacaatcggcgtttgcaatcagcaaccggatgctcctgaaaggccagatgatgttgaagttccacctcctcgaagagtctgcaaggtgaagatatgtagctgaagtaaagctatacccataacccttctaagtcgaatctcgaggacgagattccttttaagtggggtagatttgtagcatcccacatattcaaatcctgaaatattctcaaactcgctctaaattcaaaatgaatatcaaatctcatttcaaatcgttgtttgcga

SEQ ID NO: 62596 - DNA, 454 bp, Zea mays
  unsure (1)..(454): unsure at all n locations
tctctattcgagaaacaagccttgatcactttatttatcaatgtttctctccganagcttgcttcacccataaatggatactgaagttgcatatcttcacattgacggatcacaaaaccctcgggctggatcatatacacgttctcatctatgtttccattaaggaaagctgttttgacattcatctgccaaatctcataatcgaaatatgcggtaatagctagaatgatccgaatagaattaagcatcgctactggcgagaatgtctcgtcatagacaactccttgaacttgtcgaaaaccctctgcaacaagtcgagccttatagatgtgaaacattccatccatgtctttcttcttcttatagatccatttgcattctatacgtctaacaccatcaggcgggtcaaccaagttccaaacttgatcttctctcatggaatctatctctgatc

SEQ ID NO: 62597 - DNA, 390 bp, Zea mays
ctctaaagggagaacacgtgatattgttgactaacgtacttttcatataagacagactctgtgcagcctggcacgcaggtaaacaagtgggaggagcgcatcacaccaagaatgtgatgaccacatcaagacccctgcagctgctacatatggacctcttcggacctgtcgcctatctaagcatatgaggcatgaaagtatggcttagttattggtgatgactttttccgcttcacttgggtgttctttttgcacgataagtctgaaacccaagggaccctcaagcgcttcctcaagagagctcataatgagtctgagctcaaggtgaagaagataacgagcgacaacgggtccgagttcaagaacctttaagtggaggagttccttgag

SEQ ID NO: 62598 - DNA, 427 bp, Zea mays
tccctgcgcacagcttcggctgtgcaccattcttcgcgtatctttggtaatcagcccgtccttcgtctggttcaagcttcgtcctgaccgcacttcatgttcgtaattctgagtccgaaggtacctgttcacataatccacttggaaaacattgtcaaatcatgtttttgaggaccttcggaggacgaaagccctcaacaattacccctcgcaatattaatttgtttgaaataatatattcagattgcgatatgaacgaaggcgttatgccgaaggtccgaataaacaccttccctttgctagaatagcaacattcaatgacaagtggggtctttcaactttcaacgcatcaagcgtataaatacggccataccgcatacttatattgcacgctttcttgccaaccactcttgctcactcaattttt

SEQ ID NO: 62599 - DNA, 444 bp, Zea mays
  unsure (1)..(444): unsure at all n locations
tagaccttatgcctctntctttgatgggtgcataagagtcttagatggcacacatattctagctcacgtatgtcataagttgaggcttgaacacataaatagaatagggtggtctagctacaatgtattacgtatagtgggcatgtgatagtcgcctagagggggggtgaatagggcgaaactgaaatttacaaatataaacacaactacaagccggggttagcgttagttataaggaacgagtccgcaagagagggcgcaaaacaaatcccaagcgaataagcaagtgagacacggagaattgttttaccgaggttcggttcttgcaaacctactccccgttgaggaggccacaaaggccgggtctctttcaacccttccctctctcatacgatccacggatcgagtgagcttctcttctcaatcaaagccgggaacaaaact

SEQ ID NO: 62600 - DNA, 364 bp, Zea mays
cttagatctatgaacccaaaagtccttcgtttaccactatgtaacccattacctttctagcacaagttgaatttcggggtgcctacctacatgaaaaataattgacaagttaagaatggaattgctaccaattggacaatccctgcattgatgttcctttcttcggcatgtctagcataagcagtattcaagttttgaagatatcctctttccttgtttgttgcctgctacatggttagtaaaaaacttcgtttctaaccctatgcctttttgttttaaatggggacaagaactaaccaagtgtcccttcttggagcatttacaacaaagtctatcatccttgttaatatccagcctttttaat

SEQ ID NO: 62601 - DNA, 397 bp, Zea mays
  unsure (1)..(397): unsure at all n locations
tataggttttctgagatgactattggcttcgaaggaagtattcaccctanacatgtcagatcaattcacaactctagtcagagtgatgatagaggaagccagtttcagaggccacaacatagctcacagtctttatggcagcatcatagttctttcaggccaccaactccaaggggcagaggcgacaggagcttctggggaagatatatggatcagtccaggaaactctactgcttattctgtggtgaggacaagggccacactacaagtacatgctatgtcaccatcctgaagcaaaaagagattgtcgaagcagaagcacgacagaatcagccgaagcaggttntatagactacttcgtgctactctccctatataccagaatacgtgggtaatc

SEQ ID NO: 62602 - DNA, 317 bp, Zea mays
  unsure (1)..(317): unsure at all n locations
tcataactcctattggtacctattattaccttcngatgcccaangagctcaagaatgctggaggaagcttcagcagaatgactgccaaggttcttcactcctaaattggcaggaatgtgctgacatatgtcgatgacatcatagtgaaaagcacaaagcaagaaaatcatgttgccgatttacaagagacgtttgccaatttcatacaagctggtctcaagttaaatccagaaaaatgtgtcttctgagtgaagaaaggcaagtttcttggtttcctggtatcgacaaaaggcatcgaagctaatccaagcaaaatc

SEQ ID NO: 62603 - DNA, 397 bp, Zea mays
  unsure (1)..(397): unsure at all n locations
gagagccctatattgcatatgaccagtgactctctcaattaaggactttgccacccagatttgtctaggtctactcttatttggtggacctaggaatgtaaccttaatctttccatttgcaacctttcttagaacatagtgagcattgaaagcaaatggtcttgagtgcttatgcaagggagttggtggtttagctntgcagttgtgggcaaaatgaccttcatttccacactcaaagcatttgataggcttgtgagtctgctttggcttgtattgagtgatagatttcttttgcacaaaagcattgtatccaataccactcttgttatttttcataacagtgttcataagcagctcattttggaggtattgacccttgctgaacttttgcacactt

SEQ ID NO: 62604 - DNA, 476 bp, Zea mays
  unsure (1)..(476): unsure at all n locations
actcaagcttcaactagtaattctcacattgcatcaagaattcatcattttattntaaaggatcacccggtaaatcaaattgtaggtgatattagtaagggtgttcaaactcactctcatattgcttcattttgtgaacatttctcttttgtatcttgtattgatcctaaccttgtagatgaagctctacttgatgttgattgggtaaatgcaatgcatgacgaattaaataactctaccctaatgacagttgagagcttgttgagagaccaaagaaccacaatgttattggtaccaaacggttgtttcgaagcaagcattatgaaggaattgaaagatgaaatctttgtgagtcaatctaaatatttgaaggacatgctcaagaagtttggttataatatgcaagccaatcaagactctatggctccaatggtcatcttgatttgatgatganggacaatcgtgatcaaaacttt

SEQ ID NO: 62605 - DNA, 447 bp, Zea mays
  unsure (1)..(447): unsure at all n locations
ctcgtcttgaccatactcttgtatacccgtaacccgattctttatacacctgttcacatatttcacttggaaaacattgtcaaatcatgtttttgaggaccttcggaagccgaaggcccccaacaggtgcatatgataataattaaaagcataacaaaggatatagttaaggcaagactcgcgaaacgacaaagtggagaaaacaatcaagggtaagataggtaaggttccaatagaagggttgaagtaaagattcattaccgagtggagttacaaggagacaacgagatcaccaaggatatgcaaagtagaatgaccgctcatggatcattaagaaacaagggtggtcaagggcacgttaactgaaatgtcttaaacatatattgagatatanaggtaagcacatataanaataagagtatgcaagaatccaatggtacgagcata

SEQ ID NO: 62606 - DNA, 360 bp, Zea mays
tgaacaagacatatgctacagaatttgcctaatgggcctggggatgactgtctggtcccggtatgctaaaagacaactcccatatacttatctagatgtacattcgcttgcatcctatggttcctaatgcatgcaatgttttcactgcatcagcatggcaggtcattagcctgtctatagtctttctacttgcaacatggcttaatgtgtcatgaccataacaactcagccggggaagatagaccagtgtcgggaatacaatcctcggtctccaagacacagcggtcatagagcgcactggaaacaacctctgaacactgatgttcgttggtcagttggagatggattacatctaccatg

SEQ ID NO: 62607 - DNA, 204 bp, Zea mays
cgctccgaagcttaagagacttttttcacggatcaagctccgtacgaaaaacgatctatcaccgcgaaaggtgctactgttgggcctatgcttcgtcgccgaaggtcttacatggagaagcagtcttcatcggaagctgtatgcatgaattggccgaaagttcctctctgtgaagcttccgcattgcaaaccgacttatagata

SEQ ID NO: 62608 - DNA, 394 bp, Zea mays
acacttaaaactcaacttatgcccttctaaagatatctattttgttaaggtttgctcccatgcctcaagataacgagggttacattttataccctggcggttatcctgagcacaaaattaggagaattcactctaggaagtctcactctaactctcatcatgcttttatttataagagtgagacatctagttctagacaatcaacccgtgctatattgcctaagaagaaaactcctattgcatcaaatgaacctaacatttcatttaagacttttgatgcttcttatgtgttgactaacaaatcaggcaaagtagttgccaaatatgttgggggcaaacacaaggggtcaaagacttgtgttttggtacccaaggtgcttgtttctaatgtgaa

SEQ ID NO: 62609 - DNA, 457 bp, Zea mays
  unsure (1)..(457): unsure at all n locations
ntatatattatgtagaagccttgtgtgaagtttgacatgtttttggacattgtntgatgcctaaaccctaaaaccctagtcttctagtgatgcgtgccctatggattgcagttctgactccaaaaaccctagcttcctggagtcccgtgaagtaaaattgtattcaagacctaagataatacacttttattatctttgcattntcataagcattacatgagcattcatggttatatatgtgatatatatagaaaacgaagaagaagtagaagttgaagaagaaagagctacaccaccaccacctgaagacccaccggtcacgaagtgcttttattttgacatttgtggagcagagcccgactcccctataacacaatgcaagccctggtgcatttgccaccaccttgctatttaaaatctttctacttgcttgatgcattaagtgatatgagttgtg

SEQ ID NO: 62610 - DNA, 353 bp, Zea mays
  unsure (1)..(353): unsure at all n locations
taatgcccctaagagattgtccaattntgttaagggcattgctcccatggcactggataacgagggttacattctatatcctgctagttatcctgagcataaaattaggagaattcattctaggaagtctcattctggttctcttcatgcttttatgtataagaatgagacatctagttctaggcattctacccatgttaagatgcctaaaaagaaatctcctattgcatcaaatgaacctaatgtttcatttaaaaactttgatgcttcttatgttttgactaacaaatccagcaaagtagttgccaaatatgttgggggcaaacacaagggcttcaaacttgtgtttgggt

SEQ ID NO: 62611 - DNA, 448 bp, Zea mays
tgaatgatcaatatcaagaacttcaagtgcaacttgaatattgcaagaacatcaatgcatcatctttagtgcttgaatctaagtctagcttaaatgataattcttgcaaacgctgcgccaaatatcatgcttcttgttgtctaactaaccatgcaaggaagaatagtccacaggcgaaggatacttggggatcgacccccactgggacttgtggactcatttcttcttcgctgagctttttgcttcgccgacggtggagagaagggtccgcgcagcagtgcgggccagcagctgcattctccagctgaggcagtcgcgggcgtcgcagtatattctcgccgtccttgcgtcctcgaataaagggtggcagcgccggtggttctacctcctgaatgacgacgaagatgctccgtcggtttctcagcatgtggtcaccgtcgcccgcgat

SEQ ID NO: 62612 - DNA, 414 bp, Zea mays
ctatcttgttgtgctggcgcatctttgcttatggaagtatctgtatcactgccgtcctgagatggccggtgggcaacatctattggtcggaggtgccagcttagagatgcgtccggggcggaagaccgagtatctcgagataccccttaaagacagcattaaaggttggcgtctggagtggtttataatggataattatggaaattctctccctacccgctcgggaagacaggcagacgttcgtacttcgagttggactgaatctcccacggaccacgaagtagccgaagcgggcgtggtgcttactgaagattgattactgatagagagaggtctgactgccgaagccgcggtcacagaatttgtgttcaaaaacattcagctcgctgaaatgacaggcctatcccgcatatc

SEQ ID NO: 62613 - DNA, 444 bp, Zea mays
  unsure (1)..(444): unsure at all n locations
acaggatcacctattcacccncgctctaggtgctcttatgaatgggaccccttggctgactaattatgaaagctagtggaagactaccttacatgaaaggggcaagagcagtaggggagttgcatgcagggaggttctcgggttgattttgctgcgatggcggtcagacgagggattattgcaagtgttcttcccatanactgtaactggtttttggaagctagtggaactttgtaaaggcctcgtagtgttaccctgccttgcctcctcggtagaggtgtatgggattggccatctcttggcagatgggtaacatgacttgtggataaagatgtgcaacctcaccagagtgtaaaactggtatactagtcgtgctcatggtcaagagcagcaccgacacacacatgatttaattatgaaactaaattcaatttgtcatatgca

SEQ ID NO: 62614 - DNA, 347 bp, Zea mays
  unsure (1)..(347): unsure at all n locations
ctgaagaacanactanaaagcaagcctcagtgtactttgttttttttgttttcagtttatcaaagaanaactatacagaattggagaaggggttatatgctggcttaatggcctccataaagcttcgacattactttcaagcataccatataattgttccttcatcacagcccttgaaggatattatgagaaatagagaagctactggaacgattggaaagtgggctgcggaactcaacgaattcagcattgattatgtccatagatcctcgattcagtcccaagcgctagcagacttcatcgctgattggacgccacgggctcacgaggaagaagcaagtaaagac

SEQ ID NO: 62615 - DNA, 389 bp, Zea mays
  unsure (1)..(389): unsure at all n locations
ctcctaagggagaacacgtgataggtttgactaacgagctttttctatatagatagatcttgtgcagcttgtcaagccagtaaacaagtgggaggagcacatcacagcaagaatgtgatgaccacttcaagacctctggagctgttgcatatggacctcttcggacctgtcgcctatctgagcatangaggaagtaagtatggccctagtattgttgatgaactttcccgcttcacttgggtgttctttttgcaggataagtctgaaacccaaggaaccctcaagcgcttcctcaggagagctcaaaatgagtttgatctcaaggtgaagaagattaggagcgacaacgggtccgaattcaagaatcttcaagtggaggagtttcttga

SEQ ID NO: 62616 - DNA, 384 bp, Zea mays
gagaacacgtgataagctagactaacgcacattttgttaatacgaagactttgtgcaacttgtcaagcaagctaacaggtgggatgagcgcatcacactcagaatgtgaagaccacttccagactcccggagctgctgcatatggacctcttcggacccgtcgcctatcagagcataaggggaagaaagtatggtctagttcttatttgaagactttttcacacttcacttgggtggtctttttgcacgataatgtctgaaacccaaggacccttcatcgctttctaatgagagctcaaaatgagtttgagctcatagtgataaagataacgatcgacaacgggtccgagttctagaatctttacagggaggaggttcttgagg

SEQ ID NO: 62617 - DNA, 216 bp, Zea mays
tcggcaccaattcaacttctctcggtgcaaaggggtttcatgtctaactatatttgttggaccaatcttggagaaatacgggttctggatacggatggtcatttaacccgttcacctcacattcgatgggtacccgacccgactggtactagtaatagtgaagagtttaacacatgggtgcacatgcaccaacatgaaatttcatgggtatgggtg

SEQ ID NO: 62618 - DNA, 450 bp, Zea mays
acacataaatactaaccttagaatctgacaacaatttatttatctcccattttttccccctcactagacttcttattgtccctaagaattaataacattcacttcacgattctcatgctaaaccacgaatttattgcatttaaaacagcttacagaaatacgtcctgaatcttatacaatcaatagtaatgccacaaatgtctaaaatctttatatcatctcccacattatttagaagcctcgggtagaatttgagttgatttggacacttgtctgataactaaaacccaaaaccctatcctctgcactttgaaccttcttactgactccggaatacctaagttctctgaatttcttgaacgtaagctatattccacactctcatcataaatctttttatctatgccctctcatgagcattacatggcattcattcttatcaatataccc

SEQ ID NO: 62619 - DNA, 418 bp, Zea mays
  unsure (1)..(418): unsure at all n locations
ttcttcggcgccatagcgaatgtatatgatcaccgaatctgntcaaaaactctaatagtggaagtgagttcaccggaggtgggcgccaatgttggggacttgttctcaaatgctatgaattaagaacaaggcaacatagaaaatattaatcggtaaagtccttcgttcttcgaagcattatttcccttatgatataatgattttcggacgaaggttatgaagggcataccttcataagcacactatacagtgacgaaggatgaatcataatgaatatgaaggataacatagacaaccgtatatcattattaacttatttntgcattactattatgtataaacagaaataatatcgaattacaaatgtaccttcagcttgaaggagatgaaagtacaagcgtgacgcaaaagcgaatgt

SEQ ID NO: 62620 - DNA, 448 bp, Zea mays
tcagcattcttcggaatgtgctttggattatcaaccttctttaccaccattctgcagacaaacaatgatatgagggtaaaagtaattacaagagttcaggcaagcaacaggtatatgttccataccggttaagcaaatattgggcttcgttccccagccaactctcgtccgcccttagcccagatttgagttataaatctatttccgatgcttcgggcttcactgggaatatcaatcatatctgttggagacagactgaaggttggtctatttaccgtttttgcgtgtgtgcaaccaaccttcaaaaatgcggtggctgtgccgcgagaagctagcaaggcacaaaagtcaccatgcccggctatcacttcatcaagtgcatcaactttattttcaatatgttcgaaggtgtttggtatgtcttcagccgaagatgtaatatcttcag

SEQ ID NO: 62621 - DNA, 444 bp, Zea mays
tgtggcgccctcgggcgtcttgccgcagtcgaagcacctattcttccacttggaggtctcggggccgaacccctcgggcatggtagcgtcgcagagactgctgataccgtgccgagtgtagtaaggccatgtcccaagcctcttccagctggtccagcgagtcttctcggctggtctagttgctttggtcatcgtacgcccttgtcctcggggaaccgtattctaagtctgtgggcaagatagcctcggccccatagactagaaagaacggtgagaaacccatggcccggcttggcgtcgtcctcagactccagaccaccgagggtagttccttcatccaccgcttgccaaacttgttgagggtcgtgtagatcctcggtttaagtccctacagaagcataccgttggcacacttcacctgcccattcgtcatggggtgagcta

SEQ ID NO: 62622 - DNA, 415 bp, Zea mays
  unsure (1)..(415): unsure at all n locations
accgagagcccgcggcaccggagaagccaaatcgctctcatcggagtttaagaactcgccggcgcacgtggaccgggtaaaccccttcaccatttctcgattcgttgcgcgcacggcctctgtgtcaccccgtgaagcgcctcgtgccctttaattgaactcacccgccgtggtttggccggagcaggcgtcgccgtcgatccccgccgcctgtgttcgtggccaggggagctccgaccacctcgccggaactccctcgccgccggtaagccgcgccaccctttctttttccgcggctactgtttcagttgagggagggactacnggtgagagggagggaaatccagggggttaagtgaaaggtcagagactcaagtgaatagtggcgtaagggtagatctgcgagggtttgatt

SEQ ID NO: 62623 - DNA, 387 bp, Zea mays
attccttcaaccggtgcaaggcccatgatgacctataaacaatattttaactggtttaccacaaatataagggacattatgttagcaacaattttttttaatatacttgtctagaaagatgtaatcatttattgatatgaaactgtactgctatatgatacttgtaaatgaactatatggtgtggaaaaaaagtttattaagcttaggctgtaccttattattagcgcgtgcataactaaatagctgctttgcatctgattcaagaacacccttagcgataatggctacaacccttattgttggctgcttcaaactgacattgacgaatccccacacttgcaaaatcctcaaattagttaacatgttattacccataccatgcgatc

SEQ ID NO: 62624 - DNA, 239 bp, Zea mays
tttgaacctcttatatcactaatccatatattggtcctctacaccaccataaggggtgatccaagactctttgtgataaatatgaaaatactacaattctcttaatactaagtctacaatcttgaagtcccctaaacggggtgaatatggcaatctgaaattatcaacttatgcacactacaagccgggttagcgttaaaatataacaaggccgaagagaggcaaaaccatcgcagtaa

SEQ ID NO: 62625 - DNA, 352 bp, Zea mays
  unsure (1)..(352): unsure at all n locations
tgcggacatttttctctgaagacatctatttgccgcaaatgatgagctacgtcggtgcacccttatgcgacttttcgcggatagccttcacggaatacttcgattttacgcacttgctgtgctagtacggctgcacccttatgcgacttttgtgcggatagtcttcgcggaagacttcgatttaccgcacttgttgtgctagtccggctgctcccttaagcgacttttgcgcggatagntttcgcggaagactacgattcttcgcacttgttgtgctggtccggctgctcccttatgcgacttctgcacggatagtctttgcggatgacttctatttttcgctcatgttgag

SEQ ID NO: 62626 - DNA, 340 bp, Zea mays
atgtaacactagaagagcaatcaatgcaaggacccatggacaatttcccatgactaaaggcttgtgtgatggcatcgatgcttcttcaaaagctaattgtcaagcacaatctacaagcctgaacatgatcttttataaccagaatctagtgttgcaatcagcatcctgatgctcctgaaaggctcagtatttgtcgaagttccatctcctctaagagtctgcacagtgaagatatgtatctgaagataagctatacccataacccttctaagtcgaatctcgatgatgagattccttataagtggggtagatttgtatgcattccctaatatcaatatct

SEQ ID NO: 62627 - DNA, 350 bp, Zea mays
  unsure (1)..(350): unsure at all n locations
tgcttctgccatggntcaacttgttattatagcgccatttcttgcgtatcttggcatagtcactgtgtacgggcgcttctctgctccaaatcctatcttttcgctgtgagctccaagtcgagatatggtcggggcacggagatatataggggagaagtttgctgtgtcatccaagcccgatccgagacaaaaggggtgcttagtcgtgtctaactgccctcaggtaggtgtcactctctctccatggtgctcaaggttaatttggcgccatttcgcaatagcgtctaaaggtttcgaaagggtgattacgtgaacatgtggaatcgttgttcaaggttagtttttatctt

SEQ ID NO: 62628 - DNA, 347 bp, Zea mays
ttatcatatgtgtcgtagaagtgttttatctacaggacctagttatgaagaggtctatgatgtacagccttcctgttattaagacagtgagtacgctaaccctgttcataaactctctagagcgctctatggactaatgcattctccaatatcctggtatgaatgccttatggaatccctcattgataatggcttctaagttgaaaagacgatgctactctttgtacttaaacttttgaaaatgaatagttgtatgccaaatttatgctgatgatattatattggagctcgaacgagtctacatgtgtagaatttttatgagcatgaccataagttgagatgcaatt

SEQ ID NO: 62629 - DNA, 378 bp, Zea mays
cactgacagatagaacttctatgcacaatactattattccattttggactgggatacgattaacgagatgagagaactaagctatatgtgaaagaggtatcatgatcttagctaacaatgagagacgctaagaaaagatatctaccgtactaagacaacattatcttcagagatattactacaccctctattctgagaactatatcttctcaagggattcatattttttaaaagacaataaactaatattctttaagacaataaaaatctctgaaaaatgaggttccaaactaagcctaacaaggaattccagctattgtgtcaaagtaagtctttccccgtgaagaataatgtttgctttgcgcatcacgggataac

SEQ ID NO: 62630 - DNA, 403 bp, Zea mays
  unsure (1)..(403): unsure at all n locations
ggacccggagaccctcgtcactggtatagcccaatcgtgttcaccggagttcaagaacccgtcggcgcacgtggaccgggtaagcccctgcaccgttttccaattcgttgcacgcatggcctctgtgtcaccccgtgaagctcctcgtgcaccctaattgaactataccgccgcggtttggccgaagcaagagccgccgacgacccccgccgcctgtgctcgtggccagagtagctccgaccaccttcgacaccgacccgcacaccgacgtgaccgtcgcgacctcccggacatcacttgaaagggaattaggcttacacctagttcctatataattntggtgggtgaattgcccaacacaaatctttggactaactagtttgctctagttaataagttatac

SEQ ID NO: 62631 - DNA, 145 bp, Zea mays
  unsure (1)..(145): unsure at all n locations
ngctatcttctcttattctgngagccaatacccaataccttatagctagcagaacatggagatacaacttccttgtacttgtcttacatggagatacaactttggcaggtgtgtgtatccccctctcaaatctatatatataggg

SEQ ID NO: 62632 - DNA, 406 bp, Zea mays
  unsure (1)..(406): unsure at all n locations
tgacattgtcttcctagtggaaacctatgccatccttattgtcatgacgtctcccattatagagcatgcttctagcaaatttaaatttttcattttctatctcatgctcattaattttagcaggtaattgagctatatgatcatattgttgtttaattaaagcaaggtgatcatgaatagcttctacattaacatctctacatctagtacaaatagtaacatgatcaacggtagatgtagagggtttataagattttaatcttctatctagcattaaaattgtatttcatctctagacgganatagaatcatgcaacattaaattttacctttgaagtaactgcatttcagttctaggctgaattgctcattaattatcatcttagcattaactacatttcattct

SEQ ID NO: 62633 - DNA, 432 bp, Zea mays
  unsure (1)..(432): unsure at all n locations
atatgactatggtgtaagacacgactgccggnttctgttgcaacttttaatatctacagtagttggtcaaaattcaagagttaagatggttattcctttggatattccatgtggatcaccatgttgccttattaacctaacctaggaaagacatgttatctatcgaaggcctaccaacttaatccttgacctggtgatccctatgatgggcatagaaatatgcttgggctgaattaacagtctcccatcatacttctttcatcaagtttaggttatggccatgccttgttcacttcctcgggccatgatctatttggatctctacttgtaatcatacttacaggtggagtctcttttgtaccttgtcatccttgatcagtctatttgtttatgtgagattccttattgggtatgtctggtattggcgctatg

SEQ ID NO: 62634 - DNA, 345 bp, Zea mays
aacttccgcaccagagccataggattcatataccgacgtctcatgtcacgatgaccggcaattaacgacggtgacagcacaggtcgcttcccaaccttttctgctcttatgtctccatctaacatactatcaaccaagccctggtccggtctcctcgtaaccggtcctggttcttacgtatgacatctaaacgggagctctcaatcttgacgtacgtgtcgactgcgaactggctggaaagccgcttaccatgaagctatggattgaatatcccttgacgaatctggaattcgtagcagtaatagtcacgtacggccaccatagatgattaggagattctgcata

SEQ ID NO: 62635 - DNA, 220 bp, Zea mays
agccactcccacaaacatatgacaccttgccgttggcactcacatgatcatcggccgtcgctcataacttgcgggagtagatgcttgaatagggagacatcccgttactgggatttttacagaaaatctaaccagaactaaggactttgaacggctacatgattgtcttcgtaagaaattagcgcacggccgagtaaaacttcaatgaagttctgagaga

SEQ ID NO: 62636 - DNA, 358 bp, Zea mays
ttctgggtatgttctcataccacacaagataaaggctggagtagccaaatgtttcaaggaagactatcaaagcgtgatatgtgttaaaaaccgcatattaatgcctaagaacgaagtactccgccagctaattcttgatgaaacacatcctagtcgctattctattcatcccggacgcactaatatgtatcaagacttaatgcaacattattggtggacaaagatgaagatcgaaattgcacgctatgtggctaaatgtgacactagcagacgtgtcaaggccatacacatgaaaactgcttggccattacaatctttgtcaatgccaacatgcgaatggtaagacataagtatggac

SEQ ID NO: 62637 - DNA, 423 bp, Zea mays
acacataaaactcagctcgaagatcgtgaggttccttttatatgcaagcttctttatactatctaatgatctcttgacctattacttttacatgagttatgatttaatttactacttttgttatgtgtatgctctattatatgctatgaccactacatgaaactggtttgaacgtgggtgaacaaccgtcgaacttaatgttctggatctggggcttcggaggcccgcgcctcggtgtgtgctccttctacagtggcggaggtgtggggatcatcaagcgcagtgctacctcgtcactgtactcgatctcggtcttcactgcgatgcgagcacatacaattgggcggtttcacatcttaacgatcgattttggcggggtcgattggagcattataccttttgcgtgctcacttggcgcacatt

SEQ ID NO: 62638 - DNA, 400 bp, Zea mays
tattatcagaccatcagagaaattttggtttcacgagcttaccacagagattacaagaataagcctcagctaagtcaactggctcaacgtattgtttgagaatcaatgcccaacctgcagactaaatcccatacacggttcacaactccatctgacataatcgaaaatgcatcttttgcagctctttgacgtgctcccagagtgctggcatcaccaagcagttcttttagtggttgcagcagttcaaattctcctgacacctgaatgaataaaagaacactctgaaagaaatttcaagcccaaatctgtgttaacatgaattttatcattccccactaaatttagcaagtatgttgaaaacaagggagtcttaaaactgtggccaaccccaaccgggcac

SEQ ID NO: 62639 - DNA, 449 bp, Zea mays
  unsure (1)..(449): unsure at all n locations
taaaggatactactcaactaaagtaagatgaagttgatattagccaacgtatgaaaacttcctctccttcagttggtttagtattctatccttagtgggatgtactatattataggttaatttccttgcaatacaaaatgttcaatagtgcatataactttgagatcaactatatgtgtgcactaatttaaaagaaatttaatctatccttttgggttcaagaatgatgattcattctccatccacatataaggattatcatttgtgaaacccttccttgtgtttctaatgctctcttttctaagtgtttgaacaaggtccttccaagtgctttcaagatggatttcaaatctacggatataagagtcttggttctttcaatcattgagtttcaataagtctcatatcaagtacgatcaaatcaagatnagatgaaagaagttcaagat

SEQ ID NO: 62640 - DNA, 434 bp, Zea mays
  unsure (1)..(434): unsure at all n locations
tctaaatgtagaacacantttgngactaacaaatgttcattttgagaaagacagggtttgtagcgcatgtcaggcagggaagcaagttggtgttcatcatccacacaaaaacatcatgacaactgacagaccactcgagctcctacacatgtacctattcggcccgatagcttacataagcatcggcgggagtaagtattgtctagttattgtggatgattattctcgtttcactcgggtgttctttttgcaggaaaaatctcatacccaagaaaccttaaagggattcttgagacgggctcaaaacgagttcagcttaaggatcaagaaaattagaagcgacaacgggacggagttcaagaactcacaaatcgaaggcttccttgatgaggagggcatcaagcatgagttctcttctttctacacaccacaac

SEQ ID NO: 62641 - DNA, 425 bp, Zea mays
tcagctgtcaagtggatttcacatgctctgcttgttggtcattctttgacccttcactttcttgaagtacacgagtacagctgtgacccgcgcatctgacattgaatcatttataactgttctagcaacattgaggaatacacgttgtgcatgatcttcgtttgctcgttctgccaatctaaatagatcctgctaaatgaagaagaaattaaattcatttatagacgcccacggtaagtaaatttaaaagacataactaactcagccaatacgatgaccacaccgtgtcttggtgagtacggtctggtccatatggtttgaggccccagtgagcccagtgacacgtccctatttctaccccgttgagttgaccacccctgatagcgaaacgagcttagatccatcctgtgtaccggtgtcgggac

SEQ ID NO: 62642 - DNA, 255 bp, Zea mays
gcgcgtggaccgagctatccagtgagtctccgcccgatatctttggctcatgtcttctctggcattccgtggaccttcctgacctatttgattgaactatctcgccgcgaccaggccggtctcctcggcgccgacgagcatccgcgcctgcgcgcgtggaccgaccgactccggccatctccgacggtgttccgcacaccgttgtgatccccgcgacctccccttcaccctcggccacttcaccggaacagtctc

SEQ ID NO: 62643 - DNA, 347 bp, Zea mays
aaaatttggggtttcttatagcgatgtccaagaccaacacagaaaaaatcaccaaggagattctggaaggttgtctgaggatactggtgatagtgacagctatgatgtggacagtggtggggaagactccgaagatcgcccctggcgaccaagtcatgcggttttcggcaaatcagctatcaaagaaaaccatcttgccaatatgaggggaaggtatttccgggatctgtccattgtgagggcggacgaaggggaaggacttgtccacaccctgaagacaatgaagttgtggtgtaccgaagctttttgaaagctggattgcggttcccctttgacagcttcgtcgt

SEQ ID NO: 62644 - DNA, 424 bp, Zea mays
atcgtgttagtgttacacctttatctgattaagatgctatattatttagcaagatgacgctggatgtcgtatagcgctatggccatgcaaccacagacatcataatactactgtacaagtatctctgtcgattgtccgcatagatgcgcatgtgaacatattattatatcatactcatgtatataatgtgtggtgagtaactggtaagagataaattttagtttactgcttaagataaaaatggtgtacgtgtggtactggacatgggagtatgttataggctcggcctaatatctaataatattaacacgccatattaacaaaccgatagttctctgctcggttgtatacttaaagtgcccaaataaccatatatttgctaccatacttgggctagattatgcgcttaattctatccacaact

SEQ ID NO: 62645 - DNA, 323 bp, Zea mays
cttccactatagagcatgcgtgcttccaattttataatttcatttctcagtcatcccatgatttagcagttatatagctatgtgatcactctgtcggttaattaagcatgggatctgataacaactcattacatcttacatctgtgcaatagaaacatgataaccgacatgtgaggattgctattattatcaacaacttatcatggaaaatagcatccatctctaaattggaaaagaacattgaaacatctaattccttagccttaacattaaactatcattctcattcttaaagctagcaagagatgcattcattttataac

SEQ ID NO: 62646 - DNA, 294 bp, Zea mays
  unsure (1)..(294): unsure at all n locations
ttgtgcagcttggtcagctagttaacaagtgggaggagcgcatctcagcatgaatgtgatgaccaccttcagacccctggagntactacatatggacctcttcggaccctgcacctatctgagcataggaggaaagtaatatggactaattatctgtgaagactgctcccgcttcacttgggtgttctttttgcatgataagtctgaaacccaagggacccttaagcgcttcctcacgagagctcaaaatgagtttgagctcaaggtgaagaagattaggagcgacaacgggtc

SEQ ID NO: 62647 - DNA, 451 bp, Zea mays
  unsure (1)..(451): unsure at all n locations
tctaaagggagaacacatnttgtgactaacaaatgttcattttgagaaagacatgatttgtagcgcatgtcaagcatggaagcaagttggtgttcatcatccacacaagaacattatgacgactgacagaccactcgagctcctacacatggacctattcggcccgattgcttacataagcatcggcgggagtaagtactggctagttatagtggatgactattctcgcttcacttgggtgttctttttgcaggaaaaatcgcatacccaagagaccttaaagggattcttgagacgggctcaaaacgagttcggcttaaggatcaaaaaaataagaagcgacaacaggacggagttcaagaactctcatattgaaggctttcttgaggaggagggcatcaagcatgagttctcttctccctacacgccacaacataatgggttagtggag

SEQ ID NO: 62648 - DNA, 421 bp, Zea mays
  unsure (1)..(421): unsure at all n locations
tcaaaattcacaatttctatattcttatactatngnatgttagactgtctaagagatcggccttcgtcatggcgcaaaggccagcttcgagcttcgtgaagcccatacttctggccatctcctggcagacggataattctttattgttcgggagacagtacaagaaatcatcttcgtccgtactgttgaacactaaggcccccttcaggtactttagttcccgggcatagtgtctagcttcaaaaatttcttcttcggacaatctttttcccgcagcatgtcaaatgacataatcaaaatcttcggagagtgcttcaggagtaaagggttcgccttctttggccatactnttctcanaagctatattagtatctggagttattctttttgccccctgctcgggtgtggcaagcttcgtctc

SEQ ID NO: 62649 - DNA, 363 bp, Zea mays
  unsure (1)..(363): unsure at all n locations
ntanacacgacaatcaaggcctatgttgataagaatcttatactgagtgaaatggtcaagactcttcggaataaatgcttcaactntgctactcaatgcatcgctcggctaaagggtatcttcaattctgttggagccaagtctgaagaagttaatctttctgctgaagatatccttggagctcttggaagtattgagaaagaagttgacgttcttgacgaagttataactgtccatggtgatttctgtgtgctagtggcttctcgtggcatagtcgctgcttttgttaaggctgggtgtaatcaaataagaactttaataggcccaacttcagcctctcatcgtctgacctaggtaatattc

SEQ ID NO: 62650 - DNA, 316 bp, Zea mays
tttgagaaagacaggatttggtatgcatgccaggccgggaagcaagttggctctcatcattcacacaagaacatcatgactagtgacagaccactggagcttctacacatggacttattccgcccgatcgcttacgtaaacatcggcgggagtaagtactgtctagttattgaggatgattattctcgcttcacttgggtgggtcttttgcaggacacatctcatacccaagagaccttaaagggattcttgagacgagctccaaatgagttccgcttaaggatcaagaaaattagaaacgacaaccggacggagt

SEQ ID NO: 62651 - DNA, 313 bp, Zea mays
  unsure (1)..(313): unsure at all n locations
tcaagatggtgttccagaagcaatattatctattcggctttcagacataaaggttgggattntaaccggagacaagcaggagaccgcaatttctattgggtactcctgtaagctgctgaccaatgacatgacacacatcgttataaataacaattcaaaggagtcatgtcagagaagtcttgtggaggcgcttgctacaactaagaagctcagagccgcttcatcaattggacacagggtccattggtagcatcagaaacttctaatgaactcttgctttgattgtagatggtacaagctttgttacattctg

SEQ ID NO: 62652 - DNA, 467 bp, Zea mays
ctatatatacacacctatgatcgaaaagaggagagatcgatgtctccaccagtgttgtgtttgtcagacttacagaaaggatgcgatatctatcgagatgcatgtggccaaggattacgatgtgttcttatgcaagaaggacatgtgatcgcctatgcgtctcgtcagttgccgaaacatgaattgaactaccccactcatgacttggaactggcagcagtagtgcatgctcttaagatttagagacactacattatgggaactaagtgtcaagtgtacacggatcataagagtttgaagtacatattcactcagaaggatctcaaccttaggcaacgtccttggttggagctcattaaggattatgagttggagattcactatcacccgagcaaggctaatctggttgcagatgccttgagtcagaaggagcacgttcattctgactttgttgccagctacccatg

SEQ ID NO: 62653 - DNA, 457 bp, Zea mays
tgtattaatcaagttaattaacatttatatttacaaaagcacgaattaaaactatagactcgttctaattgaattgttattttaaataagcaacagctaaacaataattgactaattagcacgagcgacaataacggaaattattaaaaaacgtgctgacagcgcgcgagacgcacgcgatcaacaagagacgacgcacgttgcaacacgtgttggggaccttcggcgtacgaaggtcctcaaaaacataatgtaacaatgtttctggagtataaatgtctgaacaggtatcttcggactcgtatcagaaagggagaagctcacaagatacgaaggttgacacagcgccgaagctgtgaagcagtaaagcttcggcatgttcgcataacagggaaccgacttatatatgaatacgccatttagacctcgatggagtgctatggaattatcaccaaat

SEQ ID NO: 62654 - DNA, 462 bp, Zea mays
  unsure (1)..(462): unsure at all n locations
ngaaaatatcttaattataaatttataaccattaggcgaaccaatttaatctttntacaaaaagttatatagaataactaaggctatgggctaaaggattataaaacacatttattaaacacttagttataaagcattatgaaacacactattaaacataattaaacccttttttagaaaagatatatgttatatatctaaggttgatgagttgtgaagcacattattaaacattacttttataaatagcttaaacaactttttatgtgagaagatcataattatattattattcacctatttatgacgagttaggttatatgccttaagtggattttcatgcaaaagataatgaacaaataactatcttttatttttattagaaagtacatggtctatatcctttattaagaaagctatatacaaaacaatatgtaaactaatattntaattatagaatca

SEQ ID NO: 62655 - DNA, 458 bp, Zea mays
  unsure (1)..(458): unsure at all n locations
tgagaagttatcattattaagtcaaaaagcaataacccatttaagaaatccatgcaatccctgcttctcgcacaccaaaggcctgacggcacgaagaaccgttgagtaatagcataaaaaaattgctgccgactgaaatttttaacacgagaacacaacgttcctgcactgggaacataacataataaactggcattggccatgtcgcagaataaactggcaacgtaggccctggcaggctggcagcgatttttttactaccaggctagaagcctctgcccactgagccaaaaagtaaattgatttgcaattagcaaaatagcaactgaccaatgggaccgatagatttgtttattaaaacgagaccacaatntcggcattggcaacatttaacaacaaaacaaggccaaaataaccccacttcaaaaagttgcagttcacgacttctgctcaaaatc

SEQ ID NO: 62656 - DNA, 450 bp, Zea mays
  unsure (1)..(450): unsure at all n locations
tatctcggcgtgctgccgcactttggtttatggaaatatctgtatcactgccgtcctgggatggccggngggcaacatcagttggtcggaggtgcaagtttagagatgcgccgtgggcggaagaccgagtatctcgagatacccctcaaagacagcattaaaggttggcgtctggagtggtttataatggataattatggaaattctctcccttcccgctcaggaagacagccggacgttcgtactccgagttggactgagtctcccacggaccaagaagtggccgaggcaggcgtgttgcttactgaagttggtttactgaaagagagaggtctgactgccgaagctgtggtcacagattttgttttcaaaaacattcagccgctgaaagacagggcctatccagcatatctttaccgagggctggccgactcaacccgagttaccaat

SEQ ID NO: 62657 - DNA, 461 bp, Zea mays
  unsure (1)..(461): unsure at all n locations
ngcatgaagtattgtacataatgaatatataaaatcaatgttataagcaaataatattttgtaggattcgcataacaccaggactggatgtgaacatgtgttaacaataataacaactggtaaccaggtacatattaaaataatattgtttatttgtctaaaatgaaaatatatatttatgctgcatgtaaatgttgatgtatttgggttgggctctaaaggaggacaacatgagaatttcacatgaggttggtgatacaagttctccgtgtcacgtagcacatgaacaaatggaacatattgctgcatcctcagaagctaaaaaagtgagcattgataaatgattttactgattggtataaatatatgtaaatatgcatatactaaatagtaacgtctattattatgcagaaggttgaatttaatgtggatgttataaatctgagtatgccggatcgtgc

SEQ ID NO: 62658 - DNA, 405 bp, Zea mays
  unsure (1)..(405): unsure at all n locations
tgtgcaaactanttagtccaattatctgtgtngggcaattctaccaccaaaattaatatacgaaatacgtgttagcctaattccctttcaatcttcccctttttggtgattgatgccaacacaaaccatagcaaatatagaagtgcagaattgaactacttcgcaaaatgttagtgcaaaggttacttataattgagccaataaatattactttctagatatgcatggattgattcttaacattttggaccacatttgcaccactatgtttgttttgcaaaatctgttgtaaattctgttcaagaactctctgcaagatagccaaaggtaaatgagtaatactgaaagaagcattttcaagatttgaaattttctccctttgtttcaaatgcctttcctttgact

SEQ ID NO: 62659 - DNA, 460 bp, Zea mays
  unsure (1)..(460): unsure at all n locations
tcactacacaatttcaggacatctacttaattcatgaatatcatcgtcacacatatcgactcgatttgaattaaccacacatgtctatcacatgaatggagcatttcaacaaatatcctaaaacaaactaagttcatcacacatcttgcattacaaacctacttgacttatttgaagtgtctactcgaaaccgtgagtaaaatcatacactatatgcgaagcataatttaaggaacgcctaacgcgtatagactcgacttataattatagaggaagtgatgactacttacgtcatgtcatcacctctctacataagccaaaacaatttctactatcgactaagagttctaagtattaaacacacggttactttccatgcgcaaataaatctcaacttaacactagtgacanccgatggattttactaaactcatcatgcgcataacttgtctcgcataca

SEQ ID NO: 62660 - DNA, 312 bp, Zea mays
cggaccgagggcccgcgtcaccggataagccatctttcgcttcccggagttcaagaccgcgccggcgcacgtggaccgggtcaaccccttcaccatttaccaattcgttgcgcgcatggcctctgtgccctcccgcgaagcttctcgagcccatgaattgaactctcccgccgtggtttggccggagcaagcgcctgcgtcgatccccgtcgtctgtgttctaggacaggggagctcctagcacctctgacgccgaaccgaacatcgacgtgaacgcatggacgtgctgaacatcaccgaccacctctccgg

SEQ ID NO: 62661 - DNA, 444 bp, Zea mays
atagcttgcctgagctgggcttctagcgagtcaaaggtgtgcccgtctcttgaggaggccctcgggcgaggcgtgaatctgtccgggactactgttcctgcccgaggccgggctcaagtgaggcgagatcgtgtcccttggtagacgaggccttgacctgaaccgcgcccatcagtctttgcggtttgtgctgatggtggttaccatccgtgtttaggagtgttgggggtacccctaattatggtacccgacagtagcccccgagcctcaaagggagtgttggtactcgcttggaggctttgccgcacttttttgcgaggggaccggcctttctcggttacactttgttccggtgggtgcgcgcgagcgcacccgccgggtgtatgcttgaaaacgatcgggaacggtcggacaaatgctcacaccattaccgttactatattt

SEQ ID NO: 62662 - DNA, 464 bp, Zea mays
  unsure (1)..(464): unsure at all n locations
tcacatgtctcgtatgattcanaatcaaacgaagttaanagcccatcagaatgaagcttcttcatgcgattctcacttatatgacccaaacgacagtgccacatgtaggtaggacttaaatcattaggccgaggccttttagcactaatattacagataggtgcatcatcaagatttaaaatgaataacccattcataatggatgcaaaagccacaaacatgtcattcttagagatcacacaaccattgttttcactcgcaaatgaataaccatccttcatcaaacatgaaggagacataatgtttcgactcatactaggaactagataacaattatttaactccaaaataaatcctgatgggaggtggagttgcatcgtcccgacggtcaacgcagcaactcttgcattattgcctacccggaaatcaacttctcctcttttcacgcttctacttcttatcat

SEQ ID NO: 62663 - DNA, 438 bp, Zea mays
  unsure (1)..(438): unsure at all n locations
tctaaagggagagcacattntgggactaacaaatgttcattttgataaagacaagatttgtagcgcatgtcaagcagtgaagcaagttggtgttcatcatccatacaagaacatcatgacgaccgacaggccacttgagctactccacatggacctattcgacccgatagcttacataagcatcggcgggagtaagtattgtctagttattgtggatgattattctcgcttcacttgggtgttctttttgtaggaaaaatcccaaacccaagagaccttaaagggattcttgagacgggctcaaaatgagtttggcttaaggatcaaaaagattagaagcgacaacgggacagagtacaagaactcacaaatcgaaggctttcttgaggaggagggcatcaaccatgagttctttctccctacacaccacaacaaaat

SEQ ID NO: 62664 - DNA, 472 bp, Zea mays
  unsure (1)..(472): unsure at all n locations
tanagaattgcgataacaaagaggaccttcgaattatcaattattcttcgaagcccgcatagtcgttctaaggaacgcagagtaagtttgccgaagtcacaaaaagccgctccaaagggagcgcagtgtaagttttctgctccaaagtcgttccaaagggaatgcagagcttacagcgaaaagtcaacgctgataccgccaaagtaaaaggcgaagcgcgaaaagtcaacgcgaataccgctgaaagtaaaaggcgaagaagctcctaagggaggcttacagcgaaaaataaacgctgattccgctgaagtaaaaggcgaagaagctcctaagggaggcttatagtaaaaagacaacaagattatgtgttttatcgcaggaatatgtgtgtatcttcggaataaacatcatcttacatagcataacatcatcgcatcatttcgcatagcataagcatcatacatcatgttgc

SEQ ID NO: 62665 - DNA, 451 bp, Zea mays
  unsure (1)..(451): unsure at all n locations
tcttgagcttcggataaagncacgttttcaccatgtctgatgtatatatgtccaaggaaaaaaaggttgttgcggagatgaagctgactgaagagaccatactgtttgaggagaaggttgtggatccttatattagtggatttattgaatcgatggctaagacgaacatagagaagattactaaagagatactggaagatttatctgaagatactggtgacagcgatagctatgatgtggaaagtggagacgaagattctgaagatcggccctggcggccaagccatacaatcttcgaaaaatcaacgattaaacagagtcatcttgacaacatgagaagaaggtactttcgagacatgtctatcgtgagagttggcggagacaacaacgcccctgcccctgaagaaaatgaagttgttattttccgaagctttttcaaggctggtctctg

SEQ ID NO: 62666 - DNA, 446 bp, Zea mays
tcactattgcatatattataccttactaaaattgtatgtttattcttattccgtttatgggttacttgatggtcctagagctctgttctcatccttattcttacgttgtcttttgtagatggctcgccttaggcataatgcacgtaactcagtgattcatttcctgccttctcgtcttgcggagcgcccgcttcgccgcatagtgtaaaccctaacatggaattttcactactcaagtccttcggggaataatacacgtgttgtgttgattatgagtttcattagtgcgatatgtttctctttgttaaaataaatacaaaaaggggtattcaaaatgtgcatcactgtggcagaagcgcccatattattccagcttaagtgcctaagtcacggctcatgggccgtaacacacttaaatcggaataacccgtcagtccctcaaatct

SEQ ID NO: 62667 - DNA, 455 bp, Zea mays
  unsure (1)..(455): unsure at all n locations
gggtcatcaagtttcctgttgcccctccctctgcgctgatcatcaagtgtgtaggaagcctgtgtggtagcgtcttgaaaggccatacgagcgaccttcggtgtggcagcggctgtcggagaaggagcccttgacttccggaggtggacgttctgattctcggcataagaagtatgtttgggtaaggattactcctacaagtaaatctccaattaaggatttcatcgctgtagcggactctcatcgttctctgcgcaacaagaggaaggggattcactccaagggagggaagagatccctggttggcggtggcgataattcaagacacaagcctcccatctcgtctgacggtgctgatgatcctcattctctggtgatgcctgaaggtcagagggagacttgctcgtcgccaacggcttcacgtgtcatgggtntctctgatgagatgacgcggg

SEQ ID NO: 62668 - DNA, 460 bp, Zea mays
tctactgaagcttcggctcaacaagctgaagctgaagctgttccttcagagccctacaaggagcaaccttttgaagccgaagcaataaaaattccagaaccagtattagttgaagaaactgacaccgccatccccgaagcacctgccagcatgcgtgattacatgatacgacatgcttcggggaagaagctatctgaagaagaaactcatgaagccatccattatgcaaaggaactaaaatatccgaagggggcagtaatattcaatggaacgaatgaagatgacttcttatactgcctacctgacaacaaagagctatctgtctgccgagaaatggccagaagtattggtttcccgaagcttgaatctggattaagcgccatgacgaaagaagatctcgcagacagtcttgcgtacaacagcctgaaggtataggaattaaacacttgaaaaaccccct

SEQ ID NO: 62669 - DNA, 281 bp, Zea mays
  unsure (1)..(281): unsure at all n locations
tcaccatggaggctcgccgccgccactacaggaaacgcctatattttcgtgggccaaaaacccacgaaaataagcctaaaccgacgaaaatagccgtcgaaaataagttctattttcgtcggtaccgacgaaaataacctattttcgtcggctgtcccaaggccgacgaanatcaaaggtcggctgactatttttgtcggcccggtgatggccgacgaaaataagtgccaggatattttcgtcggcctccgtgatggccgacgaaaatacgtgtcaggcta

SEQ ID NO: 62670 - DNA, 466 bp, Zea mays
ttcccgctcacatcttcggcgctgtatcaaccttcgtattattttgggcttctcctactatgataccgactcgagtccgaagatacctgttcacacattatactccagaaatactgttaaatcctgtttttgaggaccttcgtaagccgaaggcccccaacagtagcccctcgcaatattaatttgttaaaataataaatttagattgcgacatggacgaaggctttaagccgaaggtccgaaaaaacaccttccctttgctagaatagcaacattcactgacaggcggtgtctttcaattttcaacgcactgggcgtataaataagatcataccgcaagctcatttggcatgctctcttgccatctgctcccgctcactcaatttttagctcttgcgcaccaagaattgcttagccttttaagttctgaagcttcggcattgaaaaacagttttttagtgtttcc

SEQ ID NO: 62671 - DNA, 479 bp, Zea mays
  unsure (1)..(479): unsure at all n locations
acggacactatacacactctagcttctaaagggagaacacgtgttatgtgtagcaaatgtttctttcatataagatagaccttgtgcagcttggcaagcaggaaaacaagtgggaagtgctcatcacatcaagaatgtgatgactacatcaagacctctggagctatggcatatggacctcttcggacccgtcgcctacctcagcatcgggggaagtaagtatggacttgttattgctgatgattnttcccacttcacttgggtaatcgttttgcaagataaatcagaaactcaagggaccctcaagcgctctctaaggcgagctcaaaacgaatttgagctcaaggtgaaaaaggttagaagcgacaacgagtccgagttcaagaacctgcgaatggaggagtttcttgaggaggaaggaatcaagcacgagttctccgctccctacacaccacagcaaaacggtgtggtagagagga

SEQ ID NO: 62672 - DNA, 479 bp, Zea mays
cattacgagacctatagaaactaagcttaacaatggcggctaaagatcacaacgcctcatctatattcaggtccgagccacctccattgcaaggcgacaacggtggcgctcatagcgacaacagtcgcatcccttcacctcctccgccgcgcgcaagacatgcatccacctctacaaggcctgacatatagccttgtccttaatcaagggcaagacaatatgaactctcctactcccctctgtttatgcgttgacaatgcgtgcacaagtatagatcatcaccctgtttattgttaagtgctatcggattagtctaagtaggacacagaaggatctctagaactatcaataacaattatgaatagcttatatttgttaagtcattctacgatgggtgatcatcacctaagatgacaaatagttaggtgacaaatccaatagtcccacacccatctatgaaccaatcatacatgtgtgac

SEQ ID NO: 62673 - DNA, 460 bp, Zea mays
ttatagataatagcttcgacgcttgcttctgataagacctttcgaaggtgttctttgtaggatcttcggctacgaagcatacccccaacaatgtccaagacatccacaaagtcattaacttaagtcataatcaaagtgctgaacgaaacgcactacgataaggccttcacaagcagctgactaggggttttccactaatctaatctagaactcgtcgaagtcctgaaactcctgaatgtcctccatgttgccttcatcttctcttgagcaatggttgcaatgggacaacctgaggttgggtgtttttaagcaaggatgagtacacatcaacgtactcatgaaatgttctatttggctaaagtggactagttgtatgtggggttaagcccaaagcagtggctcttagctgggcatgtatttattactagtagagagccaagttgtagcaataatcccatgt

SEQ ID NO: 62674 - DNA, 464 bp, Zea mays
tcggaaaccccatacttctagccatctcacgacagacggattattctttgttgtctgggaggcagtataggaagtcatattcgtttgtcccattgaacactagtgcccccttcggatatttcaattctttggcatagtgattagcttcaaaaacttcttcttcggataattttttccccgaagcgtgtcgcacaatataatcgtatattttggaaggtgcttcgggggcagcagtatcaatttcttcaaccaaaattggctctgacattttcattttttcggttgcctttgcaattttcgtttcttctgtttccaaaggctttaccttggttggctctgaaggtccggcttcagttccagtctgttgcttcgaagcttcagcaacagatgcttcagcagacgcttcagaagtttcagcagtcttctttggagttatgcttgaagaattaattgtctccaaaaca

SEQ ID NO: 62675 - DNA, 425 bp, Zea mays
tataatactaagcttcgaaagcagaggatctagaagacaaaaacacgagttattttgaaaattagagagcaaataaagagcaatcagctctattgagaaaaaaacttcagcttcagacaactgaaggtttattgtcagaagccgaagctaaaatagcaaaattgaatacgaagcttctctgcaatctgaacagtttgaacaagagaagcagaacttatgcgaaacttgaaccgaagtccaacaaaatttagatttgaaaaaattattgcaagccttcaagacaaatgttggagtacaataaatgtattcaacgattgaaaaatcttcctcatcggactacagtggaagtcactccgcactgaaataccaagaccttcacatatgagggaatgagactgacaagttagcggctgggatttggctgg

SEQ ID NO: 62676 - DNA, 470 bp, Zea mays
  unsure (1)..(470): unsure at all n locations
tggtatctaattttagcttgagcagaatatttcttccctgtccagtgaccaaggaagctttgaaggccatagccatttcataccgacgatgccgaacagttgaccttcacatcatataaatactccgtccagcgtgtaggcactgcagttgatcttcatatacaaacaccatgatgaggcagcaggtcttcatatggctcagcagtagatctcatgcggtgacgacgatgtatcatataaactaactacaataaaaatgactgcaaccataggtctcgcatttgaagctacaacaaataatacacagctgattcatatattcaaaagtttatcttcaatggtcaatagaagacccccgtgcgagaagcgttgggtgaagaacgccttacagagtagagtgactgaacgcctttcgcatgtgctntatagccttacgggataagcgttgggtgaatgaagtgcatatggat

SEQ ID NO: 62677 - DNA, 464 bp, Zea mays
  unsure (1)..(464): unsure at all n locations
tcacatgtctcatatgattcanaatcaaacgaagttaanagcccatcataatgaagcttcttcatgtgattctcacttatatgacccaaacggtagtgccacatgtaggtaggacttaaatcattaggccgaggccttttagcactaatattacagataggtgcatcatcaagatttaaaatgaataacccattcataatggatgcaaaagccacaaacatgccattcttagagatcacacaaccattgttttcactcgcaaatgaataaccatccttcatcaaacatgaaggagacataatgtttcgactcatactaggaactagataacaattatntaaatccaaaataaatcctgatgggaggtggagttgcatcgtcccgacggtcaacgcagcaactcttgcattattgcctacccggaaatcaacttctactcttttcacgcttctacttcttatcat

SEQ ID NO: 62678 - DNA, 446 bp, Zea mays
cttcctgtgtctttacataattattattcctgccatggcctctccctacgaggtcagcgcgtccgcccgttctccggccacgagcagacgacgccgcatcccatgccttggccgcatatttctctcgaattggctgtgtgaagttgttcttccacatatgtgtatcctttctaatccttgtagggcatcattgttaagaacttcagctgcaacatccacatcgtgcaaaaatgccatcagtgagcgcatgaaaccatgttccaagacagaagaatgcaaattcagaatcaacttattcaactacctgccaatgttaaagtattttttgtttctaacgcaggatagcaagcaaaaatgttaaagtatctcactgaacagtaatgcggaaggcgcggccgtgtgcccgtgctcagcgcggcgagggctagcccaatggcctgcacgtc

SEQ ID NO: 62679 - DNA, 386 bp, Zea mays
ccctatgttggattaataatctagttagatagaagccgtatattgtcttgaatctgcattatcattttaggacctatcttcttctatagatgtagtgacacgatcgatatgcattttagtatcgagaaaatctatgaatcatgtgttattttattttagcatcaaatacggtaggtgaggaccgtcgatggatgtatgaaggttggcgtatgaatgatccctcgacggagtggataagaaatatataggattctattgatcgtgcttttgctctgtcaagaaccggcacggatgtgcagtgtccatgtagtatgtgtgcggttcgtagatggcaacacaagagaactttgttgggacacctttgcacatatggattaatgcctgac

SEQ ID NO: 62680 - DNA, 462 bp, Zea mays
  unsure (1)..(462): unsure at all n locations
taacatagaaccactctgatttccagcctgctgcccatttgcttctgtagctaataacaggaaactttgtagatttccgataggcgaagttatagcaaccaaaattgtcgtgcaatccatcctttctagccttcgtttgataatgcaactcgtgaacccggcaaaagctgtccgcaaatggttccactgcttggcttcggagtgcccagatataaacaataagtctgacaatagcgttgggggtcagctggtgaaaataaataccgaacctcttcagtacctctgcaataatcccatgtagggggaatcttaatccagcttttagaaagcttttgaaaataacaatttcatccttctccggctntggggtagtctcttctccctcgaagcgcaatagcttcttctgattttcagtaaaaaagcccgattttaccatcttggacagatcagctttcgaaacag

SEQ ID NO: 62681 - DNA, 466 bp, Zea mays
tatcatgcaaacgcatcttgtcatatggatagacctacctatcatcgtaggagtatatctttagcaccagttttatgtcaggtgcaaaacgtgtaactatattcttattccgcttcttgtttaataataagtttaatgggctgttacactatagacagggcatgagaaactagctaagtccaacgcaacagatagtcacacgttctcgcatagtataacatcgctagctgaaggaggacgaatatccgagcatgatatatacaaaggagtttaaactcatttttaacttatatctttcttagctttttatgtaacaaaaagtgtaatatttgttttgactagtttaatatttggtacgtggactataagtttactttgatattaatttttttatatatattagatacgatcgtgtgtcggtgtaacatacgaggattaattatacaatatctatgtaagcggacgg

SEQ ID NO: 62682 - DNA, 463 bp, Zea mays
  unsure (1)..(463): unsure at all n locations
tgaaaagttgagattgtctcgacttcatcttttggtgcatttgttgatcctanggcaatagatcttgccatgagaatcgccgaaaggatgttcctcaaaatgaaggaagatgaggcgaagaaaagtattgaagaagaagaaaatgatcgatggagaccaaacgacgaatccacctcttcacaaggttcgtctttcaaatccacttctcatatgtgctttgttgctaatgagagtgacagtgaaagcgaaagtgaggatgaggaggagcatgaaagtgatagtgaagatgaggatgatcttcaaaaattcttctctcaactaagcaagaagaaccggatgagcttgctcaaactcatgaaaagagcggaagaacaaaaggaaatgcttcataagcaagaagatatcctcatcgaataaatcaaagacttggagaagttgaccaaagagcatgagaagctaaagt

SEQ ID NO: 62683 - DNA, 411 bp, Zea mays
ctcagcttgccatacttgtcaaagcaacaacacatgccagcacagctactatagaccataccagtaacttggcctttcgcatgctggggactggatatgattggacctttcaagaaagctcaaggaggatatacccatgtgttggtggcgattgacaaattcactaaatggatagagttccagcccattgcttccttaacttctgctaaagccgtggaattcatacagagcataatattcaggtttgggataccaaacagtatcatcactgacttgggatccaatttcaccagttcagaattctttgacttctgcgagcaaaagagcatccagatcaagtacgcatctgtagcacatccaagagccaacgggcaggtcgagcgagccaacgggatgatattggaagcactc

SEQ ID NO: 62684 - DNA, 456 bp, Zea mays
  unsure (1)..(456): unsure at all n locations
tcaagacctncataaggagcaactaataaagccaatgcatttaaaatctttcctgcaacaacatagggaataaaaccctgagtaggcaattactcagcaagacttacccgactaaggaaaagactctcaagggcatgctagcttttggggaatcaagggaaaagctcatcaattatcaatgactcctttntgcataaaagcttactaataatggatccttaagccaagttttatttcacaagttaggttattacctgaatctactaacctgtctctagattttcctaatctagatcattcacttggcctacactagattgcttttaaccaaaactctgttatacttgttatctatgatgcagagcagtgatccagtcttcatgaccgagaagtaacggcgattcgaatcgattaatacccagctggngatctccagccacacgacatatgtagcac

SEQ ID NO: 62685 - DNA, 399 bp, Zea mays
tcggaagaagttcgtcatcttgctcaagatgaccataaccgtaagcctccgcacagagagcttcatcaggagggcttctacaatgaggacgactggtatgaagattttcatcatggaaattttgcttttgatgatgcttctcctctgtcaacagaattgcaggctacaccatggccccagtcttacaagccaccccagctccccatgtacgacggtcattcagacccgaagcaattcttgatgagttatgaagcaaccatatcttcgtatggtggcaatactgcagtcatggcaaagtctttcgtcatggctgtcaagagtgttgcacaaacctggtactcctctcttcggccaggaacaatcacctcatggcaaaagctgaaggacatgttgataacc

SEQ ID NO: 62686 - DNA, 441 bp, Zea mays
tgaagccatggtaagtagcataggcaagtaatatacgaattgactcaagcctagctacgggtgcataggtttcaccgaaatccaaaccatcgacttgtgaatatcccttggccacaagtcgggctttgttccttgtcaccacaccatgctcgtcttgcttgttgcggaagacccacttggttcctacaacattttgcttaggacgtggaactaaatgccatacctcgttcctagtgaagttgttgagctcctcttgcatcgccaccacccaatccaaatcttgtagtgcttcctctaccctatgtggctcaatagaggaaacaaaagagtaatgctcacaaaaatgtgcaacacgagatctagtagttatccccttatgaatgtcgccgaggatggtgtcgacggggtgatctcgttgaattgcttggtggactcttgggt

SEQ ID NO: 62687 - DNA, 467 bp, Zea mays
  unsure (1)..(467): unsure at all n locations
ggganatngaaactaggtgttcactacaagcatcaatgtctaattctttacacctagtacaaatttcaacatgttctacacaagaattggatttatttgctacttctaatttagcatttaaatcattgttgacacctttcaaagtagaaatggtttcatgacaagtagatagttcaaaagaaagcatttcatttcttttaacttctaaagtataggatttttgtgcctcaacaaatttatcatgctcttcatacaacaaatcctcttgcttttctaaaagtatattcttttcattcaaggcatcaattaattcattaattntgtctatcttagatctatctaagcccttgaacaaacatgaataatctacttcatcctcatcactagattcgtcctcacttgaagaagcataggtagagttgcgagtacataccttcttctcccttgccataaggcatgtgtgacgc

SEQ ID NO: 62688 - DNA, 310 bp, Zea mays
  unsure (1)..(310): unsure at all n locations
tcaacacanaaccaataaaaagtccaagatagggttcaaaattattatgcttaagacaaaccaatggcagccctggtctggcgcaccggactgtccggtgtgccaccggacagtgtctagtgcaccaccgtttagtttcctgtgtacctttcgttcaatctccaaacttgccgccttccggagttctgtgagtcgcttcgctataatccttccgactattatgcgtgcttaatcactaacgtctactcagtgtcgacggacgtctgctattgatcacgtaaagtgaacatcgccatccaactgttcggtg

SEQ ID NO: 62689 - DNA, 468 bp, Zea mays
  unsure (1)..(468): unsure at all n locations
tcgttaactgcagggtttgtacgtcactgactgccgggccttctattagcgtagctgtgttctgtgggtctacctgtcagtagtagggccagacaattggctgcatccacgtattgccgcattggttccgtgtaaatttcttcgaacttcgaaaaaatagcctccagcgctggttgtccaccctctaccggctcatttgcctacgacacaccttcgttcgccagtgtcacgtctcgccctttaatcgcgctntactacctaccagcgacgtcacaatggaaaaaataacttgagaaagattacgtaggtcaaagatgacgtagtcaaagatgacatgacacttgaatggatgtgggcctcaaagatattctggtctagtttaattttctggtatatatttatggaaatcgttggagattgaaagaaaatccgctctcaataattnttaggtcactcccaaaaaccatg

SEQ ID NO: 62690 - DNA, 353 bp, Zea mays
  unsure (1)..(353): unsure at all n locations
caggcctcaatttgtgatgttacaaaactgtgggctaacctgtactggaagtgtggaacttcatgccaatctaacaagtgggtgatctctccaggattgacataatgccacggcaacttaatctttttatctggtttcagagtaacatgagtcanaacacgcaaatgacagtatgatcaacactgtatcctgaggaacctgcttcacaactctctgtgcttgctgaggcgcgctttgcgcactgcttattggatattcttttcatgctccctgagcatctgctacacgtttccttttgctgtaatcattgaacctgagtgctgatatattctgctcttgcccttggtctgatc

SEQ ID NO: 62691 - DNA, 470 bp, Zea mays
ctcaagcatttctttcttttgtcgatggctataaatactctatttgattttatctgtacatgagaatgtactattcagcaaggaattgagattgaatgtaaaatttatctgtagatatttgcgaataccttgtaacattgctttaccttagatcccactattgtgtgctttgctgaggactaaactgatgctctcagcttttttgagccaaaagcgaaaaacaccttctcttctttacattcacatcgaagcacctctggaccaaaatcaaaatatggccccctctcacataatgaattgatcttcctttgtttcctgttaaacttcttcgattatagcatgcatctttgttcacaacgaaacatctttgttcacaacgaagtatctttgttcacaacgaagtattctgacatagaaaacagaaaccgtctggtgcttttctgataatgcttcatgtgatatgtcatgat

SEQ ID NO: 62692 - DNA, 449 bp, Zea mays
  unsure (1)..(449): unsure at all n locations
ntgtaactcacattntntgtgcgctgcaggtgcacgactgcccacctaatgtggtctctatactagcgattgaagtcgagcctctggatgacaaaaaaagaaaggtatatcttcaatggcattttattcttggatttgatagcttggtcattataggcctcacaatatgacttctatcgcatagtgtatgctgagacacgatttttttgcttattgaaatttgtgataacaagaagatggcaagggttgtgtttgaatttatgttgtttgttcttttttgttagataaaaattaaacatttgtagacaatgcgaaagtgttagttcttcactcgagtgccctgagacatatacattgttcttcattaagtgccctgaaacatatatgctatcttctgatgcttacttggtgactgtgtatatatagaaattaaaacatgcatttgttac

SEQ ID NO: 62693 - DNA, 447 bp, Zea mays
  unsure (1)..(447): unsure at all n locations
tgtccacttcaccataaggttcttgaatgacaatnttctttttttgatcaaaaggggcaagctatgggggaagacaaaacatagatacacaaacaactggggggacagaactttaaatccaaaccacaactcgcaagctcaactctagctggaaccacattgaataagaggaagcaatcgaacaatattagaattaacaaaaacactatcagcgcanagctggaggaatagccaactcacctcaaagacctcctctctctctgtcctggacgcttctcgtacgccatggctaacacgttcgccttcacctccagcacgccctttctttcgtttcgatccgtgcgaaaacacgaagtcgattagatccaaagcaggctctcaactcccattgatgggggcgtcagtggagccagctccagtgacatatgaacatggacggatagcgag

SEQ ID NO: 62694 - DNA, 448 bp, Zea mays
  unsure (1)..(448): unsure at all n locations
ttntgcatcaggttccaagccttggctcctcacagcccacatcttaatattcatccttatgatcgcttcggggataagctggtgaaggtggatttcaaatatcttcagcacctccacaacaaagtggctcaggggaaatcgtagtccagctttcaagaagcttcgaaatattacgacttcatcttcctcaggagttgggcaagtcttctctccttcgtcggcccttacaacagacaaatcccggaaatatcttcccctcatggtgacaagatgattttctttaatacttgatttgccgaaaatcgcatggcttggccgccaagggcgatcttcggagtcttcaccaccactatccgcatcataactatcgctatcaccagtatcttcagataaaccttccaaaatttctctagtgatcttttctgtattggtcttcgacatcgatcga

SEQ ID NO: 62695 - DNA, 461 bp, Zea mays
  unsure (1)..(461): unsure at all n locations
ntgaattggaataccttntaatcataatttacttctaaagttatatctcctaaaagatcaaatgagaagtatcccgatatgattttggttattccttcataaaaaacatataaaataagtattctctgaaaggatttttataaactatttcttaatgtacttttttctgatcttgtatgcatgaaggcatatttaaaagactntgcgtaaataggataatagataaaataattaatcaaataatatttgcatttcatgctgccatttttttttgaatgatgcatttgagtcaaagttgtaacctcattttaaattcgaattcaaaatttaaacatgaattaagtttagaatctgagaataagagaaaataagaaagataatgaaaacagaattaaataaaaagaagacctctaccactattgtgcccaaaaatccctcggcccactcaaccatgctcccct

SEQ ID NO: 62696 - DNA, 458 bp, Zea mays
  unsure (1)..(458): unsure at all n locations
tgttcgttgttgcacctgagataactcttcgaaatcatgctctcgccaattcttttatgcgtctgctttntgatccgaggaagcatcggcgaagtcacaacgatacctaatcagtaatcacaggagggtaacaataaggatagagttacagatagagtagtttggattgttttcacggtaagttgttaagattctagtatacactttctctgatactactagaaagatagacttgtagactttgggaacataagttatcatatcacattccatttactacgaactcagttttatttgtttgtggttaagaattagggttatctccagtagccttacttattccacctcccattataaatttcactctgtaaacagtgcagtctacagtgcaaaacaatggtttatacaaccatatatatagtatgctcagactatctccaacaaactctctatcacac

SEQ ID NO: 62697 - DNA, 460 bp, Zea mays
  unsure (1)..(460): unsure at all n locations
tgtcattggtcttcaattggtctgcaattgactttcaattggtattcttgagactacatttggtatcatttacatgtcttctccaatatttgattagactatatttcatatcatatacttccctatacatacataagttgttgaatcatattttgttacctatgcataaggggagttagtctaatcaaatcatgtcttgcacctctatttctcacatgctttttcctaagtagaagatctctgtcagggggagtatttcttcgtcactaaagggagagaaaattctttctaagggaaaacactcgcttagggggagtaatcctttagtgcttcaattggtataattgacaaatctttaagagggcaagtcttatttatgtcttcctttcggtggttgatgccaaaggggacgaagntgtanggactaaaacaatgaanatgttatcaaacaccatacact

SEQ ID NO: 62698 - DNA, 453 bp, Zea mays
  unsure (1)..(453): unsure at all n locations
ntgcctcgggcagactaataccagaataagacaacacacattgggagtggtgagatggcgagagtagcgcgtaccctccatggcaagaggctggacggtggtgtatctgtgctctcggttggcgtgaacctgatctagtcttaagaacctcgttggcgagttgacatatgcaagggttaagtgctacatatgtcgtgtgattggagatccccagctgggtattaatcgattcggatcgccgttacttctcggacataaagacttggtcactgccttgcaatctaagtcatggatggaatcttaatgagcaaaaatcatgttggattgattaatgtgatgatggaattagactagatgcaaacaaggtctattaatacttaatctagcattaaaatgttgaaagtaaggactcactttagtaagctatttctgcaaaagtatctaagtagattc

SEQ ID NO: 62699 - DNA, 456 bp, Zea mays
  unsure (1)..(456): unsure at all n locations
tgcttcggccgaggggtctnttataccttcaatagataatgtcttttctgtttgcgccaaggatttcacatgttcgcagcctctcctctccaagatagcggcaatccccctagcacccgagaaggcgcatatgtccccacggccactcaaaatttcttcaaaagcttcggcctcgccgttgatccagtcgattggaccttcgggatctcccagtacgaagttgccttcattcgaatatgcgccgacgctggcgaaactagtcttaattgtctccacacatttcatggatttttcataacatctttcttttgaagaccgaagttctgtagttgttttctcccaatgatttttccagtaatcgctggcgtctcggacagcttcggcagttgcacactttaatttcgcttcagccagctggttctgaagattntcaatttcgcacttctgggtttcagc

SEQ ID NO: 62700 - DNA, 404 bp, Zea mays
  unsure (1)..(404): unsure at all n locations
tacctcgacctgagaggaaagcttatcttaagggtgaagattatttntttgtgtgctaaaggactcagaggagtatccttgagttacatcgatcttacagaaaaacgtgttactctgtcgataatacttatcatatgcttcttgttgcattatatggtgataatgcagaattactgcttccgccgatatgaatcaatcgggatatactgtgtctatcctgtgatagatattcatgttgctctagcgctatatattctgatcttaacgccgaatagggtgagggggacattgctgtggtatatgcatctaagcgatgcataactctaattctgcgcatttgagtgttatacacagtacacgatgattcttgacacaatgcatcccacatgtgctaatgtgtagca

SEQ ID NO: 62701 - DNA, 483 bp, Zea mays
  unsure (1)..(483): unsure at all n locations
tacggaccttgaaactcagcttaagtttcaggatcacctattcaccccccctctaggtgctcttatctatctcattcctcaaaccaaacaacccatttttttaggagaggatggaattcgttcgcttttttttgaaagagacatgtggtctgacagttgtcacaaacacagctgcaaccaaatatgcgtggtcccactcttcacagaatttctttttacancgaaggcccacccaacacacgagaccaggcttgtgtcgtacaccttgcttccgtactagacttggcacgttcatgctgtaaagaactgatatggattgataaggatttagtatgattaaattctaagcaagttaaaattntttataattttttctaatcttatccaatcgaaataggatgaaaataaccaaacaagatctaatgttctggtatggnngnaatggttttttacccactagtagtaattcaacccacacatgga

SEQ ID NO: 62702 - DNA, 460 bp, Zea mays
  unsure (1)..(460): unsure at all n locations
tgccaagccctcggacccgaccggacttcaccggaggccctatatctacctcaccggacttcggtcttccgccgccgcgcgtggaccgagctatccagtgagtttccgcccaattcctttcgctcatgtcttctctggcatcccgtggacctccctgacctatttaattgaaccacctcaccgtgaccaggccggtctcctcgccgccgacgagcattcccgcctgcgcgcgtggaccgaccgactccggccatctccgacggcgttccgcacaccgttgtgatccccgcgacctccccttcaccctcgaccacttcaccggaacagtctcgccgctggtaagcccctccgcccttttctacgccgcgactactgtntaagggagaagaaagacctcgggttaggttctgtagaacccgaggggttctctgtaatgtcagcgactcatgtgaatagtaac

SEQ ID NO: 62703 - DNA, 464 bp, Zea mays
  unsure (1)..(464): unsure at all n locations
ttatcaaatggatgtgaaaagtgccttcctcaatggtaccttcaaggaagaggtctatgttgagcaacctcccggctttgaagacagtgaatatcctaaccatgtctataagctctctaaggcgctttatgggctcaagcaagccccaagagcatggtatgaatgccttagagattntcttattgcaaatggattcaaagtcggaaaggccgatcctacactctttactaaaactcttgaaaatgacttgtttgtgtgccaaatttatgttgatgatattatatttgggtccactaacgagtctacatgtgaagagtttagtaggatcatgacacagaaattcgagatgtctatgatgggggagttgaagtatttcttaggattccaagtgaaacaactccaagaaggcaccttcattagccaaacgaagtacactcaagacattctaaacatatttgggatga

SEQ ID NO: 62704 - DNA, 459 bp, Zea mays
  unsure (1)..(459): unsure at all n locations
tagggcggngcagaggccacagcccggcttgcttctccctttcatcgaactggtggtcatcatcctggatgaccattggtgaggaaatgtagccgggctgcatgatgaaaatccttgaagccgagcgatggctgaagggtgccaaccctcgtgaggttgcgctcctccaacaacaagacgaaggcaacgcgggtgctccccatccgggggctcggaaggcggaagggcgcgatgcatgaggggagtgcgaaggcatggctaccgcccggnggatcgatccctttttaaaggcggctctccccacttgcgtcctccagcgtcgcgggcaaagtcttcaccgacgtactccagggtcctccccctacgacacggnggctatgtcccacgcgtcatgcaagctaacccgaaacggaagaagccaaaccgccgcacgcggagcgtgtaaccgccccacgggta

SEQ ID NO: 62705 - DNA, 463 bp, Zea mays
tgggctaccaccatgcagccggagtgcggaggtgatcccgcatgaacgtccatagaagtaccagaggaagaccccgctcggacaccctcggggctgggtcacggtttgcgctgcccacttgagccggatcatctccggcagtaccctcgggggctgggcagtggcttacacttcccacccgagtcgagtcatccccggcaacatcctcgggggctgggcaagcgtcaacaccatccttggggtccaagttctctgcggtagccacctctaaggctgatgggccctctgttacttccatgggaccagggcgatccaagtcagtctcctgaccctcgagatcgcgctctaaggtcgacgaggcacgggatgacctcaacccagcatcaagcacatcagcacaaacctccatcacaccatcatgtgctggctctaataacaaatcctctggaaccatatcctcaag

SEQ ID NO: 62706 - DNA, 437 bp, Zea mays
  unsure (1)..(437): unsure at all n locations
ttagttaattacaaagctacaagtatttgcgaagctttattctgacaaacatacctataagcctttcacgttatgcggcttctttagctttcctcgcttcttctaaagtagtatgggattctttttcattttgtttaatagcctcatctgctattttcttggccaccattcacccgtacttcagaataaaattttccactaaaggcgatggcttcggctgaaggatccttgacgtaattcgatgaaactgagaattctggttgagttacagccttcacatgctcatagccagctntttcaagcaaagaaacagctcctcgagcgtcgatgcaggtacaaaaatcttctctatcactaaggatctcatcaaacgcttcggcttcgcctttaatccatctgataactccgccaggatcaccatgaataaaagtttggtt

SEQ ID NO: 62707 - DNA, 451 bp, Zea mays
  unsure (1)..(451): unsure at all n locations
ttaccaaatggacgtgaagagtgctttcctcaatggaccaatcaaggaagaggtctatgttgagcaacctcccggctttgaagacagtgagtaccctaaccatgtctataggctctctaaggcgctttatgggctcaagcaagccccaagagcgtggtatgaatgcctaagagatttccttattgataatggcttcaaagtcggaaaagtcgatcctactttattcactaaaactcttgacaatgatttgtttgtgtgccaaatttatgttgatgatattatatttgggtctactaacgaatctacatgtgaagaatttagtaggatcatgacacanaaattcgagatgtcgatgatgggggagttgaagtacttcttgggatttcaagtgaagcaactccaagagggcaccttcattagccaaacgaagtatactcaagacattctaagc

SEQ ID NO: 62708 - DNA, 457 bp, Zea mays
  unsure (1)..(457): unsure at all n locations
ttaagttntctcaactagcagttaagtttacccctttaatccctatttagggttaaatcctttaaccagggttctatttgcaaaacattaaaacaatacttgtttgaaatttttacctagtgaatgcactctaggtgtgtcaaacatatgcaatgccaatgcttatgatgccatgctcaagttttagttatagtaacaccaggggtgttacacggtcatgaagtcccgcatggcactggggttgccaagtccggagaaatcccaacagacgctggggtcgtcatcttcctcggacccagagggcccgtaggtcgagacgtccgtcagccggtcccaaggcgaccgtatacgaaaccccagaggggttgcactcgcctcaatgagagcgcccgccatagcgaggtcgtntggcgggtcgaggccgagtcgaaatgacgtaagatgggagttagtcggt

SEQ ID NO: 62709 - DNA, 401 bp, Zea mays
  unsure (1)..(401): unsure at all n locations
ctacatgccttcttcttttactccatagcatgaaccttattggaacactaccccacttaaaaagaatgagggtagatctcttgaatcttggggatttgaactccttgaagtacctcataacaagggtgttacggggccttcttctgatgttgctgcttgagtaggctgcggagaaatgactgacacatggttgattctgggagaaccttcttcttatcttctcttcactatcttcttttcactgaccctttctttctctttgctcttcccactggaggattctatcaaagagtattaccatcatacagaggaggaaaccgaagatgttgaaccatgtacaacagtcttcaacccaagaatcaccaagcattgtgatcttangggcgagggagtgggaaatg

SEQ ID NO: 62710 - DNA, 470 bp, Zea mays
  unsure (1)..(470): unsure at all n locations
ngaagcgaacatcagtcgctaccgacgacagcatatcgtctgtagtttattctattctaatttcaaggtaaatttttttccttcagcttttcattgttttacgatgaaggtgattgctgatgaaggttattttgcacagagtatgctactaagtaaagccttgaggatgcaacaggacctcgaagataagaaaaatgaggttataattgaaggcttggaaagcaaaattaaatatcatgaagctgctcttgaaaataaagattttgttcttcaaacgatggagggttcactggcagaggcccaagccgagattgccagattaaacagtgaactcctcctaaaatcggaaaacttcgagcacgaaaagaagaatctcgatatgaagcttaaagtcgaagtcaaaaagagttcaaatttgcaaaagaaaccttataagagcttcaagacaaatgcctaagcttcgacaaccg

SEQ ID NO: 62711 - DNA, 473 bp, Zea mays
actaagcttccattgcttccctattggaagccaataccatccttaatgtctcttgcgtctcccactatagagcatgctcctagcaaattttaatttttcattttcaatttcatgctcattgattttagcagttagttgagctatgttattattttgttgtttaattaaagctaggtgatcgtgaatagcatcaccattaatgtctctacatctagtacaaatagtaacatgaacaacagtagatgtagagggtttgcaaacatttaattcatcaatcttagcatgtaaaatggcattctcatttctaagattggaaatagaaacattgcaaacattcaaatctttagccttagaaattaacttatcattctcagttttaaggctagcaattgattcattcaatttatcaatcttagcaactaaactagcattatcatttttaagattggtaatttaattatcataagcattca

SEQ ID NO: 62712 - DNA, 451 bp, Zea mays
  unsure (1)..(451): unsure at all n locations
atgtgtattacataaaatcatctctggtctttatntatgtcacaataaaataagttaaactatgtttatgtacttgtaagtaacacttaggggaatagtaatctattttcaaataaagttgatatatgttatagtttatgttatactttgaattcattatcccttatgtagtattgtgtctttttaagaggtgttccaatgtttgtatatgtttggtgtgatgtttatttttactttccaaatgtattgaatgcatgctcgctctatttagacaacgagcagtctgaggttcctgagtgtgtagttggagacctccctgagcagcaacctggtgaaggcaagtgtcctctgacctattatgtgctacatactttatgattcactatcaaatattactttatgaaacctaaggattgactattctgtattcacttatccttgtttacctttt

SEQ ID NO: 62713 - DNA, 448 bp, Zea mays
  unsure (1)..(448): unsure at all n locations
tcgcanaggtgaacgaaaatagagatctggagaatggagttatggttcatgtgagtcaagttgatgtgataaaaatcaaggatgccacggaaaaaaggagatatgggaaggccgaggccacgaagaaggaaaggagtgtaaaccactgactcgtgggtatcttcggtggggacagtagtcccgtggcaagcacgccaagaacagagttcccgtggagggagaaccccgatggaaacaaggcgaaaaagctcaacttcagaaatcacagacatatggttacctgcgaagggtaactgactgttggggtcgatggcagggatcactgcggcagacgagttcgcggtcttcctcttgagcgccatcttgcttctcgctggcgaaacatagcatgaggcgagtggcagagaagactcagatgcggaaatgcaagaactagggcacggaaagc

SEQ ID NO: 62714 - DNA, 441 bp, Zea mays
  unsure (1)..(441): unsure at all n locations
tcacggttactcgatgaagctgtctagaggctcaagtgaagctatgggtctctggaaatggctggccatgcgggccggcgctcgggtggctcaggcgggtggcacacagctctctagagctatagacagggtctaatcctcggtggtatgcgatgagtgaggtgaggcacgctcgggggtggtctttaagggtgcgggcgagcacaaccatagggttgctctgacacangctcggtgtgtgtgcgggcgagagccaatgcgcgctctggcgcctgagcacggcctcgagcacgaggctacgcatagagtggtctagttcaagcgcggattgtctccacatcttcgcgactatgtccatgatcccatcgagagatctcttcacctgacattccttcgacgcttatgtgtggacgctggtgggtctgttgactggagccaaga

SEQ ID NO: 62715 - DNA, 447 bp, Zea mays
  unsure (1)..(447): unsure at all n locations
ntatcaaatggacgtgaagagtgccttcctcaactgtctcttcaatgaagaggtctatgttgagcaacctcccggctttgaagatagtaagtaccctaaccatgtctataagctctctaaggcgctttatgggctcaagcaagccccaagagcatggtatgaatgccttagagatttccttatcgctaatggcttcaaagtcggcaaggccgatcctactctattcactaaaactcttgacaatgatttgtttgtatgccaaatttatgttgatgatatcatatttgggtctactaacgaatctacttgtgaggaatttagtaggatcatgacacagaaattcgagatgtctatgatgggggagttgaagtatttcttatgatttcaagtgaagcaactccaagagggcaccttccttagccaaacgaagtatactcaagatattct

SEQ ID NO: 62716 - DNA, 390 bp, Zea mays
tgaggagagatctgtcttgcacgcagaggcggttctttatgtgacaggagtcatgaagaagtttcttggctgtgttcagaccccacacgtgcgctgggattccccggatctcaatatccatcaagtgagagaaagacgtagccgaggcatgtgcaaatcttgtccattgcttgaacacgagcgagaacatagggcctctgaatggctttccttcattaagcacttttgtcgccactttctcatccagcataaacagaaagaagtcttctggcatggattggtgactatacatatcatcgatattgatgcaatattgacgtggcactttctcaacaccttcgagcccggagcactcgcgctggttcatccacattgatctaaatgctctac

SEQ ID NO: 62717 - DNA, 462 bp, Zea mays
  unsure (1)..(462): unsure at all n locations
ttaagagactntnttcacggatcaagctcgttacanataactatctagcaccgcgaaaggagctactgttgggtctatgcttcgtcgccgaaggtcttatatgaagaagtggtcttcggctgaagctgtttgtataagatggccgaaggttcctcttcgtgaagctttggtattacaaaccgacttaaagatagaatgaccttttagtccataaaggtctgagtcaatgttgtaagcttttataaggggcatacttgtaattcctcacaggctgcgtcctgtgcctataaatagtgaacagtattcctttactgtccacgcattctgataattgtaatcgcatcttctggaatccaacctttgccaaggcagagggtattttgtattcaatgattcaatatattgagtaaatataatataattcgtctatgatgtatctacccctttttataccttttatct

SEQ ID NO: 62718 - DNA, 442 bp, Zea mays
tcatgcaattgctgccagaagtgagaagtgaattgtgtacttctgttagatactatcttctttggaatggcatgcaagcatacaatccgaaacatatagttctggcaacgctgcactgttataggtggtcttgactggtatgaaacgagtcgcctttgttaagctatccactactacccagatggagtcataaccggctcgagtgcaaggaagaccaactataaagtccatcccaatatcatcccatttccactgaggaatctgcaacgactgcaacaaacctacgggcctctgatgttgtaccttgattctctgacaactgtctcatatggcaagatactctgctatctcccgtttcattctgtaccactaaaatcttttcttcaggtcttggtacatcttctcactgccagggtgtatggaataagttgtctcgtgagcc

SEQ ID NO: 62719 - DNA, 421 bp, Zea mays
  unsure (1)..(421): unsure at all n locations
tctcctggacaagtgctgcactcaccgctgagtgcgaagcttccacatataataacaaaggagcccctggcgttggtggagttaatgttgttaaatctatcagatattgcttcagttcctcgaaggctttctgttggcttggtccccattgaaagacttcggctgatttcagcacttcgaagaatggtaaatttctttctgctgatctggatataaatctattaagagatgccaacctccctgttaatctttgggcccccttttttgtggttggtggctccattcaaagtatggcttcaattttacttggattagcttcaattccctttgttgaaaccaagcatccaagaaatttccccttctttacaccgaagacacattnttctggattcaactttaagccagcttgtctgaaactggc

SEQ ID NO: 62720 - DNA, 458 bp, Zea mays
  unsure (1)..(458): unsure at all n locations
tgttaaactatatagtgaatgtcgtagtaatggtatgttacttactttcattgtttgagaagtgaatggcctcacaaaagctgctctttttgaagcaatattagtggtcatcttagattttaatcctaaatatgaatagttatctatgtagtgtttaatatgcacatcatactacattgtcaagcagtaataatgttatttacttatgtagagatcactattggtgcgatggcagcttgatcgatatgaagtanggtctgtgcctatctaatgacaagcttcttaaatactctctccgtccaaaaatattaatcattttaactcttgatttttatgtttatatttaaataaataatgataaatctagacacatatataaaaaaataaattaattattgtatgaatcaactaaaatggataaaacaaattttattttgggactagtatgtctcaacatt

SEQ ID NO: 62721 - DNA, 439 bp, Zea mays
taaagataatattcaactaaagtaagatgaagttgattagatgcacggtatgaaaacttcctcttcttcagctgttttagtattctatccttagtgggatgtaccatagtataggttaaattcctcgcaatataaaatgttcaatagtgcatataactttgacatcaactatatgtgtgcactaattttatggtgtgtttggtttgacttttggctttggcttgtgcccccctaaaagccaaaagccaaccaaagggctggatccaggaagcagctttttctaaaaactgactttctcgcagtgcaaatctgaaagcagccctggacctgcttttagtggctctcggatggaactgtgaaaatatatatcgaagaattttaacgacttttagtgattttactaaacgatttttagcttttaacagcttacagcctacaa

SEQ ID NO: 62722 - DNA, 468 bp, Zea mays
  unsure (1)..(468): unsure at all n locations
tatgagattaaagcaagaaagcttaggcaagaagagcaatatcacaagttctctcttgcaatgtgttgcttcactaagtgagagtttaacttaaagcaacaccaaatagaattagtcaagagtagtgcaagagaaacttagaaagggaaaagacaaacaaatcacaagcaataagcacacgagacacaggtgatttgttttaccgaggttcggccctcgaaggcctagtccccgttgaggagtccacttaaggacgggtctttttcaaccctttccctctctccaccgatcactcaaggatcggcgagctcttcttcttctcaaggatcaacctcgatctcgcaaggaccaccacactctttggtgtctcttgctaagctttacaagcctccaaaactttggaggaagttcgatgggagtcaaaactncacgcgcaaatgaacacaaagatgtagcacacactatctc

SEQ ID NO: 62723 - DNA, 447 bp, Zea mays
  unsure (1)..(447): unsure at all n locations
ntatcaaatggacgtgaaaagtgccttcctcaatggaccattcattgaagaggtctatgttgagcaacctcccggctttgaagacagtgagtatcctaaccatgtttataggctctctaaggcgctttatgggctcaagcaagccccaagagcatggtatgaatgcctaagagatttccttattgctaatggcttcaaagtcggcaaggccgatcctacactctntactaaaactcttgaaaatgacttgtttgtatgccaaatttatgttgatgatattatatttgggtctactaacgagtctacatgtgaagagtttagtaggatcatgacacagaaattcgagatgtcgatgatgggggagttgaagtattttctaggattccaagtcaagcaactccaagagggcaccttcattagccaaacgaagtacactcaagacattct

SEQ ID NO: 62724 - DNA, 468 bp, Zea mays
  unsure (1)..(468): unsure at all n locations
nggcttgacaacacgagagcatccccacccttatcacattcatatggtttaacaacagtggtaagttcaaggtaacaaaaacagcaagggtgcatttttctattagctcttaccatgactttgctgatttcgatgtggtgagtaaggatgcttgctctcttttactgggacgtccttgggagtttgatactgatgttattcaccatggtagatctaataaatatactttcatgcataagggaaagaaaattgtgttgcttcctatgactcccactgaaattgtccactttgaacatgagaaagagactaatgctaagcaaaaaggtgttttgaactctgaaaatcagcaacctattaagttaaaaactcctactttgctagccactagatctgatcttgatgagttacatgcctctgttggactntgctatgccttagtgtgcanaaatgctttctattccgttgatg

SEQ ID NO: 62725 - DNA, 466 bp, Zea mays
  unsure (1)..(466): unsure at all n locations
agagcaagtctcacggcctcaccaggaagctatctgagggctctgatcgaacagaggaggacgagagaggggctggccacggtggttgctctcgggcggcactggcgggttgcggggaggtcgccggagttaatggctggctcgggcaagtccggcgaggtacggagggggtaacggggaaggcagccaagcactggagcgggctttatagccgtggcgcgggcgtggtcacgggcggccgcgggcgcgcggtggttcgcgcacgggcgtgctctgagcgcgcccccggatgccagctcgcgtcgaacacgtggaagcttgcttctgccatggttcaacggccgattagagcgccatagcgtgcgtatcttggcaaagtcactgtgtacggtcgcttctctgctccaaatcctatcttttcgctgtgagttccaagtcgagatatggtccgngtacggagatagag

SEQ ID NO: 62726 - DNA, 381 bp, Zea mays
tctatagggagaccacgtgataggattatctaatgctgaaatggttttattgctcacacctagtccctaattgattttggtggttgaattgcccaacacaaataattggactaactagtttgcccaagtgtatagattatacaggtgtgaaaggctcacactcagccaataaaaagaccaagttttggattcaacgaaggagcaaataagcaaccgaaggctccctggtctggaggcaccggactgtccggtgtacaccggacagtgtcctgtgcgccaccggacagtgttcggtgcaccaaacgattttaactcgaactcaacaccttcgggaattttcgaggcactcgcgctatcatataccggactgttcggtgtaca

SEQ ID NO: 62727 - DNA, 191 bp, Zea mays
  unsure (1)..(191): unsure at all n locations
taagctcaatgggttcagtattagcgtctntagcttctctctcttcttttcgtcggccttaacataaaaccactcatttgttcaaaccggttggccacttggtccggtacctaaccaccggagccttcatatttttgcggtaagcgaagttgtaacaaccaaaatcttcatgaagcccatcttctttggcc

SEQ ID NO: 62728 - DNA, 463 bp, Zea mays
  unsure (1)..(463): unsure at all n locations
ntggaggaagattcaactcacaaccaagaaggttgttttcttgttctgtggagagaataaggggcacacaactaggacatgccaagttacaatacagaagcaaaaagagatagttgaggccgaagcacgacagaatgaaccgaagcaagtcctacatactgtttcgtgttattcccagtacattcctgagtatgtgggcaatcaatagccattttgagaacctacagtttcagtagctttagcaaaccactctccagctgcatgggtcttgccacaaccaccggtcatggctccaactttgtcccacaaccaacagcctgaagggaagcaccaaattcagcaacgacgtgatgcaagagaagagtccgaagctcagatagttaatagcactgttccaaagtcgatgcacatttactaaagctacagaggggttgggttaaaaactntcatantacacctattg

SEQ ID NO: 62729 - DNA, 448 bp, Zea mays
  unsure (1)..(448): unsure at all n locations
tatcaagtctactctcatatggatccggaattatagtcatatctgttctgaggccgccgtaatcattgttttcttaccgagacatttcctgccttttctgcccatggtgctgcgtcaccctattttggcccaatgggtcgtgtatcaagttaggtccattagggacgcatcctagggttgcagcacgaccccaatacccttgtggtcgtcctcccatgtttataaaccccctagccgccaccaagaacagcgggttttgtttagatcaagtttagctctcgctacttgcttgcaagcgcgcgtgctagttcagccgcccgtcttcttgtcttcggaaccccaccatattgtagtttgatctttaaacctacatttagatctggtaattcagtacttgttctacttgttcttgctagttcttcgattgcttgcangacgagtgccctag

SEQ ID NO: 62730 - DNA, 456 bp, Zea mays
tgcacacatagctcatttgaatacctttgatcatatctcttttatatgctatgactaatgtgttttcaagtttatttcaaaccaagtcataggtatattgaaagggaattggagtcttcggcgaagacaaaggcttccactccgtaactcatacttcgccatcactccgagcaactctctcgtctttgggggagaaatgagcatcaaggaaaagaacttcatcctagggggagagagtaaaagctcaaacgcaaaaggacttcgtctttggtataatcttaactcacttatttatgaccaaaggggaagaacttacttctaggactctaatgattccgtttttggcgattcatgccaaaaagggggagaaatgagcccaaagcaaaaggaccgcaccaccaccaccaaattcaaaaacttagtgctctccaaaagtctttatcatttggtatccta

SEQ ID NO: 62731 - DNA, 440 bp, Zea mays
  unsure (1)..(440): unsure at all n locations
tgacccggagaccctcataccggatgtggggaccttctgcattcgaaggtcctcaaaaacaggatttaataatgtttctggagtataatgtgtgaacaagtatcttcggactcaagtcaagcatcacagtagaccagaataatacgaaggttggtgaaacgcccaaggtgtaaacaagaaaacttccgcgtgacagcagcaggtgaaaccgacttaaagatgaaaaggctatttagacctcgacagattactataggattattatcgagtgtaaagggcattaatgtaattttgcacgggctgcgtcccgtgcctataaataggtgaacagtactcccgtactgttcaagctgacttggcattcgctttttgcgtcacgcttgtactgtcatctncttncgattgaggtacacttgtaattcaaccgatatttctgttat

SEQ ID NO: 62732 - DNA, 460 bp, Zea mays
  unsure (1)..(460): unsure at all n locations
ntcaccatcaagactgaagaatccctcattttcaaagcttctgaatgtaatgcttcaacccaacatgagtccctgagcaactgttcagctgtagatctactccaagcatgttgaggaatgccagttagccatataggcacaatatacaaggattctaacaatctctatagtttatacacaattttcagttatctctagccaaacatatctatactcctaacaatctttattagaggtggttgtttgatatttctattntggtggaatctcaatgaaattgtggtatttatctagtttgatgacttcaagttttgtgatggtcaaatatttggaataccaactcattggtcgtcatagtggcatggtggattcggaagcatacaaattgttgtgtctttgagggatctcatcccaattttagtaccatcatgcatgatataagagatgaagccaagtgtgg

SEQ ID NO: 62733 - DNA, 422 bp, Zea mays
  unsure (1)..(422): unsure at all n locations
tgaccctaattngctaagtgtacccgaaaaatatcttcagcagtaagaataagctccaccatgattaaattaatcctctctcatcaattttaattgtaattacgtatcatgccatgcatatatcttactcattgcattcattagattgcaatctcgttgacggagagtacgtgctcatccccgagcaaggagctatccacgaggaagaccaggagcaagctcccgagactgccatcgaggatattcccgcagccccagctattgaaggcaagccccagttttatgcataacggtatctatatatgctactttactacacttaatgtttgtaggcttgtaatgtgcacttaagtgtangagttgcttgaaacctctagttgcatgaactcaggaattccttttgagatggatactagtatgct

SEQ ID NO: 62734 - DNA, 466 bp, Zea mays
  unsure (1)..(466): unsure at all n locations
taacgacgatgagtgtgtctctcaactggaattgaaggagatgatgcgcgcgatgattgaagcttttaaaaaataccaggactctgcggcgacatcctatgagcagcttgatcgacgagttgctgaacttgttacacgcatggacgtactggaggctcgtcccccaccaccaactccagccccagctcactctcctgtggacgacgacgacgatgacgatgatgtttatgcaccgttgcaacaacgcctcacacgtaatcgacaaggtatgggaggtaatggtagacgttgtcatcataatcctgaaccagaccatgatctatttgctaagattaagttctctattccaccgttcatgggttcttatgatgctgaagcttacttagactgggagatgacggtagaacaaaaatttaattcacatcttattcctgagcaacatanggttagacaagccactagtgaa

SEQ ID NO: 62735 - DNA, 468 bp, Zea mays
  unsure (1)..(468): unsure at all n locations
tggccanataactcanataaaagcccaaatcaagcctcttatgtggggacttaatgggaattctgaatttcagaattctgaaattcagaccttgagccaaagatcaagcatgttcaccttgatccctaactcgaatcctaatggccccattaacaaaaatgtgcctaactaacccctttgtcgtgtgccaggagatggcattgggacgcgtgccttggacacgtcaaaccagagatcttctccctgtgtgtggcagtgagacaaacaggatttctcccctctctatctcttaatccagtcagcaaaacctgctagcctccacacacaaacgacaaagggacctgagaggaagagatctctcaacgggatcatggccataatctcaaagatttggggccaatccgcgcttgaactcgacctctctctgcgctgcctcgtgctcgacgctgtgccaggcgccagagcgcg

SEQ ID NO: 62736 - DNA, 438 bp, Zea mays
  unsure (1)..(438): unsure at all n locations
agaaccaacataacatgtacaagtgtaacagaatcagaatttttttatatatattnctatatgctatgctcgtaaaaatcttatgattacgcattaccatcacgcagaggtcagagctaccagcctacaaaccagcgtaaaagtactgacactagcagcaaccagaaaccctttccactacaacgacctccggaaagcgcaatattgacaagaggctcttggaagccgtcaacaatcgacattgcacagactcattgctctaatcttctatctaaccctgcacacgaatgatgacaggaaataacaaagtatgtctcacattccacacatttgaaatatcatgaagagggtaaaagaatcattgacgggctgaattattcctcatctcataaactggtgtgcataaccaaccaacttgtcaaagctttctcttggctt

SEQ ID NO: 62737 - DNA, 434 bp, Zea mays
  unsure (1)..(434): unsure at all n locations
tgtgagcaatacaagtacagaagggagaaggctgcttcggctaatcaaccgaagcccatgctcttatgtgacgatatagcagaacagaaggtgctattgggatctcaattgtctgaagagcaggagaaaactctaataaggttcctgttcaacaacaaagatgtcttcgcatggtcagctaatgatctctgtggtgtcaacagggatgtcatggaacactcgctcaatgttgatccatccttcagacctagaaagcagaggcttcggaagatgtctgacgacaaagccaaaggtgctcggaatgaagtgaaaagactccttagcgctgcagtcatcaaagaagtaaagtacctagaatggttagctaacactgttatggtgaacaaagcacatggtaaatggagaatgtgcattgattntactgatctcaacaa

SEQ ID NO: 62738 - DNA, 415 bp, Zea mays
  unsure (1)..(415): unsure at all n locations
gcagtgctcgtcgactttcttcgctcgaacaccgagggttttgcgtggagtgcctcggacatgcctggcataccgacggatgtctccgagcactcgcttgatattcaagctggagctcgacccgtgaagcaacctctgcgccggttcgacgaagaaaagcgcagagacctatgcgaagagatccacaagctgatggctgcagggttcaacaaagaggtatttcaccccgaatgggtaaccaaccctgtgcttgtgggaaatggaggatgtgtgtagactacactggtctaaacaaagcatgtccgaagggtccctaccctctgcctcgcatcgatcaaatcgtggatttcactgctgggtgcgaaaccctgtcatttctcgacgcctactcanggtatcaaccaatcaagatgaa

SEQ ID NO: 62739 - DNA, 464 bp, Zea mays
  unsure (1)..(464): unsure at all n locations
tcacctagagagattcacttgaaggccgcagaaagaattctatgatatttgaagtatactcccaatattggtctatggtatcccaaaggtgctcaatttgaattaattggatattcggattcggactatgcggggtgcaaagttgatagaaaaagcacctccggttgttgtcaatttcttggtagatctcttgtttcatggtcttctaaaaagcaaaattccgttgctctctctaccgccgaggcggaatatatatcgaccggaaattgttgtgctcaactattatggatgaaacaaactctattggattatgggattattttcaagaatgtgcctctaatgtgtgataatgaaagtgcggtaaaattggctacaaatccggtccaacactcaagaactaagcatattgatatacgacatcacttcttaagggatcatgtnggaaagggagatatctctatata

SEQ ID NO: 62740 - DNA, 466 bp, Zea mays
  unsure (1)..(466): unsure at all n locations
nttccttatcgtcatcaactttgacatagaaccactcagatttccatcctgctggcccattgcttcggtagctaattacaggaaacttagtagttttccggtaggcgaagttgtaacaaccaaaattatcgtgcagtccatcccttctagccttcgtttgataatgcaactcgtgaacccggcaaaagttgtccgcaaatggttccactgcttggcttcggagtgcccagatataaacaataagtctaacaatagcgttgggggtcagctggtgaaaataaataccaaacctcttcagtacctctgcaataatcccatgtagggggaaccttaatccagcttttagaaagcttttgaaaataacaatttcattcttctccggctttggggtagtctcttctcccccgaagcgcaatagcttcttctgattttcagtataaaagcccgaatttaccatcttggacat

SEQ ID NO: 62741 - DNA, 458 bp, Zea mays
  unsure (1)..(458): unsure at all n locations
tggatgctaataggtccatagggatggtcgaccgactagcatatggtggtcccatcagctcatctttctccatttcccatagttctacacaaaatactccatggatatgtggaacttgttatttgattaaatatgctcatgatatgcttagcttacttttattccaaggttgttgatggtgttttaggtatgtgaaatgatgacattttcactatcaataagattcctaagcttagcctttgctcatcctgaacaaatgattaaaacttagctatagtggataggagttggtaccatgcttcacattccaataatactatgtgtgcaacaaacatttctctttgagtagaaaaattggcaatgctgaaaacccactcatattaccttagtcctccgtggtgcatatggctntttcctttgtattgngtgttgagagacaaaacaactntgacttgagc

SEQ ID NO: 62742 - DNA, 461 bp, Zea mays
tcagctccatctatgttatggattgcttttgaatcagtccattttccttcggcccttctggcagcttcctggcttccatgaatagcgatgggtccttgatccgaaggtatcttcatgcaaagataggcagggtgaagaattgcttcaaaagcattgagggtgccacgaccaataattgcattgtaagggtattccatgtcaacgatgtcaaacacaacttgctcagttctagtgttgttgatgaacccgaaggtcactgacatggtaatcttgcctagtgctacaatttgtcttcctccgaagccacagagaggatgtgtagcatcatgaatcttatcttctggctcttgcatttgtctgaaggccttagcaaatatgatgtcagctgcactgcctgtgtcaaccaagacattgtggaccagaaatcctttgataacacaagaaataaccatggcatcgtt

SEQ ID NO: 62743 - DNA, 454 bp, Zea mays
ttccagattgttgaagagagcattcatatgaattatgaaactgcaggtatgtttggtttactgcggctattcatgtttccctaacaaaaatgagcgggtctactggtgggtttcatctactaaatggctgaattgtctcttccaactatggagacttttgtagagggataaaagttcttactgccagcagaatttcataatttttgagtgtgtagagtgggagatatcgaattttgaaggtaactatgatgttgtgtgaaacggattcagtcggttatcttgtcaggtgttttagaacttatggatggcagaatttaattatcctctgaatatcgaaattgtagattactttgtgtagatactcctagagtatttgtttgatatcatcactattataattttaaagatacaaaattaacaaacagcactgctgcctgttggcatgtgggtcaag

SEQ ID NO: 62744 - DNA, 306 bp, Zea mays
  unsure (1)..(306): unsure at all n locations
aactatacaaactcaagctgccgcagnagggcagacgtagaatcacgccggcttctttttgtcaacagagccgncttgggcacctacacgtgcaccaccctcagcatgtcctcgcgcccaagcctgagcgcctacaaacaccttgcacggcttgccgcgtaagcgacctctggtcgaggactctcacttcttcgtgataccctggcaggccatgcactgctcccgagtgagatgaagctctccgccgacagagataagcccagagagagcctgtggttagtcgccgtaaccaccttgaagcgacca

SEQ ID NO: 62745 - DNA, 448 bp, Zea mays
  unsure (1)..(448): unsure at all n locations
tatgaaggttcttcataactacatgtgctacacggcgatgccacagccagcccatgcttgtcttatcaattaagcatgcatctagaccggcctcctccttcgaaaaatcaactaaatagagtttgtcgtctagtacacccttaaaagctaatgaaccgccacaccttctaaagacggacacatctacattggtagataagcaattgtgacccatattacataattgactaacggacaacaggttatacctgagcgattgagctaagaacacattatatatggaatgctcggatgaaatagcaatctttcctagtgctttaaccttgccttgattcccgtcaccaaatatgattgagtcttgggaatctttgttnttgacgtaggaggtgaacatcttcttctcacacgcatgtggtttgtgcattcgctgtcgataatccagcttgag

SEQ ID NO: 62746 - DNA, 511 bp, Zea mays
  unsure (1)..(511): unsure at all n locations
gcttgacagtattctgcgatggttcttggggaacctttggtgcttgagcggctgctgtcctagtagcaccttcaaaagtcaaaacatgtgatgtatccaaactagatttcagttgcacttttaatattgttgagtacgaagcacttctattngggcttcggaagctcanggcaatgggaataagaagggccatcttaaagactgattctcaaagtatttctagccatgtggacaaaagntagcaggcaagagatctgaagcttgaaacatatctggatacagttcgaanggtgtaggcttctttcgaaggttnttctgttaagaataacccangatgtgaaattgagcacgtagatntactagccaaatcggcggcccaggggctccctctacctccagaagtattntttgaaacaataaaggcaacttctgttgaactcatggagagagcagtgcttactatnntctccgtacatagtgaagactagaggactgnattatatctttctct

SEQ ID NO: 62747 - DNA, 385 bp, Zea mays
  unsure (1)..(385): unsure at all n locations
agacacctgaggcatgcaagcttatgaagattcttcatcccaacatgggctagtctgcggtgtcagagccaacccatgttagtcttagcaattaagcaagtgtcgagttcagctctatcaaaatctaccaagtatagctgaccctctaacactcccttaaatgctattgaatcatcacttctcctaaagacagtgacacctacatcagtaaatagacagttgtagcccatttgacataattgagaaacagaaaagcaaatgtaatctaaagaatctacaagaaaaacattggaaatagagtgggcaggagatatnagcaatttacccaatcctttgaccaaaccttggtttccatccccgaatgtgatagctcgttggggatctt

SEQ ID NO: 62748 - DNA, 393 bp, Zea mays
  unsure (1)..(393): unsure at all n locations
catcgagccagtggcttaccccacgtggctctccaatgttgtgatggtgcataataaaagcggaaaatggcgcatgtgcatagacttcaccagtctcaataagtcctgcccanaagacaatatcccgttgccgcggatcgacaaaatagtcgatagcgcggccggatgcgaggtcatgtctctcctcgactgcttctccggctatcaccagatatacatgaaggaggaagacaaagccagcaccagctttataacacccttcgtcacctattgctttgtcagaatgccggagggtctcaagaatgccggatccaccttctccagactcaccanaacagtgctcgaggggcaggtcggcagaaatatattcacatatgtggacgacatcgtcgt

SEQ ID NO: 62749 - DNA, 462 bp, Zea mays
  unsure (1)..(462): unsure at all n locations
ccgcaagcatgcaagcnntcccctctnnttctggtcaaccttcacatattatcatattatttgtccatccagccgcccacttgggatgataaccaatcacatgagctttggtatctctccggtatgcacaattgaatcatccgaaggttttatgtagcccatcaactctagccttcgtctgataggggagttcgtgcacacgggaacatccttcagcattggcactcttcccttggctctggagagcccatatgtagacactgagtctaactatggcatttggcgcaacgtgatgaaagtagatctcaaatttctttaacacctcaccaatcatctcgtatagagggaatctaagacctgctctaaagaagctcttacaaactacactccgcgttccttggttccagaacactttctcccacaaaccaactagctatcatcgtgttttcaaatatactaatt

SEQ ID NO: 62750 - DNA, 479 bp, Zea mays
  unsure (1)..(479): unsure at all n locations
cgagcatgagccaacgaccanccacacgcggaatagngtattcgcgctcgctggagtttgttaacccgccggagcacgtggaccgcgtaaccctgtgcaccatttctcaattttttgcgtccatggcctctacatcacctcgtggagcgtcctcgcgcacctttacattgaatcccatacgcagcctgtgggtgtgtgtctggaagcatagtagcangcactgacantacctctcacttgcactgctgctcgtaggccacgtgcaacttccgaccacctcagacaccgacccgcacaccgacgtgaccgtcgtgacctactcgacgtccctgaccaccccaccggagctctactgccgtcggtgagcctcgccaccgtgattattaccacggttactggttcagccagccacggatcgccggttagatatacgctaagtccacggagttctgtgcaatgtcagtgacttatgctaatag

SEQ ID NO: 62751 - DNA, 488 bp, Zea mays
  unsure (1)..(488): unsure at all n locations
gcttataactctctaagggtcctatccggtgtggaattatgtgccacactaaccacatcaggtgttntatagagctgttgtacatgtttgacatactctttgagttttccgcatggtgaaatatttggtgttgcatgtccggtgcacataagacaccatggtgcccggctgaaaacagtgaactaaaactaggccaaatacatattcaatgtcatgtctggagttaaatcggacatgttcaatgaactataaaaatatatctcgagaacattttcttctctctttttaagcgagctaactctcaaacaatntgtcaaacatgttggattatagttagcatttttcaaaatgttttatacaaaccatttcgcttgctctcacgtgtgccgcatgggcttatatgcaatggaaatgaatccattatctattggtactagatgtccacattgccaattaaactctactcttaagagtatgaatactatact

SEQ ID NO: 62752 - DNA, 440 bp, Zea mays
  unsure (1)..(440): unsure at all n locations
tctanagggagaacacgtgataggttngactaacgtacaattctaataagatagaccttgtgcagcttgtcaagcaggtaaacaagtgggaggagcgcatcacagcaagaatgtgatgaccacttcaagacccctagagctgctgcatatggacctcttcggacccgtcgcctatctgagcataggaggaagtaagtatggtctagttattgttgatgacttttcccgcttcacttgggtattctttttacaggataagtctgaaacccaagggaccctcaagcacttcctcaggagagctcanaatgagtttgagctcaaggtgaagaagataaggagcgacaacgggtccgagttcaagaaccttcaagtggaggagttccttgaggaggaagggatcaagcacgagttctccgctccctacacaccacagcanaatg

SEQ ID NO: 62753 - DNA, 403 bp, Zea mays
  unsure (1)..(403): unsure at all n locations
agcttatcttcgctcgatctcaaatctgcacaacatcttctatattatatcagagacatcaaacatgaacaagagaacaacaaaatcaagaaaatccaaagaattctctcgctaagatgtggnnggtagggcaacaacgataattaccccacttacgagagcaaagaaatttgtgccacgcatgcatgcataaatctttgaggaaatccttgacgcaaataaaggatgccatcagtggccgcacaggaaagaatcgagttccaggatcctcctnctgatgcacatacatgaaagataccgttgattgtgaagaaacaactccgacccaaatctacataaaaggaagacaaatgtttangttctctgaaattcacagctcatagtgacaaatgcatcaaatatg

SEQ ID NO: 62754 - DNA, 437 bp, Zea mays
  unsure (1)..(437): unsure at all n locations
agcttcgcnaggtgaaccgaaatagagaattggagaatggaattatggttcatatgagtcanattgatgtgataaanatcaacgaggccacggaaaaaatgagatatgggaaggccgttgtcgctgagaaggaaaggagcgtaaactactgactcgtgggtatcttcggttgggacagtagtcccgtggcaaacccgccaagaacagagttcccgcggaggaagaaccccgatggagacaagacggaggagctcagcttcggaaataacagacatatggttacctgcgaagggtaactgactgttggggtcgattgcggggatcactgcagcagacgagttcgcagttttcctcttgggcgccatcttgtttctcgctggcaaacagagtaggaggcgagtggcggagaagattcagatgctgaaatgcaagaacta

SEQ ID NO: 62755 - DNA, 413 bp, Zea mays
  unsure (1)..(413): unsure at all n locations
agctntgttagggcgtaacatagctgttggtttctatgctgattgctaacttatgcactctgtataagttgttacttcagatgttgtggcctttcagataaatctccatattaggttcctcttcacttgtgatataaatcctgtttggtgctgtggctcatgatattttcatgaaaaagtagctgcacaaagtgatgctagcagagtagataaaagcatgcctggtttaatcgtcgatgttgcttagagcttangacattctttgcacttgttgttagctactttntgtaaccttaacaaacaagtaacaagggctaggtatcttttgtgggttgccttcaactgaatacatcggtcattatcattngttataagtggtctaacccgcctacctaagttgtctnttaccatcc

SEQ ID NO: 62756 - DNA, 433 bp, Zea mays
  unsure (1)..(433): unsure at all n locations
ctgtgaagattcttcatcccaacatgggctagtcggcgatgccagagccaacccatattagtcttagcaattaagcaagtgtcgagttcagctctattgaaatcaactaagtatagctgaccctctaacactctcttaaatgctactgaatcatcacttcttctaaagatagtaacacctacatcagtaaatagacagttgtagcccatattgcgtaattgagaaacagaaagcanattgtaatctaaagaatctacaagaaaaccattggaaatagaatggtcaggtgatatagcaattttaccaagtcctttgaccaaaccttgatttctgtccctgaatgtgatagctctntgnggaatcttggttttctcataagaggaagaacatccttttctccctgtcatgtggtttgtgcactcgctatcaagta

SEQ ID NO: 62757 - DNA, 460 bp, Zea mays
  unsure (1)..(460): unsure at all n locations
agcttcggcttcatctatgttatggatagcctntgaatccgtccaactcccttcagccctcctggcagcttcttgacttccatgaacagcaatgggcccttggtccgaaggtatcttcatgcataagtatgctggatgaagtattgcttcgaaggcattaagcatccctcgaccaatgattgcgttgtatggatagtccatgtcaacaatatcaaagacaacttgtttagttcttgtgttatggacgtaaacgaaggtagatgacattgttattttgccaagtgccacaatctgtcttcctccgaagccacaaagagggtgtgttgcatcatgtatcttgtcttctggctcttgcatctgtgatgtccgctgcactgcctgtgtcaaccagaacattatggaccataaatcccctgatgacataagatataaccatggcatcattgtgaggataatcttt

SEQ ID NO: 62758 - DNA, 491 bp, Zea mays
  unsure (1)..(491): unsure at all n locations
atctaatgcctatagtgntctttagatcgcatctgttgtttatttgatcattgaataacttcaattaacacttatgtttcttagtgcctcatataatttcaatcaatatctctcttgatatgcactaagttaaaaggagaattcatgatatatttatgcaatttgtgatctacttgatatataataacatgacttagaaaaggatcactagttgtagaactctctcgtgtgcaaaatatttccatacactgtcttgattataggtcttaagtaactaagactaaggtcaaagcacaatgaagagtgcgtctctatgtgaaggtacaaaagggtaaaactactttctctncattatacatgtacctaaatcttccttttctatacatntcttgcatatcttgtataaaaggaagagaaagcatgtctatgcatatccctgcttatacctagntaacctctcanaaattcattcttgcataatgcatctttgt

SEQ ID NO: 62759 - DNA, 459 bp, Zea mays
cagctggacagtattctgcgatggttcctgtggaaccttctgggcaggtgcagctgccattttaattacaccttccaaagtcagaacatgctacgcagtgaaacttgactatagttgtacaaataatattgctgaatacgaagctttgcttttgggtcttcgaaagttgaaggcaatgggtataagaagggtggttctcaaaactgattaatttctggccatgttgacaaaagttgtaaagcaagagatccaaagcttgagaaatacttagatacagttcgaagacttgaagcttcctcgaagggttttctgtcaagaatattccacgaggagaaaataaacacgctgatctactagccaaatcagcggcacatgggctgccattaccttctgaagtattctttgaaacaataaaagcaccttcacgtgaccttcttgaaagagcaatgctcaatatat

SEQ ID NO: 62760 - DNA, 414 bp, Zea mays
  unsure (1)..(414): unsure at all n locations
cgatccaatgtgatgtatcccatggatacatcccgattntgccaagtctccaaattccccaagtgtctttcagactcatcacttccctttcgggatccaaaccttcttggtgcttttcatgggtgaaattatttactntggcacgcagatgcgtttggcccctttccctttataggcttgcatgttggccttgatttctatcacctttccattctttttcttcttgatcaaatatggtgtagcagccttttatctacctctttgatgtaggtgttggagattntgcttgttggcttttgcttgaccttntgcttttgcttatcctcgatcttcgccttgcattgaanagacttatggccttctttgtgatatagcctacaaatcaaagtttcgccctccacaggcttgttcact

SEQ ID NO: 62761 - DNA, 295 bp, Zea mays
aactcgaagtggaagtgagttcaccggaggtgggcgccaatgttggggacttgttctcaaatgcttcgaattaagaacaaggcaacataaaaagtgttaaatgttaaagtcctttgtccttcgaagcattatgtccttttaggaaataatgggcgtcagacgaaggtcataagggacataccttcgtaaacgtaacaagttatgacgaaggatttatataaagaatgaaatataatacaagcctcatcatagtatcatttctattttattaatatggaaaaatagaaatgatttc

SEQ ID NO: 62762 - DNA, 442 bp, Zea mays
  unsure (1)..(442): unsure at all n locations
tcggattacaaaccggcttaagagtagaatgacctttcagtccataaatggttgagtcgttgttgtaaacttttatgaggggcataattgcaattcctcacatgctgtgtcccgtgcttataaatagtgaacagtattcctttactgttcacggattccggtaattgcaatcacgtcaatcgtgaattaatctttgtcaaggcaaaggtaaaaatgtatttagtatttggatacattaaattgagataatataaaagtgatgttgttcatttataatttatttgtctttaatgcttcgtatttcgtattgctttatataatctattaaagttcaattacgaagatttaaccttcgtaattgtattggctttaaccttcgtccgaagttcattaatccttanagggataatgcttcattggacgaaggacattaacatttaat

SEQ ID NO: 62763 - DNA, 425 bp, Zea mays
  unsure (1)..(425): unsure at all n locations
atttatgactaacaaatgttcattttgagaaagaaggatttgtagcgcatgtcanacagggaagcaagttggagctcatcatccacgtaagaacatcatgacgactgatagaccgcttgagctactccacatggatcttttcggcccaatagcttacataagcatcggcaggagtaagtattgtcttgtaattatggatgattattctcgcttcacttgggtattctttttgtaggaaaaatctcaaacctaagagatcttaaagagaattttgaggcgggctcaagatgtgttcggattgagaatcaagaagattagaagcgacaatggaacggagttcataaattcacaaattanaggatntcttgtggaagagggcatcagcatgagttctctttctcctacacacctcaacanaatgatat

SEQ ID NO: 62764 - DNA, 392 bp, Zea mays
  unsure (1)..(392): unsure at all n locations
agctttgtcaagtgccttctagagcactcggcaaataagctgacaaagggccccgctagtagaccctctgctgagtgccggctggtagacactcgacaaagaggtaacctctttgccgagtgtattaagtgatgctcgacaaagttaattctttgtccagtatcacctagaacactcgacaaagacaccgtcttcgttaccaggcgccatgacggccgcttttctttgccgagtactgactgacagtcggcaaagtatttgccgagtgcccgataaaaagtactcgacaaagaagccgttgtcgacgtactattcgccgagctctctttgtcgagtgtttttcaagctntgccgagtgctttgggcactangcaaagcgctcgattctgata

SEQ ID NO: 62765 - DNA, 327 bp, Zea mays
tatcatatcggacctcaatgggcgggtcaagggatagctctgatatttctccaagcaacatcatagagccgacttgggaaaccttgcccgctgattattaacttcagtttgaggagcacaaagagcggatgatccatgaagcgaaagcaaagttcttggcctacttctaagtggacaggaacaacaaggtcgttcgacatctggcgacagattcggtctcgctccaacccacgccagatattcccaatgtaagtaataccaacgatctgcaatctcttagaaattatgttgaagatcagcgtgaacaaatgcagaatatcatatggg

SEQ ID NO: 62766 - DNA, 264 bp, Zea mays
  unsure (1)..(264): unsure at all n locations
tggcgctgaangtctttcatagaattggtaggggccgcgcgaacgcttactccctctaccacaaattatgacgtacactcttgcacttatgaagatggtagaccagcgcactaaccaagtgcaatgtgagccactgatctaggccataagtcttcttgatcacccatccacctcgtacaggtaagtattggacaaacgtattccgggactttcttatatatgccgctagctcgtccttgattgccatcggcgccgatgtgggac

SEQ ID NO: 62767 - DNA, 302 bp, Zea mays
  unsure (1)..(302): unsure at all n locations
gcttcgacccaggcacgccggtctgctgaccgtgccggactggcccattagcccatcgggccattgngttaaatcagtgtaaaatgttaaaaaagcggggcaggaggtggaacccatgctctgacggaagaagggcggaagacactgggtaaagttgtctaccacagagaccattatgttcaggtgttntaatattgaatataaatcggacatatatatacgattttttgtaaaatataaaaatataatcatgctgtgtcgggccagcactacgggccgaggctacngcccaagcacgacac

SEQ ID NO: 62768 - DNA, 281 bp, Zea mays
  unsure (1)..(281): unsure at all n locations
tacgagagccttggactacaatgatatgcccaacagtcgttatgaggatgatcactcttatgctcatgctctacaacgtcatactcgtgacatgctatctcacacataggctattccatctctcgaggtcatactcggcacattagttgtgatgatggagagcgtttggactattgtcaacaacatcccaatctacttggttgaaagaactctatggcaaacggccgngggcgacttcttggacttcatctgccgtaatataatcctatgagtgtactgct

SEQ ID NO: 62769 - DNA, 420 bp, Zea mays
catctcctcctgcaccagcacacgcccaattagtggtggctatccggtgttgctccaccgcaagctcctcttgcttatactctatcctctctttggcctctgtttactactttctaagatcctccaaccacttcttgtgttcttatgagatatacatagcaattcactgctcaaaatcacagaggggcggaggaggctacaatacatgcaatgattacgacgcctacacttacattacgacgtgtcaaccattataatgctatctctcaccattatatttaatctcaacgctgcacaatcgtaggctcatatgcatagttagcacacattccaaacctttgccgatatgtgtcatgatcctcatacttgtcaatcttggaacgatcatcacatacacacataggcactacaacaccacct

SEQ ID NO: 62770 - DNA, 497 bp, Zea mays
  unsure (1)..(497): unsure at all n locations
tgtctntctcaatctccttcgnagctatcatcctcttatcagtcacctcataaatattatctatcattaattcatgatagtcaccaacaaatagatcattttgtgtagcaaatctgatagcatttatgcttatctctacaggcaaaatagcttccttcccatattcaagctctaaacgagaaactctggtagcatgatgcttagacattctatgagcccacaagacctcctacaaaacttgatgtcagtgcctaggatggtcaaatattntcttcttaataaatctaatcgatgtcctattacttgactcggcctgaccattggcccaaacgtaatatggagataaatgagcaatcatatangattcaatgaaatcaggaacctcttaagacataaaagaagtcctctgatatgtaggttaagnttggggaatgtcgaatctatagatactatgttcatttataaactcaattaccttcttatgtattatattcttc

SEQ ID NO: 62771 - DNA, 430 bp, Zea mays
  unsure (1)..(430): unsure at all n locations
tctacaaatgtctcaagaatagctacacggtctatcaactttatgtattgagaagaaattattagatgacgtccatattgaagccatcattgtatgatttgcatctagaaatgttataagacattattaagttgatctctacaatatatttgaggtaataatcttacttctatgtcttactgctcaagtctttatgtggtacatcaagtataattagttgatatatataataggaaaaaatagtttatatggtgttggggcctctgtttataatcttgtcacaggcccctcaaaagtcataaacggccctgngtaagggtttagagtcgatccttgatgtagtcctattctaatcttaaagtcatacatgtccccatcactcgntcagacactagtcagaatcatggttattaaagcatcactaaagcga

SEQ ID NO: 62772 - DNA, 427 bp, Zea mays
  unsure (1)..(427): unsure at all n locations
atctgatcagagtcatattcaataccctccaacctttctaagtggtcggcatagccccagtcttgactaaggttgtcttcaccatggggtggtgaggacaaatcatatggttcgtacatgatgctaagatggtgggataccgtagttaccttgtccaaatactgttggaacaccaaatcatcttgctccattatgcaagcaatgctcttcaatgctacacgaagtttggtagcgtcaaaagaggtcaacccatgttcttgaccgattgtttcccgagctaccgaaaatatcttgtccacaatctcttgcattctttcaattgccttgtcngctatggagtctgctgaatccatctgatgtggatctangtggntagtgtactagacaaggggacaatctactaacttccatgtattgacatgaattg

SEQ ID NO: 62773 - DNA, 237 bp, Zea mays
atatccatatctcaaccaggattaataaaatctataaacatattgcaccattttacattagaatctatggatcacaagaataactagcctttgaagcaaaatagattaaatgatggagttaattccatgagaatgggcatgtgaaataaattcaatcaattcagacctagactaaatccatggcaggattcgatccccttataatgtttgggagggcacggaaaaatgtaccatatt

SEQ ID NO: 62774 - DNA, 440 bp, Zea mays
tcctgtgcccagctcccaccaccaccaccgctagcacctactctggcccgaagccagcagctagaagggcaccaacacgctcaacaacaacgcgattttcgggaggagtccgaagctcgcacagtcaatagcactgtgcctaaatccaagcacatctactaaagaatatcttacttctggtgcatctttatcttttctgtcattttatttttcttgtatgaaaaacaattcacgaaggattgaattccaatttcatgtaataatattgaactcatatcatcatcaaatgggatgcttcctattaacaagattccgaagctacaaaaatcgttcctaagggagcgcagagtaaggtccgaagctacaaaagtcattcctaagggagcacagagtaagttccaaagctacaaaaggtcgttctaagggagcgcagagtaagt

SEQ ID NO: 62775 - DNA, 347 bp, Zea mays
  unsure (1)..(347): unsure at all n locations
gcttgtaacccctactgcaagcacccncggtgcattataatataagcctcatccctccgcttgtgttccaccttgcatcaacccatctggacaggggcacgtggcacaaaaatcactagtcgggccggttgagggtcctccgggtccaaaacgccgacagttggcatgccangtagggggacgctgcgtgttgacaatacttcctcgtggagttccagatggataatcttcagcagcctcttcagcccgggacggtgctcctctttgggagcctcgagttcatgtccccggacggcggctacgacatggtacttctttccccgcagcacgacaacaacgacgatcgt

SEQ ID NO: 62776 - DNA, 382 bp, Zea mays
  unsure (1)..(382): unsure at all n locations
cgttattataaaatgaaccctagngcaaagtttggaactatatgtantatgattagttagcacactaattatcgcccacaaagaaaaggatttcacctatgatatgatgacacctagtagtttagtgaagtgagggacttgtttaagaagttttaagctttggatgagatataagttggattagttccctagtttatctaagtgaattcaattggtcacttttattgaatgctacgttgtgtagaagtatgtgtatacttgtcatgtacttatttacgagtggttatgttccccacctctccttatgagagnttgcatttcatatcataacataagcatacatgtatttgtaattgacttgtagaacatctataagaagtgg

SEQ ID NO: 62777 - DNA, 395 bp, Zea mays
  unsure (1)..(395): unsure at all n locations
tatccttgtcgncatcaaccttgacgtagaaccattccgatttccatcctgccggccacttgcttcgatagctgatgacaggaaactctgtggttttccgatatgtataattatagcaaccacagctatcatgcaatccatcttttctagccttcgtctgataatgcagctcatgaactcgacaaaagctgtcggcaaacggctccaccgcctggcttcagagggcccagatatagacgctaagcctaacgatagcgttaggagtcagctgatgaaagtagatcccacacctcttcaatacatctgcaataatcccatgcagggggaatctcaacccagcctctagaaagctcttgaaatgacatatcatccttctctggcttcggggtaggttc

SEQ ID NO: 62778 - DNA, 416 bp, Zea mays
  unsure (1)..(416): unsure at all n locations
tgcagtacagataatggcaatctatgaacactcttattatgcaagncttgggtattcacactttcaatggatccatccatttctttgtggtttctgtttgttttcatccatctgaaactcttgccttctaatgctttgtacaaacagagacatctgaatctgcctcattattttcgtaggccatataacaatcattagttntcttactttatatggnttctgtatatttccattntcaggtaccatgttacgaatttttttgccccaagtagccgttttgggactccagaggacctacaatctcttattgataaagcgcatgagcttggcttgctagtgcttatggatattgttcatangtatgtctgttcgggtattctattgtctcgttggatgccttatntctatcatgcagt

SEQ ID NO: 62779 - DNA, 378 bp, Zea mays
  unsure (1)..(378): unsure at all n locations
tctctacatgccatacaaagagatatattatagcgacacatgttacgatgtccaattaaaaatatttacaaacattgaataaacatgatagttggcatttaataaaatctaaanttgaacctttctaacattcccatcttgtggcccttctaaataacatttccacaagcgtcatttgcaactcaaaatgatgatgtgcattaatagttttggtttcatcctaaccattagtgcatttagtcaatattacaaataatggttagatcatctaatggtgtttcattatacataaatcggcattatttcttgcatatattacctgttgcagtgaacgtactggcacatgcttctcattatcacattgtgacacatgttcac

SEQ ID NO: 62780 - DNA, 466 bp, Zea mays
  unsure (1)..(466): unsure at all n locations
agcttatgaagattcttcattccaacatgagctantctgcggggccagagccaacccatgttagtcttagcaattaagcaagtgtcgagttcagctctatcaaaatctactaagtatagctgaccctctaacactcccttaaatgctactgaatcatcacttcttctaaagatagtaacacctatatccgtaaaaagacagttgtagcccattttgcataattgagaaacagaaagcaaattgtaatctaaagaatctacaagaaaaacattggaaatagaatgtcaggagatatatcaattctacccaatcctttaaccaaaccttgattgtcatccccgaatgtgatcgctctttggtgatcttgtgttttctcataggaagagaacatcttcttctcccctgtcatgtgggttgtgcacccgctatcgatgatccaacttgagccctcggatgcataaaccta

SEQ ID NO: 62781 - DNA, 333 bp, Zea mays
agcttgggctaccaccatgcaaccggagcgcggagaatatcctgcgtgaacatccatggaagtacaagaaggagaccccgctcggacaccctcgggggctgggctttagtttgcgctacccacttgagccggatcatctccggcagtaccctcgggggctaggcagtggcttgcgtttcccacccgagccgagtcatccccggcaacatcctcgggggctaggcaagtgtcaacaccatccttgaggaccaagttctccgcagtagccgcctctaaggctgagggtccctcaattacttccatgggagcaagacgatccaagtcagtttcctg

SEQ ID NO: 62782 - DNA, 432 bp, Zea mays
  unsure (1)..(432): unsure at all n locations
actcttagctatctctcggcacacggatatttctttgttnttctggagacagtacaggaaatcatcttcgttggtaccattgaacactaaggcccccttcatatatttcagtctttgggcatagtgtttggcctccaagatctcttcttcagataatttttccccgaagcatgtcgaacaatgtaatcaatatcttcagctaaggcttcggggacaggagaatttgcttgttctaccatatcttgctctgtcgtcttgccggtatctaaaatctactgacccaccttatcttcaggctcggcggccttcgtctcagtaggcgctgaaggcccagctctggcttcgacttggattttggcagcttcggtagttntcttgggaggagcaggagttaaggccttcgtggtctctataacagcgtctagcacgctg

SEQ ID NO: 62783 - DNA, 348 bp, Zea mays
agcaagggctcatgagccacactagaacgacatgactaccaacaggccgccggagctacttcacatggatctatacggcccgatcacttacataagcaccaacgagagtaagtattgaattgcacttgtcgatgataattctcacatcacaatgggaaccattttgccggaaaaatcgcaaaccgcagagaccttaatacgatgctcgagacgagctcaaaacgaggtcgcattatgaatcaagaggattacaaccgacaacggagaggagttcaagaactctcaaattggaggatctcacgagaacgagggcatcaatcacgagttctcttctcctacactcctcac

SEQ ID NO: 62784 - DNA, 436 bp, Zea mays
  unsure (1)..(436): unsure at all n locations
attgtaaaacaggtgatcaaggacnggtatcaaattcaaggaatgttatgcangattggcttaatcaagcaactcctatcacctaatgcatcaatcaagcgagaaagatcttacattatcattgaatgtggccaatgcaccggagcttgccttctgttataggtgattcgggttcgaatccacagatatcgaagtagaaactattcccggcctgagactcctaaggtggtggtggtggtgtctactctttagatacttcgatgtcttcttcacgttctaatcataaccatacatatgtataaggatggatgccatgggatgctcatgaggatgcaaagataatatacacttattatttatgtcttgaatacaactttccttcacggagtctcgggaacttatggttcctgagtcggaaaagagtcatacggcaggg

SEQ ID NO: 62785 - DNA, 366 bp, Zea mays
  unsure (1)..(366): unsure at all n locations
ccgcagctgcagcgggagcnccatggggagactgggtttctctcttcttctttcgacactgaagcacgggtgagcttcgagcgtcgccactcgttgatttctcgaccttcatctgcactaaactacaaatgccgaaattcctcggggcattctaggatgtagatacccgagcaatgaacctgaggggattcagaaaatgagagatttaaatacattaccactcgtggacgccacttctgctccaggttgccattggtaccaaaattgaccggtgacatggtgggctcttctttggaaccgaacgacgactccctcatgatccgtgggactggactactcctgtcgagttgacctccaattcttctt

SEQ ID NO: 62786 - DNA, 385 bp, Zea mays
aacgtcgagctctatgcgttctgatcgtgtgtgaggatattggtagatacctagaattatatggtcactcctaaacatagggaacttgacgacctttggcaaggcatattttaatagttcccctggggcagatttgtgattacgacagctatattgatataagcaaataggaggccttgtgccgaaggaccaaaatacaccttcctgaagctcgttctgaatcgagaggatgatatcacttcgactggaagggcccactgtctggagagtgaaacgaccagactctctaaagtcgcatatataaagaacgagccccgcatacatcttactcagtatatatggcttacacttgctgtcagaacccgctcttgtgtcgacgcttact

SEQ ID NO: 62787 - DNA, 273 bp, Zea mays
  unsure (1)..(273): unsure at all n locations
ctggttcctaaaccaaacaagagtgcacgggtcttcatggtctaaataagatggacatgaactcaagagtgtaatcacctgatggttgagntgactagcacgagcgcgtgtaatgggaccagcaattggtacttgtattggcatagatgcatcagcagtgtggatgtcttcatcattctcgccttcttgcatttgaggcgtactcgactcaagctcaacttcctctctcacgtagggcgttacatctgcaatagttaatgtggggctaacccc

SEQ ID NO: 62788 - DNA, 404 bp, Zea mays
  unsure (1)..(404): unsure at all n locations
ctgcattattttatgacctacaaagctgaagtggaagatcatctctagagganaattaaacggttaaggtctgatcgtggtggagaatatttttcacgtgatttttctaatntttgtgtggaacatggtattattcatgagaggacaccaccatactcaccacaatccaatggggttgctgggagcaagaaccgtactctaactgatnttggtaatgccatgttagagactttggggctatctaaggaatggtggggtgagacaatcttgatggcgtgtcatgtactgaataaagttcccacaaagaataaagaaatcacaccatttgaggaatgagaaaatatgaaattaagtatctcctacttgtgcacctacggcttgttggctaaagtgaatgtggcaat

SEQ ID NO: 62789 - DNA, 418 bp, Zea mays
  unsure (1)..(418): unsure at all n locations
agcttgactgaaatggaagacgatcgtgacnaatgtttaattggtcacaaagctacgtgcagaaaggctttggcatgacagcacaaaacgggaaccgacttaaagatgaaaagccaagttagacctcgaagaattactatagaattattgataaaagccaagggcattaatgttattttacaagggttgcgtcccatgcctataaataaatgaacagtactcctggactgttcacgctgactcggcatatacatcacgcttgtactcttacttttctccaagccgaaggtacatttgtaatttgttatcgcttatataagtaaaataaatagacataaattataataatgtttaaagtaatcatgttattctccggattttatgccataatcctttcttatctctcattatgaatatg

SEQ ID NO: 62790 - DNA, 482 bp, Zea mays
  unsure (1)..(482): unsure at all n locations
ggcaccacgatatattggtccttttcttatcctggaaagatattgtccagtggcataccgactccagttacccgaaaccttgtctgctgtgcataatgtgttccacgtgtcacaattgaagaagtgtcttcggagtcccgatcgaaccgttgaagtgacagatgttgtccttgagccggacttgacatattctgagcaccctattcgagtcttggatcanaaggacagggttacccggagaaaaactctcaagntttacaagatacagtggaaccaacattccgaagatgaggctacatgggaaactcaagactntntagataagaatntcccaggctttttaacctcttgtaaattgtaaagcatgtatagctgttgtaataaaggagtgagtcccaagccacccctgccttgtaccagaaataaggaaataaaagtatgtcacgtttcattntccattacttaccctangacttttaatc

SEQ ID NO: 62791 - DNA, 482 bp, Zea mays
  unsure (1)..(482): unsure at all n locations
ctaagaacttggaattatatgttntgaagtgttagtctagtgtaagtaacacttgagaagattggatcttgagctagagagtaactntgctctaggtggagggatcaaagggatgaatccctagaagaagctgaaacacaaatgaaactcatttgaaaccctaaaactagcccaaaaggggaattcanaatctagaaggatttagctaaaagtctatataccaaaatggtagagcttggataagtgaataagtttcttatttggagaattccaagttgtgtggagaaatttggagtaatttgcagaaattcagttttgggttcagtttgaattgggctgaaaacagtttcatatagctgtatttggaccctctataactttgatctatggacttttggtaaggagttgctataacaaacttgtaaagtgactgtgggagaacaatccttattaagtgtaccagccctataactatatgcaac

SEQ ID NO: 62792 - DNA, 425 bp, Zea mays
  unsure (1)..(425): unsure at all n locations
agcntgaaaatcttatatggtcttaaacaccttatatgcttggntaacatgcgaccaaggcggatgtatctctatctatatttcataacaccgacattagcaatgtctatcctcatctatgtggatgacatcatcatcattagctccttatcttttgctactgattgcctcctccaacaacttcaagatgagtttgtggtgaaagaccctggactactcgattattttcctgacacctaaagtcatcatacactatcggattgcctctatacaatatagatatatcaaggacctttctgtgcacaccaacctgnggattcataaagcgcactatcaacgtgttgatgccacaagttcttctgccaatggtaacctctcccaccaaagatatacatgttaccgcaccgggtggcgtctctgaacta

SEQ ID NO: 62793 - DNA, 478 bp, Zea mays
  unsure (1)..(478): unsure at all n locations
tgccttcgcttcagtctatcatccgcagtccaacggagtcgtggtgcgtgccaatgggaaaatattcacggctgtcaagaagatgctcctcgatgaaaaaaaatgtatatggaccgacttattaccggaggcagtctgggcgctaaacacaaccgagtgcanggcgaccggattcactcctttccgccttctatacggatcggaggcaatgaccccgcaagagataaagcatgggtctccgcgcacagctccgtcagccacccccgacgtggatgagccaacctccaaaggtctcattgacggagaccgggtcttcgccctgcaggccttatacaaataccaagcccagaccatagcatggcgcgaccgcgcagtcattccaaaggagttcagcgcgggggacctcgtactcattcgaacagctcggacgggagtcataggcaagatggagctcaagtgggaaggccccttcatagtc

SEQ ID NO: 62794 - DNA, 286 bp, Zea mays
ccgaccaaaaccgcgcgcactcccccggaggcttctcttccaaatgaaccggacaacactgcacaaaagcaggcacacaccttgacacaaacgtctcccttcccctaaaggtaagcgtcatgtatctcgcccttactgataaaaaactactgcaggagacggctcctcgaaaaaccacctcctcgggctaaaagggaccccttgctcaaatttctccaaagttctacaaatacttcggcctcaaattcaaatgaactaaacaacaagaaactaacgcaggcgacca

SEQ ID NO: 62795 - DNA, 453 bp, Zea mays
  unsure (1)..(453): unsure at all n locations
ctgatacattgtatacaactggtcatagccttctaacatgtacacaagtccatttgttcagatttcaaaattcaatttgctaataaaaaggagaattaaacttgaaaatatactatattaccagtgcccagcaaaggtcttgtcaatgggatcacatctattcaccaagcatgaactaaaaattaattgtcttataccatctgttaaaagattctcattccttcttcaatgcccttaaactggctgtgatccaagtacatcagaacccaatccattcaagaagacatgcaactctactagtgaagacactgaatgntcactattgaacaacagtatgagggttatattctttaacaacctttttaagtctcacaagaaatatgcacgaatatttcaacacaagtctagtaggttgtnggtcatgggccatgataccaatttcagactatatat

SEQ ID NO: 62796 - DNA, 368 bp, Zea mays
  unsure (1)..(368): unsure at all n locations
tctatagggagagcacattgtaggactaacaaatgttcacttttagaaagacaaggtttgttgtgcatgccaagcacgaaaccaagttggtgcttattatccacacaagaacatcatgacgactggcaggccgctcgagctactccacatggatctattcggctcgatcgcttacataagcatcggcaggagtaagtattgtctagatattgtggatgattattctcgcttcacttgngtattctttttgcaggagaaatcacaaacccaagagaccttataggggttcttaagacgagctcacaacgagttcggattaaggataaaaaagataagaagcgataatgggatggagttcaagaattcac

SEQ ID NO: 62797 - DNA, 469 bp, Zea mays
  unsure (1)..(469): unsure at all n locations
tctacttggtcctatcgtgttctgcagtttgtctaccgaagcgaaagcaactcgcatatataactctctctagatctgtacttattaaaatcttgctgcctcccactactcctgtcatggataccctgccagttccatgccctggcattgattcgcacaacgcacagccatatgcatatatatataactttaatttcaggagtgaagaacacatntggtaactaagagggcatcgtggtctttcagttttcaccgctcaatttagcaattatcaataactaccatcattgttagtacaaaaacaacaattactaacgaaaccgtttagtaatttatcatttcagcagtgacgaaacgtttaaattattactaacgaataaacatttaactattattagcagaacatttaattattactgacgaatctgaataaccgacgagctagatcacgcacgcgggtctcggagcg

SEQ ID NO: 62798 - DNA, 485 bp, Zea mays
  unsure (1)..(485): unsure at all n locations
cctcaacttcagggccactggtagagctagccaaagcactggcgcgacttgttggtggccggtgtgggctggccgaagctctgacggcagtggcgggctgaaaagagctctccggagctaatgatgggtggctggccggtgatggtgagcgtgcggagaagtgatgcgcgcccggtgaggctctataagcgcgggcgggcacgaccgatggcaatgacgcgcggcgtacttgaccgaacgtcatggcgagcgctcgcgcgagttgtgcgagcgccatcgtgccgaccagggtcgaacacgtgtgcccgtgcgttctacccaagttctggcgcgtatggtcactcatccgagcctgctctcgccttggtcagagcacacaacctcttctactccctacaagctaccgatcttgtgtaggggtcataggattntgcctactgcttgcagagatatggagccctgatatgctgtctggctccctgctc

SEQ ID NO: 62799 - DNA, 437 bp, Zea mays
gcttcgctggcttctcctgcctgaggcgccgcctgtcccaccgtggtgtttatgcgactgtgcgagtggttcgcgagggcaccgatgcgcgtgcgcgggccgttcgaggaacggtcactgtcgcgctgtcttcacgccgtgagagagggttctctcgctgcccctggatgggacgtaagcttggctgacgacgtgactgctgctcctgcccgcctgccaccgccattactgtcggcccatctttggccgtatagaccgtcgtgcctggctggcactgctaggtcatacgcagggttgcctcgagtcgcggtattggctccgcagtctatgaggcgcggtattggtgcgagtggcggtgcaattgctcgcacgtatcaaccggcgcgccggttgcatgacgtgtgggcctgtgcctccatgctgggcgcgttggagtc

SEQ ID NO: 62800 - DNA, 351 bp, Zea mays
catgttagtcttagcaattaagcaagtatcgaggtcagctctattaaaatcaactaagtatagctgaccctctaatacttccttaagagctactaaatcatcacttcttcaaagatagaacacctacatttggtaaaagataggtggaacccatttttacataattgagaaacagaaagcaaggtataatctaatgaatctacaagaaaaacattggaaatagaatggtcaggtgatatagcaattctaccaagtccttggaccaagccttgatttcatccctgaatgtgatcgctctttggggatcatggtttttctcgaggagggagaacattcctttctccagtcatg

SEQ ID NO: 62801 - DNA, 368 bp, Zea mays
gctcgtacgctatatgtggtgtgaataaaaacatgtggcatgagagcatgccaaataactcgcgatgagctctctagttatacatttatagctgtgaaaactggacaggcccgcttgtcaaagattgattgctattctagcaaggagaaggtgttttttcggacctttggcttaaggccttcgtccatatcgcaatatgaatgtatcactatagctaattaatattgcgaggagctactgttgcggccttcggcttccaaaggtcctcacaaacatgacttgacaatgttttccaagtgaaatgtgtgaacacgtatcttaggaatctgattacaagtatatgactatggtctacactacacttgagt

SEQ ID NO: 62802 - DNA, 471 bp, Zea mays
agcttggaaggttcttcatccgcacatgtgctaagcggcgatgccacagccagcccatgctagtcttagctattaagcatgcatctagaccggcttcttcttttgcaaaatcaactaaataaagtttgccgtctaatacacccttaaaatctagtgaaccatcacttcttctaaagacagacacatctacatttgtaaatagacagttgtatcccatattgcataattgactaacagatagtaaattatatcctagagactctactaaaaacacattagagatagagtgctcattagaaattgcaattttacctaacccttttaccttgccttgattcccatcaccgaatatgattgaatcttgggaatccttattcttgacgtaggaggtgaacatcttcttctcccccgtcatatggtttgtgcatccgctgtcaataatccagcttgaacccccggatgcataaacct

SEQ ID NO: 62803 - DNA, 524 bp, Zea mays
  unsure (1)..(524): unsure at all n locations
tgccaagacatccagactgcgcgtagtagcttcacgcanaacatataccagtcagagatcaagagcatgcacatgcatgcatatatgccactgccatgccataaatacacgtggtgttgtgtccatcggcggcgcgcgccgctcgtgattgcagccttgcagggagcacacacaatggctcagaggggatgtgatcgcgaccaaaagcagcttagtttaatacagtaagttgcatatggagtgtatatccacgtacgttttgaaatactagaaggtataagtgcatcggatcctgcttgcattntgcatcgaaagctagcacaagcactactgcagcaggcgggcgatcacatgcacggcgatccgccgatcacgtacgcacatggcccacatgaattatgcatgagatgtctctcgagacagatgaaggatgatgcgtgcgtgtgcgtgcgtgctttcaagacccaccgcatncttcttggttccattctcacctcacacatctcatatgaatcatacgcatt

SEQ ID NO: 62804 - DNA, 481 bp, Zea mays
  unsure (1)..(481): unsure at all n locations
tcagcagtgtgtcatccgngtattgtactatcggaaaatcttgccacaattctctggcaatggtaacttgagaatgtctcgtcgccgcgctttatttatgatgctctgaagcagatcagccgcgagaacaaaaagaagaggcgagagggaatcaccctgcctgaccccacgcttgcagtgaaaggttttcccagggacaccattaagaagaactgaagacgtgccagaccgaagaatatccctaatccagcttatccatctgggcccgaagccattgtgcagcaatacctgaagaatgaactcatgctctagagaatcaaaagccttttcaaagtccaatctgagcacaataatctcttttttgaaatatgacataggtgaatatattcgaatgcccaagccagacagtcttgaatggctcttcctttgatgaagtcatattgattcttgtggaccacgaacgcatcactgctcgtaaccg

SEQ ID NO: 62805 - DNA, 416 bp, Zea mays
  unsure (1)..(416): unsure at all n locations
ctcatctgatgccatcctgcggntacatgttaagatggtccgcacggtcttagccctcanagcctggagacgacgcacggtgggtaacatcaaagtgcagctggctatcattcagatcgtacttaccatgctggaaaaagctcaggaaaatagaagactatctagcgatgagcttgactttagaagaaggttaaaaatcaaaattctgggccttgcgggcatccaaatatctaatgctagacaacactctatacagacttgngtgcgggtgggtgatgcgaacacaacatttnttcacttgatggccaatcacaggaaaagaaaanaatttatcagatccttaaattgtggaacccgcatgttaactagccaagaagacaagctgcaagagcctcaccgacatttccttgagattc

SEQ ID NO: 62806 - DNA, 388 bp, Zea mays
gacaaacacttgtgagctctgatctatacattcgactgtctcattgatctaaattctaaaattcctactattctctactttgatggtggttctgcttattatatggactgtccaatttactacacattagcttctatcgttgttcagattattttcttatttagcattattttctgtccccagaaaaaacccctttctaaaacaaagcctcatctatcagattagtactttggatacaagacaaaattgaacattcgcttttgaaattgttgctaaccaagcttttcgttctaggacaaagtctttgcctgcaaagacagttacaaagaggttgttcaccgacgtagatggaggaaccactatctccaaggatgccgcagataacact

SEQ ID NO: 62807 - DNA, 398 bp, Zea mays
  unsure (1)..(398): unsure at all n locations
gcttcagaaaaccacactcttcgntagagtgctgataatccttgctccggtgcgatcttggatgcacactaaggcttcttcttcaatgccaccaaaaagcaaggccctcgactgatagccacaggatatggcgtactcctgaagttccttttcctcagcctctgataactcttcaccaactaagttccaaagggttgaagtttgttcatccgaagcatctttagcaatttccttctctttttcaggcgctgtggccgtgatttcttctgtagctatcgcgatcttctatgcgcctatatccaagagcattntatcaatatccgatagtgtgctctctaaattggtggcttctgcggcagcttcttcggtggcagcagctggcgtcatttttgatgctg

SEQ ID NO: 62808 - DNA, 450 bp, Zea mays
  unsure (1)..(450): unsure at all n locations
aaaactcagcttccttgcaatctacaaagatttcaattgattccacaagtggtttcatttcacaaatcgtatcatttacatgtcttctccagaatntgattagactatatttcatatcttttacctctcatgttgctataaatgcatatattttacctatgcatagggggagttagtctaatcaatcatatcttgcacctctctttctcatgtgcttttcctaagtagaggatctccgtcagggggagtatttcttcgtctatgacaaagggggagaatattcttttagggagaataatctttttagagggcaagacttttattngcttcctgtatgcttttaatgtctttnttcagtggttgatgctaaagaggggaagtttacggaccnagcaatgaanaaatatcnacacccacaccatcattttaattttaaatttgatcttcagt

SEQ ID NO: 62809 - DNA, 310 bp, Zea mays
  unsure (1)..(310): unsure at all n locations
taagtcacctgcggcatgcaagctttantgattagagagagtgacttgtcgtgttcattcgagctcttgcgcttggattgcttcttttctttctcattcttcttgagacaactcaattgtaaccgagagccgggactccacacctgatgggttcctcgggcgacgcgtgaggcgctctcataccggagggatggtctaataatgcacattcttttggttctgcgacgggcccgaggaggagcaatactggtgctagcggcggtttcctcgtttctgactcagaaacctacgccccacgagtatgacttgt

SEQ ID NO: 62810 - DNA, 409 bp, Zea mays
tatgaagaatcttcatcccaacatgtgctagtctgcggtgccttagccagcccatgttggtcttagcaattaagcatgtgtcgagttcagctctatcaaaatctattaagtatagctgaccctctaacacacccttaaatgctattgaatcatcacttcttctaaagacagcgacacctacatcagtgaatagacaggtgtagcccattttgcataaatgagaaacggaaagcacattgtagtctaaagaatctacaagaaaaacattacaaatcgaatggtcaggggatatagctattttaccaagacctttgaccaaaccttgatttccatcctcgaatgtgatagctcgttggggatctatggtattctcatatgaagagaacatcctattctcctctgtcatgtg

SEQ ID NO: 62811 - DNA, 500 bp, Zea mays
  unsure (1)..(500): unsure at all n locations
ngtgtgcacttatcaccttgaacaagaagggagtaaaccctatacctctcttgaacccctatctcttaaaccaccttggtgaaggggggagagattaagcaaaggtgcaaatcatgaccaaacctttggcataaagttaagtaacttattaatctgcaaatatagaaaggaaacattgcaaaaagaccccttaagaaaccccaaatccatcctttaagtagagaaagagctagagctctctaattctctctaagtcaaaatctacacctaatctaaagatccaccgtgttcaccttgaagatggcaccaaaaccacctaagttctataccaaaaatgtggcataccacctaaggaacaccctggaaaaagttgagaccgagcccttgacattngacatgtcttggcatcacttttgtcgcgcagcgggcagggggacaagccagaattggtgtccgcatatcttctgacctanggttatcttcctttggaactcacatat

SEQ ID NO: 62812 - DNA, 283 bp, Zea mays
agtcttaaccattaaacatgtgttgagctcagctctatcaaaatctactaagtatagctgaccctctaacacacccttaaatgctattgaatcatcacttcttctaaagacagtgacacctatatcaataaaaagacagttgtagcccatttgacataattgggaaacagaaagcaagttgtaatctaatgaatcaacaagaacaacattggaaatggaatggtcaggtgaaataagcaatttacccaaacctttgaccaaccctttgaattcatccccaaat

SEQ ID NO: 62813 - DNA, 287 bp, Zea mays
  unsure (1)..(287): unsure at all n locations
acgcatagaactcaactatacctgtccgcttctgagtagaggcctataattattgtgtcgcncgcctgtcgccggaggaccgacactgatctaacctttcattactgagctgatgacccacttaccatacctggtcattcaccatcgatcgagatatacgaatcttcctgggcgcggacattggtgccaccgtgaagaatgcaaccatggccaactntacttgcgtcagttcgtacccgacgaacttttgtgtggcatccctttagcctcatgttgattaccgtgct

SEQ ID NO: 62814 - DNA, 420 bp, Zea mays
agcttcaacaggatgacttctaaagttctttgctctaagattagcacgaatggtctaacgatgatatcatagtaaaaaggtccaagcaagaaaatcacatcgctgatctacaagaaacatttgccaatttcagaaaggcaggcctcaagctcaacccagaaaaatgtgttttcggagtgaagaaagggaaatttcttgggtgtatcgtgtcaacaaaaggaattgaggctaacccaaacaagatagaagctatacttcggatggagccaccaaagtcaagaaaaagtgcccaaaggctgacaggaaggttggcctcatagaatagatttatttcaagatcgacagaaaggaacttgccattctttgaagtattgaagtcagccaaagtctttcagtggggaccaactcaacagaagactt

SEQ ID NO: 62815 - DNA, 460 bp, Zea mays
  unsure (1)..(460): unsure at all n locations
ntaacaacttaagcctgtggagaaagtatattntccttgtggcaaacaacgaaactattacatgaaatctaaaaaatgtcctttattacacagattattaaactgaatgaaaaagactgctatcaaggtaggatatttgtcaatagatgtgctttgactctggcacagtgctgttgactgtgcgagcttctgactgttctctgaagtccctttggtgtggagcatattggctcccttctggctgttggccttgttgcaccggtggtggaggcagaggctgttgccaggaagcttgaggttgactcgccgaagcaacagaaactgcagggtggttgcctacatattctgggatgtaaggcgaatgatatgaagcagtgtgcatgacctgcttcggctgagcctattgtgctgcagcttcngctatttcctttngcttctggatagtaacatggcacatcct

SEQ ID NO: 62816 - DNA, 397 bp, Zea mays
atgcaagcttgccggcagccatcttccacaagtgctggcgtatgggagccatgtcccctctggccagagaatgcagagctcgagcacacctctctactcccatccatggtgccccaaatcttcagccggagctccgaaggccgtctccctggtgcacctcgccagtagcagggatcctttccctctcccatggcgcgcaagccgcgagctcccccacgtgcgttcccttccccaggcgcaggcgtagaaagctctcatccacgcagtccagctccaggccagatccaattcgcccaacccctgctcgcccagagcttcttcgctccaaatccggccatccccgcctggccgtggagttcctcgagcaagcccacctggccgtcatccttcccaggtc

SEQ ID NO: 62817 - DNA, 502 bp, Zea mays
  unsure (1)..(502): unsure at all n locations
tctaatgggagaagcacatttaggactaaccaatgttcattntgagaaagacagggtttgtagcgcatgtcaagcanggaagcaagttggtgcccatcatccacacaagaacatcatgacgaccgataggccgcttgagctactccacatggatctattcggcccgattgcttacataagcatcggcgggagtaagtattgtcttgtaatagtggatgattattctcgcttcacttgggtattctttntgtaggaaaaatctcaaacccaagagaccttatagggattcttgaaacgggctcaaaatgagttcgacttaaggatcaagaaaattagaagcgacaacgggacggagttcaagaactctcanatcgaaggcttccttgaggaggagggcatcaagcatgagttctcttctccctacaccccacaacanaatggtgtagtagagaggaagaatagaactctattggacatggcaagaaccatgctngatgaatac

SEQ ID NO: 62818 - DNA, 361 bp, Zea mays
  unsure (1)..(361): unsure at all n locations
gcttctanagggagaacacgtgataggttngactaatgtgcatntcttataagatagaccttgtgcagcttgtcaagcaggtaaacaagtgggaggagcgcatcacagcaagaatgtgatgaccacttcaagacccctggagctgctacatatggacctcttcggacccgtcgcctatctgagcataggaggaagtaagtatggtctagttattgttgatgactnttcccgcttcacttgngtgttctttttgcaggataagtctgaaacccaagggaccctcaagcgcttcctaaggagagctcaaaatgagtttgagctcaaagtgaagaagatcaggagcgacaacgggtccgagttc

SEQ ID NO: 62819 - DNA, 333 bp, Zea mays
  unsure (1)..(333): unsure at all n locations
tatgaagattcttcattccaacatgggctagttggcggngccttagccaacccatgttagtcttagcaattaagcatgtgtcgagctcagctctatcaaaatctactaagtatatttgaccctccaacacacccttaaatgctattgaatcatcacttctcctaaagacagtgacacctacatcagtaaaaagacagttgtagcccatttgacataattgagaaacagaaagcaagttgtaatctaaagaatctacaagaaaaacattggaaatagaatggtcaggagatatagcaattttacccaatcctttgaccaaaccttgatttccat

SEQ ID NO: 62820 - DNA, 506 bp, Zea mays
  unsure (1)..(506): unsure at all n locations
tgcatagggtttctatcctcctaaacatcagaacgacttatctttcctgagtagtggaagcgacactggatacgggtgaagagggcatcgtgaaggcagttatattggcaccatattctggtcctaactccttaggtgcctcttctccctcgcttccagcctcattggcctccatctccaggtggtgcatgtccaggtggtcattagcttcttcaagttcctgctgcacaccgtggagctggttctccaagatatcaatggtgttgtcttggatctccacctgctgctccaaggtggtgatgcgttggctcagcctttccatatgtangtccttctccaccaactcggaggacaagtcgaccacgaagtcctctcggctgtcgagggtgagcttggtggttgagtgcggacgcaagatgtgcattgcgtcctctgatggcctgaagcggatagccactcatgcctgacagtgatcctccaccaagtangatacataccatacatct

SEQ ID NO: 62821 - DNA, 458 bp, Zea mays
  unsure (1)..(458): unsure at all n locations
gcttcgcttcgaaatagtttttagcgtctccgaagatgtctgttgatagacttctgttgctgagatgaagctgagccttgacgaagagaagaacctgaggttccttatagcgatttttatgaccaatacagaagaaattacgaaggagattctggaaggtttgtctgaagatactggtgatagtgatagctacgatgtggacagtggtggcgaggactccgaagatcgttcctggcgaccaagccattcagtttatggtaaatcaactatcaaagagaatcatcttgtcaacatgagaggaaggtatttccgggatttgtccattgtgagggccgacgaacgggacaaaacttgcccacactctgaagagaatgaaatcgtattgtaccgaagctntttgaaagctgggctgcgaattcccttgagcagcttccgtgtggacgtactgaaaatattcg

SEQ ID NO: 62822 - DNA, 385 bp, Zea mays
  unsure (1)..(385): unsure at all n locations
aaacgcagctgaaggaggaccacctagtnctgatgtgcaagacttctatgatacactcggnggatcagataacaagattatggccactatacttacatcatatgttttatttggagcgagacctgtgagcattaaaaggatatgtgcgaaattgcgctcacccagatggttcaatcatgggaggatacactacagaagaagtgatggagagctgtatagattacatcagggacagaacaatgataagtgtgcctgtacctaaacaagagggtagactatgtgggagaaggagaatgggcaagacaacttttcgcgttgaagagtactagctaatacattgtgcgcatggtagagtactacaacatattacgatagccgagcctta

SEQ ID NO: 62823 - DNA, 447 bp, Zea mays
  unsure (1)..(447): unsure at all n locations
ntatcaaatggacgtgaaggagccttcctaatggaccaattttgaagaggtctatgttgagcaacctcccggatgtgaagacagtgagtaccctaaccatgtttataagctctctaaggcgctttatgggctcaagcaagccccaagagcatggtatgaatgccttacagatttccttattgctaatggcttcaaagtcggaaaagccgatcctacactctttactaaaactcttataaatgacttgttagtgtgccaaatatatgttgatgatattatatttgggtctactaacgagtctacatgtgaagagtttagtangatgatgacacacaagtctgagatgtcaatgatgcgggagtagaagtatttcttaagatttcaagtcaagcaacctcaagaagggaccttcctaagcgcaacgaagtacactcaagatattctaaa

SEQ ID NO: 62824 - DNA, 201 bp, Zea mays
ccttaaacgtacggaaacatcacttcttctaaagacagaacacctatatatgaaagagacaattgagcccattttgcaaattgagaaaccgagagcgcattgcaatataaagaatctaccagaaaaacattggaaatagaatgcgcaggtgatatagcaattttactaagtgcttcgaccaaaccttgattccattcccga

SEQ ID NO: 62825 - DNA, 507 bp, Zea mays
  unsure (1)..(507): unsure at all n locations
gacacttaaaactaagcttcatgtcgctgcgctccttaccggccttttgatggaatatcttctatctcggatatcgcagtacgtaacgcccactaactcctcgctagacatccatctttacatggagtgatggagaagatgtaagacgatcatgtgtgtgtcgctgcaaaggagactcggtacgtcggtggggttatcatggttggccgcaaccccagctatgagcatcgacaagacctcgccgagactcccagctacctctgtatgtgacgccaaccacctcctcgctcgacacctaaataatgagatgattatgtgtgtcggtgcagagacttgtgtagatggccgcagccccaggtttgctgccaacaacgacgaagagtntctagatctcatccccaccgagagtcgtcgcgtgcgctccggctacacggccaccgtataagacaccgaccatcgacgttccacgctggccctatatgctgctgaacattccttccgatcatc

SEQ ID NO: 62826 - DNA, 475 bp, Zea mays
  unsure (1)..(475): unsure at all n locations
tctanagggagagcacattntaggattaacatatgttcatttttataaagacaggatttgtagcgcatgccaagcagggaagcaagttggtgcccatcatccacacaataacatcatgacgactgagaggccactggagctcctacacatggatctattcggcccgattgcttacataagcatcggcgggagtaagtactatctagntattgtggatgattattctcgtttcacttgggtattctttttacagganaaatctcacacccaagagaccttaaagggattcttgagatgggctcaaaatgagttcggcttaaggatcaaaaagattagaagtgccaacgggacggagttcaagaactctcatatngaaggcttccttgaggaggagggcatcaagcatgagttctcttctctctacaccncacaacataatggtgtagtggagaggaagaatagaactctattggac

SEQ ID NO: 62827 - DNA, 331 bp, Zea mays
  unsure (1)..(331): unsure at all n locations
tctacccatctgtcgacagactgatatctcttttctattncggttaagnacacaaatcttccttcccgctgtcgatagacactaatgcccccttttgtgtatttaatttttgggcatagtatagtgcattcagcgtttctgcttgagaaagtcttcttcccgaagcatggcgaatgatgtaatcagtgctttctttctaagcttcagaggcagaagcttcagctctttcagacacaactagttctctcgccttttcttcaattacgacaggctctgtctcagaagactctaatggcccatcttcggtatcaacttgaattggtgcagcttc

SEQ ID NO: 62828 - DNA, 279 bp, Zea mays
  unsure (1)..(279): unsure at all n locations
tagtaaacataaagggcgttaatgttattttacacaggctgcgccctatgcctattaatagatgaacaatacccccgtactattcacgctgacttgtattcactcgtgcgtcacgcttggacttttgccttctttcaagccgcaggtactaatgtaatacaatattgctcttgttcattcatgatgatataataaagatatactgagaatggcatatgagtattcatcttgtctctcatatctcgnatacctcttctttcattaacatatactatgatg

SEQ ID NO: 62829 - DNA, 401 bp, Zea mays
  unsure (1)..(401): unsure at all n locations
ntattggagatgcaaatgttctttatatnttcgacaatcttaatcaaaactntaaaaaggttgatgtgaacaagcacgaatactatagtgactttttttagaaatactagtgagagaatgaaaacttgagttagttgagtgatcaaacattcacaatgatgcgttgatccaatcatggttaacagaacagcggggagacgtttaacacttcacttggtttattgactgcttgatgctacaggattgttattattacgcgaaacagccctgctcagtagtcagtgttcacgtggataaaaactgctaccgaanaagcaaaattcctggaaaaaagggaggcaaggagaaacactaataagcatcagtaagacgattagttgtagcttcctacaataatcaca

SEQ ID NO: 62830 - DNA, 424 bp, Zea mays
  unsure (1)..(424): unsure at all n locations
tccaacatgagctagtcggcgatgccatatcctacccatgttattcttggcaattaagcaagtgtcgagttcggctctatcaaaatctaccaagtatatctgaccctctaacactcccttagatgctattgaatcatcactccttctaaagacagtgacacctacatcagtaaaaagacagttgtagcccattctgcataattgagatacagaaagcaaattgtaatctaatgaatctacaagacaaacattggaaatagaatggtcaggagatatagcaantttacccaatcctttgaccaaaccttggtttccatccccgaatgtgatagctacgtggggatcctgggttttctcataggaggagaacatcttcttctcccctggcatggtggttggtgcacccgtgtcgataatccaactt

SEQ ID NO: 62831 - DNA, 450 bp, Zea mays
  unsure (1)..(450): unsure at all n locations
ctgtgtcccattatccacagtaatgacctttgttactccgaagcgacanaacaatatttgccagaaaaacttttgaatagtaaccgaagttattgtggctagatgctttgcctcaatccacttagaaaatattccactgccactacaacatatcttaaatttccctgtgctggtggtaatggacctagtaaatcaaggccccacctttgcaacggccaagtgggttgtattaattgagttaaagacgaaggttgtttttgatctcttgcacatttctgacaaccttcgcacttttggactaaatccgctgcatccaaagctgcctttggccaataaaatccttgacgaanaactntcccaagcaaaggcctagatccaatgtgagatccacacaggcctgcgtgtatttccttcattaattctataccttcggatgtggataaacacttg

SEQ ID NO: 62832 - DNA, 224 bp, Zea mays
  unsure (1)..(224): unsure at all n locations
tctgcgcttccagcagtgaccttgcggttatctggcgaccaactacacttcagtaggttcttctaaagttatgctggtgaccttgtaagagtctttgatgtttccgtgttcctctggtgcagtaagggcnccagatccccagatcttgagctcaattgtcatggcattggtcacgaggtaagacccatcagggctaagctgcatnccagtgatcatgtcctgat

SEQ ID NO: 62833 - DNA, 417 bp, Zea mays
tgtcatccactttgtgcccctgtccatgaataaattgatcactttcttatgcaaatcccaattatcatcaacaaagcttgctgtcacagtcatgtatgcgtcttgctgctgtgaagtccaacagtctgttgttaggcaaactctctggcaggagtctttaagaaatttctttagcttcgctttctctttgagataaagctgcacaatgtccctggtggaggttcttctagatggcacctggaaacgtggacaggccctagacatgaactttctaaatcctgccttctcaccaaaagcaaagggcaactcatcctctacgaccatctcagcaaaagcctctcttagtgcatcttgatcaaacctccaagtggttggagcttccccgtctgttgcttgcaaagagccctgctttggatc

SEQ ID NO: 62834 - DNA, 428 bp, Zea mays
  unsure (1)..(428): unsure at all n locations
ngccttcgcttcagtctaccattcgcagtccaacggngtcgtgtagcgcgccaatgggaaaatcttcacagctgtcaagaaaatgctcctcgatgaaaaanaaggcagctggacctatttattaccggaggcagtctaggcgctaaacacaactgagtgcagggcgactgggttcactcctttccgccttctatacggatcggaggccatgaccccgcaagaaataaagcatgggtccccgcgtacagttccgtcagccgtccccgacgtggacgagccaacttcaaaagatctcattgacggagaccgggtcttcgccctacaggccctaaacaaataccaagcccagaccaaagcatggcgcgaccacgcaatcatcccgagggagttcagcgaaggggacctcgtactcgtccgtacatctcgga

SEQ ID NO: 62835 - DNA, 494 bp, Zea mays
  unsure (1)..(494): unsure at all n locations
gttcgatgcacatacgatactagaatgcgtgagtgttatggaaacttattagtcgcacntagggttccatgacaagctcatgcactttgcgaagaatgaagattctatatgtgttgaatctaaattgagtcattggaacatatgagaccaaaattagatcaaaataatataattcttcgttcatctaccagaatttgatgaaacctaattagtgttacaattagtgcaaccacgaacaaagtctgtgtaaatcaatgctcacattattgcactctatcttgcctcacagacgcgaggacatgatcgcccaatgatgtaacctattgtacgagtttgaggctgactatagagtaatagtgaagtgtaacgggtatcagtatgtagtacatgaacctactgtagttctagtggtaccttatttgctcaataacttgacgtacaatagttttctgtgatgtataaatagatctctcagttgaccataaacttcacat

SEQ ID NO: 62836 - DNA, 451 bp, Zea mays
  unsure (1)..(451): unsure at all n locations
taacacttcggagaccaaatatactgggacttgctttttattttgtccttcaagcttctcctgtacaagtgccgcactcactgcagagtgcgaagctgccacatattatagcagaggagcccctggcgtgggtggagttagcgtcgttaggtctatcaggtactgcttcagctcttcgaaggctttctgttgagctaatccccattgaaagacttcggccgacttcagcacttcgaagaatggtaaatttctctctgttgatctagatatgaatcgattcanagttgccaatcttcctatcagccgttgagccccttctttgtgcttggcggctccatccgaagaatagcttcgattntgtttggattagcttcgatcccatttgntgaaactaaacaaccaaggaatttcctcttctttactccgaagacacatttttctagaatcaact

SEQ ID NO: 62837 - DNA, 472 bp, Zea mays
  unsure (1)..(472): unsure at all n locations
gcttatggtgatgatgtggagattattatttaactcttcattgaagacttgcagctggtctntaacagtctgagacgatactggtggaagctcaacccagaaatatgtgtctgccgagtaccaacagggaagttactcgggatcattgtcagccaccaaggaaatgaagctaacccggaaaaaatcgatgctatcatgagaatagaagcaccatgatcacacaagaaagtacaaatgcttactggatgcatggcagccttgagcangttcatatcatggctgtgcgacaaaggcttaacattctacaaattgctcatgaacgtggacgagttccagtggaccacagaagcacaggaagctctgatgcattagagatgttcttgccacgccaccagtgctaaagccgccacgccgaaccacgccagatcagctggcanaagacctgttgtatacatctctacatgactcacgt

SEQ ID NO: 62838 - DNA, 414 bp, Zea mays
  unsure (1)..(414): unsure at all n locations
tcancaacgaagactgctaatgcttgcgattggatcgaagatctatgaacgcattcatatattgtattcattcagctatgtagcccactgtacaactcttcctggggcttctctgtttctcattatatccttgagagggtgcgaagaacggactatgatacggtatgtctggaaataatgccaaagctttctggatgccatcagtacagcatatagtacctcctccaactctgtgaatgttcttaatgggctaaggacttcagagacgaagtacactgcactcntctttttgctcggccatcctgcttatatggaccaacgctgcactaaacactgcattggaagacaccacataccgcatccatggagctcctgaagaacgagggntagagtcgttaatctaacaacactgct

SEQ ID NO: 62839 - DNA, 455 bp, Zea mays
agctctatcaaatggacgtgagaagtgtcttcctctatggaccaatcaaggaagaggtgtatgttgagcaacctcccggctctgaagatagtgagtaccctaaccatgtctataaactctctaaagcgctttatgggcttaagcaagccccaagagcatggtatgaatgccttatagatttccttattgctaatggcttcaaagtcggaaaggccgatcctactttattcactaaaactcttgaaaaagacttgtttgtatgccaaatttatgttgatgatatcatatttgggtctactaacgagtctacatgtgaagaatttagtatgatcatgacacaaaagttcgagatgtctatgatgggggagttgaagtacttcttaggatttcaagtgaagcaactccaagagggcaccttcctgagccaaacgaagtatactcaagatattctaagc

SEQ ID NO: 62840 - DNA, 368 bp, Zea mays
  unsure (1)..(368): unsure at all n locations
tctaatggacaacacacgatatgtgtgactatcgtacaaataatcaanagattgtccttgcgcagctagtcatgctagtaaacaggagggaggagcgcatcacaactagaatgtgatgaccacatcaagaccactcgagctgctacatattgacctgttcagacccgtcacctatctaagcataggaggagaggacgcttgattacctattgttgatgactcatcccgcttcacttgggtgttctttttgcacgataattcttgaacccaaaggaccctcaagcgctatctcaggagagctcaaagtgatgttgagctcaaggtgaagaacataatgagcgataactggtctgaggtcaacaactttc

SEQ ID NO: 62841 - DNA, 337 bp, Zea mays
cagccagaaaggagccaatatgctccacaccaaagggacttctatagaacaatctcgagctctcacagtccataacactgtgccggagtcgaagcacatctattgacaaatatactattttgatagacagtttcttcatttcagctttattttctgtataataaaagacactttttaaatttcaagtaataattttgttgtctgccataaggaaaatatatcttctccacaggtttaagttgtcggagcttgaagatttgcaatagcaaggaagaccttcgaattatcaaaaaattattttataaagacacggtatgaattctcgaagcaacaaaag

SEQ ID NO: 62842 - DNA, 382 bp, Zea mays
  unsure (1)..(382): unsure at all n locations
tgctagagatgatcatangatgtcaccatggatgaactcaagtgggatccacaccctaagagtacaagaaaccctaattggaaccttagaaaactctattcttaaaccctagggggctatgtgcaaaattagagcacttttggactatagtacaaaaactatgaagttaagatgtcttaagtcatatggtttacaattatgaagatttgcaacctatacccctgagtgtggacctatatgcaaaaaggccctatttgagttctaagggtaagtctaaaaccagtgatattggccccactttgaagccctatatctcccaaataatgaggattntgttctatgtcaccacatcaatttggtagagctattatgggagaataaa

SEQ ID NO: 62843 - DNA, 342 bp, Zea mays
  unsure (1)..(342): unsure at all n locations
ctcatgagctccgaagtaacagctgcatccacaagggcatctattcttggcaatggaaattcatccttcnggcatgccttattgaggtctgaaaagtcgatgcacatttctcattctccattagctttctttaccatcacagtattagtcagccactctangtatgtcacttctctgataacaccagcactcagaagtctttntacttcatttcgtgcaccttcngctntatcatcagacattnttcgaagcctctgctntcttggtctgaaggtcagatctagattgagcgagtngtcaatgatatctctattgacaccacagagatcatttgctgaccaa

SEQ ID NO: 62844 - DNA, 400 bp, Zea mays
  unsure (1)..(400): unsure at all n locations
tagtcaacccgacatagacacaaatcaacataatcaagctctgtctaagatcctctagtttatgatcaactactaggctatctattctgcctactaaattattcaccttgaanaactatcttaccatatatttctaacccagatggtcaataccaggaagggagtcggtatcgatctacctgctaacaaccgtcgtaggaggattgttaaccaaccacaaccagagatgaatcctccaccgaacccttcaccggttggaacagatcctgttgctgccgctcagatgcagctgctgcagcaattggcaaacaccatgacagaaatgcaagctcanatgcgacaagaacgtcangagatgcgctaggagcagcangaaatacgacagtaaatgaggcaataa

SEQ ID NO: 62845 - DNA, 358 bp, Zea mays
tcgtgggctgcaggagcgcgatgtcgaaagtcggtatgaccacgttggtgagcgccttgtccagcctcatgtcgccgaggtgctggcgaagcaggccatggaggtacatgttcgtcgtacttgggcccgctcaccatcctcagcgtgccggcgatcttggacaggatccagttcctgcagaactcaactcacgcgcgcgccagcatctttaatttctcttcattccgtcgcagtggtggagtaaacaattaataataatgcatctcttctaaaccgcgccgtgaaattttcgccatgcatgcatgcagctgtgttacttacttctgtgggaagatattgggcgagtggtcgatgtaga

SEQ ID NO: 62846 - DNA, 284 bp, Zea mays
agcagggaaacaggtgggaggagcgcatcacagcacgaatgtgatgaccacttcaagacccctggagctgctgcatatggacctctttcgacccgtcgcctatctatacatagggggaagtaagaatgggctagttattggtgatgactttacccgcttcacttgggtgttcttgttgcatgataagactgaaacccaagggaccctcaatcgcttcctcaggagggctcaaaatgagtttgagctcaagtgaagaaataatgactacaacggtccgagtcaaa

SEQ ID NO: 62847 - DNA, 463 bp, Zea mays
  unsure (1)..(463): unsure at all n locations
cagcttcggtgttatagcatgcccgaagacgaaggatcgaaccgacttatagatagatgattcttttagcccataagggtctgagtcattgttgtaaacttttataaggggcatgattgttatttcttacaggctgtgtcctgtgtctataaatagtgaacaatattcctttactgttcatgcattcctgtaattgcaaacgcattgcccgggaattattatctatcaaggagaaggtataaatgtacttaaactctatgttctaacatttttatgttcatataatacaatatgtgaatgatgttacttatttctgatacatctatctttaatgtctcatgttctatatattatttcatattattttataagtgtaatcacgaaggtatgaccttcgtgatacttcactcatggtcttcgtgcgaagttcattaactccttgnggaaataatgcttcagcgga

SEQ ID NO: 62848 - DNA, 430 bp, Zea mays
  unsure (1)..(430): unsure at all n locations
tcttcatccncacatgtgctaagcggcgatgccacagtcagcccatgctagtcttatctattaagcatgcatctagaccggcctcttctttngcaaaatcaactaattaaagtttgccgtctaatacacctttaaaagctagtgaaccatcacttcttctaaagatagacacatctacatttgtaaatagacagttataccccatatgacantaatgactaacagatagcangttatatccaagactctccactagaaacacattagagatagaatgctcattggagaatcgcaatttacctagcccttttaccttgccttgattcccgtcaccgaatataattgaatcttgggaatccttattcttgacgtaggaggtgaacatcttcttctcccccgtcatatggtttgtgcatccgctgtcgataat

SEQ ID NO: 62849 - DNA, 463 bp, Zea mays
  unsure (1)..(463): unsure at all n locations
gtccctggggggcaatcatatcgganaccttatgacagcctatcttatcatcaccccgacccacaggacactagaatacccgaatatgcataattcttgtgtgacttatggataaacacgcgcgaacatataggccagatcttatcgcaattgggagaattggccgacacagaggcatatcgcgtgcagttattttcattatctctaacacgaactgcgttcgcatggtatgccactatacctcctaattgcatttcatcatggngggatctagaccanacatttcatgatcaatttcttctccggtgactatgagttggatttggtagatttagtgtcattgcgacagacaatagatgaatccgctcatgattacattcggagattctgagatactagataccgatgctgtcaaaatcatttagcagactaacagttatgaggattatgctttaatggtcta

SEQ ID NO: 62850 - DNA, 304 bp, Zea mays
  unsure (1)..(304): unsure at all n locations
aagcaagtgtcgagttcagctctataaaatatattaatatagctgaccctctaacactcccttaaatgctattgaatcatcactacttctaaagacagtgacacctacatcagtgaatagacagttgtagcccatatcgcataattgagatacaganagcaaattataatctatagaatccacaagaaacacattggacatagaatggtcaagagatatagctattttaccaagaccttngaccaaaccttgatttccatccccgaaagtgatagctcgatggggagcatggatattctcatat

SEQ ID NO: 62851 - DNA, 431 bp, Zea mays
  unsure (1)..(431): unsure at all n locations
agcttctaaagggagcacatttaggactaatcaatgttcattttgagaaagacaggatttgtagcgcatgtcaagcacggaaacaggttggagttcaccatccacacaagaacatcatgatgaccgagaggccgcttgagctactccacatggatctattcggctcgatcgcttacataagcatcggcaggagtaagtattgtcttgtaattgtggatgattattctcgcttcacttgtgtgttctttntacaagaaaatctcacacccaagagaccttatagaagttcttgagacgggctcaaaatgagttcgggttgagaatcaagaatattataagcgacaatggaacagagttcaagaattctcaagttgaaggatttcttgaggaggagggcaccaagcatgagttttcttcttcctacacacctc

SEQ ID NO: 62852 - DNA, 433 bp, Zea mays
  unsure (1)..(433): unsure at all n locations
ngaatcactnttatacccctgagataccagataccctaattgttaccctgganaaccctanaccaaaccctaggggcttatatgcaaaattagtccactnttgtgctaaagtgcaaaaaccaagccaaataggtttcttaagtcctttggttcacaaaaatgtggacttgaaagcaaaacccaaagttttggacttaaatgcaaaatggacctcatttgagttntgctctaagtctgaaaaatcagtgtaggggctcaactntggggctgtgtaacttacaaagcatagggtttttgccctatgtcaccacatcaaagttaaagaccaattataggagaacaactttgcttaaggttgtaagcttagttgctaagaagaatntggagaanaccaagcctaaagttgggctgtcagggctgtatgtctgaattt

SEQ ID NO: 62853 - DNA, 442 bp, Zea mays
  unsure (1)..(442): unsure at all n locations
gcggcatgcaagcttgggaagggtcttcattcccacatgtgctaatcttgttatgccacagccagcccatgctagtcttagcaattaagcatgcatctagaccggcctcttcttttgcaaaatcaactaaataaagtttgccgtctaatacacccttaaaagctaatgaaccatcacttcttctaaagacagacacatctacattagtaaatagacaattatatcccatattacatagttgactaacagatagcaaattatatccaagagactcaactaaaaacacattagagatagagtgctcattggatattgcaatcttgcctaaacctttcaccttgccttggttcccatcaccgaatatgattgaatcttgggaatccttattcttgacgtaggaggtgaacatcttcttctcccncgtcatatggtttgtgcatct

SEQ ID NO: 62854 - DNA, 454 bp, Zea mays
  unsure (1)..(454): unsure at all n locations
tactcctccctgggaggggccattcatcatcgtcaagaatttgaagcccggaacatacaagctggacaacaatcaaggcgaggtctacaacaacgcttggaacatctgacagctacgtcgctnttacccttaatatgttttcaagtcgttcatttacctcgttttctatacatacacaaataaagtctaaccgtcaaggaagggtcagccttgcctcggcaaagcccgaccctccctcgtgggctagaaggggggaaccccctctgcgtaaaaattttcctcggaaaaagtctttctgccagaacatctttcgcgcttttcgactgcttcgatagcgggatcctgaaaacgacggagtacaagtaagcggcaaggccgaccgagccgaggggactctacgcctncangatacggatacctcactcatcaccttctgggataagtaactcacgct

SEQ ID NO: 62855 - DNA, 341 bp, Zea mays
ggactcaggtatgcacacattgatacttaattacttgtcccgtctcatggacaaggcatcctacctggatccaagtccatagactaacatttatcccgttatcaatatgaatacaatcaatttctgacctcgcgcgagtgctagaaaaatcactcgacttctgccgagatcctgattagcaagcagctactcgacctagcatactagtattcatctcaaaaaggaatgctgcgatcatgcaactagaggtttcaagcaactcctacacttaagtgcacattacaattctacaagcattaagtgtagtaaaatagcatataatagtacggttatgcataaaa

SEQ ID NO: 62856 - DNA, 119 bp, Zea mays
ctgcgatcatcaattgttgcaacttgcgctcggttggactcctgctatcatgaaattcagacaggctgagtctgacgggggcacttacctgggaagctgggcatatggatgaggtgtac

SEQ ID NO: 62857 - DNA, 291 bp, Zea mays
  unsure (1)..(291): unsure at all n locations
tatcccatttgtttctcacgaatatnaccgcgttgcttcttatgataccttaagggcgactctgattttctttggagtgaaggcttctacttttcttggtggtgtcccatcatgtttcaagcaaatgtttttccgcaagaaaacaacttacagatcaaaatttgctgtagggtgtagtgtacacgcgatacacaattacacaaacaacaatatatggatgatgtattggcgtgtacactttgctgtgtgtacactttgtcccgactccgacaaccacctacgaacccaaac

SEQ ID NO: 62858 - DNA, 470 bp, Zea mays
  unsure (1)..(470): unsure at all n locations
tattacggacctatgaaactcagctgtggaactaaaacactcagttattcatggagaattaagctctctgtggtcactatggtgacatgtgctatcaatgatcaagcgattggagcagttatgccccacgggacacctacaacaatacaaggaagccatctatagactagaggaactagcaagatgacatgaatggttcctgttgaatgcattgtaatcaaatatgtgttgtggtgttagggtggccctaacacaatacatgatagaagggatttggccaacttgcaagtgtggcactagcacaatgtcatgctctaatctttatagttgttctcgtactcctctangcctcgagggagatgctnttgaaactctaaactataatgctataaccatggcttggntatgataaataatttaatgaaccagcggatgtccctttgaactccaacaatggaagcatatggatg

SEQ ID NO: 62859 - DNA, 343 bp, Zea mays
  unsure (1)..(343): unsure at all n locations
cgtcatctgctcttttattggaacaagagatttagtacaagagcatattgcctttcgggtttggcctcttgcggagaaatgggaaatgcctcaagaaaccataatagaggccgacgaaggtgggcttgtgagactgaagtacacctttcagtttggagatanatttactgagccagatgatgattggcttaagagtatcgacacattaagtgacgaattgcttggtgcttattcaaaggccgaagatactgcgatgtcagcagccttcggaggccgaanaaaagaaaggctgaatcgagtatttgatgcaattgggtttggctaccctgactattgctacccc

SEQ ID NO: 62860 - DNA, 489 bp, Zea mays
  unsure (1)..(489): unsure at all n locations
gcttctggaaggatgccttattgctgcgagtggaatgagggcatcatctgcttacatctacattanaggtgaatacgngaatgagcgtctcaaccttgagaaagctcggcaggaagcgtatgcatctggacttctgggtaagaatgcttgtggctctggttatgattttgatgtgcatattcattttggtgctggtgcgtacatctgcggtgaagagaccgccctactatagagccttgaagggaagcagggcaaacctaggctgaagccacctttcccagccaatgctgngctctacggctgccccacaactgtgactaatgtagaaactgtggctgtatccccaacaattcttaagcgcggtccagaatggtttgcaagctctgagcgcaagaacaactctggaaccaagctctattgcatctcanggcatgtgaacacaccttgcaccgcggaagaggaaatgagcatacctctgaatgagttgct

SEQ ID NO: 62861 - DNA, 434 bp, Zea mays
  unsure (1)..(434): unsure at all n locations
gagaaagacaggcgttgtggcgcatgtcacgcacggaagcaagttggtgttcatcatccacacaagaacatcatgacggctgacaggccactcgagcttctacatatggacctattccgtccgatagcttacataagcatcggcgggagtaagtactgtctaattattgtggatgattattctcgcttcacttgggtgttctttttgcaggataaatctcatacccaagagaccttagagggattcttgagacgggctcacaacgagttcagtttaaggatcaaaaagattagaagcgacaacgggaccgagttcaagaactctcaaatngaaggctttcttgaggaggagggcatcaagcatgagttctcnttctcctacacgccacaacacaatggtgtagtggagaggaagaatcgaactctattggacat

SEQ ID NO: 62862 - DNA, 521 bp, Zea mays
  unsure (1)..(521): unsure at all n locations
tatctatgctatacttgntgcgtccaggaagttgcgccactattttcatgcacacatggtcatggtggtgacctccttcccgttaagggccattctccaaaactctaatgccactgtcaacattgccaagtgggtcgcggatcttgctgagttccaactggacttccagcctcgccacgctgtcaagagccaggttctggctgacttcatcatggaatgaactgtgacaccccaggtgtcagtttcgtgttacgtcgcgagatttgtcctaatctcggatgctcagtaaaaattttctatttctcgctcgcctatgtccctaattatccagattattcattcacgtttcaccgaattcggagttactcagtctcacagaaggccaattttggagcctgttataacttttatcctcggcacaaatgcgaactaaaanatcattctcgaattataaatctcatatgaagctcatttaatcaaactctcgacggctgctatntgatctgagcccgaatctaatt

SEQ ID NO: 62863 - DNA, 388 bp, Zea mays
ccacttagtaacacagatgccatgaatgaatgctatgatgcaaatgctatgatgaaatgtgatgtgcgaatgaatgtcccaaacatataaccgaagccacactcaaccataattccttggaataaccacacatgagctcttgattccttatgaacgactgtggaagcttctcgtttttacttatgcggaatatactctgcattcccttaagaacgtctatggagttctttgccttttattaagcggtataactctgcattccttaggaacgtctttgagcttcttcgcttttactagacggaccaacgttgactttcgtgagagtctgatcccctaaggacgacttggagctcttctcttttttttttaagtctgactcgagggcgtc

SEQ ID NO: 62864 - DNA, 461 bp, Zea mays
  unsure (1)..(461): unsure at all n locations
taatcctgagaaatgcgtcttcngngtaccagcaggaaagtttctctgatttattgtcagccaccggtgaattgaagctagtccagataagattgaacctatcatgaagatggaatcccctcggtcgcaaaagaaggttcagcgactcactgggtgtatggcagccctgagcagattcatatccaggctaggagaaaaaggtctgccattntacaaactgctcaagaaggtggataaatntcaatggacgtcagaagcacaagaagctctagatgcactgaagaaattcctgacaacaccaccagtactaaagccgccccggcgagctacgccaactcaaccagctgaagatttgctgctatatatctcttgcacgactcacgtggtaagcactgcgttggtagtcgaacgagtggaagaaaggcatgcttatccggtacaacatcctgtctacttcatct

SEQ ID NO: 62865 - DNA, 479 bp, Zea mays
  unsure (1)..(479): unsure at all n locations
ngttcctaagacgggtgagatngcctctgaacctaactaccaggtcactggtggtatggatagtgagcaaagaatcatcttttcagaaaagatccgttgtgcagtagaacaatcaactgcacaggctaaaggtgcaagccttgactcaatggaggcagttaagcacaaggaaggcgtatggagcaatctatccacaatctcaagaaacaagttatctccagaggtcgaagagaagcttacctcagttgcagcagctgctgaagcagcagtttctgttgcaaaggcagctgcagaagctgccaagatggcgtcagaggctgcattgcangcgaaaataatggcagaggaaactcttagctcttttacatctgtaatgtccatgcatcacgaagttggtcaatctgatgtcattagtagtccactgatcttgtcaagttcaacaccagcatcatccctgaaaaataaggacaagagtcatg

SEQ ID NO: 62866 - DNA, 301 bp, Zea mays
agcttgccactacttgtctaagcaataacatctactagcacagaaaccgtgtaccataccattaactcggtcgtctgcatgctgggggctgtatatgatcggacctttcaagaaagctcaaggaggatacacatcatgtactggtatcaatctacacatttactaaatggatagagttgcaacccattggttctttaacctcaggtctagggcgcggaattcatactagacattatattcatattcggaataccaaacagtattataactgacctatgatcccacttcacagttcagagtt

SEQ ID NO: 62867 - DNA, 204 bp, Zea mays
  unsure (1)..(204): unsure at all n locations
tatatagagatagcattcgtcacgggcctgtactttgcagaggaacacaatgtcaatgcccatacgttgcggtatcatgtcgacgagccccctatcagtgatattgaaatttttcaatggaggggcaaaactgtatgacccagcacaacatactgtttaccaacgacgaatggaagactgtntactctacatgtataacaacat

SEQ ID NO: 62868 - DNA, 447 bp, Zea mays
  unsure (1)..(447): unsure at all n locations
ctgatgtgtggntgcgttctgcagatgtcttataacacgcgtanaggaggaaggcgtgctcagcacgatcgagccgctccgcangatgaggtgccccagcagcagcacctgcccgccccgcccncgatgtcgatcgagcagatgtttctgatgcagactcaggcagttcaagccatcggtcagactatggccgccattcagcagcagcagcagcagcagcaagcaccaccccagcctcagatgcctcagatgcctagagataagcgtgctgaattcatgagaggtcatccaccaacgttcgctcactcttctgaccccatggatgctgaagattggctgcgcactgtggagcgggagttgcataccgctcactgcgatgaccgggagaaagttctgtatggtccccgtctgttgagaggagcagcccagtcatggtgggagtcttac

SEQ ID NO: 62869 - DNA, 417 bp, Zea mays
  unsure (1)..(417): unsure at all n locations
tattgaanatactanagagagatgttaatagcgtcagggagtatatggtgaaagatgattactttagataattaacatacatgattcatcatccacaaatcacacagacatgaagtaaaatccttaacatttgtgcttattactaanaaggaatatgcactatttaactatttgatcaaacataggattttgcttcttcatattgaattntattaattattacttaaaagcangtcaatatgagaacatttatagcaaaggtatgaaatagattctaatggataagtgcatttatgagaatgtgattgaatgcacatcaagacaaatttagtcctccaaagaatctattcttcaagaatgataatttagagagaataaccattgaagggaactatattaaagagatgagttctcata

SEQ ID NO: 62870 - DNA, 433 bp, Zea mays
  unsure (1)..(433): unsure at all n locations
tcttgggttgtgtttggaaccaatatgagcggcggacggtcctttcttgangccggacagtccgcgcctgtgggccggacagtccgcgcaagcgcagaacagattatggttccgagtttcttgctatgtttgttggcgagaatctcgggataagctcgaaaattagttagtaaagggtccagcccctcctctataaatagagaggtatacgactgtnggggtatgcttcgtcgccgaagatcctgtaagaagaaacaccttcggcagatcctctcaaaaacagtgccgaagctatcatccataaagcttcagcatagtggcatgtctcaagacgaaggactacaccgacttataggtgaaatgaccgattgatccatgagagtctgtgtcataattgtaatctttcgtacagggcatgaatgtaatatctcac

SEQ ID NO: 62871 - DNA, 345 bp, Zea mays
  unsure (1)..(345): unsure at all n locations
tgtgaagattcttcattccaacatgtgctagtcggcgatgccagagccagcccatgttagtcttagcaattaagcaagtgtcgagttcagctctatcataatctactaagtatagctgaccctctaacactcccttanatgctactgaatcatcacttcttctaaagacagtaacacctatatccgtaaaaagacagttgtagcccattntacacaattgtgaaactganagcaagttataatctaaagaatctacaagaaaacatttgaaatggaatggtcaggtgaatatagcaatttacccaatcctttgaccaaaccttgatttccatccccgaatgtgat

SEQ ID NO: 62872 - DNA, 467 bp, Zea mays
  unsure (1)..(467): unsure at all n locations
tcggaggaagatatggtaatcagcccaggagactgttctgcctattctgtggngaagataagggacacatgacaaggatgtgtcaagtcatgattcataagtagaaggaaatcactaaagctgaagcacggcagaacccgtcgaagcaggtcttgcatactacttcatgctattctccatatatcctggagtatgtgggcaatcaacagcctacgacttccgttgctttggcgagtcactcccaatcctcctgggctcagttgccaccatcgccaccactggcgcctaccctgatccataaccaacagccagaagggcatcgtcaggctcagtagtagcgcgacactcgggaggaatccgaaattcgcacaatcaacaacattgtgcccaagtcaaggcatatctactgagtgtctaatccaatgtatattaccctnttgccttatattttcttttcaaacacatac

SEQ ID NO: 62873 - DNA, 502 bp, Zea mays
  unsure (1)..(502): unsure at all n locations
tcatgcaactgccgccagatatgagaggtgaactgcgttcctctgtctgacanctatcttcttggcacaccatgaagacaaacgatccgagacatatacaattctgccaatactgcactgttgtagttggtcttgacaggtatgaagtgggctgacttggtcaaacggtccactactacccaaatggaatcgtagccggctcgagtgcgaggcaatccaactatgaaatccataccaatttcatcccatttccactgagggatctgcttcactgctatcaacagtcatctgataacaacttcctttctttggctcaggcgggactaactcggtcaccactttctctcctattgnggacaccaacctgattgtccttttatcacaactgataactgtctgatacttatctagccaattcatccctatgatgacatctattccctgagntacccatactataagggtgggcgggaaacgctatccncttatttcacacttatat

SEQ ID NO: 62874 - DNA, 59 bp, Zea mays
  unsure (1)..(59): unsure at all n locations
agagaagaaagaaaaaaaggagagagaggaanaagaaagangaagaaaaaagggagggg

SEQ ID NO: 62875 - DNA, 265 bp, Zea mays
aaaaaaacgcgggaaaaagggggagaaaaagggggaaaaacaggggagagaaggtggagaagagataagaaaggagacggagaagagagggaaaataggagagaagaagaagaaaaagatgagaaaaagaaaagaggagaaaggggaggaatgaaagagaagaaagggaagaagagggggaagaaaggggggaaataagggggagaaagggggaagggagtggagagaaaggggaagaagagggagagagaggagggaaaaggga

SEQ ID NO: 62876 - DNA, 270 bp, Zea mays
gaaacggaaaaaaaaacaaagaaggaggggaaaaaagagaaaagaaaaaggaaaagaaggggaaaaaacaggggggagaaaaaaaaagaaagaaggaggaaaaggaggagaaggagggaggggagaaagaagaaaaaaaagaaaaagggaagagaaagaggaaaaaagagggggaaaaggggggaaaaagaaagggaagcggggggagaaggaaagaaacgagaagagaaaagaaaaaagggggaaagaaagagaaaaaagacgagaaag

SEQ ID NO: 62877 - DNA, 354 bp, Zea mays
  unsure (1)..(354): unsure at all n locations
aaaaaaaaaaagagaggagtgatcgaacacccaaaaanaaaannnngaaaaagaaaagnagaaaaaaaaagaangaaaanaaaaggagaagaaaagaggggggagaaaagagaggaaaaaaagaaggaaggaacaacggaagaaagaggaagagaaaaacgaggaaaaaacggggggaaaagggggggaaaaagaaggagaaacagggaaaaaaaaaagggagaacgaggggggaagagggaggaaaaaggcgagagaaagggaggaaaagaaagagaaaaaggagaaagaaagaagaaaagaggagaaaaaggggaagaaaaaaggaagaaaggggagaaaaacgggagaaaa

SEQ ID NO: 62878 - DNA, 268 bp, Zea mays
agaggggaaaaaagaaagaaaaaaagggggagaaaagggggaaaaagagggaggaaagagaaaaagaggggaagaagagggaaaagagggagaaaaggaggaaaggagagaaaaggggaaaggaaaagggaaagagagaaagagggggagagggagggaaagaagggaaaagggagaaaaagggggagaagcggaaaaggagggaaaagaaagaaaaggggggaagggggagaaaaggggggagaaagggggaaaaggggggaagggg

SEQ ID NO: 62879 - DNA, 249 bp, Zea mays
  unsure (1)..(249): unsure at all n locations
ggggagaaaagggtggaaaaaaaaaaaaaaaaaaagacgtcgtcaccaaaaaaaanaggaaaaaagagacagaaaaggaaaaagagaggaaaaaaggggaaaaggaaggaacaaggggaaacacgagaaaaaaagggaaaaagggaaaagaggaggaaggagaaaaagggagagaagaggcgaaaggagacaaagagggaaagggggaaaaggggaaagaggaaaaaaagggaaaggggggaaaaggag

SEQ ID NO: 62880 - DNA, 467 bp, Zea mays
  unsure (1)..(467): unsure at all n locations
tgtgaagattcctcattccaacgtgggctagtcggcgatgccagagccaacccatattagtcttagcaattaagcaagtatcgagttcagctctattaaaatcaaccaagtatagctaaccctctaatactcccttaaatgctactgaatcatcacttcttctaaagaaagtaacacctatatccgtaaaaagacaattgtagcccattttgcataattgagaaactgaaagcaagttgtaatctaaagaatctacaagaaaaacattggaaatagaatggtcaggtgatatagcaattttaccaagtcatttgaccaaaccttgatttccatcctcgaatgtgatagctctttggggatcttggtttttctcataggaggagaacatccttttctccccagtcatgtggtttgtgcacccactatcaatgatccaactngagccctcggatgcataaacctacaaa

SEQ ID NO: 62881 - DNA, 468 bp, Zea mays
  unsure (1)..(468): unsure at all n locations
ggagaaatatctcgatacaatccgaagaatggaagcctctttcgtatgcttcgctgtaaagaatatcccaagaggagaaaaagaacatgctgacctattagccaaatcagcggcacaggggctcccattaccttcgaaagtattttttgaaaaaataaaagcgccttcagccgagctcatggagagagcagtgcttacgatctcaccagtgcacaatgaagattggaggactaagattgtatccttcctacaaggcaactatccttcggacgatgaaacttatatcaaaagaatagaagctaggacaaggccttacataatcatagaaggagaattgtataaacaaggagtttgctcttccattgctgaagtgttgtctagaaccaaaggtcaggagataatgaaggaaatacatgcaggcctatgcggaactcatattangtccagacctttacttgaaaagtttca

SEQ ID NO: 62882 - DNA, 461 bp, Zea mays
tggtgccaatggagaagcagatatccttgaagtcttggctgttttattgcttgccgctgtcaatggtgagttcggacgggactctgaagcggcaaacaatgttttgccagaagaatttctgtgcaatctttgatgttattgtggatacagccctcgcctcgatccatttggtaaaatactcgaaagcgacgaaggtgaacttgaggttcccctgagccgtgggcaggggcccgacaatgtccaggccctagcgctggagaggccatgtgtgggcgattagtttcgtgaattgcgaagggcttcctgatcgaggagaacacttctggcaggcttcgcaagaccttgtgacccgatttgcggcgcagatcattgcgggccagtagaaaccttgacggatcacctttgatgctagggcccttggccctgcgtgagagccgcaagtaccgttgtggacttcactc

SEQ ID NO: 62883 - DNA, 464 bp, Zea mays
  unsure (1)..(464): unsure at all n locations
cttggattcaacanaggagcaaaggggcaaccgaaggcacccctggtgtggagcaccggactgtccggtgtgccaccggacatgtccggtgcaccagggggactcagactcgaactcgccaccttcggaatttccggaggcgactcggctataattcaccggactgtccggtgtacaccggacagtgtccggtgcgccaagggaggtcgacctcaggaactcgccagcttcgggaaaagccaacggctcgtccactataattcaccggactgtccggtgtgcaccggactgtccggtgcgactccagagcaacggctatcttcgcgccaacggctctctgccgcgcatttaatgcgggctctgcgtgcgcagatggcaggcacgcccatgctggcacaccggacagcaaacagtacctgtcctgtgtgcaccggacactcangcgggcccacaagtcagaagct

SEQ ID NO: 62884 - DNA, 467 bp, Zea mays
tcctatagtcctcattgaagccccacacaagataatgcacacatgatgaccaagctcctcatttcgtaactccgtggataacctagggccttattcacacacaagtggtgttctagcttcggcatatcccatatgtttctgtcatattcactattgagtttccgataaacattgtgggccttgttcagtacacggtggtggcaacaccatagatgcaaatggtgtgatcatacaaggctaaccgcccactcggtacaaatacaataatgcgtgcaagcaccaagggtttggtggtgtttatccttacttctaatcactaagaaaaacctagagaaaatgttaatggtagctacctaactaaaacacatggtgtctagagctataagaatggattctcaactccctaataatggttatcaactcccacacatctcacaggttagttgggtgggatatataacccccaa

SEQ ID NO: 62885 - DNA, 468 bp, Zea mays
ctcgagctgtatatatatactctctaacgctaagagctcgcttatggtttctggtcagctcgttaatatgtaagggctaaggctcttgcttttctatgataaaagctacaatctgtccatacatctttataaacaaaatgacagcttaccgtgaaaagcacaaaagaaaaccatccgagtcattttttactacagcgaagaagtcgacaactagttcagtggatctgcattgctgtaagtgctagagagcaacaaacaccttacactcttggcaggtctagcatctcagaagcgacaacaagcttatatagggcctgtccggatcatctattgtctgaccagctgttatgaaaatctggctgtgtggagaatttggctgtgaggagaatatgactatctttccaattacgtgtggaggaagataaattgttcatacggctaggatctaatattgacggattttactat

SEQ ID NO: 62886 - DNA, 439 bp, Zea mays
  unsure (1)..(439): unsure at all n locations
cttgctgcttagcgtagcaatatagtctatttcttatttaacttagtcaaaaaagtctaagtgtcatgtgtgtgttgaatcaagacaaccccgcaagccacacaaggctgctgaggcgaggagtttggcacctctagaacttgttcattctgatctgtgcgagatgaatggaattttgaccaaaggtggtaaaagatactttctcacttttatatatgactccactagatnttgttatgtgtatctcttaaaaacaaaagatgaagtgttcaattattttaaggcctataaagctgaagttgagaaccaacttgagaggaaaataaaacgtttaaggtctgaccgaggtggagaatatttctctaatgtgttcgatgagttctgcgtggaacatgtattattcatgagaggacaccgtcattctcaccacaatccaatg

SEQ ID NO: 62887 - DNA, 429 bp, Zea mays
tgattgggagttttgaaataatccactcgaaggtcttcgtttcctgctgttattcagaaatcatccttctcttttattgaatgccttagagatcagcattatatcattaacattatgctttagaggtcagcatacatttttgtctttgaagtcgagtacgcgatctgcccatatcttgttaggtcttgcaatttatttgacttgcgactgattggacgtttggtagatggcctttggctattcttcatatcacttcgtgcttcaatgcttctgttgattagacttgtacctcatcggctatatttggctttcctctgatatctattgatatcttccttctgtcttgaggtatacattacatatactgtatggatgtgacctgcttggaaaatctattgaaaattcctagacgttccccccaatgggtgt

SEQ ID NO: 62888 - DNA, 266 bp, Zea mays
gtttgtatggtgaacactaggggagactaacttattctcttttggaaacataaaaaacacgtaccgctaataaagcagagaagcgcgttgcaaggcctgatcacaccgtatatgtgatgacacacctgcaccactctgcggagaagcgacataaggagctattctgacacctaatatctgcttatgggattggagtacgaaagtgttgttgtctgaaatgcacatgcctacggggcggaggcgatattataggatgatcaatctta

SEQ ID NO: 62889 - DNA, 445 bp, Zea mays
  unsure (1)..(445): unsure at all n locations
tacccatgacgaggcatgtggccagataatatgttcttattcatcaagcctacattggtacggaccttaatcgactcaaacggagacactacaccgggacttccttctcgtgcaagtcacccgcccggtctcgtctttatcatttacaatcccaaagtttggtacatgatagaggtacatcttttctgatgttgaacccatcatggccatgatggattcaccatcaagttttatttttgaaaacatcccattccatatgaagcatcatcttttgtttaaaataaaacattttgttntctaagcaagactaagcatcagaaaaccttctcaagtaaaataagtatcaacgagtggtaatcaatttcagggaggaaatgcaacaactgtgtagcactcaattcctatcaccanatgcatcatttcaagtgataaagaaattataaca

SEQ ID NO: 62890 - DNA, 364 bp, Zea mays
  unsure (1)..(364): unsure at all n locations
tacactcagaggactcatgagcatcgtcttcaatttcttcctcttcatcttatcggccgtgatataaaaccactcacttttctagccggttggccacttggtacgatagttgagcacaagaaccttcgtattctctacagaaagctcatgcatttgggtccattgcttcagaaagctttctaaagatataacaaccaaaattatcatgtagcccatcttctctggccttcgtttggtaatgtagcttatgcactctacataaagcttcatcatttgggttcattgcttggcttcnaacggcctatatgaagatgttgagcctaacgatagcgttatgggtcaactgatgaagatagatgtcata

SEQ ID NO: 62891 - DNA, 466 bp, Zea mays
tgaggctgactcgccgaagcaacagaaactgcaggatgattgcccacatattctggaatgtagggcgaatgatacgaagctgtatgcatgacctgctttggctgagcttgttgtgctgctgcttcagctatttccttttgcttctgaatagtaacatggcacatcctggtagtatggcctttgttctcaccgtagaataagcagaagattcttctcggttgatcgccaaatcttccttcaaagcccctggcgcctctgcctcttggagctggtggtctgaaggagctttgctgttgccccgaagcctgtgaggaacattgaggcctttgctgttggcttcctccatcatcattttgtgtagagttatgaattgatctcacgtgcctcgggtagaacctccctccgaagcccctggtcatttcagaaaacctgaaagcctcctcccttctttggcgaacatcattat

SEQ ID NO: 62892 - DNA, 455 bp, Zea mays
  unsure (1)..(455): unsure at all n locations
gcagcggctgtataggtgtatattcgggccgcccggctctttctaagcccagaaaggcccgtattgtttgaatttagggtcgtgccatgccggcccatggcccggcacgtaatatgttaaacgtgtcgggctcatttggggcagccccaaattataaaagcccgaaattcaatttttggctcgaaattcacattagggcccgaaattcaatttttggcctgaaattcaattttaggcccgaaattcaatttttggcctgaaattcaattttaggcccgaaattcacatcagagccctaatttcaaaaaaataaaataaaacagataaaagataagacaaataaatttgaacaaaaacaaacttaatatttgtattagagttactagagctatgcaatgactacctcctttacaaatcatnttgttagaaggaacaatagtataatcagctctata

SEQ ID NO: 62893 - DNA, 382 bp, Zea mays
gaccttaaaactaagctttgtggattggagaggattgatcactggtgcgcttgtttgaatgcctagctctcgaagtagttggaaggggaaaacttggatgacttgaatgtggggtggttgggggtatttatagccccaacaccaaactagccgcttggggaggctgctgtccatggcgcaccggacagtcctgtgcgccacccgtaccagccgttgggttcaccgtggagctctgacttggcccgctgctgcctgggtgcaccgacaaacctgttatgtccggagcaccggcggctggctctctacccgcgggcgattaatgagtgaacaccgctgcgcaattccgtgcttgtactcacggcaaccgtgtcccaaatgccgg

SEQ ID NO: 62894 - DNA, 437 bp, Zea mays
tgacatacaactggcaatctcgtaacctctgaagtaccttcctcaaatgttcctcatgttcttgctcattctgggagtatacgagaatatcatcaatgaacaccactacgaacttgtcgaggtagtccatgaacacactgttcatcaggtacataaagtaagctggcgcattcgtcaatccgaatgacataaccatgaactcatatagtccatacttggtgatgaatgctgtcttcggtatgtctaagggtcggattctgagctgatggtaacctgacctcagatctatctttgagaacacattggctcctctcaactaatcaagtaagtcttcaattcaaggcagggggtacttgttcttgacagtgacttcattcaaagctctgtaatcaatgcacatcctcttcataccatccttcttctccacaaatagcact

SEQ ID NO: 62895 - DNA, 454 bp, Zea mays
  unsure (1)..(454): unsure at all n locations
ntaaaggttaatcttcacctanaagagagactangaatgctctatgcataggtatggaacaaattgcttcaattggtagttgatcaatagtagttccttccaagtggcattctttcaattggtaataatctattctatggaaagaaatgtcaatataaggttaaattccttttggcttaaatttgtaaattggcgcatattgttaattcactcctccatgtgcattaacttaaaaggaatttaatttatgcctttatgcctcataaatgatgatttgtttgcgattcatatataaatatcatcattcattaaatacttccttgtactactaatacctattttcaaagnggtttatcgactagttttaaaaggaaaagagataacacagaaagaagtctccacacatgatgaacagaagaatactaatgtgacacaccacatatagtaagatctg

SEQ ID NO: 62896 - DNA, 459 bp, Zea mays
tctaaagggagaacacgtgataggtgtgactaacgtgcaattctaaaaagatagaccttgtgcagcttgtcaagcaggtaaacaagtgggaggagcacatcacagcaagaatgtgatgaccacttcaagacccctagagctgctgcatatggacctcttcggacccgtcgcctatctgagcataagagggagtaagtatggtctagttattgttgatgacttttcccgcttcacttgggtgttctttttgcaggataagtctgaaacccaagggaccctcaagcgcttcctcaggagagctcataatgaatttgagctcaaggtgaagaagataatgagcgacaatggatccgagttcaagaaccttcaagtggaggagttccttgaggaggaacggatcaagcacgagttcttcgctccctacacaccacagcataatggtgtggtagagaagaagaa

SEQ ID NO: 62897 - DNA, 432 bp, Zea mays
tcgtcttgaccatactcttgtatacccgtaacccaattcctaagacacctgttcacatatttcacttggaaaacattgtcaaatcatgtttttgaggaccttcggaagccgaaggcccccaacagacgcgaaaaaggcccgagctcgcgaaaggatgctagctcgagaagccttggagaagcgtcatcggaggcaggcgagggatgggctcccgagggagtcgtcgccagagacgcctgacgacgacgatgaagatgatgatgatgacgacgaagacgacgacatggcagcccgacttgtcctcagcccggacccgaggccgggttaggggtcgctgggccagcctccaagtgggctggcaccatcagcgcctggggccgggacaccaaggtcccaatccgaggagcggaggcaggccgagggggtactttg

SEQ ID NO: 62898 - DNA, 451 bp, Zea mays
  unsure (1)..(451): unsure at all n locations
ntcacccttnttgtgtcaaatccgcctgtgactgatagcattttgggccttagagtgcgaccttctgctgaagaagtcagtactttggttgcttcgctcggggcgattcctgatgatgaacggcagatttattttgaagtgcctctgaaccctagtgatgcagacataaatgacatgcttgatctgttagctgaggattcgtccgatgctgctcctgatggcacgttggcagtagtgccccttccagaggttgatacaactttggatgtcccgaaacctgtcagtactcgcccgagacgccctagccgaaccagtcagcccgagccttctgctgatgagcaaaagaagaagagaagacgcctccggcgagtatccagttttgatgaggacgccggtaccttatctcctgtcgctgaagaagtgcctgcaactggtcttactgacactgatc

SEQ ID NO: 62899 - DNA, 454 bp, Zea mays
  unsure (1)..(454): unsure at all n locations
ccttctaaagggagagcacatnttgngactaaccaatgtacattttgagaaagacaggatttgtagcgcatgttaagcagggaagcaagttggtgttcatcatccacacaagaacatcatgacgaccgacagaccgcttgagttactccacatggatctattcggcacgatcgcttatataagcatcagcgggagtaagtattgtcttgtaattgtggatgattattctcgcttcacttgggtgttctttttgcaggaaaaatcacaaacccaagagactttaaagggattcttgagacgggctcaaaatgagttcggcttaaggatcaaaaagattataagcgacaacgggacggagttcaaaaactctcacattgaaggctttcttgaggaggagggcatcaagcatgagttctctttctcctacacgccacaacaaaatggtgtagtggag

SEQ ID NO: 62900 - DNA, 459 bp, Zea mays
  unsure (1)..(459): unsure at all n locations
tcagcagaatgacagcaaaggtccttcattctcatatatgttgaaacgtgctaacatatgttgatgatatcatagtaaaaagcacanagcaagaaaatcacattgctgacctgcaggagacattcgctaattttaggcaagctggtctgaagctgaatccggaaaaatgtgtcttcggggtaaagaacgggaaatttcttggttgtttggtttcaacacaagggatcgaagctaatccaaataaaatcgaagttatccttctgatggagccgccaagcacataaaaaggggctcaacggctgacaggaagactggcatctttgaatcgatttatattcagatctgcagagagaaattaccattctttgaagtgtggaagtcaggcgaagtttttcattgggatcagctcatcaaaaagccttcgaagaactgaaacagatttgatagattaacaactct

SEQ ID NO: 62901 - DNA, 433 bp, Zea mays
  unsure (1)..(433): unsure at all n locations
tcttagggagaacacgtgataggtctaactaatgttcaattcgaaaaagatagaccttgtgcagcttgtcaagcagggaaacaggtgggaggctctcatcacaccaaaaatgtgatgacgacatcaagatccttggagatgctgcatatggacctttttggacccgtcgcctatctgagcataggaggaagtaagtatggtttagttattgttgatgatttttcccgcttcacttgggtgttctttttgcaggataaatctgaaacccaagggaccctcaagcgcttcctcaggagagctcanaatgagtgtgagctcaatgtgaagaagataaggagcgacaacgggtccgaattcaagaaccttcaagtggaggaattccttgaggaggaagggatcaagcacgagttctccgctccctacacaccacagc

SEQ ID NO: 62902 - DNA, 431 bp, Zea mays
  unsure (1)..(431): unsure at all n locations
tctaaagggagaacacgtgataggtttaactaatgtgcaattcgaanaagatagaccttgtgcagcttgtcaagcaggcaaacaggtgggaagctcttatcacaccaaaaatgtgatgaccacatcaagacctttggagatgcttcacatggacctcttcagacccgtcgcctatctaagtataggaggaagtaagtatggtcttgttatagttgatgacttttcccgcttcacttgggtattctttttgcaggataaatctgaaacccaagggaccctcaagcgcttcctaaggagagctcaaaatgagtttgagctcaaggtgaaaaagataaggagcgacaatgggtccgagttcaagaaccttcaagtggaggagtaccttgaggaggaagggatcaagcacgagttcttcgcttcctacacaccac

SEQ ID NO: 62903 - DNA, 447 bp, Zea mays
  unsure (1)..(447): unsure at all n locations
tctaaaggagaacacgtgataggtctaactaatgttactttcgaaaaagatagaccttgtgcagcttgtcaagcagggaaacaggtgggaagctctcatcatgccaagaatgtgatgacaacatcaagacccctggagttacttcatatggacctcttcggacccgtcgcctatctaagcataggaggaagtaagtatggtcttgttatagttgatgatttttcccgcttcacttgggtattctttttgcaggataaatctgaaacccaagggaccctaaagcgcttcctaaggagagctcaaaacgagtttgagctcaaggtgaagaagataaggagcgacaatgggtccgaattcaagaaccttcaggtggaggagtatcttgaggaggaaggaattaagcacgagttctccgctccctacacaccacagcanaatggtgtggta

SEQ ID NO: 62904 - DNA, 467 bp, Zea mays
  unsure (1)..(467): unsure at all n locations
actaagcttagcatcgaaggtgtcccgttgttacagtaatagccttctgttctccgaagcgacaaacaatattttgctagagaaatttctggacagtgaccgaagttattgtggctaaaggcttcacttcaatccacttggaaaaatactctaccgccaccacaacatattttagatttcattgtgctggcggaagtgggcctagtaaatagaggccccacctttgcaacggccaagtgggctatattaactgagtgagtgatgaacgttgcttctagtctcttgcacatntttgacagccttcacatttttggactaattctgctgcatccgaagctgccttcggccaataaaatccttgtcgaanaacttttcccaacaagggcctatatccaatgtgagatccacacagacctgcatgtatctctttcattaattccataccttcggttcttgataaacatttg

SEQ ID NO: 62905 - DNA, 454 bp, Zea mays
  unsure (1)..(454): unsure at all n locations
ctataaaactaagcttctggactgaaattccgaagataagtagcatcaaaactatctcgttntgtttcttgtacgcagactatgtcacacttagattctattattttgcttctcaatgaattccatttttcaggagcattaacccccctaatgttatgagtcaggattttccaatctctttgttgttgatccatatataagaaaaaacttgattattgagcaagacatatacagagtatacatccatcatagaattccctaaccaattagagaaacccaataaagtccaagacatgtttttaggagatgccataagacaattcatgtcgttcatcataaacatgattaatcctagcacataataccataagttatgctctttagcatacccaanagcatatagttcacaaccaaaagcatgaagttaacctccatcaaacgaccacccttaaac

SEQ ID NO: 62906 - DNA, 416 bp, Zea mays
tcgcatctctgaactagctcggctgcatcattctttgccgtcggtcaatagaatcctgacctgaaaaccttcccgactaatgttctggatgctgcatgtactccgcactgccctgcatggacttcctccagaagttgtttcccggtggacgggagaacgcacttcatgaggacgcctgacgcgcccctccggtataatacctccccaatgagtgtatagtgagctgattgtctggcaatgcgctctgccgagttcttgtcatctggctcttcttcattctttatatacttaataatcggttgcctccagtcatcagagtctgactcgggttggtctatgatgttgcattcttctatttgatccgtcgagatgctcggctgattgaattcttgcatgacgaccccgggcgggacttg

SEQ ID NO: 62907 - DNA, 407 bp, Zea mays
ttagggtaaaagtcataacatgaccccaacaatagagatgtatttatatttatactcctgcgatcccagaaaccctaattgaaaccctggaaaaccctgaaaccaaaccctacggacctaagtgtaaaattagtccacttttgggctaaagtgcaaaaaccaagtcaaataagtattttaagttatttgggtcacttatatgagaatttgcaatccacaacttgagatttggacttaagtgcaaaagagccccacttaaccttattggggttaagtctggattttagagacattggctcaactttggggctgtgatacttacaaagcatagggttcttaccctaggtcaccacatcaaagttgaagacccattatatgagaacaactttgcttaatgttgtgagctt

SEQ ID NO: 62908 - DNA, 445 bp, Zea mays
  unsure (1)..(445): unsure at all n locations
tctcttggacaagtgccgcacttaccgcttagtgtgaatctgtcacatataacaacagaggagcccctggagttggtgcagataatgtcgctaagtctatcaaatactgcttcagctcgtcgaaggctttctgctgaattggcccccattgaaaaacttctgctgacttcaacacttcaaaaaatggtagatttctctctgctgatctagatatgaatcggcttagagatgcaagtcttcccgtcagtcattgagcccctttctttgtgctaggtggttccattcaaagaatagcttcgattgtatttggattagcatcaatccctcttgttgaaactaggcaaccaaggactttccccttctttactccgaagacacactnttctggattcagctntagaccggccctgtctaaaatagcgaaagtctcctgcagatcagcaat

SEQ ID NO: 62909 - DNA, 423 bp, Zea mays
  unsure (1)..(423): unsure at all n locations
tccatcgatattgtcgtagactgttgaaaaccagttgtatatcttcaatgaaattttctgaattctctggtttgattaccacatcatccacataagcttccacacgcttgccccagtgatcggctaagcatgtttgaatggctctctgataagtcgctccagcgtttttgaggccgaacgacatggaggtatagcagaaagcaccgaatggagtgatgaacgctgtttttcctcgtcttcttttgccaagctaatctgatgatacccggaatagcaatccaagaaagacagcacagaacatccagcggtggaatctaccacctgatctatccctgggagcccgaanggatcctttggacagtgtttgttgagattcgtatagtcgacgcacatgcgccaatccactttaattctttttagtac

SEQ ID NO: 62910 - DNA, 442 bp, Zea mays
  unsure (1)..(442): unsure at all n locations
taatgcccctaagagattgtccaatattgttaagggcaatactcccatggcacatgataacgagggttacattntatatcctgctggttatcctgagcataaaattaggagaattcattctatgaagtctcattcaggttctcatcatgcttttatgtataagaatgagacatctagttctaggcattctacccatgttaaaatgcctaaaaagaaatctcctgttgcatcaaatgatcataacatttcatttaagacttttgatgttgcttatgttttaactaacaaatcaggcaaagtagttgccaaatatgttgggggcaaacacaagggctccaagactagtgtttgggtacccaaggtgcttgtntctaatgtgaaaggacccaagaccatttgggtacctaagaacaaggcctaaattgttttgtatgtttatgca

SEQ ID NO: 62911 - DNA, 425 bp, Zea mays
  unsure (1)..(425): unsure at all n locations
tgacattgcttccctgttggaaaccaatgccattctttatgtcagagcgtctcccattatagagcatacttctagcaaatttaaacttctcattttcaatttcatgctcattaattttagcagttaatttagctatgtgattattttattggttaattagagcaagatgatcatttatagcttctacattaacatctctacatctagtgcaaatagaaacatgctcaatagtagatgtagaaggtttgcaaacatttaatttattctatcttagattttaacatggcattntcatttctaagacaggagatagaatcattgctaacatttaaatctttaaccttagaaataaactagcatcttcatttctaaggctagaanatgtatcattcaattcatcaatcttagcatttagactagcattt

SEQ ID NO: 62912 - DNA, 443 bp, Zea mays
  unsure (1)..(443): unsure at all n locations
tgtggaggttcttcatccncacatgtgctaagcggcgatgtcacaaccagcccatgcaagtcttatccattaagcatgcatctagaccggcctcttcttttgcaaaatcaactaagtaaagtttgccgtctagtacacccttaaaagctagtgaaccatcacatcttctaaagacagacacatctacatttgtgaatagacagttatatcccatattgcataattgactaacagatagcaaattatatccaagagactctactaaaaacacattagagatagagtgctcatttgagattgcaattntacctaacccttttaccttgccttgatacccatcaccgaatattattgaatcttgggaatctttattcttgacgtaggaggtgaacatcttcttctaccccgtcatatggtttgtgcatccgctgtcaataaccagc

SEQ ID NO: 62913 - DNA, 454 bp, Zea mays
  unsure (1)..(454): unsure at all n locations
ntccgctccttcactcagggcgacctctccgcagctgattactggccgccgctacaaaaagctgccgaagatcttcgcgatcttggcgagccggtctccgacaagacccttgtcctcaacatcattcgcggcctcaacgaacgctttcaagcgctcggccttcacctccgtcgcacctctcctctccccacttttttgcaggtccgcgatgatcttactctggaggagctcaccatgaccaatgctgctcctgcagcagctctcgctgctgttactacaccacctggcgagaacagcagctccaagtcatctacacccactgctcccgctgggcgtccttcacatcagcgcccgccctcccaccattccggnggcggttccggtcatggctcctcctccggacaacgcggcaagcgaagcaagcgcggtggtagaacctncagcaacagcagca

SEQ ID NO: 62914 - DNA, 453 bp, Zea mays
  unsure (1)..(453): unsure at all n locations
ngagtcaatcattntgcanaggataattgatgctcaaaaagataatctgggtatgaagcacattcgagagaagataaaggctggagtagccaagtgtttcaaggaagacgatcaaggtgtgctatggttcaaaaaccgcatagtagtgccaaagaacgaagaactccgccaacaaattcttgatgaagcacatcttagtcgctattatattcatcccggaagcactaagatgtatcaagacttaaagcaacattattggtggacaaagatgaaaatcgaaattgcacgctatgtggcgaaatgtgacacttgcagacgtgtcaaggccatacacatgaaaactgctggtccattacaatccttgccaatcccaacatggaaatgggaagacgtcagtatggattttattgtgggactacccaggacagcanaggggtatgactctatttgggt

SEQ ID NO: 62915 - DNA, 423 bp, Zea mays
tgccttcgcctcaggctatcacccgcatgcagggagtttggttctatccaatggagaaaatgcacagctgccaaatagatgcttctccaccaatgaaagggcaagtgggccgatttgctacctgaggcggactgggcgctaaacacgactgagtgcagggcgaccgggttcaccccttttcgacttctatatggatcagaggccatgaccccacatgagataagacatggctgcccacgaacagttccgtcagccgtcctcgacgaggactagcccacttttaatgatctcatagatggagaccgagtcttcactctacaggccctgatcaaataccttgctccgacaaaagcatggcgcgaccacacagtctttccgagagaatttatcgaaggagacctcatactcctacgacaactttga

SEQ ID NO: 62916 - DNA, 458 bp, Zea mays
  unsure (1)..(458): unsure at all n locations
tgtaaactaataggaagacaaatgttgacacaaggattntcttcttgaggttcggtggttttccaaccacttactccccatcaaggcaagcccaaggttgtcatagatcctcttgctagtggtgacccataagtcacactctcccacatggagtactcgcaaccaatctctagcacttgatctggccaagccacttggcgttcttcacaccttactctacttgtgtcgccttcacatctcccatggggtgagtttggtacctgatgaggacatcactatcattgataaaactataccagtgactgagagcacctagaggggggtgaataggtgatcctgtgaaaacttaaaacttaatccacaaaacttgattagagttagcacagttaagccaagtggctagagaggagaatatgcacaacacgataaccacatagagatcaacacagagatgacac

SEQ ID NO: 62917 - DNA, 426 bp, Zea mays
ggatggtcaagtcaagaggcaggccccaatatatattgtattcgatgtccttagtttatcaaagaaaaattatacagagttggagaaggtactgtatgctgttttgatggcatccaggaagcttcggcactattttcaagcttacaacataattgttccttcttcacaacctctgaaggatattatgaggaaccgaggagctactggaaggattggaaaatgggctgcagagctcaatgaattttgtattgaatatgttcatagatcttcgattcagtcccaggcgttagcagactttattgctgactggacgccaggggctcatgaggaagaaacaaataaagacgccgaagcatggacagtgttttgcgatgggtcctggggaaccttccgagcgggagcggctgctgtgttggttcaccttcc

SEQ ID NO: 62918 - DNA, 433 bp, Zea mays
  unsure (1)..(433): unsure at all n locations
ntgcatctccttaggaacgactttgaagcttcttcaccttttaattaggtggcatttaagctctgcatccccttaggaacgactttggagcttcttcaccctttacttaggtggcatttaagctctgcattcccttaggaacgactttggagcttcatgacttactctgcatttcttttggaacgactttggagatttgtgagcagttattgttacacttgatggtgtatccacagtcttattagatcagactgaaggttaaaccttcttgtattgtctttttggagaaaaatgtaaatacaaaaagtgagtaagaatacattggattaaaacactctttggtgtaagtgttgcaccaccttcagtagatatgactcgactcgggcacaagtgttgtgactgtgcgagcttcgaactcctcctgaaggtcacg

SEQ ID NO: 62919 - DNA, 447 bp, Zea mays
  unsure (1)..(447): unsure at all n locations
tcgganaccctatacttctagccatctcccggcatacagattattctttgttgtccgggaggcaatataaaaagtcatcttcgtccgtgccatgaatactaaggctcccttcggatacttcaattcccgggcatagtgattagcctcaaaaatctcttcttcagataatctttttccagaagcatgtcgtataatataattgagggcctctgaggatgcttcgggggcagcattgttagtttcttcaaccaaaattggctctgtcctttttggtttttcggcttccaggggatttatcttcgtaggttctgaaggcccagcttcagcttcaggttgttgctgcgaagttcaacagcaagggtttaccaggcactgcaggaatttcatagttttctttggtgttatgcttgaagattaatcgtctccaaacatctagcacataaccat

SEQ ID NO: 62920 - DNA, 460 bp, Zea mays
  unsure (1)..(460): unsure at all n locations
tagcccgtgcgttntccaactggtatgggctcaccggagtccctgctccgccgtccagggtcgggggtctcgacttgtgaagaattagaaaaggggagggtctgtttgcgattgtcagtggcacagagaaatagtgttgcggacactttaagggttttttaaatcgccagggtcttctgtgcaaatctgacgccacaggcgcacgcgggcgcgctttcgcctgtgcgtgggccaacttaggctagtttcagcccattactgtttatgttttttctttttctttttctgccagacttaggaaatccatagaaaattatagaaaaatgataaaaaaaatgagaaccaatttgttggactcctaaatntctctagtatttaaataaaatagttcccagaattttagtcgcaataacgaattatgtagtatttaagaagaccaaaacctagtctttttgaaatt

SEQ ID NO: 62921 - DNA, 449 bp, Zea mays
  unsure (1)..(449): unsure at all n locations
tcggcgtgacagcagaaagcggaaccgacctaattatgataaggctatttagacctcaacagattactatagaattattatcaaatgcaaagggcatgaatgtaattttgtatgggttgtgtctcgcgcctataaataggtgaacagtactctcgtactgttcacgctgacttggcattcactttttgcgtcacgcttgtactatcatttccttccagtcgaaggtacacttgtaattcaacgatattcctgtttatgcttaataataatgcataattgtgcatgttgttatttgtatttcttacatttcatccttcgtcattatataatgaatctatgaaggtatctccttcatgaccttcgtcctanaactattataccctaagggaaataatgcttcgaaggacgaaggactttaacaattaacatcttctgtgttgccttgttct

SEQ ID NO: 62922 - DNA, 421 bp, Zea mays
  unsure (1)..(421): unsure at all n locations
nttctgcacatagcttcgtgatcgtttcatccttcgtcatgatcgtcttccatttcagtcaagcttcgtcttgaccatggtcttgtatacccgcaacctgattccgaagatacctgctcgcatatttggaaaacattgtcaaattatgtttttgaggaccttcggaaaaccgaaggaccccaacagcagccgcgcctgcccccgcatggcaccatgcgccgtcacagtggattgtccacaccttctctgagggctcttattgctgtcgtgctggccctgtccagtcgacgatgaaatctgcaaggacttgcgacttgattgtggtcctgagctcgaaggtgatgtggtattcggagagttcggctgcccatttggcgatacagacggacgccttcggatatctaaatattcgccgagtccc

SEQ ID NO: 62923 - DNA, 333 bp, Zea mays
ttctcaacatttcttggtgcttaataaacatactttaatttttataattggctcaagtcaaaattttaaacttttcataccctttttcttattttctttaatttttgctcatggggctcacttagggtttttattaggggtgcacattcttatctttttaaaagactcaattgttttgatcatgatacttttaagtatatacttggtgaattctttcttacttatattaatttgatgctcatgcttactttgattcacataaaataatggttcttgggttggtatttgagagaaaccctatgtgacactgtggtgtcacagccttcccccctt

SEQ ID NO: 62924 - DNA, 109 bp, Zea mays
tgtgtggagatgtgagaggattcgatctcttttgtgtgtcttgtcttgaaggctatagctcttgtaaggtgtagaagtgtagaaacttggatgccattgaatgtggggt

SEQ ID NO: 62925 - DNA, 449 bp, Zea mays
  unsure (1)..(449): unsure at all n locations
tattatatatgtgtgaaaatgagcactgtgattttctgtctcgccggccaacactttcacgttgcaccacctccctctcgaatcatgcaatggaattgagcaaaaggggtcaactcagttacaccgactacgtactcttcagtagcaggtcacatggcgacaaagagctcagttgtacgtatacacatgatgtgtgtaggtattcatccacatatatacaaacaagatgaggaaagcacatgcgacgaacttaactggagccactggcatcggtgtctttccatgccgtanactnttcatagaacatgtagtgtaatctgttgaaaactgcaaccatgcgatgtgtaatccacgatgagccatntnttaaaatgtgtggtagtgcgcttccagtctttgcgcagatgattctcaatttataaaaaagaagaagctgtctttgtgtgtac

SEQ ID NO: 62926 - DNA, 421 bp, Zea mays
  unsure (1)..(421): unsure at all n locations
tcctatccagggtcctatntgcaaaacacttaaacaatatatcttgtttgaaattnttgcctagtgaatgcattctaggtgtgtcaaacatatgcaatgccaatgcttatgatgccatgctcaagttttagttatagtaacaccaggggtgttacatccttccccccataaaagaatctcgtcccgagattaaaagtcctagggtaagtaatggaaaaggaaacgcgaaatacttttatttccttatttctggtacaaggcaggggtgatgtgggggtcacttctttattacatagctatacagactttacaatntacaagaggctaaaaagcctgngaaattcttatctaaaaagtcttgagtttcccatgtagcctcatcttcagaatgctggttccactgtatcttatanaacttgag

SEQ ID NO: 62927 - DNA, 461 bp, Zea mays
  unsure (1)..(461): unsure at all n locations
tgtgaaggttcttcatccncacatgtgctaagcggcgatgtccttccagcccatgctagtcttagctattaagcatgcatctagaccggcctcctcttttgcaaaatcaactaagtaaagtttgccgtctaatacacccttaaaagctagtgaaccatcacttcttctaaagacagacacatctacatttgtaaaaacacaattatatcccatattgcataattgactaacagatagcaaattatatccaagagactctactaaaaacacattagatatagagtgctcatttgagattgcaattttacctaacccttttaccttgccttgattcccatcaccgaatattattgaatcttgggaatctttattcttgacgtaggaggtgaacatcttcttctcccccgtcatatggttggtgcatccgctgtcgataatccagcttgaaccccggatgcata

SEQ ID NO: 62928 - DNA, 463 bp, Zea mays
  unsure (1)..(463): unsure at all n locations
tctttcagttattaatcttgttgcagtagtctatacacactctatatattaattatattctgattatgctatttcagtaccgtgctttttacttcacaagaaaaggttggccgaggtccctgctctagcgcaaggatttctactgcaacgattgcaacacacacaggtaagagacgttctatgctcctctcctctctacttcctgttgcttcangttttgcccagatggatgcatattatgtatttgaattggatcatgagcgattcaaattttaagtattgttagtaagtctctctaatattgtacgcttatgggctcttattttgcgcaacaaagcaaagaacagtggagcaaggtccttaattatcgttgcacgttggagatggattcaattgtgcgacatatcttaacccaagtcagaaggcaatgaccaccatttatttcttttctttccctaacaaa

SEQ ID NO: 62929 - DNA, 380 bp, Zea mays
  unsure (1)..(380): unsure at all n locations
ntatcaaggagacaagtagacaggcaaaggtgtaatatattaatgtatatattgcgcaagggtggcaatacaatggcacgaaagcaaaagtataagaattcaatagggagaaagcattatcgaggagaaaagtagagaggcaaaagtttaatatatcaaggtggatattgcacaagggtggcaatacaatggcaagacaacaaaagtataagaagtcaagggttatatagcaatattagggattagaaaaccacttataatataatataatatcgccattaccgatctagtcgaaaatcttaatactaaagaactatcctatcaacctacccaagaagaatggtaatagatccaagagatctataacgagaacttcttgc

SEQ ID NO: 62930 - DNA, 278 bp, Zea mays
tcatgaacggcacccttcggcatcacgtacagacaactttatcctattctgtttcttcttgcaggaccttcggcgacgaagcatggtcccaatagttctgttacaccaaccgccagtggaaacatcctatttccactggcggttgtgttaagataaccgctagtggaaataggtttccactggcggtttttcaagccaaccgccagtgaagtgtctgttataaatacccctcttctttcctccgacagtgaactgtatgctcgcatccaacttccatt

SEQ ID NO: 62931 - DNA, 281 bp, Zea mays
actagctcgcttggtaatttggtgcgacagttttttctttgatgtgggactcacacctacctgctgttaatatgctgcacgtaagaagtgaacgtatattttacaccaacaacagtcgttgacccctgacggtgggtcgaaaatgaaaaggtacctcattggggaccgccccgctggaaactgatcgtctcgctacactcaggaaggttttggacttcattccgagcctaagatttttacggtaagctcgtacaaaacacttccccgaagggtctgtggac

SEQ ID NO: 62932 - DNA, 423 bp, Zea mays
  unsure (1)..(423): unsure at all n locations
tgaagctgggttaagcgccatgacgatagaggatctcgtttacagcctcgcgtacaacagcctgaaggtactggagttaaacacttgagaaaaaaccccatatctttcttttttacgcagctcattccttctttcttatatgaattcttttttcatatagggcctgatcctaagcaacgcgttaagagcgcaacagagcgccgaagatgaaagttatgaaattgcgtttaataatttacgctccgaagttatcaaactgagaaacgaagctntggaaaaagataaaattctacttacactggtagataaagtgaaaaaagacgaagctgcttcaaaggcccatgccgaagctcaagaacgcgagaataaagatcttcagaaacagctggctagagctaaagaggagcgcgcgcttgatgaaac

SEQ ID NO: 62933 - DNA, 444 bp, Zea mays
  unsure (1)..(444): unsure at all n locations
tctaaatntcagattcgccctattcacccgccctcttgttattttcaattggtatccgagcccggtacttcattagagcctaaccgctcgaagtgatgtcggtagatcatgccaagaaggagatgatgaccggcgagaagcccgccacaagccacgggaaggctccatcaagggagttcggcaacaaaaagaaggagagatccccctcacgcattatgacgcacaagagtggcgagaagaagaagataatgaagaaagtggtctactacgagaccgactcttcatcgccctctacatcgggatccgacgccgcgtctatcactactaagcgcccagagcgcaagaagttagtaagacccncttacgctatcctcgcattcctaaacatactccattacttttcgtccattacgcaaaccaccgacatttgactgtgaagattat

SEQ ID NO: 62934 - DNA, 391 bp, Zea mays
tgcattgcatgtttaaattccttgtattgcatctatgacttgtctaacctagttgagataaccgcccacaaagcgagtgaaaaagcttaactcgggtcaaacctgacaagtcttagttttaagcttttagcacttaaattcttactttttatgcaattattggttcttgaaatatgcatgaggtactgcacttatggggagtattcaaaactcaaatcactcatgaaaacccctagtgcaaaccaaaatgcaaatttcatcatttgcctattttctctaaaaattatctagcctatggcgagataatttgaaaagtatatgagggtgccaatacctgtcacaacaagtgttattttgtgtgattataagttgggatttggtttggttggga

SEQ ID NO: 62935 - DNA, 410 bp, Zea mays
tagcttcatttggagaaatttctcgcacatcacatttctatgtaagcgcacgactacttccattaattcaacaactagcaatatgctgccctaactctgaaaaaatgttgctgctatctatctgacatatgcacgacctggatggaggtatccatcatgcttttagtcaaccgcgcccgcaagcgcaagaggcaggtaccataccatttatgcacagcacaggaacgctcaagtttgcaggccagctaaacaccccgcacccggggttctgctagctacattgacgaatgaaccacgcttgcttctttgctagaaatcgcaactgcagccatacacaaccggcccatggaagatgccaagcacatgatataacccaattaatcacggtacaacttaaaggagaatttctc

SEQ ID NO: 62936 - DNA, 403 bp, Zea mays
tgactcaggtatccacacattaatccttaattctatttttcatctcatggacaaggcatcctccctggatccaagtccatagactaacatagatcccgttatcaagatgaatacagtcaatttctgacctcgcgcgagtgctagaaaaattactcgacttctaccaagatcatgattagcaaagcagctactcgacctagcatactagtatccatctcaaaaaggaatcctaagttcatgcaaatagaggtttcaagcaactcctacacttaagtgcacattacaaccctacaaacattatgtgtagtaaagtagcatatatagatacgggtatgcataaaaccggcgctagccttcaatagctggtgctgtggggagatcctcgatggcactcttgggagct

SEQ ID NO: 62937 - DNA, 447 bp, Zea mays
  unsure (1)..(447): unsure at all n locations
tcgcaagatgtcagatgaaaagatagataccgccaaggctgaggtgcatcgcctcctggaggctaaattcatcgagccggtggcttaccccacgtggctctccaatgttgtgatggtgcagaagaaaagcggaaaatggcgcatgtgcatagacttcaccagtctcaataagtcctgcccaaaggacaatttcccgttgccacggatcgacaaaatagtcgatagcgcggccggatgcgaggtcatgtccctcctcgactgcttctccggctatcaccagatatacatgaaggaggaagacaaggccagcaccagctttataacacccttcggcacttattgctttgtcagaatgccggagggtctcaagaatgccgggtccaccttctccagactcaccaaaacggtgctcgaagggcangtcggcagaaatgtattcacatatgt

SEQ ID NO: 62938 - DNA, 468 bp, Zea mays
acgcacctataaaactcagcttacacctctgaactagctcggctgcatcattctttgctgttggccaatagaatcctgacctgaagaccttcccgactagtgttctggaggctgcatgtattccacattgccctgcatggacctcctccagaagttgcttcccagtggacgggagaatgcacttcatgagaacacctgatgcaccccttctgtataatatctccccaatgagtgtgtagtgagccgactgtctggcaatgcgctctgccgagttcttgtcgtctggttcttcttcgttctttatgtacttaatgatcggcctcctccagtcatcagagtctgacttgggttgatctacgatgttgcactcttctgtttgatctattgagatactcggccgtgtaatttcttgcacgaaaactccgggtgggacctgagttcgaccggatccgagcttggatagtatat

SEQ ID NO: 62939 - DNA, 459 bp, Zea mays
  unsure (1)..(459): unsure at all n locations
ntataggtgatagcttctacgctgcttcggataggatctgtctttgtgatctctttctttaggatcttcagctacgaagcatacccccaacaaggttattcacaagtcgaaggtttggattttgatgaaacctatgcacccgtagctaggcttgagtcaattcgtatattacttgcctatgctacttaccatggctttaagttatatcaaatggacgtgaagagtgccttcctcaatggtcctatcaaggaagaggtatatgttgagcaacctcccgactttgaagatagtgagtatactaaccatgtttataagctctcaaaggcgctttatgggctcaagcaagccccaagagcatggtatgaatgcctgcgagatttccttatcactaatgacttctaagttggtaaagttgaccctactctcttcactaaaacaattgctaaagacttgttatat

SEQ ID NO: 62940 - DNA, 452 bp, Zea mays
  unsure (1)..(452): unsure at all n locations
ntaactgattcagagttccttggtggaccattcccaggtttagcttctccatctcttgacataaagggttgtcagaggtcttcaccgtaagacagtgacaggaaaccttacggcttagtgcatctgccacaacattggctttgcctgtgtgataatgaatttccagttcatagtccttaataagctcaagccatcgcctctgcctcatattcaattatgactgggtgaagatatacttcaagcttttatgatatgtataaatgtgacagatatttcccagcagatagtgacgccaaatattcagggcatgaaccacagcagctagctccagatcatgagttgggtaatgctcctcatgtcgacgcaactgccttgaagcatatgcaattactcggccttcttgcattagcacgcaaccgagtccactggctgatgcatcacaatatacatca

SEQ ID NO: 62941 - DNA, 261 bp, Zea mays
gcttaatgctcccagaaatggcctaatatgctcaacggtcacgctcctatggctcaggacaacgatggctgtatattatatcctgctgggtatcccgcgcgtaaaattcagagaattcatgctcggaaacctcctaatgttacgcatcctgctcttatgcataaaactgaggcttctatctctagacaatcaaccgatgttaaactgcgtagaatagtactcctactgcgtcacatgaccctactgtatcatttaagactt

SEQ ID NO: 62942 - DNA, 412 bp, Zea mays
gttctaagggagagcacattgtgtgactaacagatgttatttttatgaaagacagggtttgtagtgcatgccaagcatgaaagcaagttggaacccatcatccacacaaaaacatcatgacaacggaaaggccactggagttactccacatggatttattcagcccgatagcttacataagcatcgacaggagtaagtactgtcttgtaattgtggatgattatcctcgcttcacttgggtgttctttttacaggaaaaatcacaaacccaagagactttatagggattcttgagacgggctcaaaatgagttcggattaagaatcaagaagataagaagcgacaatgggacggagttcaagaactcacacatagaagcctttctgaggaggagggcatcaagcatgagttc

SEQ ID NO: 62943 - DNA, 455 bp, Zea mays
  unsure (1)..(455): unsure at all n locations
tcggtatccttgcttgtcccttcttcgtgagcccttggctttcagtcttcaatgaaatctgctagcacctgagattgaattgaagatctatgcacgtaatcaatggtgaattcattgagctccgcggcccactttccaacccttccagtagcttctctgttcctcataatatcctttagaggctgtgacgaaggaacaattatatggtaagcctggagataatgccgaagctttctggaagccattaacacatcatacagcactttctccaactctgtgtaatatttctttgacaagctcaacacttcggagacaaaatatactgggacttgctntttactttgtccttcaagcttctcctgtacaagtgccgcactcactgcagagtgcgaagctgccacatacaacagcagaggagcccctggcgtgggtggagttagcgtcgttaggtctat

SEQ ID NO: 62944 - DNA, 357 bp, Zea mays
  unsure (1)..(357): unsure at all n locations
tcatcagcaatttcttttcctttctttgacgctgtgatcacngcttcttcggcagcagtggtagcctcttctgcagccatgtctagcagcatttggtcaatatgttcaattgtgctctccaaattcaagtcttcagctgaggcagcttcggcagctgctgcctccgaaggtgcaatttcaatatttgcctcctctgcagccgctcgtgttttttgggccgaagctcttggcggcgttttgtcaattacctctgttacggtaatgattctttggttctttgctttgattgttttccttgatctctcgggctccttgttcttctgaaaaaactttgtcagttcaggacccagtggactt

SEQ ID NO: 62945 - DNA, 455 bp, Zea mays
tgacgttgccgatgacgggatcgacaacgagcgggtactttctctggctctgcacgcggtcagggtggtcgccctggtcgaaggtgatgggcttgtcagaccagtctaggtagactggcgccgtcaccttcaccaagcagacctcccggcgctcttgcttgcggtgccgagccgaggcgttcgccacttgcccaccgtagatcatgaagcagtcatggacctcggggaactcttctgccttgtggccctccttcttgtcgttgtcgcggactctgccaccttccgccggtggcccggccttgtggaagtagcgccgaagcatgacacactcctcaagggtgttggtgacgagaccctgatgataggggcacgactccttgagcatcttgtcgaacaagttggcgcctccgggaggcttccaagggttcctgtgttcggcggcggcaacaaagtct

SEQ ID NO: 62946 - DNA, 231 bp, Zea mays
gtaacaggattcagttcagctttattgagaacaactaaagatagctgaccctctaatacctacttaatcgctaccgaatcatcacttcttctaaagacaataacgcctatattcgtgaaaagacaattggtgcccattttgcatgagtgagaaactgatagcaagttgtaatctaaagaacttacacgaaatacattggaatggaatggacatgaaaataacaaatttgcc

SEQ ID NO: 62947 - DNA, 447 bp, Zea mays
  unsure (1)..(447): unsure at all n locations
tgtgaaggttcttcatcctcacatgtgctaagcggcgatgccacagccagcccatgctagtcttagctattaagcatgcatctagaccggcctcttcttttgcaaaatcaactaaataaagtttgccgtctaatacacccttataagctaatgaaccatcgcttcttctaaagacagacacatctatatttgtaaatagacaattatatcccatatgacataattgactcacagatagcagattgtatccaagactctctactaaaaatacattagagatagaatgctcattagaaatcgcaattttacctaaaccttttaccttgccttgattcccatcaccgaatacaattgaatcttgtgaatctntattcttgacgtaggaggtgaacatcttcttctccncgtcatatggtttgtgcatccgctgtcgataatccagcttga

SEQ ID NO: 62948 - DNA, 465 bp, Zea mays
  unsure (1)..(465): unsure at all n locations
tgtgaagattcttcatccgaacatgggctagtcggcggtgccagagccaacccatgttagtcttagcaattaagcaagtatcgagttcagctctattaaaatcaactaagtatagctgaccctcgagtactcccttaaatgctactgaatcatcacttcttctaaagacagtaacaccaatatccgtaaaaagacaattgtagcccattttgcataattgagaaactgaaagcaagttataatctaaagaatctacaagaaagacattggaaatagagtggtcaggtgatatagcaattttactaagtcctttgaccaaaccttgatttccatccccgaatgtgatagctctttgggggtcatggtttttctcataggaggagaacatccttttctcccctgtcatgtggtttgtgcacccgctatcaatgatccaactngagctcccggatgcataaacctaca

SEQ ID NO: 62949 - DNA, 488 bp, Zea mays
  unsure (1)..(488): unsure at all n locations
attacggacctatgaaactaagcttgtactaatttgatggtttattaggtgtagctcataattctagaaccaacatagcctgcactcacatgtcatagaaaataggagtatccaagcacaatttgtgtgagcatacatgacacaaattatatatagactgatataattaattccttgaaaaaagaaaaaggaaacaataaaatgttttttgatattgcaggatatctcctttagctaatgaggagtactaaaaagatgttgcacttttgggtggcgagaattcgtcaatcataactttgacataattttaatccggatcacatatatatcatcatatattaattattaaattaatatggttccatcatcgtattattaattcaatccgatataaccatcagatcttaattattaaattaatctggagcgtacattatattatcaaaccanatcaacccgacataaccatctaatggtccgctatgcac

SEQ ID NO: 62950 - DNA, 301 bp, Zea mays
  unsure (1)..(301): unsure at all n locations
cttgaagcgtcgattggttgtctacttggtgtagactccttcttcttctcctncgtcgccttgaaagccaccggttgagcttcggacgtggagggatcatctagctcgttgatcttctttgagcccttgatcatacattcaaagctcacaaaattcccgataacttcctcgggggtcattagtgtatatctaggattaccacgaattaattgaacttgagtggggttaaagaagatgaatgatctaagaataaccttaaccacctcgtggtcatcccaatttttgcttccgaggtagcgca

SEQ ID NO: 62951 - DNA, 407 bp, Zea mays
  unsure (1)..(407): unsure at all n locations
ntggaaaaaataaaattctgcttacactagtggataaaattattgtagacgaagctacctctaaggctcaagctgaagcccaaaaacgcgaaattcaggatcttcataaacaactggccagggctaaagaagaaaacatactagaagaaacaaaacgagaacttagtgatcaatgggcaaatcatttggaagtaaatgttgaagagcttcgtgctttcaagaaaagatactatgataaatccatagagtgtgttaagaagataaaatccagcttcgccagcgtcggcgcgttctctagcgaagagaatntcacaaggggaaatccagaaggccctattgaatggatcagtcacgaagctgaggcctttcaagaaatcttgaatagccgcggagaatatgcgcttttt

SEQ ID NO: 62952 - DNA, 337 bp, Zea mays
cataggcaagtacaatgcgaattgtttctatcctagctacggctgcataggtttcaccaaaatctaaaccttcgacttgtgaataccccttggccacaagacgggctttgttccttgtcaccacaccatgctcatcttgcttgttgcggaagacccattcggttcctacaacattttgattacgacgaggaactaaaagccatacctcattcctagcgaagttattgagctgctcttgcatcggcaccacccaatccgaatcttgaaatgcttcctttaccctgtgtggtgcaataaaggaaacaaaagagtaatgctcacataaatgtgcaacacg

SEQ ID NO: 62953 - DNA, 343 bp, Zea mays
  unsure (1)..(343): unsure at all n locations
cctatcccttctacaaatatcaaaggaagcatttagagcatgattaaacgtagagggaccatacataacatatctagtcacatgaacaaaatctttcctaggcacatgattaatagaattcctcctagctacgttnctgccatgcatataggaagaactagaagcaaacatagcataagagacacaagcatcattacaacccctataagtatttctagggtgcctcctatcagggtacataaaagcaaggttcttatgcacactactagccataggagccttccctttctacttggcagagatgggagtcttatgacttgttaagttccttggctacctcttg

SEQ ID NO: 62954 - DNA, 463 bp, Zea mays
  unsure (1)..(463): unsure at all n locations
tatctacgtgacacttgnaatactaagcttctaagggagaacacgtgataggtttgactaacgtgcaattcgaaaaagatagaccttgtgcagcttgtcaagcagagaaacaggtgggaagctctcatcacaccaaaaatgtgatgacaacatcaagacctctggagctgctgcatatggacctcttcggacccgtcgcctatctgagcatatgaggaagtaagtatggtctagttattgttgatgacttttcccgcttctcttgggtgttctttttgcaggataagtctgaaacccaagggaccctcaagcacttcctcaggagagctcaaaatgagtttgagctcaaggtgaagaagataaggagcaacaacgggtccgagttcaagaaccttcaagtggaggagttccttgaggaggaatggatcaagcacgaagtcttcgctccctacacacctctgca

SEQ ID NO: 62955 - DNA, 417 bp, Zea mays
cttgccaaataggacgcataattatacctctgatgtcttctcgtgctgataagtcattcttcacataaaaccattctgtcatccaatccccgggccatctcttccgaaaggttggtacgggacagcttgccccggaccgagaaacgaagctgtagcagccaaagatgttatggtactgttctttgccccaaggctttgtttcatataataattcatgaacattacagaagcttcttgcgtcaggcttcagaccttggctcctcgcggcccacacgaagatatttagccttataattgcctcgggagtaaggtgatgaagatagacttcgaagattttcaacacctccacgacgaagctgctcaaggggaatcgcaatccagctttcataaagcttctgtacaccacaacttcatttt

SEQ ID NO: 62956 - DNA, 452 bp, Zea mays
  unsure (1)..(452): unsure at all n locations
ggacactataaaactcagctttcctcnatacgtcctgtgtcgcgtgtttgtccgttatcaccttaacccttgtcatccctcgatctttaccttgatgcttatcctgtacctgcactttaaagccgcctcttccattccatttcaagagtgatgtcttgcccttctcgatcttgtccgttcccttttcctctgtcgcattgtaagtcctagcttttgctcgatatcacccctagcttcctaatatctagatctttccatgatgcttatcctatacctaccttttgaattatcatcttttccatctcaatttgagaatggtgctttacctatcccgaccttgctttgcattgtcatcctgctcggctacaattcttgctntaggctcatcatttattatgctcatggctctatctggatgacttatcattccactggctttggaggcctaaata

SEQ ID NO: 62957 - DNA, 337 bp, Zea mays
  unsure (1)..(337): unsure at all n locations
tggcatacaactggcaatctcgtagtctttgaagtacttttctcaaatgttcctcatgctcttgctcattntgngaatatataagaatatcatcaatgaacaccactacaacttgtcgaggtagtccactgttcatcacgtacacaaagtaagctgacacattcgtcaattcgaatgacataaccatgaactcatatagtccatacttggtgatgaatgcgatctttggtatgtctgaacgccggattcacagctgatggtaacctgacctcaatctatctttgagaacacactggctactctcaactgatacattaagtcttcaattctgggcagg

SEQ ID NO: 62958 - DNA, 416 bp, Zea mays
  unsure (1)..(416): unsure at all n locations
tcggcaaccaagtgatcaggctcttcaagttccatanagttgaagaccctgagcatctgtttggtgaaggcaagtgtcccttgacccatctatgtcctactcactttataattcactcccgcattacacatttatacctaaggatngactagcttttgttatccatgtccttgtttacctatatgggttggattattattgtttagctatatgctatngctcaactctaatcaatgaacatgatgagatttatcaatgatacgttgtttcccttctttattattgatgttatacttgagtcattcaaggcggctcgagcggattctcgagtgcctcttcgtaaggaacctgttcgttgattgaccgcccggaaaacagtgcaccatgaaggttgaagggatgccttacttaataat

SEQ ID NO: 62959 - DNA, 396 bp, Zea mays
  unsure (1)..(396): unsure at all n locations
ntatcaaatggacgtgaaaagtgccttcctcaatggaccaatcaaggaggaggtctatgttaagcaatctcccggctntgaagatagtgagtaccctaaccatgtctataaactctctatggcgctttatgggctcaagcaagccccaagagcatggtatgaatgcctaagagattatcttatcgctaatggcttcaaagttggaaaagtcgatcctactctctntactaaaacacttacaaatgatttgtttgtatgccaaatttatgttgatgatatcatatttgggtctactaacgaatctacatgtgaagagtttagtaggatcatgactcaaaaattcgagatgtctatgatgggggagttgaagattttctatgattcaagtaagccact

SEQ ID NO: 62960 - DNA, 434 bp, Zea mays
  unsure (1)..(434): unsure at all n locations
tctaaagggagaacacattttaggattaacaaatgttcattntgagaaagacaggatctgtagcgcatgccaggcaggaaagcaagttggagctcatcatccacacaagaacataatgacgaccgacaggccactggagctcctacacatggatctattcggcccgatcgcttacataagcatcggcgggagtaagtactgtctagttattgtggatgattattctcgcttcacttgggtattctttntacaggaaaaatctcaaacccaagagaccttaaagggattcttgagacgggctcaaaatgagttcggcttaaggatcaagaaaataagaagcgacaacgggacggagttcaagaactctcaaattgaaagctntcttgaggaagagggcatcaagcatgagttctcttctccctacactccacaac

SEQ ID NO: 62961 - DNA, 477 bp, Zea mays
  unsure (1)..(477): unsure at all n locations
gacctatgaaactaagcttctaagggagaacacattntanggactaacaaacgttcatttgataaagacanggattgtagcgcatgccaagcaggaaagcaagttggcactcatcatccgcataagaacataatgacgactgacaggccactggagctcctgcacatggatctattcggcccgatcgcttacataagcatcggcgggagtaagtactgtctagttattgtggatgattattctcgcttcacttgggtattctttttacaggaaaaatctcaaacccaagagaccttaaagggattcttgagacgggctcaaaatgagttcggcttaaggatcaagaaaattagaagcgacaacgggacggagttcaagaattctcaaatggaaggcttccttgaggaggagggcatcaagcatgagttctcttctccctacacgccacaataaaatggtgtagtggagaggaagaat

SEQ ID NO: 62962 - DNA, 367 bp, Zea mays
  unsure (1)..(367): unsure at all n locations
tcaagcttctctgctngatgttctagcctcccttaagtctctggctacttgtatacccatttaattgaactagactgccctgaatcaccaagaacacatctggttgttctcggttttcgccatcgtcgcggacagagggattccaggctagaatcatgcaattggtagagggattagggtcgccaggattggaattgggtatcaaacaaaggagaagcctagccattgtgttttccggccagtacaagatcgccggaggtgtgctcgtcacctgtcaccgtcgtggacttggcgcggtaaagaaatataactccgagggccaaactgtgaatgtcagaaagacaatgaatagtgcgcaagggttctt

SEQ ID NO: 62963 - DNA, 465 bp, Zea mays
  unsure (1)..(465): unsure at all n locations
tcagatggcacaaaggataccacatcattatcatctaanaacgtagagtttatgtgaaatattgaatgtgcgaagactaactctattctaagcttatcttattaacatctaaaaagatcatgtcacagtaacaaattgtaccataagtaacaagttcattcaacatacatcaatatttacttgaagttcagtatttgcctctggagctgaaactgccttaggtcgatcacatgttctccgtcttcttggatccatcaccattagctctaccaccagcagctctctgtcttatccatggctcctataatctcgactctcagcaaactactgttagcaaatgaaaaaaactaagaccatgaatgaataaggagaacaaagtgattattttattgctcaagagatctgatacgacccaacaatattctatatagtagtgatgaacctatctgttgttgaaaaaaatgc

SEQ ID NO: 62964 - DNA, 343 bp, Zea mays
  unsure (1)..(343): unsure at all n locations
ngctacatgccttcttctatttctccatatcatgaaccttactggaacactatcccacttaaaaagaatgagggtagatctcttgaatcttggggatttgaactccttgaagtacctcataacaagggtgttacggcgccttcttctgttgttgctgcttgagcacgctacagagaaatgaccaacacagggttgattctgggagaaccttcttcttatcttctcttcactatcttcttttcattgaccctttctttctctttgctctacccactggaggattctatcagaatattaccatcatacacaggaggaaaccgaatatgttgaaccatgtacaaca

SEQ ID NO: 62965 - DNA, 321 bp, Zea mays
  unsure (1)..(321): unsure at all n locations
gacacaaaaactcagctgctaaggagacacgtgatacgttaactaatgtgtntttcgtaaaagatagaccctgtgcagctgggccagcaggcaaacaggtgggaagctctcatcacaccaaaaatgtgatgaccacatcaagaccttcggagatgctttacatggacctcttcggacccgtagcctatctaagtataggaggaagtacagatggtcatgttataaagagacaacatttaccgactcactagggcattctaattgcaagataaatctgaaacccacaggaccctgaagcgctgtctaaggagagctcaaaac

SEQ ID NO: 62966 - DNA, 423 bp, Zea mays
  unsure (1)..(423): unsure at all n locations
ggggctggccttgtcttcctctttcatgtagatctggtggtaaccagagaagcaatcgaggagggacatgacttcacatcctgctgcactatcgactattttgtcgatccatgcaggggaaattgtccttggggcaggccttattgagactggtgaagtcgatacacatgcgccacttgccgcttttcttttgcaccatgaccacgttggtgagccatgtagggtaagcaattgtctcgatgaagttggcttccaataggcggtgcacctcggctttggcggctntggttttctcctcggacattttgcgcagtcgttgctttcttgggcgcatcgaggggtcgatgcccaggccgtgctctatgatgtgtgcggtgactccgaccaggtcgtgggcggaccaagcgaagacatccttgtttt

SEQ ID NO: 62967 - DNA, 410 bp, Zea mays
  unsure (1)..(410): unsure at all n locations
taagaggggttagtaggcccataggggttgaccaacccatatgtgggcccacatccccccaaagattcatgtttatgcaccttcaaacaagtaatgacatatacatgttgtagcaggttatttatccaaaattgccatttctttgcttgttatcttccaaaaagagtgttttgttgaccgttttgactatgcaaagatatgatgaaattacgattaacaagaccacgacactaaagtctatgttcgtcctcaagtaaaggttaaaaagtaagcatgtacataacatcttaagatatacgactatcatgatgattatnttaaaacatttctcatataagtgggatatgtggcacaagctaacatatattctttatgagtngaaaagtggaattcttgaagcaaacttatct

SEQ ID NO: 62968 - DNA, 252 bp, Zea mays
  unsure (1)..(252): unsure at all n locations
ntactcaatagcanactctgtgcaggagcaaccttcattatataacaccttcgctggccaacacacgaaagagtctgggacaagatttttatcttgcaattctaatataagaaactactcacgacatgctgtcgacggtagcggctaatgtctgtcacaagcttctggagaccaattcacttcgctagagtactgataaccctcgctccagtgcagtctacgagacagcctacgctttcgtcgtctaacacc

SEQ ID NO: 62969 - DNA, 356 bp, Zea mays
  unsure (1)..(356): unsure at all n locations
ttaactctcgcgagaccttttctcatttctatctaaccatggtnagcacattatcgtatgtgatactctatgcatatttacttcctatgctctctagtatggcgtactgtttgttccctacattgaatggatggatgtatgtatgcttgcaaccgcatagagaacgattcggtcgaagagcccgaggaactctcatgagaagcccctgagcaacaatcggttggtggaggcaagtgccctttgaactatctctgtgctattcattctttaattcacctcccgcattacacatttatacttaaagattgactagctttggtatccatgtccttgcttacctatttgggtcggattat

SEQ ID NO: 62970 - DNA, 400 bp, Zea mays
  unsure (1)..(400): unsure at all n locations
atatcaaatggacgtgaagagtgccttctctattggacctttcaaggaagaggtctatgtngagcaacctcccggctctgaagacagtgagtatcctaaccatgtctataagctctctaaggcgctttatgggctcaagcaagccccaagagcatggtatgaatgccttagagattttcttattgcacatggattcaaagtcggaaaggccgatcctacactcttcaccaaaactctcgaaaaagacttgtttgtatgccacatttatgttgatgatattatatttgggtctactaacgagtctacatgtgaagaatttagtacgatcatgacacaaaaggtcgagatgtctatgatgggggagttgaaatatttcctaggatttcaagtgaagcaactt

SEQ ID NO: 62971 - DNA, 272 bp, Zea mays
ggcatggtgttctacaaaacaacctctattataaggtacatcataaaaccaaaatggaacgtccattgtttgccggagcttgaagatcacgctacaaagattagtgaataaaaggaccacccacaaatatcttcaccaaatacggctttaaaagaccgcaaaaaaaaaacacaaggcctccaaagaacacatgattacagtcattcaccatcaaaatagggtgtagaacatatcaaaagaagagggcgaggtccaattcgcacatcaaaagc

SEQ ID NO: 62972 - DNA, 335 bp, Zea mays
agcttgtgaacagtacatatacacaaaggagatatcttctttagcagatcagccgaagcccatgctcttatgtgaagacatagcagagcacaatgtgctgctgggctctcaattatccgaagaacaggagaaaaccttgataacgcgtttgttcaacaacaaagatgtttttgcatggtcagccaatgatctctgctgagctaataaggatgttattgaacactcgctcaatgctgacccatccttcaaacccagaaagtatacgctttggaacatgtctgatgataaagtcgaaagtgctcgttatgaagctcaaagactcctccgtgcatgag

SEQ ID NO: 62973 - DNA, 407 bp, Zea mays
agcctgcatgtctctagaaagttgaatatatcttattactatttagagattaaatggctatgcgcatgatgagtttaattaacatccatcggtgtcactggtgttaaagtgaggtttatttgcgcgtggaaagtcataatgtgattaatacttacaactcttaattgatagtacaaattgttttaacttatataaagaggtggtgacatgccaaagtagtcatcgctttctctatatcttgagtacgagcaatacgctttatgtgttcatgaattgagaagtaagcacatgatggtcttgagttatagattattggtttacagctcgtatgaattggtcaatgtgtgaaaatacatgtgaatatgtatgtttatataacatgttgtggtatatgctgcgcctccgat

SEQ ID NO: 62974 - DNA, 461 bp, Zea mays
  unsure (1)..(461): unsure at all n locations
agctctagtagtcttcacattctttgntgtatgctataatgtaatgttggattgaaatgcacgaaccaacaactaattctagagaggaggaagacaatgaggaggactatagccttgacatggaggatgatttctctctaagcctatcttcagaggatggtgggagccaatgtgaatatgaggttcaagtggcacaagttcataatgcaaagagaggagtcaaaagggcaaagggtgatgttccattatctccttcanagtgtaaggtcaagaaggcgaagcgagccgattgctagaagtattttaaggtggtcgaagttcaatcaaagaagaagtttgngaaatggtgatgaatgccaagtgcatgttttgtacaaaatatatgtgtatcaacctgngggtccaacatcacaactgaatcgacatcttgataagtgcactgctgtgagtaccctgaaact

SEQ ID NO: 62975 - DNA, 468 bp, Zea mays
  unsure (1)..(468): unsure at all n locations
agcttgatagagcgctgtgctctattgactacgatgatatttttcctaatgcaatgttacaaagtgcagcttctgaatactctggtcactgtcctttattattgagcttcatagataacaaagatgttaaaaggcgttttcattttgaattcttctggacaaagattgaaaggtttcttgaaagggtgcaaaatgcttggagttcttgtcctattggccaatggtcatcttccacttttgatttaaaactcaaaggtgggacacaatgagactccgntgcatcttgctagagacttgatccatcagcttgagattgcgcacgaggaagactcgcagcaaggtgcagtactgtgcgtcgaaggccagggggcacgacaccaggttgggccgatggaaacaccgcggctgtaaagatatgacagatgatcgggaatatgccaggaaattctcacatctctcttttttatt

SEQ ID NO: 62976 - DNA, 430 bp, Zea mays
cttcatccccacatgtgcttagcggcgatgccacagccagcccatgctagtcttaacaattaagcatgcatctagaccggcctcctcttttgcaaaatcaactaaataaagtttgccgtctagtccacccttaaaagctagtgaaccatcacatcttctaaagacagacacatctacatttggtaatagaccattatatcctatattacataattgactaacagatagtaaattatattcaagagactcaactaaaaacacattagagatagagtgctcatttgatattgaatcttgcctaacctttaccttggcttggtcccataccgaaatgatgaatctgggaatcttattctgacgaagagtgacatcttctctccccgcatatggttgtgcatcgtgtcgatatcactgacccccgatgctaact

SEQ ID NO: 62977 - DNA, 453 bp, Zea mays
  unsure (1)..(453): unsure at all n locations
ctgcaagctttcttcagagtcccactcccagctaacatgggcatcaccggccttcttcttgnaatatctcttcttcatcttcttttacccctcttgtcgttatccctgtcactatcactaaacaaaggacatttagcgataaaataaccgggcttaccacatttgtagcaaaccttcttggagcggggtttggaatccttcccctcctttgcttgaagaattggcggaagctcttgatgatgagcgccatttcctcgttgtcgagcttggaggcctcgatgggaatcctacttggtgtagaatccttcttttcttcttccgtcgccttgaatgcgacaggttgcacctcggtgttgaagtggaccttgctcgatgatttcttggagcctttatcatcaatcanagctcacaatttcctatactcctcgagacatagttatattaagacacaca

SEQ ID NO: 62978 - DNA, 304 bp, Zea mays
  unsure (1)..(304): unsure at all n locations
agcaagcaaagcgaaaggcgcaagcagcgaaccaaatgtggttggtgcaagatcttatatatatgctcggcgcgccctgagctggaagagcccgcctgtcattgactgttgctattctagcaaagggaaagtgttctttaggaccttcggcttaaaggccttcgccatgtcgcaatctgaattccgtatcttaaacaaattaatactgcgaggggctactggtgggggtcttcgtcctccgaaagcactcanaaacgtaatttaacagtgtttaccaagcatgcgttatagacaggtaccttca

SEQ ID NO: 62979 - DNA, 326 bp, Zea mays
  unsure (1)..(326): unsure at all n locations
agcttattgaanatactcaagagagatgttatttgctcaagggagtatatgatgaaagatgattattntagataattaacatacatgattcatcatccacaagtcacacagacaagaagtaaaatccttaacatttgtgcttattactaaaaggaatatgcactcatttaactattgatcaaacataggattgtgcttcttcatattgaatcttattaattattacttaaaagcaagtcaatatgagaacatttatagcacaggtatgaaatagaatctaatggataagtgcatttatgagaatgtgattgaatgcacatcaagac

SEQ ID NO: 62980 - DNA, 328 bp, Zea mays
aatattattaacatgtccacaaatggaatacaatcgcatgttcaccaatgcaaggaacatatgtgtgatttcattgcgacaatctgttatcacaacacagatatcaacaacaagaacaacaatgccttctatcccaagcaagttgggatacgctagagctaaaaacctaatagaacccacagaaatagctcttcagcctggcacaagctggaatataatgcttaatcacaaattgtaaccatacaattgtctggcattgacatgcatatacatataagaataccctcaaatctaagaatagagatcacacgaacaatcctagcactat

SEQ ID NO: 62981 - DNA, 461 bp, Zea mays
  unsure (1)..(461): unsure at all n locations
agcttcgactccatctatgttatggatagccttttaatcncgccaactcccttcagccctcctgatagcttcttgactcccatgaacaacaataagcccttgttccgaaagtatgttcatgcataagtatgctggatggagtattgcttcaaaggcattaagtgtccctcgaccaatgattgcattgtatgggtactccatgtcaacaatgtcaaagacaacttgttcagtttttgtgttgttgacataaccgaaggtaactgacattgttattttgcaagtgccacaatctgtcttcctccgaagccacanagagggtgtgttgcatcatgtatnctgtcttctggctcttgcatctgtctgaaagcctttgcaaagatgatgtccgctgcactacctgtgtcaaccagaaacatatggaccagaaaatccttgatgacataagatataaccatggcatc

SEQ ID NO: 62982 - DNA, 343 bp, Zea mays
  unsure (1)..(343): unsure at all n locations
agctntggctgtcttatgcggttagcaaatataaatttaattcctaaatttaacttggtcaaaaagtctaagtgccatgtgtgtgttgaatcaaaacaaccccgcaagcctcacaaagctgctgaggcgaggagtttggcacctctagaancttgtcattctgatctgtgcgaaatgaatggaattntgaccaaaggtggtaaaagatactttctcacttttatagatgactccactagaatntgttatgtgtatctcttaaaaacaaaagatgaagccgtcaattattttaaggcctataaagctgaagttgagaactaacttgagaggaatataaaacgtt

SEQ ID NO: 62983 - DNA, 349 bp, Zea mays
  unsure (1)..(349): unsure at all n locations
gcactgaaattctatgggaagatcattgtacattctacgaagtgaacggatctgcacggtacgggttgggtcattgcctcctaagcgcacactttcgtttntatttgaaaaaagctacaacaaacatataggaaatattttgatttttaaggagtacttttgatatctatctatctatctaaaaaataaaatacccttgtaactacaacaaataaagcatggaatcttgtgatgacatccttctaatctctactacttaataaggcgcgaagggataagttgtcattcccgattctggtattcccattccgctctatcattccagattctggcattcccattccgccct

SEQ ID NO: 62984 - DNA, 384 bp, Zea mays
  unsure (1)..(384): unsure at all n locations
agcttatganattatctacaacttcttttaccaacccacagtttaattctggtgataaaatctcctaaatcttaagagaacagattctgcacagaattatgagactgaaaaactgctatagtaaaactgcaataactttctggtcggatgtccgattgaggtgttcttcgcggccacggaaagatctacaaatcatctacgactcatacatagacttttcanttttttgaggccactaagaccacggaaaactggcatgaacagaaactgtcgaatctgccattctgcagaanactaaattcgggatcaaaacctaaccccacatcanatccaacctctaatccttcaattcccatgatccacaacctccanaagcctataatt

SEQ ID NO: 62985 - DNA, 233 bp, Zea mays
  unsure (1)..(233): unsure at all n locations
agcttcgtccggctgcgcccttangcaattgttgcacggatagtcttcgcggaagacttcgatatttcgcacttgttgtgctagtccggctgcacccttaagcgacttctgcacggatagtcttcacggacgaccacgatttttcgcacttgttgtgctagtccggctgcacccttangcgacttctgcacggatagtcttcgcggaagacttcgatttttcgcacttgttgt

SEQ ID NO: 62986 - DNA, 381 bp, Zea mays
agcttcaacataatgaccgacaaagttcttcatctccatattggcaagaatgtgctgacatatgtcaatgatatcatagtcaaaagcacaaagcaagaaaaccatgttgctgatttgcaagaaacatttgctaatttcagacaagcaggtctcaagctaaatctataaaattgtgtcttcggagtgaaaaagagcaagtttcttggttgcctggtatcaacaaaaggcatcgaagctaacccaagcaagatcgaagctatccttcggatggagccaccaaattcaaaagaggaggctcaacggttagcaagaaagatggcatcgttaaacagattcatttcaagatcagcagagagaaatatacctttatttgaaatacta

SEQ ID NO: 62987 - DNA, 358 bp, Zea mays
  unsure (1)..(358): unsure at all n locations
agctcgngcccgagctgacatgttatgcgacctatcctgttttataaaagcattaatgactctgttggaggatgaagaggaagaaatggtcacatgattcaactctttagtatgttcttatattntggttatcgaatctgattattgatttaaccatttattctatttgttgtttgccacgatgaacatgattctactatcattgattaaaaaaatttaaacacagctactatagcgctagctcaagtgctcaacactacactcggatcggatcagaatcaaaaggcataaggtntaaggctcaaagcagacatgtatttgtcttcatgttgagacatgtagacatgtatttttgtca

SEQ ID NO: 62988 - DNA, 383 bp, Zea mays
gcttagcccgagatacattggatcattctctatcttggcctgaggtggcagcttggcttatcgcttgcaatatccggattccatggcaagggtacacccggtatttcatgtctctatgttgaggaagtttttgcgggatctggaccatcaaatcaagctggaaccgattgctatgcatcaggatctgactctagagtgtcgcccagtgcgtatcttggagtcctcggagcgtgtcatgagaaagagatcaattgagtatgttaaagtcttgtggacttatcaatctgagcgcgaggctatttgggaacttgaagagctgatgccgcagaagtacccccgaactttttgttatgggtgaagttcttttgcttcgctaatctttc

SEQ ID NO: 62989 - DNA, 438 bp, Zea mays
  unsure (1)..(438): unsure at all n locations
agcttgaaacgggaacaaccatggcatgcactatatccttttgaagaaaatatcaaggacttgaggattgccaagaagagggaacaaaagaagaaaatcaataccttcttccaaaagcctcaaccatgcctccatacaaggtaacatccaaagtaatgatcaagccacactttacactaagagaagtaaaaagtgcagtgaatgctntgaaaagggacactcgattaggtcttgtcctcatattaaaaatggcttgattattaacaaagatgataaactctgttttaaatgctcaaagaaaggacacttaattaagtctcgtccctatttaacacaaacaggcatagtggtagaaaataattattaactaaccatgtagcaagcaagaaacaaggaaagaagaaatcttcaagacttgaagatcgcctttgctacata

SEQ ID NO: 62990 - DNA, 269 bp, Zea mays
tgcaagcttctataggagaacacatgatatgtttattctttctgcaattcgaaaaagatagaccttgtgcaacttatcaagcacgttaacaagtgggaggatcacatcacagcaagaatgttatgaccacatcaagacccctggagatgctacatatggacctcttcggacccgtcacctatctaagcataggaagaagtaagtatggtttagttattgtcgatgacttttcccgcttcacttgggagttcttttgcaagataagtctg

SEQ ID NO: 62991 - DNA, 465 bp, Zea mays
  unsure (1)..(465): unsure at all n locations
agccgtatagctgtagaataaaagagtgatttctatatcacccctgccttgnaccagagataaagaaataaaagtatgtcgcgtttccttttccattacttaccctaggacttttagtctcgggacgagattcttttatggggggaaagatgtaacacccctggtgttactgtaactaaaacttgagcatggcatcataagcattggcattgcatatgtttgacacaactagagtgcattcactaggcaaaaatttcaaacaagttgtattgttatagcactttgcacatagaaccctggatagggaacctaaccctaaataggggttaaaggtgtaagacctaacccaagttgtgaataacctaaagctntaagggaaatagtataaaatgtccccaaaataaagatgaatacctttataccatggataccaaaaccataatggaaccctagaaaaccctaaac

SEQ ID NO: 62992 - DNA, 219 bp, Zea mays
ttaagcacctgggctgcagcttacggccttctaagggatctatctaagggcttggatcgagcggaagaaggcgggaaatggtttggccacggtggttgccctcgagcgtctctggcgggtcgtggagaggtcgccggagctaccggcgagctccggggagtttggcgcagtacagtggatgccacggggaagatagccgggcaatggggcgggctatat

SEQ ID NO: 62993 - DNA, 441 bp, Zea mays
  unsure (1)..(441): unsure at all n locations
agcttgtntggtccttgctgagtctaagagatctctttgtttaaagagaaagctcactcggtctaagtgaccgtttgagagagggaaagggttgaaagatacccggtctttgtgaccacctcaacggggactaggttctcaagaactgaacctcgctaaaacaaatcaccgtgtcatccactttatttcttggttgatttgttctcgccctctctttcggactcggttgtaattctaacgctaaccccggcttgtatgttgtgttttaagtaaaaaatntagattccacctattcacccccctctacgttgacttcatgaatgtatcattgtaatatgaatgttgtaatgcttatagagactcgatgaagatataataaattgagtattggcacactacaattattatcttcatctactaggattctttatctcttattat

SEQ ID NO: 62994 - DNA, 355 bp, Zea mays
  unsure (1)..(355): unsure at all n locations
aaatatacttatggatagaactcttcttcttctcaagcatgaaaatgatcctttgttagttcaaatatatgtgaaagatatcatatttggtggttcttctcatgctcttgtttctaagttttcagatactatgagctacgagttatatatgagcatgatgggagagctcaacttctttcttgggatacaaataaagcagacccaagactgtacttttgtgcaccaaggcaaatatacaaaagacgtcctgaagaagtntgacatgagcgaagccaagtctcttttgatgcccatgtccttcacaacggcgctcgattctaggctttgccacacctcacagacatggtgtcaaatg

SEQ ID NO: 62995 - DNA, 398 bp, Zea mays
  unsure (1)..(398): unsure at all n locations
agcttctgactatgtcttacgtcatgtcttgtgtttatttctgaccgacaaagacaaaagagaagctcagttctatgcgcaaaaattgaaatatccaaaaggggcgctgatattcaacggcagcggagaagaagacttcttgtattgtctccctaacagcaaggagatntctgtctgtcgagagatgagcaagagcttcagattcccgacattagaagacgggctttcggtgttgtcaaaagacgagctggccgacagcttatcatacaatagtttataggtgaaaaagaatgagatctttgtattatcttttgaagccaaaacttttcatttgcttaaagcttatagcacacttttttcacggccttatacttagcaatgccctcanggcacaaaaa

SEQ ID NO: 62996 - DNA, 376 bp, Zea mays
  unsure (1)..(376): unsure at all n locations
agcttctaaagggagagcacattntattatatatatatgttcattctgagaaagacaggatctgtaacgcatgctaagcacggaagcaagttggtgctcaccatccacataagaacatcatgacgactgacaagccactggaactcctacacatggacctattccgcccgatagcttacataagcatcagcgggagtaagtactgtctaattattgtggatgattattctcgcttcacttgggtattctctttgcaagaaaaatctcatacccaagaaaccttaaagggaatcttgagacaggctcaaaatgagttcggcttgaagatcaagaacattacaagcgactacgggacagagttcaagaactcacaaat

SEQ ID NO: 62997 - DNA, 415 bp, Zea mays
  unsure (1)..(415): unsure at all n locations
agctctaaggacaatcttcacctaatataaatattattaatgctcaaagcaaaagtatggaacaaatagcttcaactggtagttgatcattattagctcctttcaagtggcattctttcaattagtaataatctattctatggaaagaaaatgtcaatatgaaagttaaattctttttggcttaaatttgtaaattggtgcatattgttaattcactcctccatgtgcattaacctaaaaagaatttaacttatgcctttatgcctcataaatgatgattcgttcgaattcatatctaaagatcaccattcattanatacttccttagactgctaatatctcctttcaaagttctttttcactagtattagaggaaaagagataacaagctaaagaaggaagttctcacaaatga

SEQ ID NO: 62998 - DNA, 142 bp, Zea mays
  unsure (1)..(142): unsure at all n locations
gtgtggagttgggagaagatatgatctcttttgtgtgtcttgnattgaatggtatagctcttgtaaagagtaaaagtgtataaaacctggatgccattgaatgtggggtggctggggtatttatagccccaactaccaaaaa

SEQ ID NO: 62999 - DNA, 329 bp, Zea mays
agcttaaccctgagaagagtgtctttgttgtgtctctaagcatgctcctaaggttcatcgtcttcgagcgaggcatcgaagccaacccggagaagatcgcggccatcaccagcatgggacccatcaaggacttgaaaggggtacagagggtcatgggatgcctcgcggccctgagccgcttcatctcaagcctcggcgaaagaggtctgcctctgtaccgcctcttaaagaaggccgagtgtttcgctaggacccccgaggccgaagaagccctcgacaacctgaaggcgctccttacaaaggcgcctgtcttggtgcccccggcggac

SEQ ID NO: 63000 - DNA, 274 bp, Zea mays
  unsure (1)..(274): unsure at all n locations
agctngaagtacatcttcacccagtcagaattgaatatgatttatatacgatggcttgagcttattaaggactatgaactggaaattcattatcacccacgcaaagccaatgttgtggcagatgcactaagccgcaaagtttcctagcattgtttaacgatgaagacctctgacaacactttatgttaagagatggagaagctaaacctgcgaatggtccaacaaggaactctgaatcagcttaagcttgagtcattcctcttgcaaaggataa

SEQ ID NO: 63001 - DNA, 395 bp, Zea mays
  unsure (1)..(395): unsure at all n locations
agcttatatatntatcttttacatacctctttatggcatgttattgtattgncatcttccatcccatcgccagcattatttttattcaatcctacttcctggtacaaataacatgttactatgcataatttatgttacaaatagtataacacttaaaacatctggaatattattaccttgtcttcctcatcatcactaacatctgttgactcattacatccaatatctggctctaatcggcatagaacgacatcgagctcatccaacacatatatcgccttatcgtacccttgctttgacatacacgcctggcgaactactttcattagttttgtaacaacattntctgtctgtatgaataagtaactccatcctttccctgaaactctatcaat

SEQ ID NO: 63002 - DNA, 279 bp, Zea mays
agcgaccctggaagcgggacgaccgcctctctttcatctgttactgctgctgtggttgttgctactactggtgccccttggggagatcacccctaggtggtggtggcggaaggaccgatggtggatgtggtggtgatggcggcgggcccgatggtggtggtggcggaggactgacgcgcctctgcaagccctatgcctgggagccggcctcttcgggcccaccagcagtcctctgacgcttctagggggttcgaaacaagcgacccgtcggcgcgacgc

SEQ ID NO: 63003 - DNA, 377 bp, Zea mays
  unsure (1)..(377): unsure at all n locations
agctnggcttctatcttgagtgggctcanaacttattctatgatacaacgaaccaactcaaggtgactcaccagcggtcgatgcaatttaacagacatctcgtcgtcttgcggcttggcggcaacaatgaactccggcaaaccattccccctgccagtgcgcgagctcccatagcccccagcattcacccgtgaccaagaattccatgcggattcatagggagatgagcatggcgcgcagcagattccaaggctccctgcacccgcgtctctttctctgtattagccatggcgcagctctagctctccgttctaagggatgaggaggagcacgcaacgatcctggtttatataggagcggacgcagcatcgggcgat

SEQ ID NO: 63004 - DNA, 397 bp, Zea mays
tgcagcttgaagccatggttagtagcatattgccaattatatgaattgactcaagcctagctacgggtgcataggtttcaccaaaatccaaaccttcgacttgtgaataccccttggccacgagtcgagctttgttccttgtcaccacaccatgctcgtcttgcttgttgcggaagacccacttggtttctacaacattctggttatgacgtggaactaaatgccatacctcgttcctcgtgaagttgttgagctcttcttgcatcgccatcacccaatccgaattttgtagtgcttcctataccgtgtgtggctcaatagaggaaacaaaagaataatgctcacaaaaatgtgcaacccgagatcgagtattaccctctatgaatgtcccgaggat

SEQ ID NO: 63005 - DNA, 437 bp, Zea mays
agcttcattcctcagctagataacctttgtcttttgtttgttaaagcgatattataaccttcatctgcagcattcttttgtgctctcaaagcgatgcttattattaaaccctatacggaataagaattactataagaataaaagaatgaatcaaaaattgtaaattcccaaatatacatgtttcacaccttcagactattatatgcaaagctatccgcaagagcgttcttcgtcatagcgcagaagtcagcttcaagctgtggaaaccccatgcttctagccattctccggcagacagataattctctattgcaggacaagcagatacgaagtcatcttcgtctgtcccaatgaacactagtgccctcttctgatattacaattctctagcatagtgaatagcgtcataaatctcttatttagagtaatttcttccc

SEQ ID NO: 63006 - DNA, 301 bp, Zea mays
  unsure (1)..(301): unsure at all n locations
agcttatagccacacaaacttgttnagtgttattctcagtaatgctaagtggctggaaaggagtctcaacaaaacacaataccacaggagatcaatcacagagatgacacagtggtttatcccgtggttcggccaagaccaatgcttgcctactccacgttgtggcgtcccaacggacgaaggttgcaatcaacccctctcaagcggtccaaagacccacttgaataccacggtgggttgcttgctttttctcaatcccgtttgcgaagaatcttcacaacttggagcctctcgcccttac

SEQ ID NO: 63007 - DNA, 332 bp, Zea mays
agcttatatatatacacacgggtatgcttattatcttatatgggtataatattcttggacctgcgagaaacatccaccaaattgagaatcaaacttgtacctgtgcccgcgagtacaaactcacaccctatagaagttttaaccatgggcacgcaaatatgcccaaaggtatccctaattctagtcgcgaccaaacccaacgcgaaattgtgacattggttatttcaatctcctcgcgtctctgcttggtttcatcttggttcgagaaaaaatggggatttgaatgcttcttttacaaaatctcgagtatctgctaaaactcgacacaaaat

SEQ ID NO: 63008 - DNA, 364 bp, Zea mays
  unsure (1)..(364): unsure at all n locations
acgcaataagcgtggagagatggcgagagtatcgtgtaccctccgtggcaagaggctggacggaggtgtatctgtgctctcggttggcgtgaacctgatctggtcttaagaaccccggtggcgagttgacatatgcaagtgttaagtgctacatatgtcgtgtgattggagatccacagctgagtataattgattcggatcgccgtaccttcgcggttatgaagacttggtcactgccctatacgtagaaatccagtaaagataaagggttgttaagaaattggctagtgcaagtcaagtgattgaactatggtagaaagaactctagtngccgggtaattcacttaactngacaaataaaact

SEQ ID NO: 63009 - DNA, 319 bp, Zea mays
agcttctaaagggagaacacgtgataaggttgactaacgtgcaattctaaaaagatagaccttgtgcagcttgtcaagcaggcaaacaagtgggacgagcgcatcacagcaagaatgtgatgaccacatcaagacccctggagctgctacatatggacctcttcagacccgtcgcctatctaagcatagggggaagtaagtatgggttagttattgtggatgacttttcccgcttcacttgggtattctttttgcaagataagtctgaaatccaagggaccctcaagcgctttctaaagagagctcaaaatgagtttga

SEQ ID NO: 63010 - DNA, 286 bp, Zea mays
  unsure (1)..(286): unsure at all n locations
ctcccatggcacatgataacgaacgctatatctcatatcctgctggttatcccgaacataagattacgagaattcatgatagaaaacctcataatggttcacaatattctctcatgtataaaaatgatgcttctagctctagacaatcaacccatgttaaattgcctataaagaacactccaactacatcaaatgaatctaatgtttcatataagacttttgatgcttcttatattttaactaacanatcaagcaaagtatttgcccaatatgttgggggcaaaca

SEQ ID NO: 63011 - DNA, 341 bp, Zea mays
  unsure (1)..(341): unsure at all n locations
agcctccataatctntatagtagcttatttagtatatctttatgtttataantggcctaagccatgaatttatatttttcatggtcttttaccccttttctttatctctacttagatagcttgattaaggttggtgttagggtttcaacgtttccccactttttgaaaatcttgtttgtttggaacacgattctttagatatacacttagtagaattttcattcttaagttaatttgatgcttcatgctctggctcacatgaaatgttgattcttgggttagcactgagagaaaccctatgtgacactggggtgtcacacccgctcaggccctccttcatc

SEQ ID NO: 63012 - DNA, 371 bp, Zea mays
agctttgaagtatttgaaaaggcaagccaaactttactgttttttgccaaatgggttgagtatatcgaaacatttccatacattgtgaaatataagaaagatattgacaatgtggtcgttgatgccttgtctcaaaggaatgtgttgttgaatcaactagaggtaaaacgtttgggtcttgaaaatttgatagaaatgtacaatgatgatcctgaattttagaaccatataatcattgtgaagacggacaaagttgtgaaaacatatatatacatgatagattcctggttacagctaacaaacttagtgtccaaattcttcagttaaatggtttattgttgagtcacatggagcggtctaactagtcattt

SEQ ID NO: 63013 - DNA, 200 bp, Zea mays
tgctcattccgagaaagacaggactcgttgcgcatgtcaagcacggaagctagatgcgtgccatcatccacacaagaacaccatgataactgacaggccactggagctcctacacatggacctattccgcccggtagcttacataagcatcggagggagtaagtacttgctagttattatggaagatcattctcgcttca

SEQ ID NO: 63014 - DNA, 451 bp, Zea mays
  unsure (1)..(451): unsure at all n locations
agcaagcttgtgagtgctcgcctagcatacacatatctatttttgcgtacgacatgaccatatttgtcatgcccaacaaaagtgacatatatatgcttgtaaagatcctggactggtgaagtcactaacttgacaacatactttgaaaagttgattgtagctccaattcaatgcaacaacatcaatctccgtgacgtcttgtcaaggctgctggcaacgaagatatcctttcccttcaaataccttcggttgcctttgtctttgaacaggctaaagcgagcaaacttttagccctgtattgacaaaatatccacaaagttgagtacgtggaacgagaaanactaatctactgctagttgtctcacattggtcaattaggtcctaacctcatagatcatctatccgcttctagcactcanactgcctanagaggtgatggacctgattgact

SEQ ID NO: 63015 - DNA, 347 bp, Zea mays
  unsure (1)..(347): unsure at all n locations
gacctgcagcatgcaagcttctggtagatgaacaaaggccacacaactcttctatttagncgaaagcnaccatgaacaacaatcttcaataataccgaaagttaacacagacggattttcgtccaagaaaaggtctccaccataaatccaagaatgcgttctatggaaaagaaacatatgtggggagaggcgtaccaacctttggtcgaagataaaaggctacacaaccgccattctgtgccgaaaatacgtcatgaacgactcattttcaataatacgcgaatgctaacacctatggattttctaccaagaaatgggctccacaaaacatccaagaatgtgatcta

SEQ ID NO: 63016 - DNA, 242 bp, Zea mays
  unsure (1)..(242): unsure at all n locations
agcttcnnggtcccgacactagaagactggcgctcggttctatcaaaagaagaactanccgacagcgtagcatacaacagcttacaggtgagagaatgagatttctgcgcttataaacaaaaatgttccatttgcttatatcaaggactgcactccttctggagggccttattcttagcaacgccctcaaggcgcaaaaaagtgctgaagacgaaagatgtactatagcccttgaacaaccc

SEQ ID NO: 63017 - DNA, 369 bp, Zea mays
  unsure (1)..(369): unsure at all n locations
agcttcatgtagctgctgccatatatgataagtttattgggtgcctcctgtccgatattatcttctntggaataccatgcaagcacacaatccgagacatgtataactctgccaacactgcactgttataggtggttttgactggtatgaaatgggtcgcctttagtaaacggtccactactacccagatggagtcataaccagctcgagtgcggagcagaccaactataaagtccatccgaatctcatcccatttccactacggaatctacaatggctacaacaatcccgcgggtctctgatgttctgccttgatccttngacaactatcgcatctaggcacatactctgctatctctcttttcatac

SEQ ID NO: 63018 - DNA, 353 bp, Zea mays
  unsure (1)..(353): unsure at all n locations
agcttcttttcgagccaactccgcctctgtttatactgataccgctgcctccggctctggctcatcgcagagcggccgagggttcctttaactaagcaagagaagcctcgggcggcaaggctgaccgagccgaaggactcctacgcctccaggatacggatacctcactcgtcaccttccgcacagggcaactcacacttggttaagcggttcagctagccgacaagcgagtcctattgctcgaaatgaggaaaaaacacggctntaggccaaaatacatagatagtcacgcctcgacagccgcaatgaacagacaccagcactcaaggtgccattacaaacggaactccggt

SEQ ID NO: 63019 - DNA, 345 bp, Zea mays
  unsure (1)..(345): unsure at all n locations
agcttatttcagagtcgagcccaggcctcagttttctgtccgtgcgccatgggcgaacccctcattntcggcccagacgcaaggccgaacagccatgccgcccgtcgccttgcgcctccgtgccgttttccctccgttccgccatgcccttcacccaagacatacatattaccttcggtgtctttccacacgcttggacttagcttatttccggggccatgcncgaacctcgggtttccgcccctgcgccatgggcgaacccctcgttttcggcccanacgcaaggccgaacagccatgccgccccgtcgccatcctgcccttcacccaaggcatacgtcgcagc

SEQ ID NO: 63020 - DNA, 384 bp, Zea mays
  unsure (1)..(384): unsure at all n locations
agcttgtttgatggatgctgtncatcagttaaatttggaatgtaagaattatgccttttaaaatccttttggtgaagtcggagtctatcatgtgtttttaactttttctccgcgacaaaatcttgaacttggagatatggtgttaagtatgtatgtgggttttcagatggcagggagacagcgtcgtggccagaatgagcgcgttccttcaccgtcgccaccgtcttccactctgtaagagctcatggctcatcagaatgagatcttgagacagctggcccagcgtcagccaccacctcagcattatggtggtggagaccatcagcgtcaccctgcggcggctacctattanngagtcctcagcacccagcctccattgttcac

SEQ ID NO: 63021 - DNA, 297 bp, Zea mays
cgctactaggtgatgactcctccgttctctccgtccgatgacctaaaagccattggttgcgcctcggaagtggaaagctcgtcaagctcgttgatcttcttggagcccttaatcatgcattcaaaactcacaaaattcccgatgaccttctcggcggtcattactggatatcttggattaccaccaattaattgaacttgtgtggggttaacgaaaataagagctcttagaataaccttaaccacttccgggtcatccacttttgactctcgaagtgcgcacttggtcaccaaggct

SEQ ID NO: 63022 - DNA, 290 bp, Zea mays
  unsure (1)..(290): unsure at all n locations
atgcttacgtgatggaaaaagcacatcgacgaacacattcctactgatgatgccggcctatcttgctgatgtcactggaccagtactacactacaagagatacaatcatttttgacagtcatttttaacggacacgagccgccgaaaatagagtatttgctgccgaaaataaggtattctcgacggtaaatactctantttttgcaactcatagccgtccaaaaaagtagccgaaattaatgttttatttttggcggccagagctcggccaccgaatatttctgagctta

SEQ ID NO: 63023 - DNA, 355 bp, Zea mays
  unsure (1)..(355): unsure at all n locations
aagtcacctgaggcatgcaagcttcgcagtgcagcctagaggacttacagctngttttgttagattantcattacctttaaaatttttctacttcggcagcataaagcgtcgaaagagcttcctcttctatctcatccatctctggctctagagttgcacgttttctcttcttcgaggtcgccacctctggctcaggactggattgtctctttttaaaagttgtttcgtcttcttttaccattctagcaggctgtttgctcataacactaacaactcttttttctttggccctccggcacccctgtttagtcgttcatagtcagtgtattcaaaagttaaagcgtgcatacccaa

SEQ ID NO: 63024 - DNA, 259 bp, Zea mays
ccgcagcatgcactttaagggaacacatttttgattctatgtcacttgaaaaacaggattgtaccatccaacacgaaagcagtggtgccatcatccacacaaaacatatgataccgacagccgttgactactccacaggactattcacccgatgctacatagcatcgggggagtaatatgtctgaataggatgatattctcgctacttggtgtctttttgcagaaatctcaacccaaaaatttaaagattttgaacagc

SEQ ID NO: 63025 - DNA, 479 bp, Zea mays
  unsure (1)..(479): unsure at all n locations
gacctctaagtcacctgcagcatgcaagctggaagatcttcatccaacatgggctattctgttatgccacagccaacccatattagtcttagcaattaagcaagtatcgagtttaactctattaaaatcaactaagtatagctgaccctctaatactcccttaaatgctactgaataatcacttctaaagacaggaacaccaatatccgtaaaaagacacgtgtaactcatttttcataattgagaaaccgaaagcaaatggtaatctaaagagtctacaagaaaaacattggaaatagaatggtcaggtgatatagcaattttaccaagtccttagaccaaaccttgatttccatccccaaatgtaatagcttgttggagatcctcattnntctcataagaagagaacatcattttctcccctgtcatgtaggttggtgcatccgtatcaattatccaacttgagccctccgatgcat

SEQ ID NO: 63026 - DNA, 243 bp, Zea mays
agaaagacagaccttgtgcatcatgtcaagcaagaaaacaggtgggaagcactcattatagcaagaatgtgatgacgacattaagaccactggagcttcttgaaagggaaatgtgcacttgggccatttctaagtattttggtgattgagtgccaacacaagcggacttatgttaatctctgcaaagtgatggacaaagtgcaaatcaagtaaaaaggtatgtttctaagacttagtacactg

SEQ ID NO: 63027 - DNA, 302 bp, Zea mays
  unsure (1)..(302): unsure at all n locations
agcttcngatctctcgctatactacttttgtctatatgaccagaaatgacttgagagtcagttntaaagatgacccttcttattcccattgcctttaacttccaaagccccaacagaggtgcttcgtattcagcaatattatttgtacaactaaagtcaagctttgctgcataacatgttctgactttagaaggcgcaactagaacagtaatcgctcctgcaccgaaagtttccacgaaccatcgcagaacactgtccaagcttcagcgtctttattaggttcttctttctaagcccctggc

SEQ ID NO: 63028 - DNA, 417 bp, Zea mays
  unsure (1)..(417): unsure at all n locations
gctttgtgcacacatatgaagttcagtccatcttatcacccgcagactcaaagtcggactataagaactaatcaaattctggaagacatgctgtgagcttgcgcattgctagataagtcaagttggaataagaagttaccttatgcagaattctcctataacaatagccactatgctagcttgaagatgttgctggttcaagcactatacggaagaaagtgtagaactccactgctctaagatcaacctcgagaaagacaagtgttcggttccgacattttgctcaaagtcgaagagaanatcaaaatggtccaagagaatctgaagatagcgcagtcaaggcagcatagttatgttgacacaagaagaagagaactaagttttgagtgggagatatgttatctgaaggatacctat

SEQ ID NO: 63029 - DNA, 381 bp, Zea mays
  unsure (1)..(381): unsure at all n locations
agcttaatgcccncaanagattgtctaattttgtttatggcaaagctcccatggctcaagataacgagggttacattntatattctgctggttatcctgagcacaatattaggagaattcatgctaggaagtctcattctgtttcccatcatgcttttatgtacaagaatgaggcatctagctctaggcattctacacatgttaaaatgcctaaaaagaactcctactgcatcaaatgaacttaatgtttcatttaagacttttgatgcatcttatgtgcttactaacaaattaggaaaagtagttgccaaatatgttgggggcaaacacaagggatcaaagacttgtgnttgggtacccaaagtgctttgttctaacgtg

SEQ ID NO: 63030 - DNA, 419 bp, Zea mays
  unsure (1)..(419): unsure at all n locations
gcttctccttctattatttccncttcacatcaatctattctagttctataaaagaannatggatgttgtataagcaagatataaatgggaataaaattagttaaaaatgataaaaaaacatagatgcaaaattaggaaactgcttgattgctagaaatacatgtaggggccttccccaccattcacataaatatgggtaatatgctataaataaacaagaaagctggatttatatatttcaatggaatggtctgcaataacataaaaatgacctttgttggaattcccttccagttgatggagaacaatgttagatatgggaagtaagcttgatcctgtataaagaaatagaaagtacatatgactcttcattgttttacacagacgtaacaaaaaatgtatgctgaataaatacagac

SEQ ID NO: 63031 - DNA, 313 bp, Zea mays
  unsure (1)..(313): unsure at all n locations
ccgcagtacattggtccatttcatattcttgtatgatgtggaccagtggcgtaccgactccaattatctaaaacattgtgtgcagtgcacaatgtgttccatgtatcccaattgaagaagtgtcttctggttccaaatcgaaccattgaagtgacggatgttaccttggaaccagacttaacatattcagaacatcctattctagtcctggatcaaaaggacagggttacctgaagaagaactctcaaattntataagacacaatggaaccaacacactgaagatgaagctacatgggaaacccaaagctttt

SEQ ID NO: 63032 - DNA, 372 bp, Zea mays
taaagagatatagagaagctcctcacttccctctagtactcattggatccccttgcaaggattccttcacaaaagccaagctcctagttgggtaactctatggatagcctctaagcttctaactaaactgtcataagccttgttctcttaatacatgatggtgaccataacacaaaagcggttgttgtgacattgcaaaattaatagctcctctggtgtacaataatggttcatgcaagccccaaattgttagaggaatgcatactcattaaacactatgcctaaacccggagcaagtactaaagtagttgcctaactaacctaaatacttcataaagcacttatgctatatacacatgcactagacatgcc

SEQ ID NO: 63033 - DNA, 347 bp, Zea mays
acctcagagtcacctgaggcatcaagctaacctatgttgagcacttcatcacacaattgtgtctatatttgcatcgactttattatattttgagaaacgatgtggcaaattgatgtgtggcgttttacttgagaggaaataaacaccttttaagtatgacttgaatagaggagattataggaaatctgtcttcacaaaaggtcattagctagcccactaacgtcttcatccactagttgtactctaataccctctcatgcgaatacaatgccctcaatatgatagaaacatctattttaggttcaaaggtgatctattggtttgaattaatctatattcaacttttt

SEQ ID NO: 63034 - DNA, 403 bp, Zea mays
cggcgccatcggttcctcgcccggtccgaccccaaacagcagcatgtgtccatggtcgcgtccctcgagtgtgccaaagctctgttacgagaacgaactatacctataaagcctcgccggtaaagtcagcagccgtcctctggtcccagctcgtcccggcactcgtgcttgccgctggctcgcgttaacgctcgcgcgcctgctcgttgtcactgcgtcgcactcgctcttcgtccattgggcttcacgtgtgctcgcatttgtcgtcgagctgttgaacccgtccctccttgctcgttacttcgtcgtcgccagagccctcactggattagtgcctcgccagctcgctctagacacaatctcgtcgtcgttccgtgcgtcatcaagaaatcccaagagtcga

SEQ ID NO: 63035 - DNA, 197 bp, Zea mays
gagaacacgtgattgttttctatttcaattcgaaaaatagacctggcagctgtcagcacgtacaaggggaggacacatacagtagaatgtgatgaccactcagaccctggactgtacacaggactttcgacccgcgctactgacatagagaagtagatggctagtattgtgatgacttcccgttacttggggtcttt

SEQ ID NO: 63036 - DNA, 396 bp, Zea mays
agcttcatctagagagattcacttgtttgtctcttatataactctacaatatttgaagtatactcccaatattggtctatggtatcccaaaagtgctcatattgaattaattggatattcggactcggactatgcaaggtgtaaagttggtacaaaaagcaccttcggttgttgtcaatatcttggtagatctcttgtttcatggtcttctaaaaaacaaatatttggatgctctctctaccgccgaggcggaatatatatcggccggaaattgttgcgctcaattattatggatgaaacacactctattggattatgggattattgtcaagaatgtgcctctcatgtgtgataatgagagtaccgcataattggctacaaatccagtccaacact

SEQ ID NO: 63037 - DNA, 343 bp, Zea mays
  unsure (1)..(343): unsure at all n locations
agcttcagtcttagcggtagtctcagttttagttagtcttaggtagacagggtagtctgctatatcctgtgcatctatagttgtcatgatgaactttgtttggtttggatctttgtaatgattgtcaccagagtgtgggtatcccctgncatttggtttacctattatggtaataaagttagttacatagttgggaaaccttttattccactttcctctttatctgagaagctgtgtggtctgtgttggagatcagtgaagatgctcatctgttcagtgctgctgaagaattctttactcttttcttatgctgcaagacttgccagatcagttctgatgtgtg

SEQ ID NO: 63038 - DNA, 370 bp, Zea mays
agcttaaagccatggtaagtagcataagcaagttatatgcgaatagactcaagcctagctacaggtgcataggtttcaccaaaatccaaaccttcgacttgtgaatatcccttggccacaagtcgagctttgttccttatcaccacaccatgctcatcttgcttgttgcggaagacccacttggttcctaacaacatttggttaggacatggaactaaatgccatacctcattccttgtgaagttgttgagctcctcttgcattgccactacccaatccgaatcttgaagtgcttcctctaccctgtgtggctcaatagaggaaacaaaagagtaatgttcacaaaaatgagcaatacgagatcgagtgg

SEQ ID NO: 63039 - DNA, 125 bp, Zea mays
  unsure (1)..(125): unsure at all n locations
agcttcttggtcgatntatcaagaactccaaagatcaaatgttgntaaatattaactttgccgccacatagcggcatcggcttgtctttcattcgcgcttctcaatcatggcggttggctatata

SEQ ID NO: 63040 - DNA, 281 bp, Zea mays
  unsure (1)..(281): unsure at all n locations
actttgtgaagggcaatgcttccatggntcaagatagtgagggttagaatttatatcctgctaactatcttgagcacaaaattaagaagaataatgctaggaaacctcacaatgtttctcatcatgcattcatttataaaaatgaggcttctagctctaggcataccactcatgttaaaatgcctagaaagaaaattcctgctgcatcaaatgagcataatgtttcattccactagtagaaaaaggctcacagcctgcggagacgatatatttttacaggc

SEQ ID NO: 63041 - DNA, 290 bp, Zea mays
agcttaagaatgaactaaatgtcttagattcacgaaactttgatcgaaatcttgcacacattgctcattttatacctttgatcatggcatgtctctttcattttgtacaaatgcatatttcttattcttcttgtgccaaagctaagactaatgtgcttccaagtgcatttcaatacttagtcttaaattgaaagggaaatgaagttgtaggcaaaggcaagccttccactacattttcgtcaagatcgtatatcctttgccctactcatgtaattatattcatattcttc

SEQ ID NO: 63042 - DNA, 269 bp, Zea mays
tgccattgcttcgtactgattacagaaatttttggttccggagcaaatataccaccaagtgtctgcatcatcttttaccttcttgaaggcaatcggactcgcaaagcgtccaatgtccctgttgcttgaggccaattaacctacctacatgtgtagagtactgtgaaaaatccgactttcatacttgataatctgagggatctatccccttaaactttgaaaaattctatctcgctgggagcttttcccaacgatacttttattataaa

SEQ ID NO: 63043 - DNA, 430 bp, Zea mays
agcttgacaacgagatggcgctcattatcaatatctttcgccaaatcctcaaacaaaggaaggggaaagattcaagccccgttccaagaaagtatgctacaagtgtggtaagcccggtcatttcattgctaaatgtccattatcaagtgataatgacaggggcgacaacaagaaggaaagaaggaaggagaataagaggtactataagaagaagggcggcgatgcccacgtttgtctggagtgggactccgatgagagctccaccgactcctcctccgatgaagacgccacaaacatcgccgtcaataagggtctcctctttccaaacataagccacaagtgcctcatggcaaaggacggcaaaaagaagatacaatctagagcctccactaaatatgctacatctagtgatgaggacaactctagtgat

SEQ ID NO: 63044 - DNA, 327 bp, Zea mays
tcaagcctagctacgggtgcataagtttcaccaaaatccaaaccttcaacttgtgaataccccttggccacgagtcgagctttgttccttgtcaccacaccatgctcgtcttgcttgttgcggaagacccacttggttcctacaacattttggttaggacgtggaaccaaatgccatacctcattcctcgtgaaattgttgagctcctcttgcatcgccatcacccaatccgaatctttgagtgcttcctctaccctgtgtggctcgatagaagaaacaaaagagtaatgcttcacaaaatgggcaacacgagatcgagtggttacc

SEQ ID NO: 63045 - DNA, 394 bp, Zea mays
caattgccttctgcccttcttgcagctttctgacttccatggatagcaatgggttcctgatccgaaggtatcttcatgccaagataagcatgatgaaggattgcttcaaaagcattgagaataccacgaccaataattgcattgtaaggatattccatgtcaacaatgtcaaacacaactcgctcaattctagtgttgttgatgaacccgaaagtactgacatggtgatcttgcccagtgctactatctgtctcccttcgagccacagagaagatgtgagcatcataaatcttatcttctggctcttgcatttgtctgaacgctttaacaaatatgatgtcagctgcactgcctgtgtcaccaagacattgtgaccagaaatctttgatacaca

SEQ ID NO: 63046 - DNA, 364 bp, Zea mays
  unsure (1)..(364): unsure at all n locations
agctagcttatgattgagcaatctcataattgttgttgtactataactggggttttttccctgatctacgtaattggtggcttctaagtaaaagaaatctttatgcacgcttaaacaatgttcaaagtactagctagtacattgattaggcgatgtagatttacacaagctgatgaacaaaaaagtggagaaattctcatctctttctaccagtactagaaacgtaagttctctactaaaacatggatgtgactgcatataacacaatgtaaggaaccaaacacaactgtatcagtgcacaatgattacataaatcaatttacaatatctctgagaacaacanatgaataattaaactaaatct

SEQ ID NO: 63047 - DNA, 379 bp, Zea mays
  unsure (1)..(379): unsure at all n locations
agctntatagtcgatagcttctgcgctgtttttgagaagatctgccgaaagtgtttatttctttaagatcttcggctacgaagcatacccccaacagttttgtaggatggaagcggatggacagaatcaaactaaaccaaaacaaatctaaaccagcaaccaaactcaacctagaacacgaactcaaaactgcggactctaaaactgaattgtgcaaaggctaaggcgatgggtttaggtcggaataaactgatcgtatatattattatntttggctttntgtggactatgggatcaaacaaaactaatctaaaggtatgattatacttcacgggcaacctggaaatctgataccactgataatagacgtgacccgatc

SEQ ID NO: 63048 - DNA, 178 bp, Zea mays
  unsure (1)..(178): unsure at all n locations
agcttncatcgatatcgtcgtagactggtgaataccagctgtaagatgacgttgacttctattctcctgcgatccatgtccgccaaagatgacgttgacctccccgtcaacgcgcgggaaagctccaccttctcccttctcctgctgctgggattgtcgcggttctcctggtcctccc

SEQ ID NO: 63049 - DNA, 115 bp, Zea mays
  unsure (1)..(115): unsure at all n locations
acttgagtagtcttggtcgcgcggactgtccgngcccttggggcggaccgtccgcgatcctccagatggtccgaggtttgaccatttgtattgactctatgcttttttgcactgc

SEQ ID NO: 63050 - DNA, 377 bp, Zea mays
  unsure (1)..(377): unsure at all n locations
ttgatgatctcactatgattaaaaacactagtaatgttggttctttgggctcttcggtaaatggcattagctgcatgtgttaaatctgttaaattcattntatgatctcactatgattaggtttgagaggctctggcattcataccctcaactttatgtgttggaaaattgcgtaatattctaaattcagattataatttgaggcaaatttcataggtattcaaaactgatatgtgaactacacatagctacaaatagatcaacacagtaaacaactgaatagacatattgactcatgttggtttgtcggtgcttaggttgatcaagcataaaagaagacgaagtagattgtcaatgtagacgcgtcaatttgtctg

SEQ ID NO: 63051 - DNA, 476 bp, Zea mays
  unsure (1)..(476): unsure at all n locations
atccttaatcanctgccgcatgcaagcttcngctgaggtcaaattgtgtggcagcacaacaattctttagcaataaatgctggggtaacttcacacctacccgtctgtttatatagcgctgcatgtgggaaggtgaatcatcaagccgctcgcacccgtcgaacagtcacccacactcgctgaacggtggaccatagtgcccaagaagctgaatcgccacatcgcgcgtgctcgttgcatggagggaccatccttcactcggaatatttaaatcgtttctcggcaacgagcttacggaaggtgttttttggaccttcagcattccgaatactgagagagtttttcacggatcgagctcgtcacgaaaaacgatatggcaccgtgaacgggctactgttgggggtatgcttcgtagccgaacgtcccataagaagaaacaccttctgaagattacacatagccgaatctatcaatca

SEQ ID NO: 63052 - DNA, 252 bp, Zea mays
  unsure (1)..(252): unsure at all n locations
catgttagtcttagcgattaagcaagtgtcgagttcagctctatcaaaatctaccaagtatagctgaccctctaacaactccttaaatgctattgaatcatcacttcttctaaagacagtgacacctacatcagtgaatagacaagtgtagcccatctgacataattgggatacggaaagcanatggtaatctaatgaatcaacaagaaaaacatttgaaatggaatggtcatgagatatagcaaatttacc

SEQ ID NO: 63053 - DNA, 462 bp, Zea mays
  unsure (1)..(462): unsure at all n locations
agcttgttctcttttgttgggtacacgcgtgagaatatgatacttatgcatgtcaccatgggaggagtaatacatacactcttatgcataaacataaaaatataacttcgctacctatgactcttactgaaattggacaagctgattaaaatagagctgctagttcccattaggaaccaactaatgagacagaaattcatcaacaaaataaaatgaaagctgctgtcatgcttgctactaaatctgatcttcttgaaactcatgctactgagtcttgtcgctatgcctagggttgcaaagatgctcacttttctattgatgatattactagcacttagactgcatntgtgactaaccttttgcagcaattccgagatgtctctttctatgagttacctccaggacttacttccattcgtgggattgagcaccagattgatttgattcctagagcgagcttgc

SEQ ID NO: 63054 - DNA, 519 bp, Zea mays
  unsure (1)..(519): unsure at all n locations
tcaagctctactagatatgaatggatggctntcttttattcgacattgtggtccacatntgcactacttgttttggtnttgcaaattcttttggaagatcttttcaaagtcttttgcaaatagtcaaaggtatatgaataagattgaatgaagcatttttcaagatttgaaatttctcccctgtttcaaatgcttttcctttgactaaacaaaactccgcctgaatgaaattctcctcttagctntcaagagggttgtaatagataccaattggaaacatatttagaatgctagttttgaaaaactataccaatttgaaaatatcataccaattgaagaaattcttatcaaaagatatcaattgagaaacaaccttntgcgaaactacaatttttgaagttggtggtgcggtccttngctctgagattaatatttctccccctttgcatntaatgccaaaacagagcaatgagaccctctacttctccctatggaaatgattatagtgaaatatccaat

SEQ ID NO: 63055 - DNA, 460 bp, Zea mays
  unsure (1)..(460): unsure at all n locations
agctnntaagtttttatccaccgaaccacttctccctcttaagacaagcttcccttttaggcaaggtagctttaaataataacttctccccctttgacatcaaacacaaaaacacaatgcatcacaattaaacgatgtcaacggaccaacggggcatgaagcaaggatatgcaatcaaagattctaacttacttcccctaacaccttaagacatgtaatacatactctagaggggatctaggtataggataaatgccacaagtgaattacctccatttgtaccttttcgttgataccagttgaagactcctctttttatgacaccaattgagagtcttctcacgagattccctttgtgcctgatcctccattttgatttacagttgtaacttaaccaatcggctaanaacaagttaaagagttaatagcacaagagattactcctacaagtagtgatcac

SEQ ID NO: 63056 - DNA, 503 bp, Zea mays
  unsure (1)..(503): unsure at all n locations
tgtgtcacacgtgtcagaactagctgcctcgctgcacataaaagtgataaaagagctagcatgtcatacctagctacctcgttgtgtgggaaaggagaanaaaataagcacgccgatgtggaaaaattggccccactatgtttaggaaagttccttggagttgtcaaatatggatagtaaataggggtgaatagtaattaactaaatttagtaagtgtatttaaaaaactactagagtagcatttttctgttcacttcttaaatntaagatttagaaagtttttgaaaaactattagagttgctctaatcatgtaagttacatattntagataccggatccacacatttcttttacaaactgtcttaaaatctatgaacatcctacttttagctggttcggttcctactaaggaacggtggcctggaactggtactggctggattatttatctattttatataagaatttattaggtagaataatttcagatcaaatccttga

SEQ ID NO: 63057 - DNA, 212 bp, Zea mays
cataacagggacctgcagcacaccatccatatgctaaaggagctactcattcatctcaaccgaaggaggtgttcaatacatgttcgtactactcaccttacattccatattatgttcaaccccaggagctcaagccgcatcaagctttatcttcaaaatgctttgagcaaccctatgataagtgtgtggtcaccatctacttcttttattat

SEQ ID NO: 63058 - DNA, 426 bp, Zea mays
  unsure (1)..(426): unsure at all n locations
tgcaagcttattagttattactaagtttgcaggattactttaagtcgcaactacagccttgggcactcaatacgagctctcgtaaaccaggttctactggccatggntattactcttactcactagctggacattccaagcacgaagtgcgtgcacagctgcatcgcgctgcctgtagtagagtagcgtgcatacgaacaaggaagaagaaacgcacgtcccactcagaatatgtgagaagcatctcgtccaaatccagagaaagcgacacggaggaattaaaggctgcagaaaccgacctcacacctcagcccgccagcgttcagtgatctagtagtcacgggtaagaggaggtacagtagcaagcagcagccagccaagcggtggaaacaaacgcacgcaccacgccgcggtgaccgccatgaa

SEQ ID NO: 63059 - DNA, 458 bp, Zea mays
agcttaaagccatggtaagtagcatataggcaagttaaatgtgaattgactcaagcctagctacgggtgcataggtttcaccgaaatccaaaccttcgacttgtgaatatcccttggccacaagtcgggccttggtccttgtcaccacaccatgctcatcttgtttgttgtggaagacccacttggttcctacaacattttggttaggacgtggaactaagtgccatacctcattcctcgtgaagatgttgagctcctcttgcatcgccagcactcaatctgaatcttgaagtgcttcctctatcctgtgtggctcaatagaggaaacaaaagagtaatgttcacaaaaatgagcaacacgagatcgagtagttacccccttatggatatcgccgaggatggagttcacggcgtgatctcgttggattgcttggtggactcttgggtgtggtggtctt

SEQ ID NO: 63060 - DNA, 163 bp, Zea mays
actgtcattggtgtataaccaggcatgcggactgccagccattgcttctcaccaaagaggacattaattatttggttgttgcgagctacaaatagatgatgctgtacaaatgggcaaatctgtacaaaacatgttgcggatttatagcttggagatgagaact

SEQ ID NO: 63061 - DNA, 459 bp, Zea mays
tgcaagcttatgagcagtctctagaggtaaatgaagttcttttatctatatactataaacaattcaaaggagctatgggaatatatttggggttcatagatattttctacaaaaatgacctactgacatctaatgggacatccctaggcccattacatctataaatcgttgtggaaaaacaaatgtcaagctaagcatatagatttctactggttatggctgaaaaacagactgaacacaaggaatatgctgaggaggagaaacatgacactggaatcatactcgtgcgaaaatagtatctggcaaacagaatagatactttaccatctttttctcagatgtaactttgtcaacgcctgctggaattccattggtatgacgccccccagaattactaatcccgaggaggcttcggccaatctcaagcagcaacttaacgttcccttctctatggagata

SEQ ID NO: 63062 - DNA, 427 bp, Zea mays
  unsure (1)..(427): unsure at all n locations
tactcagctatgtcgtgatgtgggatcagacagaatcttatatactttctcgaagattgcagctggcttcaacaacttgaggcgatacctgtggaagctcaatctanaataatgtgtcttcggagtactggcaggaaagatactcggattcattgtcagccaccggggaattgaagccagtccagaaaaaatcgaggccatcatgagaatggatgcgccgcgatcacagaanaaggtacataggcttactggatgcatggcagccctaagcaggttcatatcaaggctaggcgagaaaggcatgccattctacaaatggctcaataaggtggacaagtttcagtggaccatagaggcacaggaagctctagaagcactgatataagtcctgactacaccaccagtactcaagccaccacgtcgagcc

SEQ ID NO: 63063 - DNA, 326 bp, Zea mays
agcttgtgaagattcttcataccaacatgggctattctgtgatgctagagccaacccatattagtcttagcaattaagcaagtgtcaagttcagctctattgaaatcaactaaatatagctgacccactaacactcccttaaatgctactgaatcatcacttcttctaaagacaggaacactagtatcactaagaagatagttatagcccattttacataattgagatacagaaagcaaatgtaatctaaagaatctacaagaaaaacattggagatagagtgtcacgtgatatagcaatttaccaagtcctttgaccaaccttga

SEQ ID NO: 63064 - DNA, 508 bp, Zea mays
  unsure (1)..(508): unsure at all n locations
tctaaagggagagcacactttgtgactaacagatgttcattntgagaaagacagggtttgtagcgcatgtcaagcatgaaagcaagatggtgcccaccatccacacaagaacataatgacgacgaatatgcctctagagctactccacatggatctattcggcccgatagcttacataagcatcggcgtgagtaagtactgtctagtaattatggatgattattcttgcttcacttgggtgttctttttgcaggataaatcacaaacccaagagaccttaaagggattcttgagacgggctcataatgagttcggattgaggatcaagataataagaagcgacaatgggacggagttcaagaactctcacattgaaggctctcttgaggaggaaggcatcaagatgagttctcttctccctcacacctcaacaaaatggtgtagtagagaggaagaatattactctacttgacatggcaaggaccatgcttgatgagtacaagacacc

SEQ ID NO: 63065 - DNA, 446 bp, Zea mays
  unsure (1)..(446): unsure at all n locations
agcttatgaagattcttcatcccaacatgtgctattcggcgatgccagagccagcccatgttagtcttagcaattaagcaagtgtcgagttcagctctatcaaaattcactaagtatagctgaccctctaacactcgcttaaatgctattgaatcatcacttcttctaaagacagtgacacctacgtcagtgaataaacagttgtagcccattttgcataattgagatacagaaagcaaattgtaatctgatgaatctacaagaaaaacattggaaatagaatggtcaggagatatagctattttacccaaacccttgatcaaaccttgtgttccatcccagaatgtgatagctcgttgggaatcttgtgttttctcgtaggaggagaacatnctcttctcccctgtcatgtgggttgtgcacccgctggcgatacccagcttgag

SEQ ID NO: 63066 - DNA, 334 bp, Zea mays
  unsure (1)..(334): unsure at all n locations
tcaagaacttcaagtgcaacttgaatattgctagaacatcaatgcctcatctttagtgattgaatctaagtctagctccttaaatgataattnttgcaaacattgtgccaaatatcatgcttcttgttgtctaactaaccatgcaaggaagaatagcccacaggtgaaggtcaaaggaattntgaaaagatgctctatcaatgatgggttaaagaaagttgaacccaagtacaagtccctaaagcccaacaatggaagaaagggggcttgggttcaactcatccaaggaaaaccctagcacagtgcataatgtgtggagatcccccaagttcat

SEQ ID NO: 63067 - DNA, 456 bp, Zea mays
  unsure (1)..(456): unsure at all n locations
agcttaaaggatactattcaacttaggttttattttgttgatacgaacccacggtatgaaaacttcctatccttcagcggatttagtattctatccttagagggatgtaccatagcatatgttaaattccccacaatataaaatgttcaatagtgcatataactttgacgttaactatatgtgtgcacttatttaaaggaattgagcctatccttttngggttcaataatgatgattcatttgccatccgtatataaggatcatcatttgtgaaaccctaccttgtgattctaatgctctcctttctaagngcatcaataaggtcctttcacgtgctttcaagatggattcaacatctacagatataagagtctcggtagttcaatcattgagcttaattgagctcgtgaaaatatgagcgaatcaagagtagatgagagaggttcaatatcactc

SEQ ID NO: 63068 - DNA, 440 bp, Zea mays
  unsure (1)..(440): unsure at all n locations
agcttancaaatcaacaacacttagccccatcgaattgttccgggtacttctgccgcatcaactggtcaagttcccacgtagcctcgcgctctgactgattagaccataagaccttgacatacttaattgatctcttcctcaacacacgctccgagaattccaaaatacgcaccggacgacactccagagtcagatcctgctgcaccgcaattggttccatctcaatctgatggtccggatcccgcaagaacttcctcaacatagagacatgaaaaaccgggtgtacccctgccatggaatccggcagcagcaagcgataagccaggctgcccactcgggccaagatagtgaacgggccaatgtatcttgggctgagcgttccagagacaccgaaccgaacaactcccttagtgggtgataccctgagaaggacttggtc

SEQ ID NO: 63069 - DNA, 443 bp, Zea mays
  unsure (1)..(443): unsure at all n locations
tatactaattgactcaagcctagctacgggtgcataggtttcaccataatccacaccttcgacttgngaatatcctntggccacaagttgggctntgttccttgtcaccacaccatgctcatcttgcttgttgtggaagacccacttggttcctacaacattttggttaagacgtggaactaaatgccatacctcattcctcgtgaagttgttgagttcctcttgcattgccaacacccaatccgaatcccttaatgcatcttctaccctgtatggctcaatagaagacacanaggagtaatggtcgcaaaaatgagcaacacgagatcgagtagtaccctcttatgaatataccgangatgagttacgggtgatctcgtgtattgttggtgactcttggtgtgcggctagaccgctccatctcttgctgatattgcatctcc

SEQ ID NO: 63070 - DNA, 465 bp, Zea mays
  unsure (1)..(465): unsure at all n locations
agcttgtgaaattcttcattccaacatgggctagtcggtgatgccagagccaacccatattagtcttagcaattaagcaagtatcgagttcatctttgttaaaatcaactaagtatagctgaccctctaatactcccttaaatgcaactgaatcatcacttcttctaaagacagtaacacctacatctgtaaatagacagttgtagcccattttgcataattgagatatggaaagcanaatgtaatctaaagagtctacaagaaaaacattggaaatagaatggttaggtggtatagcaattttaccaagtcctttgaccaaaccttgatttccatccccgaatgtgatagctctntggggatcnttcgttttctcgtaggaggagaacattcttttctcccctatcatgtggtttgtgcattcgctatcaattatccaacttgagcccncggatgcataaacct

SEQ ID NO: 63071 - DNA, 356 bp, Zea mays
  unsure (1)..(356): unsure at all n locations
ctctcaatctatcttggtgcttatcanatatactntaacttatattattggctcaactcannaatttaaacttttcattccctcttgcttattntctttgaatttgttcatggggttcacttagagttcttaattagggttgcacattcttatcttttcaaggactcaattgttntgatcatgacactnttaaacatatacttggtgaattctttgtcacttaagttattttgatgctcatgcttactttggttcacaggaagtaatggctcttggtgtggctttntaagagaaaccctatgtgacactgnggtgtcacagccttccncncttaaaggaatctcgtcccgagattc

SEQ ID NO: 63072 - DNA, 462 bp, Zea mays
  unsure (1)..(462): unsure at all n locations
agcttcggctctatgttcttcggatgcggatcctgtacatatcanagcattataagaaaaattcaagtttcgaggaaaaggtaaacacaaggtatgattttattaccggcttgagatgacttcgagctttgtcaccagctaggcttcgcccacccttcgtccatatttgctttataaatctgtttcctatgcttcgagctaggctggggatatcaatcaaatctgctggtgataaactgaagtttggtctattaacaatctttccatgcatgcaaccagacttcatgaaggcaacagctgtgccccgagaagctagcagggcacagaaatcaccgtgtccggctataacttcatcaagagcatcaactttgccctcaatgtgttcgaaggtccctggcaggtcttcaaccgaaagactgaatatctcagagctggctcanaccgagtggaagacccgcttta

SEQ ID NO: 63073 - DNA, 393 bp, Zea mays
ctgcagcatcagcttctcaaaaaccagacatgagaaagcctttccatttcctgctacatctaccactacgcgtgtttgtgactctttctagacctcactcacatgcctggctcatccataccttactttatttatttcacctactctccctatacacatacgatcgacgattctcgctatattatattcttcaacaaaacttttcatcccttttgatctgactgacatcttaactctcaccgtggaaatataaatctggtgtctccctaaccatccaggccttttctgaaagagattcggcgcataccccatttaagtgcctcatctatgaatctttctccggctctactaacttgacatacaactgcatcggtccattcctcttgaggatac

SEQ ID NO: 63074 - DNA, 449 bp, Zea mays
  unsure (1)..(449): unsure at all n locations
agcttatcacaacgaattaccttcgagacacacaatggaggtatgaaggtaaaaccatttaaatgactntggcgaggcggagcgcgttaagcatggggagatcacgtgaaaagagaaaacgtgcctctacatgagcattgtacacctatttatagggagacgacagcatacaacttcgtatgagattacattaatgcccctaagttctatacacacggtatacacaacctactaagggaaatatggtatttttctccacaagacgtgttgtgcacacctctttcactctccttcatatatgtgttgtcaagacatactaaagtcatggtgaggtgctttatctgagccattacgacgaagctattgcttctcccgtcattctccaagacaaagctatggcaacgaatgctagttcgttattccgatacaaagtcaaaatggctagaaat

SEQ ID NO: 63075 - DNA, 434 bp, Zea mays
  unsure (1)..(434): unsure at all n locations
tctanagggagaacatgtgataggtctaaccaatgttcatttctaataagatagaccttgtgcagctggtcaagcagggaaacaagtgggaggctctcatcacaccaaaaatgtgatgacaacatcaagacccctggagctgctacatatggacctcttcggacccgtcgcctatctgagcataggaggaagtaagtatggtctagttattgttgatgacttttcccgcttcacttgggtgttctttntgcaggataagtctgaaacccaagggaccctcaagcgcttcctaaggagagctcanaatgagtttgagctcaaggtaaagaagataaggagcgacaacgggtccgagttcaagaaccttcaagtggaggagttccttgaggangaanggatcaagcacgagttcttcgctccctacacaccacagc

SEQ ID NO: 63076 - DNA, 453 bp, Zea mays
  unsure (1)..(453): unsure at all n locations
agctntatgcagaactcacagtgtaagtattgattangttaattatttatcatactagaatgttggggtggtggccattttttctatactctcttcaatctcttcttaggatacttcattccaagatgggctagttgtttcttctatcaccattctcgagatcctnttctatatgaataaaagagtgcttttgtattcttttctctattcttatatcagagaattcccagatggtggatttggtactactggatgtgctcattggcatggacaatgtatgggcttattgtgacacaatatggagacctataagaccccatcacagtccatggtgaaagcaagtagaagattatctattatgtaacacatcgtttttgatacaatacggattttatgcctgttgttgcacatgttcttgtgctctaagcaacattcttagctttcatgtacaca

SEQ ID NO: 63077 - DNA, 473 bp, Zea mays
  unsure (1)..(473): unsure at all n locations
tcgcatctctgaactaactcngctgcatcgttcttcgccgtctgtcatagaatcctgacctgaaaaccttcccgactagtgttctggatgctgcatgtactccacactgccctgcatggacttcctccagaagttgcttcccggtggacgggagaacgcacttcatgaggacgcctgacgcgcccctcctgtataatacctccccaatgagtgtatagtgagctgattgtctggcaatgcgttctgtcgagatcttgtcatctggctcttcttcattctttatatacttaataatcggccgtctccagtcatcagagtctgactcgggttgatctatgacgttgcactcttctgcttgatccattgagatactcggctgcaggatntcttgcacgaagactcctggtgggacctgagtcgaccggatccgacttgacagacatcggttgcgtgtccgattcttctacatgatg

SEQ ID NO: 63078 - DNA, 460 bp, Zea mays
agctttcacttaacgacgtaatgtgcttatcaattctgtgttgcctgctacttcttcgggtgcattaacctcagatatttggtctggtaatgctaaggaggactacattagtgttgtctgtcattatgttaatgctgattgggaattacagaaaaaggtcattggtcttaggcttattgaggttagacatactggtcaaaatattgctgaaagaattggtgttgtggttgaggagttttgtctggttgacaagattttctctgtcactctagacaatgcttcttctaattcaaaggctatggatacattgacacctttgtttgctggttatttgggtcctgatccttcttctaactacactcttatgcatcaacgttgtgcttgtcatataattaatctcattgttaaatctggaatgaagagaactgaaaccttttttggaagattttagaactgcaat

SEQ ID NO: 63079 - DNA, 295 bp, Zea mays
ccatgctgctgtgtgaggatatagcagagcagaaggtgctattgggctcgcaattatctgaagatcaagagaaaaccttgataaggtttttattcaacaataaagatagttttgcatggtcagccaatgatctttgtggagtgaatcgagatgttattgaacattcgctcaatgttgacccatccttcataccccgcaagcagaggcttcggaaaatgtctgatgacaaggccgaaggggctcgcaacgaagtaaaaagacttctaagtgcaggagttatcagagaagtgaagta

SEQ ID NO: 63080 - DNA, 420 bp, Zea mays
  unsure (1)..(420): unsure at all n locations
agcttggcataccatttcattagatatattgaatggttaccccagtcaatgcgctttaactgcattttagtggtggttgacaagatttcaaagtatggtcatttcttgcctctgtcacatccattcacagcagttaaagtagctaagctctttttggactcggttacaagcttcatgggttacctgtcaatataatatctgacagagatagaattttcacaagttcgttctggcagcaactgtttcatctgaccgatactcagttgtctatgtctttagcatatcatccgcagtcagatggacagactgaaaggttaaaccaatgtttggagacatttctcctatngtttgtgcatacttgtccagctaagtggtcgcattggatgtctgttgttgaatattggtacaacaccaattttc

SEQ ID NO: 63081 - DNA, 473 bp, Zea mays
  unsure (1)..(473): unsure at all n locations
tccaactccagcactcgcatatgcgtgttgtgagtatgtccacctgaccaccatgataggtttgataccttgctggaactcgacatcacctctccattggccacttttacttttatatctcggcatttctcagttttcagccccaatttctccaccatagtctgactgacaaaagtagtggaactaccagaatctaccagtatgagcatcacctgattctgaatcagagctcttactctcatgcaacactcatggtctgttccactgatggcatttaacgacagattgtgggactcctctcggttctggtcctcctggtccagatcatacaacacctcatccgacaacatctgccccatatcttccacagttaaactatgtaactganggacctgtctcttggaacacttggcctgatgtnncagttcatacttctctccacacccaaaacataaccccattcatcctctaaa

SEQ ID NO: 63082 - DNA, 446 bp, Zea mays
  unsure (1)..(446): unsure at all n locations
agctntagattattgtaattaatgtagacatatttttgttttttgctggatatgttctcgaactcgatcaagagaccgagtttaaagtgaactcacgccctgatgcacaaaacatcatgtggttgcggcctccgattatatggtactacaataatcgaggaagggaccaacatggaagccaatatttttcccactatttattttgtatttaaatgagtcttatgtactagtgaaaaattagttataaatgagaaatatggttacgcttgttgagaacgagatggaattttcaaagagttgagaactaactagctatagtaacaataacaatcaagtactagtaatgatatgcacatgaatggacacatgcgctgtcaagctggatcacatgtgccactcattatctangacgcatangaatacacgattgacggagaaaggacaaa

SEQ ID NO: 63083 - DNA, 458 bp, Zea mays
  unsure (1)..(458): unsure at all n locations
agcttcttgccaaaggatgtttgtgtttgactattggtgcgcactggttaatttagttcatgttggtatggttgtctttgtaacacctcaggtgttactatggctagagcacacctggcactaaggactgtgatcacatgtggtagaggcttacggaaacacataagaacttggagatcatgtgttaatcaaagtttgttaatgacctgagaagcattactcanatccttgtacccttactaccttggaagggagaggggggaagaaccctagacctctcttaaaccctatctcccaaaaccatggttaagaggggaaagagagtgagcaaatgtgcaaaacatgggtaatttttaaccaaaccttaagtaaccttataaccagcaattaggggagagaaatattgaaaaagacccctggagaaaccccanatccaatctccaagtggagagagagct

SEQ ID NO: 63084 - DNA, 433 bp, Zea mays
tctgtagaatctactgtcacagttctctatctttccgagtacatgtccgtcgtcgagctataaaaaagctgatcagaacttcacatgagaattgcggtccatccgcaacaatctgtcaagtttgtagtatcaaagcttgttctgagagggaaaaaaacccacatcatgtcagaatagcagcccatatccaacaatctgccagaaatgttacattcttagatttacgtcttctaaatatggatcacttattcacttcttctagatattgatctctaatcacgccacgtctccaaggcggtgcgatccaagtttccctaacctcattttcatgtcgcttcatgctgtgccctgaatgctgcttcttcctgctgctgctgacagcgctgttaccgtatccacttcccgcagatgaacctcagacaacactggaaca

SEQ ID NO: 63085 - DNA, 448 bp, Zea mays
  unsure (1)..(448): unsure at all n locations
agctntatcaaagggacgtgaaaagtgccttcctcttctgaccaatcaaagaagaggtctatgttgagcaaccttccggctttgaagacagtgagtatcctaaccatgtctataagctctctaaggcgctttatgggctcaagcaagccccaaaagcatggtatgaatgccttaaagatttccttatcgctaatggcttcaaagtcggcaaagccgatcctactctattcactaaaactcttgacaatgatttgttcgtatgccacatttatgttgatgatatcatatttgggtctactaacgaatctacttgtgaggaatgtagtatgatcatgacacagacattctagatgtcgatgatgggggagttaaagtattttctacgatttcaagtcaagcaactccaagaaggcaccttcattatccaaacatagttcactcaagatat

SEQ ID NO: 63086 - DNA, 362 bp, Zea mays
agcttccttgcgcatagctatggaactggttcgaccttcgtcccaaccatgcttttcatattgtggacaacttcatcccgatgtccgaaggtttctgtacatatattacacttggggaaacattgttaatcatgtttttgaggaccttttgaagacgaaggcccccacacgtacccctcgcagtattaatttgttaagataacgaatttatactgtgacatggacgaaggcctttatccgaatgtcctaaaaaacacctttcctttgctagaatagcaacagtcaatgacagacagggccctccaatttggagcgtactgggcgtataaataggaacttacaccgactgcacttgatacact

SEQ ID NO: 63087 - DNA, 401 bp, Zea mays
  unsure (1)..(401): unsure at all n locations
tgaagtgggcccattggccactgtcggtaccctgaaatatgggtaccccttactacagtatgaagacgcggtacccgcgcggttatctctagtcgcgtggtaaacaacacccgaccccaccacgtggacggctccggggccgccacgtggccagagaagacgatatactccaaagtatcaacagtgggtccggacccccatgggaaaatgccgaaccactgatatacagaccggacctccgagtaaggtccaggacctccatgggcgcgaaccggacctctctatgtggggtccgggccactcacagtanggtcccgggattctgggacaaagaatacccangccttaatcaatgccaagcatgggtccggagctgacacgtgttcggactataccgcgta

SEQ ID NO: 63088 - DNA, 464 bp, Zea mays
  unsure (1)..(464): unsure at all n locations
agcttgcangtcatttcaagtcaaagcgccatcgtgcatatgatgtaaattataatctagctacagactctgaggcccaatcctcagctgggggcagcatctctatggacacataggatgttccacatgctcatccagactatccaattgacatcacaggatggacttatccaaagtgaagattctctatggctgagtactgctccaggaggacaattaatcagtatgatctgccctcagacaccaacattcagttntttcatactcagcttcaatttgatgtcttctggggaaccctagtggacactaattttcacaagcatcaagtcattgagtggaactttatgctgggtcagtcagtcatggagggattaattccaaagtttgaggcatgtggtctctatgactntatgggctagaagacaaacttcagtgagatggctgtgaaacagttcctggcaact

SEQ ID NO: 63089 - DNA, 472 bp, Zea mays
  unsure (1)..(472): unsure at all n locations
ctatatggacaacgatgtcgtactccgctaaattggtctgaacctgttgaaaggtacttcttcaggcctgatatggtgaaagaaatcgaagaanaagttcagagaataattcataatatgaagaaagcccaagctcgtcaaaagagttatgcagacaaacggcgaatgcccttatacttccttgtgggagactatgtctacctgaaagtttcaccaatgaagggggtatcacgtttcggggttaaaggaaagcttgcaccccggtatattggtccattccctatacttgagcaatgtggaccagtggcataccgactccaactacccgaaacattgtctgctgtgcataatgtgttccacgtgtcataattgaagaagtgtcttcgagttcccgaatcgaaccgtgaagtgacagatgttgtccttataccggacttgacatattctgagcaccctattcgagtcttggatc

SEQ ID NO: 63090 - DNA, 438 bp, Zea mays
ctaagggagagcacatttgatgactaacaatcttttattttgagaaagacagggtctgtagcgcatgtcaagcatgaaagaaagttggcgcccatcatccacacaagaacatcatgacgaccgacaggccgcttgagctactccacatggatgtattcgacccaatcgcttacataagcatcggcgggagtaagtattgtcttgtaattgtggatgattattctcgcttcacttgggtattctctttgcaggagaaatcacaaacccaagagaccttgaagggattcttgagacgggctcaaaatgagttcggattgagaatcaaaaagataagaagcgacaacgggacggagttcaagaactctcaaattgaaggctttcttgaggatgagggcatcaagcatgagttctcttctccctacacacctcaacaaaatg

SEQ ID NO: 63091 - DNA, 446 bp, Zea mays
  unsure (1)..(446): unsure at all n locations
agcttcttggagcacgcagcgtctttatggcggaatctttggtggacaacaactcgccgagtacggacacctcatcctgngacgccctcaattcgtcgcgatggtggtccaaatccgacatggtaaagcgatggctcctcccaaaaatggtcaaggaggtactggcatcacgatacaacctgtccatatagtcacgagaagcaacgagtgctcgttatttctgctgcaagcaagaacaacactatacattcaagcaaggggagcaaaacaggagcagccatgagagtgtacctcatgttccatcttctcgaagtcgagctgtgcattcatagaggagttcaaggagcgagcactgtccataaaaaaaagaagtttggattaaagccggccttgctctgggaatacttctcttcaatgtcagagcaccaccgatccaaatttgataa

SEQ ID NO: 63092 - DNA, 473 bp, Zea mays
  unsure (1)..(473): unsure at all n locations
gctatggaggtctacaagctgtgtatgtgtatattcaacgattaacacacnaaaggttagaaaacaccaacacaagcatgaaatnttttaaggattcacttgctaaactcaaggttgtatgtgggggcttttcatgagcacgataaacacatttttgttgctaaaagggttgaacaattacaataccacctagatagcaagacaagagaaacacataacacgacctaactagacttaccaatctaacacgaggtaaggcatttcttatagttcctaacatagcacgacatcacattattcacaagttcttattatangaataaaggcgagaagcatgttggtgcacaagagacaatgatgtgacaatcatgatgcatgctcattctaagcggcttcttagacctaactacttctgatgtgcttctaaacatcctaataccagacattagaggctttacatgctatattaatag

SEQ ID NO: 63093 - DNA, 451 bp, Zea mays
  unsure (1)..(451): unsure at all n locations
agcttcgcacctctgaactaactcggctgcatcgttctttgctgttggccaatagaatcctgacctgaagaccttcccgactagtgttctggatgctgcatgtattccacattgcccagcatggacctcctccagaagttgctttccagtggacgggaggatgcacttcatgagaacgcctgatgcaccccttctatacaatgtctccccaatcagtgtgtagtgagccgaatgtctggcgatgcgctctgccgagttcttgtcgtctggttcttcttcattctttatatacttaatgatcggccttctccagtcatcagagtctgactcgagttgatctatgatgttgcactcttctgttngattcattgagatactcagctgtaaaatttcttgcacgaagactccgggtgggacctgagttcgactggatcctagcttgacagtacat

SEQ ID NO: 63094 - DNA, 471 bp, Zea mays
  unsure (1)..(471): unsure at all n locations
atgaatactactctgttccaatgttcagatatgcatataaaagattgatagagccactgcctgacaagtcacaatggcccacagtagaaattccatttgatatgggtgcaccaatttgcaaaagaactgttggcagacagaaatttgaggttcaaaagttcccttcaaggcggcaacagttcagagacaaaacatgatgaaggtggcatcagttcaaaggcaaaaccaactgaacaagataagcccanaacgatggtaagaggaaaacgtatgtgcaaaagatgcggtacattgngtcacacaaaagttagttacaaatgccaactcaatggtacaaagaanacgaagagaaagcctatgaatagtaaatcaagtggtaaaagtcagatggcaagaccatatagccaataacaactatggaaaccataattcaagataatccanaagcattggcatagagtatggaactat

SEQ ID NO: 63095 - DNA, 410 bp, Zea mays
ccatgctaatggtagcaattaaacatgcatatagaccggactactcttttgcgaaattaactaaatagaagttgtcatctagtacaccactttacagctaatgaaccatcacttcttctaaagacagacacatctacatttgagaataaacagttatatcctatattacaaagttgactcatagacaacaagttatatccaagcgactcaactaagaacacattagaaatagagtgctcagatgaaataacaatttgtgctaatacttacaccttgccttggttcccatcaccgaatatgaaagaatcttggggaatcttgttcctgaccatagaagagaacatactgatttcccacggaatgtggcttgtacattcgctgaccataatctaacttgagcccacggatgc

SEQ ID NO: 63096 - DNA, 428 bp, Zea mays
  unsure (1)..(428): unsure at all n locations
gacgagggcatgtggcngtaagaggtgctcaatcatgatacctacatcgacactgtccttaatcgagtcagacggagacactacaccgagacttgcttctcgtgcaagtcaccctgccggnctcgtctctatcattcacaactcgaagtntggtacctggcagaggtacatcttttcagatgtggaacccatcacgaccatgatggattcaccatcaagtcttctctttgaaacttcccattccatatgaagcatcatcttttgttcaagacaaaaccatttgttttctaaagcaaagcttaacaccaaagaaactcttatgtaaaacacgtatcaaggaatgtgtancnnntccaggaatgaaatcagcaattgtttgcactcaactctatacctaatgctcatctcagtgataagagtttaacaac

SEQ ID NO: 63097 - DNA, 421 bp, Zea mays
tccaatagcctctcgcccttcatgcagcttcctgacttccatggatagcaatgggtccctggtccaacagtatcttcatgcaaagataagcaggatgaacgattgcctctaacgcattgacggtaccacgaccgataattgcattgttagggtattccatgtcaacaatgtcaaatacaacttgctcagttctagtgttgttgatgaacccgaaggtcactgacatggtgattttgcctaatgctacaatctgccttcctccgaagccacagagaggatgtgtagcatcatgaatcttatcttctggttcttgcattcgtctgaaggccttatcaaatatgatgtcagctgcgctgcctgtgtcaaccaagacatagtggaccacacatcctttgataacacaagagattaccatggcatc

SEQ ID NO: 63098 - DNA, 452 bp, Zea mays
  unsure (1)..(452): unsure at all n locations
agctgggctgcccggtgccgtctcttntattatttntggttggcctgtcgccttgcccgtgaaagggtgcaagcatgcaacgcaaaagctccctgtggtctgccgctgctagacgcctagacctatagatatccaaatgagcgggtcgtgccggcacggcccgaacatgcctaggcccggtacggattagaaccgtgtcggcccggcctaaattaactagtgggccgtgccgtgccgtgccgacacacgggtcccaagcgaggcccaggcacgacccgctaggttaataatcgtgtcaggccgacccacagactgacgggtctaacgggctcataataatatatgacgtttaaatgataaaaatatcctaaaaatatgcactttttaggggttcaatcatatttattagctctaacacattatttacactcacataaccaacaaaaacacat

SEQ ID NO: 63099 - DNA, 349 bp, Zea mays
  unsure (1)..(349): unsure at all n locations
tactcagcttgtaattctctatccgatgaattgaaaagtgaagtggttgcttatgggtttggcggcctgctgagattcaagccgcacttattgtcaagaaagatgctcagctggctgatgcggaagcttaacctagaaacgatgaaattagagattggtggtggaaaagagattcaaatcaccgaacacagtgtttggtgtgttttgcagttaccaaacgttggcagtgatccgcccnccatgtctgatgcagatgctcatgccttgcgggacgagctggggggagcaaatttgtggcaaatcttatagacgcatatctggtatcaatatatctgttatcactgataga

SEQ ID NO: 63100 - DNA, 402 bp, Zea mays
tcattttcgagaaagacaggatttgtagtgcatgccaagccgcgatacaagttgcgctcaccatccacacaagaacatcatgacgactgacaggccactggagatcctacacatggacctattcggcccgatagctcacataagcatcggtggaagtaagtattgtctagatattgcggatgattattctcgcttcacttgtgtgttctttttgcaggaaaaatctcataccctagaaacattaaagggattcttgagacgggctctaaacgagatccgcttaaggatcaagaaaattatagcgacgaccggacggatttcaagaactcttaaattgaaggcttccttgatgaggagggcatcaagcatgaggtctcttctctctacatcgcacatctaaat

SEQ ID NO: 63101 - DNA, 424 bp, Zea mays
ggcatccttaagtcactgcagcatgcaacttctaagggagaacacgagagaggggtaacttatgttaccttcaaaaaaaatacaccctgtgcagcttgtctagctagtgaacaactggtaggagcgcatcacattaacaatgtgatgaccacatcaagacccctgtagctgctacatatggacctcctctgacccatcgcctatctaagcacacgaggaagcaaggatggtccacttattggcgatgacttctcccgcttcactagggcgtcctttttgcaagataaggctgaaacccaccggaccctcaagcgcttactaaagagagctcaacactcagtttgagctcaacgtgaataagataatgaccgacaatgggtcccgagtctaacaaccttcaaatggacgagtaccttgagtggga

SEQ ID NO: 63102 - DNA, 456 bp, Zea mays
agcttaagggcatgctggtgagcagtttccaaggtttttatacgaagccagtcacagctcaggccctgttctaatgcacacaagatcatgaggaatacctccaggcgtatgtccgaaggttcttgcaattgagggcacaagcgtccacagtgtccaatgaaattgtcattgaggccatgattaagggccttcgaccaggacctacggctcagtacttcgccaggaagcccccacaaactctggagaagctgctccagaaaatggatgagtacatccgggttgacaacgacttccgccaaagaagggaggaagcttacagattctcggaaatgaccaggggcttcgaaggaagaatccacccgaggcatgtcaggtcaatccataatttcactcagagtgatgacaaagggagtcagcctcagaggtcgcaatacacctcgcaatcttcggggcaac

SEQ ID NO: 63103 - DNA, 440 bp, Zea mays
  unsure (1)..(440): unsure at all n locations
tatctatattgcccaatgcttntctcaattgtgtcacaaaccacactcaattatcntttgtttcaccatctataaaaccaaaagcaattgggtacatccaattatgcccatctagtgcggttgcagcagctaaatgcccattccatctaccattcagacacatggagtccacgctgaggtaaggtcaacaacttccaaggaacccttgtatacatgggccaagtgcacaaaaaaatctatggaagtacactttcccatctacaacctgngtgtctatcttcacaacgctattgtgggacctcaacaaaacctctgccttccattgatacaacaacctanaactatcatcccatgtaccatacattttttcaatgctttctgcagccctctatatgcagtgtcataagtaatttgaccttatatngtgctngaagctcttt

SEQ ID NO: 63104 - DNA, 415 bp, Zea mays
  unsure (1)..(415): unsure at all n locations
agctngccttcgcttcagtgtatcatccgtattccatcggggtgggggaacgcgccaatgggagaatcttcacagctgtcaagaagatgctccttgatgaaaaaaagggcagatggaccgatttgttacctgaggcagtctgggcactaaacacgactgagtgcagagcgactgggtttactcccttctgccttctatacggatcggaggccatgaccccgcatgaaataaagcatgggtccccgcgaacagttccgtcagccgtccccgacgtggacgagccaacttcaaaggatctcattgacggagaccgagtcttcgccctacaggccctaaacaaataccaagcccagaccaaagcatggcgcgaccacacagtcatcccgagggagttcaacgaaggggacctcgtact

SEQ ID NO: 63105 - DNA, 370 bp, Zea mays
  unsure (1)..(370): unsure at all n locations
tctccttgtcgtcatcaaccttgtcgtagaaccattccgattttcaacctgccggccacttgcttcgatagctgatgacaggaaactntgtggttttccgatatgcaaaattatagcaaccaaagttatcatgcaatccatcttttctagccttcgtctgataatgcagctcatgaactcgacaaaagctgtcggcaaacggctccaccgcctggcttcgaagggcccagatatagacgctaagcctaacgatagcgttaggagtcagctgatgaaagtagatcccacacctcttcaatacatctgcaataatcccatgcagggggaatctcaacccagcctttagatagctcttgaaaatgactatttc

SEQ ID NO: 63106 - DNA, 422 bp, Zea mays
agcttctccagagtgggcgaagggctccttggagctattgggggaaaagtgcttgcgggtcgctgtgaattcctcgccgtaccttgctgtcgccacaactctgcggcccaccgtgaatagctcgtgcgcaactcggttttcggtaagttctgtacccatggagtttgccttatcgtccttcatgtgtagcaccactttattcaaagtttgggccgtagttcgccggtttagcgttggccggacatggcgccgccgctggaacctgcccaccgccgtgtgcggtcaccagaaggagggggatgggcgctcggccgtggatctggccacgaacggcccaaatataaccacgcgtaacccttcgctggtgcagatcctatgccgtagatcgtaaatggacggccgcgtagtgatcctaacatttt

SEQ ID NO: 63107 - DNA, 307 bp, Zea mays
  unsure (1)..(307): unsure at all n locations
ngagagtgacttgtcgaagcaacatatgccatatgcttgtgattgtctaccgactctgggacatacggagagtagcatgaagcagtatgtaaaacctgcttcgtgtgactctgccgctcttcagctttaacaatattctgctgcttctgaatggtaacatggcacgtcctcattgtgtggcctttgttctcgccaccaaaaaagacagtatagtttcctgtgttggctgccaaaccttgctccactaaaacttcttccttctctacccctcggagcatgtggtctgaaagaagcatgcttgagactg

SEQ ID NO: 63108 - DNA, 379 bp, Zea mays
  unsure (1)..(379): unsure at all n locations
ttatgaggaaaacgcattgaggcgctttggttatagtgactgtgatcctgctccaacaccttatgaccccagggtgctattaataaagaatcggagaatagcaagggatctattgacatactcccagatcattggctcgctcatgtaccttgcaagtgcaacaacgccagacatctcttatgctgtgagtaacctaagtcggtctgtgtcgaaaccaggagatgatcactggcgtgctcttgagagagtgttgcggtatttgaaaggtactatgacatacaatattcattatactggaaacccaanagtgctggaaggctattgtgatgccaactggattctgatgctgatgtccttatgcccaagcggtatgtgttct

SEQ ID NO: 63109 - DNA, 450 bp, Zea mays
  unsure (1)..(450): unsure at all n locations
tcttttatctagaatttctaattccttctgtctttcttttctataggggtttcaaatccagattcaaactaggtttcaaattcaaataaattcaaacttatgcaacacttcaaagaatattttaagctcagtatgatgcaacatgtcatgactcataatgttttggcaaaaacaaataattaaatccccctaactctaagctatttttactcacaagggaaaaaaggagagagaatctagagagagataaaacctagagtgagagagagaagagtaacacatgaatntgggtgataattagaaagaaattctatacccccaaattcaaggtgttacattactcgaccttcgatctatgtctgactattttatccgaattcgtactctcaaatagaatgctctgtcgtgttagaactaattaattcttatctgactcggcataatatctct

SEQ ID NO: 63110 - DNA, 365 bp, Zea mays
  unsure (1)..(365): unsure at all n locations
tgaagccatggtaagtagcatatgcaagtaattttcttattcgactcaagcctagctacgggggcataggtttcagcgaaatccaaacctttgacttgngaatatttctgggccacaaggcgggctttgttccttgtcaccacaccatgctcatcttgcttgttgtgaaagacccacttggntcctacaacattttgattaggacgtggaacaagatgccatacctcattcctcgtgaagttgttgagttcctcttgcattgncaacacccaatctgaatcttttaatgcatcttccaccctatatggctcaatagaagacacacaagagtaacgttcacaaaagtgagtgacacgagatcgagt

SEQ ID NO: 63111 - DNA, 331 bp, Zea mays
  unsure (1)..(331): unsure at all n locations
actctgcggnggcagattccaagcagaataagacaagggagcaccagcatttgaaaccctgccccttaacatcaagtcaatccaactcagcaggtcctcattatgaatctgtctattggtaattcgggttgggtcgttgacccctgtgtatagataagctgggtaaactctgtatttcagaggctagatgttctctaaaacaaagtcagcggccacaactttatcagtcacgcctctgtcttttaacgagcatatctcagcaagcagcaccttggactcgactacctctgaactgtgggggggctctgtccaactgggcgtgcggaccgtc

SEQ ID NO: 63112 - DNA, 338 bp, Zea mays
agctttgcaccaacaatttaacttaggaggtgctgttataagctggtgctcacggaagaggctatgccattaacaccatatgctatactaataacctaatatcaacatgcgtgctccacccacctggatcgctgataagaaccacgaccaaaggcccaagagtatgctaaagcccaatgtcaaactggcccgcctagaatgggtgaaatgatgtattggcccatgctaaattaagctacttgtactgctcagacgtgggatagaatgattatacaacaaaagacaacacttatctgcctacctactcttgtgctcaccttctttcttcctatgcatcc

SEQ ID NO: 63113 - DNA, 558 bp, Zea mays
  unsure (1)..(558): unsure at all n locations
ctatancatactnaagctctaccttattacattgaccattcaccatcaaatataatatcatatattgcatatcatgccccngcatatatcttaactgtgacaccacganaatccatataactacaaataataaactctagttatttatgttaatcatngggaataatctctctaatgtgtttaaattattatatcttgcatttgtagatcaattcttctcttgtactgcgccttgaattgactatctggatgctctatcatcatattcttcttaaagaaaaacctattaattaatataataattaaataatataatagctattagtataaaaacaagtattttatttataaatagtttcggtgaatcttntatgaatttttgagctctgtaaaaatgtatttccgaattagaaaaaaataccttctaacctaaccggcccactgtgggcccaatcccctataccctaaccgtgcgcgcgctctagctcttccaggtcacagacgctggcgcctgtgcactcctattctcacgtttcctctccctccctatctctataa

SEQ ID NO: 63114 - DNA, 458 bp, Zea mays
  unsure (1)..(458): unsure at all n locations
ctgcagctaccttagtatatgtactaaggttagaagacttttcaaaaggggagtataattaacagaggggggaatcataaganaaacataagatgtagaaagttgattagtgcattctatgtcatgagcatcacgtttattttatgacacaaagcaccctatgaatagtatgatataagttgtcttcactctttgacccaaatatgtgcttttggcatttgagtacaaaattggtattttctgaaatgcacatatttagggggaggaaactatattataggattcaaaatcttatttatcaaatcttatgtaagctttaaatgtgttgtcatcaatcaacaaaaagggggagattgaaagtgcagtcatcccttttgtgagttttggtgatttggataacaacacatttaaaggtctaacaagtttgctaagtggtgaacaggacattcagtatgatg

SEQ ID NO: 63115 - DNA, 467 bp, Zea mays
  unsure (1)..(467): unsure at all n locations
gattcttcatcccaacatgggctagtcggcggtgccatatccaacccatgttagtcttagcaattaagcatgtgtcaagttcagctntatcaaaatctactaagtatagctgaccctctaacacacccttgaatgctattgaatcatcacttcttctaaagacagtgacacctgtatcagtaaaaagacagttgtagcccatttgacataattgggaaacagaaagcaagttgtaatctaaagaatcaacaagaaaaacattggaaatagaatggtcaggagatatagcaattttaccaagtcctttgaccaaaccttgatttccatccccgaatgtgatagctcgttggggatcttggcttttctcatatgaggagaacatncttttctccccggtcatgtgtgttgtgcacctgctgtcgagtaccaacttgagcccccggancataaacctacaaacaatttag

SEQ ID NO: 63116 - DNA, 244 bp, Zea mays
  unsure (1)..(244): unsure at all n locations
agtacatttctcaactatcgtgaatatatgcacgatgctgctggatggtattattcgtgtgcatgcatgctgcaacgaactcatatgattatgccaacgccttatgatattcgtgcaccctatataagaagatagtgccgtacaatacaaaacaataagcactgtaacgtgcttacggcgaaagccatatgcactaatataatcctaataacaaacactcntttcttttgatatactttcggat

SEQ ID NO: 63117 - DNA, 286 bp, Zea mays
  unsure (1)..(286): unsure at all n locations
agtatcgagtntacgtctattaaaatcaactaagtatagctaaccctctaatactcccttatatgctactaaatcatcacttcttctaaagacaagaacacctatatgcgtaaaaagacagttgtaacccattttgcataattgagaaacagaaagcaaattgtaatctaaagaatctacaagaaaaacattggaaatggaatggtcaagtgatatatcaattttaccaagtcctttgaccaaaccgtcgatttcatcctcgaatgtgatagctcttttgggatca

SEQ ID NO: 63118 - DNA, 456 bp, Zea mays
  unsure (1)..(456): unsure at all n locations
agctntggatagcctatattatccattatttcctgtgcaacatctatctctttggtatccggcaagcagtaaaggaaatcatcttcatcatttcctccatatactaaggatcctcggggatatttcaggtcctttgcatagtattgcacttcggcaatttgctcttctattaaatgtttccctaaagcatgacaaacaatataaccaaaatcgtctcgacaatatgcttcggatgtaggcgatgatagcttctctggaagaccttcctttgcttgctccacctatttagttctcgaaggaccaacttcaacgtaggtaggagaagcacttgcagcagctacttcacccaattcttcaatcttgtcatagaagcaggagttagcaccttcgaagatttagaacagcatccacaacgttggtcattcttctccctttccaaggagttaccaatggagc

SEQ ID NO: 63119 - DNA, 461 bp, Zea mays
  unsure (1)..(461): unsure at all n locations
tctccttgtcgtcatcaactctgacgtagaaccattccgatttccagcctgccggccacttgcttctatagctgatcacaggaaattttgtagttttccgatatgcaaagttgtaacaaccaaaattttcatgtagcccatcctttctggccttagtttggtagtgtagctcgtgtactcggcagaaaccttcggcaaatggatccactgcttggcttcggagagcccaaatataaacactaagcctaacaatagcgttaggagttagctggtgaaaatagatcccaaatttcttcagcacatcggcaatcatcctattcaaaggaaatctcagaccagctntgaggaaactcttaanaatcactatntcatctttttgtggcttcggggtaatctcttcttcaccaaagcgaatcatcttcttctcatcttcgctgaagtagcccgacttcaccatcttt

SEQ ID NO: 63120 - DNA, 438 bp, Zea mays
  unsure (1)..(438): unsure at all n locations
agctttatcaaatggacgtgagaagtgccttcctcaatggaccaatcaaggaagaggtctatgttgagcaacctcccggctttgaagacagtgagtatcctaaccatgtctataagctctctaaggcgctntatgggctcaagcaagccccaagagcatggtatgaatgccttaaagatttccttattgcaaatggcgttcaaatcggaaaggccgatcctacactctttaccaaaactcttgaaaatgactttgttgtatgccaaatctatgttgatgatattatatttgggtctactaacgagtctacatgtgaagagtttagtaggatcatgacacagaaattcgagatgtctatgatgggggagttgaagtatttcttacgattccaagtaaagcaactccaagagggcaccttcattatgccaacgaagtaca

SEQ ID NO: 63121 - DNA, 388 bp, Zea mays
  unsure (1)..(388): unsure at all n locations
tcgactgcgatattgngtgcattaacaccatgtatgaccggaagttcttcaactaatgatgactggtgcattntttatgaaacctaaagccgtgtttccatctaattgtaggcccattntactctagtctccggtctctctctccactctaactacgggccggctcgcgtctcctcgaccatcaccaccttgacgatctccatgaaggtatttttcttctttcattgatgcatattattagaattagtttgctagttaaaatttgatgcatgatttctttgatgtctagtgatccttcctaatagaagaaaggcttaatgatgtttatntacacatctctatttatgtttggatgcctaatgatagttaattacatatcttttataca

SEQ ID NO: 63122 - DNA, 432 bp, Zea mays
  unsure (1)..(432): unsure at all n locations
agcttgtgaagattctacatcacaacatgggctattctgttatgccagaaccaacccatattagtcttagcaattaagcaagagtcgagttcagctctattgaaatcaactaagaatagctgaccctctaacactcccataaatgctactgaatcatcacttcttctaaagacagtaacacctacataagtaaatagacagttgtagcccatattgcataattgagaaatagaaagcaaactgtaatctaaagaatctaccagaaaaacattggaaatggaatggtcaggtgttatagcaattntaccaagtcctttgaccaaaccttgattccatccccgaatgtgacagctctttggggatcatcagatttctcggaggaagagaacattctcttctccccagtcatgtggattgtgcatctgctatcaa

SEQ ID NO: 63123 - DNA, 327 bp, Zea mays
gcgcggaccgtccgggtccttgcgttgaaccgttcacgacacgaggatgaccctcggacagaaccaatgcaaaaacacaagtttccactacagactgtccggaggaaaagcgaagaccgtctgagcccttgcgcggaccgtccggcctcatgcgcggaccgtccggtcggttagaaaccgataaacccgaaagtgacgggttcggagaaatgaatattatcggcctcgcggaccgtccgggccaggcgggcggaccgtccgcgactggctctgtctgacatctgacgtcgcattaaatgcaatatagccgttgatataaccgttact

SEQ ID NO: 63124 - DNA, 460 bp, Zea mays
  unsure (1)..(460): unsure at all n locations
agcttcagcggctggggctgcagcactacaaccgctggaccacaaccaggagaccgtctctcttcgggaggccagaagccagaagagaaaagctgttagcccgacgcttgaggaagaagagctagaccaagaaatcagagagatggagatgctacatcaacaagtgcagaggaagaaggagaaggtggcccgcctagctgagttgcaaaggcaaattgacgaagcttctgaggaagttcgccatctcactcacgatgagcagaacagaaggcctcatcagaaagacctccatcaggagggcttcgtcaacgaagacgactggtatgataatttccatcagggaaattntgtttttgatgatgcttctcctctgtctgctgagctgcaggctacaccttggcctccatcctataagccaccccagcttcccatgtttgatggccactccgacccgaagcaa

SEQ ID NO: 63125 - DNA, 404 bp, Zea mays
  unsure (1)..(404): unsure at all n locations
ctcagctngacacgaggagatggctcttatcatcaagagcttccggcnaatcctcaaacaaaggagagggaaggactccaaaccccgctccaagagggttcgctatatgtgtggtaagtccggtcattntattgctaaatatccatatacaagtgatagtgacaggaacgacgacaagaaaggaaagaagatggagaataaaacatactacaagaagaagggtggcgaggcacacctatggtgggaatggaactccgacgagagctccactgactccttctccgacgaggacaccgccaacatcgccgtcaacaaaggccttctcttcccaacgtcggcacaaatgtctatggcaaggatgcaanagaagaagtacattctaagaacccccaatcactacttcg

SEQ ID NO: 63126 - DNA, 458 bp, Zea mays
  unsure (1)..(458): unsure at all n locations
agcttggncattntattgctaactgtcccgacaatgatagtgaccaggaacacgggagcaagagggaaaagaagaagcattacaagaaggccaagggcgaagcacatatcggaaaggagtgggattcggattgctcctcctccgactccgacaatgaaggactcgccgccactgccttcaacaagtcatccctcttccccaacgagcgtcacacatgccttatggcaagggagaagaaggtatgtaatcaaaacaatgtcacttatgattcttccagtgatgatgagtctagtgatgatgaaatagattactctagtttgttcaagggattggatagaactaaagtagataaaattaatgaattgattgatgccttgaatgacaaagataaactcttagaaaaacaagaggaccttntgtatgaagagcatgacaaatntgtagaagcacaaaaatct

SEQ ID NO: 63127 - DNA, 294 bp, Zea mays
  unsure (1)..(294): unsure at all n locations
ttctgatcttgcatgnggaggacatattattgattgggaatgacattcctatgctggagtccgtcaaggcttcactgaaaaagagtttttctatgaaggacttatgggaagcagcatatattttgggcataaggatctatatagataggtcgaagaggcttatatgattaagtccagatacgtacattgacaaggttttgaaacgattcaacatggaacactccaagaaagggttcatacatatgtcacatggtaaacaccttatccagatgcaatgtcctgcaaccgctgatg

SEQ ID NO: 63128 - DNA, 450 bp, Zea mays
agcttatgaactctggaatgaagccttttattctcatgttaatccttctattctttcttgcaggtcttaataattagcaatgccctatgggcgcaaaagaatgctgaagacgagagttacactttagctctcaacaaccttcgaacagaggttatcaagctgagaaacgaagccacagaaaaagacaaaattctactttcattagtggacaaagtaaaagaagatgaaactagtttcaaggctcaagctgaaattcaaaagaatgagatcgaagaccttcggaaacagctgaccgaacccaaagaaaaatgtggtctcacagaggccaaccgagatattagtgaatattggagaaattatttagaaaaaatagttgaagaacttcgcgcatccaaagaaagatgcttgaataatctctgggctccgtggagaagaaaaggctagcttcac

SEQ ID NO: 63129 - DNA, 355 bp, Zea mays
  unsure (1)..(355): unsure at all n locations
ccttgatactcagcttgcttccttagtctatatttttttccatctgagtcntggagcgtgccaatgggaaaatcttcacagccatcaagaagatgctcctcgacgagaaaataggcagatggaccgacttgctaccggaggcagtctgggcgctgaacacaaccgagtgcanggcgaccgggttcactcctttccgccttctatacngatcagaggcaatgaccccgcaagaaataaacacgggtcttcgcgcacagctccgtcagccacccctgacgtggatgagccaacctccaaagatctcattgacggagaccgggtcttcgccctgcangccttaaacanataccaagcc

SEQ ID NO: 63130 - DNA, 434 bp, Zea mays
  unsure (1)..(434): unsure at all n locations
gcttaacggctagaatcaacggcagtgatgactttgcttttgcaccggactgtccggtgtgcaccggactgtcctgtgcgccatctaacagacagggttcccaactgccacatttggtggtttnnnantctcactttttctcctctaattctaattctatataaattcatactctttctatatttatcattaattctcttattacactatcataacaactatccttattctttacgttaaaatttagcttttttttaaacatattccacatatattctctaatattcatatttcattgtaaatacatttacttttttcatataatcacgatctttcttacttaccacctattaactaagtatccattatctcattttaataaattttaatttttaatcaatcttatttctttttttattatatatactttactt

SEQ ID NO: 63131 - DNA, 485 bp, Zea mays
  unsure (1)..(485): unsure at all n locations
cttaagtcacctgcggcatgcaagcttancaagtgcgagttctggatcagcgaagttctattctttngtcatattataaaccgagatggactagctgtggatccaaagaaggtagcagcgattctagactggaaagcaccaaaagatgttcgaggaatcaagagtttcattggaatggtcggttattatcggcgtttcattgagggtttctccaagattgccaaaccaatgacagccctgctagcaaagaaggttgatttcaagtggaccccatcgtgccaagaattatttgagatgttgaagcagaagtagacaacaacaccagtgttggttctgccagatgttcacaagccattctccgtatactgtgatgcttcgtacactggactacgatgtgtgttaatgcacgaaaggaaagtactggtatactcgtcccgatagttgaaagttcatgataagaaatactccactcatgatttggagct

SEQ ID NO: 63132 - DNA, 389 bp, Zea mays
actttctacttgatgtacaatggttggggggtttcactccaaaatatccttgactttgctaggatccaccgcaatccccttggcatataatacatgtcctagaaattggatctcctccagccagaatgcgcacttactgaacttagcatataattggtgctcccttaagcgcgttaatacgatccacaaatgttgagcatgctcctcttcattcttagaatatatcaagatatcatcaatgaataccaccacgaatttatccaactcgggcatgaataccgagttcataagatatgtgaagtgggcacgagcatttgtagtccgaaagaataaccagatattcaataatcataccatgtagtgatgcggctcgggatattttcggtcga

SEQ ID NO: 63133 - DNA, 94 bp, Zea mays
aacccgcgaactggccaagcaattttttttttcagtagaagagccatgagcgactttcaaaatgcgctatggacaccctacttgcttcttagaa

SEQ ID NO: 63134 - DNA, 413 bp, Zea mays
acaccacatcctttaatcctctaaccatgtctttctttaataccttcttgagtgtgctcatcccaacatgagcaagccttctatgccaaagccatccaagtgaagctttggtgaagaggcaagttcttaagactgcatcttctgaagtgaaatccactaagtagaggttggtgtatctaaatcccttgaataccattgattcatcatccatctttgttacaataacctctgttggagtgaataagcattgaagtccaagatcacagatgtgacccactgataatatattgaagctcaaaggtgcaactaagagaacatttgatattgataaatcacttgagaatgccacttgccaagccttgcactttcctctgaatatctccaatgtgatttttcttgtcatcaacttctca

SEQ ID NO: 63135 - DNA, 448 bp, Zea mays
  unsure (1)..(448): unsure at all n locations
gctgctgaattcatgagaggtcgtgcaccagcgtttgttctctcttctgaccccatggatgctgaggactggctgcacactgnggagcgggagttgcttaccgctcactgtgacgacaaggagaaggtcctgtattgtccccgattgttgagatgagcaacttattcatgaggggagtgttatctggtcacccatgccaaccccgacgccatttcttgggaagagttcagagggagctcttgtcagtaccatgttcctgcangtctgatgaccgtgaagaaggaggagttcctggcccttaagcaacggtcgatgtacgtcaatgagtatcgagacaggcttctgcgattgtctcgctatgctcctgaagatgtcgacaccgacgccgagagacaataccgtttctaagaagttggttgccctcttagtatanctgataatatacctt

SEQ ID NO: 63136 - DNA, 446 bp, Zea mays
  unsure (1)..(446): unsure at all n locations
gatcagagagccgccatatgtggagtggagctttgtaactcttcctacnccagagctacatggaaataatgcattcttcatggtctatggttcagaagcagtgctacccgccgacctcatgttctgtgcaccgatgttggtcttctaaaacatagctgaagcagaagctaccacgctagaggatattgatgtactggaggaagagcgantgaacacagtaattcagtcggctagataccaatagaccttgaggcgctatcatgataaagtcgtacgacaccgatcctttacagtgggagactctggtcttcgctgaattctaacgngggaaggacgacacaatgtgttaccactatgggaagggcattcattgatcagatgtactcngccagacatatctgctactcaaaggatggatggaagtgggaactattgacataaacatc

SEQ ID NO: 63137 - DNA, 442 bp, Zea mays
agcttggtccctgggaggaaacccagaagattttctctctggtgtctgtcctgctgctgagctcggaggacttggaacttcctcttgaggcgacctctttcttcttctctagcccttttcacttgtatggccttgtttgagaggtgcgagaagctgagaaaatcttggctagcgaggatagtcttgagttctggtctcattcccttcaagaaacgggccatcttcttggtttctttactgacatcatcaggcgcatagcgagccaattctatgaacttgtggacgtattcactgatagatatccctccttgagttaattcccgaaattcttcttctttgagctggacgatccctacgggcacatgatgctctcagaaagcggcttcaaattctgcccaggtagcatctcttactgtagcgatgaaagtatcccaccaggata

SEQ ID NO: 63138 - DNA, 281 bp, Zea mays
  unsure (1)..(281): unsure at all n locations
tcaccggacttcgggcttccgccgccgcgcgtggaccgagctaaccagtgagtctccgcccaattcctttcgctcatgtcttctctggcataccgtggacctccctgacctatttgattgaactatctcgccgcgaccaggccggtctcctcgccgccgacgaagcatcccgcctgcgcgcgtggaccgaccgactccggccatctncgacggtgttccgcacaccgttgtgatccccgcgacctccccttcaccctcggccacttcaccggaacagtctc

SEQ ID NO: 63139 - DNA, 217 bp, Zea mays
gagtcctttgacctatctctagcctattcattctttaattcacctcccgcattacacatttatacctaaggattgactagcttttgttatccatgtccttgattacctatctgggttggattattattgataacctttatgctattgctcaactctaatcaaagaacatgatgagcttatccatgatacacatgtttcccttctcttataatgatga

SEQ ID NO: 63140 - DNA, 379 bp, Zea mays
  unsure (1)..(379): unsure at all n locations
actcagctcgccacatagctccttgacaccttagagcatatctctttatatgctangacnaangngntcgcacagttatttcataccaagtcatatgtatattgaaagggaattggagtcttcggcgaagacaaaggcttccactccgtaactcatacttcgccatcactccgagcaactctctcgtctttgggggagaaatgagcatcaaggaaaaggacttcatccttgtgagagagtaaaagctcacacgcacaagggacttcgtctttggtataatcttaactcacttatntatgaccaaaggggaagtttgcacttcgagggctctaatgattccgttcttggcgattcatgccaaanagggggagaaatgagc

SEQ ID NO: 63141 - DNA, 405 bp, Zea mays
  unsure (1)..(405): unsure at all n locations
tccttgagggctcctaaagacgggttgtgttctgttttctcctanctnataagaacctacagtcttggaggcacctagaggccaaaagggctctggacctccggtagccttgagggtatctcgagatttagtcgtctaggccaaacggccttgaagaccacgagaactatatgatttgttcccccagcctagagagcatcagaggtgtggaggaccctggaatttagttggaaatgggtatggcctcctaagggcatgagccctaaggtacgagggtggcatgaggatggttcactttaggatttcttttgctaatgatatctcatttaagacgtactactagtatattagcggatggtcttctctaacgctgacaactatattatttaccactatgttacattc

SEQ ID NO: 63142 - DNA, 446 bp, Zea mays
  unsure (1)..(446): unsure at all n locations
agctngtgaagccaatcacaagtttgttgaagaatgacactaagttcaattggtcttctaagtgcaatgaagcctttgagcaactgaagacactattgaccactgctccggttttggctcaaccggacatcactaaaccttttgatgtatattgtgatgcctctggcagtgggctcggctgtgtactgatgcaagagggccgagtgattgcgtatgcttcaaggcagttgcgccggcatgaggagcactatccaactcatgatctggagctagctgctgtggttcatgccctaaagatttggcgtcattatctgctgggtaatatctgtcacatatatacagatcataaaagtttgaagtacatctttacccagtcagagttgaatatgatgcaaagacgatggcttgagctcattatagactatgaactggaaatccattatcac

SEQ ID NO: 63143 - DNA, 432 bp, Zea mays
  unsure (1)..(432): unsure at all n locations
gtgaagattcttcatcccaacatgggctagtcggcgatgccagatccaacccttattagtcttagcaattaagcaagtatcgagtttagctttgttaaaatcaactaagcatagctgatcctctaatactcccttaaatgctattgaatcatcacttcttctaaagatagtaacacctatatccgtaaaaagacagttgtaacccattntgcataattgagaaacggaaagcaaattgtaatctaaagaatctacgagaataaaattggaagtggaatggtcagttgatatagcaatnttaccatgtcctttgaccaaaccttgattntcatccccaaatgtgatagctctttgaggatcttcgttnttctcatatgaggagaacatcnttttcttccctgtcatgtggtttgtgcatccgctgtcaataat

SEQ ID NO: 63144 - DNA, 435 bp, Zea mays
  unsure (1)..(435): unsure at all n locations
ncaagctttacagaagaagaaggagccttctgttgcttataagcccgctgaaccaacaaagcgaaggattattactgtcattgaagctattgaagaaacatcgccgtcggcctcagcgccgaaaacagcagcagccgaagctgcttctcccgaagcttctactttcgaagctacagaagccgaagccacaaatttggaaaacacactttctaacattgatgaaatgagtttgaatatggctgaggaagaaattgctgcatctgctgaggaaaccccggctgcagtgcctgaaaaaagggagaagatgcctggaaaagagaaggagcttgccgaagatgcttcggaagaaagaaatntcaacttttcaaacataattgcgcaagagttgctaaggctgaaaagaaagctgggaactatgctatatttgcgggacta

SEQ ID NO: 63145 - DNA, 384 bp, Zea mays
tgataccagctgtggcggaactgtccgaattattccaacttaattgcctaagccccgccttagaggctagaccacacttaaatgggaataacccgccaatccctcggatctagtccgacacggccactgatatgatcaagtaccacaatctcactcaatggtgagtcacagagcacatacaataaagcataaaaccatacatgtcagagtattaaattattacatcatcatcatcatcggagtttttgcaaaagtaaccatcattgttcgaagtgcagcagaaataaactaacggtaaataaatagagagatggggaagcctgtcccatcactcctcatgctccttctcaggcgaggcagggttccacttgacagttcaacccg

SEQ ID NO: 63146 - DNA, 389 bp, Zea mays
  unsure (1)..(389): unsure at all n locations
agctngatttggagttatatttgagtntattttgtttagatttctcaacctttattggtgcttattaaatatacttcaatttttataattggctcaagtcttaattataaatttttcatgctcttttccttattttcttgaactttgctcatggggctcacttagggtttttattagggttacaacattattacctttttgagagacccatttgttttttatcataatacttttaagtatatgctcggtgaattctttattacttaagttaatttgatgctcatgcttactttggttcacataaaatgatggttcttggtttggcattttgagagaaaccctatgtgacactggggtgtcacaacctttcccccttataggaatctcgt

SEQ ID NO: 63147 - DNA, 349 bp, Zea mays
  unsure (1)..(349): unsure at all n locations
tcgcacttctgaactaactcggctgtatcactcttcactgntggccaatagaatcctgacctgaagaccttcccgactagtgttctggatgccgcatgtattccacattgcccagcatggacctcctccagaagtcgcttcccagtagatgggagaatacacttcatgaggacgcctgatgcaccccttctgtacaatgtctccccgatgagtgtgtagtgagccgactgtctggcaatgcgctcggctgaattcttgtcatctggttcctcttcattctttatatacttgatgattggccttctccagtcatcagagtctgactcggtgtgacaccccagtgtcacct

SEQ ID NO: 63148 - DNA, 461 bp, Zea mays
  unsure (1)..(461): unsure at all n locations
agctntanattntctaattcattctcatgtttctttctttctcatattggttacattctcatgtttgtttacgttaggccaagaaagccaaggaaaaatagtaccaaagaatggtttcctaaagagtctacgccggagagagcagaaactacaagagaacaactaatgcaagagagtcctggaataatgacaagaaggtacatatttcatgtttgtcaccatgcatacattgtgttgaaaacaagtgaattttgataaatatatggttacatatgcagacgtcttggaattttgatgggagaggtgacaacacatgaggcttcttcttcgcaggctttagagactacgacaacagctccaagaaagatgactccaagaaaggcgaagagaaagttgtgaaattgactttttaaagacacttagagaaagatgttagtgcagcaataaactgttagtgaaat

SEQ ID NO: 63149 - DNA, 457 bp, Zea mays
  unsure (1)..(457): unsure at all n locations
agctntcctagccctcagacccggcagaactgtaccggaaggtcaagatcgccctcaccggactttggtcgcccacctgcgcgcatagaccgagcaatacggtgagccattcttcaattccttgcgcacacgccttccttgatccctggtgaagctctctgacccatttgattggtcaattgtgccctggataggccggactcctcgacgccgacgagctccccgcctgcgcacatggaccggccgactccgaccatcctcgacggcggcccgcacatcgtcgtgaccctcaggacctcccctacaccctcggncacctcaccggagcagtctcgccaccggtaagcccctctgtcctttcttccgccgcgggtactgtntaaatttggggaaggagcttgngttangattagaagaatccagngggttntctgaactgtcagcgacacatttgaat

SEQ ID NO: 63150 - DNA, 454 bp, Zea mays
  unsure (1)..(454): unsure at all n locations
tctccgncagtctgagcagttcgaacgagaaaaacaagatctttatgtctaacttgaagccgaagctcaacaaaattcagatttgagaaaactactgacaagtcttcaagaaaaatgcttggaatttagcaacaaatgcattcaacgattaagaaagattttttactcagttggagccagcagtgaaaaattcaccccctcagctgaagatctaccgaaaaccttcgaacatattgagggggagattgacgagctcgacgaagtcatagctgggcatggtgacttctgtgcctgggtggcttctcgaggcactgctgcagccttcctgaaggctggctgcgatcatggaaagaatgtcaacaggccaaatttcactttatcaccatcaatcctggatgacattcctgatctcgcccgaagtatctcgaatagattttgtaaaatgatatggaca

SEQ ID NO: 63151 - DNA, 430 bp, Zea mays
  unsure (1)..(430): unsure at all n locations
ataaagatgtgagngcaacagaaccaagtggctatagtgtgatctcttgctaatcacaataatcacagagaaagacaacacaagagacacagtggtttatcccgtggttcgaccaantataacacttgcctacctccacgttgtggcgtcccaatggacgagggttgcactcaacccctttcaagtgatcctatgatcaacttgaataccacgatattcttccttatatgtttcttcccgtttgcgaggaatctccacaagttggagcctcttgcccttacaaggttgttcacatagaaagcacggagttaggttaggaagagcaacgcacactataattaaatgcacacgcacacacgcacacgagtgagaagatgagcacacaacacacgcgcaagggagttacaactcgagaagtgctccaatctca

SEQ ID NO: 63152 - DNA, 436 bp, Zea mays
  unsure (1)..(436): unsure at all n locations
agcttgtggcgccctacggcgtgtgtgtagagccgaattttcaagtctgagagcacctagagggggggtgaatangtgatcctgtaaaacttcaaaacttaagccacaaaaacttgtaagtgttagcacaattatggccaagtggctatagaggagtcaaaacacaataaccactagagatcaatcacagagaggacacggggctatccctgtgttcggcccaagacaaaagttgcctacttcacgttggggcggcacaacggacgagagatgcactcaactcctctcacgtgatccaatgatcaacttgaataccatagtgttcttgctattcttatctcaatcccgtttgcgaggaatctacacaacttggagcctctcgcccttacaagagatgttcacagagaatcacggtgcaagggagggatatcagctc

SEQ ID NO: 63153 - DNA, 353 bp, Zea mays
  unsure (1)..(353): unsure at all n locations
ctcaagctcgagagtctgagtgaacttgngttgcaatgtcgcatgcctactctttttagctgaaggagggcatgcacaaaggtactgagccccgacatgtgggcccagcgacaagatgtatatagcactcggagctactaatgttcgctgctggggcaatcttctcgtgccctgacctccaagatctacgtctcctcggcgtgccggggaagcttcttgtacaatggacaatatccatagtgcgccgcatagcacgggtgcactgtttgacaacaaacctaacatgcgcgccgcctgcaaggttgttctgacgccgtctgccaacggagtggacaatacgcattaaatgctga

SEQ ID NO: 63154 - DNA, 405 bp, Zea mays
  unsure (1)..(405): unsure at all n locations
agcttatctcggcgtgctgccgcattgtggtttatggatgtatctgtatcactgccgtcctgngatggcgcgggggcaacatcagttggtcggaggtgccagtttggagatgcgtcgtgggcggaaaaccgagtatctcgaaatacccctcaaagacagcattaaaggttggcgtctggagtggtttatagttgataactatggaaattctctcccctcccggtcaggaagacagccagacgttcgtactccgagttggactgagtttcccacggatcaagaggtggccgaggcatgcgtgttgctttctgaagtcggattactgaaagagagaggtctgactgctgaagctgtggtcacggattctgttttcaagaacattcagccgctgtaagacagggctta

SEQ ID NO: 63155 - DNA, 412 bp, Zea mays
acacatttgggactaacaaatgttcattgtgagaaagacatgatttgtagcgcatgtcaggcagggaagcaagttggtgttcatcattcacataagaacatcatgacgactgacaggccactcgagctcctacacatggacctattctgcctgatagcttacataagcatcggcgggagtaagtactggctagttattgtggatgactattctcgctttacttgggtgttctttttgcaggaaaaatctcatacccaagaaaccttaaagggattctcgagacatgctcaaaacgagttcggcttaatgatcaaaaagattataagcgataacgggacggagttcaagaactctcaatttgaaaggcttcttaatgaggagggcatcaagcatgagttctcttcttcctaca

SEQ ID NO: 63156 - DNA, 455 bp, Zea mays
  unsure (1)..(455): unsure at all n locations
agcttnctactatgcacaaagccggtggaggtagcgtctgatcgcctggttgtaccgtgcatttcgcactgctgctcgccacctgtgctagtcgatgaagtccacatcctcgcgccatagctgttcttgcgcagactcatcaaacgactggactcgtggggagcccataatgatttctgggggaaggcatgcttcggccccgtagaccaggaagaatggcgtctccctggtagcttggctgggcgtggtaaggttcccccgtagcacggagggcagttcactgacccaatttgcgccatgcttctttaatagtcataggtacgcgtcttgagtcccctgagaatctctgcatttgcactttccacctgtctgttgctcctagggtgggacacggatgctaagcagagatgggtgccgattccttcctaattctccctgaagatccgacttgtaaa

SEQ ID NO: 63157 - DNA, 186 bp, Zea mays
tgtgcagcttgtcaagcacggaaacaggtgggaggctctcatcacaccaaaaatgtgatgacgacatcaagacccttggagatgctgcatatggaccttttcggacccgtcgcctatctgagtataggaggaagtaagtatggtctagtaattggtgatgacttttcccgcttcaattgggtggtc

SEQ ID NO: 63158 - DNA, 457 bp, Zea mays
agcttgtccaacaccaattgaggtggctttttaacatgcccaatggagacctgcagcaacaccaatgtgtagtgggattctacgacacactagtatcaggaagagatggagagaaatattgaacgttttatgagaagagacattaataggatacatgaaaatagaatatactcatagatttaaccctaaataggagtagatgcaaaatatattcttaaaccttgatttatggtttctattagattttggctctaaactactctaaataaattagttagaactaaaaagctctgttattgccattaaaaccaaggatatatatattggatattatgagctctaggcttctaataactagaggaagcccaggtcagatggtgccatctggtcgagtcggactaggtccgagcatctataatagaagaccctgagtgctagggttcagtttttcacaccc

SEQ ID NO: 63159 - DNA, 422 bp, Zea mays
  unsure (1)..(422): unsure at all n locations
cgcacggagtaaacccctgtgaccttgatacagtattgttgtggctccaaaccacctttattaattcgtctggccattttcctttaggctgattgaaaattgacttcattattcctgtcattatgatgccgcttgcttttnttaccaaaccatttgactcangatgcctcactgatgcaaagtgtatttntgtaccaatttggctacaaaaagctntaaaagtctcggcatcgaactgagttccattatcaacggtgatagccttcggtacgccgaagcgacaaacgatgttttgctagaagaaattttgtactatggctgaagttattgtagccaaaggatttgcttcgatccactttgaaaatattccactgtcaccacaacatantttaagttcgcctgtgccggtggagtggtctaac

SEQ ID NO: 63160 - DNA, 453 bp, Zea mays
agcttcggcataccccattacttgtagcgggggaatactctgttggctaagtattcctgaactaaatccctggtaccaatatgttcagacacaattctaaattcgcccacagcatctgggcatgatgcccccggcggcatgttgcgctgaggcctattcaacccgaaggttagcttcagcgggctctgaactagcttctgctttttctcatcaatcttaacataaaaccattcagttttccaaccgggcgggcacttattacggtagctaaccaccggtgtcttcatgtctttgcggtaagcaaaattatagcagccgaagttctcgtgcagtccatcttctctagcctttgtctaatagtgaagttcgtgtacctaacagaaagcttcggcaagcggcttccctccttggcttcggagagcccaaataaagacgctgagcctaacgatagcg

SEQ ID NO: 63161 - DNA, 351 bp, Zea mays
  unsure (1)..(351): unsure at all n locations
catgaagattcttcattccaacatgggctagtctgtggtgccatatccaacccaagttagtcttagcaaccaagcaagtgttgagttcagctctatcaaaatctaccaagtatagctgaccccctaacactcccttaaatgctattgaatcatcacttcttctaaagacagtaacacctacatcagtaaatagacagttgtagcccatttgacataattgggatacagaaagcaaattgtaatctaaagaatctacaagaaaaacattggaaatagtatggtcaggtgatatagcaattntacccaatcctttgaccaaaccttgatttacatccccgaatgtgataactc

SEQ ID NO: 63162 - DNA, 357 bp, Zea mays
  unsure (1)..(357): unsure at all n locations
agcttcggcgatggttaaaaagtgtggcagcatatctgtgcaaatagcaatgaatgttgtggtaacttcacacctactcgtctgtttatatagtactgcaggtaaaaaggcgaggcgccaggatttttacaccaggcggacacccgcttgcactcgctgcgcggtggaccgcagagacaaacagtaactctgcaaggtgggaccactacgcgctgggaaactgaatcgttctcgcaacgagctcagggaggtgtttttggaccttcgcttcccgaagcttaaagacttnttacggatcagctcgtacgaaaacgatctacaccgcaaaggggctctgtgggactatgcttcgcaccg

SEQ ID NO: 63163 - DNA, 462 bp, Zea mays
atgatcttgagaagccagcatctgttacaagcttggtggctaacatcaaaggggagaacaggtttgcagaggtcaaggcagagaatgccgatgttcaggcagatattcacagaggaaagaagcatttctatggtgatgacttggatgcagaggaagggaggcgcagtaaacattcagcaccagctattgacactgatcaccttgtgcgggagatgatggacaacgtcttggtgtgcaatggcgagacatgttcaaaaggcgtcaaggagctccatgaagccctgcagcatgacgtcgcaaaaaattcacacggggttcatggaaaagggccacatagaggccaacacaaggagggtatggtctcctccatcgcctccctccctgcgtggatgagctatcctcttcatcgctagataagaagtcttctgcgtaaggtacttcttaccttttcgtgccaacaca

SEQ ID NO: 63164 - DNA, 366 bp, Zea mays
agcttctccaccatgtcgctgctagccaagttgttgcagctacctccatcaatgatcaaacgacatgaacgctccttaatgacacactttgtttgaaacaacgtatgtcgctgattctgctctgccttctccatttgtgcactaagcacacgctgtacaatgaggctctcataatgctctgcatcatctgcaccaatctgttcttcgggtggttccttagtgcctgcatcatcagccgcaagcaaagcaagtgtagcttcatccaaatcactagcagaggaatacccaccatcgtcttttaccaccaaaacacgctgattaagataatcacgctgcacgtgtccatagcccttgcatcgattacac

SEQ ID NO: 63165 - DNA, 161 bp, Zea mays
tataacaggaggatagaagcaagagctcgaccatatgtcataatataaggggaactatacaagcgaggggtctgttgcccgttgctcaagtgtttattcagagccgaaggcctataattgatgaaggaaatacacgcagggctgtgtggatctcacattgg

SEQ ID NO: 63166 - DNA, 464 bp, Zea mays
agcttagcaaaagaaatttctagaatcaagaatatttttctcatgcctaagtctggtaaaagattgttcatcaagtggcttggtaaagatatcggctaattgatctttagtattaatgtaagaaatctcgatatcccccttttgttggtgatccctaagaaaatgataccgaatggctatgtgcttagtgcggctatgctcgacgggattgtcggccattttgattgcactctcattatcacatagcaaagggactttggttaatttgtaaccgtagtcccgcagggtttgcctcatccaaagcaattgcgcgcaacaatgtcctgcggcaatgtattcggcttcggcggtggaaagagcgaccgaattttgcttctttgaagcccaagacaccaaggatctttccaagaactggcaagtccccgatgtgctcttcctattgattttgcaccccgcccaatcgg

SEQ ID NO: 63167 - DNA, 501 bp, Zea mays
  unsure (1)..(501): unsure at all n locations
taagctctagctcttgacataaattacttaccagttaacatgatcagaataatgttaagaagtaaactaggtatgaagcanggttaagggctgaatatgcttttttccatttatacaagatatgcaaagaaggtatgaaaaaggaagatctaggtacaagttaaaatgaaagggaagtgtttaccctttngtaccttcacttagagatgctctctntattgtgctttggccttagtcttagtcgcttaagacctatactcaagacaatacatggaaatattttgcacaagagagggttctacaactagtgatccttttctaagtcattggtattatatatcaagtagatcacaaattgcataaatgtatcatgaattctncttttaacttagtgcacaagagagatattgattgagaatacatgatgcactaagaagcataagtgtaaattgagctattcatgatcaacacacacagatgcgatcaagaacacatatcata

SEQ ID NO: 63168 - DNA, 375 bp, Zea mays
  unsure (1)..(375): unsure at all n locations
gcttctatagggagagcacattttgagactgacattgtttattttgagaaagacacggattgtagcgcatgtcaagcacaggaaacaaagntggtgttcatcattcacataagaacatcatgaccactgacatgccgcttgagctactccacatggatctattccgcccgatcgcttacataagcatcgcgcgggaaatagtactgtctaattattgtggatgattattctcgcttcacttgggtgttctttttgcaggaaaaatctcaaacccaagagaccttaaagggattcttgagatgggctcaaaatgagttcggattgagaatcaaaaagatttgaagcgacaacggtacggagttcaagaactcataa

SEQ ID NO: 63169 - DNA, 345 bp, Zea mays
  unsure (1)..(345): unsure at all n locations
acacgtgataggttngactaacgtgcaatttgttattatttttcttgtgcagcttgtcaagcaggtaaacaagcgggaggagcgcatcacagcaagaatgtgatgaccacttcaagacccctggagctgctgcatatggaccttttcggacctgtcgcctatctgagcatatgagggagtaagtatggtctagttattggtgatgacttttcccgcttcacttgggtgttctttntgcaggataagtctgaaacccaagggaccctcaagcgctttctcatgagagctcanaatgagtttgagctcaaggtgaagaagatnacgagcgacaacggatccgagttc

SEQ ID NO: 63170 - DNA, 259 bp, Zea mays
agacgctataaactttcttcgcaccccaatacgacatctactcttccaggattactccctaagcacagccacatccttcttacgtgcagtctggtgcccaccacgagcctgtggactttcaaaagacttattgcaaaaagaacagttgtagaatgtttcctaacatccgacggtgtgcgcgaaacactgtgataagctctactatggacccaaaggaggctaagccatatgtctacggatatccacgattagcttaatc

SEQ ID NO: 63171 - DNA, 426 bp, Zea mays
  unsure (1)..(426): unsure at all n locations
agcctttctgctgacatcttctgaggtgtatcaagacctttgtattatcctggtcttctcctggcgtgataacgacttgagttcgaaggtactctgctcacacattatacttccagaaatactgttaaatcctgtttttgaggaccttctgatgccgaaggtccccaacagtagcctctcgcaatattaatttgttttaaaataacgaatttaaaatgcgacgcgaaccaatgctttcgcccaaggtgccaaaaaacacctttctcttgctagaatagcaacaatcactgacaagcggngtctttgaattatcaacgcttttggcgtataaatactggcataccgcaaactcatttgacacgctttctggccgactgctctcgcttactcaaattttagctcttgtgcactacgatttgctaaact

SEQ ID NO: 63172 - DNA, 353 bp, Zea mays
  unsure (1)..(353): unsure at all n locations
atactcgatgcatatccactctatttgttcccttgtatgatgtactgcttgcttcccaatttgaatggatgtatgtatgtatgcttgcaatcgcatatagaacgatccggtcgaagagcccgaggaactctcaagagaatcccctgagcagcagtcggttggtggaggcaagtgtcctttgacctatctctgtcctattcattatttaattcacctcccgctntacacatatatgcctaaagactgactagcttttgtattcatatccttggttacctatttgggttggattaatattggttagctttatgctattgctcanactcttatcaatgaacatgatgagaatatct

SEQ ID NO: 63173 - DNA, 452 bp, Zea mays
  unsure (1)..(452): unsure at all n locations
agcttgtatgcaacagacccaattgtgtcagttactgttatatgtccaaagaaccgaagagccaacttttgagtttcacgacgagcgaggaatgactggacataatgctgaattntcaggaacacttgatctccaacttcaaaatgtctttcagtgcgttgtttgtcagcttgggacttcatacgctgctgagctcaggcttagtgttgcntgcacaactgttgcatgactgtcttctactgcagacaatcacgcagaggtgtatctggagaggcagcattcaagtcaataccgaaatgacgaggtttatacccatacaacacttcaaaaggggaaaacccgagagctgaatgccgactctcatttgtcccacattaagcctagtaaagacatgagcccacttttgaggcaagcattcacaagcaacgaaatatgttccatacattggtact

SEQ ID NO: 63174 - DNA, 438 bp, Zea mays
  unsure (1)..(438): unsure at all n locations
tcagagccgaagcaactccagctttgaacgaagccatcagctcataaagtggttgtgagntcaccggaggtgggcgccaatgttggggacttgttctcaaatgcttcgaattaagaacaaggcaacacaaagatgttaagtataaatgcccttcgtccactgaagcattatctccccaaggatttaatgagcttcggacgaaggtcataagtaaagtatcacgaaggcttcaccttcgtgatcatatttttaagacaacaatgagaaatgaaatatacaacacaaaatatattcacatgttntattatatgaatatacaagtattaaaacataatatttaggcacatttataccttcgccttggagagaacaataatcaagcgtaacgtgtacgtgatacatgatcgcgtgaacgtgccggatgctgttacctattat

SEQ ID NO: 63175 - DNA, 399 bp, Zea mays
  unsure (1)..(399): unsure at all n locations
aagcaaacgagctgcaagcattgcgcatggcagcaagcatgaacaaccacacgaagaaagtgttatttgaacccggtgacttgcgttggattcacttgcgcaaggaacgttntcctgatcagtgcaaatccaaattgaggccacgaggggacgggccatttcgtgcgcttaccaagaacaatgataatgcatacaagatagatcttctaccaagctatggcgcgagcaacacgttcaatgtcgctgacctcgcaccatatacaagcgaagacacttcagagtcgaggacgactccttttcaaggagaggaggatgatatgaccacgccatcaagcaacacgccacaacccctaagtcatactacatcaacccaagtacaaccaacatcatcaccgaccc

SEQ ID NO: 63176 - DNA, 342 bp, Zea mays
tctaaagggagaacacgtgacaagtctaaccaatgttcatttttttttatatagaccttgtgcagcttgtcaagcagggaaacatgtgggaggctctcatcacaccaaaaatgtgatgacaacatcaagacccctggagctgctacatatggacctcttcggactcgtcgcctatctgagcataggaggaagtaagtatggtctagttatcgttgatgacttttcccgcttcactcgggtgttctttttgcacgataagtctgaaacccaagggaccctcaagcgccttctcaagagaagctcaaatgaggttgagctcaaggtgaaaagataatgagcgac

SEQ ID NO: 63177 - DNA, 459 bp, Zea mays
  unsure (1)..(459): unsure at all n locations
agcttcagctnctcattctttagcttcatcatcctgttcatattaaaacggaatgaggaaaccgcagagttcaaggagaaggtaaaagtaacaagtataagtttctcactggcttaaggtggctccgagcttcatcaccagccatttttcgcccaccgtttatctaaatctgggtcataaatctgtttcctatgcttcgaactaggctggggatgtcaattaaatctgctggtgacaaactgaagtttggcctattgacaattttcccgtgcgtacagccagccttcaggaaagcagcagccgtgcctctagaagctaacagggcgcagaaatcggcatgcccagcgataacttcatcaagtgcgtcaacttcgccctcaatgtattcgaaagtgtttggcacgttttcagctgaaggtgtaaacttatcagagctaactccaattgagtggaacacat

SEQ ID NO: 63178 - DNA, 500 bp, Zea mays
tatcccatcgactgcaaaagccagtgtctgcatttcataagatatacttctcagcatataatattatgtagtccaacatacagtattataccattattacctttctggcatgatcattttgttcactgacaccactaacattcataattgcgtgatcatgcaaattaacctgtaattgacaacacattgtgttaagctcaatcataacccaataactcaaacttataaatcatgtatatgtataactgcaaatcagtatagttgttatagatattacctcttctaatggacgtattggtatatgtatctgatcattggccacaccttgttcaagtatattagatatgtcttgaatttcctgaaaatgtggatgaaagctcaatatacatcatttacatcataacacatttcagaccatacgttcacagtgcatgcacaatataactactggatggtataccatctctagctgcctctactgatacaattaaccacatact

SEQ ID NO: 63179 - DNA, 438 bp, Zea mays
  unsure (1)..(438): unsure at all n locations
agctntgacatccataatcatgtctttctcgatatcttctanagccacaaatctcttgtcgggtacttcattaatattgtcaatcatcaaattatagtaatctccgactgctagatcgttctgtctggcacacctaacgacatttatgcttatctctacaggaaaaacaacttcttgtccataaacaagcttaaaaggagagactttattaacacggtgcttacatattctatgagcccacaaagcctcaaacaaaaacttatgccaatgcctaggatgatcagatatcttcttctatgaacccacatatgccttattcatggcataggtggatgtatttcccaaatatgggtttgatccacttggatatcttgatactcttggacctataattggaggaagtctatctataaagttgataatcgcctagaggggggg

SEQ ID NO: 63180 - DNA, 456 bp, Zea mays
  unsure (1)..(456): unsure at all n locations
cgactcaggtatccacacattaatccttaattgagttttcgcgtctcatggacaaagcatcctccctggatccaagtccatagaccaacatagatcccgttatcaagatgaatacaatcaattcctgacctcgcgcgagtgctacaaanatcactcgacttctaccgagatcctgattagcaagcagctactcgacctagcatactagtattcatctcagagaggaatcctaagttcatgcaactagagggttcaagcaactnctacacttaagtgcacattgcaatcctacaagcattaagtgtagtaaaggagcatataataacatggttatgcataagaccggagcttgccttctattgctggggctgggggagatcctcaatagcagactctaaagcctggctctgggtcctctcttggacagggtcttgctcggggatgagcacgtactct

SEQ ID NO: 63181 - DNA, 323 bp, Zea mays
ctgagcatcaacttatcaaatgtgagggccagacagtttatctttttttcatcatgaaccagcgcctgcgaaagatccctactcactactactactacacccacacttctactacactatactaatatctaagccgatggtcctcctcctctgagtcatcccagccatcgagacctacttcctttacggcatggagtaacctttctccgttgctcacaaccccatccagtcatcttgatcaacccgacgatagctaagtggcaacccatggtggagacttgccaccctcagaggagaactttacctccgaataccagagtcac

SEQ ID NO: 63182 - DNA, 387 bp, Zea mays
  unsure (1)..(387): unsure at all n locations
cactatataatactaagctcggggacagctccatgcgcctagggggcccttatatgtccaattgctctanganncccnggagagcaatttggaaggccgatcttgccttctgtcgagtggtgcaccggacaatcactgttcatgtccggtgcacgatctccttccatatcgggcacaaccgaccgttgctcctctgggccggttggcgcaccggacactgtccgatgcacaccggacagtccggtgcccccattcgaccgttggagcgggccacgtgttgcacgttgatcgcgatgacgatctgtggccgctggcgccgttggctcactcgatagtaccgtgcactaccggacagtncgatgaatataaccacgtcaccttttcttt

SEQ ID NO: 63183 - DNA, 429 bp, Zea mays
  unsure (1)..(429): unsure at all n locations
agctntanagggtaatcttcacctacaaggaatattatgaatgttcaaagccaaggtatggaacaaattgcttcaattggtagttgatcaatagtacttccttccaagtggcattctttcaattggtaataatatattctatggaaaggaatgtcaatatgaacgttaaattccttttggctcacatttgcaaattaatgcatattgtgaattcactgctccatgtgcattaactcagaaggaatttaatttatgcctctacgcctcataaatgatgatttgattgccattcatatatagatatcatcattcattaaatacttccttgtactactaatacctcttttcatagtgatttatcgactagttctcataggaaaagagataacagagaacgaagtctccacacatgatgaaaagaagaatatt

SEQ ID NO: 63184 - DNA, 315 bp, Zea mays
  unsure (1)..(315): unsure at all n locations
tcatgagcggtagcttcagtattatgtataaacatggtntgccgaaggggattcttcctgcacgacattctgcgaccaagcatactcccaacagatggatcacagaggatgtgtgtggattatacatcccttaatgatgttactgtgaagaacaagtgtcctttaccccgcattgaagatttatttgatcaaatgagacgcctcacggagtcttccaacatggatctccaatctcggtatcaccaaatgaatattaagccatctaatatttccaagacaactcttctctaccgatatgggttatatgagttcaca

SEQ ID NO: 63185 - DNA, 447 bp, Zea mays
agcttatgaagattcttcatcccaacatgagctattctgcgatgccagagccaacccatgttagtcttagcaattaagcaagtgtcgagttcaactctatcaaaatctaccaagtatagctgaccctctaacactcccttaaatgctattgaatcatcacttcttctaaagacagtgacaccaacatcagtgaatagacagttgtagcccatttgacataattgagaaacggaaagcaagttgtaatctaaggaatctacaagaaaaacatttgaaatggaatggtcaggagatatagcaattttaccaagacctttgaccaaaccttgatttccatccccgaatgtgatagctcgttggggatcttggtttttctcatatgaggagaacattcttttctccccggtcatggtggttgtgcacccgctgtcgagtatccaacttgag

SEQ ID NO: 63186 - DNA, 227 bp, Zea mays
  unsure (1)..(227): unsure at all n locations
ccatgcttctatgtgaagatatatcagagcagaaagtattgttgggatctcaattatctgaagaacacgagaaaactctcataaggtttttgttcaacaacaaagatgtctttgcatggtcagccaacaatctctgtggtgtcaacagggatgtcattgaacattcgcttaatgtcgatccatccttcagacccagaaagcagaggcttcnngaaatgtctgatgac

SEQ ID NO: 63187 - DNA, 407 bp, Zea mays
  unsure (1)..(407): unsure at all n locations
agcttgccaatacttgtcatagcaacagtttatgtctttacagcagctacagaccataccagtaacctggcctttcgcatgctggggactggatatgattggacctttcaagaaagctcaagggggatatacccatgtattggtggcgattgacaaattcactaaatggatagagntcatgcccattgcttttctaacctctgctaaagccgtggaattcatacaaggcataatattcagatttgggataccaaacagtatcatcactgacttgggatccaacttcaccagttcataattctttgacttctgcgagcaaaagagcattcagatcaagtacgcatctgtagcacatccaagagccaacgggcaagttgagcgagccaacggaatgatattggaggcac

SEQ ID NO: 63188 - DNA, 395 bp, Zea mays
  unsure (1)..(395): unsure at all n locations
agctngcccagcctctgctcaccctgccgcgccctctcatcaatctgcaggaggccttgatgcgtcaaggggagatggaagatgcatctacagatcgaccacaaggggagtcaggaaaccagtagccatatgatccagctaaagatcctaagagaaaggcatgagatgcctttgttagtgatgattggactaggtccaagctatcaagcacagaagcaggaaaggtcacagagatacttctttctacatacttttggaactcagaccaagattgtatttgtgcatcacaaccactcctcattgtgttgcattgtgttgcgaattgttgatggcgatgaaaagccagccatgccagaggttgccgttgccatggatatggcaaaagcaaagatcac

SEQ ID NO: 63189 - DNA, 444 bp, Zea mays
  unsure (1)..(444): unsure at all n locations
gcgagttctggatcagtgaagtcctgttcttgggtcacattacataccgagagggattggctgtagatccgaagaaggtaacaactatcttggactggaaagcaccaaaagatgtctgaggaatcaagagtttcatcggaatggctggttattatcggcgtttcattgaaggtttctccaagattgccaggacaatgactgctttgttggcaaagaaggttgagttcaagtggaccccagcatgccagaagtcctttgagacattgaaggagaagttgacaacggcaccagtactgattttgccagatgttcacaagtcattcttagtgtattgtgatgcttcgtataacagattangatgtgtgttgatgcangaagggagagtattggcatactcgtcctgacagttgaagaatcatgggaagaatatcctactcatgatat

SEQ ID NO: 63190 - DNA, 405 bp, Zea mays
atggttcaagcggtcggaccaaagcatataattttttgtcatacacagaataatttaattaagcacctcccaatttgtcactaaaatatgctatagaatttccttgttgcattaaaactcctcctatcccaatcccactagcatcacattctacttcaaaaagtttagtgaaatcaggaagaataagtacaggtgcttcagtcaaacgtttcttcaattattgaaaagcatcttcttgtgagtttccccatttaaattcaacacctttctttatcaattcatttaaaggggaagcgatagtactgaaatctcgcacaaatcttctataaaaaccagcacgaccatgaaaacttcttacttgacttacattcgttggagctggccaatccttgattgctttcacct

SEQ ID NO: 63191 - DNA, 452 bp, Zea mays
  unsure (1)..(452): unsure at all n locations
ttctctttttaaaaccttctcatccttcttcaccatcctggcagcttgccttctcaaaacactaacaatccttttttattntttccccttcggcacccttgttgagccgctcataatcagggtattcaaattttagagcgtccattacccggtttaaccttcgttttggccgggtgccgaaggctgctgtcattaattggtctttntttagtgtagttccccaaaatttcattgcacatagtttcaatcatttccagccattcttggcaaggctccttgaactatttctcanatttaaaacgataaggttatcgaacgagttcatatttcttctttgttccctttagcttcggcatgccccaatcacttgacgttggagatgtcctatnggccaggtattcttgcactaggtctctggtgctgatttgttcagcaccaccctgaatttcact

SEQ ID NO: 63192 - DNA, 461 bp, Zea mays
  unsure (1)..(461): unsure at all n locations
agcttattgcatgtcacttgttaagaagatgaaagactcttatggctgccctggtgatgtaaaggttgattctcacattggagcatgggttggacaactgcctaactgcttcaaggcaatcagattgaggatgctgctgcttctggctcttttcagtatcctaacactnttagccaagaaaatcaatccgagcaagtgccagttaatactaagatgtctcattttgaacagaatgatagaacccacgaattttctctgcacaatattgctagttttcacgtacctcgtgtgacttataaaagggagttctctttgcacgagatgtcttttttatactgattatgtatctaatgagtctaatgtctatattcaccactaagaatgggaaagcaagagaatatgactgaaattcagcaaagctcagctcataaggtaactgaaactatatggaatataactga

SEQ ID NO: 63193 - DNA, 197 bp, Zea mays
caaaccaatttaatggggtaccacacctgtcgtccatacagtgcttgtatggtgccatcttgatgctctcttgatatctgtcattatatgaaaactctaccaatggttaatattcatgccactatttgtggaaatttcaggacacatgcccgcaacatgttttcaactatttgattcactctctcaggccgtccact

SEQ ID NO: 63194 - DNA, 446 bp, Zea mays
  unsure (1)..(446): unsure at all n locations
ggatccttaagtcacctgcngcatgcaagcttgaagccatggtaagtagcataggccaataatatgcgaattgactcaagcctagctacgggtgcataggtttcaccgaaatctaaaccttcgacttgggagtatcctttggccacaagtcgagctttgttccttgtcaccacaccatgctcatcttgcttgttgcggaagacccacttggttcctacatacatttggttaggacgtggaactaaatgccatacctcattcctagtgaagttgttgagctcctcttgcatcgccaccacccaatccgaatcttggagtgcttcctctaccctgtgtggctcaatagaggaaacaaaagagtaatgctcacaaaaatgtgcaacacgagatctagtggttacccccttatgaatgtcgccgaggatggtgtcgatggngtgatctcg

SEQ ID NO: 63195 - DNA, 390 bp, Zea mays
  unsure (1)..(390): unsure at all n locations
acaacagcttgaaggtttgtatacttacgtttgtcattntgtaaatatttctatggtgaactatctttgtggcaatccttatcgtcattatttgtcacccttcctttgccagggcttaattctaagcaaggatctgaatgccacaaggatgcataggatgagagctatcgaatagcaattggaaacctccgatcggagggtataaccctgagaaacgaagctcttgcaaaagagcaaaatttgctatcattggtcgagaaactgaaatccagcgaagccaaagttgctgctcaagctgaagcccatgaagccgacatgcaagagctaaagaagaaagttgccgaagcaactaagaactttaatggttgaagagtaaaacatgaaatatgt

SEQ ID NO: 63196 - DNA, 455 bp, Zea mays
  unsure (1)..(455): unsure at all n locations
agcttattcatttaccttngactatttgcaaaatgactttgaaaaagatttacaaaaagaatttgcaaaaacaaaacatgtggtgcaagtgtggtccaaaatgttaaaaatgaagaaacaatccatgcatatcctatgagaatttatattggctcaattccaagtaacctttgcacttacaattatgcaaactagttcaattatgcacttctatatttgctttggtttgtgttggcatcaatcaccaaaaagggggagattgaaagggaattaggcttacacctattntctaattgattttggtggttgaattgcccaacacaaataattggactaactagtttgctctagtctataagttctacaggtgccaaaggttcacacaacgccaataaaaagaccaagaaaagggttcaacatagagagcaagggataaccgatgtgtgccctggtct

SEQ ID NO: 63197 - DNA, 270 bp, Zea mays
  unsure (1)..(270): unsure at all n locations
tctcttatacaagcgccgcactcactgtagagtgcgaagatgcctcatacaatagcaatggagcccctagcacgggtggagttaatggtggtaaatcaatcaggtattgcttcagctcttcgaaagctttctgttgagttgggccccattgaanaacttcagctgactntagtacttcaaagaatggtaaatttctttctgctgatctagatataaatcgattcaaagatgccagaattcctgtcagtcgttgggcccccttctttgtgc

SEQ ID NO: 63198 - DNA, 456 bp, Zea mays
agcttggcggactccattatcgacgaagtcgtttattttctttgaacgaaggtgcagaaaaagttcttaaagaagaatagattctattgtaatgatattttgaaacccttgatgtaaggaacaatggaaggaggattaagcttctactgtaataaaactatgtaacatttgatgtatgtaacattgaatcgaatatgtaaattattgtaacttatttctttgcgatgcatgaaatttacacagataccgtttttgagccttcgacgaaaaaacaccttcccttcttttcatgcttcgaaaagaacaagatccctccttatgacaaggctgataaaactgtatttcccgaagcttacttcgtgccttatcacattttcaatttgacgaagcatttgcctaagattgccttcgtattcgattcttatgtcgttgatgcaatatgatgtatgatgtaat

SEQ ID NO: 63199 - DNA, 368 bp, Zea mays
  unsure (1)..(368): unsure at all n locations
tattattactgttagatgccaacaaanataacccttatgacattacccactcctagttgagagttgtagtacaaagtggcccatttacacaacttttgttattttnttataaagcatagcctttntgttttgaacctcaaattcctagaataggctatagtgacccatggcaacccactgtaatttttgcagaatttttggaagaagttaattcactgttgtagttcaaacctacactagaattcataaatagagaataaagaagaggaaaatgaatgatggaaattagtgtcatcctaaaaccctttgtaatttttcactgaaacatatataagggaaatgccaatccactatgctcatccttaaca

SEQ ID NO: 63200 - DNA, 409 bp, Zea mays
  unsure (1)..(409): unsure at all n locations
tcgctgcaacatgacacccgaaggtccatcacaacatgcattgaatgaattcacaactattgcagaacatatcaatacaagagacctggttcaggagttcttggctatcaaagtttttcctattttaaaagaatgggaaatgccgatactgaatggggaaaagaaaaaangtgaacttgagcgtttaccttactatctcaaaatttagaaatactttaaaacaccttgccaagagcggctggatacaattgaagtgatgtcgtatgaaatacttgtgaactacttcaaagaagaagatcatttgatgactgcggtcttcggtccccgtccgaagcgaagactgaaccgagtgctatacgccttgggctttgaataccctgattatgaaaatctgacaaaggtgcttggg

SEQ ID NO: 63201 - DNA, 245 bp, Zea mays
acgcatgcgaaggcacacaacgtcatgtgtcgcattgaggaagacaccgatgtcgccgagccccccgtcctaacccaggcaacccatagcctagcagcggctgcgctcttactctgcaccataccagagccctctaccaccgatggatgccgcatccacggtgaacttctggggcttctggaatgcgctgcggtccaccatgccgagagattggcctctcagctccgagaactcgcctctagcca

SEQ ID NO: 63202 - DNA, 438 bp, Zea mays
  unsure (1)..(438): unsure at all n locations
agcttctaaagggagaacacattttaggactaacatatgttcattntgagaaagacaggatttgtagcgcatgccaagcaggaaagcaagttggtgcccatcatccacacaagaacatcatgacgaccgacaggccgcttgagctactccacatggatctattcggcccgattgcttacataagcatcgacgggagtaagtattgtcttgtaatagtggatgattattctcgcttcacttgggtgttctttttgcaggaaaaatctcaaacccaagaaaccttatagggattcttgagacgagctcaaaacgagttcggcttaaggatcaagataattagaagcgacaacgggacagagttcaagaactcacaaattgaaggctttcttgaggagganggcatcaagcatgagttctcttcttcctacactccacaac

SEQ ID NO: 63203 - DNA, 348 bp, Zea mays
  unsure (1)..(348): unsure at all n locations
cgacaatgaggaaatggcgctcgtcatcaagagcttncgccatatcctcaagcaaaggagagggaaagactacaagtcccgctccaagaaagtttgctacaagtgtggtaagcccggtcactttattgcaaaatgtccattatcaagtgacagtgacagggataacgacaaanagggcaagaggagagaaaagaagaggtactacaaaaagaagggcggcgatgcccatgtttgtcgggaatgggattccgacgaaagctcaagcgactcctccgacgacgaggacgccgcatacatcgccgtcaccaagggaactcctcttcccaacgtcgggcacaagtgcctcat

SEQ ID NO: 63204 - DNA, 442 bp, Zea mays
  unsure (1)..(442): unsure at all n locations
agcttcnatgtacgacgaggaatacgacacgatgcttatctcggtcggaggcggacgataaggtcgtggagctccgcacggtggcaataccaccgtccgcgacaagctattctgtgaggacaaccaagctatanaagagggcgaggaatggcgagtgagtgctaatcacacgagagacacgagtgtgcttgatagaatggagcgagcgcggctggagctcgtcgacacgagggggacaaggcgcggcgcacgccatgacgtgagctccacgcatccatgcgagcgacacctggatcccaatctgcccgagttgcagacgcgatagaggcagaaggatagctccgaagcatcgtccacatcagccgaattgctcccctctctaccggctacaactttgctatagggtctagggtgattagactactggattttgaattaaaga

SEQ ID NO: 63205 - DNA, 398 bp, Zea mays
  unsure (1)..(398): unsure at all n locations
actatagatactcagcttggctgcttatgcngtagcaatataaatttattctatattaactnggncaaaaagtctaagtgccatgtgtgtgttgtatcaaaacaaccccgcaagccacacaacgctgctgatgcgatgagtttggcacctctagaacttgttcattctgatctgtgcgagatgaatggaattttgaccaaaggtggtaaaagatactctctcactcttatagatgactccactacgatttgtatgtgtatctcttataaacataagatgaagccgtcaattattttaatgcctataaagctaaaggtgagaaccaacttgagaggaaaatanaacggctaaggtctgatcgaagtggagaatatttctctaatgtgttcgatgagttc

SEQ ID NO: 63206 - DNA, 438 bp, Zea mays
  unsure (1)..(438): unsure at all n locations
agcttgtgaatggcttgccgaagcaatagatttttgttgttggttgcccacatattctggtatttagggagagtggcacgaagcagtatgtacgacctgcttcggttgattctgtcgggcttctgcttcggcgatatccttttggttttgaatggtaatctggcatgttcttgtcgttggcccttatcttcaccatagaacaagcaatagaattttctgggttgatccccatatctgcctctgaagcccctgccgcctctgccccttggggctggtggtctgaaagagcttcgctgctgtcctgaatactgtgcgctgtgttgtggcctttgaaactggcctcctttgtcgtcattctgactggagttgtggatcgatctgacatgcctanggtggattcttcctccgaagcccctattcatttcagaaaatctataa

SEQ ID NO: 63207 - DNA, 357 bp, Zea mays
  unsure (1)..(357): unsure at all n locations
tgtgacaatatagccctattgatgagtgacatgcgatgtttttgttntggcccaataagaatccgacacattatattcggctaacatagacctagccatatcaatgagagtcctattctttctttcaacaataccattttgttccggagtatatntggaagaaaattcatgtttaatacccttgtcattacaatattcatcaattcttagcattttaaattccgacccattatcacttctaactttcttgatatncaaaatcaaatgtgtttgagccaatatagcatatgacttgaatgtttcaaacacattagaattatcccgaagaaagtaacccaagtgaatctagaataatca

SEQ ID NO: 63208 - DNA, 429 bp, Zea mays
aggaaagatatacatctcagtcctctaatcttcactatgtactggggaaagtgcaagcactgctctctctccatgagttcaactgaaggtgcctttattgtttcaaaaaatactttcgaaagtagagagagcccctgtgctgctgactagactagcagatctacatgctcattttctcctcttgaaatattcttgacagaaaaaccttcgaaagaagcctccaaccttcgaactgtatgcagatatttttcaagcttcgggtctcttgccttgctacttttgtctatatggacagaaatgacttgagaatcacttttcaggatggtccttcttattcccattgcccttaacttctgaagccccaacagaagtgcttcgtattcagcaatattgtttgtgcaactgaagtcaaccttgctgataacatgt

SEQ ID NO: 63209 - DNA, 430 bp, Zea mays
tgtacttgtgtccgtgattgattcattcgaagatgctcttggtaatatgtcctatatcacttagaggtagacaagaagacgtatattatcttggtgtttcgaggaccttcggaagaagagggcccccaacaattgcatacacccagttgttgcaactttgatcgtgattcgagaagcactcaatttgaacttgttctagaacaccccataaataacccattctttacaggagttctgatctgcacatggatggtagagttgctgatgttcatacttcatgattagacatctttccctctatgcaaacttgtggtaaaatttgaggcgattgtgactcatctttagtgcccggcattgccagccatgtgtgtggcactacctgcccctgcactaccggactctagttcagcactaccgcgcacactgcact

SEQ ID NO: 63210 - DNA, 444 bp, Zea mays
  unsure (1)..(444): unsure at all n locations
ngaccgctagcagctgcgagcgttgacatctaatttctgattgcctgcgaganactagtaaaaggacacctggcaacttatgtgcatgtgaaactagcgaattgaaaccattcatgtggggttcgcctactgttttgcgatattcctattctcatgaatgtgaatatgtgaataattcaaacacgcagcatgctgctgttggcctagctgcctgctgctggttcattggtcaggctcggaattttcgttgctctgttacaaacaaacgcaaggatgacacgcatgtacctaanaaaatacaagacagataccttcaatatagtattaggtttaggacatanaagggagatttacggngaaaatcatttcaatataaaaattggaaaagtatggaagacaaatcttaagagaaatgttattatttggtgatanacgatatgatat

SEQ ID NO: 63211 - DNA, 368 bp, Zea mays
  unsure (1)..(368): unsure at all n locations
ctcagcttctagaggtcaataccagttggcacatgtgatatggtcatcttatgatacatagttggtacatggtaacctatttgctatatacatgacaagacacaacacaactaanacaacaaatcaccaaatttgacgtagttcataagtgcatattcctccaacacttcgaacaatggaagagtaataagtccctcccactaattataaaatgcaatgaaggggttgaataattntgtcaccttcgaacacatgcctggcacataanaaagttgagcctgctgtgagagtgactacaacagtaagatgcaaggtaactatgcaagagcgtaaccttctcatggcgagtccaccgagaaccttgtagt

SEQ ID NO: 63212 - DNA, 414 bp, Zea mays
  unsure (1)..(414): unsure at all n locations
ggtgaaggttcttcatccctacatgtgctaagcggcaatgccacagtcagcccatgctagtcttagctattaagcatgcatctagaccggcctcctcttttgcataatcaactaaataaagtttgccgtctaatacacccttaaaagctaatgaaccatcacttcttctaaagacatacacatctacanttgtaaatagacaattatatcccatattacataattgactaacagatagcagattatatccaagggactcaactaaaaacacattagagatagagtgctcatttgaaattgcaatcttgcctaagcctttcaccttgccttggttcccatcaccaaatatgattgaatcttgggaatccttngttttgacgtaggaagtgaacatcttcttctnncccgtcatat

SEQ ID NO: 63213 - DNA, 447 bp, Zea mays
  unsure (1)..(447): unsure at all n locations
tcttcgtgtcatccttcttctccacaaacaacactatggctacccaaggtgaggtactcggtctgatataacctttctctgacaactcatcaatttgcttcttgagttccaccaactctggtccggacactcgataggctcttcttggaaatgnggcggtgcctggaataagctctatggcaaattcaaccttcctttcaggtggcatacctggtaactccttgngaaacacatctgggaaatctgatactacactgatagcctctgatggtntaatctcctcaatatgagcggtgacttggtgacaactccctttccttgatccagacaagaccaattccactaacacttcttctcctgatagggacactaacttcaccgttctttcatcacaactaagactagctngatacttggttagcccattcatccctangatgacatcta

SEQ ID NO: 63214 - DNA, 216 bp, Zea mays
tagacaagaaagcatatattatcttgggtgttcgacgaccttctgatgaagagggccctcaacaattgcgtacacccaggaggtgaactgtgatcgcgactagagaagcactcaatgtggacatgatctaaaaaaccacataaataacccaatcaacacaggagttctgatctgtgcatggcatcttgagtagctgatggtcgtacttcatgaata

SEQ ID NO: 63215 - DNA, 437 bp, Zea mays
  unsure (1)..(437): unsure at all n locations
tacaaaattgtaattcatgttactatctaaagcatcatttctttacagatgcatttactgactacctagtcaagggaggaggaggaagacatttctttagtacaatgaaagtaaataaatntatgtagccaaaaatctgacttatttttaaacgtcacaggagagttgcgtgcttttgtattaaagaaagaaaacctggatcagttccaatacctaagcatttgcctcacaatctcatattctttttaataaagtgaaaaatataagcacaacaagaagttactcanagaatactaatgctaataggagattcaacagaatanaaataatatataaaaaaacatttctagtgaagtaagcaagaagcagtggtgcctcttcttttttntctcgaaagcagtggtgcctcttcttaataataatgatatgtagctctc

SEQ ID NO: 63216 - DNA, 346 bp, Zea mays
agcacaccataaaactcaacttgatgagtggcatcatcatcatcatccgagctatcatacgacgttcattctactaagtacgcgttgtcatctatcttcttgtgaaaaatttcattttcttcttgacactttcatacctgcccttcttcttcttgcttgggcaatacaaggcaatgtgaccgggttcctcacactcaaaacactttctattattgaaagcacttcttgtagatgtttgacctcttctatgttgacctctcttcatcttcatgaatttattgaatttccttacaaatagagccatgtcaccatcactctcactttcatattcttcatcaatactctc

SEQ ID NO: 63217 - DNA, 392 bp, Zea mays
  unsure (1)..(392): unsure at all n locations
acatgtgctaagcggcgatgccacatccagcccatgctagtcttagcaattaagcatgcatctagaccggcctcctctnttgcaaaatcaactaaatagagtttgccgtctaatacacccttaaaagctaatgaaccatcacttcttctaaagacagacacgtctacatttgtgaatagacaattatatcccatattacataattgacttacggataacacaatatatccaagcgactctactaagaatacattagaaatagagtgctcatttgagattgcaatcttgcctaaccctttaaccttgccttgattcccgtcaccgaatatgaatgaatcttgtgaatctttattcttgacgtaggaggtgaacatcttcttctcccccgcatg

SEQ ID NO: 63218 - DNA, 284 bp, Zea mays
  unsure (1)..(284): unsure at all n locations
ctcagctcggatntaatttgtataatagcttcagctgtcgccagtaaccttctgtggatgaagctcgaagctttcttttcatatcagtcgatgctctttatttagctctctaaatttaattatacctcgaggttttatcttccagtcctggtgcattttcaaagctttgctcagcagcatactctgcacacaaacacaccttgttagaaaacatcttcgttatctaaaacaataaaatcagacaaacgctgttaccttgacattggaataaataaactatcgat

SEQ ID NO: 63219 - DNA, 341 bp, Zea mays
  unsure (1)..(341): unsure at all n locations
ttgaaatacgaggatagcgaaggggcatcttactatacttcttacgctcatggcgcttagaagtggcggatgccgatttcgagccggaagtggagggtgacgaagagtcggtctcgtagtagaccaccttcttcatcttcttcttcttgtcacccttccgttgggactcgatggaggaagatgattcctccttgtgtttgtgggcggattccttgagtgtgttcttcccgagcttgcggacttgttgccggtcccgatctccctcatgggcggatgctccgacatcacttcgagcggntaggctctaatgaagtaccgggctctgataccaattgaaagtc

SEQ ID NO: 63220 - DNA, 388 bp, Zea mays
  unsure (1)..(388): unsure at all n locations
cgtgccgcttccgtgtggttgctgacgtaatctccgccaatccgcctttggtcacgccatctgccatgtctgtccctgcngctgactgacctgtggcccccacccttgatggatatcctgggccacgcgtgaggtgcctcgataccgctgcactggtttaaaaaatcgccttctctttcttctgcagcgggcccgaggaggcgcagtactggcgcgagcggcggttcgctctttctgcacccaagaaccgacgcccaaggagtacgacttgtgggcctgggcccccgtgtcacagactgggccgctttggtgcgcgtcgggcgagattntccgcagtgtctcggtgcgcgagcgggagagtctgccttgaaagggattcaccccgcgt

SEQ ID NO: 63221 - DNA, 537 bp, Zea mays
  unsure (1)..(537): unsure at all n locations
ntcctctcaggttgagataagctntaatacacaaattctccccctttgacatctatcaccaaaaaccttactcaagcaagaacataggatgatgtcaagggacagcacggtgttaaggaggaaaaacgactatcaaaactcccccttacttattgaacatatgcactatcaacatttaggtaagatacatatatgcaaaaagattaatacttccttttgtacctttaccatgttgtagtgtacttcctatcttgaaagtanttaatctctcgagagcttctccacacttgtgcctgattctttatcctaactntttcttggtgctaagacaccaaacttagaacaagttatagtattgggcacaagaagaaacttctattctaatgattatcataagatgtcaatngaagcaaactatcacggctaccaattgaaatataccaatngcanagntcatttattatcatagctncatgatatttaagaataagcatctattatcaccagatattatagagcatgagcaaatctaaaata

SEQ ID NO: 63222 - DNA, 395 bp, Zea mays
  unsure (1)..(395): unsure at all n locations
ctcagcttataccttcgtctntgcttaattcattccgaagggggtttctgctgtagcatctataatactctagagatgtatcaagaagcaatggctaattagtgttttgaggacctttgaaggtcgaaggcccccaacaatagcccctcacagtcttaggtcatttcctcacaacaaactcagactgtgaaatgaacgaacgccttttgccaaaggtccaaaaaataccttccctgagctaatcatcgaaatacctaaaatgcggngaccatcctgtagtggtgattntacattnttcttcatctcctgccttatttcattcagccctagctcaatttttatgtataaataggatgaaaaccatatgcacattaatcacattattcgtctgtttg

SEQ ID NO: 63223 - DNA, 554 bp, Zea mays
  unsure (1)..(554): unsure at all n locations
cgcgaccttagatactcagcttcggaaaactatgctattgatatgtataacaattcttgccctatcgcgatcatggatacaccctaggatttcttcggcaacgctaacaaaaagcacggacacggcttgatagccacccgctgtgacgataccgcccaatttttaagagcacaagtaccaaaacatctgcttccacagtgttaaacatacttgagcccatataaacccggtagaccgtcgagcaccccgaagggcctcgataaatcaatttacaaccaagatcgcagattaagtaaatacacaatcacataccagagtttttgtcagcggaaataatattacaataagtttacaaataaggaatgagagtaagtacaaaacttggtttgaaagaatataactntgtacattatagatgtaaccatagttttgaaatacatgctagctcagtgacaattccttcananacaacagagatgagaactacatagaaggccgaacccaccgacacttatncaccatcatcagcaggtctagatcttcacctgaacatg

SEQ ID NO: 63224 - DNA, 459 bp, Zea mays
  unsure (1)..(459): unsure at all n locations
cctatacttgaaagatatgggccagaggcataccgactccaactacccgaaacattgtctgctgtgcataatgtgttccacgtgtcacaattgaagaagtgtcttctggttcccgatcgaaccattgaagtaacagacgttgtccttgaaccggacttgacatactctgagcaccctatacgagtcttggatcataaggacagggttacccggagaaaaactctcaagttgtataagatacagtggaaccagcattctgaagatgaagctacttgggaaactcaagacttcttgaataagaatntcccaggctctctagcctcatgtaatttgtaaagcgtatatagctattgcaatacaggaatgataccccacaccacccctaccttgtaccagagataaggaaatatgagtattccgcgtattcttttccattacataccctatgactnttaatct

SEQ ID NO: 63225 - DNA, 416 bp, Zea mays
  unsure (1)..(416): unsure at all n locations
acccgaaaactacaattatttgttcccatttggagggccaccaacgtagctaatagatacttaagcacccaaatagccttggtcctagaatgtggtgaactcatcacctttctagcacacaggtccaatatgggtctcctaagtatatttgaatgttctgacaggttaggcttaggagttgtaccctttggacaaaccttgaatagatgacctctttcacggcaattgtagcaaatgcggtgcttgtccttgcaatgcatttgcctttcgctatcatctttcgtgatggacatccttcttgatcgcgcaaagtcttggttcttcatgcggnggcatgaatcaatttcatggcccttctccttgcattcatagcacctactatcgcttctttttgatctntctttatttgaacacat

SEQ ID NO: 63226 - DNA, 428 bp, Zea mays
  unsure (1)..(428): unsure at all n locations
tgaatgcaacgggttgagcttcagatgtgtcgccaagctcgttgattttcctcgagccttctatcatgcactcaaaacttacaaaatgcccgataacttcctcgggggtcattntagtatatctaggattaccacgaattaattgaacttgagtgggatttagaaaaatgagagatctcaaaataacatttaccacttcgtgatcgtcccacttcttgctcccgaggttgcgcactnggttcaccaaagtcttgagccggttgtacatgtgtagtggctcctcccctttgtgaagccganaccgaccgagctccccctcgatcgtatcccgcttggtgatcttggtgagctcgtcttcctcgtgcgcggttctgagtacataccaaacctactttgcgttcttcaacccttggactattgtatattcc

SEQ ID NO: 63227 - DNA, 451 bp, Zea mays
  unsure (1)..(451): unsure at all n locations
tgtgaactgtcntagcttggggggcctcgcccggagactatcggcttctaaactattcatcaggatacctgcaagatcagaagcgctggtgaaactattcatcaagtcagtctgcatagtgatataacatatatatttcatgcgttcaagccctctggtactcctggggtttcactggtcggtcatctcttggacagcttaattcgattgttttaaatttctgaattgcaggcgtagagtataaatatcaataccaccctcttttttttctcgctactcgcattgagcaatcgctgagctctcagttttcatagactgtaccgactgggtgatggacagtgatccatcgatctggagtagtgcggctgaataatatgaatgagtgcatatgcatagcctgccagaccagaagttgttgactctctctattaccacagatggtctgactgag

SEQ ID NO: 63228 - DNA, 434 bp, Zea mays
  unsure (1)..(434): unsure at all n locations
tcatttgagatcttaaatgagagatctaagatcaagtgtatttaattcattcctcaacatgccaaagcggggtttatcaagtgggttaatgaaaatatccgctaatagatctttcgacctcactccttctaaaatgatatctcctttcgcaacatgatctctaaggaagtgatgaccgatatcaatgtgcttggtgcgagagtgttgtacagggttattaacaattataacagcactctcattgtcacacaacanaggtacctttttctagaactacgccatagtctagaagagtttgtttcatgtataaaatttgtgtgcaacaagcacccgcggcaatgtattccgcttcggcagttgacaaggcaacactattgtgctttctgatgccatgatctagtgatctccaagcaaatggccccccagaagtactt

SEQ ID NO: 63229 - DNA, 188 bp, Zea mays
ctggcagcttcctggcttccatgaataacaataggcccttgatccgaaagtatcttcatgcatagatatgctggatgaagaattgcttcaaaatcattgagtgtcccaccaccaatgattgcattgtaggggtactccatgtcgacaatatcaaacacaacttgctcagtccttgtattgttgacaaa

SEQ ID NO: 63230 - DNA, 505 bp, Zea mays
  unsure (1)..(505): unsure at all n locations
tctctttntgctgaacaatgaagagatcgaaataatgctntatagatcaaattgttgtataatatgaggagaaaaagtttccttgttgacagcttacacaacaaatatttgactgttgttataagttctctctcacaattataatacctaaaaatgttgcataaatcgatacccaatttcagaacggtatgagtaattggataaaccatgggcaataataaaacgagctggactatacatctctgcatataaaagtctctgcttggcagcattggcctgatgccgtgcactntaccaccattatatatgcgcaaattctcctatgtgcctgaaagcacaatgcaaccaatgaatattcttgtgagcgctagaccctgatggtcattntacttgttgatctgaagtcaactactagctccaaacgatgaatggtatgcatgagcccctgaagacccttctgataacatatgtgtgacatatcagctaaatttaatgatgactgtga

SEQ ID NO: 63231 - DNA, 399 bp, Zea mays
  unsure (1)..(399): unsure at all n locations
actatacactactcaagcttggcgcncatgagcctcattatttcttgccagaacatggaggtgatcacggcatctcgatcggagacgatcgattgcggcataccatggagacgtacaatgtcggagaagaacgcctgtgccacagtctcggcggagtacgggtgagccaggggaataaagtgtgcgtacttactgaagcgatccaccactgtcaagatgacggacttgccgcgaacacgcggtagagcttcgatgaaatcgaggccgatgtccgaccatacgtccgtcgggatccgcaggggtagcagcaacccacccggcaggaggtggtccgacttattgcgctggcaggtcgagcatgcccggacgaagtcttgcaccacacagcgcatgtcgggg

SEQ ID NO: 63232 - DNA, 427 bp, Zea mays
acattccaagaggagaacactatcatgcagatttactatctaaatctgcggcacaaaggctcccactcccttgagaagtgatgttcaaaactctcaaagcaccttcagtcaagctcatggagcgagcagagcttacaataacacctgtgcacagcgaatattgtagaactgagagtagatctttcctccagcgcaattatccttcagatgacgaagcttatatataatggatgcgagccatatcacgaccatatatgatcatggagggcgaaattggtgaacaacgagattgctctccattggtaagacgtgtatctagagctgaagcgcacgagctaatgatagagatacacgcatggatatgaggagctcatatcggatccatacctgtcctaggaaaggtttctagacaaggcatttactgacc

SEQ ID NO: 63233 - DNA, 475 bp, Zea mays
actcagcttggtgcgtctattggtgacgactctggggagcctcctacttctttatctccgttgtcttgaatgcgacgggtggagcttccgatgtggatggatcatcaagctcgttgatcttcctcaagccttcgatcatgcactcaatacttacaacaattcccgataacatcctcggcggtcattttagtatatctaagattaccacgaattaattgaacttgagtggggttaaggaaaatgagagatcttagaataaccttatccattttgtggtcgtgccattatacgctcccgacgttgcggacttggatcaccaaagtcttgagccggatgacatgtgttgtggctgcttccattgcgaagccgaaccgaccgagctcccctcatcgtttccgttggtgactttgaactcgttctctcggcgcggttggcacatccaacttcttggcgtcttaaccctgacttgtatctc

SEQ ID NO: 63234 - DNA, 391 bp, Zea mays
  unsure (1)..(391): unsure at all n locations
tgtgtctgggatgctntcgtgcgattaatggaacgactaatganaatgcctgtccatatatatataatgcgcgtacttatggtgtcgcaatagtgttgcgtcaatacataaaatatttgaggtctttaatggtattaatgttgaacgtcgataatgtgtagataactaaagcgaacatgtgattgttacggcgcttctatcttattgtttagttcgccactgtgtcttggtataccttgtgctatttttgtgctactttcattatattcatacatatgcatcttacacctcatatacgaccgagaggtgactaccgtgcaagtgatgtggtgccacccacaagatgcagtctgtggacgacccacagaaggatggacataaccagtggatg

SEQ ID NO: 63235 - DNA, 445 bp, Zea mays
  unsure (1)..(445): unsure at all n locations
tgacaacgagganatgacgctcatcatcaagagcttatgccttattctcaagcanaggaaggggaacgattacaagccccgttccanaagggtgtgctacaaaagtggtaagcccgatcattttatcgctaaatgtcctatgtctagtgatagtgacaagggtgacgacaagaagggacaaaggaaggagaagaagtactacaagaagggtgacgatgcccacgtatgtcgggaatgggactccgacgagagctccaccgactcctcctctgatgaggatgccaccaacatcgccgtcaacaagggcctactcttccccaacgtcgggcacaagtgcttcaaggcaaaggacggcaaaaagaagaaggacaatctagagccaccgaatatacaacatctagtgatgaaggtagctctagtgatgatgaagatgaattgctcactc

SEQ ID NO: 63236 - DNA, 436 bp, Zea mays
  unsure (1)..(436): unsure at all n locations
ttcctttacaccgaaacggtcacaccctgatcagtgatactttatgtcacataatctttgactngaaagtacaagggttggcgtcgtttgtctgcataacactnttgtcgagcctgtgcctctttcaagttatgtatgattcgttgaacattttcttccatctctttcaccatgtcaggcctaaaaaaccacctttctcctggttcagaccaattcaagggggtacggcaccgtcgtgcatacaatgctataaatggtgccatcttaatactttcttgataactattgttatacgaaaactctgctagtggtaaacattcatcccattaatgtgggaattccagaacgcatgctcgcaacatgtcttcaagtatatgattcactctcttagtctgtccacttcgttgacgatgatatgccgaactcgtgagcaact

SEQ ID NO: 63237 - DNA, 325 bp, Zea mays
  unsure (1)..(325): unsure at all n locations
gctagctntgatggcagggatcacaacatagtgtatgtcgcatcgtcactcgtgggcatcaccncctttatataagcantttttaaaatttaacccgtttactcacttagcactcagccccactgagcagagttatctaaaaagaaacttttcataacgagtttcgggaaggtgtttttggaccttcagcgcaaggccgtccaatcatatcttctgcggtctaaactcattatganaaatgaacttattccgcaaggggctactcttggnggcctatattgctgaagatcctcanaaccctttgttttcaggacaagtgtatttc

SEQ ID NO: 63238 - DNA, 317 bp, Zea mays
  unsure (1)..(317): unsure at all n locations
actcagcttgcagagctngaaccgcggacccncgccatcggaatagcgcaatcttgctcgccggagttcggagctccgccggtgcacgtggaccgggtgagtctctgtgccattttccaattcactgcacgcatggtctctacgtcaccccgtggagctccccgtgccattggattgaccagaatcatcgtggttagacaggaacactcgccgcagacgagttcacccgcctgcgcacgtggaccggccgattccgaccaccaccgtcgtcgagccgtacctcgttgtggccgcaagaaccttccggagccaacccc

SEQ ID NO: 63239 - DNA, 395 bp, Zea mays
  unsure (1)..(395): unsure at all n locations
tcaactccatctatattatggattgccttggtatcagtccagctttcttcggcccttctggcagcttcctgactcccatgaatagcaataggcccttggtccgaaggtatcttcatgcagaggtaagctgggtgaagaattgcttcacaagcatttatggtaccacgaccaatgatggcgttgtaggggtattccatgtcaacaatatcaaacacaatttgctcagtccttgtgttattaacaaatccgaaggttactggcatggtaatcttcccgagtgccacaatcttgccgcctccgaagccacaaagagggtgcgtagcatcatgaatcttgtcttcaggctnctgcatctgtctgaaggctttggcaatataatgtcagctgcactggct

SEQ ID NO: 63240 - DNA, 353 bp, Zea mays
cgaggctgtgtatagattaccgccctcttaatgcggtaactgtctttaacaaggatcctttgcctcgcattgaggatctctctgaccacatggtcggggccaaggtattatccaagatagaccttctctctggctaccatcagatcaagatacgagccagtgatattccgaagacggcattctcaaccagatatgggctatatgaatttttggtaatgtcattcgggctgacaagtgcaccagcgtatttcatgtatctgatgaattctgttctcatgccggaattgcacaagttcgtggtggctttcatcgatgataatctggtgtgctcaaagaacgaagaacaacatgtc

SEQ ID NO: 63241 - DNA, 472 bp, Zea mays
  unsure (1)..(472): unsure at all n locations
gccgaagtccagaccagctcagaattgaagagagcattaacatgccttcatagacatatgctngaactntggtaataattgtattggacgattaaagaagatattntactctgttggagccagcagtgggaaatttaacccttcggcggaaaatttaccccaggccttcgatcatattgaagctgaaatcgaagagcttgacgaagttatagccgggcacggcgacttctgtgcctgtgtagcttctcagggtaccgctgctgcatttctgaaagccggctgcgaacatggaaaggttgtcaacaggcccaatttcaccttatcttcatcaatcctggatgatatgcccgacctcgcccgaagtatctccaatagagttataaaaatggtatggacaaagggcggtcgagagaaagctggagacgaagcccgaagtcatcttgaaccagtaagaaataatacttcgtactta

SEQ ID NO: 63242 - DNA, 388 bp, Zea mays
  unsure (1)..(388): unsure at all n locations
cactatacantactcnnnagcttggaccagggtcgctntagagggcagcgtccncgctgaccaatgtttgggctctgntgatggcactgaattggttcctgctggttcgttgcaagctgcttcnggtggcggccttacgcccggtcatcaattgatctctcatgatttgggggtcccttcgttcttttccaacctctaggtactgtgatatactttagcttgatttttacaccgcatgaactgctgtcattacactcatctgttctccttatcangctttggtggacgggatggctagccagctgaggttacagggtacttctgtttcagaaggagctntgtctcttgcacgtnggaatccagtggtacttcaacatcgtgtctctga

SEQ ID NO: 63243 - DNA, 428 bp, Zea mays
  unsure (1)..(428): unsure at all n locations
tcanagggagaacacgtgatagggttgactaacgtgcaattcgaattagatagatcttgtgcagcttgtcaagcaggtaaacaagtgggaggagcgcatcacagcaagaatgtgatgaccacatcaagacccctggagctgctacatatggacctcttcggacccgtcgccgatctgagcatangaggaagtaagtatggactagttattgttgatgacttttctcgcttcacttgggtattctttttgcaggataagtctgaaacccaagggaccctcaagcgcttcctaaggagagctcagaatgagtttgagctcaaggtgaagaagataaggagcgacaacgggtctgaattcaagaatcttcaagtggaggaagtccttgaggaggaggggatcaagcacgagttcttcgctccctacacacc

SEQ ID NO: 63244 - DNA, 197 bp, Zea mays
gaggcacaaactccctccgataatgtaaaagccaaagatcctaagtggaggaccgagtcctcccgcacttcagtcttgattttcttcttttggaaccaccttggcacataagcagccaaagtctgctacatcctcacctataaacaacgaagggataaaccctgaggatggaattactcagcaagtcttacccgact

SEQ ID NO: 63245 - DNA, 271 bp, Zea mays
agcagggaaacaggtgggaggctctcatcacaccaaatatgtgatgacgacatcaagaccctcggagatgctgcatatggacctttttggacccgtcgtctatctgagtatatgaggaagcaagtatggtctagtaactgatgatgactttttccgctttacttgggtgttctttttgctcgataaggctgaaacccaagggaccctcaagcgcttcctcacgagagctcactatgagcttgagctcattgtgaagagaaatacgagtgac

SEQ ID NO: 63246 - DNA, 434 bp, Zea mays
ggtcaagcaggtaaacaagtgggaaatgctcatcacatcaagaactgtgatgaccacatcaagacccctggagctgctgcatatggacctcttcggacccgtcgcctaccttagcatcggtggaagtaagtatgggttagtaattgttgatgattttcccgcttcacttgggtattctgtgcaggataaatctgaaacccaagggaccctcaagcgcttgctaaggagagctcaaaatgaatttgagctcaaggtgaagaagataaggagcgacaacgggtccgagttcaagaaccttcaagtggaggagtaccttgaggaggaaggaatcaagcacgagttctccgctctctacacaccacagcataacgatgtggtagagaggaagaacaggacgctcattgacatggcaatgacgatgcttggagagttca

SEQ ID NO: 63247 - DNA, 237 bp, Zea mays
catggctgaaggaaaatggtacactgctgcttacatcaaacatagctgatataaagtcaatagataaatatatgtcaattaaccagtcattaaacaaagggcatgaaaactccagtttgaggatgacactcacacaacatctgagatccgaaactagacccgatgaacaacgcaacggtaatcatctattgccgagaataagttgcaaactgcaatcgatgtatatacgaaatacat

SEQ ID NO: 63248 - DNA, 344 bp, Zea mays
ccatcagcacacaatatgacactgcctggcttcagaacaacaacaagcttcttgtggcccactgatatcattttctctcaccctgaatgctatagtctgtagaaaatgtgatttctcggccttttatcaattgaataggcttcccatctgtcaaaaatacaggtctaatctctggaccctgccatatatataagacatgcaatggatatgaggccacgatacatatgcatagcacaattatgtgtccagcactggttctacgtacatgggataatccacgagtcatacagcttatggaatattaagacgaccaatatggttcacttcatattatcaaactggta

SEQ ID NO: 63249 - DNA, 451 bp, Zea mays
  unsure (1)..(451): unsure at all n locations
atccttganagacaatngccttgaaggaaagatattattacagttctccagtcttcactgngnactgganaaataataagcactgctctctccatgagttcaaccgaaggtgctnttattgtttcaaaaaatacttccaaaggcaaggggagccccacggccgctgatttggctagcaaatctgcatgctcattttcacctcttggaatatttttgacagaaaaaccttcgaaggaagcctncaaccttcggactgtgtcaagatatctatcaagcttcggatctcgtgcctttgctactttatccatgtgaccagcgataacttgagaatcggttttcagaatagcccttcttattcccattgcccttagctntcgaagtcccaatagaagtgcttcgtactcaccaatattatttgtgcaactganatccagtttgattgcataacatg

SEQ ID NO: 63250 - DNA, 412 bp, Zea mays
  unsure (1)..(412): unsure at all n locations
ggtgaagattcttcatccctacatgtgctaaatggcaatgccacagtcagcctatgctagtcttagcaattaagcatgcatctagaccggcctcctcttttgcaaaattaattaaataaagtttgtcgtctaatacacccttaaaagctaatgaaccatcacttcttctaaagacagacacatcgacatttgtgaataaacagttatatcccatattacaaagttgactcacagacaacaagttatatccaagcgactcaactaagaacacattagaaatagagtgctcggatgaaatagcaattnttcctaaccctttcaccttgccttggttcccatcaccgaatatgattgaatcttggggatccttgttcttgacgtaggaagagaacatnctcttttcccccgcatg

SEQ ID NO: 63251 - DNA, 338 bp, Zea mays
  unsure (1)..(338): unsure at all n locations
agcttcagcaacttctacactctcttatggaattgtgctttaagacttatttgtctccaagacgtctagtacatttaccattcttttccttcttggagtcactgatggccccttctggttntttgctgtcccaatgatngctgtaggactcaaaacttctgatgttttggagccctcagttgcttctcttacctcctcaaatttttctgtgagcggcgcttcggttttctcttattgttctaacaacacaatggttgattggtctgattctatctttggtggcacttcggccgtttctgcgatctccggcaacaaggctggctcgattagaatttcag

SEQ ID NO: 63252 - DNA, 471 bp, Zea mays
  unsure (1)..(471): unsure at all n locations
gcttatacaggaggatagaggcaagagctcgaccatatgttataatagaagggggagctatacaagcgtgggtctgttctccgttactcaagtgtttatcaagagccgaaggtatagaactgatgaaggaaatacatgcaggcctgtgtggatttcacattggatccaggcctttgcttggaaaagtttttcgtcaaggaatttattggccaaaggcagcttcggatgcagcggaattagtccaaaagtgcgaagggtgtcagaaatgtgcaagagatcaaaaacaaccttcgtctctaactcagttaatacaacccacttggccgttgcaaaggtggngccttgatttgttaggtccgttaccaccagcacaagggaacttaagatatgttgaagtggcagtggaatanttttctaaatggattgaggcanagcctntagccacaataacttcngtcactattcaaaaag

SEQ ID NO: 63253 - DNA, 474 bp, Zea mays
  unsure (1)..(474): unsure at all n locations
tgccttcgcctagtataccacccgcagtctaacggtgttgtggttctctccaatggcaaaattntcacagctatcaagaagatgctcctcgacgagaaaaagggcaggtgggccgatttgttacctgaagcggtctaagcgctaaacacgactgagtgcaggacgactgggttcacccctttccgccttctatatggatcggaggccatgaccccgcaggaaataaaacatgggtccccacggacagtctcgtcagctgtccccgacgtggacgaacccacttcgaaggatctcatcgatggagaccgcgtcttcaccctacaagctctaagtaaataccaagcccaaacaaaagcatggcgcgaccatgcagtcatcctgagggaattcagcgaaggggacctcgtactcgtccgaacagctcggacagagtccagtggcaagctggagcccaagtgggagggccctttcatt

SEQ ID NO: 63254 - DNA, 346 bp, Zea mays
  unsure (1)..(346): unsure at all n locations
gatgagttcccattgccaacgatagattctctactatatgcattcagctcgncagagctcatgagtctactagattgttactcaggctaccatcacatctggatgaagaaggatgatgagccgtaaactaccttcataacctcaagtggcacatatagctatcttcggatgcctaangggctcaaaaatgctggacgaagcttcagcagaatgacagacagagtccttcactctcaaatatgtacgaatgtgttgacttatgttgatgatatcatatgtaatagcatgaagcacgaaaactatattcgtgatctgcaagagacatttgccaactataggcaagctg

SEQ ID NO: 63255 - DNA, 123 bp, Zea mays
gggatgctgacttaggagatcacggtcatgaaagagttgttaagagcactcaactgaacttggccacacgaaaactcatacacaactggtatatgccgtgattaacgatgtcccaacaactct

SEQ ID NO: 63256 - DNA, 293 bp, Zea mays
ataaaccttatcaacaattttgcaattgttcttaactctgcaactagcgggtggattcggagggcctcttggaattgggccgtcccggttgcactcgatggcaattaatatcccggccggtggattcctggaattcataggaaagacattgctactcacagaccatgggatttcttcagggaactccgtctagaaaagccatactgagaaaaccctgctagcaaattaagtgaattccgtaaatggaaataacttcacgtacactgctactcagccaactggtgaaggcatca

SEQ ID NO: 63257 - DNA, 504 bp, Zea mays
  unsure (1)..(504): unsure at all n locations
tcaccctcttccatgagaattccctgcaactcctctataatccctaatgacacttccttccgcggtcctgtatgatgtatggatgcagtatgaggataaatgatacttaatgcaagagacatatgatgcttatgggagcatagcgcacattctttaagatttactattcagaggttactacaaattggttctacaagatagtctacatcgtctaggaacatatagtctgtcttttcttggttggtcctgactaacagtttaataaatcacacagctcatcactaattacactacaaggtattcctaactacactacacatacatgtgtacacacactcaagcaatacacttaagagttattcatcacttagtgagaaggactntacaaataaattgaactatcataacaacangtatttcctttatgaatccgggcttaatcatgattgaactaagaatacgtacactacttaatctatacttaattggctacatagaaatact

SEQ ID NO: 63258 - DNA, 526 bp, Zea mays
  unsure (1)..(526): unsure at all n locations
tctctggttctgctactnttatcaacttgccctttgatgacttgtgagtcataattgagaaccgtccttcttattcccattgccttaagctttcaaagccccaaaagaagagcttcgtactctgcaatgttatttgtgcagttgaattccaatctggttgtatagcaagttttgattttagatggtgaaatcagaatagtggctgcacatgcaccanaggttccccatgacccatcacagaacattgtccaagcttttcggtgtctgttatgcttccttcttcctgagcccctggcgtccaatcagaaatgaagtctgctaacgcttgtgattggatcaaagatctatggacaaaatcaatggtgaattcattgagttctgcagcccattntccaactcttcatgtagcttctctggttcttataatgtccttaagagtctaagatgaaggtactataatgtgatatgactgtgaataatgctaaagctntctagaagccatcaataccacatatagtaccttctc

SEQ ID NO: 63259 - DNA, 427 bp, Zea mays
  unsure (1)..(427): unsure at all n locations
actcagcttctcatccctccttttcttcttaatacaaagaaacacagttctcatgcgtatttttaataaannagtggcaaaatggagacaatagcatatntgatgagaagtctcattacatcacatagagcttcaatgtaaacattaaaataaatctagcataagggaagcatgaaacttccctgattgttagtaccctcatccaccaatagtaaaccaaccccaatatcccatgctcccagaccctaaaattacaggaaatggaaactttattttgttggtagcctatatattcacttgacattattatttatagaactttagtgggaatattttagtgggatctttcaaattcatcagtatctgcaacatcctggatattaattaagactggaactctggaagagagtagagactcactagttca

SEQ ID NO: 63260 - DNA, 340 bp, Zea mays
ccgctcgcttgcctaccgtcagcagtatgggcacgagaagcataggagtcccgctcctttgtcatctatcacgatctagagcactctatacacttgatatagggttgggcctctggcctcttactcttctctgtaatatgacagggagtacacgctccttatatagagatgagagacccctcacgggcaaggtctgattctgccacataaccctaactatggatacttaacactcccacttgggcgaatggcgcgaccaacacatgcctctctagactcccaaaacccagttgaaataatggaaaagagacatgggactcagatgcatttcactttgtgc

SEQ ID NO: 63261 - DNA, 420 bp, Zea mays
tcttcggagaaacccgacctcgttgcaacatgacaccagaaggtccaacacaacaagcgttgaatgaattcagaattattgcagagcatatcagtacaagagacctggttcaggagtttttggctttcaagatttttcctagtttaaaagaatgggaaatgccgaagctaaagggggagaagaaagaaggtgaacttgtgcgtttaccttactatttcaagtttaagaaatactttaaaacaccttgccaagagtggctggatacaattgaagtaatgtgtaatgaaatacttggcaactactccaaaaaagaagatcaattgatgattgtggccttcggcacccgtccaaagcgaagactgaaccgagtgctggacgccttgggttttgaataccctaactatgaaaatctgaataaag

SEQ ID NO: 63262 - DNA, 420 bp, Zea mays
  unsure (1)..(420): unsure at all n locations
tanagccatggtaagtagcataggccaataatatgcgaattgactcaagcctagctacgggtgcataggtttcaccgaaatccaaaccttcgactngngaatatcccttggccacaagtcgagctttgttacttgtcaccacaccatgctcatcttgcttgttgcggaagacccatttggttcctacaacattttgattaggacgtggaactaaatgccatacctcattcctagtgaagttgttgagctcctcttgcatcgccaccacccaatccgaatcttggagtggcttctctaccctgtgtggctcaatagaggaaacaaaagagtaatgttcacaaaaatgtgcaacacgagatctagtatttacccccttatgaatgtcgccgaggatggtgtcgacggcgtgaatctcgtgga

SEQ ID NO: 63263 - DNA, 427 bp, Zea mays
  unsure (1)..(427): unsure at all n locations
tcgcgagagagggaacggatcccaggtctctcgagatgtctaatgctgtggagagagggttttgccttggagtgagccgtctgagttagccttttttgtgtgcctcgggaaggccctgcgcatctccttttatagatacaaggaggtgatccagctatgcatatgggggtgtagctatgtgctaacgtggccggcagagaagtgcttgagccctgtagaagcgtagctggcggtgtggccctaggtcctgctgacatttctttgccttcgtagagagctgaggacaatcgacctcatggacgcatgcagggaatcatcattacctattaccggagtaatcttgatgtgacaccggtcttggtccttcgtaacctgaggtggctagctaggggtaggataatgtcatatntcctgtagcgtagtcggt

SEQ ID NO: 63264 - DNA, 311 bp, Zea mays
  unsure (1)..(311): unsure at all n locations
cctgtgagctatcgcgccgaatatgcgcgtgtggaggagctcgagttgtctgtcacnccgcatgatgactctgggtggatgatgagcaccaacttgtgattgtgcctgacatgcgctacagatgctgttgatcgtacaatgaacatgtgctagtctcacaatgtgttgtctctttagaagcttatgaagagtcttcattcctgacagggaagtaagcttacacctatgcgctaagtgattttggtggttgaatcacccagaacgactcattggacgtactactctggtctactgtatcacgtatacatgag

SEQ ID NO: 63265 - DNA, 149 bp, Zea mays
agcgtgtgcagacgaacatgccatcaaaaaaaaagtcaacatgcatttggcactctagaaggttcaaacactctattacatccgtacgtgtgtatgtaccagaagatccacatctgtatggctccgatgggaacacgcatatgtatgtg

SEQ ID NO: 63266 - DNA, 259 bp, Zea mays
ttgaatctcttgatgatgagagccatcatcttatcattgagccacagccgctcaacttgcgccaccttgctaggaagcgactacttgctcctcagtgcctttagagcaatgggttgaggctcatggagaggaccgatcaacgcgtcgacgacgtatcttgcctgcttgatcatcatccgcccgctcacgaatattccaagtacttcctcgggcgtcatcatcgtgtacctgggattctcacgaatattgttcacgagat

SEQ ID NO: 63267 - DNA, 521 bp, Zea mays
  unsure (1)..(521): unsure at all n locations
ctcagcttacaagtctctctatggtatgaagtaagcccgcgcgcttagtcaatatgtgctccacatatctattctcccatggatntattgaggataagtctgacacatatttattcatctattgggttggcaatgacactgtgtacctncttctctatgttgatgacattgtgctactgcctctttcttgcccacccccccgcactggatcatcaccgctctttagcatgagttntgtatgaaagatctgggccatcttcaccatttttggagatttctattaagcatcgtctagatggcctctntctctagcagtgatgatacaccctagatatcctcgatcgcgttggcatgctagattngcagacttgtatgactctggtggacacacaggccaagcccttcaacgacgatgtctgtgtcagcaacccacttgctaccatagtcttgctaacgcttntcattatttcaccttcactagacttgacgcacatatgtatacaatacgggtgctctcatac

SEQ ID NO: 63268 - DNA, 385 bp, Zea mays
  unsure (1)..(385): unsure at all n locations
tatgaatttgtttncgtatttctttatctncgacgtactgtaatgtctgcaagacaggtgagacgttcctggtaaggtaaggaaagataccgaacttgtcaagtagttcaagggcacctgcagggttgtccgaagtctgctggacaaagacgactgtangtgggcctaattacttgggaggttccggcacagctggtatcggagcgtagcccttctttgcagatattatgaggcatcttcaaaaggattntcgaaagtcttatctaanaaaattcttttctcttcttacctaagtattctgaagagtctatnttaaagaccagatangatgagtgcaatgtatataagggtgaatcgactaaagggtgatctgtacttattcatg

SEQ ID NO: 63269 - DNA, 401 bp, Zea mays
  unsure (1)..(401): unsure at all n locations
attagcgacctatgatactcagcttctttcgtcgtcatgagcgacgccaacacgagcgccttctgccagtggtgtttgttcggggtttccaagtaagaaaccatggattcattttgacgttggtttatgaaaatgactcacaagtcagagccatggaaaaatattacggagaataaatgtcacacatataaaaaagaatntaagttaaaaacattattcaaacaaaagaanatgcatgcaagactctntnttaaatactactccctccatcaaaaaatataattcaggaatctcgttgataattatctattactacacattgtgcanaggtagcaggtgggctttgggagagatgtaatatatanttttactggaacaaatattgatataaacacatatgt

SEQ ID NO: 63270 - DNA, 261 bp, Zea mays
cctggtgatggagcaatgtggtctagtggcataccgacttcaactccccgaaacattgtctgctgtgcataatgtgttccacgtgtcacaattgaagaagtgtcttcggattcctgatcgaaccattgaagtgactgatgttgtcctggaaccagaattaacctactcggaacatcctattcgagttctggatcaaaaggacaggatcacccgaagaaagactctcaagttctacaagatacagtggaaccagcattctga

SEQ ID NO: 63271 - DNA, 534 bp, Zea mays
  unsure (1)..(534): unsure at all n locations
ngagtcctnganatccaagactatcctatagtaatacggacacatactttctcttcttttgatgatccacctacacatggcaagataatttcatatgctgacatatgaatctagtttgacatcaaaattccagcggaggcaacacaaatcatcaaaacaagatagcatcaagaatntgcatcattggctcttgggttggtgagccacataacatatagtcctagtgagggagcgaatacaggttcctagacaccccttatactatataatctaccgcagtcgctcatgttagagtttggaatttactntagatcaatatatcattgaacaatacgttgtatcggttgtgacaccctaacttcgtgatcttaatcatgcatctgtcattatcactttaagctangtactgcanaatgatgccccatgtcgtcaagtatgacaccgntgatagatgtctgcattggatgtgctcatgggtatgcctntggcctcatatgtggatacaataatgacctatgtcatcgagtctaacat

SEQ ID NO: 63272 - DNA, 433 bp, Zea mays
  unsure (1)..(433): unsure at all n locations
ttgcatctgcgagacattcataattcaatggactggtagaacgagctaatggaatcataataacgggaataatgaagtccatcttcaatcagcccaaaggaaagtggccagatgaattagtaaaagtggtatggaaccacaacacttgtgtctaaggtcaacaggaattaccccattcaaacttntattcgttgatgaaacactatcatcggatgaagcaagagcggtgttcgataggatcttagcttcagcagaagacgaagaggattggtaaataataaaagacaccatagaatggaccagacttcatgcaatagatcacatcaataagtatcatgccgaaacagtcaaatcacatgatcggaaggtagactaaagactatcaagcatggacactctgtacttcggagagtggccaacctcgatacaatgg

SEQ ID NO: 63273 - DNA, 437 bp, Zea mays
  unsure (1)..(437): unsure at all n locations
ctatgttatggatggcttttgagtctgtccagattacttcggcccttctggcaccttcctgacttccatgaatagcaatgggtccttggtccaaaggtattttcatgcaaagatatgctagatgaagaattgcttcgaacgcattgagagtaccacgaccaatgattgcattgtaagggtattccatgtcaacaatatcgaacacaacttgttcagtccttgtgttgttgataaatccgaaggttactggcattgtgatttttccgagtgctacaatctgccttcctccgaagccacanaggggatgtgtggcatcatggatcttgtcttcgggctcttgcatctgtctgaaggccttagcatatatgatatcagctgcactgcctatatcaactaagacattatggaccagaaatcctttgatcagacaagagata

SEQ ID NO: 63274 - DNA, 546 bp, Zea mays
  unsure (1)..(546): unsure at all n locations
ttagcgacctatgatactcagcttcatattataacgtatcccaagacgaaggatcgatcctacttatatatggaatgactccttagtccataaggatctgagtcataattgtaatcttatgtaaggcgtatgattgtaatttcttataggctgcgtcctgtgcctataaatagtgaacggtactcctttattgttcacgaaatcttgtaattgctaacgctntattctggaattattgttttctgccaaggcgaaggtataaatgtacctaaacattatgttttagtatttcagtttatattataaagtaagtaataatgttcgttattcttggtattctttaacactctatattttatatttcatttcgcattaatttatatctgaacacgaaggtangaccttcgtgattatcatccatgaccttcgttcgaagctcattannatctcaggganataatgcttcagcagaacgaagggattaacatttaacattctatcgtgccttgtcttaattcatagcatttgagaaacaagtccaacatt

SEQ ID NO: 63275 - DNA, 370 bp, Zea mays
ggggggccacaaacatggaagttttactgggcaaagcagcgagatcccaaaaggagagaggaggaagtgaacacgagcatcaggagcagcagcaagccggcggcggctgaaagaccttctagttggcagcctatcaccacaacgacccatccacaccgaggacagagctggtgagcacagcagacgaaacaccgcttgtcattactcgccggggaccgccgatgagcaacctgtggcaactatcctgcgcgacagcgaccacagccggaggacgctatcacagcggcggcaacgcataaacgatgcgcactgaagagtcctgatcatctgcacctcagcgcacggactgactgcaggacacaggcacacg

SEQ ID NO: 63276 - DNA, 494 bp, Zea mays
  unsure (1)..(494): unsure at all n locations
aactaagcntttgacatgtagactngatatgcactggaccgcatcatgatgtcttcctatttgtttntagntctcgtatcagtagtgttcctgtggagtgagcagcatcactccgtccaccatctcctctaagtatttgcaccgcaatatctctgtgcattgagaagcataacatccaccatctgatccaagattntgcatctctaatgttaccatgcactgggcaacttcagcttgtccatcatctataatgaacccttgtttaagaaatgatgtgccttgaatagaatctccttgttcgtaagacatatgctctctttcaagaatgtcattgtcacttgtcaagtaagaaaatgccttcgcataaacaccatctctatcaatattgtgttcttctgtgacaaccacctcatcatcatcattgacagatcaacaatatctactatcattgcttagtctgaaacagcanacaagtgtgagtggtagatcacaac

SEQ ID NO: 63277 - DNA, 406 bp, Zea mays
  unsure (1)..(406): unsure at all n locations
tatgaagattcttcatcccaacatgtgctagtcggcgatgccaaagtcagcccatgttagtcttagcaattaagcaagtgtcgagttcagctctatcaaaatctactaagtatagctgaccctctaacactcccttaaatgctattgaatcatcacttcttctaaagacagtgacacctacattagtaaaaagacagttgtagcccatttgacataattgagaaacggaaagcaaattgtaatctaaagaatctacaagaaaaacattgaanatggaatggtcaggagatatagcaattttacccaatcctttgaccaaaccttgatttccatccccgaatgtaatcgctctttggggatcctggntnttctcataggaggagaacatcttcnttctccctgtcat

SEQ ID NO: 63278 - DNA, 346 bp, Zea mays
  unsure (1)..(346): unsure at all n locations
gaagcacaaccggtcgcattcaaggcgacggaggagaagaaggaggaaactacatcaagtagacaaccaatcgacgcctcatagctcgacaatgaggagatggcgctcatcatcaagagcttccgccaaatcctcaagcaaaggagggggaaggattacaaaccccgctccaagaaagtgtgctacaaatgtggtaagcccggtcattntattgcaaaatgtccattatctagtgatagtgacaggggcgacgacaagaaggggagaaaanaaggagaagaagaaatactacaagaagaagggcggcgatgcccatgttngccgagagtgggactccgacgagagc

SEQ ID NO: 63279 - DNA, 346 bp, Zea mays
  unsure (1)..(346): unsure at all n locations
cacagctcangctctgttccaatgcacacaagatcacgaagaataccttcaggcatatgtacgaaggttcttgcgattgagggcacaagcgcctacggtgcccaatgagattgttattgaggccatgatcaagggtcttcgtccaggacctactggccaatatttcgctaggaagcccccacaaactctcgagaagctacttcagaagatggatgagtacatccgagctgacaatgattttcgccaaagaagggatgaagcttacagattctgcgaaatgaccagtggcttcggaggaagaattcatccaacgcatgtcacgtcaatccataactccactcgaagt

SEQ ID NO: 63280 - DNA, 491 bp, Zea mays
  unsure (1)..(491): unsure at all n locations
ttctggaggggtgcatgaagaggaactgtaggcgtgcaggtagcaaaaggaattcccatggagatagactgacgatggagatcgtcatccgtctcccactgccgcctggccaactcatgaacgtcagcagaaatgttcctgcacatagagaaaaaggctgcaatcccatgagccaacctggctcctaggccacgaccacgacctcgaccacgaccacgtggagtgggagagccacgaccaggagaaggatgggagggactagctgaggtctgctcacgagagctggcaggagccttcttcatccttcctgctggattattggggtcaatccacaaaggggtaaggaaagatgtctggtgcccttttcatatctgaattgtgtgacaacctcaatcattntcatgatgtanggggcatgcagacaaccctngagtggngagcaagaggcatgaatgaattccggccagatcatatcanacacattcaatctc

SEQ ID NO: 63281 - DNA, 429 bp, Zea mays
  unsure (1)..(429): unsure at all n locations
tcttgaacgcaagctgtccgtcaccttctaataatgattccgcaagctgcgatttatataaccttngcagcctaaagacaggaaagtaggtctaagaactacatattaaaatatgataggaaaagaatgcagcaaacaaattctttaatgatttcaaaacttcacgcgctgttcaaaataatcagatcacgctatgaatgtctcgtggtaactcaccgtggccaacatggataccgagcgagtgcaggatgtgggacgcatgcgaaccgcagcaaagcgcgacgatcgtccacgcgactcggccccggctccgcagcaggagttcctccttcctggccgccatcttcctccacttgcgcgcgctctccccaacccccgcgaccgtccccctcggcgcgccgtggcggngaacccgcactccgtgagcct

SEQ ID NO: 63282 - DNA, 436 bp, Zea mays
tggcttcatctatattatgaatagccttgaatccgtccaactttcttcggctctcttggcagcttctggattcccatgaacaataatgggcccttgttccaaaggtatcttcatgcagaggcatgctgggtggagtattgcttcgaaggcattgagcgtccctcgatcaatgattgcattgtatggatactgtcacacccgggttttaggggtccaaagcccgggcgcgaacataatcaccaggtgtgctaggaccaagtctcacacatatgatgaatcatggcacaggatcgaatgtcacatctttactatataatcggagtttagtacaaaataaataaataattacattatatggagacaacggtccagcaacccaaagttgactgggagacgacgacctagatctctcacgaactcatcgcagcatccacct

SEQ ID NO: 63283 - DNA, 343 bp, Zea mays
  unsure (1)..(343): unsure at all n locations
actagccaaatcggcggcctaggggctccctctaccttcagaagtatnttttgaaacaataaaggcaccttcggttgaactcatggagagagcagtgcttactatatttccggtacatagtgaagaatggaggactgaaattatatctttcctccaaggtaatngtcttccagatgacgaagcttataataagagaatggatgcaagaacaagaccatatgtgataatagaaggggagttatacaaacatggagtctgctcttcagttctcaagtgtttatccagaaccgaaggtatagagctaatgaaggaaatacatgcaggtttgtgtggatctcacatt

SEQ ID NO: 63284 - DNA, 223 bp, Zea mays
ctcagctccgcttggtccatcttggggcaaatttgcactttctttttgctgtgcgaacttcacacctacctgtctggttatatagtgccgcacgtgggaaggtgaatcgtcaagtcttccggaccagttaaacagtcgtccgcacccactgaatggtgggccacagagcccgagaatgtgaatcgtcacgacgcgtgtacccgccgcatggaatattttaatc

SEQ ID NO: 63285 - DNA, 457 bp, Zea mays
  unsure (1)..(457): unsure at all n locations
gggacattnttcatcagagaagcgaattcttgggatatataaaggattntcttcacgaagcatgaaaagaagggaagggtgtttttcgccgaaggctcataaaatggtatgtatgcaaagtttcatgcatcgtaaagaattaaactataaatagattatatattacatttaaagttacaatatattacacatctttatgttttaaatgtttctacaatggcattcaatcttctttaagcactatctctgcagcttcgttcaatagttggttgacaaccttgtccataatggcttcgaccattnttctaatttcatcgtcccccttcgggtgggggcccggagatgcctcagcaggttctgagggaagaaaagatacggctatatcactattacaaaccgagaacagagtttggaattaanaagtacagcatgaataanaccactaattaatacctat

SEQ ID NO: 63286 - DNA, 449 bp, Zea mays
  unsure (1)..(449): unsure at all n locations
ggtgaaggttcttcatccncacatgtgctaagcggcgatgccacatttattccatgcaagtcttagccattaagcatgcatctagaccggcctcttcttttgcaaaatcaactaaataaagcttgccgtctaatacacccttaatagctagtgaaccatcacttcttctaaagacagacacatctatatttgtgaacagacagttatatcccatattgcacaattgactaacagatagtaaattatatcctagtgactctactaaaaacacattagagatagagtgctcattagaaattgcaattttacctaaccctnttaccttgccttgattcccatcaccgaatatgattgaatcttgggaatccttattcttgacgtatgaggtgaacatcttcttctcccccgtcatatggtntgtgcatncgctatcaataatccagcttgaa

SEQ ID NO: 63287 - DNA, 428 bp, Zea mays
  unsure (1)..(428): unsure at all n locations
cgtgcanaccttgngagattctaagagtggattccaatcccaaatcttttccaagttaggaaaaggaagcaatggagcttgtgttggcaaggtctggttagggtctccttggcatccaattgccctactcagctcatctattggaattgttgccattgtagcggagtttgcattaagcagggcgtgtgtggaagaaggcagcattggtgggttaacacccttcatgtggtagagtgatgtaccgtcctcctctgtcgacgtggtggagctaagtgagggggttgataggaacattgacgtctgtggtgccagtgtagctgctcgagctgcggctgatgatgccatgcccagcatggtggtgtttgctccactgtatggcttggtcatgtaacctgatgagtggccaccgtcgaacactggcgccatgc

SEQ ID NO: 63288 - DNA, 80 bp, Zea mays
cttgtatgagaactatgttggctggatcttgtatgatggaccatatggggatccctgctttggttaatctatgcataagt

SEQ ID NO: 63289 - DNA, 360 bp, Zea mays
  unsure (1)..(360): unsure at all n locations
tcagtcttagcgttagtctcagtcttagttagtcttaattagactttggttnttgttatattctgcgcatttatgattgtcatgatgaactatgattggcttggatctttgtaatgaatgtcaccagagtgtgggtatcccctgcatntaggtttacctattatgttaatggagttagctatatagctgggaaaccccttttattccactttcctttctatctgagaagctgtgtggtctgtgttggagatcagagaagatgctcatctggtcagtgctgttgaagaattctattctctttccttatgctgcaagatttgccagatcagttctgatgtgtgtgtgcattctgcagaatgt

SEQ ID NO: 63290 - DNA, 446 bp, Zea mays
  unsure (1)..(446): unsure at all n locations
tcggctggggtcaaatattntggtagcacaacgatgcaatagcttttttgatgtggtaacttcacacctacccatctgtttatatagtgctgcaggtgggaaggtgaatcgtcaagccgctcgcacccgttgaacagtcacccgcactcgctgaacgatggaccatagtgcccaagaagctgaatcaccagatcgtgcgtacccgttgcatggtgggaccatccttcacttggaatattttaatcgtttctcggcaacgagctcaaggaaggtgctcttcggcccttcgacattctgaagcctgagagagnttttcacgggtcgagctcgtcacggaaaacgatctggaaccgtgaaggggctactgggtggggtctgcttcgtcgccaagggcccataaaaagaacaccttcgaagatgacatanagccgaactataatcaaaag

SEQ ID NO: 63291 - DNA, 452 bp, Zea mays
  unsure (1)..(452): unsure at all n locations
attcttgagcccctcgggcatccgaaggtagcaattagttccactatgggttatgaagcttgcgttaggctcatcctcctttttcacccagatttgatgatagcctaagtagcagcccaatagactcatgagcaccanagtggttgctacatctatgagggagtctattcttggcaaggggaactcatccttcaggcatgccttgttgagatctgtaaaatcaatatacattctccactntccattggccttctttaccataacagcgttggctagccattctgggtatgttacttccctgaatactccagcactgagaggacctttaacttcgtttctgcccttcggattatcatcatacaacttccaaagcttctgcttccttggctgatagttgcgtctacattgagtgaatgttncataacttctatgttgacaccacaaagatcatt

SEQ ID NO: 63292 - DNA, 348 bp, Zea mays
  unsure (1)..(348): unsure at all n locations
tcttcagctctntcagactngcataatgcatcaattangacattttattcatgctcatcaagtgtcaagccattttgttccatcatttcaaataacctgaaagcattatcaaattcgtgtttttttgcactggccttgaatcagagtagtataagtgataacaccaggagttatcccatcctcttgcattttgaagccattgccttatgaagttcttgatcctgaattaacccatatatgaaaaaactataagtccaggcatttggaggcggccagatgacaattctatactctattcttatgctgcaagcttttgcagatcagttctgatgtgtggttgcgttctgc

SEQ ID NO: 63293 - DNA, 438 bp, Zea mays
ctttctgcaaactgagtctttgatatttggtaagccttaccttgtattcctacaactagcatatccttgagagtctttttctttagtcgggtcagtcttgctgagtatttccatactcagggtttatcccactgttgttgcatgagaaactatcaacacatatgagtgttgttaaactcataatggtgacttttacttgtgtacattatgtgggtgctgccggaagatggtttcttcccagttgatgtgataagttagcactttaactctacctcgggcatgtaataataaatactctgtgggttgtaaactcaataccgtggtaatgagttatccataatgcaagacggccgctcaactctatatttttaaactctatgtctagattggtattgtaatattgcactttgcgtgatggtctttgaaggacgagtcttc

SEQ ID NO: 63294 - DNA, 471 bp, Zea mays
  unsure (1)..(471): unsure at all n locations
taatccctcatatccaccataatagatgcctagnccactatatatatctgaacttttctgctctaagcgaacatccgaaacagatggaaaagctgcaagtgttatgcaagagtaaggatctggaggcagtgaataaaacatacagaaatgtcaggtagaaactggaaacatatcaaggagcaacctgccatgaccggaccatcatagatagccatcanaggatcaccaaccttttcatcacgccgtgtatgaacccaataaagaatcagataggaactaacatcattcaatgaaggcttatattttctgttacagggtccatatttcaaagggttagttacttatatatctcatccaacactaacaaattagataaagtcaaagaacacacaaggtttcttcacaacttctgatgatcatcaccagatcaaattcaagtatcaagttctctttgttcaaacattgatattg

SEQ ID NO: 63295 - DNA, 423 bp, Zea mays
  unsure (1)..(423): unsure at all n locations
ntgtagctacatcaccatcaacttgtgtggaaatagtagaatatactcatgatcgacgaagcagataagcatgatgacatactcatgatcgacgtagctgcatcaccatcaccttatgccatatccatgctctggcctttaaaaaaagataaataaaaacttattcccacccttgtgatcttctaaaaaaaccctaatttatacattctaaaatgttggaggagtcaagagtgaactatctactgccatagcatctgcgattaatacagaccaagaacagtagaacactacacaggtgacatgcccaactntagttngtgagaggacaactaanaatcttaaactatcttatcttacctcaccatcattgttctaagataggggaacatgcctcactgctgaccctccatggtggaggggtat

SEQ ID NO: 63296 - DNA, 447 bp, Zea mays
  unsure (1)..(447): unsure at all n locations
tactcagctcttgtagggattttaactcatgaaatttgaagcattgttagtcctcatgcaaatgcaaccactagatgctctatgaggcactatggtttacacagatcaaagtcattgacccctcttaatagtacggctatctaacctactaatccggtcaagtatcttctctatactcctgaagaccggcaaaaacaaaacctatgttatgcctttgcctttcactcgatccacaaccaatgcttatgaatctccaagatttcctgttctatgtggtccaaccctgcattcttaattttccaagaaccgttagtccacacacagttgtcattaattaccanaacatgacaaaggggcctagatgaatcacaatnctcccctttntgggtatttgatgatacactacantaatatattcagagagntntgttttcccaatctccctca

SEQ ID NO: 63297 - DNA, 260 bp, Zea mays
ctgaatatgcggattgggatggaatacctattgaaacttggtctcttttgttgggtaaaacttgggaatatgatactgatgcatgtcaccatggtaggagtaatacatacacttttacgcataaagaataaaacattaatttgctacctttgactcttgctgaaattggacaagctgataaagatagagcttgcaatacccataatgaaccaactaatgagacagaattcagcacaaattaattgaagctcatgcatgct

SEQ ID NO: 63298 - DNA, 432 bp, Zea mays
  unsure (1)..(432): unsure at all n locations
tcatatcatctgtgggtacctgcanaacttattaagtaccattttgtacccatctcatgataggtccatcaaggttagccaataaggacttatgcacccaaatagccttgatcctagaatgtggtgaactcatcacctttctagcacaagagtcaaagttgggtctcctaagcatatttgaatgtattgacaagttaggcttaagagttttaccctttggacaaaccttgaatagatgacctctttcacggcaattgtagcaaatgcggtgcttgtccttgcaatgcatttgccttttgctttcatccttcttgatggtcatctttcttgatcgtgcaaggtcttgtgtcttcatgcggnggcatgaaccaatttcatgacccttctccttngcatccatagcacctctatcgcttctctttgatctttctt

SEQ ID NO: 63299 - DNA, 381 bp, Zea mays
  unsure (1)..(381): unsure at all n locations
actaagcttctaagggagagcancatttgggactaaccaatgttcatttttatatagacaggatttggagcgcatgtcaggcagggaagcaagatggtgttcatcatccacacaagaacatcatgacgactgacaagccactcgagctcctacacatggacctattcggccttgatgcttacataagcatcggctaagagtaagtacttgctagttattgtggatgattattctcgcttcacttgggtggtctttttgcaggaaaaatctcatacccaagaaaccttaaagggattcttaagatgagctcagaatgagttcgccttaaggatcaaaaagattagaagcgattatgggacggagttcaagaactcacaaatc

SEQ ID NO: 63300 - DNA, 465 bp, Zea mays
  unsure (1)..(465): unsure at all n locations
taatacccttcgtcctttgaagcattatctcccttaggatataatgatcttcagacgaaggtcatgaaggaagtaccttcatcatcacaatatatgttaatgaaagaagaagcatacgaaatatgagagataagacgaataatcatttaatatcatcaatatagctttattatatcatcatggataaacaagaacaatattgaattatatttgtaccttcggcttgacagaagataaaagtccaagcgtgacgcacgagcgaatacaagtcagcgtgaacagtacgagggtactgttcacctatttataggcatgggacgcaacctggtcaaattacatttatgtccttgataatngattacaatcatgatacaaattatcatggactgatcggtcttttcctctttaagtcngtgcagcccttcgtctcaaggcgtgtcactatgccgaaagctcttggatagt

SEQ ID NO: 63301 - DNA, 434 bp, Zea mays
  unsure (1)..(434): unsure at all n locations
tgacattgtctccctgttggaagccaatgccatccttaatgccattgcgtctctcattatagagcatgcttctagcaaatttaaaattnttattctctatctcatgctcattaattttagcagttagttgagctatgtgatcattttgttctttaattaaagctaggtgatcatgaatagcatcaacattaatatctctacatcttatgcaaatagaaacatgatcaacagtggatgtagagggtttgcaagattttaattcatctatcttagattntagcatgacattcttatctctaagataggaaatggaaatattgcaaacatttaaatccttagccttagaaatgaatntatcattctcaatcttaanggctagaaatgattcattcaatttggcaatcttagcaataaaactaccatttatcatttta

SEQ ID NO: 63302 - DNA, 398 bp, Zea mays
  unsure (1)..(398): unsure at all n locations
actcaactttaagctcttngatgatgaaatcactctatccagctgtaacatatagtttaactttgtatgaagcacggattatgcatggacatgctttctcttccttctatacaagatatgccaagaatgtgtagaacacgaagatttatgtacactgtaaaatgagaggcaagtgtttaccctcatgtaccttcacattgagatgctcacttcaatgtgctctgtccttagtcttagatacttaagacctaaattcaagacaatatatggaaatattttgcacaagggagagggttctacaactagtgatccttttctaagtcatgcgtattacatatcacgtagatcacaaatcggataaatatatcatgaattctcctttaactcaatgcatatca

SEQ ID NO: 63303 - DNA, 487 bp, Zea mays
  unsure (1)..(487): unsure at all n locations
tgaatacgacatangcatcactaactactgaactcctattttatttcaactagagcaagaaacatacaaaacgtgacacacgtgcattatgaagcttagtcatggcaagtctacattacttaagtgttaactaagcatatntagccaaaaagggtcaactcaacaatcaattaaacatttgcagaattttaggacagcagcacatcagtcacttgctttaaccataactnttcaaagattaatccaaaaatagcaaactatgacattccggaaagcttaagaagtgaactacaactntggtattatcatctcaatatgagtagactcttagcaaggtcgaattgncaaacacagcagctctgtccagatttggacagattcagacttgcagcttcaaaaattcacaacttaagaatcagacattccaaacaagtaatcctagactttctgtaangtaattaaatgtctacanatatttataacatcc

SEQ ID NO: 63304 - DNA, 444 bp, Zea mays
  unsure (1)..(444): unsure at all n locations
gcttcttcaaatgaagtcattaaagaattatttgagggcattactattctttgaagggtggtctggcaactttatgcatcgagaagctattggatgatatcaatactaatagtataatcgatgagtttgtataaaaaaatgttcgaataaattttataagatgtggaagagacaagccaggttttatgaattcaatcaatgttattttataaacagtaatgtgtaatattctataaaaaagtaaggtatatgcaatttttttaataatacatgttcattagatgatacacatatacatttatatagagaggtatacatttatacatatacatgtccatatannatttcgcttatggtcctcgaaatatcaatattggtactgggcatagtcgatatttgagcatgtaatattcttcgccttcacatttatcatctatcatatat

SEQ ID NO: 63305 - DNA, 430 bp, Zea mays
  unsure (1)..(430): unsure at all n locations
tctatagggagaacacgcgatatgtctaactaatgtgcattntttacaagatagaccttgtgcagctcgtcaagcatgtaaacaagagggaagctctcatcatgccaaaaatgtgatgacaacatcaagaccgccggagttacttcatatggacctcttcggaccctgctcctatctaagcataggaggaagtaagtatggtcttgtttacacgatgatttttcccactacacttgggtattctttttgcaggataaatctgaaacccaagggaccctcaagcgcttcctaatgagagctcagaatgagattgagctcaacgtgaagaagataatgagcgacaacgggtccgaatattaaaacctttatgaggaggagtaccttgaggaggaacgtatctatcaagaatcatctgctcctaccaaccaaa

SEQ ID NO: 63306 - DNA, 364 bp, Zea mays
  unsure (1)..(364): unsure at all n locations
tctaaagggagaacacgtgataagtataaccaatggtcatttctaaaaagatagaccntgtgcagcttgtcaagcaggtaaacaagtgggtggagcacatcacagcaagaatgtgatgaccacgtcaagacctctggagctgctgcatatggacctcttcggacccgtcgcctatctgagcatatgaggaagtaagtatgggctagatattggtgatgacttttcacgcttcacttgggtgttctttttgtaggataagtctgaaacccaatggaccctcaagcgcttcctcatgagagctcataatgagtttgagctctaggtgaagaagataatgagcgacaacgggttcgagttcaagaac

SEQ ID NO: 63307 - DNA, 434 bp, Zea mays
  unsure (1)..(434): unsure at all n locations
tctanagggagagcacattntgngactaaccaatgttcatttttataaagacagggtttgtagcgcatgttaggcagggaagcaagttggtgttcatcatccacacaagaacatcatgacgaccgacaggccacttgagctactccacatggatctatttggcccgatagcttacataagcatcggcgggagtaagtactgtctagttattgtggatgattattctcgcttcacttgggtgttctttttgcaggaaaaatcacaaacccaagagaccttatagggattcttgagacgggctcaaaacgagttcggattaaggatcaagaagataagaagcgacaacgagacggagttcaagaactcacaaatagaaggctttcttgaggatgagggcatcaagcatgagttctcttctctctacacaccacaac

SEQ ID NO: 63308 - DNA, 373 bp, Zea mays
  unsure (1)..(373): unsure at all n locations
ctctggatgccatcaaaacagcatataacaccttctctaattctgtgtagcntttctttgatatactaagaacttcagatacacaatatactgggacctgctttctgacttggccatcaagcttctcctggacaagtgctgcacttaccgctgagtgcgaaactgccacatataataataaaggagcccctggcgtatgtggagatagtgctcgtagatctatcaaatactgcttcagttcttcgaaggccttctgctggattggccccattgaagacttctgctgacttcacacttcgagaaatgtaagttctctctgctgactgatataatctattgaagatgccaccttctgtcaactttgacccctttt

SEQ ID NO: 63309 - DNA, 359 bp, Zea mays
  unsure (1)..(359): unsure at all n locations
accttaaaactcagcttatatatctcntctctacaagcttgtcaagcacatttggtacccatcgcttgatgggtccatcacggttagtcaacaaagatctaggaacccaaaagttctttgtgttagcactatgtagactcattacctttctagcacaagttgcaattttgggttgcctagttacatgaaaatcaattgacaagttaggagtgggattgttaccaatgggacaatccttgcattgatgtcccttctttcggcatgtgtagcataggcgtttttcaagttttgaagctttcttctttccttgtttggtgcttgctacatggntagtaaaaactttcttttctaaccctatg

SEQ ID NO: 63310 - DNA, 348 bp, Zea mays
tggacgtgaaaagtgccttcctcaatggacctatctatgttgatgtctatgttgagcaacctcccggctttgaagatagtgagtatcctaaccatgttcacaaactcttaaaggtgctttatgggctcaagccagccccaagagcatgatatgaatgcctgtgagaattccttatcactaatggcttcaaagttggtaaagacgatcctactctctttactaagactgttggaaaagatctgttcgtatgccaacaatatgttgatgatattatatattggtctactcacaactcaactatgaagagattttaggatcatgattcaaaattcagatgtctatgatggg

SEQ ID NO: 63311 - DNA, 457 bp, Zea mays
  unsure (1)..(457): unsure at all n locations
ctataaaactcagcttctaagggagaacacgtgataggtctaactaatgatactttctaaaaagatagaccttgtgcagcttgtcaagcagggaaatatgtgggaagctctcatcatgccaaaaatgtgatgacaacatcaagacccctggagttacttcatatggacctcttcggactcgtcgcctatctaagcataggaggaagtaagtatggtcttgttataggtgatgctttttcccgcttcacttgggtattctttttgcaggataaatctgaaacccaagggactctcaagcgcttcctaaggagagctcacaacgaagttgagctcaaggtgaagaagataaggagcgacaatgggtccgaattcaagaaccttcaagtggaggagtatcttgaggaggaatgagtcaagcacgagttctccgcttcctacacaccacagcanaatggtg

SEQ ID NO: 63312 - DNA, 367 bp, Zea mays
  unsure (1)..(367): unsure at all n locations
actcagctctaagggagaacacgtgataggttngactaacgtgcactttttaataatattgtccttgtgcagctggtcaagcaggtaaacaagtgggaggagcgcatcacgggaagaacgtgatgaccacttcaagacccctggaggtgctgcatatggaccttttcggacccgtcgcctatctaagcataagagggagtcagtatgggctaactattggtgatgacatttcccgcttaacttgggtgttccttttgcaggaaaagtgcgaaacccaacggaccctcaaacgctttctcaggagagctcanaatgagtttgagctcatagtgaagaagataatgagcgacaacggatctgagttcaa

SEQ ID NO: 63313 - DNA, 495 bp, Zea mays
  unsure (1)..(495): unsure at all n locations
tggctcccgtgtaattagttctcacaggtatgaagtgagttccttttgttagtctatccacaatcaccaaaatggagtcatattctgcaagagtgcggngtattccaacaatgaaatccatgccaatttcttcccatttccacttgggtatcttaagaagctgcaatagtccagctggtctttgatgttcggccttgactctttgacacacatgacacatagccacgtgtgcagccacatctcttttcagcccataccactagtacttccgcttcaaatcctgatacatcttagtgctaccagggtgaatagagtaatcagaatcatgggctttcttcaatatagtctcacgaaggctatcattctcangaacacatatatcggccttgaaccatactgnttcttgctcattcttcgtgaattctggaccttaccttcacgaatagatccttgatctcttgaatttagcataccaacctgtctttgcgtattctg

SEQ ID NO: 63314 - DNA, 403 bp, Zea mays
  unsure (1)..(403): unsure at all n locations
actcagcttagcgaagactgccagggtcttcactctcaactatgcatgtatgtgctgacttatgtcaatgacatcatagtgaanagcacanaacaagaaaatcatgttgccgatttgtaagagacgtttgccaattttagacaagctgatctcaagttgaacccagaaaaatgtgttttcagagtgaagaagggcaagtttcttggntgcctggtatcaacaaaaggcatcgaagctaatccaagcaagttcaaagctatcctttggatggagccaccaaattcaaaaaagggggctcaacggttggcaggaaggctaacatcgttgaatagatttatatcaagatcagtagagaagaattataattctttaaatactgaagtcactgaagcttcagcggagt

SEQ ID NO: 63315 - DNA, 454 bp, Zea mays
  unsure (1)..(454): unsure at all n locations
ntatgctatgaatattgctgatgcttaatatgggtttggtatatacttatacttagcaatcaggggttgataataaaatggtgaccacctaaaatgttaactgcattaaactttagccttaccttgttaccttgcattttcaccccacttgctaagccccaaccataagtgagctcacccttgcttaattttgattagaagtttgcagatgaagatatgatggtgaactcgatggatgctagtctagtgattcccccggtcatcttcctgtggaaggatgtccatgtttcgctatactctgatgaataaaggttaagacattatgtctgttcgaagtgtaatatggtaatataatctttatcatacgctttatgcattgttatttagatatattacacttgtgacgtcaacatatgtgtggaaatagatcctggcacacatatgctaatcattc

SEQ ID NO: 63316 - DNA, 322 bp, Zea mays
actcagcttgacagacactcgagcaggttctagctcctgcgcgacttgtttctttgtagcacacagatcttttatgatcaaatccttggctgatatcagctatccaagacgctgaactttatcttgagatacttgcagctcgtgacaatgatggcccacgtccgacatattgaagcggtggctcctttcaagatagtcaatggagttctaagcgcatgatataacctgtccagattatcccgagaggatacaaggtctcgtttctcctcctacgaacaagaatcaacatttatcacccagtctacaataagcctggcaaagt

SEQ ID NO: 63317 - DNA, 349 bp, Zea mays
  unsure (1)..(349): unsure at all n locations
tctccaaaacagtcaagaatgagtttgacacagtttatctctttctcccttggcttgacaaacaagactacatcatctacatatagagataatctggacttcacaatggcaccttctagactagacaacaattctttttcttctgccactntgaanaggctgctgaggacatccatcaccaggacaaagagcattggggagagggggtccccttgcctcaaacctctgtgatgtctaatctgttcacctggaaacccatttaataaaatttgagtcgatgaagtggccagcaaattggagataagaatcctccacctattactaaatccaaggtgggttaacacctcaa

SEQ ID NO: 63318 - DNA, 387 bp, Zea mays
  unsure (1)..(387): unsure at all n locations
tcgaatcattgctcttcggcttcgtcatcctgtacataacaaattgttataaggtaaactcaagtttcaaggagaaggtaagcatcaaatatggatttattaccggcttgaggtggcttctagcttcgtcaccagctaaatttcgcccgccctttgtctagatttgtgttatgaatctattccctatgcttcgagctaggcaggggatatcaatcagatctgctggtgataagctgaagtttggtctattaacgattttcccatgcgtgcagccagttntcatgaaggcaacagatgtgcctcgagaagctagcanggcacaaaaatcgtcgtgcctagctataacttcatcaagagcgtcaactttcgccttcatgtgttcgaaag

SEQ ID NO: 63319 - DNA, 399 bp, Zea mays
ggggctaccaccatgcagccggtgtgcggaggcgatcccgcatgtacgttcatggaagtacaagaggaagaccccgctcggaaaccctcgggggctgggtcacgatttgcgctgcccacttgagccggatcatctccggcagtaccctcgggggctgggcagtggcttgcacttcccacccgagccgagtcatccccggcaacatcctcgggggctggacaagtgtcaacaccatccttggggaccaagttctctacagtagtcgactctaaggttgatggaccctcagttacttccatgggaccaagatgatccaagtcagcctcctgaccctcaagaccgcgttctaaggtcgatgaggcatgggatgacctcaacccagcatcgagcacatcaaca

SEQ ID NO: 63320 - DNA, 491 bp, Zea mays
  unsure (1)..(491): unsure at all n locations
tgagtcggttcttctgcanagaataatggatgcccaaagaaatgatgttggtatgaaacacattcatgagaaaatggaggccggtaaagccaactgcttcaaaagagatgatcaaggtgttgtatggtttaacaaccgcctagttgtgcccaagaatgatgagatccgccagcaaattctagatgaagcacatcttagtcgccattctatttatcccggaagcactaagatgtatcatgatctaaagcaacattattggtggacgaagatgaagattgaaattgcatgctatgtggcaagatgtgacacttgcagacgtgtcaaggccatacatatganaactgctggtccattgcaatctttacctataccaacatggaaatgggaggatattagtatggacttaattgtggggttaccccggagaacanaagggtatgattcatctgggtatcattgatcgactacaaagatcgccactttctccagtc

SEQ ID NO: 63321 - DNA, 480 bp, Zea mays
  unsure (1)..(480): unsure at all n locations
tataggatattattcaactaaagtaagatgaagttgataagatgtctatgtatgaaaacttcctctccttcagntgttttagtattctatccttagtgggatgtaccatagtataggttaatttccttgcaatataaaatgttcaacagggcatataactttgagatcaactatatgtgtgcactagtttaaaggaatataatctatcctttggggtttcaagaatgatgattcattctccatccacatataaggattatcatttgtgaaaccctcccttgtttttctaatgctctctattctaagtgtttcaataaggtccttccaagtgttttcaagatggatntaaaatctacggatataagagtcttggttgttcaatcattgagttcaatggatctatatcaagatgatcgaatcagaaagataaagaagtcaagatacttggtggatatatcgtaagagaaagagatacagtga

SEQ ID NO: 63322 - DNA, 426 bp, Zea mays
  unsure (1)..(426): unsure at all n locations
tgccttcatcagagtctataaagaagttatgaatttctgaaacatgattctatcggtgtgggattgtaatatcaaccaacagggacgctaaggttccatggcgattcataatacgaaaggcacagatagttatgaaggtatccatgccccttggtaacatgaactggcacgtatagtcatcaagccatccatgtccattgataacatttcaggtgtttctctagcttatgttatgatccagcaatggtgcactatctgtgacacttccatttttcctgcacggatgtcttttcatagtagtgtgatatgttcgactactcttgattcgctactgatcttgaaatagtagtaaaaagccctcacccctcacaaaaatagagtgaacanatttaagcagcaggtcaacttggctactggcacataata

SEQ ID NO: 63323 - DNA, 477 bp, Zea mays
  unsure (1)..(477): unsure at all n locations
cttgaaggtaggctcccattgaggtgtgaagcgatcaagatcctttctctgtgtatagagccttgaactcattgagaaaagagaaanatactcacgttcgatctttgtgatcacttgaggaagaanatggttgagaaagaaccggttcttagtgaactcttcaacggagacatagatttctttgtgaagaccacactcagtaacaaatcatcgtgtatctcttgatttggggttgccatttgactttccatctcctccctaagatcttcattgttttatattattgctaagtctaaatcatgcaattttctgtgcaacaatatcaagtattgtagatagtcaattcttcgactaagagtcttggtctatcacttaagaatacttatctcagatcaacttttggattattttgagtacaatttacgtttcgttattcacccgcttctaccgactttatgacacattggacttgagctg

SEQ ID NO: 63324 - DNA, 398 bp, Zea mays
  unsure (1)..(398): unsure at all n locations
ttcctgcgcacagcttcgtgatcaccttgtccttcgtcataattacctttcgtctcgctcaagcttcgtcctgaccatgctcttgtatgctcatgacccgattccaaagacacatgtttacatatttcacttggaaaacattgtcaaatcatgtttttgaggaccttcggaagccgaaggcccccaacaagatggttcgtctccatggccctgactntgactggcgccatgaaccggtggatccctcggtggtgtacgcaagtggtggtggcaaagcgcatggacggtaagctctaacttatgaaattatatgggtgacactaaatngattatgcagtaatcacatatttgaatcacttatagatacacactcttcgacagatcattaactcgtcgtc

SEQ ID NO: 63325 - DNA, 386 bp, Zea mays
ccttaaaactcagctttatgatctgtataaatgtgacagatattttccagcatatagtgttcgcccaatttcagggcatgaacaacagcagctagctccagatcatgagttgggtaatgctcctcatgtcggcgcaactgccttgaagcatacgcaattactcggccctcttgcattagcacgcagccgagtccactaccagatgcatcacaataaacatcataaggcttggtgatgtccggttgagctaataccggagcagcggttaataatgtcttcaattgttcaaaagcttcattacactttgaagaccaattgaacttaacatcattcttcaataaacttgtgattggcttcacaagcttataaaagtctagtatgaatct

SEQ ID NO: 63326 - DNA, 453 bp, Zea mays
tacccatgacgaggcttatggacagttaaaaggtcctctgtcttcttgtctacattccctataatccttaatcaacctggatagaacatcacctgttcctagcccaagtctcgatttaagtacttccatccttaggaatgtttgcgttccttaggatgattaaaacatcatagggaaccttgcactagatctcccaatgatcctggtgaaaatattcttgtaggtagagccatccttcctcaggataaacctgagctaggcattagtgcaaaggacaaactctatctgcaagatttacctctaggcagggctaagcacattttgtaatcatatttgatacttcaccagaagtatctataaaaggaatggatttcaagggtagccatgctatcaaggggtttcatgcaactcctattaactaatgcacatttactaactaaagttgtaaatcat

SEQ ID NO: 63327 - DNA, 475 bp, Zea mays
  unsure (1)..(475): unsure at all n locations
tgataggatcaatggaatatctccttntagccattgcacaacatctattcgtagatttctactgcatagttccctgaagaaggtccccagctctgcaattgcttcatatacatccttcctcactagtcctctaaggccagcggctatgattctctataggacagtaggagtatgtggcaagaatgtgttttcagttttccaaccacctctgaaccatcttcacttatgtatcttgctaggttatccgcaaatccatcaggaaacttgatacctttgaggagacttgcaaactcgactctctgatccttccccaacacatatggagcaggtggagccctgcacgccgagttgccatcttgttgcaagtngcagtcacgtcttatgcccatatcatacaaatctagccttgcattatgtgtgtccttggacttgcctagtatactaagtagtgggcaaagaatattttcacatacat

SEQ ID NO: 63328 - DNA, 437 bp, Zea mays
  unsure (1)..(437): unsure at all n locations
tcgtcctgatcgtacttcatgttcataatctgagtcctaagatttctgttcatacatttcacttggaaaatattgtcaaatcatgtttttgaggaccttcggaggacgaaggccccccaacaggtgaccaagttgagccctgcaccaacttatgaagatcacctttagattatccctaaactaggtcaagccctacaccaattcaggaatatcacctctaaggtatctcaagactaggtcgagccctacgccgatgcgagaagatcacctccatattatctcaagacctgttcatgccttgcactaacttataaagactcatagtcttggtcaacctcacgtcgacttangaagactcaatactangtcaagcctcgtgttgctcaagaaagctcaagacctagtcaagcccattaatgactcatganaactgaaca

SEQ ID NO: 63329 - DNA, 410 bp, Zea mays
  unsure (1)..(410): unsure at all n locations
tataaaattgtctacaacttattttacaattctaaagtttaattctgttgataaaattgactaaatcctaagagaacagattctgcacagaattaagagactgaaaaactgctataatcaaactgcaataactttctgatctaatgtccgattaaggtgttcttcgcagccactgaaagatctacaaattatctacgactcatagatagactctntattntttgaggccactaagaccacaaaaaactggcatgaacagaaactgtcgaatctgccattctgcaatgattaaatactagatcaaaatctaaccccccatccaatccaacgaagatgctgcacaattacccaaaggaaaacaatattacccttggactcctttttttctttctttcttctccaccaattca

SEQ ID NO: 63330 - DNA, 454 bp, Zea mays
  unsure (1)..(454): unsure at all n locations
tattacataactgntccttcttcacaacctctgaaggatattatttgaaatctataagctactggaaggactggaacatgggctgcagagctcaatgaatcttgcattgattatgttcatagatcttcgatctaatctcaagcgttggcagacttcattgctgactggacgccacgggctcatgaggaagatacgaataatgatgccgaaacatggacagtgctttgcgaagggtctttgggaaccttcggagcacgagcaactgctgtgcaggtccaacttctaagttaaaacttgtattgcgcaaactcatttcactgcccaataatatgtgatacgaactctgtcttggtttctaagttaaagcatgggaatcaaagctatctaaaatgatcccactatttctgctgtgacagaaataagaagaacccacttaaaaattaatcattcgaga

SEQ ID NO: 63331 - DNA, 372 bp, Zea mays
  unsure (1)..(372): unsure at all n locations
ctcagcttctaagggagagcacatttngactaacaatgtcattttttatatacaggatttgtagcgcatgccaggccgggaagcaagttggcactcatcatccacacaagaacatcatggctagtgacaggccactggagctcctacacatggatttattcggcccgattgcttacataagcatcggcgggagtaagtactgcctagttattgtggatgattattctcgcttcacttgggtattctttttacaggaaaaatctcaaacccaagagaccttaaaaggattcttgagacgggctcaaaatgagttcggcttaaggatcaagaaaataagaagcgacaacggaacggacgtcaagaactctcaaa

SEQ ID NO: 63332 - DNA, 301 bp, Zea mays
  unsure (1)..(301): unsure at all n locations
ttaacctgggtagaacaacatgcgcaagcgtgagccgactcctctatcttaagagttcggngattcagagtactcggaggaggagttctcctccgagcccgatgggtctccggctcccgtctctcccccggcgtcgttcgatgactcggacgactcccaggggatagccgcggaggtctggacatacatccgggccgtcgagcgcgcctggctcgaaagctttgatgagtcggagtactccttggatgaggaggactcggacggcggcgacgagggtgaagatgacgactaccacgacgac

SEQ ID NO: 63333 - DNA, 226 bp, Zea mays
tctcttgcctcaatacaagtgagtggatcgcaatgaatttatctttagagatgaaagccttccacgcgcacgagcttgtaagaacacacgcaaatcactctctctagtcactatggcgctgtgtggaacttgcagaggatatgatctctttggtgtgtctacacatgaatgctatagctctcgtattagttgggaagcggaaaacttggatgccatgaatggtggg

SEQ ID NO: 63334 - DNA, 473 bp, Zea mays
tgagaaaatcaacttgaaagtgaccttcatgatgatgtattatctttctcttattttagcaagacacattgctgacgcagccctgtgttgccctgctttctatcactaatttaaattgatcttctttcttatcttgtgcagacagtaaattgtctcaaacgcaacgctattgaaatggagggatacattcgccctcctgacgtagtaataattgtgtcgcagtatataccttgctctgatgttagttttttgttttaatcaataattaacagtagacaagcttttatgttatatcattcattaacatacatactcattcttttattatatttatatttccaggaccagcattctgatggtgttgcagatgatcattccaacgattccttattctcttcaacataccatcattacaagggtcgcgaattgaataaataacctaacgaaaggtataaagataataaaatgtctga

SEQ ID NO: 63335 - DNA, 414 bp, Zea mays
  unsure (1)..(414): unsure at all n locations
tgtgaagggtcttcatccncacatgtgctaagcggcgatgccatattctgcccatgctagtcttagctattaagcatgcatctagaccggcctcttcttttgcgaaatcaactaaataaagtttgccgtctaatacacccttaaaagctagtgaaccatcacttcttctaaagacagacacatctacatttgtaaatagacagttataccccatgttgcataattgactaacagatagcagattatatccaagagactctactaaaaacacattagatatggagtgctcattagaaatcgcaattttacctaacccttttaccttgccttgattcccatcaccgaatataattgaatcttgtgaatccttattcttgacgtaggaggtgaacatcttcttcttctccgtcatat

SEQ ID NO: 63336 - DNA, 271 bp, Zea mays
tctctcggtataggaccttctggagcacgggtacattcgtgagagccctaggccttgtgttgttcttgtgcttttgaatcctaagaaagatgacatttggcgcatgtgtgttgaatgtagagccattaataacatcacacattggtaccgatatcctattcctagatcggatgacatgcttgacgaattaagcggttctaatgctttctcaaaaattgacttgtgtagtggataccaccagattcctatgactctaagtgatgaatggaaa

SEQ ID NO: 63337 - DNA, 349 bp, Zea mays
  unsure (1)..(349): unsure at all n locations
tcagctccatcgatgttatggattgctgttgagtcagaccaatttccttttgtccttcttgcagcttcctgacttccatggatagcgatgggtccctgatccgaacgtatcttcatgcaaagatatgcaggatgaatgattgcttcnaaggcattgagagtaccacgaccaataattgcattgtaagggtattccatgtcgacaatgtcaaacacaacttgctcagttctagtgttgttgatgaacccgaaggtcactgacatggtgatcttgcccaatgctacaatctgtcttcctccgaagccacagagaggatgtgtagcatcatgaatcttatcttctggctctt

SEQ ID NO: 63338 - DNA, 467 bp, Zea mays
  unsure (1)..(467): unsure at all n locations
tgtgaagattcttcatcccaacatgggctagtctgcgatgccttatccaacccatgttagtcttagcaattaagcatgtgtcgagttcagctctattaaaatccactaagtatagctgaccctctaacacacccttaaatgctattgaatcatcacttcttctaaagacagtgacacctatatcagtaaaaagacagttgtagcccatttgacataattgggaaacagaaagcaagtngtaatctaatgaatcaacaagaaaaacattggaaatggaatggtcaggtgaaatagcaattntacccacacctttgaccaacccttgatttccatccncgaatgtgatagctcggtggggatctttgttttctcatatgaagagaacattctnnttctcccggtcatgtggtatgtgcacccgctgtcgagtatcaacttgaccccccgatgctaacctacaaacaaat

SEQ ID NO: 63339 - DNA, 312 bp, Zea mays
  unsure (1)..(312): unsure at all n locations
tctaaagggagaacatatattgcgactcacaaatgttcattnngtgataaacatggcttgnagagcatgtcaagcaaggaagcaagttggtgctcatcatccacacaagaacatcataacgaccgacatgccgcttgagctactccacatagacctattcgggccgatagcttacataaacatcagcgggagtaagtattgtcttgtaattggggatgaatattctcgcttcacttgggtgttctttttgcatgagaaatcacatacccaagagacattgaagggattcttgagacgggctcaaaatgagtt

SEQ ID NO: 63340 - DNA, 398 bp, Zea mays
  unsure (1)..(398): unsure at all n locations
tctcctgtacaagcgtcgcacttactgcagagtgcgaagctgccacattctatagcagaggagcccctggcgtgggtggagttagcgctggtagatctatcacgtattgcttcagctcttcgaaagctttctgctgagctgctccccattgaaagactttggccgacttcagcacttcaaagaatggtagacatctctctactgatctagatatgaatcgattcaaagatgccagtcttcctgtcagccgtcgagcccccttctttgtgcttggtggctccatccgaagaatagcttcgattttggtcggattagcttcgatcccttttggtgaaactagacaaccaacgaagtttcccttctttacttccaagacacattnttctggatttaatttc

SEQ ID NO: 63341 - DNA, 450 bp, Zea mays
  unsure (1)..(450): unsure at all n locations
ntgtgtggaattgngagaggatatgatcacttggcgcgactataattgaatgatttagctctngtaagtagctggaaggtggaaaacttagatgatttgaatgtgggggtggttagggtatttatagccccaaccaccaaactagctgtttggtggaagcgctgtcgtattgcgcaccggaaagtccggtgcgccaccggacactgatcggtgcgccagccacgtcacctggccgatgagattcgaccgttggagctctgacattggggcacccctggctgttcagtggtgcaccggacactttctgtacacagtccggagcgccttctcgcgcgtgcctgacttctgcgcgctctggcgcgcattatatgctgtaacacgtgaccatttgcgccgaaggagtcgttgctccgctgtcacatcatacaatattgtgtgcaccagacactg

SEQ ID NO: 63342 - DNA, 431 bp, Zea mays
tcggatctcagtaaccgaacttggtatcttccatcctactatctctctcactttagtaggatccactgatattcctccattagagatgatgtgtccaaggaatggtacttcgtcaacccagaactcacacttgctatacttggcatagagttattatctcgtaacttctgtagcaccatccacagatgttcctcatgatcactatcattcttggaataaataagaatgttgtcgatgaataccacgacgaatctatcaagatactccatgaacaccttgttcatcagattcatgaaatatgctagtgcattggttaagccaaatgacatgatcgtgaactcatatagaccatatcttggagagaaagtcgtcttgggaatatcagaacgcctaatcttcatttgatgataacccgatctgagatcaatctt

SEQ ID NO: 63343 - DNA, 380 bp, Zea mays
  unsure (1)..(380): unsure at all n locations
tcagcttcagtcttagcgttagtctcagtcttagttagtcttagttagacttggtttttttgctatatcctgngcatctgcgtttgtcatgatgaactatgtttggcttggatctttgtaatgattgtcaccagagtgcgggtatcccctgcattttggttgacctattatgttaatggagctagttatatagttgggaaaccccttttattccactttcctctttatctgaaaagctgtgtggtctgtgttggacatcagtgaagatgctcatctcgtcattgctgctgaagaattctatactctcttcttatgctgcaagatctgtcagatcagttctgatgtgtggttgcattatgcagatgtcatagaacatgcgt

SEQ ID NO: 63344 - DNA, 351 bp, Zea mays
  unsure (1)..(351): unsure at all n locations
tgagtggactgtgcagatgcatttacacattgcttgtgtttccgcgtgggtcttccacattgacggctggctggtcttgtctaaaatggctaataaagcacaggatatataaccgtctgagcagcttcattcaaccgtgcatgcatatacaacctcagacagtcttcgtttaaaggcggacagcgggtttcacctgatttattggagtcggaaatgaagtgacgcgcgctccacaactgtacggtcgtcaactgcaattacgtaccgtgcaagaggagaangacacgtcacttataagcagtcgaaccggaaccgcacgcatgagcacatgacgtatccgcttatacactc

SEQ ID NO: 63345 - DNA, 362 bp, Zea mays
  unsure (1)..(362): unsure at all n locations
tcccttctctgttgaaagtcattgtcggcgccgatgtatttattcatcttctgaagcaacttctccagagtctgagagggtttcctggcaaagtattgggctgaaggtcccggctgaagccccttaatcatggcctcaatgacaatttcattgggcactgttggcgctcgtgccctcaggcgtaagaatcttctgacatacccctgaagatattcttcgtgaacttgggtgcactggaataaggcttgagcagtgaccggcttcgttngaaatccttaaaaactagtgatcagcatatacttccgcttctgtcatgatgtgattgtccttgccgaaagaggaataccacgtttgtgcaacat

SEQ ID NO: 63346 - DNA, 332 bp, Zea mays
acgctacggcgcagtcctccacctcacttcgaccagatctatgttatacatctatctcacacgctccgagcttcacttggaatattcccaacgacagctggagagatagtgaacgagggcttgtctacatctctcaaatgcttacacccagcttttgcaaatatgctagctgctacccggatggtcactaaggcacaaaaatatctgtgcccatccacttcgtcaaatcgatacgattctatttccacaaactacaacgccttcgaaatatcataggcagaatgtgtctctactcttgacattccctgactaaactaaaactctcacgcagg

SEQ ID NO: 63347 - DNA, 358 bp, Zea mays
  unsure (1)..(358): unsure at all n locations
tcgggtctcttgctntacaactcttgtccacatgaccagaaattacttgggaatcggttttgagaaccgcccttcttatccccattgcttttaacttccgaagacccaaaagcaaagcttcgtattcagcaatattatttgcgcaactgagatcaagtatcactgcatagcatgttctgactctggaaggtgcaactaaaacagcagctgcatctgccccgaaggtttcccaggaaccgtcgcagaacattgtccaagcttcggcatctttacttgcttcttcttcctgagcccctggcgtccaatcagcgatgaagtctgctaatgcctgngactgaatcacagatcaatgcacata

SEQ ID NO: 63348 - DNA, 366 bp, Zea mays
  unsure (1)..(366): unsure at all n locations
tcgggtctctggcttacaactcttgtccacatgaccatatataacttgngaatcggttntgagaaccgcccttcttatccccattgcttttaacttccgaagacccaaaagcaaagcttcgtattcagcaatattatttgtgcaactgaaatcaagtttcactgcatagcatgttctgactttggaaggtgcaactaaaacagcagctgcatctgccccgaaagtccccaggaaccgtcgcagaacattgtccaagcttcggcatctttacttgcttcttcttcctgagcccctggcgtccagtcagcgatgaagtctgctaatgcctgggactgaatcaaggatcaatgcacataatcaatgctg

SEQ ID NO: 63349 - DNA, 462 bp, Zea mays
tcttcttctattctttccccttcacatcaatctattctagttctagaaaagaaaaatggatgttgtataagcaagatataaatgggaataaaattagttaaaatgataaaaaaacatagatgcaaaattaggaaactgcttgattgctagaaatacatgtaggggcctgccccgccattcacataaatatggtaaaatatgctataaaacaaacaagaaagctggatttatacatttcaatggaatggtctgcaataacattaaaagggacctttgctggatttcccttccagttgatggagaacagttgacgtcggcgtggcgatggatgtccttccagttgacggatttttcagttgacatcatgtagaaagaaatagaaagtacatatgatccttcaagtgtttacacaggcgtaacaaaaaaatgtatgcttgaataatacagacatttgaaaccatg

SEQ ID NO: 63350 - DNA, 387 bp, Zea mays
  unsure (1)..(387): unsure at all n locations
cgtagaggttntctagctaaatatgtgctggtggtcctcgtctgaaacccctgatcatttggcacacgttgtgcctaatctctgagacgtagaaaccttcggacacacgcttgcgagtattcctcatggttctgctggcactggaacagagcttgggcagttactagctttcgctggaaaccctagaaactggttactagcatgtgcttcagcatttgccatggcatgatcgatccctggcgaatggaggaataccacgtctgggccacacttctaactaccatgacaaaggattttgccatgacagtcgtgttgcaccatatgatgatatggtcgcctcgtagctcataaagaactgcttcgaatcagaatgcccgtcatacatgg

SEQ ID NO: 63351 - DNA, 391 bp, Zea mays
tgccttcacctcagtatatcacccacaatctaacagcgtcgtggagcgcgcctacggtcaaatattcatggccatcaagaaaatgcttctcgacgacaagaatggtaaatgggctgacctgctacctgaagcagtctgggcgctgaacacgaccgagtgtcgggcgactggattcactcctttccgcctgctatatggatcgcaagccatgacctcgcaggaaataaaacatgggtcaccacggacaagcgcttcagtcgtccctgacatagacgaaccaacctccaaggacctcatcgacggagaccgtgtcttcgccttgcagactctcaacaaataccaagctcaaacaaaggcatggcgcgaccacacaatctgtccaagagaattc

SEQ ID NO: 63352 - DNA, 449 bp, Zea mays
  unsure (1)..(449): unsure at all n locations
tctacagaatgttgcgagcgaattggcacgaagatccatttcgcatctgttcgacatccgaagacaaatggacttgtataaagagctaatggtatcataatgaaaggaataatgaaggtaatcttcaatcatcccaagggaaagtggccagacaaattaatcaaagtggtgtggagacacaacacaacaatgtcaagatcaacatgctttacgccattcaaactaattgttggtgacgaagcaataactccggaagaagctaaagcaggatcaataagaatagtagcttccgtagaaggcgaagatgaagctgattactctgtagaataagatgctatanaagggatcaggcttcaagctgtggaatacatccacaaatacgacgctgaaacaactaaatggcgtgatagaaaagttacgctacagaacatcgaaccaagacatttggt

SEQ ID NO: 63353 - DNA, 395 bp, Zea mays
  unsure (1)..(395): unsure at all n locations
tgggcattgaataaccatgttccaagtggaggactcatgcatgcacgttcacttgagggtgagcaagcctcttgccggtgtgcacgtacactcgagggtgagcacggcactgtcaagccgcctttctgtgttaccctaagacccatgcgcgctatcaagagtataccctctatggttgggaggagacactgccatggcgggtatacttaaatatatacatggtcaagtgggtcatgctatatggactgacactatatgcacagtatgacacgagcatgattcatataaatacgcgcgacgcgggtctagtgtcgagcttggaccgccacctctacacgatatgctgacactagcacgacacgattangcatgacatagaccaacttgattgatat

SEQ ID NO: 63354 - DNA, 222 bp, Zea mays
  unsure (1)..(222): unsure at all n locations
tctccgagggcangacggngntggngatggctctgctggccgatctattgtgtgcagaagggtgggcggccgcggactctctgcgcacgggcaaacggcgacgagctaactcccgtgatgtgtgtgaggtgcgcccgaaggtgtaatctaagcctgggaaggctttattaactccggcgccggccacagcgccggtttggctctggccccgctccgggcatt

SEQ ID NO: 63355 - DNA, 467 bp, Zea mays
  unsure (1)..(467): unsure at all n locations
tgttcctcattntggtcatctagcctttccactgantatggttttctagtctagaacggactaatcgcagactatatgtatacatgtgaagcatctccaacaacaaaccttataagtagagtcctacaatttgaaataggatccgatttaaaatatatagggtctcagaagaaatgtttactctaatagataactcgtcaataatgtaatttaagaaacaaatagctggagattaagtgaaaataaagatagggcttcagtatacgaggcacctgagagactgagctctataatcactatataaaatcttatacaatagagacgcacgtgatagaatgtctattatttaagctctatattaaaaaggaccaggttgaatcctctgtgcagngactattgatcgtatcgatcacagaaccgcggaaaagagcacgaggcagcatcgaattcaaagcgcacaaaacatt

SEQ ID NO: 63356 - DNA, 278 bp, Zea mays
  unsure (1)..(278): unsure at all n locations
ntagntatgaatggttacatatgaagactgaatctgtctatttcttgacttcaaaggcttttagagatgtgtatccctagataaatatcgaatcaccttgggatgtttataaataattttgagaaaatttaattagctttccataaagtctaagatcattttggttggatgtctgaatctttagttgtgaagttttgaatctgcaagtctgaatctgtccaaatctggacagagctgctgtgtttgcacaaatcgaccttgctaagaggcttatcata

SEQ ID NO: 63357 - DNA, 400 bp, Zea mays
  unsure (1)..(400): unsure at all n locations
tatcctcacctgngcaatcaaggcactccattcaactgtgtctttttagcctacagattctncttgagtggcttcagcccttcgaccagtgcaacacaccacttacgaactgtctcacagctagtntcagaagtggtgctcccaccagtgaccccttcttggatcatgctcaatgtgtcggcctggatgacccgcaccttgtctataaagctntcaccgccgtcaggacacagctgtcccataccgaatgccgtcatctgctttacttttgtcacaacccttgggctagctcaacccctccagcctcaacagcaatggaaccatcattcatgatagacaccgttcctggagttggcgaagctgccctcatatgtacaagccacaagaatgccacgctctt

SEQ ID NO: 63358 - DNA, 406 bp, Zea mays
  unsure (1)..(406): unsure at all n locations
tttctttttcagattagcttcgcaattgtcaactttntcagccttatcttgaatgacggctttgtttttctcttcttccagatcttgttgcatttttagaaccttgcttaataatatgctctgtcgaaacgatctttgttagaacacgacctataagataataataatagtaataaaataacaaaaatatttgttaccttaaagttagcataaagcaagcttccggcgatatgatgtcgttgataacggcagaggtccgcttctagcttcggcaagccaatatttttgcagagagttctaataattntagcttcgttgcggtttcgaaggcacctcaattttccttcgttaacaccgccgaacagtgtagcccctggcttatatccgcaggctatagcacaatttt

SEQ ID NO: 63359 - DNA, 326 bp, Zea mays
  unsure (1)..(326): unsure at all n locations
cgggaagaatcttcatcccaacatgggctagacggcgatgccttattctacccatattagtcttagcaattaagcaagtatcgagttcagctctattaaaatcaactaagtatagctgacccactaatactcccttaaatgctactaaatcatcacttcttctgaagacagtaacacctatatccataaaaagacaattgtaacccattctacataattgagaaacagaaagcaagntgtaatctaaagaatctacaagaaaaacattggaaatagaatggtcaggagatatagcaatcttaccaagtcctttgaccaaaccttga

SEQ ID NO: 63360 - DNA, 333 bp, Zea mays
  unsure (1)..(333): unsure at all n locations
tcngacctgaaagctcattattagaaggattttctaagcgatgtctgtngaaaagaaagttgttgccgaagtaaagctgagcctttctgaggagaaaaatctgggctccattgaatcgatagcaaaaacaaatacagagaaattactagggagattttggaaggcttatctgaagatactggtgacaatgatagctatgatgtagacagcggaggtgacgattccgaagatcgaccatggcaaccaagccattcagtcttcggagaatcaactattggacacagtcacctttgaaacatgaatggaagatatcttcgagatatattcatcgtg

SEQ ID NO: 63361 - DNA, 315 bp, Zea mays
  unsure (1)..(315): unsure at all n locations
gatttctttgatacctactcaccagtggctcgaatgactacaattcgcacattaatagtcgtggcagcctcttatggtcttatcattcatcagatggatgttaagacagctttcctaaatggagagttggatgaggagatctatatggatcagccaaaaaggttattgcggatggtcaagagaacaaggtgtgcacgttgataaaatcattgtatggcccanaatcacgcacctaagccatggcttgaaaagcttgataatactcttacagcagctggctttgttgtaaatgaatctgacacgtgcgtatactat

SEQ ID NO: 63362 - DNA, 331 bp, Zea mays
ccacatctcaatctcttggctttgcatagccaagtcaaacacatctttattcatctactagtgtggcaatgactatgttgatgacattgtgctcatctcctctttggctctccttgttcggatcatcaaccgagtacaccatgagttccccatgaaggatttgggcccccttcaccattttctacggattgtggttgaacctcgtctcaaggggcctctttattcagcagtgaccgtacactctggacatccttgaacgagctggcatggtcaattacaagccttgtgtgaccctggtcgacatgcaagccaagctcactatctaatgcgc

SEQ ID NO: 63363 - DNA, 465 bp, Zea mays
  unsure (1)..(465): unsure at all n locations
ttgacanaacanaaactctattctactattctcagaatctctcatgtggtagctgatccatttatcactttggcctttattttctccccctttggcatcaagcaccaaaacgagattaatcttggcctattaaccccattgcctcaccaaagtcttcaattaagagcaaatggcaataagatttcatgagatgaacttggaattagttaccctctcatcggagtgcagtggaagtctttcatggtccaagaacaccttctccctttcaatcctccttcgagactaaattatcaaactcaagcacatggttagtctcaaatggtcaagttgtaacacatctccncctacacatgtgcatcactttgcaacggacttgtgaggtccagcgagtggttgacaactcgagcaccataataagcaacataatggcaaaaggaacatgatcacaagcataactacatgtat

SEQ ID NO: 63364 - DNA, 346 bp, Zea mays
  unsure (1)..(346): unsure at all n locations
acactatactaagcttcgggtctcttgcttacaactcttgtccacatgacctttattttcttgttaatcagagaccataagcggcctttctatcccgattgcatgtgggaggagcgcatccatcatgattgtatgaccacgtntagacctctgtagctactgtatatggaccttttccgacccgacgcctatctaagcataggaggaagtaagaatgggttagttactgctgatgacttttcccgcttcactagggtgttccttgttgcaggataagtctgaaacccaaaggaccctcaagcgcttcctcacgatggctcaaaatgagtttgagctcatagtgaaa

SEQ ID NO: 63365 - DNA, 437 bp, Zea mays
  unsure (1)..(437): unsure at all n locations
tanaggatactattcaactatagtgagatgaagttgatttatgtctaggtatgaaaacttcctctacttcagatgtattagtatattatccttattggaatgtaccatagtatacgttaaattcctcgcaatataaaatgttcaatattgcatataactttgacatcaactatatgtgtgcacttatttaaaggaatttactctatcctcttgggtttcaataatgatgattcatttgccattcgcatataaggatcatcatttgtgaaaccctcccttgagttactaatgacctcttttctaagtgtctcaataaagtacttccaagtgctttcaagatggattcaaaatctaccgatataagagacttggttgtttcaacattgagcttcatgagtccatatcaagatgattgaacaacccagatgaatgaattc

SEQ ID NO: 63366 - DNA, 295 bp, Zea mays
ctacaataagccccggaagtccgtagaacacataaggaccgttcttatatggcagatctgttgtgaaccacgctgttcattctctttcccaaaactggtgacttgcttttgagcttcatacgttccgattttttgttttttcgggaataatttccactcccgctttttgtcttcttttaccttatacttatccatggaaacgcttttgaaaagatagggtttaaaatccggatacttcttggttaccttataagaaacctgccccgatctggctcttctgttaaagctgaaattt

SEQ ID NO: 63367 - DNA, 383 bp, Zea mays
  unsure (1)..(383): unsure at all n locations
tcctatccagggttctatgtgcaaaacactaaaacaatacaacttgtttgaaattattgcctagcgaatgcactctaggtgtatcaaacatatgcaatgccaatgcttatgatgtcatgctcaagttntagttacagtaacaccaggggtgttacagtactttactccaaaaacattgttaaatcatgttttgaggaccttcggaagccgaaggcccccaacagtagtcttcatcccctacggatggtacctgtacaccaaactcaacaacatcccatatacttttgtggagtgaggttaggtgatatcgcatcatatcactccacctagcataatcttcaccatcaaaacgtggnggtttgcccaatgggacagaaagtaat

SEQ ID NO: 63368 - DNA, 398 bp, Zea mays
tatgaagggtcttcatcccaacatgtgctagacgacgatgccgttattagcccatgttagtcttagcaagtaaacatgcatctagatcgacgctgtctttaatgaagagaaccaaataaagcttgccatctaatacacctttaaatgctaatgaaccatcacttattttaaagacagttacataaacatttgtaaataaacagttataacccctatgacataactggctaactaaaagcatattagaaccagatgattctaccaaaacgacatttgaaatcgagtgctcgatagtaatcgctatctttactaacccctttaccttgccttggtttccatctccaaagatgatcgtggtatgggaatcattattcttgacataagaagtgaacatcttc

SEQ ID NO: 63369 - DNA, 478 bp, Zea mays
  unsure (1)..(478): unsure at all n locations
actcagcttaagatctttaccttattttccaagcctacaatgatatatttcgtttctcctatcttcgacatcctgctgcattttgagcgctttgctcagcagcatgctctgtaacaacaagctatattcagaacattcaattcatcacgaggataataataataacttagtcaaaggtctcaccttgaaagtggagtagaataagctaccgacaatatgttgtcgtcaggagccgctgatatcagcctctagctttggaaagccgacactctttgataaagtgccgactatcttctctccggcacggtcacggatacatnccaagagctactcatcaaccccgccgaagaccaaagcttccggttggtatccacacaacatggtgaattcttttagctccaatatttcttcttcggaaagctcccgaccacccaagtgtcgaggtcgaagtcttctcgtccgaaggaccgaatcaatt

SEQ ID NO: 63370 - DNA, 469 bp, Zea mays
  unsure (1)..(469): unsure at all n locations
tgacaatgaggaaatggcgctcgtcatcaagagcttccgtcaaatcctcaaacaaaggagggggaaagactacaaatcccgctccaagaaggtttgctacaagtgtggtaagcccggtcattttattgctaaatgtcctatatctagtgacagtgaccgaggcgacgacaagaaggggagaagaaaggagaagaagaggtaccacaagaagaagggcggcgatgcccatgtttgtcgggagtgggactccgacgagagctcaagcgactcctccgacgacgaggacgccgccaacatcgccgtcaccaagggactcatcttccccaacgtcggccacaagtgcctcatggcaaaggacggcaaacgaaagaagttaaatccaactcctccactaaatatgaatcttctagtgatgataatgttagtgatgaggaggatagcttgcgttccctttntgcaaccttaacat

SEQ ID NO: 63371 - DNA, 390 bp, Zea mays
tgagcaagtctcacggcctcaccaggaagctatctgagggcttggatcgaacggaggaggactggagaggggctggccacggtggttgctctcgggcggcactggcgggtcgcggggaggtcgccggagctaatggctggctcgggtaagtcaggcgaggtacggaggaggcaacggggaaggcagccaagcactggggcgggctttatagccgtggcgcgggcgtggtcacgggcggccgcgggcgcgcggtggttcacgcacgggcgtgctctgagcgcgcccccggatgtcagctcgcgtcgaacacgtggaagcttgcttctgccatggttcaacggcggattagagcgccatagcgtgcgtatcttggcaaagtcactgtgtatg

SEQ ID NO: 63372 - DNA, 483 bp, Zea mays
  unsure (1)..(483): unsure at all n locations
cttcacggacctatgatactcagctntctaccatattgtcacggttatcatgagaaggttgagcatgacactttcccttcaaaagtgttaagctccttcttagccttccaacttcttccttgagctctntattttcttgtgtgatagaaatatcactaattcctgaaatttctagctcaatggaagattggcttgcttgataacaacaattgttagcacatggtgatatagtttcaatttcaacacatgtgcacatgtgaggttggtatgatttcaaattagttaacacaacctcatgagccatttctaacatgatatgtgaatccataaatttattatgagagcatacaagcatatcatgtttttctttgcaagctagattntcaatgtttagcttttctaccgtgttcttgagcataacanttttattttctaattgagcaatatatgatgaatgattaatagctttaatttgctcaattg

SEQ ID NO: 63373 - DNA, 429 bp, Zea mays
tatcaacagtataagcacacaagagagaatgttgtttcatcatatcaaccgaagcctatgctcttgtgtgaagacatatcagaccaaaaggtacagctgggatctcagttatctggtgaacaggaaaagattctattaagggtcttgttcaacaacaaagatgtcttcgcttggacagctaatgatctctatggtgtcaatagagacatcattgagcattcactcaatgtggacccatccttcagaccaagaaagcagaggcttcgaataatgtctgatgataaagccgaaggtgaacgaaatgaagtaaagagacttctcagtgctggtgttatcatagaagtaacatatccagagtggctagctaacaccgctatggtgaagaaagctaatgggaaatggagaatgtgcatctgattcacagacctc

SEQ ID NO: 63374 - DNA, 462 bp, Zea mays
  unsure (1)..(462): unsure at all n locations
ttcatgattcaatggtgtgggagtgttctgtatttgcattttaagcatggnggatctgtctgcatactatggtggagcagttcggagagcagtggtcagttactgagcaagagaaagaagagcagctatacttgtttgctatccaggatcatcctcgactgtggaaaattgggggttgttttccctgttcagcacgatatgggtataacaatgtggtattggttgtactggtgctcaacgggattgtggatttagtgggggctacttggatacaactgaaggctatgtgcttaacgagaaatttccacatgctcttgctagagggcaagcaagctttgcagcagggggagatgtcttgactgctatggtcgctgaccaggaagtataagctattagtgtatagagattctgtcatggcgtgatgggctttaagcccagaattgtgtataacaattgggctgt

SEQ ID NO: 63375 - DNA, 385 bp, Zea mays
  unsure (1)..(385): unsure at all n locations
tanacatatattcatgcaaacgagatccatgatagtatcttagttaanaacttcaaacacaggctagttcactatatggattaaagcgctcaccttaatgctcaaagtaaggaacatttcaatccaatcagaaactgacagaagcttaagtggatgtccctaacaaaatgcatgtatcaaaaactgtcagggacaaatgaagaacatagtcagactggaaatattgtggtgagaagagacaaacagtggatggagcatccagcactatacgcctaagtttatcgggctcttgcacttcaatggattttatcagctgcaaaggatacacatcaattgatgagtaattttcggatatgcatacgcacacaatataacacacaaatac

SEQ ID NO: 63376 - DNA, 461 bp, Zea mays
  unsure (1)..(461): unsure at all n locations
cggaggcgtcgattggacgcctacttgatgtatactccttcatttattcttctgtcactttgaatgtgacgggttgcacctcgggtgtagaggtggcgccttgctccaagttgacaatgtgtttggagtctttgatcataagttcaaagctcacaaacttgcctatgacttcctcgggagacattagtttgtatctacgatccccacgaattaattgcacttgagtaggattgcaaaaaacaagggatcttataataaccttgaccatttcatggtcatcccacttggtgctcccgaggttgcacacttggttcaccattgtttttagccgcgtgtacattgcttgcgactcttctcctttgttgaggatgaaaagaccgagctctcnctcgatcgtctccacttggtgatcttggtcaccttatccccttctgcgcggtctgaggatgcccacattcctt

SEQ ID NO: 63377 - DNA, 461 bp, Zea mays
  unsure (1)..(461): unsure at all n locations
gaaactcagcttataagngggattcattatggaattctgttatcagttttctcgaattcacaccttgagccaaagatcaagcgtgttcaccttgatccctaactcatatcctaatggccccattgacaaaaacgtgcataactaacctctctgtctttggccataagatggcattgggacacgtgccttggacacgtcataccagagatcttcttcctgtgcgcggcagtgagacaaacaggaattttcccctctctatctcttaatccagtcagcaaaacctgctagcctccacgcacaaacgacaaaggaacctgagaggaagagatctctccacgggatcatggccataatctcatagattaggggccaattccgcgctgaaactcgacctctctctgcgctaccttctgctcgacgctgtgccaaacccagagcgcgcactgtcgttagtcgcgcac

SEQ ID NO: 63378 - DNA, 398 bp, Zea mays
gtggcataaagattagagtagcaagcgctcccaagcatgtgagggtgatcgtatgagggagaggtgacaaagagagcaaagtcgggggtggtgtgaggaaccgccttggtggggaggcggttgagtagattgatagtagtggctaggccctcggcccagtaccgagcgggaagggaggcttataacagcaaggagcacatgacgttatttgtggagtggattatgcgctcgaccctgccgttctgagaagaagtgtaggggcgcgacatcctcatctgagcatcatgggagaggaagaagacacgagacgtggagttgtcaaactcctgttcgttgtcactatggacaatccggatggtgtgtccaactgagtgggaacccagtgaaaagcgagaaag

SEQ ID NO: 63379 - DNA, 326 bp, Zea mays
  unsure (1)..(326): unsure at all n locations
tgtgaaggatcttcatccncacatgtgctaagcggcgatgccacagccagcccatgctagtcttatcaatttatcatgcatctagaccggtctcctcttttgcagaatcaactaaataaagcttgtcgcctaatacacctttaaaagctaatgaaccatcacttcttctaaatacagacacatctatatttgtgaatagacaaatatatcccatggtacataatgactaacagatagtaaattatattcaagagactcaactaataacacattagagatagagagctcaattgatattgcatcctggctaaaactctcaccttgac

SEQ ID NO: 63380 - DNA, 432 bp, Zea mays
tcagctagctgccaacctctgttctgacctctggatgcctctccctttcagagatcagcatcggcgtaaaaatgactggcacaggagagagccgccctgccagccacggaattgccgatctatcattgctggagatgaaaaatgccacgaaaaattcccttcgtacgagttgatttggatgcaaggaagggcaaagatgctggtgcttatgcgtatactccgttcttctgccttgcctgctaattcgttggccttagccgatagtctgcagtcagaaggaatccaggatcagaatcttgtaaataccctaccctggcccaccaacttttacaagtctattacagccatatgtgatgtattccaacgatgtgaagtctgaagtgcttcaatcacaagccaggcttaatgtaacttcaagcatatgtgcagagc

SEQ ID NO: 63381 - DNA, 469 bp, Zea mays
  unsure (1)..(469): unsure at all n locations
tagcatggtattgtgcatcaccatagaacgttcttgtgtataactctactacttttctcttgtaccttagaataaaggaagacactcataatttcaataagctggttattaaagagaacatttcagctagcagattatggcatatacatacctcggatcaaggaaacttgccacaacaagagcaacattacatttgttccaaatttctcacattttgctcatggaaatagccatttcacgaatattgatatcttcactagtagaccagtcacctatcaaacttctaatcttacaaaagcctntgtagaacaagttggcagttcgatatatagtaccggacagaagctcagtcagatcataaaactntttcaaggcatgaaaccacatcttggtcttatcccactcctcacgagttggagatatgtgttcatatctacgccgatcagcaagcttgagctgagtaaagcat

SEQ ID NO: 63382 - DNA, 391 bp, Zea mays
  unsure (1)..(391): unsure at all n locations
actcaagctggggaagggtctncatacccacatgtgctaagcggcgattttatatctttnccatgctagtcttagcaatgaaggatgcatatataccggcctactcttttgcaaaatcaactaaataaagtttgccgtctaatacacccttaaatgctagtgaaccatcactttttctaaagacagacacgtctacatgtgtaaattgacagttataccctatgtggcataatatgactaacagatagcagattatattcaagagactctactaaaaacacattagagatagagtgctcattatacattgcgattttacctaaccgctttatgttgccttgatttccatcaccggatataattgaatcttgggaatatttattcttgacgt

SEQ ID NO: 63383 - DNA, 454 bp, Zea mays
  unsure (1)..(454): unsure at all n locations
ntaaaggttaatcttcacctaacagatagactaggaatgctcaaggctaaggtatggaacaaattgcttcaattggtagttgatcaatagtagttccttccaagtggcattctttcaattggtaataatctattctatggaaagaaatgtcaatataaggttaaattccttttggcttaaatttgtaaattggtgcatattgttaattcactcctccatgtgcattaacttaaaaggaatttaatttatgcctttatgcctcataaatgatgatttgtttgcgattcatatataaatatcatcattcattaaatacttccttgtactactaatacctattttcaaagtgttttatcgactagttttaaaaggaaaagagataacaaagaaagaagtctccacaaatgatgaaaagaagaatactaaggtgacaccaccacatatagtaagatct

SEQ ID NO: 63384 - DNA, 370 bp, Zea mays
  unsure (1)..(370): unsure at all n locations
tgagcaaagctcacggtcttaccaggaagcttctctgggcttgaatcnaacggagggggactggagaggggttggccactgcgcgggttcttggtcggcactggcgggctgcggtgaggtcgccggaggcaatggctggctcgggcgagtctggcgcaatacggaggaggtaacggggaaggcaaccgagcgccggggtgggttttataagcgcggacgccgccggggcgccggctcaaccgtttggcgcgacgcgggcacgcggggcgcgcgcgcgggcgtgctctggcgagctcatagcgcgtcgaacacgtggcgcgttgcttctgcccgtgttcttctctctgctgagcggccaggcgtaccaatc

SEQ ID NO: 63385 - DNA, 435 bp, Zea mays
  unsure (1)..(435): unsure at all n locations
tcgganagcctatgcttctcgccatctctcggcagacggatagctctttgttatcaggcaggcagtataagaagtcatcttcatttgttccattgaatattactgcccccttcggatatttcagctcctttgcataatggttggcctcatgagtttcttcctcagatagctttttccccgaagcatgtcgtatgatgtaatcatgcatgccggcaggtgcttcggggatgacggtgtccgtttcttcaactaatattggttccggaattttaactgcttcggcttcaaaaggttgttctttgaagggctctgaaggcccagcttcagcttcagcttgttgagccgaagcttcagtagaagcttcagcaactttaacactcttttttggaattgagcttgaagacttaattgtcttcaagacgtctagtacattta

SEQ ID NO: 63386 - DNA, 435 bp, Zea mays
tcagcgactggggctgcagcactgcaaccgctggaccccttccaggagaccgtctttcttcgggaggcccgaaaccagaagaggaaggctgtcagcccgacgattcatgaggatgaactagaccaagagatcatggacatggagatgctacatcaacaggtgcataggaagaaggagaagatggccaggctacctgaactgcagaggcagatagacgaagcttctgaagaagtccgtcatcttacccacgatgagcagaaccgaatgccttaacaaaaagaccttcatcaggagggcttctttcatgaagatgactggtatgacaatttccatcatggaaattttgttttcgatgatgcttctcctctgtccgctgagctgcaggctacaccttggcctccgtctataagccacccagcttccatgttcatggca

SEQ ID NO: 63387 - DNA, 431 bp, Zea mays
tctaagggagagcacattctatgactaacacacgttcattctgagaaagacagggtttgtaacgcatgtcaagcacggaagcaagttggcactcatcatccacacaagaacataatgacaacaaacaggccactggagttactccacatggatctattcggctcgatagcttacataagcatcggcgggagtaaggactgtctacgaattatggatgaatattctcgcttcacttgggtattctttttgcaggagaaatcacacacccaagagactttaaagggattcttgagacgggttgggacggagttcaagaactctcaaatcgaaggcttctttgaagatgagggcatcaagcatgagttttcttctccctacacaccttaacaaaatggtgtagtggagaggaagaatagactctattggacatg

SEQ ID NO: 63388 - DNA, 218 bp, Zea mays
tgagcaaggctcactgtctcaccaagaagctacctgatgtttgaatcgaacggaggggggactggagagggggtggccactgcggtggttcttggtcggcactggcgggctgctgagatgtcatcggaggcaaccgctggctcgggcgaatccggcgaggtaccgaggaaaaaatggtgaaagcaacccgaccgctgggcggtttttataggcgcgga

SEQ ID NO: 63389 - DNA, 470 bp, Zea mays
tctgaggaagttcgccatctcactcacgatgagcagaatatttgtctcatcaaaaaccttctcaggagggcttcgtctacgaagacgactggtatgataatttccatcacggaaattttgctcttgatgatgcttctcctctgtctgctgagctgcaggctactccttggcctccatcctataagccaccccagctccccatgtttgacgggcactccgacccgaagcaattctttgatgagctacgaagcaacagtgtcttcgtacgggggcaacgctgcagtcatggcgaagtctttcgtcatggccgtcaggaatgttgctcagaccatggattcctcccttcagccaggaacgatcacttcatggcagaagctgaaggatatgttactgaccacctttcaaggatttcaaacgaagccggttacagctcaagccctctttcagtgtattcacgatcacgaagaata

SEQ ID NO: 63390 - DNA, 449 bp, Zea mays
  unsure (1)..(449): unsure at all n locations
ctcaagcnnatctacgaaggctgggtattaccgacggtatatcagatgattctttatcttatcaagaccaatgaccgagactctgacgagagacaataagattgtgtggactccgaagtgcgaagaaagctcccaaatcattaagaagaagctcacaaccgcacccgtattgacactgccagacatccatcaggaattcgtcgtcttctgtgatgcttcaaggcaaggatcatggtgtgtacttatgcacaatgataaagtcattgcatatgcatcacgcttactgataccacacgagcagaattatcccacacacgatttggaataggcagccatagagcacgccctacaaatatggaggcactacctaattgcgaacaaatgtcacatcttcaccgatcaccagagtctgaagtatatctttactcagccatacctcaacctccgtc

SEQ ID NO: 63391 - DNA, 491 bp, Zea mays
  unsure (1)..(491): unsure at all n locations
attacggaccttaaaactcagctaaggtctacaatgcctgaacaatattgatttttaggctattatggaaaaatagtgtcttggaatactacctcatggacgagaactagatcaaagaaataatgtctggtattgataatgtttaccacacgaattttacatatcatagtgatatttgttgttccgtttatatgtttcatacaaattttttacttccgtagcaacgcacgggcactcacctagtgtttcatttaagacttttgatgcttcctatgttttaactaacaaatcaggtaaactagttgccaaatatattgggggcaaacaaaagggctccaagacttgtgtttgggtacccaaggtgcttgtttctaatgtgaaaggacccaagacagtttgggtacctaagaacaaggcctaaatttgttttgcaggtttatgcatctangggctcaagttggattattgatagcggatgcacaaatcacatg

SEQ ID NO: 63392 - DNA, 433 bp, Zea mays
  unsure (1)..(433): unsure at all n locations
ctcaagctttaccaaatggacgtgaagagagccttcctcaatggaccttattatgtggaggcctatgntgagcaacctcccggcttggaagatagtgagtattctaatcatgtgtacaaactctctaaggcgctttatgggctcaagcaagccccaagagcatggtatgaatgcctaaaagaatttcttatcctaatggcttcaaagtcggaaaggtcgaacccactttatttactaaatctcttgacaatgaatntgttgtatgccacaattatgttgatgatattatatttgggtctactaacgaatctacatgtgaggaatttagtatgatcatgacacagaaattcgagatgtcgatgatgggggagtcgaagtacttcttatgatttcaagtgaagcaaactccagatggcaccttcataagccaaac

SEQ ID NO: 63393 - DNA, 452 bp, Zea mays
  unsure (1)..(452): unsure at all n locations
ntaccctctgtgctaggcgcttcagcagaagcaggagttgatgtcttcacagattccataacagcatctagcacgctggccattcttcttttccttggagttgttgcggggatgcttgatggcttcggcaggtctgttgtgcatggtggactcggtgcttttaattgctctgctaccttctccagttttggctcttcagccagttttgtcctagctttgactgacacagagcgacttggctctgcaataggagcggccccctcaattaacttcggcatgtcggccgtttcaatgcgtctgggccgccgtgtcaaaactttaacctttttttgacttcgacgcgctagaagtcgccgaggtagcagctttcctctnttttccttgcttccgcgaaggataacaatagtctggatatacaaatccgatgacatcgaataccctgttcagcctct

SEQ ID NO: 63394 - DNA, 235 bp, Zea mays
atggccgagctccggagagtctgaccctgggcctatgactgcccggcgaatacatacgcgctctcggaagggctttatagccatggcgcgggcgtgatcactatcggtcgccttcgctcggcggttctggcatggacatgctctgagcacgccacctaatgtcgatccttgtcacacactctggatcatgtttgttccatggttcaaaggatgattagcgcacccttgcactgcg

SEQ ID NO: 63395 - DNA, 398 bp, Zea mays
  unsure (1)..(398): unsure at all n locations
ctataatatcaacacacgctgaaggaggttacaagctgtgtgtgtcttgtccaacatgtctctctctctcnctctgcggcctacattaaaaatactaagagccttttagggtgcataaatttcacagatattatacacgaattcacacgagctagtgcattttcacatgaagaggcataaaataaaatagaatgatttccaccatacatagaggggttanaagacaaagtacaaggcgcgccacatcaggggaccaaatctctaatgaagtgatgtcagatactaatgtgttttgattctctagtggtggaacggattggtggctatcttgactacacatccatcgtcaccaagttaatgcactcagcgtaaagttgattctatagtcctataaagtc

SEQ ID NO: 63396 - DNA, 462 bp, Zea mays
  unsure (1)..(462): unsure at all n locations
tagttggcggaanattctntactgacatctgtgaaaatgtgcggccgagggatggcccacgagataataaaaaagagtgaaaaagatactcacgatgcaagagaagcaacgaaggcagctgaaaaagctgcggaactcgaaaggcggataggtatcgcttaatagctttcagcttgatttttacttttgtgacttcgaacttatttacgntttctatcacagctgaactatctcctcccccagagcccttcgagtcattggacaacccagaagcaaagaaggaagatgaaattactagcatggccgaagctattatggacgaagctgttactcgactgctaaacgaagctgcagaatcaagtttaaaagaagaatagctgttatttgaaaaacatttggaatattaatgtaactatttctgaacaaagtatgaatattctatagttttgaatgtatatatag

SEQ ID NO: 63397 - DNA, 354 bp, Zea mays
cacgcaccaaggcgagggacataggcctttttcttggccatttacggaccacatcctcaccaaacaagtgagcgaggcgggttgaacgaacctagtcttcaccgatctagcgtgccaagcacgtggaaccaacatgtccgtatctgactactcttctagctcaggggaacgaccaattccctctcgagaaagtctactcggtggggggaacgaccaaaccccgcctagcggatgcacgaggagggaacctacgctgacgatgccatgactaatgctatcagacgtaatattctctaaccacgtctgtaccggacgtatagtgccacaatggattctagcagacacgagggaaca

SEQ ID NO: 63398 - DNA, 376 bp, Zea mays
  unsure (1)..(376): unsure at all n locations
tggagaggatctcatctntggtatgtgtcttggagtgaatgttattgctcttgtattgaatgtgaacttcacaaaacttggatgccattgaaggaggtggttgggggggtatttatagccttcaaccacttcctggcctttggctgtttttgctgtcaatgggcacactggacagtccggtggtgcactggacatgtactgttcactgtccggtgcgtgcccacgtatcacgcccattgtggtttggagcggacgacccgtggaactctttgtcctgtagctgcaccacacatgcccggtgtgttctgactttctgctctgacttctgacttgcactgttcccttttgagtccactgttgcgccagttaccgttgc

SEQ ID NO: 63399 - DNA, 433 bp, Zea mays
  unsure (1)..(433): unsure at all n locations
atttatattctattaattaaataattagaacttatcgatggagcgatgaagaattaatatacataatgcgatgaagaatctacatgcaaatattttgctaagactctggttgtagctcttcttctggtgcacttctaaatcaccgggtgctattttgatctaatttgatgagtcgattgggcctaggtgcaaatactcaaagcatgactcttccttctcttatactcattgntcttctctcctctgtctgtgggttctcctgtactacttgtttattagtaccattcagtcgcttccctacagaggacattcaagagccacaactgcgactcttcctttttttattgtgctttctctcttatctctgtgagctttctaagctgcatgatgacgcggatgccttccctagacatcacatgtcttctagagagat

SEQ ID NO: 63400 - DNA, 480 bp, Zea mays
  unsure (1)..(480): unsure at all n locations
actaagcttcngctatggttaaaatttttggcagcagaacagtgcattagcaatgtatgctgtggtaacttcacacctacctgtctgtttatatagtgttgcaagtaagaaggtgaatcgtcatgatttttacaccaggaaaaagttgctcgcacccgctgcacggtgggccgcaaaaaccaaaatagtgaacctgcatggtgggaccgctacgcgctcaaaaactgtatcgtttctcgacaacgagctcagggaaggtgtttttcggaccttcggcttcctgaagcctaagagactttcttcacggatcaagctcgttacgaaaaacgatctagcaccgcgaaggggctactgttgtgaccatgcttcgtcgccgaaggtcctgcggataggaaacgacttcggctgaagctacttgaacgtaatgctgaaggacccttcatgaagcttccanttacagcatgtccgaagatgagggat

SEQ ID NO: 63401 - DNA, 453 bp, Zea mays
  unsure (1)..(453): unsure at all n locations
nggctgtgcatgtacaatattgagctgcccctcagatgagtttctactctttccaaattatctgattgtatagttttcagattattaacttgtctctctttgatgatcagctgctgttggaagcaacttgcaagaagccaaggaggaaagcaacttatgtaaaaaataaatgtgcggaacagtaaaaggtaggttcactagtatcactacttagtagttgtgttattattacttagtacttagttactcactgctgatcttgctttctgcagcacaaaaattaaaaaacaaacgattaatcacgcttaatctacgtttaatcttcctagacgctagtcagtaggataacgtgtgactagcgcctangtntcttgaaccttggtaaaacaaatcagaaacctgaagcagaaaagacaagtattatggcctacaaagctttctacttagacataa

SEQ ID NO: 63402 - DNA, 487 bp, Zea mays
  unsure (1)..(487): unsure at all n locations
acactactagaaactcaagcttgcacaagcaccgtaatctactacatagaatatgccacatataacgtattcntatntcaagcactatacacatgaagctcaggaaagctatgtaatatgtgatgagatgtaatatagatgtgatataaaatccaaaacaaaagttgaactacaaagaaccaaaaactagtatataagatccaaagcgtcctcttctgtaatagggcattaaacacctatatccccaaaacaggcttggtctagtggttttgtgagaatgatagggagttgtctgtgggtgtctatacatagcgaaggtcgatgtctcctttttcataataggctctcaagaagtgaaagcttacactaatgtgtttcgtatttggagtgtactacatgggtctttacaacactaattgcaattgtgatatcacacagacatgggacccttctcaaagttgagacttaaatctattaaggcgactat

SEQ ID NO: 63403 - DNA, 437 bp, Zea mays
  unsure (1)..(437): unsure at all n locations
taccatngaatgggtactgatagagaacaacacctaggccatcaactattgtcttgaagttcaactcactcactgtagcatttagtgcattatcaaaacaattattgaaagcatgcacaatcggggaaacatctacatcggtatttagtaacatcacaacaatagtcattcagtttgggaaacatgttattttgaagtgaacagtttgngaatagccatgacttactacagttgacaacatatgaaatggatagcattacacttgacaacctacacaaacaatggcagaatccaatcaaatgaataacaaatgtttgaaagtttcttatgctccagtaaaaagattctcaacttacataaatgattaaatagatntaccagagatatccttcatttcattgcagttagaggttggtcagctgctcctgatgcaactg

SEQ ID NO: 63404 - DNA, 322 bp, Zea mays
  unsure (1)..(322): unsure at all n locations
gtgactatgacccgaactgtcagtcttctcatgttgctctgaaggtggttaccacccgcgattaggagtggtgggggtacccctaattatggtacccgacaacagcagaagcagccagtccttcatcatcggagtcggatgaagagtagtctgagttccattccttaccgatgtgcacctggcccttcttctttctatagaactttttctccttctctttcttggcatagtcctgggcattctctttatcgagacattgagcaataagattaccatacttaccacactcgaagcatgaacgctntcaccttgatctgttcta

SEQ ID NO: 63405 - DNA, 325 bp, Zea mays
  unsure (1)..(325): unsure at all n locations
nttattgactctcttgtcaaaagttggcttcttgtggtgagaagtattgattatgggaaatagggggaggttttgaaatcttcgatcaatctcttttggaatgactctctttatacttcaacatgtgtgtttgacttagagatagagatttgagtttgatttgcaaaaacaaaccaagtggtggcaaaggatgatccatatatgccaaaattgaataaaacttaaatttattttatttgaagtgagtttgcacttgttctaattgctttatgttgtggtggcataaatcacccaaaaaggggagattgaaagggaaatgtgccct

SEQ ID NO: 63406 - DNA, 398 bp, Zea mays
  unsure (1)..(398): unsure at all n locations
tgtgaagattcttcattccgacatgtgctagtttgcgatgttagaaccagcccatgttagtcgtagcaattaagcaagcgtcgagttcagctctatcaaagtccactaagtatagctgaccctctaacactcccttaaatgctattgaatcatcacttcttccaaagacagtaacacctacatccgtaaaaagacaggtgtagcccatcttacataattgacaaacggaaagcaaattgtaatctaaagaatctacaagaaaaacattggaaatagaatggtcaggtgatatagctantttacccaatcgtttgaccaaaccttgggttctatccccgaatggaatagctcggtggggatcgtggtttttctcatatgaggagaacatcttctttctc

SEQ ID NO: 63407 - DNA, 372 bp, Zea mays
tatgaaaacatcttaagagctagcttgtttcaatgagagtacccgaagggggtctattcctgacagagtatgctgctgtagttagccgctgcaatgccactggacctcgaaaatttaaagaatgaacttatattccgcggtcttgtaaagcaaacttataaattactatgtctctcttgaaagaagatctctatccacagataagttccttgagaacgcatctggaatatttattaacaaggatctcctgcctaaatctgagagcttctaacaggaaaggaaaaacttgcatgccaaataccatgctgaagctgcttgaaattcctaacctgaaacaatctctcgcagagcttccatacatgtgtctgaatt

SEQ ID NO: 63408 - DNA, 199 bp, Zea mays
  unsure (1)..(199): unsure at all n locations
gtggtacgcggacctattgcattcaagtggatggatcctatataaagggcggtgaaaaagctcatggcgtctgttcgcaacaaggctagagtccaatggtgtatagcggaggcttttgcccttaaggagatatctcaantttcaaccaagtatttcgctcgagccaacaatgagattgctccttcagtgcgacttcatg

SEQ ID NO: 63409 - DNA, 443 bp, Zea mays
  unsure (1)..(443): unsure at all n locations
ntgagcaaggcagctnttctgcgtccatcagccacagctgatttcactgccatagttntcttcaagcagtagttttgttcctgtcaaatgaccaactggtagtggtaagcaggtacgatgtgctcggtagcgaggctggcgtttgtgcttgcactggccatagccgcctcatcaattacggttgcggagagcagagatnttaatatctttggtaagctttcaatctactgatttttgctccttactctctttattcgttgttgaatgttgattcatagcagtgaattatcaggtctagtgatagtttcttttcgatggagatctcgtgatagtttcaattagtttatctaaattccttatctgtttgacaagttcgtatcttcatttagtccggtgacatgttaaagaaagcaattacgtctaagccatcagttctactcact

SEQ ID NO: 63410 - DNA, 408 bp, Zea mays
tagcagacttaatagaagagaccagtgtgtgcttgtggatactaaagatgggataaataagcaacaagaaaattcatctgctcgtagcgggactggttagtcttaattctatagtgtggaaacaattaagagtatttgtgaaataaaactcactataaatagtcatatatattgcaggaagggtggtattaccttttgtgccccttgcagtatcatttaaagatgtgaactactatgtagatacacctgcggtaattatcatactctaaaaactcaaggtatttactagtgagagaaaggcatgtctgatggaccatcacatcggcatcgcagacactggtgcttccaagtgaagtaaacaaagagagaaatggaacttactactagaaaaataattaggaatattta

SEQ ID NO: 63411 - DNA, 477 bp, Zea mays
attacggacactttaaactctagctgacttactatttaagggaatctgcactctgtaagtgtatgtatagctgaacatgttttcttttaccaggatttgacgctgcttctttgtacctctggtagagatcctggtataatacctcggaatactcatcctcctgaacctgaatccattgatgggatcaatgatacaggtgttcagactccacaacaatttcgtttgcctcgcacaaaggaagttgttgtaaatgggatcagtgtacgggtaaaatactgtgatacttgcatgttgtaccgaccacctcgatgctcacactgttccatttgcaataactgtgtggaacggtttgatcatcactgtccatgggtcggccagtgcataggactggtaagttacacaagattactaggtgtttcataagcgtcctcatattaacttgaatgatatttagagctactatctctgggtacattt

SEQ ID NO: 63412 - DNA, 443 bp, Zea mays
  unsure (1)..(443): unsure at all n locations
tctnagggagaacacgtgataagtctaactaatgttactttcgaaaaagatagaccttgtgcagcttgtcaagcagggaaacaggtgagaagctctcatcatgccaaaaatgtgatgacaacatcaagacccctagagttacttcatatggacctcttcggactcgtcgcctatctaagcataggaggaagtaagtatggtcttgttatagttgatgatttttcccgcttcacttgggtattctttttgtagggtaaatctgaaacccaagggaccctcaagcgcttcctaaagagagctcaaaacgagtttgagctcaaggtgaagaagataagaagcgaatatgggtccgagttcaagaaccttcaagtggaggagtatcttgaggaggaaggaatcaagcatgagttcttcgctccctacacaccacagcanaatggtgt

SEQ ID NO: 63413 - DNA, 460 bp, Zea mays
  unsure (1)..(460): unsure at all n locations
tacaagaaacattctaagactccaagactctctcttcattcttttgattctntgagatagtgacttgagctccatttgagttgtgaactccgtgcgttgtgttttgagctcgagttgtgacttgtgtgcgtgattgtgctgtggatttgagtcttgtgtgtgttgctctcccctcccttacttctgtgcttcttttgtgatcatcattggaagggcgagaggctccaagttgtggagattcctcgcatacgggagaaagactaagaaagttaaaactgtggtattcaagttgatcatcggatcacttgaaagggcttgagtgcaaccctcgtccattgggacgtcacaacatggaagtagacaagtgttactttgtcaaactacnggataaaatcgtgtgtctcttgtgtgctctctctttgattgtctgcgttcacaagagctcgtttcaagctactta

SEQ ID NO: 63414 - DNA, 356 bp, Zea mays
cttgtcatttgagtgtattctagtattcttctcccacatctcatacgttttttttgatgaaaaacatgatctaattctagaggcaatccaccaggatcttttcttctgcaaataactggatcatgttgaaactcattttgttcaacccagtatattggcggacgcagaacaggaagttttcatagggacaagaaaaccacgtgacacaatcaagcaagactataaaaaactagtattatatagaattcaagtttcatattaatacacgatacaagttcacagaataaaactatagaaacaaaagaaataagcatactgcttagttcttgctgaccgaatcaaagccatacatacct

SEQ ID NO: 63415 - DNA, 315 bp, Zea mays
acactatagatagtcagctagcttcgtgtaaatagcatgcgcaggcttatgtattgtggaacgcgccaacgggaaccaggtcacagctgtcaataatacgctccttgatgacagacacggcagatggaccgatttgttatctgacgacgtcaggcgactacatacgagtgagtaatggcaccgtggtttagactcttccgcactttattaggatcggacgacatgaccccgcaggaaatagaacatgggtccccgagaacagttgtgatagtcgcttgctgcgccgaccagctcaatgctcaggatgttactgtc

SEQ ID NO: 63416 - DNA, 309 bp, Zea mays
tcaatactccagccaacatagtgaatgcgttgctctattcacagatttgcatctacttcagtcacgaatgagttttttctgtacgctgcatcaaggcgtatcctctggcggtcaacatcgaagccgaattgaacaacttgttatactgtcgtataagggataactccaggcatccggaatgagctagagcagtccttgccacccaagacccatggaggcatgactttctctgctatgttctgctccctgaatagaatcgaaatgaactctggagttctaatggatagatgttgagccatgaaaaaacct

SEQ ID NO: 63417 - DNA, 301 bp, Zea mays
ttgggcccacgttttataggatccagacaacgactctttttgaaaaacatattctttgcaaattacgagtctcccggagaaccttgcccacgcgtcggacgaaggcgctggatagactggtatgaaatgttgtgcttgcactttattccccattacaatttgtagagttccaagaactgacattttgactggctcgtgcatggtttgctcttcccgtgcgaggagctcggaagaattcctatacatacgtgaagctgccccggctcctagcgttcatttcacccccccaccaaagcatgca

SEQ ID NO: 63418 - DNA, 267 bp, Zea mays
tggagccatggtatgtagcatatgctaataatatgcgatttgactcaagcctagctatgggtgcataggtttcaccgaaatccaaaccttctacttgggagtatcccttggccacaaggacagctttgtatcttgtcaccacaccatgctcgtcttgcttgttgcggaagacccacttggttcctacaacattttgattaggacagtggaataaatgccataccttggtactagtgaaattgttgaactcctcatgcactgtcatca

SEQ ID NO: 63419 - DNA, 473 bp, Zea mays
  unsure (1)..(473): unsure at all n locations
tgtcacttaatgactatatttgaanaatctatgaattttttggtcctcaaccatgctagctagcaccttttgagtagaaatcttctatttttcaggaacggttggcataagaatccacccatgaaatttgatctttaaggacagttctttatgataatcattcatgataatagtgaaattttaggagtggtgtaattatgtcaacgttctagagatggcttaatatatgaaccatctcaataaaatgggaaacgtgagagtgccatatacattacatgcactttcgattatagagatggtggtagaaccacagttgggacacaattacaattatagtacataaatacaatccatttattttattatcggctgagagtctagaanaaataaatacatagagtagtatgtaaaatgtaaataaatcattatattcccatacaatgaactgtaactcgatttattttttcaatagt

SEQ ID NO: 63420 - DNA, 467 bp, Zea mays
  unsure (1)..(467): unsure at all n locations
ntaagctctntgacagttaaatcacttcatctagtttcaacaaggatgcattaaagcatgaatgaatttttgagaagttaaactagatatgaagcagggataatacatgaacatgctttctcttccttttatacaagatatgcaaagaatgtatagaaaaggaagatttaggtacaagtttaaatgaaaggagatagttttacctttatgtacctttacatagggacgctctcttcattgtgcttgtccttagtcttaaatgcttaagaccaatccttaatgacaatatatggaaatattttgcacaagagagagttttacaactagtgatctttttcaagttagtgttagcatatatcaaatggatcacaatttgcataaatgaatcatgaattctcctttttccttagtgtatatcaagatagatgtcagttaaaattacaattgagatcaaattcaaattacat

SEQ ID NO: 63421 - DNA, 467 bp, Zea mays
tagagccagttgctttagttggtcaggtagttattactattagagagctcaagtttagcattaatcccaagtcattagcccaaaattactccctccaaaaggaaagaataccggaatccataaccataatcatcacccttagaaccattattattctcatcatcatctgtaatcatggtatctctaattaaaggagctcccaaggctgctcgtaaccgtgagcacgactgatatatcagtttataacactctagagaggtcgcacactttacccacgagtcgtgatcccttccaagcctgggttgtacagaactgatcttcactaccgaggtgaatggccagtgattcactatgaagcctttacaaagattccctgaagatgtagctacccgttaggtttcctaaatgtaccgcactccttcccaatgggcgagccaccctccgtagagcgagccgcgtacactgag

SEQ ID NO: 63422 - DNA, 400 bp, Zea mays
ctttagcggttggctccaaaccttggcttctcgcagcccatacaaaaattttcattcttataatagcttcgggagtgagttgatgagggtagatttggaatgttttcagtacctcaacaacaaaattgctcaaggggaatcgaagcccagccttgaggaagcttcggaaaatcacaacttcatcctcttcatgggtgggagaagtcttttccccggcatcagctctcacaatagatatgtctcggaagtatcgccccctcatattatcaatgtgactctgcttgatggttgttttcccaaaaactgagtgactttggcgccacgttcgatcttcggcctctttcccatcactttctacatcatagctgtcgctgtcattaaaatctttcgacaaaccttc

SEQ ID NO: 63423 - DNA, 390 bp, Zea mays
  unsure (1)..(390): unsure at all n locations
ttaccatatgttatctngtacccatcaaacacatactctatgatccttatgattgtcctaaccttcatatttggttcccactgtagtatacccataagtcgcttcccaatgagggtagatgtcaattggcaatgtttcatcgttaactcatgttcaacacatgtgtgtggccccgctacttttgttatctttcactcttgtgggtgagctttttggatccctacacaaaccctccatgcacagntattcttgtcgcatacaaccgtgtaacgacgtttctcgtatgaatgaattactctatacgacctcttacgtaagactgcgtaatgctgccaccacctcttcaaggcagttaggtccttgaagaccctaccttttcaatcataatgc

SEQ ID NO: 63424 - DNA, 394 bp, Zea mays
tcttgtcaaggacgtttggttctaactagttgtgcgctctggataatttagctcatgccgttatggttgtcttcccattgctagcagactattaatgtctattatgctttcttatcatgatatctatttatactttgttgcttccccgtttatgccattttcaaaagagatgttgtcgaattttatataccaatgttagatgtgtagtttagtagcattctggggtgtttgtggatcccggagtgttacaattggtatcaaagcttatgctttagattcttggcaatttgaagataaatttgacacacttgcacatataggaagggtatgggttcaagtatccttgatatatattagtgactttgaagtgcagatgacaataatttcacccctc

SEQ ID NO: 63425 - DNA, 433 bp, Zea mays
ggttcatttcaccttaaaactaaaataagataaaaaaacattggctgaagtgggttagtttggttttaagggctcccaaatttttccaaagcacaattgtatatagaagcatggaaaacggatgaaggacaaatctgagataatctttgttttcccaaaaataaagaagaacataatctccttgaattaaggtaaaacatatttagtgcacattgacctttgaactaatgagaaaacatatttagagcaaaaaatgatgttaaaactgtttacagaatgcaaacaaactgcaaaattttatttgaattactttgctaatggctataatacaaggacaagatgaatctgattacaacaaagcaccaagactacaaaacagtcctggcaacgaagtggcaaattttagacatctttgttttccaaaaaacacaag

SEQ ID NO: 63426 - DNA, 315 bp, Zea mays
  unsure (1)..(315): unsure at all n locations
ntagatgcactgaagaaattcttgacaacaccaccagttctgaagctgccacggcgagccacgtcaactcaaccagctgaagatctgctgctgtatatctcttgcacgactcacgtggtaagcaccgcgttggtagtcgagcgagcaaaagaaagtcatgcctacccagtgcaacatcccgtttacttcatcaatgaagttctgggtccctcgaagaaaaagtatcatcaagttcagaagctattatatgcagtacttctaactgcccgcaagctacgtcactactttgatgaccacaaagtcatagtagtcact

SEQ ID NO: 63427 - DNA, 455 bp, Zea mays
  unsure (1)..(455): unsure at all n locations
nggcaagaccaaataactcanaacccaagggaagaacattatatgtgagtgaacaaaaggttattaaattgggcgcaaaaggtacaaagaaaatgaacaggaaatgccagaagtgtggtattgccaatggtcacaatagtaggacatgtttgtcattggaggagaatagagttcggttggctagccttgttggacgtaagagaggatgacctcctggatctagaaacaaggttggaagtaacgctcctcaatggaatgagacaacaacatctaaaaacacgcaattaatatcgacaatagtgactcacccagtgattagtatgttgtatgtgatgcgaacatatgtttntgcagtaaacattgcatgtgtcacaaatgatttctatanagttgattgttgaagtctatgaaacgtagcgtatattcttgtactaatgttgcatatttgggactga

SEQ ID NO: 63428 - DNA, 413 bp, Zea mays
atcaatgtgatgatcctttggacattgagcacattaggcaacacatttcttcatgtcaattggccagtcattatatctaagctcgagtatatgcaaaatatcaagctcatcatcacatatggtgcttcgccgtaacacatactcccattcctccttagtggtcttgttacgcactacaaaccctattgcttttgctgtcaatggagaccccgcacatctgtcagcaatcagactaaccaactcaactaaatcatctagcttgctcttcttcaaactgaatgctctccgttcaataatatcttgtatgtattcctttgcccaaaatgccacttcatggtaactatttgtcaatgagatgtcaactacagtacccattaactgcgctacttgtttttcacgtgtctgcactaata

SEQ ID NO: 63429 - DNA, 453 bp, Zea mays
  unsure (1)..(453): unsure at all n locations
tactcctccctgtgaggggccattcatcgtcgccaagattttgaagcccggaacatacaagctggccaacaatcaaggcgaggtctacagcaacgcttggaacatccgacagctacgtcgcttttacccttaagatgttttcaagtcgttcatataccttgttttctatacatacacaaataaagtctaaccgtcaaggaagggtcagccttgcctcggcaaagcctgaccctccctcgggggctagaagggggaccccctctgcatcaaaattttcctcggaaaaagttttgtaccaaaacgaatttcgtgctttccgactatatcaatagcanaacgaataagagcgcacgtaagcggcaaggccgaccgagccganggactcctacgcctctgggatacagatacctcactcgtcacctttccgcgaaaggaacacttactcggataaat

SEQ ID NO: 63430 - DNA, 357 bp, Zea mays
  unsure (1)..(357): unsure at all n locations
ggacctataaaactcagcttgccatacctgtctaagcaacttcacatgccagcgcattatctacaaaccataccagtaacttggcctttcgcatgctggggattggatatgattggacctttcaagaaggctcaaggaggatacacccatgtattggtggcaattgacaaattcactaagtggatagagttccagcccattgcctctttgacttctgctanagccgtggaattcatacaaagcataatattcagatttgggataccaaacagtatcatcactgacttgngatccaactttactcagtcagaattctttgacttctgcgagcaaaagagcattcagatcaagtatgca

SEQ ID NO: 63431 - DNA, 472 bp, Zea mays
  unsure (1)..(472): unsure at all n locations
tctnagggagaacacgtgataggtttgactaacgtgcatttcgaaatggatagaccttgtgcagcttgtcaagcaggtaaacaagtgggaggagctcatcacagcaagaatgtgatgaccacctcaagacctctggagctgctgcatatggacctcttcggacctgtcggggaccataattaggggtaccctcaagactcataattctcagctggtaacccccatcagcataaagctgcaaaggcctcatgggtgcgattaagtcagggatcagtccattcgagcgactcgatcacgcctcgcccgagcctagcctcggacaagggcagccgaccccagagggtttccgtctcgcccgaggcccccctccaacggcagacacatctccggctcgcccgaggcactgncttcgctaagagcaaccctgactaaatcgccgcaccgaccgaccgaatcgcaggagcatttaatg

SEQ ID NO: 63432 - DNA, 417 bp, Zea mays
  unsure (1)..(417): unsure at all n locations
tgtctganaagtgcanagtcttggatgcgcggaccgtcctggtcttgatggcggaccgtccgcgatccaccagtggggtccgaagtctgaccacttcggacaagccctgttcatttgcagtgtggaccgtccgggccttggggccggaccgtccacagtcctgaccagagaagactgctttcgggacagtccctaaattatagtgcggaccgtccggcgttgatgagcggacagtccgcaggtgccaaataaggtttgggcagggactgtgtggttttggagatttgtactatggactgtccggaggataagtccggacagtactgtctctangtctcggaccgtccggccatgtaagcggatggtccgcctgtgttaactgctcttggtctcaagtcccggtgcttcaagttgcca

SEQ ID NO: 63433 - DNA, 378 bp, Zea mays
  unsure (1)..(378): unsure at all n locations
tcgananataatctccgaagctatacctcgaaaatcaatattggttctccctgtaacttggcatgatttgccctttttcaaagcattttccgaagatcgataacatgcccccttcttgtgccacatgcagcatgatgtatgatgattatgctatgcaaaatgatgtgatgatgttatgttatgcaaaatgatattttgtgccgaagatacgcacattcctgcaatggggcacaatcttttgtatcaatactgactttttcattataagcctcccttaggagcttcttcgccttttacttcagcggaatcagcgtttatttttcgctgtaagttctgcatccccttaggaacgtctttggaacttcttcgcctttactt

SEQ ID NO: 63434 - DNA, 420 bp, Zea mays
tgagagctgagagtctatgcctcgaatcagtctgtccatgtgtcgttgcatgtctccccttttataactaaggggggcacgtacaagggtactgagccccgacatctgggcctaggaacataacggatgcagtgcttggagctacttattgtttgctgctggagcaatcttcttgtgtcctaacatccgagatctatgtagtatcggcgtgcaggggaagcttctcgtataagtgatgatggacacagtgcaccccgcagcacgggcacactgtttgacaatggactggacaggcacgccgtctgcaggatggccctggcaccgcctgccagcagagtggacaggacgcattaaatgctgagggggcacatcgcctgtcagcagagtggacaggcggcgcgtcctctccataataaatgc

SEQ ID NO: 63435 - DNA, 457 bp, Zea mays
  unsure (1)..(457): unsure at all n locations
ngacgaacaccattgacatcttanataagatttctgagatcaagtatatttaattcattcctcaacatgcaaaagcaggttttatcaagtggtttagtaaaatatccgctagttgatctttcgacctcactccttctaaactaatgtttcctttagcaacatgatctctaagaaagtgatgacggatatcaatgtgcttggtgcgagagtgttgtataggattattagcaattttaacagcactctcattgtcacacaacaaaggtaccttttctagaactacgccatagtctagaagagtttgtttcatatataaaatttgtgtgcaacaagcacccgcggcaatgtattccgcttcggcggttgacaaggcaacactatttttgcttttggatgtccatgacactaagtgatctccaagcaaatgggcacccccagaagtacttttctatcaatt

SEQ ID NO: 63436 - DNA, 366 bp, Zea mays
  unsure (1)..(366): unsure at all n locations
tanagcgaacatgtttctttttttttcgaatataaattgcttggaacaacaacgggaaaagcccacatcgatcgccaagacgccaactcatctaatcttctcgggacataggtatagctcaatacttgctgaactatcgattgccctgtggatataagcagatccgaggtgcaaactaacagccttgtcaaatcttacactatagaaagaaaattacaaacgaaaacaactacatggttctgacttccatcttattgcacgggtggaaatgaattgctctgtgtatgccgccttcgtatctgatttgcacgtatggttctgtcgacgtctaaggatttagtggctcatctatcccgatcatttctt

SEQ ID NO: 63437 - DNA, 360 bp, Zea mays
tcgcacctccgaactaactcggctgcatcacttttcgctgttggccaatagaatcccgacttgaagaccttcccgactagtgtcttggacgctgcgtgtattccacattgtccagcatgaacctcatccagaagttgcttcccagtagatgagagaatgcatttcatgaagatgcctgatgcgccccttctgtatagtgtctccccaatgagtgtgtagtgagctaactgtctagcgatgcgctcggctgcatttctatcgttcggctcctcttcattctttatatatctgatgatcggccttctccagtcatcagagcctgactctagttgattcacgatattacactcttctgcctga

SEQ ID NO: 63438 - DNA, 317 bp, Zea mays
tgaaccgaggacccgcgtcaccggaatagcgaaactgtgctcgccggagttcatcaccccgccggcgcacgtggaccgggtaaatcactgcgccatttttcgattcaatgcacagatagcctctacaccaccccgggaagctcaccgtgccgttggattggactatgtcgccgtggtttggccggcacacccaccgccgacgaggacccccgcctgcgcacgttgaccgagcgatttcgggcattcccgccgtcaagccgtacatcgctgtgaccggcagagccttcccaagctaaccctacccctcgccggaccta

SEQ ID NO: 63439 - DNA, 324 bp, Zea mays
  unsure (1)..(324): unsure at all n locations
gttagggtgtctcaaattgagttatgtcttacccctctttatccccatttatggttaaattccctatcttgggttctatttgcaaaacactaaaacaatacaacttgtttgaaatntttacctattgaatgcactctangtgtgtcaaacatatgcaatgccaatgtttatgatgccatgctcaagtttttatttacagtaacaccagnggtgttacattcttccccccataaaaaaaactcgtcctgagattaaaagtcctagggtaagtaatggaaaagaaacgccacatacttttatttccttatttctggtacaagcagg

SEQ ID NO: 63440 - DNA, 252 bp, Zea mays
actcagcttgtagaaggcccttccgtcttgtttaaagaagaacctgcttatagccccgcgctccacagcataaagggatatagggtaaccttggagctataaaaagaagaattttattgccatgctcaactctttcttcttctttgcagggcttaattcttagtaatgccttgagggcgtcgaagaacgcccaagacaaaagttggaccacggctcttaacaaccttggctttgatgtgattgaactgagaa

SEQ ID NO: 63441 - DNA, 480 bp, Zea mays
actcaagctagcggaggttctacatacacacatgtgctaagcggcgattctacagtcttcccatgcaagtcttatccattgagcgtgcatctagaccggcctcttctcttgcacaagcaactagataaagtttgccgactaatacacccttagaagctattgaaccatcacttcttctaaagacagacacatctatattggtgaacagacagttatatccgagattgcacaattgactaacagatagtgaattatatcctactgactctactaaaaacacattagagatagagtgctcattataaattgcaattttacctaacccttttaccttgccttgattcccatcactgaatatgatagagtcttgggaatccttattcttgatctacgaggagaacatcttcttatgccccgttatatggttcgagcatccgctctcaataatccagtttgatccctcggatgcgtaaacctgca

SEQ ID NO: 63442 - DNA, 387 bp, Zea mays
  unsure (1)..(387): unsure at all n locations
tatgttgcttaagatttttttgtaggcttcatttatgccagtcttggtgttagctggaanactgtgccttccaggaatggaagccactttatttgcaactttgatgtccatttctaatgctggaagtgttactggtggtctggttggtgctggtctaactcggatatttggggtcaccaaggacacctttgggaacctacctctattgnnatgtcgtctgcatcttagttcgctgctgcccttacctcttttaggtctcctgccagaggaatcaggtgacacagacaatggagaaacaaagaatatctgacttgcttgagggttcatctctgttcgttctgattctcaagtatagcataccacagtgtgcagcttcaactcagatat

SEQ ID NO: 63443 - DNA, 404 bp, Zea mays
  unsure (1)..(404): unsure at all n locations
ttgcccctacctgcaggctcgcatcctcccctgaggcgggcccaggggccactgtcggtaccctaaaactagggtacccnctgctactgtataaagacacagtgcccacgcggctatctcttattcgcgtgggtaaaggtgtgtgtgtgggaccaggccatgacttattcccagccttcggcgactactctgggtccacaacagtacctgaccccgccacatgggtgggtccagggctgccacgtgtccagagaaggtcatatactccaaggcatcaatagtgagtctgaacccctatgggagagtgttggacccctagatatacagtccggaccttcaagggtggtccaggacctcgacgtgtgcaagccgaacccctggaatgggatccggaccccccgtat

SEQ ID NO: 63444 - DNA, 343 bp, Zea mays
actcagctacctgtacaggatagcaccttggtccaaagttggggtcttagctcttgaatcttaaggtaatgcttaaatgttcccacatggcttcataagtgcatagtctggcatgaaccttccacttttattattaacccatggaccttaccagttctaatgatataaaaaggtcctaattaacctaattatggccccttgccattaaaggccaaaatcgtgtttcctttcaaggcacaattaaggggagccatctatattatatataactctataagcctaattgacatatccttataaccacgtgtcttttctctggacacatgcatatattctatatctc

SEQ ID NO: 63445 - DNA, 382 bp, Zea mays
  unsure (1)..(382): unsure at all n locations
tatgatgttgtaggagtctcattataaggaanatggagttcttgaagattatcaatatacttcaacttgccatccaaatggaatcaatcaaatgggcattgcttcaatttgataccaaatcaaaacggtgtgaatgtgttctctttcatttggcatattttgcatgttctctccatgcattatatatattaaacacctttggccattagattgctagntatacatatgctttgccatacaccatatgtatgcatacatgggaaggctagtctatgtaatgtgagagtcacagtctatctcgtgagagaaaagtttatctgggacaggacaagtgaatgtacacgacctacatttctacaacttccaactaacaaaaataatt

SEQ ID NO: 63446 - DNA, 369 bp, Zea mays
  unsure (1)..(369): unsure at all n locations
tcagctgaagtgggaaggaccttttctggtagtatcttcttcaagacccggntcttacaaactgaaggacatggatgataacgacatacccagatcttggaatgcggatgagcttcggcgatattatgtgtaattgatgtaatctttttatttttttcctatggcacccttttccttttatgaggggagaaaggtttttaatggggccatagtttgtaattttcattttttgtttagccatatgcaatacaaggccaaaattcccccaaaaatgtaacatgtaatatcagaatctgcaccatcgagtgcaaaaagaacagggaaaagctcaaaagtagtccctaaggggatgcagagctaanatgtcac

SEQ ID NO: 63447 - DNA, 464 bp, Zea mays
  unsure (1)..(464): unsure at all n locations
ngacattgtctccctggtggaagctgatgctatccttaatgccagggcgtctcccactatgagcatgcttctagcaaaaaatttaaatttttcattttctaagtcatgctcattgattttagtagttaatgtagctatatgatcattttgttgtttaattaaagcaaggtgatcatgaatagcatctacattaacatctctacatctagtgcaaatagaaacatgatcaaccgtagatgtagagggtttgcaagtatttaattcaacaatcttagcatgtaaaacaacattttcatctctaagattggaaatggagacattgcaaacatttaaatctttaaccttagcaattaacttttcattttcaattttaaggctagagagggatgcattcaatttgtcaatcttagcaatcccattagcattatcattcttaagattaacaattgaatcatcacaactat

SEQ ID NO: 63448 - DNA, 261 bp, Zea mays
  unsure (1)..(261): unsure at all n locations
ttatatgggaggaagtgcagaactcctttgtattgngatcatactggagagagacagttctttgngcctgaattgattcaagaagcagaagaacaagttcgtataattcgagagaatttgagagtggctcaaaccaggcaaanaacctatgctgatattaaaaggagaccactggattttgaggaaggagattatgtgtttctcaaggtgtaaccacttcggggattgaggagattcaaagtaaagggcaaattgtcccct

SEQ ID NO: 63449 - DNA, 420 bp, Zea mays
  unsure (1)..(420): unsure at all n locations
ngcacacaagcaggtccggcgcatcctctggtctggtctgtgtttcttgatcacccangtgggcctcttcttcaggctcacgttctgggagttctcctgggacgtcatggagcccatcacgttcttcacgaccacgacaggcctggttgtgggatacgcatacttcctcatcacatcaagggacccgacctaccgagacttcatggagaggatgtttgagtctcggcagaggaagctgatccagaggcagaacttcaacctggacaagtaccttgagctccagaggcgctgcaaggatcccctggagaaagcctgcggcacgaccaaccctgacacagctcatcttcatgagctctccgttcacaaatgacaaagaatatcaccattgcttcactactcattccattctatgggagaaat

SEQ ID NO: 63450 - DNA, 418 bp, Zea mays
  unsure (1)..(418): unsure at all n locations
attcggacctatgatactcagcttggaaatgaaactatgtggtcactacaagcatcaatgtctaaatccttacacctagtacaaaatacaacatgttctacacaagaattagaattatttgctacttctaatttaacatttaaatcattggtgacaccttctaaagtagaaatggttttatgacaagtagatagttcaccagagagccatttattcctttttaatttctagagcaagagagttttgtgcacctaacaaattatcatgctcctcatataaaagaatcgccttgttnttctagtaatctattctttgcattcaaagcatcaatcaactcattaatcttatctatcttagatctatataagcccttgaataacatgaatagtctatgtcatcatcatcactagactcatta

SEQ ID NO: 63451 - DNA, 371 bp, Zea mays
  unsure (1)..(371): unsure at all n locations
cgaagccatggtaagtagcatatgcaagtaatatgcgaattgactcaaacctagctacgggtgcataggtttcaccgaaatccaaaccttcgacttgtgaatatcccttggccacaagtcgggctttgttccttgtcaccacaccatgctcatcttgcttgttgcggaagacccacttggttactacacacatttggttaggacatggaactaaatgccatacctcattccttgtgaatntgttgagctcctcttgcattgccaacacccaatccgaatcttaaagtgctttctctaccctgtgtggctcaatagaagaaacaaaagagtaatgttcacaaaaatgagcaacacgagatcgagtgttaccc

SEQ ID NO: 63452 - DNA, 298 bp, Zea mays
  unsure (1)..(298): unsure at all n locations
tatatatgggtgctagtggttcatcaggctggagcgatgaaactagctcatagagaacacttgatccttgagctgaccaaggaagagggacacctttgcacagatgcttgaataagcactagtagggagtgctgactctccggtacattagcaaacatcaaggagtttctaatcttttgcttactttatgcagttacatttaaataattcattttaagaattcattttactataattgacatgctagtttaggactggaacttanggtgcaaactctttacacactttcaaataacac

SEQ ID NO: 63453 - DNA, 122 bp, Zea mays
  unsure (1)..(122): unsure at all n locations
gtctctattgcttngatcctctctgggttagcttcaatgccccggtgcgaaaccaagaaccccagcaacttccctgctgagacaccaaagatgcacttgtccgggttaactttgtgtgtgtt

SEQ ID NO: 63454 - DNA, 366 bp, Zea mays
agcttctggctgtgactgcgcccaatgctgagagaaaagttttccacacgctggagtgacactgtttggtgtggaacacgtgaaccgaatcctgtccaactaaacaccgccgtgctgacgacggacagccacattatgaaccataaccggtgccactctgctgccccacgacgcgacccgcggacccgaagccgagggcggagccatggtgtgatggcggcatcactgtgttcgcagcggcgagcggatcacgcgtctctgagtgggcaccaatgcgcattggaaccatggactaacgatgatcactgctaggggatgaccgtgtgcactatatcaaggcgacgtgtaaggcgactctgtgctgct

SEQ ID NO: 63455 - DNA, 352 bp, Zea mays
cacctctgaactaactcggctgcatcattctttgctggtggccaatagaatcctgacctgaagaccttcccaactagtgttctggaggctgcatgtattccacattgcccagcatggacctccttcagaagttgcttcccagtggacgggagaatgcacttcatgagaacacctgatgcaccccttctgtatagtatctccccaatgagtgtgtagtgagtcgactgtctggcaatgcgctctgccgagttcttgtcatctggatcttcttcattctttatatacttaatgatcggccttctccaatcgtcagagtctgactcatggtgatttatgatgttgcactcttctg

SEQ ID NO: 63456 - DNA, 375 bp, Zea mays
tcgcacctccgaactaactcggctgcatcgctcttcgctgtcggccaatagaatcctgacctgataaccttcccgactagtgttctggatgctgcatgtattccacattgccctgcatggacctcctccagaagttgcttcccggtggacgggagaacgcacttcatgaggatgcctgatgcgccccttctgtacaatatctccccaatgagtgtatagtgagccgactgcctggcgatgcgctctgccgagttcttgtcagctggttcttcttcattctttatatacttaataatcagccttctccagtcatcagagtctgactcgggttgatctatgatgttgcactcttctgttagatccattgagatactc

SEQ ID NO: 63457 - DNA, 345 bp, Zea mays
  unsure (1)..(345): unsure at all n locations
tctggtcggctntgattccggccggaagcctcattgtctctattgcttngatcctctctgggctggcttcaatgccccggtgcgaaaccaagaacaccagcaacttccctgcggagacaccaaagatgcacttgtccgggtttagcttcgtgtgtgttgcccgcagcttgtcaaagactatggttaaatattccactacggtcgaccctctcttagtcttgaccatgatgtcatagacgtatacctctaccctgtccataatcaggtcaccaaaagtcttactcatcgcccgtacaaatgtaggcaaggcgcttttcagaccgtaaggcattacaacataacagt

SEQ ID NO: 63458 - DNA, 494 bp, Zea mays
  unsure (1)..(494): unsure at all n locations
tctcctgaacaagtgctgcacttaccgctgagtgcgaagctgcctcatataataacaaaggagcccctggcgtaggtggagttagtggtgtcagatctatcaaatactgtttcagctcttcaaaggccttctgctggattggtccccattgaaagacttcggctgacttcagcacttcgaagaatggtaagtttctttctgctaatctagatatgaatctattgagagatgccagccttcctgtcaatctttgagcccccttttntgtacttggtggctccattcgaagtatagcttcgattntacttgggttggcctcaattcccttttgtgaaactaagcaaccaagaagattacccttctttactccgaagacacatttttctggattcagctntagaccagcctgtctaaaatagcanaggctcttgtaatancaatgtggtatctgcttgtctcttacatgatatatcacatagtagacttctgctatt

SEQ ID NO: 63459 - DNA, 283 bp, Zea mays
  unsure (1)..(283): unsure at all n locations
tgccagtacttgtcaaaacaacaacatttaccagcacagcgactgctgaccataccagtgacttggctcttcgcgtgctggggactggatatgattggacctttaaagacagctcaaggaggatacactcatgtactggtngcaatcgacaaaattactaaatggatagaaatcaaacccattgcctctttgaactcaactaaggccgtggaattcatactagacataatattcagatttcggataccaaacaacatcataactgacctatgatccaacttca

SEQ ID NO: 63460 - DNA, 434 bp, Zea mays
  unsure (1)..(434): unsure at all n locations
agcaaagtgctacacannatttgtgatcaccaagaagtgagtcctggtttaactaaatcaaacattacagntttcgaaatctgttctgacggtggacagaacacaacaaccagtctgtaaaattcataactcttagaccgtcaggcctatagttatgaaattttaacacaagcaagataagagaagcctctacaactttcttataattgacaaggactgattctaaagttaacttaagcaaacaatgcagtttctgaaatctgtacagtaattggacagattcagttactgaatttgtataaagcacaactcctaaacgggcagacctatggctggtcaaatttaataccagcaagataataaagtatctacaactcttctatatgacttntctacagaagacatgatttgactcatccaacaaacaacacaac

SEQ ID NO: 63461 - DNA, 309 bp, Zea mays
  unsure (1)..(309): unsure at all n locations
acctttatactcagctttaaacttnattcttacttttatgcgattgttggttcttgatatatgcatgaggcactgcacttatggggagtattcaaaactcaaatcactcatgaaaacccctagtgcaagccaaaatgcaaatttcaccatttgcctattttctctaacaattatctagcctatggcaaaatattttgaaatatatgataaaatatatgagggtgccaatatctgtcccaacaagtgttatattgtgtgattataagttaggatttggcttggttgggaactacatagaaaaaattcaaa

SEQ ID NO: 63462 - DNA, 346 bp, Zea mays
  unsure (1)..(346): unsure at all n locations
actgacccctatactcgtatgaccgaagttctctaaccatatcgtagaactcgaccctcagaagccaaacaagctcgaacttaaaagaatggtgggaggaactagagtgtggttccccagaattcagtaatagaggagtatggtcggaaatgtcacggcttanggccctcacagaagacaaaggatatttntgatcccactctgtggttaccaggattctatccaacttttcatacttaagtctttcgagggtatttgcccaaagtgaatggcgaccagtcatctctagttccttaagacatagaccatcaataacgacattaanaagaaatgaccaccgatgatc

SEQ ID NO: 63463 - DNA, 306 bp, Zea mays
  unsure (1)..(306): unsure at all n locations
gttgcggaagacccacttggttcctacaacaatttggttatgacgtggaactaaatgccatacctcgctcctagtgcagttgttgaggtcctcttgcatcggcaccacccaatccgaatcttggagtgcttcctctaccctgtgtggctcaatagaggaaaccatagagtaatgttcacaanaatgagcaacacgagatcgagtagttacccccttcttgaatatcgccgaggatggtgttcacggtgtgatctcgctggatcgcttggtgaactcttgggtgtggcggtcgtggaacttgttcat

SEQ ID NO: 63464 - DNA, 329 bp, Zea mays
  unsure (1)..(329): unsure at all n locations
cttcatcccacatgggctagtcggcggtgccagagtccacccatgttagtcttagcaattaagcaagtgtcgagttcagctttatcaaaatctaccaagtatagctgaccctctaacactcccttaaatgctattgaatcatcacttcttctaaagacagtgacacctacatcagtgaatagacagttgtagcccaattgacataattgagaaacggaaagcaaattggtatctaaagaatctacaagaaanacattggaaatagaatggtcagaagatatagcaattttaccaagaccttngaccaaaccttgatttccatccgcgat

SEQ ID NO: 63465 - DNA, 394 bp, Zea mays
  unsure (1)..(394): unsure at all n locations
tcacacctctggactaactcgactgcataactctntgctatctgccagtaaanaccacacctgaagaccttcccaaccagagtcctggatgctgcgtgtatcccgcactgtccggcgtggatctcatctagcagttgcttcccaatagctgaaagaatgcacttcatgaggactcttgttgcgccccttctgtatagtgcttccccaatgagggtgtattgagctgattgccttgtgaagcgttctgctgcagttntgtcatccggttcctcttcattctttatatatctgatgatgggctccctccagtcattagagtctgactctggctggctcagaacattgcactcttctgcccgatataaggaaatactcgggcgtggtacttcttgga

SEQ ID NO: 63466 - DNA, 439 bp, Zea mays
  unsure (1)..(439): unsure at all n locations
cactacaagcattaatgtcaaagtctttacacctagtacaaatttcaacatgttctacacaagaattggatttgtttgctacttctaatttagcatttaaatcattgttgacacctttcaaagtagaaatggtttcatgacaagtagatagttcaaaagaaagcatttcatttctcttaacttctaaagcataggatttttgtgcctcaacaaatntatcatgctcttcatacaacaaatcctcttgctnttctaaaagtatattcttttcattcaaggcatcaattaattcattaattntgtctatcttagatctatctaagcccttgaacaaacatgaataatctacttcattctcatcactagattcgtcctcacttgaagaagcatangtagagttgcgagtacataccttcttctccttgccatangcatgtgt

SEQ ID NO: 63467 - DNA, 302 bp, Zea mays
tcactgaatcaccaagaacacctctgtttgtcttcgattatcaccgccgctgtgattagacaaaatctgagccgaatttgtgcaattgatggagggattaaggtcgcctgaggtaggatttggtgttagccgagttaaggcaccggccattgcgtgttccgaccagtacaagttcgccgtaagcatgcttgtcgccgttcaccgtcgtggacttggcgcagtaaagaaacagaaatatagggcctaagtgagaatgtcagcgagacagtaaatagtggctagggattatttactagtttttc

SEQ ID NO: 63468 - DNA, 145 bp, Zea mays
acctgcaggttcgtgtgcttgccgagaattcatctaactggctgctaacttgattggacgctgctagctcgtgtgtatacacgttatctgcgcggatatatgtgcggggtgcatgtgaccaaataaagcgagtacgcatgatgct

SEQ ID NO: 63469 - DNA, 487 bp, Zea mays
  unsure (1)..(487): unsure at all n locations
actcagctttattccactntctcatgctgaagggacatactctcaacatattctccaacacttgattagtcctttcagtctgtccatcaatctgagggtgataagccgtactaaaattcaactttgtactcatattctcatgagagcttctccaaaatccgggggtaaactgtgatcctctatccaaaatgatcttcttcggtacaccgtgtaaacacacaattcgagccatatataactctgccagttgagagcctntataagtagtcttgataagaatgaagtgagccactttagtcaatctatccacaatcacccatatagcatcatatccttcttgggtgcgaggcaatccagtaatgaaatccataccaatctcttctcacttcactcgggtatcttcagtggatgcaatagtccagctggcctctggtgtcacccttaactctttgcatacatcgcacatagccacatatgcagctacatc

SEQ ID NO: 63470 - DNA, 368 bp, Zea mays
  unsure (1)..(368): unsure at all n locations
aagacatgatcttgagcgcatgccaagcaggatagcaagttggtgcccatcatccgcataagaacataatgacgaccgacaggccactggagctcctacacatggacctattcggcccgattgcttacataagcatcggcgggagtaagtactgtctagatattgtggatgattattctcgcttcacttgggtattctgtttacaggataaatctcatacccaagaaaccttaaagggattcttgagacgagctcaaaatgagttcggcttaatgatcaagaaaataagaagcgacaacgggacggagctcaagaattctcaaattgaaggctttcttgagganganggcatcaaacatgagttctct

SEQ ID NO: 63471 - DNA, 392 bp, Zea mays
  unsure (1)..(392): unsure at all n locations
gtcctccacattttggctgatggtgatgatcaatgcatattttcatttggtatcatcgagaaacatccgcatatttgagctttgtcaaatctatagagttaagctcattgacaattaaattcaaaaaagaatacatatctctcacaaactcgttttctttcattntcaaagagtcatacatttggttaataagggaatgtntttgctcacacacatttcttgtatatggagctaatacaacttataaccaaatttcattttgatttagtaaggtgaacacttcgttaaacatgtccatggtaaaacattcaagcaacccatgttatctcttaaatcaagatgcatttnattttatatggtttagggtnncttacgagtccatcctatcacaa

SEQ ID NO: 63472 - DNA, 182 bp, Zea mays
atgtcaagcacggaagcaagttggtgttcatcatccacacaagaacataatgacgaccggcaggccacttgagctactccacattgatctattccgcccgataacttacataagcatcagcaggagtaagtattgtctaggtattgtggatgattattctcgcttcgcttgggtgtcttttt

SEQ ID NO: 63473 - DNA, 483 bp, Zea mays
actcagcttttgggtgaactggttagtgcgtccattctaacatggtatcaaagccagaggtctcgagttcgaatcctggcagaggctttatttgtgcctccacccatttatttccacttttgcgcctttctctctggttgcacgtgagtgggggtgttgaagtgtataagtggattggctaccttctcccatcagcttaagcttttgggttgaactggttagtgcgtccattctaacagttctaagacgatttgaaacaacacagtttccctcagaaattccattaccaaatacttaagattttgtttcaccaaaacctagctcaccttagaaatatagagcataaaagatgagttttgagctgtagacccaagtcttgcatttttaatgtatatagatagatagatagatagatagatatgctatctgtcacctcgtgtgatggatccaacagtccatcattcacacacaatggtgtagtca

SEQ ID NO: 63474 - DNA, 293 bp, Zea mays
  unsure (1)..(293): unsure at all n locations
aacaggtgggaggagcgcatcacagcaagaatgtgatgaccacgtcaagacccctggagctactgcatatggacctcttcggacccgtcgcctatctaagcatagggggaagtaagtatggcttagttattggtgatgaattttcccgcttcactcgggtgttctttttgcaggataagtctganacccaagggaccctcanacgctttctcaggagagctcannaatgagttgagctcaaaagtgaaaagataagaagcgacaacgggtccgagttcaagaaccttcaagtg

SEQ ID NO: 63475 - DNA, 371 bp, Zea mays
  unsure (1)..(371): unsure at all n locations
gctgaggactgcttcngcaagagagcttccgaacgtgaagacttgttctgtccacggagtcgctttatccgagcgcgggttacttatcgcagaaggtgatgagtgaggtatccgtatcccggaggcgtaggagtccctcggctcggtcagccttggctgcttacgtgtaccccgtctcctgctagaaagagatcctttttcgaggaaaaattcgacgcagagggggtctctccccttttagcccccgagggagggtcgggctttgccggggctangccgacccttccttgacgactaaactntgcgtaggtgcgaggtatatgaacaacttggaaacatcttaaaggtagaagcgacgtaagctgttgatg

SEQ ID NO: 63476 - DNA, 355 bp, Zea mays
  unsure (1)..(355): unsure at all n locations
tcttcaagtctgaaccacggtctgagatatactctttgcacaaagctgacggaagaaatagctcaactctgaaagcgctagccagacatgctcagggacatagcctcgaaccatcgcaggaagaatccgttcaatccatatgtggaagtcatgactcttcatccctaagactcgcatagtagataaggtcaccccctactcagggtagctgcatacccatcacggaacatcaacatcttgatccactgaagtactttcttnctctgggccctgcttacgacgaaatcggncttaggccttctccacgtctttccgccacttggcggcttcatctctagtattggtctatcacata

SEQ ID NO: 63477 - DNA, 478 bp, Zea mays
  unsure (1)..(478): unsure at all n locations
gctcgacaatatagtctcataataaccgtatgtagtggtgtggcgaatccagagaatagctactgcttttagctgagttctaccttaattcttttgtgagcgtatgatttaggccctgtttgtttaccctctagattatataatccagcttaaatgagttaagaggttaacaaacaacacagattattaggtggattatgtaatctagatacctagattataataatccataagcacgtcaatagatgcttgtataatccataatctagaatatataatcctagagggaaacaaacatggccttaaagaacttatattttggcacaagcctcaacttctttcccgcacgcatgcacgcacagtacagcacaagcatccaaaaaggtacgtnaacgatgccctcgtctactctctactactagtcgacgaaaccttgctctcgcacgcctaattcctggaccagatcacgggccccggc

SEQ ID NO: 63478 - DNA, 429 bp, Zea mays
  unsure (1)..(429): unsure at all n locations
aatataagatgtagaaagttgatgagtgcatactatgtcatgagcatcacatttatttaatgacacactgcaccctatgaatagtatgatataagttgtctccatactttgacccaaatatgtggctttggcatttgagtacaaaattggtattttctgaaatgcacatatttagggggagaaattatatcataggattcacaatcttatttatcaaatcttatgtaagctntaaatgtgttgtcatcaatcaccaaaaagggggagaatgaaagtgcattcattccttctgtgagttttggtgatgtggataacaacacatttaatagactaacaagttggctaagtggtgaacaggaaactcagtatgatgaacatactngaatagtatataatgacagtgaacaaagggttcaacacaaggtaaat

SEQ ID NO: 63479 - DNA, 251 bp, Zea mays
  unsure (1)..(251): unsure at all n locations
ctcgctgataagggattggtgccttctcttatcaacatggcaccctctggcgctgtattctatggagtgtatgacatactgaagatggcttatctgcattctcctgaaggaaagaaaacggtatcgatgatgaagcaacaaaaacaagagacaaatgcattggatcaacttgaactgggtactgtgaggactttactctatggcgccattgcangttgctgtgctgaagctgctacatacccatntgaagt

SEQ ID NO: 63480 - DNA, 349 bp, Zea mays
taccgcatttgaagcatgatcgctgtaccttggtcttggccttgcttggctgtccctttcgaccttttagcgccgtcttgaatctcttgatgatgagagccatctcttcatcattgagcccggccgcctcaacttgcgccaccttgctaggtagcgactccttgctcctcgttgcctttatagcaatgggttgaggctcatggagtggaccgttcaacgcgtcgtcgacgtatcttgcctccttgatcatcatccgcccgctcacgaattttccaagtacttcctcgggcgtcatcatcgtgtacctgggattctcacgaatattgttcacgagatgaggatcaagaac

SEQ ID NO: 63481 - DNA, 334 bp, Zea mays
tcggcgtaatgatgttaggcagctgtccccgtccatatgaccttggtgagcctgacatcgccgacaacggggtcgacgacgagcgggtattttcccgggctcggcacatggtcggagtggtcggcccggtcgaaagtgatgggcttgtcggaccagtctatgtagactggtgccgccaccttcaccgagcagacctcccggcgctcttgcttgcggtgccgagccgaggtattcgccgcatgccctccatagatcatgaagcagtcgcggacctctgggaacccccctgctgggtgatcttcgttcttggcgtcgtcgggggccctgccaccct

SEQ ID NO: 63482 - DNA, 363 bp, Zea mays
  unsure (1)..(363): unsure at all n locations
atgaagaatcttcatcccaacatgggctagtcttcggtgccagatccaacccatgttagtcttagcaattaagcatgtgtcgagttcagctctatcaaaatctactaagtatagctgaccctctaacacacccttaaacgctattgaatcatcacttcttctaaagacagtgacacctacatcagtaaagatacagttgtaacccattttgcatagntgagaaacggaaagcaaattgtaatctaaagaatctacaagataaacattggaaatagaacggtcaggagatatagcaatcttaccaagacctttgaccaaaccttgatttccatccccgaaagtaatagcctcgtggcgatcttg

SEQ ID NO: 63483 - DNA, 302 bp, Zea mays
cgtctaaacgcctaaaattcaacatcaaatggccaatgctcgctcgacagctacagttactcgcgacggagacgaaaccgaagctgctgaaactgctccgatcgcccaagatatgaggcggtcggcactggttgtgactgaatgcgctgctgacaacaaattacccgctgctgaaactgagcaggtagatattgaagatggtgatgctaatgaacgagagattgactatgatattattattccatcgcagcccagccatctggagtttgtgaaatcaactgtgtctgcagctgatatgacta

SEQ ID NO: 63484 - DNA, 352 bp, Zea mays
  unsure (1)..(352): unsure at all n locations
tactcagcttcttctatgacgaagctacaacaatacgatgctcttattgagtatactatgaataagctctggctatggncgaaattttcaacagcacaacagtgcaatagtaatgaatgttgtggtaacttcacacctacccgtctgtttatatagtgctgcacgtgggaaggtgaatcattaagccattctcaaacgctgaacagtcgcccacaatcattgaacggtggaccatagtgcgcgagaacgtgaatcaccagatcgtgcgtacccgtcgtatggtgggaccaactcgcactctgaatatataatcatttctcgacaacgaactcacggaaggttgtttttggat

SEQ ID NO: 63485 - DNA, 537 bp, Zea mays
  unsure (1)..(537): unsure at all n locations
tagtctcanagaaatcaaactagaanataacgtcccctaaagatgtgcatacaaatttataatacctgtaggagacattcacttgtcttgtaagatcgaaataccacttgaaagcataatgtcataagagaattaccttaggtgatacgtagaggcaaatntctactacttattaaggcagtaaggggtaggctgccattccgtgttctgccattcccattccccctccccgcactgtctttctcattctcccatccncgtaaagcccattcccattcctggttctgccagtgttctaccattcccattaccccaccactcgcactgtctttctcattccgccatccccgcaaatctcattcccattcccacgtgcatcccacgcctagctaaaattaaattataataacacaaatgtggctccaatggaattcgaatctatgacctctcaagcaaatgtgcttgtagctaccactacaccacatgtgtgtttatgtcaatatctggtacagtagaaatatctactacatctctccc

SEQ ID NO: 63486 - DNA, 378 bp, Zea mays
  unsure (1)..(378): unsure at all n locations
gatatgcaagtacacctattcatacatctcgtggatcagataanaatattanggccactatatntacatcatatgtttcagttggagcgatacctangagtattaaaaggttatgtgcgaaatcgcgctcacccagagggttcaatcatggagggatacactacagaagaagtgnatgagagctgtatagattacatcagtgacggaacaatgataggtgtgcctgtacctaaacatgagggtaaactatgtgggagagggagaatgggcaagaaaaactttcgcgttgaggattacaagttagtacattgtgctcatggtagtgtactacaacatctcacgatagccgagccttacatagaggaacacctggatgag

SEQ ID NO: 63487 - DNA, 458 bp, Zea mays
  unsure (1)..(458): unsure at all n locations
actcagcttccatcnngtttgtgctcatcagaagcatgccagctcataagtctggcatcctcatgattagcgaacanacacctcaatcgatcgacgacggngaggtaccacatcaccaaagcaggaatctttttgagcgcataatagtctacttcttctttttctttgctcgtggattttgaagtctttntttgggctttctttcgcttcttccctttagacacggatgcaacacactcttcgtcctctcgatagtctttattcgtcttgtacctacttgcaccgcactttgggcagctctccaagtctttataatcatcacctcgataaaggatacagtgatttctacacgcgtggatcttctccacacccatagtgagcggacttgatagtttctttgcatagtacgtgttagcaggcacattngtctcctttggagcatgtctgcgatatactca

SEQ ID NO: 63488 - DNA, 435 bp, Zea mays
  unsure (1)..(435): unsure at all n locations
tctnagggagaacacgtgatagggttgactaacgtacaattctgtaaagatagaccttgtgcagcttgtcaagcaggtaaacaagtgggaggagcacatcacagcaagaatgtgatgaccacttcaagacccctggagctgctgcatatggacctcttcggacccgtcgcctatttgagtataggaggaagtaagtatggtctagttattgatgatgacttttcccgcttcacttgggtgttctttatgcaggataagtctgaaacccaagggaccctcaagcgcttcctcaggagagctcaaaatgagtttgagctcaaggtgaagaagataatgagcgacaacgggtccgagctcaagaaccttcaagtggaggagttccttgaggaggannggatcaagcacgagttctctgctcctacacacacagcaaat

SEQ ID NO: 63489 - DNA, 260 bp, Zea mays
  unsure (1)..(260): unsure at all n locations
gagtctggctgcaaattgctcgctatngtcaactgtgagttccgacgggactccgaagcggcaaacaatggtntgccagaagaatttctgggcagtcttcgatgctattgtggatacagccctcgcctcgatccatttggtaaaatattagacagcgacgaaggtgaacttgaggttcccctgtgccgtgggtaggggcccgacgatgtccaggccccagcgctgaagaggccatgtgtgggcgattagcttcgtgaact

SEQ ID NO: 63490 - DNA, 386 bp, Zea mays
  unsure (1)..(386): unsure at all n locations
ctcagccttcttctgatttcagtgaacaagcccgattntaccatcttggacagatcatccttcgaaacagtagattntccgaagtccaagtggctctgcttgcttggcatggcaatgcgataatcatcttcggaatcagattcctcaatatcttcttcctctgcttcagcgattgcttgttctgcttgttctgcatcatcatgagggatctttttcgaagtcactagacccgatcgttgcatggcttcggagatggggagagtctccgaagcttcagtttcctccccctcgcgctcaaccctggcggtagagcggactctggccattcaattatgaacttgtgaaactntaatattttcttcctctgaagcangtttcaaactgga

SEQ ID NO: 63491 - DNA, 359 bp, Zea mays
  unsure (1)..(359): unsure at all n locations
tggtatgtctttactattggtgtatgtgcggtatcatggaggtcatgcaagcagaccatcttgacgaggtcaaccatggaagctgagctagctgtacttgacacaacaaccgttgaggcagaatggttgcgtgaactcttgatggacttgtcagtggttgagaaactgaaagggaaatgtgcccttgggccatttctaagtattttggtgatntagtgcccaacaagtgcctaagtgtaaaaaggtggacaaagtacacatcaaggataaaggtatgtttctcagacttagtacattctttatggactaatggattgtgtctaagtgctggaaacaagaaaaattcaattggaaatgtc

SEQ ID NO: 63492 - DNA, 394 bp, Zea mays
  unsure (1)..(394): unsure at all n locations
ttctatcaagaatattccacaaggagaaaatgagcacgctgatctgctagccaagtcagcagcacaggggctggctttaccttcggaagtattctttgagacaataagagcaccttcagtggaacttcttgaaagagcagtactcactatatttcctattcatagtgaagattggaggactgagatcatatctttcctccaagggaactgcctttcagacgacgaagcttataataagagaatggaggcaagaacaagaccatatgtaataatagaagaggagttgtacaaacatggagtctgctctccactcctcangtgcttatcaagaaccgaacgtatagagctgatgaaggaaatacacgcacgcttgtgtggatctcatattggatct

SEQ ID NO: 63493 - DNA, 448 bp, Zea mays
  unsure (1)..(448): unsure at all n locations
tctaangggagaacacgtgatnggntaactaacgtgcatntcgtataagatagaccttgtgcagctggtcaagcaggtnaacaagtgggaggagcacatcacagcaagaatgtgatgaccacttcaagacccctggagctgctgcatatggacctcttcggacccgtcgcctatctgagcatatgagggagtaagtatgggttagttattgttgatgacttttnccgcttcacttgggtgttctttttgcaggataagtctgaaacccaagggaccctcaagcgcttcctcaggagagctcataatgagnttgagctcaaggtgaagaagataaggagcgacaacgggttcgagttaagaaccttcagtggggagttcctgagaggaggaataagccgagtcttcctcctaccaccacacaaatgggtggtgagagaaaacagaccta

SEQ ID NO: 63494 - DNA, 417 bp, Zea mays
  unsure (1)..(417): unsure at all n locations
gaaacactactaaactctattcctgaactacacccaggaatagcttctcttgtctaaaaggtagccctaaacttttgggactaccttcagggaaccatttatgccagggaacaatagaaaaagtttcttgcctccgaaacggatagggcatacatgagggcctagccatttttgtcttttccaggtaacaacaatatatcgccaagcaaaccaatcaacttggagactgcaggcgcaatgtcattgcacatgacttccatttcttgaacaagatgcagattntggcccccaccctatggattcaccatctcacgctagtgggcccggnggcctctatcggtaccctaaatatggngtactcacttctgctgggtcaagacgagacccctatggcttncatagccatgggatcaccgg

SEQ ID NO: 63495 - DNA, 377 bp, Zea mays
  unsure (1)..(377): unsure at all n locations
gctgagtacgaagcattggttctaggtcttcggaagttaaaagcaatgggaatcagaagggccatacttaanactgattcccaggttgtttcgggtcatattgacaaaagttgtaaggctaaggatccgaagcttgaaaaatatctggatatggttcgaagagtcgaagcttccttcgaagggttttctgtcaaaaatatccctagaggacaaaatgaacatgctgattngctagctaagtcagcagcacaggggctgcccttaccttcggatgtgttcttcgaaacaataaaagcaccttctgtggaacttcttgaaagagcagtccttaacatatctcctgtttttagcgaagaatggagaaccgagatcatctc

SEQ ID NO: 63496 - DNA, 364 bp, Zea mays
ctgccttcatctacttcagacttctcttctcagtgaagcgtatctcgtggattcgctcaactaacgacgaagaggatgaattgactttgatctctactttgattctttgtattcacgcgaagtgaacattcgtctttaccatatcagttgtttcactctcccatgaagatactcataaaaatactcgattaaagacaaaataatcataattcaactacagaacactttggactactgcttgtccaggtcacaatcacaataacggcccctcatggcgcgaagatctcctcgaaatgtctcaatcccaccaaattatgactctaaactgaggtagaacatcttccacgagctttacagctggaca

SEQ ID NO: 63497 - DNA, 458 bp, Zea mays
  unsure (1)..(458): unsure at all n locations
cttcatccncacatgtgctaagcggcgatgccacagccagcccatgccagtcttagcaattaagcatgcatctagaccggcctcctcttttgcaaaattaactaaataaagtttgtcgtctaatacacccttaaaagctagtgaaccatcacatcttctaaagacagacacatctacatttgtaaataagcagttatatcccatattacataactgactaacagatagcaagttatatccaagagactctactaaaaacacattggagatagagtgctcattggagattggcaatttacctagcccttntaccttgccttgattcccatcaccgaatattattgaatcttgggaatccttattcttgacgtangaggtgaacatcttcttctcccncgtcatatggtttgtgcatccgctgtcaataatccagcttgaacccncggatgcataaacct

SEQ ID NO: 63498 - DNA, 431 bp, Zea mays
  unsure (1)..(431): unsure at all n locations
tctaaagggagaacatgtgataggtctaaccaatgttcatttcgtataagatagaccttgtgcagcttggcaagcagggaaacagatgggaagctctcatcacaccaaaaatgtgatgacaacatcaagacccctggagctgctacatatggacctcttcggacccgtcgcctatctgagcatatgaggaagcaagtatgggctagctatcgttgatgactcttcccgcttcacttgggtgttctttntgcaggataagtctaaaacccaagggaccctcaagcgcttcctcaggagagctcaaaatgagtatgagctcaaggtgaagaagaatangagcgacaacgggtccgagttcaagaaccttcaagtggaggagttccttgaggatgaanggatcaagcacgagttctccgctccctacacaccac

SEQ ID NO: 63499 - DNA, 390 bp, Zea mays
tagcgacctatgaaactaagcttggaaggatcttatcccaacatgggcaagtgtactatgccatatccagcccatattagacgtagcaattaagcgagagtctagttcagctctggtatcattaaaatcaactaaatatagctgactatctaacactcccttaaatgctattgaatcatcacttcttctaaagacagtaacacccatatcagtaaaaagacaattgtagcccattttgcacaatggagaaacagaaatcatattgtaatctaaagaatctacaagaaaaacattggaaatagaatggtcagaggatatagcaattttacccaaacctttgatcaaaccttgattaccatccccgaatgtgatagctctttggggatcttc

SEQ ID NO: 63500 - DNA, 427 bp, Zea mays
  unsure (1)..(427): unsure at all n locations
aaccctatatccccccttaaagcactaaacctccaagcaagagattagtgggaaagataatctaatgacaaatgctcgttttaacccttataccaaagttaagtacactaatgtatctactaaaacagttagggaaacattacaaataggccccttaaagaaccaaaatcaattcattaagtatggagcacactagagctctctacttttctctaagtccaaattcaaccctaagctaaagatcagaagtgttcacctagtaaatggtgccaataccactttgtctgaatataagaaaggagccaaactaccttaggaacccactataaaaattngaacccgagccaaaaccgttngacatgagttgacatatcctttgtctccgggtaacaatgtgacaccccgattggcgtcgatatatctgact

SEQ ID NO: 63501 - DNA, 374 bp, Zea mays
  unsure (1)..(374): unsure at all n locations
tgcacgcaggacaatgaggagtaccttcaggcgaatgtccgaaggttcctgcgtctaagagcacaagcgcctatagtgaccaatgaanatgtcattgaggccatgatcaaggggcttcggccaggacctaaggctcagtantttgccaggaagcccccacaaaccctagagaatcttcttcagaagatggatgagtacatccgggctgataatgattntcgccaaagaagggaagaagcatacatattntctgagatgaccagnggcttcngaggaagaatccaccccaggcatgtcagatngattcataattccaacccaagtgatgacagaggaagtcaacctcaaaggcagcaacactggctccagtcttc

SEQ ID NO: 63502 - DNA, 198 bp, Zea mays
gggtggggacgtcggctgttccccacgctgcatcatatgattctgatgatgcagcgaaggccgccgcactagcagataatgccaagtgggaccaagccaatgaggcatgcttgtctcgtctgctgaacgtctttgtcaaccgcttatttgacgtgaactctggattacctccgctacggtctatgactgaactgaaac

SEQ ID NO: 63503 - DNA, 239 bp, Zea mays
tatctatttcgtgaaagcgagtgtgctctgacctattatgtgccattcacttttaatgcactgtcccgcattacttaattgaaaccttatgaatgactaactttccatttaccttattcttggttaccttttgggttatcatgggtagcattatgctattgctttacttgaatcaatgaacatgatgtgaatacttatgatactattgatgtatcccgatgatgttcctgtgatacttt

SEQ ID NO: 63504 - DNA, 313 bp, Zea mays
gcaagatatccgaagcttgaaaaatatttggatacagttcgaagacttgaagccttctttgaagggttttctgctaagaatattccacgaggagaaaatgaacatgctgatctactggccaagtcagcggcacaggggctgccattaccttcggaagttctatttgaaacaataaaagcacctttggttgaccttctggaaagagtagtgctcaatatatctcctgtttataacgaagattggagaactgagatcatgtcttttctccagcgcgatttcttttagatgacgaagcttatcaaaagagaatagc

SEQ ID NO: 63505 - DNA, 398 bp, Zea mays
  unsure (1)..(398): unsure at all n locations
gcatcatcttcttcatctccttcaaattcatcttcaacctcctggaaagagaaaatgtaagaaccagacaaaaatatttaagataaatgtaggcgacaatactgacatntgtgaagtacttcaaaggattaggccacaagtcttccttgatgatctccgccacctgcgcaatttgaaacctcagaaaactctcgaaggaataaaaaaatcatgcaacttctgaccttccaaaacaaacacatggcccggattgccagtcgatgagataaactaaataagtacaagaattcaagcacaacagtttgcttggtgtcccagttttttaaaagtccgaaattaatcaataccatcacanatctggcaatatagtttgtatagagttggtgcatgtgatacac

SEQ ID NO: 63506 - DNA, 348 bp, Zea mays
  unsure (1)..(348): unsure at all n locations
gcgtggtgagcaagagctataaanatgagtctacaaagcaagtggcacatacagcgtaccaaatgtggtcagggtgagtacttatttatacgcttggcgcactccaaattggagggtcccgtctatcattgactgttgctattctagcaaagggaaggtgtttttttggaccttcggcttaaggccttcgtccatgatgcagtatgaatttgttatcttaaacaaattaatactgcgaggggctactgttggnggccttcatcctccgaaggtcctcanaagtgtaatntaacaatgtcttccaagtatggtttatggacaggtaccttcggattacacgattgatat

SEQ ID NO: 63507 - DNA, 390 bp, Zea mays
cgcttcagtctatcatccgcagtccaacggggtcgtggagcgcgccaatgggaaaatattcacagctgtcaaaaagatgctcctcgatgaaagaaaaggcagatggaccgatttattaccagaggcagtctgggcgctaaacacaaccgagtgcagagcgaccgggttcactcctttccgccttctatacggatcggaggcaatgaccccgcaagaaataaagcatgggtccccgcgtacagttccgtcagccgtccccgacgtggatgagccaacttcaaaagatctcattgacggagaccgggtcttcgccctacaggccctaaacaaatatcaagcccagaccaaagcatggcgcgaccgcgcagtcatcccgagggagttcagcga

SEQ ID NO: 63508 - DNA, 397 bp, Zea mays
  unsure (1)..(397): unsure at all n locations
cactcagctgccttcgctcgtataccacccgcaatctaacggcgtcgtcattcgcgccaacttgcagatnttcactgccatcaagaaaaggcttcttgatgacaagataggtaaatgggccgaccagctacctgaagtagtctgggcactaaacacgactgaatgccgggcaactggattcactccttttcgtctactatatggatcggaggccatgaccccgcaggaaataaagcatgggtcaccccgaataagtgcatcagccgtncncgacgtagacgaaccaacgtccaaagacctcatcgatggagaccgcgtattcgccctgcaggccctcaacanataccaagctcatacgaaagcctagcgcgaccacgcagtcgtntcaagagagttc

SEQ ID NO: 63509 - DNA, 313 bp, Zea mays
  unsure (1)..(313): unsure at all n locations
tcaccgaaatccaaaccttctacttgggagtatcccttggccacaagtcgagctttgttcctagtcaccacaccatgctcatcttgcttgttgcggaagacccacttggttcctacaacattatggttaggacgtggaactaaatgccatacctcgttcctcgtgaaattggtgagttcctcttgcatcgccattactcaatccgaatcttgaagtgcttnctctaccctgtgtggctcaatagaggaaacaaaagagtaatgctcacaaaaatgtgcaacccgagatcgagtggctacccccttatgaatgt

SEQ ID NO: 63510 - DNA, 454 bp, Zea mays
  unsure (1)..(454): unsure at all n locations
cgcttcttcaccatgtgatcacggttatctngagaatgttgatctatgcttcttcctcttactcgggtcaagctcatttttagcctctcattttcttctttgagcgtttgatatgtatcatcttgtgttcctacaaattctagcgtaaagaaagatatgcttgtcgactgacaacaagcattatcacacggtaatatagnttcaatttgaatacatgtgcatgagtgagattgctgngattataagtattgtatcacaacctcatgagcaacttctaatatgatatgatcatctataagacttttatgagaacatagaagctatcatattttcttgaacagatacgttatcactattagcttttctacatggtccttaggcaaggcatatctactactaattgagcgatcactgttaagagtatcttgctcattgaaatagttcatacctttga

SEQ ID NO: 63511 - DNA, 351 bp, Zea mays
  unsure (1)..(351): unsure at all n locations
gcacatgttcaacacttagcaacactctgtcattctttaattgagttatcgccaagagaacataggatcctgaagtagacttatgaatatcagaatagcttgaccgtaatcaagagtgccacgaagacaatgaaggatccatttgaccaatgaaaggtggggagcctacgtgttatgcataaataagcatgtctactggatagcataagcaatatctagacaactataagtgaggtaccatanggcactagtaatgttgtggtaatcggtggcattgttagggtcttctacgggtgagagacttgactgagtatcaataggagtacttgaaggctngcattcagacatacc

SEQ ID NO: 63512 - DNA, 380 bp, Zea mays
  unsure (1)..(380): unsure at all n locations
tctataaagctgcgcttccgtttctgatgagtatattttgtagtttatgtatcgaatacctaccaagntttccttcaccagctgacccccgaagctatattgaggatgggaatcttcgtctgggcaacaagaagccaagggatagaaccaagtgctaagtgcttctgtagcatgcacgaacttttgtatgagacaaaggccatggggaaagaacagtatcataacaacttcgcgtgttatgggtttattccccgtcccaatgccagtcaccctgtgccgacattncggaagagacggcctgtacattggatggaagaatggtttatgtgaaaacgattgtcaccatggaagacattaagtgtatcatgcccccaatggcc

SEQ ID NO: 63513 - DNA, 479 bp, Zea mays
  unsure (1)..(479): unsure at all n locations
cctagctactggtgccataggttcaccaaaatccaaaccttcgacttgtgaatatcccttggccacaagtcgggctttgttccttgtcaccacaccatgctcgtcttgcttattgcggaagacccacttggttcctacaacattttgattangacgtggaacaagatgtcatacctcattcctcgtgaagttattgagctcctcttgcattgccaacacccaatccgaatcccttaatgcgtcttccaccttgtatggctcaatagaagacacaaaggaataatgttcacaaaaatgagtgacatgagatcgagtggttacccncttatgaatgtcaccgagaatggagttcacggngtgatctttgtgatcacttggggactctgggtgtggggggcttgatctgtcatcttccttgcttgacattggcatctcccttgatcatgcctctcttgagggtcatctctgatctcatttat

SEQ ID NO: 63514 - DNA, 418 bp, Zea mays
  unsure (1)..(418): unsure at all n locations
ctcagctagaaaatctggtatgaatctgcgatatacccagctagtccaagataactctggacttggtgaacagttnngtggggtttccactccagaatatctttgaccttgctaggatctaccgcaattcctttagctgacaacacgtgccccaaaaattgaatttctttcagccagaacgcgcacttactgaacttggcatatagctgatgttccctgaggcgcgtcaatacaatccgtagatgctgagcatggtcttcttcattcttagaatatatcaagatatcgtcgatgaagactnaccacgaattgtccaactcgggcatgaacaccgagttcatcaagtaagtgaagtgggcaggagcatntgtgagcccgaaagacatgaccagatattcaaacaatccatatcgcgtag

SEQ ID NO: 63515 - DNA, 394 bp, Zea mays
  unsure (1)..(394): unsure at all n locations
catatgcgccttctctggtgctangtggatagccgctatcttggagaggggaggctgcgaacatgtgaaatccttggcgcagaccgaggctgccctatctattgaagatataaaagacccctcggccgaagcaagctnggttggtggaaaattattcaccgacatctgggaaaatggtggtcgggagatggctcaagaaattataaggaaaagtgaaaaaggtattcacgatgctagagaagtagcaaaggccgctgagaaaagtgcggatctcgagaggcgaataggtatttaattaataattttgactntatgttgtaatgttatgacttcggacttatntacactntgcatgacagctgcactatctccttccccagagcccgtcgagcca

SEQ ID NO: 63516 - DNA, 369 bp, Zea mays
  unsure (1)..(369): unsure at all n locations
ctcagcttcaggcctnccatgaagtactaaccaaaaaataagggaatataacttctcctgcataaacaacaggggataaaaccctgagtacgcaattactcagcaagacttatccgactaaagaaaagactctcaagggtatgctagctgattgggaatcaaggtaaagtttatcaatgatcaaagaactccttttgcagaaaagcttgctaccagttgatccttaagccaaattttatttcactagttaggttattacctgaatctatatttgcctgatctagttcaagcacttggcctatactagctccattntattcattctcatatntcacttgctaactacgatgatggtcacagggatgagtc

SEQ ID NO: 63517 - DNA, 461 bp, Zea mays
  unsure (1)..(461): unsure at all n locations
ctatattatggattgctnttaaatctgtccagttttcttcggcctttctggcagcttcctgactaccatgaatagcaataggcccttgatccgaaggtatcttcatgcaaagatatgctggatgaagaattgcttcaaaagcattgagtgtcccacgaccaatgattgcattgtaggggtactccatgtcgacaatatcaaacacaacttgctcagtccttgtattgttgacatatccgaaggtcactggcatcgtgatcttgtcgagcgctacaatctgccttcctccgaagccacanagagggtgtgtagcatcatgaatcttatcctctggctcttgcatctgtctgaaggcctcagcanacataatatccactgcactgcctgtatcaaccagaacattgtggaccanaaaccctttgatacacaagaanaaccatagcatcattgtgagggtaatc

SEQ ID NO: 63518 - DNA, 197 bp, Zea mays
gcgccacgccaagtcgtgcccgcgtgtcctgctcgcgcccgcgcctataaatcaccctcatgcgtatagctgactactccgtgcacgcttgacctaatcggattccgaaaccacacgcgattgcccctctcacagcgtgcccgcggacacccgagcctctgccaccgtagaccggacaacagagacccttctagcca

SEQ ID NO: 63519 - DNA, 426 bp, Zea mays
  unsure (1)..(426): unsure at all n locations
catcgcagaagactgtccaaacttcggcgtcttttgttatttcttcttcctgagcccctggcatccaattagcgatgaagtctgctaatgcctgggactaaattgaggatctatgcacatagtcaatggtgaattcattaagctctgcaacccattttccaatccttccagtagcttctttggtcctcataatgtccttcagaggctatgacaaaggaacaattatgcgatatgcttgaaaataatgttgaagctttctagaggccattaactcagcatacatcaccttctccaattctgtataatctntctttgacacacttaccactttggagacgaagtacactggagcttgctttttgatttggcatctagcttctcctatacaagtgccacacttactgcagagtgtgaagctgccacata

SEQ ID NO: 63520 - DNA, 413 bp, Zea mays
  unsure (1)..(413): unsure at all n locations
gctgtattagatcgagttcanatactaatgaacaaatagcttatattatggttcggtgctcagtttcacacagcaggaagcanagagaagaggtgggcatacctggtggatgctcgtcgctgntgaaggtcgacctgtgcacctggcctatgcggcggcggcggcctacggtcgcccacccacccgtcgacacgagagagagagagagagcgcacggcacgggggtggcggcggtcgcccactcgacgccacggtccgagagagagagagagagagagcacgcgggatgaatgtgagcgaagaanagggcgcacgcactgctggccttctgggtttgggttgtgtatacagattatgctatttctagaggtgtacccattaatacatnacagttttttctaatatgactagtt

SEQ ID NO: 63521 - DNA, 417 bp, Zea mays
caccgtaagccagtactcttcttcgagaagccatagcctagcttcccttgcacggcaaccgcatggcttctatccgaagcgtacttcctctataaataccgagtgagtcttccatacttcactcaaccttgcctttacaaactccacaaccatgaatccctacttagaaaacaattttcttgtgcggttgatggaagaaatggaagaggaagaagaagagttgcagttggcgaggcacatggtcaataggaggcgacgtgcacgcaatgagcgtcgtcatggtggttcgattccagggcgtgttatgattcatcgtgatcacatgagcggcgatgcaagaaatcgagcggactactttggagcgaacccggtgtacacggatcctcatttcgtaggaggtattacaataccacatca

SEQ ID NO: 63522 - DNA, 249 bp, Zea mays
atgctcattgattatagcagtgagatgagctatgtgatcattatgttgctcaattaaagctaggtgatcatgaatagcaccaacattaatatctctacatctagtacaaatagaaacatgatcaacactcaatgtagaaagtctgcaagagttaattcatcaatcttagcatgcaaaatggcattctcatttctaagattggaaatagagatatcgcaaacatttaaaatctttagcctagaaatcata

SEQ ID NO: 63523 - DNA, 374 bp, Zea mays
  unsure (1)..(374): unsure at all n locations
ctatcanatggatgtaanaagtgcatttttaaatggcttcatatatgatactngttatgcngagcaaccacctggatttgaagaccctatatatcctaaccatgcttacaggttgtccaacgcgctatatgggctaaagcaagctccaagggcttggtatgagcgtcttcgcgacttcctcatccaaaagggcttctagatcaagaccgtcgacacaactctattcacacggaaacataacggtgatcatttcatttgtcaaagatatgctgacgacataatacttggctcgactaatgactatcattgtaaggaattttgtgagttgatgtcaatcgacgttgagatgtctatgatcggtgagctgacgtact

SEQ ID NO: 63524 - DNA, 415 bp, Zea mays
actcagcttcttgagctgctgtcaaaatgagaagtgaactgtgttcctcgatctaacactatcttcttcggacgccatgaaggcagactatccgtgacatgtataactcaactaacgttgctccggtgtatgttgtcttcacgggtatgaaatgggccacctttgttaagcggtccacaaccacccagatggaatcatagccggcccgggtacgaggtaggccaactataaaatacatcccgatctcatcccacttccactgaggaatccgcaatggctgcaacaatccggcgggcctctgatgctctcctttggttctttgacagctatcacagatggcgacatattctgcgatctctcttttcatgccataccaccaaaaccttctttttaaatctgatcatcttctcacttt

SEQ ID NO: 63525 - DNA, 321 bp, Zea mays
  unsure (1)..(321): unsure at all n locations
tctgactcataagaaaaattaacagaattcaccattntattacacacatcatgcagtgataagcggaacaagcctccgcagtcatatcctttaccaacaaaattaccatgtttcgacacaacacatttattggactcaagaacaactttgtatccatctcgacatagcatcgaagcactaacgagattcttcttgatagagggcacatgtngcacgctctntgaaagtcgcctagagggggggggggtgaatanggcgaatctgaaattataaacttaatcacaactactagtcgggctagcgttataaatatgaacgagt

SEQ ID NO: 63526 - DNA, 350 bp, Zea mays
  unsure (1)..(350): unsure at all n locations
cttcctcatgcgcggtatgcttcgccgaggcgggcgctgaacgcccagcttcaacttcagcctgagtattggtagcttcagcttcggcccgagttttcatagcttcgacttctaccttgccagtttcgacttcggcttgcgctttggcatcntcaacaatcttctttttaggagcagggctcaaggcctttgtagtctctagcacaacatctagcatgttctccatccttctcctgctgagagtcgcggtagaagccttttgaccttcgacagcttatgctctattgaacggctcagactntctcgatatttcattatatcttcaatctatagcccttcgccttatcatc

SEQ ID NO: 63527 - DNA, 413 bp, Zea mays
  unsure (1)..(413): unsure at all n locations
actcagcttaagattttaatgcccanacctccatttttctttgtgtgacatatcttgttccaatttaccaagtgatactttntttcctccaccaccttgccaaagaaatcttcttcttttggcatctagctttttaatagctagttttggaagaagatacatggacatatgataaataggtgaattagtcaagcaagcatcaataagggtgatatatttaagaattgtgaagacgatggttccaccatgtttggatgtggttgttcaaaagttacctgttattcattgcgaaggtccagtcgggttatctccacaaatgccaaatgcatctcgtattgaagctcctctggtagagcatcatgaagaagtggttggtgtgcccgatgctcaatcgcgtccgcacgagtatggga

SEQ ID NO: 63528 - DNA, 459 bp, Zea mays
  unsure (1)..(459): unsure at all n locations
tgttcgaccttatgcatgcttggtgagtactgcttcgcagctctggcatactctctccataanaatcaagtcagcgccccagccctccgagctcctttcaatctccacatgcagacacaggtaccatcgttcatccgcattaagaacaacaccgaacatggctaagaatacacatcaatctcactctagcgacctatccatctagccatctaccaacatcgccaaaaggacaaactaactaacactgggcatggcacggtcggcgaccctataggtaaaagagggagaatcagcgggctggtcctcatcgcattaaaaacggtgagttcctaccacacaccctttgcgaggatcgaaacgtctatcagactcaaaggaaaggganggagcatccatcccatactggtgcccatgccgatccaacggagggaaaaaattgtttggcacaatacggcgcaa

SEQ ID NO: 63529 - DNA, 211 bp, Zea mays
ataagctgaagattatatggtcagtgacattggatcatctttggagacaaattatgattaatctattaagaatttgcccatggctgctataacaaagatggagatggtatgttagtctacaactttattgcagagcctcggattagttgccatgttgaattgagagaaaatgaggcccaaactttgtctgtcagacggactgaataccact

SEQ ID NO: 63530 - DNA, 363 bp, Zea mays
  unsure (1)..(363): unsure at all n locations
atactcgatgcatattcactttatgtgttcccttgtatgatgtactgcatggttcccaacttgaatggatgaatgtatgtatgcttgcaatcgcatagagaacgatccggtcgaagagcccgacgagctctcacgagaatcctcttagcagcaggcggttggtggacgccagtgtcctcngacctatctatgtgctattcattatttaattcaccttccgctttacacatttatgcctaaggattgactagcttttggtatccatgtccttgttcacctatatggggtggatattactgtttagcttatgctatcgttaactctatcattgacatgatgagatatcttgatacgtgttttcct

SEQ ID NO: 63531 - DNA, 212 bp, Zea mays
  unsure (1)..(212): unsure at all n locations
tagaccttgtgcagcttgtcaagcaagtaaacaagtgggaggagcgcatcacagcaagaatgtgatgaccacttcaagacccctgggagtactacatatggacctcttcggacccgtcgcctatctaagcatangaggaagtaagtatggtctagttattggtgatgactnttcccgcttcacttgggtattctttttgcaggataaatctg

SEQ ID NO: 63532 - DNA, 267 bp, Zea mays
  unsure (1)..(267): unsure at all n locations
ataatgtttcagacacaattaacccaatcataanacagcatgtcgtccctcaagtcaccaggagaaggggaacatgcttgaccagcgagcangcacggtctggcgagttgaggatctcgtagtataagacgaagaagttganggcgaggccgagcctgaanggatgcgtgggcggcagctccttgacggcgatgtcctttatacgtacgtattaataattaagataagacaagtctcgtttagcgagaggagagagacaatccatga

SEQ ID NO: 63533 - DNA, 210 bp, Zea mays
cctcaattggaatccttgcacagttggcttgtcctggacccacatgctatttgttgtgccgaacccactggtcctaaacttttgttagacgggactaatcctactcatctaggattggggactctttgatgttcaccatctaatttgacgttcttacctggtgctatcaggaacaaagaatgtacaaaagacacccaatcagagtaccct

SEQ ID NO: 63534 - DNA, 406 bp, Zea mays
  unsure (1)..(406): unsure at all n locations
acctgatgaacagtggtcggtggtttccactccaaaatgtccttgactttgctggggtctaccgcaatccctctggcagatagaacatgtcccagaaattgaatatcctccagccaaaacgcgcatttgctgaatttggcatacaactgatgttccctcaggcgcgttaatacgatccgtaaatgtcgggcgtgctcctctcattcgtgaatatatcanaatatcatcaatgaagactaccacaaacttgtctagctcgggcatgaacatcgagttcatcaaatatgtgaagtgggccagagcatttgttaacccgagagacattaccagatattcaaacaacccataccgcgtagtgaaggcggcttttgtatatcttngggccgaatacggatctggtgatagc

SEQ ID NO: 63535 - DNA, 246 bp, Zea mays
ccgaagggagtgaagtgtatatcgagcctctttgagtccaacgagcggtggtcaccgtccataaatctttctggtagaaacatgtccgggtcctcccagtatttagggtccctggaaatagcccaaacattcgtaatgaccattgtgccccgcggcacgtggtacccctggatgtcgcggtcatccaagcatacccttgggaagaagggggcaggaggatggagtcgcaaggtctctttgataact

SEQ ID NO: 63536 - DNA, 423 bp, Zea mays
  unsure (1)..(423): unsure at all n locations
accactcaaccttcatagctaaaagaggtgttcagnacatcctcatactggtcaccctacattccacaatacgttcaaactcagtcatatgagccaaggccaagcctgtcttcggtctcaaatgcctcaagcaacccagtgatgagtacatggtcaccagctgccttcttcgtcctaggaccggcttcctatgataaagtccccgctaatcaacccaaatttataaggcaagacctacaacaaagggatagaaagagggatctcaaacatgtactatttacagcatggtcccagagacgaagcatatatactgagtaccctaaggggctaggtaagtgacccanagctatcacatgctactatggtattttgcatttactttcgcaggtctttcatcatttacaagcaatacaataatgatct

SEQ ID NO: 63537 - DNA, 423 bp, Zea mays
  unsure (1)..(423): unsure at all n locations
tgtacttctggtgcattgtgcatcctctntatatttaatgaccagatcctctcgagaagaactaaatcattcattntgtaagctgagaatatgtttctattgtaatggaatatattgagtatgtccaactagaatgacctagntctttttccatctatnngattaatgaataattcctctgttcataaaaattctttgaatgtgctatatcttgtgtgaaggcatcagttctggtaatctatatttaggaaaatgcgaatcaactttggagttccatcggcaataagcttgaaacaccaaccaagacaatcactccagttattccgcagcgtgatgggattcaagataactacaatgatgtattattcttaaactaatgggattcaaggtgactacaatgctttatttcagtacaaacttact

SEQ ID NO: 63538 - DNA, 472 bp, Zea mays
  unsure (1)..(472): unsure at all n locations
catgcaagcttcggatggcncatgaggacagcttcagccgaagctgcttctttctgcaagaccttcggcgcgacgaagcatagtcccaacacacgtcatcatttaacgatggaattngagatgaaggatttgggtaaaaccaaattttgcttatgtcttgaacttgagcattaccttctggaatccttgtacatcagagtatgtatacccaaaaggtattggaaaaattcaatatgcatatgtcttatccttcaaagactcctatggtggtccgatctttggatttagagaaagatccattcagaccaatggataatgaagaacaaatattgtggccagagttcccatgtcttagtgctgttggtgcattaatgtaccttgctaacaatacccgaccggatattgcctttgcagtaaatttgctagcaagacacagctcttgcccaacaaaacgacactgagttggcattat

SEQ ID NO: 63539 - DNA, 307 bp, Zea mays
ctatgaaactcagctttaagggaagccatttacgataacaaagtcattttgaaagacggatttgagcgcagccagcgggaagcagtggagtcatcacccacacaaacatatgacaccgacagccgttgactactcccatggattattctgccgatgttactaacatcggcgagtaatatgtctgtatgggagatatctcgttacttggattttttacagaaaattcaacccagaaccttaaggatttgaacagctcaatgagtcgttaagacaaaatagaacacaacgacgggtcagaactctaatg

SEQ ID NO: 63540 - DNA, 255 bp, Zea mays
tattggttcttgggatcccgatagtgctcaatttgaattaattggattttctgattctgactatgctgagcgtctaagttgatataaaaagcacctccggttgctgtcgatttcttggaagatcttttgtttcatggtcttttaagaaacaaaattacgctgctctatttaccgccgaggcggattatatatctggcggaaattgttgtgcttactattttggatgaaaccaccttattgactatggaatttttt

SEQ ID NO: 63541 - DNA, 422 bp, Zea mays
  unsure (1)..(422): unsure at all n locations
gcttgcagaataaggttcttttctagctagatcctgcagcatctacgagtccaggccacgggcgactggttctccttcgatctagtcttcctttcctttctttctttctgaatgcgcatggtaccacatccagttttctctgtctttgccaaagaaacacccccccccctcccccggttattggtaatacaggccgaggtcgtcttgagaagaccgatagctatggctggtttggttttgctgcacatgtttattaccgagtgtncattgctctgacgaactgaagaactgatcttctgtaccattgttacatgtacctttggttgaatgggaatcattcataccatattactatcaatccaactaacaggactaactaccttctcaagtatcgtacactaacttcttcattcgaagcatgc

SEQ ID NO: 63542 - DNA, 311 bp, Zea mays
  unsure (1)..(311): unsure at all n locations
tgtgaaggttcttcatccccacatgtgctaagcggcgatgccacatcctgcccatgctagncttagctattaagcatgcatctagaccggcctcttcttttgcaaaatcaactaaataaagtttggcggctaatacacccttaaaagctagtgaaccatcacttcttctaaagacagacacatctacatttggtaatagacagntataccccatatgacataattgactaacagatagcaaattatatccaagactctctactaagaatacattaaatatggagtgctcattagaaattgcaattttacct

SEQ ID NO: 63543 - DNA, 325 bp, Zea mays
atgatgtatgacgtgatgttatgccaaatgatgtgatgatatgatgcccaatgacgatgatgatgaagccacccattcacacacccacactggaacacacaagctctacattcccttaggaaccactctggagcttcttctccttctatttcggcgatataagttctgcatctccttatgaacgtcttttgaacttctatcccttttattttggcggaataagttctgcatccccttacgaatgactttcgaactttctcgccttattattcagcggtatttggctcgacatttcctttggaacgactcttcagctagaaaatta

SEQ ID NO: 63544 - DNA, 250 bp, Zea mays
aaaactcgctacacatagtttaatgatgtgaagtttcaagacgacttaaaaacagattggggactcttggccttgtacagtggaacttgtcacctggcgacggagtttccccacactcagccagttattttggaacacacatacacatggttgccgtgacacccccacgatacagatggagatggaactgctctatcgaacgactatatcttgtagaaagcttatcacgtatggttatagtagctactaa

SEQ ID NO: 63545 - DNA, 345 bp, Zea mays
  unsure (1)..(345): unsure at all n locations
gcttatgatatcaaaattggagaatgaatntnttggatcatgacatgagaagcaaactaattactctatgattgcttcaccaaaccgatgattcattttcacacaaattttgtcaaccacaacataaaaaatctcagcccgataatgatgaaggttagtaacagtgaacccttctctcctcgatctacctctgactggtatttatataaacatattcggcactggaatagattgttcattacagaattgcttcacctcatcaaataaggtctcccatccactctctctcatggtaattaactgatctttgacattacaaactaacttcatagcgtgaacaatatt

SEQ ID NO: 63546 - DNA, 480 bp, Zea mays
  unsure (1)..(480): unsure at all n locations
actcagctttatatgatgctacattgaccaagagaactgtaatttatcttaaatataggggtgcctttaaaaaagggcagaacctgtgttatcaacaaatataatatttaaaccaagccttgattcaaccgccaagtatcttaaacagtgccatcaagacagaataaaaatctgagtttaggattcgaattcttctacgtctgaaatcagtgtcgntcgggtcgacgtctcgcgttcccaaatttttgttgaacaactcaaatttccccaaatataagatttgttaataactaataggggcacaacatattaaaagatgacattcatccgattccgtttgacatgctttgacactcagttttcacgagttttcactgatttctaacccagtgacaaaccacgttttgtgggtctataactntctaaccagtgcccgaatcacctcaatctctatacaccgagttgtagaatatacatcac

SEQ ID NO: 63547 - DNA, 450 bp, Zea mays
  unsure (1)..(450): unsure at all n locations
gcttctaaagggagaacacattntaggattaacatatgttcattntgagaaagacaggatttgtagcgcatgccaagcagggaagcaagttggcactcatcatccgcataagaacatcatgtcgaccgacaggccgcttgagctactccacatggatctattcggcccgattgcttacataagcatcggcgggagtaagtactgtctagttattgtggatgattattctcgcttcacttgggtattctttntacaggaaaaatctcaaacccaagagaccttaaagggattcttgagacgggctcaaaatgagttcggcttaaggatcaagaaaataagaagcgacaatgggacggagttcaagaactctcaaattgaaggctttcttgaggaggagggcatcaagcatgagttctcttctncctacacccctcaacaaaatggtgtagt

SEQ ID NO: 63548 - DNA, 456 bp, Zea mays
  unsure (1)..(456): unsure at all n locations
ntatatggacgacggtgccatactccattgaattggtccgaactctgagaaaggtggttcttcaggcctgatatggttaaagaaacggaagaaaaagttcaacgaattatacataatttgaaagaagcacaagctcgacaaaggagttatgcagacaaacgatgtcaacccttatactttcaagtcggggatcatgtgtatctgagagtatcaccaatgaaggggtatctcattntggggtaaaaggaaaacttgcacctcggtacattggtccatttctcattcttgaacaatgtggaccagtggcgtaccgactccaactacccgaaacattgtctgcagtgcacaatgtgttccatgtgtcccaattgaagaagtgtctttgggttccagatcgaaccattgaggtgatagatgttaccttggaacctgacttaacataagatacaatggatc

SEQ ID NO: 63549 - DNA, 386 bp, Zea mays
  unsure (1)..(386): unsure at all n locations
gcttcggatttccgaagctggaagatggcctttcaatactatcaaagnatgaactggctgacagctaagcatataatagcataaaggtataaaagtcaattctgtatttgaaaacaaattacttcatttgtttatacttaatcttctcctcctcttgcagggcttaatccttagcaatgcccttagagcacagaaaaacattgaagatgaagggtatacaatggctctgaacaaccttcgttcagaggtgattgaactaaggaacgaaggccttgaaaaagacaagatattaatttcattggtaaacaaagtaaaagaagacgaagctagctccaaagctcaagttgaggtccaaaagaatgagatcgaanaccttcggaaacaat

SEQ ID NO: 63550 - DNA, 478 bp, Zea mays
  unsure (1)..(478): unsure at all n locations
tataaaactcagcttgtaagaagctngtcaagaagtaccatgcttttttggcatcatataccatcatcaagcaaattccccgtctccttggtcctggtctcaacaaggcagacaagtagtccgtttctgacatgacagttactttgcgtgccaagctgtagcatgcaatgcagtgttgtctcatatttctctatgtagttntgcatgataatgactaatttggtacttattgcaaggcaatgtcctgtcattgtgtttgtattgaactattttattagttgcttgatgacatactcttggagctgttcatctggagagctnttgatatatgtggtctgctttgcctgcccagctgattgaatcatgttgatatcactcctgcaggcaagttccccactctggtcactcaccaggaattcctggaatccaaggtgaatgagacgaangctacagtcaagtttcaactgaacaaaaagtc

SEQ ID NO: 63551 - DNA, 418 bp, Zea mays
  unsure (1)..(418): unsure at all n locations
agcttgtgaaggttcttcatccncacatgtgctaagcggcgatgccatagccagcccatgctagtcttagcaattaagcatgcatctagaccggcctcttcttttgcaaaataaactaagtaaagtttgttgtctagtacacccttaaaagctagtgagccatcacaccttctaaagacgaacacatctacattagtgaatagacaattatatcccatattgcataattgactaacatataacagattatatccaagagactcaactaaaaacacattagaaatagagtgctcatttgatattgcaattttgcctaagcctttcaccttgccttgattcccatcaccgaatatgattgaatcttgnggatccttgtttttgacgtangaggtgaacatcttcttctcccccgtcatat

SEQ ID NO: 63552 - DNA, 396 bp, Zea mays
  unsure (1)..(396): unsure at all n locations
tttgatctacagttntaccttcttcatttaagtcgagatgaccacttgaagccattggtgtcttggcgtgctttgcttttccatgccaaactttttgagcatgtcttgtgtgtacttggtttggcacagaaaggttccttccttgagttgtttaacttgaaaacccaggaagtacttgagctcacccatcatggacacctcaaacctatttgtcataaccctactaaattcctcacaaaaagtttcatcagtactgccaaaaataatgtcgtcgacatatatttgacaaacaaataattgattgtcaactntgcgagtgaataaagtagagtctacttttcctatttcaaaaccatttttaagcaagagatctttaaggcaatcataccaagctct

SEQ ID NO: 63553 - DNA, 384 bp, Zea mays
  unsure (1)..(384): unsure at all n locations
cttactggaacactacccacttaagagaatgagggtagaactcttgaatcttggatttgaactccttgaagtacctcataacaagggtgttacggggccttcttcttgctgtgctgcttgagcaagctgcggagaaatgaatgacacagggttgattntgggataaccttcttcttatcttctcttcactatcttcttttctattctcacctttcacttttcactgcctctttcttctctttgtcttcccactggaggattctatcaaagagtattaccatcatacagaggaggaaaccaaagatgttgaaccatgtacaacagtcttcaaccccaagaatcaccaagcattgtgatcttaggggcgagggagtggaaatggag

SEQ ID NO: 63554 - DNA, 370 bp, Zea mays
  unsure (1)..(370): unsure at all n locations
atcctgcaagcgganactctgagcttttcacctatttactggtaaatcgtgtaaatcctgtaagaaatcatttgtccctatctagctgttaaatataatcaaaagacacgcccagttctgtccatttagctggtaaattgcgtatatgcttaagctgtttacatatagacgacaaatctctgtaagcggtttacagatagacaacatattctctttgtaaaggattaagctgtttaatcaaaagacatgtgcacatctgtgtatacacgcccagcatcagcagaataaccagacacaagcccatcaaatcctggctcactacatatagacaacctgacacatttccatctaaatcctggctcattcagta

SEQ ID NO: 63555 - DNA, 346 bp, Zea mays
tcttcagacacgacaggctccgtttcaatgggcactgaaggcccagcttctgctttagcttgagacttagtagctttggtttcagcttgaacaattttcttcgcaggggaagggctcagcgccttcgtagtctccagaatagcatctagcacattggccatccttctcctcttggggtcgccgcagaagatatttgctccttcggcagacttgcccctgtcggagggctaaggattcctggcatttttacttcaactttcggctcttcaaccttttcaaccttatctttgattgtttcaactgtatgcatttttggcattacagtcgcctctctagtgctctgaac

SEQ ID NO: 63556 - DNA, 346 bp, Zea mays
  unsure (1)..(346): unsure at all n locations
gatcatctgccttataccacaataaaaatattgtatcattataaccatccttcacaatgtggagaacttgagaaaaatgaccgcacgcttttgatcagaaaaattgtggtatttgagagccatatgctttcacttgtgatgagcacaaaaagacgaaaggcaagaagaaggtggaaagctcaagtttctcaagtgaagaggaatatgaagaagaagatgacgatgaagatgatcaaccatgtggcagaacctcccaagtattgggtccacatgcacctgacctttgctcatagacctcagacggctatgcatgtgcaccagatangttaacaggatccgtctgagt

SEQ ID NO: 63557 - DNA, 474 bp, Zea mays
  unsure (1)..(474): unsure at all n locations
gtcacgctgctgcagcttatactcngctgcattgttagaggtcgggaatatcaactggagagcatacttgaggtgctcgcctccaggtgcagtgaagagaatccctgctcctgctccctgcagcttcagcgagccatcaaaatacattcgccatacttctgctgtttctggattgtctggaacttgatgttctgtccactctgatacgaaatcgaccagtgcttgagttttgatggcagtgcgaggtcggaactcaatatcatgggatcccaactcgcaagcccacttggctattcggccaatggcttcctttgtgtgaagaatatcccctattggaaaaccagtgactactatgactttgtggtcgtcaaagtagtggcgcagcttgcgggcagttagaagtactgcatataatagcttctgaacttgaggatactttntctttgatggacctagaacctcactgatgaagta

SEQ ID NO: 63558 - DNA, 396 bp, Zea mays
ttatggactatgtcggtaccatggatcacgggtaccccttactactttattaagacactgtgcatgtgcagctatctctggccgcgtggtgaacaacacctaactctaccacatgagcggtcccaaggacgccacatgaccacaagaggtgatatactctaggatgccatcagtgggtccggacctccacgagagagcaccggacccctgtacactcaacccggaccttcgagtaccgttcaagactcccaagtaagccaggcggaccccttgagtggggtccgaacccctcttagtgagggtcggaccacctacagcgatgtccggaacaggggataccctggcatatctcaaagacaggcaacggtccgggactgatgcagtgtcggctttaac

SEQ ID NO: 63559 - DNA, 458 bp, Zea mays
  unsure (1)..(458): unsure at all n locations
tatgacctcgcttttggtgaaggaaagattattcatatgggacgagaagtgccaagtatatacggatcataagagtttgaagtatatattcactcagaaggatctcaaccttaggcaacgccgttggttagagcttattaaggattatgatttggaaattcgctatcaccccgggcaaggcaaatttggttacagatgccttgagtcgaaaggagcgtgttcatttagcttgtgttgcccagctactcgatgggattgttgagaatttcaggaggcttaaccttgggatagttactcacactaaaggagttattattgaggtggaaactactttggagcaagagatccgcanaggataaattggtgatgctaagacacaagagattaaggatctgattaccgaanatcgagttccggaattcacggaagatgagcangcacaatgtggttcaaggatc

SEQ ID NO: 63560 - DNA, 237 bp, Zea mays
agcaatttagtctctagcaagttgtgaggaaagtggatgattgccagaggaataccaagaattatgtggtacccttggttcaatattgaccatctctcttagtagtgaccaccaatctgtgaataagaatagaatatcttcagctagaccactggagcttgagaagaatttcttggtagcatcataaactaccttctcacctccgagcttaaatggcaaagtagatatattagcagc

SEQ ID NO: 63561 - DNA, 389 bp, Zea mays
  unsure (1)..(389): unsure at all n locations
taaccttcatatttggttccgactgcagcattcccataagtcgcttcccaatgagggttgatgacaattggcgatgtttcatcgataactcattgtcagcacatgtgtgaggccccactacttttgttatcttccactttgcggtgatcttttgtatactagcacaaaccctccatgaacaattatccttgtcgcatacaactgtgtaacgacgtttctcgtacgaatgaagtactctatacggcctcttacgtaagactgggtgatgctgcaaacacctcttgaaggcagctaggtccttgatgaccctacccttttcaatgatcatgctangaccggcctcatgagcgtctagcaactcatcataccattcttctgcatttgcctga

SEQ ID NO: 63562 - DNA, 349 bp, Zea mays
  unsure (1)..(349): unsure at all n locations
agaaactcaagcttaacaacaccatttgacattntacatanaatttctgagatcaagaatatntagttcattcctcaacatgcaaaagcgggtcttatcaagtggcttagtgaaaatatccgctaattgatcctccgacctcactccttctaaaatgatatctcctttagcaacatgatctctaaggaagtgatgacggatatcaatgtgcctggtgcgagagtgttgtacaagattattagcaatttaacagcactctcattatcacacaacaaaggtaccttttctagtactacgccatagtctagaagagtttgttcatatataaaattgtgtgcacaagcacctg

SEQ ID NO: 63563 - DNA, 371 bp, Zea mays
cctttaacaccgtcttgaatcttttgataatgagggccatttcttcttcattaagaccggcgcgcctcatttgcgccaccttgctgggtagcgccttcctggtccctgtggctttgagagcataaggttgcggctcgttgatcggtccatacaagggcgtcgtcacataccttgcattcttgatcattattcgcccgctgacgaattttcctagtacttcctcgcgcgacatttggtgacctgtgattctcacgaatattattcacctaatgaggatcaagaacggtaaaggacctgagcattaatcgactgacgtgtggtccgacatcgcgtgcttcgtagctcttttttgttgacaggacttggccgtt

SEQ ID NO: 63564 - DNA, 373 bp, Zea mays
actcagcttccagatgtaaagaggcattctatgattgtgaacttcttttgtttgtttactgtggctgttcctggttacctgacaaaaatgaatgggtctgttcactggtgggtttcatctaataaatggccgaattggctcttccaactatggagactcttgtagagggataaaagttcttacttccagcagaatttcataacttttggttcaccacgtttggagatatcgaaatttaaagttaaccatactgctgtctaaaacagaatcagtcagttatcttgtcagatgttttataacttgtagatggcacaatttaattatctattgaatactcgagctgtagagcatattgtgtagatactcctagagt

SEQ ID NO: 63565 - DNA, 410 bp, Zea mays
cacgaagcaaccgacgcttatgcaagggttttcaagcaatccttgtcgcataaccaggtgaaagctttggctgacctctatggctggacccctccacctgacctggtgtattaaatattttggtcaccccgcttcttcaataaaatcttgtgattatatttcatggatcccactatacaagctggaatggaatgtgacgtggctgatcttctttgttaggctagacataaataaggagttggaggatgcttcccaagctgaagtagtatgtttccactagacaataatgcagatcattactaggacgactatttttgcaattgtgggagctggatttcagaatatgtgaccttccatctggtggggagtggggcattctgttggttgaagagactacaggtacacaggac

SEQ ID NO: 63566 - DNA, 400 bp, Zea mays
tcaagcgcttctcgcccgggaagaagtcgcggctataaaccgttcttgtcccgtcggtggccgaaagggcgaggccgatgctgctgggacctcaactctggcgagggcattgctttccgcatcggtggcgctagacacggtgccgactgttgggcgcgcattgccgcgacacttctttgaggtggatgccctcgaactggccccccgcctactcggcaagcttcttcggtgcgatgaggttgtcctccgcatcaccgaggttttgcttcttcttcacgagtctcgcgtctttcttactatcaagagtgtactctgctgaagagcttccagctaaatttcccttgctgtgcgtagtagacctatcttatctggagaattctcctctctatgtatgtgctga

SEQ ID NO: 63567 - DNA, 391 bp, Zea mays
catatgtgctattctgcgatgccacagccagcccatactagtcttagcaattaagcatgcatctagatcggcctcctcttttgcaaaatcaactaaatagagattgccggctaatacacccttaaaagctagtgaaccatcacttcttttaaagacagacacatctacatttgtgaatagacaattatatcccatattacataattgacttacggataacaaattatatccaagcgactctactaagaatacattagaaatagagtgctcatttgagattgcaattatgcctaagcctttaaccttgccttgattccgtcaccgaatatgattgaagtctgggaatctttattcttgacgtaggacgtgaacatcttcttctcccccgcat

SEQ ID NO: 63568 - DNA, 421 bp, Zea mays
agcttcgattccatgctcttccgtaacaaatggctttaaccatagtagaaacaaagggtactcgtttccacgaacaattttgtgctgtagttccttgcctgcaaaaaggtgcttggcaaaagagttgaatggcatgtgacagcaaggtgcgccaccaagctctacgaatctcaaaaactcactagcaccatctgcataccactcgaatcttcgaacagcagatctgctggactcgtagttgttgtggccaaaggcagagaaaatgaaagaattggtagcatgcgctattcgtctaggaaagtaggaattcctaacctcctgttccatctgttcatcttcaaggatcatcttcttgtatttgtatagcgtgtcatcacactcttgagcagctcgcttcagcttcttgcgccaacgcaacaac

SEQ ID NO: 63569 - DNA, 362 bp, Zea mays
  unsure (1)..(362): unsure at all n locations
tatgganactatccaaccaaagcaaaacggcggcggcggcgggatggagcaacaaccttccagagcctgatgacgggtgcccactcggtctcgagaacggcgacgaagactgagaacaccaccgcgtagcaccggaacacgccgccgatgatctgaggagcggatcagagttcagaatccggaaggaaggtcaccaatagtcagccggacggccggccggtgatgaggaggacagagggggtgtcggtcagattacgtacgtcagcgccaccgcggaaggagtataccgcggagaggacgttggcggcgacgcaaagcagcgcggcggcggtcgtgacgacgccgaagaagcggcacacgat

SEQ ID NO: 63570 - DNA, 432 bp, Zea mays
  unsure (1)..(432): unsure at all n locations
agcttagcagacaatccgaagctcaacagatggtgatgaagctcgaatacctagctgtggaaaaattctaagaaaactcttgtattaacctttataaagaatattgtaacttaagaatcagattctactctgtaaatntgtccataccttgtaatatatttttacctttccatcgatgtatgaaatgctttgatgtggacgaaacttgtatttttttgagccgaaggcaaaaaacaccttcccttcttttcgtacacaacgaagcatgaatctgctnttgaagctgtatgcttagagccgaagcaactgtctgtatctgtatgatatgatgatgatgatgatcctatgtatgtctaaatgaatggttatgaatgcaatgtatgatgtaatgtatcgtgcanatgaatgcccaaacacacacattcgaagctt

SEQ ID NO: 63571 - DNA, 432 bp, Zea mays
  unsure (1)..(432): unsure at all n locations
tctactttcgaagctgcagcagccgaagccacaaatttggaaaacacactttctgacattgatgaaatgatattgaatatggctgaggaagaaactgctgcagctgctgaggaaaccccggctgcagtgcctaaaaaaagggagaagatgcctggaaaagagaaggagcttgccgaagatgcttcggaagaaagaaatttcaactttcaaaacataattgggcaagagttgtctaaggctgaaaagaagagctgagggactatgctatatcttgcggctataaaccaggagcattgctcttcggtggtgttgccgaagagagtttaagatgccttcnggactgggttggggcgaaggttgttagcaccctatcgaanagtgttagtttcccgaagctcgaagccgatctcagcagataccgatggcagcata

SEQ ID NO: 63572 - DNA, 430 bp, Zea mays
  unsure (1)..(430): unsure at all n locations
ctgcagctcggaagaatttctgagctcacttcctaagatcaatagaggatctccttgtgacttagcatgattatcccccttttcaaaacattcttctgaagatcgatattgtgtccccttcttgtgccatatgccgcatgatgtatgatgcttatgccatgcgaaatgatgtgatgatgttatgctatgtaagatggtatttattccgaagatacacgcacatncctgttataaaacacataatctttttaaatcaacgttgacttttcgatgtaagcattccttaagagcttcttcgcttttacttcagcggaatcagcgtttatttttcgctgaagccctccttatgagcttcttcgccttttactttcagccgtattcggcgtgacttttcgcgcttcggcttttacttaagcgggatcacgcgtta

SEQ ID NO: 63573 - DNA, 434 bp, Zea mays
  unsure (1)..(434): unsure at all n locations
tgctagtacttgtcaaaacaacaacatctaccagtgtagcaattgtaaaccatacccataacttggccgctcgcatgctggggattggatatgattggacctttcaagaaggctcaaggaggatacactcatgtactggttgctatcgataaattcactaaatggatagagttcaaacccattgcttctctaaccttagctaaggcagtggaattcatacaagacataatattcacgtttggaataccgaatagcatcataaccgacctgngatccaatttcacaagctcagagttcttcgatttctgcgagcaaaagagcattcagatcaaatatgcctcggtggcacacccaagagccaacgggcaggtagaaagagccaacgggatgatattggaagcactcagaaagaaagtcttcgataagaatgaaaa

SEQ ID NO: 63574 - DNA, 434 bp, Zea mays
  unsure (1)..(434): unsure at all n locations
ctccatctatattatggatngccttggtttctttccaacttccttcggcccttctggcagcttgctgactcccatgaatagcaataggcccttggtccgaaggtatcttcatgcatagataagctgggtgaagaattgcttcataagcatttatagtaccacgaccaatgatggcgttgtaggggtattccatgtcaacaatatcaaacacaatntgctcagtccttgtgttattaacaaatccgaaggttaccggcatggtaatcttcccgagtgccacaatctggcgccctccgaagccacaaagagggtgcgtagcatcatgaatcttgtgttcaggctcttgcatctgtctgaaggctctggcaatatgatgtcagctgcactggctgtgtcaactacgacattgtgaaccataaaccctttgacacaca

SEQ ID NO: 63575 - DNA, 332 bp, Zea mays
actaacaaatggtcattttgataaagacaggatttgtattgcatgtcacgcacggaagaaagttggtgttcatcattcacacaaaaacatcatgacgaatgacagaccactcgagctcctacacatggacctattcagaccgatagcttacataagcatcggcggtagtaagtactggctaagtattgtggatgactattctcgcttcactcgggtgttctttttacagtatacatctcatacccaagagaccttagaaggaatcttatgacgggctcacaatgagttcggcttatggatcaagataattagaaacgacaacgggacggagt

SEQ ID NO: 63576 - DNA, 386 bp, Zea mays
ggctgatgttgttaaactgttacgtacatatttcctggaagattatgtattaaattttctcagcaccctctgcatttatttctacacattttgtgattatcagcttatgtagttacacgcgtatgattttctgtatgtgctcaatgtatgtctatgttaagttagcatatttaggttgaaggctaaaacttcagttatacagaaattggcttatatccactggttattcactttctctgcaacctttcttagctggtttcgaatatctattatctattgctgacaagtgattcataatgatgttttcaatactatgctagtatgctacttagtcgtggcatctgtcagttattgtcaaatctatgacctatggataagtacctagc

SEQ ID NO: 63577 - DNA, 490 bp, Zea mays
tctaaagggagaacacgtgataggtttgactaacgtgcaattcgtataaggatagaccttgtgcagcttgtcaagcaggtaaacaagtgggaggagcacatcacagcaagaatgtgatgaccacttcaagacccctggagctgctgcatatggacctcttcggacccgtcgcctatctgagcataggagggagtaagtatggtctagttattggtgatgacttttcccgcttcacttgggtgttctttttgcaggataagtctgaaacccaagggaccctcaagcgcttcctcaggagagctcaaaatgagtttgagctcaaggtgaagaagataaggagcgacaacgggtccgagttcaagaaccttcaagtggaggaagttcttgaggaggaatggaacatacatgagttctctgcttctacacaccacacgcaaaaggggtggtagagaggaagaacaggacgctaatctcatggcaagactatgct

SEQ ID NO: 63578 - DNA, 443 bp, Zea mays
  unsure (1)..(443): unsure at all n locations
tttganataaatgtaagattatgtaattcgcttccgcatttctttatctccgacgttctgcaatgtctgcaagacgggtgaaacctctctggtaaggtaaggaaagataccgaacttgtcaagtgacttaggggcacctacagggttgtctgaagtccgttggacaaggacaactgtaggtgggcctaattacttgggaggttctgtcacagctggtatcggagcgtagcccttcttggcagatattatgaggcatcttctaaaggatttttaaaagtcttacctaaaaattcttttcttttcttacctaagtattctgaagaagtctactttaaagaccagataggaagagngcaacgtataaaacgttgaatcgactaaggttgattctgtaattatacatgcatcatgctaagaatcttactaataacatttttcccctt

SEQ ID NO: 63579 - DNA, 455 bp, Zea mays
  unsure (1)..(455): unsure at all n locations
tacttgtcaaagcaacaacacctgtctttcattaactgcagaccataccagtaacttggcccttcgcgtgctggggactggatatgattggacctttcaagaaagctcaaggaggatacactcatgtactggtagcaatcgacaaattcactaaatggatagagttcaaacccattgcttctttaaccttagctaaggccgtggaattcatacaagacataatattcagattcgggataccaaacagcatcataactgacttaggatccaacttcacaagttcagaattcttcgacttctgcgagcaaaagagcattcagatcaagtatgcatctgtagcacatccaagggccaacgggcagggtgagcgagccaacggaatgatattggaggcactcanganaaaggtcttcgataaaaatgaaaaatcncacgaaagtggataagggaattgc

SEQ ID NO: 63580 - DNA, 393 bp, Zea mays
  unsure (1)..(393): unsure at all n locations
actcagcttaaagatgaacaaggtgatgaggataggaaaaacaaagttattgtctatggtttgaaagataagataaaaaaacttgaggattccttaaaagaaaaagatgagttgatgtgctcagccgaaggatcccttgccgaagtgcagactgagaataaaaaattgggcaaagagctggcggatacttagacacttttggaagacagcttcagccaaatcaaccgtgaatctgaaactttgaaaatgacacttaaggttgaagctgggaagaacacgaagcttagtgaagcgctaagagctcttaaagagagatgttntagctgtgcaagccaatgcaccactcgattgaaagcatattcattcagttagagctacatctaaagaagctag

SEQ ID NO: 63581 - DNA, 461 bp, Zea mays
  unsure (1)..(461): unsure at all n locations
actcctcctggaagggccattcatcattttcttttattgaagcccgagacatacaagctggccaacgatcaaggcgaggtctacagcaatgcttggaacattgaacagctacgtcgcttttacccttaaaatgtttcaagtcattcatgtacctcgggccctttacatgtataaataaaaagtctaaccatcaagggaggatcgacctttgcctagcaaaaaccgacccttcctcgggggctagaagggggaaccccctctgcgtcaaaattttcctcggaaaaagtttctatcaaaacgactttcgtgcctttcgactatatcgataacggaatcctaaaaaacgagcgagagagacctcgaacggcaaggctgaccgagccaagggactcctacgcctctaggatacngatacctcactcatcaccttccgcgaaaagtaactcgcgctcagataagtg

SEQ ID NO: 63582 - DNA, 350 bp, Zea mays
gcttagctcctctatgttatggattgctattgaatctgtccagatttcttcggcctttctggcagcttcctgacttccatgaatagcaatatgcccttgatccgaaggtattttcatgcaaagatatgttggatgaagaattgcttcaaaagcattgagagtaccacgaccaatgaatgcgttgtaagggtactccatgttaacaatatcaaacacaacttgttcagtccttgtgttgttgataaatccgaaggtcactggcatcgtgatcttgccaagtgctacaatctgcctttctccgaagccacaaaggggatgtgtggcgtcatggatcttatcttctggctctt

SEQ ID NO: 63583 - DNA, 424 bp, Zea mays
ctccatctatatcgtctcaggctggtgaaaaccatctgtaagtcttcaatgaagttctccgaactctccgttttgattaccacatcatctacgtaggcctccacacgcttgccccagtgatcggctaagcatgtttgaatggctctctgataagtcgctccagcgtttttgaggccgaacgacatggaggtataacagaaagcactaaatggagtgatgaacgccgttttttcctcgtcttctttcgccagactaatttgatgatacccggaatagcaatctaagaaagacaacacagaacatccagcggtggagtccaccacctggtctatcctcgggagcccgaagggatccttctgacagtgtttgttgagatctgtatagtcgacgcacatgcaccaatccactttattctttttgagta

SEQ ID NO: 63584 - DNA, 295 bp, Zea mays
aacgatctatggttctagagttatctggtcttcacgcgggattgcatatgactgtggccactctgaggtgagcggtacgggtgctgagtcccaacgggagcggtggaaccaccatccagaaaacgacggtccgcgcgctcagcccgcatcatgcgatctcagcacgagccctactcagctcgtttaatgcatggtccacctccgtgtttagaccggcggctaggttgactgtgctgttcaacctatgattgccatcaccgacaggtgagacaatctcgccttctgtgttgtcaga

SEQ ID NO: 63585 - DNA, 419 bp, Zea mays
  unsure (1)..(419): unsure at all n locations
caccgcagcagcaactttaaaggagaacacattttgttttctattgctccttctgagaaagacaggatttgtagcgcatgccaagcaaggaagcaagctggctcccatcaaccacacaagaacatcatgacgaccgacttgccgcttgagctactccacatggatctattctgtccgactgcttacataagcatcggcgggagtaaagatatggcttgtaatacgggatgaatatnctcgcttcacttgggtattctttttaccggaaaaatctcaaactcaagagaccttaaagggattcttgagacgggctcaaaatgagttcggcttaaggatcaagaccataagaagcgacaaccggacggagttcaagaactctcacattgaatgctttcttgaagaggagggcatcaagcatg

SEQ ID NO: 63586 - DNA, 384 bp, Zea mays
  unsure (1)..(384): unsure at all n locations
aactcagcttgatagctgtgaagtgaagaacacacttctgccattattttccgtgatcgnccagcgacccaacagcgagcgtcatgcccacttgtctgaacgcctgaagaccgacgacgccaaacgagggctcacccccttattcacatttctggaagccatacagtccctcttctcatcatttcgcgtctccagatctatgccatacccttttaatctttataggatattgctgaattttctgtgttgctgcgctgctagggttgatgtcccaccacagtatctagaggtccgcgctgccgtagctaaataaattagactccccatgttatcagcacaaacgttggtacacaacaaacaaagctctaggatttactgatgatc

SEQ ID NO: 63587 - DNA, 451 bp, Zea mays
  unsure (1)..(451): unsure at all n locations
agctttaccaaatggacatgaagagtgtctttcttaatggaccaatcaaggaagaggtctatgttgagcaaccttccggctttgaagatagtgagtaccctaaccatgtttataaactctctaaggcgctttatgggctcaagcaagccccaagagcatggtatgaatgccttagagatttccttatcactaatggattcaaagtcgaaaaggccgatcctacactctttaccaaaacacttgaaaatgatttggttgtatgccaaatttatgttgatgatattatatttgggtctactaacgaatctacatgtgaagagtttagtacgatcatgacacacaaattcgagatgtcaatgatgggggagttgaagtatctcttacgaattcaagtgaagcaactccaagaacggcaccttctaagccanatgaagtatactcaagatattct

SEQ ID NO: 63588 - DNA, 368 bp, Zea mays
  unsure (1)..(368): unsure at all n locations
actcaagcctgatatacctatccaaaattaacaatatgtcattggttgcagtttatatatnggaagatttatttcagcgattggctctatagacctaatctcattggtcagtgtccaagccaaagaccaaaaaacaaggacatatcgtagccctgccaatattgagcaaatgtagcgttgaagcccactacacctagttttcttggagcttggaataattcattggtgcagttatatggttgattataccttccaacggacttgaaattcaacttgtagcatatatcgactntttccaacagaccgctataaaatgtgactaggagatnttaattctagacgtgaattcgatgatacaattagataga

SEQ ID NO: 63589 - DNA, 261 bp, Zea mays
attgtctgctgacttggcccacagtcactagacccaaggaccttgggggtctgggtattaatgatcttctgatcatgagctgggcactgcaggctacgtggccttggctgcaaaaattgataggactaagccatggtcggactttcagattacaacttgcgacattgtgcaaagcttgatggctgcggctgttatcactcatttgggagatgggtctgatactctgttatggaacgatccgtggctgaatggcaaatgtat

SEQ ID NO: 63590 - DNA, 393 bp, Zea mays
  unsure (1)..(393): unsure at all n locations
tctataaactactacttcgtcagcttcaggcagagggacactatttttttccccagccctcacaattgagatatcacgaaagtaccttcccctcattgcatcaatttgcccttgcttgatagatgatttcccgaagacaacatggcttggtctctacggccgatcttcgcatcttcattcccgctttctacatcaaagctttcactatcactggaactctcagatatcccagctaacatctcatgtgcaatcttctctgcgttggatttttccatagcttcataaaacccggacagcgtcgggtcaacaaccttcttctcatcagccattagtcgatgtntgttgaaatgctgaaggttaaaatccaatcaaactcaacaaagcaagtaagtt

SEQ ID NO: 63591 - DNA, 395 bp, Zea mays
agcttggtcgcaacatgagagctaagagcgaccctttgtttgcagaatatttgttgcgtgtcggtggtggaactgaggaagtgaacaacgatggtgatgttcgtcttccagatgaggtatgtgtgccatataccggtgatgaccgtgaccttgacagattgatagatgacatttaccccagtctaaacgaaagcatgtctaatacaagctacatcacttcaagagcaatattgactactcggaacgactgggttgatatgataaatatgaggatgatcgatcgttttcaacgggagcagatgatgtaccatagctttgacaccgcggtggacgatcctaataactattatccatcggaatttctaaacacgcttgactctaatggactacccccg

SEQ ID NO: 63592 - DNA, 475 bp, Zea mays
  unsure (1)..(475): unsure at all n locations
tctaaagggagaacacattntaggactaaccaatgttcatttttataaagacacggattgtagcgcatgccaagcaaggaaacaagttggcactcatcatccgcaatagaacataatgacgaccgacaggccactagagctcctacacatggatctattcggcccgatcgcttacattagcatcggccggagtaagtacttgctaattatttgggatgattattctcgcttcacttgggtattctttttacaggaaaaatctcataccccagagaccttaagggattcttgagacgggctaaaatgagttctgcttgacgatcaagaaaataagaagccgacacgggacggagntcaagaactctcanatngaatgtttccttgggaggacggcatcaagcatgagttctcttcttcctacacacctcaacaaaatggtgtagtggagaggaagaatagaactctaatggacatg

SEQ ID NO: 63593 - DNA, 468 bp, Zea mays
  unsure (1)..(468): unsure at all n locations
gcttcttcctatctnctggctgacggatatctctttgttattcgggagacagtacaaaaaatcttcctccccgctgccattaaacactaatgccccctttgggtatttcaatttttgggcataatggtgaacttctcgtttttcttccttagaaagtacctttcccgaagcatgacggataatgtaatcaatgctctctttcaaagcctcaggagcaggagtggcaaccttttcaggcggaatttgctctgggggtttttcttctggtgctttttcttcaatttccgcaggaattatctcagcgggctctgaaggcccaactttggcactagcttgaattattgcagtttcaatttcggccttgctctgttcaacttcaggttgcgccttcgaggcttcggcaattntctttgaaggagtcgagttcaaagtatttactgtttctagcacatctaatacattagccat

SEQ ID NO: 63594 - DNA, 379 bp, Zea mays
gctggatagctcccttctattataatatatggtcgagctctggcctctatccttttgttataagcttcgccatctgaaagaaagtaccctgaaggaaagagatgatctcagttcttcagtcttcactataaacaggggatatgttgaggaccgctctttcaagaagctcaaccgaaggtgcttttattggttcgaaaaatacttccgaaggtaagggcagcccctgtgctcctgacttagctaataaatcagcatattcattttctccacgaggaatatttttaacagaaaagccttcaaaggaagcctcaatccttcggaccgtgtctaaataattttcaagcttcggatctcttgctttataacttttatcaatatg

SEQ ID NO: 63595 - DNA, 470 bp, Zea mays
  unsure (1)..(470): unsure at all n locations
gcagcttaagtttgaggggcctatattgcataggactcttttctttctcaatcaaggactttgcaacccaaatttgtctaggtctactcttgtttggtggacctatgaatgtaactttgaccttcccatttgcgacctttcttaaaacataatgagcattgaaagcaaatggtcttgagtgcttaagcaagggaactggtggtttggctatgcagttgtgggcaaaatgaccttcatttccacactcaaagcatttgataggcttgagagtctgcttaggctcgtattgagtagtagctatcttttgtacaanagcattgtatccaataccactcttgttgttntttatgacagtgttcataagcagctcatnttggaggtattgacccttgttgaactttngcacacttgttgcaagatgttcattntcactctntagtatctctgacctcattttaagcctttcatta

SEQ ID NO: 63596 - DNA, 403 bp, Zea mays
  unsure (1)..(403): unsure at all n locations
atttctaaagccacacttctcaccaaaacaaaatggttgctcatcttctattaccatctcagcaaaggcatctctaagcgcttcttgatcaaacctccaagtggcaggagcttccccatgacatgcttgcaaggtgccttgcttcgagtccttgttgaaaacatgaggattgtgtttgcatgtaccaaagtgtttcttcaacgcaaatgttccatgcccccttgtgtcagccttgatttcacggtggcaatatttgcaccttccagcctttagagacccttngtcattcttgatcttgataaaatgtgtgcacatctcagaccttgaagccacctcctctcgactttctctttctccttctttttcacattaatgaccattntttattggcgtcagttttgtc

SEQ ID NO: 63597 - DNA, 473 bp, Zea mays
  unsure (1)..(473): unsure at all n locations
ttagagccacctgcngcatgcaagcttcattanggtgataatggatcacgatcgatattattcttaataatatgatagggcactaaatatattntagttcaaaaataaatagaaatagggcctgataataatccgattcgatcttcaaatcttatattgtaaaatttagagttcattgtcatccattagcttactcgaaatctattttattagtagtctaataagaaatatgagcatgtttataggatcagtccagcgacaaacctctagggaccaatgttagcatctagagaaggtataccctcaaatgtttgtcaagacacattcgagaattccatcataaaaaccatcatggagctaggaacctaccctatctcccgctagggcagaggcctaatcctctatcaaacttgaccttangacaaaggaataagatgtccatcatatcctgccataacaaccccctaggagcc

SEQ ID NO: 63598 - DNA, 401 bp, Zea mays
  unsure (1)..(401): unsure at all n locations
tgagcaccgnctggtccaccgggacgcggccacactcccccgcgccgtgcgccgtattcagccccgcgaagctggccaccaggagcatcgcgacgacgcagacgcaccttgcctggagcttcatatttttttttcttggtgcctggtagtgcacctcacgctctgctgccttggctgcactacactggtggccagatacccctgagattgtgtaagctcttccactgtctgcagagtgaaagcttcttctggactgtctagcgcagaagataactggttctctgcaatgatcacattggacagtggtttcttgaaggtgtttatagcatcctctggatcctcctttgctatagatgcctgcaattccaatggctgatgggtatttttggaatgtcacaatg

SEQ ID NO: 63599 - DNA, 239 bp, Zea mays
cctgggcattccctgttatacatacaacgagaggatccagctgtacatacggcggtgtagctatgtgcaaacgaggcatgtcggagaaaagcttgagccctgtagaagcgtagctggcagtgcaacttggggtcctgctgaccgttctttgccttcgtagaaagttgagaacaatcgacgtcatggatgcatgcagggaaccatcattacctgttgtcggagtaacctatatgggacac

SEQ ID NO: 63600 - DNA, 169 bp, Zea mays
gcttgtcagtgcctccggacatgaaaatacctcacgcgtatgtttgaggttttatactaaggcacagcgcaacggtcctaagagaatgtattgatgcatgattaagggcttcgggcggaactacagccaatactttccaggaaaccccctcagacctggagaagctgtt

SEQ ID NO: 63601 - DNA, 188 bp, Zea mays
atgatcggcatgatacgtatcttggatggaacttacaaccccaaagcctaatccgcctgcactctgaactttactatatgctcgaaaaccctgactactgagagcactctgaatgagagatatatatgcgacgctagagcataagctgttatgctctatgcatagtcacgagcactacatgagcgttg

SEQ ID NO: 63602 - DNA, 463 bp, Zea mays
  unsure (1)..(463): unsure at all n locations
agcttcttcacgacgcgcgcgtggatattttgtatatgttaacaangcgactnctgctcagctgtcgttgcttcttgatcccacacaatttcttttgtgaccctgcagcttgatgcttattcaaacattggctttcttttgaacaacagggattagcacatggagatgaattatctaaatgtgtactcgagcaagaatgaagttcacatgaatttaagttcgcaattacgacctcatgagcaacttcaagcatgatatgtctatccaagagattatcatgataacaagacaataagtcatatttttcagtaagagcaaggctatcatgacttaacaattctatttgattcctaagcatagaatcttcaattttaagttgagcagcattagataatacatcatgattatctctttgctcaattaaaatcgattcataccgttggaccnaattcccatgagagta

SEQ ID NO: 63603 - DNA, 321 bp, Zea mays
ttcccctttttcataacattcttctgaaggtcgatattgtgttcccttcttgtgtcatatgcagcatgatgtatgatgcttatgccatgccaaatgatgtgatgatgttatgctatgtaaaatggtatttattccgaagatacacgcacatccctgtaataaaacacataatctttttaaatcagcgctgacttttcgctgtacgccatccttatgagcttcttcgccttttacttcagcggaatcagcgtttatttttcgctgtaagcctcccttatgagcttcttcgcctttactatcagacggattcgcgttgacttt

SEQ ID NO: 63604 - DNA, 451 bp, Zea mays
gctggatattcttcatcagaacactactgatattgttataatttttcttcacgaagcatgaatagaagggaaggtgtttttttttcgtcaaagactcaaaaacggtacgtatgtaaaatttcatgcatcgtaaagaattgaaccataaaaacaagtatattatattcaggattacaagatgttacacatattacattctagaagtttttacaatagcacttaatcttctctaagtacaacttccgcagcttcgttcaggagccgattaacaacttcatccatgatagcttcagccatctttttaatttcgtcgtctcctttcgggtgagggcccggagacgctttagtaggatctgaaggaggacaggatacggctacattgctattacaaattgcgaacgaagttaaaaccaaaaattacaacacaataaaaaccattaggtaataccta

SEQ ID NO: 63605 - DNA, 444 bp, Zea mays
ttagagacacctgcggcatgcaagcttgaaaataatgctgaagcttcctggttgcctttataacagcatacagtactttctccaattctgtataattattctttgataaactaagaacttcggatacaaaatatattggggcctgcttcttgacttggccttcaagcttctcctggacaagtgctgcacttaccgttgagtgcgaagctgccacatataataacaaaggagcccctggcgttggtggagttagtgttgttagatctatcaaatactgcttcagttcttcgaaggctctctgctggactggtccccattgaaaaacttcggctgacttcagcacttcgaaaaatggtaaatctctctctgctgatctagatatgaatctgttgagagatgccagccttcctttcaatctttgagcccccttctttgtacttggtg

SEQ ID NO: 63606 - DNA, 413 bp, Zea mays
tcgtcctgaccatacttttgtatactcataacccgattccgaatatacctgttcacatatttcacttggaaaacattgtcaaatcatgtttttgaggaccttcggaagccgaaggcccccaacatgaccctaggtcattagactagttataaatagaaagcctagtttgttcaaaacttgctaatttcattcttataaaattattttatcaaacttacctctttaaaattccaccgagttgacatttctcttgtagatggttcgtactctccaaaccacccgagttaacaccagctacgcccctccgccttggaaattcctgtctacccagtggtagtagaggaagttccggtggatctccctcgcattcgagtggagcatggagtcatcctggaagatagctcggaggaaca

SEQ ID NO: 63607 - DNA, 419 bp, Zea mays
  unsure (1)..(419): unsure at all n locations
agcttcnggcgactcgccagcgacctctgcagcattattcatggtcccaggacggacgcggccaccggaaggctctcgttcgcgtccccactcaagggacgcgaaccagatattaaagccaaagagccgagggtcggtccgtaggcgacgctgacgacctcgacggtggggaagctttctccagctgccaccacatcagcaccgacggcggcgtccgcctctccaccaacgtcgcaccggcgagcacgggccgctccaaagcgcaccggcaggtcctcgctcccgtcctcgccacgaaagcgaggaggaggacggaatgttgcatcctagctgggcagcaacagttcgccttccccagcatggctggaggacgccttctncgcagagctagaggatggtctccaccatcagtagctgga

SEQ ID NO: 63608 - DNA, 329 bp, Zea mays
  unsure (1)..(329): unsure at all n locations
agcttgccagcccttgacccaccggacttacctgatggccgatatttacctcaccggacttcgggctttcgccgccgcgcgtggaccgagctatccagtgagtcttcgaccaatttcttgcgctcatagcttctctggcatcccgtggacctctctgacctatttgattgaactatctcgccgngaccaagccggtcatctcgccgacgacgagcattcccgactgcacgcgtggaccgaccgacttcggccatattcgtcgacgttacgcacaccgatgtgatcctcgcgacctacccttcattcttgaccacttcaccggaacagtc

SEQ ID NO: 63609 - DNA, 462 bp, Zea mays
agcttggaatgctttgtattccgcggcttcagtattaaaacttcaaatgagccgccttcctttttgctttcctgaaaagacaccctgcctacattttatctgaagaatagggaaataatgcgactatattcctacattgaccggtactttgtgtagtaacatggagcatctcattcccatttctcaggatatggtggtgatgtgtggttcccacagccagcaccaaaggatcggatcacccctggcgctatatgcctaacaatgccatgacccctcacatctctgggactacaattgatgcgcaggtcaggttctgagttttgtacctgagtttgaaaatctatctaattctaatacctcataggacactaggtctctgcttcatgcattagcagaactcaatagaatggcaatcaccttaaggctttactggattaaaattgtactgagaacctgaacact

SEQ ID NO: 63610 - DNA, 393 bp, Zea mays
  unsure (1)..(393): unsure at all n locations
ggatatgtcgnttacagataagttgataaaattagcgtcatgatcctcagagaacggggtatgataatgaccagaaatgactgatttacgcttatcaacatccgatgcttgtgaatgtggtattggagataaccagataacgatgcagattcaataagggatcccatgattcggatgataaagccaacatgattcatgagaaacaggattaccacatctatgcataaggagagaaaggcaaataggatcagctatgatgattaacagatatgcttatgaagtttaggagctacgatctatggagagaaacatggttttgatagggtctgcgcaactagacaccaaacgacattgttttgacactacaagtgcacaatgagacttgcgtcggtc

SEQ ID NO: 63611 - DNA, 410 bp, Zea mays
  unsure (1)..(410): unsure at all n locations
agcttggtgccaatggagaagcagatatccttgtagttatggctgtcaaattgcttgccattgtcaactgtgagttcggacgggactccgatgcggcaaacaatgttttgccagaagaacttctgggcagtcttcgatgttatcgtggatacagccctcgcctcgatccacttggtaaaatactcgaccgcgacgaaggtgaacttgaggttcccctgggccatgggtaggggcccgacaatgtccaggccccagcgctgaagaggccacgtgtgggcgattagctntgtgaattgcgaagagcttcccgagcgtggagaaaatttctggcaggcttcgcaggaccttgtgacccgatttgcggcgcagatcatggcatgccaatagaaaccttgacggatcacctttgc

SEQ ID NO: 63612 - DNA, 394 bp, Zea mays
agcttaatactgctaggaggcatgcattgaagtttctgctcactgtctttcactccttaagaagaaacctcccattgttctattcttgacatgatgagctagtgtgtgtaagaatgccgctactatctctcccaatggtgtatttcttgtacccctcaaaccaccaatatctctaagcatatcacacaatatatgaaatgttctcctatccatgcgaagggcatttatacacttaacatcgctctcacagattagatggtacatacgttgtcttctaaggtctttaatctttatcctcctttctatcttccaacacttccacttatgtgatagtactaataaagcccagatataatagtacataagcataatggcagatgtcacatttctaaat

SEQ ID NO: 63613 - DNA, 412 bp, Zea mays
  unsure (1)..(412): unsure at all n locations
catgcaagctttaccaaatggacgtgaagagtgctcttcttattggaccaatcaaggaagaggtctatgttgagcaacctcccggctctgaagatagtgagtatcctaaccatgtctataagctctctaaggcgctttatgggctcaagcaagccccaagagcatggtatgaatgccttaaagatttccttattgcaaatggcttcaaagtcggaaaggccgatcctactttattcactaaaactctcgaaaatgacttgtttgtatgccaaatttatgttgatgatattatatttggatctactaacgagtctacatgtgaaaaatttagtaggatcatgacacanaaattcgagatgtctatgatgggggaagtgaagtatttcttaggatttcaagtgaagcaacttca

SEQ ID NO: 63614 - DNA, 358 bp, Zea mays
  unsure (1)..(358): unsure at all n locations
atgtgctatgtggcgatgcctttttctgcccatgcttgncttagctattaagcacgcatctacaccggtctcttcttttgctaaaacaactaaataaaggttggcgtctaatacaccctttaaagctagtgaaccatcacttcttctaaagacagacacatttacatttgtgaatatgacagttatatcccatattgtgtaattgactcacagaaagcaaattatattcaagactctctactaaagatacattacagatagcatgctcattagaaaatgcaattttacctaacccttataccttggcttgatttccatcaccgaatataattgaatcttgggaatgcttattcttgac

SEQ ID NO: 63615 - DNA, 462 bp, Zea mays
  unsure (1)..(462): unsure at all n locations
gcttgataatacaacatatccgaaggtgaagggttattttacttaaagatagaatgaccttttagtccataaaggtctgagtcaattatgtaaacttttatgaggggcatgattgtaattcctcacaggctgtgtcttgtgcctataaatagtgaacagtattcctttactgttcacgcattcctgcaattgcaattgcatcactcggaaattattctttgccaaggcagaggtataaatgtatctaacatttgaatacatcaagtttgtataatatgagaatgatgttgtttatttataatttacttgtcgttaatgcttcatatctcanattattntatacaatctctgagagttcaattacgaagattcaaccttcgtaattgtaccgtctttaaccttcgtccgaagttcattaaatccttaaggaaataatgcttcagcggacgaagggcattaaca

SEQ ID NO: 63616 - DNA, 276 bp, Zea mays
  unsure (1)..(276): unsure at all n locations
acatccttactatgtataaagatatctttaaaatcagcatcatcgacatattgtctttcacagtttgcagcccaagaattctaaattctactgtgaaagcatggtatatttatgggacaacgcatcagcaatgacattttccttctcggtaatgtgtntaatgatgtaaggaaaagactctatgaattctacccaactagcatgacgacaggtcagaattgtttgggtacgaatatgttttaaagcctcttgatcagaatgaattataaacttgcg

SEQ ID NO: 63617 - DNA, 408 bp, Zea mays
  unsure (1)..(408): unsure at all n locations
ttacatgcgnnngaagtgtgaagactgaatctgtccagttttggacagcacagccttcatagtatgtgttacccttgatacatgccaaaccagccagagattgttataaataatttgtagaacatntaattagctttccagaaagtccaggatcacntttgttggatgcctgaatcttcagttgtgaatttatgaagttgcaagtcagaatctgtccaaatctggacagtgctgctgtaattgcactttntgaccttgctaacagctgaatcctgtggaggtaaaaataccaaagttgtagttcacttttgaagctttccagaaagtcctagtttgctagttctggataatattttgaaagtatgattaaaaaaacaactgctgattgctgcctaaattctgtagtgc

SEQ ID NO: 63618 - DNA, 410 bp, Zea mays
gactgggctggttcatatacctagggcggcgcggtaatatcttaatctttctgcctttccgcacaacagacatagccgaagcaacaaatttgcttctctttccctgctttccggagggataagcggagtccaagtacactaagccgataacgtcaaaaactttgttcaaccctttcttggctcgtcctctgaaggctgaggtcaaggcatcatactccgatctcgtgtacgccctcagcaactcatcgctagtcgcctcaacgcagactagccagtcatcattcagcgtcgcgaactggactctatatctgaaggtgtatttcaagtataccataccaccttgactagacccagcagcagtctccttcggcatctccagtcattcacaagaggcacactttatatgctat

SEQ ID NO: 63619 - DNA, 447 bp, Zea mays
agtcacctgcggcatgcaagcttttccttatcgtcatcagacctgacgtagaatcattcctatttccaccctgctgcccatttgcttcggtagctgatcacaggatacttcgtagttttccgataagcaaaattatagcaaccaaaattctcatgtaatccatcttttctagcctttgtctgatagtgcaattcgtgaacccggcaaaagctgtccgcaaacggttccaccgcctggcttcggagtgcccagatataaacattgagcctaacgatagcgttgggggtcagctggtgaaaatagattccaaaattctttaatatctctgcaataatcccatgaagggggaatcttaatccagcctttaggaaagctcttaaaataacaatttcatctttttccggctttggggtagtctcttctcccccgaagcgtaatagcttcttt

SEQ ID NO: 63620 - DNA, 339 bp, Zea mays
  unsure (1)..(339): unsure at all n locations
tgtcggcattntccgacccgcgaggatcgtcaatcgaccagtaatatttgntgcttcgtgtccctgcctagaaagggtgatgcaagatggaacataagagggaaaatgaggcttatgttatctcgcaccggggtgctcgtagtaggggttacaagcgtctcgagggagcgaaggcgaaagcgaaagaagagagagagagtctctgcgcgtgtccatctctgcctgtctcgtcttgcccgcctcccactatgtcgacgtctatgtgtgtgtgtccacatatgtccacctgaacgtgtgtcaacgtgaacgtatctctacctggacgtcttctgcgtgaac

SEQ ID NO: 63621 - DNA, 453 bp, Zea mays
  unsure (1)..(453): unsure at all n locations
gctttacttgntagtcatggcttgactgtgacacgaattcttttataccggtatgaaggggcttgctacatgagatgtgatattaaaggattgaaaacatcgatcatgcatgagtcaccttctgcttattatatccattgtgttacacatcaactccaactagtttttgttgttgttgccaacggaaataatgattgggtctggttttttgatcaagtaactctcttattgaatatcgtaggagcttcttgtaagcgtcacggtatgcttcgagatgctagacttgagaatctcatgaaatcacttgaatgtggtgaacttgaaactgggagaggattgaatcaagagatggtgttgcctatgcctggcgagactcgatggtgctcttattacagaactatatgcaacataatgactatgtatcctattatccgagatgtactcatgattctt

SEQ ID NO: 63622 - DNA, 320 bp, Zea mays
gaagatcttcatcccacatgggctagtcggcggggccagatccaacccatgttagtcttagcaattaagcaagtgttgagttcagctctatcaaaatctaccaagtatagctgaccctccaacactcccttaaatgctattgaattatcacttcttctaaagacagtgacccctacatcagtgaaaagacagttgtaaccccatttgcataatggagatacataaagcaaattgtaatctaaagaatctacaagaaaaacattggaaatagaatggtcaggagatatagcaattttacccaatcctttgaccaaaccttg

SEQ ID NO: 63623 - DNA, 442 bp, Zea mays
  unsure (1)..(442): unsure at all n locations
agcttgagtaagcttcactgcctcatctttatttatctgtatgcttggatcgaacggacgaggacgggaaaggggctggccacagtggttgctctcgggcggcactggcgggtcgcggggaggtcgccggagctaagggcgggctctgaggagttaggcgtggtactgaggaggcaacggtgaaggcagccgagcactgggacgggctntatagccgtggcgcgggcgtggtcactggcggtcgcgggcgcgcgggggttcacgcaccggcgtgctctgagcgcgcccccgggtgtcagcccgcgtcgaacacgtgggagctcgcttctgcatggttaacggcagatttggcaccttagcggcgatcttggcaagtcactgtgtcgggcgcttcctgcttctatcctaccctttgctggagttcacagcagatatgccgggt

SEQ ID NO: 63624 - DNA, 416 bp, Zea mays
agcttggcgcgcggttacgtggcctactgtttggtttactccttaacgctgatgggatggctcaaacgaattacggtgacacggtagacaagcttggccacgcggcggaggaccgtcgaccggagatggggaagaaatgcgatctgagggtgcgctggcaagcctacggcggtctccggtgagggcacgattgccgcttaacccaagcgcgccaccgaggtaacttttgccacgatacccagtcactttaccacggccaacgacgaccggtcacgccgcgatggcgttcttatcgccggcggagatgtcctgatccataacgcgatagtaactgatgacgatgaacagtgcctctgatccaatacacaacttgactgacagaccaacttagagcccatttttctctcaattttcat

SEQ ID NO: 63625 - DNA, 445 bp, Zea mays
  unsure (1)..(445): unsure at all n locations
ntagcactntgntatgtaccaatcttctactaactcatttaatataatacatcactaaattgtcttccctctaatgaaatatagtggtccaagatccatattcagtaaattttagtgagctttggcttcactactaaaatttaagtgtcatagataaacgataaattgttaatcatatctctatgtgactcttgtttgttagttagcatccaatgccctggctcccaactccatgccatatagctcgaaactgttttgatagctttgctaagtaactaattgtcggggttaaaaaacctatgcctctgggcccacgggtcataggaaatggaaacaccctaaaaggtcaagtcgtgatactgcacctagaggaggtgaatagatgacacgtgaaaatcacaactaaaactaatacttaatccacattaagtgttagtgcgaaaat

SEQ ID NO: 63626 - DNA, 352 bp, Zea mays
acatgtgtgtgttgaatacaaacaaccccgcaagcctcacaatgctgctgaggcgaggaaatagacacctctagaacttgttcattctaatctgtgcgagatgaatggaatgttgacctcaagtgggaaaagatactttctcactcttatagatgactccaccacatcttgctatgcgtatctcttaaaaacaaaagatgaggcgtttaattattttaagacctataaagctgaagttgagaaccaacttgagaggacaataaaacgggtaaagtctgatcgacgtggagaatatttctctaatgtgttcgaagagatctgcgtggaacatggtattgttcatgagaggaca

SEQ ID NO: 63627 - DNA, 363 bp, Zea mays
agcttaagcctacagaggcgacaagacttctacctatgctgaaaacgtatacatttggtcaatgaattgggtgttgttggtcacttattctcaaatgctataaatcaagaacatgccacacaattggtaatagttaaagaccttcattcttcgaagcatcatttcctctcagatataatgatctttagaccaaaggcatgcctttatcatttccacatataaatggtaatggtaatggtaataagaaaataaaggaacaccaaggaataaaggtaataataattacgtatcaataatctatttattcttggatttcataaacatgaataaacattaataatattcatattacatcggtacctt

SEQ ID NO: 63628 - DNA, 412 bp, Zea mays
tgtgaagggtcttcatccctacatgtgctaagcggcgatgccacattcaacccatgctagtcttagctattaagcatgcatctagaccgacctcctcttttgcaaaatcaactaagtaaagtttgccgtctaatacacccttaaaagctagtgaaccatcacttcttctaaagacagacacatctacatttgtaaatagacagttatatcccatattgcataattggctaacagatagcaaattatatccaagagactctactaaaaacaaattagagatagagtgctcatttgagattgcaattttacctaacccttttaccttgccttgattcccatcaccgaatattattgaatcttgggaatatttttttgacgtaggaggtgaacatcttcttctcccccgtcatat

SEQ ID NO: 63629 - DNA, 458 bp, Zea mays
  unsure (1)..(458): unsure at all n locations
agcttcggtataccccattccctcagcgttggaatatctcggtggccaagtattcttgaactaaatccctagttccaatgtgtttagatacaactctaaactcatacacaacatctaggcatggtgcccccggcgtcatgttgcactgaggcctagttagcccgaaggttaactccagtgggctctgcactagcttctcctttntctcatcaatcttgacgtaaaaccattcagatttccaaccggtcgaccatttagtgcgatagctgaccactggtgtcttcatgtctttgcgataagcaaagttatagcagccgaagttctcatgcagtccgtcttccctggccttcatctgatagtgaaagtcatgtactcggcagaaggcttcggcgagcagctccaacccttgacttcggagagcctagatatacacgctgagcctaacaatggcgttaggg

SEQ ID NO: 63630 - DNA, 439 bp, Zea mays
tgaagctggcctctacgccatgacgaaggacgatcttgcagatagtcttgcatataacagtctgaaggtacaaaaattgtatatttggaagtttgtgaactatgaattattctttggttcttatattaactcgatcattcttttaatatatgggttaatacttagcaacgccttaaaggcgcaaaagaatgccgaaaacgagagttgtactatcgctctcaacaaccttcgaacagaggttattaatctgaggaacgaagctttgggaaaagacaaaattctacttacattggtggacaatgtaaagggggatgaagctaactacaagaaccaatctgaaatccaaaggaacgagattgaaaaccttcaaaaacaactggcctgagccaaattgaaatgcgctattaccgaagctgaccgatatgccagtgattactgg

SEQ ID NO: 63631 - DNA, 367 bp, Zea mays
  unsure (1)..(367): unsure at all n locations
agcttcggctatggttaaaatttttggcagcaaaacagtgcaatagcaatgaatgttgtggtaacttcacacctacccgtctgtttatatagtgtcgcaggtaagaaggtgaatcgtcaggatttttacaccaggcaaacagctgcttacacccgctgcgcggtggaccacagaggccaaatagtaaccctgcagggtaggaccgctacgcgctcggaaactgaatcgtttctcgacaacgagctcagggaaggtgttttttggaccttcggcttcctgaagcctaagagactnttttcatggatcaagctcgttacgaaaaacgatctagcaccgcgaaggggctacttgtgggaccatgcttcgt

SEQ ID NO: 63632 - DNA, 475 bp, Zea mays
  unsure (1)..(475): unsure at all n locations
taagacctactaactggacaagttntagacctgctaactaggcaggctntaactaacgactcccactgcaaggcacatattntctcggaggcaaaagtagcagatctttcagcgctccgaccaatcaagaaatcgatcccaacatcaataaactaaataaatacgtaatccctaggcggcttttttgtaaaaagaaaaaagaaaacaaattactaaacaatattcctcacacattgtctcgatccattctgaatcatttcatgcagaactggtgatctagcatgatggcgttaatattccatctgctcccttaacagccccaacccttccagttgggaagaaacaggcagccaggcaggcaagaacaacagcacggctccatctggtacctcgacaggcaccggtcggctgattctacggagtatactaagcatgaagaagcaggagatgaatatcaggtctgccctatctagac

SEQ ID NO: 63633 - DNA, 464 bp, Zea mays
  unsure (1)..(464): unsure at all n locations
agcttctaaaggggagaacacatttaggattaactaatgttcattntgagaaagacagggtttgtagcgcatgccaggcgggaaagcaagttggaacccatcatccacacaagaacatcatgacgaccgacaggccactggagctcctacacatggatctattcggcccgattgcttacataagcatcggcgggagtaagtactgtctagttattgtggatgattattctcgcttcacttgggtattctttttacaggaaaaatctcaaacccaagagaccttaaagggattcttgagacgggctcaaaatgagttcggcttaaggatcaagaaaataagaagcgacaacgggacggagttcaagaactctcaaatcgaaggcttccttgaggaggagggcatcaagcatgagttttcctcttcctacacgccacaacaaaatggtgtagtagagagaaagaat

SEQ ID NO: 63634 - DNA, 351 bp, Zea mays
  unsure (1)..(351): unsure at all n locations
tatgcgaattgactcaagcctagctactggtgcatagggttcaccaaaatccaaaccttcgacttgtgaataccccttggccacgagtcgagctttgttccttgtcaccacaccatgctcgtcttgcttggtgcggaagacccacttggttcctacaacattttgattaggacgtggaactaaatgccatacctcattcctcgtgaaattgttgagctcctcttgcatcgccatcacccaatccgcatcttgcagtgcttcctctaccctgtgtggctcaatagaggaaacaaaggagtaatggtcacaaaaatgtgcaacccgagatcgagtagttacccncttatgaat

SEQ ID NO: 63635 - DNA, 462 bp, Zea mays
cacgacataggcattactaactacggtacttctatatcacaatcaactagagcaagaaacatacaaaacgtgacactcgtgcattattaagcttagtcatagcaagtctacattacttaagtgttaactaagcatttttagcaaaagggtcaactcaactatcaattaagcacttgcagaattttaggacagcagcacatcagtcacttgctttaaccataacttttcaaagattaatccaaaaatagcaaactaggacattccggaaagcttaaaaagtgaactacaactttggtatttttacctccacaggattcagcacttagcaaggtcaaacagtgctaacacaacagttctgtccagaattggacagattcagacttgcaacttcaaaaattcacaactacagattcagacatccaaacaaggtgatcctagactttctggaaaagctaataaatg

SEQ ID NO: 63636 - DNA, 465 bp, Zea mays
  unsure (1)..(465): unsure at all n locations
tctagtgtttgaagcacattcacaaaccacatcaaatgancagctactcatgaattaaattcaagttatgagtgattaatgatgcttatgatgatgctttcatgatgcatatgagatgtataagcatgcttaacaccaaaggtgttacaactataattactgaaggagtcactgctgcattggtccattcaagttctggactaattggactagacttttcttcagccagtagcgtggagtccttcggagctagtgttgtgccggtagtatccttcttagcttcatctttgaaagtatcgaagaattaattcatcactggagctattcactccacgtcatcttcttcttcatcactctctggaagtgctccaaaggcttaaccttctgcgctatcaagtcgatatcttctccaattntcgcttctttggcccccataggaaaggagtcctcaatctcaacttctat

SEQ ID NO: 63637 - DNA, 469 bp, Zea mays
  unsure (1)..(469): unsure at all n locations
agctngctcgtcgcacgatagcctgcctctcctgtgaaagaatgtcgacgctgcttcccggcgagacagctatcacagacatgatcagcgtgatcaatccgtggcagcccgcacaccatttcttctttggctagacgtctcaagcttcgaaaattaaggtgtccaaggcgtgcgtgccacctccatgttgcgctgcctccttgcgcagcgaggcagactggctttgcaacgtcaagatccagctcgtacagctggttcaccgaccgcggcacacttgccagtagctgacgctgagtatcccagatcttcagacgcccgttcagcattagaatcttgtgtccaccttcttccaattgtccaaggctcacgatattcgtggtgagcctcggaatgtagtaaactcccgtcagagtcttgtggtcaccattccggcagtggagaagaatggatccgcgaccacaaatggccg

SEQ ID NO: 63638 - DNA, 474 bp, Zea mays
  unsure (1)..(474): unsure at all n locations
cttctccccctttgacatcaaacacccaaaaccatactcaagcctgaacgtaggatgatgtcaagggacagcagggtgtttaaggaagaaaaacgactatcaaaacccccccttacttattggacatatgcactatcacatatatgccaaaagaataatacttccttttgtacctttaccatgttgtagtggacttcccaatctgaaaggatttaatctctcgagagcttctccacacttgtgcctgattctttatcctaatttttttcttgttgctaagacaccaaacttagaacaagttatagtattgggcacaagaagaaacttctattctaatgattatcaaaagaatgtcattgaagcagactatctcggctaccaaatgaaagataccaattgcgagttcatttattatcatggctncatgatatttaagaataagcatctattattaccagatattatagagcatga

SEQ ID NO: 63639 - DNA, 288 bp, Zea mays
aatatctattgttcaatgatcatgaaaccattatgtgctgtatctaactacatttgtatcttgagcttgataaaaggaaaaggtcgaagtaagatccgagagcgtgaacagtactgtggtactgttcacctatttataggcacatggcacagcctgtgagaatttacattcatgtcctctacgaatgattacaatcatgccactggtataatgagtgaagagttgtttcattctctgttcgtgcatgtaaaagtgcactactaagctccctgatcggtagcttatgta

SEQ ID NO: 63640 - DNA, 401 bp, Zea mays
  unsure (1)..(401): unsure at all n locations
aagaagaagtaggcttttatgtcttgtacaagaaagaatagcttcngtttatacaacaagtcntcttttatgttttgtacaaaatagcaaagcttccgcagaaagaagaagcagtctttaatgcttcgttgtgtacgagaagacaggaaggtgtgttattcgccttcggctctaaaaattgatttcgtccacatcagagcgtcttaataaaacggtaatgatatattacaaggtatgtacacagttccttgagaacggtttaattgtatttacaacaagttgttacaaaatctcctcagtattttctagcctactactactaatcttcttcggcgttcgcttccgcggatattcttaatctcatcacttcgcatcctacatgaatccggtatccgagtaaa

SEQ ID NO: 63641 - DNA, 344 bp, Zea mays
  unsure (1)..(344): unsure at all n locations
atcatcgcttggaacatctaatatctatgtcgcttttacccctaaaaatgtctcaaggtgctcatgtatctccctttcttcacatacataaataaaggctaaccatcaatgaaggatcagccttgcctctgcaaatcccgaccctccctcggtggctagaaggggggaacccnctctgcgtcaaaatggtcctcggagaagtctgttaccaaaactgttttcgcgctgttcgactgcgtcgataacggaatcctaacgacgagcgagagatacattgaacgacgaggccgaccgagccgagggactaccacgccttcggtatacggatacctcactcatcacct

SEQ ID NO: 63642 - DNA, 472 bp, Zea mays
  unsure (1)..(472): unsure at all n locations
ggcnctctcagcgaccgattaaggcaactgatgtgttctcccttctaaggatcttcacatcctcatacgaaaataagcaattataacccattccacaaagttgagaaacggacaacaaattatagcttaaggaatctactaataaaacatttgaaagtgattgttgagcatagataagaatnttaccaataccaatcaccttactcttgccactatctccaaacacaatatcttgtgcttcttgagttagttgcaatgtatgaaacatgtctntctccccggtcatgtgatttgtacattcactgtcaagcacccaacttgacccaccagaggagtagacctgcaaaacaagattaggctatgctcttaggtacccaaattgaattgggtcctacagtgttagttatagccttgggtacccacacacttcgttgcatgacgtttcgttaatgtatgacccacatatttcaca

SEQ ID NO: 63643 - DNA, 462 bp, Zea mays
  unsure (1)..(462): unsure at all n locations
aagcttncggccgcagcaaagttctattctgtcttttcgctaagaggcagaggcgccaggggcttcnggggaaggtttggagatcagccaagaaaaanttattgcctattctgtggtgaagacaagggccataccaccaggatgtgccatgttaccatccagaaacagagggagatagcagaagcagcagctaggggtgggcgatccggttacccgaaattttcgggtcgggtaattcgggtttttaaaatttcgggttttgagaatcgatacccgaaattacaacgggtttttcaatacccgaaaattcgggtatccggaatttcgggttcgggttcgggtattcccgaactacccaaactattgtgttggcttcattaaaacacatacaccctattatattagtataaaaatatagtttgaataatgatatacatggacatataaaacacaagcaatcta

SEQ ID NO: 63644 - DNA, 294 bp, Zea mays
  unsure (1)..(294): unsure at all n locations
tgaaggactgcttccgcaggagagcttccgaactgtgaagacttgttctgtccacggagtcgctttatccgagcgcgagttacttatcgcagaaggtgatgagtgaggtatccgtatcccggaggcgtangagtccctcggctcggtcagccttggctgcttacgtgtactccgtcgtttccaggatccgctttccgaagtagtcaagaagcacgaaagtaatcctgctaaaaagagatcctttttcgaggaaaaattcaacgcagagggggtctcccccccttttagcccctg

SEQ ID NO: 63645 - DNA, 399 bp, Zea mays
agctttattccagtgcacccaggaccacttatatatattctttggcgtatgtccgaagggtcctgcgtatgagggcacaggcaccaacagtgcccaatgaaattgtcattgaggccatgattaaggggcttcggccgagaccttcagctcagtactttgccaggaagcctcctcaaactttggagaagctgctccagaagatggacgagtatattcgagctgataatgactttcgccaaagaagggaggaagcatacaggttctctgaaatgaccaggggcttcggatgaagtttccatccaaggcacgtcaggtcaattcacaactttgctcagagtgatgatagagggagtcaatagcaaaggccacagtactcctcgcatgcttctgggcagcagc

SEQ ID NO: 63646 - DNA, 434 bp, Zea mays
  unsure (1)..(434): unsure at all n locations
tcgtcatctgaaaggaattttccctgaaggtcagagatgatctcagttctccaatcctcgctataaacacgagatatgttgaggactgctctttcaagaagttctatcgaaggtgcttttattgtttcgaagaacacatccgaaggtaagggcagcccctgtgctgctgacttagctagcaaatcggcatgctcattttgtcctctagggataattttgacagaaaacccctcgaaggaagcttcaactcttcgaaccatatccagatatttttcaagcttcggatccttagccttgcaactcttgtcaatatgacccgaaacaacctgtgaatcagttttaagtatggcccttctgattcccattgcttntaacttccgaagacctataagcaatgcttcgtactctgcaatgttatttgtgcaactaaaatc

SEQ ID NO: 63647 - DNA, 365 bp, Zea mays
  unsure (1)..(365): unsure at all n locations
agcttcnggaatctgagacatcttgatagagtgttttctatctctgctccaacacgagcagggatgcaccctagaatttcttcgctaacaccaccaaagagcacagatccaggctgggagccaccagcaatagcgaactttttcagctcagagatatcttcttcggagagttcctggccacccaagtgtcataggtccaattctttactcttcgaagaagcttcttccaattctttcacctttaagggtgtaaccctaccagcggtcacttcatccatttccctctcaggaaccacgatagctataatcctgtcaatctccggcattgggggtccaagagggcctccgctattttcagctntagc

SEQ ID NO: 63648 - DNA, 385 bp, Zea mays
  unsure (1)..(385): unsure at all n locations
ttcccatctgtgcccatgaatgtattaaggaagctttcgctcacattgtttgctatgtgcatgaagacaaaattatgtcgcaacattaaatctttcctatatgggagcaccaaccagatagatctcctctttgagatgactaacggntcccctgtcttgcgcctcttgctagatggtttattaccagatgtgtccttgccaaaaattggattaagatgtttagtgcactccaatagttcctctcccgatagtggaggacgtgctgccctaaactcagtacagccaaatttggcaacatcaaatctaaatgggtggtttcatgcaacaatctgcgatgggccatatagcaagtctcgctaccacttccaagtctaagtgaactcgt

SEQ ID NO: 63649 - DNA, 441 bp, Zea mays
  unsure (1)..(441): unsure at all n locations
agcttgcaataggtgaagtgagacctcatgaaaatgatgatgaggaaggaattttgtggatgaccaatgaggtttttgatgtgggcgcaaaggtggtgggtgataaattctccacccaagcaaacccatcaacctcaagtcatccaagtctagaagaaggtcatcaacccaaaggctgccaaccgtggtagaagatgaacatgaaagtgttgatagtgaagtgtctcttgatcaagtggatgaggaggaggagcaaattcaaagacagccattagtgccccatcctcgagtccatcataccattcaaagagatcatccggtggacaacatcctgggtagcatcaggagaggggtaacaactcgatcccgatagcaaattttgtgaatttactcgttggctcctctcttgaccacatanggtgaagagcgttggtgatctga

SEQ ID NO: 63650 - DNA, 454 bp, Zea mays
  unsure (1)..(454): unsure at all n locations
agcttatgttagtagttttgttcaagaaattaagactttctatcattnggaatcagcacttgatagtcaatctagctgacttccatgttgatttggttttttaatgaaatgttttagtttatggttccaatacaagaaatttgctgcaaaggttgtttttacaggtacagactaaatagttaaccatgcaaatacagacatcaatattttttgttaggttgtttgtgcaatgtttacttatgaatttaaactgcatatgttaatttttttaccagtactacttcatggtgtctcgtgtgattatttgtagaatattaattttctgaattagttattggtttatggtaatatatgatcattntggtaatgctagtgcagtattttccattnttttctttgagaaccacaatcannttttgttattgcttctttatagatgaagctgagtgtagta

SEQ ID NO: 63651 - DNA, 363 bp, Zea mays
  unsure (1)..(363): unsure at all n locations
agcttcaacccactcgcccncgctgtgctgcgagaagtatatagacgacagctgacctgagaagttgctcactcggagggtgaagtgctcccagtctccaatgtgcctaccgaccttctgcagagcgaaactcgcaaacccaaccttgatggtggcaggccccgtgaacgggcagaacacccacattgcaatgtcagtgaaggtccctccatgagctggcttcacatgagcgtatagctcagcgctcttcagattgccagctctgacgagctccttcctgtcatcatcagggagatcaatccagtactcgccaatcgttgtcccaccaacaggcagattcaagccaccagggagtattgcatc

SEQ ID NO: 63652 - DNA, 342 bp, Zea mays
tctcttggacaagtgctgcacttaccgctgagcgcgaagctaccacatataacaacagaggagcccctggcgttggtggagttagcgtcgttaggtctatcaaatattgcttcagctcttcgaaggctctctgctggactggtccccattgaaaaactttggctgacttcagcacttcgaagaatggtaaatttctctctgctgatctagatatgaatctgttgagagatgccagtcttcttgtcaatctttgagcccccttctttgtacttggtggttccattcgaaggatagcttcgattttatttggattagcctcaatcccttttgttgaaactaggc

SEQ ID NO: 63653 - DNA, 379 bp, Zea mays
tatgggaatagcaaaatctttcaataaaaaagagacatgcttagctgtgcagatctctctaccctctacaaaagaagatataataaatagcagatgtcatgaaccggtgacaactctattgaacataatcatgtcttcttgcatgagtcaacatttgcttcaactactaaaccacttagatgttgcttctcacttgtcgatgatttcactacatggaggaaaaaagggagatatactaaatcactcaaccattgatggtctaaagggatgatgagacataaatactccttgcatgtaaatatcttcagcattgataccttaatggacatgacaagataggtgagttaattatttattgcatgaataatccaggacacat

SEQ ID NO: 63654 - DNA, 475 bp, Zea mays
  unsure (1)..(475): unsure at all n locations
ctctattctactatgttcaaaatctctcatgtggtagcttatctatttatcgctgtggcctttattttctccccctttggcatcaagcaccaaaacgggatcaatcttggccctttaaccccattgcctcaccaaaatcttcagtaagaatacaaaggccataagagtctaaagatgaacttggaataagttaccctctcatcggagtgcagtggaagtcttttatggtccaagtccaccttattcctcttaatcctccttcgagactaaatcatcaaactcaagcacatggttagtctcatagggtcaagttgtaacacatcttcccctaaacatgtgcatcactttgcaacggacttgtgaggtncagggagtgtttgtacaacttgagcaccacaataagcaacaaaatgcataaaggaacatgatcaaaagcataaatacatgtatgctacaatttcaatcaggttccgcg

SEQ ID NO: 63655 - DNA, 399 bp, Zea mays
  unsure (1)..(399): unsure at all n locations
ttttgattnngccttctaatctcttgcacaagcaccgcataaactgcagagtgcaaagctgccacaaataatagtaatggagcccctggcgcaggtggagttaatgttgttagatcaatcaagtattgcttcagcccttcgaaggctttctgttgagctgggccccactgaaagacttcgactgactttagtatttcaaagaatggcaagtttcattctgctgatctagatataaatctgttcaatgaagccaatcttcctgccaaccgttgggcccccttctacgtacttggcggttccattcgaagtatggcttcgatcttgcttggattggcttcgatccccttcgntgaaactaagcaaccaaggaacttacccttctttacttcaaagacacat

SEQ ID NO: 63656 - DNA, 340 bp, Zea mays
  unsure (1)..(340): unsure at all n locations
gctcnatgagaagaaagaattgaacttcaatcaatggagggattacttgcggaagttctagctaaaattgccagaatgaatagtgaactcctcacaaagtccgaaaacttccaaccagaaaagcagatatttgataccaagcttgaggctgaagtccaaaagagttcaaatttgcagaaatcattgaaagagcttcagataaatgtctagacttcggcaaccgatgcgtgcaccggctgaacagttcttcaactcgggtggagcccggtttgagaaatttgagccttctgttgaagacctaccaggaccttcaaacacattgagggcaaagttgatgctc

SEQ ID NO: 63657 - DNA, 435 bp, Zea mays
tcttcataaaaaacagcagtgagaccttcttctttgttgtctaagctctgtatttttcctttcatttttgtcttcttgccgaagcaaccattgtatgcgatgaagatgattatcctacatatgcctagatgaatgtttatgaatgcacatgcgatgatgtaatgtgatgtgcaaatgaatggccaaacacgtatccgaagccatattcggaaccattattttcttaagaacaatcacacctcagctctgcattcccttaggaatgactttggagcttcttcgcctttacttttggcggaatcaacgatgacttttcgctgtaagctctgcattcccttaagaacgtctttggagcttcttcgcctttactcttggcggaatcaacgttgacttttcgctgtaagctctgcattcccttaggaacgaatatggagc

SEQ ID NO: 63658 - DNA, 102 bp, Zea mays
aatgtgcgtgaacttagtgggccaactgaacacattgcctgaaaagctgagtattattccaggatataagttaaagacccttaagtcagatgcgcggaaatg

SEQ ID NO: 63659 - DNA, 345 bp, Zea mays
  unsure (1)..(345): unsure at all n locations
catttccgccgcatgtactattgtcggtgactatgaacctgtcgttgcctagtataattctggtcctatagaagccacctttactaaaccacaagaatctgtaaatcatttaaagccgttcttcctgtgcggtcacattgatgagataccgtatgctaaaatgttggtagatggaggggcgactgtaaatctaatgccttattcattgtacagaaaattatgtaaatatgatgacgatcttgtcaagaccaacatgaccatcagcggtgttggaactaatagttcgatctaagccagnggagtcacgtccgttgaattaaccatctgtactaanacccttgttgc

SEQ ID NO: 63660 - DNA, 396 bp, Zea mays
gcactccaaatagacactggatcatgcgtaaaatcaagtccaaaggtagctctggttcactgaagttctggaattcagcatggacccgcctgacagccaaacttgagacttaattatctctgcctttttttaataactatgctttccttcttaagcaaagttgctctcctatgtttggtcttcaactttgatatggtgacctagggcaaaaaccctatgctttgaaagttacaaagcccaacagtggagccaattctctgagtttcagacttcatcacatgagccaagtgtggccctcttgcacttaaggcccaatcttaaggtttggcttgtaaattacatatttgtgaaccaattggctttagatgcttagacatagtagttgttacatattag

SEQ ID NO: 63661 - DNA, 348 bp, Zea mays
caccgcagctgcagctgcatggtggcggggcccaatatcgttatgacaacgacattggagactgaaggggtgtgatgggagtgctacagaggatggtgaaaatccttccgtccgagcgcacacatcaacctcaagtcatgcagtcatcgtagaatagcttctaccgcaagatgtggcaaccattgtgtataatgagctagagcacattgctagtgaagatgccattggcaagatgaaccgatgaaccattcagacttctctttgcctaccctctagtgcccagggctgccgagagatcatcttgtggcaacatgctgggtacatcaggagaggggaacaactcgatct

SEQ ID NO: 63662 - DNA, 358 bp, Zea mays
  unsure (1)..(358): unsure at all n locations
ccgcagcagcagcttgttagagataaaaaactatttttttgctttcaanaacctattgggacttatttaggatacctcaatgtatacattcggcctaaccctgaattataattttcataggcttttgccccttttcttcaattctacctaaagagctctattagggtcttaacattttgctctttttaaaaaaaacttatttgcttggaacatgagcttgtagatatacacttaggacatatttcattctcaagctaaattgatgcttcatgcctaatatggctcacataacatgataattcttgggttggcactgagagaaaccctaggtgacactgtggtgtcacaagatcacccc

SEQ ID NO: 63663 - DNA, 420 bp, Zea mays
  unsure (1)..(420): unsure at all n locations
nttatttacttcctacatgctnttaatgtctttcttttcngtgtgttgatgccaaaggnggagaagnttatggaccaaagcaatgaaaactatatcaaacaccaaacacaaccaatttaaaattttatatctacaaatggctnttcaagtggttatggttatttggtccataaataggaagtaagtgaattatggagttagggggaggcttaagtccataatatcacattgtggggacaatcatgcatcttagcaagtaaaaatgcatattttcattcaaatacttgtattatttgcttgctttggttgtgttgtcatcaatcaccacaaaggnggagattgtaaggaaaatggaccccgggccattngactaattgagttntggtgtttgatgaacaacacaatccgtgaactaataag

SEQ ID NO: 63664 - DNA, 363 bp, Zea mays
tactcttatgggctccaatagaacaagaggcttggactatgttgttctttatatgccctcatttagaggcgttgtatcctcatctttttaatgcaatcctccttgcatttggattctttcactcagatgtcttcttttgctcgataatgactccacaatagcgatatgatgatgtcaagcttttcaaactttctagatgaggtgaaaggattccttagggtaattagaacttatccaaagagtagaactattggtagttcatctattccacgtattacccctatctgtgtggaagtgagctgattcttacttaaaaaccgaactggtgatcttatgaacctgtgaatcaaagactatgcgaac

SEQ ID NO: 63665 - DNA, 358 bp, Zea mays
tgtacacagtaccaatgatttgagagagaaatattggagactgttctgtctcacattgaaagattcaacttatcatttgtctggatactcaccagacatcaatccttgtcgcacattcatttatgataacttcatttttgtatcacacaaactcttactatgtgcccataacaagaacctctacagtcgattttggtgccaacattaatgccaaaccaaaatcagtaatcttggcattcatattatggtccagcaggatgttgcttcaacacactaaacgattgttaatagcctcagcactatgcgatcaacataaccaatataactacaaatactcgaattggatcatatgaacaac

SEQ ID NO: 63666 - DNA, 325 bp, Zea mays
  unsure (1)..(325): unsure at all n locations
tgagggtctcggcgtagatgatgttgaggcagctgtcctcgttcatcangaccttggtgagcctgacatcgccgacaacggtgtcgacgacgagcgggtatttccccgggctcggcacatggtcggggtggtcggcccggtctaaagtgatgggcttgtcggaccagtctaggtagactggcgccgccaccttcaccgagcagaccttccggcgctcttgcttgcggtgccgagccgaggtattcgccgcatgccctccatagaccatgaagcagtcgtggacctcggggaacccccctgctgggtgttcttcgttcttgtcgtc

SEQ ID NO: 63667 - DNA, 301 bp, Zea mays
agcttgaaggactgcttcggcaggagagctttctatcgtgaagacttgctcggtccacggagtcgttttatccgagcgcaagttacttatcgcagaaggtgatgagtgaggtatccgtatcccggaggcgtaggagtccctcggctcggtcagccttggctgcttacgagtactccgtcgtttccaggatccgcttttcgaagtagtcaagaagcacgaaagaaatcctgctaacaagagatcctttttcgaggaaaaattcgacgcagagggggtctccccccttttagcccccgaggga

SEQ ID NO: 63668 - DNA, 471 bp, Zea mays
ctgatgcacggattgaacattgccatatcactgggcactaatagtgttgatggaataccgagaatcactggtggtcataagtcacataaacaaagaatgggattgctcgaatgactctatgggcaagtactgcacagccgtccaaaagctggaagacaaatttgaaggactggaatttcatcatgcggaaagagatcgcaacgcggcggtagacgcattgtcaaaactaggatccagttggacccaagttccacctggagttttcgtccaagaggtgccacgcccaagcatttccccagatcaaacagaagagtgcaacgttttgagccagccatattcagactctaatgactggagggagcccatcatcagatatataaagaatgaagaggaacctggatatcaagctgcagcagaacgcatcgcaaggcaatcagcccactacacccttattggtgatgcactgtatag

SEQ ID NO: 63669 - DNA, 440 bp, Zea mays
  unsure (1)..(440): unsure at all n locations
agcttctaaaggggaacacattntaggactaatcaatgttcattttgagaaagacagaatttgtagtgcatgtcaagcacgaaagcaagttggagctcatcatccacacaagaacatcatgacgaccgagaggctacttgagctactccacatggatctattcgacccgattgtttacataagcatcggcgggagtaagtattgtcttggtaatttggatgactattctcacttcacttgggtattccttttgtaggaaaaatcacaaacccaagagacgttaaagaaattcttgagataggctcaaaatgagttcggattgagaatcaagaagattataagcgacaatggaacagagttcaagaactctcanatngaaggatntctngaggagggcatcaagcatgaagtatcttctccctacacacctcaacaaaacg

SEQ ID NO: 63670 - DNA, 374 bp, Zea mays
  unsure (1)..(374): unsure at all n locations
ttattanatggacgtgaaaagtgccttccttaatggacccattttataagaggtctatgttgagcaacctcccggctttgaagatagtgagtatcctaatcacgtatataaactctctaaggcgctttatgggcttaagcaagccccaagagcatggtatgaatgcctaagagattttcttatcactaatggcttcaaagtcagaaaggtcgatcctactctattcactaaaactcttgataatgatntgtttgtatgccaaatttatgttgatgatattatatntgggtctactaacgaatctacatgtgaggaatttagtaggatcatgacacagaaattcgagatgtcaatgatgggggagttgaagtact

SEQ ID NO: 63671 - DNA, 438 bp, Zea mays
  unsure (1)..(438): unsure at all n locations
agcttgcacatcagcacatgccattatggttaggggagaatgtactaaagttgttgntgggcttgggttgtgtgaagtcgattttgttttttggttttgtcacactctatcggttgaagcccaatagttctagtgatggtaaaaatctccatgggagcgggccgattgaggatcctacccatttgggacaggtgtgaggatggtttctcccccgtggggctaatgggagggaataaactatccacatgacctcattggagacccgataagaaatcctaatgtgtatttgtgtatgtgattcgcgagagtgtgagactattactaagttaaaataattgtgatttgtgagttatgattgtattataaagatgttagttgtctcagatttattntcgtcttgttctctttgataatcaatatatttgtaattggtatcat

SEQ ID NO: 63672 - DNA, 371 bp, Zea mays
  unsure (1)..(371): unsure at all n locations
ctaagcttnctggcctcagcttccaccggcaccttcattacaacctacttatactcgaagcttgcagctagaagggcgccaacacccacaacagcaacgtgacttcagggaggagtccgaagctcgtacggtcaacaacaccgtaccagaatcaaagcacatttactgagcaatatcctacttctgaaatacttttactttttacgccactttgctttttggacgaggaacaagcaatgaaaacttagtttaatttctcgtaatgattctacatgtaccagaatgaaatatatcttcttcacagatttacgaagctcanaagtcgttcctaagggagtgcagcgtaagtcttttgctcaaaagtcattcct

SEQ ID NO: 63673 - DNA, 452 bp, Zea mays
gtactggtggaccagaatgaagagggagatatcctactatgtatcagagtgtgacacctgtcagaggataaaggcaagccacttgaagtcagctggagcgttgcaaccactgtccgtacctttgtggaagtgggacgacatcagcatggatttcattgtgggtctgcccaacacctctcgtcatcatgattcaatttgggttattgtagaccgattgacgaaagtggcacattttcttcctgtgcacaccactgataaggctcagaaatatgcagaattgtatattgaccggatcgtgtgtttgcacggattaccgcggaccattatttctgaccgaggggcccaatttgttgccagaatttgggaacaatggcatgagtctttgggaaccaagctaatcaggagttcagcttaccacccacagactgatggtcagacggaaagggtaaacc

SEQ ID NO: 63674 - DNA, 413 bp, Zea mays
  unsure (1)..(413): unsure at all n locations
gcttcttttcgagccaactctgnctctgtccatgctgacaccactgtctcttgcccctgcttaccgcagagcaaccgaggggtcctttaacttagcaagagaagcctccggcggcaaggccgaccgagcctagggactcctacgcctctgggatacggatacctcagtcgtcaccttcgcacgaggcaactcacacttggttaagcggttcggctagccgacatgcgagttccagtgctcgaaaatgaggggaaaacacggcttctcgccaaaaatacatacatgttcaggcctcgacagctacaatgaacagacaccggcattcaaggtgccattacaaacggaactccggtttacgcccccgcaggtacgaacaacccctcacattggagggcctgcgggacgacgaaacc

SEQ ID NO: 63675 - DNA, 356 bp, Zea mays
agcttgtgcagagtccgcttgttctaatcttctgagaaacccgacctcattgcaacatgacaccagaatgtccaacccaacaagcgctggatgaattcagaattattgcagagcatatcactacaagagacctggttcaagagtttttggctttcaaggttcttcctagtttaaaagaatgggaaatgccgaagctagagggggagaagaaagaaggggaacttgtgcggttaccttactatttcaagtttaagaaatactttaaaacaccttgccaagagtggctggatacaattgaaataatgtgcaatgaaatactcggcaattactccaaaaaagaagatcagttgatgact

SEQ ID NO: 63676 - DNA, 355 bp, Zea mays
cttaatatgggtcatgtgttacccccttaatatctatttatgattaagcatcctattccaggggtctatttgcaaaacaccaaaacaatacaacttgcttgaaatttttgcctagtgaatgcactctaagtgtgtcaaacatatgcaatgccaatgcttatgatggtatgctcaacttttagtaacagtaacaccaggggtgtttcaagcaccattcccgaggacaatgctaaaggttgtagtgatgctcacgctactggcggtgtgcttgatgaggaagaagaggaagaataagaagaaattccgttgatctaaaagaatagtacgtaccacaggggcaacgacattcccgtgc

SEQ ID NO: 63677 - DNA, 455 bp, Zea mays
  unsure (1)..(455): unsure at all n locations
agctnttaatatcttagttagtgttcttagngatgtttatgatgcccacataaatagagatgaacaaccccttgatgatgcgcatatcacttggactaaaattagggataaaattgataagtccaaaaaaatgataaacattattcatatggtgatgatacttctaatatatgtggatctaaccctttgaagaaagaagaaaatgatcgattgaggacaaacgatgagtccacctcaccaaaattagaacttttcgtaccacttctcatatgtgctttatttctaatgagagtgacaatgaaagcaaaagtgaggattatgatggaaatcacagtacaagtgaagatgaggatgatgatgttttccaaacactctatactcatttaaacaagacagacaacatgatcatgttcaaattgatgaagagagcagaagagcaaaaagacacactttac

SEQ ID NO: 63678 - DNA, 445 bp, Zea mays
  unsure (1)..(445): unsure at all n locations
ctacacattccttcaacacatgaccggtcaacgatcctaagaaattatctattggatcaacatcttggtgatatcaccacgggagtaacaactcgctcacatttaacttacttttgtgagcattactcgtttagttcctctatagagcccttcatggaagaaaaaccttgcagtatctcgactatgtgctggccatgcangatgagctcaactacttcaaaagacatgaagtgtctagcctggtgccacatccacagccaaatgatgcgggaacaaagtgggtgttccgcaacaagcaagataaacacggcgtggtgacaagaaacaacgctcgacttgtggcaaaagggtatgctcaagtcgcaagtacggattctgaggagacctttctctcgnggctaggctagaatcaattcggatcttattggcctatgctgctcaccac

SEQ ID NO: 63679 - DNA, 391 bp, Zea mays
ttcttaccaagagacttcgacgtgaacgagacgtgtaaaaggtattatgcttaatgctctacattataaagtaacctcccctgagagagcgcctactagttgtgaatacttgtcatgagacatgcacttcgatataatatcacgacgggcgaactatctataatacgagctttggcacatattagctgaagtgaaactaatagcatgataaaagcttctgaaacattaacgccaattacttaaggatagtgaataaactatggtgcctgcttaatcatacaatttaaacaagtatagtcgctcattactctgaattgaaaaaaccaatcctaccatgagaattacctaggatgcatgccttgttaacttataataaatactcaattgaatt

SEQ ID NO: 63680 - DNA, 395 bp, Zea mays
gatgatgtgatgtatgaacacatatatgttctacacaacaaccacctagatgtagagattgcgagtggcagcctcatgacaagaatgtcatcatggatgtgtggcacatcgatggcaaagtcgtcgtccttaaggtcctccccatcaaggatgggttgatcaaaggcaactcggatatagcacatgtacgagcaatgcgatcaagagcaacatggatgcaagcatccacaacatcatgctcaatctaggcaagagtgacctcacgctcaaccttagcaacacgagagaggaagacgttatggagtcctaggtcatgtgctcacattccttcttggcaaggcaattagaaccaacttattggagagaaacaactacaacctctagatcaataatca

SEQ ID NO: 63681 - DNA, 425 bp, Zea mays
  unsure (1)..(425): unsure at all n locations
agcttggaggcgtcgatgggttgtctacttgatgtatactcctccttcttctcctctgttgccttgaatgcgaccggttgtgcttcgggcgtggatgggccatctagctcgatgattttctttgagcctttgatcatcaactcaaagctcacaaagtttcctatcacttcctcgggagacattagtgtatatctaggattacctcgaattaattgaacttgcgtaggattaagaaaaacgagggatcttagaataaccttgaccatttcatggtcatcccacttggtgctctcgaggttgcgcacttggttcaccaaggtcttcaagcggttggacatggcttgagggtcctcgccttggttgagtcggaaccgaccgagctccccctcgatcgtctcccgcttggtgattntagtcatctcatc

SEQ ID NO: 63682 - DNA, 415 bp, Zea mays
  unsure (1)..(415): unsure at all n locations
tatatctcccatagctctgggtgtgcaaaaaattcatgcatgtcctaaccattgtattctgtatcgnggcgagtttgagaacgcatcaagatgcccagtttgcaatgtcagtcgatacaagaagagctacaatcaagactgtgtaaaaaaatttccgaagaanaataaaaacaagacatccactattggacctgagagtgacgatgacacttttgatgacatggatgggaaaaagaagtcaaagaacccagctctggtgatgtggtatcttccagtaattgatcgcttaaaacgtttgttctcaaaccctatggaggctgagcttatgcgttggcatgctgaanatcgcaagcagaataacaaacagattcgacaccctgctgatgcatcacaatgtgagaaattcgatcttatg

SEQ ID NO: 63683 - DNA, 409 bp, Zea mays
atcaatgtggacacatatatggaacatacactagcaatataaaaacaacaactagccaccttaaaaaaaaggctaccaagtagaggtcaaaacatgaaaactaccactaggttgtctgatcgtgtatataggcgtggaaaaacactattttgctatgtagaccgtaccatggtactgctgcaactgcaatctatagagacaaaaatattgtacaagtaatagaagctggtacggattaaagccaaacgaacatattaagatataagatgaaagatatgatatgtaaactgctacagacattctaacaacttataatacttgccattgaaggccgaattgtaaaataacacacacatatataatagagatataccttttgttacatatttatcagcctatatggtctaaa

SEQ ID NO: 63684 - DNA, 281 bp, Zea mays
gagattgagctcgatgatattagcgatgaatttatatcacaaaatgttagaacacatttttaataatatcatataacacgtaagggtttgttgctatattctataattgctatcttataaactggtgaacattgcataataatgtttataccgtcacatatatatacttgtgtgtggatgaggcctctatatcgaaattcacactgagcccctgtaaagtcatgaacggccctgaatggcaaagcatattatatgtcgagagaatagaataaaactgaggg

SEQ ID NO: 63685 - DNA, 435 bp, Zea mays
agcttgatgcagaagccgatttacctacctgtctttgtcgacccgacggccacgaggtgcaatgccacatctatcccctgtagaaaaagctagctaatagcctatatggacaggtaatattcagactgtggacgataaggaagcaaatatactttttttccggaggaaaaaaacatgcacactgcagatacaccgatctcattctaagaagtaaaagccatggaatcgatgccaacattttttttctaggaaaaaaaaggaattggtaacaaattccagtcgtcgcgtgcaaactggtttatcatgatcccccagtagagcaggagagcagccatggcccatggggaggacggaggaagaagctaggccaacgctggtctccggtgggacacgtatggcgtgtttgtgaccctgtcctggccagctcggtccgtt

SEQ ID NO: 63686 - DNA, 397 bp, Zea mays
ttaccaaatggacgtgaagagtgccttcctcttggaccaattcttgaagaggtctatgttgagcaacctcccggctttgaagacagtgagtatcctaaccatgtctataggctctctaaggcgctctatgggctcaagcaagccccaagagcatggtatgaatgccttagagatttccttattgcaaatggcttcaatgtcggcaaggccgatcctaccttattcactaaaactcttgacaatgatttgtttgtatgccaaatctatgttgatgatatcatatttgggtctactaacgaatctacttgtgaagaatttagtaggatcatgacacagaaattctagatgtcaatgatggcggagttgaagtattttctaggaatccaagtcaagcaac

SEQ ID NO: 63687 - DNA, 403 bp, Zea mays
agcttggcatacagatgacaatctcgtattctctgaagtactttcctcaaatgttcctcatgctcttgctcattctatgaatatataagaatatcatcaataaacactactacgaacttgtcgaggtagtccatgaacacactattcatcaagtacatgaagtaagctggcgcattcgtcaaaccgaatgacatgaccgtgaactcatatagtccatacttggtgatgaatgctgtcttcggtatatccgaatgtcggattctaagctgatgatagcttgacctcagatctatcttcgagaacacactggctcctctcaactgattgaataaatcttcaattctgagcagagggtacttattcttgatagtaacctcattcaaggatctgtagtcaatgtaca

SEQ ID NO: 63688 - DNA, 396 bp, Zea mays
agcttgccaacgaccagattaaggtctatagcaacgcttgtaatatccaacagctacgtcgcttctacccttaatatgttttaagtcgttcttgtacctcgtttacatacataaatagagtctaaccgtcaaggaagggtcagccttgcctcagcaaagcccgaccctccctcgggggctagaaggggggaaccccctctgcgtcaaaatttttctcggaaaagttttccaccaaaacgacttttgtgtttcccgactatatcggtaacagaaccccgcaaaacgaataatagcgcatgttagcggcaaggtcgaccgagccgagggactcctacgcctccgggatacagatacctcactcgtcacctttcgcgaaaaataactcttactcggata

SEQ ID NO: 63689 - DNA, 403 bp, Zea mays
cgcgatcttaagtcgactgcagctgcagcttgcaagccctcggacccgaccggacttcaccggaggcccgagatcaccctcaccggacttcggtcttccgcagccgcgcgtggaccgagctatccagtgagtccccgcccaaatcctttcgctcatagcttctctggcatcccggggacctccctgacctatttgattgaactatctcgtcgtgaccaggccggtctcctcgccgccgacgagcatccccgcgtgcgcgcgtggaccgaccgactccggccatctccgtcgacgttccgcacaccgttgtgatccccgcgacctccccttcaccctcgaccacttcaccggaacagtcttgccgccggtaagcccctccacccttttcttcgccgcggctact

SEQ ID NO: 63690 - DNA, 139 bp, Zea mays
tcgggtctagtttcaaaaatttcagctggaaagtctgttgcgttgatgctcagaactcgcctatttaagctacacaaatgttctttccaccttgaagaatatgaaaccgaactcgaagatggaaagggctccactcaga

SEQ ID NO: 63691 - DNA, 376 bp, Zea mays
agcttctgagggagagcacatttctttataaccaatgtttattttgagaaagacaggatttgtagcgcatgccaagcatggaagcaagttggcactcatcatccacacaaaaatgtcatgactaccgacaggccgctggagctactacacatggacttattctgcccgatcgcttacataagcatcggcggtagtaagtattgccttgtaattgtggatgattattctcgcttcacttgggtattctttttacaggaaaaatctcaaacccaagagactttaaaaggattcttgagacgggctcaaaatgagttcggcttaaagattaagaaaataagaagcgacaatgggacggagttcaagaactcacaaatcg

SEQ ID NO: 63692 - DNA, 389 bp, Zea mays
  unsure (1)..(389): unsure at all n locations
agctgtatcaaatggacgtgaaaagtgtttttctctatggaccaatcaaggaggaggtctatgttgagcaacctttcggctttgaagatagtgagtattctaaccatgtctataaactctctaaggcgctttatgggctcaagcaagccccaagagcatgggatgaatgcctaaaagatattcttatttctaatgactttcaaatcggcaaagcccatcctactctttttactaaaacaattgcaaatgatttgtttgtatgccaaatttatgntgatgatatcatatatgggtctaataacaaatctacttgtgaagaaattattacgattatgaatcaaaaattcgagatgtctatgatgggggagttgaagtattttctaagattt

SEQ ID NO: 63693 - DNA, 406 bp, Zea mays
  unsure (1)..(406): unsure at all n locations
agcttgaccgggacgaaaggcgatcattactaaggagaagacgatcacgaagctatgtgcagaaaagcttcgacataacggcagaaaaggggaaccgacttaaagatgaaaagccaaattagacctcgaagaattactatagagttattgttaaatgtaatgggtattcatgtaattntgcatgggctgcgacccgtgcctataaatatgtgaacagtattcccgtactgttcacgctgacttggcactttgctttcgcatcgcacctgtattcacattccttcaagccgaaggtatatttgtaatttactattatttacatgagtaatttaagtaaaaaaataaattaataataatgtttacagagaatatgttatttcttatactctgtggttaaatattcttt

SEQ ID NO: 63694 - DNA, 340 bp, Zea mays
acgagccatcttcttcttcttgcgctgcacctgttgctgaaggatctccaagatttggatctcctgatccaggtcatcctccggaggtgttggactaacagcctttctcttctggctttcggcctctctaaaagaaaagacgtcctgattgggatccatcggctgtaaagtaccaacccctgtcgctgaagctattttcggcggcatgacaaaggtgatgcttgccgaaagtgttcaagagtcaaaaaatggaagtgagttcaccggaggtgggcgccaatgttggggacttgttctcaaatgctttgaatcaagaacaaaccacacaaaatggttaata

SEQ ID NO: 63695 - DNA, 352 bp, Zea mays
  unsure (1)..(352): unsure at all n locations
tagctttgtaaaatctggtttgaatctgttgttatatccacccagnccaaggaaacttcagacctgatgaacaagggtcggtggtttccactccaaaatgtccttgactttgctgggatctaccgcaatccccctggcagacagtacatgtcccagaaattgaatttcctccagccaaaatgcgcatttactaaacttggcatataactgatgttctcgcaagcgcgttagcacgatccgtaaatattgtgcatgctcctcttcattctttgaatatattaaaatatcggcaatgaagaccaccacaaaacttgtccactcgggcatgaataccgagttcatcaaatacgtg

SEQ ID NO: 63696 - DNA, 390 bp, Zea mays
cccacatgtgctaagcggtgatgccacaaccattccatgcaagtcttagccattaagcatgcatctagaccggcctcttcttttgcaaaatcaactaaataaagtttgccgtctaatacacccttaaaagctagtgaaccattacttcttctaaagacagacacatctacatttgtaaatagacagttatatcccatattgcataattgactaacagatagcaaattatatccaagactctccactaaaaacacattagagatagaatgctcattggagattgcaattttacctagcccttttaccttgccttgattcccatcaccgaatataattgaatcttgggaatccttattcttgacgtaggaggtgaacatcttcttctccccc

SEQ ID NO: 63697 - DNA, 379 bp, Zea mays
agcttatgaagattcttgatcccaacatgagctagtcggttatgccagcgccaacccatgttagtcttagcaattaagcaagtgtcgagttcagctctattgaaatcaactaaagatagctgaccctctaacactcccttaaatgctattgaatcatcacttcttctaaagacaggaacacctatatctgtaaaaagacaattgtagcccattttgcataattgagaagcagaaagcaaattgtaatctaaagaatctacaagaaaaacattggaaatagaatggtcaggtgatataacaattttaccaagtcctttcaccaaaccttgatttacatccccgaatgtgatagctctttggggatcgtggtttttctcat

SEQ ID NO: 63698 - DNA, 398 bp, Zea mays
gcatgcaagcttgacccggggaagcgcgtcaccggaatagcccaatcttgctcaccggagtttaagaacccgccggcgcacgtggaccgccggtaagcccctgcaccgttttccaattccttgcgcgtatggcctcttgtgtaccccgggaagctcctcatgcaccctaattgatctgtgccgccgaggtttggccggagcaagagccgtcgacaacccccgccgcctgtgctcgtggccagggtagctccgaccaccttcgacaccgacccgtacattggcgtgaccgttgcgacctcccggacgtcactgaccaccccgccggagctttactgccgtcggtaagccccaccacacgaaactgtaccgtgggcactgttttagccggtcacggagcg

SEQ ID NO: 63699 - DNA, 385 bp, Zea mays
  unsure (1)..(385): unsure at all n locations
gcttaagccatggtgagtagcatagtccaataatattcttattgactcaagcctagctacgggtgcataagtntcatcgaaatccaaaccttctacttgggaagatcctttggccacaagtcgagctttggtccttggcaccacaccatgctcatcttgcttgttgcggaagacccatttggttcctacaacattttgattaagacgtggaactaaatgccatacctcattcctagtgaagttgttgagttcctcttgcatcgccaccacccaatccgaatcttggagtgcttcctctaccctctgtggctcaatagaggaaacaaaagagtaatgctcacaaaaatgtgcaacacgagatctagtggttacacccttatgaata

SEQ ID NO: 63700 - DNA, 410 bp, Zea mays
agcttgtgaagattcttcatcccaacatgggctacgtggcgatgccagagccaacccatattagtcttagcaattaagcaagtatcgagttcagctctattaaaatcaactaagtatagctggccctctaatactcccttaaatgctactgaatcatcacttcttctaaagacaggaacacctatatccgtaaaaagacaattgtaacccattttgcataattgagaaactgaaagcaagttataatctaaagaatctacaagaaaaacattggaaatagaatggttaagagatatagcaattttaccaagtcctttgaccaaaccttgatttccatctccgaatgtgatatctctttgggggtcattatttttctcgtaagaggagaacattcttttctcccctgtcat

SEQ ID NO: 63701 - DNA, 397 bp, Zea mays
  unsure (1)..(397): unsure at all n locations
agctgtacgacttatatcatctgccactatattancctttcctatgtgacaataaatctccaaatcataatccttgattagctcgagccaccttctttaactcatgtttatctctgactaggtgaagatatacttcaaactcttgtgatccgtatataagtggcatatatttcccagcagataatgacgccaaatcttaagggcatgaactattgcagccaattccaaatcatgtggggggtaatgttcctcatgtcggcatagctgccttgaagcataagctattactcgtccttcttgcatcaggacacatccaagcccactgcctgatgtgtcacaataaacatcaaacggcttcttaatatcccatttgtccaaaacaagtgcagtggtcaat

SEQ ID NO: 63702 - DNA, 353 bp, Zea mays
caattcaattttttgtgactcaagctaccgatatccaagattgacccaaggttattttaaattgttataccttaaactcatatcatctcaaaggaagttgttgatgttgtacgaaataaaaaattatcctatgccgaaaagtcaaagcctacaatatggaggaatgccaaaggatggtaacatctatgcttttaagtgcaagtgtcttaacttatcatttctcatgtgtcttgtgtagtcacatagaaaaagtaagcacttaagatatttttaaatttatgtcaccattctttgaagaaaattctcccatatggtagattgcatattcttcatttctatattatgacaatcta

SEQ ID NO: 63703 - DNA, 396 bp, Zea mays
agcttgaaagacgttcctaatggagcatttattaagttccgaagctcaaaagtccgtcctaagggaatgcagagccaaaatgccacctaagtaaaaggtgaagaagcttccaagtcattcctaaggggatgcaaagcttgaattccacctaagtaaaaggtgaagaagatcaaaagtcgttcctaaggggatgcagagcttagctccaaagtcgttcctaaggggatgcagagctaaaataccacctaagtaaaaggtgaagagactccaaaatcgttcctaaggggatgcaaagtatgggtgtgtattcgtgtgggtttttttaacttcggcataaacatcattttgcatcataccctcatatcatattccatagcatcgcatcatacatcattt

SEQ ID NO: 63704 - DNA, 201 bp, Zea mays
ttttttcaaatctcatctccccctggaagtctagggcctccccttcgtcgtggtaatgtctacaaatgttgtaccgaccgagtgtagtaggccccttctgaccttttcaactgggcaatgagttttttgttggcccggatttttggtcgacatctcccttgtccttgggaaccgattctaaagctggggtagatacctcgg

SEQ ID NO: 63705 - DNA, 379 bp, Zea mays
agcttgagtcaatctattttccaaggattattgatgctccaaaggataatctgggtatgaagcacataccaaagaagataagagctggagtagccaaatgtttcaaggaagacgatcaaggtgtgatatggtttaaaaaccgcatatttgtgccatagaacgaagagctccgccagcaaattcttgatgaggcacatcttagtcgctattcaattcatcccggaagcactaagatgtatcaagacttaaagcaacattactggtggacaaagatgaagattgaaattgcacgctatgtggctaagtgtgacacttgcagacgtgtcaaggccatacacatgaaaactgctggtccattacaatcttgccaatcccaaca

SEQ ID NO: 63706 - DNA, 378 bp, Zea mays
gatcttaagtcacctgcagctgcatgctggaagttcttcatccccacatgtgccaaacggcgatgccatatccagcccatgctagtcttaataattaagtatgcatctagaccgacctcctcttttgcaaaatcaactaaataaagtttgtcgtctaatacacccttaaaagctaatgaaccgtcacttcttctaaagacagacacatctatatttgtgaataaacagttatattccatattacacagttgactcacagacaacaagttatatccaagcgactcaactaagaacacattccaaatagagtgctcggatgaaataacaattttcctaccctttaccttgcttggttccatccccaatataatgaacttg

SEQ ID NO: 63707 - DNA, 307 bp, Zea mays
cttgcctactttatgttgtggcgtttctaccaaccaaggttgcaatcaacccctctcaagcgggtcaaagacccacttgaataccacagtgttttgctttgcttttcttaatctcgtgcgcgaggaatcttcacaacttggaaccttttgcccttacacttgaagttcacaaagaagcacaaagttagggagggatgaacaacgcacactagacacaaaatcagaatgtcaacacgcacacaagtcgcaacaagagctcgcaacacaaccccgcgagttcacaactcaacaagagctctagatgcta

SEQ ID NO: 63708 - DNA, 390 bp, Zea mays
  unsure (1)..(390): unsure at all n locations
agctngagaaggatacgagcctgcttctgacaatgtangaatttggtcgtctactggactagcataaagttgtccagaataaaccgtttcttaataaaagcggtttgattgggggaaaccatattttgcagccgacctgctaaccggttagccaacaatttagtcaccaacttcgcgaaactatgaaccagacttattgggcggaaatccctcacactagtggccccctccaccttgggaagaagagtaatgaaagctgaattcagaggacccaggtttctgaaatttctagcccaaatgcagtgaacggccgccatgaaatcagtcatgattaccgaccagcagcttttgtaaaatctaccagtgaacccgtcgggacccgaggatttg

SEQ ID NO: 63709 - DNA, 370 bp, Zea mays
  unsure (1)..(370): unsure at all n locations
agcttaataggcggaaaattttcactgttttttgggagaatggcggncgagggatggctcacgaaataataaagaaaagtgaaaaagatactcacgacactagagaagcaacaaaaacagctgaaaaggctgccgagcttgagagacgaataggtattacttaatgatttttacctttgttgtttacttttgcaacttcgaaataatttacgttttctaccgcagctgaactatctcctcccccagagcccttcgagccactggccgaagcagaggcaaaagaatcatcagaaattattagcatggccgaaactattatagacaaagtcgttacccaactgctgaccgaagctgcaaataaaagtttgaa

SEQ ID NO: 63710 - DNA, 397 bp, Zea mays
gcttagcgggcggaaaatgttacactgtcatctgggcatatggtggtcgagaaatagctcacgaaattatgaagaagagcgaaaaagacattcatgaggcccgagtacaagctaagcaagctgaaaaagctgcagagcgcgagaggcgcataggtattgtttcgcgtcatctagcttcggcatttgttttcgtgacctcgaactgattaatttttctactgtagctgaactatctcctccaccggaaccgttcgaccccctggccgacccggaaatgaaggaagcaatagagatcatcaatgtggccgaatctattattgacgaagttgttaacaaggtgttaaatgaaggtgcggagaacgtcctgatagaggactaatacttgttgtaaaaatat

SEQ ID NO: 63711 - DNA, 448 bp, Zea mays
  unsure (1)..(448): unsure at all n locations
tgcaagcttactcaacttatgtgtaacatgcctctcaagggcgatcttctatgctcttaccagcccgatcatactagccgtaaattaagaaaaaagattccaaaaaccacgcgcacctacaacttacttctacnnaatcattcatggaacaactgggttgaattctaaccgacacgagaacannaaacgttaataaggttttttgccgccaaagaaacacannttctaacatctctaccccgaatattctaagcgcgcgtggtcaccacatacccatatagttcacanaatgcanttctaatggtcttcttaaacaccacgcaaaacaatcttcttatcttggcaatgggtcttnntcgcaggagccaatcaagggatgtaagaagcgactcgaagcatcagggtgtagcccttgacgtccgcaacaatgtcatcaggaacaactaca

SEQ ID NO: 63712 - DNA, 402 bp, Zea mays
  unsure (1)..(402): unsure at all n locations
cctgcangcatgcaagcttgtgaatggcttgccgaagctacttaagctgcaggtttgtttcccatatattctggtatgtaaggagagtgacatgaagcaatatgtaaaacctgcttcggctgattctgccgagcttcagcttcggcaatctctttttgcttcaaaatagtgatctggcacgtccttgtagtatgacccttgtcctctccacagaataagcaatanattttcctgggctgatcctcgtatctttttctgaagcccctgccgcctctgccccttggaactggtggcctgaaagagctgtgctgctgtcccgaagactgtgaggtgtgctgtggcctctgaagctggctttctttgtcatcattctgactagagctgtcgattgatctgacatgc

SEQ ID NO: 63713 - DNA, 400 bp, Zea mays
  unsure (1)..(400): unsure at all n locations
agcttaatatccattgatgcttgaacaaatgtttccaaaaagcacttgtaaaaatcttgtcccaatcagacaccactgtgttgggcatcccatgtagcttgattactgaatctaccatgatttgggccactccctgagcagtgaaagggtgctttaagggaaataagtgagcttacttggtgaatcgatccaccaccaccaaaatagtatcatatccttctgacctatgtaacttctcaataaagtccatagttaagtcttgccaagctcctgctggcacatgcaatgggtgaagtaacccanaaggatactgcttgagacttttggcttgctgacaaactgcacattgtttacaaacaattccacatcagttttaagccgaaccaacagaacacttttt

SEQ ID NO: 63714 - DNA, 383 bp, Zea mays
  unsure (1)..(383): unsure at all n locations
agcttaacactntgcacatgattggttcttacacaatatagacggaaggatgcatgagcaagctgaaaagcatcccaagtatggctcactgaactgtatccaaccagaaacacatttattataaataactgtttcatttaaatcgaactggaagagggagggtgaatgaatacctttgaattgctgacatcaacgcatggcgaaaatgagatgctgcataagacgaaaatgaatntctccagtatattacatatgggatcccctgaaataaattaatattagtattagtaaaattcccaattccaaaacaataaaattggctggctaacacttaaagcaatataaagtaagaacattacatataacagttgggtttgatatag

SEQ ID NO: 63715 - DNA, 417 bp, Zea mays
  unsure (1)..(417): unsure at all n locations
gattcttaagtcacctgcagcatgaagcttgtaatcatagtatcttggaatttcttgataatcattattgtctnaaatagaatggtaatgaaaataagcgttgactggaaatatacgattaatgtcagctacattattgctgagttcaacctgggtttttcccttgattcctgtgaagtatccgaagaaaaataagtaggcaatgaaaggttcaccatattttagtagctgcccttctgttcagacaacgactattgtcctccatggtggtgcatactantgtctttattgataaaatccgttttaaggtgtaataaacattcatacatttcttcgattctggtggcataaaggaattctgttttaatattcactgaaatattcctctctctaaatagctaccgtttattactcccc

SEQ ID NO: 63716 - DNA, 400 bp, Zea mays
agcttgcatgacaaaaacgtgaatgctatatatctgactcatcagaaatatttacataattcaccattttattacacacatcaagtagtgataagcggaacaagcctccgcagtcatatcctttaccaacaaaaataccatgtttcgacacaacacatttatttgactcaagaacaacttcgtatccatctcgacatagcatcgaagcactaatgagattcttcttgatagagggcacatgctgcatgttcttcaatggcgccgtctttctcgaagtaaacttcagaatgaccgtaccaacaccaagaacataagcacgcgacccattttccattaacaaggcactagaccttccgacctggtacgaagagaacatagagacatcagcacacacatgaat

SEQ ID NO: 63717 - DNA, 260 bp, Zea mays
caagttggtcacctcatcattctcacaacaagaacattcatgacttagtgacatggccactggaacctccttcacataagatctattcggcgccgaacgcttacaataagcatcggcgggagtaagaactgcctagttattggggaagattattctcgcttcacttgggtgttctttttgcaggaaaaaactcataccccagagaccctaaaaggattcttgagacgggctcaaaatgagttcggtttaggatcaagaaa

SEQ ID NO: 63718 - DNA, 176 bp, Zea mays
  unsure (1)..(176): unsure at all n locations
agcttcttcctactctggctctcggatttggtgggctataagaagatnggtgtatgcccaataactgtgagctatgatgaccgctctgagcatttttggccctattatcggtagcgttggaattatggattgacctaacaagcctaagatgaagtcttcctccgaagacacatagt

SEQ ID NO: 63719 - DNA, 405 bp, Zea mays
ctgcagcctttaagggagacacatttatgttacaaatgttattttgagaaagacagatctgtagcgcatgccaagcagggaagcaagttggtgcccatcatccacataagaacatcatgacgactgataggccactggagctcctacacatggacctattaggcccgatagcttacataagcctcggcgggagtaagtactgtcttgttattgcggatgattattctcgcttcacttgggtgttctttttgcaagaaaaatctcatacccaagaaaccttataaggattcttgagacgggctcaaaatgagttcggcttaaggatcaagaaaattagaagcgacaacgggacggagttcaagaactctcataatgaaggctttcttgaggaggaaggcatcaagc

SEQ ID NO: 63720 - DNA, 400 bp, Zea mays
agcttcagcccgcccgcagcccactaactatgttgggctgatttttgtcctcaagtcggtttaagctgagaaaaaaaaggaactgttggattttcatctcgtcagtatccagtgggccttttgatacgaaagtggaactcggtagcccaatttgttgttcaatgcgttcgtggtaataccacaccggctccaccttgaagagcaaaaacgtcacggcattgttgtaagcccatgactggaccaggagtgtgaggcctgcctgcctgcctgatggaacgggctgacatccttccatccataagaaagcaaagagaaatatgatgttgctgcatttgattggttggtaaagaaagattggagtgatgggaagggctatctgttttctgtagatgagctatgc

SEQ ID NO: 63721 - DNA, 385 bp, Zea mays
acattttaggactaaccaatgtttattttgagaaagtatttatttgtagtgcatgttaagtagaaaagcacggtggagttcatcatccacacaagaacatcatgacgaccgagaggccgcctaagctactccacatggatctattcggcccgattgcttacataagcattggcgggagtaagtattgtcttataattgcggatgattattctcgcttcacttgggtgttctttttgcaggaaaaatcacaaacccaagagaccttaaagaaattcttaagacgggctcaaaatgagttctgattgagaatccagaagattagaagccacaatggaacagaagtcaagaactctcaaattgaaggatttcttgaggaggagggcat

SEQ ID NO: 63722 - DNA, 400 bp, Zea mays
agcttatccatgatgcgacatgtggcctgttaaaaggtcctatatcagcaagcctactttggttctgttcgccacacggcacttgaagctcgctgcttatcaacgcgagctaatcggtctagtgcatgcagtacccctttggaggccgtacttatggggtcatcgtttcgtggctcggacagaccatttcgccctcaaattcatgctgggccagcgactgtcgactgtcccgcaacatcactgaatcaataaagtgtttgggtttgatttttctgttgaatatcgacccagaggatttaacacggtagcagatgctatctcccgcaaggacgccgaagcaatggagtccctatcaatatccggaccgccggtccagttctacgacgaagaacacactgat

SEQ ID NO: 63723 - DNA, 414 bp, Zea mays
  unsure (1)..(414): unsure at all n locations
agcntttgtcggtgattcaccatttgctggatacatcgatgttgatttttcggtgattcaccatttgcaggagccgcctcaagagggtgtcgtcctccacaacccacgcgaaatcaaggcagcatgttctgccggaggagcgaaacagaaaatatcggtgaatgtttgcgcggcggatgaggtgattttcgcctgcgagaaatttgggagcacaactagggaacggttggaggattatttttctttccccccccctaaaataagattgggacaaaggtttataggagttattggagatgctcttatttccttctagagtgtatacgtacattttactacacttcccttggacgattaccatgatatatacatgcctcattaanaactctatctaataccccggtgggagaacta

SEQ ID NO: 63724 - DNA, 401 bp, Zea mays
agcttagtcgaatgtgccttcggcaatgtagtcggctcttcagtcttctgtgtgggaggagcaacttcttttgcttcagtaactgaagaagatttcttgccaaactcaggcactatggccggttgaatatagcgcgatcggtgggtaaggaccttcaattttttcctctttggcgtaggctcgtttggagcagccgaagcaacaacctttccagaagttgcaccctttcttttctgccccctcggcgggtagcgatagtaaggatacataaatccaatagcatcaaaaaccctatttaatcttttctttttttggctcccgaaggccgcagatagtgcattatcttccgacttggaatatgctccaagtagctcatcgctagtatattcaacacacttcac

SEQ ID NO: 63725 - DNA, 371 bp, Zea mays
  unsure (1)..(371): unsure at all n locations
agcttctaaagggagagcacattntatgtattaacaaatgttctttttgagaaaaacagggtttgtagcgcatgccaagctggaaagcaagttggtgcccatcatccacacaagaacatcatgacgaccgacaggccactatagctcctacacatggacctattcggcccgatcgcttacataagcatcggcgggtgtaagtactgtctagttattgagaatgattattctcgcttcacttgggtgttctttttgcaggaaaaatctcatacccaagagactttaaaaggattcttgagacgggctcaaaatgagttcggcttgaggatcaaaaagattagaagcgacaacggaacggagttcaagaactc

SEQ ID NO: 63726 - DNA, 329 bp, Zea mays
gatctgaacggcgacttcacactgttcggagcattgcaaactgaagttgatgccctggagaaacaaaccttgtctctagccaaggattgcctaccaccaaacatgctcaagaaggaggtatacatattatgccatgtggttattcaggcgtctctgatattggtatgtttccttactcatgaaactcattctgcttattgtttttggcaggagaatccactatcacctcagctgtcaaaagatgctgtgaggcccagtgaagatcataacaccacaaaggtggtgaaggacatggagctgtcaaaactccacgggaacatcaaagcact

SEQ ID NO: 63727 - DNA, 398 bp, Zea mays
agctgcatatattattctctttaaaatgtttttaagcatctattactctattagtgacagtttgctagaagataattgtgacactttgctagaagagtattatacctctttaaaatgctattaagcgtctattactctattataccattgaaaattttagaaatcccttatttgtaattgataatcatgaaattaaatttcagtggcatagagagttcacccaaggaatattagcacaatgtcaaaatgtagttaagctgaataacaattactcacctgacatgatgctatcaaacataaaagaaatgaattggattaaaggataactagaaaatccaaaacataattaagtggctttatgagttacgagttgatgatgttgaacaactaaacaaaac

SEQ ID NO: 63728 - DNA, 392 bp, Zea mays
acctgcagcatgctacttggaagttcttaccctatttttgtaagcggagatgccacagccagcccatgctagtcttatcaattaagcatgcatctagaccggcctcctcttttgcaaaatcatctaagtaaagcttgtcgtctaatacacccttaaaagctagtgaaccatcacttcttctaaagacagacacatctacatttgtgaatagacaattatatcccatattgcataattgactaacagataacaaattatatccaagaaactcaactaaaacacattagatatagagtgctcatttgatattgcaatttttcctaagcctttcaccttgccttgattcccatcaccgaatatgaatgagtcttggggatccctgttcttgacgt

SEQ ID NO: 63729 - DNA, 181 bp, Zea mays
gctcatgagttcccaagaagctgctgcatctacaagggaatctattcttggtgaaaggaactcatcctttggacatgccttgttaagaactgtgaaatcagtacacattctccatttcccattaaccctcttcaccataacagggttagctaaacactctagatatgttatttctctgatg

SEQ ID NO: 63730 - DNA, 410 bp, Zea mays
tgcaagcttgcagttgtttggactacagttgttggcggcctcctttagatgatcattctgctgcatcgactttataaatagattcgaatagccaagagattctccagttcgtgaaaggcactgcgctgcttcttgtgcacctcttcttgtagaacagaaaataagtacagacttcccccttgaatgttgcatcagtatatctgcaatctatatttcatttatatttctgcttttgaattgtaaaagtatgattggcatgatgtgcaatgcagctactgagtgaacaaaagatgttacttaccataaataaaactctgcaacctctacaagttcaaacaaacaaacaaaattaagcaggcagcattatataaaatccaactatttgcacaatatgatacaactcacggaga

SEQ ID NO: 63731 - DNA, 328 bp, Zea mays
tataaactcacgacctcacggcaagcgtggtaaagctaaatattacatgtttttctctgggttatgaataatatttactcgatcaaaaaattctattggtgtcaaatgccattttcttacatgtatgcaaagagcagtcgctcaaatattataattggtaattggtatataaacatctagtcccattgtttaccacatatcttttctaaacgtcatttctatatattgtgagacattcttttgctgattactataccaagttctacaattttgtcccttttgtcttatattcatggaaaaaggatcgctattgtagcgttttcctgat

SEQ ID NO: 63732 - DNA, 373 bp, Zea mays
gcttgcccttagcaactcatcagtgtgagcgaaggttttttttcccccacgtgaaatcttgagggtgtcccagatctgcttggcgttatccaagccgctcactttggggtattcattcctgcacaatgaaactagaagaacagtagtagcttgtgcattcttatgaatttgctcattaatgaacatgggactattcgaactattcaaagggcattccactctctacaatctcccatatactatgatggagagagaacaagtgactactcattttgtgactccaaaattccgaatcctcttcatcaaaatgaggagggttaccaagtggaatatataacaaatgagcatttgtcctttgaggaataccccgaaa

SEQ ID NO: 63733 - DNA, 403 bp, Zea mays
acctgcagatgcagcttagacaaaataatagagtgtttaaggggcctttattgtctacaactcttaattaaaggtggggtctgtcttaacggttatttttgttggcatctaacaccaaattaagcttctgtgccaaaaaccacagaaggctaaggggtggttatatagttatgattatctaaagtttaatgacaaaaaggcactttctactactttgttgtttgaaaaaagtcaaacagcagatcccgtatttttcctaagttcttaataacaaaacattaactatcccatgggtgggggtgttttcaccttggggttatttttgtacggtttttctaagatttccttgttttattaaataaaaaagatccacttaatttatactaaaccgggttgatagatt

SEQ ID NO: 63734 - DNA, 340 bp, Zea mays
aaacggagggaaaacgacacggaggcacgcgacgacgggcggctgggccgttcggccttgcgtctgggctgaaaacgaggtgttcgccatggcgcacgggacgaaaacggaggctcgggcacgaactcgaaaataagctaaatccaagcatgtggaaagacaccgaacataatgtgtatgtctttggtgaagggcacagaggaactgagggaaaacaacacggaggcacgcgacgaacggaggctcgggcacggaggcgcgcgacgacgggcggcagggctgttcggccttgcgtttgggctgaaaaccaggcgtttgccatggcgcgcgggcccaaaac

SEQ ID NO: 63735 - DNA, 394 bp, Zea mays
  unsure (1)..(394): unsure at all n locations
aggcgttagaaactaatactctttgatttagtaccgataaccttcgctccggtgtgatctcggacgcagcctaacttttcatctgcaacaccaccgaaaagtagtgcccctggttgatatccacatgatatggcatattcttttaactcttatttctcagcctttgtcaactcttgtccaactaagatttgaaaattgaaaatttcctcttccgaagcatcttcagctatttccttctccttctcaggtactgtagccacggtttcttcagcggctgcagcagcttcttctgtggccatatccagaagtatcttatcaatgttagaaagtgtgctttctaaatgtacatcttcggntgtggcagcttcagtaggtgcaacttccgtagctgttg

SEQ ID NO: 63736 - DNA, 384 bp, Zea mays
agcttctaaagggagaacacgtaatatgtctaacaaatgttactttcgaaaaggatagaccttgtgcagcttgtcaagcaggtaaacaggtgggaagctctcatcataccaaaaatgtgatgacaacatcaagacctttggagttacttcatatggacctcttcggacccgtcgcctacctaagcttaggaggaagtaagtatggtcttgttatagttgatgatttttcccgcttcacttgggtattctttttgcaggataaatctgaaacccaagggaccctcaagcgcttcctaaggagagctcaaaatgagtttgagctcaaggtgaagaaaataagagcaacaacgggtccgagttcaagaaccttcaagtggaggagta

SEQ ID NO: 63737 - DNA, 349 bp, Zea mays
ctggcataccacggatgcccaacaataatatgttgaatgactcggccatgttactacactggaacctatatctccatccacctaagtcgtgagctctcggtcacttcttcaaattctgcatcgatccattcaaccaatctctgccttcggcatttgatgcgacgtttagcttttctaacttttttctaaagaactagtcttgcagctggcgacatgttctctggaaaagctcaaagttatccttgataccatacttacgcagaagattctcagcaaggtgtcgagtacaccacttggaatgaaaggagggtacccatccatctgctcaccgaccgcgtggaggattccc

SEQ ID NO: 63738 - DNA, 354 bp, Zea mays
atgatagtgaccaagatccagggaaccagaaggagaaaaacaactgtatgaagcctagggcgaagcgcatttatgcaaggagtgggattcaaattgctcctctttcgactccgacaatgaaaagactctgccgccacacgcctttcaacacagtcatttcctctttccccaacgagcgttacacatgccttattgcaagggagaagaaaggatgtactccaaaactctacttatgcttcttcaagcgaggacgaatctaatgatgaagaatgaaataattattcatgtttatttaacggcctagatagaaccaaggtagataaaattaatgaattgattgatgcccttaatgat

SEQ ID NO: 63739 - DNA, 411 bp, Zea mays
  unsure (1)..(411): unsure at all n locations
gcagcttctaagggagagcacattntaggattaaccaatgttcattttgagaaatttangatttgtagcgcatgccaagcaaggaagcaagttggtacccaccatccacacaagaacatcatgacgaccgacaggccactggagctcctacacatggacctattcggcccgatagcttacataagcatcggcgggagtaagtattgtctagttattgtggatgattattctctcttcacttgggtgttctttttgcatgaaaaatctcatacccaagagaccttaaagggattcttgagacgggctcaaaatgagttcggcttaaggatcaagaaaattagaagcgacaacgggacggagatcaagaactcacaaattgaaggcttccttgaggaggagggcatcaagcat

SEQ ID NO: 63740 - DNA, 395 bp, Zea mays
ctgcagcttcgccgtcttgttatttctgttcctcagcacctttgttcagctgcgcatagtcaggatattcgaagcccagtgcatcaaacactcggttcagccttcgcttcagacgggtgccgaaggctgctgtcatcaattgatcttcttttttcaataatttccaagaatttcattacacatcacctcaactgtgtctagccactcttggcagggcctcttaaaatatttcttgaatttgaagtggtaaggaagccggacaagatccccttcctttttctccccctttaactgtggcatttcccattttttcaaaatagggaagactctgaatgctaagaattcttgaaccagatccctggtaccaatatgctctgccatgattctgaattcat

SEQ ID NO: 63741 - DNA, 337 bp, Zea mays
gaccggtttgaggccaacaacacatcattgtatcatcataaataaaaaaaatgtgggggctcacactggagctttcttgatagcatgagccctccttgttaaactataactcattagctgcttttactcttaagatcacctttctttgaaggcgcacattttttcctattggagaagccataatgccgaccgtagaaatggtgtgtgcggctagacacataaaataatcgataaaaaacatatattaccatccgatttcatatctcataattgtggcattgacttgactgccaacaatattaaaacccatgaattcactataattgtggcttttaaa

SEQ ID NO: 63742 - DNA, 386 bp, Zea mays
agcttggacgattcgcgatgataaggggtgaggagccaacacatacatacaaccggctcaagacccttatcaacaaaataaggagctacggaagcacgcgatggacggaccacgacgtcgtctgactgatgctaaagtcctttaccgttcttgatcctcatttggtgaataatattcgggagaatcccaggtacaccaaaatgtcgcccgaagaagtccttggaaaattcttaagcgagcgaatgatgatcaaggaggcaagatacgtggacgacgcattaaatggaccaatcaacgagcctcaaccccttgctctcaaggcaacaagaagcaaggaggcgctacctagcaaggtggcacaaattgagggcggccgacttaatgat

SEQ ID NO: 63743 - DNA, 389 bp, Zea mays
  unsure (1)..(389): unsure at all n locations
ctttattccctatagtttattgtggcggctacaccataaacacagttggtatgatctcacaaaactaacaacccttttagtacaactattataatggtgtgcacaagtgccaaaggggtgagggagactatcctcactactaacaactagggaataacctagagcaagcactaaaacaacagtctaattaacctaagcactttgtaaagcacctatgctaatcactgaataactttntgagtacttggatgtgtaatgctataagattggagtctcatctctctaaccttgattcttggcctccccacttctcagatggtccgatgggaccgcatatatagccccaaatttataactagtccttgattgccatacaaaaattctcattc

SEQ ID NO: 63744 - DNA, 340 bp, Zea mays
ttggctggcacttgcaaccttttaccaccgttttgaatctcttgatgatgagagccatctcttcatcattaagcctggccgcctcaataagtgccaccttgttaggtagcgtctccttgcttcttgttgcttgagaactagaggtctaggctcattgattggaccatttcatgcgtttggcacgaatcttgtttacttgatcatcattcccccgctcacgaactatccaagtatctcctcgggcgtcatcttggtgtccttaagattctcaccaattttgtttacctgatgaggatcaagggacattaaacaacttatcttttgttgacgaagtcgtggt

SEQ ID NO: 63745 - DNA, 400 bp, Zea mays
  unsure (1)..(400): unsure at all n locations
caagcttagccgnctaagggttttaagctgtttaacgactgtttttctagaaangtgggtcgaagatgagtagctagtaagaactgcatacaatgacatctgccgcttaacctcctttcagtgaaatgagtgggtattaggacatcgaattgacagaaacacttctcgtcactgtactcactttcacgtgacttgttcccttccgtttctcttagaactagaaagcagatattcggttttctcgtgtccacgcagaacagaacacacgtacgtcgctgtggaagagctgcattcatttgcattacatcgggcacccgctggagacagcactggcctgacagggggttggtgaccattacagaatcgtgttgctactaccggaagcaactgctaactttgc

SEQ ID NO: 63746 - DNA, 376 bp, Zea mays
agcttgtgaaggttcttcatccccacatgtgctaagcggcgatgccacagccagcccatgctagtcttagctattaagcatgcatctagaccaacctcttcttttgtaaaatcaactaaataaagtttgccgtctaatacacccttaaaagctagtgaaccatcacttcttctatagacagacacatctacatttgtaaatagacagttataccccatgttgcataattgactaacagatagcaaattataaccaagagactctactaaaaacacattagagatagagtgctcattagaaattgcaattttacctatcccttttaccttgccttgattcccatcaccgaatacaaatgaatcttgggaatccttat

SEQ ID NO: 63747 - DNA, 271 bp, Zea mays
gcttcggcagatcagcccaagcctatgctcctatgtgaagaaataacataataaagggtactgctgggatcccagttatctgatgaaaaagaaaaattttgctaagatttttgttcaacaacaaaaatggttttgcttggatagctaatgatctttgtggtgtcaacagagatgtcatcgaacattcacttaatgtggatccatctttcaggccaaagaagtaaagacttcggaagatgtctgaagataaagctgaaagtgctccgaacca

SEQ ID NO: 63748 - DNA, 371 bp, Zea mays
  unsure (1)..(371): unsure at all n locations
ccttataacaagaggattttttaagtggagtgcttttgtgaagacttttgcgaatcacttgaagcgttagtatttttgtgaatgattntgtaaagcgtgtgcaaatatgtgccaaacataataacatgtgtaagttttgtgaatgattctgctgcggcttggtggagggttatgtgatgtggatctatcattgggcaatactaattaaatttgtatatctatgtgattatgtgtataaaaattggtgatttgtgatgcttttgtatatataacagatggtgaatgctaattaatggtatattatcattattaaccactattattacgggcacctttctgttggttgctaatgtatagtataacgactcatg

SEQ ID NO: 63749 - DNA, 401 bp, Zea mays
  unsure (1)..(401): unsure at all n locations
ctgagcatgttgcaccgccttaaggtgttgccgacttaagtcgattgctctttttgtatggcatagcggncaccccgagttaagtaagcgtgagcatgttgcaccgccttaagtgcgtgccgacttaagtcgaatgctccatttgtagggcataatggtcaccccgagttaagtaagcgtgagcatgttgcaccgccttaagtcgttgccgacttaagtcgattgctccgtttgtagggcatagtggtcaccccgagttaagtaagcgtgagcatgttgcaccgccttaagtcgttgccgacttaaatcgattgctccggttgtagggcaaataggacacccccagttaagtaaaaatggcagtcgatcgtaaacgaaccgagtttctttgaaatctctct

SEQ ID NO: 63750 - DNA, 416 bp, Zea mays
acctgcagcatgcagctttttggagcatagtcttaaattctgataaatttgtagctctgaaactaaaatctggcagccctgaaacttcatcctaagtactgaatctgatgaacaacaagaaagcatttcagaaaaagaaacatatgtgcaaaagaatacaataatgcgataggagagcacaggaatgaacgaactgagaaacaaagatcaaaggagagtgcaagtatgaacgagcctaccgagaaatacaggaccaagaataagagccagtgatggctgctattgttgctacagatatagtgatcagaggcgaacaatcacccgctcaaacatttctttgtagctaagaaatgctttgaactagaccggctttctttgtagtttttaactctttagctcattccatttcttcagtt

SEQ ID NO: 63751 - DNA, 243 bp, Zea mays
aggaagacacatctagaccctcggagtacttatatcgacctctttaacccgtcgcctattaagcaatgaagagtaagcatggacatggcatagttatgatttttcctcttaacttgggcttctttttggaggataaatctgaaacccaaaggaccctcaagcgcttctaaggagagctcaaatgagtttgagccaaagtgaagaagatatgagcgaaactggtccgaagttaagaaccttcca

SEQ ID NO: 63752 - DNA, 371 bp, Zea mays
agcttatttgggaattagcccttccttttcactcttccaatataatttcttcttcttccctcgctcaatcaaagagcaacttacagtagcgaggtgtataaattcaattatgtgtccgacacccacactttgattgtcctttgaaaatgtctcattaaaatgacacaagcgttggttttatgtgagaaatcacgagcctacgcttctaaagttcgtaagggaaaggctggtccccaaaacaaaatgaatgggtgatatagccctagaattcattaaacaacactacacaaaagattttgctagacggtagcaaaacattttcggaggcgggcgtgcctacaggtcgcctccgttaaacatggtagggtcgc

SEQ ID NO: 63753 - DNA, 398 bp, Zea mays
  unsure (1)..(398): unsure at all n locations
agcttanagccatggtaaggagcatatgtcaataatatgttatttgactcaagcctagctacaggtgcataggtttcaccgaaattcaaacctttgacttgggagtatcccttggccacaagacgagctatgttccttgtcaccacaccatgctcgtcttgcttgttgcggaagacccatttggttcctacaacattttggttaggacgtggaactaaatgccatacctcattcctagtgaaggtgttgagctcctcttgcattgctaccacccaatccgaatcatggagtgcttactctaccctgtgcggctcaatagaggaaacaacagagtaatgctcacaaaaatgtgcaacacgagatctagtggttacccccttatgaatgtctcccaagat

SEQ ID NO: 63754 - DNA, 342 bp, Zea mays
accaatcaagacgaggtctttgtgagcaaccttccggcttttaagatactgagtattctaaccaagtgtataaacatcttatggggctttatgggctcaagcaagccccaaaaacatggtatggatgcctaaaagattttcttatacattacggcttcaacagtcgaaaggtcgatcctactttatatactaaaactcttgaccacgatttgtttggattgccaatttttgtagaagatattatatatggggccactaacgaatctacatggaggaattttatagatcatcaccaaaaattctagatgtctatgattggagaatagaacttttcttggaatt

SEQ ID NO: 63755 - DNA, 396 bp, Zea mays
agcttattgattgatgttggtgcacatggtggctgcatgcccttgcatttcaacctcgcaaggattttttgccacacgaatagcgtttctatgactgataacatgctcagtaccactgctacattccccaaaatcagctacccttggcctttagcttttaagcggaacggtgttcttgtacaaacaatatccggtgagtatggctcgcaagggctttgtgttgatctcaaaggtaactcaaattgtaattggtatgatgcaaagtagtgcttatctgcatatggatacacatggtggcatttttgggtgcacataataagttgactgcatttttaccttccattttgatatgttgcgttctttacttaatttttttattggccttggagaactttt

SEQ ID NO: 63756 - DNA, 388 bp, Zea mays
ggatctctaagacacctgaggcatgcagctttaaaggataaacattgtgtatacaaagtcatttgaaaagatggggttgtagtgcatgtcaagcaggaaacaagttgtgtcccaccattcacacaaaacataatgacaacggacaggccactagaactactccacatggatctattcggctcgatagcttacataagcatccacggcagtaagtattgtctagcaattatggatgactattatcgcttcacttgggtgttctttttacaggaaaaatcacaaacccaagagaccttatagggattcttgagatgggcttcaaatgagttcgaattaagggtcaacaaaatatgaagtgacaatgggatggagttcaaaaactcccaaa

SEQ ID NO: 63757 - DNA, 328 bp, Zea mays
gaatttgatgttggttttttgggatcattttccccgccgagggcgggtgaaaaaatgcgctctctcgatcatgaaccagtgtgtagctgtgggcgacccttttctaagtatatgtgaaataatcctggcctctggatctgatctgaaccgccaggggttctagaaactccttcgggatcatggttttcataagagccccctcgtaaacaagaattcaacccgccgtccatattcactgtttactgtgtctaagacagtttacctggagcccttgagtctctgtaattgtgcgcccatcatactctgaaattcagtatttattttaaaa

SEQ ID NO: 63758 - DNA, 217 bp, Zea mays
tcttgaaattctcagtggtaggcaatttcaaaaaacctcgtaacaaccccgggcctctattaaaagcgtgaccgaagattccccgaccgataaaaaaatgccccccaacactatgggaaaggttccccccggtatttggaattacaacatgctatttcaaaagtttttcaaaagctttaacctggtttcgcagcccacaaaaaattacctataatgc

SEQ ID NO: 63759 - DNA, 209 bp, Zea mays
aaagttcaagatcttttaatttgagtttggagctacaagttatggccaaaaataccaacaagcgagcattggctattcggtgcacatcggacccgccggtgcgccatcttcggaagctccaacggctatcttcacggctagtacacgtggcatgtgcggtgcaccactggacagtccggtgcacttgtccagtgcaccacagaaagctg

SEQ ID NO: 63760 - DNA, 364 bp, Zea mays
gcttgttgctagaaatctgggagtgttatttctgccagttgttaggctccgaggaaaacgggtcttacaagtggggtccacacgtaggtgatgcacgcaaaattgaggaggagggtagaaaaaggttgcggacggatcccttatgagcgcgtgggaatgggcatgggttcaacgcctccagccgccaagttcgcattgccgcccgtggagttcggcgaggtagaatcccgaatccgacgtccagctccacgcacggtttgttacaactgcttcgccgcgaaaaggggaagagaaagacctgacgcgtggggccaccgccagtgcaacggcgcggtcgattttgcagggggaaaggacccggtct

SEQ ID NO: 63761 - DNA, 399 bp, Zea mays
  unsure (1)..(399): unsure at all n locations
agcttcgnctctggcgcgttggaatcggtgctgcttcaacagcatgtttctgacttagaggcggcgaatgctgggtagtgcttttctgcttcctttcagctacctgattaaactgcttcttactttaacccttttgcttgactgtttctcgctagatatggctcggcagttttctggtcttgaagagaaacattctcaaagtcaggctgaactggtccggcggtgctctgatcttgaggaaaagtattcccaaagccagactgagctggcccaggtttctgctgctctgaatgatgctaacatgctgaactctactcttcgcgttcagctcgattctgaaaaggtgacctgtgaatatgggctttgtttgctgtgtcttattgcttgcttgacgtttga

SEQ ID NO: 63762 - DNA, 347 bp, Zea mays
actgcagcctctcctccacccaaggttccccctaaaccatcgctaaacactcgtccaagcttcggtgtctttgtttatttcttcttcgtgagcgccttggtcgccaatcagcgatgaaatttgcttacgcctgagactgaataacgatctatgtacatagtctacggtgaacattatattctgcaacccattgttcaatcctttcgggagcttctttgttcctcataatgtccttcacaagctgttggtggggcgaaggcgaatacaccccccttcgctgaagccttctccgtactctctgtaccactggggcaatgaaacgggcagacttacccttcgtctcatac

SEQ ID NO: 63763 - DNA, 414 bp, Zea mays
caagctttgtccatagtggtgctttctactactactatatttgaaaaatgtcaaacaacagagtctttgtgcaagagcaatcattctagaatttgacaacttttgcttacgggaaagcgcgtagaaattcttgtaatatatggcttttttcatggggtagggggtaatgtgtgttaccttacatttttaattgagttttagatttttctctggtggtttatctcataagtaattgggtaaaaatttgtttgcccactgttgcacaattttaggctttatcatgatttaattaaaacatgggccaaattcaagttttgattgttcaagtcacttattgtgatgggttggggtgtttatcatttttgtagtggtgttatatcaattaggagtctactgaatttctctcgccatttt

SEQ ID NO: 63764 - DNA, 350 bp, Zea mays
ggagttttttatcccccatgttctagcggcgagccacaccagcatgcaggtcaccataaaatgcatcaaacggcttttttggaaaatagccaaaaaaggttgccgtttagtacacccttaaaggctagtggaccatcacattctttaaagaaagacacatctacattggtaatagacaattatatcccattttgcataattgactaacagacaacaaattatatccaagcgactctactaaaaacacattagaaatagagggctcagatgagatagcaattttacctaacccttttaccttgccttggttcccatcaccgaatataattgaatcatgggaattctcattt

SEQ ID NO: 63765 - DNA, 380 bp, Zea mays
agcttggtcggatgaatcccttttctatcagaacttgtaattgtgttttgagctctgccaactcattcggaggcattcggtacgaccttctagaaacatgagtcgtaccgggcttcaattcaatcacagattctatactggaggcaatccaggcagatcttctggaaagacgttcgggaattcacatactaccagaatatcttggatctccggtatgatggcttcataaactctgccaaatggtttatctggaatagctaccaggatggacaagataacctcttcttggccatagctcaacctgatggttctcagatcagtgttgaggatagctctatgttgggctaaccaattcatgcccagaattacatttatatctt

SEQ ID NO: 63766 - DNA, 380 bp, Zea mays
agcttgtgaaagttcttcattcctacatgtgctaaacggcgatgccacagccagcccatgctagtcttaacaattaagcatgcatctataccggcctcctcttttgcaaaatcaactaaataaagtttgtcgtctagtacacccttaaaagctaatgaaccatcccttcttctaaagacagacacatctacatttgaataaacaattatatcccatattacaaagttaactaacagacaacaagttatatccaagcgactcaactaaaaacacattggaaatggagtgctcggatgaaataacaatctttcctaaccctttcaccttgccttgattcccgtcaccgaatatgaatgagtcttgagagtctttggtcttga

SEQ ID NO: 63767 - DNA, 277 bp, Zea mays
cttctcttttatgtaaaacagggggaagcccgcgaagccatccaagagggacatgacttcgccgcctgctacactgtcgacaatgttttcaatttctggtagacagaaattgtccttgggggaaaccttattgaagcttgtgaagtccatgcacatactcccatttgccgctttttttttgcaccatgaacacattggtgaaccaatgctggataagcgattggctcgatgaatctggcttcaaaaagcaaagcatttcggctttggtgcctccgtt

SEQ ID NO: 63768 - DNA, 250 bp, Zea mays
acccaatggacataatgaccaaaataaaacgctgaactcataaacaaacaatgaagacctttgagtggattagtaatcaaatcaactcaaagctctggggctacacccattggatgcacctggggtgcacccaatggatacgacagtgaagcataatgaccttcgaaaatctcagaagaaacattggacatcattctttttcagagtctcgagccaactactctcaaaagttggcttgagcctcgggggc

SEQ ID NO: 63769 - DNA, 116 bp, Zea mays
ctgcgcacactgtagcgcattaactcccattgcagacgacccgttgcgctgtagtagcccgtactccgctggcacacccgacagtccggtgctacacccgacaagccggtgaatta

SEQ ID NO: 63770 - DNA, 143 bp, Zea mays
agctgcagctccatcattagcggaactgtgatttctttttattcctacagaagtttacaagcctcagtttgataccacatcatctacgcatggcttcacacgcttgcccaggatcggctagcatgtttgagtggctctctgat

SEQ ID NO: 63771 - DNA, 359 bp, Zea mays
  unsure (1)..(359): unsure at all n locations
acgatacgatccccgcttcctttctgtctgtgtaacaacctaaaagttaatccttgatttgggataaaaaaaatatatatttcaataagatgcccctctagaataattaaacctttgaattcaccctttctaatatagaggggtcatacaaanaatggttgttaagtggctcgtaaaagatagatagtggaaatatttctatcanaacaagagatatgacttttgaaatactgaatcaactattattcaaataatgttttctagcgaataacatggtgtttggtattacacattgtgtggaaatgataggattactataaatatgcttatctggtttgatgccatctactaagtgaatt

SEQ ID NO: 63772 - DNA, 432 bp, Zea mays
  unsure (1)..(432): unsure at all n locations
actaagcccttcaatatgatntcatgaatgattaactctaccgtcgaactgttaactatgttctacctaaatgcctgggcccagatgatgctatattatccatggcccaagtacatgagatgatattgggtactcaccaatcatctctgaagatgaaagggttattacgaaaatctggcttctattggcccaacatgataactgattggtttatgtactatcaatgatgccaagtgtctcagaaattcagtgacatacaagtggtccctgcagctgaattacatcctatcatcaaacattggcctctcangggatggagaatggatcttataggagaaatacatccttcatcatcataagggcattcggtcatgttagtcgacacagactactttaccaaatgaactaaagttgttgatctgaagaacatga

SEQ ID NO: 63773 - DNA, 510 bp, Zea mays
  unsure (1)..(510): unsure at all n locations
tctacggcctctcgatttaaggcacctgacgatataagcccctatggcccatcacaccaccggggcattctatttggtatatagccacccgaagacacctcattgccctatgtattaatgcccctatgtgcacctgatgatatatacccctatggctagtggaccccctataggaaacaaggaatttgagtgatgtgcctaggccctatcttggtggctaaaaagatgtgataagcccaccaatggttgtacaacactgagacgtgggcctcacacctaaatgtcctgaagactatctcgtggtgatagcttgatggataagtctcgagtacaacacattaaaagcatgatgggtgatgttacatgatngaatcagttngtatacatgcaacatagattganggcacttgatgcactacatatgcatgcacagtctataccacacatcacacgtatgtgtgcataatattaaatgactacaaagactatttggatatattacctgagtct

SEQ ID NO: 63774 - DNA, 395 bp, Zea mays
  unsure (1)..(395): unsure at all n locations
attaattaattatagaaagcctactatcaagaaccggcagccatccactattcattactcttattgcctctttccaccgccctaaatctcaagaaatactataagatccatgcattgtgcccatactctgaatgatgcaagtgttgtttaatatggtccaacgtacgtcgtactagtatttgntggttcaaaactgcagaaattgatctttntttatcgacagagagatggaccaaccatgctctgtaactacttnctctgtttatttggaaagaacatatatctgacttttagagntggtaaacttttctaatatactgatattaggatgcgtantaagtagataatctataatgaatatngtttttaaaacaacatgttcgactataatatga

SEQ ID NO: 63775 - DNA, 314 bp, Zea mays
acactattatactcagcttaaggtgatgtggcccaaactttcaagaagagagctatcgatgatgtccctcgtgcaggagaagaatacgcaaatatcatgtggaggaagatggcgacatgcatccgaaagatagcttcagaagagttcgggttgagtcaagggaacagaagggatgttaaagacactcggtggtggaacgaagatgtccataaggctatcaaggagaagaaagattgctacaaacgcttacatcatgacatgtgtgcagataacatagagatgtacaggatagcgaagtaatctgcaaagcgagc

SEQ ID NO: 63776 - DNA, 274 bp, Zea mays
  unsure (1)..(274): unsure at all n locations
agcataatatggagatgaattatacagcttaattctgtataattcagcaaattcacgtaccttctttgacataaaagaagaccttgatctgtagttantgcccgggaatgccgaatctatgaataatatgnctcagtatanactcaattacctncttgtgtgtcatgttctttagagcaacggcttcagtccatttggtgaagtagtcagtggcaactaacacaaaccgatgcccctttgatgatgaaggatgaatttctccccataagataat

SEQ ID NO: 63777 - DNA, 199 bp, Zea mays
gacattccggtgtctcattgcgaaaggcgtcaagctcaatcccgagaagtgtgtcttcggtgtgccccgatgcatgctcttgggattcatcgtctccgagcggtgcatcgtatccaacccggagaatatcgcattcatcaccaacatggtgcccatcaaggacttgaaaggtgtacagagggtcatgggatgcctcgcg

SEQ ID NO: 63778 - DNA, 284 bp, Zea mays
tttttgaatggctgagaactatgctcaaacgctatcattacatctttctttgggcacgtgccctttggtttgtgccaagatgtgagactaactttgagttgacctagtgctttactctatttttggacggctcgttctttgttgcacaaagtgatgtcgatactgggactcgcgtcacacttgcacagtgctatatttactcggagagatctccgaaccgcccactgtataacagcgggaaactattttcttggttgtgtagaacgcctctttgaaatggtttt

SEQ ID NO: 63779 - DNA, 466 bp, Zea mays
  unsure (1)..(466): unsure at all n locations
aatcccattgtgtctcccattatagagcatgcttctagtaaatttaaaattttcattttctatctcatgctcattaattttagcactaagttgagctatgtgatcattttgttgtttaattaaagctaggtgatcatgaatagtatcaacattaatatctctacaactactacaaatagtaacatgatcaacactagatttagagggcttgcaagcatttaattcatcaatcttagcatgtaaaatgacattgtcatttctaagaatggaaatagaaacattgcaaacatgtaaatctttagccttagatattaatntatcattctcaatcctaaggctagaaagtgattcattcaacttgtcaatgttagcaatcaaactagcattatcatttttatgtttgacaagagatcatcacaaacatttaactgttcaaacttaacannataattaacattctcatttc

SEQ ID NO: 63780 - DNA, 311 bp, Zea mays
  unsure (1)..(311): unsure at all n locations
tctgtccaaaacattcctcgaggagaaaatgaacatgctgatttgctatccaagtcagcagcacaggggtttgccttaccttcggaagtattttttgaaacaataaaagcaccttcggttgaacttcttgaaagagcnagcctcaatatatctcctgttcatagtgaagattggagaactgagatcatttctttccttcanggtaatttcctttcagatgacgaagcttataacaagagaatagaggcaagagctcgaccatatgttataatagaaggggagcttgacaagcatggagtctgttctccact

SEQ ID NO: 63781 - DNA, 503 bp, Zea mays
  unsure (1)..(503): unsure at all n locations
tcggctgcggtcaaattnttcggcagcacaacagtgcaatagtattatatgttgtggtaacttcacatctacccgtctgtttatatagtgctgcaggtgggaaggtgaatcgtcaagccgctcgcacccgctgaacagtcacccgcactcgctgaacggtggaccatagtgcccaagaagctgaatcaccagatcgcgcgtacccgttgcatggtgggaccatccttcactcggaatatttaaatcgtctctcggtaacgagctcaggtaatgtggttttcggaccttcggcattctgaagcctgagagagtttttcacgggtcgagctcgttacgaataacgatctggcaccatgaaggggctactgttgtgggtctacttcgtcgctgaaggtccataagaagtacaccttcggaagattgacacaagccgaagctatcaatcagagagcttcggagtacatttccagatgcaccgactaaaatgaaatgaccaatcggct

SEQ ID NO: 63782 - DNA, 284 bp, Zea mays
  unsure (1)..(284): unsure at all n locations
tggtttgggtcggaaaaaaggcactcctacaaatggcatttgatgatgcacaacaaccccattttttattgtgcagctcaatggttttgtttttgctcctcaccactctatgaccttttttcacctaaaatgactacatacattacagtttctacctttgacttgtacctgactatgttctcatggcctattttatcttgcctgntatggcacatcatacatctgctgctatcatgtcgatatgacttacttacctcttctcgcatgaaatccgaaccaggctg

SEQ ID NO: 63783 - DNA, 376 bp, Zea mays
  unsure (1)..(376): unsure at all n locations
tcgtggcggtgagagtttcgtctttcccggtgtactcgctcgtcaagagtttctcctacttctgaggcttcatcacgagagacaggttgcgctagatcccattccctaacttcgtgatgtcgccgtatattccggcgtctgttccttcgtcggtgtgcctcacactggggagggtcctccccttgcatactaggctcatcgtcggagatgagtgctgactccaatctccccccgatgaagaagatgtcanggtagaaaggagccagcgcaatgacgctcttctttctatcactctttgatggcgaaggcgtcngaaagatggctcggtgcattctcatctgtgactcgggacgttggctcccttctttcaagtgat

SEQ ID NO: 63784 - DNA, 257 bp, Zea mays
tgctcagagctatcatttacatctttctttgggcacgtgcccttggttttgtgttaaattactgagactaaactttaatgtttcttagcgtcttccttttctttttatgatgggctcgcatttgagtttggacaagtgctgtacttcgtgcgaaactttcgtaaccagcccgactgtattacgggcgggggaaattatcttttttatttggtcctgacatgcctcctttcagtggtttttttgctatgatacatgca

SEQ ID NO: 63785 - DNA, 361 bp, Zea mays
  unsure (1)..(361): unsure at all n locations
tctaaaccccttgaacaccattgattcatcattcatctttggtacaataacctctggtggagtgaataagcattgaagtccaagatcacagagttgacccactgataataaattgaagctcaaaggtgcaactaagagaacatttgatattgataaatcatttgaaattgccaccttgccaattccttgcacttttccttttgaatngtctccaaatgtgattttatcttgtccatcaacattctcatcaagtgaggtgaacatccgtgggttgcctgtcatatgtngtgtgcatacactgtcaataacccaatggcttccacttgtcttgtagttcaccttccgttcacccctaaccatg

SEQ ID NO: 63786 - DNA, 212 bp, Zea mays
tggtatttgaaaaatgtcaaacagcaaaattcatatttcctaactcttataacaaacactactatccaaggttgggtgtttcacctgggtattttgaaggttttctaagttcctgtttctaaaaaaaaggatctattatttatactaacaggtatataatgttctaggaatacctgataataccctacaaattggaggcccctgttattatt

SEQ ID NO: 63787 - DNA, 245 bp, Zea mays
  unsure (1)..(245): unsure at all n locations
gttttatatcctggtggttatcccgagcatgagaataagagaattcatgcctangaaagtctcattcctgttcccatcatgcctttatatataaaaatgaggcttctaactctatgcaatcaacccattgttaatggcctaataagaaaacacttactgcatcaaatgatcagaatgtttcatttaaaacttttgatgcatcctatgtgctcactaacaaatcatgcaaagtagttgccaaatat

SEQ ID NO: 63788 - DNA, 349 bp, Zea mays
tgcccatgttggtagcgcatattcaattgcttggacacacctgccagatgtgctgcttactggtggagaggatggtgctattcgattgtcaatgcttctgatgtctgtgatgatgaaggtgacattaaaccagtggcaacttgtgtgccacattcatgtcctgttcattctcttgcttttgagtatccatggcttgtgtcagcctcgagtgatggcatgattgcacttattgatttgatgaagcttctgtcctacaaaagttcatcaaagggtctgcgtgttaagataagtgatggaagcgcaatatatccctcacagaggatgcttcatggcgttggatgtgatctct

SEQ ID NO: 63789 - DNA, 275 bp, Zea mays
  unsure (1)..(275): unsure at all n locations
atcgtctactgcttttcgtgatgctcgatcgcatatattggcatgtctggaaaatgagatcgactaacaatacagtatctgacggtgactctgcatgtaaaacaaagtaatctaagaaaaatgggttcataatgactgagtaagtattgaataaatgagcagcacaagcatgtatattcacatggaanatgaatctgcagagggacaanagttcatacttgagagagagagagagagatcacaattcgcagcacgcacacacccaaaaatgaaaa

SEQ ID NO: 63790 - DNA, 387 bp, Zea mays
  unsure (1)..(387): unsure at all n locations
acactactgtatttaccaaatgtgcttacaatggtnngatgttgtcttggtattcagaatgatatccatagaggatataatgaatctgtgatagattccaaaatttcagatcattaatgaccatcagtaatgaattgtcatttccaactggttatggttggagtcaagaaagtttgcacgctcctgacttgtgattaactgcatgtactgcatgtacaagttcccctatggttntaatacgtgaaaatccgtgaaagatttcccatgcgtacattgtgtatgttcccaatctcaccaccacagcgtacatatatgggcacacagaanactggngatctatgtgagaaatcattctccgtcgatcattaagtttcagaatctctttat

SEQ ID NO: 63791 - DNA, 181 bp, Zea mays
cttctcggctaacttggttgctttgatcgtcgtaggccctcgtcctcggtgagccgtattccatgtcaatgggcaagacggcctcgtgcccgtagaccatgaagaacggcgtgaaacccgtggctcgactcggcgttgtccttaagctccataccaccgagggaagttcctttatccatcg

SEQ ID NO: 63792 - DNA, 462 bp, Zea mays
  unsure (1)..(462): unsure at all n locations
ntatcaaatagacgtgaaaagtgccttcctcaacggaccaatcattgatgaggtctatgttgagcaacctcccggttttgaagatagtgagtatcctaatcacgtatataaactctctaatgcgctttatgggctcaagcaagccccaagagcatggtatgaatgcctaagagattttcttatcactaatggcttcaaagtcggaaaggccgatcctactttattcactataactcttgacaatgatttgtttgtatgccaaatntatgttgatgatattatatttggtctactaacaaatctacatgtgaggaatttagtaggatcatgacacanaaattcgagatgtctatgatggnggagttgaagtacttcttaagatttcaagtgaagcaactccaagatggcaccttcattagccatacgaagtatattcaagacattctcaacaagtttgggatg

SEQ ID NO: 63793 - DNA, 272 bp, Zea mays
  unsure (1)..(272): unsure at all n locations
acgataggaggtggaagttcatgacgctgttctgattatgtactactggatagttataatgtatgacatcatgacttggttggtggttccatttcttccttggtgggtcaagatgatggggggaactgtancgtgtgccaaactggccgacacttggggccttcgttacgtactaacgtggacgtgggccttattgttctcggggtgctgaagctgctcgaggagatgcatggcaaggggtgccagtccaacgagcgcacctacagcacgct

SEQ ID NO: 63794 - DNA, 244 bp, Zea mays
  unsure (1)..(244): unsure at all n locations
ttcgccggcaatttccagtgcacgtacgtgcgccccggatatttctgngacctncgaagctgtcgacagcagccgggagaatctctccgggactacatccggcgattctcgaagcagcgcaccgagcttgccaacatcaccgactcggatgtcatcggcgcgttcctcgctggcaccacctgccgcgaccttgtgagcaagctgggtcgcatgacccccaccatggcgagcgagctgatggaca

SEQ ID NO: 63795 - DNA, 312 bp, Zea mays
  unsure (1)..(312): unsure at all n locations
catggatctattccggccgaatgcttacataagcatcggcgggagccagtactgtctaaatattggtgaagattattctcgcttcactcgggtattcttttngcaagaaaaatctcatacccaagtgaccctaaagggattcttgagacgggctcaaaatgagtttggcttaacgatcaagaaaattagaagcgacaacgggacggagttcagaactctcaattcgaggcttccttgacgaagtggcatcaagcatgagtctcttctcctacacccacacaaatggtgtagtgagataagaataaactctat

SEQ ID NO: 63796 - DNA, 423 bp, Zea mays
  unsure (1)..(423): unsure at all n locations
cgccgcatgccagcctcttttctagtcttaacacttcagatttgtttgtctccacctgagcagantaagcatattcaaagtcacgctatgtgttttgcgtcaacctctttcttcttttcaagctttgaaaatatttggtctgcctcagaaaatttagccaaatcaatttgactcttcttcagcctctcaataagagaaagaagaaccttgtctttttcaataacttgatgccgaaggtcaacaacttcagatctgaaatttctgaaggctatccggacactttcatcttcggcatctttctgtgcttttaatagctttccaaggatgagaccctaataaaaataatcatacaaataaaaaatgagtactattgaaaagcattctgcanaattacaagtctaaaagaaaaatataatatgggaa

SEQ ID NO: 63797 - DNA, 207 bp, Zea mays
  unsure (1)..(207): unsure at all n locations
ctctgacaatgattgttgatgccaattatgtgatgatatatattgggctactaacaatctcatgtaggaattagtngacatgaccaaaatcgaatgttatatggggagtaaagattctatgattcagtgagcaactcagatgcacctcttaccaacaagatatcagactctaacagttgatgaagtgcaccatcaacacctggacat

SEQ ID NO: 63798 - DNA, 345 bp, Zea mays
  unsure (1)..(345): unsure at all n locations
tctcgaggatnagtacgcggaagatatcttcgtcgtcaccattgctgtatcgtaaaaggtaccagcactctgggatccttgtcgatgtgtgaatattctcttgtgtttgattcgctcccgtctctcttcaatcggagtctgttgattgtgtcgtgacccgggagctctgattccccatccgatttggttggtctcgctntaattttaagtttggcttgtgctcggtgggtttgatcctcaccattattttctcgtgttcatttgttcatggatccacatattaccgatcccagagaaccaaattggtgcgaaattgaatatcagaagggaaaaataccctgaatc

SEQ ID NO: 63799 - DNA, 322 bp, Zea mays
  unsure (1)..(322): unsure at all n locations
cattcttaccatgcatttatttataaaaatgaggcttctagctctaggccgtctacacatgttaaaattactaagaagaaaactcctattgcatcanatgatcatggcatttcatttgagaactttgatgcttcatatgtgcttactgttggggcgaaggcggagacgctacccttcgctccatgccttcgtcagccttgctgtgccaacagaagcaaaatggcgatgcccaccggcgaggtccacccttcatcgaatctctgcaagacaagactatggggagtcgcccttccttgtaccactcaactgaggccacatggga

SEQ ID NO: 63800 - DNA, 430 bp, Zea mays
  unsure (1)..(430): unsure at all n locations
tgagcaacatataccgattntggtatgcaaacttgaaaaaatatttccaccatgtttcttcaatctgatgcaacatctactagttcacctaccataagaagctaatgtaggaggtcctatgcaatatagatggatgtatcacatcgaaaggatactaaagaagctacatgcaatggttggtaataagagacgaagtgaagggtgcatcgctgaagaattcaaatacaaagagatagcatcgttcacgggcctgtactttgcatatgaacacaatgtcaatgcccctacgttgcggtatcatgtcgacgagccccgtatcagtgatatntgaaattttcaatggaggggcaaaactgtaggacccatcacaacatacttgttcaccaatgacgaatggaagactgcttactctacatgtatacaaacatga

SEQ ID NO: 63801 - DNA, 289 bp, Zea mays
  unsure (1)..(289): unsure at all n locations
gattcttcatcccaacatgggctagtcggcggtgcctgatcctacccatgttagtcttagcaattaagcaagtgtcgagttcagctctttcaaaatctaccaagtatagctgaccctccaacactcccttaaatgctattgaatcatcacttcttctaaagacagtgacaccttcatcagtgaaaagacagttgtatcccattgtgcataattgagataacagaaagcaaatggaatctaatgaatctacaagaaaanacatggagatagaatggtcaggagatatagc

SEQ ID NO: 63802 - DNA, 353 bp, Zea mays
  unsure (1)..(353): unsure at all n locations
gaatattgctatttaagaattagattgtactcttgtaattctgtccatacccttgtaaatatttttacctttccatcaatgtgtgaagtgcttcaatgtgaacgaaacttgtactttntgagccgaaggcaagaaacaccttcccttcttttcgtacacaatgaagcatgattctgctttcgaagctgcattcttagagccgaagcaactgtttgtatctatatggtatgatgatgatgatgatcctgtgtatgtctaaatgaatggttatgtatgcaatgtatgatgtaatgtatcgtgcanatgaatgcccaaacacacacacccgaagcttattcacaaccttcattccc

SEQ ID NO: 63803 - DNA, 352 bp, Zea mays
ttgatatggttgaaataatacccaccggagatgggtaagagtatccttgctgtgttcctatgtcttacactattacgtgaatacattttgtatttgacaattgttcttgtgctggtaggactttgggtggattagattttcactggcacatgtattcgaatgcaagtaaagaaagtgtcgtgcaacatatgtcgtatgaaatggcctggaatggtgattgacgatcgtaacgaggtgcctgtcacaagatgggatcaatatgcacttgcaataaatgcgcaacatgtgaatgcacaatgctgcagtgtggcacgacttctgggtatggtaaattattttggtaagttggaac

SEQ ID NO: 63804 - DNA, 327 bp, Zea mays
  unsure (1)..(327): unsure at all n locations
gacgaagcatagacccaacatccagcattgttgatgaacaatgttggaaatctactaagtaacctacggcctccaattagaaaatcttcgacgtgatgggttgaaaggtggaccaaacttcgngcagnnggttcgtaattatgttagtaatggtcattctctcattggccatacttaatcttttgaatttggacttggaagatataatgcatatactaattccttggataggtttccaaaaactctgtgcacccagacttgcagcanatggcacatacctctgtgtccgttcggaactatactcgctatgatgtanatggatatcgc

SEQ ID NO: 63805 - DNA, 366 bp, Zea mays
  unsure (1)..(366): unsure at all n locations
cttatgacatcaagatctatgggctcatatgccaccttcttcctcaggtagtagtagaggagctcctcgtctgtcgggtggaaccggtagcccggatgcactgccagtggagaacagctcggatgcatgcttctttacctgagaaatcaaacaaacaatcttgttcaaaatcaagtttcaatcatatataagtttcatgtacactgagcgatgaataaacatgtatatatccacgcgcataccttggaaaagtgactntgcttggttgtgtgcagcgaggaagcatgaacagcagccggagagccaatgcatgatgggtgtgaaagcctgtgtgctttgtgatgtgcaagaatgaagttacatata

SEQ ID NO: 63806 - DNA, 358 bp, Zea mays
  unsure (1)..(358): unsure at all n locations
ttgattaccacattatctacgtatggcttcacacgcctgccccagtgatcggctaagcatgtttgaatggctctctgataaagtgctccaccggttttgaggccgaacgacatggatgtataacagaaagcacccaaccaagtgatgaacgcttgtttttnctcgtctttcttcgccaaactaatctgatgatacccgaatatgcatctataaagacagcacagaacatccagcggtggagtccaccacctgatctatccttgggagcccgaaaggatccttcngacagtgtttgtgagatcagtatagtcgacgcacatgcgccaatccactttattcttttgagtacaagacagga

SEQ ID NO: 63807 - DNA, 252 bp, Zea mays
tcgggctgggccgatgccttctcgggctcgggcgtgtcgtcggtcttgacggagggttgatgcatgtctcgggagaagacgtccggtggaaccgttgttcgccccgaagctatcttatccagctcgtccgcagtctcgttgtatcgtcgggcgatgtggttgagctcgagcccgtataacttgtcctccatgcgccgaacctcatcacagtatgcttccatcttcgggtcgcggtagtgggagttcttcatg

SEQ ID NO: 63808 - DNA, 136 bp, Zea mays
  unsure (1)..(136): unsure at all n locations
agcttcacatctctggactaactcggcggcatctctcttcgctgnnggccaatagaaaccagatctaaaaactntcccaaccagagttctggacgcagcatgtactctgcattgtccgacatggatttcctctaat

SEQ ID NO: 63809 - DNA, 469 bp, Zea mays
  unsure (1)..(469): unsure at all n locations
ctatgganctggaaataaagtattttattgctacgcctatcctttattctttcttgganggcttaatccttagcaacgccctgatggcgcataagaacgcccaagacgagagctgcaccatagctctcagcaaccttcgatcagaggtcatcatgctgagaaacgaagccatggagaaagacaaaattctactttcattggtggataaagcaaaagaagatgaagcaaaatttaatactcaatttgaagcttataaagccaaagttgaagatcttcgtaaaaaacttgctgaagctaatgaaaattgtgcgctcacaaaggctaaccaagaaattagtgagtggtggaagactaagctagagaaaaatgtngaggagcttcgcgaatccaaggaaagatgcnttgaaaaatccctggattggcgtgaataaatgaaaaactagcttttccaaagtgggtggttattctt

SEQ ID NO: 63810 - DNA, 371 bp, Zea mays
  unsure (1)..(371): unsure at all n locations
tgtacgatgaagttgtgtgcccgcgcttgcctgtgcctgctgatgcgttgtgtactttgtctggtatatttggttatgccgtgctggtgtggttatagtcggtcttgacgcggacggttngatgttgtcgtttctgctggtggtgtactaattccgcttgcgcctttangcggccctctgcgtggatagtcttcgcggtagacttcgggttntttcgcacttgtgctattccggctgcacccttgggcggcttctgcgtggatagtcttcgcgatagacttcgtgttttttcgcacttgttgtgctaatacggcttgacccttatgcgacttctgcgcggatagtcttcgcgatagacttcgtgttttttc

SEQ ID NO: 63811 - DNA, 224 bp, Zea mays
aaattgtagcaaccgaagttttcatgaagcccatcttttctggcctttgtttgataatgcaattcatgaactcgacagaaactgtcagcaaaaggctccactgcttggcttcggagggcccaaatataaacgctaagcctaacgatagcgttaggagttaactggtgaagggagataccaaacctcttcaatatcttcgcaacaatctcgtgaacagggaatct

SEQ ID NO: 63812 - DNA, 247 bp, Zea mays
taaccaggttctatttgcaaaacattaaacaacacaacttgtttgaaatttttgcctaatgaatgcactctatgtgtgtcaaacatatgcaatgccaatgcttatgatgtcatgctcaagttttagttacagtaacaccagtggtgttacacgtatagtcgacgcacatgcgccaatccactttattctctttgagtataagaacagggttggctaacctctcgggatgtaacacctctctaataaa

SEQ ID NO: 63813 - DNA, 263 bp, Zea mays
  unsure (1)..(263): unsure at all n locations
atgtctaatgtctatgggaatcctcgtattcctaaaattgggtcttatgtcacgaaagttcttcttttcttggtagctatttacttagaaaaattattgtggttgtgttctttgacatgcttntagatagtcagaacgatccaagcatggctacaagtgatattggtacttctgcgcggcatcaggtactgcatattataaatatctggacttatcattcttatgtctgtgttttcaattatagaacacttccttaaaaatca

SEQ ID NO: 63814 - DNA, 254 bp, Zea mays
  unsure (1)..(254): unsure at all n locations
tcttatccatcaagcaagtatcgaggtcagctctatcaaaatctaacaagtatagcttgacctctaacactcccttaaaagctactgaatcatcacttcttctaaagacaggaacaccaatatcaagtaatagacagttgtagcccatttgacataatggggatatggaaagcanattggaatctaaggaatctacaagaaaaacatgggaaatagtatggtcaggtgatatagcaattntacccagtcctttg

SEQ ID NO: 63815 - DNA, 362 bp, Zea mays
  unsure (1)..(362): unsure at all n locations
gcatgtcaagcatggaagcaatgtggtacccaccatccacacaagaacatcatgacgaccgacatgccggttgaattactccacatggatttattcgacccgatcgcttacataagcatcggcgggagtaagtatnggcntggatttgtagatgattattctcggntcacttgggtgttctttttgcaggaaatatctcaaacccaagagaccctaaagggattcttgagacgagctcaaaatgagtttggattaatgatcaagaagataagaagcgacaacaggacggagttcaagaactctcatattgaaggctttcttgaggaaganggatcaagcatgagttctcttctccctacaca

SEQ ID NO: 63816 - DNA, 314 bp, Zea mays
  unsure (1)..(314): unsure at all n locations
tgatgaacctcttcgatgaatccagcgtttatcatcttccggaccttctcacggatgaaatcctgccgctcaacgcactgtcttcaatgcttctgactcacccgtttggcgtctgggtgtatcttcagatggtgctcaatcacctccctggggatctcatgcatctgcgacggntcccatgtaaaaacgttgacatttgcctatatgaaggcgacgagcgtgagttcctatttctccttcaaattgcccgcgatgcgggtggtctgggaagaatctgcgctgacctggatggtcttgacaggactgccatatgc

SEQ ID NO: 63817 - DNA, 404 bp, Zea mays
  unsure (1)..(404): unsure at all n locations
actctctcattagtggaaatactttggaagccaaaaattcatgcacttagtcccttatgcgctggcttcggatagcccaaatgtgaacgcttatcctaacgatagcggtaagagttagctgatgaaagtagatcccaaactttgtcaacacatcaacaatcatcttattcaaagggaatctcaaaccagctttgaagaaactcttaataactactatttcatcttttcctggcttcggagtagtttcctctccaccaaagcgaatcaactctttcttttcttcattgaaatagctcaatttcagcatcttaggaanggcaccttcggagactgtggatttccaaaatcagatggctgggttgctcggcacccaatgtataatctcctataatcgtctctaacat

SEQ ID NO: 63818 - DNA, 360 bp, Zea mays
  unsure (1)..(360): unsure at all n locations
taaaatatttggaacatgccttcaataatggataaactggcattgacctcacacttaatctatgacacaatgcacttcacaatctatatgatttagatatgttctcattaacctaattatgtgcaatggcattntaggccaaactatgtgttcttctctcatgcacatattagggggagcaactatgttgatagactatgatcatgctaattaatatatctttgatcatatctttatgctacacaatggcttcaaggactctatatagtcgtaatatgaagggaatgggcttcgcgaagcaagttcactaacttatcgtttatcaccctcgcatactcacactacttcaatatgatatct

SEQ ID NO: 63819 - DNA, 224 bp, Zea mays
  unsure (1)..(224): unsure at all n locations
atcgatcgagctccccctcgatcattctccgtttggtgatcttggtcacctcgtctacctcatgcgcggtctttatcacgttacaaatctctttggcactttgtatccactgcaccttgtatactcctctcgacacaatgagtcgaggagacctagtggtgcttgtgaatcaaagtgccggatttgggcaacctcnttcgggtcgtagccttcattccccacag

SEQ ID NO: 63820 - DNA, 202 bp, Zea mays
accctctgtttgtgctgaacagggtgagctggacgcctcagcggcacgattgctctgatatatgcgttacattcagactctgcgatttggcctggattacaatgtacaatagataaacgaagactacatagcgacacttatcgcatgggctcgactctattgtatagactaccgtgtgtggcgtctccctaaccaatgcact

SEQ ID NO: 63821 - DNA, 443 bp, Zea mays
  unsure (1)..(443): unsure at all n locations
ctacgaagattcttcatcccaacgtgggctagtcggcgatgctatatccaacccatgttagtcttaacaatttagcaagtgtcgagttcaactttattgaaatcacantaatatagctggccctccaacactcccttaaaagctattgaatcatcacttcttctaaagtcagtaacacctatatccgtataaagacaagtgtagcccattttgcataattgagaaactgaaagcaagttgtaatctatagaatctacaagaaatacattggacatagaatggtcatgtgatatagcaattntacccaatcctttgaccaaaccttgatgtccatccccgaatgtgatagctctttggggatcttgggtnttctcatangaaggagaacatcttttctccccaatcatgtggtttgtgcattcgctgtcaatgatacaacttga

SEQ ID NO: 63822 - DNA, 191 bp, Zea mays
acatggaaagaagtgccttaagaaatcaatacatagtcgtcttagagctcacctatgtctcgaaattgctgacctgggctttggaataattccatggcataagcgaatcattcatgggcttaagagccctgtagtcgcaataggccatatgggcctgccggggacaatatactgagtgacaccgaatactg

SEQ ID NO: 63823 - DNA, 352 bp, Zea mays
  unsure (1)..(352): unsure at all n locations
atatacgaattgactcaagcctagctacgggtgcatatgtttcaccaaaatccaaacctttgacttgggagtatcccttggccacaagtcgggctttgttccttgtcaccacaccatgctcgtcttgctttgtgcggaagacccatttggttcctacaacattntgattangacgtggaactaaatgccatacctcattcctagtggaagtgttgagctcctcttgcatcgccaccacccaatccgaatcttggagtgcttcctctaccctgtgtggctcaatagaggaaacaaaagagtaatgctcacaaaaatgtgcaacacgagatctagaagttacccccttatgaat

SEQ ID NO: 63824 - DNA, 219 bp, Zea mays
actccgcttaagatgggacctatatggataactcttagcgttatggtcagcagcccaacaggatgatgctaaaatttttatataggttaaagcgaagcatcacttttataaatttgcatgatgtgatgcaatatggggaataattggctaacaattctggagattagagactgccaaaatcaatgcatggggggtgaactttagattaaggacactcaa

SEQ ID NO: 63825 - DNA, 401 bp, Zea mays
  unsure (1)..(401): unsure at all n locations
tctgccgctgagacccgacggtcgcacggagcttcgcccatagaacacgccggtgcacacaaattgccgattcaatgctcggatcctaatcctaatgccacctaaacatagccccgacgatcccgaacatgataatcccgaacttgggcacaatatcgagcatatgcttacggccacagcaaatgagtccccaagtgaacatcgcccgctgcagacgaagttctctgacgctgcgagcccaaggtctcccgagctttgaaccgaccccgactacaatccacgcatgctggtgacactactcgatcacccatcatcacgtgagcggcggtgcagacgatagttacctgtggcgacgaatttcccccccgggcgagtngtcgaggcggtgtctttcagctcct

SEQ ID NO: 63826 - DNA, 291 bp, Zea mays
ctggatgcagcatgtactccacattgccctgcatggacttccttcaaaagttgcttcccggtggacgggagaatgcatttcatgaggacgcctgacgccgccccttctgtattataccctcccaatgagtgtatagtgagccgattgtctggcaatacgctctgtcgagttctttgcatctgattcttcttcattctttatatacctaataatcggccgtctccagtcatcagagtctgactcgggttgatctatgacgttgcactcttctgcttgatccattgagatact

SEQ ID NO: 63827 - DNA, 447 bp, Zea mays
  unsure (1)..(447): unsure at all n locations
ttttatgctgcccaagtctcagtatgttacagaagaacacatttagatgtagatcctctaaccatccagcggttgtcaccattcatccaatgccccttcggcagaaagcaccaacagcttgtctttcatggtgaataactcaaggataaatccttgtacagaatcagttaacgaaccggggctcaaattcggcgaaatcaaccgagccagactcgatggggggcatgaggtatgcggcgatgatctcggacaccagagaggcgacaagaggaatcctcttcacgttcttcactanggggatttcgtcggactctacgacggcaatgatcttctggttgatctcaaccatactgtcaagcttcctcttgaactctgggttctcgacgtctaagacagcatggaagatcctccccgttgtgcgggtggtctgcatgggtaacgcatatt

SEQ ID NO: 63828 - DNA, 392 bp, Zea mays
  unsure (1)..(392): unsure at all n locations
agcttaccgcatttgaagcatgatcgctntctcttttgtttggccttgcttggctggccctttcgaccttttagtgccgncttgaatcttttaatgatgagagccatctcttcatcattaagaccggcagcctcaatttgtgccaccttgctgggtagcgactccttgctcctttgtgcctttatagcaatgggttgaggctcgtggagtggaccgttcaacgcgtcgtcgacgtatcttggcttcttgatcatcatccgcccgctcacgaattgtccagtacctnctcgggcgtcatcttcgtgtacctgggattctcacgaatattgttcacgagatgaggatcaagaacggtaaatgacctgagcagtaggcggacgacgtcgtgatcc

SEQ ID NO: 63829 - DNA, 406 bp, Zea mays
  unsure (1)..(406): unsure at all n locations
tatgaagattcttcatcccaacatgagctagtcgacggtgccttatccaacccatgttagtcttagcaattaagaaagtgtcgagttcagctctatcaaaatctactaagtatagctgaccctctaacactcccttaaatgctactgaatcatcacttcttctaaagacagtaacacctatatccgtaaaaagacagttgtagcccattttgcataattgagaaacagaaagcaaatggtaatctaaagaatctacaagaaaaacatttgaaatagaatggtcaggagatatagcaattgtacccaatcctttgaccaaaccttgattcccatccccgaatgtgatacgctcttggggatcttnggtnttctcataggaggagaacatcttcttctaccctgtcat

SEQ ID NO: 63830 - DNA, 466 bp, Zea mays
  unsure (1)..(466): unsure at all n locations
gctggagatggatcgcattctcatcgcaactttaagacgaacaggcacaagccagcaaacacatatatgcataagaacatttcaccattcaaattcnaacattattaaacattccaaaagaaatagagcgtgttactatggtcacgcgaggaaaaagaaacgcgacggtcggggctaccgtcgagaagtcatcgtatttacactaaataaagtgtaatcgacataatcatattaattataactactatttagtgttgattaatctgcaacactaacaactatcagttaagtaagtaatttaattaacacgagagaactctagtggggcgaaattaacgacacgtgacaagatgcgcgacgtgcataaataatgcgcgaacgatgcacagccacacgcgacttantgcgtgtgcgacgcgcggagatgcgcatgatccgcacgcgcgacacgcacacacaacgtgtg

SEQ ID NO: 63831 - DNA, 383 bp, Zea mays
  unsure (1)..(383): unsure at all n locations
agaatctcttcttgattataactcaacctgatggttctgagttcagtgttgagaattgccttgtgttgggttaaccaattcatacccaaaatcacatctatatcctggcctttcataacaatcatgttagcaagaaagttccgcccggccattgttactggcacatgatatgccacttctctagtaaacatgtgtcccccaagtgaatggaatttaaatccttctttggattcatggcatgaaatgtgatgttgctccacaaatgtcttgctaataaatgtatgcgaagcaccagaatcaaaaagaataattgcagggttggtggtgacttgttctcaaatgcttcggattaagaacaaggcnacatataaagtggtaaatga

SEQ ID NO: 63832 - DNA, 309 bp, Zea mays
  unsure (1)..(309): unsure at all n locations
tctttccaatggtaataatattatttatggaaaaggaatgtccaatatggaacgggtaaattccttctgtcttaaatttataaattaacgcaaattgtgaattcactgctccatgtgcattaacttanaaggaaattaatttatgcccttacgccacataaatgatgatttgtttgccattcatatatatatatatatatcatcatttattaaacaccttcttgtactactaatatctcttttcaaagtgtttatcgtctagtttaaacggacagagatacacagaaggacgtctcccccatgatgaaa

SEQ ID NO: 63833 - DNA, 363 bp, Zea mays
  unsure (1)..(363): unsure at all n locations
tcacatgtctcgtatgattcataatcaaacgaagtttaaagcccatcataatgaagcttcttcatgcgattctcacttatatgacccaaacgacagtgccacatgtaggttggacttaaatcattatgctgaggccttttagcactaatattatagataggtgcatcatcaagatttaaaatgaataacccattcataatggatgcataagccacaaacatgccattcttagagatcacacaaccattgttntcactcgcaaatgaataaccatccttcatcaaacatgaaggagacataatgtttcgactcatactangaactagttaacaattatttaactgcaaaataaatcctgatggg

SEQ ID NO: 63834 - DNA, 392 bp, Zea mays
  unsure (1)..(392): unsure at all n locations
cgcggtccacacgaagatatttagccttataattgcctcgggaagtaggtgatgaagatagacttcgaagattttcaacaccttcacgacgaagctgctcaaggggaatcgcaatccagctttcaaaaagcttcgatacaccacaacttcattttcttcagggtgtggacaagttttttccccttcgtccgccctcacaatggacagatcccggaaataccttcctctcatattaacaagatgattctctttgatagttgattaccataaactgaatggcttggtcgccaggggcgatcttcggagtcttcgccaccgctgtccacatcataactttcactgtcaccagtatcttcagacangcccttcagaatttccctggtgatcttttc

SEQ ID NO: 63835 - DNA, 267 bp, Zea mays
  unsure (1)..(267): unsure at all n locations
tgataatacttatcatatgcttcttggtgnattatatggtgataatgcataattagtgcttccattgatatgaatcaattggtatctatttgtgtttgcctgtaatagatattcatgtgggtctggtgcctttaaatggtatcttaatggtgaatagtggtagggtgatattcctatggtatatccatntaattggtgttaactctgattctgtgcatttgtgtgttatacgcatcatgtgttaattattgacacaatgcatctcac

SEQ ID NO: 63836 - DNA, 319 bp, Zea mays
  unsure (1)..(319): unsure at all n locations
tcgcacaggttatagcactgtgccagaagtcgaacacatttattgaccaatatcctaccttgatagtagtctttccattcagtttattttctgtgaataaaggacactntttaaatctcacgtaatgatttcgttgtctgccacaaagaatatatatctcctctacggcttagttgtgagctaaagattgcgatgcagaggacctcgaatataagagttatttataaggctgacatgattcttcaacaacaaagtcgttcaggacgcaggtaagttgtgaattacaaagccgtccaaggagcgaggaagtttctgtcaa

SEQ ID NO: 63837 - DNA, 173 bp, Zea mays
tgagtatggaatactcagcaagtcttacccgactaagaaaagactctcaatggtatgcctggtatatgggagtcaaagtaatggcttttaatattcaaagactctgtcttgcagaaatgcttactaaagtggatccttataaatgcagtttaatttgtcaagttaagaaaata

SEQ ID NO: 63838 - DNA, 353 bp, Zea mays
  unsure (1)..(353): unsure at all n locations
gcacgaacgctgtcccttggcttttggtctgcttaggctgcccttgcgacctttaagcgccgtcttgaatcttttgatgatgagggccatctcttcatcattaaagcccgccgcctcaatttgtgccaccctgctatgtaacgcctncttgcttcttgttgccttgagagcaaggggttgaggctcgttgatcggtccattcaagggcgtcgccacgtatcttgccttcttgatcatcatccgcccgcttacgaattntccgagtatcctcctcggcgtcatcttcgtgtacctgggattctcacgaatattgttcacgagatgaggatcaagaacgggtaatgaccttatca

SEQ ID NO: 63839 - DNA, 244 bp, Zea mays
gcaatccaacggagttgtggaactctgccaatggtaaaatttcacagccgtcaagataatgctcctcgacgacaaattaggcaagtgggtcgacctgttactttgatcggtctgggcactaaacacgactgagtgcatggcgactgggttcacccctttccgccttctatatggatcggatgccatgaccccgcaagatataaacatgggtaccacggacagtcacgtcagtcgtccccgatgt

SEQ ID NO: 63840 - DNA, 357 bp, Zea mays
  unsure (1)..(357): unsure at all n locations
cataaaaccattctgtcatccaagcgccgggccattntcttccgaaaggttggcacgggacagcttgacccggaccgagatacgaaactgtaaccaccaacattattgtgatactggtncttaccccaagggtttgtntcgtatgataattcgcgtatattgcagaaactttttgcatcaggcttcagaccttggcttctctcggcccacacgaagatattcagccttatgattgcctcngnggtaagatggtgaagatagacttcgaagattntcagcacctctacgacaaactcgctcaggggaaatcgtagtccagctttcataaagcttcggtacactacgacttcattctct

SEQ ID NO: 63841 - DNA, 299 bp, Zea mays
  unsure (1)..(299): unsure at all n locations
aatgatcanacaacatgaacgctccctaatgacagacatttgtttgaaacaaccgatgccgatgattctgctctggcttctccatttgtgcacctaacacacgctgtacaatgaagctctcataatgctctgcatcatctgaccaatctggtcttcaggtggttccctaatgcctgcatcatcagccgcaagcaaagcatgtgtagcttctccaaatcactagcagaggaatacccaccatcgtctgttccaccaaaacacgctgattaggacaatcacgctgcacgtgtccatatccc

SEQ ID NO: 63842 - DNA, 369 bp, Zea mays
  unsure (1)..(369): unsure at all n locations
gcttctaaagggagagcacattttgggactatccaatgttcattnngagaaatacaggggttgtagtgcatgtcaagcanggaagcaagttggtgttcatcatccacacaagaacatcatgacgatcgacaagccgcttgagctactccacatggatctatttggcccgatcgcttacataagcatcagcgggagtaagnactgtctaggtattgtggataattattctcgcttcacttgggtgttctttttataggaaaaatcacaaacccaagagacattgaagggattcttgagacaggctcaaaatgagttcggattgagaatcaataagattagaagccgacatgggaaggagttcaagaactc

SEQ ID NO: 63843 - DNA, 375 bp, Zea mays
  unsure (1)..(375): unsure at all n locations
tgcacccaggtacattggtccattccccatacttgagcaatgttttccattggcataccgactccaactacccgaaacattgtctgatgtgcataatgtgttccacatgtcacaattgaagaaatgtcttcggattcccgatcgaaccattgaagtaacatgtgttgtccttgaaccagacttgacatattctgagcatcccattcgagtcttggaccaaaatgacaggattacccgaagaaaaactctcaagttctacaagatacagtggaaccaacattccgaagatgaggctacatgggaaactcaagacnttttagataagaatttaccanngcttttagcctcttgtaatttgtaaagcatatatataac

SEQ ID NO: 63844 - DNA, 134 bp, Zea mays
  unsure (1)..(134): unsure at all n locations
aacatggtattacacccaataatacctacatgttcangccccgacagccacaatgaacaaacaccggcactcaatgtgccattacaaacggaactccggttccgcccncacaggtacgaacaaccccncacatt

SEQ ID NO: 63845 - DNA, 417 bp, Zea mays
  unsure (1)..(417): unsure at all n locations
tctaaagggagaagcatatttgggactaacaaatgttcattntgagaaagacagaanttgtagcgcatgtcaagcatggaagcaagttggtgttcatcatccacacaagaacatcatgacgactgacaggccgcttgagctactccacatggatctattcagcccgatagcttacataagcatcagcgggagtaagtactgtctagttattgtggatgattattctcgcttcacttgggtgttctttntgcaggataaatctcaaacccaagagaccttaaagggatgcttgagatgggctcaaaatgagttcggatggaggatcaaaaagaatagaagcgacaacgggacggagttcaagaactcacaaatagaatgcttccttaaggatgaaggcatcaagcatgagttctcttc

SEQ ID NO: 63846 - DNA, 321 bp, Zea mays
  unsure (1)..(321): unsure at all n locations
gaaatccaaaccttcgacttgggagtatcccttggacacaagccgagctttgttccttgtcaccacaccatgctcgtcttgcttggtgcggaaaacccacttggtttctacaacattttgaataggacgtggaactagatgccataccttattccttgtgaagatggtgagctccatttgcatagacaccacccaatccgaatcttgtagtgcttactctaccctgtgtggctcaatagaggaaacaaaagagtaatgctcacaaaaatgtgcaacacgagatctagtggtaaccnccttactaatgtncgcgaggatggt

SEQ ID NO: 63847 - DNA, 416 bp, Zea mays
  unsure (1)..(416): unsure at all n locations
tgctatgccctatcgtgattcgtgagacaacattagttatatcaaatctgaatctcagggacgaactagaatttagttgattgctcaactgaattgcaatcctatacactaagtaattccatttaataaacaaacttggggacatagtatgccataattagaatctgcactagtacagaacatatgcataactaataacacataagatgcccggntgctgtctctccctcccccccccccccccaaaagtcaagttgtgttatcataaaatatctatgacaaccagaatacgatatgtctatgtctctatgcactcctatgctcgtagaaatcttacatgcatgagagggaggtatacagaagtagtgtttattatacttatacagcataacatcaaatgtacaacgaaatgatct

SEQ ID NO: 63848 - DNA, 397 bp, Zea mays
  unsure (1)..(397): unsure at all n locations
ctgcagctgagcagaactgactaactggtcgtcttttgntagctgangaggactggcttgaaaaacatatacatcggtttcagtcttactctcaaaaagatggtggcagtggtagtcagtggaaaggtaagggacctcatcgttctgatggtggcagttcaagcaattcaaacaagccatagctgacatcaaaggggacaccaagaagaaaggggagatgtcgaaattgtggcatttatggccactgggcacagaacttgtaacgtccaaagaaggatgacaaggatcaaaaacaacatgaagcaaatgttgtagttggagatgtggagaatgcaacacttctattatctgaggtgcaaggggcagtgagtgaagcatctcaagtaattcatctgtc

SEQ ID NO: 63849 - DNA, 212 bp, Zea mays
  unsure (1)..(212): unsure at all n locations
ttacggacacttgaaactcaagctgtaaaatgtcatcacaagtgacaacatcagccaaaatgtttgtgtttnttagctganaaacctatgatgagcctacttgtggaaagaataataaaagcgccctcacatggccatataaattatgtgcacctcgacacttatacagttctactcacatgccacacactctatttcctataccattcatg

SEQ ID NO: 63850 - DNA, 408 bp, Zea mays
  unsure (1)..(408): unsure at all n locations
tgtgaagattcttcatcccaacatgggctagtcggcgatgccatagccaacccatactagtcttagcaattaagcaagtatcgagttcagctgtgttaaaatcaactaagtataattgaccctctaatacccccttaaatgctactgaatcatcacttcttctaaacacagtaacacctacatctgtaaatagacagttgtagcccatcttgcataattgagaaactgaaagcaatttgtaatctaaagaatctacaagaaaaacattggaaatagaatggtctggtgatatagcaattttaccaagtactttgaccaaaccttgatttccatccccgaatgtaatagctctttgaggatcttcgtttttctcgtagaaggagaacatncttttctaccctgtcacat

SEQ ID NO: 63851 - DNA, 318 bp, Zea mays
  unsure (1)..(318): unsure at all n locations
tcaccccagtcctgttctttttatcgagccggtccactctcgccgcgctctcttcagtatctnctgcgcacgctctaagaatgacatgtgggcccgtgatcaatggcctgtagatctttcactccccacacgctacaacgaacatgcgtttttgccgcagattttttttctccttcccaccatcgagctttcatctgctctcaaccgtccccgctaacccctctgggggataaaaagctggtcgcactcctgacccattaagcctatgttaatcctaatccctataagccgccatgaccccctgtgaggatagaatct

SEQ ID NO: 63852 - DNA, 389 bp, Zea mays
  unsure (1)..(389): unsure at all n locations
gatcatccgaaacccatgcctttatgcgaagatatcgcanagcagaaggtgctgctgggatctcaattgtctgaggaacaagagaaaaccctgataatgtttctgttcaacaacaaagatgtctttgcatggtcaggtaacgatctctgtggcgtcaacaaggatgttattgaacactcgctcaatattgatccatccttcatacccagaaagtagaggcttcggaagatgtctgatgacaaggccgaaggtgctcgaaatgaagtaaatagactcctcagcaccggagtcatcatagaagtgaagcatccagaatggctggctaacacttgtatggtaaaaaatgccaatggcaaatggacgatgtgtatttgatttactgatctcaa

SEQ ID NO: 63853 - DNA, 304 bp, Zea mays
  unsure (1)..(304): unsure at all n locations
cagcattcataactctagcaatttcagcacgtatcctatcaaatcccactgcatggcttggcagcatagtaccatataaaatcagctacagggatttcaccttctctccttatactttggccttcaggatcaagaagtatcacaaactggattttcatttgccatcttttagatatcctagcatgaacgccaattcctcgtgcccatacattacatgactcgcaccatttacaacaacgagcattcctgaaggatctccattactaatntctttcattattggctgggacatggtataatcatc

SEQ ID NO: 63854 - DNA, 300 bp, Zea mays
  unsure (1)..(300): unsure at all n locations
ttatgcttcggtgtgtaccaaaagaagggaatggtgtttttcgccttcggctcnaaaaactgatttcgtccacatcaaagcacctcaatcgaagggtaagaatatattacaaggtattgacaaagtccttgagaacagttaattctattacaagaagtgtacaaaattatcctgagtttttctaaagcacacttctgctagtcttcattaagcttcagcttcgacgacaacttcggcgacatatnctangcatcatcttcaccttcgtcatcctacatgagtcaaggaatcataagaatc

SEQ ID NO: 63855 - DNA, 336 bp, Zea mays
atactaagcttcatcagcatttcttttcctttctttgacgctgcggtcacagtctcttctgtagcagtggcagcttcttctgcagccatgtctagcatgcattggtcaatatgttcaattgtgctctctaaattcatatcctcagctgatgtaacttcggcggctgcggcctccgaatgtgcaatttcaatatctgccctctctaaagttgctcgtgttttttgggccgaagctcttggcggcgttttgtcaattacctctgtcacggtaatgattctttgtttccttgccttgattgttttcttcgatttctcgggctccttgccttctgaaaaa

SEQ ID NO: 63856 - DNA, 382 bp, Zea mays
  unsure (1)..(382): unsure at all n locations
catatctaaacttagagaaccgtgttagaaacgttcattctcgaatatatggtctttatgttntttccacatacctctttaaattgatatcccttgagataaagaccatttgtgtgggttctatatgtcctgataaggattctcttatcatatgttgcagtgtaaagaacctctattatgacaattcagcgtgtgtgcaaatcttagttattatgataagtctatgtataatatgactattatataagcaaaatatcataattcacatacttcaaacattggacaacagtcttagaataataaaacataagcatcatgaacatatttttcaaataatatttcacgtatgatggagtattntttaaaaacataaaacagacac

SEQ ID NO: 63857 - DNA, 360 bp, Zea mays
  unsure (1)..(360): unsure at all n locations
attcagatttccaaacagtccgccatttattacgatagctgaccactggtgntttcatatccctccgataagcaaaattgtagcagtcgaatgtctcatgcaatccatcttctctagccttcgtctgataatgaaattcatgtactcggcagaatgcatcggtgagcggcgctaccccttgacttcggagagcccatatgtacacgctgagcctaacaatggcgttgggggtcagctgatgaaggtaaatcccgaattttccaagacttctgccatcattccgtgcagatgaaatctcaaccctgctttgaagaaactcttaaaactacaactcatcatcttctggttcgggatagtttc

SEQ ID NO: 63858 - DNA, 322 bp, Zea mays
  unsure (1)..(322): unsure at all n locations
tgttcattctgagaaagacaggatttgtagcgcatgtcaagcggtgaaacaagttggaatccatcatccacacaagaacatcatgacgaccgacaggcccgcttgagctactccacatggatctattcggcccgattgcttacataagcatcggcgggaggtagtattggcttggtattgtggatgattattctcgcttcacttgggtatttcttttacaggaaanatctcaaacccaagagactttatagggattcttgagacgggctcaaaatgagttcgggttaaggatcaagaaaataagaagcgaccacgggacgga

SEQ ID NO: 63859 - DNA, 204 bp, Zea mays
  unsure (1)..(204): unsure at all n locations
gatagcttacataagcatcggcgggagtaagtactggttagtaattgtggataattattctcgcttcacttgggtattctttttgcaggaaaaatctcaaacctaagagaccttaaagggattcttgagacgggctcaaaatgagttcggcttaaggatcanaaagataagaagcgacaatgggacggagttcaagaaatcaca

SEQ ID NO: 63860 - DNA, 457 bp, Zea mays
  unsure (1)..(457): unsure at all n locations
tgggctggaatggaaaaccctcttccggccccaggcccgccgtgggctccttcaagcacgcacagcttcagcctcgcgctcaatgccgacgtcggacggggtaaccatgtctgccagaaagatcatgcatgcatgccatcatcatcaggagaaccaanaatgtgcttgatggaggcangcangcagtccttattcgttacatacctaacgcagcacggacgttgtcgagagagtcacgaggagatagaggccccttctcggacagtgaggctctgcagacgtcgtacagcttctggatcgcattngttgcatccgtcgaagcgggaggcattngctataacttaacgagggcagtgtcagactgatcgatcaagcttcctncgcttaaataaattagagcctgagtagatgaccaacggattaattttgtattacctcattctactatctgagagtc

SEQ ID NO: 63861 - DNA, 353 bp, Zea mays
tactcagcttagaaaatctggttgaatcggcggtaatatccagcctgttcttgaaacttcgaacttgatgaacagtgggtgggggtttccactccaaaatgtccctgactttgctgggatctaccgcaatcccctggcagatagtacatgtcctagaaattgaatttcctccagccaaaacgcgcatttgctgaacttggcatataactgatgttctctcaagcgcgttaacacgatccgtaaatgttgggcgtgctcctcttcattcttggaatatattaaaaatgtccaactcgggcatgaatactgagttcatcaaatacgtgaagtgggcaggagcatgtgtcaatctg

SEQ ID NO: 63862 - DNA, 304 bp, Zea mays
  unsure (1)..(304): unsure at all n locations
gctaactgctgattaagtgcattctttattngcagggtatcaatagagggtttcaagntaattacttctatatctttattgtgaatcaactcttgaagctctaggtttctttccttttcaaggataagcaagtcttcttgagcatcaagagttgcctttcttttatctagcttttccattaattntgtgataacattgtatccatttaagccaaattctttaatcattttatttttcatggcaatttgatcatcatcatcatcatttaaaaaatcattactaaataaagntaccttatctccct

SEQ ID NO: 63863 - DNA, 351 bp, Zea mays
  unsure (1)..(351): unsure at all n locations
tatgaagattcttcatcccaacatgggctagtcggcggtgccatagccaacccatgttagtcttagcaattaaacatgtgtcgagctcagctctatcaaaatctactaggtatagctgaccctctaacacacccttaaacgctatggaatcatcacttcttctaaagacagtgacacctatatcagtaaaaagacagttgtagcccatttgacataattgagaaacagaaagcaagttgtagtctaatgaatcaacaagaaaaacattggaaatggaatgatcaggtgaaatagcaattntacccaaacctctgaccaacccttgatttccatccccaaatgtgatagctc

SEQ ID NO: 63864 - DNA, 315 bp, Zea mays
  unsure (1)..(315): unsure at all n locations
tagcttcaacgctgctcctgataagatctgccgaaggtgttctccttctttatgatcttcngctacgaagcatactcccaacagtagccccttcgcggtgctagatcgtttttcgtaacgagcttgatccgtgaaaaagtcttctatgcttcgggatgccgaagatccgaaaaacaccttccctgagctcgttggcaagaaacaattaaaataatccgcgctcgaggtggcttcatcttgcagcagttacgcgcgccctggcgattcaccctctcggaccctgtggcccaccgttcatcgagtgcgggtgactgt

SEQ ID NO: 63865 - DNA, 364 bp, Zea mays
ttttttctaaaaagtcttgagtttcccatgtagcctcatcttcagaatgctggttccactgtatcctataaaacatgagaagttttcttcgggtaaccctgtccttttgatccaagactcgaataggatgctcagaatatgtcaagtccggttcaaggacaacatctgttacttcaacagttcgatcaggaatccgaagacactttttcaattgtgacacgtggaacacattatgcacagcagacaatgtctcaggtagttggagtcgatatgccactggtccacattgctcaagtatagggaatggaccaatatactgatgtgcaaactttcctttaacctcgaaacgcgatacacccttcat

SEQ ID NO: 63866 - DNA, 393 bp, Zea mays
  unsure (1)..(393): unsure at all n locations
acatgtgcttatcggcgatgccacagccagcccatgctagtcttagctattaagcatgcatctagaccggcctcttcttttgcaaaatcaactaaataaaagttgtcgtctaatacacccttaaaagctagtgaaccatcacttcttctaaagacagacacatctacatttgtaaatagacagttatatcccatatgacataattgactaacagatagcaaattatatccaagactctccactaaaaatacattagagatagaatgctcattggagattgaattttacctagcccttttaccttgccttgattcccatcaccgaatataattgaatcatgggaatccttattcttgacgtaggaggtgaacatcttcttctnccccgtcatat

SEQ ID NO: 63867 - DNA, 198 bp, Zea mays
  unsure (1)..(198): unsure at all n locations
catgtcaacaatatcaaacacaatttgctcagtcctgtgtattacaaatccgaatgttaccgcatggtaatcttcccgagtgccacaatctgtcgccctccgaagccacatagagggtgcgtagcatcatgaatcttgtcttcangctcttgcatctgtctgaaggctntggaaatatgatgcaactgcactgctgtg

SEQ ID NO: 63868 - DNA, 322 bp, Zea mays
  unsure (1)..(322): unsure at all n locations
aatctcatcattatcaagactccttttgcaaanagcaagctactaatatggatcttaagccaagnttacttcacaagtaggttattacctgaatcttctagcctgaatctagcatttgcctaatctagatcattcacttgacctaaactagcttcattntatcaactntaatttcactttgtatctacgttgaaggtcgaagatctagtcttcatatccgagaangtcngcgatccgagtcgattaatacccagctggtgatctccaccacacacatatgctcctttactctttacacatgttaccatcccacgatctcata

SEQ ID NO: 63869 - DNA, 209 bp, Zea mays
atgaatgtataacgtatgaaagtatacgattgcctatatatagatgaacaattaccccatactggtcacggctgattataattgtacttgcgccattaccttcaagcaagacggaggtatcaatgcaataaaaactttggtaatatccatacattcggtatgatataaatatatggcataatattgcatttataatctctactacttat

SEQ ID NO: 63870 - DNA, 341 bp, Zea mays
  unsure (1)..(341): unsure at all n locations
tatgaagcaattggttcagcagcagaaagtatgagtcaataaatgatcagcagacatatcatgtcccacaaaagtatgaacacantaaaaaagatatgcactancttacattcgaaactatcagatcaagtttagaatcaccagatcacagctttttttggaaaggaatttataatctagtcattacatcgagtgatcattacactaaaagacattggatccgcgaggctttcaattagcactacaaacaaatttgatccgtatgctctcaacaaaccctcaaaagaaatatacctacacacgcgtgtatgatcaacaatgagcaaccttgtttatataaa

SEQ ID NO: 63871 - DNA, 246 bp, Zea mays
cgcgcgcgtggacgagctatcatgagtctcgacaattcttgacccatatttcttggcatccgtgaacctttgaccatccattgctcttctcgcgtgacaggccgactctcgctcacgagcatccgctgttgctggaccgacgatcggcatctcgacgcgaccgacaccgttgtgatcccgaacctcccttgtctgacattaccgacatctcgcgcgtagcctcacctttttcgcgggtatgtaaaa

SEQ ID NO: 63872 - DNA, 344 bp, Zea mays
  unsure (1)..(344): unsure at all n locations
ataatganggctatattttatatcttgctggttatcctgagcacaaaattatgaaaaatcatgctagaaaatctcattctatttctcaccatgcttttatgtataaaaatgagggatctagctctatgcaaacctctcatggtaaattgcctagaaagaaaattcctactgcatcaaatgaccctacattcatttaagactttgatgcatcttatgttttaactaggtgagtgcccgtgcgttacaacggaaccgtataataacacgataacttatgtacatatgtgtgtatattgtatangtatgtgccgcgcgttgcacagaagtaaacttttgatgaacat

SEQ ID NO: 63873 - DNA, 323 bp, Zea mays
  unsure (1)..(323): unsure at all n locations
ggtatgagtactctattatttctatttatccctatgccaagatatcaccattcagtanggtcaggatatcacaatccaccccatagaagactgacgtnctcgtcgatcacccctaagaaaggaaactcccctcttgacaaatatgtgtgccaatgtcgcatatgcatgcctatgacacttcggccacatgtgcatatgccaaccccacccaacacccaggtcgcttgaacattgtacactgtcactctgatcacatctactctgacaccttagacattatatctcacagacaatatttgtggccttatcctatatgccaccca

SEQ ID NO: 63874 - DNA, 271 bp, Zea mays
taagcttctaagggagaacatgtgttacgtctaacagatgtaagtgtcgaaatagatagaccttgtgcagcttgtcaagcaggtaaacaggtgggaagctctcatcatatcaataatgtgatgaccacatcatgacccctggagctgctgcatatggacctcttcggacccgtcgcctaccttagcatcggtggaagtaagtatggcttgaaaatcattgatgaattttcctgcttcacttgggtattctttctgcaggataaatctgaaa

SEQ ID NO: 63875 - DNA, 266 bp, Zea mays
ccaccttgacgagaatgtgcgccgaggctaccaccccaggcgtggggaacgctacgacagcggtgaggatcggagcccctcgcctgaaccacccggtccgcgagctttcagccgggccatacgacgggcgccgttcccgacccggttctgaaccccgactaccatcaccaagtactctggggagtcaaagccggaactgtggctcgtggaccaccggctggcctgccagctggatgggacggacgatgacaacctcatcatccgca

SEQ ID NO: 63876 - DNA, 349 bp, Zea mays
gtgggcggagcacatcacagcaagaatgtgatgaccacatcaagacccttggagctgctgcatatggacctctttggacccgtcgcctatctgagcataagaggaagtaagtatggtctagttattattgatgaactttcccgcttcacttgggtgttctttttgcaggataagtctgaaacccaatggaccctcaagcgcttcctcatgagagctcaaaatgagtttgagctcaaggtgaagaagataatgagcgacaacgggtccgaattcaagaatcttcaagtggatgaagttcttgaggaggaggggatcatgcacgagttctccgctccctacacaccacaac

SEQ ID NO: 63877 - DNA, 477 bp, Zea mays
  unsure (1)..(477): unsure at all n locations
cactcagtcttattgtcacgtacttaatttgaacacgttatgagacaaacaaattcagtaggtagcaccgtaacaagatacttgcaaagttagtgggggggcacgaggccatagctagcttttccttcaacgtatacaattatgaaacaacatacacaaatggaatagagggaacacctagtttggaattntcaacttccaaatatgcagactatttcatagttcttacctctgtcttggacagaggcttctgaaacgaccccttggctttggattttcttctgtaattatacccctatggctgcaaacacaaacaataaggtaatgcttagtaagtgaaaatatttaattgactaagttgtcagagacaagatgcgaaatttgcacctgcatctctgactaaagtaaatatacatagtttcattcatggtgtacaatattaccagcaacaaatgtntgatgcaaaagagctcacat

SEQ ID NO: 63878 - DNA, 431 bp, Zea mays
  unsure (1)..(431): unsure at all n locations
ctgtaaggacttttggtccaatgatacattcaacagtatcgtcaggtccttgtgttggtgtagaccttgangcagagcaaatgtattgtttcagatagctgctgcttctatgaaaggtcattactagactactcgatgcgatttatttattgtatgagggagcgctgcaacttatgcttcatcgaattggagaaggccaaaaataagcttccatctctaacaaggtatttgggaatctagatactaaaccatgtatttgcagtctacttaagggggtgtctagtttaaggtactaattttagtctctccattntagtccctaaattacaaacacatggactaaactagaaataatccctcttttagtctctgtgtttagcaatttaggtactaanagagactagaatagagggactaaaaatagaaataat

SEQ ID NO: 63879 - DNA, 260 bp, Zea mays
aatgactgagtccatgatggaagcctttatcaagggcatacactattaacctcacaagctgggtcctgtgcccataaatattgaaccaaagttctttaccgcgcacacactccattaaatgagatcgcgtcttatgtaaatcaacctttgccgaggagagggttatagattctacgaggcctatagtaccaaaggtacatacctctcttgatttattacccatttgtcccctatttttggtgcgtcaaaaccctcaaaat

SEQ ID NO: 63880 - DNA, 448 bp, Zea mays
  unsure (1)..(448): unsure at all n locations
gctgccttcgcttcagtttatcacccgcaatccaatctgagtgnggagcgcgccaatggaataatcttcacagccgtcaaaaagatgctcctcgatgaatagaatggcagatggaccgaattattacccgaggcggtctgggcactaaacacgactgagtgcagggcgaccgggttcactcctttccgccttctatacggatcggaggctatgaccccacaagaaataaaacatgggtccccacgaacggctccgtcagccgtccccgacgtggacgagccaacctcaaaggatctcatcgacagagaccgagtcttcgccttacaggcactaaacaaataccaagcccagaccaaagcatggcgcgaccactcagtcatcccgagggagttcagcgaaggagacctcgtactcgtccgaacagctcggacagatgtcatgggcaagc

SEQ ID NO: 63881 - DNA, 388 bp, Zea mays
  unsure (1)..(388): unsure at all n locations
taagcttataagatttanaaactattctagggacagattatgacatcatacccaaacacttatagaacaatcaaatatctctagaagcttcaataatataaatttagacctagagaaataggtaaagtatccaaacaatattgaattgtgtgttgtgtcttgttggatgcaaacatgcagtcatgatatggatttggttttttgtgtttaagttttatctggaaaattttgaaaacacgtctacacaacaattagaattgttgaaaatctttcatatcttttatgttttcacatattgctagagctagctaaatatgatggttagaagattctaggtatattcttacgagctctaatatctttatgtcaaaattacttgttaaatcta

SEQ ID NO: 63882 - DNA, 203 bp, Zea mays
  unsure (1)..(203): unsure at all n locations
gcttcggatttccgaagctggaagatgttctttcaatattatcaaaggatgaactggctgacagttgagcatataatagcataaaggtataaaagtcaattttgtatttgaaaacgaattacttcatttgnttatacttaatccttgcctcctcttgagggcttaatccttaacaatgcccttagagcacagaaaaacattga

SEQ ID NO: 63883 - DNA, 339 bp, Zea mays
  unsure (1)..(339): unsure at all n locations
tctncaccgacgagaccgtcagagccgcccgcggaccgtccttcggctctttggctttaatgtctggttctcgtccctcaagtggggacgcgaacgatagccttctatcggtagcgtccgtcctgggaccatcgcttgttgtgcagaagtcgctggcgagtcacctggagtttgtcgtcccgcaggctctccgatgtggaggttgttcatacccacgggagtggaaccggagttccgtttgtaatggcaccttgagtgccagtgtctgttcattgtggctatcggngcctgaacatcgaggtatttgagcgcaataccgtgtttcttatcatttcgagc

SEQ ID NO: 63884 - DNA, 189 bp, Zea mays
  unsure (1)..(189): unsure at all n locations
atgcagcctcaaaggtggaacacgttttatgattatctaatgnncattntgagaaagacaggatttgtatcgcatgccacgcgggaaagcatagtggcactcatcatccgcataagaacataatgacgaccgacaggccactggagctcctacacatggatctattcngcccgatcgcttacataagca

SEQ ID NO: 63885 - DNA, 369 bp, Zea mays
  unsure (1)..(369): unsure at all n locations
accggatccatttcttgcgttttcacaacgaacatgcncaatccactaatttaggtccaaaactcatgtttggtgtggtttcgcgcaattttgttgtcgcacgtcactcattccgaatacgggtgcatacaagcactagtttgtgccaccggaaccatttcttcgttttttgcatcgaacatgcccaatccactactttatgtccaaaactaatgtatggggtggctttgcgtaatttcgctgccgcacgtcacccattccgataacggatgtccgggtgcatacaagcacaaagttttgtcaccgtaaccatttctttgtttttgctacgaacatgcccaatcctctactttatggtcaaaacacatg

SEQ ID NO: 63886 - DNA, 363 bp, Zea mays
  unsure (1)..(363): unsure at all n locations
tataacgcttggcatgtgcccccgttcctagtcgaccatgaccaacacccaacataagactntcctagttatttagccaataccagagccatgatagttctcatggtagcactggtttcccgggtggtcactccatgttccaattaatatgcaataatcttttttaacataatctttgttgggatcaaacagaatatgcagagggagaagtccacttgccttgcttattgaaaacttganggtcttccacgaataggaatagatcttgattcttaactactagatcaaccacagaatatcacacacaccaacaagaagaacanacaccacttcataacatacaacatttaccatacgtgaagc

SEQ ID NO: 63887 - DNA, 287 bp, Zea mays
  unsure (1)..(287): unsure at all n locations
tgctgggatctcaattgtctgatgaacaagagaaaacccttaccaggggttttgttcaacaacaaagatgtcttcgcatggtcagccaacgttctctatggtgtcacacatggatgttatttgaacactcgctcaatgtcgatccatccttcagacccagaaagcagatgcttcggaaaatgtctgatgacaaagctgaatgtgctcacaatgaagtaaaaagacttcttagtgcttgagtcatcagagaagtanaatactcagaatggctagcccaacactgtatg

SEQ ID NO: 63888 - DNA, 222 bp, Zea mays
cacgttgaacaataacaaaggcaggaacccccgaaaagctacttcgcggccaacgaccgggctggactgatggacccacgacccatatggctcgcggatcaggcctcagcgagtaataaatcgtgagccgacgtggaccatgaacgtcgtcaaagcaacccaactttcatgaaagcaacgatcgcactatgcaagtaagactcatggtgatatgaagacgtt

SEQ ID NO: 63889 - DNA, 190 bp, Zea mays
tgttgttatataaaaatgctcccatgactttttaaattacagtctcgcacatctattacttagcctatatagtcgtgagtgatgaatgggatgatgatctacaatagctgttgaatgatcaacaatcgtaatcacaataaggggagcgattgaagggcggaagtaacgtgatgtgttcatcaatcgactc

SEQ ID NO: 63890 - DNA, 368 bp, Zea mays
tacactttatactaagctcaggtctgctgactccaggcactgtggtggctggtgggatgaacagggcacgacccattgtcgctacccattggatcttgagcgaccggatcaactgacagcggttctcgccattgcaattcttcttcttactctttttcttcctgctgccctaagtagcggcgcatgagccacccatttgggtgggtctagcctatgggaccaagtgccatgcaagacccttagtgaccctagcacacttcttgggtagagcgataagcgtggtgaccctttctacatcgtgcgtcggcagcttctcaagcatcttcttgccacgtacaccctaccggataacagtgatgatagacgca

SEQ ID NO: 63891 - DNA, 374 bp, Zea mays
  unsure (1)..(374): unsure at all n locations
agcttctgaagaagttcgtcatctanctcaagatgagcagaaccgaaggcctcagcacagagagcttcatcaagagggcttcttcaatgaggatgactggtatgaggatttccatcatggaaatnttgcttttgatgatacttctcctctgtcagcagaactgcaggctacaccttggcccctgtcttacaagccaccccagcttcccatgtacgatggacactcagacccgaagcagtttttgatgagctacgaagcaaccatatcttcgtatggtggcaatactgcagtcatggcgaaatctttcgtcatggctgtcaagaatggttgcacaaacctggtactcctctcttcggccaggaacaatcacgtca

SEQ ID NO: 63892 - DNA, 294 bp, Zea mays
taatgccactcctaaaagattgtctaatgttgttaatggcaatgctcccatggctcaagataacgagggttacattgtataccctgtcggttatcccgagcacaaaattatgagaattcactctatgaagtctcactctggctctcatcatgcttttatgtataagactgaggcatctatttctaagaaatcaacccatgctaaattgcctaagaagaaaactcctactgcatcatatgaacctaacatttcatttaagacttttgatgcatcatatgttttaactaacaaatg

SEQ ID NO: 63893 - DNA, 474 bp, Zea mays
  unsure (1)..(474): unsure at all n locations
tcatctatgttatggattgctttttagtcaanccaattaccttcgggccttcttgcagcttcctgacttccatggatagcgatgggtccctgatcccgatgtatcttcatgccaagataggcaggatgaaggattgcttccaaggcattgagagtaccacgaccaataattgcattgtaagggtattccatgtcaacaatgtcaaacacaacttgctcagttctagtgttggtgatgaatccgaaggtcactgacatggtgatcttgcccagtgctacaatctgtcttcctccgaagccacagagaggatgtgtagcatcatgaatcttatcttctggctcttgcatttgtctgaaggccttancanatatgatgtcagctgcactgcctgtgtcaaccaagacattgtggaccagatatcctttgataacacaagagataaccatggcattcgtgtgtggtaatctttgagct

SEQ ID NO: 63894 - DNA, 428 bp, Zea mays
  unsure (1)..(428): unsure at all n locations
gacgcacaaagtattgatgatggaatgaagcacattcatgagaaaatagatgctggtaaagccaactgcttcagaagagacgatcaaggtgttgtatggtttaacaaccgcatagtggtgcctaaggataatgagatctgccagcaaattctagatgaagcacatcttagtcgctattctattcatcccggaaacactaagatgtatcatgatataaaacaacattattggtggacaaagatgaagattgaaatcgcacgctatgtggcgagatgtgacactngtagacatgtcaaagccatacacatgatagttgctagtccattgcaatcgttacctattccaacatggaagtgggaagatataagcatggactttatcgtgggattgcccatgaccacaaaagggtatgattctattntgggtat

SEQ ID NO: 63895 - DNA, 404 bp, Zea mays
  unsure (1)..(404): unsure at all n locations
cttcatccctacatgtgcttagcggcgatgccacagccagcccatgctagtcttatctattaagcatgcatctagaccggcctnctcttttgcaaaatcaactaaataaaggttgccgtctaatacacccttaaaagctaatgaaccatcacttcttctaaagacagacacatctacatttgtaaataggcaattatatcccatattacataattgactaacagatagcaaattatatccaagggactcaactaanaacacattagagatagagtgctcattngaaattgcaattntgcctaagcctttcaccttgccttggttcccatcaccaaatatgattgaatcttgggaatccttggttttgacgtaggaggtgaacatcttcttctcccccgtcatat

SEQ ID NO: 63896 - DNA, 361 bp, Zea mays
  unsure (1)..(361): unsure at all n locations
gatcatcaaaatcggagttcggagcttatagttatgcccacaatacgaagtcgaattgctgaaaaccagacagcatatgggatgtncggtgcacaccggactgtccggtgtgccaaatttgctcaaactggtattgcttcaactctgggatgtagagaatttcataagctttccaaaaagtataagatcatcgaaatcggagttcggagctaaaagttacggccaaaatagacaagcggacatgggctgtccggtgcacaccggactgtccggtgcgccatatccggtgcgccatcttcggaagctcaaacggctacttttaacggctagtacacgtgggatgtccggtgcaccaccggac

SEQ ID NO: 63897 - DNA, 238 bp, Zea mays
  unsure (1)..(238): unsure at all n locations
tctatagggagaacatgtaatatgtctaactaatgttcaattcgaaaaagatagaccttgtgcagcttgtcaagcatgttaacaggtgggaggaacgcatcacagcaagaatgtgatgaccacttcaagacctctggaagttgtgcatatggatctcttcggacccgtcgcctatctgagcatangaggaagtaagtatggtctggttattggtgatgacttttaccgcttcacttgg

SEQ ID NO: 63898 - DNA, 322 bp, Zea mays
  unsure (1)..(322): unsure at all n locations
tatcaaagaataattataccgaattggaaaaggtactgtatgatngtttgatggcttccaggaagcttcggcattattttcaagcttacaacataattgttccttcttcacaacctttgaaggatattataagaaaccgagaagctactggaaggattggaaaatgggctgcagagctcaatgaattttgtattgattatgtccatagatcttcgattcagtcccaagcattggcagacttcattgctgactggacgccaggggctcangaagaagaaatgaataaagatgccgaagcatggacagtgttctacgatgggtc

SEQ ID NO: 63899 - DNA, 296 bp, Zea mays
acatgtgctaagcggcgatgcctcagcctaaccatgctagtcttaacaattaagcatgcatctagaccgacctcttcttttgcataatcaaccatatatatgttgccgtctaatacacccttaaaagctagtgaaccatcacaccttctaaagacatacacatctacattcgtgaatagacaattatatcccatattgcataattgactcacagataacatgatatatccaagagactcaactaaaacacattagatatagagtgctctgatgaaataacaattttacctaaccct

SEQ ID NO: 63900 - DNA, 226 bp, Zea mays
ctttggcggaagtcgttgtcagccctgatgtactcatccatcttctgaacaacttctccagagtttgggaggcttcctggtgaaatattggacagtatgtcctgggcgaataaccttgatcatggcctcaatgacaatctcattgggcaccgtatgcgcttgtgccctcaatcgcaagaaccttcgtacatatgcactgaagtattcttcgtggtcttgcgtgcat

SEQ ID NO: 63901 - DNA, 354 bp, Zea mays
atcattcacacaagaacatcatgacgaccgacatgccgcttgagctactccacatggatttattcggcccgatagcttacataagcatctgcaggagtaagtattggcttgtaattggggatgactattctcgcttcacttgggtgttctttttgcatgatatatcacaaacccaaaagactgtaaagggattcttgagacgagctcaaaatgagttcggcttatggatcacaaagattagaagcgactatgggacggatgtcaagaattctcaaatcaaatgctgtcttgaggatgatggaatcaagcatgagtttcttctccctacacacctgaacataatggtgtagtgga

SEQ ID NO: 63902 - DNA, 471 bp, Zea mays
  unsure (1)..(471): unsure at all n locations
cagatacacctttaaatgctaatgaaccaccacttcttctaaagacagttacatcaacgtttataaacaaacatttatatcccacatgagataactggctgacagaaagcaaattataaccaagtgattctaccaaaaagacattaaaaatagagtgctcggtagtaatcactattttaccaatcccctttaacttaccttggtccccatctccaaagttgatcatgtcataggaatccttattcttgacatatgaggagaatatcttctgctcccctgtcatgtggtttgtgcatccgctatcaatgatccaacttcaatccccgtatgcataaacctataaggaatntangcttggtgttaggtccccaacttgtgttgngtcctgtcaggttagttacataagattntggaactcaaatgccagtcttacctctattgcactttgggtccaccatggtagcaacattc

SEQ ID NO: 63903 - DNA, 474 bp, Zea mays
  unsure (1)..(474): unsure at all n locations
tagtacanatattccacaaacatttgccaacaatcaacttatctctcatacacatgaaaccaagacccggtggaaagacttccaccctgaaccacatgctaaacagcagcggcgctgtttgttaattttgtatctttaaaactataacagtggtgatatcaaacaaatactctataagtatctacacaaaatactctacaacttcggtattcaatggataattaaattttgccttctatatgttctaaaacatctgacaaggtaactgactgaatctattttagacagcagcatagttaacttcaaaattctgtatctcccaatctacacaaccgaaaattatgaaattatgctggaagaaagaacttttatccctctacaaaagtctccatagttggaagagccaattcggccatttactagatgaaacccaccagtgaacagacccgctcatttttgcaggcaaacagaaac

SEQ ID NO: 63904 - DNA, 497 bp, Zea mays
  unsure (1)..(497): unsure at all n locations
acacttaaaactaagcttcggctgacagcngaaaggggaacgcgacttaaagatgtatagccatattagacctcggagaattactatagagttattgataaaagcaaagggcattaatgtaattttacatgggctgcgtcccgtgcctataaatagatgaacagtactcccgtactgttcacgctgacttggcattgacatcacgcttgtacccttactttccttcaagccgaaagtacatttgtaatttgttgtcgtttatataagtaaaataaagagaaatgaattaatgttcaaagtaatcatattattttatgtatgaacctttcttacctttcattacgattatgaaggtgtgaccttcataaccttcgtccgaaatttattatatcccaagggaaataatgctctgaaggacgaagggctttgatatttaacatcttatgttgncttgttcttaattcatagcattcgataacaagtccgccacagatagt

SEQ ID NO: 63905 - DNA, 480 bp, Zea mays
  unsure (1)..(480): unsure at all n locations
ctggagaaatcgtgggctgcaggagcgcgatgtcgaatgtctggatgaccacgttggtgagcgccttgtccagcctcatgtcgccgaggtgctggcgaagcaggccatggaggtacttgccgtcgtacttgggccccctcaccatcctcagcgtgccggcgatcttggacaggatccagttcctgcagaactcaactcacgcgcgcgccagcatctttaatttctcttcattccgtcgcagtggtggagtaaacaattaataataatgcatctcttctaaaccgcgccgtgaaattttcgccatgcatgcatgcagctgtgttacttacttctgtgggaagatnttgggcgagtggtcgatgtagaactgcgccagatccttggcgtcgaagagtggccgtcgacgtccgtcatggtccttggccagggccgtgagcatcgnctgcaggagaccaccggtgctcgtgccggcaacgacgt

SEQ ID NO: 63906 - DNA, 446 bp, Zea mays
  unsure (1)..(446): unsure at all n locations
actcagctgtcacgtctgggcncattgcatgccgggctctatttatgatcgtgccgcccgtcccgtcctgcttcaacgcgaacgttgactccggaatcggcagcctcgtcgagccgacggttatgccctttagtgacaggtagtatagttccagagacgagaagttctggaccagaggagtggactgcactacgccgccggcgtcgccgtaaaggttggccggaaggccgagcaggatggagctgggctccggccgcgttatgtcggtgaaacagtaggagaagttgtccactttgagctgcgacggcagggacagcgcgccgcgcccgaagccggcgatgccggtctcgttggactcgaaaatcccgttggtgaagagaccgcagccgaaggccatgtcgggtactgagacctggccgccggagccatcagcggccgcgaacgtg

SEQ ID NO: 63907 - DNA, 473 bp, Zea mays
  unsure (1)..(473): unsure at all n locations
tgggatgtcaaccaaatctggcggtgacagactgatagttgtcctatctacaatcttcccatgcgtgcagccaacctttaggaaagcggtagccgtgcctcgagaagctagcagggcgcagaaatcagcatgcccagcaataacttcgtcaagtgcatcaacttcgccctcaatgtattccaaggtgcttggcaggttttcagctaaaggtgtaaacttatcagagctggctccgattgagtgaaacacatctttcagccgctgcacgcatcggctgccgaaatctaagcatttctcctgaagctccttcaatgatttttgcaaatttgaattnttctcgatttcggtcttgagacttgtttcgagattcttcttttcctgctcagaattttctgactgtataagtaattcattggttaatttggcagcttcggctcgggcctcagccagtgaaccttccatagaataattat

SEQ ID NO: 63908 - DNA, 424 bp, Zea mays
  unsure (1)..(424): unsure at all n locations
cttgaagactgtgaggaagttcatcttaatggctatgcaacttttggcaccaatggaaatccaaattgtggacccgatgcacatgttgatgtttcacttaaaaaggtcattgatgtgaactccggttcatgtaccaatgaacgcattcttgaatattcaaatcagattattgaaatcaataaagactatttccccgttggcataccaaccaagaaggttggagcagaactccaagcctctggtatgcactttgcacttgtattttataatcactccctacagacaagaataagtgacagaacatgtactaaacaagtggtcatgcaaatgatacttcataactaatntgtctattataatatgaagacatctgggaacacttatcggatcatcggagtatttctcaatataaatctgcacatac

SEQ ID NO: 63909 - DNA, 352 bp, Zea mays
  unsure (1)..(352): unsure at all n locations
ctaacccctattgttgatcagctgtacacatcacatgaactcccacctttggtgagnncatacactggttttcccacaacttgttgagctatgatcatgtgtgagctcacccttgctgtctcacaacccccacaggagaagaacatgtggctcaagaggagccacgtattgaggagttccatttgatctatgtggcgccttctacttgacttgtcccaaggatgatccttaggtcgctgtatatctatattatcttttgtaagacttccgctatgtaataagcactctgattatattgagacatgtatccttatgcactctgctattatataggtggatcttcttggagcat

SEQ ID NO: 63910 - DNA, 455 bp, Zea mays
  unsure (1)..(455): unsure at all n locations
tgngagaattagaatatgtattacataagttcatctttgttctacaatttaggccataataaaataagttgaactatgattatgtatttgtaagtaacacttatggaaatagtaatctattttcaaataaagttaatgtatgttatagttgatgttatactttgaattcattatcccttatgtagtattgtgtctttttaagatgtgttccaatgtttgtacatgtttggtgtgatgttcatttgtactttccaaatgtactgaatgcatgctcgctttatttagacaacgagcagtccgaggttcctgagtgtgttgttggagacatccctgagcaacaacctggtgaaggcaagtgttctctggcccatcatgtcctacattctttatgattcactgtcccatattactctatgaaacctaaggattgactagtctgtattcacttattcttg

SEQ ID NO: 63911 - DNA, 445 bp, Zea mays
  unsure (1)..(445): unsure at all n locations
cgggatatctatcaaatctgaagctgacaggctgatgttnggtctgttcacaatgtttccatgcgtgcagccagccttcaaaaaagcagtagctgtgccccgagaagctactagggcgcagaagtcggcgtgcccaccaataacttcgtcaagggcatcaacttcgcgttcaatatattctaatgttattggcagattttcagctgaaggtgtaaatttcgaagagctagctccgacagagtgaaacacatccttcagccgctgcacacatcggctgccgaagcttaagcatttctcctgaagttctgtaaaggatttctgcaaatntgagtatttatccacttcagttttcaggcttgcttcaagatatttcttttcttgctcgaatatttctgattggtggagcaattcattctttaattggtcattctcactttggacttca

SEQ ID NO: 63912 - DNA, 362 bp, Zea mays
  unsure (1)..(362): unsure at all n locations
tgaaccgnccgaccgtgttcaagggcgccgatctgtcttcatggatgagagnggcggtacttgccctgcatatgagttcatccacataccatataatggttacggctgcaaatacccatttgttgctgatgtattagacatacatatcctgtttctcatttcatatgatggaaaactaggagccacagacttctccagcgtacgcgttaattttctaattgactcttttaaccgaccaatctgttgattcattagaatctgctgatgatctacatactggataatagattggatgtcgtcggccctacttactgaaggcgttacgaaccctggggagccctggaccgacgagtgaattatcg

SEQ ID NO: 63913 - DNA, 419 bp, Zea mays
  unsure (1)..(419): unsure at all n locations
cttgccaaatanggcgcatgattatacctttgatatcttctcgtactggcagatcattcttcacataaaaccattctgtcatccaatctccgggccatctcttccgaaaggttggcacggngcagcttgacccggaccgggaaacgaaactgtagcagccaaaattattgtgatactgttccttaccccaaggttttgtttcatatgataattcatgtatattgcagaagctttttgcgtcaggcttcagaccttggcttctcacggcccacacgaagatattcagccttataattgcctcgggggtaagttgatggagatagacttcgcaatatttcagcacctctacaacgaagctgctcataggaaatcgcagtccagctctcaaaacacttcggtatactacgacttcattctct

SEQ ID NO: 63914 - DNA, 485 bp, Zea mays
  unsure (1)..(485): unsure at all n locations
tgcattgcatatttaaattccttgtattgcatctagggcttgtctaacctagttgagataaccgccaataaagcgagtgaaaaagcttaactcgggtcaaacttgacaagtcttagttttaagcttttagcacttaaattcttactttcatgcaattattggttcttgaaatatgcatgaggtactgcacttagggggagtattcaaaactcaaatcactcttgaaaacccccagtgcaagcccaaatgcaaatttcaccatttgcctattttctctaaaaattatctagcctatggcaaaatattttgaaaagtatatgaggatgccaatacctgtcccaacaagtgttattntgtgtgattataagttgggaattggtttggttaagagttagatagaanaattcaaaattttccaaactcccctctgtctgggctcaccggacagtccggtgtgcaccggacactgcactgtgcaatgtccg

SEQ ID NO: 63915 - DNA, 496 bp, Zea mays
  unsure (1)..(496): unsure at all n locations
ctataaaactcaagcttcngatttagttctactattntagctgcagcttctgtcaatattccttcggntggctgaagctcaaactccttcttttcaagagcagctgattggtcttttattttgctttctaaactctcaattataacttcgngttttttatcttccaaatcttgctgaattntcaaagctttactcaaaagcatactctgcgcacaaacaaccttcgttagaaaacatcttcgttgttgaaacaataaaagttaaagaaaagtttaccttgaaattggaatagaataaactaccaacgatgtgctgtcatcggtagaggctaatgtccgtttcgagcttcgggaaaccaatactctntgatagagtaccaataaccttcgctccggtatcatcccggacacaagccaactnttcatcatcgacaccaccgaagagaagtgcccccggccgatatccgcangatatgacatactcgtttagctattct

SEQ ID NO: 63916 - DNA, 360 bp, Zea mays
ctactgcgagattgatttgcaacagtttgaagttcttccttgaaggcgtgaaagaagctagagtcttttagatctgttaatactttttgttatagaagtgtttttacgtcagctttgaagttcagttctggcatatgcattcttcagacttaggcttcttcgacgtgaagtgaaactattacagcagtcatgatggtggaggagaactattgcagcagtcatggttgaggaagactattgcaccagccactgtagttagcctaagaaattcccgcgtcctgtctgctggttatatttctggcagtcacattattgcatgcgatgtaaattagccatgccaccattattgatatgttgagt

SEQ ID NO: 63917 - DNA, 468 bp, Zea mays
  unsure (1)..(468): unsure at all n locations
ctttataagggaaccaacccctgccaagggtgaattgaaaaatgttacttagtgattatggcgcgtttggcaattttgcgtgccttgctcgcctcaccttgccaagcaaggccagctttggcaggagtggaaaacagatcttgcttgctcagtttggcgtgcaaaaaccttgaaatcatgagcccccagaacaatagaaagaaaaccaaacgctaccatcctgtcaacttgtgtagtagttaggcaaggtgagggagctgcaggaccctatgactcatggctagccatagtatcttatgctgagtgaactcatggctgatatgccttatgagcatgtgtggaatcatcactcacacaatgtgaattccgtgggttntagtcatccactgcctttcttgccttttcagaatacatactccacacaatctnttttttntaaaaaaaaagaggcanaataanactaccata

SEQ ID NO: 63918 - DNA, 427 bp, Zea mays
  unsure (1)..(427): unsure at all n locations
ggggcaaactagttagtccaattatttgtgttgngctattcatccaccaaaattagtataggaaataggtgtaagcctaattccctttcaatctccccctttttggtgattgatgccaacacaaaccaaagcaaatatagaagtgcagaattgaactagtttgcaaaatgttaatgcaaaggttacttagaattgagccaataaatattactttctatatatgcatggattgtttctttatttttaacattttggaccacgcttgcaccacaagttntgtttttgcaaattttttttttttgtaaaaccgtttcaaagtctttttgcaaaatagtcaaaggtaaattaataagaattttgcgaagcattttcaagatatgaaattttgtctccttgtttaaatgcttttcctttgactaaacaacac

SEQ ID NO: 63919 - DNA, 462 bp, Zea mays
aatatgcacaagcaagaattatggtattatgcataattcctgatacagaacatacgttcaaatagaccttattattactcctaaatagcaaaatactagctactacctaaggcattatctacgacatataaatactacttaatatatatatatatatacttatgtatacatcctattcttgttgctcgttgacttcttcaccggcttcttcaccttcaaccggcacctcttcttggatatcaggttcaccaggttcagcttctacttacacatggttgacctgccctggttgacgaataagggctgactgttgcctcctgaggcctgaccctgttgatggatcttttatgggcctgacccatcttttcaataaaactctatagtgagtaatagtggagaataccaatagtaccatattagaagttcaagggtcttcttggttgacttatatggtgggaatta

SEQ ID NO: 63920 - DNA, 476 bp, Zea mays
  unsure (1)..(476): unsure at all n locations
cctataaaactcaactcggttagnctgaattttgcttagcttccttcattaaccttcggctgcttggagttcaaagttctttttctcaaaagcatctgattgctcctttattttgttttccaaatttccaattataacttcatgctttttatcttcaaggtcttgctgcatttgcaaggctttgctcaatagcatactctacacaaacacaaccttcgtcaaacatgtttttattagaagcaataaaagttaagggacaaatcatttaccttgaagttggagtaaaacaaactaccaacgacatgttgtcgtcggtagcggctgatatctgcttctagcttcgggaatccaatacttttggacagagtgctgatgactttggcccctgtttggtcccgaatacactntaatttctcatcatcaacacctccgaagaggagtgccncagatttgtatccacaggattgggcatactc

SEQ ID NO: 63921 - DNA, 478 bp, Zea mays
  unsure (1)..(478): unsure at all n locations
tgagcaagaaataccgattgtggtatgcaaacttgatataatatttccaccaggtttcttcaatccgatgcaacatctacttgttcacctaccattcgaagctaaggtaggaggtcctgtgcaatatagatggatgtatcacatcgaaaggacactaaagaagctacgtgcaatggttggtaataagagacgagttgaagggtgcatcgctgaagaattcaaatacaaagagatagcatcgttcacgggcctgtactttgcagaggaacacaatgtcaatgcccatacgttgcggtatcatgtcgacgagccccctattagtgatattgaaattnttcaatggaggggcaaaactgtaggacccagcacaacatactgtttcaccaacgacgaatggaagactgctntactctacatgtataacaacatggaagagatgaagtcagttctcctgtaagtgtaaactntaatttagtca

SEQ ID NO: 63922 - DNA, 477 bp, Zea mays
  unsure (1)..(477): unsure at all n locations
nggagatgtgttattgagcaaccatgtgactntntcatatggctgggagagcgcgccgtggtcagaatgagcacgttcctccaccgccaccgcctnccactctgcaggagctcatggcccagcagaatgagatcctgcgacagctggcacagcgtcagccgccaccacagcactatggtggtggggaccatcagcgtcaccctgtcgctgctacctaccaggatttccttagtactcagccaccactgtttaccagggcagaggacccacttgatgcagatgtgtggttgagggtggtggaatccaaattcccactgctccatggngcttgttcagaggtcaccaaggtcaggttcgccactcagcagcttcgcgggcccgcaaggacctggtgggaccatattcttgccatgcagccagagggtagagaagtggagtggagggagttcaaggccgctctcagagggcatcatattc

SEQ ID NO: 63923 - DNA, 483 bp, Zea mays
  unsure (1)..(483): unsure at all n locations
ctacatttcanagagaaacttatcctttgtaaacgatctagagaaactcattctcttcaaagaactacacaaattcactaaaagaaaatgttagtctttaaggacacaagatatagaatgagctccccttaaatgtatgcatcaagtactcgaattacttgtaacatgcacttgattcaattaagattcttagaggagttcatcatatatcttggtcaaggcataatatatttgaaacaattgaacttatgctagagaacacatatcatttccccaatagaagtaatccatgtggtgacatgtggtaaatatttgatcatttccttggaaccacttatcctcatttgatgttctcttttcaccaaggtgtgagactaaacaacatgaacttgaaagaaatcattagtctcacaagatataggctaaactcttcctcaatnntgtgcattgcagggtacacatagtacacttatgcatatcaac

SEQ ID NO: 63924 - DNA, 406 bp, Zea mays
  unsure (1)..(406): unsure at all n locations
tgcaatgccagnggatgctaactaaggatgccggtgggtacctactggctactggtgttgttttggtcagctaactaattacgatcaaatgccattctagatcatttccctcaaaaattaaattacgtgatatggcattctagttcatttgggcaagtttttggatcgacccaatgacccagagaaatttgaacttccattcatgatgctaacctaacaccagttcaaaaggaaaaaagaactattgttaaaaccctaagcccaagccaatcaaatcgcatgggaaggggtggcggctctacctgcgggtcctggtatttatcggggtggtagatttgcgcaaactggcggtacgccctgcggacttcctcgctggaggcgtccggcgagaggtggagcagcgcgt

SEQ ID NO: 63925 - DNA, 454 bp, Zea mays
  unsure (1)..(454): unsure at all n locations
ntagtgattagagagagagattaggtgtgttcattttagctattgcgcttggattgcttcttttcttccttcattcttgtgatcaaactcaattgtaaccaaggcaagagacaccaattgtgtggtggtccttgcgggaacttcgtgttccgtttgattgagaagagaagctcactcggtccgagggaccgtttgagagagggaaagggttgaaagagacccggtctttgtgaccaccttaacggggagtaggtttgcaagaaccgaacctcggtaaaacaaatccttgtgtctcacttcttattcgctcacgatttgttttgcactctctctctctcagactcgtttctatttctaacgctaactcggcttgtagctgtgatttaatttgtaaatntcagattcgccctattcacccnccctctacgcgactttcaattggtatcagagcccg

SEQ ID NO: 63926 - DNA, 476 bp, Zea mays
  unsure (1)..(476): unsure at all n locations
actaagctaggtccgatttgatctaaggattgaatntagttccctcccatcaaatgtttgaatattaattacaagtattaaatatagtttaattataaaactaattacaaaaataataattaaacgataagacgagtctattaaacctaattagttcatgcttcactcatataatgttatagtaaacatttgctaattatgaattaattagacttaataaatttgtcttatcgtttagtattcatgtatgtaattagactacacctaacacttgcaataggtattcaaacatccgatgtgacacatacaattttttagtctgaagaacgaaacaaccccctgagactgtcttaaacatatcgtgcatatggtcgtgcaaaacacagttntgcattatagattgtaatgtttataaaatgaagtttaagataggagataggatgagtaagttggtggagataggagataaaatgaag

SEQ ID NO: 63927 - DNA, 481 bp, Zea mays
  unsure (1)..(481): unsure at all n locations
ttngacaataaatattatctactggtggcgacaagtcgttttataatatatgtaaaaagatacataatatgctaacagaaaagtagatagacccacacagcatacaattgtttgtgcataacacagccaggtcagccatgaccaactttggggatatcatagtgctcgctgaggttagccaggtattggttgaagtcctgcatgcggtccttgtacgacttgtttgcgactttggccatcttcttcatgtcgatcttctgcttctgttccatgtagcggcgctctgcttgtgtgagatggtcataatcagaatgtgggttcttttcgtcttcattcttattagattcagtctgagacgactcctcacgctggtacttcttcttctttttctttactccaccatccttcacgtncagcgctgtacccttcagctgcagccgtcctccaacgacgttntggtattccaacatcttgatgtaac

SEQ ID NO: 63928 - DNA, 481 bp, Zea mays
  unsure (1)..(481): unsure at all n locations
tctgcattgcagtggccagtgtggggggtgggagcatgaactggatatgacngatgaggagactgctcgatcgcctcccggccggagcctctgctctgcatgacacagcgaattaatgcgtagaatttgaagcagtaacgacgacacgcaatctctcacttagtaagtagtaatgtgatggtccagattaagcagatagtggtcttttttccatgctagctagagctgatgagggaatagtggaggaagaaggccagacgaacgaacgagagtactgaaaggtcaaatctgtgtgtgcgcgcatgaggggtgggcaggaccagagatccggctgtcctgccaggcgcagcagcccacttgaagtgagacagtacaagatagatagatagatagatagatagatagatagatagatagatagatatagatgcagtcattcagtgtcaactgtggcccggaccacagggagagccgagagcgg

SEQ ID NO: 63929 - DNA, 476 bp, Zea mays
  unsure (1)..(476): unsure at all n locations
aggagatgatatgaagccttggggtgcttgatagagtccattcgattcttatcaactcaagctatcaatcgacaatgatctatatacataattgacccaaggttatttttcaaattgctatgtcttaaactcatatcatctcgaggaagatattatatgttgtaggaagtgaagagatatcatgtgcaaaaatcaaggcctacaacatggaggaaagccaaaggatggtaacacttatattttaagtgcaagtattntagaacatcatttcttatgtgtcttgtgtagtcacatagaaaaattgaagcacttcaaatgtctttaaattgatattaccattctttgaagaatttcctctcatatggtagatggcatattcatcatttctattctatggcaatctacatgctntaattctgtgcaagtatatcatggcatggttttcactaagttattctattattgccatgantcta

SEQ ID NO: 63930 - DNA, 447 bp, Zea mays
tcgcaaggtgaacgagaatagagatatggagaatggagttatggttcaagtgagtcacgttgatgtgataaaaatcaacgataccacggaaaaaaggagatatgggaaggccaatgccgcaaagaagaaaaggagtgtgaaccactgactcgtgggtatcttctgttgggacagtggtcccgtggcaagaacgccaagaacagagttcccgtgaagggagaaccccgatggaaacaaggcggagaagctcaacttcagaaatcacagacatatggttacctgcgaagggtaactgactgttggggtcgatggcggagatcactgcggcagacgagttcgcggtcttcctcttgggcgccatcttgtttctcgctggcgaaacagagcatgatgcgagtggcagagaagactcatatgcggaaatgcaacaactatggcacggaaagc

SEQ ID NO: 63931 - DNA, 468 bp, Zea mays
  unsure (1)..(468): unsure at all n locations
ctataaaactaagcttagagatgttcacgaagctgagatgattgtttataagaaacaaattctgtgatatagaaaagattttcttcacgaagcatgaaaagaagggaaggtgtttttttcgccgaaggctcaaaaaatggtatgtacgcaaagtttcatgcatcgtaaagaattaaattataaatagactatatgttacattcaaagttacaatatatcacacatcttatgttccaaatgtttctacaataacgatttaattctccttgagaactatctctgcagcttcgttcaaaagttggttgataaccttatccataatgtcttcagccatttctctaatttcatcgtcccccttcgggtggcggcccggagatgcctcancaggttctgagggaagaaaagatacgactatattactattacaagccgagaacagagtctggaattaaaattacagcatgataa

SEQ ID NO: 63932 - DNA, 465 bp, Zea mays
acctataaaactcagctttaggccgtgcgcgactcaggcaccccggcatggtcttgcgtgacgaagtcacaggcaggtcagccgtgggaacgggcgtgatagtcggcatagccataggcggaccgacagtaattgcaccaacaggcccgcaagagcagcaggcagatcgccaatcagactctggccccacctgcaggctcgcctcctcccctgaggcgggcccggcggccactgtcagtaccctcaatcaggggtaccttctgctactgtataaaggcgccgcacctgtgcaacgccttaagaccacgtagagaatggcgcccaatgggcaggtccaagagcgtcgcgtgacaaggaaagggagtacatcctgatgttcatcgctagattcggacctccgcagaagaacaccagacccctatacatacatgtccagggccccaagaaggtatgccggatccctta

SEQ ID NO: 63933 - DNA, 486 bp, Zea mays
  unsure (1)..(486): unsure at all n locations
ctcagctttacccggacacttaaattagtagaaactatctattcttaatttcaggtatctattggatgtaagattctatgctacacatcttgaagaaattttggatactgctgcagaattgcttggacattgtagggcttgatcttcagatagtagactgaagatttacatcttccgttcagatagctttactttcctatagagaaacgtgactgtcaagaaatcatctgtcaaacatctagcacctggatcattagcgactaatgctgtctcttctgtttcatccatgtagaccatcccgtaacccacagggacatcaaatcctcttctaatgaacacctgtcgagctataaggttgctggcttcggattngccaaactagctcagctgacgctagtcatatctctcaatcaagtcaagggaacagcaggctatctcgatccagaatatctatctcagaacataccagctcaatgagatcaatct

SEQ ID NO: 63934 - DNA, 475 bp, Zea mays
  unsure (1)..(475): unsure at all n locations
tgtatctacctactagaccaagtaaaaatgtgtttcttcttctgcccactccattcaagttaattntaccctttattctaaaatatgcttaaggataaggaaaatagaaaatgcaacttaattaatgaaccagagagtacttctatttttgttaggttacttattcaataaagttcactggaaaaatatatcataccctgttttagtataaaataagtaagatcctttttgtttaaataaaacaagtgaaacctagaaaaactctacaaaaataaccccaaggtgaaaacacccccacccttgggataactattgttntattagaaagaacctaagagaaatatgaaatctgctgttngacatttctcacataataaggtagtagaaagtgcctttctgacattaaacttaagaaaatcataactaaatcaaccaccccttagtttctgtgaattttagcacagaggcctattat

SEQ ID NO: 63935 - DNA, 450 bp, Zea mays
  unsure (1)..(450): unsure at all n locations
ttaaagggagaacacattntatgactaaccaatgttcattttgagaaagacagggattgtagcgcatgccaagccgggaagcaagttggcgcccatcatccacataagaacatcttgacggctgacaggccactagagttcctccatatggacctattcggcccgatcgcttacataagcatcggcgggagtaagtactgtcttgttattgtggatgactattctcgcttcacttgggtattctttttacaggaaaaatctcaaacccaagcgaccttaaagggattcttgagatgggctcaaaatgagttcagcttaaggatcaagaaaattagaagcgataatgggacggagttcaagaattctcatatcgaaggctttcttgaggaggagggcatcaagcatgagttctcttcttcctacatgccacaacaaaatggtgtagtggag

SEQ ID NO: 63936 - DNA, 472 bp, Zea mays
  unsure (1)..(472): unsure at all n locations
cgaagccatgcgaagtagcataggctaataatatacttattgactcaagcctagctacgggtgcataggtttcaccgaaatccaaaccttcgacttgtgaatatcctttggccacaagtcgggctttgttccttgtcaccacaccatgctcgtcttgcttgttgcggaagacccatttggttcctacaagattttgattaggacgtggaaccaaatgccatacctcattccttgtaaaattgttgagctcctcttgcatcgccaccacccaatccgaatcttgtagtgcttcctctaccctgtgtggctcaatagaggaaacaaaagagtaatgctcacaaaaatgtgcaacacgagatctagtggttacccacttatgaatatcgtcgaggatggtgtcgacggggtgatctcgttggattgcttggtggactctcgngtgtggcggccttggttcttcatccttccttgc

SEQ ID NO: 63937 - DNA, 474 bp, Zea mays
  unsure (1)..(474): unsure at all n locations
ggtnatcgaagncatgcattgacggatgactattgttttggcggtatagctcataatcctcatatgattttagtacaaattacgtcacattcgtaccataagaatttggccaatccgtatcaaccagcatgctcaaatgagaagtttttattctacttcgtagctcaaataattcaagaagttgatgtggttggatatattcttttggaccaattaataatatatatgtgactgacgaccatcgtgtcgtttgatgtatatgtgcggatgtcagccatcatgctgttacttttatttgcaagttttggaaaccttcccgcgcgagggatgtgctgccgatttttttgttgataggcttgataatattttgcagatgtctatctagccgatgcaggtctctcttgaccgcgttatcactgtaccgacctaccacagtcccgctagcctgacttcactgtcaccctaggcataacc

SEQ ID NO: 63938 - DNA, 441 bp, Zea mays
tgaagccatggtaagtagcataggctaataatatgcgaattgactcaagcctagctacgggtgcataggtttcaccgaaatccaaaccttcgacttgtgaataccctttggctacgagtcgagctttgttccttgtcaccacaccatgctcatcttgcttgttgcggaagacccatttggttcctacaacattttggttaggacgtggaactaaatgccagacctcattcctcgtgaaattgttgagctcctcttgcatcgccaccacccaatccgaatcttggagagcttcctctaccctgtgtggctcaatagaggaaacaaacgagtaatgttcacaaaaatgtgcaacccgagatcgagtagttacccccttatgaatgtcgccgaggatggtgtcgacggggtgatctcgttggattgcttggtggactcttgggt

SEQ ID NO: 63939 - DNA, 449 bp, Zea mays
tgaatgtgggctatctacaatgcgaaggatcaacttgcagattgccttgcatacaacaatttaaaggttggtacataattttcacgtactatttttcatgaatattacttgattgactaattttttaaatgtaggtactcatcttgagcaatgctttgaagtgcaagaaggatatcgaagacgagagcactcgaataacctttaggaatttgcgatcggaggttatcgagcttcagcaccaggcataggagaaagaggaaatactgagtactttggcttgtgagctacatgaagaccgcactaagttcaagaaatcttttaaagaaagtaatgacaaaactttaaagttggaggatgagtagaattagaacacaaaagacattgttgacctcgagctatactggcaacacaagctaaggcacataaatctgagatgtgtaaggtgagag

SEQ ID NO: 63940 - DNA, 485 bp, Zea mays
  unsure (1)..(485): unsure at all n locations
gcttcttagggagagcacattntgngactaaccaatgttcattntgagaaagacagggtttgtagcgcatgtcaagcaggaaagcaagttggtgtttgaaagtcgcctagaggggggtgaatagggcgaatatgaaatttacaaacttaatcacaactacaagccggtttagcgttagaaatataaacgagtccgagagagagggcgcaaaacaaatcacaagcgaataaagagtgagacacacgaatttgttttaccgaggttcggttttcgcaaacctactccccgttgaggtggtcacaaagactgggtctctttcaaccctttccctctcttaaatggtccctcggaccaagtgagcttctcttttcaatcaattggaacacgaagttcccgtaaggaccaccacacgattggtgtctcttgcctcaattacaagtgagtttgatcttaagaaagaatgacaaagaaggaagcaatccaag

SEQ ID NO: 63941 - DNA, 484 bp, Zea mays
tctgacttgtgggcccgcctgtgtgtgcggtgcacaccggacatctactgttccttgtccggtgtgccggagtgggcgcgcctgccatctgcgcgcgcagagcgcgcattaaatgcgcggcagagagccgttggcgcggaggtagccgttgctccggagttgcaccggacagtccggtgcacaccggacagtccggtgaattatagcggactagccgttggagtttcccgaagctggcgagttcctgaggctgacctcccttggcgcaccggacagtccggtgaattatagcggagtcgcctctggaaattcccgaaggtggcgagtttgagtctgagtccccctggtgcaccggacatgtctggtggcacaccggacagtccggtgcgccagaccaggggtgccttcggttggcctttgctcctttgttgaatacaaaacttggtctttttattggctgagtgtgaaccttttacacctgtat

SEQ ID NO: 63942 - DNA, 391 bp, Zea mays
  unsure (1)..(391): unsure at all n locations
tgacattgtctccctgttggaatccaatgccatccttaatgtcagggcatctcccactataaagcatgtgtgggggacagatatccnccgggtccaccagaaggacaagatgcctcgtgaggggcccgtgggcccaataatccgcaaggtcatcccttcgtgggcttggggaggaacgtccaataaaccggatcgacgcgagcccagatggtccgaaggattcaagcggagatcacaacagtgacccgaccttcccgcgcaggggccacatacatcggaactgagcgaggatgagtcagctgaattatatgaagatagactctgttagttcactataacttatgcacgcgttgttatcatatccatatgtaacgccccacggtcgagtata

SEQ ID NO: 63943 - DNA, 478 bp, Zea mays
  unsure (1)..(478): unsure at all n locations
tcgtcggctcctagaaaatcttcaccgctcaacctctctctctcacgtattccatcagtcctattcgctcatcaggcttctagccgctcccagctcttgccaaccgtgagtccctgctccagccatcggacgccagaacaagccgcctctcctgctcggccacgctcagctttcgtttcgagcttcccggcgtcgctcacgcccagcctgctcgccatggctggccacgcgctggctccctgctcgtccgccgagtccgactcgctcctctgcgcgcagttcgccctaactcccgtccgtagtggtcgccagtcgttgaccctgctcagattccatctcgccagcttgctacagactcgattntgtcgtcgttccgtgcgtcatcaagaaatcccaagaatagggtgaagacgaagctagcaacgcgatattccccaagcgctcgacanattgactggatcggaanatcattaccgat

SEQ ID NO: 63944 - DNA, 465 bp, Zea mays
  unsure (1)..(465): unsure at all n locations
tggacgtggctccctgttggaagcctatgccatcctttatgccagggcgtctcccactatagagcatgcttctagcaaatttaaatttttattttctaagtcatgctcattaattctagcactaagttgagctatgtgatcattttgttgtttaattagcgctaggtgatcatggatagcatcaacattaatatctctacatctagtacaaatagtaacatgatcaacactagatgtagagggtttgcaaacatttaattcatcaatcttagcatgtaacatggcattctcatttctaagattggaaatagaaacattgcaatcatttaaatctttagccttatatattaatttatcattctcaatcctaaggctagtaagtgattcattcaacttggtcaatttagcaatcaaactagcattatcattcttaagnttgacaagagaaccatcacaaacatttaa

SEQ ID NO: 63945 - DNA, 416 bp, Zea mays
  unsure (1)..(416): unsure at all n locations
gaaactcaagctctggcacgcacncgaanggcagcagagcgagatattctgttacacanggccataccgaaaggaccaatcaaattctcgaagatatgctgagagcctgtgccgtgcaatatcagtccggatgggacaagagaatgccttatgcacagttttcctataacaacagttaccatgccacgttgaagatgtcaccatttcacgctctctatggaaggagttgcagaactccgttgcaatgggatcaacccggagaaaagcaagtggttgggccacacattttgcttgaagccgacgagaacatctagatggtccgagagaatctaaagatatcgcagacgaggcatcgaagctatgctgacacaagatgaagagagctgagtttctaagtccgagactctgactatctg

SEQ ID NO: 63946 - DNA, 451 bp, Zea mays
  unsure (1)..(451): unsure at all n locations
tctccttgtcgtcatcaaccttgacatagaaccactccgacttccagcctgctgcccatttgcttcggtagctgattacaggaaactttgtggtttcccgataagcaaaattatagcaaccaaaattgtcatgcaatccatcttttctagccttcgtctgatagtgcagctcgtgaactcgacaaaagctgtccgcaaacggctccaccgcttggcttcggagggcccagatataaacactaagcctaacgatagcgttaggagtcaactggtgaaagtagataccaaacctcttcagtacctctgcaataatcccatgtagggggaatcttaatccagcctttagaaagctcttgaaaatgactatttcatccttctctggctntggggtagtttcttcctccccccgaagcgtagtagcttcttctgactttcactgaaaaaactcgac

SEQ ID NO: 63947 - DNA, 171 bp, Zea mays
tcagggacatatcttccaggatcttccttcttgcggatgccacgcatgatccccttgtgtgcatacgggacatgagcagggtccatgtgattctcaaccaaaatatcatacctgcaatacaatgcaacagtgccacaaatcatgactgaactgcgaatgtccaaatgtgca

SEQ ID NO: 63948 - DNA, 473 bp, Zea mays
  unsure (1)..(473): unsure at all n locations
ntatggagaaggacctgaataagaggtgccatgggctcgacactagattacggacccatgaactcaacgatcaagaacaggaggaggcttgaagcctgatgaattcgaaaagcattgctaatagtggtatgatgtgagtatattttacccatatgtatatggatacaggtagttgtgaatcatctaggccccttagtgatgttttggtaattaatgacaactgtttgtggactaacagttcttggagaaataagaatgcagggttggaccacatagaacagataatcttggagatntataagcattggttgtggatcaagtgaaggcaaacgtataacataggttttggtttttgccggtctccaggagtttagagaagatatttgactggattagtacgctagatggtcgtactattaagagaggtcaactgacgttgtctgtgtaaacttagtgcctatagacatctagtg

SEQ ID NO: 63949 - DNA, 467 bp, Zea mays
  unsure (1)..(467): unsure at all n locations
tatgcaacatcgntggagatggtttggacatatccatctaatacctgaagaggcaccaatgcatatcggaataattaggcgtcccgagaatgtgaagagaggtagaggtcgaccaaccttgacgtggacagaggctgtgaagagggacctgaaggagtgaaatattgataaagagctcgccgtggataggaaggggtggaagtgtgcaattcacgtgccagaaccttgatttatagtttcgcttttcctccttaatcgtttgaccttttcttgtgcccatttagatcttgctggttcttgtgggttttatctcttttatgtgtttccccgtttcgtcgtttttcggttctcctttgcctttgtttccccttttttctttgggggttgagctctgaggttttcatacggngtttcatctctagcctaccccaacgtgcttgngacaaaaggctnntgtttgtgtgttg

SEQ ID NO: 63950 - DNA, 488 bp, Zea mays
  unsure (1)..(488): unsure at all n locations
ggacctataaaactaagcttgtgaggttcttcatccncacatgtgctaagcggcgatgctctcagccagcccatgctagtcttagctattaagcatgcatctagaccggcctcctcttttgcaaaatcaactaaataaagtttgccatctaatacacccttaaaagctagtgaaccatcacttcttctaaagacagacacatatacatttgtaaatagacagttataccccatgttgcataattgactaacagatagcaaattatatcccaaggactcaactaaaaacacattagaaattgagtgctcatttgagattgcaattttacctaatccttttaccttgccttgatttccatcaccgaatataattgaatcttgggaatcattattcttgacgtaggaggtgaacatcttcttctcccccgtcatatgggttgtgcatccgctatcaataatccagcttgaacccccggatgcataaacctg

SEQ ID NO: 63951 - DNA, 454 bp, Zea mays
  unsure (1)..(454): unsure at all n locations
ntagctgattcaaagntccttggtggaccattcccaggtttatcttctccatctcttgacataaagtgttgtcagaggtcttcaccgtaagacagtgacaggaaaccttacggcttaatgcatctgccacaacattggctttgcctaggtgataatgaatttctagttcatagtccttaataagctcaagccatcgcctttgtctcatattcaattctgactgggtgaagatatacttcaagcttttatgatctgtataaatgtgacagatatttcccagcagatagtgacgccaaattttcagggcatgaaccacagcagctagctccagatcatgagttgggtaatgctcctcatgtcggcgcaactgccttgaagcatatgcaattactcggccttcttgcattaatacacagccgagtccactgcctgatgcatcacaatatacatcaaa

SEQ ID NO: 63952 - DNA, 472 bp, Zea mays
  unsure (1)..(472): unsure at all n locations
tcgacttcatctatgttatggatagcctgtgaatccatccatcttccttcggccttcctgacagcttcctgactcctatgaacagcaatgggcccatgtttcgaaggtatcttcaagcataaatatgctggatgaagaatggcttcgaaggcattaagcgtccctcgaccaatgattgcgttgtatggatactccatatcaacaatgtcaaagacaacgcgaagatgatgtccgatgcgctgccagtgtcaaccagaacattgtggaccagaaatcccttgatgacataagatataaccatggcatcattgtgaggataatctttaagctgaaggtcttcctgngagaaggtaattgggatgtgagaccacttagatctgtaaagggtccttgcaccccaacacgctgcactcttctttgtgcttccttcttctgcttcttattggctggctctgagcttgaaccacctgtg

SEQ ID NO: 63953 - DNA, 462 bp, Zea mays
  unsure (1)..(462): unsure at all n locations
ctcagcttcgaggaaggtcagctcccaaccgaggatgaggtctgtttatgctacggngaggagaaaggacatacaacaaggacgtgccaagtaatgatccataagcaaaaagagatagcttgtaacacccaaaatcctattttaggatttatgaaagattctccagaagatttgaactaaaatatcttttaataagatttttttatttttgaaaattactcatcctaaaaaatgaatatgtttcttatcaaataataaatatctatgaaagttacccttgtgttagattatatatttacaagcctctcttaatgaaagttttacactaggagttaatattattccttcttatgacgaactgcatactctgaagccttctgcttatataaaatactaattcaattatctaactaatcaatgcatatcttgcactcatgttgaagtttgagtgtgatctagctg

SEQ ID NO: 63954 - DNA, 376 bp, Zea mays
  unsure (1)..(376): unsure at all n locations
gggaagtatcaatggataagggttttgcacgacgtcgtatatgtgataggagaaaattctaaattgtggctagtactttaacaaatcatacgttagtttggtggaacaacttgcatgactatgacaaaccacaaacttggtctaatatgaaagcgtttatgagagaacaatttgtttcttctcatgatgtctaccttcaaataaatctgagttacatttgttacatgataattgtactatcgattcttttaagaacaaagagttgtgtgatgaatcttctattacttatatgccacaacttgagaacaaactngatattcgtgctgccaatcctattaatcgtgcctgaattagaactttcaatcctataactagt

SEQ ID NO: 63955 - DNA, 427 bp, Zea mays
tctaaagggagaacacgtgataggttggactaacgtgcaattcttataagatagaccttgtgcagctggtcaagcaggtaaacaagtgggaagagcacatcacagcaagaatgtgatgaccacttcaagacctctggagctgctgcatatggaccccttcggacccgtcacctatctgagcataggaggaagtaagtatggtctagttattgttgatgacttttcccgcttcacttgggtgttctttttgcaggataagtctgaaacccaagggaccctcaagcgcttcctcaggagagctcaaaatgagtttgagctcaaggtgaagaagataaggagcgacaacgggtccgaattcaagaatcttcaagtggaggagtttcttgaggaggaggggatcaagcacgagttctccgctctctacaca

SEQ ID NO: 63956 - DNA, 454 bp, Zea mays
  unsure (1)..(454): unsure at all n locations
cgcaatatattgctaacagatgaagtgtggaattgttctttatcaacgatatgaaatgtaagttaggcgcaaatcaagtatgaacttagggaggaaaggtggaaatcaaattgcaaatgataaaggcacaaagacagaacaatttgttacatagttcggtttccaataaaacctacatctccattgaggtgttccaatggatcgagtctatctcgactctttccccactcaagtgatccaaagatcaagcttgagttccctttatctttgctcaaatggtaggaccgagtcttcgcaagactctccacaacttggaggcacttgcccgctttacaattatcaatgagatctttgctccaagactcaagatcacaacacattctgcttgcatctcanatacaagtgctctatcacttatcactcaaatggatgctctatctaagaacactacaca

SEQ ID NO: 63957 - DNA, 418 bp, Zea mays
caaaaaccagccctaaggagaaccagcagaggaagaatgttctttgagaaacacaggatttgtagcgcatgccacgcatggaagcaagatggagtccatcatccacacaagaacatcatgatcgaccgacaggcccgctagagctactccacatggatcgattccgaccgattgcttacataatcatcggcgggagtaagaatcgtctcgtacacgggatgattattctcgctccactcgggtattcttcttacacgaaaatttcaaacccaacagaccttaaagggattctcgagaccggctcataatgagtccgtctctacgatcaagataataacacacgactcacggacggacgacaagaactcccatattgaatagctccttgacgaggagggcatcaagcatgagttctctt

SEQ ID NO: 63958 - DNA, 381 bp, Zea mays
  unsure (1)..(381): unsure at all n locations
actcaagctgcttgatattaaattccttgtattgcatctatgtcttgtctaacctagttgagataaccgccaacaaagcgagtgaaaaagcttaactcgggtcaaacctgacaagtcttagttttaagcttttagcacttaaattcttactttttatgcaattattggttcttgaaatatgcatgaggtactgcacttagggggagtattcaaaactcaaatctctcataaaaaccccttagtgcaaaccaaaatgcaaatttcaccatttgcctattttctctaaaaattatctagcctatggcgaaatattttgaaaagtatatgagggtgccaatacctgtcccaacaagtgttattntgtgtgattataagttggga

SEQ ID NO: 63959 - DNA, 492 bp, Zea mays
  unsure (1)..(492): unsure at all n locations
ggacacatgaaactcagcttcggaactntacttgcttcttcctcctgagcccctgtcgtccagtcggcgatgaagtctgctagcgcttatgactgaatcgaagatctatgtacataatcaatgttaaactcgttgagttccgcagcccacttttcaatccttccagtagcttctctgtttctcataatatccttcaagggatgtgatgaaggaactattatatgatatgcttgaaaataatgtcgaagcttcctggaggccattaaaacagcatacaacaccttctccaattatgtatagtttttctttgataaactgaggactttggagacaaaatatactggagcctgctttttcaattgcccttcaagcttctcctggacaagcgcagcacttactgtagagtgcgaagctgccacatatagcagcagaggagcccctggcgctggtggagttacagntgttaaatctatcagatactgcttcagctct

SEQ ID NO: 63960 - DNA, 434 bp, Zea mays
tctaaagggagaacacgtgataggtctaactaatgttactttcgaaaaagatagaccttgtgcagcgtgtcaagcagggaaacaggtgggaagctctcatcatgccaaaaatgtgatgacaacatcaagacccctggagttacttcatatggacctcttcggacccgtcgcctatctaagcataggaggaagtaagtatggtcttgttatagttgatgatttttcccgcttcacttgggtattctttgtgcaggataaatctgaaacccaagggaccctcaagcgcttcctaaggagagctcataacgagtttgagctcaaggtgaagaagataaggagcgacaatgggtccgaattcaagaaccttcaagtggaggagtatcttgaggaggaaggaatcaagcatgagttcttcgctccctacacaccacagc

SEQ ID NO: 63961 - DNA, 482 bp, Zea mays
tgaggctgtgtatagattaccgccctcttaatgcggttactatctttaacaagtatcctttgcctcgtattgatgttctctttgaccagttggtcggggccaaggtgttttccaagatagaccttcgctctggctaccatcagatcaaaatacgagcaagtgatattccgaagacgacattctcaaccagatatgggtcatatgaattcttggtgatgtcattcgggctgacaaatgcaccagcatatttcatgtatctgatgaattctgttttcatgccggaattggacaagttcgtggtgggtttcatcgatgatatcctggtgtactcaaagaacgaagaagaacatgccgggcatttgcatgtagtgcttcaacgtctgcgagagcaccacctttatgccaagttatccaagtgtgattgttggctaaaggaaatcaaattcttgggtcacactatctctcaggctgggaatagctgt

SEQ ID NO: 63962 - DNA, 478 bp, Zea mays
cttggagggtttctaccttcctgctcttgaataagctatgttctctgagtatatcacgacttgtgataaatattactcttgtcaaacatgtaaaacttgagttttgaaaaggtaaagaatgtttgtaaagtcttccgctcttatctccgaagagtgtgtatcgaatgtgattactgtaatatgcatgtatggtgggagatctttgggatgatgagttcaagttgttgaactcgtgatagccttgttaagttacctggtacacgtgcataaccatctgaggccatccacgcaaggattggtgcacgtgggcctgataacttgggagggctgtcacaatcaccctgctaaactcttcacaagacttttggttagtagaaccaaatattatgtcatctgacataaattggcacacaaaaagatcaccatcacacgtcttagtataaagaagtggatcggcttttccaaccttgaaagcatt

SEQ ID NO: 63963 - DNA, 486 bp, Zea mays
  unsure (1)..(486): unsure at all n locations
cggatagnngtttgcgaaggttcttgtagagccttctgtgcatgatcanctgcggncctagtggcaccttcaaaagtcaaaacatgttatgcagtcaaactggatttcagttgcacaaataatattgttgagtacgaagcacttctattgaagcttcggaaactaagggcaatgggaataagaagggtcatcctaaagactgattctcaagttattgctggccatgtggataaaagcagcaaggcacgagatccgaagcttgaaaaatatctggatacagttcgaaggttggaagcttccttcgaaggtttttccgtcaagaatattccaagaggtgaaaatgagcatgtagatgtgctagccaaatcagtggctcaggggctccgcctaccctccgacagtatttttgaaacaataaaaacaccttcatctgagctcatggagagagcagtgcttactatttctcctgtacacagtgaagactgg

SEQ ID NO: 63964 - DNA, 473 bp, Zea mays
tgtgaagattcttcatctcaacatgggctagtcggcgatgccagagccaacccatattagtcttagcaatcaagcaagtattgagttcagctctattaaaatcaactaagtatagctgaccctctaatactcccttaaatgctactgaatcatcacttcttctaaagacagtaacacctatatccgtaaaaagacaattgtagcccattttgcatagttgagaaactgaaagcaagttataatctaaggaatctacaagaaaaacattggaaatagaatggtcaggtgatatagcaattttaccaagtcctttgaccaaaccttgatttccatccccgaatgtgatagctctttggggatcatcatttttctcgtaggaggagaacattcttttctccccagtcatgtagtttgtgcacccgctatcaatgatccaacttgagcccccggatgcataaacctacaaaacaagt

SEQ ID NO: 63965 - DNA, 439 bp, Zea mays
  unsure (1)..(439): unsure at all n locations
tactaagcttanagcttaaactancagatcacagtgcacaggagctatatttgagtgagcacgagtggttggccagaaagcgtgcaaaataaagttgcggtatggccgtatttatacgcttgatgcgttgaaagttgaaagaccccacttgtcattgaatgttgctattctagcaaagggaaggtgttttttcggaccttcggcataaagccttcgttcatatcgcaatctgaatatattatttcaaacaaattaatattgcgaggggctactgttgggggccttcggcttccgaaggtcctcaaaaacatgatttaacagtgtttctagagtgtaatgtgtgaacaggtaccttcggacttatatcaaagagggagaacctcataagatactaaggttggcagtgccgaagctgtgaagcangaaagcttctgcatgt

SEQ ID NO: 63966 - DNA, 116 bp, Zea mays
  unsure (1)..(116): unsure at all n locations
gcaacgggcgaatccaacgtcagtgatgacgtggtttgtggcancggactgtccggngtgcaccggactgtccggtgcgccatctaacagatagaactcccaacggccacattttg

SEQ ID NO: 63967 - DNA, 449 bp, Zea mays
  unsure (1)..(449): unsure at all n locations
tgtgtaagcttcacggcctctccaggaagccatctgaatgctaggatcgaacggaggaggacaggaaaggggctggccacggtggttgctctcgggcggctctggcgggtcgcggggaggtcgccggagctaagggcaggctcgggggagttaggcgtggtacggaggatgcaacggggaaggcagccgagcactgggacgggctttatagccgtggcgtgggcgtggtcacgggcggccgcgggcgcgcggnggttcgcgcacgggcgtgctctgagcgcgcccccgggtgtcagcccgcgtcgaacacgtgggagctcgcttctgccatggttcaacggcagatttgagcaccttagcgtgcgtatcttggcaaaaccattgtgtacggtcacttccctgctccatantcctatcttttgctgtgagttccaagtcaagatatggtc

SEQ ID NO: 63968 - DNA, 397 bp, Zea mays
  unsure (1)..(397): unsure at all n locations
gtcagtcttagcgctaatctcggtcttagctagtctttgttagacagggtagtttgctatatcctgtgcatctatgtntgtcatgattaactatgtttggtttggatctttgtaatgactgtcaccagagtgtgggtatcccctgcattttggtttacctattatgctaataagagttagttatataggtgggaaaccccttctattctactttcctttctatctgagaagctgtgtggtctgtgttggagatcattgaagatgcccatctgttcagtgctgttgaagaattctattctctttccttatgctgcaagatttgccagatcagttctgatgtgtggttgcattctgcatatgtcagagaacatgcgcagatgaggaatgcgtgctcaac

SEQ ID NO: 63969 - DNA, 479 bp, Zea mays
  unsure (1)..(479): unsure at all n locations
ntagccncctnccttncacttgagtgagacgacaatgtctatctcccctcttttcccctggccggcccagcaagcctcttcctcccagttcattgccgcgctcggttcacccgcagcccatcaaccgcgttccctaggccgagcgcgccaagtcgcctgagcctatcaccctcccccaaaccctagccccgccatggtcctatggcccacacgccagggcaccggcttccacttcttcgcgtgctcctcggccgagtggagctcaaccgcatcgtggacgcgcctggatcggaaaccgctgccacgatctcgcccaagtcattgaagttaggccctcgacgtgttgcttgccttgccttgccacgcgacgatggcacatgtctcgcgtgtcgatcacgtgtcgcttgccttgccacgaacgtatgcacatgtctcgcgtgtcgatcacgtgggtcacgcagagtctgctcatgataata

SEQ ID NO: 63970 - DNA, 448 bp, Zea mays
  unsure (1)..(448): unsure at all n locations
ggacctataaaactcagctctgtctgactataaggagccctcccacttgggctccagctngcccctggactccgtccgagctgttcggacgagtacgaggtccccttcgctgaactccctcgggatgactgcgtggtcgcgccatgctttggtctgggcttggtatttgtttagggcctgtagggcgaagacccggtctccgtcaatgagatcttttgaagttggctcgtccacgtcggggacggctgacggagctgtacgcggggacccatgctttatttcttgcggngtcatggcctccgacccgtatagaaggcggaaaggagtgaacccagtcgccctgcactcagttgtgtttagcgcccagactgcctccggtaacacatcggtccatctgccttttttcatcgaggagcatcttcttgacagttgtgaagatctttccatt

SEQ ID NO: 63971 - DNA, 441 bp, Zea mays
  unsure (1)..(441): unsure at all n locations
tctaaagggagagcacattntaggactaactaatgttcattntgagaaagacaggatttgtagtgcatgccaggcacgaaagcaagttggagcccatcatccacacaagaacatcatgacgaccgacagaccgcttgagctactccacatggatctattcggcctgattgctcacataagcatcggcggtgaaagggaattaggcttacacctagtccctaattaattttggtggttgaattgcccaacacaaataattggactaactagtttgcccaagtgtatagattacacaggtgtaaaaggttcacactcaatcaataaaaagatcaagttatggattcaacanaggagcaaagaagcaaccgaaggccctctggtctgggagcaccggactgtccggtgtacaccggacagtgtccggtgcaccaccggacaatg

SEQ ID NO: 63972 - DNA, 474 bp, Zea mays
  unsure (1)..(474): unsure at all n locations
ngaattcaggcctagagcatccctaccctctccccgtaacctatgtcggncgnagagcgccagattaacccccaccacgatgggtattgctcgctggagcagccctgtgttcaccttagggtcccctccacgatctgtcggcctcggccccgttcacgccatcctgacctcgccttagtgtttgccaagacttccccaacctctctggcaaccccgaccgatccctagcgccctatgagccccaatctacctcatctccggtagctgcgctgccgtgagcgcgtatggcgccgcccctagctggccggagtatgtaaagccccagcacccatcctaaccatctgactctgatccgacggcccagattcactgataacggttcgtgcaattcgtggaatcagcgtcgtcgatctgcgatttagcagccagcgcgcctcgtgccctcagcgcaccgctgagctgtgggtcccgcgt

SEQ ID NO: 63973 - DNA, 485 bp, Zea mays
  unsure (1)..(485): unsure at all n locations
tctggtagagtctatgaagccattgtaccggagatcaagaacattccggtagtatgtgagtttccagatgtatttccggaagatttgcctggactaccccctgaaagagatgtagaattcgtgattgagctaaagcccggtacggctccgatttctcgaagatcgtaccgtatgcccccaaatgaattggcagaactgaagactcaattgcaagatctgctgaataagggatttatccggccaagctcgtccccgtggggttgtcccgccatctttgtgaagaagaaggatcaaaccttgcgcatgtgcgtggactatcggcccctgaatgaggtcaccatcaagaataagtacccccttcccaggatcgacatcttatttgatcaactaactggggcgagggtattntctaaaattgatctcaggtcgggctatcatcagatccgtattcggcccgaggatataccgaagaccgcgtttactac

SEQ ID NO: 63974 - DNA, 472 bp, Zea mays
  unsure (1)..(472): unsure at all n locations
ttcacggatcaagctcgttacgaataactatctagcaccgcgaaaggggctactgttgggtctatgcttcgtcgccgaaggtcttatagaaagaagtgatcctcggatgaagctgttcgcacaagatagccgaaggtgccttttcgcagagcttcggcattacaaaccgacttaaagatagaatgaccttttagtccataaaggtctgagtcaacgttgtaagttcttataaggggcatacttgtaattcctcacaggctgcgtcctgtgcctataaatagtgaacagtattccgttactgttcacgcattntctgacattttgcaatcgcatttctcggaatacaacctttgtcaaggcataggtatcattgtattttatgattcaatatattaagtgaatattatataatgcatctgtggatcatntattcattcttacctcttactttgcattattctacaacgtttat

SEQ ID NO: 63975 - DNA, 417 bp, Zea mays
actcaagcttatcgaaattcttcatcccaacatgtgctagtcggtggtgccttagtccacccatgttagtcttagcaattaagcatgtgtcgagttcagctctatcaaaatctactaagtatagctgaccctctaacacacccttaaatgctattgaatcatcacttcttctaaagacgatgacacctacatcagtaaaaagacagttgtagcccattatgcataattgagaaacggaaagcaaattgtaatctaatgaatctacaagaaaaacattggaaatagagtggtcaggagatatagcaattttacccaatcctttgaccaaaccttgatttccatccccgaatgtgatagctctgtggggatctctggtcttctcgtatgaagagaacatctttcttctccctatcatgt

SEQ ID NO: 63976 - DNA, 446 bp, Zea mays
  unsure (1)..(446): unsure at all n locations
ttgtgaaacanagagacataaggtgtgtgatatggtttatttgcttctcaaattggtattgcttttgccggtggcgacagcaagtgttgaaagggcattttctgcaatgagtttggtgaagactaaattgagaaacaagatgtgtgatagtcttttggatgattgtcttgttacatacatcgagagggatattttcttcgaagtgaatgaagaagatataattgaaacttttatggcgttgaggaagcgcatgccagataagtagtattattgcaatttttatgcttaatgtatgcaatttttatgcttaatgtatgcaattttcatgcttatttgttgagtgtcaaactttatatctatatatcaaattgtttaccaaatntactatgaaattatatgtacattaaatagaattctacatggaagattttgtgcggcacacccta

SEQ ID NO: 63977 - DNA, 471 bp, Zea mays
tgcgccttataacaagaggatacaagaagttggagtgctcttgtgaaagcttctgcgaatcacttgaagcgttagtacttttgtgaatgattctataaagtgtctgcaaatatgtgtaaaacataataacatgtgtaggttttgtgaatgatattgttgtggtgctctgtgatggattatgtgatgtggatttattattgtgcaatactaattaaatttgtatatctatgtgattatgtgtataaaaattggtgatttgtgatgcttttgtatatgagacctttgtatatataacagttgttgaatgctaattaatggtatattatcattattaacgactataactaggggcaactttctgttggttgtaaatgtatagtataacgactcacgattggttgctaaatctatagtacaacaacccacgaatggtcgctagatatacaatattatcaacggacggtcggtcgc

SEQ ID NO: 63978 - DNA, 478 bp, Zea mays
actcacaaacctagaggagaactgtgaacctctatcttacacaatcttctttggtatcccatgtaaacacacaatctgagccatatataactctgctagctgagaacctttataagtagactttacaggaataaagtgagccactttagtcaatctatccacaatcacccatatatcatcatatcctttctgggtgcgaggcaatccagtaataaaatccataccaatctcttcccatttccactcgggtatcttcagtggatgcagtactccagctggcctctggtgttcagccttaactctttgacgcacatcgcacatagccacatgtgcagccacatctctcttcaatccataccaccagtatctctgcttcaaatcctgatacatcttggtactcctgggatgaatagaacaatccgagtcatgggcctcctttaaaatagtctcttaaaagcttttatatcaagaacgcaca

SEQ ID NO: 63979 - DNA, 493 bp, Zea mays
  unsure (1)..(493): unsure at all n locations
acctataaaactcagcttctaagggagaacacgtgataggttggactaacgtgcatttcgaanaagatagaccttgtgcagcttgtcaagcaggtaaacaagtgggaggagcacatcacagcaagaacgtgatgaccacttcaagacccctggagctgctgcatatggacctcttcggacctgtcgcctatctgagcataggaggaagtaagtatggtttagttattgttgatgacttttcccgcttcacttgggtgttctttttgcaggaaaaatccgaaacccaagggactctcaaacgcttcctcaggagagctcanaatgagtttgagctcaaagtgaaaaagataagaagcgacaacgggtccgagttcaagaaccttcaagtggaggagttccttgaagaggaagggatcaagcacgagttctccgctccctacacaccacagcanaatggtgtggtagagaggaagaacaggacgctcatcgacat

SEQ ID NO: 63980 - DNA, 462 bp, Zea mays
tgcgaaggttcttcatcctcacatgtgctaagcggtgatgccacagccagcccatgctagtcttagcaattaagcatgcatctagaccagcctcttcttttgcaaaatcaactaagtagagcttgccgtctaatacacccttaaaagctagtgaaccatcacttcttctaaagacagacacatctatatttgtaaatagacagttatatcccatatgacataattgactaacagatagcaaattatatccaagactctccactaaaaacacattagagatagaatgctcattggagattgcaattttacctagcccttctaccttgccttgattcccatcaccgaatataattgaatcttgggaatccttattcttgacgtaggaggtgaacatcttcttctcccccgtcatatgggttgtgcatccgctggcgataatccagcttgaaccccgggatgcat

SEQ ID NO: 63981 - DNA, 465 bp, Zea mays
  unsure (1)..(465): unsure at all n locations
tgagtcatttnttctgcaaaagattattgatgcacatattattgacaccggtatgagacatattcatgagaaaatagaagctgacaaagcgaattgtttcacaaaagatgatcaacgcatactatggtttaataaccgcatagttgtgcctaatgacgatgaagtccgccaacacattttggatgacgctcatcttagtcgatattccattcatcccgaaagcactaatatgtatcaagatttaaagcaacattttgtgggacaaaaatgaatgttgaaattgcacactatgtggcgagatgtgacacctgtagacgtgtcaaggccatacatatgaagactgttgtgtcactgcaatctttgcccatcccaacatggaaatgggaggacatcttcatggacttcattgtgcggtacccagaagacacaacgattcgttctatctggttatcatcgacgacttac

SEQ ID NO: 63982 - DNA, 462 bp, Zea mays
tgtctggccaccactcactagcagcttgtggctgactgcagagtgcaaacatgcactcatactctcctagcatgctactagcctactaggctagcacacgttgagactctggcacacgccagtaccggccatagacgacatggactgacaaaattacgtgagcaacagattgtagctttgaaatttttggggccctcaggatttaggagccctgttccactgaacagctagcaccccctctcgcacgaccctggcacttagatagtggccctaggcgtcaaaatcgccatctccaccacagatccaacatatacatatggttggaccaatacaataactcattgtgtgagttagtatccactctcatggtatcaagatcgtaaccatgttgtgcatctttcgatgcccatcttgttgcgccgatctcatcgatcgtctttgccttcattgcagtcatgctca

SEQ ID NO: 63983 - DNA, 478 bp, Zea mays
  unsure (1)..(478): unsure at all n locations
tgccaattcttgtcaaagcaacaacacttaccggcgtagcagctgcagaccatacctataacgtggccattcgcgtgttggggattggacaggattggacccttcaaaaaagcttagggaggctatactcacgtgttggtcgccattgacaaattcaccaaatggatagagtacaagcctatcgcttctttaacctcagccaaggcagtagagttcatacaagacataatattcaggtttgggataccgaatagcattataaccgacctgngatctaacttcactagctctgaattatttgatttctacgagcaacaaagtatccagatcaagtatgcatcagtggcacaccctagagctaatggtcaggtggaaagggctaatggtatgatactggaagtactcatgaagaaagtgttcaacanaaataaaaagttcgcaggaaagtggatcagagagttaccttatgtgcgttgga

SEQ ID NO: 63984 - DNA, 326 bp, Zea mays
  unsure (1)..(326): unsure at all n locations
natcacacgaggatagaggcaagagctcgtccatatttcatganaggaggagagttgtacaagcatggagtctgtgctccgctactcaagtgtttattcagaacctaaggtatagagttgatgaaagaaatacatgcacgcctttgtggatctcacattggatctacgccgttacttggaaaaattttccgccaaggatcttattggccgaaggtagcttcggatgctgcggaattagtttaaaagtgcgaaggttgtcagaaatgtgcacgacatcaaaaacaaccttcgtccctaacacagattatatcacccatatggccatt

SEQ ID NO: 63985 - DNA, 488 bp, Zea mays
  unsure (1)..(488): unsure at all n locations
tccctgcgcacagcttcngctacactcgaccttcgtctggttcaggcttcgtcctggccgtgctccatattcataattctggatccgaaaatacctgttcacataatccactcggaaaacattgtcaaatcatgtttttgaggaccttcggaggacgaaggcccccaacagtagcccctcgcaatattaatttgtaaataataaattcagattgcgatatggacgaaggccttgagccgaaggtccgaaaaaacaccttccctttgctagaatagcaacatctactgacaagcgggacctttcaattntcaacgccctaggcgtataaataagatcacatcgcgaactggattggtacgcacacttgccctctgcttcggcccacttaaaattttagctcttgtgcactaagaattgctgatcttntagctntgaagcttcggcttttaanaacagtcttttagcgcttccgaagatgtctgaagctg

SEQ ID NO: 63986 - DNA, 487 bp, Zea mays
  unsure (1)..(487): unsure at all n locations
ntgccaaataggtcgcatgaatatacccttgatatcttctcgtgctttcagatcatttttcacatagaaccattctgtcatccagccgctgggccatcttttccgaaaagttggcacggggcagcttgacccagaccgagaaacaaaactgtagcagccaaagttattgtgatactgttccttaccccaaggtattgtctcgtatgataattcgtgcatattgcagaaactttttgcatcaggcttcagaccttggcttcgcacggcccatacgaagatattcagccttataattgcctcgggggtaagttggtgaagatagacttcaaaaatcttcagcacctccacgacgaagctgctcaagggcaatcgcagcccagccttcataaagcttcggaacactacgacttcattctcttcggngtgtggacaagttntctccccttcatcggccctcacaacagaacaaatccctgaaatacncttc

SEQ ID NO: 63987 - DNA, 437 bp, Zea mays
  unsure (1)..(437): unsure at all n locations
tcttcacctaaaagatagatcaggaatgctcattgcanaagcatggaacaaattgcttcaattggtagttgatcaatactagttcctttcaagcggcattctttcaattggcaacaatatattctattgaaaggaatgccaatatgaacgttaaattcctttcggcttaacattgtaaactagtgcatattgtgaattcactgctccatgtgcattaacttagaacgacaataatttatgccttcatgcctcataaacgatgatttatttgccattcatatataaatatcatcattcattatatacttccttgtactactaatacctcttttcaaagtgctgtttgactagctntaacaggaaaaaagataacaagctaaacaacgaagtctccacgaatgaagacaataacaatacttagatgacaccatgtcata

SEQ ID NO: 63988 - DNA, 502 bp, Zea mays
  unsure (1)..(502): unsure at all n locations
ggaccttgaaactcagctgccctcataagaanggatcagatgatgtcactagtatgtatttaaattaaactatgtgaaggatgccacttgaaggagtcctcagaagattactccccctagatgagtagtctcctttagaaagagcttttcttccgctttagagatgaagaaatactccccttgacagagatcctctacttaggacaaagcatgtgaaaattataggtgcaggacatgatttgaaaagactaacttcccttatgcataggttacagactatgaggtaactacttatgcattgttagcagcgtggacgcatatgatatgaaatataggctaatcaaatattggagaagacatgtaaatgatactgaatgtagtctcataagataccaattgaagatcaatggcgagctttagagacatgagagttcttggagaatttgcagtggaagattgttgtctttctccggggacttcattntccttacaatgagactat

SEQ ID NO: 63989 - DNA, 434 bp, Zea mays
tctaaagggagaacacgtgataggtctaactaatgttactttcaaaaaagatagaccttgtgcagcttgtcaagcaggtaaacaagtaggaggagcgcatcatagcaagaatgtgatgaccacatcaagacctctggagctgctacatatggacctcttcggacccgtcgcctatctaagcatatgaggaagtaagtatggactagttattgttgatgacttttctcacttcacttgggtattctttttgcaggataaatctgaaacccaaggaaccctcaagcgcttcctaatgagagctcaaaacgagtttgagctcaacgtgaagaagataaagagcgacaatgggtcccgagtcaagaacctttcagtggaggagtaccttgaggaggaagggatcaagcacgaagtctccgctccctacacaccacaac

SEQ ID NO: 63990 - DNA, 489 bp, Zea mays
gaaactcagctgctcagggagaacacattataggactaacatttgtttctttgagaaagacagaattcgtagcgcatgccaagctgggaagcaagttggtgttcattatccgcacaagaacatcatgatgactagcaggccactcgagctcctttacatggacctattcagcccgatagctgacataagcatcggcgggagtaagtactgtctagttattgtggatgattattctcgcttcacttgggtattcttttagcaggataaatctcatacccaagaaactttgaatggattcttgagactggctcaaaacgagttcggctggaggatcaagaaaataagaagcgacaacgggacggagttcaagaactcacaaatcgaaggctttcttgaggaggaggagggcatcaagcatgagttctcttctccctacacgccacaacaaaatggtgtactggagaggaagaatacaactctatcggacat

SEQ ID NO: 63991 - DNA, 493 bp, Zea mays
  unsure (1)..(493): unsure at all n locations
acctataaaactcagcttctaagggagaacacgtgataggtctaaccaatgtccatttcgaaaaagatagaccttgtgcagcttgtcaagcaggtaaacaagtgggaggagcacatcacagcaagaatgtgatgaccacgtcaagacctctggagctgctacatctggacctcttcggacccgtcgcctatctaagcataggaggaagtaagtatggtttagttattgttgatgacttttcccgcttcacttgggtgttctttctgcaggataagtctgaaacccaagggaccctcaagcgcttcctcaggagagctcataatgagtttgagctcaaggtgaagaagataaggagcgacaacgggtccgagttcaagaactttcaagtggaggagttccttgaggaggaagggatcaagcacgagttctncgcttcctacacaccacagcanaatggtgtggtagagaggaagaacatgacactaatcgatat

SEQ ID NO: 63992 - DNA, 388 bp, Zea mays
  unsure (1)..(388): unsure at all n locations
ntatcaaatggatgtgaaaagtgacttactcaatggtatcttcaaggaagaggtctatgttgagaaacctcccggctctgaagatagtgagtaccctaaccatgtttataaactctctaaggcgctttatgggctcaagcaagccccaagagcatggtatgaatgccttagagatttccttatcactaatggattcaaagtcggaaaggccgatcctacactctttaccaaaacacttgaaaatgatttgtttgtatgccaaatttatgttgatgatattatatttgggtctactaacgaatctacatgtgaagagtttagtaggaccatgccttataggtgtctatgatgggggatttgaagtatttcttatgatttcaggtgaagc

SEQ ID NO: 63993 - DNA, 443 bp, Zea mays
  unsure (1)..(443): unsure at all n locations
ctatcanatggacgngaagagtgccttcctcaatggttctttcaaggaagaggtctatgttgagcaacctcccggctttgaagatagtgagtaccctaaccatgtgtataaactctctaaggcgctttatgggctcaagcaagccccaagagcatggtatgaatgccttaaggatttccttatcactaatggattcaaagtcagaaaagccgatcctacactctttaccaaaacacttgaaaatgatatgtttgtatgacaaatttatgttgatgatattatttttgggtctactaacgaatctacatgtgaagagtttagtaggatcatgacacagaaattcgagatgtctatgatgggggagttgaagtacttcttatgatttcaagtaagcaactccaagagggcaccttcctaagccaaacaaagtatactcaagatat

SEQ ID NO: 63994 - DNA, 455 bp, Zea mays
  unsure (1)..(455): unsure at all n locations
ttgagtgtggggcataaataataacaaaatcctttatctttaaggaaaagtatggaccaggaatattgtacctcaagggctttagcaaatgaatttacaaagaactgagacttcccagcaattgttcgtgcatgctgcctgagatacttgcttatttccatctacacaaaacataaaaaaatcagcataaaattctatgaactactgaaccatctatgttgacaagttgaccaccagacatacatcaatagcaccaccacccggcacaactgtcgagttcttaagtgctctcctcacaatcatgatggcatcatggagacttcgttcagcttcctcaatgaactagcacagaatcaaagaaatataagaacatctgtaacatcttagaatagataatggctaacatanagttatcaatagaagacctggtctgcaccaccacagagaacaatagt

SEQ ID NO: 63995 - DNA, 475 bp, Zea mays
  unsure (1)..(475): unsure at all n locations
tgtgntacaagaaggaaagtgggagcgctgntgtatttctgatcttgtatgtggatgacatattattgattgggaatgacattcctatgctggagtccgtcaaggcttcactgaaaaagaggttttctatgaaggacttaggggaagcagcatatattttgggcataaggatctatagagataggtcgaagaggcttataggattaagtcaagatacgtacattgacaaggttttgaaacggttcaacatggaacagtccaagaaagggttcatacctatgtcacatggtaaacaccttagccagatgcaatgtcctgcgacggctaatgagcgggagcgcatgagtaaggtaccatacgcctcagcaattggatcaatcatgtatgccatgataagtacatgcccagatgtttcatacgctataagtgctacgagtaggtaccangctgatccaggtgaggatcactggacagc

SEQ ID NO: 63996 - DNA, 449 bp, Zea mays
  unsure (1)..(449): unsure at all n locations
ntaccaactataacacgagccagcaatacctttgcctgtactatactggactagggctctagctcgaaccagtataatctctcatctcagactcctaccttcgagcctagtgctgggaatatggttcgggcttttcgggccagcacgagcacaacccgaaaataagagcccaaaacacgaaataatatgggacagactagcatggcccgaaagcaggcctgagccgggcctctggcacggcccacataaataggtcgatcttgggtcggtacggcccaattaagcccaatctattaatttctttaatttagtaagataccaactctatattggtgttatatttagagtttatgtggtcaaatgatgctagaattgtttaatatctttaatttaataagttatgaactctctatagctataatattttgattcttatgtggtcaaatata

SEQ ID NO: 63997 - DNA, 353 bp, Zea mays
  unsure (1)..(353): unsure at all n locations
tctgctcatctcccggcagacagaaatctccttgctgtctgggagacaatacaagaaatcttcttctccgctgccgttgaataccaaagccccctctggatatttcagtttctgggcatagtattgagcttctcgcttttcttctttagagagaatttttcccaaagcatgacggataatatattcagtattctctttcanagcttctggagtaggagcggcagattattcaggcaaaatttgttctatagcttcttccttcgctatcttttctccaatttccgaggatttctctttggtgggctctgaaggcctaggttcagcatcgaccccgctcattgtagctttggctt

SEQ ID NO: 63998 - DNA, 427 bp, Zea mays
  unsure (1)..(427): unsure at all n locations
agttataatggccaagctttctcatcctttcttgttgcttattaaatatacttcaatttttataattggctcaagtcacaacaattttaaaaatttcatgcccttttccttatttttttgaatattgcttatggggctcagttagggtttttattagggttacaacattcttacctttttgaaggacccatttgctttgatcatgatacttttaagtatatgcttggtgaattctttattcttaagttaatttgatgctcatgcttactttggttcacataaaatgatggttcttggtttggcattttgagagacaccctatgtgacactggtgtgtcacacccttccccccttaaaggaatctcgtnccgagattctggccagagtcctcccatggtgaagcgaagggtgagacttatatgaaatg

SEQ ID NO: 63999 - DNA, 461 bp, Zea mays
tctggtagagtctatgaagccattgtaccggagatcaataacattccggtagtatgtgagtttccagatgtatttccagaagatttgcctggactgccccctgaaagagatgtagaattcgtaattgagctaaaactcggtacggctcccatctcccgaaggtcgtaccttatgccccctaatgagttggcggaactgaagattcaattacaagatctactgaataagggattcatccggccaagctcgtccccatggggttgtcccgccatttttgttaagaagaaggatcaaaccttgcgaatgtgcgtggattatcgacccctaaatgaggtcaccatcaagaataaataccctcttccaagaatcgatatcttatttgatcagctgactgtggcgagggtattttccaaaattgatctcacgtcgggctatcatcaaatacgtattcggcccgagga

SEQ ID NO: 64000 - DNA, 417 bp, Zea mays
tgaggaaggagaaaccacagcacgggtcaaactccacaagatagaagttcctatagcaatcaacatgaaacaagaaaaaggttacgattcaactagtcatgttgtttgcactaacaatctctctgtgtcatccaaaagttaaaagagaagaggaagacagagatgcttcaagcgcacagcattaggccacctcatcgcatcttgtccgtacaaggacacggactaagggacaaggagatgttttggatgcaacaataaggaccacatgatcacttcatgtcccgtcatgaggaatcaaagacgtgcatcctccaagatgaacctctccaaagaaagtaataatacacaagcgtcatgtcaggttgagcgacacttctgctacaagtgtggtgagcacggtcatctatcctaggtatg

SEQ ID NO: 64001 - DNA, 463 bp, Zea mays
  unsure (1)..(463): unsure at all n locations
tgttattactattagaagccaacaaacataacccttattacagaacccacccctagttaagagttgttgtacaaagtggctcatttacccaactgttgttattattgtctaaagcatagcctttttatttttgaacctcaaattcctagaacaggctatattgaccaatggcaagccactgtaatttttacagaatttttggaaaaagataattcactgttgtagttcaaacctacactagaattcataaatagaaaataaagaatgggaaaatgaataatggaaattagtgccatcctaaaaccctttgtaaatgtccactgaaatatataaagggaataccaatccactatgcttattcttaacaaaacctaaacctagagtgataagcatataccactaaaagccacgtatgaccaagacaccntaagttgcttccttaacataatgttgttaatcttgc

SEQ ID NO: 64002 - DNA, 448 bp, Zea mays
  unsure (1)..(448): unsure at all n locations
ttagtttanactgcacgtacacacaatgtaatattgtattggtgccaaagatcttatgtttgaatcctagttaacataattacataaaataattgtttgagtctatcaacgttgacgatgaatcagatccacacatctggtgctagtaagagcttgtttaggagcaagtgaaatggagaggattgaggggactagaatacttcactgttcaaaaatggatagtgaaaattctaataccttcattacctttgctaccaaaagcctaggtttccgccagcgaatctcatactcccatcccacgcgtgcggtgtggtgttcttgggacgctgtatactgacggacggacggatgtatgcaaggtaaataattaattatctaggtatatttgtttcataactttggcttgattaatagtctgacgataacatttggaacaaatcctctgtct

SEQ ID NO: 64003 - DNA, 440 bp, Zea mays
tgagttgaatgtggatgacttgcaactgggtttcttcttctctgacctttgtacttccactgtagataccactgctttggagtagtgagctgtgacaactaatgtgtagcaatttgcaaaaaatactggcaatatcttactctggcttctttcattattttacaacacaagaagacaagatccactacaacaatttttaaagattggtactagtgttccctaagaattatgtgaagactaaaaaggggttttgctgaagttaatatgagtaacactaattacctcttctaatcctcctttgtctttttctatttatgcctttaaggcggatttagccactgagctgggtcgataactggctcttcgaatgttatactctttgcaacttcagaaggaagccctacgtcacctagtcagatgatccatccttcatctaaaca

SEQ ID NO: 64004 - DNA, 421 bp, Zea mays
  unsure (1)..(421): unsure at all n locations
tctgctntntgggtcgcaccgaagggtcaatccccaggctgtgttcgattatggctcggctgactccgaccagatcgagggcagaccaggcgaagacatctttattcttggccaggcagcagagaagtttctcttcttcaagtgacgtgaggtcttcgctgatagttacagtctgcttgggcgtggcctgatcgagggggacagtcttggtcccgtcttggcactgcaactgtgccttgtcgtgctgcttgtcggttgggctagccggcgcagggacttcgcgctgggtcgtgagacagtgtacatttctctgaccgggcacgaagtcccgctctatgttgcgcgccgtctgctggttgccgtagattgtgatggcgcccaacgggcctggtatcttcatacataggtacaacccgtggat

SEQ ID NO: 64005 - DNA, 413 bp, Zea mays
  unsure (1)..(413): unsure at all n locations
tgtgaaggttcttcatccacacatgtgctaagtggcgatgccacagccagcccatgctagtcttagcaattaagcatgcatctagaccggcctcctcttttgcaaaatcaactaaataaagtttgtcgtctagtacacccttaaaagctaatgaaccatcacttcttctaaagacagacacatctacattagtgaatagacaattatatcccatattgcaaagttgacttacgaatagcaaattatatccaagtgactcaactaagaatacattagaaatagagtgctcatttgagattgcaatcttgcctaagcctttaaccttgccttgattcccgtcaccgaaaatgattgaatcttgtggatccttgttcttgacgtaggaagagaacatcctctnttcccccgtcatg

SEQ ID NO: 64006 - DNA, 411 bp, Zea mays
tccacgtgttcgacgcgagctggcatccgggggcgcgctcatagcacgcccgtgcgcgaacccccgcgcgctcgcggccgcccgtgaccacgcccgcgccacagctataaagcccgccccagtgcttggctgccttccccgttgcctcctccgtacctcgcctgacttgcccgagccagccattagctccggcgacctccccgcgacccgccagtgccgcccgagagcaaccaccgtggccagcccctctcccgtcctcctccgttcgatccaagccctcagataacttcctggtgaggccgtgagacttgctcaagcttgacccggggaccctcgtcaccggaatagcccaagcgtgcccaccggagttcaagaacccaccggcgcacgtggaccgggtaagcccctgca

SEQ ID NO: 64007 - DNA, 451 bp, Zea mays
  unsure (1)..(451): unsure at all n locations
actcagcttctaagggagagcacgtgataggtntgactaacgtacaattcgaaaaagatagaccttgtgcagcttgtcaagcaagtaaacaggtgggaggagcgcatcacagcaagaatgtgatgaccacttcaagacccctggagctgctgcatatggacctctttggacccatcgcctatctgagcatagggggaagtaagtatggtctagttattgtcgatgacttttcccgcttcacttgggtgttctttttgcaggataagtttgaaacccaagggaccctcaagcgcttcctcaggagagctcaaaatgagtttgagctcaaggtgaagaagataaggagcgacaacgggtccgagttcaagaaccttcaagtggaggagttccttgaggaggaagggatcaagcacgagttctccgctccctacacaccacaacaaaatggtgt

SEQ ID NO: 64008 - DNA, 470 bp, Zea mays
tctaaagggagaacacgtaataggtctaaccaatgttcatttttaaaaagatagaccttgtgcagctcgtcaagcacggaaacaagtgggaggctctcatcacaccaaaaatgtgatgacaacatcaagacccctggagctgctacatatggacctcttcggacccgtcgcctatctgagcataggaggaagtatggtctagttatcgatgatgacttttcccgcttcacttgggtgttctttttgcacgataagtctgaaacccaagggaccctcaagcgcttcctaatgagagctcaaaatgagtttgagctcaaggtgaagaagataacgagcgacaactggtccgaattcaagaatcttcaagtggaggattatcttgacgaggaggggatcaagcacgagttctccgctcctacacacctcagcacaatggtgtggtagagaggaagaacaggacacttatctct

SEQ ID NO: 64009 - DNA, 448 bp, Zea mays
tgaggccgaacagggctagagaagagagaaaggagaatgctgtatctgcgtacggacttgtactccagggaggcgaccgagcagaggagggatccaggggagccgccatgggaggggcaggaaagaagcaccacggtgcgcagggctccacggcgcggtggccatggccgagctgggagggcgtgcggtcgagccagtggtggggaagaggaagatggctgggagagcagggcgcgaccgatgagcagagcatgaggaagctccgcgagctgggatccgacgtgcgcaggagctccagcgagctggaaccgggcgtaggagcatggtagtctgagctggaacgcggcacggtgcaggagcagtgcttgggcgcgccatcagagaatagggagatgagctagtcggctgggcaccacagacccgcgcgaggagctcggcgcgcgtccat

SEQ ID NO: 64010 - DNA, 458 bp, Zea mays
tgccttcgcctcagtataccactcgcagtccaacggagttgtggaacgcgcaaatggcaaaattttcacagctgtcaagaagatgctcctcgacgataaaaagggcaagtgggccgatttgttacctgaagcggtctatgcactaaacacgactgagtgcagggcgactgggttcacccctttctgccttctatatggatcggaggccatgaccccgcaagaaataaaacatgggtccccacggacagtctcgtcagctgtccccgacgtggacgagcccacttcgaaggatctcatcgatggagaccgcgtcttcgccctacaggctctaaataaataccaagcccaaacaaaagcatggcgtgaccacgcagtcatcccgagggaattcagcgaaggagacctcgtactcgtcctgacagctcggacagagttcccgggcaagctggagcccaagt

SEQ ID NO: 64011 - DNA, 436 bp, Zea mays
  unsure (1)..(436): unsure at all n locations
ntatcaaatggacatgaagagtgccttcctcaatggaccgatcaatgaagaggtctacgttgagcaacctcccggctttgaagatagtgagtaccctaaccatgtttataaactctctaaggcactttatgggctcaagcaagccccaagagcatggtatgaatgccttatagattttcttatcactaatggattcaaagtcggaaaagccgatcctacactcttcactaaaactcttgaaaatgacttgtttgtatgccaaaattatgttgatgatattatatttgggtctactaacgagtctacatgtgaagaatttagttggatcatgacacacaaattcacgatgtcaatgatgggggagttgaagtacattttgggagttcaagtgaagcaactgcaataaggcacctttctaagccaaatgaagtatact

SEQ ID NO: 64012 - DNA, 448 bp, Zea mays
tatgccacagataagtattgaagtgcagatataaatactagttatgcagagagtcaggatagaacagagcacacagacgcaaggatttatcctgagggtcggccaagcctgaaatgcttgcctaatactcgttggagttagccacacctgcgcttggagtctatttcaactccttcctccgtttgctcagatctgtcagtataacagatagagcctttcactattgagtggggttacaacagaaccacggctgcttacaaacttcttggcagcaccccggcagagtaacgatacgctcaagaccttgctctagctcttagcagcactactcctctctctaaaggcttatagctgtgccttctacacaaactatagagttacacacaagagggagagcgagaattgattcgagtgaagtctatacttgttggctgcgcttgtactatgc

SEQ ID NO: 64013 - DNA, 457 bp, Zea mays
tggatgaggtgtcatcatcatcatcatccgagctatcatccgagtcccattcaactaagtagggcttgccatctttcttcttgttatagtatttctttttcttcttgtcactttcatctttgcccttcttcttcttgcttgggcaattcatggcaatgtgaccgggttccccacactcaaaacactttctatcattgaaagcatttcttctagatgtttgacctcttctaggttgacctctcttcatcttcatgaatatattgaatttccttacaaatagagccatgtcaccatcactctcactttcattttcttcatcattactatcttccttttcaattgcctttgaggccttagctttgagagcaattgattcatttttcaccttctttgccaaacttaaagcatcggcttgcgacttcttaaatatatcttgagtgagaatttctcccaatac

SEQ ID NO: 64014 - DNA, 434 bp, Zea mays
tgaagcaatggtaagtagcataggctaataatatactgattgactcaagcctagctacgggtgcataggtttcaccgaaatccaaaccttcgacttgtgaataccccttggccatgattcgagctttgttccttgtcaccacaccatgctcgtcttgcttgttgcggaagacccacttggttcctacaacattttggttagggcgtggaaccaaatgtcatacctcgttcctagtgaaattattgagctcctcttgcatcgccatcacccaatccgaatcttgaagtgcttcctctatcctgtgtggctcaatagaggaaacaaaagagtaatgctcacaaaaatgtgcaacacgagatctattggttacccccttatgaatgtcaccaaggattgtgtcgacggggtgatctcgttggattgcttggtggact

SEQ ID NO: 64015 - DNA, 417 bp, Zea mays
tctcctgtacaagtgccacactcactgcagagtgcgaatctgctcatacaataacaatgaagcccctggcacaggtggagttaatgttgttagatcaatcaagaattgcttcagctcttcgaaggctttctgttgagctgggccccattgaaaaacttcggctgactatagtacttcaaagaatggtaagtttttttctgctgatctggatataaatcgattcaaagatgccagtcttcctgttagccgttgggcccccttctttgtgcttggcggctccatccgaaggatagcttcgatcttgcttgggttagctatgatcccctttgttgaaactagacagccaaggaactttgccttcttcacttccaagacacatttttctagattaatttcagtcagcttgcctaaaatagc

SEQ ID NO: 64016 - DNA, 458 bp, Zea mays
  unsure (1)..(458): unsure at all n locations
ntaacccctgcgagacctttccccatttctttctaaccatggtgaatgcaatatcgcatgtcatattctatgcatgtttaatctacttgttctcttgtatggtgtactgttcgtttcctaatttcaatggatggatatatgtatgtttgcactcgcatagagaacgatccggttgaagagcccgaagaactcgcaggagaagcccctgagcagcagtcggttggtggaggcaagtgtcccttgacctatctctgtcctattcattctttaattcacctcccgcattacacatttatgcctaaggatttactagctttgttatccataaccttgcttacctatttgggttggattattattgtttagctttatgctattgctcaactctaatcaatgaacatgatgagattatctatgatacgctcgtttcccccttcttattatgatgtcatacttgg

SEQ ID NO: 64017 - DNA, 418 bp, Zea mays
tataaagtcctctataacttttgtattaccatcacaacatgattcgacctttagaaaggtcaaacagcgctaaacataaattctgtccagatttggacagaattcgactaactacttcaaaagtccagaactggagtttccgaaatccaaatccggtgatcctagactttttagaaagttaatagaattgtctacaattcatttataaacatctcaggttaattcaatacatatcaaagtcagttactacaaacagacttcgctgtccagatttggacagattcagactctatagttcaaacagctgtaacttgatctctagaccaccaaaaagggtgctccaaaatttgttggaaagcttaagaaaagtactacaattcttctataattactaagggctgattctcagtttagctta

SEQ ID NO: 64018 - DNA, 442 bp, Zea mays
tggatattattcatcagaacactgcggatatcgttgtgataaataaaaattcttcttcacgaagcatgaaaagaagggaaggtgttatttcgtcaaagactcaaaaacggtacgtatgtaaaatttcatgcatcgtaaagaattgaacaataaaaacaggtatattatattcaggattacaagatgttacacatgttacatttcagaagtttttacaatagtacttaatcttctctcagaacaacttccgcagcctcgttcaggagctgattaactacttcatccatgatagctttagccatctttttaatttcgttgtctcctttcgggtgagggcccggagacgctatagtatgatctgaaggaggacaggatacgactatattgctattacaaattgcgaatgaagtttaataccaagaattacaacacaataaaaacc

SEQ ID NO: 64019 - DNA, 444 bp, Zea mays
tcccgggtacccagagctgctaatacagcacacgagaaacgcatagccataccagagtggtccggccacggaaaggctatccacggcggcgcggagattcaatttgggggaaaacccaaattgaaacgctatggcaaatgattggagatgagactgggtgctctggattggggataacctaacggagctcacagaggcatcaatttatagagatcgatcgcgagcacgacgaatttgagcggcggatggttatcggtaagaaacaagatgagtcaccggaggccgctcaacgtggcatttattgggttaagtctccggtgacgatgaggctggctttagtgatcttcagtggggtggtagtatggcttatgagcgtggcggacgccgatgaacggcgatcatcgcggcgacggtcgtgcggccacatcgtggcgcaagtgggta

SEQ ID NO: 64020 - DNA, 449 bp, Zea mays
cttaattcttaagagttacaaactaatgaattggaaaagttatcaataaactttgtacattaaaatgtgagtagaacaaactttcagcaatatgttgccttctgtaattgctaaggtctcgttcaagctttgggaaaccaatgctctatgataaagtattaacaatttcttttaactcggaaatatcttcttgagagagctgttggccacccatgtgtcgtaggtccaaatccttgctcttcgacaaagtttcttctatctccttcattttcaaagctgtaacttcagcagcaataacttcatccatttccctctctggaaccacactagctataaccctatcaatttccaacaacatggtcctgagagggcctccgctgctttcaccttcaacttctgcttcaccaacttcagcaccagcgggagaaaaaatcttttctgtcgtggct

SEQ ID NO: 64021 - DNA, 459 bp, Zea mays
tctaaagggagagcacattttgtgactaacaaatgttcattatgagaaagacagggtttgtagcgcatgtcaagcaggaaagcaagttggtgcccgccatccacacaagaacatcatgacgaccgataggccgcttgagctactccacatggatctatttggcccgatcgcttacataagcatcggcgggagtaagtattgtcttgtaattgtggatgattattctcgcttcacttgggtgttctttatgcaggataaatctcatacccaagagactttaaagggattcttgagacgggctcaaaatgagttcggattaaggatcacaaagattataagcaataatgggacggagttcaagaactctcaaatagaaggctctcttgaggatgagggcatcaagcatgagttctcttctccctacacaccacaacataatggtgtagtggagaggaagat

SEQ ID NO: 64022 - DNA, 455 bp, Zea mays
  unsure (1)..(455): unsure at all n locations
ntactacgatcggcaccaccgtcaagtctcctaccagccagtggattgggccctccttcgtcttcggcagcgggcagcttcttcaatgcccaggaccaccacgggcaagctcaagcctcgctttgtggggccctaccgcgtcgtcgagctcatcaacgacgtcgccgttcgcctggccttgccgccaggggcgcgcctccatgatgtgttccacgtgggtgtcctcaagaagtttgtcggcgttccaccagcgtccccgcctgccttaccaatcatccacaacggcgccgtggtccctgagccgatgcaggttactcaggcatgcttggcgcgaggcgtgcgtcaagttctcgtccactggaggggcgaaccggccgagtctgctttctgggaagacctcgactaattccgcagcangtacccagacttttagctcgaggacgagctgggtctcg

SEQ ID NO: 64023 - DNA, 190 bp, Zea mays
tgtgggtgcagtgcatgcccagtgacagggacactccagcgaagcgtatctgtgcgttgggttagggggagaaaaatcaacactccactcactcgtctatcaaaatctgcctcgaatggtttaacatgtaacgatcccattgatactcataaatcgatcctcctcattaacacattaccacttatcttct

SEQ ID NO: 64024 - DNA, 437 bp, Zea mays
  unsure (1)..(437): unsure at all n locations
tctaagggagagcacatattacgattaacaaatgtttattttgagaaagataggatttgtagcgcatgccaggcatggaagcaagttggtgttcatcatccacacaagaacatcatgacgaccgacaggccactagagctcctacacatggatatattcggcccgattgcttacataagcatcggcgggagtaagtactgtctagttattgtggatgattattctcgcttcacttgggtattctttttgcagganaaatctcatacccaagaaactttaaagggattctttatacgggctcaaaacgagttcggcttacgagtcaagaaaattagaagcgacaatgggacggagttcatgaactctcacatagaaggcttccttgatgaggaacgcatcaagcatgagttctcttctccctacaccccacaacaaaa

SEQ ID NO: 64025 - DNA, 459 bp, Zea mays
  unsure (1)..(459): unsure at all n locations
ntcaagttgatatggtttgatcttaagaccaagtctcttggtctcaaaacaattatcataagttgttgctatttgtattgagctgtattgttgtgggcttgatattcacctttgggactctagacctaagttggagatgtctaagaagataaacacatcaagtaagcctctaaacgtcctataccatgaccaccaacttgcatggccagcaaggacatctaagccaagttagagccccttttggaatttaagactagactgcagtaaaatggatgctctaaactcatatatactttgtttttgatgatccacataaaggcttgtttgttttaccgttgatccatgtggattggatggtattgagtcggtttaaatctatagtaagtcaaaattcatcccaatccacatagaattaanataactgaacaacgcctaatgatggnaagataattctatgat

SEQ ID NO: 64026 - DNA, 449 bp, Zea mays
  unsure (1)..(449): unsure at all n locations
tgcatgctgcaacgcgaatagaaagatgcattgttgcttcgtttctatgcatattcagcttggtggatgcaagcgaagatgaatcttcgagttcatttcgtctntttgttgagcctgcacgcgttgactaatataagaaagttaaatcccaatctgttacgcttacacttcgcactgatttgagataaactgtgaagtatatatattagcatttgatcctgacgaaccatggttgatatgtccatcagccatagattggtgctctcatcaacaatcacattgctatgccttatttgagctatgtacatgaactagcatatgtaagctctgcatttggcatgcataattgtagcttgtaaatcttcttactgagatcgataatatatgtggtggtctattttgttgatattttgattacgatggtctgttgcatacacggatacctgagg

SEQ ID NO: 64027 - DNA, 450 bp, Zea mays
  unsure (1)..(450): unsure at all n locations
taattnggatacgatcatcatgtcttatgagagagctattagtgnggccatattacttgactgtgtgtgcctgagggttgccacaagaattaaaaattattataaatatatatacggagaaacatattgcaaagtttatatcaagcacatctgtaaggagaacgcctcccatttagttgctacatgtggaattgaatcataaactgtattataaaataaataaagaattatatcagtgacaacaaaaatatcgcatgccttgcatatctagaattgctgaatggtagtggttgaattgcatctaaaacatattggatgaataataattattcgctaataacaaacaccgaaacatgtgatgacatgctcgtacccttctcagttcatttgcccatatatgaattaagagaggatattcgatggcttgttgatatctttccaatctcttca

SEQ ID NO: 64028 - DNA, 311 bp, Zea mays
  unsure (1)..(311): unsure at all n locations
tatgaagattcttcatcccaacgtgggctagttggtgatgccagagccaacccatgttagtcttagcaattaagcaagtgtcgagttcagctctattaaaatcaactaagtatagctaaccctctaacactcccttaaatgctactgaatcatcacttcttctaaagacagtaacacttatatccgtaaaaagacaattgtagcccattttacataattgagaaactgaaagcaaattatagtctaaagaatctacaagaaaaacattggaaatagaatggtcaggagatataacaattntactaagtcct

SEQ ID NO: 64029 - DNA, 465 bp, Zea mays
  unsure (1)..(465): unsure at all n locations
tacggaactatgaaactcagctntttactcgctttgttggcggttatctcaactatgtttgacaagccctagatgcaatacaagaaatttaaacatgcaatgcaagcttgacaacaccatttgacattttacataaaatttctgagatcaagaatatttagttcattcctcaacatgcaaaagcgggtcttatcaagaggcttagtgaaaatatccgctaattgatcttccgacctcactccttctaaaatgatatctcctttagcaacatgatctctaaggaagtgatgacggatatcaatgtgcttggtgcgagagtgttgaacaggattattagcaattttaacagcactctcattatcacacaacaatggtactttttctagaactacgccatagtctagaagagtttgtgtcatatataaaatttgtgtacaacaagcacctacggcaatgtattccgct

SEQ ID NO: 64030 - DNA, 449 bp, Zea mays
ttaaatattatttagaagccttgggtaaagtatgttattatttggaccatatttggtgcatagaacccaaaaccatagcctcctgccctatgaacttcactatagactccaaaaaccctagtttcctggagatccgtgaaggaaaattatattcaagacattagataatatacttttattatctttgcattttcatgagcattacatgagcattcatgattatatatggctatatatagaaaacgaagaagagatagaagttgaagaagcaaggactacaccaccaccaccacctgaagaaccccaggttgggaactgcttttactttgacatccgtggagcagagcctgactcacctataacacaaggcaagccccggtgcatttgccacctactttcttgttggcgtttcagacccggggggtcccttgaccgaccagtaaatttgt

SEQ ID NO: 64031 - DNA, 472 bp, Zea mays
  unsure (1)..(472): unsure at all n locations
actcagcttctaagggagaacacattntaggattaacaaatgttcattntgagaaagacaggatttgtagcgcatgccaggcgggaaagcaagttggagtccatcatccacacaagaacatcatgacgaccgacaggccgcttgagctactccacatggatctattcggcccgattgcttacataagcatcggcgggaataagtattgtcttgtaatagtggatgattattctcgcttcacttgggtattctttttgtaggaaaaatctcaaacccaagagaccttaaagggattcttgagacgggctcaaaatgagttcggcttgaggatcaagaaaattagaagcgacaacgggacggagttcaagaactctcatattgaaggcttccttgaggaggagggcatcaagcatgagttctcttcttcctacactccacaacaaaatggtgtagtggagaggaagaaatcgac

SEQ ID NO: 64032 - DNA, 466 bp, Zea mays
tcatgaagaggaaccttcggtcatctcatacgaacagcttctttctaaaactgcttcttcctacaagaccttcggcgacgaagcatagtcccaacagtacccttatgaacgactttggagcttcttcgtcttttactttcggcggaatcagcattgacttttcgctgtaagctctgcattcccttagcaacgactttggagcttcttcgccttttactttcggcactcgatggtgcgttcgcagcttttacatttacatcctcggggattttgctcttatagaactaaaaaaaggaaattacatatgatggccccattaaaaacctttctcccccttcagaaaggaaaagggtgccatgaaagaaaaaatataaaaaattacatcaagttacacataatatcaccgaagctcatccgcattccaagatctacgaatgatcgtgccgccatatccttcaatctatat

SEQ ID NO: 64033 - DNA, 478 bp, Zea mays
  unsure (1)..(478): unsure at all n locations
cggacctatgaaactcaagcttctaaggcggaacacatngtgggactaaccaatgttcattttgagataagacaggattgtagcgcatgccaagcggtgaagcaagttggcacccatcatccacacaagaacataatgacaagtgacaggccactggagctcctccacatggatttattcggcccgatcgcttacataagcgtcggcgggagtaagtactgtctagttattgtggatgattattctcgcttcacttgggtattctttttgcaagacaaatctcaaacccaagagaccttaaagggattcttgagacgggctcaaaatgagttcgacttaaggatcaagataattagaagcgacaacgggacggagttcaagaactctcnagatgaacgcttccttgaggaggagggcatcaagcatgagttctcctcttcctacactccacaacaaaatggtgtagtggagaggaaga

SEQ ID NO: 64034 - DNA, 455 bp, Zea mays
  unsure (1)..(455): unsure at all n locations
ggcttctgccatggttcaacggccgattagagcgccatatcttgcgtatcttggcaaagtcactgtgtacggtcgcttctctgctccaaatcctatcttttcgctgtgagttccaagtcgagatatggtcggggtagggagatagagaggggagaagtttgctgtgtcagctaagcccgaaccgggacaaaaggggtgtcaagtcgtgtctagcaccctagggtaggtgtcatctctntccagggtgttctagggttaatttggcgcccttttgtcaattgggtcgaaaggttttgaaaaggggattaaggtgaacatgtggagtctttgtgcaagggttagtttttgtacttatgcaaaaactgaatatccccttgtgctaaatcttatgtggactgtntanggcttttctgaanactttttgggggtacttccttactattaattgtaggtta

SEQ ID NO: 64035 - DNA, 428 bp, Zea mays
tgtgaacaagagttcacagcccagtcgagcgctagatcccgatccgcttgttggtcttgcaggtggtggatttctgtcctcaattcatttatactttcaccatccgcgacccatagatcgttcctgtgtcggagttctgatcgaagcagatcaacttgtgcttctagatcctcgattggatcattactaccacttatactatcttcatgttgtggggcaagttgatgacgggggtacgccaaacggcccgctagacttgcgcgcagtctttctcgtgcgcagcggcatatctccatgaggggaaaatcttattagcataatttttagcatgatgcatgtataattacagaatcaaccttagttgattcacaccttctatacattgcactcttactatctggtctttaaaataaactcttcagagatac

SEQ ID NO: 64036 - DNA, 452 bp, Zea mays
  unsure (1)..(452): unsure at all n locations
tgttggagtttatttcatgaatgtactttgccatgcattttattaagaggatgggacaagaacacaaaacaatccatacctgctgctttgatgctgaatataggaaccaacaactttgtgagcaaaagtcatagctaattacatacaacacatatattgctaccatatccatatgctttaaaggcttcttatgacacactcgtattcttatgaattcatatgtgttggaatggattaaaataaaatttatttaaattttcaatataattgttaacgctcgagggagaccttatcatgaatattgtcaagatgtattcaaatatacaagtatagaaacctaccacggtccctaggtgttgtgaccatcgctctcgaggccncatcgccctaaggtctccttggacccagccaaggaagggcttgatccacaagaaaactcgatactaggatac

SEQ ID NO: 64037 - DNA, 437 bp, Zea mays
  unsure (1)..(437): unsure at all n locations
ngaagccatggtaagtagcataggccaataatatgcgaattgactcaagcctagctacgggtgcataggtttcaccgaaatccaaaccttcgacttgggagtatcccttggccacaagtcgggctttgttccttgtcaccacaccatgctcgtcttgtttgttgcggaagacccacttggttcctacaacattttggttaggacgtggaactaaatgccatacctcgttcctcgtgaaattgttgagctcctcttgcatcgccatcacccaatccgaatcttgtagtgcttcctctaccctgtgtggctcaatagaggaaacaaaagagtaatgctcacagaaatgtgcaacacgagatcgagtggttacccccttatgaatgtcgccgaggatggtgtcgacggngtgatctcgttgtattgcttggtggactctt

SEQ ID NO: 64038 - DNA, 385 bp, Zea mays
ttctcgactaagtcgggaacagggcctcatgaactggtgaaagtacgcgtaaacggcaaggccgaccgagcagagggattcccacgcctctgggatacggatacctcactcgtcccttctgcgagaagcaactctcgctcacacaaacatccctgttaccgacagagtccagatgctcgaaacaagaggaaaaaagacgcagcttcgcaagcgcggtgagggtgtgttttttccggcctcggcggccgcagaaggcacacgctacaagacgatctgatcctgcaggctcgggtcttcacgccgaagggagccatagcaccctcggcatcgacgacgtcttcagcaaagtccgacccagcctcggatggcgacgcggtccaaggac

SEQ ID NO: 64039 - DNA, 464 bp, Zea mays
tactcagctgtgtcttggaacaaaagctagtgaatagcttatgctaaatttaaatggagaaataagaattgatgacctttggaaggagaaagccccaacaatgcactaaagagaatatgaaccatggttggtggcttcaatcacacattcacacccacctagacaataaaacacacttccttgtcttttatactctacagccaaacataaatagaaatcgtatcaacatacggacactttgctatgcattatgtatgtatctctatacttctaaatttcactactatttctacctataatgcaaaatgtctataatagtatataggagcacgttcactagcaaaaacaataataacatcatttcaaactatttaaaacaacagaccacatcattcacggacaataatataattttttatattagcacgctaaaatcatcttctagcatatatcatgataactat

SEQ ID NO: 64040 - DNA, 415 bp, Zea mays
tcgcatctctgaactaactcggctgcgtcgctctttgctgtctgccaatagaaccctgacctgaagaccttcccgactagtgttctggaggctgcatgtattccacattgccctgcatggacttcctccagaagttgcttcccagtggatgggagaatacacttcatgagaacccctgatgcaccccttctgtataatatctccccaatgagtgtgtagtgagccgactgtctggcaatgcgctctgctgagttcttgtcgtctggctcttcttcgttctttatgtacttaatgatcggcctcctccagtcatcagagtctgactcgggttgatctacgatgttgcactcttcttgttggtctattgagatactccgccgtgtatttcctgtacgaaaacatccggtgggacctg

SEQ ID NO: 64041 - DNA, 447 bp, Zea mays
tagcagtttagaagttatgcttctctgaagttcagtatctgaatctgtctaaagtcggtactgatttccaaagttggattgtttggctaagttaaactgagaataagttcttagttattatagaagaattgtagtactttttttaagcattccaaaaagtcttggatcaccccttttggtggcctagagaccaagttacagctgtttgaagtgcgatctctgaatctgtctgaatttggacagcagagcctttgtcatgtcttttgaccttgatatgcattgaattaacctgatatgtttataaatgaattgtagacaattctactagctttctaaaaagtctaggatcacctgaattggatgctcgagactccagttatgggatttttaagtgggtagtcgaattctgtttaaatctggacagaatatatgtttagttctgtttga

SEQ ID NO: 64042 - DNA, 448 bp, Zea mays
  unsure (1)..(448): unsure at all n locations
cttaccgcattgaagcatgatcgctntcccttggtcttgtttcttgcttggctgtccctttcgaccttttagcgctgtcttgaatcttttaatgatgagggcatctcttcatcattaagaccggcagcctcaatttgtgccaccttgctgggtagcgactccttgctcctcgttgcctttagagcaatgggttgaggctcgtggagtggaccgttcaacgcgtcgtcgacgtatcttgcctccttgatcatcatccgcccgctcacgaattttccaagtacttcctcgggcgtcatcatcgtgtacctgtgattctcacgaatattgttcacgagatgaggatcaagaacggtaaaggacctgagcattangcggacgacgtcgtgatccgtccaacgcgtgcttccgtagctccttattatgttgataagggtcttgagccggttgt

SEQ ID NO: 64043 - DNA, 459 bp, Zea mays
  unsure (1)..(459): unsure at all n locations
tcatctcgtaatctagttaagactagtttatagtttcatttctcacttcataaatacatgttaatgtgattaacaccaactaangtgtcttgaattaatacttacttaatataaacacgatatctattactgattctcgtgtgtcgcgcgctgttcacgcgcatcgttgcattgtctgcgtgttgttcgcacgtgatgtgctcgccgtcgccgtgttgttcgcgtgcgtcgtcgttcgcgcgcgttgttgtttgcccacgttactaaaactgtttcactatatcgcacgcgttgattaattaattcttgtttagtcatcaactaattaacaattcaatttatctgaaatatcttccgcaaatgatttatattaattaaaatcgacttatgaatatagttttacgtgttaaacgcataaatcttccgaaaattaataactttcaacattagcttcttgtc

SEQ ID NO: 64044 - DNA, 428 bp, Zea mays
  unsure (1)..(428): unsure at all n locations
ntgtgttcagttctgttattattgcttcggcttccgccaatgaaccttcggttgcctggagctcgaagttctttctctcgatagcatctgattgctcctttattctgctttctaaatgttcaattataacttcgtgcttcttgtcttcaaaatcttgctgcattttcaaggctttgctcaacagcatgctctgcacgaaatcaaccttcgtcagacgtgttttcattattagaagcaataaaagttaatggaaagctagttcaccttgaaattggaatagagtaaactaccaacgatatgttgtcgtcggtagcggctgatgtctgtctccagcttctggaaaccgatactctttgacagagtaccgataactatggctccagtttgatctcgaatacaatctaatttttcatcatcaatgcctccga

SEQ ID NO: 64045 - DNA, 429 bp, Zea mays
  unsure (1)..(429): unsure at all n locations
ngaggatacaagagcgaggnggacgaaggtatcttacgatttgccgcagccgctgactcccatgaccacgatcgccagccctgcaaccaaaattccccccaaagagaagctcggttagcattagcagccgcccaatcccaacgtatcccggctctccttggctgttcatcgcagcaagggactctcagctcaagattcagatcgcgagcttgttggtacgcacgacacgaacagccgctacgcgagcgaccagcaaattaaatcccgaatcggaatctcttgcgagaaggctgctattttgacttggaccacgcgtggaggaggaggatgcagctgccgggcaggcagtggaggcaggtgctgctactgacctggatgcgcgagggaatcggagacggccatggcgggcgctgcgggttctctggtgga

SEQ ID NO: 64046 - DNA, 462 bp, Zea mays
  unsure (1)..(462): unsure at all n locations
tctaaagggagagcacattttatgactaacaaatgttcattttgagaaagacaggatttgtagcgcatgccaagcaggaaagcaagttgggtcccatcatccacacaagaacatcatgacaagtgacaggccattggagctcctacacatggatttattcggcccgatcgcttacataagcatcggcgggagtaagtactgtctagttattgtggatgattattctcgcttcacttgggtgttctttttgcaggaaaaatctcatacccaagagaccttaaagggattcttgagacgggctcaaaatgagttcggcttaaggatcaagaaaattagaagcgacaacgggacggagttcaagaactctcaaatngaaggcttccttgaggaggagggcatcaagcatgagttctcttcgccctacacaccacaacaaaatggtgtagtggagaggaagaatct

SEQ ID NO: 64047 - DNA, 351 bp, Zea mays
tatatcaggaggatagaggcaagagctcgtccatatgtcattatataaggggagttgtacaaacatggagcttgtgctccgctgctcaaatgttcatacacaaccgaaggtatagagttaatgaaagaaatacatgcaggcctgtgtggatctcacatcggatctatgccgttacttggaaaagttttccgtcaagggttttactggccgaaggcagcttctgatgcatcataattggttcaaaagtgcgaaggttgtcagaaatgtgcaagagatcaaaaacaaccttcgttcttaacacagcgtatacaacccacatgggcattgcaaacgtggtgtcttgacttgtta

SEQ ID NO: 64048 - DNA, 477 bp, Zea mays
gaccttaaaactcagcttgggaaggcgggtttagtaccgtgtacaagttgtacttgttagcaacacaactcagtatgcaagggagcgaagcgtaacatcgtctgcgctcttcttccttcgcatcaaggtggatgaattatatagggaaaggtcacagatagaaataaaataccggtgaagaacttgtcccggtgtagtatacaaagactggaccagctgcacaatgagatgcatgtatctgtcaatcttcaacacgagaagcttgtcagactattggggttctgcatgcaccgggacgagatgatgctcgactatgcacatatgaagaacggaagccttgacaggtttctatttggtagttctcttccacactttcaatacatagaattcttatttacgcgaataagaggaaccacatgcatatggctactgataatacgtggataagagactacatcgcgggcgatgactataata

SEQ ID NO: 64049 - DNA, 450 bp, Zea mays
  unsure (1)..(450): unsure at all n locations
ngacttatggacatngatgcctggagtgataaaggcagtatctcctgtgtccaaacttcatgatctagaatcttttgacatgttaggttttgaagaagtgtcaacgacaaactgcttagtgaaataacacatttttcatttttcttttgttaatcagttgaggtactttatagtactccattccagtattttttattatgtacacttgaatatgaaatagatgtttccctcttaaatgaaaactgggaattgggatgttcgctctcaatggctattacttgtatctttatatataaatctttaaatagtggagcgagccaacccccatttgttcactcggtattatattagttactaatattcttttataactccatacctgatcgtatttcagcttccattacaggaaaaggcggttatgcttgaagcccacaacagatcactctaaca

SEQ ID NO: 64050 - DNA, 443 bp, Zea mays
  unsure (1)..(443): unsure at all n locations
tccttgatctcgtanggtccaatgtaacgaggagctatcttgcccttgatcccaaatcgctggacacccttggtgggtgataccttaagataaacatgatctcccacctcaaactgtagaggcttccgcctcttatcatgatagctcttttgcctggcctgagcagcttctaggttcttcttgatgatcttgacctttgcctcttcttcaagtaccaaatctggcccaaaaatttccctttctcctgcttgagaccaatttagtggggacctacaccttctcccatataatgcctcaaaaggtgccatcttcagactggactgatagctgttattgtaagaaaactctgccaaagaaagacacttgtcccaatcctttccgtagtgtagtgcacatgcgcgcaacatgtgtttcaaaatatgattacccttttgtctgacatc

SEQ ID NO: 64051 - DNA, 338 bp, Zea mays
tcgtcagcaatttccttttctttcccagaagctgcggccatggcctcttcggcggcagtggtagcttcttctgtggtcgtgtctagcagaattttatcgatatgctcaattgtgctttccaagttcaaatcttcggttgaagcagcttcggtagccgccatctccgaaggcgcaacttcaatatttgttagtctttcagcctctggtatcttctgagccgaagctctcggtggtgtcttgtcaatgacttctgtcactgcgatgattctttgtcttttagtttcagttgatttcttcgtttggtcgggctccttttccttctgaaaaaacttcgtcag

SEQ ID NO: 64052 - DNA, 457 bp, Zea mays
  unsure (1)..(457): unsure at all n locations
tctaaagggagaacacattntaggattaacatatgtttattntgagaaagacagggtttgtagcgcatgccaggcgggaaagcaagttggagcccatcatccacacaagaacatcatgacgaccgacaggccgcttgagctactccacatggatctattcggcccgattgcttacataagcatcggcggaagtaagtattgtcttgtaatagtggatgattattctcgcttcacttgggtgttctttttgcaggaaaaatctcaaacccaagagaccttatagggattcttgagacgggctcaaaatgagttcggcttaaggatcaagaaaattagaagcgacaacgggacggagttcaagaactctcatatcgaaggcttccttgaggaggagggcatcaagcatgagttctcctctccctacacttcacaacaaaatggtgtagtggagaggaag

SEQ ID NO: 64053 - DNA, 435 bp, Zea mays
  unsure (1)..(435): unsure at all n locations
ngaggatatagaagaattgatacagtactcctgtatatcttgaacaaatattccattagtacgacaatctataaatatacgctatttaactatcttaattaaatgtaaattaaacttttaatcctcaccattatgtaatgacatcatatatctgccattgaaagtgttattcttggtataagattctaacaccattttcagaaatcaacggttgcaggagtggtaatcaaagttgttcttagagaactcgaagaagtcaacacagattagggatagcaggagtaaccgttattatgaaaatgtngaaatgctaacagttattttacagattactggaactgaagtgaataagtgatataatacnatttattagtccagaaatcagcaagaggtgcagatcctgagttcttaccttcttcttcacctctgtgaata

SEQ ID NO: 64054 - DNA, 448 bp, Zea mays
  unsure (1)..(448): unsure at all n locations
tattcaaaggtttagaatgtaacaccccaagtgttaccatggctatgacacacctatgcactgatgactgtgatcacatgtggaagaaacttaaggagaagagcataagaaccttatagaccatgtattaaccaagaaatgtgaatgaccaaaagcattacccaagcttttgtgcacttatcaccttggacaagaggggagtaaaccctagacccctcttgaacccctatctcctaaaactttggttgaaaggggggagattaagcaaatgtgcaaatcatgacctaacctttggccaaagttaagtaacatattaatctacaaatatagagaggaaacatttcaaaaagaccccttaagaaaccccaaatccattccttaaatagagagagagctagagctctctaattctctctaagtncaaatttaaccctaatctaaagatcaa

SEQ ID NO: 64055 - DNA, 435 bp, Zea mays
tcttgaaagagcaatccttaacatatccgctgtgtatagtgattattggagaactgagatcatctctttccttcagggtaattttctttcagacaacgaagcttataacaggagaatagaagcaagagctcgaccatatgtcataatagaaggggagttatacaagcgtggggtctgttccccattgctcaagtgtttatccagatccgaaggtatagaattaatgaaggacatacatgcaggtctgtgtggatctcacattggatctaggcccttgcttgggaaagtttctcgccaaggattttattggtcaaaggcagcttcggatgcagcggatttagttcaaaagtgcgaaggatgtcagaaatgtgcaagagatatagacaaccttcgtctttaactcaattaatacaacccacttggtcgtgcaaaggt

SEQ ID NO: 64056 - DNA, 453 bp, Zea mays
  unsure (1)..(453): unsure at all n locations
tgccaattcttatcntagcaacaacatataccggcatatctgttgcttaccatccctataacatggccatttgcatgctggggactgaacatgatcggacccttcaataaagctcatggaggctatactcatgtgctggttgccattgacaaattcacaaaatggatagagtataagcctattgcctctttaacctcacccaaggcagtggaggtcatacaagacataatattcatgtttgggataccaaatagcatcataactgacctgtgatccaacttcaccagctctaaattctgtgattattgcgaacaacggagcatcctaattaagtacacatcagtagcgcatccaatagccaatggccaagtggatagggccaactgaatgatactggaagcgctcatgaagaaagtgtttgacaagaatgaaaagcttgcatgaaagtggatc

SEQ ID NO: 64057 - DNA, 459 bp, Zea mays
  unsure (1)..(459): unsure at all n locations
tgtctcanatatgttcaacgcctacaaaattctgataactctagaataattgtacgccagaacatccagtacgataaattacacaaatgagatcaacttacaggcacccatgtaccaacaagaatctcagcaccagcagcagcaagagccttagcaattgcccaaccataaccattatcatcagcaactccagctataaatgctcttttacctgaaaacttgcaagataattgatgtctgaaaacttgcagttattgaatatgtgcattagttcagatcccatagataaaaaaaattgccagatcatgtacaccaacacagagcaaaagtgatggattgatatttacatacgattttttacagaagcacaagtgtacataagcaaagacataaaccgttagaagtatatatcagtagtgacctgcaatttctggatgaatatcttagttcagcttacct

SEQ ID NO: 64058 - DNA, 452 bp, Zea mays
  unsure (1)..(452): unsure at all n locations
atatggacgacgatgtcgtactccgctaaattggtctgaacctgcggaaaggtatttctttaggcctgatatggtaaaggaggccgacgaaaaggttcagaaaattattcataatatgaagaaagcacaagctcgtcataagggttatgcagacaaacggtgaatgcccttgtattttcatgaaggggactatgtctacctgaaagtttcaccaatgaagggagtatcgcgtttcggggttaaagggaagcttgcacctaggtacattggtccattcctggtacttaagcaatgtggaccagtggcgtatcgactgcagctccccgaaattttgtctgctatacataatgtgttccatgtgtcacaatngaagaagtgtcttctggttcccgatcgaaccattgaagtaacagatgttgtccaccggacttgacatactctgagcaccctat

SEQ ID NO: 64059 - DNA, 464 bp, Zea mays
  unsure (1)..(464): unsure at all n locations
acacttagaaactcaagctntctaagctctctatgggcttaagcaagctccactcgtcttgtatgaaaggcttacggatttcttgctttccaaagacttcaaaattgggaaggttgacactactctatttactaaaagaattggccaagatttatttgtttgtcaaatctacgttgatgatatcatttttggatctactaatgatttattttgtgaggagttcggaaaaatgatgtcaaaggagattgaaatgtctatgatatgagaattgagcttctttcttggccttcaaaacaaacaattgaaagatggaatttttataagtcaatcaaaatatttgaaggacatgctcaagaagtttggtttacaanatgctaagcctatcaagactccattggcaacaaatggtcctctatacttatatgaacgaggtactatagttgatcaacaacttatacgtcaat

SEQ ID NO: 64060 - DNA, 454 bp, Zea mays
tgtgaaggttcttcatacgcacatgagctaaacggcgatgccacagccagcccatgctagtcttagcaattaagcatgcatctagaccggcctcctcttttgcaaaatcaactaaatagagtttgccgtctaatacacccttaaaagctaatgaaccatcacttcttctaaagacagacacatctacatttgtgaataaacagttatatcccatattaaaaagttgactcacagacaacaagttatatccaagcgactcaactaaaaacacattggaaatggagtgctcggatgaaatagctatttttcctaacccttttaccttgccttgattaccgtcaccgaatatgattgagtcttgtgaatctttattcttgacgtatgaggtgaacatcttcttctctctcgtcatatgcgttgtgcatacgctgtcgataatccagcttgatccccc

SEQ ID NO: 64061 - DNA, 444 bp, Zea mays
tatgaagattcttcattccaacatgggctagtcggcggtgctcagagccaacccaagttagtcttagcaattaagcaagtgtcgagttcagctctatcaaaatctaccaagtatagctgaccctctaacactcccttaaatgctattgaatcatcacttcttctaaagacagtaacacctacatcagtaaatagacagttgtagcccatttgacataactaggatacggaaagcaaattgtaatctaaagaatctacaagaaaaacattggaaatagtatggtcaggtgatatagcaattttacccaatcctttgaccaaaccttgatttccatccccgaatgtgatagctcgttggcgatcttcggttttctcatatgaggagaacatcttcttctcccctgtcatgtggtttgtgcacccgctgtcgagtatccaacttgag

SEQ ID NO: 64062 - DNA, 439 bp, Zea mays
  unsure (1)..(439): unsure at all n locations
nngacaacaccattgacatcttaaataaaatatctgatatcaagtatatttaattcattcctcaacatgcaaaagcgggtcttatcaagtggcttagtgaaaatatccgctaattgatcttccgacctcactccttctaaaatgatatctcctttcgcaacatgatctctaaggaagtgatgacggatatcaatgtgcttggtgcgagagtgttgtacaggattattggcaattttaacaacactctcattgtcacacaacaaaggtaccttttctagaactacgccatagtctagaagagtttgtttcatatataaaatttgtgtgcaacaagcacccacgacaatgtattccgcttcggcgattgacaaggcaacactattttgctatttggatgtccatgataatagtgatctctgagagcacctagaggggggat

SEQ ID NO: 64063 - DNA, 342 bp, Zea mays
  unsure (1)..(342): unsure at all n locations
ntgagatgatggccaacgtagtcttatctgaagtgaaccttgtctccttcccgcnactccctgataaacagaccaaacaaggtccaccctgctgataacgcgatgatttcaaaagcattgagggttgtggccacccaggactctttatctttcttaaccaatctctttgcccttaaaaggaacacttggaccacaattgtggtggtggcattcttgcttagaactttctcttcactgcactgatctccctagacctttcgaaccagtagactcttttatttcctgaattgaggtctcatgctggggttggggtcaaggatcttgtatagcacccttttgaat

SEQ ID NO: 64064 - DNA, 435 bp, Zea mays
  unsure (1)..(435): unsure at all n locations
taccagaagaaatatgatatccatgcttcctaagcaaatataanagctgtgatgttgtagtaagatcaagatcttgatccctagcttcgaagacattgcacattaattcatcaatctccttggtatagtggtaatccagtccaagccgttctagtgtatcaatgcagtctaacttatgagacaaatcagaggatccaacatccagtaacattttcttcacctcctccttcattatttcgacgttatccttcataatcaaatactgcaagaaagatatttcatctaatttggntattctcttattgtctatagtgtaaacctttcatttgcacaacacagtacgagtcatatattttacttgaagagacacctggttgttgatggaggccagtgtgaattaactagagaaaccaatatgaacaaattcatagcata

SEQ ID NO: 64065 - DNA, 452 bp, Zea mays
tgagtaagtctcacggcctcaccaggaagctatctgtgtgctgggatcgaacggaggaggacgggagaggggctggccacggtggttgctctcgggcggcactggcgggtcgcggggaggtcgccggagctaatggctggctcgggtaagtccggcgaggtacggaggaggcaacggggaaggcagccaagcactggggcgggctttatagccgtggcgcgggcgtggtcacgggcggccgcgggcgcgcggtggttcgcgcacgggcgtgctctgagcgcgcccccggatgtcagctcgcgtcgaacacgtggaagcttgcttctgccatggttcaacggcggattagagcaccatagcgtgcgtatcttggcaaagtcactgtgtacggtcgcttctctgctccaaatcctatctttttgctgtgagttccaagtcgagatatggtcggg

SEQ ID NO: 64066 - DNA, 378 bp, Zea mays
  unsure (1)..(378): unsure at all n locations
tcacatctctggactaactctgctgcatcactctntgttgtctgccattataaaccagacctgaagaccttcccaactagagctctggatgatgcgtgtattccgcactgtccggcgtgaatctcatctagcagttgtctcctagtaaccgagggaatgcacttcatgaggactcctgttgcaccccttctgtacagcgcgtcccctatgagggtgtagtgggctgactgtcttgcgaggcgttctgctgcggccttatcatccggttcttcttaattctttatatacctgatgataggccctctcaagtcattaaagactgactctggttggctcaaagcattgcactcttctgcctgatctgagggaatgattggg

SEQ ID NO: 64067 - DNA, 461 bp, Zea mays
  unsure (1)..(461): unsure at all n locations
ngaagctgaagtttcaaagagttcgaacttgcanaagtcattgtatgaacttcaagataaatgtctgaacttcggcaaccggtgcgcacaacgactgaagcaggtcttcaactcagttggagccagttctaaaaaatttaaaccttcagctgaagacctgccaggcaccttcgatcatattgaaggcaaagttgatgctcttgatgaagtcttagctgggcatggtgacttctgcgctctgctagcttctcatggcacatctgttgcttttatgaaggctggttgcacgcacgggaatattgtaaataggtcgaacttcagcttatcaccagcggacttgaatgacatcctcggtctgtcccgaagcattgggaacagatccgtaactcaaatttgggcgaagggtggacgaaacttatctggtgacgaagctngaagtcacctcaagccggtaatgacct

SEQ ID NO: 64068 - DNA, 458 bp, Zea mays
tgtgctaccaccatgcaaccagagtgtggaggagatcctgcttgaacatccatggaagtacgagagggagaccccgctcggacaccctcgggggctgggccatagtttgcgctacccatttgagccggatcatcttcggcagtaccctcgggggctgggcagtggcttgcgcttcccacccgagccgaatcatccccggcaacaccctcgggggctgggtaagtgtcaacaccatccttgaggaccaagttctctgcagtatccgcctctaaggctgagggtccctcagttactttcatgggaacaagacgatccaagtcagtttcctgacccacaagaccgcgctccaaggtcgatgaggcgcgggacgctgcccgggatgaccccaacccggcgtcgagcacatcagcacaaacatccgtcgcaccatcatacgctggctctgataacagatcctc

SEQ ID NO: 64069 - DNA, 456 bp, Zea mays
tcggcagccgatgcgtgcagcggctgaaggatgtgtttcattctatcggagctagctctgaaaagtttacaccttcagctgacaacctgcccagtacattagaatatattgaaggcgaagttgatgctcttgacgaagttattggtggacacgccgacttctgcgccctggtagcttctcggggcacatatactgcttttctgaaggctggctgcacgcatggaaatattgtgaatagaccaaacttcagcttgtcagcattagatctgatagacatcccaagcctggcctgaagcattggaaatagattcatgactcaaatctgggtaaatggcgggcgaaaaatggcgggtgacgaagctcgaagtcatcttataccggtaagaagcttatatttgttactttcaccttccccttgaaatttgtacttttcttattctgctctttgatattcgt

SEQ ID NO: 64070 - DNA, 359 bp, Zea mays
cgcttctaatgggagaatacatcttgggactaataaaggagtattttgtgaaagaaagggtttgtagcgcatgtcaagcacgaaagcaacttggtgcccaccatccacacaagaacatcatgacgaccgacaggccgcttgagttactccacatggatttattcggcctgatcgcttacataagcatcggcgggagtaagtattgtcttggaattatggatgattattctcgcttcacttgggtattctttttgcaggagaaatcacaaacccaagagaccttatagggattcttgagacaggctcaaaacgagttcggattgaggatcaagaagataagaagccacaatgggacggag

SEQ ID NO: 64071 - DNA, 459 bp, Zea mays
  unsure (1)..(459): unsure at all n locations
tcataaatattactttcaatactaaaatagcaacacgatactatgctcatcangagtaattggatgtcaataagacaatccacataaccaaactaccttgattaacctcacatacaacaaaacctactattactgcacttgaacaatttgtacctcgtgatatcacaggatgcattcaaagtagtagacatacatgatctatcaaaccatcattcatataagaaaaatctcaatccgatgcaacaaccccatcattaaagagatagatgactaacaaacataagcaactcccagttaagcattgacttcgtttaagataaagcggtccaaataatgattcaacaagcatgcatagagaaactgatcataaaaaaaatcatactaccatacaatgttggcaaataaaanaaaataaaatgggttgtcaatatcgtccacatgactagcctgcaacaacta

SEQ ID NO: 64072 - DNA, 449 bp, Zea mays
  unsure (1)..(449): unsure at all n locations
ntaactatgtttggtcaggtcagtttgttttggggtggtttgtaccatcctgtttattgttttaatagttctgcaaatttcatttcagcttggaaccacatgcttggattttatcttgtactccaaataatcattagttttcaacttgccttcaaatgttaaccattgcctgcttatgtgtttgctaataatagaataatgaacggaagagctgctaatatccttttgtagtttggttgatcagtctttacaacacgagaattatctggccatttcaagtcatcttttccttgattntttatggcgtcagtatgggtatttacttttcaccaccaacttattcatgttaatttgtgttttaggcaaaaccattattcttcttccaagtaaccttctgagttctggctgttagtgtgtgaagtacttgagggtgcagtttgtgtttctac

SEQ ID NO: 64073 - DNA, 400 bp, Zea mays
  unsure (1)..(400): unsure at all n locations
aactctgcttgaaagtaactacatgcagtccgaagggtggaagctctctttgaaggattctctgtaaaaatatcccaaggggagagaaccagcatgcagacctattagctaaatcagcggcgaggggctccctttaccttccgaagtatttttcgaaacaatataagcaccttcggttgagctcatgtaaagagcactgctcacaatntcaccagtacatagtgaagataggaggactgaaattgtatccttcctccagggcaactgtctttcggacgacgaacgttataatgaaagaatggaggcaaggacaataccatatgttataatagaaggggagttatacaaacacggaggttgctctccattgctcaagtgcttatccaaaaccgaacgacaa

SEQ ID NO: 64074 - DNA, 429 bp, Zea mays
  unsure (1)..(429): unsure at all n locations
cattacggaccttgaatctcagctanaggttggaacagtaatatggtgggtcactacaaattgctgttgaaaaacttgattgaataaattgatattctggataaggccagtgagatgtctggcctttcggatgctgacagatatatgaaattagatttggaatctaatctcaggaagattgctgatgaggaaaacattatccttagacaaaaagctagggataaattcttattagagggtgatgagaattccaagtattttcatttgatggctagacacaaaaaaaggaagttgaaaatcttgactctttctcatggtgatattgtggctcatgatgatcatggcattaatcagttggcgacttccttttacaaagatctctttggtcctttccgtgattcgaatatttctttgaataactcggacatg

SEQ ID NO: 64075 - DNA, 433 bp, Zea mays
tctaaagggagaacacattgtgggactaaccactgttcattttgagaaagacagagtttgtagcgcatgtcaagcaggaaagcaagttggtacccaccatccacacaagaacatcatgacaacagatagggcactggagctactccacatggatctatttggcccgatagcttacataagcatcggcgggagtaagtactgtctagtaattgtggatgattattctcgcttcacttgggtgtttttttgcaggaaaaatcacaaacccaagagaccttaaagggattcttgagacaggctcaaaatgtgttcggattgagaatcaagaaaataagaagcaacaatgggacggagttcaagaactcacaaatagaatgctttcttgaggaggagggcatcaagcatgagttctcttcttcatacacacctcaac

SEQ ID NO: 64076 - DNA, 259 bp, Zea mays
tcggcatagtccactctttcatagttggaaataccctgtatgccagaaattcttgcactaaatctctagtgccaatatgttctgcaataatattgaattcagccagtgcagcccaagttggaccttctactgccattttgaatcggggtcttgtttcttcgaagatcaattcaagagggctctgtaccacctactctttgccttcgtaaactttgacataaaaccattctgacttccagcctgccggccatttgcttcg

SEQ ID NO: 64077 - DNA, 411 bp, Zea mays
  unsure (1)..(411): unsure at all n locations
ntcttggcacttctcatcccacttaaactctcttcctttctccagaagtgaggtcataggcttagcaatcttagaaaatccttcaataaatctccgataatatcctgctagtcccaagaaactacgaatctccgtaactgtagtgggtacgctccactccataatctccttgactttagcaggatccactgatattccatcattagaaatgacatgtccaagaaatggcacctcgccaatccaaaactcgcacttgctaaacttggcatagagttggttatctcgtagcttctgtagcaccaaccttagatgttcctcatgatcactgtcactctcggaataattaaataaaaaatatcatcgatgaataccacgacgaatctgtccaaatcatgaacaccttattcttta

SEQ ID NO: 64078 - DNA, 444 bp, Zea mays
  unsure (1)..(444): unsure at all n locations
tgtggcgccctcggcatcttgtcgcagccgaagtaccaagtcttccacttggaagtctcggggccgaacccttcgggcatggtagcgtcgcagagactgatgataccntgccgagtgtagtaaggccacgttccgagcctcttctagctggtccaacgaatcttctcagctggtctgggtggttttgtcaatgtaaagccttgttcttcggggaacctatttcaaggtcctgggttagaagggcctcggccccatggactaggaaaaacggcgagaaaccaatggcccggttcggcgtcgtcctcagactccaaaccaccgagagtagttcttttatccaccgcttgccgaacttgttgaggtcgttgtagatcctcggctttagtccctgcaagatcataccgttggtgcgctccacctgcccatttgtcatagggtgagcta

SEQ ID NO: 64079 - DNA, 464 bp, Zea mays
tcgctagcttctgggaggggcgctaccaccggtgtttcatcactggccgcatcagaggaatcttcagctaacatatccagcatggcacttatctctacatcactgggattcaaaggcacctcaaaatgaacctgcctctcgtcgtcaggaatttcttccagtgaggcaaccaaagcattaacttcttctggagagggtcgcactctaaggcccaaaccgctatcaccggcaggaggattcgacacaaaactggtaaaggccttggaaggaggcagattccacgctgagtacgcaacaggagcaccaatgttcgacaccttgcctctgagtatcatttcgagccggctcaccaagtccacagcaggaattcttctggtggttacccgggttgaatcagccaggcctcggtacaataggccggatatgctctgtctttcagcagctgaatgttctcgaaaacaagg

SEQ ID NO: 64080 - DNA, 441 bp, Zea mays
  unsure (1)..(441): unsure at all n locations
tatganattctctacatcctanggttgaagtcatatcagtttgagcaaatttgattatgtgaaaaatgtacaattcagtcagcccttcctctcaactttgtcaacttcacttttgttatgtagctttgtatctcacttctacttattgatgtgttacactcttagcatgtataaagtgtcttcaatatgactatttaatgtcttctatgggtcttataatgcattctttgaggtgttgcatccttagagcctcagtccaatccacttcgcatcctgtgaactacaacacacaaacacttggaaaatacattagtccacacgttatgttgatcatcaaacaccaaaacctattgagctaaatggcccggtgtccattttccttacagggcacttgtagctagaatgacggtgtcctaattcaccacaattaggacaagtgta

SEQ ID NO: 64081 - DNA, 423 bp, Zea mays
  unsure (1)..(423): unsure at all n locations
ntacaataagaattggctcattgaatgtgacccagtgctttactcggtcaccaaacatcttgaagcaaagctcaacgaagtaggtgaagtcctccctgaatagaaataaagaaacaaccacatatgaacttacggcatcttcgtagataaagctataatataggtgactaactgaatttgacttactgaatctctgggttcaaccaagaattgtatctttcttggagttcttcaggtatgtcatagtggttgatcgtcacaaatggttgtatccctgctccaagcgtatcaaatgtcaggcccagatgaaatagactggactgaaaggcgtgcttgttttgcaggatggcatttgtggagggaggtagctgcccgcataatagcagaacagaaggcgtacctttttctagcagtccgttgatg

SEQ ID NO: 64082 - DNA, 366 bp, Zea mays
tctccaaatttttctaaccctagccaaatagtacaactattttttttctattattgagcttttggccaaaactataattaaatcagaactttaaagttttctatagtacatagggggttttatatttttcttaagtaggttacattatttagagtctggcaaaattagtttgaccaaatttggatgaactaaacagaagttatgaatttttaaagtttatgttcaatttaaaaacagatttaataagagtttcctggaaaaacagtttacaccgaggtccctgggtttaaactaaatcaaccttcgcagttctacccttgcgctactattcccccgggtcgctgacagttcaaaaagccccctgac

SEQ ID NO: 64083 - DNA, 452 bp, Zea mays
  unsure (1)..(452): unsure at all n locations
tgtgcttgccttgtcctgctctttcatgtaaatctggtggtacccacagaagcaatcaagaagtgacatgacttcgtagcctgctgcgctatcgactattttgtcgatccgtggcaaggggaagttatccttgggacaagccttattgaggcttgtgaagtctatgcacatgcgccacttgccgctcttcttttgcaccatgaccacgttggcgagccatgtggtataagcgattggctcaatgaatttggcttctagcaggcggtgcacctcggccttggctgcttcagttttctcatcagacattntccgcagtcgctgcttttttgggcgcaccgaagagtcgatgcccacgctatgctcgatgatggagcggctgaccccgaccatatcgagggccgaccaaaagaagacatcattgttgggtgagagacaggaaatgagctttttct

SEQ ID NO: 64084 - DNA, 456 bp, Zea mays
tcttcagtgaagccagacataaacataacagcagcatataggtcaggatgcacatcttgctgcttggtttccctaattgcttcagccacattgttaacagcagctgtcataccaccaaagacatggacatcatcatcagttagcactgacctcttcctttttccccagacctacttccagaaccaccactaacaggcacctccttcttgctgccatcctctggccccttaacatcctcatcagacttaaatgagctcccagcaaagtctaaaggagaacccagtggctcactagagcccatggcaaacttgccagtggccaggccattgccaaagatgacctccatttgcttgtagttctctatgggtttattaagtagttcagcatccttagggtgagcctagatggttatgcgagaaatgaagtcagaattgtaaaaaggttagaatgaaatgc

SEQ ID NO: 64085 - DNA, 445 bp, Zea mays
tattcaccgtattctcaatccaagcatcattttgctttatcttcgtcacaagagggagcttcggcaaagataaaaagtaatcaactttgtcaaaacgcaagaaattcagcatcaaatggccaggatgcgttcaactgctagagttacacacgacagggaggaggccgaagcttttgagactgccccaatcttcgaagttatgaggcggtcgggactggttgtgacagagggcgcttctgccgaaggtgcgcctgctgtcgaagctgaatgagcagatattgaagaggttgatgctggtgaagaagagatagattgttccatcatgccatctaaacccagccacctggagtttggaaagtctactgtctccgaggccgatatgcccatgatgacgaagctgggctacttcggggaagccgagaagaagctgattcgtttggcggac

SEQ ID NO: 64086 - DNA, 431 bp, Zea mays
  unsure (1)..(431): unsure at all n locations
ngatgcactcctcctcaagaattccttcaattagagagttcttgaactccattccattatcgcttctagtctttctgattctcaatccaaactcattatgagcctgtttcgaaattatctttaatatttcttgggtttgtgattattcctgcaaaaagaacacccatgtgaagcgagaatagtcatccacaattacaggacaatacttactctagtcgatgcttacttaagaaattgggactaatatatccatgtggagtagctcaggtggcctctcggtcatcatgatattcttgtgcggatgatgaattccaacctggatccctgctttacatgcactacaaatcatgtcttccataagataaacattggttagacctagagtgtcgtcccctatagaagcttgtgaagattctttatatcaacatgag

SEQ ID NO: 64087 - DNA, 260 bp, Zea mays
gctattacgtgacctatgaaactcagctgtggtggggatgcaatgcttgtggtggctgtctcttacggtcctggaaaacggaatccaccacatgcgttctactggtcttaggtttgtgggcgggaatggtataacattgaatgatataattgagaatgagaatggcatgacatggaatgacagattaccccttaccttcttcatagtagtagagatgttgaatatcaaacacgataatttaattgggtttatttgcttta

SEQ ID NO: 64088 - DNA, 456 bp, Zea mays
ttaattgtgttgccatcaatcaccaaaaagggggagattgaaagctctcttgtgagttatggtgtttggatgacaactcaattaaaggactaacaagtgtgtgagtgttgaacaggtgcttagtgtaaagctgacagggttcaacacaagtgaacaagtgtgatggcccaaggactagataatgggcatcacaagttagatggacattgcaaaagtgatactcgggtgcgtagctcggagacaactgatcaagccaaggacagaggcaagaagagcttcgaggtaccaagtgcacgggagaaggtcaaggagactgatgaacccaaggccaagggtgaagaagagagcttgcaaagtcaagggtgatcgagttgagaacagctacggcacatcaaggatcactatataaggacgtgacttacaaccaatgaggtaacagctacagttatgtggtgt

SEQ ID NO: 64089 - DNA, 472 bp, Zea mays
  unsure (1)..(472): unsure at all n locations
tataggaccttgaaactcagcttatatcatctccttctcctacaaagcttgtcaagcatattatggtacccatcgcttgatgggtccatcaaggttagtcaacaaagatctaggaacccaaaagtcctttgtgttagcacttggtaaactcattacctttctagcacaagttgcaattttgggttgcctagttacatgagaaataattgacaagctagaggtggggttgttaccaatgggacaatccttgcactgatgtcccttgtttcggcatatgtagcaaaggcgatcttcaagtcttgaagatttcttctttccttgtttcttgcttgctacatggttagtgaatattttcttttcttaacataatgccttttgttntaaatggggacaatacctaattaagtgtccctgctttgagcatttaaaacaatgtttatcatccttgntaataatcacagtcatttttata

SEQ ID NO: 64090 - DNA, 209 bp, Zea mays
tcccaatttgaaagaatgggaaatgccgaagctacacggggaaaagagaaaaggtgaactcgtacgtttaccttactatttcaagtttaaaagtactttaaagcaccttgccaagagtggctagatacaattgaagcaatgtgtaatgaaatacttggcaattattccaaaaaagaagatcaattgatgaccgcagcctttggcacccg

SEQ ID NO: 64091 - DNA, 410 bp, Zea mays
tggcacgttatgcgtgcagattgttggggagctttatcgctagagcatctgatgttctcacaggaaacactaaaggtaggacatgttatgcagtaaagttggactttaattgcacaaataacattgtcgagtacaaagctcttcttttagggcttcggaagctaaggcaatgggaataagaagggcaatcctcaaaactgattcccaagttatttctggccacgtggtcaaaagcagcaaggcaagggatccgaagcttgaaaaatatttggatgcagtccgaagattggaagcttcttttgaaggattttctgtaaaaaatatcccaaggggagaaaatgagcatgcggatttgctagctaagtcagcggcacaagggctccctttgcctttggaagtattctttgaaa

SEQ ID NO: 64092 - DNA, 391 bp, Zea mays
agcttctaaagggagaacacgtgatatgtcttactaatgttcaattcgaaaaagatagaccttgtgcagcttgtcaagcagggaaacaggtgggaggctctcatcacaccaaaaatgtcatgacgacatcaagacccttggagatgctgcatatggacctcttcggactcgtcgcctatctgagcataggaggaagtaagtatggtttagttattgctgatgacttttcacgcttcacttgggtgttctttttgcaggaaaagtccgaaacccaagggaccctcaaacgcttcctcaggagagctcaaaatgagtttgagctcaaagtgaagaagataaggagcgacaacggatccgagttcaagaaccttcaagtggaggagttccttga

SEQ ID NO: 64093 - DNA, 378 bp, Zea mays
tatagatactaagcttataaatggacgtgaagagcgccttcctcaatggaccaatcaaggaaagaggtctatgttgagcaaccctccggctttgaaaatagtgagtaccctaatcatgtctataaactctctaaggcgctttattgggcctcaagcaagctccaagagcatggtatgaatgccttatagatttccttatcactaatggattcaaagtcggaaaggccgatcctactttattcactaaaactcttgaaaatgacttgtttgtatgccaaatttatgttgatgatattatatttgggtctactaacgagtctacatgtgaagaatttagtaggattatgacacagaaattcgagatgtctatgatggggg

SEQ ID NO: 64094 - DNA, 396 bp, Zea mays
gcagctgcaagcttgacactgcagttcgatctctaaagtattcttacgtggtcgcatgcccccgctgtgtaccgcaaagctccccgaaacccccgcttggaccccgtccagaacaactgcaccgcgcctgtcattgttaaacaggggggcctcatggttgtcgccaacgtcgacgactctcgggttgttctggacaccggatccgacgacgacgccatcacgccgtccaactcatcgtccacctgaagcccaacctgccacgtaagtcgctactggccggacatgaattcttgagcgctaggacgatggacgttgctgacgttgtgtgagtgtcctcgaacatgatgtatatagtggaatagcgcattcggtggtgccacgaccaggggtactacc

SEQ ID NO: 64095 - DNA, 409 bp, Zea mays
  unsure (1)..(409): unsure at all n locations
tcataactcctagnggnacctatattgntatcttttgtatgcctgagggctcaagaatgctggaggaagcttcagcagaatgaccgccaaggttcttcactcccaaattggcaggaatgtgctgacatatgtcgatgatatcatagtaaaaaagcacaaagcaagaaaaccatgttgctgatttgcaagaaacattcgccaatttcagacaagctggtctcaagctaaatccagaaaaatgtgtcttcggagtgaagaagggcaagtttcttggttgcctagtatcaacaaaaggcatcgaagctaacccaagcaagatcaaagctatccttcggatggagccaccaaattcaaaaaaggtggctcgtcgcttagcaggaagggtggcatcattaaatagattcatttc

SEQ ID NO: 64096 - DNA, 402 bp, Zea mays
  unsure (1)..(402): unsure at all n locations
ggatccttaatcgcctgcagctgcagctttaaaggagagccatttttgattaacaatgtcttttgaaaagacggatttgtgcgcatgccaagcaggaagcaagtgggctcanatccacacaagaacgtcatgacactgacggccactggaactcctacacatggacctattcggcccgatagcttacataagcatcggcgggagtaagtactgtctagttattgtggatgactattctcgcttcacttgggtgttctttttgcaggaaaaatctcatacccaagagacattaaagggattcttgagacgggctcaaaacgagttcggcttaaggattaagaaaataagaagcgacaacgggacggagttcaagaactctcaaattgaaggcttccttgagga

SEQ ID NO: 64097 - DNA, 417 bp, Zea mays
ctaagcttgggtcacatctgaatgttagtgtagcttattattttttgacaaacggtcagaccaaaagaaccaatcaaatccttgaagacatgttgagagattttgcgttacaagatcagtccggatgggacaagaagctaccttatgcagagttctcctataagaacagttaccaggccagcttgaagatgtcaccatttcaggcgctttatggaaggagttgtagaactccgttgcaatgggaccagccttgagaaaagcaagtgtttgggccagacattttgcttgaagttgaagagaacattaagatggttcgggagaatttgaaaatagcgcaatcaaggcaatgaagttatgctgacaccagaagaagagagctgagtttcgaagttggagatcttgtctatctgaaagtgt

SEQ ID NO: 64098 - DNA, 322 bp, Zea mays
tccgacttccagcctgctgccaatttgcttccgcagctcgatacaggaaaatttcgggtcttccataagcaaaatatgccgccaaacgccggcaatcatcctttctagccttcgtctgatagtgcagctcgtgaacccgacaaaagctgtccgaaaatggctccactccttggcttcggagggcccaaatataaacactaagcctaacgatagcgttaggagtcaactggtgaaaatagataaccaatctcttgcagacctctgcaataactcccatgtagggggaatcttaatccagcctttagaaagcctcttgaaatga

SEQ ID NO: 64099 - DNA, 411 bp, Zea mays
  unsure (1)..(411): unsure at all n locations
ggcggatgacgagagtcatgcttgtctaagtgngcgaaactcataaagtggaagtgagttcaccggaggtgggcgccaatgttgggacttgctctcaaatgctaagagttaagaacaaggcaacataaaaagtgttaaatgttaaagtccttactgcatcgaagcattatctcccttcggatataacgaatttcggacgaaggttatgaaggacaaaccttcgtaagcacaatagatgatgaagaaggattcatatataagatatgaaaaataacataaacactctaaacattattatcaacttatttttatttgcgttactgtatcaacaataacaaattataaatgtaccttcggctcanaggatagcaggggtgcaagcgtgacgcgaaagcaaatgtgaagtcagcg

SEQ ID NO: 64100 - DNA, 406 bp, Zea mays
ctgacgcatgcaagcctgccagaacttgtctaatttactacatctgccggcacagcaactgcagaccataccagtgacttggcccttcgcatgctggggactggatatgattggacctttcaagaaagctcaaggaggatacactcatgtactggtagcaatcgacaaattcactaaatggatagaattcaaacgcattgcctctttgacctcagctaaggccgtggaattcatacaagacataaaattcagattcgggataccaaacagcatcataactgacctaagatccaacttcacaagttcaaaagtctttcacgtttgtgagcaaaaaagcattcaaaacaagtatgcttctgtagcacacccaagagccaactggcaggttgagcgaaccaacgggatg

SEQ ID NO: 64101 - DNA, 387 bp, Zea mays
tcatgtttttagatcaatgttaaatcgttagatgtttattccttgaacgggtgttacactccacaacatgcaagttgcaacaaatgcatgcggtatctcgagagatttatatgcatttgacacactattctacatgtttagtctcattgtttactctagatggacttcttaggaggtcctgatccatgttcacatacatgataatcggcacacaacaactgatgttcctaaaatcaccagcgtgatatatgttgtagattagatatgggatgttcctatagatgggttaatgtttatctggccctagattagattaacaatgtgggtaattgatgggtttcagcccatttctgtgccattggccatgcacgtagtctgcgtcgctct

SEQ ID NO: 64102 - DNA, 336 bp, Zea mays
cggatcttaagtcacgcagcatgcactgaagctggattttttttgctatattaccaatggactcagcctactacggtgctagttcaccgaatccaacctcgattggagtatcctggccacaagtgagcttgtccttgcaccacaccatgccatttgttgtgcggagaccacttggtactacacattggtaagacgggactaaatgccatacctcgtctagtgaagtgtgagctctcttgatcgcctacccaatccgacttgagtgcttctctaccctgtgggctcaataaggaacaaagagtatgctacaaatggcacacagatcagggtacccct

SEQ ID NO: 64103 - DNA, 409 bp, Zea mays
tgacaacaccatttgacattttacataatatttttgagatcaagaatatttagttcatttctcaacatgcaaaagcgggtcttatcaagtggcttagtgaaaatatccgctagttgatcttccgacctcactccttctaaaatgatatctcctttagcaacatgatctctaaggaagtgatgacggatatcaatgtgcttggtgcgagagtgttgtacaggattattagcaattttaacagcactctcattatcacacaacaaaggtaccttttctagaactacgccatagtctagaagagtttgtttcatatataaaatctgtgtgcaacaagcacctgcggcaatgtattccgcttcagcagttgacaaggcaacactattttgctttttggatgtccatgaaacta

SEQ ID NO: 64104 - DNA, 399 bp, Zea mays
ggatcttaagtcacgcagctgccactatctcaactgaagtttttttcctagggtgagtgttagttgactttgtggaggtaattatatgcttcttcttgcagtattatatgtgttgcaacatatggactagtgcttccgaaaatatgaattaattggcatctattgggttcattctgaaatagatagtcatgaggataatggtgcatatggttaatggtgctttaagattcattctgaaatacatagtcatgaggataatggtgcatatggttaatggtgctataagattgtctttaaattggtatcttagtttaaattggtatcctaatggtgaatagtggtaggttgatatttctgtgatatatccactacattgaatggtgtttaactctgattatg

SEQ ID NO: 64105 - DNA, 407 bp, Zea mays
cttgcacatctgaagtcactattctgccccccttctttcttcttgaaccaccatgcaaaatggtcatgttgtcttccattccgtattcctatgatggctctatttctgcgaagtgtgtggggaaggaaggaaaatcatttttccatattgctattgattgcccagttgcaaagcagttctggggagtggttaaaaacatctcgagaataaaactgccagttgttttggaggtcacttggacaaaggatttattggctgacgaccacttcactgactcagttaaaacaatggttatttgtggacaaaggggctgggggtgtggtgatgaggaactcgcggcgagaggttttggcggcagcagcacaattatatgaacacatccctgatgcgctaaccagcgaagcttt

SEQ ID NO: 64106 - DNA, 306 bp, Zea mays
ccccggatctctaagcaccgcggctgcagctatggaaaggtatccttaatggctaaccgtggggccaaccacccatgtgtcatagcatatgcacggctcgaagcttatcaagttacccaataatgacgtctacctccttaatgctaagagctcctttctaaaacgggaactcatcataacaacggtgttccgttcgcttaacgaaccagcgcaattgtacgatgacttgaaaagctggggcgaacggcggaaatacattgacatgactagcaaacttgttgtcccaagcatactcctgggttggat

SEQ ID NO: 64107 - DNA, 250 bp, Zea mays
tgcgaagccaatgacacgattatggagtaatttctttttctgcaaaaggacctccaagtgtcatgaagcctttgagcaccttaagacactattgaccactgatccgcggttacctctatctgacataattcaggctttcgatgtatatggtgatgcactatgcacaatgcttaggtgggtactgatacaacacgtacgtggaatcgcttatgcttcacagccggagactcgacctgaggaccatgataca

SEQ ID NO: 64108 - DNA, 392 bp, Zea mays
agcttgacaacgaggaaatggctctcatcatcaagagtttccaccaaatcctcaaacaaaggagggggaaggattacaaaccccgctccaagaaggtgtgctacaagtgtggtaagctcggtcactttatagctaaatgtcctatatcaagtgacagtgacaggggcaacgacaagaagggaaagaggaaggaaaaggagaagtactacaagaagaagggcggcaatgcccacatatgtcgggaatgggactccgacatgagctccaccgactcctcctccgacgaggatgtcgccaacatcgccgtcaacaagggactcctcttccccaacgctgtccacaagtgtctcatggcaaaggacggcaaaaagaagaaggaaaatctaaatttg

SEQ ID NO: 64109 - DNA, 312 bp, Zea mays
gttggtgttcatgattcacacacgaacatcatgacgactagcaggccactggagcttctacacatgagatctattcggaccgatagcttacataacatcacgggaggagtacggctagaattgggatgatattccacttacttgggaggctgttcgcatgaagaatctcatacccgagagactataaaaggagttttgagacgggctcaaaatgagttccgcttaaggatcacgaaaattacaatcgaccacgggacggagttcacgaactctccaatcgaggcttcctttgagactgggcatcaacatgac

SEQ ID NO: 64110 - DNA, 381 bp, Zea mays
  unsure (1)..(381): unsure at all n locations
agcttgtcaatacttatcaaaacttcagcatttaccagcacagcaactgcaaaccatacctgtaacatggatgttcgcgtgctggggactggatatgattggacccttcaagaaggctcaaggaggatacactcatgtactggttgctatcgacaaattcactaagtggatagagttcaagcccattgcttctctaacttcagctaaggcagtggaattcatacaggacataatattcaggttcggaataccggacagcatcataaccgacctgngatctaatttcactagttcggagttctttgatttctgtgaacaaaaaagcatccagatcaaatatgcatcagtggcacacccaagagccaacgggcaggtagaaag

SEQ ID NO: 64111 - DNA, 403 bp, Zea mays
  unsure (1)..(403): unsure at all n locations
tgagaattgagagtctaagttcggtccaagttatcttgtgttgnaacgttgcatgcctccccttttatagctaaggagggcatacacaaaggtactgagtcccgacaagtgggcccaggaacataacagatgtagcacttggagccacaaatgttcgctactggagcaatcttcttgcgccctgacatctgagatctgcgtagtatcggcgtgcaggggaagcttctcgtataagggatgatgagcacagtgcgccgtgcggcacaggcgcactgtttgataatggactggacaggtgcgccgtctacaggatggccctggcgccgtctgccagtggagtggacaggacacattaaatgctgagggggcacatcgcctgtcagcaaggtangtaggcaacacg

SEQ ID NO: 64112 - DNA, 411 bp, Zea mays
  unsure (1)..(411): unsure at all n locations
actgcagcatgcaagctggggaaggaacttcatacccacatgtgctctacggcgatgccacaaccagcccatgctaaacctaacaattaagcatgcatctagaccggcctcctcttttgcaaaatcaactaaataaagtttgccgtctagtacacccttaaaagctaatgaaccatcacttcttctaaagacagacacatctacatttgtgaataagcgattatatcacatataacaaagctgactcacagataacaagttatatccaagcgactcaactgagaacacattataaatggagtgctcggaagaaatagcaatctttcctaaccccttcaccttgtcttgantctcgtcaccgaatatgattgaggcttaggaatccttgttcttgacggacgaagagaacat

SEQ ID NO: 64113 - DNA, 403 bp, Zea mays
tctaaagggagaacacgtgataggtttgactatcgcgcaattcttaaaagatagaccttgtgcaacttgtcaagcaggttaacaagtgggaggagcacatcacagcaagaatgtgatgaccacctcaagacccctggagctgctacatatggacctcttcggacccgtcgcctatttaagcataggaggaagtaagtatggtttagttattgttgatgacttttcccgcttcacttgggtgttctttttgcaggataagtctgaaacccaagggaccctcaagcgcttcctcaggagagctcaaaatgagtttgagctcaaggtgaagaagataaggagcgacaacgggtccgagttcaagaaccttcaagtggaggagttccttgaggaggaagggatcaag

SEQ ID NO: 64114 - DNA, 394 bp, Zea mays
agcttcaggaggatcggcacatttatttcttgtccaagaaccggccagcccactttggttagcacaaaatagtgtggctcgtggcgagaaagatgggtcccatgggtctatctgattcaaaagaggatgttcgcttggaatataggaaagtcggttcttatatagtgttcatcaaatgtcaaattcaaaacctgtacctacaccctacaaatttgtgtcataataaccgccctttactatatatctatatacgtaacatatatctaggtaagtagcaaaatattccaatctttataacctggaacagagagggtacagtttgtttgcacagagaagaccagcggagctctaacagacggctttggactagagatgtcaatggggacccgatacc

SEQ ID NO: 64115 - DNA, 417 bp, Zea mays
tgccaattcttatcaaagcaacagcatgtaccttctcttcagctacagaccatacctataacatggccatttgcgtgttggggattaaacatgattggacccttcaagaaagctcaaggaggttatactcacgtgttggtcgccatcaacaaattcaccaaatcgatagagtacaaacccattgcttctctaacttcagccaaagcagtagaattcatacaagatataatattcaagtttgggacaccgaataacatcataaccgacctaggatccaacttcactagctttgaattctttgatttctgcaagcaacggagcatccagatcaaatatgcatcagtagcacacccaagagccaatggtcatgtggaaagggctaatggaatgatactggaagcactcacgaagaaagtc

SEQ ID NO: 64116 - DNA, 354 bp, Zea mays
tcaaatattccacgggggtgatagttatgaccaatgcactgaagatgacaaatctgaaaattatgctgccaaagatacgaatagcatccaaagaagattcaaatgctgacatgacctctcgaacaaatgaagtgcatgtatactttctttatttcaattattaaataccattagctactatataataatattcaagctcttgctaatggcttgtagaacatggttcatgtcgagcagcagcaacaacaatctgtccatagaagtcttggacaaactcaagtccatacatctacaccacaggagcaaacaccttcaaaggtatgtccaagaactggatattctttccagctgacg

SEQ ID NO: 64117 - DNA, 394 bp, Zea mays
agcttcggtattacaaaccgactttaaatattgaatgaccttttagtccataaaggtctgagtcaatgttgtaaacttttatgaggggcataattgtaattcctcacaggctgtgtcctgtgcctataaatagtgaacagtattcctttactgttcacgcattctggcaattgtaattgcatctttcgggaaccaatctttgtcaaggcagaggtataattgtattcaataattcaatatattaaataaatataatctaattcgtttatgattcatttatcttttcataccctttattttatgttatcttatatcatctattagaatttaattatgaagacttaactcttgtaattatattctcatcaaccttcgttcatggttcattatcctc

SEQ ID NO: 64118 - DNA, 408 bp, Zea mays
  unsure (1)..(408): unsure at all n locations
tatctcaacctgagaggaaagcttatcctaaggggtgatgtgttagtttgagctttgccaagtgtgatattcatatgtttcttgcagtattacatgtgttgcatcatatggactaatggttccgctgcgatgaatgcgatgaattatttggcttctatagtataatagatagtcatgtggataatggtgcatgtggttaatggtgctttaagattgttttaaattagtatcttagtttaaattggtatcttaatggtgaatagtggtaggttgatattcctgtgatatatccactaatttgaatggtgtttaactctgattatgtgcatttgtgtgttatagcatcatggtttgattcttgacacaatgcatcctanaaagtgctaaggtgtagaaatgttttgaatt

SEQ ID NO: 64119 - DNA, 398 bp, Zea mays
  unsure (1)..(398): unsure at all n locations
agctntaagccgaaggacactgcctacttttttttttacaatgctatttagctagcgctctttttcgtcggttcactcggtgtttgcggacctgtaagatggtatcatactaactaggcagtacaatgatagatggaggatatctgagttactttgacctctgcgctggaatgttatttttagaagggaaggaaaccaacagggctaattctcaattatataacatggtgtcattgaaattcaatttattgtgctctaaatttgtcataaagtgattctaagttgtttcttatcgcagttctcctgcgtacttgaggaaaaaggaacttgtcatgataaattgtccacaaatggttcctgcttctgcagcttccactaattaccagtaggtaatttat

SEQ ID NO: 64120 - DNA, 305 bp, Zea mays
tactcaagctttttcaccatattatcacggttatcttgagaatgttttgcatgacactttcccttcaattgaatcaagctcctttttagcctctcattttcttccttgagctcattgttttcttttgcataggaaacattacttgttcctgaaagttttagctcaatggaagattggctttcttgagagcaacatttgttagcacatgataatatagtttctgtttgagtacatgtgcataagtgaggttggtatgattcaaattaattaacacaacctcatgaagccattttaacatgatatgt

SEQ ID NO: 64121 - DNA, 245 bp, Zea mays
  unsure (1)..(245): unsure at all n locations
ttcatatagggcttaattctgagcaacgccntgagagcgcaaacaaatgccgaagacgagagctataatattgctttcaacaacctacgaacagacgttattaagctgaggaacgaagctttggaaaaagataaactctgcttacattggcggataaaataaaggaagacgaagctacctcctaggctcaagctgaaacccacacacgcgaaattgaggatcctccgaaacagctagccacagct

SEQ ID NO: 64122 - DNA, 406 bp, Zea mays
tgacccggggacccgagtgaccggactctctctttcgtgctcaccggagttcaagaacccgccggcgcacgtggaccgggtaagcccctgcaccgttttccaattctttgcgcgcatggcctctgtgtcaccccgtgaagctcctcgtgcaccctaattgaactataccgccgtggtttggccggagcaagagccggcgacgacccccgtcgcctgtgctcgtggtcagagtagctccgaccacctccgacaccgacccgcacaccgacgtgaccgtcgatacctcccggacgtcactgaccaccccgccggagctctaccgccgacggtaagccccacctccgtaaactatgccgcgggtactggttcagccggtcacggagcgcgggttagaatttatttaagt

SEQ ID NO: 64123 - DNA, 394 bp, Zea mays
agcttagagaaatctagtttgaatctgtgataatacccagctagtccaagaaaactccggacttggtgaacagctgtcgggggttaccactccaaaatatccttgaccttgctaggatctaccgcaattcctttagctgataacacgtgccccaaaaattgaatttcttccagccagaacgcgcacttgctgaacttggcatatagctgatgttcccttaggcgcgtcaatacaatccgtaaatgctgagcatggtcttcttcattcttggaatatatcaagatatcatcaatgaagactaccacgaacttgtccaattcaggcatgaataccgagttcattagataagtgaaatgggcaggagcatttgtgagcccgaaagacattaccaaat

SEQ ID NO: 64124 - DNA, 411 bp, Zea mays
tgctccgcgttccaccgtatgtgtctttcttggataccctttagaacataaaggatataaatgtcttgatcttactacaaatagaattatcatctctcgtcacgttacttttgacgagtcctcttttccttttgctgaaatttctaacccaccttcatcccactttgattttctttcggacttggattgcacttctttgcctgttggtactatgtattctataggtcctattgctctggtcccatccggtgctgctgcccccgtcccatcacggcaggaggtggcacgtcgcactaccgcccaagagcgcctggacacttctgctgctggccgcatggtgtacctggacactgcccctgctggccacatgcctcaagctgctgcaagtgtcccgggcgcgaccacaaatga

SEQ ID NO: 64125 - DNA, 268 bp, Zea mays
  unsure (1)..(268): unsure at all n locations
cccggacttaagcacgcgctcactcgactacctatttttgcaaagaccgacaacggaatcattaaatggttctgatccatgtttacttcaaactaaccgngctgactacaagtattggcaataaataactttgcgataaattgacttgaaggaaataaaacaccgtcctgctcaagttccaaaccataaaaacgccgcttgtgcttattcttctctctacccctgcgtcaatacgaaagctgcacgctggataatcaaatttacattc

SEQ ID NO: 64126 - DNA, 413 bp, Zea mays
  unsure (1)..(413): unsure at all n locations
ctggtcattttattgctaactgtcccgacaatgatagtgatcaggatcaagggaacaagagggagaagaagaagaactataagaaggcaaagggcgaggcacatcttggcaaggagtgggattcggattgctcctcgtccgactccgacaatgaaggactcgccgccaccgccttcaacaagtcatccctcttccccaacgagcgtcacacatgccttatggcaagggagaagaaggtatgtactcgagactctacttatgcttcttcaagtgaggacgaatctagtgatgaggatgaaatagattattcatgtctatttaagggcttagatagaaccaaggtagataaaattaatgaattgattgatgccttgaatgataagaataggcttttagaanagcaagaggatttg

SEQ ID NO: 64127 - DNA, 356 bp, Zea mays
agcttctgcaaggaccattattatgattagtgatcattagtgaataatgccttggaaagtctataaagagtgtgatcctgtgtatttcttggtgctcttgctgcgtggctttcttaatcggtctttcttcatcttcttctaaactcttaagtgacttgtaaagctagcaaaagacaccaaattgtgtgatgatccttgcgagtctaagtgatcctcgagattaagaagaaacactcaaccggtctgagtgaccgtttgagagagggaaagggttgaaagagacctgccttacgtggccattaatgcatagcactactatcggagagggaattctccaaccgggtggcggaatgcac

SEQ ID NO: 64128 - DNA, 410 bp, Zea mays
tcctagtcattgcaacttcgaagctagctctgcttctaatctgacatgaggaccatgaaacacggcggacctggacctcggcgcaggaacgacgagcagccgtagagcgggaggcacgtgagggcgttccggtggctagctatttcacactctctttgttaggtggataaaaaatataggaaaacaaaaatagatagcgacgagcaaatagatataagatgaatcaagagataaataaattactattacgattcttttacgagagctattcgagatagccacgccctgagcccatgaaaaaacagctcgcggccaatgatgacagtgatagtacacgattgctgtccgagaatcggaattactgatttcccttcccctaaccaatgaactcatctgcatgacaacatctg

SEQ ID NO: 64129 - DNA, 385 bp, Zea mays
agcttcggaattgcaaaccgactttttagtagaatgaccttttagtccacaagtgtttgagtcattgttgtaaacttttatgaggggcatgattgtaattcctcacaggctgtgtcttgtgcctataaatagtgaacagtattcctttactgttcacgcattcctgtaattgcaatcgcatcactcgggaattattccttgccaaggcagaggtataaatgtatctaatattgtatttgaatacatcaagtttatataatatgtaaatgatgttgttttcttatagtttacttgtctttagtgctttatatctcacattattttatataatctttgagaatttaattatgaaaattcaaccttcataattgtgtcgttttaacct

SEQ ID NO: 64130 - DNA, 317 bp, Zea mays
tagaaaatctaagaaaccaagcagttgttggttatcaaaagctaagaaattgaacaaagcaaagcaggcggcaagtaacgtaccaaatgtgcttggggtgagttcttatttatacacccagcgtgctccaagttggagggccccgtctgtcattgaatcttgctattctagcaaaaggaaggtgttttttcggaccttcgacttagagccttcatccatatcgcaatttgaattcgttattctaacaaattaaccttgcgaggggctactgttgggggccttcgtcttctgaaggtcctcaaaaacatgatttaaca

SEQ ID NO: 64131 - DNA, 385 bp, Zea mays
agcttgtgaaggttcttcatccctacatgtgctaaacggcgatgccacagccagcccatgcaagtcttagcaattaagcatgcatttagaccggcctcctcttttgcaaaatcaactaaataaagtttgccgtctagtacacccttaaaagctagtgaaccatcacaccttctaaagacagacacatctatatttgtaaataaacaattatatcccatattgcacaattgactaaccgataacaaattatatccaagagactcaactaaaaacacattagaaatcgagtgctcggatgaaatagcaattttccctaaccctttcactttgccttggttcccatcaccgaatatgaatgaatcttgggaatccttgttcttgacgt

SEQ ID NO: 64132 - DNA, 235 bp, Zea mays
  unsure (1)..(235): unsure at all n locations
tgctatgccctatcgngagacaacattagttatatcaaatctgaatctcagtcacgaactagaatttagttgattgctcaactgaattgcaatcctacacactatgtaattccatttaaaaacaaacttggggacatagtatgccagaattagaatctgcactagtacagaacaaatgcaaaactaagaacacaaaagatgcccgggggctgtctctccctcccctcccccccga

SEQ ID NO: 64133 - DNA, 347 bp, Zea mays
cccgggaacttaagtcacctgagctgcagctcgagtccttcgagtttattccgaactagtatgtgctccggaaaacggatagatgaaccagaattccggaagctctgtggctaatctaatttgactcacaccttggatcgaatggggctacgattgcgcacatggttaactgttaacgttgtttttatttgtcaggtgttaaatgtaagcggagcttgggcaaagggacgacatatcattagctacgccccccggaagtagagttgttattacatgcatgcctggcgagacaaaatccacatgggctattacctactactgattctagcggggttgactactaagca

SEQ ID NO: 64134 - DNA, 418 bp, Zea mays
ggaactatgaaactcagcttcacagaagaagcgaagttcttattcttttaaggccgacacgtgctaacttatgtggatgacatcattgtaaaaagcacgaagcacgataatcacattgctgatttgcaggagaccttcgctaattttagacatgctggtataaagttgaacccagaaaaatgtctcttcggagtgaagaaagggaaatttcttggctgtctagtctcaacaaaagggattgaagctaatccaaataaaatcgaagctatccttcgaatggagccaccaagtataaaaagggagctcaaagattgacaggaagactggcatctctcaacagatttatatctagatcagcagaaacaaatttaccatttttcaaagtgctgaagttagctgaagcttttcaatggtgacc

SEQ ID NO: 64135 - DNA, 399 bp, Zea mays
agcttgggatgtcaaccaaatctgccggtgacaaactgaagtttggcctatttacaattttctcgtgcgtgcagccagccttcaggaaagcggtagccgcgcctcgagaagctagcagggcgcagaaatcagcatgcctagcaataacttcgtcaagtgcatcaacttcgccctcaatgtattccaaggtgcttggcaggttttcagctgaaggtgtaaacttatcagagctggctccaattgagtgaaacacatcattcagtcgctgcacacatcggctgccgaaatctaagcatttctcctgaagctccttcaatgatttttgcaaatttaaattcttctcgatttcagtcttgagacttggttcgagattcttcttttactgctcagatttttctg

SEQ ID NO: 64136 - DNA, 394 bp, Zea mays
tgatgtactctgcccaaatcaatcctcatgtgataatatgttaaaagggggtagccctgggtggacaccctgagtaacacctggggtgtcacactcggctcgcccgaggcccagctcgggcaggcttcgtcgaaaagcaaccttggccaaatcgcctcaccaaccgaccgtatcgcaggcgcattcaatgcaaggatcgcttgacaccttatcctgacacgcgcgcctcagtcggcaaggtcgaagtgaccacagtcacttcgcccttccactgaccgatctgacaggaaaacagcgccgctcgcctcgctctgactgctgtgccagccactcgggcaaggctgacaacagcaaagtcagccttgggcgtgacaggaagcttcgcctcggccga

SEQ ID NO: 64137 - DNA, 345 bp, Zea mays
ttggagtgaggaaattggtgcaactatgcacctgataacctgtttccacacaataagccatactaatcattaatcgcccccctcagaaatatctaaaccctttttcaacctgcagacaccgctgatgttactgcctagtttgggaacgggtacgctccaacaacaactggtgacgatcttctgcagtctctgtgatcatccgcatctacccctctgctgacaattgtgtgctgaagatgtttgtttttaatcagcttatatagctcagcgcacagcgctcttggaaactggtgatctgaatatcctactggtactttcatttctttgtgataagattgttctcaa

SEQ ID NO: 64138 - DNA, 410 bp, Zea mays
  unsure (1)..(410): unsure at all n locations
ntaagggtaatcttcacctaaaagaaagattatgtatgctcaaggcaaaggtatggaacaaattgcttcaattggtagttgatcaatattatttccttccaagtggcattctttcaattggtaataatatattctatggaaaggaatgtcaatatgaaggttaaatttcttttggcttaaatttataaattagtgcatattgtgaattcactgctccatgtgcattaacttaaaaggaatttaatttatgcctttacgcctcataaatgatgatttgtttgccattcatatatatatatcatcattcattaaatacttccttgtactactaatacctcttttcaaagtattntatcaactagttttaaaaggaaaagagataacaaagaagatagtctccacaaatgatg

SEQ ID NO: 64139 - DNA, 397 bp, Zea mays
agcctgtgaagaatcttcatcccaacatgggctagtcggggatgccagagccaacccatgttagtcttagcgattaagcaattatcgaggtcagctctattgaaatcaactaaggatagctgaccctctaatactcccttaaaagctattgaatcatcacttcttctaaagacagtaacacctgtatccgtaaaaagacagttgtagcccattttacataattgagaaacagaaagcaagttgtaatctaaagaatctacaagaaaaacattggaaatagaatggtcaggtgatatagcaattttacccaatcctttgaccaaaccttgatttccatccctgaatgtgatagctcgttggggatcttggtttttctcgtaggaggcgaacatctttt

SEQ ID NO: 64140 - DNA, 413 bp, Zea mays
tctaaagggagaacacgtgataggtttgactaacgtgcaattcgaaaaagatagaccttgtgcagcttgtcaagcaggtaaacaagtgggaggagcacatcacagcaagaatgtgatgaccacttcaagacctctggagctgctgcatatggacctcttcggacccgtcgcctatctgagcataggaggaagtaagtatggtctagttattgttgatgacttttcccgcttcacttgggtgttcttttttcaggataagtctgaaacccaagggaccctcaagcgcttcctaaggagagctcaaaatgagtttgagctcaaggtgaagaagataaggagcgacaacgggtccgagttcaagaaccttcaagtggaggagttccttgatgaggaagggatcaagcacgagttct

SEQ ID NO: 64141 - DNA, 397 bp, Zea mays
  unsure (1)..(397): unsure at all n locations
agcttggatattctccatcagagaagtattccaattcttgtgatatataaaagatnntcttcacgaagcatgaaaagaagggaaggtgttttttcgcccaangctccaaaaatggtatgtatgccaaatttcatgcatcgtaaagaattgaactataaatagattatacattacattccaagttacaatgtattacacatgttatgttccaaatgtttctacaatagcatttaattctccttaagaactatttctgcagcttcgttcagtagctggtcgacaaccttgtccatggcttcggcccattttctgatttcatcctctcccttcgggtgggggcccggagatgcctcagtaggttctgagggaggagaagatacggctatattactattac

SEQ ID NO: 64142 - DNA, 413 bp, Zea mays
ttacctcgagcagactaataccagaatggccaacactctttgggagtggagagatagcgagagtagcatgtaccctctatggcaagaggctggatggtggtgtatctgtgctctcggttggcgtgaacccaatctggtcttaagaaactatcacacccggggctttaagggacaaagccgggtgcatctcatacatgcgccaaagaagacaacatatataataacagagtgtatagagataaatgtaacaatataataagagtacttattacatagcggaagtcttacaaaataaaatataaatatggatcgaactaaaatccatccttggcgccagaaagccaactaggagacaccacctagatcgaatcgaactcctcgttgcgtggctcctcttgaaccacctattcttc

SEQ ID NO: 64143 - DNA, 387 bp, Zea mays
  unsure (1)..(387): unsure at all n locations
agctttgccagcatgagtgagctgatttggcttttcttccncgacaagcaaaatcttgccagcacaaacctaaaataaccttacaagaaaacaagacaattaggatcaaattggtaccttctgcctaccttgctcgtctagcctggccaaacaaagttagccttgttaaagtaggtggcatctgaaagcaagataaagcttacccgcatagaccaaggcaactttgcctaaaatccaaacaactaattttatctgactcgttgctttcaggtgaagtgagtctaccaaatagccgatggttctatcttgaattctgtgcaagcaaagcgttgtctctccggagaaccaaacgttttcatagggcactgttggttcaacttttttctg

SEQ ID NO: 64144 - DNA, 403 bp, Zea mays
ctgatcatctcttcctttgaacccagtcgttcgtttggtgttcggagagaatccagtgggtggtgtttggagagaatccgccgatttatttgtattttctatttttcgcaaccatcttttagcaaattttcgtcatacacaatttgcatttgtaagatatttttggaacaattatagtgcaagctagtcaatgttatctctatattttttttccttaccttttaatcagtggggaacagaggtagcgttaacttagccaaaagaaagacattggcaatcttaaaactgtatatttctagaaacctttttctcgagcacacggtataagtattattccaataataagacggcatcactcctttagaaactatttacaatagagtaattctggttggacataaca

SEQ ID NO: 64145 - DNA, 411 bp, Zea mays
cggatccttaagtcactgtgctgcagcttctttggcttttttttatgtacctgccaattcaggtgcatcataaataccaagagtgattgttccttttgcacagaaacttcctgcatagatccctttgaacccaactttcgaatttcaaaattaggcagcttacctgcaccatcaaaagtgcaagataaatcattatgacatcagatctacacatttacatgtttaatgccataaataacagcatcaaattcaacatgataatgaagctaagtaatagagaaatcagtgagaacctgcgagtaaagcatctaccgtggcttccaaactacgatggacacgtaattcttttttggagacgatctctgcagcacatgtaaatgttgatgggcccttgcgctccacacagttttt

SEQ ID NO: 64146 - DNA, 404 bp, Zea mays
tgtgcacacctctgtgaagctgcccgagcaatgtatcggagttcccttcgccggagaagccagtctgcgctcgccggagctctcaccctcgccggagcacgtggaccgggtaagccactccaccatccttcgattccttgtgcacacagtcgttgcgtgaccccgtgatgctcaccgtgccctcggattgcgccagttcgccgtagtttggccggtatactcgccgccgacgaggacacccgcctgcacgcgtggaccgggcgattccggccacctccgacgccgagccgtacctcgacgtgaccgccagagtctccccaagccgaccccacccttcgccggacctccctcgccgccggtaaagccgcgccgccttttctttcccgctgttactgtttcagtga

SEQ ID NO: 64147 - DNA, 382 bp, Zea mays
agcttgctgtggcatttcttatatagtcactgccaaattcagttgcatcatacataccaagatgtgattgttccttttgcacagaaacttcctgcatagatccctttgaacccaactttcgaatttcaaaattaggcagcttacctgcaccatcaaaagtgcaagataaatcattatgacatcagatctacacatttacatgtttaatgccataaataacagcatcaaattcaacatgataatgaagctaagtaatagagaaatcagtgagaacctgcgagtaaagcatctaccgtggcttccaaactacgatggacacgtaattcttttttggagacgatctctgcagcacatgtaaatgttgatgggcccttgcgctcca

SEQ ID NO: 64148 - DNA, 416 bp, Zea mays
ggtgcacacctctgtgaagctccccggcaatgtatctttttcccttcgccggagaagccagtctgcgctcgccggagctctcacctccgccggagcacgtggaccgggtaagccactccaccatccttcgattccttgtgcacacagtcgttgcgtgaccccgtgatgctcaccgtgccctcggattgcgccagttcgccgtagtttggccggtatactcgccgccgacgaggacacccgcctgcacgcgtggaccgggcgattccggccacctccgacgccgagccgtacctcgacgtgaccgccagagtctccccaagccgaccccacccttcgccggaccttcctcgccgccggtaagccgcgccgcccttttctttcccgctgttactgtctcagtgaagggaaagactgcg

SEQ ID NO: 64149 - DNA, 395 bp, Zea mays
  unsure (1)..(395): unsure at all n locations
agctttttagattgctgtatatttttacaaatcccaggtaaaattccgaatataaatcatgaccaaatcagaagaactgaaataacaagtcaaatcagctgatgcgtactgaatagacttactgatagatggcacgcgccggaatcagcagggtcgacgatgtcgaagtagcgaaatcagcagggtcgacgaggtcagcagatcacgagcagtcacgtgaagacgcttaccaaaaaccttattcgccctctcccggnncnntatctataagacgaagggttccggagacctgctctcctgatcgcagatgcacctctgcgactggggtgatttggaggctggtaggataagcgtaacagccaagataccaaaaaatcaaacggcaaaaggtagcc

SEQ ID NO: 64150 - DNA, 409 bp, Zea mays
  unsure (1)..(409): unsure at all n locations
tgctaagctccgcagccaggaggacgagtattttgtgtttttgncttaacgacgaactggatgttgccattcctttctgtaggaaactactttgcttgtgtcttgttagtactgaaaaccagagtcactcctacctttttgcaatcagtagctactaaaatgtggcagattccactatttccttgcatctatctaaattatatgcgttacatggtttcacctgccatcttgacattcgttgataatacatagcgctcattaggccaagctctgccgttccccagagttcccgagagtttatccaatagagtaattctaaaagattaggagaaatgaatctatcttactaaaactgtttggtaaatagttcgtgaagtgatttctaactggttttaggggggagcaacga

SEQ ID NO: 64151 - DNA, 318 bp, Zea mays
atcctgaacatactgattggacaataaattcaatggagtacttggaagtacagtaccccgaatacaacaccgatgggaaaggaaaccaatagaataatctagatttatctgtctggcgctatccacaataataaggaaacaattccatgttgaatgctgggtattctttagcatggaacctacgtaataaatagatacatcatgagtaaaaaaatcattatttccatacacttctgctcattacccacttctttgagtattaagccagcagctcttcgacctggatgaaagacaaggccttggttccaggtatggact

SEQ ID NO: 64152 - DNA, 396 bp, Zea mays
agcttttgaacgtactaatcactattccgggaaaaatggtaaccgataaacctagtacctgagtgaagccgggcaaggacattatccctcatgcgacctgagactgggtttcccatgctagctatggtgggtacaagtgcggtcactgcacggcggcagccgggatcagtggagcattgtatgccaaggcggtgaggtctggacgcgaacggggaatcgatggggacgattgtcatgtgcagggtcggagcaccctgacatgccgtgtgtttaggtttaccttgcaaggttaaaactcgattcgaatcgtctgcttctcgcagctaatgagactgcttgattccttgtactgcatcgagtaagaagtgaaatgaggttacatgagataatttgttg

SEQ ID NO: 64153 - DNA, 385 bp, Zea mays
  unsure (1)..(385): unsure at all n locations
tagggctaagccatctccagcagtatgtgttttcatgcgtgtagaatactattttgtactgtagaaaatactatttatatagtggagtttaaaatggagagtatgatagagaggccgcgagagatagcctaactgtcgtctcactaagccatctcctattttaaacccgactcgtctatagtgcaaaacattgtattgcactcttataacaacacattgctgaagatatcctaataggcaatgtttcgatgactacgagatgatgttcataacttcaaccataaagtctactcatcaatttcattataagattacacatgtttacgtatttttaggcgtctacagtagtctatccataggttatcntaaaaataatggtctacac

SEQ ID NO: 64154 - DNA, 401 bp, Zea mays
  unsure (1)..(401): unsure at all n locations
ggatcttaagcacctgagctgcagcttggaaattttatcccacagggctatcgcgggccagagccaacccatgttagtcttagcaattaagcaagtgtcgagttcagctctatcaaaatctaccaagtatagctgaccctctaatactcccttaaatgctattgaatcatcacttcttctaaagacagtgacacctacatcagtgaatagacagttgtagcccatttgacataattgagatacagaaagcaagttgtaatctaaagaatcaacaagaaaaacattggaaatggaatggtcaggagatatagcaattttacccaaacctttgaccaaaccttgatttccatccccgaatgtgattgctctntggggatcttggtttttctcatatgaggaga

SEQ ID NO: 64155 - DNA, 395 bp, Zea mays
  unsure (1)..(395): unsure at all n locations
tcttaaaggctggactgcgatttcccttgagttatttttgtcgggaaatactgaagatatttgaaatctaccttcatcaacttactcccgaagcaatcatgaggatgggcatctttgtgtgggccgtgaggagccaaagtttaaaacctaatgcaaaaagtttctgcaacatacatgagctattgtatgatacaaaaccctggggtaaagaacagtatcacaacaattttggctgctatagcttcggcgcccggtctgggtcaagctgccccgtgccaacctttcgaaagaggtggcccggtgactggatgtcggaatggttntatgtgaagaatgacttgaaaatacgagaagatattaaagatatcattatgcgccctatctggcaacgcttc

SEQ ID NO: 64156 - DNA, 385 bp, Zea mays
agcttgtgaaggttcttcatccttacatgtgctaagcggcgatgccacaaccagcccatgctagtcttagcaattaagcatgcatctagaccagcctcttcttttgcaaaatcaactaagtaaagcttgccgtataatacacccttaaaggctagtgaaccatcacttcttctaaagacagacacatctacatttgtaaaaagacaattatatcccatattgcataattgactaacaaatagcaaattatatccaagagactctactaaaaacacattagatatagagtgctcatttgagattgcaattttacctaacccttttaccttgccttgattcccatcaccgaatattattgaatcttgggaatccttattcttgacgt

SEQ ID NO: 64157 - DNA, 398 bp, Zea mays
  unsure (1)..(398): unsure at all n locations
taatacctaatgagcatatgaacaattctaattcatagnagangcatattgacctaagaagcatattaaggaagtaacagaaagatctaagtaaaaaagttaaagaagcaacaaatctagggaagttagtgggttgggtttatgccgggtggagcaaacactcgtccgtaatcacacccgtgaagtctacctaaacccgccagcgattgcactagtgggtacaattccaaacatgcatccgcacccatcgttttcgggtcacccgcggttttactcaatgtaccttttaatcaataattcagctgtaagcaattaagtattatcattaattgagttatatctatggattntaagtgttctcacatcgagcaacaacaaaatatttcatgaatcattac

SEQ ID NO: 64158 - DNA, 387 bp, Zea mays
gagataaatattgaacttcaagattatgggcccatgtgcagttatagttctatcctggaataaaaacaagtcacttacggaagtaggccttcttccaatggctcccacatatcagtaataccagtagatccagtggtggtattctgatggaagccaacaatcctcctcttcacagtaataacagtaacaattagaatcaagtgataagtaatattagcaagcaccagagccataaggagtaccttgatcaattccacaaccatgaaagtcttattgatagtcctccccatggccttgaatacaacctcatcagaacctttgtccttaaagtaagaaatattatggtgcatcttatcaggcacacaacacaacaaaagtatattgcat

SEQ ID NO: 64159 - DNA, 395 bp, Zea mays
agcttgtaacccctactacgaacactcctgtgcaagataatataagcctcatccccccttttgtgtttcatcttgcattaactcatctgggcagggacacgcaacgtcaaattcactagtcggttggggtcctcgtgggtccaaaacgccgacaacagtaaaatgtcgtttttaccggatcactcggagttcagaagtagtggtccggtagacttattttcaaggcattccttgttaaaatcaaaaactgcaagctggacctaggatctttgggccagttatttcaaaatcaacccaaagatcgggggcctgtgggggacggatatcccctgcgtccaccagaaggataagagacctcacaagaggcccgtgggcccaataattcgcaaggtcat

SEQ ID NO: 64160 - DNA, 388 bp, Zea mays
tctcttgtacaagcgccacacttactgtagagtgcttatctgccacatacaatagcaatggagcccctatcacgggtggaggtaatgttgttaaatcgatcaagtattgcttcaactctttgaaagctttctgttgattgggccccattgaaaaacttcagctgactttagtacttcaaagaatggtaaatttctttctgatgatctagatataaattgattcaaagatgtcagtcttcctgtcagccgttgggcccccttctttgtgcttggtggctccattcgaaggatagcttcgatgttacttggcttggcttcgatccccttcgttgaaactagacaaccaaggaacttgcccttattcactccgaagacacatttttctgga

SEQ ID NO: 64161 - DNA, 401 bp, Zea mays
  unsure (1)..(401): unsure at all n locations
tgcaagcttgtgaagattcttcattccaacatgtgctagtccgcgatgccagagctagcccatgttggtcttagcaattaaacaagtgtcgagttcagctctatcaaagtctaccaagtatagctgaccctctaacactcccttaaatgctattgaatcatcacttcttctaaagacagtaacacctatatccgtaaaaagacagttgtagcccattttacataattgagaaattgaaagcaagttatagtctaaagaatctacaagaaaaacattggaaatggaatggtcaggtgatatagcaattntacccaatcctttgaccaaaccttggtttccatccccgaatgtgatagctcgttggggatcttggtttttctcgtaggaggagaacatctttt

SEQ ID NO: 64162 - DNA, 406 bp, Zea mays
  unsure (1)..(406): unsure at all n locations
ctaacatgcttgattcaagagcatgcttttcatttgtaagaatatctatagaggttttcatatttggtacttctttttttttatcctccatagttatcttgactaaagatacttccttaatcaaggattctagcatttcatctttattgagtagcaattcttgaagctctaggtttctctccttttcaagaatgagacagtcttcttgagcatcaagagttgcttttcttttatctagcttctccattaatttagtgataacattatatccattcaagctaaattctttaatcattntatttttcatggcaatttgttcatcatcatcatttgagaaatcatcactaaataaagttaccttatctccttttgccatgaggcaagttggagtctaagagtcgtcttg

SEQ ID NO: 64163 - DNA, 398 bp, Zea mays
agcttctaaagggagaacacgtgatatttttaaccaatgttcatttcgaaaaagatagaccttgtgcagcttgtcaagcacgtaaacaagtgggaggagcacatcacagcaagaatgtgatgaccacgtcaagacctctggagctgctgcatatggacctcttcggacccgtcgcctatctgagcataggaagaagtaagtatggtctagttattgttgatgacttttcccgcttcacttgggtgttctttttgcaggataagtctgaaacccaagggaccctcaagcgcttcctcaagagagctcaaaatgagtttgagctcaaggtgaagaagataaggagcgacaacgggtccgaattcaagaatcttcaagtggaggagttccttgaggaggag

SEQ ID NO: 64164 - DNA, 410 bp, Zea mays
taccgcaccctcaaattggactacgacaagaaactgtttaagctcgcccccgcaagaaaaatccgcaagaagaccaaaagccaaggatgtcagactgagcagcaagaaaagaacccttctaggaaccagtccgacaccgaggacatgtccctggccagccttgatgaccttctcttggaatttggggacactttaaagaaagagttcgggggtaccctaggtagcactcgtgtgtgatgagcttgtggtagcagtatgctatgtaatgtaatggcttgatgtaatgaataaaataactagttaaaaaaatggcatgtgcataatagtgactcttttcccatggcagatggcttcggatagaaccacgcctaccgcctccgggattggggcaagacttcccctaagagctg

SEQ ID NO: 64165 - DNA, 402 bp, Zea mays
agcttcttcaacctttgtgcctctctgatggctgcaaccttcaccgcaaccattttcgcctataatgtaaggaagtattaatagcagcataagttgaagaacgttgaaccaatttgaaggagcaagcaattgcctagcttttccctattttctcgtagcatccgaagacatcatttttccaccaacatttcaaatgtcggtaaagtaccttttcctcaattctgatgcttcggtagatagattcctaacatcttcgagagagatggagaagtcagggttcctaacagcttgaacatgatcacaagcagcttttcgaggaccaaggcaatgtttcgggtatcggtccatgcaaaatagtcctctctagcttcgaggatctctttaaatgcttcaacttctcca

SEQ ID NO: 64166 - DNA, 410 bp, Zea mays
  unsure (1)..(410): unsure at all n locations
tctaaagggagaacacgtgataggtttgactatttttcaattcgaaaaagatagaccttgggcagcttgtcaagcaggtaaacaggtgggaggagcgcatcacagcaagaatgtgatgaccacttcaagacccctggaaatgctgcatatggaccttttcggacccgtcgcctatctgagcatagggggaagtaagtatggtctagttattgttgatgatttttcccgcttcacttgggtgttctttntgcaggataagtctgaaacccaagggaccctcaagcgcttcctcaggagagctcaaaatgagtttgagctcaaggtgaagaagataaggagcgacaacgggtccgagttcaagaccttcaagagaggagtaccttgaggagaaggatcaacacgagtctccg

SEQ ID NO: 64167 - DNA, 370 bp, Zea mays
cggatcttaagcacctgagctgcacctttgccctttgtttttttctgaggtcgaaaaacttgtgtgccctgatgattgaagcttgttgtgcgcttgggatgatccccctgtcgcacttgcactggattatgaatgatctgacatgcctgggtggaatcttctatatgaggatatggttgctctaactcatcataaattgcttcgggtctaagtgcccgtcatacatagggagctgaggtggcttatatgatggtggccatggggtggcctgaattctgtgccaagggagaacatatcaaagaaaatgccatgataaagtcccataccattgagacattgattgactttttgacaactcctggggagacct

SEQ ID NO: 64168 - DNA, 399 bp, Zea mays
taaagccacggccagcagtataggcaagttttttactaattgactcaagcctagctaccggtgcataagtttcatcaaagaccaaaccttcgacttgtgaataaaccttggccacaagtcggcctttgtttcttataaccacaccatgctcatcttgcttgttgcggaatacccatttggtacctacaacattttggttaggacgtggaactagatgccgcacctcattccttgtgaagttgttgagctcctcttgcatagccagcacccaatccggatctcttagtgcatcctccaccctgtaaggctcaatagaggacacaaaagagtaatgctcacagaaatgtgcaactcaagatctaggggctccccccttatgaatgccaccaaggatggatt

SEQ ID NO: 64169 - DNA, 386 bp, Zea mays
agcttgacaatgaggaaatggctctctttataaaagcttccgccaaatcctcaagcaaaggaaggggaaggattacaagtcccgctccaagaaggtttgctacaagtgtggtaagcccggtcattttattgctaaatgtcctatatctagtgacagtgaccaaggcaacgacaagaaggggagaagaaaggagaagaagaggtattacaagaagaagggcggcgatgcccatgtttgtcgcgagtgggactccgacgagagctcaagcgactcctccgacgatgaggacgccgccaacatcgccgtcaccaagggactcctcttccccaacgtcggccacaagtgcctcatggcaaaggacggcaaacagaaggttaaatctgaat

SEQ ID NO: 64170 - DNA, 412 bp, Zea mays
tatcgagccatctcgagctggctaatgagcctagccgagctggacttttagctcgttgttataatgagccgagccaatatggctcgttacactaacgagctagaacaagctgagccaaaacgatccgaactagctcattatccaaccctacaagtagtcgatagagggaggagaggctcacatatctcttatcgggggtggaaatggagcttaaaagctaagatgtggagttctagctaggtcttggcttggcggggctccggccttctagtcctcatcggtgcttctcctcctatttgtccttgtgggctcgtctttgtctgaaggcatctgatcatcttcaagtcgatctcttctctccgtcgaatctgtttgtcgatctcccttgtctagaggtcaacctctctctttc

SEQ ID NO: 64171 - DNA, 388 bp, Zea mays
agcttgggactaaacttttgttttttatcacatgccacccccaaactgatggccaaactgaagtggtgaatcgtacattgtcaatgctgctgcgaacaatggtaaagaagaacttgaaggattgggaggaatgtttgccacacgtggagtttgcttataacagggcagtacattctacaactaatttatgccccttcgaaattgtatatgggttcaaacctattgctccgatagatttgttgccccttccattgcaggaaggaactaatatggaagcttccaagcgtgctgcatacataaaaaagatacatgagaagaccaaggaagcaattgagctcaaagcagtgcgcaaggcaacaagcatgaacaagcataggaagaaagtgtt

SEQ ID NO: 64172 - DNA, 410 bp, Zea mays
tgtagaggattttactaactgtcccaaaaatggattttggggtgttacagaaatctgataccacttgatattgttgaggtgcccgatctttcggtgattggagataattccgatttggcggaagatgacccttgcgatccgactacgacaagcaagcccgaggcgccaatgcaatcgctgaaccaactccctgtggttagtgaccttgctgatgcgagatcggcctaatctcataatggtgtcaacaagctcctgtaaaaatttcagattttttgaacaaacgagcaaaaagttatgcccggtttaaggaaggtacctcaagttatggttaaaaacgaccgagatgagacaaccgctttgtttcctttccctatttttttgtttgttctctggttctatgctttctcttt

SEQ ID NO: 64173 - DNA, 386 bp, Zea mays
agcttccatctataccgtcttatattttaaaaccgctgtagtcttaatgaagtttccgaattctccgttttgattaccacatcatctacgtaggcgctcacacgcttgccccaatgatcgggtaagcacgtctgaatggctctctgataagtcggtccagcgtttttgaggccgaatggcatggaggtgtaacaaaaagcaccaaacggagtgatgaaccgctgtttttcctcgtcttccttcgccaaactaatctgatggtatctggaatagcaatccaagaaagacagcacagaacattcagcggtggagtccaccacctgatctatccttgggagcccgaagggatccttcggacagtgtttgttgagatcagtatagtcgac

SEQ ID NO: 64174 - DNA, 411 bp, Zea mays
  unsure (1)..(411): unsure at all n locations
nttaatatgtgatgatattattatatgatttatgaacttattagccaaaaataatgatatcatcttaagaatagtatatatatctatgtatgctatttttcatagtcacttatattaataatagtacttccaattaattaatcagtgtatatattttaacaaaagatactagcctctctactatttgagtctattcggtggaccgaatagaccgaaccggaattatgagtctattcgggttcggttcctaaaattattttgaaaatttgggttctcatttttcagaaaccgaaatttcaaaaacccgaataggccgaaccgaattaccctaaggccccgtttgtttcgttggaattgaattctattttaataattataatttagacaaaactaattaagtttatatattta

SEQ ID NO: 64175 - DNA, 399 bp, Zea mays
agcttcctatccagggtcctattttttttaacacttaaaacaatacaacttgtttgaaatttttgcctagtgaatgcactctaagtgtatcaaacatatgcaatgccaatgctatgatgtcatgctcaagttttagttatagtaacaccaggggtgttacatccttccccccataaaagaatctcgtcccgagattaaaatcctaaggtaagtaatggtaaaggaaacacatcacatttttatttccttatttttggtacaagacaggggtgatgtgggggtcacttcttcattatacagctatacagactttacaatttacaagaggctaagaagcctgcgaaattcttattcaagaagtcttgggtttcccatgtagcctcttcttcagaatgctgg

SEQ ID NO: 64176 - DNA, 384 bp, Zea mays
tgtctttggctcatcctctgtcttcatccaattttggtgatagcccgagtagcagtccaataagctcatgagttccaaagaagctgctgcatctacaagggagtctatcttgggtaaagggaaccaatcctttggacttgccttgtggagggctgggaaatcaatacccataatccatttttaataagccttcttaacctaacaatgttagctagccactctggatatgttacttctctaataacaccggcgctgagaagtctctttacttcattccgagcaccttcagctttatcctcagacattttccgaagtctctactttcttggcgtgaaagatggatccacattgagtgaatgctcaatgacatctcttttaacccca

SEQ ID NO: 64177 - DNA, 385 bp, Zea mays
agcttttcttgaagttatttcttgattttttccatgtttccctttttgtttcttggacctgatgcgaccatgaggctgaaactgtgtgcaagtaatagtccatccatcaatgtaacattcatgtgtttcttcttggggctgggcatccttgtgatgtttcctttttgtaatactttgcaattcatcaactgatagtgcattaggtatgagagaatctgttattagttgttcttggggagacatctgtcttttaacgccagaaaataaaatatggctcttttgttttgtagtttcacttttgtttgcattgatttggtgacaaggaattccatagtactcacaacaacaacatgttccaaagtcacttgtcggttggtttggttgt

SEQ ID NO: 64178 - DNA, 398 bp, Zea mays
tctagtggcatttgtgcgattgtatggtggctgcaccggtcggaccatggtggtcggcgctctggtggtaatgcgagcgatggaatgctcggttgcggtgaattccgacgaagaatggcttggcagtggttggggagggagaggccgatggcgggccgctacttataggcgagggcacacacgacgttgcggttccctggccacgttgcagagcatgaactcgggtacgggttggtgtgcgcacagagcagccaatggcgtgctctgtggttcagtcctgcgggcgaacggttggtttatggcatttagtcacattcaaatgcccataggtcgcgaatcccgggtgaattgggtgaaatcccctcatatgatttcctctcctttcttcactctgtcac

SEQ ID NO: 64179 - DNA, 386 bp, Zea mays
agcttgacaacgaggaaatgtttcttatcatcaagagcttccgccaaatcctcaaacaaaggaaggggaaggattaccaaccccgctccaagaaggggtgctacaagtgtggtaagcctggtcactttatagcaaaatgtcctatgtcaagtgatagtgacaggagcgacgacaagaaaggaaagaagaaggaaaagaagaagtactacaagaagaagggcgacgatgcccacgtgtgtcgggaatgggactccgacgagagctccaccgactcctcctccgatgaggatgccgccaacatcgccatcaacaagggacttctcttccccaacgtcggtgacaagtgcctcatggcaaaggacggcaaaaggaagaaaggtaaatct

SEQ ID NO: 64180 - DNA, 404 bp, Zea mays
ttaagtgcatcaattgtttttcttcatcctgtttgtgcatgaaataaacaatcaagatagttttctacgcactgttgattatatcaaaactcgaaagcaaaatacatattaaaaccaccttgctggattcattgattgaagatctatttcttttggtttcatttcttttgttcccttccctggctttactccttcccatccaatagcatcaggtagaaattcagggttatcccaacctgtaataacagccagtgttacaaatggacaaatcataaatggaagtgcagactgacatttaaatccaccatatttataccataaggtgatggaaatgatgcttcaccaatgagggactgttctagatcagggttccctttatattcacggtagcagaaaatctgggc

SEQ ID NO: 64181 - DNA, 357 bp, Zea mays
gcaaatagcaggaaatgcttgggtaacttcacacctactcgtctggttatatagcgccgcaagtaaaaaggcgaagcgccagaagttttacaccaggcggacacccgctcacactcgctgtacggtggaccgcagagaccgaacagtaactctgcaaggtggggccgctacgcacagggaaattgaatcgtttctcgacaacgagctcagggaaggtgtttttgagaccttcggcgctccgaagtttaagaaacttttttcacggatcaagctcgttacgaaaaacaatctatcaccgcgaaaggggctactgttgggtctacgcttccgcgccgaaggtcttatatagagaagcga

SEQ ID NO: 64182 - DNA, 420 bp, Zea mays
  unsure (1)..(420): unsure at all n locations
ctataccacagattagtattgaagtgcagatattaatgcgagtaagacagagagtcaggatacaatacagaaagagcacacagacccaagggtttatcccgaggttcggccaagcctgaaatgcttacctagtcctcgttggagttagccacacctgggcttggagtctatttcaactccttcctccgtttgctcagatctgtcagtatgacagatagagcttttcactattgagatgggttacaacaataccgtggctgcttacagacttctcggcagcacctcggtagagtaacgatacgctcaagaccttgctctagctctaagcagcacttctcctctctttaaggcttatagctgtgccttctacacaaactatagagttacacacaagatggagagcgagaatngattcgagtg

SEQ ID NO: 64183 - DNA, 394 bp, Zea mays
  unsure (1)..(394): unsure at all n locations
agctnnggctgagcggaggaaaatgaattcttcttaaagagaaaaaggccatctagtcctcgatagattgtccctaagccacatagaaaaatcaagggcatggatgtaaatttacacaggctgcatcctatgcctataaatagatgaacaggaacaccgnactggtcacgttgtcctgtattcacttacacgtcactcttgtgcttgtaccttttgtcaatcgaaggtacaaatgcaatttactgttattaatgttcgcccatgatgagataatgagaatgtgaataatttaacgattcaatatgattattcatgtcattttccatgtttcatatgcttctactttccttattatatactgagattatgaagggatgtccttcataacctccgc

SEQ ID NO: 64184 - DNA, 369 bp, Zea mays
  unsure (1)..(369): unsure at all n locations
aaagcccaatttgacccttaagaattactattgaggtattggataatggaaagggccttaatggtattttgcatgggctgcgacccgtgcctattaattaggtaacaagattcccgtactggtcacactgacttggcattcacttttccgtcatgcctgtattttcttttcttcaagcccgaaggtacatttgtaatttatctttgtttatacaagtaatacaaatagaaatagattaataataatgtttacagaaattatgttactttctgtattttgtttgaatgttctccattttttatcatgatcatgaaggtacgtccttcatgaccttcgtcctaaattcgntatatccgaagggaaataatg

SEQ ID NO: 64185 - DNA, 398 bp, Zea mays
cagcttctaaagggagaacacattttatgactaacaaatgttctttttgagaaagacaggatttgtagcgcatgccaagcaggaaagcaagttggtgtccatcatccacaccagaacatcatgacgactgacaggccactggagctcctacacatggacctattcgccctgattgcttacataagcatcggcgggagtaagtactatctagtaattgtggatgattattctcgcttcacttgggtgttctttttgcaggaaaaatctcatacccaagagaccttaaagggattcttgagacgggctcaaaacgagttcggcttaaggatcaagaaaattagaagcgacaacgggacagagttcaagaactcacaaattgaaggcttccttgaggagga

SEQ ID NO: 64186 - DNA, 390 bp, Zea mays
  unsure (1)..(390): unsure at all n locations
gttcgcagaagctccggcgttagacttgtttgtccacaaagtcgctttatccgagcgtgagttacttatcgcaaaaggtgatgagtgaggtatccgtatcccggaggcgtaagaatccctcggctcggtcagccttggctgcttacgtgtactccgtcgtttccaggatccgctttccgaagtagtcaagaagcacgagagtaatcctgctaaaaagagatcctttttcgaggaaaaaattcgacacagagggggtctctccccttttagcccccgagggagggtctggctttgccggtgctaggccgacccttccttgacgactaaactntgcgtaggtgcgaggtatatgaactacttggaaacatcttaagggtagaagcgacgtag

SEQ ID NO: 64187 - DNA, 397 bp, Zea mays
agcttgctacttagagcacccatggtttatagcctagtgctgctgaccctcgaatgttcttgttggtgccttattggaccaaatacttacgatccctagatcatgctcgcggggaacgagaccttatggaacctttctgcaagacgggggactgttcatggtaagttaacagaccatccgcgtttggtcactaaacggttcatggtaagtcaccggaccatccatgatgtgcacaaagatagcgatgagttcctgcagaatctaaatctcgccccaggagggaccgtgtcagggaggaaagatcctagggttatcttaggatcgaaggccatccaagatgcctctagacgacgtagagttaaagagagaaatgaagattgggattgggaaactacaa

SEQ ID NO: 64188 - DNA, 358 bp, Zea mays
atggacagacccaaaggaccaatccaatctttgaagacttggtgagagcctgggcgttgcaagaccagtccggatgggataagagattgccttatgcagaagtttcctataacaacagttaccaggccagtttgaagatgtcaccatttcaggcgctttatggaaggagttatagaactccgttgcaatgggatcagcctggagaaaagcaagtgtttgggccagacattttgcttgaagccgaagagaacatcaagatggtccgagagaatctgaagatagcgcagtcaagacagcgaagctatgcagacacaagaagaagagagctgagtttcgaagtcggagactttgtctatct

SEQ ID NO: 64189 - DNA, 394 bp, Zea mays
  unsure (1)..(394): unsure at all n locations
agcttgagaagattcttcatcccaacatttttttagtcgcgantctagagccaacccatattagtcttagcaattaagcaaggatcgagtgtagctctattaaaatcaactaagtgtagctgaccctctaatactcccttaaatgctactgaatcatcacttcttctaaaggcagtaacacttatatccgtaaaaagacaattgtagcacattttgcataattgagaaactgaaagcaagttgtagtctaaagaatctacaagaaaaacattggaaatggaatggtcaggtgatatagcaattttaccaagtcatttgaccaaaccttgattcccatccttgaatgtaatagctctttggggatcatggttnttcccgtaggaggagaacatca

SEQ ID NO: 64190 - DNA, 96 bp, Zea mays
ggggggattttgttaatgaatcgagtctctggccaaatacaatagtgaagaacatacttgcatgggaaagacttatgcaatataatagtgggaaac

SEQ ID NO: 64191 - DNA, 414 bp, Zea mays
ccgggatccttagatcgaccgcggcatcaagcttgggtcgttcttttgttttttggtggaccgcttctgaagggtctgatgagataatgccgccgccggcggcggcggcagctctctaactctagtttggagccagccaaatccatccagatacaatgtcaggaaaagaaacgtacgccactcaagtaccatcacgaccatgaggaccaagatcccgttctctgggtcgctcaggtctcccacgcgtacgccggagaagtccgagaaaggccccgacggcgatggaggtggagagagctcgtagattatgcggtacagagacattggtgggaagaactccatcagcgtaatcaggctttctgaagaaacgaattgaagtttctgaaacctggcagcatatttaagagcgtatat

SEQ ID NO: 64192 - DNA, 172 bp, Zea mays
acccccgggttcgagtgtacagcgtttctatgctgtttgcctcttatgtacactttttgatctgcctgagctatcaatggtttttggccaggtgcctggatatattaagccctggcaatgagcacagatagtcgctacccttgaccacactatgggacctatattaataaac

SEQ ID NO: 64193 - DNA, 390 bp, Zea mays
agcttctaagggagaacacattttttgttaacaaatgttcattttgagaaagacaggatttgtagcgcatgccaggcgggaaagcaagttggagtccatcatccacacaagaacatcatgacgaccgacaggccgcttgagctactccacatggatctattcggcccgattgcttacataagcatcgacgggagtaagtattgtcttgtaatagtggatgattattctcgcttcacttgggtattctttttacaggaaaaatctcaaacccaagagaccttatagggattcttgagacgggctcaaaatgagttcggcctaaggatcaagaaaataagaagcgacaatgggacggagttcaagaactctcaaattgaaggcttccttgag

SEQ ID NO: 64194 - DNA, 412 bp, Zea mays
  unsure (1)..(412): unsure at all n locations
ntatcaaatggacgtgaagagtgcctttctttactgaccaatcaaggaagaggtctatattgagcaacctcccggctntgaagatagtgagtatcctaaccatgtgtataaactctctaaggcgctttatgggctcaagcaagccccaagagcatggtatgaatgcctaaaagattttcttgtcactaatggattcaaagtcggaaagtccgatcctactgcattcactaaaactcttaacaatgattngtttgtatgccaaatttatgttgatgatattatatttgggtctactaacgaatctacatgtgaggaatttagtaggatcatgacaccgaaattcgagatgtcaatgatgggggagttgaagtacttcttatgatttcaagtgaagcaactccaagagggcacc

SEQ ID NO: 64195 - DNA, 323 bp, Zea mays
ttatttttgggacgggcaaaatcttactggcgatgacactaaaagaaacaaaagcccctactttgcttcagcttaagagcaagaacggggaaagaaaaatgggctagcgggctcaccacactagttacgtcttctaagaggtacccatacaagaacacacacaaaaggcatgacattcctatggaacccctcttcgtgttatatgtcaagactatgcagggaccaacaaaccattgtgtcgggaaccataattaaggcgaccctcaagactcctaactctcagctgagaacccccataagcatacaacagcaaaggcctgacg

SEQ ID NO: 64196 - DNA, 403 bp, Zea mays
  unsure (1)..(403): unsure at all n locations
nggctactttggcgaagctgaaaggaaacttgttctatttgccggagaagaaaccaccccagtgccgaaggatgatgaagtggtggtcttcaagagttttttttagagcaggactccgactccctctgaatgagatgataggggaagttttgaaaaatttcgaaatatatctccatcagcttacccctaacgccattgttaggcttagtgtctttatctgggccctccgaagccaagggatgagcccgaatgccgaagcattttgccgagtgcacgagttgcactaccaaacgaaggccatggcagacggtttgcatganaattttggctgctacaattttgcgtatcgcaaggatacgaaggctccggttcttatctaccgcaccaaatggccaactgactg

SEQ ID NO: 64197 - DNA, 79 bp, Zea mays
gaccaacccaaggggaaaacaggcgagaaccgatacaaggaacccacaaggaacacggacgggatgaaacacacagaac

SEQ ID NO: 64198 - DNA, 406 bp, Zea mays
  unsure (1)..(406): unsure at all n locations
gggaggcgncgaaagggtggcgacgaggagtttatctttccttctcnacntccggcgccgtgaatgcgacgggttgagcttcggatgtagatggatcatcaagctcgttgatcttcctcgagccttcgatcatgcactcaaaacttacaaaatgcccgattacttcttcgggggtcattctagtatatctaggattaccacgaattaattgaacttgagtggggttaaggaaaatgagagatcttagaataaccttaaccattttgtggtcgttccacttgacgctcccgaggttgcgcacttgggtcaccaaagtcttgagccggttgtacatgtgttgtggcttctcccctttgcgaagccggaaccgaccgagctcctcctcgatcgttttccgcttggtgat

SEQ ID NO: 64199 - DNA, 400 bp, Zea mays
agctttgcaggagaaggagatgatatttatctctgggatgcttgagagagccatttcaatttaaggtatcaatcttcaatgatttatatatcaaagattgacccaaagttgttttgaattattatgtctaaaactcatatcatctcggggaagatattgatgttgtaggaaatgaagaattatcctgtgcggaaaaatcaaggcctacaacatggaggaaagccaaaggatggtaacatttatgcttttaagtgcaagtatcttaaattatcatttcttatgtgtcttgtgtagtcacatagaaaaaggaagcacttcaaatgtttgtaaattatgtcaccattttttgaagaaattcctctcatttggtagattgcatattcatcatttctatactatg

SEQ ID NO: 64200 - DNA, 305 bp, Zea mays
  unsure (1)..(305): unsure at all n locations
tcgaaagataacgacttcatcatcttcgggagtctgcacagtcctctctccatcatctgccctcacgatggatatatctcgaaaatatctccctctcatgttttcaaagtgactttgcccaatagttgattttccgaagactgaatggcttggtcgccatggtcgatcttcggaatcctcacccccactgtctgcatcataactatcactttcaccagtatcttcagataacccttccaaaatctccctangaattttttctgtatttggttttgctattgattcaataaagcctatggttttct

SEQ ID NO: 64201 - DNA, 386 bp, Zea mays
agcttcagctccgtagaccgggtagcacggggtccctctagggtccgtctagtcgtctgcaccggaataggagcctccggcgaagacatccttcaggtccccctcgggtgactgataccggaggtcccgttcagccgcggccacatcaccgtcgtccaccttttctttgccaggttggcgacgaggtggggagccgtctttggaagactgctcgtgccgctcgctgacatgtttcgtgaggtcaatgatctcgtgacactccgtggcgctgtggcgtccattagggtgcatagggcatgggccgctgttacccctctgcggccgtggacgtttgttgcggtcgccccggcccccggtcatggctgcaacgaccaacgcggtggacc

SEQ ID NO: 64202 - DNA, 403 bp, Zea mays
  unsure (1)..(403): unsure at all n locations
tctccttttcttgctcatatttttctgactttttgagtagttcattctttaaactgtcattttcggcttggacctcagccaaggagccttccataaactgaataataaagtctttcttttctaaagcaccttcgtgttctttaaccataatttcaagatcttgaatggcgaagtccttcttcttcagaacagcttcgtagttttcaactttttcttctaaatctttgatgatagctttgttctcctcttcaagatcttgttgcatttttagcacttaataatatactctgccaaaacaaccttcgtcagagaaagacataaataataataataataataaaataataataatatttttaccttanaaatcgcatagagcaagctgcctgcgacatgatgtcgc

SEQ ID NO: 64203 - DNA, 390 bp, Zea mays
agcttgaagccatggtaagtattttatgccaataatatacgaattgactcaagcctagctacgggtgcataggtttcaccgaaatccaaaccttcgacttgggagtatgctttggccacaagtagggctttgttccttgtcaccacaccatgctcatcttgcttgttgcggaagacccacttggttcctacaacattttgattaggacatggaactaaatgccatacctcgttcctagtgaagttgttgagctcctcttgcatcgccaccacccaatctgaatcttgtagtgcttcctctaccctgtgtggctcaatagaggaaacaaaagagtaattctcacaaaaatgtgcaacacgagatctagtggttacccccttatgaatgtcg

SEQ ID NO: 64204 - DNA, 405 bp, Zea mays
tgactcaggtatccacacattaattcttaattcatttttcccgtctcatggacaaggcatcctccctggatccaagtccatagaccaacatagatctcgttatcaagatgaatacaatcaattcctgacctcgcgcgagtgctagaaaaatcactcgacttctaccgagatcctgattagcaagcagctactcaacctagcatactagtattcatctcaaaaaggaatcctaagttcatgcaactagaggtttcaagcaactcctacacttaagtgcacattgcaatcctacaagcattaagtgtagtaaagtagcatataattatacggttatgcatataaaccggggcttgccttcaattgctggggccgcggggagatcctcaatagcagcctctgaagcct

SEQ ID NO: 64205 - DNA, 396 bp, Zea mays
caagcttctgagatcgacactcccttgtttaaacccgtttggttcgtgtcaattatgttgtcgatgatctgatgttggaggcgggttgtgagcattttgcttaagatcttgatactacagttttgaaacgagattggtcgaaagtatgaaggagaggaggcattatcttttttttggattgggggtgatatatgagcggttgattctttccaggtctgccgcaacctaatggaaagcatttgctaagaagtttattcatcatcaaactcatattcaaacttcactctattaacagtacagtctataatgcaaaatactcctttcgtttcattttagttgtcgctggatagtgcaaaattgaactatctagcgacaactaaaaagaaaccgagggag

SEQ ID NO: 64206 - DNA, 415 bp, Zea mays
  unsure (1)..(415): unsure at all n locations
tgacattatctccctttgaaagccaatgccattcttaatcccaaggcatcctccactataaagcatactacgagcaaatttaaatttttcattctctaattcatgctcggcaattttagcatctaattttgctatatgatcattttgttggttaatcatagcaatgtgatcatgaatagcatcaatattaacatctctacatctagtgcaaatagtaacatgctcaacggtagatgtagagggtttgcaagtatttaattcaacaatcttagcgtgtaaaatagcgttatcatctctaagattggaaatagaaacattgcaaacatttaaatctttagccttagcnaattaattttcattctcaattntaaggctagagagagatgcattcaatttgtcaatcttagcaatcaaa

SEQ ID NO: 64207 - DNA, 394 bp, Zea mays
agcttgctggtcgtgagaggaattatttttaattcaagtatgagagcacacttatggagcttgagtctgctagaactttggttatggtgtatgatgagactgaatgtgatgagtgcgctctacacatgtcgaacatcacaactttgtagaccaagtaccccaccttgctagatgagcatgatgagttaagatctaagtctagattgttaggtgtgtgcactgtttgtcttggctcgcagactaagctagtagagagagacgctaggatagctttgcttgagatggctagcttagtgagtgcctctgcacctatgtagtatacactttgtgagggtttgtagtctgcttttgagtcctgcaaacatgacaagacccggatcaaggaagaaaacac

SEQ ID NO: 64208 - DNA, 433 bp, Zea mays
gcgaccttaaatactcagcttctaagggggaacacattgtatgactaacctatgtttattttgagaaaaacaggatttgtagcgcatgccatgcccggaaaccagttggcactcatcatccacacaagaacattatgactagtgacaggcccttggaactcctacacatggatttattcggcccgatcgcttacctaagcatcggcgggagtaagtactgtctagttattggggatgattattctcgcttcacttgggtgttctttttgcaggacaaatctcatacccaagagaccttaaagggattcttgagacgggctcaaaatgagttcggcttaaggatcaagaaaattagaagcgacaatgggacggagttcaagaactctcaaattgaaggcttccttgaggaggagggcatcaagcatgagttctc

SEQ ID NO: 64209 - DNA, 170 bp, Zea mays
gaccaacacggcgcaccggggcagaggcttttttatggggccctgcttcacggaacgcggcccgttagatcgcaccaacctggcgccggcgcacatttagtacctatataatttgctttcgtataactatagctcaccagcgtaagcccatctgctaaaaaaccccgcct

SEQ ID NO: 64210 - DNA, 396 bp, Zea mays
cagcttctaaagggagaatatgtgttatgtcttatcaatgcatgctttgcgaaagacagaccttgtggagcatgccaagcaggaaaacaggtgggaactaatcatccaagaaaaatgtgatgacaacgtcaagaccactgaaactcctccacatggatctcttcaggcctattgactatcttagcatcgggggaagtaagtatggtcttgttattgtcgatgattttctcgcttcacttgggtattctttttgcaggataaaacagaaacccaaggtacactaaatcgcttcctaaggagagctcaaaatgagtttgagctcaaggtaaagaagatcaggagcgacaatggatctgaattcaagaatcttcaagtggaagagtatctcgaggagga

SEQ ID NO: 64211 - DNA, 431 bp, Zea mays
  unsure (1)..(431): unsure at all n locations
cactatanaatactcacacctccccagggagaacacattttgttgactaaattttttctttnngaaaatacagggtttggagcgcatgtttagcaagaaaacaagttggtgtccaccatccacacaagaacatcatgacgaccgacaggccgcttgagctactccacatggatttattcggctcgatcgcttacataagcatcagtgggagtaagtactatcttgtaattgtggatgactattctcgcttcacttgggtgttctttttgcaggaaaaaccacaaacccaagaggccttaaagggattcttgaaatgggctcaaaatgctgttggattaaggatcaagaaaataagaagcgacaacgggacggagttcaagaactcttaaatngaacgctttcttgaggatgagggcatcaagcatgagttc

SEQ ID NO: 64212 - DNA, 206 bp, Zea mays
  unsure (1)..(206): unsure at all n locations
ggagacaatatttaaaatcattttagntagattcattgtacaccaaggccccctttgggtactccaactccccggcgtagtgtttggcttccgcaatttcctcttcagacaaccttttacccaaagcatgttgaataataaagtcaatatctttacaaggtgccttcggagtaataaatttaactttctcacgcacgtcttttttc

SEQ ID NO: 64213 - DNA, 314 bp, Zea mays
ctggtgggcgcaatgtttgtcagatctttcaaatactgttttcagctcatttacaaagccttctgctggatcggccccccattgaaagacttcggttgacttcagcacttctaagaatcggaagtttctctctgctgacctggatatgaatctattgagagatgccaatcttcctgtcaatctttgagcccccttctttgtagttggtggctccatccgaagtatagcttcaattttacttggattcagcttcaattccctttgttgaaaccaagcatccaagacaattttcctcttttactccgaagacgcat

SEQ ID NO: 64214 - DNA, 347 bp, Zea mays
gactatcctatgttcattttgagaaagaccggataggtagcgcatagccagcatggaagctagctggtgttcatcatccacacaagaacatcatgacgaccgacaggccgcttgagctactccacatggatctattcggcccaatagcttacataagcatccgcgggagtaagtactggcttgcaattgtggatgactcatctcgcttaacttggtgttctttttgcaagaaaaaccccaaacccaagagacattaaagggattcttgaaacaagctcaaaataagttcggctaaaggaccacaaagattacaaccgacaacgggacagagttcaaaacctctcaaa

SEQ ID NO: 64215 - DNA, 312 bp, Zea mays
  unsure (1)..(312): unsure at all n locations
agcttgaaggactgcttttgcttgagagcttccgagcgtgatgactcgttcggtccacggagtcgctntatccgagcgcaagttacttatcgcagaaggtgatgagtgaggtatccgtatcccggaggcgtaggagtccctcggctcggtcagccttggctgcttacgtgtacctcgtcgtttccaggacccgcttttccgaagtagtcaggaagcacgaaagaaatcctgctaaaaagtgatcctttttcgaggaaaaattcgacgcagaggggggtcctcccccttttagcccccgagggagggttggtc

SEQ ID NO: 64216 - DNA, 397 bp, Zea mays
tgaggccgacctcagcagataccggcggcatcatatcgccgacagcttgttttattctaatttcaaggtaaagtcttacctgaactttattattgttttcgagatgaaggttacttctgacgaaggttattttttcagagtctactgctaagtaaaaccttgaggatgcagcaagacctcgaggactagaaaaacgaaattataattgagggcttatagggcaaaattaaagagcacgaagctgctttggagaagaaagattttatgcttcagacaatggagggttcgctggcagaagctcaggccgagattgctaggttaaacagtgaactctccacgaaatcaaaaagcttcgaacaagagaagaaggattttgatgcaaagcatgaagctgttg

SEQ ID NO: 64217 - DNA, 418 bp, Zea mays
cggatctctaatcacctgcgctgcagcttgagcaagtctcactgtcttccaggaagctaactgagggattggatcaaacggaggaggacgggaaaggggctggccgcggtggttgctctcgggcgacactggcgggtcgcggggaggtcgccggagctaatggctggttcgggtaagtcaggcgaggtacggaggaggcaatggggaaagcagccgagcaccggggcgagctttatagccgtggcgcgggcgtggtcacggacggccgcgggcgcgcgggggttcgcgcacgggcgtgctctgagcgcgcccccggatgtcagctcgcgtcgaacacgtggaagcttgcttctgccatggttcaacggcggattagagcaccatagcgtgcgtatcttggcaaagtcactatgtacgg

SEQ ID NO: 64218 - DNA, 409 bp, Zea mays
  unsure (1)..(409): unsure at all n locations
tatgaagattcttcatcccaacatgtgctagtcggcgatgccagagccagcccatgttagtcttagcaattaagcaagtgtcgagttcagctctatcaaaatctactaagtatagctgaccctctaacactcccttaaatgctattgaatcatcacttcttctaaagacagtgacacctacatcagtaaatagacagttgtagcccattttgcataattgagaaacggaaagcaaattgtaatctaaagagtctacgagaaaaacattggaaatggaatggtcaggtgagatagcaattttacccagtcctttgaccaaaccttgatttccatccccgaatgtgatcgctctttggggatcttgaattntctcgtaggaggagaacatcttcttctcccctgtcatatg

SEQ ID NO: 64219 - DNA, 391 bp, Zea mays
agcttggtgccgatggataaacttattttcttgaaatcttggctgtcgaactgcttgccggtgtcaactgttagctcggacggtactccgaagcggcaaacgatgttctaccagaagaatttttgggcagtctttgatgtgattgtggaaacagccctcgcttcaatccatttggtgaagtattcgacggctacgaaggcgaacttaaggttcccctgagcggtgggcaggggcccgacgatgtccaggccccagcgctggagaggccatgtatgggcaatcagctttgtgtattgcgaggggttgcctgaccgaggagagaacttctggcaggcttcgcaggaccttgtgacccgatttgcggcgcagatcattgcgggccagtaaaacc

SEQ ID NO: 64220 - DNA, 397 bp, Zea mays
  unsure (1)..(397): unsure at all n locations
agctttgggcacgcatctttacttcttctcggcttatcacccgcagacagacggtcatactgaatgaacccatatgatcctataagatatgtngagagcctgtgcgttgcaagacaagtcacggtgggacaaaaggttaccttatgcagaattctcctacaacaatagttactaggccagcttgaagatgtcaccgttttaggcgctctatggacggagttgtaggactccgctgcattgggaccactctggagagagacaggtgtttggccccgacattttgctttgagccgaagagaatatcaaaatggttcgggagaatctgaagatagcacaattaaagcagcgaagctatgctgacagaatgagaagagaattgagctttgaaggggagatt

SEQ ID NO: 64221 - DNA, 386 bp, Zea mays
  unsure (1)..(386): unsure at all n locations
tgcaacataagaaaagagtatagaattcttctctaatactgaatagatgagcatcttcactaacttccaacacaggcaaacacaacttctcagataaagaggaaagtagaacaaaagggcttcccaactagataactaattttttattaacatttaataggtaaaccaaagtgcaggggatacccacaccctggtgacagtcattacaaagatccaaatccaacatagttcatcatgacaaacataaagtcacaggataagcaaactaccctgtctaactaagactaactaagagtaagactgatgctaagactatagcttctatatatatatatttgcattaaataacagatctgacgctgacgatctatggtntctaaattatc

SEQ ID NO: 64222 - DNA, 390 bp, Zea mays
agcttgtgaagggttttcatctttacatgtgctaagcggcgatgccacagccagcccatgctagtcttagcaattaagcatgcatctagaccggcctcttcttttgcaaaatcaactaagtaaagcttgccgtctaatacacccttaaaagctagtgaaccatcacatcttctaaagatagacacatctacatttgtaaacaaacagttatatcccatattgcataattgactaacagatagcaaattatatccaagagactctactaaaaacacattagagatagagtgctcatttgagattgcaattttacctaacccttttaccttgccttgattcccatcaccgaatattattgaatcttgggaatctttattcttgacgtaggag

SEQ ID NO: 64223 - DNA, 402 bp, Zea mays
  unsure (1)..(402): unsure at all n locations
taccacatttgaagcatgagtgcttcccctttttcttggtcttgcttggctggcccttgcgaccctttagcgctgtcttgaatctctttatgatgagggccatctcttcatcattaagtccggccgcctcaatntgtgccaccttgctaggtagcgcctccttgcttgttgttgccttgagagcaaggggttgcggctcgttgatcggaccattcaaggcgtcgtctacgtacctcgcctccttgatcatcattcgcccgctcacgaattttccaaggacttcttcgggcgacattttggtgtacctgggattctcacgaatattattcaccaaatgaggatcaagaacggtaaaggaccttagcatcagtcggacgacgtcgtggtccgtccatcgcgtgc

SEQ ID NO: 64224 - DNA, 389 bp, Zea mays
agcttcttgggcccatctgtctttgccaccactggtagcacctactctggtatgcagtcagcagccagaagggcatcaccacgctcagcaacagcgcgattttcgggatgaagtcgaagctcgcacattcaacagcactgtgcccgagtcgaagcacatttattaaaggatatcctaacctgatgtattttcgttttgtttgtcattttattttcttgcatgaaaaataattcacgaaagcttgatctccaacttgatgtaataatattgtggtcacaccatcgagtgtagaatgccacccctcaacaacacttcagaagctacaaagtcgttcctaagagagcgcagagtaagttccaaagctacaaaagtcgttccaaagggagcgc

SEQ ID NO: 64225 - DNA, 403 bp, Zea mays
  unsure (1)..(403): unsure at all n locations
ttctcaccatgtatagcatgcttaatgaaacttcgtagaatgatacagnttaatatgaaaacttggtcatcaagcagactattgaccttctgaccagtcagcactaaagtaggttggctgcctttctggtaaattttattaagtcggccttagaagcattggaactagaatttaagagctttccaaaaagtacttatgggccttcatagcttttgggaatcaaaagatatgattgtttcttctggacgattctgttgcgctggactgactcggacatagcttttcttgctgaatcgcccttgatatgttttgtccttcctctttggtgaatctaagtaatatcaacatacactacttaggtagcataaagttctcattagtgtttaattgaaattcataaagt

SEQ ID NO: 64226 - DNA, 400 bp, Zea mays
catgcagcttatcccatcgactgcaaattcattttttgaattcaaaaagtaatatttctcaacatataatattatgccgtccaacattcaatataataccattattacctttctggcatgatcattttgttcattgtcaccactctcattcatatttgcgtgatcctgcaaattaacttgtacctgccaacacattttaagctcaatcataagccaataactcaaacctataaatcatttatatgtataaccacaaatcaatatagttgttaaagatattacctcttctaatggacgtatcagtataggtatttgaacattgtccacaccccgttcaagtatattagatacgtcttgaatttcctgaaaaattggttgaaagctcagtatacatcattta

SEQ ID NO: 64227 - DNA, 412 bp, Zea mays
  unsure (1)..(412): unsure at all n locations
tggcgactgccagntcgacctctcgaagcagtactacgtgtccgcatgcatcgctgtgttcggcaagctccagcgcagccgccgcttggacgtggtctaaagcggctgcaccgcgctgtccatcttcaaacagggggacctcatggtcgtcgccaacaacggcgactctcgggttgttctaggcaccgcatctgacaacggcgccatcacgtcatccagctcatcatccaccggaagctcaacctgccacgtaagtcactactgaccagccatgaattcttgtgcgctgggacgacgaccgttgctgacgttgtatgagtgtcctcgaacaagatgtatgtagaggagtagcacatccggtggtgcaacggctaggtgtactaccttgctgatgagcccagggtgcacttcg

SEQ ID NO: 64228 - DNA, 343 bp, Zea mays
cccatgttagtcttagcaattaagcatgtgtcgagttcagctctatcaaaatccactaagtatagctgaccctctaacacacccttaaatgctattgaatcatcacttcttctaaagacagtgacacttgtatcagtaaaaagacagttgtagcccatttgacataattgagaaacagaaagcaagttgtagtctaaggaatcaacaagaaaaacattggaaatagaatggtcaggagatatagcaattttacccaatcctttgaccaaaccttgatttccatccccgaatgtgatagctcgttggggatcttggtttttctcatatgaggagaacatccttt

SEQ ID NO: 64229 - DNA, 365 bp, Zea mays
acagtgacagcgaagcggatagtctagggccacgaaagcgccattgacacgagcaacctccttgcgccaggcctaagtctgtcgcggtcctccacgccatcccaacagaggagtatgggggttcagaggcgcacgagtgtcgcggtgatcgaggcagaccgaggggatgcggagcaacgtgccctggcgacgtccctcgcgagcgggaaacctgccacaatgttggagttctactccccgcgctgccgtctgtacgcctctctgcagggcctcatgcgcgagctcaaagacggtaccagtggcgccgccaatttcgtgctcgctgacgctgaggacgaccggtggctctccgaggtgcgacgtct

SEQ ID NO: 64230 - DNA, 306 bp, Zea mays
caccattgaggcctggaatattttggcgccgccggtttgctggatgttcctgtgtactcctccctgcctatattgggcgatttaccaaaaaaacatcggtccttcattatttcctggttaagacatccgtgggcctaatttgatgatgtccccttttgttgctctcttggggatgaaatatgccttttgtgccccggtcgattggagcccatatggcgatagtctggaatctgctggacctgtgttggcaccggttgagggactaatcagctgtctgtagtgcaactgccaaacaaccttgatgcc

SEQ ID NO: 64231 - DNA, 304 bp, Zea mays
  unsure (1)..(304): unsure at all n locations
cacaaaaactcactgcttcctggaatcttatggccccctcttttctggctttcgatgagtctatgccggaacagctattgcataagggcatggacttcatcgacaagcgcaaatggcgagcaacaatccaaaatacacagtgcaaccaagcgatcgggcgctaccgccagcggttcatgcatagtanggagctcaggtttgggggacctagtcctaaggcgaattctaaaccaagaagggctccacaaactcccctccagttgagaaggacccttcaaggtgatggaagtatgccgacccgggt

SEQ ID NO: 64232 - DNA, 387 bp, Zea mays
  unsure (1)..(387): unsure at all n locations
gagatgcagcttttcattaattctttttttatngcgaaccaggaacggaagtgcgtttggttgcgggacagtcaggacaggaacgttccctggcgttctatctcgtcccttcaattttgaaggataactgagacaacactgagatagtcctgttccaacccctgacactgaaccaaacaaccttatttaagggatcgtcccatctcatctcgtcctagcattgtaaccaaacgtgcctagaagcctgccaagcagcttgctagctcccagcctaagcagcaaccacaacctagccctccaaaattagatgtttgggtggtagacaaatttgcaggaaaaccttcttaaccatgtcaaccgcatatgtggttgataaccaacatagcg

SEQ ID NO: 64233 - DNA, 426 bp, Zea mays
  unsure (1)..(426): unsure at all n locations
catcaggaactataaaactcagctacagatctttaactaagtagatgtttttattagaggccaaggtatgaaaacttcctatcctttcaattgttttaatattctatccttagtgggatgtaccatagtataagttaaattcattgcattataaaatgttcaatagtgcatataactttgacatcaactatatgtgtgcactaatttaaaggaatttatctatccttttgggtttcaagaatgatggttcattttcatccacatataaggatcatcatttgtgaaaccttcccatgtgtttttaatgctctcttttctaagtgtttgaacaaggtccttccaagtgctttcaagatggattcaaaatctatggatataagagtnctggttatttcaatcattgagtttcaatgcgtctcatatcat

SEQ ID NO: 64234 - DNA, 389 bp, Zea mays
  unsure (1)..(389): unsure at all n locations
agcttgcctgtgcctcattcttttatctgtagnccaacggggtcgtggaacgcgccaatgggaaaatcttcacatctgtcaagaagatgctccttgatgaaaaaagggcagatggaccgatttgttacctgaggcagtctgggcactaaacacaactgagtgcagggcgactgggnttactccctttcgccttctatacggatcggaggccatgaccccgcaagaaataaaacatgggtccccgtgaacagttccgtcagccgtccccgacgtggacgagccaacttcaaaggatctcattgacggagactgagtcttcgccctacaggccctaaacaaataccaagcccagaccaaagcatggcacgaccacacagtcatcccgaggg

SEQ ID NO: 64235 - DNA, 409 bp, Zea mays
  unsure (1)..(409): unsure at all n locations
tcctatggcgcccgaggctggacttggctgctttcantctcaccctgacaggtggcacagcagtcggagcatggcatgcagcgctgttttcctgtccggtcagtcagtggagggacgaagtgactgcggtcacttcatccttgtcgactaaagagcgcacgtcaggataacgtgtcagacgatccttgcattgaatgctcccgcaatccggtcagctggcgaagtgatctgtccaaggttgcttctccacgaagcctgcccgagctgggcctcgggcgagtctaaggtgtgcccatctcttgaggggaccctcgggcgagacgtgaatcctcctaggtcggttgtcttcgcccgacgctgggttctagcgaagcgagatcgtgacccttgagtggacggagccttgacc

SEQ ID NO: 64236 - DNA, 306 bp, Zea mays
cccggatcttaagcactgggtgcagctgagatcatttgttttaatgctgcgtatcatgcatactgtcctgtggaaatgtatccgtcaaattcaccacatacaaccgagcataaaggtaagccgggtgctaatgaggactatacattatgcgtggctactgccgtttcagtcgaaactgctgccactgataatgaatgcaaccgaaccttgcgcgccggccgcaccatttatgttgaactatatcaatctgcatatcctatatacttatagcgacacagcttaagcacatactgctaaaaatacccg

SEQ ID NO: 64237 - DNA, 183 bp, Zea mays
ggaaggatgcccgcatgctcgcactcccatagagaaccacccgggcgaagagcccgaggaacccgcaggagaagcccctgagcagcacccggctgcgggaggcaagcgtccctagaccaatctccgcactacacattcttcaatacacccaccgcattacacactcatgcctaaggaccgacc

SEQ ID NO: 64238 - DNA, 71 bp, Zea mays
gatcttaagcgactgagctgcacctggggcctatgttttttactccattattgcgtgcctcctggccgctt

SEQ ID NO: 64239 - DNA, 382 bp, Zea mays
agctttcatccttcttcttcaattcagtgctggacatccccaaggcgaagtacttgggcgaataaatcccttatccaacgactcctgcaattgcatcttcaattctgccaactcagcgggtggcattcggtagggcatcttggaaattggggtcgttcccggttgcaactcgatggcaaattcaatatcccggtctggtggcattcctggcaattcatcaggaaagacatctgcatactcgcagactattgggggccttcggcttccgaaggtcttcaaaaacatgatttgacaatgttttccaagtgaaatatgtgagcaggtatcttcggaatcggatcatgagtatacaagagcacagtcaggacgaagcctgaacgag

SEQ ID NO: 64240 - DNA, 405 bp, Zea mays
  unsure (1)..(405): unsure at all n locations
tcatcccatttgaactctgtacctttctccagtagagaggtaagtggtttcactaacttggaaaaaccttcaacaaatcttctatagtatcctgccaatccaagaaaacttctgatcttggacgcatcctttggttgcttccaatctagtatctcacttatctttcctgggtccactttaattccaccatcggtaacaatatgtcctaagaaagcaacttccttcaaccaaaaatcacacttctagaattttgcgtacagttggttgtcacgaagcttttgtaggactagccttagatgatcttcgtgtgtttcttcattcggagaatatatcagtatgtcatcaatgaatacgaccacaaactgatccagatattccatgaatactntattcatcaagttcata

SEQ ID NO: 64241 - DNA, 387 bp, Zea mays
  unsure (1)..(387): unsure at all n locations
acttatccttttaaattttttatatncaaccaacacctgatactgttttcaaccacaataaatacctgagtaatgaatttaagctatcacaattatgacttgtgtagtggactttttatccctaataaaagccacaccaagaaacaaagtacatccatgaacccctgaccaaggtcaaatatacatgatacatgaagagaatgtttgtggacgacatatacatgatataaaaaaggtggcttcttttgccgtccatgtactgttttcaataggtcctttaaatgccctcacatttccgcacaaagggcttttacatgaattagacaaattattatgtatcacatcacatactccacccagttggttttatatacaccacatctacac

SEQ ID NO: 64242 - DNA, 405 bp, Zea mays
tattgatatcaaatttggagaatgaattttttggatcaagacatgaggagcaaactaataactctgtgtttgcttcaccaaaccgatgattcatttccacacaaattttatcaaccacaacatagaaaatctcagcattacaaccatttgctcttttactgatatatcacgcgactcatctataagcactgagaactgtctttcaccgattccccccatgattacctctattatttcttctacacaacatcttgcaagatccttttggatttctggagaaagcatttgacaattcaatccaccacggtcaaaagcgttttctcacaggtccatccttatctttccaccaatctatcatctctctaaaattacccttgtttaaggacgtagaagattcatcatgtc

SEQ ID NO: 64243 - DNA, 355 bp, Zea mays
atgcgaccggtcttatatatatgctcccaaagcattcggttggatgaaaacgcccaccgcggaacgtgcccaagactctgggttccgttttgctggagtggaaaagaggaagatgaaggacctaacaggtggggcccaattgcagtgggacaagcgtgtaacgcggaggagaaaacggctgacaagcgggtcccacaaatcggtgagccatccggccgatagcgtgatagctgagcgtggggacgtgcgactggggagtggggcaggtcggtcagttgtactggcgaggagcagcgcgcccaccacggagttggaccgtgcaggtgaggtagaattgggtcggaagtatagaatt

SEQ ID NO: 64244 - DNA, 406 bp, Zea mays
tgagggcatgaatctgttagtctgatgttcaaacagaaccagcctaacagtccaacttgggttgagattttcttcacatttctcataagaacatggcttgaatccttaaacaaagttgttctcctataattgggctacaaacttgttgtggtcactctgggcaaaaaccctatgctctgaaagttacaaagccccaaagttgagccaattctctgattttcagacttagaatagaacctaattgaggtccattttgcatttaagtccaaaacttaatgtttggctttcaagtccacacatttgtgaaccaaagaacttaaaatacttatttagcttggtttttgcactttagcccaaaagtggactaattttgcacataggcccctcaggtttagtttagggtttc

SEQ ID NO: 64245 - DNA, 392 bp, Zea mays
agcttaaagccatggtaaggagcatatgtttataatatgcgaattgactcaagcctaactaccggtgcataaggtttacccaaatccaaaccttcgacttgggaatattccttggcccacaagtcgtgctttggtccttggcaccacaccatgctcatcttgctttgttgcggaagacccatttggttcctacaacattttggttaagacgtggaactaaatgccatacctcatttctagtgaagttgttgagctcctcttgcatcgccaccacccaatccgaatcttgtagtgcttcctctaccctgtggggctcaatagaggaaacaaacgagtaatgctcacaaaaatgtgcaacacgagatctagtggttcaccccttatgaatgtcg

SEQ ID NO: 64246 - DNA, 334 bp, Zea mays
  unsure (1)..(334): unsure at all n locations
agctttccccttttggtcaatgcactggactgtttcaaatngggccttaaagtgcgaccctttgctgaagaagtcagtactttggtcgcttcgctcgggacaatccctgatgatgaacggctggtttattttgaagtgcctctgaaccctagtgatgccgacataaatgatatgcttgatctgttagctgaggattcatccgatgctgctcctgatggtacgttggcagtggtgccccctccagaggttgatacaactntggatgtcccaaaacctatcagcactcgcccgaggcgccctacccgaaccagtcagcccgagccttctgctgatg

SEQ ID NO: 64247 - DNA, 400 bp, Zea mays
  unsure (1)..(400): unsure at all n locations
agcttaccaccaagttggttcctgaactatatgggtattctcactattcagttttacatgcagagttccaactaaagcacaatgttctgtgatctaatagtgacacaaagtctcaaaaactttttccaagaaagcaagaaccataaaggacagaggcatcttgttagaggtagatcattacatctttttcacaggtagtgatgctagtaagtcttgaactgatgaagaagggacaactgtttgctgagcaggcttgtacattccactgacaagtttagctaacatctgcacagtataagaacaatgagtggaaaactaagatagcaagagaaatgaataaaggaatgcagaaaacagaanaacaggaaccttagctgattntctgagcacaacaaaacta

SEQ ID NO: 64248 - DNA, 296 bp, Zea mays
ggacattgctcccctgttggagaccaatgccatccttaatgccagggtgtctcccattataaagcatactacgagcaaattttttttcattttcgagctcatgctcggcaattttagcagttaatttagctatgtgatcattttgttgtttaatcatggtaaggtgatcatccatagcttctacattaatatctttacatctaatacaaatagaaacatgctcaatagtagatgtagatggtttgcaagcatttaattcttctatcttagcatttaatttagcattctcatatcta

SEQ ID NO: 64249 - DNA, 396 bp, Zea mays
agctttaagctctttgacaatagtttctttttatctagctttagcaaagatgcaataatgcatgaatgaaattttaagaggctaaactaagtatgaagcaaggataaatgcaaaagacatgctttctcttccttatgtataagatatgcaaagagtgtatataagaggaaagatttaggtacatatgtaaatgataggaataagatttacccgttttgtaccttaacttgtagacgctctcttcattgtgcttttgtccttagtcttgtttgcttaagacctatgctcaatgacaatgtgtggaaatactttgcacaagagagagttctacaactagtgatcttttcaagttattgtagcatatatcacatggacacaagttgataaatgaatcat

SEQ ID NO: 64250 - DNA, 417 bp, Zea mays
  unsure (1)..(417): unsure at all n locations
cactaaaaactcaactgagacggagaaacgcagaagtgtaaactccatanaagatgttcctaaagcaataaatgaagaaatcaacatgaacaaggaaaaagggtaaaattcaattagtcatgttgtttgcactgatcatctctctatgtcatccaagagcaaaaaaggaagaagaaaaaggaggtgcttcaagtgcaaagaattaagtcacttcattgcgtcttgttcacacaaagacaacgattaatgaatgaagagatgttttggatgcaacgataatgaccatatgatcacttcatgcccgcttatgaagaatcaaagacgtgcaccctccaagatgaccctcactaaacaaaaagacaaacagcaagngtcaaatcatgttgagcgacgcttctgctacatgtgtggtgagca

SEQ ID NO: 64251 - DNA, 383 bp, Zea mays
  unsure (1)..(383): unsure at all n locations
agcttcggctttggtcaatcttttggcagcaaaacaatgcaatagcaatgaatgctgtggtaacttcacacctacccgtctgtttatatagcgtcgtaagtgggaaggtggatcgtcaaggtcttctgcaccgaacaaacagtcacccgcactcactgaacggtgggccataaggtccgaaaaagtgaatcgccagggcgtgcgtaactgctgcaagatggggccacctcgcgcgcggattattttaatcgtttctcgccaacgagcttagggaaggttttttcggatcttcggcatcccgaagcctagaagactntgtcacggatcaagctcgttacgaaaaacgatctagcaccgcgaaggggcttactgttggggtatgc

SEQ ID NO: 64252 - DNA, 286 bp, Zea mays
  unsure (1)..(286): unsure at all n locations
tctaaagggagaacacgtgatatgtttaactaatgntaccttccaaaaagatagaccttgtgcagcttgtcaagcagggaaacaagtgggaagctctcatcatgccaaaaatgtgatggcaacatcaagacccctggagttacttcatatggacctcttcggacccgtcgcctatctaagcataggaggaagtaagtatggtcttgttatagttgatgatttttcccgcttcacttgggtattctttttgcaggataaatctgaaacccaaaggaccctcaagcgc

SEQ ID NO: 64253 - DNA, 389 bp, Zea mays
  unsure (1)..(389): unsure at all n locations
cagcttcgcacctntgaactttttttttgcatcattcttcgctgttggccaatagaatcccattctgaagaccttcccgactagtgttctggatgctgcatgtattccacattgcccagcatggaccttctccagaagtcgcttcccagtagatgggagaatgcacttcatgaggacgcctgatgcaccccttctgtacaatgtctctccaatgagtgtgtagtgagccgactgtctggcaatacgctcggccgaattcttgtcatctggttcctcttcattctttatatacttgatgattggccttctccagtcatcagagcctgactcaggttgatctataatattacactcttctgtttgatccattgagatgctcggctgtagta

SEQ ID NO: 64254 - DNA, 142 bp, Zea mays
ttcagcgaagagcgagttctcctgcacagctcactagcccaccgcgcaggtcccaaccggtagcccgggacgccaccgtcccaccaacgtggactaccgctccaagcggagagaacaacggcgacccatcgttgggaaccca

SEQ ID NO: 64255 - DNA, 395 bp, Zea mays
  unsure (1)..(395): unsure at all n locations
agctttaccctgtggactggactataagttggttacggtaggtgtaccttatgcagttgaccatttccaacatttgcgtaatgaggactctagggagaagcctcgtagtgagaccctggccattcacctcggaagtgaatacgggtctagctaacccgggctataagggaatcgcgactcatgggtaaagatgcgccacctctgcagagtgtaaaactgatatatcagccgtgctcacggttatgagcagtctggactcctcacatgataattgaacttgaagatggaaataaatcgagatccgatgatctgccaatggtttgcttaagtggtttaatttaagtgtntttgatatactcttgtacctttggttaatgggaatacttgggattcac

SEQ ID NO: 64256 - DNA, 241 bp, Zea mays
  unsure (1)..(241): unsure at all n locations
taagagactttnttcacgaatcaagctcgttacgaaaaacgatctagcaccgtgaaaggggctactgttgggtctatgctctctccccgaaagtcttataaaaagaagtggtcctcggctgaagctgttaacataagttagcccaagggtcctcttcgtgaagcttcgtcattacaaaccgacttaaacataaaatgaccttttagtccataaaagtctgaatcaatggtgtaagctttta

SEQ ID NO: 64257 - DNA, 245 bp, Zea mays
ccaccggagaaatgtcactcctcccatgtgtgtttccctcaccagacggaataccgagcccccccggttctatccagtgggattcaatagactcattgtattacccgtcatagctttccctagtctactctaagtgtttcattctataactccatataattgtcatacaacacagaaaattctgctgttctagaaccctgcctagcccttgcaactttgtgtcaaattggctttgttaattcgtg

SEQ ID NO: 64258 - DNA, 349 bp, Zea mays
  unsure (1)..(349): unsure at all n locations
catacgggccaatccaaaggggaaagggcccgcgcgcgcccgcgccctggcagctttgcagaaagggcctctggtttcttgaatatcccgacaaagcccaaggcactatttaacacagccgctgacaattgcaaagacacccttgcacttctatctattctcggtttgaagtccccgacgacggtgaacgcggccgcgctccggtgaacaactgtaccggccgaacggggccatgaccggcgctcttgagcgacagacaccaaattagacctgccccgacatttnccctaagtcattgcatgattgtgacctatttcttctgccacgaggacgcgaaagcatggacata

SEQ ID NO: 64259 - DNA, 290 bp, Zea mays
tgcaattcaaataaactcgacaaatctttgaatgtttaaaaagacgagtgcgatgcaagccactaaaatggcacaagaaatgcttacaatccaagctcctatttatatgtccaaagccccacagtttggtgggtcccacaagacaatgtcatttgctattctagcgaagggaaggtgctttttcggaccttcggctaaaggccttcgttcacgtcgcagtctaaatttggtacaaagaaaccaatcaatactggcaagagctactggtggggggctttcttcttccaaag

SEQ ID NO: 64260 - DNA, 378 bp, Zea mays
agcttctaaagggagaacacatttttggactaacaaatgttcattttgagaaagacaagatttgtagcgcatgccacgcagggaagcaagttggtgttcatcatccacacaagaacatcatgacgactgaaaggccactcgagctcctacacatggacctattcggcctgatagcttacataagcatcggcgggagtaagtactgtctagttattgtggatgattattctcgcttcacttgggtgttctttttgcaggaaaaatctcatacccaagagaccttaaagggattcttgagacgagctcaaaacgagttcggcttaaggatcaagaaaattagaagcgacaacgggacggagttcaagaactcacaaatcg

SEQ ID NO: 64261 - DNA, 352 bp, Zea mays
  unsure (1)..(352): unsure at all n locations
tttgtggaattgggagaggatttgatcacttgggtgtgttttgtattgaatgtctagctcttgtaagtggttggaaggtggaaaacttggatgacttgaatgtggggtggttgggggtatttataaccccaaccaccaaactagnccgttggtggaggctgctgtcgcatggcgcaccggacagtccggtgcgccagccacgtcaccagggcgttgggttccgaccgttggagctctgacatgtgggcccgcctggctgtccggtggtgcaccggacaagtcctgtagactgttcggtgtgccacccttgcgtgctttgcttctctgcgcccgctggcgcccatttaatgca

SEQ ID NO: 64262 - DNA, 391 bp, Zea mays
agcttgtgaatggcttgccaattttacagaagctgcaggatgattgcccacatattctggtatgtagggagagtgatacgaagcagtatgtaagacttgctttggctgattctaccgagcttctgcttcggcaatctccttttgcttcaaaatagtgatctggcaggttcttgtagtgtggcctttgtcctcaccataaaataagcaataaatttttctgggctgatccccatatcttcctccgaagcccctgccgcctctgccccttggagctggtggcctgaaggagctttgctgctgtgccgaagactgtgaggtgtgttgtgacctctaaagctggcttcctttgtcgtcattctgactggagctgtggattgatctgacatgccta

SEQ ID NO: 64263 - DNA, 367 bp, Zea mays
tgggaagattcttcatcccaacatgggcaagttgacgatgccagagccaacccatattagtcttagcaattaagcaagtgtcaagttcagcttggttatcagtaaaaccaactaaatatagctgaccctctaacactcccttaaatgctattgaatcattacttcttctaaagacagtaacacctatatcagtaaaaagacagttgtatcccattttgcataattgagaaacagaaagcaaattctaatctaaagaatctataagaaaaaaattggaaatagaatagtcaggggatatagcaattttacccaaacctttgaccaatccttgatttccatccccgaatgtgatagctcgttgggatct

SEQ ID NO: 64264 - DNA, 253 bp, Zea mays
  unsure (1)..(253): unsure at all n locations
aaaaaaaaaccccccccccccncnnaaacaagggaaaaaaaaaaaaaaaaaaaaagaaacaaaaaaaaaaaaacaaaaaagaaaaaaaaatagaaaaaaaaaaaaaaaaaaacaaaaaaaaaaaaaacaaaacaaaaacaaaacaaaaaacaaaaaaaaaaaaaaaaaaaaaaaagaaaagaaaaacacaaaaaaaaaaaaagaaaacaaagaaaaaaaaaaaagaaaaaaacaaaaaaaagaaacaaaaaaa

SEQ ID NO: 64265 - DNA, 214 bp, Zea mays
aggggaggaaggggaagaggaaggggaaggggaagaggagggaagggaagggaagggaaaggaaaagggagaaaagggaaaggaaaggaagagaaaggaaggggagggaaaaggagggaagggaagggaaggaaagagaagaaaaggaaggaaagaaaagggaagggaagggaaggagggaagggaagagggcaagggaaaggaagggaaggaa

SEQ ID NO: 64266 - DNA, 362 bp, Zea mays
atcttcatgcaaagatatgctggatgaaggattgcttcgaacgcattgagagtaccacgaccaatgattgcatttgaagaggtattccatgtcaacaatatcaaacacaacttgttcagtccttgtgtctgtgatgaatccgaaagttactggcattgtgaatttgccgagtgctacaatctgccttcctccgaagccacaaaggggatgtgtggcatcatggatcttgtcttcaggctctcgcatcaatctgaacgcctctgcaaatatgatatcagtcgcactacctgtatcaaccaaaacattgtgtaccagacatcctctgatcacacaagagagtaccatagcatcattgtgcgggt

SEQ ID NO: 64267 - DNA, 452 bp, Zea mays
ctaagctttaagggagaacatggaaggttaactaacgtgctattctttaagatagaccttgcgcagcatgtcaagcatgtaaacaagtgggaggagcacatcacaccaagaatgtgatgaccacatcaagacccctagagctgctacatatggacctcttccgacccgtcgcctatctaagcataaggggaagtaagtatggtttagttattgtggatgacatctcccgcttcacttgggtattctttttgcatgataagtctgagacccaacggaccctcaagcgcttcctaaggagagctcaaaacgagtttgagctcaacgtgaagaagataaggagcgacaactggtccgagctcaagaaccttcaagtggaggagtagcttgaggaagaatggatcaagcacgagttcttcgctccctacacaccacagcaaaatggtgtggtatag

SEQ ID NO: 64268 - DNA, 343 bp, Zea mays
gaggagcagaagtctttgaaatcttggttgtcgtactgcttgtcgttgtcgatcgtgagtttggatggtactccgaagcggcaaacaatattttgccagaaaaatttctaggccgtctttgatgtaatggtggagactgccctcgcttcaatccatttggtgaagtattcaacggctacaaaggtgaacttgaggttcccctgagccgtgggcaggggcccgacgatgtctatgccccagcgctgaaagggccacgtgtgggcgatcagcttcgtgaactgcgaggggcgtcccaatcgtggggaaaatttctgacaggcttcgcatgatctgataacccgat

SEQ ID NO: 64269 - DNA, 284 bp, Zea mays
  unsure (1)..(284): unsure at all n locations
tcttcnaacgctctctgctgaactggtccccatcgaaaaacttcggttgacttcagcacttcaaacaatggtaaacttctctctgctgatctagatataaatctgctgagagatgctagtcttcctgtcaatctntgagcccccttctctgtacttgtggatccattcgaaagatagcttcgatcttattcggattagctgcaatccctctctgtgaaactagacagccacaaaatttccctttcttcacttcgcagacacatatctctcgattcacctttaac

SEQ ID NO: 64270 - DNA, 418 bp, Zea mays
  unsure (1)..(418): unsure at all n locations
cacgtgatggtgtgactatgtgcttttaaaaaagatagaccttgggcagcttgtcaagcaggtaaacaagtgggaggagcgcatcacagcaagaatgtgatgaccacttcaagacccctggagttactacatatggacctcttcggacccgtcgcctatctaagcataggaggaagtaagtatggcctagttatccgtgatgactcttcccgcttcacttgtgtgttctttttgcaggataagtctgaaacccaaggaaccctcaagcgcttcctaaggagagctcaaaatgagtttgagctcaaagtgaagaagatcaggagcgacaacgggtccgaattcaagaaccttcaagtggaggagtttcttgaggaggaggggatcaagcacgagttctncgctccctacacacctcagc

SEQ ID NO: 64271 - DNA, 442 bp, Zea mays
  unsure (1)..(442): unsure at all n locations
acactananaacactcagagctttaaagacatgatagatccatagataacagctacattcattaatccacatggatatgtcgngtagagataaattgataaaacaagtgtcatgatcctcggagaagggggtatgagaatgaccagaaatgagagatttatgcaagatcggcatccgatacttgagaacaggttatagcaaataactaggtaatagggcagaatcattaaaggatccagagatctagatgataaagccacaacatgattcgcaagggaaaagattaccagatccaggtgaaaggagaggtatgtaaacaggatcagctangatgatcaacagaaatgctatgaagtttttggcgcaaggatctatggaaagaaacatggccttgatatggtttgtgcaactagacgccgacaacatntctttttgacacaac

SEQ ID NO: 64272 - DNA, 359 bp, Zea mays
  unsure (1)..(359): unsure at all n locations
ngtggtgccctcgggcgtctcgtcacaatcgaagtactctttcttccatttggaagcctcggggccgaacccttcgggcgttgtagcatcgtatagactgctgatatcgcgccaagtgtagtaaggccacgttccgagcctcttccagctggtccaacgaatcttctcggctggtctggttgctttggtcgacgtaagcctttgtcctccgggaaccgtattctaagttcaagggtaggatgggctcggtcccatagactagaataaacggcgagaaaccagtggcccggctcggcgtcatcctcagactccaaaccaccgagggcagctatgttatccaccgcttgccgaacttattg

SEQ ID NO: 64273 - DNA, 363 bp, Zea mays
  unsure (1)..(363): unsure at all n locations
gaggaccttcgccaccggaattgcgcaatcgtgctcactggagttcggaaccccaccggagcacgtggaccgggtgagactccgcaccattttccaattcactgcacgcatagcctctacgtcaccccgtggagctcctcgtgatgtttaattgaactataccgtcgtggtttggccggagcaagagccgccgacgaccttcgccgnctgcgctcgtggccaggatcgctccgaccacctctgacgccgacccgcacaccgacgtgaccgccgtgacctcccctacgtcactcacaaccccgctggagctctactgccgccggtaagcctcgccgccgtaatctatgccgcgggtactggtta

SEQ ID NO: 64274 - DNA, 438 bp, Zea mays
  unsure (1)..(438): unsure at all n locations
cactaagaaactcagcttcgcaanagaagaagagtctttatgttttgacttttagaaaagctcggcagaaagaaatgtagtcttttatgttctgtacaaaaaagaaaagcttccgcagaaagaagaagtagtcttttatgttctgtacaaaaaagataagcttcggcagaaagaagaagtagtcttttatgttntgtacacaaaagcaaagcttccgcagaaagaagaagcagcctttaatgcttcgttgtgtacgaaaagaaaggaaggtgtttttttcgccttcggctcaaaatattgatttcgtccacatcaaagcgtcttaataaaagggtaaggatatattacaaggtatgtacaaagttccttgagaacgggttaattgtatatacaacaagttgctacaattttcctcagtatttctagcctactactact

SEQ ID NO: 64275 - DNA, 431 bp, Zea mays
  unsure (1)..(431): unsure at all n locations
atgaatgttgtggtaacttcacacctacccgtctgtttatatagtgccgcatgtgagaaggtgaatcgtcaagatcttccgcaccggacaaacagtcacccgcactcactgaacggtgggccacagagtccgagaaggtgaatcgacagggcgcgtgtaaagatggggccatttcgcgtgcggattattttaatcgtttctcgccaacgagctcanggaaggtgtttttcggatcttcggcatcccgaagcctaaaagactatttcacggatcaagctcgttacgaanaacgatctatcaccgcgaagggctactgttgggggtatgcttcgtagccgaagattctaaagaaagagaataccatcggcagatcctcttagaagcaatgctgaagctatcacctataaagcttcggcacagtgacagatctc

SEQ ID NO: 64276 - DNA, 472 bp, Zea mays
  unsure (1)..(472): unsure at all n locations
tctaaatacagttcgaaggttggaggcttctttctaaggtttctctgtcaagaacattccaagaggcagaaatgagcatgcagatctactagccaaatcagcggctcaggggctccctctaccttccgatgtattttttgaaacaataaaagcaccttcggttgaactcatggagagagcagtactctccatttctccaatacataatgaagattggaggactgaaatcatatcttttctccagggcaactgcctctcggacgacaaagtttataataaaaaaatggaagcaagaacaagaccgtatatcataatagaatgagaattatacaaacatggagtttgctccccccttctcaagtgtttatccagaaccgaaggtatagaactaatgaaggagatacatgcaggattgtgtggatctcatattgggtctagacctttgctgggaaagatnttagacagggattta

SEQ ID NO: 64277 - DNA, 435 bp, Zea mays
tcttgtagctgctgccaaaaatgggaggtgaactgcgttcctcgatctgacactatcttcttcggcacaccatgaaggcagactatccgtgacatgtataactcagctaacgttgctccggtgtatgttgtcttcacgggtatgaaatgggccacctttgttaagcggtccacaaccacccagatggaatcataaccggcccgggtacgaggtaggccaactataaaatccatcccgatctcatcccacttccactgaggaatccgcaatggctgcaacaatccggcaggcctctgatgctctgctttggttctctgacagctatcacagatggcgacatattctgcgatctctcttttcatgccataccaccaaaaccttcttttaaatcctgaacatcttctcgctcccagggtatggagaagctgctcatga

SEQ ID NO: 64278 - DNA, 415 bp, Zea mays
  unsure (1)..(415): unsure at all n locations
tgcatcgcgcgcnctctccgtcgccgggagatggcagctccagtttctccgccgcctcaacatccacgagtaccaggtgcctagcgctcccagattggcactttgccctcccattagtattgcgtgggatttattcgtgctattttggaggctaggactgatggattagggtttgtggattgtttgggtctgcagggcgcatagttgatgggtaaatacgggatcaacgtgcccaggggcgcggcggctgggtccgtacatgaggtcaaggacgccttgaagaacatgttccccagcgagaaagaggtgatgacgccatagcttcctcatcgtctgttattcgacccatcattatgttcatcttatcgcgtcgtgatccaaaatgccagtcgtccattgcttgggtgtgacagtc

SEQ ID NO: 64279 - DNA, 393 bp, Zea mays
  unsure (1)..(393): unsure at all n locations
ttttagtgtctccgaagatgtctgaatataagaagactgctgctgagatgaagctgagcctcgacgaagagaaaaacttgnggtttctcatagcgatgtcaaagaccaacacagaaaaaattaccaaggagattctggaaggtttgtctgaagatactggtgacagtgacagctatgatgtggacagtggtggtgaagactccgaagatcgtccctggcgaccaagccattcagtttatggtaaatcaactatcaaacagaatcatcttgtcaacatgagaggaaggtatttccgggatttgtccattgtgagggccgacgaangggaaaaaacttgcccacaccctgaagagaatgaagtcgtagtgtaccgaagctttttgaaagctggac

SEQ ID NO: 64280 - DNA, 463 bp, Zea mays
  unsure (1)..(463): unsure at all n locations
gcttacatgtctcgtatgattcataatcaaacgaattttatagcccatcataatgaagcttcttcatgcgattctcacttatatgacccaaacgacagtgccacatgtaggtaggacttaaatcattaggccgaggccttttagcactaatattacagataggtgcatcatcaagatttaaaatgaataacccattcataatggatgcaaaagccacaaacatgccattcttagagatcacacaaccattggtttcactcgcaaatgaataaccatccttcatcaaacatgaaggagacataatgtttcgactcatactangaactagataacaattatttaactccaaaataaatcctgatgggaggtggagttgcatcgtcccgacggtcaacgcagcaactcttgcattatttgctacccgggaatcaacttctnctcttttcacgcttctacttcttat

SEQ ID NO: 64281 - DNA, 480 bp, Zea mays
  unsure (1)..(480): unsure at all n locations
ggtacaccgcanatccagtatcgcccgctacttctgacatgataaacacaaacgcgcattccaagagcggtgaggggtaaaaaaaaaaaacaaggcaggccgcaaagccgtggaggcacaggtcgacatacaactcactcacaatacccagagatttgcatgggatagaagacgaacaaaaagcagaccagaacgtctacttgctagccgattttgacggggaaccgtgaccatcattggctaggcctgacctctggagagcttctacaatctctgccaccgcatgaccgctcctgtcgaggacgccctccagtgccttcaccttctccagcagctgttccgcgttcgtgtccgcgcaactcatcagcctatccgcagtcttcagcgccgcgcacagctagaaggcagacatgaacatagcattagtaatcacatggaacaggtaccagtattatatatacannggaatggagggggatg

SEQ ID NO: 64282 - DNA, 395 bp, Zea mays
  unsure (1)..(395): unsure at all n locations
nttgccaagcagagtnttggatctggcccttatatatgttataggtgtagtcctttaggtacctaaactagaaagtactaagtcagctattctagggcagtggaaggtgtaggcttacggtacgggaacaggctaagcggctacccagctccggaccacccctgagaatgtggacatttcctttagactaagcccctaccagtctatactntgtttagcatatgaggggatcacaaaataagcgacattgctagttgcataactcagatttcgtgataacaacaaaaatgataatctcgagcgggggtagaaagagaaacatgcgtaggttaaaaatgatagagccgatacgtaaggatcgtaccaagggaaaaacctttcttcatttcttgatg

SEQ ID NO: 64283 - DNA, 405 bp, Zea mays
  unsure (1)..(405): unsure at all n locations
actcagctgtattctagcttacttggccttggatctctttatttttgaaagcattgcccgaaaatcggccttgttttcaattgatgtcattgatgcgatatgatgtttgatgtgatgttatgatgtatgatgcgatgatatgatgcaaagaatgatgctaatgtatcgtgcaaatgaatgcccaaacacacatatccgaagcttcatccacaaccttcattccctaaggaatgactgaaatctctttgccgtttacttttcggctacactgtttatttttcggtgtaagttctgcattccctaagtaacgtcttttgaacttcttcgccttcgattntggcggtattcgtgttgactnttcgcgttttggcttatatttcggcggtatttagctctacattccct

SEQ ID NO: 64284 - DNA, 194 bp, Zea mays
  unsure (1)..(194): unsure at all n locations
tggacctttcaaaaaagctcaaggaggatatacccatgtattggtggcgatggacaaattcactaaatggatagagttccagcccacggcttctttaacctctgctaaagccgtggaattatacaaagcataatattcagattcggggtaccaaacagtatcatcactgacttgngatccaacttcaccagttc

SEQ ID NO: 64285 - DNA, 385 bp, Zea mays
  unsure (1)..(385): unsure at all n locations
ntacccattcattaattagaanagggccttgttgtttgtattacccattcagtaatntatccaacacaaactccctcaatgtcatgctgcttgctacttgttgacgctgcaacaaattggccttttttgggactactccactgctgcttgtttcttgtgatgccagcactttaggctaggatagatgtttatcatgttttcctatatcttgatgtacatgtgatttaatgccagttgtatatttatgagaattttggtttattctgtaggattccggctctcatcaagtgactactccctctcacgctgactttgcgcacagatgtctcaattctagtggtggagctacgaacaacaatctgatgtcctgatcgagagcgatgga

SEQ ID NO: 64286 - DNA, 372 bp, Zea mays
  unsure (1)..(372): unsure at all n locations
tcgntattttctcagtctcaaccttaagtgttgcttcttagcttcgntctcctgagtgaatcgactagagttttccttcaaaagtgcttgagcattcaccagttctttaccccactccttggtttgagcttgcgcttcggcaagggacccttgggctaaacatagcatttcgtctttttccttcaaagagtcttcgaactctntgaccttaccttctaaacctttgataataatnttgttcttcctgtcctcatcatcttggtgctttttcaaagctttgctcagcaacatactctacaaaaacgaactcaaaattaaagatatttaagctaatacaaacacatcagtggtaacttatagaagggttcttac

SEQ ID NO: 64287 - DNA, 478 bp, Zea mays
  unsure (1)..(478): unsure at all n locations
gacctctgctgtccagctaaacctaattcagcatccttactcccactaagcactaatactgatacaggcacccggtagatatttgacagttgttgtgcctgttcgttccagatctttttctttcttttcttttttccaaggtcaagaaaacttcagcttcctacgccaccactactgcgaacgcaaggatgaaagaagcggaaaaaaaggtggaagccgaaagcaacacggcagaatcgtttttttcccctgcgcctctttctgcctgcggctctctttgacgcgcagcccctcgctctttttcagaaatttgtatggattctagtgcctttcatttaaggccccgtttgtttcctttcatttcgaggaattggaatcttactaatggagtaggctattcttttagaatatgacattccaccactttccaaagttatcatataagcctacctcanattcatggngtgagagatggaaa

SEQ ID NO: 64288 - DNA, 204 bp, Zea mays
tctaactcatgctccgcaactttagcatctaattatgctatatgagcattatgatggctaatcataccactgtgatcatgaatagcatcaatgttaacactctctacatctagtgcaaatggtaacatgctcgactgtatatgtagaggcgttgcgcgaatctagttcagcaatcttagcatgtgacatgtcattctcatctct

SEQ ID NO: 64289 - DNA, 257 bp, Zea mays
  unsure (1)..(257): unsure at all n locations
aaccacccagtggcgctacaggatcacgattgataggagttatttgagtctgtcacaatctcntcgcgcggtcttcgcactatattactctgcatctgcgcatcgccaatatagcattatgcatcacacatccgtgctatattgagactcgtattctcttccgctctgttaccgtgtcgttcgcagcggttaaaaaagctcgtgtactccttcgtactaatctacccctagcctgttgagctcactctgaatagcca

SEQ ID NO: 64290 - DNA, 457 bp, Zea mays
  unsure (1)..(457): unsure at all n locations
ntgtctttngtgtatggacgacgtgcggntntaggctatggacatggagttgtatcgtcaccaaggtgccagtgtcagaatgcctggtcccgaggttgagctgcgccaaaaccgtgtcaaaaggatttggtttgagttcaaattttcccagaatgcgttcaagggtaattggcacgactttgatatttggatcttctggctttgagtttggaaaagcagagaacacagatgatctttgaggagaggtctgaaattcagaaattcagaaatctgaatttctctaagggttcgttgatcaaaggctgttctggggatttaattgagttattttggctaagccttcttaacctttcttggtgcttaataaatatantttaacttatantaatggctcaactcaaaatattaaacctttcatcctcttttgctattttcttgaatttgttcatggggtcac

SEQ ID NO: 64291 - DNA, 323 bp, Zea mays
  unsure (1)..(323): unsure at all n locations
atgcggggtttctccggttntcagtgtttttactgtgaaaataaaatgattcttataaaatttctgtatgttttctcagaaattcctgcattccaaagaaggttttagaccgagtttgttaactatagattctggtgatcagacgaattttatgtgatatagatccaaacgttctattttatctgtcttggataatgtgccttaagaaagattataattattaatcttctctcaaatgttcttggatagagtgccctgttcaaattctaaaaaacggccggccctattcacgtgtttattatgctcttcagcctgctccatat

SEQ ID NO: 64292 - DNA, 437 bp, Zea mays
  unsure (1)..(437): unsure at all n locations
tgtcgtggaccagttaanacagatcaagtaccataaatattattcgatgcatttctgttccagttatttgaatactaagacgaatgcaaagaattaagaactcataactattcatacttaaaaaatataaagaaattttacattatcactgcttcaaatgtaaaaaattgtaaacaagttttcgcacattatgtcgtgttgtgcccagcttatcgcccagcgccagcaaccactctagggtcaccttgttgtgcacgtcatactcatacttctatatggtggtgtgatgccacacgatcatgacgggaggatgggcacccaagcgccctccaagaacttgatcagtgacgtcgagaagaagagcgcctccatggaggcgaagaagaggaagaagtcgagggccagctatggggagcggtcacaacacaacatgttaa

SEQ ID NO: 64293 - DNA, 453 bp, Zea mays
ggaagacaagtttgatggcgttgaattcttacacattcttcgagccataaatgaagaggcgaatgttctcgcaaaataagctaaactcttcgagctcactagttccaccatgagtttttctctgagtgttacatgctccaactattcagaataatacaatatcttcctagtttgagtcatctaagaagacaaacctcgagtctttgaagactaagtcggtggaggttatggtttggctcggattggcatacttcttttgttgaatatttgtaggacaaggtcttactattagataagtcactaacagttcgggttcatctaaaggccaataccttcgtgcgagttcacgaggaacccaccacatgtacttagaccaagcttcatgtagatagagaccagtacagatgagtccatgggctcgaccgagagtggcaggattcgaatgtgaagact

SEQ ID NO: 64294 - DNA, 458 bp, Zea mays
  unsure (1)..(458): unsure at all n locations
tcagctccatctatgttatggattgcttgtgaatctgtccagtttccttcggcctttctggcagcttcctgacttccatgaatagcaataggcccttgatccgaaggtatcttcatgcaaagatatgctggataaagaattgcttcaaaagcattgagagtaccacgaccaatgattgcgttgtaagggtactctatgtcaacaatatcaaacacaacttgttcagtccttgtgttgttgataaatctgaaggttactggcatcgtgatcttgccaagtgctacaatctgccttcctccgaagccacaaaggggatgtgtggcgttatggatcttatcttcnggctcttgcatctgtctaaaggcctttgcaaatataatatccgctgcactgcctgtgtcaaccaaaacattgtggaccagaaatnctttgataacacaagagataaccatagcatc

SEQ ID NO: 64295 - DNA, 431 bp, Zea mays
  unsure (1)..(431): unsure at all n locations
ntaggtaagtgtagtttgggatggtcataaacctaacgtatcatggtctctccagcatggtgtggtaggtgcctcagaaccccactacctcaaacatgaggacctcatttcggaagtcggtagcagtcccgaagccgacggacagatcaatctgcctaagggagtgtaccctctttccaggggtgatgccatgaaatggcgcagccccgaccctaatctaggaattccaatccccatgagctccaaagtgtctgcttagatgatgttgaggttgttgcctccatccatgagtaccttggtgagacgagtgtttccgatgatggngtcgatgacgagcgggtagttcctaagatctgggatgtaatctggatggtcatccttatcgaaggtgatggcgtggtcgaaccaatctaagtagactggcaccacta

SEQ ID NO: 64296 - DNA, 332 bp, Zea mays
  unsure (1)..(332): unsure at all n locations
ggagagcttctttgatggaaagtttgctattgcaagcaaaggaaaataactcatgatattgatgagccgggatgcccctattccacatatcttcccagaaaagaatggttcttccatccctgataattgnggcagccagtcccttgtaatcttggacaagagtaagcaagctnttccaccanaaggagccaatttttgagcaactangtagcctgactgtcctgtaatagttgctccaaaccaggttaacccagggaatattcgtgattgtgaanaacttgtgccaaaacttcagaacaanggcttattgtgagtctctaatcttaccactc

SEQ ID NO: 64297 - DNA, 414 bp, Zea mays
  unsure (1)..(414): unsure at all n locations
ntaaatgtgttgtcatcaatcaccaaaaatggggagattgaaagtgcattcatcccttttgtgagttntggtgaattggataacaacacatttaaaggtctatcaagtttgctaagtgttgaacaggaaatttagtatgatgaacatacttgaatagtgtataatgatcagtgaacaaggttcaacacaaggtcaaataaccagtgagacaatgcaaatggatataatatggtctctatattggtttgaatatatggacaagtcctgagaaatcactatgcataaatatgatcataatagaggttgaagtgattaagaggattggtcaagccaaagtgaataagatatgaggaatcgtgaattggctcgaccatattactattagtccatatctgaatatatgagaatcaaact

SEQ ID NO: 64298 - DNA, 197 bp, Zea mays
  unsure (1)..(197): unsure at all n locations
actaagctgctgctatttcacacactacacgcctgcgcttgtctaactcggagtgccacccagtgnccacgctgcctgccatggtcgatcgtctactatcggcaggcagtccttttttggtgtggtgtgtgtgtgtgactgggtgcctacgtcacagcttccgtgcagggtccatcggcatgcagagggggatcccc

SEQ ID NO: 64299 - DNA, 323 bp, Zea mays
aagctacgataggtaatggcgagcgcttcttatacccttttcgactcgccggcgagagcgcgccagcgcagtgatattacacacagctggtttggcggcgttgttcgtcgtacgcctataatgacggcctgtgacaactgacatatcacgacgtgatggaggactgctccagaaagacacaaagaggaagaacaaaggcgcacaactgagactcgatgagattaggcaactagtaatatttgggcttacccagaggtatatgccctctcaaactactccatacgctttttctttgcacctgagctgagccccgggggctgtca

SEQ ID NO: 64300 - DNA, 489 bp, Zea mays
  unsure (1)..(489): unsure at all n locations
actaagcttcaaaggtgacatcttcagactggcctgatagctattattatatgagaactcagcatatggtagaattntatcccaacttcctccatgctgaagggcacaagctctcaacatatcttccaatacttgattagtcctttcagtctgtccatcagtttgagggtgataggcagtactaaagttcaacttggtgttcatattctcatgaaagcttctccagaatcttgaggtaaactgtggacctcgatcagacacgatcttctttggcactccatgtaaacacacaatccgggtcatatataactctgctagttgagaacctttataagtagtcttgacaggaatgaaatgggctactttagtcaatctatccacaatcacccatatagagtcatatcctttctangtgcgaggcaatctagtaatgaaatccataccaatctcttcccactttccaatcggtatcttaaagtgggtgtagtg

SEQ ID NO: 64301 - DNA, 480 bp, Zea mays
  unsure (1)..(480): unsure at all n locations
tcggcacagtgacaaatctcaagacgaatgggtgaaccgacttatagatgaaatgacttacagacccgcgatgttctgtgtcattattgtagtcgattgtaaggggcataaatgtaattttacacaggctgcgccctgtgcctataaatagatgaacaataccactgtactgttcacgcaatctggtaatcgctagcacattacgctggaattatagcttttcgccaagacaaaggtataaatgtacctaaatattatgttctaatgtttaagttcatatagtgaaatatatgaataatgttatctatttttagtatatctttctataatggtacatgttttatattgtattntatattggatgataaatctgatcacgaaggtgtgaccttcgagatatttatgctcatggccttcgtccgaagctcattaaatccttgcagagataatgcttcagcggatgaagggcaataatattta

SEQ ID NO: 64302 - DNA, 410 bp, Zea mays
  unsure (1)..(410): unsure at all n locations
ctaagctttcgcgatgtgtgtaagcacttgctttccagcttgacatgctctacaacgctcgtccttttcaaatacaacatccttgaatcctctgaccatgtcgtttataatgctgacttgagtgtgctcattccaacatgtgcaagcctcctatgccaaagccatacatgtgacgctttggtaanaagacacgttcttaactctgcatcttgagatgtgaagatcactaactagagatagtagtgtctagatcctttgtaccccatcgattcatcatctattcatgagaccatatcctatggaggattgcatgagcgatgacagccaagatcacagagttgacccactgatgatccacttgagcttagacgtgcaactcctagaacatctcgagtggatatatcatatga

SEQ ID NO: 64303 - DNA, 414 bp, Zea mays
tctagacagtggtatctcaggtttgatcagactataagtatggtttagagggttacaatgaagacaattgcatttctgaaaagtttaagaatggaaagtacatcttctttgtcttgcatgttaatggcatacttttggctagtggtgataagaatctactagcggaaacaaagaagtttctatcctcgaactttgatatgaaagacatgggagaagcctcctatgttcttagaatagaaattcataaagatagaaagaagggagtattaggactcgcatagagacgtacataaaaacatactaaagaggtgcaatatgcaccaatgtaaggctttgcctgcaccaatagtcaatggtgagaagtttgggaattattagtgccccacaatcagtatgagaaaacaaaggtagtat

SEQ ID NO: 64304 - DNA, 453 bp, Zea mays
  unsure (1)..(453): unsure at all n locations
tcttcaccatgtgatcatggttatcttgagaatgttgatcaatgctcttcccttntagttgtgtcaagctcacttttagcctctcattttcttctttgagcttttgatatgtatcatcttttgttcctgcaaattctagctcaaagggagatttgcttgtcgacggacaacaagcattagcacatggtaatgtagtttcaatttgaatacatgtgcatgagtgaggttgtagggattttaagttttctatcacaacctcatgagcaatatttaatatgatatgatcatccataagattttcatgagaacatagaagcatatcatatntttcttgagaagctagattntcatcttttagcttttctacttggtccttaagcaaagcatttctatttactaattaagcgatacaatgtanagagttatcttgctcaattgaaatcagtttatacc

SEQ ID NO: 64305 - DNA, 378 bp, Zea mays
tgattaaaggcttaaagaaaatcatcgagcaatgcacctcctcaacgtctgaagcacaaccggtggcattcaaggcgacggaggaaaagaaggaggagtctacatcaagtagacaacccatcgacgcctccaagctcgacaacgaggaaatggcactcatcatcaagagtttccgccaaatcctcaagcaaaggagggggaaggattacaagcctcgctccaagaaggtttgctacaagtgtggtaagcccggtcactttattgccaaatgtcctatttctagtgacagtgacaggggcgatgacaagaaggggagaagaaaggaaaagaagaggtaccacaagaagaagggcgtcaatgcccatgtgtgccgcgagt

SEQ ID NO: 64306 - DNA, 411 bp, Zea mays
  unsure (1)..(411): unsure at all n locations
tgtgaaggttcttcatccncacatgtgctaagcggcgatgccacagccagcccatgctagtcttagctattaagcatgcatctagaccagcctcttcttttgcaaaatcaactaaataaagtttgccgtctaatacacccttaaaagctagtgaaccatcacttctaaagacagacacatctacatttgtaaatagacagttataccccatgttgcataattgactaatagatagcaaattatatccaagagactctactaaaaacacattagatatggagtgctcattagaaattgcaattttacctaacccttttaccttgccttgattcccatcaccgaatataattgaatcttgggaatccttattcttgacgtaggaggtgaacatcttcttctcccccgtcatat

SEQ ID NO: 64307 - DNA, 361 bp, Zea mays
tcgtctggaccatgcttctgtatacccgcaacctgattccgaagatacctgctcgcatacttagaaaacattgtcaaatcacgtttttgaggaccttcggaagccgaaggcccccaatagtagcccctcgcaatattaatttgctgtaatgataaattcatattgcgatatggacgatggccttaagccgaacgtccgaaaaacaccttccctttgctagaatagcaacagtctttgacaagcgggaccctccagtttcaacgctctgggcgtataaataagagctcatcccgggtttatttggtacgctctcttgccaactgctattactcacccaacttttagcctgcgcgcaacaacg

SEQ ID NO: 64308 - DNA, 239 bp, Zea mays
  unsure (1)..(239): unsure at all n locations
gtatacacactaacaacgagagtagacgacaatgttntacaaatgttgcatacacaattttatactatctactatctcaagtttcattctatgacatgtaagcatcatttctttcagaaacatgtccctgcacatcgtcaccgtgggaggagagttgtcaaagatccaactgtttcagcatttccaaatacaccacaacatgagtattatggcttccgttctccatggttntataaact

SEQ ID NO: 64309 - DNA, 353 bp, Zea mays
gggcgtggagcggtggcgatagtagcgtgtaccctccgtggcaagaggctggacggtggtgtatctgtgctctcggttggcgtgaacctgatctggtcttaagaaccctgtggtcgagttgacatatgcaagggttaagtgctacatatgtcgtgtggctagagatcctcagctgagtaaatcgattcgaatcgccgttatatccccggagagtggagacttgatcactgacctgcaacctaagtcaggatgtgaacctcatgaataaaaatgatgttgtattgatgagatggtaaaattagaccagatgcacacagagtctattaatacttaatttggcgttaacatattga

SEQ ID NO: 64310 - DNA, 373 bp, Zea mays
  unsure (1)..(373): unsure at all n locations
gcttcgcgggagagggggtttggcctggagtgagccgctataattatcctcttttctctccctgngaaggccctgtgcatcccctcttatagatacaaggagatgatccagctgtacatatgggggtgtagctatgtgcaaatgtggtaagcggagaagtgcttgagccatgtagaagcgtagctagcggtgcggccctaggtcctgctgacgattctttgccttcgtagagagttgagaacaatcgacgtcatggatgcatgcagggaaccatcattacctgttgccggagtaacctatatgggacaccggtcttgtttcttcgtagcctgaggcagctaagctatgggtagggtaatgatgtatcccctgt

SEQ ID NO: 64311 - DNA, 456 bp, Zea mays
  unsure (1)..(456): unsure at all n locations
attgctgacatagaatatagattatttatctgaaggcctacaaaatcttgttgatctctcagtgaagcttgttcaaacaaagagacataaagtttatgacttactatacatgcttctcaaattagtattacttctgtctgtggaacagcgggtgttgagagggcattttctgcgatgacattcatcaaaagtaagttgagaaataagatgggtgatagccttttggatgactgtctactcacatttattgagagagatgttntctttcaactggacgaagaagatgtaatcaagacttcttttaccatcagaaaccgcaggccacagaaaacaagtaatcttctagtacgtactgccatgagtaagtganattatgcatatgttgaactgaattaatatactatcatggttataacacatattatatcggaaccaatatatatatattcgaactat

SEQ ID NO: 64312 - DNA, 231 bp, Zea mays
ttgaccgaagatctcatgcaagatatctggatataaaagcttcaaagcttgagagtccgcgaccaatgatagcttgaagggtctcctgtctacatgcaaaccaaatgctaaccttgattgtacaaaatcaagtcatgcaggaatttacagcctacatttttctcaacacaaacggggacatatgaattgttctgctttcaactgctaagttacaaatatgcgctatgcttg

SEQ ID NO: 64313 - DNA, 378 bp, Zea mays
  unsure (1)..(378): unsure at all n locations
tctanagggagaacacgtgataggtttgactaacgtgctattcttataagatagaccttgtgcagcttgtcaagcaggtaaacaagtgggaggagcacatcacagcaagaatgtgatgaccacttcaagacctctggagctgctgcatatggacctcttcggacccgtcgcctatctaagcataggaggaagtaagtatggtctagttattgttgatgacttttcccgcttcacttgagtgttctttttgcaggataagtctgaaacccaagggaccctcaagcgcttcctaaggagagctcanaatgagtttgagctcaaggtgaagaagataaggagcgacaatgggtccgaattcaagaatcttcaagtggagga

SEQ ID NO: 64314 - DNA, 329 bp, Zea mays
  unsure (1)..(329): unsure at all n locations
atgacacacgtatggatcatggcaaatcacaaagtctccccttcgtattgagatatatcttcagttcctttgagaaagagttgctaagacagaatagtaagtttggattattcctttgagagattaatagcagacagttttactcaagctcttctagcaagacaatttgaaatttcaagcgcaatctaaacttggtcagagaaccaagttaagattaagggaggatgatagttttacattctactacaagttgctaanactacactcatttntgtagtgattactttgtcagatctcgtgtccttcaccacctggcgtggcaagcaagt

SEQ ID NO: 64315 - DNA, 396 bp, Zea mays
  unsure (1)..(396): unsure at all n locations
gagaaagacaggatttgtagcgcatgccaagcagggaagcaagttgttgctcatcatccacataagaacatcatgacgactgacagaccactcgagctcctacacatggatctattcggcccgatagcttacataagcatcggcgggagtaagtactgtctagttattgtggatgactattctcgcttcacttgggtgttctttttgcaggaaaaatctcatacccaagagaccctaaagggattcttgagacgggctcanaacgagttcagcttaagaatcaagaacattagaagcgacaacggaacggagttcaagaactcataaattgaaggcttncttgaggaggagggcatcaagcatgagtnttctttctcctacacccacaacanaatg

SEQ ID NO: 64316 - DNA, 418 bp, Zea mays
  unsure (1)..(418): unsure at all n locations
atacattcatttgcaccattntcggatactcgttcgacacacagttattctaagacagcacaagtacattcaccccatcagtaaaacaccagcacatttccgaaaattccccgagactacgacgacaaggcatcgatccgccatacaacananatcatgacgatgtcaataggtgctattaactaatcgtttaaaaatattgagcttacttctcgcttgccactatatcaccttttagtcacatgaccatcgcaagccttcttcacacgggtatacgacagcaacctacacattgtgttaacaagacatacacatttccttggtgcgagtataaccatattacgaacatataccccacacctcaacanatatcttacgccaccactaccataacacaccacgacaccacacacatacg

SEQ ID NO: 64317 - DNA, 419 bp, Zea mays
  unsure (1)..(419): unsure at all n locations
tgatgcagagacatgctcattgatattgttccccttgtatgngagagagagaaagtctgaaatcatgaatatggcttacccacacaaaagttcaataaaatggatacactgtgcattcaaagattggtgtaccttgtttccaaggtagcccatcaagcctctacccacacatgaaaccttcaggttcttcacatgctcccttatgtcacttcgtacccacaccatgagaaaaatcccaaccatttgcttgctggcgactaagcaatacctgatttgccattgaagccttaatctcagcttaagggaattcaatgataacacggaactattgcatataactagctcagaagtcagaaagcacattatctttgaggaaagacgagctatttatcttcagtgagctatttacctagaaccat

SEQ ID NO: 64318 - DNA, 371 bp, Zea mays
  unsure (1)..(371): unsure at all n locations
tggctcgaagcagccaagagtctgctcagtctgggtgcaccggactgttcgatggtgcaccggacagtgtccggtgcgccaggctggctctggcgaactggctgctctcgggacttcgacggcggcgtacggctataaatcaccggactgtccggtggtgcaccgaactgtccggtgagccaacagacgaccggaccaacggtcggtcgtggaatccgcgagcgacgcgtggcagagccaacggtcagaagggggcaccgaactgtctggtgcaccaacggctaggaatctgcaacggtcggcttcgccaaataaggaaagagatccgcaccggacagtgtccggtggttcaccggactgtncggtccgtc

SEQ ID NO: 64319 - DNA, 332 bp, Zea mays
  unsure (1)..(332): unsure at all n locations
tgtgaagattcttcgtcccacatgagcaagtcggtgatgccagagccagcccatattagtattagcaattaagcaagtgtctagtttggcattgttatctttaaaatcaactaaatatagctgaccatctaacactctcttaaaagctactgaatcatcacttcttataaagacagtaacaccaacatcagtaaaaagacagttgtagcccattttacataattgagaaacaaaaagcaaagttataatctaaataatctacaagataaacattataaacggaatggtcaggagatatagcaattntatccaaacattngaccaaaccttga

SEQ ID NO: 64320 - DNA, 386 bp, Zea mays
  unsure (1)..(386): unsure at all n locations
cattctatgttaatttgctttaatcatgtcaaaaattgtatgaagaaataactaattcaatcttaatcttaattataaattaactagacatcatattttaatcattataattatggataggttagctttggtttggaaaagttaatctagtagacataggataaataaatgtctaactataaaagtatgagacacggtataatcaatgttgttactgcgtagtaaatatttatacgaagctaacgcaactcgaacgagtcaattcggagttaaaataaatttaatatgaattttccaagtttctagaattatntntgagctaaaaatccccttttctaatnntcttttccactatttgtngatccttggactgtgcgcattaatac

SEQ ID NO: 64321 - DNA, 340 bp, Zea mays
  unsure (1)..(340): unsure at all n locations
tgatcccgtgtttaagcctttcttttgttgcccgctttagttgcattcattttattcaaaatgcgatcctcttttgatatttttagggaactcatttttttcaatacattggcagagcttaacaacagattatgcccaaatttttctaggtcaacatggccttcaatttgggaagtgggaaataagggtgggataatttgattccatgtttggataattgaattgaagatagggatagataaataaagactacacccatcccatgccccctncttttgtctcaacccatttttatttccctatccaatcttgatgggatcactcctgaaaagatatgtat

SEQ ID NO: 64322 - DNA, 306 bp, Zea mays
  unsure (1)..(306): unsure at all n locations
aaatcccggaaataccttactctcatgtagacatgatgatttcttttgatagctgatttgtcgaacatggcatggtttggtcgccataggcgatcttcggagatttaccaccactgccacataataactgtgncttcaccagtaatcttagacacaccttatatatgtccttggtgaattattctgtatagtgcctgacattgctgtacgaaacccctagttcttctgtttatcgagactcatgtcatctctacagcagccattatatctgatgacatgttcggaaacactccatatactgttttc

SEQ ID NO: 64323 - DNA, 457 bp, Zea mays
  unsure (1)..(457): unsure at all n locations
ctaagcttcggattacaaaccgacttanagatagaatgaccttttagtctcataagtgttgagtcgttggtcgaaacgtttatgaggggtatgaatgtaattgctcacaggctgtgtcctgtgcctataaatagagaacaatattcctttactgttcacggattcctgtaattgcaatcgcatcactcggaaattattctttgccaaggcagaggtataaatgtatctaatatttgaatacatcaagtttgtataatataaaaatgatgttgttcatttataatttacttgtctttaatgcttcatatctcacattattttatacaatctctgaaagttcaattacgaagattcaaccttcgtaattgtaccatctttaaccttcgtccgaagttcattaaatccttaaggaaataatgcttcagcggacgaagggcattaacatttaacattgtat

SEQ ID NO: 64324 - DNA, 353 bp, Zea mays
gcttgctacacaggggcttgtggtgagcacacacgtactgtgatttctcccactatctactctctcgcgcccgcttgccaacttgttgctagagagagagacagacagggatgtgtgccggctgccaggagtgccatccatatatatgccaagctagctagccccgccatgcacggcgtttgcacggtgacgaatggcgacatgcattcttgcgatctcagtgccatccacattttatggtgcaattgtccatgagctagtggtgctgaactttcatcaagtgggctggttacactaccggaatcgcgttctttgctgagtgtctaagacactcggcaaaggctatgttacac

SEQ ID NO: 64325 - DNA, 434 bp, Zea mays
ctaagcttgcagcgagactgtggcctctgtagtgactcctcctatcatctctttgagtagaagggtgaattgacctgacgtgcctctgatgaagtcttcctccgaagcccctggtcattttagagaacctgaatgcttcatcccttctttggtgaaagtcattgtcagctcgaatatactcgtccatcttctatagcagcttctccaaagtttgacgaggcttcctgcaaagtattgagctgaaagtcccggccgaagtcccttaatcatggcctcaatgacaatttcattgggcactgttggtgcctatgccctcatacacatgaaccttcgaacatatgcctgaaggtattcttcgtggtcctgggtgcactggaataaagcttgagcagtgaccggcttcgtctgaaaccctcggaagctggttataacat

SEQ ID NO: 64326 - DNA, 478 bp, Zea mays
  unsure (1)..(478): unsure at all n locations
actaagcttggttctcttaagaaacatagaggcatggtattgtcttgatactatttagtggacagattacaaaggttgtaggatagccttaattcacattattctttttcctttcattaattcccatttagggtttctagggtaggtttgaactacaacagggttttaataatttccaaaaattctgtacaaattacagtgggctgccctttgctattctaacttgttttaagaagttgaggatttaagtaccagggctaggctttaaacaaaaataacaaatgttaggcaaaatgggccactttacactacacctcttagttggggtaggttctgtcctcaaagttatttttgttggcatcctatagtaataatanagctctgtgctaaaaatcacagacaactaangggtggttatttagttatgattntcttaagttcaatgtcaaacaggcactgtctactacattattaattt

SEQ ID NO: 64327 - DNA, 443 bp, Zea mays
  unsure (1)..(443): unsure at all n locations
tgtgcanagtccacttgaactaatcttcggagaaacccgacctcgttgcaacatgacaccagaaggtccaacccaacaagcgttggatgaattcagaattattgcagaacatatcagtacaagagacctggttcaggagtttttggctttcagagtttttcctagtttaaaagaatgggaaatgccgaagctagagggggagaagaaagaaggggaacttgtgcggntaccttactattacaagtttaagaaatactttaaaacaccttgccaagagtggttggaaacaattgaaataatgtgcaatgaaatacttggcaattactccaaaaaagaagatcagttgatgactgcagccttcggcacccgtccgaagcgaagactgaatcgagtgctggacgccttgnngtttgaataccctgactacgaanatctaaataaag

SEQ ID NO: 64328 - DNA, 425 bp, Zea mays
  unsure (1)..(425): unsure at all n locations
ctcagctttattggctctcttgcannaagtggcttcttgtggtgtagaagattgattatgggaaatagggggagttnttgaaatctttgatcaatcttttctggaatgactctctttatacttcaacatgtgtgtttgacttagagatagagatttgagtttgatttgctaaaacaaaccaagtggtggcaaaggatgatccatatatgccaaaattgaataaaacttanatttattctatttgaagtgagtttgcacttgttctagttgctttatgttgtgttggcataaatcatcaaaaagggggagattgaaagggaaatgtgcccttgggccatttctatgtattctggtgatagagtgccaacacatgtgcttaattgnngaattatgtacatggatgaacaaggtgaanatcatgaagt

SEQ ID NO: 64329 - DNA, 166 bp, Zea mays
  unsure (1)..(166): unsure at all n locations
catgcangaggatgaaaactaagttntatttggggaaggtgttttaccttccagtgatgtaataataagtttatgcactcaagtacctggatatgtaataactactctntctatattntcttatgaatgtaaattatgttattgtaagctnttccgcttactcact

SEQ ID NO: 64330 - DNA, 407 bp, Zea mays
actcagcttgggctgtgatagattaccgccttcttaatgcggtttctatcaatttcaagtatcctttgcctcgtattgatgttctctttgaccagctggtcggggccaaggtgttttccaagatagaccttcgctctggctaccatcagatcaaaatacgagcaagtgatattccgaagacggcattctcaaccagatatgggctatatgaattcttggtgatgtcattcgggctgacaaatgcaccagcatatttcatgtatctgatgaattctgttttcatgccggaattggacaagttcgtggtggttttcatcgatgacattctggtgtactcaaagaacgaagaagaaacatgccggcatttgcatgtagtgcttcaacgtctgcgagagcaccacctttat

SEQ ID NO: 64331 - DNA, 390 bp, Zea mays
  unsure (1)..(390): unsure at all n locations
tgaaaaatgccgaagcttcctgaggccatcataacatcatacagttctttctccaattctgtantaattttctttgataaattaagaacttcggatacgaaatatattggagcctgtttcttgacttggccttcaagcttctcctggacaagtgctgcacttaccgctgagtgcgaagctgccacatataataacaaaggagcccctggaggttgtggacttaatgttgttagatctatcaaatattgcttcagctcttcgaaggctttctgctggattggtccccattgaaagacttcggctgacttcagcacttcgaagaatggtaagtttctctctgctgatctggatatgaatctgttgagagatgccagccttcctgtcaatctt

SEQ ID NO: 64332 - DNA, 418 bp, Zea mays
  unsure (1)..(418): unsure at all n locations
tctagtcggcacgcgggcctgattcaagacccataatgcatactgatcctgaacacacgataaccagataacagagcaacgccaacaaagtctattttattccacagcaatgccagaagacaccagcgccactgtcaagaacagaatcatgcgccatcttcctgctgacgatccctttccttatactcatcttcagcatactcatcccttccgcttcccagcttagcacaagcagccttcatcagcaactttgcgccgtcctgcaagagatctttaagctccttnttgctgagacctgcccagtacgtcataagagcgtacgcatgacagaggatntcattaggcgacttaatcaanatgttttcataacacatcttggttcttgctttccagatagaccagcaaatagcaaccacac

SEQ ID NO: 64333 - DNA, 464 bp, Zea mays
  unsure (1)..(464): unsure at all n locations
actcagcttagatctcttgcntactactttagtcgatatggcctgtgataacctgngaatcacacttgacgacttcccttcttattcctaataccttgagtgttcgaagccccaagagataggcttcatattctgcaatgttatttgtgcaggtgaactccaacctgactgcataacaggttctgatcttatatggtgaaattaggatagcagctgcacctgcgccgaaggttgcccatgacccatcacagaacgatgtccaagcttcgttatctttcgttctttcttcatcctgagcgcctagtgtccagtcagcactgaacactactaacgcttgggattggattgaagacctatgaacataatcaatagtgaattcattcagctctatagcacactttccaactctactcgaggctctctgttcttatatgtccttggaggctgagacaacgactatatat

SEQ ID NO: 64334 - DNA, 276 bp, Zea mays
  unsure (1)..(276): unsure at all n locations
tgtggcggcagtctttcgttntcatgtgcatgcccatatatataattcaaccaagcttgcgggaacatagtaaaaactaaaaactaaaaggggagatgtcataagtcttcaaggaaaaagccatcaaacagggcacttggaagtagagatggcaatggggacacgattccgattccccgcggggaattcctccattatgggatggagaagaaacttcccccgcggagatgtaaacggagaaaattcatcccccgatgggtaaacggtgatggggac

SEQ ID NO: 64335 - DNA, 470 bp, Zea mays
  unsure (1)..(470): unsure at all n locations
actcagcttaacctcccnncccgcgagaccttttctcgttagtttctaaccataatgaattcgacatcgaatgtcatacttgatgcatatccactttatttgttcccttgtatgatgtactgtttgcttcccaatttgaatggatgtatgtatgtatgcttgcaatcgcatatagaacgatccggttgaagagcccgaggaactcgcaagagaagcccctgagcagcagtccgttggtggaggcaagtgtcccttgacctatctttgtcctatacactctttaattcacctcccgcatttcatatttatacctaaggattgactagctgttgttatccatgtcctttgttacctatctgggtcggatattattagttagctttatgtgattgctcaagcataatcaatgaacatgatgagactatctatgatacgctgttgtgcctcttcttattatgatgttatacttg

SEQ ID NO: 64336 - DNA, 319 bp, Zea mays
aagctactgacagattggaaatgggctgcacagctcaatgaattttgcattaattatgtgcatagatcttcgatccagtctcaagcgttggctgatttcattgctgactggacgccatgggctcatgacgaataaacgaatatagatgtcgaagtatggacagtgttttgcgatgggtcttggggaaccttcggagcaggagcatccgctgtatcggtctcaccatccaacagttaaaacttgttatgcggcaagactcgattttagttgtacaaacaatattactgagtatgaagccctgcttttgagccttctgaag

SEQ ID NO: 64337 - DNA, 358 bp, Zea mays
  unsure (1)..(358): unsure at all n locations
tgaagctgacatcagtctctaccgacgatagcatatcgtcagctgtttattntattccaacttcaaggtaaaatttttccctgagctttttattgttttatgatgaaagtaatttctgatgaaggttgttttgcacacagtatgctactaagtaaagccttgatgatgcaacaagacctcgaagataagaaaaatgaggttataattgaaggcttagaaagtgaaataaaagatcatgaagctgctcttgaaaagaaggattctgttcttcaaacaatggagggttcattggcagaagcccaaactgaaattgccagattaaacagtgaactcctcctaaagtcagaaagcttcgagc

SEQ ID NO: 64338 - DNA, 415 bp, Zea mays
ttggagcgcatgattgatgaacttaagagtgatgttgatgatgctaggaatcttggttccaagtcaaagcagttagctgacgaatggcagaagaaggcaatggagggtctagcctcagccttacaggaaatgtcagctgaatccagagaggtgcaagacaagtaccttctgaaacaagatgagatagggcacgctcaggcacaggtagaggagcttaacttgagtctgaagaatattaaggagaactatgagctactgcttgatgaggcaaactatgagaaggtttgccttacaaaagcagatgaaagactggaagcagaagctaagagggcacatgaggaatggcagtccacagagctaagttctgtcaactctattaagaattcagaagaagagatagtcgctgtctgtcaca

SEQ ID NO: 64339 - DNA, 434 bp, Zea mays
  unsure (1)..(434): unsure at all n locations
tggtcattntattgctaactgtcccgacaatgatagtgatcatgaccaagggaacaagaaggagaagaagaagaattataagaaggcaaagggcgaggctcatcttggcaaggagtgggattcggactgctcctcgtctgactccgacaatgagggactcgccgccactgcattcaacaagtcatccctcttccccaacgagcgtcacacttgcctcatggcaagagagaagaaggtaatcactcgtaatgatgtcacttatgattcttctagtgacgatgagtctagtgatgatgaaatagattactctagtttgttcaagggattggatagaaataaaattgataaaatcaatgaattgatggatgccttgaatganaaggataggctnttagaanagcaagaggatttgttgtatgatgaacatgataagt

SEQ ID NO: 64340 - DNA, 337 bp, Zea mays
actcagctagaaagaatagagtagtaaggtgagtagagaatggttgtccagttctatctaggtttcgtcctacagtcaacattcctctgataccacttctgtaacacccgggttttatgggtccaaagcccgggcgtaaacataatcaccaggtgtgctgggaccaagtctcacacatatgatgaatcatggcacaggatcgaatgtcacatctttactaaataacaagagttctatacaaaataaataaataattacattataaggagacaacggtccagcaacccaaagttgactgggagacgacgggctagacctctcacgaactcatcacagc

SEQ ID NO: 64341 - DNA, 408 bp, Zea mays
  unsure (1)..(408): unsure at all n locations
aactaagctnaaccaccagaacctacactcatacttctttctgctttccacgccgatcacataagaaacaagcaagcaattacctaccgtcgtgcagcatgggcatgtcgcccccttcctctcctagctgtccaaactgagacaggttacacaaaactgaacaatattcaatgcccagcatgtctggcagctcatgttccagcaatctctactccattatttgcaacacgacttgcaaatcggtcttaatcaaagttgtgcactgatccacactctatcactntggtataataactataacaaaaactccacggatcacgcacaggagagcaccacagtccgcaaaaaaaacacacatgcctagcttcatatcacagagaagggaatcatagctgcagcatggaaagc

SEQ ID NO: 64342 - DNA, 190 bp, Zea mays
  unsure (1)..(190): unsure at all n locations
accccctctattttctntcattggatcagagcccggtgcttcattagagcataaccgctcgaagtgatgtcgggagatcacgccaagaagatggtgatcggcggtgagaagtccgctacaagccacgggaaggctccatccagggagtccgccaacaaagtgaagggatccccttcacataacaagttgg

SEQ ID NO: 64343 - DNA, 172 bp, Zea mays
  unsure (1)..(172): unsure at all n locations
tactcacttgatggacgttctcaacgtatattctattttggcagatgcttaagaaaccgatgtataacatcgtgtaagatgctttggttcctcagctcaccaaaaggcggaggcatatgttggtcccattttgagcgagcggacggtcctcgcgtgtgggtcnnnatttttt

SEQ ID NO: 64344 - DNA, 361 bp, Zea mays
  unsure (1)..(361): unsure at all n locations
tgtggacccgtagcctatcaactggaattgccacctcacatgtcagcagntcacaatgtgttccacgtatctcagctgcggaaatgtgttcgcctacccactgaagtactgccagaaccagatattgagatagaaccagacttgtcctaccaagagtaccccgtcaaggtattagatcaaaaggaaagatcaactcgagcaaggtcggtcagaatgtataagattcagtggagtcaccattcaacagaagaagctacatgggagacggaggattttctgcgctctcgcttccccgactttctgcccaaaggaatcggtacgtaaccccagaaccccacccccccacctgccgtttgaatac

SEQ ID NO: 64345 - DNA, 452 bp, Zea mays
  unsure (1)..(452): unsure at all n locations
gctgncgctatacacccttaaaagctagtgaaccatctcatcttctaaagacatacacatctatatgtgtgaatagacagttatatcccatatgacataattgactaacagatagcaagttatatccaagactctccactagaaacacattagagatagaatgctcattggagattgcaaatttacctagccctcttaccttgccttgattcccgtcaccgaatataattgaatcttgngaatccttattcttgacgtatgaggtgaacatcttcttctcccccgtcatatggtttgtgcatccgctgtcgataatccagcttgaacccccggatgcataaacctgcaatgcaaatttaggctagngacttaagtacccaactctctgtgggtcctacaagggtagtcacaattgtcttagggacccacatgcaaagtttatcacccttgca

SEQ ID NO: 64346 - DNA, 394 bp, Zea mays
agacaatcgcgcactgtgagtggagagatggcgagagtggcacgtaccctcctggcaaaggaccgcctaaaaggggtggtgtgctctcaggtggcgcggacctgttcatgtggtggaggattcgtgtgaatggtagacatgtgcaaaagagttaagagaagcatatgtcgtgtggttggagatccccagctgggtattaatcgattcggatcgccaaacttcttggatatgaagactggatcttcgaccctcatcgtagataacaagcgaaacaaaagttggattttaaaagaaagctagtgtaggacaagtgaatgctctagattaggcaaatctagattcaggaaaagtacttaacttgtgatgtaaaattttggcttaaggacccacttct

SEQ ID NO: 64347 - DNA, 425 bp, Zea mays
  unsure (1)..(425): unsure at all n locations
tcttctccttacatccacattnttcttatatctgatgcatatctatctggaatatttactcctttcaatacctcacaaaatagtgtcttctcggacgcactcattgtatatgatgctggtggtaaatataacttgtcacccactggaataggatgaagctcagttcgaatgcctagggactgaagatccaaacgatatttcaagttgtccttggactttcgttgaatgcctaggagggtgttgacaatgttatcacacacattcttctcgatatgcatgacatctaaattatgtcgtaacattaaatccttccaatatggaagcctaaaaaaatagacctacttttccatatgatagtaggctcccctctcttcttttttgctttctatttatgttggcaaactttcccatgcactgtgtgcata

SEQ ID NO: 64348 - DNA, 465 bp, Zea mays
  unsure (1)..(465): unsure at all n locations
ctcagcttgaatttaagttatagaatgctccccctaaatatgtgcttactttanaatctcaactttggccttatatgccaaattgcacatacttaggctaattcgaagcataactataccttatcatcagtgggatgcattgtgtcaataattaaaccgtgatatgtataacacacaaatgcacagaatcagagttaaacactatttaaatggatataccataggaatatcaacctaccactattcaccattaagataccaatttaaagcaccagaagcacatgaatatctattataggacaaacacaatatataccaagcaccagaagcacatgaatatctattataggacaaacacaatagataccaattgattcatatcaacggaagcactaattatgcattatcaccatataatacaacaagaagcatatgatangtattatcaaccaaactaacacattc

SEQ ID NO: 64349 - DNA, 431 bp, Zea mays
  unsure (1)..(431): unsure at all n locations
tctatgttccatgacatgtcaatccaagttaaatatttttcatatcataatatccatatttataaagcacttgcaatgcttaagcagacattnttgcacaaggcagaagtagcagcttcaaaacaagcatcttcatcaatacgtttttacaaatatctgagtgcaattaagggcacaagtgggtacccaatggtgtttcgagggtcagctagcctagttcatttctctccctaaattaattaggtgcatgaaattctagttcattttaacaagtttaaggtcaacccaatgacccaaaacgtgtgggactcacatccctaagtgcaatccatataccatactccatcctcaaatataagggatccaagaaatattatgacatattatatggtaaaacaaatgacacatgtaacccttcctgattaccatat

SEQ ID NO: 64350 - DNA, 422 bp, Zea mays
cagcataagaaaagagtatagaattctcccacagctctgaacagatgagcatcttcactgatctccaacacagaccacacagcttctcagataaagaggaaaggagaataatgggtttcccaactatataactaactttattgacatagtatgtaaaccaaaatgcaggggatacccacactctggtgacaatcattacaaagatccaaaccaaacatagttcatcatgacaaacataaatgcacatgatatagcaaactaccctgtctaactaaaactaactaagaccgagactaacgctaagactgaagcttccatgtatatatctattttcgtattaattacaagatccaactctaacgatctatggttctagatttatcttggtcttgcaggcgggattgccataagactggtgtcca

SEQ ID NO: 64351 - DNA, 342 bp, Zea mays
  unsure (1)..(342): unsure at all n locations
actgtctaacttaaagagcctaagagcccatatcaattcttcaaattggtatagaagatgcatctccaggagaaccattattcaaattcggctggctaattntctcatcagttgcagatgagctatcagttggaggtacatcaacaactgcacaacctggacagatgcacattgaaataactngcaaacatagctgttcaatctttgttgtccccttgaggtcttcggcaatcagtaattcaactttttcatgatttaggttggatatataagaggttggctcttccggagagcttgctcggtcaaaatgttcagaattagctattcataaaaaaataatag

SEQ ID NO: 64352 - DNA, 414 bp, Zea mays
gcttcgactgcggatacaacgccatcatcggcaggtcattgttggcaaaattcatgcccattccacactattcgtacatgatattgaagatgccgggaccacaatgaatcatcaccgtgcgcgctgacttccaaggcaccgcggaatgtttccgagtggccattcaggcggccctcaccaccaaatcaccgacgacttcttccgcgtatgcgaactcaaagcctgaggaagacctcacgatacctatgaatgaagctcaagccgtgacctctatgcggccgactgatgagacgaagagaatcaaccttgggttcgctgatgaacacaagactgccatcatcagctctagcctggatgacaaatatgaaggcgtgctcgtccagtttctacaagataaccgagacgtattcgcat

SEQ ID NO: 64353 - DNA, 433 bp, Zea mays
  unsure (1)..(433): unsure at all n locations
tcggcgttatagcgtatgcaaagatgagatgatcaactttcttaaagatggaatgaccttttagttcataaaggtctgagtcattgttgtaaacttttataaggggtatgattgtaattccttacaggctgtgtcctgtgcctataaatagtgaacaatattcctttactgttcacgcaatcctgtaattgcaaacgcattgctcgggaattattattttctaccaaggcgaaggtataaatgtacctaaacattatgttttgatatttaaattcatataataaaatatgtgaataatgttatctatttttggtacatctttctctaatggtttgngcgttatattntatttcatattatattgtaagtctgatcacgaaggtgtgaccttcgtatattctactcatgggtcttcgtccgngttcattaaatc

SEQ ID NO: 64354 - DNA, 456 bp, Zea mays
  unsure (1)..(456): unsure at all n locations
tggtgcttcattagagtctaacaactcgaagtgatgtcttgagaacatgtcaagagggagatcgtgaccggcgacaagcctgcaagctcgggaagaactctttcgagagagtccggccacaagcacaaggaggaatcctcttcctccaacaagacacatcggaagggtgacaagaagaagaaaatgaagaatgtggtctactatgagaccgactcttcgtcgccctccactttgtcaagctccgacttgtccgtcgcttctaagcgccatgagcgcaagaagtatagtaagaagcccctacgctatccccgtatttctaagcgcgctccattactntttgtgcccttaggcaacccaccatatnttgatggtgaagaatattgtatgtggagtgataaaatgaggcatcacctaacctcactccacgcaagcattggggatatttgttgagtttgg

SEQ ID NO: 64355 - DNA, 381 bp, Zea mays
  unsure (1)..(381): unsure at all n locations
gtcaatataatcatgttattatatcatttactntnnntgactnatacgacatgtatgtgtaataaaatatctagggagccaaaatcgaagcaatttcaaacggcaataatgtcgaacggttcgacgtcttactcaaacaaggatacacatatacattgtataaagtggcattctgtctaaactgggcggagggtcaatttccgaatattgcgcatgggctagagttgggattgataacacatactattgtggagccattcactaaaccaattcaatttactccatttccaaaatatcttatgccatttcatgatgttaccaaacaccgcataagacgttcgtatgttatcacccttccctctatatggtatataacttaac

SEQ ID NO: 64356 - DNA, 253 bp, Zea mays
tagccccggctcgggaaattgtgatcaaccaaaataattactgctatttgtgtgaagacaaggccataccacccagatgttccacgtctccttccataatcataaagacatagcagaagctgctgcacaacaaagttaccccaagcaggccatgcccctggcttgtaccattctgctcactttccaaaattggtccgtaatcactctccaacttcttgtgctatggcaatccaacccaaatcattttgtaaca

SEQ ID NO: 64357 - DNA, 396 bp, Zea mays
ttactggtcttaattgcttatatgtggtgctcaagttgttcaagtcatccccggacctcacaagtccctatgcaaataatgcatatgtttagggggagatgtgctacaacttgactcctttgagactaacatgtttgtttgagtgcacttgaagtagtctcaaaggaatattgaaagggaaacgtgaacttggacatagagagagcttccactgcatttttctgtaaaatgaaacttgtcctaagttctttttatactctcattgccttttgcttctaattaacatttggtgagcaatggggataaaagggccacaggaatcttgttttgtggttaatgccaaagggggaaaaaataaggccaaacaaatggatcacttacacctttgattttaaa

SEQ ID NO: 64358 - DNA, 353 bp, Zea mays
attcacgacgcgcagcgaagggggactggaagaaacaggcgaacctatatatatgcctaagaacattacaccatacaagataaaatgttataaaaacatgcagcataaaatagagctcgattctacggtcgtgcgagggaaagaaacgtgacggtcaagctatagtcgagaagttatcgcgtttacattaaacaaatattaactataacatttaattcaacactatcaaatataaataatctctaccatttagtttcgattaatctgctatactaacatatatcagttaaataagtaatttaattaacatgagacattctacgcgaggtggacttacgatacacgaaacaaca

SEQ ID NO: 64359 - DNA, 361 bp, Zea mays
  unsure (1)..(361): unsure at all n locations
tgcttntcaatccaacattatagcagcgaggtattgttaaaaatgtngaatttatacataccaaagagctatatgtgcctttcgaagcagtctgtgtcttcatcagatttctctactcttcacggcatggatgctatgtactcactcgtgtagatagttcactgacctttaattggtctaagatcagatttcaattcaaacagctaacagtgactgaatgctgatgaagacagggcagattcttcttctgatgaactttgagtgggccgtgcatttttaacggagaatcagacctgattaattctttggtcgaaggtttactctgaacaaaggaaggaccccccttgatttagcttgaact

SEQ ID NO: 64360 - DNA, 377 bp, Zea mays
taagacaaaatcgtgtgccaatgcctaagatgatcaaatatgttcttcttgataaggctaattaacatcttattacatgactcgtcctgaccattggcctaagcatgatataaagatgaattgagcaatttgatcttatataattcaaaaaactcatgtaccacttttggcataaaagaagtcccatgatctgcattcaaagtttggagaacaccgaatctataaataacatgctcagtcacaaactcaattacctccctatgtgtcatatttttgaaagcaacgactttggtccatttggaaaataatatgtggcgactaacataaatcgatgccctttgatgatgtcgggtgaattctcctacaagtccaaaccc

SEQ ID NO: 64361 - DNA, 403 bp, Zea mays
gcaggtgatgccacctctgtatggatctccacaatcctcaagacctgcgtcgtgcaacggcagcggtaagaacccgtccccttcctctcccgcggcggtctcacggcctgcgtcctccgggggcatcggctccaaggacgacgccgctgccggcgagcgcaaggcgctgctgccgcggcagcctcctggcggcatggcgcggaagggccgcaaggggtccaaccgccgcgtgcagtggaaagataagcatggcagcaagctcaccgatgtcagggagttccagcctatgtacgtcgaaaacaagcattcccactcattttatgtgtgctttcacactggtgtggtgcacttgttattgattgatgcttccgatagcaaaattctttgatccaaattatctatt

SEQ ID NO: 64362 - DNA, 340 bp, Zea mays
tgctcaactgtgtcaatccggtccacaaatattatttgtgcgtctatgctcgactttggatgagaaaactttaattgactttggttgactctcaatcttagctttcattcttaatgaaatatagagcctctttgctatagtgtacttacgtctaccttcttgcggaattatgaagaaccttcagattcttattgttgggggttgtgaggataattcgtgggatataatcattttgatactgggtcctccaatcgggtagtcttggctggatcccactaattcgtttgaattccgctggaaaacccaccacaccctaattggaccgtcttccaacttcgat

SEQ ID NO: 64363 - DNA, 166 bp, Zea mays
actacgcttctaagggagaacacgtgataggtttgactaacgttcaattcgaaaaagatagaccttgtgcagcttgtcaagcaaggaaacaggtgggaggagcacatcacagcaagaatgtgatgaccacttcaaggccccctgagctgctgcatatggacctcgt

SEQ ID NO: 64364 - DNA, 373 bp, Zea mays
gctccttgacaataaaattgcgttgttcagtttttcttagatgtaaaaatgaatgtttgagaagttaaactacgtatgaagcaaggttaatgcatgaacatgctttttcttccttttatacaaagagatgcaagtaatgtaagaagagtttatgtacatgtatgaatgacatagagtagttttacctttttgtgcctttacatagagatgctctcttcattgtgctttggccttaatcttagtcgcttaagagctatactgaagacaatgtatgaaaatattttgcacacgagagagttctacaactagtgatcctttctaagtcatgttatatataccaagttgatcacaaattgcataatacatatgaatc

SEQ ID NO: 64365 - DNA, 392 bp, Zea mays
attggtccattcctggaactcgtgctatgtgtaccaatggcataccgactccaactacccgaaaccttgtctgctgtgcataatgtgtaccatgtgtcacaattgaagaaatgtcttctggttcccgatcgaaccattgaagtaacggatgttgtccttgaaccggacttgacatactctgaacaccctattctagttctggatcaaaagacagggtaccccgagaaaaactttaactttattaaatcctgtggaacacaattttaagatgaacctctctgaaaaattcagaaatctttgaataaaaatttccaagctttcaaccccagtaattggaaagggatatagatatgcaaaaaggaggaacccccaatcacccctctttgtccaaa

SEQ ID NO: 64366 - DNA, 369 bp, Zea mays
  unsure (1)..(369): unsure at all n locations
ctaagcttatcaatggacgtgaaaagtgccttcctcaatggaccaatcaaggaagaggtctatgttgagccacctcccggctttgaagatagtgagtaccctaaccatgtttacaaactctctaaggcgctntatgggctcaagcaagccccaagagcatggtatgaatgcctaagatattttcttatcactaatggcttcanagtcggaaaagccgatcctacactctttaccanaacacttgaaaatgatttgtgaaagggaaagtgcctttaggccatttctaagtattttggtgattgagtgccaatgcaagtgctttggtgtgatctatgcaatgtgggggacaaagtgcaaatatgtcaaaag

SEQ ID NO: 64367 - DNA, 283 bp, Zea mays
  unsure (1)..(283): unsure at all n locations
tggacagtgttctgcgatgggtcttggggaacctttggtgcangagtggctcgtggcctactagcgccttcgaaggtcagaacatgttatgcaactaggcttgactttaattgtacaaataatattgctgaatacgaagcacttctgttggggcttctaaagttaagggcaacgggaataagaaaggccatcctgaaaactgattctcaagtcatttctggccatgtagacaagagtagcaaggcaagagacccgaagcttgaaaaatatctcaacacagttc

SEQ ID NO: 64368 - DNA, 363 bp, Zea mays
  unsure (1)..(363): unsure at all n locations
acaccttaagcctgtggggaagatatatttttcttgtagcanacaatgaaactattacatgagatataaaaagtgtcctttattacacagaaaataaaactgaatggaaaagtctattatcaaggtaggatatttgtcaataaatgtgcttcgactctggcacagtgctattgactgtgcgagcttcggactgttctctgaagttcctttggagttgagcatattggccccttctggctgctggccttgttgcaacggtggtggaggcagacgctgttgccaggaagcttgaggttgactcgccgaagctacagaaactgcagggtggttgcctacatattctgcgatataacgcgaatgata

SEQ ID NO: 64369 - DNA, 397 bp, Zea mays
  unsure (1)..(397): unsure at all n locations
tcaagacaagatagngcttggcaatgatgatgagctatcaattagatgcttttttctgattctattcaatcgacttctttttccttctgcttcttggggcattacaaacaatgaggtactcatgacttcaaacatggcccaaatggctgatattgactggtgtcaactagtttacacggatttgtgtgatgctgccgcacgttggcataaaaggaacaaaacaaacattacagcaacaatatatggatgctcactcatttgtctagtaagtaatttttttggttactgtgcatatatatgatatgcaaatatttgctatgtactaaatttatatacttgtgcattccctttttcaaattactattttgacacctacattacctgcatttctgaaaca

SEQ ID NO: 64370 - DNA, 394 bp, Zea mays
  unsure (1)..(394): unsure at all n locations
ntagggtaaaagtcattaaatgaccctaagaatattcttgaatcacatttatacccctaaggtaccaaaaaccctaattggaaccctggaaaaccctaaaaccaaaccctagggacttatatgcaaaattagtccacttttggactaaagtgcaaaaaccaagccaaataagtatcttaagtcctttggtcacaaaaatgtggacttgaaagcaaaaccctagattttgcgtttatttgcaaaaagaaccacttgacctttatatggcctagttctgaattaagggttgtgacgacaactttaagcccttgtaactttcaagcattagggtatttgccctaggtcccccctccaaagttgaaaaccaaacttaggagacaacttttgttaaaag

SEQ ID NO: 64371 - DNA, 382 bp, Zea mays
  unsure (1)..(382): unsure at all n locations
ntacactaagcatatgtccaacacttaacacacatgtcagtcctttaattgggttgtcatccaaaccaccaaaacccacaagagagctttcaacaccttgttactcaacgctcgtagtagaggttacaagcgggatgagagacggatgagctcccatgtctcttatgcatgggtggacctaaagactaagggactggagttctaagctaagccttgtacattgcaatggctcgcgtcttggctctagcctttagttcttttggtctcgtcaaaagggtgggtccgccgtctcgtgtatgcctgttttatgcatttgcgcatccccagttttgtcgacctcccatttttaacccaaggtggggggcggttttataacttctta

SEQ ID NO: 64372 - DNA, 425 bp, Zea mays
  unsure (1)..(425): unsure at all n locations
cggctgacgacgcgaccgctgcgcctgctcgtctgttaccgccattactgccggcccacttttggccgtgctgaccatcgcgccaagctggtgctgttgggtcgcgcgccgggtcgcctcgagtcgcggtattggttcctcactcaaagaagtgcggaggtggcgcgggtggcgatgcaattactcacacgtagcaaccggcgcgccggttgcatgacgcgtgggcctgngtctctatgccgggcgtgttgtgagttggaggagcgcgcccacttggcgcggatgcatgccgcctgcatggctgcccaccctttcccccgttggttgggcaaaatggagggtccttgtaaccgctgggcggtgatgcaccgccgcggggtttgcttttctgcctgatatggttgatgaatgtggaccaacccccc

SEQ ID NO: 64373 - DNA, 87 bp, Zea mays
tgtaccctggcagaaccatgccggactcactcactatttgcccgtaagacacggagtgtatctcacctgtccagctcacccgcatgt

SEQ ID NO: 64374 - DNA, 298 bp, Zea mays
tcatctcaacgcgcgcaacataacttattacaaaacttggaaggtagaaacattcccaaaagttcatacataaacatcccatcctccaaaagctgcaacaattttcaactaacaaaagtaaaaagtatcgatgacctctcctgcaaaaacataagaataaaactctgagtagtcacttggcctaatctagctttcatttaccacactttagttcacttttttaactaccatgcaaagcagtggatcacatctttaatttcaaagtaccgacaatctaaatcgataataacccacctga

SEQ ID NO: 64375 - DNA, 332 bp, Zea mays
  unsure (1)..(332): unsure at all n locations
ctacttgatgtagactcctccttcttctcctccgtcgccttgaatgcgaccggttgtgcttcggacgtggaggggccgtcaagctcgttgaatttctttgagcctttgatcatcaattcaaagctcacaaaattcccgattacttcctcgggagtcattagtgtatatctaggattgccacgaattaattgaacttgagtagggttaaggaaaacaagtgatcttagaataaccttaaccatttcatggtcatcccantttttgctcccgagggtgcgcactttgttcaccaaggtcttgagccggntgtacatgtcttgcgggctctccct

SEQ ID NO: 64376 - DNA, 360 bp, Zea mays
cagcttccctgaccagcttgataccgcaactgttttattatcctggccacatacttggaaaacattgtcaaattatgtttttgaagaccttctgaagccgaaagcctccaacaactggtcaacaacaaaaagtgatgcaacccgagttagtccagagatgcgaaatctgccagtacttgtcaaaaaacacaatttccagcgcagcaactgcaaaccataccaataacttgcccgttcgcatgctggggacttgatattaatggacctttaagatagctcacggggatacctcatatactgtggcaattgcaaattcccaaatgataaagttaaacccttgttttttactccactaaggcc

SEQ ID NO: 64377 - DNA, 296 bp, Zea mays
gaccttagaaactcaagctcctcagcgcttacaggctcacaacgccaaacagcgatgacctggagcactcctggaacatcgacaacctccgcaaattttttgtttgactcaatcaggctgatttcgcccttgtaattcgccaaaaacaatcttgtaccggcccgcactcttttcctcccggggggtgaggtttttaacgaggcggagccatgtaatatatgtgtgaaaaatcccccgcaaaaacatgcgtcgaaaaaagaccgcgacgacggtcttcgacattcgaccaatacaag

SEQ ID NO: 64378 - DNA, 424 bp, Zea mays
  unsure (1)..(424): unsure at all n locations
aactcagcttggttcaagacaaggaccttcatcttctacgattatgttgtgcaatangaagcatgttttcatgatatctccgatgtgttgtggagaccaaccatatgcaggaccacgaactatggcccatcgcttctgtagtactccaaatgttcgttcaatgtcttttctagcagactcttgaacaatggcgaaatgttgggtcctcacatcatacggatgacagattgtcttgacaaacgctggccagtccggataaataccatctgctacgtaatatcccatggtgtacgtgtgtccattgacggagaaactcactggtggactatcaccattaagatgccaatcaaataggtttgaacgctgaagaacattgatgtnttacagctaccgggcatgtcgaaatatgcttgtcacatccata

SEQ ID NO: 64379 - DNA, 320 bp, Zea mays
  unsure (1)..(320): unsure at all n locations
tacccatgacgaggcatgtggacagtgaaaatattcttaatcatcaagcctacatcgacacagtccttaatcaactcagacggagacactacaccgagacttccttcttgtgcaagtcacccacccggtctcgtctttattatttacaacccaaaatttggtacctgacagaggtacatnttttccgatgttgaacccatcatgcccatgatggattcaccatcaagtcttttctttgaaaacttccctccctattaagcatatttttggttaaacaaaaattttgtctttaaggcagaatagcatataaattttaataa

SEQ ID NO: 64380 - DNA, 266 bp, Zea mays
  unsure (1)..(266): unsure at all n locations
tctaaagggagaacacattntaggattaacaaatgttcattttgagaaagacaggatttgtagcgcatgccaagcagggaagcaagttggtgctcatcatccacacaagaacatcatgactagtgacaggccactagagctcctacacatggacctattctgctcgatcgcttacataagcatcggcgggagtaagtactgtctagttattgtggatgaatattctcgcttcacttgggtgtcctttttgcaggaaaaatctcata

SEQ ID NO: 64381 - DNA, 371 bp, Zea mays
  unsure (1)..(371): unsure at all n locations
ttggatcattgctcttcggcttcgtcatcctgtacttaacaaagtgttataaggtaaactcaagtttcaaggagaaggtaagcattatgtatgaatttattaccggcctgaggtggctttgagcttcgtcaccagatttgtgttatgaatctatntcctatgcttcgagctangcttggaatatcaatcagatctgctggtgataagctgaagttaggtttattgacaattttcccatgcttgcacccagttttattgaaggcaacagctgtgccccgagaagttagcagggcacagaaatcgccatgcccagctataacttcgtcaagagcatcaactttgccctcaatttgttcaaaggtccctggcag

SEQ ID NO: 64382 - DNA, 369 bp, Zea mays
cttgataccaactgtaacaccccgggatgcacaaacttctcctgaatgctactaaactacacatctaacattcatatataaaattttgacagtgtctcctttgaaaattgcataaacggggaagcaacaaagtataaatagatactcatgattagaaaacataatagacattaataatctgctagcaatgggaagacgaccattacgacatgaactgaataaccagtgccacaactagtaaaaaacaacatcctttgacaggaagttcttatttaaatcatgactgcgcctggcagcgtaattataaaagtgaaggggaatgggctgatacttccaactcgcctggttgagcacaaagcacctccattg

SEQ ID NO: 64383 - DNA, 403 bp, Zea mays
tgtgaagattcttcatcccaacatgggctagtcggctatgctagagccaactgatagtcgcctagagggggggtgaatagggcgaaactgaaatttacaaatataaacacaactacaagccgggttagcgttagaaataaaatcgagttcgcgagagagggcgcaaaacaaatcgcaagcaaatgaagagtgtgacacgtggatttgttttaccgaggttcggttctcgcaaacctactccccgttgaggaggccacaaaggccgggtctctttcaacccttccctctctcaaacggtccctcagaccgagtgagcttctcttctcaaatcaaatccgggaacaaaactttcccgcaagggccaccacacaattgggacctcttgccttgatacaataaagtt

SEQ ID NO: 64384 - DNA, 352 bp, Zea mays
  unsure (1)..(352): unsure at all n locations
ntaggcaaatcctcaagcaacggaaggtgaaggactactaacctcgttccaagaaggtttgctacaaatgtggtaagcccggtcacttcattgcaaaatgtcctatgtctagtgacagtgacaggggcgacgacaagaagggaagaagaaaggagaagaagaaatactacaagaagaacggcggcgatgcccatgtttgtcgggagtgggactccgacgaaagctcaagcgactcctccgacgacaaggacgccgccaacatcgccgtcaccaagggccttcttttccccaccgtcggccacaagtgtttaatggcccaggacggcaaaaagaaggtaaaaacaaggtcctc

SEQ ID NO: 64385 - DNA, 316 bp, Zea mays
tagcaagtgcgagatctatatcagtgaagttctgtttttgggtcacattataaaccgagagggattggctatagatcctaagaaggtacagctaacttggactggaaagcaccaaaagatgttcgaggaatcaagaagttcatcggaatggctggttattattggcgtttcattgaacatttctccaagattgccaggccaatgacagccttgtggccaagaaggttgagatcaagggaccccagcttgccttaagtcctttagacatttaagagaagttaccaccaccccaatctgattttccaaatgttccaac

SEQ ID NO: 64386 - DNA, 377 bp, Zea mays
ccttctttggcggaagtcattgtcagctcggatgtactcatccatcttctgaagcagcttctccagagtttgtgggggcttcctggcgaagtactgagatgtaagtcctggccgaaggcccttaatcatggcctcaatgacaatttcactatgcactgtgggcgcttgtgccatcaatcgcaagaaccttcggacatacgcctggaggtattcctcatggtcttgcgtgcattgaaatagggcctaggctgtgactggctccgtctgaaagctttggaaactagtcaccagcatgtccttgatcttctgccacgacgtaatattccctggcctaagagaagaataccatgtttgggctacattccggaccgccatga

SEQ ID NO: 64387 - DNA, 330 bp, Zea mays
  unsure (1)..(330): unsure at all n locations
tcacacctctggactaactcgactgtgtcactctttgtttttgccaatagaaacctgacctgaaaacctttccaactagggtcctggatgctatgtgtactccacattgcccagcatggacctcatcccaaagttgctntccagtagctgagagaatgcattttatgaggactcctgatgcacctcttctgtatagtgtttcccaatgagtgtattatgacctgatggtcttgcgatgcactcggctgtattctgggcatctgcctcctcctaattnttattattttgaagaattggcctcttccacccttcaaattttaatctgggtaa

SEQ ID NO: 64388 - DNA, 309 bp, Zea mays
cggatcaccctcaccggactacggtcttccgccgacgcgcgggaccgagctaatcagagagtctccacccaattaccttcgctcatagctactttggcatccgtggacatcctgacctttttaaattgaactactctcgccgagaccaaggccggactcctctccgtccgacaagcattcaccgctgtacgcgaggaccaaccaacttcggccatctccggagacagatcgaacaccgatgtgaacccgcgaactccccttaaccttaacactttaccgaacaaactctccccggaaacccctccccct

SEQ ID NO: 64389 - DNA, 358 bp, Zea mays
  unsure (1)..(358): unsure at all n locations
ttcttncgcggcatgacgaaggtgatgcttgccgaatgtgttcaaaactcaaaaagtggaaatgagttcaccggaggtgggcgccaatgttggggacttgttatcaaatgcttcgagttaaggacaaggcaacatanaaagtgttaaatattaaagtcctttgttcttcaagacattatgtcctcttcggatataatgagttgcggacgaagttatgaangaaaaagccttcataagcacaatagatgataaggaagaattatatccgaaatccgaaaattattttaaattttatcatcaattaatttttattttcataatcatatccaaattaccaaattataattgtcctttcggt

SEQ ID NO: 64390 - DNA, 370 bp, Zea mays
aactaagcttctcaggtttttaggcgtcgcagataagagatcttctcactgcattccctctgagcgccgccactccctgacatcgagaccggctgcccgaccccggtccggcgatccctctgcacccctttctttgcgctgccagccccaatctctcgcatccctgtcaaccatggcggcgtcagcatgcggaggcgcggtgcgcgcgctgttccataaggagcaggacatacagatgatgctcgcggccgacgtccacctcggcaccaagaactgcgatttccagatggagcggtatgtctttaagcgtccaccgacggatgttctttcctccgcatcccttcttttgcctctccgcatgcaatcctgt

SEQ ID NO: 64391 - DNA, 274 bp, Zea mays
tataaaaactcaagcttccatgtggctagaacatagaagccgactcttatctgaccgtggagaccgtcacaagatggtgttcttctgcagaccgacatccagcatgtacaatatacttttccctgtccgggcatctccctgaaacctaaacaaaacaagaatgcacggggctccatgggctaaaatgatggacatgaactaaaaaagtgaatcaccgaatggttgaagtgacgagcacaagcgccagtaaggggaacaaaaatcggacctggaa

SEQ ID NO: 64392 - DNA, 398 bp, Zea mays
  unsure (1)..(398): unsure at all n locations
ntatcaaatggacgtaaagagtgccttcctcaatggaccaatcaaggaagaggtctatgttgagcaacctcccggctttgaagatagtgagtaccctaatcatgtctataaactctctaaggcgctctatgggctcaagcaagccccaagagcatggtatgaatgccttagagattttcttatcactaatggattcaaagtcggaaaggccgatcctacactttttaccaaaacactggaaaatgattggttcgtatgccaaattaatgtggaggatataatattggggtctactaacaagtctacatgtgaaaagtttagtaggatcatgacccagaaatctcagagtgttatgatgggggagtggaagtatttcttaggatttcaggggaagcaac

SEQ ID NO: 64393 - DNA, 210 bp, Zea mays
catgaaattgtacacgagtgagatattattaatcatctaccagtttcctatataacattgttacagaacacatggctcattatgctaaattagctgcgcaattaaaatcgtacctgtagctctgaacaacaatacattcaagtagctcctatttggcttctacaactatcatgtgcctaacactccaaatattacctacaccttatctaa

SEQ ID NO: 64394 - DNA, 430 bp, Zea mays
  unsure (1)..(430): unsure at all n locations
actataaaactcagcttgcttgctgggaaagggccgttctttgcttaattctacagggagntgaagatatatggggggagtcaaagtggtggctactcaacactcacagatagttttgtgtgcaaatcgtgctgcagtgaaaatattaaacgtgcattgtatgtggattatgtccgggatcttcatagttcgcgcagaaaagatcgttcaaagaaagcagccctgagtgctgggaaacaggtctgccaattggagtacacggaagcattctgatttattcaaaagtagtcaaatttgtgcaaagcacaatgtagcaaaaccttgatgggaagaaatcccttgcaaaatttcctatgcaaattctttacaaaggattttcaaccttgtcccggggtcataaaaggccccctgctaatcttagccgtggaac

SEQ ID NO: 64395 - DNA, 356 bp, Zea mays
  unsure (1)..(356): unsure at all n locations
tgtttaanagtgcactgcatcaacctggctttgataccaattgttataaccggaccgccaaaatatggtgtgttggggcgaaaatgctacccttcgctccaggccttcgtcaactcgctgcaccagcggaggcaagatgaccggcacggcccaccccttcgccctattcactgcaagacgaaggcctacgacgaagtctctccatcccacgtcctcgctcgacctggaggcccacgtgggattcgacccattgtaacaggccccgcacggacaggcgtgttacgggcctganttataantagctttctataatgatagtctgtaaccctcccttatgggaatattctggggataat

SEQ ID NO: 64396 - DNA, 348 bp, Zea mays
actcagcttgtactcaagagctggaggccacccgccttaacatcaaggccttagaggatgactgcatcgctatgaaggcgatgtgtgacaaggccatggattaggttgtttctgccgggcggatcctgatgtggaggcctaatgtcgtggtgcctgaagacattattgtcgatgttcttgcccgcccacttgtatgggtcgaccatcttcttttgttctcctacagccaaggtttcttgcaaaaatgctcatgcccagggattcatttgaattgaaaacatctcttctttgagttagacctttttataggaaaaaaggaactatgaatacccggggttgtaattggca

SEQ ID NO: 64397 - DNA, 175 bp, Zea mays
  unsure (1)..(175): unsure at all n locations
tggngatgttgaaaaggcagagaaggtattttatgatatgctngcgcattggaaaacactctcttccaaattctacaacgcgatgctaaaggtgtatgctgatcacaacctcttagacaagggtaaggaactaacaaagcggattggatgagaaccgtgtcatgtttggggcccc

SEQ ID NO: 64398 - DNA, 132 bp, Zea mays
gctacttaactacacatctggcattcatttataaaatttcgacagtgtgtcctttgaaaaatgcattaaccgggaggcaacatagtatagatggatatcatgatgagaaaacataatatacatttataattt

SEQ ID NO: 64399 - DNA, 412 bp, Zea mays
  unsure (1)..(412): unsure at all n locations
tatanaatacttaacgcttggcatcaagntcaaccccttgactgcgaatagtctctttggaaatttctagacgcactatatcgtttggggtgaactgatgaagataaatgttaaacctttttaacaacgcgactatcatcttatgcaaagggaatctaaggccccccttcaaaaagccctcctaaccgcacccatggaacattgtcaatataactgagatggtaaataactcaatgtgtcctcttttatcttgaattactgaagtccacttggcatggcttcatgggacaattatggggttgtcctcttcaatgtcaatgaggtttttgtcttttgacggattcataaagctaccctcatcttggaaggcggaactccccctgttaaaaaaactttaacccttggttttaac

SEQ ID NO: 64400 - DNA, 173 bp, Zea mays
gccctaaactgctaagaaaagagggctgtcatttttattaatcaaaattaagcccctgcaatgctcaacacaataggactgaatctgaatacttaaaagacatgagacgagcttgcccgcaacaagtacaaggtagcttagctgattccattgcatgcgaatcgagctaaaaa

SEQ ID NO: 64401 - DNA, 239 bp, Zea mays
agcaaaccggaccggagggagcactctggaaacgcctaaattctcgcgggccacaaactcacgaaaataagcggaaaccgacgaatataggctatatctcggtggctgacccacgaaaaacgccctgccgaaaaatgaaccgcgaacataggcaactatatctgtcagaacctacgaaaacgaccactcttctcggcattcccaacgccaacgaaaataggctgggtatttacgacggc

SEQ ID NO: 64402 - DNA, 259 bp, Zea mays
aatatctttaacttagaaaaatggtgataatttacagaattataacagtgctatgcaaatattacctgccgaagccctttagcattaaatggtgattgacgaaccatcctgtgtgttcctttttcgccagaaagaaacccttaagcatatcttccctttaattcaacagttgctgaatttataccggcctgttaaccaggggatttctaactaactcgtgtctaataacgctcgctctctcccaacctaacataattct

SEQ ID NO: 64403 - DNA, 349 bp, Zea mays
tatgaagattcttcatcccaacatgggctagtcggtggtgccagagccaacccatgttagtcttagcaattaagcaagtgttgagttcagctctatcaaaatctaccaagtatagctgaccctctaacactcccttaaatgctattgaatcatcacttcttctaaagacaatgacacctacatcagtgaacagacagttggacccaatttgacataattgagaaccagaaggaaaattgtatcctaaagaatttacaaaaaaaccattggaaagggaatggccaggggatataccaattttaaccaatctttggacaaaaccttgatttccatccccaaagggaatacc

SEQ ID NO: 64404 - DNA, 125 bp, Zea mays
  unsure (1)..(125): unsure at all n locations
attacgttcttgaggaccctcggaagccgaagcccccaatacacagcanagaacgaaccttaactcaatggacattggcggtaccctgaaacaagggacccctttgtcggggaccataataaggg

SEQ ID NO: 64405 - DNA, 252 bp, Zea mays
  unsure (1)..(252): unsure at all n locations
cacagngaagcaaccttggccgagcgcgtgtttccgaccgtatcgcaggagcattcaatgcaaggatcgccttgacaccttatcctgacgcgcgttcctcagtcggcagggccaaagtgaccgcagtcacttcgcccttccactgactgacctgataggaaaacagcgtctcctgccctgcttcgactactgtgccacccgccagggtgaggctgatagcagccgagtccagccttaggtgccataggaagc

SEQ ID NO: 64406 - DNA, 340 bp, Zea mays
ggacccggggacccgcgtcaccggtatagcccaatcgtgctcaccggagttcaagaacccgccggcgcacgtggaccgggtaagcccctgcaccgttttccaattcgttgcgcacatggcctctatatcactccgtgaagctcctcgtgcaccctaattgaactataccgcccgtggtttggccggagcaagagccgccgacgacccccgccgcctgtgcttcgtggtcagggtagctccgaccacttccgacgtgaacccgcacaccgacgtgaccgtcgcgacctcccggacgtaactgaccacccggccggagctttactgcggccggtaagcccca

SEQ ID NO: 64407 - DNA, 316 bp, Zea mays
  unsure (1)..(316): unsure at all n locations
gaactatgaaactcagctgaatgaattagaacgcgggggagtttgttttgctttaacttganaatccctaacctaaaaccctagtcttctaagtaatatctgccctctgaaagaagaactgactccaaaaccctagttccccggagtaccgtgaaggatagttgtattcaagatacaccttgatagaccttttctattatagcagtttcataagccttacatgaccatctatggtgtggggtgtttacttcgtcgctgaaggtcttatgggagaaaacacctttggaaaaaaaaaacagaacctgggccgaagttc

SEQ ID NO: 64408 - DNA, 259 bp, Zea mays
  unsure (1)..(259): unsure at all n locations
gacatttcacataaaagttctgagatcaagaatatttagntcatttctcaacatgcaaaagcgggtcttatcaagtggcttagtgaaaatatccgctaattgatcttccgacctcactccttttaaaatgatatctcctttagcaacatgatctctaaggaagtgatgacggatatcaatgtgcttggtgcgagagggttgtacaggaatattaccaattttaacagcactcttcatatcacacaacaaaggtactttt

SEQ ID NO: 64409 - DNA, 392 bp, Zea mays
  unsure (1)..(392): unsure at all n locations
aacaaatgtttattttgagaaagacaggatntgtagcgcatgccaagcagggaagcaagttggtgctcatcatccacacaagaacatcatgacaaccgacaggccactggagctcctacacatggatctattccgcccgattgcctacataagcatcggcgggagtaagtactgtctagttattgtggataanaattctgcctcaacttgggggttctttttgcaggaaaaatcccacacccaaaagaccttaaagggatttttgaaacggcctcaaaagaagtccggtttgaggatcaaaaaaataaaaaccgacaccgggacaaagtccagaacctttcaaatggaaggcttccttgaggagaagggcataaaccatgggttcttttttc

SEQ ID NO: 64410 - DNA, 276 bp, Zea mays
aacagtgtttttattttggatggctggggaaccttacacctactcgtctgttatatagagttgcaaggtaaaaggcgaacccccggattttacaccaagcggcacccgctcgcactcgctgtgtggtggaccgcagagaccgaacagtaactctgaaaggtggggccgctacccgctgagaaaagaattgtttctcgacaacaagctcagggagcgtgttttttaacctttgggctccgaagcttaaagacttttataccgatcagctcttacaaa

SEQ ID NO: 64411 - DNA, 370 bp, Zea mays
  unsure (1)..(370): unsure at all n locations
tcggctcagcacaaggatgatgatgaaggacgaaactgtcttaaaaggaaagactgctcaancctcgacagattaccctttggctaacagtaaatgtcatggacataaatgtaattttacccaggctgcgtgctgtgcctataaatagatgaacagtaacaccgtactgttcatgctgacttgtaatcacttgcatgtcacgcttagatttttaccttctttcaagcccgaggtccaaatggtaattaatatcaataatggttggtatagatatatatgataatttgaataatttaatgatttgaaagataatcatgctttcttatgttcatatgaacgcgatatatctctgatattgcatgaaaaagga

SEQ ID NO: 64412 - DNA, 201 bp, Zea mays
ggcaatcctcaagatgataacactccgcaccgaacggataccaaagggctaatttggcagccttcatcctcagcattcatctgggctctccaagccgtgcctaaaatgaagccctacaacaaggggggagacaaaggatcagcccaagagtaaaagacacaaaaccaatacgctgataagtccataactcctataccctca

SEQ ID NO: 64413 - DNA, 329 bp, Zea mays
  unsure (1)..(329): unsure at all n locations
tgtctaaanaagttggtgatgtatgggagtataaattactctataaaantccaaacgtctggattttggctattttaaatgccccaaaataccctattggaactaaaaatcatgaaactatttttattaaatactatagaaaattaggagcctcattaacttggtttggcacttttagccattttttatnatgttctggaaattctcaaagtctagaagaaaaagaaaacggaaaacatgctacaggattgggctgaaactggcctgggtcggcccattaactggcaaaagcgcccccgccctggtggttttgtaaaaaggcccctatt

SEQ ID NO: 64414 - DNA, 360 bp, Zea mays
tcaccgaattccttggtatcagcagctaacattcttgcatactgttcagttagtctgacacagctgagttgcaaccgtgattagattgtacattgtttgaatttttatatggtctgaactggtgatggtgtacatctcagcttaattttttattctcacagtatttgagctgtgaaccagacagatgccaccccatcccaccggacaatatatactgtcacgtgagtggatttgtcgatcatgaacctacatggctacatatggtgtactctaccgactaccgcgctgcaaattgattcaacaaactgaaattgttccaaagaatgacagtcaactcccgaacaacgaataatcaaccaa

SEQ ID NO: 64415 - DNA, 350 bp, Zea mays
  unsure (1)..(350): unsure at all n locations
tgtcaagcacattntggtacccatcgcttgatgggttctctaaggttagtaaacaaagatctaggaacccaaaagtcctttgtgttagcgcttggtaacctcattacctttctagcacaagttgcaattttgggttgcctagttacatgaaaattaattgaccagatatgagtggagttgttaccaatgggacaatccttgcattgatgtccctttttccggcatatgtagcaaagttgatcttcaaatcttgaagactacttctttactcgtttcttgcttgctaccatggtaggaaatattttctttttaaccctatgcccttttgtttaaaatggggacaaaatttg

SEQ ID NO: 64416 - DNA, 333 bp, Zea mays
cgggaagggtctgcatcctcacatgtgcgaagcttgtatgtcacagccagcccatgctagtcttatcagttaagcctgcatatacacccgcctcctcttttgcccaatccactaaggaaagtttgtcgtataatacacccttagaagctagtgaaccatcagttcttctcaagacagacacatctacatttgcgaagagacaattgtatcccatattgcattattgactaacagataacatactatattcaggagactcaactaaaaacacattagatatagagtgctcatttgatattgcatttttgcctaagcactttaccatgccttgat

SEQ ID NO: 64417 - DNA, 344 bp, Zea mays
  unsure (1)..(344): unsure at all n locations
gacctataaaactcagcttgctcaggccttcttcttcttctccatagcaggaaccttgccggaacactaccccacttacaaagaatgagggtagatctcttgaatcttggggatttgaactccttgaagtacctcataacaagggtgttacagggccttcttctgctgttgctacttcagcangctgtggagaaatgactgacacagggttgattctaggagaaccttcttctaatcttctcttcactatcttcttttacttgacccttcttttctctttgctcttcccactgaaggattttatcaaaaagtattaccttcttccaaaggaggaaaccgaaaac

SEQ ID NO: 64418 - DNA, 253 bp, Zea mays
ggacctatgaaactcagctttccatgtctccacatttaggcattaaatgctttttcggaggaaagggaaaaatatgttttggattatgttgtatgttaacctggatcatgaaccaaccttatttaagtccatggcagcgcttggtccttacgacagaattgcacatgatgggctgacttatattgcaattttcaaaacacctttttccaaggccttaacccgtttattggaaaaggtggatgttagtttccac

SEQ ID NO: 64419 - DNA, 348 bp, Zea mays
  unsure (1)..(348): unsure at all n locations
tccctttaaccccgaaacgngatacacccttcattgttgaagctttcacgtagacataatctccaactcgaaagtacaagggttgtcgtcgcttgtctgctaagctcttctgacgagcttgagcttctttcaaattataaaatattcattgaactttctcttcggtctcttttaccatatcangcctgaagaaactttttcaccacggtcagaccagtttaacggagtgcgacattcgtcgtcatataaagctccaaaaggtgccatctaattgcttcctggatagcaattataaattgaaaactcccctattggaaaacattcatcccaattctgtgggaattccaa

SEQ ID NO: 64420 - DNA, 323 bp, Zea mays
  unsure (1)..(323): unsure at all n locations
ttatgaaggcaggccttcngttcccattgagtgaatttgttgttgaagtgctgaagatattccagatatttcttcatcaaattactcccgaagctataattaggatggggatgtttgtttgggctgtaaagagccaagggctggaaccaaacgcaacgtgcttctgcaatatgcacgaattattgtatgagacaaaggctaccgggaaagaacaatatcacaacaacttcagttgttacagaattattgcctgtcccaatgcaagttaccatgttccaaggtttcggaaaaggtggtccggggcctgtttaaaggaatggttt

SEQ ID NO: 64421 - DNA, 310 bp, Zea mays
  unsure (1)..(310): unsure at all n locations
tgacttggccctttgcatgctanggactcgatatgattggacccttcagaaagctcaatgaggatacactcatgtactggtagcaatcgacaaatttactaaatggatagaattcaaactcattgcctctttgacctcagctaaggccgtggaattcatacaagacataatattcagattcgggataccaaacagcatcataattgacctangatccaacttcacaagtgcagagttcttcgacttctgcgagcaaaaaagcattcatatcaagtatgtttttgtagcacacccaagagccaatgggcag

SEQ ID NO: 64422 - DNA, 398 bp, Zea mays
  unsure (1)..(398): unsure at all n locations
tgcatgcatgggagaattttagtgtccgaaccatatttcacgttttagtccccggcgggccggtaggctattttggcctcccgtgacacatggttattttcgtcgaacagcgattacgtgcctcccgaccgccacccattatttgaccatagagactggtaaagttgntttggcctcccgtgagctataacacacgtttttatggccgagcgaccatttatattcccgtgtcctccacacgtgttattttccccggacaccttaaagcggttttgggctccgcgagctatttacacattccgtggcaaccagcaattttttgttccaccggcacctttgtttaaaccgggaggccgtatggattttttgcacccggggctttacccccatttttggaa

SEQ ID NO: 64423 - DNA, 304 bp, Zea mays
  unsure (1)..(304): unsure at all n locations
cgggtacaactngcaatctcgtagcctctgaagtactttcctcaaatgttcctcatgctcttgctcattttgggaatatacaagaatatcatcaatgaacaccactacgtacacactgttcattaggtacatgaagtaagctggcacattcgttaaaccgaatgacataaccatgaactcatatagtccatacttggtgatgaatgatgtcttcggtatatctgaaggtcgaatctgagctgatgtaacatgacctcaatctatcttgagaaccaggggctcccttaactgatcaataggtatc

SEQ ID NO: 64424 - DNA, 371 bp, Zea mays
  unsure (1)..(371): unsure at all n locations
tcatggaaaggaaccttcggccatctcatgctaactttttcagccgaaagccgcttcttccttgaagacctttggcgacgaagcatagacccaacacatggcctctccagcgctggggcctggacattgtcgggcccctgcccaccgctcaggggaacctttagttcgccttcgtagccgtcgaatacttcaccaaatggatcgaagcgagggctgtttctacaataacatcaaagactgcccagaaattcttctagcaaaacattgtttgccgcttcggagtaccgtccgagctaacagttgacaacggcaagcagtttgatagccaaaatttacagaattattgttnttccattcggaccaagcttgcc

SEQ ID NO: 64425 - DNA, 280 bp, Zea mays
  unsure (1)..(280): unsure at all n locations
tggtcattntattgctaactgtcccgacaatgattgtgatcatgatcaacggaacaagagggagaaaaagaagaactataagaaggcaaagggcgaggctcatcttggcaaggagtgggattcggactgctcctcgtccgactctgataatgagggactcgccgccactgccttcaacaagtcatccctcttccccaacgagcgtcacacttgtctcatggcaagggagaagaaagtaagcactcctaatactagtactaatgcttcttcaagtgaggat

SEQ ID NO: 64426 - DNA, 394 bp, Zea mays
tgaaggccaagtcaaaaagcaagccccaatatactttgtatccgaagttcttagtttatcaaagaaaaattatacagaattggagaaggtgttgtatgctgttttgatggcctccaggaagcttcgagactattttcaggcatacaatatagttgttccttcttcacaaccgttgaaggatattatgagaaatagagaagctactggaagggttggaaaatgggctgcggaactgaatgaatattgtattgattatgtgcatagatcttcgattcagtcccaagcattggcagactttattgctgactagacgccaggggctcaggaagaagaaacgagtaaagatgccgaagttggacagtattttgcgatgatcttggggaacctccgaaca

SEQ ID NO: 64427 - DNA, 261 bp, Zea mays
tctaacgggagagcacaggctaggattaactaatgtatatgctgagaaagacaggagtcgtagcgcatgccaagcaggggagcaagatgaggctcatcattcacacaggaacatcatgacgactgacaagccactggagctcctacacatggacctatttggcccgatagcttacataagcatcagcgggagtaagcactgtctagctgtcggggatgacaagtctgaggcacttgtgtgttcttttgcatgaaaaacttc

SEQ ID NO: 64428 - DNA, 313 bp, Zea mays
ttgagtgccttcactttccaatctagcatatagggtatgtatgacacaagtttgctcctttggccaaagccttgggtaacacctggggtgttacagccctcccccttaaaggaatctcatcccgagattgggtaaggatcctttattggggtaccaaaaaagtgcgtgttaatgtgttgtggttccctttgatcaagattctctagttaactgctctttgaatgtcattctctttgcaacttcagaaggaagtcctttttgaattagtttcacaattaactctgctggtataaactatgtttctctaaattta

SEQ ID NO: 64429 - DNA, 277 bp, Zea mays
acatactatgctgtgccaatgtacaaggccgctatattcttgggcacgttcactggccctccaagtggatgccgatcagtaagtccttcatataaactaacttcttcagataaatatttctatttccactatatacgcctgggattcgtactatatcggcttggaatttaatgaatatacgctcccgagtttacgaaggatataaaaattaaatagatttgttacaaccagatttttgatggtatagaagaacctagaactccatgaagtttatata

SEQ ID NO: 64430 - DNA, 342 bp, Zea mays
  unsure (1)..(342): unsure at all n locations
cttaaaactaagcttagtgactagtgagagaaaatgcttgtgtcttttgatctctcgcgcttggattgctttcttctttcttgaatctttattgcaatcaaactcacttgtaattaaggccagagacaccaatcttgtggtggtccttgtaggaactttgtgttccaagtgattgagaagagaaagctcactcggtccgagggaccgtttgagagatggaagggttgaaagagacccggcctttgtggcctcctcaacngggagtaggtttgcgaaaaccgaacctcggtaaacaaatctgcgtgtcacatctcttatttgctttgcgattgttttgcaccc

SEQ ID NO: 64431 - DNA, 418 bp, Zea mays
tatcatatcgcagatgcctgatgctgcttgttactacaacttgctgaaccgacagtggcaaatagtccaacaacaaaacatgcttcatgagcgaacacgagcactatatggggcttcttttgctgcaaatatgggcaggcaatcctcagataaagcagaattttcaaatgatgattttgttggttgtgcttggaatgagctctctgaatactatgcttgtgaatactatgatgttccatcaaaagatggtgttttgggttccattaactttagtatactcgcggaagcacaagcaagatggaaatccaggattacttcatggacatggtgctaacggtgaaattctggataaacgttggcgcagtgaattaaaaactctactggatcgcggttgggtgatggcatatgctgatgttag

SEQ ID NO: 64432 - DNA, 209 bp, Zea mays
ggacactataaatactcagcttgcattgccgacttgatgtagcgcaggcctttcttcatgcccaggcgtgctccactatagggcctacttgagagctaacttggtctttccattttctaatcatgctcaacaaatgtagcatctaatgttcctatatgatcatcgtgttgcctaaacatagccaagtgatcctgaatcgcgaccatgtt

SEQ ID NO: 64433 - DNA, 418 bp, Zea mays
  unsure (1)..(418): unsure at all n locations
ntaacccctgcgagaccttttgccgtgtctttctaaccatattgaatgcgacatcgaatctcatacttgatgcatattcactttatttgttcccttgtatgatgtactgtttgtttcccaacttgaatggatggatgtatgtatgcttgcaatcgcataaagaacgatccggtcgaaaagtccgaggaactcgcatgaaaagcccctgacatcagtcggttggtgaaggaagtgtcccttgacctatctctgactaataattcttaaatccacccccctgcatacacatttatccttaaggatggcctacctttgttaatccatgtcttggataccaatttgggtggaataataatacctctacttattcctttggtccactttattaatggaccttaagaaaaatatttttttaacc

SEQ ID NO: 64434 - DNA, 341 bp, Zea mays
  unsure (1)..(341): unsure at all n locations
ctttcaccatattatcacggttatcgtgagaatgttgagcatgacactntcccttcaaaagtggtaagctccttcttagccttccaacttcttccttgagctctttattttcttgtgtgatagaaatatcactaattcctgaaatttctagctcaatggaagattggcttgcttgataacaacaattgttagcacatggtgatatagtttcaatttcaacacatgtgcacatgtgaggttggtattattttcaattagttaacacaacctcttgagccatttctaacatgatatgtgaatccataatttattatgagagcatacaaccatttatgtttttc

SEQ ID NO: 64435 - DNA, 272 bp, Zea mays
ataaaactcagctacaattgcgaacaggaggaccttatttcttaatctcgagcaacaaaagtcgttcttaggaccaagtaacttgctgagttacaaaagccgtcccaaggaggcgggtagtttttgctcaagtcttccaagggaagcaacttacacgaaaaaaaccctgtccgctaataaaaggaacgcgaaagtaagcgaatccgtaaagaaaagcgaaagctctacggagttcaggaaaataacctgattctttaataaaggataactcc

SEQ ID NO: 64436 - DNA, 390 bp, Zea mays
  unsure (1)..(390): unsure at all n locations
tcaagtgattngaaggtccatgttgaattattcccaggttcaacttctccatttcgtggcataacgtaatgtcagaaatcttcatcgtcaaacaatggcaggaagccttgtgacttaacgcatctgccactacattaaccttgcctgggtgatagtgaatctccagttcataatcattaataagctcaagccatctcctctgcctcatattcaactctgactgggtaaagatgtacttcaaactnttatgatctatataaatatgacagatattccccagcagataatgacgccatattnttagggcatgaaccacaacagctaactccaggtcatgagttggataatgttcttcatgtcggcgcaacttccttgagcataagctatact

SEQ ID NO: 64437 - DNA, 203 bp, Zea mays
tcttctcgtcatcgatgagcgacgacaacgcgaatgctctctactcatggagtttgttcggggattgaagtatgaaacatggattcatgcttggcgttggcttatgaaaatgactcacaagtctgatccatggaaaaaatattacgaagaacaagattcacacatgcaaatgggaatttagtataatgcattattcaaacaaa

SEQ ID NO: 64438 - DNA, 263 bp, Zea mays
gacctataaaactcagctgcgtggggccgcaggagggagcgtgtgtttttatctacggtgtccccaggcgcacgggaccagcgtaaccaaatcctccccgacataatctagccgcacggtggagcttcatgcaatctggcacagctaattacttcgagaagctctcccgcattcttgaccttgccctcttgaggccggactctccgaactattagaagacccgcatttctcttttttccaagtaacccgagagcctggcttga

SEQ ID NO: 64439 - DNA, 393 bp, Zea mays
  unsure (1)..(393): unsure at all n locations
tattcgatntgctggagaagacaccactctgacgcctcatgatgatgaactagtatatttcaaaagctctttcagagcatgattactgtttcccctgaacgagatgattggataagttttggataattgccaaatttatcttcatcagctaacccctaatgctatcgctaggctcagcatcttcatctgggcccttcggagccagcggatggacccaaatgttgaaacattctgccgagtgcatgaattgcactatcaaataaaggctatagcagacgggctgcacgaaaatattgtcagctataacttcacgtatcgcanagatacgaatgctccggtcctcagctatagtaccaagaggccaaccggctggaagagcgaatgcgtttatat

SEQ ID NO: 64440 - DNA, 432 bp, Zea mays
ttgcctgctatgctatgctacatgctcacagaaacactctcgtgtcgtcgttgctttcaattaattctcgcatgccgagtcttgtctggaatcaatgcgtggtagaccacacttgttggcctgtgatcttcatccatcgtcgatcgcgatcggaaggtcgacaaagttttagatctagcttggctagatgctatcattcacgcaatagtaagctaagccgctagctagctagggcgtagctggatgttcatataaggagtggcaacaaggtcacgttgcttgcgcttttgtttccttttcctttgatctggggcccgtggcagcaacgttcgactgaatataaatctctaaatatccatcctcccacgcgcatagcctgaaaatcgcagtgagacacgggcaactaattagtacatacatatctacacgtct

SEQ ID NO: 64441 - DNA, 466 bp, Zea mays
  unsure (1)..(466): unsure at all n locations
tcaagcttgaacgggcatgcttactatatttgtctggatggagtagaatatatcctttgaaaactcttttgtagtgaagagcatcagctagcatcaagtaggttgaattccatctagtggacacatctaaagaaagacccctttgctctactcccaaagcagcagcctgcttaaaaaatatctgctcttgcaaaggtgagctcttgacaacaactactaggctacgaatgtttgcaatcacatctgaaattgtactcacaccatctctagcaataaggttaataatatgagcagcacaacgcacatgaaagaacttgccaccacanagaacagaaccttgattctttatggtggaaacgacggtgtccacacaaacatcattggaagatgcattatctaaggtcaatgcacataatttatgatcgagattccaagaggccatgtnttgcataaatgcagcactcaa

SEQ ID NO: 64442 - DNA, 485 bp, Zea mays
  unsure (1)..(485): unsure at all n locations
gcttccgcagaaaagagaagtagtnttttatgttntgtacagaatatcttctgcagaaaggagaagtagtcttttatgttttgccatgtacaaaaaagcaaagcttctgcaaaaagaagaagcgaccttttatgcttcgttgtgtacgaaaagaagggaaggtgttttttcgccttcggctcaaaatactaatttcgtccacaacaaagcgcctcaagcaaaagggtaagaatatattacaaagtatgtacaaagttccttgaaggtagtctagttgtgtttacaagaattgttacaaaaatatcctgagtttttctacagtacacttctactgatcttcattaagtgtcagcttcgacgacataatttaggcatcatcttcaccttcgtcatcctacattaaataagagtttattgagtaaaatcaagagcaaagganaaaggtaactccgaagtatcatttcttactggctcaagatgactcg

SEQ ID NO: 64443 - DNA, 469 bp, Zea mays
  unsure (1)..(469): unsure at all n locations
tcttcatgcgattctcacttatatgacccaaacgacagtgtcttatgtaagtatgacttaaatcattaggtcgaggccttttagcactaatattacagataggtgcatcatcaagatttaaaatggataacctattcataatggatgctaaagccacaaacatgccattcttagagatcacacaaccattgttttcactcgcaaatgaataaccatccttcatcaaacatgaaggagacataacgttttgactcatactaggaactagataacaattatttaactccaaaataaatcctgatgggaggtggagttgcatcgtcccgacggtcaacgcagcaactcttgcattattgcctacccggagatcaacttctcctcttttcacgcttctacttcttatcattccctgcatcgaatngcacatatgggcaaccgatccggtgtcaaatacccaagaattaatata

SEQ ID NO: 64444 - DNA, 128 bp, Zea mays
cttgcctgtgggatctaaatcggatctatgccgttacttgtacaaatgttccgtcaggattatttgaccgcacgcagcttcatatctcacgaaatggctcaaatgcgaatgttgcagaaatgtgcaaa

SEQ ID NO: 64445 - DNA, 318 bp, Zea mays
  unsure (1)..(318): unsure at all n locations
cgagccgcgcatcgagagcgtgcacaccattatattaagaagaaaaagatctagcatagaccgatacaaaccgtcggagcggtgaatgcacgaaaatagaagagggtttcaagacagcagagagaanctgaaccacacaatacactaacgcctaatctgcttcagccccggtgcccctgctaagcaccataacctggcttgcttcttactatctttgacaaccatgggcacactggngaaattgtatcaaacacacatgcattaccatgttttcacagccaccaagccacaagagcgaccattgagtaaaggcctctc

SEQ ID NO: 64446 - DNA, 479 bp, Zea mays
  unsure (1)..(479): unsure at all n locations
gaaaccaccccgccacatactctttgataccttggtcattctcttttattgctatgactaatgtgtgttcaagttcatttcaaaccaagtcataggtatattgaaagggaattggagtcttctgcgaagacaaaggcttccactccgtaactcatacttcgtcaccactccgagcaactctctcttctttgggggagaaatgagcatcaaggaaaaggacttcatccttgggggagagagtaaaagctcaaacgcaaaaggacttcgtctttggtataatcttaactcacttatttatgaccaaaggggaagattgcacttcaagggctctaatgattccggttntggcgatacatgccaaaaagggggagaaatgagcccatagcaaaaggaccgcaccaccaccaccaatactcaaaacttagtgctttcagaagtcttatcatttggatcctattgtgtcaaacgtggagaaagaa

SEQ ID NO: 64447 - DNA, 365 bp, Zea mays
tattatcgggagcaccagcttcctaatttaatgtgctactacttggatagtgaacatattcatcagctcagaagcggaaaagagttctccggatgtgggcaccaacgttcgggactgattctctaatgctatgaggtaagaacaaggtaacactaaatgttgaaggtgaatgcccttcgctctttgaagcattatctcccttaagatataatgatcttcttacgaaggtcatgaaggacgaaccttcatcatcacagtgtctattactgaaagaattagcatgtgatctttaaaagatctcatgaataatcatataacattattaatatatatatatatatatatcttttattatcatggataaa

SEQ ID NO: 64448 - DNA, 378 bp, Zea mays
tagtacttaaattcttacttactatgcaattgttggttcttgagatatgcatgaggcactacacttagggggagtattcaaaactcaaatctttcatgaaaacccctagtgcaacgccaaaatgcaaatctcaccatttgactattttctctaaaaattattctagcctatggcaaaatattttaaaaattatgagaaaatatatgagggtgccaatacctgtcccaacaagtgttattttatgtgtttataagttgggatttggtttggttaaaaactagatagaaaatttcaaaattttcctctgtctaggctcaccgaacagtcgggtgtgcaccggacactgcactgtgcactatccggtgcaacggacgcatg

SEQ ID NO: 64449 - DNA, 256 bp, Zea mays
ttgcttttcttcatgtcctgcatcacgaaaataaacttttaacctttggccgcaatcaagataattactacaaccctgtgccaatctataagacattttggcttcgctaaatacacaggcattactattgttgtagtcaaaccaattatctccgtgcataccaaaaataacggtctagaatagaccaaatgtctcatagtcttactctctattaaaccctaggtcaagcgcccacatccttaagcctcctcctgcc

SEQ ID NO: 64450 - DNA, 275 bp, Zea mays
cattttgagaaagacaggatttgtagcgcatgtcaagcaggaaagcaagttggtgctcaccatccacacaagaacatcatgacgaccgacaggccactggagctcctacacatggaactattcggcccgatagcttacataagcatcggcgggagtaagtattgtctagttattgtggatgactattctcgcttcacttgggtgttctttttgaggaaaaatctcacacccaagagaccttaaagggattcttgagacgggtctcaaatgagttc

SEQ ID NO: 64451 - DNA, 469 bp, Zea mays
  unsure (1)..(469): unsure at all n locations
tattcngtttgctggagaagaaaccactctgacgcctaatgatgatgaagtattagttttcaaaagctntttcagagcaggattacggtttcccctgaacgagatgattggagaagttttggataattgcgaaatttatcttcatcagctaacccctaatgctatcgttaggctcagcatcttcatctgggcccttcggagccaggggatggacccaaatgttgaagcattctgccgagtgcatgaattgcactatcaaataaaggctagagcagacgggctgcacgaaaattttgtcagctataacttcgcgtatcgcaaagatacgaaggctccggtcctcagctatcgtaccaagtggccaaccggctggaagagcgaatggttntatatcaaggccgatgaaaagaaaagggggaaactgatgatgatggccatgtgcccgctggctntaagcttcagaatgact

SEQ ID NO: 64452 - DNA, 379 bp, Zea mays
agaacacgtgataggtatgacatacgcgcattttcaaaaggatttaccttgagcagctggtcaagcacgtaaacaagtgagaggagcgcattacggctagaactgtgatgaccactttaataaccctggagctgcttcatatggacctcttctgacctgttgcctatctgagcatatgaggaacgaagtatggtgtaagtattgttgatgatttttctcgcatcacttgggcgttcttcttgcgggattagtctgagaacacaaggaccctcaagcgctttctcaggagagctcaaaatgagtttgagctcaatgtgaagaagagaatgagcgactacgggtccgaattcaagaacctttcagtggagaaatttcttga

SEQ ID NO: 64453 - DNA, 464 bp, Zea mays
  unsure (1)..(464): unsure at all n locations
tatgtggacgatgtggtaatcaaaacagaaaattcggaattatttcattgaagatttacaactggttttcaacaagtctacagcgatatcgatggaagcttaatcccgaaaatgtgttttcggagtaccagcaggaaagctactcgggttcattgtcagccaccggggaattgaaactaatccagagaagatcgaagctatcatgaagatggatgcaccgcgaccacagaagaaagttcaaagacttaccagatgtatggcagccctgagcagattcatatctaggctgggagaaaaaggcttaccattttataagttactcaagaaggtggacaagtttcagtggatttcaaaggcacaggaagccctagatgcattgaaanaattcttaacgacaccaccagtgctgaaaccaccgcgtcgagccacaccgactcaaccagctgaagatctactgctatata

SEQ ID NO: 64454 - DNA, 403 bp, Zea mays
  unsure (1)..(403): unsure at all n locations
ttggtgaatgagatcaagctcttagagtttacaaggttgatttctcctaatcatctgtttggngaagacaagtgttctctgacctacttatgttcttttcacatgataatttattttctcgcattacacaattaaaacctaaggattgactaagtttctattcaccttgtcctttattaccttttaggatattatggctagcattatgttagtgctctactttaatcaatgaacatgatgagatatattttatgatacgatgattttattttggatatgatgatgaacttgtggcacaaaaggaggctcgagctatttcccgagaacctctccagaaggacctgtttgttgagagaccacctatgaaaatagtgcaaccatgagggcggtatgggacgccctt

SEQ ID NO: 64455 - DNA, 413 bp, Zea mays
  unsure (1)..(413): unsure at all n locations
gagataagtatcatctccgaagcgaagagtatctgactaagaagagactcccgcatcacactctgccactgacgtggaagagatattgaaggtaatgactgaatccctgcctgtgaagctaagtccattagggcctcaactgacaaagttntttcagaaggaaaaggagcccgaaaaaacgaagaaaacaacttaaacaaagagacaaagaatcatcgcagtgaccgaagtcattgacaagacaccaccgagagcttcagctcggagaacaccagcagttgatgaaatatcaaatgttgaagtcgcaccttcggaaatcgcgactaccgaagctacctcagccgaagatttaacttggaaccacaattaacatatcgacaaatactgctgacatggctcagaaaagctctact

SEQ ID NO: 64456 - DNA, 353 bp, Zea mays
tataggtctggtgagaagggttacccaagttttgttgattaatctccacacgacccatcaaggaaggaatccatgtgggagttcgcaagagaaaggcttgcgtgtaggcatcgatgcttcctcaataagctagctgccaagcgaaagctgaagcctgtagatgatctttgagttgccagaatcagcatttgctatcagccaccggatgctcctcaaaggccggattttgtgaagttccatccctctaaaaggtgcaagtgaagatatgtaactgaagtaacgctatacccataacccttctaagtcaaatctcgaggacgagattccttttaagtggggtagatttgtagcat

SEQ ID NO: 64457 - DNA, 315 bp, Zea mays
  unsure (1)..(315): unsure at all n locations
gatatacatgggctccaacactatgcatgcactgatattaacatatagaggaaaacaaggactgatattaacacatggatacaagagaacttaacatccagtaccatgtggcaataacaatagttacactaggaatttaatagaacagcattntgaacaacttgagatcaatgggcaaacctagataacctaaggtggtgcanatgccacatacataccatataactcaccatctatactaactcaatctacacatctaataggcaatgtaagctatcagcactctttgcacacagataacatgcaagatgcata

SEQ ID NO: 64458 - DNA, 403 bp, Zea mays
aacctgaacataagaaccagacataagaatctatcgctcgcatacatcagaacattggttttctttaacacgaaaatgcagcttcttaactgaaatcagatttcagttttcattgtgttttggccaaaaacagatcaccttctagcgaagaaaagatgaccttcaagaacacaataaacatgaggcgttcactcacctttttgctgtcgaagttacttctgcagaatcaattagcaaagatctactgcttgaagaactgtaatagagaaggaaaacatattaggttcataggagactgtaccacacgccctcacataaattccagattcataatattctcctagttaataccaccgaagggagatactctttcatgacatataaaacaatagtatctatatta

SEQ ID NO: 64459 - DNA, 453 bp, Zea mays
  unsure (1)..(453): unsure at all n locations
actcagcttcttaccatgcgtccgtggatatcttgaggaggttgtttaatgcctcttctccttagntgctttgctttcttgttcctttcttttgatcctgcagcttgatgctcattcaaaaatttgctttcttttgagcaacaggggttagcacatggtgatatattatctaaatgcgcacatgtgcaagaatgaggttcacatgaatttaagtttgcagttacaacctcatgagcaacatcaagcatgatatggtcatcaactaattcattatgagaataagatagcatatcatatttttcacttagagcaagtttttctaaatttatcatttctacttgactcttaagcatagaattctcagttttaagttgagcaacatcagataatacatcatgattatttctttgctcanataaaacagattncataccgtggaccaaattatcatga

SEQ ID NO: 64460 - DNA, 464 bp, Zea mays
  unsure (1)..(464): unsure at all n locations
tcatgttatcagatcgagcttacatggccaaatatgtatcactcacctcgtcgctacattccatgacatgtgactacaaaatgtgcatatgacaactcgagagactgatacatacctaacaccttgtcttacatatcatagttgcattatttgttctagatggactttgttggaggtccttagccgtgctcacgcgcacaatcgtctagctacgaatgtttctagggtcgttgatacttactatagattggatctaggatgttcctatgaatgacttaccatttattaggacctaagtttggttaatgttgtgggtaatgctagcggcttatggactatntttgcatctttggttgttcacgtggcttgtgtcgatctagcatcaataatcctctanatcatgctntagacgaagttatttcctgtttcggtcgctttcaatgcacatttacgttcatttactt

SEQ ID NO: 64461 - DNA, 403 bp, Zea mays
  unsure (1)..(403): unsure at all n locations
tattacacacgagtgctacctaaggtacccccgaactctttctctaaagtgtccccaaactccttgagaaggtcatcatagctggccagggacatgtactctgcgtcggactggttcctgggtgggttttcttcctgctgctcagtctgacatccttggcttttggtcttcttgcggattatccttgcgggggcgagcttctttagtaccttgtcgtagtccattatgagggtgcggtaagcttcacgggtgttggtctcttcgccttcagctaacgagaggctctcttggagggacgctttttcttctgaaagctccctgactttctgctccaggctntccacccgggaggttatggaggtgcaactgaaggcgaggtcatcatattggttatcaacggtat

SEQ ID NO: 64462 - DNA, 475 bp, Zea mays
  unsure (1)..(475): unsure at all n locations
ntagacaagtntaaacagttcaaggctgaggtagaaaatcaacacaatttatagataaacattgtcagattcgatcgtgggggagtgctacaggcaccataccgagtatgggcatgtcctatggacttttgaggttcctaaaagaaaatgacatagttgctcagtattcaacacctggtgaaccacaacggaatggggttgccaaaaggcgaaacagaacgctaatgaacatggtaaggagtatgcttagttactccagcttaacattgggtctgtggataaaggctttgaaaacctctgtccatacacctaacagagtcctccgtaaatcagatccaaaactccatatgagttgtggaatggcagaaagcccacgctcaactacttccacatatggngttgtccagcgaagctataataattaatcctggagagggaaagctagatgacataaccactggctaccattttattg

SEQ ID NO: 64463 - DNA, 440 bp, Zea mays
  unsure (1)..(440): unsure at all n locations
ntcgccaaatcctcaagcaaaggagggggaaggattacaaaccccgctccaagaaagtttgctacaagtgtggtaagcccgatcactttattgctaaatatccattatcaagtgatagtgacaggggcaacgacaagaggggtaagaaggagaagaagaggtactacaagaagaagggcggtgatgcccatgtttatcgggagtgggactccgatgagagctccaccgactcctcctccgacgaggacgccaccgacatcgccatcaccaaaggccttctcttccccaatgtcggccacaagtgcctcatggcaaaggacgggcaanagaagaaggaaaatctaagcttcactaatatcaacatctatgataggctgctctatgatgataggatacttgctacttnntttcacctaacatcaacanaggaaaaatgatga

SEQ ID NO: 64464 - DNA, 457 bp, Zea mays
tataaaactaagcttctaagggagaacacgtgataggtctaaccaatgtacatttctaaaaagatagaccttgtgcagcttgtcaagcaggtaaacaggtgggaggagctcatcacagcaagaatgtgatgaccacttcaagacctctggagctgatgcatatggacctcttcggacccgtcgcctatctgagcataggaggaagtaagtatggtctagttattgttgatgacttttcccgcttcacttgggtgttctttatgcaggataagtctgaaacccaagggaccctcaagcgcttcctcaggagagctcaaaatgagtttgagctcaaggtgaagaagataaggagcgacaacgggtccgaattcaagaaccttcaagtggaggagtttcttgaggaggaggggatcaagcacgagttctccgctcactacacacctcaacaaaatggtgt

SEQ ID NO: 64465 - DNA, 288 bp, Zea mays
gaacttcaagtgcaacttgataatttcatgaacatcaatgcctcatctttagtgattgaatctaagtctagctccttaaatgagtaattttgcaaacattgtgccaaatatcatgcttcttggtgtctaactaaccatgcaaggaaaatagcccacatgtgaaggtcaaaagaaatttgaaaagatgctcttccaatgatgggttaaaaaaagtggaacccaagtacatgtccttaaggcccaacaatggaagaagggggcttgggttcaattattccacggaaaacc

SEQ ID NO: 64466 - DNA, 437 bp, Zea mays
  unsure (1)..(437): unsure at all n locations
ngaaggagtgaagtcgatggatcgagacactgaagtgttgttattccacactaccttgattaatttattaggccacttacccttcgacaatctaaccaaagactttataattcccaataaaattataccattggctctttcaattaacccattagattttgggtgtctaactgacgcaaaatgtatatttatgcctacataattacacaaaattctaaatgctntagaatcaaactgtgtttcattatcagttatagaacttggaactccgaagcgacatataatattttgccaatagaatttccgtattgtagccaaagatatggttgctagtgcctttgcttcaatccatttggagaagtattctactttcagattctactaagaatttcaagtgctgatatctgcttacctctgaagccacaaagtgggtgcat

SEQ ID NO: 64467 - DNA, 431 bp, Zea mays
agctcgaccatatgttataattgaaggggagttatacaagcgtggggtctgttccctattgctcaagtgtttatccagatccgaaggtatagaattaatgaatgacatacatgcatgtctgtgtggatctcacattggatctatgcccttgcttgggaaagtttttctccaagtgttggggacttgttctcaaatgctatgagttaagaacaaggcaacatataaaatgctaatcgttaaagtccttcgttcttcgaaacattatctcctttggggtataatgctattcggacgaaggttatgaagagcataccttcataaattcatttcataacgacgaatgaagaaatgtcacgaatataaatggcatcatgaacagttatgtattatcattacacataaacagagatattcattgatcacaatgtgta

SEQ ID NO: 64468 - DNA, 255 bp, Zea mays
tccagctgtacatgggggcgtagctatgtgctaacgtggccggcggagaagtacttgagccctgtagaaacgcaactggcgatgcgacctgtgtcctgctaacgtttctttgccttcgtagagagctgagaacaatcgacgtcatggacgcatacagggagccatcattacctattattggagtaatttgatgtgacaccgggcttgttccttcacagcctgaggtggctagcttgcggcagggcaatgatgtat

SEQ ID NO: 64469 - DNA, 321 bp, Zea mays
aacatgtatgcgccaacgttggtgactgcatcgtcgagagaacccatcaaggataatcattggcgctttgcgacagaacatcgctcactttgtggaagaacgctccaagctgagtccaataaaatgtatcttctagtaaagaagggcaaattccctggatgtcttgtggctaccaaaggaattgacgctcacccgagcatgatcaaagagatactttggatcaaaccgctgcaggcaagaaaatgtgcccagaagttgtatagaacacttgcatcagtgaacagattcatctcaagcttggcggaaagaaatctaccggtc

SEQ ID NO: 64470 - DNA, 385 bp, Zea mays
ttcgcttctgttatcatccgcagcccaactgtgtctgggaacgcgccaacgggaaaatcttcacagcttgtaagaagatgctcctttatgaaaaaaggggaaatggaccgatttgttacctgaggcagtctgggcactaaacacgactgagtgcagagcgaccgggtttactcccttccgccttctatacaagtcggaggccatgaccccgcaagaaataaagcatgggtcctcgcgaacagttccgtcagccgtccccgatgtggacgagccaacttcaaaggacctcattgacggagaccgagtcttctccctacaggtcctaaacaaataccaagcccagaccaaagcatggcgcgaccacacagtcatcccgagggagttc

SEQ ID NO: 64471 - DNA, 181 bp, Zea mays
  unsure (1)..(181): unsure at all n locations
gcaggcttagcggtaatctctgacttagacagtcttagttatactagggagaccgctatatcctgcgcatctatgcatggcatgatgaactatgtantggttggatcattgtaatgattgtcaccagagtgtgaggttccctggcatttggtctacaaattatgttaatggaggtagttat

SEQ ID NO: 64472 - DNA, 352 bp, Zea mays
  unsure (1)..(352): unsure at all n locations
tggaggcgtctattggntgtctacttggtgtagactccttcttcttctcctccgatgccttgaatgcaacgggttgggcttctgatgggtcgtcaagctcgttgatttttctcgagccttctatcatgcactcaaaacttacaaaatgcccgataacttcctcgggggtcattttagtatatctatgattaccacgaatcaattgaacttgagtgggattaagaaaaatgagagatcttaaaataacatttaccacttcgtggtcatcccacttcttgctcccgaggttgcgcacttggttcaccaaagatctgagccggttgtacatgtgttgtggctccatccctttttg

SEQ ID NO: 64473 - DNA, 482 bp, Zea mays
  unsure (1)..(482): unsure at all n locations
tgtgaagccaatcacaaatctattgaagaatgatacaaaatttaactggtcctcaagatgcaacgaagccttcgagcagctgaaggtattattgaccactgctccggtattggctcaaccggacattgaaaagccttttgatgtgtattgtgacacatcgggcagtggtcttgggtgtgtcttaatgcaagaaggacgagttatagcatatgcttcaagacagttgcaccgacatgaggaacattatacaactcatgacttagaattagctgctatggttcatgcccttaaaatatggcgtcattatctgctaggaaatttctgccatatatatacagatcataaaagcttgaagtacatttttacctagtcagaattaaatatgaggcagaggagatggctngagctgattaaggattatgaattanaaattcactatcacttatgcaacgccaacgtggtggcagatacactaagtcgca

SEQ ID NO: 64474 - DNA, 463 bp, Zea mays
  unsure (1)..(463): unsure at all n locations
ntaccaaatgtacgtgaagagtgccttcctcaatagacttatttatgaagaggtctatgttgagcaacctcccagctttgaagatagtgagtaccctaaccatgtttataaactctctaaggtgctttacgggctcaagcaagccccaagagcatggtatgaatgccttagagatttccttatcactaatggattcaaagtcggaaaagccgatcctacgctcttcactaaaactcttgaaaatgacttgttcgtatgccaaatctatgttgatgatattatatttgggtctactaacgagtctacatgtgaagaatttagtaggatcatgacacacaaattcgagatgtctatgatgggggagttgaagtatttcttaggatttcaagtgaagcaactccaagaaggcaccttcctaagccaaacgaagtatacccaagatattctaagctagtttgggatg

SEQ ID NO: 64475 - DNA, 486 bp, Zea mays
  unsure (1)..(486): unsure at all n locations
ctcagcttgaagaggtcttggtaggcaaagaaaaaatagaatcaaaagctgcctcgagggtgggagtggtagaaaaagtagttgcaacgacaatgaaaaaacaagaaagcgagtgaaaaggcaatacacttgtcctaattgtggtgaattaggacaccgccaatctagctacaagtgccctntgaatggcacaaaaaaaaggctagtgctgaacttacttctatatgcttaatttatcttactactcatgaactaaatgtttgagtatttntttgtgtaggaaaaggaaaccacggaagaacaccaccaaaaattggattcctaaagagttgcgtacttcacagaccgtacctgaagagaaagagcaagaagatgttgaagagcctgaaggggtactacaaatatacagtccacgggttcagaaccatcttctatatgcagcacagccaactacagagccatcaagttctccaccagaacaattcg

SEQ ID NO: 64476 - DNA, 290 bp, Zea mays
  unsure (1)..(290): unsure at all n locations
tcctggctgttggcgtgtacgttttgtggtggtagcatgttatgtcttntttaattcgtacctcgccttggctgacctcgaacccgatggactccgtgccgtgcggcacgacagccggcggtggcgcgccggcagttaggatgcgcaccctcgccctgctcgacatagcctggctcatccacgtctcgtccccgcaggacgacgacagcaacatgcgggggctccccaacatcgcgcagaacgagcccgtgctcggcatggtctgggacaacatcgcgcgcctccacacc

SEQ ID NO: 64477 - DNA, 432 bp, Zea mays
  unsure (1)..(432): unsure at all n locations
tctacatctgaagttcctcctgaaggtgcttctgaagattcttcttctgagaacagggcttattntgatatctgtggtgaggtggtagtgtctcctccacatcaaggcaagcctcggtgcatttaaccaatttccttgcattttcaaagcttttatcacttatatgatgcattaggtgataggagttgaatgattaaacacttgttgcataaatcattccttggaatattccaccgccaccacaatggagccagtttgcatccacactagctctgccaccacagttcaacacccctccgacacatataccgacacctagagatagggtacgtttgataactctcgatgaatatatacacttgtatactttttgatatttgcatttaacgtgttgatatatgctaacttgcataggttatgctcgaagcgtgt

SEQ ID NO: 64478 - DNA, 272 bp, Zea mays
gaacggaggcggactggagagggtgttggccatggacggggctctaagccggcactggcgggctgaggggaggtcgccggaggcaaccgctggctcgggcgagtaccgcgaggtacggatgaaacaacggggaacgcaaccgagcgctggggcgggtctcatacgcgcagacgcagacggggcgccggcacaaccgattggcgcgacaccggcacactgggcgcgcgcgcgggcgtgctcatgcgagctcagagcgcgtcgaacacgaggcg

SEQ ID NO: 64479 - DNA, 312 bp, Zea mays
ttccaatgcatgtttacgagtatattcacgatctgcatgatgctacctgggagtgactgctactcagactctgagcaatacacgatgtatgtattgtggtgaatgcgctcagagactctctcaatgagaacatactgagcgtctggaacccgaacgcatcacactcatcaagtaggcgacaggacatcatgctgctatgatatggcgttcacgctgtgttagtaattcctgctctttagccgtccaggcgtgcatggcattgccggaatctatcacgaggcacctcaagctggctgacagctctcttatgga

SEQ ID NO: 64480 - DNA, 235 bp, Zea mays
cacccttaacagctacgtgaccactacttcttcttaagacagagaccttacatttggtaatagacaagtataccccatgtggggtaattgacttacagatagcaaattataacctagagactcttctaaaacacattagagatagagtgctcattagaaattgcaaatttacctaacccttttaccttgccctgattccagtcaccgaatatgaatggatctatggaattcttat

SEQ ID NO: 64481 - DNA, 442 bp, Zea mays
actcagctgctcgactgctgaatttgatgcaatttcctgtttgtgatcgtacaataataagaagcccacttgagacttatattcatcatgtgagaagacattttgccttttctagttgcatggatattggaagtttggcagtaaagatggttgaaactgaaaagcatacggtttttcctttagtctacaagcttattgacttgtcattaatactgccagattcaacagcatcggttgaaagagccttctctgcaatgaaaataattacgaacaaactgcacaacaggatttcagatgaatggttcaatcacttgatggtgtgttacacagagcgggaattattcaaagcacttgataattctaccataacatgacgctttcagagtataaagactcgaaaaatgagtctacctcgtgttatacgagactagcacattatata

SEQ ID NO: 64482 - DNA, 293 bp, Zea mays
accggcatgtagatgtgttcgagtggatattctccttcagttggcacaatgccgaagaaaggagtgtctgactcgtggagctctttgagtgcgactcccaagcctatgagtgtttgagggaaggtaatgatgatgctgctttccccatccactaacaccttctttaccctgctttctcagatcaccggatcaacgaggagcgggtatttccccggatgatcgaagatgagccactaatctgcccgagtgaaggtgatcgggtgttcggaccatctatactgggcgggaggact

SEQ ID NO: 64483 - DNA, 389 bp, Zea mays
cgtcgattggttgtcgacttggtgtagccttcttcttttttcttccgtcgccttgaatgcgacgggttgagcttccgatgtggtggaatcatcaagctcgttgatcttcctcgagccttcgatcatgcactcaaaacttacaaaattcccgataacttcctcgggggtcattttagtatatctaggattaccacgaattaattgaacttgagtggggttaaggaaaataagagatcttaaaataaccttaaccacttcgtggtcatcccacttcgtgctcccgaggttgcgcacttggttcaccaaagtcttgagccgggtgtacatgtgttggtggctcctccctttgcgaagccggaaccgaccgagctccccctcgatcgtttcct

SEQ ID NO: 64484 - DNA, 327 bp, Zea mays
actttggagggtgctactaacacagcagctgctcctgccctcataggtctccaagaaccgtcacataatacccgccatacttcggtatctttagtactttactgttcttgagcccctggcgtgcaatcgtgaatatagactgctaacgcatgggattgcatcgacgatctgtgcacataattaatgctgaacacattaagctacgcagcccacttcccaaatctttcaatagcttctctgttcctcatgacattctttcaaagttatgacgaacgaacaactatatgatatgcttgaataaatgtcgaagcttctggatgccattaa

SEQ ID NO: 64485 - DNA, 457 bp, Zea mays
  unsure (1)..(457): unsure at all n locations
acctatttgctgtntggaatactacggcatagaattatctttggtgcttttataacagttatttaaaagattataaagttggagcaaacttttagctgtagcatacatcttctatcagatttatcacaattttctttgctgaaaaattactctttccaggttatagaggatatgaagcagtttatttttgtctattatgaacttggtaacttctaccaaaaccataggaggtatgctattttttaagattagcagacaacctttcaaattttcatccattggcacaaattgacagttattgctttcctaatattgatgaattatcatttgcaattgcgatgctattttaattggaaaaattgatacaacttaactgctagattggtatcttgctgacaaagaanaatagtgaacaatcttgcttgagatttgcatgctctgatcagaatttaagaac

SEQ ID NO: 64486 - DNA, 387 bp, Zea mays
  unsure (1)..(387): unsure at all n locations
ntaggtggcacattgattcccataggtgagaactctgtttattggaagcaactatctgagcccttgaccccttacgtacaacagggagtacttgtctgaaatctcccccaaacacaatagtcttcccaccaaagggcagatcagggcgtcccatgatatcacacatgctgttgtccaacacttcaattgattgtctcttagccattgatgcctcgtcccaaataatgagcgatgctttctgtagcaactttgatgtcccactttgtttcgtgaaggtacatatatgtcggcgtttcgagaccggggggtccctaagccgactaatgagtgtgccgcgtgccccagcccatatgggtcgagcgcgtgggcgagcgcgatagggggaaa

SEQ ID NO: 64487 - DNA, 464 bp, Zea mays
  unsure (1)..(464): unsure at all n locations
nttccttgtcgtcatcaaccttgacatagaaccactctgatttccagcctgctgcccacttgcttcggtagctaattacagggaactttgtagttttccgataggcaaagttatagcaaccaaaattatcgtgtaatccatcttttctagcctttgtttgataatgtagctcgtgaacccggcagaagctgtctgcaaatggttccactgcttggcttctgagtgcccagatataaacaataagcctaacgatagcgttaggggtcagctgatgaaaatagataccgaacctcttcagtacctctccagtaatcccatgtagggggaaccttaatccagcctttagaaaacttttaaaaataacaatctcatccttctctggcttcngggtagtctcttctccaccgaagcgcagcagcttcttctgattatcagtaaaaaagcccgctcttaccatcttggac

SEQ ID NO: 64488 - DNA, 476 bp, Zea mays
  unsure (1)..(476): unsure at all n locations
cttgaagatccatttgcagcctataggttgacaaccattatgacggtcaacgacctcccaagttccattagacataatagattccatctcactccttactgcttccttccataagtcagcattaggagaggaatatgcctcactaatggtagttgatgtgtcttccacaaggtacactataaagtcattaccaaaggattttgcaaccctctgtctcttgctctttcgagtgactatagtgtcatcctcctcagggatgtgcacgtgaagatcctcagcatgatctataggaataaacaattcgtgttcatggggaattatagtctcatgacttgtatcactaggtgtattcttcatgggaaaatcattctcacaaaatgttgcatctcttgattccatgatagtatcaacatacatatcangcacatcagattntataattaagaacctataccctgtgctgtgaaaagagtacc

SEQ ID NO: 64489 - DNA, 457 bp, Zea mays
  unsure (1)..(457): unsure at all n locations
ctcaagctntgtaagggcgagaggctccaacttgtggagatttcttcttactgtttatatctcaatggaaagaccgtggtattcaagttgatcattggatcacttgaaaggggttgagtgcaacactcgtccattgggacgccacaacgtggaagtaggctagtgttacttggccgaaccacacgataaaaatcgagtgtctcttatgttgctcctctctgtgattgcttgtgttcgcaagagctcgcttcataaatttgattgattaataacatcttgttgaccacaggtgtagctattagacaatatatgggttcgatatatgaacatgtatggcgtttagtcacttcttctactttgttctaattaatgaataaaaaatgaatgggtctttcctcctttcctcctgtcggagaaacatctatgaagtgtccaaaataattactctaatgcttta

SEQ ID NO: 64490 - DNA, 340 bp, Zea mays
agcccacccacgtctagtcttagcaattaaacatgtgacgagttcagctttatcaatatctaccaagaatagctgaccctcgaacacacccttaaggctattgagcatcactttgtctaagacagtgacacctacatcagtatacagacaggtgtagcccatttgacataattgagatacacaaagcaaattgtatcctacagaatctacaagaacaacattggaaacagtatggtcaggtgatatagcaaatttacccaattctttgaccaaaccttgattatcatccccgaatgtgagagctcgctgaggatgcaggactttctcatatgaagagaac

SEQ ID NO: 64491 - DNA, 362 bp, Zea mays
ggaaacaagttggagctcatcaacgccaccagaagatcatgacgaccgacaggccacttgagctacttcacatggatttatttggcccgaatgctgacataaacatagacgggagtaaggactgtctaaataatgggaatgatgattctcacttcacttggggattcttttctgatgaaaaatcccacacccaaaggaccttaaagagatacttgagacaggctcacaaagacgttggagtgaggataaaaaagataagaaacgcatatggaacgcggttcaagaactctcacatcgaaggatgtcttgaggaataaggccacaagcatgaattctcttctctctacacacctcaacaaaat

SEQ ID NO: 64492 - DNA, 258 bp, Zea mays
agaaactcagctgagtggttaagccgcttgagaggcgtactcccttctttgtgtgggtactacgtatggggatgggttcacaggttctgactgctaatattatcggcttatgatgagaacaaaatagctcgcgggcctcctggccttatatacacaaccagcaagggctctcccgaacaggtgctgattacaatctggtgggcccgcaatctgtatcagaaaaaaaattactaatacttgaacaaatatatgaaaaga

SEQ ID NO: 64493 - DNA, 431 bp, Zea mays
  unsure (1)..(431): unsure at all n locations
ntatttgagagaacaaagatcactagcgttctanatttgttgtgangcggncacaatatgtcttatcagaaatatcatacgagacggtgtatgtttacaagtttctagtatactcactaacatctaagacaatttgtatagtctagatgactctaataatatctttatttgagatggtttcatatacagaagtgtctaatatactaaccaaaataaaagacacttcttgtaaacttaatgcctcacaaggtatatttatttgagacgattttcaaaatcaaactgtattaaatcaactagaaaaagacagcgccctatcgggcactgtatgaggcatatatacatangtatcggcgaaggagagaatacgaacaatgagacccacaaaacagcagtgcagctaggctgctagcgcacaatacacatgaact

SEQ ID NO: 64494 - DNA, 439 bp, Zea mays
  unsure (1)..(439): unsure at all n locations
tggcaagaccaaataactcanaaccctaaggaagaactttataggggagtgaagaaaaggttattaaattgggagcaaaaggtacaaagaaaatgaccaggaaatgtcagaagtgtggagttgctgatggtcacaacagcaggacatgtttgtcaatggaggaaaatagacaaaggttggcaagccttgctggacgtaagagaggacgacctccaggatctatgaacaagggtggcagtaaagctcctgattggaatgagacaacaacatcaaaaaaacacgcaaatgatttcgatagtagtgagtcagacagtgattagactgttgtatgagatacgaattaatttgtttttacaataaaccttgcatgtttggcaactgatntatatagaggtggatattgatatataataaatggtgtgtatattgcttaataatg

SEQ ID NO: 64495 - DNA, 442 bp, Zea mays
  unsure (1)..(442): unsure at all n locations
ggtgaagccaatcacaagtttgttgaagaatgacattaagttcaattggtcttctaaatgtaatgaagcctttgagcaactgaagacactattgaccactgctccggtattagctcaaccggacatcactaaaccttttgacgtatattgtgatgcatctagcagtgggctcggctgtgtactgatgcaagagggccgagtgattgcgtatgcttcaaggcagttgcgccgacatgaggagcactatccaactcatgatctggagctagctgttgtggttcatgccctaaagatttggcgtcactatctgctgggtaatatctgtcacatatatacagatcataaaagtctgaaatacatcttcacccagtcagagttaaatatgagacanagacgatggctngagctcattaaagactatgaactggagatccattatcac

SEQ ID NO: 64496 - DNA, 459 bp, Zea mays
tgttgcatgtggtgtagccaccgctctgcagctcggtgggtaaccaagaatggtcggtgtcgtcctataagggcagggtgtcctgcaagaaaaaccagacaacttgggcttacgagtccaaattatcttgagagtaatggatagaaaacacaaagtacaaaagcataggtactatcactacataatgatagccacaactaaaatggcccacaaacaatagtggcatcgcacatgaagatactcgtttcttcaatcattttgggcagaccatctagccagacatgcaaaaaaaacagcagaaatggtcaaatgaatctttttcactctattagtgactacagaatacaaaagcaacctcaatcgagaattacaagttatactagtgaattacgtggttcaggttagggtaaagtcagtcctctgatcaaagcaagccataattgaaatgaaaatattcac

SEQ ID NO: 64497 - DNA, 445 bp, Zea mays
  unsure (1)..(445): unsure at all n locations
aaatatattgtgacgttgctgctgactattgttggaaccaagaaaataattgtgggagcgtcctcaaactgctccgtcacttgctggctactgtgcttgatgttgtagcgcggactaatgtatcgaaaagagctaagtataaataatatctggtatctatgtagatcactaactgtatcgtatgcatcacagattggcgtggctgctgatatgagatagcatgtctgatctgggatgacatgttggtcagttcgtgttcgacaagctgcatgttttgtacatgaatgtcaaatttctatatattaaagcaggacgcatagctgcaacctcgctcgcccacgtcaccacaattnttntcaaccccacgtttaagatccaacggcgcaggaccattccattcttcctccaccttccgttcaatcgcttccctgacaatctggaacta

SEQ ID NO: 64498 - DNA, 439 bp, Zea mays
  unsure (1)..(439): unsure at all n locations
tagctcanaatgaaaaacctttgctgccttccgagtatagattgccaataagtacgaggcccgcgagcccggcacgtagcccgctatttgggctcgatctaagcccgtcacggtccggttctatgcaggtctaggtctagcccggcacgggtgctatgtaaggctcgttgcgagtttttgacccacagggctagcctgagcacggtctgttctaaacgggctaggactcagcccatttaataaggcaaacattgcaaaaatagctctattntttatttaaagtctattatttattcgtgaaatatgtattatttgtaatatgttattgtatttagttatatccttcaattatgatttataaatgtgttcaattctatggtgatttaattttaagtttgatttatgcgccggcgagcttggaccggtcggcacgatcttt

SEQ ID NO: 64499 - DNA, 455 bp, Zea mays
  unsure (1)..(455): unsure at all n locations
cgaagccgaagtcgagacaagttcgaatatgcagaaattcttttttatgcttaaaacaaatgcttgaacttctgcaaccggcgcgtgcaacggctgagacagatcttcaactcagtgggagccagctctaaaaaatttgaaccttctgttgaagatctgccaagcacctttgaacatattgagggcgaagttgaggcgcttgacgaagatatagctgggcatggagacttctacgccctgctggcttctcgtggcacagctgtagcttttatgaaggctggttgcacgcataataagattgtaaacaggccaaactttagtttgtcactagcagacctagctggtatccctagcctggcccgaagtattgggaatagatttataacacacatttggacgaagggtgggcgggacttanctggtgatgaagctcgaagtcatcttaagccgggatt

SEQ ID NO: 64500 - DNA, 476 bp, Zea mays
  unsure (1)..(476): unsure at all n locations
ntctcaacctttctcgttgcttaatgaatatactttaatctttataattggctcaagtcataagtgctggggacttgttctcaagtgctgtgagttaagaacaaggcaacatagaaaatgttaatcgttaaagtccttcggcctccgaagcattatttcccttaggatataatggttaacggacgaaggttatgaaggacgtaccttcataaattcattaaacaatgacgaaggatgaaatgtgaagaatataaaagacaacatgaacaattatatattattatcaggcgtaaacagaaatatcgctgaattacaagtgtaccttcaattggaaggagatgatagtacaagcgtgacgcaaaaagcgaatgccaagtcagcgagtccagtgcggaggtactgttcacctatttataggcgcgggacacaaactactacacaatacaattgtctctttacactgataataatctata

SEQ ID NO: 64501 - DNA, 290 bp, Zea mays
gcacggagaggacgccggagctatgggcgagcacccgggagaacggcgcgcgacagaggatgcaacaaggaagaaagccggacaccgggcgggctttataaacgcggcacgggcgagggcaaggggcggccgcgggcgcgagggggttcgcgcaccggcgtgctctgagcgcgcgcccgagtgccagccctccgcgaacacgtgtggggaggcttctgccaaggccaacggccgagtagagcaccttaccgcgcagaacttggcaaaaccccacgaacgagcactaccca

SEQ ID NO: 64502 - DNA, 391 bp, Zea mays
tagatcttcgtaataaaatttcaatagatattgcaagattacataaaataaaaggtacaaaagaggtgaacaagtcatagacgaattatattatattttcttaatatatccaatcattgaatacaataatacctttgccttgacaaaaggttgaattccagaatatgcgattgcagttactagaatccgtgaacagtaaaggaatactgttcactatttataggcacagggcgcagcctgtgagggattacaagtatgccccttataaaagtttacaacattgactcagacctttatggactaaaaggtcattctatctttaagtcggtttgtaataccgaagcttcatgaatagggaccttcggccatcttatacaaacagcttcagtcg

SEQ ID NO: 64503 - DNA, 428 bp, Zea mays
accctgtagtctggactataagttggttacgggaggtgtaccttatgcagttgaccatttccagcattcgcgtaatgaggactctagggagaagcctcgtagtgagaccctggccattcacctcggaagtgaatacgggtctagctaacccgggctagaatggaatcatgactcatgggtaaagatgtgccacctctgcagagtgtaaaactgatatatcagtcgtgctcacggttatgagcagcctggactcctcacatgataattgaacttgaagatggaaataaatcgagatccgatgatctgccaatggtttgcttaagtgggttcataagtgttttgatatactcttgacctttgttaatggaaacttggatcacactatagtagacagtgttgtataaatgtgacactaaatgctacgtcac

SEQ ID NO: 64504 - DNA, 419 bp, Zea mays
  unsure (1)..(419): unsure at all n locations
ttaccctgtagtctggactataagttggttacggtaggtgtaccttatgcagangaccatttccagcatttgcgtaatgaggactctagggagaagcctcgtagtgagaccctggccattcacctcggaagtgaatacgggtctagctaacccggctagaagggaatcgcgactcatgggtaaagatgcgccacctctgcagagtgtaaaactgatatatcagccgtgctcacggttatgagcagcctggactcctcacatgataattgaacttgcagatggaaataaatcgagatccgatgatctgcccatggttntgcttaagtggtttcacttaagtgttntttatatactcttatacctttgtaatgggaatacttgggatcacacttattagtaaacaggtgttgttataaaat

SEQ ID NO: 64505 - DNA, 481 bp, Zea mays
  unsure (1)..(481): unsure at all n locations
cttggatatatatgttaacaggatagcttcacaccctgaactcaagcaaagtgatgtcttgaggacatttttgcaggcagatgaagaggtaaaacatttcaatgcagatcagcagactgctgcgccttttcttgtgcatttatttggattcttattgagaactgactcaaaacttcgttggatacacgaaattggtccttaattagtttgttttcataaactcatgattcttgaaatctgagttttgatttaattttgagaaatgtgaattgaagtcttttggtattttctttcaatgatatatttggcatgatatgcacaggtctgcgtaggataactgctaataactacgtaactcttatgtccagtgatcatttgacctgatctcttgctgaaatttccatcacaacataaataataagtaagtcagacatatccatgtgaaggttngatagttcgagtatgttatatgaattcaact

SEQ ID NO: 64506 - DNA, 486 bp, Zea mays
taacttgtggactggtggatttgaccttcagacgatcaatacttagcggtacacttcaaaggatcccttggacctgtgggttaggacccacacactctatcgctgcaccactttgatcttgacggttgatgttgatcgcattgtcggctaacccccttaacaggagcattgatatgcacttgataaagatgctgccaactctgatcttgactgattaagagaggtcggaggttgtcaaccagacaggtgcaagaggaaagggtacatatataaaaggtaagcatagattgatttaacagagaaaagagagagcacccaactacctaactctatggcacttagctagtaaactgatgtcattgcggaccaagggccccaacacatcaacaatcatttcaaagaagcatatcagtcataccacagagacaatcatgctgagcacacaacaacaaacatctcactgctatacgttccttgtaagtacat

SEQ ID NO: 64507 - DNA, 398 bp, Zea mays
aacaggtgggaggagcgcatcacatcaagaatgtgatgaccacttcaagacccctggagctgctgcatatggacctctttggacccgtcgcctatctaagcatagggggagagaagtatgggctagttattgttgatgactatttccgcttcacttgcgtgtttcttttgcacgataagtctgaaacccaagggaccctcaagcgcgttctcaggagggctcagaatgacgttgagctcaaagagaagaagataaggagcgacaacgggtccgaattcaagaaccttcaagtggaggagttccttgtataagaaaggatcaagcacgagttcttctctccctacacaccacagcaaaatggtgtggtagagaggaagaacacgacgctcattgacatg

SEQ ID NO: 64508 - DNA, 477 bp, Zea mays
  unsure (1)..(477): unsure at all n locations
tctaagggagaacacgtgataggtgtgactaacgtgcaattcgaataagatagaccttgtgcagcttgtcaagtaggtaaacaagtggaaggagcgcatcacagcaagaatgtgatgaccacatcaagacccctggagctgctacatatggacctcttcggactcgtcgcctatctaagcataggaggaagtaagtatggtctagttattgttgatgacttttcccgcttcacttgggtattcttttttgcaggataagtctgaaacccaagggaccctcaagcgcttcctaaggagagctcaaaatgagtttgagctcaaagtgaagaagataagaagcgacaacgggtccgagttcaagaaccttcaagtggaggagtttcttgaggaggaagggatcaagaacgagttctccgctccctacacaccacaacaaaatggtgtggtagagaggaagaacangatgctaatcgatat

SEQ ID NO: 64509 - DNA, 384 bp, Zea mays
  unsure (1)..(384): unsure at all n locations
aggtgaaaactgcttactcctccacagattatctctatactcaatagtacatggcaaggacactgatgccatttcacccacgctgtgtcctgcgcctaaaaaaaagaaccgaacaccgtactggtcacgttaacttgaaatcactcgcacgtcactcttggattctcatcttctgtcaagccgaatggactaatgtcattcaatattattaatatttgtgatggggaactgttctcaaatgctatgaattaagaacaacgcaacatacatagttaaaattaatacccttcgtccgatgagcattatctcccaacgtgtaatgagctctgacgaagccataacaanattcacaacgtataccttccgatacagttgaaacaattg

SEQ ID NO: 64510 - DNA, 428 bp, Zea mays
  unsure (1)..(428): unsure at all n locations
gaactaanataaaatagagatataaaatctggctttgtttatcatgctgaacttctataggtatatctaaattaacgattgaacttcaaactcgggttgattggaaattcaaatagaaaataaaatagaataaaagaaaagagaaaaggaatagcaaacctgcgcatgggccgacttctcccctgccccggcccatcataccccgtgtcttcctcgtttgctccggtgtacggcgcgtggcccctgttcgtctgtctctgaaacgcgctcgcttctgtgtgtcgctggctcgtggggcccgcttgtcatctctatccccacctcctccaacagatcgcatcctggtccgtagctcgcgtgcgcatcgatgcgatttcctggatccgcgcgcacttgataggatcctggatcactgcacccacacagac

SEQ ID NO: 64511 - DNA, 416 bp, Zea mays
tcagcttctcctaacaagggctgcacttaccgctgagtgtctttctccacatataataacaaaggagcccctggcgtatgtggagttaatgttgttagatctatcagatactgtatcagttctttgaaggccttctgctggattggtccccattgaaagacttcagctgtcttcagcacttcgaagaatggtaagtttctctctgctgatctagatatgaatctgttgagagacgccagccttcctgtcaatctttgagcccccttttttgtacttggtggttccattctaagtattgcttccattttgcttggattagcctcgattccctttgttgagactacggagccgagaaatttcctcttctttactccgaaggcacatttttctggagtcaaccttaggccagcctgtct

SEQ ID NO: 64512 - DNA, 418 bp, Zea mays
attgcacgagaaggagatgatatgaagctttgttggtgcttgagagagacaatttaattcttattaactcaagctatcaatcttcaatgatctatatatccgagattgacccaaagttgttttgaattattatgtctaatactcatatcatctcgaggaagatattgatgttgtaggaaattaagaattatcctgtgggaaaaatcaaggcctacaacatggaggaaagccaaaggatggtaacatttatgcttttaagtgcaagtatcttaaattaccatttcttatgtgtcttgtgtagtcacatagaaaaaggaagcacttcacatgtttgtaaattatgtcaccattctttgaagagattcctctcatatgggagaatgcatattcatcacttctatactatggcaatctacat

SEQ ID NO: 64513 - DNA, 440 bp, Zea mays
  unsure (1)..(440): unsure at all n locations
tcctatcatgatgaacatttctagcaaattttctatcatggtataagaaagcatgggtcttttgcacactatttgccatagaggccttccctttctccttggcggagatggaagccttatggcttgttaagttcttgtcttccctcttgaagccaagaccatccttaattgaggggtgtctaccaatcgtgtaggcatcccttgcaaattttaatttttcaaattcattcttgctagtcttaagttgggcattaagactagccacttcatcattntaatttgaaatgcaaactaggtgttcactacaagcatcaacattaaagtctttgcacctattggcaaattctacacaagagttagatntatntgctacttctagtttagcatttaaatcatcattaacattnctttaagaagaaatggtttcatgacacgtagat

SEQ ID NO: 64514 - DNA, 392 bp, Zea mays
tgtgaagaatactacggcctctgcagttgacttcctctatcatcactctgagtggagttgtgaatggacctgacatgccttgggtggattcttcctccaaagcccctgatcatctgagagaacctgaatgcttcctcccttctttggcggaagtcattgtcagcccggatgtactgatccatcttctgaagcagcttctccagagtctgtggggtctttctagcgaaatactgggcagtaagtcctggacgaagccccttaatcatggcctcaatgacaatttcattgggtactgtaggcgcttgtgctctaagatgcaagaacctttggacatatgtctggagatactcctcatgatcttgcgtgcattgaaacaaggcctgagctgtgac

SEQ ID NO: 64515 - DNA, 407 bp, Zea mays
  unsure (1)..(407): unsure at all n locations
caggagcagcttcngctgctgctgttttcacgctgagccggggctttgtttcttcaatagcctcaatgatagtaataattcttcgcttttttggcttagcacgcttctcggcaaccgaaggcttcttcttcttctgtaaaagcttcatcagttctggtcccagcggacttagcttattaggtagagattcagtcattacctttaaaatttcttctgcgtcaggggcaaaaggtgttgagggaacttcttctaaatcaactctcggattcgaagttggagcttttcttttctttgacacagccaccttcggctcaagactagataatttcttatttgccaaattttcatcctcttttatcatcctggcagcttgtctttgtataataatgacagttctttttcgtttt

SEQ ID NO: 64516 - DNA, 478 bp, Zea mays
  unsure (1)..(478): unsure at all n locations
tcgganatcccatacttctagccatctcccgacaagccgattattctttgttgtctgggaggcagtatangaaatcttcttcgttcgtctcattgaacactaatgcccccttcggatatttcaattctttggcatagtgattagcttcaaaaacttcttcttccgataactttttccccgaagcatgtcgcacgatatagtcgtatattttggaagatgcttctgggacggcggtatcaatttcttcgaccaaagttggctctgacattttcatttcttcggttgcctttgcaatatttgcttcttctgcttccaaaggtattaccttggttggttctgaaggcccggtttcaactccagtctgttgcttcgaagcttcagctacggacacttcggcaagcgcctcagtcttttgggttgtgcttggaagattaattgnttccaaaacatctaacacattaaccattcttttcctttt

SEQ ID NO: 64517 - DNA, 455 bp, Zea mays
gcttaggaaaacccatactcttaaccatcttccggcgaactgatatttctctgttatctacgagacagtacaggaaatcatcttctgtactaccattaaacactaagggcccctattgatatttcagtctttgggcgtactgattggcctccaagatttcttctttagataatttcttccccgaagcatgtcgaacaatgtaatcagtatcctcagctaatgcttcggggataggagattttgctttttctatcacgacttgttatgtcgctttgctagtatctaaaatttgctaacccaccttatcttcaggctggcggccttcgtctcagtaggcgctgaaggcccagctttggcttcgacttggaattaggcagcttctgcaggtatcttggcaggagcaggagttaatgccttcgtcgtctctataacagtgtctagcatgctggccatac

SEQ ID NO: 64518 - DNA, 504 bp, Zea mays
  unsure (1)..(504): unsure at all n locations
gcttgacgtgaccttaaatactaagcttctnagggagaacatgtgttaggactaaccgatatctgttttgaaaaagacataccatggacaacatgtcaagtagagaaacaggcaggaacaagtcatccaagtaaaaatctgatgacaacatcaagaccattagaacttctccatatggatctcttgagggtgcgtgcttatctgagcatcgatggaagtaagtatggtttagtaattgttgatgactattcctacttcacttgggtattcttttcatatcataaatctgaaacccaagaaactctcaagcactttctaagacgggctctgtaacaccctgaattatggggtataaaaatatgtttgctctgtactcacaattcaggtgttaccctttcctttcttcgcttttcttttccctctatcaaaacaatagagttatnnttgtctatgttggtctgagccctaacaatgtcatgaatggtgcattcatactgtctcata

SEQ ID NO: 64519 - DNA, 397 bp, Zea mays
  unsure (1)..(397): unsure at all n locations
tcatactcngctgcgttgttagaggcctgttttagctactggagagcgtacttgaggtgctcgcctccacgtgcagagaaaagaatacctgctcctgctctctgcagcttcagcgagccatcaaaatacatcctccatacttctgccgtttctggattgtctggaacttgctgttatgtccactctgatacgaaatctaccagtgcttgagttttgatggcagcgcgaggtcggaactcgatatcatgggatcccaactcgcaagcccacttggctattcggccaatggcttccttgttgtgaagaatgtcccctattggaaaaccagtcactactatgactatgtgatcgctacagtaatgacgcaccttgcgggcagttagaaatactgcatata

SEQ ID NO: 64520 - DNA, 412 bp, Zea mays
  unsure (1)..(412): unsure at all n locations
actatacacactcaagctntgatcagaccctgtntgtttgtgcaggaatacataataaattattctagttaatcaaaacatatatatatatatatatattatagaagcaatctggataagaattattccctctattccataataaccgaacgacagtgagaataattcctgcctccatttctggagagaaagaaacgggacctttttcataaaggcctattcgttttctataaatccatatggattgaggggagcaaatctcttataagttaaaatctcttcaatctctttcaatcctcttcaatccatatggtttagggtttgtacgtttatccaagaatggacttggaatcgttacagctaatcaaaacttatataattaacagaagaaataccgctaggaattgttcca

SEQ ID NO: 64521 - DNA, 245 bp, Zea mays
tgtggactgggtggttctggcgagggactccgatccttcccgctgtcgtagtgtcccccacgcctggggtggtagcctctgcgcaccctctcgtcgaggtgggctcgacggatgccgtggtggtgctcgttgccgaagcgacccggggccgcatgcgccgcgttgcgcgttcgctcagtgtggaccgacgctttccgcataaatcgtgaaatcgcggcgcgatgctcctaggggtacccctgcct

SEQ ID NO: 64522 - DNA, 336 bp, Zea mays
  unsure (1)..(336): unsure at all n locations
tggagaggcaatgtggctagctagggttagtcattattacagctntggtttcaccttatgctcagncgatcacgcctatatatgcgacatgcgtgagttcgttcgtttgttatcatttgtggccgtatgttttgttcatcccatttcgacgttgatgtccagtttggtaatatttagtcttcatctagctacagacctttgagtaccgacgtggctagagttcatcattcaaattctgattttctccgtttacgtggggttattataattnttgttgtgttgtctaccttgaattttttacatgtgtcttgcgcggatggataatgtggagccgga

SEQ ID NO: 64523 - DNA, 374 bp, Zea mays
  unsure (1)..(374): unsure at all n locations
actctagctggcgaactaacgaacgacgctccatttgtatatttcttcngatgaagaaaagtccaagtgtcacaagtatataaatgaatggacaaagtccgctcttccaacatagatgaccgcgacggggaggaaactgaagcttcttagactcttctcatcggccaatgcatgcaacgatctggtctgaagtacttataagataacccttgtgatggtgcaaaactagcagaacaagcaattgctgtcacataggaagaagatattgacgaaactgattccgcacatgactaccacattgtcatgcctaccaagcccagccacgtggacttatggaaatctactgtattcaaagctgagttgtactacatggt

SEQ ID NO: 64524 - DNA, 421 bp, Zea mays
ttaacccctgcgagacctttccctgtttctttttaaccttaacgaaagcgataccgaatgtcatacttgatgcatatttactttatttgtccccttgtgtggtgtactgtttgtttcctaatttgaatggatgtatgtatgtatgcttgcaatcgcatagagaacgattcggtcgaagagcccgaggaactcgcaggagaagcccctgagcagcagtcggttggtggaggcaagtgtcccttgacctatctttgtcctgtacactcttaaattcacctcccgcatttcatatttatacctaaggattgactagcttttgttatccatgtccttgtttacctacttgggtcggattattattggttagcattatgctattgtccactctaatcaatgaacatgatgagaattatttatgata

SEQ ID NO: 64525 - DNA, 403 bp, Zea mays
ttctgtattgtcattagaaacatgcccttgcgagccattaaactcatcaaatgtcacgtctatcgctatttcaacaagaccggtggtatagttgaaaacacaatatccatgcgcatttgatgcataaccaagcaagaaaccctcgtccactctataagcaaactttgagctcttgactttcttgttaataaataaagcacttacaaccaaatactctaaaataatcagctttaggttttgtaccagcgagaagttcgtacgtagtcttcttgtagatcttgtgaagatagaggcggttgattacatgacaggcggtgttgaccgcctcttgccaaaagatgtcatgggtcttgtactcatccaacatggttcttgctgcttcaattagaattcgattcttcct

SEQ ID NO: 64526 - DNA, 338 bp, Zea mays
cgctgccttcgcttcagtctatcacccgttgtctaacggtgttgtggagcgcgccaatgggaaaatcttcacagctgttaagaaaatgctcctctatgaaaaaaaaggcagatggaccgatttgttaccggaggcagtctgggcgctaaacacaaccgagtgcaaggcgactgggttcactcctttccgccttctatacggatcggaggccatgaccccgcaagaaataaagcatgggtccccgcgtacagttccgtcagccgttcacgacgtggacgagccaacttcaaaagatctcattgaccgagaccgggtcttctgcctacatgccctaaaca

SEQ ID NO: 64527 - DNA, 419 bp, Zea mays
  unsure (1)..(419): unsure at all n locations
cctgcacgcatgcaanctnnnacagggagaacacgcgacatgtcttactaangnacatancgaaaaagatagaccttgtgcagcttgtttagcacgcaaacacgtgcgaaagctgtaacacccctgcctgtactcgaactaaaacttgagcaaggcatctataacatgggcatttcatatgtttgatacacccataatgcattcactatgtaaaaatatcacacaagtgtattgcttctggagttttgcaataagaccctggataggcaacctaaccctaaatatgctcaaaggggtaaagcttatccccacatgagaaaacctcgaagctttaagggaagagtttcaaaatgctctcacacacaacagtgaattacatattatacccttgaaataccaacatcctaattgtaaccctg

SEQ ID NO: 64528 - DNA, 73 bp, Zea mays
agcttcacatcgcgctcgtgctttctgtcgacccccccctcccaacatgcactatatgagggtggatgctata

SEQ ID NO: 64529 - DNA, 238 bp, Zea mays
  unsure (1)..(238): unsure at all n locations
agagaaaacttccatgtctgggcctcacttcggactgtactgacgatagacttngtcatgactgccgcgttgcctttatatgatgatactgttgcctcatagctcatctagaattgctttgtgttcgagcgcccattgtatatggcaactgacgtggcttgtatgactgtggcctatgaataacctgcatatctgttgctgtggagaagtctcatcctatgtacctgtaccatgatga

SEQ ID NO: 64530 - DNA, 391 bp, Zea mays
  unsure (1)..(391): unsure at all n locations
agctncgcatgtgtgaactaactcggttgtatcgnncntcgccgacggccaatagaatcctgacctgaagaccttcccgactagtgttctggatgctgcatgtactccacactgccctggatggactttctccaaaaattgctttcccgtggacgggagaacgcacttcatgatgacgcctgacgcgcccctcttgacaaaatcctcccaatgagtgtatagggagctgaatgtctggcaatgtgctctgccgaatcttgtcatctggtcttcttcatacttatatacttaataatcggccgtctctagtcatcagagtctgactcgggttgatctatgatgttgcatacttctgtttgatcattgagatactcggatcgtaaaattcttg

SEQ ID NO: 64531 - DNA, 130 bp, Zea mays
agcgtgtaggaggaggtcacatttttgttactaacaaatgctcattatgagagagacaggattagtactgcatctattgcaaagaagcaagcttgtgatcatcattcacacaataatcatattgacaact

SEQ ID NO: 64532 - DNA, 363 bp, Zea mays
agctagaagatggaggtggggctatgttttttggagatcccgtgggttgccatgtgtataattattttgaaggggttagaaccccctctttggaaatatattatttttgaaccattcttgtattattaatctaaaatttggtcatataggggataaaattgagcgaatcttctagagcgcaaaagaatgttttaatagagagctctatatttcttttacaacttttaacagaattattaatctttgaacgaactttggaaaaaataaatttgtttataatgtggataaataaggagaatagcttcttaatgctatggtagccctaatgtgaattagattataaataagtggtagagtaaaaaa

SEQ ID NO: 64533 - DNA, 458 bp, Zea mays
  unsure (1)..(458): unsure at all n locations
gatctctaagncacctgcggcatgaagcttgcaatgaggagatggcgctcgtcatcaagagcttccgccaaatcctcaaacaaaggagggggaaagactacaagtcccgctccaagaaggtttgctacaaatgtggtaagcccggtcattttattgctaaatgtcctatatcaagtgacagtgaccgaggcgatgacaagaaggggagaagaaaggagaagaagaggtactacaagaagaagggcggcgatgcccatgtttgtcgggagtgggactccgacgaaagctctagcgactcctccgacgacgaggacgccgccaacatcgccgtcaccaagggacttctcttcctcaacatcggccacaagtgcctcatggcaaaggacggcaaacggaagaagttaaatctaactcctccactacatatgagtcttctagtgatgataatgctagtgatg

SEQ ID NO: 64534 - DNA, 326 bp, Zea mays
  unsure (1)..(326): unsure at all n locations
attncgagaaagacaggcntgtgtatcgcatgccaagcatgacagcaagttggagcccatcatccacacaagaacatcataacaaccgacaggccgcttgagctacttcacatggatctattcggcccgattgcttacataagcatcggcgggagtaagtactgtctagcaattgtggatgattattctcgcttcacttgggtattctttttgcaggaaaaatctcaaacccaagagaccttanagggattcttgagaccggctcacaacgagttcggcttaaggatcaagaaaaatagaatgacaacgggacggagttcaagaac

SEQ ID NO: 64535 - DNA, 408 bp, Zea mays
agcttgcataataggaacgatggtgtgcgtttttagcctaaccacctttttcactgccgaaggatcgtccttcttctgtaaaagcttcgccacatgccgccctataagatttaacagcttgattggtaaggatttagtcattacctttaaattttcttctacttcggcagcagaaggcgttgaaggagcttcctcttctatctcaaccatcttcggctcaggagttgcagtttttctctccttcgaagtcgccactttcggctcaagactggattttatcttctttagagattttccgtcctctttcaccatcctagcagcctgtctactcagaacactgacaactttcttcctttttgcccctttggcacctttgttgagacgttcgtaatcaaggtattcgaaatt

SEQ ID NO: 64536 - DNA, 409 bp, Zea mays
  unsure (1)..(409): unsure at all n locations
agctngngngattactgagtcgcgacgttctttatacaatcaagactacagctctgtgatatagacatngtaacatgagctgagcaacaaatttcatgtgattttggtgtctggaaaaataataaaagtaatgacagttagggttaagaataagctcatagcaaaactacaatcgaaataaaataataacaggaacccgtcttcgcggacgcggatccgctgacgtaactgcagatgaagttgagcttactgcgtgtgggtcttgtcgcacgcggtgcccacacgtcagtgctcccacccaacgtcagcggcgggatcccgatcctatcttcacaccccgtcttcaatgaaacacctcgacattgtggtggggctaacaaagactaatgctagcaggtacatattaccg

SEQ ID NO: 64537 - DNA, 317 bp, Zea mays
agccccccgaaaggcgaggaatcgctcaagataggttattcggccagcatctgcgagtccacaattgcagctgcaaccaatgaggaagacaaggcccgactggccagtcatctagacattgaacgctggaaagtcacgatagaagctgagagaatacctcggctttgccgatgagaccgaggtcgcccaaaagacagccgacctgaatgtcaatggtgacgctcgagaaatctcgttgaggaggacgacagctacttcttaggccatgacaacaacgctgatggagaagatggcgataactttctcgccgatcttgc

SEQ ID NO: 64538 - DNA, 272 bp, Zea mays
atcttatcaatttaacatgtgtcgagcgtatgcttatcaaaatctactaagtatagctgacccgttaacagacccttaaatgctattgaatcatcactccttgtcaagacagtgacacctacatcaaataagagacacttgtagcccatttgacataattgggatacagaaagcagttggaatctaaagaatctactagagacacattggaaatagaatgcgcaggagatatagcaattatacccaatcctttgatcaaaccttgatttcca

SEQ ID NO: 64539 - DNA, 78 bp, Zea mays
ttgaaaacaattcgatggatcgagtccagtctgacacgctctccctatgtttgcctttgcctaagatgataatagcat

SEQ ID NO: 64540 - DNA, 244 bp, Zea mays
tgattcaatgaatagcaatcaacaattaatgtctctacatctagtgcacatagtaacatactcaacggtagatataaagggtttgcaaacatttaattcatcaatcttagcatgtaacatagcattttcatttctaagattggaaatagaaacattgcaaacatttaaatcattagccctagcaattatgttttcattctcaattttaacgctagagagagatacattcaacttgtcaatctta

SEQ ID NO: 64541 - DNA, 430 bp, Zea mays
  unsure (1)..(430): unsure at all n locations
agcttataaagagtcttcatcccaacatgagctagncggcggtgccagagccaacccatgttagtcttagcaattaagcaagtgtcgagttcagctctatcaaaatctattaagtatagctgaccctctaacactcccttaaatgctactgaatcatcacttcttctaaagacagtaacacctaaatctgtaaaaagacagttgtagcccattttacataactgagaaacggaaagcaaattgtaatctaaagaatctacaagaaacacattggaaatagaatggtcaggtgatatagcaattntacccaatcctttgaccaaaccttgatttccatccccgaatgtgatagctcgttggggaatcatggttttctcataggaagagaacatctntttctcccatgtcatgtggtttgtgcacccgctat

SEQ ID NO: 64542 - DNA, 413 bp, Zea mays
agcttatctgcgcatagcttcgtgattatcttttccttccgcacaatcgccttccgtcccactcaagcttcgtcttgaccatactcttatatactcggaatccaattccgaagatacctggtcacacatttcacttggaaaacattgtcaaatcatgtttttgaggaccttcggaagccgaaggcccccaacaattccaaatttggtgagtatgtcttgagtgtactttgtttggctaatgaaggtgccctcatggagttgcttgacttgaaattctaagaaatacttcaactcccccatcatagacatctcaaatttttgaatcataatcctactaaactcttcacaagtagatttgttagtagacccaaatataatatcatcaacataaatttggcatacaaacaaatcat

SEQ ID NO: 64543 - DNA, 438 bp, Zea mays
  unsure (1)..(438): unsure at all n locations
agcccaggatacccatctgcgcagttgtttatatttctcaaggcgtnctgtcacccgagctgaaaaaattggctgcctttctaattctagtagcggttcttcaatgggcaacaggtactctgaagctaactacgaaccaaaaaatgaccttgttaaatgttaaactatcactggaattctatattagttctaccgcagacaccctgattccactttgttttgaagaactaaaagcagatgaacaccctacacttgaatgaatacagtatatgtttctagacactaattgaaagcatgactgccccaattaaaaacagaaccatttttgtattgatgaacaacaaacacactaaatcacaccatttcccaaaaaatgaaaggaccgggacctactaactgaacaagagactaatggataaacccttttgtattgatgaa

SEQ ID NO: 64544 - DNA, 390 bp, Zea mays
  unsure (1)..(390): unsure at all n locations
gaccgcagcatgaagctgacagaggaggagcctactctgtttgcntatantgnaaatattccttgattgttatgataagctgagaacgctgacacttgacaaacctatacaccacaaacatacacttcatacggttgtttaacttcatacagcttttataacaaaccgtacgaaataaataacttccgagaggcaactggtaactctaggaaataaacataatttcctatggtattttataaaagctgtaggaagttagctttcacatgctgacccatgtgtgcggtcaagcgagccgataacttttacggccgtttctatgaagttagcatggacaactaatttcctacggctggctctagaaagttaccatgggcaactaacttctta

SEQ ID NO: 64545 - DNA, 406 bp, Zea mays
  unsure (1)..(406): unsure at all n locations
agctngcacgcgtggaaggggataagcaccgctagaaaatatccagggaatgggggcgggggcagattttccttttttttgctgtgcgcgacgatgaggatcgactgcagagataagaatggctgagacataggaaatatcgcgtggctggacggatgaaggagagaagataagcacgacatcaggaaatatcccatgaagaggataaggattggagataaaacaaaaatcagcagaggagacctttcacagtttttctttaacaaaagaatacaaatctgagctctaaagttaggatttgaacagggtataagtgaatcagatcacaacgatacgagtcgacggtgcttgtgacacggtttgatttgattcgaaacccgacanatattatctggggtctgaacac

SEQ ID NO: 64546 - DNA, 159 bp, Zea mays
gttggactgaataatcattgaagtccaagatcacaacatttgacccactgataataaattgaagctcaaaggtgcaactaagagaacatttgatattgataaatcaattgaaattgccacctagccaagtccttggacttttgcttttgaattgactcc

SEQ ID NO: 64547 - DNA, 311 bp, Zea mays
tgtatgacttatacatgtgtcgagggcggctctatcgggcataccaagtttagctgaccctctacactaccttaagagctagtgaaacgtcacttcttcttaagacagtgacaccaactttagcgaatacaccgttgttgcccattttacctaatagagaaacggagagcaagttgttatctaaggaatctacgagaaaaacattataaatggaatggcaggggatatagcattttttacccaacctttgaccaaaccttggttttcatccccgaatgttatcgctcgttggggaactttgtttttcttat

SEQ ID NO: 64548 - DNA, 339 bp, Zea mays
agctggagcagacatgcgtgaggctcctcgagcaaggaatcggaattccttcgccggagaagccagaccacgctcgccggagctctcacccccgccggagcacgtggaccgggtaagccactccaccatccttcgattccttgtgcacacagtcgttgcgtgaccccgtgatgctcaccgagccctcggattgcgccagttcgccgtagtttggccggtatactcgccgccgacgaggacacccgcctgcacgcgtggaccgggcgattccggccacctccgacgccgagccgtacctcgacgtgaccgccagagttctcccaagccgaccccaccctt

SEQ ID NO: 64549 - DNA, 420 bp, Zea mays
  unsure (1)..(420): unsure at all n locations
agcttggtcattttatcgctaactgtttcgataatgaaagngaccacgaaaaggggtaccaaagaaaaaagaagaagctattcaagaaggcaaagggcgaagcgcatctaagaaaagaaggggactcggattgctcctcctccgactcccacaaccaaagactcgccgcccctgccttcaacaaatcggctctcttccccacgagcgtctcacatgtcttatggcaagggagaaaaaggtgagtactcaagactccacttatgcttcttctagtgatagtgagtctagtgataatgacatagattattcatacttgttcaagggcttagatagatctaagatagataaaataaatgaattgattgatgcattgaatgaaaaggataggctnttagaaaagcaggaggaattattgtatga

SEQ ID NO: 64550 - DNA, 367 bp, Zea mays
acatctcatttactcggttttggtcctgctaattctgaatcattttgactctagggtctgacgccatactctagctttctatttactcattcccgactttcatctactagaactacatcgtcagtgaaaaacatacaccaagggatatctccttgtatatcccttgtgacctcatctatcactaaggcaaatagataagggctcaaagctgaaccttgatgtagtcctatgttaatcgggaaaatatttgtatcaccatcagttgttcgaacgctagtcagaaccttgtcatacatgtccttgatgagtgtagcatactttgttgggactctatgcttatacaatgcccaccacatgagattcctac

SEQ ID NO: 64551 - DNA, 327 bp, Zea mays
  unsure (1)..(327): unsure at all n locations
gctgaacatgatgtgatgctattccnagagaaccctctcttcgcgcgaaacctgaaccctgaatttgcccgcgccatgaacacaccgagtgaggtcaggggagtattggctcggatagccgatggtctcccccggactccagacactaaaagctatcgacggctgctcactcgggcagctaatcatcttctacctctcgctcatcctccgagcgatctacgacacgccatcaacagtcgacgggacgcacggagctccatcaacgcttcacgcgaacggtgaaatgagaatgaaatatggcgctgagaggagtatgatcgggatcat

SEQ ID NO: 64552 - DNA, 402 bp, Zea mays
  unsure (1)..(402): unsure at all n locations
agctttgagagcggggaggattctattttnnttatcacccacgaactggggagcagcgaaactcagagatgttngggatttaacctggacctgagttcacacttcatacatttaataagtatgcagatgatttcccggaacaatctttttataaagaagttgcctgtggctcaccaccatcagtagaaaacattgaatgcaagtattggcgtatagtccaaacacctacttattagatagaggttcctgccttctgcttttatatactactatgtcatttgcaattcaaatctctgtccaacttcataaagctcagcatatgtcctctcagatctcgattcgttaaatgcctctgaattacttcccacgcagttctgtccttcgtatataatcctgatgcct

SEQ ID NO: 64553 - DNA, 445 bp, Zea mays
agcttatggaaagagcacgagaggagcaacttccggacctcagggcagataatcaaggaaccctctggttcagggatcgcctgtgcgtgccagtgggagaaacacgagaaaccctgctcaatgaagcccacaactcagcttactctatccacccagggaccaccaagatgtacctagaccttaaggccagatattggtggaaagggatgaagagggaaatagcacagtatgtggcccgatgtgacacctgccagcgaacaaaggccgaacatcagaagcctgcaggcctgcttcaacccctcccaatacccgaatggaaatgggaagaaataggcatggatttcgtcaccggactgcccagatcacaaagaggaaatgactctcattgggtaatcatcgaccgtctcaccaaggtggcccatttcattccagtaaagaccacctt

SEQ ID NO: 64554 - DNA, 432 bp, Zea mays
agcttgagatcgatccatttggaagctcatggtataacagttgtgatcggcaagaaaaaaagtgggcccttgggtgattgacctcacccgaggtatatcatataaggaagattttttctcgaactagaaggtcaagaaaaggccataaaaattggctgccagaatgcacctacgacacagatatatctacagacagttacacaacatgggacctttcttcgtgctactcaacatttgaacccctgagcggcagcctcccaacccaagaacctaccactgtgctaaaccaagatgttgagtacttgagtatataaagtaactcaagcactgaaatgttaaatgtatcacgcatgccacggcccacgtcttgaacaactagaaaatcgtaatgtctgattgggtgcttactgccttagcctgcattagagtttg

SEQ ID NO: 64555 - DNA, 380 bp, Zea mays
tgcggcatgcaagcttaccgcattgaagcaagagcgcttcctcttggtcttagtcttgctcggctgtccattgcgacccttaagcacccgtcctgaatctcttgatgatgagggccatttcttcatcattaagaccggctgcctcaatttgcgccaccttgctgggtagtgactacttgctccttgtgcgcttgagagcaaaaggttgcggctcgttgatcggcccattcaaggcgtcgtccacataccttgcctccttgatcatcattcgcccgctgacgaattttcctacgacttcttcggccgacattttggtgtacctgggattctcacgactattattcccatatgaggatcaacaacggtaaaggacctgagca

SEQ ID NO: 64556 - DNA, 338 bp, Zea mays
ctatgtttatacaatcctaccggtcttacgagataatgagtatctctaactatgtctataacactctctaacgacctttatgggctcaagcaagccctcagagcaaggtttgaatgtcttatagactttcttatcactataggctttaaagcttgtaaggcgccacctccttaccaaaactcttgacaatgatttgcttgtgtgccaaatttatggcgatgattatatatttggggtcactaaccaatctacatgtgacgaatttattacgatcatgaacagcaattcaatatgtctatgatgggggagcttaaatcttttacgattttaagcgaaca

SEQ ID NO: 64557 - DNA, 356 bp, Zea mays
  unsure (1)..(356): unsure at all n locations
agcttatggaaagagcacgagaggagtcttcttctgacctcagggcanataatcaaggaaccctttggttcacggatcgcctgtgcgtgccagtgggagaaacaccataaaccctgctcaatgagtcccacacctcatcttactctatccacccaaggaccaccaagatgtacctagaccttaaggccacatactgctgcacagggatgaagaaggacatagcacagcctgtgggccgatgtgacacctgccagcgaacaaaggccgaacatcacaagccgcgggcgcgcggtcaacccctcctcaaactcgaatggaaatgggaagagataagcatggtattctccgccggactg

SEQ ID NO: 64558 - DNA, 432 bp, Zea mays
  unsure (1)..(432): unsure at all n locations
agcttgagttatattattacagaccatcctaaaagtgagtgcatagagtaataattatacaaaccagggagacacaaacttctcccgaaagactataaacaaaagatcctagatggaggaccgagtcctcccgcacttcagtcttgattttcttcttttggaaccaccttggcacagaagcagcaaaagtctgctacttcctcacctaaaaacaacaaagggataaaccctgagtatggaatactcagcaagtcttacccgactaaggaaaagactctcaagggtatgctggttataggggagtcaaggtaggcttttaatattcaaagactcctgttttcagaaatgcttactaaagtggatcctnntaaaatccagtttatttgtcaagttaagtaaaattacctgcactagagttctttctatcctagt

SEQ ID NO: 64559 - DNA, 409 bp, Zea mays
agcttcttcttgagccgactccgcctctgtccacgctgacaccggtgccttcggctccggctcatcgcaaagcagcccgaggttccttaactgaacaaaggaagccttaaacggcaaggccgaccgagccgagggacttctacacctccgggatatggatacctcactcgtcaccttccgcacagggcaactcacacttggttaagcagctcagctagccgacaggcgagtccaagttctcgaaatgaagaagaaacccggtattacactaaaaatacccggattttcaggcctcgacagccacaatgaacacacaccggcactcaaggtgccattacaaacggaactccggttccactcccgcgggtacgagccaaccccacatcggagggcccgcgggacgacaaac

SEQ ID NO: 64560 - DNA, 382 bp, Zea mays
tatccctcgaggacaaaatgagcatgctgatctgctagctaaatcagcagcacaggggctgcctttaccttcggatgtggtcttcgaaacaataaaagcaccttcggtggaactccttgaaagagcagatcttaatatatctcctgtttttagcgaagattggagaactgagatcatctcttatcttcagggtaaatttctttcagatgatgaagcttataacaagaggatagaggcaagagctcgtccatatgtcatgatagaaggggagttgtacaaacatggagtttgtgctccgctgctcaaatgcttatccagaaccgaaggtatagagttaatgaaagaaatacatgcaggcctgtgtggatctcacatccgatct

SEQ ID NO: 64561 - DNA, 415 bp, Zea mays
  unsure (1)..(415): unsure at all n locations
agctntaggttntcttaacttgggtttatttttacccctttaaccactatttagggttaagtcctttaaccagggttctatttgcaaaaacattaaaacaatacaacttgtttgaaatttttgcctagtgaatgcactctaggtgtgtcaaacatatgcaatgtcaatgcttatgatgccatgctcaagttttagttatagtaacaccaggggtgttacagacccgaacgaaaagccaacgccgccgtgtgagggagcgaacggtgtagtggcgccattgccgccgtgacgaatcgatgtcgcatccgcgctccgctcttgccttctcgctggtaatcccctttctagctgtggtatctttctgggttggtagtagatcataaggtgcctgaattagaatcttggagccttggga

SEQ ID NO: 64562 - DNA, 434 bp, Zea mays
  unsure (1)..(434): unsure at all n locations
cagcttactacggcgtggactaattattctttctcctgcgctaaacacggacttcgatgccactgttgaaaccggaattgcaagaacatcacgtgcaatctttcttaaaggaggatatttaaacccagcatgctggcaccacttgatgatatccaaatcatgtgttctaagaaacagtggttcctataagtacaaatacatctctgtgcgcacataaatggaggtcacgtctgggttgcttggacatgtaatcatcnaaagtgtgcatccaatccttctcgaacatgtcattaggagcactacttgtcctatgttgagcaccatctgttgtggcaacaacttctatagtatcttgatactctaaaaccaagttataaaggatatncttgactttgttaacaggctccatacttgtaatttagatccatggattt

SEQ ID NO: 64563 - DNA, 415 bp, Zea mays
agctagagacattattattttatggtcttgtgctggccaaaggacacacttgagggtatcatatttatgcaccacagaaccatattaagccttctatgtcccttcaatctctgttatggaccacactcgtttctttgaaacaattcaaagaacttaacccattcagaacagattttaagataagagggacttaaaatctcaatcccaatgatactcatcaagtattcatcttatgggaaaaacatgaccaatagaatttgtcataacttttcatttcatcccaacaatggaatgaccaattcagtcttacccaacatgataagtatcatcacctgaaaagttataacaaattacacacattgtatgggaggatgtatatagtatataatccataacaatggttcgcagaaacata

SEQ ID NO: 64564 - DNA, 440 bp, Zea mays
  unsure (1)..(440): unsure at all n locations
agctntatnnnggatacttgatggaggataattgntaaatatcaagctctgctgatcatgttactacatgtcaaattatgttggacaggcccctggcaccctgttctcatcattactgcaagattttatctgtcagacctgttgctgcaccttattcagcaacaataaattttagagtagaaggttttaacctactcagtacttcctcaaggtacttcatcatcttgaattctgattaacttattcgtgaagtatatacatgtaaaccttgatattcccttcggcttatccatttacatgtaaataccatcttctcatgnttgcagggtaattngttcattcgaagggcgttgtatattacaggaagacatggattctgtaacagagaatgctgagtataacgatagggacactcgaatccttagtttgtgcgttatgtt

SEQ ID NO: 64565 - DNA, 336 bp, Zea mays
gatgactgaccatctaagaccacttggatacttacttcacactggatcatttatcggacaccgcttgcctacctacagtatcagggtggaagataagtatggtccttgtaataagatgaagatatttccttgcttcacttgggtattctttttacaggacaaatccgaaaccctaggaaccctatagagcttcttaaggagagctcaaaatgaatttgatctaaaggcgaagaagataagaagcaaccatgggtctaagttcaagatattgcaagttgaatagtatcttgaggaggaaagcatctagcacgagttctccactctctacacaccata

SEQ ID NO: 64566 - DNA, 403 bp, Zea mays
  unsure (1)..(403): unsure at all n locations
agctttaagctctttgagcatagaattattttatctattttcagcaaagatgtaataatgcatgagtgaaattctaagaggctaaactatgtatgaagcagggaataaccgcaaggtcatgctttctcttccttttatacaagatatgctaagagtgtatataggaggaagatttaggtacaggtttgaatgaaaggaagtggntttacctctttgtaccttctcataaagacgttctctccattgtgcttatgtccttggtctcgtttgcttaagacctatgcttaataaaagtgtgtgaaaatattttgcacaagagagagttctataactagtgatctttttcaagtattgttagcataaatcaaatggatcaccagttgtataaatgaatcatgaattc

SEQ ID NO: 64567 - DNA, 418 bp, Zea mays
  unsure (1)..(418): unsure at all n locations
tgcaagcttggctatattgggcaccaacttatattttctagntnanccatgtcagctcttgtacaactttacattcacaagctacatttgtctgaaagaaccacgaagcaaaaaataggaacaaagcctttgatttcctttaaagcatgcaacaaccaaaatcttatcttctaactatatgccaactggttgaacttgaattgattgttcccaaagcacaagaggcagccatgcgtttggtccttggggttcacgtcatcgccattggacgtgtcgatcgcctacaccaagaacaccacctccgccatctcgggacgcttgtccaggtttgtgtcccagcatcgcacgttcactagcgagctangacaacaatgcgatatcttaggcctaagggtttgtacaaaagtatattcacctc

SEQ ID NO: 64568 - DNA, 371 bp, Zea mays
cggtgccagagccaacccatgttaggcttagcaattaagcaagtgccgagttcaactctatcaaaatctaccaagtatagctgaccctctaacacttccttaaatgctattgaatcatcactttttttaaagacagtgacgcctatatctactaaaagacagctgtaggccatttgtcataattgagatacagaaagcaaattgtgatctatagaatcaacaagaaaaacattggaaatagaatggtcaggagatatagcaattttacccaatcctttgaccaaaccttgatttccatccccgagtgtgatagctcgatagggatattggtttttctcgtacgaggagaacatcttcttctctcctgacat

SEQ ID NO: 64569 - DNA, 423 bp, Zea mays
  unsure (1)..(423): unsure at all n locations
agcnngaggcagaactgcagtgtttatataaaataaaatnaaaataccaggcaagcaacagaatgagataatgcccaataatacagctagcaaaaaaatgttatagctcgctccataaccatttggctcgacagaacgacaattcatcagtggcctcaatcaaaaagactgaccgacctctgccgttatgctgggacgtataagggcacgaaagacgcaggtgatgagtgccaaaggaagacagaataaagcgcatggcgtgagaaaatatccacgtctgttgtctgtctgtgaaacgccaggactggtatgaacgtaagacagcaacatgtaatgaaaatagaccccgggccatttggctaattaagtattggtgtttgatgaacaacacaaaccgtgaactaaaaattttctagagttgtg

SEQ ID NO: 64570 - DNA, 195 bp, Zea mays
agcttagggcctaatagagcattatgttgtttgcatttcatgaggactaacatcgcttcaaattcagagagttaaaatcttttcaaaagcatgtttggaaaggtgttagtactatggtccgcggaccgtccgggccaagttgtcgaaccgtccgtgtcttattcagagagttttgaagaatgtgtaaggaaaatg

SEQ ID NO: 64571 - DNA, 415 bp, Zea mays
  unsure (1)..(415): unsure at all n locations
agctngnccagaatcttgaggtaaattatgattcctcgattagacacgatcttctttggtactccgtgtaaaacataatccgagccatgtataactctgccaactgagagcctttataattagtcttgataggaatgaagtgagctactttggtcagtatatccataataacccatatagaaccatatcctttcggggtgcgaggcaatccagtaataaaatccatgccaatttcttcccacttccattcgggtatcttcaatgggtgcaataatccagctggtctttggtgttcggccttgactctttgaaacacataacacatagcaacatgtgcagccacatctctcttcaaccataacaccaatacttntgcttcagatcctgatacatcttaatgctaccagggtggata

SEQ ID NO: 64572 - DNA, 314 bp, Zea mays
taaactcattacccttctagcacaagttgcgaatttgggttgcctagttacatgagaattaattgacaagccaggagtgagattgttatcaatggggcaatccttgcattgatgacccttctttccgcatatgtagcataggcgatcctcaagccctgaagattacttctttccttgtttctttcttgctacatggctaatgaatattttcttttctaacactatgcctctcttgtttaaatggagacaagacctaacaagtggcccttcttggagcatttaaaacacagactatcatccttgttaataatcaa

SEQ ID NO: 64573 - DNA, 340 bp, Zea mays
tactctgggacataaggagagaatcctgaagcggtatatagaacctgcttcggctgaatctaccgagctttaacttcggcaatctctatctgcttttgaaacgtaacctggcatgttcttgtaatattccctttgtcttcaccgcaaaacaaacaaaacaagtttctgggctgatctccatatcttcctctaaagcttctgccccctctacctctttgagctgatggcctgaaggaactttgtcgcgccctaatgattgggagctgtgctactgcctctgggattggtttccactattgtcacttgagctagcattgtggattgacctgacatgcctggg

SEQ ID NO: 64574 - DNA, 452 bp, Zea mays
  unsure (1)..(452): unsure at all n locations
gcacctgcggcatgcaagcttcacccgacccgattgtgcgacctagcgtggccgcgaggcccgacacccatctggtccggtcgtattgcctcgcgtgcgtgggaccacctgngccagtgttatcattatggtacggacccaaaaacggggcatagtctttttcccagccgaggggtttgccgctttcaatttttgaaatcctttcctatttcgcaccgctctccagcgctaacccgaatcgcccctagggtttttcgcatttttcgactccactgatccgggaatcaaaggagattagttgttgatgcggagttatcatcgtgggtcgctaccagtagggttttccactttctctccaccgtcatcgttttgattntttaatgtagtttctccagttttttgtatacggcgattcgggtggaagctcttactggattatgcatattatacat

SEQ ID NO: 64575 - DNA, 352 bp, Zea mays
cctcgaaaagaaaaaccaccaactttttaaatcaagtccgtcgagcataagaagcagctcttaagaaatgtgcttgccaaaaaaaaaagtgggctgatccagttctttccatacagccacacacatgcactggggacccaaaaacataggataaagtttctcaccctctttgtccctgccatgatctttcccccctttggaattaatccatgtcccacgttgcgatagaattatagactggggggcaacttggccccctgctgatgcttactgtacagccaatgcccaagagcaccatatctggactaaaccctactggtcttgtaataactcacaccgatgatttgaacaa

SEQ ID NO: 64576 - DNA, 364 bp, Zea mays
  unsure (1)..(364): unsure at all n locations
agagtcttttctttagtcgggtaagtcttgctgagtaattgcgtactcaaggttttattccctgttgtttttcacgttgtaatattgttctgttgtggatggtgctaagtgccggtgggctcggcctttttatataagtatatcccatctttagctttcttattgaggattgtcacttaagctagcatgtattttaaaacttataaatgttttatacattcaaattgtaatcttttgaaatcaatttcttttgtaatcaacctcgatgatatatattgtaatcttgttataacttgtaaatgtttgaacttgtaatcattntgtaatacagaaattatttccgctgcaagtgtttgtatgtgag

SEQ ID NO: 64577 - DNA, 134 bp, Zea mays
cttatatacctgccaactatactgataataatattgtgaagatccatgctagaagacctcacattgttcctcatcatgcttttgtgtataaaaatgaaggttctagttctatgtataccacgcataaaaaaatg

SEQ ID NO: 64578 - DNA, 375 bp, Zea mays
  unsure (1)..(375): unsure at all n locations
ggaccntaagngacctgagcatgcagcttgagttttattacgaccattctaagtgaggcagagtagtaatattatacaaaccagggaggacaaacttctccgataagctataaacaaaaatcctatgtggaggaccaagcctcccgcactcagtcttgttttttatttgaaccaccttggagcaaagcaacaaaattgtccttctcacctaaaacaacaaggataaaccctgattggatactcacaagcttacctgactaagaaaaactctcaaggatgctggaaaaaggatcaagaaggctttaccaaataagtatctttgcaaagactactaaggagtctacttaatcttaacgctataatataaaacttatt

SEQ ID NO: 64579 - DNA, 437 bp, Zea mays
ttaagtcacctgaggctgcagcttctttacaggaatgtaaattgaatccggagaacttaaccgaagcttcattgtatggtttagttgaagacctatgcacattcatattataagaggtcattccagctgaagaaaaatatcacgtcgctttcagtacattagctatgccagcgtttagaatattaacagaagttagttgactatctcttaaacgagatagttactagctagagcgtaggtaaaaacttatatgctcagtcttgatgtatagaatgtatcgaatctaattcagttttgattgattgaaaatttatagttgtaaacagaaaaatatgtattgtaaacaatatattgtaaacagatctgtgtataaaattcagtttttgttgaaatgataagcagaccgccagcggtaatattatttccactggcgagct

SEQ ID NO: 64580 - DNA, 417 bp, Zea mays
agctagtttgagaagtgcagagtcttttgatgcgtggaccgtccgggccttggggccggaccgttcgcagtcctgacctagatgctctatgaggcactaagttttacacagattaaagttattgacccctcttaatagtacggctatctaacttactaatccggtcaagtatcttctctaaacttctgaagaccggcaaaaaacaaaacctatgttatactttatgttatacttttgccttcacttgatccacaaccattgcttatcaatctccaagatttgctgttttatgtggtccaaccctgcattcttatatctcacaaaagtgtttgtccacaaacaggtgtcattaactaccaaaacatcactaatgggcctagatgattcacagcggccgcgcggcaactcccgtgagcg

SEQ ID NO: 64581 - DNA, 413 bp, Zea mays
agcttcattcagtagatcttgataagatatcttttaaagaatctagtatccctgagccccttttattgactttggtagctccatccgaagtattgcttcgattttgcttgggtttgcttctattccctttgttgacataagacaacataggaactttgccttttactatgaagacacatttcttagggttcaactttgggcctacccttcgaaaattagcaaaggtttcctgaagatctaaaatgtgatcttattgattcacgcttcttataacaatgtcatcaacataactcaaaacattcatgcccagttgtgagctcaacactttggatgtcattctacttgaactttcttcagcattcttgagcccctcaggcatccgaatatagtaataagtcctgctggggggtatg

SEQ ID NO: 64582 - DNA, 373 bp, Zea mays
  unsure (1)..(373): unsure at all n locations
catgcaagcttangggctacagtggagaacaatccacatatcaattgtccaaaagtgaacaataagagcatctaaataatttaacagaaacaccaatctatcataaaagacagaccaactactgatggctcccataaggttctgggaagaaataaccaaggcaagccttacctctgcatttaatgcagagaggctgcctggctcagtggggaagccttcttaccactatgccaagcttgtccttctaaacaccaacctaagttcctaacaaagagctaaattctatctcattgtttgtaccatggaaatgttcactaattgcatgtttttccctcaaatatgcaaggagagctacttaccgttatatttagaa

SEQ ID NO: 64583 - DNA, 383 bp, Zea mays
ttaaggccagggcgtctcccattataaagcatgctaccagcaaatttaaaattttcattatctagttcatgctcgggaaatgtagcatctaagatagctatatgatcattttgttgcttaatcatagcaatgtgatcatggatagcatcaacattaatatctctacatctcatgcaaatagaaacatgatcaacagtggatgtagagggtttgcaagattttaattcatctatcttagattttagcatggcattttcatctctaagacaggaaatagaaacattgcaaacatttaaatccttagccttagaaattagtttatcattctcaatcttaaggctagacatcgatgcatttaatttgtcaatcttagcaattaaact

SEQ ID NO: 64584 - DNA, 381 bp, Zea mays
  unsure (1)..(381): unsure at all n locations
gcttctaagggagaacacattatatgactattaaatgttcattttgagaaagatagggtttgtagcgcatgtcaagcangacagcaagttagcgctcatcatccacacaagaacataatgacaacggacaggccactggagttactctacatggatctattcggcccgattgcttacataagcatcggcgggagtaagtactgtctaataattgtggatgattattctcgctttacttgggtattctttttgcaggaaaaatctcaaacccaagagaccttaaagggattcttgagacgggctcaaaatgagttcgtattgagaatcaagaagataagaagcgacaacgggacggaagtcaagaactcttaaatagaaagc

SEQ ID NO: 64585 - DNA, 393 bp, Zea mays
agcttcgacatcataagaagcgtgattatctttactccctgccgaccaatcacctctgaagtccgctaacgcctgacattgaattgcggatctatgtacataatcaatggtgaattcattaagttctgtggcccatttaacgatccttcctggatcttcattgctcctcattatgtctttcaagggttgtgatgaaagcactattatatgatatgcttgaaagtagtgtcgaaacttcctggatgccattaatacagcatacaggaccttctacaattctgagtaatttgtctatgataggctgagtactttcgatactaagtatacagctgcttgtccttatacatgggcaatttgcttgctctatacaagtgccgcactaaccgcatcatg

SEQ ID NO: 64586 - DNA, 358 bp, Zea mays
  unsure (1)..(358): unsure at all n locations
ctaattttatctattaagcatgcanaattactgttctattctttcgcaaaatgaagtaaataaaggtggccgtctaatacacccttaaaagctaatgaaccatcgcttcttataaagacagacacatctacatttggaaatagacagttatatcccatatgacataattgactaacagatagtaaattatatccaagactctctactaaaaatacattatagatagaatgctcattagaaattgcaattttacctaacccttttaccttgccttgattcccatcaccgaatataattgaatcgtgcgaatccttattcttgacgtaggaagtgaacatcttcttctccnccgtcatat

SEQ ID NO: 64587 - DNA, 420 bp, Zea mays
  unsure (1)..(420): unsure at all n locations
agcttcngctccatctatattatggatttcttttgaatcngaccagcttccttcggcctttctggcagcttcctgacttccatgaataacaataagcccttgatccgaaggtatcttcatgaaagatatgtcggatgaagaattgcttcaaaagcattgagtgtcccacgaccaatgattgcttcaatgaagatttgcttcacaagcatcgtaagggtattccatgtcgactatatcaaacacaacttgctcagtccttgtattgttgacaaatccgaaggtcactggcatcgtgatcttgccgagcgctacaatctgccttcctccaaagccacaaagagggtgtgtagcatcatgaatcttatcctctggctcttgcatctgtctgaaggccttagcaaatataatatccgctgcact

SEQ ID NO: 64588 - DNA, 383 bp, Zea mays
  unsure (1)..(383): unsure at all n locations
agcttgcacccaggtacattggtccattcctggngcttgagcaatgaggaccaggggcataccgactccaactacccgaaacattgtctgctgtgcataatgtgttccacgtgtcacaatagaagaagtgtcttccggttcctgatcgaaccgctgaacgactgatgttgtcctggaaccagatttaacatactcagaacatcctattcgagttctggatcaaaaggacaggatcacccgaataagactctcaagttctacaagaacagtggaaccaacattcttgagatgaagctacttgggaaactcaagacttctngaataagaatttcccaagctttntagcctcatgtaaattggaaagtgtatctagttattgcatt

SEQ ID NO: 64589 - DNA, 389 bp, Zea mays
  unsure (1)..(389): unsure at all n locations
agctttggaaatcccatacttttagctatctcccagcaaacggatatttctttgttgtccgggagacagtataggaaatcatcttcgttagtgccattaaacactaaggctcctttcgaatatttcagtctttgggcataatgtcttgcttccatgatttcttcttcggataattttttccccgaagcatgtcgaaaaatgtaatcaatatcttcaactaaggcttcggggacaaaagatnttgctttttctgccatgtcttgccttgctgccttgccggtatctgaagtttgttgatcagctntatcttcaggcgcgacaacctttgtctcaacgggcgctgaaggcccagcttcngcctcatcttggactgtggcagcttcaacatt

SEQ ID NO: 64590 - DNA, 309 bp, Zea mays
cctggggaaaggagcaatttcacaacaactttgggtgcttcagctttggcgcgcgctccgggttaaacctgcccttgtgcccgaacctctctgaaaatgtgggccggaacctggatgaccgaatggttttatgtgaaaaaatgacctttcagatcaagagaatggtgaaaaatatattatgccacccatctggcaaacgcttcgtctttgaatgccgaaggttcaaatgaacgaacctgcgaagaatgccaaaggccttcggaagagtctgctcgttattgggacacggacttgtccaagacatattgc

SEQ ID NO: 64591 - DNA, 371 bp, Zea mays
agcttgacattggattggttttttgttggaaaccaatgccatccttaatgccagggcgtctgccattataagcaaactacgagcaaaattaaaaatttcattttctagttcatgctcggcaattttagcagttaattcagctatgtgaacattttgtttgttttaatcatggcaaggtgaccatccatagcttcaacattaatgtatttacatctagcacaaattgttacatttacaacagtagatgtagatgcgttgccaatactcaatttctcaatcttagcatttaaattattattctcaattctaagactagagattgactcattgcaaacattcaacttttcatcttagaaactatactagcattc

SEQ ID NO: 64592 - DNA, 428 bp, Zea mays
  unsure (1)..(428): unsure at all n locations
agcttgactgcttgagaccaaggcaagaatccactatatgaaagattcaccagctagaaacagcaaaattgacgtgactgaagacgaagcagcaagaggtacctctccgtcttcgcgtcaatccagtcccctttctctctcctctcctctcctctccctccctccctctcccaagtagccctcctggaaagactctgctgcagtgctgctccggaaaggccctcctcgccgcagccaaatatgcattcgttgtatatcctttntgctgggctcttctctccctctctggttttttttcctttctgattttgggttaaacaaatatgatctgtcacactctcatcgctatcatacatcatccgccagcaaaattgctagacacacacggcatagagcaacatgtgatgcacgaatccttttttacgata

SEQ ID NO: 64593 - DNA, 395 bp, Zea mays
  unsure (1)..(395): unsure at all n locations
agctggcattntattgctaactgtcccgacaatgatagtgatcacgatcacaggaacaagagggagaagaagaagaactataagaacgcaaagggcgaagcgcatctaagcaaggagtgggactcggactgctcctcttccgactccgacaatgaaggactcgccgccaccgccttcaacaagtcatccctcttccccaacgagcgtcacacatgccttatggcaagggagaagaaagtgagtactcaagactccacttatgcttcttctagtgataatgagtctagtgatgatgatgacatagattattcatgcttgttcaagggcttagatagatctaacatagataaaattaatgaattgattgatgccttgaatgataagaataggctttt

SEQ ID NO: 64594 - DNA, 336 bp, Zea mays
  unsure (1)..(336): unsure at all n locations
tttttttatncccccaatccncctcaccctttggcagcttcctgctcccttaatatcaagcggccctgatcccaaggtatcttctgccgacgcaagccgatgaataattgccttgaagcgattgaggtgcacgaccataattgattgtaggatatccatgttataagtcaaaccaactgctcaaattggtgtgttatgtaaccaaggtcctggcatggaatcttgcccatgctacaattgttttcttcaatccatgaagggtgtgagatcatgaatttactttggctctgcattgctgaagccttaaaaatgattcacctgactgctgtatcacca

SEQ ID NO: 64595 - DNA, 367 bp, Zea mays
cacgactgagataataaagtgctaactattgactagacgtggtgatcatcttataggagatccatatgagtttggatgtttaaaaagacgctatgaggtgtcctctgccttgcgttgactaaatactaaacgcggtgatcatcttatatgagaccaattagagttatgatgttttaaaaaatatattcacgaggtgtcatttgcattattttatatagcgtctaagatatgggacactacctaaccctagttgttctagacacataactatataataatattgagtgtatgcttcaaaggttcaagattgtaccatgagagttcgtaccattgttcataagtgtgcaccatgactatcatgctgcgc

SEQ ID NO: 64596 - DNA, 377 bp, Zea mays
  unsure (1)..(377): unsure at all n locations
agcttncgaattacaaaccgacctaataatagaatgaccttttagtccataagtgttcgagtcgttgttgtaaacttttatgaagggcctgattgtaattcctcacaggctgtgtcttgtgcctataaataatgaacaatattcctttactgttcacgcattcctgtaattgcaatcgcatcactcgggagtcaatctttgccaaggcagaggtatatatgtatctaatatccgaatacattaagttgagataatataaaaatgatggtgctcatttataatttatttgtctttgatacttcatatttcttaataatcttagtctattagagttcaatgaacgaaagttaaccttcgtcattgtatcgtttctaacc

SEQ ID NO: 64597 - DNA, 338 bp, Zea mays
  unsure (1)..(338): unsure at all n locations
aactaaaacatcgccgaatgctttacaggctcacctcaccatccggcgaagacctagagcattcatggaacatagataacctccgcaaattcttcatctaaaacccaaagcccaatttcctttgcaattcttgaaacaatgtcaatcagggccgcactctnttcctcccagggggtgaagtttttaacgaggcggagctgttaggggccttcctcttccgaaggtcctcaaaaacttaactagcatattttctagtataacatgctgtctcaagaggcttcgactttgagatgaacgtgtgcatggtatgaaggcgcggtctggaggaaggatgaact

SEQ ID NO: 64598 - DNA, 387 bp, Zea mays
agcttctaaagggatagcacattttatgactaaccaatgttcattttgagaacaaggtttgtagcgcatgccaagcagggaagcaagttggagtccaccatccacacaaaaacataatgacgacggacatgccactcgagctactccacatggacctatttggcctgatcgcttacataagcatcggcgggagtaagtattgtctagttattttggatgattattctcgcttcacttgggtattctttttgcaggaaaaatcccaaacacaagataccttaaaaggattcttgagacgggctcaaaatgagttcggattaagggtcaaaaagataagaagtgataatgggacggagttcaagaattctcaaattgatggaattcttg

SEQ ID NO: 64599 - DNA, 403 bp, Zea mays
agcttggccggatgaatcctttcgatagtagatcttgtaactgaatcttcagttccgctagctcatttggaggcatacgatacgatcttcgagaaatgggagccgtaccgggcttcaatttaattacaaactctacatctttctcgggtggcaatccaggcaaatcctctggaaagacgtctgggaactcgcataccaccggaatatccttgacttctggtataatggcttcataaactctgccagtaattttggttggaatggggatagacaagagaatttcttcttgattatgagtcaacctgatggttctctgatcagtgttgagggttgctttatgtcaggccagccaattcatgcccaaaatcacatctatgtcttggcctttcagaactatcatatt

SEQ ID NO: 64600 - DNA, 398 bp, Zea mays
agcttcggccctctctcacaagccactttagccgaaagccgcttctttctttgagaccttctgcgacgaagcatagacccaacagtagcccctttcgcggtgctagatcgtttttcgtaacgagcttgatccgtgaaaaaagtctcttaagcttcgggaagccgaaggtccaaaaaacaccttccctgagctcgttgtcgagaaacgattcaatttcccagcgcgtagcggccccaccctgcagagttactgtttggtctctgcggtccaccacgcagcgagcgcgagcgggtgttcgcctggtgtaaaaatcctggcgcttcgccttcttacctgtagtactatataaacagacgagtaggtgtgaagttactacaacattcattgctatttgcact

SEQ ID NO: 64601 - DNA, 291 bp, Zea mays
agcttgagaccgcggtgccggtgaatcgttcgcgcggcggcacccaattttccttcacggtggaccatggcgccccatgtttttcttgggcgatgacacgaccagaggggtccgagttaaatagccatgggaggcgctagatcttaacccaatcccgacacacacgggttctgatcggctcgaatccaaggagtagttccgccatgcgcgggattgaaggtgacgattggatcgccattggggagttggggaaggttttgcgatggcgggcaccttaaaacaaggaggggg

SEQ ID NO: 64602 - DNA, 454 bp, Zea mays
  unsure (1)..(454): unsure at all n locations
atccttaagtcacctgcngcatgcagctanaaagtctaaaaaccaagcaagcgttgttggtcaagagctaaaaaattgagcaagcaaagcatgcggcagatagcgtaccaaatgtgctcggngtgagttcctatttatacgcccagtgcgttccaaattggagggccccatctgtcatcgactgttgctattctagcaaacggaaggtgtttnttcggaccttcggcttaaggccttcgtccatatcgcaatctgaattcgttattctaataaattaatattgcgaggggctactattgtgggccttcgtcttccgaatgcctcaaaaacatgattaacaatgttctagagtataaacatgaacaagaccttcggactcggtcagaacccagtgtgaaagcacaaaaaacgaaagtgacgcacgccaactaccgcagggacttcgcatgacaca

SEQ ID NO: 64603 - DNA, 425 bp, Zea mays
ctaagcttctaagggagaacacgtgatatgtctaaccaatgtacaattcgaaatttatagaccttgtgtagctggctgtcggcgtgtcgagacaggggggtccctaagccgacgagtgagtgtgctgcgtgccccatcccatatgggtcgagcgcgtgagcgagcgcgaatgggggagaggcgaggtggccggagtcgatcgtgagagatgtgtaagtcccgcggccttcgtgttcgtcccgcgcccatgtcaagtgcgcttgcagtatgggggttacaagcgtccacgcgggtgatggaagcgagcgtgcccaagagagcgcctgtcccgtcctcggtaccgcgcggccaaccttctatgataaggccctggtccttccttttatattcgttaggagaggatccacgtgtacaatggggatgta

SEQ ID NO: 64604 - DNA, 501 bp, Zea mays
  unsure (1)..(501): unsure at all n locations
agcttctanatacctgaagagatcatcaattctatatcataacctgatcatcaaaaacaagtaaagtatagccttcttgacgcatattcacttactatacaaatatgattacgatagtcaaaccagttccgtatttgcacacaactgcaggcatagaaccatcgatgcaaatccatcaactcaacaaaaggatcaataagtgaaacaagagaggtaaatttcttaccggctgccagtaaagtcatgcttcccaagtctctggagcacatcaatttctatcatagcagcctctcggtatttctgaagggagcgtacaatcttgatagccactgcttcttggttntccaagtcccagcactccaaaacttgaccaaatgtccctgtgacacagattggaacgataaatatagcatggaatggaagcaatgaanagtgttgggactgagaacatagaataccatgtcatccttgtccgatactaagcattccagctaagaacaa

SEQ ID NO: 64605 - DNA, 475 bp, Zea mays
  unsure (1)..(475): unsure at all n locations
ttggtcttggccgaaccacgggataaccaccgngccatctctgtgantgatttattgtggatattgtgttgtgactcctctctagccacttggcaattattgtgctaacgattaactaaattctgtggcttaagttttcaagtttcacaggatcacctattcaccccccctctatgtgctctcacttgtagacttcatgttattcctagaactgttaacctttgtaatcacagtttgattgtcacagttcatggaaatagccggtatcggttttttaactaccggttaatccaattggatatcacgaagccactcatcctcattcccaacagtgtctaatgctgcgagttctgcttncattgtagacttcgtaagatagtctgcttgcaagacttccaagaaacagcgccaccttcaacataatcacatatcgcttgtgcataagctcataacatcagaatgcagttgcgtacat

SEQ ID NO: 64606 - DNA, 438 bp, Zea mays
  unsure (1)..(438): unsure at all n locations
agctngccttcgcctcagtgtaccacccgcaatcttactgagttgtggaacgcgccaacggtaaaattntcacagccatcaagaatatgctcctcgacgacaaataaggaaagtgggcagacctgttacctaaagcggtctgggcgctgaacacgactgagttcatggcgactgggttcacccctttccgccttctatatggatcggaggccatgactccgcaagaaataaaacatgggtcactgcggacagtcgcgtcagccgtccccgacgtagacgaacctacttcgaaggacctcatcgacggagaccgtgtcttctccctacaggctctaaacaaataccaagctcatacaaaagcatggcgcgaccacacagtcatcccgagggaatntagcgaaagagacctcgtactcgtcctgacaactcggacagagt

SEQ ID NO: 64607 - DNA, 390 bp, Zea mays
  unsure (1)..(390): unsure at all n locations
gatccttaagtcacctgcggcatgcaagcttgtgaagggtcttcatccncacatgtgctaagcggctatgccacagccagcccatgctagtcttagcaattaagcatgcatctagaccggcctcctcttttgcaaaatcaactaaataaagtttgtcgtctaatacacccttaaacgctaatgaaccatcacttcttctaaagacagacacatctacatttgtgaataaacaattatatcccattttgcataattgactaacagataacaagttatatccaagagactcaactaaaaactcatgagatatagagtgctcggatgaaatagcaattntacctaacccttttaccttgccttgattcccatcaccaaatattattgaatctt

SEQ ID NO: 64608 - DNA, 456 bp, Zea mays
  unsure (1)..(456): unsure at all n locations
tactcagcttaatgcttcacctttaacanaggatgtaaagggaactatatgagttgtctctaccattatcaaaagaaataagaccacatatgaaagtggtatgcccttttgatccaacggaaatgacagatgttgcttgatttcctcacagacaacaagaaattgttttaaggaaggagtccacagaagatcacacatcagtgtagtttcacaatggatcatgaccagatacttctataccaacatgcgccaagcagcagaatcctgtgtgtacattcacaggaggctctcagtttcgctgcggtaccataagttcttaaccatgacaccattacaaaactggcaccaataatggatctcaagtaataagaacaattngcgtagggataacatattgatataatctcataatggattatgacttctaactgtgatacaagcgtgcatcgatcatca

SEQ ID NO: 64609 - DNA, 440 bp, Zea mays
  unsure (1)..(440): unsure at all n locations
agcttctatagggagaacacgtgatattattatctaatgtgcaattcgaanaggatagaccttgtgcagcttgtcaggcaggtaaacaagtgggaggagcacatcacagcaagaatgtgatgaccacatcaagacccttggagctgctacatatggacctcttcggacccgtcgcctatctaagcataggaggaagtaagtatgggctagttattgttgatgacttttcccgcttcacttgngtgttctttttgcaggataagtctgaaacccaagggaccctcaagcgcttcctaaagagagcacnaaatgagtttgagctcanagtgaagaagataagaagcgacaacgggtccgagttcaagaaccttcaagtggaggagttccttgaggaggaatggatcaagcacgagttcttcgcttcctacacaccacaacaa

SEQ ID NO: 64610 - DNA, 431 bp, Zea mays
  unsure (1)..(431): unsure at all n locations
tcgactcgttgttcctcaacatcgtcatcctgtacatattttttcggnatgagagaagngcagagttcaaggagaatgtaaagtaataggcacaaatttcttaccggcttaaggtggctttgagcttcgtcgccagccatttttcgcccgccttttacccaaatttgagttatgaatctatttcctattctccgagctaggctggggatatcaattaaatctgccggtgataagctaaaatttggtttgttgacaatntttccatgtgtacagccagatttcatgaaggcaacagatgtgccccgagaagctaacagagcgcagaaatcggcgtgtccagctataacttcgtcgagtgcatcaacttcgccctcaatgtgttcgaaggtttccggcaggttttcaaccgaatgactgaatttctcaacgct

SEQ ID NO: 64611 - DNA, 492 bp, Zea mays
  unsure (1)..(492): unsure at all n locations
agcttgagaaatctctccacctgccttctttgatgtcatggngcacttgcgtgtccatcttcccgatgaggcaatgcttataggacctgttcagtatggatggatgtacccaattgataggcgactaggcactttgaaaaattntgtaaggaacagggctaggccggaatgatcaattgctaaggcatatatggcaagtgataccttaacattntgttctaggtacatgaaggatgttgacactagatttaactaggatgatgatagtggtacagagatgccattgcctaatgacatgtctgtttttaagcacggtgctactcttgctactaagactgattacattgatgatgctatcatgaataagnntagttggtatgtgctacatattgctgatgaagtagaggaatatttgaagtaagtatcatttacatgtttgagatttaattgatggtctatttattacaattgcaaatattcttatgaataaag

SEQ ID NO: 64612 - DNA, 416 bp, Zea mays
tactcagcttgtgatccggaagatttacactcgttctctatcatgtattgcctccaaatcttcaaagcgtgcactacgacaactaattccaagtcatgtgtaggataattcttttcatgcttccgtaactgccttgaagcatatgcaatcacttttccttcttgcattaacacacatccaagtcctagttgtgatgcatcgcaatacacatcgaatcctttatgaatatcaggcataattaacactggtgcagtggttagactttcctttaattcctcaaaacatttctgacatgcttcatcccacttgaactatgtacctttgtccaacagtgaaataagatgtttcactattttggagaagccttcgataaatcttctatagtatccttgctaatctaagaaaactcctaatct

SEQ ID NO: 64613 - DNA, 443 bp, Zea mays
agcttgaagccgtgaacacggatatacgatgatccccttgtgaggtgatcagttagagtaactgtcgtcagttagttcagttgtcctgaaaatctggacataagaaatctgtgtcttataatgaatcacactgcatgcagggtacatggaccccgaatatgtggttactcaagagctgacggagaagagtgatatatacagctacggggtgcttcttctggagcttgtgaccggacgtagagcaatccaggacaggactaacttggtggagtgggcacagtcgcacctctcgtcgggagcggtctctcctgaacttgtagacccgatgatcatgggcgctgttgacgtggaccatctgcatgtggtggtgggcatcgtgcagtggtgcacccatagagaatggcggcagatgccctccgtgaggcatggtcttctgatgctct

SEQ ID NO: 64614 - DNA, 415 bp, Zea mays
tctaagcttgccaattggcgcatatttgcctttatgtcttcctttgttttcagggtcattttcacataaaaccattccgtcatccattcgccgggccatctcttccgatatgttggcacgggacagcttgacccatactgagagacgaagctgtagcagccaaaattattgtgatactgttctttaccccatggttttgtctcgtatgataattcgtgaatgttgcagaaacttttcgcatcaggttccagaccttggcttctcacggcccacacgaagatattcagccttatgattgcttcgggggtaagttggtgaagatatacctcaaatattttcagcacttctactacaaagctgctcaggggataccgtagtctagctttcaaaaagcttctgtacactacgacttcat

SEQ ID NO: 64615 - DNA, 467 bp, Zea mays
  unsure (1)..(467): unsure at all n locations
agcttgagacaaacattagccgctaccgacgtcttcatatcttcggnagnttattctattctaatttcaaggtaaaaaactnttcttcaacttttcattggttttaacaacgaaggtgttttctaacgaaggttgcttctgcacagagtatgctattgagtaaagctttgagaatgcaacaagatcttgaagataaaaagcatgaagttataattgagggttnggaaagcaaaataaaagaccaagcagctgatcttgaaaagaaagatttcgaacttcagacaacagagggtttattggcggaagctgaaactaaaattgcaaagntgaatccacagcttctctcaaagtcagaaagcttcgaacaggaaaagcagaattttgatgcacaatttgaagctgaggtcgaaataagttcaaatntacaaaaataattgacatatcttcaaaacacatgtctggagttc

SEQ ID NO: 64616 - DNA, 432 bp, Zea mays
  unsure (1)..(432): unsure at all n locations
tcgtgtngtggcgaatgcaaagacgccacccttcgctcgtggccttcgctgtagtcgttggtccaacggagataaaacgggcagggacacccttcgccccatacgacatcagacgaaggcgtgcgacgaagtcatcccaccgtgcggcctcgtccagctcggaggcccacgtgtgatccggcccactctaacgggccctacgtggacgctgtgtgttacgggcctaatttgtaaaggcatccctgtaattacagtctgtaaccctgctttatgggaatattctggggataacctaggtgtctgagggcacatgcgtccttaacacaagacgctgggcgctcagacacctataaatacccncgcacagtgcccgtgagaggctagattaaccgagctattgccatcttgcgcgagaaccctattaacgtgcct

SEQ ID NO: 64617 - DNA, 418 bp, Zea mays
  unsure (1)..(418): unsure at all n locations
agcttanagccatggtaagtatcatatgcaagtaatatacaaattgactcaagcctagctacgggtgcataggtttcaccaaaatccaaaccttcgacttgtgaataacccttggccacaagtcgtgctntgttccttgtcaccacaccatgctcatcttgcttgttgcggaatacccacttggtttctacaacattttggttaggacgtggaactaaatgtcatacctcattcctcgtgaagttgttgagctcctcttgcatcgccagcacccaatccgaatctttaagtgcatcctctatcctgtgtgactcaatagaggaaacaaacgagtaatgttcacaaaaatgagcgactcgagaatcaagtggtacccncttatgaatatcgccgatgatggtgttcacggggtgatctc

SEQ ID NO: 64618 - DNA, 227 bp, Zea mays
  unsure (1)..(227): unsure at all n locations
ttgagaaagacaggatntgtatcgcatgccatgcgaggaagcaagttggtgcccatcattcacacaagaacatcatgacaaccgacaggccactggcgctcctacacatggatctattcggcccaatagcttacataaacatcggcgggagtaagtactgtctaattattgtggatgaatattctcgcttcacttgggtattctctttgcacgagaaatctcatacc

SEQ ID NO: 64619 - DNA, 485 bp, Zea mays
  unsure (1)..(485): unsure at all n locations
tagctntgtaggagaaggagatgatatgaaactttgtggtgctcgagaaagtcaattcatttttttttattaactcaagctatcaatcttcaatgatctatatacccaagattgacccacagttattctgaattgttatgtctaaaactcatatcatctcggggaagatattgatgttgtaggaaataaagaattatcctatgtcaaaaagtcaagacctacaacatggaggaaagccaaaggatggtaacaattatgcttttaagtgcaagtatcttaaattatcatttcttatgtgtcttgtgtagtcacatagaaaaagaaagcacttcaaatgtntttatattatgtcaccattctttgaagaaattcctctcatacggtagattgcatactcatcatttctattccttggcaatctacatgccttatattgttgaagtatctcatggatgcttttactaatcatctattattgcatgtct

SEQ ID NO: 64620 - DNA, 377 bp, Zea mays
  unsure (1)..(377): unsure at all n locations
gcaagctcatggctttatctcttatggaattttntttgtgcaatgaggctaaagggccaaaaatgatctcgtttgggtgcttaatgccaaagggggagaaattaaggctaaagcaaatggaccagctaccacttgtgaattttgaatagagtagagatagaacttttgattggcaaaatactcttattgcaaaatttggtctcttgtggggagattctatgattatgggaaaaaggtgggagtgatttgcataaacacaccaagtggtggcgaagaatgatcctaatatgtcaaatcttgttaaagacaattattgttctcaatagcattgatgctgcacttctttttgttgcttttggatgtgttggcataaatca

SEQ ID NO: 64621 - DNA, 485 bp, Zea mays
  unsure (1)..(485): unsure at all n locations
tcggaaatgcataccgacttatagatagaatgaccctntattccataatagttcgagtcattggtgtaaacttttatgaggggtatgattgtaattcctcacaggctgggtcctatgcctataaatagtgaacagtattcctttactggggaggaggttctggcatttgcaatcgcatcactcggaaaccaatctttgccaaggcaaaggtataattgtattcaacacgtaaatataatgaatggatataatatggtttatttatgatacattcacctttgatattcggtattttatgtcatcttatacaatctgttggagttcaatcacgaagatataaccttcgtaatgtattccatcaaccttcgtacagggcccattatccccaatggaataatgcttcgttggacgaagaacatttacatttaacattntatgtcgccgttgtcttaattcatagcatttgagaacaagtctacaacaag

SEQ ID NO: 64622 - DNA, 496 bp, Zea mays
  unsure (1)..(496): unsure at all n locations
atccttaagtcacctgcagcatgccaagcttgctttaaaaaaaacgtaagagatgtattcgcttttgtatttccttanncccgatgttctgtaatgactgcaagacgggtgaatcgctcctggttaagtaaagaaagataccgaacttgtcaagtgacttatgaacatctacagggtgtctgatgtctgttggacaaggacaactgtaggtgggcctaattacttgggaggttccgtcacaatggtgaaccggctgttctcgggaaagagaaatacacgtacgactataattcattggactgctcggtgagccaacagcactcacggccaacggtcggatgcacaatctgcgggcgacacgtgtctcgctccaacagtcaagtggcacaccgtactggccggtgcgccaacaggcccggatgagcaatggtatattcgcccgatatggatgagacatgcacccacatgaacatgattgttggggtgctctacttcc

SEQ ID NO: 64623 - DNA, 406 bp, Zea mays
ctcatgggaggaattacaaatcacttcccacttgtgttcctagcgagagcctaaatcaatctgctgagatggaactaaaacctgaagccaacctgtcgtgctgccaactgtgtcgtctgttggtggtcatagtgcggtcaaaagtcaaaactgaaggggtagaaggaaggagagtattgtgtgacagatgaagaataatacaccaggttctggtgagtagatgggcagtatagcatggccgacaagctgttatataggatgtataggaagcttgctgatgcatgtgcttggccgattagtttaattgtggcgctatttcattccatgattccatctgtcaggccgaacagaatttggatcaacaggctatctatcccacatggtcacatcacatgcatgtactctg

SEQ ID NO: 64624 - DNA, 445 bp, Zea mays
  unsure (1)..(445): unsure at all n locations
agcttgatgacacaatgttgccactcggctttcttctgatcatgtcgaaacacgcaatctacatcaagcaaagcagtggcacccacttggtcatcgaaggttacgtcgattcatcgagtaggtaagactctggtgacctcgtggtgttcaataaggagatggccactgtgttcaagatgagcgacctctgtgttgggggccttcatcttccgaaggtcctcaaaaacacgactaacatgttttccaagtgtaatatactgttataggaaccttcggctntgagatgaaggtgcgcacggaatgaaaggagcagtctaaaagaaggatgaatcagttctaaagctatggatgatgaggcttcngcttatcgcanatacagtgatggagaatgaaaccgacctaaaggggataagactgcttagtcctcgacagactactccttagt

SEQ ID NO: 64625 - DNA, 356 bp, Zea mays
ttcctatactcaagttaaataaaactgtcgaggaccataattaggggttccctcaatgctcctaattctcatctagttacccccatcagcacaaagctgctaaggcctgatgggtgcgattaaatcaaggatcagtccattcgatggactcgatcacgcctcgcccgagcctagcctcggactatggcatccgaccccggatggttttcgtctcgcccgatgcccccctccagcggcgaacgtattttcggctcgcccgatgccctgtcttttccaataatcaaccctgaccaaatcgtcgcaccgaccgaccaaatcgcaagagcattttatgcatatgtggcctgacaccttta

SEQ ID NO: 64626 - DNA, 494 bp, Zea mays
  unsure (1)..(494): unsure at all n locations
agcttnggggatggcaacaatattctatctagtttattttctangctgcagcggnggatcagnntttctctaatctgattggaactaatgtggacagggactggactaatgatttanatgcgcttggtttaccttctcatgacctgtctgagcttgatgcacccttntttgaaaaagaggtgtgggagaccatcaatggcttaccacttgataagggtcctgagccagatggttttacaagaagggtttatagagtgtgttggctaataattaaggaggacctcatggcagttgtgtcgtctgtntggagcatgaagttcaacaatttcggcaggcttaacacagcttatatatccttgattccaaaaaaggagggagcttaccaggttaaggattctaggcccattagtcttgtacacagtgtcgcacaactcatcaccaaaatccttgcaataggcttgctagaagactntatgacatggtctcacctaatc

SEQ ID NO: 64627 - DNA, 356 bp, Zea mays
acatggttagaggattaatgaatgcggtgcttgaaaaagacaatcattgtagttcctgtcatgctggaaatcatttgcctatacacatcctactaatgctttcatgtcaacatctatgccactggaactgcttcatatggatttatttggacctactaactatgtaagtgccgtgggcaacctctactgtctaatgactgttaatgacttctcaagatacacttgggtgttctttctccatgacaaatctgaaggtgcatctatattcaagaagtatgtcataaaagcacaaaatgaattgattgcacgatcaagaaatcttgaatgattatggtaagattattacaacaccatca

SEQ ID NO: 64628 - DNA, 363 bp, Zea mays
  unsure (1)..(363): unsure at all n locations
agcttaaatgtgttgtcatcaatcaccaaatttggtgtgattgtatgtgcattcatcccttttatgagttttggtgatttggataacaacacatttaaaggtctaacaagtttgctaagtgttgaacaggaaattcagtatgatgaacatacttgaatagtgtataatgatcagtgaacaaaggttcaacacaaggttaaataaccagtgagacaatgcanatggatataatatggtctctatattggtttgaatatatggacaagacctgagaaatcactatgcataaatatgatcagaatataagttgaagtgattaagaagattggtcaagccaaagtgaatgagatatgaagaatcatg

SEQ ID NO: 64629 - DNA, 413 bp, Zea mays
  unsure (1)..(413): unsure at all n locations
tatagccatgataagtagcatatgcaagtaatatgcgaattgattcaagcctaactactggtgcataggtntcaacgaaatccaaaccttctacttgtgaataccccttggccacaagttgggctttgntccttgtcaccacaccatgctcatcttgcttgttgcggaatgcccacttggttcctgaaagggaattatgcttacacctagttcctaaataattttggtggttgaattgcccaacacaaataattggactaactagtttgctctagtgtataagttatacaggtgccaaaggttcacacttagccaataataataccaagtatttggttcgacaaatgagcatgggtacaaccaatgcacctctggtctggcgcaccggactgtcctgtgtgccaccggacatg

SEQ ID NO: 64630 - DNA, 276 bp, Zea mays
actcattgagaattctgaattacagaattctgacactcagaccttgttccatagatcagggatgtgtaccttgacccctaactctaatcctagtggccccattgacaaaattgtgtctaactaaccactctgtcgtgtgcctgaagattgcattgggacgcgagctctatacacgaccaaacttgggtattcgctcggtgttggcaaggatacaaaccatatttcctggctccatatttctgtaaccaggaggctaattcctattacctccacaca

SEQ ID NO: 64631 - DNA, 472 bp, Zea mays
  unsure (1)..(472): unsure at all n locations
agctncgncttaaccatattcttgtattcttctatctgacttcgaaggtacctgttcacatatttctcttggaatacatagtcaaattacatttttgaggaccttcggaagccgaaagcccccaacagtagcccctcgcaatattaatttgctgtaaagataagtttatattgcgatatggacgaaggctatgggtcgaatgtccgaaaaaacacctgccttttgctagaatagcaacagtcattgacaagcgggaccctccagttttcgacatactgggtgtataaataagggctcatcacaagttatttggcacgctctcttgccatctgttntacctgctcaaatagctttctgcccacaaatatntgactgcctccctagttntaagcttcggagccgagaggcatgatttccgaatggatgtctgatgaatagatagttgctgccggagtgaagctgagcctttctg

SEQ ID NO: 64632 - DNA, 443 bp, Zea mays
gacaccatagctgcaggtcacctttgtatattgtctcccatttggcaaagtatgatgcccccatattgcttatgtatgatggcctaactgatccaaagcaattccttatgacttatgaagttaccacatctttctatggtggtaacttagtagtcctgacgaagtccttcgtcatggcagtcgggaatgtggcacagacctgttactcatcgcttcatccaagaactgtaacttcatgaaaaaagttgaaggagatgctcctcaacagctttcaaggcttctagtcaaaaccagtcactacacgagctttgtttagtgtacttggaccagatgagtatctccagactttgtccaaaatttctttgctttgggtcggcaccatagtatgaagaattgtcatcaagccatggcaggtgctaggcatgacatcacctatattttgc

SEQ ID NO: 64633 - DNA, 473 bp, Zea mays
  unsure (1)..(473): unsure at all n locations
gcttgcatacagctgacaatctcgtatcctctgaagtaccttcctcanatgctcctcatgctcttgctcattctgggaatatataaggatatcatcaatgaacaccaccacaaacttatcgaggtagtccatgaacacactgttcattaagtacatgaaataagctggcgcattcgtaaaaccgaatgacatgaccgagaactcatatagtccgtacttggtgatgaatgttgtctttggtatatccgaaggttggattcaaagctgatggtagcctgaccttagatctaacttcgagaacacactggctcctctcaactgatcaaataaatcttcaattctaggcagggggtacatgttcttgatagtaacttcattcaaggatctatagtcaacgcacatcctctttgtgccatccttcttctccacaaatagcacttgggatgcccaatgcgaagtacttggtctgatgt

SEQ ID NO: 64634 - DNA, 428 bp, Zea mays
ggtgaagattcttcatcccaacatgggctagtcatcgatgccatagccaacccatattattcttagcaattaagaaagtgtcgagttcagctctatcgatatcaactaagtatagctgaccctctaacactcccttaaatgctactgaatcatcacttcttctaaagacagtaacacttaaatctgtaaaaagacaggtgtaacccattttgcataattgagaaactgaaagcaaattgtaatctaatgaatctacaagaaaaacattggaaatagaatggtcaggtgatatagcaattttaccaagtcctttgaccaaaccttgattcccatccccgaatgtgatagctctttggggatcataatttttctcgtaagagaacatacttttctcccagtcatgtggtttgtgcacccgctatcaatga

SEQ ID NO: 64635 - DNA, 469 bp, Zea mays
  unsure (1)..(469): unsure at all n locations
agcttgcactcagaacctattcaacacttattacacctgttagtcctttaattgggttgtcatccaaacaccaaaacccacaagggatctttcaagtacgagtcatgaaccttgtattggctagaagaaagtgaatgagaatcaagaaaatgtgtgtcagacccatgagactcctcttttctccttcccctttttcccgcgcaccaaccaggtcgctggctatggcaaccagatgtgagccccttcccggtctcattctcatttaaaccaaacgtgacaacctgaaagggaaatgtgcccttgggccatttctaagtatntttggtgattgagtgcaaacacaagtgcttaaatgtgaaaatatgcccatggatgaacaaagtgcanatcacaagttaaggtatgtttctaagccttagtacattgtgtntgtgtactaatatcttgtctaagtgttagaaacagaaag

SEQ ID NO: 64636 - DNA, 360 bp, Zea mays
  unsure (1)..(360): unsure at all n locations
ctacaacatcagctgagaaaactaatcctcaataacacaagtcaagaaatttagaacacgaacctttacaaaggcaaagcagttctgatattcagggactgttccaagataataagaataagggcgccgccagccaccacaggatacttgagccatctatatatatagaataataaaagttgaaactgctgattagatgaaccgtcgattctgactggccaattcatatgctacatgtgttctgttaccttttgttcattctcaaggtcccaaatgataaaatctgcataggtgaaacctattgcgtaggtactactagatnggctctcatatgcaagaataattgagatggattgaatg

SEQ ID NO: 64637 - DNA, 396 bp, Zea mays
  unsure (1)..(396): unsure at all n locations
gactgccagtgtcatgacattatgcacacaaccttctttgatgtatctattgctcgggtcctctctatgtatcgcgagaacaatctgcaaattatccatcgatcaatagaattaaatgcactcaatctgacacttactaaccatgaataagcatggaaactgaaatgtaaaaaacaagttcattcagagctatacaggaaagaaactttggtcactatctgatgccaaaacaaaacaaataaaggactgctgcgatataacggttgtgcgntcttcccgtatataagaatatatattagcagagcacaaatgaatcataatttcttgaataacattcttgaccataaggaacctaacatgtgttacactgatgcaatgatatatgtaatgtcatga

SEQ ID NO: 64638 - DNA, 323 bp, Zea mays
  unsure (1)..(323): unsure at all n locations
agcttgtgaaggttcttcatccncacatgtgcttagcgtcgatgccacagccagcccatgctagtcttagcaattaggcatgcatctagaccgacctcctcttttgcaaaatcaactaagtaaagtttgccgtctaatacacccttaaaggctaatgaaccatcacttcttctaaagacagacacatctacattagtgaataaacaattgtatcccatattgcataattgactaacagaaagcagattatatccaagagactcaattaaaaacacattagaaatagagtgctcggatgaaatagcaattttacctagggaaca

SEQ ID NO: 64639 - DNA, 416 bp, Zea mays
  unsure (1)..(416): unsure at all n locations
tggaggcgtctattggttgtcgacttggtgtagactccttcttcttttcttccgtcgccttgaatgcaacgggttgagcttctgatgtgtcgccaagctcgttgattttcctcgagccttctatcatgcactcaatacttacaaaatgcccgataacttcctcgggggtcattttagtgtatctatgattaccacgaatcaattgaacttgagtgggatttagaaaaatgagagatcttaaaataacatttaccacttcgtggtcgtcccacttcttgctcccgaggttgctcacttggttcaccaaagtcttgagccggttgtacatgtgtngtggctcctcccctttgttaagcccgaaccgaccgatctccacctcgatcgttttccgcttggtgatctnggtgagctcatct

SEQ ID NO: 64640 - DNA, 474 bp, Zea mays
  unsure (1)..(474): unsure at all n locations
agcttgntaccctgataagttgtcgcacatgtgtttatattgctactggaacaacanaataatagctntagcattctattagttcttacctctagatccaatttacttaacttggaacagccagcaagtacatctggtactctggatatgttgttgtttgatgcctgtacacaatgaaaacattattttgtgtgtctgaaccagaaagtaaacaaggaagtgataaattggatagccatcaagtacaaggaccaagaaactagataactatatgtcaaaaaaaagataagaatacatccaatggaatcttttggagcgaaaaaacagcatgggaggcccccactgtgaagttntattaaaacaaagagaagctcgacaactgatccagaaacaacagggagagaaactgtaccagagcaagaatgaagggggtatgatgtggaacagagagcatccaatgcaacttaccttgag

SEQ ID NO: 64641 - DNA, 390 bp, Zea mays
  unsure (1)..(390): unsure at all n locations
gctgtatgcgtcgatggtgaccctactcgttgtataancttctttcttcttctccgatgccttgaatgcaatgggttgcacatcgggtgtggaggacgcgccttgcccgatgattctcttggagcctttgatcatcaactcaaagctcacatattttcctattacttcctcgggagacattagtgagtgtctaggatcaccacgaattaattgaacttgcataaggttaaagaaaacgagtgatctaagaataaccttgaccatttcatggtcattccatttggtgctcccgaggttgcgcacttggttgaccgatgtcttgatcacggtgacattgcttgtggctcctccccttggcgaagcaagaagcgactgagctccccctcgatc

SEQ ID NO: 64642 - DNA, 480 bp, Zea mays
  unsure (1)..(480): unsure at all n locations
angctgcaagcttaacaacttaagcctgtagaggagatatatttttcttgtggcagacaacgaaaccattacgtgagatttaaaaagtgtcctttattacacagaaaataaaactgaatggaaaagactactatcatggtaggatatttgtcaataaatgtgcttcgactctggcacagtgctattgactgtgcgagcttcggactgttctctgaagtccctttggtgttgagcatattggcccccttctggctgctggccttgttgcaacggtggtggaggcggaggctgttgccaggaagcttgaggttgactcgccgaagctacagaaactgcagagtggttgcctacatattctgggatataaggcgaatgatacgaagcagtgtgcatgatctgcttcggctgaccctgttgtgctgcagcttcggctattctccctttgctttggatggtaacatggcacaatnctggtggtat

SEQ ID NO: 64643 - DNA, 283 bp, Zea mays
gtttaaataccatctggcccacatttaatacaccccgctggaccacatattgattgacacaatggtcattatatcgtgatgacaacattgtgtgtgtggcaaatgccgggatacaataagtacacatttgatggcctttcgctgtggatggaaactgctataatgaatcgtgttatggctaattgagttacgtaagaataagtgtgggacgcaccttctcttaaaatgcgaatccgaacatttccattatcaaaaaaccttactgagcacatgagaaatgata

SEQ ID NO: 64644 - DNA, 338 bp, Zea mays
  unsure (1)..(338): unsure at all n locations
tgcagctgcagctctatgatattatattncgattaatttctttattcactctaacgagctatgggtctagagttatcttggtcttgcaatcggnggttgccataagactggtgtccacgctgaggtgagcggtacgggtgctgagtcccgacgggagcggtggaaccaccatccaagtgacgacgttccgcgcgctcagcccgcaactgggcgatctcagcacgagccctactcagctcgtctaatgcatggtccagctccgtgtgtagcacggcggctaggttgactgtgctgctcaacctaagattgccctcaccgacaggtgagacaatcacgcc

SEQ ID NO: 64645 - DNA, 436 bp, Zea mays
actaagcttggactacactatccgagatgaaggtcgaccgttttagattaatgaccttttattccataaaggtctgagtcaatgttgtaaacttttatgagtggcatgattgtaattcctcacaagttgtgtcctgtgcctataaatagtgaacagtattcctttactgttcacgcattcctgtaattgcaatcgcatcactcggaaattattctttgccaaggcagaggtataaatgtatctaatattatatttgaatacatcaagtttatataatatgtaaatgatgttggttacttataatttacttgtctttaatgctttatatttcacattattttatataatctctgagagtcaattacgaagattcaaccttcgtaattgtatcgtttaaccttcgtccgaagttcattaaatccttgatgaaataatg

SEQ ID NO: 64646 - DNA, 352 bp, Zea mays
  unsure (1)..(352): unsure at all n locations
ttacctcaaccaaggtggtggagttcatccacgagattatcttcaagtttgggatacccaacaacaacatcacagatccatgttcaaacttcaccagtgtcgaattcttcaacttatgtgaacaagagtgcatccaactctagtatgcttcagtggcgcaccctatggccaatgggcaggtagaaagagcaaatggaaagatactataagcaatcagaaagaggttctttgacaaaagcgagaagtttgtatggaaatggatcagggaaatgccatatgtggttnggagcttacgaactcaacccagccaagctttgcatagatatacccncttcttcatggtgtatgggtc

SEQ ID NO: 64647 - DNA, 296 bp, Zea mays
atgccattgtcaactgtgagttcggacgggactccgatacggtatacaatgttttgccagataatattctgggcagacttcgatgttattgtggatacagccctcgcctcgatccatttggtaaaatattcgacagcgacgaatgtgaacttgatgttcccctgagccgtgggtaggggcccgacgatgtccatgccccatcgctgaaaggtcattggtgggccattatctttcagtaactgtaatggcttcctgatcggtgagaaaaattctggcatgcttctcaggaccttgtg

SEQ ID NO: 64648 - DNA, 241 bp, Zea mays
cgctcagcggaaggaaagtttttttttctgaaatcgtatgtgaacagatgaatactatgggctaagcgtgtacccactggactattattgctgacattaaggagtgatgaaaccagccttaaacaagcgttaacttaatggcttaagacacttatgagaacctgtaaggaaaacgttgaattaactaatggtgtctggcagcggctagtgaataactttcatataaactgactagtatcga

SEQ ID NO: 64649 - DNA, 379 bp, Zea mays
  unsure (1)..(379): unsure at all n locations
atagcctggtggcactgctaaaggcacactaccagtgtgtctgactgttctaatgttcaaattcctgcaatgaaacaattgtctttgttacgacatataaagttgacgtcataggactatgtatggtattcagaactcactgttcattcatttattctaccatttcttttcttttgagctatgttcccatgctctgtggctgattcatatattgtgttacatgcaacaaaactatctgccctttctgcgtccgtgtgatagagntgttccagaagctcggagcaagctaccaagccattgttttggataacgaaagtgagtgcacttaaatagatcaatttgttcgtttttctttcaatgacttatgtaatcataattt

SEQ ID NO: 64650 - DNA, 482 bp, Zea mays
  unsure (1)..(482): unsure at all n locations
agcttctaaagggagaacacattntgttactaatctatgtnncatttgagaaagacagggtttatagcgcatgtcaagcagggaagcaagttggtgttcatcatccacacaagaacatcatgacgactgacaggcctcttgagctactctacatggacctattcggcccgatagcttacataagcatcagcgggagtaagtactgtctagttattggggatgattattctcgcttcacttgggtgttctttntgcaggaaaaatcacaaacccaagagaccttaaagggattcttgagacgagctcaaaatgagttcggcttaaggatcaaaaagattagaagcgacaacgggacagagttcaagaactcacaaatagaaggctttcttgaggatgagggcattaagcatgagttctcttctccctacacgccacaacaaaatggtgtagtggagaggaagaatagaactctacttgacatg

SEQ ID NO: 64651 - DNA, 425 bp, Zea mays
tgtactctacttattcaagactcacaccatatctctaccattctaacaatcactcataatcaaactaaaccataaaaaacatgtcaaccttgtgttcacaaaaaaacactcctctttgctgctctctattgaacactacctgcaaatagtgttgttagcacaattcgctcttcgggaaaggctgcagtcatattcattttctcttcatctcctttattctgaaaagtgaaactgcaacgatctcacgcctcctgcagtccttcatccatagaagcaatgacttcggtacccgtagcctactggatatcggcaattctaaagctgttccaactcaacatcgtcatttttgtccatttaacctatccttaaaccaagacaagatggttatcatatgccaacacagacaaaatgggatatatgacatg

SEQ ID NO: 64652 - DNA, 476 bp, Zea mays
agcttaatgcccctaacaaatagactatctttgttaatggcaagctcccatggttcaagatagtgagggttacattttatatcctacaaactatcccgaacataaattatgaagattcatgctaagaaacctcataatgtttcacactatgcaagatgagctcaacaacttcacgaggaatgaggtatgaaatttagttccacgtcctaatcaaaatgttgtaggtaccaaatgggtattccgcaacaagcaagatgagcatggtgtggtgacaagaaacaaagcccgacttgtagccaaaggttattcacaagtcgaaggtttggactttgatgaaacttatgcacccatagctaggcttgagtcaattcgcatattacttgcctatgctacttaccatggctttaagctttaccaaatggacgtgaaaagtgtcttcctcaatggacctatcaaggaagaggtctattgtcaca

SEQ ID NO: 64653 - DNA, 341 bp, Zea mays
tactaagctgtttccgcctggttcaacggccgattagatcgccatattgttcgtatcttggcaaagtcactgtgtacggtcgcttatttgctccaaatcctatcttttcgctatgagttccaagtcgagatattgtacggggagggagatagatatgtgagaagattgctgtgtcagctgatccctaaccgagacaaaaggggtgtcaagtcgtgtctacgccctatggtaggtgtcatcctctttccagtgtgttctatggttaatatggcgccattttgtcaattgagtcgaacggttttgaaaaagggattaatgtgaacatgtggagtctttgtgca

SEQ ID NO: 64654 - DNA, 360 bp, Zea mays
  unsure (1)..(360): unsure at all n locations
agcttgaacggggtaaatcctggtgttcttttttctcagngnagnggntccacagcacttgtattaattcgtctggccactttccttcgggttggttgaagaatgacttcattattcctattgttatgattctgtttgctctttctaccagtccatttgactctggatgcctcactgatgcgaaatgtatttttgtaccaatctggctacaaaatgttttgaatgttttagcattgaactgagttccgatatcaacggttattgccttcggcgcgccgaagcgacaaacaatattttgccataagaatttctcgattgtggccgaagttattgtatcttatggctttgcatcgatccact

SEQ ID NO: 64655 - DNA, 435 bp, Zea mays
  unsure (1)..(435): unsure at all n locations
tactcagcttttatcctcttgtgaataganagcctatgtttctgtattataaaagagtgagtcccaaaccacccctgccttgtaccagaaatatgggaatgaaagtattccgcgcttccttttccattacttaccctatgacttttaatctcgggacgagattctcttatgggggaaaggatgtaacacccctggtgttactataactaatacttgagcatggcatcataagcattggcattgcatatgtttgacacacctagagtgcattcactatgtaaaaatttcaaataagttgtattgtttttgtatgttgcaactaataccctatatagggaacttaaccctaaacagggattaaaggggtaaaacacaacccaaattgagaaaatctaatagctttaagggaaaagtcataaaatgatcccaagtatg

SEQ ID NO: 64656 - DNA, 177 bp, Zea mays
  unsure (1)..(177): unsure at all n locations
agcttggatattcttcatcatatctctatgagtattgnagngataaatgaaaattcttcttcacgaagcatgaaaagaaaggaagggtgtttttcgtcaaagacatcaaaacggtacgtattgtaaatttcatgcatcgtaaaaaattgaaccataaaaaacaaagtatattacatt

SEQ ID NO: 64657 - DNA, 358 bp, Zea mays
  unsure (1)..(358): unsure at all n locations
tctaaagggagagcacattntattgttaaccaatgttcattttgagaaagacaggatttgtagcgcatgccaagcatgatagcaagttggtgcccatcatccacacaagaacatcatgacgaccgacaggccgcttgagctactccacatggatctattcggcctgattgcttacataagcatcggcgggagtaagtattgccttgtaatagtggatgattattctcgcttcacttgggtgttctttttgcaggaaaaatctcatacccaagaaaccttatagggattcttgagacgggctcaaaatgagttcggcttaaggatcaagaaaattagaagcgacaacgagacggagttc

SEQ ID NO: 64658 - DNA, 220 bp, Zea mays
tgcccaccattcacacaagaacatcatgacaatctgacaggccactggagctcctacacatggacctattctgcccgatagcttacataatcatctgcgggagtaagactgtgtagtattgtggatgatgattcgcgcttcactcgggtattctttttgcaagaaaaagctcatacccaagagacctaaagggattcttgagacaagctcaatatgacct

SEQ ID NO: 64659 - DNA, 434 bp, Zea mays
  unsure (1)..(434): unsure at all n locations
agcttctaaggggaacacgtgaaggtctatcttttgttaattcgaaaaagatagaccttgtgcagcttgtcaagcatggaaacaggtgggaggagcgcatcacagcaagaatgtgatgaccacttcaagacccctggagctgctgcatatggacctcttcggacccgtcgcctatctaagcatagggggaagtaagtatggcttagttattgttgatgatttttcccgcttcacttgggtgttctttttgcaggataagtctgaaacccaagggaccctcaaacgcttcctcaggagagctcanaatgagtttgagctcanagtgaaaaagataagaagcgacaacgggtccgagttcaaaaaccttcaagtggaggaagtccttgaagaggaagggatcaagcacgagttctcccgctcctacacaccacagc

SEQ ID NO: 64660 - DNA, 499 bp, Zea mays
  unsure (1)..(499): unsure at all n locations
gcttctatgagacaggcttaacgttcacaagagaatcatgttcttgtgtatgtagacgtgtagttatggtggttatactcctggtatagacatgtcaaatatttaattaaaatacataaatatatgtaaaataacaatctacataaagtatatggtacggctgttaatatagctntaaataatttattagcatcattagtatatgagttgttatgaaagcgttatttgttttatgaaacatatcatatgtattttggtactcatgtatgctgtcacgacattaattaaatcttactattaatatgtttggtgatgtggagtaatgtagaaacatatatacgattaatttattgcctaaatattctttatatggaagatgatgatagtttagatgcacatttgagaagataatttacttttctaataacgagatgttattcgtaatcacagaaaaaaatatatataatatctgaataagtatccattgtcatccctgata

SEQ ID NO: 64661 - DNA, 405 bp, Zea mays
  unsure (1)..(405): unsure at all n locations
agcttctctgcctttcttacaacttcattngattggagtctcattanaagattagntntaggcgttctgttcagttttgtggctctataatggtgtcgtttatattttatttggaagactacttgatgtgtttgcaactgcattggttgaaaaaacaagtttccaatatcaaaaaaaactcatgcaattgctgagctaatttgacttgattcatttgtcaacacaatgtcacctggtgtccaatagcacatatgcagcagaactgaattggttgaaacaatatgttttcaataacagaagtggctgcttgtgcgaataacagaagatcgggcgtggatgatcgacgaccgctgaatgttatcggcaatgcagccaacatctgatgcggntgcaaactacacgatg

SEQ ID NO: 64662 - DNA, 438 bp, Zea mays
tctatagggagaacacattctgggactaacagaagttcattttgagaattacagggtttgtagcgcatgtcaagtatggaagcaagttggtgttcatcatccacataagaacatcatgacgactgacaggccacttgagctactccacatggatctattcagcccgattgctgacataagcataggcgggagtaagtactgtctagttattgtggatgattattctcgcttcacttgggtgatctttttgcaagaaaaatctcatacccaagagaccttatagggattcttgagacgggctcaaaatgagttcggcttaaggataaaaaagattataagcgacaacatgacggagttcaaaaactctcatatagaaggctttcttgatgacgaaggcatcaagcatgagttctcttctcctacacacctcacaaaatg

SEQ ID NO: 64663 - DNA, 398 bp, Zea mays
  unsure (1)..(398): unsure at all n locations
agcttacttagactgggagatgacggtagaacttttattttattcccatcttgnncctaagcagcatagggttagacaagccactagtgaatctagagattttgctatcatttggtggaatgaactatttaacacacgtgctgcaccacaaacatggaatgcgttaaaagaggagatgcgagctcgctttgttcccccttcttatagacatgatcttcgacaaaaattgcaacgcttagatcagggagacatgtcggtacaggaatactaccaagagctttaaaaggtatgctatgatgtggggtagttgaggatccggaagatcaaattggtaggttttatggggattgaggcgggagattcaagatattgttgattataaagaatatcattctata

SEQ ID NO: 64664 - DNA, 411 bp, Zea mays
catgccaagcatggaagcaagttggtgctcatcatccacacaagaacatcatgatgactgacaggccgctggagctcctccacatggacctattctgcccgatagcttacataagcatcggcgggagtaagtactgtctagttattgtggatgattattctcgcttcacttgggtgttacttttgcaggaaaaatctcatacccaagaaactttaaagggattcttgagacgggctcaaaatgagttcggcttgagaatcaagaaaattagaagcgacaacgaaacggagttcaaaaactcacaaatcgaaggcttccttgatgaggagggaatcaagcatgaattctcttctccctacaccccacaacacaatggtgtagtgagaggaagaatagaactctattggacat

SEQ ID NO: 64665 - DNA, 361 bp, Zea mays
  unsure (1)..(361): unsure at all n locations
agctntagtgttggggatcatgtatatctcatggtttctccaatctggggcacacgcagattccaagtgcgtgggaagttagccccatgttacattggcccttttctgatcatcaagaaagtaggagcaggggcctacaagctacagttacctcaagaaatgtcagatgtgcatgatgtgtttcatgtgtcccagcttaagaaatgcctaaggataccagaagaacaagtgactccagaaacaattgatctacaggacgatctcagatatcaagaggtaccaataaggattttagataccgtgacaagaagaaccagaaattcaacctacataatttgccgagccaatggagctacactca

SEQ ID NO: 64666 - DNA, 298 bp, Zea mays
ttaaccactgcgagacctttccccgtttctgtctaaccttttcgaatgcgatatcgaatgtcatactttatgcatatatactttatttgtccccttgtgtggtgtactgtttgtttcctaatttgaatggatggatgtatgtatgcttgcaatcgcatagagaacgatccggtcgaagagcctgatgaactcgcaggagaagcccctgatcagcagtcagttggtggaggcaagtgtcctttgacctatctctatcctattcattatttaattcacctcccgctttacacatttatac

SEQ ID NO: 64667 - DNA, 385 bp, Zea mays
  unsure (1)..(385): unsure at all n locations
agctngtgaaggatcttcatccccacttgtgctattcggcgatgccacagccagcccatgctagtcttatcgattaagcatgcatctagactggcctactcttttgcaaaatcaactaaataaagtctgtcgtctagtacacccttaaaagctaatgaaccatcacttctcctaaagacagacacatctacatttgtgaataaacagttatatcccatattacagagttgactcacagacaacaagttatatccaagcgactcaactaataacacatttgaaatagagggctcggatgatatatgcaattattctaaccctttcaccttgccttggttcccatcaccgaatattattgaatcttgtggatcctctgtcttgacgt

SEQ ID NO: 64668 - DNA, 423 bp, Zea mays
  unsure (1)..(423): unsure at all n locations
tggagagcttctcgatgacgatactttgtttcttgcctttctatataccttgngatgtgttggttctaattatactggcacggactatagttcttctatctaacaatgacaaatcgtgttatgacaccgcatgctcgaattaattacttgtgagttgtggctggatataacagacgacatatgaaaatgactctatatacgagttctgtgtatggatgacaatgagctctaaatcttacactattaaacttaagaattagatcggattacggttgaactctatttctatttatatttaaactaatatttatttagaaccctatgaatttataaagaaatatgtggatcccgatccattatcatctagttctgngtcatgccacgaagactctcgtttaatttctttctttacacacaaattat

SEQ ID NO: 64669 - DNA, 445 bp, Zea mays
  unsure (1)..(445): unsure at all n locations
acctgaggcatgcagctatataggagcgacctgaccttgtgtattnttgtcnaanccagattgacggtgacctttatagaagctgagaacctgtgttatacaacaaattttttatttaaacccagccttgattctatctctaatgtatcttagacggcgccatcaagacaggataataatattgatctcagaattcgaattcttctatatctggaatcaaggtcattcagagtcgacggcttagcgttccctacaatttgttaaacaactttgattttcaccaaatataaaagttgctcgttactaatggaggcgcatcatatcacaagatggcattctatctaaccattctgacaggttagacatccactcttaggcgaaatctaccctctgagcatagcaccttggactaattatctctaatcttgttggacatggtgagacc

SEQ ID NO: 64670 - DNA, 386 bp, Zea mays
  unsure (1)..(386): unsure at all n locations
atactaagcttnggtatggttaaaaatcttggcagcaatacatcgcatttctatgtattgctgtggaactcacacctacctgtctgtttatatatcgctgcatgtaagaccgtgaatcgttaggattttcacaccatgcgaacagccttcttccacccgctgtgcggtggtccgcatagaccataatagtgtacctgcatggtgggaccgcttcgcgctcggaaactgtatcgtttctcgacaacgatctcatggaatgttgttattggaccttctgcttcctgaagcctaagagacttttttcacggatcaagctcgttacgtaaaacgatctatcaccgctaatgggctactgttgggaccatgcttcttctctgaatgtcctg

SEQ ID NO: 64671 - DNA, 453 bp, Zea mays
  unsure (1)..(453): unsure at all n locations
gatccttgagtcacctgcggcatgcaagcttgaagaatcttatccaacattgtcttgntgcgatgctagagccaggccatattagtcttagcaatcaggcaagtgtctagttcagcattggcatcagtgaaatcaactaaatatagttgtccattaacactccccagaaagctagtgaatcaccacttcttctaaagacggtaacatcaatatcagtaaataaagttgtagcccattttgcataattgagatacaaaaagcaagtttacccaatcctttgaccaaaccctgattcccatccctgaatgtgattgctctntggggatcatcatctttctcatatgtggagaacattttcttttggcccctatcatgtgggttgtgcacnctctgtcgattatctaatcttgtccactggatccataaacctaatatacatatgtatgccatgta

SEQ ID NO: 64672 - DNA, 411 bp, Zea mays
tttaatctaagcccacatttgactactcgctgcatattctttgtgttgtccaatagaaaccagacctgattactttcccaaccagagttctggatgttgcatgtattccacactgtcatgcatgaatctcatctaatagctgtctcccagtaaccgatgaaatgcactcatgatgactcctattgcactccttctgtacagcgcgccccctatgatggtgtagtgggtcgactgtcttgcgatgcgttctactgcagccttatcatccggttcttcttcattctttatatacctgatgatttgctctgtccagtcattagagtctgactctggctggctcaaagcgttgcactcttctgcctgatctgatgaaatgcttgtgcgtgacacttcctgtacgaaaattcgggt

SEQ ID NO: 64673 - DNA, 380 bp, Zea mays
agctagcctactccacggtgtggcgtttatcttgtgttatttgcactcaactcctctcatgtgatccaatgatcaactagaataccatggtgatttgcctcttctctatctcaatcccgtttgcgaggaatctccacaacttggagtctctcgcccttacacttggaattcacaaagaagcacggagcaaggcagggaagcaacacacacaattccacagcaagatgcgcacacacattgccaagaatcgagctcaaaagactatctcaaagttctcactagaacggagctctaatcactgataatgacaaacgaatgcgtaaagactgagtgtggatgatccagaatgctctaaggttgcttggtatttttccttcatg

SEQ ID NO: 64674 - DNA, 319 bp, Zea mays
catatccaagcattggaaggaaaatgcaagcttaaaggacaacggtagcacaagatatgattttgttaccggcttaagatgacttctagcttcatcaccagctatgctttgtacacccttcgtgcatacgtagtgtataaatatgtttcctatgcgttcaggcaagactgggaatatcaaccagatctgctggagataaactaaagttgggactattgacaatttttccatgtgtgcaaccagatttcatgaatgtgacagctgtgccccgagaaactaccatggcacagatatcaccatgttcggctataatttcatc

SEQ ID NO: 64675 - DNA, 349 bp, Zea mays
  unsure (1)..(349): unsure at all n locations
agagtcacctgcggcatgcaagctngacaacatcgggtgagaagatttggactttgtttatgtaaaccctcagagacacacaaagtctcctgtgcgtagtgggatactaaggcacgatcgcaatgggaagagaaatagaccgaagattgcatgttacgaaaaagagacttgaaaggttgaaatatactcaaagatttagcattgaatatggggacatgataaacaactatccatgtggctgacccttgactagtgggttttaactccagcgtacgtgaacttgcctgtgacttaaagacttttgtgttgttgttgttggtcagggcaagaaatactaccacattgacac

SEQ ID NO: 64676 - DNA, 185 bp, Zea mays
gtgaaccatcaattcttctgaagaatgacacatatgcatttggatatagacagtgatattccatattgcataattgactagcagataaccaactatgtgcaggatactataccatgcacacattagagatatagcgctcgttagatattgcatatttacctaaccgtgtgaacttgccttgatta

SEQ ID NO: 64677 - DNA, 331 bp, Zea mays
  unsure (1)..(331): unsure at all n locations
agcttaaatcaactgtttttttgtcttcttaatagccttcggcactccgaagcgacaaataatgttntgccagaagaatttctggacggtgaccgaagttattatggctaaaggcttcgcctcaatccacttggaaaaatactctaccgccaccacaacatattttagatttccttgtgctggtggaagtgggcctagcaaatcgaggccccacctttgcaatggccaagtgggctgtattaagtgagtgagagatgaaggttgcttctggtctctcgcacatttttgacagccttcacatntttggactaattctgctgcatctgaagct

SEQ ID NO: 64678 - DNA, 326 bp, Zea mays
  unsure (1)..(326): unsure at all n locations
ntaatgcgcatattctctcnctttgacatcaaacaccaattccatattcaagcaagaacatatgatgatgttaagcgacagcagggtattaagcatggaaaatgcatgtcgggtaccataattaggggtacccccaacactcctaaactcggctggtaatcaccatcagtgcaagccgcatagactgatgggcatgatccatgtcaaagcttcgtccactcaagggatgcgatctcgcctcgcccgagcccagcctctggcatgaacagtactcctagacgaatccacgcctcgcccgaagacctcttcaagcaacgggcgcaccc

SEQ ID NO: 64679 - DNA, 392 bp, Zea mays
  unsure (1)..(392): unsure at all n locations
agcttgtcactgcccaggagtgtactcttgatttttaggagnatnngcaggcgtatgtccgaaggttattgcgactgagagctcaagcacctatagtgcccaatgagatcgtcattgaggccatgatcaaggtgctatggccaggacctacggcgcaatactttgcacgaaagccaccatagactttgtagaagcttctctagaaaatgaatgatacattagagccgacaatgattgttggcaaaaaaagggaagaagcctagagatactctgaaatggccaggggcttcggagggagattccaccccaggcatgttaggtcaatccataatgccagcccaagtgacgacaggggaaaccaaatccataggcagaagcatagctcccaatca

SEQ ID NO: 64680 - DNA, 351 bp, Zea mays
tatacccgtggtgagcccatgatgatttctggtggaaggctggcttcagccccgtataccaagaagaacggtgtctccccggtggctcggctgggtgctgtccggttcccccatatcatggacggaagctcactgacccaatttgcaccatgcttcttaaacaatcgtaatgtgtgtcttgagtcccctgaggatctctgcatttgccctttccacttggtcgttactcctgtgatgagccacggacgcgaatcagagctgggtgccgatgccctcacaatactcctggaagatccgacttgtaaactgggttccgttgtccgtaatgatatggcttgggacccacaatct

SEQ ID NO: 64681 - DNA, 431 bp, Zea mays
  unsure (1)..(431): unsure at all n locations
agcttctacaccatgtcactgctagccaagtngtctctgtnttcctttatcaaagatcaaacgacatgaacgctccttaatgacacactttgttngaaacaacgtatgtcgatgattctgctctgccttctacatttgtgcactatgcacacgctgtacaatgaggctctcataatgctcttgatcatctgcaccaatctgttcttcggagggttccttaatgcctgcatcataagccccaagcaaagcatatgtagcttcatccatatcactagtagaggaatacccaccatcgtctnttaccaccaaaacacgctggttaggacaatcacgctgcacgtgtccatagcccttgcatcgataacacacaacatatcttgttctacctgtggaggctactgaagaggcactaactgctggtttctgggcac

SEQ ID NO: 64682 - DNA, 410 bp, Zea mays
  unsure (1)..(410): unsure at all n locations
actcacgcttatcaagtctactntcatatggatacggaattataggcatatctgctctgatgccgtcgtaatcaatgttttctcaccgagacatttccctccttatctgcccatggtgctgcgtcaccctattttggcccaatgggtcgtgtatcaagttaagtccattaaggacgcatcctatggttgcagcacgaccccaatacccttgtgggcgtcctcccatgtgtataaaccccctatccagcaccaagaacagtgggttctgtttatatcaagtataactctcactacttgcttgtaagcgcgcgtgctattcatccgaccgtcttcttgtcttctgaaccccaccatattggagtttgaatttgtaacctacattctgatctggttattcattacctgatcta

SEQ ID NO: 64683 - DNA, 456 bp, Zea mays
  unsure (1)..(456): unsure at all n locations
agcttggaatagaacagacaaggccaagaaattattttttatctatgaaaatcatctgattcgtaagctttcgacaaagcaaatggagataactgcttggcaagagcgaaagatataccaatatccgcctcgggctagtcttcaacaacagataatactgctctcatacgaaggaatcatcaagactagggagaatacctctggtctccataagatcttcatatttctatcacaatttaccatcactaatagcttagtggtcaagaattatggatcttccggtgccaaggaccaatgacatattaatgcccaattttgcttcaagctctgtgggaattttttggctattntctattcttcttacttctggtggatcagagatagattacaataagcatgtcaaaaggtggaatccaatgtagttctgctacattaactccatgtatatgtccattc

SEQ ID NO: 64684 - DNA, 466 bp, Zea mays
ctgactgtacatagacttatctttcatgtatgttgaaaaatgcataactctgcgttgtgtaatgcataagatggttaacctgtgaaccatgactgtacaaaaaatgaccctgtttgcagtatataactctgataatgtatataataatgtattggcatataatgatgaatattgtatcataagtgtatggacaaacatgcataagactggcaataattatatcgtatacttcggacaaaaacatgcatacttcgaggttattgacataacaatattgtacaggaacctggtataatctattgcaagaaacacacattactatcaaacacagttgggtacaatattccagtgtagaatatagttgatccccaaagttgtcattgacatatactaataaacgtttactgactttgcccataatatacacacatgactgatctgatgttatggaaccattgatacataa

SEQ ID NO: 64685 - DNA, 333 bp, Zea mays
  unsure (1)..(333): unsure at all n locations
acctgcggcatgcaagcttctanagggagaacacgagatagggcgtgtctatcgtacaatttcgnaaaagaaagaccttgtgcagcttgtcaagcacgtaaacaggtgggaggagcgcatcacagcaagaatgtgatgaccacttcaagacccctggagatgctgcatatggacctcttcggacccgtcgcctatctaagcatagggggaagtaagcatggtctagctattggtgatgactattcctgcttcacttgggtgttctttctgcaagataagtctgaaacccaagggaccctcaagcgcttcctaatgagagctcaaaatgagttt

SEQ ID NO: 64686 - DNA, 421 bp, Zea mays
  unsure (1)..(421): unsure at all n locations
tctatagggagaacacattntatgattaacaaatggtcattttgagaaagacaggatttgtagcgcatgccaagcatggaagcatgttggctctcatcatccgcataagaacataatgacgaccgacaggccactagagctcctgcacatggatctattcggcccgatcgcttacttaagcatcgacgggagtaagtactgtctagatattgtggatgattattctcgcttcacttgggtattctttctgcaggaaaaatctcaaacccaagagaccttaaagggattcttgagacgggctcaaaatgagttcggcttaaggatcaagacaattataagcgacaacgggacggagttcaagaactctcaaattgaatgcttccttgaggaggaaggcatcatgcatgaattctcttctcct

SEQ ID NO: 64687 - DNA, 350 bp, Zea mays
agctttccaagctctcggacccgaaagaaccttttcggttacccgagatcgtcctcgccggacttcggttgcccgtggccgcgtgtataccgagcaatccggtaagccattctcaaattcctcgcgcacacatcttccatgatcgctggtgaagctccctgacccatttaattgatctatcgcgccatggttaggtcagattcctcaccgccgacgagctccctcgcctgcgcacgtggaccgacctcctccgaccaccatcgctggtgatccgcacctcgacgtgatcgccagagactcccggacctcacccgacccttcaccggagcaacctcgccatcggtaagccc

SEQ ID NO: 64688 - DNA, 289 bp, Zea mays
gtctgttactccatcgtcttttgtcctttacatatttctggaaaatagtcaattacttttgagacttcaaagccatagccccacatacccctccaaattaatttgtgactgataattatattgcgatatggacgaagccttaaccgaatgtcgaataaaaccttcccttgctaatacaatcagtctttgacaagcgggaccctcatttcaagctctgggcgttaaatagagctcatccgcttatttgacacgctctttgccaatgttttactcaccaacctttacctac

SEQ ID NO: 64689 - DNA, 448 bp, Zea mays
  unsure (1)..(448): unsure at all n locations
agcttgtgattntaccaattgaaagagcacaatctctatttatgaatttccatgaaatatcttaaaagagattgtgttattaacacaagcaatagtttcctatttagcaacctctagtatatgaatgacaagaaggttactaaaacaaggaaacctcatgatatgaactaaattacccttacaagcatcatgcataacatcnaatgtaaaaaatgaaagtagcatgattatttaattaagtttacatggcacgttcaattcatagcatggtgagtgattaatggagaagactcaaaaccaatttaaacaagaatgaatacatcacatagtattggttcgatcttctttgaatgttgaatggcacactccatttgggaaacacattctcatgttgtgagactacatatacacttagatagaaacattagtctcacaactctagtcatat

SEQ ID NO: 64690 - DNA, 365 bp, Zea mays
tatgctttaaggcggacacgtgatggttgactaattacaattctaatttatgaccttgtgcacttgcaagcacgtaacatgtggaggagcacatccaccaagaattgatgaccacttcagacccctggagctgctgcatatggacctctttggacccgtcgcctatctgatcatatgagggagtaagtatggtttaattattgttgatgacttttcccgcttcacttgggtgttctttttgcatgataagtctgaaacccaagggaccctcaagcgcttcctcaagagagctcaaaatgagtttgagctccacgtgaagaagataataagtgacaacgggtccgagttcaagaaccttcaaatgg

SEQ ID NO: 64691 - DNA, 378 bp, Zea mays
ctcaagacaaaaaagctgttgctgagacaaagctgagcgaagaggagaagctccttgaggagaagactgctggatttattgaatcaatagcaaagacaaatacagaaaaaattactaaggagattctagaaggcttatctgaagatactgatgacaacgacagttatgatgcggaaagtgggggcgaagactccgaagatcggccctggcgaccaagtcatgcagttttcggaaatcaactattaaacagagtcatcttgataatatgagaggaagggtatttcgagatatgtctattgtgagggctgacatcggagacaggactgttcctgttcctgaagaaatgaagttgtgatctaccgaagcttcttcaaagct

SEQ ID NO: 64692 - DNA, 346 bp, Zea mays
tgtggcacccacgggcgtcttgtcgcagccttatcaccaattctcccacttggaagcctcgatgccgaacccttctagtgtggtagcatcgcatagactgctgataccacgtcgaatgtagtaaggcaacgtcccgagcttcttcgagctggtccatcgagtcctctcggctggtctgcttgcttctgtcgtcgtacgccttcgtcctcggggaaccgtattctatgtccgtggggaggactgcctcggccccatatactaaatagaacggcgttaaacccgtggctcggctcggcgtcgtcctcatactccagaccactgatggaagctctttcatccaccgctt

SEQ ID NO: 64693 - DNA, 263 bp, Zea mays
tacggagatgtggagaccatcgactgtggcggcagaacctgatgtaggggcaagtgccagcatggagacgtggatgcgactcatgctgcacgtgggagtgggcctatggcaaggaggaacacaaacggcgtggccaggagccgaggcgtgcgggccacgacggtgaggggtcctagcggcggcgaatagggagtctcatggccggtggctatggtgggtggagtatccggtgtggggtggtatgcatggaaaaatacttggct

SEQ ID NO: 64694 - DNA, 378 bp, Zea mays
  unsure (1)..(378): unsure at all n locations
tgaggctngngcgctggctactgcaatcatctatgcatattattaatatggcactctacccgtagctagcgtaatccttggatctgaatgcacacgtggcaggcacctattctttgtatgatgcttaccactgcacaaacatggtttgcaaacatccgtaaccagcggaggtcgttggctgtggttatgcatgaaacttaactgagttntactaaaagtcagctaaattctactcccttttgtcccgaaataagtattcgttttatcacttaatttattatgtctatatacaaatagatgagataaatatagacacatatataaatcatatatatcaaatatggtatgaatctataaattatctaaaacaagtttaaa

SEQ ID NO: 64695 - DNA, 449 bp, Zea mays
  unsure (1)..(449): unsure at all n locations
ggatacttagagcgacctgangcatgcaagctangcacatgtctaataaaagtttaatttgttcctagctagctagctggatcagacttgtaatttgctacgtccattatattgaataatatacctaagtcggcatcctctaatcaatgttactggctagtaggtaacacagccagaatccacgtacgtgttatatatacatattttaacacagccctagctctcacgtaaatgcactatcggcagatatgatggtggccgcctgccgggcctaactgcacgtacgtgcactagctacacacacaaatatataatatataatagctagtagtacatagatgaaatccaataatgaatggacgcactatctagcgggtctcggagagtgaagcactagtacagagaatctctatactgacggtcctatacatattatagangacgttttc

SEQ ID NO: 64696 - DNA, 364 bp, Zea mays
gaagaggcatttatgttttatgatgttatacttctcatgccaacatgccaactagttgaagttcactttatagttgtggcagaacatatcagcactcgagacttggtccaagaatatttatccaatatggttttcccaatgctgattgggcatggaatgcctaatcttaaaggcaaaggaaacaagtttgaacttgtgagactaccgtaccgctttagactccaagataccttcagcggtccctatgccgagtggctggaagtgattgaaacaatgtgcaacgaaattcttggcaattatactaagaaagaagaccaattgatgactgtcgccttcggcacccgatataaccgaatgttgaatc

SEQ ID NO: 64697 - DNA, 438 bp, Zea mays
  unsure (1)..(438): unsure at all n locations
agcttctaaagggagagcacnatntgtgactatccaatggttcatttgagaaagacagggtttgtagcgcatgccaagctaaaaagcaagttggggcccatcatccacacaagaacatcatgacgaccgacaggccgctngagctactccacatggatttattcggcccgattgcttacataagcatcagcgggagtaagtattgtcttggaatagtggatgattattctcgcttcacttgggtgttctttgtgcaggaaaaatctcaaacccaagagaccttaaagggattcttgagacgagctcaaaatgagttcggcttaaggatcaagaaaattagaagcgacaatgggacggagttcaagaactctcatatcgaaggcttccttgaggagganggcatcaagcatgagttctcttctccctacacgccacaac

SEQ ID NO: 64698 - DNA, 329 bp, Zea mays
gaacttagatactcagcttacaccattcatactgtcggtcggtgatgattcaataacttcacacaaagctatagcgggatcaataagaacaatggcttctgcgaaggaccaatctgattattctgtggcaaaagatgctatctaagggatcaagcttcagactgtggagaatatcaataaatatcaagccgaaacaataaaatgatgtgacagaaaagttccgttaaaaaatgtcaagccaggacacttggtatttctgagagttgccaacccagatatagtaggcaagctatagataaaatgggaaggacctttcctggtaatatctt

SEQ ID NO: 64699 - DNA, 354 bp, Zea mays
  unsure (1)..(354): unsure at all n locations
agcttctaaagggagaacacgtgatatgtctatctgatgtttctntcgaaaaagatagaccttgtgcagcttgtcaagcagggaaacaggtgggaagctctcatcatgccaaaaatgtgatgacaacatcaagacccctggagttacttcatatggacctcttcggacccgtcgcctacctaagtataggaggaagtaagtatggtcttgttatagatgatgatttttcccgcttcacttgggtattctttttgcaggataaatctgaaacccaagggaccctcaagcgcttcctaaggagagctcaaaacgagtttgagctcaaggagaagaagataaggagcgacaatgggt

SEQ ID NO: 64700 - DNA, 473 bp, Zea mays
  unsure (1)..(473): unsure at all n locations
taagcttctaagggagagcacattgtatgactaacaaatgttcattttgagaaatacaggatttgtagcgcatgccaagcatgaaagcatagttgggtcccatcatccacacaagaacatcatgacaagtgacaggccattggagctcctacacatggatttattctgcccgatcgcttacataagcatcggcgggagtaagtactgtctagttattgtggatgattattctcgcttcacttgggtgttctttctgcaggaaaaatctcatacccaagagaccttaaagggattcttgagacgggctcaaaatgagttcggcttaaggatcaagaaaattagaagcgacaacgggacggagttcaagaactctcaaatngaaggcttccttgatgatganggcatcaagcatgagttctcttcgtcctcaccccacaacaaaatggtgtagtggagatgaagaatcgaactct

SEQ ID NO: 64701 - DNA, 434 bp, Zea mays
  unsure (1)..(434): unsure at all n locations
agacttggatcttcttcaataataggcacaaactcacctccagagcaaggtcgaaacgagaaccagctcagcactcccccgtgaggccggtgcgcctagcattgctctagcgaagcaagatggtatagggatggaactggcaaagcaaaagcactcgtgatggtcaaatctctgaagcagcatgacaaataagcaattttttgagacttgaactgctaggtattcaatatctccaatgaaatctcccanaataatcaattcaccaacacaaaaaccacagaaatgagctaccttaatgaaaatgtacatacatatcgtcttaataatcaaaaggtgaactcatgcaggaacaacaccccatatattcagtgccttgttcagaataaatgaatgtcgtgaggctaagggcttttgacaatacattntcactgtac

SEQ ID NO: 64702 - DNA, 405 bp, Zea mays
  unsure (1)..(405): unsure at all n locations
taacactgtaacgaggataagctacctctgttccaaggtggatggtccttaagtctctttgaaatctttaaaggaaaatgcttaaaatgtttgcaacatgctttcataagtgcataaactgtcttgagcatcacacatatactatgacacaatgcacttcactttctctatgatatagacttgttctcattaacctaattatgtgcaattggcatttaaagccataatatgtgttcctctccatgcacatacttatggggagcaatctatgttatatagaattatgatcatgcttaatntgacatatctcttgatcatatctctgtcattttggtacaaatgcatatatcctattattctcgtaccatgactacgactaatatngttccaagtatattactatgc

SEQ ID NO: 64703 - DNA, 372 bp, Zea mays
agcttcagcaactggcactgcagctcttcaacctctggaccacaatcaggagactgtctctcttcgggaggcccgaagccagataaggaaggctgtcagcccgacaccaccagaggacgagatagatcaagatatcagagacatggagatgcttcatcaacaggtgcagaggaagaaagaaaagatggccaggctagctgaactgcaaaggcagatagacgaagcctctgaagatgttcgtcatcttgctcaggatgagcagcaccgaaggcctcagcaccaagaccttcatcaggagggtttcctcaacgaagatgactggtatgataatctccatcatgggaattttgtttcgatgatgcttctcctctg

SEQ ID NO: 64704 - DNA, 425 bp, Zea mays
  unsure (1)..(425): unsure at all n locations
actttcttctgacgaagtaggctgtaaactggagcttcgtcttattgcgagagtcaagcttcggctatggttaataattttggcagcaaaacagtgcaatagcaatgaatgctgtggtaacttcacacctacccgtctgtttatatagtactgcatgtaagaaagtgaattgtcaggatttttacaccatgcaaacagctgctcaaacccgctgcgcggtggaccgcagagaccaaatagtaaccctgcatggtgggaccgctacgcgcttggaaactgtatcgtttctcgacaacgagctcatggaatgtgtttttcggaccttctgcttcctgaagcctaagagactcntttcacggatcatgcacgttacgaaaaacgatctatcaccacgaaggggctactgttgtgccatgcttcgtcgc

SEQ ID NO: 64705 - DNA, 430 bp, Zea mays
  unsure (1)..(430): unsure at all n locations
agcttgtcacgcatgagctggaggccgcccgtctcactatcaaagcctnggaggatgaccgtgtcgtcttgaaggcaatgcgtgacaaggccatggataaggccgttcgtgctgggcggatcctaatgaggagacccagtgttgtggtgcctgatgacatcgtcactgatgtcatggccacgcctgacgctgcaagccgtccatcttcatttgttgctcctgcaaaagatgccgcctacagggatacttcagcgcaatgattttcctgaaagacacttgtttatcgagttagcatcttttagagaaaaggtgtaatgtgagttctgtatgtgcacaacagttatgtntgaactgattgttccgtgggtagggtgctgaaaaacacccctagcacttgaagcgaaatatntctttttttcgaagtactcac

SEQ ID NO: 64706 - DNA, 466 bp, Zea mays
  unsure (1)..(466): unsure at all n locations
actcaagctggaggaacattgtgtgccttgctgttggcttcctctatcatcattntgtgtagagttatgaattgatctcacgtgccttgggtagaacctccctccgaagcccctggtcatttcagaaaacctgaaagcctcctcccttctttggcgaaaatcgttatcggcccgaatgtactcgtccatcttctggagcagcttctccaaagtttgaggaggcttcctagcaaagtactgagctgacggtcctggccgaagccccttgatcatggcctcaatgacaatttcattgggcaccgttggtgcctgtgccctcaaacgcaagaaccttcggacatacgcctgaaggtattcttcgtgatcctgggtgcactggaacagatcctgagcagtgaccggcttcgtctgaaatccttggaagctagttaacaacaagttcttcagcttctgccatgaagtgatc

SEQ ID NO: 64707 - DNA, 472 bp, Zea mays
  unsure (1)..(472): unsure at all n locations
agctggggaagattcttcatcccaacatgtgctattcttcgatgccagagccagcccatgttagtcttagcaattaagcaagtgtcgagttcagctctatcaaaatctaccaagtatagctgaccctctaacactcccttaaatgctattgaatcatcacttcttctaaagacagtgacacctacatcagtgaatagacagttgtagcccatttgacataattgagatacagaaagcaaattgtaatctaatgaatctacaaaaaaaacattggaaatagaatggtcgggtgatatagcaattntaccaagacctttgaccaaaccttgatttccatccccgaatgtgatagctcgttggggatcttggtttttctcgtaggaggagaacatccttttcttccctgtcatgtggtttgtgcacccgctgtcgagtatccaactngagcccncggatgcataaacctacaaaa

SEQ ID NO: 64708 - DNA, 373 bp, Zea mays
tgcactgtatactgctcttggaggtgtacggccatccgctgtgagctttatcatgtgaatatacagctttaaattagtctatgtgagcatacagttttttattagcagtctcatgatgtaatattctcctccatgttgattcatagtgcttacctattaccattgatgtgggaacaaataatgaagacctactgaaggatgaattctacattggcttaaagcaaagaatagcaactggccaggttccatgctacttgtattggctatgctcgttcaattatcatgattcatgttaacctttttgattgtggattccaattgcttatatccattttctgaatcaagaatactctgaatttctggatgagtttat

SEQ ID NO: 64709 - DNA, 453 bp, Zea mays
  unsure (1)..(453): unsure at all n locations
ttaagcgactgagctgcagcttcatgtcttgaagcaatccaattctcttctgtactgctcctctatgaggtagatctcattggcccctaatgatntgctcatgttctgcccctttatcttcttgtagtaatagttgacggccacgatgcgagcattgtacatggcatccttgatgaccttatcagcgcactttcgaaagtgcctcttcacacgtgcccactgagcctgatcctcctcgatctcattcggcaattggaacctcccctacatatcaacggagaagttaattaaagtaagattaggagaagcaataattcagtgaattgcttatatacgaaagtaaactcacccagaactcgtcccacacagccacctgacaagtccttcgtttntgttccgatagtgcccctccgctactgctttcccctgactccactggctggacatagtcct

SEQ ID NO: 64710 - DNA, 304 bp, Zea mays
  unsure (1)..(304): unsure at all n locations
cctctgctcactgtgcgctgagggatgcgaaggtagttctgatctgttgtgaccaccgttgcggcgggatgatgactacatatgtacngcctgcgaaatattagccgtactaaaaccttggtgtagacatgagggggtctgtggtgttgaatatgatatcaatggcgcctgattttattgacgcttgatctgcgagttcgatgcatatgtgcataagacgaaaggtcgccgacgtggaattatagctgtagtgaccgatgcgtctatatattaagattcaataaactaatgcataacagtatgt

SEQ ID NO: 64711 - DNA, 450 bp, Zea mays
  unsure (1)..(450): unsure at all n locations
agcttgctaagggtntctcatctagtgtcttgttaaagatatcgactaattggctgggggtgctcacataagcaatttcgatatccccctttggttggtgatctctcagaaagtgataccggatgtctatgtgcttagtgcggctgtgttcaacaagattatccggcatgcggattgcactctcattattacataggagagggactttgctcaatttgtagccatagtccctaagggtttacctcatccaaactaattgcgcacaacaatgacctgcgacaatgtactcggctttggcagtggaaagagctactgaatngtgtttctttgaaagccaagacaccagggatcttcccataaactgacaagtccctgatgtgctcttcctatcatatttacatcccgcataatcggcatcagaatacccaanttaatcatagatagatccct

SEQ ID NO: 64712 - DNA, 436 bp, Zea mays
gattcaccgaagctcggatacggatcacgatctattctcttctctcaatgaatacaaacaggcacatgcatacaaacatatacatgcattataacattacaccatattagagaaaacattattaagcgtgcaatacgaaataaaacttgctactacggttacatgatgaaaagaaacacagttgctgaagctacggtcgagaagatattgcatttatgctaaaaagtattagttagaacatgtaattcgacgaaactatattaaacgctatttgttaaatgcaactagagctatcgcctaagtttaattagttgtactacgctaaaactcttaattaaataactaatttaaataacatcagcgactccaagtaagacgaattattggagcgagacgaaatacgttacgcgtgaaacaacacggtcacacgcgcacg

SEQ ID NO: 64713 - DNA, 401 bp, Zea mays
tactatgctgtgtactgtcgctcttgttgggcatgataaccctatttcttgttttctttatccaaatatatgagacagctacgggattgcattatacaactctaacctcatgtctcataaatgcatctaaacacaaataacacgcatggagtcacgtacagattgtatactcttggcctatggtccacctacctatgctcccaataaggactatatgtttgcattgattatcatatatagaatatacaatctatgtacatttccaaaccataacatgctctcatggtatcaagagattattcgctctagtatgatctcttcctggctccgcaaaccctatacactatcatcatgtgcctacaattgatttgatcattccaacacacgacgtctatccacat

SEQ ID NO: 64714 - DNA, 408 bp, Zea mays
  unsure (1)..(408): unsure at all n locations
agctngttcgcaacatgagagcaaagatttactcgtgtgttgcagaatattagttgcgtgtcggcggtggaactgaggatatgaacaacgatggtgacgttcgtcttccagatgatgtatgtgtgccatataccggtgatgaccgcgaccttgacagattgatagatgacatttaccccagtctaaacgaaaacatgtctaatacaagctacatcacttcaagagcaatattgactactcggaacgactgggttgatatgataaatatgaggatgatcgatcgtttccaacgggagcagatgatgtaccatagctttgacaccgcggtggacgatcctaataactattatccatcggaattcctagacacgctgactcctaatggactatccccgcacgttctgaagc

SEQ ID NO: 64715 - DNA, 432 bp, Zea mays
ctaatggactggtggagcaatgatgcgcagtttttatattgtatttggtggctcttatcaagctgacaagcattactgactgatgaatcacaatcctttgaatataataatttattgagatgcgagatagatctaactattagacgcgacgggtgacccaacctagcatgctgcatgccaatggtcacggctaacataccgactaagaatggcatgagataaagcagcaatgtcatctggttggagaggatataggcccccgttacacgatccctccagaagtgtagtctttgtttgcctatccttattaacaaaatggcaagggtgaaactcatagaatacatcattatctcaagagaacttatgcactgagactagatgtttgttcatatcacgaacatgaataacgtgacacatagcaagtgagcgatc

SEQ ID NO: 64716 - DNA, 442 bp, Zea mays
  unsure (1)..(442): unsure at all n locations
agcttctactcctcgctcagcttcgtctcagcatcaactnntttatcttgagacatcttctcttcggaaatggtgaatatgtgttcttaaggccgaagcttanaaaatctaagaaactaagcaaccgttggaaagcaggagctaagaaatcaagcaaagcatagcaggcataccaaatgtgctcggggtgagttcttatttatacgcccagcgcgctccaagttggagggccccgtctgtcattgactgttgctattctagcaaagggaaggtgtttttttggaccttcggcttatggctttcgtccatatatgtcggggaccataattaggggtacccccatgactcctaatctcagctagtaacccccatcagcaaaaagctgcaaaggcctgatgggtgcgattaagtcaatgctcggtccactcaatggacatgatct

SEQ ID NO: 64717 - DNA, 355 bp, Zea mays
  unsure (1)..(355): unsure at all n locations
ngagaccgatatctgccgctatcgacgacagcatatcatctgtagtttattctattctaacttcaaggtaaaaactgttcttcgactttgcattgttcttaacaacgaagatgttttctaacgatagttgcttctgtacagagtatgttattgagcaaagctctgatgatgcaacatgaccttgaagacaaaaaaacatgagaatatatatgaaggtttagaaaacgaaataaaagatcaagcagctgctcttgaaaagaaagatttcgaagttcagacaatggaaggcttactggcagaagttgaagccaaaattgcaaatgtggatacggagcttctctcaaaatcataaagc

SEQ ID NO: 64718 - DNA, 407 bp, Zea mays
  unsure (1)..(407): unsure at all n locations
ggaatagtcataaaatattcccattatataaagtgaatcacacttatacccctgggataccagaaaccctaattggaaccctggaaaaccctataaccaaaccctagggacctatgtgcaaaattagtccacttttggactaaagtgcaaaaaccaggttaaataagtatcctaagtcatttggttcacaaatgtgtggacttgtaagccaaatatttgatattggacttaattgcaaaatggacctcaattgagttctatactaagtctgaaattcagtgttgagggctcaactttggagcctttgaactttcaaagtatagggttgttgccctaagtcaccacatcaaagttataggcctaacataggtggacaactnttgttaagaatgtgagctcagttgtca

SEQ ID NO: 64719 - DNA, 407 bp, Zea mays
  unsure (1)..(407): unsure at all n locations
ctctataaagtcttcgatcacgcttttcggtgttctagatatcaagttatagccgctngaaatatgaagtctaattctgtccaaatctggacaaagaagtttgtgttaactgattttgatatgcattgaattaatctgagatgtttataaatgaattgtagacaattctattagatttctaaaaagtctaagatcacctgatttgaatgtctgatactccacttatggatttttgaagtgagtagtcgaatcttgtccaaatctggacagaatttacgtttatcacagtttgacccttcaaaacattaaatgttgttatgataattatacacaagttatagaggactctattagcttctcataaagtcctagtttactatttttggatgcatatcttgtgagttatg

SEQ ID NO: 64720 - DNA, 483 bp, Zea mays
  unsure (1)..(483): unsure at all n locations
agcttcgacaatttgtcttgaaggagcatgactctatgtttctgatggttctatcacaacatctagcacatttgccatccttctcctcttaagagttgcggcagaaccctcttgtgccttcgtcactttcacctctgttgaagggctaaaaatctctgacatttttgttatttcttcaatttttgacccttcatccttatccttatcatccttcgtctcaactggctcaactgaaggtaacttcgacattatagccgattcttcagtcctctgcgcaggaggaacagtttcttttgttttagcagccgaagaggtcccttcgccaaattcaagtatcacggccggttcgatgtaacgcggcctgtgagtcaaaaccttcatcttcttgcccttcggctcagctatgatggccgaagcggcaaccttttcagaaacagcaatctttctttttacnccttgtcctcgcagtgggtaacaataatc

SEQ ID NO: 64721 - DNA, 325 bp, Zea mays
tactcagctttgcctgactgattgccctgccgaagtgagaattctctgttgggtacgacccggactgccatgactaatgactttggcatgacagctgcattgcctccgtatgatgatattgttgcctcataactcatcaagaattgctttgggtccgagtgcccatcatacatgggtagctggggtggcttgtatgattgaggacatggggaatgctgcaattctgttgtcatggaactacatcatcaaaagaaaaggtgtcatgattaaatatggtcgaccatccatcttcgttgaacaatccctcttgacgaagctgcctatg

SEQ ID NO: 64722 - DNA, 349 bp, Zea mays
  unsure (1)..(349): unsure at all n locations
agcttctaagggagaacacgtgatatgtcttatcaatgttcatttcgaaaaagatagaccttgtgcagcttgtcaagcaggtaaacaagtgggaggagcacatcacagcaagaatgtgatgaccacgtcaagacctctggagctgctgcatatggacctcttcggacccgtcgcctatctgagcataagaggaagtaagtatgggctagttattgttgatgacttnttccgcttcacttgngtggtctttttgcaggataagtctgaaacccaagggaccctcaagcgcttcctcaggagagctcanaatgagtttgagctcaaggtaaagaagataaagagcgacaac

SEQ ID NO: 64723 - DNA, 452 bp, Zea mays
taaaggatactattcaactaaagtaagatgatgttgataatatgccaatgtatgaaaacttcctctccttcagttgttttagtattttatccttagtgggatgtaccatagtataggttaaattccttgcaatataaaatgttcgatagtgcatagaactttgacatctattatatgtgtgcactcatttaaaggaatttagtctatccttttgggtttcaagaatgatggttcattttcatccacatataaggatcatcatttgtaaaatcttcccatgtgtttttaatgctctcttttctaagtatttcaacaaagtccttccaagtgctttcaagatggattcaaaatctacaaatataagagtcttggttggttcaatcattgagtttcaatcgatatcatatcaagtatgatcgaaccaagcacagatgaataaagttcaagatcac

SEQ ID NO: 64724 - DNA, 379 bp, Zea mays
  unsure (1)..(379): unsure at all n locations
agcttgcgctgatataccacttatactagaaccccaacaatgaggaagctggcaggcggtttgccgagatcaacgatggtatgtactctgtggagactggatntgagtgctcatatatatgctgccggataaaggaacattcctgatcgaccagtgaggtttcatcttgcagcctacgaggtcttgacggatcggaagaagaggaaagccgatgactggcacggtgaggaggatttagccaagtacatgggtcgtgctatgaaagtcgatgtcaaatacgtgtttagcaagtaagtagaaaaatgcatgttagattacaacgttttttattgctcattacatcagcttattttacaactaatatagtagagagcgaaca

SEQ ID NO: 64725 - DNA, 403 bp, Zea mays
taagcttatgcagctgctgccagaatgttatgtgaactgcgtttctctgtctgacactatcttctttggcacaccatgaatgcaaacgatccaagacatgtacaactctgccaatactgcattgttgtagttggtcttgaccggtataaagtgggctgacttggttaagcggtccaccactacccagatggagtcgtatccatcacgagtgcgaggcaatccgactatgaaatccacaccgatttcatccaatttccactgaggaatttgcaattgttgcaacaatacatctggtctctggtgctctgccttgatccatcgacagctatcacacatatgcacatgctctacgatttaccactttattccgtacaccaaaattcttcttcaatcttgatacatc

SEQ ID NO: 64726 - DNA, 382 bp, Zea mays
tgttagtcacaaaccttcacaggtgctgaagcttttcttctatacaacagtaacctgctagatgacaggcagaattggaactctttcttttatcactttccacctttgtggtacatgactgacaaagctttccatgagttacaaaaagacaattcatatcaaacttcagatcatcaagaatcttattatttagatgaatgtaggccttctccctgctagctgtagcatgaacccatcccatagccttcgtaatgcggagtacctattggcccaaaatttgctgttacaaatacattatgcacattgaactagtgtttagattctatttgacaacaacagaaaatatttgtgtacatgagtatccaactgaaaatcatccctc

SEQ ID NO: 64727 - DNA, 360 bp, Zea mays
  unsure (1)..(360): unsure at all n locations
tggcatgcaaacagtgcaattttatgaatgctngggttacttcacacctacttgtctgtntatatagtaccgcaggtgggaaggttaatcgtcaagtcttccacataggacaaacagtcgcccgcacccaccgaactgtgggccacagagcctgagaaggtgaatcgtcatgacgcgcgcaatcactgcatggtggggccacctcccgctcggattattttaatcgtttctcggcaacgagctcatggaaggtgtttttcggatcttcggcatcccgaagcctatgagattttttcacggatcaagctcgttacgaaaaacgatctatcaccgtgaatgggctacatgtggtggtatgct

SEQ ID NO: 64728 - DNA, 457 bp, Zea mays
  unsure (1)..(457): unsure at all n locations
atccttaaagcacctgcggcatgcaagcttctanagggagaacatgtgataggtctatctcttgttatttcgaaaaagatagaccttgtgcagctntgcaagcagggaaacatgtgggaggctctcatcacaacaaaaatgtgatgacaacatcaagacccctggagctgctacatatggacctcttcggacccgtcgcctatctgagcataggaggaagtaagtatgatctagttatcgctgatgacttttcccgcttcacttgggtgttctttttgcaggataagtctggaacccaagggaccctcaagcgcttcctcaggagagctcataatgagtttgagctcaaggtatagaagataatgagcgacaacgggtccgagttcaagaaccttcaagtggaggagctccttgaggaggaagggatcaagcacgagttctccgctccgtacacacc

SEQ ID NO: 64729 - DNA, 434 bp, Zea mays
  unsure (1)..(434): unsure at all n locations
tataactacctactagaccaagtaaaaatgttaaacctctctgtctactctatttaaattagttntaccccttattctatgatatgcttaaagataaggaaaatagaaaatgtaatttaattaatgaaccagagagtacctctatttttgttaggttacttattcaatacagttcactggaaaaatatatcataccctggtttagtacaaattaagtaggatatcttttattttaataaaacaaggataacttagaaaaaccctacaaaaatgaccccatggtaaaaacaccatcacccttgggataactaatattttattaatgagaacttatgaaaaatatgagatctgctgcttgacattcttcaaataataatgtagtagaaagagcctttgtgacattaaacttatgaaaatcataactaaataaccac

SEQ ID NO: 64730 - DNA, 340 bp, Zea mays
  unsure (1)..(340): unsure at all n locations
gcttcccgagctagcatcctctcgcgagctngtgccttttccgcgtccttcttctccttctccttctccgcggcaagcctctgcgtggctcggtccaccgcgtcctccgagaccggtggccggacgggtttataaatcctcaacccctgtggacgaacaaaaatcccaacagtgaggatcaaaagcgtagagaactcggcgcacaatagaaggaggatcggacacttaccatggacacatacccgcggtcaggacacatcgtgggctggctaatggcaccggtatctggcctccctaccgtacttgttacccgcttgaggaggtcgtcggcagagaggga

SEQ ID NO: 64731 - DNA, 431 bp, Zea mays
tgtgagcagtacaagttcagaatggaaaaagctgcttctgctgatctttcttaacccatgctcttatgtgaggacatatcagagcagaaggtgctattgggatctcaattgtccgaagaacaggagaaaaccttgatacggtttttgttcaacaataaagatggttttgcttggtcagctaatgatctttgcagagttaacaaggatgttattgagcactcgctcaatgttgacccatctttcagacctataaagcagagacttcggaagatgtctgatgacaaggccgaaggtgctcggaatgaagtgaatagactcctcagtgctggagttattagagaggtaaaatacccagaatggttggctaacactgttatggtgaagaatgccaatggtatatggagaatgtgtatcgattttactgatctcaa

SEQ ID NO: 64732 - DNA, 471 bp, Zea mays
  unsure (1)..(471): unsure at all n locations
agctngagttatgttattacagaccagtctaattgtgattgcatagaagtaatattatacaaaccagggaggcacaaactcctcccgagaagctaatagcaaaagattcttaagtggaggaccgagtcctcccgcgcttcagtcttgtttttcttcttttggaaccaccttggcacagaagcagcaaaagtctgctacttcctcacctaaaaacaacgaagggataaaccctgagtatggaatactcagcaagtcttacccgactaaagaaaagactctcaagggtatgctggttatatgggagtcaaggtaaggcttttcaatattcaaagactctgttttgcagaaatgcttactaaagtggatccttcaaaatccaagtntaatttgtcaagttaagtaaaattacctgcactagagttctttcaccctagttcatcgctggcctgactaccaattcttacaaagcca

SEQ ID NO: 64733 - DNA, 401 bp, Zea mays
  unsure (1)..(401): unsure at all n locations
tactatgctttaccttgctcacagtcgtggccatatgttaaagaaaaggtttagagttttatacggagttatgtggagggtaaagagctagaaccatagcatgtgttacatacattacgcatcggcagaaactagaggaagaggggagaaagctaaccccatgatgctggacattgcgtttggcaatcggcatgcatggtttccttcactanattatgacatgtttttgtggtttggcaaaatgggcatgcgcattgcgttgttgcggtgaaacagacacaacgctctgtaagcttacatgtctccttcaattccaaatgaagcacaaaaacgtatacagcctttgaaaacgtgccgaatactagctctagatgtatacgtgacatatatgcggatgcgtg

SEQ ID NO: 64734 - DNA, 398 bp, Zea mays
  unsure (1)..(398): unsure at all n locations
atcctcatagtcacctgcggcatgcaagcttgacaatggaagagaatagaccacgtgctcttctgtttggtttttcttgggattatcgggcttgtgagattgggaagtgaaaactgaatcatttgtctataactttatattttgttctcaagacaaagtgcagttttggacagtgacctgacatgtagctcattgcaagaattaaaaatgtataaccccaatacctacagcgaccttatgttgtgggcctattcacaatngatcttcataaggtgcactctaaatccttatattgggtcaaattgttggattcctaatttcagtgatagtattgtctctctgaaccaatatcctgaatttttntatttcatatttgatatgacagatgttttatctat

SEQ ID NO: 64735 - DNA, 446 bp, Zea mays
actaagcttcttatggagaacacattctgtgactaacacatatacattttgagaattacaggggtggtagcgcacgtcaagcaagaaagcaagttggcgtacatcatccacacaagaatatcatgacgactgacaggccactggagctactccacatggatttatttgacctgatagcttacataaacatcggcgggagtaagtactgtctagtttttgtacatgattattctcgcttcacttgggtattctttttgcaggataaatctcaaacccaagaaaccttaaagggattcttgagacgggctcaaaatgagttcggcttaaggataaaaaagattagaagcgacaacggaatggagttcaagatactacaaatcgaatgctttcttgatgatgagggcatcaagcatgagttctcttctctctacacgccacaacaaaat

SEQ ID NO: 64736 - DNA, 313 bp, Zea mays
aaagatagaccttgtgcatcttgtcaagcacgctaacaggtgggaagctctcatcacaccaaatatgtgatgactacatcaagacacttggagatgcttgacatggacctcttcggacccgtcgcctatctaaggataggaggaagaaagtatggacttgttatagatgatgatatttccgcttcacttgagtattctttttgcaggataaatatgaaacccgaaggaccctcaagcgctgcctaaggagagctcataatgagtttgaactcacggtgaagaaaataaagagcgacaacgggtctgaattcaa

SEQ ID NO: 64737 - DNA, 488 bp, Zea mays
cactatatatactctagctcgtgtgctctcataataaaatgatggattctcttatcatgtctttaatggctcatgatgtcgtgttaactaatttgaaatcctaccaacctcacatatgcacatgtactcatatagaaactatattatcatgtgctaacaaatgttgctctcaagaaagccaatcttccattgagctagaattttcacgaacaagtaatgtctcctatgcaaaataaaacaatgagctcaatgaagaaaatgagaggctataaaggagcttgactcaattgaagggaaaatgtcatgctcaaccttctcaagataaccgcgataatatggcgatatagctagagaatgggacaaccgtatcatgcacaacaccccttcataagaatatcaagctctccaagaaatgcctgatccaacatcaagagaatatagacaaagctcatgacaagtaccttaaccacgcgctcacattgctcaca

SEQ ID NO: 64738 - DNA, 414 bp, Zea mays
agcttgttaatgttgaaaaatcccttgctttatagatcaagaagaatgaaatgcttgcttttgagttgtcttcttgccatgcttctatctctagccttaagagtttaaatgttgatttaaatgctagagtagaaaagttgagtgtttctagttcatctttggagcatgtttctatttgcaatagatgcaaagatttcgatgttgatgcttgcaatgatcatgtctctacaatttctaagttgaatgatgatattgctaaacttcatgcctcaacttataattgcaaagatgaatgtgataaaatcaagtttgctagggatgcctacaccattggtagacatccctccattaaggatggacttggtttccataggggaaccaagaatataaagagccaaaaggccctcaacttca

SEQ ID NO: 64739 - DNA, 405 bp, Zea mays
agcgtggcacaaccgcggtgaaacacggcgactccgttgactgccatacggccacgtcgccggtgaacaactccggctgggcttgggcggtggcgccacgtaaagttgttccaccccgacgttatccgttccttactgagccaaattgagacggcggcgacacgaattgcggtggtgagtcaccgacggtgagatacgcggcaccgcagatcttttgttactgtaccatggcaaagatcatcaaccgacctgacagcgtgatttgcagggctatttactcccaattttgtgtagtgacggagcaagcttcctataccaaagttatagccccatgttccagctacaactctgctatgggaatcatacccaaacttgcactggatcttatttaaatccgggttcaaa

SEQ ID NO: 64740 - DNA, 391 bp, Zea mays
  unsure (1)..(391): unsure at all n locations
agcttctcgtcatcgatgagcgacacctatgctattacctcctgctcatggtgtttggtcggggtttcaagtaagaaacatggattcatgcttgacgttggtttatgaaaatgactcacaagtatgatccatggaatacatattacgaagaataaatgtcacgcatgcaaaanagggaatttaagtataaaacattattcgaacaaaagaaattgcatgcaaagctcttctttaaataatattacctccatccnaaaatataattcaagaatctcggtgatacttatctactactacgcattgtgcaagggtagcaagtgagattggtgagagatgtagtaaatgtgtttcctgtcatagatgcagacataaacacacatgtggtatatcg

SEQ ID NO: 64741 - DNA, 478 bp, Zea mays
  unsure (1)..(478): unsure at all n locations
tctatagggagagcatatattacgactaacatttgtttattttgagaaagacaagatttgtagcacatgtcaagcacgaaagcaagttggtgttcatcatccacacaagaacatcatgacgaccgacatgccgcttgagctactccacatggatctattcggcccgatcgcttacataagcatcggcgggagcaagtattgtcttgttattgtggatggatattatcgcttcactttggtgttctttttgcagaaaaaatctcatacctaataaaccttacagagattcttgagacgggctcaaaatgagttcggcttaaggatcaaaaagattagaagcgacaacgggacggaggtcaagaactgcacaaatgaaagctttcttgatgatgagggcatcaagcatgagttctcttctcnctacacaccacaacaaaatagtgtagtggagatgaagaatataactctacttgacatg

SEQ ID NO: 64742 - DNA, 332 bp, Zea mays
  unsure (1)..(332): unsure at all n locations
agcttaacgacgatgagtgtgtctctcagctgtaattgaatgagatgatgcgcgcgatgactaaagcttttaaaanataccaggactctgcggcgacatcctatgagcagcttgatcgatgagttgataaactagntacacgcatggatgtactggagggctcgtccccaccaacaactccagccccatatcactctcatgtggacgacgacaacgattacaacgatgtttatgcaccgctgccacaacgcttcgcatgtaatcgacaaggtatgggaggtaatggtagacgtcgtcatcataatcctgaaccagaccatgatccatttgct

SEQ ID NO: 64743 - DNA, 388 bp, Zea mays
tcttgacctgaattgcgcacatcaagctctgcagctggtgctgttggtgattaccagctgagtttaagagtgttgggggtacccctaactatggtccccgacaatagcccccgagcctcaaagggagtgttggtactcgcttggaggctttgtcgcacttttttgcaaggggaccggactttctcggttacattttgttccggtgggtgcgcgcgatcgcacccgccgggtgtagcccccgaggcctcggaggagtggtttgactcctctgaagtcttaatgcttttcgcgatgccttggccggtctggttgttcccttatgcgatctgacagtagcccgggtgcatggtcgggttccgagttctcaagctggtctgttgacgctgtc

SEQ ID NO: 64744 - DNA, 372 bp, Zea mays
  unsure (1)..(372): unsure at all n locations
agcttcttcaccatgtgatccggttatctttataaggtgagcagagcacttcccttntagttgtgtcaaactcatctttagcctctcattttcttctttgaactcttgacatgtatcatcttttgttcctggaaattttagctcaaaggaggatttgcttgtcgacgaacaacaagcattagcacatggtaatataatttcaatttgaatacatgtgcatgattgatgttgttgagattttaagttttctatcacaacctcatgagcaatgtttaacatgatattttcatccataagaattttatgagaacaaataaacatatcatgttttttcttgaaaagctagattttcaacttttagcctttctactt

SEQ ID NO: 64745 - DNA, 376 bp, Zea mays
  unsure (1)..(376): unsure at all n locations
tcggctcgatcgaagagtagctctcctcagtggagatattgcaaggacagnngttgccagtttcgattaagcgtgaccccgctccgctctttctcgacgcgcagtgcctcaccttcgatggccgatggtgcctctgactgggccgatggtgcctctggctgggccgatgccttctcgggctcgggcgtgtcgtcagtcttgacggaaggttgatgcatgtctcgggagaaaacatacgggggaaccgttgttcgccccgaggctatcttggacagctcgtccgtagtctcgttgtatcgtctggtgatgtggttgagctcgagcccgtataacttatcttccatgcgtcgaacctcatcgcagtatgccttcatct

SEQ ID NO: 64746 - DNA, 423 bp, Zea mays
  unsure (1)..(423): unsure at all n locations
tgcaagctgtgctttcttcatattatgaataattttctgaaccttntcctcggcctccttcaccatatcaggcctaaagaagtacctttctctatgttcagaccaatttagcggagttcgacatcgtcgcccatataaatcttcaaagggtgccatcttgatactttcttgatagctattattatatgaaaactccgccaagggtaaacattcatcccatttctgtgagaagtccaaaacacatgctcgcaacatatcttcgagtatttgattaaccctctcagtctgtccactggtttgtggatgatatgccgaactatggagcaacttagtacccaaggattcgtgaagtgcttcccaaaacttggctacaaattgaggtccacgatccgacactatggtcttcggaacaccatgcagact

SEQ ID NO: 64747 - DNA, 406 bp, Zea mays
gtattgataacgagaccctttgcttacaaagttcaattcgttcacaagagtctcaaggtactgctatggatagaacttcccgaggtgctcaatgttccacgaattccccacttctgtggcatccatttgagtgagccggtatgatcctggctgggtaacttctgcaacgatggatggtacttcccatggcggtgacagtttgtgccgtccttctcccattagtactcggcggaggactaaatctcccactgcgaaggatcgatgtcgcactgctttgtcgtggtagcgcctcaaggtctgctagtatctggccgactgaatgaccacattcagccattcttcctctaatatatcaatgtcttccagactaggtgcttcttgctcaacattgctttgaatgtaatct

SEQ ID NO: 64748 - DNA, 372 bp, Zea mays
  unsure (1)..(372): unsure at all n locations
agcttgagacgggaacaaccgtaacatgcactttctcccttgaagaaaatgtcaaggacttgaggattgccaagaagaggaagcncaagaagaatatcaatacctcttccaaaagcctcaaccgtgcctccatacaaggtaacatccaatgtaataatcaagccacacttcacactaagaaaaataagaagtgtagtgaatgctctaaagagggacacttgattaggtcatgtccctacataaaaattgcttgattattaacaaggatgatagactttgtttaaatgctaaagaagnacacttaatcaatcttgtcctatttgaaaaaaaaggatatggtagaaaaaaagttttactaaccatgtagcagcg

SEQ ID NO: 64749 - DNA, 381 bp, Zea mays
tctccaccaactcaagatgaggatcaagctcattatgatgtttatgaagatcaagaagatccacctcaagaggaggacaatgatcaagggggagatgccaataatcaagacaaggaagatgatgagggtccaagaccaccacacccaagagtccaccaagcaatacaacgagatcacctcgtgaactctatcctcggcaatattcataagggggtacgtgtcgctcaattttgtgaatattactcctttatgtcttctattgagccatacagggtggaagacgcattaaggaattcggattgtgtgttggcaatgcaagatgaactcaacaacttcacgaggaatgaggtatgacatttatttccacgtgctaatcaaaat

SEQ ID NO: 64750 - DNA, 470 bp, Zea mays
  unsure (1)..(470): unsure at all n locations
agcttgngaagattcttcatccccacatgtgctaagcggcgatgccacagccagcccatgctagtcttagcaattaagcatgcatctagaccggcctcttctttngcaaaatcaactaagtaaagcttgtcgtctaatacacccttaaaggctagtgaaccatcacttcttctaaagacagacacatctacatttgtaaaaagacaattatatcccatattgcatatgtgactaacagatagcatattgtaaccaagagactcaactaanaacacattggagatagagtgctcattagatattgcaattntacctaacccttttaccttgccttgattcccatcaccgaatataattgaatcttgcgaatccctattcttgacgtaggaggtgaacatcttcttcttccccgtcatatgggttgtgcatccactgtcaataatncagctttgacccccggatgcataaac

SEQ ID NO: 64751 - DNA, 466 bp, Zea mays
tgaggaatgaggaaccgcatcatgggtcaaactccgcgagttatatactcccaatgcaatcaacatgaacaaagaataaggtaaagattcaattagtcatgttgtttgcactgatcatctctctatgttgtacaagagcaaaaagagtagaggaaaaaggaggtgcttcaagtgcaatgagttatgccacctcattgcgtcttgtccatacaaagataaggatgaagggatgaggagatgttttggatgcaatgacaatgaccatatgatcacttcatgactgctcatgaagaatcaaacacgtgcaccctccatgatgaccctcaccaatgaaaaagacaaacagcaagcgtcatgtcaagttgagcaacgcttcagctacatgtgtggtgagcatggtcatctacctaagatatgtaagaatggtaatggttctaagcaaataatattatctcaatgttattcg

SEQ ID NO: 64752 - DNA, 407 bp, Zea mays
  unsure (1)..(407): unsure at all n locations
atccttaagtcacctgaggcatgcaagctttgtgtggaaattgggagaggatttgatctcttgtgtgtgtctagaattgaatgcctagctctcgtaagtggttggaagtgtaaaaacttggataccatgaatggtgggtggntggggttatttatagccccaaccaccaaactatccgtttggtggcgctgtctgtcgaatggcgcaccggacagtccggtgcacaccggacatgtccggtgtgacaaccacgtcacctaagccattgtgatctgaccgttggaactctgacttctgggcccgcctggatgtcctgtggcgtttttctaattaatacttacttatattattttctacttactatcatcatcattatgatattattcagtattatatataactctttt

SEQ ID NO: 64753 - DNA, 468 bp, Zea mays
  unsure (1)..(468): unsure at all n locations
tcggatgtggtcaaatnttttgcagcacaatagtgcaatatcagtaaattctgtggtaacttcacacctacccgtctgtttatatagtgctgcacgtgggaaggtgaatcatcaagccgctcgcacccgttgaacagtcacccgcacccgctgaacggtggaccactcgatgcctggaaggtgaatcgccagatcgctcgtatacactgaacggtggaccacctgacgctgggagtattttaatcgtttctcgacaacaagctcatggaaggtgtttttcggaccttcggcattctgaagcctgggagaagttttcacggatcgagctcgtcacgaataacgatctattaccgtaaaggggctactggtgggggtctgcttcgtcgccgaatgtcccataagaagaaacaccttcgggagattgacacatagccgaagctatcaatcataaggctttggagtacattt

SEQ ID NO: 64754 - DNA, 380 bp, Zea mays
  unsure (1)..(380): unsure at all n locations
agctntaccttgattcccaaaggctagcatattcttgagagtctttttcctttgacgggtaagacttgcgaaagtacactccgtactcaaggctttaaaacccatgttgttgtaagtgatgaaactgctgagttttgttgtttctgttccaaggtggttccaaagcaggaggaagaaaactaagacctacctagggaaggtgtctggccttcctatgatgtaataataagtttaagcactcagtacccgattatgtaataatcaacttgttgggggccttcggcttccgaatgtcctcataaacgtaatttgactatgttttccaagagaaatatgtgaacaggtaccttcgaagtcagattgcgagtgtacaagagcat

SEQ ID NO: 64755 - DNA, 329 bp, Zea mays
actacgagcacctcggtgcaagataatatattcctcatcctccctcttgtgtttcatcttgcatcaatccatctgggcagggacacacagcgtcaaattcactagtcgattgagggtcctcgcgggtccaaaacactgatagttggcgcgcgatgtatgggcccatctgcgtgtatgcaatactttcccgttgagttccagatggacaatcttcagcaacctcttcatcccgggatggagcaccgctctgggagtctcgagttcatgtcccgcgatggcagctacgacatggtactcctttccccgcagcacgacaacaacgatggtcg

SEQ ID NO: 64756 - DNA, 452 bp, Zea mays
  unsure (1)..(452): unsure at all n locations
gctgcacaatgcttacaacggtgcagcttgttattcttctctaagaatagcatgcaactgtggngacacacgttgatcttctcatatgtcatcccaagaccaaccaacatcttctttgcgaagtacatattctctggcgacttatgattctccgggagaacctctcccatcaattggacgatgtcgttattagcactggttgaaatgatgagcttcgactttatcgccattaatctagtgagagtcccaataactgacatctgagtgtgctcgtgcagtctctctgctcctgcggcgatgtaccggaagaattcctgagcatcgngtggaagtctgcccggctcctcatcagtcatttctacatccctaccaagatcatgcgacatggcatccatcctttcatgatacggattatgttccacctacgcgcgatgcgtataatagactctcat

SEQ ID NO: 64757 - DNA, 448 bp, Zea mays
  unsure (1)..(448): unsure at all n locations
tcttcagaagatggatgaatacatccgagctgacaatgatttcgccttttagggaggaagcctacaggtattttgagatgattaggggctttggaggaagactccacccgaggcatgtcagaacgatccacaatcccaacacaaatgatgacaggtccaatcatacccagagcagccagcatagctcacaatcttcgggaatgcagcaaacttcctatatgtcaccatccccgagaggcagaggagggaggaacttcggaggaaggtttggtactctacccacgagattgttctgcttattctatggngaggataanggacacacgactaggacgtgccgagtcacgatccanaagaaggaaatcgcttatgctgaagcacgatagaaccagccgaagcaggtctcgcatactgcttcatgctattccccatatattcatgaatatgt

SEQ ID NO: 64758 - DNA, 380 bp, Zea mays
  unsure (1)..(380): unsure at all n locations
agctatgctttagggtcttcttttgtttaagtgcttgagaattacaagggcagctcttaaaactgattcccacgttatttctggtcatattgacaagagttgtaaagcaagagacccgaagctcgagacatatttatacatggtccgaaagattgaagcttcctttgaagggatttctgtcacaaatattcctcggggagaaaatgaacatgctgatntgctanccaattcagcagcacaggggctggcgttaccttcggaaagtattttcgaaacaataatagcaccttcaggtgaacttcttgagagagcagacctcaatatatctcctgttatagtgagactatagaactgaaatatctctttcttagagtaatttc

SEQ ID NO: 64759 - DNA, 336 bp, Zea mays
ctcggcgtatgtgactctcttaccaaaatatgctgaggctgtggaggtaaaagacttcagaccgattattttaattcacagttttgccaagattctggccaataggcttgctgcaatcctccctactttggtctcccccaatcaaagtgcattcatcaagggaagaagtattcatgacaaatttatgatggttagagaaactgcaaaagcgattcacaggcagaaaattcctaaaatcttgctgaagttagacattggcaagggccttcgactcaatttcgtggcctttcctccttgaagttctggaacatgtgggatatggtctattctggcgta

SEQ ID NO: 64760 - DNA, 458 bp, Zea mays
  unsure (1)..(458): unsure at all n locations
agctngacaacaccattagacattgtacataatgtttctgagatcaagaatatttaattcattcctcaacatgcaaaagcgggtcttatcaagaggcttagtgaaaatattcgctaattgatcttccgacctcactccttctaaaatgatatctcctttagcaacatgatctctaaggaagtgatgaccgatatcaatgtgcttggtgcgagagtgttgacaggattattagcaattttaacagcactctcattatcacacaacaaaggtaccttttctagaactacgccatagtctagaagagtttgtttcatatataaaatttgtgtgcaacaagcacgtgcggcaatgtattccgctttggcagatgacaaggcaacactattttgctttttggatgtccatgatactagtgatctaccaagcagatggcattccccagaagtactcttgctatc

SEQ ID NO: 64761 - DNA, 399 bp, Zea mays
  unsure (1)..(399): unsure at all n locations
tcttcatcacaacatgggctagttctgnggtttcttatccaacccatgttagtcttagcaattaagcatgtgtcgagttcaactctatcaaaatctaccaagtatagctgaccctctaacacacccttaaatgctattgaatcatcacttcttctaaagacagtgacacctacatcattaaagagacagttgtagcccatttgacataattgtgaaacggaaagcaaattgtaatctaaagaatctacaagataaacattggaaatagaatggtcaggagatatagcaattttaccaagaccttggaccaaacttttatttccatccccaaatgtgatagctacgtgggaatcttgtgttttctcgtatgaggagaacatcttcttctaccctgtcatg

SEQ ID NO: 64762 - DNA, 481 bp, Zea mays
  unsure (1)..(481): unsure at all n locations
agcttctaaagggagagcacactttaagactatcaaatggttcatttgagaaagacaggatttgtagcgcatgccaagcaggaaagcaagttgggactcatcatccacacaagaacatcatgactagtgacaggccactagaactcctacacatggacctattcggcccgatcgcttacataagcatcggcgggagtaagtactgtctagttattgtggatgattattctcgcttcacttgggtgttctttntgcaggaaaaatctcatacccaagagaccttaaagggattcttgagacgggctcaaaatgagttcggcttaaggatcaagaaaataagaagcgacaacgggacggagttcaagaactctcaaattgaaggcttccttgaggaggaaggcatcaagcatgagttctcttctccctacaccccacaacataatggtgtagtggagaggaagaatcgaactctattggacat

SEQ ID NO: 64763 - DNA, 386 bp, Zea mays
  unsure (1)..(386): unsure at all n locations
atcacggaactataaaactaagcttacatgtctcgtatgattcataatcaaacgaagttaattttccatcataacgaaactccttcatgcgattctcacttatatgacccaaacgatagtgccacatgtatgtaggacttaaatcattatgtcgaggccttttagcactaatattacagatatgtgcatcatcaagatttaaaatgaataacccattcataatggatgcaaaagccacaaacatgccattcttagagatcacacaaccattgttttcactcgcaaatgaataaccatccttcatcaaacatgaaggagacataatgtttcgactcatactangaactagataacaattatttaactccaaaataaatcctgatggg

SEQ ID NO: 64764 - DNA, 486 bp, Zea mays
  unsure (1)..(486): unsure at all n locations
agcttgatgactacatgaagtcctctgttgatcttcatggntagacgnncaactgcaactggcaatgttttcttgggaccaattaaatttctatgccgctttgctttcttatggttgttatggaattttactggatagttagttgggtctgttggtatatcctcctaaactntcttgcattactgttaggtttggcactagatttgttctcaattgctatctaagaaaagtatcggataaaggggttattggcactaggtttgttcccaattgctaatattttatacgaataattgcgtgtcatcacaattcacaatcatatatgtntacagtgatattctgccacatatttnttgaatatcatagagatgtttgtccttcagtatctatattttacactaattntaactcatatggcaacgcacgagcacatacctattaccaaatgaatatcacttatgttgtctcaacagcttacttatctat

SEQ ID NO: 64765 - DNA, 461 bp, Zea mays
attacggacacttagatactaagcttgatatataaccactacttgtagccggttggcacttgtgcggtagctatcaccgggccttatatccttgctgaagcgaagttgaacagccaatattctcatgaagcccatcttctctggccttcgtctgataatgtagctcatgtactcggcagaaggcttcagcatttggatccattccctagctgtgaagggcccaaatgaagatattgagcctaatgatagcattaggagtcagctgatgaagataaatttcataattattcaaaacttctccaatcatctgatgaagcgaaaaccgtaatctagctttgataaagcgtttgaaaactactacttcgtcatcttttggctctggggtggttcttcgccggcaaaacgaagaagcttcttctctatcttcccgtagtaacgagcttcatcatcatcggcacatc

SEQ ID NO: 64766 - DNA, 328 bp, Zea mays
  unsure (1)..(328): unsure at all n locations
agctntgatcaattgacttcaaacatgtaaaatcttaattcaagcatagactatcttaagtgagtaaacgaaatacaacaaaataaatgatatctcattactttgttgaataagacgagtgctcaatgttttttaaaaagttaacagtgtcatatatttataaacgtagggatttttttttatcttggttctgatccggtgatgaaacaagtgtgctgctctactctgcgtttgaggcatgttgctcaatagtcaatatctcctacgaagattctcacaatgaccttgcatttattagtcgccaaaggtcatcttcaagtcatgaata

SEQ ID NO: 64767 - DNA, 435 bp, Zea mays
  unsure (1)..(435): unsure at all n locations
ctggtgtacaagtgtagagctaataattgaggtgtagaatttcggctctatattgtcatatgcatttattaacagtagtggcatggatctaaatattttacaactggtgtactgtgactactgatgacaacataaaactcgtggttgcttgcagggagtacggaaggcaatgtcaatctcttcttgaaatcagctgagtatttggactgtgcagttcatcatgtactcatacatataccacctcaaagacgccttattaattctatttntattgcattaattcggagcactgaacatatgagttcaccgtagaagttcagtggtaacactaatgatgactacatactcttttatgaaagccttgccacaacaagatgtcattctcatagatgagtacaagaataattatctctcgtatcttactgtaaaatctga

SEQ ID NO: 64768 - DNA, 290 bp, Zea mays
  unsure (1)..(290): unsure at all n locations
ttatagtcacctgccgcatgcaagcttagcaaatcttagtgttcttgatcttattattgagngagagagagcagncggccagagagcgtatcaaatgagtttgcggtatggccgtatttatatgccaagtgcgttgtaaattgaaagaccccgcttgtcagtgaatggtgctattctatcaaagggaaagtgttttttctgaccttcagcgtaaagccttcgtccatgtcgcaatctagatttattatggtatacaaattaatatcgcgaggggctactgtgggggacct

SEQ ID NO: 64769 - DNA, 402 bp, Zea mays
  unsure (1)..(402): unsure at all n locations
tcncgagagagggtgtggccttggagtgagccctctcgcccttgcctccgcttncgcccncctgtgaaggccctggacatccccttttatagatacaaggagatgatccagctgtacatatgggggtgtagctgtgcgctaacgtggcaagcgaagaagtgcttgagccctgtataatcgtatctggcgttgcggcccggggtcctgctgacgtttttttgccttcgtagagagttgagaacaactgacgtcatggacgcatgcatggaaccatcattacctgttgccggagtaatctagatgggacacatgtcttgttcctttgtagcctgaggaagctagctaggggtagggtaatgatgtatcccttgtggcgtaatcggtctgatgccgagatcgggc

SEQ ID NO: 64770 - DNA, 398 bp, Zea mays
  unsure (1)..(398): unsure at all n locations
tanctggatctcagatcgtgcatgtgattaatttttatctttcctcgatcacctgctcaaaattatcttctccgagtccctggactctcaccattctggcgcgctgtgctagccttctgctcctccgatgaccaacgatgtcagccacaagcctgctcgtgggttcagcagcgcctatatcttggcggcctcaccgacgatgcactcgtcgtcagtgaacacgaatgacgacgcgatacggttgctcatgtcgatgccgatcaccgccctcgacgtgccttccccttctctgactttcgtgccttcgcaccttcagttgtcccgactagtaacctgagcaatatatagagagcgaaactagagcctcgatgttggtcacgtcattgatgaccttttct

SEQ ID NO: 64771 - DNA, 392 bp, Zea mays
agcttatcatatcggccctattggtcttttcataggatagctctgatatttctccaagcaacatcatagagccgacttgtgaaactctgccggctgacgagcagctccagtttgaggagcacaaggagcggatgatccaggaggcgaaagcaaagttcttggccaacttcatagtggacaggaacaacaaggtcgtccgacatcgggcgacggatccggcttcgctccaacccacgccagatatccccaatgtaagtaataccaacgatctacaatctcttagaaattatgtagaagatcagcgtgaacaaatgcagaacatcatatgcggtatgcagagcgatcttaataaactagtacgtgcatttgatatatctagtaccacaaatttt

SEQ ID NO: 64772 - DNA, 398 bp, Zea mays
  unsure (1)..(398): unsure at all n locations
ttgactggactaagttcatgggcatgctctcttttatgtttctctngaatttgatggttcttatttttgggctggtgttcttctccagcaactggattgtaaatggatggattggtgcctgagttcgattctgcttctgcgtcagcaataataagatctgaactcttcagggttccttgtttgttcaaaaaaaaaccccatcctatatgtcaaatgttcttctaaagttagttcacttgtaggctaccttcaatgattcgattgtaatctgcagttttggaggcatcgcaatggagataggactntgcagttgaactttgtggcggatgattggacttcctatcccacattatttgacgaatgttcgtgctgtttaagtgttctctgttctcactatc

SEQ ID NO: 64773 - DNA, 363 bp, Zea mays
  unsure (1)..(363): unsure at all n locations
ngatcttggggtttatctggattatgttggctaatctttctcaatctttcttgttgcttatcaaatatactttaacttatataattggctcaactcaaaatttcaaacttttcattccctttttcttattttcttgaattttgctcatggggctcacttanggttcttaattanggttgcacattcttatcttttcatagactcattgttttgatcatgacacttttaagcatatacttggtgaattctttattacttaagttaatttgatgctcatgcttactttgatttacataaaatgatggtttttggttcggctttcaagaaaaaccctagtgacactggggggtacatcctcccccc

SEQ ID NO: 64774 - DNA, 458 bp, Zea mays
tctcctctgtcgttagctcatactggcgagatacctgttttgcttatctatttatgaccataagaatttgtagactgtgtatccgcccaatcgagatctcgtgtcgctgctgttcccgaccaagctctatctctgatgcattggaaccctctgctgctccagaaacagatagatgatttgagggcgtcgaatgctggtcagtgagttcacggtttctctagttgctttaattgcttagcttatctctaatcacatgttctcattcagctgctctatcagatatggcttgacggtgctatgattatgaggagaaatattctcatagtcagaccaacttaaccgagacttctgcctttatggatagtgcgcgttccctgaactcttctttgaatgcccagcttgattccgagaggatggcacatgatgtaaactaccctggctgacccttgcttgctatt

SEQ ID NO: 64775 - DNA, 453 bp, Zea mays
tgcactcgggccttccactcttgatgggtatggtggagaggtggaaagtatcctatgggggtggttcccacttcttctcggtagaccgagcatagtgtacttatcgcttcacgagccacgagatggcaagtgtccttggacctatgcccgattgccatagaacaccatccgggttgtcgattacttgatccaatgtacacggtaaccatgtacttctttttaccatgctccatgaattccattccacggtattctgggtaaccagggattccaaggcatgacatgctgtccctcaagagcctagagaaaccttcttcgtagatgtagaaactggtgaagctctaaccttccatctagggaacacataggagatcaactctggctgctgaactgagaaccacgctgaatgcgtattacgagcactaacgttaaagcatcacatatgcgcacaaa

SEQ ID NO: 64776 - DNA, 455 bp, Zea mays
  unsure (1)..(455): unsure at all n locations
ggcttctnttccgagtgttatggccacaacacttagcataaaagctctaccggtgcccagatgttccttctttgccgagtgctatgaccctgacactcgacaaagaacctctttgtcgagtgttacactcatcaaagtgaccagtatacacctttttaattggtttttcctattccctccaaacaaacaaaagatatatcacatatacatacatcacatatctcacaaagatcataaatcaaactagttatcgcagcattaccaacatgttcgaacacaaacataagtatccaacactcaagaacataagtctcaagtatctcacaaagcattatcaacatcaaataagttcagaccgggttatctcacaaagtattaacaacactaacaaagataatatctcatcaagatgggcggctggattggtgcggcgatgggctgggcaccatcttgtc

SEQ ID NO: 64777 - DNA, 240 bp, Zea mays
tgggcacgcatgtgaatatcagttcagctgtggagccgttgacttgtgtgtcacactgatacaaccaatcatattcttgaagacatgttgagagcctgtgcgttgccatatctgtccgaatgggataacacaccgccttatgcggaggtttcctataacaacagatacacatgctattttgaaaatgcgccatttacgcgccttatgtatcgagttgcataactcctctgcaagggatca

SEQ ID NO: 64778 - DNA, 409 bp, Zea mays
tctgcacccaatgcttcgagttgcacttcggaagtttctccaaatttcttcggagtagtgcttaaagactctattgtctccaatacatctaatacattaaccattctttttctctttggggtcgtcattggcatcggcattggcacctcaatttttgctgaacgacttagaattttcgatgtctgtgtttcttcaaccctcagttcttctattatttacagcgacagcacttcggccagcccttcaatattcggcaggggagctggttctttagctttggtgtccgaagaggtttcaccgacaaactcaggcactgtggccggttcaatataacgtggccgatgtgtgagaacctttacccttttcctcttcggcgccgactcgctatgagcagctgaagcaacttcct

SEQ ID NO: 64779 - DNA, 375 bp, Zea mays
attacgtgacactatatatactaaagctctcacgaagagatggagaatgcactgtgcactatacacatttccacataagctacacctatatgctccacaaaatgtacaacatgtgagagtactggttgttcataggatgataaacaataccctgcggctacaagaaatacatgaacaagcatgcggttggcagcataaccaaacatagtaggaaatgggaaaacgtgcacatgaatggttggcagtaatgtgattaagcacaaacgatgtcagtcatcccaaaactaacttactgtatgcagtagacaacctgacagcatttgggaacgatcacagagcatagcatcagtaaataatacagagcaaactgcatgc

SEQ ID NO: 64780 - DNA, 449 bp, Zea mays
ctaccctatggacgtgaagagtgccttcctcactggaccattcattgaagaggtctatgttgagcaacctcctggctctgaagacagtgagtatcctaaccatgtttataggctctctaatgcgctttatgggctcaagcaatccccatgagcatggtatgaatgccttagagatttccttatcactaatggattcaaagtcagaatagctgatcctactctattcactaaaactcttgacaatgatgtgtttgtatgccaaatttatgttgatgacattatctttgggtctactaacgaatctacatgtgaagaatttagtagaatcatgacacagaaattcgagatgtctatgatcggggagttgaagtacttcttatgatttcaagtgaagcaactccaagaaggcaccttcataagccaaacaaagtatactcaagatattctaa

SEQ ID NO: 64781 - DNA, 372 bp, Zea mays
tactcaacttggtaactacatacttttaggatacttgtgtcagttcaacgcacaatattctatattgcttgcatgtctgcattgtgcacatcttgctggtacctactttggacgaacttctaatcaccacggctactctttcactaaaacaataaactactggtctattctgttcagattggtgatgccaatcattgtttagcctcaattaaaagttgtgaatcgtattgaactgattgacatgctaatttggcatgcgacctaaaacttacctacaagtcgcactgtcacgtggatggtcttcacagatggttcacggaaacaggacattatgttactctaaactgcgatttaaatatggtcctcctgttt

SEQ ID NO: 64782 - DNA, 359 bp, Zea mays
  unsure (1)..(359): unsure at all n locations
tacgtgacactattaaactcagcttctaagggagacacgtgatggttggactacgtgcattcgaaagataacctggcactgtaagcagtaacaggggagagcacatacagcagaatggatgaccacttcagactctgaacttgtgatattgacctcttccgacctgtcgcctatctgagcatangaggaagtaagtatggtctagttattgttgatgacttttcccgcttcacttgggtgttctttttgcaggataagtctgaaacccataggaccctcaagcgcttnctcagaagagctcataatgangttgagctcaaggtgaagaagataatgagcgacaacgggtccgagttcaa

SEQ ID NO: 64783 - DNA, 436 bp, Zea mays
  unsure (1)..(436): unsure at all n locations
tttcttttcctttgtctgattntatttntcctattttaatttcaaatcaaactcaagtttgaatttcaaacttttaattttagatgcacaaatagaactccaacatgatgtgcactgattatattaatctatttatttataatcaaaagttcatcttcctttgttttgatagaaaacattgttcaatgtctaatctttattaagatatgttttaactaacattattctattatgaccattcactctagaaagaggtgaattctgaagtttaattatttaccaatggtactttagtttgattattatgattattattattattattatgattatgattattattattattattattattattatcattatctcttaacgaatttccttaaatcacaagttagaatattgggtgttacagtttatatctggtacagat

SEQ ID NO: 64784 - DNA, 429 bp, Zea mays
  unsure (1)..(429): unsure at all n locations
gtgccttcgcttcagtctatcatccgcagtctttcatggtcgtggagcgcgccaatgggaaaatcttcacagctgtcaagaaaatgctcctcgatgataaaaaggcagatggaccgatnttttacctgatgcaatctgggcgctaaacacaactgagtgcatggcgactgggttcactcctttccgcctcttatactgatcggatgccatgaccccgcaagaaatatagcatgggtccccgcgtacagttccgtcagccgtccccgacgtggacgagccaacttcaaaagatcttattgacggagaccgggtcttcgccctacatgccctaaacaaataccaatgccagaccaaagcatggcgcgaccacgcagtcatcccgagagagttcatcgaatgggacctcgtactcgttcgaacagctcggac

SEQ ID NO: 64785 - DNA, 466 bp, Zea mays
  unsure (1)..(466): unsure at all n locations
actggaggcatcgattggaatcctacttggtgtagattccttcttttcttcttccgtcgccttaaatgcgacgggttgcacctcgggtgtggaggaggcgccttgctccaagttgataatttgtttggagcctttgatcataagttcaaagctcacaaactttcctataacttcctcgggagacattagcttgtatctagaatcaccacgtattaattgaacttgagtaggattacgaaatacgagtgatctaagaataaccttgagcatttcatggtcatcccattttgtgctcccgaggttgcgcacttgattaaccaaggtcttgagccggttgtacatggcttgtggctcctctccttggttgaggacgaatcgaccgagctccccctcgatcgtctcccgtntggtgatcttggtcacctcgtccacttcgtgcgccgtcttgaggacgtaccatatttct

SEQ ID NO: 64786 - DNA, 451 bp, Zea mays
tgaagggcaaatcaagaagcatgctccaatatactttgtatctgaagttcttagtttatcaaagaaaaattatacagaattggagaaggtgctatatgttgttttgatggcttctagaaagcttcggcattatttccaagcatacaatataattgtcccttcttcacaaccattgaaggacattatgagaaataaagaagctactggaaggattggaaagtgggctgcggaactcaatgaattctgcattgattatgtacacagatcttcgattcaatcctaggcgttagctgacttcattgtcgattggacgccagtggctcatatagaagaggcaaataaagatgccgaagcatggacagtattctgcgatggttcttgtggaaccttcggagcatgagcagctgctgttttggtcgcaccctccaaagttaaaacttgctacacagca

SEQ ID NO: 64787 - DNA, 465 bp, Zea mays
gacactatgatactaagcttggatttatcaattgaaagagcacaatctctacttatgtttttccacgaaatatcttaaaagagattgtattagtaacacaagcaatagtttcctatttagcaacctctagtatatgaatgacaggaaggttactaaaacaaggaaacctcatgatatgaactaaattacccttacaagcatcatgcataacataaattgtaaaaaagatgaaagtagtgtgattatttaattaagttttaaatggcaagtttaattcatagcatggtgagcgattaatgtagaagactcaaaaccaatttaaataagaatgaatacttcacatagtattggttcaatcttctttgaatgttgaatggcacactccatttgggaaacacattctcatgttgtgaaactacataaatcacttagataaaaacattagtctcacaactctagtcatat

SEQ ID NO: 64788 - DNA, 442 bp, Zea mays
gaaccgatgacccgcgtcaccggaatagcgaaaccgtgctctccggagttcatcaccccgccggcgcacgtggaccgggtaaatcactgtgccatttttcgattcaatgcacaggtagcctctacatcaccccaggaagctcaccgtgccgttggattggactatgtcaccgtggtttggccggcacactcgccgtcgacgaagacacccgcctgcgcgcgtggaccgagcgattccggccatccccgccgtcgagccgtacgtcgttgtgaccgccagaacctccccgagccaaccctacccctcgccggacttctctcatcgccggtaagccgcaccgcccctttcttctctgcggatactgtttacacctgcgagggaccgcggtggagaggaagagaaagtcacggggttttgcgcattgtcagtcacacagaggaat

SEQ ID NO: 64789 - DNA, 446 bp, Zea mays
  unsure (1)..(446): unsure at all n locations
tcagcacatcggctatctcaataagttgtggtctatgtgtcaaaactttcactntttcgccttcagcgcactataagatgccgaagcagcagttttccttttccccttttgtttccaagcaggaaaacagtagtcagggtaaataaacccgacaacatcaaaaaccctattcaatctctgtttccctcaagcgctgaatgccattgtcatagattcatcttcatccctcgagtatgctccaagcagctcatcacttgttgcttctatggcatctaaccaatcagcattcgactcatcaaaccgatccctgaaccgaatgtgtacttcagatagatcgggccactttggctggagccagcagcagcctccttcggcatttcccatccactcgcaaggggccatactctgtaagcattatactctcgaatcaaatcccttatgccgat

SEQ ID NO: 64790 - DNA, 440 bp, Zea mays
gtctcatgtggagacttaatgggatttctgaatttcagaattctgaaattcagaccttgagccaaagatcagggatgttcaccttgatccctaactcgaatcctaatcaccctcaccggccaaccacctttccttagctccggcgagctcaatttcgcccgccattgccgccagagcttctgccaccgtggccagcccactccagccaccctcaagccaagccagtgcttcggctagctccgccagtagcccgtgaagctcgccaagccctcggccccggccagacttcaccgtatgcccgagatcgacctcaccggacttctgtcttacgccgccgcgcgtggaccgagctatccagtgagtctccgcccaattccttgcgctcatatcttctacggcatcccgtggacctccctgacccatttgattgaactatctcg

SEQ ID NO: 64791 - DNA, 464 bp, Zea mays
  unsure (1)..(464): unsure at all n locations
tctccacccacagcttcggagctggttcatccttcttccatatcacgcctttcataccatgcacaccttcatctcaaagccgaagcttcctgtgacagtatactatactggaaaacatgttagttgtgcttttgaggaccttcagaagaggaagacccccaaaagtagcccatcgcagtattaatttgtttttgcgtttatcaaattcagactgtgacgtgaacgaaagcctttagccgaaggtccgaaaaaacaccttcccttcgctagaatagagaaagtcaatgacaaatagggtccaccaagttgcaatgcactagtcatataaatagaaacccgcagcgacaacatctgctgcgccatttcaatcacttgtgctattttctcaagttntaattttcttgctttccgattntgcttgttttgtgagcttcgacatttgttcaattgtccatcaaatggct

SEQ ID NO: 64792 - DNA, 256 bp, Zea mays
  unsure (1)..(256): unsure at all n locations
gtgtgggacccncacgtcagaatcatcttcaccctctcaagcttcgtaacaaactaatgcgggcgccgcatccttcgccgggatctccgcgcgcgcgtttcgaaaggccagcacaagtctggtctataaaaccgagccaacgcatctgcccttattccctccctatccgggaattttactccaccacagggagctactcgccaccacgattccgctgcgccgtcgcgggtggctccactgcgcggtcacctgggta

SEQ ID NO: 64793 - DNA, 330 bp, Zea mays
ctgatttcatcaccccgccggcgcacgtggaccggcgaaatcactgtgccattattagatacaatgcacacgaagcctctacatgaccccaggaagctcaccgtgccgatggattggactaggtcaccgaggtttggccggaacactcgccgtcgacgaagacacccgcctgcgcgcgtggaccgagcgattccggccatacccgccgtcgaaccgtacagttgtgtgaccgccagaacctacacgagccaaccctacccctagccggacttctctcatcgacggaaagacgcaccgccccttgtttctatgcggatactgtttacacct

SEQ ID NO: 64794 - DNA, 453 bp, Zea mays
  unsure (1)..(453): unsure at all n locations
tctttctcaatcagaaaacttcgaagaagaaaagctgaatcttaatgcaaaacttgatgccgaagtccaaaaaagttcaaatttgaaaaagtcattgacaaaccttcaggataaatgtctggagtttaataatcgatgcattcaacggctgaagcaaatcttctattcagttggagccagtagtgaaaaaattactccttcggctgaagacctgccaagtgccttcgaacatatcgaaggtgaaattgatgaccttgatgaagttattgctggacatggtgactnttgtgccctggtagcttctcgaggcacagctattgcattcctgaaatctggttgtgaccatggaaaggttgtcaatagacccaactttatcctatcaccagcagatttggatgatatccncaaccttgcccgaagcatagcanatagattttgtaaaatggtatggac

SEQ ID NO: 64795 - DNA, 470 bp, Zea mays
  unsure (1)..(470): unsure at all n locations
gtgacacttaaatctcagcttgcaaaattaagctatcttgaagtggactgtttggtctgaaactctggaaggcctgttcttttttactgctgctactgacacatgtgttgcaaatcatgatttattatgtctctttttgtgatattgtgaggctggaaaatgtctcagtttggatcactttacccgcccaaatgaacaaaatgtctcagttctgctactgcctgtttcggcgaaggctttagtgggtcatgacttcagaactgtggaactatttacgaattaattagtttatgtatgtttttttttgaataaacactgtgaacttgcatagtgtcagaatatttgttattacacctattattccgtatccaatctctatctctacctagatcttttaatggtatggatctaattgttcaattttaaagagcgatgctntttttctacctgttttttctttatctgcgttc

SEQ ID NO: 64796 - DNA, 455 bp, Zea mays
tggcagaagaatgcatttctgtctgcacatgtttcttatcagttaaacacaacctatggcaatcttcaacccattctacaactccaagtgacaaaccaatatcatgaagcatgcaaagctgcccgttttcagtggcttcatgcaacataactgcatgccagttcttattaacaacccgaaatcctgccaatagtatgtctgctgcaagactacggaattctgaaggtagatgatcaagacaatcaagtacaaattttgtgatcaaatgaacagtgttattaatgtttggcaagctatcagacctgatcaaccttccatgagacgcctgagagctttcttgacactgatcagcaaaacaagtagagctttcactacttatgttttggggctcatcaggcataaactattttgtttcagatttagcattcatcatatcattggtgttatctactatg

SEQ ID NO: 64797 - DNA, 465 bp, Zea mays
  unsure (1)..(465): unsure at all n locations
tctcctgtacaagtgctgcacttaccgctgagtgcgaagctgctttatataataacanaggagcccctggtgttggtggagttaatgctgctaaatctatcaaatattgcttcagttcctcgaatgctttttgttggcttggtccccattgaaagacttcggctgatttctacacttccaagaatgcgaaatgtctctctgctgatctggatatgaatctattgagagatgccagcctccccgtcagtctttgggcccccttttttgtatttggtggctccattcgaagtatatcttcaatattacttggattagcttcaattccctttgttgaaaccaaacatccaagatatttccccttctttactccaaagacacatttntctggattcagcttcagaccagcttgtcttatactggcgaaggtctcctgcaaatcagcaatgtgattatcttngttcgtgc

SEQ ID NO: 64798 - DNA, 464 bp, Zea mays
  unsure (1)..(464): unsure at all n locations
acttgcttataagcatgctctgcaaataaacaaccttcgtcttgattattgccattattaaaaaacaatagaagttagagaggaggatggttaccttgaaatttgaataaaataagctgccgacgatatgttgtcgtcggtagcggctgatgtctgtctctagtttcgggaaaccgatactctntgatagagtaccgatgaccttagccccatctgagtcccggatgcagcccagtttttcatcatcaatgcctccaaatagaagagctcctggcttgtatccgcaagatttggcgtattccttaagctcttctttttcggccttcgacagtttttgcccgactaaattntgaaatgaataggcttcgtcgtccgaagtgtcttcggctatttctttccctttcccaggcactgtggccatggtttcttcagcagtggtggcagcttcttctgcagccatgtct

SEQ ID NO: 64799 - DNA, 448 bp, Zea mays
tcagcctctccgcttatccattcgataacaccttcagggtctcctcgtataaagttatcttcgttggaataggtgcccacgttggtgaagctagcctttatcttctccacgcagcccatggatttttcgaagcatctttctttggatgcgcgaagttcttcaactgtcttttctaaatagtttttccaatactcactaatatatcggttggcctccgtgagaccacatttttctttggcttcggccagctgtttccgaagatcttcaatctcaattttttgggcctcggattgagttttgaagctagcttcatcttcctttactttatccaccaatgaaagtagaatcttgtctttttccatggcttcgtttctcagcctgataacctctgatcgaaggttgttgagagctatagtgcaactctcatcttcagcattcttttgcgccc

SEQ ID NO: 64800 - DNA, 453 bp, Zea mays
  unsure (1)..(453): unsure at all n locations
tcatactcggctgcattgttagaggccgggaatagcaacttgttatcatacttgaggtgttcgcctccaggtgcattgaataaaatccctgctcctgccccctgcagcttcagcgagccatcaaaatacattcgccatacttctgccgtttctggattgtctggtacttgctgttctgtccactctgatacgatatcaaccagtgcttgagttttgatggcagtgcgaggtcggaactcgatatcgtgggatcccaactcgcaagcccacttggctattcggccaatggcttccttgttgtgaagaatgtcccctattggaaaaccagtaactactatgactttgtggtcgtcaaagtagtgacacagcttgcgggcagttagaagtactgcatataatagcttctgaacctgatgatactntttcttcgaggggcctagaacttcactgatg

SEQ ID NO: 64801 - DNA, 428 bp, Zea mays
  unsure (1)..(428): unsure at all n locations
tcanagggagaacacgtgataggtttgactaacgtgcttttctaaaaagatagaccttgtgcagcttgtcaagcaggtaaacaagtgggaggagcacatcacagcaagaatgtgatgaccacctcataacccctgtagctgctacatatggacctcttcggacccgtcgcctatctaagcataggaggaagtaagtatggtttagttattgttgatgacttttcccgcttcactggggtgtcctttttgcaggataagtctgaaacccaagggaccctcatgcgcttcctcggaagagctcaaaatgagtttgagctcaaggtgaaaaagataaggagcgacaacggttccgagttcaagaaccttcaagtggaggagttcctggaggaggaaggaatcaagcacgagttctccgctccttacacacc

SEQ ID NO: 64802 - DNA, 468 bp, Zea mays
tacgtgacactattaaactcaagctgcagatcgagccgcatacatcgagccccattgtctactctactgctaaacgaactacaccccggatcctctaattattcagctaatgacaccccattccaccctcgtggttgcactgattttccgggcggtcatccaacgaacaggtccttacggtgaggcactctagaaaccgctcatgcccccttgaaggacacaagtataacatcataatataagaagggaaaacagcgtatcattgataattctcatcatgttcattgattttagttgagcaatagcataagactaagcaataataatccaacccagataggtaaacaaggacatggataacaaaaactagtcaatccttatgtataaatgtgtaatgcgggaggtgaattaaagtatatataggacagagataggtcaaggtgcacttgcctttaccaaccgactgct

SEQ ID NO: 64803 - DNA, 458 bp, Zea mays
  unsure (1)..(458): unsure at all n locations
gtaactctcgcgagaccttgtcccatttctttctatccattgtaaattcattatcgtatgtgatattctatgcatatttactttatttgttctcttgtatggtgtactgtttgtttcctaatttgaatggatggatgtatgtatgcttgcaatcgcatatagaacgatccggttgaagagcccgatgaactcgcatgataagcccctgagcatcagtcggttggtggatgcaagtgtcccttgacctatctctgtcctattcattctttaattcacctcccgctttacacatttatgcctaaggattgactagctttttgttatccatgtccttgtttacctatttgggttggattattattgtttagctntatgctattgcttaactctaatcaatgaacatgatgagaatatctatgatacgtagttttcccctctcttattatgatgttatactt

SEQ ID NO: 64804 - DNA, 457 bp, Zea mays
tgttcatgctttcgctatgtagataacattagcctctcttaatgattcttgaaaaaggcaggcacctaatccttacgtattccatacaacttattgagagtaatgttatcgtgcagatggaaatcttcaagtagcattgaccatgtagtctcaaactccaactcagtcaaaggatgatgtattatagattggaaccttgtcttatagtccatttactcaaaccttgcatacaactcgtttagaaaaggcatatacctattttgcacatgccatatacacaaccgatgtattgtgtgtgggaaaaccctctcgagtgctactggcattgcaggatcttgatctgcattcatagatgtcaaaattgtatgaatcttattccatgttagaaagaaaataaaatcaaatttaagacatattttatgtatatacatttccttcattattatgagtcgtacct

SEQ ID NO: 64805 - DNA, 428 bp, Zea mays
  unsure (1)..(428): unsure at all n locations
tcttagggagaacacgtggtaggtttgtctaacgtgctattcgaanaagatagaccttgtgcagcttgtcaagcaggtaaacaagtgggaggagcgcatcacagcaagaatgtgatgagcacttcaagacctctggagctgctgcacatggacctcttcggacccgtcgcctatctgagcattggaggaagtaagtatggtctagttattgttgatgacttttcccgcttcacttgggtgttctttttgcaggataagtctgaaacccaagggaccctcaagcgcttcctaaggagagctcataatgagtttgagctcaaggtgaagaagataaggagtgacaacgggtccgaattcaagaaccttcaagtagaagagttccttgaagaggaggggatcaagcacgagttctccgctccctacacacc

SEQ ID NO: 64806 - DNA, 407 bp, Zea mays
  unsure (1)..(407): unsure at all n locations
cgacattgtcccactgttggaagctaatgccagttcgtcttccactataaagcatgctacaagcatatttaaatttctcatnttctagttcatgctcggcaattttagcatctaatttaggtatatgatcatgttgttatgtaatcatagcaaggtgatcatggatagcatctacattaacatctctacatctagtgcaaatagaaatatgctcaacggtagatgtagagggtttgcaatcatttaattcaacaatcttagcatgtaaaatgtcattctcatctctaagatggaaatacaatatatgatacatctagtttctatccctatcaatcaattttcattctcattctaagctagcaagaaagcattcaattttcatcttagcaataaattagcatatcatt

SEQ ID NO: 64807 - DNA, 460 bp, Zea mays
  unsure (1)..(460): unsure at all n locations
tangaatgaactaaatgtcttagattctatgatctttgattgaaatcttgcacacattgctcattntatactcttgatcatggcatgtccctttcatttggtacaaatgcatatttcttattcttcttgtgccaaagctaagactaatgtgcttccaagtgtattttcattcttagtcttaagttgaaagggaaatggagttgtaggaaaaggcaaggtttccactacattttcgtcagtatcgtatactctttgccctaatcatgcatttacattcatatctttcttgttaaaggcctctagatttcttcgtttttggcgcttaatgccaatgggagagaaattaataggccaaagtaaaaagaactgcaccaccaccctgttttctgaaaacatttttccaaattattgcatttacaaaaaccctcttgacagctaatgggagaaactttttatgggg

SEQ ID NO: 64808 - DNA, 434 bp, Zea mays
  unsure (1)..(434): unsure at all n locations
ngccatgagacatgatacatcaaatttcattaatcccacacaattggtgttttttaaaatgaatagaactatattgcaaatgaagggaactgatctgaagcccaaccataaaatttagtaccattaatactttacttatggcaaaagaatcaattataatttcattggaatgaagagagaaaatataacaaaaacaccaaacctgatgtgaactgacgaactatgctatgtctgcgatgttggccaactgcaactacaacagcatcttccacctacatgataataacaggaatttgggttttagcatgccagaataggcagccaataattacacatggcgagaaattgtgcaacagtataatggcaaaatagcccttgtagcatttgtgattgttagagattgtatctangtctaacttgttcatagccatgtg

SEQ ID NO: 64809 - DNA, 467 bp, Zea mays
  unsure (1)..(467): unsure at all n locations
tcgcgagaatttnnttttttttttgattgcctgcttgcttttgtcgcgcatgcacggcgttttaatacgatatcctatcgcatgatgcaaacaaaagagcagcatctcctgttctggcaccaccagctatctcatcacacactacgctgcactctttgttcagaatctttcaaatggttcactcaggcagctaggtgtgcatggtacactgtccaacgtcctgaattcacaaatgctcacgtgagccaagccaacacacataagctccactctggctagctactggcacatgtgtgcatgcaaataaaacacttgctgatctcaggttcgtcatcgagctgtagccagccagcagtcgcatttgccggtgcacaccgacttgttccactgcgagttaagagagaaacaaaacaaaacaaaaggaactcacgtcaatcggctacagctcacatacacgctgtgttccg

SEQ ID NO: 64810 - DNA, 440 bp, Zea mays
tccatgtatatatttatttcgtattaattacaagatccatctctatcgatctatggttctaggtttatcttggtcttgcaggcgggattgccataagactggtgtccacgctgaggtgagcggtacgggtgctgagtcccaacgggagcggtggaaccaccgtccataaaacgacgttccgcgcgctcagcccgctgcatggcgatctcagcacgagccctactcagctcgtctaatgcatggtccagctccgtgtttagcacggcggctaggttgactgtgctgctcaacctatgattgccctcaccgacgggtgagacaatcacgcctcctgtgctgacagatgaacggcggtggtaatacttcatgtcaagaccgtcagctgccccaccgtataccgagcagtagtgcgatagcgcacgccgtgcagcatcttgcat

SEQ ID NO: 64811 - DNA, 459 bp, Zea mays
tgtgaacaatacagattcataagggagaaagcagcttcatcagatcatccgaagcccatgctcttatgtgaggatatagcagagcagaaggtgctgttgggctctcagttatccgaagaacaagagaaaaccttgataaggtttttgttcaacaacaaagatgtttttgcatggtcagccaatgatctctgtggagttaatagggatgttatcgagcactcgctcaatgtcgatccatccttcagacccagaaagcagaggcttcggaaaatgtcagatgataaggccgaaggtgctcgtaacgaagtcaaaagactcctcagtgcaggagttatcagagaagtaaagtacccagaatggctagctaacactgttatggtaaaaaaggccaatggcaagtggcgaatgtgtatcgattttacagatcttaacaaggcttgtccgaatgatgaattccca

SEQ ID NO: 64812 - DNA, 448 bp, Zea mays
  unsure (1)..(448): unsure at all n locations
tatctgcgcatagcttcgtgatgatcttttccttcgtcacaatcgcctttcgtcccactcaagctntgtcttgaccatactcatatatttgtaatccgattccgaagatacctgttcacatatttcacttggaaaacattgtcaaatcatgtttttgaggaccttcggaagccgaatgcccccaacagtagcccctcgcaatattaatttactgtaaagataaatctatattgtgaaatggacgaaggctataagccgaatgtccgaaaaaacaccttcccttcttttcatgcttcgtgaagaaaatcttttctatgtcgcaagaaattacatacttctctggtgaagaataaccaagcttcgtgaaatattctccgaagccaaataagttttttgttgcctttctaatgaagctacacttcttctcgatttatcttgtgccttatca

SEQ ID NO: 64813 - DNA, 435 bp, Zea mays
tgtgcaatgtccactcgaactaatcttcggagaaacccgtcctcgctgcaacatgacacccgaaggtccaacacaacaagcaatgaatgaattcagaattattgcagagcatatcagtacaatggacctggttcatgagtttttggctttcaaagtttttcccagtttgaaagaatgggaaatgccgaagctaaaggtggagaagaaagaagtgaacttgtacgtttaccttactatttcaagtttaaaaagtactttaaaacaccttgccaagagtggctagatacaattgaagtaatgtgcaatgaaatacttggcaattattccaaaaaagaagatcagttgatgaccgcagccttcggcacccgtccgaagcgaatgctaaatcgagtgctggacgccttgggttttgaataccctgactatgaaaatctg

SEQ ID NO: 64814 - DNA, 406 bp, Zea mays
tacttgtatccatctagcggcagacatatatttctttactgtgcgggaagcagtataagaagtcatcctcatctgtgccattgaacactaatgcccctttcggatacttcagttctcgggcatagtgtttagcttcaaaaatctcttctttagataacccttttcccgaagtgtgtcgtacaatataatcaagtactttagaagatgcttcaggagtacgagtggcagttttttatgcagaatttgttctgcagcttctttttccgtttccttttctccggtttccaaggatttctccttggcgggctctgaaggcccagcttcggtctcggcctgtctctttgcagcttcggcttcggttaagtttgtctcaatctgtgcttttgaagcttcgacagtttttcct

SEQ ID NO: 64815 - DNA, 460 bp, Zea mays
tgtaccccggtattgtaataaccttattgaaactctgttctatttgaagtaaagaatgtgtttactagcctcctgagactagtaatttgtatcacatttgaatcccaaaggatcgggacgcttcacttgcgcatagctttggagcaacaacagccttcatcacgaccatgctgttcacatcgtgtatggttttaacccgagtccgaatggacctgttcatatgttacacttggaaaacattattaaatcatgtttttgaggaccttcggaagacgaatgcccccaacagtagcccctcacagtattaatttgttaagataacgaattcagactgcgacatggacgaaggccttaagccgaaggtacgaaaaaacaccttccctttgctagaatagcaataaacaatgacagatgggccccccatcttgcagcacactgagcgtataaataggaactcaca

SEQ ID NO: 64816 - DNA, 433 bp, Zea mays
  unsure (1)..(433): unsure at all n locations
ggcattgcatatttaaattccttgtattgcatctatggcttgtctaacctanttgagataaccgccaacaaagtgagtgaaaaagcttaactcgggtcaaacctgacaagtcttagtttttaagcttttagcacttaaattcttacttttcatgcaattattggttcttgaaatatgcatgaggtactgcacttatggggagtattcaaaactcaaatctttcttgaaaacccctagtgcaagccataatgcaaatttcaccatttgcctattttccctaaaaattatctagcctatggcaaaatattntgaaaagtatatgagggtgccaatacctgtcccaacaagtgttattttgtgtgattataagttgggatctggtctggtaggagatagatagaaaaattcanaattttccaatctccactctgtc

SEQ ID NO: 64817 - DNA, 415 bp, Zea mays
  unsure (1)..(415): unsure at all n locations
tggatactgctggctcagctcactgtggaggaccaccttcccccgagtctagcatggcctcttttgctcgttatgttgcaggttatgaataagcactcctcaaaactagcttagctnttgcacattggatgtactatgctagaaagttgagtcctctgggcctaatgtaaccattggaaatttcttttgggaaagatgaatgatggatggtttctattttaagattttgaatgaaattatatcatgtggtaccagttatggaaatcgaggagacattggaaccttgcacctctcacggcttaattgtttcatcgtgtaacgcaattacgggttataaatctaaaggcagaaaactcctaaatttcagatggtagaaagagcgcgccgcatatagaatgagcgcattcctacacca

SEQ ID NO: 64818 - DNA, 455 bp, Zea mays
  unsure (1)..(455): unsure at all n locations
tcttgcccacaatgttntccataaatagctcacaaacttcacatcacggtcagatacgatggtcttgggcactccatgtagtctcacgatttctctgaaaaataaattagcaacatgtgaagcatcgtcgctcttgctgcatggaataaaatgagccatttttgaaaatctatcaaccacaacaaaaatagaatctctcttttttcgagtcatcggcagtcctaaaacaaaatccatgcttatgtcttcccaaggaattttatgagcgggtaaaggagtatataaaccatgagggttcaattttgacttatctttgtgacaggtgacacaacgctccacaaatctgatgacgtctctcctcatcttgggccaatagaaatgatcactgagcatttcataagtattgctttgtccaaaatgacctgttagaccgcctccatgtgactcctgcataa

SEQ ID NO: 64819 - DNA, 462 bp, Zea mays
tataacgggataatccagtatataagctactttaacaatgtatgctacaatccttgataaaggtgacattattttaccaagatggattgatatgtagtagcatatttcatgagaaaattgttctcatacatgagactatatgagattactaagatagagtgtttgtctcaatataatcaagatatagaaataggctccccctaaagatatgcattaagaaattgaatgaactggaaagatgtactcacttttacagacagatagggagaagcattattcatcttgatcaaggcttacaaaatttgcaataaacaatttatgcctagtaatctcataatgaaaaagatttagaatgcttataaccacaccattgattgttttgaagatctcattatccaagtaggtgttgtttctcttgatgtcttctttttcatttgagagtcctccctttatagttgactc

SEQ ID NO: 64820 - DNA, 480 bp, Zea mays
cattacggaactattaaactaagcttatgcaactgctgccataaatgagaggtgaactgcgtttctctgtctgacactatcttctttggcacaccatgaagacaaacgatccgagacatatacaattctgccaatactgcactgttgtagctggtcttgacaggtatgaagtgggctgacttggtcaaacggtccactactacccaaatggaatcgtagccggctcgattgcgatgcaatccgactatgaaatccataccaatttcatcccatttccactgagggatctgcaacggttgcaacaatccatctggtctctggtgctctgccttaattcttcgacaactatcgcacttagccacatgctctgcgattttcctcttcattccgtaccaccagaatttcttcctcaaatcctgatacatcttctcactaccagggtgaatcatatatgctgtctcatgagacttcttgagaatc

SEQ ID NO: 64821 - DNA, 456 bp, Zea mays
  unsure (1)..(456): unsure at all n locations
ntctcaatctatcttgttgcttatcaaatatactttaacttatattattggctcaactcaaaattttaaacttttcattcccttttgcttatcttcttgaattttgttcatggggttcacttagagttcttaattatggttgcacattcttatcttttcaaagactcaattgttgtgatcatgacacttttaaacatatacttggtgaattctttatcacttaagttattttgatgctcatgcttactctggttcacataaagtaatggttcttggtgtggctttttaagagaaaccctatgtgacactggtgtgtcacagccttccccccttaaatgaatctcgtcccgagattctggccatagtccttccgaggtgaagcgaatggtgagactgatangaataagggtgatgattgttattattangataaactgctcctcgaatgtcattctc

SEQ ID NO: 64822 - DNA, 461 bp, Zea mays
ctctcataataaatttatggattcacatatcatgttagttatggctcatgaggttgtgttaactaatttgaaatcctaccaacctcacatatgcacatgttctcatatagaaactatattatcatgtgctaacaaatgttgctctcaagaaagccaatcttccattgagctagaattttcaggaacaagtaatgtttcctatgcaaaagaaaacaatgagctcaaggaagaaaatgagaggctaaaaaggagcttgactcaattgaagggaaaatgtcatgctcaaccttctcaagataaccgtgataatatggtgaaaaagctcgagaaggggacaaccgtagcatgcacaaaaccccttcaaaagaatatcaagctttccaagaaaggcatgagcaaacatcaagagaagaaagacaaagctcatgacaagtgcctcaaccacgcctgcacatgctcca

SEQ ID NO: 64823 - DNA, 381 bp, Zea mays
  unsure (1)..(381): unsure at all n locations
gttttctctatttgagatttgttgtacccttctgatccctatttatggttaagtaccctacactanggtcttatttgcaaaacaccatatcaatacaacatgtttgaaaattttgcctagtgaatgcactctatgtgtgtcatacacatgaaatgctgatgcttatgatgttatgctcaagttttagtgacagtaacactatgggtgttacagtgtggtaccgtgtgtcaagcgtttgaacgtactaaacatatgccgagaaatatggtaaatcggtaagcctagtacctgattgaacctggcagcagattgccctcctcacgcgacctgatacgtggtctcccattcctgttatggtgggtacaagtgcggtcactgcac

SEQ ID NO: 64824 - DNA, 422 bp, Zea mays
ctacaaaacacttatagagtttagagagaaatgatgaatgcacggtttataaaaccaagcaacatgagcatctaatgaaacacgaatcactctctctcaagtcactaatcactaatgatcacttgtctcaattgtggaacttggagagattggaagctttgaatgtgtttttgattgaatttctaactcttgtattgaatgtgaaggagtggaggtggttggggttgtatttatagccaccaaccactttctagtcgttgctcctttcctgccgaccgtggactgtccgcgcccctggtccggactatccacccctgcacatcaacggttgaaatcgcaacggtcagcaaacagctatatcaacggctatagaacatttattgcgtcgtcagatgtcagataaagcagtcgcggacggtccg

SEQ ID NO: 64825 - DNA, 451 bp, Zea mays
  unsure (1)..(451): unsure at all n locations
ctatgccaaaaagggtgcttataactaacttgtctcttgtaaaatatcaaacaacagattntgtatttttcctttgttcataataaccaaacattatttatcccaagggttggggtgtctttgccttgtggttatttatgtaaaatttttctaagtttcacttgttttattaaaataaaagagatcttacttattttacactaaaacagggtatgatatatttttccagtgaactatattgaagaagtaacctatcaaaaatagaggtactctttggttcattaatttaattactttatctatttttcttatccttaagcatattatagaacaagggtaaaactaatttaaatggagtagacagagaggtttaacatttttacttggtctagtaggtagatataagtttctcaaaatttttctaaccctggtcaaacaatattcctatttt

SEQ ID NO: 64826 - DNA, 451 bp, Zea mays
  unsure (1)..(451): unsure at all n locations
tgtggaggaccagatcatcgaagcttataagtttctggttgatatatggtcacccaagttttgttgatgaagcgccagatgaccaatcaaggaaggaatccatgtggaagtttgcaagagaaaggattgtgtgttggcatcgatgcttcttcaataagctaactgccaagcgaaagcaagaagcctaaagatgatcttgagtagccagaatcagcgtttgcattcggcaaccatatgctcctcatggccagatcttgtggaagttccatctcctcgaagcgtctgcaaagtgaagatatgtagctgaagtaaagctatacccataacccttctaagacgaatctcgaggacgagattaattttaggtggggagaattgtagcatcccaaatatcaaatcctgaaatttctcaactggctctaaatcanaaataattcaaattcgttcaaat

SEQ ID NO: 64827 - DNA, 434 bp, Zea mays
tagttctaagtccagcactgccacatcatttggttcacttcagtgacaaattgtcgcttttataaataaggagttgatctttctcattctatactaattactcccaattgacacccttcaagtactatgtctctctgaataatcacataaaagggcctgtttggatccactagtgctaattaagtgcttgagtgtatacctcaaggagtgctctgatggcgagcttgatggtctccttaccggacgtctccttgtaattcttctcgagaaactcgcgcatggagttggagttgcggccggttgcgttggccttccaagcggagaatgtccccgaggggtcagtctggtacagcgcgggcttctgggtgtatggatcgaagccgacgatgagcgtggagaggccgaatgggcgcacccctccgctctgcgtgtac

SEQ ID NO: 64828 - DNA, 451 bp, Zea mays
  unsure (1)..(451): unsure at all n locations
ntatatggacgatgatgtcgtactccgctgaattggtctgaacctggtgaaagaagtttcttcaggcctgatatggtaaaagagaccgaagagaaagttcggcgaataattcataatttaaaagaagctcaagctcgatagaagagttatgcagacaagcgacgacaacccttgaattttctagtgggagattatgtctatttgaaagtttcaccaatgaagggtatatcacgtttcggggttaaagggaagcttgcaccccggtatattggtccttttcctattcttgaacaatatggagaagtgtcataccgactccagttacccgaaaccttgtctgctatacataatgtgttccacgtgtctcaattgaagaagtgtcttcgggttcccgatcgaaccattgaagtgatggatgttgccctagaatcagacttgacatattcggagc

SEQ ID NO: 64829 - DNA, 456 bp, Zea mays
  unsure (1)..(456): unsure at all n locations
ggtggaggacccgatcatcgaagcatataagtttctggatgagaagaagtcacccaagttccgttgatgaagcactagaagaccaatcaaggaaggaatccatgtgggagttcacaagagaaaggtttgcgtgttggcatcgatgcttcttcaataagctagctgccaagcgaaacctagaaggctgaagatgatctttgagtagccagaatcagcgtttgcaaccggatgctcctgaaaggccagattttgttgaagctctatctcctcgaagagtctgtaaagtgaagatatgtagctgaagtaaagctatacccataacccttctaagtcgaatctcgaggacgagattccttttaagtggggtagatttgtagcatcccataaattcaaatcctgaaattttctcatactcgctctaaattcanaatgaatttcaaatttcatttcaaaatg

SEQ ID NO: 64830 - DNA, 467 bp, Zea mays
tctaaagggagaaacacatttgtgactaaccaatgttcattttgataaagacagggtttgtagcgcatgtcaagcatggaagcaagttggtgttcatcatccacacaagaacatcatgacgaccgacaggccgcttgagctactccacatggatctattcggcccgatcgcttacataagcatcggcgggagtaagtattgtcttgtaattgtggatgattattctcgcttcacttgggtattctttttgcaggataaatctcaaacccaagagaccttaaagggattcttgagacgggctcaaaatgatcaaaaagattagaagcgacaatggaatggagttcaagaactctcaaatagaaggctttcttgaggatgagggcatcaaacatgagttctcttctccctacacagcacaacaaaatggtgtagtggagaggaagaatagaactctacttgacatggcg

SEQ ID NO: 64831 - DNA, 465 bp, Zea mays
  unsure (1)..(465): unsure at all n locations
tttatgttttctcaattngngttaagttgtacccctttaatccctatttatggtaaagctgcctatcccgggtcccatttgcataacacttaaacaatacaacttgtttgaaatttttgcctagtgaatgcattctatgtgtgtcaaacatatgcaatgccaatgcttatgatgccatgctcaaattttagttatagtaacaccaagggtgttacatccttccccccataatagaatctcgtcccgagattaaaagtcctatggtaagtaatggaaaaggaaatgtgtcacattcttatttccttatttctggtacaaggcaggggtgatgtgggggtcacttctttattacacagctatacaggctgtacaatttacaagaggctaaaaagcctgngaaattcttatctaanaagtcttgagtttcccatgtagcctcatcttcggaatgctagttccactgta

SEQ ID NO: 64832 - DNA, 212 bp, Zea mays
tgtgaacatactgccacctggcctcattgatgacgcggtgcactctaatgcccatcccatctatgaggcaaatctgctaggacctgtccatgttggatggcatgtcccatcagtacacgcgacgagggacattggatgaagtcgtgaagagcacagccatgacgccaaggccaagtagccgggcatatatggccatgatatcattcattttt

SEQ ID NO: 64833 - DNA, 441 bp, Zea mays
  unsure (1)..(441): unsure at all n locations
tggatattctccatcagagaagatgcaaattctggggatatattttatattttcttcacgaagcatgaaaagataggaaggtgttttttcgccgaatgctcaaaaaatggtatgtatgcaaaaatttcatgcatcgtaaagaattgaactataaatagattatatattacattcaaaggtacaatgtattacacatgtcacgttccaaatgtttatacaaaatgcatctaatcctccttaagaactatntctgcagcttcgttcagtagcttgtcgacaaccttgtccatgatggcttcagccatttttctaatttcatctcccccttcggggggggcccggagatgcctcataggtctgaggaggagaaatactgtatattactattacaaccacgatcaagtctgaataaaaattacacagataatacactattaatac

SEQ ID NO: 64834 - DNA, 463 bp, Zea mays
actaagcttgaagcgtgctgcatatataaaaaagatacatgttatgaccaatgaagcaattgagctcaaagcagtgcgcaaggctgcaagaatgaacaagcatatgaagaaagtgttatttgagccgggggacttggtttggattcacttgcgcaaggagcgttttcctgatcagcgcaaatccaaattgatgccacgaggggatggtccatttcgtgttcttgccaagatcaatgataatgcatacaagatagatcttccaccaagctatggcgtgagcaacacgttcaatgttgctgacctcttaccatatacaagcgaagacatttcagagtcgaggacgactccttttcaaggtgaggaggatgatatgaccacgccattaagcaacatgttaccacccccaagtcatactacatcaactcatgtacaaccaacatcatcaccaacccatgtctttgat

SEQ ID NO: 64835 - DNA, 443 bp, Zea mays
  unsure (1)..(443): unsure at all n locations
ctcaacttgngttaagttgtacccctttaatccttatttaaggttaaattccctatccagggtcctatttgcaaaacacttaaacaatacaacttgtttgaaatttttgcctagtgaatgcatctaggtgtatcaaacatatgcaatgccaatgcttatgatgccatgctcaagttttagttaccgtaacactatgggtgttacatccttccccccataaaagaatctcgtcccgagattaaaatcctagggtaggtaatggtaaagaaaacacatcacatttttatttccttgtttctagtacaagacaggggtgatgtgggggtcacttctttataacacagctatacagactttacagtttacaagaggctaaaaaaaagcctgtgaaattcttatctaaaaagtcttgtgtttcccatgtagcctcatcttcagaatgc

SEQ ID NO: 64836 - DNA, 400 bp, Zea mays
tatcctcgggcgagccggtggtgcacccactgcctgatgttgtcctcgggcgatgcgtgaatccgtccaagactactattcttgcctgaggctgggctctggcgagacgagatcgcgtcccttggcagacgatgcttcaactttgaaccgcgcttaccggtctttacagtttgttttgaggatgttttccagccatgcttatgagtattgggggtacccctaattatggtacccgatagtagcccccgagcctcgaagggagtgtaggcactcgcttggaggttctgccggattctttgtaaggggaccaacctttctcggttatattttgttccgacgggtgcgcgcgagcgcacccgtctggtgtatcccccgatgcctcgtaggagtggtttgactc

SEQ ID NO: 64837 - DNA, 407 bp, Zea mays
  unsure (1)..(407): unsure at all n locations
tacccatagcactatgaatactctcccagaattctgtttcttatttggagtctcgatctaaaacaatggacttatgcaccccgtgaagcctaattacttctttcatatacaagggaaccaactttgaagctgaatttgtggtcttcatgggaataaagtgcgcagacttaattaagcgatccactacaacccatatatcatccctgcctcaaggagaccgatgtatgccaaccacgaattccatggtgatatgctcccacttncactcatgatttttcaacggcttcaatatacctgtaggcctcttatgtttggccttcacgtgctaacacacctcacaagctgccacatacttggaaacgtaaacctcatttatcttccaccaaaagctttgcttcaaatccctg

SEQ ID NO: 64838 - DNA, 422 bp, Zea mays
  unsure (1)..(422): unsure at all n locations
tcttctctgtctccccgaagtaaccgagcttcatcatcatgggctcatcggcctcagagacagtagatttttcaaaatctaagtggctgtgctttgctgggattagagtgttatagtcttcctcttcatcagcattttcttcctcaatatcagcttcttcagcttcagcagtatgtgcatcttcatcgatagccccctctgtcacaaccaatcccgattgcctcataacttcggaaatcggggctatctcagtggcttcggcttcctctccttcgcggggcacccttgcagttgatcgtactctggccatttgatgttgaatctcttacgagtttttacgaagctggtgacttttacagttgtgacgaagctttntcttttaccgaagctaaatcaaaatgatgcttcgctcgagaacatag

SEQ ID NO: 64839 - DNA, 454 bp, Zea mays
  unsure (1)..(454): unsure at all n locations
ntataagggcttttacttggttatgactcatacacaatggcatatagagtcttcaacaaatccactggattagttgaggtttcttgtgacattgtgtttgatgagactaacggctcccaagtggagcaagttgatcttgatgagctagatgatgaagaggctccatgcatcgcactaaggaacacgttcattgnggatgtgtgtcctaaggaatctgaagagcctccacaagcacaagatcaaccgtcatcttccaaccaagcatctccaccaactcaagatgaggaataggcttaagatgatgaaaatgaagatcaagaggatgagtcacctcaagagagggacaatggtcaagggggagatgataatgataaagacaaggaagatgatcaaganattcatggtcaaagaccgccacacccaagagtccagcaagcaattcatcgagatcacc

SEQ ID NO: 64840 - DNA, 460 bp, Zea mays
ggccttcgcctcagtctatcacccgcagtccaacggagttgtggaacgcgccaatggataaatcttcacagctgtcaaaaagttgctcctcgacgaaaaaagggcaggtgggccgatttgttacccgatgcggtctgggcgctaaacacgactgagtgcatggcgaccgagttcactcctttccgccttctatatggatcagaggctatgaccccacaagaaataaaacatgggtccccgcgaacagttccgtcagccgtccccgacgtggacgagcctacttcgaaggatctcatcgatggagaccgagtcttcgccctacaggctttaaataaataccaagcccatgcaaaagcatggcgcaaccatgcagtcatctcgagggaattcagcgaatgggacctcgtactcgtccgaacagctcggacagagtccatgggcaagctggatcccaagtggg

SEQ ID NO: 64841 - DNA, 459 bp, Zea mays
gacacttaaaactaagcttgaggaccgcttcggcagaagagcttccgaacataaagactcgtccggtccatggagtcactttatccgaacgcgagttacttatcgcagaaggtgatgagtgaggtatccgtatcccggaggcgtatgagtccctcggctcggtcagccttggctgcttacgtgtactccgtcgtttccagaatccgcttttcgaagtagtcaaaaagcacgaaagaaattctgctaaaaagagatcttttttcgaggaaaaaattcgacgcagagggggtctccccccttttagcccccgagggagggtcgggctttgccgatgcgatgccgacccttccttgatgactaaacttttgcgtgggcgcgaggtgtatgaacaacttgaaaacatcttaagggtagaagcgacatagctggttgatgttccaagcgttgccgtagatctcg

SEQ ID NO: 64842 - DNA, 449 bp, Zea mays
  unsure (1)..(449): unsure at all n locations
taccgcatttgaagcatgagcgcttccncttggtcttggtcttgtttggctgccccttgcgaccatttagcgccgtcttgaatctcttgatgatgagagccatctcttcattgttgagtccggccgcctcaatttgtgccaccttgctaggtagcgcctccttgcttcgtgttgccttgagagcgagaggttgcggctcgttgatcggaccattcaaggcgtcgtccacatatctcgcctccttgatcatcattcgcccgctaacaaatttcccaagaacttcttcgggcgacatcttggtgtacctgggattttcacgtatattgttcaccaagtgaggatcaagaacggcaaatgaccttatcattatgcggacgacgtcgtggtacgtccatcgcgtgctcccgtagcttcttatcttgttgataagggtcttgagccgattgtat

SEQ ID NO: 64843 - DNA, 454 bp, Zea mays
taaaactaagctgccatcattatatcatgataacgaaactacgagtctgattctttccaacggaaacttggcctcatgcagactgtagacctcttgaccaaacatcactcaaatgggccggctggctttctgaggcattctagtcactcggctctacaaacagcggagacaagactttactactttccaaattatactcatgggccatcacatgtcctgggaatacaaaaatattgactgctcttctagacgtgcctgttgcgctggactgactacgacataactcttattgatgactcgtacttgatatgtttgtccttcctctttggcgaacctaagtcatatcaacatacacgacataggtcgaacacaattctcatcagtgggtaattgaaatcgtgaaatagcgcgcgcacctcatgtcgtactgataactggctactgtaaccgatca

SEQ ID NO: 64844 - DNA, 461 bp, Zea mays
  unsure (1)..(461): unsure at all n locations
tctaaagggagaacacatgttgtgactaacaaatgttcattntgttaaagacnaggattgttgcgcatgtcaagcatggaagcaagttggtgttcatcatccacacaagaacatcatgacgactgacaggccactcgagctcctacacatggatctattcgcctcgatagcttacataagcatcggcgggggtaagtactgtctagttattgtggatgattattctcgcttcacttgggtgttctttntgcaggaaaaatctcatacccaagaaaccttaaagggattcttgagacgggctcaaaatgagttcggcttacggataaaaaatattagaagcgacaacgggacggagttcaagaactcacaaatcgaaggcttccttgatgaggagggcatcaagcatgagttctcttctccctacacgctacaacaaaatgatgtagtggagaggaagaata

SEQ ID NO: 64845 - DNA, 432 bp, Zea mays
  unsure (1)..(432): unsure at all n locations
tcttagggagaacacgtgataggtctaactaatgtaactttctaanaagatagaccgtgtgcagcttgtcaagcaggtaaacaggtgggaagctctcatcatgccaaaaatgtgatgacaacatcaagacccctggagttacttcatatggatctcttcggacccgtcgcctatctaagcataggaggaggtaagtatggtcttgttatagttgatgatntttcccgcttcacttgggtattctttttgcaggataaatttgaaacccaatggaccctcatacgctttctaatgagagccgagtttgagctcaaggtgaagaagataaggagcgacaacgggtccgagttcaagaaccttcaagtgaaggagtaccttgaggaggaagggatcaagcacgagttctccgctccctacacaccatatcataat

SEQ ID NO: 64846 - DNA, 446 bp, Zea mays
tgccttcgcctcagtctatcacccgcagtccaacggagttgttgaacgcgccaatggaaaaatcttcacagctgtcaagaagatgctcctcgacgaaaaaagggcaagtgggccgatttgttacctgatgcggtctgggcactaaacacgactgagtgcatggcgaccggattcactcctttccgccttctatacggatcggaggccatgaccccacaagatataaaacatgggtccccgcgaacagttccttcatccgtccccgacgtggacgagcccacttcaaaggatctcatcgatggagaccgagtcttcgccctacaagctctaaacaaataccaagcccatacaaaagcatggcgcgtccatgcagtcgtcccaagggaattcaacgaatgggacctcgtactcgtgcgtacaactcggacagagtccatgggcaagct

SEQ ID NO: 64847 - DNA, 447 bp, Zea mays
tcttgccatctcccggcagacagagatatccttgctgtctgtttacaatacaagaagtcttcttctccgctgccattaaatatcaacgccccttttggatattttaatttctgggcattaagatgagcttctagctcttcctcttgagatatcattttgcccgaagcatgtcgtacaatataatcaggcaatttggaaaatgcttcgggagttgaagagagagtatttcaaacagaatttgctttatagctttctttgtagtttctacttcggtttccaaggatttctccttggcagactctgaatgtccaatttcaatcttatcctgatgctttgtagagcttgaagactttattgtctccagtacatccaaaacattaaccatcctttttctttcgggggtcaccactggacctttctgagtttgtggcactccaacttctgccg

SEQ ID NO: 64848 - DNA, 440 bp, Zea mays
tctaaagggagaacacgtgataggtttgactaacgttcttttctaaaaagatagaccttgtgcagcttgtcaagcatgtaaacaggtgggaggagctcatcacagcaagaatgtgatgaccacttcaagaccgctggagctgctgcatatggacctcttcggacccgtcgcctatctgagcataggagggagtaagtatggtctagttattgttgatgacttttcccgcttcacttgggtgttctttttgcaggataagtctgaaacccaagggaccctcaagcgcttcctcaggagagctcaaaatgagtttgagctcaaggtaaagaagataatgagcgacaacgggtccgagttcaagaaccttcaagtggaagagttccttgaagaagataggatcaagcacgagttctccgctccctacacaccacaacaaaatg

SEQ ID NO: 64849 - DNA, 383 bp, Zea mays
  unsure (1)..(383): unsure at all n locations
tcgaaggaagatatggagatcaacccaggagactatnttgtttgttctgcggcgaagacaaagggcataccacaagaacgtgccatgtcacgattcataagcagaaagagattgccgaagctgaagcacgacagaattatccgtagcaggttctacataccgcttcatgctattctccctacgtcccatagtatgtatgcaatcaacagcctacgacctctatcgcttcgacaagccattctgaagtttcttgggcccaactgccaccaccaccaccgctagcacctactctggttcgcagtaaacaaccagaagggcatgaacacactcaacaacatcgcgattntcgggaggagtccgaagctcgcacagtcaataacact

SEQ ID NO: 64850 - DNA, 458 bp, Zea mays
tgcatagcagactgtacatttaccctctctaggagcattgtgtggaattcttattgcttgtgacgaagactattttgatattgctccaattacttacacttcaatctactcaatatcagttagggtcagttccagattggaggacgtggtgtgggacttaacggctgtttatggcccccagcaggagaatgaaaaaattatctttctatctgaactgtgtaccatctctaacctgatgagacctgaatggttgattttaggagacttcaacatgataaggagagtgagggaaaaaaacaagggagcaatcaacaaaagagtaatgaggaagttcaaccaaactattgacgctctacagctcctagagctagacctttttggaaaaaaattcacttggtcaaatgaacaggatgatcctacgatgtctcggatagatagattaatggcgacaacagagt

SEQ ID NO: 64851 - DNA, 463 bp, Zea mays
  unsure (1)..(463): unsure at all n locations
tctgccaattcttatcaaagcagcagcatttaccatctcatcttctgcagaccatacccgtaacatggccatttgtgtgctggggactggacatgattggacccttcaagaaagctgagggaggatacactcacgtgctggttgccattgacaaattcactaaatggatagagtacaaacccattgcttctctggtttcagctaaggcagtggaattcatacaagatataatattcaggtttggaataccgaatagcattataactgacttgggatccaatttcactagctctgaattctttgacttctgcgaacaaagaagcatccagatcaaatatgcgtcagtagcacacccaagagccaacggtcaggtagaaagggctaatggaatgatattggaagcactcangaagaatgtcttcgacaagaatgaaaagttcgcgagaaagtggatcagagagtt

SEQ ID NO: 64852 - DNA, 380 bp, Zea mays
gttaagaggcaggccccaatgtattttgtatccgatgttcttagtttatcaaagaaaaattatacagaattagagaagatactgtatgctattttgatggcctccatgaagcttcggcactattttcaagcttacaacataattgttccttcttcacaacctctgaaggatattatgagaaaccgaaaagctactggaaggattggaaaatgggctgcagagctcaatgaattgtgtattgattatgttcatagatcttcgattcagtcccaggcgttagcagacttcattgctgactggacgccatgggctcatgaggaagaaacaaataaagatgccgaagcatggacagtgttttgcgatgggtcttggggaacctt

SEQ ID NO: 64853 - DNA, 463 bp, Zea mays
taccgcatgtgaagcatgatcgcttccccttggtcttagtcttgttctgttgtccattgcgaccctttatcaccgtcttgaatctcttgatgatgagggccatttcttcatcattaagaccggctgcctcaatttgcgccaccttgctgggtagtgcctccttgctccttgtggctttgagagcaaaaggttgcggttcgttgatcggtccattcaaggcgtcgtccacataccttgcctccttgatcatcattcgcccgctgacgaattgtcctaggacttcttcgggcgacattttggtgtacctgtgattctcacgaatattattcaccaaatgaggatcaagaacggtataggacctgagcattagtcggacgacgtcgtggtccgtccatcgcgtgcttccgtagctccttattttgttgataagggtcttgagccaggtgtatgtctgagttggctc

SEQ ID NO: 64854 - DNA, 411 bp, Zea mays
  unsure (1)..(411): unsure at all n locations
ntgctatctatgtggacgtatagaccatgaccggcgaatttgtttgttatgaatcactaccaaacacccccaagatgaagctatctcagtcgttagacatggaatatgaacaaaaatgcacagaaactgctatcaacatcgcgaagaacaaaaaaggaataggaaaatgtgaggatacatgagtagttgacctcaaccacaagcaaaagccccgaaacacatggatgcccatataaaagaattaagtcaggctcagctatataaaatatagacacacaatcaaccctcaccccctgttggtcaagcaaagatgactgcgcaagaacacaatgcaagaggagcttgctactactgcacaaatgaaggacatattattcacgaacgccccaagaagcatctagatcgactaga

SEQ ID NO: 64855 - DNA, 427 bp, Zea mays
gtcgtgtgtgaaaaagtaccctgaaggaaagagatgatattttgttctccactcttcactatagacagacgatatattgaggaccgctctttcatagaaactcgaccgaacgtgcttttattgatctgaaaaatacttccgaatgtaaatgcatcccctgtgctgctgacttgggcaatagatcagcatattcattttctacacaaagaatatttttaacagagaatacctcataggaagcctcgatacttcagactgtatctagatatattgtaagcttccgatctatcgctttatagctgttgtcaacatgaccataaataacttgggaatcagttttaagaatggaccttctgatgcccattgcctgtatcttccgaatgcccatgactagagcttcgtattcagcaatattgtttgacaactg

SEQ ID NO: 64856 - DNA, 220 bp, Zea mays
tctcctgtacaagtgctgcacttaccgctgagtgctattctgccacatataataataaaggagccctggcataagtggagttaatgctgttaaaactattaaatactgcttcaactcttcgaaggccctctgctggattggtccccattgaaagacttcggctgactttaccccttcgaagaatggtaagttctctctgcggagccgggatggaactatt

SEQ ID NO: 64857 - DNA, 448 bp, Zea mays
  unsure (1)..(448): unsure at all n locations
tctgacaacaccatgtgacattgtacatagaatgtctgagatctaaaatatgtagntcattcctcaacatgcaaaagcgggtcttatcaagtggcttagtgaaaatatccgctaattgatcttccgacctcactccttctaaaatgatatctcctttggcaacatgatctctaaggaagtgatgacggatatcaatgtgcttggtgcgagagtgttgtacagggttattatcaattttaacagcactctcattatcacacaacaaaggtaccttttctagaactacgccatagtctagaagagtttgtttcatatataaaatttgtgtgcaacaagcacctgcggcaatgtattccgcttcggtagttgacaaggcaacactantttgcttgttggatgtccatgaaactagtgatctaccaagcagatggcatcccccagaagtact

SEQ ID NO: 64858 - DNA, 473 bp, Zea mays
tacggaccttatatactcagcttagtctagcgtagtctcggcttagtaggtttattttatctggtagttagctatatcctgtgcatttatgtttgtcatgatgaactatgtttggtttggatctttgttatgattgtcaccagagtgtgggtatcccctgcattttggtttacatactatgtcaataaagttagttatatagttgggaaacccattattctcctttcctctttatctgagaagctgtgtggtctgagttggagatcagtgaagatgctcatctgttcagtgctgttgaagaattctattctcttttcttatgctgcaagacttgccagatcagttctgatgtgtggatgcattctgcatatgtcagataacacgcgcaaatgatgaatgcgtgctcatcatgatcgagccgctccgcatgatgatgtgccacatcatcagcacctgccgtccccgtccccgat

SEQ ID NO: 64859 - DNA, 230 bp, Zea mays
cacccggaaaagcgagcgaaccaccactgccgtctaaagacagacacatcgatatgtgtaaaaagacaaagatatcccatacagcagaatggacgcacagagaataaatgatagcccaaagactcaactaaaaacacaatgggaaaggagcgcgcacgagagattgcaatagtaccaaaccacgggaccctgccgtgatgcccatcaccgaatatgaaggaagctgggga

SEQ ID NO: 64860 - DNA, 412 bp, Zea mays
  unsure (1)..(412): unsure at all n locations
tatanaagattgaatntaatgcacaatntttttcctattatatacaatgctccccttaaatatgtgctttcatagaaatctcanctttggcctcaatagccaaattgcacatacttatgctaaagtgtggaccatttctataccatatcatccatagggtgtatagtgtcataaaacaaactgtgatgctatgacataaatgtgcacacaattaaagctttgcagaattgaaacacatttcacacatattataaaagctgtcgcttacctatatttaatacacactatataaaccatttaattcaccatattcacttctatcatcatgataagcaatacccaacatatataacatacatcccatctcaacatttatatactaatttaaagtgatgctacaccatgttaatat

SEQ ID NO: 64861 - DNA, 461 bp, Zea mays
tatcatatcacagtgcacaagagctaaaaaatgagtgatctagagtggttggccagaaagcgtgcataataagtttgcggtatggccgtatttatacgcttgatgcgttgaaagttgaaagaccccacttgtcattgaatgttgctattctagcaaagggaaggtgttttttcggaccttcggcataaagccttcgttcatatcgcaatctgaatttattatttcaaacaaattaatattgcgaggggctactgttgggggccttcgtcctccgaaggtcctcaaaaacatgatttaacaatgttttccaagtggattatgtgaacaggtaccttcggactcataattacgaacatgaagtgcggtcaggacgaagcctgaaccagacgaatgacgggctgattaccaagctccacgaatgatggtgcacattcgaatctgtgcgcatggaatcttcgtct

SEQ ID NO: 64862 - DNA, 385 bp, Zea mays
tgactcaagcgacgcagcatgcagctcgcttacaaccactaaatattatgacctttcgccaaaaggtctgatcaatgtgttagattttataaagggtatacttgttatttctcacaggctgcgttcctgtgcctataaataatgaacagtattccggtactgttcacacattctggattgcaatcgcatctctcggaaatcaacctttgccaaggcataggtattattgtattcaataattcaatataatgaataaatataatataattatttactcatcttataccctttttgtattatcttatgaacatctattgaagcttattacgaaggcttaacttcgtaattatactttttccaaccttcgtccaagaatcactatccc

SEQ ID NO: 64863 - DNA, 435 bp, Zea mays
  unsure (1)..(435): unsure at all n locations
ngacaacaaggaaattgcgctcatcatcaagagctcacgtcaaatcctcaagcacaggaaggggatagagtacaagccctgttccaaaagggtgtgctacaagtgtggtaagctcgtgcattatattgctaaatgtccaatgtctagtgatagtgataggggcgatgacactaatggaaagaggaaggaaaataagaagtactacaagaagaacggcggcgatgcccatgtgtgtcgggaatgggactccgatgagagctccaccgacttctcctccgacaagatgccatcaacatcgtcgtcaacaatggcctcctctttcccaacgtctgccacaaatgcttcatggaaaaagacgtgtaaaagaagaacgtaaaatttagagccttcagcaaatatacaacatttagtgatgaagcttactctatgatgatg

SEQ ID NO: 64864 - DNA, 440 bp, Zea mays
agcttgtaaagggagaacacattgtatgattaacaaatgttcattttgacaaaaagacaggatttgtagcgcatgccaagcagggaagcaagttggaactcatcatccacacaagaacatcatgacgaccgacaatccactggagctcctacacatggatctattcggcccgattgcttacataagcatcggcgggagtaagtactgtctaaatattgtggatgattattctcgcttcacttgggtgttctttttgcaggaaaaatctcatacccaagaaactttaaagggattcttgagacgggctcaaaacgagttcggcttaaggatcaagaaaattagaagcgacaacgggacggagttcaagaactctcaaattgaaggacttcttgaggaggagggcataagcatgagatctcttttcctacatgccacaacaa

SEQ ID NO: 64865 - DNA, 473 bp, Zea mays
  unsure (1)..(473): unsure at all n locations
actcagcttaacaagccagttagatccactccgtcacgttacagtcagcagggtctaagttccctctaggccccctccgttgcaagcaaccaacctccagccaatgcctgttggcattgcggagaccccagtcactacaagaataattgtcctcagttgaagacatttgtgcctacctactccaactcggtgaatggccccaagagtgccccagcacccgcctccaaggcacccttctccaacagccagctaagcaagacccagtatcatggcagggcacgagtaaaccacgtcgacgctcaagaggctcagcaagccctaggagtagtgctcgatgagttcctagttgaatgtactcccgtctctgtaccttttgatttaggaccatctcattcattcataaccactggttntgtggaaaagcatggcattcccactgcatatctagaaattcccttggtcacccgaaccct

SEQ ID NO: 64866 - DNA, 429 bp, Zea mays
  unsure (1)..(429): unsure at all n locations
agcttgacattatctccttgttggaagctaatgccattcttaataccagggcgnctcccactatagagcatgcttctagcaaatttaaattcttcattttctaagtcatgctcattaattttagcactaagttgagctatgtgatcattttgttgtttaattaaagctaggtgatcatggataacatcaacattaatgtctctacatctagtacaaatagtaacatgatcaacactagatgtagaggttttgcaatcttttaattcaacaatcttagcatgtaaaatagcattctcatctctaagattggtaatagaaacattgcaaacttctaattctttagccttaacaattaagttttcattctcattcttaaggctagcaagagaggcagttaatttatcaatcttagcaattaaactagcatta

SEQ ID NO: 64867 - DNA, 363 bp, Zea mays
tcggcttcatctatgttatggatagactttgaatctgtccagctcccttcggccttcctggaagcttcctgactcccgtgaatagcaataagcccttgttccgaaggtatcttcatgcataaatatgctggatgaagaatggcttcgaaggcattaagcgtccctcgaccaatgattgcgttgtatgtgtactccatatcaacaatgtcaaagacaactcgttcaggtcttgtgttatggacgtagccgaaggtcactaacattgttatcttgccaagtgccacaatctgccttcctccaaaaccacaaagagggtgtgttgcatgatgtatcttgtcttctggctcttgcatctgtctgaaa

SEQ ID NO: 64868 - DNA, 432 bp, Zea mays
agcttggtataaaataaagattaagccctgctaaagaatcttcatatcataaccacttattggcctattcgtctacctgccaaataattttccttgcaaaattatattaccatatgcttctaacttcgatggtcaataccaggaagggaagattatcacgcaacaggaaacagaaatgaatcctccaaatcctccaccggttggaatcgatcaagtggttgccacccaaatgatgataatgcaacaaatggcaaacatggttaccgaattgcaaaatcagataagacaagaacgcaaggaaatacttcaggactggctggagatacgttaaaaaataaggcaagcacggttggaaagacaacaacaacaacgccgactacctacaccaccaccaccagcttcaccaagctacataaatatatatatactact

SEQ ID NO: 64869 - DNA, 454 bp, Zea mays
  unsure (1)..(454): unsure at all n locations
tcacagcctctcggggaagctatccaggggctagggcgatgctggtgtatttagaaaagattggtcacgatggccgtgctcgggcaatgatggcgggcgatggcgctcgctttccacgatgaactccaatgatctctggctcgggcggngctttgggtgcgcgagtgcaaacgactaaggcctctggnggcacttataggcgagggcaaggtgcagacgcacgaggcggngcgcgcgctgccgcgctcggccggtcaggcaagggatcgaacacgtggcctcgctcggtctggtcattttcaaacgctaactggctcgcgatcttctcgtaactctcctaaatccctacacacgatttcttccttgtcttttactctttggttctcttacagcacatgagtggatttgatctcggattcgcgagatacgaggcgacaaagttgggtttgtcgct

SEQ ID NO: 64870 - DNA, 411 bp, Zea mays
  unsure (1)..(411): unsure at all n locations
agcttgaaatatgtnttcctccatcattntttgatatgcaagtacacctaatcatacatctcgtggatcagataaaaatattagggccactatatttacatcatatgtttcagttggagcgatacctgcgagtattaaaaggttatgtgcgaaatcgcgctcacccagagggttcaatcatggagggatacactacagaagaagtgattgagagctgtatagattacatcagtgacggaacaatgataggtgtgcctgtacctaaacatgagggtaaactatgtgggagagggagaatggacaggaaaacttttcgcgttgaagattacaagctagtacattgtgctcatggtagtgtactacaacatctcacgatagccgagccttacatagaggaacacctggatgagc

SEQ ID NO: 64871 - DNA, 445 bp, Zea mays
ttgacatttccatagtttaagacagtatgtggttacaatcctacaagttcattatgaataagaatatcacaaacaacaataattagcatagagccatcaaaattgtacaataaaaaataagttgcaacgaagcacaccatttcctactcattgttgggctgaatactattaaaaaacaatggaaatgatcgcgcatgtgaactgtattactacaacaacagaaaatggaagcaccagtgctttacgtttacctcctagtttgtaggcataacacatgtatcttgcacttgtgactcaatcatcagatccaaatacaaatgctcttgtccatagccgccaccgtggatctagcacctaaataacccgcagccacagcttggccttccaccgtggcgtcacacctgagcagaacgaggccgctacacaggctacaacgtaggagtat

SEQ ID NO: 64872 - DNA, 338 bp, Zea mays
ctgtggttccaatattactctgactcgaaggcattctcagatacaaaggttgtatctgggtgggagacgacacaaccattcagtcccgcattgtgttagcattgcattcttcagcggtagggggtcactccggggttccagttgaaagggaattaggcttacacctattttcctaattgattttggtgggtgaattgcccaacacaaataattggactaactagtttgctctagtctataagttatacatgtgccaaaggttcacactaagccaataaaaagaccaagaaaagggttcaaacaaagacagcaagggataactgaaggctgcctggtct

SEQ ID NO: 64873 - DNA, 424 bp, Zea mays
catgccgcttgacacaccattgatatctattataaaattcttgtatcaagtatatttaattcattcctcaacatgcaaaagcgggtcttattaagtggcttaatgaaaatattcgctaattgatcttctgacctcactccttctaaaatgatatctcctttagcaacatgatctctatagaagggatgacggatatcaatgtgcttggtgcgagagtgttgtacatgattattagcaattttaatagcactctcattatcacacaacaaaggtaccttttctagaactacgccatagtctagaagagtttgtttcatatataaaatttgtgggcaacaagcacccgcggcaatgtattccgcttcggcggttgacaaggcaacactattttgctttttggatgtccatgatactagtgatctac

SEQ ID NO: 64874 - DNA, 454 bp, Zea mays
ctcacattcttctccagcctagagatcgaccattcacttatttctcgactagcctttgcaacttccaaattttcatttgcttcggcaagtttcttctgaaggtcttcaattttggctttgtaagcttccgattgagtgttaaattatgcttcatcttttttcactttatccaccaatgagagcaggattttaatcttttctgcggcttcatttctcagtatgatgacctctgaccgaaggttgctgagggctatctggcagctttcatcttcagcattcttttgcaccctcagagcattactaagaatcaagccctgcaaaaagatggaatcagcacgacaatacaagataagataatctattttcaagttaatcgtttttgaaccttagacttgtgtacgcaacgctgtctgtgaagtcatcttttgacatggcggaaaggccaacttcaagc

SEQ ID NO: 64875 - DNA, 371 bp, Zea mays
agcttaccttagaagataacatgaagattttcttatgacacaaagaatggggaacggatgcaagtgcatcgaactcaaagtatactaccagctaagcctccccacgcacaattttaactaaaaattggcatcaaccgatatatactggaagaatgcatatataaacattataccccaataaaaaaccccaatacacacaagctcagcatactggaagaatgcatatatataaacattataccccaataaaaaccccaatacacacaagctcagcatactaaagaatgcatatataaacattataccccaataaagttatattatgggaagcactcgaattcactcttatatactgcaggctactaaagatc

SEQ ID NO: 64876 - DNA, 456 bp, Zea mays
  unsure (1)..(456): unsure at all n locations
agactcactcagacactcacaagntcatacaagctctcttgcnatacatcacacagnggagtaaggtgttacgcttcggcggcccgaaccactctaaatccttgtgtgttcttgtgtttccactcaacttccaactaacaagcaaaacgtcgaggcccctcctcatcttaggatttagggcgggtgcactcccgcacccgaccggagatttcctctccgacccttttaaaattagatatttatttaaccgatgtttaatagattaatcttgctaatcaaagttaaattttccataattataaactaattaagatataatatgtaatcaagttataactcagattaaagttgaattagctaatcctanggttatctatctcacatgaattacattacttcaaatccacctagaacctagtttttcatagtaatcacatagatnttccaaatggtata

SEQ ID NO: 64877 - DNA, 379 bp, Zea mays
  unsure (1)..(379): unsure at all n locations
gcagcatgcagcttgccgagtgcttangcactctttaatgcggcgattccggtagtgtatgggtatggtgatatgtgcccacttggtatcttacctattatcatccctaggtagctagacctatttgaacgtcgggttgggttcggatcgaattgggtctataggaaagaagagtgggtagtagatccatattatcttacataaggatcatcaattattataagagactcaatctatttctcgtatcttctgaagaaaagtaaaagtgtcgttcaatcttttattctgactaattgttaagacatggtcacattgcattactgccattcaaattnttatatatatagtatcctagtaattttagtaaatattaaataga

SEQ ID NO: 64878 - DNA, 439 bp, Zea mays
  unsure (1)..(439): unsure at all n locations
agttagggtattacagaccagtctaaaagtgagtgcttatgagtaatattatacaaaccagggaggcaaaaactcctcccgagaagacaaaagcaaaagatcctatgtggaggaccgagtcctcccgcacttcagtcttgattttcttcttttggaaccaccttggcacagaagcagcaaaagtctgctacttcctcacctaaaaacaacgaagggataaaccctgagtatggaatactcagcaagtcttacccgactaaagaaaagactctcaagggtatgctggctatatgggagtcaaggtaaggcttttcaatattcaaagactctgtttttgcagaaatgcttactaaagtggatccttanaaatccagttttatttgtcaagttaagtgaaattacctgcactagagttctttctaccctagttcaatcactg

SEQ ID NO: 64879 - DNA, 327 bp, Zea mays
taccaagcacttctggtggggcttcgaaagttaaaagcaatgggaataaaaagggccatccttaaaactgactctcaagtcatttctggtcatgtaaacaaaagtagtaaggcgagagatccgaagcttgaaaaatatctggatacagttcgaaggttggaggcttctttcgaaggtttttccgtcaagaatattccaagaggataaaatgagcatgcagatctgttagccaaatcagcagcacatgggctctctctaccttcggaaagtgtttttgaaacaataagagcaccttcgattgaacttatggagagagcagtgctttac

SEQ ID NO: 64880 - DNA, 373 bp, Zea mays
  unsure (1)..(373): unsure at all n locations
tagttactatttttggatgccgatttttgtagntatgagcgaaacaagtaggtgttgtcctgctgtccaaaaatcagcanatattataatgattgcttggagtctcttttgtggggtaactaaatttggttagttcttgtcttgattaatgaagtcttgtgatatgaacatacatactatggtggcgcgagtgctttttagcatctgctttcttctgtatctatcaaccactctaatcctacacgttccaatgcactttatgttttccatcggattcagaattcagttgtttagtataaactctatatatacattagtttaaaataaaactcactcttattgatttgcagatgatagtgctcatatggatctc

SEQ ID NO: 64881 - DNA, 368 bp, Zea mays
  unsure (1)..(368): unsure at all n locations
tgcagctgttgatatttttttcttgtttgcanccagggctcgtctaacctaggtgagataaccgccaacaaagcgagtgaaaaagcttaactcgggatcaaacttggacagtcttaagtttaagcttataatacctaaattcctacttttatgcagttgttggttcttgagatatgcatgaagcattacacttagggggagtattcaaaactcaaatatctcatgaaaacccctagtgcaaaaccaaaatgcaaatctcaccatttgcctattttctctaaaaaatatctagcctatggcaaaatattttgacaattatgagaaaatatatgagggtgccaatacctgtcctaacaaggggtcttttg

SEQ ID NO: 64882 - DNA, 410 bp, Zea mays
  unsure (1)..(410): unsure at all n locations
atggtccttaagcctctttgaaatccttaagggaaaatgcttaaaatatttgtaacatgctttcagtagtgcataaactgtcatgagcattacatttatcctatgacacaatgcacttcttattctatatgatttagagatgttctcatcaacctaactatgtgcaattggcattttaagccaaaatatgtgttcttcctctcaatgcacatatttaaggggagaaatctatgttgtatagaactatgatcatgcttaatttaatgtatctttntgatcatatctctttatgtctacgactaaatgtgctttcaagtgatctctatgattaagtcgtagattgaaaagcgaaatgaatattcggccaagacgacgctttcactcaactccatcggtattatccactcttt

SEQ ID NO: 64883 - DNA, 442 bp, Zea mays
catgcaagcttagtgcaagcgtgtggaaaggtattaaaccatattattgtgtatgaaaggctcgagcgaagggcaaggtggaaccgacggaaaaccggatgaggcgctcggcgacgggcggcatggctgttcggccttgcgtctgggctgataacgaagtgttcgccatggcgcacgggccgaaaacggaggctcgggcaccaactctaaaataagctaagttcaagcatgtggaaagacaccgaacatacagtgtatgtctttggtgaacggcacagtggaacggagggaaaacgacacggatgctcgcggcgacaggcggcatggctgttcggccttgcgtttgggctgaaaacgaggcgttcgccatgtcgcgcgggccgaaaacaacggttcggccacggtctcgaaaataagctaagtccatgcgcgtagaaagaca

SEQ ID NO: 64884 - DNA, 406 bp, Zea mays
gcgccatgttctatacccccattgtcggcccagacgcaaggccgaacagccatgccgtccggcgccttgcgcctccgtgccgaattacctccgttccgtcatgcccttcacccaagacatacatattaccttcggcgtcttttcacacgcttggacttagcttaattacggggccatgcccgaacctcggttttccgcccctgcgccatgggcgaacccctcgttttcggaccaaacgcaaggccgaacagccatgccgccccgtcgccatcctgcccttcacccaaagcatacgtagcagcttcggtgtccttgcacacgcttggacttggcttttttttggtcgccacgaacccaggcggcttcggcacgctggccctggccgtttcgttcgaagaccgggccc

SEQ ID NO: 64885 - DNA, 429 bp, Zea mays
  unsure (1)..(429): unsure at all n locations
gcttcgtcttaattacatcctttaatgtttttttgtttgctaaccccattacctttgncatccatcgatctcaccttgatacttatctttatggctgctcttcaaaaccccctctctttcacctctatttgagagttgcagtttacttatctagcccttagtcgtatcctcttctttgccactcgcaggtcttgtcttaactaaacccttcgttgtgcttttggtctgttatctgccttacctttgtagtctgtggatcttgccttggtacatattttaaatctactttttgaaaatcttctcttttctatctcacattgagagcggngtnttgcttatctcaccctntggcatatcatcttctttaccgcgtgcaagccttgatgtaactctattctttgttgtacatataccactgagtcttctatg

SEQ ID NO: 64886 - DNA, 449 bp, Zea mays
  unsure (1)..(449): unsure at all n locations
aactcagcttctaagggagaacacatgatanggttgactaacgtgctattcgaaaaagatagactcttgtgcagcttgtcaagcaggtaaacaggtgggaggatcgcatcacagcaagaatgtgatgaccacatcaagacccctggagctgctacacatggacctcttcggacccgtcgcctatctaagcataggaggaagtaagtatggtttaattattggtgatgactnttcccgcttcacttgggtgttctttttgcaggataaagctgaaacccaagggaccctcaagcgcttcctaaggagagctcaaaatgagtttgagctcaaggtgaaaaaaataaggagcgacaacgggtccgagttcaagaaccttcaagtggaggagtttcttgaggagaaagggatcaagcacgagttcttcgcttcctacacaccacaaacaaatg

SEQ ID NO: 64887 - DNA, 300 bp, Zea mays
agatagaccctcgtgcagattgtcaagtcaggaaacaagtgatatgttctcatttcaccaaaaatgtgatgacgacctcaaaacccttggagatgctgcacattgtcctatttggaccagtcgcctctctgagcatatgaaggagcacgtatgcgttaactattgatgatgactattcccgcatcacttggtgatcttttcgcaagaaaagttccaaacccaagggactctcaaacgctttctaaggagagctcataagagtttgagctccacgtgataatataatgagcgacaaccgat

SEQ ID NO: 64888 - DNA, 107 bp, Zea mays
cccgaagggatgtcaatgattcatgggaaaactgaccccgacgaagtaaagaaaattgaggtctgactttctcattaaagaatcgaacacgggccgagtactgtcag

SEQ ID NO: 64889 - DNA, 348 bp, Zea mays
  unsure (1)..(348): unsure at all n locations
tatcttgtcaagcatatattggnacccatttcttgatgggttcatcacgggtagtcaacaaaaatctaggaacccaaaaggcctttgtgttagcactatgtaaactcattacctttctaacacaagttgcaattttgggttgcctaattacatgaaaaccaattgacacgttaggagtggaattgttaccaatgggacaatccttgcattgattgtccttctttcggcatgtgtaacatatgcgtttttcaagttttgaaactttgttcttttcttggttgttccttgctacatggatagaaaaaactttcttttctaaccctatgcctctttgttttatatggggac

SEQ ID NO: 64890 - DNA, 441 bp, Zea mays
  unsure (1)..(441): unsure at all n locations
actcagcttaacggtcgaatccaacggcagtgatgacgtggcacgttgcatctgattgtcctgngtgcaccggactgtccggtgcgccatctagcatacatcctcccaacggccacatttggtgtgttntntantttntcatcagattctcatttattgttttcatattatattataactatatttatataaatcctctctttttccttattatattatttattatctctgtatttatatctatgatcatttttttcatttatatctccttattattttttcttctttatttgtttcctttttcaactactaaatctttttatcttttaccttaatactatatcatataatctcttttttaaccattattatttatattatgaatttatcaatctacttaatttattcatttctatatgtatttttaaatatattattttt

SEQ ID NO: 64891 - DNA, 428 bp, Zea mays
  unsure (1)..(428): unsure at all n locations
agcttcggcgtctttatttgtttcttctttctgagcccctggcgtccaatcagcaatgaagtctgctaacgcctgngactgaattgaggatctatgtacatagtcaatactgaactcgttaagctccacagcccattttccaatccttctagtagcttctttgttcctcattatgttcttcagaggctgtgatgaaggaacagttatgtgatatgcttgaaaataatgtcgaagcttcctggaggccattaacacagcatacaacaccttctccaattctatatagtttttctttgataaacttagaactttggagatgaagtataatggagcctgctttttgaattggccatctagcttctcctgtacaagcgctgcactgactgcagagtgggaagctgctacatataagagcaatggagcccctg

SEQ ID NO: 64892 - DNA, 456 bp, Zea mays
  unsure (1)..(456): unsure at all n locations
gacacctcaaactaagcttgtgtcacaagaaggaaagtgggagcgctattgtatttctgatcttgtatgnggatgacatattattgattgggaatgacattcctatgctggagtccgtcaaggcttcactgaaaaagtgtttttctatgaaggacttatgggaagcagcatatattttgggcataaggatctatagagataagtcgaagaggcttataggattaagtcaagatacgtacattgacaaggttttgaaacggttcaacatggaacagtccaagaaaggtttcatacctatgtcacatggtaaacaccttatccagatgcaatgtcctgcgacggctaatgagcgggagcgcatgagtaaggtaccatacgtttcagcgattggatcaatcatgtatgccatgataagacacgcccagatgtttcatacgctataagtgctacgagtag

SEQ ID NO: 64893 - DNA, 457 bp, Zea mays
  unsure (1)..(457): unsure at all n locations
gganagtcaaaaccagtcaaaccaccatcaaggtaattctatactgaacaaganaatattaattgtagtttgcacttaccgtgcagagcagagcaagagtttccttccatgaacttagtggccaggtacttacaaaactcattaaatcattgcccaccatagcggagacaacctatacttgaaacagtataaaaataaataatggtggttatggaaattactatgtacaaataaacaaagatattcaaaatcgagaataaaatgaaacctttaagtaaggtgagatactgtttttaagataatgatttcttgtgctttcccagagagcagaaccaccggcatgggctataaccaaagcatcagctatacgattagcagaaagacactggttaaccgcccctttgtagtcttcaaccaccaatgcatgctgaatacttttgcaatngatggatctgac

SEQ ID NO: 64894 - DNA, 290 bp, Zea mays
gccccaatatactctgtatccgaaggtcttagtttatcaaagaaaaattatacaaaattggagaaggtgctgtatgctgttttgatggcctccacgaagctttggcactattttcaagcatacaatatagttgttccttcttcacaaccgctgaaggatattatgagaaatagagaatgttggcgacttattctcaaatgctaagagttaagaacaaggcaacataaaaagtgttaaatattaaagtccttcgtccttcaagacattatgtcccttctgatataatgaaa

SEQ ID NO: 64895 - DNA, 448 bp, Zea mays
ttgcctcgggcagactaataccagaataagataacacactttgggagtggagagatggcgagagtatcgtgtaccctccgtggcaagaggctggacggtggtgtatctgtgctctcggttggcgtgaacctgatctggtcttaagaaccctggtggcgagttgacatatgcaagggttaagtgctacatatgtcgtgtgattggagatcctcagctgagtattaatcgattcagatcaccattacttctcggacatgaagacttggtcactgacttacacgtagcattccagtgaataagaagggttgataagaaattggctagtatatgccaagtgcttgaactatggtagaaagaactctagatgcaggtaactttacttaacctgacaagtaaactggattttaaggaccactataggtagcattctacatacatagcttgattc

SEQ ID NO: 64896 - DNA, 409 bp, Zea mays
  unsure (1)..(409): unsure at all n locations
agcttctccaaagattgttgaggcttcttgtcgaaatactgagctgacggacctggccgaagccccttgatcatggcctcgatgacaatttcattgggcaccgttggtgcctgtgccctcagacgcaagaaccttcggacatatgcctgaaggtattcttcgtggtcctgattgcactggaacagagcctgagcagtgaccggcttagtctgaaatccttgaaaactggttaacaacaaatccttcaacttctgccatgaagtgatcgttcctggtcgaagggaggaataccaagtttgagcaacacttctaacagccataacaaaagatttggccatgactgaagcattgccaccatacgaagacactgntgcttcgtagctcatcaaaaactgcttcgggtctgagt

SEQ ID NO: 64897 - DNA, 408 bp, Zea mays
cgctttcctcaatggcggcaggcggcagacggcttactctctttctcggggttggtttctcgggcaccggaggggtggctgacttcgtggggctttcgggttccgcgggtatgccttcgcgtttatactcgcagcccacgcgggggtggaggtcacgccagcggcgaagtcagcgcggtcgggcgctagctagaatcgcggaggggttgttataactgcggttctgatccgaacggaggtattagacacgcaactatgtggggcccgatgctcaatgaaggcggccaccaagtgagctcagcacgcctggagggtgcggcatgccagaagggcccacacgttcgtcggcctaagactgttcgcaacgctttaccctacaccttccctacctaatactgtgcatcctat

SEQ ID NO: 64898 - DNA, 385 bp, Zea mays
agctttctcaagcagggcttcgatttcccctaagcaactttgtcattgaagtcctgaagacatttcaagtctaccttcatcaacttactcccgaagctatcataaaaatggggatgtttgtctgggctgcgagaagccaaagtttagaaccaaatgctaaaagcttttgcaacattcatgagttgttatatgagacgaagccctgggggaaggaacaatatcacaacaactttgggtgctacagcttcggtgcccgctccgggtcaagccgccctgtgccaacttttcggaagaggtggcccggagcctggatgactgaatggttctatgtaaagaatgacttaacagcgcaagaaaatgtcaagagtatcattttgcgccccat

SEQ ID NO: 64899 - DNA, 399 bp, Zea mays
tatctgcgcatagcttcgtgatgatctttttcttcgtcacaatcgccttctgtcccactcaagcttcgtcttgaccatactcttatatactcgtaatccaattccgaagatacctgttcacacatttcacttggaaaacattgtcaaatcatgtttttgaggaccttcgaaagccgaaggcccccaacaacgaaggactttgtcatgacagcagtgttgccaccatatgatgatatggttgctttgtagctcatgacgaattgcttcgggtcggagtgcccatcatacatggggagatgtggcggcttgtatgaaggtggccatggggtagcctgcaactctactgtcaggggagaagcatcatcaaaagcaaaattaccatggtacagatcgtcatac

SEQ ID NO: 64900 - DNA, 375 bp, Zea mays
aataatctctaccttattacttctagggaaaccaaagttatattgtggactatatatattaagaaatagtttaatcatgattcttctttataacctaacccaaaggcaatttaaattatctaagtatctttaattatgtatttttaacatattcatgaatggaaacttctaaattatgattatctttaaggaaaggtgttttgatttaaaatctttgagaagttttccttgtctttacaaaattgaactttagggtgttacaaatcctaccccccttaaaaaataatctcgtcctcgagaattgtaagaaaagggatgtattaagtttgtttaagaattagtttccccatatattaggaccaaaagtttgttcaa

SEQ ID NO: 64901 - DNA, 431 bp, Zea mays
  unsure (1)..(431): unsure at all n locations
ngacaacaccatttgacatcttacataagatttttgagatcaagaatatttagttcattcctcaacatgcaaaagcgggtcttatcaagtggcttagtgaaaatgtctgctaattgatcttccgatctcactccttttaaaatgatatctcctttagcaacatgatctctaaggaagtgatgatggatatcaatgtgcttagtgcgagagtgttgtacatgattattagcaattttaacagcactctcattatcacacaacaaaggtaccttttctagaactacgccatagtctagaagagtttgtttcatatataaaatttgtgtgcaacaagcacccgcggcaatgtattcctcttcggcggttgacaaggcaacactantttgctttttggatgtccatgaaacccgtgatctaccaagcaaatggca

SEQ ID NO: 64902 - DNA, 383 bp, Zea mays
  unsure (1)..(383): unsure at all n locations
ggatcttaagcacctgcagctgcagcttgtgaaattttcattccattattctagncggcgatgctagagccagcccatgttagtcttagcaattaagcaggtgtcgagttcaactctatcaaaatctaccaagtatagctgaccctctaacactccattaaatgctattgaatcatcacttcttctaaagacaagaacacctgtatcggtaaagagacagttgtaacccattttgcataattgcgaaactgaaagcaagttgtaatctaaagaatctacaagaaaaacattggaaatggagtggtcaggagatatagcaattttacccaatcctctgaccaaaccttgtattccatccccgaatgtgatagctcgttggggat

SEQ ID NO: 64903 - DNA, 421 bp, Zea mays
  unsure (1)..(421): unsure at all n locations
ntgngagagaagaaagggaagaggcagtaaggagcantcttatatatgtgaagaaaccagagaagcaaaggggttatttatagaagggaaaggcaaccgctcacttctaaccgtggtcactgaacagtcgcaagacattcaataagcactttcacccacccgaagacacgtcagacggcggacgccgtttcatgcaacactacacccattgggactccagtcaacagcgcgaaggatatgattacactagccgtcccatcgcattactactcagaggcaactggctaaaacactcagcgtaccaagccgtcccttgcccacacccattggggggggacgcccaggaattatcggtatatttttcatacggtcacatctgtgcagagcatgcagtgaaaacctcaagacaaaatgagatatc

SEQ ID NO: 64904 - DNA, 410 bp, Zea mays
gggtactcactcgaaattcagttcaacttatctctcacagacagatggttagactgagagaaccaaccagattcttgaggatatgttgacagcttgtgctttacgagacaagttaggatgggacaagaggctaccgtatgcagaattctcctacaacaatagctatcaggccagtctgaagatgtcaccatttgaagcactctatggaagaaattgcagaactccattgcattgggatcaacccgacgaaaggcaggtattcggtctggagattttgcttgaagctgaagagaatatcagaatggtccatgaaaatctgaaggcagcgcagtccagacagtgaagctatgttgacaccagaagaagggaactcagttttgaagtgggagactatgtctacttgaaagtgt

SEQ ID NO: 64905 - DNA, 438 bp, Zea mays
actcagcttctaaaggagaacacgtgataggtttaactaacgttcaattcgaaaaagatagaccttgtgcagcttgtcaagcaggtaaacaagtgggaggagcacatcacagcaagaatgtgatgaccacatcaagacccctggagctgctacatatggacctcttcggacccatcgcctatctaagcataggaggaagtaagtatggtttagttattgttgatgacttttcccgcttcacttgggtgttctttttgcaggataagtctgaaacccaagggatcctcaagcgctttctaaggagagctcaaaacgagtttgagctcaaggtgaagaagattatgagcgacaatgggtctgagttcaagaaccttcaagtggaggaataccttgaggaggaagggatcaagcacgagttcttcgcttcctacacaccac

SEQ ID NO: 64906 - DNA, 441 bp, Zea mays
  unsure (1)..(441): unsure at all n locations
agctntaccaaatggaggtgaagagtgtcttcctcaatttaccaatcaaggaagaggtctatgttgagcaacctcccggctttgaagatagtgggtatcctaatcacgtttataaactctctaaggcgctttatgggctcaagcaagccccaagagcatggtatgaatgccttagagattttcttatcactaatggattcaaagtcggaaaggccgatcctacactctttaccaaaacactngaaaatgatttgtttgtatgccaaatttatgttgatgatattatatttgggtctactaacgaatctacatgtgaagagtttattacgatcatgacacacaaattctatatgtctatgatgggggagttgaagtatttcttatgatttcaagtgaagcaactacaagagggcaccttcattatccaaacgaagtatactc

SEQ ID NO: 64907 - DNA, 440 bp, Zea mays
  unsure (1)..(440): unsure at all n locations
ggctcgnnggngttacttacattgtgggtatgcgttatgggtcggagagaagccagatcagtcgtccgttgccgaacgaccttgttgttcctatccaccttgaagttggccaggaattccgcaattgctttttggatcagctgctccttgtgcttctcgaactagagttgtttgtcagccggcaaggtctcccaagtcggctctatgatattgctgggggagacgtcagagctatcccttgaaccggccattgaggaccgatctgatgggtttatatgtgttgtcccctgcggagtcgctaaaaagtgtgttggtgcctttttgggcgccaatcactgcgtgagaaccgacagtggtgctctctgcacaggcgcanatggttcgcgaccagaggctggacggaacgtgacctgtggcagggctaaggttttctgtctgat

SEQ ID NO: 64908 - DNA, 418 bp, Zea mays
gcttgtgcagtatgttttagtcctatttgttttatattttgcaccatttcatttcaccatttttctttgcttcatgatatgactcccactctcttcggtctttgctaattatttgacccaaaagtgaccctatggtttgggtgaacttgtgatgttgttctttgtttcagctttctaatttctgttgtgattggtttggtatgtcattgatgcttccgttattaaacatgctgcttctattttatcttcatctatctgaatgatgtttccttttaggtcactcttattggtagtctagaaatgccaaaggatgacatatggcttgtcacagctatcctatctggtctcattgaataatgtgcgaagatataagtcacgttagtgatttaatttattatacccaacaaaaaatcacaac

SEQ ID NO: 64909 - DNA, 387 bp, Zea mays
  unsure (1)..(387): unsure at all n locations
actcagcttcttctcgcgctaagagattgtcttccttcgtgaaactgagattgtcttccttcttgaaactacagngngcgaacgttcactcatcaatgattagcacaaaataataataaatttattgtttaatttcaacttccaaatataacgcgatgaatgctgaaattaataaatgctcaaatcttgctcttgctattcaactcaatcttagattcctctcacctcaatccaacagtgcaaatatggcggactcgctccatgatgcctatgtgaggttcangctcaccatctcggggagcaacatcacctgctccttctgcgggaacaccaagattaaagaaggaaggaggcaaaccgaaggagtatactgactcgtcgtggaca

SEQ ID NO: 64910 - DNA, 430 bp, Zea mays
  unsure (1)..(430): unsure at all n locations
agcttatggagcttctggacaactaattctctcacctttgtgtgcaccaaagtaaacgtgttctagttgccctcacaaccaccgaaggatcaacgctgtgaaaccaatctcaaatcaagcttttgtaatgtcggagtagcatattcacatgatgtacaaaaggcttaccaaggtcggcttcttcatccaatccctcgtcgcagcaaccgtcctcgctccctgcctccctcagttccgctcttcgtctttgagggccattgcccgtgcgtcacccgagcccgtgcccggaatctttgtagaagcgtctggaggagagtntatttanattgtataatntcntcgcgcggctttgccacttttgtactccgcagccgcgcatcgccagtatggtattctcgagcttacattcttgccagacaaggacagttat

SEQ ID NO: 64911 - DNA, 328 bp, Zea mays
  unsure (1)..(328): unsure at all n locations
tgagaaagagaactcctcacttggatcccctttcaggctggtctcaagtctctttngaaagtaacggaggtagatccaactcatatacatgccaaaccacagaactgggagggtagacataaagtcgtatatgaagatgcttccaagaatggatatcaatgcaacaagagatggaatccactgtatacccagaaaaaacaagatcattagcgaacattaatggtaggacgaaaaacaagattactttcattgatattcgaagagaccgacctttgccttaatttttagcacaaaaagattaagctcttgatcaggtaaaagctgttta

SEQ ID NO: 64912 - DNA, 437 bp, Zea mays
  unsure (1)..(437): unsure at all n locations
agcttntaaagggagaacacgnaatatgtctaacaaatgttactttcgaaaaagatagaccttgtgcaacttatcaagcaggtaaacaggtggggagctctcttcataccgaaaatgtgatgactacttcaagacctttggagttacttcatatggacctcttcggacccgtcgcctacctaagcttaggaggaagtaagtatggtcttgtntatagtgatgatttttctcgcttcacttgggtattctttttgcaggataaatctaaaacccaagggaccctcaagcgcttcctaaggagggctcaaaatgagtttgagctcaaggtgaagaagataaggagcgacaatgggttcgagttcaagaaccttcatgtggaggagtatcttgaggaggaaggaatncagcacgagttcttcgctcctacacaccacaac

SEQ ID NO: 64913 - DNA, 464 bp, Zea mays
  unsure (1)..(464): unsure at all n locations
tgaaccgagagcccgcgtcaccggagaagccaaatcgcgctcaccggagttcaagaactcgccggcgcgcgtggaccgggtaaaccccttcaccatttcccgattcattgcgcgcatagcctctgtgtcaccccgtgaagctcctcgtgcaccctaattgacctatgccgccgtggtttggccggagcaggcgtcaccgtcgatccccgccgcctgtgtttgtggccaggggagctccgaccacctctgacgccgacccgcacctcgacgtgaccgtcgcgacctcctgaacatcaccgaccacctcgccggacctccctcgccgccggtaagccgcgccaccctttctttttccgcggctactgtntcaattaacggagggactgcgggtgagagggagaagaaatccaggggttaagtgaagagtcagagactcaagtgaatagtggcgtaagggtagatct

SEQ ID NO: 64914 - DNA, 385 bp, Zea mays
  unsure (1)..(385): unsure at all n locations
ctttgccgatcaagggccaatatcatgtcatatttccaagagatcgaagaggatgaaacaaataagggcgatcaacaccctgtgctttcagaaatatttgattcacagttcgttaatttacttactaagcttgaggctgatattagagaaaacataatggatatatttagtcggacaaaaactgcaacagcagtccttcctactgaattggagcanaagaacggggaggtcgatgaagagtatatcaagcgactaaagtcatttgtagaaaaacagtgcaatgagatgcangtatgtttccatttgttgctgtctgaaaaatatctattgaattacctcaagactgcatagctaaaaaacgatgttttgtgctttacaatgaaaa

SEQ ID NO: 64915 - DNA, 301 bp, Zea mays
  unsure (1)..(301): unsure at all n locations
atactgtttagcaaancttcaacggagattaccgaagggaggggaaaatcgccgagctgcgtattcataatattattctccccaaaggctcctgcataatctctcagtctgcatattgctaacgggacgggttctgaagctatgatcaccatattcaacacgagcagaatgggctctagtgacgcatagaaagtactgatagtgtcctgccttttcaccttcccaaagaagcctcgcaagctgaccaatagctcgaacaacagcttctataccccgtactttctacttgacagccttgtca

SEQ ID NO: 64916 - DNA, 420 bp, Zea mays
agcttgtgaaggttctttatccccacatgtgctaagctgcgatgccacagccagcccatgctagtcttagctattaagcatgcatctagaccggcctcttcttttgcaaaatcaactaaataaagtttgccgtctaatacacccttaaaagctaatgaaccatcgcttcttctaaagacagacacatctatatttgtaaatagacaattatatcccatatgacataattgactcacagatagcagattgtatccaagactctctactaaaaatacattagagatagaatgctcattagaaatcgcaattttacctaaaccttttaccttgccttgattcccatcaccgaatacaattgaatcttgggaatctttattctcgacgtaggaggtgaacatcttcttctcccccgtcatatgg

SEQ ID NO: 64917 - DNA, 449 bp, Zea mays
  unsure (1)..(449): unsure at all n locations
tctaagggagaancacatttgggactaacaaatgttcattttgagaaagacaggatttgtagcgcatgtcaggcagggaagcaagttgggattcatcatccacacaagaacattatgacgaccgacaggccactcgagctcctacacatggatctattcggcccgatagcttacataagcatcggcgggagtaagtactgtctagttattgtggatgattattcgcgcttaacttgggtattctttttgcaggaaaaatctcatacccaagaaaccttaaagggattcttgagacgggctcaaaacgagttcggcttaaggatcaagaaaattagaagcgacaacgggagggagttcaagaactcccaaattgaaagcttccttgaggaggagggaatcaagcatgagttctcttcttcctacaccccacaacaaaatggtgtagtgga

SEQ ID NO: 64918 - DNA, 424 bp, Zea mays
agcttgacaatgaggatttggcgctctttatcaagagcttccgccaaatcctcaaacaaaggagggggaaagacttcaagtcccgctccaagaaggtttgctacaaatgtggtaagcccggtcattttattgctaaatgtcctatatctagtgacagtgatcgaggcgacgacaagaaggggagaagaaaggaaaagaaaaggtactacaagaagaagggcggcgatgcccatgtttgtcgggaatgggattccgacgaaagctcaagcgactcctccgacgacgaggacgccgccaacatcgccgtcaccaagggactcctcttccccaacgtcggccacaagtgccttatggcagaggacgggcaaaagaagaaggtaaatccaactcctccactaaatatgaatcttctagtgatgataat

SEQ ID NO: 64919 - DNA, 428 bp, Zea mays
ttttgaagaaaattgaaggatagctagggatttattgttatattcccaaataattggttcactcatgtacttagctagcgctacgaggcctaacatctcgtttgctgtgagcaaacttagtcgggttgtttcaaatccgggagatgatcactggcgttctcctgagagagttatgcgctatctaaaaggtactatgagtttaggcatccattataccgggtacccgacagtactggagggctattgtgatgcaaattggatatctgatgctgatgagatatatgccacaagtggatatgtgttttcacttggaggtggcactggttcatggaagtcttgcaagcagaccattctaacgaggtcgactatagaagcataactcacaacattagatacttgttcagttgagactgagtggcttcatgaac

SEQ ID NO: 64920 - DNA, 409 bp, Zea mays
agcttgcatagggattattgtacaatattttgtgcacaatacaacactaagtgctaagaccaacatacctatttctttaaatagtttgattacaaatcaactctacagtcaagcaaggcatcatgagctggtatataactagcagagtaacaagcttgcatgcagctggtatctagtaagttaatgtctattgaataacaggaacatacaaaatatctatgcatgcaactatgcaagcagactggatggaaatatgcatgcacttgcacatgaagatccttggaacatgacgcacgacaaggtgcgactggggcagggacctctatggtcctaatgtaactcgccagtgtcatacgagacaagttacaaagcgtttaataatgatagatatacattttcgactctataa

SEQ ID NO: 64921 - DNA, 401 bp, Zea mays
  unsure (1)..(401): unsure at all n locations
agcttggcatacaactggctatctcgttttctctgaagnaccttccgcaaatgttcctcatgctcttgctcattctangaatatatgagaatatcatcaatgaacaccactacgaacttgttgaggtagtccatgaacacactgttcatcaggtacatgaagtaagctggcgcgttcgtcaatccgaatgacataaccatgaactcatattgcccatacttggtgatgaatgtggtcttcggtatgtctgaaggtcggattctgagctgatggtaacctgacctcagacctatctttgagaacacactggctcctctcaactgatcaaataggtcttcaattcgaggcaggggtacttgttcttgacagtgacttcattcaaagcttgtaatcgatgcaca

SEQ ID NO: 64922 - DNA, 413 bp, Zea mays
  unsure (1)..(413): unsure at all n locations
ggaacccaagcacagaggaacggccatggctgagaggggctcgagcgtgctggctgtgcaggagctcgacaggagagaggagcgcagcgctgggagccagacgccgtgggaaccgctcggcaaactccatgccggggccagggacgtgcgcagaccgagcagagcaggggctggatatttgaagacccaggggcggcgccgtagaaaagatcaacaagggagaaaggatagcgacggaaggaggagaaaatctcacgacagggataggatcggctggtaggttcttctttntttaatttttttcctttctttnttttataaagagaatcgctgatattttggaatcaagaattttagtgatataaaatgggtcgacagtactggtgacacggtttgattcgattcgaaattta

SEQ ID NO: 64923 - DNA, 392 bp, Zea mays
  unsure (1)..(392): unsure at all n locations
agctttaccaaatggacgtgaagagtgtcttcctcaatggaccaatcaaggaagaggtctatgttgagcaacctcccggctttgaagacagtgagtaccctaaccatgtctataggctctctaaggcgctntatgggctcaagcaagccccaagagcatggtatgaacgcctaagagatttccttattgctaatggcttcaaagtcggcaaggccgatcctactttatttactaagactcttgcaaatgaattgttcgtatgccaaatttatgttgatgatattatatttgggtctactaacgaatctacatgtgaggaatttagtaggatcatgacacagaaattcgagatgtcaatgatgggggagttgaatatttcttaggattcaagt

SEQ ID NO: 64924 - DNA, 417 bp, Zea mays
  unsure (1)..(417): unsure at all n locations
tganatgggagaaactgcagccagtgttaaaacccataataaggatgtttctcaagcaataaatgaagcaatcaacatgaacaaggaaaaaggtaaagattcaattagtcatgtcgtttgcactaatcatctctctaagtcatccaagagcaaaaagagaagaggaaaaagaaggtgcttcaagtgcaatgaattangtcacttcattgcatcttgtccacataaagacaaggatgaagggataaggagatgttttggatgcaatgataaggaccatatgatcacttcatgtccgctcatgaagaatcaaagaagtgcaccctccaagaagaccctcactaagagaaaagacaaacaacaagtgtcatgtcaggttaagcgacgcttctgctacatgtggggtgagcatggtcatct

SEQ ID NO: 64925 - DNA, 415 bp, Zea mays
  unsure (1)..(415): unsure at all n locations
agctttngacattactatttatttactttatggggatatacttagtaaaggggtctatgactttcttcatctttttggagaaacacatatgaatcttaaactagaaatttgggtgttacaaatcctaccccccttaaaaataatctcgtcctcgagatttgcaagaaaggggatacaagtctatcttgtagtctagatttcattttctaattagttctagtacgaaaagtttttttttatagtctatatcaaattatcaggtgattaggaaggcatatgtatggccaccttattatgtatgataaaagatgtcctagaaatatgagtaggtgttggtaagaaagagtanggtaagggaaagactccgtcatgcatagcgaatcttgagtcctttggcgctccaacttgatctttg

SEQ ID NO: 64926 - DNA, 378 bp, Zea mays
taatgagttcttggcactgactcatggaacccgcaccgtgctacaatatgtcaaggccttcaacgacctgtgccaatatgcgggttatcatgcagattcatatgaaaagaagagggaccttttcgaaggggtctcaactccaagctccgtgagcgcctcaacattgttcgtgttgatagctacaatgaactggtcaaccttgccatatcacaggaagactgcatcgtatcccaccgggcagagaagaagaggaaggcaccaatgtcagggttctcagctccacctcagaggtttcagaatgtctccaacaatcagataggggattccatcagcaagtagggagatgggtcatcaggccgccacagcagcagcagcaag

SEQ ID NO: 64927 - DNA, 423 bp, Zea mays
atgcaagcttgtgaaggttcttcatccccacatgtgctaagcggcgatgccacagccagcccatgctagtcttagctattaagcatgcatctagaccggcctcttcttttgcaaaatctactaaataaagtttgccgtctagtacacccttaaaagctagtgaaccatcacatcttctaaagacagacacatcttcatttgtaaataaacaattatatcccatttgacataattgactgacagatagcaaattatatccaagactctccactaagaatacatttgatatagaatgctcattagaaattgcaattttacctagcccttttaccttgccttgattcccatcaccgaatataattgaatcttgggaatccttaattttgacgtaggaggtgaacatcttcttctcccccgtcatat

SEQ ID NO: 64928 - DNA, 471 bp, Zea mays
actcagcttcttagggagaacatgtgataggtttaactaacgtgctattcgaaaaagatagaccttgtgcagctggtcaagcaggtaaacaagtgggaggagcgcatcacagcaagaatgtgatgaccacttcaagacccctggagctgctgcatatggacctcttcggacctgtcgcctatctgagcataggagggagtaagtatggtctagttattgttgatgacttttcccgcttcacttgggtgttctttttgcaggataagtctgaaacccaaggaaccctcaagcgcttcctcatgagagctcaaaatgagtttgagctcaaagtgaagaagataaggagcgacaatgggtccgagttcaagaaccttcaagtggaggagttccttgaggaggaagggatcaagcacgaggtctccgctctctacacactccagcaaaatggtgtggtagagaggaaaacatgac

SEQ ID NO: 64929 - DNA, 385 bp, Zea mays
  unsure (1)..(385): unsure at all n locations
agctntggccccacctgcaggctcgcatcctcccttgttgtgggcccgggagccactgtcggtaccctgaaactagggtaccccttactactgtgtaaagagcagtacccacaccgctatctttagtcgtgtggtaaatgagttgtatgtgggaccaagccatgactcgccccaacctcggccgactactctgggccagcaacagtgcctgaccccaccacataggcgggtccggngccgccacatgtccagagaaaatgatatacttcaaggcatcaacagtgagtccggacccctggatatacagtccagacctccaagtgtggttcaggactcccacgtgtatagaccagaaccctggaatgggatccggacccccccgtat

SEQ ID NO: 64930 - DNA, 428 bp, Zea mays
ctagagatagagtcattataagcagatgattcagaggtcaatagttcattccttttagtttctagagcaagagatttgtgaacactaatgaacttatcatgttcctcatacaaaatattttcttccttttatagcaatctatccttttcattaagagcatcaattaattcatttattttatctaccttagatctatctaatactttaaataaatcactataatctatttcatcgatagaagattcctcatcgctagaagaagaatatttaggagtatctcgaatacataccttcttctcctaagccataaggcacatgtggcgtttgttggggaagaaagaaaacttgttgaaagccgacgcacctagttcttcatcatctgagtccgatgaggaacagtcagagtcccacctctttccgaagtgcgc

SEQ ID NO: 64931 - DNA, 406 bp, Zea mays
gcatgcagctatatctaacattggaaaacttttgtagggtgtgaaattttatcccaactaaatatgtcaggaatcaaccgaagaatccagaccttgttctcttctctagtgaaagaactagttggcgccatgttgggttatatggggcctgttgggctcaaagttgagtttaacctcaataagcgtttgagttttgcccttctgctctcttttttctccctctctgtcttcgtgtgagtgtcttgtaaatgtttctcctctctaatatattggagcggcagatcttttgcccctctcattctaaaaaaaaagaattccaattctctaaaatgaacggatccaaacgctccggtagattattttatggatgattgcttggcgtttctgatcatcgcctagagggggg

SEQ ID NO: 64932 - DNA, 330 bp, Zea mays
  unsure (1)..(330): unsure at all n locations
gggatcgacaattagtctatagcgctgtccgatgcgaggtcatgtccctnctcgattgcttctccggctaccaccagatatacatgaaggaagaagacaaggctagcaccagctttataacacccttcggcacatattgcttcattagaatgcccgagggactcaagaacgccgggtccaccttctcccggcttaccaaaactgtgcttcaggggcaagttggcagaaacatattcacatatgtggacgacatcgtcgtcgccagcaagagcaaggaggaccacctcgccgacctcgccgaaacattcgcgaacatgcgagacgcacaac

SEQ ID NO: 64933 - DNA, 422 bp, Zea mays
  unsure (1)..(422): unsure at all n locations
agcttaaagccatggtaagtagcatatgctaataatatacgaattgactcaagcctagctacgggtgcataggtttcaccgaaatccaaaccttcgacttgtgaataccccttggccacgagtcgagctttgttccttgtcaccacaccatgctcgtcttgtttgttgcggaagacccacttggttcctacaacattttggttaggacgtggaactaaatgccatacctcattcctcgtgaagttgttgagctcctcttgcatcgccatcacccagtccgaatcttggagtgcttcctctaccctgtgtggctcaatagaggaaacaaaagagtaatgctcacaaaaatatgcaacacgagatcgaggggtacccccttatgaatgtcgccaagatggtgcnacggggtgatctcgttggat

SEQ ID NO: 64934 - DNA, 457 bp, Zea mays
  unsure (1)..(457): unsure at all n locations
actaagcttctaagggagagncacatttgngactaacaaatgttcactttgagaaagacaggatttgtagcgcatgccaagcaggaaagcaagttgggactcatcatccacacaagaacattatgacaagtgacaggccactggagctccttcacatggatctattcggcccgatcgcttacataagcatcggcgggagtaagtactggctagttattatggatgattattctcgcttcacttgggtgttctttttgcaggacaaatctcatacccaagagaccttaaagggattcttgagacgggctcaaaatgagttcggcttaaggatcaagaaaattagaagcgacaacgggacggagttcaagaactctcaaatcgaaggctttcttgaggaggagggcatcaagcatgagttctcttcttcctacacgccacaacanaatggtgtagtgga

SEQ ID NO: 64935 - DNA, 321 bp, Zea mays
  unsure (1)..(321): unsure at all n locations
ggcggctctggcgggtcgcggggaggtcgccggaactattggcgagctcgggggagttaagcgtggtacggaggaggcaaccgngaaggcagccgggcactgggacgagctttatatccgtggcgcgggcgtggtcacnggcggccgcgggcgcgcggtggttcgcgcacaggcgtgctctgagcgcacccccgagtgtcagcccgcgtcgaacacatgggagctagcttctgccatggttcaacggcggatttgagcaccttagcgtgcgtatcttggcaaaccactgtgtacgggctcttccctgctcatatactacct

SEQ ID NO: 64936 - DNA, 476 bp, Zea mays
  unsure (1)..(476): unsure at all n locations
tctnctggacaagcgctgcacttaccgctgagtgcgaagctgccacatataataacaaaggagcccctggcattggtggagtcaatgttgttagatctattaaatactgttntagctcttcaaaggccttctgttggattggtccccattgaaagacttcggctgacttcagtacttcgaagaatggtaagtttctctctgctgatctggatatgaatctattgagagatgccaatcttcctgtcaatctttgagcccccttctttgtagttggtggctccatccgaagtatagcttcaattttacttggattagcttcaatcccctttgttgaaaccaagcatccaagaaatttccccttcttcactccgaagacacattnttctggatttaacttcaagccagcttgcctaanactggcgaaggtctcctgcagatcagcaatatgatcttnctgcttcgtgcttttgacaatg

SEQ ID NO: 64937 - DNA, 417 bp, Zea mays
gcttacggtctcttgttgaagctattctatggctcggatcgagcggaggtgggcgggaatggtttggccatgcgggcgccctctggcggctttggcgggtcgcggggaggtcgccagagctgcgggctggctcgggaaggcttggcgcggtgcggagggggcaactgggaagatggtcgtgcatgagggtgggctttatagccactcgcgggcacggcacaggtgtgggcacgggggcggccgaaggcgcgtgggggtgcgcgtgcgggcatgctctgggcgtgttcctgagtgcatgcccacgtcgaacacgtggtggtttacttctgctagtgttcaacggcctgtttggtccccttagcgtgcagatctcagcaaaaataccgtgtacggtctcttctatgcaccatatgctat

SEQ ID NO: 64938 - DNA, 327 bp, Zea mays
tcgaacttcactaacgtttgatggccgcttccatttggatactgattctactttggatgggtccacttctattccttctacaattaggatatgtgcgataatggcaaggcgactgggcgggcggtggccggcagcgaacgcgtcgatagcctgatcacgggcgaggggagagtggctgacaagcggggcccgcttgccagacagagagtggtcgtgagggagcgagagcgggcgtggctgatgggtggggtcgggtcgtcagcgaggagaggggagtggggcacgagaggtgggcctcgtgggccatgtgcggcgcgggagagaggg

SEQ ID NO: 64939 - DNA, 427 bp, Zea mays
  unsure (1)..(427): unsure at all n locations
agctatcggtccgaagcagctccagcttggtcgntgaactaaaccatcagctcaaaaagtggaagtgagttcaccggacggggggcgccaatgttggagacttgctttcaaatgctatgaattaaaagcaaggcaacataaaatgttaaataataacgcccttcatccttaaaacattattcccttcgggataatggattttggacgaaggttgataagagtataattacgaagctgaaccttcgtaatataatttcaataggcatttataagataatataaaaaggtataatatgagtaaataaatcatagactaattatattatatttatttactatattgaatcatcaaatacaataatacctatgccttgacaaggttgaattccgagagatgcgatngcaattatcagaatccgtgaacagt

SEQ ID NO: 64940 - DNA, 312 bp, Zea mays
  unsure (1)..(312): unsure at all n locations
acaacgaggagaaggcgctcgncatcaagagcttccgttcaattctcaacaaaggagggggaaagactacaagtcccgctcctagaaggtttgctacaaatgtggtaagcccggccattttattgctaaatgtcctatatcaagtgacagtgaccgaggcgatgacaagaaggggagaagaaaggagaagaagacgtactacaagaagaagggcggcgatgcccatgtttgtcgggagtgggactccgacgaaagctctagcgactcctccgatgacgaggacgccgccaacatcgtcgtcaccaatggact

SEQ ID NO: 64941 - DNA, 281 bp, Zea mays
agcttatgaaaccttcattcttcttcgttcgtaaaccccaaaagagaaatatgccatggagccatttatacctcgtttggtgaataagtgatcaacacaccattttagactaactttattaatgtgagtatgaacacatgttcataaaaagcaatttgaagaaaataagtccaaaagggcttcaagagaggtccaaatatgctacttgcaccctaagatatgttgcatatgtccattacaatgaatataggacttctgtttggtctctaatctcttttatt

SEQ ID NO: 64942 - DNA, 398 bp, Zea mays
  unsure (1)..(398): unsure at all n locations
acagccgtcatcccgtgccggcttcttgntgtcgacngcgccgccttgggcgcctncgcgggcaccaccctcagcttgtcctcgtgccccggcctaggcgccttcgcgcgccttgtgcggcttgccgcgtttgcggccccatgtcgaggaggactcccccttcttcttgtcaccctggcaggcctcccactgctcccgattgagatgtagcttcccgccgatggtgataggcgcagagagggcctgtggttcgtcgtcgtcgaccaccttgagacgaccactcgcttcttcaatcgtcatcgtggagaggtctagcagagactcgattgagcgagcgatcttgcttgtacttctcgggatgcaacgaaagagctactcaacggctctcttctcatcgt

SEQ ID NO: 64943 - DNA, 406 bp, Zea mays
  unsure (1)..(406): unsure at all n locations
agcttacaaggctntgtgtgagatattttcttcaccagagtggattgagaagtcaaacaggaatcgacatatgcagcgccatcatcaggacgaggacgaggatgaagtcgtanttaaccatacctatggggctgatggacacattcgattggttaagcgaatggtgagtatgtagtattctgttgtactcagaaatgaaaccgatttaaactcatatatttgcaggaggctcanactggagttgtcccgagcccaatcgatgtttataggagagggcatagagcgaaaaacagtgaaatctccaatgagctatgtagtcaaacggctgttgagcgtatggtagatgttggtaggattaatgttttcttgtcgtatagctataaaatacatgtttgctgaaccttca

SEQ ID NO: 64944 - DNA, 363 bp, Zea mays
tggtcgtcgtcgagcccttggtgagcctccatggcgagcgcgacgaggtctatgcatggccactacgggagagacgatccatcgatctcttgtggaaataaaaacaaattgttacatgtgtaacatgtggcaatggtgggtaaatacccttcaaatctacgactacatacaacaaatgaatactaggagcatctcttttgttgttctaccaaaatggtggagttgccccccaactccacgtttttttgagcagagttgctagagttcagcgtggttggtaaccaaatcatggagcgaagtatcataacatggagtgggagcgacggcgacgacctcccttatgaccgagcagtggcagtgaca

SEQ ID NO: 64945 - DNA, 390 bp, Zea mays
agcttgccttcgcttctgtctatcacccgcagtccaatggggtcgcggagcgcgccaatggaaaaatcttcacagctgtcaagaagatgctcctcgatgaaaaaaaggcagatggaccgatttgttaccggagacagtctgggcactaaacacaactgagtgcagggcgactgggttcacccctttccgccttctatacgggtcggaggccatgaccccgcaagaaataaagcatgggtccccgcgtacagttccgtcagccgtccccgacgtggacgagccaacttcaaaagatctcattgacggagagcgggtcttcgccctacaggccctaaacaaataccaagcccagaccaaagcatggcgcgatcacgcagtcattccgaggga

SEQ ID NO: 64946 - DNA, 448 bp, Zea mays
  unsure (1)..(448): unsure at all n locations
cagtttgttgccgccagtttagcggctgacaacttggttttattattgattagatactacgtacgctttcaacgaaaagaccagtttgagagagttttatgacacggttactaagatttgtcatgtcggcttttatatgtggtagccacaacaacaaattcttcggatgaaatcctacgaaaatatctctatctttnttttctccgtaactaacctgtaaagttaccaaatcttctgatgtgttatatatagtactaaatacaaatagaactcatataaaacctcctgctgaaactgatgtaatgcaattctctgttaggctgcgctcactgaaaacacatgttgtatactttctctttccccccctaacaaatgtgtttaggcatgactgcaggaaaaagttattaatcaaagatttttttttcttgatattactctcttctttcta

SEQ ID NO: 64947 - DNA, 381 bp, Zea mays
agcttcaccaatgtgggcccttattcatatgaagacaacttcatacgaggcgatcccgagggtgttatcgagtggatcaacggagaagccgaagcttttgaggaaatcctgagtgaccgtggggatgtctgtgcattttctggtgcgaaaggagtttcaactatcttggagaaggcgggttgcaatcatgttaaaaccctagctcaggccgaagctgccttctccgtggaggacacgaaggatccctcagccaaagcaagttcattgggtggcaaaattttcactgatatttgggaaaatggcgaccaagaaatggcccatgaaataatgaagaagagcgaaaaagatatccacgactctcgagaacagcaaagaaagctg

SEQ ID NO: 64948 - DNA, 377 bp, Zea mays
  unsure (1)..(377): unsure at all n locations
ctgtgaagattctttatcccaacatgggctagtcggtgatttcagagccaacccatattagtcttagcaattaagcaagtatcgagttcagctctattaaaatcaactaagtatagctgaccctctaatactcccttaaatgctactgaatcatcacttcttctaaagacagtaacacctatatccgtanaaagacagttgtaacccatttttgcataattgagatacaaaaagcaaattgtaatataaagaatctacaagaaaaacattggaaatggaatgatcaggtgatatagcaattttaccaagtcctttgaccaaaccttgatttccatccccgaatgtgatagctctttggggatcatcngttttctcgt

SEQ ID NO: 64949 - DNA, 205 bp, Zea mays
acctaccggagtatcaggagtcgccgacgcgcgaaccggtgagccgtgaagtcagaaagcgtgccaaaacgggcaacactgagggggaaggtgatagcacaacactggtgggtgcggatgttggtgcggaccctcggatgatggccgcccagttggacgtatgaggagagatctttctaacacctaaaatctgccgtgggtcttg

SEQ ID NO: 64950 - DNA, 441 bp, Zea mays
cgcttggggcctttctttgtcctggagtcactcttgaactgtaaggagacagcaatgattatcttggtaagggattatctggtgggaaaattgttgtgtacccaccaaggaacagttcatttaatccagaggacaatattgtcattggtaatgtggctttatatggtgctaccatgggagaggcatatttcaatggtatggcagcagaaaagttttgtgtccgcaactcaggtgctcaagcagtgggtgaaggaattggagatcatggatgtgagtacatgactggaggcactgtggttatccttgggaaaactgggcggaactttgctgctggcatgagtggaggcattgcctatgtttatgatgttgatgggaaaatcagtgctcgctgcaacaatgagttaggtgatctatatcatgtggaggaagaggatgacatca

SEQ ID NO: 64951 - DNA, 430 bp, Zea mays
ttaatcccaaaaaatgtgtctttgtgtgtccagcaggaaagcttctcttatttattgtcagccaccggggaattgaagctaatccggataagattgaagctatcatgaaaatggaggcaccacgatcacaaaagaaagttcagagacttaccgaatgtatggcagccctgagcagattcatatccagactgggagaaaaaggctcaccattttataagctactcaagaaggtggataattttcagtggacttcagaagcacaggaagccctatatgcactgaaaaaattcttgacgacaccaccagtgctgaagccgccacggcgagccacgtcaactcaaccagctgaagatttgctgttgtatatctcttgcacgactcacgtggtaagcaccacgttggtagtcgagcgagcagaaaaggacatgcc

SEQ ID NO: 64952 - DNA, 433 bp, Zea mays
agcacgcgaatttgcgaaagagcaaggagatattatgttcgtgcatcgattgtgataataagatagctgggagagatacaggagtaatccaatcacatctgctaaaaagagggtttaaaaacaattacacgatatggtcagaacatggtgagttggatccgtgtgaagtgcctggtaatgacgagagagttgtcggaattttagatcttaaagttgatggtaaagtggataatgtggatgctaatcaagattttgaagaatttgattgcgaagagatgttgcgccatatggaaccagaaatgttgagttctgtgggatcgcagaaagggctatctataatggagggactggaaagtgcttcacaagaacctttatatgatgaatcaaagggttgtgacaaagaagttactacactgcgtacagttctagaact

SEQ ID NO: 64953 - DNA, 409 bp, Zea mays
  unsure (1)..(409): unsure at all n locations
agcttgtgaatattcttcatcccaacatgtgctagtctgcggtgccagagccaacccatgtttgtcttaacaactaagcaagtgtcgagttcagctctatcaaagtctaccaagtatagctgaccctctaacactcccttaaatgctacaaaatcatcacttcttctaaagacagtaacacctacatccgtaaaaagacagttgtagcccattttacatgattgcgaaactgaaagcaagntgtaatccaaagaatctacaagaaaaacattggaaatggaatggtcaggagatatagcaattttacccaatcctttgaccaaaccttgattcccatcctcgaatgtgatagctcgttgggggatctttggttttctcgtaggaggagaacatcttcttctcccctgtc

SEQ ID NO: 64954 - DNA, 473 bp, Zea mays
  unsure (1)..(473): unsure at all n locations
actccaaactcagctgaagagcgggactgtctgtcaactcactgtggagcagaatggaatgactctataaggagattgagcttctgaaggaaaatagaagatcaagatttgctaccccagctacagaggaatctctagctacagaagaacctaccccagctacagaggaatgagttccctgacagtcagaggtatgtggattagtatagaagtagtctcttgtagttaagtgaacaaataaattgtctagactctagcgaaagatgcacattacatgtgtatcagttggatgctaaattatttttttgaactttgaagccttttgccactacttttgagcaatgctctcctgtgcctngaggaaaaaactacttttgagcactttcttaaactacacgaaaaccctatgacagaaacggaagaacttgctntaccatgcagtggtcactacttgccttcattagtataaacat

SEQ ID NO: 64955 - DNA, 388 bp, Zea mays
catgcaagcttgtgaagattcttcattccaacattggctagtctgcgatgccataaccaacccatattaatcttagcaattaaacaagtgttgagttcagctgtgttctcattaaaatcaactaaatatagctgaccctctaacactcccttaaatgctattgaatcgtcacttcttctaaagacagtaacacctacatctgtaaaaagacagttgtagcccattctgcataattgagaaacagagagcaaattgtaatctaaagaatcttcaataaaacattggaaatagaatggtcaaaggatatagcaattttaccaagtcctttgaccaaaccttgatttccatccccgaatgtgatagctccgtggggatccttctttttctc

SEQ ID NO: 64956 - DNA, 438 bp, Zea mays
tcgtcttgaccatgctcttgtatacccgcaacctgattccgaagatatctgctcgcatacttggaaaacattatcaaatcatgtttttgaggaccttcggaagccgaaggcccccaaaagtgcccgatctaatcctggccacgcgtatacgatctaagggctcggattttatttggcgcacagggatactttttttgatctaaaccacccactggcaatcggacggccaggggcctccttcttcctacgaacccgagctgggcggtggcgccatgcccccaagcggccgagctcgtcggagcgcaggcaacacaaggcccaggcgcactaaatcaagtccggctgggtgctacgcgtatagggtgtgagggcgagctcgctggtgccacaaatcccacgaatcaaccatggccagagcctacccacgacagcgcacca

SEQ ID NO: 64957 - DNA, 433 bp, Zea mays
agctttaatgcacaaaattctccccctttgacatcaatttttttaaccatattcaagcacgaacataggatgatgtcaagggacaacaaggtatttattatataaaatacaacacactaacattactcccccttacacattaaacatatgcaacacaagcattgaaggaaaattaagatacaaatacgcaaaaggtcaacacttccttttgtacctttaccctgttgtgatgtactttccattttgagagtttaatctctaggaagctccttcacacttgtgcctgatcctttatcctgaccttgtcttgttgagcttaagataccaaatacttgacttatggaggtacccaagtcctgattcttccatttcttgctcatcttcccttttccaccttgagactatacaagatcactcaagaaacaattagtct

SEQ ID NO: 64958 - DNA, 415 bp, Zea mays
  unsure (1)..(415): unsure at all n locations
gcttgaaagcatgtattggcgtatttttacactttttgacaagncgaccagctcgtcgntccccaaccatacctcctgttacaagaatcatatttactgatggctcacatcccagacatgatcaaagagccgcataatagctagattcagctcacctgaacgcagatgatggaggagtgatcatcgctaatgcggncaataatcgtctcgttgcggctgaaccagtaggccctgtactggctctccctgcaattatgcttccaatgccaaacaccgaccgtcaatatactactagccagaattttctaccagaccaaaactaactaaatagattccccgtcgaaagggaaagcagagcaagatccaacccacctcggtgtccatgcgcttggagatcggcgccaggatgttaaac

SEQ ID NO: 64959 - DNA, 310 bp, Zea mays
gacagacagcaacagcgcggtaataaacatatacaaaatatgcaccttataattcgagtgcaccaagctatcggtgatatgttgttttctataactgctaaagccgctaattatcttcaggaagacgaagcaactctgacaaagtgttaactatttttgctccggcgcaatcacgaatacatacctagaacactttgtctacgccgctaaaaagtatggacctacgttgatagccacccgctatagcagattcctccaattcatatatatcttcttcagtcggttcctggccacctaggtgcctcaagtc

SEQ ID NO: 64960 - DNA, 462 bp, Zea mays
tgaaccgagggcccgcgtcaccggagaagtcaaatcgcgctcaccggagttcaagaactcgccggcgcacgtggaccgggtaaaccccttcaccatttcccgattcattgagcacatggcctctgtgtcatcccgtgaagctcctcgtgcccattaattgaactctcccgccgtggtttggccggagcaggtgccgccgtcgatccccgccgcctgtgttcgtggccaggggagctccgaccacctctgacgccgacccgcacatcgacgtgaccgtcgcgacctcctgaacatcaccgaccacctcgccggacctccctcaccgccggtaagccgcgccacccttttctttcccgcggctactggttcagttaacggagggactgcgggtgagagggacaggaatccagcgggttaagtgataagtcagagactcaagtgaatagtggcgtaagggtagat

SEQ ID NO: 64961 - DNA, 407 bp, Zea mays
ctttaaccccgaaacgcgattctccctttattggtgaaacctttaagtagacatagtcgtctaccagaaagcataagggttgtcgtcgtcggtctgcataacttcttttgtcgagtctgagctttcttcatattatgaataattctctgaaccttttcttcgacctctttcaccatatcaggcctaaagaagtatctttctcaggttcagaccaatttagcggagttcgacatcgtcgcccatataaagcttcgaaaggtgccatcttgatactttcttgataactgttattgtatgaaaattccgctaagggcaaacattcatcccatctttgtgagaagtgcaaaacacatgcccgcagcatatcttccagtatttcattgaccctctcagtctgccactgtttg

SEQ ID NO: 64962 - DNA, 413 bp, Zea mays
gtgcttcgcgccttaacacattgccattcaatgaagtattgtcacagtattgcttcgtaatcgaactttctgttgatgcgataagatgtatgatgcgatgctatgccaaatgatgcaatgatatgatatgatgcaatatgatgatgctttaacacccacacatacgcccacactggttcacggaagactctgcattcccttaggaacgactgttgagcttcttcaccttctatttcggcgggataagttctgcatccccttatgaacgacttttgaaccttttcgccttgtatttcggcggtataagttctgcatccccttatgaacgacttttgaacttcttcgccttatattttgggcgtattttggtctgcattacctttggaacgacttttgagcagaaaacttacact

SEQ ID NO: 64963 - DNA, 402 bp, Zea mays
agcttacctttaacccttatacgcgattctcccttcattggtgaaactattaagtagacatagtcgtctaccacaaagcataagggttgtcgtcttcggtctgcataactcttttgtcgagtctgagctttcttcatattatgaataattctctgaaccttttcttcgacctctttcaccatatcaggcctaaagaagtatctttctcaggttcagaccaatttagcggagttcgacatcggcgcccatataaagcttcgaaaggtgccatcttgatactctcttgataactggtattgtatgagaattccgctaagggcatacattcatcccatctttgtgagaagtccagaacacatgcccgcagcatatctttcagtatatcattgaccctctcagtct

SEQ ID NO: 64964 - DNA, 411 bp, Zea mays
  unsure (1)..(411): unsure at all n locations
tgcttcgtgccttagcacatttccattcaatgaagtatttccaaagattngctccgtattcgatctttctgttgatgcgatatgatgtatgatgtgatgctatgccaaatgatgcaatgatatgatatgatgcaatatgatgatgctttaacacccacacatacgcccacactggtacacggaagactctgcatccccttaggaacgacttttgagcttcttcaccttctatttcggtggtataagttctgcatccccttaggaacgacttttgaacctcttcgccttgtatttcggcggtataagttctgcatccccttatgaacgacttttgaacttcttcgccttatatttcggcggtatttggctctgcattacctttggaacgacttttgagcagaaaacttacac

SEQ ID NO: 64965 - DNA, 375 bp, Zea mays
tgccacagccagcccatgcttgtcttagcaattaagcatgcatctataccggcctccttttttgcaaaatcaactaaataaagtttggcgtctaatacacccttaaaagctagtgaaccatcacttcttctaaagacagacacatctacatttgtgaatagacaattatatcccatattgcataattgactaacagatagcaagttatatccaagagactcaactaaaaacacattagagatagagtgctcatttgaaatagcaatattacctaaaccttttaccttgccttgattcccatcaccgaatattattgaatcttgggaatccttgtttttgacgtaggaggtgaacatcttcttctccccgtcatat

SEQ ID NO: 64966 - DNA, 435 bp, Zea mays
  unsure (1)..(435): unsure at all n locations
tctaaagggagaacacattntaggactaacaaatgttcattttgagaaagacaggatttgtagtgcatgccacgcaggaaagcaagttggagcccatcatccacacaagaacattatgacgaccgacaggccgcttgagctactccacatggatcttttcggcccgattgcttacataagtatcggcgggagtaagtattgtcttgtaatagtggatgattattctcgcttcacttgggtattctttttgcaggaaaaatctcaaacccaagagaccttaaaaggattcttgagacgggctcaaaatgagttcggcttaaggatcaagataataagaagcgacaacgggacggagttcatgaactctcaaatcgaaggccttattgaggagganggcatcaagcatgagttctcttctccctacacgcctcaaca

SEQ ID NO: 64967 - DNA, 426 bp, Zea mays
  unsure (1)..(426): unsure at all n locations
agctttggtactacatctagatctttgttgtttcattactcttggagcttctagctcctagacgactaggtgtctcttgtgagtctccaaatcttgtggaagaccacaagaaagtttgtattacccgctcgtctgagcaaagattattgtgtgggcttgacctttgtggtcggcaaagggaggattatggttgaaagagacccggctctttgtgggcgcctcaacgaggaagtagggcaccttggtgatgtgaccgaacctcgggataaatcttgtgtctcttgtgttcttgttcattgagcttatacatgatcttcgttctctcaccattccgcggaagatttgttcatatcttnttggtgtgtggtttttgagaagtgcccttcttacatctactactttgaaccctgtggatcatttagaaca

SEQ ID NO: 64968 - DNA, 443 bp, Zea mays
  unsure (1)..(443): unsure at all n locations
ggttgaatgcaattnttgtggtgttgttagtgcacgagatatctagagccacctgctataagaaagtagaggaagaaaaagaaaaaacaaattattagccggtgtatggatatacggcggtatacagccagaaaaagtggaagaagggcacccgtacaagcatctactaatgaccaaattggcgtgggcacaagcactaaagtttgttaggattattattcatttagattaaattagttcctattttctagagtgggtcagttttatgctcggtcagggatagactaaaaaggtaggttgtttagatttttatggagtcagatcctattttctatagtgagtcggtcgtaaatggattataaagccttattgtaatgatgcagagagggcagaatctacaattatcattttatttaatctgctatctattctcttcggtcttc

SEQ ID NO: 64969 - DNA, 413 bp, Zea mays
agcttgcaccgtaagccaatactcttcttctagaagccatagcctaacttcccttgcacggcaaccgcatggcttctatccgaagcgtacttcctctataaatagcgagtgagccttccatacttcactcaaccttgcctttacaaactccacaaccatgaatccctacttaaaaaacaattttcttgtgcggttgatggaagaaatggaagaggaagaagaagagtttgcagtggcgaggcacatggtcaataagaggcgacgtgcacgcaatgagcgtcgtcatggtggttcgattccaaggcgtgttaggattcatcgtgatcacatgagcggcgatgcaagaatccgagcggactactttggagcgaacccggtgtacacggatgctcaatttcgtaggaggtatttac

SEQ ID NO: 64970 - DNA, 443 bp, Zea mays
tcagcttactactctccagctgctgcacatatgccttcttcagatgaaaaatgttagtttttttatttttagtggcctaataaaaactaaaaggaataaacttgtagaaagtatgttactatttaacacaattgaactccatgcgcatgaaccaggctttccatttttatttcgactgtttgaaatttttgttgcatagtatgcttaaatttttatattatttgtggcacttgctttcttttctccgttcaatattctgaacatagggctaatattgttctatttgactaatcatcttgcaaagccttatgggaaataaaggtttatataaagatatagttgatataagatctacgaggctgctaaaaacttctgtctgatgattaaattgattttcctaaaacttcatgtgataagtcagtatgatatggatctgaaatgct

SEQ ID NO: 64971 - DNA, 365 bp, Zea mays
agaaagacaggatttgtagcgcatgcctatcatggaagcaagttggctctcatcatccgcataagaacataatgacaaccgacaggccactggagctcctacacatggatctattcggcccgattgcttacataaacatcggcgggagtaagtactgtctagttattgtggatgactattctcgcttcacttgggtattctttttacaggaaaaatctcaaacccaagagaccttaaagggattctgagacgggctcaaaatgagttcggcttaaggatcaagaaaataagaagcgacaacggaacggagttcaagaactctcatatcgaaggctttcttgaggaggagggcatcaaacatgagt

SEQ ID NO: 64972 - DNA, 398 bp, Zea mays
  unsure (1)..(398): unsure at all n locations
ngagagtaagaagtgagaaagaaaagaaagccaagccaatctaacaagagcaacaaagaaacaaaaaggatcctctcacaagtctaaatgcggtagagttgaattggagactttgagcggatcgatcacttgaattgtgtctttggagtggagtctattgctcttgtattgaataaggagtagtgaatgctnggatggttggagtggaggtgattgtgaggtatttatagcccccaaccaccaattcaaccgttggggcaggctgctatcgatgggcgcaccggacagtctggtgcgcaaactggacaatgttcggtgcgccagccacgtcacccaaccgttatggttctgacggtttcgaccgttggaagctttgcttcatgtggcaccggacagtc

SEQ ID NO: 64973 - DNA, 423 bp, Zea mays
  unsure (1)..(423): unsure at all n locations
agcttgtgaatggcttgccgaagcaacattaagctacaggttggntgcttacatattctggnatgtaaggagagtggcacgaagcaaggggtaaaacctgcttcggctgattctgccgagcttctgctatagcaatctccttttgcttcataatagtgatttggcatgttcttatagtgtggcccttgtcctcaccacagaataagcaatagattttcctgggctgatccccatatcttcctctgaagcccctgccgcctctgccccttggagctggtggcctgaaggagctntgttgctgtcccaaagactgtgaggtgtgttgtggcctctgaagctggcttcctttgtcatcattctgactggagctatggatngatctgacatgcctagggtggattctccctccgaagcccctagtca

SEQ ID NO: 64974 - DNA, 453 bp, Zea mays
  unsure (1)..(453): unsure at all n locations
actcagctaaaggacactattcaactaaagtaagatggagttgataagaggccaaggtatgaaaacttcctctccttcagttgttttagtattctatccttagtgggatgtaccatagtataggttaaattccttgcaatataaaatgttcaatagtgtatataactttgacatcaactatatgtgtgcactaatttaaaggaatttagtctatccttttgggtttcaataatgatgattcatttgccatccacatatcaggatcatcatttgtgaaaccctctcttgtgtttttaatgctctcttttataagtgttacaacgaggtccttccaagagctttcaagatggattcaaaatctacaaaaaatgaatgaagttcaagatcacttggttggatgaaatcacanagagaaaagagatcacagtgaatcaagaagggagttatattttt

SEQ ID NO: 64975 - DNA, 411 bp, Zea mays
tctgaggcatgcaagcttgtgaagattcttcattcaaacatgtgctatctttgatgccagagccagcccatgttaatcttagcaattaggcaagtggcaagaccagtctcttcaaaatctactaagtatagctggccctctaacactcccttaaatgctattgaatcatcacatcttctaaagacagtaacacctgtatccgtaaaaagacaggtgtagcccattttacataattgagaaacagaaagcaaatttgtatctaaagagtctacaagaaaaacattaaatatggaatggtcaggagatatagtcaatttacccaatcctttgaccaaaccttgggttccatcctcgaatgtgatggctctttggggatcttgggttttctcataagaggagaacatttcttct

SEQ ID NO: 64976 - DNA, 408 bp, Zea mays
gccatctttaacatttcgcccatagaaaagatcaattctcttattcaattgttcgtctgccacacaagtgataatctcaataggtaacatgatatgttaaccacaagtgtctgtctgcaagagaagtatctcgtgttcacctattgataacaggtatgagactgcctaattgcacacataatatttatcccttaatagactggtgggtgtctaaacctccctgcctctgcctctctattctagagatacaatctgagacttacttgttcaatgcgcttaacagcataagctattatcctccctctcctaagtaattggatgttgtcaacaggcctagcatcagacgtgtttctcattccaattggcagatctgcgttgctacgcaaatgctagacgcctacgaaaaac

SEQ ID NO: 64977 - DNA, 444 bp, Zea mays
  unsure (1)..(444): unsure at all n locations
taacagatggagtgtagaatcactgtgatgatgtcatatcannattatttgataatatggaataagctcaatttcctcacagtaaccagttctggttagtgtaacatgttgaagaagggctattgaaaattatgcatttgagaaaagaaaaagatgattattcaaacccttcaaactgaactaccaaactgcacaaaaatattggcagggaaagtgaaggaaaagctgcatattttaaaaggtgcaacccttgctataactgaagctcancagttggataatgaagaaaactctcaggaagaactacagcttgtgggactattgcacccaaaggattgtataatacaagaactaaggaacaatttgaaaccagaaaatttgttttgcagaaagagcaaaaggattctcgtgatgacctactgtgctggtagttcattgcatgat

SEQ ID NO: 64978 - DNA, 465 bp, Zea mays
  unsure (1)..(465): unsure at all n locations
ngtagctaaattagacattaacatattcttggtcctcggatccagaagagacatatgtcttgaccactagactactagtgatgataatttgtgatagaaatatgaagatcttgtagagacctgttgtatcctctctactcctgatgatttcttcgtacgagagcaatactatctggtgttgaagatggatcctangcggatatcagtattgtttcgttcttgccaagcagttatcatcatttgcttcatcaaaagctagttatatggtgattttcctagataaaatgaattcttggccttgtctgttctatttcaaagcttctctttttgtcgaacaacgaagagatcgaaataatgctttatagaacaaattggtatataatatgaggagaaatgtttgtcatgctggcagcatcacaaattattaactattggtataaattctctctcanaattatcatacct

SEQ ID NO: 64979 - DNA, 433 bp, Zea mays
agcttgtagggagttgagttcgtccaattcagaacccgcatcgtatgtatgttggaggaagcgttgcagtttcagtatcaaactatcactaatgctaattgatagtcgcctagaggggggtgaatagggcgaaactgaaattctcaaatataatcacaactacaagccgggttagcgttagaaatataaacgagtccgcgagagggcgtaaaaacaaatctcaagcgagtaaagcggtgagacacaaagatttgttttaccaaggttcggttcttgcaaacctactccccgttgaggaggacacaaaagccgggtctttttcaacccctttcctctctcaaacggtccctcggaccgagtgagctttctcttctcaaatcaaccagggacaaaactttctcgcaaggaacaccacacaattggtgtctcttgc

SEQ ID NO: 64980 - DNA, 463 bp, Zea mays
  unsure (1)..(463): unsure at all n locations
ntatcaaatggacgtgaagagtgcattcctcaatggaccaatcaaggaggaggtctatgttgagcaacctcccggctttgaagatagtgagtaccctaaccatgtctataggctctctaaggcgctttatgggctcaagcaagccccaagagcatggtatgaatgccttagagatttccttattgctaatggcttcaaagtcagcaaggccgatcctactttgttcactaaaactcttgacaatgatttgtttgtatgccaaatttatgttgatgatattatatttgggtctactaacgaatctacatgtgaagaatttagtatgatcatgacacaaaaattcgagatgtctatgatgggggagttgaagtattttctatgattccaagtcaagcaactccaagagggcaccttcatttgccaaacgaagtacactcaagacattctataccaagttggaatg

SEQ ID NO: 64981 - DNA, 394 bp, Zea mays
  unsure (1)..(394): unsure at all n locations
agcttaagtgatagagatgcaaactctttttgacacattggtagntttatcgagggatcaagaaccctacaaggctattactaatccttattagtgtccctgcacaaagggaaccccacacgagggtagggatgtcaacttaacctttgtgtttgcttaccacctattgtttgagttttcaattggtttgataggtttatgagctttgttcctaaatcatgtgacttaagttttgagtttttatttacattcagtttattgttcaatggttcatgatgtgcgatataatcttatgtttatgttcatgtatgttctagctccacttactcggctttactcataaatgctaaggatgcatgtttgtccattttagacaaaaactgctatttaaatg

SEQ ID NO: 64982 - DNA, 438 bp, Zea mays
gaaatagactgcgcacgacctaacagaataggctagtccttaacaaggggcataagtagggctcaacacgactagccagcagacaaagccaaatcagagcacaaaattagcaagagtggtgaaatcaaagctagttcctcaagaaagagccaattggctcaacacaactatgcaaagctagaaatggctcacaatttctacatgtcaaagtactctccctcgaagggaactcaacatgctcaaaacctctcccaaagcaaaaatctcccccttgtaatcgtggttggttgacattgatcttgcaaagtgattaacatgttattggatgttatgcatgtgtgaaaatatgcatttttaagattaatgtaacatactcgtgtgagtggtggtgtatggataatggaattggattgagccacgtcgtgaactatgcatgga

SEQ ID NO: 64983 - DNA, 400 bp, Zea mays
  unsure (1)..(400): unsure at all n locations
agcttcacacctttcgtcttgagacattgtatgtcacttcaagggcggaaaggaggtcaaaggctttcctcgtcttgactactatgtcatcgacgtaggccttcaccgttccggcgatgtgttcgccaaacacatggttcatgcatcgatggtacgttgcccccacatttctcaaaccaaacgacattgtaacatagcagtacatgccgaagggtgtgatgaatgaagtcgcgagctggtcggactccttcatcctgatctggtgataccctgagtaggcatcgaggaaagacagggtttcgcacccagcagtggatatcacgatctgatctatgcgaggcagaaggtanggaacctttggacatgctttgtttagaccagtgtagtctacacacattcg

SEQ ID NO: 64984 - DNA, 437 bp, Zea mays
tgggagcctatttgttggtgaggctctttctttttttcttctggtgctttgaatgcaacgagttgcacctcgggtgtggaggtggcgccttgctccaagctgacaatggtgttggagtccttgattattagttcaaagctcacaaacttgccaatcacctcctcgagagacatatgcttatacctaggatctccacgaattaattggacttgagtaagattacgaaaaacaagagatcttagaataaccttgaccatttcatggtcattccacttggttctcccaagggtgcggacttggttgaccatcgtcttgagccggttgtacattgttgtaacaccccgttcaatccctggtccgacggtacttactcttggaaactctctatgatcatataattgtcccacagaccaacatgagtcctttgtgcacacttt

SEQ ID NO: 64985 - DNA, 406 bp, Zea mays
atgttcctacaaaacatgaatattttcatgaagcatgtatcttttttctttacgaagcatgaaaataagggaaggtgttttttttgccgaagctcaaaaacggtatgtatataaacagttcatgcatcgcaaagaagtgaattaccaaataatttacatattacattcaaagatatacacatcgagtactccagtcttgttacaacaaagctacattgatcatctaaaaatgtttttataataagtactagtcctctctcaagatcttctccgcaacttcatttagcaacttgttaacgacttcgtcaacaatagattcgaccatattaatgatctccagtgctttcttttgttctcggtcggccaggggatcgaacagtttcgatggcggagataattcagctac

SEQ ID NO: 64986 - DNA, 401 bp, Zea mays
  unsure (1)..(401): unsure at all n locations
ntgttccagtgcacgcaagattacgaagaatacctccaggcgtatgtccgaaggttcttgcgtttgagggcacaagcgccaatggttcccaatgagattgtcattgaggccatgatcaaggggcttcggccggtacctacgacctaatactttgccaggaaaccccctcagaccctagagaaattgcttcaaaagatggatgaatacatccacgctgataattactttcgtcaaagaagggaggaagcctacaggttctctgagatgaccaggggcttcgggggaagaatccacccaaggcacgtcagatcaatccactcctcccagaatgacgacagaggaagtcagcaacagaggccacagtattcctcgcaagcttcggggcaacaacaaaactacct

SEQ ID NO: 64987 - DNA, 427 bp, Zea mays
agcttgtgaagaatcttcaatccaacatgggctagtcggcgatgccagagccaacccatattagtcttagcaattaagcaagtgtcgagttcaactctattgaaatcaactaagtatagctgaccctctaacactcccttaaatgctactgaatcatcacttctaaagacagtaacacctatatccgtaaaaagacagttggaacccattttgcataattgaaaaactgaaagcaaattgtaatctaatgaatctacaagaaaaacattgaaaatagaatggtcaggtgatatagcaattttaccaagtcctttgaccaaaccttgatttccatccccgaatgtgatagctcttttgggaatctggtttttctcataagaggagaaacatcctttctccccagtcatgtgggttgtgcacccgctat

SEQ ID NO: 64988 - DNA, 461 bp, Zea mays
tcatccgaggatgtagcttaacatgtgttaagtattagtcagattcttgaataaaccagtttgcataaaatttctaattcaaggatagcagtcgtgagctagcatagttcatgagtctagatgtatgttcaacttaatagtcttcaccataaaacgggtatatcaacacttcaacagtatcataagatattttgatagctgattaagtgtttcctttgagatttggtggaagattgttggatatatatggtctttggcctatgttccttccaataattcatacaataaatctcaaagatcactcatgcacaaaccaacaatgaaaaatttagtcctatattggaagttgaagagttatcctggaccctactctcatatgtaacagagaggacgttttttcacgaaaggtatgggaatcaatcaaatttactcacataaagggtttagacgagagagtcatc

SEQ ID NO: 64989 - DNA, 427 bp, Zea mays
  unsure (1)..(427): unsure at all n locations
agcttatcaagnctactttcatatggatcctgaattatagncatatctggtctgaggccgccgtaatcattgttttcttaccgagacatttcctgccttttctgcccatggtgctgcgtcaccctattttggcccaatgggtcgtgtatcaagttaggtccattatggacgcatcctagggttgcagcacgaccccaatacccttgtggtcgtcctcccatgtttataaaccccctagccgccaccaagaacagcgggttttgtttagatcaagtttagctctcgctacttgcttgcaagcgcgcgtgctagttcagccgcccgtcttcttgtcttcggaaccccaccatattgtagtttgatctttaaacctacatttagatctgngaattcagtacttgttctactttgtcttgctagttcttcg

SEQ ID NO: 64990 - DNA, 450 bp, Zea mays
  unsure (1)..(450): unsure at all n locations
cttgaacattccaatgcgatcccgcatctgaccgtggngaccgtcacaagttggtgttcttctgcagtccgaatccagcatgttcaaatccttttccctttcggtcttctccctgattcctaagcaaaacaagagtgcacgggtctccatggtctaaatatgatggacatgaactcaagagtgtaatcacctgatgatgtgcacccgttgggtgattgcccgatctttcgatgagagggtgtggaataactcgattgggggaggagacgacgttcacggcccgactacagccttccaaagacgctgcgccttagcaaccgatacaccacctcctatggctgtcacgatcttgtggagcgtgacaccctggccactatggcactcgtcctgcaagcaatcgaagaactagccagaacaagtagaacaagtactgaattaccagatctaaat

SEQ ID NO: 64991 - DNA, 400 bp, Zea mays
  unsure (1)..(400): unsure at all n locations
ntctgctgccatggtgtagacaacttctgatcatccaaatgagtcaggctctggtggtctgtttgaatgataaattcaccatgttgaagatagggacgccaattctcgacagcaaaaacaatggctaaacattctttttcatagatggagaggcccaaattcttgggacctaaagctcgactgatataggccactggatgtccttcctgctgcaaaacagccccaactccgcccccactggcatcagtctcgatggtgaatggtttagcaaaatttggaatggccaacactggcgcctgggactggcttaccaccggtacactgacacccagagccgcgcgcaacccctttttgcaccccgccctccgtcgnctcgtccccacgctccgtcagcccgccc

SEQ ID NO: 64992 - DNA, 353 bp, Zea mays
  unsure (1)..(353): unsure at all n locations
ccccccgttagaccttttttcgtttctttctaaccataatgaatgcgatatcgaatgtcatacttgatgccatatttacttatttggccccttgtgtggggtactggttggttcctaatctgaatggatgtatgtatgtatgcttgccatcccataaaaaaccatccgatcgaagagcccgaagaactcccatgagaaacccctaaacaacattcggttggtggaggcaagtgtcccttgacctatctctgtcatattcattagttaattcacctcccgcttacacatttatgcctaaggattgactagctnttgttatccatgttcttgtttacctatgtgggttggattat

SEQ ID NO: 64993 - DNA, 436 bp, Zea mays
  unsure (1)..(436): unsure at all n locations
nttacatcagtaaagcatatttcaataactactagcattgtgtaaaatatcataaattaagctatttcttnttttaacaaatgaacatgaacacatatttcactaaaaagaaaggaatgcaaccacacgcacagctcagtggcatgaggtacggtgaggtttatttacttgagaaaaccaaaaaaaaagctacaggctacggctagtatctagattacacactgaagctagagcaacaagcaacctcaccctatggtatcctacttgaatccacaatctggactcatccttgatcttcaataccgaagtgatagactgatagttgaagactgaacccctcaaagacttgatggttcctttccttccaaagtaacaaaatcactaagagcataagggcatcanaaccattgcaccctgacttatcaatctgttccct

SEQ ID NO: 64994 - DNA, 433 bp, Zea mays
agcttaaagtcaattttacatacgacattgaagttactgttgtgttatggatagttggtgcgtctaattaatctgaagttatttttatgtggcaggctatggccgaagaaataaaactttttcaccaagcttgtcatataggcaagaaccagttgatgcgggctaataagattggtaattttatctgaaggtgatcagtgggcggacgcagcataagaattcaggggggggggcaataaaccacatgacaaaaccaaccaacaccgtaaacaactattgtcgcatataattcaagttttatatcaatacatgatacgagtttaaagaaggaaactatattaataataaaagcacacatattgttaaattcttgttgatcgaggcaattgcatcattctacttttgaaacgttgaaatcatcgaataataagct

SEQ ID NO: 64995 - DNA, 421 bp, Zea mays
  unsure (1)..(421): unsure at all n locations
actcttaatattagctatataacatactgcatgagttgtggccctatggcggccgccctagtggctctatgcctagagccggccctggaccagctcttgggtatcttgttcctgatggcatagtttgttgtctttgttgctctctatgatctaaaacaagcttctcgtatagtttgagcgctttgcctctgtaatcgctggtgctagttntgctctgagagctcatgacagaccttgtttgttcatacttcatcacgtggtcacactcttcattnttatgttgatgatatgatcatcaccgatgattctgagtgtattgcctttgtcaaggcacgtcttattgagcaatttctcatgtccgatcttggtcttcattattttattgggattgagaattctttcacctctcatggcatttatt

SEQ ID NO: 64996 - DNA, 400 bp, Zea mays
  unsure (1)..(400): unsure at all n locations
agcttgatgttgcttttggctcccttgttggaagtcaatgccatccttaatgccagggcgtctcccattatacagcatactacgagcaaatttaaaattttcattctcaagctcatgctcggcaatntgcatttaatttagctatttgattattttgttctttaatcatggcaaagtgatcattcatagcatcaatgttaacatctctacatctagtgtaaatagtgacatgttcaacagtagatgtagaaatattgcaagcattcaattattcaatcttagcaattgaactagcattttcagttctaagacaagaaattgaatcactgcaaatatcaagctctttagacaaactttcacattnttctacttcaagtgcataatcattanttggcttaac

SEQ ID NO: 64997 - DNA, 455 bp, Zea mays
  unsure (1)..(455): unsure at all n locations
tatgaaactcagctntgacaaaacaattncatccttctccggctatgaggtagtctcttctcccccgaagcgtaatagcttcttctgattatcattaaagaagcccgactttaccatcttggagagatcagccttcgaaacagtagactttccgaagtccaagtggctgggcttgctatgcatggcaatgcgataatcatcttcgggatcagattcctcaatatcttcttcttctgcttcggcaactgcttgatctgcttgttccgcatcatcactagggatcttttccgaagttaccagtccggatctttgcatcgcttcggagatgggaacagtctccgaactttcagcttcgcccccctcatgctcaaccctagcggtagaacgtactctggccatttaattctgaatatgtggaaattaaatacttttatcttccgaagtattatctcttg

SEQ ID NO: 64998 - DNA, 291 bp, Zea mays
ctccctggaagtttggggcaaccttcggcgggaacgtctaaaactgctgaaccggcgagtgtataaggtacttccagcctttcaactggccagaacctcttgctggctgtgtttggcgcatacccttgtcttgggaccgattcaagtcggggaagatgctcgcccataactcgaaaacgggaaatccgtgccggtcgggtctcctaaactcaacacgaggtagttttatcacgttgcaaacttgtgggtcgtggaatctcggttagtctgcaattatcattgcccctcccc

SEQ ID NO: 64999 - DNA, 461 bp, Zea mays
  unsure (1)..(461): unsure at all n locations
ggtaactcaagtcatatgngtcttgtgcctgctggtgtttctatggatcaaanaattcatgtgaacccactgaagatactaagccaaacgaagtgtacacatattcagaattctagctcaagctgccctaatcaactgaggaggataaggatgccgtggattttgagagggaggagcccgccaattgccagaagtctgtgcaagctgatgcaaatgcgacagctgccccgtctaaggctggtggtaattatttttatttctttcttttttactgatttactattagcttgtttagtgaagacattctattggttgtaggtatcatcaaatgattaggttcaaacatgtgataaggcttttaattcagtaaacgagacagaacatcagcgatatattaccttatagcttcccaccatgtgacattcaactaaagtgttggagtgctataaacatagtatcca

SEQ ID NO: 65000 - DNA, 395 bp, Zea mays
tattccaagatgggaaaatgagcatgctggcctactagccaagtcagcggcacaggggctctctcttccttctgaagtattttttgagacaataagagcaccttcggttgaactcctcgaaagagaaggactcacaatatctcctgtccatagtgaagattggaggactgagattatatctttcctccagggtaactgtctctcggatgatgaaggttataacaaaataatggaagccagaacaagaccatatgtcataatagaaggggaattatataaacacggagtttgctcccacttttcaaatgcttattcaaaaccgaatgtgtataactgatgaaggagatacatgcaggattgtgtggatcccacattgggttcagacctcttctggg

SEQ ID NO: 65001 - DNA, 446 bp, Zea mays
tgttgtcacggcaactccattctaccccgacgtactcttcattgtggggagagtggaatcgtcccccatctccaacgacaaaccaaccgtgcctgggcaagaacctcctcagtgagaagctcaccgacaaaggaaccgacaccgtaatgatcggcgacatcatgaagctagagaacgagacccggcgcagcctgtatcacgagatgagatctcgaaggtgggagaaactcctgatgaacgagtcttcagggaaaggaggaactcccaccgacgtgatcgtcagcaagctcaagagcaagccgagcaggaggcgaggcaacgccgagagaaccctctcttcagacgaaacatgaaccccgacttcgcccgagccatgaacacaccgagcaaggtcggtggtgtgttggcccggatagatgatggcctcccccggactccagatgctg

SEQ ID NO: 65002 - DNA, 376 bp, Zea mays
tagaccttgtgcagcttgtctagcaggctaacaagggggaggagcgcatcacgcaagaatggatgacacttctgacccctgcatctgctgcctgttgacctcttccgaccccgtgcctatctgagcatatgaggaagtaagtatggtctagatatcgttgatgactttccccgcttcacttgggtgttctttttgcaatataagtctgaaacccaacggaccctcaagcgcttcctcaagagagctctaaatgagtttgagctcaaggtgaagaagataaagagcgacaacgggtccgagttgaagaaccttctagtggaggagttccttgaggaggaagggatcaagcacgagttcttcgctccctacacacccc

SEQ ID NO: 65003 - DNA, 211 bp, Zea mays
actcaagcttgacgcaattccagaggatctgatctctctggtgtgtctacaattgaatgctagagctcttgtaagtaattggaacgtggaaaacttggatgccttgaatgtggggcgtgcccccatacccctcctcaaacttcataccaacttcacagacattctcccacttctcaatcactcatttttataatctccaactccccacctc

SEQ ID NO: 65004 - DNA, 130 bp, Zea mays
  unsure (1)..(130): unsure at all n locations
agcttttgtgaagttgttagaggattttatcactngggtgtgtcttgtattgaatgcctagctcttgtaagtggttggaaagtggtaaacatggatgacttgaatgtggggtggttggncctctctcctc

SEQ ID NO: 65005 - DNA, 445 bp, Zea mays
  unsure (1)..(445): unsure at all n locations
tctcctgaacaagtgctgcacttaccgctgagtgcgaatctgccacatataataacaaaggagcccctggcgtatgtggagttagcgttgttagatctatcaaatactgtatcagctcttcaaaggccttctgctggattggtccccattgaaagacttcagctgacttcagcacttcgaagaatggtaagtntctctctgctgatctggatataaatctattgagagatgccagccttcctgtcaatctttgatcccccttttttgtacttggtggctccattcgaagtatagcttcgattttacttgggttggcctcaattccctttgntgaaactacgcaaccaagaaatttccccttctttactccgaagacacatttttctggattcagctttagaccagcctgtctaaaatagcgaaggtctcctgtacatcagcaatg

SEQ ID NO: 65006 - DNA, 422 bp, Zea mays
  unsure (1)..(422): unsure at all n locations
agcttaacaacagggttgatagcctcatgtgttttgcaagaataaagttcattttcaacaagaagattgtcatgatcaaatctaatttgagtatagncttccttgatccttactaggctattttgcaactccctattagcttcatttaatttgtcatatttttccttagcatcttttagggagtttgtgagctcatttacagttgatgacatagttttattttcttcctttatttcatcactagcctttataactatgtcatacttggcatttaaagattcattttcatttttcaacctatcacatttagcttttgactgtctaatgagttgagtatattctttaagcaagtcagctaactcatcatatgaaggtgaagcaaattcttcatcactatcactatcactatcatcatcaatatt

SEQ ID NO: 65007 - DNA, 453 bp, Zea mays
  unsure (1)..(453): unsure at all n locations
ngcgctcactagacctaaggaacctgagttccagacttatcatagaattcgagcagttaaagtaaagagctctgcagagatataggatgaaatgttggctaatataccctagttcatggcacggtcattcaacataacagtaagaacttgctattttgtttacatgaaagatcgtcttgcgttaactgcatgctgacactagctgttgctttttgcctaaagattgctgaagccccttcgatccctccacttccaaggaaacccccacagatttctgaattcagtgtacgtattctatcacagtggaaaattcatgaatgaactttatcatcactgattaattcatttgttgctttgtatcaactacaagaatttcatcttataacaatggagagagcaagtcgatatgcggacacctgatcggaagtatcatgtgcatatactattcgggta

SEQ ID NO: 65008 - DNA, 393 bp, Zea mays
ctttaaaagcctaatagaatttgaccgagcagggctaaaatcatgctgcaaataagggtctgatgaaccaaatactttctccttcccctcgtcatcttcatcagcatcagcatcagattcatcatatatgaactgcccaccactgctactgatgaactctctagagatactaccattagagaagcattctgcccactcctttaagatctacttcacagcgtcagagctccctgcaccattaaattcaacgattgatttcaaagccaatacttgagagaaaataccgcgcacttcaatcgcatcagcattttcagtcggtgtgccgacctctttcactttactaacagcatcctgattttcacattctgctcctcttcaggctatctttacaca

SEQ ID NO: 65009 - DNA, 454 bp, Zea mays
tatatttaaaccttgaaaatgttaattcctctctaatataggggtccaaagagtcccacccagctaatattttataaatagcttactatattatagtttgtctttagtcactcgcaccccagccaatatttataaatatgttttctgcttataccgcatatatactaatacttatttatacattattgtgattccttccacatcctgtttctcccaacttaattcaaattacttatacatctccacagtaactgtcgatgagttctccttagtttctattctttgattgtccaacactcccaagtgacatcaggctatgttgggcagttgatctacttcacaaaagtggtaagacattcgtcatattgggttgacacaaacaagtggcttaattggttgtccgcgtcatcttatcttgaccaccgcatgtgttgactttatgcaagcatgtgtt

SEQ ID NO: 65010 - DNA, 308 bp, Zea mays
attttaatgatctcacttctccatcttcgctataacaggagacctattgtgtctgctctttcagaagcgccaccaaggtgctttttagctttaagaacacatccaagtaagggcaacccctcgctgctgacttactacatatcacatgctcatttgcctcgaggatattttgacagaaatcccttaagaagcttcactattcaaccattccaatacttttcaagcttcggattttagccctgtactcttgcgaaatgaccgagcaacttgtaatcaattttaaaaaggccttctgattccattgcctt

SEQ ID NO: 65011 - DNA, 334 bp, Zea mays
  unsure (1)..(334): unsure at all n locations
tcattctgagaaagacaagatttgtaacgcatggcaagcatgaaagcaagttggggttcatcatccacacaagaacatcatgacgactgacaggccactggagctactccacatggatttattctgcccgatagcttacataagcatcgacgggagtgagtactgtctagttattgtggatgattattctcgcttcacttgggtatttctttttgcaagaaaaatctcaaacccaagagactntgaaaggattcttaagacgggctcaaaatgaattcggattgaggatcaagaagataataagcgacaatggtgcggacgtcaaaactctcaa

SEQ ID NO: 65012 - DNA, 395 bp, Zea mays
tgccagtacctgtcataacaacagcacctgcttgctcattagctacaaaccataccacgaacttggccttttgcatgctggggattggatatgattggacctttcaagaaagctcaaggaggatacacccatgtattggtggcaattgacaagttcactaaatggatagagttccagcccattgcctctttaacctctgctaaagccgtggaattcatacaaagcataatattcagatttgggataccaaacagtatcatcactgacttgggatccaactttaccagttcagaattctttgacttctgcgagcaaaaaagcattcagatcaagtatgcatctgtagcccatccgagagccaacgggcaggttgagcgagccaacggaatgatatt

SEQ ID NO: 65013 - DNA, 142 bp, Zea mays
ggatgaaaattctcgcttcacttgggtattctttctacagggaaaatcttacaccccagagacctttaagggattcttgagacgggctcataatgagttcggcttaacgatcaagaaaataatacgcgacaatgggacggag

SEQ ID NO: 65014 - DNA, 414 bp, Zea mays
  unsure (1)..(414): unsure at all n locations
taatgacaaacttgaggctgaaatccagaatggtttannttttgaaaaaaatcattgatagaccttcagaacaaatgtttgaaattcaacaatcaatgtgttcaacgactgaagaaggtgttttattcagtcggggccagtagtgaaaaatttattccttctgctgaagatctaccaggagccttcaaacacatcgaaggtgagattgatgacctcgatgatgttattgctagacacggcgacttttgtgccctggtagcttctcggggcaccgctgctgcgttcctgaaatctggttgtgagcatggaaaaattatcaacagacccaatttcagcctatcaccagcaattctagatgatattcctaacctcgcccgaagcatttgcgataaaattataaaggtgatatggact

SEQ ID NO: 65015 - DNA, 400 bp, Zea mays
  unsure (1)..(400): unsure at all n locations
cccctgcgagacctttccccctttctttctaaccttaacgaatgcgatatcgaatggcatactttatgcatatttactttatttgtctcttgatggggactgtttgtttcctaatttgaatggatgaatgtatgtgtgcttgcaatcgcataaagaacgatcccgtcgaaaagcccgaagaactcgcacgagaagccccttgacaacaatccgttgctggaggcaagtgtcctttgacctatctctgtcctatttattatttaattcacctcccgctttacacatgtatgcctaaggattgaactagctttgttatccatgtccttgtttacctatttgggttggaatattattgttnagctntatgctattgctcaaactctaatcaatgaacatgatg

SEQ ID NO: 65016 - DNA, 434 bp, Zea mays
  unsure (1)..(434): unsure at all n locations
tgagacagacattagccgctactgacgacaacatatcgtcggtagtttattctattctaatttcaaggtaaaaatcttttcttcaacttttttattgtttttaacaacgaaggtgttttctaacgaaggttgcttctgcacagagtatgctattgagtaaagctttgagaatgcaacaagatcttgaagataaaaagcatgaagttataattgaaggcttataaagcaaaataaatgatcaagcagctgctctcgaaaagaaggattttgaacttcaaacaacagagggtttattggcagaagctgaagctaaaattgcaaaattgaatacggagcttctctcanaatcagaaagctttcaacaggaaaagcagaagtttgatgcctaatttgaggccgacgttgaaaaggttcaaattgcaaaatcattgaca

SEQ ID NO: 65017 - DNA, 403 bp, Zea mays
  unsure (1)..(403): unsure at all n locations
agcttcggcaagtgggtccactccttggcttatgagggcccagataaagacgctgagcctaacgttagcgttaggagtcagatgatgaagataaatttcgaaatcttccanaacgtccccaatcattatatgcaaaggaaacctcaatcctgctttgaagaaacttctaaaaactaccacctcatcattttctggcttcggagtggtttcttccccgccaaaatgaatcagtctcttcttggcttccccgaagtagcctagctttatcatcatgggcatatcagcctcacagacagtagactctccaaagtccaagtggctgggcttggatggcatgacggtgttataatctatctcttcttcgtcagcatcaccctcttcaatgtcatcctgttcagcttct

SEQ ID NO: 65018 - DNA, 463 bp, Zea mays
  unsure (1)..(463): unsure at all n locations
actcagcttggtgtctcaaggacctggcctntgccacatggaggacttcgctaacgtaatataatggcttctggatggttcggacccctgcggttggtcctgagccctcaaactcttgaccttccatcaccatcgtggtggtcggaccaccaccttctcctagggggactttctgactcccacaaagatgttgtgccgttctttctgcgactagcaccatgctcaccgcctctgtagccgctgcaatgtataagtacaacggctcctggctctggagaggctcattctgcctccttagtccaagagaatgggccggacttccgtaatagcttgaagaaaggtagcgccctcttagccagtcttgagatgaagcggctaagggcggccagtgaccccgtaagcttctggacgttcttgattcgggctggaggcctcattgtctcaattcctttgatcttctatg

SEQ ID NO: 65019 - DNA, 429 bp, Zea mays
  unsure (1)..(429): unsure at all n locations
tagcttctaaagggagaacacantttgggactaacaaatgtttattttgagaaagacagaatttgtagcgcatgtcaagcaagaaagcaagttggtgctcatcatccacacaagaacatcatgacgatcgataggccacttgagctactccacatggacttattcgacccgattgcttacataagcatcggcgggagtaagtactgtctaattattgtggatgactattctcgcttcacttgggtgttctttttgcaggataaatctcaaacccaagagaccttaaagggattcttgagacgggctcaaaatgagtttggcttaaggatcaacaagattagaagtgacaacgggacagagttcaagaactcacaaatagaaggctttcttgatgatgagggcatcaagcatgagttctcttctcctaca

SEQ ID NO: 65020 - DNA, 441 bp, Zea mays
  unsure (1)..(441): unsure at all n locations
ngaaaaatatcttgatacagtccgaagaatggaagcctctttcgaaggtttctcagtaaagaatattccaagaggagaaaatgaacatacagatctattagctaagtcagcagcacaggggctcccattaccttcggaagtattttttgaaacaataaaaacaccttccgttgagctcatggagcgagccatgcttacaatctcactagtgcacagtgaagattggaggactaagattgtatccttcttacaaggcaactgtccctcggacgacgaagcttatataaaaaagaatggaagctaggacaaggccttacataatcatagaaggagaattgtataaacaaggtgttttctctccattgctgaagtgtttgtctagaaccgaatgtcaggagctaatgaaggaaatacatgcacggcttatgtggagctcatatt

SEQ ID NO: 65021 - DNA, 346 bp, Zea mays
cccacatgtgctaggaggcgatgccacagccaccccatgctagttttagatattaaacatgcatctagaccggcctcttcttttgcaaaatcaactaagtatagtttgtcgtctaatacacccttaaaagctagtgaaccatcacttcttctatagacagacacatctacatttgtaaatagacagatataccccatgttggataattgactaacagatagtaagttatatcccagagactcaactaaaaacacattagcaaatgagtgctcatttgaaattgcaatttaccttacccttttaccttgccttggatcccatcaccgaatacacatgaatcttgtga

SEQ ID NO: 65022 - DNA, 425 bp, Zea mays
tcagctcgtcattcttcagcttcatcatcctgtacatattaaaacggaatgagaaaggcgcagagttcaaggagaaggtaaaagtaacaagtctaagtttctcactggcttaaggtggctccgagcttcgtcaccaaccatttttcgcccgcccgttatccaaatctgggtcataaacctgtttcctatgcttcaggctaggctggggatgtcaactaaaatctgccggcgacaaactgaagtttggcctattaacaattttcctgtgcgtacagccagccttcatgaaagcaatagccgtgcctctagaagctaacacggcgcagaaaacggcatgcccagcgataacctcgtcaagtgcatcaacttctccctcaatgtattcaaaggtgctcggcaggttctcacctgaacgtgagaactta

SEQ ID NO: 65023 - DNA, 347 bp, Zea mays
agcttctcctggacaagtgctgcacttaccgctgagtgcgaagctgccacatataataacaaaggagcccctggcgtaagtggagttagtgttgttagatctatcaaatactgtttcagctcttcaaaagccttctgctggattggtccccattgaaagacttcggctgacttcagcacttcgaagaatggtaagtttctctctgctgatctggatatgaatctattgagagatgccaaccttcctgtcaatctttgagcccccttttttgtagttggtgactccatccgaagtatagcttcaattttacttggattagcttcaattccctttgttgaaaccaagca

SEQ ID NO: 65024 - DNA, 468 bp, Zea mays
  unsure (1)..(468): unsure at all n locations
ntgaagacgtactagattntccttcatcagatcactcccgaagcagttattagaatggggatcttcgtctaggctgtgaggagtcaaggtctagagtcaagtgcaaaatgtttttgcagcatgcacgaacttttgtacgagacgaagccctgnggtaaataacaatatcataacaattttgggtgctatagcttcgttgctcgctctggcgcaagctacccggtgccaacgttttggaagaggtggcccggggcctggatggaagagtggttttacgtgaaaaatgatttgaaggcgagagaagatattaaagaaatcatcatgcgccccatctggtcccgcttcggcctccgaaagccgaaggtagaaattgatgaggcagccgaagcatgtcgaagggccttcagcacaatttgctcttttatttggaacagagacttaattcaagagcatgtagcctacaagata

SEQ ID NO: 65025 - DNA, 425 bp, Zea mays
  unsure (1)..(425): unsure at all n locations
agcttgtctatgaggagattgcgctcatcatcaagagcttccaccaaatcctcaagcaaaggagggggaaggactacaagccccgttccaagaaagtgtgctacaagtgtgataagcccggtcatttcattgctaaatgtccattatcaagtgatagtgataggggcgacgacnagaagggaaagagaagagaaaagaagaggtactacaagaagaagggcggcgatgcccacgttngccgggagtgggactccgacgagagctccaccgactcctcctccgatgaggacgccggcaacatcgccgtcaccaaagggctcctcttccccaacgtcggccacaagtgcctcatggcaaagaacaacaaaaggaagaaggtaaaatcaaaatcctccactatatatgcaacctctagtgatgaggat

SEQ ID NO: 65026 - DNA, 461 bp, Zea mays
  unsure (1)..(461): unsure at all n locations
tgagcgcgtcgcgggggcacctgccgaacgactacagcgtgggcgtgggcgtcgtcngcgtcgaaggggtcggggtcggggtcgggcagtaaggcgagcaggcgctggctacgcccagcaccaccaggttcacggccaggaacagcgcaaatgccttgcacgccattgctcgtctcgatcacaaagccaggagctaccacgatcgcgatcactctctatagccaataatgcagtggttagagatcttggttgcgatgctttgatcacagtattaccgatgtatttatagtacagcctcgggtgattaataaatcggtgcactaggcacaatagcgttcatgtgatgaaccccgcggccatcatatatatgcatgtgaacccggccgccggttaggaagaggagtatttgcctacctcgtataacgactatagtggttttcccttatacggcatcgaatatt

SEQ ID NO: 65027 - DNA, 394 bp, Zea mays
gcttctaaagagagaacacgtgatatgtctaactaatgtaactttcgaaaaagatagaccttgtgcagcttgtcaagtaggtaaacatgtgggaagctctcatcataccaaaaatgtgatgaccacatcaagacctttggagttgctgcatatggacctcttcggacccatcgtctatctaagcataggaggaagtaagtatggtcttggtatagttgatgatttttcccgcttcacttgcgtattctttttgcaggataaatctgaaacccaagggaccctcaagtgcttcctaagaagagctcaaaatgagtttgagctcaaggtgaagaagataaagagcgacaacgggtccgagttcaagaaccttcaagtggaggagtaccttgaggag

SEQ ID NO: 65028 - DNA, 428 bp, Zea mays
  unsure (1)..(428): unsure at all n locations
ctttaaactaaagacacagggaatcttagcgcgcataagctaataatcgagcgagtgagagaaagtggcaagaaagcgtaccaaatgagctcgcggtatgctcttatttatatgcttgatgcggtaaaaattgaaaggtcccgcctgtcaatgaatgttgctattctagcaaagggaaggtgttttttcggaccttcggcttatagccttcgtccatgtcgcaatctaaatttattaacaaattaatattgcgaggggctactgttgggggccttctgcttccgaaggtcctcaaaaacatgatttaacaatgtttctggagtataacgtgtgaacaggtatcttctgacttgtatcagaaagggagaagcttaaaagatacgaaggttgacacagtgccgaagctgtaagcangaaacttctgcatg

SEQ ID NO: 65029 - DNA, 375 bp, Zea mays
cctccatcaatgatcaaacgacatgaacgctccttaatgacacactttgcttgaaacaacgtatgtcgctgattctgctctgccttctccatttgtgcactaagcacacgctgtacaatgaggctctcataatgctctgcatcatctgcaccaatctgttcttcgggtggttccttagtgcctgcatcatcagccgcaagcaaagcaagtgtagcttcatccaaatcactagcagaggaatacccaccatcgtcttttaccaccaaaacacgctgattatgacaatcacgctgcacgtgtccatagcccttgcatcgataacacagaacatctcttgttctacccgtggaggctactgaagagcaatacctgctg

SEQ ID NO: 65030 - DNA, 427 bp, Zea mays
tcgtcatctgaaaggaacttaccctgaaggttagagattatttcagttctccaatcttcgctgtaaacaggagatatgttgaggactgctctttcaaggagctccactgaaggtgcctttattgtttcgaagaacacatccgaaggtaacggcagcccctgtgccgcagacttagctagcaaatcagcatgctcattttgtcctcgaggaatattcttgacagagaatccttcgaaggatgcttcgatccttcggaccgtatctagatatttatcaagcttccgatctttagccttgcaacttttgtcaacatgacccgaaaccacctgggaatcagttttaagaattgcccttctgattcccattgcctttaatatccgaaggcccagaagcaggctttgtactcagcaatattgttcgtgcagct

SEQ ID NO: 65031 - DNA, 428 bp, Zea mays
agcttatgaaggttcttcatcccaacatgtgctagacggctatgccagagccaacccatactagtcttagccattaagcatgcatctatattggcattctctttcaaaaaatcaactaaatagagcttgccgtctaatacacccttaaatgctaatgaaccatcactccttctaaagacagatacatcaacatttgtaaacaaacaattgtagcccatgtggcacaattgacttacagataggaggttgtatcctaatgactctactaaaaatacatttgaaatagagtgctcgcttgtgatggctatctttcccaaacctttgacctggtcttgattcccatctccaaatatgaatgtatcctgggaagtcctcgtcttgacgtaggaggtgaacatcctcttctcccccgtcatgtgggtatgcat

SEQ ID NO: 65032 - DNA, 448 bp, Zea mays
  unsure (1)..(448): unsure at all n locations
nganatgtgttttcctccatcattntttgatatgcaagtacacctaatcatacatctcgtggatcagataaaaatattagggccactatatttacatcatatgtttcagttggagcgatacctgngagtattaaaaggttatgtgcgaaatcgcgctcacccagagggttcaatcatggagggatacactacagaagaagtgattgagagctgtatagattacatcagtgacggaacaatgataggtgttcctgtacctaaacatgagggtaaactatgtgggagagggagaatgggcaagaaaacttttcgcgtggaggattacaagctagtacattgtgctcatggtagtgtactacaacatctcacgatagccgagccttacatagaggaacaccttgatgagcttcatanagaanatcagaaccgcacagaggactggatcatg

SEQ ID NO: 65033 - DNA, 361 bp, Zea mays
  unsure (1)..(361): unsure at all n locations
acatgtgtctagcggcgatgccacagccagcccatgctagtcttatcaattaagcatgcatctataccggcctcttcttttgcaaaatcaactaaggagagtttgccgtctaatacacccttaagagctagtgaaccatcactttttctaaagacagacacatctacatttgtgaatagacagttataacccatatgacataatngactaacagatagcaaattatatccaagactcttcactaaaaacacattagagatagaatgctcattggagattgccaatttacctagcccttttaccttgccttgagtcccatcaccgaatattattgaatcttgggaattcttattcttgacat

SEQ ID NO: 65034 - DNA, 425 bp, Zea mays
  unsure (1)..(425): unsure at all n locations
tgtttgtntgtcagcaaagtagacaagttgtgtgtgcataattccatcgatcgagttcccaatgtactattcctgcactccatgcgactactgcatctgaaacgtaactgttgagcacagaaaaagtccttgcggactatccacggtccatactgtccagacccctcctttatatagataagatccaattaaatctatgtatcgcttttatcttatgtattaggagtagctctagtttagccttactttagccttcctctaccttaaattttcatctctcttcggctctacatcgactagaggagtcttgtgtggcctactgacgccaagacacaccctacgatctcttctccccgacggggccctctcgagaggcgagatctagttctgctgcgaagaagacgatgctctgcgccattccggac

SEQ ID NO: 65035 - DNA, 378 bp, Zea mays
  unsure (1)..(378): unsure at all n locations
atttacttaggatggtaaataagctatgtgtcatgcttaattaaacaatnttaaaccatgtagggttgctcaagaatatgaaatgagaacgaacaaccctaccatgtaatttacctagtatgcatgcattgttaatctaaagtaagtaccaaatgaaatactaggtatggaagggtaaactagatacaagaaaatagatacgcatatataagaataaagaatgcaataaatctagttaccttaatcatgggtggngaaacttgngtccaaaatatttgctaacccacttggcaataaacttgatccaatatgatgtatcccatgatatacatcccatctttccaaatcttcaaattcccgtggtcctttcgactactc

SEQ ID NO: 65036 - DNA, 384 bp, Zea mays
  unsure (1)..(384): unsure at all n locations
tgtgntacaagaaggaaagtgggagcgctgttgtatttctgatcttgtatgtggatgacatattattgattgggaatgacattcctatgctggagtccgtcaaggcttcactgaaaaagagtttttctatgaaggacttatgggaagcagcatatattttgggcataaggatctacagagataggtcgaagaggcttataggattaagtcaagatacgtacattgacaaggttttgaaacggttcaacatggaacagtccaagaaagggttcatacctatgtcacatggtaaacaccttatccagaagcaatgtcctgcgacggctaatgagcgggagcgcatgagtaaggtaccatacgcctcagcaattggatcaatcatgt

SEQ ID NO: 65037 - DNA, 301 bp, Zea mays
gatgaaattcaataccttctccaaaagcctcaaccttttcttcacaaaaggtaacattcaaggtaatgatcaagccacacttcacactaagataaataaaaagtgcagtgaatgctttgaaaaaggacacttgattaggtcatggtccttcattaaaaatggcttgattattaacaaggatgatagactttgtttaaatgctcaaagaagggacacttaatcaatcttgccccaattgaacaaaaagcaagggttaaaaagaagttttactaacatgtacaggcacaacaagaaagagata

SEQ ID NO: 65038 - DNA, 419 bp, Zea mays
tgtacaacccatgccatacacacttaatacatcagggtttataactcccaggcaatgagtcagctgcatcaaaaatctatctacgattgaatccgcgaaaaatctgtccacgatggcatttgtgagctctacataaacttgccccctatcgtacctgtcggtgcaattctaaacctgttttaaaaccgtcattagctaacatctgcccgtgatcgaacctgtcaaccatcattagctaagtcttctcacgttgagcaacaataaaacatttcatgaatcattagttaagttacttattcaaaatatataatattgtatctcaatcatttttacgtaaaaataaaaacgaaccatacttcgagtcgagtgtgggtcaccttgtggtagaaataaaaactcgcatccatacccgcaaaact

SEQ ID NO: 65039 - DNA, 417 bp, Zea mays
  unsure (1)..(417): unsure at all n locations
ttaagtacgagctgcactccttgtggcagtgaatcatgtctgtcttcaaattatgaggaanntacaagggcaatgggatccacgagatatgcctatgcatggtgtgtctnttccgagcttctggcatgtgctcgaaaggcactacacgattgagagggtcatttctggtggcagtggcatgagaatgacacaggaagagaatgaagtttgttatctccctataagattgtagtagttaaaaagtggttcttttgcaaggttttctacctttaaaaagttttaaacttgtgcacctaaatctttttattgtgaataaaacggcaggagctctgcctatatattaagggagaaaggtttcggaaaacaatagacgatgtccgacgaccagatacaagacattcgcacacacacggcggg

SEQ ID NO: 65040 - DNA, 494 bp, Zea mays
  unsure (1)..(494): unsure at all n locations
ctaagcttcgcactgaagacaatcgtcctgtgtactgaaaatattttctctgttctntccatgagctcaaccgaaggtgctcttattgttcaaaaatactttcgagggtagggggagcccctgagccgctgatttggctagcaaatctgcgtgctcattatcacctcttggaatatacttgacagaataaccttctaaagaagctgtcaaccttcgaactgtatccacatattcttcaagctgtggatctcaggccttgctacttttgtccacgtggccagcaattacttgagaatgagtctttatgatggccctgtttattcccattgcccttagtttccgaagactcaatagaagtgcttcatactcagcaatattatttgtgcaactgaaatctactttgattgcataacattgtttaactttngaaggtgccagtatgaccgcagctgcttctgcaccgaatgcttcccatgaccatcgcaaacactatc

SEQ ID NO: 65041 - DNA, 462 bp, Zea mays
  unsure (1)..(462): unsure at all n locations
gcatcaagcttgacacaccatttgatatcttacattatatttctgagatcaagtatatttaattcatttctcaacatgcaaaagcgggtgttatcaagtggcttagtgaaaatatccattaattgatcttccgacctcactccttctaaaatgatgtctcctttcacaacatgatctctaaggaagtgatgacagatatcaatgtgcttggtgcgagagtgttgtacaggattattagcaactttaacagcactctcattgtcacacaacaaaggtaccttttctagaattacgccatagtctagaagagtttgtttcatatantaaaattgtgtgcaacaagcacccgcggcaatgtattctgcttctgcgattgacaagacaacactattntgctttttggatgtccatgatactagtgatctcccaagcaaatgacatcctctagaaaatacttttcta

SEQ ID NO: 65042 - DNA, 478 bp, Zea mays
  unsure (1)..(478): unsure at all n locations
ctaagcttgagcgtgcacgtcgtgcagatgaagcaatggaggagaaccctgatgcatttttctagggcaaatggccccgttgcactcagtagtctatgtgttgtatntgaagttatgtatgaatgaacttattattcggtattatgtattgtcgaacaatgatatttggtaatggattaccttcaaattgatgaagacgacataaatacgcaattgatgaaaactacattaaaagcaattattgaaggcgacttccagcaattgataaagataatcaacacgctgaaagcaattgatacagaagagttttctagtagtgctcccacattccaaattgtgtggacccttctccatagtatcctcacattgctgttgtctgctgtgggtgtggtggagacatcngaggaccaacattcttgttgtgacaagggcagcaacaatatggatctgggcatacttgcacctgtgaagcacacca

SEQ ID NO: 65043 - DNA, 474 bp, Zea mays
agcttccttgagggtgtttcagtaaagaatgtttcaagaggagataatgaacaagtagatgtgctagctaaatcggcagcacaagggctgcctctcccaacagaggtgttttttttgaaatcctcaaagcaccttcgatagaccttataaaaaaagttgtgttaataatatcaccaaaacacagtgaagattggagaacataaatcatatctttcctccagagcaactacccttctgatgacgaagcttatattagaaggatgcaggccagaacaagaccgtacatgttggtcacttgttctcaaatgctgcgaatcaagaacaaggcaacacaattgttaggtattaaagaccttcgtcttccgaagcattacctcctcgtggatataatgatcatcaaacgaaggtcatgaaggacatgtcttcatcatcttgtagataaataagaatacacaaggataaagatagcgaacg

SEQ ID NO: 65044 - DNA, 488 bp, Zea mays
  unsure (1)..(488): unsure at all n locations
gggcatacagtgacaatctcgtagcctctgaaagactttcctcaaatgtttcctcatgttctgctcattctgggaatatacaagaatatcatcaatgaacactactacgaacttgtcgaggtagtccatgaacccactgttcatcangtacatgaagtaaagtggcgcatttgtcataccgaatgacataaccgtgaactcatatagtccatacttggtgatgaatgttgtcttcggtaaatctgaaggtcggattctgagctgatggtagcctgacctcagatctatatttgagaacacactggctcctctcaactgatcgaataaatcttcaattctgggcagggggtacttattcttgatagtaacttcattcaaggatctgtagtcaatgcacatcctctntgntccatccttcttctctacaaatagcactggggcttgccaaggcgaggtactcngtctgatgtaacctttctctgacaact

SEQ ID NO: 65045 - DNA, 471 bp, Zea mays
  unsure (1)..(471): unsure at all n locations
agcttactcctccctaagaaaggcccttcattatctccaaggttntgaagcccggaacatacaagctagccaacaatcaaggcgaggtctacaacaacgctaggaacatccaacagctacgttgcttctacccttaaaaagtttcaagtcgtttatgtacctcgctttctttacataaataaagtctaaccgtcaagagaggatcagccttgcctcggcaaagcccgaccctcccttgggggctagaaggggggaaccccctctgcgtcaaaattttcctcggaaaagtcttttgccagaacgtctttcgtgctttttgactgcttcgatagcagggtcgtaaaaacgacgagagtacacgtaagcggcaaggccgaccgagccgagggactcctacgcctccgggatacggatacctcactcatcaccttccgcganaagtaactcgcgctcggataagcgattctacta

SEQ ID NO: 65046 - DNA, 484 bp, Zea mays
  unsure (1)..(484): unsure at all n locations
ctaagcttgaagtttcagagccctatattgcataggaccagcgactctctcaattaattactttgccacccagatttgtctatgtctactcttatttggtggacctaagaatgtaaccttaatctttccatttgcaacctctcttagaacatagtgagcattgaaagcaaatggtcttaagtgcttatgcaagggagttggtggtttagcttttgcagtgtgggcaaaatgaccttcatttccacactcaaagcatttgataggcttgtgagtctgcattggcttgtattgagtgatggctttctttgcacaaaagcattgtatccaataccactcttgttatttttcataacagcgttcataagcagctcactttggaggtatngacccttgttgaactcttgcacacttggtgcaagatgttcattttcactttctagtttctggacctcattcttaagcctttgatatccactgcaactca

SEQ ID NO: 65047 - DNA, 118 bp, Zea mays
ctgagcagcactacgggacattagaaaggggtttttttacctggacccgcgcgtgaggtgctctaactatgtctcaggggagactctttcctcttcaccagcattgtccttaccgctc

SEQ ID NO: 65048 - DNA, 371 bp, Zea mays
agctactcctggacaagtgctagacttatcttttagcgcgaagctgccacatataataactaaggagccccttgcatgggtggagataatgttgtttaatctatcacatattgcttcacttcctcgaaagctttttgttggctgggtccccattgaaagacttctgctgatttcagcacttccaagaatggtaaatttctttctgctgatctggatataaatctattaagagatgccaaccctcctgttaatctttgggcccccttttttgtggttggaggctccattcgaactatggcttcaagtttacttggattagctgcaattccctttgtcgaaccaagcatacaataaatatccccttctttaca

SEQ ID NO: 65049 - DNA, 365 bp, Zea mays
  unsure (1)..(365): unsure at all n locations
catcgtcggctatcccatgtcggtttgaggaatctggccaaacttcaaaaggataatcacatcattggactaacaaatgttgtatttgagaaagatagggtttgtggcgcatgccaagcaggatagcaacatggagtcccacatcaatcaaagaatgtggtcacaacaaagaggccattggagcttcttcacatggacctcttcggacctgtggcttacattagcattggtggcagtaagtatggtttagtcattgctgatgattattctcgattcacctgngttntctttntgagtgataaacgtgaaactcaagagatattgaagaaattcatgaggagagctcaaaatgatgttgagttcaa

SEQ ID NO: 65050 - DNA, 342 bp, Zea mays
  unsure (1)..(342): unsure at all n locations
agcttcgnctactcaaaggacgcgattctctccgtccgagcccaaccttaggcgggaacaataatcccagacgaatgctcgccttgcccgaaggcctcctcaagcaacgggcgcaccctcgactcacccgaagcccagctgtggcaagcttcattgagaagcaaccttggccaaatgacctaaccaacctaccgtatcggaagcgcaatcaatgcaaggaatgactgacaccttatgctgacacgtgtgcctcactcagcaaaggtgaagtgactcgagttactctgtcctttcactgaccgacctgacatgaaaacagcgccgctcgcccctcttcgactg

SEQ ID NO: 65051 - DNA, 417 bp, Zea mays
  unsure (1)..(417): unsure at all n locations
ctaagcnttgcatacctttccaacgagtacttatgcgctctattcggatttattctttangagatatcactgtttgaacccgactatgttgctgtccaaaaacagattgcagggtgtatcttgtagacgggtttgggctaattaaatgttggaatttaattatcatttgaatataaaacttttggaaattntatgtagatgctttcggaccttttgattgatatcactgcttgttataatttaaagttatgaaattatcaagcagcgccactgcagtttggtagtgatggagagagttgtcgctcgcgacgggttggaattgtgcgtatgtgcagcgttgtttattagcgtttgttatgttgattcgtgcactaaggtgtgtgtcaaaaacatgtggtggactttcggatcatactt

SEQ ID NO: 65052 - DNA, 445 bp, Zea mays
  unsure (1)..(445): unsure at all n locations
agcttggatcaagatgctggtccttcttttatgctgctaagggagtgcccgtgctagnttttgctgaagctgaccccaatgggtgtgacccgactgatgatgaccccaatgggtgtgacctatatgatgctaaccccaatgggtgtgatccggttgaagctgaccccgatgggtgtaccgtccgcattgttgatgaagatgatgaagaggaggatgaaatccctctaattcggaagaacaaccgacgctacatagtcaacgaagaaagtagtggtgttccttctccagctttgtctgccctcattggtctgcaagaattgtctctggcaaactttgatcagactcttgaagacatggtcccaaaagatctgttgtcagagccggcagatggtggaatgatggatatttgtgctgatgtgcctgatgctgtgcttaagttatctcg

SEQ ID NO: 65053 - DNA, 473 bp, Zea mays
  unsure (1)..(473): unsure at all n locations
ttgggcgtgcttgagcgggttaattcgattcttatctcaagctatctaccttacactggctattctnttaagattgacccatagatgaattgagctgttatatcactaacttcgtattcatctcaagcaagatcttgtgttgtacgggataaaaagatttacctttgtggaaattaagagaaagacctacaacttggtgaagttcaaaggacagtagcatttaactcttaagtgtatgttgctctcaattgctatattcctnttgtgtcttgtgtggtcacataggaaaaagaaggcacttaagaaagatcttaagaggacttacctctcctttgaaaagatacaatcatatggtagattatatattcatcattcttatacatggaaatctacattgtttaaatttggttgtaagtatcttgtggcatatttcagattatctatcttattactggcatgatctagacataaag

SEQ ID NO: 65054 - DNA, 444 bp, Zea mays
agcttcggctcggtcgaggagtagctctcctcggtggagatattgcaggtacggagtctgccagtttcgattaggcgtgaccccgctccgctcctcctcgacgcgcagtgcctcaccctcgagggccgagggtgcctcaaggtgagccgagggtgcctcgggctgggccgaagccttctcgggctcgagcgcgtcgtcggtcttgacggagggttgatgtaagtctcgggagaagacgtccgggggaaccgttgtccgccccgaagctatcttatccagctcgtccgcagtctcgttgtatcgtcgggcgatgtggttgagctcgagcccgtagaacttgtcctccaggcgccgaacctcatcgcagtaggcttccatcttcgggtcacggcagtgggagttcttcatgacttggtcaatgacgagctgcgagtcaccgcgagc

SEQ ID NO: 65055 - DNA, 469 bp, Zea mays
  unsure (1)..(469): unsure at all n locations
cacgacgacttcggcgacatatgctaggcatcatttttcttcttcgncatcctacatgaggcaaagaatcatatgaatcaagtccaaaggagaaggccagcacgaaatgtcatttcttactggttcaagatgacttcgggcttcgtctccagctttctctcgcccgccctttgtccataccatttttataaatctattggagatacttcgggcgaggtcgggcatatcatccaggattgatgaagataaggtgaagttgggcctgttgacaacctttccatgttcgcagccggccttcagaaatgcagcagcggtaccccgagaagctacccaggcacagaagtcgccgtgcccggctataacttcgtcaagctcttcgatttcagcttcaatatgatcgaaagcctgngggtaaatttccgccgaagggttataatttacactgctggcttcaacagagaaaatatct

SEQ ID NO: 65056 - DNA, 435 bp, Zea mays
  unsure (1)..(435): unsure at all n locations
agcttcttaattntcaaaacaccatttatatttataccttggaacatctttgctatttgttcatcatcactagaatcactagaagaagtttaatgatcatcatcatcactagaataagtatacttaggagaggaacttaaaatggggtttaccttctttttacgctctttagccgtgaggcatgtatgctatagcttgaggaagagagatgtcttgttgaaggccaaatgtgtaatgcctacatattcagaagaatcaaaactctcttcattagagtcccactcgttcccgatgtgtgcctcctcgtatgcctcttcttgaaaaacctcttgttcttgggataacccttcttctcttccttgtcatcattnttatcatatggacaattagtaataaaatgaccattcttaccatagttgtagcacatttttcttg

SEQ ID NO: 65057 - DNA, 471 bp, Zea mays
  unsure (1)..(471): unsure at all n locations
tgtgaaaattcttcattccaacatgtgctagtcggcgatgccatagccagcccatgttagtcttagcaattaagcaagtgtcgagttcagctctatcaaaatctactaagtatagctgaccctctaacactcccttaaatgctactgaatcaccacttgttctaaagacagtaacacctacatccgtaaaaagacagttgtaacccattttacataattgcgaaactgaaagcaagntgtaatctaaagaatctataagaaaaacattggaaatgaaatggtcaggtgatatagctattttacccaatcctttgaccaaaccttgattcccatccccgaatgtgatagctcgttggggatcttggtttttctcgtaggaggagaacatcttcttctcccctgtcatatggtttgtgcacccgctgtcgatgatccaacttgagcccnccgatgcataaacctacaaaacaa

SEQ ID NO: 65058 - DNA, 427 bp, Zea mays
  unsure (1)..(427): unsure at all n locations
agcttcaaacanaatcactgtctacattattcatcatgcttcaagaaaagaactatcccaagaagaaatgctagaggcacgacactatgcccaaaaattgaaatatccgaagggggcgttagtgttcaatggtagtgatgaagaagattttctgtactgtctcccggataacaaagaaatatccgtttgtcgggagataggtaaaagcatcggattcctgaagctggaagacagcctttcgattttatcgaaagatgaacttgctgacagcctagcatataatagcataaaggtatgaaatttaactttaaatttgaaaatgaggtatttcatttgtcatactcaactctntcctcctcttgcagggcttgattcttagtaacgcccttagagtgcagaanaatattgaagacgaaggttatacgat

SEQ ID NO: 65059 - DNA, 483 bp, Zea mays
  unsure (1)..(483): unsure at all n locations
tataacaagagaatagaggcaagagctcgtccatatgtcattatataaagggagttgtacaaacatnggagttgtgctccgttgctcaaatgcttatccagaaccgaaggtatagagttaatgaaagaaatacatgcaggcctgtgtggatctcacatcagatctatgccgttacttggaaaaattttccgtcaaggattntattggccgaaagcagcttcggatgcagcagaattggttcataagtgcgaaggttgtcagaaatgtgcaagagataaaaaacaaccttcgtccttgacacagctcatacaacccacttggccattgcaaaggtggggccttgacttgttaggtccgttaccaccggcccaagggaacctgagatatgttgtggtagctgtggaatanttttctaaatggattgaggcgaagcctttagccacaataacttcggctaccgtccaaaagtttttctggcagaat

SEQ ID NO: 65060 - DNA, 466 bp, Zea mays
  unsure (1)..(466): unsure at all n locations
agctagataacgaagagatggttcttattattaagagcttccgacaaatcctcaagcataggaaggggaagaactataaaccccgctccaagagtgtttgctacaggtgtggtaagtctggtcattttattgttaaatgtccatatacaagtgatagtgacaggacgacgaaagatagggaagaagaagatggagaagataaggtactactacaagaagaaaggcggcgagacacacatgggaagggagtgggactcctacgagagctccactgacttatcctccgacgaggacgctaccaacatcgccatcaacaaaggccttctcttccccaacatcggccacaaatgcctcacggtctatgatataaaaaagaagaaggtacagtctagggatactcccanatacactacttccaatgatgaaggtagctctagtgaanatgatgatgaattaacttctcttt

SEQ ID NO: 65061 - DNA, 187 bp, Zea mays
ccctagacattggtctcgacactcgtcctagacagttgtgctagattggtaactattatctgaacgcctttttcgaaacgattgtctctgattgtttatcaaaatttacgataatggagatctagaccgtccttataattccgattgctagtgtacggcacttgatctcgaatactgtgtggggtgg

SEQ ID NO: 65062 - DNA, 432 bp, Zea mays
  unsure (1)..(432): unsure at all n locations
agcttgngatatccatcanatctgaagntgtcttgttgaagtntggtctgttcacaatgtttccatgcgtgcagccagccttcaaaaaagtcgtagctgtgccccgagaagctaccagggcgcagaagttggcgtgcccaccaataacttcgtcaagggcgtcaacttcgccttcaatatattctaatgttcttggcagattctcagctgaaggtgtaaatttcgaagagctagctccgacagagtgaaacacaaccttcagccgctgcacacatcggctgccgaagcttaagcacttctcctgaagttctctaaaggatttctgcaaatttgagtatttatccacttcaactttcaggcttgcttcaaaatatttcttttcttgctcaaatttttctgagtgacggagcaattcattctttaattggtcat

SEQ ID NO: 65063 - DNA, 423 bp, Zea mays
  unsure (1)..(423): unsure at all n locations
tatgccgagatttaaatatgggccagttaaattgaaatcatgcttatctacacatgtggttaaataataataactttggcttgtgtagtgaggtggcgacatgccgaagtagtcatcacttcctctatngttttaagtcaagtcaaaatgcggggtactagtagtacgctaggcaggctgtgttccaaatagataaatccggtgatgtggtagttgtcaagcatgatacaggttgagtcacttatgttataaattgatgctcgacatgtgaggtctcctaaaatatggtgtttaaagtgacttgtgcgctgtccagtttaagttgagaaaatggttaagaaaaactaattaatctgctcccatctatgttcttgagttgcgaagtctacaatactttgctaagtggtatactggntaacaaac

SEQ ID NO: 65064 - DNA, 383 bp, Zea mays
ctgtgatgactgcgagcacagtttctcttgttgattacctacgtattctggtacatagggagagtagcatgaagcagtacgtaagacctgcttcggctgattctgccgcgcctctaggtcgacaaactctttttgcttctgaattgtgacctgacatgttcttgtagagtggcccttgtcttcaccacagaataagcagtaaagtgttatgggctgatcctcgtaccttccttcgaagcccgtgacgcctctgccccttggggttggtggcctgaaagaactttgttgttgccctgatgattgagagctatgttgtggcctctgaagctggcttcctctatcatcactttggctggagatatggattgatctaacatgtctac

SEQ ID NO: 65065 - DNA, 458 bp, Zea mays
  unsure (1)..(458): unsure at all n locations
aagcttctaagggagaacatgtgatagggtaacagacttgcgtttttaacataggaccaccntcaataaatcttctatagtatcccgccaatccaagaaaacttttgatcttggacgcatccttggggtgcttcaaatttagtatctcacttatctttcttgggtccactttaattccaccatcggtaacaatatgccctaagaaagcaacttccttcaaccaaaaatcacacttcgagaatttgcgtacagttggttgtcacgaagcttttgtaggactagccttagatgatcttcgtgtgtttcttcattcggagaatatatcagtatgtcgtcaatgaatacgaccacaaactgatccagatattccatgaatactttattcatcaatttcataaagtatgctggtgcattagtcagtccaaaccacatgaccaaaaactcatgtaatccatatc

SEQ ID NO: 65066 - DNA, 476 bp, Zea mays
  unsure (1)..(476): unsure at all n locations
agcttactcccccctgagaagggccgttcatcatttccaagtatttgaagcccgggacatacaagctggccaacgatcaaagcgaggtctacaacaacgcttggaacatccgacaactacgtcgcttctacccttaagatgtttcgagtcgttcatatgcctcgttgtctttacatacacaaatagagtctaaccgtcaaggaagggtcagccttgcctcggcaaagcccgaccctccctcgggggctagaaggggggaaccccctctgcgtcaaaattttcctcggaaaaagtctttctgccagaacatctttcgcgctnttcgactgcttcgatagcggggtcctgaaaatgacggagtacacgtaagcggcaaggccgaccgagccgagggactcctacgcctccgggatacggatacctcactcatcaccttccgggataagtaactcacgctctgataagcgattctcccg

SEQ ID NO: 65067 - DNA, 326 bp, Zea mays
  unsure (1)..(326): unsure at all n locations
aatcttcgaagtctatcttcaccaacttacccccgaggcaattataaggctgaatatcttcgtgtgggccgtgagaagccaaggtctgaagcctgatgcaaaaagcttctgcaatatacacgaattatcatacgaaacaaaaccttggggtaaagaacagtatcantaataatttggctgctacagtttcgtttctcgcttcgggtcaagctgtcccgtgccaacctttcggaagagatggcccggcgactggatgacagaatggctttatgtgaagaatgacctgtcagtacgagaagatatcanaggtataattatgcgcccta

SEQ ID NO: 65068 - DNA, 444 bp, Zea mays
agcttctaaagggagaacacgtgataggtctaactaatgttcaattcgaaaaagatagaccttgtgcagcttgtcaagcaaggaaacaggtgggaggctctcatcacaccaaaaatgtgatgacgacatcaagacccttggagatgctgcatatggacctttttggacccgtcgcctatctgagcataagaggaagtaagtatggtttagttattgttgatgacttttcccgcttcacttgggtgttctttttgcaggataagtctgaaacccaagggaccctcaagcgcttcctcaagagagctcaaaatgagtttgagctcaaggtgaagaagataatgagcgacaacgggtccgagttcaagaaccttcaagtggaggagttccttgaggaggaaaggatcaagcatgagttctccgctccctacacaccacaacaaaatg

SEQ ID NO: 65069 - DNA, 378 bp, Zea mays
agcacatgccaagcaaggaagcaagttggcactcatcatccacacaagaacatcatgactagtgacaggccactggagctcctacacatggacctattcggcccgatcgcttacataagcatcggcgagagtaagtactgtcttgttattgtggatgattattctcgcttcacttgggtggtctttttgcacgaaaaatcccttacccaagagaccttaaagggattcttgagacgggctctaaatgagttcggcttaaggatcaagaagattagaagcgacaacagaacggagttcaagaactttcatattgaaggcttccttgaggaggagggcatcaagcatgagttcttctcttcctacacaccacaacaaaat

SEQ ID NO: 65070 - DNA, 471 bp, Zea mays
agcttatgaagattcttcatcccaacatgggctattctgtggtgccagagccaacccatgttaatcttagcaattaagcaagtgtcgagttcagctctatcaaaatctaccaagtataggtgaccctccaacactcctttaaatgctattgaatcatcacttcttctaaagacagtgacacctacatcagtaaagagacagctgtagcccattttgcataattgagatatagaaagcaaattgtaatctaatgaatctacaagaaaaacattggaaatagaatggtcaggagatatagcaattttacccaatcctttgaccaaaccttggtgttcgtccccgaaagagatagctccgtggggatcttggttgttctcgtaagaagagaacattttcttctccccactcatgttggttggtgacccgctatcgatgatccaacttgagctcccggatgcataaaccctacaa

SEQ ID NO: 65071 - DNA, 352 bp, Zea mays
  unsure (1)..(352): unsure at all n locations
tggacgtgaagagtgccttcctcaacggaccaatctttgatgtggtctatgttgagtaacctcccggctntgaagatagtgagtaccctaaccatgtgtataaactctcaaaggcgctttatgggctcaagcaagccccaagagcatggtatgaatgcctaagagatttccttgtcgctaatggcttcaaagtaagaaaagccgatcctactctctttaccaaaaccattgaaaatgatttgtttatatgccaaatttaagttgatgatatcatatttgggtctactaacaaatctacttgtgaagacttagtaggatcatgattcaaaaattcgagatgtctatgatgggg

SEQ ID NO: 65072 - DNA, 404 bp, Zea mays
  unsure (1)..(404): unsure at all n locations
agcttctanagggagaacacgtgatatgttttactaacgtacaattcgaaaaagacaaaccttgtgcagctcgtcaggcaggtaaacaggtgggaggagcgcatcacagcaagaatgtgatgaccacatcaagacccctggagctgctacatatggacctcttcggacctgtcgcctatctaagcataggaggaagtaagtatggtttagttattgttgatgacttttcccgcttcacttgggtgttctttttgcaggataagtctgaaacccaagggaccctcaagcgcttcctcaagagagctcaaaatgagtttgagctcaaggtgaagaagataatgagcgacaacgggtccgagttcaagaaccttcatgtggaggagttccttgaggaagaaaggatc

SEQ ID NO: 65073 - DNA, 320 bp, Zea mays
  unsure (1)..(320): unsure at all n locations
aacgaaactattacatgaagattgaaaaatgtcctttattacaccgaaaataaaactgaatgaataagactgctatcaaggtaggatatttgtcaatagatgtgcttcgactctggcacagngctgttgactgtgcgggcttcggactgttctctgaagatcctttggtgtgggccatattggctcccttctatctgatggccttgttgcaacggtagaggaagcggaggctgttaccaagaagcttgaggttgactcgccgaagcaacagaaactgcagggtggctgcctacatattctgggatgtaaggcgaatgata

SEQ ID NO: 65074 - DNA, 407 bp, Zea mays
agcttgccaatacctgtcaaagcaacagcttatgctatcacagcagctacagaccataccagtaacttggcctttcgcatgctggggattggatatgattggacctttcaagaaagctcaaggaggatatacccatgtattggtggcaattgacaaattcactaaatggatagagttccagcccattgcttctttaacctctgctaaagctgtggaattcatacaaagcataatattcagattcgggataccaaacagtatcatcactgacttgggatccaacttcaccagttcagaattctttgacttctgcgagcaaaagagcattcagatcaagtacgcatctgtagcacatccaagagccaacgggcaggttgagcgagccaacggaatgatattggaggcac

SEQ ID NO: 65075 - DNA, 378 bp, Zea mays
  unsure (1)..(378): unsure at all n locations
tctaaagggagaacatgtgatagggttaactaacgtgcaattctaaaaagatagaccttgtgcagcttgtcaggcaggtaaacaggtgggaggagcgcatcacagcaagaatgtgatgaccacatcaagacccctcgagctgctacatatggacctcttcggacccgtcgcctatctaagcataggaggaagtaagtatgggttagttattgttgatgacttttcccgcttcacttgggtgttctttntgcaggataagtctganacccaaggaaccctcaagcgcttcctcaggagagctcaaaatgagtttgagctcaaggtgaagaagataaggagcgacaacgggtccgagttcaagaaaccttcagtggagga

SEQ ID NO: 65076 - DNA, 467 bp, Zea mays
agcttatgtcgatgacgtggtgatcataatataaaactcagaaaacttcattgaagatttgcagctggtcttcaacagcctgatgcgatactgatggaagctcaatctagagaaatgtgtcttcggagtaccagcagggaagttactcggattcattgtcagccaccgaggaatttaagccaacccagaaaaatcgaggccatcatgagaattgaagtgccatgatcatagaagaaggtacataggcttactggatgcatggcggccctgagtaggttcatatcaaggctaggcgagaaaaggcatgccattctacaaattgctcaagaaggtggacaaatttcagtggaccacagaggcatatgaagctctagaggcactaaaaaagttcctgactacgccaccagtactcaagccgccacggtgagccacgccgaatcagccggcagaagatctagttgtataca

SEQ ID NO: 65077 - DNA, 419 bp, Zea mays
  unsure (1)..(419): unsure at all n locations
tgcaaccggagcacggagaagattcttgtttattatccatggaagnacaagagggagaccctgcttggacaccctctggggctatgctatagtttgcgctacccacttgagccggatcatcttcggcagtaccctctggggctgggcagtggctagcgtttcccacccgagccgagtcatccctggtaacatcctcgggggctgggcaagtgtcaacaccatccttgaagaccaagttctccgcagtagccgcctctaaagctgagggtccctcaattacttncatgggagcaagacgatccaagtcagtttcctgaccctcgagaccgcgctctaaggtcgacgatgcgcggtacgctgcccgggatgatcccaacccggcgttgagcacgtcagcacataactccatcacaccatca

SEQ ID NO: 65078 - DNA, 446 bp, Zea mays
  unsure (1)..(446): unsure at all n locations
caagcttanaggcactaggccacgagcaatgtttgttctgcggcgatggtgagcatgagcagagggcatgagagcacgggagagggtgtcaatgcgtgtgatcgacgatgggggattgggtggttcttatagggacaaagctggggcgaatcgactctagaacaacggatatctccgatgattgaagatccagccacctaccatagacagcgctcgtgaatggggaaagaaattcgcatcgggtggaggaaaggatcgagggcaattgcagagaaaaggaagggggtcttggcatgctccacttcgggcaaggaatcgaccgacagtggcttggcgcgggaagcacaacacggcgaggtccggcgctggtgcgagcgagcggaggaaggagaacaggaatgactgatagcgggacccatacgtcatagagagggagggaaaggaaa

SEQ ID NO: 65079 - DNA, 481 bp, Zea mays
  unsure (1)..(481): unsure at all n locations
taagcttcaacaacacatgtgttctagcagatacaacacatggtcccatttaatagcgcaacgggttcctcattcgacaacacaagaagctaaatgatcctctcaaatatgcccaattgtagagggaccttatcgagcatcactgggcatgtcttggatctggccttgcgtacgtatattgtgtgtccaagttataataaattgaagaaaaatcaacaaacaacttttatcctttagttagaactagtattcgatcggagtaaggtaatttgtgttttcattatgtgtattnggacgtgcaataagtacctaattcaataagtttgtaatgtgtcgtggtcatccagtcaagtatgtaatggtcatttgtaatgacactcctatggtccatctgcgatccacaatcagagctacctctggtaatgcatatgaagtacaccagtatgacaaatgtcacanacaaataaacattcattccaac

SEQ ID NO: 65080 - DNA, 411 bp, Zea mays
  unsure (1)..(411): unsure at all n locations
agcttctntctgttctcctttgagggcggtgataccagaagagcagcttgacgagccttcatctcatttgtttcttttcttcttgcgatccgtgtccatttttccgtgggtgaggtggacagcttggttctttgggtaaacggattctctgctcctagcctgtacgaggtagtctttgctcagagcgctggaggttgcgttatttcctgcatcgctccggctttcctggagattatcgaggaaggttttctctccggcagatccgcgatgcgatgtagagtcccttctttgtctgccacagatgaaatggttccgaagcataacatggatccatggcggagaacgatattgtgcttgaaggtgatggccattgagctagcttggatcagtgacacaccccctacctggcac

SEQ ID NO: 65081 - DNA, 402 bp, Zea mays
  unsure (1)..(402): unsure at all n locations
tcaactccatctatgttatggatttcttttgagtctatccagttttcttcggcccttntggcagcttcctgacttccatgaatagcaatgggtccttggtccaaaggtatcttcatgcaaagatatgctggatgaagaattgcttcgaaagcattgagagtaccacgaccaatgattgcattgtaagggtattccatgtcaacaaattgaacacaacttgttcagtccttgtgttgttgataaatccgaaggttactggcattgtgattttttctagtgctacaatctgccttcctccgaagccacaaaggggatgtgtggcatcattgatcttgtctttcggctcttgcatctgtctaaaggccttaacacatatgatgtcagatgcactggctgtatcaa

SEQ ID NO: 65082 - DNA, 380 bp, Zea mays
  unsure (1)..(380): unsure at all n locations
ngaaggacanactcaaaagcaagncccagtatattttgtctctgaagttntaagcttatcaaagaaaaattacacagaattggagaaagtgttgtatgttgtattaatggcctccaggaagctttggcattattttcaagcttaccatataattgttccctcgtcacagcctttgaaggatattatgaggaacagagaagctactggaagggttggaaagtgggccgcagagctcaatgaattcaccattgactacgtgcacagatcttcaattcaatcccaggcgctagcagacttcatcgctgactggacgctaggggctcacgaagaagggacaagcaaggataccgaagcttggacggtgttctgcgatggttctt

SEQ ID NO: 65083 - DNA, 440 bp, Zea mays
  unsure (1)..(440): unsure at all n locations
agcttctaagggagagcacattttgactttaaatgtgcattttgagaaagacaggatttgtagcgcatgccaagcagggaagcaggttggtgttcatcatccacataagaacatcatgacaactgacaggccactggagttactccacatggatttattcggcctgatagcttacataagcatcggcgggagtaagtactgtctagttattgtggatgattattctcgcttcacttggatattctttctacaggataaatctcaaacccaagaaactttgaaaggattcttgagacgggctcaaaatgagttcggcttaaggatcaagaaaataagaagcgacaatgggacggagttcaagaactcacaaattgaaggctttcttgaggaggagggcatcangcatgagttctcttctccctacacgccacaacaaaatg

SEQ ID NO: 65084 - DNA, 472 bp, Zea mays
  unsure (1)..(472): unsure at all n locations
taattacanaccaatccttatgtatccctttcttacatatctttatgacgagaattctgtgaaaggggtaggagttgtaacacccaaaatcctattctgaatgtacaaaanaagattattctaaggtctaaataaaaggtcatgaataaagaatttattagcttagtaattatttcttggaaataagtaaatagtagtattatttttctttatcaaagatagatttgggtctcaaaactaaaagtaaaaaaaaattgaaaatcttttaataaacataaagagttctaatttctgatatgagagaattattctcttcttcgctctctctcatgaattaagcatcaatattatttaaaatgataaagtaaataataaaatattattgcatcatgctgggattatcttgtttgtcaaaactcagaattgaattctgttgaaaatttaaaatgatacttgataatataatgaaata

SEQ ID NO: 65085 - DNA, 471 bp, Zea mays
  unsure (1)..(471): unsure at all n locations
agcttgtagctaaattagacattaacatattcttggtcctctgagccagaagagccatatgtcttgaccactagactactagtgatgataatttgtgatagaaatattaagatattgtagagacctgttgtatcctctctactcctgatgatttcttcgtacgagagcagtactacctggtgttgaagatggatcctaagcggataccagtattgtttcgttcttaccaagcagttatcatcatttgtgtcatcaaaagctagttatatggtgattttcccagataaaaatgaatttttggccttgtctgttctattccaaagcttctttttttgctgaacaatgaagagatcgaaataatgctttatagaacaagttggtatataatatgaggagaaatatttgccctgctggcaacaccatacataatngactatcggtataagttctctctcaaaaatattataccta

SEQ ID NO: 65086 - DNA, 438 bp, Zea mays
  unsure (1)..(438): unsure at all n locations
agctagactgaccactttggcagaagagctttcgttcgtgaagatntgttcgggccacggagtcgctttatccgaacgcgagttacttatcgcagaaggtgatgagtgaggtatccgtatcccagaggcgtaagagtccctcggctcggtcagccttggctgcttacgtgtactccggcgtttccaggatccgcttttcgaagtagtcaaaaagcacgaaagagattctgctaaaaagagatcttttttcgagggaaaaattcgacgcagagggggtctccccccttttagccgccgagggagggtcgggctctgcctacgctatgccgacccttccttgatgactaaactttgcgtgcgtgcgaagtttacgaacaacttcgacacatcttaagggtagaagcgacgtacctgtttgatgatccacgcgttgcctta

SEQ ID NO: 65087 - DNA, 396 bp, Zea mays
  unsure (1)..(396): unsure at all n locations
catcttgtcgtagccgaagcaccaaatcttccacttgtgaagcctcgggccgaatcattctggcgtggtagcgtctcagagactgctggtactgcgccgagtgtaataaggctacgtcccgagcctcttctagctggtccaatgaatactctcggttggtctggttgttttggtcgtcgtatgcctttgtcctcggggaaccgtattccaagtccgngggtaagatggcctcgaccccatagactaggaaaaacggcgagaagcccatggcccggctcggcgtcgtcctcagactccaaaccaccgagggtagttcttttatccaccgcttgccaaacttgttgaggtcgttgtagatcctcggntatatatcctgcaaaatcatgccgttggcgc

SEQ ID NO: 65088 - DNA, 467 bp, Zea mays
agctagagacagacattagccgctaccgattacattacatcgtcggtagtttattctattccaatgtcaaggtaaaaaacttttcttcaactttgtattgtttttaacaacgaaggtgttttctaacgaaggttgctttgtgcacagagtatgctgttgagtaaagctttgagaatgcaacaagatcttgaagataaaaaacatgaagttataattgagggtttatgtaacaccataaaagccatcaactaaaaataatgaatttagttattatgttaattatggtaataatttttttaagtgtttaattatttatttgcattttgaatcagttttctttgtatgcacatgtttgatgatccgatgtttataccaattctttttaaaagaaaatactagtaaacaatataataattaaataatataataattattagtctaacaataaatattgtatttataaatac

SEQ ID NO: 65089 - DNA, 498 bp, Zea mays
  unsure (1)..(498): unsure at all n locations
ctcagcttagcaactggtgctgcagctctgcaaccgctggaccccattcatgagactctctnccttcgggaggcccgaagccagaaaaggaaggctgtcagcccgacaccgccagaggatgacctagaccaagaaatcagagacatggagatgcttcatcaacaggtgcagaggaagaaagaaaagatggccaggctagctgaacttcaaaggcaaatagacgaagcctctgaagaagttcatcatcttactcatgatgagcagaaccgaaggcctcagcataaagacctttatcaagagggtttcctcaacgaagatgactggtatgagaatttccaccatggaaattttgcttttgatgatgcttctcctctgtccactgagctgcaggctacaccttggccttcgtcctacaagccgcctcagcttcccatattcgacggccattcagacccgaagcagtttttgatgagctacgaaacaacagtatcttcgtat

SEQ ID NO: 65090 - DNA, 358 bp, Zea mays
  unsure (1)..(358): unsure at all n locations
agcttctaagggagaacacgtgataggtcttacttatgttactttcaaaaaagatagaccttgtgcagcttgtcaagcaagtaaacaagtgggaagctctcattataccaaaaatgtgatgaccacatcaagacctttggagttgcttcatatggacctcttcggacccgtcgcctatctaagcataggaggaagtaagtatggtcttgttatagttgatgattactcccgcttcacttgggtattctttntgcaggataaatctgaaacccaaaggaccctcaagcgcttcctaaagagagctcanaatgagtttgagcttaaagtgaagaagataaggagccacaatgggtcggag

SEQ ID NO: 65091 - DNA, 446 bp, Zea mays
gaatgcttctgaagctatcttgccatttcacctattttcctgaaagatgctcttagagctctttttttaaatgaaaaacattatatccgataaaaaattatcgaaggatgtaatatctttacaagcatttatgagtaccttgtaatagtaactttcttctgctattacttgctttgctgtggacgaaaccagtgttaccatattttgagccgaaagagaaatacacctttccttcttttcgttacaaaaaacattcttgagccgaaggcgaaaaacactttcccttctttttcattaatgtctcatgcaatgcgccatggtgcaatgaaattaaagatgtctaatgaatgtttgtatgaatgcaaagtatgatgtaatgaagtatgcaagtgcatgccaaatataataaaacccccacaaacacgctcacagacatctgattccct

SEQ ID NO: 65092 - DNA, 443 bp, Zea mays
  unsure (1)..(443): unsure at all n locations
agctagcttctgccatggttcaactttcgtttatagcgccatagcgtgcgtatcttggcaaagtcactgtgtacggtcgcttctctgctccaaatcctatcttttcgctgtgagttccaagtcgcgatatggtcggggtagggagatagagaggggagaagtttgctgtgtcatctaagcccgaaccgagacaaaaggggtgtcaagtcgtgtctagcgccctagagtaggtgtcatctctttccagggtgttctagggttaatttggcgccattttgtcaattgggtcgaaaggttttgaaaaggggatcaaggtgaacatgtggagtctttgtgtaagggttagtttctgtacttaggcaaaaactgaattctcccttgtgctaaatcttaggtgaactggttagggcttttctgaaaactttntgggggtacttcttact

SEQ ID NO: 65093 - DNA, 472 bp, Zea mays
  unsure (1)..(472): unsure at all n locations
agcttcatactcggctgcgttggtatatgtctggatcagcagctggagagcatacttgaggtgctcgcctccaggtgcagtgaagagaattcctgctcctgctccctgcagtttcagcgagccatcaaaatacattcgccatacttctgcggtttctggattatccggtacttgctgttctgtccactctgatacgaaatcaaccagtgcttgagttttgatggctgtgcgaggtcggaactcgatatcatgggatcccaactcgcaagcccacttggctattcggccaatggcttccttgttgtgaagaatgtcccctattggaaaaccagtaactactatgactntgtggtcgtcaaagtagtggcgcagcttgcgggcagttagaagtactgcatataatagcttctgaacttgaggatacttcttctttgatggacctagaacctcactgatgaagtatacaggatgt

SEQ ID NO: 65094 - DNA, 384 bp, Zea mays
  unsure (1)..(384): unsure at all n locations
tcttaatgtagacgacaaaagctgatggcttgccatgttcttcattgtgatatagctnggtgtgggcgagatatcaccggaggtgggcaccaatattgatacttgcttttgattactacatggtaccaaaaagaagacaacacaaatgagaagataacttccttctccctttacttacctcttctctgaagggtaactaaagaaagaaggtttgaagagggaacgtaaacgaagctatattgtattgaagagtaatgaagaacgaagcatgttactcatctttagggatggcaacgggtcaagtttgggttgggtgcagcgtccggcggacctgccctcgaaacccgagatgtcgactcgaaactgaattcactgggtgaaaat

SEQ ID NO: 65095 - DNA, 455 bp, Zea mays
  unsure (1)..(455): unsure at all n locations
agcttagcaaccttcggaatgtgcttctgttcatcaaccttcggcaccatcatcctgcagacaaacaacggtataaggtaaaaagtaatacaagaatcaaggcaagcaacatgtataagttctgtaccggtttaagcaagttttgagcttcgtccccagccaactcttgtccactcttagcccaaatctaagttatgaatctattttcgatgcttcgggcttcactgggaatatcaatcaaatctgatggcgacagactgaaggttggtctgtttactgtcttcacatgcgtgcaaccggccttcaagaatgctgcagcttggcttcatatttctcttgtagatctttcttctcttgttcgaagttctctgatttttcttttaaaggtgtttgactttggagaagctcctcgcttaatctagcattnttcagcttgaatttctgcaagcaaaccc

SEQ ID NO: 65096 - DNA, 475 bp, Zea mays
  unsure (1)..(475): unsure at all n locations
tgcctactgtgttagggttggctactctccgaagctcccaatgttctgtcctaatgtgtttcaactgaacttctctatcatgccatattattgcttcagcttgatatttgctgatattttccatagcctgaagtctggtcccttctatagtatcttttgccgcagagttattagcttcgtcttctaccgaagctactggtcttatcgaccccgctttagcctcttcgggggttatagcttcgtcaccgaacaataactngaatggtgtaaaacctgttgaacttgatatagatgtattggggctccacaccactttaaccaactcatctggccactttcctctgggttgattgaagattaacttcattattcccgtcattataataccatttgccctttcaactagtccatttgattccgggtgcctgactgatgcacaatgaactttcgtgccgatctgatcgtagaaatcttt

SEQ ID NO: 65097 - DNA, 467 bp, Zea mays
  unsure (1)..(467): unsure at all n locations
agcaagcttgattcccttntattatataattcttttttttcacttacgcttaaccgtacacagatgacttctcatggatcatcggaaggagggaacgcacattcccacacggacggacgtgcacgcgaaggttttccccgtatcttgtgggaggtacttcaaggagcaggttacacgatgcctccccagtacacggtgcagctattcgcaaagcaccgggtgcccagctgtaaggtgaggatgaccctggagcctcatcccctacagccaggctggcgttcgttggactctgagtctttcggataccgggctgaggatactatccaggccattgctctccacgggctgaccaccttctgtggttttcaccccttggagctgtctaatcatcccattggcttgttccccgctgaaaaggaagatgacccaatgtggaaagaccgagtggagcatgccaaggatatatg

SEQ ID NO: 65098 - DNA, 433 bp, Zea mays
tatggggtcattagccgcccttagttgcttcatttcgaggctgtctaagagagcgctacctttcttcaagctcctgcggaagtccgggcctttctcttggaccgaaagggcggaacaagccttccgggagttgaagcagcaccaggtgtccctaccaatactggtagctctagaaccagcggagccgctatatttatacatcgcggcggccgcggaagcggagagcatggtgttggtcgttgaaaggacggcaccataaggccaggagcctgaggactcgggatcgacaacaggggtccggaccgttcagaggccggtctactacgtcagcgaggtccttcatgaggcaaaatctatgtaccctgagacgcacaaactcctctatgttgtgctagtcgcgtccaggaagctgcgccattatttccaggcacat

SEQ ID NO: 65099 - DNA, 384 bp, Zea mays
  unsure (1)..(384): unsure at all n locations
agcttactatggtttggagactctattctttattntactatggttaggacactaaaaccttttagtgtcggtgtttaaggttagggtttaaggattgtatcttgtgtctaggttacaataaaaacatgtgctatagctcacttatggcaaaaaatgtcgtaacggcctctccgatctaaaatgtaggtggcaggtcggatgaagccataatcagccttatcagtctcagtggccaaatcatgggtggtggacgggaggcatgaaatcgtcttttgacgatgaaaacatgtgtcacgggaggccaaaaatagccttaccggcctccggggacccaaacgtgtgctatggtttggacactaaaattctactatgtcagcaaagttg

SEQ ID NO: 65100 - DNA, 396 bp, Zea mays
  unsure (1)..(396): unsure at all n locations
cgcggcatggtagatatttagtgtccgaaccattgtacactgttntattccccggcggcccgtaaggctatnttggcctaccgtgacacatgtttttgtcgtcgaacagcgatatcgtgcctcccgaccgccacccattatttgaccatatagactggtaacgttgttntggcctcccgtgagctatagcacacgatttcatggtcgagcgaccatttttatgcccgtgttcctccacacctgttnttctccccggagcaccttatagcggttcttggcctcccgcgagctatatcacacattttcatggccaaacagccaattttatgtatccgacctgacaccttcgttttagaccggggaggccgttatggcatatntttgccacccgtgagc

SEQ ID NO: 65101 - DNA, 459 bp, Zea mays
  unsure (1)..(459): unsure at all n locations
agcttataaaattatctatatctcatagtttaagccatgtcagttcgagtagatttgattntgtgaaacacttccaatttagtcagcccttcctctcaactttgtcaagttcacttttgttttgcatctttgtatctcacttctacttcttgatgtgttggactcttagcatgtataaagtgtcttcaatatgactttgtaatgtcttatatgtgtattataacatcttctttgaggtgttgcatcctcagagcctcagtccaatccacttcgcatcctgtgaactacaacacacaaacacttggaaaatacattagttcacaggttgtgttaatcatcaaacaccaaaatctatcaagccaaatggcccagggtcctattttcttacaaaggtcacggcagcnnacggcgagagagaggaaaagagggagacacagtggacgaagggagggagagagc

SEQ ID NO: 65102 - DNA, 435 bp, Zea mays
  unsure (1)..(435): unsure at all n locations
aacttggcagagcaacataattccgaatgtacaaaatagcgcaagcagctgacatggcacatcaaatgctatcaatgtgagtccctatttatatgcccagcgcatcacagcttggtgggccttgcacctcaatgtctttcgctattctagcgaagggaaagtgtcttttcggaccttnggctaaaggctttctttcacatcgcagtctgaatctgttaatatagaaacaaattaatactacgaggggctactgttgggggccttccttttccgaaggtcctcaaaaacgcgactaatatgttttttagtgtaacatagatngatacaggaggcttcgacttcgagatgaatgtatgcgtgatatggaaatacaacccgaaagcagaacgaacagacgcccaaagtgtggctgaaagaccttccttatataatgac

SEQ ID NO: 65103 - DNA, 447 bp, Zea mays
agcttctactgagggataggaatttatagttcgtcacgcgatggcgaaaaactatcagaagagcagattgccgaagctatgcaatatgccaaggatttgaagtatcccctaagatccttggtgtttaatggcactggtgaagacgactttctatactgccttccggacaatgaggagatatctatttgtcgggagatggcaaaaaatataggattcccaaagctagaggttggcctatctgcaatgtcgaaagatgaacttgcagacaaccttgtctataatagcttgaaggtatatatatttttgttgtaaaataaattatgtttatagattttctttttattggtgtgttctcatacatctttattattatggtttgatcctaagtaaagctttgagagcccaaaaagaagcagaagatgagagctgccaaatagctcttgggaa

SEQ ID NO: 65104 - DNA, 413 bp, Zea mays
gtgcttgtattacatgagacacggtcattctgttgtctggaatactcagtttacaccgaggaccctgtgttgttcctaaaacaatcctttaacttatacacctgcgcaactattcactagagtcgctgacaattcataaacccccctgacttctattccttcttccccgaggtccctcccccttttgaacagtaccagcggaagtaaacagggcggcacgacttatcggcggcgagggaagtccggcgaacggtggggttggcttcgagaggtccttgcggtcacgacgaggtacggctcgacgacagtgatggccggaagcgtccagtccacgtgcgcaagcgagcgagctcgtccgcggcggctgctacggcctatccacggcgataccgctcaattcaagggcacggcga

SEQ ID NO: 65105 - DNA, 458 bp, Zea mays
  unsure (1)..(458): unsure at all n locations
agctagaaagacaattgtaaaagcaggctctagtatactntgtctgcgaagttctcagtttatcaaagaaaaactatacagaattggagaaagtgttgtatgccgtcttaatggcctctaagaagcttcgacattattttcaagcataccatataattgttccttcatcacatcccttgaaggatattatgagaaacagagaagctactggaagaattggaaagtgggctgcggaactcaacgagttcaacattgattatgtgcatagatctttgattcagtcccaggcgctagcagacttcatcgctgactggacgccaggggctcaagaggaagaagcaagttaagatgccgaagcttggacagtgttctgcgatggttcctgcggaacacttcgggcatgtgcagctatccgtttaattgcaccttccaaagtcagaacatgttatgcagtgaaa

SEQ ID NO: 65106 - DNA, 378 bp, Zea mays
  unsure (1)..(378): unsure at all n locations
tcccctgagaacagatgatggctactatcgctttggcacttgtcaggtcagtcattgtgaatcggcttatctgcaggggggcaagtcacggattcatgcaagattgcctgcacgatcaacacaaattctcacatttcggcgagaggaccagagatcatatagatcagtggattctgcattggcactttgcagtgaatcngcaatggtagcgccatgacggtcaccaccctctggcgaagcaaccacaagctcctcaaactgcagcatgagagaaataaaccttcgcatcacctctgaagtagttgaacagaccagctagactttttatggctgcggctgtagattctttagttcatgcgacaatacttagtaggtata

SEQ ID NO: 65107 - DNA, 463 bp, Zea mays
  unsure (1)..(463): unsure at all n locations
agcttctacagggtgaacacattgtaagacttacttatgttcatcttgagaaagacaggatttgtagcgcatgtcaagcacggaagcacgttggagttctttatccacacaagaacatcataatgaccgagaggccgcttgagctactccacatggatctatttggctcgattgcttacataagcatctataggagtaagtattgtcttatgattgtggatgattattctcgcttcacttgggtgttcttttacaggaaaaatctcacactcaagagaccttaaagagattcttgagatgagctcaaaatgagttcggattaagaatcaagaagattagaagtgacaatggaacggagttcaagaactctcaaatcgaagagcttcttaaagaggaaggcatcaagcaagagatctcttctccctacacacctcaacanaacagtgttgcgtagagatagaat

SEQ ID NO: 65108 - DNA, 359 bp, Zea mays
  unsure (1)..(359): unsure at all n locations
gactaacgtgcaattcttaaattatataccttgngcagcctggcaagcacgtgaacaagtgggatgagcacatcacagcacgaatgtgatgaccacctcaagacctctggagctggtgcatatggatctcttcggacccgtcgcctatctgagtataggaagaaagaagtatgggctagttattggtgatgacttttcccgcttcactttgggattctttttgcgcgataagtctgaaacccaaaggaccctcaagcgcttcctcaggagagctcataatgagtttgagctcaggtgaagaagataaagagcgacaaccggtccgagttcaagaacctttcaagtgatgagttccttga

SEQ ID NO: 65109 - DNA, 447 bp, Zea mays
  unsure (1)..(447): unsure at all n locations
agctagcctgcatgcatgcctggcgatttgtttgttcgatgtgtaagattagtttgatcccaactcgtgaacgaacggacgaatgagttaagcatctagttaaccaccctctttgagaaatacccttgtgcgttggtcttctgcacgtactcatgcatatggctcccagctactggcagtaaaaaaacatgtaaaatgttgtttagcataacgaaagcctaaaaactacagtttgttgggcattagtttaattgttttcttcgttcaaacatggctcatctctctgttgccaccgacccaccgntcacgatttgttataagcaaattgatgcaatttcattttaatttggatattattaacatcaaattgaatcgtacatcagctaggactaatcgcttgtgtcgccatgcatagaccagataacgaacacagcgaggatatcacac

SEQ ID NO: 65110 - DNA, 359 bp, Zea mays
gcatgctgcgattatggtgtgttgcatgaggcgtgaagtgcgaaaattgtgcctgacgcacggtacctatcctgtgtgtgcacacctggacggtccgaccatggtgatcggatatggcacggagggaccgaatggcctggtattgtatccggaccgtccgggcgtgtagggatctaatctgattggtctaatttaataaatctaatctaatggatcagacttgatagatcctatatgtcttccccagtagagtcgctattaatgcgtgtagacgcctttatcgaccaagcactaacgaatcctatgccgccgtatagtgagtttggacctggggagcttgatttatataagacggagac

SEQ ID NO: 65111 - DNA, 441 bp, Zea mays
  unsure (1)..(441): unsure at all n locations
agcttgtcgagaagaatgaagatctcgaattgtgcttttgcgaancacgaaataagtgagtggactatcgcaaggttgcaaaagaatgtatatgagcttccggaatcaaaataaagatattacgaataattcttggattgtgccaagaagctaaaggacagttttgcaaaggtgggtgcctactcatccgagcaaaaatttattataggcgaccccgaaggaatcatcaaatggatcggtgaagaagccaaagcttttgaagagatccttattgatcgtggtgatttctgcgcctttgccggtgctagaagggttgcagcaattntggaaaaatctggctgcgaacaccttaaagctgcaacccagacagaggctgtctttattgtggaaaacactaaagatccttctgctgaaaggagtctgatgggcggacaaatttac

SEQ ID NO: 65112 - DNA, 458 bp, Zea mays
ctaagcttaccctgagtcagactataatggtacgtaggcgattctttctttttaccatcactagcctttgcataatgaggactctatggaaaagcctctgaatggaccctatccattcatcctctgaagtgaatatgggtctaacttacccggactataacggaatcgtgactcatgggtaaagatgtgccacctctgcagagtgtaaaactgatatatcaaccgtgctcatggttaagagcaccatggactcctcacatgataattgaacttgaacatggaaatcaatcgagatctgatgatctgccaatgatttgcttaagatggttcacttaagtgtatttatatactctagacctttgttaatgggaaacttgggattacatttataattaaaccgtgtcgtaatatatgtgaccactaaatgttatgtacacttagctaccatgtaaattgat

SEQ ID NO: 65113 - DNA, 469 bp, Zea mays
  unsure (1)..(469): unsure at all n locations
agctnttctaggtggcgtctcccagtcagtttgatggcaccaaagaatgatatttagtttgctctattgttatcattntattttgtaagacacttcctctatgtaataatgattgtgacatttatctctatacactttgtcattatacgtgatgttcttctttggcgcacatatgagacgcaccacagtttatcacataaatccgggtgtggcagaagtggtatcagagcaaatgttgatgtaggacgaanactatatagaacaggacaaaatccttacctacttaccttactctgattctttctatacttttcttgataatgtctcgcctttggctattctactctgattattcttatcttttctattctagaaagacaagaaagatttcacacctcggaatcctacatctaagacctcttaagagataggacacctcagacaaaaaacagtactttctctatctaaa

SEQ ID NO: 65114 - DNA, 430 bp, Zea mays
  unsure (1)..(430): unsure at all n locations
tccttaatctttattggtgcttattaaatatacttcaatgtttgtatttcgcctaagctgtgactctatatttttcatactctntcgcctcttttcttcaattttacttatagagctcaattagggctgttattagggtttcaacattttgctttttagaaaaactcatttgttctgatcatgatgcttttaagtataaacttagtggatcctttattcttaagtcaatttagatgcttcatgcttagtttggctcacaagaaatgatggctcttgggttagcacttgagagaaaccctgcgtgacactggggtgtcacacttcttcgccttctatttccgcgagatattttcgcgttgacctttcgcgcttctccttatatttcggcgatatttggctcttgattcccttttgaacgacctttgagcca

SEQ ID NO: 65115 - DNA, 487 bp, Zea mays
atccttaagtcacctgcggcatcaagctcacccggaccaaaccatttcttttagatctttctacttccccgctgatatccactgcgtgtccagcacgaatcacagcgaccggcacttatcctggcgcaaggtcactggcagcgagggggatgaatctgaagatcttttgcgcactataccatggccaacatcttcattggttctgacaacgtgatctatggagctctgttctccattttctatgtaacaacttagtaatcttcaattttgctatagcaaccttgatcattcactttctgtattgatctataatccatctctctgtaacaaagttattgatatataatccatcttcaattttgctatagcaaccttgatcattcactttctcaatcgagcgtgaatcaagtctaaagttcatcaatactggctgtcagatccatttcaaggttcagtggtgactgacagcccaactttaaacttatta

SEQ ID NO: 65116 - DNA, 367 bp, Zea mays
catacccagcgaatctagcatatttactttattcgtctctcgatggcgactgtttcgttcctaattttaatggatggatgtatgtgtgcttgcaatcgcatagagaacgatcccggcgaagaacccgaggaactcgcaggagaagcccctgagcaccaatccgttgagggaggcaagtgtcccttgacctatccctgtcctattcactctttaattcacctcccgcattacacatttatgcctaaggattgactagcttttgttatccatatccttgtttacctatttgggttggattattattggttagctttatgctattgctcacactctaatcaatgaacatgatgagattatctatgataca

SEQ ID NO: 65117 - DNA, 473 bp, Zea mays
agcttcccaagcacaaagagcacgaattttattgtttcatcacattgaagaatcctggcggaaaaaccttttcaaatttacaaatcagaattggaatttctttctcaaatttctgcatcaacctctttgatatcgtatttgcgcatacttccctatagaagtaactcagctctgcaaatatgctccaaagctcatccttaaaatagcctcgaaacatcacgggcatcagcctctccataataatatggtagtcatggcttttcaaactgatcaatttaccggtcttcagattgactgcccgtttcagatttgtcgcatatcgatcgagaaatttcaaattcttcaaccacttaaatatatctttcctttcatccggcttgaggcagtaatcagctcgcgggctactctcatgccgcttatcgcttactttcaactcgagcatccgccctctacaaattatcaccatgtctttt

SEQ ID NO: 65118 - DNA, 349 bp, Zea mays
  unsure (1)..(349): unsure at all n locations
tggagagatggcgagagtagcgtgtaccctctgtggcaagaggctggacggcggtgtatctgtgctctcggntggcgtgaacccggtctagtcttaaaaaactcggtggcgagttgacatatgcaatggttaagtgctacatatgtcgtgtgattggagatcctcaactaagtattaatcgattcggatcgccgttacttcttggacatgaagacttggtcactaacttacacgtagcactccagtatacaaaaagggattgataaaggatggctagtatatgccaagtgcttgaactatggtagaaagaactctattgacacgtaatgacttaacttgctaataaact

SEQ ID NO: 65119 - DNA, 394 bp, Zea mays
  unsure (1)..(394): unsure at all n locations
agcatgcaagccccacagcagcataaaacactgtgttttatattaataccccngcgaccatatcctcaagagtttgagtcaaattaaccacggacagtccttgcagactaatgaaggcagattacacacgataaggaactccactactgtcaacgccggcgatgaactggtgactgttcttccgagtcacaggaacttcattctcctcctcctcatcttccacagtgacaacacaagcagcacccccatcgtgaacaccaacagataaggcacctacattgggatcactatcaggctgggtacactcattgtggccagcgtcagtatgaccaatctcaggcacttcttcagcggcaggaactgacgcaccagcggctctatcaaaactggatac

SEQ ID NO: 65120 - DNA, 447 bp, Zea mays
gagtccgcttgaactaatcgacagagatacttcccctcttttctatttgacacccgacaggccaacccaaagcggtgtggctgaattcagaatttttgcacagcacatctgcactatggatttggtgcacgaatttctggccttcatagcatttccaactatgaacgaatgggctatgcctaatcttaaaggagagaagaaagagggggagcttgtcccactaccctatcattataattcatgaaatatttaaggcaccctgccaagaatggctctattccatccaaataatgagtactgaaattcttggaaattattctcaaaaagatgaccaattgatgactgcagccttttgcactccggcgatactgatgctaaacagaatacttgatgatataggctctggattcctgactatgggcgactgggtggagatgcctgcggccc

SEQ ID NO: 65121 - DNA, 437 bp, Zea mays
  unsure (1)..(437): unsure at all n locations
agctngccctatagaaaatccatgagaatttgtacttatcaatgtgaaccaagtccacaagatcaacaccacgggataaaactagactatgctacccaacaaattgaagtccttttcaagaacacaagaacacatgatttaacccaaggtttggccacaccacaaaggtgtcctactcctcattgaggcacccacaaaggggcaggtcagtttaaaccctaattctcctcaagctgaccaccaaggtcaagacaatctcttctcaacttagctcaaagagcgggtgatacaaacttcttgaggtcatccacaaatttggagactctcaagcaacctctattcatcaaggaacacaaggttccaagagtaacacatccacacaagaattaagttngcaacgagctcaagagatagagagagagaatagaacgatgaaa

SEQ ID NO: 65122 - DNA, 449 bp, Zea mays
  unsure (1)..(449): unsure at all n locations
cgtanatcctctcttaatgattactgtgttgacttcataatgttatatgtggcgatcttcacgataaggaaacctctgaaaaataccacaaaacaatggttttctagaaatatgaccctgtcagctgaacattcggatgaccacacacaagacgaccccggaagaactgaagattctactgaaacacagctgatgttgcgccagggaggtaatgttgcgcaccaggagtgactcanataatgctggcgacggaccagcttcgagatcttctaaacgatgtgcttcgtcctcaagtgactgagcaagctcatacacgcgccacattgcgaaggtcactaacacctttntggccgtatctggcgaatccataatctcgtctccggccaaatctttcaactccttcccaactacatgcatctttgcaatggcttgtgcgaggtcactaccaa

SEQ ID NO: 65123 - DNA, 423 bp, Zea mays
  unsure (1)..(423): unsure at all n locations
agctagcacacatagctcatttgaatacctttgatcatatctcttttatatgggatgactaatgtgttttcaagtctatttcaaaccaagtcatatgtatattgaaagggaattggagtcttcggcgaagacagaggcttccactccgtaactcatacttcgccaccactccgagcaactctctcttctttgggggagaaatgagcatcaaggaaaaggacttcatccttgggggagagagtaaaagctcaaacgcaaaaggacttcgtctttggtataatcttaactcacttatttatgaccaaaggggaagaacttacttctaggactctaatgattccgtttttggcgattcatgccaaanagggggagaaatgagcccaaagcataaggaccgcaccaccaccaccaaattcaaaactt

SEQ ID NO: 65124 - DNA, 480 bp, Zea mays
  unsure (1)..(480): unsure at all n locations
ctcagcctctaagggaggcacatttaggatttattttgttcattttgagaaagacagggtttgtagcgcatgccaagcacgaaagcaagttggcactcatcatccacacaagaacatcatgacaagtgacagaccactggagctcctacacatggatctatttcgcccgatcgcttacataagcatcggcgggagtaagtactgtctagttattgtggatgattattctcgcttcacttgggtgtgtcttttgcaggaaaaatctcatacccaagagaccttatagggattcttgagacgggctcaaaacgagttcggcttaaggatcaagaaaattataagcgacaacgggacagagttcaagaactcacatatagaaggcttccttgaggaggagggcatcatgcatgagttctcttcttcctacaccccacaacanaatgggtagtggagaggaagaatcgaactctattggacatg

SEQ ID NO: 65125 - DNA, 454 bp, Zea mays
  unsure (1)..(454): unsure at all n locations
agcaagcttgtagtgcatgccaagctatataattagttgcaaatactcatcctacaaaggcattcatgtcaacatcaaagccactagaactacttcacatgaatttatttggaccaacaacatatgcaagtgctggtggtaacgtctactacttagtcattgttgatgattattccagatacagttgtgtgttctttctccaagaaaagtcctaagtttcatcaatattcaagaagtttgccaagaaatctcaaaatgaaaaatcaagaaaatcagaagcgataatgggaaagagtttgacaacaccaacatacctgagtattgtgatgaggttgggatcaaacatgaagtatctacaacatatacacctcaacaaaatggagttgtggaaagaaagaatagagctntgaccacccttgcnagaactatgattgatgagtataacacacctaat

SEQ ID NO: 65126 - DNA, 471 bp, Zea mays
  unsure (1)..(471): unsure at all n locations
cttgcacatacacactagaggaaaggttctatcctatgtcgtcttcttcggcagcaacataggtacttctggtataagccaaaggagaaggcgtcgaaagcctgagctcactcggccgaggatggagaaaatatgttactgccttgatggcatttataaacaatgaagggcatgattgtaatcctatactaagttggttcatcttccctataattagatgaacagtaccctacataaagtacctttagctaggtactacaacttcgtataactcagccttcgaaataccttcgtgctatcttgcatcaagaagccaaaggtatgattgtaaacttgtcttgtatgagaagagaaataaaatgctaaggcacatgagatgagttctcatctcttacttcatcatgctntgtgtattccattcgattacactctaccttcgtccttgaattgttatcctgaagagataacact

SEQ ID NO: 65127 - DNA, 376 bp, Zea mays
tgcagcatcaagcttagggggcacatggattcccagatgtattatctctgtatagaggcagcaactatctgagcccttgaccccttgcgtacaacagggagtacttgtctgaaatcacccccgaacacaatagtcttcccaccaaagggcaatccagaccgtcccattatatcacgcatgctattgtctagagcctcaattgcttgtctcttagacattgatgcctcgtcccagataatgagcgatgctgtgtgtagcaactttgctgtcctgctttgtttcatgaagctacatacagcaccatcatcaatagtaagtggtatcttgaagcacgaatgggcacgcctccccctaagcaatatataagccacaacat

SEQ ID NO: 65128 - DNA, 462 bp, Zea mays
actctgacctccgatgaagtgaatttttgtttctatggccaattcacgatggagatcctcaagcatctcgttcattctatcaacgtcttcattcggcatcaatcttctaccttctactgcgtcgttcaaggcgtgacttcccgtggagatatcagaccttatagcatggcatgaaaccatgtgagcacatgtgtaggtttatctgactcttggtgtgactcatcatatttctacacttatttcatggacacctaatattatctatttgtgacaaagcagctacatggtccaaaaacatctgagtcttggcaaaccattcacttgtgtgacacccacccttattgaaaccttcatacatccaatcacgtctatcacccattattgcgtctatgtacgagatagaagtgcgtgtgagacattcatgtttctacacgtcacacataccatgtatgggatatatat

SEQ ID NO: 65129 - DNA, 474 bp, Zea mays
  unsure (1)..(474): unsure at all n locations
agcttgntgtctaatacacctttaagagcttttgtttcatcacatcttataaagacatatacatcaatatttgtaaataaacaattgtatcccatatgacataattgactaacagaaagtaaattgtgcatctgctatcaatgatacatcttgtgcccccacatgcataaacatgcaaggtgatttaagcttgggttttaagtacccaactcttgttgagtcctacaaggttagtcacataagactttggaacccatacgcaagttttgtctctcttgcacttagaccccaaatttctagcaactactttatcatttttgcacaagcacaaattaagcatcataagtatgatagagcatagttggattacttcatgcatttttaggcacatgagaaacaacatggcgcttgttaggggccttcgtcttccgaaggtccacaaaaacatggctaaccattagctntcagcatact

SEQ ID NO: 65130 - DNA, 428 bp, Zea mays
  unsure (1)..(428): unsure at all n locations
aactaagctcgcttactagctttcagcctatccactaaagagaagagtattttatctttntcaagagcttcattccttagtgtaataatttccaattgaagattaccaagggctaattgacaatattcatcttctgctttttatctacgcctttaaagccttgcttagaattaacccctacaaaagcaaaggatgagcacatactgataaagaaataagccgcaaaaataatcttgtttccaaccagttaaagtattctcaccttcagactattataagtaaggctatccgtgagctggtccttcgtcattgcagcctagttcaagcttcgaatatcctacattgtctgccatctcccgacaaacatgaatctctttattgtcaagcagacaataaaggaagtcatcttcatcatccccaccatacac

SEQ ID NO: 65131 - DNA, 473 bp, Zea mays
  unsure (1)..(473): unsure at all n locations
agctagtgaagattcttcatcccaacatgtgtctttcggtgatgccaaagccagcccatgttagtcttagcaattaagcaagtgtcgagttcagctctattgaaatcaactaagtatagctgaccctctaacactcccttaaatgctactgaatcatcacttcttctaaagacagtgacacctatatcagtaaatagacagttgtagcccattttacataattgggaaacaaaaagcaagttgtaatctaaagaatctacaagaaaaacattggaaatagaatggtcaggtgatatagcaattntacccaatcctttgaccaaaccttgatttccatccccgaatgtgatagctcgttgaggatcttggtttttctcgtaagaggagaacatccttttctcccctgtcatgtggtttgcgcacccgctatcgatgatccaacttgagcccccggatgcataaacctacaaaac

SEQ ID NO: 65132 - DNA, 470 bp, Zea mays
  unsure (1)..(470): unsure at all n locations
gagaacacgtgatatgtttgtctaacgtgcaattctatttttatagaccttgtgcagctgggcaagcaggtaaacaagtgggaggagcacatcacagcatgaatgtgatgaccacttcaagacctttggagctgctgcatatggacctcttcggacccgttgcctatctaagcataggaggaagtaagtatggtctagttattgttgatgacttttcccgcttcacttgggtgttctttttgcatgatatgtctaaaacccaagggaccctcaaagcgcttctaaggagagctcaaaatgagtttgagctcaaggtgaagaagataaggagcgacaacgggtccgaattcaagaatcttcaagtggaggagttccttgaggaggaggggatcaagcacgagttctctcgctcctacacaccttagcanaatggtgtggtagagaggaagaacaggacgctcattgatatg

SEQ ID NO: 65133 - DNA, 472 bp, Zea mays
  unsure (1)..(472): unsure at all n locations
agcttcacatttctgttttgcactgctgntatcattgccaatgcatgctcgcaaggcttgccagtatgttgctactcttcacaagtgcagtcatgtaaatgttccttgatagcatgtcgatcatgatgattgtggctgctgtcgtacacctctgcatcatgtaagtcagctttcacaacagttaagtgtcccaaccctctagttcttgcattcaattggtggaggacagctggtagtatcttgccttgaagtcgttctccaatttttcttatcttctcccgtggtatcattatcatttcccttatcttatcaacatgatcagtcactggcaagtcctttatgtctctactctctaatccaattgttgaaacactccgctagattgttagtaatataatcacacttaatttcttggttgaagtcacatctcatccatttcagtgaatggtgttcatcaaagtacttgaacaca

SEQ ID NO: 65134 - DNA, 402 bp, Zea mays
ctcagctttatggaaacgggaacacattggagttgtatcttcagcattttcttcttcaagcatagaaccaaggcagctattcatatggaaaaatgattggaggatgcacacctttactgtccagtttgatgcacctgcacatcttttgttcgatttgacctaatagagaaacaaaatgttaattatgaatccatgttgcaaaaagagataaaaaaataagaacattacatcttcagggaaatcgtagacagcatcaagtgggtagacttaaaacaatatccataagagatccatctggcagcctgtatcaacagtaagttagatacttgctaaactgtatgtatgatgaatccaataaagaaccaacatacatattgttgtgattcatcaaactttccacgc

SEQ ID NO: 65135 - DNA, 425 bp, Zea mays
  unsure (1)..(425): unsure at all n locations
agcttagcaagtgcgagttctggatcatcaaagttctgttcttgngtcatatcataaaccgagatggactactgtggatccaaagaaggtaccagcaattctggactggaaagcaccgaaagatgttcgaggaatcaagagtttcattggaatgccggttactatcggcgtttcatcgaggagttctccaagattgctatgccaatgacaatcttgctagcaaagatggttgagttcaagcggacctccacgtgacaagaatcatttgagatgttgaagcaaaagttgacagcagcgccagtattggttctgccagatgttcataagccattctaagtatattgtgatgctttgtacaccggactatgatggtgatatcctgaccccaggcttaatagaattaatatagtatccataccaacaag

SEQ ID NO: 65136 - DNA, 443 bp, Zea mays
  unsure (1)..(443): unsure at all n locations
ctaagcctgcggcctaatgcctgccggtatgtgatgccctctgaatgttgtcttgtactctctccattccaccacgtggtcaacgggctgcatagcgaggaagtgatcctaccatgtccgcgtgggtccacaaagctgctgggtggcgaacctgaacttagccacatctgaacaaactccattgagtagtgggaatctggattctactaccctgagccatacatcatcatcaagcggatcctctgcccgagtgaacaacggcggctgcgtgctgaggaactcctgataagtggctgctgctgggggacgctgatggtggtcaccaccaccatattgctgaggtggcagctgacgctgagccaactgttgcaaaatctcgtcctgctgagccatcaactcttgcatggtatgaagcagtggcngtggtggaagaattccttcat

SEQ ID NO: 65137 - DNA, 419 bp, Zea mays
  unsure (1)..(419): unsure at all n locations
agcttctcaagatcactaggagagattattgattanttgccaaagtgccatgtaccccaatttgatccatggtcatactgattcatggcagcaccaacatgacatttctctggaacatagctttcatcaaatctgtaccagcattcgagcgtcgtgtgtccggtcttgaaaccgacctggcagatcgggcgcccacttttgtcatgggtcgcagttggacccgtggtgaagcttctgcgctgatagttctgacgctgaagctagtgttggccacgaccacgtccagcagatccacgaccaaagtttgaccgtccacctctgccacggtaagagccacgcatctgctgactcccaccacggacgcctcttcctgctgagttcactgatgacaaaccagggccatgctgcaactctagtct

SEQ ID NO: 65138 - DNA, 441 bp, Zea mays
agccttaagggagacaccgataggccactgatgtttatttttttagaagaccctcgcagctgccaagcaggaaaaaggggagctctcatcacaccaaaatggatgacgacatcagacccttgagatgctgcataggacctttttggacccgcccctatttagcaacgaggaagaagcatgggtaactattgttgatgacttttccgcttcacttgggtgtctttttgcaagaaaaggtcgatacccaagggactctcaaacgctccctcatgagagctcaaaatgagattgagctcaaagtgaagaaaataaggagcgacaactgatccgagttcaagaaccttcaagtggaagaagttcttgaagaggaatggatcaagcacgaggtctcctgttcgtacacaccacagcataatggtgtggttgagaggaagaacaaga

SEQ ID NO: 65139 - DNA, 424 bp, Zea mays
  unsure (1)..(424): unsure at all n locations
agcttaccanaatatattgtgaaatttggatatattttaaatgtaaaaaaacaaaaaaaagtttatgcccaatatagccggcaggcgtgcagacgcgttgcttgtggccatctaccggcccggtagctcggtccagcccacctcgtgcaggtgcagcaggcagcagcatgtggggaaaaggggaatcaacgacggccgtggaactgacaggacggccagggagcacagtacgttttaaactaggcctcggaaaataaaattgcgttaccttttgtctcggtctttctaaactagcgacccttctggtacgattttttactattaaaaattcatcggctgctaccgattcttaatgcattgatgtaactatgtaagaatattgaagtgtccgcaccacatcccgggttggcagagatctggtatt

SEQ ID NO: 65140 - DNA, 402 bp, Zea mays
  unsure (1)..(402): unsure at all n locations
aactaagcctcaaaggtgacatcttcagactggtctgataactattattatatataacccagcataaggcaaactcttatcccaacttcctccatgctgaagtgcacaagctctcaacatatcttccaatacttgattagtcctttcagtctgtctatcagtctgaggatggtaagtcgaattaaaattcaacttcgtatccatattctcatgaaaacctttccaaaatctggaaggaaattgggatcctctatccaaaatgatcttcttcggtacaccgtgtagagatacaatccgtgccatatataactcttccaattgagatatcttataagtagtcttgaccgaaatgaaatgagccactttggttagtctatccacaatcacncatatagcatcata

SEQ ID NO: 65141 - DNA, 459 bp, Zea mays
  unsure (1)..(459): unsure at all n locations
agcttgagaaatatatccacctgctttctttgatgtcacggcgcacttgagagtccatcttcccgatgaggcaatgcttagaggacctgttcagtatggatgcatgtacccaatagaaaggcgactatgcactctgaaaaattctgtaaggaacagggctatgccggaaggatcaattgctgaggcatatatggcaagtgataccttaacattntgttctaggtacatgaaagatgttgacactagatttaaccaggatgatgatagtggtacagagatgccattgcctaatgacatgtctgtttgtaagcatggtgctactcttgttggaggtactaagactgagtacatcgatgatgctaccatgaataagttaattgggtatgtgctacataatgctgatgaagtacaggaatatttgacgtaagttagtttggtatgtgctacgataattatgtt

SEQ ID NO: 65142 - DNA, 311 bp, Zea mays
catgctaggcttagcaattaagcatgcatatagaccggcctcctctctcgccaaattaactaaataaagctcgccatccaatacacccttaagagctagtgaaccaccacttctctctaagacagacacctctacattcgtgaatagacacttatatcccatattgcataattgactaacacgatacaaattatattcaagagactcatctaaagacacattagatatagagtgctgggatgaaatagcaaatttacctaacccttgtaccttgccttgattcccatcaccgaatattatagaatcttggg

SEQ ID NO: 65143 - DNA, 374 bp, Zea mays
agcttcttggaacagtctccgcctttatcttcgtttctacaaggccagcagccagaaaggagccagtatgctccacaccagaaggacttcagagagcagtccgaagctcgtacagtcaatagcactgtgccagagtcaaagcacatctattgacaaatatcctaccttaatagcgagctttttcattcagttttatcttctgtaataaaggacattgtttagatttcatgtaattagtttcgttgaattctacaaggaaaatatattttcttcacaggcttatgataacaaagaggaccttcgaactatcgaaaattcttcgaagcaacaaaaagtcgttctaaagaacgcacagtaagttgctgaagtcacaa

SEQ ID NO: 65144 - DNA, 433 bp, Zea mays
  unsure (1)..(433): unsure at all n locations
actaagcctagaatctggctagctaagattgatcataggagaatttgcttctacctacatgcattatntaacccatgagagagattctaaaaccctaatataccctctcgagccattaaaccccaaacattagataaaagggaaaagattatgcatatggccaaatcatgaagtgaaacctttaccaaagatgaagtacattaataaatctacaaaatgtagttagggaagtattacaaaacggccatacataaacctcaaatcaagcccctaagtggagagcacactagagccatccattctctctaagtcccaaaatcagccctagcctaaagatcagatgtggtcacccctttgctggcgccaaaacaacttggtccaaataacaaaaagtggccatactacccaatgcacactcctgaaaatttgaaac

SEQ ID NO: 65145 - DNA, 318 bp, Zea mays
  unsure (1)..(318): unsure at all n locations
agcttacttagtagaatgggactcgtttgtattctctaatgatgatgatgatgacacctcatccaagcttaatgccggaattgccatcaaggaagcttcctcactcttctcatccncccattgtctcatggcaaagggagatgctaacgtaaaaatcatcaccgatttaaatgatataaaagatgatgatgatatcgatgatcgtgatgatgatggctattcatatgatgatcttgttagaatgttaggtgaggccgatgactacatgcacaaagaaaaagaaaaatttaagaccttgaaagaactgtataaaaacct

SEQ ID NO: 65146 - DNA, 388 bp, Zea mays
  unsure (1)..(388): unsure at all n locations
cgccttcgcatcagtatatcacccacagtccatctggtgtctttagtgcgccaacggcaaaattttcacggccatcaagaatatgcttcttgacgacaagaatggcatatgggctgacctgctacctgaagcagtctgggcgctgaacacgaccgagtgccgggtgactggattcactcccttccgcctgctatatggatcggaggctatgaccccgcaggaaataaaacatgggtcaccacggacaagcgcttcagccgtccccgacgtagacgaaccaacttccaaagacctcatcgacggagaccgtgtcttcgccctgcatgccctcaacatataccaagctcaaacaaaggcatggcgcgaccacacagtncgtccaagagaa

SEQ ID NO: 65147 - DNA, 453 bp, Zea mays
agcttgtaagaagaaagatgatcatgttgctatggtctagtctcatcttttctgatggttctatgcataattaggagtatgatcttattgttgctcgaactaaattatgttggttgattactaggcttgaccttccattaggtataggtgagacacatgcctaggcggactacattgcccatattcattaccctaggtttaccaaagtttctagactgaccatcactatagatcttggaaagttgtttactgaatgatgtaatgtgctaatcaattatgtggtgtctgttccttcttctagtgtattaacattaaatatgtggtatggcaatgcgaaagaagacgataatagtgttgctagtcattatgttaatgctaattgggagctacagaaaagggtgattgggtctcatatgcttatagaggttaaacatactggtgaaaacattgttg

SEQ ID NO: 65148 - DNA, 495 bp, Zea mays
  unsure (1)..(495): unsure at all n locations
actattgatactcaagctttgccgagtgcctnctagcacacttggcttagaaactgatatatggccccgctggtctctttgccgagtgtcacctataacacttggcaaaggcgtcgtctctgttaccagtcgctgtgacagcgacttttctttgctgagtaccgagtgacacttggtaaagtctttgtcgagtgcccgataaaaagtacacggcaaagaagacgttgccgatgtatagttcgtcgagctctctttgccgagtactacactcggcaaagaagactntgtcgagtgttttcaggctttgccgagcgcttcatgcactcggcaaagcgcccgattctggtagtgtaagcacgcttggacctgcaccgtctatcacctatatcatactatgtgatgttaactctcgtatagccattgtagcatgatatacttatcactgtggcacgattgaagagtgcatcacgtgctaatcaacaactatgacaagat

SEQ ID NO: 65149 - DNA, 386 bp, Zea mays
  unsure (1)..(386): unsure at all n locations
agctagcaccttgccccaatatggtttgatttatgattggcacgtcgtttcagcatgtctgctgacgcaccctctgtcaatcaccttcggtcacgccaactgccatatctgtccccgcggctgactaacccacgacccccacgcctggtggtttcgtcgggccacgcgcggggagcctcgttatcgctgcattggtttaaaaaattaccttttgtcttctgcagcgaccccaaagaggcgcactaccggcgcgtgtggtggttcactcttttcgcacccgtaatccgacacacaaagtgtatgacttgtggacccaggcccccgtgtcatagactgagctacctaggtcctangtacccgtcgagcgagatttcctgcggcgattc

SEQ ID NO: 65150 - DNA, 464 bp, Zea mays
  unsure (1)..(464): unsure at all n locations
tgattgataagagcctcaaggcaaggatggtgtggtgtatgtgctaangcaagcagataggatcatcttagttaaacattggagatattggtgcaaatgttaaccatagaaaccaaagtggatggatgaagtagcgccaagcatctaacattctctatgacaaggggtgccacaaaagctaaaagacaagttttatagaacggcgattagacccgctatgttgtatggagtagaatgttatgttggccaactaaaagacgacatattcaacaactgagtgttgtagaaatgtatatgttgcactggatttgtggtcacacaagatggaccaagtttggaacaatgatattcatgaccatctagtggtagcaccaattgaaataaagcttgtccaacattggttgaggtggtttggctatgaccaaaggataccttcaatggcaccagtgcattgtggagtccta

SEQ ID NO: 65151 - DNA, 420 bp, Zea mays
  unsure (1)..(420): unsure at all n locations
agcttatccattgaagtattttcccaaactctatctaaaatgttaatataaattctgctatggatttgaactattttcttaactaaataatatgatgagatattntacataaatcatacttcattataatttttgtagcatggacaaaggataaatataaataaacatataatttatacttgcatggtcatgctgagagttctgtttggtacatcaaatatatgtttgaaattcagaatcaaacttaggattgaaatgggaaatgaaaatatgaaatgaaaatagaaaaaagggtgaataaggaaccaaactgggcctcacttctcggcccactccctcattcccttttctcgtcagcccaccacgccctgcctctggctgcgggacccacatggcggtggctccaactagagtaagcgc

SEQ ID NO: 65152 - DNA, 373 bp, Zea mays
gtgaggagatgtccctggctagccttaacgatcttctatgtgaattggggacaccttagaaagggagttcggaagcaccttataaaacgctcgcgcgtagtgtgatctgtggtaactgtatgcttgtaatgaacttgtgtgatgaataaaataacatgtttgaaaaaaaatggcatgtgcatagtagtaatcctttccccctggcagatggcttcggataaaaccacgcctaccgcctcaaggattggagcaaggtctctcctaagtgatgaaggagaagtcggtaaagaagggaatgaaacccacctccccgcaccttcggagctgccattagacttagcccaagttctggccaaccaaacccgactcattg

SEQ ID NO: 65153 - DNA, 445 bp, Zea mays
agcttgccaatactcgtcaaagcaacagcttatgctttcacagcaactacagatcataccagtaacctggcctttcgcatgctggggactggatatgattggacctttcaagaaagctcaaagaggatatactcatgtattggtggcgattgacaaattcactaaatggatagagttcaagcccattgcttttttaacctctgctaaagccgtggaattcatacaagacataatattcagattcgggataccaaacagcatcatcactgacttaggatccaacttcaccagttcagaattcttcgacttctgcgagcaaaagagcattcatatcaagtatgcatctgtagcacatccaagagccaacgggcaggttgagcgagccaactgaatgatattggaggcactcacgataaaaagtctttgattagaatgacaaattctc

SEQ ID NO: 65154 - DNA, 403 bp, Zea mays
attgggtcacattcaaatatgatatgtcaatctctacttatctcgattgaaaaagcagtctacaagatcacgagggaaaggtatatacaccatacaaactttactcgcaaattctgttggaacatgtttaaataactcttattctaacaaggcatatgtatgttcataacatagtatagggacctaacttactactatgaacaaagaaggcgtaggctgaccctctctggttctgcctttcctatcttcgacaaatggactctacacttttggcaaaaccatccacgcctgccctcctttggctcttccccgtctttgtctaatcgcgcagcgctccgcatgccacggcctcaccacatgcctgccctcgagcctgcctcttacgtgattcatgggccacaca

SEQ ID NO: 65155 - DNA, 406 bp, Zea mays
  unsure (1)..(406): unsure at all n locations
agcttaacacttcagagacaaaatatactgttacttgctttttattttgtccttcaagcttctcttgtacaagtgtcgcactcactgtagagtgcgaagctgccacatacaatagcagaggagcccctatcgtgggtggagttagcgtcgttaggtctattaagtactgctttagctcttcgaaggctttctgctgagctgatccccattgaaagactttggccgacttcagcacttcgaagaatggtaaatttttctctgctgatctagatatgaatcgattcaaagatgtcagtcttcctgtcagccgttgagcccccttctttgtgcttggcggctccatccgaagaatagcttcgattntattcggattagcttcgatccctttntgtgaaactagacaacc

SEQ ID NO: 65156 - DNA, 391 bp, Zea mays
acaagtgggaggagcacatcacagcaagaatgtgatgaccacatcaaggcccctggagctactgcatatggaccctctcagacccgtcgcctatctaagcataaggggaagtaagtatggtttagttattgtggatgacttatcccgcttcacttgggtattccttttgcaggataagtctgatacccaagggaccctcaagtgcttcctatagagagctcacaatgtagttgagctcaaggtgaagaagataaggagcgaccacgggtccgaattcaaaaccttcaagtggaggagttccttataaaagaaaggatcaagcacgatgtctccgctcctacacaccaaacaaaatggtgtggtagagaggaaaatatgacgctcatcgatt

SEQ ID NO: 65157 - DNA, 477 bp, Zea mays
  unsure (1)..(477): unsure at all n locations
agcttcttcaccatgtgatcatggttatctttagtaagttgagcaatgcactttcctttaagttgtgtcaggctcatctttagcctctcattttcttctttgagctgttgatatgtatcatcatttgttcctgcaaattctagctcaagggaagatttgcttgtcgatggacaacaagcattagcacatggtgatatagtttctatttgaatacatgcgcatgattgaggctgttgggattataagttttctattacaacctcatgagcaatattcaatatgatattatcatccataagaatttcataagagcataggagcatatcatatctttcttgaaaagctagattttcaattgtgaagctttctacttggtccttaagcaaggtattactatttgcaattgagcgatacaatataaagcgttatcttgctcaataganatagtctcatacctttggaccagatcaacatgag

SEQ ID NO: 65158 - DNA, 448 bp, Zea mays
  unsure (1)..(448): unsure at all n locations
ttattgctaactgtcccgaccatgatagcgatcatgatcaatggaacatgagggagaagaagaagaactattagaatgctaagggcgaggcacatnctggcaaggagtgggattccgattgctcctcgtccgactccgacaatgaaagactcgccgccaccgccttcaacaagtcatacctcttccccaacgagcgtcacacatgccttatggcaagggagaagaaggtatgtactccaaactctacttatgcttcaagtgaggacgaatctagtgatgaggatgaaatagattattcatgtttatttaatggcctagatagaaccaaggtcgataaaattaatgaattgattgatgcctcgaatgataagaatacgcttttataaaaaaaagaggacttgttgtatgaagaacatgacaacattgtagaagcacaaaaatctcatgc

SEQ ID NO: 65159 - DNA, 350 bp, Zea mays
  unsure (1)..(350): unsure at all n locations
agcttctanagggagaacacgtgaaggtttgacttcttacaattcgaaaaagatagaccttgtgcagcttgtcaagcacgtaaacaagtgggaggagcacatctcatctagaatgtgatgaccacatcaagacccctggagctgctacacatggaccttttccgacccgtcgcctatctgagcatatgaggaagtaagtatggtctagttattgttgatgacttttcccgctacacttgagagttctttttgcaggataagtctgaaacccaaaggaccctcaagcgctttctcaagagagctcataatgagcttgagctccatgtgaagaatataaggagcgacaatgg

SEQ ID NO: 65160 - DNA, 402 bp, Zea mays
  unsure (1)..(402): unsure at all n locations
tagcactcaaattcttactatntatgcgattattgggtcttgaaatattcttgacgcactgcacttagggggagtattcaaaactcatatcactcatgaaaacccctagtgcgaaccaaaatgcatatatcaccatttgcctattttctctaaaacttatctagcctatggcaaaatattttgaaaagtatatgagggtgccaatacctgtcccaacaagagttattttgtgtgattataagttgggatttggtttggttgggagttagatagaaaaattcaaattttccaaactctcctctgtctgggctcaccggacagtccggtgtgcaccggacactgtactgtgcaattgtcggggcaccggctaacgcgcgctaaatatcatattttctgtgcgct

SEQ ID NO: 65161 - DNA, 455 bp, Zea mays
agcttgtagtcacgagaaatagcttgttgttgtctatatgcgtatggttatggtcgcggatgaaaaatagtagtgctcataggatgtctaagttaaaatgcaaattattgggtgaaaagcgcttcgatgttgattatcgcggagaacgcgtggttaattgagtatggtaaatctagagcacgaaatgacttggataaaatttatgagtcaacttgatggtcctaatgttactaatttaactctaatcaacggtgaagtgttagaataattcaagtctctagaacacaactaattcttgaattatataggagctgaatattattgattgctgttttggactgcacgcgctgttttagttgtgctgtatgtctgatgaactaaatcgtattgtctgtagatatgtgctatataaaagaggtagataactttattatcttgctggtgtgtaaattgac

SEQ ID NO: 65162 - DNA, 462 bp, Zea mays
atcacttcgctctagcttcgtgacaagagggagcttcagtaaagataaaaaacaatcaacttcgtcaaaacacaagatactcgacatcaaatggccagggtgcgctcaacagctagggttacacacgacggtgaggaaaccgaagctgctgaaactgctccgatctccaaagttatgaggcggtcgggactggttgtgacggagggcgcttctaacgaaggcacccctgctaccgaagccgagcaggcagatattgaagagggcgatactagagaagaagaaattgattataacaccgccatgccatcaaagcccagccatttggattttgggaagtcgactgtgtccgaagctgatatgctaatggtgatgaagctaggctacttcagagaagccgagaaggagttgattcgctttggcggtgaagagactatcccgaaacccaaaaatgatgaagtagta

SEQ ID NO: 65163 - DNA, 459 bp, Zea mays
  unsure (1)..(459): unsure at all n locations
agctngagttatgttattacagaccatactaaaagtgagtgcatagaagtaatattatacaaaccagggaaggcacaaactcctcccgagaagctaaaagcaaaagatcctaagtggaggaccgagtcctcccgcacttcagtcttgtttttcttctttcggaaccaccttggcacagaagcagcaaaagtctgctacttcctcacctaaaaacaacaaagggataaaccctgagtatggaattactcagcaagtcttacccgactaaagaaaagactctcaagggtatgctggttatgtgggagtcaaggtaaggcttttcaatcatcaatgactctgtttttgcagaaatgcttactaaagtggatccttaaaaatccaattttatttgtcaagttaggtaaaactacctgcactagagttctttctaccctaggtcaatcactggtcctgcactag

SEQ ID NO: 65164 - DNA, 416 bp, Zea mays
tattcccaagaatattgttgaatcacatttatacccctgggataccagaaaccctatttggaccctcgaaaaccctaataccaaaccctatggacctatgtgcaaaattagtccacttttggatgaaagtgcaaaaaccaaggtaaataagtaccttaagtcatttgggtcactcatatgtgaatttgcaagccaaaccctaagttttggactcattcgcaaaaaggaccctaattgagatttcatgttaaatatcagtgtgttttcttcaactttgagcccttgtatctttcaaactataggggttttgctctaagtcaccacatcaaagttatagagcaaacaaaggagaacaactttgcttaaggttgtgagcatagttgtaagaataaattgaatataatcatgctcaaagt

SEQ ID NO: 65165 - DNA, 430 bp, Zea mays
agcttcttcttcattctgatgaagactaatctctttgatcacttcattaaaacgaatgttccaactccgagatgcttgcttcaacccataaatggatttctgaagtttgcatatctttccagcattgatcggatcgacaaaaccctcgggctgtatcatatacacgtcctcatctaggtttccattaaagaaagctgttttgacatccatctgccaaatctcataatcgaaatatgcgacaatagctagaatgatccgaatagatttaagcatcgctactggcgagaatgtctcgtcatagtcaactccttgaacttgtcgaaaaccctctgcaacaagtcgagccttatagatgtgaacatttccatccatgtctctcttcttcttatagatccatctgcattctataggtctaacaccatcaagcggg

SEQ ID NO: 65166 - DNA, 461 bp, Zea mays
cgaagccatggttagtagcataggccaataatatgcgaattgtctcaagcctagctacgggtgcataggtttcaccgaaatccaaaccttcgacttgggagtatcccttggccacaagtcgggctttgttccttgtcaccacaccatgcttgtcctgcttgttgcagaagacccacttggttcctacaacattctggttaggacgtggaactaaatgccatacctcgttcctcgtgaaggtgttgagcttctcttgcatcgccatcacccaatccgaatcttggagcgcttcctctaccctgtgtggctcaatagaggaaacaaaagagtaatgctcacaaatatgtgcaacacgagatcgagtgtgtacccccttatgaatgtcgccgatgatggtgtcgaccgcgtgatctccgtgtattgcttggtggactcttgggtgtggcggctttgttcttcat

SEQ ID NO: 65167 - DNA, 307 bp, Zea mays
  unsure (1)..(307): unsure at all n locations
agctagcttcggccgaagagtcttttatatcttcagaagataaggcgacctcggtttgtgccaaggatttcacatgatcgcagcctttactctccaaaacagtggcaatccccctagcacccgaaaaggcacatatgtctccgcggccattcaaaactttctcaaaagcttcggcttcgtggctggtccattcaattgggccctcgggatcgccctttacgaaattntcctcgcttgaatacacgccaacgttggcgaagctagtttttatttttcttacacactctataaacttttcataatacct

SEQ ID NO: 65168 - DNA, 242 bp, Zea mays
agatcccttggaacacgtcaggacttgctccctatcaccacagcatgctcagtcttgcttgatgcggaagacccacttggttgctacaacattttggttaggacatggaacaagatgccatacctcattcctcgtgaagctgttgagttcctcttgcattgccaacacccaatttaaatcccttaatgcgtcttctaccctgtatggctcaatagaagacagaaaagagctatattcacaaa

SEQ ID NO: 65169 - DNA, 406 bp, Zea mays
  unsure (1)..(406): unsure at all n locations
agcttcgcaacaagaatatgataattntattggatgccaaattccagaacaaatacaaatacatcctccaaatggtgctcggtcaaagggaagaagtaaaagaattaagagggctaaagaactaccaaagtctcgcaaaggaaagaatgtgaagaaagacatgaaggatgcagctatatagattaatttgttgtcagttcaatgttatccaaatgttgtctctgtattttgtctctgtaactggaacaagctcagtcctgcttgaaaaaaacatgtccagaaagtagaatgtatgaaatggctagattcagactctttntgttggcgtagcaccgctgcaagaggattggctttgtggcttcgcgtgcgagaaagacgccattgcgggcaggagaacgtcggcgtg

SEQ ID NO: 65170 - DNA, 474 bp, Zea mays
  unsure (1)..(474): unsure at all n locations
gtgaagattcttcatcccaacgtgggctattcggcgatgccatagccaacccatgttagtcttagcaattaagcaagtatcgagttcagctttattaaattcaactaagtatagctgaccctctaatactcccttaaatgctactgaatcatcacttcttctaaagacaataacacctaaatctgtaaaaagacagttgtagcccattttgcataattgagaaacagaaagcaaattgtaatctaaagaatctagaagaaaaacattggaaatagaatggtcaggtgatatagcaattttaccaagtcctttaaccaaaccttgatttccatccccgaatgtgatagctctttggggatcaatggttttctcataggaggagaacatccttttctccccagtcatgtggttggtgcacccgctatcaattatccaacttgagcncccggatgcataaacctacaaaacaagttt

SEQ ID NO: 65171 - DNA, 459 bp, Zea mays
  unsure (1)..(459): unsure at all n locations
agcttttcattgttgtcgaacactttctttctgagtgcttccagtatcattccattggctctttccacctgaccattggctcttggatgcgctactagtgcatacttgatccggatactccgttgttcgcagaaatcgaagaacttagagctggtgaagttggatcctaagtcggttatgatgctatttggtatcccaaacctgaatattatgtcttgtatgaactccactgccttggctgaggttaaagaagcaatagacttgtactctatccatttgatgaacttgtcaatggcaaccagcacgtgagtatagcctccttgagctntcttgaagggtccaatcatgttcagccctcagcacgcaaatgaccatgttatagggatggtctgcagctgctatgccggcaaatggttgtactttgacaagaataggcaagcttcacacctatggactaac

SEQ ID NO: 65172 - DNA, 466 bp, Zea mays
  unsure (1)..(466): unsure at all n locations
tgtcgccggtcatgatctccctctgagcgtgatctccatacatcacttcgagttgattaggctcttaatgaagcactggctccaataccaattgaaagtcgcttagaggggtgggggtgaataggtgaaacctgaaatttataactttaaacacacactacaagccggggttagcgttagagttaaatttaagtccaaaagaatgtctctcttgctaggagttgctcaaggattgcagataacgtatgggagccaactcaaattcacactatcaaggaaacgttagaaaggggaaaacaaatcaaacaagaatcaaggcgagtgaacacgatgaattgttttatcgaggttcggntccaaaaaacctagtccccgttgaggaggtcacaaagaccgggtctatttcaaccctttccctctctcaaacggtcacttataccgaatgagccctttccttaatcacatg

SEQ ID NO: 65173 - DNA, 446 bp, Zea mays
  unsure (1)..(446): unsure at all n locations
agctngaagccatggtaagtagcataagcctttattatactaattgactcaagcctagctacgggtgcataagtttcaccgaaatccaaaccttcgacttgggagtatcccttggccacaagtcgagctttgtttcttgtcaccacaccatgctcatcttgcttgttgcggaagacccatttggttcctacaacattttgattaggacgtggaactaaatgccatacctcattcctagtgaagttgttgagctcctcttgcatcgccaccacccaatccgaatcttgaagtgcttcctctaccctgtgtggctcaatagaggaaacaaaagagtaatgctcacaaaaatgtgcaacacgagatctagtggttacccccttatgaatgtcgccgaggatggagtcaacggcgtgatctcgttggattgctcggtggactcttgggtg

SEQ ID NO: 65174 - DNA, 304 bp, Zea mays
  unsure (1)..(304): unsure at all n locations
ttatataccacatcttccttcatcaaatcaccaccgaggctataattaagatggggatattagtctaagctataaggagtcatgggctggactcaancgcgaagtgcttctgtagtatgcacgagcttttatatgagacgaacgctactggctaagaacacgaccatcaacaacttccggatgatatggatatattgcgtcgcctaatgcatgacacccaaagccaacattctggaaaagatggcccggggcctggatggacgagtggctttaccttaaaaatgatttaaataaaagggaagac

SEQ ID NO: 65175 - DNA, 441 bp, Zea mays
agctccatggggagctaagaagtctacccgttcattatttcgaagaaatactcactgtggagctcggtctacgttcgtcggcgatctgctgaagtccgacgacgctaatctggtatctccggcgagggagagctcgattcctggctttaggagcttcaccaagacacgtggagactccctcaagggtcggacggtgcaaggaaaggctaggatggccggtctatggcggtcggttctcgggtggccgctggcacgccgtgcgcatagcaaacgccggtgatctggcgctctcgtgaggttgagagcgagcggtggtgtatggctgaagccttggctggctttataggcgcgggcaatggcacgggcttggcttggtgcggtgcgaggcatgcggtgtccggcgccggcgcgtactctggcgaagtcatggcgcgtctaaca

SEQ ID NO: 65176 - DNA, 393 bp, Zea mays
tattctcgtactgttcacgcttttatgtaatcgctctcgagtcagcaccttctaacaagactaaggtatcaatgttatacaatctctattaatgctcatatgtttatcatgaaataaatatatggataaatgaatgaatgaatgaataacatatattgtctctatgaactctcgttctcatgaatgatgacggtgtgtccttcgtgacctttgtccgaaaatcgttatcttcaaaaggagataatgcttcgaaagacgaacgtctttaatctttaacaattgtgttgccttgttcttgatccacaacatttgagaacaagtgatccacattggcgcccaccttccgtgaactcaaacgaccaccttcgacaccaggagctcgagctaccacct

SEQ ID NO: 65177 - DNA, 444 bp, Zea mays
  unsure (1)..(444): unsure at all n locations
tctaagngacctgaagcatgcaagctagcttgcttttggctcctcagccctctgatgcctacctaattgagccatggaataatcacgtctagtctgtctttcttgatacttggacatgcacaatactaccagtagcgcgagaactatgaatagcacaatagcaagaagaacatatccagccgtttctgatggtcgaatgcttcttcttcttggatgacgtataattgctatttcgagcagtagatccactagaagagtttgatgctgcattagatggcgaaggagattctgaaggggatgaagaggacgatggtgtttgtgttggtgagcctgtacgtgaatacggtgaggtggatggagctatgctggtattaaaaggattcccatcatttctgtacgcaaaagaagttaatgagctatatgtaactggtcccatcattatag

SEQ ID NO: 65178 - DNA, 448 bp, Zea mays
  unsure (1)..(448): unsure at all n locations
cctttagactcagcttacacggcggaaatgccagcatcctctacattggatcagactggangaatacagttctttgngcctgaattaattcaagaagcagaggaacaagtccgtataattcgggagaatttgatggtagctcaaaccatacaaaagagcttctcacataatagaagaagaccactggaatttgaggaatgagaatatgtgtacctcaaggtatccccacttcgtggaatgaggagattccaagtcaagggccaaatagcccctcgctatattggaccattcttgatctttaggcacagttggggagatggcataccaactcgagttacctgatagtctatcacatgtgcataatgtgttccacatatctcagctcaagaagtgtcttcccgtccctgaggaacaattacacatggaagagctcaatgttccgggtgat

SEQ ID NO: 65179 - DNA, 456 bp, Zea mays
  unsure (1)..(456): unsure at all n locations
agcttatngacacacacacattgttgtgcatggtcttatacttagcaatgccctcagggctcaaaaagatgctgaagacgaaaggtgtgttatggccctgagcaaccttcgttccgaagtaattgaactaaggaacaaaggtctcgaaaaagataaaatattacattcattggtgaatagaataaaagaagatgaagctactttcaaagctcaagctgaagctcagaagcgtgaaattgaagatcttcggaaacaactagccagagcaaagaggaacgtacacttgaagaaacaaaacgagaaattagtgaccaatgggcaaatcatttggaaaaaaacgttgaagagcttcatgcatccaagaaaaggtgctacgaanaatctatagaatgtgttaagaaaataagaaccagcttcaccagcgttggcgcattctcaagtgaggagaacttcata

SEQ ID NO: 65180 - DNA, 468 bp, Zea mays
  unsure (1)..(468): unsure at all n locations
tanagccatggtaagtagcataggctaataatatgcgaattgactcaagcctatctacgggtgcataggattcaccgaaatccaaaccttcgacttgggagcatcctttggccacaagtcgagctttgttccttgtcaccacaccatgctcatcttgcttgttgcggaagacccatttggctcctacaacatattgggtaagacgtggaactcaatgccatgcctcatttctagtgaagattgggagctcctcttgcatcgccaccacccaatccgaatcttgaagtgcttcctctaccctgtgtggctcaatagaggaaacaaaagagtaatgttcacaaaaatgagcaacacgagatctagtggttacccccttatgaatgtcgccgaagatggtgtcgaccgcgtgatctcgatggattgcttggtggactcttgggtgtggcggtctttgctcttcatccttct

SEQ ID NO: 65181 - DNA, 403 bp, Zea mays
atacgagcgcaccaggaagggcgagacctttttttatcagaggtcgcgacgagctggatgaaaaaaacctagcccgcgaaggactactagttgggggcttctccgcccaagagtcccaagacatatatataactggccaagtgatgttcaagatcctccctgtagaaggtgctccatacaaaaatatcatcttaaagctctataacaaatgctcagctacacctgtccaaccgggttaaaaagcacaccaatgcaaccatataccgccagaatagcattcacgttacatagtgacaaatggacatctcaaccatgtcaataaaatataacaagaggtttcgtaacctatcatggggaacaaccctatcttaaacatataaagaacaaataactctttacccgc

SEQ ID NO: 65182 - DNA, 385 bp, Zea mays
gctgctggcttcctcgattattattttgatcagagttatggattgacctaacatgcctcgggtgaaatcttcctccgaagcccctggtcatttcagaaaacctgaatgcttcctcccttctttgacggaagtcattgtcagctcgaatgtattcgtccatcttctggagcagcttctccaacgtttgtggtggcttcctggcaaagtactgcgctgatggacccggccgaagccccttaatcatggcctcaatgacaatttcattgggcactgttggcgcttgtgccctcaggcgcagaaacctctggacatacgcctgaaggtactcttcatggtcctgggtacactggaagagagcctgagcggtgactggcttcgtctgaaa

SEQ ID NO: 65183 - DNA, 441 bp, Zea mays
agctggggaaggatctgtatgccacttgtttcttatggcgacgccacagccagtccatgctagtcttagcaattaagcatgcatctagaccggcctcctcttctgcaaaatcaactaaataaagtttgacgtctagtacacccttaaaagctaatgaaccatcacttcttctaaagacagacacatctacattggtgaataaacagttatatcccatattacacagctgacttacagacaacaagttatatccaagcgactcaactaagaacacattagaaatagagtgcttggatgaaatagcaatgtttcctaaccctttcaccttgccttggttcccatcaccgaatataattgaattctggggatccttgttcttgacgtatgaagagaacatcctctcttcaccgtcatgtagttgtgcattcgctgtctataatc

SEQ ID NO: 65184 - DNA, 477 bp, Zea mays
  unsure (1)..(477): unsure at all n locations
tcccggatccttaagcacctgangctgcagctgagcttggctatctgcaatgacgattgctcactngcagacagcctcgcctacaacagcctgaaggtttgtatattttgtcttcgcatttggctatttttgttatagtgaactatatttgtggtaattcttatcattattatttgtacgttctttgtttgccagggtctaattcttattaaagctttaaaagctcacaaggatgcagaagatgagagcaaccagatggcaattggaaaccttcgtttggaggtcataactttgagaaacaaagctctcgagaaggataagatcatgctctctttggtggagaggttaaaatctagtgaagctacgatgtctagcctttctgaggcaaagttgaagatgaaggagcttgaagaaaagcaacatacagatgcaaagcatattgatgacttatagtatgagccatctattcaagtggga

SEQ ID NO: 65185 - DNA, 478 bp, Zea mays
tctaagggggagaacacatttgggactaaccaatggttcatttgagaaatacaggggttgtagcgcatgtcaagcaaggaagcaagttggtgttcatcatccacacaagaacatcatgacgaccgataggccacttgagctactccacatagatctattcggcccgatagcttacataagcatcggcgggagtaagtactgtctagttattgtggatgattattctcacttcacttgggtattctttttgcatgataaatctcaaacccaagagactttaaagggattcttgagacgggctcaaaatgagttcagcttaaggatcaaaaagattagaagcgacaatggaatggagttcaagaactctcatatagaagggtttcttgatgacgagggcatcaagcatgagttctcttcttcctacacaccacaacaaaatggtgtagtggagaggaagaatagaactctatttgacatg

SEQ ID NO: 65186 - DNA, 466 bp, Zea mays
  unsure (1)..(466): unsure at all n locations
agctntagctntgagagcgatagattcattcttcacttcctttgccaaacttatagcatcggcttgagatttcttgaatatatcttgagtaagaatttctcccaaaactttggttggagaagttgtagataaatcacttcttactagcatggtcacaatagtatcatacttctccggaagggatctaaggaacttatgagagaaatccacatccggtacatcaaaaccaagttccttgagctcattcactatctcatttgaccggttgaacatattggatacactttcttcttctttcatgatgaattgctcaaattttcctttgcacacatatagctttgcactcttcacaattgtagttccttcatgaatttccattagcttaatccaaatctcatgagcagttgtgagattcttgatacggctgaactcatttatgtcaagagcatcatataatacaatcatg

SEQ ID NO: 65187 - DNA, 468 bp, Zea mays
  unsure (1)..(468): unsure at all n locations
tgcccaggcagagcgacgggtaacaatttttatatactctgctattgcctgtctccgcctaacaccctagatatgcttgcagcacacgggcaccctgctcatcctctggatcacttggatgagctgtaactaaatggtctttgacgttgttgaccaaacctccaacaccaccaccctcccccataatcaagattattgttaagtaccgatcggtacgagcagtaaaattttgagttgtctaagagcatcttcaagagattcttcattttttgctctctatttgactatctatttacgttntcatcaagattacactctatatatagcatctcagtccaacagactatctatctagtttggctagtcaggtggctagccaaatttaactagtgagagaaccaatttatagagtcagatagcttgcgagtaagatagctaatctgttggagaattaatttactattgagt

SEQ ID NO: 65188 - DNA, 455 bp, Zea mays
agcttaatcataacccagtaactgatatttattaatcatgtatatgcataactgcaaatcaatatagttgttaaagatattacctcttctaatggacgtattggtataagtatttgaacattggccacaccttgttcaagtatattagatacgtcctgaatttcctgaaaatttggttgaaagctcaatatacatcatttacaaataaacattcacaacaatatgatcaaaaccttgttattcctttcatcaaatgttccatccttttcgttgcctctattgtcttcatcatccgcctgagatttattgttcacacctcatcatataatatgattaataatatgtacaaaataaattaaaacattactacctgttaccatccctccatagttcacaattctcttaactttatatttgcttcaacgcgaaataccttgaaagctattcattctgta

SEQ ID NO: 65189 - DNA, 399 bp, Zea mays
cggccgtgcagagcttgggcttctacaacggcagttatggcggtattgccagcggaggatgttcgcgacggtctggcacatgagtgtggccgtggggatccacggcgcgatatcggcggtaatgacgccgtggctgggagagtcgctgggtctgcggagaggagggaccgcagggcacgctacttattcctgggagcccaggagatcgcggaatccgcggcgagggggacgggagagctgacactcgagaacggcggattccgttgagaagagcacagagcaaggaaagatgatgacagggcgggcccaccggctagccgcacatgtgatcggcagtgggcaccacgggctgagcgggagggaagccaagctatgccggcacaggtgagaaaggagcga

SEQ ID NO: 65190 - DNA, 407 bp, Zea mays
  unsure (1)..(407): unsure at all n locations
agcttaacaacgatgagagcgtctcttattataatagaaggagatgatgcgtgtgatgatcaatgctttcaataagtactacgtctctgtagcaacatcctatgagcagcttgatcgacgtgttgctgaacttgttacatgcatggacatgttggaggctcatcccccaccacaagctctagctattgtgtggtagtgatctctcctacggaggaggaggcggacgacgatgacgatgttgatgcaccactgcgacgaagccttgcatgtaatagacaaggtatgggaggtaatggtagatgtcatcatcataatcttggaccanagaatgatccataggctaaaattaagttctttattcctntgttcattggttcatatgatgttaaagcttacttagagtggga

SEQ ID NO: 65191 - DNA, 375 bp, Zea mays
ctttaaactcacttgtccaggcccatgatacgaatattccttttgcttatgtgccgagggtcttacgactgaaggcacaagcgccaacggtgcccaacgaaattgttattgaggccatgattaatgggcttcgaccaggacttacagtccaatactttgccaagaaaccccctcagaccctgaagaatatgcttcaaaagatggatgaatatattcgcgcacattatgacttttgacaaaagaaaggaggaagcttacaggttctctgaaatgaccaggggctttggagggagaggccaccctaaacacgtcagatcaatccactctacttataatgacgaccggggaagtcagcaacagaagccacagtatttc

SEQ ID NO: 65192 - DNA, 420 bp, Zea mays
agctaggagaagcttcacagcttctctggttgtcgatccaagggctaaggcgaggctggggttcaacagaaaaggttggccacgacggccgtgcttgggtagagatggcgggcggcggtgcttgcttttcacggcgagctccggtgatctctggctcgggcgaggctctgggtgtgcaagtgccaacggctaaagcctctggaggcatttataggcgagggcacgacacaggcgtgcggagcaaggcgaccacgtgcgaggcgtgcgctgccgtggccagtccgcgctcggtcggtcaggcagctatcgaacacgtggctttttgcttctgcccgagttcaagcgctcataggttgaagatctttgcatatttgggcatgatcactgcgcaagaattgcttcctcgacagagctttgtcg

SEQ ID NO: 65193 - DNA, 359 bp, Zea mays
gtcaaaaagcaagccccaatatcatttgtatctcttagttcttagttatcaaagaaaaattatacagaattggagaaggtgctgtatgctagtttgatggcctccaagaagcttcggcactatttccaagcatacaatataattgtcccttcttccaaccattgaaggatattatgagaaatagagaagctactggaagggttcgaaaatgggctgcggaactcaatgagttttgcatgataatgtgcatagatcttcgattcagtcccaagcgttggcagacttcattgctgactggacgccaggggctcaagaagaagaaacgattaaagatgccgaagtttggacagtattttgcg

SEQ ID NO: 65194 - DNA, 412 bp, Zea mays
  unsure (1)..(412): unsure at all n locations
agctttactcagcatcatactctgtgcacatgcaaccttcgttagaaaacaccttcgttgttcaaaacaataaaaagtcgaataaaagcttttaccttgaaattagaatagaataagctaccgacaatatgctgtcgtcggtagcgaattatgtcggtctcaagcttcgggaaaccaatactctttgatagagtaccgagaaccttcgctccggtttgatctcagacgcaacctaacttttcatcatcaacaccaccgaagagtagtgcccctagttgatatccacaggatatggcatattcttttaattcttctttctcagccttcgttaactcttgtccaactaagttttgaaagttgaanatttcctctttcgaagcatcttcagctantttcttccccttcttaagta

SEQ ID NO: 65195 - DNA, 427 bp, Zea mays
tgccggcgacaaccaccagcttcttggttgttcttcgctgcttcggctgcgataggctctcgaagcctgacgccctgctggtgctaaaagacaatgaaccgagcaaccttgcggaccatgtattggtgctgtcctccacgaagtgggcgtcagccatgagcccctgatgctggtcctcgccttcgccttcgaccaacctgtctgcccacctgcagctgcagctctggtaattagacgatgcccaacggtagtcgtcggtcatgtaggaggggggcacatggctgtggtgatgtcggagaagtgggagactctacgaaagaccgacaccaggtgcgcgaggtcctacagtaggcggaggccgatgccaatgacggggaggacgacgacgtctggctatcgaagccgtcgtcgcgcaccttgcaccttg

SEQ ID NO: 65196 - DNA, 466 bp, Zea mays
agcttcacgacttcagtgggaagtgatccatgggctatgtcaacgctggggttcaacagaaaaagctggccacaatggccgtgcttgggcagagatggcgggcggcggtgctcgcttttcacggcaagctccggtgatctctggctcgggcggtgctcggggtgtgcaagtgccaacagctaaagcctctggaggcatttataggcaagggcacaacacatgcgcgtggggcggtgtgaccacgcgcagggcgcgcgctgccgcggtcagtccgcgctcgaccgatcgggcaagcgatcgaactcgtggctttttgcttctgcccaagttcaagcgctcataggttgaagatcttcgcgaatttgggcatgatcactgcgcaagatttgctcccccgacagagctttgttcgttgtgtgtggaagtcgagtggtttggtgcagtgtacaaagagttgtcgtgtcac

SEQ ID NO: 65197 - DNA, 390 bp, Zea mays
  unsure (1)..(390): unsure at all n locations
acaagcgtcagcatatatacgcagcctgttttattctaacttcaaaggaagaacctttttacaagttaccactgatatgttcgtattaacttaagtatctaatttgagtctgtcttacagagctcgttactaagcaaagctttaaaaatgcaacaatatgacgaggacaggaaaaacgaagttattgtcaaaggtctagaggataatatcaaagaacatgaggaatctctaacagaaaaagatgagttgctgcgctcaaccaaaggattccttgccgaagtgcaatgtcaaaataagaaattgagcanagagctggcgtatgcgtagatacttttactagatacttccaactgattcaaccgagaatctaaaactttgaaatgtcacata

SEQ ID NO: 65198 - DNA, 487 bp, Zea mays
  unsure (1)..(487): unsure at all n locations
ttaagtcacctgangcatgcaagcttcatgagtggtagctgtggcactactttttattagatttgccgaaagtgtntcttcctgcaagacctttggcgacagagcatggccccaacaggcaagtaatatacgaattgactcaagcctagctacgggtgcataagtttcatcaaagtccaaaccattgacttgtgaataacctttggccacaagtcgggctttgtttcttgtcaccacaccatgctcatcttgcttgttgcagaatacccatttggtacttacaacattttgattaagacgtggaactaaatgccatacctcattcctcgtgaaggtgttgagctccacttgcattgccaccacccaatctggatctcttagtgcatcctccaccctgtatggctcaatagaggacacaaaagagtaatgttcacataaatgagcaactctagacctagtggttacccccttatgaatgttccaaaga

SEQ ID NO: 65199 - DNA, 385 bp, Zea mays
atgtacttgccctttgtgccaacttaaacatgctacataaatgataaatcgaatgaattgatggtgacattcatgagaaggatgaacctctggatagctacaaggaatgccttatctatgtaaacaaacagcatattaaagtgaataatgtccatgctcatgatattaaaaatgtgaataataactaaggagcttagcattcggcatgacactatctctaaccttacaactgagaatgccaaattacttgctaacgttgagaaaagaaatatttgtgatgattcaattgtcaatcttaaaaatgataatgctagctcaattgcttagattgatataatgaatgaatcactttctagccttaagattgaacatgataaattatatt

SEQ ID NO: 65200 - DNA, 469 bp, Zea mays
  unsure (1)..(469): unsure at all n locations
gcaagcttctanagggagaacacatgttgggactattatttgttcattctgagaaagacagggtttgtagcgcatgtcaagcatggaagcaagttggtgttcatcatccacataagaacatcattacgactgacagaccactcgagctcctacacatggacctattcggcccgattgcttacataagcatcggcgggagtaagtactgtctagttattgtggatgattattctcgcttcacttgggtgttctttttgcaggaaaaatctcacacccaagagaccttaaagggattcttgagatgggctcataacgagttcggtttaaggatcaagaaaattagaagcgacaacggaacggagttcaagaactctcatatcgaaagcttccttgaagaggtgtgcatcaagcatgagttctcttcttcctacacgccacaacanaatggtgtagtggagacgaagaatat

SEQ ID NO: 65201 - DNA, 425 bp, Zea mays
  unsure (1)..(425): unsure at all n locations
cccatcgcttgacaggtccggttttgttnttacatatatctaggaacccaagcgtcctttgtgctatcgcttggtaaactcactacctttctagcacaagntacaatcctgggttgcctagttatatacgaaatgattgactagctataggtggggttgttaccaatgggacaatccttgcattgatgtccctttttcccgcttgtgtagcttaagcgttttagaaagactggaaaagacttctttccttgcttggtgcttgctacatggttagtaaaaaacttcttttctaaccctaatcctctatgtttcacatggggaccagatttgattaatatgtcctttcttgggcatctaaaacaaagtctatcatccctggtaattaactaaccctttctaatgtaaggacatgacctatacaagtg

SEQ ID NO: 65202 - DNA, 401 bp, Zea mays
  unsure (1)..(401): unsure at all n locations
agctntatcaaatggacgtgagaagtgccttcctatcagaccaatcaaggaagaggtctatgttgagcaacctcccggctctgaagatagtgagtatcctaatcacgtatataaactctctaaggcactttatgggctcaagcaagccccaagagcatggtctgaatgcctaagagactttcttatcactaatggctccaaagtcggaaaggccgatcctactttatttactaaaactcttgacaatgatttgtttgtatgccaaatttatgttgatgatattatatttggatctactaacgaatctacatgtgaggaatttagtaggatcatgacacagaaattcgagatgtctatgatgggggagttgaagtacttatagggatttcaagtgaagcaac

SEQ ID NO: 65203 - DNA, 368 bp, Zea mays
catgcaagcttctaaaggaggaacatattttatgattaaccaacgctcatttcgagaaagacatgatttgtagcgcatgccaagccggaaagcaagttggtacccatcatccacacaaaaacatcatgacgaccgacaggccactggagctcctacacatggacctattcggcccaattgcttacataagcatcggcggaagtaagtactgtctagttattgaggatgattattctcgcttcacttgggtattctttttgcaggacaaatctcatacccaagagaccttaaagggattcttgagacaggctcaaaatgagttcggcttaaggatcaagaaaattagaagcgacaatggaacggagttc

SEQ ID NO: 65204 - DNA, 234 bp, Zea mays
  unsure (1)..(234): unsure at all n locations
ctattaaactcagcttaacatctcaaggacatgctctctgattctaatatctttcacaccaccaacgaagnatgacactgacagccatctggagatcacccttgttgagggctcttgtggtcaacattacatgggctctctcattctccggcgtgccaacaaatgtctgcctttcactcacttctagaagccttcacaatggtgtgctcactaagcaccgcttgccatacgtgc

SEQ ID NO: 65205 - DNA, 467 bp, Zea mays
  unsure (1)..(467): unsure at all n locations
gcagctaagaccctagagagtgaatttattctgtcactatncatctatctataaggaagttgagtcacctcgtaagtaattaacaatatgcccacaaagtttacgcacatgatttacaaatgatacagggcagtactatcttttctctttctttcttgctgcacaagcctttagcttctcttgctttgtctgagttcgaagccttctccatgccgaggctggtgacctcggcttagcatcttcattgcatgcacatatgatcgaatcttctttctcatgccgcttcagccggaggctaccttcaaccgctttttgctatatgcctgaaacacatttgcttataccgaagtgaatacattctgacgatgttttgcaaagcatgtccctcaaaatagccctctgtggaatgagttagtttctttataacgagcttataatacacaaaaacacaattgcgatatcttgtg

SEQ ID NO: 65206 - DNA, 471 bp, Zea mays
  unsure (1)..(471): unsure at all n locations
atttattacagaccagactataagtgagtgctgagttntattatacaaaccaagggaggcacaaactcctcccgataagtttaataaacaaaagatcctaagtggaggacctgagcctcccgcacttcagtcttgttttcctcgttggaccaccttggagcaaaagcaacaaaagtttgtcgcttcctcacctaaaaacaacaaagggataaaccctgagtatggaatactcagcaagtcttacccgactaaggaaaagactctcaagggtatgctggataaataagagtcaaggagaggctntagcaaaatcaacttatacttttgcagaagtagcttactaaagtgagtccttactttcaatcttttaacgccatattatgtattaatagactccatttgcatctagtctaagtttacatcacatcaagacaacatcatatttatccatcggggtcacatcctgacttt

SEQ ID NO: 65207 - DNA, 469 bp, Zea mays
agctagacaacgaagagatggcgcttattatttatggcttccgccaaatcctcaagcagaggaaggggaaggattataagcctcgctccaagaaagtatgctacaagagtggtaagcccagtcatttcattgctaaatgtccattatcaagtgatagtgacaggggcgatgacaagaagggaaagagaatagaaaagaagagatactactagaagaagggtggcgatgcccatgtttgccaggagtgggactccgacgagagctccaacgactcctccgacaaggacgtcgcatacatcgccatcaacaagggtctacacttccccaacgtcggccacaaatgccttatggctaaggacggctagaacaacaaggtaaaatcttgatcctccactaagtatgcaacttttagtgatgaagaaaattctagtgatgatgaggataactcgctcactctctctgccacaaa

SEQ ID NO: 65208 - DNA, 470 bp, Zea mays
  unsure (1)..(470): unsure at all n locations
tggggaggttcttcatccccacatgtgctaagcggtgatgccatatccagcccatgcaagtcttagccattaagcatgcatctagaccgacctcttcttttgcaaaatcaaccaaataaagtttgtcgtctagtacacccttaaaagctagtgaaccatcacatcttttaaagacagacacatctacatttgtaaatagacaattatatcccatattgcataattgactaaccgataacaaattatatccaagcgactcagctaaaaagacattagaaatagagtgctcggatgaaatagcaattntacctaacccttttaccttgccttggttcccatcaccgaatattattgaatcttggggatccttattcttgacgtaggaagagaaacatcctctttcccctgtcatgtggtttgtgcatccgctgtcgataatccagcttgaacccccggatgcataaacctgc

SEQ ID NO: 65209 - DNA, 446 bp, Zea mays
agcttatgaagagtcttcattccaactttttctattcggcggtgccagaaccaacccaagttagtcttaacaaccaagcaagtgtcgagttcagctttatcaaaatctaccaagtatagctgaccctctaacactcgcttgaatgctatcgaatcatcacttcttctaaagacagctacacctatatcagtaaatagacagttgtagcccatttgacataattgggatactgaaagcaaactgtaatctaaagaatctacaacacaaacattggaaatagtatggtcaggtgatatagccaatttacccaatccttcgaccaaaccttgatttccatccccgaatgtgatagctcgttggggatcttgcgttttctcatatgaagagaacatcttcttctcacctgcatgtgagttgtgcacccgctgccgagtattctacttgag

SEQ ID NO: 65210 - DNA, 424 bp, Zea mays
agcttgaagccatggtaagtagcatatgctattaatatgcgaattgactcaagcctagctacgggtgcataggtttcaccgaaatccaaaccttcgacttgggagtatcctttggccacaagtcgggctttgttccttgtcaccacaccatgctcatcttgcttgttgcggaagacccacttggttcctactacatcttgattatgacatggaaccaaatgccatacctcattcctagtgaagttgttgagctcctcttgcatcgccaccacccaatccgaatcttgaagtgcttcctctaccctgtgtggctcaatagaggaaacaaaagagtaatgctcacaaaaatgtgcaacacgagatctagtggttacccccttatgaatgtcgccgaggatggtgtcgacagagtgatctcgttgga

SEQ ID NO: 65211 - DNA, 488 bp, Zea mays
  unsure (1)..(488): unsure at all n locations
ctcaagcttcgtcattacaaaccgacttanacatagtatgaccttttagttcatagaggtctgagtcaatgttgtaagctattataaggggcataattgtaattcttcacaggctgcgtcctgtgcctataaatagtgaacagtattccattactgttcacgcttttctgattttcgcaatcgcatctgttgggaatcagactttgtcaaggcagaggtataaatatattcgatgatataacatgaatcgtttgtgaattattcctctatttataccctttattntattttgttttatgcaactcaccaaaattcaattacgaagatttaaccttcgtaattgtattcttagtaaccttcgtccgaagttcattatcctcaagggaataatggtttacggacgaaggacgttaacatttaacattntatgttgccttgttcttaattcatagcatctgagaacaagtcntcaacattggcgcccacct

SEQ ID NO: 65212 - DNA, 375 bp, Zea mays
attctgcatcactcaggcattcggagccaaatggacttgttgaaagagccaatggcatcataatgacacgaataatgaagttaatcttcaatcaacccacgggaaagtggtcatatcaattaatcaaagtggtataaaggctcatcacaacaacaacaaggttcacaagctttgctccattcaaattattgtttggtgatgaagcaataactccggaggaagctaacactggatcaataagaatagtatcttcggcagaatcaggttctgaagctgatcattctgtggaaaaagatgctatataagggatcaagcttcaagctgcatagaacatcaataaatatcaagccgaaacaatcaaatggcgtgatagaa

SEQ ID NO: 65213 - DNA, 402 bp, Zea mays
  unsure (1)..(402): unsure at all n locations
ctattgtatttgcagatgtatagtgctcatatgggatcttatatgggaccccacttcacccgttcgtcacaatctggacagaccccaaacaccaacgaaacacaggtattagtttggagtatatttactttacattacaattataatcatgcatagctctatttggntatatggttctgagaccggacaaggaaacccacagatggacatgcggcggtcgatgcctcctaaaggacatattcttcctccttacaaccaggatgggatattggccgcaccaccatggggatatcctacacatccaatggggccttggggacgccctcatggccaacacagccacttccatcaccagcggtacgttcctgattcatgctgcttgctacttggtcacgctgcaac

SEQ ID NO: 65214 - DNA, 463 bp, Zea mays
  unsure (1)..(463): unsure at all n locations
ggacattgtctcncttctggaagccaatgccatgcttaattccactgcgtctcccattatagagcatgcttctagcaaatataacaatttcattttctaagacatgctcacttattttggcactaagttgagctatgtgatcattttgttgtttaattaaagctaggtgatcatgaatagcatcaacattaacatctctacatctagtgcaaatagagacatgactaacagtagatgtagaggggttgcaagcatttaattcattaatcttagcatgtgaaataagaatctcatctctaagattggaaatagaaatatngcaaacatttaaatctttagccctagcaattaatatttcattctcaattctaaagctagagagtgatgcattcaacttgtcaatcttagtaatcaaactagcattatcacttctaatactaacaattgaatcatcacaaacatc

SEQ ID NO: 65215 - DNA, 342 bp, Zea mays
ccagacatcgcatagggatttgatgcgtattgtgatgtatcacaccttggacttggatgtgtgctcatgcaagaaggaaaagtgatagcttatgcttcaagacaattgaggaaacatgacataaactatccgacgcatgatttggaactaactgttgtagcgcatgctttgaagattctgaggcactatatgattggaaacaagtgcaaaatcttcacggatcacaaaatgcttgaaatacatattctctcagaaagaacctatcctcagatagagaagatggctcttgtcgattaacgactatgaattggagatacaatatcaccccctaatagctaatgt

SEQ ID NO: 65216 - DNA, 461 bp, Zea mays
  unsure (1)..(461): unsure at all n locations
tgtgaaggctcttcatncccacatgtgctaagcggcgatgacacagccagtccatgctagtcttagcaattaagcatgcatctagaccggcctcctcttttgcaaaatcaactaagtaaagtttgccgtctaatacacccttaaaagctagtgaaccatcacttcttctaaagacagacacatctacatttgtgaatagacaattatatcccatattgcataattgactaacagataataaatatatccaagagactcaactaaaaacacaatagatatagagtgctcatttgatattgcaattttgcctaagcctttcaccttgccttgattcccatcaccgaatatgattgaatcttgcggatccttgttcttgacgtaagaaggtaacatcttcttctcccccgtcatgtgagttgtgcattcactgtcgataatccagctggataccccggatgcat

SEQ ID NO: 65217 - DNA, 338 bp, Zea mays
atatgaatcgtctgatgaagtaccacatgagtggatatatagaaaaggaatcctaactccgattacgtataccctgttgttgtgagaattcttaattcatgagttgtacggagggacttatgtcaccacaaaccgaaactaaagcaaagttggatttgaagctggtgttaaagattataaattgactcactcaccccggatacaaaccaggatagtgtatcttggcaccattccgagttactcctcaactttgggttcctcctgaataaccaggagctgttatagctgtggaatcttctactggtacatggacaactagttggactgatggacttacc

SEQ ID NO: 65218 - DNA, 416 bp, Zea mays
  unsure (1)..(416): unsure at all n locations
gcttctcaccatgcctgctaccaaatggcgctttacctccatcatagatcaaacgacatgaacgctccttaatgacacactttgcttgaaacaacgtatgtcgctgattctgctctgacttttccatttgtgcactaagcacacgctgtacaatgaggctctcataaagctctgcatcatctgtaccaatctgttcttccggtggtntcttaatgcctgcatcatctaccgcaagcaaagcaagcgttatttcatccatatcactaccagaggaatacccaccatcgtctgttaccaccaaaacacgctgattaggacaatcacgctgcacatgttcatagccattgcattgataacacagaacatctcttgttctacccgtggaggctactgaagaggcactacatgttggttct

SEQ ID NO: 65219 - DNA, 479 bp, Zea mays
  unsure (1)..(479): unsure at all n locations
tctaaagggagagcacattntaggactaacggatgatcattttgagaaagacaggatntgtagcgcgtgccaagccgggaagcaagttggcactcatcatccacacaagaacatcatgacgactgacaggccactggagctcctacacatggatctattcggcccgatcgcttacataagcatcggcgggagtaagtactgtctagttattgtggatgattattctcgcttcacttgggtatnctntttgcaggaaaaatctcaaacccaagagaccttaaagggattcttaagacgggctcaaaatgagttcgacttgaggatcaagaaaattagaagcgacaacgggacggagttcaagaactcacaaattgaaagctttcttgaggaggagggcatcaagcatgagttctcttctccctacacgccacaacaaaatggtgtagtggagaggaagaatcgaactctattggacatgg

SEQ ID NO: 65220 - DNA, 387 bp, Zea mays
tggatattcttcatcagaacactatggatatcgttgtgattaatgaaaattcttcttcacgaagcatgaaaagaagggaagggtgtttttctcgtcaaagactcaaaaaaggtacgtatgtaaaatttcatgcatccgaaagaattgaaccatgaaaaacaagtatattacatactgagttacaagatattacacattgttggggcgaaagcaaagacgccacccttcgctcgtcgcctttcgctgcagtcgctggtctgacaaagacaaaacgggcagggacacccttcgcttcattcagcaccagacgaaggcctgcggtgacgtctccccgcaacacgacctcgttctgctctaaagcccacgtgtgatctggcccattgtaac

SEQ ID NO: 65221 - DNA, 480 bp, Zea mays
  unsure (1)..(480): unsure at all n locations
tgagacggaagaaaccgcagcaagtgttaaactccatattaaggatgttcctgaagcaataaatgaagcaatcaacatgaacacggaaaaatgtaaaaattcaattagtcatgttgtttgcactgattgtctctctatgtcatccaagggaaaaaagggaagaggaaaaaggaggtgcttcaagtgcaaggaattaagccacttcattgcatcttgtccacataaagacaaagatgaaggaacgcggagatgttttggatgcaacgataaggaccatattatcatttcatgtccgctcatgaagaatcaaagacgtgcaccctccaagattaccctcactaagaaaaaagacaaacatcaagcgtcatgtcaggttgagcaacgcttctgctacatgtgtggtgagcatggtcatctacctaatgtatgtacgaanggtaaggttcctacaaaagtaaatttatctcaatcttattcact

SEQ ID NO: 65222 - DNA, 469 bp, Zea mays
attacggacctatgatactcagctttgaacatcctgaggtgtatatgagacgaatccctgtgggagagaacaatatcacaacaaccttgggtgctacagctttgttgcccgcttcgggtcaagctgccctgttccaaccttttggaagagatggcccggaacctggatgactgaatggttctatgtaaaaaatgacctgacaacgcaagaagatgtcaagagtattattatgcgccccatctggcaacgcttccgacttctaaggccgaaggttaaaatggatgaagcagccgaggaatgccaaagagccttctgcgtagtctgctcttttattgggacaagggacttgattcaagaacatattgccttcagggtgtggccacttgcaggatagtgggaaatgccgaaagggaccatcatagagtccgacgaaggcggactggtaagactaaaatacacattctaatac

SEQ ID NO: 65223 - DNA, 455 bp, Zea mays
  unsure (1)..(455): unsure at all n locations
ntgatacacggattgaacatcgccatgtcactgngcgtctagagattgatggtatacggagattctctggtagtcatcagccagataaacaaggaatgggattgttcaagtgattcaatgggaaaatattgcgctgtcgtccgaaagctggaagataaattcgagggtctggagtttcatcatatataaagagaacggaacacggcggccgatgtattgttcaagctcggatccggtcggactcacgtcccgcccggtgtcttcgtgcaagaaattctccagccgagtatctcaatggatcaaacagaagaatgcaacatcatagatcaacccgagtcagactctgatgactggagacggccaattattaagtatataaggaatgaagaagaaccagatgacaagaactctgcagagcgcattngccagacatcagctcactatacactcatttg

SEQ ID NO: 65224 - DNA, 320 bp, Zea mays
tccgcagctataagaaagtgttgtgctgtcgttctattcatctcgagccttagcacaaatatctcttttccaaaatatttttcgaacatcaacactgaatcctcttcttgttcctcatgcaatgtgctgtatgatgctcatgttgtgcaaaaatgatgcgatgatgttatgtcatgcacaatgatatttcgcccacatatataaatccctgtaatagagcacacatactttttatattaacgctgacttttcgctgttagcctcacttaagagcttcttctcctttactttcagcggaatcagcagttatttttcgctgt

SEQ ID NO: 65225 - DNA, 463 bp, Zea mays
  unsure (1)..(463): unsure at all n locations
ntatcanatggacgtgaaaagtgcctttctcaatgcaccattcatattggaggtctatgttgagcaacctcccggctctgaagatagtgagtaccctaatcatgtttacaaactctctaaggcgctttatgggctcaaacaagccccaagagcatggtatgaatgcctaagagattttcttatcactaatggcttcaaagtcggcaaagccgatcctactctctttactaaaactattgcaaatgatttgtttgtatgtcaaatttatgttgatgatatcatatttgggtctactaataaatctacttgtgaagagtttagtaggattatgattcgaaaattcgagatgtctataatgggggagttgaagtatttcttatgatgtcaagtgaagcaactacaagagggcaccttcatcagccaaactaagtatattcaagacatactcaccaagtttggaatg

SEQ ID NO: 65226 - DNA, 420 bp, Zea mays
  unsure (1)..(420): unsure at all n locations
tagtgttgaggccnctcttgaacctatctctcttcttctcatccgtgtcagcatgatagcctatgtactgacacaggtcattgaaagcttgggcatactgaaacacggtatgacttccctgagtgagtgcaagaaactcattgagcttacggtccatgatccctgctggtatgtgatgccctctaaatgccgtcttgaactcttcccactcaaccacgtggtcggtcggctgcatggcaaggaaatggtcccaccatgtcctagcgggtccacaaagctgctgggctgcgaaacggaccttggccgcatctgagcactctccgttaagcagcgggaactttgattccaccaccctgagccagacgtcagcatcgagtggatcttccgccttggtgaacaatggcggctgagtactgagaa

SEQ ID NO: 65227 - DNA, 385 bp, Zea mays
gcataggcaaggtatatactaattgactcaagcctagctaccgttgcgtaggtcttaccgaaatccacaccttctacttgtgaatatcccttggctacaagacggactttgttccttgtcaccacaccatgctcatattgcttgttgcggaagacccaattgtttcctacaacatttagataggacgcgcgacaagatgtcatacttcattcctcgagaagttgatgagtaccttttgcattgccaacacccaatctaaatctcttaatgagtctttcaccctgtatggctcaatataatatactaaacagtattgctcctaaaatgtgcgacacgacatctagtggttacctccttattaatatcaccgatgatggagttcacc

SEQ ID NO: 65228 - DNA, 439 bp, Zea mays
tcggctacatctatcttgtggaatgtctctgaatcagttcttattcccccaacctttctggccgcttcctgactcccatgaatagcaatcagtacctgatcccactgtatctttatgcaaaaatatgctcgatgaagaattgctgttaaagcatttattgcttcgcgaccaatgatagccctgttaagatactccatgtctgcaatagcatacacaactcgctcagtccgtgtattgatgactaatgcgcatgtctctggcatggtgatcttaccgagcgctacaatctgtcttccttcgcagccacacagagggtgcgtatcatcatgaatcttgtcttcgggctattgcattagtctgaatgccttaacgaatataatatccgcttggctgtctgtatcaaccagtacattgtggaccatgaatcctttgagcacac

SEQ ID NO: 65229 - DNA, 475 bp, Zea mays
  unsure (1)..(475): unsure at all n locations
tcggccttcggaggccgaaggttgaaatgaatgaatctgtcgaagaatgccagagggccttcggcgcagtctgctctttcattggaacgagagacttagtacaagagcatattgccttcatggtatggccgctcgcggagaaatgggaaatgccacaagaaaccgtaaaagaggccgacgaaggtggacttatcaggttgaagtacacttttaaatttggagataaattcgttgagccagatgatgactggttaaaaagcattgaaaatttaagtgatgaactgcttggggcttattcgaaggccgaagacactgcaatgtcagcagccttcggaggccgaaaaaagaagaggctgaatcgggtatttgatacaatcgggtttgtctaccctgactattgctatcccattcgaaggcagaagagaanaaacacaacctctacaaaagaagaagctgcaactgctcctagcgagcc

SEQ ID NO: 65230 - DNA, 480 bp, Zea mays
  unsure (1)..(480): unsure at all n locations
ngaagccatggtaagtagcatatgccaataatatacgaattgtctcaagcctagctacgggtgcataggtttcaccgaaatccaaaccttcgacttgggagtatcccttggccacaagtcgagctttgttccttgtcaacacaccatgctcatcttgcttgttgcggaagacccatttggttcctacaacattntgattaggacgtggaactaaatgccatacctcattcctagtgaagttgttgagctcctcttgcatcgccaccacccaatccgaatcttgaagtgcttcctctatcctgtgtggctcaatggaggaaacaaaagagtaatgctcacaaaaatgtgcaacacgagatctagtaattacccccttatgaatgtcgccgaggatggtgtcgacggggtgatctctttggattgcttggtggactcttgggtgtggcggcctttggtcttcatccttcttatcttgatcat

SEQ ID NO: 65231 - DNA, 471 bp, Zea mays
  unsure (1)..(471): unsure at all n locations
ngacgaagcctagcctgaagcttgatagttgtttacaatatactttcctacaaaaattctggagaaacttttgtaatatagttatggaacaacttatgtaaatttgtacataccttgtaatatattttgtttctgctatctgtgtacaatctgctntgctgtggacgaaacttctcttttgagccgaaggcgaaaaacaccttcccttcttttcgtacacaacgaagcataaaaattttccttcgaagttcttcctcattgctgaagcacctgtctttnttgtgtggtatgatgatgattctatatatgtctaaatgaatgtttatgaatgcaaatgacatgatgacatgtactgtgcaaatgaatattgggacacatgttcaaaaaccataagcacagcccttcatccncttaggaatgattcanatctttntgccgtttactttttcggcttcaccgttacttttcagt

SEQ ID NO: 65232 - DNA, 457 bp, Zea mays
  unsure (1)..(457): unsure at all n locations
gcgacactatanaaacatcagcttcggagttacacattagaagatgggctctcagttctgtcttacgaagaaatggccgaccgnctagcatattatagtataaagggacgaaacatcaatattcgtacttaagaacaattttttttcatttgcttatacttaatacaatgctcctttcgcatggcttgatccttaacaacgccttaacggcgcaaaagaatactgaagaccatagctgcactattgctctcaacaaccttcgaacagaggttatcatgctgataaaccaagccttggaaaaagacaagatcctacttacattggtggacaaagtaaagggagacgaagctaacttcaaggctcaatctgaaatccaaaggaatgagattgaaaaccttcaatagcaactggctgaagccaaattaaaatgcgctgtggccgaagctgaacgagatgc

SEQ ID NO: 65233 - DNA, 488 bp, Zea mays
  unsure (1)..(488): unsure at all n locations
acgtgacactataaaactcagctttatgatctgataaatatgacagacatttcccagcatatagtgatgccaaatnttcagagcatgaaccacagcagctagctccagatcatgagttgggtaatgctcctcatgtcggagtaactgccgtgaagcatacgcaattactcagccttcttgcattagcacgcagccgagtccactgccagatgcatcacaatatacatcanaaggcttggtgatgtccggttgagccaataccggagcagtggtcaataatgtctttaattgttcaaaggcttcatcacacttcgaagaccaattgaatttaacatcattcttcaataaacttgtgattggcttcacaagcttagaaaagactagtataaatctgcggtaatatccagccagtccaaggaaacttcggacctgatgaacagtggtcggnggtttccactccaaaatgtccttgactnttctgggatcta

SEQ ID NO: 65234 - DNA, 465 bp, Zea mays
tcgtactcagcaatattatttgtgcagctaagatcaagtcttgctgcgtagcaagttctaactttggagggtgctactaacacagcagctgctcctgccccgaaggttccccaagaaccatcacaaaataccatccatacttcggtatctttagttgtttcttctccttgagcccctggcgttcaatcggcaatgaagtctgctaacgcctgcgattgtattgaggatctgtgcacataatcaatgctgaactcattaagctccacagcccactttccaattcttctagtagcttctctgttcctcatgacatccttcaaaggttgtgacgaagggacaattatatgatatgcttgaaagtaatgtcgaagctttctggatgccattaagacggcatataagaccttctccaattctgtataattcttctttgatagactaagaactccggagatgaagtatatt

SEQ ID NO: 65235 - DNA, 481 bp, Zea mays
  unsure (1)..(481): unsure at all n locations
ttatcanatggacgtgaagagtgccttcctaaatggaccaatcaagtaagaggtctatgttgagcaacctcccgactntgaagatagtgagtaccctaaccatgtctataaactctctaaggcgctttatgggctcaagcaagccccaagagcatggtacgaatgcctaagagatattcttatcactaatggcttcaaagttggaaaggccgatcctactctatttactaaaacacttgcaaatgatttngttgtatgccaaatttatgttgatgatatcatatttgggtctactaacgaatctacatgtgaagagtttagtaggatcatgacacacatattcgagatgtctatgatgggggagctgaagtatttcttatgatttcaagtgaagcaactccaagagggcaccttcattatccaaaccgaagtgtgccctggtctggcgcaccggactgtcaaagtttcacaacaaaagaca

SEQ ID NO: 65236 - DNA, 478 bp, Zea mays
  unsure (1)..(478): unsure at all n locations
ttctanagctctctatgggcttaagcaagctccacgcgcttggtatgaaaggcttanggatttcttgctttccaaagacttcaaaattgggaaggttgacactactctattcactaaaagaattggcaaagacttatttgtttgtcaaatctacgttgatgatattatttttggatctactaatgaattattttgtgaggagttcagaaaaatgatgtcaaaagaatttgaaatgtctatgataggagaattgagcttctttcttggccttcaaatcaaacaattganagaatggaattttataagtcaatcaaaatatttgaaggacatgctcaagaagtttggtttagaaaatgctaagcctatcaagactccaatggcaacaaatggtcatctagacttagatgaaggaggtactatggttgatcaaaaactntatcgttcaataattggtagtttgctntatattaccgcatct

SEQ ID NO: 65237 - DNA, 496 bp, Zea mays
  unsure (1)..(496): unsure at all n locations
taagcttacgcaactgctgccagaaatgagaggtgaactgcgttcctctgtctgacactatcttctttggcacaccatgaagacaaacgatccgagacatatacaattctgccaatactgcactgctataattggccttgacaggtatgaagtgggctgactttggcaagcggtccaccactacccaaatggaatcgtagccggctcgagtgtgaggcaacccgactatgaaatccataccaatttcatcccatttccactgagggatctgcaacggctgcaacaatccaactggtctctggtgttctgccttaattcttcggcaactatcgcacttagccacatgctctgcgatttccctcttcattccgtaccaccagaatatcttcttcagatactgatacatcttctcactgccagggtgaatcgaataaacggtctcatgagctttcttaagaatcaactcncgaatggactggacattgcgaacacacaa

SEQ ID NO: 65238 - DNA, 443 bp, Zea mays
tctgaaggtattaacggccagctgagcaatgtttctgttgttgccataaacgtcatacgcatgcatatggatcatgctgctgcaaggattgacgcatagtgctgtttgcttcaaatggctcgggatcgcaacctgataaggatactgaacacctgttccaacctggactttagagcgctggtgctccagtacatgcccaactggagcttagaggagctcttgcgctccgacggaggaatgcgactacggttcgttgagaagctggacatcgtgctatatgcgtccatggcaatggagcatctgcaccaccagcactgcgaggtggtcctacactgcgacttgaagcctaacatcgtgctcgttgatgacgacatgaccgcgcatgtggcggattttcggactgcgaggatattgcttgatgatgagaactccatgatctccgc

SEQ ID NO: 65239 - DNA, 427 bp, Zea mays
  unsure (1)..(427): unsure at all n locations
tcttgctcaatttccttcacctatgtaacgatctatgataattgtctaaaaaaacaaaggtcttctatgctgcaacatggtgtgtatctcaatttctttctcaaatcactcacaaagtgcacggaaacatactcttctaatcaaatccataggctccatagcacgacgcagctcctcagattcccatatataccgaagctgagctgcacaatagtagaacccagtacttaagctgaacttaatcatcaaataatagaagcgaggtgcacaatcacaatgtgaggagcagactgtagaattttctaacatagtaaaatcctaacacttacatatataacttaaccaagcaccaaaacaacttaactccatcaagtcgcggagcacacgtcgcagagccggaagtcgctctccacggcgtcngcgtggg

SEQ ID NO: 65240 - DNA, 493 bp, Zea mays
ctataaaactaagcttaaggaggttcaagaattcctgaacctctacggttggtttattttcgtgatcttggttaacatctggccgcatatcgttaatcatccgatccatcctgtcaatgtattcactgtcatcaacttctacttgtgtcgatattccacggcgcgactcgccgtggagataccaaacctcatagcctgacacgaaacccttcctcacaggtctagcgtgacctggcccttgcatgggacaccatgttcttgcatttgctacatgggcacctaatcttatttgtcgctgacattgcagaagcacggtcaagacaatcctgagtcttgtcaaatcattcctttgggtgaaccccgctcttgttccaaccagcatacatgcacccacggtcatcacccatacttgcggctatatattcgaggcaaaatgtttcatgagaattgtctgtcttacatatcaccgccctacatctatagtaatgatatg

SEQ ID NO: 65241 - DNA, 484 bp, Zea mays
  unsure (1)..(484): unsure at all n locations
ntatcatatggacttgaagagtgccttcctcaatggacctatctaggaggaggtctatgttgagcaacctcccggctttgaagacagtaagtatcctaaccatgtctataaactctctaaggcgctttatgggctcaagcaagccccaagagcatggtatgaatgcctaagagattttcttatcgctaatggcttcaaagtcggaaaagtcgatcctactctattcactaaaactattgcaaaagatttgtttgtatgccaaatttatgttgatgatatcatatttgggtccactaacaaatctacttgtgaagaatttagtaggatcatgattcaaaaattcgagatgtctatgatgggggagttgaagtacttcttacgattccaagtgaagcaactccaagagggcaccttcattagccaaacgaagtacattcaagacatactcaccaagtttgggatgaaggatgccaagcccatcaag

SEQ ID NO: 65242 - DNA, 434 bp, Zea mays
  unsure (1)..(434): unsure at all n locations
gaagccatggtaagtagcataggccaataatattcgaattgactcaagcctagctacgggtgcataggtttcaccgaaatccaaaccttcgacttgagagtatcctttggccacaagtcgagttntgttccttgtcaccacaccatgctcatcttgcttgttgcggaagacccanttggttcctacaacattttgattaggacgtggaactaaatgccatacctcattcctagtgaagttgttgagatcctcttgcatcgccaccacccaatccgaatcttgaagtgcttcctctatcctgtgtggctcaatagaggaaacaaaagagtaatgctcacaaaaatgtgcaacacgagatctagtggttacccccttatgaatgtcgccgaggatggtgtcgacggagtgatctcgttggatagcttggtggactc

SEQ ID NO: 65243 - DNA, 468 bp, Zea mays
tgcttacttggtaagatgaccaaagcgctcttattggtttaccggagaggacggtagatttattggaactcatacatactgatgtgtgcggaccaatgagtacgacagctaggggaagattccaatacttcataaccttcactgatgattttagtagatatgggtatgtctacttaatgaaacacaagtctgaatccttataaaagttcatagagtttcacaatgaagtagaaaatcagcgtggcaagaaaattaaagcactgcgatcagatcgtggtggcgaatatttgagtcatgaagttagcaatcatctaaagagttgtggaattgttccacagcttactgccgctggaacgcctcagaggaatggcgtgtctgagcgacgtaatccgactttattggatatggttcgatcaatgatgagcccagcggacctacctttgtcgctttggcgatacgctctataaa

SEQ ID NO: 65244 - DNA, 443 bp, Zea mays
  unsure (1)..(443): unsure at all n locations
tcnggagcangagcggcaactatntcatgcatagtctgttctattatctcntcctctgctgctttctcttcaatttccaaaggatttttctcagcaagctctgaaggccccgcttcggcactagcctggctcaccgcgacttcaacttcggtcggttttgtttcatcttcggnttgcattttcgaagcctcggcaattccccctgaaggagtagagcttatagcctttactggttccaacacatctagtacatttgccattcttcttcttttgggagttgccgcaagaaatttttctgccttcggcacttttacttctgccgaagggcttaaaatctctaacatttttgtttcttcagcttttggctcttcggccttatctctaccagcctttgactcatctaggtcggctgagggcgccttcggcatggtagccagttcttc

SEQ ID NO: 65245 - DNA, 483 bp, Zea mays
  unsure (1)..(483): unsure at all n locations
tcggagccgaagcaactccagctntgaacaaagccatcagtttattatagtgaaagtgagttcaccggaggtgggcgccaatgttggggacttgttctcaaatgcttcgaattaagaacaaggcaacacacaaatgttaagtataaatgcccttcgtccgctgaagcattctctccccaaggatttaatgagcttcggacgaaggtcataagtaaagtatcacgaaggtttcaccttcgtgatcatacttttaagacaacaatgagaaatgaaatataaagcacaaaatatattcacatgttntattatatgaatatacaagtattgaaacataatatttatgaacacttataccttcgcctcggcagacaacaataatccgggcgtaacgtgtccgtgattacaggatcgcgtgaacagtgtcgggatactgttcacttaattataggcacaggaatgcaacctgcgcaaaatacatttatg

SEQ ID NO: 65246 - DNA, 447 bp, Zea mays
  unsure (1)..(447): unsure at all n locations
tcggctatggtcaannattttggcagcacaacagtgcaatggcattcaatgttgtggtaactccacacctacccgtctgtttatatagtgctgcangtgggaaggtgaatcgccaagttgcccgcacccgctgaacggtggaccactcgacgcctgngaagtgaattaccagatcgttcgtacccgctgcatggtgggccaccttgcgctccaaatattttaatcgtttctcggcaacgagctcanggaagggtgttttcggaccttcggcataccgaagcctttgagattttttcacggatcaagctcgttacgaaaaatgatatagcaccgcgaaggggctactattgngggtatgcttcatcgctgaaggtcccataagaagaaacaccttcggaagattgacacanagctgaagctaccaatcagaaagcttctgagtatatt

SEQ ID NO: 65247 - DNA, 469 bp, Zea mays
  unsure (1)..(469): unsure at all n locations
gggggaggttcttcatccncacatgtgctaagcggcgatgccacatccagcccatgcaagtcttagccattaagcatgcatctagaccggcttcttcttttgcaaaatcaactatgtaaagcttgccgtctaatacacccttaaaagctagtgaaccatcacatcttctaaagacagacacatctatatttgtaaataggcagttatatcccatatgacataattgactaacagatagcaagttatatccaagactctccactagaaacacattagagatagaatgctcattggagattgcacatttacctaacccttttaccttgccttgattcccatcaccgaatataattgaatcttgggaatccttattcttgacgtaggaggtgaacatcttcttctcccccgtcatatgggttgtgcatccgctatcaatgatccagcttgagcccncgaatgcataaacctg

SEQ ID NO: 65248 - DNA, 457 bp, Zea mays
  unsure (1)..(457): unsure at all n locations
aaaatctggaatgaatcggcggtaataaccagccagtccattgaatcttcggacttgatgtacagtggttgggggtttccactccaaaatatccttgactttgttgggatccactgcaatcccctcggtagataatacatgtcccagaaattggatctccttcagccagaatgcgcacttactgaacttagcatataattggtgctcccttaagcgcattaatacgatccgcanatgccgagcatgctcctcttcattcttagaatatatcaagatatcatcaatgaataccaccacgaatttatccaactcgggcatgaatatcgagttcataagatatgtgaagtgggcagaagccattgttagtccgaaagacataaccagatattcaaacaatccataccgcgtagtgaatgcggtcttgggtatatcttcnggtcgaatacggatctgatga

SEQ ID NO: 65249 - DNA, 482 bp, Zea mays
  unsure (1)..(482): unsure at all n locations
taactctgatcanacttgacaagtcttagatctaagctcttatcacttatattcttacttcttatgcaattgctgggtcttgaaatatgcatgaagtactgcacttagggggagtattcaaaactcaaatcactcatgaaaacccctagtgcaaggccaaaatgcaaatttcaccatttgcctattttctctaaaaattatctagcctatggcaaaatattttgaaaattatgagaaaatatatgagggtgccaatacctgtcccaacaagtgttattttgtgtgattataagatgggatttgatttggttggaaattagatataataattcataacaaatcaaaacttccctctgtctgggctcaccggacagtccggtgcaccggcagccgcgcgctaaaattccattcttcagtgcgctgtccggtggatcaccggacaactactgtgcgttgtacggtgtgcaccggataggcactgt

SEQ ID NO: 65250 - DNA, 479 bp, Zea mays
tcggcttcatctatattgtggattgcctttgaatcagttcaattcccctcaacctttctggcagcttcctgactcccatgaatagcaataggtccctgatccgaaggtatcttcatgcaaagatatgctggatgaagaattgcttcgaaagcattgagtgtttcgcgaccaatgatagcattgtaaggatactccatgtcgacaatgtcaaacacaacttgctcagtccttgtattgttgacgaatccgaaggtcactggcatggtaatcttaccaagcgctacaatctgtcttcctccgaagccacaaagagggtgcgtagcatcatgaatcttgtcttcgggctcttgcatttgtctgaaggccttatcaaatataatatccgctgcacttgctgtatcaaccaaaacattgtggaccagaaatcctttgatcacacaagagataaccatagcatcattatgtgggtaatccttgag

SEQ ID NO: 65251 - DNA, 484 bp, Zea mays
  unsure (1)..(484): unsure at all n locations
tcgacatctntatntatctcttcttcctgagcccctagcatccagtcagcgatgaaatctgctaacgcctggactgaattgaagatctatgcacataatcaatggtcagttcattaagctctacaatccattttccaatccttccagtagcctctctgttcctcatgatgtcctttagaggttgtgacaaaggaacaattatgtggtatccttgaaaataatgccgaagctttctagaggccattaacacggcatataataccttctccaattttgtgtaattnttctttgatggacttaaaacttcagagacgaagtatactggagcttgctttttagcctgaccatctagcttctcctgtactagtgccgcacttactgcagaatgtgaagctgcgacatataagagcaatggagcccctggcgcgggtggagttaatgttgtaaatcaatcaaatattggttcaattctttaaaaagcttt

SEQ ID NO: 65252 - DNA, 374 bp, Zea mays
tataatactcagcttactcgaaacatactgcgtgacaagcaagctgtcatttaaacacctatcgtgacaagacacccagcagtcgaagaaatatttgtaccttgaaatatccaatacaagatactaccgtcgatgtgctgtcatcgggagcggctaaagtgagtgacatcttctgaataccaatactctttgaaaggagaccgataacctgcgctccggtatgatctcatacgcagactagcttttcatcgtgaacacctatgaagagtattgttcgtgcttgatatccgcgggatatggcatactcttttaacatctttttcgtagtcattcgcaactgttgaccaactagaatctgaaagttgaaaattttc

SEQ ID NO: 65253 - DNA, 486 bp, Zea mays
  unsure (1)..(486): unsure at all n locations
tctanagggagaacacgtgataggtctaactaatgttactttataaaaagatagaccttgtgcagcttgtcaagcagggaaacaggtgggaagctctcatcatgccaaaaatgtgatgacaacatcaagacccctggagttacttcatatggacctcttcggacccgtcgcctatctaagcataggaggaagtaagtatggtcttgttatagttgatgatttttcccgcttcacttgggtattctttntgcaggataaatctgaaacccaagggaccctcaagcgcttcctaaggagagctcaaaacgagtttgagctcaaggtgaagaagataaggagcgacaatgggtccgaattcaagaaccttcaagtggaggagtatcttgaggaggaaggaatcaagcacgagttctccgctccctacacaccacagcaaaatggtgttgtagagaggaagaacaggacgcttatagacatggcgaggac

SEQ ID NO: 65254 - DNA, 488 bp, Zea mays
  unsure (1)..(488): unsure at all n locations
ttacgtgaccttagaaactcagcttaactctccgagaccttttccatttctttctaaccattgtgagttcattatcgtatgtgatattctatgcatatttactttattnngtctcttgnatggggtactggtttgttcctaattngaatggatgaatgtatgtatgcttgcaatcgcatagagaacgatccggttgaagagcccgaggaactcgcacgagaagtccctgagcagcagtcagttggtggaggcaagtgtcccttgacctatctctgtcctattcattatttaattcacctcccgctttacacatttatgcctaaggattgactagcttttgttatccatgtccttgtttacctatttgggttggattattattgnttagctttatgctattgctcanactctaatcaatgaacatgatgagattatctatgatacgcctgtttcccctctcttattatgatgtattacttgtggtcttc

SEQ ID NO: 65255 - DNA, 462 bp, Zea mays
  unsure (1)..(462): unsure at all n locations
tgcacggtcaacagtactgtgccagagtctattctcatttactagaagatatcctacctcgccaatagttcttgcatattttcatcatttttcgtataaataaggaacaatcattaaggcttaagtttttcttgtcattttcaattacttgtaacagcttcgctttttaccatagtgaaaatatatcttctctataggcttaagttgccaaagcataagaatctatggttgcaaggggaaactccgaattaaccaaagagtcgttctaaggagcgcagtataagttttcccgaagcaacaaaaagtcgttcctaagagagcgcagcgtaagttttctgctcacaagtcgttccaaaggggatgcagagcttacagcgaaaaataaacgctgatgccgctgaagtaaaaggcgaagaagctcctaanggaggcttacagcgataaataaacgttgattccgct

SEQ ID NO: 65256 - DNA, 432 bp, Zea mays
  unsure (1)..(432): unsure at all n locations
nggtgccaatgganaaacaganatccttgaaatcttgattgtctatctgcttgccgntgncaactggtagctcggacggtactccgaagcggcaaacaatgttctgccaaaagaattnttgggcagtctttgatgtgattgtggacacagccctcgcttcaatccacttggtgaagtattcgacggctacgaaggcgaacttgaggttcccctgagcggtgggcaagggcccgacgatgtccaggccccagcgctgaagaggccatgtatgggcgatcagctttgtgtattgcgaggggttgcctgaccgaggagagaacttctggcaggcttcgcaggaccttgcgactcgatttgcggcgcagatcattgcaggccagtaaaacccttgccggatcaccttagcagccagggcccttggccccgcgtgcg

SEQ ID NO: 65257 - DNA, 304 bp, Zea mays
  unsure (1)..(304): unsure at all n locations
ttccacccggtgagttaagcgggtgcagagggaggaaagtttatttttggaactcgctctcaacaacaaagaggccaacatgagtgaacagtggtgacaacagggttacgtgctcgggggcaatagctctgttgatctggcctctcacgagcactgtgcggnggtatntataggtatctgagtgcccagcgcccttgtgttaagactccttgtctctcacacacctaatttatacccacaatatccccataaagcagggttaccagccgtaaatacaagcctgcctttacatattaagcccgat

SEQ ID NO: 65258 - DNA, 455 bp, Zea mays
tctcagctttatacacacgagtgctacctaaaggacccctgaactctttcttttagtgtccccaaattccttgagaaggtcatcaaggctggccacggacatgtcctcggtgtcggactgtgttctgggaggggtatcttcctgctgctcagtctgacatccttggcttttggtcttcttgcgggttttccttgcggaggcgagcttcttcagtaccttgtcgtagtccattttgagggtgcggtaagcttcacgggtgttggtctcttcgccttcagctaacgagaggctctcttggagggacgctctttcttctgaaagtccctgactttctgtccaggctttccacctgcgagggtatggaggtgcaccggaaggcgaggtcatcatattggttatcaacggtttgaagatatccagccatgtagacaatggtgggatcattcctaataaga

SEQ ID NO: 65259 - DNA, 467 bp, Zea mays
  unsure (1)..(467): unsure at all n locations
ttagctgattcanagntccttggtggaccattcccaggtttatcttctccatctcttgacataaagtgttctcggaggtcttcatcgttaaacaatggcaggaagccttgcggcttaatgcatctgccacaacattggctttgcctgcgtgataatggatttccagttcatagtccttaataagctcaagccatcgtctcttgctcatattcaattctgactgggtgaagatgtacttcaaactcttatgatctgtatagatatgacagacatntcccagcagatagtgacgccaaattttcagggcatggaccacagcagctagctccagatcatgagttgggtaatgctcctcatgtcagcgcaactgccgtgaagcatacgcaattactcggccctcttgcattatcacgcagccgagttcactgccagatgcatcacaatatacatcanaaggcttggtgatg

SEQ ID NO: 65260 - DNA, 486 bp, Zea mays
  unsure (1)..(486): unsure at all n locations
tgtcaacaatataagcacaagagagagaaggctgcttctgtttactctccgaagnctatgctcctatgtgaagatatagcagatcaaagggtactgctgggatctcacctatctaatgagcgagaaaagactctgctaagattcttgttcaacaacaaagatgtcttcgaacattcacttaatgtggatccatctttcatgccaaggaagcatagacttcagaagatgtctgatgacaaagctgaaggtgctcggagcgaagtaaagagacttctcagtgctggtgttattagagaagtaacatatcctgaatggctagccaacactgttatggtgaagaaggctaatggcaaatggagaatgtgtattgatttcacagatctcaacanagcatgtccaaaggacgagttcccattatcaagaatagacacccttgtagatgcagcagcttcttcggagctcatgagtntactggactgctactct

SEQ ID NO: 65261 - DNA, 440 bp, Zea mays
  unsure (1)..(440): unsure at all n locations
tgatgctganctcacctgtgagatttaagagctttacgtattctggcatacgtcactaatgtgtattgttaaagaatacgtatgccgcccgcgttttaaaacaaaagtacatgctcttttttcattttaaggacatgtttggctttttgattcaagtttagtctctatcttggttggttacagggactaatacgattaagatcatattaatgactcataccaagatgaaaaagtctcttaccactctctcgtcattagtgctactgaaataagtgacatacaaaaggtggattatattgcttaatcccttttaagcatcccttggtgagactaaagactaatacaatttagttcaatattttgacaatttagtgagtacataagatacanacagatgtacttatttttagtcagtggacccaactaccatatatctctat

SEQ ID NO: 65262 - DNA, 452 bp, Zea mays
  unsure (1)..(452): unsure at all n locations
tgggaaaggtgcacacggcatacatcgatacattatatgttcatagntacaatatttatttttctaaaacgcgcaggagaactgcgcattatatatattaagatagaagaaataccaatggtctaaagaagaccagagtacagagaaacaacaaaaaaataacaaaaaaataaaataaaataaaaataaaaataaacattcatctataagacagccaaagctgcccctatactaaggccagatggtgcccatatccttggcacccgcgagacaccacctctgaacgtcgtctttgatattctgaataatctggttgccactaggagcatccccctcatacacacatttatttcgctgctttcaaagccaccatgccaccaacatcacaagggagttaatccctttgcgcagcgcataatggaccttggccttcaattagcccaccaatcttg

SEQ ID NO: 65263 - DNA, 478 bp, Zea mays
  unsure (1)..(478): unsure at all n locations
tctatagggagaacacatcttatgattaacaaatgttctttntgagaaagacaggatttgtagcgcatgctatgcaggaaagcaagttggtgcccatcatccacacaagaacatcatgacgaccgacaggccgcttgagctactccacatggatctattcggcccgattgcttacataagcatcggcgggagtaagtactgtctagttattgtggatgattattctcgcttcacttgggtattctttttgcaggagaaatctcaaacccaagagaccttatagggattcttgagacgggctcaaaacgagttcggcttaaggatcaagataattagaagcgacaacgggacggagttcaagaactctcaaatcgaaggcttccttgaggaggagggcatcaagcatgagttctcttcctcctacacccctcaacaaaatggtgtagtggagaggaagaatagaactctattggacatg

SEQ ID NO: 65264 - DNA, 330 bp, Zea mays
  unsure (1)..(330): unsure at all n locations
ctcagcttttcccagtgacaccgtattcgagaagtttgttatgctttccctgttagtggtgagaagctcttctttaacctctcatattctttcttgagctnttgatatgaaacatcatttgttcctgctgattctagctcagaagaagatttagttgtcgacatactactagcattagcacatggtaacataggatcaatctgaatacatgtgcacgagtgaggatgatgggactctaagacttctatcacaacctcatgagcaattgttaatatgatatgaacatctctaagatttcatgagagcataggagcatctttattcatcttg

SEQ ID NO: 65265 - DNA, 481 bp, Zea mays
  unsure (1)..(481): unsure at all n locations
tttgaagaaaactccatatgaatagctcattggtagaatgtcctatatctcatattctagggtattcggttgcaaatgttatattttgagaaagggaacccgactttctaaatttgagaagaaatgtgatgagggttttcttcttggatgttcatcaaatagcaaagcttatagagtcttcaacaaaactcatggtattattgaagaagcatatgatgttgaattcgatgaaacaaatgggtctcaagatgagagtgataatctcgatgatgttgggggaactcaattaataaatgcaatgaaaacaatggccattggtgaaataaaaccaaaggaagatgatgatgaaaatagtgtggttgtcattccttcatcctcaactcaaaatgaggaagatcaccaaagccaacaacatgatgaaaccatggatactcatgatcaaggtacttcaagactttcggntccttctaatgcttcaact

SEQ ID NO: 65266 - DNA, 471 bp, Zea mays
tacgggtctatctgaaagaaaaagggcctaactatggtggtctttctattggagcgggtggggggttgattcactgttccgagggggttctttagcaaaattccatgccgaaggggtatcctcgcgtgcacgccgtatgatctgatccaaacggactggattaaaagccacacactccctaacccattacattggtgatcacacaatcaagcatcaagggtgtgggtttcaaataaaagagattctttgtgatccgtttgatcggcgatcaacaaccctctttgctcctagacgaacgtttatttgtgcggtaatctcctccattggatcaagattcaatggaccgcgcaccttgcacccatctcgacggctaagaatagtggtgccgccagctcccacggcgaaaggtgccctgacgacgagccatccgaccattccaatggccaagctctaaaccaagagatgctatac

SEQ ID NO: 65267 - DNA, 478 bp, Zea mays
tctcgctcttggggaatatacttttctgagtgcatccagtatcattctggtggctctttctacctacccattagctcttgggtgtgccactgatgtgtacttgatctggatactcctttgttcacataaattgaagaactctgagctggtgaagttggatcctacgtccgcgatgatgatatttggtattccgaacctgaacattatctcctggataaactccactgcttttgctgaggtcaaggaagcaattggcttgtatactatccacttcgtaaatttgtcaatggcaaccagtatatgagtataacctccctgagctttcttgaaaggtccgatcatgttcagcccccagcatgcaaacggccaggttacaggaatggtctgcagctgctgggcgggcaagtgctggtgttttgacaaaaattggcatgccttgcacttttggactaactcggtagcgtcactcttcgcagtt

SEQ ID NO: 65268 - DNA, 457 bp, Zea mays
  unsure (1)..(457): unsure at all n locations
tcatactcggctgcgttgntagaggccgggaatagcagctggagagcatatttgaggtgttcgcctccaggtgcggtgaagagaatccctgctcctgctccttgcagcttcagcgagccatcaaaatacattcgccatacttctgcggtttctggattatccggtacttgctgttctgtccattctgatacgaaatcaaccagtgcttgagttttgatggcagtgcgaggtcggaactcgatatcatgggatcccaactcacaagcccacttggctattcggccaatggcttccttgttgtgaagaatatcccctattggaaaaccagtgactactatgactntgtggtcgtcgaagtagtggcgcagcttgcgtgcagttagaagtactgcatataatagcttctgaacttgaggatactttttcttcgatggacctagaacctcactgatgaagt

SEQ ID NO: 65269 - DNA, 485 bp, Zea mays
tcgggaaacccatacttctagccatctaccgacagacggtttattctttgttgtctgggaggcagtataagaaatcttcttcattcgtcccattgaacactagtgccccctctggatatttcaattctctggcatagtggttagcttcaaaaacttcttcttccgatagctctttccccgaagcatgtcgcacgatataatcgtatatattggaagatgcttcgggggcagccgtatcaatttcttcaaccaaagttggctctgacagtttcattttttcgggtgcctttgcaatttttgtctcttctgcttccgaaggcattaccttagttggttctgaagaccacgtttcaactccagtctgttgcttcggagcttcagcaacgaatacttcagcaggcgcctcagatgtttcagcagtcttatttggggttgtgcttggaagtataattggttccaaaacatctaacacattaaccattctt

SEQ ID NO: 65270 - DNA, 487 bp, Zea mays
  unsure (1)..(487): unsure at all n locations
gggggtagngggatgctatgtaatgtaatggctcgatgttatgattaaaataactagctaaaaaaatggcatgggcataatatcgactctcttcccatggcagatggcttctgatagaaccacgcctaccgcctccgggattggagcaagacttcctctatgagctgaaggagaggctggcggagaatggggtgagacccaccttcccgcaccttcagaactaccactagacctatcccaaattctggccaatcaaaccagactcattgaagtcctcactcgaagcctggagaaccagcgcccaggcggtggaaggccccaggacaggatgggagaattcctgagactgaagccgcccacgttcgcggggttcagcaatcccctcgatgcagatgactggcttcgcacaatcaagaggaagttggacgctatcgcttgttctgagaattaacgtattcagctagcagctcatcaactttcacgaatg

SEQ ID NO: 65271 - DNA, 490 bp, Zea mays
  unsure (1)..(490): unsure at all n locations
tcggcagataagagtagcagnctcttatgttttgttatgttatgaaaggcttcggcaaaaagaggaagcggccttttatgcttcgttgtgtacgaaaagaagggaaggtgttttttcgccttcggctcaaaaaactgatttcgtccacatcaaagcacctcaatcgaagggtaagaatatattacaaggtatgtacaaagttccttgaagaacagtttaattctatttacaagagttattacaaaattatcctgagtttttctaaagcacacttctgctagtcttcattaagcttcagcttcgacgacaacttcggcgacatatcctaggcatcatcttcaccttcgccatcctacatgagtcaaggaatcataagaatcaagcccaaaggataagggtagcacgacatgtcatttcttactggttcaagatgacttcgggcttcgtctccagctttctctcgcccgccctttgtccataccatatttat

SEQ ID NO: 65272 - DNA, 484 bp, Zea mays
  unsure (1)..(484): unsure at all n locations
taactcggatcanactngacaagncttagttgtaagcgtttaatatttaaatncttacttcttatgcaatagtgggttcttgaaatatgcatgaagtactgcacttatggggagtattcaaaactcacatcactcatgaaaacccctagtgcaaggccaaaatgcaaatttcaccattcgcctattttctctataaattatctagcctatggcaaaatattttgaaaattatgagaaaatatatgatggtgccaatacctgtcccaacaagtgttattttgtgtgattataagtngggatttgatttggttggaaattatatagaaaaattcaacaaaaatcaaaacttccctctgtctgggctcaccggacagttcggtgcaacggcagccgcgcgcttaaattccattctccagtgcgctgtccggtggttcaccggacaactactgtgcgtngtccggtgtgcaccggatatgcactgtat

SEQ ID NO: 65273 - DNA, 435 bp, Zea mays
  unsure (1)..(435): unsure at all n locations
cagcgcctggacagagtgcatatgggccgtatgctttgtccaagccttcgtgacctcgtcttgaaacccaggaagtttgatccagaaattctcgaaacggaacggacgcggtcggcggggcccagctagactagagagaagtagaggacagcgatctgagattgaggtggctagtgcttgtagaccatgagaatcaaaggagagatcccagatttcattacaaaagactctatccagcttgaccaaagtaagccgacgacgctcattgctccaagtgataattcggntntgaaggcggatttcacgaagctcacaaaaatttaacgttgtccgaaatagactcatttgacaaaggtttaagttccgattgttcttatcccgagcacgggaaatgagggtaaaatcaccaaagactaaccacttctggccatccgg

SEQ ID NO: 65274 - DNA, 482 bp, Zea mays
  unsure (1)..(482): unsure at all n locations
tccncagcacgccaacactatgcggaccacgggtgtctgtacgcgggaagattgctccagcagccaactattgctgtccaagtcttacatccattgtgctcctgngcccacatgtcgggctcagcgctcttatacacgccccccttgtgctatagaagggggagcatgtaacgttacatangggctcaatctagaggcttggactctcaagtttccacagcaatccaacacacagtggagtatggtgttacgctccggcggcccgaaccactctaaatcctcgcgtgttcatgtgcttgatgttcgcttagcaagacagacaaaacgcttaaaccccttcctcatcttagaatttaggacggatgcactccgccacccggccggagaattccctctccgaccgagtggatatcgtacaacggtgtaagtagcgtttagaatccctactgcgtgatagcgtagtggacactgtatgccgctgc

SEQ ID NO: 65275 - DNA, 455 bp, Zea mays
actcagctcttgagaccgcccacgtcggtggacttacattgttggtaattctagcacaaccgaacgaatccagattcgtcgctcgttgtctaacgactctgttattcctgtccactttgaagccggccacgaactttgcctttgctctttggatcagctgctcctgacgctcctcgaacaggagttgttcttcacccggcaaggtgtcccatgtcatcgtgatgatattgctggtggaaatttcacagctatcctttgaaccggtcattgagagcccatttgataggtctatattgcgttgtacccagcggagtcgccataaagcatgttgacaccttattagggcgccaaacactcaacacgaaccatccgcggtgccctctgcacacggactgacgatccacgcgcatgggccggacagtctgcagccttgtgcgaggcgcggcggagctctc

SEQ ID NO: 65276 - DNA, 469 bp, Zea mays
  unsure (1)..(469): unsure at all n locations
tncttgttcagntagtctaatcaatcaggcttcagcacatgtttaatgtccgaccagagattaagctgccaatagcccaatcaaggctgggccaggccaatggcaataccagtggataagcccgatgaatctctgcagagagagagggatgaacttgctggcaatccacaccaacttaaataccaaatccagtttcacaaatgggagatgaaaaggctcatagacccaaatagtaactaccaagttntgtttcaattaatcacgaaaatgaatatttaagggcaaaacttctaaaatggccttgccgatacaggaaaaaaaagttgctgataaaaaaaactgaagcgacctatcaattaaatccaatccaaaacaaaggacaaaattagtaagatattcaaaggttctcagtcctcattccagaattctgaaggtggatgctggcagaacttaatggcataaacgatga

SEQ ID NO: 65277 - DNA, 456 bp, Zea mays
tcggggcagcagcaaagctccttccggccgccagtgcctatgggcagatgcgccaggggcttctggggaagatttggggatcaaccaagaaaaatatactgcctattctgtggtgaaggtaaaggccacaccaccaggatgtgtcacattaccatccagaagcaaaaggagctagcagaagctgctgcacaacagaatcagccgaagcaggtcctgcatactgcttcgtgtcattcgccttacattccagaatatgtaggcaatcaccctgcagcttctgttgcttcggcaagtcaatcccaagcattctggcaacaaccttcaccgccgtcaccgacgcagtcagggctccagccagaagggagtcaccacaatctgagggatttcagagagggctccgaagctcgcacagtcaatagcactgtgccagaatcgaagcacatttactaataaata

SEQ ID NO: 65278 - DNA, 445 bp, Zea mays
  unsure (1)..(445): unsure at all n locations
tcggctatggtcanatnnttcagcagcacaatagtgcaatagtagttaatgatgtggcaacttcacacctacccatctgtttatatagtgctgcaggtgggaagatgaatcgtcaagccgctcgcacacgctaaacagtcgcccgcacccactgaatggtggaccacagtgcgcgagaaggtgaatcgccagatcgcgcgtacccgtcgtatggtgggaccacctcgcactcggaatatttaatcgtttctcgacaacgagcttatggaaggtgtttttcggaccttcggcattccgaagcctaagagaatttttcacgggtcgagctcgtcacgaaaaacgatctggcaccgtgaaggggctactgttgggggtctgcttcgtcgccgaaggtcctgtaagaagaaacacttttagaagatcaacacagaagcaaagccgaagc

SEQ ID NO: 65279 - DNA, 491 bp, Zea mays
  unsure (1)..(491): unsure at all n locations
cggacctatgaatctcagcttagtcttgcgtagtctcggnctagttagtcttagttatacttggtagntcgctatatcctgtgcatttatgtttgtcatgatgaactatgtttggtttggatcnttgtnatgactgctaccagagtgtgggtatcccctgcattctggtttatctattatgttaatggagttagttatataatttgggaaaccccttctattccactttcctttctatctgagaagctgtgtggtctgtgttggagatcagtgaagatgctcatctgttcagtgctgccgaagaattctattctcttttcttatgctgcaagatttgccagatcagttctgatgtgtggttgcattctacagatgtcacagaacaagcgcacaggatgaaggcgtgctcatcatgagcgagccgctcaacaagaggatgtgccccatcaagaatacctggcgcctcgccccgatgttatcgagcgatgttt

SEQ ID NO: 65280 - DNA, 482 bp, Zea mays
tgaagccatggtaagtagcatacgcgagtaatatacacatcgactcaagcctagctacgggtgcataggtttcactgaaatccataccttcgacttgtgaatatccttggccacaagtcgggctttgttccttgtcaccacaccatgctcatcttgcttattgcggaagacccacttggttcttacaacattttggttaggacgtggaacaagatgccatatctcattcctcgtgaagttgttgagttcctcttgcattgccaacacccaattcgaatcccttaatcgtcttccaccttgtatgactcaatagaagacacaaaggagtaatgttcacaaaaatgagcgacacgagatcgagtggttacccccttatgaatatcgccgaggatggaagtcacggcgtgatctctttgtatcgcttggtggactcttgggtgtggcggtcttggaccctcatcatcttccttgtcttgattatt

SEQ ID NO: 65281 - DNA, 370 bp, Zea mays
  unsure (1)..(370): unsure at all n locations
tctatagggagaacacgcgatacgtttgactaacgcactttttttatataganagaccttgtgcagcttggcaagctggtatacaagtgggaggaacacatctcaactagaatgtgatgaccacgtctagacctctggagctgctacatatggacctcttctgacccgtcgcctatctgagcataagaggaagtaagtatggtctacttatttgttgacgactttttccgcttcacttgggtggttttcttgcaggataagtctgaaacccaagggaccctttagcgcttcgctaggagagctcaaaacgagtttgagctcacggcgaagaagataatgagtgatcaccggtccgagttcaagaaccttc

SEQ ID NO: 65282 - DNA, 452 bp, Zea mays
  unsure (1)..(452): unsure at all n locations
ctcagcttccctttaccccgaaacgtgatgtacccttcattagtgagactttgagatagacataatctctaactagaaagtacaagggttttcgtcgcttgtctgcataactcttctgacgagcttgagcttccttcaaattatgaattattcgttgaactttctcttctgtctcctttaccatatcaggcctgaagaaacttctttcacccggttcagaccagtttaacggagtacgacaccggtgtccatacaaggcttcaaagggtgccattttgatactctcctgatagctattgttgtacgagaactccaccaatggtaaacatttatcccatttatatgaaaattctagagcacaagctcgtaacatgtccccaagtatttgattcaccctctcagtttgcccactggttngaggatgataggccgaactatggagcaacttagta

SEQ ID NO: 65283 - DNA, 379 bp, Zea mays
  unsure (1)..(379): unsure at all n locations
ngantgcgnctcaggcccatccaactagagaggctcttgtttcggtgagtacctcaagaaagatgacgccgaagctgttaacgtcactcttctcagtcagttggcatgtctgcatgtattcacggacgaggtattcacacgtacctcgaaccatcgngacatactgctctctgtcggacggcgctagtatggaggccccaaaatctgacactctggccatgtagacgccgtcaagaagtatgttggcgctcttcacgcctccatggatgatcggaggagacgccgtcgattgcagaatacagaagccctttgctgcttcatgggcgatcctcagtaaggcgctgaaggggatctgtagcgcttgggtctcgccatggat

SEQ ID NO: 65284 - DNA, 483 bp, Zea mays
  unsure (1)..(483): unsure at all n locations
tctctcagtgagaatgtctcttgattggtgtccagtggctgcatggcancccctggcgctattgccttcttcggcggcacgacgaatgtgaatgcttgccgaaggtagtngtttgagttcaccggaggtgggcgccaatgttggccacttgttctcaaatgcttcagcttgttcaaaggtgcttcagcttgttcaaaggtgctgaagcgagagagattacaatccagtgtgaacagtatgatgctactgttcatctatttataggcacgagatgcagcctangtaaaagtacatttatgtccttgacatttacttatgacataacatanatcattaaggactagctggtctttttcttccagtcagcatcatgtttggtcttcatcaccattntaagccaaagctattactcttcggctctaagcttggcgtccattcttatcatcttcgggttacatcttcacatcgtatgcctttttccat

SEQ ID NO: 65285 - DNA, 487 bp, Zea mays
  unsure (1)..(487): unsure at all n locations
ttacgcgacctataaaactcagcttatacaggaggatagaggcaagagctcgaccatatgttattatagaaggggagctgtacaagcatggagtctgtgctccattactcaagtgtttatccagagccgaaggtatataattgatgaaggaaatacacgcaggcctgtgtggatctcacattggatctaggcctttgcttggaaaagtttttcgtcaaggattttattggccaaaggcagcttcggatgtagcggaattagtccaaaagtgcgaaggttgtcagaaatgtgcaagagataaaaaacaaccttcgcctctaacccagttaatacaacccacttggccgttgcaaaggtggggccttgatttgttaggtccgttaccaccagcacaagggaacttaagatatgttgtagtggcagtggaatattnttctaaatggattgaggcnagcctttaccacaataacttcngcactattaaaag

SEQ ID NO: 65286 - DNA, 479 bp, Zea mays
  unsure (1)..(479): unsure at all n locations
tcggctccatcgatattatggattgctttggagtcagttcagttaccttcggcccttcttgcggcttcctgacttccatggatagcaatgggtccctgttccgaaggtatcttcatgcaaagataagcaggatgaaggattgcttcgaaggcattaagagtaccacgaccaataattgcattgtaaggatattccatgtcaacaatgtcaaacacaacttgctcagttctagtgttgttgatgaatccgaaggtcactgacatggtgatcttgcccagtgctacaatctgtcttcctccgaagccacagagaggatgtgtagcatcatgaatcttatcttctggctcttgcatttgtctgaaggctttagcaaatatgatgtcagctacactgcctgtgtcaaccaagacattgtggaccagaaatcctttgataacacaagagataaccatggcatcgntgtgtgggtaatctttgag

SEQ ID NO: 65287 - DNA, 462 bp, Zea mays
ttcaacttctcaaccacttacaagagccaggcattcaattttatttacattcaaagagatcaaatcctctccaattccacacaaaaccctagtgactagagagagtgatttgccgtgttcatttgagctcttgcgcttggattgcttcttttctttctcatttgttcttgtgatcaaaactccattgtaatcaaggcaagaggcaccaattgtgtggcggcccttgcggagaaattttgttcccggctttgattagagaagagaagctcactcggtccgagggaccgtttgagagagggaagggttgaaagagacccggcctttgtggcctcctcaacggggagtaggtttgcaagaaccgaacctcggtaaaacatatctccgtgtctcacttgcttattcgctcgggatttgttttgcgccctctcttgcggacttcgttattattactaacgctaaccc

SEQ ID NO: 65288 - DNA, 490 bp, Zea mays
  unsure (1)..(490): unsure at all n locations
tctanagggagaacacgtgataggtntgactaacgtgcatttcttttaagatagaccttgtgcagcttgtcaagcaggtaaacaagtgggaggagcacatcacagcaagaatgtgatgaccacttcaagacctctggagctgctgcatatggacctcttcggacccgtcgcctatctgagcatatgagggagtaagtatggtttagttattgttgatgacttttcccgcttcacttgggtggtctttttgcaggataagtctgaaacccaagggaccctcaagcgcttcctcatgagagctcataatgagtntgagctcaaggtgaagaagataagaagcgacaacgggtccgagttcaagaaccttcaagtggaggagttccttgaggaggaagggatcaagcacgagttctccgctccctatacaccacaacanaatggtgtggtagagaggaagaacaggacgctaatcgacatggcgaggactatg

SEQ ID NO: 65289 - DNA, 476 bp, Zea mays
tatgtgatgatgtagtgatcaagacaaaatactcagatattttcattgatgatttacagctggccttcaacagtctacggcgatatcgatggaagcttaacccacagaaatgtgtctttggagtaccagcgggaaaattacttggatttattgtcatccaccaatgaattgaagccaacccataaaaaatcgaggctatcatgatgatggaagtgccacggtcgcagaagaaagtacaaagacttattggatgcatgacagctttaatcagattcatatcaaggttatgagagaaaggcttgccgttctactaagattctcaaaaaggtggacaaattccattggacctcataagctcatgatgctctacatgcactgaagaaatatctgacaacgccgccagtactgaagccactgcaccgagccacgccaagtcagcctggggaagaactgctattatatatcttctacatgac

SEQ ID NO: 65290 - DNA, 482 bp, Zea mays
  unsure (1)..(482): unsure at all n locations
tatcaagtactaattgaagcataattatatcatcgctcatgtcttgtcgcctatttggcccttcantttttaagagctactagctacacgaggggaaaatgagagaggtggggatgagagatgggccatataatgagggcaatatgtgcggcaaaccaatcaatttaacctaatcctatggacatttgtcatcgtttttacactaaatatccaagataccaagtcaaatttggcagtctgtccggtgcacttctttagagaactcgaaaacatccacttttatagaaaaccatgaaatgagagataaagttntaaaacatcaaaacaatttctttattacaaggttatagaaacagagttattataagtttactaattaaggctagtttagaaacttacacccctctgtgattctcggagattgagtggaaaaatgaagtatcttcccactcaatcctcacgaatcttggaggatatataag

SEQ ID NO: 65291 - DNA, 453 bp, Zea mays
  unsure (1)..(453): unsure at all n locations
ttggccncatctgcaagctcgactcctcctctgatgctgtctctggggccactgtcagtaccctgaattaggggtaccccttactacagtgtgaaggcgcggagtccatgcggctgcctctagccacatggcaaacagcgcctgaccccaccacatgggcagcaccggggccgccacgtggtcggnggagacaatatactccatggtgtcaacagtgggtccgaacccccacgggaaagtgccagacccctggataaacagctcgaacctccgggcagggtccaggacctccgcgagtacagactggacccccgagacgggtctcagacctccctgtgtggggccctggtcactcacaacaaggtcccgagattctatgagaaggagtaccctgaccttaatcaatgccaggtatgggtccagagccaacacgtgttcagaccatattgcgta

SEQ ID NO: 65292 - DNA, 376 bp, Zea mays
  unsure (1)..(376): unsure at all n locations
ggggagcaacacaagnncagaagggaaaaagctgtttctttttatcagccgaagcccatgctcttgtgtgaggatatagcaaagcaaaaggtgctcttgggatctcaactgttcgaagaacacgagaaaaccttgataatgttcttgtcaacaacaaagatgttcttgcttggtcagctaatgatctttgcggagttaacagggatgttattgagcactcgctcaatgttgatccatccttcagacccataaagcaaaggcctcagaagatgtctgatgacaaggctgaatgtgctcggaatgaagtgaaaagacttcccagtgccggagctatccgaaaggtaaaatacccacaatggctggctaacactgttat

SEQ ID NO: 65293 - DNA, 470 bp, Zea mays
  unsure (1)..(470): unsure at all n locations
tgccttangctattctcaatggtggtttcatgcacatttattagtgcgacatatcatattttttgatgatatgacatagtatttaattggattgagttttatgggacgagaaaattagtttcattgggatgaaatcatgtcaacttccaaggtcttgaaaaccatgtgaaaccttcattaagagtgatttgttccatcttcatatgttttactaattacaattggctattgagttgcaacatttaattggtatgttagtatataaaatagtaaagtgaaatattgcattgagaggtattgcttcatttatagttttatagtacttttgatgatgtatcacagttggaaagagtgctaccaaattaccattgaaatagtcttactgcaatccttatcaatataagactcctgcctgttntgttttcgaaaataaatccgacaaaccgcgcaaagcaatattaagaagtggt

SEQ ID NO: 65294 - DNA, 467 bp, Zea mays
  unsure (1)..(467): unsure at all n locations
tctgagtttcttgcgtgatttgttagttacaactgctgttattactcggaanacgacttgtaacgggtccagacctcctcctttatatagatgaagggctacggccgattgaaccccccacaatcgattaaatcaaatctatttatcagttttactttttcgctcttttaatccctaggagtaggagtaatttagccttagaattagatctagtttagtcttccacaacaatctctactcgactctacgccgattagagtagcaccgggtggcctaccgatccggagcaaccccttggagctctccccctcgatggcatctctcccggagcgagattgagggttcttcgcggagaagaagaccctctgcgctatcgtggaccattcgacactatgcgcggaccgtccggaagtgtgcaaaggaggatccactcctgcgccaggtcgcggaccgtctggtcctatgcc

SEQ ID NO: 65295 - DNA, 278 bp, Zea mays
ctgtctccatgttatgaacttattattgctcccgctacttgttcaatctgaataaaatccctgaatattcctattgcaccaaattctttccaaacaaatcctatggtttgatggttagtgggttagtacacgtccttattttttgccttcatatgattactttactactcccttcgttccaaattataagatgttttgcctattttagacacattcctttactatgtctttagacatcgacacatcgtgtatatctaattgcatagaaaaagctattt

SEQ ID NO: 65296 - DNA, 480 bp, Zea mays
  unsure (1)..(480): unsure at all n locations
ttatcanatggacgtgaagagagctgtcctcaatggacctttcaaggaagaggtctatgttgagcaacctcccggctttgaagatagtgagtaccctaaccatgtttacaaactctctaatgcgctctatgggctcaagtaagccccaagagcatggtatgaatgccttagagatttccttatcactaatggcttcaaagtcggaaaggccgatcctactttattcactaaaactcttgaaaatgacttgttcgtatgccaaatntatgttgatgatattatatttgggtctactaacgagtctacatgtgaagaatttagtatgatcatgacacaaaagtttgagatgtctatgatgggggagttgaagtacttcttaggaattcaagtgaagcaactccaagagggcacctttcctagccaaacgaagtatactcaagatattctatacaagtttgggatgaacgatgccaaacccat

SEQ ID NO: 65297 - DNA, 478 bp, Zea mays
  unsure (1)..(478): unsure at all n locations
tgtgacctcttcaccggcgagcgcgagcgtcaccggtctgctctcgccgcggaactggtccaccgtgctgagttgcggtagagatggaaaccacggtgagctagactgagaccaccggattacctggactcgatccgactcatagtctggagttgtgtagcacgcgtcttcagtgcacgcgccgaacagcaatgctatggcatctatgaactccaccacgcacctgtgcacgaagtagccgttcgcgcggcgacacacgtagttgaactgcaccaggtcaccctcccgcgcctcggccccctcccncttgacgacatcttcagagtttagatcaagaagcgagcgcagctcgttccatgagccatcggaattcagaaacatagctcaaaaccgcgagaaacatgtatgtctgcgaccactaccttcgagtatgaactccactcccagcttccggtacctgaaagcttcgagaaacgga

SEQ ID NO: 65298 - DNA, 317 bp, Zea mays
  unsure (1)..(317): unsure at all n locations
tatgtgaggatataaaaaaaaaaaaggtgttattgggatntnaantttttgaggaaaaggaaaaaanntttataaggtttttgttttaaaataaagatatttttgnttggtaagntaatgatttttgnggagttaatagggatgttattgagcantngttnattgttgatttattttttagaaaaagaaagnagaggttttagaagatgtntgatgaaaaagttgaaggtgcttggaatgaagtgaaaagatttnttagtggtggagttattatagaggtaaaatatctagaatggttggttaaaattgttatggtg

SEQ ID NO: 65299 - DNA, 407 bp, Zea mays
tgccgcatgcaagcttatgaagattcttcatcccaacgtgggctagtcggcgatgctagagccaacccatgttagtcttagcaattaagcaagtgtcgagttcagttcaattaaaatcaactaagtatagctgaccctctaacactcccttaaatgctactgaatcatcacttcttctaaagacagtaacacctaaatctgtaaaaagacaattgtagcccattttgcataattgagaaacagaaagcaaattgtaatctaaagaatctacaagaaaaacattggaaatggaatgattaggtgatataacaattttaccaagtcctttgaacaaaccttgatttccatccccgaatgtgatagctctttggggatcatgggttttctcatacgaggagaacatcctt

SEQ ID NO: 65300 - DNA, 467 bp, Zea mays
  unsure (1)..(467): unsure at all n locations
gagttatgcngacaaagacgccaacccttgttctttcaagtcaaagattatgtgtacctaaaagtatcaccaatgaagggtgtaacccgtttcggtgtaaaaggaaagcttgcaccccagtacattggtctgtttcctattcttgaaagatgtgaaccagtggcataccaactccaactaccagaaacattgtccgtagtgcataatgtgttccatgtatcccaattgaataagtgtcttcgggttccagatcgaaccattgatgtgatggatgttaccttggaaccagacttaacatattcagaacatcccattcgagtcctggatcaaaaggacagggtcacccgaagaagaactctgttgggggccttcggcttccgaaggtcctcaaaaacatgatttaacaatgtttctggagtaaagtacattaacaggtatcttctgattctgatcagagccacgacatg

SEQ ID NO: 65301 - DNA, 388 bp, Zea mays
  unsure (1)..(388): unsure at all n locations
agcttgggaagccaatcacaaggtcgttgatgaatgtacattaagccaattggtcctctaagtgcaatgaagcctttgagcaattgaagacactattgaccactgctccggtattggctcaaccggacatcactaaaccttttgacgtatattgtgatgcatctggcagtgggctcggctatgtactgatgcaagagggccgagtgattgcgtatgcttcaaggcagttgcgccgacatgaggagcactatccaactcatgatctaaagctagctgctgtggttcatgccctaaagatttggcgtcactatctgctgggtaatatctgtcacatatatacagatcataanagtttaaagtacatcttcacccagtcagagttaaatat

SEQ ID NO: 65302 - DNA, 406 bp, Zea mays
  unsure (1)..(406): unsure at all n locations
cgcttctcttctctacttcagtcttctggatctgngggagccatctcgtcggagcctcgatctgctgccacgacaagaatcactgaagtcgggagatcgatggacgcatactcatacttggatggcggtcggtcaccgccagaggcatcgtcgcagagggtgaggatgggtagagagacggctaggtttttaggatttggagttggggtgcggggttagtgatgcggaggggcatccttgaactcccataattgttggcggcatgaatcgcggtggggtttgcgggcggtcgggcgggcggatgcgggcggccgccggatcggatcgaggcaagtctgcgctgcgcagcgcggcgccggagtgaatatggtttggagggggagttggctgtccgctcaactcgcgc

SEQ ID NO: 65303 - DNA, 395 bp, Zea mays
agcttgagacgtgattacttaatggtcacttgttgtccgaaggacacacttcaggtcatcatatagatgcaccaaagaaccatataaagacatcaatgtccataccatctatgtaatggaccacacccgttcttttgaaacaattcaaagaacttaaccaattcagatcagattttaagataagagggactcaaaatctcattcccgatgatattcatcaagtatccatcttatggggaaaaacatgaccaatagaattgtccataacttttcatttcatcccaacaatggaatgaccaattccttcttacccatcatggtaagtatcatcacatgaaaagttataaaaaatgcaacacattgtatgggaggatgtatgtggaatacaatccata

SEQ ID NO: 65304 - DNA, 450 bp, Zea mays
taaaggatactactcaactaaagtaagatgaagttgataagtggccaaggtatgaaaacttcctctccttcagttgttttagaattctatccttagtgggatgtactatattataggttaatttccttgcaatataaaatgttcaatagtgcatataactttgatatcaactatatgtgtgcactaatttaaaggaatttaatctatccttttgggtttcaagaatgatgattcattctccatccacatataaggattatcatttgtgaaaccctcccttgtgtttctagtgctctcttttctaagtgtttcaataaggtctttccaagtgctttcaagatggattcaaaatctacgaatataagagtcttggttggttcaatcattgagtttcaatgggtctcatatcaagtatgattgaaccaagccaagatgaatgaagttcaagat

SEQ ID NO: 65305 - DNA, 395 bp, Zea mays
agcttcagggacaatcctggagagtcttttttttgtttaaatgcactagaagtattagttaattggctacaaattgttagtggaattagctagctaacaaatagctacctaactattaactaatttaccaaaaaatagctattatctaggaagtttgaatgtctcaactaattttagtcattaactattagctctaatgcattcaaacgtccctaaaagaaggtgtgggttcggctcacaccttctatcttttttaaccttacaatacaaacaatagccatctgtttaagttgattcaacctcttggtaatttctcatacaatattattctttaattatcacactagcatactatgagattttaaaattttaaggttcgatcgcatctatattaa

SEQ ID NO: 65306 - DNA, 477 bp, Zea mays
  unsure (1)..(477): unsure at all n locations
gaccttaaaactaagcttgataccactggacacccgggatgcaaaacacttattttgctactaaactacacctctaacattcgtatataaaatttcggcagcatcttcttcgaaaatggcataaactgggaagcaacaaataataaatagatatcatgataagaaaacataatcgacactaataatctgctagcaatgggaagacaaccataacggcatgaactaaattaatcagtgcgcacaactagttagaaacaaacatcctttgacaagaagcttctaattaaatcatgactgcgcctaagcagcgttattatgagagtgaaggaggatgtgctgctacttcccacttccctggatgagcaacaagcacctgcattgagtaatgcaagagtgagatgaaacatctcanctagcgaattgttttacaagatatttaaccacaaatgaattaataacattttaaagaatacaatt

SEQ ID NO: 65307 - DNA, 391 bp, Zea mays
tttaataatagtcaatatcttttatagtaataacagcatgagaacactgtgcagagaaagtaaactgttcaaagtctacagtagctgctcaaagagcccacaatagaatataagtgtccaaagtactcatcctagatgctggcctagagaatgtattagcacaattggaggaagacacaaagaaggtgaaaaggttcgaggaatagcaagggaacaagttggaatgaaaaacaaacacagaggtgcacagatcaatggtgttcctgattatgcgcaccgacactctttttccctttcttctcttatttttcttctttgatttgggcagcttttttctgcaattgctttttatattctcttttttcacaagtgtcacagaaacaagatataa

SEQ ID NO: 65308 - DNA, 461 bp, Zea mays
ggctcttctatctagtaacttttttttaatataaatatgcattctgacgtcataagttcataacagtgggaatgcattatgtagaatcatatagtactaactagttattatatgcttagatgtaggcagagttgttatatcattaactgatacttcatgtagttgaaaactttttgttctgagtattatctatttttttataattatgttgagtacaattgaatggtaacttttgagatattgaaatgctgaatagttaggtttataaaattaatgttatctgctagaatatgccttttctgtggtgtgggcagtgggcttggccattcctgtgtgtctaaggcccagcctaaggtgctgcgccacctgttctcatccctgtgtacgcctgcctatatatgtgtactattcccgcaatcaataatacacacaatcatatggcagtatatctcctatcatta

SEQ ID NO: 65309 - DNA, 212 bp, Zea mays
ctagagcacacccatgttagtcttagcaacaaaggctgtggggtgctcctcccaaatatcattgaccttgctggatctaccgctaaccctttctctgatgccactggctcatcactttgtatttcctccagcccgaacgcgcacgtgctgagactattgtaccccattttgtccctcaggcgcgccaataccatcctgagatgctgagcatg

SEQ ID NO: 65310 - DNA, 159 bp, Zea mays
gggagagatatatttgttttagacgacgattttccagggagtttgtttaatgatgtctggacgaccacatatcttgtaatcactgccttgcatatgcatatgccatgccgggcgtacacacgaggcgcactataattctgtcgctcacagcgtccaacc

SEQ ID NO: 65311 - DNA, 393 bp, Zea mays
  unsure (1)..(393): unsure at all n locations
agctntgaggatcaagcatcttaccttgaccattgtcatttgccctcaagacaacaaaaacatacttgagaagcggtatgagagtgagggtgtaaataatcaaggaaagagctccaataacatcctcatcctcgccctcacctattccgcgaggaaatatattatagaacacatacaaaggtgacgtgcccaagtcaccaaagaccaccccaaggctctgaaatgccagccgtagtaacaaagctgatgagaacttctgcaagaaaagaaaccagagtcaacagaaattcttgatttagcaatctatttacttaaatcaaaaactagtattcttcttccaaaccagagaaatttctggtagtgatttcattggaagtagaatggatcatagac

SEQ ID NO: 65312 - DNA, 482 bp, Zea mays
  unsure (1)..(482): unsure at all n locations
ggaccttgaaactcagcttggcaggttaatttgaaatggttgtgaggatgtttttataaaaatatgacatcggacgagttttttataaaaatatgacatcggacgaccgttgaaactggtgctttaagtatagtatagatatattatgtctattgtaatctctgctgctaagtgatttactatgacattaccataaatgtttctatgaatatttctacgagttacagtaacacatttgtggtaataaatagaggcatctatagaataataacgactataggagtgtttggtttctagggactaatgtttagtccctatattntatttcattttagtatctaaattactaaatatagaaactaaaactctattttaattttcatatctagcaatttagggattaaaatagttaaaatgaagagactaaatattagttcttagaaaccaaacagtcanacaccccctatatgtcagtctaatag

SEQ ID NO: 65313 - DNA, 394 bp, Zea mays
catgcaagctgccttgagttctggagcctgtttttgtggtattgatagggagaaatcgttttcattaagttatcagttagacaagccaacatgatggttatcatgaatacctgaatgcataagccaagcaggggagatatctctttcttcagattatccctgatcattccatatatcttctccacgtacgctgtgagctgctgtttgaacagcaaagccgggtacttggcctcgacctgtctcagagtttcgaccccagtaaccatgcttccatttatgagagaaagatttacaccctgtggcgctcctcggaagctctggaataaaaaaaaaaggcatattaaatatgaagattacagaagaagaagaaaagaagacgagttcttacaataag

SEQ ID NO: 65314 - DNA, 458 bp, Zea mays
  unsure (1)..(458): unsure at all n locations
tatcagaatccttctccaccggcacgatattaaagactccactctgcgtatctacaaggtctaataaaattagcttctaagagtcggtgaatttcgtccttaatcttgaggagcaaatctggacgaaatgatcttggtctctgcttgaagggcctgaaaccagacataataggcaaccgttgctccactatctctcgatttaaccctcgcatctcggtgtaactccaaataaagcaatcagaatattcttttaataaaccgatcattttatctctaggatcgacttccagggtcctgttcacaaaagtcggccttagaattttaccatctcctatgtcaatctcctccaaaggatcgcccgatgtaattccctatcctaacttgtcgagatccctanattcctctattgtgctcacctcagaggagttagatgatctctgcatggctgtggactgtat

SEQ ID NO: 65315 - DNA, 382 bp, Zea mays
  unsure (1)..(382): unsure at all n locations
agcttgggaagattcttcattccatctatttgctagtcggcggngccaaagccaacccaagttagtcttagcaactaagcaagtgtcgagttcagctctttcaaaatctaccaagtatagctgaccctctaacactcccttaaaagctattgaatcgtcacttcttctaaagacagtaacaccaatatcagtaaaaagacagttgtagcccattttacataattgggatacggaaagcaaattgtaatctaaagaatctacaagaaaaacattggaaatagtatggtcaggtgatatagcaattttacccaaacctttgaccaaaccttgatttccatccccgaatgtgatagctccgtggggatcttggttttctcatatg

SEQ ID NO: 65316 - DNA, 462 bp, Zea mays
  unsure (1)..(462): unsure at all n locations
tntcattcagtacttccaccttcttctctgcatcgtttgtcctatactctagagctgctttctggctgctttgtgcttcaatatcctttttgatcttgtcaacctaagcaggagaaaaataaaatgagaaatcacaaacatagctagcacattccaaacacattgctagcatggttacctgcttctcaagctcaacaaccttggcattggccttgttagcctgctcctcggcagctacagacccttttgcctgtacatggattagctgttgtgttttaaggctagctgttgtgttttaaattgcatacctggagggaagcaatctcgtccagcatagaggtaatagcctttgacttctcttcaatggctgtctccaggttcatgatggcatcatccttattcttcagttcttgagatcgctcttctatgtctgactctgtggcatgaaaacaaacataatga

SEQ ID NO: 65317 - DNA, 391 bp, Zea mays
agcttagaaaaatctggtatgaatctgcgataatatccaactagtccaagaaaactccggacttggtgaacagtggttgggggtttccactccagaatatctttgaccttgctaggatctactgcaattcctttagctgataacatgtgccccaaaaattgaatttcctccagccagaacgcgcacttgctgaacttggcatacagctgatgttccctcaggcgcgtcaatacaatccgtagatgctgagcatggtcctcttcatttttagaatatatcaagatatcgtcgatgaagaccaccacgaacttgtccaactcgggcatgaacaccgagttcatcaaataggtgaagtgggcaggagcatttgtgagccgaaagacattaccac

SEQ ID NO: 65318 - DNA, 497 bp, Zea mays
tattacggacactatgaaactcagcttgacaaggggccgaaggggtgaaaaggaaaatgattgtcagcatcctgagtaggcaagctgctcggctaataaaggaagatgagaaaaatttgaagaaagcaaagacagctcctgagccgaaagcgacaatcaataaaaagcaaaagcttgacataacgccctctgttgagccgaaggtggatgagacaggggaagaagctccttcaacgccctctactgccgaagtagcagaaattttaaaggtaattactgattccccacacttcaagctgctaagttctctgggatcagaacagacgcaatttttacagaggaaaggacaaccttcggctgcaaaggagaaggttgaagggcaaaagaaacgatgaatagttaacgtgatgcaagccgtcgagcaaacaccaccttctgcctcagtggctaaaatagtgactgctgcgagtgccgaagctgatgctgctgctgaagtc

SEQ ID NO: 65319 - DNA, 391 bp, Zea mays
agcttccacacgcttgccccagtgatttgttaaccatgtttgaatagctctctgataagtcgctccagcgtttttgaggccgaacgacatggaggtatagcagaaagcaccgaatggagtgatgaacgctgttttttcctcatcttctttcgccaggctaatctggtgatacccagagtagcaatccaagaaggacagcacagaacatccagcggtggaatctaccacctgatctatcctagggagcctaaagggatcctttggacagtgtttgttgagatccgtatagtcgacgcacatgcgccaatccactttattctttttgagtacaagaacaggattggctaatcacttgagatgtaacacctctctaataaatccagccgtgacc

SEQ ID NO: 65320 - DNA, 431 bp, Zea mays
gggctatattgggcaccaactatatataaagctagtttatcctatttagagtgttcttcctattggacatcttcagaatcgtcaacagagattagacgaaataggagatgtttttgacaccgtgagcttgcctatgatagatagaccagcaatcaaatttgctttcattggttaagcaagatcaccccattagagttggcaaacaacgtccaaaataagttagcaaagtacctaacaaattatacttaaaaatgagagaattacctttgcgcaaattttcgtgcattgccacgaaagttaaaaattagtgtaaaatatagataaaggatgacaaacatcactatgataaatatgtaacttagaaacggtaaaagttggtgctctattctgaacaaattttgaagaaacaaatttaaaaaaagttaaatata

SEQ ID NO: 65321 - DNA, 393 bp, Zea mays
  unsure (1)..(393): unsure at all n locations
agcttctaaagggagaacacgtgatatgttttactaacgtgcatttcgaaaaggatagaccttgtgcagcttgtcaagcaggtaaacaagtgggaggagcgcatcacggcaagaacgtgatgaccacttcaagacccctggagctgctgcatatggacctcttcggatgtcgcctatctgagcataggaggaagtaagtatggtttagttattgttgatgatttttcccgcttcacttgggtgttctttttgcaggataagtctgaaacccaagggaccctcaagcgcttcctcaggagagctcaaaatgagtttgagctcaaggtgaagaagataatgagcgacaacgggtccgaattcaagaaccttcaagtggaggaatntcttgaggag

SEQ ID NO: 65322 - DNA, 462 bp, Zea mays
  unsure (1)..(462): unsure at all n locations
tatgaagattcttcattccaacatgggctagtcggcggtgccaaagccaacccatgttagtcttagcaattaagcatgtgtcgagttcagctctatcaaaatctactaagtatagctgaccctctaacacacccttaaatgctattgaatcatcacttcttctaaaggcagtgacacctacatcagtaaagagacagttgtagcccattttgcataattgagatacagaaagcaaattgtaatctaatgaatcaacaagaaaaacattggaaatagaatggtcaggagatatagcaattttacccaatcctttgaccaaaccttggtttccatccccgaatgtgattgctcgttggggatcttggtttttctcgtaggaggagaacattntcttctccctagtcatgtggtttgtgcacccgctatcaatgatccaacttgagcccncggatgcataaacct

SEQ ID NO: 65323 - DNA, 398 bp, Zea mays
agcttgacaacgaggaaatggcgctcatcatcttgagctttcgccaaatcctcaagcaaaggagagggagaaaactacaagtcccactccaagaatgtgtgctacgagtgtggtaagtccaatcatttcatagctaaatgtccaatttctagtgaaagtgatagggacgacgacaagaaggggaagaagaaggagaagaagagatactacaagaagaagggcggcgatgcccacatatgtcgggaatgggactccgatgtgagctccaacgactcctcctccgacaaggacgccgccaacatcgctgtcaataaaggcctcctcttccccaacgtcggccataagtgtctcatggctaaggacgataaaagaaagaaggtacaatctacagccacccc

SEQ ID NO: 65324 - DNA, 471 bp, Zea mays
  unsure (1)..(471): unsure at all n locations
ttgagtcaatcatttgcaaagaataattgatgctcattatgataatctgggtatgaagcacatacgagagaagataagggctggagtagccaaatgtttcaaggaaaacgatcaaggtgtgatatggtttaaaaacagcatagtagtgccaaagaacgaagagctccgccagcaaattcttgatgaagcacatcttagtcgttattctattcatcccggaagcactaagatgtaccaagacttaaagcaacattactggtggacaaagatgaagatcgaaattgcacgctatgtggctaagtgtgacacttgcagacgtgtcaaggccatacacatgaaaactgctggtccattacaatctttgccaatcccaacatggaaatgggaagatatcagtatggactttattgtgggactgcccaggacgggcaaagggtatgaatctatttgngttaatcgtgatcgactcac

SEQ ID NO: 65325 - DNA, 397 bp, Zea mays
agcttcttcaccatgtgatcacgggtatcttgagaaggttgagcaatgcacttcccttttagttgtgccaagctcatttttagcctctcattttcttctttgagcttttgatatgtatcatcgtttgttcctgcaaattctagctcaaaagaagatttgcttgtcgacggacaataagcattagcacatggtaatgtagtttcaatttgaatacatgtgtatgagtgaggttgttgggattttaagttttctatcacaacctcatgagcaatatttaatatgatataatcatccataagattttcatgagaacataggagcatatcatatttttcttgaaaagctagattttcatcttttagcttttctacttggtccttaagcaaggcattcctat

SEQ ID NO: 65326 - DNA, 473 bp, Zea mays
tcggccttcggaggccgaaggttgaaataaatgaagccgcctaatagtgccaaagagccttcggcgttgtctgctcttttataggaacaagggacttagtacaagagcatatcgccttcagggtgtggccgcttgcggagaaatgggaaatgccacaagaaaccattaaagaggccgacgaaggtggacttatcagatttaagtacacttttaaatttggagataaatttattgagccagatgatgagtggttgaaaagcattgacaatttaagtgatgagctactcgggacctactcgaaggctgaagataatgcaatgtcagcagccttcggaggccgaaaaaagaagagactgaatcgggtatttgatgccatcgggtttgtctaccctgactattgttatcccattcggaggcagaagagaaaaaacacaacctctgcaaaagaagaagctgcagctgctcctagcgag

SEQ ID NO: 65327 - DNA, 373 bp, Zea mays
agcttgtgaagattcttcatcccaacatgggctagtcggcgatgccagaaccaacacatattagtcttagcaattaagcaagtatcgagttcagctctattaaaatcaactaagtatagctgaccctctaatactcccttaaatgctactgaatcatcacttcttctaaagacaataccacctatatccataaaaagacagttgtaacccattttgcataattgagaaacttaaagcaagttgtaatctaaagaatctacaagaaaaacattggaaatggaatggtcaggagatatagcaattttaccaagtcctttgaccaaaccttgatttccatccccgaatatgatagctctttggggatcatcatttt

SEQ ID NO: 65328 - DNA, 480 bp, Zea mays
  unsure (1)..(480): unsure at all n locations
ntagctccatctatattgtggatggctnttgagtctgtccaatttccctcagccttcctggtagcttcctgacttccatgaattgcaataggcccttgttccgaaggtatcttcatgcataggtatgctggatgaagaattacttcgaaagcattaagtgccccacgaccaatgattgcattgtaggggtattccatgtcaacaatatcgaaaacaacctgttcagttcttgtgttgtggacaaatccaaaggtcactggcattgtgatcttgccaagtgctacaatctaccttcctccaaagccacaaagagggtgtgtagcatcatgaatcttgtcctctggctcttgcatctgtctgaaggcttatcaaatatgatatccgctgcactgcctatatcaaccagaacattgtggaccagaaatcccttgatgacacaagatataaccatagcatcattgtgagggtaatccttaagct

SEQ ID NO: 65329 - DNA, 392 bp, Zea mays
  unsure (1)..(392): unsure at all n locations
agctntaactctcgcgagaccttttcttatttctttctaaccatgtgtcggggaccataattaggggtaccctcaagacgcctaattctcagctggtaacccccatcagcataaagctgcagaggcctgatgggtgcgattaagtcagggatcagtccatacgagcgacttgatcacgcctcgcccgagcctatcctcggacaagggcagccgacctcgagggatttccgtctcgcccgaggccccccttttaacggcggacacatctccggctcgctcgaggccttgccttcgctaagaagcaaccctgactaaatcgccgcaccgaccgaccgagtcgcaggagcatttaacgcgaaggtggcctgacacccttatcctgacgcgcgccc

SEQ ID NO: 65330 - DNA, 479 bp, Zea mays
  unsure (1)..(479): unsure at all n locations
ctttattgtctctcttgtcaaaagtaggcttcttgtgttgagaagtattgattatgggaaatagggggagtttttgaaatctttgatcaatctcttttggaatgactctctttatacttcaacatgtgtgtttgacttanagatagagatttgagtttgatttgcaaaaacaaaccaagtggtggcaaaggatgatccatatatgccaaaattgaataaaaccaatttgagtttttatttgaagtgatnttgcacttgttccacttgctttatgttgtgttggcataaatcaccaaaaagggggagattgaaagggaaatgtgcccttgggccatttctaagtattttggtgattgagtgcaaacacaagggcctaaatgtgaaaatatgctcatggatgaacaaagtgtaaatcacaagtaaaggtatgtttctaagccttagtacattagttntgtgtactaacatcttgtctaagt

SEQ ID NO: 65331 - DNA, 394 bp, Zea mays
  unsure (1)..(394): unsure at all n locations
agctntagaagaaggattggttggtcatatatgaaaatgttcaaaaaagttgtgtagttggaaaggtaactcttatcgctagactagccatgtatatgctcagatgtaactagactagccatgtatatgctcaccttttttgaagttcccagaggtgtgttaaaaaggctagactattgttgtttcatattcttttggcaatgccatgaacataaaaagaaatatgtacttgcaaaatggaacattctttgtaggccaaaagaatttggaggtttgggaatccaaaatttgggtattaaaaataaatgccttttgagcaaatggttgtctaaacttaatgacaaaaatggcgtttgataaagcattattaaaaggaagtactttatacaataaa

SEQ ID NO: 65332 - DNA, 481 bp, Zea mays
tcatcttcgtaatcgtgaccacaacattccatttcctaacgaaggtgtcatttagcatttaccctgttacacttaaaacatactcaagggtaactgataagctagtgtcctgagtaccttcggctaatgtgggtccccaatagtagccctcgcggtattagttagtttttataacgagctcaaactgcaaatgaacgaaggccttatgccgaagatccggaaacacctttccatgagctcgttggtaaaaacgaattgttgaaaacacaccttcatgaaaacctgccatgaagtgcccacccatggtggtggggtagaatttgaatttttaattccctctcgttttgtgtataaaacaaaccgagtcctaagcaattagacacaacatccacttgttttttccaacctactgatgccattcgctaatactccaaagcttacttcgataattcttttgtcattgtaagcttcagagattttg

SEQ ID NO: 65333 - DNA, 386 bp, Zea mays
agctttagtgtcaagtgagagtgatttttcttgttcttttgagctcttgcgcttggattgctttcttctttctcattctttcttgggatcaatactcacttgtaaccaaggcaagagacaccagttgtgtggtggtccttgcggggaagttttgttcttttgttcccggttgatttgagaagagaaagctcactcggtccgagggaccgtttgagagagggaaagggttgaaagagacccggtctttgtgaccacctcaacggggagtaggtttgctaaaaccgaacctcggtaaaacaaatccacgtgtcatactctttattcgcttgcgatttgttttgcaccctctctcgcggacttgattatatttctaacgctaacccggc

SEQ ID NO: 65334 - DNA, 443 bp, Zea mays
  unsure (1)..(443): unsure at all n locations
tactcctccctgggaagggccattcatcatcgtcattattntgaagcccggaacatacaagctggccaacgatcgaggcgaggtctacaacaacacttggaacatccaacagctacgtcgcttctaccattaagatgtttcaagtcgttcatatacctcgtttttttctttacatacataaataaagtctaaccgtcaaggaaggatcagccttgcctcggcaaagcctgaccctccctcgggggctagaaggggggaaccccctctgcatcaaaattttcctcggaaaagttttctacccaaacgactttcgtgctttccgactatatcgataacagaatcctgcaagcgagtaagagcgcacgtaagcggcaaggccgaccgagctgagggactcctacgcctctgggatacggatacctcactcgtcaccttttcgcaaa

SEQ ID NO: 65335 - DNA, 391 bp, Zea mays
agcttacccatgatgaggcatgtggcctgttaaagggtcctcggtcagcaggccaacatcgacatggtccttaagtgactcagacggagacactacaccgagacttccttctcgtgcaagtcacccacccggtctcgtctttatcatttaaaacccaaagtttggtacctatcagaggtacatattttccgatattgaacccatcatggccatgatggattcaccatcaagtcttttcttttgaaaacttcccatcccatatgaagcaccatctttgtttaacacaaatcattttgttttctaaggcaagactaagcattagaaaacttttgtataaaacaggtatcaaggaatggtaaatagttccaaggaaggaaatgcagaaattgtt

SEQ ID NO: 65336 - DNA, 447 bp, Zea mays
tctgagcagcaacaaagctctattcggccgccagctttaatgggcagaggcgccaggggcttcgtaggaagatttggggatcagccaaggaaaatttattgtctattctgtggtgaggacaagggtcataccaccaggatgtgctatgttaccatccagaagcaaaaggagatagcagaagctgcagcacaatagagtcagccgaagcaagtcatgcatactgcttcgtaccattcgccttacattccagaatatgtaggcaaccaccttgcagcttctgttgcttcaacaagccaaccccaagcatcttggcaacagcctccaccttcaccaccaacgcaatgcgaccagcagccagaagggaagtagcacactcacctccaacgggactttagagaagagtctgaagctcgcacaagtcatagcactatgcgagagtcgtagcat

SEQ ID NO: 65337 - DNA, 335 bp, Zea mays
  unsure (1)..(335): unsure at all n locations
agctngccttcgcctaagtcattttttctagtccaacagagntgtggaacgcgccgatggaaaaatcttcacagctgtcaaaaagatgctcctcgacgaaaaaagggcaggtggaccgatttattacccgaggcggtctgggcgctaaacacgactgaatgcagggcgaccgggttcactcctttccaccttctatatggatcgaaggccatgaccccacaggaaataaagcatgggtccccgcgaatagtaacgtcagccgtccccgacgtggacgagcccacttcgaaggatctcatcgatggagaccgagtcttcgccttacaggctctaaa

SEQ ID NO: 65338 - DNA, 467 bp, Zea mays
  unsure (1)..(467): unsure at all n locations
tgagaaaaaaacctggtgcttccatcatgtggtgagctattattacctttaatttagccaagcaaaggtaagttaaactcatgattcctgtttcaggtgcaatacactaatatcaaagacagatgcacaatttttccattgtcatcgagtggagttgacttgagacattgatattaacctgtaaaaccctacatagcatgctttcgtttccgtacataacattcaggatataagagaatcttgtnttatggccgacactggaagcttttcttgattccagttcagcttagtattttttttattttccatcgtagaacctcactaagaggtgacaattatgtaatgcattgcagcattacacgaaatacatatgtaatgcattgcagcattacacgaaatacataacaagtgcactcaagatttcttgttattctttgcctgatatggtgtgacgggaatctgagtct

SEQ ID NO: 65339 - DNA, 381 bp, Zea mays
agcttgtgagcagtacaagtactgtatgtagaagggtgcttcggccgatcagccgaaacccatgcttttatgcgaagatatcgcacagcagaatgtgctgctgggatctcaattgtctgagcaacaagagaaaactttgataaagcttctcttcaacaataaagatgtttttgcatggtcagctaatgatctttgcagagtcaacagggatgttattgaacactcgctcaatgttgatccatctttcagacccacaaagcagaggcttcggaagatgtctgatgactaggccgaaggtgctcggaatgaagtgaaaagactcctcaccgctggagttatcagagaagtaaaatacccagaatggctggctaacactgctat

SEQ ID NO: 65340 - DNA, 388 bp, Zea mays
agctagcggacttgtcgccggtcctgatctccctcatggcggatgctcccaacatcactttgagcggttaggctctaatgaagcaccaaatctgataccaactgaaagtcgcctagagggggtgaatagggcgaatctgaaatttacaaacttaagcacacactacaagtcgggttagcgttagaattaaatgcgagtccaaaagagagggcgaaaaacaaatcacaagcaaataaggtggatgacacggtgatttgttttaccgaggttcggttcttgcaaacctactccccgttgaggtggtcacaaagaccgggtgtaggatctaggacaccggctagagggggggtgaatagacggttttgactaaaaacaacaatactaagta

SEQ ID NO: 65341 - DNA, 319 bp, Zea mays
tgcctcatccagtgcatgctagtctaaacacttaagcgggcatctagaccgtgtgcgtgacatggggaatcctctaggtacagactgacgctgataccaccctctagagctctagaacgcatgctatctgatagcgagcgacacatctctatttgtacaaaccagttataccacatataacatattggactcacagagattccactacgtccgagactattcactggtgactgagtagagacaaaaagctcatttgatattgccatactagcttatctttttgccttgtgttgggtgagcttatacaatataaaagaat

SEQ ID NO: 65342 - DNA, 409 bp, Zea mays
  unsure (1)..(409): unsure at all n locations
tcttaagcacgcggctgcagcttccaaaggtgaacgaaaatagatatttggttgatggaattagggttcaaatgagtcaagttgatgtgataaaaatcaaggatgccacggaaaaaaggagatatgggaaggccgaggccgcgaagaaggaaaggagtgtaaactactgactcgtgggtatcttcggttgggacagtagtcccgtggcaaacccgccaagaacagagttcccgcggaggaagaaccccgatggagacaaggcggagaagctcagcttcagaaattacagacatgtggttacctgcgaagggtaactggctgttggggtcgattgcggngatcactgcagcagacgagttcgcagtttttctcttgggcgccatcttgcttctcactggcgaaacagagt

SEQ ID NO: 65343 - DNA, 467 bp, Zea mays
  unsure (1)..(467): unsure at all n locations
tctaaagggagaacacgngatagggttaactaatgttaccttcgtattagatagaccttgtgcagcttgtcaagcaggtaaacaagtgggaggagcgcatcacagcaagaatgtgatgaccacatcaagacccctggagctgctacatatggacctcttcggacccgtcgcctatctaagcataggaggaagtaagtatggggtagttattgttgatgacttttcccgcttcacttgggtgttctttttgcaggataagtctgaaacccaatggaccctcaagcgcttcctcatgagagctcacaatgagtttgagctcaacgtgaaaaagatgaggagcgacaacgggtccgagttcaataaccttcaagtggaggagtaccttgaggaggaagggatcatacacgagttctccgctccctacacaccacatcataatggtgtggtagagagggaagacatgacac

SEQ ID NO: 65344 - DNA, 481 bp, Zea mays
  unsure (1)..(481): unsure at all n locations
tggtgtggcatgctcgatcctgcataactggattntatgctttggcattgatgaagtagtgcctgatgaggagggtttcactggcacacaacaagatccactagatgacaatggtagccagagccaagaatccagtgccatggctgcaaagagggatgccatttgcaatgttatgtgggaagggaggggaagctctangatatgatggtttgtttaccctgctatggaactcatgtttgtttgatgataatgtaataatatgatggacatggctgagaccaatttttttattcccatttgactcttcttgttgtgctgatattattatactaatttgtacatgcaaaccagtggtaagatgccttcagtcccagctggtgatcagggtgggtttgtccaagctactgatgtgatgactgagatgataanggttggtgctagtgcagcagctaacgctgatgatgctactgcatctagtgcc

SEQ ID NO: 65345 - DNA, 395 bp, Zea mays
gcttccacaacaatccaacacacagtggagtatggtattacgctctggcggcccaaaccactctaaatcctcgcgtgttcatgtgcttgatgatctctaggcaagacaggcaaaacgcttaagccccttcctcatcttaagatttagggcgggtgcactacgccacccggctggagaattccctcttcgacatttggcgcgccaggtagggggtttggcattaggtttttgcttgttttcctgcccgacactatggttcacatcgtcgagcaccatgacttcgttctcgaggatttcccgatggaggaagaagctgcctcctccacgccacgggtgtccagccgccctgcgcttggtgctgctgctgtgtgtgctctgcacggcagcacactcct

SEQ ID NO: 65346 - DNA, 460 bp, Zea mays
  unsure (1)..(460): unsure at all n locations
tctcatagcacaccacacacatttttacttaattaccttttgtatatttgtattggaactctattattaattcaggagattggagaaaaactatcagaaattggtgccagattggaatacccatcgttgaacaaagaacgtgtacaggatgtaagaaaactatggcaagatccagccattcaggtgaaattccatttactttgattttttttaaaaaatgtataaacttttaaacataaagtttgatcatttagaaattcatttgtaggaaacttattcacgtgggagtattctgcaagtcccagactgtgcacagtacttcatggaaaatttggacaaattatctgaagaagattatgtaccgacaaaggtacacaattatcctcaatctattttaggagagatntacatatgcgtttacaatgtcacatatttatgttgattgcatggtactgaatct

SEQ ID NO: 65347 - DNA, 394 bp, Zea mays
agctttgcccacaatgtcttccaaaatttccacaaacttcacatcacggtcagatacgatggtcttgggcactccatgtagtctcacgatttctctgaaaaacaaatcagcaacatgtgaagcatcgtcgctcttgttgcatggaataaaatgagacatttttgaaaatctatcaaccacaacaaaaatagaatctctctttttttgagtcttcggtagccctaaaataaaatccatgcttatgtcttcccaaggaattttaggagcgggtaaaggagtatataaactatgagggttcagttttgacttagctttgtgataggtgacacaacgttccacaaatctgatgacgtctctcctcatcttgggccaatagaaattatcactgagcatg

SEQ ID NO: 65348 - DNA, 453 bp, Zea mays
ctttgcctcggcagactaataccaggaaaggccaacccgttatgggagtggagagatggcgagaataccgtgtaccctccatggcaagaggctggacggtggtgtatctgtgctctcggttggcgtgaatttggtcttgtcttaagaaccccagtggcgagttgacatatacaagggttaagtgctacatatatcgtgtgattggagatccccagctgggtattaatcgatttggatcgtcgttacctctcggacatgaagacttggtcactaccctacacgtagcattccaatgaagagaaaggggttgataaaaggatacctagcataggccaagtgcttgaactagggtagaaagaactctagtgacaggtaatgacttaacttgctaataaaactgggattttaaggatccactattagtaagcatttttgcaaacagagtcttgactc

SEQ ID NO: 65349 - DNA, 396 bp, Zea mays
agcttcagctccatctatgttatggattgcttttgagtcagtccagtttccttcggcccttctggcagcttcctgacttccatgaatagcgatgggtccttgatccgaaggtatcttcatgcaaagataagcagggtgaagaattgcttcaaaagcattgagggtgccacgaccaataattgcattgtaagggtattccatgtcaacaatgtcaaacacaacttgctcagttctagtgttgctgatgaacccgaaggtcactgacatggtgatcttgcccagagctacaatttgtcttcctccgaagccacagagaggatgtgtagcatcatgaatcttatcttctggctcttgcatttgtctgaaggccttagcaaatatgatatcagctgcact

SEQ ID NO: 65350 - DNA, 453 bp, Zea mays
  unsure (1)..(453): unsure at all n locations
atttatcgctaactgtcccgataatgaaagtgtccatnataaggggaacaaaagagaaaagaagaagcaatacaagaaggcaaagggcgaggcgcatctatgaaaggagtgggactcggattgctcctcctccgactccgacaacgaaggactcgccgacactgccttcaacaaatcggctctcttccccaacgagcgtctcacatgtcttatggcaagggagaagaaggtgagtactcaagactccacttatgcttcttctagtgatagtgagtctagtgatgatgacatagattattcatgcttgttcaagggcttagatagatctaagatagataaaatcaatgaattgattgatgcattgaatgaaaaggatacgctgttagaanagcaggaggatttattgtatgatgaacatgatatatttgttgaggcacatatatcatatgcttt

SEQ ID NO: 65351 - DNA, 397 bp, Zea mays
agcttctaaagggagagcatattttagtgtcttacaaatattcattttgagaaagacagggtttgtagcgcatgtcaagcaggaaagcaagttgtagcctatcatccacacaagaacatcatgacgactgacaggccgctcgagctactccatatggatttattcggctcgatagcctacataagcatcggcgggagtaagtactgtctagttattgtggatgattattctcgcttcacttgggtgttctttttgcaggaaaaatcacaaacccaagagaccttaaagggattcttaagacaggctcaaaatgagttcggattaagaataaaaaagttaagaagcgacaatgggacgaagttcaagaattcacaaattgaaggttttcttgagtaaa

SEQ ID NO: 65352 - DNA, 462 bp, Zea mays
  unsure (1)..(462): unsure at all n locations
tgtgaaggttcttcatccncacatgtgctaagcggttatgccacagccagcccatgccagtcttagcaattaagcatgcatctagaccagcctcctcttttgcaaaatcaactaaatagagtttgtcgtctaatacacccttaaaagctaatgaaccatcacttcttctaaagacagacacatctacatttgtgaatagacaattatatcccatattacataattgactcacagacaacaagttatatccaagcgactcaactaagaacacattagaaatagagtgctcggatgaaatagcaatttttcctaaccctttcacattgccttggttcccatcaccgaatatgattgaatcttggggatccttgttcttgacgtaggaagagaacatcctctnttcccccatcatgtggtttgtgcatccgctgtcgataatccagctggagctcccggatgcat

SEQ ID NO: 65353 - DNA, 383 bp, Zea mays
agcttgtggcacactgtaatccttgacttatctgtccaatatttcaagatctgcctccttgcacgaattgacattcgataaatgaattacttccaacttgttctctttctctagacactgggatttctctgatttatcagcagcacgatagaactcaaaatggagtgtggatccaacctcagtggaaactggatcagatacactgggtagagaacatgctactaatccaagaccaccttcttttccaccccagccttgagataaggcaaataactttgaagcgagagatgcactgcgtattgagcttttcccaactgacttgtctacaaatgccattaatgtctgcaagcttgcttcaacaatatccgcatctgttgatgcta

SEQ ID NO: 65354 - DNA, 405 bp, Zea mays
  unsure (1)..(405): unsure at all n locations
ntaagcgctggcagattaagactcgcatgtggctcactaacctaaaattattttgggtagtgacgtcggctgttccccangctgcatcagatgattctgatgatgcagcgaaggccgccgcactagcggagaaggccaagtgggacgaagccaatgaggcatgcttgtgtcgtctgttgaacatcttgtcgaaccacttatttgacgtgtactctggttntacctccgctaagggtctatggactgaacttgagaacgagttctctgaagttgacaatggaaatgagtcattcacaacggaaaactacatcaactataaaatggctgggggaaggtctgttatggagcagttacaggagatntcaactccttgtagggacttggtccaatatagttgcatcctac

SEQ ID NO: 65355 - DNA, 391 bp, Zea mays
agcttcggcgaccaagagagcaaactcttctagttctacgagatcgaagactctgagcatctgtttggtgaaggcaagtgtcctctgacctattatgtcccactagtcggttgcccgtgcgttgcgacggcttacaacaatacccatgtaaactatctatcaacaaaatttcaagattttttattgattgtctccgctctccgtataatatttttttgatttggctaactgatgttattgtttactccatacaatatgtcttggtacaacacggccaatgaagtgagcgattagaagagagttcaaaacgactgactgaacgaacagagattgtaaaatgacataattccaccatacaaagaccaaataagagaaagtttgtgagctcaag

SEQ ID NO: 65356 - DNA, 443 bp, Zea mays
  unsure (1)..(443): unsure at all n locations
ntggaacataaccgaggtagccaacatggtctgcatgtgctggatgaactcgtagtaaggaaaccaatgccgcagacagtagtaaaggaagctctgggtctgtagcaattgcttcataatgcgtagcagcaacagaggagacatattgatctaggagcccttcaaggaatcttttatggtttctcagtggaaatttggggtccttaagaaaaagtctaacataaattccaccaacctgaaatttggacagcatactgacatcttaactaaagttacagaattatattatgcaagaaaaaagttctggaatagaagctacctgtggttcgtccttcattacatgttgcccagatgcttgttcaggtacatcccaatcaacaacacgtnctttcatctgctcttggtagaggtctgatgccattggtgctaactgtgcagaaaga

SEQ ID NO: 65357 - DNA, 390 bp, Zea mays
  unsure (1)..(390): unsure at all n locations
gcttacagactcggttatggatcttttccttaacaatggnttaactggggagaagtatggcctcttttctgtagctcatcattgtactattattgacaaatagcttttatacaatgattttgtgctgctgcacgttaagagagaagaaattgtcctgggttgatatttctgaggagataccagtatgcactcttatatttttcattttgagttataatgatgaatttagtctcaggttcttttcttatttgggttacagataaaagtttccaactcagcgcttgtcagtgccttcatgaaggagctggaacctgaatcacctgttactcaggtttagattttntggttgcagaaactcttatgtggcatttgttcttcctgttcttacat

SEQ ID NO: 65358 - DNA, 474 bp, Zea mays
tctaaagggagaacacattttaggactaacaaatgttcactttgagaaagacaggatttgtagcgcatgccaagcaaggaagcaagttggagttcatcatccacacaagaacatcatgacgaccgacaggccgcttgagctactccacatggatctattcggcccgatcgcttacataagcatcggtgggagtaagtattatctagttattctggatgattattctctcttcacttaggtattctttttgcaggagaaatctcaaacccaagagactctaaagagattcttaagacgatctcaaaacgagttcggattaagaatcacaaagattagaagcgataatggaacggagttcaagaattcacaaattgaaggatttcttgaggaggagggcatcaagcatgagttctcttcttcctacacacctcaacaaaatggtgtagtggagaggaagaatagaactctacttga

SEQ ID NO: 65359 - DNA, 393 bp, Zea mays
  unsure (1)..(393): unsure at all n locations
agcttgcttcccagctctttagtcctctattgaatagggggggatatcgagccagctcagctcggctcggctcgacccaactcgagctatctcgttaaggaaacgagctggctcggctcgacttgttagacaaccgagccagagaaccagctcggctcgtttgcgagctcgagatagctcgtttagctcgcgagccaccaaaaaaattagtatacatgtatatatacaacaatataaccaattgctagttaatttcatactaatttaacactagaaaagactaacaataatcataattntatatatcacatcatttaaaccctaaattaatatagttcatcacttattaattcatcaaatacaagtataggctttgttttacagataaatgct

SEQ ID NO: 65360 - DNA, 464 bp, Zea mays
  unsure (1)..(464): unsure at all n locations
cgctttagtgccttcacttcctaaatttagcatatatggttagaggccaaaactgtgctcattgggctagggccttgggtaacacctgcggtgttacagccctccccccttaaaggaatcgcgtcccaagattggtagggatcctttagcggggtgctaagaaggtgcgtgttggtgtattgtggttcctttttggtcaagattttctagtaaactgctattcgaatgtcattctctttgcaacttcagaatgaagtccttttttatttagtttcaccacttactctgctcttattaactatgtttctcttatatttagattcaaagggcacgtggggtgggtgttttgggttacgtaccaattcctttatgcagaaaatcagagaagcgagagcgcagaanatcctcagtttcccacgtagcttcttcttctgaatggttgctcgactgaatcttatacattc

SEQ ID NO: 65361 - DNA, 324 bp, Zea mays
  unsure (1)..(324): unsure at all n locations
agctttaacccctattggtgatcagctttacacatcacatgaactcccacctttggtgagttcatacactggnttccncacaacttgttgatctatgatcatgtgtgagctcacccttgctgtctcacaaccctcacaggagaaaaacatgtggttcaggaggagccacgcattgaggagctcgacttgatctaagtggcggtttctagatgacttgcaccaaggatgatccttagatcggtctatacttatattttattttgccagacttccgctatgttatagaggctctgattatgttgtgacattaatctgtatacactc

SEQ ID NO: 65362 - DNA, 424 bp, Zea mays
  unsure (1)..(424): unsure at all n locations
gacctataaaactcagctaatgctccaaaattgctaatttngtaagggttatgctcccatggntcaagataacgagggttatattttatatcctgctggttatcctgagcacaagattaggagaattcatgcaaagaagtctcattctgtctctcatcatgcatttatgtataagaatgaggcatctagctctaggcaatcaacccatgttaaattgcctaaaaagaaatctcctattgcatcaaatgagcctaatatttcatttaagacttttgatgcttcttatgtgctaactaacaaatcaggcaaagtagttgccaaataagttgggggcaaacacaagggctccaagacttgtgtttgggtacccaaggtgcttgtttctaatgtgaaaggacccaagaccgtntatgtacctaagaac

SEQ ID NO: 65363 - DNA, 285 bp, Zea mays
  unsure (1)..(285): unsure at all n locations
agcttataacaagagaatagaggcaagtgctcgaccatatgnnataanagaaggggagctgtacaagcatggagtttgttctccactacttaaatgtttatctagagccgaaggtatataattgatgaaggaaatacacgcaggcctgtgtggatctcacattggatctaggcctttgctgggaaaagtttttcgtcaaggattttattggccaaaagcaacttcggatgcagcggaattagtccacaagtgcgaaggatgtcagacatgtgcaagaaccaaaaa

SEQ ID NO: 65364 - DNA, 443 bp, Zea mays
  unsure (1)..(443): unsure at all n locations
ntatcaaanggacgcgaagagagcgctttcttttgttcctttcaacgaggaggtctatgttgagcaaccttccggctctgaagatagtgagtaccctaaccatgtctataaactctctaaggcgctttatgggctcaagcaagccccaagagcatggtatgaatgcctaagagattttcttatcgctaatggcttcaaagtcagaaaagtccatcctactctattcactaaaactactgcaaatgatttgtttgtatgccaaatttatgttgatgatattatatttggatctactaacaaatctacttgtgaagagtttagtatgataatggtacaaaaattcgagatgtctatgatgggggagtctgaatattttctaagctttcaagtcaagcaacttcatagaggcacctttcatagccaaacaaagtcattcaagaata

SEQ ID NO: 65365 - DNA, 397 bp, Zea mays
  unsure (1)..(397): unsure at all n locations
agcttctgtgccaaaaatcatagaaagctaaatgatggttatttagttgtgattttctaaagtttaatgccaaaaaggcactttctactgccttgttatttgaaaaatgtcaaacagcagatttcatatttttcctatgttcttcataacaaaacattaattatcccatgggttggggtgttgtcaccttggggttatttttgtagggtttttctaagttttccttgttttcttaaaataaaaggtattcttatttattttatactaaaccagggtataataattttttctagtgaactacactgaataagtagactaacaaaaataggggtgctccctggttctttatttaaattacctttcctattttctttagctntaagcacaatgtgaaata

SEQ ID NO: 65366 - DNA, 409 bp, Zea mays
  unsure (1)..(409): unsure at all n locations
taatcgcataggactcataaccatggtcatcagttnttccctcttcttctcgtcaacttttacgtataaccactcatttgtccacctggtcggccacttggtgcattagccgattactagggctctggtgtcctttcggtacatgaagttatagcatccaaagtttttgtgaaggccatccaccctggccttcgtttgatagtgcaactcgtgcactcggcagaaaccttcggcattggcactcatgccttggctttggagagcccatctgtaaacacttagcctaacaatggcatttagtgtcagctgatgaaggtatatctcaaacttattcaaaacttctcctattatatcatatagagggaaccgaagccctgctctgaagaagctnttaaaaacaacaacttca

SEQ ID NO: 65367 - DNA, 399 bp, Zea mays
agcttgtccatgtccaaacctcgattttgtttatgctcaagtacagtgtgctcctctcgaccagcgaattaacaagctaaaggcctaaaagcttggtaaagcatagccgcgtgcctgcacgcagcacgcgcgtggtaggtgagagatcgatcgatgatctctacgcgcaggcgcagatagctaccgagtccatccatccatccatatatataaaacctatcagctcccgttgccaatctcatcactactgtagcatgatccacaacggcagttcatgagatgcccatctcgctgccgtaggagactacacgcagtgctaagtagtagactgcacagcacacacgcacgtacgtagcacatacatactcctccgtaatggcgccaatctctgcagcggcg

SEQ ID NO: 65368 - DNA, 466 bp, Zea mays
  unsure (1)..(466): unsure at all n locations
ntagggtctttgacatatataatgaatatgctacttgagaaattcgtatgtgaaaatggtctcatgttctggaggtactttgttgtttttctgctactgagtacataagtattttgtggtcaattgtggaaaaatagattaatagaatagactaatagagatctaaggactatctgtcagacaattagttagtgttagtcacatgcttgagtttctgcgagaaaccataacagggcaacacaatcaaatcgatagtaccttctccccttgttcactcatgaggagaggggagacatggggagaaggtctgataagtatgactgtcatgatagacaaagtgtgtatgtagaaaagtcatgaaacttgtttaccatcttttattgccatcttcatgatntacaaataattcaacatgttaccttcgaggcacacaaggcgtctgaaggtagaaacacttaaacaacct

SEQ ID NO: 65369 - DNA, 398 bp, Zea mays
agcttatgaagattcttcatcccaacatgtggctattcggcggtgccagagccaacccatgttagtcttagcaatcaagcaagtgtcgagttcagctctatcaaaatccaccaagtatagctgaccctctaacactcccttgaatgctattgaatcatcacttcttctaaagacagtaacacctacatcagtaaatagacagttgtagcccatttggcataattgagatacggaaagcaaattgtaatctaaagaatcaacaagaaaaacattggaaatagaatggtcaggagatatagcaattttaccaagtcctttgaccaaaccttgatttccatccccgaatgtgattgctctttggggatcttggtttttttcatatgaggagaacatccttt

SEQ ID NO: 65370 - DNA, 467 bp, Zea mays
  unsure (1)..(467): unsure at all n locations
ngcataggtttctatcctcctaaagcgtcaaaatgacttatcaactgtaacaccccaagtgttacttagggtgtccacccagggctaccccttttaacctattatcacatgaggattgatttgggcaaagtacatcaaacttggaattcaaggtcctaagcaagtgcaaccatcttggatatcatgccctagcttgtcatgcacatctaagtggggaatttcctaaaaccctaaagcaaacccctcttgggcaataagaaccctaattgaagctaggatcaaaaggtcatgtaaaccttatgatcatggcttgggccaaatacaaaagttgtaatatgcttcataacctacaaataatagtaaggaagtacccccaaaaagttttcagataagccccataaagttcacctaaggttgagcacaanggagaattcagaaattgcctaagtctaaaaactaacccttga

SEQ ID NO: 65371 - DNA, 392 bp, Zea mays
agcttgcatttgggtccctaaggaaattgtgactaaccttgtaggacccaacaagagttgggtacctaagacccatgcctaaatttgccttgcaagtttatgcatccgggggctcaagctggattatcgacagcggatgcacaaaccatatgacgggggagaagaagatgttcacctcctacgtcaagaataaggattcccaagattcaatcatattcggtgatgggaaccaaggcaaggtgaaaggtttaggcaagattgcaatatccaatgagcactctatctctaatgtgtttttagttgagtctcttggatataatttactatctgtcagtcaattatgtaatatgggatataattgtctatttacaaatgtagatgtgtctgtcttt

SEQ ID NO: 65372 - DNA, 478 bp, Zea mays
  unsure (1)..(478): unsure at all n locations
cggacctataaaactaagcttggaaggttcttcatccncacatgtgctaagcggcgatgccacagccagcccatgctagtcttagctattaagcatgcatctagaccggcctcttcttttgcaaaatcaactaaataaagtttgtcgtctaatacacctttaaaagctagtgaaccatcacttcttctaaagacagacacatctatatttgtaaatagacaattataccccatgttgcataattgactaacagatagcaaattataaccaagagactctactaaaaacacattagagatagagtgctcattagaaattgcaattttacctaacccttttaccttgccttgattcccatcaccgaatacaattgaatcttgggaatccttattcttgacgtaggaggtgaacatcttcttctcccccgtcatatggtttgtgcatccgctgtcaataatccagcttgaacccccggatg

SEQ ID NO: 65373 - DNA, 385 bp, Zea mays
agcttgtgaaggttcttcatccccacatgtgctaagcggcgatgccacagccagcccatgcaagtcttagccattaagcatgcatctagaccggcctcttcttttgcaaaatcaactaagtaaagcttgccgtctagtacacccttaaaagctagtgaaccatcacatcttctaaagacagacacatctacatttgtaaataagcagttatatcccatattacataactgactaacagatagcaagttatatccaagagactctactaaaaacacattggagatagagtgctcattggagattgcaattttacctagcccttttaccttgccttgattcccatcaccgaatattattgaatcttgggaatccttattcttgacgt

SEQ ID NO: 65374 - DNA, 443 bp, Zea mays
  unsure (1)..(443): unsure at all n locations
taatcccgagaagtgtgtcttcggggtaccccgaggtatgctcttggggttcatcgtctctgagcggngcatcgaagccaacccggagaagatcgcggccatcaccagcatggggcccatcaaggacttgaaaggcgtacagagagtcatgggatgccttgtggctctgagccgcttcatctcacgcctcggcgaaagaggcccgcctctgtaccacctcttaagaaaggccgagtgctccacttggacccccgaggccgaggaagccctcgggaacctgaaggcgctcctcacgaacgcgcccatcttggtgccccccgctgccggagaagccctcttgatctacgtcgtcgcgaccactcangtggttagcgtcgcgattgtgggtgagagacgagaagaggggcatgcattgcccgttcaaggccagtctacttcatcag

SEQ ID NO: 65375 - DNA, 436 bp, Zea mays
  unsure (1)..(436): unsure at all n locations
tgaatcggctacctngtcgagaagttggggcgcacttacattatatgacggtctgaccctcactcttgagatattacggaccggcctagcactctgtgtctcaatggatgatcgctggattgtgtggtttaacaaccagcatatgtatgcctaataatgagccagtcctcacccatatcattgatgatatctatattacacgttattctattcatgctgcaatcacaaatatgaattatgatctcatgcgccattattggtgggctgaatatatgcatgaatttgcacgctctgtggcgagacgtgtcacctgtctacttgtcaaagctctacacatgtatagtgtgtgtacattacaatctttgactatcccgactcgtgagagagcagaaattatcatggacgttatcgcggtgttacctactggagtggcacg

SEQ ID NO: 65376 - DNA, 395 bp, Zea mays
agcttatcccatcgactgcaaattccagtttctgcaattcaaaagtaaatacttctcagcatataatattatgtagtccaacatacagtatttataccattattacctttctggcattatcattttgttcactgacaccactaacattcattattgcgtgatcatgcaaattaacctgtaattgacaacacattttgttaagctcaatcataacccaataactcaaacgtataaatcatgtatatgtataactgcaaatcagtaaagttgttaaagatattacctcttctaatggacgtactggtatatgtatttgatcattggccacaccttgttcaagtataatagatacgtcttgaatttcctgaaaatttggatgaaagatcattatacat

SEQ ID NO: 65377 - DNA, 478 bp, Zea mays
  unsure (1)..(478): unsure at all n locations
tctaagggagaacacattntgggactaacaaatgttcattttgggaaagacaggatttgtagcgcatgtcaggcagggaagaaagttggggttcatcatccacacaagaacatcatgacaactgacaggccactcgagctcctacacatggacctattcggcccgatagcttacataagcatcggcgggagtaagtactgtctagttattgtggatgattattctcgcttcacttgggtgttctttttacaggaaaaatctcatacccaagaaaccttaaagggattcttgagacgggctcaaaacgagttcggcttaaggatcaagaaaataagaagcgaanacgggacggagttcaagaactcacaaatcgaaggcttccttgaggaggaaggcatcaagcatgagttctctccctacacgccacaacanaatggtgtagtggagagaaagaatcaaactctattggacatggcag

SEQ ID NO: 65378 - DNA, 390 bp, Zea mays
  unsure (1)..(390): unsure at all n locations
agcttcgttcttctatcaaggatttcttatgtgatcttggagaagggacaaggagtgtttggaatgtccaatccaagctctgggtcagcaacgcaacaccagaccagctggaagagaacgtgagcgaaggcggngaaacaacggcctttccaagcgcgcgcgtcgagcaggctgatgtgggccaagtaggcatagtgggccgactcgagtgaagagagagacatatatatacttctcttttgtaataaggttacaactttgatgagattaatgagaaactcccgagacgccggcggctctcgtctcccacctctgcctctaattcttactccttccccaatatagtttctctactcgtttcccctatctcagcgctaacactctgccact

SEQ ID NO: 65379 - DNA, 432 bp, Zea mays
  unsure (1)..(432): unsure at all n locations
tctattgagtttcggatcgtctgttaagcttctgctttgtgcactntagcttcgtcatcttgctcctcagcttcgtcatcctatatatattaaagcattataaggaaaattcaagtttaaaggaaaaaggtaagcacaaggtatgattttgttaccggcttaagatgacttcgagcttcgtcaccagctatgcttcgtccaccctttgtccatactagttttataaatctctttcctatgcttcaggcaagactgggaatatcaatcagatctgctggtgataaactaaagttgggtctattgacaacctttccatgtgtgcaaccagatttcaggaaggcgacacctgtgccccgagaagctaccagggcacagaaatcaccatgtccggctataatttcatcaagatcatcaatttcactctcgatatgt

SEQ ID NO: 65380 - DNA, 389 bp, Zea mays
  unsure (1)..(389): unsure at all n locations
agcttctgacatgccagcgatgggagattattggcgagggcacccagggtaaccgaaatcacccccatttcacctccaaaactgcctcaaatcgacaccgttcttggtcgcatgggcagcaaatccggccacagttgtcgaggccacatacccaagaacggtataatccaatgcagcagattattatacaacattccacacatcctatcacacccattgaatcagattagttgggggtcgaggccacatacccaagaacggtggccaggcgggagatccatggtcatgcaggggtcccttgtcatcggagtccgcggacgacagggttggggaggagcgcccaatgcggcgcttgacggtcggcgacnggaggcgcggtggctggaggt

SEQ ID NO: 65381 - DNA, 445 bp, Zea mays
tcggatcattgaccttcggcttcgtcatcttgtacatatacatagcgatataaggtaaatagaaattttaggagaaggtaagcaacaggtacaagtttaataccggcttaacatgacttcgagcttcgtcaccagctataagttccgcccacccttcgtccaaatttgagttatgaatctatttccaatgcttcgggtcaggctggggatgtcagttaaatccgctggtgataggctgaagtttggcctgtttacgatctttctgtgcgtgcaatgtaatacccaacttgcaatttgtggaagatagcctaagaggagaaatgatattcctttgtatatatgtgtgttggccatatttatcatctcatgagaacatcacaggagaacaaataaatatataatacaaagatataccattaaatcatgtgacatgctggaggttatg

SEQ ID NO: 65382 - DNA, 382 bp, Zea mays
  unsure (1)..(382): unsure at all n locations
agctngcacatagtcgtcgatgatgtatttctttagatagnccaagtcttctaaagctattactttttgtgaaaccgcattgaaaaagtaacacaagcgtgtgatgacaactttaacatgctctgtttcgagggctcttaccgcaattgggaggaacaccgtcatcatcacatggtagtcatgagagttgtagccaaatagagacaagtccttcatcctgactagtctgctgatattggatgagaaacctgtgggcactttgaccccacgcaaacatttgcaaatctttgttctctcctcaactgacaagttgtacctatctggggggaggtaatgcttccctttgccactatccactggatgaaagtccggtctgatttga

SEQ ID NO: 65383 - DNA, 453 bp, Zea mays
  unsure (1)..(453): unsure at all n locations
cttcctgcctcttgcgagcaatgaacacaaatgttattattttgacaaataccccacattgttcaaaaagaactcccagaaaaccttgttaactttaccttgagctcattgtacttgttcaacagcttccttttcgcgaagctcagctggctaagaaaatgaaagggggagtaaccatcacgttcaggaacagagagtaaccatttcatctaatatagacagacagtgcggaaaggaaggaggcattgggattgaggactcacatttcttcagatagtatggtcattntccggccttcgctcgctgcttccctctctttcttgatatgctcacgcaagatctctgattcaactttctttttgggaaatgtatggtagatatttatttatataaagaataaagaggacatagagcatgagcagtcgctcccccgacatatatcagaagtaaact

SEQ ID NO: 65384 - DNA, 385 bp, Zea mays
  unsure (1)..(385): unsure at all n locations
agcttattcgcccttctcttgcaaattcttacaatttgaacctgtgaaaaagatttactttcctcgtggcaaacgacaaaaccattacatgaagtttaaaaagtgttctttatttcatgaaaaatgaaacttgaatagagaagacttctatcagagtaggatacttgtcaatagatgtgctttgactctggcacagtgctattaactgtgcgagcttcggactgttctctgaaatcccgttgattttgagtatattggcccccttctggctgctggccttgttgtancggtggtggaggcggaggttgttgccaggaagcctgaggctgactcgccgaagcaacagaagctgcagggtgattgcctacatattctgggatgtaag

SEQ ID NO: 65385 - DNA, 419 bp, Zea mays
  unsure (1)..(419): unsure at all n locations
tgaagtacgcaaagtttaacacaattggtctcatgattattgggtcagtagtcaataagttacagatttttgaagcttgctgcagaattaaaacgtatttcgaattaaaaaggaaaagaaaagttgttttgcgctcggccccctagatttttccactgttttctctttcactaatgccctcgggctcctattcacctgngtcgctgactgtgcaaaagggccctcgggcttttaaggatctcaacccgcgctccctcttcccctcgccagaacagcgcctagagcgtgtcggggactgggtcgtggagcttcgggttggtcaggcgaactcgagggcggtagtgatcagacggcggcgagcgaagcaagccggtccacgggcgcatgcgggtgtaggtcgccgacgagctttaatccga

SEQ ID NO: 65386 - DNA, 387 bp, Zea mays
agcttaaagccatggtaagtagcatatttaagtaaaatgcgaattgactgaagcctagctacgggcgcataggtttcaccgcaatccaaaccttcgaattgtgaatatcccttggccactagtcgggctttgttccatgtcaccacaccatgctcatcttgtttgttgcggaagacccacttggttcctacaacattttggttaggacgtggaactaaatgccatacctcattcctcgtgaagttgttgagttcctcttgcatcgccaacacccaatctgattcccttactgcgtcttccaccctatatggctcaatagaagacacaaaagagtaatgttcacaaaaatgagcaacacgagatcgagtagttacccccttatgaata

SEQ ID NO: 65387 - DNA, 408 bp, Zea mays
  unsure (1)..(408): unsure at all n locations
tgcattngggtccctaaggaaattgtgactatccttgtttgacccaacaagagttgggtacctaagacccaagcctaaaattgccttgcaggtttatgcatccggcggctcaagctggattatcgacagtggatgcacaaaccatatgacgggggagaagaagatgttcacctcctacgtcaagaataaggattcccaagattcaatcatattcggtgatgggaaccaaggcaaggtgaaaggtttatgcaagattgcaatatccaatgagcactctatctctaatgtgtttttagttgagtctcttggatacaatttactatctgtcagtcaattatgtaatatgggatataactgtctatttacaaatgtagatgtgtctgtccttataagaagtgatggttcact

SEQ ID NO: 65388 - DNA, 389 bp, Zea mays
agcttgaagccatggtaagtagcataggccaataatattcgaattgactcaagcctagctacgggtgcataggtttcatcgaaatccaaaccttcgacttgggagtatcctttggccacaagtcgagctttgttccttgtcaccacaccatgctcatcttgcttgttgcggaagacccatttggttcctacaacattttgattaggacgtggaactaaatgccatacatcattcctagtgaagttgttgagctcctcttgcatagccaccacccaatccgaatcttgtagtgcttcctctaccctgtgtggctcaatagaggaaacaaaagagtaatgctcacaaaaatgtgcaacacgagatctagtagttacccccttatgaatgtc

SEQ ID NO: 65389 - DNA, 394 bp, Zea mays
  unsure (1)..(394): unsure at all n locations
tatgaagattcttcatcccaacatgagctagtcggcgatgccagagccaacccatgttagtcttagcaattaagcaagtgtcgagttcagctctatcaaaatctaccaagtatagctgaccctctaacactcccttaaatgctattgaatcatcacgtcttctaagacagngacacctatatcagttaaaagacagttgtatcccatttgacattattgggaaacagaaagcaaggtgttatctaatgaatcaacaagaaaaacattggaaatggaatggtcaggtgacatagcgattgtcccaaacctttgaccacccttgatttcatcctcgatgtgatagctcgttggggatcttgtcttctcattgaggagaaatcctttctctcggcat

SEQ ID NO: 65390 - DNA, 399 bp, Zea mays
agcttgtaaagggagaaactgtgatttgtatgctatgccacatggaaggccacaagtctttccaatgcaaggtgatgaccgaggataatcaaaggcaaaagctccagcaaaagccatcaagcaaaatctccagcacctacatcaaaaaggtgaacaaaaaggatgctacaccatatttgatcaagaagaaaaagaatggaaatgtgatagcaatcaaggccaacaagcaaggcaacaaaggaaagggggccaaacgcatctgggtgccaaaggaaataatttcaaccatgaaaagcaccaagaaggtttggatcccaaaagggaagtgagtggaccaaaggtctgcgggaaatttggagacttggcaaagttgggatgtatatcatgggatacatcata

SEQ ID NO: 65391 - DNA, 463 bp, Zea mays
tcggattcccgacgctagaagacgggctctcagtgttatcataagatgaattggccgacagcttagcgtacaacaacttataggtgagagaacaagatatttgtgtttaaaaacaagattttttcgtttgcttatacttaataccacgcttcttttgcagggccttattcttagcaatgccctcagggcgcaaaaaagcgccaaagacgagggatataccatggccttgaataaccttcgtttcgaagtaattgagctaaggaacgaaggtcttgaaaaagacaaaatattaaactcactgataaataagataaaagaagacgaggctacttcgaaagcccaatctgagacccagaagtgcgaaattgaagatcttcggaaacagttggcagaagaaaaattaaaatgtgcgggtgccgaagctgaccgagacgccagtgaatactggaaaaatcactgggag

SEQ ID NO: 65392 - DNA, 389 bp, Zea mays
  unsure (1)..(389): unsure at all n locations
agctttatctgacaatgacgttcaaacgtgtattatanctttcactattcactattactaccaatctagtggctccgatcccttctacaacccattaatcacgttttaagtcctgaatgctaacaagtactccctgtgttttaggtccttacttttttgtccatattgaaattgataacaatgaacctagacatatatataaaaaaaacacatacatcaaatattgtatgaatctattaacaccctaaaacgaatactattttaggacggagggagcacagtcgaaggcaataagtaaaattaccatgcgagtaattatccaaccagtggatatttgaaactagcaggaatatataaaagccaccttttataatgtagatgagtaattc

SEQ ID NO: 65393 - DNA, 446 bp, Zea mays
  unsure (1)..(446): unsure at all n locations
tgggacaaaacccatggtcagattctacaatgcccatgggatctgtaaaacaagatgcaaacggngtcaagtacggtagaggaactataacaacaacatcaacaaattaaataggtcatactccaggatccacaacaggtctcaccgcctggtaaatatgacaaggcgactgaattatctcttttcgcctgaaggtctttntcccccctttccacctgagcatgccgcaagaaaatcatcctgtacgaccctttctgctccttttctcccaaagggctatagaacaactacttcatattattcagcatttcttggctttgtctgtttcctctgcaagggtcttggacatatccttgctggatctgttgatttcatgtggctcttgaccaaatggccagcggcctgcgcagagataatggacagcttcccagctaggaccgcacccg

SEQ ID NO: 65394 - DNA, 388 bp, Zea mays
agcttctatgcatatatttcggattaatttttttatccaactctaacgatctatggttctagagttatcttggtcttgcagtcgggattgccataagactggtgtccacgctgaggtgagcggtacgggtgctgagtcccgacgggagcgggggaaccaccatccaagtgacgacgttccgcgcgctcagcccgcaactgggcgatctcagcacgagccctactcagctcgtctaatgcatggtccagctccgtgtttagcacggcggctaggttgactgtgctgctcaacctaagattgccctcaccgacaggtgagacaatcacgccttctgtgctgccaaatggacggggggggtaatactttaagcaagaccgtagctgcccac

SEQ ID NO: 65395 - DNA, 476 bp, Zea mays
  unsure (1)..(476): unsure at all n locations
tgacaacatcaaattcttatntaccaacattgagatcacgtctcatgttntgcagcagcatccacttcaccataccaatcagtaaactccctgcctcctccagcacatggcaaacccaaaatcagatgaaccgtatcttttgttatcttcagttccttgccagcccctgngcgtatggtcatgtcatgtggatccaatttatccatcaaccacctgttgagtgatctgctctctaaggcatcagttcgcaaatcaaatatgcttgaaaatcccaacctagcgacagcatcgcgctgccgatcgctcattatccaagatgatacaataacatcatagggaatgcagcggatattcagtttctggaagcataaatgaatatgcattaatacacaaagtatatatatagttagaactaatgatacaatatctacaaacaacggataattattacatgcttgtaataactatgctacaac

SEQ ID NO: 65396 - DNA, 303 bp, Zea mays
ttaccaattaagcatgtgctgagttcaactctatccaaatttaccgagtatagctgaacctctagcacaccctcaaatgctattgaatcatcacttcttctaaagacagtgacacctacatcagtaaagagaccagtgtagcccatattgcataattgagatacacaaagcaaatggtaatataatgaatctacaagaaaaacattggaaatagaatgggcaagtgatatagcaattttacccaatcctttgaccagaccttgatttccatccccgaatgtgaccgctcgttggggatcttgg

SEQ ID NO: 65397 - DNA, 460 bp, Zea mays
tgagacgggaacaaccgaggcatgcactagattccttaaagaaaatgtcaaggacttgaggattgccaagaggaggaagcaaaagaagaaaatcaatacctcttctaaaatcctcaaccatgcctccataaaaggtaacatccaaggtaataatcaagttacacttcatacaaatagaatcaagaagtgtagtgaatgctttgaagaggggcacttgattagatcatgtccctatattaaaaatggcttgattattaacaaggatgataaactttgttttaaatgttcaaagaagggacactttattaaatcttgtccccatttaaaacaaaagggcatatggttagaaaagaaagttttactaaccatgtagcaagcaacaaacaaggatagaagaaatcttcataacttggaaaacgcctatgctacacatgccgggataaaggacataatgcaagga

SEQ ID NO: 65398 - DNA, 395 bp, Zea mays
  unsure (1)..(395): unsure at all n locations
agcttanggggttatccgcaacgccattgtctcatacgaatagtagcccgaggacccgtcttgtagagcgcagggaaaaatacgccagggacccgagcgcaaagtggattttcttttccattatgatgttcaattctttttgaataaacaacagacttagaaaaaacataacttgagtattattcatccaaatgtggtcaaaccagttttactagactctgcatattataaccttccaagcaaaaatagtagaccccatatttcctatattactttttagagttttgaattagaggagaaaactacttaaatatagggaaagtggtaggaagacttttagactgaggttggaaaagtttatggagatactggaccagtagttacactgttgaaaa

SEQ ID NO: 65399 - DNA, 489 bp, Zea mays
  unsure (1)..(489): unsure at all n locations
gctattacggacctatgaaactcagcttgtcagagcccgcttgaactaattgatggagaaactcgaccccagtgccgcatgacaccagatggtccaacccaaacggcgctggctgaattcaggattattgcagagcacattagcactagggatttggtgcaggaatttctggctttcaaagtattcccatctatgaaggaatgggctatgccgaagcttataggagagaagaaagagggggagcttatccgactgccctatcattataaattcaagaaatatttcaaggcaccctgccaagaatggctcgaaacaatcgaaataatgagtactgaaattcttggaaattactctaaaaaagaggaccaattgatgacagcagccttcggcacccggccgaaacgaaggctaaatagagtacttgatgctataagctntgaatatcctcgatacnggcgactgggcggagatgttggaggcccgaagaga

SEQ ID NO: 65400 - DNA, 391 bp, Zea mays
  unsure (1)..(391): unsure at all n locations
agcttctnctagagagattcacttgaatttcgctaaaagaattctaagatatttgaagtatactcccaatattggtctatggtatcccaaaggtgctcaatttgaattaattggatattcggattcggactatgcggggtgcaaagttgatagaaaaagcacctccggttgttgtcaatttcttggtagatctcttgtttcatggtcttctaagaaacaaaattcggttgctctatctaccgccgaggcggaatatatatcggccggaaattgttgtgctcaactattatggatgaaacaaaccttattggactatggaattattttcaagaatgtgcccctcatgtgtgataatgagagtgcggtgaaattggctaccaatccggtccaa

SEQ ID NO: 65401 - DNA, 463 bp, Zea mays
  unsure (1)..(463): unsure at all n locations
tcttgtatatatttaaaagataagaataaacatggcttataggttaaatngtgaagccaaccacatgtatacagtcaaacaggaaagtcctgagggagcaagggactaaccttggataggtcaataggaacatcaaggtagtgatctaagaaattaacattctgctcagggtcaaggagttccaacaatgcactagctggatcgccagaatgacccttcccaagctgcaagccagttagccagacaagtaaaagttagcattaataaagcatgcacacaagttgtcacattgaacaaagtaaccgtggaaagtccattctgtgtcagaatcaaagtacatcacaggtcattatgcaagttaataatgtgggctattattatcaatttagcatctcaagcaaaataagatcatatggaccataaccgttgtttgagcaccttgtcaatctcatctatcaacact

SEQ ID NO: 65402 - DNA, 390 bp, Zea mays
ggtcagtgctcgtctgaggcgcgcttgccgaaccaatcattctgatccttctgttgatgagcagaagaagaaaagaagacgcctccggcgagtatccagttttgatcaggacgctggtacctcagatcctgctattgaagaagtgcctgcgactggatttactgacgctgaccccaatgggtgtacccaatccgctgttgatcccatagtgggtgccccatctgttgctgatcccaatgggtgtgctgcttgtgttgccaatgtggatgatgatgaagaggaaaatgagattcctttgactcggaaaaacagtcggcagttcatcgccaatggtgaaagtagtggagttccctcttctgctttgtctgccctcattggtctgcaagaact

SEQ ID NO: 65403 - DNA, 390 bp, Zea mays
agcttgaaccagtaaaacccctatcttatatccaccttcgagccccctatggctcaccattcggagtgagtccgcgctagcacccctgccaaacacaaatcttattgtccaccggtttccgaaacatgacacttatacttagtgaaagggaaatgagcaaataagtcattttcatattgttttggtgattaatgtccaacacaacattttggactaactggtttgctaagtctatgagcacaggttcactcacgtgcaaattgaagatctcaagtccaaatgagctcaaataaggccaggaagtgcaacattttgaaaaaaagggaaaatagtgaggtttgaacctttgaataagttacatacacctattagaatgtttctagcactttg

SEQ ID NO: 65404 - DNA, 426 bp, Zea mays
cggcatagctgacaatctcgtagcctctagagtacttctctttatgctcctcatgttcttgctcattctgggaatatataagaatgtcacaaatgaataccactacgaacttgtcgagataatccatgaacacgttgtttatcaagtacatgaagtaagctggtgcattcatcaaaccaaatgacatgaccatgaactcatataatccatacttggtgataaatgctgtcttcggtatatctgaaggtcggattctgagctgatggtatgtcacaccctgttttggaaggcaaaccgaatgcgaactatgtacgtgccaggatcaaaactcacgtacacagcgattacataaatgaacatcattgcacagtgctcgaataatagcatataggagtattaacttattacgtcatagaggcatagaca

SEQ ID NO: 65405 - DNA, 384 bp, Zea mays
agcttcgtactcagcaatattatttgttcaactgaaatcaagtcttgttgcataacaagttttaactttggaaggtgcaaccaacacagcagctgctcctgctttgaaggttccccaagatccatcgcaaaatattgtccaaactttagcatctttattcgtttcttcttcctgagcccctggcgtctagtcagcaatgaagtctgccaatgcttgagattgaatcgaagatctatgcacataatcaatatagaattcattgagctctgcagcccattttccaacccttctagtagcttctctatttctcataatatccttcaacggttgtgaagaaggaacaactatattgtatgcctgaaaatagtgctgaagcttcctgga

SEQ ID NO: 65406 - DNA, 443 bp, Zea mays
  unsure (1)..(443): unsure at all n locations
tctaaagggagaacacgtgataggattgactaacgtgcaatacgaaaaagatagaccttgtgcagcatgtcaagcaggtaaataggtgggaggagcacatcacaggaagaatgtgatgaccacatcaaagcccctggagctgctacatatggacctcttcggacccgtcgcctatctgagcattggaggaagtaagtatggtctagttattgttgatgatttttcccgcttcacctgtgtgttctttttgcaggataagtctgaaacccaagggaccctcaagtgcttcctcaggagagctcanaatgagtttgagctcaaggtgaagaagataaggagcaacaacggatccgaattcaagaatcttcaagtggaggagtttcttgaggaggaggggatcaagcacaagttcttcgctctctacacacctcagcaaaatggtg

SEQ ID NO: 65407 - DNA, 360 bp, Zea mays
agcttcaaaaggtgccatcttgatactttcttgataactattattggatgaaaactccgccaaaggtaaacattcatcccattttggtgagaaatccaagacacatgctcgcaacatatcatcgagtacttgaataatcctctcagtctgtccactggtttgtggatgatatgctgaactatggagcaacttagtacccaaggatttgtgaagggcttcccaaaacttggctacaaattggggtccacgatccgacacaatggtcttcggaacaccatgcagactaagaataccagcaatgtacaattgggcgtagacagtaactggggaatctgtcttgaccaataaaaatgagcgatc

SEQ ID NO: 65408 - DNA, 188 bp, Zea mays
acatacttacgcaggatcgcacatgttattaatggggtccattggaacgacgtcacaccgatgctgtccattaatggatatcttgaatatcctatttgaagcttgggcttatagaacaatcaaaattgttatctatctcacactaatatattggttagtcatttgatacgcccttaaagcatacttcc

SEQ ID NO: 65409 - DNA, 396 bp, Zea mays
agcttaggctcgacaaaagagttatgcataccgactacgacaacccttatgctttctggtagacgattatgtctacttaaaagtttcaccaatgaagggtgtatcgcgtttcggggttaaagggaagcttgcacccaagtacattggtccattcctggtgattgagcaatgtggaccagtggcgtaccgacttcaactacccgaaacattgtctgctgtgcataatgtgttccacgtgtcacaattaaagaaatgtcttcgggttcccgatcgaaccgttgaagtaactgatgttgtcctggaaccagatttaacatactcggaacatcctattcgagttctggatcaaaaggacaggatcacccgaagaaagactctcaagttctacaagatata

SEQ ID NO: 65410 - DNA, 487 bp, Zea mays
ggacacaagaaactaagcttggaaggttcttcatccctacatgtgctaaacggcgatgccacaaccagcccatgctagtcttagcaattaagcatgcatctagaccggcctccccttttgcaaaatcaactaaataaagtttgccgtctaatacacccttaaatgctagtgaaccatcacaccttctaaagacagacacatctacatttgtgaatagacagttatatcccatattgcataattgactaacagatagcaagttataaccaagagactcaactaaaaacacattagagatagagtgctcattagatattgcaattttacctaacccttttaccttgccttgattcccatcaccgaatattattgaatcttgggaatccttattcttgacgtaggaggtgaacatcttcttctcccccgtcatatgggttgtgcatccgctggcgataatccagcttgaacccccggatgcataaacctg

SEQ ID NO: 65411 - DNA, 400 bp, Zea mays
tgcaagcttatgaagattcttcatcccaacatggtctattcggcggggccagagccaacccatgttagtcttagcaattaagcaagtgtcgagttcagctctatcaaaatctaccaagtatagctgaccctctaacactcccttaaatgctactgaatcatcacttcttctaaagacagtgacacctatatcagtgaataaacagttgtagcccattttgcataattgggatacggaaagcaaattgtaatctaaagaatctacaagaaaaacattggaaatggaatggtcaggagatatagctattttacccaaacctttgaccagaccttgatttccatccctgaatgtgatagctcgttggggatcctggtttttctcataggaggagaacatcttc

SEQ ID NO: 65412 - DNA, 425 bp, Zea mays
  unsure (1)..(425): unsure at all n locations
tgactcctttcgccttgagacaccggaatgtcacttcaaggtcggagaggaggttgggagccttccgtgtcttgactacgatgtcatcgacgtaggcctcgactgtgcgaccgatgtgttcgccgaacacatggttcatgcaccgctggtacgtcgcgcctgcattcctcaggccgaacggcatggtgacgtaacagtacatgccgaacggcgtgatgaaagaagtcgcgagctggtcggactctttcatccggatctggtgataccccgagtaggcatcgaggaaggacagggtttcgcacccagcagtggaatccatgatttggtcgatgcgaggcagagggtanggaaccttctgacatgctttngtgagaccagtgtagtctacacacatncgccatttcccccctttcttcctcacaagc

SEQ ID NO: 65413 - DNA, 390 bp, Zea mays
  unsure (1)..(390): unsure at all n locations
agctntngaaaactaccacttcatcatcttttggcgttggagtggcttcttccccggcaaaacgaataagcttcttctcagcttctccgaagtatctcagtttcatcatcatgggcacgtcgtcttcagacacagtagatttctcaaaatccacgtggctgaattttgatgggatcaaaatgctataatcttcttcttcaccagcattttcttcttcttcaatatcagcctgctcagcttcggcaccagaagtaccttcgtcaacagttccctctgtcacaactaagcctgattgtctcatgacttcggaaatcggagctgtcttggtggcttcagactcctctccttcacgagtcaccctcgcagtcgagcgtactctgaccatctgat

SEQ ID NO: 65414 - DNA, 442 bp, Zea mays
  unsure (1)..(442): unsure at all n locations
tcagctgaagtgtgaaggaccctttctggtagtatcttcgtcaagacccggntcttacagattaaaggacatggacgacaacgacattcctagatcttggaatgcggatgagcttcgacggtattatgtataaatgtaatctttttcatttttcctatggcactgaagcgtccccaattctctgggactcaaatgtgatacaattactagtcccaggaggctagtaaacacatttatacatcaaatgattacagatctgcttaaacgagacaaacctataaaggtggcgatcaacttcaagagttggtccacaactcgggacatatcatcagagtggggctgaagcagcccgatatacgcagcgaagcaaatcagcggtccaacagccacaggcaaggttgngaacagtcgtaactcttacccgatctccttttgtgaaaac

SEQ ID NO: 65415 - DNA, 394 bp, Zea mays
  unsure (1)..(394): unsure at all n locations
agcttctggtagagtctttgaagccattgttccggagatcaagaacattccggtagtttgtgagtttccagatgtgtttccggaagatttgcttggactacccccagaaagagatgtggaatttgtaattgagctaaaacccggtacggctcccatttcccgaaggtcgtaccgtatgccccctaatgaattggcagaattgaagattcaattgcaagatctgctgaataaaggatttatccggccaagctcgtccccttggggttgtcccgccatctttgtgaagaagaaggatcaaaccttgcgcatgtgcgtggactatcggcccctgaatgaggtcactatcaagaataagtaccctcttccaaggattgacatnctatttgatcaactg

SEQ ID NO: 65416 - DNA, 427 bp, Zea mays
  unsure (1)..(427): unsure at all n locations
ntaccgcattgaagcatgagcgcttccccttggtcttggtcttgcttggctgccccttgcgaccatttagcgccgtcttgaacctcttgatgatgagagccatctcttcatcgttgagtccggccgcctcaatttgtgccaccttgctaggtagcgcctccttgcttcgtgttgccttgagagcgagaggttgcggctcgttgattggaccattcaaggcgtcgtccacatatctcgcctccttgatcatcattcgcccgctaacaaatttcccaagaacttcttcgggcgacatcttggtgtacctgngattttcacgtatattgttcaccaagtgaggatcaagaacggtaaatgaccttagcattatgcggacgacgtcgtggtccgtccatcgcgtgctcccgtagcttcttatcttggtgat

SEQ ID NO: 65417 - DNA, 393 bp, Zea mays
agcttaggctttagattcttggcaatttgaatataaatttgacacacttgcacatataggaagggtatgggttcaagtatctttgatatatattagtgacttggaagtgcagatgacaataatttcacccctctcgattcctttacggtgatgtggtaagttatttatggcttaattcttgatataatttatttctgaaattttgatattgttttattaatgcggtaaatatcgctgatcatttgtgagaatgaagttgttattatgcttgtgatatacaagtatgcctatgatgttttcactatgtttttcatggttgagttttattacaataatattgttatatatgcttgactgaggatgtttctaaaaggagtgtgaattgcgtgtttt

SEQ ID NO: 65418 - DNA, 469 bp, Zea mays
  unsure (1)..(469): unsure at all n locations
aaaactaagcctgctcaggccttcttctttttctccatagcaggaacttggttggaacactaccccacttaaaatgaatgagggtagatctcttgaatcttggggatttgaactccttgaagtacctcatcacaagggtgttacggggccttcttctgctgttgctgcttgagcaggctacggagagatgactgacacagggttgattttgggagaaccttcttctcatcttctcttcactatcttcttttctcttctcacttttcacttttcactgcctctttctttctctttgctcttcccactcgaggattctatcaaagagtattactatcatacactggaggaaaccaaagactatgaaccatgtgcaacagtcttcaacccaagaatcaccgatcattgtgatcttatgggcgagggagtggaaaatggagttgcttgctatttggcangggggtntatctgg

SEQ ID NO: 65419 - DNA, 354 bp, Zea mays
acctgccttctttgatgccacggcgcactcgtgtggccatcttcccgatgaggcaatacttacaggacctgttcagcatgggacggatgtacccaatagaaaggcgactaggcactttgaaaacttttgtaaggaacagggctacgccggaaggatcaattgctgaggcatatatggcaagtgataccttaacattttgttctaggtacatgaaggatgttgacactagatttaaccaggatgatgatagcggtacagagatgccattgcctaatgacatgtcgcgttttaaccatggtgctactcttggtggagctactaagactgagtacattgatgatgctatcatgaata

SEQ ID NO: 65420 - DNA, 463 bp, Zea mays
  unsure (1)..(463): unsure at all n locations
ntatcaaatggacgtgaaaagtgctttcctcaacggtccaatcaaggaagaggtttatgttgagcaacctcccggctttgaagacagtgagtaccctaaccatgtctataggctctctaaggcgctttatgggctcaagcaagccccaagagcatggtatgaatgcctaagagatttccttattgctaatggcttcaaagtcggcaaggccgatcctactttgttcactaaaactcttgacaatgatttgttcgtatgccaaatttatgttgatgatattatatttgggtctactaacgaatctacatgtgaagaatttagtaggatcatgacaaagaaattcgagatgtctatgatgggggagttgaagtatttcttaggatttcaagtgaagcaactccaagagggcaccttccttagccaaacaaagtatactcaagatattctaagcaagtttgggatg

SEQ ID NO: 65421 - DNA, 397 bp, Zea mays
  unsure (1)..(397): unsure at all n locations
tgcaagcttcaactccatctatattatggattgtcttggaatcagnccagcttccttcggcccttctggcagcttcctgactcccatgaatagcaataggcccttggtccgaaggtatcttcatgcagagataagctgggtgaagaattgcttcaaaagcatttagggtaccacgaccaatgatggcgttgtaggggtattccatgtcaacaatatcaaacacaatttgctcagtccttgtgttattaacaaatccgaaggttaccggcatggtaatcttcccgagtgccacaatctgccgccctccgaagccacaaagagggtgcgtagcatcatgaatcttgtcttcaggctcttgcatctgtctgaaggctttggcaaatataatgtcagctgc

SEQ ID NO: 65422 - DNA, 470 bp, Zea mays
tcttagggagaacacgtgataggtctaaccaatgttcatttcgaaaaagatagaccttgtgcagcttgtcaagcagggaaacaggtgggaggctctcatcacaccaaaaatgtgatgacaacatcaagacccctggagctgctacatatggacctcttcggacccgtcgcttatctgagcataggaggaagtaagtatggtctagttatcgttgatgacttttcccgcttcacttgggtgttctttttgcaggataagtctgaaacccaagggaccctcaagcgcttcctaaggagagctcaaaatgagtttgagctcaaggtgaagaagataaggagcgacaacgggtccgaattcaagaaccttcaagtggaggagtttcttgaggaggaggggatcaagcacgagttctccgctccctacacacctcatcaaaatggtgtggtagagaggaagaacacgacgctcat

SEQ ID NO: 65423 - DNA, 387 bp, Zea mays
agcttgaagacacagaagataatgtatgtttcctctgaccctcgccccaccttgccttgtgtgataccttgatggccattggtctaactgtaaatttggcgttgttgctggtttaagggccaaatgagtcagacagtaaacaagaagcgtgggctcttatggccactgtcggaaatggttatgagattcttcagtgccgatggtagcaagggttccacgctgtggcctgcgctgaggctattgatcccggtaatagcattggttgcagtttgtgtgggttactacatgcacaacagtgttgaagagatagactgcaccaactgttagttgagcaaggtatctgtgcttaccttctgtcctttttcaggagagtgtttatcgttgtat

SEQ ID NO: 65424 - DNA, 374 bp, Zea mays
tcgcatctctgaactagctcggctgcatcactcttctttgttggccaatagaatcccgacctgaaaaccttcccaactaatgttctggatgctgcatgtattccgcactgccctgcatggacttcctccagaagttgcttcccggtggacgggagaacgcacttcatgaggacgcctgacgcgcccctccgatataatacctccccaatgagtgtgtagtgagctgattgtctggcaatgcgctctgctgagttcttgtcatccgactcttcttcattctttatatacttaataatcggttgcctccagtcgtcagagtctggctcgggttggtctatgatgttgcactcttccctttgatccatcgagatgct

SEQ ID NO: 65425 - DNA, 390 bp, Zea mays
agcttataagtttctggatgagtagtggtcatcccagttttgttgatgaagcaccagaagaccaatcaaggaaggaatccatgtacgagttcttaagatgaaggtttgcgtgttaacatcattgctttttcaataagctagctgccaagcgaaacctaaaagcctgaagatgatctttgagtagccagaatcagtgtttgcaatcggcaaccggatgctcctcaaggctagatttcgttgaagctcaatctcttcgaagagtctgcaaagtgaagatatgtagctgaagtaaaagtatacccataaccctttctagccaaatctcgaggacgagattcattttaagtgggggagatttgtaccatccccaaaattcaaatctttgaattt

SEQ ID NO: 65426 - DNA, 456 bp, Zea mays
tatgaagattcttcatcccaacatgggctagtcggctgtgccttagccaacccatgttagtcttagcaattaagcaagtgtcgagttcagctctatcaaaatctaccaagtatagctgatcctctaacactcccttaaatgctattgaatcatcacttcttctaaagacagtgacaccaacatcagtgaatagacagttgtagcccatttgacataattgagaaacggaaagcaagttgtaatctaaggaatctacaagaaaaacattggaaatggaatggtcaggagatatagcaattttaccaagacctttgaccaaaccttgatttccatccccgaatgtgatagctcgttggggatcttggtttttctcatatgaggagaacatccttttctcccctgtcatgtggtttgtgcacccgctatcgagtattcaaacttgagccccggatgcat

SEQ ID NO: 65427 - DNA, 366 bp, Zea mays
agcttagcaaaagagatgctagaatctttttattgagctcatgcctaagtctggtaaaagattgttcatcaagtggcttggtaaagatatcggctaattgatctttagtattaatgtaagaaatctcgatatcccccttttgttggtgatccctaagaaaatgataccgaatggctatgtgcttagtgcggctatgctcgacgggattgtcggccatcttaattgcactctcattatcacatagcaaagggactttggttaatttgtaaccgtagtcccgcagggtttgcctcatccaaagcaattgcgcgcaacaatgtcctgcggcaatgtactcggcttcagcggtggaaagagcgaccgaat

SEQ ID NO: 65428 - DNA, 474 bp, Zea mays
ctacggagcacctatacaccccgctctaggtgctctcaattggtatcggagtcgctctcttcaagaaagggactaatcgcccgaagagatggatcctaagggaaaggggattgtgatcaatgataaggagaaggagtccttcttcaacgagcctaaagatgacaaggctaccgactctggctcaggtcacaaacgaagagatgggaggaagaagaataagacgaggcgcatcaaggagatcgtctactacgacgacagcgatgagtccacttcttcccaaaaggacaacgatgacaacgactacgacaaaagaaagacggttaattcaaacttttctttcgactactctcgtattccgcagagtacaaatactcatttgctctccattccacttggcaaaccttctcactttgatggagaggactacggattttggagtcacataatgcgtagacacttggtctctctccatcc

SEQ ID NO: 65429 - DNA, 392 bp, Zea mays
caagcttgacagagtacgcttgaactattcttcggagaaacccgaccctagtgcaatatgacaccagaaggtccaacccaaacggcgttggctgaattcagaattattgcagagcacattggcactagggatttggtgcaggaatttctggctttcaaagtatttccaactatgaaggaatgggctatgccgaatcttaaaggagagaagaaagagggggagcttgtccgactaccctatcattataaattcaagaaatattttaaggcaccctgccaagaatggctcgaaacaaccgaaataatgagcactgaaattcttgaaaattattctaaaaaagaagaccaattgatgacagcagccttcggcacccggccgaaacgaaggctaaa

SEQ ID NO: 65430 - DNA, 470 bp, Zea mays
  unsure (1)..(470): unsure at all n locations
taacagntcanaatcaagaactccgagtgcaacttgtaagatgcaagaacttcaacacttcatctgtagtgtcagagtctaaagctagctcctcaaatagtaatatttgcaaacattgtacaaaatatcatgcttcttgttgcttgactaaccatgcaaggaaggacaactaaaaggttaaagtcaaggaaatattgaagaaatgctctagcaatgatggggtaaagaaagttgaacccaagtacaaatccttgaagcccaacaatgggagaaagggacttgggtataactcatacaaaatgaaccctaacatagagcacaaggggtggagattccccaagttcatagagggaactaccctatatgatgccttgnggaggattcattcctcaaatgacaagtcaactcaagtgaatgtaaacttgagtcacacacaggataagataaatgatgttgttctcacatatgga

SEQ ID NO: 65431 - DNA, 385 bp, Zea mays
agcttgcacttacgaccaaaccgtactttcatccatatcacattcaatggctcaacaatagtggtaaggtcaaggtaaccaagctggtactaattaattttgctattggttcatatcgtgatgttgttgactgtgatgttgtgcctatggatgcttgtaatattctgctatgtagaccatggcaatttgattcagattgtatgcatcatggtagatcaaatcaatattctctcatataccatgataagaaaattattttgcttcccatgtcccctgaggctattgtgcgtgatgatgttgctaaagctaccaaagctaaaactgagaacaacaagaatattaaagttgttggtaataacaaagatgggataaaattgaaaggaca

SEQ ID NO: 65432 - DNA, 425 bp, Zea mays
tctccaccatgtcgctgctagccaagttgttgcagcttctcttcatcaaagatcaaacgacatgaacgctccttaatgacacactttgtttgaaacaacgtatgtcgctgattctgctctgccttctccatttgtgcactaagcacacgctgtacaatgaggctctcataatgctctgcatcatctgcaccaatctgttcttcgggtggttccttagtgcctgcatcatcagccgcaagcaaagcaagtgtagcttcatccaaatcactagcagaggaatacccaccatcgtcttttaccaccaaaacacgctgattatgacaataacgctgcacgtgtccatagcccttgcatcgataacacagaacatctcttgttctacctgtggaagctactgaagaggcactaccttgcgggttctgggc

SEQ ID NO: 65433 - DNA, 399 bp, Zea mays
agctttatcctaaatagggattaaaggggttaaacctaacccaaattgagaaaacctaaaggctttatggaaatagttgtaaaatatccccaaaaacaaagttgaatcacatttatacccctgggacatcaagaatctcaattaaaaccctggaaaaccctaaaaccaaaccctagggacctatgtgcaaaattagtccacttttgggctaaagtgcaaaaaccaagtaaaataagtgttttaagtcattgggttcacaaatatgtggacttgaaagccaaaccctaagttttggactcatttgcaaaaaggaccccaattttgattcctatgctaagtctgaaatcagggttataggcccaactttggggctgtgtagctctcaaaatagtgagaatt

SEQ ID NO: 65434 - DNA, 443 bp, Zea mays
  unsure (1)..(443): unsure at all n locations
ntatgatccactgatccattccgcttccatgactagcgctccctccgtccaagagtctaaatcgcctaagcaaaaattgtttttccaatatactacgtcatctaatctgctcgtcttctagttttgctatgttccagtgattttgctattctgctcgtcttctagtttgtctatttgtcggtggctttgcaattctgttgctctgaatgtcgcgtgtcttgcctcctgtctggagtgcaaatcctgtaataaacaaaatttgtggctcctgtcggggcatgtggcgtgatgcgtcaagtcgtttctttcctctatcgagttagctcggtattgtaggggggttcctgatgtagcgtttctggacttgttgcctgtcaattggcctggttgcttatggatgtgatccttgtaatgaactctttgttcctatttcttaatgaaat

SEQ ID NO: 65435 - DNA, 383 bp, Zea mays
agctggccaagccctcggacccgaccggacttcaccggaggcccgagatcaccctcaccggacttcggtcttccgccgccgcgcgtggaccgagctatccagtgagtctccacccaattcctttcgctcatagcttctctggcatcccgtggacctccctgacctatttaattgaactacctcgccgtgaccaggccggtctcctcgccgccgacgagcatccccgcctgcgcgcgtggaccgaccgactccggccatctccgtcgacgttccgcacactgttgtgatccccgcgacctccccttcgtcctcaaccacttcaccggaacagtcttgccgccggtaagcccctccgcccttttctccgccgcggctactgtttg

SEQ ID NO: 65436 - DNA, 473 bp, Zea mays
  unsure (1)..(473): unsure at all n locations
ttgtcaagcatatttggtacccatcgctggatgggtccattaaggttagtcaacaaagatctaggaaccaaagagtcctttgtgttagcatttggtaaactcattacctttctagcacaagttgcaattttgggttgcctagttacatgagaaataattgacaagctagaggtgggatagttacccatgggacaatccttgcattgatgtcccttctttcagcatatgtagcaaaggtgatcttcaagtcttgaagatttcttcttttcttgattcttgcttgctacatggttagttaataatttcttttctaacactatgcctttntgttttaaatagggacaagacttaattaagtgtcccttctttgagcatttaaaacaaagtttatcatccttgttaataatcaagccatttttaatatgaggacatgacctaatcgagtgtcccttttcanagcattcactacacct

SEQ ID NO: 65437 - DNA, 380 bp, Zea mays
  unsure (1)..(380): unsure at all n locations
agctntatcaaatggacgtgaaaagtgccttcctcaatggaccaatcaaggaagaggtctatgttgagcaacctcccggctttgaagatagtgagtaccctaaccatgtttacaaactctctaaggcactttatgggctcaagcaagccccaagagcatgatatgaatgccttagagatttccttatcactaatggattcaaagtcggaaaggccgatcctacactcttcactaaaactcttgaaaatgacttgtttgtatgccaaatttatgttgatgatattatatttgggtctactaacgagtctacatgtaaagaatttagtaggatcatgacacacaaattcgagatgtctatgatgggggagttgaaatatttc

SEQ ID NO: 65438 - DNA, 440 bp, Zea mays
  unsure (1)..(440): unsure at all n locations
tctaaagggagaacacgtgataggtctaacaaatgttcatttctaaaaagatagaccttgtgcagcttgtcaagcagggaaacaggtgggaggctctcatcacaccaaaaatgtgatgacaacatcaagacccctggagctgctacatatggacctcttcggacccgtcgcctatctaagcatatgaggaagtaagtatggtttagttattgttgatgacttttcccgcttcacttgggtgttatttttgcaggataagtctgaaacccaagggaccctcaagcgcttcctcaggagagctcaaaatgagtttgagctcaaagtgaagaagataatgagcgacaacgggtccgagttcaagaaccttcaagtggaggaggttcttgaggaggaggggatcaagcacgagttcttcactccctacacaccacagcanaatg

SEQ ID NO: 65439 - DNA, 397 bp, Zea mays
  unsure (1)..(397): unsure at all n locations
agcttggacagngttctgcgatggttcctgttgaaccttcggggcaggtgcagctactgttttagttgcaccttccaaagttagaacatgctatgcagtgaaacttgatttcagctgcacaaataatattgctgaatacgaagctttacttttggggcttcggaagttgaaggcaatggggataagaagggcggttctcaaaactgattcccaagttatttccgatcatgttgacaagagttgtaaagcaagagatccgaagcttgataaatatttggatacagttcgaaggcctgaagctttttttgaagggttttctgtcaagaatattccacgaggagaaaatgagcacgctgatctgctagccaagtcagcggcacaggggctacctttgtct

SEQ ID NO: 65440 - DNA, 476 bp, Zea mays
  unsure (1)..(476): unsure at all n locations
tctanagggagaacacgtgataggtctaactaatgttaccttctaaaaagatagaccttgtgcagcttgtcaagcagggaaacaagtgggaagctctcatcatgccaaaaatgtgatggcaacatcaagacccctggagttacttcatatggacctcttcggacccgtcgcctatctaagcataggaggaagtaagtatggtcttgttatagttgatgatttttcccgcttcacttgggtattctttntgcaggataaatctgaaacccaagggaccctcaagcgcttcctaaggagagctcaaaacgagtttgagctcaaggtgaagaagaccagaacaacaatgggtccgagttcaagaaccttcaagtggaggagtatcttgaggaggaaggaatcaagcacgagttctccgctcccgacacaccacagcataatggtgtggtagagaggaagaacaggactcttatagacat

SEQ ID NO: 65441 - DNA, 443 bp, Zea mays
  unsure (1)..(443): unsure at all n locations
tanagccatgggaagtagcatatgccaataatatgcttattgactcaagcctagctacgggtgcataggtttcaccgtaatccaaaccttcgacttgggagtattctttggccacaagtcgagctttgttccttgttaccacaccatgctcgtcttgcttgttgcggaagacccatttggttcctacaacattttggttaagacgtggaactaaatgccatacctcattcctagtgaagttgttgagctcctcttgcatcgccaccacccaatccgaatcttggagtgcttcctctaccctgtgaggctcaatagaagaaacaaacgagtaatgttcacaaaaatgtgcaacccgagatctattggttacccccttatgaatgttcccgacgatggtgtcgacggggtgatctcgttgaattgcttggttgactcttggatgt

SEQ ID NO: 65442 - DNA, 392 bp, Zea mays
agcttgaaggtcaagctaagaaacaggccccaatatattttgtatccgaggttcttagcttatcaaagaaaaattatacagaattggagaaggtactgtatgctgttttgatggcttccaggaagcttcggcactattttcaagcttacaacataattgttccttcttcacaacctctgaaggatattatgagaaaccgagaagctactggaaggattggaaaatgggctgcagagctcaatgaattttgtatcgattatgttcatagatcttcgattcagtcccaggcgttagcagacttcattgctgactggacgccaggggctcaggaggaagaaacaaataaagatgctgaagcatggacagtgttctgcgatgggtcttggggaacc

SEQ ID NO: 65443 - DNA, 456 bp, Zea mays
  unsure (1)..(456): unsure at all n locations
tatntaatcatgctgttgaaagaatgattataggagtaggatttaggcatatttttggtagtttggtgatcatccaaagaaatgggtgacaagggctttgggcagggaatacaatcaacatgctccagatattattccaacccaagcggtcgaactcgaaacatttgaatgcgtcaagaggagtatggcagaagcacaagagaaatgaccgctctgagaactcggaagcacaaaagggaggaatgagtatggcagaagcacaagagaacaaccaagaggcttatccaagcattagctctgcctttgttttatagttagatgttctgctttcttttgagtatttgatagtgtacttctagaataacaactgagggacatatggccactcttactgtgttgaagttcggtttgacatttaaatactcgaatagtattgctacttggcatagagagcat

SEQ ID NO: 65444 - DNA, 389 bp, Zea mays
agcttgagctaatacctctggagaaagcccttctggagtcagccccttctgtgagctccaaatccaaatcgctggagtcggctttgaagtcctcatcgtcttacgcagcgaacgagcgtctgccgcccctcttgaacttcttcttcggctgctagatgtcccactccatgagccggcgcggcgctggctcgcgaaggtcggcaaggatcgcgtcgccgcacagcacggagcggggttgcggggtggggactccatggagcgtccacaccatgcagatcggtcttccacggagatattgggagcggcagatcggggggagggggagtaaatcgcgcatacgtacagagactccatggaaggcgtccacgcgatgcagagatggggagcga

SEQ ID NO: 65445 - DNA, 389 bp, Zea mays
tctatagggagaacacgtgatatgtgtaactaacatgcatttcggaaaagatagatcttgtgcagcttgtcaagcatgtaaacaagtgggaggagagcatcacagcacgaatgtgatgaccacatcaagacccctggagctgctacatatggacctcttcggacccgtcgcctatctaagcatatgaggaagtaagtatggtctaattattgttgatgacttttaccgcttcacttgtgggttctttatgcatgataggtctgaaactctaaagaccctcacacgctctttaaggagagctcgcaatgagcttgagctccatgtgaataagataataagtgacaacgggtccgaggtcaagaaccttcaagtggacgagtaccttgagg

SEQ ID NO: 65446 - DNA, 386 bp, Zea mays
  unsure (1)..(386): unsure at all n locations
agcttcngaattatactctgatgaaccttctttcaaggcccattatcctcaagggaataatgtttcatggatgaaggacgttcacatttaacattttatgttgccttgttcttaattcatagcatttgagaacaagtccccaaaagtaaaggcgaagaagctccaaagtcgttcctaagggaatgcacagctgaggtgtgattgtttttaaggaaataatggctatgaatatggcttcggatacgtgtttggccattcatttgcacatcacattacatcatagcatttgcattcataaacattcatccaggcatatgtatgataatcatcatcatggcataagtgggtgctttcgcaaaaagaaaataaagggggaagaaagagct

SEQ ID NO: 65447 - DNA, 439 bp, Zea mays
ggaccttgaaactcagctggattcttgtgcagaatcgcttgattgtttcttcggatttaacaagcgctcaccaaatggcttaagagaataaagttattgatcctgctctggctggtttttacgaagctatggagaatacaaacatagataagattacaaatgaaatgctagctggcttgtctgaagattctgacgatagcgaaggctttgatgtggaaagtgaagacgaagatgccaaaaatcggccctttataccatgcacaccttcatctcaaagccgaagccttctgagacagtatgttatactggaaaacatgttagttaaagtttttaggaccttcgaaagagaaaggcccccaacaaaagtccttggtcacatgctaccatcaacacaaaagggagaaggtgaaatgccataacgaagatacacatgagaagc

SEQ ID NO: 65448 - DNA, 305 bp, Zea mays
agcttatgaagattcttcattccaacatgggctagtcggcggtgccagagccaacccatgttagtcttagcaattaagcatgtgtcaagttcagctctatcaaaatctactaagtatagctgaccctctaacacacccttaaatgctattgaatcatcacttcttctaaagacagtgacacctacatcagtaaaaagacagttgtagcccatttgacataattgggaaacagaaagcaagttgtaatctaaagaatcaacaagaaaaacattggaaatagaatggtcaagagatatagcaatttt

SEQ ID NO: 65449 - DNA, 407 bp, Zea mays
  unsure (1)..(407): unsure at all n locations
tacttggtgtttacttctccttcttctcctccgctgccttgaatgcaacgggttgggcttcggatgtggtggcatcgacaagctcggtgatcttcctcgagccttcgatcatgcactcaaaacttacaaaatttccgataacttcctcgggggtcattttggtatatctaggattgccacggattaatcgaacttgagtagggttaaggaaaataagtgatcttagaataaccttaaccacctcgtggtcatcccactatacgctcccgaggttgcgcgcttggttcaccaaggtcttgagccgatagacatgtgttgtggctcctcccctttgcgaagccggaaccgaccgagctnnccctcaatcgtatccgcttggtgatcttggagagctcatcaccttcatg

SEQ ID NO: 65450 - DNA, 392 bp, Zea mays
agcttgatcatcggtcctcgaagctcgtaaacggatcacgatttaatcacaacgcgaagcgaggacaaataggcacaagcaaacaaacatatatatatatatatatatatatatgcataaaaacattacaccattcaaagaaaaacaaaacataatcaaaacttgcaatacgaaatagaactcgcttctatggtcgcacgatagaaacaaataccgaggtcgaaataacggttgagaagttattgcgtatacgttatacaaatatgaaataggacatttaattcgacatactcgcattactcaacatttattaattgtcattaaagctatcgcctagctttaattagttttgtaccctaataactttcgcctagacaaataattcacatagc

SEQ ID NO: 65451 - DNA, 305 bp, Zea mays
attcctgtgcccataatggcaacacagacggatgctttttgtgggacgcggccgcggcgaacgctatatccctggcgagcacttcatcacagatgggacctccgccgcttgcaataatgtgcggaagggtacgccaaacccccccctatcgaacacccgcatagcacccgctcgaggttaaatcttcattaaaggcatagttcgagcacggtgaattccttctcccgtcgggaaggctcacatcaccgtatgactttgtggcgaccccacgtttggggtttggcgaatgatggaagtcgcgtatg

SEQ ID NO: 65452 - DNA, 383 bp, Zea mays
agcttggtgttgggaattagggctggttcatgagcacatgaggctgaagcctgtggtgttctgtatgagatccatgccccacacaagcattatgtaaaagtgtgcactgcccacgaaaatccggatgactcacaagtcataacctagagtatgtgacacagatttttcttaaccacatgtgagtatgtggcagaatgtacagatagactaagaaacaccaagttggaatagcaatgttactaggtaaacataaaagaaacatgcacacatagcaaatatgtactctgtatttcttattcacaagtcctctaggatctctagcttcaaggatataggctactcaggttaagtgtacacattaataatagtagaaaccacactta

SEQ ID NO: 65453 - DNA, 422 bp, Zea mays
ggacacataaaactcagcttcaaacttaaagctagcaaagtttggcgcgttttatctaaaattgagtgagcgggagcagatggcatgagagcgtgtccaataagcttgcggtatgatcttatatatacgcccagtgcgtcgaaaattgaaagaacccgcctgtcagtgaatgttgctattctagcaaagggaaggtggtgttttcgaccttccgcttaaagccttcgttcatgtcgcaatctaaatttattatgttaaacaaattaatattgcgaggggctactgttgggggccttctgcttacgaatgttctcaaaaacaggatttaacagtatttctggagcataatatgtgaacaggtatcttcgacttgagtcgatatcacagtaggagaagcccagataatacgaatgtgatgcacg

SEQ ID NO: 65454 - DNA, 305 bp, Zea mays
  unsure (1)..(305): unsure at all n locations
ccctccttattcccattgcccttaacttncgaagcccccaacagaagggctttgtattcaacaacattgcttgtgcaactgaagtcaagccttgctgcataacatgttttgacttttgaaggcgcaactatgacagcagccgctcctgcaccgaaggttccccaagaaccatcgcagaacactctccaagcttcagcggctttgtttatttcttcttcctgagcccctggcgtccagtcagngatgaactctgctaacgcctgggactgaattgagaatctatgcacatagtccatagtgaattt

SEQ ID NO: 65455 - DNA, 470 bp, Zea mays
tcttggaacagcctccgcctccacctacgttgcaacaaggccagcagccagaagggagccagtatgctccacaccagagggacttcagagagcagtccgaagctcgtacagtcaatagcactgtgctagagtcaaagcacatctattgacaaatatcctaccttaatagcaatctttttcattcagttttattttctgtaataaaggacattgtttaggcttcatgtaattagtttcgttgattcctacaaggaaaatatattttctttacaggcttatattggtgacaaaaagaggaccttcgaactatcgaaaattcttcgaagcaacaaaaagtcgttctaaggaacgcagagtaatgttgccgaagtcacaaaaaagtcgttccaaagggagcgcagtgtaagttttctgctccaaagtcgttccacagggaatgcagagcatacagcgaaaagtcaacgctgata

SEQ ID NO: 65456 - DNA, 394 bp, Zea mays
agcttgggcctcgcttctatggtccctatcttagtttggaggaaattggtacagtatcttacaagcttgccctgccatctcacgcccgcatccataatgtgtttcgtgtctctttactaaagaaatatactggggctcccccggctgcaatagttcctctacccccaatattacatggcagagtcctgcctcagcctaagaaggtcactaaggcacacaagaaccgaggcgtgtgggaactgctcgtgcaatggctaggacaatcagcagctgatgcaacgtgggttcagctggaggactttcgtcgctgttttcttggtgtccaggtcgcggacgacctgtttttgggggagggggaaattatactgatgcatttgtaggaaaggtataccag

SEQ ID NO: 65457 - DNA, 480 bp, Zea mays
  unsure (1)..(480): unsure at all n locations
tgtatatttgagagtttagggtctttgtggnggacagatatcccctgngtccactagaaggtaagaaggcctcgcgagaggccttangcctgttatctcgctaggccatctcttcgtggaacaggggaggactactgacggaatgggctggcgcangaaggaagcgggctcaagcccaagcaactcgtcaaactcgaacgctatctgtagcgtccgcccaacttttccgtgcacaacgccctggaacgtcggaatggaatagagataagttggcaagattataggaagatcaattcagtcggttcactattgtttagggacatatcatcatcacatacgcatgtagtgccccacggtcgagtatataaggcctatgggtaccccatcatttccatcgaccatctactcaactcattagcctttctccatacaggagctntcccttggacctaccacatanagatccacaccaggaagtag

SEQ ID NO: 65458 - DNA, 398 bp, Zea mays
  unsure (1)..(398): unsure at all n locations
agcttgagaanttgcaatagcaaagaggactctttgataattaatttacaatagacacggtatgaattctacgaagcaataaaaagtcgctctaaaaagaacgcagtgtaagttttttgctccaaagacgttcctaagggaatgcagagcttacaacgaaaagtcaacgctgattccgccgaaagtaaaaggcgaagaagctccaaagacgttcctaagggaatgcagagcttacagcgaaaagtcaacgctgattccgccgaaagtaaaaggcgaagaagctccaaagacgttcctaagggaatgcagagcttacagcgaatagtcaacgctgatgcaaaaaagattatgtattttattgcatggatgtgtctgtgaagcttcagaacgaatacctt

SEQ ID NO: 65459 - DNA, 434 bp, Zea mays
ggtggcacctcgggcgtcttgtcgtagccaaagcaccagatctcccacctggaaacctcggggccgaatccttctggcgtggtagcgtcgcaaggactgctgataccgcgctgagtgtagcaaggctacgtcccgagccttctccagctggtctaatgaatcttctcggctggcctggttgctttggtcgtcgtaagccttcgtccttggggaaccgtattccaagtccgtggtaagatggcctcggccccatagactatgaaaaacggcgagaaacccgtggctcggctcggcgtcgtcctcagactcataaccaccgagggtagctcttttatccatcgcttgccaaacttgttgaggtcgttgtagatactcggctttagtccctgcaaaatcatgccattggcgtgctccacttgcccatttgtcattgg

SEQ ID NO: 65460 - DNA, 396 bp, Zea mays
  unsure (1)..(396): unsure at all n locations
agcttcaattggntcaaggttccatgttgtatcattctcaggtttaacttctccatttcttgacataatgtaatgtcagaggtccttactgtaagacaatggcaggaagccttgcgacttagtgcatctgccaccacgttggccttgcctgggtgatagtgaatttctaattcataatccttaatcagctcaagccatctcctctgcctcatgtttagttcagactgggtaaaaatgtacttcaaacttttatgatttgtatatatatggaagatatttcccagcagataacgacgccatattttaagggcatgaaccacagcagctaattccaggtcatgagttggataatgttcctcatgccggcgcaactgtgttgaagcatatgctataact

SEQ ID NO: 65461 - DNA, 464 bp, Zea mays
tgccacaaccgagcagagggccaaaggaataactccagatactaatatagcttttgagaaagtgtggccaaagaagccaaatcccttgctcctgaagcactctccgaagactttgattatatcattcgacatgctgcgggaaaaagattatccgaagaagaaatttttgaagccaaacactatgcccaggaactgaaatatcctaagggggctttagtgtttaacggtacggacgaagatgatttcctgtactgcctcccggaaaacaaagaattatccatctgccgggagatggccagaagtatgggttttctgaagctcgaagctggcctttgcgccatgacgaaggtcgatctcgcagatagtcttgcatacaacagtctgaaggtaccaaagttgtgaattttaaagcctatgggctctgaaatgaagactttattctcatgttatccttattcttcttg

SEQ ID NO: 65462 - DNA, 389 bp, Zea mays
  unsure (1)..(389): unsure at all n locations
agctngatctgtgcaatcttgcatgctctatcaatagtagatggacaatgtcaaatgtgtgtcatgacattctgagatcattgttgcccaattcgggtagcatcggccaaaacatgcgacacaataaggatatacaacctgcagaaaaagggactctaaatttgcagagaatagaaatgcaaaagctaaagtagagaagatacatcagaagatatgcccaacataaacttcagctcccaacagattcaaatagttgtttgagatcttcagaatagttgtttgagattttcagaagatacattagaagatatgccccaacataaacttcagctccatgagtaagagcaagaagctcagcatgcttccgtttttcattctcatcattcgca

SEQ ID NO: 65463 - DNA, 444 bp, Zea mays
  unsure (1)..(444): unsure at all n locations
ttanacagcaaaatagtaaattcagtattccataggcatgaatgaattccctcgaattttctctatttccccgtgtttatgtttcaactacaacagaattttttttctaaactaaaatgtttgatctcatacactacatcaagtatgggaaaataaacctaanaattgtccaattctactcgccaataacaataatgcagcattcacaatactcaacttgcggatacaggaaaatagataggaactcagttcagtagcagcataccattacgggtgacgaggaactgcttattggcggggagatacggcttcctcttgcttggatcgcccgcttccctgtgaacacacgaaacacaccagatcaatcagtcaaccaaccaatcagcaaccacctaaatcggttatagggatgcagagcgagggcagatgaaaggagaacgcacc

SEQ ID NO: 65464 - DNA, 391 bp, Zea mays
agcttcacatgtctcgtatgattcataatcaaacgaagttaaaagcccattagaatgaagcttcttcatgcgattctcacttatatgacccaaacgacagtgccacatgtaggtaggacttaaatcattaggccgaggccttttagcactaatattacagataggtgcatcatcaagatttaaaatgaataacccattcataatggatgcaaaagccacaaacatgccattcttagagatcacacaaccattgttttcactcgtaaatgaataaccatccttcattaaacatgaaggagacataatgtttcgactcatactatgaactagataacaattatttaactccaaaataaatcctgatgggaggcggagttgcatcgtcccgacg

SEQ ID NO: 65465 - DNA, 472 bp, Zea mays
tctagagatgtatgttctaatctcatgagatctaattaaatactaaataaattcatggccaacagccgaaaacatttgccactgcactcacacaaaaatagagtgtcttaaagaaggataaatatgtatatcatatccattaaattatatattttcaataatcataactaatcagtattgccacagcacttacaaatatacaaaatcagtattgacataacatagagcagataaaactagatttgcctccaaaagggcttcatttggaagatggacagcatgaaagtcagaaaatgccagagtttgctaaaccttcaaaactgatgctcacgtcgttgtaattcatggtgtggtcagtaattgtaaacttaaaagctttcactcatctcaaactactaagagttcctctggcaaaaccaccagatacacctaaaactacaacctataagttaatcaacatctcttcttgctt

SEQ ID NO: 65466 - DNA, 394 bp, Zea mays
agcttctccaaaatcttgaggtaaactgtgaacctcgatcagacacgatcttctttggtactccatgtaaacacacaatccgagccatatacaattctgctagctgagaacctctataagtagtcttcacaggaataaagtgagccactttagtcaatctatccacaatcacccatatagcatcatatcctttctgggtgcgaggcaatccagtaatgaaatccataccaatctcttcccatttccactcgggtatcttcagtggatgcaacagtccagctggcctctggtgtttagccttaactctttgacatacatcgcacatagctacatgtgcagctacatctcttttcaaatcataccaccaatacttccgtttcaaatcctgatacat

SEQ ID NO: 65467 - DNA, 472 bp, Zea mays
  unsure (1)..(472): unsure at all n locations
tcggaaaccccatgcttctagccatctcccgacagacggataattctttggtggctgggaggcagtataagaagtcatcttcgtctgtcccattgaacactagtgcccccttcggatatttcaattccttggcatagtgattagcttcaaaaatctcttcttcggataatttcttccccgaagcgtgtcgcacaatataatcgtatattttggaaggtgcttcgggggcagcagtgtcaatttcttaaaccaaaattggctctgacatttttatttttttggctgcctttgcaattttcgtttcttcggcttccaaaggttataccttggtgagctgtgaaggcccagcttcagtttcaaattgttgcttcgaagcttcagcaacaaaggcttcagtagacacttcggangtttcaacagctttctttggagttatgcttgaagatataattgtctccaaaacatctaacac

SEQ ID NO: 65468 - DNA, 381 bp, Zea mays
  unsure (1)..(381): unsure at all n locations
agcttgcacacatagctgttttgaatacttttgatcatatctcttttatatgctatgactaatgtgttttcaagtctatttcaaaccaagtcataagtatattgaaagggaattggagtcttcggcaaagacaaaggcttccactccgtaactcatgcttcgccgtcactccgagcaactctcttttctttgggggagaaatgagcatcaaggaaaaggacttcatccttgggggagagagtaaaagctcaaacgcaaaaggaccggatttcgtctttggtataatcttaactcattcatttatgaccaaagaggaggaacttactccgagggctctaatgatttccgttttgccaatcatgccaaaanggggagaaatga

SEQ ID NO: 65469 - DNA, 432 bp, Zea mays
  unsure (1)..(432): unsure at all n locations
tgtgtgtgtgttatctattgctcttgcgtagcgtaaccaacgagtagttctagtgttgcttacgctttgagtgcttttttcactagtatgtgtatgaactcttgatgtgcttatagaactatgtgcaaatgcgaccttggtaaataaagttgtttacgtgagctctcactagcttgacaccttagttatttaactagaatctttgtaaggctagctatttccagcagcttacccatcctcttacacatatttaactccactctgcgaacggtgcaatctagaatgtaaaacagagttttgggtgaccatatgggtgaactgttggacacngtctaaagtactcgtaaacttaggtagatgcatgtagtcttggcaaaaccgtgtagtttaaacccttttattataatatatatgtatgcgggctaatagctg

SEQ ID NO: 65470 - DNA, 374 bp, Zea mays
agcttggtgccgatagagaagcatatatccttgaagtcttggctgtcaaattgcttgccattgtcaattgtgagtttggacgggactccgaagcggcaaacaatgtttttccagaagaatttctgggcagtcttcgatgttattgtggatacagccctcgcctcgatccatttggtaaaatactcgacagcgacgaaggtgaacttgaggttcccctgggctgtggacaggggctcgacaatgtccagtccccagcgctgaagaggccatgtgtgggcgattagcttcatgaattgcgaagggcttcccgagcgtggagaaaatttctggcaggcttcgcaggaccttgtgacccgatttgcggtgcagatcat

SEQ ID NO: 65471 - DNA, 410 bp, Zea mays
  unsure (1)..(410): unsure at all n locations
tagcanaagaaatttctagaatcaagaatattttgctcatgcctaagtctggtaaaagattgttcatcaagtggcttggtaaagatatcggctaattgatctttagtattaatgtaagaaatctcgatatcccccttttgttggtgatccctaagaaaatgataccgaatggctatgtgcttagtgcggctatgctcgacgggattgtcggccatcttaattgcactctcattatcacatagcaaagggactttggttaatttgtaaccgtagtcccgcacggtttgcctcatccaaagcaattgcgcgcaacaatgtcctgcggcaatgtactcggcttcggcggtggaaagagcgaccgacatttgcttctttgaagcccaagacaccaaggatcttcccaagaactg

SEQ ID NO: 65472 - DNA, 393 bp, Zea mays
cctgcggcatgcaagcttgcgaggcttgccatcacgattctttgtttgggatggaactgcccactatcaggatcaagttactgtataaccaagcgagaggcctataaagggagatgaatgctatatgttctgaactagaagtgaacaaggcaaatgagatgactgacggataggtgtgtctattgtgtagttgaggatgctcccgcagcgtcccatctttttcttttccactcaggatgggccaaccagagcatttctgtgacagcaaacacacacacacacacgcacaagcggacaagcctcaaagagatccacgactggaactgctgccccttccctgtttcgtgctatcttttatctcaaagaacaaggagttacaagcaaagtaagaat

SEQ ID NO: 65473 - DNA, 390 bp, Zea mays
  unsure (1)..(390): unsure at all n locations
taatcccgaaagagagtctgtggtgtcccccgatgtatgctcttgaggctcatcgtctccgagcggngcatcgaagccaacccggagaagattgcagccatcaccagtatggggcccatcaaggactcgaatggcgtacagagggtcatgggatgtctcgcggctctgagcgcttcatctcctgcctcgacgaaagaggtctgcctctgtaccgcctcttaagaaaagctgagtgcttcgcttggactctcgaggccgaggaagccctcgggaacctgaaggcgcttctcacgaacgcgcccatcttggtgccctccgctgccggagaagccctcttgctctacgtcgccgcaaccacccaggtggttagcgccgtaatagtggttgaga

SEQ ID NO: 65474 - DNA, 318 bp, Zea mays
agcttgaaggacaaactaaaatatgattctctagtatactttgtcttcgaagtcctcagtttatcaaagaaaaaatatacagaattggagaaggtgctatatgttgtcttaatggcctccaggaagcttcgacattactttcaagcatttcatataattgtcccttcatcacagcctttgaaggatattatgaggaacagagaagctactggaaggattggaaagtgggctacagaactcaacgaattcactattgattatgtgcatagatcctcgattcaatcccaggcgttagtagacttcatcgctgactggatg

SEQ ID NO: 65475 - DNA, 390 bp, Zea mays
cccaaaacaagctgagcgatcgtcagactatatctcgagcaggttggtttcttgccgccctgatactccagactctcttcatcttcgttatgacctgagctacgtactatgaacttcggtactctgattctgcgaaaaattgttaccacaatcagcggactatattcaaaagccaacgttcgtggcagagctcccgtatgaccaactagactaaaccataccaaaaacaagctgatatggtgggagttcatactattatatcaacaaatacgtcaagttcgaccctagtgcgcatataatttcgattctacgtgcttccccaaccttatatatttgtctccgcctgcagggtaagcatcttcttaatcatcctcttatgttgctcttaag

SEQ ID NO: 65476 - DNA, 442 bp, Zea mays
aactaagctatgaagattatcatcccacatgggcaatcggcgggtcatacttcccatgtagctagcattaacaagtgcgagttagctctatcaaatctacaagatactgaccttatactcccttaatgctactgaatatcactttttaaagacacaacacctatatccgtataaagacagttgtagcccattttacataattgagaaacataacgcaaactgtaatctatagaatctacaagagaaacattggaaatagaatggtcaggagatatagcaactctaccaagtcctttgaccaaaccttgatttccatcacccaatgcgatagctctttggggatcatggtgattctcgtacgaagagaacatcttcttctcccctgtcatgtggtgtgtgcacccgctatcgatgatccaactagagctcccggatgcataaa

SEQ ID NO: 65477 - DNA, 508 bp, Zea mays
  unsure (1)..(508): unsure at all n locations
gaaaccacttctttacttgcgttagcgatgtgatgtattgatggtgttgttcttcatagttgtttgtgtgatattcaatggttgatctagtagttaagaatcaagatctattcagatccgtggaagagtctcaagttctaaataagcaaggcaagtggacttctccctctgcatactctgtttgatcccaaacaatacatttaataaagtttattcttcgagaaatatatgcataatttgatgggttacctatttagatacccctaacctttccaacctgattccttgaacaaacctgtgtattataccttactttagtagctatgctattgctacaattttaaatttatgcagccactcctggttatgatattaatgttccaaatggtaagtttacattattggttgtaacccgatggctaaacaagaatattgcatattaattngaacatggagtgaccacccnggagaacagtgctaccatgagaactatcatggctctggtctt

SEQ ID NO: 65478 - DNA, 423 bp, Zea mays
  unsure (1)..(423): unsure at all n locations
ttctgccaacattcagagatcacagttccatgggaattttgttagacaaataataaagccacatgttctctctccatgatctgataggtggcacttattcttccaaaaactggtagctctgccattacctaatacctactgcagtagctctgccttttagatatatatgcctaatcttcagtagatcattccacacaggagagctgtctttattattctgcttaagatgagaaacaactcgcttctttaattgtgtacagtttcctatcaaattcccttcccattttccatcaccacttgcanaggagactaatattcattcttctcaaatctttgacccatanaccccctttctctttgggtttagtaatcttgatccactntgataaatgttaccttttctttcaaccaaccaatttgctg

SEQ ID NO: 65479 - DNA, 409 bp, Zea mays
  unsure (1)..(409): unsure at all n locations
caaattcncctgggagcgagactttctttattgggagaggttgagtatggaacgggagtggtgaatctcgccaatctctctcgaatgactctgtttaacctcaacactgtgagtgtgacttaaagatagagatttgatttgatctgagaaacaaaccagtggggctaggatgatcatatatgccaaagtgaatgaaaccagttgggagtttatctggagggagttgcacttgtcacttgttttagtgagttggtatataccctatgggcaattataggtatgtcccttggcccttcttagtatctggtgattgatgccaaaccagggcctaatgtgaaaaatgctctggatgactatatgatatacatcctaagggtgttctaaccctagacattagttttgggctaac

SEQ ID NO: 65480 - DNA, 443 bp, Zea mays
  unsure (1)..(443): unsure at all n locations
cccccgcgagaccttatcccgtgtctttctaaccatattgaatgcgatatcgaatgtcatacttgatgcatattcactnntattgttcccttgtatgatgtactgtttgtctcccaatttgaatggatgaatgtatatatgcttgcaatcgcatagagaacgatccggttgaagagcccgaagaactcgcaggagaagcccctgagcagcagtcgtgtggtggaggcaagtgtcccttgacctatctttgtcctattcattctttaatacacctcccgctttacacatgtatacctaaggattgactagctntngttatccatgtccttgttcacctatatgggttggattattattagttagctttatgctattgctcaactctaatcaatgaacatgatgagattatctatgatacgctgtcttcccttctcttattatga

SEQ ID NO: 65481 - DNA, 461 bp, Zea mays
  unsure (1)..(461): unsure at all n locations
ttatcanatggacgtcgaaagtgccttccttcatggaccattctatgaagaggtctatgttgagcaacctcccggctttgaagatagtgagtaccctaatcatgtgtataaactctctaaggcgctttatgggctcaagcaagccccaatagcatggtatgaatgcctaagagatttccttatagataatggcttcaaagtcggaaaggccgatcctactttatttactaaaactctcgaaaatgatttgcttggatgccaaatttatgttgatgatatcatatttgggtctactaacgaatctacatgtgaggaatttagtaggatcatgacacataagttcgagatgtcgatgatggaggagttgaagtacttcttgcgatttcaagtgaagaaactccaagagggcaccttcattatccacacgaagtatattcaagacattcttaacaagtttggga

SEQ ID NO: 65482 - DNA, 209 bp, Zea mays
ctctccaagatagcaaagaattggtggcgtcgcgaacaacttgcaaggttgtcacgagaagttgcaagggcacagtcttccttctgcagacaagaatcagctctcaaacatcaagtaggcagtaagaacacaacatagaaagtcaagttaagcttaattcattggccaccttttcagagtcaagctgagcattgagagaggaatctaca

SEQ ID NO: 65483 - DNA, 481 bp, Zea mays
  unsure (1)..(481): unsure at all n locations
ctaagcttgtgaagaatctntatctcaacatgggctaaatggtgatgctatagccaacccatattagtcttagcaattaagcaagtatcgagttcagctctattaaaatcaactaagtatagctgaccctctaatactcccttaaatgctactgaatcatcacttcttctaaaggcagtaacacctatatccgtaaaaagacaattgtaacccatcttgcataattgagatatagaaagcaaattgtaatctaaagaatctacaagaaaaacattggaattgtaatggtcaggtgatatagcaattntaccaagtcctttgaccaaaccttgatttccatcctcgaatgtgatagctctttggggatcttcgttttcctcgtaggaggagaacattcttttctcccctgtcatgtggttggtgcatccgctatctattatccaactngagccaccggatgcataaacctgcanaacaattt

SEQ ID NO: 65484 - DNA, 334 bp, Zea mays
agctctatcagaatttaataagtatagctgaccctctaacactcccttaaatgctactgaatcatcacttcttctaaagacagtgacacctacatcagtgaataaacagtgtgagcccatttcgcataattgagaaacagaaagcaaatcgtaatctagcgaatctacaagataaacattggagatagaatggtcaggtgatataacaatcttacccaatccttggaccaagccttgatttccatccccgaatgtgatggctcgttggggatcttggtttttctcgtaagaggagaacatcttcttctcccttgcatgtggattggcacccgct

SEQ ID NO: 65485 - DNA, 447 bp, Zea mays
  unsure (1)..(447): unsure at all n locations
gtggtggaggtttccactccagaatatctttgaccttgctaggatctaccgcaattcctttagctgataacacgtgccccaaaaattgaatatcttccagccagaacgcgcacttgctgaacttggcatatagttggtgttcccttaggcgcgtcaatacaatccgtaaatgctgagcatggacttcttcattcttggaatatatcaagatatcgtcgatgaagactaccacgaactttgtccaattcgggcatgaacaccgagttcattaaataagtgaaatgggcaggagcatttgtgagcccgatagacattaccaagtattcaaacaatccataccgcgtagtaaacgcggtcttcggtatatcctcggggccgaatacggattgatgatagcccgacctgagatcaatnttggaaaataccctcgctccagtcagttgatca

SEQ ID NO: 65486 - DNA, 261 bp, Zea mays
  unsure (1)..(261): unsure at all n locations
gcattaaactntagaaaatcacagctgaatacccagtggggctttttctgtgatgtttaacacagagacctattatcacctaagaagcatggcgaatataaaatttagtccagaaacctcacctaaagcagagctatagtagaaaatgcaccttcacacgtacatcagtgtggattgaacagatagcagtctgaaatatttcaatctcgaaaatttacactcgacgcccccgctcgcttttatcccacccgatcgcaagtt

SEQ ID NO: 65487 - DNA, 386 bp, Zea mays
aagaagaccttgtgcacttgtcaacaggttaacaagtgggaggagcgcatcacagcaagaatgcgatgaccacatcaagacccttggagctgctacatatggacctcttcggacctgtcgcctattttagcattggaggaagtaagtatcggttatttatagttgaagactctacccgcttcacttgcggagtctatctgcaggataaaattgaaacccaatggaccctctagcgcttcttaaggagagctcacaacgagtctgagctcaatgcgaacaaaataaggagtgacaatgggtccgagttctagaaccttcaagtggaggagtacctcgaggaggaagagatcaagcacgaggtcttcgttctctacactccacaacat

SEQ ID NO: 65488 - DNA, 418 bp, Zea mays
  unsure (1)..(418): unsure at all n locations
acatttatgactaaccaatgttcattttgttatagacaggattgtagcgcatgccaggccgggaagcaagttggcactcatcatccacacaagaacatcatgactagtgagaggccactggagctcctacacatggacctattcggcccgatcgcttacataagcatcggcgggagtaagtactgtctagttattatggatgattattctcgcttcacttgggtattcttttggcaggacaaatctcatacccaagaaaccttatagggattcttgagacgggctcataatgagttcggcttaaggatcaagaaaattagaagcgacagtgggacggagttcaagaactctcagatagaatgcttccttgaggaggagggcatcaagcatgagttntcttctccctacactccacaac

SEQ ID NO: 65489 - DNA, 382 bp, Zea mays
  unsure (1)..(382): unsure at all n locations
gatgaagttgtggatatgatcgcaccaacgcagctattgaaaatgcttaatcatatttaataaacaatgcacatgctaaatcctaagctactgaatagaacatcacctttncaacatgttaaaatgtgattagataaatacttgacattctcaatatctatgtgtagacaacattggctgagaaatatatgtgcgtggataaaatgtcagagtaccatatcgagcatatctaatttcaacaataattatcttgggcgcgaaagaagtgacattggaacagcacatactgttatttgacaagtgtggaacattgctaagatgccatgtagtgacgtattntatgatgcatatgagaagcttaatctacctcttaactcacatc

SEQ ID NO: 65490 - DNA, 490 bp, Zea mays
  unsure (1)..(490): unsure at all n locations
agctntatcaagccaagggagagattacaacttcgtcgcataagatgaagcatggatcgacgtgtcgctgaagcctaatcccagagccagtgcttggatgatgaagcttcggatagatgcagatactagagacgaaggaatatagaagagacgtacacgacacgtttcatgggagaaaggacaaaaataacacccctcgctttgtagggcatgtacgtagatataatatcactgatgaatttcgttcaaaaaaagtacactggcactctcctatgattaggtgaacagtgcccttgcatgagagatagtttgtcaattcacgttttgtagccacctttgaaattctgagcctaagaagcttcttttgtgtatctcatcttcgagcaactcatatttgcttcaagggtaactntgtaaatctacatgacaacagaatggatgatcgaggacttgcttttcttaggtagtatcttcatgtttggccatctct

SEQ ID NO: 65491 - DNA, 427 bp, Zea mays
accctgcttgtatggtgcccaatgttggaccacacaaagacgacatgttcaatagataagtgttgcagaaatgcgcatgttgtggtgaatttgtggccatacaagaaggaatcgaagtccaaatgatgatatatgtgataggctaggggtagcaccaattgaagaaaagctggttcaacatcgattgggcgaaccatgacctgtggattctattgggtatttaactctaacctagcccaacttgcttgggactaaaaggctgtgtcattgttgtatttataaggaaaaacatgcttcgatcctcacaagcaattagtgtttaacgaatcaatgacacatcgcaccaacatggcacacataaaacaactataaactgattcccattggaatatagtagataaatgattatacacatttagctacacta

SEQ ID NO: 65492 - DNA, 494 bp, Zea mays
  unsure (1)..(494): unsure at all n locations
ctaagctttctgcgcacagcttcgtgatttccttatccttcatcataatcatctntcgtttcgctcaagcttcatcctgaccatgctcttgtatactcatgacccgattccgaaggtacctgttcacatatttcacttggaaaacattgtcaaatcatgtttttgaggaccttcggaagccgaaggcccccaacagtagcccctcgcaatattaatttattagtgataaattcatattgcgacatggacgaaggccttaagtcgaaggtccgaaaaaacaccttacctttgctagaatagcaacagtcattgacaagcgggaccctccagtttttaacgcactaggtgtataaataagggctcaccacgagttcatttggcacgctttcttgccatatgctcctgctcactcgactnttagcccttgcgcaataacacttgcttggctttttaaatttttaagcttcngtttcgagagcactttctcagcattt

SEQ ID NO: 65493 - DNA, 418 bp, Zea mays
  unsure (1)..(418): unsure at all n locations
tggagagaagagtactatgtctgtgcctcacttcggactaccatgatgaatgactttgcgatgacagcggcgttgcctacatatgaggatattgtngcctcatagctcatcaagaattgctttgtgtccgagtgcccatcgtacatgggcaactggagtggcttgtaagattgtggcaatggaatagcctgcaattctgctgccagtggagaagcatcttcataatgttagttaccatgatgaaagtcattgtaccattcatcttcattgaatgagccctcttgacgaagctacctgtgctgatgccttctgtactggtcatcttgagtgagatgacgcatttcttcagcggccttatcgatcttcttctgaagttcgatgagacgaagcatcttcttctcttcctctggacctgtga

SEQ ID NO: 65494 - DNA, 282 bp, Zea mays
tggacgtgacaagagcgcttctcaatggaccaatcaatgaagaggtctatggtgagcaatactctgtctttgaagattgcgagtaccctaaccatgtttacaaactctctaaagagctccatgggcttaagcatgccccaataacatggtatgagatgcctacaagattctcatattacaataggcttcaaattctgaaacgccgatcctacttaatttactataaatatcacaatgatctgattgcgtgccaatctatgtcgatatatctatattgggtct

SEQ ID NO: 65495 - DNA, 471 bp, Zea mays
  unsure (1)..(471): unsure at all n locations
tggaccaactcatgaagaggtctatgttgagcaacctcctggcttcgaagataagtttagtaggatcatgattcanaaattcgagatgtctatgatgggggagttgaagtattttctaggatttcaagtcaagcaactccaagagggcaccttcatcagccaaacaaagtacattcaagacattcttaacaagtttggaatgaaggatgtcaagcccatcaagacacccatgggaaccaatgggcatctcgacctcgacacgagaggtaaatccgtagatcaaaaggtataccggtcgatgataggatctttactctatttatgtgcatctcgacaggatattatgctntctgtatgcatgtgtgcaaggttccgagccgatcctaaagaagttcaccttanggccgtgaatagaatcatgagatatttagtctatacacctatagttggactttggtaccccaagggatc

SEQ ID NO: 65496 - DNA, 341 bp, Zea mays
gcctcatgagccatatgcagcatgatgtacgatgcttatgctatgcgaaaagatgtgatgatgttatgctatgtaagatggtatttattccgaagatacacgcacatccctgcgataaaacacataatctttgtgaatcaacgctgacttcttgctttaacctcccttagagcttcttccgcttacttcatcggaacagcgttattatcactgaagcctccctaagagctcttcgcctttacttcagcggattcgcgtgactttcaccttcgccttactatgcggataacattgcttttgctgaagctcgcatcctttggaacaattgagcaaaacttaca

SEQ ID NO: 65497 - DNA, 334 bp, Zea mays
caccgagctgcccaacatcaccgactcggatgtcatcggcgcgtgcctcgctggcaccacctgccacgacctggtgagcaagctgggtcgcaagacccccaccacggcgagcgagccgatggtgatactaatctatcgtcgaaatggctggtatgtgtaaacacttgtgtcagaatagtacatctaccttggtcctacgatgtgagaagccccgcggcgtcactcatcgcggcgccataacaagggcagaagaagtccaagcaaaccgacgccgctacgcggaccttgtgcgtcccgagacataacctctgagcccccggagtgccacctcttc

SEQ ID NO: 65498 - DNA, 485 bp, Zea mays
  unsure (1)..(485): unsure at all n locations
ctaagctttacaagagaagntaagctggccagctacattattgattgtctntgttcttctggccacaacaaattagacgctgcttataagcaagtgccatgacaaaataattggcatgacatacgcttcacagccttgctaatatcgataaagacatgagggccaatgcttagattgcaaaatcaagctgttaggtgagcaagtcccctatccattgctcctctatgtacttctgaataatggcatcaacgataagaaaagctgggtcttatatgggctagatgcaatccaatgcagagcagcaggatgtcacaaaagtcacttcagtgtggcccccatgtgcactcaactntgcagatcanaagggtacaggatatccaagaaaagctagatcccatcagaggaaaggctagatatcagctagccagtacatacaatcatattagataaaactctctttcctgcattgcttctgtttacgcatg

SEQ ID NO: 65499 - DNA, 449 bp, Zea mays
  unsure (1)..(449): unsure at all n locations
tgcttgtgtgagttggctataaaagataatgtaataaagtgaagcatttgtgcaatatgaagtaaaaacatggaattgtatgtctggttaaatgctcaaaaggatctggatgaccattcttgttctttgtattcaaagggagctagtggaccattcttcctgttctcggtattcaaaggaaattggtggatcaaactctacatcatgtcctggcgtggcggagctccacaaaaattaacgcctaaggtcattttatgaaatttgaaggtcacttaaaaagctctgtaacatagtgtgtggctaactataccgttaaaatgagcctacacatcactcgttctagaggaagggtggtttagtgtcgatgaactagtctgtgtcaaaggcgtangagtnggactgtgggagatagatgtaccatgggtcatcgtcgcatggacacgacccat

SEQ ID NO: 65500 - DNA, 184 bp, Zea mays
ctacatcgactaggtcctcaatcgactcatatggatactctacaccgatactctcttcttctgcgagtcacccgcccagtctcagctttatcattacaaacccaaagtttgatacctggcagaggcacatcttctctgatgttgaatccatcatggccatgatggatccaccatcgtgttttat

SEQ ID NO: 65501 - DNA, 476 bp, Zea mays
  unsure (1)..(476): unsure at all n locations
catgagagccaaaacgaccctgggtttgcggtgtttttgctgcgcgtatgcggtggaactgaggaaacaaatagtgacggcgacattcgtcttcctgatgatgtgtgtgtgccttacagtgggagtgacaacgatcttgacaacctaatagactttgctttcccaaatctcaacgaanatatgtctgattctacctacatcacttcaagggcaatactgtcaacacggaacgactgggttgatatgataaatgttaagatgattgatcgttttcaaggggagcatatggtgtaccatagtttcgatagcgccatggatgatccccacaactactacccacccgagttcctaaacacattgacgcctaatgggctaccacctcatgttttgaagctcaagattggatgtcctgttatattgctccggaatatagaccctgcanatggactntgcaatggcaccaggctggtcgttcg

SEQ ID NO: 65502 - DNA, 444 bp, Zea mays
  unsure (1)..(444): unsure at all n locations
ctaagcttcttagggagaacacgtgatagggttgactaacgtgcaattcgaaaaatatagaccttgtgcagcttgtcaagtaggtaaacaagtgggaggagcacatcacagcaagaatgtgatgaccacttcaagacccctggagctgctgcatatggacctcttcggacccgtcgcctatttgagtatatgaggaagtaagtatggtctagttattgttgatgacttttcccgcttcacttgggtattctttttgcaggataagtctgaaacccaagggaccctcaagcgcttcctcaggagagctcacaatgagtttgagctcaaggtgaagaagataaggagcgacaacgggtccgagttcaagaaccttcaagtagaggagttcattgaggangaagggatcaagcatgagttctccgctccctacacaccacagcaaaa

SEQ ID NO: 65503 - DNA, 356 bp, Zea mays
  unsure (1)..(356): unsure at all n locations
taatcacaacaaccattggatgcattgtgatattcacgtcgcaagtgaaaatacattacggatatatatatggttccagttggcccgggacacaatccaaaaccganacggatgaagttttacactatgaatacccaatatgctgaaaacaacaacgacttaaccaaaaggtagacctcacctcagatatatacaaactgaacaggtcaccatcccggttggccttgatgtctcttcttcccatgtaatacaatatatattccatttaagggctagttcgaaaacttcattttctcaaggtattcctaatgttccacaagataatattaaattctcttaagaaataaaaatattat

SEQ ID NO: 65504 - DNA, 492 bp, Zea mays
  unsure (1)..(492): unsure at all n locations
tagcgtagttagtgtatttcaacttttataattggcctaagccatgataccatgtntatcatggtcttattaccaatctctttctttctacttaattggcctaaatagggttgttctagggttttagcatttctcccattttgaatgtatgatatgatttatgcataagtcttatgacaaaataattagtggaactcttattctcaagttgattggtgtcttttgcccaatttgattcacatgaaataatagttcttgagttaacactgagaagaactctgagaattactgtggtgttacaatcatccaatagcaagcttgaatttaacttattntgaagccatccataatttaaccaacttgaataaagcacttgtattntatagaatatctactttacttattattgactcggcattgggatagaactttattaatcttcaatatttgattcaacatatgatgatgacatgaatattattgactcaacct

SEQ ID NO: 65505 - DNA, 183 bp, Zea mays
tgcatgaccagctcggccgaaccgccttagagcctgttgagaaaaaaccctctgaagttgaagagaaagcagcggaggaagaggctatagaacagactttgcctgatagagctgccgctcctgctcccgaagtcttataagaaagtctcgagcataggtaaaagaatgcgcgcgtgcgaaacg

SEQ ID NO: 65506 - DNA, 362 bp, Zea mays
atgggaggaagcttactcctgcatgatggctaaatgggtggagggaggggcggcggctatcccctgcaaggtggtcgccgaccctggagtgtgcgtcggtttggggcattatggattgcaagcgtctgtccctgatcggacgcgctggaagggagggaagggacatacctgggacattagactctcgctgggttctcattctcaaaaacaatgcattaccaacgtccatttcttcgctacctgcacaaatgttgttgcacaagtctcactctgcttagctatttaaacactatggtggtttggttaaagcttggagtatccatcgcctactcctatcttgttgttagatttgtgaacggacg

SEQ ID NO: 65507 - DNA, 440 bp, Zea mays
  unsure (1)..(440): unsure at all n locations
tacccacttatantcgactagcttgcagcccatttgtcgatctataacctcacatgttccatntgcagtgatggagtccatctcactacggattgcattcttccaacattctacatcgggcggtgcatatgcctctactatggttgtgggggtatccttgacaaggtacatagtgaagtcttcaacaaaggactttgcaatcctcggtctcttactccttggagctaactctatatcacccttcttgtttacaagtggatcttcaatttggttcaagatttaattcatttagaacactagagaaagagtaagttactttcatcagatatatatcatcatagaaagtgacttctcatgactgcatgagttaatccactacaatatcaggtgtctctgattctatctccaagatcttattattcgtgttattgtgtgcatag

SEQ ID NO: 65508 - DNA, 427 bp, Zea mays
  unsure (1)..(427): unsure at all n locations
tcttcttcattctgatgaaaaccaagccctttatcacttcatcaaatgaatgttccaactctgagatgcttgcttcaacccataaatggatctctgaagtttgcatatctctccagcattgatcggatcgacaaaaccctcgggctgtatcatatacacgtcctcatctagggttccattaaggaaagctgttntgacatccatctgccaaatctcataatcgatatatgctggcatagctagaatgattcgaatatatctaagcatcgctactgacgacattgtctcgctatattcaattacttgaactagcgaaaaccctttgcaacagttgagccttatagatgtgacattatcatccatgtattcttttcttatagatcatttgcttctatggtctacacatcggcgggtcaccaagttcaac

SEQ ID NO: 65509 - DNA, 492 bp, Zea mays
aataacttatagtgttaaagacttgctgcaagaattctggatatatccttgtaatataataatggcagaaacttatgtaaatctgtacataccttgtaatatatcttgtctcctttatccgtgtacagtctgctttgctgtgaacgaaactacacttttgagccgaaggcgacaaacaccttcccttcttttcgtacacaacgaagcatgaaaattttcctctttcttcaaaggtgttcctcattaccgaagcatctatcttatctgtgtggtatgatgatgatgatactatatatgtctaaatgaatgtttatgaatgcacatgacatgatgtaatgtatcgtgcaaatgaatatctgaacacatattcataaaccataatcatatccctttatcctcttgggaatgattcaaatcttttagcctgttactttgcggctccaccgtatacttttcggtgatcagcgccgacttttctctgtaagcctccct

SEQ ID NO: 65510 - DNA, 371 bp, Zea mays
tgaatgcgacgggatgagcttcggatggggtgggttcgtcaagttcgatgattttcctcgagccttcgatcatgcactcaaaacttacaaaatgcccgattacttcctcgggggtcattttagtatatctaggattaccacgaattaattgaacttgagtagggttaaagaaaataagagatcttagaataaccttaaccactgcgtggtcatcccactttacgctcccgaggttgcgcacttggttcaccaaggttatgagccggttgtacatgtgttgtggctccttccctttgcgaagccggaaccgaccgagctccccctcgaacgtatcccgcttggtgatacttgtgagctcatctccctcatgc

SEQ ID NO: 65511 - DNA, 343 bp, Zea mays
  unsure (1)..(343): unsure at all n locations
cactcctggaacatcgacaaccttcgcaaattttgtgttagatccacttaaggctgatttcgcccttgtaattcaccgtaaacactcttgtaccggcccgcactcttttcctcccggngggtgaggtttttaacgaggcggagccatgtaatatatgtgagaaaaatcccccgcataaacatgtgtcgaaaaaagaccgcgacaccggtcttcggcattcgaccaatcagaagtcaccgcgaggctaagcgctagccaccctcgcgtgcgacaagttcacacataaatcccctaatggtgcactcggactagcacaacaagtgcgagaaaattccgatgtcta

SEQ ID NO: 65512 - DNA, 358 bp, Zea mays
tctaaggggagaacacgtgataggattaactaatgtgcaattctataaagatagaccttgtgcagcttgtcaggcaggtaaacaagtgggaggagcacatcacagcaagaatgtgatgaccacatcaagacccttggagctgctacatatggacctcttcggacccgtcgcctatctaagcataggaggaagtaagtatggtttagttattgtggatgacttttcccgcttcacttgggtattctttgtgcaggataagtctgaaacccaaaggaccctcaagcgcttcctaaggagagctcataacgagtttgagctcaaagtgaaaaagataatgagcgacattgggttcgagttc

SEQ ID NO: 65513 - DNA, 429 bp, Zea mays
agttttggtcttaatctcttgaaatcttatggtaaatgcttaatgattcaacatgcttccataagtgcatagtctgccatgagcatcacacttttattatgacacattgcactgcacaggttctatgataaagatatgttctcattaacctaattatgtgcacttggcatttaaggccaaaatctgtattcctctcaaggcacatattctaaggggagcaatctatattatatataaccgtgtaagcttaatcgacatatccttttaatcatatctctatcctttggtacatttgcatattctctatctctattgtgccaaagctaagactaatatgcttccatgaacatctcgtgtattaagtcttagactgaaagggatatggagtattctacaaagacatcgcttccactctacaatcttcggatt

SEQ ID NO: 65514 - DNA, 181 bp, Zea mays
cactataaagcatgcctctagctaacataatatcttcatatcccaagtcatgctcattgatcttagcagataatgtaaatatgtgatcattcttttgttaacaaaagcgaggtgatcatgaatagcatctacattaacatctctacatctaatgcaaatataaacatgtgcaacggagtat

SEQ ID NO: 65515 - DNA, 215 bp, Zea mays
aacatgtgttacgtctaacacatgtaactttcgataaagatagaccttgtgcagcttgtcaagcaggttaacaagtgggaagtactcatcatagcaataatgtgatgaccacatcaagacctttggagctacttcatatggacctcttcggacccgtcgcctacctcagcatcatgggaagtaagtatggtcttgctattgttgatgatttttcc

SEQ ID NO: 65516 - DNA, 385 bp, Zea mays
tggaatacaagttgatgtggcgacctacggagaattcttactggtctgaaagtcaataagctccacagttgagcttataacactgaaattcagacttagcatagaactcgagtgaggtccattttgcaattaagtccaaaatccaatattgggcttacaagtgcacacattagtgaaccaaaagaacttatatgctttacattgtaggttttcactttataccaaggggcactgtttttgccaataagccctagcgggagatcttgtgtgttaacggtttcaatatgggttctggtgtctccaggaatgaatggaatgtaatacatcttcggtaacatttatgagtggttacttaaaccctacgggtttctcaacttgggtcatg

SEQ ID NO: 65517 - DNA, 407 bp, Zea mays
cttagcgagtgggctggtgctctgtaatcgctggaccactatcttgatacagtctcccttcgtgaggcccgaagccatgaaaggaaagttgttagtccgacacctcctgaggacgatatagatcaagagatcatagatatggagatgcttcatctacaagtacagaggaagatagacaaaatggccaggctagctgaactgcagagactgatagacgaagcctctgaaaaagttcgcgatcttgcccaagatgtgcgatctcgaagggctcatcatcaagaacttcgtcagaggtgttctgcatggaagatgacttggacgaccatctccagtatgggaatattgtttttgatgatgcctctcttctgtccgctgatctgcaggctacaccttgttctctgtctaca

SEQ ID NO: 65518 - DNA, 177 bp, Zea mays
ctgatgtagagactataggtgcctaatgtggcaagcacacagacgccatgcatgtaatgttatggtacctatgcctgcatcatagtgtagcgctggggcttctatgctggtggccaccgtatgatcagcttcatggtcgagaagatacttgacagtgttcagatggtcttgcgtatt

SEQ ID NO: 65519 - DNA, 253 bp, Zea mays
catacaacttaatatggatctaagccagatgtctcgaagtcgaatcctggtatgcacaattaaatataataattgttgctcacttctatattccacgtcagagacctaaaagaggctcgacgtgaggaggggtgctggaatataatataagtgaattgtccacctcttcctatcagcttaagcttttgggttgaattggttggtgcatgcaacttaatacaaacatgcgcatgacaaataacactcatggtgt

SEQ ID NO: 65520 - DNA, 257 bp, Zea mays
aatataaaaaatctcatatagatatttttggacgaaatgaatgtaccctcacttgtgatgtacaaaaaaaactatcccgccaatacaaggtgatacatcgaacgtaagtctcgatgtaatcggcgggcgatggtggatgagctccatcccgtagaactcgttctcaatgcgcctaaccttcacgcagaaggcttccatcttcgggccgcggcagagagagatcttcatgacatggtcgaatacaagctgcgaatcgc

SEQ ID NO: 65521 - DNA, 136 bp, Zea mays
ttaatgacatgataggggaagtgttaaataactttgagatatacctctaacaattgacacccaatgctattgctaggctcagtgtttttattctggctctccgaagccagggtatgagcgcaaatgctgaatcttt

SEQ ID NO: 65522 - DNA, 334 bp, Zea mays
tcgatatgtttgtcaataacatacatcctaattgtggtgagtcctagctatacgatttatgtactaattggcatcacacacaacctacaattaggcatcataagaaccacactagcaagacatttgagctagctccgactgccgcagtggagctattacggatcccgttggtgaatacagtatgcccagtgtctcgtatgacatatcgcctggtaatcctatagccggcattgtccacaaacgttggcttctagaggtgatatcaccggagagcagagatacctaacaatcactcactaggcacagcgcagactattctgggcctagactctta

SEQ ID NO: 65523 - DNA, 395 bp, Zea mays
  unsure (1)..(395): unsure at all n locations
gcctgaacatgtcctcagaaagcctcagctttctttcntatattgtttaagtcttccctctcggcatttgcagatgtagcagcttggtcttcaaacttagctctgtccagctggaagttttcgatcatctcgatgcatgctgtcgaattcatggaagcgttactgctgcgagctcttttggtgcggtccctcccgggtggacggcgaaagggatcactctgtgtactcacattgtccgtcttattgggaaccagttgtgaggaatgacttcagtattggatatccaagatgtccacttgacctcgttccgaagcatgtaccagcaatgaatgtatctaaatggtttcttgtggatgccttcaaacatttgcagtgcatctttgacctacaagtta

SEQ ID NO: 65524 - DNA, 462 bp, Zea mays
  unsure (1)..(462): unsure at all n locations
ngagaatggcatgccgaagcgacggaggtcgtaggctactgattgcctacatactccaggacgtagggagagtaacacaaagcggtatgcagaacctgcttcggctgattctgttgtgcttcagcctcaacaatttctttttgcttctgaatcataacttgggacgttcttgtggtatgccccttatcttcaccgcagaacaaacaaaaaaaattttgggctgatctccatattttcctccgaagcttcttccccctctgcctcttggagccggtggcctaaaagagctttgttgtactcctgacgactaagagttgtgttgttgcctttgggtatggtttcgcctgtcgtcacttgacctggcattatggattgacctgacatgcctagggtggaatcttcctccgaagcccctggccatctcagagtatcagtaggcttcttcccttctttgtcgaaagt

SEQ ID NO: 65525 - DNA, 437 bp, Zea mays
agtcaaacacattaaactcttacccttgaacaagtgagaagaatacatctgaaaggtggctccaaacattgcatgtacataaaaactgcgggtgttgcacattgatatcatgatgttccatgttcttttgcaaatctaaggctaacagacggctcatcttaacagcataacacgcatttgtacataagatattatagtattatatgcttccgttgcaacacacgggcactcacctatttagtacataatactgctaatctgttattattacgatgcccgtacgatgtgacgacatacaatcatacttgatgacagcatgtttgttacgtatagacacacaccaaggtgtgcataaccctgtcatgaagctcacttctctctcttaacaaggacaactctattgagtggtttcgttaatgtcttcttgttcactcctc

SEQ ID NO: 65526 - DNA, 429 bp, Zea mays
  unsure (1)..(429): unsure at all n locations
tgttgtgggctgganaagtgatagtgcagcttaatacactgtttctgttgtcgcttctgttcgatgcagggctttcatgtagatttctttgctttatcttgtctccggctctcggcaacggttttcaacggctctgccattagtttttgtgccttgtattcgtattagcaaaggggacggacccatgtttcttgggtatttcccttggccatggccactttcccagctgtgttgtgtgacacgaacttgagccgcgttgacacatactgggaaaaaaatggcccggcatagatgagttgagcttcacacgactcatgccagactatagtaatacaatagatcccgtctagtattataacactttggcttgctcggttagctagaaataatcatctcagaactgttccagcttatcanatgttatatgaa

SEQ ID NO: 65527 - DNA, 473 bp, Zea mays
  unsure (1)..(473): unsure at all n locations
tgcacaactcacattcattgcaatgagcagaggcttgactccatccacactcagcatcaactccatttctgagtgccataattgtgttcgagaatcattagtgattagtgctttggagagacaaacgagagtgtgacattgtgatcttttgttgctctttgttgcttggcttcttgatcatgctttcttcatctccttctaaactctcaagtgactttgaaagctagcatgagacacctaattgtgtggtgatccttgcagggtctaagtgacccttgatattaagaagaagcactcaaccggtctaagtgaccgtttgagagagggaaagggtcgaaagagacctgacctacatggtcttctcaactgggagtaggttctttggaaccgaacctcaagaaacanatcaccggattcatttgtgttgtcattaccttgcgagttgntctttctattccctctctatagatctc

SEQ ID NO: 65528 - DNA, 450 bp, Zea mays
  unsure (1)..(450): unsure at all n locations
agttctcttctccctacacaccataacaatatggtgtatnggagaggaagaataaaacgctacttgacatggcgaggaccatgcttgatgagtataagacttcggaccggtattgggcggaagcaatcaacaccgcttgctacgccatcaaccgcctctaccttcactgaatcctcaagaagacatcatatgaactcctcaccggtaaaaatcccaatgtttgatattttagagtctttggtagcaaatgtttcattcttgttaaaagaggtagaacatctaaatttgctcctaagactgtagaagggcttntacttgggtatgactcacacacaagggcatataaggtctttaacaagtccactgaactagttgaagtctcttgtgacattgtgcttgatgagactaactgctctcaaatagagcaagttgatcttaacgagctagacg

SEQ ID NO: 65529 - DNA, 471 bp, Zea mays
ggacttcagttgcacaaataatattgctgagtacgaagtcactttgttggagcttcggaagttgagagcaatgggaataagaagggccatcctaaaaactgattctcaagtcatttctggccatgtagacaaaagtagtgaggcaagagatccgaagcttgaaaaatatttggatacagttcgaaggttggaagcttctttcgaaggtttttctgtcaagaatatcccaagaggtgaaaatgagcatgcagatttgctagtcaaatcggcggctcaggggctccctctaccttcggaagtattttttgaaacaataaaggcaccttcggttgaacttatggagagagcagtacttgttatttctccagtacatagtgaagaatggaggactgaaattatatctttcctccaaggtaattgtctttcagatgacgaagcttacaataagagaatggaagcaaggacaagatc

SEQ ID NO: 65530 - DNA, 452 bp, Zea mays
tctcctggacaagtgctgcacttaccgctgagtgcgattctgtcacatataataataaaggagcccctggcataggtggagttaatgctgttagatctattaaatattgcttcagctcttcgaaggccttatgctggattggtccccattgaaagacttcggctgacttcagtacttcgaagaatggtaagtttctctctgctgatctggatatgaatctattgagagatgccaaccttcctgtcaatctttgagcccccttttttgtagttggtggctccatccgaagtatagcttcaatcttacttggattagcttcgattccctttgttgaaaccaagcatcctagaaatttccccttctttactccgaagacagcattttctggattcaactttaagccagcttgtctgaaactggcgaaggtctcctgcaagtcagcaatatgattc

SEQ ID NO: 65531 - DNA, 456 bp, Zea mays
  unsure (1)..(456): unsure at all n locations
tatcgaagatttncattccaacgtgggctattcggcgattccatatccaacccatggtagtcttagcaattaagcatgtgtcgagttcagctctatcaaaatctaccaagtatagctgaccctctaacacacccttaaatgctattgaatcatcacttcttctaaagacagtgacacctacatcagtaaagagaccgttgtagcccatttgacataattgagatacagaaagcaaattgtaatctaaagagtctacaagaaaaacattggaaatagtatggtcaggtgatatagcaaatttacccaatccttngaccaaaccttgatatccatcttcgaatgtgataactcgttggggatcttggtctttctcatatgaggagaacatcttcttctcctctgtcatgtggtttgtgccnccgctgtcgagtatccaacttgagcccccggatgcat

SEQ ID NO: 65532 - DNA, 472 bp, Zea mays
  unsure (1)..(472): unsure at all n locations
tcannaccttaaagctcagcanatcttggtgtgttagagctaaaaatagagggagcgggagcagatggcaagagagcgtgccaaatgagtttgcggtatgatcttatttatacgcccagtgcgtcgaaaattgaaagaccccgcttgtcagtcaatgttgctattctagcaaagggaaggtgttttttcggaccttctgcgtaaggccttcgtccatgtcgcagtctaaatttattattttaaaaaaacaaattaatattgcgaggggctactgttgggggccttcggcctacgaaggtcctcaaaaacaggatttaacaatatttctggagtataatgtgtgagcacgtatcttctgactcaaatcggtatcacagcatgagaagaccagataatacgaaggttgatacagcgccgaggatgcgaacaggaaagcttcggcatggtagcagaaaatgaaaccgacttaaag

SEQ ID NO: 65533 - DNA, 400 bp, Zea mays
  unsure (1)..(400): unsure at all n locations
tgtctatgggcaggaagcagggttgtctgtggaaataatttntaatgttgtcaggttcgccagacaaaatgatctaaccatcattgattattataattcaatgatggataatattgatgaggtgaccgacaagagggtgatagctttgggagcaatagaaaaggacaagatcatggtagccagggcctacaacaagaaggttaaagcaaagtcattttaagtatgggacctggtgtggaagactatcctgcctttaaggaataaagaccgtgaaaggatcacgatgcccaagagggggggtgaattgngcttttctaaaaatcaacactaattaaaacctaagcaagagctaaacaagagcccaacttcaccccaacaactagcactaagaatataatac

SEQ ID NO: 65534 - DNA, 459 bp, Zea mays
  unsure (1)..(459): unsure at all n locations
ccgtcgatccctcaaagctcggaaacagatcgcaatctattcgcgacgcacagcgaatacaaacagacacaaacaagcaaacacacacacatatatatatatatgcataagaatattacatcattcaaataaaaacataatagaacatgcaaaacaaaatagagcgtgttactacggtcacgcgaggaaaaagaaatgtcgaactcgaagtgtcagtctggaagatatcacgtttacgctaaataaatattaagtaaaacatttaatttgacattaccaaatataaataatatctatcatttagttcgattaatatgctatactaacaaatgtcagttaaataagtaatntaattgaaacgagatattctaagcgaggcgaatntatgatgcacgaaacagtgcacgcgaccagtgcgaatgacacgcgaatcagcatgacatcacgtgtggaacagca

SEQ ID NO: 65535 - DNA, 438 bp, Zea mays
  unsure (1)..(438): unsure at all n locations
tctaaagggagaacacgtgataggtttgactaacgtgcatttcgaataagatagaccttgtgcagcttgtcaagcaggtaaacaagtgggaggatcacatcacagcaagaatgtgatgaccacttcaagacccctggagctgctgcatatggacctcttcggacccgtcgcctatttgagtatagggggaagtaagtatggtctagttattgttgatgaattttcccgcttcacttgggtgttctttttgcaggataagtctgaaacccaagggaccctcaagcgcttcctcaggagggctcaaaatgagtttgagctcaaagtgaagaagataaggagcgacaacgggtccgagttcaagaaccttcaagtggaggaattccttgaagaggaagggatcaagcacgagttctncgctcctacacaccacaacaaaat

SEQ ID NO: 65536 - DNA, 474 bp, Zea mays
tgtcgccacgacaactccattctaccccgacgtcctcttcatcggttggagagtggaatcgtcccccatctccgacgacgaactgactgtgccaggggaagaacctcctcagcgggaagctcgccgatgaatgaaccgacgccgtaacgcccggcgacatcatgaagccggagaacgagatccggtgcagcctgtatcacgagacgagatctcagaggtgggagaaactccagatgaacgagtcttcagggaaaggaggaactcccaccgacgtgatcgtcggcaagctcaagagcaagccgagcaggaagcaagacagcgtcgagagaaccctctctttggacgaaacctaaaccccgacttcgcccgagccatgaacacaccgagcaagggggtggagtattggctcagatagccgatggcctcccccggactgcagacgccgaaggctatcaacggctgctcactcgggca

SEQ ID NO: 65537 - DNA, 460 bp, Zea mays
  unsure (1)..(460): unsure at all n locations
tctaaagggagaacacgtgataggtctaaccaatgttactttcgaaaaagatagaccttgtgcagcttgtcaagcagggaaacaggtgggaagctctcatcatgccaaaaatgtgatgacaacatcaagacccctggagttacttcatatggacctcttcggacccgtcgcctatctgagcataggagaaagtaagtatggtcttgttatagttgatgatttttcccgcttcacttgggtattctttttgcaggataaatctgaaacccaagggaccctcaagcgcttcctaaggagagctcaaaacgagtttgagctcaaggtgaagaagataaggagcgacaatgggttcgagttcaagaaccttcaagtggaggagtatcttgaggaggaaggaatcaagcacgagttctccgctccctacacaccacagcanaatggtgtggtagagaggaagaac

SEQ ID NO: 65538 - DNA, 494 bp, Zea mays
  unsure (1)..(494): unsure at all n locations
gacctatgaatactcagcttgaaaagttgaggttgcctcgactntatcttttggtgcagatgttgatcctagggcaatagatcttgccatgagaatcgccgaaaggatgttcctcaaaatgaaggaagatggggcgaagaacaagattgaagaagaagaaaatgatcgatggagaccaaacgacgaatccacctcttcataaggttcgtctttcaaatccacttatcatatgtgctttgtcgctaatgggagtgacagtgaaagaaaaagtgaggatgaggatgaaaatgaaagtgatagtgaagacgagaatgatcttcaaaaattcttcgctcaactaagcaagaagaatcggaggagcttgctcaaactcatganaagagcggaagaacaaaaggagatgcttcataagcaagaagatatcctcatcgaaaaaatgaaagacttggagaagttgaccaaagagcatgagaagctaaagtgctctcatgatg

SEQ ID NO: 65539 - DNA, 428 bp, Zea mays
tgtgaagattcttcattccaacatgtactagtcggcgattccagagccagcccatgttagtcttagcaattaagcaagtgtcgagttcagctctatcaaaatctaccactacaaaataaacccccctatagcaacgtatacctagcaacgtacaattatatgcgttggaagtgattatgttccaacgcttggtatgtgttgcaacttatatctgttgaattacaatggtactggcaacatttaacatgcgttgcaaattgtatgcgtagagtaaatacgatcatagcaacgattaccatgtgttgcagccgtatgcgtagagtaactagaatgcttgtaacgtttatatgcgttgcaaaccgcatctgtagattaattatggtactttagcaattatgcaattgtgcctcttatttttaactaaagca

SEQ ID NO: 65540 - DNA, 434 bp, Zea mays
  unsure (1)..(434): unsure at all n locations
tctaaagggagaacatgtgataggtttgactaacgtgctattcaaaaaagatagaccttgtgcagcttgtcaggcaggtaaacaggtaggaggagcgcatcacagcaagaatgtgatgaccacctcaagacctctggagctgctgcatatggacctcttcggacccgtcgcctatctgagtatatgaggaagtaagtacggtctagttattgttgatgacttttcccgcttcacttgggtattctttttgcaggataagtctgaaacccaagggaccctcaagcgcttcctcaggagagctcanaatgagtttgagctcaaagtgaagaagataaggagcgacaacgggtccgagttcaagaaccttcaagtggaggagttccttgaagaggaagggatcaagcacgagttctccgctccctacacaccacagc

SEQ ID NO: 65541 - DNA, 465 bp, Zea mays
tctgctccatctatattatggatttcttttgaatctgtttcttttctttcagcctttctagcagcttcctgacttccataaatagcaataggtccttgatccgaaggtatcttcatgcatagatatgctggatgaagaattgcttcaaaagcattgagtgtcccatgaccaatgattgcattgtaggggtactccatgtcgacaatatcaaacacaacttgctcagtccttgtattgttgacaaatccgaaggtcactggcatcgtgatcttgccaagtgctacgatctgccttccttcaaagccacaaagagggtgtgtagcatcatgattcttatcctctggctcttacatctgtctgaaggccttggcaaatataatatccgctgcactgctgaaagggaaatgtgcccttgggccatttctaagtattttggtgattagtgtccaacacaagtgcctaagt

SEQ ID NO: 65542 - DNA, 444 bp, Zea mays
  unsure (1)..(444): unsure at all n locations
tgcggtcgccttcgtgtgtacataacgcacatgtctgtttggaatcagccaggcgcgcggaggcagaggcggcgacaccttcgagctcgagcaactctgtaagtaggggtgtaaacggatacttattcggatatcaatttttttggtcttttttctttgattgtgaattaatagaacatagaatctgttatgcaaatttatattcttgtttttagtattgggcttgtaaagattcataaaaggtaaacctcaaatctaccatatatcttctcaaataataaatataaatttcggatacaaattgaatacggatacggatatttttttgacctttttgttgtatggagcanataatgtatgaaataatttatatacaattttattcttatttataataatgtgttttataacataagaagagattagcatcacatttcatacata

SEQ ID NO: 65543 - DNA, 379 bp, Zea mays
tctaaagggagaacacgtgataggtttaacttatcgtgctattcgaaaaagatagaccttgtgcagcttgtcaagcaggtaaacaagtgggaggagcacatcacagcaagaatgtgatgaccacctcaagacctctggagctgttgcatatggacctcttcggacccgtcgcctatctaagcataggaggaagtaagtatggtttaattattgttgatgacttttcccgcttcacttgggtgttctttttgcaggataagtctgaaacccaagggaccctcaagcgctttctcagtagagctcaaaatgagtttgagctcaacgtgaagaagataaggagcgacaacgggtccgagttcaagaaccttcaagtggagga

SEQ ID NO: 65544 - DNA, 459 bp, Zea mays
  unsure (1)..(459): unsure at all n locations
ntaagttttcttaactggagttaagttttaccctttttaccactatttagggttaagtcctttaaccagggttctatttgcaaaaacattataacaatacaacttgtttgaaatttttgcctagtgaatgcactctaggtgtgtcaaacatatgcaatgtcaatgcttatgatgccatgctcaagttttagttatagtaacaccaggggtgttacatatggcttgttaagttcttggcttccctcttgaagccaagcccatcctttattgaggggtgtctaccaatcgtgtaggcatccctagcaaattttagtttatcaaaatcacttttgctagccttaagttgggcattaaggctagccatttcatcatttaactttgcaatagaagctatgtgttcactacaagtatcaatatctaaatctttacatctattgcagataacaacattntctacac

SEQ ID NO: 65545 - DNA, 442 bp, Zea mays
  unsure (1)..(442): unsure at all n locations
tgtcaaacacattaaactcttacccttganaaagcgattttaatacatcagaaaggttgctccaaacattgcaagtacaaagaaaatatgtgtgttgcacattgatatcatgattttccatgttcttttgcaaatccaaggctaacagacggctcatcttaacagtataacacacatttgtacataagttatcatagtattatatatttccgttgcaacgcacgggcactcacctagtaaaaaatattatgcggagagcggagacaatcaataaaaatcttgagatctttttggtgaatagtttacgtgagtattgttgtgagccgtcgcaatgcacgagcaaccgactagtattttactatttgtaggttgtgactcagacaaaattatgcaacttagtttgtgaaatatacctaattactattattatacgtggatctta

SEQ ID NO: 65546 - DNA, 458 bp, Zea mays
  unsure (1)..(458): unsure at all n locations
tcatggtatgatggaccacgatatacgggaccatattgcccaatagactcgaacataatctcccaacttcttgacttgacgacatgcaatggtatcttattttcataaaaaaagtcagctacatggtcgtcaactatttgtttagcttctttccctttttgtgtagtgctctagagtggattgagacgttttggattcatgcctctctgcaactacctcttctggtgtcttgcagagcatggaagtaatcgactttgaaggcttctgagtaattggttttgttgttgcagaaacaacaaacaatttcattgtactctgagcacttttcttttttagtttgcttgcattntgtcctagaactaggttctgcagctgcaacctcttcagttgcatcttcttcttcatccacattgatcaaaggaagagccctttgattcattctaagataagaaagcata

SEQ ID NO: 65547 - DNA, 437 bp, Zea mays
  unsure (1)..(437): unsure at all n locations
tgaagccatggtaagtagcatatgcaagtaaaatgcgaattgattctagcctagctacgggtgcataggtttcaccgaaatccaaaccttcgacttgtgaataccccttggccacaagtcaggctttgttccttgtcaccacaccatgctcgtcttgcttgttgcggaagacccacttggttcctacaacattttggttatgacgtggaactaaatgccatacctcattcctagtgaagttgttgagctcctcttgcatcaccaccacccaatccgaatcttgaagtgcttcctctatcctgtgtggctcaatagaggaaacaaacgagtaatgttcacaaaaatgagcaacacgagatctagtagttaccctctgttgaatatcaccgaggatggtgttcacggngtgatctcgttggattgcttggtggactctt

SEQ ID NO: 65548 - DNA, 410 bp, Zea mays
tgatgccgctaaaagatcatctatgtgcgttacggcatgactcccatggttcatgataacgagggctatattttatatcctgttggctatctctaacacagcattatgagaattcatgctcagaaatctcattctgtttctcaccatgcttttatgtatacgaatgatgcatataactctatgcactttacacatgttacaatgcctaaccagaaaactcctactgctatcattaagcctaacatgtcctttagaactttcgatgcatcttatgttttaactaacatattatgcgaagtagatgccaaatatgccttgggcaaacacaagggctccaagacttgtgttagggacccaaggagcttgtttctaacatcaaaggacgccagactgttcgggtacctaagaac

SEQ ID NO: 65549 - DNA, 403 bp, Zea mays
  unsure (1)..(403): unsure at all n locations
tgagtcaatcattttgcanaggataattgatgctcacaatgataatttggatatgaagcacatacgggagaaaataaaggctggaacagccaagtgtttcaaggaagacgatcaaggtgtgatatggttcaataaccgcatagtagtgccgaagaatgaagaactccgccagcaaatcttagatgaagcgcatcttagtcgctattctattcatccgagaagcactaagatgtatcatgatctaaagcagcactactggtggacgaagatgaaaattgaaattgcacgctatgtggctaagtgtgacatttgcagacgtgtcaaagccatacacatgaaaactgctggtccattacaatctttgttgatcccaccatggcaatgggaagatataagtatggac

SEQ ID NO: 65550 - DNA, 424 bp, Zea mays
  unsure (1)..(424): unsure at all n locations
tgagaaggggacaatagtagcatgcacaaaaccccttcttaagaatatcaagctttccaagaaggacatgagcaaacatcaagagaagaaagccaaagctcatgacaaggtagcttcggctgaaggatcttttgcatcttcgaaggacaaggtagcttcggattgcgctaaaatctttacatgctcgcagccctttttctccaaaatggtggcaatccccctggcacccgagaaagcacatatgtctccgcggctatttaaaatttcctcaaaggcctcagcttcgtgattaatccattcgatgggaccttcggngttgcctcttgtanagttttcttcgctcgagaatgcgccgacgctggcgaagctagctttcatcttcttaacacactccatagatttatcatagcatcttttcttggac

SEQ ID NO: 65551 - DNA, 453 bp, Zea mays
  unsure (1)..(453): unsure at all n locations
ctgatatgcaataccttctaatcataatttacatctaaagttatatctcctaaaagattaaatgagaagtatcccgatatgattgtggttattccttcataaaaaacatataaaataagtattctctgaaaggatttttataaactatttcttaatgtactttttttctgatcttgtatgcatgaaggcatatttaaaagactttgcgtaaataggataatagataaaaaaattaatcaaataatatttgcatttcatgctgccatttttttgaatgatgcatttgagtcaaagttgtaacctcattntaaattcaaattcaaaatttaaacatgaattaagcttagaatctgagaataagagaaaataagaaagacaatgaaaacatatttaaataaaaagaagacctctaccactattgtgcccaaaatccctcaggccactcaaccatgc

SEQ ID NO: 65552 - DNA, 405 bp, Zea mays
tggacttgacagctggataccaccaaatcaagatggcatagtctgaggaatataaaactgctttttaaaactcatcaagggcattatcgattccatgttatgccttttggacttacaaatgccccggctacattccaatgtgcaaggaactcgattttggccccttttctcaggaaatttgccatggtttcatttatagtgattcttggactactcatcttgagcatattcggttggtgtttacaaaactgagggagtatcagttcttccttaaaaggactaaatgtgagtttggcaaaactgaactctcttatttgggccatattatttcacagaagggtgttgctgcagatccttctaaaactgaggtgatgagcaagtggcttactcctacatctgtcactg

SEQ ID NO: 65553 - DNA, 416 bp, Zea mays
ctgtgagagaagaaagggaagaggcagtactgagcaccttatagatgtgaagaaaccagagaagcaaaggggttatttatagaagggaaaggcaaccgctcacttctaaccgcggtcactgaacaatcgcaaggcattcaataagcacttccacccacccgaagacacgtcagacggcggacgccgtttcatgcaacactacacccattgggactccagtcaacagcgcgaaggatatgattacactagccgtcccatcgcattactactcagaggcaactggctaaaacactcagcgtaccaagccgtcccttgcccacacccattgtgggggggacgcccaggaattatcggtatattgttcatacggtcacatctgtgcagagcacgcagtgaatacctcaagacaaaaatga

SEQ ID NO: 65554 - DNA, 386 bp, Zea mays
  unsure (1)..(386): unsure at all n locations
tcctanagtcatatttaacaagttgctaaatatttattgtaagtaaaaaaattcctaacacaagtttagcaagttgctaaattgtgctattaagagtaaaacatacattggccttcaatagttcctaatatttagaaagtagtttagttttcaatctaggttcggcaggtctgttccggtcggatctggcaaacgacggggttgagagcagatgacgtcgagaggggaggagaaggctggtcggtgtaacctgtcggggaatggcggtccagctgcccaaccaatgggacatcgctagtccgacgatggagcagaagcttgtgtcacacttataggagctggttgcctcactaagtgggaaagggagaaaagagcgcatttggcct

SEQ ID NO: 65555 - DNA, 449 bp, Zea mays
  unsure (1)..(449): unsure at all n locations
tgagaagatatttccacccgacttcttcaatccaatgctgcatttgattcttcatctcccctatgaggcacgaatggaggggcgtgcagggacgttggtgctatccaatcgagagatgtctaaagactattcgaaagaaatgtaaaaataaatgcaaaatcgaggctttcattgcagagacatacattctataggagggaatgccaagataggagggaacatcaagagatggaggcgaggatggagacagagcangaggcccgcctggcagatcagcagaggatggcagagatgtttcaatacatgtagagccttggcaccgcatagggtttcgctccgccacctccattgttccctataattgaccctacactgttccatactcctgtgagtatcaaaattgtagntagatgttggaatgcatctggataacacatgcaatctcttct

SEQ ID NO: 65556 - DNA, 391 bp, Zea mays
tgtaccatgtgttggacagcagcgagaacgtgctgtatctgatcaaactccacctctctgttagtaccacagctaaacgctcatttggaagcatgagcaatagattggccttggtaaactgccgcagaaccaaagaagatgcctcaacatccaacttaagtgcaatcgcctttgcatatctctgcaatcggaatcaccaatgcactgataacaacaatgaacactgcattcttcaaatcatcttcagcctgcgttagaagattattccacccaatgatgcaaggcacatgagactgtactgctattccttccaaaggggtctgatcacttactggcaagacagctccatcttggacttgaccaggatccgaaccacccctctactatgaac

SEQ ID NO: 65557 - DNA, 432 bp, Zea mays
  unsure (1)..(432): unsure at all n locations
tctgcgcctccctcccgaacggaggcgggccggngcggtgaggggagcacgcctgcgctctgcgcctgcgggtagggtttctcccggcccgacgatggcgtccgccaagtcgtcgaggtcgcggcccgccggccactccggagtgttcccggtgaacgctgcggccggcgcgggaggcagcgatggcggtgtgcagctcgcggacaagctcaagatattcaagaccgacaacttcgaccccgacgcctacgtgcagtccaagtgccgcgccatggacgagaaggtgaggaatccgtccgccccgggatttcgcctccagtggtagcgggagtgccgcgtcgtctttctctcccaagtgcgacgggtacgggttctcgacgcgttttgagtagtttagtgctaatctggcgtgatcacgactgaattatagat

SEQ ID NO: 65558 - DNA, 470 bp, Zea mays
  unsure (1)..(470): unsure at all n locations
ctntgattgtagggaaagttcactgttcaatctagcgatctcggtttgagcttctgcgagtgaatcttccatcgtttgaagcacgaagtctttcttttccagggcaacttcatggtctttaatcttcttctctaagccctcaattataacttcgtttttcttgttctcaaagtcttgttgcatcctcaaggcttttcttagcagtaagctccgacaaaataaccttcatcataaaacatcatatcaaaacaataaagagttatggatagatttttaccttaaaattagaataaaacaggctaccggtgatatgttgtcgtcggtatttgctgagatcagattcgagcttcgggaaaccaacactcttcgacaaagaggtgacaacctttgcccgaactcggtcccgaaagcattctaaatattcttcagcaacacagtcgaagagcagcgcccctggctggtacccgcaa

SEQ ID NO: 65559 - DNA, 441 bp, Zea mays
tgtgagcaatacaagttcagaagggagaaagctgcttcggctgatcatccaaagcccatgctcttatgtgaggatatagcagagcagaaggtgctattgggatctcaattgtctgaagagcaggagaaaaccttgataaggtttctgttcaacaataaagatgtttttgcttggtcagctaatgatctttgtggagttaacagggatgttattgagcactcgctcaatgttgatccatccttcagacccagaaagcagaggcttcggaagatgtctgatgacaaggccgaaggtgctcggaatgaagtgaaaagactcctcagtgccggagttattagagaggtaaaatacccacaatggttggctaacactgttatggtgaagaaggccaatagtaaatggagaatggtgtatcgatttactgatctcaataaggcctgt

SEQ ID NO: 65560 - DNA, 466 bp, Zea mays
  unsure (1)..(466): unsure at all n locations
tgtgntacaagaaggaaagngggagcgctgttgtatttcttatcttgttgtggatgacatattattgattgggaatgacattcctatgctggagtccgtcaaggcttcactgaaaaagagtttttctatgaaggacttatgggaagcagcatatattttgggcataaggatctatatagataggtcgaaaaggcttatatgattaagtcaagatacgtacattgacaaggttttgaaacggttcaacatggaacagtccaagaaagggttcatacctatgtcacatggtaaacaccttatccagatgcaatgtcctgcaacggctaatgagcgggagcgcatgagtaaggtaccatacgcctcagcaattggntcaatcatgtatgccatgataagtacacgcccagatagttcatacgctataagtgctacgagtagataccaagctgatccacgtgaggatcac

SEQ ID NO: 65561 - DNA, 456 bp, Zea mays
  unsure (1)..(456): unsure at all n locations
tggccggattggttgcggggagagtcaaaagaatctcttcttggttatagctcaacctgacggttctgagttcagtgttgagaattgccttgtgttgggttaaccaattcatacccaaaattacatctatatcctggccctttagaacaatcatgttagcaggaaagttccgtcaggccattgttattggcaccccataggccacttctctagtataaatgtgtcccccaggtgaatgaattttaaatccctcctttgattcatggtatgcaatatgatgttgttccacaaacttcttgctaatgaatgtatgtgaagcaccagaatcaaaaagaataattgctgggtgactggccacgggaaacgtacccatcatcaccggctctccttccggtgtagtagccacttgagtgtaatatacacgcnnccgttttcttcgtattcttccccatagca

SEQ ID NO: 65562 - DNA, 428 bp, Zea mays
  unsure (1)..(428): unsure at all n locations
tacctataaagttntcttatgttcggagctactcaaattttctctataattctaaaaggctaagtttaggcatctttaaatgccaagtaaatccacggttggactataaatcttggatctatttttaataaacactagatgaatntaggagtctagtaaaattggtcccataattttaccatttttctagaatttcctataaatttccaagcctggcagaaaaaggaaaaaggaaaaaggaaaaagatgactagtactgggctgaattcagcccgaaccggcccacgaccaggcaatcgtgcccacgctagccaaattgcatagaggaccctaactattcaaaaaactattaaagaatccctacgtactcttcacatgtctcactgacgggtgcacatacaccactagggttatatttcttcttcaac

SEQ ID NO: 65563 - DNA, 425 bp, Zea mays
  unsure (1)..(425): unsure at all n locations
tgtggacccgtagcctatcaattgaagatgctacccagtatgtcagctgntcatgatgtgttccatgtatctcagctgcggaaatgtgttcgcctacccactaaagtgctaccggaaccggacattgagatagaaccagacttgtcctatcaagagtaccccgtcaaggtattggatcagaaagaaaggtcaacgtgggcaaagtcaatcagaatgtataaggttcagtggagtcaccattcagtagaagaagctacatgggagactgaggattttctgcgttctcgcttccccgactttctacccaaaggagtcggtacgtaacccaaaaccccaccccacctgccctttgatataattataagaaanacttagatagcaagggtagtctaagttgtggtttaacttaaaaggagttcttctga

SEQ ID NO: 65564 - DNA, 433 bp, Zea mays
  unsure (1)..(433): unsure at all n locations
tcttcaccatgtgatcacgggtatcttgagattgttggtctttgcatntcccttttagatgtgtcaagctcttctttagcctctcattttcttctttgagcttttgatatgaatcatcatttgttcctgcaaattctggctcaaaggaagatttgcttgttgacaaccaacaagcattagcacatggtaatatagtattaatttgaatacatgtgcacgaatgaggttgttgggattttaagttctctatcacaacctcatgagcaatgtttaatatgatatgattatccataagattttcatgagaacatagaagcatatcatatttatctttgaaagctagattttcaacttttagcttttctacttggtccttgagcaaggattcctattactaattggcgatacaatgtgagcgtatcttgctcaatga

SEQ ID NO: 65565 - DNA, 435 bp, Zea mays
  unsure (1)..(435): unsure at all n locations
ttaacccctgcgagaccattccccgtttctttctaaccatggtaaatgtaatatcatatgtcatattctatgcatgtttaatctacttgttctcttgtatggcgtactgcttgtttcctaatttgaatggatggatgtatgtctgcactcgcatagagaacgatccggttgaagagcccgaagaactcgcaggagaagcccctgagcagcagtcggttggtggaggcaagtgtcccttgacctatcttagtcctattcattatttaattcacctcccgctttacacatttatgcctaaggattgactagcttttgttgtccatatccttgtttacctatttgggttggattattattgtttagctntatgctattgctcanactctaatcaatgaacatgatgagattatctatgatacgctgttntcccttctc

SEQ ID NO: 65566 - DNA, 393 bp, Zea mays
  unsure (1)..(393): unsure at all n locations
ctttgaaagctgggctgcgatttcctttgagcagcttctttgtggaggtgctaaaaatattcgaaatctatctccatcaacttacccccgaggcaattataaagctgaatatcttcgtgtgggccgtgagaagccaaggtctgaagcctgacgcaaaaagcttctgcaatatacatgaattatcatatgaaacaaaaccttggggtaaggaacagtatcataacaattttggctgctacaattttgtttctcggtccgggtcaagctgccccgtgccaacctttcggaagagatggcccggagactggatgacggaatggttctatgtgaagagtgatttgacaatacgagaagatatcanaggtataattatgcgccctatttggcaaagct

SEQ ID NO: 65567 - DNA, 458 bp, Zea mays
  unsure (1)..(458): unsure at all n locations
tcggggtctntatttgtttcttcttcctaaacccctgtcgtccaattagcaatgaagtctgctaacgcctgatactgaattgaggatctatgtacatagtcaatactgaattcgttaagctctatagcccattttccaatccttccagtagcttctttgttcctcattatgtctttcagagactgtgatgaaggaacaattatgtgatatgcttgaaaataatgctgaagcttcctggaggccatcaacacagcatacaacaccttctccaattctgtatattttttctttgataaacttagaacttcggagacgaagtatactatggcctgcttcttgatttggccatcttgcttcttctgtacaagcgccgcactaactacagagtgagaagctgctacatacaggagtaatggagcccctggcgagggtggttagagtntgtagatctatcaagt

SEQ ID NO: 65568 - DNA, 360 bp, Zea mays
ctgtgtggaattgggagaggatgtgatcacttgagtgtgtctagaattgaatgctacagctcttgtcagtagttgaagtgggaaaacttggatgacttgaatgtggggtggttgggggtatttatagccccaaccaccaaactagccgtttggtggacgctgctgtcacatggcgcaccggacagtccggagcgccagccacgtcaccaggccgttgggtttcgaccgatggagctatgacttgtgggccacgcctggctgtccggtggtatacagaccatgtgcttttgattgctctgatgctcaaccttgcgacctcaccatctctgatgacgatagtactcgtgttgttcgtttcta

SEQ ID NO: 65569 - DNA, 448 bp, Zea mays
  unsure (1)..(448): unsure at all n locations
acactcagaaactaagcttgagccatggaagagctangctaaaatatgcgttttgacttttcctagctacgggtgcataggtttcaccgaaatccaaaccttcgacttgtgaataccctttggctacgagtcgagctttgttccttgtcaccacaccatgctcatcttgcttgttgcggaagacccatttggttcctacaacatattggttaggacgtggaactaaatgccagacctcattcctcgtgaaattgttgagctcctcttgcattgccaccacccaatccgaatcttggagagcttcctctaccctgtgtggctcaatagaggaaacaatagagtaatgttcacaaaaatgagcaacccgagatcgagtagtacccccttatgaatgtcgtcgaagatggttgcgaccgagtgatctcgttggattgcttggtggactctt

SEQ ID NO: 65570 - DNA, 409 bp, Zea mays
ctcaagctggagaacaagctccttcgccgcgggagctgagacgactatgctcctttcgttctccctgatgaaccctacgctcacggccatgtcgatgaaagacagcaactggtcgtagaacccatccaccgtcacaagcccaacctgcgcaggtggtggacatctatcatgaggcactggttatggaggatgccaactgcacattcccttcgaaacgagtaccaagatccatcaggatcactccgctctacctttgtcaaaacatccatgaggcaatcaacaagtcgacaaggcgtataaacaacggagagagcagaccgcatgctcccacaatatgttgcgattaaaacaactgtgggtgctaaactagactaatcatccaaaaccccagcttatcacatgggcacac

SEQ ID NO: 65571 - DNA, 399 bp, Zea mays
ctaagcttctccctgtccaattggctcgcccccccttcttttccttttctgcagaagccgggcccctctccattttccctgctcctggcgcccttcctcttctgatgtccatggcgccagcagagccccctcccttcatgggcccctgcaaatttcccttcctccctcggctcctctccttgtgcacacctgaacgcacaacagccctgcgcagcacccctgctcaagcccctctccaaacaacaccttgtcgcttctaggacagcccttccttgctctttcatggcgcaagtgtcacaaatggcacaccctacgactccgcctgctgtcctgattggaaccaggaaaacacccgcacctcccggtgttgtgtttgccaccccgctcatcgcttacccc

SEQ ID NO: 65572 - DNA, 338 bp, Zea mays
tatcaagtctactttcatatggatgcggactcatagacttatccgttctgaggccgccgcaagcattggcttcttaccgagacatttactgccttgtctgcccatggagctgagtgaccctatattggcccaatgggtcgagtatcatgatatgtccattagggacgcattctagggttggagcaggactcccataccctttgtggccatctcccatgtttataaaccccctaaccgtcaccaaaaacataacgggctgaatagattcagttaaacatttactacttgctcgcaaactcgcgtactaattcagacggccgtcatcatgtcttaggaac

SEQ ID NO: 65573 - DNA, 456 bp, Zea mays
tataagctatgcgacacggtaataaaagatttattgttctttcagatctccacataaccctaggaaagccaagccccaatccatttttattttcttaattctttttatttttcgcttacccttacacagatgacttctcacgagtcctcggaaggagggaacgcacattcccacacggacggacttgctcgagagggttttccccgcattttgtgggacgtgctgcagggagccggttatacgacacctccccagtatgcggtgcagttgttcgaggagcaccgggtaccccgctgtatggtgaggatgaccttggagcctcatcccttgcagctgggctggcgttcgttggactccgagtctttctgataccgggcttgaaacacccctggtgttactgttactataacttgagcatgacatcatcagcattagcatttcatgtgtttgaacacc

SEQ ID NO: 65574 - DNA, 459 bp, Zea mays
  unsure (1)..(459): unsure at all n locations
taatcccannaaatgtgttttcggagtaccattaggaatgttgttctggtttattggcagccaccgagggattgaagccaatccagaatagatcgaggctatcatgaggatggaagcaccacgatcacagaagaaagttcaaagacttaccagatgtatggcagctctgagcagattcatatcaaggcttggagagaaaggcttaccattctataagtttctcaagaaggtagacaaattccagtggacttcagaagcacaagaagctctggatgcgctgaaaaaattcttgacaacaccaccagtgctgaaaccgccgcgccgagccacgccggctcaacagtcacgtctcgacgcgacttcgtcaccgtccatcgatctagaggtaccgtccgtttccaccctgtgcctttatattagcttcatccaccagcgacccacttcttgagcgctttgtaa

SEQ ID NO: 65575 - DNA, 464 bp, Zea mays
tgacgtcgtcgatggcagcgtccaccctctgtcgccagtctttcagctcgggagccgaggtctccaacgcccccaagcgttcccccttggtgatcgccatctccgagaaccgctgctcccacttggcgtccagcgccgaaatcttctttctccatctcatccaggatgggcttggtgctgtcgtccatgaaggcgtggcggcgttgggatcgagtgaagtagccgtgacaaggaggaacaagctccagatcggccaaggatcgaacgaatccgataccaaattgttaacagaattgaggtagagaagcttggataggagaaggggaaggtggtattgagttggaagagttcaaatgaatacaggtttgtatgtttttttttttgataaccctgatctcaccaactggatgccttataacccctgtctccacacgcgcgcacagtgcacctgctggagcacacac

SEQ ID NO: 65576 - DNA, 451 bp, Zea mays
  unsure (1)..(451): unsure at all n locations
tcttcgccagtccgagcagatcgaacgagaatatcaatttttcttgaaaaactcgaagccgaagctcagcagaattcagatctgagaaaactactgacaaatcttcaagaagaatgcctggaatttagcaacaagtgcattccacgattaagaaagattttttactcggttggagctagcagcgaaaaatttaccccctcagctgaagatctaccgaaaacctttgaacacattgagggggagaaggacgagctcgacgaagtcatagctgggcatggtgacttctgtgcctgggtggcttctcgagggaccgctgctgcatttctgaaggccggctgcgaacacggaaaaattgtcaacaggcccaactacaccctatctccatcaatcctggatgatatgcccgacctcgcccgaagcatcctccatagatntatgataatgatatgga

SEQ ID NO: 65577 - DNA, 368 bp, Zea mays
  unsure (1)..(368): unsure at all n locations
ntgtggtaaaaataactccctgagctacgactaaggcctatcttgntnnatatctatgcattatactgaacagctggctttaatttgaagcgaacagccttaacggaagctatagacaaaacaagcagagagaagtagtatatgaaaggatgtgcccaccaacaaccatggcggtgacaggcaaagactgttatggcatgtggcaggtaaaggatgcagggatcggacttcacttcagttcttcaccatggttaattaataatagtccatgcaaaggactgctctgcttcatttcaaccgcacgccaaacttgatctcatcgtcacctgtagctgtcaagccaaggacatcttttgctttcgatgatc

SEQ ID NO: 65578 - DNA, 458 bp, Zea mays
  unsure (1)..(458): unsure at all n locations
ngaagccatggtaagtagcataggcaagaaaaatgcgatttgactcaagcctagctacgagtgcataggtttcaccgaaatccaaaccttcgacttgtgaatatcccttggccacaagtcgggctttgttccttgtcaccacaccatgctcatcttgtttgttgcggaagacccacttggttcctacaacattttggttaggacgtggaactaaatgtcatacctcattcctcgtgaaattgttgagctcctcttgcatcgccaacacccaatctgaatcccttaatgcatcttctaccctgtatggctcaatagaagacacaaaatagtaatgttcacaaaaatgagcaacacgagatcgagtggttacccccttttgaatatcgccgaggatggtgttcacggggtgatctcgttgtattgtttggcggactcttgggtgtagcagtcttggtctc

SEQ ID NO: 65579 - DNA, 460 bp, Zea mays
  unsure (1)..(460): unsure at all n locations
nntccagaaatcttagnttgataattttgaacttatattttaagagttatgattaaaacaaaaactactgtgttgttgtcctaaatgtgttagaagtgattgattgctctactctattgtgtttgacttgagtgattgcttgcttgttttggttttaagtgaatatgagtaacaatgatagtaactaatataatcaggttatatataagtaaatagtacacatctcactaagttagtgaactaaattggttaaggtctaatacgtagcttagcttaatccacacttagcaatgcagttatatgttcgaagaaaccaaatgataatgtcatgtctttgcctttctgctaatactactaagtaaccaacgtcattaaagtagtacaatctgtaattgtgaataaactatctcctcatgtgtgttctctggggtgtaagcttgcagtaaaaagatgtgaatga

SEQ ID NO: 65580 - DNA, 448 bp, Zea mays
tcagcttgacccccctgaggctcgtttctacctgaggcgtcccggtggcctttgtcagtaccctgaaacaggggtaccccttactacagtgtgaagacacggtgcccgcgcgactatctctagtcgcgtggtgaacagcacccgaccccaccacgtggacagctccagggccgtcacgtggccagataagacgatatattccaggatatcgacagtgggtccggaccccatggaaagtgccggacctctgtacgtatcgaccggacctccgggtaaggtccagaaccttcacgggtgtgcccggagagactggtcccggacccctatgcatggtccgggccactcacagcagtctaaacacttggcgctatccgaattgattcgattgattgctttacgaactttgtcttgtaacagtcaacagtgaactcacaaattgcattacgtc

SEQ ID NO: 65581 - DNA, 470 bp, Zea mays
  unsure (1)..(470): unsure at all n locations
ntaatgcacaatttctccccctttgtcataaatctccataaaggatacaaagaatataaagggtagaaattatgattaagcaagatgggaacacactattatgaaaagggtccttatatggcacaaaggtaatggagaagtgacataaagtgatgtacctttgcattttaccttttcaaggggagttccacacttgtgttgtatttagagttcattttgcaatctcttgttggcataattgtgacataggtccaagatatcaaatgaatattgtcatactaattgaaagataactcttgatacctggagtctagatgtcacctagcattntcttatcataaaaagaggcagcatgaaaattgcacaagtatgaattatacaactagtgatcatgtatgaaaaatatcaattgaaaaacaccaattgatacaatttgatagataagcagatcactaatagcatattacact

SEQ ID NO: 65582 - DNA, 448 bp, Zea mays
gggttataaagatgttagtgcaatagaaccaagtggctatcgagcgagctcttgcgaatcacagtaatcacagagagagacaacacaagagacacagtggtttatcccgtggttcggccaagtataacacttgcctacctccacgttgtggcgtcccaatggacaagggttgtactcaacccctttcaagtgatccaatgatcaacttgaataccacgatattcttccttatagttttcttcccatttgcgaggaatctccataagttggagcctctcgcccttacaagattgatctcaaagaaagcacggagtaaggttgggaagagcaacgcacactataattaaatccacactgaaaacacgcacacaagtgagaagatgagcacacaaaacacgcgcggggagtttacaactcataaagtgttccaatctcaagaacgatgaac

SEQ ID NO: 65583 - DNA, 439 bp, Zea mays
tcagcttctccgcttatccaatcaataaccaccctcaggtgtcacttttaatgaaattctcttcggaagaatatgcacccaccttggcaaaactggttttcaattttcttacgcaatccagggatttctcaaagcatatgtccttagattcgcgaagctcctcaatatttttctccagcctagtgttcgaccattcacttatttcttgcttcacttttgcaagttcaaaattttcattcgcttcggcaaattttttccgaaggtcttcaacttcggctttatgagcttcgaattgagcgttaaattttgcttcgtctttcttcactttgtccaccaatgaaagcataattctatctgtttccacggcttcatttctcagcttgataacttctgaccgaaagttgccgagggctatctgtgcagcttcatcttcagcatt

SEQ ID NO: 65584 - DNA, 450 bp, Zea mays
  unsure (1)..(450): unsure at all n locations
tgacaacatcaaannctacgttaccaacatttagatctttctcaggnttgcagcagcatgcacttcaccgtaccaatctagaaactccctgcctcctccagcacatggcaaacccaaaatcagatgaaccgtgtcctttgttatcttcagttccttgccagcccctgagcgtatggtcatgtcatgtggatccaatttatccatcaaccacctgatgagagatctgctctctaaggcatcagttcgcatatcaaatatactagaaaattccaacctagcgacagcatcgcgctgccgatcgctcattatccaagatgatacaatagcatcataaggaatgcagcggatattcaatttctggaagcatatatgaatatgcattaatacacacagtatatatatagttagaactaatgatacaactattacatacaacggataattattaca

SEQ ID NO: 65585 - DNA, 454 bp, Zea mays
  unsure (1)..(454): unsure at all n locations
cgcccttgattngctctttctttcgcttgtttcggtgggggttccaatagtgcctaggaactttttctcggtgttcaagccgcccctgttggcttagaggattttcagttagactcttacttcattgtgattgaagtgcatgactcttgttttcacgttttggagagctttgttgttgtgctcgattttccactaaggtgagtattccgttgtgttctctagtcatcaccaagaacatcctactactagttagctcgatggcatcacttgtgtgaggtttggttttttggtggctgattggtacatcgaccaattcaaatgaaattttgattggcttccattcactcctctatggtcacctattcttgtccttcaattggtatcatatcacgataaatataatatccaccttaactcgttcttgatccatgaaggaagcaatggatcanagtag

SEQ ID NO: 65586 - DNA, 456 bp, Zea mays
  unsure (1)..(456): unsure at all n locations
tgtgactntcattttgcgattattggttcagcctcgattgcatttatcaatgacccgataagagagcttaaatcactcatgcctaggactttgttttggatccctttgcaatctatagaggcaagataggtgtcgacacatttgtctcccacatttaataatgttctccgtcatttcctaaaacgaaagattcattgttccgtattcctagcacaatgatattgcgtgcattgctaggaacttcatcatcaagatgaacctcttcgtgaggcaaatcaccagcagggcaagttcatcggaggagagttatttacaaaccatgtgaatctgcaatcagaacatatgcttttgactaaggctgatggatcatattcgcaggcgtcctcacggaatagatcaaatgccaataagtcaaatgtggatatgatattaatcctgggtatatccacatctaca

SEQ ID NO: 65587 - DNA, 430 bp, Zea mays
  unsure (1)..(430): unsure at all n locations
tcaagtttagttctgatatttttgcttcagcttccgcctgtaagccttcggctgcctggagctcaaagttctttttctcaaaagcatctgattgctcttttattttgttttccaaatttccgattataatttcatgctttttatcttcaagatcttgctgcatttgcaaggctttgctcaatagcatgctctacataaacacaaccttcgtcagacatgttttattagaaacaataaaagttaagggacaagtcatttaccttgaagttggagtaaaacaaactaccaacgacatgttgtcgtcgatagcggctgatatctgcttctagcttcgggaatccaatacttttggacagagtactaataactntggcccctggttggtcccgaatacactctaatttctcgtcatcgacgcctccgaagagga

SEQ ID NO: 65588 - DNA, 445 bp, Zea mays
tatggcacatacctggccactacaacgttgggaactagacatcatcgggccattgcccacagcgcaaggcaacctaaaattcaccatcgtcgccttgaatacttcaccaagtggattgaagctagagccgtgtcgacaataacttccaagacaacacaaaaattcttctggtagaacatcgtgtgtcggtttggagtcccatcagagctaacatgtaacacccgggctttaagagataaagccgagtgcatctcatatatgcgccaaagaagacaacatatataataacatagtgtatagagataaacatcacaataatcagagtatttattacatagcggaagtcttacaaaataaaagataaatataaaaggatctaaaatccatccttggtgccataaagtcaactgtgagacgccacctagatcgaatcgaactcctcgat

SEQ ID NO: 65589 - DNA, 456 bp, Zea mays
  unsure (1)..(456): unsure at all n locations
tagcactatagacaaaaagaatgcagtactcagtcagattagagaacatctagtatgaactcttaaggactaaaggttctatttaagactaacatgacagatgtgtacatggcagatgtggaggttttctcttcaaaaaagctacagagagctctgaccttcaccgatgcagaggctgaggaacagctctccttcgaggaagacagtgcttctggaatatacaaccttggactatatgaaagttcaaggtaatcttggacacacattgaaacagaaaaaaattgctactatgacataataaccttatggtctacaattcanaaattgctctctgcagtcacaaaacgtgcaaaaacaacaaacaattcaaattatttgagagcatcatctttataatatgaaataacatatggactgcaattatcagctggacaaatatcaaatagttcaaattat

SEQ ID NO: 65590 - DNA, 453 bp, Zea mays
tgaagcaattgatacaaaagagttttctagtagtgctcccaaattccaaattgtgttgacccttctccatagtatcctcccattttgttgcctgctatggttgcggcagagaagttgaaggaccaacattcttgttgtgacaagggcagcagcaatatggatctgagcatacatgcacctgtgaaccacctccattgttgttgtctatgtcttcgtcctcatttatgttgattacttccctctctagatcaaatatcctattctgtaggtaggatatgtattctgcatgcgaaaaaattggacgaggatctacccaacgagtgaacccataattctccttgaccaatgaatgttgtataaatgcttatagttagtttcactcaacaacaaaatcatatagaacaaagggatagaattaatatttacatgtgcataagaacatctaaagaccca

SEQ ID NO: 65591 - DNA, 473 bp, Zea mays
  unsure (1)..(473): unsure at all n locations
tctaaagggagaacacattntgggactaaccactgttcattntgagaaagacagagtttgtagcgcatgtcaagcaggaaagcaagttggtacccaccatccacacaagaacatcatgacaacagatagggcactggagctactccacatggatctatttggcccgatagcttacataagcatcggcgggagtaagtactgtctagtaattgtggatgattattctcgcttcacttgggtgtttttttgcaggaaaaatcacaaacccaagagaccttaaagggattcttgagacaggctcaaaatgtgttcggattgagaatcaagaaaataagaagcaacaatgggacggagttcaagaactcacaaatagaatgctttcttgaggaggagggcatcaagcatgagttctcttctccatacacacctcaacanaatggtgtagtggagaggaagaatataactctactgga

SEQ ID NO: 65592 - DNA, 456 bp, Zea mays
  unsure (1)..(456): unsure at all n locations
tctctttntgttgaacaatgaagagatcgaaataatgctatatagaacaatttggtatataatatgaggagaaatgtttgccctgctggcaacaccaaaaattaattattgttataagttctctctcaaaattataatacctaaaaatattgcataaattgatacccaatttcaaaatggtatgagtaattgggtaacccatgggcaatgataaaaacgagttggactatacatctctgcatataaaaatctctgcttggcagcattggcaggataccgtgcactttaccaccattatatatgcgcaaactctcctatgtgcttgaaagcacaatgcaaccaatgaatgttcttgtgagcgctagacctgatggtcattgtccttgttgatctgaagtcaactacttgctccaaacgacaaatggtatgcatgagccctaaagttttttgttttat

SEQ ID NO: 65593 - DNA, 429 bp, Zea mays
  unsure (1)..(429): unsure at all n locations
tccgatatcttcttgggtaagacactattctcttcagatgggttaagatgagaatggaagcatacggtaaggattagctctaatttgcgatctatgtttttagagaaaaccttttttaagataaacaaaaagaatacacacaagctcagcaatgataagcacaaacaaatcaaatgttttgaataagggaagaatagagttttttcaaagcacggactactcagattcgagggctaagcataactactactgctcagctcctgaattgaggactatgctaaccaggacttatgagcactaacgttaaagcatcacatatgcactcaaaagaggagaaaacatcaagcgaaattcattntgagatgccctaggaggccacaattagaagttttgcaaacacgagtctacacgactacctttcatacatgc

SEQ ID NO: 65594 - DNA, 479 bp, Zea mays
  unsure (1)..(479): unsure at all n locations
tacccttgaagcctggaataagctacagaggaaccagtccagcctcatagtcaaaaggaccgaccgtgagaatcaaagcactgcccctgagtcaaagtaaacagaaaaagaggacagaaggagttattaccatacagagaggcaaagattcttggaaccagagaccacaaacatcagggtcatcgaccccaccactcacctgtgctccccgcacgcgtgccctgcctccaaccaccgccccacgccccctttgcagcgcattaccgccacccatgcccctttgcagcgcactaccgccacccacctccctttgcagcgcacccaccaccaccatcgtcgccggcaacagcccccccaccccttgtcgcacctgctgccgcgtgtcacctgctccgtcattcgcactctgcacccgagcacccncactcgcttantaaatatcccaccagctccctcaactcccatctcgctcaaagcaa

SEQ ID NO: 65595 - DNA, 405 bp, Zea mays
  unsure (1)..(405): unsure at all n locations
tagaaactcaagcttgcagcagtctcctcggtgtctgaattntcatcatttctcaaagtgtcactgctcggngcctcctttacctcatggcagctgggtggcttctcagatatatctaccatggcctgatcagatggaagcagttgctgactttcacccatctttgcattctcagcacgaggagcacatccctcacttactgatcctttactatccacaaaatcaccatcagttactcgggcagcaccatccaccattgagtcttccgaagaagaatatcctactaaagccatggttgatgccgcttgtgcaactgaagccatctttatttgtttagggtttagggtatcataagatatcataaggacattagatcagtaaaatggtctgtgttgaaggtatcat

SEQ ID NO: 65596 - DNA, 463 bp, Zea mays
tatacaataccatggtctatgtatcaatttggtacctataactgttgttgttatatatcttagccaatcaacgccacactccgctacacaatcactcacatgtttggcaaatgactttttgttgtaagctgcaacactagaacatgtggtcccacgaccattttacatcgattacatagcatttttgtcgttaccatgccattttcttattgtgctagctaataactttgtcttgcttgcatagaaccttcaccgtatgtttagggtccattgttaggcaatttaactcttaggggcacatgccactacctgttgatatagttcatcaaagttgtattgtacccaatagtgaatattagtattaaaaataataatgttgtaacttaattaaaagtcttgcattgataaagtaagatcgatgtgtcataaagactataacaaaatcttgatgtaatccaatgga

SEQ ID NO: 65597 - DNA, 407 bp, Zea mays
  unsure (1)..(407): unsure at all n locations
taagaaacatgagcttaactatcactaaacactaatgcataaacaacatatacctgctggcaatactagaaaagatcaattaggtgaccatgccaacctccggaagaaagatggtagtgactcatcatgaaacaaatgagatttgattggtggctgcaagacaaaaaagggttatgtattgctgtgttaaaactcagcatgcattcaaatgttgctgcaaataatggattgcatactgtagtgggggtcacctttactagcttcccaaattatgctattgttgtcaactaatgcagacatttcccgtcctggcatcgatctcccataggaaaattccccanagcccgaaataaatcaagcagcaaccacagaatggccattttgcataatcggcacaagacgttcat

SEQ ID NO: 65598 - DNA, 426 bp, Zea mays
  unsure (1)..(426): unsure at all n locations
tcatgaagaggaaccttcggtcatctcatacgaacagcttcagccgaaaactgcttcttcctacaagaccttcggcgacgaagcatagtcccaacagccggcgaaggcttggaccaggtcgtcccagttggagatctgccccggaggcaggtgctccagccaggctcgagcggtatcggagaggaacacggggaggttgcggatgatgaggttgtcatcgtccgttccacccaggtggcaggccagccggtagtccgcgagccacagttccggtctcgtttcccccgagtactttgtgatagtagtcggggttcggaaccgggtcgggaacggcgcccgtcgtatggcgcggctganagcctgcggaccgggtggttcgagcgagggactctgatcctccccgctgtcgtagcgtcctccacgtct

SEQ ID NO: 65599 - DNA, 466 bp, Zea mays
  unsure (1)..(466): unsure at all n locations
ctgaaaagttgaggttgcctcgactctatcttttggtgcatatattgatcctagggcaatagatcttgccatgaaaattgccgaaaggatgttcctcaaaatgaaggaagatgaggcgaagaacaagattgaagaaggtgaaaatgatcgatggagaccaaacgacgaatccacctcttcacaaggttcgtctttcaaatccacttctcatatgtgctttattgctaatgggagtgatagtgaaagcgaaagtgaggatgaggaggagcaagaaagtgatagtgaagatgaggatgatcttcaacaattcttcgctcagctaagcaagaaacatcggatgagcttgcttaaactcatgataagagcggaagaacaaaaagaaatgcttcataagcaagaagacttcctcatcagaaaaattgaagacttatagaagtngaccacagagcatgagaagctaaagtgc

SEQ ID NO: 65600 - DNA, 376 bp, Zea mays
tgtgaggaacactgtggcctctgctgttggctccctctatcatcattttgggtagagttatgaattgatctaacgtgcctcggatagaacctccccccgaagcccctggtcatttcagaaaacctgaaagcctcctcccttctttggcgaaaatcattatcggcccgaatgtactcatccatcttctggagcagcttctccaaagtttgaggaggcttcctagcgaagtactgagctgacggtcctggccgaagccccttgatcatggcttcaatgacaatttcgttgggcactgttggtgcctgtgccctcaaacgcaagaacctccggacgtacgcctgaaggtactcttcgtgatcctgggtgcactggaata

SEQ ID NO: 65601 - DNA, 456 bp, Zea mays
  unsure (1)..(456): unsure at all n locations
ntatagaggatgaaagggggcaaggcgatgggtccgaatagtatcccaatagaggtgtggaaatgccttgnggatattgctactgtttggctaaccaagttgttcaaccatatttttcgatcaaacaatatgcccgatgagtggagaagtacattagtactaatcttcaagaacaagggagatattcaaagttgtaataactattgagggattaagctcatgagcctatgaagctatgagagagagttattgagcgtcgcctgagaggaatgacacatatcaccatgaatcaattnggattcatgcctggaaggtcaaccgtggaagcaagtatcttaataagataggtcatggtgcggcataatgagcagaagaacttgcacatgattnttatcgacttggaaaggcctangataaaatacttaggaatctcatgtggtgggcatttgataaaca

SEQ ID NO: 65602 - DNA, 300 bp, Zea mays
aaaactcacttggacgcatcgattcattttcgttctttttatcgaggcgacgagaactcgcaattctcagagagttagacctggcgctacaaacagtcggagggacaagaagtgctatgcaatctccttaacacagtaccaccctcttgaaaggcccctttcaggcttatggaggagttttaactccattgactggatcccctggaaaagcagtgtgggctaaatatgtcgacctgagaaacatctatgtctgagaacgaaataacggtcaaggcatgtatctaccacaagaaagtgatt

SEQ ID NO: 65603 - DNA, 472 bp, Zea mays
  unsure (1)..(472): unsure at all n locations
tgtgaagattcttcatcccaacatgggctagtcagcgatgccagagccaacccatattagtcttagcaattaagcaagtatcgagttcagctctattaaaatcaactaagtatagctgaccctccaatactcccttaaatactactgaatcatcatttcttctaaagacagtaacacctgaatctgtaaaaagacagttgtaacccattttacacaattgggaaactgaaagcaaattgtaacctaaagaatatacaagaaaaccattggaaatagaatggtcaggtgaaatagcaattttaccgagtcctttgatcaaactttgatttccatccccgaatgtgatagctctttggggatcctcattnttctcatagaaggagaacatccttttctcccctgtcatgtgngttgtgcatccactgtctattatccaacttgatcccccagatgcataaacctacaaaacaat

SEQ ID NO: 65604 - DNA, 420 bp, Zea mays
tcaactcttcgaaccatatccagatatgtttcaagcttcggatctttatccttgcaactcttgtcaatatgacccgaaacaacctgggaatcagttttaagtatggcccttctgattcccattgcttttagcttccgaagacccaaaagcagggcttcgtactcagtaatattgtttgtacaactgagatcgagtcttgccgcataacaagttttaactttggatggtgagaccaacacagcagctgctcctgccccgaaggttccccaagacccatcgcaaaacactgtccatacttcagcatccttatttgtatcttcatcctgagcccctggcgtccagtcagcaatgaagtctgctaacgcttgggactggatcgaagatctatgcacataatcaatgcaaaattcgttgagctct

SEQ ID NO: 65605 - DNA, 415 bp, Zea mays
tagagaaatctggtatgaatctgcgataatacccagctagtccaatataactccggacttggtgaacagttgttgggggtttccactccagaatatctttgaccttgctaggatctaccgcaattcctttagccgataatacgtgccccaaaaattgaatttcttccagccagaacgcgcacttgctgaacttggcatatagctggtgttcccttaggcgcgtcaatacaatccgtaaatgctgagcatggtcttcttcattcttggaatatatcaagatatcatcaatgaagactaccacgaatttgtccagctcgggcatgaacaccgagttcatcaagtaggtgaagtgggcaggagcatttgtgagcccgagagacattaccaagtattcaaacaatccatatcgcgtagt

SEQ ID NO: 65606 - DNA, 460 bp, Zea mays
  unsure (1)..(460): unsure at all n locations
tgtcttagtgtcacacctggttntggaaggtaaatcgaatgcgaaccatgtacgtgccaggatcagaactcacgtacatagcgattacataaatgactcatcatagcacaatgtttcgaataacaatgaagaataagtaataactaggtgtatgcccgtgcgttgctacggagtcaagatataatggtaaaatacattgagatgtgaagtattatgatgccctctactctctatataaatccatggtgaagagggacctccgcacctgtcttcacagtgaaaccatgtgaagctctggcagctcccgcatgaaaagaaaggcaggattcagtttctcaatgtcgacagttgacgcctttctgtatcgtgtcctccaatgtttcattgttcactgcactctgcatagagtggacctattggaagagatactgcccatagtcaatgacagtagacactggga

SEQ ID NO: 65607 - DNA, 461 bp, Zea mays
  unsure (1)..(461): unsure at all n locations
ntgtgagagagacaagaggagtcttatattaataacctatccactatattcaatatgaatataggctaaatgacatgctatagggatccttgtagccatcagttagctctattattaaacttgctctaagaacggcagatgctatatatgcaacgggggaggaggaagcaaatcttcgttccagccttaaagtaccgttgatcatggatcggcggccccctctggatgcatgcaggtcctggcgaaataagtacgcttctttaatactctgcgcgcgtgtggtccaatccaagctctcaccctctctcgctagcagccatcgccggaggagcaaagtgcaaccgaatcggcaagccatgccatgccatgcatgacgactgccccgccagccttgaattcacaaggtgcanacanacaccaagaccccacgtcataatcattatgcactcactctcttcaca

SEQ ID NO: 65608 - DNA, 467 bp, Zea mays
tgcacccaggtacattggtccattcctggtgattgagctatgtggaccagtggcgtaccgacttcaactacccgaaacattgtctgctgtgcataatgtgttccacgtgtcacaattgaagaagtgtcttcggattcctgatcgaaccgttgaagtaactgatgttgtcctggaaccagatttaacatactcggaacatcccattcgagttctggatcaaaaggacaggattgcccgaagaaagactctcaagttctacaagatacagtggaaccagcattctgaagatgagactacttgggaaactcaagatttcttgaacaagaatttcccaggctttttagcctcttgtaaattgtaaagcctgtatgactgtttaatagagaagtaacccccacatcacccctgccttgtaccaaaattaaggaaataaaaatgtgatgtgtttcctttaccattacctaccc

SEQ ID NO: 65609 - DNA, 347 bp, Zea mays
tgctggtcacgccttctaatattttggcatctcatctggcggaattcaaccttttgccaaggcaaagggatttctggattctataattcaatatattaaggaattataaagtggcttatacatgttttaattggccttctcgtaccttttatattatggtatcttataatttccgctgaaatttaattacgaaggtttaagcttcgtaactatgctcttgtcagccttcgttcgaaaatattattctcaagagaataatgtttcatggacgaaggatgttaacatttaacatttatgttgccttgttcttaattcatagcatgttagtacaaggttccacagtatac

SEQ ID NO: 65610 - DNA, 459 bp, Zea mays
gtagtaggatgtgtattagcaacttgctttctagcttgacatgcactgcatggcttgtctttttcaaacaccacatcctttaatcctctaaccatatctttctttaataccttcttgagtgtgctcatcccaacatgtgcaagcctcctatgccagagccatccaagtgaaactttggtaaagaggcaagttcttaagtctgcatcttctgaagtgaaatccactaagtagaggtttttgtacctaaatcctttgaacaccattgattcatcatccatctttgttacaataacctctgctggagtgaataagcattgaagtccaggatcacagagttgacccattgataataaattgaagcttacaggtgcgactaagagaacatttgatattgataaatcatgtgagattgcaccttgccgagtccttgcactattcttttgaattgctccaatgtga

SEQ ID NO: 65611 - DNA, 397 bp, Zea mays
taagcgtgccgcgtatttgtgcttgaccccgtcgggtgatgtgatgactgcagcagcgcctgcccccgcatggcaccatgcgccgtcgcagtggattgtccaaactttctctgtggacgggtccggctgtgttattggcccagtccagtctacgacgaagtctgctagaacttgtgacttgatggttgtcctgcgctcgaaagtgatgtggtagccggagagttcggccgcccatttggcgatccgtaccgatgcctccggatttctgaacaattcgccgagtcccctatctgaggtgactcggaccttgaatgcttcaaaataatggcgcaatttgcgcaaagacataacaactgcataggcaatcttttccagttccgccatgttacattatgat

SEQ ID NO: 65612 - DNA, 377 bp, Zea mays
tgccttcgcctcagtatatcacccgtagtccaacttgtttgttgaacgtgccaaaggaaaaatatttacagctgtcaaaaagatgctcctcgactaaaaaagggcaggtgggctgatttgttacctgaggcggactgggcgctaaacacgactgagtgcatggcgactgggttcacccctttcctccttctatatggatcggaggccatgaccccacaagaaataaaacatgggtccccgcgaacagtttcgtcagctgtacccgacgtggacgaacccacttcgaaggatctcatcgatggagaccgagtcttcgctctacatgctctaaacaaataccaagcccatacaaaagcatggcgcgaccacgcagtcat

SEQ ID NO: 65613 - DNA, 327 bp, Zea mays
tctgcgcgtcgatccgatctccgtccgagcaggcgctgttcccttccacgggatcatccctgggaagcgcgttcagcccctcgggcgactcgacctcccagtctgctttgggacaccctccaacttccgaagggagaccctgacgttcgaagtggtctggttccgaggaacctaccacgccgtgctagggaggccatgctacgcgaagttcatggccgtccccaactacacctacctgaagctcaggatgccgggccccaacggggtcatcactgtcggccccacgtacaaacacgcgttcgaatgcgacgtggagtgcgtggagta

SEQ ID NO: 65614 - DNA, 368 bp, Zea mays
  unsure (1)..(368): unsure at all n locations
tctanagggagaacacattntgngactaacaaatgttcattttgagaaagacagggtttgtagcacatgtcaagcagggacgcaagtaggtgaccatcatccacacaagaacatcatgacgaccgacatgccgcttgagctactccacatggatttattcggcccgatcgcttacataagcatcgacaggagtaagtattgtcttgtaattgtggatgattattctcgcttcacttggatattctttttgcaggaaaaatctgaaacccaagaaattttatagggtttcttgagacgggctcaaaatgagttcggattaagaataaaaaagataagaagcgacaacgggacatagttcaataactcac

SEQ ID NO: 65615 - DNA, 297 bp, Zea mays
  unsure (1)..(297): unsure at all n locations
cttcttaaacatatctcgagtgtactaggtttggcacagaanagttcctgggcttagttgtttcacttggagccccaagaagaacttgagctcacccatcatagacatctcaaacctatttgtcatgaccctactaaattcctcacaaaatttctcatcagtactaccaagtatgatgtcatcgacatatatttggaacccaaataattcattatctactttgtgagtaaataaagtagagtccactttccctatatcaaaatcattttcaagcaagaaatccttaagacattcata

SEQ ID NO: 65616 - DNA, 267 bp, Zea mays
actatgcacgtatccaatctgactgagccggaactttatcagcttgtcagatgccctcgttcctggcgaccacgaccagcacccaacatatgacttccctagttatttatccaagaccagagccatgataagtctcatggtaacactgctttcccgggaggtcactccatgttccaatttatatgcaataatcttgtcttaccatcgggtttacaacaataatgtacacctaccatttggaacatgagtatcatatatgagtgactg

SEQ ID NO: 65617 - DNA, 448 bp, Zea mays
cttaaatactcagcttcttattatgtgcagcggaggttggagcatatatctttgcatctcccttaacttctctgctagttacgtttggtggtcagtgggccgtatgtatctatggtttacgttgggtgggtcagagctcattgggcgcatctctccatggtttatactgggcggctttaatagttcaggttattactatatctttgtcaaattaaaaatttaattgatgcaatccaataagctcaccaagatatggcattgagtcaatccagcaatctacaccaatggctctgtttgcttgagattaagaagttgttgggctgcagatgcatggtctgtcactaaatacttgcaaacaaattatctttgttgtgattgtcaagaacaatctcttgggcttttcgggactttcattcctcaagtactgtcaaaacttctttattctcag

SEQ ID NO: 65618 - DNA, 291 bp, Zea mays
ctcttcatccatgatagcggtcgcctcaatatgtgccaccatgctaggtagcgcctccttgcttcgtgttgccttgagagcgaaaagttgcggctcgttgatcggaccattcaaggcgtcgtccacatatatcgcctgagtgaatatcattcggccgctaacatatattccaagaacttcttctggcgacatcttggtgtacctgggattttcacgtatattggtcaccaagtgaggatcaagaactggaaatgaccttatcattatgcggacgaacgtttgggccgtcat

SEQ ID NO: 65619 - DNA, 361 bp, Zea mays
tctggaaaaagattgtcatcaagtgggttggttaaagatatcggcttattgattttagtattaatgtaagaaatctcgatatcccccttttgttggtgatccctaagataatgataccgaatggctatatgcttagtgcggctatgctcgacgggattgtcggccattttgattgcactctcattatcacatagcaaagggactttggttaatttgtaaccgtagtcccgcagggtttgcctcatccaaagcaattgcgcgcaacaatgtcctgcggcaatgtactcggcttcggcggtggaaagagcgaccgaattttgcttctttgatgcccaagacaccaaggatcttcccaagaact

SEQ ID NO: 65620 - DNA, 438 bp, Zea mays
  unsure (1)..(438): unsure at all n locations
tgcggganaaggtgaaagaagctgatagtaaagtatatcatatgagatcaacatcagggacgtccactccgaatccgttggcaaaatcgtttggagtagcccaaagggaatctgtcgatatggaaattaccaaatttttatgtgccaacggtattccattcaatgtgttgaggagccctcaattttcacaaatgataatggcaataaaaaatggtccaaaagattataaaggtctgtcgagtgaaaaggcaaggacaactctcctagatgcatgcaagagaagtgtggagaccgacttagcacaacttgaaagtatgtggtaagttcttaattttattgccttttcattgtatgggttttgccccaaaactcacttttaatcatgcattaagttgacacaaggtgttttcggtgtgtccgatgattgacngatattaa

SEQ ID NO: 65621 - DNA, 432 bp, Zea mays
  unsure (1)..(432): unsure at all n locations
cggatattcttcatcagaactctatggatattgttgtgataaatgaaaattcttcttcacgaagcatgaaaagaagggaaggtgttttttcgtcaaagactcaaaaacggtacgtatgtaaaatttcatgcatcgtaaagaattgaaccataaaaaacaagtatattacattcatggttacaaggtattacacatattacatttcagatgtttttacaatagtacctagtcttccctaagtactacatccgcagcttcgttcaagagttgattgacaacttgatccatgatagcttcagccatctttttaatttcatcgtcatctttcgggtgagggcccggagacgctctagtaggatctgaaggaggacaggatatggctacattgctattacnaattgtgaacgaagttaatatcaaaattacacacaa

SEQ ID NO: 65622 - DNA, 344 bp, Zea mays
ttggcaccggaacaacatagaaggataatttggacattacacagtcatactaatctaacaacaactgatatcttgtaccataatttctcccaaactggctatgttagaagcttaagatcaagaattgtttacttcaactaacccacttttccctataaactaggccaggattttttctggtttaatattacatggaatacaagcgctcgagaactttctaataaatacttacaactgagggggttcatgaataaagagtattgtccatgggatgtttgctcgcataatctcataactattatgggagagcataataaaatttatacatttttaaaacaataata

SEQ ID NO: 65623 - DNA, 380 bp, Zea mays
  unsure (1)..(380): unsure at all n locations
tattctgatgatcgtgagcagtgtgtcccgtctccctatctangggaaccgggccaaacatcctctaaccctccgncccatgatccttctggcagagctcctacctcggatcagtctggggaagaacacttatgctctcacctggcgcaccacttctttgctcctcatcagcctcctgccaactggtgatctttggattggccgctctctcttttttcggtccttggtgcccacaaaggggagaatgtttattagactggcagtaccttctattnttgtaatgaacaatcggcttgaataactattgggtctatcgtatgatacatgcatggctctgaagccataaacactttatgatgtgatgagacgagctatcatta

SEQ ID NO: 65624 - DNA, 200 bp, Zea mays
tcctcaacacgcagaagcgggtcttatcaagtggcttaagggaaatattcgctaattgaacctccgacctcaactcttcttaaatgatatctgctgtagcaacacgatcctcttaggaagagatgaccgatatcaatgtgcttggcgccaaagagttgcacaggattactatcaattttacaacactctcattatcacac

SEQ ID NO: 65625 - DNA, 453 bp, Zea mays
  unsure (1)..(453): unsure at all n locations
tcttcaccatgtcatcacggntatcttgagaaggttgagtcttgcatttccctttcagatatgtcaagctcgttcttagcctctcattntcttccttgagctcttgatatgtaatatcatctattcctggagattctagctcacagaaggatttgcttgctggcgagcaacaagcattagcacatggcaatatagtttcaatttgaacacatgtgcatgagtgaggttgttgagattttatagtttctattacaacctcatgagcaatatttaaaatgatatgatcatccataagattttcatgagaacatagaagcatatcatgtttagggtgtgtgtgggatggctccaagtttcaactccagtgtgaagctgtagtgtataatatcaatntaaataggtttaaaaatatttttaatctaaataatatacaaaatgacttatctaagtgtc

SEQ ID NO: 65626 - DNA, 373 bp, Zea mays
actcagcttggatacagctgacaaacccgtagcctctgtaataatttactcaaatgctcttcacactcttgctcattctgggaatatatgaggatatcatcaatgaacaccactatgaacttgttgaggtagtccatgaacacactattcagaccgaaggacatgatggtgaactcataaagcccatacttggcgatgaatgttgtcttcgatatgtccgaaggctggatcctgagttgatggtaacctaacctcagatctatttttgagaacacactagctcctctcagctgatcgaacagatcttcaattctgggcaagtggtacttgttcttgatagtgacttcattcaaagctcgataattcatgcaca

SEQ ID NO: 65627 - DNA, 376 bp, Zea mays
  unsure (1)..(376): unsure at all n locations
ccttcggcgttatctgttcttttattggaacgagagatttagtacaagagcatattgccttccgggtatggccgctcgcggagaaatgggaaatgccgcaagaaaccatataagagggcgacgaaggtggacttgtcagactgaagtacaccttcaagttcggagataaattcattgagccagatgatgactggttaaaaagcattgaaaatttaagtgatgagctgcttggggcttattcgaaggccgaagatactgcgatgtcagcagccttcggaggccgaanaaagaagaggctgaatcgggtatttgatgcaattgggtttgtctaccctgactattgctatccattcgaaggcagaagagaaaaacacac

SEQ ID NO: 65628 - DNA, 433 bp, Zea mays
aatctcaatccttgctattgcttctttatgcaggactctttgctataattggaattttagtgcataaaaagaattttaccatgcttcaggtgacaaaaggttcttctcatgcagaagatcgaatttcgctaggattgaaacatctgctctatgtgtttaattcattttcttgcagacatggcctgtgcgttctttacctatctatcgctctactggtatacatgatttaatcagccaatgctaatctaacggtgaatccattaaaaaatctatgtagcgctgatctctttcattgttaatactatttaatttctctcgaaatacaacgccagggagtggagcagattcgttctgctctggaaatggctccatgtaatcattcaggatactctggccttgcttctgcattgctgcatgggcaaagatttgtgta

SEQ ID NO: 65629 - DNA, 215 bp, Zea mays
aggctagagccagacgccagcggccggtgtattattcacgaattctcctaccagacgagggcaactgggaaggagcagtaccacaacaacctcgagcgctacaacttcgtgccgcactctgatgcaagacatcccgagccaacatttcggaagaaatgggcgagctcttggatgaaacaaagagttcatgtgaagaatgatctgggtgagaggga

SEQ ID NO: 65630 - DNA, 376 bp, Zea mays
cggacctataaaactcagcttatgcaactgctgccagaaatgagaggtgaactgtgtttctctgtctgacactatcttctttggcacaccatgaagacaaatgatccgagacatatacaactctgccaatactgcactgttgtagttggtcttgacaggtatgaagtgggctgacttggtcaaacggtccaccactacccaaatagaatcgtaaccggctcgagtgcgaagcaatccgactatgaaatccataccaatttcatcccatttccactgagggatctgcaacgagtgcaacaatccagcaagtctctggtgttctgccttaattcttcgacaactatcgcacatagccacatgctcttgcgaattcctc

SEQ ID NO: 65631 - DNA, 408 bp, Zea mays
  unsure (1)..(408): unsure at all n locations
ggtctttattgttctcacacattctatggagggttcatttcatctttctcttaaagaccgaagttctacaactgttttctcccaataatttctccagcaatcactaacgtctcggtcagcttcagcaattgcacatatgaantttgcttctgctagttgtttccgaagatcttcaatttcacatttctgggcttcagcttgagcttttgaagaagctctcgcctcttttatcttggtcaccaatgaggttaatattttatctttttcaagaccctcggtccttatctcaattacttcggaatgaagggtgctcaaagctatagtaaatccttcggcttcaacactttnttgcgccctgaaggcgttgctgagaataaagccgtgccaaaagagtgcagtactaaatat

SEQ ID NO: 65632 - DNA, 428 bp, Zea mays
  unsure (1)..(428): unsure at all n locations
nggaggcgtcgatgggtgttcgacttggagtagatttcttcttttttcttccggcaccttatatgcgaccggttgtgcttcggacgagaaggggtctacaaactcgttgatcttcttcgagcctttgatcatcaattcaaagctcacaaaattcccgattacttcttcgggagtcattagtgtatatctaggattgccacgaattaattaaacttgagtagggttaaggaaaacaagtgatcttaaaataaccttaaccatttcgtggtcatcccatttcttgctcccgaggttgcgcacttggttcaccaagggtttgagccggttgtacatgtcttgtggctcctccccttggcgaagtcggaagcgaccgagctctccctcgattggttcccggcttgtgatattggcacctcgtctccttctgc

SEQ ID NO: 65633 - DNA, 380 bp, Zea mays
tagtgcaagcgtgtggaatggatagacaacgaagcttatgtgatgtatggcttgagtgaagggcaaggtggaactgatggaaaacggtatgatgcgcgcggcgactggtggcaaggctgtttggccttgcgtctgggctgaaaacgaggtgtttgccatggcgcacgggccgaatacggaggctcgggcatgaactcgaaaataagctaagttcaagcatgtggaaagacaccgaacatacagtgtatgtctttggtgaacggcacagtggaaccgagggaaaacgacactgaggctccccgtacgggcggcattgctgttcggccttgcgtttgggctgacaacgaagcgttctccatgtcgcgcgggcccgaaacaac

SEQ ID NO: 65634 - DNA, 401 bp, Zea mays
  unsure (1)..(401): unsure at all n locations
tgccgcagttgtgacagtcgccgactcgtgcctacttcttgttgccgacggcgccgccttgtgcacctacacgggcaccaccctcagcatgtactcgcgccctagcttgggcgcctccacgcggcttgacgcgtttaggagnctcgtgtcgaggatgactcccccttcttcttgtcaccctggcaagcctcccacttgcttcgagtgagatgtagcttctcgccgatagtgataggcccagagggagcctgtgggtcgtcgtcgtcgaccaccttaagacgacctatcgcctcttcgattgtcatcgtggagagggctagcacagactcgatcgagcgagcaatatgcttgtacttctcggtgatgcaacggaagagcttgtcaacagctctctcctcatc

SEQ ID NO: 65635 - DNA, 390 bp, Zea mays
cttataacgagtacactcaagagatgagggtttgtctttaataaaaggtgtagaacctgtgttatacaccaaatggtataaataaactaagccttgattcaatccctaaatgtcccaaacagagccctcaagctagataaagatctgaattcacgatttgaaatacttctaagtctgaaatcagtgtcgatgcggtcgacatctctcgttcccaaattgttgttaaacaactcgagttctcccaaatatagaagtttttattaactattgcaggcacatcatatcaaaatatggcgttcaactaaccctgtctgacatcgtttgacactcacgttctattgaattccaatgcactatcagacctattttcgcgggctataactctctaac

SEQ ID NO: 65636 - DNA, 401 bp, Zea mays
  unsure (1)..(401): unsure at all n locations
actcagcttaatccttcngaccgtgtctagatattgttcaagcttctgtattttagccttacaactcttgtcgatatgacccgaaacaacctgngaatcagttttaagaatggccctactgattcccattgcttttaacttctgaaggcccaaaagcagggcttcgtactcagtaatattggttgtacaactaaaatcgagtcttgccgcataacaagttttaactctggatggtgagaccaacacagcggctgctcctgctccgaaggttccccaagacccatcgcaaaacactgtccatactttggcatctttattcgtttcttcatcctgagcccctggcgtccagtcagcaatgaaatctgccaacgcttgagactggatccgagatctatgcacat

SEQ ID NO: 65637 - DNA, 393 bp, Zea mays
  unsure (1)..(393): unsure at all n locations
ctgatcgtggtggagaatatntttcaagtgatatttctgatttctgtgtggaacatggcattattcatgagaggacaccgccatactcaccacaatccaatggggttgcgcacctggggtgaggcgatcttgacagcgtgtcatgtcctgaataaagttcccacaaagaacaaagatatcacaccattcgaggaatgggaatagaggaaattaaatatctcctatttgcgcatctatggtttgttggctaaagtgaatgtgtcacttaacaagaaacacaaattaggaccaaaaactgttgattgtgtttccttggtatgnttttcacaacatggatataggttcttaattataaactctggagtaccggacatgttggtaggtactattatg

SEQ ID NO: 65638 - DNA, 360 bp, Zea mays
  unsure (1)..(360): unsure at all n locations
tcttggcacaacctccgcctccacctccgttacagcattgtttgcagccagaaaggagccagtatgctccacaccaaagggacttccgagagcagtccgaagctcgtacagtcaacagcaccgtgccagagtcaaagcacatctattgacaaatatcctaccctaatagcaatcttttctatccagttttgttntctgtaataaaggatattgtttaggtttcatataaatactttcgttgattcccacaaggaaaatatatttttctcaggcttaaattggttaaagttaaagacttgtgataatcaagagcaccttcggactaccgaaaattattcgaaacagcaaaaagtcgctcta

SEQ ID NO: 65639 - DNA, 430 bp, Zea mays
  unsure (1)..(430): unsure at all n locations
ggccaatacatgtcaaagcaacagcacatgccagcacagtttctacagactataccagtaactnggcctttcgcatgctggggactggatatgattggacctttcaagaaagctcaaggaggatatacccatgtattggtggcgattgacaaattcactaaatggatagagttccagcccattgcttctttaacctctgctaaagccgtggagttcatacaaagcataatattcagattcgggataccaaatagtatcatcactgacttgggatccaacttcaccagctcagaattctttgacttctgcgagcaaaagagcattcagatcaagtacgcatctgtagcacatccaagagccaacgggcaggttgagcgagccaacggaatgatattggaggcactcangaaaagagtcttcgataagaatg

SEQ ID NO: 65640 - DNA, 358 bp, Zea mays
  unsure (1)..(358): unsure at all n locations
ngcaggtatattatatctcacttgctttgtgcacgtatacatacatgcgcgcccagaattaccagcaacaagctcatgaaaaagcagcagcagaatgtaagctgtggcgtgcattacggtgttacttggctagtagctaacctggttcttcatgctgttcaagcctcgacaggtgtggcaagagctgcaggctgaggtggataaactacctgaggccagacctcaagaggggcacattctcgcaagaggaggaggacctcatcatacacctccactccttgctgggaaacaagtaagcttaattttcatgcatggatgcatggcgagcagtaatggagaacgaatctgaacgggtaca

SEQ ID NO: 65641 - DNA, 409 bp, Zea mays
  unsure (1)..(409): unsure at all n locations
ngaagaactgaagtcaaacatggtggcattagggattgtttctatctcagcaatgtcagcgggtgagactcagcagcaacggttgaccttacaacgtctcattgcattggtaatcttcaatggcaccttgacaacatttttcttatccttcaggttcctgtatttcatgtttactaatcattcttattgtgggtttaaggttgatgctgagaggttaccatcagagagttctggagatacttgaccacttggaagaagtatgtatgctaccagctttatcatttgagcatatatatatattacgctgctctgttggaacggcttttactgcaatctgaacttctgaagcatacagaatcttgtgtatatccatctgacgattatgttataatagatagatggtgtctga

SEQ ID NO: 65642 - DNA, 460 bp, Zea mays
ggtcttcttctagttgggctagctattccacgtctttctctatgttgatgggagttgatcgtcgcaaccaatttagtgtacaaataagagcttggatcatgaacgaagttatagaggatcttaaatcatataaaattcgtccacttgtactaaaaattgatttgaatgcaaccattgatataggaattgccaacacatcactaactatatgtgccaatataggaaatctagattcattcactttccaccatgtaagagtatcaaacttgttggtgtcatcttcattgttctcattaaggtatttgtcaattttagaattggtagtgcctattgaactaccgcctaccttcatatttttagcaactaatgatctcatcattcttcctcctctcttttgaagttgatcttcattgacttctggcattgaatcgtcatttagataatacatgtttctatattc

SEQ ID NO: 65643 - DNA, 457 bp, Zea mays
ttacacttcatgagctcccatcccacctttggtgagtttatgccacattattccccacaacttgctgagcgatgaacatgtgtgaactcacccttgctgtctcacaccccccacaggagaagaacaggtggttcaaaaggagccgcatatcgaggaattcgattcgatctatgaggcgtctcccagttgactttctagcgccaaggatggattatagatcctgctatatttatcttttattttgtaagtcttccgctatgtaataagtactctgattattgtgacatttatctctatacactctgtgattatatatgttgtcttctttggcgcatgtatgagatgcactcggctttgtcctgtaaaaccaggtgttacactctacctcccgctggccggtggagccggatagttcgcgcagatttcccccacgcataagctcactctgtctctctgt

SEQ ID NO: 65644 - DNA, 328 bp, Zea mays
  unsure (1)..(328): unsure at all n locations
aggatgaggtgtcatcatcatcatcatccgagctatcattcgagtcccattcaactaagtaggctttgccatctttcttcttgttatagtatttctttctcttcttgtcactttcatctttgcccttcttcttcttgcttggacaattcatggcaatgtgaccgggttccccacactcaaaacattgtctatcattgaaagcatatcttctagatgttcgacctcttcgaggttgacctcttttcatcttcatgaatttatntgaatttcttacaaataaagccatgtcaccatcactctcactttcattttcttcatcattgctatc

SEQ ID NO: 65645 - DNA, 384 bp, Zea mays
  unsure (1)..(384): unsure at all n locations
nntgtattttatggagagaacatngcctagcatttgacgagcttcgctntgctctctcgctctttctagaagtttgagcatgaccgccttatcttcttggcttaggcgagcgtagagttgcatgaagctcctttcttcctcctcatcctcatttgtgcttccgctatcattgtcattagccacacaacacatgtgggaatcgaaatgggaagacaaaccttttggagaggtggattcatcgtttggtctccatcgttcattntcttcttcttccttcaaagggttagtatcacaagtaccaaaggaagtagaagcacaaaatgaactatcatgtgtggactcatcaaatttatttttaattctagtccaaatatcatgcgcatc

SEQ ID NO: 65646 - DNA, 306 bp, Zea mays
atgcttctgtgtgaagatatatcataacacaaagtactgctggggtctcaattactaaagatcaagaaaaagatttgataatgcttttattcaacaacaaagatgtttctgcctggtcagacaacgatctctgtggtgccaacaaggatgtcaatgaatattcactcaatgtcgatccatccttcaggcccacaaagcaaaggcttcagaacatctctgatgataaagccgaatgtgctcggaatgaaataaaaagacttctcattgctcgtgtcctcacagatatgaaatatccataatggcaac

SEQ ID NO: 65647 - DNA, 464 bp, Zea mays
actcagcttggaaatcttatcccacatgggctagtcggcgatgtcatagccaacccatgttagtcttagcaattaagcatgtgtcgagttcagctctattaaaatccactaagtatagctgaccctctaacacacccttaaatgctattgaatcatcacttcttctaaagacagtgacacctatatcagtaaaaagacagttgtagcccatttgacataattgggaaacagaaagcaagttgtaatctaatgaatcaacaagaaaaacattggaaatggaatggtcaggtgaaatagcaattttacccaaacctttgaccaacccttgatttccatccccgaatgtgatagctcgttggggatctttgtttttctcatatgaggagaacatccttttctccccggcatgtggtttgtgcacccctgtcgagtatcaacttgagcccccgatgcataacctacaa

SEQ ID NO: 65648 - DNA, 348 bp, Zea mays
  unsure (1)..(348): unsure at all n locations
aaagcaggttggaactcattatccacacaagaacatnatgacgaccgacaggccacttgaactactccacatggatctattccgcccaatcgcttacataagcatcgacgggagtaagtattgacttgttattgttgatgagtatcctcgcttcacttgggcgttctttttgcacgaataatctcacacccaagaaacctttaagagattcttgagacgggctctaaatgagttcatattgagaatcaactagattaaaagcgacaatggaactggattcaagaactctcaaattgaaggatttcttgaggacgaggacatcaagcatgagatctcttctccctacac

SEQ ID NO: 65649 - DNA, 391 bp, Zea mays
agtactgaccatcaaagtgagcttgcgttgcatctaatctgccatccacatgtgtcatcatataccctaaaaccttccatccatatgagtatggaactcgtgctacatctgctggaagtaaggatccaaatatcctggaccaggatgccggaactgtccatgctaaggaggaggtggcatctgctgagctggatcattctcaggattagcagcataatcatctctaggggctccctcgtcatcagggaaagggatgagagacctggtgagaaaatcaatctcattcttgaaagggctaaatggagtgtgagctatctcacattggccctcaaatctggtttagacttaatcagagtcattatataaagagcatatgctatggtctgattct

SEQ ID NO: 65650 - DNA, 461 bp, Zea mays
  unsure (1)..(461): unsure at all n locations
ntcatccttattcttcacaaataaggctggacatccccaatgctatgtacttgggtggatgaaacccttgtctaacaactcttgcaattgcttcttcaattctgccaatagcgggtggcatccggtaaggcctcttggaaataggtgtcgctcccggttgcaactcgatggcgaattcaatatcccagtctggtggcattcctggcaattcatcaggaataacatctgcatactcatagaccactggaatcttcttcagaggtaactctatcatagcaaaagcacatgatcgagtagagtcttggctgggtagatacaatgcaaggtctccgaaggtatgagaacagatttccagagctctggcagctacatccaacaccactcggtgttgagtcatccggtcagctccgagaatgatgtccttggccgatttctcatcattccgacgtatcgactatccg

SEQ ID NO: 65651 - DNA, 316 bp, Zea mays
gcttcttaccacgtgcccgtggatatctttagagagatgagtcttgtgtcttctcctcagatgtctttgcttcttgttcccacagaatttcttttgtgaccctaaaacttgttgctcaatcaatgattggctttcttttgagcaacaggggttagcacatggtgatatacaatttaaatgcgcacacgtgcgagaatgaggttcacatgaatttaaggttgcaattataaccttatgagcaacaataagcatgatatgggcatcaacctaattattatgagaatatgacaacatatcataacctttaactaaaaca

SEQ ID NO: 65652 - DNA, 380 bp, Zea mays
  unsure (1)..(380): unsure at all n locations
actcagcctggtcatttattgctaactgtcccgacaatgatagtgtatcangatcaagggaacaagagggagaaaaagaagaactataagaaggcaaagggcgaggctcatcttggcaaggagtgggattcggactgctctttgtccgactccgacaatgaaggactcgccgccaccgccttcaacaagtcatccctcttccccaacgagcgtcacacttgcctcatggcaagggagaagaaagtaagcactcataacactagtacttatgcttcttcaagtgaggatgagtctagtgatgatgatgagatagattactcatgcttatctcagggattagatagaaccaaggtagacaaaattaatgaattaattgatgc

SEQ ID NO: 65653 - DNA, 411 bp, Zea mays
  unsure (1)..(411): unsure at all n locations
tacctgcatttgctgactccatctcgtaccaactcattgtcactgttgcctccatgctctcgtcagagtcagacaagggcaagccggccggccggccatatcgccctgcagcatccaaccaggaccgggccctgcttctcgtccctgttgtccttttcttctcccaacgaacgccaaagggattgacagttgacacgatcggtcaatatagggggctccgcgtaagcgtatgtgatgcctgacgagcgtggcgtcngggtgttttttttcttcttttttttcccttactattatttctatgtgtgtgcgatgcaagttcaccaaacaggaccagaattcattcagggaacaaaaacgaatgtctctcagcttgcccccgggccactggagctgcttactgcagaaaggcga

SEQ ID NO: 65654 - DNA, 371 bp, Zea mays
  unsure (1)..(371): unsure at all n locations
aattgcaagggatgcctacacaattggtagacacccctcaattaaggattgacttggcttcaagagagaagcccagaacttaacaagccataaggctcccattcccgccaaggagaaagggaaggcccctatggctagtaatgtgcaaaagaaccatgcttttatgtattatgataggagacaaactagaaatgcttataggaggtataatgcttttgatgattttgactctcatgccatgtttgcttctaggtcttcctatatgcatggtagaaatatgtctaggagaaatgctattcatcatgtgtctaanaagaatgctattcatgcttctatgaaagtagtgaatgaaccttccacaattattatgc

SEQ ID NO: 65655 - DNA, 415 bp, Zea mays
  unsure (1)..(415): unsure at all n locations
tgtgtgggagaatagctcttagtttagaattatttcatgcgtatagatatatttaattctatgcagccatcacttagatgtgagcactacaatcttttttataaatacgagcatggtcaatctgacataaacacactgtttttatttgtcacctgtatgtcctttgctttctaatgcttagtttgtttagcaaatacaatgaaacccctcttgcaagttcctgttcatgtttgaaatgttgtttcacagtttgacaattgatgtttagactgtcacaatgatcacaaaggcactgatggctcaatttggcacatcaattgacagtaagaaaccaatcatcacagttaacattcatacataatctcaactgaaatcaatntacagtctatattcattacaacatggctgctactac

SEQ ID NO: 65656 - DNA, 383 bp, Zea mays
ctttagaaccatagatcctagattagaacaaattatagacaagagtatcataccctctgattatgatgcttccgaggaacatcaaagatgtatacgcttaaactatctagctcttgacatcttaggtaattctcttagcgaagaagattatcatgccttcattacaaattataatgaacatattcctgatgcacatgatatttggactagaattaaaagcaaatttaatgagtccaaaaatgatgattcatttgatacttctacgtcctttagtttttgtgatactaaccctttgaaggaagaagaagacaatgaacgatggagaccaaacgatgaatccacctctccaaaagatttgtcttcccattctgattcccacatat

SEQ ID NO: 65657 - DNA, 412 bp, Zea mays
gacttacgtgcatttccaaaaagatagaccttgtgcagcttgtcaagcaggtaaacaagtggaaggagcacatcacagcaagaacgtgatgaccacttcaagacccctggagctgctgcatatggacctttttggacccgtcgcctatctgagcataagagggagtaagtacgggttaattattgctgatgatctttcccgcttcacttgggtgttctttttgcaggataagtctgaaacccaagggaccctcaagcgcttcctcaggagagctcaaaatgaggttgagctcaaagtgaagaagataatgagcgacaacggatccgagttcaagaaccttcaagtggaggagttccttgagaggaaaggatcaagcatgagttcttcgctccctacacacccacagcaaatg

SEQ ID NO: 65658 - DNA, 336 bp, Zea mays
  unsure (1)..(336): unsure at all n locations
attttgtatcttaagttcttagtatatcaaagaaaaactatacagaantggagaaggtgttatatgctgttttgatggcatccaggaagactcngcattactttcaagcatacaatattgttgttccttcttacaaccggtgaaggatattatgagaaatagagaagctactggactgattggaaaatgggctgcagagctcaatgaattttgcattgattatgtgcatagatcttcgatccagtcttcaagcgtggcagatttcattgctgacttgacgccangggctcacgatgaagaaacaaatatagatgtcgaagtatggacagtgttttg

SEQ ID NO: 65659 - DNA, 393 bp, Zea mays
  unsure (1)..(393): unsure at all n locations
acatgtgctaagcgacgatgtctcagccagcccatgctagtcttagctattaagcatgcatctagaccgacctcttcttttgcaaaatcaactaaataaagtttgccgtctaatacacccttaaaagctagtgaaccatcacttcttctaaagacagacacatctacatttgtaaatagacagttatatcccatgttgcataattgactcacagatagcagattatatccaagagactcaactaaaaacacattagatatggagtgctcattagaaattgcaattttacctaaaccttntaccttgccttgattcccatcaccgaatataattgaatcttgggaatctttattcttgacgtaggaggtgaacatcttcttctnncccgcatat

SEQ ID NO: 65660 - DNA, 419 bp, Zea mays
  unsure (1)..(419): unsure at all n locations
tcttctattctctggcaganatcactatcggctaggatgttcttattcatcttctgaagcagcctcttcaaggtctaagagggattcctggcaaagtattgagccgtaagtcttggtcgaagccctttgatcatggcctcaatgacgatttcattaggcactatgggtgcttgtgctctcagacgcaagaaccttcggacatacgcctggaggtattcttcatggtcttgcgtgcactggaacaaagcttgagcagtaactggcttcatctgacacccttggaaactggtgatcagcatgtcctctatcttttgccatgatgtgattgtgcctggacggagagaggagtaccgggtttgtgctacattcttgactgccatgacacaagatttcaccatgactgcagtgttgccccatat

SEQ ID NO: 65661 - DNA, 453 bp, Zea mays
tcctccgtgaccatatccgctcctccgcgagatctgtttacctcttctgggatatccactacgtgccaagcacgaatcacgacgaccagtgctaatccgggcacaaggtcaccaacggcgaggggggctgaatcatgagatctatctatggcactgtaccatcagaacaccattcagtgtgtctgacaaggtcatttgcaaggcattaatctctgatttatgtgtagcaattagttatcctctttgtaacaaagttcttggcctacaatccagctacaatcttgctatagtaaccatactcagacactcactggattatcttcaaaagagctcccaaagttcatcccaagtcactggtagtagaatttcagattctgaattgactaacaaccggactttagacctatttatcttccacatttttatgacaccaaaggttaatcacttaagaaa

SEQ ID NO: 65662 - DNA, 383 bp, Zea mays
  unsure (1)..(383): unsure at all n locations
cggacctataaaactcagcttagctngcattcttagcttatcatcttgccatattttacggaatgagaaaggtgcagaattcaaggagaagggtaaaagtacaagtataagtctctcactggcttaaagtggctccgaacttcgtcaccagccatctttcgcccgccgtttataccaatctgggtcataaacttgtttcctatgcttcgagctacgcttgggatgtcaaccaaatctgccggtgacaaactgaagattggcctatttacaatcttcccgtgcgtgcagccagccttcatgaaagcggtggccgtgcctcgagaagctagcagggcgcaaaaatcagcatgcccagcaataacttcgtcaagtgcatcaaactc

SEQ ID NO: 65663 - DNA, 440 bp, Zea mays
  unsure (1)..(440): unsure at all n locations
gggtggagaagttgcccgtggcagccttcagctcgtggtatgtgaaacggctcggtgtccccggtatgccgtcaaacagcggctcctcctcttccctccacttcttccataagacagcgaaacccaaaactgatgcaactgaaatacctgcaactgttgaagtaataataacaatgttcctcctttccgccgagtgtccgtcttgtatgctgaacagcgccgaaacattgtttgccgagccttctgcaaacatgatcagcttctgctctgatagaagcaagcagttaccagcgtctccaccgaagctcattccatcttcgccgaagctcaggctcctctgaaaaagaacgactctgcaggagcagtccagtaggcaagaacgcangcagagagcctgggagatgccccgggtggctgatgactggaacgtggtgtaactg

SEQ ID NO: 65664 - DNA, 381 bp, Zea mays
  unsure (1)..(381): unsure at all n locations
tatangtattctaagataactaggggctatggaggaaggcttcaccctagacatgttagaacaatccacaatcctagctcaagtgatgacagaggaaaccacgctcaatggcattagcagagctcccagacttcatggacgcaacaaagttcttacagaccaccggctccaagaagcagaggaggcaaaagctctggaggaaggttcagctcccagcccaagaggttgttctatttattctacacggaggataaaggacatacaacaaggacgtgccaagtcatgatccagaagcaaaaagagatagtcgaagccgaagcaaggcagaattaatcgaagcaagtcttgcatactccttcatgctattctccatacattctc

SEQ ID NO: 65665 - DNA, 422 bp, Zea mays
tgtcatgatggggattaaacagaaagctcagattatcttattgaggatctgcagctggtcttcaacagcctgaggcggtaccagtggaagctcaattcggaaaatgtgtccttggagtaccagccgggaagttgctcgggttcattgtcagccaccgaggaattgaagctaacccggaaaaaatcaaagctatcatgaggatggaagcaccacgatcacaaaagaaactgcagaggcttactgggtgcatggcagctttgagcaggttcatatcaaggttaggagaaaaaggcctaccattctacaaattgctcatgaaggtggacaagttctagtggacctcagaggctcatgaagctcttgatgcactgaagaagttcttgaccacaccgccagcgctaatagccgcacaccgatccatg

SEQ ID NO: 65666 - DNA, 412 bp, Zea mays
gtgctatcgatggtgctaccgaactccttttcttagtgtccccaaattccttgagaaggtcatctaggctggctatggacatttcctcggtgtcggacgagattcttatcctggtatgaggtaagtctggaggggcttcttccttctgctcagtctgacaaccttggcttttgggctctctgcgattttttcttgcggggacaagattcttcagtttcttgtcgaaatccattttcagagtgcgttaggcctcacggatattgagttcctcgccttctgctatcttgaggctcgtttgaagggacgccttttacctagcagttccctgactctttgctctatgctttccacccgggagattatgtgggtgcagtgagaggcgatgtcatcatattggttatcaagggtgtga

SEQ ID NO: 65667 - DNA, 418 bp, Zea mays
  unsure (1)..(418): unsure at all n locations
ctctcgcgagacccttntctcatttctttctaaccatgtgttgttcattatcgtatgtgatattctatgcatatttacttcatttgttctcttgtatggtgtactgtttgttccctaatttgaatggatggatgtatgtatgcttgcaatcgcatatagaacgatccggttgaagagcccgaggaactcgcaggagaagcccctgagcagcagtcgattggtggaggcaagtgtcccttgacctatctctgtcctattcattctttaattcacctcccgcatcacacatttatgcctaaagatngactagctctgttatccatgtccttgtttacctatttgagttggattattattgtttagctttatgctattgctcacactctaatccatgaacatgatgagagtatctatgata

SEQ ID NO: 65668 - DNA, 436 bp, Zea mays
  unsure (1)..(436): unsure at all n locations
tcttagggggaacacattntaggattaaccaatgttcattttgagaaagacaggatttgtagcgcatgccaagccgggaagcaagttggcactcatcatccacacaagaacatcatgactagtgacaggccactggagctcctacacatggatctattcggcccgatcgcttacataagcatcggcgggagtaagtactgtctagttattgtggatgattattctcgcttcacttgggtattctttntacaggagaaatctcaaacccaagagaccttaaaaggattcctgagacgggctcaaaatgagttcggcttaagaatcaagaaaataagaagcgacaacgggacggagttcaagaactctcaaatcgaaggctttcttgaggaggagggcatcaagcatgagttctctttctcctataccccacaacaaa

SEQ ID NO: 65669 - DNA, 455 bp, Zea mays
  unsure (1)..(455): unsure at all n locations
tggaaattcttatcccacatgggctagtcggttgtttttagccaacccatgttagtcttagcaattaagcaagtgtcgagttcagctctatcaaaatccaccaagtatagctgaccctctaacactcccttaaatgctattgaatcatcatttcttctaaagacagtgacaccaatatcagtaaaaagacagttgtagcccattttgcataattgagaaacggaaagcaaattgtaatctaaagaatctacaagaaaaacattggaaatagaatggtcaggagatatagctattttaccaagacctttgaccaaaccttgatttccatccccgaatgtaatagctcgttggggatcctggtttttctcataggaggagaacatcnttcttctccctgtcatgtggtttgtgcacccgctgtctagtatccaacttgagcccccggatgcataaac

SEQ ID NO: 65670 - DNA, 418 bp, Zea mays
  unsure (1)..(418): unsure at all n locations
actcagcttcggctggcccactctctcatagtaggaaacactctgatatccgagaattcctgcactaagtccctagtgccgatgtgctccgtgataactctaaattcagccagcgcaatttgggttggaccctctggtgtcatattacacggnggtctggtctctccgaagatcaactctaacggactctgaaccagcttctccttatcatcgtcaactttaacgtagaaccattcagatttccagccagctggccacttgcttcggtaactgatcactagaaattttgtagtcttgcggtaggcaaaattgtagcagccgaagtttttatgtaacccatctcctctagccttggtctagtaatgaagctcatgcactcggcagaaaccttcggcaaatggatccaccccttggcttc

SEQ ID NO: 65671 - DNA, 415 bp, Zea mays
tgcttggcagccgatgcgtgcagcggctgaaggatgtgtttttctctgttggagctagctctgcgaaatttacaccttcagctgaaaatctgccgagaacattagagtatattgaaggcgaagttgatgcccttgatgaagttattagtgggcacaccgacttctgcgccctggtagcttctcggggcacagctactggctttttgaaggctggctgcacgcatggaaacattgggaacagaccaaacttcagcttgtcagcttcagatttgatagatatcccaagcctagccagaagcattggaaatagattcatgacccagatctgggtaagtggcgggcaaaaaatggcaggcgacgaagctcgaagccatcttaagccggtaagaaacttatggttggtacttttaccttc

SEQ ID NO: 65672 - DNA, 449 bp, Zea mays
  unsure (1)..(449): unsure at all n locations
tctaagggagaaccacatttacgattaacacatgttcattttgagaaagacagggtttgtagcgcatgccacgcgggaaagcaagttggaacccatcatccacacaataacatcatgacgaccgacaggccactggagctcctacacatggatctattcggcccgattgcttacataagcatcggcgggagtaagtactgtctagttattgcggatgattattctcgcttcacttgggtattctttntacaggaaaaatctcacacccaagagaccttacagggattcttgagacgagctcaaaatgagttcggcttaaggatcaagacaataagaagcgacaacgggaccgagttcaagaactctcatatcgaaggctttcttgangaggagggcatcaagcatgagttnttctctcctacacgccacaacaaaatggtgtagtggag

SEQ ID NO: 65673 - DNA, 280 bp, Zea mays
  unsure (1)..(280): unsure at all n locations
tctttctgttctcctttgagggcggaggtaccaagagagcagcttgtcgagcctttaccttgtttgcttcctttttccttgtgatccgcgtccattnttccgtagaagaggtggacggcggagttcttcgggtagatggtgttggggcgaaggccaagacgccacccttcgctcgaggcctttgctgcgtcgctggtctgacagaaacaaaacgggcagggacacccttcgctctattcggcaccagacgaaggcctgcgacggcgtcattccacagtgc

SEQ ID NO: 65674 - DNA, 415 bp, Zea mays
  unsure (1)..(415): unsure at all n locations
tcagctccatctatattatggatagcttctgaatcattccaattaccttcggcccttcttgcagcttcctgacttccatggatagcaatgggtccctgatccgaaggtatcttcatgcaaagataagcagggtgaaagattgcttcgaaggcattaagagtaccacgaccaataattgcattgtaagggtattccatgtcaacaatgtcaaacacaacttgctcagttctagtgttgttgatgaatccgaaggttactgacatggtgatcttgcccagtgctacaatctgtcttcctccgaagccacagagaggatgtgtagcatcatgaatcttatcttctggctcttgcatttgtctgaaggccttagcanatatgatgtcagctgcactgcctgtgtcaaccaagacattat

SEQ ID NO: 65675 - DNA, 458 bp, Zea mays
  unsure (1)..(458): unsure at all n locations
ctcagcttctaagggagaacacgtgataggtttgactaacgtgcaattctaaaaagatagaccttgtgcagcttgtcaagcaggtaaacaagtgggaggagcgcatcacagcaagaatgtgatgaccacatcaagacccctggagctgctacatatggacctcttcggacccgtcgccgatctgagcataggaggaagtaagtatggactagttattgttgatgacttttctcgcttcacttgggtattctttttgcaggataagtctgaaacccaagggaccctcaagcgcttcctaaggagagctcanaatgagtttgagctcaaggtgaagaagataaggagcgacaacgggtctgaattcaagaatcttcaagtggaggagttccttgaggaggangggatcaagcacgagttctccgctccctacancacctcagcaaatggtgtggtagaga

SEQ ID NO: 65676 - DNA, 458 bp, Zea mays
  unsure (1)..(458): unsure at all n locations
cttgaactagctaactgtacaggatagctcctttgttcaaaggtgtatggtccttaagtctctntgaaatacttaagggtaaatgcttaagattccaacatgcttccataagtgcatagtctgtcatgagcatcacacttttattatgacacattgcacttcacagtttctgtgttaaagatatgttctcattaacctaattatgtgcacttggcatttaaggccaaaatcggtattcctcacaaggcacatatttagggggagcaatctattatatagaactgtttaagcttaattgacatatccttttaatcatgtctctttcctttggtacattngcatatttcctatctctattgtgccaaggctaagactaatatgtttccatgagcatctcgtgtataagtcttatattgaagggaaatggagtattcggcaagacatcgcttcactctaca

SEQ ID NO: 65677 - DNA, 394 bp, Zea mays
tagcagcgatctcggtctcagcgaggtccgtgggtgccgtatgataaatgggtggcttccacttccaccacacctggttcaaggcacgcaaggtgtttgtaagaatgcttatcaatggaggcggtgccagcatggcctgtgatatctcggtggacgcctcagacctctccaagcgcctctgcaagctcatcatctcctgccggaaggcatccgccctcgagcacgagctcgaccatatcagcgttcgcgttacgccggagatcgcggagagcgttctcaagcacctcgacaacgctggtatgctcgcgtaccgcttcttctagtgggcgcgcaagcagaagcgtggggtgtgtgctcataccgtgcgttcctaccacacggtggttacgtccct

SEQ ID NO: 65678 - DNA, 455 bp, Zea mays
  unsure (1)..(455): unsure at all n locations
tanagggtgccatcttgatgctntcttgatagctattattatatgaaaactccgctaagggcaaacattcatcccatttttgtgagaagtccagaacacatgcccgcagcatatcttcgagtatttgattgaccctctcagtctgtccacttgtttgagggtgataggccgaactgtggagcaatttggtacccagggatttatgaagttcttcccagaatttggatacgaactaaggtccacgatccaacactatagtcttcggaataccatgcaaactgagaatacgggcaatgtataatgctgcataggtggccactgtatactttaccctaacaggcaagaagtgggcaatctttgtaagtcgatcaacaatcacccagataaagtcatatccttttgcggtcctgngcaatcccacaatgaagtccatacttatgtcttcccattttcat

SEQ ID NO: 65679 - DNA, 224 bp, Zea mays
tccctccacagaaacccgagagcgcctgtttcagaatatgattttagtggcgcaccggacagtgcaccggactgtccggtgtgcactggacagtgactgttcactgtccggtgtgccatgagtccaacggctagctgtcagaactagccgctggaaacgaccgttggcgcaccggtggcgcacagtactgtacgttggccattttcgatgagatgcctgatacg

SEQ ID NO: 65680 - DNA, 371 bp, Zea mays
  unsure (1)..(371): unsure at all n locations
tgatgaaaccactggattggacctgtagccataggtgtcttatgtcactggaaacaacagctgaagtgggcagagaagtaatatcctgtcttatatctaattatttaaccatgtctatttgatacttgaaagcattggaaccttctcgggttctctccgctcagatgttttttcttatttgatacttgagaacattcattcaagaccaggtcccttccacatgctcttttgtttccccatttgttacatctcacttaacatatgttacatcaatgttgtacgattatgttacttanggctagtctaagaacactatttctctaaggaaaatgaactaattttcctttgtaaaatgaaagagccttacaaaa

SEQ ID NO: 65681 - DNA, 434 bp, Zea mays
actcagcttctaagggagagcacatcttgggactaactaatgttcattttgagaaagacagggtttgtagcgcatgtcaagcacggaagcaagttggtgttcatcatccacacaagaacatcatgacgaccgacaggccgctcgagctactccacatggacctattcggcccgattgcttacataagcatcggcgggagtaagtattgtcttgtaattctagatgattattctcgcttcacttgggtgttctttttgcaggaaaaatcacaaactcaagagacattaaagggattcttgagacgagctcaaaatgagttcggcttaaggatcaaaaagtttagaagcgacaacgggacgaagttcaagaactctcacatagaaggctttcttgaggaggagggcatcaagcatgagttctcttcttctacacgc

SEQ ID NO: 65682 - DNA, 382 bp, Zea mays
  unsure (1)..(382): unsure at all n locations
cagcttatctnccttgcatgttgcctcataattactagcatttctcttcttattctttctacaaaatgcaaaggaagcattgtaagcatgataaattgtacaaagttcattacttggtttcctaggtacatgagcaacatttctcctaagcatatgatgaataatatttttcctatgcatatcatgcacaatataacaactaaaagcaggcatatcatatgaatcataagaataattcctataagcatttctagagaattttctatcactataaatgaaagcatgattcttttgaacactattatccatatgggccttgcctttatcctcggcggagatgggagccttataactacgtaagntcttggcttccctcttaaag

SEQ ID NO: 65683 - DNA, 430 bp, Zea mays
  unsure (1)..(430): unsure at all n locations
tatgctctttcaagttgtatatgagccattagtctctttcttctgnctctctaaccatgtcaggcctgaaaaaccatcgttctcctggttcagaccaatttaagggtgttcgacaccgtcgcccatatagtgcttcaattggtgccattttaatgctttcttgatagctattattatataaaaactctgccaatggcagacattcatcccatttctatgggaattcaggacacatgctcgcagcatatcttcaagtatttgatttactctttcagtttgtccgcttgtttgaggatgatatgccgaactgtggagcaacttagtacctagagaattgtgagctcttccaaaattggatataactgggtccgcggccgaactattgtttggatcccggcaaccgagatccaccatgatactggcataacac

SEQ ID NO: 65684 - DNA, 420 bp, Zea mays
tacgggccatgacttctagctgctgggaggtttggacgttgaatgacagggactgaagcgagttggagtgtatggacacgttggaagcaccagccagcctgacgaaaaggtacagattcctcaggagcgggcactgttcggacacaatgttgccaagctcgctgcctgccatggtggcgcagcttatgtgcaggtcggtcagcgacatgaacgagcccgccggacagaggcggaggctccatcgtcgctcgagcgagagggtgattctcgtcgctccatcgcacactggaagctcgagctcctctttgatgggcttagacaagaagaatttcttctgggatggcacttggatatggatatcctacacacggcgctgcgaggcgaagcgtagccactggacgatgcggacccatggactcg

SEQ ID NO: 65685 - DNA, 398 bp, Zea mays
gctggacagacctaccgacgacctccaggacaccagaatgccgccactagcaccaactgctgggaggaagatgaggttgttatcaaaatctgtccctaacatggagaggatgcagcgtctagaacaaattggcattttttattcttgcaaacagactacatcaatactcattgagagaaggaatttaatcccctcatattccaaaataaaatacgcctaggatccataaagcttactgacaaaagagaacgaccacaacccacacacagactactcagcagcctagctggagcggagctggcgcctcaaggtctggcactgtccagccaaacagcgccgccaaggccctgacctgctcttgattaagcggttcaaggaacagcttggtataagcatca

SEQ ID NO: 65686 - DNA, 393 bp, Zea mays
tcacgcctttcgccttaaggtatcagaatgtcacttcaatgtctgaaaggaggtcggaggctttcctcgtcttgactatgatgtcatcgacgtatgcctcgaccgtctggccaatgtgttcgccgaacacatggttcatgcaccgctggtacgtcgcacccgcattcctcaagccgaacggcatggtgacatagcagtacatgccgaagggtttgatgaaagaagtcgcgagctggtcggactctttcatcctgatttggtgataccctgagtaggcatcgaggaaagacagggtttcgcacccagcagtggaatccacgatttgatcgatgcgaggcagagggtatggaaccttctgacatgctttgtttagaccagtgtagtctacacaca

SEQ ID NO: 65687 - DNA, 442 bp, Zea mays
  unsure (1)..(442): unsure at all n locations
cttggacacactcgagattcagttcagcttatcacccgtagacagatggtcagactaagagaaccaaccagattcttgaggatatgttgagagcttgtgctttgcaagacaagtcaggttgggacaagaggctaccgtatgcagaattctcttacaacaatagttatcaagccagtctgaagatgccaccattcgaagcactttatgggagaaattgcagaactccattgcattgggaccaatccggcgaaagacaggtgttcggtccagagattttgcttgaagccgaagagaatatcaagatggtctgggaaattctgaaggcagcacagtccagacagcgaagctatgcggataccagaagaagggaactcagttttaaagtgggagactatgtctatntaaaagtgtcgcccatcagaggaaccaatagggttggagt

SEQ ID NO: 65688 - DNA, 441 bp, Zea mays
  unsure (1)..(441): unsure at all n locations
nanaggttaatcttcacctaaaagaaagattaggaatgctcatggcaaaggtatggaactaattgcttcaattggtaattgatcaataatagttcctttcaagtggcatactttcaattagtaataatctattttatgaaaagaaatgtcaatatgaaggttaaattccttttggattaaatttgtaaattggtgcatattgttaattcactcatacatgtgcattgacttaaaaggaatttaatttatgcctttacgcctcataaatgatgatttgtttgccattcgtatatagatatcatcattcattaaatacttccttgtactactaatacctcttttcaaagtgttttatcgactagttntaaaaggaaaagagataacaaagaaggaagtctccacaatgaaaatagaagaatcttaatgaccctctcatatagt

SEQ ID NO: 65689 - DNA, 275 bp, Zea mays
  unsure (1)..(275): unsure at all n locations
tatcanagaaaaatatacagaattagagaatgtattatatgctgtgttgatggcctccaggaagcttctgcattattntcaagtatatcatataattgttccttcatcacaacttctgaaagacataatgaggaatacagaagctattagaaggatcggaaaatgggctgccgagctcaatgaattcactattgattatgtacatagatccttaattcagtcctaagcgttagcagatttcattgctgattggatgccaagggctcaagtataac

SEQ ID NO: 65690 - DNA, 432 bp, Zea mays
  unsure (1)..(432): unsure at all n locations
ntggccncacctgcaggctcgcatcctcccctgaggtgggcccgtgggccactgtcggtaccctgaaactagggtaccccttactactgtatgaagacgcagtacccacgtggctatctttagtcgcgtggtaaaggagctgtacgtgggaccaggccataactcgccccagcctcgggcgactactctgggccagcaacagcgcctgaccccatcacataggtgggtccagggccgccacatgtccagagaatgtgatatactccaagacatcaacagtgggtccggacctccatggggaagcgctagacccccggatatacagtccggacctccacatttggtccaggaacccccacgtgtacggaccggacccctggaatgggatccagacncccccccgtatggtgtctgggccacccacagtagggt

SEQ ID NO: 65691 - DNA, 419 bp, Zea mays
  unsure (1)..(419): unsure at all n locations
tgtgatntatccaatntaaaacaagcaccatctcttaacatatattgtctatggataaactcaacacaagagatgacattagtagcacaagcactagtttcttatttagcaaccctttatatgtggaaggcaagtgagttgctaaaatagagaaacctcataatatggactaaattccccttgagccctcatgcacaatatatnttggatgacatggataatatgcatggttgttcaatgaagtctaaagggctgacttaatccatattatggtgagtgtctaataaagaagaatcacatccaaattaactagatagagaatacgtcacataattttggattgttgaccatatgataagaattcattttcttctaattggaccttttattcataatcaacaactgatgtatatcctcaa

SEQ ID NO: 65692 - DNA, 441 bp, Zea mays
  unsure (1)..(441): unsure at all n locations
tcttcggccaccgaagctgaacagccaaccttgctgtcttatactgcagagatggccgaagcaccatccacagaaaaaatggaagaagcgaanaagccgactaaagaaaaaacattagaagttttgagtcctgcagtaaatattgaaacagcaaaaaaccaaaaggggccatcagtgaccccaaaaaggaaaagaatggtaaatgtactagacgtcttggagacaattaagtcttcaagcacaattccaaaaaagagtgttgaaattgctgaagcttctactgaagcttctgctcatcaagctgaagctgaagctgggccttcagagccctacaaggagcaaccttttgaagccgaagcaatacaagtttcagaaccagtattagttgaagaaactgacaccgccatcgcctgagtaccttgcagcatgcgtgattacatg

SEQ ID NO: 65693 - DNA, 329 bp, Zea mays
cgtgggttccatttatatgcctttcattacaaattattaccacgataacctcaaggctctgggtaacaatctgaacgtaagacagctgtatcttctgaggatgagcgattatgcaaacactatggtgtctgtctagcaaaaaatgcgaaaaatacatgggtattgtaccatttataggggcaacacgacgcacaactttctatgaaattacaaccattgactctaaatcctacacacatgaactaatgggcttgatgagaataacaccatcatttttcttcttaaaacatggtgcgcacgccgctcgacttcttctttacttctctgct

SEQ ID NO: 65694 - DNA, 339 bp, Zea mays
catgcaagcttggcctgcatctcgtggagtagctcgtatctgtgtgtcctgaccccccgcacggactaggaccacagcttgctcccgaaggatgtcaacgcgaggcgcaggtctagggggatcgtcgtccttcggcataccaaggtggttgccttcgtcgtgaccccctatatcgacatggaaacattctcgacttgggccacaacgcttcttgttaaggctgtggtcattatcggagcaatcggagaagccagagtcacatgctgtctttaaatctcacctggcgcttggattacccagcccggagaaatcccaaccagagtcgagctcatcgtcttt

SEQ ID NO: 65695 - DNA, 476 bp, Zea mays
  unsure (1)..(476): unsure at all n locations
cttagcacaatgactaatgtggaagatggaaccgattctattgatataagactacttaacccttgacagcttgccttattgttagcagtacaagtcaaggacataaatgtaactttctccgggctacgtcccgtgcctataaatagatgaacagtaacaccgtactattcacgctgcattgtaatcgctcccgtgtcacactcacattctcaccatctgtcaagccgaaggtatcaatgaaatataaatattgtgaacatctatccatggttatgaaatgaaatagaaaatgtaaataatgtattgctatattgtcattatttacattcttcttctgagtgcatgtttcttcattatatttacttatttaccgagatgatgaaggtagatccttcatgaccttcgtctaaagatcattatatccaanaggagataatatttctaaggacgaatgtagtttatcatttaacaatatg

SEQ ID NO: 65696 - DNA, 180 bp, Zea mays
aatttaaccatcctgtagaacgccggatgcgatcatgtcaagtgaaagggaaatacggtcaaaccttttccaaaatgatcttggaggctgaattgcccaacacaaataattggactaactagtttactctagactataagttctacaggtgccaaaggttcaacacaaaccaataaaaag

SEQ ID NO: 65697 - DNA, 480 bp, Zea mays
  unsure (1)..(480): unsure at all n locations
ctaagcttccgattcccaactctagaagatgggctgtcagttntgtctaatgatgaatcggccgacagcttatcatataacaacttataggtgagaaaatacactttntgtgtggttaaaaattcgtgtttttatttcttaatatcacattccttttgcagggcctaattctcagcaatgccctcagagcgcaaaaaagtgtcgaagatgaagggtgcaccatggctttaaacaaccttcgttccgaagtaattgagctaaggaacaaaggtcttgagaaagataaaatattacattcattggtgaataaaataaaagaagacgaagctactcttcaagctcaagctgaggcccagaagcgccgaaatgaggatcttcgaaaacagttggccgaagctaaagaaaaatacgcagctgtagaagctaaacgagaaatcagtgaacaatgggcagatcatttagagaaaaacattgaagaac

SEQ ID NO: 65698 - DNA, 433 bp, Zea mays
  unsure (1)..(433): unsure at all n locations
gctttacctctagttgattcaacaacacattccttcgagataatgcatcagcgaccacattgtccttacctttcttatatttcacaatgtatggaaatgttntgataaactcaacccatttggcatggcgacggtttagtntggcttgccctttcaaatacttcaaagcttcctgatcggaatgaataacaaactctnttggccataaatagtgctgccatgtttcaagcgatcggaccaaagcatacaattctttgtcatacacagaataatttaattgagcacctcccaatttttcactaaaatatgctataggttttccttgttgcattaaaactcctcctatcccaatcccactagcatcacattctacttcaaaagttttagtgaaatcangaagaataagtacaggtgcttcagtcaaacgtttctt

SEQ ID NO: 65699 - DNA, 464 bp, Zea mays
  unsure (1)..(464): unsure at all n locations
ctcagcttatggatgatagcttcgcattgcttttgagaggaactgtctaaagtgtttcttcttataagatcttcggagacgaagcatgcccccaacaacaccacactaactacaatcactggttactggaataaggatgagagaagcattttggatgtataggtgacaaacatgatgcacaatcaggatgcatgctcgtcctatacgtcctcacaaatntttgtcaatatattgtggcaataacgttctatatcggtggcatacttacgactctcacggtattttgctagtcgtcagctacacatacgttttcgaggttagtgtacctgcagaaaaatccatcacatcccaagttcccatgatgcaagatccacacatgacagtttatactccatatattgctatatggaggccagctcatcattaagcgccgagccacacataggcgccgttaccacacttta

SEQ ID NO: 65700 - DNA, 421 bp, Zea mays
  unsure (1)..(421): unsure at all n locations
acctgcngcatgcaagcttgaggccatggtaagtagcataggcaagtaaaatgcgaattgattctagcctagctacgggtgcataggtttcaccgaaatccaaaccttcgacttatgagtatcccttggccacaagtcgggctttgttccttgtcaccacaccatgctcatcttgcttgttgaggaagacccacttggttcctacaacattttgattaggacgtggaactaaatgtcatacctcgttccttgtgaaattgttgagctcctcttgcatcgccaccacccaatctgaatcttgaagtgcttcctctaccttgtgtggctcaatagaggaaacaaaagaaaaatgttcacaaaaatgagcaacatgatatcgagtagttacccccttttgaatatcgccaaggatggtgttcac

SEQ ID NO: 65701 - DNA, 498 bp, Zea mays
  unsure (1)..(498): unsure at all n locations
tctcggagacaccgaaccgaacgactcctctagtaggtgatacccttagaagtacttgatcacccactgcaaattccaagtcccgcctcctcacatcaacataactcttctgacggctctgagcggccaaaatattctgacgaatctcctgaaccttctcagatgtctgcttaacccaatcaggaccaaccagagatctctctcccaaagtctccctacacaaaggggagatacactgcctgccatataaggcctcatatggtgccatcttgatgctagcctgatagctgttgttataagagaactcaaccaaggcgagatgatcctcccagctacccttccaagacagaacacaagcacacaacatgtcttccaaggtttggatagttcgctccgactgaccgtcagtttgagggtgaaaagcaacactaagagaaagcttggtacccaanaaacaatgaagaactctccagaatttggatacannattggagtctc

SEQ ID NO: 65702 - DNA, 452 bp, Zea mays
  unsure (1)..(452): unsure at all n locations
gctngcatctgatcatgagcgctacgattttgtgtatttccttagcnggctggtggttggtcccgatgccctggttcctagttgtgctacccttcttctctcacctgttcgttgacgcgcagctctggctggagaagaaatggccacggcagattgctctgatcaaactggtaggtcaagggagctggttccagcagttccgcgtggccgcgttgctcaggatctcgccgttcccatacgcgttgttcaactacgctgtaaccgtgacggagatgaagttcgtcccttacatatggggttcggttatcggaatggtgcctgatgtgttcatcaacatctacagggtagatccattccaacgatgcgtagtagttgggcatagactgcagttcaatctgatgtgttcattctgtgcagtgggcggctgatacgcacgttggctgagctgaatt

SEQ ID NO: 65703 - DNA, 380 bp, Zea mays
actgcttcggcaggagaacttccgaacgtgaagacttgttcggtccacggggtcgctttatccgagcgcaagttacttatcgcagaaggtgatgagtgaggtatccgtatcccggaggcgtacgagtccctcggctcggtcagccttggctgcttacgtgtactccgtcgtttccaggatccgcttttcgaagtagtcaagaagcacgaaagacatcctgctaaaaagagatcctttttcgaggaaaaattcgacgcagagggggtctccccccttttatcccccgagggagggtcgggctttgtctaagctactccgacccttccttgacgagtacactttacgtctgtgcgaggtatatgagcaactagaacacatct

SEQ ID NO: 65704 - DNA, 203 bp, Zea mays
taccctaaccatgtgtataaactctctaaggcactttatgggctcaagcaagccctaaaagcatggtatgaatgtctaaaagattttcttatcgctaatggcttccaaggcagaacagctgatcctactctctttactaaaactattgtaaatgatttggttgtatgccaaatttatgttgatgatatcatatttggggctac

SEQ ID NO: 65705 - DNA, 482 bp, Zea mays
  unsure (1)..(482): unsure at all n locations
tatgaagattcttcatcccaacatgggctagtcggttgtgttctagccaacccatgttagtcttagcaatcaagcaggtgtcgagttcagctctatcaaaatccaccaagtatagctgaccctctaacactcccttgaatgctattgaatcatcacttcttctaaagacagtgacacctatatcggtaaaaagacagttgtagcccatttgacataattgagatacagaaagcaagttgtaatctaatgaatcaacaagaaaaacattggaaatggaatggtcaggtgaaatagcaattttacccaaacctttgaccaaaccttgatttccatccccgaatgtgatcgctctttgnggatcttggttnttctcatatgaggagaacatcttcttctcccctgtcatgtggtttgtgcacccgctgtcgagtatccaacttgagcccccggatgcataaacctgcanaacanaattagttctt

SEQ ID NO: 65706 - DNA, 365 bp, Zea mays
agcttgtgaacattcttcatcccaacatgggctagtcggcgatgccagagccaacccatattagtcttagcaattaagcaagtatcgagttcagctctattaaaatcaactaagtatagctgaccctctaatactcccttaaatgctactgaatcatcacttcttctaaagacaataacacctatatccgtaaaaagacagttgtaacccattttacataattgagaaactgaaagcaagttataatctaaagaatctacaagaaaaacattggaaatggaatggtcaggtgatatagcaattttaccaagtcctttgaccaaaccttgatttccatccccgaatgtgatagctctttggggatc

SEQ ID NO: 65707 - DNA, 502 bp, Zea mays
  unsure (1)..(502): unsure at all n locations
tcgtactcagcaatattatttgtgcaactganatcaagtcttggtgcataacaagttttaactctggaaggtgcaaccaacacagcagctgcttctgctccgaaggttccccaagatccatcgcaaaatactgtccaaacttcagcatctttattcgtttcttcttcctgagcccctggcgtccaatcagcaatgaagtctgtcaatgcttgagattgaatcgaagatctatgcacataatcaatacagaattcattgagctccgcagcccattttccaacccttccaggagcttatctatttctcataatatccttcaacggttgtgaagaaggaacaactatattgtatgcctgaaaatagtgccgaagcttcctggaggccattaaaacagcataccagcaccttccaactctgtgtaattttctttgataaactaagaacttcggatacaaagtatattggggcttggcttttgattngaccttcaagcttctcctgg

SEQ ID NO: 65708 - DNA, 373 bp, Zea mays
agctataccatatgttatcttgttcccatcttattcattctccacgatcctcatgatagtcctaacctatatatatggtttcgactgcagtatacccataaggcgctttccaatgagggttgatgtctattggcgatgttctcatcgttaactgatgttcagcacatgtgagatgcctcactacatttgttatcttccactttgcggtgatcttttgtatcctagcacaaacaccgcatgaacagttatccttgtcacatacaaccgtgtaacgacgtttcttgtatgaatgaagtactctatacggcctcttacgaaaactgtgttaggctcaaccatcttttgagagagtttgttcttgagaccttccctt

SEQ ID NO: 65709 - DNA, 379 bp, Zea mays
  unsure (1)..(379): unsure at all n locations
agcttgtgaagattcttcatcccaacatgggctagtcggcggtgccagagccaacccatgttagtcttagcaattaagcatgtgttgagttcagctctatcaaaatctactaaatatagctgaccctctaacacacccttaaatgctattgaatcatcacttcttctaaagacagtgacacctacattagtaaagagacagttgtagcccattttgcataattgagatacagaaagcaaattgtaatctaatgaatctacaagaaaaacattggaaatagaatggtcaggagatatagcaattntacccaaacccttgaccaaaccttggtttccatccncgaatgtgatagctcgttggggatcctggnttttctcgt

SEQ ID NO: 65710 - DNA, 478 bp, Zea mays
  unsure (1)..(478): unsure at all n locations
tgtgattntaccaatnganagagcataatctctacttatgaattttcatgaaatatcttanaagagaatgtattagtaacacaagcgatagtttcctatttagcaacctctagtatatgaatgacaagaaggttactaaaacatgcaaggaaacctcatgatatgaactaaattacccttacaagcatcatgcataacatcaattgtaaaaaagatgaaagtagcacgattatttaattaagttcacatggcaagtttaattcatagcatggtgagtgattaatgtagaagactcaaaaccaatttaaacaagaatgaatacatcacatagtattggttcgatcttctttgaatgttgaatggcacactctanttgggaaacacattttcatgttgtgagactacataaacacttagatagaaacattagtctcacaactctagtcatatagagaattccncatttggtaagtgctat

SEQ ID NO: 65711 - DNA, 456 bp, Zea mays
agcttcggcattacaaatctcgacttatagatttaatgaccttctagtccataaaggtctgagtctgtcggcgttttgggtccgaccgcacacccggggttgcccctcaaggtgtttttaggagtaggacgatgtcgacgactgtagcaaaatggttcgtgccgttcgcacgagggacaatggacaagatttgcaggttcgtgccgcttagaagtgtgtaacaccctacgtcctggtgagtatatgagcgtggttacaagagggttctctggatagagggcacaaagagtttatgtgggtggctaagtagaacagggtcgatcgatctgaaggggtgccccctaggccttatatactcggccgtggagcagtacatgtgatatgataacaacaagtagctaatagatagtgaacctcttgagttatccctgcgtaaccttcgccgacttatcctcg

SEQ ID NO: 65712 - DNA, 483 bp, Zea mays
  unsure (1)..(483): unsure at all n locations
tcggatctcttgccttgctgctcttatccacatggtccgtaataacttgcanatcagttntaaggattgcccttattattcccattgcctttagcttccaaagccccaaaagaagagcttcatactcgacaatgttgtttgtacagctgaagtctaactttattgcataacatgttatgactttagagggtgcgactaggacaacagctgctcttgcaccgaaggtcccccaagttccatcgcaaaatatcgtccaagcttcgacatcttttattgcttcttcatcctgagcccctggcgtccaataagcaatgaattctgctaacgcctgagattgaattgaggatctgtgcacgtaatcaatggtgagattgttaagttccgcggcccattttctgatcattctngtagcttctctggttttcattatgtcctttangggttgcgatgaaggcactattatgtgatatgcttgaaagtaat

SEQ ID NO: 65713 - DNA, 439 bp, Zea mays
  unsure (1)..(439): unsure at all n locations
agcttatgtgtcctttgtatctaacctatgttttatgcttcatccttttgtatgaaacttatgtgcaatgttgcatccttctattcatattgcgcgaaccttatgtggaatgcattccagtttgtagtttatagtccaagtttgttatctgttgtccaacttaatgtatttatgtatttcattccataatggctgacgacaacacaaacacaccttttcgaccacctgctgccagccccaattcaggtaaccaaatgttcccccacccatgtgggatcctcagatgtggcangccaaggtttggacccaacacacgctgctatttttactaatgctacatcccatatgaccaatcctacctgggttcagggacctaatgacccatcttcatataccttttgtaatccatggaagccatattttgtattacaaatctggg

SEQ ID NO: 65714 - DNA, 492 bp, Zea mays
  unsure (1)..(492): unsure at all n locations
tagcanaagaaatntctagaatcgagaatatttttctcatgcctaagtcctggtaaagattgttcatcaagtggcttggtgaagatatcggctaattgatctttagtattaatgtaagaaatctcgatatcccccttttgttggtgatccctaagaaaatgataccgaatggctatgtgcttagtgcggctatgctcgacgggattgtcggccattttgattgcactctcattatcacatagcaaagggactgtggttaatttgtaaccgtagtcccgcaggggttgcctcatccaaagcaattgcgcgcaacaatgtcctgcggcaatgtattcggctttggcggcggaaagagcgaccgaattttgcttctttgaagcccaagacaccaaggatcttcccaagaactggcaagtncccgatgtgctcttcctatcgattttgcaccccgcccaatcggcatccgaataaccaattaaatcanatgtggat

SEQ ID NO: 65715 - DNA, 399 bp, Zea mays
  unsure (1)..(399): unsure at all n locations
agcttgtcgagtgtgtgtctatatcgagtgttctactctcagtaaacgtggtcgttaccgagagtgtgactttggcgattgcggtgctcgacaaagagttctttattaagtgtccgacaaaaagtactcgtcaaagcgccgagcactggacaaagagacgaatttcggtagtgattatataatggtaaacaaacagtgactcaatctatccaacaataatctctaatantttagaggcacgcctatatatatntaaagttcgtctattctatatataaaatacattagagataggtacactgcaagaggggtgaaatttggaacacatctgttattgctatattacacttcagagaaagttgatcatatatatatgatcaaaattaaatctagtttttt

SEQ ID NO: 65716 - DNA, 488 bp, Zea mays
  unsure (1)..(488): unsure at all n locations
tctanagggagaacacattntaggactaaccaatgtttattttgagaaagacaggatttgtagcgcatgccaagccgggaagcaagttggcactcatcatccacacaagaacatcatgactagtgacaggccactggagctcctacacatggacctattcggcccgatagcttacataagcatcggcggaagtaagtactgtctagttattgtggatgattattctcgcttcacttgggtgttctttttgcaggataaatcccatacccaagagaccttanagggattcttgagacgggctcaaaatgagttcggcttaaggatcaagaaaattagaagcgacaacgggacggagttcaagaactctcanattgaaggcttccttgaggaggagggcatcaagcatgagttntcttctccctacactccacaacaaaatggtgtagtggagaggaagaatcgactctattggacatggcaagaaccat

SEQ ID NO: 65717 - DNA, 430 bp, Zea mays
  unsure (1)..(430): unsure at all n locations
tactcagcttttcactagtcgaacaggcctatggacggtgattgttctctaagcggcaggccgaccgagccgagggactcctacgcctccaggatacagatacctcactcatcaccttccgcgagaagcaactctcgcccgcacaaacatccctgttaccgacggaaagtccagatgctcggaataaggggaaaagagacgcagctttacaagcacagcgagggtgtgttntctggcctcaacggccgcagaaggcacacgctacaagacgatctgatcctgcaggttcgggtcttcacgctgaagggggccgtagcaccttcggcatcgacgacgtcttcagcaagatccgacccagcctcggacggcagcgcggtccatggacttctccgggaatccggcccgagcagggcggctcggcggctacccc

SEQ ID NO: 65718 - DNA, 367 bp, Zea mays
  unsure (1)..(367): unsure at all n locations
agctntaccaaatggacgtgaaaagtgccttcctcaatggaccaatcaaggaagaggtctatgttgagcaacctcccggctttgaagatagtgagtaccctaaccatgtttataaactctctaaggcgctttatgggctcaagcaagccccaagagcatggtatgaatgccttaaaaatttccttatcactaatggattcaaagtcggaaaggccgatcctacactctttaccaaaacacttgaaaatgatttgtttgtatgccaaatttaagttgatgatattatatttgggtctactaacgaatctacatgtgaagagtttagtaggatcatgacacaaaaattcgagatgtcgatgatggggga

SEQ ID NO: 65719 - DNA, 501 bp, Zea mays
  unsure (1)..(501): unsure at all n locations
tctaaagtgagagcacattntaggattaacaaatgttcattttgagaaagacaggagttgtagcgcatgccaagcagggacgcaagttggtgttcatcatccgcataagaacatcacgacgactgacaggccactggagctcctacacatggacctattcggcccgatagcttacataagcatcggcgagagtaagtactgtctagttattgtggatgattattctcgcttcacttgggtattctttttgcaggaaaaatctcatacccaagagaccttaaagggattcttgagacgggctcaaaacgagttcgacttaaggatcaagagaattagaagcgacaacgggacggagttcaagaactctcaaattgaaggcttccttgaggaggagggcatcacgcatgagttctcttctccctacacgccacaacaaaatggtgtagtggagaagaagaatagaactctattggacatggcaagaaccatgctngatgagta

SEQ ID NO: 65720 - DNA, 383 bp, Zea mays
agcttcaccttggtccttggaggtggaggctggatgatatagcgttcttgagaaggtgaatcacagcgaacccaagtttgtgtgtatatctgcacatccacacgcgttagcgagagaagacacacgatccatatgggtgaccatatacataccatgtattctctgtgttttaaattataagttattatagccttttaaaatacatagatcttgttagatgttatacacctataaaagtccgaatgatttggaattcggaaccttaaaaagtctgaacgatttgtaaattggaaccaaggatagttgttaaaacctatattttatacatctttatataaacttaaggcctaattttacgagtctagtcagttgtatgattttat

SEQ ID NO: 65721 - DNA, 482 bp, Zea mays
  unsure (1)..(482): unsure at all n locations
ctaagcttctctcgagcaacaatatccgaagcagaagaaactcctcgttcaccttctgctgctggtgttgaggaaattctgaaggtaatgactgaatccttacctgcgaagctaagtccactgggtcctcaactgacaaagttttttcagaaggacaaggagcccgagaaatcgaagaaaacaatcaaggcaaggaaacaaagaatcattaccgtgacagaggtaattgacaaaacgccgccaagagcttcggcccaaaaaacacgagcagctgcagagggggcagatattgaaattgcaccttcggaggacgcagccgccgaagttacctcagctgaagatttgaatntagagagcacaattgaacatattgaccaaatgctactagacatggctgcagaagaagctgccactgctgccgaagagactgtgaccgcagcatcaaagaaaggaaaagaaattgctgatgaagcttcagaaaa

SEQ ID NO: 65722 - DNA, 443 bp, Zea mays
  unsure (1)..(443): unsure at all n locations
attgctaactgtcccgacaatgatagtgatcatgatcaagggaacaagaaggagaagaagaagaactataagaaggcaaagggcgaggcgcatctatgcaaggagtgggattcggattgctcctcttccgactccgacaatgaaggactcgccgccaccgccttcaacaagtcatccctcttccccaacgagcgtcacacatgccttatggcaagggagaagaaggtatgtactcgaaactctacttatgcttcttcaagtgaggacgagtctagtgatgagaatgaaatagattattcatgtttatttaagggcctagatagaaccaaggtagataaaattaatgaattgattgatgccttgaatgataagaataggcttttagaaaaacaagaggatnnntgtgtatgaagaacatgacaaattgtagaagcacaaaaatc

SEQ ID NO: 65723 - DNA, 490 bp, Zea mays
  unsure (1)..(490): unsure at all n locations
tactaagctttgcaaanagatgcnggatgaaagattcgaaccctggtctctcaataaaggtacaaagacttcgcctgctaaccaatacacctcatgttctgttatgttttacaaaggatcaataattttaatataataatacgtataaacagcgcctgcccagggtgggtggttgccatgctcgtagcgatcggcagcctggctgttcgctgtacgtgcaaggaacaacctccaacttgtccagcgacttccctggaatatcacattgaggcatgcacgtactggtcctgtggcttcaaactctgctctccattgtcacgcacgttcgcgtcgcgatcataaaaacacactgctagccagcaaatccctttcttttgcgtttaatttttatcacgttcagaggacggtcggttggatttaatggaattagtctaaattaattcattaatattttgtctactatataaatcatcatcaagttccaccattg

SEQ ID NO: 65724 - DNA, 469 bp, Zea mays
  unsure (1)..(469): unsure at all n locations
agctntaacttatgaaatacatggttgatactaatatgatcatgtagtaatcacaatttttgaatcacttatagatattcactttttgatggattcatttactcgtcgttagtgagatctcataggacgggttcatcttcccgtagctcatgctctcatcgactgaacgggcagaagttggagattatgaggatgcatgaggagatgagacagcaacgggaatttatggaggcttacaatgcacataacgaagcgatgtatcaagtaagtatagataacccaaactctaaattcttatatttcaatacaacatcttcaatagtaacacctatgtttaacagttaatgcaacaatagggcatggcaccaaactttccaccgccaccacaatggagccagtttgcatccataccagctncggtacgttaatcttagcaaaatctcttaataacattctctaaactagcaat

SEQ ID NO: 65725 - DNA, 467 bp, Zea mays
  unsure (1)..(467): unsure at all n locations
ctttgaacgtactaagcacatgccgggaaagatggtaaccggtattcctagtacctgagtgaagccgggcgcggactntatccctcatgcgacctgagactgggtctcccatgctagctatggtgggtacaagtgcgatcactgcacgacggcagccggggtcagtggagcattgtatgcgaaggcagtgaggcctgtacgcgaacggtgaatcgatggggacggttgtcatgtgcggtgtcggagtaccctgacatgccgtgtgtttaggtttaccttgcaaggataaaactcgattcaaatcgtctgcttctcgcagctaatgagactgcttgaccccttgtactacatcgagtaagaagtgaaatgaggttacatgagataattngatgattgaactaaatgcttgttaacatgtatgcttagaaggagcaaacctagctaatataacgatgctagaatttgaa

SEQ ID NO: 65726 - DNA, 363 bp, Zea mays
agcttgtgaagccaatctcaagtttgttgaataatgacattaagttcaattggtcctctaagtgcaatgaagcctttgagcaactgaagacactattgaccactgctccggtattggctcaaccggacatcactaaaccttttgatgtatattgtgatgcatctggcagtggactcggctgtgtactaatgcaagagggccgagtgattgtgtatgcttcaaggcagttgcgccgacatgaggagcactatccaactcatgatctggagctagctgctgtggttcatgccctaaagatttggcgtcactatctgctgggtaatatctgtcacatatatacagatcataaaaggctgaagtaca

SEQ ID NO: 65727 - DNA, 480 bp, Zea mays
  unsure (1)..(480): unsure at all n locations
ctcagctagtcagcctactatcgcttgtctgaagacatcttcttacctcgatagggataccatcaaggcccatcgcctttcctaccttcatcctttttagcgccttcttaacttcatattcttgtatccttcgtacaaaacccctggttgtgtcatcgaatggttcgtccaattctattgtagcactctcattccctccattgaacaatttgttgaagtactccttccatctggtcttgatctcttcactcttcactaatagttggnttgcttcatccttgatgcatttgacttggttgacatcccttgtcttcctttcacgaatcttggccatcctatagatatccttttctccctgctttgtgtccagccgttgataaaggtcgtcataggcttgaccnncggctctactaaccgctcgctttgcagacttcttcgctatcctgtacttctctatngtntctgcacacttgtcatgat

SEQ ID NO: 65728 - DNA, 353 bp, Zea mays
  unsure (1)..(353): unsure at all n locations
agctngccagtacttgtcaaagcaacaacatctaccagcacagcaactgcagaccataccagtgacttggccatttgcgtgctggggactggatatgattgtacccttcaagaaagctcaaggaggatacactcatgtactggtagcaatcgacaaattcactaaatggatagaattcaaacccattgcctctttgacctcagctaaggccgtggaattcatacaagacataatattcagattcgggataccaaacaacatcataactgacctaggatccaacttcacaagttcagagttcttcgacttttgcgagcaaaaaagcatttagatcaagtatgcttctgtagcac

SEQ ID NO: 65729 - DNA, 250 bp, Zea mays
  unsure (1)..(250): unsure at all n locations
cgacatggaggtatagcacaaagctcccaatggagtgatgaatgtgnttttcctcgtcttcttttgccagactaatctgatgatacccagagtagccatcccagaaagacaacacagaacatccggggggtgaatccaccacctgatctatcctatgaagcccgaagggatccttcggacagtgtttggtgagatccgtatagtcgacgcacatgcgccaatccactttattctttntttagtacaagaa

SEQ ID NO: 65730 - DNA, 450 bp, Zea mays
  unsure (1)..(450): unsure at all n locations
agcttggtaatattggtgtttatgaacttgtttgtaatatatgtgaattgtctgtaatgcagttctttgcgatgcatgaagctntatgtacatactgtttttgagccttcggtgaaaaaacaccttcccttttgttgggggtatgcttcgtagccggagatcctaaagaaacaaacaccttcggcaagtcctctccaaagcagcgccgaagctatcgcctataaagcttcgacacagtgacatgtctcaagatgaaggggtgaaccgacttaaagatgaaatgacttanagacccatgatattctgtgtcattattgtacttcattggaaagggcataaatgtaattatacacaggctgcgccctgtgcctataaataggtgaacagtacccctgtactgttcacggaatccttgaatcacgcattgggcatttgcttctatattacact

SEQ ID NO: 65731 - DNA, 486 bp, Zea mays
  unsure (1)..(486): unsure at all n locations
tcggcccagtgacagatctcaagacgaaggggtgaactcgtcttatagatgaaatgacttanagacccacgatgttttgtgtcattattgtagtcgattgtaaggggcataaatgtaattttacacaggctgtgccctgtgcctataaatagatgaacagtacccctgtactgttcacgtaatcttgtaactgctggcacattatgctggaattattgctttctgtcaagacgaaggtataaatgtacctaaatattgtgttttaatatttgtgttcatataataaaagatgtgaataaggttatctatttttagtatatctttctataatgtttcatgcttcatattttttatttcatattgttttacaaatctgatcacgaaggtgtgaccttcatgatattctgctcatggccttcgtccgaagctcattaaatccttggggagataatgcttcagcggacgaanggcattaatatttaacat

SEQ ID NO: 65732 - DNA, 352 bp, Zea mays
  unsure (1)..(352): unsure at all n locations
agcttaccgcatttgaagcatgatcgcttcctcttggtcttagtcttgctcggctgtccattgcgaccctttagcaccgtcttgaatcttttgataatgagggccatttcttcttcattaagaccggccgcctcaatttgcgccaccttgctgggtagcgcctccttgttccctgtggctttgagagcaaaaggttgcggctcgttgatcggtccattcaaggcgtcgtccacataccttgcctccttgatcatcattcgcccgctgacgaattttcctaggacttcttcgggcgacattntggtgtacctaggattctcacgaatattattcaccaaatgaggatcaagaa

SEQ ID NO: 65733 - DNA, 515 bp, Zea mays
  unsure (1)..(515): unsure at all n locations
tacggacctataaaactcagctnttcactcngcttgttggcagntatcttaactaggttagacaagccctagatgcaatacaagaaatttaaatatgcaatgcaagcttgacaacaccatttaacatcttaaataaaatttctgagatcaagtatatttaattcattcctcaacatgcaaaagcgggttttatcaagtggctgagtgaaaatatccgctaattgatcttctgacctcactccttctaaaatgatatctccttttgcaacattatctctaaggaagtgatgacggatatcaatgtgcttggtgcgagagtgttgaacagggttattagcaattttaacaacactctcattgtcacacaacaaaggtaccttttctagaactacgacatagtctagaagagttggtttcatatataaaatttgtgtgcaacaagcacccgcggcaatgtatttcgcttcggcagttgacaaggcaacactattttgctntttggatgtccatgatac

SEQ ID NO: 65734 - DNA, 382 bp, Zea mays
agcttctaaagggagaacacgtgataggtttgactaacgtgcaattcgaaaaagatagaccttgtgcagcttgtcaagcaggtaaacaagtgggaggagcacatcacagcaagaatgtgatgaccacttcaagacccctggagctgctgcatatggacctcttcggacccgtcgcctatctgagcataggagggagtaagtatggtctagttattgttgatgacttttcccgcttcacttgggtgttctttttgcaggataagtctgaaacccaagggaccctcaagcgcttcctcaggagagctcaaaatgagtttgagctcaaggtgaagaagataaggagcgacaacgggtccgagttcaagaaccttcaagtggagga

SEQ ID NO: 65735 - DNA, 479 bp, Zea mays
  unsure (1)..(479): unsure at all n locations
ggtcacgtgngtcgctaccacaaggaaatgaccaggttctccgctgggactgggctgccaaactaggcctaagggtttcaaacaaggcctaactctcgaagatgaagagagaaggacctatcttttaattgtgttgtcctattatagttatttgtattatttgtaggagctttagtatgtgactaacaacacttatacccatgtttttttgattgcctcatccttccaatacaagttgtagtatcttaactcacacactacacacgccaaatgcacaccactacatgtatacctaccatgtgagctagatctacaacctacctaaaagaacacacaagtgcagctaagggtaccgaaagcgacctccagcgatgacggacatgtttctctgaccattatgtcacatctaatggtgagtctaactattaattattggtttctattgttgnacangannnagatggaataaactcanattt

SEQ ID NO: 65736 - DNA, 435 bp, Zea mays
  unsure (1)..(435): unsure at all n locations
agcttctgatccttagccttgcaactcttgtcaatatgacccgaaacaacctgggaatcagttntgagtatagcccttctgattcccattgcttttagctttcgaagacctagaagcaaggcttcgtactcggcaatgttatttgtgcaactaaaatcaagctttgccgcataacaagttttgaccttggaaggtgaaaccaacacagcagccgctcctgctccgaaggttccccaagatccatcacaaaacactatccatgcttcggcgtctttatttgcttcttcctcctgagcccctggcgtccagtcagcaatgaagtctgctaacgcctgngactgaattgaagatctatgaacatattcaatacaaaattcattgagctctgtagcccattntccaatccttccagtagcttctcgggtcctcataata

SEQ ID NO: 65737 - DNA, 474 bp, Zea mays
  unsure (1)..(474): unsure at all n locations
tcggccttcggaggccgaaggttgaaatgatctatacctgttaagagtgccaaagagccttcggcgttgtctgctcttttataggaacaagggacttagtacaagagcatattgccttcagggtgtggccgcttgcggagaaatgggaaatgccacaagaaaccgttaaagaggccgatgaaggtggacttgtcaggtttaagtacacttttaaatttgaagataaatttattgagccagacgatgagtggttgaaaagcattgacaatttaagtgatgagctgcttgngacatactcgaaggccgaagatactgcaatgtcagcagccttcggaggccgaanaaagaaaaggctgaatcgggtatttgatgccatcgggtttgtctaccctgactattgctaccccattcgaaggcagaagagaanaaatacaacctctgcaaaagaagaaactgcagctgctcctagcgagc

SEQ ID NO: 65738 - DNA, 438 bp, Zea mays
agcttggaaaaatctggaataaatcggcggttataaccagctagtccaaggaaacttcggacttgatgtacagtggttggtggtttccactccaaaatatccttgactttgctgggatcaaccgcaatccccttggcagacaatatgtgccctagaaattgaatttcctctagccagaatgcgcatttactaaatttggcatataattgatgctcccttacgcgcgttaatacgatccgcaaatgctgagcatgctcctcttcattcttggaatatatcaaaatatcatcaatgaataccaccacgaatttatccaactcgggcatgaataccgagttcatcagatatgtgaagtggccaggagcatttgttaattcgaaagacataaccagatattcgaataatccataccgcatagtaaatgcggtcttgggtata

SEQ ID NO: 65739 - DNA, 477 bp, Zea mays
  unsure (1)..(477): unsure at all n locations
tcggctacggttaannaatttggcagcanaacagtgcaatatcaatgaatgctgtggtaacttcacacctacccgtctgtttatatagtgtagcaggtaagaaggtgaatcgtcagggttcttacaccaggcaaacagttgctcgcacccgctgaacggtgggccgcaaaaaccagaatagtgaacctgcacggtgggaccgctctgcgctcggaaactgtatcgtttctcgacaacgagctcagggaaggtgtttttcggaccttcggcttcctgaagcctaagagacttttttcacggatcaagctcgttacgaaaaacgatctatcaccgcgaaggggctactgttgggaccatgcttcgtcgccgaaggtgctgcggaaagaaacagcttcngctgaagctgcttgaacatgatgacgaagacaccgtttgcaaagcttcagaactacagcanactacaacatatncgaagct

SEQ ID NO: 65740 - DNA, 364 bp, Zea mays
  unsure (1)..(364): unsure at all n locations
catgcaagcttgtacttcgcttcaacatggcctgatattgtgattggcgcgccgtttccgtgcgtctgctgacgtattcaccgtcaatccgccttcggtcacgccaactgccatatctatccccgcggttgactgacccgcgacccccacgtctggtggtttcgttgggccacacgtggggcgcctcgataccgctgcattggtttaaaaattaccttctgtcttctaccgcggcctcgaggaggcgcactaccgacgcgtgcggcagttcgctctttccgcacctgngatccggcacccaaggagtatgacccatgagcctgggcccccgtgtcatagactgtgctgttgtctcttgcggtgg

SEQ ID NO: 65741 - DNA, 481 bp, Zea mays
  unsure (1)..(481): unsure at all n locations
tgtctgacagaaccaagtggagcttaattntctcccaaatttctgtggtaacataagttaatctttgcagcaaacttgtagagcattatacaaactacaaccttgctatggcaaccataggtagatttccactggatattagtctaaatgtctcttaatgttggatcaaggtcactgtccaacagaaattcagtctataccagcctgacagtccaagtttgggtatgattatcttccaagttttcacaagaacatggcttgcactcttaagcaaacctgttctcctataattgggctacaattttgatgtggtgacctagggcaaactctcttttgtttagaagttacagggtcacaaagatgagcacaatacaccgaaattagacttagtcaaaagagttcaaatgtgactcttttgcanataagcccaaaactcanggtttggcttgtaaatcttcccanatgtgaaccatgtgactta

SEQ ID NO: 65742 - DNA, 378 bp, Zea mays
acctgcggcatgcaagcttcgactccatctatattggggattggctttgagtctgtcctatttccttcagcctttctggcagcttcctgacttccatgaatagcaatgggcccttgatctgaaggtatcttcatgcatagatatgctggatgaagaattgcttcgaatgcattgagtgttccacgaccaataattgcattgtaggggtattccatgtcaacaatatcaaacacaacctgttcagttcttgtattatggacaaatccgaaggtcactggcattgtgatcttgccaagtgctacaatctgccttcctccgaaaccacagagagggtgtgtagcatcatggatcttatcctctggctcttgcatctgtctg

SEQ ID NO: 65743 - DNA, 498 bp, Zea mays
  unsure (1)..(498): unsure at all n locations
tcacgggccactagcggagctagccgaagcactggctcgtttgttggtggttggagtgggctggccacggtggccgaagctctggcggcaatggcgggcggaattaagctcaccggagctaaggagaggtggttggccggtgaaggtgagcgcggtgtgaagtgaggcgcgcccggngaggctttataggcgtggacgagcacggccgagggcggngctctgacatgcgctcggtgcgtgcgcggcgaacgccagtgcgcgctctggcgcctggcacagcgtcgagcacgaggcagcgcagagagaggtcaagttcaaacgcagattgtgcccaaatctttgagattaaggccacgatcccgttgaaagatctcttcctctcaggtccctttgtcgtttgtgtgtggaggctagcaagtttcgctgactggattangagatagagaggggaganatcctggttgtctcactgccacacacagagagaaaatctctggt

SEQ ID NO: 65744 - DNA, 411 bp, Zea mays
  unsure (1)..(411): unsure at all n locations
gcttctctttttgctgaacaatatgaagagatctaaataatgctatatagaacaatttggtatataatatgaggaganaatgttgccctgttggcaacaccacataatttactattgttataagttttctctcaaaattattatacctaaaaatgttgcacaaatcgatacccaatttcaaaatggtatgagtaaatgggtaacccatgggcaatgataaaaacgagctggactatacatctctgcatataaaaatctctgcttggcagcattggcctgatgtcgtgcactttaccgccattgtatatgcgcaaattctcctatgtacttgaaagcacaatgcaaccaatgaatgttcttgtgagcgctagacctgatggtcattgtcctttgtgatctgaagtcaactac

SEQ ID NO: 65745 - DNA, 464 bp, Zea mays
  unsure (1)..(464): unsure at all n locations
actaagctggatncncggattgaataacattattcagactctgtatctatttgaagtaatgaatgtgattactagcctcctgcgactagtaatngtatcacatttgagtcccaaaggatcgggacgcttcagcccactactggtcagaggttcgaaggctggcccctcggaagggttcaacggccgcctcatgccactcgggctccgcgcccactactgatcaggggttngtaggctggccctcgaagggttcacagccgcctcagacacagagcgagggatgaccctgtgtacgttcgatacataaccaaggctcgggctacgctcccgaggtaccctatgacatttccgagaccagcgggaacgatcttgtaacggaatcccatcagagggaggcatcgagccctcggaccccgtcgaaaggggaccgggtccggcagatcacccgcatgtacttttggagc

SEQ ID NO: 65746 - DNA, 375 bp, Zea mays
  unsure (1)..(375): unsure at all n locations
atggacgtgnaaagtgcctttctcaatggaccaatcaaggaggaggtctatgttgaacaacctctcggctttgaagatagtgagtaccctaaccatgtatataaactctctaaggcgttttatgggctcaagcaagccccaagagcatggtatgaatgcctaagagattttcttatcgctaatggcttcaaggtcggaaaagccaatcctactctctttactaaaacaattgcaaatgatttgtttgtatgccaaatttatgttgatgatatcatatttgggtctactaacaaatctacttgtgaagaatttattatgaccatgattcaaaaattctagatgtctatgacgggggagttgaagtatttctaggat

SEQ ID NO: 65747 - DNA, 488 bp, Zea mays
  unsure (1)..(488): unsure at all n locations
ttgctcttgggtcttcggaagttaaggcaatgggaatcattatttctgttcttaaaactgattcccaggttatttctggtcatattgacaaaatttataaagcaagagatccgaagcttgaaaaatatttagacacggtccgaaggattgaggcttcctttgaggggttttctgttaaaaatattcctcgtggagaaaatgaatatgctgatttattagccaagtcagcagcacaggggttgcccttaccttcggaagtatttttcgaaacaataaaagcaccttctgttgagcttcttgaaagagcagtcctcaacatatcccctgtctatagtgaagactggagaactgagatcatctctttccttcagggtaactttctttcagatgacgaagcttataacaggaggatagaggcaagagctcgaccatatgttataatagaaggggagctatancaagcgtgggtctgttctcccgtactcaag

SEQ ID NO: 65748 - DNA, 329 bp, Zea mays
gcactacaggatttagcggtcatgttgaaacgatagcggtggatatggacgcgatgttgtattctaccagctagatgacccttctatatatcctcattgcagctcgtcccaatatcgggtagcagaaagtgctgcatacggtggaggagtttccaacagctcctaatgcatcgagggtgctagtggagcacctatagccatgatagctagtggaagcatgcccatggagtacaataatggtagggaactatgccgttgtcgcgtacatagatgcaaccgaagtaactactactagtgatatactgggcatatgttcatgtgaagaccac

SEQ ID NO: 65749 - DNA, 224 bp, Zea mays
agcagctcgtggctcagctctgtcaagccttaccccgaagcctggtccagactcttcacaacgattcggtggacataacgcaggaaacgcatgcgttttaggcgccgtgcttgcttgctgatgagatgtggctccctctctctacgtactgtctatctatgcgaagagcaccggtggaaatagtaccttgtatactcacacgtatgattcttgttattctaact

SEQ ID NO: 65750 - DNA, 376 bp, Zea mays
agcttagatagtgacgatgaatcaatctacattaagaggataattgtaaaaagtagttagttataactattatcatatgtcttttaattatgaccgtattccttcaaatactactactcctctcctatcggtttcacttggaaaaccctctcaaattgatgtactaactattccatgtggagttatagcatgagaggacatttatattcacttcatccaagtatatggaatattgttgaagtagacatgaaaaagttgtgtaactatgatgaagacttttaataatcaaaaggtgagcaaatgatccataacaatgcttaagttgcgatggtactctcatcatttgaaccaagaagaatatggtacccttcacatg

SEQ ID NO: 65751 - DNA, 477 bp, Zea mays
  unsure (1)..(477): unsure at all n locations
ctaagcttatgcccctctaaagaatgcccaatttgtaatggcatagcttctctgccttangataatgaaggttatattttgtatcctggtggttttcctgaggataagattatgagaattcattctagaaagtctcactctggctctcatcatgcttttatgtacaagagtgaggcatctagttctaggcaatcaacacatgctaaattgcctaagaagaaaactcctaaagcatcaaatgatcataatgtttcattcaagacttttgatgcttcttatgtgcttactaacaaatcangcaaggtagttgccaaatatgttgggggcaaacacaagggatcaaagacttgtgtttgggtacccaaagttcttgtatctaatgtcaaaggacccaaaactgtntaggtacctaaaatcaagaactaaatntgttttgtaggtntatgcatctggnggctcaagttggatcatcgaaag

SEQ ID NO: 65752 - DNA, 384 bp, Zea mays
agcttcggatctcgtgctttgctgcttttgtccacgtggccggcaataacttgagaatcagtctttaggatggcccttcttattcccattgcccttagtttccgaagccccaatagaagtacttcgtactcagcaatattatttatgcaactgaaatccagtttgactgcataacatgttttgacttttgaaggtgccattagaaccgcagctgctcctgcaccgaaggctccccaagaaccatcgcaaaacactgtccaagcttcggcatctttgcttgtcccctcttcgtgagcccctgacgtccaatcagcgatgaaatctgctagcgcttgggattgaattgaagatctgtgcacatagtcaatagtgaattcattaagc

SEQ ID NO: 65753 - DNA, 491 bp, Zea mays
  unsure (1)..(491): unsure at all n locations
tggatgtacaatagnntttgcctatatctttttcacttttctcaagtttaggcttataaataatagcccatgactctagtggcagtatgtaatcacccatgacttattacagaccagatgctactggtggattgggtatagaaaaaaaatatagtgtatctgtgctggtatatatatccaattcagtcatgcatcaacaaatgaacaaatggtgcactactttacacacaaaatcacccatgtttagtgattagtaatataagtatataactatatatatgataatagtaagcaggacgaaaaatgtgactcctttcacgatggaaggcttatttgcatgtaaaaggccacaaaaagttggtcaattcaacttactttgagaatgagtacagctgcaaatcggcgatattccactcgttcaccagtaagccaccccatagccgttttaatcttttaaaagaacggatgtngtcaaaagaatgaaacataat

SEQ ID NO: 65754 - DNA, 413 bp, Zea mays
  unsure (1)..(413): unsure at all n locations
agcttcttgaccaaatctgaactcaccaaattattgcagctntcaccatcaataataacatgtgcatgccgattctcgatggagaagaaagtctgaaacaaattatggtgttgctgcttctctgatgattcaggctcagaactaagaacacactgcaccatgatgcttcgaaggttcaccgtagcatcagcaacaagcatggcatcatcattagcagcaacatcactggagtcatcatcgtcaccctcaccctgcaccatgagcgtcttgttcttcctctctaccacaccattttgctctggtgtgtagggagcggagaactcgtgcttgattccttcctcctcaaggtactcctccacttgaaggttcttgaactcggacccgttgtcgctccttatcttcttcactttgag

SEQ ID NO: 65755 - DNA, 451 bp, Zea mays
  unsure (1)..(451): unsure at all n locations
tctacccatctttcgctcangacatatcctcgacgtctgacttattctctttcctggagggaggtagtgctggaggggcttccttctttcgctcagtctggcacccttggctcttggtcttcttttggattttcttcgtgggggcgagcttctttagcttcttatcgtaatccatcttcagggttcggtaggcttcacgagtgttggccctcttcgcctttgctatttcgagactttcttggagggaccgcttctcctttntaagttccttgacctgttgctctaagctttccacccgggagtttaagtgggtgcagtgggaggaaaggtcatcatagtggttatcgagagtgtggagatatccgaccatgtagacgatggtggggtcatcctcagtaggatctcttcctgacagggcctgaagtcttttcctccaggtaggggtattttt

SEQ ID NO: 65756 - DNA, 453 bp, Zea mays
  unsure (1)..(453): unsure at all n locations
agcttcaccatacactgtattctcttgagtcttataccagaatgtttcattgttctttntatcaaaaccatatgctggcgatgcagcggtaggctcgtttataataggcagaacctccatcctgtaagtattgtgacaccaacaacgaactcaaattggtccatctctaatgatgtactcaccatgtgtaattcattatccaaaagtagttcgtgacatgtaattttattttgtttccatcactattcactggaccttttcatttacctcatgttttatgggtgatttggataaacatgagtatatccttcaggtttacatattttcttagaaaacaatgacatagtcattagagtgagggaaaatatgttgcatatntatagcttctaaaaccatntttaaatgtgtgaacatgatgtcatggctattcctganaatgttatcttacatatt

SEQ ID NO: 65757 - DNA, 475 bp, Zea mays
  unsure (1)..(475): unsure at all n locations
tataaaactaagcttggaaggttcttcatccncacatgtgctaagcggcgatgttccagccagcccatgctagtcttagcaattaagcatgcatctagatcggcctcttcttttgcaaaatcaactaagtaaagcttgccgtctaatacacccttaaaggctcgtgaaccatcacttcttctaaagacagacacatctacatttgtaaaaagacaattatatcccatattgcatagttgactaacagatagcaaattgtaaccaagagactcaactaaaaacacattggagatagagtgctcattagaaattgcaattttacctaacccttttaccttgccttgattcccatcaccgaatataattgaatcttgggaatccttattcttgacgtaggaggtgaacatcttcttctcccccgtcatatgggttgtgcatncgctgtcgataatccagcttgaacccccggatgcat

SEQ ID NO: 65758 - DNA, 435 bp, Zea mays
agctttacaacatttccattcatgagcttactagttccggcatcaagtgtaacaataattctaagcaagccattcatgttatgcaacgatggtttttgagcctgcaataaagcaaacaacatgtgagttcaattgttgttgcaataaaacatgaaacagaaacgaagtttagaaaaactcacaattgcattaaataaattattccaaatcaattcaaggaccagcgagccatcgcccatttcagatagggaagtcaaaattaggcgattcaatgacttgaaagtatcccaatttgaaagcttgctagaatcctccagagtaactatgtcccctagtttaatttaacgaagtaacatatacatgtcagaggaggggcaggtaatggaacagcagaattacttgagacaagtaataagttcagaataaataatcgat

SEQ ID NO: 65759 - DNA, 467 bp, Zea mays
  unsure (1)..(467): unsure at all n locations
ctaagcttggcgtctcaaggacctggcccttgcctcatggaggacttctctaacgtagtagactggcttcttgatagttcggacccctgcggttggtcctgagccctcaaactcttgaccttccatcaccatcgtggtggttggaccaccaccttctcctaggggaactttttgactcccttagggatgttgtgtcgtcctttcgacgaccagcaccatgctcaccacctctgtagccgctgcaatatataagtacaatggctcccctggctctagagctaccagtattggtagggacacaaagtgctgcttcaactctngaaaggctcgtttcgcttcctcggtccaagagaatgggtcggacttccgcaatagcttgaagaagggtagcgccctctcgaccagtcttgagatgaagcggctaanggcggccagtgaccccgtaagcttctgtacgtccttgattc

SEQ ID NO: 65760 - DNA, 367 bp, Zea mays
agcttctgctccatctatatcatggagtgctttggaagcaggcacgttacgttcagcccttcgcgcggcttcctgacttccatggatagcaatgcgttcctgttcccaacgtaacttcatgctgagatataccagatgatggattgctctacaggcattaatagtaccacgacccacaactgccttggaaagatatcccatgtcaactatgtataacacaactagctcagatcttgtgtgggtgatgaatgctgaggtcaccgacatggtgatcttgcccagtgacacaatctcgcttgctgctaagccacacacatggatgagatcatcatgaatcttatgttatcgctctagcatttgtctgaag

SEQ ID NO: 65761 - DNA, 353 bp, Zea mays
  unsure (1)..(353): unsure at all n locations
tcatcctcatatggccgatgcaacagaatgactggaagtatctggtggngttctacctgaacaggcatctgctcaatgccacactatgtacatatagcctgagagactgtgctctctgaaagggaaatacgccctcgtgccatttgtagatgctctgttgattacatgctcaacacattactattgactaacaactccacatatgatcataagcgcatgtatttgaaatgcagatcgagagacatatgagaagagcattctggtgtatattgcagatcctattgcattgaaagaacaaaggtatgactctagcacttacctaagatattatacttgataacaatgttcattta

SEQ ID NO: 65762 - DNA, 211 bp, Zea mays
  unsure (1)..(211): unsure at all n locations
gcgtaccagctnntaaatcttcttgttcttagctgaggcctgaatggatgctntgctattgttcatgtgtggagtactttcactcgctcctattactgtgccggtgctggagttggaggcaacggcactcgtcgtcctcgacggacatgggctcagagatccagacgtcatacgcatgcangggacagcgggtggtggtggtcggcggcgt

SEQ ID NO: 65763 - DNA, 397 bp, Zea mays
  unsure (1)..(397): unsure at all n locations
ttctgccatgatgtgattgttcctggccgaagagaggagtaccaggtttgtgcaacattcttgactgccatgacaaaagatttcgccataactgcagtgttgccaccatacgaagatatggttgcttcgtagctcatcagaaattgcttcggatctgagtgcccgtcatacatggngagctggggtggcttgtaagacggnggccaaggtgtagcctgcagctctgctgaaagaggagaagcatcatcaaaagcaaaatttccatgatggaaatcctcataccaatcatcctcgttgaagaaaccctcttgatgaagctctctgtgctggagtattcatttttgctcatcttgacaaggtgacaaacttcttcagtagcttcgtcaatctgcctttg

SEQ ID NO: 65764 - DNA, 333 bp, Zea mays
cttcacctcgggatcaccgccgcggaggttgaccgaggccgttattggtccacatgcccagaaaggatagtgactttccctcgaggagacacaaatccttcaccctgttaaagaatggggaaaacaccatgaagtttgttaccaggagaataaaaagcggttttgggagactcatggtggtgatgttattatcctggagcaacatataatcatccttatttcaggataggtgtacacaatatattgacatttattactagtcttcacaggcagccgactgggggttgccgctaacccatgcctagaactcatcgtagtcttggaactcctgga

SEQ ID NO: 65765 - DNA, 505 bp, Zea mays
  unsure (1)..(505): unsure at all n locations
tcggaacactacgacttcattntcctcaggagtcggacatgtcttttctccttcgccggccctcacaacggacaagtcccggaaatatcttccnctcatgctgacaagatgattttctttgatacttgatttgccgaaaaccgcatggcttggttgccaagggcgatcttcggagtcttcaccaccactatccacatcataattgtcgctatcatcagtatcttcagataaaccttctaaaatctctttggtgatcttttctgtatttgtcttcgacatggcttcaagaaaccccaggtttttctcttcagatagacttagcttcatctcgacagcagccctcttatcctcagacatcttcgaagatgctgaanaatcgctttcaaagccgaagcttanaaacttanaaagccaagcaagtgttggtgcgcaagagctaaaaatngagtaagcaaaagcagatggcaggaaagcgtaccaagtgagctcgtggtatgctcttatt

SEQ ID NO: 65766 - DNA, 399 bp, Zea mays
attgagagttcttgaactccgtcccgttgtcgcttcttattttcttgatccttaagccgaactcattttgagcccgtctcaagaacccctttaaagtctcttgggtttgagatttttcctgtaaaaagaatacccaagtgaagcgagaataatcatccactattacaagacaatacttactcccgccgatgcttatgtaagcaatcgggccgaaaagatctatgtggagtagctcaagcggcctgtcggtcgtcatgatgttcttgtgtggatgatggactccaacttgcttccctgcctggcatgcgctacaaatcctgtctttctcaaaatgaacatttgttaatcctaaaatgtgttctccctttagaagctcgtgaagattcttcatcccaacat

SEQ ID NO: 65767 - DNA, 392 bp, Zea mays
  unsure (1)..(392): unsure at all n locations
catgctagtcttaactattaagcatgcatctagaccggcctcttctttntgcaaatcaactaaataaagtttgccatctaatacacccttaaaagctagtgaaccatcacttcttctaaagacagacacatctacatttgtaaatagacagttataccccatattgcataattgactagcagatagcagattatatccaagagactctactaaaaacacattagatatggagtgctcattagaaattgcaattttacctaaaccttttaccttgcattgattcccatcaccgaatacaattgaatcttgggaatctttattcttgacgtaggaggtgaacatctntcttctccccgtcatatggtttgtgcatccgctgtcgataatccagc

SEQ ID NO: 65768 - DNA, 431 bp, Zea mays
  unsure (1)..(431): unsure at all n locations
agcttgcacatagtctcgatgatgtatgccttcagatagtccaagtcttctaaagctattacttnttgtgacaccgcattgaaaaagtaacacaaacgtgtgatgacaactttgacatgctctatttcgagggctcttaccgcaattgggaggaacaccgtcatcatcacatggcagtcatgagaagtgtagccaaatagagacaagtccttcatcctgactagtttgctgatattggatgagaaacttgtgggcactntgtgaaagggaaatgtgcctttgggccatttcaagaatattttggtgattaagtgctcaacacatattgagtgagtaattatatgccaaatgattgatgaagtgcaaatcgacaagaaggtatggttctagacttagtacattggttttggtatactaatatatttgtctaa

SEQ ID NO: 65769 - DNA, 205 bp, Zea mays
tggaattcgtgagaggaattgatcactcgcgtgtgtcttgtattgaatgcctagctcttgtaagtggttggaagttgagaaacttggatgacttgaatgtggggtggttgtgggtatttacaaccccaaccaccaaactagtcgtttggtggaggctgccgccgcatggcccacccgataatctgtcgcgccatccactctcacc

SEQ ID NO: 65770 - DNA, 406 bp, Zea mays
  unsure (1)..(406): unsure at all n locations
agcttcagtgtctgttatgctttcttcttcctaagcccccggcgtccaatcagtaatgaaatctgctaactcttgggattgaattgaggatctatggacaaaatcaatagtgaactcattcagttctgcagctcattttccaactcttcatgtagcttctctgtttcttataatgtccttgaatgctgggacgaaggtactataatgtggtaagactagaaataatgtcaaagctttctggaagccatcaatacaacatatagtaccttctccagctctatgtaatttctttttgatggactaagtaattcagaaatgaagtatactggacttgcttcttcgnttgatcatcttatctcttcttcactagcgctgcactaactgcagcgtggaaagcagctacata

SEQ ID NO: 65771 - DNA, 484 bp, Zea mays
tgccttcgcttcagtctatcatccgcagtccaacgtgtgtcttggagtgtgccaatgggaaaatattcacagctgtcaaaaagatgctcctcgatgaaaaaaaaggcagatggaccgatttattaccggaggcagtctgggcgctaaacacaactgagtgcagggcgaccgggttcactcctttccgccttctatacggatcggaggcaatgaccccgcaagaaataaagcatgggtccccgcgtacagttccgtcagccgtccccgacgtggacgagccaacttcaaaagatctcattgacggagaccgggtcttcgccctacaggccctaaacaaataccaagcccagaccaaagcatggcgcgaccacgcagtcatcccgagggagttcagcgagggggacctcgtactcgtccgaacagctcggacggagtccaagggcaagttggagcccaagtgggagggccccttcatagtcaagtc

SEQ ID NO: 65772 - DNA, 376 bp, Zea mays
  unsure (1)..(376): unsure at all n locations
agctntatcaaatggacgtgaaaagtgcctttctcaatggaccaatcaaggaagaggtctatgttgagcaacctcccggctttgaagatagtgagtaccctaaccatgtctataaactctctaaggcgctttatgggctcaaacaagccctaagagaatgtatgaatgccttagggatttccttatcactaatggcttcaaagtcggaaaggccgatcctacactcttcactaaaactcttgaaaatgacttgtttgtatgccaaatttatgttgatgatattatatttgggtctactaacgagtctacatgtgaagaatttagtaggatcatgacacaaaaattcgagatgtctatgatgggggagttgaagtat

SEQ ID NO: 65773 - DNA, 406 bp, Zea mays
tacaataatcacactacgacaacatttgatagcccaaacgacaaacataattagctaactactgtttatggtatacgcgtatgtgcgaaggtcgatcgtcggcgacgtgtcccatcgtttgtagttttgtccagtttttttggtgacgtggtagcgacaccatggtagaaattatgttttctaaatgtattctattctgagtactgacttgggaactgacttacgtgagcagaccaacaactgcttcgggcttatgttacatgagcaagatagtagagactagactgcctgcttagactgtctctagtagataaggtaaaataggggactccgaactatagttacactgtttgcatagtaaattttaaaatagaggatgagatagagtatgtgataagggatctga

SEQ ID NO: 65774 - DNA, 395 bp, Zea mays
  unsure (1)..(395): unsure at all n locations
agctggtctntggcttatcctctntcttcattcaaattngatgacagcccgagtagcagtccaataggctcataagttctgaagaagctgctacatctacaagggagtctattcttggtaaagggaactcatccttcggacatgccttgttgaggtctgtgaaatcaatgcacattctcaatttcccattagctttcttcatcataacggtgttagccagccactctagatatgttacttctctgataacaccggcactaagaagtctctttacttcatttcatgcaccttcggctttaccatcagacatttttcgaagcctctgatttcttggtctgaagaatgggtccacattgagtgaatgcttaatgacgtctctattgacaccacagata

SEQ ID NO: 65775 - DNA, 474 bp, Zea mays
  unsure (1)..(474): unsure at all n locations
tggtgccgatggagaagcanaaatccttgaagtcttgtgtgtcaattgcttgccgntgtcgactgttagttcggtcggtactccgaagcggcaaacaatgttttgccagaagaatttttgggcagtctttgatgttattgtggagacagcccttgcctcaatccatttggtgaagtattcgacagcgacgaaggcgaacttaaggttcccctgagccgtgggcaggggcccgacgatgtctatgccccagcgctggagaggccatgtgtgggcgatcagctttgtaaactacgaagggctgcctgatcgaggggaaaacttctggcaggcttcgcaggactntgtgacccgatttgcggcgcagatcattgcgggccagtagaaaccttggcggatcaccttagcagctagggcccttggccctgcgtgagagccgcangtaccactgtggacttcgcgtaggatctggacacc

SEQ ID NO: 65776 - DNA, 341 bp, Zea mays
  unsure (1)..(341): unsure at all n locations
agctnggtgtcaaatcgtcgcttcatttcatacgtgatgtttggcttgtgtcctattttttcgtgcgtcgtgccctcttataaataattgctcccttgagctgttttgttgcgccttgcttctaccttcttcgggacgattccttcgtggcccgttatggactcaggcaagcgtccggtggaagagcgctcccgatgttgcgctctatccatcaagagatgattgactcagggtacaggctcttccttctcccgtccctagattcttgtgatggtgcttgtcccgttttcttcctttctcagccaagtgatctcgacgggacaggggaaagactttggatg

SEQ ID NO: 65777 - DNA, 492 bp, Zea mays
  unsure (1)..(492): unsure at all n locations
ntaggggaatagtcataaaatattcccaaaaataaagttgtatcacatttatacccctgaggtaccaaaaatccccatttgaaccctggaaaaccctaaaactaaaaccttggggcctatgtgcaaaaactgtgcacatttggaccaaagtgtaaaaattaccatgataaagcatataaagtcacatggttcacatttggaaagatttacaagccaaaccctaagttttggactcatttgcaaaaaggcccctagttgtgatttcatgctaagtctgaatttcagattgatgagctcaactttggagccttgcaacttttaaaatatagggtttttgccctggggcaccacatcaaacttatagacctattaatggataacaagtttgcttaagagtgcaagccatgttcttgtgagaaatttggagataatcatgctcaaactntggctgtcaggctgattaagtctgaaaatcagactgacagtggactg

SEQ ID NO: 65778 - DNA, 449 bp, Zea mays
  unsure (1)..(449): unsure at all n locations
agctngcataggatcaatggaatntctcctttcatccgtttcacaacatctatccgtagatttctactgcctagttcactttcttgtgccatcgtgtttcctcagaagtttgttttgaagcaaaaattcttttcaaccttggcaacagtggaaaatgcctcaaaaccttatgtggaacccgcttcgaacaagtttcatctttccatctagactccttgcatactgggcactcattcattttagcattaacatttcgaaacaacacacaattgttcttgcacacatggatgttttcgtatccaaggcccaattctttaaaatatttcatggcctcatcatatgattttggcaactcactgttagggtatccatctgacatcagcttcatcattgctgataatggtgattacagatttacaatgagacttataacaacatcctcacataaa

SEQ ID NO: 65779 - DNA, 484 bp, Zea mays
acctatgaaactcagcttccatgtggcttgacattccatccgagcccgatctgaccgtgggaccgtcacaagttggtgttcttctgcagtccgaatccagcatgttcaaatccttttccctttcggtcttctccctgattcctaagcaaaacaagagtgcacgggtctccatggtctaaatatgatggacatgaactcaagagtgtaatcacctgatggttgagttgacgagcacgagcgcgagtaatgggaccagaaattggtacttgtattggtatagatgcatcagtagtgtggatgtcttcatcattttatctcttttgagaggaggaaaagacgttgcatgacatgagcaccattttcttcacgtcaacagaatagttgtggagagctctaatagttggattctagtgtaataacaaccatcgtttatagtgctagaggcgggtatgtcaggtgtttcatacattgtcgatacatggat

SEQ ID NO: 65780 - DNA, 374 bp, Zea mays
  unsure (1)..(374): unsure at all n locations
agcttataccttcgtaatataatgtcagcgtatattatatgataacatanaataaaaggtctgagaaggacaaattatacatgtacaaatcacattataattacttaatatattgaattattggatacagaaatacctttgccttggcaaaaggttgaattccgacagatgcgattgcaaaataccagaatgcgtgaacagcaacggaatactgttcactatttataggcacaggacgcatcctgtgaggaattacaagtatgccccttataaaagcttacaacattgactcagacctttatggactaaatagtcattctatctttaagtcggtttatactgtctaagcttcatggaaagaaccttcgacatct

SEQ ID NO: 65781 - DNA, 409 bp, Zea mays
  unsure (1)..(409): unsure at all n locations
ntatgaagaggaaccttcggccatcttatactatcagcatcagtcgaagaccgctttttcctataagaccttcggcgacgaagcatggacccaacagtagcccctttcgcggtgctagatcgtttttcgtaacgagcttgatccgtgaaaaaagtctctttaagcttcggggagccgaaggtctaaaaaacaccttccctgagctcgttgtcgagaaacgattcagttccccagcacatagcggtcccaccttgcagagttactgtttgatctctgcggtccaccacacagtgagtgcgagcaggtgtccgcctggtgtaaaaatcctggctcttcgccttcttacctgcagtactatataaacagacgagtaggtgtgaagttaccaccgcattcattgctatttgac

SEQ ID NO: 65782 - DNA, 414 bp, Zea mays
  unsure (1)..(414): unsure at all n locations
agctngaacacgacataggcattactaactacggaacttctatatcacaatcaactagagcaagaaacatacaaaacgtgacactcgtgcattattaagcttagtcatagcaagtctacattacttaagtgttaactaagcatttttagcaaaagggtcaactcaactatcaattaagcacttgcagaattttaggacagcagcacatcagtcacttgctttaaccataacttttcaaagattaatccaaaaatagcaaactaggacattccggaaagcttaaaaagtgaactacaactttggtatttttacctccacaggattcagcacttagcaaggtcaaacagtgctaacacaacagttctgtccagaattggacagattcagacttgaacttcaaaaaatcacaactac

SEQ ID NO: 65783 - DNA, 449 bp, Zea mays
  unsure (1)..(449): unsure at all n locations
tcggtacactacgacttcattntcttcagggtgtggacatgtcttctcccnctcgtcggccctcacaacggacaaatcccggaaataccttcctctcatgttggcaagatgattctctttgatagtcgacttaccataaactgaatggcttggtcgccaaggacgatcttcggagtcttcaccaccactgtccacatcataactgtcgctgtcaccggtatcttcagacaaaccttccagaatctccttggtgattttttccgtgttggtcttcgacatcgctataagaaaccccaagtttttctcttcatcaagactcagcttcatctcagcagcagccttcttagcttcagacatcttcggaagcactaaaaaactgttttcaaagccgaagcttcaaaactaaaagctcagcaaatcttagtgtgcaagagctaaaaatngagtga

SEQ ID NO: 65784 - DNA, 303 bp, Zea mays
  unsure (1)..(303): unsure at all n locations
catgcaagcttctaaatggagagcacattngacgatttataattgttcattttgagaaagacttgagttgtagcgcacgccacgcatggaaacatgttggcgtctatcacacacacaataacataatgactaccgacaggccgattgagctactccacatggatctattcggcccgaatgcttacataagcataagcggcagtagagactgtcttgttattgcggatgattatactcgcttcacatgggtagtttattttacaggaaaaatttgaaacccaacacaccttaaagggattcttt

SEQ ID NO: 65785 - DNA, 466 bp, Zea mays
  unsure (1)..(466): unsure at all n locations
ttatgccatcaaactgagtgcagatataacgccagctgcttatctcngccttgaactctaggaaggcgacgtgaataacttgcgagtgtgtcttcaagactcaccttcttaatgccattgcctgtaactctccaagccccatgcgctgagcttcctattcagcaatatcatttgctcacctggaatctagcatcgctgcctaacatgttctgaccttggaaagtgcaacatagagatagtaacgcgcacctgcgccgatagttccccaagaaccgtcgcataacactatacaagcctcatcatccatatgtgcttcttcttactgagaccctggcggacaatcgacactgacatatgctaacgcctgcgactgaatagacgatctatgcacatcatcaacactgaattctataagctgctgcccccactttacaatccgactagcagctgctcttgctctcatgat

SEQ ID NO: 65786 - DNA, 423 bp, Zea mays
agcttggcttccattttgattctatagttgttatatttggaccatcacttacaaattcatctttgtgactgccctttaatatttgcaatacagacttagctgaattggttatgatatattgcattcatagtgtggtgattgctgctgcttattacaggcgctaccagaattcctctctttgtcgagtgtcaaatgatttgtgaaagggaaatgtgcccttgggccatttctaagtattttggtgattgagtgcaaacacaagggcttaaatgtgaaaatatgctcatggatgaacaaagtgcaaatcacaagtaaaggtatgtttctaagccttagtacattagttttgtgtactaacatcttgtctaagtgttagaaacaggagaaagaagaaaagaaaagaagtggagagtggctgtgtac

SEQ ID NO: 65787 - DNA, 506 bp, Zea mays
  unsure (1)..(506): unsure at all n locations
tcagcttcgtctaaccatgttcttgtatactcgcaatctgacttcttatgtacctgctcacatatttctcttggaaaacatagtcaaattacgttnttgaggaccttcggaagccgaaggcccccaacaactgtctttttactgatataggtgtcactgtctttagaagaagtgatgattcaatagcatctaagggtgtgttagagggtcagctatacttagtagaatttgatagagctgaactcgacacatgcttaattgctaagactaacatgggttggctctggcaccgccgactagcacatgttgggatgaagaatcttcacaagcttctaaagggagagcacattttatgactaaccaatgttcattttgagaaagacagggtttgtagcgcatgccaagcaggaaagcaagttggtgcccatcatccacacaacaacatcatgacgaccgacaggccactggagctcctacacatggatctattctgcccgatcgcttac

SEQ ID NO: 65788 - DNA, 385 bp, Zea mays
  unsure (1)..(385): unsure at all n locations
gcaagctngaagctgggttaagcgccatgacgaattatgatctcgcatacagcctcgcgtacaacagcctgaaggtataggaattaaacacttgaaaaatccccttatttttacgcaactcattcctgttttcttatatgaattctttttcgtatagggcctgatcctaagcaacgcactaagagcccaaaagagcgccgaagatgaaagctatgaaattgcgtttaataatttacgctccgaagttatcaaactgagaaacgaagctttggaaaaagataaaattctacttacactggtagataaagtgaaaaaagacgaagctgcttcaaaggcccaggccgaagctcaaaaacgcgagattaaagatcttcagaaacagctg

SEQ ID NO: 65789 - DNA, 509 bp, Zea mays
  unsure (1)..(509): unsure at all n locations
tatacatactcaagcttcttctgccacctgctgngtatgtcaaaccatgtctggcctgctttngagtttctttaattggcattgcgctgagagtcatcttgtttctatttgcctggttgctattgctaacatacagtcagatgtagtgtttcagcagtactctgtttgccaacatagagactntgaccgcatggcagtctccttgtttaatttttttttccaaaaaattaggttgngacctcaagaatggtgagagccacctggactcgttgcttagaccagtgctcttggttgctcttgtcaaacttgggcatgataagagtataaatgagggagctaggcgtttcagtatctttgtacatgatcggaacacttctcttcttcgtcctgataccagaaagggcctgccttnttccttactttatatgatgactcttgcgttgacctacctcatatttattgcgatgcactacaggctgcatacctagctgcaatgcagaatgtaactg

SEQ ID NO: 65790 - DNA, 436 bp, Zea mays
gcttctaaagggagaacacactttgggactatcatatgttcattttgagaaagacagggtttgtagcacatgccaagcaggaaagcaagttggtgcccaccacacaagaatattatgacgactgacataccgctcgagctactccacatggatttattcggcccgatagcttacataagcatcagcgggagtaagtactgtctagttattggggatgattattctcgcttcacttgggtattctttttgcaggaaaaatcacaaacccaagagaccttaaagggattctaaagacgggctcaaaacaagttcggattaaggatcaaaaagataataagcgataattggacggagttcaagaattcacaaattgaatgatttcttgggatgagggcataagcatgagttctcttctcctacacacctcaacaaaatg

SEQ ID NO: 65791 - DNA, 503 bp, Zea mays
ctcagcttgcggtatctctcgtgtggccttccgtagtatacatacatgtatatgttacaaacagacgcctaaattcagtcgacgtggatatagataaaaggatatttgcatgagattataatctgtttggattatataatctaacagatttctcacagatcaatacatactcaccaaccataccgtgtttggtcaagggctccgttaaaaatgcatgcgggtgtatacgtagatttaagatgcaaagggagggccacaactgttggttgtttcgtgtctaccgatgtaacttttaacattgtttcaagacactatgatcacctgcgccaacagagttaatacatcagcacgcctagcgagtaccgacagtaacgcgaagggattcgaatttctcacagcaccacacgatttcgttacacctctgctcgaacaagtcagcagatcacacataattaccgtaagtgtcagcagcgaaagctcttactccgactagtgaccctccg

SEQ ID NO: 65792 - DNA, 457 bp, Zea mays
  unsure (1)..(457): unsure at all n locations
agcttcgaggcatcaatagagctatcctcggtcctcaactcctatgggcagaggcgctaggggcttcggaggaaggtttggggatcagcccatgaaaatttattgcctattctgcggtgaggacaagggccataccaccaggatgtgccatgtcaccatccagaaacaaaaagagatagcagaagctgcagcccaacagagccagccgaagcaagttatgcatactgcttcgtaccactcaccgtacattccagagtatgtgggtaaccattctgtagcttctgttgcttcgccaagccaatctcatgcatcttggcaacaacttccacctccaccaccaatacaacgaggccagcagtcagaagggagccagccactcatcagcaacgagacttcagagaggagtctgaagctcgtacagtcnacagtacttgtccagagtcgaagcacatctact

SEQ ID NO: 65793 - DNA, 474 bp, Zea mays
tcagttccatctatattatggattgccttggagtcagtccatctttcttctgcccttctagcagcttcctggcttccatggatagcaataggcccttggtccgaaggtatcttcatgcaaagataggcaggatgaatgattgcttctaaggcattaagagtaccacgaccaataattgcattgtaaggatattccatgtcaacaatgtcaaacacaacttgctcagttctagtgctgttgatgaatccgaaggttactgacatggtgatcttgcccagtgctacaatctgtcttcctccgaagccacaaagaggatgtgtagcatcatgaatcttatcttctggctcttgcatctgtctgaaggctatagcaaatatgatgtcagctgcactgtctgtatcgaccaatacattgtgaaccatataatctctgataacacaagagataaccatggcatcgttgtgtgggtaatct

SEQ ID NO: 65794 - DNA, 389 bp, Zea mays
catgcaagcttagcttagctattttttgttaccatgtttcttgaatcatttcatattgtgcagactctggcgcatctttacctgaaggtgtgaatcctattgatgtaggtgcactggtgaagtgctaccttgccagtatccctgagccgcttactacatttacgctctatgatgagcttcgagctgcgagggttagcattcctgatcttagggatatattgaagaagcttccaaatgtgaactacatgacaatagagtttgtacagcattgcttcttcgagtcagccataaatcatcacttaacaaggtagagcgtatccctaactttttatattagtcttttctatgaatcattttcaagatattcctttttctttggtatggtattt

SEQ ID NO: 65795 - DNA, 291 bp, Zea mays
gaggcgaagcttaaagatcggagactgttcccatctttgaagcgatgctacgatccggactggtgacctcggaaggactccgtactgccgagacagagcagactggtgccgagacagaacaagttgctgccgaagcataagaaggaaatattgaggaagctgatcccgatgatgattaccatattgtcgtgccaagcaagcccagccacttggacttcggaaagtcgactgtctctaatgctgatctctccaagatggtgaagttgggttacttcagtgagaatgagaaga

SEQ ID NO: 65796 - DNA, 352 bp, Zea mays
agcttgctatattcgggtctgatctaatcacttgtgcagtataagtgtgtgcatgtattatgcctactcaatatgtttttttggaagaaaaaaaaatcattgggtgtacatgtgtattatttgatccgtccctgatgcccgctccttcccttcgcttcctgctgcgcggagcgcagtaccgggcaccccaaaaccctgatctaagctatctttatttggatgcgaaccaatcacaatgctacatcgagtgtctgcaacaaaaaaaaaactgctgtacatgtgtagttgtgtacacccatgttctaatataccgggcctgctcctgaatctagcagaagaggaggtgagacga

SEQ ID NO: 65797 - DNA, 501 bp, Zea mays
  unsure (1)..(501): unsure at all n locations
actcagctaaccttgtacgaggataagctacctttggttcaaaggtggaaggtccttaagtctctttgaaatccttaagggtaattgcttaaaatgtttccaacatgctttcataagtgcatagtctgtcgtgagcatcacacttttattatgacacattgcacttcacagtttctatgatatagatgtgttctcgttaacctaattatgtgcacttggcatttaaggccaaaatttgtattcctctcaaggcacatatttaggggggagcaatctatattatatagaactgtttaagcctaattgacatatccttttaactagggatgaaaacggtcggaaacagtatttatttggtaatcagttntttagtcgtttttctttgattgcgaataaatagaatatagaatctaccatacaaatttgcattcttggtttaacatccagcttataaagattaataaaagataaaccttaaattcatcctatattttcttaaat

SEQ ID NO: 65798 - DNA, 401 bp, Zea mays
  unsure (1)..(401): unsure at all n locations
agctntgttccagtgctcttcattatcacgtattatataccttcagggcgtatgtnccgaagggttcttacgaaactgagggcacaggcgccaacgtgttgcccaatgaaattgtctattgagggccatgattaaggggggcttcggcccaggacctacatgcccaatacttttcaccaggaaaaccccctcagaaccctggagaaactgctttagaagatggatgaatacatccgtgctgataatgactttcgacagagaagggaggaagcttacagattctccaaaatgaccaggggcttcggagggagagtccaccctaggcacgtcagatcaattcattccactcaaaatgatgacaggggaagtcagcaacagaggccgcaatatttctcccaagc

SEQ ID NO: 65799 - DNA, 460 bp, Zea mays
  unsure (1)..(460): unsure at all n locations
actcagctgaactcgtctattgcatgtcaaggatgatcttgctttatccttgcttataatagcctaaaggtgcatatattttttcttgtaaaataaattatatttgtagctnttcttgctaccgttatgttctcatatttttttattagggcttgattctaagtaaggctttaaagtcccaaaaggaagcagaagatgagagctgtcaaatagctcttgggaatcatcggtcagaagtcattacactaaggaacaaagctctcgaaaaagataagatattgctttccttagtggacaggctaaaaactagcgaagccaaacttagtgtacaagccgaagctcacaaagtcgaagttgaagatttaaataagaagcttgcagaaacgagcaaaaaaattgaagttgcaatggtgaagcacgagattagcgaaattgaaaaatcaagggcacacaagaatgt

SEQ ID NO: 65800 - DNA, 372 bp, Zea mays
agcttctaaagggagagctcattttatgattaacagatgatcattatgagaaagacacgatctgtaacgcatgccatgcacggaagcaagttggtgcccatcatccacataagaacatcatgacgactgacaggccactggagctccttcacatggatctattcggcccgattgcttacataaacatcgacgggagtaagtactgtctagatattgaggatgattattctcgcttcacttgggtattctttttgcaggaaaaatctcatacccaagaaaccttaaagggattcttgagacaggctcaaaacgagttctgcctaagaatcaataaaattagaagcgactatgggacggagttcaaaaactctc

SEQ ID NO: 65801 - DNA, 493 bp, Zea mays
  unsure (1)..(493): unsure at all n locations
tatatctcccatagctctaggtgtgcaaaagattcatgcatgttctatccattgtattctgtatcatggcgattntgagaacgcagcaagatgcctagtttgcaatgtcagtcgatacaggaagtgctacaatcaagactgtgtaaaaaaattcccgaagaaaaataaaaacaagaaatccactattggacctgaaagtgacgatgacacttttgatgacatggatgggaaaaagaagtcaaagaccccagctttggtgatgtggtatcttccagtaattcatcgcttgaaatgtttgttctcaaatcctanggaggctgagcttatgcgttggcatgctgaaaatcgcaagcagaataacgaacagattcgacaacctgctgatgcatcacaatggaaaaatttcgatcttatgtatcctgagtttgccaaataaaccagaaatgtaagatttgctttgggtacagacggaatgaatccatttagtgaaaaa

SEQ ID NO: 65802 - DNA, 432 bp, Zea mays
  unsure (1)..(432): unsure at all n locations
agcttctattctagtgattaccaaaagatctctattgaagcacactaccaaggctaccaattgaaaaatcatcactgtcatagctccatgatatttaaagataagcatctaggatcaccaactattatagagcacgagcaacctttaaatacgcaattactcacaactttagataccaattactcgacttgtggaggtacccaagtcctaattgctccatttcttgctcatcttcccttttccaccttgagactatataggatcactcaagaaacagttagtctcaaaagacacaagttatgtgtgctccccctcaagttgtgcatcaagtatttgaatgacttgcaccttgcacattctagncgtctcagaactagaggggatcaacacatacccttgtctaggcataatatatcaaattgcatcacaaaa

SEQ ID NO: 65803 - DNA, 472 bp, Zea mays
  unsure (1)..(472): unsure at all n locations
tctccttgactcctatntatccagcatacccttgagagtcttttccttagtcgggtaagacttgctgagtattccaaactcagggtttatcccttcgttgtttttaggtgaggaagtagcagacttttgctgcttctgtgctaaggtggttcccaacaaggaaaaccaagactgaagtgcgggaggacttggtcctccatctangatcttttgttttttttgtctttcgggagaagttggtgtctccctggtttgtattatattacctctatgcactcacttttaggctggtctgtaataatataactcaagcttactttgaaataaatgtaagattatgtaattcgcttccgcatttctttatctccgatgttctgtaatgtctacaagatgggtgagacgttcctggtaaggtaaggaaagataccgaacttgtcaagtagttcaggggcacctacagggttgtctgatg

SEQ ID NO: 65804 - DNA, 411 bp, Zea mays
  unsure (1)..(411): unsure at all n locations
agcttatgaagattcttcatcccaacatgttctagtcggcgatgccagagccagcccatgttagtcttagcaattaagcaagtgtcaagttcagctctatcaaaatctaccaagtatagctgtccctctaacactcccttaaatgctattgaatcatcacttcttctaaagacagtgacacctatatcagtgaaaagacagttgtagcccattttgcataattgagatacagaaagcaaattgtaatctaatgaatctacaagaaaaacattggaaatagagtggtcaggggatatagcaattntacccaatcctttgaccaaaccttggttcccatccccgaatgtgatagctcgttggggatcttggttnttctcgtaagaggagaacatcttcttctcccctgtcatg

SEQ ID NO: 65805 - DNA, 492 bp, Zea mays
  unsure (1)..(492): unsure at all n locations
actcagcttgacagatntatgtttttgtacaatatggcgcattcttttctcatccttgagttnggattcttaatttaccatatttattttccttgtccagcttgcaaagaagggagaacaattcattgatgtcccttatgttgtgaagagtatggatgtgtcatttagtggcatattgagctttattgaagctgcgacgattgaaaagcttaaaaataatgagtgcacacctgcggacctatgctactcattgcaggtacttgcatgctcttaaacttttcccccttgtggataataattggttatgctttcttgacagtgacactgatgaaagtcctaatttctcaggaaactatctttgccatgcttgtcgaaattactgaaagtgccatggcacactgtgattcanaggacgttcttattgttggtggcgtcggttgcaacgaacgtttacaggagatgatgaagattatgtgctcagaaagagggggt

SEQ ID NO: 65806 - DNA, 237 bp, Zea mays
gacccctttcagccagccttttggctaaaaagaccttaggtttcgaaaaaataaaccggcagccctgcttatagggctaggtgtttaaggaccttttgtttcaaccccctggggttcaaagaaatggaggcccactccatagttcttaaagtccggttgtttaatgaaggaaattacttttaaataccaaagattggtaagacctttgataattcatgaaaaatccttaggaactcc

SEQ ID NO: 65807 - DNA, 501 bp, Zea mays
  unsure (1)..(501): unsure at all n locations
acacatgaaactcaagctaatntcacttatccatggctaagacaagcttatctccatttaatccncgncnnctcccgctaatcctcgcctactgcccctaatactccaccttgcctataaatagaggggcaaggggctccttcatgccatcataagccatttcacagcaactcactcccactccccacacaagcacaacacgggcacaaggatcgttcggtcgttcattcgatcgtttgtccaaacgaacatagattgttcatttgtccgattgttcgtctgatcgttcatgggtcgttcattcaatcattcgatcgtttgtccatcagttcgtccaaataatctttgtttagctgtcatgctgctgaaattacgatcgttcgttcgtttgaacattcgatcattacttcgttcgttcataatccctattcatcttccgttcatacgaactattcatcgttcattcatacgaactattcaccattcattggatccgtcatg

SEQ ID NO: 65808 - DNA, 460 bp, Zea mays
  unsure (1)..(460): unsure at all n locations
gcttggtgaaagttccccgtcccgaccgaatgtctacgttgcagctcgagttcgatttcgaccgtggcggccctcaccactccccaagttggtgaagctgggccacgcaggagaggaggaaaacggcccaggttggggttttgtccttttctttttctttttccttttctattttctttcttttccaaattcaaatgttcaagtcaaattcaaatttctattttgaattttagatctccaatctcaaacataatcctaatgtgaatatgaatcctactattttcaatattattatttattctccttcccattatttaattctagtagtaatatatgaattcattacaatttcctttctcattttctgttttacattntcatttataatttgagggtcaaattaaggtgtgattcctttatttcaataaaatttatcacaataaaatcatcagcatgagat

SEQ ID NO: 65809 - DNA, 489 bp, Zea mays
gagttctgtgaacaaattggcacgaagatccactttgctttggttatacatccggagtcaaatcgacttgtcgaaagagctaagggcattataatgacgggaataatgaagttaatcttcaatcagcccacgggaaagtggccagatgaattaatcaaagtggtgtggagccacaacacaacaatttcaaggtcaacaggctttacaccattcaaattgctgtttggtgacgaagcaataaccccagaggaagcaaaagccggatcaataagaacagtggcttcggcagaggacgaagctgattattctgtggcaaaagatgatatagaagggatcaggcttcaggctgtggagaacatcaataaatatcaagctgaaacaataacatggcgtgacagaaaagtccggttaaaaaatatcaagccagtgcacttggtacttcggagagttgccaacccagaaacagtatgcaagctacatgtaaagtgg

SEQ ID NO: 65810 - DNA, 458 bp, Zea mays
  unsure (1)..(458): unsure at all n locations
atctctaaccacctgcngcatgcaagcttgtgagcagtacaatacagaagggagattgatgtttcagcctatcagccgaaacccatgcttttatgcgaagatatcgcagagcagaaggtgctactgggatctcaattgtctgaggaacaagagaaaaccctgataaggtttctcttcaacaacaaagatgtatttgcatggtcggctaacgatctctgtggcgtcaacagggatgttattgaacactcgctcaatgttgatccatccttcatacctagaaagcagaggcttcagaagatgtctgatgacaaggccgaaggtgctcgaaatgaagtaaaaagactcctcagtgccggagtcattagagaagtgaagtatccagaatggctggctaacactattatggtaaaaaaaggccaatggcaaatggaggatgtgtattgattntactggtctca

SEQ ID NO: 65811 - DNA, 500 bp, Zea mays
tctgctatgggtactcccttcgcccctcgttctcctgatgtaccttcttaccctcctcctccagatgtgaatgagtggtaccagcaggcgtatggggtacctttctcttcagccgatgacgtcgaagaagaaacttatgttgatgatccggagcagtttgacccgcccccatatcgcggggatccgggtcaatcgtcctcttaccctccgccccaggacccgtctggcagtgctcctcctccgacccagtctggagaggaacattttgcctacgacctggcgcaacacctctttgctcctcatcaacctcctcctcactggtgatccttggcttggcgcgtctctctctcttttttttggttcttggtgccaaaaagggggagaacgtttactattcagtactttatttttgtaatgaactcttggtctgaataactctatttgctgcatgcatggcttgagagccataaacacttgatgatgtgttgagacgagctctc

SEQ ID NO: 65812 - DNA, 483 bp, Zea mays
  unsure (1)..(483): unsure at all n locations
gatatatnggtccttttcttattctggaaagatatgggccagtggcataccgacttcagttacccgaaactttgtctgctgtgcataatgtgttccacgtgtcccaattgaacaaatgtcttcnggttcctgatcgaaccgttgaagtgacagatgttgtccttgaactggacttgacatattctgagcaccctattcgagtcttggaccaaaaggacagggttacccggagaaaaactctcaagttntataagatagagtggaaccaacattccgaagatgaggctacatgggaaactcaagactttagataagaatttcccaggctttttagcctctcgtaaattgtaaagcatgtatagctgttgtaataaaggagtaaatttccaagccacccctgccttgtaccagaaataaggaaataaaagtatgtcgcgtntncttttccattacttaccctanngactttaatctcgagacgag

SEQ ID NO: 65813 - DNA, 461 bp, Zea mays
  unsure (1)..(461): unsure at all n locations
gcttcgtggacggccatctgcgcttcacggctgacgctaggttccctctcaggcaattcaattnttctcacaccgcgttttgcaaccttcggngcagtgaatagtgggtggggtcaccggagggccaagcaccggcgagaccgccgccgcgggcactgttttcgtcgtcgccgagaccgtaaggaggaaggacataggagcgccgtccgataacgatcgtatggtcgagagagatcgcagggataccctttcggactttgatcgtggaccgttggatgtgatctgacagacccgatccgatctcgcttgcatagagttaccaccgtcagatttagatccaagggtctagattggataccggttcgtttaaacaaccttctaatcttagtcgtncacttacgatccaacggctgagatctgtgagtaccccttcgccgagcctgttnntgtaaaaagccctg

SEQ ID NO: 65814 - DNA, 474 bp, Zea mays
  unsure (1)..(474): unsure at all n locations
catttttgatatgcaagtacacctaatcatacatctcgtggatcagataaaaatattagggccactatatttacatcatatgtttcagttggagcgatacctgcgagtattaaaaggttatgtgcgaaatcgcgctcacccagagggttcaatcatggagggatacactacagaagaagtgatatatcacactaacagtatatccctttatcgatggaaccagcttgaatggcagacaacgagcagcctagtatggatgtggtctgcaccggtgcgtctaacaaagttgatgaagacgcgaccaaacttgaatggcagacaacgagcagctccggtgaagggagcggngaggatagttctagtgacgacaatccttgtactcctatacctccaaggaagaagaaacatcagatgagcttgatgccgactatattcccaacgatgaagaggtaaatagaaatatgccgactatat

SEQ ID NO: 65815 - DNA, 462 bp, Zea mays
  unsure (1)..(462): unsure at all n locations
agcttatcanatatatgtattcatgtttgaatttaattattatgttctcaatgcactaggtttaaccaaggtgagtgatacgaatgtgatgacaaagatcggctcggcgctacccaataacaaatatgcctccatcatatcatgcatatatatatatatataacatggaggacatgatcatcataaccccacatttgccattggcaatactgtggcaacaaaaatatcacacattataggtcaagaagcttcttcatcaagcaagtaaaacattgttgtcacatgtaatgagcataaaaagatgaagaagaagtgcaagctagtttaatcaagatcaagcttgggtgaaagaagaacacgatgatcaagaacaagcttcctcctcttcctctaatgatggaaccataatctatctatccttagtatgatatcaaagatgaactactagcaatttttcatgaa

SEQ ID NO: 65816 - DNA, 480 bp, Zea mays
  unsure (1)..(480): unsure at all n locations
aacaaccgnggcatgtactaaatcccttgataaataatctaggacttgaggattgccaagaggaatgaacaaaagaagaaaatcaatacctcttccaaaagcctcaaccatgcctccataaatggtaacatccaaggtaataatcaagtcacacttcacactaagagaagtaagaagtgtaacgaatgctttaaaaaggggcactcgattaggtcatgtccctatattcaaaatgacttgattattaacaaggatgataaacattnttttaaatgctcaaagaagggacacttatttagatcttgtccccatttaaaacaaaaaggcatagtgttagaaaagaaaatattaactaaccatgtagcaagcaagagacaaggaaagaagaaatcttcaagaattgaagatcgcctttgctacatatgccgaaagaatggaatcaatgcaaggattgtcccattggtaacaaccncacttcta

SEQ ID NO: 65817 - DNA, 380 bp, Zea mays
  unsure (1)..(380): unsure at all n locations
agctntatcaaagggactgtgaagagtgcctttctaaatggaccaatcaaggaagaggtctatgttgagcaacctcccggctttgaagacagtgagtatcctaaccatgtatataggctctctaaggcgctttatgggctcaagcaagccccaagagcatggtatgaatgccttagagatttccttattgctaatggcttcaaagtcggcaaagccgatcctactttattcaccaaaacacttgataatgatttgtttgtatgccaaatttatgttgatgatattatatttgggtctactaacaaatctacatgtgaagaatttagtaggatcatgacacagaaattcgagatgtctatgatgggggaagtgaagtattt

SEQ ID NO: 65818 - DNA, 463 bp, Zea mays
  unsure (1)..(463): unsure at all n locations
gagatnggatgggatcgtcatgtgaccaataaatctttatgttaacttccaagccgaagacttgagccaagtaatgtgagaattctgccatgtacgttccaacttccaacaaagatttcagcaaagtaacatgaggattctgccatgtatggtagttcataaaccttagaatccataatagcaaatnttattcatgatattacacaggtacggcaatctaagatatcatattaagggcttgttcggttaggcgtggattgaaaagtattggagtggattaaagcccctctatttgtatagaaggaaatttaatcaccttcaattcccttatacacagacacaaacgaacaagccctaaaagggttgtagtcttatgaaattacacaagggagcatggtctagcatgttgggaggtggctccttattctgcaactttgctttgagcttcaggctcgcacatgga

SEQ ID NO: 65819 - DNA, 376 bp, Zea mays
  unsure (1)..(376): unsure at all n locations
tctgagtcacctgcggcatgcaagcttctgcaacatactgtaatttttaaacttgacaccaaacttattgaacataagttcataacagaccaaacatgagacgaagtaggaagcaagtagggtacattcatctgaaaaacacagtagagtacagtagtgaatcgaagtatcaaacagggggggcagtcagcacatctggcaagcgaaccatccacgggccacaatcagtagcagttcaacagaataaaagcaaaaatcaaaatagatatagctagtaccaggaaccctcgctccagcaagatttgattgatagatagagtaaactttcacacaccacanacttcccctgatgaagcgtccatcacaaaaccgaacg

SEQ ID NO: 65820 - DNA, 458 bp, Zea mays
  unsure (1)..(458): unsure at all n locations
tggtcattntattgctaactgtcctgacaatgatagtgatcttgatcaagtgaacaagagggagaagaagaagaactataagaaggcaaagggcgaggcacatcttggcaaggagtgggattcggattgctcctcgtccgactccgacaatgaaggactcgccgccaccgccttcaacaagtcatccctcttccccaacgagcgtcacacatgccttatggcaagggagaagaaggtatgtactcgagactctacctatgcttcttcaagtgaggacgaatcgagtgatgaggatgaaatagattattcatgtttatttaagggcctagatagaaccaaggtagataaaattaatgaattgattgatgccttgaatgataagaataggctnttagaaaaacaagaggaacttgtgtatgaagaacatngacaaattgtagaagcacaaanatctcatg

SEQ ID NO: 65821 - DNA, 263 bp, Zea mays
atcttgaacatttattagaaaacaaaattaaaatgaatgcgtctaagacaaaggtagcattggcactaacacagactatactactgttatccccagtagagaaaccacaacaacactataccttaacttctggtgaccaatgatctaagggtgtcagggcacatggaatgactaacgaacacatatccccgagcttaggggagcttacctgaaatacaaaaataaaaactgatgtaaacatcttttgcttatgctagtactac

SEQ ID NO: 65822 - DNA, 487 bp, Zea mays
  unsure (1)..(487): unsure at all n locations
tcttcaccatgtgatcactgttatcttgagaaggtttagttattcatttcccttctagttgtgtcaagctcatctttagcctctcattttcttctttgagcttttgatatgtatcatcttttgttcctgcaaatattagctcaaaggaagatttgcttgttgatgcacaacaagcattatcacatggtgatgtagcttcaatttgaatacatgtgcatgagtgaggttgttgggattttaagttttctatcacaacctcatgagcaatatctaatatgatatgatcatccataagattttcatgagagcatatgagcatatcatattttccttgaaaagctagattatcaactatagctnttctacttggtccttaagcagagtatatctattactaattgatcgatacaatcgtaagcgtgatcttgctcaattgaaatagttttatacctttggaccacatcaacatgagagcactttatcttct

SEQ ID NO: 65823 - DNA, 426 bp, Zea mays
  unsure (1)..(426): unsure at all n locations
agctntaactctcgcgagacctttccccgtctctttctaaccatggtaaattcattattgtatgtgatattctatgcatgtttaatctacttgttctcttgtatggtgtattgttggtttcctaatttcaatggatggatgtatgtatgcttgcaatcgcatagagaacgatccggttgaagagcccgaggaactcgcaggagaagcccctgagcagcagtcggttggtggaggcaagtgtcccttgacctatctttgtcctatttattatttaattcacctcccgctttacacatttatgcctaaggattgactagcttttgttatccatgtccttgtctaactatctgggttggattattatttgttagctttatgctattgctcanactctaatcaatgaacatgatgagattatctatgata

SEQ ID NO: 65824 - DNA, 485 bp, Zea mays
  unsure (1)..(485): unsure at all n locations
nttccttgtcgtcatcaaccttgacatagaaccactctgatttccagcctgctgcccacttgcttcgatagctaattatagggaactttgtagttttccgataggcaaagttatagcaaccaaaattatcgtgtaatccatcttttctagcctttgtttgataatgtagctcgtgaacccggcagaagctgtctgcaaatggttccactgcttggcttcggagtgcccagatataaacaataagcctaacgatagcgttaggggtcagctgatgaaaatagataccaaacctcttcagtacctctccaataatcccatgtagggggaaccttaatccagcctttagaaaacttttaaaaataacaatctcatccttctctggcttcggngtagtctcttctccaccgaagcgcaacaacttcttctgattntcagtaaaaaagctcgctnttaccatcttggacaaatcagccttcgaaacagta

SEQ ID NO: 65825 - DNA, 461 bp, Zea mays
agcttttagagacatgagtagatccaaagattcagcaacatccattgaattaaatgtttacgctatttagagataacttgatgaaacaaacgtcatgatcctcggagaagggggtatgagacgggccagaaatgagagatttatgcaagatcaacattcgatacttgagaacaggttatagaagataaccagataatagggcaggatcattaagggatccgaagatttggatgataaggccacaaaatgattcacaagaaaaatgattaccagatccaggtgaaaagagaggtcggcaaacaggatcagctaggatgatcaacaggaatgctatgaagttttaggagcaaggatttatggaaagaaacatggccttgatagggtttgcgcaactaggcaccaacaacaaatatatattttttgacaccagtgcacaagggaagtttagtcgatctagtggg

SEQ ID NO: 65826 - DNA, 488 bp, Zea mays
  unsure (1)..(488): unsure at all n locations
ggactctcgcaatcaaacgaagctccagtttaaagcctacttcttcagaagaaaaagcttcggaagaaaaagttnttagttcccaaaaaattcataattaaatggccagagtgcgctctaccgctagggttgagcgtgagggaggcgaggctgaaggatcggagactgttcctatctccgaagcgatgcaacgatctggactggtgacctcggaagcaatccgtactgccgagacagagcagactgttgctgagacagaagaagttgttgccgaagcggaagaaggaaatattgaggaagctgatcccgatgacgattaccatattgccgtgccaagcaaacccagccacttggacttcggaaagtcgactgtctccaaggctgatctctccaagatggtgaagtcaggttatttcagtgagaatgagaaaaagctacttcgcttcggngggggaagaaactaccccgaagccaggaaaggatgaaat

SEQ ID NO: 65827 - DNA, 436 bp, Zea mays
  unsure (1)..(436): unsure at all n locations
agcttgagccgaggaccagccccaccagattagtgagatcacgctcgccggagttcgtgaccccgccggagcacgtggactgggtaatccactgaaccatttctcgattccttgtgcgcatagcctctacatcacccagtggagctcctcgtgcaccttgattgaaccctaccgccatggtttggccgaagcaggtgccgacgacgacctccgccgcctgcgcttgtggccagagcagctccagccacctccgacgctgacccgcacaccgccgtgaccgccgtgacctccccgacgtcaccgaccaccccaccggagctctactgccgtcggtaagcctcgccgccgtgatctttgccccgngtactgttccagccaaccaaggatcgtgggttagatataggataagtccagngggttatgcgtaggtcagtga

SEQ ID NO: 65828 - DNA, 485 bp, Zea mays
actcagcttctatgttcgctgctggggcaatcttcccatgctctgactctggagatctgtgcgtccttggcgtgctggggaagctttcttgcggaagagaagatgagtatagcgcgccgctcggcacgggcgcactgtttgccagcatacccagcaggcgcgccacctgccggatgaccttgacgccgcctgccagcggatgggacgggacgcattaaatgctgagagggcacgtcgcccgtcagtgcagtggcaggcggtgcgtcttttcctcaataaatgcagggctgcacgacttctcgtcaggttcggcccggtggcttatgtcatatgtcacaagcagcgggtctccacctgagcgggaagtggagggcaaggcccgcacacgtgtcagtaccggacccctgcacacaccagggtcctcctcgttctgggaccctgctggaagtcggacctacccggaggctccgaacttatatgtatat

SEQ ID NO: 65829 - DNA, 442 bp, Zea mays
agcttatgaagattcttcattccaacatgatttagtcggtgatgctagagccagcccatattagtcttagcaattaagcaagtgtctagttcagcttggttattattaaaatcagctaaatatagattaccatctaatactcccttaaatgctattgaatcatcacttcttctaaagacagtaacacctatatcagtaaaaagacaattgtagcccattttgcataattgagaaacggaaagcaagttgtaatctaataaatctacaagaaaaaacattagaaatggaatgattaggagatattgcaattttacccaggcctttgaccaaaccttgatttccatccccgaatgtgatagctctttggggatcatcatttttctcagaggaggagaactggagaacatccttttctccccagtcatgtggtttgtgcacccgc

SEQ ID NO: 65830 - DNA, 469 bp, Zea mays
  unsure (1)..(469): unsure at all n locations
ggtcaatacctgtcaaagcaacagcacatgccatcacagcatctacagaccataccagtaacttggcctttcgcatgctggggattggatatgattggacctttcaagaaagctcaaggaggttacacccacgtattggtggcgattgacaaattcactaaatggatagagttcaagcccattgcttctttaacctctgctaaggccgtggaattcatacaggatataatattcagattcgggataccaaacagcatcatcactgacttaggatccaacttcaccagctcagaattctttgacttctgcgagcaaaaaagcattcagatcaaatacgcatctgtagcgcatccaagagccaacgggcaggttgagcgagccaacggaatgatattggaggcactcanganaagggtcttcgataagaatgaaaaattcacagganaatggataagagaactaccttatg

SEQ ID NO: 65831 - DNA, 439 bp, Zea mays
  unsure (1)..(439): unsure at all n locations
gcttcatgtagctgctgccaaaagtgagatgtgaactacaacctatttctatcctctttggcactccatgtaaacaaataatccgagacatatatataactctaccaatactgcattactatagctggtcttgactagtatgaagtgagctgcctttgttaaacggtccaccactacctagatggagtcgtagccatctctagtgcaaggcaaaccagccataaagtccatcctgatctcatcccatttccactgagaaatctatagcagctgcaaaccaactatcatttggtgttctacctttatactctgacagctgtcacatacggcaacgtgctctacaatttctcttttcataccataccactagaatctcttcttcaagtcttggtacatcttctcacttncaggatgcatggaataggctgttttatgggcc

SEQ ID NO: 65832 - DNA, 457 bp, Zea mays
  unsure (1)..(457): unsure at all n locations
agctntatcaaatggacgtgaaaagtgccttccttaatggaccattaaggaagaggtctatgttgagcaacctctcggctttgaagatagtgagtaccctaaccatgtctataggctctctaaggcgctntatgggctcaagcaagccccaagagcatggtatgaatgcctaagagatttccttatagctaatggcttcaaagtcggcaaggccgatcctactttattcactaaaactcttgacaatgatttgtttgtatgccaaatttatgttgatgatattatatttgggtctactaacgaatctacatgtgaagaatttagtaggatcatgacacaaaaattcgagatgtcgatgatgggggagttgcagtattttctaggattccaagtcaagcaactccaagaaggcaccttcattagtcaaacaaagtatactcaagacattctaaaccag

SEQ ID NO: 65833 - DNA, 499 bp, Zea mays
  unsure (1)..(499): unsure at all n locations
tctaaagggagaacacgtgataggtctaactaatgttacattctatttatgatagaccttgtgcagctggtcaagcagggaaacaggtgggaagctctcatcatgccaaaaatgtgatgacaacatcaagacccctggagttacttcatatggacctcttcggacccgtcgcctatctaagcataggaggaagtaagtatggtcttgttatagntgatgatttttcccgcttcacttgggtattctttttgcaggataaatctgaaacccaagggaccctcaagcgcttcctaaggagagctcanaatgagtttgagctaaaggtgaagaagataagaagcgacaatgggtccgagttcaagaaccttcaagtggaggagtatcttgaggaggaaggaatcaagcacgagttctccgcttcctacacaccacaacaaaatggtgtggtagagaggaagaacaggacacttatagacatggcgaggacaatgcttggaga

SEQ ID NO: 65834 - DNA, 438 bp, Zea mays
gcttatgacctcgcttctggagaaaggatgagaattaaatgtgatgagaagtgtctataaagctttgatcaattaaaggaaagattgatgtcaccaccaatgttggttatgccagatctattgaagggatttgacatttattgtgatgcatgtggccaaagattgggatgtgtgctcatgcaagaaagacatgtgatcgcctacgcgtctcatcagtcgcggtaacatgaattgaactacctcactcatgatttagaactagcagctgttgtgcatgcacttaagatatggagacactacattatggggactaaatgccaagtatacatggatcataagagtctgaagtatatattcactcagagggatctcaaccttatgcaatgcccgtggttggagcttattaaagattatgaattggagatcactatcaccccg

SEQ ID NO: 65835 - DNA, 266 bp, Zea mays
  unsure (1)..(266): unsure at all n locations
ntgtgtggaattggagaggatttgatcacttgcgtgtntcttgtattgaatgcctagctcttgtaagtggttgagaggtggaaaacttggatgcaatgaatggtgggtggttgggggtatttatagccccaactaccaaactagccgtttggtggagctgactgtcatatggcacaccggacagtccggtgcgccagccacgtcaccaaagccgttgggtttcgaccgttggagctctgtcttctgggcccgcctggatgtccggt

SEQ ID NO: 65836 - DNA, 471 bp, Zea mays
  unsure (1)..(471): unsure at all n locations
catgcaagctttatgttatatcattcattagcatactttctcattcttttattatacnnanatttccaggaccagcattctgatggtgttgcagatgatcatcccaacgatttcttattctctgcaacgtaccatcatcacaaggttcgtgatttgaataaataacctaacgaaaggtataaagataataaaattcgctgatttgttgccctgtatatcttgtgcccacatcgtagctaaattgtttacctttgttgaaattagttcttctaggcagcgattttcgtatagccttgatcttgtgagatattgtatgagacactaaacatcttatacaaaatgcttccaattaaatatcaatcggtgattatttctattatgcaccattgtataagagtttgttaacaaaaagcatattatttctggtcattaaattatgggaattttgtgctaaaacacacgcctttatac

SEQ ID NO: 65837 - DNA, 386 bp, Zea mays
agcttatgccagtgaggtgtggatgcaatgtataagacccatatcgaccgtcttatgacaaagaaaatcttgctattaagaggaaaagaaatggagctagggtcaagttccagaggggtctccaaacagcctcacactacaccatcatgtgggagctcctccactcctgtggaaagggcatgtcttactatagatagtaggtcagctcaatcactttcatcaaattcccttgcttaagtacaaaagcaaactccccaggttcaaaagcaacggccatggggtcaggtcactatactcgtcaaggttgtcggaggtctgtgagtcatacgactgtggtactggcacttttcaaactgagactcactaaatattacgcttctgctcgc

SEQ ID NO: 65838 - DNA, 460 bp, Zea mays
  unsure (1)..(460): unsure at all n locations
tctttgccgagtgctatgaccctgacactcggcaaagaagttagctntgccgagtgcctcctaacgcactcggcaaagaaactggcaaaggggcccgctggcggcctcgttgccgagtgctattttggctaacacttggcaaagagggaaactcttttgtcgagtgttatctgatacactcggcaaatatatactatntgccgagtgtcacctagtacactcaacaaaggcgttgtcttcgttaacagccgccgtgacggcggctgttctttgccgagtaccgagtgacactcgacaaagtatttgtcaagtgcccgatgaaaagttcttggcaaataagtcgttgccgatgtacagtatgtcgagctttatttgtcgagtgtcacactcgacaaaaccttcgccgagtanttttcaggggttcccgagtgcttcagacactcggcaaagaacctgattt

SEQ ID NO: 65839 - DNA, 437 bp, Zea mays
agcttgtggcattaagtttcaagtttcactttatcgcctattcaccccccctctaggtgctctcaattggtatcagagctgttctcttcaagaaatggactaaccgcccgaagagatggatcctaagggcaaggggattgtgatgaatgataaggagaaggagcccttcgtcaacgagccgaaggatgacaagcctaccgactcgggctcgggccacaaacgaaaagatgggaagaagaagacaaggcgcatcaaagagatcgtctactacgacgacagcgacgaatcttcctcttcccaaaaggacgacgacaacaactacgagaaaaggaagacgggtaattcaaacttctctttcgattattctcgtattccgcatagttcaaatacacatttgctttccattcctcttggcaaaccttcacactttgatgggg

SEQ ID NO: 65840 - DNA, 493 bp, Zea mays
  unsure (1)..(493): unsure at all n locations
cttgtagganaaggagatgatatgaagccttggggtgcttgataaagttaattcaatttaactcaagctatcaaatcttcaatgatctttatccgtgattgacccaaggttattcctcatattactatgtcttaaactcatatcatctcgaggaagatattatatgttgtaggaagtgaacagatatcatatgcgaaaaatcaaggcctacagcatggaggaaagccaaaggatggtaacacttatcttttaagtatttaaaatatcatttcttatgtgtcttgtgtagtcacatagaaaaattgaagcacttcaaatgtctttaaattgatattaccattccttgaagaatttcctctcatatggtagtttgcacattcatcatttccatactatggcaatctacatgctntaatttattgctagtatgtcatggcatatccttcctctaattatcttgttattgtcatgattctagatatagagagatatt

SEQ ID NO: 65841 - DNA, 390 bp, Zea mays
  unsure (1)..(390): unsure at all n locations
agctngccttcgcctcattctatcatccgcttttcaacggaggtgtggagcgcgccaatggaaaaatcttcacagctgtcaaaaagatgctcctcgatgaaaaaagggcagatggaccgatttgttacccgaggcggtctgggcactaaacacgactgagtgcagggcgaccgggtttactcctttccgccttctatacggatcggaggccatgaccccacaagaaataaaacatgggtccctgcggacagttccctcagccgtccccgacgtggacgagccaacttcaaaggatctcattgacggagaccgagtcttcgctctacaggccctaaacaaataccaagcccagaccaaagcatggcgcgaacacacagtcattccgaggga

SEQ ID NO: 65842 - DNA, 455 bp, Zea mays
  unsure (1)..(455): unsure at all n locations
ggcttatgaatgtgcaatntcataatagtggttgctctattatctgttgtttttccctgatctacgtaattgttggcttctaagtaaaggaaatctttatgcaggcttaaacaatgttcaaagtactagctagtacattgattaggcgatgtagatttacacaagctgatgaacaaaaaagtggagaaattctcatctctttctaccagtactagaaacgtaagttctctactaaaacatggatgtgactgcatataacacaatgtaaggaaccaaacacaactgtatcagtgcacaatgattacataaatcaatttacaatatctctgagaacaacaaatgaataattaaactaaatctagcgatggttatggtttatgggttggacctttctgacttctgtgcctccttttgttcaccatcaaggtcgtctgcgatgacccatatccagcgat

SEQ ID NO: 65843 - DNA, 435 bp, Zea mays
agcttggtgccgatggagaaacaaaaatccttgaaatcttggctgtcgaactgctttccgttgtcaactgttagctcggacggtactccgaagcggcaaacgatgttctgccagaagaatttttgggcagtctttgatgtgattgtggaaacagccctcgcttcaatccatttggtgaagtattcgacggctacgaaggcgaacttaaggttcccctgagcggtgggcaggggcccgacgatgtccaggccccagcgctggagaggccatgtatgggcaatcagctttgtatattgcgaggggctgcctgaccgaggagagaacttctggcaggcttcgcaggacctcgtgatccgatttgcggcgcagatcattgcgggccagtaaaacccttgtcggatcaccttggcagccagggtccttggccctgcgtgc

SEQ ID NO: 65844 - DNA, 465 bp, Zea mays
taactaaatggaaatgttgcaatattagaatggatgagagttcaccagctacaccctctagtgattaagtgaagatactgaagaatttcagagcacagtagagagatcttattagattggttaatcttgctgtccgagggggggtcaaatggcaacaaggtagcacgaatgtagctacgaagcatgcacagtgcctcttcctccttccaattgatcccccgaactaggaacagaagaaatcaaagatgtgcagacaagaatggtgaggcaaaagacaatggtgaaagaagtgactacaaaaaatgaatgataaggtgaaacccaaatacggaagggaagagaggatatgagccctccttcactttccttgtttaatcccacacctctcggagcccatataaaaatgaggcgtgggattaagcaaatggtggcgtgctgtgatgtgctgttgactgctgaccttgt

SEQ ID NO: 65845 - DNA, 437 bp, Zea mays
  unsure (1)..(437): unsure at all n locations
agcttgactaggtttatataaaacagtatctatgtttatatagattnttataaaaaacatgttgcataataattattctcgtaatacttcatcacacgtcttaaatatcagtagctttttaaaaatatcaggtcaaaattaggattgtttgactcttggagaagtgatcttttttcgtttctgaatgagggaatttctctctcatatttaattctaatatcacaccagcattctgtttacttgtcatcctaattaatgctgtataaactagcattgagatcacacctagcaataaatagtggtgacacttgcttggtaaaaggatttttctcttgatgcagnttaaatgaacaaggattttactctgaaacagaacatatgcgcctttgctaattggcagtgccgaaaagctgtaaacacgtcacaagctaacaaat

SEQ ID NO: 65846 - DNA, 478 bp, Zea mays
  unsure (1)..(478): unsure at all n locations
tctaaagagagaacacgtgataggtctaactaatgttactttcgaaaaagatagaccttgtgcagcttgtcaagcagggaaacaggtgggaagctctcatcatgccaaaaatgtgatgacaacatcaagacccctggagttacttcatatggacctcttcggacccgtcgcctatctaagcataggaggaagtaagtatggtcttgttatagttgatgattttccccgcttcacttgggtattctttntgcaggataaatctgaaacctaagggaccctcaagcgcttcctaaggagagctcaaaacgagtttgagctcaaggtaaagaagataaggagcgacaatgggtccgaattcaagaaccttcaagtggaggagtatcttgaggaggaaggaatcaagcacgagttctccgctccctacacaccacagcanaatggtgtggtagagaggaagaacatggcacttatagacatg

SEQ ID NO: 65847 - DNA, 418 bp, Zea mays
  unsure (1)..(418): unsure at all n locations
agcttgtgaaggttcttcatccncacatgtgctaagcggcgatgccacagccagcccatgctagtcttagctattaagcatgcatctagaccggcctcttcttttgcaaaatcaactaaataaagtttgccgtctaatacacccttaaaagctagtgaaccatcacttcttctaaagacagacacatctacatttgtaaatagacagttatatcccatattgcataattgactaaccgatagcaaattataaccaagagactctactaaaaacacattagagatagagtgctcattagaaattgcaattntacctaacccttttaccttgccttgattcccatcaccgaatataattgaatcttgggaatccttattcttgacgtaggaggtgaacatcttcttcntccncgtcatat

SEQ ID NO: 65848 - DNA, 418 bp, Zea mays
  unsure (1)..(418): unsure at all n locations
aatgtctttaaaagaatatttaaattgtcggcgtttcgantaccgggggtccctaagccgacgagtgagtgtgccgcgtgccccagcccacatgggtcgagcgcgtgggcgagcgcgaatgggggaagcgaggcggccggagacgggcgtgagagaggtggaaatcccgcggccttcgtgttcgtcccgcgcccaggtcgggtgcgcttgcagtagggggttacaagcgtccacgcgggtgagggaagcgagcggccccaagagagcgcctgtcccgtcctcgtccccgcgcggccaaccttctctaagaaggccctggtccttccttttataggcgtaaggagaggatccaggtgtacaatgggggtgtagcagagtgctacgtgtctagcggcggaagaactagctgtcacacccg

SEQ ID NO: 65849 - DNA, 460 bp, Zea mays
  unsure (1)..(460): unsure at all n locations
agcttgacactcggcgaagacatctctntntctttntcttccnctcagcaggaaaagttggttgattggctcggtgaggacgcttcgggtgaacactatcagacctctaaatatccaaagctttgccagcctctgggatgggcgctgcatccagtgtttcagcaggggctgcatcagaggaatcttcagccaacatatccagcatggcacttatctcagcatcacttggattcaaaggtacctcgaaatgaacctgcctctcgtcgtcagggatttcaccaagtgaagcaaccaaagcactaacctcttcgggagagggtcgcactctaaggcccaaaccgctatcaccagcaggaggattcgacacaanaatggtaaaagccttggaaggaggcagattccaggccgagtatgcaacaggaagcaccgatgtngatacctngcctctgagtatcatctc

SEQ ID NO: 65850 - DNA, 446 bp, Zea mays
  unsure (1)..(446): unsure at all n locations
cactatagagcatgcttctagncaaatttaaatttttattttctaagtcatgctcattaatcttagcactaagttgagctatgtgatcattntgttggttaattaacgctaggtgatcatgaatagcatcaacattaacatctctacatctagtacagatagtaacatgcttaatggtagatgtagagggtttgcanatatttagttcatcaatcttagcatgtaaaatagcattttcattcttaagattgaaaacaacatcattgcgaacatttaaatctttagccttagcaattaatttttcattctcaatnttaaggctagagagagatgtattcaattggtcaatcttagtaatcaaactagcattatcatttctaagactaacaattgaatcatcacaaacatttaacttctcaacctttagcaataatttggcattttca

SEQ ID NO: 65851 - DNA, 455 bp, Zea mays
  unsure (1)..(455): unsure at all n locations
agcttgtctntcanaaagaagcananaagaaataagacagtttcctatggccagngaaaaagaaaagcgagcattgctgctttcgtgaaaaaatcaggctcaccagaccacctgaccccagatactttcatgcatgtcccttcgaatctccgcatcctttacaatttttaaccagacatccttcgctttttcctggttgtagatccctcagcacacccaatcaattcggatttcttgaatgcgcgtcgtcgtcatcataaacaagcacacggctcacaaacaagcaacgaaacttaacaattgttctacttctctcttcacttcgtctggtttatttgcctatcaggtctttgattgtcaaatctcttgcctgcacaagcttggtttccaggtaccaacaggcttcagttccagatcactgtatatataatcagttaccgttttttttctcctat

SEQ ID NO: 65852 - DNA, 493 bp, Zea mays
ctaagcttgctgagaagctgtggtggagtactatgtacagtcctcttatgtggaaaaggtattgagtcgctttggttttagtgattgtgatcctgctccaacaccttatgaccccagtgtgctattaagaaagaatcggagaatagcaagggatcaattgacatactcccagatcattggctcgctcatgtaccttgcaagtgcaacaaggccagacatctcttatgctgtgagtaagctaagtcggtttgtgtcgaaaccagcagatgatcactggcgtgctcttgagagagtgttgcggtatttgaaaggcactatgacatacggtattcattataccggaaacccacaagtgctggaaggctattgtgatgccaactggatttctgatgctgatgagctctatgccacaagcggatatgtgcttctgtatggaggtggcgctgtttcctggaagacttgcaagcagactatcttaacgaagtctacaatg

SEQ ID NO: 65853 - DNA, 437 bp, Zea mays
  unsure (1)..(437): unsure at all n locations
cccggctattccatacatganaagacaatcgcgcactgggcgtggagagatggcgagagtggcacgtaccctcctggcaacggatcgcctaaaaggggtggtgtactctcgggtggcgcggacctgttcatgcagtggaggatccgtgggaatagtagacatcaagatttacgtgaaacatatgtcgtgtggttagagatcctcagctgagtaaatcgattcggatcgccgttatatccccggagagtggagacttgagctccgacctacaacctaagtcaggatgtgaacacgatggataaaaatgatgttgtcttgatgtgatgtgaaattagactagatgcaaatagagtctattaataattaatatggcgttaaaagattgaaagtaggactcactttagtaagctacttctgcanaagtataagttgatttt

SEQ ID NO: 65854 - DNA, 469 bp, Zea mays
  unsure (1)..(469): unsure at all n locations
actcagcttctaagggagagcacattntaggattaacaaatgttcatttttgagaaagacaggattngtagcgcatgccaagcanggaagcaagttggtgctcaccatccacacaagaacatcatgacgaccgacaggccactggagctcctacacatggatctattcggcccgatagcttacataagcatcggcgggagtaagtacttgtcggggaccataattaggggtaccctcaagactcctaaatctcagctggtaacccccatcagcacaaagctgcaaaggcctgatgggtgcgattaagccaaggatcggtccattcaagggacgcgatcgcgcctcgcccgagcccagcctcgggcaagggcagccgaccccagaggatntacgtctcgcccgaggacccnctacggcaacggacacaccttatgctcgcccgaggcccagtcttcaccaagaagcaacc

SEQ ID NO: 65855 - DNA, 466 bp, Zea mays
agcttgatgtagcaacatcatgtgatgatttgagcaatgttgatctatctagccttcatggtgatttggttcaaaaacttgaagtcatgtcactagagaacaagaaattaaagaattacttgaccaatgcaaccaccaagggaaaatgccatagaaacaaagactttggcaatgagttagtgaatgacaatgagaggcttagggaaaagagcaagaagcttgagactgagaaagatcaccttgtcactagtgtgcaaaacttcaacgagggccaatacctccaaaatgagatcctgatgaacacaatcatgaaaaataacaagagtggtattggatacaattcaattgtgcaaaagaaagcaacaaaccaaaacaaggggtaagcaaaatctaagcccatcaagtgctatgagtgtggagaatagggcagtttgctcacaattgcaaagccacatcaccaactacc

SEQ ID NO: 65856 - DNA, 463 bp, Zea mays
  unsure (1)..(463): unsure at all n locations
ntagctccatctatgttatggattgcttttgagtcagcccattttccctcagcccttctggcagcttcctgactcccatgaatagcaatgggtccttgatccgaaggtatcttcatgcagaggtaagcacgatgaagaattgcttcgaatgcattgagggtgccacgaccaataattgcattgtaagggtattccatgtcaacaatgtcaaacacaacttgctcagttctggtgttgttgatgaatccgaaggtcactggcatggtaatcttgcccagtgctacaatctgtctttctccgaagccatagagagggtgtgtagcatcatgaatcttatcttctggctcttgcatttgcctgaaggccttagcaaatatgatatcagctgcactgcctgtatcaaccaagacattngtggaccagaaacccttgataacgcaagaaataaccactagcatcttat

SEQ ID NO: 65857 - DNA, 448 bp, Zea mays
agcttttttcggtggcatgacgaaagtgattcttgccgaaggtattcaaagctcaagaaatggaagtgagtttaccggaggtgggtgccaatgttggagacttgttctcaaatgctatgaattaagaacaaggcaacataaaatgttaaatatcaatgcccttcgtccttcggatcattatttcccttcggatataatgaatctaggacgaaggtcatgaaggacataccttcacgatcatgataaaagatggagaacattcatacaaaaatacagaaagtaacataatttttgtaaacattattattaatctacttccatttatattacttatgtaaacaatagtaaattacaaatctaccttcggcttgaaggaatgaaaatacaggcgtgacgcaaaagtgaatgccaagtcagcgtgaacagtacgggaatactgttcacctat

SEQ ID NO: 65858 - DNA, 421 bp, Zea mays
tgtatgggcgaagatgcaataatcaaacatatggtccatagctatagacctctagaaagtccatttgtacctcccaatcataatgaaagggatatgatgaacggaaatctgaacgagtttcctgtgaagaatgattacttgaagttttctaccaatagtaactaccaaactggagcaggttttgatcattgttctccagactattcagatgttcttgcaatgggtacaaaaagagaacatgatgctatcagtggccatcagatttctcttggcattgactttattaactcaaatagaacaaggaagttctgtagtgatgaccccctttccactagctctcaaacatcttactgtcctcaatcatgcaaaaggatgaggccagaggatcatagcaatcagctccatggaactatgggtaagc

SEQ ID NO: 65859 - DNA, 409 bp, Zea mays
agcttgtaagagtcgactaaagaacatgatgatgtagagtgctcccatgttgatttcgtccaaaggtatgaaactatatcaactgagcacgataactctttattatgtgtcactcaataagtaaatacgaataccttgcttaaggaccaagtataaaggctaacaattgaaaatatatcttgtcaaaataaacatgatatgcttctatgttctcatgaaaatcttatggatgatcatatcatgttaaatattgctcatgaggatgtgataacaaacttagaatttcaacaacctcactcatgcacatgtgttcaaattgaaactatgttgccatgtgctaatgctttgtgctcgccaacaagcaaatactgtttttgacttgaatcccagacataaatatgtacatatc

SEQ ID NO: 65860 - DNA, 487 bp, Zea mays
gacctataaaactcagcttacatgtctcgcatgattcaatataaacgaagtttatatcccatcagactgaagctacttcatgcgattgtcacttatatgacccacacgacagtgccacatgtctgttgacttacatcattatgccgatgccttttagcactaatattacagataggtgcatcatcaagatttacaatgaataacccattcataatggatgctaaagccacacacatgccattcttatagatcacacaaccatagttttcactcgcatatgagtaaccatccttgatcatacatgaacgagacataatgatgtgactcatactatgaactagatcacaattatttaactcctaaataaatcctgatgggaggtggagatgcatcagcccgaccgtcaacgcagcaactcttgcattattgtctacccggagatcaagttatcctctgttcacgcttctacttcttatcatacactgca

SEQ ID NO: 65861 - DNA, 407 bp, Zea mays
  unsure (1)..(407): unsure at all n locations
agctntaacccctgcgagacctttccccgtttctttctaaccatggtaaattcattatcgtatgtgatattctatgcatatttactttatttgttctcttgtatggtgtactgtttgtttcctaatttgaatggatggatgtatgtatgcttgcaatcgcatagagaacaattcggtcgaggagcccgaagaactcgcaggagaagcccctgagcagcagtcggttggtagaggcaagtgtcccttgacctatctctgtcctattcattctttaattcacctcccgcattacacatttatgcctaaggatctactagttttgttatccatgtccttgtttacctatttgggttggattattatttgttaactttatgctattgctcaactataatcaatgaacatga

SEQ ID NO: 65862 - DNA, 448 bp, Zea mays
  unsure (1)..(448): unsure at all n locations
tcggcttcatctatattatgaatagccttcaaatccgtcctactcccttcagctctcctagcagcttcttgacttctgtgtactgcaatgggcccttgttctgaaggtatcttcatgcaaagatatgctggatgaagtattgcttcgaaggcattaatcgtcccccgaccaatgattgcattgtatggatactccatatcaacaatgtcaaagacaacctattctgttcttgtgttgtgaacttagccgaaggtaaccgacattgttatcttgccaagtgccacaatctgtcttcctccaaagccacaaagagggtgtgttgcatcatgtatcttgtcctcatcctcttgcattttcctgaaagcctttgcaaagatgatgtccgctgcactacctatgtccaccaggacattgtggaccanaaaatcctttgatgacacaagatata

SEQ ID NO: 65863 - DNA, 365 bp, Zea mays
agcttcggtagcagaaagtcctgcaaagccgaaaaaacgaagaattatccaagtggcagatgtgattcatcagacaccgccaccgacatcggtgtcaaaaattgtcattgccgagaccaccgaagccgaagccatcgcagccgaagctactggagccgaaaccactgaggctgaaaccaccggagccgaagctaccggagccgaagccaccggagctgaagccgggaccatcgaagatcctaacctggaaaccacacttgatgatattgacaatatacttctgaaaatggctgaagaagaagctgtgtggttgcggtgaacacggcaactgaaaaaggaaaagagcaaatttgagacattttgga

SEQ ID NO: 65864 - DNA, 503 bp, Zea mays
tattacggacctataaaactcagctatcaagtcagatttccaacgcatccaaccccacgttatttgaagattcctagaagaagttattgtcaaaatactaaaggctgcacagaagtcaaacagccacgcggaaatcagctctgcagatctcccgaagaggctccttcacattagcacgtgaaaatacttttgtttcgtgtttatacctcgctaaggctggttgttactagtataaataccccctatatctatgatgtaaggcaacttttgataatctaaaacagaacccctttgttcagctgtgtgctaacaaatattgagagtgatctctacccctttgctcttgtgaattccttcgcatgattgcagaagcggcggcttcatccgctcccaagtggagctcctactcccttcgaggtctcctcgattgattgtaggctgtgttggttggttctttgagagtcgtggtgggcgaatcctcgatttatgctgacggttaaaga

SEQ ID NO: 65865 - DNA, 420 bp, Zea mays
  unsure (1)..(420): unsure at all n locations
agctggtaaatatccataaaaggtaaatcttatatttatcatatattttcatatattntcataatttatcatatcggtatagattgagatacaaattcagttttttttttgttgtagggcacaaataacacataaaacaatgaatgcaaaaaaaatattctcatttgtaacattgcgcttgataactaanaaacatacatatttattttaaaagatcaaatttatcttaacattcagattaccaccttcacccctaaagccaaagaaactctagaggctggttcattgaccagaaaatggagaggtctatagaggaggaatccccttgctaaatagcaataacaagatattcctccccataaatcatctctaattatctggtcatcaaattaattataggagtaccgtttggaactggga

SEQ ID NO: 65866 - DNA, 489 bp, Zea mays
  unsure (1)..(489): unsure at all n locations
tgaacccggctattccatacatgaaaagacaatcgcgcactgngagtggagagatggcgagagtggcacgtaccctcctggcaaaggaccgcctaataagggtggtgtgctctcgggtggcgcggacctgttcatgcagtggaggatccgtgggaatggttgacatatgcaagggttaagtgctacatatgtcgtgtggttagagatcctcanctgagtaaatcgattcggatcgccgttatatccccggagagtggagacttgatcgctgccctgcaacctaagtcaggatgtaaacattatgaataaaaatgatgttgtattgatgagatggtgaaattagactagatgctaccagagtctattaatatttaatctggcgttaaaatattgaaagtaacgactcactttagtaggctatttctgcaaaagtatctaagatgattcttgctaaagcctttgtcttgattcctatttaaccagcatatc

SEQ ID NO: 65867 - DNA, 305 bp, Zea mays
agcttatgaagattcttcattccacgtgggctagtcggtgatgccagagccaacccatgttagtcttagcaattaagcatgtgtcgaggtcagctctatcaaaatctaccaagtatagctgaccctctaacacacccttaaatgctattgaatcatcacttcttctaaagacagtgacacctacatcagtaaagagacagttgtagcccattggacataattgagatacagaaagcaaattgtgatctaaagtatctacaagaaaaacattggaaatagtatggtcaggtgatatagcaatttta

SEQ ID NO: 65868 - DNA, 457 bp, Zea mays
  unsure (1)..(457): unsure at all n locations
ggagcggccgcccatgacatacagcttcccttctaagctgcacccgaagcagccccaccttggtctgcgcaggccctcgatcagtgtccacttattctgttctgggtcatacacttcgacgctagataaactctcgccgtttggaccaaatccaccagcaacatatatcaccccattgacctctgcacaggcgaagtcgcaccgagctacattcatcttagcaagcacagtccacctgngaaccaatagcataaatgaatcagccaaataattcagaatactcagaccttaatatgcatttggttgaataatatatcagtatcagagttgatgagtttttttttcctttgatgtgttcagtttctctcagtatgccagtttatcaattgaagtttgtgacgctagtaaggtcactgagaaatgaacagaatcttccatagtataataaacttatgag

SEQ ID NO: 65869 - DNA, 428 bp, Zea mays
agcttgtcaccccttcctctcagccatttatcccattaggcccgcctagccccgcacccgttcccccttgctctccctgcgtagcgggcctagcatgtcagcaccaccgctccccctgtgcgtgcccattctctcgccctgcgcgcgggtcccgcttgccagtcgcgctgcgccaattgttcgcgttcgcgtccgtggtcgccgactggtgggccccgtccgtcagtggctcgctctgcgccccggccctacctatcatcccctcctcccctacaactaaactaatctattttccccgcacggcgcgctcccacgtcgccccccgtcccacctgtcagcctcctttccctccatgtcgcccactcgccatgctcgacacctaggagcataaccccccttccctcctttccccgcgtgtgaccacccct

SEQ ID NO: 65870 - DNA, 481 bp, Zea mays
  unsure (1)..(481): unsure at all n locations
ntaaccctngcgagacctttccccgtttctttctaaccatggtaaatgcaatatcgcatgtcatattctatgcatgtttaatctacttgttctcttgtatggtgtactgttggtttcctaatttcaatggatggatgtatgtatgtttgcactcgcatagagaacgatccggttgaagagcccgaggaactcgcaggagaagcccctgagcaacagtcggttggtggaggcaagtgtcccttgacctatctctgtcctattcattctttaattcacctctcgcattacacatttatgcctaaggtttgactagcttttgttatccatatccttgtttacctatttgggttggattattattgtttagctntatgctattgctcaactctaatcaatgaacatgatgagaaatatctatgatacgcagtttcccttcttctttatatgatgtctacttgtggccttaaagggctcgagcggt

SEQ ID NO: 65871 - DNA, 441 bp, Zea mays
  unsure (1)..(441): unsure at all n locations
agctntgatatgaaagattgggtgaggatgatgttattctaaacatcaagctgataaaaaatgaggatggaattactcttctacaatcccattatgttgaaaaggttntgagatcttttgactataaggacatcgagccttctctagttccttacggtcctagtttaattcttcgaaagaacaaggaactaagaacatgccaactgaggtattcttacataattggttcactcacaacttagctagtgctactcaacctgatatctcctttgtggttagcaaattaagtgaattttctaatctaggatatgatcattagtgcatgctcgagagagttatgccacttgaatagtacaatgcgttatgaactagtggatatgcactagccgattttctgatgctgatgtgatatatgcaactagtggatatgcatttactcat

SEQ ID NO: 65872 - DNA, 401 bp, Zea mays
tttcttcacgaagcatgaaaagaagggaagggggttttttccccaaggctcaaataatgggatggatgccaaatttcatgccttcgaaagcattaaactatagattatatatcacattccaagttacaatatattacacatgttacgttcccaatgtttctacagtaacattcaatccttcttaagcattatttctgcagcttcattcaatagctggtcgacaaccttgtccataatggcttcagccatttttctaatatcatcgtcccccttcgggtgggggcccggagatgcctcagcagggtctgagggaagagaagaaaccactatattactattacaaatcgcgaacaaggctagaattataattacagataataacaacccctaattaaatctat

SEQ ID NO: 65873 - DNA, 250 bp, Zea mays
tcatcggcatagtgccgattcaagaaattgaagggaagtaataggtggttttctacctcaacaggtatctcctcaatgccaaactatgtacatagagttggagagactgtacttactgaaaaggaaatacgcccttgggccatttctagttgttttgttgattagatgctcaacacattactatggactaacaactccacatatgagcataagcacatgtatttgaaaggcaaattgagagacataggaa

SEQ ID NO: 65874 - DNA, 243 bp, Zea mays
gcttttctgcttcaacaacttggggctgggtcaacctttgtatcttttgaacttctccctttctgatacgagtccgaaaatacctgctcacacattataaaaccgcttctcccttgaaaacctttggggaccaagcatagacccaacaaggtcctgctaggatctcatgacggatcttcaaaatcctataaactgcatattttaattcatgccatttgccagatatattacatagcggaacag

SEQ ID NO: 65875 - DNA, 250 bp, Zea mays
tgaaatcgagcacacatgcacacactaaacataacatcgggcctaaatgcggtaatataaagcaaattaccaattattgaacgatacagtttttgatcaaccatagtacctccttcatctaagtctagatgaccatttgttgccattggagtcttgatagactttgcattttctaaaccaaacttcttgagcatgtccttcaaatattttgattgacttataaaaatttcatctttcaattgtttgattt

SEQ ID NO: 65876 - DNA, 245 bp, Zea mays
agcttagcaattttagagaacccttcaataaatctccgataatatcctgcgaatcccaagaaactttgaatctcaataactatagtgggtatgctccacaccactatcttcttgacttttacaggatccactgatatttctccattagaaataatatgtccaaaaaatggcaccttgtcaatccaaaactcgcatttactgtacttggcatagagttgattatctcgtcacttctgtagcaccaa

SEQ ID NO: 65877 - DNA, 220 bp, Zea mays
cagcgccaaggggcataagcgccaggggcttccggggaaggtttggaaaccagccaagaaaaatatattgcctattctggggggaagacaagggccatactaccaggatgtgccatgttactatccagaagcagaaggaaatagcggaagcagcagcgcaacagagtcaaccgaagcaggtcatgcatactgcttcgtatcactcaccttatattccaga

SEQ ID NO: 65878 - DNA, 243 bp, Zea mays
agcttccagcggtagcgcctcaagctgttgaatacttgttggagatcttcaatgaagtcatctaagtttactgtttcaatcaccacgtcatcaacataggcttccacacgcttgccctagtgatcaactaagcacgtctggttagtcctctagtaagtcgctctagcatttttgaggccaaaccgcatggaagtgtagcagaaagccccgaagggcgtgatgaacgcaatttttccttcatcc

SEQ ID NO: 65879 - DNA, 250 bp, Zea mays
tgagcagtgaccagcttcgtttgaaacccttggaaactggtgatcagcatgtccttcagcttctgccatgatgtgattgttcctggccgaagaaaagagtaccaagtttgtgcgacatttttgactgccatgacgaaagatttcgccatgactgttgtgttgccccatatgaatatatggttgcttcatacctcattagaaactgcttcgggtctgagtgcccatcatacatagggagctggggtggctt

SEQ ID NO: 65880 - DNA, 243 bp, Zea mays
agctttaccaaatggatgtgaaaagtgccttcctcaatggaccaatcaaggaagaagtctatgttgaacaacctccccgctttgaaaatagtgaataccctaaccatgtttacaaactctctaaagcgctttatgggctcaaacaagccccaaaagcatggtatgaatgcctaaaagattttcttatcactaatggctttaaagttggaaaagccgatcctactttatttactaaaactcttg

SEQ ID NO: 65881 - DNA, 248 bp, Zea mays
  unsure (1)..(248): unsure at all n locations
tctccatccgtagcttcggaactggttcatccttctcctaaatcgcgcctttcatgtcgngcgcaccttcatctcatggccgaaggttcctgtgacagtatattatacttggaaaacatgttagtcgcgttttgaggaccttcggaagatgaaggcccccaacaaagaggattcctccttttgtttgttgccggactcccttgagagagtcctccccgagcttgcggccttttcgccggtcatgatct

SEQ ID NO: 65882 - DNA, 236 bp, Zea mays
  unsure (1)..(236): unsure at all n locations
agcttgtgtgcaaactaagccacctttaaaatcacactttantatggaagaaaagggtgtgacactttcaaaactcatacattatgatctttgtgaaattaatgatgtgttgacttaaggataaatgaagtacatgatgacttttaatgataatgcaactagatattgtcatgtgtatttactaaaaacaaaatatgaagtgttagactactttagaatctaaaaggtttagatcg

SEQ ID NO: 65883 - DNA, 254 bp, Zea mays
tacttgagcttcagcttaagtgggaaggtcccttcttggtggggttgtcataccaaggtttcaagggcaccaaaacccgggcacggacataatcaccaagtgtgctggaccaagtctcacatatatgatgaatagtggtacagaaacgaatgtcacatctttactatataataggagttccatacaaataaaataaataatgacatcataaggagacaacgatccagcaacccacagttgactgggagacgacg

SEQ ID NO: 65884 - DNA, 240 bp, Zea mays
agctttataactatactactttgaccaaagtgaaactttaatttatattcgagatatgaggtttgacctttaataaaagttgcagaacatgtgttatacaacaaatattttatttaaaccaagccttaattcaatatctaagtatcccaaaccgtgccatcaagacagaataaaaatccgatttcgggattcgaattcttcaaagtctggaatcagtgttgttcgggttgacgtctcgcg

SEQ ID NO: 65885 - DNA, 246 bp, Zea mays
tgaatcacttttatgcccctgagatccagaaaccctaattggaaccctggaaaaccctaaatcaaaccctagggacctaagtgcaaaattagtccacttttgggctaaagtgcaaaaaccaagtcaaataagtttcttaagtcccttggttcacaaaaatgtgtacttgaaagcaaaacccaaagttttggacttaaatgcaaaatggacttcatttgagttttgctctaagtctgaaaataagtg

SEQ ID NO: 65886 - DNA, 231 bp, Zea mays
cacccaaagcttcgatttgcacttcggaagtctcgccaaatttcttcgaagtagtgcttgaaaactttattgtatccaatacatccagtacattaaccattctttttctctttgggtcgtcattggcattagcattggcacctcaatttttgctgaaagacttagaatttctgatgtctttgtttcttcagcccttggttcttctattttttccatcgccggcacttcggc

SEQ ID NO: 65887 - DNA, 245 bp, Zea mays
tatgaagattcttcatcccaacatgggctagtcggcggtgccagagccaacccatgttagtcttaacaattaagcaagtgtcgagttcagctctatcaaaatctaccaagtatagctgaccctctaacactcccttaaaagctattgaatcatcacttcttctaaagacagtgacacctatatcagtaaaaagacagttgtagcccatttgacataattgtgaaacagaaagcaaattgtaatct

SEQ ID NO: 65888 - DNA, 239 bp, Zea mays
agcttgtacttacgaccaaaccgcacccccattcatatcacattcaatggcttaacaataatggtaaagtcaaggtaaccaagctggtatgaattaattttgctattggttcatatcgtgatgttgttgactgtgacaaaagctgaactgggagttgtctaaataggattgagaaggtgcactttgttgttggtagtcaagtaagacagtgttgtgttcatatgcttgttgaaaacctg

SEQ ID NO: 65889 - DNA, 246 bp, Zea mays
ttaggtggcacatggattcccagaggtaagaactccgtagagaggcagcaactatctgagcccttgaccccttgcgcacaacggggagaacttgtctgaaatcacccccgaacacaacagtcttcccaccaaagggcagcctatgctgtcccattatatcacgcatgctattgtctagcgcctcaattgcttgtctcttagtcattgatgcctcgtcccagataatgagcgatgctttttgtagca

SEQ ID NO: 65890 - DNA, 238 bp, Zea mays
agcttgtgaagatccttcatcccaacgtgggctagtcggcgatgccagagccaacccagtcttagcaattaagcaagtgtcgagttcagctctattaaaatcaactaagtatagctgaccctctaacactctcttaaatgctactgaatcatcacttcttctaaagacagtaacacttatatccgtaaaaagacaattgtagctcattttgcataattgagaaactaaaagcaagtta

SEQ ID NO: 65891 - DNA, 246 bp, Zea mays
tgcaccggcctcagcgaccaccccgccactgtacccgagccgtcccctcacccatcgcctgcccgagccgtcccaatcgccgttagctccattcccgccatcatggtgagctcgtcggcgctcgccgtcccctccatccctctccctctcctgggcgcctataaaaggagccgcccgagccccgttctctccacaccagctccggccaactcctctgcttcttcccgagccaatcgagctagcgcc

SEQ ID NO: 65892 - DNA, 236 bp, Zea mays
agcttgaggctacacagtacatgggtgtgattacacaggatgaaagaactcaacaacagctctgcattgggaaggttaattagtataagcttaccttgacttatcatatggttgaataagaagagaagttgcatctggagtgcttatctgtgcaatgctcttcaagtttactggagttccgtagtactcaacctgtaagaaacatttattgaatcttagttgaatagaacagtaca

SEQ ID NO: 65893 - DNA, 243 bp, Zea mays
tgtgaacagtacaagttcaggagggaaaaagcagcttcggctgatcagccgaagcccatgctgctgtgtgaggatatagcagagcagaaggtgctattgggctcgcaattatctgaagatcaagagaaaaccttgataaggtttttattcaacaataaagatgtttttgcatggtcagccaatgatctatgtggagtgaatcgggatgttattgaacattcgctcaatattgacccatccttc

SEQ ID NO: 65894 - DNA, 235 bp, Zea mays
agcttgtagatcctaggaccacactatagttttccttcatttttttacgaatgatgggactgcttgcattatgcgcttcagttcagacaccgacaatttgcatgacacagctaagatctctctcaccattattataatataatttagggattatatgagcatctcacaacattgtttaccatatcctactaatgggggatgtaaatgacagtcagttttcacatgttaggcatct

SEQ ID NO: 65895 - DNA, 244 bp, Zea mays
ttagacacctaaattaaactataaaaatagtaaattagactatgagaataaataatttgaggtaaatttgacctaggactaagtaattcagggacaaactaaggcgataaaattagcaatttgctatccatgataaattacatgggaagttgagaaaccaagagactaaatttgaacttaatgaaggagaaaagtttccctattgttcactagattactcagtgttctgctcagactcgccact

SEQ ID NO: 65896 - DNA, 244 bp, Zea mays
gcttgcgtaagtttctatccgcctaaagcgttttaaacgactgatcaaccctaaacggtgggaaccacactgggatgcgggtgaaaggggcaccgcgaaagtagtcacattggcaccagggctggtcctaactcctcagaacctcttctccctcgcttccggcttcattggcctccatctctaagtggtgcatgtccaggtggtcattatcttcttcaaattctcgctgcacatcatggacctg

SEQ ID NO: 65897 - DNA, 244 bp, Zea mays
  unsure (1)..(244): unsure at all n locations
tcggctttatctatattatgaatagccttcgaatccgnccaactcccttcaactctcctggcaacttcttgactcccgtgtacaacaatgggcccttgttctgaaggtatcttcatgcaaaaatgtgttggataaagtattgcttcgaaggcattaagcatccctcgaccaatgattgcattgtatggatactccatatcaacaatgtcaaagacaacatgttctgttcttgcgttatgaacat

SEQ ID NO: 65898 - DNA, 240 bp, Zea mays
tatcaaatggacctgaaaagtgcctttcttcatggaccaatcaaggaagaagtctatgttgagcaacctcttggctttgaacatagtgagtactctaaccatgtttacaaactctcaaaagcgctttatgggctcaaacaagccccaaaagcatggtatgaatgcctgcgagattttcttatcactaatggcttcaaagtcggaaaagacgatcctacactctttactaaaactattgca

SEQ ID NO: 65899 - DNA, 250 bp, Zea mays
ttttggaaaaacacctaagcgcggaccgtccgcgacaccaaagtaagcctcggacagaagcactgcataaacgcaagtcaacactacggactatccgacggagaagcgagcaccgcccgagaccaagcgcggacagtccggcctcaggtgcggaccgtccggtcgatgaaaaccagaaaacgcgaaagtgacgggtttggtaaaatgtatttttagcgtcctcgcggaccgtccggggtgcatgaccgga

SEQ ID NO: 65900 - DNA, 243 bp, Zea mays
agcttttgccttcttttctttcgcatggttaaattgttttttaaaatctaagccgaataaaaataatctccgctttttctgggattctgtgtccgtggttaaaatctatttcaatcacgaagtgttctaatgccaattttaaaattttgggatttatttttatattcagattcttggaatccctgtgcattctaacacatcgaaaggctcttctggctttactggtttaagttaattcctctg

SEQ ID NO: 65901 - DNA, 251 bp, Zea mays
tcaaagtccaaccaaaattgtattagtatacgaaaaaatacatgtcaacaatctgaagcagagagagagagagagatcaacatctgtacattgttgttgaacaatgcatttgtattacttgatcgttttatttcgccagtcagtgaagcatataaatagttatgcatgcgcggatgatacaaacataaattactgtttcaagacaagatccatgtttaattgggtgatgaaggaacatgcattacattgca

SEQ ID NO: 65902 - DNA, 244 bp, Zea mays
agcttcggtgtgtttgcagaaaaggaaaccgacttaaatatgaaaaggctatttaaacctcggtggactactatagaactactaccaaatgtaaaggacatggatgtaattttatatgggttgtgtcccgtgcctataaataagtgaacaatacccccgtactgttcacgcggacttggcatttgctttttgcgtcacgcttgtacttttacttccttccaagccgaaggtacatttgtaactt

SEQ ID NO: 65903 - DNA, 250 bp, Zea mays
ttgaagccgtgaacacggatatacgaggaaccccaggtgatgtgatctgttagagtaactgtcgtcagttagttcagttgtcctgaaaatctggacataagaaatctgtgtcttataatgaatcacactgcatgcagggtacatggaccccgaatatgtggttactcaagagctgacggagaagagtgatatatacagctacggggtgcttcttctggagcttgtgaccggacgtagagcaatccaggac

SEQ ID NO: 65904 - DNA, 241 bp, Zea mays
agcttgaaatgtgttttcctccatcattttttgatatgcaagtacacctaatcatacatctcatggatcagataaaaatattaaggccactatatttacatcatatgtttcagttggagcgatacctgggagtattaaaaagttatgtgcgaaatcgcggtcacctagagggttcaatcatggagggatacactacagaagaagtgattgagagctgtatagattacattagtgacggaac

SEQ ID NO: 65905 - DNA, 250 bp, Zea mays
tagtgcccccaagaaattgtctaattttgttaagggtaaggctcccatggttcaggataatgagggctacattttatatcctgctggttatcccgaacataagattaggagaattcattctaagaagtctcactctggctctcatcatgcttttatgtataagagtgaggcatctagttctaggcaatccactcatgttaaattgcctaaaaagaaaactcctactgcatcaaatgagcctattgtttca

SEQ ID NO: 65906 - DNA, 240 bp, Zea mays
agcttcagctccatctatgttatggattgcttttgagtcagtccaatttccctcagcccttctggcaacttcctgactcccatgaatagcaatgggtccttgatccgaaagtatcttcatgcacaagtaagcaggatgaagaattgcttccaaagcattgagggtgccacgaccaataattgcattgtaagggtattccatgtcaacaatgtcaaacacaacttgctcagttctggtgtt

SEQ ID NO: 65907 - DNA, 246 bp, Zea mays
ttctcaactccagctgaacttcaacttcaactaaggtccatgcaggttcaactggggtccagggcaagttcaaccagggtccagagaggttcaaccggtgtccagggaaagttcaaccggggtattttccctagacctcactggtcaaaaccggttgaaccagtcctaaaggaggttcaactggtgttagggtcacctgaccggtctgacctcctgactgtcagactgactgctagtctgaccccc

SEQ ID NO: 65908 - DNA, 240 bp, Zea mays
agcttgacaacgaggagatggatcttatcattaagagcttccagcaaatcctcaagtaatagaaagggaatgagttcaaaccccactccaagagaatttgctaccgacgtggtaagttcggttatttgagagcacctagaggggggtgaataggtgatcctgtaaaattcaatacgatatagccacaagcttggttataaagatgttagtgcaataaaatcaagtgtctatagagcgagt

SEQ ID NO: 65909 - DNA, 245 bp, Zea mays
tctccgcgtgtaataggtgctgaagttcttcctggtgtgagtgctgggcgtaagccgcgaagggcggtggcgaaacaaagggtgagtgaggtggagggtggtcgtctttgtgtggacggggctagcaaacgggaattgttgtcctctccagctggggtgggtgtaggtgaagcgagttgcgaaatcatttttagggtgaggagctgaggataatgttgttcaactacagggagataggtatcatc

SEQ ID NO: 65910 - DNA, 240 bp, Zea mays
agcttgtgaaggttcttcatccccacatgtgctaagcggcgatgccacagccagcccatgctagtcttagctattaagcatgcatctagaccggcctcttcttttgcaaaatcaactaaataaagtttgccgtctaatacacccttaaaagctagtgaaccatcacttcttctaaggacagacacatctacatttgtaaatagacagttataccccatgttgcataattgactaacagat

SEQ ID NO: 65911 - DNA, 246 bp, Zea mays
tggtgccgatggagaaacaaaaattcttgaaatcttggttgtcgaactgcttgccgttgtcaactgttagctcggacggtactccgaagcggcaaacgatgttctgccagaagaatttttgggcagtctttgatgtgattgtggaaacagccctcgcttcaatccatttggtgaagtattcgacggctacgaaggcgaacttaaggttcccctgagcggtgggcaggggcccgacaatgtctaggc

SEQ ID NO: 65912 - DNA, 240 bp, Zea mays
  unsure (1)..(240): unsure at all n locations
agcttcagattcccaacactagaagacgggctctcagtgttgtcaaagaacgagctggccgacagcttancgtacaatagtttaaaggtgaaaaaatgagatctttgtattatctcttgaaaccaaaaattttcatttgcttaaacttattgacacacattttttttctcagggtcttattcttagcaatgtcctcagggcacaaaaagatgtcgaagacgaagggtgtaccatagcctt

SEQ ID NO: 65913 - DNA, 247 bp, Zea mays
tgttacggtgaggttggggaagaacccgacaggcgggcctttctttgccagtggaaggaggaatcggtgcgcgtggtggagtccgagttactgagaccggacggtggggcccaagggcagtgagcgcggagtgcaagtgacggctgggcctaatggtgggagaagatgtgagatgggccgagaaggtgggaaagccggcccaagagcaggttactcttatcaatttttctatattttctactttatt

SEQ ID NO: 65914 - DNA, 238 bp, Zea mays
agcttatatctcccatagctctgggtgtgcataaaattcatgcatgtccgaaccattgtattctgtatcgtggcgattttgagaatgcatcaagatggccagtttgcaatgtcagtcgatacaagaagagctacaatcaagactgtgtaaaaaaattcccaaagaaaaataaaaacaagaaatccacttttggacctgatagtgacgatgacacttttgatgacatggatgggaaaaa

SEQ ID NO: 65915 - DNA, 245 bp, Zea mays
tgaagctggcctctgcgccatgatgaaggacgatcttgttatagccttgcatataacagtctgaaggtacaaaaattgtatatttgaaagtttatgaattttgagttattcttttgtttttatattaacccattcattcttttcatatagggtttaatacttagcaacgccttgagggctcaaaagaatgccaaagacgagagttgtactattgccctcaacaaccttcgaacagaggttatcaa

SEQ ID NO: 65916 - DNA, 236 bp, Zea mays
agcttgcaagcatatggcattctcatctaagctatattttcccatttttgcacattgaacagtttatggttgtagtagcctaacaagccacatgttctgcagacctgaaaagtattcacacgtcacaaactactaccggtagcacatatactgcaagcctaaaaaaacacaaaccacgaactacttctggtatcacctggactttataagaatcatttgaaaacactagacgttca

SEQ ID NO: 65917 - DNA, 242 bp, Zea mays
ttacggatagcctggcttattgctgttattattgcaagttcatgtgaatattgaagggtggatgtttgtttatggtttattcgtcgtttttttgttctgatatcatcatattggtttcgaagattggcaccggacatgctctaagcttgattggaaatgctgatgcctggatctgcaggggaaataaagttctcgaagtagattgaagcgttgactggactgcagtttgtagtattggcgag

SEQ ID NO: 65918 - DNA, 234 bp, Zea mays
agctttaccaaatggacgtgaagagtgccttcctcaacggaccaatcaaggaagaggtctatgttgaacaacctcccggctttgaagatagtgagtatcctaatcatatctataggctctcaaaggcgctttatgggctcaagcaagccccaagagcatggtatgaatgccttaaagatttccttattgcaaatggcttcaaagtcggcaaagccaatcctactttattcacta

SEQ ID NO: 65919 - DNA, 244 bp, Zea mays
tgtgaaggttcttcatccccacatgtgctaagcggtgatgtcacaaccagcccatgctagtcttaacaattaagcatgcatctagaccggcctcttcttttgcaaaatcaactaagtaaagcttgccgtctaatacacccttaaaagctagtgaaccatcacttcttctaaagacagacacatctacatttgtaaacaaacagttatatcccatattgcataattgactaacagatagcaaatt

SEQ ID NO: 65920 - DNA, 239 bp, Zea mays
tggggttttaccgtcacctcagtgagtttttctccttcaattatcttgggctctgtctggtcgaaatactgtgcatcctaacattcacattaatacgataaggatcataaacaagaaccaagggccaatggtcgatacaaaacttttctcgtgaacccgacgcatctttctttcttcattttattgtctactttatttttctttggagtacctacgtttcaaattataatgaatcgttc

SEQ ID NO: 65921 - DNA, 250 bp, Zea mays
tttatgtaattagagaaaaaggtttaatttaaggttttgagttccaaaattttaaatttcatatatttttcatatgaactccaaattgggtggttcaaattgcaaaatgtccataaagttattctctatctgtttaaattatatgcatcaactgtttccatgtatcaattttgtggttagtctctaagtcaacttaaggttatagaatatttactaaaggtaaaataaaagataaagccctagtgaatat

SEQ ID NO: 65922 - DNA, 237 bp, Zea mays
agcttgcggtagctaaagaaaatctcatcgaaatacaacattgccttggaggactcaaaagggaacacaccagcacatgttgaaggcaatggacgttgcacatgaacgattcgggacttcactccgctttgagcatttcgtggaccgggttcgtgaactcgaagtggagaccttttgtcggggtggcaaccaaacctttgtcattgctagatcccatgaaggagggatcaacctgga

SEQ ID NO: 65923 - DNA, 248 bp, Zea mays
ttaactctcgcgagacctttccccgcctctttctaaccatggtaaattcattatcctatgtgatattctatgcatgtttaatctacttgttctcttgtatggtgtattgttggtttcctaatttcaatggatggatgtatgtatgtgtgcactcgcatagagaacgatccggttgaagagcccgaagaactcgcacgagaagcccctgagcagcagtcggttggtggaggcaagtgtcccttgaccta

SEQ ID NO: 65924 - DNA, 243 bp, Zea mays
agcttgagaagatctttccaccccccttattcaatcctatgcagcatttgattcttcatctcccgtatgaagcacgaatggggggcgtgcaaagacgttggtgctatccattcgagagatgtctcaagactattcaaaagaaatgtagaaataaataaaaaatcgaggcttccattgtaaaggcatacattctagaagatgtgtcaaactttagaacaacttattatggtgacaaactgtcga

SEQ ID NO: 65925 - DNA, 250 bp, Zea mays
tatctgcgcatagcttcgtaatgatcttttccttcgtcacaatcgccttccgtcccactcaagcttcgtcttgaccataatcttatatactcgtaatccaattccgaagatacctgctcacacatttcacttggaaaacattgttaaatcatgtttttgaggaccttcggaagccgaaggcccccaacacgtagcatgcacaaaaccccttcaaaagaataccaagctttccaagaagggcatgagcaaa

SEQ ID NO: 65926 - DNA, 244 bp, Zea mays
agcttctaaagggagaacacgtgataagtttgactaacgtgcaattcgaaaaagatagaccttgtgcaacttgtcaagcaggtaaacaagtgggaagagcacatcacagcaagaatgtgatgaccacttcaagacccctggagctgctgcatatggacctcttcggacccgtcgcctatctgagcataggaggaagtaagtatggtctagttattgttgatgacttttcccgcttcacttgggt

SEQ ID NO: 65927 - DNA, 251 bp, Zea mays
tgtgcaaagtccactcgaactaatcttcggagaaacccgacctcgctgcaacatgacacccgaaggtccaacacaacaagcaatgaatgaattcagaattattgcagagcatatcagtacaagagacctggttcaggagtttttggctttcaaagtttttcctagtttgaaagaatgggaaatgccgaagctgaagggggagaagaaagaaggtgaacttgtgcgtttaccttactatttcaaatttaaga

SEQ ID NO: 65928 - DNA, 243 bp, Zea mays
agcttcggtgacggttaaaaattttggcagcaaaacattgcatatagcaatgaatgctgtggtaacttcacacttactcgtctgtttatatagtgctgcaagtaagaaggcgaagcgccagaatttttacaccaagcggacacccgctcgcactcgctgcgtggtggaccgcacagaccgaacagtaactctgcaaggtggggccgctacgcgctgggagattgaatcgtttctcgacaacca

SEQ ID NO: 65929 - DNA, 249 bp, Zea mays
  unsure (1)..(249): unsure at all n locations
tcgtgctatactcgtcagctgctcgatcgaagacttcaatcgaagactatcgncgatcccgccaacactgaatcaagttgataacggtgagccaaatcactatttttaatatggattttatgatcgtgaaataagacgcttagtttgcgtaggaagttaaaattagaaatacccgtgaggcgaggtgtgcttcgaggggtttagtggtcgaatatattcgaactagttctattttgtagaatatagtat

SEQ ID NO: 65930 - DNA, 236 bp, Zea mays
agcttcgatatctgaatgtgtacttttatctaactagctctcctttgccagtcttagtaacagtctcctttggcatttcccacttttccacaagtggccatactctaaaagctatatgttcctggactagatcccttgtcccgatgaaagaacaaactgtgccgaaagctctttggcatccttcggctacctcatcaatctctaccttcggcttccgaaggccaaagcgttgccag

SEQ ID NO: 65931 - DNA, 246 bp, Zea mays
tacccatgatgaggcatgtgaccagttaaagggtcctttatcagcaagcctacatcgacaaggtccttaatcgactcagacggagacactacaccgagactcccttctcgtgcaagtcaaccgcccggtctcagctttatcatttcaaacccaaagtttggtacctggcagaggtacatcttttccgatgttgaacccatcacgtccatgatggatccaccatcaagttttatttttgaaaacatc

SEQ ID NO: 65932 - DNA, 241 bp, Zea mays
agctttatagactcacaggcgacacctagccatctaggtggttggtgctccaagagaaatgcacccacagagatattgttgttgcaccaaagctcgaatcaagaagcacaagaaggatttggagatgaagcacaaagacctacaactctcaatctcacctaaagatttctctccaaacattgaaatgggagaagcaagagatgtgtgagagagagtggggagtgtttctcaggttataaat

SEQ ID NO: 65933 - DNA, 245 bp, Zea mays
ttaccaaatggacgtgaagagtgccttcctcaatggaccgatcaaggaagaggtctatgttgagcaacctcccggctttgaagatagtgagtaccctaaccatgtttataaactctctaaggcgctttatgggctaaagcaagctccaagagcatggtatgaataccttagagatttccttatcactaatggattcaaagtcggaaaagccgatcctacactcttcactaaaactcttgaaaatg

SEQ ID NO: 65934 - DNA, 239 bp, Zea mays
agcttctgacggatatgagatcaggggtcgccgctgggctgtaaaaagctaacgatttacatagcgagatggtaaattcgaaccatatcgcgtggggggaaaaggacttttaagtttgcaactgtttctgcgatactggccatttaggagccttcgcaagttcagattgtctttgtataggtacttaggtagctgataatgatatgtaacctttttgcgtagattgtttaattttcttt

SEQ ID NO: 65935 - DNA, 245 bp, Zea mays
  unsure (1)..(245): unsure at all n locations
tcagtcttttcattgcttgctgcttgctgattttgctatttatagtgncaacaacgttgtttgttgctgcctcattgcttggtgatgcttcttgctgcttttgctatttatattgtgaatagggctgcttgttgttgttgcttctgcagttctactgacgcagtggtgctggactgctggtcgtgtacgtgcatgaggcagagaagcaaccttctgcttcctgctgctgcttgcttctacatcta

SEQ ID NO: 65936 - DNA, 238 bp, Zea mays
agcttgtacttgatacccctaatatatatctttaacagtagtccctcgagtcttatttggtcgaatcattggctcatgcatataactcttatcttgaatcttcttgtttggcttgtctttattgtgtctagttgttctgacccctggcgagtccacaactcggtcatgcatcccttaagtatatgtgttgactcatttttagggcgtcaatcactcaacacgaaccagcggcggtgct

SEQ ID NO: 65937 - DNA, 245 bp, Zea mays
tcaaccatgggcaagaacaataagcgcaagcgtgaaccgactcctccatcggaggagtttggtgactcggaatactcggaggaggagttctcctccgagcccgaggggtctccggctcccgtctctcccccggcgtcgtctgatgactcggacgactcccaagggatagccgcggaggtctggacgtacatccgagctgtcgagcgcgccgggctcgaaggctcggatgagtcggagtactcctc

SEQ ID NO: 65938 - DNA, 247 bp, Zea mays
tctaaagggagaacacgtgataggtttgactaacgtgcaattcgaaaaagatagaccttgtgcagcttgtcaggcaggtaaacaggtaggaggagcgcatcacagcaagaatgtgatgaccacctcaagacctctggagctgctgcatatggacctcttcggacccgtcgcctatctgagtataggaggaagtaagtatggtctagttattgttgatgacttttcccgcttcacttgggtgttcttt

SEQ ID NO: 65939 - DNA, 236 bp, Zea mays
  unsure (1)..(236): unsure at all n locations
agcttcactagggtggtttttgcttataagacttggtcatgttgggatgaagcaactcaatcggttaaccaagcatgacttanttcgaggcttaaaagatgtgaagtttgaaaagaacaaattgtgtagctcttgtcaagccggtaagcaagtggcaaatactcatccaaataaaagtcaaatgtccactcatcgacctttggaattacttcacatggatttatttgggcccacat

SEQ ID NO: 65940 - DNA, 243 bp, Zea mays
ttatcaaatggacgtgaaaagtgccttcctcaatggaccaatcaagaaagaggtctatgttgagcaacctccctgctttgaagatagtgagtaccctaaccatgtctataaactctcaaaggcgctttatgggctcaagcaagccccaagagcatggcatgaatgcataagagatttccttgtcactaatggattcaaagtcggcaaagccgatcctacactctttactaaaaccattgcaaa

SEQ ID NO: 65941 - DNA, 235 bp, Zea mays
agcttggcaaaagcactacataacttttataatcaccaagaagtgattccaggtttaatcaaatcaaacattacagttttcgaaatctgttctgacagtggacagaatacaacaaccagtttgtaaaattcataactcctaaactgtcaggcctatggttatgaaagtttaacacaagcaagataagaaaagcatctacaactttcttataacgaccatgaacagattgtggcat

SEQ ID NO: 65942 - DNA, 243 bp, Zea mays
ttcatccttcttcttcacaaatagtgctggacatccccaaggcgaagtgcttgggcgaatgaaacccttatccagcaactcttgcaactgcttcttcaactctgccaactcagcgggtggcattcggtagggcctcttggaaattggggccgttcccggttgcaactcgatggcgaattcaatatcccggtccggtggcattcctggcaattcatcagggaagacatctgcatactcacagac

SEQ ID NO: 65943 - DNA, 246 bp, Zea mays
agctttgtcatatgtgctatatccaacaccaattgccaaaactgggagaccctgctaatgaaagaaacaaagaaaatgaaaaaatattggaaccaagatagaaagaaggaacttattataacaactaccacatgcaacctaacaattgtggtagaaagtttgctattttttttgaaaaaaactaagtctcgggaaacatagactactatagtatacaaacaggaaactaatgactcgttgatgttg

SEQ ID NO: 65944 - DNA, 250 bp, Zea mays
tcggagccgaaagcactctaactttgaacggaaccctcagcttaaaaagtggaagtgagttcaccggaagtgggcgccaatgttgggaacttgttctcaaatgcttcgaattaaaaacaaggcaacacaaagatgttaagtgtaaatgcccttcgtccgctgaagcattatctccccaaggatttaatgagcttcggacgaaggtcataagtaaagtatcatgaaggtttcaccttcgtgatcatatttg

SEQ ID NO: 65945 - DNA, 246 bp, Zea mays
tgcaacttgcttaagccgggttgaaacttaaacctgttactttccttttgggaatacttttttaccttatacagctttggtgtggggtagatgatgaagccgaaaattaataatccgaagcagattccaaaagcctttgaaactgtttttaagcctgcctacatagatcttaaaagcatttgtattatctctgtaaaagacattgtaatcgagaattgaacattactctgcatatttgtccatacc

SEQ ID NO: 65946 - DNA, 248 bp, Zea mays
tttttagttcctaagtcagtttgcatccaatatattttctgtcatatggactttacagattgtctatgtaaaagcatggtcctttttttgtttggctaattctgcctgttaagtgatagttaagaaataaatgacatctctcctaattagtagctttccactgcctaaactcagtgccggtcctgtcattttagaggcccaaggctagacttataatagaggcccttttcaataataactattataca

SEQ ID NO: 65947 - DNA, 251 bp, Zea mays
  unsure (1)..(251): unsure at all n locations
tgcagcatgcaaactttcggaaggtgtttttggaccctcggcgcaaggtctcccaattatgggntntgcgatctaagcatgttatgaaagaataaactcatcacgcaagggggctactattgggggcttgccttgtcaaagatcctcaaaacgtctttactctgcctataagcaaatgggtttcagatatgcagtaaaaggcagacaaaactgacctttgggtgtgcagtgaataaaaaagtttcttctat

SEQ ID NO: 65948 - DNA, 250 bp, Zea mays
tctggacaagtaactccatggatagccctacttcatgtgcaagtggtgctttgattgtggcctctctcaaatgctccctaatgtctccactatcgagtttctagctaaaatgttatgggtctcgttccctctagtacatggtggtagccacaccataaacacacttagtgtgatctcgcaagacttacaacccatcttgatacaacttttacaatggcacacataagcatcaaggggtaatagatgtgta

SEQ ID NO: 65949 - DNA, 235 bp, Zea mays
  unsure (1)..(235): unsure at all n locations
agcttatctcaacctgagaggaaagnttatcctaaggggtgatgtgttagtttgagctttggtgatgtgttagtttgagctttgctagtgtgttattcatatgcttcttgcagtattatatgtgttgcatcatatggactaatgcttccgttgctatgaattaattggcatctattgtgttcattctgaaatagacagtcatgttgataatgatgcatatggtttatggtgctta

SEQ ID NO: 65950 - DNA, 249 bp, Zea mays
ttaacccctgcgagaccttttcccgtttctttctaaccataatgaatgcgatatcgaatgtcatacttgatgcatattcactttatttgttcccttgtatgatgtactggttgtttcccaatttgaatggatggatgtatgtatgcttgcaatcgcatagagaacgatccggtcgaagagcccgaagaactcgcaggagaagcccctgagcagcagtcggttggtggaagcaagtgtcccttgacctat

SEQ ID NO: 65951 - DNA, 271 bp, Zea mays
  unsure (1)..(271): unsure at all n locations
ctcaacaaaaaaaggtgaaaaaaagaagaagacaaaaaaaaagaaaaaatgaacttgaacctggaaaccgaaanaaaaaaacaacgaaaaaacaaagaagaaaaaagataagaaaattaaaaaaaaaaaaaaagagggaaaaaaaaaaaaaagaaaaaaaaaagaaaaaaaagagaaaaagaaaaaacaaaaaaaaaaaagaagaagaaagagaaaaagaaaaagaaagagaaaagaaaaaaaaaaagaaaagagaaaaaagaaaaaaaaa

SEQ ID NO: 65952 - DNA, 239 bp, Zea mays
agcttcttatagctgctgccaaaaatgatatatgaactgggttccccggtcggatactatcttcttcggaacaccatgcaagcatataatccgggacatgtataactctgccaacacatcactattgtagctggtcttgactggtataaaatgagccgcctttgttaagcggtccactactacccagatggagtcgtagccagtccgagtgtgaggaaaactgactataaagtccatcc

SEQ ID NO: 65953 - DNA, 245 bp, Zea mays
tcggtattacaaaccgacttaaagatagaatgacctttttgtccataaaggtctgagtcaatgttgtaagcttttataaggggcatacttgtaattcctcacaggctgcgtcctgtgcctataaatagtgaacagtattcctttactgttcacgctttttgaaaattgcaatcgcatcttccgggaaccaacctttgtcaaggcagaggtattattgtgttcaatgattcaatatattaagtgaa

SEQ ID NO: 65954 - DNA, 239 bp, Zea mays
agcttctaaagggagaacacattttaggactgacaaatgttcattttgagaaagacatggtttgtaacgcatgccaagcaggaaagcaagttggagcccatcatccacacaagaacatcatgacgaccgacaggccgcttgagctactccacatggatctattcggcccgattgcttacataagcatcggtaggagtaagtattgtcttgtaatagtggatgattattctcgcttcact

SEQ ID NO: 65955 - DNA, 245 bp, Zea mays
ttgtcctacggcctgcaaattcttctgctcctaaaggaagtttctgacccagctttagatgatagaagatttgacaaagaaacctcttcctgccatactgatcgactattctcttgaaatgccatctcatccttcggcctagctttttcatttcttccttattggattcaaactgtttcaaaagtttggtacttggtacaaagtatataccaactttcctggcttccctagaggttgtattaaag

SEQ ID NO: 65956 - DNA, 238 bp, Zea mays
agcttcggatctttagccttgcaactcttgtcaatatgacccgaaacaacctgggaatcagttttaagaatggcccttctgattcccattgctcttagcttccgaagacccaaaaacaaggcttcgtactcggtaatattatttgtacaactaaaatcaagtcttgccgcataacaagttttaactttggatggcgagaccaacacaacagctgctcctgccccgaaggttccccaaa

SEQ ID NO: 65957 - DNA, 245 bp, Zea mays
tgtaatcgaaaaggcgtaccgtaatgtgtgctgattttcatcaatcaatgtgttctgaattgagttgctacacatactagctgagctgcttattattttcgggttagatgttgaccagatatgcattcttttcctaggtataaatatgaaaatgagcaggttattgatgctgcttcaactgatgcaagctcacccttaccatatcaggtgtatggaaatgggaagactggatcacaattgtcaac

SEQ ID NO: 65958 - DNA, 237 bp, Zea mays
agcttgtcaatacttatcaaaacaacaacatttaccagcacagcaactgcaaaccatacctgtaacatggccattcgcgtgttggggactggatatgattgaacccttcaagaaagctcaaggaggatacactcatgtactggttgctattgaaaaattcactaagtggatagagtacaagcccatcgcttctctaacttcggctaaagcaatggaattcatacaagacataatatt

SEQ ID NO: 65959 - DNA, 246 bp, Zea mays
tgttgaactaaattcttgcaaaccctctacatctaccgttgagcatgttactatttgcactagatgtagagatgttaacattgatgctattcatgatcacattgctatgattaaacaacaaaatgatcatatataaaaattagatgctaaaattgccgagcatgagttagaaaatgaaaaattcaaatttgctcgtagtatgctctataatgggagacgccctgacattaaggatggcattggcat

SEQ ID NO: 65960 - DNA, 235 bp, Zea mays
  unsure (1)..(235): unsure at all n locations
agcttgtggttcgagttattttattctcaaataagngggacctaattattttctatttttcatgtcaagtacgaccgccacttcgtcgccatgtacgagctggggaagaaggtgggccgtggccatttcggccacacctgctcgtgcgcgcccacaacgaagacatgagaagccaggtcatggctatcaaggtcatcttcaaagccaaggtcttgctattcgtgatctcacagtg

SEQ ID NO: 65961 - DNA, 243 bp, Zea mays
tcaactccatctatattatggattgccttggaatcagttccatcttccttcggcccttctggcagcttcctgactcccatgaatagcaataggcccttggtccgaaggtatcttcatgcagaaataagctgggtgaagaattgcttcaaaagcatttaaggtaccacgaccaatgatggcgttgtaggggtattccatgtcaacaatatcaaacacaatttgctcagtccttgtgttattaac

SEQ ID NO: 65962 - DNA, 234 bp, Zea mays
agcttagtgtgtgagcttgacctttatggtcgacaaagggaggattaaggttgaaagagatccggctctttgtgggcgcctcaacgaggaagtagggcaccttggtggtgtgaccgaacctcgggataaatcttgtgtctcttgtgttcttgttcattgtgcttattcgtgttcttcgttctctcaccattccgtaggacaagttattctccacaagaaatttaaagaataccc

SEQ ID NO: 65963 - DNA, 244 bp, Zea mays
tctttcccagtcaaaaaattttgaacaagagaaactgtagcttgattcaaggcttgaagccgaaactcaaagaaacttggaattgaaagaatctttgaaaaattttcaaaataaatgtttggagttctgcactcgatgcattcatcagctaaagaaagtgttccattttgtcagagccagtagtgaagagtttactccttcggccgaagacctgcctcgtgccttcgagcacattgaaggtgaa

SEQ ID NO: 65964 - DNA, 241 bp, Zea mays
tatattaaaaggtacaagctaaaaaaaagaacgtacataatgatagaagtggagttgtttaaacaaagaggctattcacctctggtgaagggtttatccaaaactgaatgtcaaaaattgaagaaagaaattcactcaggccactattggggaaaagtttcaagcaaggattttactggccaaaagctaacttggatgcaactgaattggtagaaaatgtgataattgccaaagatgtgcg

SEQ ID NO: 65965 - DNA, 242 bp, Zea mays
agcttaagcctgggaataagaagaacactacttatatctgactcttaagtaatcacaagcccggttgacaaaaagcagtaggcaagagatctgaagcttgaaaaatatcttgacacagtccaaaaaatggaagcctcctttgaaagattttttaatgaaaaacattccaagaagggacaatgaacaaggagacttgctaaccaaatcagcggcactggggcttccacttcccctagaagtat

SEQ ID NO: 65966 - DNA, 248 bp, Zea mays
tttagcacttaaattcttactttttatgcaattattggttcttgaaatatgcatgaggtactgcacttaggggagtattcaaaactcaaatcactcatgaaaacccctagtgcaagccaaaatgcaaatttcaccatttgcctattttctctaaaaattatctagcctatggcaaaatattttgaaaagtatatgagggtgccaatacctgtcccaacaaatgttattttgtgtgattataagttggg

SEQ ID NO: 65967 - DNA, 244 bp, Zea mays
cagcttatcaagaatcaaagactctgtttgcagaaaaacttattataagtggatccttaaaaatccatttttattatcaggataagtagttacctgcatctagagatctttctatcctagatcaaacacttggcctaaactaaccatcttttatcacaccttgaattcacatgattgctacgtgtaagtcagtgaccaagtcttcatatccgagaagtaacggtgatccgaatcgattaatacc

SEQ ID NO: 65968 - DNA, 249 bp, Zea mays
tgtggtggtgtcccttcaatgacttccgtcactggaatgattctttgttttttcggcctagctgccttcttcgtttttgtgggctccttttccttctgaaaaagcttcgtcagatgtggctccagtggacttagcttgacaggcaaagattcagtcattacctttaagatttcctccacgtcggtggtagagggtgttgcaatagtttcttcttcttcatcaattgctttctgcttcggagctatagct

SEQ ID NO: 65969 - DNA, 243 bp, Zea mays
agcttggggaggttcttcatccccacatgtgctaagcggcgatgccacagccagcccatgcaagtcttagccattaagcatgcatctagaccggcctcttcttttgcaaaatcaactaaataaagtttgccgtctaatacacccttaaacgctagtgaaccatcacttcttctaaagacagacacatctacatttgtaaataaacaattatatcccatttgacataattgactgacagatagc

SEQ ID NO: 65970 - DNA, 250 bp, Zea mays
tggcctggtagtgccgtacatgccgtccctagctagacctatgcgtgtgtgtgaatgcatgtgggattatactcaccgacaataactaatatacaaccagatcttacagcatatatagtggagagatatcaaaacggtttttcaagcataagatgtaactaaaagtctctattatataataggtcgaaatgtctataaatataatttattaataaatacagaagtaaatgcacgtatacatcatcggatc

SEQ ID NO: 65971 - DNA, 242 bp, Zea mays
agcttaagcccttgtgctgttcctgtgattttagtacctaagaaagatggatcttggaggatgtgtgttgattgtagagctataaataatattaccgttcgctatcgccatcctattccacgactagatgatatgcttgatgaattaagtggttccacaatttttactaaaattgatttgagaagtggataccatcaaataataatgaaaactggagatgaatggaagactgcatttaaaac

SEQ ID NO: 65972 - DNA, 250 bp, Zea mays
tcacgaagaggatccttcggtcgtctcatgcggacagcttcagccgaagctgcttcttcatgcaagaccttcggcgacgaagcatagtcccaacagtagcccctttcgcggcgctagatcgtttttcgtaacgagcttgattcgtgaaaaaagtctcttaagcttcgggaagccgaaggtccaaaaaacaccttccctgagctcgttatcgagaaacgattcagtttccgagcgcgtagcggtcccacct

SEQ ID NO: 65973 - DNA, 240 bp, Zea mays
agcttctaaagggagaacacgtgattttttttactaacgcgcaattcgaaaaaaaaagaccttgtgcagcttgtcaagcaggtaaacaagtgggaagatcacatcacagcaagaatgtaatgaccatatcaagacccctggagctgctacatatggacctcttcggacccgtcgcctatctaagcataggaggaagtaagtatggtctagttattgttgatgatttttcccgcttcactt

SEQ ID NO: 65974 - DNA, 244 bp, Zea mays
tctccttgaggagctcaccatggcgaatgaagcttctactcttgcctcggctctctacagcgctcctaccaacggtctgccgccttcaaggggccaggccacccgtcctccgtcgaccggggctcctacccgtcctccacccgccgtacaagcggcccctcgtccgacttccacgaccgacgagggtcgtcgctcccgcaaaggcggccgtgggggcggcggctcctctcgtggaggtccctcc

SEQ ID NO: 65975 - DNA, 239 bp, Zea mays
  unsure (1)..(239): unsure at all n locations
agcttatgtcccgtccagggagactagnattaccctctctcacggcgtgaagacaacgcgcccgtgttccgttcctcgaacggctcgcgcacgcgcaacggccgcctcgcgaaccactcgccccgtcgcattaactccgcggtggaacagacgacacccctcgcaggagaagcgggcgacgcttcgccttcgccataatgaccacgtcagaaaaggtacgccgcgtcgttcgatttcgt

SEQ ID NO: 65976 - DNA, 245 bp, Zea mays
tgtgattttaccaattgaaagagcacaatctctacttatgtatttccatgaaatatcttaaaatagattgtattagtaacacaagcaatagtttcctatttagcaacctctattatatgaatgacaagaaggttactaaaataaggaaacctcatgatatgaactaaattacccttacaagcatcatgcataacatcaattgtaaaaaagatgaaagtagcatgattatttaattaagtttacat

SEQ ID NO: 65977 - DNA, 238 bp, Zea mays
agctttgcctcggtcggaccaataccagaaaggccaccacgcaatgggagtggagagatggcgagagtaacgtgtaccctccgtggcaagaagttggacggtggtgtatctgtgctctcggttggcgtgaacccgttctggtcttgagaaatcctgtggcgagttgacatatgcaagggttaagtgataatatgtcgtgtggttggagatccccagctgggtattaatcgattcagat

SEQ ID NO: 65978 - DNA, 246 bp, Zea mays
tcatgggctactggcggagctagccgaagcactggcttgtccagaggatggctggagggggctggtgtaacactccaggttccacaaacaacccggtatgctactgtactacacttccgacgtccatacataaaatttcggcagcatcccctttgcaagattgcataaaagagggagcaacagagtataaacatatattatgactaaaacatactaagtattattactcggctagcaaggaaagat

SEQ ID NO: 65979 - DNA, 245 bp, Zea mays
tcacacctctggactaactcggctgcatcgatcttcgctgtcagccaatagaatcctgacctgaaaaccttcccgactagtgttctggatgccacatgtattccacattgccctgcatggacctcctccacaagttgcttcccagtggacgggagaacgcacttcatgaggatgcctgatgcgccccttctgtacaatatctccccaatgagtgtatagcgagccgactgcctgacaatgcgctc

SEQ ID NO: 65980 - DNA, 238 bp, Zea mays
agcttttacaattaattttgtacccacaggatatcatatcgtagatggcttcatcaaaactcgttagctagaatactttaagtacaatcttaattttaaaagttgtggttaagggggtcttttaagagatatgtctaggtaaattgctttcttgcacgacatagatttcctagtatcataagtcatagagtaatgtcgtaacttttttttatcaatttagaagtcctaattgtatact

SEQ ID NO: 65981 - DNA, 245 bp, Zea mays
tgccttcgcgtcagtctatcatccgcaatccaacggggtcgtggagcgcgccaatgggaaaatcttcacagctgtcaagaagatgctcctcgatgaaaaaaggcagatggaccgaattgttaccggaggcagtctgggcgctaaacacaactgagtgcagggcgactgggttcactcctttccgcctcctatacggatcggaggccatgaccccgcaagaaataaagcatgggtccccgcgtaca

SEQ ID NO: 65982 - DNA, 235 bp, Zea mays
agcttgctctcggccttcccaaagtagcccaatttcttcatcataaccatgtcgtctgccgtcacagtagatttaccaaattcaatgtggttgggtttcattgggctcaaaatagtgtagtcctcttcatcttcgttctcacttcctccttcagctacgatctgttcagcttcagcaatcgacgtaccttcggcaacagcctcctctggcacaacaagacccgattgcctcatca

SEQ ID NO: 65983 - DNA, 242 bp, Zea mays
tgaaaagtatctggacatggtttggagagttgaagcttcctttgagggattttctgtcaaaaatatccctcggggacaaaatgagcatgctgatttgctagctaagtcagcagcacaggggctgcccttaccttcggatgtcttcttcgaaacaataaaagcaccttcggtggaacttcttgaaagagcagtcctcaatatatctcctgtttataccgaagattggaggactgagatcatct

SEQ ID NO: 65984 - DNA, 234 bp, Zea mays
agctttatcaaatggacgtgaaaagtgccttcctcaatggaccaatcaaggaagaggtctatgttgagcaacctcccggctttgaagacagtgagtatcctaaccatgtctataagctctctaaggcgctttatgggctcaagcaagccccaagagcatgatatgaatgccttagagatttccttattgcaaatggtttcaaagtcggaaaggccgatcctacactctttacta

SEQ ID NO: 65985 - DNA, 243 bp, Zea mays
tgtggaagctcaaaactcctctcatgttcatgaagctgtgctggtcaccatggatgttggagtcacttgtgacttacttgatagtcctacaagtgaaccacatattactaacactatttgtagtaaatgcaatatttctctcatgaatgataatgttgtttgtgtcgactcacaaattattgttcaaaatgaggtgttagtaagaaaggtccatgctctaactcaagatttggagaaggccta

SEQ ID NO: 65986 - DNA, 246 bp, Zea mays
agcttatgaaaattcttcatcccaacatgggtctagtttgcggggccagaaccaacccatgttagtcttagcaatcaagcaagtgtcgagttcaactctattcaaaaaccaccaaatatagctgaccctctaacactcccttgaatgctattgaatcatcacttcttctaaaaacaataacacctacatcaataaatagacaggtgtagcccatttggcataattgaaatacggaaagcaaattgt

SEQ ID NO: 65987 - DNA, 249 bp, Zea mays
tggcgtccgggtggccgccgtgtttcccgcctttgccgcttgccttgtgacgctggtcaaggtcccacaactgatcgaggaaggttacttctgcgataagggattaagggtatggttgctttaatttgcgcgcgtgctgaagtcaaagtgcataaatctggcagcaacgttgaagctaacacatctttctgttcaacaaattaacgcaggcttcccaaagcggcacggcttgttcgagctcgcccctgg

SEQ ID NO: 65988 - DNA, 239 bp, Zea mays
agctttctcgactaaatcggggacaagggccttatgtttctggtgaaagtacgcgtaaacgggaaggccgacccagcccgaggattcccacgcctctgggatacggatacctcacttcttcctttccggaaaagcaactttcacacaaacattcctgttacccacagagtccaaatgctcgaagcaagaagaaaaaaacgcaccttttcaaaacgcggcgagggcctgttcttctggcc

SEQ ID NO: 65989 - DNA, 267 bp, Zea mays
gacactatacatactcagcttgatcttctttgctgtcttttgctttgctgatatacttttttgttctgtcttttcaatgctgctttgggaaggttttcttatgcgcctgagtggtatgaatctccaaacaaaacttatgctcagagagaagctcaatctgtgtcagtatttgttcattttctacaaaatgagcgcaccagtggtcctgtcgattcggtttcaaagttacagggacgtgaaggtgaacctagcatggtatgactgaat

SEQ ID NO: 65990 - DNA, 244 bp, Zea mays
agcttctgcatgagtggatgacagagatggcccacaagtcggggcagttgccccccgtctggcgtgcccggagggaggctatacaatggggcctggttgtcagtggtgagcgcgctcgcggtgagaacttgggccccgcgagtgtaaaggggtaaatgggccgcccaagtgtaacagtttgggcccacatgagctctttctttttctcttctctttttcttttctattttcctgttttctttct

SEQ ID NO: 65991 - DNA, 249 bp, Zea mays
ttggctcttctgctgtttctctgcgcttaggacgatgtgttaaaactttaaccttttccggcttcggcgtagtggaaatcgccgaagcggcagctcttcttttctttcgttgctttcgcgaaggatagtcgtaatctggatacacgaaaccaatatcatcaaaaaccctatttaaccttttcttgcctcgccctccgaaggctgccgacagggcatcatctttggtctttgagtaggcaccaagcaact

SEQ ID NO: 65992 - DNA, 242 bp, Zea mays
agcttgcggatcgggtggtttcggcgaagggtctccctatcctccccgctgtcgtagtgtcccccacgcctggggtggtagcctcggcgcaccttatcgtccaagtgggcttgacagtcatggcggtggtgctcgttgccgaagcgacccggggccgcaagcgctgtggcccgcgtgcgcccgttgtggaccgaagctccccacatgaatcgggaaatcccaacgcgatgctccggggggta

SEQ ID NO: 65993 - DNA, 250 bp, Zea mays
ttaccaaatggacgtgaaaagtgccttcctcaatggacctatcattgaagaaccttatgttgagcaacctcctggctttgaagatagcgagtaccctaactaaaggcgctttctgggctcaagcaagccccaagagcatggtatgaatgcctgagagattttcttatcgctaatggcttcaaagtcggtaaagccgatcctactctctttactaaaactgttgcaaaagacttgtttatatgccaaattt

SEQ ID NO: 65994 - DNA, 243 bp, Zea mays
agcttaatgccggaattgccataaaggaagctcccttatttttctcatccccccattgtctcatggcaaagggagatgctaaagtaaaaatcatcaccgatttaaatgatataaaagatgatgatgatatcgatgatgttgatgatgatggctattcatatgatgatcttgttagaatgttaagtgaagccgatgactacatgcacaaaaaaaaagaaaaatttaaaaccttgaaggaattgt

SEQ ID NO: 65995 - DNA, 251 bp, Zea mays
tatagagtcttcaacaaaactcatggtattattgaagaaacatatgatgttgaattcgatgaaacaaatgggtctcaagatgagagtgataatctcgacgatgttgggggaactcaattgataaatgcaatgaaaacaatggccattggtgaaataaaaccaaaggaagatgatgatgaaaatagtgtggttgtcattccttcatcctcaactctaaatgaggaagatcaccaaagccaacaacatgatga

SEQ ID NO: 65996 - DNA, 237 bp, Zea mays
  unsure (1)..(237): unsure at all n locations
agccggggggggggaaaacnggattttattttttttcattcntggggtttctaaaaatcattaacattgaggcacataatttcatcatttggtctatctattctcttagtagaaaaagtcaacctttgtaaatattcatgaactagtgtttattaatttgggaacgttaatgctgcttagccctcttccacggtttcgttaatttcgagtaggcttccattgttcgatatatctcaa

SEQ ID NO: 65997 - DNA, 231 bp, Zea mays
ctgcgatggttcttggggaaccttcgtttatgtgcagctgccattttaattgcaccttccaaaatcagaacatgctacgcagtgaaacttgatttcagctgcacaaataatattgctgaatacgaagctttgcttttggggcttcggaagttgaaggcaatggggataagaagggcagttctcaaaaccgattcccaagttatttctagtcaagagatccaaagctcgaga

SEQ ID NO: 65998 - DNA, 238 bp, Zea mays
agcttgcgttgacgcacacagattattttgcccaacatgggacacagctgttaattaagatggattctacggatttgtcgattcaggtgatacagcagcaagaagctagtacaccagaagccacacacggttagcacacatcaaagatgccaaaatgcagtagggtagtttggaaacttatttgatgtcgttatttcgctcaaaaaattcgagaacaatttctcatgctagtttggaa

SEQ ID NO: 65999 - DNA, 238 bp, Zea mays
  unsure (1)..(238): unsure at all n locations
agcttttgatagacttggttaactaatgacatgtttatggngttggctctatggaccctttaataaaagggaaatgttcctcaaagtcatttatatatttttttggtgcttgatgaccatcacaaccatatggactaactagtttgctaagtatatgactacatgttcacaatatcaaataaatgagtctctaagtcagaaatagctcaaacctagctagaaagggggtatattgaaa

SEQ ID NO: 66000 - DNA, 245 bp, Zea mays
tcgcatctctgaactagctcggctgcatcattctttgtcttctgccaatagaatcctgacctgaaaaccttcccgactaatgttctggatgctgcatgtactccgcactgccctgcatggacttcctccagaagttgtttcccggtggacgggaggacgcacttcatgaggacgcctgacgcgcccctccggtataatacctccccaatgagtgtatagtgagctgattgtctggcaatgcgctc

SEQ ID NO: 66001 - DNA, 238 bp, Zea mays
agcttgtagacaatcccctctatggattcggcggcaagggcacgttccccatctgtaagatagagctcccctgtcatttggtgcagcgcccaacgcgcggagtgagcaagtcacattggacattgtcgacatggtctacccatacaacgccataatggggcgtggcttgatcaacaaatttgaagcaaccattcatgggctctacctctgcatgaaaatcacaggcccacagggcgtg

SEQ ID NO: 66002 - DNA, 245 bp, Zea mays
tcagcaacagatgcttcagcagacgcttcagaagtttcatcagtcttctttggagttatacttgaagatttaattgtctccaaaacatctaacacattaaccattctttttcttttcggggtcactgttggcccctttttaatttttgctacttcaatttctcctgaaggacttaaaatttctgatatttttactccctcaactgatgtttttgcttcttcagtctttggttcttccatcttttc

SEQ ID NO: 66003 - DNA, 237 bp, Zea mays
agcttctcctatttattctcgttgcggctttaatccgactgcgggcggcttatacgttattttatctctatagactacagctgcagcagttgcggctgcaggcaaatctcatgattccatttacatcaaaatgaccctggcaaccatgcgaaccaatgtgatcacaaacagactggaaccactgagacacctgtaaattgtagctcacgtccctcaacagataatctgagccctcca

SEQ ID NO: 66004 - DNA, 246 bp, Zea mays
tgagagctgagagtctaagtctaagttgggtctgtccgagtgtgtcctccctgtaacgttgcatgtctccccttttataactaaaggggcacacacaagggtactgagccccgacatgtgggcccaggaacaaaacggatgtagtacttggagctactaatgttcgctgctggagcaatcttcttgcgtctgacatccgagatctgcatagtatcggcgtgcaggggaagcttctcgtataagtga

SEQ ID NO: 66005 - DNA, 235 bp, Zea mays
agcttggcatacaactggcattctcttagcctctgaagtaccttcctcaaatgttcctcatgctcttgctcattctgggaatatacaagaatatcatcaatgaacaccactacgaacttgtcgaggtagtccatgaacacactgttcatcaggtacatgaagtaagctggcgcgtttgtcaatccgaatgacataaccatgaattcatatagcccatacttggtgatgaaagcgg

SEQ ID NO: 66006 - DNA, 243 bp, Zea mays
tcggctttgagatgaaggtgtacatggtatgaaaggcactatctggaagaaggatgaaccagttccgaagctatggatgaagaagcttcggcttagcacaaggacggtggagaatgaaaccgacctaaaggagaaaagactgtttagtcctcgacagcttaccttttggctaatagtaaatgtcagggatataaatgtaattttgcccaggctgcgtcctgtgcctataaatagatgaacagt

SEQ ID NO: 66007 - DNA, 234 bp, Zea mays
agcttgagagctgagagtctaagttgggttcgtccgagtgtggcctcccagagcctgtgttgtaacgttgcatgcctccccttttatagctaagggggcatgcacaagggtactgagccccgacatatgggcccaggagcataacggatgtagtacttggatctactaatgttcgccgctcgagcaatcttcttgcgccctgacatccgagatctgcgtagtatcggcgtgcag

SEQ ID NO: 66008 - DNA, 242 bp, Zea mays
tcatgcatcaattatcaccaagccaatctacaccaccaagactatctccaacaccatcatcctcgtcactggaacttcccccttccgaagaagactctaataaggtcttgctgagccactcataagtttttccattcgagtcagaaggacaaccgggcgaaggctgctgctggtcgccaccaattccgccatgtgaaacttcactgttttctaagactgagtgaggattcgcgtggttttgt

SEQ ID NO: 66009 - DNA, 245 bp, Zea mays
agcttgtgaaggttcttcatccccacatgtgcttagcggcgatgccacaaccagcccatgctaatcttagcaattaagcatgcatctagaccggcctcctcttttgcaaaatcaactaaataaagtttgtcgtctaatacacccttaaaagctaatgaaccatcacttcttctaaagacagacacatctacattagtgaataaacagttatatcccatattgcataattgactaacagatagcaa

SEQ ID NO: 66010 - DNA, 253 bp, Zea mays
cttaagcttttattgtctccagcacatctagtacactagccatcccttttctcttgggggtcgctgctaaacctttttgtgtcttcgacacctccactaccgctgaaaggcttaaaacttctaatgttttcgtcccttcgattctcgggtcttcaattttgtcagtcttcggcattgcatctggatcttcaatcctctgcgtaagagcaggtcctttggcttcaatagctgaagaagtctcaccgccaaattc

SEQ ID NO: 66011 - DNA, 240 bp, Zea mays
ttggtgccgatggaaaaacaaaaatccttgaaatctggctggcaaactggttgcccgtgtccactgttaacttggacggcactccgaagcggcaaacaacgttctgcccaaaaaatttttgggccatctttgatgtgattgtggaaacagccctcgctttaatccatttggtgaagtattcgacggctaccaaagcgaacttaaggttcccctgagcggtgggcaagggcccgacaatgt

SEQ ID NO: 66012 - DNA, 250 bp, Zea mays
tgtgaagattcttcatcccaacatgggctaatcggcgatgccagagccaacccatattaatcttagcaattaagcaagtgtcgagttcagctctattgaaatcaactaagtatagctgaccctctaacactcccttaaatgctactgaatcatcacttcttctaaagacaataacacatatatctgtaaaaagacaattatagcccattttgcataattgagaaattgaaagcaagttgtaatctaaaga

SEQ ID NO: 66013 - DNA, 243 bp, Zea mays
agcttgccaatacctgtcaaagcaacaacacatgccatcacagcaactacaaaccataccagtaacttggcctttcgcatgctggggactggatatgattggacctttcaagaaaacttcaagaagatatacccatgtgttggtggcgattgacaaattcactaaatggatagagttccaacccattgcttctttaacctctgctaaagccgtggaattcatacaaagcataatattcaaatt

SEQ ID NO: 66014 - DNA, 250 bp, Zea mays
tcctgatgcggtcaaggcacaggtcaacaatctccttgccaactgctagacaagcaaatcaagtttaagtatggttttcattacagattgaatatctgggatcaatgccaacttaagatccgatcagattacttactggtgtaatgaccacgaacgaagttgttggctgcatcctccttgccactgatgagctgctcaggatggaagagctggcggtaggtgccagtcctcacctcatcgatgacagtgg

SEQ ID NO: 66015 - DNA, 243 bp, Zea mays
agcttgtgaaggacccagatcatcaaagcttataagtttctggatgagaagtggtcacccaaattttgttgatgaaacactagaagaccaatcaaggaaggaatccctgtggaaattcccaaaaggaaagtttgtgtgttggcatcgaagctttttcaataagctagctgccaaacgaaacctaaaagcctgaagatgatcttgagtagccagaatcagcgtttgcaatcggcaaccagatgc

SEQ ID NO: 66016 - DNA, 250 bp, Zea mays
tatgtgtgatcccatcctctttcaccaaaaggtgctctatttcatccttaatgcacttaacttggttgaagtcccctgtcttcctctcacaggcaccaaccatcctatatatgtcctctccttcgtactcacacgttggtaaagatactcgtactctctacccttcgccgcacttacaagttacaactcgcttttttgcgatcttctttgctactatgtacttctccatgctgtccacactcctatcatg

SEQ ID NO: 66017 - DNA, 242 bp, Zea mays
agcttgtatgccccggtattgaaataacattattcatactctgtaactatttgaagtaatgaatgtgcttactagcctcctgggactagtaattgtatcacatttgagtcccaaaggatcgggacacttcatgtggtataacatgctatacgactggccgaagaccgtaaccctgaccttaaaaagttgccttaacaagaaaacaccttttacccccaagaaacactctctctcctttcccc

SEQ ID NO: 66018 - DNA, 260 bp, Zea mays
actcaaacttcgattgaaatagtgtgtaagcaaagttaaccctagaccattcacactttggacatgagctctatataccacattcggatttaaggttaaagagtagcttggctttatgaggatggacaagtttgttttcagtatgagcattagaaatggtgaagcacttacggtggttgagtatctctaaaccctaaacctgagccccaaaagtggatttggagatttagccatacttttggaaaaagtgcatatatcaa

SEQ ID NO: 66019 - DNA, 238 bp, Zea mays
agcttgttcctgagagctaaatttgttgttttctcaggcttaattggtaatatagtttaagtcatatactcgtattgacttttggtgtccacgattacttattattgaaacaagttgattgttgatgcttcatttgctgcaaaatacaactcgtctcgaggtggagtttgttacaatatgatttgaattctaacatgagtcatgcgggaatttgtttccgtattggactgcagttcat

SEQ ID NO: 66020 - DNA, 244 bp, Zea mays
tctttcttcctcctcatcctcgtttgtgcttccgctatcattttcattagccacacaacacatgtgggaatcgaaatgggaagacaaaccttttggagaagtggattcatcgtttggtctccatcgttcattttctccttcttccttgcaagggttagtatcacaaaaactaaaggaagtagaggcatcaaatgaactattatgtttggactcatcaaacttgattttaattctagtccaaata

SEQ ID NO: 66021 - DNA, 240 bp, Zea mays
agcttcggggcagcagcaaagttcttttcggccgtcagcgccaaggggcaaaggcgccaagggctttcggggaaagtttggagatcagccaagaaaaatttactgcctattctgtggtgaaaacaagggccataccaccaagatgtgccacgttaccatccagaaacagaaaggagatagcagaaacagcagcgcaacaaaatcagccaaagcaggtcatgcatactgcttcgtatcatt

SEQ ID NO: 66022 - DNA, 263 bp, Zea mays
atagtttactcaagctccgccttccctcagtatatcacccgcagtccaacggagttgtgtttacacgccaatggaaaaaattttaccgctgtcaagaagatgctcctcgacgaaaaaaagggcaggtgggccgatttgttacctgaagcgggctgcgcgctaaacacgactgagtgccgggcgactgggttcacccctttccgccttctatatggatcggaggccatgacctcacaagaaataaagcatgggtccccgcgaac

SEQ ID NO: 66023 - DNA, 223 bp, Zea mays
  unsure (1)..(223): unsure at all n locations
agcttgagagcacctagaggggggggggtgtatatggngancctgnaaaacttaaaacttaatccacaaaacttggttaagtgttagtacaataattgccacgtggctagacagaagatcttgcccaatacgataaccataaaaaattcaacacataaatgacacactggtttatcccatgggtctcccaaaaccaacccttgcctactccactttatggcat

SEQ ID NO: 66024 - DNA, 246 bp, Zea mays
tctaaagggagaacacgtgataggtttaactaatgttaccttcgaaaaagatagaccttgtgcagcttgtcaagcaggtaaacaagtgggaggagcgcatcacagcaagaatgtgatgaccacatcaagacccctggagctgctacatatggacctcttcggacccgtcgcctatctaagcataggaggaagtaagtatggtttagtttttgttgatgacttttcccgcttcacttgggtgttctt

SEQ ID NO: 66025 - DNA, 238 bp, Zea mays
agcttagaaaaatctggtatgaatctgcgattatacccaactagtccaagaaaactccggacttggtgaacagttgttgggggtttccactccagaatatctttgatcttgctaggatctaccgcaattcctttagctgataacacgtgccccaaaaattgaatttcttccagccagaacgcgcacttactgaacttggcatatagctaatgttccctgaggcgcgtcaatacaatcc

SEQ ID NO: 66026 - DNA, 245 bp, Zea mays
tgaccattgtaagcattgcgaagcttctagatatgtcgaggtgacaaatgatgagggtgaattggtagttacgaaggtcacagctaagcaacttcgtcggttgcccatcattcctcggctttcaaggttgttcctcaacaaggaaatagctctgcatatgacgtggccaaagaatggtgtacgtctctccagagagtgctgactacgtgagtacgagcagggacaacgatgatgctgtttttcaa

SEQ ID NO: 66027 - DNA, 231 bp, Zea mays
agctttctcaccatgtatagcatgctgaatgaaacttcgtagaatgatgcagtttaatgctgaaacttggtcatcaagcagtctgttgaccttctgaccgaccagcactaaaataggtcggctgccttgctgggagatctgattaagtcggtcttagaagtattggaaactagacttcaatagctttccgaaatgtacttatgggccttcatagctcttgggaatcaaaag

SEQ ID NO: 66028 - DNA, 243 bp, Zea mays
tcagctccatctatgttatggatcccctttgaatccgtccaattcccctcaaccctcctggcagcttcttgactcccgtgaacagcaatgggcccttgttctgaaggtatcttcatgcataagtatgttgggtgaagtatagctttgaaggaattaagcgtccctcgaccaatgattgcattgtataggtactccatgtcgacgatgtaaaatacaacttgctcagaccttgtgttgtgaact

SEQ ID NO: 66029 - DNA, 234 bp, Zea mays
agcttgtcacgtgggtcgctaccacaaggaaatgaccaggttctccgctgggactgggctgccaaactaggcctaaaggtttcaaacaaggcctaactctcgaagatgaagagagaaggacctatcttttaattgtgttgtcctattatagttatttgtattatttgtaggagctttagtatgtgactaacaacactatacccattgtttttttgattgcctcatccttccaat

SEQ ID NO: 66030 - DNA, 242 bp, Zea mays
gaaataggtgcacacggcatacatcgttacaccatatgtttcaaaggtacaatatttttttttctaaaacgcgcaggagaactgcgcattagatatattaagatagaagaaataccaatggtctaaagaagaccagagtacagagaaacaacaaaaaaataacaaaaaaataaaataaaataaaaataaaaataaacattcatctagaagacagccaaagctgcccctaaactaaggccaga

SEQ ID NO: 66031 - DNA, 234 bp, Zea mays
agcttgcaccccgatacattggtcctttccctatacttgagcaatgtgtaccagtggcataccgactccaactacccgaaaccttgtctgctatgcataatgtgttccacgtgtcacaattaaagaagtgtcttcgggttcccgatcgaaccattgaagtaacagatgttgtccttgaaccagacttaacatattccgagcatcccattcaagtcttggatcagaaggacaggg

SEQ ID NO: 66032 - DNA, 242 bp, Zea mays
ttagtgattagagagagtgatttgttgtgttcttttgagctcttgcgcttggattgcttcttttcttccttcattcttgtgatcaaactcaattgtaaccaaggcaagagataccatttgtgtggtggtccttgcgggaacttcgtgtttcgtttgattgagaagagaagctcactcggtctaagtgaccgtttgagagagggaaagggttgaaagagacctggtctttgtgaccacctcaa

SEQ ID NO: 66033 - DNA, 243 bp, Zea mays
agcttgtcatgatgcattttatgtaacttgaatgtgtatccacgtagatgataaactaattatatatccaaaaaaaatgccacatcattggatgaacagttcgcgttgttttggcaaaacttggtacgataattgcctgcttgaatctttattcatgatctaaggacctttatataggtcatatataagtcatatgtatccatctaggactctaactttacaaatcaatctgtatatccctct

SEQ ID NO: 66034 - DNA, 256 bp, Zea mays
acttaagcttgtactccctaagttccatttcgttatcatggtttggaatccatgtggtcaaatgtctcaatcttggaatgtcgatattgaaaataagcaaagctacatcttggctgtccaaatatgttcatactcagttctttttatttatcatcatgaaatctgggatgtgcaactttcaaaagttttaccactaatgtgttttcaagtcgtccgactaatcgcgattagtcaggctagtcggttttgggtgggc

SEQ ID NO: 66035 - DNA, 245 bp, Zea mays
agcttaagccttcttaataaggataatatgtttttacatgaattaataaccaacaaaatagtggtgtagtgattacaggagtttcttgcgtcaccggaaaactttaaatcatcaacattgagatctccacccccaaatgacttatcgaaagattgggttccttactctatcacgtggtatcagatttcaagttgcccaagtatcttacttaatttttccttaataaattgaatccatttttcatt

SEQ ID NO: 66036 - DNA, 250 bp, Zea mays
tctaattcatgtttccctcgacctctcttaacacaaaactatactcaaaatctaagcttcacagcccaagcctaaatcctagactcaaccttgaacaagctctatttgcagacaaggggtagtgtcacgtggggttctcttgcacacatcagcagtttaacactatcgaacgaagaaaacatgttatgtaaaatttaggcttgggcccgcgctccgatcggacgactaaaactgtaacggtaacagaatt

SEQ ID NO: 66037 - DNA, 242 bp, Zea mays
agcttgcccaatatgagactaaaacatgcaaatgaaaaatctgagaaaaacggccggattcgatcccgggtgaaaataaagcttacatgtacgtgcaacaagacaaattccatagaaggccctagtcctcgccctttgctcacccgaactttgtaactctttatgcatatacaaatagcgattaatttaactggggattcacggcacctctagaccaatcgatccatcaataatacaaagtc

SEQ ID NO: 66038 - DNA, 248 bp, Zea mays
tcgattaacttgtccaacttgaatagtttcgagaacatggaaattgccaaaagatgatttgcctctcagttttgttatgtaaacataaacgtttgctattttggaaaggaaaaaactactacatcatcttctcttgtcatatgcactaaattacctattcaccttagctaatgaaaatggagctatttacagaagagactgaaggaaaagtgtgttgaaatgttaacaagtactcccgctgtccactt

SEQ ID NO: 66039 - DNA, 241 bp, Zea mays
aacttcatagtaaaaagcacgaacaagagaatcatattgcctgagggctcaagaatgctggaggaaacttcaacaaaatgacagccaaagtccttcactctcaaataagcagaaatgtgctgacttatgttgacgacatcatagtaaaaaacacgaagcaagagaatcatattgctaacttgcaagagacgtttgccaatttcaggcaagctgttcttaagctaaatccagagaagtgtgt

SEQ ID NO: 66040 - DNA, 250 bp, Zea mays
tgtcttaggctcatcttccttcttcatccagatttgataatagcctgaatagcagtccaatagactcatgagctccgaagtagctgcttcatccacaagggagtctattcttggcaaagggaactcatccttcggacatgccttgttgagatccgtaaaatcgatgcatatcctccactttccattgaccttcttcaccatcatagttttggctagccactctagatatgtcacctctctaattactccg

SEQ ID NO: 66041 - DNA, 232 bp, Zea mays
agctttacttagttgattttgcaaaagaagatgccggtctagatgcatgcttaattgctaagactagcatgggctggctgtggcatcgccgcttagcacatgtggggatgaagaaccttcacaagcttctaaagggagaacacgtgataggtttgactaacgtacaattcgaaaaagatagaccttgtgcagcttgtcaggcaggtaaacaggtgggaggctctcatcacac

SEQ ID NO: 66042 - DNA, 244 bp, Zea mays
ttcttgacatttgtcatcccacttaaattctctgcccttctccagaaacgaagtcataagcttggcgatcttaaagaatccttcaataaatctccgataatattctgcaagccccaagaaactccgaatctcagtaactgtagtgggcactctccactccataatctccttgaccctagcaggatccactgctattcctccattagaaataatatgtccaaggaatggcaccttgtcaatccaa

SEQ ID NO: 66043 - DNA, 240 bp, Zea mays
agcttctaaagggagagcacattttgggactaaccaatgttcattttgaaaaagacagggtttgtatcgcatgtcaagcaagaaaagaagttggtgttcgtcatccacacaagaacatcatgacaacggacatgcctttggagttactccacatggatctattcggcctgatagcttatataagcatcgacgggagtaagtactgtcttgtaactgtagatgattattctcgcttcactt

SEQ ID NO: 66044 - DNA, 245 bp, Zea mays
tgacaatgaggagatggcgctcgtcattaagagcttccgtctaatcctcaaacaaaggagggggaaagactacaagtcccgctccaagaagtttgctacaaatgtggtaagcccggtcattttattgctaaatgtcctatatctagtgacagtgatcgaggcgacgacaagaaggggagaagaaaggagaagaaaaggtactacaagaagaagggcggcgatgcccatgtttgtcgcgaatggga

SEQ ID NO: 66045 - DNA, 235 bp, Zea mays
agcttctcacaattttctttgaggtcattgttatagtcttgagctcctcaaaagacacttggaggtttttatacaattccttcaaggccttaaatttttctttttctttgtgcatgtagtcatcggcctcacctaacattctaacaagatcatcatatgaatagccatcatcatcaacatcatcgatatcatcatcatcatttatatcatttaaatcggtgatgatttttacctt

SEQ ID NO: 66046 - DNA, 246 bp, Zea mays
tccaaccttcgaacttcatccagatatttttcaagcttctgatctcgtgccttgctgcttttatccacatggccagcaataacttgagaatcagtctttaagatagcccttcttactcccattgcccttagtttccgaagccccaatagaagtgcttcgtactcagcaatattatttgtgcaactgaaatccagtttgacagcataacatgttttgacttttgaaggtgccactaggaccgcagct

SEQ ID NO: 66047 - DNA, 238 bp, Zea mays
agcttcagcatcaaactgggttccattgtccacggtgatagccttcggcactccgaagcgacacacaatattttgccagaaaaacttttgtcaaatcccttctgcagatctggcataaccaacactggtggtgacatcaatctcttctttaatttatcaaagctatcttggcacttctcatcccacttgaactcccttcccttctccagaagtgaggtcatgggcttaacgatcttat

SEQ ID NO: 66048 - DNA, 245 bp, Zea mays
tgaagttggactctgtgctatgacgaaggacgatcttgcggattgccttgcatataatagtctgaaggtgtgagaattgtatatttggaaatttacagtttttgaatcattcttttattcttatactaattcttttttcatatagggttttatattgagcaacactttgagagcgcaaaagaatgccgaagacgagagttataatattgctttcaacaacctacgagtagaggttatcaaggtga

SEQ ID NO: 66049 - DNA, 234 bp, Zea mays
agcttgtgcaaagtccacttgaactaatcttctgagaaacccgcccccattgcaacattacaccggaaggtcctactcaaaaagcaatggatgaattcagaattattgcagagcatatcagtacaagagacctggttcaagagttcttggctttcaaagtttttcctagtttaaaagaatgagaaatgccgaagctgaaggaggaaaagaaagaaggcgaacttgtgcgtttac

SEQ ID NO: 66050 - DNA, 244 bp, Zea mays
tctaaagggagaatacgtgataggtctaagtaatgttactttcgaaaaagatagaccttgtgcagcttgtcaagcagagaaacaggtgggaagctctcatcatgccaaaaatgtgatgacaacatcaagacccctggagttacttcatatggacctcttcggacccgtcgcctatctgagcataggaggaagtaagtatggtcttgttatagttgatgatttttcccgcttcacttgagtattc

SEQ ID NO: 66051 - DNA, 232 bp, Zea mays
agcttcataagaccaacatgaatgtggtagttcctaaagttggtggagaattctgcttaataaatggtgttggtagtcgcatgggctccacaatacgcatcctaccaatccacaacggggtcggtgaggcgacccaatgcatatagtactttctctctgttagtgcattgggcaatgttgagaatcttctccactgactccagccaatcatcagcctgaagtggatctaggg

SEQ ID NO: 66052 - DNA, 243 bp, Zea mays
tcgacttcatataaactatggatggccttcaagtccgtccaacttccatcggctctcctgacagcttcttgactcccatgtacaacaatgggcccttgttccgaatgtatcttcatgcaaaggtatgcttcgaaggcattgagcgtccctcgaccaatgattgcattgtatgggtactccatatcaacaatgtcgaagacaacctgttctgtccttgtgttgtgaacatagccgaaggtgacc

SEQ ID NO: 66053 - DNA, 234 bp, Zea mays
agcttgaggaagtggctgctatgcgcgcggcttaaggggcgcgccatgggaaggggagaagcgcctatagagagagagagaacgacgcatataagaagcgcgcgacaggggaaaggagcacgacgcacgtataagaagataaggacggcgcgcgtagaaaaatcagggagaacggcggtgggatatttgaggattttttgtttttcttttctctcttttttcaaaggaaaatcg

SEQ ID NO: 66054 - DNA, 242 bp, Zea mays
tcacgggctactggcagagctagccgaagcactggctcgacttgggggtggctggagtgggctggccacggtggccgaagctctggcggcaatggcgggcggaattgagctcgccggagctaaagagaaggggctggccggtgaaagtgagcgcggggtgaagtggggcgcgcctggggaggctttataggcacgacacggtgcacgggcgatcgtggaccggcgagcgcgcgtgggcgtgc

SEQ ID NO: 66055 - DNA, 436 bp, Zea mays
agcttatgaagattcttcatcccaacatgggctagtcggcggtgccagagccaacccatgttagtcttagcaattaagcatgtgtcgagttcagctctatcaaaatctactaagtatagctgaccctctaacacacccttaaatgctattgaatcatcacttcttctaaagacagtgacacctatatcagtgaaaagacagttgtaacccaatttgcataattgagatacagaaagcaaattgtaatctaatgagtctacaagaaaaacattggaaatagaatggtcaggggatatagcaattttaccaagacctttgaccaaaccttgatttccatccccgaatgtgatagctcgttggggatctttgtttttctcataggaggagaacatccttttctcccctatcatatggtttgtgcacccgctgtcgagta

SEQ ID NO: 66056 - DNA, 390 bp, Zea mays
  unsure (1)..(390): unsure at all n locations
cttatacacgaggatagaagcaagagctcgaccatatgtcataatagattgggagctatataagcgtggggtctgttccccattgctcaagtgcttatccagatccgaaggtatagagttaatgaaggacatacatgcaggtctctgtggatctcacattggatctaggcctttgcttgggaaagattttcgccaaggattntattggccaaaggcagcttctgatgcagcggatttagttcaaaagtgcgaaggttgtcagaaatgtgcaagagatcaaaaacaaccttcgtctttaactcagttaatacaacctacatggccgttgcaaaggtggggtctggatttgctaggtccattaccaccagcacaggggaacttaatatatgt

SEQ ID NO: 66057 - DNA, 440 bp, Zea mays
  unsure (1)..(440): unsure at all n locations
agctttcgaagaactcaagcaatacctgattgatctaacaacattttctccaccaatgccaggggctcctctgttgttgtatgtggcagcttcacactcagcagtaagtgcggcacttgtgcaggagaagtttgatggacaaatcaagaagcaggtcccagtatattttgtatctgaggtccttagtgtctcaaagaaaaattatacagaactggagaaggtgttatatgccgntctaatggcatccaggaagcttcggcattattttcaggcatataacattattgttccttcttcgcagccgttgaaagatatcatgagaaataaagaagctactggccgaattggaaaatgggctgcggagcttaatgaattttacattgattatgtgcacagatcctcgatccagtctcaagcattggcagattntattgccgact

SEQ ID NO: 66058 - DNA, 445 bp, Zea mays
  unsure (1)..(445): unsure at all n locations
gcttatgaagattcttcatcccaacgtgggctagtcggcggatccntatctacccatgtcagtcttagcaattaagcaagtgttgagttcagctctattaaaatcaactaagtatagctgaccctctaacactcccttaaatgctactgaatcatcacttcttctaaagacagtaacacctatatccgtaaaaagacaattgtagcccattttacataattgagaaacagaaagcaagttgtaatctaaagaatctacaagaaaaacattggaaatagagtgatcaggggatatagcaattttaccaagtcctttgaccaaaccttgattttcatcctcgaatgtgatagctctttgagaatcatgaattttctcgtaggaggagaacatacttttctccccatcatgtggtgtggcactcgcttcaatgatccactatagcccc

SEQ ID NO: 66059 - DNA, 339 bp, Zea mays
  unsure (1)..(339): unsure at all n locations
tgacccaaacgagtcacttaagggacacgaagctaccaagtcattcaaaagaagacctatgagcggtcagcacgataaccagtgggaggagcacctcacagcaagaatgtgatgaccacgtcaagacctctggagctgctacatatggacctcttccgacccgccgcctatctgagcataggaggaaagtaagatggtctagttattgttgatgacctctcccgcttcactctggggttctttttgttcgataaggctgaaaccccaaggaccctcaagcgcttcctaaggagagctcanaacgagttccagcccacgtgaagaagataaagagcgaca

SEQ ID NO: 66060 - DNA, 423 bp, Zea mays
aactaagctttcctatcgcatcacctgacgtaaaccagccttttcattctgtgcccattgcttcggagctgatcatagatacttcgtagtttccgataagcaaaaatatgcaaccaaaattctcatggatccatctttttagcctttgtctgatagagcaaaacgtgaacccggcagaagctgtccgcaaacgggtccatcgcctggcttccgagtgcccagatataaacattgagcctaacgatagcgctgggggtcagctggtgaaaatagatcccaaaattctttaatatctctgcaataatcccatgaagggggaatcttaatccagcctttatgaagctcttaaaataacaatttcatcttttccggctttggggcagtctctactcccccgaagcgtaatagctatctttgattttc

SEQ ID NO: 66061 - DNA, 356 bp, Zea mays
ctgcagcttagctgattcaaggtccttggtggaccattcctaggtttagcttctccatctcttgacataaagagttgtcagaggtcttcaccgtaagacagtgacaggaaaccttacggcttagtgcatctgccacaacattggctttgcctgggtgtcggcgtttctagacaggggggtcccttaaccgaccagtgagtgtgctgcgtgccccaccccacatgggtctagcgcgtgggctaacgctacagggggagaggcgaggtggccggagtctaacgtgagagaggtggaagtcccgccgccttcgtgttcgtcccgcgcccacgtcgggtgcgcttgcagtaagggggtta

SEQ ID NO: 66062 - DNA, 431 bp, Zea mays
  unsure (1)..(431): unsure at all n locations
gcttatcccatntgaactcnttgcctttctccagtagagatgtaagtgtgttttactaactcggaaaaaccttcaataaatcttctatagtatcccgccaatccaagaaaacttctgatcttggacgcatcctttggttgcttccaatccagtatctcacttatctttcttgggtccactttaattccaccatcggtaacaatatgccctaagaaagcaacttccttcaaccaaaaatcacacttcgagaattttgcgtacagttggttatcatgaagcttttgtaggactagccttaaatgatcttcgtgtgtttcttcattcggagaatatatcagtatgtcgtcaatgaatacgaccacaaactgatccagatattctatgaatactgtattcatccaagtcataaagaatgctggtgcattaatcag

SEQ ID NO: 66063 - DNA, 364 bp, Zea mays
  unsure (1)..(364): unsure at all n locations
agctctgtgtggaaattgggttaggatntgatctcttgaatgtgtctagagatgaatgcctagctcttgtaagtggttggaagtgtgaaaacttggatgacttgaatgtggggtggttgggggtatttatagccccaaccaccaaactagccgtttggtggggctgtctgtcgcatggtgcaccggacatgttcggtgcgccagccacgtcaccaaggccgttgggttccgaccgttggagctctgtcttctgggcccacctagatgtccggtggcacaccagacatgtactgtagagtgttcagtgtgccagcgcgcgcgtgcctgacttctgcgcgcttctagcgcgcattatatgcgcctg

SEQ ID NO: 66064 - DNA, 429 bp, Zea mays
  unsure (1)..(429): unsure at all n locations
ggaccataaatctaagcttggaaggttcttcatccccacatgtgctaatcggcgattcctcagccagcccatgctagtcttagcgattaagcatgcatctagatcggcctcctcttttgcaaaatcaactaaataaagtttgtcgtctagtacacccttaaaagctagtgaaccatcacatcttctaaagacagacacatctacatttgtaaatagacaattatatcccatattacataattgactgacagatagtaaattatatccaagagactcaactaaaaacacattagagatagagtgctcattggatatttcaatcttgcctaaacctttcaccttgccttggttcccatcaccgaatatgattgaatcttgggaatccttattcttgacgtaggaggtgaacatcttncttctccccgtcat

SEQ ID NO: 66065 - DNA, 377 bp, Zea mays
agcttatagcttctcataagatgagccgaaactggtatttatatcgttgctaagcattactacttaagttccttgaaatgaagtcagactaaacatttatctcttatgtttacgcatctgatattctcacaacattagagttgtctgttcaggtagtgcttgacttggatgagactttaatttctgcatatgaatcatctagccttcctgctattgtacgtacacaagctgttgaagcaggattacattgctttgatatggaatgcatatctatactactatattaaggctgtaagggtagcctgcctccacctcgttctgccttcaaccaatctgcaccgtccatctatatgcgtcaaatcattaccatccgtctc

SEQ ID NO: 66066 - DNA, 430 bp, Zea mays
  unsure (1)..(430): unsure at all n locations
tattacgcgacctataaaactcaagcttgggtttcttattgggtcttgtntacccttcagatccctgttcagggttaagtatcattctccagggttttatttgcaaaacaccatatcaatacaacttgtttgaaatttttgcctaatgaatgcattctaggtgtgtcaaacacatgaaatgctaatgctgatgatgttatgctcaagttttagtgacagtaacaccaggggtgttacatgtaggccaagtgattgaactagggtagaaagaactctagttgcaggtaatcttacttaacttgacaaataaaactggattttttttaaggatccacttttagtaagcatttttgcaaatagagtcattgatcattgataagccttaccttgacaccattaaaactagcatccccttgagagtctnttcttt

SEQ ID NO: 66067 - DNA, 392 bp, Zea mays
  unsure (1)..(392): unsure at all n locations
agcttccacacgcttgccctattgatcggcttattatgtctgaanggctctctggtaagncgctccaacgtttttgaggccaaatggcatggtggtataacataaagctccaaatggggtgatgaatgcagttttttcctcgtcttcttttgccaagctgatctgatggtatccggagtagcaattccagaaagacaacacataacatctagcggtcgagtccaccacctggtctatcctggggagcccgaagggatcctttcgatagtgtttgttgagatccgtatagtccacgcacatgcgccaatccactttattctctttgagtacaagaacaggatttgctaaccactcacgatgcagtaccttttctcatgaaccctgctatgact

SEQ ID NO: 66068 - DNA, 398 bp, Zea mays
  unsure (1)..(398): unsure at all n locations
acacatagaatactaagcnttgcattantatggtgagaatatcctctagtatatgaactgcttcgctctgctctctcactctttttagaagttagagcatgaccgccttatcttcttggcttatatgagcgtcgagttgcatgaggcttctttcatcctcctcatcctcatgtgtgcttacactgtcattttcattagcaacacaacatatgtgggaatctagatgggaagacaaaccttttggaaaggcggattcatcgtttggtctccaacggtcattctcttcttcttccttccaagggatagtttcacaccgactaaaggaagcagaagcagttaatgaaccaacatgtctggactcatcaatatactattaactctagtccaatatcatgtgc

SEQ ID NO: 66069 - DNA, 383 bp, Zea mays
  unsure (1)..(383): unsure at all n locations
atcgtagtgcgcaagagctaaaacttgagtaattggtttcagnnggcctgagagcgtgtcaaatgcgtttgcggtatggccctatttatacgccaagtgcgttgaaaattgaaagaccccgcttgtcagtgaatattgctattctagcaaagggaaggtgttttttcggaccttctgcgcatagccttcgtccagatcgcaatctatatttattatnttgaacaaattaatattgcgaggggctactgttggggaccttcggcattcgaaggtcctcaaaaacaggatataatagtgtttctggagtataatgtgtgaacaggtatcttcggactctagtcacgcatcactgtagaccacaataataccaaggttggtgaaac

SEQ ID NO: 66070 - DNA, 435 bp, Zea mays
agcttgcacagaaagactgctcgcatatcctttttttttctcattaatatatttaattaatagatcaattttacaattccattttaaataaatttttacctgattcagaattttgtacctgttgtgaaaactgaaacggaaaaacttctactactagacgtcctattacaaccagaaccagaacaaccagaccacataagttaaatatacagaagacaacacatgacaatatattccatttccacctggcttgtgaaaatcatttggatcaacagggcttcttcagtcatgctctggtgggtctttgacctgaccatcttcaattattggcactccattcatggggatgttcgaagttaacaccaagatactcataataagtctatcataatatgcatgagttcgatgaccaatacttgcttctcctctgaatac

SEQ ID NO: 66071 - DNA, 408 bp, Zea mays
  unsure (1)..(408): unsure at all n locations
tcggcactactttcaagcattccatattattatttcttcatctcagcctttgaaagatattatgaggaacagagaagctactggaaggattggaaagtgggctgcggaactcaacgaattcagcattgattatgtgcatagatactcaatccagtcccaggcgttagcagacttcatcgctgactggacgccaggggctcangaagaagcaaataaagatgccgaagcttggacagtgttctgcgacggttcctgnggaaccttcggggcaggtgcagctgctatcttggttgcaccttccaaagtcagaacatgctatgcagtaaaacttgatttcagctgcacaaataatattgctgaatacgaagctctgcttttggggcttcggaagttaaaggcaatggggat

SEQ ID NO: 66072 - DNA, 426 bp, Zea mays
agcttgacacggactggagtacatttaatacataattagagggccggatagaagtttaactaatattttgaaattagcgacaggaaactttctctctctcttttgagccgcgcatgaatgggcgggattattcaaacgcagagtgcaaaccaatttcaagttcgtttaaacgaccgtccaaagtccgactgatggtgaagtttcagactgatctgagcacacctgtcgggttgtccatggcgcccaccacatcaggatcatatcacgtccacaagatatcctaccagacacgtggggcctctgaattgatagcaggcgccaacgcatggctgtgttagctgaaaaaaactagcatatacatgtgtagcatctctcttcgttggagggtttatgtttatccgtgggcatgcatgcttgatgagtaca

SEQ ID NO: 66073 - DNA, 382 bp, Zea mays
  unsure (1)..(382): unsure at all n locations
tattcaacgtgcgagtcaatgtctttctatccattatttttccgtccttcttttcaagccgntctaaccatttatgtgactccaccttcagtacaaatttcttcttctgcagggcccaaaagagaaaagacaaccagaatgatcaaatacaagtagacatgtggcacacaaagggatagcatgaacatgaacacaccaaaaaaggaaatgttggaagctgaaagttgctggtactaactctgactaggatttaaaaagaattgtctaagtagtaatacttgctccattcaaaaatatatcaagtggtctccagtatggcagtatgccacttcgaaaattattgtacatgaaaatgataaaagaaatgtaaaatcttaaatct

SEQ ID NO: 66074 - DNA, 429 bp, Zea mays
  unsure (1)..(429): unsure at all n locations
acctgcngcatgcaagcttcggcgcgatagtacaagggggaacctacttaaagataaaattacttcggggtcctcaatagatttccataaaccgttaacaaatgcaatggacatggatgtaattttacgtgggctgcgtcccgcgtctataaatagatgaacagtactcccgtactgttcacgcggacttgtcattttgcttttggcgtcacgcttatactctccaccttctctcaggatcgaaggtacatttgtaatttgggatcatttctgtttttccatgttaataaaatagaaatgattctttggtgatgcttatatcatatttcatgctttatgtgagtccttcgtcattacttgtcatgtttacgaaggtatgtctctcatgaccttcgtccgagactcattatttcccgaggggatataatg

SEQ ID NO: 66075 - DNA, 445 bp, Zea mays
tcgtgaagatgttctccgaagctacacttccgaagatcaatagtgtatctgcttgcaacttagcatgattttcccctttcaagacattcttccgaagatcgatgtcatgtccccttcttgtgccatatgcagcatgatgtatgatgcttatgctatgcgaaatgatgcgatgatgttatgttgtgtaagatggtgtttattccgaagatacacacacattcctgcgataaaacacagtctttttgaatcagcgttgtctttttactataagcctcccttaggagcttcttcgccttttacttcagcggaatcagcgtttatttttcgctgtaagcctcccttaggagcttcttcgccttttactttcagcggtattcgcgttgactttttgcccttcgccttttacttaggcggtatcagcgttgacttttcgctgtatgctctg

SEQ ID NO: 66076 - DNA, 449 bp, Zea mays
  unsure (1)..(449): unsure at all n locations
agctntaccaaatggacgtgaaaagtgcctttctcaatggtctcaatcaaagaagatgtctatgttgagcaacctcccggctttgaagatagtgagtatcctaaccatgtctataagctctctaaggtgctttatgggctcaagcaagccccaagagcatggtatgaatgccttagagatttccttatttcaaatggattcaaagtcggaaaggccgatcctacactctttaccaaaacacttcaaaaggtttgttcgtatgccaaatttatgttgatgatattatatttgggtctactaacgaatctacatgtgaagagattagtaggatcatgacacagaaattcgagatgtctatgatgggagagttgaagtatttcttatgatttcaagtgaagcaactccaagagggcacctttctaagccaaacgaagtacactcaagatatt

SEQ ID NO: 66077 - DNA, 446 bp, Zea mays
  unsure (1)..(446): unsure at all n locations
ctaagcttctaaagggagagcacattntaggactaaccaatgttcattttgagatagacaggatntgtagcgcatgccaggcaggaaagcaagttggtgcccatcatccacacaagaacatcatgacgaccgacaggccgcttgagctactccacatggatctattcggcccgattgcttacataagcatcggcgggagtaagtattgtcttgtaatagtggatgattattctcgcttcacttgggtgttctttttgcaggaaaaatctcaaacccaagaaaccttaaagggattcttaagacaatctcaaaacgagttcggcttaaggatcaagaaaataagaagcgacaatgggacgaagttcaagaactctcaaatcgaaggcttccttgaggaggagggcatcaagcatgagttctcttctccctacacgccacaacaaaat

SEQ ID NO: 66078 - DNA, 421 bp, Zea mays
  unsure (1)..(421): unsure at all n locations
agctngacaacaccattngacattntacatataatttctgttatcaagaatatttagttcatttctcaacatgcaaaagcgggtcttatcaagaggcttagtgaaaatatccgctaattgatcttccgacctcactccttctaaaatgatatctcctttagcaacatgatctctaaggaagtgatgacggatatcaatgtgcttggtgcgagagtgttgtacaggattattagcaattttaacagcactctcattatcacacaacaaaggtaccttttctagaactatgccatagtctagaagagtttgtttcatatataaaatctgtgtgcaacaagcacctgcggcaatgtattccgcttcggcagttgacaaggcaacactattntgctntttggatgtccatgaaactagtgatcta

SEQ ID NO: 66079 - DNA, 447 bp, Zea mays
  unsure (1)..(447): unsure at all n locations
tctaaagggagagcacattntaggactaacaaatgtgcattttgagaaagacaggatttgtagcgcatgccaagctgagaagcaagttggtgttcatcatccacataagaacatcatgacgactgacaggccacttgaactcctccacatggacctattcggcccgatagcttacataagcatcggcgggaataagtactgtctagttattgtggatgattattctcacttcacttgggtattctttttacaggataaatctcaaacccaagaaactttgaaagaattcttgagacgggctcaaaatgagttcggctttaggatcaagaaaattagaagcgacaatgagacggagtttaagaactctcaaatagaaggctttcttgaggaggagggcatcaagcatgagttctcttctccctacacgccacaacaaaatggtgtagt

SEQ ID NO: 66080 - DNA, 394 bp, Zea mays
agcttatcaagtcagctttccaacgcatccagccccacgttatttgaagattcctagaagaagttattgtcaaaatactgaaggctgcgtagaagtcaaacagccacacggaaatcagttctgcagatctcccgaagaggctccttcacattagcttgtgaaaatacttttattttgtgtttatacctcgctaaggctggttgttactagtataaatacccccatgtctatgatgtaaggcagcttatgataatctaaaacagaacccctttgttcagctgtgtgctaataaatattgagagtgatctctacccctttgctcttgtgaattccttcgcgggattgcagaagcggcggcttcatccgctcccaattggtgctcctactcccttcg

SEQ ID NO: 66081 - DNA, 451 bp, Zea mays
  unsure (1)..(451): unsure at all n locations
ggacactccgaaactaagcttacaggccactggcggagctagccgaagcactggctcttcttggggtggctggagtgggctggccacggtggccgaagctctggcggcaatggcgggcggaaaagagctcgccggagctaaagaggggtggctggccggtggatgagcgcggggtgaagtgaggcgcgcccggagaggctttatatgcgcggacgagcacggtcgagggcggggctctgacaagcgctcggggcgtgcgcggcgaacgccagtgcgcgctctggcgtctggcacaacgtcgagcacaaggcagtgcagagagaggtcgagttcaagcgcggattggccccaaatctttgagattatggccatgatcccgttgagagatctcttcctctcangtccctttgtcgnttgtgtgtggaggctagcangttttgctgactggata

SEQ ID NO: 66082 - DNA, 354 bp, Zea mays
ctgatgttcaaatgacatcgccttttgctaaattttcatttcttaaatgcgcgatagaagattcttaacttcctccatcacagtgagaattgattcaaagatctagatgtcgtcaacataaaggcgcagcataatagacttaccctcaccataccgataatacacacacgtgtcaaatttatttacagcaaaaccagcgggtgtgagagattatctaactcttcatgcccttgcttaggtgcttgttttatgtcatacaatgattttatcaacctgcacacctttgtgtcttgaccatgccgaatgaacccttctggctgatccatgtagatctcctcatccaactgtccattt

SEQ ID NO: 66083 - DNA, 421 bp, Zea mays
  unsure (1)..(421): unsure at all n locations
actaagcttgtgaggttcttcatccncacatgtgctaagcggcgatgccacagccagcccatgctagtcttagctattaagcatgcatctagaccggcttcttcttttgcaaaatcaactaaataaagtttgccgtctaatacacccttaaaagctagtgaaccatcacttcttctaaagacagacacatctacatttgtaaatagacagttataccccatgttgcataattgactaacagatagcaaattataaccaagagactctactaaaaacacattagagatagagtgctcattagaaattgcaattttacctaacccttttaccttgccttgattcccatcaccgaatacaattgaatcttgggaatccttattcttgacgtaggaggtgaacatcttcttcttccccgtcatat

SEQ ID NO: 66084 - DNA, 425 bp, Zea mays
  unsure (1)..(425): unsure at all n locations
agctgatggcctgtcatgctctcatcgtgattctggctgctgnggncgnggaatcactggaggtgggcgccaatatttgatacttgaattcaatcccctaaaggcattgaaaactaaggcaacacaagttaaatatgtaaacttttgtccttgttttaacactcctttgaagtgtcattacgaaggacgaagatcttttaaaaggaaataaaatgatataaaatgaaatgacaaggagtgattgagtgtaaaaactcatatcatatgccttgacattttcattccatcttacttcatatcaaatgagtttacaaacataccttcggcttcttaacacatggtggcacaaaggttcttcgaaggctaagcgatatgaagttatggcccttaaaaaaggtgaatttatgcagggcactgatcatcta

SEQ ID NO: 66085 - DNA, 346 bp, Zea mays
tcaccacttcaccacggacatgacacaccattcctcttcttctatcgcgccccatggcctcaccggcgacctcaccactgcgggagcctgccacctcaccatggaccgaccgtcctgagcccccaccggccaaattaaaacccaccgccatgaccccctaccctcgcccatgctatgccaccaccccaaccacccagaactggatcaacggcgaagaaccaccgtcgagaccaccgacggccggttcctccccaccgacggcgaaccgccgtttcccgcatctctaatacatacttataaatgatgtcagtgtaattgttttgcaatcaacatgtgatagtgttat

SEQ ID NO: 66086 - DNA, 329 bp, Zea mays
agcttctccacgatccgcggctaggtccccatcctctcgatctccagccccttctcagcccccgtattcacgccctcgacctcgcccttgcccggacagggaccggcccacgacgccggggtggacctgaaccccaggggggccgtaaaacagtggaacgcccgcctcggtggctccggcgaccttgccgcgggcgcctggcatgggcctggaggggccgcgggcggagagagtggcgcgacgactaggagtctccggtacatggcggctggcatgggcctgtaaggagctgccgcgcgccgccagttgggtgagcgccgagacgcacc

SEQ ID NO: 66087 - DNA, 437 bp, Zea mays
  unsure (1)..(437): unsure at all n locations
tcgtattattccggtctattgcaatgccgactttagtctgtgggtacctgttcacacattgtactacagaaatactgttaaatcctgtttttgaggaccttcggacgccgaaggtccccaacaaagtcaatagttccaaatgagtcattggctctgataccacttgtaaggaacaatgccatctaatagggtatgaattatgcaatctatctttgttctaatctattacctctattttgtattaataaaaacatatgtagaaaaccaagcattcatatgtgcaactaaggttttgactaagtattgtgatccctactgcaaaaggagttatgcaacctangttctagttctatcggctagcctataactaagctaggaagggtaagcacataaccaaagtaacaatataaatgtggaagctttaatgtgatagatac

SEQ ID NO: 66088 - DNA, 272 bp, Zea mays
agcttcacggcctcaccagggagctatctgtttgcttggatcgaacggaggaggacgggaaaggggctggccacggtggttgctctctggcggcactggcgagtcgcggtgaggtcgccggagctaatggctggctcgggtaagtcaagcggggtatggaagaggcaacggggaaggcagccgaacactgggacgggctttatagccgtggcgcgggcgtggtcactggcggccgcgggcacgcgggggttcccgcaccggcgtgctctgag

SEQ ID NO: 66089 - DNA, 420 bp, Zea mays
  unsure (1)..(420): unsure at all n locations
ngaagccatggttagtagcataggcaagtaatatacgaattgactcaagcctagctacgggtgcataggtttcaccgaaatccaaaccttcgacttgtgaatatcccttggccacaagtcgggctttgttccttgtcaccacaccatgctcatcttgtttgttgcagaagacccacttggttcctacaacattttggttaggtcgtggaactaaatgccatacctcgttcctcgtgaagttgttgagctcctcttgcatcgccagcacccaatccgaatcttgaagagcttcctctaccctgtgtggttcaatagaggaaacaaaagagtaatgttcacaaaaatgagcaacacgagatcgagtggttacccccttatgaatgtcgccgaggatggtgttcacggcgtgatctcgttgga

SEQ ID NO: 66090 - DNA, 381 bp, Zea mays
  unsure (1)..(381): unsure at all n locations
agcttaagcaacatcttgactcgaattcttgcttcatatgagaaagaggcaaggcatttgctgtccgtcactatgcaggagaggtcgggtgttgctatacattcattgttccttttcgcagngaacagtcgtttggtttctttcatctttgttttaccatttatatcatcgntggttcttattcttgataatcaggtggcttatgatacttcgggttttctggagaagaatagagatttattgcacatggactcgattcagctccttgccaaatgcaaaacttctctgccaaaaatgtttgcatcgaagatgctagttcaatcagataattctatgtctgttccatatagatctagtgctgctgattcttcaaaactaagt

SEQ ID NO: 66091 - DNA, 450 bp, Zea mays
actcagcttatatgcgttctttcagggtggaagcccaattttgtgttctcatcataaccatgttgaccaactgaatatgttggcttaaaaagaaaacaatagaagcagcaagcgacatctttggccacactgtattccaaccaatcatgcttcttaagccatgttccacaaaaggacctatagtctctggttccaccacataatttgcggggaaaattatggccaaatggttgagttggatctttcaacaaatattctctcttcacttgatctctaatgtcaggatggaaattttcaatgggaatacaaagacctggatttgttattttatgatctgggttgaattacttaagaataccttcgccttcaactaacgaaccttattcttcagatgggtctgcagcttggtacttctgagcacgagcatttgtatgaatgaattcttcatcg

SEQ ID NO: 66092 - DNA, 412 bp, Zea mays
tgcattcaaatactctgggccgtttgccgtgctgcagctagtctgatcagtcgcctataaactggatttgcctgcatcctcaagcgtgcatcctatttttcatgtttcattgttgaagaaagcagtaccagctaaacatcaggtgagctctacactgcatgacgcgtctgtccaactccagtttcctgtacatgtacttgatcggcgctctatcactcggggcggtgcttccagcgatcaagtcctcgtccgctggtccgacttcgatgatgttttgtctacctgggaagactacgatgctcttcgtcaacagtttcctcgtgcagccgcttatgggcaagcggcatcccaaggagaggggaatgttagcttgtccaatgctacagatgctcatgggccagaccaaatacac

SEQ ID NO: 66093 - DNA, 352 bp, Zea mays
  unsure (1)..(352): unsure at all n locations
agcttctgcaggaaagagtcagcccctatctattaaccggggacatgcccatcatgcagaagtagaggttgaaccangtgaactggaaattcaagaagaggagcttgttgaagatgaagtaatccgtgaagaagtccaccaaccaccagaatagagataaacataaatatagatacctataatatattactatttgtcagacctaaaaattagtttggccagtagttcgaattttactattttaggaataataataagggtcgatttgaccccatatgttgctaataaattctacatcatgctgagatctttgttcgtgcatatgtgttgagacaatatgggtatacaccct

SEQ ID NO: 66094 - DNA, 435 bp, Zea mays
  unsure (1)..(435): unsure at all n locations
tctaaagggagaacacactttgngactaacaaatgttcattttgagaaagacaaggtttgtagcgcatgtcatgcagggaagcaagttggtgttcatcatccacacaagaacatcatgacgactgacaggccactcgagctcctacacatggacctattcggcctgattgcttacataagcatcgatgggagtaagtattgtctagttattgtggatgattattctcgcttcacttgggtgttctttttgcaggaaaaatctcatacccaagaaaccttaaaggttttcttgagatgagctcaaaacgagttcggcttaaggatcaagaaaattataagcgacaacgggacggagtttaagaactctcaaattaaaggcttccttgaggaggagggcatcaagcatgagttctcttttcctacacaccacaacaa

SEQ ID NO: 66095 - DNA, 372 bp, Zea mays
agcttatacataaacctagctagtcctccttcataactggaaacgccctccagccacaggaacacttatagtactcctcatcacctacaacaacatgggtttgaaaaccctgagtacgaagtgtactttcgcaagtcttacccgactaaggaaaaatgactctcaaggatatgctggttaaataagaatcaaggaaaaggctttagcaagaatcaaattagatacttttgcagaaatagcttactaaagtgagtccttactttcagtattttaaagcccgattaaatattaatagactctagttgcatctagtctaatttcaccatctcatcaatacaacatcatttttattcataatgtttacattcttac

SEQ ID NO: 66096 - DNA, 403 bp, Zea mays
  unsure (1)..(403): unsure at all n locations
tgcgatggcatatcgggtgtgggctgtgtggcatgaactatgtgtccttgtacacaattatattgaaaataatataagtcaaaacttgcattatatatcaaatgttgctgtgtatacttgacaaaaacatatgctgttaactgtacatataacaaaaaccgtatgcacatgtcgaaagataaaatgttctgaataagggataattgtatgactgacctgctgaatcagtcgaattccccggatgctgtggctcatcaggctcgttttctaaattatcagactcggcacgtagtacctcgtcgatcaattctataaacttgtctgctatggcgtattgcttctcaataattttgtcaatgctgtcttttatggttatgcatgactngtcaaccctccagtcata

SEQ ID NO: 66097 - DNA, 445 bp, Zea mays
  unsure (1)..(445): unsure at all n locations
agcttcctncagcattcttgagtccctcaagtatccgaatgttgcaataggggccactgggagttatgaagctagtcttcggctcgtcttccttcttcatccaaatttgatgatagcctgagtaacaatccagtagactcatgagctctgaagaagttgttgcatctactaaagaatctattcttggcaatgggaactcgtcctttgggcatgccttgttgagaattgtgaaatcaatacacattctccatttaccattggccttcttcaccataacagttttggctagccattctgggtatttcacctctctgatgacaccggcactaagaagtctctttactttggtccgagcaccttcagctttgtcttcagacatcttccgaagcctttgttttcttggcctgaaggatgggtccacattgagtgaatgttcaataacatc

SEQ ID NO: 66098 - DNA, 456 bp, Zea mays
actaagcttacatgtctcgtatgattcataatcaaacgaagttaatatcccatcttaatgaagcttcttcatgtgattctcacttatatgacccaaacgacagtgccacatgtaggtaggacttaaatcattaggccgaggccttttagcactaatattacagataggtgcatcatcaagatttaaaatgaataacccattcataatggatgcaaaagccacaaacatgccattcttagagatcacacaaccattgttttcactcgcaaatgaataaccatccttcatcaaacatgaaggagacataatgtttcgactcatactaggaactagataacaattatttaactccaaaataaatcctgatgggaggtggagttgcatcgtcccgacggtcaacgcagcaactcttgcattattgcctacccggaaatcaacttctcctcttttcacgct

SEQ ID NO: 66099 - DNA, 443 bp, Zea mays
  unsure (1)..(443): unsure at all n locations
agcttatcacaagcggtgctatacgcagcaatggatacngttagtatgttggaggaggtcttaccatgaatcacgtgagcaggagcacagtccacagcgtagggcggcatgcggtggttcccccactccggcaagggattgccgatgcccaggtctccatcctccccatgccatcaccgcaaatacaacccagaacccaaagcgagccgcactggccatacgcccgaccctggcgagggtgcctccaggattcacccgcggcggcggcaactctccctttctctcggtgtgcggcgaagctaggcgatggcgcgctcggctatggcttgggtaccgaggaaaggcatangtcttataggaggcgggtctggggttggttgcgctcggtctgcggaagtcgcgcgcgtgcggagttctcggccacggtcgattcggtcagcggg

SEQ ID NO: 66100 - DNA, 448 bp, Zea mays
  unsure (1)..(448): unsure at all n locations
ntgatacacggattaaacatcgccatatcactgggtgtctagagactgatggtgtatggagattctctggtagtcatcagtcagataaacaaggaatgggattgttcaagtgattcaatgggaaaatactgcgccgtcgtccgaaagctagaagataaattcgagggtctggagtttcatcatataaaaagagatcggaacacggcggccgatgtactgtccaagctcggatccggtcggactcaggtcccgcccgggatctttgtgcaagaaattctccagtcgagcatctcgacggatcaaatagaagagtgcaacatcatagatcaacccgagtcagactctgatgactggagacaaccgattattaagtatattaagaatgaagaagaaccagatgacaagaactcggcagagcgcattgncagacaatcagctcactatacac

SEQ ID NO: 66101 - DNA, 418 bp, Zea mays
  unsure (1)..(418): unsure at all n locations
agctnggtcattntattgctaaatgtccattatctagtgatagtgacaggggcgacgacnagaaaggaaggaggaaagaaaagaagaagttctacaagaagaaggcggcgatgcccacgtgtgtcaggaatgggactccaatgagagctccaccgactcctccgacgaggacgccgccaacatcgccatcaccaaaggcctcctcttccccaacgtcggccacaagtgcctcatggcaaaggagggcaaaacgaagaaggtaaaatctagagcctccactaaatatacaacatctagtgatgagggtagctctagtgatgatgaagataatttgcttgccctttttgctaaccttaacatgcaacanaaagaaaaattaaatgaattgataggagctattcatgagaaggatgaactc

SEQ ID NO: 66102 - DNA, 387 bp, Zea mays
  unsure (1)..(387): unsure at all n locations
ngaaggactgcttcngcaggagagcttccgaacgtgatgtctcgttctgtccacggagtcgctttatccgagcgcaagttacttatcgcataaagggacgagtgaggtatccgtatcccggaggcgtaggagtccctcggctcggtcagccttggctgcttacgtgtacctcgtcgtttccaggatccgctttccgaagtagtcaagaagcacgaaagaaatcctgctaaaaagagatcctttttcgaggaaaaattcgacgcagagggggtctccccccttttagcccccgagggagggtcgggctttgccgaggctatgccgacccttccttgacaactaaacnttgcgtaggtgcgaggtatatgaacaactttaatacatctt

SEQ ID NO: 66103 - DNA, 324 bp, Zea mays
  unsure (1)..(324): unsure at all n locations
agctngagcaaggctcacggtcttaccaggaagctacctgtggcttgaatcgaacggagggggactggagaggggttggccactgcggtggttcttggtcggcactggcgggctgcggggaggtcgccggaggcaatggctggctcgggcgagtctggcgcaatacggaggaggtaacggggaaggcaaccgagcgccggggtgggttntataagcgcggacgcggccggggcgccggctcaaccgtttggcgcgacgcgggcacgcggggcgcgcgcgcgggcgtgctctggcgagctcatagcgcgtcgaacacgtggcgcg

SEQ ID NO: 66104 - DNA, 449 bp, Zea mays
tgtgaagattcttcatcccaacatgggctagttggcgatgctcaagccaacccatattagtcttaacaattaagcaagtgtcaagttcagctctattgaaatcaattaattatagctgaccctctaacactcccttaaatgctactgaatcatcacttcttctaaagacagtaacacctacatcagtgaatagacagttgtaacccatattgcataattgagaaatagaaaacaaattgtaatctaatgaatctacaaggaaaacattggaaatagaatggtcaggtgatatagcaattttaccaagtcctttgaccaaaccttgatttccatccccgaatgcgatagcgatttggggatcatggtttttctcataggaggagaacattcttttctccccattcatgtggtttgtgcacccgctgtcaattatccaacttgagcccccg

SEQ ID NO: 66105 - DNA, 385 bp, Zea mays
  unsure (1)..(385): unsure at all n locations
agctngaggctgtgtatagattaccgcccttttattgcggtaactatcaagaacaagtatcctttgcctcgtattgatgttctttttgaccagttggtcggggccaaggtgttttccaagatagaccttcgctctggctaccatcagatcaaaatacgagcaagtgatattccgaagacggcattctcaaccagatatgggctatatgaattcttggtgatgtcattcgggctgacaaatgcaccagcatattacatgtatctgatgaattatgttttcatgccagaattggacaagttcgtggtgggtttcatcgatgacattctggtgtactcaaagaacgaagaagaacatgccgggcatttgcatgtagtgcttcaacgtc

SEQ ID NO: 66106 - DNA, 439 bp, Zea mays
  unsure (1)..(439): unsure at all n locations
tctanagggagaancacatttaggactaacaaatgttcattntgagaaagacaggatttgtagcgcatgccaagcaggaaagcaagttggtgccaatcatccacacaagaacatcatgacgaccgacaggccgcttgagctactccacatggatctattcagcccgattgcttacataagcatcggcgggagtaagtattgtcttgtaatagtggatgattattctcgcttcacttgggtgttctttttgcaggaaaaatctcaaacccaagaaaccttaaagggattcttgagacgggctcaaaatgagttcggcttaaggatcgagaaaatcagaagcgacaacgggacggagttcaagaactctcaaatcaaaggcttccttgaggaagagggcatcaagcatgagttctcttcttcctacacgccacaacaaaat

SEQ ID NO: 66107 - DNA, 452 bp, Zea mays
ggatcttaagcacctgggctgcaagctttggacgctccatttattactatatatatcaacttataccattcaatggcatatttcaataatccgacatcaaggtgacaaaaatgacattaatgtgatattacaatatatcaaaatatataagcagtcaactgtagtaaaaatactgtcttacctaaaataattccctgagcacctctgtagtaagaactagttattgtcctaaacctctcctggccagctgcaaagcattggaagtatttattatttatttatttttaaggaaagtggtaggagctctgccttacattgaagtaaggggaaaaaagagacgaaggttttgccttgatggcaggcacgcctcaacaagctacagtgcaaccacgagctcttgagagatccaacccacaaataaacataaacaaaaagcacacgatggactccaa

SEQ ID NO: 66108 - DNA, 429 bp, Zea mays
  unsure (1)..(429): unsure at all n locations
tgtgaacaatataagtatagaagagagaatgctgcttcttctgatcagccgaagcccatgcttctatgtgaagacatagcagaccataaggtattgctgggatcccaattatctgaagagcaagagaaaaccttgataaggtttttattcaacaacaaagatgtttttgcatggtcagccaatgatctctgtggtgtcaacagggacgtcattgaacattcactcaatgttgatccatccttccaacccaggaaacaaaagcttcaaaaaatatctgacaataaagccgaaggtgctcggaacgaagtaaaaagacttctcagtgctggtgtcatcagagaagtgaaatacctagaatggctagccaacactgttatggtaaaaaaggccaatggcanatggagaatgtgcattgatntactgatctga

SEQ ID NO: 66109 - DNA, 423 bp, Zea mays
  unsure (1)..(423): unsure at all n locations
cagcttacacaacaacttgatctattcattgtttatgtgagatctaaccctaacattgtgtaattttatgaccttaatggtcttgctattattatgattgaaattgagatgaataaaatattttggaacgatttattgtattgttgaactagtcttcattttgcctgttgttgagcgagccttgatttttgcatgttgcaattatgaagatagggaatgattagtcaaatcatagaatggtttgttatattgtacgagatatttttgcaagcatggaagataagaatattttatagtattttcaagaattgaaaggtatttaaaaaagctaccttcattacctcctatcaatgcgaagtggatgntgngtatntctgttctatcttttttttgtcttctaataacatcctgagttatcgggga

SEQ ID NO: 66110 - DNA, 417 bp, Zea mays
tcagacaaaatcttatgccaatgtttaggattatcagattccttcttctttatcaaattaatgaacgtcctattactagactcggcctgtccattggcctgagcataatatggagacgaattaagtagcttaattctgtataattcagcaaattcacgtacctcctttgacataaaagaagtaccttgatctgtagtcaaggtctggggaatgccgaatctatgaataatatgctcagttatgaactcaattacctccttgtgcgtcatgttctttagagcaacggcttcagtccatttggtgaaatagtcagtggcaactaacacaaaccgatgcccctttgatgattcaggatgaatttctccaataaagtctaatccccatcctctgaatggccaacgctcgatgataggatgt

SEQ ID NO: 66111 - DNA, 376 bp, Zea mays
tgcaagcttgtcaccacaaccacttctttctacctctacgtcctcttcattgggggaagggtggaatcatcttccattgtcacacccggttttaaggaacaaagccgggtgcatctcatacatgcgcccagaagacaacatataccataaccgagtgtatagagataaatgtcgtaaaacatcagagtatttattacatagcggaagacttattacaaaataaaataataattattaaacgaactaaggatcgtcggcgccattgtcgactgagaaacgccacctagatcagatcatactcctcgccttgtggctcctcctgaaccacctgctcttcttctgtggggggtgtgagacaagcagagtgagctcacat

SEQ ID NO: 66112 - DNA, 282 bp, Zea mays
actttgcgacgcatgaaatatttatgtacatatccgttttgagccttccgcgaataaacaccttctcttcttttcatgcttcgtaaagaagagctcttatgcttcgtgaaaaatcctccaatcgtcgcaaaaacattaattcttcgtcacaatgagttttttccttcatatcagagtgcttcgaaaatatactccaacgtggccaaaacatttatgcttcgtcaacaatagagttttccttccatcagagctgatgaagttgtatttctttaacacttattt

SEQ ID NO: 66113 - DNA, 421 bp, Zea mays
agcttacctgactccttctttccaccggctctttattggagacccactctgcgtatctgcaaggtctaataaaattagcttctagcagccagtggatttcgtccttgattcgtgggagaagatctggacgaaatgttctatctttctgcttgaaaggtctgaaaccaggcttaataggcagccgatgctcgacaatttctcggcttagtccaggcatttcagtgtaattccaagcaaaacaatctgaatattccttcaatagaccgatcatctcatttctagaatcggtctccagggtcttgtttacaaaagtcggccttggagttttaccatctcctatgtcaatctcctccaaaggatcggctgatgtaaacccctgtcctagtttatcaagatctctgaattcctctatcatgtcccc

SEQ ID NO: 66114 - DNA, 434 bp, Zea mays
tctaaagggagaacacgtgatagggttgactatcgtacaattcataaaagatagaccttgtgcagcttgtcaagcaggtaaacaggtgggaggagcgcatcacagcaagaatgtgatgaccacttcaagacccctggagctgctgcatatggacctcttcggacccgtcgcctatctgagcatagggggaagtaagtatggtctagttattgttgatgacttttcccgcttcacttgggtgttctttttgcaggataagtctgaaacccaagggaccctcaagcgcttcctaaggagagctcaaaatgagtttgagctcaaggtgaagaagataaggagcgacaacgggtccgagttcaagaatcttcaagtggaggagttccttgaggaggaagggatcaagcacgagttcttcgctccctacacaccacagc

SEQ ID NO: 66115 - DNA, 350 bp, Zea mays
tgcaagcttggcatggctgcattttcttctgtttacctcccaaaatgggcatcaccaaatattggaggaattattgggttctggttgtagatgattgtcttgtaatctccctcaaccccagtaaatttgtccatgagtaacctgtgaacggtcatattctgggctacaaagcacaccccaccaacatggtcatgaagatcacgactggcacaagcattcacaaccaagataacagggtcatcatccctcttggaaccatgtgttttcaactcaaatcaaactttcttctcttctctggctatagcgctcatagacttttgagctccaatcttaatgtcatcatgcaacat

SEQ ID NO: 66116 - DNA, 436 bp, Zea mays
  unsure (1)..(436): unsure at all n locations
tctaaagggagagcacantttgngactaacaaatgttcattttgataaagacagggtttgtagcgcatgtcaagcagggaagcaagttggtgttcatcatccacacaagaacatcatgacggttgacaggccacttgagctactccacatggatctattcggcccgattgcttacataagcatcggcgggagtaagtactgtctagttattatggatgattattctcgcttcacttgggtgttctttttgcaggaaaaatcacaaacccaagagaccttaaagggattcttgagacgggctcaaaatgagttcggattgagaatcaaaaagataagaagcgacaacgggacggagttcaagaactctcatattgaggctntcttaaggacgagggcatcaagcatgagttatcttctccctacacaccacaacaaa

SEQ ID NO: 66117 - DNA, 335 bp, Zea mays
  unsure (1)..(335): unsure at all n locations
tctttaatgctctttctatatgaaacattcacctatactttacaggaccaccgaccttagcctcatatggaagatgtataaagagatgctgcatatgattgaagaaacccggcggaaatatttttttcaatttgcacaaaagcaccggtgcctctttntncagnaagtccatcacatctcttctgatttctttagcacacaactgtctgtagaaatagctaacttcagctaacgttttccacacagcttcggaaatgtacccacgaaacattacaggcatgaggctctccataattatgtggaagtaatggctcttcagtccattcatcttcatt

SEQ ID NO: 66118 - DNA, 430 bp, Zea mays
  unsure (1)..(430): unsure at all n locations
agcttctaaagggagagcaatttacgacttttttatgttcattntgagaaaaacagggtttgtagtgcatgccaagcaagaaagcaagttggtgctcatcatccacacaagaacatcatgatgactgacaggccgctcgagctactccacatggatctattcggtccgatcgcttacataagcatcgatgggagtaagtattggctagttattatggatgattattctcgcttcacttgggtattctttttgcaggaaaaatcacaaacccaagagaccttaaaggggttcttaagacgagctcaaaacgagttcggattgaggatcaaaaagataagaagcgataatgggacggagttcaagaattcacaaattgaaggctttcttgaggatgagggcatcaagcatgagttctcttctctctacacac

SEQ ID NO: 66119 - DNA, 445 bp, Zea mays
tgtacttcgcctaacatggcctgattggtgattggcgctccgtttcaatgcgtctgctgacgcactaactgtcaatccgccttcggtcacgccaactatccgtcctcgcggctgactgacccgtggccccacgcctgatggtttcgtcgggccacgcgcgaggcgcctcgttgctgctgcattggtttaaaatattaccttttgtcttccgcagcggtcccaaggaggcgcactacatgcgcgcacgacggttcgctcttttcgcacctgaagtctggcacacaaactatatgacttgtggacccgggccaccatgtcatagactgtgtttgtcttctgcagcggcccgaaagaggcgcactacaggcgcgtgcggcggttcgctctacagtcgcgcgcggcggttcgctcctttcgcacctaaagtccggcacacaaaccatat

SEQ ID NO: 66120 - DNA, 431 bp, Zea mays
  unsure (1)..(431): unsure at all n locations
catgcaagcttggacaacatttacagtaatatttatatattctatatatagagatctagcaattcatttaattgctataaaatagttaatatgtcaagaaatttaaatatgtcattccaaaatgaatgaagtgtatgaatgtgtgcaccagtaatgaacaaattaatctatatattgaaagtggagagctgtagctgattcaggatcttggattctaaatatatttcatattatgtatatttgnatcttagactgaaaaaatcccaataatgtaattgtcagagagaaaattctccggccgggtggcggaacgcacccgccctatatcctaagatgaggaggggcctaagcgtttcgcctgctagatggaatcgtgaagaacacaagaacacacaatggtctatagtggttcgggccgcctgagcgtaata

SEQ ID NO: 66121 - DNA, 455 bp, Zea mays
  unsure (1)..(455): unsure at all n locations
gacacaagaaactaagcttctaagggagaacacgtgataggtgtgactaacgtacttttcgaataagatagaccttgtgcagctcgtcaggcaggtaaacaggtgggaggagcgcatcacagcaagaatgtgatgaccacatcaagacccctcgagctgctacatatggacctcttcggacccgtcgcctatctaagcataggaggaagtaagtatggcttagttattgttgatgacttttcccgcttcacttgggtgttctttntgcaggataagtctgaaacccaagggaccctcaagcgcttcctcaggagagctcataatgagtttgagctcaacgtgaagaagaaaggagcgacaacgggtccgagttcaagaaccttcaagtggaggagttccttgaggaggaanggatcaagcacgagtnctccggttcctacacaccacagcaaaat

SEQ ID NO: 66122 - DNA, 427 bp, Zea mays
  unsure (1)..(427): unsure at all n locations
agcttaaccctgagaagtgtgtcttcggtgtgccccgaggcatgctctctaggttcatcgtctccgagcgaggcatcgaagccaacccggagaagatngcggccatcaccagcatgggacccatcaaggacttaaaaggggtacagagggtcatgggatgcctcgcggccctgagccacttcatctcacgcctcggcgaaagaggtctgcctctgtaccgcctcttaaggaaggccgaatgtttcgcttggacccccgaggccgaagaagccctcggcaacctgaaggtgctccttacaaaggcgcctgtcttggtgccgccggcggacggagaagccctcttggtctacgtcgccgcgaccactcaggtggtcaacgccgcgattgtggtcgaaaggcaagaggaagggcatacattgctcgttca

SEQ ID NO: 66123 - DNA, 431 bp, Zea mays
tctaaagggagaacacgtggtaggattaactaatgtgctattcgaaaaagatagaccttgtgcagcttgtcaggcaggtaaacaagtgggaggagcacatcacagcaagaatgtgatgaccacatcaagacccctggagctgctacatatggacctcttcggacccgtcgcctatctgagcataggagggagtaagtatggtctagttattgttgatgacttttcccgcttcacttgggtgttctttttgcaggataagtctgaaacccaagggaccctcaagcgcttcctcaggagagctcaaaatgagtttgagctcaaggtgaagaagataaggagcgacaacgggtccgagttcaagaaccttcaagtggaggagtttctcgaggaggaagggatcaagcacgagttcttcgctccctacacaccac

SEQ ID NO: 66124 - DNA, 430 bp, Zea mays
agcttcgtatggaaattcttcttttcttgctcaaagctttccgacttcaggagttcactgtttaatttggcaatttcggcttgggcctccaccaatgaaccctccattgtttggagaacaaaatctttcttttcaatagcagcttcatggtctttgatcttgctctccaagccctcaattataacctcatttttcttatcttcgaggtcctattacatcctcaaggctttacttagtagcatactctgtgcaaaataaccttcatccgcaatcaccttcatcgtaaaacaatgaaaagccgaaggaaaaattttaccttgaaattagaatagaataaactgccgacgatatgctgtcgtcggtagcgactgatgtcagcttcaagcttcgagaaactaacaccctttgacagagtgctgataaccttcac

SEQ ID NO: 66125 - DNA, 132 bp, Zea mays
  unsure (1)..(132): unsure at all n locations
tggcttcgcccacccttcgtccatatttgctntataaatctgtttcctatgcttcgagctaggctggggatatcaatcaaatttgctggtgataaactgaaatttggtctattaacaatctttccatgtgtg

SEQ ID NO: 66126 - DNA, 405 bp, Zea mays
agctttgcaagggaaaggagatgatatgaatctttggaggcgcttgagcgggttaattcaattcttattaactcaagctatcaatcttacaatggtttatatctctaagattgacacaaagttattttaaattattatatctaaaactcatattatctcgagcaagatattgatgttgtagggaataaagtattatcctgtgtagaaaatcaaagcctacaacatggagtaaagctaaaggatggtaacacttatgtctttaagtgcaagtatcttcaaatatcatttctcttgtgtcctgcgcagtcacatagaaaaggaagtacttaagaatattgttaattatgtcacattctttagaaaagttctctcataggtagattgttattatcatttcatattatg

SEQ ID NO: 66127 - DNA, 448 bp, Zea mays
ggatcgcattctggggcaactcgccaccatgaatcaccgtctggacactcatgcgcagcgtatcactctcctggagcaggaacccccccccactcagacatgcgtcgcggggacagcctctgccctcgatgacccttcctacaggtcttgcactcgagagccatgttggtgcagggcaaactgcatctgggggcagcgacggtggatatggaagtggtcgccggggcattcttggtggacaccgtgatcgccacgacgaaggaggaccacgtaggcccaatttttcttttccccattatgatggtgattctgatcccttgccatggctgaataaatgtgatacatattttcgcggcatgggagttcatcaagacgagagggtctggcaagcatcgcttcacttggaaggtgtggctgcggaatggttctatgcctcggagcgtgatct

SEQ ID NO: 66128 - DNA, 353 bp, Zea mays
  unsure (1)..(353): unsure at all n locations
ggcggctgggaacttactattcgttgggtctacaacaatcttggatgggctcctaacgagctaatttgcactatttttgtttgtagttttcctgtgattctagacccgtgtttgaaattttgggtcttttttgtttaaaccgtctatctccttcacttggagtcatttatcattcaattagtgaagcataaactcactcatttaatttcctaatattaatcaaattagcatatttcttcctttagaaatagaaagaaagccctttttctttttaacaaaattctttctatttttacctgctcaaggtattcatcattcttgtacaactattgcagtanaatgacaacagactc

SEQ ID NO: 66129 - DNA, 432 bp, Zea mays
  unsure (1)..(432): unsure at all n locations
ggaccttaaaactcaagcttacaatctttattgtagctcatatagtgtttttcaatgtatataattggcctaagccatgattntatgtatttcatggtcttttaccccttttctttatctctactgaaatagcttgattagggttggtgttaaggattcaacattttcccccatttgaaaatcttgtttgttttgaacatgatccttttagatataaacttactgtatcttttattctcaagttaatntgatgcttcttgctcaatttgcttacatgaaatgatggttcttgggttagcactgagaaaaccctaagtgacactggggtgtcacaagtggcacctaaaccctataagtgccaaaaaccctaaacaaaaccctagaaaaccctgcattgaaaccctaggggggtatgtgtatatttggacactt

SEQ ID NO: 66130 - DNA, 426 bp, Zea mays
  unsure (1)..(426): unsure at all n locations
agcttctcacaattttcttttatattggtgtgagaggtcttgagctcctcaaaagacacttggatgtttttatacaattccttcaaggtcttaaatttttctttttctttgtgcatgtagtcatcggcctcacctaacattctaacaagatcatcatatgaatagccatcatcatcaacatcatcatcatcatttatatcatttaaatcggtgatgattnttaccttagcatctccccttgccatgagacaatggggggatgagaagagtgagggagcttccttgatggcaattccggcattaagcttggatgaggtgtcatcatcatcatcatccgagctatcatccgagtcccattcaactaggtaggctttgccatctttcttattggttgtagaattctttttcttcttatcaccttcatct

SEQ ID NO: 66131 - DNA, 441 bp, Zea mays
  unsure (1)..(441): unsure at all n locations
ngaagctggactctgcgctatgacgaaggacgatcttgctgatagccttgtatataatagtctgaaggtgtgagaattgtatatttggaaatttacaatttttgaatcattcttttattctgatagtaattctttttcatatagggtttaatactaagcaacgctttgagagcgcaaaagaatgctgaagacgaaagttataatattgctttcaacaacctacgagcagaggttatcaagctaaggaacgaagctttggaaaaagataaaattctgcttacattagtagataaaataaaggaagacgaagctacctctaaggctcaagctgaagcccaaaaacgcgaaattcaggatcttcagaaacaaatggccagggctaaagaagaacgcatactagaagaaacanaatgagaactaagtgatcaatgggcaaatcat

SEQ ID NO: 66132 - DNA, 371 bp, Zea mays
  unsure (1)..(371): unsure at all n locations
agcttaggggtaaagtataatataacccttagttaaacttgaatcacatttatacccctgggataccagaaaccctaattggaaccctggaactaaaccctaggggcttatgtgcaaaagtgatgaacttttgggctaaagtgcaaaaaccaagccaaataagcattttaagtcatttggttcaccaatatgtggacttgaaagcaaaaccctaagttttggacttaaatgcaaaatggacctcatttgagttctataccaagtctgaaatttagtgttaaaggcttcactttggggcttngtaactttcaaagcataggggtttttgcctacgtcaccacatcaaagttgaagaccaaacataggagaac

SEQ ID NO: 66133 - DNA, 430 bp, Zea mays
  unsure (1)..(430): unsure at all n locations
ctataaaactaagctggtccatactcctatgctcctactagttttgcggtgttccactcgacagtccaacccggtggcaagatggacggtcaagtcactccagcaaccatgtcctccaaagaacctgtaaaaatatgccacaagcaaggctgagtatactaatactcagctagacttacccggtgtgaggagtctactcctctacctctagacatgcatctgnttggctgtggggtttggttgccaaaagcactagctgagtttctgaatcaagttttaactctgtcaaatttaagtgtgactctcttaatgctaaatatgtactaactactcatacatagtagcaaacatttttagcaatcaacatcttgtatcaactcatcatatttccacttgttactcaatgtagcagcatggatcaagcagtctc

SEQ ID NO: 66134 - DNA, 358 bp, Zea mays
  unsure (1)..(358): unsure at all n locations
ggctgcaactagcactttcggtgcttatanggttctgaggagaggattaaaagtaaggataaaaatggacggttaattctacactataaaatgtaaggatcaaattgagttaggatcgggtcctatttctatttatttttaaactaaaaataatttagggtcctaacaatttgtgaagaaacatttggatcataatccattaccaactctaattaaaagggcttctatttaattttgattaggaagagatttaattctgttcaatccccttctaaccgaatagggaaaagcgcacgctataagaagagcgacagttacatttataataacaatgttcgccacaacacaacttgtacgt

SEQ ID NO: 66135 - DNA, 441 bp, Zea mays
  unsure (1)..(441): unsure at all n locations
ggcacatatgctagatatgaagntgngagagacacaatgcttccaaatgatgttaaggtatattgattatacctttctagcatgtgtgcttcttggaataccacatggaaatattaattcatcacttgatatccagccttagcacttgggtagctataatagaatacattggaaacctttgtaagatcaacattataggatagtgttggggacttgttctcaaatgctatgaattaagaacaaggcaacataaaatgttaaatattaatgtccttcgtccgctgaaacattatttccccaaggatttaatgaacttctgacgaaggttataatgacacaattacgaaagttatatcttcgtaattgaactctcatagattaatataaataacacgagacataaagcatttaagacaagtaattagaagtaacaacatcttt

SEQ ID NO: 66136 - DNA, 379 bp, Zea mays
agcttgtccgagcggcgcggcgaagaaaggtgatggatagagctgacgtgcgggacccacgtggaaacaagactgcgttggcgtgctgtgcgcggtgagtggctgacccgccgggtccacagtcagggagaaacccgcgtaacgtgcgcgtgggagggatgccctgacacgccggccccacccgtcggtggcggggtgaaagagctgggctgcgcggtatggaattagaagtgggccgaaaacaggtttgctggcccacgtaagctcttttcccccttttctatttatatttcttttggttttactatttccttggtttcttttctttttcaaatccaaacttcattccaaattcaaactttgtggcactttatatact

SEQ ID NO: 66137 - DNA, 450 bp, Zea mays
gacctataaaactcagcttgttatatagaaatcgaggtgtattcacaattactttgtctatgctcttgacacactgaatcatgagcactaggttttatcttgataattgatgttgataattcatgtgatgatttcaactgcctattggcaatactagctgctccggagtatatttaccatcaatgtagcaactaggacacggtatacataaaattttcacgtacatatatcaacacaaccatatgttttatgtataccatggattctgagaacgcaaagctccgaagagcactcgctcatttaatcaaagtagtggagcagcgttgtgccgacatcgtcgatgtcgtccacggtgccttccaaccagttagcggaccagtcctcaatgaaatgaatcgtgctttatttcagatcgaggacctcgccaaggaccttgatcaccttgcactg

SEQ ID NO: 66138 - DNA, 377 bp, Zea mays
agcttctaaagggagaacacactttatgattaacaaatgttcattttgagaaagacaggatttgtagcgcatgccacgcagggaagcaagatggagcccatcattcacacaagaacatcatgacgaccgacaggccgcttgagctactccacatggatctattcggcccgattgcttacataagcatcggcgggagaaagtattgtcttgtaatagaggatgaatattttctcttcacttgggtgttctttttgtaggaaaaatcccatacccaagagaccttaaagggattcttgagacgggctcaaaatgagttcggcttaaggatcaagaaaattagaagcgacaacgggacggagttcaagaactctcaaatt

SEQ ID NO: 66139 - DNA, 428 bp, Zea mays
tgataatcgtgcataattaagctaaaacggatctatcttaatgggattgcttgaattgtccatagtgaagcatactaagggctacaatgtgatgatataacttataatgagcaaagttgtgcgtgaaagtattgtattaaagaaaaacatcattttgctactgtatcgtcctttgttccgtttgtaatgcctctcaggctaataccagttgcaactgttccatgaactgcaggtacgagcagcttgaaatggaaggcaagttattgaaggtatggatattttggtttcatttttttgggttatttcataaggcacttgcattgtgaatgttgtgagtagcatgatttttttaaaaaaagatccattaaaaccagtgtagatcatagataaagatgggcgtgcattgctttcatataactcaaactatt

SEQ ID NO: 66140 - DNA, 320 bp, Zea mays
acttgtgttacagaaagaaaatttatctctgttgatttttgaactcgcatgtggatgaaatattatcgattgggaatgacattcctatgctggagtccgttaaggcttcactgaaaaagagcttttctatgaaagacctaagggaagcagcatatatattgggtataaagatctatataaatatggtctcaaaagcccatatgaattagtcaatatatgtacattcgacaaggtttgaaacggttcaacatggaacagtctacaaaagggtgtttaactatgtcacatggtattcaccttatcctgatgcaatgtctgtg

SEQ ID NO: 66141 - DNA, 431 bp, Zea mays
  unsure (1)..(431): unsure at all n locations
actcaagctngagntattttattacagaccagagcttatagtgagtgtttagtagnacaaaccaagggaggcacaaactcctccagataagctataagcataagatcctaaggggaggaccgagttctcccgcacttcagtcttgtttatcttctttgggaaccaccttggcacataagcagctaaagtctactacttcctcacctaaaaacaacgaagggataaacccttagtatggaattactcagcaagtcttacccgactaaagaaaagacgctcaagggtatgctggttatatgggagtcaaggtaaggcttctcaataatcaaggactcttgtttgcagaaatgcttactaaagtggatccttataaatccaattttatttgtcgagttaagtaaaatcacctgcactagagttctttctaccta

SEQ ID NO: 66142 - DNA, 349 bp, Zea mays
gctgataggcggaaattttttacagatatctgggaaaatggcagccgagggatggcccatgaaataatgaagaagagcgaaaaagatattcatgacgctcgagaagcaacaaaagcggctgaaaaagctgcggaacttgaaagacggataggtattacttaatggcttttaactttgttgtttatttttgcgacttcgaactaatttataccttctaccgcagctgaactatctcctcccccagagccattcgacccactggccgacccagagacaaagaaggcaatagaaattattaatatggccgaagctattgtagacgaagttgtcaccaaattattaaccgaag

SEQ ID NO: 66143 - DNA, 461 bp, Zea mays
  unsure (1)..(461): unsure at all n locations
tataaaactcaagcttaaagtaccctnggttggccttgctggtgaagcaatctatcagtctgctggaccaacatgaagttgtcttggatgaaacggcctttaataaaggcactctgccttagagacactagatcatgcagtcgctgggacaatctgttggccatcaacttggtgacaagcttagcaatgctatgtaccaaactgataggtcgaaagtcttttacctcctcagccccctccttcttagggataagggtaacaaatgtagtgttaagtctcccaaactgctgaaattttctgcaccaaattgcagcaataacagccatcacatcccttttgataattggccaacaaaccttataaaatctacctgtgtacccatcaagccctgnagccttgtctgaaggaagctgcattatggattccagaacctcattntcaccaatctgcgcatctaaatc

SEQ ID NO: 66144 - DNA, 432 bp, Zea mays
cctgaggcatgcaagcttgctgaaatagcataaaacagtagatattttacatgtgttatgacagaagcaaattagatgcatacttttatcatagaaccaaaatcagccacaggttatgcaaaactatatcgatgaagtcagcagcctttatattttacgtccatatgtgattcattactatatgtcgatctttttgctctcactctactcaatttaacctgaggaaacacaacttgaataaacgagcaatcaagtatatgagaactattatggttctctaaattttatgataaaacaaacaaagaaccttattttcttgccaatctttctgtaattacaccatccctgcagatagaaatgcctctctccaagcaatcttcagctgcctgatacagagaaataaataaatattatttgtgcatgttctgatct

SEQ ID NO: 66145 - DNA, 447 bp, Zea mays
aactcaagcttgattgagagtcttgactctgcccgtcgcgcttctaattttcttgatccttaagccgaactcgatttgagcccatctcaagaatccctttagggtttctttggtataagatatttcttgcaaaaagaacacccaagtgaagcgagaataatcatccacaataactagacagtacttactcccgtcgatgcttatatcagctatcgggccgaataggtccatgtgtaagagctcgagtggcctgtcagtcgtcatgatgttcttgtgtggatgatgaacaccaacttgctttcctgcccgacatgcgctataaatcatgtctttctcataatgaacatatgttattcccaaaatgcgttcttcctttagaagcttgtgaagagtcttcatttcaacatgtgctaatcggcgatgccagagccagcccatgttattctt

SEQ ID NO: 66146 - DNA, 373 bp, Zea mays
ccttcctcagggactattcttgatgatgtctatgttgagtaaccgcccggctttgaagatagtgagtaccctaatcatgtttacaaactctctaaggggctttatgggctcaagcaagccccaagagcatggtatgaatgcctaggagattttcttatcgctaatggcttcaaagtcagaaaagccgatcctactctctttactaaaactattgcaaatgatttgtttgtatgccaaatttatgttgatgatatcatatttgggtctactaacaaatctacttgtgaagagtttagtaggataatggttcaaaaattcgagatgtctatgatgggggagttgaagtatttcttaggaattcaagtcaagcaac

SEQ ID NO: 66147 - DNA, 391 bp, Zea mays
  unsure (1)..(391): unsure at all n locations
agcacctgagctgcagcttggaaatcttattccacaagattagtcggtgatgccagagccaacccatgttagtcttagaaattaagcagtgtctagttcaactntgttattattaaaatcaactaaatatagctgaccatctaacactcccttaaatgcttttgaatcatcactttttctaaagacagtaacacctacatcagtgaatagacagttgtagctgattttgcataattgagaaacagaaagcaaattgtaatataacaaatctacgagaaaaaacattagaaatggaatggttagaagatatagccgatttacccaaccatttgaccaaaccttgatttccatccccgaatgtaatagctctttgcatcggggatccgcattt

SEQ ID NO: 66148 - DNA, 425 bp, Zea mays
  unsure (1)..(425): unsure at all n locations
actaagcttcttcttcattctgatgaanaccaagccctttgatcacttcatcaaatctaatgttccaactccgagatgcttgcttcaacccataaatggatttctgaagtttgcatatctttccagcattgatcggatcgacaaaaccctcgggctgtatcatatacacgtcctcatctaggtttccattaaggaaagctgttttgacatccatctgccaaatctcataatcgaaatatgcggcaatagctagaatgatccgaatagatttaagcatcgctactggcgagaatgtctcgtcatagtcaactccttgaacttgtcgaaaaccctttgcaacaagtcgagccttatagatgtgaacatttccatccatgtctttcttcttcttatagatccatttgcattctataggtctaacacca

SEQ ID NO: 66149 - DNA, 462 bp, Zea mays
  unsure (1)..(462): unsure at all n locations
gacccggaccttanagtgacctgcggcatgcaagctacatctttcttctttactacaaggttggacatccccaaggtgaagtacttgggcgaatgaaacccttgtctaacagttcttgcaattccttcttcaattctgccaattctgcgggtggcatccggtaaggcattttggaaataggtgtcgttcccggttgcaactcgatggagaattcaatatctcggtctggtggcattcctggtaattcattaagaaaaacatctgcatactcacagaccactggaatcttcttcaaggttaactatatcatagcaaaagcacatgatcgagtagaatcttggctgggcagaaataaggcgaaactcccatagattggggatttaattncaatgatgcagctggctatatctagcaccactttgtggcgggtcattcaattggcttcaataataatgtncacat

SEQ ID NO: 66150 - DNA, 437 bp, Zea mays
  unsure (1)..(437): unsure at all n locations
tctntcggatatggctgtggaagagacagcttctactgtttataagtcatggtcgcagtgcctgacaaaggataaaaggttgctaatgctgcttcacaagataaggatttcgaccttctgaacctgatgggtcaagaattgtccgaggccgagaaaaaggagctaaaggaatatggaatatcttgtggctaccagctatgatcaatgatttttggtggaattgacgaagaagccttgggatgtattcgtgatcgtgctggggcaaagataattggcactctatcaaagagtgtcggtttcctgaagcttgagtctgatattagcggctaccggtggcaacatatcgtcggcagtctcttttactccaatttcaaagtaaaattcttttgcctagatttctgttattcttgtgatgaactaaaattctctgaaatcac

SEQ ID NO: 66151 - DNA, 283 bp, Zea mays
ttgatacattcattttatccccatccgaccggggaccgcactagtggtgtcttcgcagcccaaccacatgttaaatccttttcctttcggacttgttcctgattcccaagcaaaacaagagtgcaccgcgtctcatggtcttaatatgatggacatgaactccagagtgttaacacctgatggttgtgttgaccagcacgagcgcgagtaatgggaccagaaattggtacttgtattgggatagatgcatcagtagtgtggatgtcttcatattctccccttc

SEQ ID NO: 66152 - DNA, 432 bp, Zea mays
cgcacttacgaccaaaccgcacccgcatgcatatcacattcattgtctcaacaacagcgggaagggcaaggtaaccaagctggtacgaattaattttgctattggttcatatcgtgatgttgttgactgtgatgatgtgcctatggatgcttgtaatattctgctatgtagaccatggcaatttgattcagattgtatgcatcatggtagatcaaatcaatattctctcatataccatgattagaaaattattttgcttcccatgtcccctgaggctattgtgcgtgatgatgttgctaaagctaccaaagctaaaactgagaacaacaagaatattaaagttgttggtaataacaaagatgggataaaattgaaaggacattgcttgcttgcaacaaaaactgatgttaatgaattatttgcttccactac

SEQ ID NO: 66153 - DNA, 411 bp, Zea mays
  unsure (1)..(411): unsure at all n locations
agcttanaaggggccatctgtagactggactgatatctgtnattataagaaaactctgccaaagatagacacttgtcccaatcctttccgtagtgtagtgcacatgcccgcaacatgtcttccaaaatctggtttaccctttccgtctggccatcaggttggggatggtatgctgagcttcgtattacctgcgtcccaagtgattcttgcagctgctcccaaaagcgtgccacgaacagtgctcctctgtcagacacaatggtcttcggaataccatgcaatcgcactatttgatcaacataaatttccgcatacttctctgtcttgtgggtggtatgcactggtaagaaatgagcagttctggacaatctatccacaataacccatatggaatcatggtgcctggaagta

SEQ ID NO: 66154 - DNA, 388 bp, Zea mays
  unsure (1)..(388): unsure at all n locations
tctccgatggcatgacggaggttgggatggctctgctattctttctaccgnggcagaggggttgagcggccgcgggctctctgttcacgggcaaacggcgactagctaactccggtgaggtgtggagggtgtgcggaatggtgtatcctaagcctgtgagggatatataagctctggcgcgggccacggcgcggttttggctctggcgctgcgcggggcgtgcgaaggcgcgcgcgagcgtgctctggcgcgggcagaatgcgtctaacacatggcagtgagtttctttcaagttcaaacgcttncagaaatcgcaaacgtgcgaatctcgccatgaatccggcgcagaccttcttctggcacctaaggctatctcacatgtgtgagt

SEQ ID NO: 66155 - DNA, 436 bp, Zea mays
agcttcacatcatctctgggtacctgcaaaacttattaagtacattctggtacccatctcatgatgggtccatcaaggttagccaataaggacttatgcacccaaatagccttaatcctagaatgtgttgaactcatcacctttcaatcacaagagtcaaatttggttctcctaagcatatttgaatgtattgacaagttaggcttaagagttttaccctttggacaaaccttgaatagatgacctttttcacggcaattgtagcaaatgtggtgcttgtcctttcaatgcatttgccttttgctttcatctttcttgatgatcatctatcttgattgtgcaaggtcttggttcttgatgtgggggcatgaaccaatttcatgatccttctccttgcattcatagcaccttctatcgcttctctttgatctttctt

SEQ ID NO: 66156 - DNA, 396 bp, Zea mays
tacacacattcttctcaatatgcataagatcaagacatttattcacacttagatcgcgccaataaggtaacctccaaaatatggagtttttcttccaaattccaaacaatgctaaattgtgtttcccgaacttattttcaatgtccttcacactctcataaaccacatgtccagacctgcgtgatggagcctttttcatttcaatactcccatcaaatgcatcaacattctttcggtatggatgatttctgcgtcacctacgatgtcccaggtatacaatttttctactggtttttagataacgactatttgtattcttttgacaaatatagcacgctttgtatccctgagtggataattctacaatgttttccacgcctttatagtcatggatgg

SEQ ID NO: 66157 - DNA, 384 bp, Zea mays
taaagccatggtaagtagcataggctaataatatgttatttgtttcaagcctagctacgggtgcataggtttcaccgaaatccaaaccttcgacttgggagtgtcccttggccacaagtcgagctttgttccttgtcaccacaccatgctcgtcttgcttgttgcggaagacccatttggttcctacaacattctgattatgacgtggaactaaatgccatacctcattcctagtgaagttgttgagctcatcttgcatcgccaccacccaatccgaatcttgaagtgcttcctctaccctgtgtgtctcaatagaggaaacaaaagagtaatgctcacagaaatgtgcaacacgagatctagtgggtacccccttatgaatgt

SEQ ID NO: 66158 - DNA, 187 bp, Zea mays
tgatgctgtcttctctgggcgacaggagggtattgaggggcctgtgcgggctgcccaaggaagggccccctctgctggtggggaccacaagctcctgtggttcgagccggggccgatggtgaccggcattcttagccggaccggtgttcacgttcggggcctggcgcacccctttatgttctaccgg

SEQ ID NO: 66159 - DNA, 321 bp, Zea mays
ggaccaaaaataactcgctccttccacaatattgaacccatcgacttaatgttccaacactacatcgagaagtgttccagggtggtctggtccacgaatgattacacacagaaacatcgtaacgtatttcatgcacaagcgatgtggaagatagtatggaactgcaaatacaggccaacaagaatacggcgaagcggtcatattgaaaggggagaacccgcccggtcgcaacccgattcgaatattactagcttcactagcaacaaacgaatcaaaatcatcaagcgccttccacgcatcactatcagatgggtgcatcat

SEQ ID NO: 66160 - DNA, 430 bp, Zea mays
  unsure (1)..(430): unsure at all n locations
agctntggaaagtgagcttgcaaggtatgattggacaaatggtgagtcgctccaatcactctntgatcgattgatggtattggtcaacaaaataagagtacttgggagtgaagattggagtgactccaaggtcacaagattgttcatgagagcttataaagagaaagataaaagtcttgcaaggatgataagggatcgtgatgattatgaggatatgacgcctcatcaactatttgcaaaaattcaacaacacaagtccgaggaagcccccatcaagacaagagactctcatgccttgatcacaaatgaacaagacaatctcaagaagagcaaagaccacaaagcaaagaaagtggtcgagaacctcagtgatgaagatagctcaagtgatgaagacacagctatgntcatcanaactttcaagaaattt

SEQ ID NO: 66161 - DNA, 450 bp, Zea mays
  unsure (1)..(450): unsure at all n locations
tgaagaaataggagtacaaatggttggtcaaacgcatcataatgtgcatgatatctaatattcctagctagtgccagattaaccctggtgcagataagacaggatagcattttttttctttatcggaaaaattacatcatcagaccagaaacattacctcattttgttagacggcctgccatacagggcacatgcgcccagggcactgccatgtatagagttgtcttagtatagcaggataggatatagattgatagagagagatttgggggagaggattgctggtcaggatcagtcatgatccttaccatttaggatatttccatttaccacacctcatcctcccctatacatatgtacatgtatntcctctcaagggaatccattattcctaccatcatctaacatggaaatcagagcctagatccctttttcgctnttgcttctagg

SEQ ID NO: 66162 - DNA, 440 bp, Zea mays
  unsure (1)..(440): unsure at all n locations
agcttaaggagcatgaatgatgggttgaatgctaagttattaatagctagtaaatctaattcttgtgtagaacatgttatgatttgcaagaggtgtaaagattttgacattgatgcttgtagtgaacacctagcttcaatttccaaattgaatgatgaattggctagtcttaatgcccaacttaagactagcaagaatgaatttgacaatctaaaatttgcaagggatgcctacacgaatggtagacacccctcaattaaggatggacttcgcttcaagagggaagccaaggacttaacaagccataaggctcccatctccgccaaggagaaagggaaggctcctattgctagtagtgctaaaaagaaccatgcgtttatgtaccatgatagaagacagncgtataggaagtgtaatgattatgatgctcttgactctca

SEQ ID NO: 66163 - DNA, 427 bp, Zea mays
  unsure (1)..(427): unsure at all n locations
tctaaagggagaacacgtgataggtctaaccaatgttcatttcgaaaaagatagaccttgtgcagcttgtcaagcaggtaaacaagtgggaggagtacatcacagcaagaatgtgatgaccacgtcaagacctctggagctgctgcatatggacctcttcggacctgtcgcctatctgagcataggaggaagtaagtatggtctagttattgttgatgacttttcccgcttcacttgggtgttctttttgcaggataagtctgaaacccaagggaccctcaagcgcttcctaaggagagctcaaaatgagtttgagctcaaagtgaagaagataatgagcgacaacgggtccgaattcaagaatcttcaagtggaggagttcgttgaggaggangggatcaagcacgagttcttcgctccctacaca

SEQ ID NO: 66164 - DNA, 389 bp, Zea mays
  unsure (1)..(389): unsure at all n locations
ntagtgttaagtgagagtgattcgctgtgttcttctgagctcttgcgcttggattgctatctttctcattctttcttgagatcaaactcacttgtaattgaggcaagagacaccaatcgtgtggtggtccttgtgggaactttgtgttccaattgtttgagaagaagaagctcactctgtccgagggaccgtttgagagagggaaagggttgaaagagacccggtctttgtgaccacctcacggggagtatgtttgcaagaaccgaacctcggtaaaacaaatccgcgtgtctcactctttatttgctngcgatttgttttgcgccctctctctctcggactcgattatatttctaacgctaccccggcttgtagttgtgattatattt

SEQ ID NO: 66165 - DNA, 422 bp, Zea mays
agcttctaatgggagaacacgtgataggtctcactaatgtttctttcgaaaaagatagaccttgtgcagcttgtcaagcaggtaaacaggtgggaagctctcatcataccaaaaatgtgatgaccacatcaagacctttggagttacttcatatggacctcttcggacccgtcgcctacctaagcttatgaggaagcaagtatgggcttgatatagatgatgatttttcctgcttcacttgggtattctttttgcaggataagtctaaaacccaaaggaccctcaagcgcttcctaagaagagctcaaaatgagtttgagctcaaggtgaagaagataaggagcgacaacgggtccgagttaagaaccttcagtggagagtccttgagaggaagaataagcacagttttgtcctaccaccac

SEQ ID NO: 66166 - DNA, 453 bp, Zea mays
  unsure (1)..(453): unsure at all n locations
ntagtgttaagtgagagggatttgntgtgcctctttgagctcttgcgcttggattgctttcttctttctcattctttcttgagatcaatactcacttgtaaccaaggcaagagacaccaattgtgtggtggtccttgcggggaagttttattcccggttgatttgagaagagaaagctcactctgtccgagggaccgtttgagagagagaaggggttgaaaagacccgacatttgtggcctcctcaacggggagtaggtttgcgagaaccaaacctcggtaaaacaaatctgcgtgtcacactctttattcacttgcgatttgttttgcaccctctctcgcagactcgattatatttctaacgctaacccggcttgtagttgtgattaactatgtaagattcagtttcgccctattcaccccccttctatgcgactttcactacttttaagtc

SEQ ID NO: 66167 - DNA, 365 bp, Zea mays
  unsure (1)..(365): unsure at all n locations
agcttctaanacatgtgttaggactaaccgatgtctattttgagaaaaaacggaccttgtgcaacgtgctatgcaaggaaacatgtgggaactactcattcacgcaaaaatgtgatgacaacgtcaagaccactagaactcctccacatggatctcattgggtccgttacttatcttatcatcaggggaagtaagtatgatcttgttattgttgataatttttcccgcttcatttgggtattctttttgcaggataaaatagaaacccaaggtactctaaagtgcttcctaaggagaagctaaaatgagtttaagctcaaggtgaagaanataaagaagcgacaatggatctgaattccagaatc

SEQ ID NO: 66168 - DNA, 437 bp, Zea mays
  unsure (1)..(437): unsure at all n locations
ctaagcttctgcccacttaaaagactggctatgcccgtatcggtatggcttattaatatcgtccgggatgaacagaggagtcagggcactccaacgcatattttatcagagatgttttactgtgccagaaacctcaaaatgactatcaaagaggccactgatcactagcagattcatgggctctctcatttacctatctctgatcaagcgattgatcaatttctggtgctcaaggggttctgggagcaaatcgctcttaatgatgctcacaaccgatggaagtacatttgggggtcagacaaattctcctcccataaagcttatagatcttncatgggccatatgcagactcattctatctacagactagtttggtaaagtaaatgtcagcctaagcatatagtcttctactaactgtggctcaaaaccggctccac

SEQ ID NO: 66169 - DNA, 417 bp, Zea mays
  unsure (1)..(417): unsure at all n locations
agcttgggaaggttcttcattctcacatgttctaagcggcgatgccatagccagcccatgctagtcttagctattaagcatgcatctagaccggcctcttcttttgcaaaatcaactaaataaagtttgccgtctaaaacacccttaaaagctagtgaaccatcacttcttctaaagacagacacatctacattngtaaatagacagttatatcccatatgacataattgactaacagatagcaaattatatccaagactctccactaaaaacacattagagatagaatgctcattggagattgcaattttacctagcccttttaccttgccttgattcccatcaccgaatataattgaatcttgggaatccttattcttgacataggaggtgaacatcttcttctccccctcatat

SEQ ID NO: 66170 - DNA, 441 bp, Zea mays
attatgatctgtataaatgtgacagatattacccagcagataatgacgcacaatcttcagggcatgaaccacagcagctagctccagatcatgagttggataatgttcctcatgtcggcataactgccttgaagcatacgcaattactcaaccttcttgcattaatacacagacgaggccactacccgatgcatcacaatacacatcaaagggcttactgatatccggctgagccaataccggagcagtggttaataatgtcttcaattgttcaaaagcttcattacacttggaagaccaattgaatttaatatcattcttcaataaactagtgattggcttcacaagcttagaagaatctggtataaatcggcggtaatatccatccagttcaaggaaacttctgacttgatgaaccgtggtccgactttgctgggatct

SEQ ID NO: 66171 - DNA, 423 bp, Zea mays
  unsure (1)..(423): unsure at all n locations
agctntgccaaatagggcgcataatgataccttngatatcttctcgnactgacaggtcattcttcacataaaaccattctgtcatccagtcgccgggccatctcttccgaaaggttggcacgggacagcttgacccggaccgagaaacgaaactgtagcagccaaaattattgtgatactgtcctttaccgcaaggttttgtttcgtatgataattcatgtatattgcagaagctttttgcatcaggcttcagaccttggcttctcacggcccacacgaagatattcagccttatgattgcctcgggggtaagttggtgaagatagacttcgaagattntcagcacctccacgacgaagctgctcaagggaaatcgcagcccaactttcaaaaagcttcagtacactacgacttcattctctt

SEQ ID NO: 66172 - DNA, 433 bp, Zea mays
  unsure (1)..(433): unsure at all n locations
cgcttgcctcgggtagactaataccagaataagttaacacgtcttgggagtggagagatggtgagagtagcgtgtaccctccgtggcaagaggctggacggtggtgtatctatgctctcgattggcgtgaacctgatctggtcttaagaaccccggtggcgagttgacatatgcaagggttaagtgctacagatgtcgtgtgattggagatcctcagctgagtataatcgattcggatcgccgtaacttcggggatatgaagacttggtcactaccctacacgtagcaatcgagtgaagatgaagggttgttatgaaattggctagtataggtcaagtgaatgaattanggtagaaagaaccctagctgcaggtaattctacttaacctgacaaataaaactggattttaaggatccactgttagtaagcatt

SEQ ID NO: 66173 - DNA, 387 bp, Zea mays
tgcagcttcggaaaaattatccgaagctattcttctaagatgaagaatgtgtctcgtgaccacgatttttactctttcaaatcatacttccgaagatcagaattgtttctccctgtaacttggcatgatttgccctttttcaaagtattttccgaagaacgataacatgttcccttcttgtgcctcatgcagcatgatgtatgatgattatgctatgcaaaatgatgtgatgatgttatgttatgcaaaatgacattttgtgccgaagatacacacattcctgcgatagagcacaatcttttggatcaatactgactttttcacacataagcctccttaggagcttcttcgccttttacttcagcggaatcagcggttatttttcgc

SEQ ID NO: 66174 - DNA, 436 bp, Zea mays
  unsure (1)..(436): unsure at all n locations
tctaagggagaacacattntaggactaacaatatgttcattttgagaaagacaggatttgtagcgcatgtcaagcagggaagcaagttggagttcatcatcaacacaagaacatcatgacgaccgacaggccgcttgagctactccacatggatctatttgtcccggtcgcttacataagcatcggcgggagtaagtattgtcttgtaattgtggatgattattctcgcttcacttaggtattctttttgcaattaaaatctcaaacctaagaaaccttaaagagattcttgagacgggctcaaaatgagttcggattgagaatcaaaaagattagaagcgataatggaacggagttcaagaattcacaaattgaaggatttcttgaggaggagggcatcaagcatgaagtctcttctcctacacacctcaacaaa

SEQ ID NO: 66175 - DNA, 414 bp, Zea mays
  unsure (1)..(414): unsure at all n locations
agcttgcagctgtatgaagatattntcctgttatttatgtctccatagagngaccttntctttcatgtttagtcattactattcaggttttattttaaagattcacacatgtatattggtctctaatttttattttgttttccctgctcccttttctattcccttccattcaattaatggatgttgataccttgtgattgcaccaacccgttcaattgtacttcagatagcatcttctttgattgtcatcttttgcatactcttgttgacggtgctatcatattcttgaaaaccttccacgctgtccatctgagcattcttctatctctgcatttgtcctnaacagtcacctgctttgangtccatttggatacccatggctgggatcagtttgagattaattatatatctttg

SEQ ID NO: 66176 - DNA, 381 bp, Zea mays
  unsure (1)..(381): unsure at all n locations
ngaagccatggtaagtagcatacgtcaataatatacgaattgactcaagcctagctacgagtgcataggtttcaccgaaatccaaaccttcgacttgggagtatcccttggccacaagtcgagctttgttccttgtcaccacaccatgctcgtcttgcttgttgcggaagacccacttggttcctacaacattttgattaggacgtggaaccaaatgccatacctcatttctagtgaagttgttgagctcctcttgcatcgccaccacccaatccgaatcttgaagtgcttcctctaccctgtgtggctcaatagaggagacaaaagagtaatgctcacaaaaatgtgcaacacgagatctagcggttacccccttatgaa

SEQ ID NO: 66177 - DNA, 423 bp, Zea mays
  unsure (1)..(423): unsure at all n locations
agcttatgttgtcttgggtgtgatctgtgtggacggtgatgcttttgcgcgatccatatgagaactaatgaagagccgtatccaaataaataaaatgcgcgtacttgtgatgttatttttgtgttgcgtaaatatataaaatgttgtcatctttttaatggtgttaatgtcgatcgacgataaagcgtagataactaatgctaacgtgtgggtgtctacggtgtcttccaatttaaatgtttagttcgtcactaagtctttgtatatctgggctacttttgtgctcctttcattatattcatacatatgcatnctgcatctcatttatgaccgagaggtgatgatcgtgcacgtgatgtggtgccaacaacaagatgtcgttgatggacgacctgaagaatggtgaacttacccagtggatgc

SEQ ID NO: 66178 - DNA, 382 bp, Zea mays
agctcagcactgctgttaaagggactgaagtatatgtaaccagatacagaagtattattaggagtctgagatatctgtaaattcaagacctgatttggaatttgcagtaggtcttgtgagtatgtttatggaggctcctgggaaggaacactggattacagtcaagaagattattagatatgtggatgagcatgctcattgcagacataaaggctgaaagtattcataaattcagactgctggtggacaatatgtcagctattggactgagcaagaattctgtgtttcatgataggagtaaacacatcgacccacgctatcactacattatagattgtgttgacaagaacgtggtggatgtggaacatgtcagaactgatga

SEQ ID NO: 66179 - DNA, 450 bp, Zea mays
  unsure (1)..(450): unsure at all n locations
ggacctataaaactcagctttgaagcnagctctctcaacaggccctgaatatactacttcagtgttctcgagccgctaggaattaggataatgactccatagttatagctcgccttcatataactcatctaacgtttcctttatgtcaccacctatcagataccacaaagacttaaaaaacttcactgtaaatccatcatgacaaggagcagtgttactcttcatgcagtttacttttttccttttgaaacaaagtttccaaatattgtttaagctactttggttcttatttcagttagcagacatcaaggtttggtacaaaagctgattgatagattacttctgttgaattgctaacctactaaaatgcaccacgtatgctaatcaaactgatttccttatggtaccctgancaaaagcgtggctaattttagaaaataaatgtaacat

SEQ ID NO: 66180 - DNA, 412 bp, Zea mays
tgttcatctagtggcttggtaagatatcggctaattgttccttagtgttaatatatgcaatctcgatatctcccttttgttggtgatcccttaagaaatgataccgaatggctatgtgcttagtgcggctatgctcaacgggattatccgccatgcggattgcactctcattatcacatagaagaggaactttggttaatttgtaaccatagtccctaagggtttgcctcatccaaagtaattgcgcgcaacaatgtcctgcggcaatatactcggcttctgcggtagaaagagctacggaattttgcttctttgacgcccaagacaccaaggatcttcccaagaactgtgcaagtcccgatgtgctatttctattaattttacaccccacccaatcggcattcgaataaca

SEQ ID NO: 66181 - DNA, 440 bp, Zea mays
  unsure (1)..(440): unsure at all n locations
agcttgtaaccnctactacaagcaccccggtgcaagttaatatattcctcatcctccctcttgggtttcatcttgcattaacccatccgggcagggacacgcagcataaaattcactagtcggttgagggtcctcgcgggtccaaaacaccgacaagattacatcaattacacataatatcgccgaagctcatccgcattctaagatctgggtatgtcgttgccgtccatatcctttaatctgtaagaaccgggtcttgacgaagatactactagaaaaggaccttcccattttagctgtagcttgcccactgtatctaggttggctattcttcgaagcaccaataggcctgacttgatattcttcaatcgaactttcctatcacgccattttattatttcggcctgatacttattgatgtactctatggcctaaagtct

SEQ ID NO: 66182 - DNA, 449 bp, Zea mays
  unsure (1)..(449): unsure at all n locations
taaacatttatgagggatagtcctacttataacatcgcacgcaaggtcatatatgcaatataaacaagtagaacaataagaatggcattcacacaacagttgtgattcggtatggcttgctgtcacatggtgatccccatctccaataacctgtccatcacgatgatctccatctccatgatataggtatgccatcctccaggtgatgagtccttcaagacctatctaacatatgctggtaaacaaattacatatacgctttggatcatcacatgttgacacgcaggtcattacattaaatttggacaatacatgtggctccagccgtattgccctggtcacgacacgcaggtcatgaataatttattaacatgcatcatatacacaatagccataccgatcacaagatgtcctgcaaaaacaggttagacaaacacgtntctatacgt

SEQ ID NO: 66183 - DNA, 409 bp, Zea mays
  unsure (1)..(409): unsure at all n locations
agcttagcagattacagtgcacaagagctaataaatcactgttcttgagtnggtggccagaaagcgtgcaaaataagtttgcggtatggccgtatttatacgcttgatgcgttgaaagttgaaagaccccacttgtcattgaatgttgctattctagcaaagggaaggtgttttttcggaccttcggcataaagccttcgttcatatcgcaatctgaatttattatttcaaacaaattaatattgcgaggggctactgttggggaccttcngcgtccgaaggtcctcaaaaacatgatttaatagtgtttctggagtataatgtgcaaacaggtatcttccgactcgaatcggtatcacagagggagaagctcatagcatacgaatggtgatacagcaccgaagctgtg

SEQ ID NO: 66184 - DNA, 421 bp, Zea mays
  unsure (1)..(421): unsure at all n locations
tggatggacanaatctcaatcaaagagcagtcccccctctcttctattcctaaccaaaagctctcaaacgagaaaggacatgctaatccctaagagacttggtctccaccactagccatattctacatgcacctgcctatttcccaagtcgtccttacaagtaggtagcccaaatactccctagggttaaatctatccaagtctagatcagggtatccaacgaccacaagcacttcacagcttttctctgcctcaacacaaactccatgattcatgtggtgcccaaaattcaatttgtcctaaactccaaccctgatttgtggcccaaatctaaaaatcgttcaccaatggtttttaggcccaaaccactgaacccctctagagaagattatccactacaactcctttatgttcttgacac

SEQ ID NO: 66185 - DNA, 444 bp, Zea mays
agcttgtgcacacctctgtgaagctccccgttttaagaatctgagttcccttcgccggagaagccagtccacgctcgccggagctctcacccccgccggagcacgtggaccgggtaagccactccaccatccttcgattccttgtgcacacagtcgttgcgtgaccccgtgatgctcaccgtgccctcggattgcgccagttcgccgtagtttggccggtatactcgccgccgacgaggacacctgcctgcacgcgtggaccgggcgattccggccacctccgacgccgagccgtacctcgacgtgaccgccagagtcttcccaagccgaccccacccttcgccggaccttcctcgccgccggtaagccgcgccgcccttttctttcccgcggttactggtttaatgaaaggaaagactgcgggtgagagggaagaaaggtcac

SEQ ID NO: 66186 - DNA, 455 bp, Zea mays
actaagcttcggaaaccccatactcctagccatctcccggcatacagataattctttgttgtcagggagacaatataggaagtcatcttcgtttgttccattgaacactagtgcccccttcggatattataattctctggcatagagattagcttcgtaaatctcttcttcagataatttcttccccgaagcatgtcgcacaatgtaatcgcgtatgttggaaggtgcttccggggcagcagtgtcaatttcttcaaccgaaattggctctgacatttttattttttcggcttccaaagctgcctttgtaacttttgtttcttcggtttccaaaggttgttccttggtgggctctgaaggcccaacttcagcttcaagttgttgctttcaagcttcagcaacaaagccttcagtagacacttcagatagttcaacagtcttctttggagttatgc

SEQ ID NO: 66187 - DNA, 440 bp, Zea mays
agcttgtgaaggttcttcatccccacatgtgctaagcggttatgccacagccagcccaggctagtcttagcgattaagcatgcatctagaccggcctcctcttttgcaaaatcaactaaataaagtttgtcgtctagtacacccttaaaagctagtgaaccatcacatcttctaaagacagacacatctatattagtgaatagacagttatatcccatattgcacaattgactaacagatagtaaattatatcccagagactcaactaaaaatacattagagatagagtgctcatttgaaattgcaatcttgcctaagcctttcaccttgccttggttcccatcaccaaatatgattgaatcttgggaatccttattcttgacgtaggaggtgaacatcttcttcttccccgtcatatggtttgtgcattcgctatcgat

SEQ ID NO: 66188 - DNA, 441 bp, Zea mays
  unsure (1)..(441): unsure at all n locations
tggatgaggtgtcatcatcatcatcatccgagctatcatccgagttccattcaactaagtaggctttgccatctttcttcttggtatagaatttctttttcttcttgtcactttcatctttgcccttcttcttcttgcttggacaattcatggcaatgtgaccgggttccccacactcaaaacattttctatcattgaaagcatttcttctagatgtttgacctcttctaggttgacctcttttcatcttcatgaatttattgaatttccttacaaataaagccatgtcaccatcactctcgctttcattntcttcatcattgctatcttccttttcaattgcctttgaggccttggctttgagagcaatagattcatttttcaccttctttgccaaacttaaagcatcggcttgtgacttcttaaatatatcttgagtga

SEQ ID NO: 66189 - DNA, 427 bp, Zea mays
  unsure (1)..(427): unsure at all n locations
agcttatggcgctatgaatagcacatctctctatttttttataattnctattaccttcataaatattataacatatatgggaggatgaacttactaaatttgtttcctagattatacaatcaaccacataatttagaaaaatctaaacaaagtaagtaactatttcaaccatactataagagaggatgaacttgctaaactcttctcacatttaaatgagtgaaatcttcaataattttttgaaaaatggatagcatcttccctcggcttttagtgccatgaaaagtgctcctttctattcctgatatacgtcagcttgaggaggtagagagtttataaaacaagaactttagcacccggtggtatctccaaccgtactaatataacgcgaacgttgtagtacctattgaagtacctaatgcattag

SEQ ID NO: 66190 - DNA, 352 bp, Zea mays
tatgaagattcttcatcccaacatgtgctagtcggcggtgttatattcaacccatgttagtcttagcgattaagcaagtgtcgagttcagctctatcaaaatctactaagtatagctgaccctccaacactcccttaaatgctactgaatcattacttcttctaaagacagtaacacctatattcgtaaaaagacagttgtagccaattttgcatatatgagaaacagaaagcaaattgtaatctaaagaatctaccagaaaaacattggaaatagagaggtcaggagatatagcacatttaccaagtcctttgaccaaaccttgatttccatccccaaatgtaatagctct

SEQ ID NO: 66191 - DNA, 417 bp, Zea mays
agctttcttcgttgactccctcgaagagtatctctcctggtctgtacccgcaagatatagcatactctttcagttcttctttttcagccttcgacaattcttgcccaagtatatcttgaaaattgaagtcctcttcttccgaaatattctcggctttctcctttccttttccagccactgtgcctgggttctcttcagcagctgtagcagcttcttccgtggctgcatccagaagcatggtatcaatttcagagagtatggcgtctagattcacatcttcagcagtttcagcttcggcactttcggcttcggtgggtgcagcttcgacagcagcagtgctctcaatagctagaatctttgacgccgatgccagcggcggcgtctgctcgataacttcaactacatgaataatccttc

SEQ ID NO: 66192 - DNA, 431 bp, Zea mays
  unsure (1)..(431): unsure at all n locations
tgagagtgacttgccaaagcgacaganactgtatgttgtttattacctacgtattctggtacatagggagagtagcttgaagcaatatgtaggacctgctttggctgactctgtcgcgcctcagcttcgacaatctccttttgcttctgaattgtgacttggcatgttcttgtggtgtggcccttgtcttcaccacagaataagcaatttagccttctaggctgatccccgtatcttcctccaaagcccctgccgcctctgccccttgggactggttgcctgaaagagcgttgttgttgccctgaagattgggagttgtgttgtggcctttgaggctggcttcctctgtcatcacttgagttggaattatggatcgatctgatgtgcctagggtggattctttcttcacagcccctggtcatctcagaaaa

SEQ ID NO: 66193 - DNA, 387 bp, Zea mays
agcttcggctatgtttaatttttcggcagctaaacagtgcaatagcaatgaatgttgtggtaacttcacatctacccgtctgtttatatagcactgcaggtgggagggtgaatcgacaagtcctccgcactggacgaacagtcgcccgcacccactaagtagtggaccacaaagcccgagaaggtgaatcgccaagacgcgtgtacccgctgcgtggtgggatcctttcgcgcttggagaatttatatcgtttctcagcaacgagcctgggaaggtgtttttttggaccttcggcttcctaaagcctaagagattttttcacggatcaagctcgttacgataaacgatctatcaccgcgaaggggctactgttgggggcatgcttca

SEQ ID NO: 66194 - DNA, 441 bp, Zea mays
  unsure (1)..(441): unsure at all n locations
tcagctnttcttgttcaaaantttctgattgggaaagaatcttctaattcaattctgttatttttgcttcagcgtccgctaataagccttcggctgtttatagctcgaagtctttcttctcgatggcagcagactgctcttttatcttgttttctaagttttcaattataactttgtgtcttttatcctctaagtcttgctgcatttttaatgccttgctcaaaagtatactctgtggacaaataaccttcgttagaaaatatttccgtgaccacaaaaaataacagttaaacacaagatatttaccttataattagaatagaacaagctgccgacaatgtgttgtcgtcgatagccgcttatatccgcttcgagtttcgggaagccgatactctttgatagagtaccgacaaccttcgcacccggttgatctcgtatgcc

SEQ ID NO: 66195 - DNA, 421 bp, Zea mays
agctttgaagtaaaccataccatagaccgttgaggggtttacaccgactcaaactcaagagctacgtccccttttgtgatgaacataagctggactcaagggtaggaaaaccatcgctggaccttgccttaatggtaactgaacatgggcaaccatctctgaacttatataagactcagtggggaaatgttctgggaatgccagcagtgcagggctcgtacacgtgtcattcatgctcagcctcatctaagttcacagcctcagcccataacacagaatctggtcgagttccccagccaaaatatccacctgatcactgaatacagacatgataaatataactgagaactccaccggttacagcaccaatgggtccaaaatggatatttttctgcaggggtgaggccactagatcttttgt

SEQ ID NO: 66196 - DNA, 413 bp, Zea mays
  unsure (1)..(413): unsure at all n locations
ggtggagggtcttcatccncacatgtgctaagcggcgatgccacaaccagcccatgcaagtcttagccattaagcatgcatctagaccggcctcttcttttgcaaaatcaaccaaataaagtttgccgtctagtacacccttaaaagccagtgaaccatcacatcttctaaagacagacacatctatatttgtaaatagacaattatatctcatattacataattgactaacagatagtaaattatatccaagactctcaactaaaaacacattagagatagaatgctcatttgatattgcaatcttgcctaaacctttcaccttgccttggttcccatcaccgaatatgattgaatcttgggaatccttattcttgacgtaggaggtgaacatcttcttcttcctcgcatat

SEQ ID NO: 66197 - DNA, 423 bp, Zea mays
agcttcagctccatctatgttatggattgttttttagtcagtccaattgccttcggcccttcttgcagcttcctgacttccatgaatagcaatgggtccctgatccgaaggtatcttcatgcatagataggcaggatgaaagattgcttctaaggcattgatggtaccacgaccaataattgcattgtaagggtattccatgtcaacaatgtctaacacaacttgctcagttctagtgttgttgatgaacccgaaggtcactgacatggtgatcttgcccagtgctacaatctgccttcctccgaagccacagagaggatgtgtagcatcatgactcttatcctctggctcttgcatttgtctgaacgccttagcaaatatgatgttagctgcactgcctgtgtaaacaagactatgtggacc

SEQ ID NO: 66198 - DNA, 353 bp, Zea mays
acccaactcttgttgggtcctacaatgttagtcacaacacggtttggaaccattatgcaagctatgtctcccttgcatttggatcccaacttcctagcaactacttttgcattcttacttaaaagtacaaaggaagtattgcacgtatggttaataatactaagaccattgcgaggtcttctaggcgcatgagatacagcatgattacgcctaggcccatatctactagaagcaaccatagcatgagaggtatgataactaggtaaaacatcatgatcatagcttctaacattatgagcatgcctcagaaatttcctatcatacatataggcatggggcttttgagaactact

SEQ ID NO: 66199 - DNA, 427 bp, Zea mays
  unsure (1)..(427): unsure at all n locations
agctngtccaatgcagcccacctccatatactgagtaaagtaaaaaaaaggaacatcttaacatcatgacaggcattcatcattctgaaagttgtgcaatgttcagtaaaaactatgtcactcacgaataatggaagtacagatagttttaatgcaagtggtaagcgttgaagtttgttgatcaaaagctgaaagaacccaacgttgaaatggaagaatgtgccaaaaagaaaatagaaagcaaaaaacactcattcaaccatttcaaacaatgaaggtcgaattttacctgtgctccaaacaccacattacaagctattagtttcatcagtcctcactttcatagtaagaacttgctctaattatgattacctgcaccatttgcacaacagaaattgcttggtcagcattgcaatacatagatagc

SEQ ID NO: 66200 - DNA, 417 bp, Zea mays
tgagaccgacataagccgctaccgacgatagcatcttgtctgtagcttattctattctaatttcaaggtaaaagcttttattcgactttttattgttttgaacaacgaaggtgttttctaacgaaggttgcttgtgcacagagtatgctgctgagtaaagctttgagaatgcaacaagatctcgaagataaaaacatgaagttataactgagggtttagaaagtaaaataaaagatcaagcagctgctcttgaaaagaaggatttcgagctttagacaacagaaggtttattggcagaagctgaagctaaaattgcaaagttaaatacggagcttctctcgaagtcagaaagcttcgaacaggagaagcagaagttaaatgccaaatttaagactgaggtcgagaaaagttcgaatc

SEQ ID NO: 66201 - DNA, 422 bp, Zea mays
agctttgcaggagaaggagatgatatgaagctttggggtgctcgagagagtcaattcaattcttgttaactcaagctatcgatcttcaatgatctatatccatgattgacccaagggtatttttcaaattactatgtcttaaactcatatcatctaaaggaaagtattgatgttgtaagaaataaagaattatcctgtgtggaaacaacaaggcctacaacgtggaggaaagccaaaggatggtaacatctatgtttttaagtgccagtatcttaaattactatttctcatgtgtcttgtgtagtcacatagaaaaatgaagcactctcaatatctttaaattatgtcaccattcctttgagaaattcctctcatatggtagattgcatattcattatttctatactctggcaatctacatg

SEQ ID NO: 66202 - DNA, 436 bp, Zea mays
  unsure (1)..(436): unsure at all n locations
tatgcatgccaaaatgattatggagaatattcttgggtttataaaagagatcaagacacaacttacctaagactcgagattccaggtaccataatgatcttcagattctcgtaacctcactgctagtcgcagcaatacaaacaaacatggtataggcaaaattaatatcacatcaaacataagcataagctgcataataatattctacgcgtcttaatgagatcctagttttgagaaccactaaattcggagttacggttagagagttatgattttctgaagatctaagtgtgggatataaaaaactaagtgtaaatttttaatctagggttcataaccaactaagaataccagatgataaataatattaatatgaatttattgcaattggaatgggtcanaaaggagtaanatcgggaaatctatgaaatttcta

SEQ ID NO: 66203 - DNA, 390 bp, Zea mays
  unsure (1)..(390): unsure at all n locations
agctntaatgtctgatgagcaagacctgttgtccatccacaagcaatctctatgttgaaatttatcagaagacatatgcctctgttaaggtaaaccttattcttcagtaacaaatacttattgttaatgtgaagaccttaattttatggtcgctaccggtcccaggaacttttttgttgggaagctaattccttacttatatgagggacaacatttttgtttgcctgatagggtgatgaaggtggctagacaacacgattatgggtattttcttatcgaggtatgattttcctttcttgactaatgaatatgtttatggatatttgttcttgaagaactgtgggtaatatttaaatctccactttctatctcangatacatcatgcccat

SEQ ID NO: 66204 - DNA, 345 bp, Zea mays
tcactggccactggcggagctagctgaagcactggctcttcttgtgggtggctggagtgggctggccaccactgtcgaagctctggcggcaatggcgggcggaattgagctcgccggagctaatgagatgtggctggccggtgagggtgagtgcatggtgaagtgaggcgcgccccgggaggctttatatgcactgcgcggtgcacaggcggccgtggaccggcgagcgcgcgcgagcgtgcactgtgaggcgagggtgcgcgaacgggcgtgaaccggaggtgtcagccacggtcgaacacctgtgcccgatgcctctgtccgagttcaagcgctggatgggtg

SEQ ID NO: 66205 - DNA, 442 bp, Zea mays
gcttctaaagggagagcacattttgggactaaccaatgtttattttgagaaagacagggtttgtagcgcatgtcaagcgggaaagcaagttggtgttcatcatccacacaagaacatcatgacgaccgacaggccgcttgagttactccacatggacctatttggcccgatcgcttacataagcatcaacgggagtaagtattttcttgtaattgtggatgattattctcgcttcacttgggtgttctttttgcaggaaaaatcacaaacccaagagacattaaaaggattcttgagacgggctcaaaatgagttcggcttaaggatcaaaaagattagaagcgacaatgggacggagttcaagaactcacaaatagaaggcttccttgaggaggagggcatcaagcatgagttctcttctccctacacgccacaacaaaat

SEQ ID NO: 66206 - DNA, 445 bp, Zea mays
  unsure (1)..(445): unsure at all n locations
ggagcccgccactagagctggagtagccgaaggtatcctttgttcccgcaataactcccaagaggagaaggatggctagcgtgctggatgctgtcttggagtcgacaagggtaccaactcctgcctttgcaaaagaggatgtcgaagctgctacagctcgtgttgaagtcgaagctgggccctcagtggccatcgaaacagagcctgttgaagctattggacagagtactaagcaaggaccttcgaataccactctgatcttggaaaaagaaggtgcatctaagaaggttaaatcctactcctgaagcgtctactgaagagttagactntattatacgacatgcttcgggtaaagagttgtcggaagagcaaattgtcgaagctaaacactatgctagagaactaaagtacccaaaaggatctttggtgtacaatggcaccgatg

SEQ ID NO: 66207 - DNA, 423 bp, Zea mays
  unsure (1)..(423): unsure at all n locations
agcttgtgaaggttcttcatccccacatgtgtttagcggtgatgccacagccagcccatgctagtcttagcgattaagcatgcatctagaccggcctcctcttttgcaaaatcaactaaataaagtttgccgtctagtacacccttaaaagctagtgaaccatcacatcttctaaaggcagacacatctatatttgtaaatagacaattatatcccatattacataattaactgacagatagtaaattgtatccaagagactcaactaaaaacacattagagatagagtgctcattggatattgcaatctttcctaaacctttcaccttgccttggttcccatcaccgaatatgattgaatcttgggaatccttattcttgacgtaggaggtgaacatcttcttctcccncgtcatatggttc

SEQ ID NO: 66208 - DNA, 449 bp, Zea mays
tgagacattattgcttaatggtcatgtgttgtccgaatgttatcacttgaggtcatcatatagatgcaccaaagaaccatataaagccttcaatgtccatacaatctctgtaatggaccacactcgttcctttgaaacaattcaaagaacttaaccaattcagatcagattttaagataagagggacttaaaatctcatttccgatgatactcatcaagtatccatcttatgggaaaaacatgaccaatagaattgttcataacttttcatttcatcccaacaatgggatgaccaattcaatcttacccagcatggtaagtagcatcacttgaaaagttataacatatgcaacactttgtatgggatgatgtatgtagaatacagtccataagaaatgtttctgagaaacatatgcaatatccttcactatcaccttgtgtttccacat

SEQ ID NO: 66209 - DNA, 405 bp, Zea mays
  unsure (1)..(405): unsure at all n locations
aatttcttgtattgcatctagggcttgtctaacctacttgagataaccgccaacaaagcgtgtgaaaaagcttaactcggatcgaacttgacaagtcttagttttaagcttttagcacttgaattcttactttttatgcgaatgttgcttcttgaaatatgcatgaggtactgttcttagggggagtattcataactcaaatcactcatgaaaacccctagtgaaagaccaaaatgcaaatttcaccatttgcctattttctctaaaaattatctagcctatggcataatattntgaatattatgagaaaatatatgagggtaccaatgcctgtcccaacaagtgttattttgtgcgattataaattggaatttggtttggttggaaattatatatgaaaattca

SEQ ID NO: 66210 - DNA, 471 bp, Zea mays
  unsure (1)..(471): unsure at all n locations
cgacacttagacactaagcttgaggcatcaattgggagcctcttggttggcgtgggcttctccttcttttctttctttgactngaatgcaacaggttgcgcctcgggtgtggaggcccgccttgctccaagttgacaatgtgtttggagtctttgaccataagttcaaatctcacaaacttgccaatcacctcctcatgagacatttgctcatacctaggactctcatggattaattgcacttgagtgggattactaaaataagagatcttagaataaccttgaccattttatggtcatcccacttggcgctctcgaggttgcggacttggttcaccatgatcttgagtcggttgtacatggcttgtggctcttcacctttgttgaggacgacccaccaagttcaccctcaattggttcccgcttggtgatcctggtgattttgtccccttcatgtggtgtcttgaggacg

SEQ ID NO: 66211 - DNA, 444 bp, Zea mays
agcttaggggacttttttcacggatcaagctttttacgaaaaacgatctagcaccgcgaaaggggctactgttgggaccatgcttcgtcgccgaaggtcttgtaggaagaagcagttttcggctgaagccgtttgtatgagatgaccgaaggttcctcttcgtgaagtttcggaatttacaaaccgacataaaagtataatgaccttttagtccatatatgtttgagtcaccgttgtaatcccttgtgaggggcataattgtaattcctcacaggccacgtcctgtgtctataaataggtgaacagtgcctctgtactgttcacgcaatcttgtaatcactggcacattacgctggaattattgttttctgctaagacgaaggtattaatgtacttaaattctatgttttcaataattaagttcacataataaaatatagatga

SEQ ID NO: 66212 - DNA, 435 bp, Zea mays
  unsure (1)..(435): unsure at all n locations
tctcccttatgacgaaggcacacaagatgaagacatccttatatgattatggtaaacaccgaagctatcactagatggacagcttcggctcacaatgaagatgatgaataatgatgatgatcgaaagaggaaaagactacttagtccttaataacttgtattacgatcatgtgtaaatattgaggacataaatgtagttttgctcgagctacgtcctgcgcctataaatagatgaacagtaacaccatactggtcacgatggattgtaatcactctcccgcattctcgccttcgagcaagccaaaggtatcaatgtaatatcaatactgttgaatattaatttacattntatggaacatgaatataaatgaattaatgaagatccagttttcatctttatcctttcgcatttccattcatatattaaataatgaa

SEQ ID NO: 66213 - DNA, 294 bp, Zea mays
  unsure (1)..(294): unsure at all n locations
agcttggaggcgtctattgggagcctacttgttggtgtaagatcttccttattttcttctatcgccatgaatgcaacgggttgtacctcaagtgtggaagtagcgccttgcttcaaaatgataatatgtttggaggctttgatcataagttcaaagctcacaaacttgtcgatcacctcctcaagagacatttgtttatatctaagatctccatgaattaattgtacttgagtggggttacgaaagacaagagatcttaanataaccttgaccatttcatggtcatcccgcttg

SEQ ID NO: 66214 - DNA, 397 bp, Zea mays
acttaaaactcaactgactctccaatagacgaagctcatttttagtgtcttctttaaagaaaaacttctgaagaaaagtttttatttccccaaaaattcagaattaaatgggcagagtgcgctctaccgctagagttgagcgtgagggaggcgaagcctaatgagcggagactgttcccatcttcgaagcgatgcaacgatcctgactggtgacctcggaaggaatccgtaatgccgagacagagcacactgttgccgaaacacaacaagttgctgtcgaagcagaagaaggaaatattgaggaagctgatcccgatgatgattaccatattgtcgtgccaagcaagcccagccacttggacttctgaaagtcgactgtctctctaatgatgatctc

SEQ ID NO: 66215 - DNA, 434 bp, Zea mays
  unsure (1)..(434): unsure at all n locations
agcttatattaaaacttgaatcatgtaacttatattatataaatcaagatttaaaatacacactatgtaaataccgntagaattaggtattgttggttacttgcaattggtttctaagagagaccaagaacaaggcaacataaatatattaagtttaccttcttcagaagaaggctgattntaaaaatgaaggtgcgacaacaattaataaaaaaaatgtgttaacaaagataataattcgaagaatgttaacacgaatataaaacgtgaatataaaattgtgtcaacaattaataaaaatgtctcgcataacaaccaaataagataagttttatctcttacatgtgcaactaaccatatattagcccttaacttctcatccctttgtccgtctctacctaccttacctagattcttccgcacagacatcgagt

SEQ ID NO: 66216 - DNA, 432 bp, Zea mays
  unsure (1)..(432): unsure at all n locations
tctaaagggagaacacattctgtgactaacatatgtnntatttgagaaagacagggtttgtagcgcatgtcatgcanggaagcatgttggtgttcatcatccacataagaacatcatgatgactgacagaccactcgaactcctccacatggacctattcggcccgatagcttacataagcatcggcgggagtaagtactgtcttgtttttgtggatgattattctcgcttcacttggatgttctttttgcaggaaaaatctcatacccaagagaccttaaagggattcttgagacgggctcaaaatgagtttggcttaaggatcaaaaagattagaagtgataacggaacggagttcaagaactcatatcgaaggctttcttgaggaggagggcatcaagcatgagttctcttctccctacacgccacaac

SEQ ID NO: 66217 - DNA, 365 bp, Zea mays
ccgcgcgccatgggcgaaccccttattttcgggccagacgcaaggccgaacagtcatgccgcccgtcgccttgcgccttcgtgccgttttccctccgttccgccatgcccttcacccaagacatacatattaccttcggtgtctttccacacgcttggacttatcttatttccggggccatgcccgaacctcggttatccgcccctgcgccatgggcgaacccctcgttttcggcccaaacgcaaggccgaacagccatgccgccccgacgacattctgtccttcacccaaggcatacgtagcagcttcggtgttcctgcacacgcttggacttggcttttttatggtcgtgcacgaacacacgg

SEQ ID NO: 66218 - DNA, 401 bp, Zea mays
tagtgcaagcgtgtggaatggaaaacaacgttgctttgtgtttgttggctcgagtgaagggcaaggtggaacggatggaaaacgggatgaggcgcgcggcgactggccgcatggctgttctgccttgcgtctgggctgaaaacgaagtgttcgccatggcgcacgggccgaaaacggaggctcgggcacgaactcgaaaataagctaagttcaagcatgtggaaagacaccgaacatacagcgtatgtctttggtgaagggcacagtggaactgagggaaaacgacacggaggcacgcggcgacgggcggcatggctgttcggccttgcgtctgggctgaaaacgaagcgttcgccatgtcgcgcgggctcaaaacatccgtttcgccactgtctctaaaa

SEQ ID NO: 66219 - DNA, 189 bp, Zea mays
actgtgtcggtcgcttctctgctccaaatactatcttttcgctgtgagttccaacgtcaaatatggtcggggtacggagataaagaggggagatatttgctgtgtcaaccaagccctagccgagacaaaaggagtgtcaagtcatgtctagcgccctaagataggtgtcatctctttccagggtgttct

SEQ ID NO: 66220 - DNA, 369 bp, Zea mays
tggagatgtgttattgagcaaccatgtgactttttcatatggctgggagagcgcgccgcggtcagaatgagcacgttccttcaccgccaccgccttccactctgtaggagctcatggcccagcagaatgagatcctgcgacagctggcacagcgtcagccgccaccacagcactatggtggtggggaccatcagcgtcaccctgtcgctgctacctaccaggatttccttagtactcagccaccactgtttaccagggcagaggacccacttgatgcaaatgtgtgtgtgagggtggtggaatccaaattcccactgctccatggggcttggtcagaggtcaccaaggtcatgttcgccactcagcagc

SEQ ID NO: 66221 - DNA, 357 bp, Zea mays
  unsure (1)..(357): unsure at all n locations
gcatttaatatacgaatngactcaagcctagctacgggggcatatgtttcaccacaaaccaaaccctcgactagggagtattccttggccacaaatctagctttgtttcttgtcaccacaccatgctcattttgtttgttgcggaaaacccatttggtttctacaacatattggttaagacgtggaactaaatgccatacctcatttctcgtgaagttgttgaactccttttgcatcgtcagcacccaatccgaatcctgaagtgcttcctctatactgtgcggctcaacagaggaaacaaaagagtgatgttcaccaaaattgacaacaccgagatcgagtgtgtacccccttatg

SEQ ID NO: 66222 - DNA, 321 bp, Zea mays
actcaagcttgacatgaggagatggcgctcgccatcaattattttcttcatattctcaaacaaaggagggggaaagactacatgttccgcttcaagaaggtttgctacaagtgtggtaagcccggtgttgggtctatgcttcgtcgccgaaggtcttatagaaagaaatgatcctctgatgaagctgtttgtataaaatagccgaaagttcctcttcgtaaagcttctgcattgcaaaccgacttaaatgtagaatgaccttttagtccataaaggtctgagtcaatgttgtacgtctttataatgggcatactcgttatt

SEQ ID NO: 66223 - DNA, 138 bp, Zea mays
gggcggcatggaaattacagctgcaaaaagctccacaaaaaggagggccattgtcctgagggctggcctacacatgatgaggcacggtacccttcgctttattgatgagctgaccccaaataactggtccgaacagtc

SEQ ID NO: 66224 - DNA, 415 bp, Zea mays
  unsure (1)..(415): unsure at all n locations
tagcttcgattcctgtaggacattcctgaatgtcctatttatcgccgaagccagatgttagataaataatctttgagatacaagtgaccttcggcaaaaccttgtacccttaaggcaattgtgacataacaaaaccaaggaccttcgacaatataggcgcccaacagtagccccttgtgtgatgagnttgttatctcataacgagcttagatcgcaataatttgtaattgggaggccttgcaccgaaggtccgaaaaacaccttcctgaagctcgttattaaatcagttaacacgcagtggggcccaatggtcattgagtgagacagataagatgagatgaccacacgtattaaagggggtggtgcccaacgttatatggtacgactttttgttgctgagcttactgctgctagt

SEQ ID NO: 66225 - DNA, 444 bp, Zea mays
  unsure (1)..(444): unsure at all n locations
gatccttaagtcaccgcggctgcagcttggaactatgcccgatccaatcttcttagccggaactataagagcttgccagatgcccccgttcctgtcgaccacgaccagcacccaacataagactttcctagttatttagccaagaccagagccatgataattctcatggtagcactgttttcccgggtggtcactccatgttccaattaatatgcaataatcttgtttaaccatcgggttcacaacaacaaagtaatcttaccatttggaacattaatatcataagcgggagtgactgcataaagttaagttgtagcaatagcatagctacaaatgtaaagtataattcccaggtttgatcaaggaataaggctggaaaggttatctaaatatgtaaaccgtcaaattatgcacatatatccnaaagaataaactttattaaat

SEQ ID NO: 66226 - DNA, 386 bp, Zea mays
  unsure (1)..(386): unsure at all n locations
ttctcnttttaggtttagggagatatattcttgccagactttcccaagtcctcaaaaaaatgacgttgggttttctcccattccattcctcataaggtgtgacttctctgtttttagtcagtaccctatttagaaaaaagctgtgagaatagcttcccccaccattcaaagggcataccgacgctctctaacatggcatttaccaaagctgttacagttcagtttttcattttagcaacccattggattgaggtgaatatggtggtgtcacttcatgaataatatcatgtttagtacaaaaatgagagaaatcatttgaggtatactcttctccatgatcattgcgtaatccggtaatccttctctcatgttggctctcaacttca

SEQ ID NO: 66227 - DNA, 395 bp, Zea mays
  unsure (1)..(395): unsure at all n locations
agcttaaacatatttaaatctctagggttcttcttttatttattntattaaataaataaatctacacctacattagttcatacttaatcataaaaattagaatgtgcagacagtaaatgaaactatttgatttagacagagaataatcttatgaacattttgcaatttgaatcactaaatttggagttcatatgcaaaagttatgaaataaacaagtttggggattcaaaatatgaaattaggtctaattctgtgaatatttaaaagtccagagttcaatctgcaagagtacaggggcctgtgcgcgaaaccagggacgatatgtttatttccaacaaaccgagggtctctttaataaaacttncacgcgaaggggtatcgggtgaatctaacct

SEQ ID NO: 66228 - DNA, 278 bp, Zea mays
  unsure (1)..(278): unsure at all n locations
cccaaaccaccaaaacccacaagagagctttcaatgagaagttcctgcacttggtgaccaacttgattgtataattagttcaaggccaatcacaagtgatgatcaagaacttagagaatgggagaataaattacaaaaacagtagagcacacaagacacaatgattttttatcgaggtttaattntgaagagcctacgcccccattgtggtgtcccaaaagattatcgttgcactcaacccttctctagtgatccaatgatcaacttgaggccacata

SEQ ID NO: 66229 - DNA, 135 bp, Zea mays
agctttaagagattggagttcgtttgtgttgcttaccttgggggtagctgtagtgggtcggagcgaagccagatcggttgccagttgccgaacgacctttttgttcctgaccattttgaaattggccaggacctt

SEQ ID NO: 66230 - DNA, 189 bp, Zea mays
tgaatcacttttatacccctgagataccagaaacccttttggaaccctagaaaaccctaaaaccaaaccctaggggcttatattcaaaattagtccacttttggactaaagtgcaaaaaccaagccaaataagtgtccttaagtcctttgggttcacaaaatatgtgggaacttgaaagcccaaaaccc

SEQ ID NO: 66231 - DNA, 134 bp, Zea mays
  unsure (1)..(134): unsure at all n locations
agcttataagtttctggatgagaagtggtcaccctagttccgttgatgaagcaccagaagaccaatcaaggaaggaatccatgtgggagttcgcaaagagaaagtgtttgctgtgttggcattcnatgccttct

SEQ ID NO: 66232 - DNA, 119 bp, Zea mays
tgctgcctaaaactgcagagatggttcttgatatctgtgtacttcgccgcattcatcgagagtgtggcatacgattcatacggcggtcattagataaagaacgttggtgcccaagggtg

SEQ ID NO: 66233 - DNA, 199 bp, Zea mays
agctttagttcatttgccaatcagaagggattgggccaatgggtaagtccattgggaatctacctttgtaattttgtcacatggacaaaaatataaaccagggaaaggtaattttcaaggcatggaggatttcagccaagggtttaccaggttttacgataaaaaacaaccaacccatatggagtttgggccatattca

SEQ ID NO: 66234 - DNA, 122 bp, Zea mays
actataaaactcatcttaatatccccgggctaacaggaatgcagtgtgtaatcgagaaatacttaattaggtgaaacccatcaaattatgcagcatatcataatagtaaacattatttatat

SEQ ID NO: 66235 - DNA, 213 bp, Zea mays
agcttgttctattaattacataaataaaatacaaggttgtagtattaccttgttcgttggccatgcaacgggcataaaaagagcatctcccatactctctacacctaaatatgggtcgtggtagagtacttttcccttttttagcacacgagttcacaaaaacctgtgttaaactccctttcaagaaggaacattcttgcaaccttaatggtt

SEQ ID NO: 66236 - DNA, 243 bp, Zea mays
acttgttagacaagctgacggtggggtaactttgttacaatcccattatgtgggaaaaagttttgagtcgcctttggtttttagtggaactgtggaatccctgcttccaaacaacctttatgtaccccccagtgttggccttatttaaagcaaaaagaaaatccgggcaagtaaattaaggcaaaaagggggaattccaaattttggaccaattatccttcccccaattattccatttttggg

SEQ ID NO: 66237 - DNA, 221 bp, Zea mays
  unsure (1)..(221): unsure at all n locations
agcttgcccaacctcacaggcagctctttgtcatgttccttccacaggatatcaacatagttgctaagcctcttattttcagcttcgagcaatttcatctttttggcccaggtgggaaggtagttccaccggcactttcctttttgttggctgtcgacgccccaaccgaaaggtgaagcccagtgtttatatggtncattaatttacaattaaaccaacta

SEQ ID NO: 66238 - DNA, 91 bp, Zea mays
acttttctgcaaaaatgagtatttgaaatttgataaactttatcttgatttccaacaagccagcatatccttgtagaagtctttctcttta

SEQ ID NO: 66239 - DNA, 153 bp, Zea mays
  unsure (1)..(153): unsure at all n locations
agcttttgactccgtttcttggtgctttttctcattgaaggtgccttttctccaccctttggatcttggcaaatggtttgggcggcaatttttgattttcccaaatcttgtttgggttttctttcctttccaccttcaaanttgcttggttaa

SEQ ID NO: 66240 - DNA, 108 bp, Zea mays
tagactccatatatagtacgggacgcctttgtacccgtccaactcccttcagctgctgcctggacaactatcttgtactgcccatgcaattagtgtatgggacacctt

SEQ ID NO: 66241 - DNA, 149 bp, Zea mays
  unsure (1)..(149): unsure at all n locations
agcttccttttgagccatctctgcctctgtccgtgctggcaccgctgcctctggctcatcgtaggcggccgagggtttctttaactaagcgagaaaagcctcgggcgggaaggccgactganccnanggactcctaggtgtttgggata

SEQ ID NO: 66242 - DNA, 189 bp, Zea mays
ttattaataccatcccgtcaagctataattaattcaataatccatttagcttggctcgatctgtttttccacaaccaccactcacatgcaaccagcaatagcaaaagctttcggcccaagcttgtcctatcccttgccggtccgtttgtacacttcaaaccttggtacccaaaactggcacagtttcta

SEQ ID NO: 66243 - DNA, 237 bp, Zea mays
  unsure (1)..(237): unsure at all n locations
agcttatttcaatttttgctcccatacatgtttgatcccccttcacttcgacccaaatacaacaaaaagacccaattttccttattgcaacatcaaccacactattcacaacctcaaggcanctattttatggggtaagggacaaagtgggaaatgtccaatgcaaactaatataattatcattcttttggtattttactaacnaattctttgaatggcttaaatctcccttttttt

SEQ ID NO: 66244 - DNA, 151 bp, Zea mays
tgttgactttaagttctttcatgaatcctcttattgtctctgcgtcactatacctcccagcatctgaatatatgtttgccaagctcatatagtagccgctctttcccaggagtacaatgccccaatcaattctctttgggaaaaccccaat

SEQ ID NO: 66245 - DNA, 206 bp, Zea mays
agcttctaaagggagagcacattttgggactatccaatgttcattttgagaaagatagggtttgtagcgcatgtcaagcaggaaagcaagttggtgtttcatcatccacacaagaacatcatgacgactgacaggcccgcttgaacctactccacatgggacctattcggccccgatcgcttacataaagcatcggcgggagtaag

SEQ ID NO: 66246 - DNA, 146 bp, Zea mays
ttcataatctttattgtagcttatttagtgtatttctttttttataattggccttaagccatggatttcaagattttctccatgagtccttttcattccactttttctttcattttcttacctttaaaaattaggcctttaaaatt

SEQ ID NO: 66247 - DNA, 203 bp, Zea mays
agcttctaaagggagaacacgtgataggtctaaccaatgttactttcgaaaaagatagaccttgtgcagcttgtcaagcaggtaaacaagtggggaggagcacatcacaacaagaatgtgatgaccacgttcaagaacctctggagctgctacatatggacctcttcggacccgtcgcctatctaagcataggaggaagtaag

SEQ ID NO: 66248 - DNA, 115 bp, Zea mays
ttagagatatttgaattatctttgtaaaaaacattgtaattgggaatcagacattactctgtaaatttgttccatatccttggtaatactaatttttaaccatttttcattccat

SEQ ID NO: 66249 - DNA, 161 bp, Zea mays
  unsure (1)..(161): unsure at all n locations
agcttctaaagggagaacacgtgatatgtctaactaatgttactttcgaaaaagatagaccttgtgcagcttgtcaagcaggaaaacaagtgggaaaactctcatcatgcccanaatgtgatgacaacattttaggacccctagagttacnnnatatggac

SEQ ID NO: 66250 - DNA, 78 bp, Zea mays
tattctagtgacactacttaatactcattcttatgtccgatcgcccaactgacaattctttgatgtgatacattatgc

SEQ ID NO: 66251 - DNA, 200 bp, Zea mays
agcttctcctggacaagtaacgcactctctgcagagtgcgaagctgctacgtacaacagcagaggagcccctggcgcgggtggagttagcgtccgttagatctatcagatactgtttcagctctttcgaaggctttctgctgaactgatccccattgaaagacttcgggccggacttcaatactttcgaagaatggtaaa

SEQ ID NO: 66252 - DNA, 186 bp, Zea mays
tgaagccatggtaagtagcataggcaagtaatatgcgaattgattcaagcctagctacgggtgcataggtttcaccgaaatccaaaccttcgacttgtgaataatccccttgggccacaagttcggggcttttgttttcccttggtcatcccacaaccaatggcctcattcttgttttgtttgccg

SEQ ID NO: 66253 - DNA, 155 bp, Zea mays
agcttagaattaaactttgaaaactaagagaaaacatcatcaaatattggaccttcgtgggactaattctttaaataatcacctttgtggtttaaggaacccccttcttctaattaaaagattcaaaatttaaaagacttctttattaccaaatt

SEQ ID NO: 66254 - DNA, 105 bp, Zea mays
tgaaaaatattcggatatggttcgaagagttgaaacttccttcgaagggtacattgtcaaaaatatccctcagaggaccaaaatgacacatgactgtatgttgct

SEQ ID NO: 66255 - DNA, 160 bp, Zea mays
agctttaacgtggtggctgaactaatctttttcaaatggtggctgaactggtggtcagtttcaactcccgcaggcaaaataatttttgctggacacctgcgtgtacggcctgtgggggcagaaccatagccatggcaagaacaggtcaaaagccaaaaca

SEQ ID NO: 66256 - DNA, 150 bp, Zea mays
tccccggcacgccaaagatacatagatctcggacgactggacacaaagggattgcaccggcagcaaatatttatagtcccaagtgttgtattctctatgtccctgggcccacatgtcgggggcccacttacccttttgtgtcatgtcccc

SEQ ID NO: 66257 - DNA, 218 bp, Zea mays
agcttaccgcatttgaagcatgagcgctttcccttggctttggtcttgcttggcctgtcccttgccgacccttaagtgttcgtcttgaattcttttgatggaatgaggggcccatcttctttcattcatttaaagtcccggcttgccttcaattttggtggcccatctttacttaggttaggcggccctcccttttgctttctttggttggccctttg

SEQ ID NO: 66258 - DNA, 73 bp, Zea mays
tgtgaaggttcttcatccccacatgtgctaagcgattatgccacagctcagcccatgctatgtcttagcaaat

SEQ ID NO: 66259 - DNA, 251 bp, Zea mays
agcttaatcctgagaagtgtgtcttcggggttccccccgaagcatgcttcctaagggttcattcgtctcccaaccgaaggcatccgaaagccaaacccgggaggaaagaatcacgggcccattcaccaagcattggggaaccccatcaagggacctttaaaaagggggggtacaggaatgggtccatggggattgcccttcgcgggccctttgaagcccgctttcattctcaaccgcccttcgggcgaaaa

SEQ ID NO: 66260 - DNA, 149 bp, Zea mays
ttatcaaatggacgtgaagagtgccttcctcaatggtccaatcaaggaagaagtctatgttgagcaacacttcccggcttttgaaagataggtgagttattccttaaccaatgttcttattaaaaccttcttcttaaagggcggctttt

SEQ ID NO: 66261 - DNA, 202 bp, Zea mays
agcttgtgaagattcttcattccaacatgggctagtcggcggtgccagagccaacccatgttagtcttagcaattaagcatgtgtcgagttcagctctatcaaaatccactaagtatagctgaccctctaacacacccttaaatgctattgaatcatcacttcttctaaagacagtgacacctatatcagtaaaaagacagt

SEQ ID NO: 66262 - DNA, 129 bp, Zea mays
tacttagtgacactatgaaactcagcttgccaagcttaaaccgaggacccccgccaccggattagcgcaatcgtgctcgccggagttcagaaccccgccgacgcacgtggaaccagtgtaagttatctg

SEQ ID NO: 66263 - DNA, 156 bp, Zea mays
  unsure (1)..(156): unsure at all n locations
agctttatggatgatagcttctgcactacttttgagaggatctgccgaaggtgtttcttcttacaggatcttcggcgaccaagcatacccccgaacagggtccaaaccctttttcctaaatgattttggtggtttgaataggncccaacccaaata

SEQ ID NO: 66264 - DNA, 88 bp, Zea mays
tcttcttgtcgtcaatgatcgacaccaactctagcgcctcctgctagcgatgtttgattggggttattcaagcacaaaaatataatat

SEQ ID NO: 66265 - DNA, 150 bp, Zea mays
agcttgcattttgtcatgtttttcttgtcgttgctgcaaactctgcagggcatgcattcttccatgaccttttttgcttgcccaagttatttcttaattcttgggggggccagggtttcgggggattttctcggcccggggaaccattgt

SEQ ID NO: 66266 - DNA, 109 bp, Zea mays
tcgttcatttcaaaacttaaagaaaaatatgtgaatgtataggtgatataccatttggtagttttgaatgtagttaagtaagtgataacttaagattgttctggttccg

SEQ ID NO: 66267 - DNA, 202 bp, Zea mays
agcttcgtctgcacgccagcacgatggcttgtatccgaagcctactcgttttataaataaccattgatgcttcaatacttcactcacacttgtctttcaaatctccacaataatgaacccgtacttaagaatccaattttcttgttaggatgatggaagaaatgggaagaggaaagaagaagagttgcagatggcgacgtac

SEQ ID NO: 66268 - DNA, 193 bp, Zea mays
tacccatgacgaggcatgtgaccagttaaagggtcctcgatcatcaagcctacatacgcatccaatccttaatcaacctgggtagaacatcacctgttcctagcccaagttcccggtttttaagttactttccattcctttaaggatttgttttggtgttttccctttaaggattgaaaaaagaagccatcaa

SEQ ID NO: 66269 - DNA, 100 bp, Zea mays
tcaagcttccaagaagaagttttaggcacgaattacaatcaaaattggttcccaaaatggaaactcaacttcttatcttagccttagtaacccccaaagg

SEQ ID NO: 66270 - DNA, 207 bp, Zea mays
agcttgtgaacaatacaaattcagaagggagaaatcagcttcagcagatcagcccgaaacatatggctcttatgtgaaggacattaacagtagcaagaagggtgcttggttggggcttctccaaattattcccgaaagagccagggagaaaaaaaaccttggattaaacggtttttttggttccaaccaaacaaaagaaatgttttt

SEQ ID NO: 66271 - DNA, 135 bp, Zea mays
tggtgccaatggagaaacagaaatccttgaagtcttggctgtcaaactgcttgccgttgtcaactgttaagttcggaacgggtacttccgaaagcggccaaacatattgtttctgtcccagaaaaaaattttttg

SEQ ID NO: 66272 - DNA, 205 bp, Zea mays
  unsure (1)..(205): unsure at all n locations
agcttacgatgtgagcaccacgatggtgtgtcaaggcatcggtacaggtacgcgccgcctctgacgccggaagggttttggaacattggtttcgaatcagaaatgtagcactacatcaagtagcaggaaaaccttcagtgtccttnggtcaccccaagaatattgtnnaatgactaanaacaagttgcatgtcgctgcctcaagt

SEQ ID NO: 66273 - DNA, 107 bp, Zea mays
tctaaagggcagaacacgtgataggttcgactaacgtgcaatttgaaaaagacagaccttgtgcagcttgacgagcatgcaaacaaatggtgaggagccgcatcaca

SEQ ID NO: 66274 - DNA, 195 bp, Zea mays
agcttgcacttacgaccaaaccgcacccacatccatatcacattcaatggctcaacaatagtggtaaggtcaaggtaaccaagttggtacgaattaattttgctattggttcatatcgtgatgttgttgactgtgatgttgggcctttggatgcttgtaatattctgctaggttagaccatggcaatttgattca

SEQ ID NO: 66275 - DNA, 160 bp, Zea mays
tgagttttcgccaccggaaccatttcttcgtttttcgcaacgaacatgcccaatccactactttaggtccaaaactcattttggggtggtttcgcgcaattttcgtttgccggcaacgtttacccaatttcccgaaaaacgggttggtccgggggttgca

SEQ ID NO: 66276 - DNA, 214 bp, Zea mays
agcttccttgatttcgtaaggttccaatgtaacgaggagcttacttgcccttaattctgaatctttggacacccttggtgggtgataccttaagataaacatgatcctccaaccttgaattgcaaaagcttccgtctcttgtcatgaatatgctcttttgtcacggccctgaaccttgttccaatgacttattagatgatgtcttgaccttttg

SEQ ID NO: 66277 - DNA, 127 bp, Zea mays
tattgcccaccctaacgttgaccaagtcgttgcaggttccaccgttattgatggtgtgaacaagggaccttcttgcaccatgtacgagacatgcctgacaaagggtgtgagggagcctccatctgca

SEQ ID NO: 66278 - DNA, 251 bp, Zea mays
  unsure (1)..(251): unsure at all n locations
agcttgcgatttatccaatttaaaacaagcaccatctcttaacataagatttttctatggggataaactcaacaccaagagaatggcattaagtagccacaaagcaactaagttttccttatttaagcaaccccttttattattgtgaaaagggcaaaaccnaaatttgcctaaaaaataagaagaaaaccttcataaataatgggaacttaaaatttcccctttgagcccccttcatggcaacaaataat

SEQ ID NO: 66279 - DNA, 71 bp, Zea mays
ttgcttttttcacggccagtgtaccctcatatgtagtccttttcaaactttatatgcaaatttcaaatctt

SEQ ID NO: 66280 - DNA, 228 bp, Zea mays
  unsure (1)..(228): unsure at all n locations
agcttgttgcattcctttccaagtcacattcataactaanccttacaggttggtatgtaatacttgaaagtcctcttttggtaaaagcttttagtatccgaagtggaagggctccgtttcccttaaagggtaaagggccttttcttgtggctaccccaatgccttggaattgggtgtttaccccataaattttattcccaacctacctttggaatgaaccaaatttat

SEQ ID NO: 66281 - DNA, 191 bp, Zea mays
tgttgaattagcggagaagaatgatcttgaccttgtgtgcacagctcatcagggaaccaaaagtattccaaccattaggccttattctcaatttttggtatagaagcgaatgtgttttaaggtgtggtaaacctggttggtttggggggaatatttttcttccctggcctttttccaaaaaccttttcctt

SEQ ID NO: 66282 - DNA, 203 bp, Zea mays
agcttttctgccaatctgggcagtttgaacaagaaaagcagaacttaatgcaaaacttgaagccgaagttcaacaaaattcagatttgaaaaaactattggcgggccttcaagaaaaatgtttggaatttggcaacaaatgtattcaacgactaagaaaatttttccactcagttggagccagcagtgagaaaatcaccccgt

SEQ ID NO: 66283 - DNA, 122 bp, Zea mays
tctttcttcctcctcatcctcatttgtgcttccgctatcatttgcattagccacacaacacatgtggggaattcgaaatgggtaagtgttgggggcaatagataatcccctgtggttccaac

SEQ ID NO: 66284 - DNA, 107 bp, Zea mays
  unsure (1)..(107): unsure at all n locations
agcttgcttacttggtaagatgaccaagggcgcctttcacgnggtttacccggagaaaggacattagattttattgggaacttcataccatactgnanntgtgtgcg

SEQ ID NO: 66285 - DNA, 91 bp, Zea mays
ataaaatattgaacgtactaaaacacatgtcgggaaatattggaactggtataacctgggaacctgaagtgaaagccgggcaatggtactt

SEQ ID NO: 66286 - DNA, 117 bp, Zea mays
tgcaataggtgaagtaaagccacaagaaaggatgatgatgaagggagaatttggatgacaaataggtgtcgttgatgggagcgtgttaaagctggttttagtgaaaaataccttccc

SEQ ID NO: 66287 - DNA, 216 bp, Zea mays
  unsure (1)..(216): unsure at all n locations
agcttgtatcttgaaaacgaaatttcctgtaataagcttatttctggaaaaacaaaatgggttaaattatggtttttggaaagaacccttcggtaagggaggaaaggcnnccccaattatgtttattggcccattggaaagttttgggtgggccctattggggtattcccattccccctttccttcttaaaaaaggttgtccgggccttcggattt

SEQ ID NO: 66288 - DNA, 117 bp, Zea mays
ttgaccttcgtcatgccgtcgaagaagacagcaggtccagggctacactgtagccactagtaccgttaatcaagaaaacggcttacgcgaaagcttgtaaagcccagaagtaaggaa

SEQ ID NO: 66289 - DNA, 204 bp, Zea mays
agcttgacttagcctgttcacagttgttggactccccattttttacttcagcaagtgcttgcaacaatgatgatgtatgctcgaggattgttgcgaagttttaaattcatccattgtgttcaaattctgccatgttaaaatcagggataaaccttttgtgtgggtgcacctggatggatcatgtttcttcagttgtctccatca

SEQ ID NO: 66290 - DNA, 175 bp, Zea mays
tggggataactagtcgtataaggtgaatatccaaaggtaaaatagtatctgttaggatgagatagatatgggtgtgaaagtcacctagaggggggtgaataggcgaaacctgaaatttataaacttaaacacacacttaaggttcggggggttagcgttagaattaaaattcaag

SEQ ID NO: 66291 - DNA, 107 bp, Zea mays
caagcttcgcgaaggatgcttgagttgaagccgttttgaatttcaagaccccttcaaagacgttgcccgttgtggtaaagggccccctgggccatccttcccttttt

SEQ ID NO: 66292 - DNA, 210 bp, Zea mays
cctagggttaagcacacttcaagtcaccacatcacacatgttttgaaattttacctaatgaatgcattctaggtgtgacaaaccaaatgaaatatcaatgcatatgatgtaatgcttaagttttagtgccagtaacacccagggtgttacatccttccctccaaaaaaagaatctcgtcccgagatttaaaggtcctagggtaaataatg

SEQ ID NO: 66293 - DNA, 141 bp, Zea mays
tttaaaaaataccaggactctgcctcgacatcctatgagcagcttgatcgacgagttgatgaacttgttacatgcatggatgtactggaggctcgtcccccaccaccaactccagccccatctttactctcctgtgggacg

SEQ ID NO: 66294 - DNA, 217 bp, Zea mays
agcttgtgaaggttcttcattcccacatgtgctaagcggcgatgccacagccagcccatgctagtcttagctattaagcatgcattctagaaccgggccttctttctttttgccaaaaatcaacctaaattaaaagtttggcccgtctaataccaccccttaaaaaggctagttggaacccatcaactttctttctaaaggacaggaccaccattct

SEQ ID NO: 66295 - DNA, 69 bp, Zea mays
tctttgtgacctactttgagggtggaggcaccagatgggtaacttgacagttgctattgtttacttttt

SEQ ID NO: 66296 - DNA, 192 bp, Zea mays
agcttgagcaagtctcacggcctcaccaggaagctatctgagggcttggatcgaacggaggaggacgggagaggggctggccacggtggttgctctcaggcggcactggcgggtcgcggggaggtcgccggagttaatggctggctcgggcaagtccggcgaggtacggagggggtaacggggaaggcagcc

SEQ ID NO: 66297 - DNA, 126 bp, Zea mays
tgtagctaaattagacattaacatattcttggtcctcggagccagaagagccatatgttcttgaccacttagacatactaggtgatgaaataatttgtggatgagaaataatggaaagaatctttg

SEQ ID NO: 66298 - DNA, 142 bp, Zea mays
agcttaattgacatatcctttttaccatgtccctttcgtttggcacatttgcatatatttcctaatctctcttatggccaagggcttaaaaactaatattgttttccattgaggtaatctttggtgtttttgaaaggtcctt

SEQ ID NO: 66299 - DNA, 116 bp, Zea mays
cacgcttatgacgcttacgtccttgatacctacgtgtgcgtggagaacccggattgtttatgttgtgcggttgcgatatttactgtttggtggctgcatattctgatgatgcacta

SEQ ID NO: 66300 - DNA, 216 bp, Zea mays
agcttgctttcaaaataaaatgtaagtttatgtaattcgcttccgcatttcttcatctccgatgttctgtaatgtctacaagatgggtgaaacgtttcctggtaagggtgaaggaaaggatacccgaacttgtcaagtaagttcaggggccccctacaggggttgtctgatgtctgcgtagacaagggaccacctgtaggttgggcccaaaattac

SEQ ID NO: 66301 - DNA, 104 bp, Zea mays
ttcctgctcacaaccttcgcgctgtatcaaccttcgtattattctggtctgctgggatacccacttgaagtccgaacatacctgtttcacacatttaaacttcc

SEQ ID NO: 66302 - DNA, 177 bp, Zea mays
tgataagcttaacaattcaaaatcaagaactccaagtgaaacttgaaatctgcaagaacttaaacacttcattctttagcggccaaaagtctaagggctaagttccttcaaaataaataaattatttggcaaaaacaatttggtaaccaaaaaattaattcaataaaccttttcctt

SEQ ID NO: 66303 - DNA, 252 bp, Zea mays
tgcaatctcttcaagtcccacaatcttagaccagggtgtcattaagtgtctcaaagaacctgagagaagtgtggattcaggtgagggtaatcctggtcggatccccggatggcttttggttttttccgccaaatacgaaggccctttttcattttcaattcctccttttttcctaccaaacgccctttccttaaaggtggggaaaattttgggtgcaaaacgtcccaaagccccaaggaaggaaccatcccc

SEQ ID NO: 66304 - DNA, 210 bp, Zea mays
agcttctagagccaggaatcgagctctacctcgccggagacaccggatcgacatcgccggacttcacccgaccgccggcgtacgtagaccgagctccacggggagtctttcttcgattcattgcacgggtagtttccttagcaccccgtgaagctccatgtgcccttggattgaaatctaccgccgggagccgaccgaagcacacgccgc

SEQ ID NO: 66305 - DNA, 104 bp, Zea mays
tcgccaaactatgtatgttcattgttgggactatgcttcgtcgccgaaggtcctgcagggggaaacagctttcggctttaagcttgcttatatcatggattaac

SEQ ID NO: 66306 - DNA, 213 bp, Zea mays
agcttgggttagtccttgggagcataatagtttccacgctgctgtgctccacgtgcatcaggcaagttgatgcttgaatggattggtacgtaaggcccgagtgatttcggtgcttccagtcctaagtggtggaattgcgatggttatccagagttggagacctccctgaccagcttggtctcttggtctgggccaatgccgttgtccaaaatt

SEQ ID NO: 66307 - DNA, 67 bp, Zea mays
tgaaaagtatctacatacagtccgaaggtattgtagcttccttcgaaggtttctctgccaaaaatat

SEQ ID NO: 66308 - DNA, 201 bp, Zea mays
agcttcgggtctcttgccctgcaactcttgtcaacatgaccagaaataactttgggaatcggttttaagggaccgccctttcttatcccccattggctttttaactttccgaaagcccccaaaaaggcaaaagctttcgttatttcaggcaaataatttattttatggtaagcctgaagttcaaagctttttatttgcaat

SEQ ID NO: 66309 - DNA, 129 bp, Zea mays
ttataagtctgacagcctatctttcagcattatttactccagtttttatagagtaccaagtccatctcccttaaacaaagttgcacactgataaatcctctaccatttttgaatataaatgggtcccta

SEQ ID NO: 66310 - DNA, 253 bp, Zea mays
gctttttttaaaaggatataattggaaggttaattcccttaaaacaccaaccggtggttaattaaaaaacactctccttccttataaagaaagccgcgccctttttttaattgtgggggcctttcaaaaagcccaaaaggccccccccaaaaagaaaaaccaattgtgggttaattggtaaaaattggcccccttaaaaagaagaggaaattttttttttccttttaaattccaacctttaaaatgggggcct

SEQ ID NO: 66311 - DNA, 107 bp, Zea mays
tcggatctttaaccttgcaactcttgtcaatatgacccgaaacaacttgggaatcagttttaaagaattggccctttctggattcccacattgccttttaagctttc

SEQ ID NO: 66312 - DNA, 249 bp, Zea mays
ccgcaccttaagcacctgcagcatgcaagcttgatagtctaaccgggagttcctgtatgaatcttaactaaattggaaaagtctgtaaatggcccctccttaattaacacccattgccaaaggaatcccctcgccccgggtattattttttttaacaccccattggccccaactttttttaaagaaaaaaatggaaaaaaccaccaacaaatttttcagggaaaaaaagggcttgtaaaccaaaccttt

SEQ ID NO: 66313 - DNA, 145 bp, Zea mays
  unsure (1)..(145): unsure at all n locations
gttaaggaagcaagtggccctcaatttcaacaatgcatagtaagaccaaccttaaaaagttattggtaaggaccttcggttgttcggtaatgaccaattaatttctggtttttttcctttttttttttctnttaataanaccctt

SEQ ID NO: 66314 - DNA, 91 bp, Zea mays
agcttcgactcttctaaccatttcaatatatttttcaaacttcagatctttagcctttcaactcttttcgatattacccgaaacaacctgg

SEQ ID NO: 66315 - DNA, 142 bp, Zea mays
  unsure (1)..(142): unsure at all n locations
taaagatgaaaataaggccttgattgctaagtatgacatacttgtcaaagctagtgatgaaaataagntccttgcattggctaaagtatggccccacaatatttcactttaatgaatcgttaattaccaaaattcaattaaa

SEQ ID NO: 66316 - DNA, 199 bp, Zea mays
agcttgtgattttaccaattgaaagagcacaatctctacttatgaatttccatgaaatatcttaaaagagattgtattagtaacacaagcaatagtttcctatttagcaacctctagtatatgaatgacaagaaggttactaaaacaaggaaacctcatgatatgaactaaattacccttacaagtatcatgcataaca

SEQ ID NO: 66317 - DNA, 119 bp, Zea mays
tagaaaaatctggtatgaatctgcgataatatccagctagtccaagaaaactcctgacttggtgaacagtggttgggggtttccactccataatatctttgaccttgctagggatctac

SEQ ID NO: 66318 - DNA, 193 bp, Zea mays
agctttaccttgattcccaaaagccagcatatccttgagagtctttttctttaaacgggtaagacttgcgaaaatacacttcgtatttagggtttttgaacccatgttgttgcaggtactaggtttgtgcttctgtggatggtgttaagcgccgatgggcccatccttcttataagtctaagtaactcttcta

SEQ ID NO: 66319 - DNA, 118 bp, Zea mays
tgacattgtctcccggttggaagccaatgccattcttaatgccagggcgtctcccactatagagcatgcttctagcaaatttaaatttttcatttttctaaagtcattgcttcattca

SEQ ID NO: 66320 - DNA, 215 bp, Zea mays
agcttggacagtgttttgcaaaggttcttggggagccttcggtgcaggaacagctgcggtcctagtagcaccttcaaaagtcaaaacatgttatgcagtcaaactgggattcaggttgcaccaataatattgctggagtaccaaagcacttctattgggggcttcgaaaacctaaagggcaatggggaataaagaaggggccatccctaaatact

SEQ ID NO: 66321 - DNA, 69 bp, Zea mays
tgtgaacaatacagattcagaaggagaaagcagctttatcagatcatccgaagcccatgctcttatgtg

SEQ ID NO: 66322 - DNA, 173 bp, Zea mays
  unsure (1)..(173): unsure at all n locations
agcttgtacagttctaatgagncttatgtatctgttctatgacaaagggaaattctatnaaagtttattgaaagtttgcagtggcttccagccaaagcaagccggttagggttgtttggacccatttttacaaaaggaccaccaaaaccttcgggtattttccattttcccct

SEQ ID NO: 66323 - DNA, 125 bp, Zea mays
tctaaagggagagcacattttaggattaacaaatgttcattttgagaaagacaggatttgtagcgcatgccatgtcgggtaaagtcaatgtttggagttcccatcattccacaacaagtaaacat

SEQ ID NO: 66324 - DNA, 205 bp, Zea mays
agcttagggacatataccacttttggctcatcatctgagctactactatcatgaagctcattatgaagagagagttctttgcttcgactttcacaagcccaaaggtccactgggtgccacctaagtttgccggaaaaagaattagccagtcggtctaattttttcttttgaaggattgaccatttggaaagaacaaccccctgtt

SEQ ID NO: 66325 - DNA, 122 bp, Zea mays
ttttgaggacaagaaggctgtgaatccctacattgctggatttatcgagtcaatggaaaaaaattgagagtaagattactaagggaaatactgggaagggcaatgtcttgaagaataactag

SEQ ID NO: 66326 - DNA, 124 bp, Zea mays
tttattgtctctattgtcaaaagttggcttcttgtggggagaaatattgattatgggatttaggggggagtttttgaaaatcttttgattcaaatcttcttttttgaaaatgacttcttctttt

SEQ ID NO: 66327 - DNA, 105 bp, Zea mays
agcttatgaagattcttcattccaacatgggcttttcggcggggccagagccaacccaagttagtcttagcaaccaagcaagtgtcgagttcaagctctatcaaa

SEQ ID NO: 66328 - DNA, 77 bp, Zea mays
tcacacaaaatcttatgccaatgtttaggattatcagatattttcttttttatcaaattaatcaatgttcctattgc

SEQ ID NO: 66329 - DNA, 197 bp, Zea mays
agcttctaaagggagaacacattttgggactgacaaatgttcattttgaagaaagacagggttttgtagcgccatgtcaaggcagaaaaagcaaggttgggtttcccattcattccaacacaaggaacattcatggacggaccccgacagggccgcctttgatacttactcccaacatgggatccctatttcggccc

SEQ ID NO: 66330 - DNA, 102 bp, Zea mays
  unsure (1)..(102): unsure at all n locations
tttcgcgagcgtgctggtgtcgtccgcttgctcgggattggcgtgtcacggggagacagcgtctcgtcctttcgncctcaaaccgcgaggttccgatgtccc

SEQ ID NO: 66331 - DNA, 264 bp, Zea mays
agcttctaaagggagaacacttgatagggtttgaactaacgttacaaatttcgaaaaagtataggacctttggtgcaggcttgttcagggcaaggttaatacaaggttggggaaggaggcgccaattcaacagccaaagaaaatgtggattgaaccccaccattcaaagtacccccctgggaagcttggcttaccatattgggacccttcttttcgggacctcggtcggcccctattcttaaagccattaagggagggaaagta

SEQ ID NO: 66332 - DNA, 108 bp, Zea mays
tcttgcaagagacacctaattgtgtggtgatccttacagggttcttagtgacctgtgaagattaagaaaggaaacacctcaatccggttctaaagtgaatcgatttga

SEQ ID NO: 66333 - DNA, 189 bp, Zea mays
agcttgcatgacaaaaacgtgaatgctttaaatctgactcatcagaaaaattaacagaattcaccagtttgttacacacatcatgcaatgataagcggaacaaccctccgcagtcatatcctttaccaaccaaagtaacatgtttcgacacaacatatttattagactccaggaacaactttgtatcca

SEQ ID NO: 66334 - DNA, 85 bp, Zea mays
tcgggtaagaccgaagggtgcaaaataacactcgttgcctgttttctcgtttgcccggagataacgaattgcatttttctccgta

SEQ ID NO: 66335 - DNA, 88 bp, Zea mays
ttatcatagtgctaaattttaacactctctaatgcgaaagcatacccctaaaattactaacagcttgagatggccaagggctaaactt

SEQ ID NO: 66336 - DNA, 211 bp, Zea mays
  unsure (1)..(211): unsure at all n locations
agcttgggaagggtcttcatcccccatgtgctaagcggcgatgccacagccagcccatgctagtcttagctattaagcatgcattctaggaaccggcctctttcttttgcaaaatcaactaaatanaagtttgcccgtctaatacacccttaaaagcctagtggaaccattcacttccttcttaaagacaggacaccatcttaacatttgt

SEQ ID NO: 66337 - DNA, 118 bp, Zea mays
tcttgttgtcagacccttgaattgctttcaagttctcatgctctggtaacacagtatgttcagtatcatttccattatatggagcaatcagttcccccaatggttaccatgaataacc

SEQ ID NO: 66338 - DNA, 196 bp, Zea mays
  unsure (1)..(196): unsure at all n locations
agcttgcactgaattatgttatcaatggntccagcggtatcaccaatcttgaaagcaccagcttgaattcctccaactgttgcagggtccaatgatgacctacaaaccatattaaagctgttttaccaaaaataagggacaatatgcagatgacaagacatggagtgtgccantagcaatgtctaggatgattgga

SEQ ID NO: 66339 - DNA, 120 bp, Zea mays
tctaaagagtgaacacatttaaagactattaaatgtctcctttgaaaaaggaataggccttgtaattgtcttggccaaagccatgaaaaaaaaaagtttgggagccaagtccaacccccc

SEQ ID NO: 66340 - DNA, 317 bp, Zea mays
atccaatactcaagcttggaagggaaatacatttgtggggcttcctatcattccggcttttcccctaagtgtctttccggaaagggcattttcggagaaggtttcccattggcaactttaggtaggaaaaaaatttcgaacaccggcgagaattccctgttccttttccacccaatgggtttggaggtatcaacccccaaaaaatttgtaatttcccccacccccaatttccgcaacgcaaaaaaaaccatttatctccaaaaacattttttccaataaaatttttttattttcaatggggggaaaaggaaaaaaaa

SEQ ID NO: 66341 - DNA, 222 bp, Zea mays
  unsure (1)..(222): unsure at all n locations
agcttgagccgcagttgcaagcgctgatgagctttggtgctgncaagatggagcaccaaagctccgatccatctgtggtcctgcagcaacagcagcattcaacagccaacgacatatggttgcagcttgtctaagccagaacccccaaggctgcagcatacttagctgaagccttccttacaacagcaggcagcttggtctttgcaactggcagcagcaaca

SEQ ID NO: 66342 - DNA, 191 bp, Zea mays
tctaaaggagaacacgtgataggtctaactaatgtgcatttctaaaaagatagaccttgtgcagcttgttcaagctaggttaaacagggtggggaagcttctcatcattcccaaaaaatggttgattgaacccaccattttatgtacccctttggggaggaatgccctttcaattattgggaacccttctt

SEQ ID NO: 66343 - DNA, 129 bp, Zea mays
  unsure (1)..(129): unsure at all n locations
cttaagtcacctgcggcatgcaagcttgaggctatgtatagattaccactcctcttttttgcgggannactatccaagaaaccaaggtattccttttggcctcggtattggatggtntcttttttgaac

SEQ ID NO: 66344 - DNA, 136 bp, Zea mays
tggataaatgtgtaatttggaacaaatatttctcatgacttcagttttcaaagcatttaaaagtaatgtcttcgattgggattcattttgtctgcaggacctgaatggcgattgaactttattcaaacaaaaaaaa

SEQ ID NO: 66345 - DNA, 183 bp, Zea mays
agctttacttaattgattttgcaaaagaagaggccggtctagatgcatgcttaattgctaaaactagcatgggctggctgtggcatcgccgcttaacacatgtgggggatgaaaaaccttcccaaaccttccttaaggggagaacacgtttatagggataacttatgggcaatttccaaaaag

SEQ ID NO: 66346 - DNA, 173 bp, Zea mays
tgttactactgttagatgccaacaaaaataatccttatgacagaacccacccctagttaagggttgtagttacaaaagttggcccattttacaacaaacttttggtttatttttggtcttaaaggcaatagtcccttttttttaatttttggaaacacttcaaaaattttcct

SEQ ID NO: 66347 - DNA, 212 bp, Zea mays
agcttaggtctagttcgaagatttagtattgtcaatgacgcaattgccaaactggcaatataatggtggtcgttttaatgttttggcgtcgagggtttatcgattcatcatctgccaaacgttgtgcttttcctttcctacccatgtggtccgttttttcagttttccttgttggccctcaaattttgttttgttgttggcagtggaggcct

SEQ ID NO: 66348 - DNA, 102 bp, Zea mays
tgcccaaacgcctcgcggcggctctgtccaatccatcatcgacgagaaattccccattacaatgctagcgggttatgcaacattcgggtgaatctttcacac

SEQ ID NO: 66349 - DNA, 226 bp, Zea mays
  unsure (1)..(226): unsure at all n locations
agctttcctctctcccccttatacatttaacaccaaaaaccatacntcaagcaagaaacatagggatgaatgtcaaggggacagccaggggtgttaagggagggaaaaaacgaacttatcaaaaacttcccccctttactttattggaaacaatatggcacttaatcaacattttaggttaaagaatacattattatgcaaaaaaaggaattaaatacctttccct

SEQ ID NO: 66350 - DNA, 137 bp, Zea mays
tcggcatagtgacatgactcaagacgatagtgtgaaccgacttaaagatgaaatgaccaatattacccatggttagattgtgccatggattgttaatccaattggtaaaaggggcattaaaaatggtaaattttttc

SEQ ID NO: 66351 - DNA, 213 bp, Zea mays
agcttctccataaagcagcacctctgtttaaactgaactaataaattaagttgtgtcgtatgatccgatatagtgcctttatttatcttatattactattttatttgtgccaagaaggatatccggaagcgtgcccaaaattctatacattcacaacaattgagataagagtcagattctccaccttcacatttggggagatagaaagtgtga

SEQ ID NO: 66352 - DNA, 193 bp, Zea mays
tcagcaacttcaacactcttttttggaattgtgcttgaagacttaattgtctccaagacgtctagtacatttaccattcttttcctttttggggtcactgatggcccccatttttggttttttttgcttggttttcaattatttttaccttgccaggtaccttcaaaaacctttcctaatggtttttttttcc

SEQ ID NO: 66353 - DNA, 97 bp, Zea mays
agcttctgctccaaacttcttcaccactgcctttgccaaacttcctcccaactttcccaaaaccccctttcagccctatgcaaccttgtaacccacc

SEQ ID NO: 66354 - DNA, 142 bp, Zea mays
tgtgagattaataatatgtattaaatatgttcatctctgttctaaatcttaggtcaccataataataaaattggatactattgagttttgtaactttgtaaaataacaactctaaggaagaaaaataggtaaaattcttatt

SEQ ID NO: 66355 - DNA, 285 bp, Zea mays
agcttgatagtgtgctgccaatatttctttttttgttttaaaatttcttggaaaggaacttttggtaatatttaatttatgggaaaaaacctcattgtataaattttgttaccattatccctttggtaattaatatttttttggttttcccgccttattcttgttgattacaaaattcctggtctttttgtttggcggggaacgaaaaaacctttccttttttttttggagaccccaaaagggccgaaaaaaaaacaacgcttttcccctattctttttttcgtt

SEQ ID NO: 66356 - DNA, 172 bp, Zea mays
tcttgacaatttaaccatattaattgtcaatttttggaattttgataacatgctaggaagaggaatttcaagaaaggaacaacttggagggcaatggtgttgaaatttgtctttggcacctttttcaaattaatgcaatttggtttttaccttattgccaaattcggttttt

SEQ ID NO: 66357 - DNA, 200 bp, Zea mays
agcttttatatcaagaccctctcatttattatcagccatatcagcaggtcgcgtttgtaccaatctttcaaacacataactgattaagaacaaacttcgtctgaatctgccaaataacaaaactgattatgtaatcaaattttagaatgtcaaatataatctgtatttataatccaaaataaaattcacagatgaaacag

SEQ ID NO: 66358 - DNA, 77 bp, Zea mays
ttaatcaggtgttctacagaaaattattgatgctcatttaaccaaccatggttatgaaccatattcatgactaaaat

SEQ ID NO: 66359 - DNA, 233 bp, Zea mays
  unsure (1)..(233): unsure at all n locations
agcttaaccttggaacgaggatttatcttccttngnnnccaaagggtgggaaagctcctttaaagccttcttttgaaaatcctttaaaggctaaaatggccttaaaaatggttttataaaaattggctttttcattaaagtggccaaaagttcttgttccgtggagccattcaacacctttataatttattggacaacaaattgccaaccttgcaccaattggtcttatggaa

SEQ ID NO: 66360 - DNA, 132 bp, Zea mays
tgcttagggttttatttaaattattttggccaagcttcttcaatctttattgttgcttattaaatatacttcaatgtttataattggcccaagccatggattcttaaaatttttcattacttcttttttccc

SEQ ID NO: 66361 - DNA, 201 bp, Zea mays
  unsure (1)..(201): unsure at all n locations
agcttgtgaagccaatcacaagtttattgaagaatgacattaagttcaattggtcttctaagtgtaatgaaacctttgagcaattgaaagaaattattaaccacttgctccaatattggtctcaacccggacatcacttaaaccttttgatgtatattgngattcatctggccagtggggctcggctgtgtactgatgcaa

SEQ ID NO: 66362 - DNA, 112 bp, Zea mays
tcagcgacaggggctggtactttacagccgctggatcccaatcaggatgtcctttctcttagagaggcccgaagccagaagaggaaggctgtttagtccaacaacactccgg

SEQ ID NO: 66363 - DNA, 255 bp, Zea mays
  unsure (1)..(255): unsure at all n locations
agcttcgcatctctgaactaactcggctgcatcgtttcttcgcccgtcgggccanataggaattcctggaccttgaaaaacctttcccgaactaagtgtttcttggaatgctggcatgttaatcccaccatttggtccctggcatgggacctttccttccaaaaaggttggttttccccagtgggacggggagaaacggcacctttcatggagggatggccctgaatggcgccccccctttctgttacaaatttc

SEQ ID NO: 66364 - DNA, 62 bp, Zea mays
tccacacacttgtccccaagtggtcggtctaagacatcatctataatagtcttcttctgata

SEQ ID NO: 66365 - DNA, 193 bp, Zea mays
agcttgcgccgtaaaaaacttcaggccttaatgactattcaggaactgggaggccccattacaaacaaattgggtttttctggaattggttgttaatattttacatgaaaattaagtggacaatggctttcccaattattacctttaaaatataattaaaaatatttttttaaatttcccgaaattaaaaaca

SEQ ID NO: 66366 - DNA, 124 bp, Zea mays
tgtgatttatccaatttaaaacaagcaccatctcttaacataaattttctatggataaactcaacacaagaagaaatggaattagttagcacaaagacaacctagttttctttattttaggcaa

SEQ ID NO: 66367 - DNA, 102 bp, Zea mays
agctttgatttgtcaaaatactctaagtgtctctctttgtcaaaagaaggtcctcttgtggggagaatgtttgattttgggaaaaaaggggggaaaaggggg

SEQ ID NO: 66368 - DNA, 165 bp, Zea mays
tgcttcttttcattctcttttacatcaatattatgcttttttctgatgcatagactctaccttccatttcatatgataatttgtgacaatgcttatgtgctctgtagaattttattttgccttttaattcatttagaaagaacaaattcattcttaaaatttttc

SEQ ID NO: 66369 - DNA, 117 bp, Zea mays
tggtcattttattgctaactgtcccgacaatgattttgttcaggatcaaggggaacaagagggaagaaagaaggaaggaactaataaggaaggcataagggccgagggcgccattct

SEQ ID NO: 66370 - DNA, 221 bp, Zea mays
agcttgcataggatcaatggaatatctccttttaaccgttgcacaacatctatccgtagatttctactacatagttccctgaagaagggtcccccaagctctgcaattgctttcatattcattcctttcctcaaccagttcctctaagggccaagcgggctatggattcttctgtagggagtattgtgggcaagaaatgtggtttttcaggtttttccaac

SEQ ID NO: 66371 - DNA, 127 bp, Zea mays
tgcctctttccatctgcagtgaacaccacccaaaatttattgaacctcagataataatgaatttttttctataaagaggattttcccccattttctaattatttttccataaacaggaaaaattaca

SEQ ID NO: 66372 - DNA, 329 bp, Zea mays
  unsure (1)..(329): unsure at all n locations
ttaataccccaactgcgaatcaactccaacactaataaaggaaccaagagttttttaaaaattttctacaaaggggaaaaaaccccgagcaccaaggaggatggggcaaccattatggggctaccacatgcctcccaaaagccccccccgactttttaaagcaaatccccatatttggtactcccctgagctgtgcgcatccctagataacggaccaatacgaagtacaacacaatcctctccccccacccaactctttaggcaccacccccgctttctcactcttatatttacccctccactacgganntcctctgggggaaaaaaca

SEQ ID NO: 66373 - DNA, 238 bp, Zea mays
ccggatccttaatcacctgcagctgcaactttaagggggaacatgtgttaggtctaacaaatgtatctttcaaaaaagatagaccttgtccagcttgtcaagcagggtaaacaggtggagaaagtacttcatcattagcaaaaatggtgatgaaccaccatcaaagacattttgggagctactttcatatggaaccttctttcggaccccgtcgcctattctcaagcattagggggga

SEQ ID NO: 66374 - DNA, 276 bp, Zea mays
tggggttcgcttggagcggcttctggcgtgttttatgtgtaccggcaagtaagggaaccaaaatatggttttaaacaaaaattaattaatgaaaaattaaaattttatggaaaggaaaaaataaaaaattgtccaaatattttcaagtaattaatttcggcaaaaaattttaataaacctttggaaaattggtttttgaaaaaattttttgaaaaggaaaccttggaaaattttttttggaaaaaagcccctaaggaaaacccttaattttttttt

SEQ ID NO: 66375 - DNA, 126 bp, Zea mays
ggacctaatcacctcagcatgcaagcttcgaagagtttgtcatcttgctcaaaattaccagaaccgaaggccctccgcgccaaaaagcttcatcaggaaaggcttctacaattgaaggaccaactg

SEQ ID NO: 66376 - DNA, 105 bp, Zea mays
tttccctattcatcgttgtatccccaccccacgtaaggggtaacccatgcgagggttaagcctcttcgatcacgttaagttccattatataggattagccctttg

SEQ ID NO: 66377 - DNA, 242 bp, Zea mays
agcttcgaccgtactcccttcgtaacaaatctcctccgccaaaatcccgaaccttcccataactgccggccggtatttttttttctggacctcgggccgagtgaacgtggccgggccctttggaatccccgccttgtttggggatattaataaaaatccccctggaatccgctttcctttggctttggaatcccgtaaccacctaacggcttagggtggccccggggcccatgggattcttt

SEQ ID NO: 66378 - DNA, 114 bp, Zea mays
tgacagtccaaaatcaagaacttcaagtgcatctttaaagctgaaataacttcaatgcttcatctttattggttgatactaaggctatctcctcaaataattaccaatttgtta

SEQ ID NO: 66379 - DNA, 216 bp, Zea mays
agcttatggtaatagttttgcaaaggaaattattcaataagcggaataaataagctagtagctggttataattctgaaaatttctttagtaggggccttaaatctttggttttatggttcaggattgagggtaacccaggtcggtataaagggtgaatatcttaagggttaaagaatagaaatctggtcaaagatgaagggaatatatatggggtg

SEQ ID NO: 66380 - DNA, 103 bp, Zea mays
tgcccttcaagcgaccggtaaagacaactgaggagtcctcccttctaaggatcttcacattccacaatccgataaataaacaatgtatataccacattccata

SEQ ID NO: 66381 - DNA, 198 bp, Zea mays
tatgaagattcttcattccaacatgggcaagtcggcgatgacagagctagcccatattagtcttagcaattaagcaagtgtctacttcagccttgttatcatgaaaatcaacgtaaaatattaagctggacccattcttaaacaacaccccctttaaaatggcttacctggaaattcattccacctttctttcttaaa

SEQ ID NO: 66382 - DNA, 124 bp, Zea mays
agcttaaaacggtaggggaatgggccttttgttttgttaaaaaaaaggcggtccttcgttgggttgggcggatcacgggagcacttcccggtgacaaaggggaacttgttctgggccgaaggta

SEQ ID NO: 66383 - DNA, 162 bp, Zea mays
tatgcaacaatcgcttggagaatggtttgtgacattatccaatcgaagacctgtaaggaggcaaccagtggcattatccggaaataaattagggccgttccccgcacaaatggtgtaagtaagagggtaagtagtgttccgaacccaaacctttttggaacg

SEQ ID NO: 66384 - DNA, 255 bp, Zea mays
agcttgacattgtctccctgttggaagccaatgccatccttaatgccaggggcgttctcccattataaaggcatggcttacgaagcaaatttaaaaattttttcattttttcttagtttcatgaattccggcaacttttaagcattcttaatttttaagctaattatgatccaattttggttggttttaaatccataagccaaatgttgaatccatgggattaggcaattcaaaccattttaataaatctcttac

SEQ ID NO: 66385 - DNA, 136 bp, Zea mays
gtgacactataaaactcaacttctaaaggagaacacattttgggactaacaaatgttcattttgagaaagacgggatttgtagcgcatgtcaaggcaggggaaagcaacttgggtggttcattcattccaccacaa

SEQ ID NO: 66386 - DNA, 110 bp, Zea mays
tgaaaatcaggcgagagctagtgagcaagagttaaaaagtttgagaaaataacgcgaatgctagaaatggcgtatcaaattgttgcacggtgtgggattaaatatttata

SEQ ID NO: 66387 - DNA, 79 bp, Zea mays
tgtggacttgtcgccgttcccgatctccctcatggtggatgctcccgacatcacttctaggcggtgtaggcttcttaat

SEQ ID NO: 66388 - DNA, 228 bp, Zea mays
cggatcttaagcactgagctgcagctttaagggagacacgtgatatgtttgactaacgtacatttcgaaaaagatagaccttgtgcagcttgtcaagcagggtaaacaagtgggaaggagccccatcacagccaaggaatgtggatgaccacttttaagaaccccctggaacttgctacatatgggaccttcttcgggacctgtcgcccttattctgagcattaggag

SEQ ID NO: 66389 - DNA, 90 bp, Zea mays
tcgaaaaaccaacactctttgatagagtgctgataatcttcgctccaattcgatctcgcatacattcgtaagggcttcatttcgtttaat

SEQ ID NO: 66390 - DNA, 200 bp, Zea mays
agcttctaaagggagaacacgtgatatttttgactaacgtgcaattcgaaaaagatagaccttgtgcagcttgtcaagcaggtaaacaagtgggaggagcacatcacagcaagaatgtgatgaccacttcaagacctctggagctgctgcatatggacctcttcggacccgtcgcctatctgagcataggaggaagtaag

SEQ ID NO: 66391 - DNA, 166 bp, Zea mays
  unsure (1)..(166): unsure at all n locations
tgacagtccaaaatcaagaacttcaagtgcaacttgaaaactgcaagaacctcaatgcttcatctttattggttgaatctaagtctagctcctcaaataatanccgttttgtaaacaatttgtgttaaaaattattcatgccttttctttgttggttttgaaccta

SEQ ID NO: 66392 - DNA, 219 bp, Zea mays
agcttctaattaaatcatggttgcgcctgggcagcgttattgtgagagtaaaagtggatgtgctgctactccctgtgacaccccaggtggtctatttcaacgttatgttcgggaggattaatccctaaatctcggaatggctccagtaaaaattgtctattttctcgatcgttgccctattctctgggtaatcaggcctttcttcttgggaagtttcac

SEQ ID NO: 66393 - DNA, 97 bp, Zea mays
cagtgacacttgaaactcaagcttttagagatttctgtgatcaaataggttctaatatccatttggccttcattcatgcagtcctgtttttcaaacg

SEQ ID NO: 66394 - DNA, 202 bp, Zea mays
agcttccatcctgcatcaatagaaacacacatggtgagcaaatggcacaacactagggttaggatacttagaataataccattgatgcggcattttacccctaaaaagtgttatggaaaacaccaaacattatcggtcccgaagggggaagcaatcaccattagaaggaaaccatggtccgcttgggaagtaggaaccaaag

SEQ ID NO: 66395 - DNA, 138 bp, Zea mays
tgaagccatggtaagtagcataggcaagtaatatgcgaattgattgaagcctatctacatgtgcataagtttcatcgaaatccaaaccttcgacttatgaatatgcctttggccacaagttcggggcttttgtttcct

SEQ ID NO: 66396 - DNA, 227 bp, Zea mays
agctttgagcctcgttccgaaagggatccctctgcctaaagttgtgtggcaatggtaccgtccctgcaactgcaagctagcatttttcctcctcctctacctttctaaggagatgtgaagccacccgagaactgctttctgaaagcttctacccaagaaaaaggggatgtggagtaacttgttgacacccgatttcggggcgcccaatcaactggcaatgaacaacc

SEQ ID NO: 66397 - DNA, 140 bp, Zea mays
  unsure (1)..(140): unsure at all n locations
tgtgtgcctcaaggtacctggcctttgcctcatggaggacctcgctaacgtagtagacccgaattctgngatgtgtttagaacaccctatgtgtcggttcccggtgtccttcaacccttccatggtcactttccgtttca

SEQ ID NO: 66398 - DNA, 227 bp, Zea mays
  unsure (1)..(227): unsure at all n locations
agcttgcgctcgtccgtttgccacgacaggccgcccacgaagatccgaccttcttccttgccctccatcgccaccgctactggctcggcccaaccggtttggagaacgaagaaagggcaggnagccagggaatttagggtttgggcggagaaagagaaggtcttgcgacctggcgagtaggggaaacatgtgggtagcccgggacccgggacaacccaggaaaaacc

SEQ ID NO: 66399 - DNA, 141 bp, Zea mays
tgactattctaataagctcgcgtctagaacgttttactatctcgatctgtggcttaccaggtaaatggtcggcctgttgtcttttgaccccgtcgtactttcgtactggaaacacgtgcaacgggttcagtttgggtttgc

SEQ ID NO: 66400 - DNA, 196 bp, Zea mays
  unsure (1)..(196): unsure at all n locations
agcttgtgaaatggtatgtatcgtctaccttatatttgngatgctagagagattgtatatgtagatggatgagctcagttagaataatataccagtagacttcaagatagctgtattagagtcaaggcaatggtgtctaaagtctaaactgggtcgacttggatgccagcaatgggctatattattagaggcaggg

SEQ ID NO: 66401 - DNA, 103 bp, Zea mays
tgactctcggaatcgaacgaagctccagcttgaagcctgcttcgtcagacgaaaaacttcggaagaaaaagtatttaattgccacaaattcagaattaaatgg

SEQ ID NO: 66402 - DNA, 376 bp, Zea mays
ccgagcaaggaatcggagtttccttcgccggagaagccagtccacgctcgccggagctctcgaccccgccggagtacgtggaccgggtaaaccactccaccacccttcgattccttgtgcacacagtcgctgcgtgaccccgtgatgctcaccgtgccctcggattgaaccagttcgccgtggtttggccggtatactcgctgccgacgaggacacccgcctgcccgcgtggaccgggcgattccggccatctccgacgtcgagccgtacctcgacgtgaccgccagagtctccccgagccgaccccacccttcgccggacctccctcgccgccggtaagccgcgccccccttttctttcccgcgggtactggttc

SEQ ID NO: 66403 - DNA, 325 bp, Zea mays
  unsure (1)..(325): unsure at all n locations
taagcttattccaggcccaggatcacaagagaaccccggctgttgttcgaaaggacaggtctgaggcacggcaccaacggtgcccaagaaanngcaaagaagatttatcaagngcggcgccaggactacggcccaaactatgccggaaaccccctcagaccctgaaaagctgctcaaaagatggatgaatacatccgcgctgagatgattttcgccaagaagaaggaagctacatgttggccgaaatgaccacggcttagatggagaaacacccagacatgtacatcaagtcttccactagaatgagacagaggaagtagcaacg

SEQ ID NO: 66404 - DNA, 441 bp, Zea mays
  unsure (1)..(441): unsure at all n locations
acaacaccatttgacatcttaaataatatttctgagatcaattatatntaatatagttctcaacatgcaaaagcgggttttatcaagtggcttagtgaaaatatccgctaattgatcttctgacctcactccttctaaaatgatgtctcctttagcaacatgatctctaaggaagtgatgacacatatcaatgtgcttggtgcgagagtgttgaaaagggttattagcaaatttaacagcactctcattgtcacacaacanaggtaccttttctagaactactccatagtctagaagagtatgtttcatatataaaatttgtgtgcaacaagcacccgcggcaatgtattccgcttcggcggttgacaagggcaacactatttgctttttggatgtccatgatactagtgatctcccaagcaaatggcacccccagaagta

SEQ ID NO: 66405 - DNA, 464 bp, Zea mays
  unsure (1)..(464): unsure at all n locations
agctntataattttcacggtggatagagacaattattctcacatggttcatagctccgccacacattcaatacttagacggtatantttgaaatgcctagtatgatacagagtatagattacatgcattacatgtggttgaagtgtctccttatatagaaaaagcagtttataaagaggatattggatccacgttcattatgctcgagggagttgcctcgtatgacttgtggatttggcatgtgaaagtcgcctagagggggtgaatagggcgaatctgacatttataaacttaagcacaactacaagccgggttagcgttagaaatatgaacgagtccgagagagagggtgaaaaacaaattgcaagcacataaagagtgagacacactgatttgttgtaccgatgttcagttcttgcaaacctactccccgttgaggtggtcacaaagaccgagtctctttc

SEQ ID NO: 66406 - DNA, 494 bp, Zea mays
  unsure (1)..(494): unsure at all n locations
ggcagtaagaattagtaatgctgatgactgttctgaacatgttgcttatgatacctaaaacacatatacacaagacaaggagacaaaaagtgaatgtgacacattattaatacatggaaccataaacacttcagtaattagataatagattaatccaccttattcattagaagcaagcccaacggtatctgttccattaccagcatccgttgcattcatgcctctctgttctcacatgatactggaagatcatcatcggttcctgtaaccatagccaaatttcttagtacatcatttcaaatgctgttacctgattggttcaaactggcgggcaggtaaaattctgaaagatgttctgcttgtacaaaaatgtgacgttcctgatgctctaataaaanaggttcatgaattaaccaacagatgacaacaaatcatgacttacctgctcaatgtctctttatacatggtaagtgcccttattatgtcacctctct

SEQ ID NO: 66407 - DNA, 467 bp, Zea mays
  unsure (1)..(467): unsure at all n locations
atatgatatctggtgcactgcctgtattatctagaacattatggaccagaaatcacttaatgacacaagatatgaccatagcatcattatgagggtagtctttgagctgaaggtcctcctgggagaaggtgattgggatgtgggaccattttgacttaatgaagggaccctgcaccccaacatgctgcacccttctctgtgtttccttcttctgctttttgttagccggctctgaacctgagccgcatgttatcggaaacaccagcttcgtagccgaagatgctacggcttggntgttgaacgaagccatcagctcataagtggaagtgagttcaccggaggtgggcgccaatgttggagatttattctcatatgctatgaattaagaacaaggcaacacaaaatgttaaagggtaaagcccttcgtccttcanagcattatttcccttatgatataatgatcttca

SEQ ID NO: 66408 - DNA, 471 bp, Zea mays
  unsure (1)..(471): unsure at all n locations
tcttcanagcagggttaagaattcccctgcatgggatgattgtagatgttntaaagagatttggaattcaccttcatcagttaacccctaatgccattgttaggcttagtgtttacatctgggcactccgaagctaggaggcagaaccacttgccgaaggtttttgctgggcacacgaacttcattaccagacaaaagctagagaagatgggctgcatgataattntggttgctacaattttgcatatcggaaagatgccaagtacccagttattagctatcgtacgaaatggccagctggctggaagagtgaatggttttatgtcaaagtggatgaaaagaaggaaaggctggttcagagccctttaaggttaaccttcgaagtaactaggcctcaatgcgtcatggatccagatagcccatgccagattgcactgagcgaatttcggtttgttgcagagcacattggca

SEQ ID NO: 66409 - DNA, 394 bp, Zea mays
  unsure (1)..(394): unsure at all n locations
ctgaggcatgcaagctttnagggagaacacgtgataagtctatctatatgttctctcgaaaaggatagaccttgtgcagcttgtcaagcagggaaacaagtgggaagctctcatcatgccaaaaatatgatgacaacatccagacccctggagttatttcatatggacctcttcggacccgtcgtctatctaagcatatgaggaagtaagtatggtcttgttatagatgatgattattcccgcttcacttgtgtatatcttntgcaggataaatctgaaacccaagggatcctcaagcgctctctaaggagagctcataacgaagttgatctcaatgtgaagaagataatgagcgacaatgggtccgaattaagaacctcaagtggggagtatc

SEQ ID NO: 66410 - DNA, 496 bp, Zea mays
tactaagcttatgaactgcatgcttcggtatctcgtacaaacagcttcttctctttctgcttcttcctgcatgaccttcggcgacgaagcatagtcccaacagagagcctcttgtgaatgcgcacacaagatttgttgtttggtgcatgctggtatcgaggtctctagtcatgatccattatggaactacactgatgtgttatcttccatagatctctcctttgaaatgatatctatgttgtttgtcgaaatgatcaagaaacatctatcatctatgttgaatcaataagaggataccactttgttgtgttcttcaataaactccctaccaattcagaagtctgcatagaacatcagaacccatctgtgtctaatcgtgtgattaaaacacctctttcgtgtgaggattctgttctcttgaccttggtggtgactacacacatataagttccttttgcatcctttgtgtaaaggtgaagcctattttataatctat

SEQ ID NO: 66411 - DNA, 454 bp, Zea mays
agctttaccaaatggacgtgaaaagtgtctttcttcatggacctatcaacaaagaggtctatgttgagcaacctccggctttgaaaatagtgagtaccctaaccatgtgtataaactctcaaaggcgctttatgggctcaagcaagccccaagagcatggtatggatgcctgagagatttccttatgactaatggcttcaaagtcggaaaagtcgatcctacactctttactaaaactggtgcaaaagatttgtttgtatgccaaatttatgttgatgatatcatttttgggtctactaaaaaatcaacttgtgaagagtttagtaggatcatgatacaaacattcgagatgtctatgatgggggagttgaactattttctatgatttcaagtcaagcaactccaggacggcaccttcatcagccaaacaaagtacaattaagacatacttaac

SEQ ID NO: 66412 - DNA, 328 bp, Zea mays
attttgagaaagacagggtttgtagcgcatgtcaagcatggaagcaaagtggtacccatcatccacactatataattatgacgaccgacaggccacttgagctactccacatggatctatatggcctgatagcttacataagcatcggcgggagtaagaactgtcttgtgaatatggatgactattctcgcttcacttgggtgttcttttgaggaaaaatctcacaccccagaaactttaaagggattcttgagacgggctcaaaatgagttcggattgaggatcaagaaaataagaagcgataatgggacgaaagtcaagaactcac

SEQ ID NO: 66413 - DNA, 418 bp, Zea mays
  unsure (1)..(418): unsure at all n locations
gcatgctcttgaggcagatagggaatacataaaacagtgcgttaagactttgaagaagggagggaaagggtttgatcttcttcacgagatattacagcatcttcgggacctaaaaaggaatgagcaacgtgcaagtgcaaagaactctggggagctttcgcctcattacctacatcatcacacggattgaaggtaacatgcgataactagtatcgatagtttgctgggtttttcttttcttgtcagcatggatggtgacagaatgattgctctatatcttctaagaaaaactgttcattgaattccgtgttacatacacgatgagtaaacagaattctaatntcctaaagaagtcatgcatccccacatgtcctttgcacagcacttctctatatcttctaagagnaactgttcattg

SEQ ID NO: 66414 - DNA, 421 bp, Zea mays
  unsure (1)..(421): unsure at all n locations
actcagcttgtactttaccttctntcaagccaaaggtacttttgtatcttgttagtatttctattttttccttaataataaaatagaaatgagttgatggtaacaaatacctgttgttgttgtttttcatatcccatatgtttctttccttgtttatatattgctttgacgaaggtacatccttcacaaccttcgtccgaaaatcattatctctcaaagggatataatgcttcgaaggacgaaggattttaacgtttagcatcctctgtgttgccttgttcttgactcatagcatttaagaacaagtccccaacattggcgaccacctccggtgaaccattntcgaccactttcggcaagcatcgaccttcgtcatgctgccaaagaaagcttcagcaacaggggctaccgctctgcagcc

SEQ ID NO: 66415 - DNA, 355 bp, Zea mays
ctgcagctatgtatgccgtggggcgcaattattgtctgtgtacctgccacaaatcgtgttaggccgccaccgaccttgttttggtgcggataccagcagcgggtgtgttttgcgcacggtgcatggactacatcatcatgatcgcgttgttgatggagcattgcgcgacagacattacattataatctacgctcgttagtggtgccgtccgctacattggtcagcataccatgtacactctgctacaggcataagtctgcaaatgggatggaggacacgcttagttatatgatcatgcctggcggccgaagagaagatctatgttcacctgtacacttactgctccttgtagaat

SEQ ID NO: 66416 - DNA, 476 bp, Zea mays
tctaaaggggagaacacatttatgactaaccaatgttcattttgagaaagacaggatttgtagcgcatgccaagctgggaagcaagttggcgctcatcatccacacaagaatatcatgactagtgacaggccactggagctactacacatggacctattcggcccgatagcttacataagcatcggcgagagtaagtactgtctagttattgtggatgattattctcgcttcacttgggtgttcttttgcaggaaaaatctcatacccaagagactttaaagggattcttgagacgagctcaaaatgagttcgacttaaggatcaagaaaataagaagcgacaacgggacggagttcaagaaactctcaaatgaaggcttccttgcggaggagggcatcaagcatgagttctcttctccctacaccccacaacaaaatggtgtagtggagaggaagaatcgaactctattggacat

SEQ ID NO: 66417 - DNA, 453 bp, Zea mays
agcttgtgaagattcttcattccaacgcgggctattcggcgatgccagagccagcccatgttagtcttagcaattaagcaagtgtcgagttcagctctattaaaatcaactaagtatagctgaccctctaacactcccttaaatgctattgaatcatcacttcttctaaagacagtaacacctatatccgtaaaaagacaattttagcccattttacataattgagaaactgaaagcaagttatagtctaaagaatctacaagaaaaacattggaaatagaatggtcaggtgatatagcaatattaccaagtcctttgaccaaaccttgattttcatccctgaatgtgatagctctttggggatcataggttttctcatagtaggagaacatccttttctccccaatcatgtggtgtgtgcacccgctatcaatgatctaacttgagccccta

SEQ ID NO: 66418 - DNA, 435 bp, Zea mays
  unsure (1)..(435): unsure at all n locations
tcatcagttcactgtcaagntntgcattccatgctcttggtgcctgacgcaaaccatatagagcctcttttagttntagcactttgtcaactccacttttgacaacaaatcctggaggttgttgaacatacacctcctccctcaaatcaccattcaagaaagctgacttgacatccatgtggtgcacttgccaacccttctgagcagccagagcaatcaacaatctcactgtctcaattcttgcaaccggtgcaaatacctcatcaaaatccaccccctcacgctgagcatatcccttcgctaccaaccgagctttgtgcttaaccacatttccctctggatcttgtttcactttgaatacccatttcaggccaatggctcgatggccagcaagtagtgcagacagctgccangntttgttttcttcaatcgact

SEQ ID NO: 66419 - DNA, 464 bp, Zea mays
  unsure (1)..(464): unsure at all n locations
agcttgccttatcacacaaggatntaaacttatatattgattacaaagacactnttagtctaattgtttaagcagctactatcaggattgttttgtcaattgcagtaactaaagcctggtgtttgagacaacttgatgttaaatattctttatttgcatggtgttctagaaagaagtatatatgaattaaccacttggttatgagagtttggaatatcatgatcatgtgtgtggactgggcaaagttatatatggattaanacatgcacctggggcttggatgcaagacttagtactaattttgtacaccctttgctttgttgtatcaaagggaggtactctcttcgttatttatagtaaaagcatggccaccatctatctatcgaactaatgtgatgatattgtggttggctatctcatncaatgctgacgtggaagcaatgttaatagatttgcgagctaat

SEQ ID NO: 66420 - DNA, 446 bp, Zea mays
  unsure (1)..(446): unsure at all n locations
ctcagcttctaagggagaacacgtgatatgtctaaccaatgtttctttctaaaaagatagaccttgtgtagcttgtcaagcaggttaacaagtgggaggagcgcatcacagcaagaatgtgatgaccacgtcaagacctctggagctgctacatatggacctcttcggacccgtcgcctatctaagcataggaggaagtaagtatggtctagttattgttgatgactnttcccgcttcacttgggtattctttntgcaggataaaactgaaacccaagggaccctcaagcgcttcctaaggagagctcanaacgagtttgggctcaaggtgaagaagataaggagcgacaatgggtccgagttcaagaaccttcatgtggagaaataccttgaggaggaagggatcaagcacgagttctccgctccctacacaccacagcaaaatg

SEQ ID NO: 66421 - DNA, 460 bp, Zea mays
agcttggtcattttatcgctaactgtcccgataatgaaagtgaccaccaaaaggggaacaaaagagaataaaagaagccatacatgaaggcaaagggcgaggcgcatctatgaaaggagtgggactcggattgctcctcctccgactacgacaacgaaggactcgccgccactgccttcaacaaatcggctctcttccccaacgagcgtctcacatgtcttatggcaagggagaagaaggtgagtactcaagactccacttatgcttcttctagtgatagtgagtctaatgataatgacatagattattcatacttgttcaagggcttagatagatctaagatagataaaatcaatgaattgattgatgcattgaatgataacgatatgctcttataagagcacgacgatttattgtatgatgaacatgataaatttgtagaggcacaaaaatcatatgc

SEQ ID NO: 66422 - DNA, 458 bp, Zea mays
tgccaagccctcggacccaaccggacttcatcggatgccctagatcgacctcaccggacttcggtcttccgccgccgcgcgtggaccaagccatccagtgatgtcttcgcccgattcctttcgctcatatcttctctggcatcccgtggacctccctgacctgtttgattgaactatctcgccgtgaccaggccggtctcctcgccgccgacgagcatccccgcctgcgcgcgtggcccgaccgactccggccatctccgacggcgttccgcacaccgttgtgatccccgcgacctccccttcatcctcgaccacttcaccggagcagtctcgccgccggtaagcccctccgcccttttcttcgccgcgactactatataaggtagaagaaagatctcgggttaggttctgtagaacccgaagggttttctgtaatgtcagcgactcatgtgaatagt

SEQ ID NO: 66423 - DNA, 474 bp, Zea mays
  unsure (1)..(474): unsure at all n locations
agcttctccatggccggcgcccagcagtagctccaagctcccatgtgcgcgcccncttcaggcttgtgcgcagggacctcccatggccgtcgagctcctgtccatggcatcccttccctccagcgcctccccctgctccacggccagcagtagcgagcggcctcaccaaccttgccggggtgctgctcgtcgaggatcccctgcagggcaccatcatttccacgccaggctcctgctcgccggcgagctcttgtgctcatggaacttttcccttccttctctttgtccccagcgaccagcagcaaggacttcctctccaccacgcaacaaccctctagttcaatctccactcccccatttgagcgcccaaacagtgccccttgctgcgcagttcctccgcggtgaagcgtcgctgttccggcagccccggcaccttcccttgtttcgtctcgcttgcaccacttcgtgcatgcc

SEQ ID NO: 66424 - DNA, 387 bp, Zea mays
  unsure (1)..(387): unsure at all n locations
tcggaatactacgactntgttttcctcaggagttggacaagtcttctctccttcgtcggccctcacaacggacaagtcccggaaatatcttcccctcatgttgacaagatgattctctttaatacttgatttgccgaaaaccgcatggtttggtcgccaaggtcgatcttcggagtcttcaccaccactatccacatcatagctgtcgctgtcactagtatcttcaaataaaccttccaaaatttatttagtaattttctctgtattagtcttcgacatagattgaagaaaacccagatgcatttcctcagaaagactcagcttcgaatcaccaacaactttgctatcttcagacatccttgcaaacgctgagaaagtgctctcaac

SEQ ID NO: 66425 - DNA, 468 bp, Zea mays
  unsure (1)..(468): unsure at all n locations
agcttcttcttcttcttcgacgtcatctgttgttataaaatgcaccctgtatgcctgctggtaccacttgttgatctccggaggaggaggatggagaggtacgtcangcgagcgggggcgaagggagtacccaaggaggaagcttgacgacttatgttgtcgtcagtctcccgctgacgtcgagccacctcatggacatccgcagcaatgttccggcacatggagaagaatgccgcaaacccgtgggccaagcgggcacccatccctcggccacgacctcgaccacgaccacgaccacgtggcgtgggagatccgcggccaggggagggatgcgaggcaccggcagcagcagcagcaggaccagcagatggacccgcagatgtatgagcgcgagggctggagggggctntcctgaggcgccctgctggattgttgggatcaatccanaaaggggtatatgactgatgt

SEQ ID NO: 66426 - DNA, 517 bp, Zea mays
  unsure (1)..(517): unsure at all n locations
ctattacggacctatgaaactaagctgtgctcncgatacaggcggttcatgctcagagccggctatcaagatacagaagaaggaggcacagagaagagtacaacatgtagaggtacaaggacccttcatcaagtctagatggtctcacatcctgattaccttctctcaagaggatcttcagctcaaggtttacccacacaatgatgctatggttatctcttgtgtgatcaaaggatttctggtccacaatgttttggttgatatatgcagtgcagcggatattatatttgctaaggccttcagacagatgcaagagcccgaagacaagatccatgatgccacacatcccctttgtggcttcggaggaaggcagattgtagcacttggcaagatcacaatgccagtaacctttggattatcaacaacacaaggactgaacaagttgtgtttngatattgtgacaaggaatatccttacaatgcaatcattggtcgtggtactctcaatgcttttgaaa

SEQ ID NO: 66427 - DNA, 491 bp, Zea mays
  unsure (1)..(491): unsure at all n locations
tcttaagtcacctgcggcatgcaagctcgtatcttccaaattatgaatattctgttctatgtcaacacatcaaaggtttagagctacaataggagtacaactttgcttaagggattaagcattgttgttatgcaaagttgagagaaaactgggcccaaacttgggctatcagtcagcctcaagcctgaaactttggttaacagtgtgtaggatcaactttggaaccatgtagcgcttgattcagcagctgattaactaaaacctctgtagtaaacttaaagttggtttgttaaactacaattttgatgcagagtgttggtctggtcactacacanaaattggtacaaattgccctcaaaagagctctgtcagtcgttctgaaggttaatcgtgatggtacagtgccctgaacaagatcgctggtacagcgcaccttactcgcgacgaccgtgcgcctagatccacgtcaccgttgcgattcgtgctcacct

SEQ ID NO: 66428 - DNA, 480 bp, Zea mays
tgtagcccatattccaattcttcctgtagcttctctgtttctcattatgtctttcagaggttgtgatgaagggactattatatgataggcttgaaagtaatgtcgaatctttctggaggccattagcacagcatatagcaccttctccaattctatgtaatttttctttgataaactgagtacttcggagacaaagtatactagtgcttgtctttttacttggccatcttgcttctcctgcacaagtgccacactgactgtagaatgagaggctaccgcatacaggagtaacggagttcctaatgaaggtggagttagagttgtcaagtctatcaagtattgctttaactcttcgaaagtcttttgttgagccagaccccattgaaaaacttcggctgattcactatttcaaaaatggcagatcctttctgctgatctgaataaatctattaacgatgccagcttctaccaatcgtgact

SEQ ID NO: 66429 - DNA, 455 bp, Zea mays
  unsure (1)..(455): unsure at all n locations
gcagcttctgaggaaaaactgctggttcattgttctattgctaagacaaatacagaaaagattacaaaagaaattctagaagacttatcagaagataccgatgacagcgatagttattacgcggaaagtggggacgaagacttcgaagatcggccctggcgtccaagtcacgcagtcttctggaaatcgactatcagacagagtcatcttgataacatgacaggaaggtattttcgagatatatctattgtgagagctgacaacggagataggactgttcctgttcctgaagaanatgaagtcgtaatctaccgaagcttcttcaaggctgggctnntggtccccttaagcagatttgtggttgaagatttaaagatatatgagattntccttcaccagaataccctcgaggctattatcagaatgaggatcttcgtctgggccatgaggagtca

SEQ ID NO: 66430 - DNA, 488 bp, Zea mays
  unsure (1)..(488): unsure at all n locations
tgagaatgtaatgcataacccaggacaaccccatcagaagatcgagactcatatttgtccaaattgtcgtttntcaccacaaagaatatgtaaccaaacaccctgaaatggctaaccttcggtggccatccaaatcatagctcataagaaattgtgttcaaaaaagcccaaagaaagattcgatttgacacatggcagacagtgttgatcgcttgtcacactcggatttaaggggtaaagccatatgcgtctcatatgtgcgccaaagaagaacaacacatataatgaccaagtgtatacagatagatgtcacaaacattattacatagcagaagtgtcttacaaaaataaatgataatattaaagcaaactaatattattccttggcgccattaagctgactggaagacgccacctagacttcctcgtactcctcgtagtagtcctcctaggctacctgctcttcacctatggngaggngtttatat

SEQ ID NO: 66431 - DNA, 390 bp, Zea mays
  unsure (1)..(390): unsure at all n locations
gatcagccgaagcccacgctcttgtgtgaggatatagcagagcaaaaggtgctcttgggatctcaactgtccaaagaacaagagaaaacctttgataagttttgttcagcaacaaagatgttttttgcttggcagctaatgatctttgcggagttaacaaggatgttattgaacactcgctcaatgttgatccatccttcagacccacaaagtagaggcttcngaagatgtccgatgacaaggctgaaggtgctcggaatgaagtgaaaagactccttattgccggagttatcaacgaggtaaaatacccagaatggttggctaacacttgtatggtaaagaaggccaatggtaaatggagaatgtgtatcgattttcctgatctcaata

SEQ ID NO: 66432 - DNA, 487 bp, Zea mays
  unsure (1)..(487): unsure at all n locations
tatgaaactaagcttatactcggctgcgttgtagaggccgggaatagcaactggatgtcgtacttgaggtgttcgcctccaggtgcgatgaagagaatccctgctcctgctccctgcaacttcagcgagccatcaaaatacattcgccatacttctgcaattcctggattatctggtacttgctgttctgtccattctgatacgaaatcaaccagtgcttgagttntgatggcagtgcgaggtcggaactcgacgtcgtgggatcccagctcgcaagcccacttggctattcggccaatggcttccttgttgtgaagaatgtcccctattggaaaaccagtgactactatgactntgtggtcgtcaaagtagtgacgcagcttgcgggcagttagaagtactgcatataatagcttctgaacctgaggatactntntcttcgagggacctagaacttcactaaacaggatgttgtactggtgtcaca

SEQ ID NO: 66433 - DNA, 472 bp, Zea mays
  unsure (1)..(472): unsure at all n locations
agcttgtgaaggttcttcatccccacatgtgctaagcggcgatgccacagccagcccatgctagtcttagcaattaagcatgcatctagaccggcctcctcttttgcaaaatcaactaagtaaagtttgccgtctaatacacccttaaaagctaatgaaccatcacttcttctaaagacagacacatctacatttgtgaatagacaattatatcccatattgcataattgactaacagataacaaattatatccaagagactcaactaaaaacacattagatatagagtgctcggatgaaatagcaattttacctaacccttttaccttgccttgattcccatcaccgaatattattgaatcttgngaatccttgtttttgacgtaggaggtgaacatcttcttctcccccgtcatacgggttgtgcatccgctatcgataatccagcttgaacccccggatgcataaacct

SEQ ID NO: 66434 - DNA, 489 bp, Zea mays
  unsure (1)..(489): unsure at all n locations
tnggggagcagctcctcacagactctatctcctggtggagttaggaagaatagccctgctgctcctgtcatcgacgctcctgctcctcatgcagacggtggtgcagtctctccaagtggctggactgtccggccacaggacggcgaagcggacgctcagcaaggcgggagggtaagaatgggatgactgactttcgtgcagtgtgtctaagtcgagccatctataaaagacatcgcaagcaaaagggtgagaacagaattaataggaccagcaaataatgaatcataagtgaaggaaggattagaataaaacatgattctcagcaaggtataatatatagtagaacataggtttggtcggtatgaccaacttttgaagggatatcatagtcaaggaagggacagaggtctatagtccttacaacgaaccattctactctaggtagcggtcctacagtcagcacggctttgataccacttatgtcacacc

SEQ ID NO: 66435 - DNA, 466 bp, Zea mays
  unsure (1)..(466): unsure at all n locations
ggatcttaagcgacgcggctgcagctgtttaatcctaccgccgctatttatttaacaccttngacaacatagtatgcatggagtactattcttcaacaggagaatagttgtccctgccttttacaagaggaagagtgtggctcccggcggagaatagtagtaaaactatgggctgcaacatgtcactatttgtttcagaagacttttaattttctatgttacgggtacttagggtgctatcgttatcgtgttatcaaatatgacagaaactaaatcattgcaccagcaattacaacatatatatatcttcacgacgtttttttgtactggccgaatagggtactagcaacagcatcaaggcaatcaaactagttccattaaaactttgccataatatatcttcatgcatggtggcagtgtttagcatcgtacatcatctattcagatataatttatttagttcagt

SEQ ID NO: 66436 - DNA, 498 bp, Zea mays
  unsure (1)..(498): unsure at all n locations
actaagctgacaggaagataacaactcgtgagatgtggttccttttgtngaccttctgcgaaagtgtatgagttcgaaacatgcaagtgtcctctcagccacatttatatgttttgccttgttggtgaaacttccgttgccatctctgagggacaatgcaattactataaaaaatgtacttatggagattttacagagagctggaaactccaatggtcatttagtcacatcttgttntaagctacttgctgatctacttagaggattcaggatttcactttcagataatgagcttcagatgcttgttcatacccctatgtttgtagatcttcagacaaacccttcccctgttgccttatcgcttctcanaacaatagtcaggctaaaattggtttctcacgaaatttatgaatatagttgtaagataggagagttgatggtaacaacattaactgaatctatacagcagcaatgcatttcaattatgctacaaatttt

SEQ ID NO: 66437 - DNA, 462 bp, Zea mays
  unsure (1)..(462): unsure at all n locations
gcttctgccccctcgttcgcaccctctttatgttgttggctggtagtggtcagatttagtcccattggtttagttggccctgcgtccatctgaactgatgtattgttactgctatggaagtcattcctttagttttgctctggcagtggattgctgttgggtcgtgttttcaatctttattggttccgatcggacgctgttgcggcaaaccacccctgtagatactcttcacatgctgaagaaaactaccagcagccgtttagcctgaataattgctanatgataggttaccgttgagggctgatggtttttatttttttttaccctgtgacatcaagttcttgggtaactttttttaccgttgaggctcaaacaaatngttaagtgggagaattgtgaagtgggagtggtaatggatcatgatctanatgattcttcacaattcattgaaacccttaatta

SEQ ID NO: 66438 - DNA, 468 bp, Zea mays
  unsure (1)..(468): unsure at all n locations
ggtagaggttcttcatccncacatgtgctaagcggcgatgtcacagccagcccatgcaagtcttagccattaagcatgcatctagatcggcctcttcttttgcaaaatcaactaagtaaagcttgccgtccagaatacccttgaaagctagtgaaccatcacatcttctaaagacagacacatctatatttgtaaacaaacagttatatcccatattgcataattgactaacagatagcaaattatatccaagagactctactaaaaacacattagagatagagtgctcatttgagattgcaattntacctaacccttttaccttgccttgattcccatcaccgaatattattgaatcttgggaatccttattcttgacgtaggaggtgaacatcttcttctctcccgtcatatggtttgtgcatccgctgtcgataatccagcttgaacccncggatgcataaacct

SEQ ID NO: 66439 - DNA, 339 bp, Zea mays
cctaacaccgcgagcgcttcaaagtaagaggcacttttattgaacccgcaagttggataagggagtcctgacccacaaaacagcggctgtacacgtgagccatctaaaacgcccaccgaactccaaccgggaacattgagagggataaagtataattcagccagatcaaatttcggggagaacgcggaaaataaattaaacactagcagtgctgaacaaatactagtatcctggaatgttcaaactataatgaccacttgatatccttgataccgaacgaaagattgtggaaaaccccaagaatgtcgaacacaccgctaatgtaaaaacaaaaaaaaa

SEQ ID NO: 66440 - DNA, 422 bp, Zea mays
  unsure (1)..(422): unsure at all n locations
gctaccttggaggtagcattcttcaagagtaacaagcaccaccaacttgtaactcgaccgcctagtgtcaccaaatgtaaccactcaatgcaacgtgctaagaactgctctcataaacaattgaatgtgatctctagctatcgtatgtaagtagaggcctaaagctaaacactatatttgggcaacacatccccaaggtgatctacatcttcaattaggcacacacccatatatttacttgtagagtatagggctcaagtagttgttgccaacagctagccagctatgttggcacctgtgccttgccaatgactatttctccaacagctctcaaactagatgttaatatgtcatacgttcggntctcacttcggacacgccactgaacatgtctagtgcattgagagcacctagaggggggg

SEQ ID NO: 66441 - DNA, 443 bp, Zea mays
  unsure (1)..(443): unsure at all n locations
acccgagatatctttaacatgatcatcctcaatttcatcattatattggctgttgtgaatttcctcatttatggctgaagaggatggaatgacaaccatactatcatcatcgtcttccattggctttatttcacccataagtttcataagcggtctcaaatgaactccaccaacatcatcaaggttttcattttcatcttgagaaccatttgtttcatcgaactctacatcatatgcttcttcaatgatcccatgagttttgttgaaaactctatatgccttgctatttgatgaatatccaaggagaaagccttcatcacaatttttctcaaatttagagagtcgactaccctctccacaaatatagcatttgcaaccgaacacctctaaataagaaatgtgtggctttcttncaataagcaattcataaggagtctttttca

SEQ ID NO: 66442 - DNA, 398 bp, Zea mays
tagtgccgatggaggagcagaagtctttgaaatcttggttgtctaactgcttgccgctgtcgaccgtgagttcggatggtactccgaagcggcaaacaatattttgtcagaaaaatttctgggccatctttgatgtaaaggtggagactgccctcgcctcaatccatttggtgaagtattcaacagctacaaaggtgaacttgaggttcccctgagccgtgggcaggggcccgacgatgtctatgccccagcgctgaaggggccacgtgtgggcgattagcttcgtgaactgcgaggggcgtcccgatcgtggggaaaatttctgacaggcttcgcaggatctgacaaaccgatttgcggcacagataatggcgggccagtagaaaccttggcgtatg

SEQ ID NO: 66443 - DNA, 466 bp, Zea mays
  unsure (1)..(466): unsure at all n locations
agcttgccaagcccttggacctggccggatttcttcggaggcccgagatcgacctcaccggacttcggtcttccgccgccctgtgtggaccgagctatccagtgagtctccgcccaattcctttcgctcatatcttctctggcatcccgtggacctccctgacctatttgattgaactatctcgccgtgacaaggccggtctcctcgccgccgacgagcatccccgccagcgcgcgtggaccgaccgactccggccatctccgacggcgttccgcacaccgttgtgatccccgagacctccccttcgtcctcgaccacttcaccggagcaacctcgccgccggtaagcccctccgcccttttctccgccgcggctactgtttaaggtagaagaaagacctcgggttaggattggtagaacccganggggtttctgtaatgtcagtgactcatgtgaatagtaacct

SEQ ID NO: 66444 - DNA, 467 bp, Zea mays
  unsure (1)..(467): unsure at all n locations
ctaagcttggattccaacattagaagacgggctctcggtgttgtcttaaaacgatctggccgacagcttagcgtacaacagtttaaaggtgaaaaaaatgagatctttgtattattccttgaaaccaaaatttttcatttgcttgaacttactaacgtatttttttgcagggccttatacttagcaatgccctcanggcacagaaagatgctgaagacgaagggtgtaccatagccttaagcaaccttcgttccgaagtaattgaactaaggaacgaaggtctcgaaaaagataaaatattacattcgttggtgaataagataaaagaggacgaagctgctttcaaagttcaagctgaggctcagaagcgcgaaattgaggatcttcagaaacagctagccagagctaaagaagaatacacagttgaagaaacaaaaagagaaattaatgaacaatgggcaaatcat

SEQ ID NO: 66445 - DNA, 444 bp, Zea mays
  unsure (1)..(444): unsure at all n locations
agcttctaaagggagagcacatnttatgattaacaaatgttntatttgagaaagacagggattgtagcgcatgccacgcggggaagcaagttggagcccatcatccacacaagaacatcatgacgaccgacaggccgcttgagctactccacatggatctattcggcccgattgcttacataagcatcggcgggagtaagtattgtcttgtaatagtggatgattattctcgcttcacttgggtattctttttacaggaaaaatctcatacccaagagacctctaaaggattcttgagacgggctcaaaatgagtttggcttaaggatcaagaaaataagaagcgacaacgggacggagttcaagaactctcaaatcgaaggcttccttgaggaggagggcatcaagcatgagttctcctctccctacacgccacaacacaatg

SEQ ID NO: 66446 - DNA, 468 bp, Zea mays
  unsure (1)..(468): unsure at all n locations
ntgcccacaatgttntccaaagatagctcacaaacttcacatcacggtcagatacgatggtcttgggcactccatgtagtctcacgatttctctgaaaaacatattagcaacatgtgaagcatcgtcgctcttgttgcatggaataaaatgagccatttttgaaaatctatcaaccacaacaaaaatagaatctctcttttttcgagtcatcggcagtcctaaaacaaaatccatgcttatgtcttcccaaggaattttatgagcgggtaaaggagtatataaaccatgagggttcaattntgacttagctntgtgacaggtgacacaacgctccacaaatctgatgacgtctctcctcatcttgggccaatagaaatgatcactgagcatttcataagtcttcttttgtccaaaatgacctgttagaccgccttcatgtgactcctgcaataaaaacaatctaactg

SEQ ID NO: 66447 - DNA, 460 bp, Zea mays
  unsure (1)..(460): unsure at all n locations
agcttcngtattacaaaccgacttaaagatagaatgaccttttaatccataaaggtctgagtcaatggtgttaacttttatgangggcataattgtaattcttcacaagctgtgtcctgtgtctataaatagtgaacagtattcctttactgttcacggattcctgtaattgcgatcgcatcattcgggaaccaatctttgccaaggcagaggtatagctgtattcaatgatttaatatattataatatgattcggttatgattcatttacctttgataccctttattttatattatcttatacaatctattaaaatttaattacgaggacttaaccttcgtaatcatattctcattaatcttcgtccaaggttcattatcctcaagggaataatgcttcgtggacgaaggacgttaaacattaacattttatgttgccttgttcttaattcatagcatt

SEQ ID NO: 66448 - DNA, 479 bp, Zea mays
  unsure (1)..(479): unsure at all n locations
cctgttcattntcttgagggccttatcattcatgtattcaagtcccatcttctcagcctgagaatgcagtataatggtttgtgtggggaaaagttgatccatataagaagggcacttgcattatcttagcaaaactttcaatcttccatgtagttgagcaggatttgtataagcagatttaattgcaaatggaatcaagtgcgggcttggactgactaatacatgccagccacaattgagtaactcgaagcattagtgtttttgcagatntactactgcaagcatgttcaacatataaataagtacattttcaagtgcatcatcaactgcctgtttacctcctcaacgtgttgngcatcaccaagcatgcacaccttcatctttggacgacggatgtgaggcaacttaatagagccactgaaacgctcgtccttttgtggatcataantctttagactaatctgaagctcaacagtctc

SEQ ID NO: 66449 - DNA, 431 bp, Zea mays
  unsure (1)..(431): unsure at all n locations
acaagtttattgaagaacgatactaaatttaactggtcctcaagatgcaatgaagccttcgagtagctgaaggtattattgaccactgctccggtattagctcaaccagacattgaaaagccttttgatgtgtattgtgacgcatcangcagtggtttaggttgtgtattgatgcaagaaggccgagttatagcatatgcctcaagacagttgcgccggcatgaggaacattatccaactcatgacctagaattagctgttgtggttcatgccctgaaaatatggcatcattatctactgnggaatatctatcatatttatacagatcataaaagcttgaagtacanttttacccagtcagaactaaatatgaggcagaggagatggcttgagctgattaaggactatgaattggaaattcactatcaccc

SEQ ID NO: 66450 - DNA, 484 bp, Zea mays
  unsure (1)..(484): unsure at all n locations
ntacaccttttcctaanntgatttggtggttgaattgcccatcacatataattggactaactagtttgctctagtctataagtgtcggngaccataattaggggtaccctcaagactcctaattctcagctggtaacccccatcagcataaagctgctaaggcctgatgggtgcgattaagtcagggatcagtccattcgagcgactcgatcacgcctcgcccgagcctagcctcggacaagggcagccgaccccggaggatttctgtctcgcccgagggccccctccaacggcgaacatattttccggctcgcccgaggccctgccttcgctaagaagcaaccctgactaaatcgccgcaccgaccgaccaaatcgcaggagcattcaatgcanaggtggcctgacacctttatcctaacgcgcgccccccggcagagccgaagtgaccgccgtcacttcgccgctccactgaccggcctgac

SEQ ID NO: 66451 - DNA, 494 bp, Zea mays
  unsure (1)..(494): unsure at all n locations
tatcaatctcgatctcatggntggntcctcctcatattaaatatcttatcaatctttggctgataattctcgtgatgatcataaaatagttctctgagttgaagaaaattctcatatgatgctcttttgccagcaatctctgcttcaactgcgatcacattcttattttctgagccatactctcataggctccatctatatttgctatgtggatttcattggttacgtttggtaatggtgtcatgactaacgactgatggtgccgtgacgagaccgagagcttactatggtgcacacctggtcgagcttctcggcacgcgctggtatcgcggttaatagtcgtggtccattacgatactatactgatgtgctatctttngtggatattctctcanagtgatcgctgcattntgtctcaacatgccgcgatattctatccaaatctatcttcagtatcttgtcagataccctctcacgaatttgcatctatcttc

SEQ ID NO: 66452 - DNA, 429 bp, Zea mays
  unsure (1)..(429): unsure at all n locations
agcttctaagggagaccacgtgataggattatctaatgtgcaattcgaaaaagatagaccgtgtgcagcatgtcaagcaggtaaacaggtgggaggagcacatcacagtaagaatgtgatgaccacatcaaggcccctggaactgctacacatggacctcttcggacccatcgcctatctaagcataggaggaagtaagtgttgatgacttttcccgcttcacttgggtattctttttgcaggataagtctgaaacccaagggaccctcaagcgcttcctaaggagagctcannaacgagttgagctcaacgtgaaaaagataaggagcgacaatgggtccgagttcaagaaccttcaagtggaggagtaccttgaggaggaagggatcaagcacgagttctccgcttcctacacaccacaancaaaat

SEQ ID NO: 66453 - DNA, 461 bp, Zea mays
  unsure (1)..(461): unsure at all n locations
tcttanagctagacttcggttcccgttgagcagatgtgttgttgtagttttaaagacataccggattttccttcaccagatcactcccgaagcagttattagaatggggatctttgtttgggctgtgagaagtcaaggtctagagccaagtgcaagatgctcttgcagtatgcatgaactttcgtatgagacgaagccctgnggtgaagaacaatatcataacaatttcggttgctatagcttcgttgctcgctctggcgcaagctacccagtgccaacatttctgaagagatggcccggggcctggatggaagagtggttttacgtgaaaaatgatttgaaggcgagagaagacattaaagaaatcatcatgcgccccatctggtcccgctttggcctccgaaagccgaaggtagaaattgatgaggcagccgaagcatgccgaagggccttcagcacag

SEQ ID NO: 66454 - DNA, 469 bp, Zea mays
  unsure (1)..(469): unsure at all n locations
tgcagcttgcattggatgaatcccttcgtggaacccaatgccatccttaatggcagggtgtctcccattatagagcatgcttctagcaaatataaacttttcattttcaagttcatgctcagcaantttagcatttaatgtagctatgtgatcattttgttggttaatcatagcaatgtgatcatcaatagcttcaacatttatgtctctgcatctagtgcaaatagtaacattctcaacagaagatgtagacggtttgcaaatattcaattcatcaatcttagcatttagactagcattctcatctctaagacatgaaattgaatcattgcaaatgctaagctccttagacaaatgttcacattattctacttctagagcataagcatttttcaacttaacaaatattgtattttctttaacgagcaagtcctcttgccattccaagagatcatccttctcgttaatg

SEQ ID NO: 66455 - DNA, 392 bp, Zea mays
  unsure (1)..(392): unsure at all n locations
actaagcttgggaatcacatgaactttgggaacaaggatcttctcttgattttacaagttgaaactctaacatctgtttgggaagcaagtgcctctgcctattactttatattcactcccccatgtgggggccttctctttcgaagtcctaaaaacacatttaaccattggtgtagcacatccttaatattgaggtgcctcggtgtgaataccttcggagaaaaccgaagaagacaagatgtagctttgtctaactaccaagaaacaaaggagaatgaaacaagccagagaagtgttacaaacactgtgccaaacaataagcaaaagaactggcttcatcgntgaaccaaatatagtttaggattgttgaacttacataactgaccttgact

SEQ ID NO: 66456 - DNA, 458 bp, Zea mays
agctcgacccgtggacccgcgtcaccggtatatcttaatcgtgctcaccggagttcaaagacccgccggcgcacgtggaccgggtaagcccctgcaccgttttcaaattccttgcgcgcttggcctctgtgtcaccccgtgaagctcatcgtgcaccctaattgaactataccgccgtggtttggccggagcatgagccgccgacgacccccgccgcttgtgctcgtggccagggtagctccgaccacctccgacaccgacccgcacaccgacgtgaccgtcgcgacctcccggacgtcactgaccaccccgccggagctctactgccgccggtaagccccaccgccgtaatctataccgcgggtactgtttaagccggtcagggagcgcgggttagatttcagttaagtccagggggctttgcgcaatgtcagtgacccaagccaatagtggaccaa

SEQ ID NO: 66457 - DNA, 412 bp, Zea mays
  unsure (1)..(412): unsure at all n locations
gagcgcattcatatgatgtatgaatgtccagttatgtttgttttactgtggctgttcctgtttgcctgacaaacatgagcgggtctgttcactggtaggtttcatatagtaaatagccaaattggctgttccaactatggagacatttgtagagggataaaagttcttactgccagcagaatttcataatttttggttgagtagtttggtagatattgaattttgaagttaactatgctgctgtctgaaacagattcagacatttatcttatcagatgttntagaacttatagatggcagaatttaattatccattgaataccgaagttatagaatattttgtgtagacactcatagagtatttgtttaatatcaccactgttataattntaaagatacaaaattaacaaac

SEQ ID NO: 66458 - DNA, 461 bp, Zea mays
  unsure (1)..(461): unsure at all n locations
agctngtccaatgcagcccacctccatatactgttttaagtaaanaaaaggaacatcttaacatcatgacaggcattcatcattctgaaagttgtgcaatgttcagtaaaaactaggtcactcacgaataatggaagtacagatagttttaatgcaagtggtaagcgttgaagtttgttgatcaaaagctgaaagaacccaacgttgaaatggaagaatgtgccaaaaagaaaatagaaagcaaaaaacactcattcaaccatttcaaacaatgaaggtcgaattttacctgtgctccaaacaccacattacaagctattagtttcatcagtcctcactttcatagtaagaacttgctctaattatgattacctgcaccatttgcacaacagaaattgcttggtcagcattgcaatacatagatagcaggccatagtaacatcttgtaaccagaaataatt

SEQ ID NO: 66459 - DNA, 467 bp, Zea mays
  unsure (1)..(467): unsure at all n locations
tgctgaagcttcctggaggccattaatacattatacaacactntctccaattctgtgtaatttttctttgataagcttaacacttcagagacaaaatatacttggacttgctttttattttgtccttcaagcttctcctgtacaagtgcctcacttactgcagagtgcgaagctgccacatacaatagtagaggagcccctggtgtgggtggagttagcgtcgttagatctatcaggtattgcttcagctcttcgaaggctttctactgagctgatccccattgaaagacttcggctgactntagcacttcaaagaatggtaaatttctctctgctgatctagatatgaatcgattcanagatgacagtcttcctatcagcagttgagcccccttctttgtgcttggcggctccatccaaagaatagcttcgatttgttcggatagcttcgatcctttcgttgaact

SEQ ID NO: 66460 - DNA, 283 bp, Zea mays
gcagatgcaagaatattttcttctgggtgtaaatattctagactgtcattcttagtccacttatatcacttgaagtgcctacatggttggtcacaagaatcatttacaggactaatggatctgctatctgtgatttctggagctaatctacccaagacatactatgaagcgaagaaaatcatccgtgacttatgtcttgattatgagagaatccattcttgccccaaagattgcattctttttcgaggtgattttgctaaacaagatttatgtcacgtgtgtg

SEQ ID NO: 66461 - DNA, 461 bp, Zea mays
  unsure (1)..(461): unsure at all n locations
ngaagccatggtaagtagcataggctaataatatactaattgactcaagcctagctacgggtgcataggtttcaccgaaatccaaaccttcgatttgggagtatcccttggccacaagtcgagctttgttccttgtcaccacaccatgctcatcttgcttgttgcggaagacccacttggttccaacaacattttgattatgacgtggaaccaaatgccatacctcgttcctagtgaagttgttgagctcctcttgcatcgccaccacccaatccgaatcttggagtgcttcctctaccctgtgtggcacaatagaggaaacaaaagagtaatgctcacaaaaatgtgcaacacgagatctagtggttacccccttatgaatgtcgccaaggatggtgtcgacggggtgatctcgttgaattgcttggtggactcttgngtgtggtggccttggttcttca

SEQ ID NO: 66462 - DNA, 362 bp, Zea mays
  unsure (1)..(362): unsure at all n locations
agcttatcattntgtaatgaaaggaaccactctatcaaaacgaggaattctgcctattattttcctatcctatcatgaatttgatgtcactaaccaccagtagaattctccttgttacttttaagcaagtgataaaatcttttgcaggcaagacaacaatgtgaaagaaacctaagcgtgaggccaacctgttgcagttggtagcattgaacctgtcctcaacgacaaattgccctttcaccgncgcggagcttcgctcatgcgtcgtcttaaaactggttactctggcagattctgcaagcgcgaccaccggaacctagtcttcaactgaatgcagcctaatccagtgctactgaaaaaaa

SEQ ID NO: 66463 - DNA, 474 bp, Zea mays
  unsure (1)..(474): unsure at all n locations
tacctgatgatngtgacattagagtaatacaggaactaaatgtgatgattagtgaccctntctatgcttatagtttatactaaacctcattggtaaacaaatggttaatgcctttgtagttttgctatatattgtagcattagataaatacaggacattttaaaaaaaagataaatacaggaaacaacctatttgggaacaactttttccaaggttttgtcaactgagcataaaatattttgtttcgctgaagaaaataagtcgcatcataagctaaatgtttcctgatatcatgcatttattactgcacatttcctacaagaaagtagaanacaactatatatatttatagtgtcaagcaacctacgtgggaacaagctttccaagacgacgaaccttcgtgtccgtcgtatcatcgaccacgcttcctgatatctcgatataatacgactttccagtcattcgagggagctc

SEQ ID NO: 66464 - DNA, 472 bp, Zea mays
  unsure (1)..(472): unsure at all n locations
agcttcatactcggctgcgttgttagaggccgggaatagcagctggagagcatacttgaggtgctcgcctccaggtgcagtgaagagaattcctgctcctgctccctgcagcttcagcgagccatcaaaatacattcgccatacttctgcggtttctggattatccggtacttgctgttctgtccactctgatacgaaatcaaccagtgcttgagttttgatggctgtgcgaggtcggaactcgatatcatgggatcccaactcgcaagcccacttggctattcggccaatggcttccttgttgtgaagaatgtcccctattggaaaaccagtaactactatgactntgtggtcgtcaaagtagtggcgcagcttgcgggcagttagaagtactgcatataatagcttctgaacttgaggatactntntcttcgatgggcctagaacctcactgatgaagtagacaggatgg

SEQ ID NO: 66465 - DNA, 472 bp, Zea mays
  unsure (1)..(472): unsure at all n locations
ngaagggaaaaagaaggaaggagaacttatccggctgccctaccattacaaattcaagagacatttcaaagtgccctgccaagaatggttggatacaatcgaagtaatgtgcaacgaaatacttggaaattattctaaaaaagaagatcaattgatgactgcggccttcggcacccgtccgaaacgaaggctaaaccgagtgatggatgctataggttttgaatatcctgactacgagcggctggacaagggtgccgaaggccaaaaaaggaagagagtagctagggctctgaataaggacgatgaagatcaaccgaagaagaaaaaacaagagtctgaggtgaaaacagttgctccgaagaanagaaaggctttgactctgaagcaaaaaccaattgatgaaaaagaaaggacttctgcgacatcctatgctaccgaaatggaggaaatcttanaggtaatgactgaaact

SEQ ID NO: 66466 - DNA, 451 bp, Zea mays
  unsure (1)..(451): unsure at all n locations
nagctntaaagcaccaatctgaaactttatctgggccttcagagcccgccaaggtgaagtccttggaaaccaaagaaacagaagcatcagaacaaattttggctgaagaaactggcactgccgcctccgaagcattttccaaagctttcgattatattttacgacatgcttcggggaaagagctgactgaaaaagaaaagcaagaggcttagttttatgcccaaaaactgaaatatccaaagggggcgttgatattcaacgacagcggagaagaagatttcttgtattgtctccctgacagcaaggaaatctctgtctgtcgggagatgagcaagagcttcggactcccaacattagaagacgggctctcggtgttgtcaaaaaacaagctggccgacagcttggcgtacaatagcttaaaggtgcanaaatgagatctttgtattatttc

SEQ ID NO: 66467 - DNA, 413 bp, Zea mays
  unsure (1)..(413): unsure at all n locations
gtttccgaagatcctcaatttcacgcttcttagcctcatcttgagcttngaaagnagcttcgtcttcttttattctattcaccaatgaatgtaatattttatatttttcgagaccttcgttctttagttcaattacttcggaacgaaggttactcagggccataatacacccttcgtcttcggcatctttttgtgccctgagggcattgctaagtataaggccctgcaaaaaaaatgtgtgtcaatacgtttaagcaaatgaaaanatttggtttcaagaaataatacaaagatctcatttttgcacctttaagctattgtacgccaagctgtcggccagcttgttttttgacaacaccgagagcccgtcttctaatggtgggagtncgaagctcttgctcatctcccgacag

SEQ ID NO: 66468 - DNA, 448 bp, Zea mays
agcttctctccggttcgagcctttctcatctgctctctacccctctctctatccttgtccgggtggaggtcgtcgtcctcaacgccctctctctatctttcacatttggcactcgagcgtcttggtcttccagcgggcgcggcggttctggaaccaaacgacgacctgacgcggctgcagggcgaggtcgcgcgcgatgaggtcgccgcgcgcccgccggccactgccagggccagcttgtcctcgtcctcgtccatctcggcctcgtcgtcgggctccatcttccacgccggcagggcctcttccaccgcgaacgtcagcttctcccctgcaataggcgtatgcagttagctagtacggacgctcgaattccgcaggaaaccgttctttctgcagctttgtggcagcaagctaactgctaaccaaatgccaaaatggaatgcaatcg

SEQ ID NO: 66469 - DNA, 466 bp, Zea mays
  unsure (1)..(466): unsure at all n locations
ctaacttcttcgcgcctaacgaagggaagattcctttattattacttcaaagagnggaagtgagttcaccggaggtgggcgccaatgttgaagacttgttctcaaatgcttcaagaacaaggcaacataaaaaatgttaatcggttaagtccttcgtcctacgaaacattatttcccttgggatataatgattttcggacgaaggtcacaaagggcgaacctttataaatgcgttacatattgacgaagaatgaattacaagaaacataannaattacgttgatcatcatatatcattattatatataaataaaaataacattgaattacagatgtacctccaatttgaaggaaatgaaagtacaagcgtgacgcataagtgaacaccaaatcatcgtgaacagtacggaggtactgttcacctatttataggcacggggtacaacccatacagaatacatacatg

SEQ ID NO: 66470 - DNA, 459 bp, Zea mays
agctgacaacgaggagatggcgctcatcatcttatatctttcgccaaatcctcaagcaaatgagggggaatgattacaaaccccgctccaagaaggtttgctacaaatgtggtaaccccggtcactttatagcaaaatgtcctatttctagtgacagtgacaggggcaatgacaagaagggaaagaagaatgaaaagaagagatactacaagaagaagggttgcgatgcccacgtttgccgggagtgggactccgacgagagctccaccgactcctcctccgacgaggacgccgcaaacatcaccgtcaacaagggtcttctcttccccaacgtcggccacaagtgcctcatggcaaaggacgacaagaagaagaagggtaaatctagattctccactaagtatgcaacatctagtgatgaggctaattctagtgatgatgaggatgatttgtttactc

SEQ ID NO: 66471 - DNA, 467 bp, Zea mays
  unsure (1)..(467): unsure at all n locations
agcttagcanatcgtagtacacaagagctaatattttattgagcggaagcagttggccagagagcgtgtcaaatgcgcttgcggtatggccgtatttatacgccaagtgcgttgaaaattgaaagaccccgcttgtcagtgaatgttgctattctagcaaagggaaggtgttttttcggaccttcggcgtaaagccttcgtccagatcgcaatctaaatttattattttgaacaaattaatattgcgaggggcttactgtggggaccttcggcatccgaaggtcctcaaaaacaggatttaatagtgtttctggagtataatgtgtgaacaggtatcttcggactcaagtcagacatcacagtagaccagaataatacgaaggttggtgaagcgccgaaggtgtaagcaggaaagcttctgcgagacagcagcagctgaaaccgacttatagatgaaaaggctattt

SEQ ID NO: 66472 - DNA, 449 bp, Zea mays
  unsure (1)..(449): unsure at all n locations
tgaatggtcttgtaaagtagctcngaaaactcctggtatttcttgtataaaatatgatgtaatctgagttntactttgtaatataatcttacttttccgtccacgtatgatatgctttggtgtggacgaaattaatacttttgagccataggtgaaaacaccttcccttctttgcgtacacagcgaagcataaaattgccttccttttgggaccgaagcatgtttgtacgttatgctgatgatgatcctatgtatgtctaagtgaatgtttatgaatgcaaatgtcatgatgtaatgtattgtgcaaatgaatgttcaaatacatattcgaagccataatcccttgagaatgactcaaaccttctttgccgcttattnttcagcttcaccggttattnttcggtgtatcagcgctgactnttcgctgtaagcctcccttaggagcttct

SEQ ID NO: 66473 - DNA, 466 bp, Zea mays
  unsure (1)..(466): unsure at all n locations
gctttcttgtcgtcttcaccttgacatatattctttttgtttcagcctgctgcccacttgcttcggtagctaattacagggaactttgtagttntccgataggcaaagttgtagccaccaaaattatcgggtaatccatcttttctagcctttggttgataatgtagctcgtgaacccggcagaagctgtctgcaaatggttccactgcttggcttctgagtgcccagatataaacaataagcctaacgatagcgttaggggtcagctgatgaaaatagataccgaacctcttcagtacctctccaataatcccatgtagggggaacctcaatccagcctttagaagacttttaagaataacaatctcatccttctctggcttcggggtagtctcttctccaccgaagcgcaacaacttcttctgatattcagtataaaagcccgcttttaccatcttggacaaat

SEQ ID NO: 66474 - DNA, 500 bp, Zea mays
  unsure (1)..(500): unsure at all n locations
cacaacacactaagcttatcaaaggcatgaagaggccttcctaatggaccattcttgaagttggctatgttgagcaacctcccagctntgaagatagtgagtaccctaaccatgtttacaaactctctaaggctctttatggacttaagcaagccccaagagcatggtatgaatgcctaagagatttccttatcactaatggattcaaagtcgaaaaagccgatcctactctctttactaaaattattgtaaatgatttgtttgtatgccaaatctatgttgatgatatcatatttgggtctactaacaaatctacttgtgaagagtttagtaggataatgattcataaattcgagatgtcaatgatgggggagttgaagtatttcttatgatttcaagtgaaacaactctaagagggcaccttcatcaaccaaaccaagtacactcaagatatacttaccaagtttggaatgaagggatgccagcccatcaagacaccc

SEQ ID NO: 66475 - DNA, 441 bp, Zea mays
  unsure (1)..(441): unsure at all n locations
gcttgaatagatagctatgaaagggctctaagaattcttgtaataacctttggaaagaatattgtnacttgagaattagattttactctgtaaactttgtccataccttgtaatatanttttacctttccatcaatgtatgaagttcttcgatgtgaacaaaaccagtattttntgagccgaaggcgaaaaacaccttcccttcttttcgtatacaacgaagcatgaactgctttcttttctttttgccgaagccttatctttagagccgaagcatccgcctgtgtctgtatgttatgatgatgatgatcctatgtatgtctaaatgaatgtttatgaatgcaaatgtatcatgtaatgtgtcatgcanatgaatgtccaaacacgcacatacgaagccagaaccatagccttcattcccttgggaatgaccgaagtctct

SEQ ID NO: 66476 - DNA, 483 bp, Zea mays
  unsure (1)..(483): unsure at all n locations
actaagcttccagttccacactgagtctgccctatgccgtcgaagcgttatatgattgccatgtactgttatgctntgttgccttcacatattttccgttcgaaatcatctccttgttgccttcacatattgccttgttgctttcacatattttctgttccacgtcatacttagaagttagaacacgtgatttatgccaattaagattattattttatataacagatgacccgccctgttgctgtggaggatgtgaaaagagaagtgaagattcttaaagcacttaaaggacatcagaatattgttcacttctacaatgcatttgaggatgattcatacgtgtacattgtgatggagtaagtaggcccatacacctgttcctgctaatagagcatatcgantttgctatgactnttttccctaaagttttaacatgaacaatatctatcctgtttacagaatcctagacactaaaatgtcatt

SEQ ID NO: 66477 - DNA, 470 bp, Zea mays
  unsure (1)..(470): unsure at all n locations
agcttagtgacacaacaagacaatcggttgatatggtgagacatagagaaccacgaggggagaagataaatcataaatggcatggggaaagaatttcttccatgagtattcattgacatgccaagatattggggtctggtttggatagctcttgtgcataagtataatatatcacatatgtgttcttatggtttccttgtttttatcgtcacaggaagaaaataattgtaatgtttttttttctaaagcacactaaatatactgatggaaccacatattttagtagttatatntgtgttaggtaaacagtgactaaattttcttgtgtttattgaacaacattccaacaccgctagaaacccaaattaccttgatggccgaatatcgctaagaaagcacacccgtaaagaaaaatccgtcacagatagaggataaaagaaattctgaggctcaaattcacgatcctagta

SEQ ID NO: 66478 - DNA, 419 bp, Zea mays
  unsure (1)..(419): unsure at all n locations
tttgaacgtactaagcacatgtcgggaaatatggtaaccgtttaacctagtacctgagtgaagccgggcgcagactttatccctcatgcgacctgagactgggtctcccatgctagctatggtgggtacaagtgcggtcactacaccgcggcagccgaggtcagtggagcattgtatgccaaggcggtgaggcctgtacgcgaacggngaatctatggggacggttgacatgtgtggggacggagtgccctaacatgtcgtgtgtttaggtttaccttgcaaggataaaactcgattcgaatcgtcagcttctcgtagctaatgagactgcttgaccccttgtactacatcgagtaagaagtaaaatgagggtacatgagacaacttgttgattgaataaatgcttgtaccatgtatgc

SEQ ID NO: 66479 - DNA, 450 bp, Zea mays
agctttcttccttaccgatgcgggcactgtttattgtgttttataggcactcgagtggccgcctgtcccttgtcaaagacgtttatgccctcgaagtacccggttatccccagaatattcccacgaggggaggttacatgcagtcattacggtaaggctattccagacacgtcccgtaacgtgcttatcctcgcggggcccattaccatgggccgattcccacatgggcctcccagggcggtgatgatgtgggagacccgtaaacttcgacaaagccttcatcttgcaacccgtccgcgaaggggaccgtgcaggtctacgtccggtaggtgctttcggcttgtttgagcgcgttctgtggatgtgaccatctgcgcgatgggaaggcgaagtcatatagcgaagggtagcgtgttcgccttcgccccaacatttgccctccgagggact

SEQ ID NO: 66480 - DNA, 497 bp, Zea mays
  unsure (1)..(497): unsure at all n locations
ggggggacccgtgcctatcaactgaagttgccacctctctttgtatctgttcatgatgtattccatgtatctcagctgcggaaatgtgttcgcctacccactgaagtgctgccagaaccagacattgagatagaaccagacttatcctaccaagagtaccccgtcaaggtattagatcaaaaggagagatcaactcgagcaaggtcggtcagaatgtataaggttcagtggagtcaccattcagcagaagaagctacatgggagactgaggattttctacgctctcgcttccccgactntctgcccaaaggagtcagtacgtaaccccagaaccccacccncacctgccgcttgaattcaattataagaataacttagataacaaggatagtctaagttgtggatttaacttaaaaagggcttccttctgaagttgcatagagaatgacattcgaagagcagctaacgagagaaactggagtataggaagagtacac

SEQ ID NO: 66481 - DNA, 386 bp, Zea mays
  unsure (1)..(386): unsure at all n locations
caacacttgcccaggtctgatctggattactattttatactggttggtccttatctttgtgctgntacagtactatgccatacaattcaaatccaacagctcagagcagaccttgtgctccccaatggtaacttctctttcctactgactgcttcaagttgttgggcgagattgggctaagctctcatgatttgatttgctccccatctttgtgccgntacaacatcatgtcataccatttaaacccaacaagtcatctngaaacctggcctccctatgccttcttctctcttcccttccctgctggctgctccctgttgttgggccagaattggatgggctcccattcaaggcagaggagtagcagtgtatcaccaccaaataca

SEQ ID NO: 66482 - DNA, 389 bp, Zea mays
  unsure (1)..(389): unsure at all n locations
ccgcagacattaatctgtggctgccttttgctgnttttcctcgccagattgccccttttctgctactgctttcttatctccttccggtattttgtctctagcattcaagtttctttgtgtctgctgggcgccgtgatgcgtgagaccagcgctgcaccatgcatcgcgtgatccagcgaacacgagctttgtcgtcaccngttagatcttgtcgtcccattaaagcatcagcttggagatggattctttattcccttcacacaatcaaggcaggtccatcacaccggatcaccattctcgacacctttcggcggctacttatgcgtggtcgactgccacttatctgcatcgactatactattattctacagctacatcaccaccacatc

SEQ ID NO: 66483 - DNA, 487 bp, Zea mays
  unsure (1)..(487): unsure at all n locations
atccttagagtcacctgcggcatcaagcttggatacagctgacaatctcngagcctctttatactttcctcaaatgctcctcatgctcttgctcattccgagaatatatgagaatgtcatcaatgaacactactacgaacttgtcgaggtagtccatgaacacactgttcatcaagtacatgaagtaggctggtgcattcgtcaaaccaaatgacataaccgtgaactcatatagtccatacttggtgatgaatgtcgtcttcggtatatccaagggtcggattctgagctgatggtagcctgacctcatatctatctttgagaacacactggctcctctcaactgatcgaatagatcttcaattctgggcaggggtacttgttcttgatagtaacctcattcaaggatctgtagtcaatgcacattgaaagtcgcatagaggggggtgaatagggcgaatcttatattataaactaagcacaacta

SEQ ID NO: 66484 - DNA, 445 bp, Zea mays
  unsure (1)..(445): unsure at all n locations
tggcttaccaaaccatacattntgtgtcatatactgtttgtttagtattcatgttcatatagcttacagaccttgtatggtgactcattccaaggaacttgcagtagagaatgattcaatggcagaggaaccacataattaatggtgaaacccatcaaacccttgaacaagatttagttgttgaagttaacgacactgaaacttaccatgaaaaaaaactatatctacttcagaggacacagtggaagataatgtaacagaagtcgagccaagttgtggtagtcaacaagtggatataatgcagaattctctgatggggtgtgattgtcgatgagataaggaacactcacattggcaaagtgaatgaaacatcccttgaaatgaatggtattccctttcagatgccaactcaagaagaaaacccagccacaacagaatttgcatg

SEQ ID NO: 66485 - DNA, 453 bp, Zea mays
  unsure (1)..(453): unsure at all n locations
agcttctaaagggagaacatgtgataggtctaaccaatgttcatttcgaanaagatagaccttgtgcagcttgtcaagcatggaaacaggtgggaggagcgcatcacagcaagaatgtgatgaccacttcaagacccctggagctgctgcatatggatctcttcggacccgtcgcctatctaagcatagggggaagtaagtatgggttagttattgttgatgatttttcccgcttcacttgggtgttctttttgcaggataagtctgaaacccaagggaccctcaaacgctttctcaggagagctcanaatgagtttgagctcaaagtgaaaaagataagaagcgacaacgggtccgagttcaagaacctttcagttgaggagtttcttgaagaggaagggatcaaacacgagttcttcgctccctacacaccacagcataatggtgtggtag

SEQ ID NO: 66486 - DNA, 447 bp, Zea mays
  unsure (1)..(447): unsure at all n locations
ntatcanatggacgtgaagagtgccttcctaaatggaccattcattgaagaggtctatnttgagcaacctctcggctntgaagatagtgagtaccataaccatgtctataaactctctaaggcgctttatgggctcaagcaagccccaagagcatggtatgaatgccttagagatttccttatcactaatggattcaaagtcggaaaggccgatcctacactcttcactaaaactcttgaaaatgacttgtttgtatgccaaatttatgttgatgatattatatttgggtctactaacgagtctacatgtgaagaatntagtaggatcatgacacacaagttcgagatgtctatgatgggggagttgaagtatttcttatgatttcaagtaagacaactccaagagggcaccttcattagccaaacaaagtatactcaagacattct

SEQ ID NO: 66487 - DNA, 417 bp, Zea mays
  unsure (1)..(417): unsure at all n locations
gcctctctcatgtctttcatatcaaagttcgatgattgaaactttggtcctgctagtagaatcctatcaatactagctaaaaggatgtcatccacatacaaaacaaggaagatatactttcccttcttaaactttgcataaatggaattggcttcctttttcctcgaaatcaaaattctaatagtctgaccgaacttgagataccactggctggaagcttgcggtaatccataaatggaccttcttaaatgacatttcatatgttcttttccatgcatgacaaaaccctttggtgtgccatgaacatgttttctattaactccctatttaggagtgatatnattacatccatctgatggggttcgagatcataattgcgcactaatggctatatgatcctgaatgaatctttcatta

SEQ ID NO: 66488 - DNA, 483 bp, Zea mays
  unsure (1)..(483): unsure at all n locations
ctaagccttgactttgacccgaactgtaagccttcatggtttgctctgaatgtgtttacaagccgngtttangagtgttgggggtacctctaattacgatacccgacagtagcccccgagcctcgaagggagtgtaggcactcgcttggaggctctgtcggctttttgcgagaggaccagcctttcttggttatgtttcgttttggtgggtgtgcgcgagcgcacccgccgggtgtagcccccgaggcctcggaggagtggtctgactcctctgaggtcttaattcgtgttgtgatgcctcggtcggcctggtcgttccctcatgcggcctggccgcagctcgggtgcatggtcaggctccgagtttttgagctggttcattgacgctgtcaacagttntggccgcagccgggtgcgagggcagcccccgagcctctgcacggagcgagaggacgatcaagaactgtctcgactnttattata

SEQ ID NO: 66489 - DNA, 238 bp, Zea mays
ttaacttgcgggattgatggttgtgagtggaagacataaacatctccattgaatttcgtctattgaacggctttatattgtacggaactgatatataaaaaggtttttctcttgagttaaaataaatggtggtgaaggttaataattctatgaatgaagtgctttttgaagacatattttactattgagagctaagaaactgctgatgatacctaatttataaattgcttaatactac

SEQ ID NO: 66490 - DNA, 465 bp, Zea mays
  unsure (1)..(465): unsure at all n locations
acacaaaaactcagcttaactctcgcgagactatcccgcctctttttttattgtgaatcatatcgatgggatattctatgcatatttactttatttgttctcctgtatgttttactcgttgtttcctaatttgaatggatggatgtatgtatgcttgcaatcgcatagagaacgatccggttgaagagcccgacgaactcgcatgagaagcccctgagcagcagtcggttggtggaggcaagagtcccttgacctatctctgtcctattcattctttaattcacctcccgcattacacatttatgcttaaggattgactagctntgttatccatgtccttgtttacctatgtgggttgaattattatctgttagttttatgctattgctcaaactctaatcaatgaacatgatgagattatcgatgatacgcttgtttcccttctcttattatgatgttgtactt

SEQ ID NO: 66491 - DNA, 454 bp, Zea mays
  unsure (1)..(454): unsure at all n locations
agctntgtttggtgacaaacattattaactaatgttggcatgnattactcggaatcgtgaggctgaataagagtatgcaccgttccacaactntgggtaggaagatatttctagcggaaacgattgctcgtccacgatatgccaatgaagaacgttctgcgcaatgatagatgagccgggacaggggactgcggcggagtggagatccgtgccgacatagtccgacttcttcgctcgttggacagcgactgccattcctagctgcgtgtgcatcgcggctgccggagccggacgcacgtggtcgcctggaggtgggcggctccctttcggcttttgcggcgcctggggagcttctgaaactatgtctcgccagctttggagttgatgagatccatggcggccatcacngagcaggcgaaatgcaagataagtgttctcctctancctgatcttt

SEQ ID NO: 66492 - DNA, 463 bp, Zea mays
  unsure (1)..(463): unsure at all n locations
ntatcaaatggacgtgaaaagtgccttcctcattggaccattcaaagaggaggtctatgttgagcaacctcccggctttgaagatagtgagtatcctaaccatgtgtataaactctctaaggcgctttatgggctcaagcaagccccaagagcatggtatgaatgcctaagagactttcttatcactaatggcttcaaagtcggaaaggccgatcctactttatttactaaaacatttaacaatgatttgtttgtatgccaaatttatgttgataatataatatttgggtctactaacgaatctacatgtgaggaatttagtaggatcatgacacanaaattcgagatgtcgatgatgggggagttgaagtacttcttatgatttcaagtgaagcaactccaagagggcaccttcattagccaaacgaagtatactcaagacattcttaacaagtttgggatg

SEQ ID NO: 66493 - DNA, 469 bp, Zea mays
  unsure (1)..(469): unsure at all n locations
agcttgaacttggtttatctgcaatgtctaatgtatcttcttgcagacagccttgcttacaacagcttaaaggtttgcatattttaattttgtatttgttattttatgttaggaaggtttgtggtaatcgatttgtggtaatgcttattattatttatttgtatgttttttggttatcagngtcttattcttagcaaggctttgaaggctcaataagatgttgaagacgaaggcacccggatagccttcggaaatctgcgttcagaagttatatcacttcggaatgagggccttgagaaagacaggattntgctttctttagtcgagagactaaagactagcgaagctaaattggttagattctctgaagtggaacaaaaaaatatgaaatttgagaagaagaaagaagcagatgaaaagcgtattgctgatttagaatatgttttgtccattcaagtgggattacaca

SEQ ID NO: 66494 - DNA, 477 bp, Zea mays
  unsure (1)..(477): unsure at all n locations
gggtctgacanacaggttggccatgtgagggcacagctagttttgtcaaaagagattctgcacagattagagatgacccaggatgagagatctctcactacggctgaattatggctcaagaacaggctgaaaaagcattgtttgttgttgtcctccttcaagtgcaccatggcaagactaagatctagaatcacttggctcanagaaggtgatgctaacacgaagttttttatttacatgctagacaccgcanaagaaagaactttgtagctacaattgtggatggagatcgtattctgaccactcataatgaaggcgcagcgcgcgcatcgcggccaggacaggcgaaaacgccatggagtgtgctcgcaaagtcctcatgagccgcctcggattaaaagatgaaggcggcgacaacgaccgtctcctgcgctacgtcaaccttcttaaggggccactcaatgacaccaacatcat

SEQ ID NO: 66495 - DNA, 394 bp, Zea mays
  unsure (1)..(394): unsure at all n locations
agctttctcgataagtcngggacgggcctttcttttgttgaaagtacgcgtaagcggcaaggccgaccgagccgagggactcctacgcctccgggatacggatacctcactcatcaccttccgcgagaagcaactctcgctcacgcagacatccctgttaccgacggaaagtccagatgctcgaaataagaggaaagaagacgcggctntactgcacggcgagggcgtgttttctggcctcggcggccacagaaggcacacgctacaagacaatctgatcctgcaggctcgggtcttcacgctgaagggggccatagcaccctcggcatcgacgacgtcttcagcaaggtccgacccagcctcggacggcggcgcggtcagggacttctccggg

SEQ ID NO: 66496 - DNA, 429 bp, Zea mays
  unsure (1)..(429): unsure at all n locations
ctaagctntccagtatcttcttgggaaggtgcctttctcttgagatgttttttgcgagaatggaaaataaggcgaggattagctctaatttatgatctatgtttttagagacaattcttcttaaaaagaaggataacacacaagctcagcaatgataagcacaaacaaatcaaatgttttgcataggggaagaataaacgttttccaaagcacagactactcaaattcaggggctaagcttaactactattgctcggctcctgaactgggaactacgctaaatgcgactaatgagcacaaacattaaagcatcacatatgcactcaaaagggaagaaaacatcaagcgaaattcattttgaaatgccctaggggccacacaattagagtttttcaaacacgagactacacgaatacctctcatacatgc

SEQ ID NO: 66497 - DNA, 241 bp, Zea mays
acatgtacaacacaagagtcggagttatctgcttctactaaattagcatctaaaacacccgtgatgctcctcaagaaaaaataaaatcatggcatgttgacacttcacaagcaagcaattcattcctcttaatatttaatgcaagggagcttcgagcatctataaactaatcatgttcttcatacaacaaaacctcttacttttctaaaaagatattcttttcattcaaggcatcaatcaa

SEQ ID NO: 66498 - DNA, 491 bp, Zea mays
  unsure (1)..(491): unsure at all n locations
acatacaatactcaagctggtctntggctcatcctccttttcatccaggttgatgatatcttagtatcaatccaatagactcatgagttctgaagaagttgttgcatctacaacggaatctattcttggtagtggaaatttatccttcggacatgccttgttgagatctgtgaaatcaatgcacattctccatttcccattagcttttttcaccatgacagtgttggccagccactctggatatgttacttctctgataacgcctgcacttaagtctcttcacttcatttcgtgcaccttcggctttatcatcagacattatctgaagcctttgctttcttggtctgaaagtcgggtccacattgagtgaatgctcaatgacatctctattgacaccacagagatcattagttgtccaagaaaagacatctttgttgttgaacaagaatcataacaaagtcatttcctgttcaccagatagctgagatcct

SEQ ID NO: 66499 - DNA, 446 bp, Zea mays
agcttctaagggagaacatgtggtaggtttgtctaacgtgcaattcgaaaaagatagaccttgtgcagcttgtcaaacaggtaaacaagtgggaggagcgcatcacagcaagaatgtgatgaccacttcaagacctctggagctgctgcatatggacctcttcggacccgtcgcctatctaagcataggaggaagtaagtatggtttagttatcgttgatgacttttcccgcttcacttgggtgttctttttgcaggataagtctgaaacccaaggaaccctcaagcgcttcctcaggagagctcaaaatgagtttaagctcaaggtgaagaagataaggagcgacaatgggtccgagttcaagaaccttcaagtggaggagttccttgaggaggaagggatcaagcacgagttctccgctccctacacaccacaacaaaatggtg

SEQ ID NO: 66500 - DNA, 470 bp, Zea mays
  unsure (1)..(470): unsure at all n locations
ggacattgtctccctggtggaagccaatgccatccttaatgccattgcgtctcccattatagagcatgctgttagcaaatntaaatttctcattttctatctcatgctcattaatttttgcagttagttgagctatgtgatcattttgtttttttaattaaagctaggtgatcatggatagcatcaacattaatatctctacatctagtacaaatagaaacatgatcaacactagatgtagaaggttcacaagattttaattcatcaatcttagcatgtaaaatggtgttctcatttctaagattggaaatagagatattgcaaacatttaaatctttagccttagaaattaatttatcattttcaattntaaggctagaaagtgattcattcaatttatcaatcttagcaattaaactagcattaatatttttaagattggcaattgaatcatcacacacatttctctt

SEQ ID NO: 66501 - DNA, 474 bp, Zea mays
  unsure (1)..(474): unsure at all n locations
agcttgccaagccctcggacccgaccggactctttcgtttgtccgagatcaacctcaccggacttcggtcttccgccgccgcgcgtggaccaagctatccagtgagtctccgcccgattcctttcgctcatgtcttctctggcatcctgtggaccttcctgacctatttgattgaactatctcgtcgtgaccaggccggtctcctcgccgccgacgagcatccccgcctgcgcgcgtggaccgaccgactccggccacctccgacggtgtttcgcacaccgttgtgatccccgtgacctccncttcaccctcgaccactttaccggaacagtctcgccgccgggtagcccctccgccctctttcttctgcgcggctactgtttaaagtagaagaaggacctccggttatgttctgtataacccgagggggttttcgtaatgtcagcgactcatgtgaatagtaacctaaggact

SEQ ID NO: 66502 - DNA, 452 bp, Zea mays
  unsure (1)..(452): unsure at all n locations
taagcttgtcctaaaagttgggtaaaatattgggattataaattattttctattattccagaagtatggactttggctattntaaatgtcccaaaattccttattggaactaaaaatcatgaaactatttttattaaatactatagaaaattaggagcctagcaaaattggtctgatatttttagcatttttctcgaattctttatggatttctaaactttcttagaaaaagaaaaaggaaaaatcatcaacagaagtgggctgacatcggcccacacagcccagtccggtgcagaatccgggcacaccctcgaccatgcggtggactttgcgcaaaggcccttgacggttcaaaaatctaagaagaagtcctcgactggatgtaatgagtcactgacatcatacaaaaatgcccctctagttctatttcttctccatcctangtccatagc

SEQ ID NO: 66503 - DNA, 453 bp, Zea mays
  unsure (1)..(453): unsure at all n locations
agctttccaacccaactggaaccaccttatatantattcggagtcaacgggaatcgncgaaacaagtcagcgttcagattctgntttggtgctgcgacaccgtttgttgggctgttgggccgtgtatcgtgttggagcccattatgggtgcgaccaggggttgtgcacgcccctaacctctattttaccagcagccaccaccacattagggtttgggttttgcttagatcatatctgtcatcgaacagtatcgccgttcatcggtttgtgagaccccacctcgtgatcaatgcagatttgattgcgttctttctgttcttgcttgtagtcttgattgcgcttgcagggataagccttcgtggcgaggtcactcgtgtgtcacgggtgataaccaaccgagcagtggtgtagtgattgcgaggagccgttcgctcggagccttggatcatcaac

SEQ ID NO: 66504 - DNA, 485 bp, Zea mays
  unsure (1)..(485): unsure at all n locations
tcttgggcccagctcccaccaccaccactagcactttattctgttccanagccagcagccaaaagggcaccaacatgctcaacaacagcgcgattntcaagaagaagtgcacacagtgttaaaactcctctgacatgtttctatctcatttccaagagtagtggttggtcttctgataccgaagcaagaccaaatagggcgttggataatcccttttatatcttctctttcaactaagtcattcttcacataaaaccattcttccatccaggcccctggccacctcttctgaaatgtcagaactaggtagctcacgtcagagcaaggcacgaagccgtaacaaccaaaattattatgatattgttccttcccagtagccttcgtttcgtaagacaactcatgcatattgcanaagcattgtgcacttggctccggtccttggcttctcacagcccacataataaaccccatcctaatgatagctt

SEQ ID NO: 66505 - DNA, 464 bp, Zea mays
  unsure (1)..(464): unsure at all n locations
agcttctgaagggagaacacattctacgattatcttatcttcnatttgagaaagacagaatttgtagcgcatgccaagcanggaagcaagttgggactcatcatccacacaaaaacatcatgacgactgacaggccactggaactcctacacatggacctattcggcccgatagcttatataagcatcggtgggagtaagtactgtctagttattgtggatgattattctcgcttcacttgggtgttctttttgcaggaaaaatctcatacccaagagaccctanagggattcttgagacgggctcaaaatgagttcggcttaaggatcaagaaaattagaagcgacaacgggatggagttcaagaactctcaaatngaaggatttcttgaggaggagggcatcaagcatgagttctcttcttcctacacaccacaacaaaatggtgtagtggagagaaagaat

SEQ ID NO: 66506 - DNA, 489 bp, Zea mays
  unsure (1)..(489): unsure at all n locations
acctatgatactcagcttcttgaaatgttctctgaagctacttagcatgatttcctctttcnaacattcttccgaagatcgatgtcatgtccccttcttgtgccatatgcaacatgatgtatgatgcttatgttatgcgaaatgatgcgatgatgttatgctgtgtaagatggtgtttattccgaagatacacacgttcctgcgacaaaacacataattttttttgaatcagcattgtctttttactataagcctcccttaggagcttcttcgccttttacttcagcggaatcagcgttgacttttcgctgtaagctctgcattcccttaggaacgactntggagcttcttcgcctttacttttggcggaatcagcgttgacttttcattgtaagctctgcattcccttaggaacgactntggagcttcttcgcctttacttttggcggaatcagcgttgacttttcgctgtaagctctgcattccctt

SEQ ID NO: 66507 - DNA, 474 bp, Zea mays
  unsure (1)..(474): unsure at all n locations
agcttgtcgtgggaccgtccgcatccgtactcttttcccatccgtggagcctcaccggaatccgcgtccaacgctgagcctcgtccgcaccgcgaccgaatccctccatttaccacaagggtgaagacaacccgaatatttttataactccaaaatcatgttttaaattaattcatgaatatggtaattattcattgtgatttggaattcatatatgtaaacgattgattttaagtgtttgtgcgatgaattagtgaatggtttttagacgtgatattggtttacgatttctttataatttgggattggaaagaggaatgatagatnttggtagaccatgtgttagtgatgaanacactagataaataatatcttagttaatcttggttatgatcgaatttagaatttatctaagagtttatattcataagtgcatctaaacccactaaatagatattaaaagcttctcttaac

SEQ ID NO: 66508 - DNA, 445 bp, Zea mays
  unsure (1)..(445): unsure at all n locations
tagagacaaggccagccctcctcttgcccttggctatggtattctccagntcagacaccgcggaaggcttcttgttacgaaccttccagacgtctccccggcggatgagcaccttggcggccttccagccatcgatgctggtgtctatgacggtgacatcggtccggctacacctctcaccgtcggcatccgcggcgcgctccgcccggcggcgcttcttggccttggcgatcttgtcctttttgtccttgtggggacgctgtgcaggaagggcagagatcggctggtcctcgtcagttctcgggcggngccgggactgcttgcggaaggctttgggggccggngggcccggcggngcggaggacgggaccgcgaagacatcggagatcacggcaacgagctgaagctgtggttgcggcggcggctgcgaggaattgctagagct

SEQ ID NO: 66509 - DNA, 443 bp, Zea mays
  unsure (1)..(443): unsure at all n locations
agcttcgatccttcggactgtgtctagatatttttcaagcttcgggtctttagccttgcaactnttgtcaatatgacccgaaacaatctgagaantcagtttaaggatcgccctcctgatccccatcgcctttagtttccgaagacccaggagcaaggcttcgtactcagcaatattatttgtgcagctgaagtccagtcttgctgcatagcaagatttaaccttggacggtgaaaccaaaacagcagctgctcctgctccgaaggttccccaggagccatcacaaaacactgtccatgcttcggcatctttattcgcttcttcgccctgagcccctgccgtccagtcggcaataaaatctgccaatgcttgagactgaatcgaggatctgtgcacataatcaatgtanaattcattaagctccgcagcccattttccaattc

SEQ ID NO: 66510 - DNA, 462 bp, Zea mays
  unsure (1)..(462): unsure at all n locations
cttggctggattggttacggggagagacanaagaatctcttcttgattatagctcaacctgacggttctgggttcagtgttgagaattgccttgtgttgggttaaccaattcatacccaaaattacatctatatcctggcctttcagaacaatcatgttagcaggaaagttccgtccggccattgttactggcacttcataggccacttctctagtaaaaatgtgtccccccggtgaatgaatttcaaatccctcttttgattcatggcatgcaatgtgatgttgctccacaaatttcttgctaatgaatgtatgcgaagcaccagaatcaaaaagaataattgcagggtaactggccacgggaaacgtacccatcatcaccggctctccttccggtgtagtggccacttgggtgtaatgtacacgccccgtcttctttgtattttttcccacagcattttc

SEQ ID NO: 66511 - DNA, 470 bp, Zea mays
  unsure (1)..(470): unsure at all n locations
agctntgccaaataggtcgcatgattataccttttatgtcttcccgcgctttcaaatcatatnttatataaaaccattctgtcatccagccgctaggccacctcttccgaaaagttggcacgggacagcttgactcataccgagaaacaaaactgtagcagccaaagttgttgtgatactgttctttaccccaaggtattgtctcgtatgataattcgtgcatattgcagaaactttttgcatcaggctttagaccttggcttcgcacggcccacacgaagatgttcagccttatgatagcctcgggggtaagttggtgaagatagacttcaaaaatcttcaacacttccacgacgaagctgctcaagggcaatcgcagcccacccttctaaaagcttcggaatactacgacttcattttcctcacggtgtggacaagtcttcttcctctctctgccctcacaatggaca

SEQ ID NO: 66512 - DNA, 492 bp, Zea mays
  unsure (1)..(492): unsure at all n locations
cgtcanactcctcgagaagacaagatatctcctctttgcttatcttgccgagctcttntagcttgtaaagtacaaattcagcagcactgtacacatcaatttcaagtatcagtatcattaggaacactttangaaaaatatattgactaatattgaaaagggatgctgaggatgaacttgtagttatgcgcttacccaacttgtcggtcgtcatctatatcagctgcctcaagatccatggtggttatcctcctgttgatcacccatttggtcaggattttctgccggcgctcagtgtagagctcagcaaggtacatgaagaactgagccatgatgagagtacttgtggttatccaaaacactgcaaaaacacgccccagtttggacgagaagcttttatccccataacccanggtagtgatcgtggcacagacacagtagaaggaatcaacatggctgagcttctcaaccttccacagaaatacagtccca

SEQ ID NO: 66513 - DNA, 448 bp, Zea mays
  unsure (1)..(448): unsure at all n locations
agcttatcagtagatgatgaagccgattaccttatgtggaaaaaactctacaaaaattcttgtattatccttgtcaagaatattgtaatttgagaaccacatactactctgtaaatgtgtccataccttgtaatataattttaccttttcatccatgtatgaactgctttgatgtggacgaaacttatatttttttgagccgaaggcgaaaaacacctttccttcttttcgtacacaacgaagcataaatctgcttccgaagccgtaaccttatagccgaagcaactgtctgtatttgtatgatatgatgatgatgatcctatgtatgtctaaatgaatgtttatgaatgcaatgtatgatgtaatgtatcgtgcaaatgaatgcccaaacgcacacatacgaagccacattcataaccttcattcccttangaatgagtgaagtcac

SEQ ID NO: 66514 - DNA, 416 bp, Zea mays
  unsure (1)..(416): unsure at all n locations
tctacacgcttgccccagagatcagctaagcatgtctgattggctctctggtaagacgctcccagcgttttgaggccatacggcatggaggtatagcatatttctcccaacggngtgatgaatgcagttttttcctcgtcttcatttgctaggctgatctgatgatacctggagtagcaatccaagaaggacaacacagaacacctggcggtcgagtctaccacctggtctattctacgaagtccgaagggatccttctgacagtgattgttgagatctgtatagtcgatgcacatgcgccaatccactttattctctttgagtacaagaacaggatttgctaaccactcangatgcagtacttctctaatgaatcctgccgcgattaggcgagctagctcatcacggatgacatc

SEQ ID NO: 66515 - DNA, 133 bp, Zea mays
  unsure (1)..(133): unsure at all n locations
ctatatcatcagtcataatgcatgggggncttatctccatccagntctacattaagaatgtcacaactgttagcccccacagttcctctgcagctcaagtgcgacacccctttctatgtggtcctgcatgcta

SEQ ID NO: 66516 - DNA, 413 bp, Zea mays
ttggctgtcttatgcggttagcaaatatatatttaatttctaaatttaacttggtcaaaaagtctaagtgccatgtgtgtgttgaatcaaaacaaccccgcaagccacacaaggctgctgaggcgaggagtttggcacctctagaacttgttcattctgatctgtgcgagatgaatggaattttgaccaaaggtggtaaaagatactttctcacttttatagatgactccactagattttgttatgtgtatctcttaaaaacaaaagatgaagcgttcagttattttaaggcctataaagctgaagttgagaaccaacttgagaggaaaataaaacggttaaggtctgatcgaggtggagaatatttctctaatgtgttcgatgagttctgcgtggaacatggtattattcat

SEQ ID NO: 66517 - DNA, 471 bp, Zea mays
  unsure (1)..(471): unsure at all n locations
agctggtgaagattcttcatcccaacatgggctattctgcgatgccagagccaacccatgttagtcttagcaattaagcatgtgttgagttcagctctattaaaatccactaagtatagctgaccctctaacagacccttaaatgctattgaatcatcacttcttctaaagacagtgacacctatatcagtaaaaagacagttgtagcccatttgacataattgggaaacagaaagcaagttgtaatctaatgaatcaacaagaaaaacattggaaatggaatggtcaggtgaaatagcaattntacctaaacctttgaccaacccttgatttccatccccgaatgtgatagctcgttggggatctttgtttttctcatatgaggagaacatccttttctccccggtcatgtggtttgtgcacccgctgtcgagtatccaacttgagccctcggatgcataaacctacaaa

SEQ ID NO: 66518 - DNA, 492 bp, Zea mays
  unsure (1)..(492): unsure at all n locations
tgcgtcccatccagggacagcgagaganacctctctcatggcatgaagaatgcacgcccgtgttccgttcctcgaacggctcgcgcacgcgcaacagccgccccacaaaccactcgccccatcgcattaactccgcggcgggacaggcggcgcctctggcaggggaagcgagcgacgcttcgccttcaccataatgaccgcgtcaaaaaaggtatgccacatcattcgattttgtatccttttcctctttctctctcttacaacagggaccgggaaagggggataccccgaaaaggatccttctccgtgaaggaaacaagctccgagcctccttactgatcagaggttcgaaggctggcccctcggaggggttcaacagccgcctcagagcgcgtgggctccacacccactactggttagaggttcgaaggccagcccctcggaagggttcaacggccgcctcaggccactcgggctccgncncactactga

SEQ ID NO: 66519 - DNA, 475 bp, Zea mays
  unsure (1)..(475): unsure at all n locations
agcttcgggaaccccatacttctagccatctcccggctgacagataattctntgttgggggggaggcagtataagaagtcatcttcgtatgtgccattgaatactaaggccccctttggatacttcaattctcgggcatagtgattagcttcaaaaatctcttcttcagataatctttttcccgaagcatgtcgtacaatataatcgaggagcttggaggatgcttcgggggcagcagtgtcagtttcttcaaccaaagttggctctgccatttttgtttcttcggcttccaagggttataccttggtgggctctgaaggcccagcttcagtttcagattgttgctttgaagcttcggcaacaaaggcttcagtatgcacttcagaagnttcaacagttttcttcggagttgtgcttgaagacttaattgtctccaaaacatccagcacattaaccatctctttttcttttcggg

SEQ ID NO: 66520 - DNA, 168 bp, Zea mays
ctaagctgagaactaacagcgtgggagcaagagctaaaatggatacaaagcaagtggccaagcaggtccaaacatagtcgggtaagttcttatttatacactcttgcgctccaaattggagggccctctgtcattactgtgctttctatcaatgaacgtgtttttcgg

SEQ ID NO: 66521 - DNA, 439 bp, Zea mays
  unsure (1)..(439): unsure at all n locations
gagcttctagcacagctctaacggcaagagttgtttttgtctcttgtngtggtatcaatcacttcccccctcccctccctcacacagtggttattgataaggcagaggctggtcgatccgcgtcaggctcaagcgggctcttgtgtgtttaacgttagtgaagctgaccttcactagcctgctcacctaacgctactagctagtgcatcagagctttgagagctgaggctaccaaatcaccgtatacaaataccatatgcatgctcgtatgagcgagacatttggagacggaaatttgtcgtgtatctgcatgactcactcactgtctcactccgtgcaactatgaattttcgccatcttatcgacgggcgattttatttttagattttgtgttccaatacgctactttcgagtcatcggtgcgtacatgttgttggga

SEQ ID NO: 66522 - DNA, 492 bp, Zea mays
  unsure (1)..(492): unsure at all n locations
cttgtcaagaccctacctcaacagttcttgatatttcctgttatgtttatatggngaaagacacaaactgagagtagttntttactaagccttgaatccttgaagggtccgaatactaatactcatcangctatagaagacatattaatgtaaggctgctattaagaaaaaacttttcatggngtatcagaagaacatatcaacatacccttacaaacagtgtaatctgagttccacgtataagcattttcttaggatcagtctcttccttgatgacataagagctactgtcagccacagcttcccacacatactgtttatctgactntggactcttggtggacaccacaacctgcaatgtgggtttgacaaaatgtcaacttcaataacggtctaagccaatgcaaaacgagtaaaaactcattccatgtaaaattatttaagaaaaaaaatcatacaagagatatctaaaaccttccccgcaacaagaaa

SEQ ID NO: 66523 - DNA, 465 bp, Zea mays
  unsure (1)..(465): unsure at all n locations
ggctgcagcttgcngctcgatctgaaaagaaaactaatatgttctgtttaaaaggccgcagggcccttctggcacatagataaacaatgcatgcataccagcatgtatgcaacataaaggcagtcggagtaaatctgttatggtcactatatcgggtgagggattggagaggggtatcgatgggcaagaacgtcgagcagggccctctgcccacggccgagcaagaggagggtttctcccttctaattcttcctactttatttctcatctattgattacataaatgacaacaactgctatgcaagtagtccttctatgcaagcgtgcaagcaaaccatctgatccattagatcgtgatccaacccgtagtcacaattaacacttaaacccttccaccaccagttcaataatctttataataaatcttaacaaaccactggtgtatctatggttggatcgtaatct

SEQ ID NO: 66524 - DNA, 491 bp, Zea mays
  unsure (1)..(491): unsure at all n locations
tgtgctacattaattccctttacatttgtgaagttaanaataccatttnttttaaaaatataattatattatttatatttttatatcctttctcttcttctcattttcaaaaaccctattttcaaatttagggtttaatcaagcttcaaataattattaccttattatttttatcctcattgttttatttaatgcacaaacatataaaactccaacaaaatgcactttcttttattttagcattattggtttaatttaatcatccctgattttatgtatgctattttcatgatgcaattaaggcacacaaaatgtggaaatccactatatcctttgtatacaaatttgagtattacaaatcctacccccttaaaaataatctcgtcctcaagatttaagaagatctanggaaaaggtggngaaaatctatacgaagctcttcttctctttcccacgttgcttcatcttcaccgtggtgactccattgaact

SEQ ID NO: 66525 - DNA, 468 bp, Zea mays
  unsure (1)..(468): unsure at all n locations
agctngtcgtggaccatttataacaaataaagttccttatagataattcgatacaattttgttccaattatttgaatactaagatgaatgcaaaggattaagaactcacaactattcatacataaaaattataaagaaattttaaattatcatcgcttcaaatgtaaaaaattgtaaacaagttttcgcacattgtgttgtgcccagcatgtcgcctagcgtcagcagccactctagggtcaccttgttgtgcacgccgtactcatacttctggatggtggtatggtgctacatgaacatgatgacgagcgggatgagggccaagaggatatgcacccacgcgccctctatgaacttgatcagcgacaccgagaagtatagcacctctatggaggcgaagaggaagaagtctaggaccatccagggggagcggtcatagcacaacatggtaactctaatatnttctta

SEQ ID NO: 66526 - DNA, 423 bp, Zea mays
  unsure (1)..(423): unsure at all n locations
gtagcataggccaataatatacgaattgactcatgcctagctacgggtgcataggtttcaccgaaatccaaaccttcgacttgggagtatcctttggccacaagccgtgccttgntccttgtcaccacaccatgctcatcttgcttgttgcggaagacccacttggttcctacaacattttgattaggacgtggaactaaatgccatacctcattcctagtgaagttgttgagctcctcttgcattgccaccacccaatccgaatcttgaagtgcttcctctaccatgtgtggctcaatagaggaaacaaacgagtaatgttcacaaaaatgtgcaacacgagatctagtagttacccccttatgaatgtcgccgaggatggtgtcgacggggtgatctcgttggattgcttggtggactctt

SEQ ID NO: 66527 - DNA, 453 bp, Zea mays
tgcaagcttggaagtcttcatccacatgtgctttttgtgatgccacagccagcccatgctagtcttagcaattaagcatgcatctagaccggcctccgcatttgcaaaatcaactaaataaagtttgtcgtctaatacacccttaaaagctagtgaaccatcacttcgtctaaagacagacacatctacatttgtgaatagacaattatatcccatattgcataattgactaacatataacaaattatatccaagcgactcaactaaaaacacattatatatagagtgctcggatgaaatagcaattttacctaacccttttaccttgccttggttcccatcaccgaatattattgaatcttggggatccttgttctagacgtacgaagagaacatacctctttctcccgtcatgaggtttgtgcatcctctgtcgataatccagcttgaacc

SEQ ID NO: 66528 - DNA, 481 bp, Zea mays
  unsure (1)..(481): unsure at all n locations
ttacggacctatgaaactaagctagaaaatctggatgaatctgcgataatacccatctagtccaaganaactccggacttggtgaacagttgttgggggtttccattccagaatatctttgaccttgttaggatctaccgcaattcctttagctgataatacgtgccccaaaaattgaatttcttccagccagaacgcgcacttgctgaacttggcatatagctggtgttcccttaggcgcgtcaatacaatccgtaaatgctgagcatggtcttcttcattcttggaatatatcaagatatcatcaatgaagactaccacgaacttgtccaattcaggcatgaataccgagttcatcaaataagtgaaatgggcaggagcatntgtgagcccgaaagacatcaccaagtattcaaacaatccatatcgcgtagtaaacgcggtcttcggtatatcctcgggccgaatacggatctgatga

SEQ ID NO: 66529 - DNA, 449 bp, Zea mays
  unsure (1)..(449): unsure at all n locations
agtgagttcacatgttgtatctgtgcttcatgcgtgtgtgcagatgagaagggatctatcgcatgtgacacangatgcaatgccgcgatctcccgtctcaaatgcttcctgatggcctattctgaaaggaaagtgttggtcagcagcaactgtgaaacgccgaccaagtgcggctgcgtgtntcgtcacaaacaagatgcaacccttatcgccggcgacgtttgcaacaaaaagggatattgatggcagacgtgtatttcttggttgaataatatatactgctataattaatatgggcaccaacaacgaaatatctatgatgttattcttcagtgtaatgcttccagcatgttctgttttaatataactaaatatctatctttcccccccaatttaagtttatttttggttcttcatacgtggcctctaaaataatcagcctatatatc

SEQ ID NO: 66530 - DNA, 491 bp, Zea mays
  unsure (1)..(491): unsure at all n locations
tctacagggagaacatgtgttatgactaaccgatgtctgttttgataaagacagaccttgtgcagcatgccaagcagggaagcaggtgggaagtactcatcaaagcaagaatgtgatgacaacatcaagaccactggaactcctacacatgtatctcttcgaccccgttgcttatctcagcatcangggaagtaagtatggtcttgttattgtagatgatttttcccgcttcacttgggttttctttttgcaggagaaatctgagacccaaggaaccctaaagcgcttcttaaggagagctcaaaacaaatttgagctaaaagtgaaaaagataagaagcgataatggatccgagttcaaaaatcttcaagtcgaagaatatcttgaggaggaaggcatcaagcatgagttctctgctccctacacaccacaacanaatggtgtagtagagaggaagaataggacactaatngacatggcgaggactatgc

SEQ ID NO: 66531 - DNA, 466 bp, Zea mays
  unsure (1)..(466): unsure at all n locations
gtcacctgcggcatgcaagctntaactccccctcccgcgagaccttttttttttctttctaaccataatgagtgcgatatcgaatgtcatacttgatgcatattcactctacttgttcccttgtatgatgtactgtttgtttcccaatttgaatggatgaatgtatgtatgcttgcaatcgcataaagaacgatccggtcgaagagcccgaggagctcgcaggagaagcccctgagcagcagtcggttggtggaggcaagtgtcctttgacctatctatgtcctatccattatttaattcacctcccgctttacacatttatgcctaaggattgactagcttttgttatccatgtccttgtntacctatttgggttggattattacttgttagctctatgctattgctcaactataatcaatgaacatgatgagaatatctacgatacgctgtttcccttctatta

SEQ ID NO: 66532 - DNA, 445 bp, Zea mays
  unsure (1)..(445): unsure at all n locations
tgtgacattggctactatacaaagagtcgccatattcgtttaacttgatcctgacacacatatgagatgcatttggatntatccttaaatccatgggtgacaattctaaggtcatttactattntagatgctactcttatcttcttagttcatgaaaaactcaggtataaaaaggtgatgccctangaggtacttggcaagtttataagccatctaatgatggccatggatgccaagtacgtcgactacctagctaatgggaacaacccctccaccaagtcacaagttgtttccttcaaggcaacaaatgagaaggaggagatcccaagcaaggtagcacaagttgaggcagtcaacctcatcgatgaagaaatgacacttgtcattatgagattcanggaagcattgaagggacacaagaactaagacaactagagatggcaac

SEQ ID NO: 66533 - DNA, 451 bp, Zea mays
  unsure (1)..(451): unsure at all n locations
agcttgtcggttaaggtggatcgatcatgattgttgtgttatttatttccaacaatctnttttcatctgaaggaccgcgatgattagtcacatcactgtcatcaattgtcatcatgcattactgcttaggacatatcgaccttgcagaacaccaacgaattttatagcacgatggtgtcgagtcgaaggcttgctggaaaaagtgcatgtcgatcacacagacgaggatcccacgctcgtcgacgaccagaagagtagctccttttattttgttctctgaacctcagcaactntgatgaatttgtcaccactcaagggatcgactattcaattccagttagcaaatgcagatgatgtctagctgccctgcactgaaccatcatggntgagacagagataactcaaggctagatctgcattgtgcatctaaatgcatangtaaaacaacata

SEQ ID NO: 66534 - DNA, 435 bp, Zea mays
  unsure (1)..(435): unsure at all n locations
tcgactgtggtgcaaattttcggcagcacaacagtgcaatattctgtaatgcggtggtaacttcacatctacccgtctgtttatatagtgctgcacgtgggaaggtgaatcgtcaagccgctcgcacccgctgaacagtcacccgcactcgctgaacggtggaccatattgcccaagaagctgaatcaccagatcgcgcgtacccgttgtatggtgggaccacccttcaatcgtttctcggcaacgagctaagggaaagtgtttttcggaccttcggcattccgaagcctgagagagtttttcacgggtcgagcttgtcggtgttttgggtccgaccgcacacccggngttgcccctcaaggtgtttttaggagtatgaccgtgtcaacgactgtagcacaatgggtcgtgccgatcgcacgagggacaatggat

SEQ ID NO: 66535 - DNA, 446 bp, Zea mays
  unsure (1)..(446): unsure at all n locations
agctngaatccatttggaaactagctattcattaccaaattctttggtgattaggttcaattgagaatatctgatcacccatgaattgaaccatgtcagcagaataactcaaagatagtttctgcatagtgcatactgtaatgatgcttaatgcagntatcatatctttttcttctccttggagattgtattgcatagacagttctgtgtaaaacaatgttttacattatgtatataactttttataggctatgggacaccgtgtcatgacaatagctcctcgttatgatcaatacaaggatgcatgggatacaagtgtccttgttgaggtatatgttctgtattgctatgtagctggcatntaacttgaagctgcttaatgatatttatattctataaaanaactgaaatatgtttcatttccacaggtaaatattggtgacacg

SEQ ID NO: 66536 - DNA, 444 bp, Zea mays
  unsure (1)..(444): unsure at all n locations
ctcaatctntcttggtgcttattaaatatactctaacttatataattggctcaactcacaattntaaacttttcattcccttttgcttattttcttgaattttgttcatggggttcacttagagttcttaattagggttgcacattcttatcttttcaaagactcaattgttttgatcatgacactnttaagtacatacttggtgaattctttcttacttaagttattntgatgctcatgcttactttggtttacataaaatgatggtttttggttgggcttttacaagagaaaccctatgtgacactggggtgtcacagatagcgtttcccgccaaccttatagtaatgggtacttatggaatagatgtcatcctannggatgaatggctagataagtatcangcagttatcagttgtgataaaaggacaatcaagttggtgt

SEQ ID NO: 66537 - DNA, 451 bp, Zea mays
  unsure (1)..(451): unsure at all n locations
agcttctaaagggagaacacattntatgattatcttatgttcattttgagaaagacagggtttgtagcgcatgccaagcaggaaagcaagttggtgcccatcatccacacaagaacatcataacgaccgacaggccgcttgagctactccacacggatctatttggcccgattgcttacataagcatcggcgggagtaagtattgtcttgtaatagtggatgattattctcgcttcacttgggtgttcttcttgcaggaaaaatctcaaacccaagaaaccttatagggattcttgagacgagctcaaaacgagttcggcttaatgatcaagaaaattagaagcgacagcgggacggagttcaagaactctcatatcaaaggcttccttgaggatgagggcatcaagcatgagttctcttctccctacacgccacaacaaaatggtgtagt

SEQ ID NO: 66538 - DNA, 483 bp, Zea mays
  unsure (1)..(483): unsure at all n locations
gcatataacgtcctattacaaaaggttgttctgtccaccggaggaaacagatgcgggtctagatgagagccatagacaagacatacctcaggtctcggaagtagaaaatgatcttttgatttcaccttttactgaggacgaaattcgtaaggctctattccagatggagcataataaagctcctggtccggatggattccctgcggagttttaccaagtgttttggtctacagtaaaagatgatctagttgctatcttctaggactttcatagaggcgacctacctctttatagtctgaattntggcacgatcatacttttaccgaaatgtatggaggcggagacgattcaacaatatagacctatctgtttacttaatgtaagttntaaaatctttacaaaggtgatgacaaatangctctcttcggttgcttcgaaagtaatttctccgacccaaaacagctttatcccttgcacgaacat

SEQ ID NO: 66539 - DNA, 460 bp, Zea mays
  unsure (1)..(460): unsure at all n locations
ntaacagttatgcagcaaactgactgtacatatacttctgtcaataattatatcgtaaacatgcatacttccagataggttatgcagttatgcagcaatctgactgtacagttatgcagcaatctgactgaacatatgcagcaatctgactgtacaaacatgcataatactgtcactaattatatcgtaaactccggtcaagaaacatgcatacttcgaggttattgacataacaatattgtacaggaacctggaagaatcaaatgcaagaaacacacattacatttcaaacacagtttggaacaacattccagtttagaaaaaagctgatcccaaagttgtcaatgacataactaagaaacgtctacggactntggccataatatacagttatgactgatctgaagtttaaggaaccacngtatacaaaatatattacatgaccaaactaaactacatt

SEQ ID NO: 66540 - DNA, 463 bp, Zea mays
  unsure (1)..(463): unsure at all n locations
agcttctgaactgtatagaattatgaacaagttatgactggcaccatcctcgtctactnttaattacttgataatggggctctgcaatcaaggaagacttgatgaggcacagcttcttttagagcacatggttagcaaaggatattgtctaagtacatcatttactatctgcttggatgcatacttcagagacggtaatgcagttggcgcactgaaatgctgggatgatatgggcaatattggtttgcagactgattntattgccttctcagcatatattaatggcctatgccgattagattgcgtgaatgaagcttatcangcatttgctgagatgacaagcagaggaattgtaccaaacaatattacttacaactccatcatatctgcactttgtaaggcaggcaatatgactgaagccttgaagttagttcagaatatgaggcagagtggccttgtcctg

SEQ ID NO: 66541 - DNA, 464 bp, Zea mays
  unsure (1)..(464): unsure at all n locations
tcctattccagggtcctattgcaaaatattaaaacaatacatcttgtttganaattttacctagtgaatgcactctangtgtgtcaaacatatgcaatgccaatgcttatgatgccatgctcaagttttagttacagtaacaccaggggtgttacagaaggcatacaagaaagctaagggtgaggcaaatcttggaaaggagtgggactcggattgttcgtcatccgactccgaaaatgaaggactcgccgccaccgccttcaacaaatcatccctcttccccaacgagcgtcacacatgtctcatggcgaaggagaagaaggtatgtaatcgaaataatgccacacatgattcctctagtgatgatgagtctagtgatgaagaaatagattactctagtttgttcaagggattggatagagctaacatagataagattaatgaattgattgatgccttgaatg

SEQ ID NO: 66542 - DNA, 466 bp, Zea mays
  unsure (1)..(466): unsure at all n locations
tgagctgnggtgagatccacatggagctgacggttgcgcttctctgtatcttctgccgggcaatcatctgacggtggtgccgagccaagaaatcatactatgcatccagggtgagtaggtatgcagtgaggtacacgactgtggggtcgtcctcaagcagttgctactctttcaatgcacgcatcctgaccaaccaaactggacgggttctctgatagggtgaaaagaatttgagcggggtgtcgaccacttcttcataaatttgacacagggtcatcaatgccttgcgggcgacgacttggcaggtgtctttgaatctgtgcctagcagcagtgacactccattccacatggtgcagactggatccaatgtatacagtcacgacacacttctctgtgccatgctcgacgaattcacgaccatcatactctggctggctcctgattccgaggcggactgtgcatgc

SEQ ID NO: 66543 - DNA, 430 bp, Zea mays
  unsure (1)..(430): unsure at all n locations
agcttctctatgaattntatttaccacgctaaatattatatatgtatatatataataaaataacgttctattatttatganaaagagaagaaaaacaaataaatgagagggtaacacctgaatttggtggatattagaaaaaatatttataccctcaaattcagggtgttacagttgagtgaccgcccggaataacagtgtaaccatgagggtggaatgggacgcccttaactgaataattagatgaacctgggggtgtagttggctttgccgaagggccatcaatggnggccaggacatattgctcgctatgctaagggtgggtgtcgaggttcattctatttgattttgttagtcacccaccttatggaggggtactatgttngtacgactagcgaaacctaacgagcagctattcaccattggagtc

SEQ ID NO: 66544 - DNA, 433 bp, Zea mays
  unsure (1)..(433): unsure at all n locations
tgtggcgcnctcnggcgtcctgccacagccgaagtaccaagtctcttacctggaagccttgnggccgaacccctcgggcgtggtagcgtcgtagagactgctgataccgcaccgagtgtagtaaggccacgtcctgagcctcttccagctggtccagtgagtcttctcggctggtctggttgcttcgatcgtcgtacacctttgtcctcggggaaccatattctaagtctgtgggcaagatagcctcagccccatagactagaaagaacagcgagaaacccgtggctcagcttggcgtcgtcctcagactctagaccaccgagggtagttctttcatccatcgcttgccgaacttgttgaggtcgttgtagatcctcggtttaagtccctgcagaatcatgccgttggcacgctccacctacccattcgtcat

SEQ ID NO: 66545 - DNA, 477 bp, Zea mays
agcttgtgaaggatcttcatccgcacatgtgcttttattgcgatgccatagccagcccatgctaggcttagcaattaagtatgcatctagaccgacctcctcttttgcaaaatcaactaaataaagttcgtcgtctagtacacccttaaaagctaatgaaccgtcacttcttctaaagacagacacatctatatttgtgaataaacagctatattccatattacacaggtgactcacagacaacacgttatatccaagcgactcaactaagaacacattctaaatagagtgctcggatgatatagcgattgttcctaaccctttcaccttgccttggttcccatcaccgaatataattgaatcttggggatccttgttcttgacgtaggaagagaacatcctctttatccacgtcatgtggtttgtgcatccgctgtcgataatccagctggagcccccggatgcataaacctgcag

SEQ ID NO: 66546 - DNA, 403 bp, Zea mays
gcttctcagagcgggatctagcatagagagctcccaattctgtgtagattgtcatgtgtgcacgttcaagtccaagaccactctccatgagagcaatgagttcattgaagcatcctctatttcggtagaactcactgacttcttccaagtcatcaacctatacgaaaagacacatgcagatatgagacaaaaaaatagatcacagtgatagaagctctgctataaagcagatactacaaaaaattatcaagtatgtgctcctacttgtatacctgaacaataatattgagaccacatatttgtgcaggacagaactactccgcgtcaacacaagcacagcagacctacgtgcatagcttggctctgttagccttgcgagcagcatccacagcaccttgaaact

SEQ ID NO: 66547 - DNA, 461 bp, Zea mays
  unsure (1)..(461): unsure at all n locations
agcttagaaagtctggtataatctgtgtttatattcaaccagnccaaggaaacttctgacctaatgaacagtggtcgggggtttccactccaaaatgtccttgactttgccggggtctaccgcaatccctctggcagatagaacatgtcccagaaattgaattttctccagccaaaacgcgcacttgctgaacttggcatacaactgatgttctctcaggcgcgttaatacgatccgtaaatgttgggcgtgctcctcttcattcttggagtatatcaaaatgtcgtcaatgaagaccaccacaaacttgtctagctcgggcatgaacaccgagttcatcaaatatgtgaagtgggctggagcatttgntaacccataagacattaccagatattcaaacaacccatatcgcgtagtgaacgcggtcnttggtatatcttccggccgaatacggatctggt

SEQ ID NO: 66548 - DNA, 497 bp, Zea mays
  unsure (1)..(497): unsure at all n locations
ntatcanatggacgtgaaaagtgcattcctcaactgaccattcaatgaagaggtctatgttgagcaacctcccggctttgaagatagtgagtaccctaaccatgtttataaactctctaaggcgctttatgggctcaagcaagccccaagagcatggtatgaatgccttagagatttccttataaataatggcttcaaagtcggaaaggccgatcctactttattcactaaaactcttgaaaatgatttgtttgtatgccaaatttatgttgatgatatcatattttggtctactaacgaatctacatgtgacgagtttagtaggatcatgacacaaaaattcgagatgtcaatgatgggggagttgaagtatctcttaagatttcaagtgaagcaactccaagagggcaccttcattagccaaacgaagtatactcaagatattctaagcaagtttggaatgaaggatgccaaacccatctagacacccatgggag

SEQ ID NO: 66549 - DNA, 496 bp, Zea mays
atcttaagtcacctgcggcatgcaagcttctaagggagagcacattctaggattaacaaatgttcattttgagaaagacaggatatgtagcgcatgccaagcagggaagcaagttggtgttcatcatccacacaagaacattatgacgactgacaggccactggaactcctacacatggacctattcgggccgatagcttacataagcatcagcgagagtaagtactgtctagttattgtggatgactattcttgcttcacttgggtgttctttttgcaggaaaaatcccatacccaagagaccttaaagggattcttgagatgggctcaaaatgagttcggcttaaggatcaagaaaattagaagcgacaacggacggagttcaagaactctcaaatcgaaggcttcattgaggaggagggcatcaagcatgagttctcttctccctacaccccacaacaaaatggtgtagtggagaggaagaatcgaactctat

SEQ ID NO: 66550 - DNA, 497 bp, Zea mays
  unsure (1)..(497): unsure at all n locations
tcctacagcagcacacattatacttcanaagcgagatcatctatatatatggctaaggcacctaggttatcaggcaacatatacaatgaacggctgatgttctgttgatgatagcttggtcaccttatgcaagcctctttcaacgccagaggaacattatgctagttggaaacctccactgctggactgaaacaaggataccataaatttaggacttctaaaagactagtaattaaacaaccaagatcaaccacatttgtgtagttagctaaaacttatgaaacaggggaaaactgttactcaagtaaattatgcaagcatagaaaaaaacacttaacgatgcacagggtttcattctaaaatcatatacatcacgcaatcagcatattccggaccaacacgaagttgggtgggatcaagcatgcaaaanaagacaagaggatctgaatctaaagtggatcanatgacttaagaaananataaaatagtacaatatt

SEQ ID NO: 66551 - DNA, 432 bp, Zea mays
  unsure (1)..(432): unsure at all n locations
taagcacaagaaccattatctttgtcagagatgagtggacatctattaatctgcctactatataagttgggctgagaaattgcctacaaagatctattattaataatctttactcttccttttangaatgtaggagccaggaggctagcagttcgtaactgaacagtaattaataatatgaagtagagctagattgaacgaaacacgataaaagaccaccctccctaatgcggttcactaatttgagcaaccaatttccaaagaacatgtggacaacagaaaaatatgtttccaaaaataactatcgcgcgcaactttgaatggagcaacaacagcccggaccagataaaaaaaaggggcaggacagacagagccaatgtcacctccgcggtcgacgaggacgaagatgggtcgtcccccagcctgcttggg

SEQ ID NO: 66552 - DNA, 465 bp, Zea mays
  unsure (1)..(465): unsure at all n locations
ngcataggatcaatggaatatctccttttagtcgttgcattacatctatccgtagatttctactgcatagttccctaaagaaggtccccagctctgcaattgcttcatatacatccttcctcaccagtcctctaaggccagcggctatgattctctgtaggagtatgtggcaagaatgtgttttcagttttccaaccacctttgaaccatcttcacttatgtatcttgctaggttatccgcaaatccatcaggaaacttgatacctttgaggaacttgcaaaactcgactttttgatccttccacaacacatatggagcaggtggagccctgcacgctgagttgccatcttgttgcaagtgcagttcatgtcttatgcccatatcatacaaatctagccttgcattatgtgtgtccttggacttgcctggtatactaagtagtgtgcaaagaatatttcacatac

SEQ ID NO: 66553 - DNA, 470 bp, Zea mays
  unsure (1)..(470): unsure at all n locations
agcttaaggacatgttggtcaccatatttcattggtttcagatgaagccagttaccgctcaggccttgttccagtgcacacaagaccatgaggagtaccttcaggcgtatgtccgaaggttcttgcgtctgagagcacaagcgccaacggtgcccaatgaaatcgtcattgagcccatgatcaagggtcttcggccaggacctacggctcaatacttcgccaggaaaccccctcagactctggagaagctgcttcaaaaatggatgagtacatccgggtcgataatgacttccgccaaagaagggaggaagcctataggttttcagagatgactaggggcttcagagaaagactccactctaggcatgtcanatcaattcacagctccagtcagaatgatgacaaaggaagccagttccagacgccacagcacagctcacagtctttatggcagcagcatagctcctgat

SEQ ID NO: 66554 - DNA, 459 bp, Zea mays
gtcactctgtttgtgtccaatccacccgtgactgatagctatttgggtcttagagtgcgaccttctgccgaggaagtcagtactttggttgcttcgctcggggcaattcctgatgatgaacggcaggtttatttcgaagtgcctctgaaccccagtgatgctgacataaatgacatgcttgatctattagccgaggattcgtccgatgctgctcctgatggtacattggcagtggtgccccttccagaagttgatacaactttggatgtcccaaaacctgtcagtactcgcccgaggcgccctagccgaaccagccagcccgagccttctgctgatgaacaaaagaagaagagaagacgcctgcggcgagtatctagttttgatgaggacgccagtgccttagctcctgctgctgaagaagtgcctgcaaccagccttgctgacactgatcccaatggg

SEQ ID NO: 66555 - DNA, 472 bp, Zea mays
  unsure (1)..(472): unsure at all n locations
agctngtacatgagggaattcaacatggttgtggtactatgagcatcaacacggtagttgccatccttctaagagatgagatacacaaaacaaaacaccaattatttgagagccttttcatatcaggaatcaggatgagcatctgcaagagttcccaaaatacccccatctagaatttttcgcaagattggaaaaaatcatggccacagcctggatgcacgcgcaatctcccacaaaaaaaaaatccacgcatcgccaagaaagttccccatgagtcaaatttttttattttccaggagtggtttttggaaactattcgagaaacccttctttgatcctcccaatacttattggcagctggganaactcaatggtttgtggaagaaattattgtgtactctaggagatgctctaacccacccacccacaagcaacaggtgcacagatcaanaaaaaaagtagcaactagaag

SEQ ID NO: 66556 - DNA, 325 bp, Zea mays
  unsure (1)..(325): unsure at all n locations
actcagcttagaaattaagaaactaagcaactgttggaaagcaagatctaaganatcaagcaaagcaaagcaggcataccaaatgtgctcggggtgagttcttatttatacgcccagcgcgctccaagttgaagggccccgtctgtcattgattgttgctattctagcaaagggaaggtgttttttaccttcggcttaaggccttcgtccatatcgcaatctgaattcgttattctaacaaattaaccttgcgaggggctactgttggggcgcttnaaattccaagggcatgttaaatcatcattttaccaagttctttgaccat

SEQ ID NO: 66557 - DNA, 470 bp, Zea mays
  unsure (1)..(470): unsure at all n locations
gcttctatagaagatggacgagtacatcatagctgacaatgacttccggccaagaagggaagaagcctacaaatactctgagatgaccaggggcttcggaggaagattccactcgatgcatgttaggatgataaataatcccagctcaagtgaagacaggggaaatcataatcaaaggcatcagcacagatcccaatcattatgaacacgacaaagctcctttatgcgaccaactccaataggcagaggaggtagaagctttggaggaagattcagcttgcaactgaaagggaaatgtgcccttgggccatttctaagtattttggtgattgagtgccaacacaagtgcttntgtgttaatctatgcaaagtggtggacaaagtgcaaatcatgtcaaaaggtatgtttctagacttagtacattgttttatggactaatgtatngtgtctaagtgcttgaaatatgaaa

SEQ ID NO: 66558 - DNA, 419 bp, Zea mays
  unsure (1)..(419): unsure at all n locations
ggtcctcanaagattaatcaccctaagtgagtgttctcctttataaagagttgtcctccccctttagagaagaagaaaggctccccctgacagagatcttatgataaagcatgtgaaaattagaggtgcaagacatgatttgaaaagactaacttcccttatgcataggtaacaaaatatgagttaagtacttatgcatttttagcaacatggaagtatatgatatgaaatatagtctaatcaaatattggagaagacatgtaaatgatacttgatgtagtctcaaaagataccaattgaaattcaatggcgagcttgagagacatgagagttcttggagattctgcagtggaagattgttgtctttctccggggacctcattttccttacaatgagactgtcacatgagatagacttg

SEQ ID NO: 66559 - DNA, 464 bp, Zea mays
  unsure (1)..(464): unsure at all n locations
agcttcttggcagagtgtgaagcgcttataagtattcatcatcgaaatcctggttccatcgtaactgcatgctcaagtatagatatgacaggcaattctttcaaggctntaatttatgagctcatgcctaatgggaacctggataaatggatacatcccacaggtgacgagacagttccaaagcgtctaagcttaactcaaagaattgcaggtgtcgtcaatgtagctgatgcattggattacttacaccatgactgtggaaggcccactgtccattgtgacttgaagccgagcaacatccttctcgatgacgatatgaatgctctcttgtcagaatttggcattacacgtctctacgccaatcctcaatcaatatgggcaggttcaaatagttcgatcggtgtaacgggacaattggtatatccctccacgatatatatatatccccatctctctatatcaca

SEQ ID NO: 66560 - DNA, 400 bp, Zea mays
  unsure (1)..(400): unsure at all n locations
tccttcgaagggttntccgtcaaaagtatctcaagtggtgattatgagcatgaccgattgctagccaaatcagcgggtcaagggctccctttaccctccgaagtattttttgaaacaataaaagcaccttcggttgagcttatggaaagagcagtgctcactatttctccagtgcacagtgaagattggagaactgaaataatatcttttcttcaaggaaattgtctttcaagtgacgaagcttataacaaaagaatggaggcaagaacaagaccatatgtcatgatagaaggggaattgtataaacatggagtttgttcaccactcctcaaatgtttatcaaggaccgaaggtatcgaattgatgaaggagatacacgcacgtctgtgtggatgcacat

SEQ ID NO: 66561 - DNA, 470 bp, Zea mays
  unsure (1)..(470): unsure at all n locations
agcttgacacgtggtaggtctattgggtcctctaaccgggagggtttcaacatacactagttcactaatcttaccatttagaaaggcactctttacatccatntggtagagcttgatattatgagcacaagcataagcaagaaggatccggattgcttccaatcttgccacgggagcaaatgtctcaccgaaattcaatccctctattttagtatacccttgtgacactaatcttgccttgtttcttactaataatccatcttcattgtgcttgttgcgaaacacccatttggtaccaataatattgtggttcatgggtctctcaacaagctcccaaacttcatttcgagtgagattatntaattcttcatgcatngcattcacccaatcaacatcaagtagagcttcatctacacggttaggttccatacaagatacaaaagagaaatgttcacaaaatgaagctatac

SEQ ID NO: 66562 - DNA, 483 bp, Zea mays
  unsure (1)..(483): unsure at all n locations
ngccaattcttatcanagcagcatcatttatcaacacaacaactgcagactattcccgtaacatggccatttgcatgctggggactggacatgattggacccttcaagaaagctcagggaggatacactcacgtgttggtcgccattgacaaattcatcaaatggatagaatacaaacccattgcttctctaacttcagccaaggcagtggaattcatacaagatataatattcaggtttgggataccgaatagtatcataaccgacctgngatccaatttcactagctctgaattctttgatttctacgaacaacggagcattcgaatcaaatatgcgtcagtagcacacccaagagccaacggtcaggtggaaagggttaatggaatgatactagaagcactcacgaagaaagtcttcgacaagaatgaaacgttcgcacgaaaatggatcacagaattaccttatgtggtttggaggcta

SEQ ID NO: 66563 - DNA, 415 bp, Zea mays
  unsure (1)..(415): unsure at all n locations
agcttccactgcatatctacaagtagtctcatgtctcacatgactacaattggtatcatttacatgtcnttctccaattttgattagactacatttctatcttatacttcccatcttgctaaatgcatatgttgtcaaaatatatttgttactatgcatacgggaagttagtctaatcaaatcatgtcttgtacctctatgtttcatatgctttttcctaagtagagaatctctgatagggggagtatttcttcgtctaagacaaaggagaatattctttcaaagggggagaacactcgtttaggggactaatcttttaatacttcaattgataaatattttaagagggcaagacttattttcttcctatatgcttttaatgtcttccttttcggtggttgatgccaaaggggga

SEQ ID NO: 66564 - DNA, 483 bp, Zea mays
  unsure (1)..(483): unsure at all n locations
nngagccctctaatttctctgatggtgagaccacagtctccacaatgtactccacaagatccatagcttgttgcaatcctttacaaggttgaatcaacaaacaccaagcacgagaacgcaacacaagcactcacacaaggcactatcaagatacacacacacaaatggctatcttctctccaatggcacttatgaggctattgaatcactaagtgttgctctaatgcatatgagtttttctctttgtcttgtgcttcttgaatactcaaatgggatgttttgggggctatttatagcctcaaacctccaaaagagcttgttgagagaactgtcaaaaaattgctcttcacagtgcatcgtccgagtactatagcaaaatctttcgggatcctgactggctcctttcttctgagttgacactggaccggtccaatccaccactggaccccgtgccatgtcaactagccattgaaagccgcgtgt

SEQ ID NO: 66565 - DNA, 466 bp, Zea mays
  unsure (1)..(466): unsure at all n locations
gcttctaagggagaacatatttggactatttatgatctatttgagaaagataggatttgtagcgcatgtcaggcagggaagcaagttggtgttcatcatccacacaagaacatcatgatgactgacaggccgctcgagctcctacatatggacatattcggcccgatagcttacataagcatcggcgggagtaagtactgtctagttattgtggatgactattctcgcttcacttgggtgttcttttcgcaggaaaaatctcatacccaagagaccttaaagggattcttgagacaggctcaaaacgagttcagcttaaggatcaagaaaataagaagcgacatcgggacagagttcaagaactctcaaaccgaaggcttccttgaggaggagggcatcaagcatgagttctcttcttcctacaccccacaacanaatggtgtagtggagaggaagaatcgaactc

SEQ ID NO: 66566 - DNA, 424 bp, Zea mays
  unsure (1)..(424): unsure at all n locations
tncatctataccgtctcagactattgaanaccagctgtatgtcttcgatgaagtattccgaattctccgtcttgattaccacgtcatctacgtaggcttccacacgcttgccccagtgatcggctaagcatgtttggatggctctctgataagtcgctccagcgtttttgaggccgaacggcatggaggtataacagaaagcgccaaacggggtgatgaacgctgttttttcctcgtcttccttcgccaaactaatctgatgatacccggaatagcaatctaagaaagacagcacagaacatccagcggtggagtccaccacctgatctatcctcgggagcccgaanggatccttcggacagtgtttgttgagatcagtatagtcgacgcacatgcgccaatccactttattctttttgagtac

SEQ ID NO: 66567 - DNA, 495 bp, Zea mays
  unsure (1)..(495): unsure at all n locations
gtcacctgcggcatgcaagcttgccttcgcctcagtatatcacccgcagtccatctgagttgtggagcgcgccaatggaaaaantttcataactgtcaaaaagatgctcctcgacgaaaaaagggcaggtgggccgatttgttacctgaggcggtctgggcgctaaacacgactgagtgcagggcgactgggttcacccctttctgccttctatatggattggaggccatgaccccacaagaaataaaacatgggtccccgcgaacagtttcgtcagctgtccccgacgtggacgagcccacttcgaaggatctcatcgatggagaccgagtcttcgccctacaggctctaaataaataccaagcccagacaaaagcatggtgcgaccacgcagtcatcccgagggaattcagtgaaggggacctcgtactcgttcgaacagctcggacagagtccagnggcaagctggagcccaagtgggagggccctttattg

SEQ ID NO: 66568 - DNA, 449 bp, Zea mays
  unsure (1)..(449): unsure at all n locations
atcctntgagtcacctgcggcatcaagcttctaacagcgagcaacctctatcatctttcttngcataatacatttcatccacctgctctgagaggcagaaggggaaggcgaagctttggtggtagatttaatgcacctccaangaaaccattctgcttgttttgaggcgaggacagaggccacacaacatgaacatgccatcatactatcaacaagcaaatgaacttgcttcatcagccactcagccctcccagtcaaaagaggtgttcagtacatcatcgtattgttcaccttatatcccacaatatgtctagtcttagttacaggagccaaggataagtttaccttcggcttcaaatgcctcaagcaacctagtaatgagtgcatggtcatcatttgcttccttcgtcctaagacgcacctcctatgactgaaagggaaatgtgctc

SEQ ID NO: 66569 - DNA, 411 bp, Zea mays
actcagctcgcatcttagtggttcttcttctgacccctgcgttcagcagcaatgaaatctgctagcgcttgggactgaatcgaagatctatgcacataatcaatgcagaactcattgagttctgcagcccactttccaatccttccagtagcttctctgtttctcataatatccttcaaaggctgtgaagaaggaacaattatatgatatgccttgaaataatgtcgaagcttcctggaggccattaaaacagcatacaacaccttctccaattctgtataatttttctttgataaactgagaacttcagaaacaaagtatactggagcctgcgttttcaattgcccttcaagcttcttctgaacaagcgccgcacttactgcagagtgcgaagctgccacatataacaat

SEQ ID NO: 66570 - DNA, 436 bp, Zea mays
agcttatgaagattcttcatcccaacatgtgctattcggcgatgccagagccaacccatgttagtcttatcaattaagcaagtgtcgagttcagctctatcaaaatctaccaagtatagctgaccctctgttgggaccatgcttcgtcgccgaaggtcttgcaggaagaaacaccttcggcagaacctgtttatacgtgataccgaagctaccggtcatgaagcttctatattatagcgtatccgaagatgaaggatcgaaccgacttaaagatggaatgactttctagtccataagggtctgagtcataattgtaatcttttgtagggggtatgattgtaatttcttataggctgcgtcatgtgcctataaatagtgaacagtactcctttactgttcatagaattctgtatttgctaacgcattactctggaat

SEQ ID NO: 66571 - DNA, 486 bp, Zea mays
  unsure (1)..(486): unsure at all n locations
gggcctacagctgacaatctcgtagcctctgaagtacttttctcaaatgctcctcatgctcttgctcattctgggaatatataagaatatcatcaatgaacactactacgaacttgtcgaggtagtccatgaacacactgttcatcacgtacatgaagtaagctggcgcattcgtcaaaccgaatgacatgaccgtgaactcatacagtccatacttggtggtgaatgccgtcttccttatgtctgaggggcggattgtgagctgatggtagcctgaccttagatcaatcttcgagaacacactggctcctctcaactgatcaaataagtcttcaattctaggcacggggtacttggttgtgatagtaacttcattcaaggctctgtagtcgatgcacatctatnttgtgccatcctttgtaacacccctggtgttagctgaactaaaacttgagcatggcatcatanacattgacattgcatatg

SEQ ID NO: 66572 - DNA, 470 bp, Zea mays
  unsure (1)..(470): unsure at all n locations
agcttatgaagattcttcatcccaacttgtgctagtctgtgatgctagagccaacccaagatagtcttagcaattaagcaagtgtcgagttcagctctattaaaatcaactaagtatagctgaccctctaacactcccttaaatgctattgaatcatcacttcttctaaagacagtaacacctacatccgtaaaaagacagttgtaacccattttacataattgagaaactaaaagcaagttataatctaaagaatctacaagaaaaacattggaaatagaatggtcaggtgatatatgcaatttaccaagtcctttgaccaaaccttgatttccatcctcgaatgtgatagctctttggggatcttggtttttctcataggaggagaacatccttttctccccagtcatgtnggttgtgcacccgctgtcaatgatccaacttgagccccccgatgcataaacctacaa

SEQ ID NO: 66573 - DNA, 352 bp, Zea mays
aatatatgttgtatccgatgttcttagtttatcaaagaaaaattatacagaattggagaaggtactgtatgctgtcttgatggcctccacgaagcttcggcactattttcaagcttacaacataattgttccttcttcacaacctctgaaggatattatgaggaaccgagaagctactggaaggattggaaaatgggctgcagagctcaatgaattttgtattgaatatgttcatagatcttcgattcagtcccaggtgttagcagacttcattgctgactggacgccaggggctcaggaggaagaaacaaattaagacgctgaagcatggacagtggtttgcgatgggtct

SEQ ID NO: 66574 - DNA, 444 bp, Zea mays
agcttgtgaagccaatcacaagtttgttgaagaatgacactaagttcaattggtcttctaagtgcaatgaagcctttgagcaattgaagacactattgaccactgctccggtattagctcaaccggacatcactaaaccttttgatgtatattgtgatgcatctggcagtgggctcggctgtgtactgatgcaagagggccgagtgattgcgtatgcttcaaggcagttgcgccgacatgaggagcactatccaactcatgatctggagctagctgctgtggttcatgccctaaagatttggcgtcactatctgctgggaaatatctgtcacatatatacagatcataaaagtttgaagtacatcttcacccagtcagagttaaatatgaggcaaagacgatggcttgagctcattaaagactataaactggagatccattatc

SEQ ID NO: 66575 - DNA, 390 bp, Zea mays
tatagagtcttcaacaaaactcatggtattattgaagaagcatatgatgttgaattcgatgaaacaaatgggtctcaagatgagagtgataatctcgatgatgttgggggaactcaattgataaatgcaatgaaaacaatggtcattggtgaaataaaaccaaaggaagatgatgatgaaaatagtgtggttgtcattccttcatcctcaactctaaatgaggaagatcaccaaagccaacaacatgatgaaactatggatactcatgatcaaggtacttcaagacattcggttcctcctaatgcttcaactagcaattatcaaacggtatcaagaattcatcattccattgtgaaggatcacccggttgatcaaattgtgggtgatatt

SEQ ID NO: 66576 - DNA, 459 bp, Zea mays
  unsure (1)..(459): unsure at all n locations
agcttgtccgttagaaacgaacgaagctccagtttgaaacctgcttcggaggaagaaaantttaaagtttcacaagttcataattgaatggccagagtccgctctaccgccagggttgagcgcgagggggaggaaactgaagcttcggagactcttcccatctccgaagccatgcaacgatcgggtctagtgacttcagaaaagatccctcatgatgatgcaaaacaagcagaacaagcaatcactgaagcagaggaagaagatattgaggaaactgattccgaagatgattaccgcattgccatgcctagcaagccgagccacttggacttcaggaaatctactgtttcgaaggctgatttgtccaagatggtaaaagcgggcttttttactgaaaatcagaagaagttgttgcgcttcggtggagaagagactaccccgaagccagagaaggatgag

SEQ ID NO: 66577 - DNA, 439 bp, Zea mays
  unsure (1)..(439): unsure at all n locations
ntgcgcttctctctcacacacacactaacaatgtgttntgtttatggagtgactccatttagaatcacctaaactagcatgacttgactacatatagatttggatgattctttgttgatgtcgcatgaatcgttgctgctacactccctctaggtttttttaagagtgctcgctcgtagaggcgctacacatggacgatgtcgtccaatggggtttgaaggaatgaatgtgacttgtttgtacaggtggaaggaatgagctangtggaaggaatgagctggtaacggacatgctgtctatcctatgcataaaacaaaaaattgcttttatgtcggaatagaggatcagatggttctgtatggtttatttccgctagcaaaacatgttgtaaactcatgcatatcanaaaaaagtttgacanaagtcaggaactctcaca

SEQ ID NO: 66578 - DNA, 459 bp, Zea mays
  unsure (1)..(459): unsure at all n locations
agctntgaagcgattagatccataaataaatatttaactgagaaagcccttgctgaattagtattgccatgcatcgacagaagttctgctgatatccgtggtatactttctgttgatctgatcaaacagatggggactatcagtgaacatatcaaagcaatagcacggaatagtgctaaacaagctggttcagtcccttcaagtaatgaagtgccatcaaacaaatcaagtggtcgtaaaggaattcgaggtggaagcccaaacattggcagaagagctccggttggtaatgacccaagccctccgtcngcttctgctctgagggcagcattgtggttacgcctccaattcatcattatgttgcttccaagaatcatggcagataggtaaagttttacatgttttggttagagttgacctcagtatttaatccaacatcgtgtttcaatagttatatgt

SEQ ID NO: 66579 - DNA, 394 bp, Zea mays
tcggcatgacagtagaaaaggagaactgacttatagatgataagccgaatcagaccctgaagaattaccgtagagttgttgataaatataaagggcactaatgtaattgtacacgggctgcgtcccgtgcctataaatagatgaacagtactcccgtactgttcacgctgacttggcattcgcttttggcgtcacacttgtattttcactccttcaagccgaaggtacatttgtaatttaatattgtctgtgcaaataagaataatggaaatagattagtgataatctttataaaagatcatattactttctgtactgtgtatgaatgttcttcacttctcatcatggtcatgaaggcatatcttttataaccttcgtcctagattcattatat

SEQ ID NO: 66580 - DNA, 358 bp, Zea mays
tactaccaatgggtccctaagatgcttgtgcttgagccttcaagggttccacttctttctgaaggccatctttttcttgcttctcggactccacatcattctgaagttgttgaacctttgcacaaactatcattggggatcttttcttggaagcaaactgaagaccaacattgcttaagaacacactggagtccggtagcacattagaaataacttctgtaggaaaatttaattggtgtccatcctgaaccggtgctgctactatttcttccatgtcaacctaatataaaatttaaaggtcacaagttgcaagttgtgagtacaaatatgaaaggaaaacaagcacttataatagctt

SEQ ID NO: 66581 - DNA, 431 bp, Zea mays
  unsure (1)..(431): unsure at all n locations
tctaacttttacattttaanatntcacaagtgggtggctgatccatttgctttggccttaatttctcccctttggcattaatgaaaaggaaatgtgcccttgggccatttctaaagtgttttggtgattaagtgcccaacacaaatgctctaagtattaatttgtgttaaagactcaagaagtgcaaatcaagctataaggtatgtttctagacttagtacattgatttgaatactaatgtattgtgtctaagtgttagaaataggagaaattggtttggaatggagttggctgtgtacaaccaaatgcagctcggtctgggtgcaccggactgttcggtacgctaggccagcctccggtgaataggccactctctgggcttgacgacggcgtacgactataattcaccggactgttcngtgagccgtctg

SEQ ID NO: 66582 - DNA, 424 bp, Zea mays
agcttgacaacgaggagatggcactcatcatcaagagttttcgccaaatcctcaagcaaaggagggggaaggactacaaaccccgctccaaacgggtgtgccacaagtgtggtaaaccagtcattttatcgctaaatgccctttgtctagtgatagtgacagggacaacgacaagagagggaagaagaaggagaagaagagatactacaagaagaagggcggtgatgcccacatgtgtcgggaatgggattccgacatgagctccaccgactccttctccaacgaggacgccgccaacatcgccgtcaacaagggacttctcttccctaacgtcggccataagtgcctcatggcaaaggacggcaaaaggaagaaggtaaatctagagcctccactaaatatacaacatctagtgatgagggta

SEQ ID NO: 66583 - DNA, 468 bp, Zea mays
  unsure (1)..(468): unsure at all n locations
ctaagcttcggagagccaacaccctntgataaagtgctgacaactntcgttctagtccggtctcgaaggcaacctaagctctcttcgtctataccgccgaagagcaacgcccctggctggtacccgcaagatatagcatagtccttcaggtcttcttttttagccttatacaactcttgcccaattatgtattgaaagttgaaatcttcttttttcgaagtatcttcggcaatcttcttcttttttccaggcatcctctccctttcttcaggcactgtggtcggagcttactggatatcttgcagaggttcttcctcagccatatttaaaatcatttcatcaatgttagaaagtatgttttccaaaatttgtggcttttactgctgcagcttctgaagtaaaaccttctgcaggagcagctttcgctgctggtgacttcggcgctgaagccgacagcggtgtttcttc

SEQ ID NO: 66584 - DNA, 415 bp, Zea mays
agcttgccaatacttgtcaaagcaacagcactctgtcttacatcaactacagaccataccgggaacttggcctttcgtatgctggggactggatatgattggacctttcaaaaaagctcaagggggatatacccatgtattggtggcgattgacaaattcactaaatggatagagttcaagcccattgcttctttaacttctgctaaagccgcggaattcatacaaggcataatattcagattcgggataccaagcagtatcatcactgacttgggatccaacttcaccagttcagaattctttgacttctgcgagcaaaagagcattcatgtcaagtacgcatgtgtagcacatccaagagccaacgggcatgttgagcgagccaatggaatgatattggaggcactcacgaaa

SEQ ID NO: 66585 - DNA, 445 bp, Zea mays
tggacgcctgtgtgggagtccaaagggtcgagctctctgttgacgttcttgctgctgagctctgatgactaggaattgcctcttgaggtgccctttgtcttccttttttgccctattcacttggatagccttgatggagaggtgagagaagctgaggaagtcttggctggcgaggatggtcttaagctcgggtcttagacctttcataaaacgggccatctatttggactcggcgctgacatcctcaggcgcgtatcgggccagttctgtgaacttgtgcacatattcactgactgttctcccgccttgaggtagctcccggaattcatcctccttgatgtgaactattccctggggtacatggtgctcacagaaggctgttttaaattctgaccaggtagcatctctgactgccttactggaagggttccaccatgctaaagcc

SEQ ID NO: 66586 - DNA, 416 bp, Zea mays
agcttagtggtatcacattctggactaagcttgtgggtaccttcccctgaataatgtaaccctgtaaacttttgatatctgtgggatccttgtcaccatgttatcttcatttcgaacctaatattatgattatggcattttccttccatatgagatgatatcttgtcgttcggaaatgtgaaatgggataacaatggcgacaatctctgttttcagatggcagcgaggcagcgtcgcgagcaaaatgagcaagctcccccgccacctcctccagctcccacagtgcaggagctgatggcccagcagaatgaaattctgcgacagctcttgcagcgccagccccaccctcagcatcatggtggaggccagcatcagcgacctccagctatggcaacataccaggagtttctaagcac

SEQ ID NO: 66587 - DNA, 472 bp, Zea mays
  unsure (1)..(472): unsure at all n locations
actaagcttagttttcttaactggttaagtttaccctttaacctctatttaaggttaagtcctttaaccagggctctatttgcaaaaacattaaaacaatacaacttgtttgaaatttttacctagtgaatgtactctaagggtatcaaacatatgcaatgccaatgcttatgatgccatgctcaagttttagttatagtaacaccaagggtgttacatccttccccccataaaagaatctcgtcccgagattaagatcctagggtagataatggtaaaggaaacacatcacatttttatttcctaagttttggtgcaaggcangggtgatgtgggggttacttctttattacaacagctatacaagctttacaatttacatgaggctatgaagcctgggaaattcttattcaagaagtcttgagtttcccaagtagcttcatcttcagaatgctggttccacagtatcttg

SEQ ID NO: 66588 - DNA, 417 bp, Zea mays
agcttatatatacctataaaaatagttttgtttttgtttctaagagtaggtctcctattcctaaaagtcactttaggcacaggatttcaaagtgtgaaatccacatttgtctttagaaagaaaaagataagaataatcagagtaaagcggaaatagatgagaaacgattaagaaaagtttagaaagaatcagagtagcaaaggtaagtagataagggttatccatttctatctaggtttcgtcctacagtcaacattcctctgataccacttctataacacccggattttaggggtccaaaacccgggcgtaaacataaacaccaggtgtgctgggaccaagtctcacacatatgatgaatcatggcacaggatcgaatgtcacatctttatatataacaggagtgctatacaaaat

SEQ ID NO: 66589 - DNA, 471 bp, Zea mays
  unsure (1)..(471): unsure at all n locations
ggacattgcttccctggtggaaaccaataccatccttaatgtcagggcgtctcccattatagagcatacttctagcaaatttaaacttttcattttcaatttcatgctcattaactttagcagttaattgagctatatgatcattntgttgtttaataagagcaaggtgatcatttatagcatcaacattaacatctagacatctagtacaaatataaacatgatcaacagtagatgtagacggtttgcaaacctttaattcatctatcttagactttagcatgacattctcatttctaagacatgaaatggaatcattgcaaacatttaaatctttaaccttagaaattaagctatcattttcttttctaaggctagaaattgaatcattacaagcatttaacttttcaaccttagcaattaaactagcattctcagttctaaggttngaaatagagtcatgacaaatgc

SEQ ID NO: 66590 - DNA, 403 bp, Zea mays
agcttcaattctgccaactcagtgggggctattctgtatggtctctttgcgaagggtgcggtgcctggaatgagatctatatagaactctacttctctttctgggggcatcccgggcaactcttctggaaatacatcttcaaattccttgattacagacatgctttctactgccagaataaatatcattgggtcatttgcgggcggttgggcttgacaggaaactgcctttccttggtgatctatgagaagaacagtcttgcttgcgcagctgataacacccttgtgcttagctagccaatccattcctaggattacatcaattccttgggatggcaagatggttaagtctgccaggaacactaccccacttaaaagaattctgacttgggaacacctgagtt

SEQ ID NO: 66591 - DNA, 466 bp, Zea mays
  unsure (1)..(466): unsure at all n locations
tgtggaggaccagatcatcaaagcatataagtttctggataataagtggtcacccaagttccattgatgaagcaccagaagaacaatcaaggaaggaatccatgtgggagttcgcaagagaaaggtttgtgtgttggcatctatgctccttcaataagcaagctgccaagcgaaagctagaagcctgaagatgatctttgagtagccagaatcagtgttttcaatcagcaaccagatgttcctcaaaggccagactttgttgaagtttcatctcctcgaagagttgcaaagtgaagatatgtagctgaagtaaagctatacccataacccttctaaaccgaatctcgaggacgagattccttttaagtggggtagatctgtagcatcccaaaaattcaaatattgaaattttctcaaacttgctctanattcaaaatgaatttcanatttcatttcaaaatgtttg

SEQ ID NO: 66592 - DNA, 410 bp, Zea mays
agcttgctgacgacgagaggcattttatcttctcctatctgaacctcttcattgaaggtagctgggacaacgcgagctctccaccattcgctcacaatataggcgcttctgacgaagatatctctggagaccatatctccaacatgatttccggctgtccacacaagatgaagccaacgaccttcatttgtctgagtactcaaaggattgtgagtcaaccaacattcataattattattctgtatctcaactccctctgcaagatgactctcatttcacaagggggaaatcagatgaacatcctcgtggagagcaaggccttgctctcttttacgaaacccaacaactcatataggaataatgtcttcgacatgatacagctggaaaatattatgcattctacttccttt

SEQ ID NO: 66593 - DNA, 409 bp, Zea mays
tgtagagggagaacacactttcatggttaacagacgttcattatgagaaggatacgattagtagcgcacgccatgcacgggagccagactgagcccatcatgcacacaagaacgatatatcgaccgactgaccagatgagctactccacatggatctattcggaccgaatgcttaataagcatcggcggagtagcactgactaggtattgtggatgaatattctcgctacacattgagtatgctttctacaggaaacatctcgcacccaagagaccttaaagggattcttgagacgggctcaataagagctccgcttaaggatcacaaaaataagaagcgacaacgggacggaggtcaagaactctcaaatcgaaagtttccttgaagaggatggcatcaagcatgaat

SEQ ID NO: 66594 - DNA, 418 bp, Zea mays
agcttgcatgacaaaaacgtgaatgccattaatctgactcatcagaaaaaataacagaattcaccattttattacacacatcatgcagtgataagcggaacaagcctccgcagtcatatcctttaccaacaaaagtaccatgtttcgacacaacacatttattagactcgagaacaactttgtacccatctcgatatatcatagaagcactaacgagattcttcttgatagagggcacatgctgcaggctcttcaatggcaccatctttcccgaagtaaacttcagaatgaccgtaccaacaccaagaacatgagcacgcgacccatttcccattaacaaggtgctagacctcctgacctggtaggaagtgaacatagaggcatcatcacacacatgaatgtttgcaccactatccat

SEQ ID NO: 66595 - DNA, 418 bp, Zea mays
gctctatgaagagcaagcttctgtcatcgcacacggacagctttagctgaagctgcttctttcttcaagaccttcggcgcgacgaagcatagtcccaacaataactatagtcaaatatttgtgatgtaagctaccaatagggcaaacttttctcctcatattatacaccaatttgtcctacaaagcattatgtcgatctcttcattattcagcaaaaagagaagctttggaatggaacagacaaggctaagaattcctatattatccaagaaaatcacccaattgctaagcttttgactaagcaaatggtggtaactgcttggcaagagcgaaacaagaacgatatccatctatgaccagtcttcacaacagatagtactactatcatacaaaagagtcatcaggactagtgagaata

SEQ ID NO: 66596 - DNA, 418 bp, Zea mays
  unsure (1)..(418): unsure at all n locations
agctttagtgaccacagagagtgagttgccgtgtttatttgagctcttgcgctnggatcgcttcttttctttctcattctttcttgagatcaaactcacttgttattgaggcaagagacaccaattgtgtggtggtccttgcgggaacttcgtgttccatttgtttgagaagaagaagctcactcggtccgagggaccgtttgagagatggaaaaggttgaaagagacccggtctttgtgaccacctcaacggggagtaggtttgcaagaaccgaacctcggtaaaacaaatccgcgtgtcacactccttattcgcttgcgatttgttttgcgccctctctcgcagactcgattatatttctaacgctaacccggcttgtagtttgtgattaagtcgtaaatctcagattcgccctat

SEQ ID NO: 66597 - DNA, 396 bp, Zea mays
actctacttcttaaggagaacacgtgatagatcgtctaacgtgctattcttataagatagaccttgtgcagcttgtctagcagggtaacaagtgggaggagcacatcacaacaagaatgtgatgaccacttcaagacctctggagctgctgcatatggacctcttctgacccgtcgcctatcttagcatatgaagaaataagtatgggctagttattggtgatgacttttcccgcttcacttggggggtttttttgcaggataagtctgaaacccaagggaccctcaagcgcttcctaaagagaagctcaaaatgagtttgagctcaaggtgaagaagataaagagcgacaatgggtccgagttcaataacctttcagtggacgagttccttgagg

SEQ ID NO: 66598 - DNA, 403 bp, Zea mays
agcttatcaggagtaggtcatcccttgagcatgtaacaaattgacttggagcctttgagtgctaaaggcaagtcctatagtctatagcaaccttgtttccaaagataggtcaagtggaagaagcacttaaagagctagaataactccaaaccttaacttgagctttgcttggaagagatggttaagtaaagcaaattctgaaccaaggacactttgtacatgagcttcatatactagagttggatttgagattaaggagtcacttggcttttatgaggatggattgagttggtaaatcactagatgagaaggaaccacatttgaaaccctaaatttgccccaaaagtggaattcaaaatctagagagaattgtgcaaaagtcaaagtaccaaagttgtagagc

SEQ ID NO: 66599 - DNA, 409 bp, Zea mays
  unsure (1)..(409): unsure at all n locations
tcggccttcggaggccgaaggttgaaatgaatgaagctgccgaagaatgccagagggccttcggcgttatctgttcttttattggaacgagagatttagtacaagagcatattgccttccgggtatggccgctcgcggagaaatgggaaatgccgcaagaaaccataaaagatgccgacgaaggtggacttgtcagactgaagtacaccttcaagttcggagataaattcgttgagccagatgatgactggttaaaaagcattgaaaatttaagtgatgagctgcttgnggcttatacgaaggccgaagatactgcgatgtcagcagccttcggaggccgaaaaaagaagaggctgaatcgggtatttgatgcaattgggtttgtctaccctgactattgctatcccat

SEQ ID NO: 66600 - DNA, 418 bp, Zea mays
  unsure (1)..(418): unsure at all n locations
agcttccagaagatgagttcttctgtaggatcaatgagntatattggatgaagttgaaaagaagcaaaccgacaactaaaacaggaaatctatagggaatgataaagaaatttgtaaagggatgtcatacatcattcattccaccaccgtcaccgccaccaccaaaaatatcctcaaatggatttccaaaaccaccctcgaagccagttccgcctccgccagaagcagttttctcatactgatcagggccaacctgcaggagaagttaatgccaatttcatcagtgccccaagacaccagataatattattgtaaaggttggtacagtcagtattgtgtgtatatatgtggataagagaactaccaacaagtgccccaagacaccagataatcttactgtaaaggttggtacagtcag

SEQ ID NO: 66601 - DNA, 412 bp, Zea mays
tcttcttctcacagcgccgcggctctctccagctcgctcggatctcccatggcgagctcgccggagatgcccctgccccagccgcccctccctgcttcttctgccctggtcagcgatcctctctctctcctcatctccatggccggagctccctcatcccctcctctcggcgtcttctacctgctgtgctcgccagctccctacactcagcctggccgcgcggctctctggagcttgcccctggctcggatttccttccccagccgagatccctccctgttcgtctctgctccggtgttaggtcaagctccccatggtgccgtcgccctcaagctcgcgccctgctctctctgctctctctgacacgcgtctgctctagctcgcccccgcgtcgagctcccttgcgcacgtg

SEQ ID NO: 66602 - DNA, 417 bp, Zea mays
agcttcggagatactatgtgtaaatcatgttattttctttcttttccctatggcgcccttttcctttcaagaggggagaaaagtttttaatgggaccataagttgtaattttcatttttccttacgcagccctttacaatataaaggctagtttccccacatgtaaaatgtaaagatctaagattacaccatcgagtgcaaaaagtatgaaaaagctccaaagtcgtccctaaggggatgcagagctaaaaagccacctaagtaaaaggtgaaatagctccaaagtcgttcctaaggggatgcagagctaaaatgccacctaattcaaaggtgaagaagctccaaagtcgttcctaaggggatgcagagcttagctccaagtcgtttctaagggaatgcagagctgaaataccacct

SEQ ID NO: 66603 - DNA, 458 bp, Zea mays
  unsure (1)..(458): unsure at all n locations
tcacgggctactggtggagctagccgaagcactggcttgtccagaggattggtgcacgggcgatcgtggaccggcgagtgcgcgcgggcgtgcactgggaggcgcggtgcgcgaacgggcgtgaaccatgggtgtcagccactgtcgaacacgtgttcccgttgcctctgcccctgttcaagcgccgattgggagcaaatcttcgcgaatttgggcaagatcgctgcaagggatttgttcaccagaccaagctttgtcttttgtgtatggacgtcgcgcggttttatgctagggacagggagttgtagcgtcaccaatgtgccagtgtcagaatgcctgttcccgaggttaagctgcgccaaaactgtgccaaatgaatntgggttgagttcaatatttttcaggatgtgttcaagggaatttggcacactttgaatttggatctctggcttgagttc

SEQ ID NO: 66604 - DNA, 424 bp, Zea mays
  unsure (1)..(424): unsure at all n locations
agcttatgttgtctttgcatcctcatgagcatcccatggcatccattcttatacatgtgtatggttatgattagaacgagaagaagaggtagaagtaactgaagagcaagtacaaccacctttggacactcaggccgggaatagtttctacttcgacatttgtggatccgagcctgaatcacctgtaaacgaaggcaagccccggtgcatttgccacctcccttgctatttcaaaatctttctcacttgattgctgcattaggtgataggagttgcttgataaaaccattcctgcattaccttccttgaatntgattaccttccttgatcacctgttttacaaaagcttnttgatgcttagctttgctttagaaaaacaaaaggttttgtttttacaaaatatgatgtggcaaaagagggtggg

SEQ ID NO: 66605 - DNA, 415 bp, Zea mays
  unsure (1)..(415): unsure at all n locations
gcggatggcgatagcgcccacgaaacagttcttgttntcttcatctaaagntattattttcataccctcagattttccaatttattgaatacaaaataaacgacttaacattaaatatttcagtgttggcattaatttatgcttggtcgcagaagccattaatgttaatctgtgtgctactttctattcatgaaagtattatgttatagtctttgatgctatgctttaagtgatatttgctggtccttagtatatcaattgacatttcctgcccaatctcgttcacggcatatatgtttcctcactctgcatccgtggaatatgaatgcttgccgttgcacaatttccaggcttcgcatggatggtgctcacccaccagtttatcgaatactgcatatggggatgggacaatctc

SEQ ID NO: 66606 - DNA, 415 bp, Zea mays
agcttaaacattcatgagggatcgtcctacttattatattcacgcaaggacatatatgctatatgaacaagtagaacatttataatggcattcacacaacagttgtgattcggtatggcttgctttcacatggtgatccccatctccaataatcttgtcatcacgatgatctccatctccatgatataagtatgccatcctccaggtgttgagtccttacaaatatatttaacgcatgctggtaaacaaattacatatacgctttggatcaatcacatgttgacatgcaggtcattacattaaatttggacaatacatgtggctccagccgtattgccttggtcacgacacgcaagtcatgaataatttattaacatgcattatatacacaatagccataccgatcacaagatgt

SEQ ID NO: 66607 - DNA, 457 bp, Zea mays
  unsure (1)..(457): unsure at all n locations
ctttanngtttgaagcttggctttgaaaagtagtttttatcgtctccgaagatgtctgaagataagaagactgttgctgagatgaagctgagccttgacgaagagaaaaacttggggtttcttatagcgatgtcaaagaccaatacagaaaaaattaccaaggagattctggaaggtttgtctgaagatactggtgacagtgacagctatgatgtggacagtggtggtgaagactccgaagatcgtccctggcgaccaagccattcagtttatggtaaatcaaccatcaaagaaaatcatcttgtcaacatgagaggaaggtatttccgggatttgtccattgtgagggccgacgaaggggaaaaaacttgcccacaccctgaagagaatgaagtcgtagtgtaccgaagctttttgaaagccggactacgatttcccttgagcagcttcgttgtgg

SEQ ID NO: 66608 - DNA, 415 bp, Zea mays
  unsure (1)..(415): unsure at all n locations
agctntacttagttgatattgcaaaagaagatgccggtctatatgcatgcttaattgctaagactagcatgggctggctgtggcatcgccgcttatcacatgtggggatgaagaaccttcacaaacttctaaagggagaacacgtgataggtttgactaacgtacaattctaaaaagatagaccttgtgcagcttgtcaggcaggtaaacaggtgggaggagcgcatcacagcaagaatgtgatgaccacatcaagacccctggagctgctacatctggacctcttcggacccgtcgcctatctaagcataggaggaagtaagtatggtttagttattgttgatgacttttcccgcttcacttgggtgttctttttgcaggataagtctgaaacccaagggaccctcaagcgctt

SEQ ID NO: 66609 - DNA, 457 bp, Zea mays
  unsure (1)..(457): unsure at all n locations
cgtcgacaagcanatcttcctttgagctagaatttgcatgaacaaaagatgatacatatcaaaagctcaaagaagagaatgagaggcttaagatgagcttgacacaacttaaagggaagtgcattgctcaaccttctcaagataaccgtgatcacatggtgaaaaagcttgaaaaggagacaaccgtggcatgcactaaaccccttgaagaaaatgtcaaggacttgaggattgccaagaggagggaacaaaagaagaaaatcaatacctcttccaaaagcctcaaccatgccaccatacaaggtaacatccaaggtaatgatcaagccacacttcacactaagaaaagtaaaaagtgtagtgaattctttaaaaagggacactcgattaggtcatgtcctcatattataaatggcttgattattaacaaggatgataaacttntgtttaaatgctc

SEQ ID NO: 66610 - DNA, 417 bp, Zea mays
agcttcgggaaccccgtacttctggccatcttccggcagacagataattctttgttgtctaggaggcaatataagaagtcatcttcgtctgtgccattgaaaactaaggcccctttcggttacttcagttctcgggcatagtgtttagcttcaaaaatctcttcttcaaataacctttttcccgaagcgtgtcatataatataatcaagagcttcggaaggcgcttcgggagtgggagtggcagctttttcaagcacaatttgtcctacaacttctttttctctggtttccaaggatttctccttggtaggctctgaaggcccaccttcggtgtcggcctggctctttgtagcttcggctttggtcagctttgtctcggtttcaatctgcgctttcgaagccttggcagttttccct

SEQ ID NO: 66611 - DNA, 415 bp, Zea mays
tcttcggagaaacccgacctcgctgcaacatgacacccgaaggtccaacacaacaagcaatgagtgaattcagaattattgcagagcatatcagcacaagggacctggttcaagagtttttagctttcaaagtttttcccagtttaaaagaatgggaaatgccgaagctacaaggggagaagaaagaaggtgaacttgtacgtttaccttactacttcaagtttaagaaatactttaaaacaccttgccaagagtggctggaaacgattgaagcgatgtgcaatgaaatacttggcaattattctaaaaaagaagatcagttgatgaccgcaaccttcggcacccgtccgaagcgaaggctaaatcgagtgttggacgccttgggcttcgattatcctgattatgaaaatctgaa

SEQ ID NO: 66612 - DNA, 416 bp, Zea mays
  unsure (1)..(416): unsure at all n locations
agcttcttcaccacacgcccgtggatatcttgagagagttgagcaatgcgtcttctccttagatgtctttgcttcttgttcccacacaatttcttttgtgaccctgcatcttgatgcttattcaaacattggctttcttttgaacagcaggggttagcacatggtgatatacaattcaaatgcgcactcgtgcgagagtgagggtcacatgaatttaagtttgcaattataacctcatgagcaacattaagcatgatatggtcatcaatcattttattatgagaatatgacaacacatcgtactcttcacctaaagcaagcttttctaaatttagaatttctacttctctctcaagcatggcattttccattntaagttgagcaacacaagatatagcatcatcattactaatttg

SEQ ID NO: 66613 - DNA, 499 bp, Zea mays
acgtgacctataaaactaagcttctaagggagagcacattttaggattaacaaatgttctttttgagaaagacaggatttgtagcgcatgccatgcagggaagcaagttggagtccatcatccacacaagaacatcatgacgaccgacaggccgcttgagctactccacatggatctattcggcccgattgcttacataagcatcggcgggagtaagtattgtcttgtaatagtggatgattattctcgcttcacttgggtattctttttgcaggaaaaatctcaaacccaagagaccttatagggattcttgagacgggctcaaaatgagttcggcttaaggatcaagaaaattagaagcgataacgggacggagttcaagaactcacaaattgaaggcttccttgaggaggagggcatcaagcatgagttctcctctccctacacgccacaacaaaatggtgtagtggagaggaagaatcgaactctattggacatg

SEQ ID NO: 66614 - DNA, 411 bp, Zea mays
  unsure (1)..(411): unsure at all n locations
agcttncactgttaatctacaagaattctttttctgcaagcctgccattggtattcaattggtccgcaattgactttccattggtatctttgagactacacttagtaacatttacatgtcttctccattatttgattagactatatttcatatcttatacttctcatgttgctataaatgcatatattgttaactcatattttgttacctatgcataagggaagttagtctattcaaatcatgacttgcacctccatttctcacatgctttttcctaagtagaagatctctgtcagggggagtatttcttcgtctctacagggggagaaaattctttctaaaggagaacactcatttaaggggagtgtcattttggtgtttcaattggtattattttacaaatccttttcg

SEQ ID NO: 66615 - DNA, 419 bp, Zea mays
  unsure (1)..(419): unsure at all n locations
agctttgtggtgatgtgggattctatagttatttgtctactcttctcacttctggtagatcggaggtagataatggtaagcatgccaaagggtggaatccagtgtagttcggctacataaaccctaggtatgtgtccattcaggaccgacctttaccatttagcttacagtgtataccaaacttgtcaaaggactatctcgagtcaattcagtgactataagtatttacaattctgagagatgtatgcggcacaagaatagaggtcctagatagaacgagtaaagtggttcgacgggaacacactatggttttcacaccaacatagtgaaaaatttctcagaataacctctcggtatactcgcaacttcgtgttgctagcggntacatgtccttttatctcataatttgcttcatgtca

SEQ ID NO: 66616 - DNA, 412 bp, Zea mays
agcttgtgaagattcttcatcccaacatatgttagtcggtgatgctagagccaacccatattagtcttagcaattaagcaagtatcaaggtcagctctattaaaatcaactaagtatagctgaccctctaatactcccttaaatgctactgaatcatcactccttctaaagatagtaacacttatatccgtaaaaagacagttgtaacccattttgcataattgagagacagaaagcaaattgtaatctaaagaatatacaagaaaaacattggaaatagaatggtcaggtgatataagcaatttaccaagtcctttgaccaaaccttgatttccatccccgaatgtgatagctctttgggcatcttcgtttttctcgtaggaggagaacattcttttcgcccctgtcatat

SEQ ID NO: 66617 - DNA, 465 bp, Zea mays
  unsure (1)..(465): unsure at all n locations
tcctgttcgccttaaggacaatgactggattgaccatccatactgggtgatggacctcttcgatgaagccagcgtgtagcagcttccgaacctcctcacggatgaaatcctgcagctcaacggactacctccgaggcttctgactcaccggtttggcgtcagggtgaatcttcagatggtgctcaatcacctccctgggaatcccaggcatctgtgacggttcccatgcgaatatgtcggcattttcttggaggaaggcgacgagcgcgatttcctatttttcctccagattacccgcaatacgggtggtctgggaggaatccacgccaacctggatgggtttgacgggaacgtcgtctgctccagatggctgcaccttaggcaccttggtaggcgccttggtatangaagtcgaggggtccctcccttcgtccgcccggtgagcagtttctgcagtcatggcgt

SEQ ID NO: 66618 - DNA, 420 bp, Zea mays
  unsure (1)..(420): unsure at all n locations
agctttcttgatatccatcttgagatatantgctctataagaagcaaccattgcaactaatgcatgaaccattgtcatatgagcaacaggtgcaaatgtctcattgtaatctagaccttgagtccgctgaaaacctatgtatctctgtagagccttttgaattggtcttaactttgaatgcccacttagatgtaatacgcaccgcgtgtgatggcaatggaacaacatcccaagtgccttgacgatcaagtatagcattttcctcagacatagctagctgcccattctggattaagagaagcttcctaataagtggatggctcatcaacaacaacacacacatgcgaaaaacaacaattctctttaggacaaatagtactacgtcttgaaggttatatcgtggaggaacctgtaactgat

SEQ ID NO: 66619 - DNA, 485 bp, Zea mays
  unsure (1)..(485): unsure at all n locations
ggacctataaaactcagcttatatcatctctgggtacctgcaatacttattaagtactatttggtacacatctcatgatgggtccatcaaggttagtcaataaggacttatgcacccaaacagccttggtcctagaatgtggtgaactcatcacctttctagcacaagagtcaaatttgggtctcctaagcatatttgaatgtattgacaagttaggcttatgagttntaccctttggacaaaccttgaatagatgacctttttcacggcaattgtagcaaatgtggtgcttatccttgcaatgcatttgccttttgctttcatcctttttgatggtcatctttcttgatcgtgcaagatcttggttcttcatgtgggggcatgaatcagtttcatgacccttanacttgcatccatagcatcatctatcgcttctctttgatctttctttggtgaagcacataggtacanttgtagagcaaata

SEQ ID NO: 66620 - DNA, 416 bp, Zea mays
  unsure (1)..(416): unsure at all n locations
agctntggccccacctgcagagctcgctattcttttctgaggcgggcccggaggccactatcagtaccctgaatcaggggtaccctcttctacagtatgaaggcgctatacatgtatggcgtccctaggtcacacggagaacggcacccaaccccaccacatgggcaggtctaaaggcaccacgtggcaaagaaaggtaatacatcccaggatgcatcattgggtccggacctccatagtaggacaccggacccctgtgcgtacaagtctggagctcccaataaggcatgccgggtctctcgggtaggccccaggtccctccgagtaaggtccgggccttatcaaggtctcggaacggggaggaccccaacttgagtaagggtccgatgctgacacgcgtccaggccctgccctac

SEQ ID NO: 66621 - DNA, 473 bp, Zea mays
  unsure (1)..(473): unsure at all n locations
ntccaagccctcggaccaggccggacttcaccggatgtccgagatcgacctcaccgaacttcggtgttccgccgccgcgcgaggacagagctaaccggtgagtctccgtccaattccttgcacccacatcttctctggcatcccgtgaacctctctgacccgtccaattgaactatctcaccgtgagcaggccggactcctcgccgtcgacgagcatccccgcctgcgcacgtggaccggccaactccggccatccccgacggcgacccgcacaccgttgtgatccccgagacctcccttacgtcctcgaccacttcaccagagcaatctcgccgccggtaagcccctccgccctttcttccgccgcgattactgtttaagttagaagaaggacctcgggttatgatttgaagaacccgaaagggtttctggaacggcagtgacccatgtgaatagtagcctatggactgatc

SEQ ID NO: 66622 - DNA, 417 bp, Zea mays
  unsure (1)..(417): unsure at all n locations
ncaagctgccacttgatatcatataataaaatgtattctcatgatatgttcactgagaaaaaggttcttcagagatttaccagacattgcaaaaaatggaattgcaacttgcataaatatcattcgaattcccaagcttactcagttatgttggttccgtaaagcaacctttttccatgtgacttgtaggtgtcaagtggaaaaggcaggcactttgtaaagcgaaaagttagactgatgtttacttgtacatgaactatccctctctgcgtcaattctccgttattcattgctagcaagatgtgtttttttctacaagagcaaccaactaagcttggatgttaacgttatccatggtccacctcccatttcatgaagacgccatcattntcataacttgccagccaagtatctaat

SEQ ID NO: 66623 - DNA, 350 bp, Zea mays
actaactgaacctggcagtacatagccaatatatacgatatgactcaagcctagctacaggtgcataggtttcaccataatccaaaccttcgacttgggagtattccttggccacaagtcgaactttgttccttgtcaccacaccatgctcgtattgcttgttgcggaaaacccacttggatcctacaacattttgattaggacgtggaaccaaatgccatacctcgttcctagtgaagatgttgaactcctcaagcatcgccaccacccaatccgaaacttgaagtgctctctctaccctgtgtggctcaatagaagaaacaaaagagtacttgtaacaccccgatttt

SEQ ID NO: 66624 - DNA, 398 bp, Zea mays
agcttgccttcgcctcagtataccacccacattccaacggagttgtggaacgtgcaaatggcaaaagtttcacaactgtcaagaagatgctcctcgacgataaaaagggcaagtgggccgatttgttacccgaagcggtctgggcattaaacaccactgagtgtaaggcgactgggttcacccctttccgccttctatatggatcggaggccatgaccctgcaagaaataaaacatgggtccccacggacagtcccgttagctgtccccgacgtggacgagcccacttcaaaggacctgatcgatggagaccgggtcttctcactagaggctctaaacaaataccatgcccaaacaaaagcatggcgtgaccatgcagtcatcccgagggaattcagc

SEQ ID NO: 66625 - DNA, 414 bp, Zea mays
  unsure (1)..(414): unsure at all n locations
tcgggaaaccaacactcttcaacagagtactgataaccttcgctccagttcggtctcggaggcatcctaagctttcatcgacaataccgccaaagagcaacgctcctggttgatagccgcatgatatagcataatctctcagctcctctttttcagccttagataacttttgacctattatgttttgaaaattgaagtccttttcttctgaagtatcttcggcgatctccttcccttttccaggcactgtggccagggtctcttcggcagctgtagcagcttcttccgcggccatattcaaaagcatttgatcaatatcagaaaacatgctctccagattcgtggcttcggttgtattagctntgacaattgcagcttcgacgggagcagcttcngtagctgtagcgtctttgg

SEQ ID NO: 66626 - DNA, 422 bp, Zea mays
gcttcggctatggtcaaatttttggcagctaaatatggcaatagcaatgaatgttgtggtaacttcacacctacccatctgtttatatagtgccgcaggtggggaggggaatcatcaagtcttccacaccggacgaacagtcgcccgcactcactgagtggtgggccacagaacccgagaaggtgaatcgccaggacgcgtttacccgctgcatggtgggaccatttcgtgctcgaaattttgtgattgtttttcggcaacaagctcagggaaggtgtttttcggatcttcagctctccgaagcataggagactttttcacggatcaagctcgttacgaaaaacgatctatcaccgcgaaggggctactattgggggtattcttcgtcgctgaagatcctgtaagaagaaacaccttctgta

SEQ ID NO: 66627 - DNA, 462 bp, Zea mays
tcatgaagaggaaacttcggccatctcacacaagcagcttcagccgaaagcagcttcttcctagaagaccttcggcgacgaagcatagacccaacagtagcccctttcgcggtgttagatcgttttttgtaacgagcttgatccatgaaaaaaatctcttaagcttcgggaagccgaaggtccaaaaaacaccttccctgagctcgttgtcgagaaacgattcagtttcccagcgcgtagcggtcccaccttgcagcgagtgcgagcgggtgcccgcctggtgtaaaaatcctggcgcttcgccttcttacctgcagtactatataaacagatgagtaggtgtgaagttaccacagcattcattgctatttgcactgttttgctgccaaaatttttaaccatcgccgaagcttaactctcggaatcgaacgaagctccagtttgaagcctgcttcgtcagaa

SEQ ID NO: 66628 - DNA, 418 bp, Zea mays
  unsure (1)..(418): unsure at all n locations
agctntattgaagtagccaacaagcacgcgaattttttaaagagtaaggagatattatgtctgtgcatcgattgtgataataaggtagcttggagagatataagagtaatccaatcacatctgttgaaaagagggtttaaaaacaattacacgatatggacagaacatggttgtcggaattttatataaagtggattctgtggatgccaatcaaaattttgaagaatttgattgtgaagagatgttgcgccatatggaaccaaaaatgttgagttctgtgggatcacagaaggccagaaggggttgtctaaaatggagggactggaaagtgcctcaaaagaacttttatatgatgaatcaaagggttgtgacaaagagtttactacattgcgtacagttctagaacttcttaagttga

SEQ ID NO: 66629 - DNA, 467 bp, Zea mays
  unsure (1)..(467): unsure at all n locations
nttctttatcatcatcaaccttaacatagaaccattctgatttccaccctgctgcccatttgcttcggtagctgatcacaggatacttcgtagttttccggttagcaaaattatagcaaccaaaattctcatgtaatccatcctttctagcctttgtctgatagtgcagttcgtgaactcgacaaaagctgtcagcaaacggttccaccgcctggcttcggagtgcccagatataaacactgagcctaacgatagcgttaggggttagctggtgaaaataaattccgaagttcttcagtatctctgcaataatcccatgaagggggaatcttagcccagcctttaggaagctcttaaaaataacaatntcatctttttccggctttggggtagtctcttctcccccgaagcgtaatagcttcttttgatcttcagtaaaatagcctgactctaccatcttggacaag

SEQ ID NO: 66630 - DNA, 423 bp, Zea mays
agctttatatggacgtcggtgtcgaactccgctaaattggtctgaacctggagaaagatatttctttaggcctgatatggtgaaagaggtcgaagaaaaggttcagagaattattcataatatgaaaaaggcacaagctcggcagaagagttatgcagacacgcggcgaaggcccttatatttcctggaaggagactatgtttacctgaaggtctcaccaatgaagggtgtatcgcgtttcggggttaaagggaaacttgcacccaggtacattggtccattcctggtgcttgagcaatgtggaccagtggcataccgacttcaactccccgaaacattgtctgctgtgcacaatgtgttccacgtgtcacaactgaagaagtgtcttctggttcctgatcgaaccgttgaagtgactgatgg

SEQ ID NO: 66631 - DNA, 425 bp, Zea mays
  unsure (1)..(425): unsure at all n locations
gctagtgtgttattcatatgcttcctgcagtattatatgtgttgcatcatatggactaatgtttctgctgcgatgaattaactggcttctatagtgtaataaatagtcatgtggttaatggtgctttaagattgctttaaattggaaactggtatctcaatttaaattggtatcttaaaagtgaatagtggtagggtgatattcctgtgatatatccactaatttgaatggtgtttaactctgattatgtgcatttgtgtgttatagcatcatggtttgattcttgacacaatgcatcctaaaaggtgctaaggtgtagaaatgcttcgaattgcctaagtatgtgcatattggcgtctgaggccaaaattnntgttttgaagtaagcacatanatagggggagcattctataaacttagaattc

SEQ ID NO: 66632 - DNA, 422 bp, Zea mays
agcttgacaatgaggaaatggcgctcgtcatcaagagtttccgccaaatcctcaaacaaaggagggggaaggattacaagtcccgctccaagaaggtttgctacaagtgtggtaagcccggtcattttattgctaaatgtcctatatctagtgacagtgaccgaggcgacgacaagaaggggagaagaaaggagaagaagaggtattacaagaagaagggcggcgatgcccatgtttgtcgcgagtgggactccgacgagagctcaagcgactcctccgacaacgaggacgccgccaacatcgccgtcaccaaggggcttctcttccccaacgtcggccacaagtgcctcatggcaaaggacggcaaaaagaagttaaatctaaatcctccactaaatatgaatcctctagtgatgacaatg

SEQ ID NO: 66633 - DNA, 470 bp, Zea mays
  unsure (1)..(470): unsure at all n locations
tctagcacagctcgtatctaannattttactcgtgatggtgatagcatcaaatggaagacaaaggggagcatggtccgagaaggatctattcaaaccaagaacactgatattattataagcaagatcccagtcaggactggccaagaatctatctagcttttcaaacgtagggtcactacgattgttagaccacgtatacaatctgtttttcagttcaaattccactagaccatgatggtctattacactgttaaacaaggagctccacttgctgagaccgcccggtttattttttcctcagcttttctgaggatgttaaagtcaccaccaataagcaaggggacctgacttctcgagcaaactgcagacatttcactgaggaatcggcttttatgttccttttgagcaaccccatacacattgacaaaattccaaataagacttttttctctgtgaagaactagagtgc

SEQ ID NO: 66634 - DNA, 52 bp, Zea mays
agcttgaacggtctataccgaaccgtcggtagatttgtctggtcctccgcac

SEQ ID NO: 66635 - DNA, 449 bp, Zea mays
  unsure (1)..(449): unsure at all n locations
acctatgatactaagcttgctgcctgccgaacactctatacgatacacgcttgctcttctctctttactcgtatacngagtccgagcccactccaatgtgcagaaatcatcaacaagcctgactgataaatgcctgacgtttaccaacttattggtcttgcaactcatgaacatcttttcctctggcgtagctcccaacaggacagcaaccctctcccttgacaacagatgcgcagccgtctggcgtatggcacctgatgctgaataacctgcctacgcattagctcggcactgagactcgatatcgtgcgctctactacaagtactgctgatgcctcctgatgatgatgccacatcgaagacaccgctgacccacctcccctgtctcataatactgacgatatcctgacctccccgaatatctaaatagatgtataaaatgatatggc

SEQ ID NO: 66636 - DNA, 418 bp, Zea mays
agcttgacattgtctcccttttggatgtcattgccatccttaatgctagggcgtctcccactatagagcatgcttctagcaaatttaaaattttcattttctaagtcatgctcattaattttagcactaagttgagctatgtgatcattctgttgtttaattaaggctaggtgatcatgaatagcatcaacattaatgtttctacatctagtacaaatagtaacatgattaacgctagatgtagagggtttgcatgcatttaattcatcaatcttagcatgtaaaatagcattctcatttctaagattggaaatagaaatattgcaaatatttaaatctttagccttagcaattaattgttcattctcaattttaaggctagagagagatgcattcaacttgtcaatcttagtaatca

SEQ ID NO: 66637 - DNA, 430 bp, Zea mays
tgagcaagaaataccgactatggtatgcaaacttgttattatattttcaccacgtttcttcaatacgatgcaacatctacttgttcacctaccatacgaagctaatgtaggaggtcctgtgcagtatatatggatgtatcacatcgaaaggacactaaagaagctacgtgcaatggttggtaataagagacgagttgaagggtgcatcgctgaataattcaaatacaaagagatagcatcgttcacgggcctgtactttgtagaggaacacaatgtcaatgcccatacgttgcggtatcatgtcgacgagccccctattagtgatattgaaatttttcaatggaggggcaaaactgtaggacccagcacaacatactgtttcaccaacgacgaatggaagactgctttactctacatgtataacaacatg

SEQ ID NO: 66638 - DNA, 418 bp, Zea mays
  unsure (1)..(418): unsure at all n locations
agcttaacttaaattcatacgatttgagattataattgattaaataaatcacctagctatgtttatattcgtactgcttccctacacccgaaatccaacatataagtatctctccttgtatggctaacaataatattcagatatattacatatacgaccatattagattaattaatatatgtctaaattataattattagaattaattcaattctaaggattcaaactggccttaacataattttattatatatagactgttatttgaaatggggatgtaatgtgggttctcataagataatttaaggttccaacctctntagaaagaaactatgctatactccatggagctggtaaggtgaagcaaataaaacttttcgagtaacaacatatatcttaagtgctgtgttgagagcaa

SEQ ID NO: 66639 - DNA, 460 bp, Zea mays
  unsure (1)..(460): unsure at all n locations
actaagcttangttagaagaaagctgctgcaacacagggcactacttatctggtgatgtttcagaaactgctgggcataacctgtagtggaagtgtggaactccatgccaatctaacaggtggttgatcttcccaggattgaatcaatgcaacggcaacttaatctttttatctggtttcggagtagcatgagtcaaaacacgcaaatgacagtatgatcaacactntatcctcagcaacctgcttcacaactctctgtgcttgctgaggcgcgctttgcgcactgcttcttggatattcttttcatgctccttgagcatctgctccacgtttccttttgctgtaatcattgaacctgagtgctgatatattctgctcttgcccttgttctgatcagatagaagtataccaaaaaagttgttaatggtagaccaacaaaagcataaaaaatactatgatg

SEQ ID NO: 66640 - DNA, 415 bp, Zea mays
agcttcgaaagatgtccgatgacaaattcttttgtgcacgaaacgaagtcaaaaggcttctgagtgccggagtatttatagaggtaacatatccagagtggctggccaatactgtgatggtgaaaaaggctaatggaaagtggaggatgtgcactgattttacagatctcaataaggcatgtccgaatgatgagtttcttttgtcaagaatagactcccttgtggacgccacaggcaccttagagctcataagtctattggattgctattcaggcaccatcaaatttagatgaagaaagaagatgaacccaaaacaagcttcataacccctagtgggacctactgctaccttcggatgcctgaggggctcaagaatgctggaggaaacatcattagaatgactgctaaagttctt

SEQ ID NO: 66641 - DNA, 434 bp, Zea mays
  unsure (1)..(434): unsure at all n locations
ctcagcttgacatgaggaaatggcgctcgtcgtcaagagcttccttcttatcctcaagcaaaggagggggaaagactaaaagtcctgctccaagaaggtttgctacaaatgtggtaagcccggtcattttattgctaaatgtcctatatctagtgacagtgaccgaggcgacgacaagaaggggagaagaaaggagaagaagaggtactacaagaagaagggcggcgatgcccatgtttgtcgggaatgggattccgacgagagctcaagcgactcctccgacgacgaggacgccgccaacatcgccgtcaccaagggactcctcttccccaacgtcggccacaagtgcctcatggcaaaggacggcananagaaggttaaatctaaatcctccactaaatatgaatcctctagtgatgacaatgctagtgatg

SEQ ID NO: 66642 - DNA, 414 bp, Zea mays
  unsure (1)..(414): unsure at all n locations
tagcttaccgcatttgaagcatgagtgctttttcttggctctgggcntgctaggctggcccttgcgacctttaagcgccgccttgaagcgcttaatgatgaaggccatctcctcatcattgagcccggccgcctcaacttgcgccaccttgcttggtagcgcctccttgctccttgttgacttgagagcaatgggttgaggctcatgaataggaccgttcaacgcgtcgtccacgtatcttgcctccttgatcatcattcgtccgcttacgaacttcccaagaacttcttcaggcgacatcttggtgtacctgtgattttcacgtatattgctcaccaaatgaggatcaagaacggtgaatgaccttagcattaggcggacgacgtcgtggtccgtccatcgcgtgctcccgta

SEQ ID NO: 66643 - DNA, 415 bp, Zea mays
  unsure (1)..(415): unsure at all n locations
tatgaaggttcttcatcccaacatgtgctagacggcgatgcctaagccagcccatattagtcttagctattaagcatgcatctagatcggcattctctttcgaagaatcaactaaatagagcttgccatctagtacacccttaaaagctagtgaaccatcacttcttctaaaaacagatacatctacatttgtgaataaacaatnataacccatgttacataattgactcaaagataacaaattatacccgagcgattcaactaaaaacacattagagatagaatgctcggatgtgatggctatctttcccaatcctttgaccttgccttggttcccatctccaaagatgatcgaatcctgggaatccttggtnttgacggaggaggtgaacatcttcttctcccccgtcatgtg

SEQ ID NO: 66644 - DNA, 356 bp, Zea mays
agcttgtgcaaagtccacttgaactaatcttctgagaaacccgcccccattgcaacatgacaccagaaggtccaactcaaaaagcaatggatgaatttagaattattgcagagcatatcagtacaagagacctggtacaggagttcttggctttcaaagtttttcctagtttaaaagaatgggaaatgccgaagctgaagggggaaaagaaagaaggtgaacttgtgcgtttaccttactatttcaaatttaagaaatactttaaaacaccttgccaagagtggctggatacagttgaagtaatgtgtaatgaaatactcgggaactactccaaaaaagaagatcaattgatgact

SEQ ID NO: 66645 - DNA, 411 bp, Zea mays
  unsure (1)..(411): unsure at all n locations
actcagcttagcatcttggttatctcttcttcctgagcccctggcgtctagtcagcgatgaagtctgctaacgcctgngactgaattgaagatctatgcacataatcaatggtgaattcattaagctctgaagcccattttccaatccttccagtagcctctctgttcctcataatgttctttagaggttgtgacgaaagaacaattatgtggtatgcttgaaaataatgccgaagctttctggaggccattaatacagcatataatacattctccaattctgtgtaatttttctttgatggacttaaaacttcagagacgaagtatactggagctngctttntagcctgaccatctagcttctcctgtaccagtgccgtactcactgcagaatccgaagctgccacatat

SEQ ID NO: 66646 - DNA, 415 bp, Zea mays
agcttggcttgaccacacgagagcatccccacccttatcacattcaatggtttaacaacagcggttagttcaaggtaacaaaaacagcaagggtgcatttttctattggctcttaccatgactttgctgattttgatgtggtgactatggatgcttgctctcttttattgggacgtccttgggagtttgatactaatgctattcaccatggtagatctaataaatatactttcatgcataagggaaagaaaattgtgttgcttcctatgactcccactgaaattgtccactttgaacatgagaaaaagactaatgctaagcaaaaaggtgttttgaactctgaaaatcagcaacctattaagttaaaaactcctactttgctggccactagatctgatcttgatgagttacatgc

SEQ ID NO: 66647 - DNA, 446 bp, Zea mays
ggaccttagaatctcagctttgacatcagatcatggcggagtgtgctggacacatacctcactgggcgccggtctatctcctaacctatggcttatcctcccttggaactcacatgaaatatgtagctctaggtgcagggaagagatctttcacagtcgacatggcgagattcgtacgcttgggcgctcagcagagcgaataacactggcagaagcaacgcgccatgtgttcgacgcgttctgccgcgccagagcacgcccgcgcgcgccctcgcgagccccgcgccgtgcccgagccaaagccagcgccctggtccgcgttcgcgcctataaaagcctcccgagcgtggatcttacccgtacggacccacccgaccctcgtcggagtttgtttcgccgtcgttggcccgtgcgcagccgtccgcgggcacccagtccccctgcca

SEQ ID NO: 66648 - DNA, 415 bp, Zea mays
agcttgcttctttaccgagatcaagggtcacaacactcggcaaaaaagctttaccggtgcccaggtgttccttctctgccgagtgctatgacattgacactcggcaaagaacctctttgtcgagtgttacactcggcaaagtgaccagtacacacctttttaatttggtttttctattccattgaaacaaacaaaagatatcacataatcatcacatatatcacataatcatcacagatatcacatatacatcacatatctcacaaacaccataaatcaaacaagttctcacatcattaccaacatattcagacacaaacataagtatccaacaccgaagaatataagtttcaagtatctcacaaagcattaccgacatctaacaagttcagacggggttatctcataaaatatg

SEQ ID NO: 66649 - DNA, 459 bp, Zea mays
  unsure (1)..(459): unsure at all n locations
ggacccacgatattaaagctccggttcaatctcacgagataaactntagctttctgctaaactttagctatatgaattgaagtgctaaagcttagcttcaattaccaccattagctctcttatttagactacaaatgactaagagtagctaaaaaaaagctgccaaagtttatctcgcgagattggaacagtacctatgtaaagcacacgtacatagcgactaactaactatacgtatatggctagctaggctagccgagcttttctagagacatcatcgcaagctaggcgatcgagctgtacactacgtacgtacgtagggggtaaacgtgtcgaatctttgcctcgatcgaggacgctgctctttaacttctcaacgacgatcgataaacaaaccgggcgtcaggccacgtatacgtacgactagctctacactactacacgtatggccggatgatc

SEQ ID NO: 66650 - DNA, 422 bp, Zea mays
gcttatgtaatcgctttcgcattcctatctctccgatgttctggaatggctacaagacgggtgaaacgttcctggaaaggtaagaaagaagataccaaacttgtcaagtgatttaagaacatctacagggtgtctcatgtctgttggacaaaggcaactgtaggtgggcctaattacttgggaggttccgtcacagctggtatcggagcgaagcccttctttgcagatattatgaggcatcttcaaaaggattttctaaaagtcttacctagaaactctcttcctttcttacctaagtattctgaagagtttattttaaagaccaagtagtaagagtgcaacatatagaaggtgtgaatcaactaaggttgattctgtaattatacatgcatcatgctaagaaccatactaatcaaattttt

SEQ ID NO: 66651 - DNA, 434 bp, Zea mays
  unsure (1)..(434): unsure at all n locations
ttgctctatgttattggtagaccatggcaatttgataaggacaccgtgcatcatggtgaaacaaatcactactctnttatgcataatgagaagaatcttgctttgcaccccatgtcccccgatgctcttttgaaggatgatattgctagagcttgccaagagaaaaacacatctgctcataataaaaatctatgtgctgccaaggagttggtacaacataagagtgacaattctaaatctactcaagtgaggaagaccgaaatacaactgaaaagtgcttgttttcttgcttacaaatctgatttgcttgaattaaatgatgttgcttcaatctgctatgtatctatttgcaaggatgctttgctctcacttcacaacatagcatctactttgccttctactgtcactaatcttttgcaagaatatgctgatgt

SEQ ID NO: 66652 - DNA, 415 bp, Zea mays
agcttgaagccatggtaagtagcataggcatgttattgcaaattgattctagcctagttacgggtgcataggtttcaccaaaatccaaaccttcgacttgtgaatatcccttggccagaagtcgggccttgttccttgtcaccacaccatgctcaccttgcttgttgcgtaaaacccacttggttcctacaacattttggttaggacgtggaactaaatgtcatacctcattcctagtgaagttgttgagctcctcttgcatcgccatcacccaatctgaaccttgaagtgcttcctccaccctatgtggctcaatagaggaaacaaaagagtaatgttcacaaaaatgagcaacacgagatcgagtagttaccccctcttgaatatcgccgaggatggtgtccacggcgtgatt

SEQ ID NO: 66653 - DNA, 421 bp, Zea mays
tggttgacttattaagttataagcagaagtgggaaccttcttatattcgccaaaggatgcttcctatgttatcaaccatatattctagagaggtggcatcttcttcgtctacaccattgcctctttgtgatcagtatgagttcgattcaattgagcggactaaaataaggcacggtcacccttattacttggtgaaatggaaaagagctacccgtggtatgaattctaatatgcctagcaagaagccagtaacggagggagaaacaagtaccgatgtagtggtgttggatgactataacaatgatgatacagtggtttgcgagtctccacagttattatatgaacctgatgatccacaagtgcttatggatgatggctgtcgctttctattgactgatgaatacactccacttgatggtgc

SEQ ID NO: 66654 - DNA, 417 bp, Zea mays
  unsure (1)..(417): unsure at all n locations
agctntatagtgtgagaaaaatcaaggatgtttattctttattaaaaatctaaggtcgctagaacactaaaagctagtagtagtataaccttgtgcgattgcgtttcgtacttgtctgtacaacggtaaggaggacaacaaaatcttatgaaaaggttgcgctggtcaattggaagggcgagattggaacagaaccttgcgtgggggtgggtttccaaaaaaggaaaaccgctgcttgctctcgactactcggcggaacaaatgctcctttacatggagaaggagaagagagaaggcggcgctcttgcttgtttattcctttctttgctcacggtgataacagagacgaacaccatatatgcaatggttgaaacatgcacgaaattgctctttgatcagacggagggaacgctgacc

SEQ ID NO: 66655 - DNA, 479 bp, Zea mays
  unsure (1)..(479): unsure at all n locations
tactcagcttcanagggagaacacgtgataggttggactaacgtgcatttctaataagatagaccttgtgcagcttgtcgagcaggtaaacaagtgggaggagcgcatcacaccaaatatgtgatgaccacatcaagacccctggagctgctacatatggacctctttggacccgtcgcctatctaagcatangaggaagtaagtatggtctaggtattgttgatgacttttcccgcttcacttgggtggtctttttgcaggataagtctgaaacccaagggaccctcaagcgcttcctaaggagagctcaaaaagagtttgagctcaaggtgaagaagataagaagcgacaacgggtccgaattcaagaatcttcaagtagaggagttccatgaggaggaaggaatcaagcatgagttctccgctccctacacacctctagcaaatggtgtggtagagatgaagaacaggacgctcat

SEQ ID NO: 66656 - DNA, 420 bp, Zea mays
  unsure (1)..(420): unsure at all n locations
agctntaaccccccctcccgcgagaccttttttcgtttctttctaaccataatgagtgcgataccgaatgtcatacttgatgcatattcactttatttgttcccttgtatgatgtactgtttgtttcccaatttgaatggatgaatgtatgtatgcttgcaatcgcatagagaacgatccggtcgaagagcccgaggaactcgcatgagaagcccctgagcagcagtcgtttggtggaggcaagtgtcctttgacctatctctgtcctattcattctttaattcacctcccgctttacacctttatacctaaggattgactagcttttgttatccatgtccttgcttacctatttgggttggattattactgtttagctttatgctattgctcaaactctaatcaatgaacatgatgaga

SEQ ID NO: 66657 - DNA, 430 bp, Zea mays
  unsure (1)..(430): unsure at all n locations
ngagaagatctctagtggtggtctgtctagaaactttgtgtaacctgnggttatgagcacgggcaatataatcctcccaggcttgtgtctcacctatacctaatggaaggtcaagcctatcaatcagacaacacaactcagttcgatcaacaataggatcatattcccaattgtgtagagaaccatcaggattgaaagcaagccgagactggaccctatcagcatgatcaaccttattcctacaagcttcctggtgtctaagcaaatgcccagtaccagcagaagatctagcagataatcgagtcttaaacattctacaaatagcaacagttcaaacattggacccattcactttctcaaaaatctcatcaaaatcaacccagacagtagatttacgcttaccaacagatgaggtaccagtaccaccatc

SEQ ID NO: 66658 - DNA, 415 bp, Zea mays
agcttacaaaagaacacatgttgggacaggtatttggtccctcacatattctctcatatttttcaaaatattttgccataggctagatattttgtagagaaaatagtcaaatgatgatatttgcattacgggtttgcactacgggtttcatgaatgacttgagttttgaatactccccctaagtgcagtaccaaatgcatatctcaaggaccaacaattgcatagtaaatgaaattttaagtactaagaagcttaaatgctaagacttgtcaagtttgagcccgagttaagctttttcacttgctttgttggcggttatcttaactaggttagacaagccctaaatgcaatacaagaaatttaaatatgcaatgcaggcttgacaacaccattttgagattaagtgaaatttctg

SEQ ID NO: 66659 - DNA, 436 bp, Zea mays
  unsure (1)..(436): unsure at all n locations
caagcaccatctcttaacatagattntctatggataaactcaacacaagagatggcattagtagcacaagcactagtttttttatttatcaacccttttttatgtggaaggcaggcgagttgctaaaaataaagaaacctcataatatggactaaattttccttaatcccttatgcactatacattattgaatgacatagatttagatatgcatggttattcaatgaagtccaaggtctaatttaagccatattatggtgagtgtctaatatagaagaatcaaattccaattaactagaaagagtacatcacataattttggattggtgaccatatgataaagatcatatttcttccaattcgacttttacttcataatcaacaattgatgtatacccttcagtgctacctcttccttagtggctacacaagtcat

SEQ ID NO: 66660 - DNA, 418 bp, Zea mays
agcttgccacacccaagagtccacctttcttattaaagagatcaccccgtgaacaccatcctcggtgatattcataaggaggtaatcactcgatctcgagtcacacatttttgtgaacattactcttttgtgtcttctattgagccatacagggtggaagatgcattaagagattcggattgggtgttggcaatgcaagaagaactcaacaacttcacaaggaatgaggtatggcatttatttccacatcctaaccaaaatgttgtaggaaccaagtgggtattccgcaacaagcaagatgagcatggtgtggtgacaaggaacaaagcctgacttgtagccaaaggatattcacaagtcgaaggtttggatttcggtgaaacctatgcacccgtagctaggcttgaatcaattctta

SEQ ID NO: 66661 - DNA, 415 bp, Zea mays
  unsure (1)..(415): unsure at all n locations
tgtgaagggtcttcatccccacatgtgctaagcgtgtatgccacagccagcccatgctagtcttagctattaagcatgcatctagaccggcctcttcttttgcaaaatcaactaaataaagtgtgccgtctaatacacccttaaaagctagtgaaccatcacttcttctaaagacagacacatctacatttgtaaatagacagttataccccatgttgcataattgactaacagatagcagattataaccaagagactctactaaaaacaccttagagatagagtgctcattagaaattgcaattttacctaacccttttaccttgccttgattcccatcaccgaatatgattgaatcttgngaatccttattcttgacgtaggaggtgaacatcttcttctcccccgtcatatg

SEQ ID NO: 66662 - DNA, 419 bp, Zea mays
agcttgctaattgagtgctaccttgttagcatatacaacaatgatcttatagctaataaaatattgatatggaggagacaagagagaagcaacacgctaggcatgagagtttatgcagtagtgactcagatattaagcatgtgaggtgaattagaaaagataaagtggaacatggacaaaaatcataattttagtaaggtttctatagacaaataaaaatattatattaacacttattgtattactaggtgagtgcccgtgcgttgcaacgggatcactatattacaaccatcagtacaatacatacttctatatatgataggtgagtgtccgtgcgttgcaacggggtcactatattacaaccatcagtacaatgcccgtgcgctacgacaacatacatgcaacacagtccatcaaaa

SEQ ID NO: 66663 - DNA, 324 bp, Zea mays
  unsure (1)..(324): unsure at all n locations
acggaccttaaaactaagctttaagggagccttacagcgaaaagtcaacgctgatactctcatnaataaacggcaaagagaatgcgtcctactgtgggaatgtacgtgtatcttcngcacaaatatcattctgcacaccatagcatcatcacatcattcgcataaacatgacatcatacatcatattgcatcaatggcacaagaagggaatacaatgttaaccttccgaaattgtcttcaaaaagtctgaagaagggcagtttcgtcaaccttagtatcggaggaaatctattgcttacgaacactacaggaattcacttaatt

SEQ ID NO: 66664 - DNA, 418 bp, Zea mays
agcttggtcttagggcaaataaattttaatttcttattgcagccaatgcctaaaactccatcatgtgttaaataatcccaagctgaagatatgtgccatattttgcaagatttcatcacttaattaagtagaacttaattaatagaattcttccagttctcagcgtggtcgcagcgtccagcctagctccatagcccgcgatgcccatgtaaattaagaatcacaccggtaatattgtaagctctaatgcaaaatccttaaaattacatacaatatgagttgcagaaaggtactcaacctgacaattgaatgaatattttgagtattagtgagaattgtatagataatcgtcaaattaatgaggtagatctcctagtagtgggcaagaaaacttgctacatagaagcacggtctctgg

SEQ ID NO: 66665 - DNA, 481 bp, Zea mays
  unsure (1)..(481): unsure at all n locations
ctatgaaactcagcttatactcggctgcgttgtagaggccgggaatatctatctggttagcatactngaggtgatcgcctccacgtgcagtgaagagaatccctgctcctgctccctgcagcttcagcgagccatcaaaatacatttgccatacttctgccgattctggattgtctggaacttgctgntctgtccactctgatacgaaatcgaccagtgcttgagttttgatggcagngcgaggtcggaactcgatatcatgggatcccaactcgcaagcccacttggctattcggccgatggcttccttgttgtgaagaatgtcccctattggaaaaccagtaactaccatgactttgtggtcgtcaaagtagtggcgtaactcgcgggcagctagaagtactgcattatatagcttctgaacttgaagatacttcttcttcnatgggcctagaaccttactgatgaagtagaccggatg

SEQ ID NO: 66666 - DNA, 399 bp, Zea mays
agcttctccagaaaatggatgaatacattctttccgacaatgatttttgccaaagaagggaggaggctttcacgttttctgaaatgaccagcggcttccgagggaggtcttacccgaggcatgtgcgatcaattcacaattctacacaaaatgatgacagaggaagcctacagcaaatgccacaatactcctcacaagcttctggacaacagcaaagctccttccggccaccagctccaagaggcagaggcgccacgggcttcggaggaagatttggcgatcaaccgacaaaaatcttttgcttattctgcggtgagaacaaaggccatactaccaggatgtgccatgttactatacagaagcaaaaggaaatagctgaagcagcagcacaacaagccc

SEQ ID NO: 66667 - DNA, 413 bp, Zea mays
  unsure (1)..(413): unsure at all n locations
ttctttnntgacatgacgaaacatataaggccgcttcttcttcttgccgaagctctttctttgttgacatgacgaaacataaaaggccgcttcttcttcttgccgaagctttttttcttttttgtacatgacgaaacataaaaggccacttctttcttttgccgaagcaaccacttagaagcacaaatgctatgaatgaatgcttatgaatgcaaatgctatgatgtaatgtgcgaatgaatgtccaaagcgtataaccaaagccacactcaaccattatttccttgtaattaaccacacatcagctctgcattcccttaggaacgactttggagcttcctcgtcttttacttagacggtataaactctgcattcccttaggaacgtctttggaggttcttcgccttttactt

SEQ ID NO: 66668 - DNA, 408 bp, Zea mays
agctttatcaaatggacgtgaagagtgccttccttaatggaccaatcaaggaagaagtctatgttgagcaacctcccagctttgaagatagtgagtaccctaaccatgtttataaactctctaaggcactttatgggctcaagcaagccccaagagcatggtatgaatgcctaagagattttcttattgttaatggcttcaaagtcggaaaagccgatcctactctctttactaaaacaattgcaaatgatttgtttgtatgccaaatttatgttgatgatatcatatttgggtctactaacaaatctacttgtgaagagtttagtaggattatgattcaaaaattcgagatgtctatgatgggggagttgaaatactttctaggatttcaagtgaagcaactccaag

SEQ ID NO: 66669 - DNA, 454 bp, Zea mays
  unsure (1)..(454): unsure at all n locations
cctccctcccgcgagaccttntcccgtttctttctaaccataatgagtgcgatatcgaatgtcatacttgatgcatattcactntatttgttcccttgtatgatgtactggttgtttcccaatttgaatggatgaatgtatgtatgcttgcaatcgcatagagaacgatccggttgaagagcccgaggagctcgcatgagaagcccctgagcagcagtcggttggtggaggcaagtgtcccttgacctatctctgtcctatttattatttaattcacctcccgctttacacatttatgcctaaggattgactagcttttgttatccatgtccttgtttacctatttgggttggattattactgtttagctntatgctattgctcaactataatcaatgaacatgatgagattatctatgatacgctgttttcccttctcttttatgatgttgac

SEQ ID NO: 66670 - DNA, 412 bp, Zea mays
agcttctaaagttgagccaattctctgaaaatcaaacttaactccatagggttcaaatagggctttttgcaaataggcccaaaacttagggtttaagttgcaaatccacacacatgtgaatcatatgagttaagataccctattttcatggtttttgcacttttgcccagaagtgcactagttttgcacttagccccctagggtttttttccaaggtactatttagggttttttggtgattctagggtttggatgctacttaagttcatccatggtgacattttatgaccatctctaatgagttttgaagttttctcttattaggctttgctttacccttctgagcccaattaagggttaagtatcctactctagggtcttacctataaaatgtcatatcaatacaacttgt

SEQ ID NO: 66671 - DNA, 401 bp, Zea mays
tactcagcttatgaatggtgcctccggcgtcacgtatgagcagcttcagccgaagctgtctctttctacaggaccttcggcgacgaagcatggtcccaacagtagccccttcgtggtgctagatcgttttacgtaacgagcttgatccgtgaaaaagtctcttatgcttcaagaagccgaaggtccgaaaaacaccttccctgagctcgttgtcgagaaacgatacagtttccaagcgtgtagcggtcccaccctgcaggtttagtatttggtgtctgcggcccaccgcgcagcgggtgtgagcagctgtttgcctggtgtaaaaatcctgacgattcaccttcttacctgtagtactatataaacagacggggaggtgtgaagttaccacagcattcatt

SEQ ID NO: 66672 - DNA, 412 bp, Zea mays
agcttgttccattaattacataaataaaatacaagggtgtagtattaccttgtttgttggccatgcaacgggcataaaaagagcatcccccatactctctacacctaagtatggtcgtggcagagtactttccctttttagcacgcgagtcacaaaaacttgtgtgaactcccttccaagaggaacatctcccaccttaatggttgggtcggttgagataatatttgctattgcaacaggaacttcagatctcatcatagaatataatatcacttctttaccaacctaataaaatatgtgaagtaatattacaaagtttaaataatgaaacataaatatgaagtgatagatgagaaaattataggattatcatctgcattttgagatgatccatgatttctttgaggtacca

SEQ ID NO: 66673 - DNA, 487 bp, Zea mays
  unsure (1)..(487): unsure at all n locations
ctttacggacctatgaaactaagctntcataattgttccttattaaanagaanatgatactgtatgcaaaaactggtgtcgaggtaggatatctgttagtagatgtgcttcgattctggcacagtactattgactgtgcgagcttcggactcctctctgaagtctcgttggtggtgagtatgctgactcccttctggctgctggtctcgttgtattggtggtggaggtggaggctgttgccaagatgcctgaggttggcttgccgaagcaacagaagctgcaaggtggttacccacatactctggaatatacggagagtggtacgaagcagtatgcataacttgcttcggctggctctgttgggctgcagcttctgctatctctttctgtttctagatggtgacatggcacatcctggtagtgtggcccttgtcctcaccacagaataaacaatatatatttttgggcttgatcccaaaccttctcc

SEQ ID NO: 66674 - DNA, 422 bp, Zea mays
cttatgctgcaaggactattatcactatgtatcttgattgctacaagcatatctgcaagaagcaagacggagggttactgattaagaataatggatgatttaaagatattagcagtgtatcaaagagctcgtgatgtaccaaagaagagtttttagcagcctttgagagctggcctatggcctgcatagtcgatgccgcaccattatctatatgggagtcgatgtcatctgaaccatacaagaagaaatataattagataaattgatgaaataacaaaatcaagtgctcaaacccatcaaactgctgaaatttcatacgtcaggtcacataccaatcattgctccttgaccatgaactagcacagcaagatctttgaaaatttcgtttacttcagtaatatggtgctgaatctcttgtattc

SEQ ID NO: 66675 - DNA, 394 bp, Zea mays
  unsure (1)..(394): unsure at all n locations
ntatcaaatggatgtgaagagtgccttcctcaatggacctatcaatgatgaggtctatgttgagcaacttcccggctttgaagataatgagtaccctaaccacgtctataaactctctaaggtgctttatgggcttaagcaagccccaagagcatggtatgaatgcctaagagaatttcttatcgctaatggcttcaaagtcggaaaagccgatcctactctatttactaaaactattgcaaaagatttgtttgtatgccaaatttatgttgatgatatcatatttgagtctactaacaaatctacttgtgaagaatttattatgatcatgattcaaaaattcgagatgtctatgatgggggagttgaagtattttctaggatttcaagtcaag

SEQ ID NO: 66676 - DNA, 422 bp, Zea mays
agctcgaagccatggtaagaagcataggctatttatattcgaattgactcaagcctagctacgggtgcataagtttcaccgaaatccaaaccttcgacttgtgaatatcctttggctacaaatcaggctttgtttcttatcaccacaccatgctcatcttgcttgttgcgaaatacccacttggtacctacaacattttgattaggacgtggaactaaatgccatacctcattcctcgtgaagttgttgagctcctcttgcattgccagcacccaatccgaatctcttagtgcatcctccaccctgtattgctcaatagaggacacaaaagagtaatgctcaaaaaatgtgcaactcgagatctagtagttacccctttatgaatgtcaccgtgaattgagttcacggagtgatctcgttga

SEQ ID NO: 66677 - DNA, 394 bp, Zea mays
acaccatcagacaggtctttttactattattatacgagaactcctcgctgggtggactattatccccacttactccatgcagaacggcacatgccctcaacatatataccaaaacaagaacattcccttcaaaccgcccatcacaccgaaggtgataagacctgccaaacaacaacatcgtactcacgttctcatgaaagccttctccaaaatcttaaagtatactgagaacctccatcaaacacgatcttatttggtactccatgtatacacacaatccgagccatatataacatctgctatctgagaacctttataaggagacctcacaagaaaagagtgagccaccttagtcaacctatccaccactcaccctataacaatacatcctttc

SEQ ID NO: 66678 - DNA, 402 bp, Zea mays
  unsure (1)..(402): unsure at all n locations
tcgcctttggcactcttgattcctgaatagcaagggcccttggtccgaaagtatcttcatgcaaagataagctggatgccaaattgcttctaacgcatttagagtaccacgaccaatgattgcattgtaaaggtactccatgtcaacgatatcaaacataacatgttcagtccttgtgttggtgatgaatccgaaagccactgacattgagattttgccgagtgctacaatctgccttcctccgaagccgcagaggggatgtgtggcatcaagaaatttatcttcgggctcttgcatctgtctgaatgccttagcanatacgatatcagctgcactgtctgtatcaccaaaacattgtggaccccaaacctttgatacacaagagataacctagcatcattg

SEQ ID NO: 66679 - DNA, 412 bp, Zea mays
  unsure (1)..(412): unsure at all n locations
agcttatgaagaatcttcatcccaacatgggcttgtttgcggagccagagccaacccatgttagtcttaacaattaagcatgtgtcgagttcagctctatcaaaatctactaagtatagctgaccctctaacacacccttaaatgctattgaatcatcacttcttctaaagacagtgacacctacatcaagtaagagacagttgtagcccattttgcataattgagatatagaaagcaaattgtgatctaatgaatctacaaaaaaaacattggaaatagaatggtcaggtgagatagnaattttacccaatcctttgaccaaaccttgatttccatccctgaatgtgatagctcggtggggatcttgattcttctcgtaagaggagaacattttcttctccccaatcatgt

SEQ ID NO: 66680 - DNA, 477 bp, Zea mays
  unsure (1)..(477): unsure at all n locations
actcagctnttctttcttgtcatgacgaaacatataagaccgcttcttcttcttgccgaagctttttctttttgtacatgacgaaacataaaagaccacttcttccttttgccgaagcaaccacttaggaacacaaatgctatgaatgaatgcttatgaatgcaaatgctatgatgtaatgtgcgaatgaatgtccaaagcatataaccgaagccacactcaaccattatttccttggaatcaaccacacatcagctctgcattcccttaagaacgactttggagcttcctcgtcttttacttagacggtataaactctgcattcccttangaacgtctttggagtttcttcgccttttacttaagcggtataagctctgcattcccttangaacgtctttggagcttcttcgtctnttacttagacggtataaactctgcattcccttatgaacgtctttggagtttcttcgcctt

SEQ ID NO: 66681 - DNA, 386 bp, Zea mays
  unsure (1)..(386): unsure at all n locations
agcttgacgacaaaaggtgtcgtcggtctctctttttctgtcnagccacctcatggacatctgcagcaatattacggcccatagagaagaaggacgcaaatccgtgggccatgcgggcacccatcccacgtccacgaactcgaccacgaccacgtggtgtgggagatccgcagccaggggaaaggcgcgaggcaccaacagcagcagcagcagcaccagcaccggcagactgaccatcagatgtaggaccacgagaactggagggagctttcctaatacgcccagctggattgttgggatcaatccanaatggagtgtatgactgatgtcgggtgtctttctcacatctgaattgggtcacgacctcaatcatcttcataatgaat

SEQ ID NO: 66682 - DNA, 470 bp, Zea mays
  unsure (1)..(470): unsure at all n locations
tattgtagaacctttgccatgtactatcacttaattcagtattgacattacacaccaaactaaaagataatgatagcagaatcacatgctacacagaataaaatgaatctctgaatggctcttcccatattatccaaaatgtacattntgtgttcaaccaagtggaaaaccagaacttcagaagaaaaggtcacaagaccatatatatcaccactacatttgtgttagtttgaacttcgaaaagaaacactctgattgaatgtcaatccacttgcagtgcaagaacattaaaaaaacatactagattgtgtctttgaatgtgctacatgacatgagtacaataattagcatatatgatgactgatgagcatgagcatgaagtacttccttatctgaaacccaggtcatcaaactatgtgcacataggttaacatccatcacgtcaactgaggagccacgcatcatgtatt

SEQ ID NO: 66683 - DNA, 414 bp, Zea mays
  unsure (1)..(414): unsure at all n locations
agcttncctcagcgcttacaggctcatttcttttattggcgaggacctggagcactcctggaacatctacaaccttcgcaaattttttgtttgatccatttaaggctgatttcgcccttgtaattcaccgcaaacaatcttgtaccggcccgcactctttttcttccggggggtgaggtttttaacgaggcggagccatgtaatatatgtgagaaaaatcccccgcaaaaacatgtgtcgaaaaaagaccgcgacaacggtcttcggcattcgaccaattctaagtcaccgcgaggctaatcgctagccaccctcgcgtgcgacaagtccgcgcagaagtcgcctaatggtgcagccggactaagcacaacaagtgcgaaaaaatccgatgtctattgcgaagactatccgcgc

SEQ ID NO: 66684 - DNA, 462 bp, Zea mays
  unsure (1)..(462): unsure at all n locations
acacataaatactaagcttctaagggagagccatttatgactaaccatgtttttntgagaaagacaggatttgtagcgcatgccaagcatggaagcaagttggcactcatcatccacacaagaacataatgacgactgacaggccactggagctcctacacatggatctattcggcccgatcgcttacataagcatcggcgggagtaagtactgtctagctattgtggatgattactctcgcttcactcgggtattctttttacaggaaaaatctcaaacccaagagaccttaaaaggattcttgagacgggctcaaaatgagttcggcttgaggatcaagaagattagaagcgataaccggacggagttcaagaactctcatattgaaggcttccttgaggaggagggcatcatgcatgagttctcttctccctacactccacaacaaaatggtgtagtgg

SEQ ID NO: 66685 - DNA, 418 bp, Zea mays
  unsure (1)..(418): unsure at all n locations
agctntagcgacaggggctgcggcacttgtttcactanacccaaaccaggaaactctttctctccgagaagctcggagccagaaaaggaaggccacaagtccaacactccaggaggaggagttggaccaagaaatcagggacatggagatcatccatcagcaagtacaatggaagaaagaaaagatgcgcggctggctgatcatcaaaggaagatcgacgaagccactgaagaagtgcgtcaccttgttcaagatgaacaggatcgaagaccccaacatagggagcttcgtcaagaaggcttgtccaatgaagatggatggtatgatgattttaatcatgatacctttacttttgatgatgcttctcccttggcagcagaactgcaggctaccctatggcccccatcatacaagccac

SEQ ID NO: 66686 - DNA, 444 bp, Zea mays
  unsure (1)..(444): unsure at all n locations
ggcagtgctgaccaaaaatgtgataaatgcaggtgattttcggtgcacgccctgngcgctggcatcagcccgatgcatggcctggtgatggaggtgatcctcaccttctcgctgctcttcgtcacctacgccatgatcctggacccgccgagccaggtccggaccatctgcccgctgctgacggggctcatagtcggcgccaacagcctcgccggcggcaacttcaccggcgcgtccatgaacccggcgcgggccttcggtcccgccatggccaccggggtctggaccaaccactgtgtctactggatcggcccgctgctcggcgggtccctggccggcttcgtgtacgagtcgctgttcatggtgtacaagacgcacgagccgctgctcaatggagacatctgacgaccgtctggcccccagggcagtgagcaccggtcatgc

SEQ ID NO: 66687 - DNA, 412 bp, Zea mays
agcttgccattgaatttcaatcggtatctttttagactacatctagtatcatttacatgtcttctccaacatttgattagactatatttcatattatatacttccatgttgctaaaagtgcataagtggttaactcatattaaattacctatgcataagggaagatagtcttttcaactcatgtcttgcacctctaattttcacatgctttttcctaatgtagaagatctctgacagggggagtttttcttcgtctctaaagggggagaaacttctttctaaaggagaacactcatttatggggagtaaacttttagtgcttctattgatattaatttataattctctagagagggcaagtcttatttgcttcctacatgcttttaatgtcttccttttcggtgggtgatgc

SEQ ID NO: 66688 - DNA, 465 bp, Zea mays
  unsure (1)..(465): unsure at all n locations
ntaagaattgcgacaacaaggaggacctttcgaattatctttatccttcgaagcaacaaaaagtcgntctatagagtgcagagtaagtttgctgaagtcgcaaaaagtcgttccaaagggaacgcagtgttagttttctgctccaaagtcgttcctaagggaatgcagagcttatagcgaaaagtcaacgctgataccgcctaagtaaaaagcgaagaagctccaaagtcgttcctaaggggatgcagagcttacagcgaatagtcaacgctgataccgcctaagtaaaaggcgaagaagctccaaagtcgttcctaagggaatgcagagcttacagcgaatagtcagcgctgatacaaaaatattgtgtgttttacggtgatatatgtgtatcttcggaacaaatgccatctacataacataacatcatcacatcattttgcatagcataagcatcatacatca

SEQ ID NO: 66689 - DNA, 415 bp, Zea mays
agcttctgatcatccaagaagtaactctggttattgaagggcctgctgtcaacaaacctgattactttctcagtatccaagccaaagagcctgcaaatgtctttggccacattaatcaccctcctcttcttcacagaaccaatattatacacatgtccaacctcccctttgtgaagaacaacctgaaacttggcaaaataaatttaatacagtactgcacaatgctggcatattaaaacttagcaaattagtttttgcagaatgtatgccgagcttctgcggtatgagcatcacggtcagcagctgatggaaggttcgttaacttgtgaggatgagtaaccacttctttttggaaacaagagttgcacacatcataatttggacaaatctcgcaccgccagccttgaccagttta

SEQ ID NO: 66690 - DNA, 431 bp, Zea mays
  unsure (1)..(431): unsure at all n locations
ntatgatctctgatgctcgagtaccaagtattgcctgatatacacatgcatagtcatagaagatgagagacatttcaattaatccagaaaagcataagcgttcatacttgagacacaaaatttttgctcatagcttcttaacaatagaaatcacttgcaatagtgaatggtagtcggtcgttccagacttgcaactacaacgaggtagcattaaattagccaaatgaactatatctgataaagtgataattaaataatatatggggtaatatacgcagtacatgcacattgtaatcaaaaccgacataaaacaatattagtcagaaataaagatttaacaatccaaaataaaatttaaaatccatttaggttaccttgcattttggttttgattgcatccacctgctaatataaagatcagttgtctctcg

SEQ ID NO: 66691 - DNA, 356 bp, Zea mays
  unsure (1)..(356): unsure at all n locations
ataagtcacccgcagcatgcagccgcacaaacgacagggagctcttgttcctaccccgggggagccgggagcccggcacgacattatacttnacaaacgtgccgccacgacctactaggtgggcgctgcctgacgaaacagctgacacccgaccctactacgctatatgccaggccgaagactctgatggatacccctggtgagtacggcgtgccctttataaccccgcccctgtggagcacagatttttgtcaacgcggcgggatgggtcttccgagacaatccgaccagcatatggttcgagctatcatgagcatggcgttcccctgagaagacgcacgcctgatctgccacac

SEQ ID NO: 66692 - DNA, 424 bp, Zea mays
  unsure (1)..(424): unsure at all n locations
taaccttgtacgaggataagctgccgttgttccaaatgtggagggtccttaagcctctttgaaatccttaagggtaaatgcttaagatgttttctaacatgttttcataagtgcataaactgtcatgagcatcacacttatactatgacacaatgcacctcacattctgtatgatatagatatgttctcattaacctagttatgtgcaattgacatttaaggccaaaatatgtgttcctctccatgcacatatttagggggagcaatcaatattatatagaactatgattatgcttaattgatatatctttttgatcatatgtctatgactaatgtgctntcaagtgtattttcatgcttagtcatagaattgaacgggaaatggagtattctgcaaagacatcgcttccactctacatcttcg

SEQ ID NO: 66693 - DNA, 416 bp, Zea mays
agcttgacaacaccatttgagatcttaaatataatttctgagatcaagtatatttaattcattcctcaacatgcaaaagcgggttttatcaagtagcttagagaaaatatccgctaattgatcttccgacctcactccttctaaaatgatgtctcctttagcaacatgatctctaaggaagtgatgacggatatcaatgtgcttggtgcgagagtgttgtataggattattagcaattttaacaacactctcattgtcacacaacaaaggtaccttttctagaactacaccatagtctagaagagtttgtttcatatagagaatctgtgtgcaacaagcacccatggcaatgtattccacttcggcggttgacaaggcaacactattttgctttttggatgtccatgatactagtg

SEQ ID NO: 66694 - DNA, 432 bp, Zea mays
  unsure (1)..(432): unsure at all n locations
tgagcagtgactggcttcgttggaaacccttggaagctggttatcaacatatccttcagcttttgccatgaggtgattgtccctggcctaagagaggagtaccaagtttgtgcaacactcctgacggccatgacgaaagactntgccatgaccgccgtgttgccaccatacgaagatatagttgcctcatagctcatcaagaattgtttcgggtctgaatgaccgtcgtacatggggagctggggtggcttgtaagactgtggccaaggagtagcctgtagttctgttgacaggggagaagtatcatcaaaagcaaaatttccgtgatggaaatcttcataccagtcgccctcgttgtagaaaccctcttgatgaagctctctgcgcggnggcctttgtgtctggtcgtcttgagcaagatgtcgaaactct

SEQ ID NO: 66695 - DNA, 407 bp, Zea mays
agcttgtggcaccctcgggcgtcttgttgtattcgaagtaccaaatctcccacttggaagtctcggggccaaacccttcgggcgtggtagcgtcgcagagactgctgataccgtgccgagtgtagtaaggccacgtcccgagcctcttccagctggtccaattaatcctctcgactggtctggttgctttggtcgtcataagcctttgtcctcggggaaccgtattccaagtccgtgggtaagatggcctcggccccatagactaggaaaaacggcgagaagcccgtggcccggctcggcgtcatcctcatactccaaaccaccgagggtagttcttttatccaccgcttgccgaacttgttgaggtcgttgtagatcctcggtttcagtccctgcaaaatcatacc

SEQ ID NO: 66696 - DNA, 458 bp, Zea mays
  unsure (1)..(458): unsure at all n locations
ttaactctcgcgagaccttgtcccgcctctttctaaccatggtaaattcattattgtatgtgggattctatgcatgtttaatctacttgttctattgtatggtgtattgttggtttcctaatttcaatggatggatggatgtatgtgtgcactcgcatagagaacgatccggttgaagagcccgatgaacttccaggagaggcccctgagcagcagtcggttggtggaggcaagtgtcccttgacctatctatgtcctatacattctttaattcacctcccgcattacacatttatacctaaggattgactagcttttgttatccatgtccttgtctacctatctgggttggattattagttgttagctttatgctattgctcaaactctaatcaatgaacatgatgagaatatctatgatacgctnngtttccttctcttattatgatgttatactt

SEQ ID NO: 66697 - DNA, 424 bp, Zea mays
gcttgaatttccaaaccatatatcttccaaaaaatgaatcctttttccatcccccattttccatttaaccccctatatgcgctgtccgtaccgcctttccagaactgagaagcgagttattttacattgtaaagtggctaaagaagctaaaacgacgtgacagttcaataaaagcgtacgcgtcatgaacagtgggctgagtctataaactcgggtcctgcacaagggattaaaggactcgatcgaagacatcaacacagatacaacaaaatcaagttatcctagaaggttcaagataagtgtcttatctgcttgatttaataactcggacaaataaaactcaggacctactattaagaatgtatactatggacgactaagagaataatgttaagaatatatactatgggtattcagatcaagc

SEQ ID NO: 66698 - DNA, 464 bp, Zea mays
  unsure (1)..(464): unsure at all n locations
ntatcanatggacgtgaaaagtgccttcctcaacggaccaatcaatgaagaagtctatgttgagcaacctcccggctttgaagacagtgagtatcctaaccatgtctataagctctctaaggcgctntatgggctcaagcaagccccaagagcatggtatgaatgccttagagatttccttatcgctaatggcttcaaagtcggcaaggccgatcctacactcttcactaaaactcttgacaatgatttgtttgtatgccaaatttatgttgatgatatcatatttgggtctactaacgaatctacttgtgaggaatttagtaggatcatgacacagaaattcgagatgtctatgatgggggagttgaagtatttcttatgattccaagtaaagcaactccaagagggcaccttcatcagccaaacgaagtacactcaagacattctaaacaagtttgggatga

SEQ ID NO: 66699 - DNA, 425 bp, Zea mays
agcttcgataccagctgtggcggaactgccttaattattccaacttaagtgcctaagtcccgccttagaggctagaccacacttaaatgggaataacccgtcaatccctcggatctagtccgacgaggccactgacaggatcaagtaccacagtctcactcgatggtgagtcacagagcaaatacaataaagcataaaaccatacattaaagagtattaaacttattacatcatcatcgaagttttaacaaaagtagtcatcattgttcgaagtgcagcggaataaaactaacggtaaataaacagagagatggggaagcctgtcccatcactcttcatgctcttccttagccgaggcaggatcccactcgactatccaacccggtggcaagatggatggccaagtcactccagcaaccatgttt

SEQ ID NO: 66700 - DNA, 340 bp, Zea mays
  unsure (1)..(340): unsure at all n locations
tactaagcttanaatcagaggaagagagaggattgtgccgccgtgcttctttctgttcatcaaccgccgccggaagtcgtatggaggtcgagagtctacaccgagcgggcgtgttaccatccgtggtgcgtgcgtgccgaatcgtccactgcgtgccccgtaattgttcgccggagatggcggaacgccgtcaagccgcctcgtgtcgtggtcagcccgcctgtgtgcccaatcctcgggaaattcacgctcctactctatgcgctggtctcctatgcgtgtaggtctgtttaccttgaaacggggcccggtgattatagctttcgcgctcaccggctat

SEQ ID NO: 66701 - DNA, 419 bp, Zea mays
agcttcaattattttcagaaagatcattaagaatttttggaccaaactgaggccacaggagctgcccatttggtaaataaactgcaaataactctgttgcctctgcataattaaactaacaacttctatgtccaggtaaatatttcgccagcattactgtgtgcctacttccttgtctacaagtcaactaaacccaactcacagatgaatatacataaagggaaacatgatatgattattagacactaacttctgcatgtttatcctttacttatgaaaataaacattatacgctcataaattaccagtcgtgcttgcacccaatccacctaatatcctttcttcgttacatagggcatgattcaaaccagacatgcctgcacaaatgacatgaaaacacaggaattacaatttatcat

SEQ ID NO: 66702 - DNA, 463 bp, Zea mays
  unsure (1)..(463): unsure at all n locations
tgactcaggtatccacacattaatccttaattcattnttcccgtctcatggacaaggcatcctccctggatccaagtccatagaccaacatatatcccattatcaagatgaatacaatcaattcctgacctcgcgcgagtgctagaaaaatcactcgacttctaccgagatcctgattagcaagcagctactcgacctagcatactagtattcatctcaaaaaggagtcctaagttcatgcaactagaggtttcaagcaactcctacacttaagtgcacattacagtcctacaagcattaagtgtagtaaagtagcatataataacatggttatgcataaaaccggtgcttgccttcaattgctggggctgcggggagatcctcaatagcagcctctgaagcctgctcctggtcctcctcttggacaggtccttgctcggngatgagcacgtactctccgtcg

SEQ ID NO: 66703 - DNA, 419 bp, Zea mays
  unsure (1)..(419): unsure at all n locations
gcttaaagggtaataagtcaaagtctatgtataccttctttaagccccacagaaccaggaaaccctaagttaattcttaacttagtttctttaacttaatgttcttaaatcttgcataatcatgacatacatgttcattgcatttcgatagactgtaatcttgcggacggagagtacatcctcgtgccggagcaaggagctgcccacgagggtgcccccgatccaccaccagagcctgcaccagaagacctgcctgccacttgcttggaaggcaagccccggttttatgcataacctgttatttatgctattntacttcacttaatgattgtaggtttgattgtgcacctatgtgtatgagtngttcgaaaccctacttgcatgatcttagaaatccctttaagatgaatactagtatg

SEQ ID NO: 66704 - DNA, 364 bp, Zea mays
  unsure (1)..(364): unsure at all n locations
ctaccaaatggacgtgaagagtgccttcctcaatggaccaatctatgaagaggtctatgntgagcacacctccggctttgaagatagtgagtaccctaaccatgtttacaaactctctaaggcgctttatgggctcaagcaagccccaagagcatggtatgaatgccttagagattttcttattaccaatggattcanagtcggaaaggccgatcctacactctttaccaaaacacttgaaaatgatttgtttgtatgccaaatttatgttgatgacattatatttgggtctactaacgaatctacttgtgaagaggttagtaggattatgacacanaaattcgagatgtcaatgatgggggag

SEQ ID NO: 66705 - DNA, 407 bp, Zea mays
  unsure (1)..(407): unsure at all n locations
agctttggaaagtgagcttgcaagatatgattgttttttggtgagncgcttcaatcactctttgatcggntgatggtgttggtccacaaaataagagttcttgggagtgaagattggagtgactccaaggtcacaagattgttcatgagagcttattaagagaaggattatagtctttgcaagatgataagagatcgtgatgactatgaggatatgacgcctcatcaattatttgcaaaaattcaacaacacgagtccgaagaagcccccatcaagacaagagactctcatgccttgatcacaaatgaacaagacaaccccaagaagaacaaagaccacaacagcaagaaagtggtcgagacctccagcgatgaagatagctcaagtgatgaagacacagctatgtt

SEQ ID NO: 66706 - DNA, 489 bp, Zea mays
  unsure (1)..(489): unsure at all n locations
aatactaagcttatatcatctgctttcacctacagagcgtgtcaagcatattgtggtccccgtctcttgattggtccatcaaggttagtcaataaagatctaggaacccaaatgtcctttgtgctagcgcttggtaaactcattacctttctagcacaagttgcaattttgggttgcctagttacatatgaatcaattgtcaagctatgagtggaaaagttaccaatgggacaatccttgcataggtgtcccttctttcggtatatgtagcaaatgtgatcttcatgttttgaggatttcttctttccttgtctctctcttgctacatggntagtaaatattntcttttctaaaactatgcctttntgttnttcatagggacatgacttaactaaatgtcccttctcagagcatctaaaacaatattttatcatccttggtaataatcaagccattttctttaatatagggacatgacctaatcaaatg

SEQ ID NO: 66707 - DNA, 418 bp, Zea mays
agcttctgtaatgtgcatgaattattatatgtttacaaagccttggggcaaagaacagtaccataacaactttggctgctacagcttcgtctctcggtccggggcaagctgtcccgtaccaacctttctgaagagatggcccggggattggatgacagaatggttttatgtgaagaatgacttatcagcacgagaagacatcaaaggtataattatgcgtcctatctggcaaagcttccgccttcggaggccgaaggttgaaatgaacgaagccgccgaagagtgccaaagagccttcggcgttgtctgctcttttataggaacaagggacttagtacaagagcatattgccttcaggatgtggccgcttgcggagaaatgggaaatgccacaagaaaccattaaagaggccgacgaa

SEQ ID NO: 66708 - DNA, 418 bp, Zea mays
agcttctaaagggagaacacgtgatatgtctaactaatgttcaattcgaaaaagatagaccttgtgcagcttgtcaagcagggaaacaggtgtgaggctttcatcacaccaaaaatgtgatgacgacatcaagacccttggagatgctgcatatggacctcttcggacccgtcgcctatctgagcatatgaggaagtaagtatggtttagttattgttgatgacttttcccgcttcacttgggtgttctttttgcaggaaaaatccgaaacccaagggaccctcaaacgcttcctcaggagagctcaaaatgagtttgagctcagagtgaagaagataaggagcgacaacgggtccgagttcaagaaccttcaagtggaggagttccttgaagagggagggatcaagcacgagttctc

SEQ ID NO: 66709 - DNA, 394 bp, Zea mays
  unsure (1)..(394): unsure at all n locations
cttggtcatttattgctaactgtcccgacaatgatattgttctngatcaagggaacaagagggagaaaaagaagaactattagaaggcaaagggcgaggcacatcttggcaaggagtgggattcggattgctcctcgtctgactccgacaatgaaggactcgccgccaccgccttcaacaagtcattcctcttccccaacgagcgtcacacatgccttatggcaagggagaagaaggtatgtactcgagactctacctatgcttcttcaagtgaggacgaatctattgatgaggatgaaatagactattcatgtttatttaagggcctagatagaaccaacgtagataaaattaatgaattgattgatgccttgaatgataagaataggctttt

SEQ ID NO: 66710 - DNA, 409 bp, Zea mays
agctttggccccacctgtaggctcgcattcttctcttgaggcgggcttgggggccactgtcggtaccctgtaactagggtaccccttagtactgtataaagtcgcagtgcccacatggctatctcttagtcgcgtggtaatggtgctgtgtgtgggaccaggccattgctcgccccaatcttgggcgactactctgggtccacagaagcacctgactccaccacatgggcgggtccagagcctccatgtgttcagagaaggtgatatcctccaaggcatcaacagtgggccaggacccccacaggagagcaccggacccctggatatgcagtctggacctccacggttggtccaggaccgccacgtgtgcaagccggacccctggaatgggatccggaccctcccgtat

SEQ ID NO: 66711 - DNA, 392 bp, Zea mays
  unsure (1)..(392): unsure at all n locations
cangatgagatctggtaagttctaggataggtgaatcttgagttcttgactggtctttaccatgttttcttttactgaaatggtcttctcggtcggtatgactgcgagcttcttctaagtgtaacaatgtaacttgggggcacaagggcagtctgccaatctttccccaccagccatgtttttttattttgctggggccacaaaaccacgacattattccacactgtcggtaccctaaaattatggtaccccctactactgtacaaagacaaaaacccacgcggctatcccttattcacgtggcaggagtgctgtgtgtgggaccaggccgcggctcgccctaatcataggcgactactctgggtccacaacaacgcctgactccaccacat

SEQ ID NO: 66712 - DNA, 414 bp, Zea mays
  unsure (1)..(414): unsure at all n locations
agctttgtcttttgtgtatggacgacgtgctgttttatgctatggacaaggagttgtatcgtcaccaaggtgccagtgtcataatgcctggtcccgaggttgagctgcgccaaaaccgtgtcaaacggatttggtttgagttcaaattttcccagaatgtgttcaaggtaatttggcacgactttgatatttggatcttctggctttgagtntggaaaagcagagaacacagatgatctttgaggagaggtctgaaattcagaaattcagaaatctgaatttctctaagggttcattgatcaagggctgttttggggatttaattgagttattttggctaagccttcttaatctttcttgttacttagtaaatatactttaacctatataattggctcaactcaaaattttaaa

SEQ ID NO: 66713 - DNA, 428 bp, Zea mays
cggtagtgttggacaacaactgattagctcctaatatgtgaatctgttttccctactgctgaaatgcacgagtttgttcattcgctttcctaattaatctatgtattccctaaccaagtggataattcatctcgcttgaagaaacggatgaacaaccggatttctatccaaatgcatgacctttgacttgcaaatgtgaactctcaacccttggcttaccgatggtactgagaggacttgctcaatgtcaaaagtagttcaacaagttggtttcactaacgtgcaactgcctggtgaacaaaggttgagtttagagatcgttttatcgagttgtctaagctcacttttgtacaacccctcttaaggaagaattttcaaaaatcgagattaagtttgtcaaataaccacctaaccatcgctctagtcgt

SEQ ID NO: 66714 - DNA, 406 bp, Zea mays
  unsure (1)..(406): unsure at all n locations
agcttaatctntaaatttatttatttacttctttattgtatttntattttcttctaccaatctttggcctttacaaatcctacccccttaacggaaatctcgtcctcaagatttgttagaacagggatgtaaaaaggcttatttatagtttggcctttaacttctaattagtttatgaacaaaaagtttcatgttatttataaagtggttatgaaagcatgggtgtgtatagtcaccttattgtgtaggataaaagataagttatggcaaatatagcctagggtaagcaagtttatgatgtgaaagaattccgtgttgagtggtaatgcatctgaagatcagtgttgactcctctctttccttgacgaggatgatattttcttctccggtcttgagctcattgatt

SEQ ID NO: 66715 - DNA, 483 bp, Zea mays
  unsure (1)..(483): unsure at all n locations
actcagcttcacggtggtcaatntttgggcagcacaacaatacatatttctgtaaatgttgtggtaacttgacaactactcgtctgtttatatagtgctgcaggtgggaagatgaatcgtcaagtcgctcgcacccactgaacagtcacccgcactcgctgaatggtggaccatatcgcccaagaagctgaatcaccagatcgcgcgtacccgttgcatggtgggatcatccttcactcggaatatttaaatcatttctcggcaacgagctcaaggaaggtgttgttcggaccttcagcattctgaagcctgagagagtttttcacgggtcgagctcgttacgaaaaacgatctggcaccgtgaagggctactgttggcggcattcttcgtcgctgaaggtcccataagaagaaacaccttcggaagattgacacacagtcgaagctatcaatcagagagcttcgtagtacatttccaaatgc

SEQ ID NO: 66716 - DNA, 415 bp, Zea mays
  unsure (1)..(415): unsure at all n locations
agctttatcaaatggacgtgaaaagtgcctttctaaatggaccaattgtaatactcaaattgtaagaaagtgtaaaaggagaaaagagttntcccttacatatgtgtgtgttacctatattcgtcatttcatgtgaaaatcacatttaaacaaataaatagttaacaaaagacactcaaataatacatgcatcatgctggtattttatttttgtgtgcatttttgtgacaatataaagaaaatgtgacgagaaaaatattaaagtccaaagtgggatttaatcctaagggaaaattcaagaagtagaaaaaagggaagaagagaaaatactatgcaatacaaaaataaacttataaatagataaatttattccaataatttattcaaatcatatactcagaaatttgagtacaag

SEQ ID NO: 66717 - DNA, 457 bp, Zea mays
  unsure (1)..(457): unsure at all n locations
tagaagcactntcgtgtcttagtcacaccgacatgatcttttcctcacgcggttaagcgttagaacgaggattatgctccgataccaattgaaagatgccaagagggggtgaataggcaagttaaaactttttcaacaaaaactagaaacaaattgggtaaaatcggttccgccggtgtcgaaaccggttcagtcagtttgcacgagctcaactaaagaatgagatataaactaaattgatctcaaaattcgcctagttaactctggaaatgagatgttctagttgatccacagagttcaaagtagtagatctgagaagggcacttctcataatccacacaccaaatagatataaacaaatctttcacggaatggtgagagaacgaagaacacatacaaacacaatgagccagaacataagagacacatgatttatcccgaagttcggtcacatcac

SEQ ID NO: 66718 - DNA, 411 bp, Zea mays
agcttttgacaaaacaaaaactcacaaaaactctattctactattttcaaaatctctcacaaaaactctattctactattttcaaaatctctcaagtggtagctgatccatttattactttggcctttattttctccccctttggcatcaagcaccaaaacgggattaatcttggccttttaaccccattgcctcaccaaagtcttcaattaagagcaaatggcaataagatttcatgagatgaacttggaattagttaccctctcatcggagtgcagtggaagtctttcatggtccaagtccacctttttccctttcaatcctccttcgagactcaatcaagcaaactcaagcaaatggttagtctcaaagggtcaagttgtaacacatctccccctaaacatgtgcatc

SEQ ID NO: 66719 - DNA, 459 bp, Zea mays
  unsure (1)..(459): unsure at all n locations
tcttaagagccaatgtaactgcatgtctagtagatggttttattgcaagcttagtcatatataatgttntaggatcaagtgcaccagctagagaaagaagcaagattattattagaaacaaattcaacaaaaaagaacataaattgaacaattctcatttcatcccttacctgcaacaatgagagtatcatcaagcatatattttagtctcttcttgatcactctaattattctattgagaagatctttctctttacttaaattaccacgtatttgagccatggctgtcatcatctttggaagaaatctagctatagttgcatttttttgttgatcagcatagcgaagcacaatataaattggtgtgacaacattcaacaccaattccatgtcacttcaccatcttctatttaacanacaatcataagtaaatgcatgatctgcttcatctttccatgc

SEQ ID NO: 66720 - DNA, 423 bp, Zea mays
  unsure (1)..(423): unsure at all n locations
agcttctaaagggagaacacattgtgggactaacaaatgttcattttgagaaagacagagtttgtagcgcatgtcaagcaggaaagcaagttggctcccaccatccacataaaaacatcatgacaacgaacgagccgcttgagctactccacatggatttattcggcccgatagcttacaaaagcatcggcgggagtaagtattgtcttgtaattgtggatgattattctcgcttcactttggtattctttttgcaggaaaaatcataaacccaagagaccttaaaaggattcttgagacgagctcaaaatgagttcggattgagaatcaagaagataagaagcgacaacgggacggagttcaagaactctcaaatngaaggctttcttgaggatgagggcatcaagcatgagttctcttctc

SEQ ID NO: 66721 - DNA, 488 bp, Zea mays
  unsure (1)..(488): unsure at all n locations
tacgtgacactatgaaactcagcttaggctaaccaaaagaattccnncctatcactctgtttttttgtgggtgcaggaaattacatgtttaaccttatatctgatttttaacgtgatacttagctgactgtctagtctaaggcagcaaggtattaagttcctccctgataggctttaatcgtgaactctattggaagtatggaattgttaccatgacttcaaacaccatcccatttctatattttagagttttgctttgagatccttctttgactcaccagcatcatttcttcgaaaactggccattttaaatagttttaggaaaaatatgttgtaccacatgtgtgcgtaaaggttcacctcaagttaaattgaagactcctttatctgccaacaaccaaggtaaaaaatgattctgttctctaactattttcagatttacttttaaacgttgttcttccctatgcgtctgtgcttgacaatcattt

SEQ ID NO: 66722 - DNA, 416 bp, Zea mays
agcttctaaagggagaacatgtgttaggacttactgatttctgttttgagaaagatagaccttgtacaacatgtctaagtgggaaatatgtggggaaaactcatctaagcaagaacgtgatgacgacgtcaagaccattggagcttctccatatcgatctcttcggcctcattgcttatcttacaattgggggaagtaagtatggtcttgttattgttgatgacaattcttgcttcacttgggtattatttttgtaggataaatctgaaacccaagaaactctcaaacgctttctaagacaggctcaaaatgagtttgagctacaagtgaagaaaataacgagcgacaatggatttgagtttaaaaatcttcaagtggaggaatatcttttggaggaaggcatcaagcatgagttc

SEQ ID NO: 66723 - DNA, 412 bp, Zea mays
  unsure (1)..(412): unsure at all n locations
atagaggcaagagctcgtccatatgtcttgatagaatgggagttatacaagcatggagtntgtgctccgctactcaagtgtttatctagaaccgaaagcgtataatngatgaatgaaatacatgcaggcctgtgtggatctcacattggatctaagccgctacttggaagaaatttccgtcaggggttttattggcctgaggcagcttctgacgcggcggaattagttcaaaagtgcgaaggttgtcagaaatgtgcaagagatcaaaaacaaccttcgttcttaacacagctcatacaacccatctggccattgcaaaggtgggggcttgaacttgtaggtccgttaccaccgggccaagggaacctaagatatgttgtagtggtggtggaatattnttctaaatggattg

SEQ ID NO: 66724 - DNA, 433 bp, Zea mays
gtgttcgacgcgagctggcatccgggggcgcgctcttagcacgcccgtgcgcgaacccccgcgcacccgcgggcgcccgtgaccacgcccgcgccacggctataaagcccgctccagtgcttggctgccttccccgttaccccctccgtacctcgccggacttgcccgagccagccattaactccggtgacctccccgcaacccgctagtgccgcccgagagcaaccaccgtggccagcccctctcccgtcctcctctgttcgatccgagcccttagatagcttcctggtgaggccgtgagacttgctcaagcttgacccagggaccctcgtcaccggaatagcccaatcgtgctcaccggagttcaagtacccgcccgcgcacgtggaccgggtaagcccctgcaccgttttcaattcgtgcgcgcatggct

SEQ ID NO: 66725 - DNA, 379 bp, Zea mays
  unsure (1)..(379): unsure at all n locations
agcttgcaagagacacctaattgtgtggtgattctttttatgactcagcgaccatgagattgagaaaaaagcactctaccagtctgagtgactgaatgagagagggaaagggttgaaataaacccgacctttgtggtctcctcaacgaggactaagttctttggaaccgaaccttggtaaacaaataaacgtgttcacttggtgatcttcactatatttgttccccctctttcctctctctaaaagttcccttgctcatatagatatgagtttgctcccaaacgttcttcacattgatttatcaactcatagcaaggagaaccatcttccgcactctgaattatttctaacactaaccctgngcatagcgcatgttcaa

SEQ ID NO: 66726 - DNA, 480 bp, Zea mays
gcctgtagccactaatatgttccctggtctgttgtctgtcatggtgtttttatacacaagatattgcgcatatacctcacgaatagggaccctacttcatatctacttgctgaaataagtcgtgaattgcctaacgcgggccctctcttcttctcgagcgatgctgtccaggtatgcatatgccaccactctgccttataaaaaaacatctggcgtcattctgaatacaacccaggagtgagcataaagggttaacaattcacaaataatctatgttcaatgggcatgagtgaagaataattagtaaaagcctttcactgctgacttgatagcaaagtagtgtttaaattatgcgaaaagtggctacgctctataaactgggacggagggagtactgttatttatcaagtacaatagcattccccgctaacatttgttgtgtattacaaatgagcagcctgtgatatacaaagtgacatc

SEQ ID NO: 66727 - DNA, 419 bp, Zea mays
agcttcagctccatctatgttatggattgcttctgagtcagcccagtttccctcagcccttctggcagctttctgactcccatgaatagcaatgggtccttgatccgaaggtatcttcatgcagaggtaagcaggatgaagaattgcttcgaaagcatcgagggtgccacgaccaataattgcatttgaagggtattccatatcaacaatgtcaaacacaacttgctcagttctggtgttgttgatgaatccgaaggttactggcatggtgatcttgcccagagctacaatctgtcttcctccgaagccacagagagggtgtgtagcatcatgaatcttatcttctggctcttgcatttgcctgaaggccttagcaaatatgatatcagctgcactgcctgtatcaaccaagacattgt

SEQ ID NO: 66728 - DNA, 373 bp, Zea mays
cccatgcttttatgcgaagatatcgcagagcacaatgtgctgctgggatctcaattgtctgagcaacaagagaaaactttgatcaaggttctcttcaacaacaaatatgtttagcatggccacctaatgatctttgctgagtcaacagggatgttattgaacactcgctcattgttgatccatctttcatacccataaagcacaagcttcggaagatgtctgatgacaaagccgaacgtgctcggaatgaagtgtaaagactcctcacggctggagttatcagagaattaaaatacccataatggctgctaacactgtcatggtaaataaggttaatggcaaatggatgatgcgtattgattttactgatctc

SEQ ID NO: 66729 - DNA, 416 bp, Zea mays
  unsure (1)..(416): unsure at all n locations
caagctggtggggacaccttctctgttgaaagtcctctanatgaacgaggccgcttcgattcatcttaacggatatgtcgaaggaccaaatgtcgaagctagagcagcggagcaagggatgcaattaatataacacagcttttgccccagttagagcttcgacttgatgtggtcccgaaggtcacacaacaaaccacatcaacagtgaaaagacccattttccttagtatctgtaataagacaaatgtataggtatcagggtcataattatacttttgtttgggctacgtcccatgcctataaatatatgaatagtaccatcgtactggtcacacttttattggaagtcattctcacattctctccttctagcaagccgaatgtataaatgcttgtaatgctttattggtgtataa

SEQ ID NO: 66730 - DNA, 453 bp, Zea mays
tcttcaccatgtgatcacggttattatgagaaggttgtgcaatgcatctccctttaagatgtgtcaagctcttctttagtctctcattttcttctttgagctattgatatgaatcatcatttgttcctgtagattctagctcacaagaagatttgcttgtcgacgaacaacaagcattagcacatggtaatatagtatcaatttgaatacatgtgcatgagtgaggttgttgggattttaaattttctatcacaacctcatgagcaatgtttaatatgatatgatcatctataagattttcatgagaacatagaagcatatcatatttattttgaaaagctagagtttcaactcttagctcttctatttggtccttaagcaaggtattcctatttactaattgagcgatacaatgttaagcgttattctgctcaattgaaatagattcatacc

SEQ ID NO: 66731 - DNA, 416 bp, Zea mays
  unsure (1)..(416): unsure at all n locations
tagctntgaagcgagttcttgtgaacacttattatttcagagaaggcaacacaagatacacgcgattttttatcccgttgttcagccaagtaacacttgcttacttccacgttgtggcgtcccaatggacgagagttgcactcaacccctttcaagtgatccgatgatcaacttgaataccacggactttttctttaggtctcgtttgtttcgttggaattgaattccattttaataatgataatttagataaaattaactaagtttatatatttatatatgtaatatatttgtatattatcttaaatcatatgagagagatagttatatactacattcatgttataacgaagcaagtagaagagtatgctataagttgtacatcggaaaaatagcatgtaaatctatagaatcaa

SEQ ID NO: 66732 - DNA, 381 bp, Zea mays
  unsure (1)..(381): unsure at all n locations
ncacgggcgcgcgcgcagagcaagagagagggctatgttgctctgctgaaggctcaactcagcggaggagggcaagtgaatgacggctgcctctacaaaacgattgggcgcgcgggggcatggacggaaaatgcgcgatcgtgggcgcgcccaccgcggacagcataagcggctggtgggggacagatccgataggcggtgcccaccgaacagagagagcgggcgagcgaacgaggatccgagctgacgagcggggcccgagggacagcgagagaaagtgcgcgcgcgcggaggaaaccggcgcccacaggtccgccccaccaagcaacgagagggatagaaagcccccgcgaactacgccgaaaaggcccgctgggctga

SEQ ID NO: 66733 - DNA, 414 bp, Zea mays
  unsure (1)..(414): unsure at all n locations
gcatgctagctngaagccatggttagtatgatatgttatttttttgcgaattgcaccaagcctatctgcaggtgcatatgttncaccaaaatccaaacctttgacttgtgaataccccttggccactaaaagagctatgtaccttgtcaccacaccatgctcgtcttgtttgctgaggaagaaccactaggtaccttcaacattctgattaagacgtggaactaaatgccatacctcattcctggtgaagtagntgagcttctattgtattgtcatcacccaatccgaatcttggagtgcttcctctaccctgtgtggctcaatacaggaaacaaaagagtaatgctcacaaaaatgcgctacacgagaaccagtgcgtacccccttataatgtctcccaggatggtgtcgatg

SEQ ID NO: 66734 - DNA, 393 bp, Zea mays
agcttggaggcgtcgatgtgtgttctactctttgtagactcttccttcttctcctccgtcaccttaaatgagaccggttgtgcttcggatgtggagggaccatcaagctcgttgatcttccttgagcctttgatcataaactcaaagctcacaaaattcctgatcacttcctcgggagtcattagtgtatatctaggattgccacgaatcaattgaacttgagtagggttaaggaagataagtgatcttagaataaccttaaccatttcgtggtcatcccattttttgctcccgaggctgcgcacttgatttaccaaggttttgagccggttgtacatgtcttgtggctcctccccttggcgaagacggaagcgaccgagctccccctcgatc

SEQ ID NO: 66735 - DNA, 388 bp, Zea mays
  unsure (1)..(388): unsure at all n locations
tacatgtgctaagcggcgatgccacagccagcccatgctagtcttagctattaagcatgcatctagaccgggctcttcttttgcaaaatcaactaaataaaagttgccggctaatacacccttaaaagctagtgaaccatcacttcttctaaagacagacacatctacatttgtaaatagacagntatatcccatattgcataattgactaaccgatagcanattatatccaagagactctactaaaaacacattagagatagagtgctcattagaaattgcaattntacctaaccctcttaccttgccttgattcccatcaccgaatantaatgaatcttgggaatccttattcttgacgtaggaggtgaacatcctcttcttcccc

SEQ ID NO: 66736 - DNA, 400 bp, Zea mays
agcttgtgaaggttcttcatccccacatgtgctaagcggcgatgccacagccagcccatgctagtcttagctattaagcatgcatctagaccggcctcttcttttgcaaaatcaactaaataaagtttgccgtctaatacacccttaaaagctagtgaaccatcacttcttctaaagacagacacatctacatttgtaaatagacagttataccccatgttgcataattgactaacagatagcaaattatatccaagagactctactaaaaacacattagagatagagtgctcgttagaaattgcaattttgcctaacccttttaccttgccttgattcccatcaccgaatatgattgaatcttgggaatccttattcttgacgtaggaggtgaacatct

SEQ ID NO: 66737 - DNA, 457 bp, Zea mays
  unsure (1)..(457): unsure at all n locations
tgtaagtatgatcattggtggtaagagtatctaagtatcattcctaaatattagagtatataataatcaattatctatttctgtgattcagacgaataggtgacattgtaactgggagttcttcgctggcattcatcagtaacatgacatctttgaacttattgtattcccaattaatcattcactttatgaatcaaactgcgccttcatttgctccattgtaaccaagttcttatatacttaaattggtgacactattcattgcagagttttaaggaattgcaggatatctggtactttggcattagtgaacttttcaaaatttacaggattaacattatttgtaggcatttcgtttcttccaatntttatgttaaatcttctttgtgcaagatgcttcctatggatatgcatcgcgagatgttcctttacacatattctcgtctttaactattgg

SEQ ID NO: 66738 - DNA, 410 bp, Zea mays
  unsure (1)..(410): unsure at all n locations
agctntgtcttctctttgttattagacgcagtatcctgtacacacaagcatgctatgaaatttgcactttcgcgtaactcgccagttgctgaaaatacaacgcagaaaactgattttaaagtttaacaagatgccgcacagntttttttattataatctatccaaattatataatctaacttattttaactccacagttgcatgtctttcttgttgaaatatgaaatgaattggccactttatccatatttcatatttcttattgacctagtattgacctcatgtttttttacctatgcaggctttgtttggatactctagtattgacctcaatccacatgtagatactctagtatttaagccggcatagaatatcaaaaaagacatgcaggctttgtttggatactcta

SEQ ID NO: 66739 - DNA, 376 bp, Zea mays
  unsure (1)..(376): unsure at all n locations
tcaattgggtgattagggtcttggcttagcccgaccactgtggtggnggttaccgaacacaaattcatgtgttccgaataattgagcgtggccaagcatagaaggttgagtcgatgagtatcacgagcatatatgggtgctaaaacaatattaagaagagcaggagcagacctatgagtggctggccatggagcgcagaggattttcactcgccagtgactgagaaggggggaaacggtgttgcgtcgggttctggtggaattaggaggtgaggttggggctacacggtcgcaaagaactacggatgcactgcgcaacaccaattttgggagagatggagagaatttcgtgaatttgtgcttcaaccgagctcgct

SEQ ID NO: 66740 - DNA, 334 bp, Zea mays
aatttcattgggcaccgctggtgcctgtgcccttaaacgcatgaacctttggacatatgcctgaaggtattcttcgtgatcctgagtgcactggaacaaagcctgagcagtgaccggcttcttctgaaatccttgaaagctggttaacaacaaatccttcagcttctgccatgaagtgatcgttcctggtcgaagggaggaataccaggtttgagcaacacttctgacagccattacgaaagatttggtcatgactgaagcattggcaccatacgaagacactgttgcttcgtagctcatcataaactgcgtctggcctgagtggtcatccaat

SEQ ID NO: 66741 - DNA, 413 bp, Zea mays
tgtggaggttcttcatccccacatgtgctaagcggcgattccacagtcagcccatgcaagtcttagccattaagcatgcatctagaccagcctcttcttttgcaaaatcaactatgtaaagcttgccgtctagtacacccttaaaagctagtgaaccatcacatcttctaaagacagacacatctacatttgttaacaaacaggtatatcccatattgcataattgactaacagatagcaaattatatccaagagactctactaaaaacacattagagatagagtgctcatttgagattgcaattttacgtaacccttttaccttgccttgattcccgtcaccgaatattattgaatcttgggaatctttgtttgtgacgtaagaggtgaacatcttcttctcctccgtcata

SEQ ID NO: 66742 - DNA, 413 bp, Zea mays
  unsure (1)..(413): unsure at all n locations
agcttgagccangctcacggtctcaccaggatactatttgggtgcttgaatcgaacggagggggactggaaaggagttggccaccgcggtggcgctcgggcggcactggcgggtcgcggggaggtcgccggaggcaacggctggctcgggcgaggttggcgtattacggaggaggtaacgggggaagcaaccgagcgctggggcgggttttatatgcgcggacgcggccggggcgccggctccaccgtttggcgcgacgcgagcacgcggggcgcgcgcgcgggcgtgctctggcgagctcatagcgcgtcgaacacgtggcgcgttgcttctgcccgtgttcttcgctctgctgagcggccaggcgtacgaatcttgccctaccgcctgggggagatttcttccctgcacct

SEQ ID NO: 66743 - DNA, 453 bp, Zea mays
tcgcacctttgaactagctcggctgcatcgatctttgctgttggccagtagaatcccgacctgaagaccttcccatctagtgttctggatgctgcatgtattccacattgtccagcatggacctcctccagaagatgcttcccagtgaacgggagaatacacttcatgaggactcctgatgcaccccttctgtataatgtttccccaatgagtgtatattgcgccgactgtctagcaatgcgctctgccgagtttttgtcgtctggttcttcttcattctttatatacttaatgatcggccttctccagtcatcagagtttgactcgagttgacctataacgctgcactcttctggttgatccattgagatactcggctcttggatttcttgcacgaagattccgggtgggacctgagttcgatcgaatcctagcttggacagtacatcagct

SEQ ID NO: 66744 - DNA, 409 bp, Zea mays
  unsure (1)..(409): unsure at all n locations
gagctntgcatacaactgacaatgccatagcctctattatatcttcctcaaaagctcttcatgctcttgctcattcctggaatatataaggatatcattgatgaacactactacaaacttgtcgaggtaatctatgaatacactattcatcaagtacattaagaaagctggtgcattcgtcagaccgaatgacatgatagtgtactcataaagcccatacttactgataaatgttgtcttcggtatgtccgaaagctggatcctgagctagtgataaccggaccgcagatctatctttgagaacatgctggctcctctcagctgatcgaacaaatcttcaattttggacagggggtacttgttcttgataatgacttcatttagagctcggtaatctatgcacatctta

SEQ ID NO: 66745 - DNA, 459 bp, Zea mays
  unsure (1)..(459): unsure at all n locations
tcggaattacanaccgacatanaagtagaatgacgctttattccatatatgtgtgagtcgctggtgtaatcccttataaggggcataattggattcctcataggcggtgtcccgtgtctataaatagtgaacaatattcctttactgttcacgcatttctgtatttgcaatcgcatcattcgggaaccaatctttatcaaggcagaggtataaccgtattcaatgattaaatatactgagtagatagaatatgattcgcttatgattcatttacctttaatactctatattttatgttatcttatacaatctattaaaattcaattacgaagatttaaccttcgtaatcgtattgtcatcaaccctcgtccaaggtccattaatcctcaaaggaataatgcttctgtggacgaaggacattaacatttaacattttatggtgccttggtcttaattcat

SEQ ID NO: 66746 - DNA, 386 bp, Zea mays
attggtaagtgcgcagacatctcacaaggggatatttgatgttgtattgtcgatgcactcacacaccttgtgacttgtgatggtgttgctatatgcacagaagagaaaaagtgatatgcttatgtcctcaagaacagttgaggaaacattgagaaagaattatcctacgcacgatttggaactatctgccgtagtgcatgctttgaaaatttggaggcactatatgattggaaacaagtgcagaatcttcacggatcacaaaagcttgaaatatatattcactcagaaagaactcaacctaagacagagaagatggcttgagttgatttaggactacgaattggaaatacaatatcaccctggaaagcaaatgtagtagctgatgc

SEQ ID NO: 66747 - DNA, 474 bp, Zea mays
  unsure (1)..(474): unsure at all n locations
ntagcctttctgtggtcatctgcaagctttcccacattgtcacgaacggcaacatgagcagcagcacagagaactccaacctgcctcattccaccacctagggtcttccggagaattttggcctgaaggtattgttcatatttccatcataacttgcaattcttttctttttgcaaacaatacaacgctgcagtttagacttatgaacacaaatcaacagaccttgtcgatgaaggccttcgagccaacaataactgatccaacgggggcgcctaaacctttagaaatgcatacctgaagtttaagttttcaaagaggaatagaagcaccatgatacatgtatctgtagtccattcacatgtaagcagcgtagctgatttggaacgtaccgaaactgaatctgcagctctcacaagtctgtccacaggaactccaagtgcctggcacaacgaaaataatggattacgatgcttg

SEQ ID NO: 66748 - DNA, 410 bp, Zea mays
agcttgctcggttactacacaaaattgggagttaataaccctgcaaatcacgctgtcaggtcggctgatgatctttgccatggtacagtgacaaaagatctgcggtgccgtgtattcaccgtcggtgactcgccgccgcgattcgtgtcgccgccggtggtcgatctcgtgctacgattcgtgcatcgggtacaacggataaacttgaccgggtaaaaatccgaggcaggattgagctacggctaagaccgtcgcacttcaccgccccagctcaccgtcggttgaatgacctcgtcaccgataagctaccgccgtcgcgcaccacgtgtctcagcgcggaacctcctcacggtgactcaccgattgcatgcccggcgatcaccggagtcactgccacggtgaaagccact

SEQ ID NO: 66749 - DNA, 439 bp, Zea mays
  unsure (1)..(439): unsure at all n locations
tctaaagggagaacacattgtgtgactaacatatgttcattttgagaaagacagggtttgtagcgcatgtcaagcanggaagcaagttggtacccaccatccacacaagaacatcatgacgaccgataggccgcttgaactactccacatggatctattcggcccgatcgcttacataatcatcggcgggaagaagtactgtctagtaattgtggatgattattctcgcttcacttgggtattctttttgcaggaaaaatcacaaacccaagagaccttaaagggattcttgagacaagctcaaaacgagtttggattaaggatcaagaaaataagaagcgacaatgggacggagttcaagaactctcacatagaaggatctcttgaggatgagggtatcaagcatgagttatcttctccctacacacctcaacaaaat

SEQ ID NO: 66750 - DNA, 436 bp, Zea mays
  unsure (1)..(436): unsure at all n locations
cttataatcacctgcagcatgctagctctcaatgctcataaaacagcgatgtttttattgagtacacattatccgaactctaaattattatatttcaatacaacatcttcagtactaacacatatgtgtttaatagtttatgcagcaacaagggctgacatcaaanttttcaccgccaccacaatggagccaatttgcaaacacaccatgtccaccaccacagttcaccaccccttcgacacatatacctgcacctggagataaggtacgtttgataactcttcattaatttatacacctgtatactttttgatattcgcatttaacgtgttgatatttgctaacttgcataggntacccccgaagcgggtggcagggggtctgatccaactagaaggactggatttgttgactcgctcttcgcgctcccttctcc

SEQ ID NO: 66751 - DNA, 453 bp, Zea mays
atattattcatcagagcactacgaatattgttgtgactaatgaaaaatattcttcacgaagcatgaatagaatggaagggtgtttttcgtcaaagactcaaaaatggtacgtatgtaaaatttcatgcatcgtatagaagtaaacaataaaagcaggtatattacattcagggctacaagatgtcacacatattacatttcagaagtttaatttacaatagtatttaatcttctctcagaacaacttctgcagcctcattcaggagccgattgacgacttcgtccataatagcttcagccatctttttaatttcatcgtctcctttcggctgaaggcccggagacgctttagcaggatctgaagtatgacaggatacgactacactgctattacaaattgcatacgaagcttaaaaccaagaattacaacacaataaaaactattagttaata

SEQ ID NO: 66752 - DNA, 418 bp, Zea mays
agctttaacctctttgacaataaaattacttctcctagtgttaacaaaattgcataaaatgcaggaatgaatgtttgagaagttaaactatgtatgaagcagggctaatgtatgaacatgctttctcttcctttttatacaagatatgtaaagaaagtatggaaaaaggaagattgagatacaagttaaaatgaaaggaagtcgttttacccttttgtaccttcgcatagagatgctctcttcattgtgctttgtccttagtcttagtcgcttaagacctatactcaagacaatatatggaaatattttgcacaagagagagttttacaactagtgatcattttctatgtcattgttagcatatcacaaattgcatagatgtaccatgaattctccttttaacttagtgcataacaag

SEQ ID NO: 66753 - DNA, 444 bp, Zea mays
  unsure (1)..(444): unsure at all n locations
tgtgaagccaatcacaagtctattgaagaatgagattaaattcaattggtcttcaaagtgtaatgaagcctttgagcacttgaagatattattaaccactcctccggtattggctcaaccggacattaataagccatttgatgtgtattgtgacgcatcangcagtggtctcgactgcgtattaatgcaagaaggccgagtaatcacgtatgcttcaaggcagttatgctagcatgaggagcattatcccactcatgatctggagctagctgcagtggtccatgccctgaagatctggcatcattatctgctaggtaatatctgtcacatttatacagatcataaaagcttgaagtatatcttcacccagtcagagttgaacatgagacaaaggcgatggcttgagcttattaaggactatgaatntgaaattcattatcacct

SEQ ID NO: 66754 - DNA, 377 bp, Zea mays
agcttgaacgttattatgaaaaaatctttttcttttatgactatatcaagaccaaagatgccacatctatagtgcttgatacaacccactaacggatatgatgaagtctggctaacattgcgccaaagatcatgattactgaagcctacggcatgcatgctatgacacaatctcctctaggtttacgataagaaagttgtaaggaatccatctaccagatggtgataatacaaaatatagccgcaagtacatataatgataccaaaacaatgaaacatcggtgctgacgataatgtcatgcaatagaaaacttcttgcacttgataaagagcgtatacaccccgacgagccttatagatgcgaactatttcatgcct

SEQ ID NO: 66755 - DNA, 191 bp, Zea mays
gaatacttggcggctacacagcgctataccaatgaatgctgcgggatcttgacaaatacccgtctgtccatatactgcccgagggggaaaagtaatatcttaagttttccgcgcaccacattcaaccgcacatactcaacgtacggtgggccacttagtcccagaaagggattcgacatgactgccctact

SEQ ID NO: 66756 - DNA, 367 bp, Zea mays
  unsure (1)..(367): unsure at all n locations
agcttcacacctctgaactaactcggttgtttctttcttcgccgncggccaatagaatcctgacctgaaaacctttccgactagtgttctggatgctgcatgtatcccacattgccctgcatggacctcctccagaaattgtttcccagtggacgggagaacgcacttcatgaggatgcctgacgcacccctcctatacaataccttcccaatgagcgtatagtgagctgattgcctggcaatgcgctctgccgcgttcttgtcatctggttcttctcattctttatatacttaataatcggccgcctccagtcatcagagtctgactcgggttgatctatgatgttgaattcttctgtttgatcca

SEQ ID NO: 66757 - DNA, 416 bp, Zea mays
tatctatgatgtacttggtgcgtccaggaagatgctcctctattttcatgcgcacatggttgtggttgtgacctcctaccgttaaaggccatcctccacaactctaacgccatgggcaacatcggcaactgggcggtggaacttgctgagttccaaatggagttccagcctcgccacgctgtcaagagccaggtcctggctaacttcatcgtggagtggaccccttccccgagtgctcctgggggtccggatcccatttcggaccccacacctgtggagcccagggctctggtcttcaccgagccccactggacgctcttcttcgacggatccacccgacagcaaggtggcggaaccggagtggtcctcattgatccaaacggagatcaagtgaaatacattgtgcaccttgagtt

SEQ ID NO: 66758 - DNA, 400 bp, Zea mays
agcttttgaggagaagaaggctgtgaatccttacattgctggatttatcgagtcaatggcgaaacaaatacagagaaaattactaaggagatactggagggcctgtctgaagatactggtgacagtgatagttatgatgcagaaagtgagggcgaagattctgaggatcagccctggagaccaagtcattcgattttcggaaaatcaaccatcaaacaaagtcatcttgaaaacatgaggggaaggtactttcaggatatgtctattgtaagggctggcggagtcaacaacgtccctgcccctgaagaaaatgaagttgtgatctaccagagcttcttcaaggctggacttcggttccctttgagtaagtttgtagttgaagtgctgaaaacctaccaaa

SEQ ID NO: 66759 - DNA, 332 bp, Zea mays
cttcccgttgtgaggaatctccataattcggagtctctcactccttacagagttgatctcaaataaaccacatgagtaagtgggagtagaaactcacacaagagataaaatcaaagcaatacacacacacattaagagaggagcacaacagacaacacaatggaattatagctcatacacttgctcaaatcccaaactatcaaaccaaaagcatagtcgcagtgtctcggtgttgtagaatgttcaatggatggctggtgtagagctccatgcgccttggggtcccttttacagccccaagggacctaagagctgttggagctccatttggt

SEQ ID NO: 66760 - DNA, 412 bp, Zea mays
  unsure (1)..(412): unsure at all n locations
agcttatcctctgataccaactgttacactcttggttccacaaacaacccggaatgctactgaactacacttccgacgtccatatataaaatttcggcagcatcccctttgcaagattgcataaaagagggggcaacagagtataaacatatatcatgactaaaacatactaagtattattaatcggctagcaaggaaagataaacatacgacctgaactgaattaaccagtgcgcacgaccatataaaaaataaacaaacttcctttgacaataagtttctaattaaatcatggctgcgcctgngcagcgttattgtgagagtgaaagtggacgtgctgctactcccctcattcccaacatgtatcaagtacctgcattgagtaatgcaagagtgagatgacacatctcag

SEQ ID NO: 66761 - DNA, 294 bp, Zea mays
  unsure (1)..(294): unsure at all n locations
gatgtcttctcgtgctgataagtcattcttcacataaaaccattctgtcatccaatccccgggccatctctttcgaaaggttggtacgggacagcttgccccggaccgagagacgaagctgtaacagccaaagttgttatggtactgttctttgccccaaggttntgtttcatataataattcatgagcattacagaagcttcttgcgtcaggcttcagaccttggcttcttgtggcccacacgaagatatttaaccttataatagcctctggagtaagttgatgaagatagac

SEQ ID NO: 66762 - DNA, 459 bp, Zea mays
  unsure (1)..(459): unsure at all n locations
atatgctggtttataataaagtgatatgccttcttaaaatggtgaataaagctagtgatggtagtcccacaaccacagggcacgggtacccataggtttcacacccattgggtgtaggtctggatgtcaaatttcactcatgggtttatactcgacacgattgtttaggtctgagtgtggctttttatcgatgggtgtccaatggatcctagattcataatactaagagcctgtttggttcagcttttttctgaccagcttttctgaaaatctggcggtggggagaatctggctgtgaggagaatctaagtatcattacgattacgtgtggaggaagataaagttgttcatatggctcaggatctaaaaagtgacggattcctactactacaacgactcaaccgattatgtgtttatgttgattntggatggtttttgctccaacaacatttatggaag

SEQ ID NO: 66763 - DNA, 470 bp, Zea mays
  unsure (1)..(470): unsure at all n locations
atgaagattcttcattccaacatgggctagtcggcggtgtcattttcaacccatgttagtcttagcaattaagcaagtgtcgagttcagctctatcaaaatctaccaagtatagctgaccctctaacattcccttaaatgctattgaatcatcacttcttctaaagacagtgacacctacatcagttaaaagacagttgtagcccatttgacataattgagaaacggaaagcaatttgtaatctaatgaatctacaagaaaaatattggaaatagaatggtcaagtgatatagcaattttacccaaacctttgaccaatccttgggttccatcctcgaatgtgatagctcgttggggatcctggcttttctcatacgaggagaacatcttcttctcccctgtcatgtggnttgtgcacccgctgtcgataatccaacttgagcccccggatgcataaacctacaaaacat

SEQ ID NO: 66764 - DNA, 469 bp, Zea mays
  unsure (1)..(469): unsure at all n locations
ttanagggagaacatgtgntaggtctaacaaatgtaacttttataaaagatataccttgtgcagcttgtcaagtacgtaaacaagtgggaagtgcgcatcacagcaagaatgtgatgaccacatcaagacccctggagctgctgcatatggacctcttcggacccgttgcctaccttagcatcggaggaaagtagtatggtttagtaattgttgatgattttcccgcttcacttgggtattctttttgcaggataaatctgaaacccaagggaccctcaagcgcttcctaaggagagctcaaaatggatttgagctcaaggtgtagaagataaggagcgacaacgggtccgagttcaagaaccttcaagtggaggagtaccttgaggaggaaggaaattctctacaaatgctngtaggaattattcttatgattcacatgctatgactgcttctacgtcttctatgcat

SEQ ID NO: 66765 - DNA, 479 bp, Zea mays
ctaagcttatgcactgctgcaaaaatgagaggaaactgggtgcctcagtccgatactatcttctttggaataccatgcaagcacacaatccgagacatgtataattctgccaacaccgcactgttataagtgggcttgactagtatgaaatgggctgcctttgttaaacggtccactactacccagatggagtcataaccagcccgagtacggggcacaccgactataaagtccatcccaatctcatcccatttcaactgaggaatctgcaacggctgcaacaaacctgcgggtctctgatgttatgacttgatcctctgacaactgtcgcatctggccacatattctgctaactctcttttcataccgtaccaccagaatctcttcttcaggtcttggtacattttctcgctaccagggtgtatataatatgttgtctcatgagcttccttgagaatcagttctcggatcgatttgat

SEQ ID NO: 66766 - DNA, 330 bp, Zea mays
ctttgagtgcatcatatgatcaaatgaaatgtacagttcttgaaactacagcagatgaagacttatattatgtgtacgttaaccatactagttggatacttttcttaattgaaatggtgaatgaagcataactgaccattggctaacccaagtattagcgttgttgttgggctgaccgtgctctatgtagagtttttggcatttcttcaatgaactgtgccgcgcaagatgttataggcttcttgtcggcataatctgcccattatcactatagattttgtaccatatggtgaggtgcaatgtatgtcagaatacatgattatactttca

SEQ ID NO: 66767 - DNA, 459 bp, Zea mays
  unsure (1)..(459): unsure at all n locations
tcacatctctgaactaactcagctgcatcactctttgctgtcatccaatataaaccagacctgaagaccttcccaaccagtgttctggacgctgcatgtatcccacactgtccggcatggatttcatctaacagttgtttcccagtggttgaaggtatgaacttcatgaggattcctgctgcgcctcttctgtacagtgtgtccccaatgagggtgtagtgngctgactatcttgcgatgcgttctgctgtagctntatcatccggctcctcttcgttctttatatacttaataataagctccctccagtcattaaagtctgactgcggctggctcaaaatattgcattcttctgcccgatctaaggaaatgctcgggcgtggtacttcttggatgaaaactccaggtgggacctgtgcccgactggattctagctttgacaatgcctctgctgcggca

SEQ ID NO: 66768 - DNA, 471 bp, Zea mays
  unsure (1)..(471): unsure at all n locations
actcagcttaccttgtacgaggataagctgcctctttgntccatatgtggatagnccttaagtctccttgaaatccttaagggtaaatgcttgagatatttataacatgctttcataagtgcataaaatgtcatgagcatcacacttatactatgacacaatgcactttacactctttatgatatagacatggtctcattaacctaattatgtgcactcggcattntagaccaaaaatttgttttcctctctatgcacatatttagggggagcaatctatattgtatagaattgtttaatcttaattgacatatcctttttaatcatgtctctttcctttggtacatttgcatatttcttatcttcattgtgtgccaaggctaagactaatatgttttcatgagcatctcatgtattaagtcttagattgaaagggaaatggagtattcggcaaagacatcgcttccactc

SEQ ID NO: 66769 - DNA, 466 bp, Zea mays
tcagctccatctatgttatggattgctttgagtctttctttttcctttttctttctggcagcttcttgacttccatgaatagcaatgggtccttgatccgaaggtatcttcatgcaaaggtaagcaagatgaaagattgctttgaaagcgttgagggtgccacgaccaataattgcattgtaagggtattccatgtcaacaatatcaaacacaacttgctcagttctggtattgttgatgaatccgaaggtcactggcatggtgatcttgcccagtgctacaatctgtcttccttcgaagccacagagagggtgtgtagcatcatgaatcttatcttctggctcttgcatttgtctgaaggccttagcaaatatgatatcagctgcactgcctgtatcaaccaagacattgtggaccagaaaccctttgatgacgcaagatataaccatagcatcattatgaggaa

SEQ ID NO: 66770 - DNA, 460 bp, Zea mays
  unsure (1)..(460): unsure at all n locations
tcataggcagagtanactgatgcaagcaaggagcggttatatcatatgtcatgccaacgtccaagggcattgttccttttatatgggtcaattttaaatttcaaactgttacagtcattgagcaaccaaacccactggccatgactagaacggtccaaaactaacatctcaatgagcttcgggaagtgtttttgactttcggcacaaggcctcccaattgtgttttttgcaatctaagctcgttatgaagaaacaaaatcattccccaaggggctactgttggggggcctatcatgctgaaggtcctcaaagcatcctaccttcagtacaagtaaatgtgtttcaggcatataaacaaaggatgcacgaagacagacttcagccgaagcagcgcataaagaaactttggctgaacacacgcatgacgaagatacaagccatcctttgagtagggagagct

SEQ ID NO: 66771 - DNA, 458 bp, Zea mays
  unsure (1)..(458): unsure at all n locations
tgtgatttatccaatttaaaacaagcactatctcttaactatagaatttctatggataaactcaacacaagagatggcattagtagcacaagcactagtttcttatttagcaaccctcttttttatgtggaaggcaggtgagttgctaaaaataaagaaacctcataatatggactaaatttctcttaatcccttatacacaatacattattgaatgacatagatttagatatgcatggttattcaatgaagtccaaaggtctaatttaagccatattatggtgagtgtctaatatggaagaatcaaatccaaattaattagagagagataatacatcacatagttntgaattattgatcatatgataagattcatttttcttccaattggacctttatttcataatcgacaactgatgtatgtcctcaggtgcttcttcttccttagtggctacaca

SEQ ID NO: 66772 - DNA, 477 bp, Zea mays
  unsure (1)..(477): unsure at all n locations
acctatgaaactcagctgctagaaaagaaaagganattaatgaacagtctcggttcctatgtagcccgagccagcccaactacgggtgaaaacgcacctgcgcacgcccgcgcagttgactttgcagaaaagtccctagtgttttgactaactagaactgggttcgccgcactattgctatgagtcgctgacatcttgcagaaacatcctcatatttctatttcttttccacaaacatccttgacctcggcgcgctcgccattcatccccgacacggcccataccggccatggccggcaatggctgctatggctagtgatcggggaagcataatcgactaaggatgacctcggaacactcgtcaatttgacatgaacgcactgagaacggtctgcccaggtgcacggcggaaaccgcgaccacgagcttgtgttcccgctcaatcangtgccaaatgagtgaacgggcgccacagtg

SEQ ID NO: 66773 - DNA, 472 bp, Zea mays
tcttcacgtgtcagaggaaaaagtgcatgacgataccactgtgaccgtgttgcatgtggttacacgtgttatggcaatgaaggcaaagtataacttctcgaataactgctataacgatataatcaatctgattattgatctcatcccatcgaaccataagatgccaaaagacttataccagtccaaaaagatcgtgtccggtcttgggatgaagtataagaagattgatgtgtgcgaagataattgcatgttgttctggaaggaatatgaagcggccacccattgtcagatatgcggtaaatcaagatatgcagaggtactaaaagaggatggagctacttttgctacaaaagtggcagttaaacagcttcgatatatgcccatcaccccaaggcttaaacgtctgtttttaaccccagaaactgcgaagctaatgttgtggcataatgaaggagaccgtgagagccaagat

SEQ ID NO: 66774 - DNA, 458 bp, Zea mays
  unsure (1)..(458): unsure at all n locations
actaagctgccgtacttgtaaaacaagaacatctaccagcacagctttcttcttaccataccggtgacttggccctttgcatgctgggggctagatatgattggacctttcaagaaagctcaaggaggatacactcatgtactggtagcaatcgacaaattcactaaatggatagagttcaaacccattgcttctttgacctcagctaaagccgtggaattcatacaagacataatattcatgttcggaataccgaacagtatcataaccgacctgngatccaacttcacaagttcagagttctttgatttctgcgagcaaaaaagcattcatgtcaagtatgcttcggtagcacacccgagagccaacaggcaggttgaacgagctaacgggatgatattggaggcactcatgaaaaaggttttcgataanaatganaagttcgcaggaaaatggat

SEQ ID NO: 66775 - DNA, 370 bp, Zea mays
tttttgggaatccaccattgtattctaggataggaatggccaatccacctctattattggaagggtattttgcttgattggtgaaattaaactcccttttggatgttctgagaggttatcaagtctctctcaacaaattggcttcttttatatggctctgcagagactcaatgacctaacagacagattaggcattttatttaacttgaaatgatgcttgcaatgataaaaagattaggaacactcaactattcaggaatcttgcacctggagctctaaatgatgagtttatgataattatgtgaactatattttaggagaaatggcctttgacacttcaaagtctaccatctgagtctgaagttttaaa

SEQ ID NO: 66776 - DNA, 470 bp, Zea mays
  unsure (1)..(470): unsure at all n locations
ngctctatgttatttggtagaccatggcagattgataaggacactgtgcatcatggtaaaacaaatcactactcttttatgcataatgagaagaagcttgtattgcaccccatgtcccccgatgctattttgaaggatgaagttgctagagcttgcaaagagaaaaataaatctgttcataataaaaatctaggtgttgcaaaggagttggtacaacataagagtgacaattctaaatctgctcaagtgaggaagacagaaatacaactgaaaagtgcttgttttcttgcttccaaatctgatttgcttgaattaaatgatgttgcttcaatctgctatgtatttatttgcaaggatgctntgttctcacttcacaacataccatctactttgccttctaccgtcactaaccttttgcaggaatatgctgatgtatntccaaacgatgtgccacctagcctgccaccgat

SEQ ID NO: 66777 - DNA, 379 bp, Zea mays
gctttggaaaacaggccaagcgcggaccgtccgggccctttctgttgaccgtccgcaacactagaatgactctcggacagaaccaatgcaaaaatacaagtttccattactgactgtccgaaggaaaagcaaagaccgtccgagccctcgcgcggaccgtccggccttatgggcggaccgtccggtcggtaagaaaccgaaaaacccgaaagtaacgggttcggagaaatgaattatagggggcctcgcggaccgtccggggtgcacgaccggaccgttcgcgactggctctgtctgacatctgacgacgcattatatgcaatatagccgttgatatagccgttactgctgaccgttgcattttcaagccgtgatctac

SEQ ID NO: 66778 - DNA, 387 bp, Zea mays
  unsure (1)..(387): unsure at all n locations
aactagctttaagggaaaccatttggactaccatgttatttaaanagacgggttgtgcgcagtaagcaggaagcaagtgggttcatcatccacacaagacatcatgacgaccgacaggccacttgagctattcaatggacctattcagccgatagcttacatagcatcagggagaagattgctagtattgggatgatatctacttcacttggggtctttttcagataatctcaaacccaagagaccttaagggattcttgaacggctcaaagagttgactaggataaaaagataaacgaatggacggagtaagactctcaataaagcttttgagacaggctaacatgatcttttcctaccactacaaagggagggaagaaataactt

SEQ ID NO: 66779 - DNA, 474 bp, Zea mays
  unsure (1)..(474): unsure at all n locations
tgtgaaggttcttcatccncacatgtgctaagcggcgattttccagccagcccatgctagtcttagcaattaagcatgcatctagaccgacctcctcttttgcaaaatcaactaaataaagtttgccgtctaatacacccttaaaagctagtgaaccatcacttcttctaaagacagacacatctacatttgtaaatagacaattatatcccatattgcataattgactaacagataacaaattatatccaagagactcaactaaaaacacattagagatagagtgctcatttgagattgcaattttacctaacccttttacctcgccttgattcccatcaccgaatattattgaatcttgngaatccttgtttttgacgtatgaagtgaacattttcttctcccccgtcatatggtttgtgcatccgctgtcgataatccagcttgaacccccggatgcataaacctgcaagg

SEQ ID NO: 66780 - DNA, 461 bp, Zea mays
  unsure (1)..(461): unsure at all n locations
tggtgccgatggagaaacananatccttgaaatcttgtctgtcaaactgcttgccgttgtcagctgttagctcggacggtactccgaagcggcaaacaatgttttgccagaagaatttttgggcagtctttgatgttattgtagaaacagccctcgcttcgatccatttggtgaagtattcgacggctacgaaggcgaacatgaggttcccctgagcggtgggcaggggcccgacgatgtctaggccccagcgctggagaggccatgtatgggcaatcagctttgtatattgcgaggggttgcctgaccgaggggagaacttctggcaggcttcgcaggacctcgtgacccgatttgcggcgcagatcattgcgggccagtaaaacccttgtcggatcaccttggcagccagggcccttggccctgcgtgcgagccgcacgtgccactgtggacttcgcgt

SEQ ID NO: 66781 - DNA, 454 bp, Zea mays
  unsure (1)..(454): unsure at all n locations
ngngaacatgaatgaggcagntaagctactgaatgaaattatggctggaagnttggtaccagacaaaatccactatacatgcctgatcaatggttattgtctgaaaggagaaacagaaaatgcctggcaagtatttgaggagatgctgaaggcaaatataaaaccagatgtagttacatataacatattggccagtggatatagcaggaatggccttgttatgaaggtatttgacattctagagcacatgatggatcaagggctcgaacctaattcactcacctatggtatagctattgctggtttttgtagaggaggcaacttgagcgaagcagaggtgctgtttaatatagtagaagaaagagggatagataatatcaatgtgctgtacggttctatggtttgtggttatttgcactcangctggactgaccatgcttacatgctttntctt

SEQ ID NO: 66782 - DNA, 460 bp, Zea mays
  unsure (1)..(460): unsure at all n locations
tctanagggagaacacgtgataggtttgactaacgtgctattcgaaaaagatagaccttgtgcagcttgccaagcaggtaaacaagtgggaggagcacatcacagcaagaatgtgatgaccacttcaagacccctggagctgctgcatatggacctcttcggacccgtcgcctatctgagcaaaggaggaagtaagtatggtctagttattgttgatgacttttcccgcttcacttgggtgttctttttgcaggataagtctgaaacccaagggaccctcaagcgcttcctcagaagagctcaaaatgagtttgagctcaaggtgaagaagataaggagcgacaacgggtccgagttcaagaaccttcaagtggaggagttccttgaggaggaagggatcaagcacgagttttccgctccctatacaccacagcanaatggtgtggtagagaggaagaac

SEQ ID NO: 66783 - DNA, 475 bp, Zea mays
  unsure (1)..(475): unsure at all n locations
tagagtatgcattgattntcgtaatttaaataaagcaacttctaatgatgaatatcccatgcccatagccgatacattaatcaataatgcatcaggaaatagaattattagcttccttgatggtaatgccggatataatcagattttcatggccgaagaagatgcgtctaaaacggcctttatatgtccaggcttcattggtttatttgaatgggttgtcatgacattcggtcttaaaaatgctggtgctacttatcagagggctatgaatctgatcttccatgagttgttaggaaacactatggaagtctacattgatgatattgtagtcaaatcggctgagtttagttctcatatagctgatttgcgcaaagcctttgataaaatgcgttggtatggtttaaaaatgaacccacgtaaatgtgcttttggagtgtcggctggtaagtttttaagaattgtcatccatgaacat

SEQ ID NO: 66784 - DNA, 466 bp, Zea mays
  unsure (1)..(466): unsure at all n locations
tggtagaattctagtgtccaaaccatagtacttgttttattccncggaggccagtaaggctattttggcctcccgtgacacatgtttttatcgtcgaacaacgatttcgtgcctcccgtccgccacccatgatatgaccattgagactggtaaggttgttttggcctcccgtgagctatagcacatgttttcatggccgagcgaccatttttatgtccgtgttccgccacacgtgtttttgtccccagagaaccttaaagcagttcatggcctccagcgagctatagcacacatttccgtggccaaacaaccaattttatgtatccgacctgccaccttcgttttagaccggggaggccgttatgtgcattttttgccacccgtgagctatagcacacgattttatggaaacctagaccctagatcttatccctaaaccctaaacctaaacatcgacactaaagga

SEQ ID NO: 66785 - DNA, 461 bp, Zea mays
  unsure (1)..(461): unsure at all n locations
gatctcagctgggccgaggaaaacaaaaccttgaaacttggctgtttactggntgttttggcaactgttagctcggaccggaccctcgaaccgcgaacaatgttttgccagaaaaattctgggcgagctttgatgttattggagaaacagccctcgcttcgatccatttggtgaagtactcgaccgctactaaggcgaacttaatggtcccctgagcggtgggtaggggcccgacaatgtccaggccccagcgctggagaggccatgtatgggcaatcagctttgtatactgcgaggggttgcctgaccgaggagagaacttctggcatgcttcgcaagacctagagacccggtttgcggcgcatatcattgcaggccagtaaaacccttggcggatcaccattgcagctagggccctttggcctgcgtgccagccgcacgtgccacttgggacttcacgt

SEQ ID NO: 66786 - DNA, 472 bp, Zea mays
  unsure (1)..(472): unsure at all n locations
tgtcaattcctgaccatttggttgcgagtgttgcagcttctgcttcagctntggcttcggcacttgcagcagttatcgttttgccttctgaggctgaaggcggtgctcgctcaatggcttgcatcacgttgactattcttcgtttcttttgcccttcagctttctcctttgcagccgacgattgttccttcttctgtaaaaatttcgttagtttcaacaccagaggacttagcagcttgatgggcagggagtcagtcattacctttaaaatttatgctactttggcagcagagggtgttgaaggagcttcgtctgtttcacccaccttcggcttatcagagtaaggggtaacgagcctccgtattttaaaaggtgtcgccttcggctcaggaagctgtttcgctttctttgaaattntttcatctttttttatcagccgggtagcttgcctattcaggatgctgacaactcg

SEQ ID NO: 66787 - DNA, 469 bp, Zea mays
ttgaatactcagcttctcccgtgctggcgtcaaaatccactgccaggtccagtgcatgcccctgtccggctggactcgccctgctaccttccttctttgtcgccttcgttttattcgtcgctgccacgtctttcccggccgcatccaccgctgtcgcgaccttcccggctagatccgtcctccttttggccggatcgccgtcttcatggctggatccgtcactgtcgtggctttttgaccagatccgccgataccccttcttttctgccacgggcgttgccaccatgaccggtgtagacgcgtgcgctgccgtcggcctctctggcaaggctcctcgacgaccggtcgcggaacgaagcacgaaggccctgaggttggtgctgtccttttctgtcgcctcgccgatcgttgacgctcgaacgtcgactcctcccgaagaataggcttctactgagtgtctcccgaccac

SEQ ID NO: 66788 - DNA, 458 bp, Zea mays
tagaccttatgcccctttctttgatgggtgcatattatgttgtttcctctctggtaccgattattcatgcatgtatatacatcctttacactgacggtatactttatacatccgccagtgtatatacatcctttacactgacgatgtactctatacagccgccagcgtatatgatatttccatagcggtgtattttatacagccgccagtgtatatacatgtaacacccggttttaaaggacaaagccgggtgcatctcatacatgcgccaaagaagacaacatatataataacagagtgtatagagataaatgtcacaataacatcagagtatttattacatagcggaagacttattacaaaataaaagtataaccataaaacgaactaaggatcgtcggcgccaatgtcaactgagaaacgccacctagatcaagtcgaatgcctcagtgctaggc

SEQ ID NO: 66789 - DNA, 439 bp, Zea mays
  unsure (1)..(439): unsure at all n locations
tgacaacaccatttgacattntacataaagtttctgagatcaaggatatttatttcattcctcaacatgcaaaagtgggtcttatcaagaggcttagtgaaaatatccgctaattgatcttccgacctcactccttctaaaatgatatcttctttagcaacatgatctctaaggaagtgatgacggatatcaatgtgcttggtgcgagagtgttgtacagggttattagcaattttaacagcactctcattatcacacaacaaaggtacctgtaacacccggttttaaagaacaaagccgggtgcatctcatacatgcgccaaagaagacaacatatataataacagagtgtatagagataaatgtcataaaacatcagagtacttattacatagcggaagtcttattacaaaataaaataataaagataaagcgaact

SEQ ID NO: 66790 - DNA, 436 bp, Zea mays
gcttgctcaagagattctcatctagaggctaggtgaagatatctgctaactggactggggtgctaacataagcaattgcgatatctcccctatgttggtgatctctcaggaagtgataccagatgtttatgtgctatttgcagctgcgttcaacacgattgtctggcatgcggattgtacattcatcgacacatatgagaggaactttgctcaatttgaagccatattccctatgagcttgcctcatctaaaggaattgtgcataacaatgccctgcaacaatatactcggcttccgtggcggatagagctactggattgtgttgctttgaagccaaagacaccatcgatcttccctgaaactgataagaccctgatgtactctttctatctatcttacatgtcggcatatctacgtcagaatacccgattagatc

SEQ ID NO: 66791 - DNA, 431 bp, Zea mays
  unsure (1)..(431): unsure at all n locations
tctanagggagaacacattntgtgactaacaaatgttcattttgagaaagacatgatttgtagtgcatgtcaagcagggaagcaagttggtgttcatcatccacacaagaacatcatgacgactgacatgtcactcaagctcctacacatggacctattcggcccgatagcttacataagcatcggcgggagtaagtactgtctagttattgtggatgattattctcgtttcacttgggtgttctttttgcagggaaaatctcatacccaagaaaccttaaagggattcttgagacgggctcaaaatgagttcggcttgaggatcaaaaagattataagcgataacggaatggagttcaagaactcacaaatagaaggcttccttgaggaggagggcatcaagcatgagttctcttctccctactgatagt

SEQ ID NO: 66792 - DNA, 448 bp, Zea mays
  unsure (1)..(448): unsure at all n locations
tctaaagggagaacacattntaggactaacaaatgttcattttgagaaagacagggtttgtggcgcatgctatgcaggaaagcaagttggagcccatcatccacacaagaacatcatgacgactgacaggccgcttgagctactccacatggatctattcggcctgattgcttacataagcatcagcgggagtaagtattgtcttgtaatagtggatgattattctcgcttcacttgggtgttctttttgtaggaaaaatctcaaacccaagaaaccttaaagggattcttgagacgagctcaaaacgagttcgccttatggatcaagaaaattagaagcgacaacgggacggagttcaagaactctcaaaccgaaggcttccttgaggaggaggggcatcaagcatgagttctcttctccctacacgccacaacaaaatggtgtagt

SEQ ID NO: 66793 - DNA, 462 bp, Zea mays
  unsure (1)..(462): unsure at all n locations
tgtgaaggttcttcatccncacatgtgctaagcggcgatttcacagccagcccatgctagtcttagctattaagcatgcatctagaccggcttcttcttttgcaaaatcaactaaataaagtttgccgtctaatacacccttaaaagctagtgaaccatcacttcttctaaagacagacacatctacatttgtaaatagacaattataccccatgttgcataattgactaacagatagcaaattatatcccaaggactcaactaaaaacacattagaaattgagtgctcatttgagattgcaattttacctaatccttttaccttgccttgattcccatcaccgaatataattgaatcttgggaatccttattcttgacgtaggaggtgaacatcttcttctcccccgtcatatggtttgtgcatccgctatcaataatccagcttgaacccncggatgcat

SEQ ID NO: 66794 - DNA, 416 bp, Zea mays
  unsure (1)..(416): unsure at all n locations
tggacgtggcaattctcttgccgtgtttaataaaaattagctnccactcaaaattaatttccttttgtggtatcttattatgggagtgacccttacaaaagataacctatcaaaacgaaggtggaatggaagtttgaagtgcattttttgcgatcaaaatgagagtattctgcatctttcatttgatcgaaatatatggagagtcattttctttgccctccatatagataaaccatatagtattaatcatattatgggggcttgtgaatccaacatacgatttgcacataaaaagaaacttttgatttgaatagcagcgatgttttggtccatatggctctgtcgcaatgatgtccgttttaatcataaaccgatacaatcatttatgcaggttattttcagaggatcacattggc

SEQ ID NO: 66795 - DNA, 460 bp, Zea mays
  unsure (1)..(460): unsure at all n locations
tagatgttctttaccggggcttctggtgaagcttctcttacggctccatcaaaagtcctgctaaacatgcacacgtgaacaatttacgaagccaaaaccgataataaggccttattctattatacagggattaaaggaggctgagaaggataaaattcttttttattcaactttaacaaaaaatgaatntaatcctcttcaatcatcttgaatccacttctaacaaataaattctaaagaagaaatcacataatatagtttttatagcttctatatatatgatgtgtttggtttgtggagtcactctatgcttcatgacgtgatgcatcataagttcatttcatcaattttggtggaatcaactcactcctcatgtatatactaattattagcttatgaggaatggngtggtgatggatcaactcattctattccacaaaccanataaaaaagtgaggag

SEQ ID NO: 66796 - DNA, 370 bp, Zea mays
ctgtagctcaggccatagccgccttcttgaaagggaaatgtgcccttgggccatttctatatagtatttggtgattagatggccaacacattaattgagttcttatgtgcacaatgtgtgaagagtgcaaatcaaagcataaggtatgtttctagacttagtatattattttgtatactactgtgtttgtctaagcgctagaaacagtgacaaaagaagaagaaaagaaaaggaaaagagttggctgtgtgcagccaacaccaacgctggccaggcacaccggactgtccggtgcgccaggctggccagcggtgaaccggctcctctcgagaaaacacaaaggcgtacggctataattcaccggactgtc

SEQ ID NO: 66797 - DNA, 423 bp, Zea mays
  unsure (1)..(423): unsure at all n locations
ctctaggggctctcaaatactccatttccctntcaatctatgacttagtagaaatacacttgaatacacattagtcatagccttggtacataaataatacaaagattgcatttgtaccaaaatgaaagagatatgattgaaggtatataaatgagctatgtgtgcaatgtttcaatcaaaattccgagaatcaagaatattgagctcattcctaagtttggtaaaggttttctcgtctaatggtgtcggcgtatcgaccccggaggtccctggaccgacgagtgaattgtcgccgcgtgccccagcccagatgggtcggcgcgagacggagcacggagggggggggggaacaaggagacaggcgtaaaggggaaacccgcggccttcgtgtatgcccgcacccaagacgggtgcgcttgcacg

SEQ ID NO: 66798 - DNA, 340 bp, Zea mays
tgagacatatacgagagatgctaagggctggagaagccaaacgctccaaagaagaagaaacaagcattgtatggcttaataaccgccaagtagtgccaaagacagaagagcaccgccagcagattcatgaagaagcacatcctaaccgctattctatacatcccggaagcactaagatgtaccaagacttgaagcaacattactggtggacaaagatgaagatcgaaattgcacgctatgaggcgagatgtgacacccgcagaagtgccaaagccatacatatgaaagttgccgcgccattgcagtcaccaccaataccaacatggaaatgggaagacat

SEQ ID NO: 66799 - DNA, 470 bp, Zea mays
  unsure (1)..(470): unsure at all n locations
ntatcaaatggacgtgaagagtgcattcctcaatgttcttatcaaggaagaggtctatgttgagcaaccttttgactntgaagatagtgagtaccctaaccatgtgtataagctctcaaaggcactttatgggctcaagcaagccccaagagaatggtatgaatcctgcgagactttcttatcactaatggcttcaaagtcggtaaagccgatccttgaagcgccctagatcctctgggactcaaatgtgatacaattactagtcccaggaggctagtaaacacatttatacatcagatgattctagatctgcttaaacgaaacanacctataaaggtggcgatcaaatttaagagttggtccacaactcgggacatatcatcagagtggggctaaagcagcccgatatacgcagcgaagcatatcagcggtccaacagccacatgcaatgttaggaacagtcgttactc

SEQ ID NO: 66800 - DNA, 468 bp, Zea mays
  unsure (1)..(468): unsure at all n locations
tcggcatctnttattgcttcttctccctgagccccttgtgttcaatcaacaatgaaatctgctaacgcctgagactgaattgaggatctatgtacataatcaatagtgaattcattgagttccgtagcccattttccaattcttcttgtagcctctctgtttctcattatgtccttcagaggttgtgatgaaggtacaattatatgataggcttgaaaataatggcgaagctttctggaggtcattagcacaacatacagcaccttctccaattctgtgtaattttgctttgataaaatgagtacttcggagacgaagtatattggtgcttgtctcttgacttgatgtaacactcgggctttaagggacaaagtcgggtgcatctcatacatgcgccatagaagacaacatatataataacagagtgtatagagataaatgtcacaataatcagagtacttattacat

SEQ ID NO: 66801 - DNA, 220 bp, Zea mays
  unsure (1)..(220): unsure at all n locations
ntaagctctntgacaatagaatcacttcatctagttntatctttagatgcaataatgcatgagtgaaattntaagaggttaaactangtatgaagcagggataaatgcaaaggacatgctttctcttccttatgtataagatatgcaaaggatgcttataagaggaagatttatgtacaagttcaaatgaaaagaagtgggtttaccctttttgtacctt

SEQ ID NO: 66802 - DNA, 456 bp, Zea mays
  unsure (1)..(456): unsure at all n locations
ngtccagatcttttcgagtgcgaagaatgcttgtgcaattaacacaactccaaattaagttagtagttcatacttgtgtaaagtgatagctctaaatttaaatctatttctacatttatatggttgtcatcaattaccaaaaataaggagaatgaaatctccacgattggttttggtaatttagacaactaacatactaatatttactctagtgttgtatatgagataaattaagtcacacttgcatttacattcttaatcttatattgagtggtagtggcttaagtagctctagagtggctcatagctatatctagtctgtatttagatctcttagtagctctgcattgtagttgtgtagttgctagattgtgtgcttgaataggaatacattagagacataagagcagtttcaatatttatgtaaactatagctctctaatcacagatttatga

SEQ ID NO: 66803 - DNA, 417 bp, Zea mays
  unsure (1)..(417): unsure at all n locations
accaattatgagagttttgtgaagtgttctacaagattcagntgacagaagacatgagcataatctttctagtatttcacgtctctcaactgaagaaatgtctcagagtacccgaagaaagagtagaagccaaagatctaaagattgggtcagacttagtgtatcaatagcaacccatcataattttggacactaaggattgaatcacaaggaatagctcggtcaagatatataaagtactatggagtcaccacgatgagcgtgatgcaacgttggagacagatgcctatttacgagaagtttaccccgttntttaccaaaaatggttagttatcttaaaatctcagggcaagattcctttaagggggaggattgtaaaatctcaggactcatacatctcacatgcatcatgaaagc

SEQ ID NO: 66804 - DNA, 384 bp, Zea mays
agccatgtgctatgcaaaacgtatggcatactctatgcatatgtaatctacgagttctctagactggcgaactgtccgaatcctaatatcaaaggatggacggacgtatgttcgcgctcgcatagaagacagaaccggttgaggaaccctaataacccccaggagacacccctgaacacagtcggttggaggaggaaagagtccctcgacctatctctgccctatacattctttaatacacctcctgcattacacatttatacctaaagattgactagcttttgctatccatgtccttggttacctatattgggtggattattattgcttagtcctacgctattcctcaactctaatcaatgaacatgatgagaattatcgatg

SEQ ID NO: 66805 - DNA, 395 bp, Zea mays
tactcagcttcacaacttaagcctgcagaggggatatattttccttgttgtatacaatgaattcattacgtgagatttataatgtgtccttcattacacagaacataaaactgaatggaaaagactactatcaaggtaggatatttgtcaataaatgtgcttcgactctggcacagtgctattgactgtgcgagcttcagactgttctctgaagaccctttgatgttgagcatattggcccccttctggctgctggccttgttgcatcggtggtggaggcggaggctgttgccaggaagcttgaagatgactcgccgaagctacagaaactgcagggtggttgcctacatattctgggatataacgtgaatgatacgaagtagtgtgcatgatct

SEQ ID NO: 66806 - DNA, 433 bp, Zea mays
  unsure (1)..(433): unsure at all n locations
tatatatacattntgaaaagttatggaatatcacattctatatttatagcctactacattaattaaatttcaatttctcaaaatgaaagaaaacaaacgggccattattagaatggcattcaaattcaatgattgaaacggagcgttatgtcttttcgtcagcctaggaattacggtgacaatgtcattttagttcgtttcttctctagactagctaattacacagcatgacgatccagttaaatctgatctattttgggtatgttagaatacccgtttagggtttggggttgttccctatgtaattactgtctcgcccctctgtaatgggctcggcccagtactcaagtctattaatacaccacccaacccccgttagggttagggtttactattccaatatggtatcagagaaactagggttagttttttc

SEQ ID NO: 66807 - DNA, 404 bp, Zea mays
cacgacatttttttgtcatctcctctacatgaaaccttaataacttctgatgtagagttgatttaaagtgattcgggaaagactccataacctggttgaatatctaaacaagctcttatttaatcgagcagtctcaagcaagcgtacgaattataatttatacaatattggtcaagcctcgcaaaatctttagaatacacttgatagatagagatgaatgatgacataacgataacaagttgatttgcataagaatttattacagattgacacatcagagattccgctggagaatgcggattcggactttatattcggacatagactgactatctagacagcggattcggacatagattagataacatcacaactgccgagagtcccaataaatgagcctggac

SEQ ID NO: 66808 - DNA, 381 bp, Zea mays
ccgggaagatacttcattccaacatgtgcatagacgttatgccagagccaccccatgttagtactagcaatgaagcaagtgtcgagattagctctaacaaaaaccactcagcatacctgaacctctaacacgcccttaaatgctattgaataccacttcttctaaagatagaaacaccacgcatccgcacaaagacaggtgtgacccattttacacaactggcaaactgaagcacgctggtaccacagaatctccacaaaaatatcggacagggagcggcccgggtattaacattttcccacctattccaaaccagggtccttcccacaaggaaaccccgttgggaactggcctctaaaaaaaggaaaaataatctctccc

SEQ ID NO: 66809 - DNA, 457 bp, Zea mays
  unsure (1)..(457): unsure at all n locations
tctanagggagagcacattctgggactaactgaaagggatttgtgcccttgggccattnctattatattttggtgattaagtgtccaacacatagtgagtaagttattatgtgccaaatgaagagagaagtgcacatcatgtaacaaggtacatttctagacttagtacattggtttgagtactaacaatgtttgtctaagtgctagaaacagagaaaagaagaagaaaaggacttggctctaagaagccaacacttagctcagtctggcacaccggactgtccggtggtgcaccggacagtgtccggtgcgccaggctggctttcggcaaactggccgctctcgggagattttggcggcgtacggctataattcaccggactgtccggtggtgcactggactatccagtgagccaacggtctgcggcgcaactgttggccgcgcaatccacatgcg

SEQ ID NO: 66810 - DNA, 455 bp, Zea mays
tactccgactacatgagaagctgccgcaatactcttgttatttaccctgcggccatagtaacagttcgtattcttcctgttgttaaaacacataagattaactctgaacaagatctgatggttgctggtggctgatccaccaattaagctggcttctttcaagagactgatgttgagcaccaggaatgccactacgtgggagtacccctttgcggtcgcatgtggaaacataaagatattttccactctattgtggttagctttcactcttttgattttataactatgtgtttgtacttggctgtctttttaattgatatgctggatttaacaaagataccgatggcgtatttgaccttgacatctgatctctttacggagctgttggctttctaacaatagcagctgtggaaggcatcaccacattggacaggcgactcgatctcttgttgaca

SEQ ID NO: 66811 - DNA, 330 bp, Zea mays
tagagactgtgatcctgctccaacacctcatgacctcagtgtgctatcaagatagaatcggagaatagtcagggagcaattgacatactcccagataattggctcgctcacgtaccttgcaagtgcaacaaggccagacatcctctacgctgcgagtaagcaaagtctcgttgcgccgaaaccaggacatgatcactggcgtgctctagagagagtgtcgcggcatctgaaactgactatgacttacggcattcataatacccgaaaccctaatgtgctggaaggctatcgtgatgccaactggatatctgatgctgaagagctatatgc

SEQ ID NO: 66812 - DNA, 448 bp, Zea mays
  unsure (1)..(448): unsure at all n locations
tacagggtgccagtttgatgctctctcgatatctgttattgtatgagaactccgctcagggtaaacagtcatcccatttctgtgggaattccagaacacacgttcgcaacatatcttcaattatttgatttactctctcagtctgcccactggtttggggatggtacgccgaactgtggagtaacttattacccaaggatttgtgaagttcttcccagaatttggatacaaattgaggtccatgatccgacactattgtcttcggaacatcatgcaaaacgaggatgcgagaaatatacatctgggcataagtgatgaccgggtaatatgtcttgacttgcagaaaatgagtgatttttgtaagccgatcaattataacccacatagaatcatatcctttngctatcctgtgcaatctcacaaaaaagtccatgcttatatcctccca

SEQ ID NO: 66813 - DNA, 451 bp, Zea mays
  unsure (1)..(451): unsure at all n locations
tgccaatacttgtcatagcaacaacacatgctagcacagtatctacagaccataccagtaacctggcctttcgcatgctgnggactggatatgattggacctttcaagatagctcaagggggatatactcatgtattggtggcgattgacaaattcactaaatggataaagttcaagcccattgcttctttaacctctgctaaggccgtggaattcatacaagacataatattcagattcgggataccaaacagcatcatcaccgacttatgatccaacttcaccagttcagaattcttcgacttctgcgagcaaaagagcattcagatcaagtacgcatctgtagcacatccaagagccaacgggcaggttgagcgagccaacggaatgatattggaggcactcaggaaanaggtcttcgataagaatgaanaattcgcaggaaagtgga

SEQ ID NO: 66814 - DNA, 461 bp, Zea mays
tgcacccatgtatattggtccatttccatttcttgagctttgtgggccagtggcataccgacttcaactacccaaaaccttgtctgctgtgcataatgtgttccatgtgtcacaattgaagaagtgtcttcgggttcccgatcgaaccattgaagtaacggatgttgtccttgaaccggacttgacatactctgagcaccctattcgagtcttggatcaaaaggacagggttacccggagaaaaactctcaagttttataagatacagtggaaccagcattctgaagatgaggctacatgggaaactcaagattttctagaaaagaatttcccaggctttttagcctcatgtaaattgtaaagcctgtataactgtgtaataaagaagtgacctccacatcacccctgccttgtaccagaagtaaggaaatataagtattccgcgtttccttttccattac

SEQ ID NO: 66815 - DNA, 465 bp, Zea mays
  unsure (1)..(465): unsure at all n locations
ctaaaaagcaagctctagtatattntgtctccgaagttctcagtttatcaaagaaaaactatacagaattggagaaggtgctatatgctgtcttaatggcctccaggaagcttcgtcactactttcaagcataccatataattgttccttcatcacaggctttgaaggatattatgaggaacagagaagctactagaagaattggaaagtgggctgcagaactcaacgaattcagcattgattatgtgcacagatcctcgattcagtcccaggcgttggcagacttcatcgctgactggacgccaggggcttcggacgaagaagcaagtaaagatgccgaagcctggacagtgttctgcgacggttcctatggaaccttcggggcaggtgtagctgttgttttagttgcaccttccaaagttagaacatgatatgcagtgaaacttgatttcagtngcacaaata

SEQ ID NO: 66816 - DNA, 441 bp, Zea mays
aacgcagattctagactgtgtgacgagtcacgctctatgcgatactcgatgtatctcctcgtaacgcgctactggagcgactatgctacgtcgccgaacggcataaagaaagaccagatcctcggatgtaactgttagcttaaaatatcctaccggttctaatcgtgatgctcctttgttactaaccgactaaggcatataacgacctcttagtccattaaggtcttaatcaatgttgctagctgttatcacgggcataattgtaagaattcacaggctgcgtcctgtgcctatgagtaatgaacagaattccattactgttcacgccttttgattcttgcagacgcatctgtcgggagatagacgttgtcaaggccgaagcttcaatatctccgatggtataacctgattccgttgcgactaatcctctattcaacccta

SEQ ID NO: 66817 - DNA, 469 bp, Zea mays
  unsure (1)..(469): unsure at all n locations
actcagctnggaaggttcttcatccncacatgagctaaacggcgattccactgccagcccatgctagtcttagcaattaagcatgcatctagatcggcctcctcttttgcaaaatcaactaaatagagtttgccgtctaatacacccttaaaagctagtgaaccatcacttcttctaaagacagacacatctacatttgtgaataaacaatcatatcccatattgcataattgactaacggataacaaattatatccaagcgactcaactaagaatacattagaaatggagtgctcggatgaaatagcaatctttcctaaccctttcaccttgccttggttcccatcaccgaatatgattgagtcttgggaatccttgttcttgacgtatgaggtgaacatcttcttctcccccgtcatgtggtttgtgcatccgctgtcgataatccagcttgtacccncggatgcat

SEQ ID NO: 66818 - DNA, 298 bp, Zea mays
ggcactcggcatagtgcatttaaaatattgaagcaatctctaccgagagcttgtcagtgggtactccgctaagaggtctctgtcgagtgcttgttagtggacactcgacaaagacgactttgctgagtgccggatgctaaggcactcctgaaaagtatatgtgttaattaataaacaaccgttttctgagtgacatatcgcgggcactcggtaaagacgtttaacttaacttatgcccgtgctcggcttctcacttatgcccgcgctcggcttcattccccgccacctccccgccgta

SEQ ID NO: 66819 - DNA, 468 bp, Zea mays
  unsure (1)..(468): unsure at all n locations
cccnncaccatgncancacagagatcttgagaaggtttattcttgcacttccctcttagttgaggcagggttgtactcaacctctcattttcttccttgagctctcgatatgcaatatcatctatacctagatattctagctcaaagaaggattcgcttgctggcgagcaacaagtattagcacatggcaatatagtttcaattagaacacatgtgcatgagtgaggttgttgagattttaagtttgttatcacaacctcatgagcaatatctaacatgatataaccatccattagattttcatgagaacatataagcatatcatgtttatcttgacaagctagattttcatttttagcctttctacttggtcctttcgcagggattcctattactaaatgagcgacacataatacagagtattcttgctcaattataaagtttcatacctttggaccaaatccacat

SEQ ID NO: 66820 - DNA, 464 bp, Zea mays
  unsure (1)..(464): unsure at all n locations
tcgacattactctcaagcatatcatatagtagncttcttttacaccttcgtacgatataatgagaaacagagaagctacacgaagaattggaatatgggctaccgaactcaatgaattcaccatcgattatgtacatagatcctgaattcaatctcatgcgctagcagatttcattgctgattgaacgccacgggctcactgagaataagcaacaaaagatgccgaagcctggacggtattctgtgactgttcttggggaaccttcggagctggagcgactgctgttctagtagcgccctctaaagtcaggacaagctacgcagtcaagctgtactttagttgtacaaataatattgctgaatacgaagctcttctgttagggctttggaagctaaaggcaatgggaataagaagggcaatccttacaactattctccaagttatttctggccatgtagacaaa

SEQ ID NO: 66821 - DNA, 468 bp, Zea mays
ttaccctgtagtctggactataagttgggtacggtatgtgtgccttatgcagatggaccatttccagcatttgcgtaatgaggactctagggagaagcctcgtagtgagaccctggccattcacctcggaagtgaatacgggtctagctaacccgggctagaagggaattgcgactcatgggtaaagatgcgccacctctgcagagtgtaaaactgatatatcagccgtgctcacggttatgagcagcctggactcctcacatgataattgaacttgaagatggaaataaatcgagatccgatgatctgccaatggtttgcttaagtggtttcacttaagtggttttgatatactctcgtacctttgtttaaagggaatacttgggattcacacttattagtaagacaggtgttgttaataaaatgttgaccaactaagatgcttactgctcaacctcagcctcacct

SEQ ID NO: 66822 - DNA, 463 bp, Zea mays
tcgggaaaccaatactcttcgacagagtactgattaccttctctccagttctgtctcagaggcaacctaagctttcatcatcaatgccaccgaagagcagcgctcttggtttgtaaccacaggatatagcataatctttcaacccttctttctcagcttcagataactcctgaccaattatgttttggaaatcgaagtccttttcctccaaagtatcttcggccttctccttttcttttctaggcactgtggccagggtctcttcagcggctgtagcagcttcttccgtggccatattcaggagcattttatcaatatcggaaaatgtgctctccagatttgtagcttcggcagttttagcttctacagttccagcttcagtgggtgtagcttctgcagcagtagcgctctcgacaacttgtgtatttgacgccaaggacggcagtggcgtttcttcaatggc

SEQ ID NO: 66823 - DNA, 403 bp, Zea mays
tgagttttgagggccctatattgcataggaccagtgactctctcagttaaggactttgccacccagatatgtctaggtctactcttatttggtggacctaggaatgtaaccttaatctttccatttgcaacctttcttagaacatagtgagcattgaaagcaaatggtcttgagtgcttatgcaagggagttggtggtttagctttgcaattgtgggcaaaatgaccttcactttcacactcaaagcatttgataggcttatgagtctgctttggcttgtattgagtgatagctttcttttgcacacaagcattgtatccaataccactcttgttatttttcataacagtgttcataagcagctcattttggaggtattgacccttgttgaacttttgcacac

SEQ ID NO: 66824 - DNA, 455 bp, Zea mays
tcctgggcccagttccaccaccactaccgctagcacctttcttggttcgtagtcaacagctagaagggcatcaccacgctcaacaacaacacaacctttgggaggagtccgaagctcgcacagtcaacaacactatgcctgagtcgaagcacatctactaaaggtgccacgacgattcgattaaagaatatcctaatctggtgtatcttagttttgtccatcattttattttcttgcatgaaaaacaattcacgaaggtttaatctccaatttgatgtaatactattgtggacacaccatcgagtgtggaacacattcccttaacaatgcttccaaagctataagtcattcctaagggagcgcagagtaagttccgaagctacaaagtcattcctaagggagcgcagagtaagttttgaagcaacaaagtcattcctaagggagcgcagagtaag

SEQ ID NO: 66825 - DNA, 449 bp, Zea mays
  unsure (1)..(449): unsure at all n locations
ntagtatcagagatgtcactttttattctgaatggcttcagccttcttcggaggtgtgctcgaagatttaattgtttctagtacatctagcacattagccattctctttctcttcggagtcactgctggcactttttgattttttattatctcaacatttgctgcaggactcaaaacttctgatgctttttcttcagatggttttttcatttcttccattttttctgtggatggcgcttcggccatctctttggtttctggtagcagaatcttcggttcttccaattctatccttgttggcgctttggccgtttctgcgacttctggcagcaaggttggctcggttggtttttcagcttcggtggccgaagaagtttccccggtaaactcatgcaccgaagctggttcaatatagcgcggccgatgtgtgaggacacttatcttctttc

SEQ ID NO: 66826 - DNA, 312 bp, Zea mays
acaaaagaattagctacatgcactaatgtatacgtgaccacttttagtagaataacattgaatgagatagatgattagttatataaattaaccaacgtaaccaatttccaaattgagactcctattttattaatataaacacgtgattagcgcgcatatgacacgggagggggtagactgtgcgtctgggggtaggtggggacacaactggtcgtgccaaggtactactcactactcgagcatgcgcgcgatgacgcatgcacatgctaagaacttatccgtcgcacgtttgtggtcgatcgttaaacgaac

SEQ ID NO: 66827 - DNA, 481 bp, Zea mays
  unsure (1)..(481): unsure at all n locations
tactaagcttagcgagtaccccttgacactcttatggaaatgcaatgtatcanttcataaacctcccttgattagatanactttatgcctaacaaattctaagcctaacggtagatattaattgtaaggggctgaaaaagttcgccttgatgcgacaacccccaatcaaacggtgttaaacctcagcgaatcagaagaagacaagctattgtgctgcttatactgcaacaaggatgtattcatattaatggtctagtctggacctcatcgacatcagtcgcttgatcataaaacatagtctaagcaccgacccagcaatacgccccaaaaagcaaaatattacgcaaaaatatccgatgagaagatgaaagcagcgaaggcagaagtccaccgtctgttggaagcaaagtttatcgagccaatcgactacccaacttggctccccaacgttgtaatggtgtagaagaaaaatggaaaatgg

SEQ ID NO: 66828 - DNA, 462 bp, Zea mays
  unsure (1)..(462): unsure at all n locations
ggtaagtagcataggcaagtaaaatgtgaattgtctaagcctagctacgggtgcataggtttcaccgaaatccaaaccttcgacttgtgaatatcccttggccacaagtcgggctttgttccttgtcaccacaccatgctcatcttgcttgttgcggaaaacccatctggttcctacaacattttggttaggacgtggaactaaatgccatacctcatttctagtgaaattgttgagctcctcttgcatcgccaccacccaatccgaatcttgaagtgcttcctctatcctgcgtggctcaatagaggagacaaaagagtaatgttcacaaaaatgagcaacacaagatcgagtagttactcccttntgaatatcgccgaggatggtgttcatggngtgatctcgttggattgcttggtggactcttgggtgtggtggtcttggaaacttgtcatcttcctc

SEQ ID NO: 66829 - DNA, 441 bp, Zea mays
  unsure (1)..(441): unsure at all n locations
ttacttagttgattntgcanaagaagaggccggtctagatgcatgcttaattgctaagactagcatgggctggttgtggcatcgccgcttagcacatgtggggatgaagaaccttcacaagcttctaaagggagaacacgtgataggtttgactaacgtacaattcgaaaaagatagaccttgtgcagcttgtcatgcacgttaancaagtgggaggagcgcatcacagcaagaatgtgatgaccacatcaagatccctcgagctgctacatatggacctcttctgacccgtcgcctatcttagcataggaggaagtaagtatggtttagttattgctgatgacttttcccgcttcacttgggtgttctttttgcacgataagtctgaaacccaatggaccctcaagcgccttctcacgagagctcataatgagcttgtgc

SEQ ID NO: 66830 - DNA, 448 bp, Zea mays
gggctctcttttagatagccatgagagagcatagctcttcattttcacttgaagggatttatatgaatccttcgaggccttaaactattctttctctctatatatgtagacattggcatcactcaacattgtaacaagagcattatatgaatatccatcatcatccacaacgacattatgaacaacttttaacattgagcaacgcctttgccataaggcagagtggagaaaagaagagtgatggagtgtatgatctcctataataagatggaggcctagacagagtgaataggcctataaaagttcaactcacaattctgttagcccaaaaggaggcactgccgacctacgcagaagagtccaaaccaaattccgaatacacctaacataacatagatcaagtaaaattctatcctttctgtgggtatatagatcacaaatcgagagc

SEQ ID NO: 66831 - DNA, 476 bp, Zea mays
  unsure (1)..(476): unsure at all n locations
aactcagctaccgacataaccatctatctaaagcggcttgtggncttctctctttangnggccaactccggcgaggctatctggacagccgtgaggcaagtgggtacgccggtacgacgggcagcccatggtctcatccgcggtgaagatctattcaccccgaggcgttatccagacactagtgggcacgaatggcatcaccggcgcgaatccaggcgcgggggtcatcggcggcaaggtgcactgcacctgtgatctcattcagttcactgtaccatcagaaatcctatcaggacgcctgacagagcggtttgtagtgcccagatctcatattntcatgtaatcacttgctaatccacctttaacaaagttatggtcctataatccagctttaatcttgttgtagccaccatactccaattctcactaaatcatactctaaatagctctcaaacatggtcctagttcactgtcag

SEQ ID NO: 66832 - DNA, 454 bp, Zea mays
  unsure (1)..(454): unsure at all n locations
ntatcanatggacgtgaagagtgccttgctcaatggaccattcaaggaggaggtctatgttgagcaacgtcccggctttgaagatagtgagtaccctaaccatgtttataggctctctaaggcgctttatgggctcaagcaagctccaagagcatggtatgaatgccttagagatttccttattgctaatggcttcaaagtcggcaaggccgatcctactttattcactaaaactcttgacaatgatttgtttgtatgccaaatttatgttgatgatatcatatttgggtctgctaacgaatctacatgtgaagaatttagtaggatcatgacacaaaaattcgagatgtctatgatgggggagttgaagtattttctaggattccaaatcaagcaactccaagagggcaccttcatcagtcaaacgaagtatactcaagacantttaagcaag

SEQ ID NO: 66833 - DNA, 441 bp, Zea mays
  unsure (1)..(441): unsure at all n locations
ntaccctanataaggattaatggggtaaaacttattcatgttattataacctaaagactntagggtaaaagtcataaaatgaccccaagaataaagttgaatcacttttataccccaagaataccagaaaccctaattggaaccctggaaaaccataaaactaaaccctaggggcttatgtgcaaaattagtccacttttgggctaaagtgcaaaaaccaagccaaataagtattttaagtcatttggttcacaaatatgtgaatttgcaagttaaaccctaagttttgggcttatttgcaaaaaaatcccctcttaagcactatagagcctaagtctgaaattcagattagttggttcaactttggagctctataactttcanagcatagggtttttgccctaggtcaccacatcaaagttgaagacctaacatatgaga

SEQ ID NO: 66834 - DNA, 323 bp, Zea mays
  unsure (1)..(323): unsure at all n locations
ctatagggagaacacgcgatagtctaaccaatgacttttcttaaaatatataccttgngcagctgggcaagcagggaaacaggtgggaagctctcatcacaccaaaaatgtgatgacaacatcaagacccctggagctgctacatatggacctcttcgaacccgacgcctatctgaacatatgaggaagtaagtatggcccaggtattatagatgacttttcccgcttcactcgggtgcactttttgcaggaaaagaccgaaacccaagggaccctcatgcgcttcctcaggagagctcaaaatgagtttgatctcaaagtga

SEQ ID NO: 66835 - DNA, 454 bp, Zea mays
  unsure (1)..(454): unsure at all n locations
ttaaccccctcccacgcaagaccttcttttgtttctttctaaccataatgaatgcgatatcgaatgtcatacttgaggcatattcactttatttgttcccttgtatgatgtactcgttgtttcccaatttgaatggatgaatgtatgtatgcttgcaatcgcatagagaacgatccggtcgaagagcccgatgaactcgcatgagaagcccctgagcagcagtcggttggtggaggcaagtgtcccttgacctatctctgtcctattcattctttaaatcacctcccgcattacacatttatacctaaggattgactagntttgttatccatgtccttgtctacctatctgggttggattattattgtttagctctatgctattgctcagactctaatcaatgaacatgatgagattatctatgagtacgctgttctccttatcatattatgat

SEQ ID NO: 66836 - DNA, 465 bp, Zea mays
  unsure (1)..(465): unsure at all n locations
tactcagctgnaggcgtcgatggaatcctatttgtgtanattccttctnttcttcttccgggactctgaatgcgacgagttgcacctcgggtgtggaggtgccgccttgctccaagttgacgatttgtttggagcctttgatcatcaattcaaagctcacaaacttccctataacctcttcgggagacattagcttatattaattgaacttgcgtatgattgagaaaaatgagtgatcttagaataaccttgaccatttcatggtcatcccatttggtgctcccgaggttgcgcacttgattcaccaaggtcttgagccgattgtacatagcttgtggctcctctccttggttgaggacgaaacgaccgagctccccctcgatcgtctcccgnttggtgatcttggtcacctcatctccctcgtgcgcggtcttaagcacgtcccaaatctccttggcactcttc

SEQ ID NO: 66837 - DNA, 444 bp, Zea mays
  unsure (1)..(444): unsure at all n locations
ttacggaccttagatactcagctgtataatacgcatgtctaactcattgtttaanaaattatcatatgaggataccgatgaggatatagagatcgatgggtagtcaagatgaatcgactaccactgatgttcctgacccgtacgacaagggtgtacaacaacatccctgataaaacacatatgctcaagactgttcccaactgcggatattgcaccatgaataagtttgaatatgaaccacttggtttttgttgtcgtggtgggaaggttgatctatccccactggagacccctccccaactcaagaggttgtgggatagtgcatactctgatgctaggcactttcgtgaaacattatgattataatggccattttctttcacttcctatattgatgctcgattgaatgacactaatgaatggattctggtataacacgttctg

SEQ ID NO: 66838 - DNA, 364 bp, Zea mays
ataagagaaaattatgaaaagaaaaatctcacttcgtatcgtcgcctttatccgaagttatctagctttaccattagtttccaccaaatatctttcacttcttctccaatcttggcgagtctccagtcaaaaaagaagagagttgagagttgagaagtagccatcgcaatcgagatatttttcatttgcttggtcaatcaatcgatttccgtacttttgttgcgtcgtgctacactactgtctactaataatggacctgggtacttggaacaagaaattacaggaaatatacactgcatctctacagacttctatgggtatggattacaggtgtgaactgattttttgtctacttacttaaaaa

SEQ ID NO: 66839 - DNA, 411 bp, Zea mays
tctaaagggagaacacgtgatatgtttgactaactttcatttcgaaaaagatagaccgtgtgcagcttgtcaagcaggtaaacaggtgggaggagcgcatcacaacaagaatgtgatgaccacttcaagacccctggagctgctgcatatggacctcttcggacccgtcgcctatctgagcatagggggaagtaagtatggtctagttattgttgatgacttttcccgcttcacttgggtgttctttttgcaggataagtctgaaacccaagggaccctcaagcgcttcctaaggagagctcaaaatgagtttgagctctaggtgaagaagataatgagcgacaacgggtccgagttcaagaattttcaagtggacgagtttcttgaggaggaagggatcaagcacgagtt

SEQ ID NO: 66840 - DNA, 429 bp, Zea mays
tggtgtcgatggagaagcagaagtccctgaagttctgtctgtcaaactgttcgccattgacgactgtgagctcggacgggacttcgaatcggcaaacaatgttttgtcagaagaaactttgggcagtcttcgacgttattgtggatactgccctatcctcgatccacttggtaaaatattcgacggcgatgaaagtgaacttgaggttcctttgagccgtatgttgaggcccgacaatatccagcccctagcgttgaagtggccatgtgtgggcaatcaacttggtgaactgcgaagggttgcccgagcgggagaaaacttctggcaagattcgcgacctcgtgactcgattcgcggcgcagattatagcggtccagtaaaatccttgacggatcaccttggtatcgagggccctgggccctgagtgag

SEQ ID NO: 66841 - DNA, 437 bp, Zea mays
  unsure (1)..(437): unsure at all n locations
tctnagggagaacacgtgatatgtttgactaacgttcatttcgaaaaagatagaccttgtgcagcttgtcaagcaggtaaacaagtgggaggagcacatcacagcatgaatgtgatgaccacttcaagacctctggagctgctgcatatggacctcttcggacccgtcgcctatctgagcataggaggaagtaagtatggtctagttattgttgatgacttttcccgcttcacttgggtattctttttgcaggataagtctgaaacccaagggaccctcaagcgcttcctcaggagagctcaaaatgagtttgagctcaaagtgaagaagataaggagcgacaacgggaccgaattcaagaaccttccagtagaggagtttcttgaagaggaagggatcaagcacgagttctccgctctctacacaccacagcaaaa

SEQ ID NO: 66842 - DNA, 438 bp, Zea mays
  unsure (1)..(438): unsure at all n locations
tgtntactgcatcctcaaccgaagctatttattntgctctttcttcgtaacaaaaaagagcttcggctaaactaataaattttcaacttcgtcaaaagacaagaaattcaatcatcagatggttagggtacgctcaacagctagagttactcgcgacggagaggaagccgaaggtgccgaaaccgctccaatttatgaagtgatgaaacagtcagggctggtagtatcggaggatgcacctgccgctgaagctgagcaggttgatgctgaggaaattgaatctgaagatgattacaacgtcgtgccatctaaacccagccacctggagtttgggaaatccaccattaccgaaggtgatatgtctaagctgatgaagttaggctatttcagtgaagcanataaggagttggttcgttttggcagagaggaaattactcc

SEQ ID NO: 66843 - DNA, 431 bp, Zea mays
gggaggcgtcgattgagtgacgactcggtgtatcctccttcttcttctcctccgatgccttgaatgcaacgggttgagcttcggatgtggtggcatcatcaagctcgttgatcttccttgagccttcgatcatgcactcataactaacaaaattcccgataacttcctcgggggtcattttggatatctaggattaccacggactaattgaactagtgtacggttaatgaaaataagtgatcttataataaccttaaccacctcgtggtcatcccactttacgctcccgaggttgcgcgcttggttcaccaaggtcttgagccgattgtacatgtgttgtggctcctcccctatgagaagcctgaaccgaccgagctcccactcaatacgttcccgcttggtgatcttggtgagctcattaccctcatgcg

SEQ ID NO: 66844 - DNA, 436 bp, Zea mays
  unsure (1)..(436): unsure at all n locations
atctatatacgggccgaatgattgaagcttcttttgaagggttttctgtaaaaaatattcctcgaggagaaaatgagcatgctgatttgctagccaagtcagcagcacaagggctgcccttaccttcggaagtattttttgaaacaataaaagcaccttcggttgaacttcttgaaagagcnggcctcaatatatctcctgtttatagtgaagactggagaactgagatcatctcctaccttaagggtaatttcctttcagatgacgaagcttataacaagagaatagaggcaagagctcgtccatatgtaataatagaaggggagctgtacaagcatggggtctgctctcccgtactcaaatgtttatccagagctgaaggtatagaatngatgaaggaaatacatgcangcctgtgtggatctcacattggatc

SEQ ID NO: 66845 - DNA, 420 bp, Zea mays
  unsure (1)..(420): unsure at all n locations
tctgaaggaaaatgccctggagaaaagacatgatctagttctcaatctcctgtaacagagatatatgagcactgctcttcagaaggcaaccaagtgctttattgttcaagaaacatccaggtatgcacccctatgccctgacttgctaatagatcaacatgttcaatttctcctcgtggaatattcttaacaaaaaacccctctaaggaggcttcaagtcttctaactgtatcgagatatttttcaagcatccgatctcttgctttgcaacttatgtcaacatggccagaaataacttgtgaatcagnttttatgacccgccttctcatctcatngctttcaactccgaagcccaaagcaaacttcatattaacaatatattgtcaactaaaatcaagttactgcgtacatgtctaactt

SEQ ID NO: 66846 - DNA, 422 bp, Zea mays
gctttggagaaatgacacagctatgctctattctttctattatctcaaagatggagatgatgagggtgcagatgatttaaccggtacagtttcaattacctcgtgaaaagaatgactttcccacatgatggaacctaagatgagcagtcaggacattaacaagggtttggggcaaggttcactaaatgataacatggcttatatttggtttatgcgaacaagttatccacattgtaccagcacacatgctcagaaacaaacacgtgttacactaacggtcgaactaagaaaatgtggaagccatcttaacacgtgtctttaaaacaccacattatttacaatcatcggctactagaataaaggtgagagaagcactttggatgtataggtgtacaacatgatgcaacaattaagatgcatgc

SEQ ID NO: 66847 - DNA, 359 bp, Zea mays
ctaagcttcgaaatgtctgatcatacaccgacgtgctcagaactatttttatgacttctcatcgctggtgtcatcagagaagtaaaatacccacaatggctagctaacactgttatggtgaataagccaatggtaaatggataatgtgcattgattttactgatctgaacaatgcttgtccaaaggatgagttcccattcccaagaatagattctctagtagatgcagcggctgtatcagagctcatgagtatactagattggtattcatgctaccacatgatctggattaagaatgcagatgagcacaagaccagcttcataaacgctagtgatacatattgttatcttccgatgcct

SEQ ID NO: 66848 - DNA, 390 bp, Zea mays
  unsure (1)..(390): unsure at all n locations
agcttctaaagggagaacacattntaggactaacaaatgttcattctgagaaagacaggatttgtagcgcatgccacgcaagatagcatgttggagcccatcatccacacaagaacatcatgacgaccgacaggccactatagctcctacacatggatctattcggcccgattgcttacataagcatcggcgggagtaagtactgtctagttattgtggatgattattctcgcttcacttgggtattctttttacaggaaaaatctcaaacccaagagaccttaaagggattcttgagacgggctcaaaatgagttcggcttaaggatcaagaaaattagaagcgacaacgggacggagttcaagaattctcaaattgaaggctttcttg

SEQ ID NO: 66849 - DNA, 501 bp, Zea mays
  unsure (1)..(501): unsure at all n locations
ctaagcttgacccagtattgaataactcttgttaaactctgcactatttgaagtaatgaatgtggttgctagcctcctgcgactagtaattatatcatatntgagtcccaaaggatcgggattgcttcaactaggttctttagaaccaaacctcagtaaaacaaatcaccgtgttcatccgcattatttcttggttgatttgttttccccctctctctcagacttgatatttgttctaacgctaaccccgacttgtagtgtgtgcttaagtntataattttcagattctgcctatccactgccctctaggcgactntcaattggtatcagagctcggtacttcatttagagagtaacaactcatagtgatgtcaggaggatccgccaagagggatatggaaactggcaacaaggccatatgccacgggaaggatccatcaagggagtctggcgccaaaggaagggaggaatcacctctctgcatcaagtcgcatcggagtg

SEQ ID NO: 66850 - DNA, 348 bp, Zea mays
catcgcaaaagatggggcttgtctcattaggagatctgggctgcctcccttcttgccttgtcgacattgatcttttcctttctttccggcctggtgtctccaactaggttttagggtgatgtacatatatgtgggtaagataagccacatggggtaggtcaaaatctggttttatgtttagggtggaatggatggcttatacaacccatcgtgtcatgtaaataagtgtgtattgccaaattgttataaagcatcaatttaggggcatacatatctagtagcgtctcatctatttcactaggattaattatcatcgttaaagcaccgcattatattagatcatatgcg

SEQ ID NO: 66851 - DNA, 334 bp, Zea mays
ctcagctgccagccctcgacccggcagacttaccggaggcccgagatctacctcaccggacttcggtcttccgccggcgcgcgtggaccgagctattcagtgagtctccgtccaatcccttgcgctcatatcttctctggcatcccgtgaacctccctgacccatctaattgaactatctctccgtgaccaggccagactcctcgccgccgacgagcatacccgcctgcgcgcgtgaaccgaccgactccggccatctacgacggcgtcccgcacaccgttgtgatccccgagactatcccttcgtcctcgaccacttcaccggagcaatctcg

SEQ ID NO: 66852 - DNA, 302 bp, Zea mays
atattccacgaggagaaaatgatcaccctgatctggtatccaaattagcggcgccggggctgcctctaccttcaaaagtattctttgagacaataagaacaccctgctgagtacttcatgaaacagcaccgctcaatatatcctgctgttcatagagaacaggggaaatccgacactctctctcttctcggagaaatcgcctttcagacgacgaaccttataattagaaaatagaggcaagcactccgccctatgtaataatagaaggggagttatacaaacctggagtctgctctccactg

SEQ ID NO: 66853 - DNA, 396 bp, Zea mays
  unsure (1)..(396): unsure at all n locations
gtttctgtccagaatattccacgaggagaaaatgagcacgctgatctgctagccaagtcagcggcacaggggctgcccttaccttctgaagtattctttgagacaataacagcaccttccgtggaacttcttgaaagagcagcgctcaatatatctcctgttcatagtgaagaatggaggactgagattatatcttttctccaaggcaattgccttttatatgacgaatcttataataagagaatggaggcaagagcacgaccatatgtaataatagaaggggagttatacaaacatggagtctgctctccactactcaagtgtctatccagagctaaaggtatagaatngatgaacgaaatacatgcacgatngtgaggatctcacattgcatct

SEQ ID NO: 66854 - DNA, 347 bp, Zea mays
ggatccttatatcacctgcagctgcagcttgaaccagacccgcgacacctttattgtatccgtgctcgccggagatactttctccgccggcgcacgttgaccgggtaaataactgagccattcttcgattcaatgcacagatagactgtacatcaccccaggaagctcaccgtgtccttggattgaaccagatcgccttgatttgtccggctcacccgccgccgacgatgacaaccgtctgcgcacgtggaccgagcgattccggccattctcgcctgcgagccgtacgttgttgtgaccgacagaacctaccgtggctaaccatacccctcgacggacttctcttg

SEQ ID NO: 66855 - DNA, 494 bp, Zea mays
  unsure (1)..(494): unsure at all n locations
ntaccanatggatgtgaagagtgccttcctcaatggacctattcttgaataggactatgttaagcaacctcccggctttgaagatagtgagtaccttaccatgtttaccaactctctaaggcgctttatgggctcaagcaagccccaagagcatggtatgaatgcctaagagatattcttatcactaatggcttcanagtcggaaaggccgatcctactctattcactaaaactcttgacaatgatttgtttgtatgccaaatatatgttgatgatattatatatgggtctactaacgaatctacatgtgaagaatttagtatgatcatgacacaaaaattcgagatgtctatgatgggggagatgaaatatttcttacgatttcaagttaaacaactctcagagggcaccttcattaaccatacatagtatactcaagatattctaagctagtttgggatgaaggatgcctaacccatcaagacacccatgtg

SEQ ID NO: 66856 - DNA, 245 bp, Zea mays
ttcaaagacaaaattttttggttgggctaaagtcggcaaacacaacgcatgggagttcggccaccggacctcgtgccctgttgggcgcctttggactaaacgtcttttaggttgacaccgggatgtcggcccacgacatcgtgactatcggcccgaaaagtcgaatgtttcacgttatttagtggggcattatactcccacgcttggaggggggccacactacaggttggaattcaggtcaaacc

SEQ ID NO: 66857 - DNA, 297 bp, Zea mays
  unsure (1)..(297): unsure at all n locations
tgccgtctctagtacccgtcctttcgtcgacggtgttgaatgactagttcctcgacacgtacagcggctgctgcccgtcctcggtgctggtcgagtggccgatgcccaacgagagcccgtactcctcggagtaagacaccgggtccgccttcccgaagaagccgccggcggcggcggcgttgtggccgccggaagcctgctcgtactcgtcagtgctgtactcgtcgcccccgaacggtgactgcagcctctttctggcgccggggtccctgtaggagtangagaggacttctgagc

SEQ ID NO: 66858 - DNA, 417 bp, Zea mays
cggggtaattcaattcttattaactcaatctatcaatcttacaatgctatatatatctaagattgaccccaaggtattttgagctattatatctaaaactcatatcatgtcgagcaagatattgatggtgtaggattatcctatgtggaaaatcaagaaaacctacaacatggaggaaagccgaatgatggtaacacttatgtctttaagtgcaagtatcttcaattatcatttgtcttgtgtcttggttagtcacatagaaaaaggaagcacttaagaatgttgttaaattatgttaccattctttggaggaagttcctctcatatggtagactgcatatttatcatttctatattatggcaatctacatgctttaaattgttctaactaccttatggcatgatctacattaatta

SEQ ID NO: 66859 - DNA, 441 bp, Zea mays
  unsure (1)..(441): unsure at all n locations
ctcagctgtcaagatgtttggtacccatcgctggatgggtccatcatggttagtcaacagaaatctaggaacccaagagtcctctgtgttagcatttggtaaactcattacctttctaacacaagttgcaattttgggttgcctagttacatgagaattgtttgacaagctatgagtgggagttttaccaataggacaatctttgcattgatgtcccttctttcggcatatgtagcataggcgatcctcaattcttgaagatttcttctttatttggctctttcttgctacatggntagtgaatattttcttttctaacattatgcctttntgtttcaaataaggacagagttttaaaaggtgtcccttctttgaacatttaaaataaagtatatcatcctggttaataataacgccttttttatatagggacatgatata

SEQ ID NO: 66860 - DNA, 373 bp, Zea mays
  unsure (1)..(373): unsure at all n locations
gcttctaaagggagaacacattntatgactaaccaatgttcattttgagaaagacaggatttgtagcgcatgccaaacaagaaagcaagttggcactcatcatccgcataagaacataatgacaaccgacaggccactggagctcctacacatggatctattcggcccgattgcttacataagcatcggcgggagtaagtactgtctaattattgtggatgattattctcgcttcacttgggtattcttcttacaggaaaaatctcaaacccaagagaccttaaaaggattcttgagacgggctcaaaatgagttccgcttaaggatcaagaaaattagaagcgaccacggaacggagttcaagaactctcaa

SEQ ID NO: 66861 - DNA, 342 bp, Zea mays
ctttaactcagcttcaaagtcaaaaacaaatctggttttttttgttaatccgactaacaaactatctgtatgcaaagatgaactgttaaaatgattgtgatacgtgataaaggatctacgaccaaacaattaacacagactgcctagacaatcattacaaattgaccaatgtgcaaactagcatggtgagcatacaatgtatgtttagatataccaggctatatgttttggctttagtatggaaacaatatctaaggttatatcttatgcactgattgtccatgaaaacaggacatttctgagacaaactgttaggagattcactgaaccagctcacccgat

SEQ ID NO: 66862 - DNA, 344 bp, Zea mays
  unsure (1)..(344): unsure at all n locations
gcttctgcaatatacatgaattatcatatgtatcataaccttggggtaaggaacagtatcacaacaattntggctgctacagtttcgtttctcggtccgggtcaagctgccccgtgccaactttcggaagagatggcccggagactggatgacagaatggttctatgtgaagaatgatctgacaatacgagaagatatcaaaggtataatcatgcgccctatttggcaaagcttcggccttcggaggccgaaggttgaaatgaatgaggctgccgaagaatgccagagggccttcggcgcagtctgctctttcattggaacaagagacttagttcaagagcata

SEQ ID NO: 66863 - DNA, 393 bp, Zea mays
gcttctgagaacatgtgtgggctatgtttttcatgagattgtaagatgtgaggtggagccgctagaacacttagcgtgcgttttactgacagtgtggagtgctgctccttagttggaatagaaaaatgcaatttgatggctgtgctgctgtcttgatctgttatcttcctgctcctggtgaaagttacccagcacatgtaatcatgccgtctttcaaacaatgagaagagcaggtcaacccacactgatgcgagtgggcacagcagcgtgccaaataaggtgaagaggtcatccacagttgacagttctaaacatcgcgagaatgatcaccctgtccccaatccgaatccgactatccaagggtgcagttgcagcacagtttatggtctgttt

SEQ ID NO: 66864 - DNA, 486 bp, Zea mays
  unsure (1)..(486): unsure at all n locations
ttctacttataaggaagagagagggagagagagaatctatatatagatagaaactagtaagagaagagtaacacatgaatntgggtgataattaaaaagaaatattatacccccaaattcatggtgttacaaatcctcactatgtgtgggtgatattgtgagtacagctctttccataagatcaacagaaggtgctttaagggtttcaaaaaaacctctggtggaagtggcagccactgtgctactgacttggctagcaagactgcttgttcattatctcctcttggaatggtttttactgagaaaccttcgaaggaggcctncatccttcaaactatatcaagatatttttctagcttgggtctcttgctatgctgcatntatcaacatgccccgtgaacacttaataatcagacttcaatattacccttcttaatctcatggctttgagttttcgagccctagcaataccgatttgtattctgc

SEQ ID NO: 66865 - DNA, 385 bp, Zea mays
cagcttatatggacgtctgagtcgaactccgttttttgttctgaacctggagaaagatatttctttaagcctgatatggtgcaagatgtccaataaaatgttcatacaattattcataatatgaaaaaggcgcacgctcgtcataagatttatgctcacacacggctaatgcccttatattctcttgaaggagactatgtttacctgaacgtctcaccaatgataggtgtattgcgtctcagggttaaagggaaacttgtacccacatacattggtcccttcctggtgctttagcaatgtggaccaattgtataccgacttcttctcctctgaacattatctgctgtgacaatgtgtgcacgtgtcacaaccgaataaagtcttc

SEQ ID NO: 66866 - DNA, 339 bp, Zea mays
tcgcttaatgtcgctattcaccctcagacggatggtcaggtatagttatcaatccaaaccatggacgatatgtagcgtgcatgtgttctgtatggaaaggtagctgggatgatcatcttgctctggcagagattgcgtataacaatagctaccaagctagcatcaagatggcaccatatgaggctatgtatggaacgcggagtaactctactctgtgctgggagactatgggagagagatcccctgatggacctgattgtgttcaacaaactactcgaaaggttcgggatattcgacagaacatattggaagctcaaagacgacataagaagtatgctg

SEQ ID NO: 66867 - DNA, 366 bp, Zea mays
  unsure (1)..(366): unsure at all n locations
gcttgaagccatggtaagtatcataggcttatttatgcgaatggactcaagcctagctacgggtgcatatgtttcaccaaaatccaaaccttctacttgtgaataccccttggccacgagtcgagcattgttccttgtcaccacaccatgctcgtcttgtttgttgcggaagacccacttggttcctacaacatattggttaggacgtggaactaaatgccatacctcgttcctcgtgaagatgttgagctcctcttgcatcgncatcacccaattcgaatcttggagtgcttcatctaccctgtgtggctcaatagaggaaacaaaagagtaatgctcacagaaatgtgcaacacgagatcgagt

SEQ ID NO: 66868 - DNA, 433 bp, Zea mays
ctgtcgacagccacgacgtggccattcttacgtctcacaggcggaggcggaggctctactcctagcacatgcaagcatcgagctatctccagtaggggtgggcacatttttaccataaaccaaaaaccaaaccgaaccgaaccgaaatttcggtttttttggtagttcggttcggattcggttattgtatctaagaagtatcggtttcggtatcgtaatcggttttcaccgtataccgaaccgaataaaccgaataccaaactttatcaattctcaaatttgactattcgactatgtgaactaattgtgtgatacaattaaattgttaatcacttatttgtatgtgatgtatgatgtataatctaatattcgtacctatataacttttactttctaaaaatatatgttatctatcatgtaaacatggtgtatg

SEQ ID NO: 66869 - DNA, 415 bp, Zea mays
ggagagtgagcttgctagatatgattgatcttatggtgagtcgcttcaatcactctctgatcgggtgatggtgttagtaaacaaaataagagtgcttggaagtgaatattggagtgactccaaggtcacaagactattcatgagagcatacaaagaaaaggacaagagtctagcaaggatgataagggatcgtgatgactatgaggaaatgacgcctcatcaattatttgcaaagattcaacaacatgaatccgaagaagccccaatcaaggcaagagactctcatgccttgatctcaaatgaacaagacacccccaagaagaacaaagaccacaaggcaaagaaagtggtcgagacatcaagtgatgaagatagctcaagtgatgaagacacagctatgttcatcaaaacattc

SEQ ID NO: 66870 - DNA, 473 bp, Zea mays
  unsure (1)..(473): unsure at all n locations
ctgagtaagacggaaggcgattatgacgaaggataagatgatcactaagctactcgtataaaagcttcngcatggcagcagaaaaggggaaccgacttatagatgaaaaggctattcagacctcgatgggttactatagagtcattatcaaatgtaaatggcatgggtgtaattttacataggctgcgtcccgtgcctataaatagatgaacagtgctcccgtactgttcacgccgacttggcattcgctttttgcatcacgccttgtacctttactttccgtcaaaccgaaggtacatttataacttgttattatggatacgataatgcaaataaaaataaaatggtaatgatatctatattattattcatattntgcatatgagttcctccttatcatctatggtacttacgaaggagttttccttcatgaccttcgtccgaaatactgtatatacgaagagacataacgt

SEQ ID NO: 66871 - DNA, 406 bp, Zea mays
agcttcagctcggtcagggggtagctcttctctgtggagatattgcaggtacggagtctgccaattttgatcaggcgtgaccccgcttctctccccccgacgtgcagcgtctcgccctcaggggccgagggtacctcaagctgaaccgagggtgcctcgggccgagccgatggtgcctcatactgtgccgagggtacctcgggccgagccgagggtgcactagactgtgtcgagggtacctcgagatgggccgagggggcctcatgctcacgcgtgtcgtccatcttgacggagggttgatgcatatctcaggagaagacatacgggggaaccgctgtccgccccgaggctattttaactagctcgtccgcaatcttgttgtagcaccgggcgatgtggttgagct

SEQ ID NO: 66872 - DNA, 368 bp, Zea mays
tactaagcttgtggcgcccttgtgcgtcttgtcgcagccgaagtactttgttctcacctggaggtctcgggaccgaaccactcgggcgtggtagcgtcgcagagactgctgataccgtgccgagtgtaataaggccatgtaccgagcctcttccagctggtctagtgagtcttctcggctggtctggatgcttcggtcgtcgtacgcccttgtcctcggggaaccgtattctaagtctgtgggcaagatagcctcggtcccataaactagaataaatggcgtgaagaccgtggcttggcttggcgtcgttctcagactccagaccaccgagggtagtttcttgatccatcgcttgtcgaacttgttga

SEQ ID NO: 66873 - DNA, 347 bp, Zea mays
  unsure (1)..(347): unsure at all n locations
actcaccattntataattaagtaatatttctgagatcaagaatatttagctcattcctcaacatacaaaaatgggttttctctaaaggctttgtgaaaatatccgctaattgatcttccgatctcactccttctaaaattatatctcctttagcaacatgatctctaaggaagtgatgacatatatcaatgtgcttggtgcgagagtgttgtacaggattattagcaattttaacagcactctcattatcacacaacaaaggtatattttctagaactacaccatagtctagaagagtttgtttcatataaagaatttgtgtgcaacaagcacccgcggcaatgtat

SEQ ID NO: 66874 - DNA, 352 bp, Zea mays
  unsure (1)..(352): unsure at all n locations
cgctacaccatgtattatcttatatagaactggactatatggtttgctttncgccaattntgtatgtgacgaaagcttagagcatctacaggaaagttgtgtaattcacatgctaaaccagtgactttcctaagttaagaaaacctacaattatctctctctggctaatagntttatatgaacttccgtaaaataaaaaaaaggacattatattgttttgtgcggcagggtctgcacggtgtcctaaatttgtcataacgctntactacaactacaatatccctaaaagactcattgatatagataanattggactanaatgttacattcaccaacatgcaaaaaaaaaagc

SEQ ID NO: 66875 - DNA, 429 bp, Zea mays
  unsure (1)..(429): unsure at all n locations
agctttaatatctaatgatccaaatgtagtctatctgggggcgtggattgtttcacctccaggaaattatcaagagccgacttgtgccttcaaccacgtgacctttgtagtccattgtaaaagaaatgtctctatgctatntactcatacattacaacagttttttttgtaagtttacacttatgcaagtaacctaaagccttagcaactgaaatgttttaagttaggttgcctatatacagtggagggtggaactggaaccaatatgtgatccgttatatgtatactgccgcaggttgccatttattcaatacaacagtacatgtgtacataataaagataaaagaatatattgatgattcaaacaagcgattctgatattaatatcaattttggtttagaatattgctatatttgagaaacaccctg

SEQ ID NO: 66876 - DNA, 466 bp, Zea mays
  unsure (1)..(466): unsure at all n locations
aactcagcttaccatgannagtggtaaggctgagcattgctcttaatatgttgttcaaaatcttattaggaaatactaagtattagtagataccaacctaattaaataagagatcacaattaataattaccataataccatgcagtgaatgacatattaagtattagttccatcaattaatcatgcgagagtcctgagtcgctcatgaccgcgagcatgactgatatatcagttttgcactctgcaaaggttgcccatctttacccacaagacgtgttcccttttttgcttaaattgatcagacccttaacacttccaacgtgagttggcagggcacactgcgatgcctttacaagttcactaacatgggaaccccgttacgatacaggacgaagangcataagtctttttcattgtctataaacnctcacaagtaatacaactagcactatactctacatcgatg

SEQ ID NO: 66877 - DNA, 397 bp, Zea mays
  unsure (1)..(397): unsure at all n locations
tagcttgccactttttataccaaagactttttatgtgttgattgttaaagacttgagctccaacttcagaattacattgatgatgttagaagtgatgatagatttcaaggcttgaacaaccttaatgagctctctattaagatggttgagacaaataaacatgatctatatgggttggtgttcatgcttcttaaattggtattgatcctaccggtggcaacaacaagtgtggaaagagtattctctgcaatgacccatgtgaagaatcatttgaggaatcggatgagtgagaatttattgaatggcgattatttggntacttttatttagcgcgatatcttctctaatgtgagtgaagatgacataattcacctcttcatgggcatgaagaagcata

SEQ ID NO: 66878 - DNA, 254 bp, Zea mays
  unsure (1)..(254): unsure at all n locations
taacccctaatagggattaaaggggtaagacataacccatattgataaaacttanaggctttanggaaatagtcataaaatgtccccaaaaacaaaagttaatcacatttatattcctaggataccaaaaaccctatttganaccctgganaaccctaattccaaaccctagggacctctgtgcanaattagtccacttttggactatagtgcaaaaaccaagttaaataagtatcttaagttatttgaatcac

SEQ ID NO: 66879 - DNA, 384 bp, Zea mays
atcttaatcaccgcagctgcagctggaccccttgtggaagctctgtctcttatgacgttcttgctgttgcgctcggaggacccggaattttctcttgatgtgccctttttcttcctcttttgctctttccacttgaatagctttgttggaaaggtgagagaagctgtggaagtcttggctggcgaggatggtcttaagctcgggtcttaaccctctcaaaaaacgggccattttcctggcctcggtgctgacatcctctggcgcgtaacgggccacctctgtgaacttgtgcacatattcactgactgttctcccgccttgagttatctcccggaactcatcctccttgagttgaactatcccctgggggacgtggtgctcacg

SEQ ID NO: 66880 - DNA, 368 bp, Zea mays
  unsure (1)..(368): unsure at all n locations
tctaaaggggagaacacatttgggactaacaaatgttcattttgagaaagacagggtttgtagcgcatgtcaagcanggaagcaagtaggtgttcatcatccacacaagaacatcatgatgaccaacatgccacttgagctactccacatggagctattcggcccgatagcttacataaacatcgacgggagtaagtattgtctagttattgtggatgattattctcgcttcacttgggtgttctttttgcaggaaaaatcacaaacccaagagaccttaaagggattcttgagacgggctcaaaacgagttcggattaagaatcaagaagataagaagcgacaatgggacggagttcaagaactcac

SEQ ID NO: 66881 - DNA, 371 bp, Zea mays
  unsure (1)..(371): unsure at all n locations
agcttgtgcctgatggagaattctatttttgcatgacgagtccatcaacttctggaaatggtcgccaccattctaggctggtggcctgngtggtcgatctgcggtggtgaattcctgttcatcaagccgaggacgatggttccttctgtgcttgtcggggtgctctcaatgctccctcctttctccactgggctcgccagcgtcccgcgggccctttcccatgtggaaaatggctcccacagcgtcctccctgttagcgaacttggtcgctatgtcaagtacgtccatcgttgttcttggtcttccctggccaagctcggggacaaacacttcatcagtggtgccatangtgaaggcacttactatgtctg

SEQ ID NO: 66882 - DNA, 446 bp, Zea mays
  unsure (1)..(446): unsure at all n locations
gacactagaagacgagctatctgtgctatctattgatgaatngaccgacagcttagcatataatagtttataggtacgagaatgagccttttgtgctttaaacaaaagattttttatttgcttatacttaataccacactcctttcgcagggcctcattcttagcaacgccctcatggcgcaaaanagtgccgaagatgaaggatgcactatagctntgaacaaccttctgtccgaagtagattgactaatgaacgaacgtcttgaanaagataagatattaaactcattggtgaacaaaatataagaagacgaagctactttcatagcccaagctgatacccagaaatgcgaaattgaggatctttggagatagctggctgaggcaaaattaatatgcgctattgtcgaagctgaccgagacgccagtgattactggaaaaatta

SEQ ID NO: 66883 - DNA, 355 bp, Zea mays
cttcacacctacccgtctgtttatatattgccgcagctgggcaggtgaatccgcaatgatctcccgcaccgaacaaacagttacccgcactcgctgaacggtgggccacatggtccgagaaggtgaatctccagggcgcgcgtaaatgcttgaagatggaaccacctcgagcgcggattattttaattgtttctcgccaaccatctcatggaaggcgttgttcggatcttcggcataccggaacctataaaactttttcacggatcaagctcgtttcgaaaaacgatctaacaccgcgaatgggctactgttgggggtatgcttcgtatccgaatattctacataaagaatcacc

SEQ ID NO: 66884 - DNA, 197 bp, Zea mays
taaaaactaacttgaattgacttggtgggcaagtattttttttttaaaccaccctagacactggttggatgagtggcactaaccgtctgaaatgatcattctgcatctgttgctgataattaatccaaacacgctggttagctttcgatccgacacggcttacttctgactacccacaagcacccccacctttttac

SEQ ID NO: 66885 - DNA, 296 bp, Zea mays
  unsure (1)..(296): unsure at all n locations
cttaagtcacctgcggcatgcaagcntatcaaatggacgtgagaagtgccttcttctatacacctatcaaggaagaagtctatgttgcaaaagacttgtttgtatgccaaatntatgttgatgatatcatatttgggtctactaacaagtcaacttgtgaagagtttactaagatcatgatacagaaattctagatgtcgatgatgggggagttgaagtatttccttggatttcaaatcaagcaactccaagatggcaccttcgtcagcccaacaaagtatattcaagacatactt

SEQ ID NO: 66886 - DNA, 499 bp, Zea mays
  unsure (1)..(499): unsure at all n locations
tggtcgcaagaccctcaccacggcgagcgagctgatggacatcttctctcaattcgcctctggccaggaggcggtcgaggctatctttcttaaggacaagcagcccctaggccgcccgtccgaagaggctcccgaggcgtctactccgcgcggtgccaagaagaaaggcaagaagaagtctcaatttaaacgcgacgccgctgacgcggaccttgttgccgccgccgagtacaagaaccctctgaagccccccggaggtgctaacctcttctacaagatgctcaaggagccgtgcccctaccatcatgggcccgtcaagcacaccctctaggagtgcatcatgctactgcgtcatttccacagggccgggccacccgccgagggtggcagggcccgcgacgacgacaagaacgaggatcgtcaagcaggagagttcctcgaggtccgcgactgcttcatgatctatngagggcatgctgcgaatgcctctgctcggcac

SEQ ID NO: 66887 - DNA, 424 bp, Zea mays
agcttcttatgcttctgaagtcaactaaaatttgtctatcttcttgagcaacttatagaatggggagactttctctcccagccttgatatgaatctgctcagagctgccatacatccgggaagtctttgtactttcttttgtgatcgtcgtgcttccatcctcatgatagcctcgatcttttctggattggcttcaattccccggtggctaacaataaacccgagcaactttcctattggtactccgaagacacattttttgggattaagcttccatcgtgatcgccgtagactgctgaagaccacatgtaaatcttcaatgaaattttctgaatcctctgtcttgatcaccacatcatccacataaagcttcacacgctcgccccagtggtcggctaatcatatctgaatagctctctgataa

SEQ ID NO: 66888 - DNA, 430 bp, Zea mays
  unsure (1)..(430): unsure at all n locations
tagcatcatcatgtacacaaagaacatactacacagagtagtgtcacattctagcatatatacaaatgaagctcaatatgctacatgatgagatgtaatgtagatatgctaaacatcaaaataaataatgaagatgttaacagaacaaaatgtgtgccctcaactaaaaatggaaacgcacacccaacttcctcacaaatgtggactgatcaaggggttttgtgataaaaatgcaagctgtctgtgggatcaacatgacaaagatcaatgttcnctttctcataatgatctctaagataatggaagcgaacatcaatgtgcttggtcttagaatgcaacacaagaatattggcaacactgatggcactagtgttattgcaaaagcaaagcccatgctgcaactctatgctcaaataccgcatagtgacca

SEQ ID NO: 66889 - DNA, 431 bp, Zea mays
  unsure (1)..(431): unsure at all n locations
agcttacaaagatngngctaaactgtggagcaccataccggtctagtggtgcactgaatcatttacacagagagcatgataagaaacacccttaagttctcttgcattgtgcttgattctaaatcaattgtgttgctcccaaagtaaaattctataataataagagcaacacttgcaagaagaacatgtctccctcacttcgattgttttgcttcttgttctaacacctaaccggggttttagtttttgtagtttgtgataaattttatgtttttcctattcaccccctatatgcgtatttcatgaaggtgaaggtcatacgggttcgtgccgatggaccaagagcaacgaaggttgagcaatgagtcttgatcgaggctctaaagaagcggngtgactggcacctatggacaccgacaggcgcaatgaca

SEQ ID NO: 66890 - DNA, 490 bp, Zea mays
  unsure (1)..(490): unsure at all n locations
tctcggaaaaagaaaaacttctaacagtggtgggccaaaacttgctctaccggcccaactctaagcggaaaacaggagcgcgcccgcgcccgcactgacggctttgcgaataggcccctgcttaaccgaataagtggcgaagaatccctagccactattcattgtatcactgacaaatgcacagaggtccctcagcttttgtttcttctctaaattgatccaagcccacgacgcgctcaccatcgacgactctgctgctcggaccagccaagattggcggtggctgcccaacttaactactgggcgagtattaccgacacgagatgacccttgaacaggctctaattggattaattcggctctgactacacacgacanagaacgacggcgaacactgaacccaattccaagcggtcctgttgatngagtatggttaagcataaagggtcgagctgatgagtatcacgagcacgtacgggtgctaaacatg

SEQ ID NO: 66891 - DNA, 431 bp, Zea mays
aaccactctaccttgttgatccattttgtgaatgggtggacgattgtctatgcgcactaaactgcacacatatcgatgtgcacgttccattgaatgaccacgggccgtttataaatatgaatcaacgaatcaccactaatgtattaaggggttgtgaaccacaaatgaaaattttgtatgtcttggcttgatgggaaaggtcggattcagatttacgcatactacagtgatgccatgtcactggaggactcatttggtgttcctagaggaaaactctatctactggatgatggatatacaaataggtccgggattttttgccccctacccatctactcagttccacttgaatgaatggggtcttcgaggcaacaatccatcttctgcgacagatgttttccacctacaccatgctacggctttgaatgtga

SEQ ID NO: 66892 - DNA, 350 bp, Zea mays
ctaatggccggttaagggatagctcttatatttttcaaacaacatcataaagccgagttgggaaaccttgccggttgacgagcagctccagtttgatgagcacaaggagcatatgattcaagaggcgatagcaaagttcttggccaacattaaagtggacaggaacaacaaggttgtccgacatctggcgactgatacggcttcgctccaacccacgccagatatgctcaatgtaagtaataccaacgatctgcaatctctagaaaatatgttgaagatcagcgtagacatatgcataacatcatatggggtatgctaagcgatcttaagagacttgtacgtgcatttga

SEQ ID NO: 66893 - DNA, 234 bp, Zea mays
  unsure (1)..(234): unsure at all n locations
accaaaacaccgagcagcacnagcggacagcccccttctttgagcgcaaaagcggcggggggaaaaacactgggccaccccgaagggggaggaacacccccccaagcacccgcacaccacacaaccgaacaaacacccagccaacaccggaacaaaaaagcccgcaccaaacacaaacgacaagggccagaaacccaaaaaaaaacccccccaccccaaagcggcagagaagca

SEQ ID NO: 66894 - DNA, 285 bp, Zea mays
ttggctgacataagatgatgggtgtcagcttatgcacttggtagagaccctatgagacactgcggtgtcacagacatgacctccgtcactattatattccatgagcgctacgaatggatctagataccctgacgctatcctcgcatttgctaacacgctcatatacttgcgtcccactaggcaaaccggctgtggttgatggagaagattatatgcttgtgtagcgataaaatgaggcaccatctaatctcactccacgctagcgcctgggacatcgttgagttt

SEQ ID NO: 66895 - DNA, 428 bp, Zea mays
  unsure (1)..(428): unsure at all n locations
gcttcngcagaaagaggaagaagtcttttatgttttgctatgtaaaagcttcggcagaaagaagaagtagttttttatgttttgctatatgaagaaaagctttggcaaaaagaggaagcggccgtttatgcttcgttgtgtacgaaaagaaaggaaggtgttttttcgccttcggctcaaaatactgatttcgtccacatcaaagcgactcaatcgaagggaaagaatatattacaaggtatgtacaaagttccttgagaacagttcaattgtatttacaaaacttgttacaaaagtatcctgagttttttcctatagtacatttctactgatcttcattaagcttcagcttcggcgacagtttcggcgacataacttaggcatcattttcaccttcgtcatcctacatgaatcanggaatcgtgagt

SEQ ID NO: 66896 - DNA, 402 bp, Zea mays
agctgaaggatcctttatatcatctacggagaaggcagcttctgcctgtgccatggtcttgatgtgatcacatcccgccttctccaagatagctgaaatcccccgtgcaccagaaaacaggcaaatatcctcgcgatcacccaaaatttcttcgaatctctcggcttctccacttatccattcaataacgccttcagggtcgcctcgtatgaagttatcttcggtagagtaggcgcccacgttggcgaaactagcttttattttcctcacacagtccaaggatttttcagagcatctttccttggatgtgcgaagttcttcaacattattctctaaatgagttttccaatattcgctgatttcttggttagcttctgcgagtgcgcattattctttagcttc

SEQ ID NO: 66897 - DNA, 444 bp, Zea mays
ccctcgcgagaactttcctcgtctctttctaaccatggtaaattcattatcgtatgtgatattctatgcatgtttaatctacttgttctcttgtatggagtattgatggtttcctaatttcaatggatggatgtatgtatgtttgcactcgcataaaaaacgatccggttgaatagcccgatgaactcgcatgagaagcccctgagcaacaatcggttggtggaggcaagtgtcccttgacctatctctgtcctattcattctttaattcacctcccgcattacacatttatgcctaaggattgactaactttgttatctatgtccttgtttacctattcgggttggattaattattgtttagtttatgctattgctcaaactctaatcaatgaacatgatgagattatctatgatacgctcgttgtccttctcttattatgat

SEQ ID NO: 66898 - DNA, 381 bp, Zea mays
  unsure (1)..(381): unsure at all n locations
cgtgaaggttcttcatccacacatgtgctgagcggcgatgcctcagccagcccatgctagtcttagctattaagtatgcatctagaccggcctcttcttttgcanaatcaactaaataaagattgccgtctaatacacccttaaaagctagtgaaccatcacttcttctatagacagacacatctacattagtaaatagacagttatatcccatattgcataattgactaacagatagcaaattatatccaagagactcaactaaaaacacattataaattgagtgctcatttgagagtgcaattttacctaacccttntaccttgccttgattcccatcaccgaaaataattgaatcttgcgaatccttattcttgacgt

SEQ ID NO: 66899 - DNA, 395 bp, Zea mays
tttctttttcagctcctccactctggccttatgagcctcagcttgcgcagcaagactatcctcactagatttcagcttctctactaaggaaagtaatatcctatccttctcaagagctttgtttctcaatgatataacttctgaacaaaggttcccaagagctattttgcagctctcatcctctgcatctttttgagcttttaaagccttgctcaaaatcaagccctggaaagcgacaataagcatgaaattagggtaagaaaaaccatagaaatgtttcattacagaacgacaaaccaaaacatacacaccttcatgttgttgtaagcaaggctgtccgtgagctgatccttcgacatcgcagataagccgagttcaagcttcggatagcctat

SEQ ID NO: 66900 - DNA, 467 bp, Zea mays
  unsure (1)..(467): unsure at all n locations
ttcttgtggtgagaagtgtgaaatatggggagtttttgaaatccttgatcaatctcttttggaatgactctctttatgcttcaacatgtgtgtttgacttatagatagagatttgagtttgatttgcaaaaacaaaccaagtggtggcaaaggatgatccatacatgccaaaattgaatcaaaaccattttgagtttttatttgaagtgattttgcacttgttctatctgctatatgttgtgttggcataaatcaccaaaaagggggagattgaaagggaaatgtgcccttgggccatatctaagtattttggtgagtgagtgtcaacacaagtgcttaaatgtgaatcaatgcccatggatgaacaaagtgcaaatcttcaacaaaggtatgtttctaagtcttagtacattcggtttgtgtactaatatatntgtctaagtattagaaacaaatagagaagagat

SEQ ID NO: 66901 - DNA, 399 bp, Zea mays
ggatccttaagtcacctgcggcatgcaagcttgtgcgtctcaaggtactctgttctttttctcatggaggacctcgctgacgtagtagaccgacttctggatggttcggacccctgtggatggtcctgggtcctcaacctcctggccttccatcaacatcgtggtggtcggaccaccaccttcttctatgggaacttcctgactctcttgggggtgttgcgtcgtcctttcgatgaccagcaccatgctcactgcctctaaagccgctgcaatgtataagtacaacggctcccccggctccggagctaccagtattggcagggacacaaggtgcgtgtttaactcttgaaaagatcggtctggctcttcgggccaacggaatggaccggacttacacaa

SEQ ID NO: 66902 - DNA, 477 bp, Zea mays
  unsure (1)..(477): unsure at all n locations
tctanagggagatcatgtgttaggactaaccaatgtctgttttgagaaagacagaccttgtgcagcatgtcaggcatgaaaatatgtgggaagctcacatcacggcaagaatgtgatgacaacatcaagaccactggagctccttcacatggatctttatggacccgttgcctatctaagcatcgggggaagtaagtatggtcttgtaattgtngatgattattcccgcttcacttgggtattctctttacaggataagtcagaaacccaagggaccctaaagcgcttcttgaagagagctcanaatgagtttgagcttaaggtgaagaagataatgagcgacaatgggtccgagttcaagaatctacaagttgaagagtttcttgaggaggaatgcatcaagcacgagttctccgctccctacacaccacagcaaaatggcgtggtagagaggaagaacatgacgcttatctacat

SEQ ID NO: 66903 - DNA, 334 bp, Zea mays
  unsure (1)..(334): unsure at all n locations
tcttctgcagatactctttccgctgctttgtcaatttccaagaattccctcttggtaggctctgaaagcccacgatcagtttccgcttgacttttggcagcttcggcttcaatttgtgtctatggagcttcagcaactatcttctaagtagagcttgaagaatttatcgtttccagtacatctagcacgttaaccattcttttcctcttgggagtngttgtaaggactatttgtgccctcggcattaatgttggcacctcaacttttgctgaaggacttaanaatttcgatgtctttgttacttcaaccctttgttcttctattttctctatct

SEQ ID NO: 66904 - DNA, 303 bp, Zea mays
tcactaacttggaaaaaccctcaataaatcttctatagtatcctgccaatccaagaaaacttctgatcttggacgcatcctttggttgcttccaatctagtatctcacttatctttcctgggtccactttaattccaccatcagtaacgatatgccctaataaagcaacttcctttaaccaaaaatcacactttgagaacttcacatatagctggttgttacgaagtttttgtaggactagccttagatgatcttcatgtgtttcttcatttggagaataaatcagtatgtcgtcaatgaata

SEQ ID NO: 66905 - DNA, 436 bp, Zea mays
  unsure (1)..(436): unsure at all n locations
ctaagcttaaacttcgagacaaaatattgggctcgtttttgacctggccgtcttgcttctactgtacaagcgccgcactaactgcagagtgtgaagctaccacatataagagcaatggagcccctggcaaaggtggagttaatgttgtcagatcaatcaagtattgcttcagctcttcgaaagctttttgctgagccggaccccattgaaaaacttcggctgacttcagtatttcaaagaatggcagaattctttctgctgatctggatatgaatctgtttaatgatgccagtcttcctgccagccgttgggcccccttctttgtatttggcggctccatccgaaggatagcttcgatcttatttggattggcttcgattcccttcgttgataccaggcagccaaggaactcgcccttnttcactccaaaaacaca

SEQ ID NO: 66906 - DNA, 446 bp, Zea mays
agcttctccaaagtttgaggaggcttcctgttttatttctgagctgacggacctggccgaagccccttgatcatggcctcgatgacaatctcattgggcaccgttggtgcctgtgccctcagacgcaagaaccttcggacatatgcctgaaggtattcttcgtgatcctgagtgcactggaacagagcctgagcagtgaccggcttcgtctgaaatccttgaaaactggttaacaacaagtccttcagcttctgccatgaagtgatcgttcctggtcgaagggaggaataccaggtttgagcaacacttctgacagccataacgaaagatttggccatgactgaagcattgccaccgtacgaagacactgttgcttcgtagctcattcaaaactgcttcggatcagaatggccatcaaatacacgaagctgatgcggcttgtatga

SEQ ID NO: 66907 - DNA, 318 bp, Zea mays
atgaatcattatttccaactttcctaatttgcacctttgagttgattccaaaatctcctcctattattataccttcattcatcctactatttttttaaatgcctaaacaaaactaaactcgagcatgatgcacgggtcatttatgttttattggaaaaatttatcacttaaatatgcccctcaatgattctcatgatatagaacgcaatacacataaagaattattccctctattttatattacaaaagtagggtattacattatgttaatgggaacatggagaaccacacgggaaaacatgccaccacaagggagga

SEQ ID NO: 66908 - DNA, 440 bp, Zea mays
  unsure (1)..(440): unsure at all n locations
cttacgcatagcttcngaactggttctatcttcgtcccaaccgttcttttcatattgtggacaacttcattccgattctgaaggctcttgtacatatattacacttgggaaaacattgttaatcatgtctttgaggaccttcacaagacgaaggcccccaacaaccaccacttagaattttaaaacagttttgagcctttaaacttgtctttttgatcaaaaccctcctgatagcaaagatgtgccctcttattgtaaaaactactctcttgtgtgggaatggttatcttatgggaaaaatggagagtttttgggagtatgatcaaaacaagtgtttttaactgacttgttttgcaaaaaccaagagttttttacttataagttaaaaaaatgagtttgattgcaaattcgaaacaagtggtggattaaggatccaaata

SEQ ID NO: 66909 - DNA, 431 bp, Zea mays
  unsure (1)..(431): unsure at all n locations
atggacgtgaanagtgccttcctcaatggaccgattatgtatatgtctatgttgagcaaccatccggctatgaggacagtgagtatcctaaccatgtttataggctctctaaggcgctttatgggctcaagcaagccccaagagcatggtatgaatgcctaagagatttccttattgctaatggcttcaaagtcggcaaggccgatcctacactctttactaaaactcttgaaaatgacttgtatgtatgccacatttatgttgatgatattatatttgggtctactaacgagtctacatgtgaagagtttagtatgattatgacacagaaatactagatgtctatgatgggagagttgaagtatttcttatgattccaagtaaagcaactccaagaaggcacctttattagccacacaaagtatactcaa

SEQ ID NO: 66910 - DNA, 435 bp, Zea mays
  unsure (1)..(435): unsure at all n locations
agcttcatatcatctctgggtacctgcaaaacttattaagtacattttggtacccatctcatgatgggtccatcaaggttagccaataaggacttatgcacccaaacagccttggtcctagaatgtggtgaactcatcacctttctagcacaagagtcaaatttgggtctcctaagcatatttgaatatattgacaaggtaggcttaagagttttaccctttggacaaaccttgaatagatgacctttttcacgacaattgtagcaaatgcggtgcttatccttgcaatgcatttgccttttgctttcatcctttntaatggtcatctttcttgatcgtgcaagatcttggttcttcatgtgggggcatgaatcaatttcatgacccttctacttgcatccatagcaccttctatcgcgtctctttgatctttct

SEQ ID NO: 66911 - DNA, 480 bp, Zea mays
tcagagtcacctgaggcatgcaagcttgagactggaacaaccgtggcatgcaccttatcccttgaagaaaatgtcaaagacttgaggattgtgcagaagaaggaacaaaagaagaaaatcaatacctcttccaaaagcctcaaccacgcctgcataaaaggtaacatccaaggtaataatcaagtcacacttcacactaagagaagtaagaagtgtagtgaatgctttgaaaaagggcattctattatgtcatgtccctgtattaaaagtgacttgattattgacaaagatgataaactttgttttaaatgctccaataacggacacttgtttaagccttgcccccatttaaaacaaagatgcatagtgttagaaaaaaatattcactaaccatgttgcaagtgagaaacaaagaaagaagatatcttcatgacttgaagatcgcctttgctacatatgccgaaagaatggacatcaatg

SEQ ID NO: 66912 - DNA, 458 bp, Zea mays
tactcttcttcgagaagccatagcctagtcttccttgcacggcaaccgcatggcttctatccgaagcgtacttcctctataaataccgagtgagccttccatacttcactcaaccttgcctttacaaactccacaaccatgaatccctacttagaaaacaattttcttgtgcggttgatggaagaaatggaagaggaagaagaagagttgcagttggcgaggcacatggtcaatatgaggcgacgtgcacgcaatgagcgtcgtcatggtggttcgattccagggcgtgttaggattcatcgtgatcacatgagcggcgatgcaagaatccgagcggactactttggagcgaacccggtgtacacggatgctcaatttcgtaggaaggatttacaattaccacattctttttaccatgtacataacttcatgacccctattatgacacatgaaatcta

SEQ ID NO: 66913 - DNA, 405 bp, Zea mays
agcttgactctcgaaaccaaacgaatttctttcttttatcctacttcgtcagaagaagaagaacttctgaagataagtatttaattcccaaaaaatccagaattaaatggctagagtgcgctctactgctatggttgagcgtgagggaggcgaatctgaatgatcggagtctgttcccatctccgaagcgatgcaacgatccggactggtaatctcggaagaaatccccactgctgaaacagaacaggcaactgccgaagcggaagaaggagacattgaggaaactgattccgaagatgattatcatattgccatgcccagtaagcccagccacttggacttcggaaagtcgactgtctctaaagctgatctctccaagatggtaaagtcgggttatttcagtga

SEQ ID NO: 66914 - DNA, 380 bp, Zea mays
  unsure (1)..(380): unsure at all n locations
ttgganagagatnaaactctgcttacactggtagataatgtgataaagacgaagctgcttcaaaggcccaggccgtagctcaaaaacgcgagatttaagatcttcataaacagctggctagagctaaagaggagcgcgcgcttgaggaaacaaaacgagaacttagtgatnttatggtcaacaaattggaatcaaaagttaaggagcttcgcacatttcatgggaaatgctatgtcaaatctgtagaatgtgtgaataaaatcaaattcaacttcgccagcgtaggcgcctttttcagcgaagagaatatctctcgaggcaataccgaaggtccgctggaatggattagccacgaagcagaggccttcgaagagattctg

SEQ ID NO: 66915 - DNA, 439 bp, Zea mays
agcttggacgacaaatatgaaagcgcgctcttccattttctggaagataaccgagacgtattcgcatggcaacctgcggatatgccgggagtcccaagagaactggccgagcacaaattgaaggtctatccccaggcgaggccgattcggcaaaagttacgtcgtttcacgcccgacaagagagaggccattcgcgccgagttagctcgcatggtcgcggctggatttattaaagaagtattacaccccgagtggttagccaaccctgttcttgtactcaaaaagaataaagtggattggcgcatgtgcgtcgactatactgatctcaacaaacactgtccgaaggatcccttcgggctcccaacgatagatcaggtggtggactccaccgctggatgttctgtgctggctttcttagattgctattccgggtatcatt

SEQ ID NO: 66916 - DNA, 436 bp, Zea mays
  unsure (1)..(436): unsure at all n locations
tgcgggttttcctgtgtttaccattcgcaactaaatggaaatacttggtgttcgaatctccctccaaaagacctttagtcttggcccgttgataccatntaatctcatcttctctcagcatcgctgcgagcctattacgaaggaagtttttggtatcaatttcctgtgtggacaacaagaccgtttcagctttcttatcgaggatgtctaatttactcaggatctctttcttttctttnttgttagatccgctacatattttagcccaccctctcagatgttgtctaactnttctgatnttattctgccatttctccaaggccgaagtgccaccccagtcttgtgaccaaatctgagcaaccatatctcgaaacccatccctcagtagccatccgagttcaaacttgaacatcggttggatattacatcggagact

SEQ ID NO: 66917 - DNA, 121 bp, Zea mays
aaccccggcgccaacattattaccaagtgtgctggtaccaactctcacacctattatgaatcatggcgcaagatcgaatgtcacatctttactactatacaagagttctattcaaaataaa

SEQ ID NO: 66918 - DNA, 438 bp, Zea mays
  unsure (1)..(438): unsure at all n locations
tctaagggagagcacattttgtgactaaccaatgttcattttgagaaagacagggtttgtagctcatgtcaagcaggaaagcaagttggtgttcatcatccacacaagaacatcatgacgaccgacagaccattagagttactccacatggacctattcggcccgatagcttacataagcatcggcgggagtaagtattgtcttgttattgtggatgattattctcacttcacttgggtgttctttttgcaggagaaatctcatacccaagagaccttaaagggattcttgagacaagctcanaatgagttcgtcttaaggataaaaaagattagaagcgacaacgggacgaagttcaagaattcacaaatagaaggctntcttgaggatgagggcatcaagcatgagtttctcttctctctacacaccacaacaaat

SEQ ID NO: 66919 - DNA, 394 bp, Zea mays
tgaagcctgcgacatacaagctggccaacgatcgacgcgaaggctacagcaacgcttggaacatccaacagctacggcggttatacccttaaattggttcaagacgatcatgtaccttgttttctttacatacacaaataaagtctaaccgtcaaggaaggatcatccttgcctcggcgaagcccgaccctccctcgggggctataaggggggaaccccctccgcgtcaaaattttcctcggaaaagttttctaccaagaaaggttttctaccaaaacgactttcgactatatcgataactgaaccctgaaaacgacgagagggaccttgagcgggaaggccgaccgagccgacggactcctacgcctcccggatacggataccttactcacac

SEQ ID NO: 66920 - DNA, 483 bp, Zea mays
  unsure (1)..(483): unsure at all n locations
tcaactacaaatctacaagtattttcatgtctcacaagactattattggtatcatctacatgtcttatccaatgtctgattagactatatttcatatcttacgcttcccatgttgctaaatgcatatgttgtcaaaatttatcttttacctatgcatagggggagttagtctaattaaatcatagcttgcaactctctttctgatgtgctttttcctaagtagaggatctcagtcaggggagtatttcttcgtctatgacaaatggggagaatattcttcataagggagaacacatctttaggggagtaatcttttagaacttcaattggtaaatcttttagagggcaagtattattgcttcctatatgcatttaatgtcttcctttaccgtggttgatgccaaagggggagaaagtntatggaccaaagcatgataaatatatcaaacaccaaacaccacccacattaattctttaaatcct

SEQ ID NO: 66921 - DNA, 431 bp, Zea mays
ttaagtcacgcagctgcaactttggccaaaatacagaaagttatttggtggtcatttcattgtgactctctaaagtttaatgtcaaaaaggcactttctactaccttgttatttgaaaaatgtcaaacagcagatttcatatttttcctatgttcttaataacaaaacattaatcatcccaaggtttggggtggtttcacaatggggttatttttatagggcttttctaagttttccttgtgttcttaaaagaaaaagtatcccatttattttgtactaaaccagagtataataaattcttctagtgaactatactgaataagtagactaacaaaaatatgggtgctccctggttctctatctaaaccttcattaatattttctctaactttacgctaaaaagggattaaatggtgaactctacattcact

SEQ ID NO: 66922 - DNA, 417 bp, Zea mays
  unsure (1)..(417): unsure at all n locations
ntgcccacaacgttntccanaaatagctcacaaacttcacattacggtcagatacgatggtcttgggcactccatgtagtctcacgatttctctgaanaacaaattagcaacatgtgaagcatcgtcgctcttgttgcatggaataaaatgagccatttttgaaaatctatcaaccacaacaaaaatagaatctctctttttttgagtcttcggcagccctaaaataaaatccatgcttatgtcttcccaaggaagtttatgagcaggtaaaggagtatataaaccatgagggttcagttttgacttatctntgtgacaggtgacacaacgctccacaaatctgatgacgtctctcctcatcttgngccaatagaaatgatcagtgagcagttcataagtcttcttttgtccaaaat

SEQ ID NO: 66923 - DNA, 361 bp, Zea mays
agctccaaaatatattatcattgctttcctggtattgtctcgacattctcttggcatggacccttaataactttagttgtagagtacatatagagttgtttgagcaacacgacaaggttttgttgaatttaaaaatttgcatttgttcaaacgagcagtttcaagcacgcataggatatattgtttcatgtgcgtagttggctcacatttctacaaatctttatagacacttgattgatagatctaaatgatgatctagatatgacaagtccatttgagtaagaattaattatagggtgacacaaagaaattctgcgagagaatgcggattcggattaagtatttggacgtacaccaacta

SEQ ID NO: 66924 - DNA, 449 bp, Zea mays
  unsure (1)..(449): unsure at all n locations
tcaatggtgtcaacgttccttgctgtactatacccatattctacttctncatttcttgacaaaaagtggtgttaggtgttcttattgtaagacaatgacaaaaagtcttgcgaattaaagcaattgccaccacattagctattcctcggtgataatgaatttccaagtcataatctttgattagctcgagccaccttctttgtctcatgtttagctcggactgcgcgaaaatatacttcanacttttgtgatccgtatacaaatggcatatattccccagcagataatgatgccaaatcttaagggcatgaactactgcagccaattccagatcatgggttggataatgatcctcatgtctgcgcagctgccttgaagcataagctatgactcatccctctcgcatcaggacacatttcagttcacagcctgacgcgttacaatacaca

SEQ ID NO: 66925 - DNA, 346 bp, Zea mays
  unsure (1)..(346): unsure at all n locations
agcttaacttatggactggatgtttttcctttanatgttcacgacccactgatgcagatcttgatgatcttccggacttatggttaagacccacacactctttcactgcgccactccgatcttgttggttgatgtcgatcacattgtcttcattggggttagcgactaacccccttaacaagagcattgatacgaacttggtgaagatgccgtcgactccgatcttgactgatttaaagaggttggaggttgccaaccacacaggtgcaagggggaagggtataaatagaaaatgcaggtatagatggatccaagagagagaatggagagcacccaactaccttac

SEQ ID NO: 66926 - DNA, 364 bp, Zea mays
  unsure (1)..(364): unsure at all n locations
ngccttcgcctcagtctatcatccgcagttcatctgagtcgtgttacgcgccaataggaaaatcttcacagctgtcaaaaagatgctcctcgatgaaaaaagggcagatggaccgatttgttacccgaggcagtctgggcactaaacacgactgagtgcagggcgaccggctatactcctttacgccttctatacggatcggaggccatgaccccacaagaaatataacatgggttcccgcgaacagttccgtcagccgttcccgacgtggacgagccaacttcaaaggatctcattgacggagaccgagtcttcgtcctacatgccctaaacatgtacccaacccagacaaaagcatggtgcg

SEQ ID NO: 66927 - DNA, 407 bp, Zea mays
  unsure (1)..(407): unsure at all n locations
agcagcagccgacacccaaccgctacccattttctcttcccaagaacaatcagcctncgcagcagcagcagttccgccagggcaatgggaacaagtgtttcacttgtggcaatgtgggccactatgccaagaattgtcccatgaaccagcagaggcagatgccagcaccaaatcaagacaagggaagaaagcagaaggtgcaagtcaggcaagggaagctcaacttcactgctctggaggaagtaccagaaggagctcctatcatgaccggtaccttntcagtttataatcaacctgctttaattctgtttgattctggtgcatctcatagtttcattagccaaaagttcagtgctaaatgcaaactgccattctctcaatcaaaagggtcattcatgatagtcaca

SEQ ID NO: 66928 - DNA, 396 bp, Zea mays
tgctggacatccacaaggctatattgttgtgcgaataaaacccttatccagcaattcttgcaactgctttttcaactctgcccactcagcgggtggcattcggtagggcctcttggaaattgggccgttcccggttgcaactcgatggcgaattcaatatcccggtccggtggcattcctggcaattcatcacggaagacatctgcatactcacagaccactgtgatcttcttcaggggtaactccgtcatagagaaagcacatgactgagtagaaccctgactaggcatgaataaagtgaaattcccgcagaacggagaattaacttccacagtacggctggctacatcaagcacaactatgtgcaaggtcatccaatttgctcctagaataatg

SEQ ID NO: 66929 - DNA, 408 bp, Zea mays
  unsure (1)..(408): unsure at all n locations
agctntagaagccggtaacccacctgtcattatctgtcaccagaacagagaatatgtgaatgcttacactagtctatgcaagtctttgggcactggacacccctccccatgtgggcagataagataacgacgtccctgagaatggggaaccgacccacgcccctctcctcatgctgcacccaccggccaccgacgctggagtgaattcaccgaccgtggctcgtttcgccgtcacccagaaggagacgtgtagctcgctctgaagagattggatgtttgtttggtttgatggttcgttttggcgctgcctgccactgcagtctgcagcacagtgatcaatggcgtttgatggcagcctattgtgggatcccagacctggtcagtccattttatttcatcatcattcat

SEQ ID NO: 66930 - DNA, 415 bp, Zea mays
  unsure (1)..(415): unsure at all n locations
taatatacgaattgatttattcctagctacgggtgcataggtttcaccgaaatccaaaccttcgacttgggagtatcccttggccacaagtcgagctatgttccttgtcaccacaccatgcccgtcttgcttgttgcggaagacccatttggttcctacaacattttggttatgacgtggaactaaatgccatacctcattcctagtgaagttgttgagctcctcttgcattgccaccacccaatccgaatcttggagtgcttcctctaccttgtgtggctcaatagaggaaacaaaagagtaatgctcactaaaatgtgcaacacgagatctagtnggtacccccttatgaatgtcgccgaggatggtgtcgacggggtgatctcgttgaattgcttggtggactcttgggtgt

SEQ ID NO: 66931 - DNA, 448 bp, Zea mays
  unsure (1)..(448): unsure at all n locations
agctntaactctcgcgagaccttntcccatttctttcttccatggtgagttcattatcgtatgtgatattctacgcatgttcactctatttgttcccttgtatggtgtactgtttgtttcctaatttgaatggatgaatgtatgtatgcttgcaatcgcatatagaacgatccggttgaagagcccgatgaactcgcatgagatacccctgagcagcagtcggttggtggaggcaagtgtcccttgacctatctctatcctattcattctttaattcacctcccgctttacacatttatgcctaaggattgactagcttttggtatccatatccttgtttacctattcnggttggattattattgnttagctttatgctattgctcaaactctaatcaatgaacatgatgagaatatctatgatacgttggttttccttctcttatta

SEQ ID NO: 66932 - DNA, 432 bp, Zea mays
tatcaaagaaaaattatacagagttggagaaggtactgtatgctgtcttgatggcttccaggaagcttctgcactattttcaagcttacaacataattgtcccttcttcacaacctctgaaggatattatgaggaaccgagaagctactggaaggattggaaaatgggctgcagagctcaatgaattttgtattgaatatgttcatagatcttcgattcagtcccaggcattggcagacttcattgctgactggacgccacgggctcatgaggaagaaacgaataaagacaacgaagcatggacagtgttttgtgatggatcttatggaaccttctgagcacgagcggctgctgtgttggtttcacctttcaaagtcaaaaattgttatgcggcaaagcatgatttagttgcacaaataacatggtcgagta

SEQ ID NO: 66933 - DNA, 453 bp, Zea mays
  unsure (1)..(453): unsure at all n locations
agctctgggcttctcttgtgggaattggcatttttacggtcgtaccggagggggtgcggatgatgccgccgcaccgggcccccaaaaacatatggcctcttattcactggacgctagcactttttcctgttaaacatatctattctaaacacaaatacgcaaagagcgatacgctatcgaccagtttcgtttagattgttaaactaatgtctcaattccttatcgaatactccatccgttttaaaatagtatttgttttagctcttgatttttatgtttatattcaactatataataatgaatccactaaagaagcaaaacaaattctattttgatatagagagagtattatttactatacacatgatggttgcttcgaccaagagaaagcttttaaaattgaaatattnttgtgaactatttatnggccacaataactcaatagagggtaaa

SEQ ID NO: 66934 - DNA, 332 bp, Zea mays
aatgagaggtgaactgcgtacctctgtctgacacatatcatctatggcacaccatgaagacaaacgattcgagacatatacaattctgccaatattgcactgctatagttggtcttgacaggtatgaagtgggctgacatggtcaagcggtccactactacccaaatggaatcgtagccggctcgagtgcgaggcaattcgactatgaaatccataccaaattcatcccattttcactgagggatctgcaacggttgcaacaatccagctggtctcttgtgctctgccttaattcttcggcaactatctgcacataggcccatgctttgcga

SEQ ID NO: 66935 - DNA, 284 bp, Zea mays
  unsure (1)..(284): unsure at all n locations
tggaccgctcggccacagtgcgcggtgactcaaggcgcttaattcttgctattgggtgatttatggcgatgagaatgggtgggcggtggccggctaccatcgtgtctctggccgatcaccggcatgggggaatgggctgacnaacggggcccggcttgtancgaaagagccggtgcgagggagaaagggcgaacgttgcttatgggtggggcccggctttctagggagagccttgcaccacggagatgggctgcgttgtccattaagtgggggaggaacctggg

SEQ ID NO: 66936 - DNA, 206 bp, Zea mays
ttcattcctcaacatgcaagagcagggcttatcaagtggcttattgaaaatatccgctaattgatcttccgacctcactccttcttaaatgatatcttctttagcaacaatatctctaatgaagtgatgaccgatatcaatgtgcttggtgcgagtgttgtacaagattattatcatatttaacagcactctcattatcacacaac

SEQ ID NO: 66937 - DNA, 338 bp, Zea mays
tcttctgctaccaagcatacccccagcaccgctgctgacatggactcatggtacatgcacaatggataatggatgtgactgtctaagcttattacctaaactatgtaacacggtgttacctgaacaagataattgctgtgaggaaacacccctaccgtatgaactgaatgcgtgagctgaatgagcacactgaagatacgatttactctgcatgacactgtttatatatcaaacctgatattattgtccatatctgacagacatatataatcaactcgacgcctaccgctgaattccgtacactgtcgaccgaataatcatgactgacaactaacgac

SEQ ID NO: 66938 - DNA, 446 bp, Zea mays
  unsure (1)..(446): unsure at all n locations
agcttatgaagattcttcattccaacatggtctattctgcggngccagagccaacccatgttagtcttagcgattaagcaagtatcgagttcagctctattgaaatcaactaagtatagctgaccctctaatactcccttaaaagctactgaatcatcacttcttctaaagacagtaacacctgtatccgtgaaaagacagatgtaacccattttacataattgggaaacagaaagcaagttgtaatctaaagaatctacaagaaaaacattggaaatagagtggtcaggtgaaatagcaattttacccaatcctttgaccaaaccttgatttccatccccgaatgtgatagctccgtggggatcttgatatttctcgtaggaggagaacattcttttctccccagtcatatggttggtgcacccgctatcgatgatccaacttga

SEQ ID NO: 66939 - DNA, 479 bp, Zea mays
gggagaacacgtgataggtgtgactaatgtgcatttctaataagatagaccttgtgcagctagtcaagcaggttaacaagtgggaggagcgcatcacagcaagaatgtgatgaccacttcaagacccctggagttactacatatggacctcttcggacccgtcgcctatctaagcataggaggaagtaagtatggtctagttattgttgatgactatatccgcttcacttgggtattctatttgcaggataaatctgaaacccaagggaccctcaagcgcttcctaaggagagctcaaaatgagtttgagctcaaggtgaagaagataaggagcgacaactggtccgagttcaagaaccttcaagtggaggagttccttgaggaggaagggatcaagcacgagttctccgctctctacacaccacaacataatggtgtggtagagaggaagaacatgacactcattgatatggcgagga

SEQ ID NO: 66940 - DNA, 322 bp, Zea mays
tacacggattaaacatcgtttatcattgtgcgtcaagagactgatggggtatggagattctctggttgtcatcactcagataaacaatgaatgggattgttcaagtgattcaatgggaaaatactgtgccgtcgtccgaaagctataagataaattcgagggtctggagtttcatcatatataaagagatcggaacacggcggccgatgtactgtccaagctcggatccggtcggactcaagtcccgcccggggtcttcgtgcaagaaattctccagccgagcatctctaccgatcaaatataagagtgcgacatcatatat

SEQ ID NO: 66941 - DNA, 406 bp, Zea mays
  unsure (1)..(406): unsure at all n locations
cgcattgcatatntaaattccttggattgcatctagggcttgtctaacctagatgagataaccgccaacaaagcgagtgaaaaagcttaactctggtcaaacctgacaagtcttagttntaagcttttagcactctaaatcttactttctatgcaattattggttcttgaaatgtgcatgaggtactgcacttacggggagtattcaaaactcaaatcacttcatgaaaaccccgagtgcacaccaaaatgcaaatttcaccatttgtctatattctctaaaaatatctagtctatggcgaaatatttttgaaaatatatgagggtgccaatacctgtcccaacaagtgttatttngtgtgattataagttgggatttggtttggttaggagttagatagaaaaat

SEQ ID NO: 66942 - DNA, 174 bp, Zea mays
aacccagagctcaacactagcgcctagaacaaaaaccggtaacaaagaagcctcaagcgaagctacataaagaccacaccctcataaaaacaatagaaaaccaacaccgtctaataaaataacttttacacaatgggtatcacaagcaccctattgaaggcggaacaagtcaaa

SEQ ID NO: 66943 - DNA, 144 bp, Zea mays
cgaccaactaaggattcatgtgtgagcacaatttctcaaaaataattgacatcaaggaaatctcaaaaaactaagtgctggcaataaaactcctaacaatgaacaagttaaatgacaaagaggatacagctacagtattcattt

SEQ ID NO: 66944 - DNA, 360 bp, Zea mays
tcacctgcagctgcagccctcatggcgtgcctacattttttttcatgaagaaatggccgcgccttacttcgtgacggcagtcagcctgtacagccacacgcttagattgctgatccacaccgttcttctaggtcgaggcgatgaacctgttactcggcgctttcacatccatggcgcgactgcatgcggcttttatccgctcgttgccgtaatccttctcgagacgcaacacaccctggcacgtgctataagcctgctgcagattctgccgaccaccatacagatgcgcgacgatcgcgcaagtgtgtgggccgatgctggccgcccacttgcgcacgcgctggggataccaccctctta

SEQ ID NO: 66945 - DNA, 455 bp, Zea mays
  unsure (1)..(455): unsure at all n locations
tgactcaacttggattgcgtagctcacgaggagctntcctatttgctgcgtcagcaaactgtcactgaactgcccgcgcgggttgctgtcactagtctttgcacgaggcattcgcaatgaataagatgacgaaccatcctttgcgtgcagaacccctacgtcgcaaactttgagtgcggcatactgagacggtctctgtcccaacattatgaccagccagcaaagtacgtattcngcaatggccacctcgcctcgaccatatgcgccgtttaacgcatgctgtatcgcctctagttctaccgatgtaaacggccccttgaccgcgtccatcgttgccgtcgaaacgcacttttgattgcccttcaccgcatttgcggaacaaggcaatgacccctcagcgatgcctggtagcccatgcatgcattgtttatactacgataaagccgcatacattc

SEQ ID NO: 66946 - DNA, 319 bp, Zea mays
  unsure (1)..(319): unsure at all n locations
agcttcgagccttcgaactgtgttcttattttttcaagctctcggtctctagccgtgctacttttgtcaatatgaccaaaaatgacttgagagtcagntttaaggatggcccttcttattcctattgcctttaacttccgaagccccaacagaagtgctacgtattcaacaatattatttgtacaactgaattcaagctttgctgtataacatggtatgactttagaaggggcaactaggacagcagccgctcctgcaccgaaggttccccaagaaccatcgcagaacactatccaagcttcggcgtctttatttggtt

SEQ ID NO: 66947 - DNA, 333 bp, Zea mays
  unsure (1)..(333): unsure at all n locations
cgtggagataatgaatatgctgatctattatctaagtcagcagcacaggggctgccattaccttctaaagtattattctgaacaataaaagcaccttctcgtgagcttcttgaaagagcagtcctcaacatataccctgttatagggaggactggagaactgagatcatctctttcctccagggtagctttctttcatatgacgaagcttataacaggaggatagaggcaagagctcgaccatatgttataatagaaggggaactatacaagcgtgnggtctggtctccgttactcaagtgtttatccagagccgaaggtatagaattgatga

SEQ ID NO: 66948 - DNA, 270 bp, Zea mays
  unsure (1)..(270): unsure at all n locations
gagaaagacaagatttgtagcgcatgccaagcaaggaaacaagttggatcccatcatccacacaaaaacatcatgacgaacgatatgccactgaagctcctacacatggatctattcggcccgaatgcttacataagcatctgcgggagtaagtactgtctcagtattgtggaagaatattctcgcttcacttgggtattctttttacagganaaatcttcaacccaagagaccttaaagggattcttgagacgggctcaaaatgagttc

SEQ ID NO: 66949 - DNA, 385 bp, Zea mays
  unsure (1)..(385): unsure at all n locations
tcggcacaaagacanatctcaagatgaagggttgaaccaacttaaagatgaattgacttaaagacccatgatgttttatgtcattattatagtcgaatgtaaaggacataaatgtaattatgcgcaggttgcatcctgtgcctataaatatgtgaacagtataccggcactggtcacgagatcctgtaatcattgacacgtcccgcttgaattattgctttccgccaatgcgaacgtataaatgtgcctaaatattatggtttaatacttgtatattcatataataaaacatgtgaatatatcttatactttatatttcatttttcaatgtttgtggcttacaaatatggtcacgaacgtgaaatcttcgtgatactttacttat

SEQ ID NO: 66950 - DNA, 392 bp, Zea mays
  unsure (1)..(392): unsure at all n locations
cacttctcaaccttcttgngctcattatatattcttcatattttataattggctcaagtcataattttaaactttccatcccctttntcttattttcttaaattttgctcatgggcttacttatggttctcattagggttgtacattcttatctttttaaaagactcaattgttttgatcatgatacttctaagtatatactcggtgaattctttattttttaagttaatttgatgctcatgcttactttggttcacataaaataatggtttttgggttcgtatttgagagaaaccctangtgacactggggtgtcacagcgagcatgcgattcaacggcgaactgcagcatggaacgatgtcctgtctggccgagcttaataaagcgtgga

SEQ ID NO: 66951 - DNA, 398 bp, Zea mays
  unsure (1)..(398): unsure at all n locations
aagctatctaagggctnggattgaactgatgatgtcatgaaaggggctggccacagtggttgctctcgggcgacactggcatgtcgcggtgaggtcgccggagctaaaggttggctcgggaaagtcaggcgaggtactgatgaggcaactgggaaggcagccgagcactggggcaggctttatagccgtggcgtgggcgtggtcacaggcggccgctggcgcgcggtggttctcgcacgggcgtgctctgagcgcgcccccggttatcagcccgcgtctaacacgtggaagctcacttctgccatggttcaacggcggatatgagcaccatatcgtgcgtatcttggcaaagtcactgtgtacggtcgcttccctgctccatatcctacacttttgct

SEQ ID NO: 66952 - DNA, 342 bp, Zea mays
  unsure (1)..(342): unsure at all n locations
cgtgttcctgtagccgctacttagtttagggggacctncggcgggaagcgatgaagacagtcttaaaggagacggcggctgtggaggggtatattaatacgaaggggtacacaaactttatcaaccgcaagaaaacaaacggttacagagctcggaagaataatagttccaatatggcgtggatgtgtgctgcataatactaaattggcgatgtgcagctgcggagtaatatattggcgaagtcacgcgacgagagtgttaccaactcaaataactctgccagagggcagcacgaagtacaacccatctattgtgcacataggcttggcttggagccacaaa

SEQ ID NO: 66953 - DNA, 321 bp, Zea mays
  unsure (1)..(321): unsure at all n locations
ttctctatggtgggctctgaatgcccagttacagcatcggcctggctcattgtagcttcggcttctgtcagctatgtctcggtttcaacctgtgatatcgaagccttggcaatttttcctgtaatagagcttgtaagttttatcgtcttcagcacatctaacacactagccatcctttttctcttgnggttgctgccagatcttattgtatctttggcgcctccactcctacctgaaggcttataatatctgatgtttttgtcttctttggtctcgggccttcaaatttgtcagccttctgcattgcagcctgctctttaa

SEQ ID NO: 66954 - DNA, 368 bp, Zea mays
  unsure (1)..(368): unsure at all n locations
agcttctaaaggagaacacatttngattttttatgttcattttgagaaagacaggatctgtagcgcatgccacgcaagaaagcaagttggagctcatcattcacacaagaacataatgacgaccgacaggccactggagctcctacacatggatctattctggccgatcgcttacataagcatcggcgggagtaagaactgtctaattattgtggatgattattctcgcttcacttgggtgttctttttacaggaaaaatctcaaacccaagagacctttaagggattcttgagacgggctcaatatgagttcggcttaaggatcaagaaaataagaagcgaccacgggacggatgtcaagaactctc

SEQ ID NO: 66955 - DNA, 351 bp, Zea mays
  unsure (1)..(351): unsure at all n locations
ttgcttgcgagtgatctatgatcgttggctgccaggctaaacatggtatctcctctgatgggatanatgatcaacctatatctacgtgtgtgcggccggtgtatgtctcgagctcgctgataatatcagccttgggatactatctgactggctgagctgcagacctgatacaataaggtatgactaatgtggaccgccggatgaccgatctgctactgtctttgtgccgtacccgttcacgtggcgctcatactaatgagcctctctgctcataataaattaactctgcgccacctcagctcatgctgggctggtcaccttacagatatacccctccttctacgggtaatg

SEQ ID NO: 66956 - DNA, 460 bp, Zea mays
cacctgaggcatgcaagcttaccgcatttgaagcatgagcgcttcttctttgtcttggtcttgcttggctgtcccttgcgacctttaagcgttgtcttgaagcgcttaatgatgaaggccatctcctcattatttagcccggccgcctcaacttgcgccaccttgcttggtagcgcctccttgctccttgttgccttgagagcaatgggttgaggctcatggattggaccattcaatgcgtcgtccacgtaccttgcctccttgatcatcattcgcccgcttacaaattttccaagaacttcttcgggcgacatcttggtgtacctaggattttcacgaatattgttcaccaaatgaggatcaagaacggtgaaggaccttatcattatgcggacgacgtcgtggtccgtcatcgcgtgcttcgagactcttatttgtgatataggcttcacctgtgaag

SEQ ID NO: 66957 - DNA, 467 bp, Zea mays
  unsure (1)..(467): unsure at all n locations
tagaatctagtgattatgctacttgaataatgaatgtttctatcctggataaaagtgatacttctttaccaaattgaattgagttgtagtagcatacttcatgagaaactcattctcatacatgaaactacatgtgattactaagagaaagtgttagtctcaacataattaagatatataaatgggctcaccctatagatgtgcatcaagtatttgaatgacttggttagatgcattttatcttatagacaaataggggaattcattgaactcttgatcaacgcatataaaattttcaataatcagcttatgtctggtcttctcaaaatgaaaaaggtttagaatacttataaccacacaactgatngatttaagatcttactgtctaagtgggtgttggtattattgacatcttctntttcatatgagtgccctccctttatagttgtattttttaaacttatgga

SEQ ID NO: 66958 - DNA, 297 bp, Zea mays
ttcttgtcctatgacggagcattctctcttgtgttctctctaacgaaagaagagtgagattgtccccgtctgcgacgatgaaccaaccgcgctcggtgaaaaacctcttcagcgggagtctcgccgacgaatgaaccgactctgaaatattaggagacataatgaagcctgagaacgcgacccggcgcaacccgtgtcgcgagatgagatctcggatggggtagtaacatccagatgatcaagtcttcttggaataagggatttccgaccgcgccatcacctgcaagctcatgaaca

SEQ ID NO: 66959 - DNA, 407 bp, Zea mays
gagcggcgcggcgaagagaggggagggagagagctgatgtgcgggacccacgcggtagcaagacagcgatggcgtgcagtgcacggtgagaggctgacccgccgggtccacaatcagggagaaacccgcgtagcgtgcgcgtgggagggatgcgctgacacacaggccccacccgtccgaggcggtgtgaaagacatgggccgcgcggtatggaaatagaagagggccgacaacaagttagctggcccatgaaagctcatttccccatcttctatttacacttactattggatgtactatagcctcgttgacgttcatttgcaaatccaaacatcattccaaagtacaactttggggcgctgtatatactggccaattccaacaactgtgatgaagaaatctaaatg

SEQ ID NO: 66960 - DNA, 392 bp, Zea mays
  unsure (1)..(392): unsure at all n locations
gatttatgctcttactttggttattacgctccacccggagtgcgtctaccagtgaacaacatgccagatttttacgcagtgtaacgaattgcataaatacctacaccatatagtataatttgtatcagtatatatcataaactagatttaatgttgttagctgcatggctggtggagggatcttatatttatgaaggaaataaaatattaaatacgatnttttgtttctatgcgtgtaatttatttcctttcattgcaaattatttttcatcataaattcgtgtgcatgcatctggtaacagatttttacgcagtatatcgaattgcatatatatttacacagtgtagcatatttagtctcaatatatatcataaaaatgggccttacgtgt

SEQ ID NO: 66961 - DNA, 490 bp, Zea mays
  unsure (1)..(490): unsure at all n locations
tggaggcgtctatgggttggtcgactggggtagactcctacttctnttcttccgtcgccttgaatgcgacgggttgagcttcggatgtagatggatcatcaagctcgttgatctttctcgagccttcgatcatgcattcaaaacttacaaaatgcccgattacttcctcgggggtcattttagtatatctaggattaccacgaattaattgaacttgagtagggttaaggaaaataagagatcttagaataaccttaaccatttcgtggtcgtcccacttgacgctcccgaggttgcgcacttggttcaccaaagtcttgagccggttgtacatgtgttgtggctcctcccctttgcgaagccggaaccgaccgagctccccctcgatcgtttcccgcttggtgatcttggtgagctcatctacttcgtgtgcggttatgagcacatcccaaacctccttggcgctcttcaacccttgaactttgtatac

SEQ ID NO: 66962 - DNA, 450 bp, Zea mays
  unsure (1)..(450): unsure at all n locations
gcttatataaagagcagtatcagtgtcttaccatatctngacatcattgcatataacaaaattatcagagtttatatctggggggtaacaagatcaatgaggtagatggtcttcacgggcttctgaaggtgcatctaatgaaaaggtgaagtcaaagcttggtaccgagattattagagaacatatcggtcacaacgttcccccacaataacatcacgcagcctgtggcatatccgattcccctacagaaagaaatgcagagacaatgaataaaatattagatgattaaggaatgaaggaatccccaatattgtagcagtacctcgcagcaatgtcctaaaggcgaacatctgccaagaaaacactacttctacttgatttccgtgcgttgcaagagaatctgacacacctgacgacatattacttgtaattgggggaacggacatgttt

SEQ ID NO: 66963 - DNA, 115 bp, Zea mays
ctatttcccgagagtacatgggtcggtttatataatttcagggcatgaatgttacttctctgtacaagttgtggactgccggttgatatcgtagaagccgaggggctcttatgaa

SEQ ID NO: 66964 - DNA, 315 bp, Zea mays
cttggaattgccaaccgacttaaaagtagaatgaccttttagaccacaaatgtttgagtcattgatgaaaacttttatgaggggcatgattgggattcctcacaagctgtgtcttgtgcctataaatagtgaacagaattcctttactgttcacgcattcatgtaattgcgatcgcatcactcaggaattattctttgccaaggcagaggtataaatgtatctaatatttgagtacattcaatcgatgtaatataaaagcgatattggatttatatagcttgatgcctctatctcgaatattttattaatctatt

SEQ ID NO: 66965 - DNA, 404 bp, Zea mays
ttgttccagtgcacccaggatcacgaagaatactcttatgcgtatgtccgaaggttcttacgactgagggcacaggcgccaacggtgcccaacgaaattgttattgaggccatgattaaggggctatggacaggacctacagcccaatacttcgccaggaaaccccctcagaccctagagaaaatgcttctaaagatggatgaatatatccacgcagataatgactctctacaaagaagggaggaagcttacaggttctctgaaatgaccagtggcttctgagggagagtccaccctatacacgtcatatcaatccactctactcagaatgacgacaggggaagtcatcaacagaggccacaatatctctcccatgcttctgggcagcaacagagctattcact

SEQ ID NO: 66966 - DNA, 183 bp, Zea mays
gatatacgactccttcatggtcttaaacactctcttttctttgtgcacgctgtgcattggccttacctatcattataacaagatgttcctatgaatatgccgtatcatctacatcgacatcatcggcatatcacatcattaaaatcagttatgattcttaccttagcatatccctttgacatg

SEQ ID NO: 66967 - DNA, 326 bp, Zea mays
ctcttggggttcatcgtctccgagcggtgcatcaaagccaacccggtgaagatcgtcgccatcaccagcatgtggcccatcaatgacttgaagggcgtatatagggtcatgggatgtctcgcggctctgatccgcttcatctcacgcctctgcgatagatgtctgcctctgtaccgcctcttaatgaaggccgagagcttcacttggacccctgatgccgaggaagccctcgggaacctgaaagcgctcctcacgaatgcgcctatcttggttgccccagctgctggagaagccctcttgatctacgtcgccgcgaccactcatgt

SEQ ID NO: 66968 - DNA, 469 bp, Zea mays
  unsure (1)..(469): unsure at all n locations
acgagcctgcttctgacaatgtaagaatctggtcgtctgctggactagcatgaagttgtcaagaataaaccgtcttttaataaaagcggtttgattgggggaaaccatattttgcagccggtctgctaacctgttagccaacaatttagttaccactttcgcgaaactatgaaccagacttattgggcgaaagtctctcacactagtggccccctccaccttgggcagaagagtgatgaatgctgaattcagcgaacccaagtttctgaaatttctggcccaaatgcagtgaatggccgccataaaatcagccatgattaccgaccaacaactcttgtaaaatctaccagtgaacccgtcaggacccggngatttgtccgaagggagagccttaattgtattccagacctcctcctccgagacaggcgcatccagggcaacgaggtcaanagatggcatccctagagca

SEQ ID NO: 66969 - DNA, 476 bp, Zea mays
  unsure (1)..(476): unsure at all n locations
cttaatcaccgagctgcagctttaaggaaacctgatngtttgctttttgcatttcgaaaaagatagaccttgtgcagcttgtcaagcaggtaaacaagtggggggagcgcatcacagcaagaacgtgatgaccacttcaagacccctggagctgctgcatatggacctcttcggacctgtcgcctatctgagcataagagggagtaagtatggtttatttattgttgatgacttttcccgcttcacttgggtgttctttttgcaagataagtctgaaacccaagggaccctcaagcgcttcctcaagagagctcacaatgagttcgagctcaaggtgaagaagataaggagcgacaacgggtccgagttctagaaccttcaagtggaggagttccttgaagaggaagggatcaagcacgagttctccgctccctacacaccacagcataatggtgtggtagagaggatgaacaaga

SEQ ID NO: 66970 - DNA, 412 bp, Zea mays
  unsure (1)..(412): unsure at all n locations
tccatcaaggggagccaacagagatctaggaacccaaatgtcctttgngtcagcactaagtaaactcattacctttctacacaatgtggatgttgggttgcctacttgcatgaaaattagttgactagctataagtgggatagctaccaatgggacaatccttgcattgatgtcccttctttctgcatatgtagcatacgcgatcttcaagtcttgaagatatcttccttccttgattcttgcttgctacatgggtaatgaatattttctcttgcaacataatgcctctttgtgttaaatggggacaagacctaattaaacggcgcttctgtgaacatttaaacagataaatctatcttgttataatcaagaattttaataaggacatgactaatcgaattccctttcaaca

SEQ ID NO: 66971 - DNA, 438 bp, Zea mays
  unsure (1)..(438): unsure at all n locations
agcttctaaatggagaacacactttaggacttatctatgntcattgtgagaaagacaggatctgttgcgcatgtcaagcaaggaagcaagttggcactcatcattcacacaagaacataatgacgactgacaggccactggagctcctacacatggatctattcggcccgatcgcttacataagcatcggcgggagtaaatactgcctagttattatggatgattattctcgcttcacttgggtattctttttacaggaaaaatctcacacccaagagactttaaaaggattcttgagaagagctcaaaatgagttccgcttaaggatcaagaaaataagaagcgacaatgggacggagttcaagaactctcaaatagaaagctttctcgaagaagagggcatcaagcatgaattctcttctccctacactccacaac

SEQ ID NO: 66972 - DNA, 199 bp, Zea mays
ttcggcgcagtctgttctttcattgggacaagagacttagtacatgagcatattgcctttctggtatgggcgctcgcagagaactgtgaaatgccacatgaaaccgtaaaagaggccgcgaacgaagacttatcacgttgaagtacacttctatatttggagataatatctttgagcccgatgatgactggttaaaagt

SEQ ID NO: 66973 - DNA, 435 bp, Zea mays
tatggaaaatcatcaccataaatatatttattatgtccattcccaccggacatcgatactctagaggttaagctaatctaatagcaacacggctgtgattccaattgaaaggatcacgaatccaaaatacgggggtgaattgtgctctttctaaaaatcaacaataattaatacctattcagaacccaacttcaccccaacaactagcagtaagagaataatactagaaatacaaaaatgctaagacaatacttcaaatacttgctaaacaaatacacaatgtaaaatgcttgaattattgcggaatgtaaagcaagctttagaagacaccttcaatttttcctgaggtatcaaagagtcggcactcatccctagtcctcgttggagcacctgcgcaagggtatcgctccaccttgtactcataagaaccaagtg

SEQ ID NO: 66974 - DNA, 198 bp, Zea mays
atggataaactcaacacaagagaaggcaatagcagcacaagcactaggttcttacctagcaaccctacatacgtgaaagacaaacgagcgctaaaatagacaaaccacataatacggactaaagaacccatgaaccttcatgcacaatatatatcgaatgacacggaaaacacgcatggatgcacaatgaagtataaa

SEQ ID NO: 66975 - DNA, 262 bp, Zea mays
tgagtcaatgttgtaaacttttatgaggggcataattgatattcctcacacgctgtgtcctgtgcctataaatagtgaacagtattcctttactgttcacggattctggcaaaagtaataccaatctttctggaatcaatctttgccaaggccaagggataattggattcaataattccatatataaagtaaatataatattcgtgcttgatcatttatccttcatacgcttcatttatgttacttaaatcactcataaaat

SEQ ID NO: 66976 - DNA, 292 bp, Zea mays
  unsure (1)..(292): unsure at all n locations
ctctgagaatgacctgcacaattgatggtattggtctatgaataaaagccaccttatttcggctgaaccaaatagaccaaaataaagctgatactccagaaagtaataaatttttgtgtcctggacccctattgctttcccaagtcccaataatatgattaatgcttactgacatgtctatttctaaggcaaagaaaataattctctatatgtttttggccatatagcgggcaaaaaagagataataaatactctcattacggntgcaaaaactacaagacaagcaaccttt

SEQ ID NO: 66977 - DNA, 444 bp, Zea mays
  unsure (1)..(444): unsure at all n locations
ntgtgttgggtttgtcgttatagctttctacaaccgcaattgtctttgagctctgactatatgttgtaatcatcactgaaatggctgaagagaagaaaagtgtagatccctcactggtttctacgaagccatggagaggaccaatgttgagaaaattactgatgagatgttggctagactgtctggggactcaagtgatagcgagagttttgatattgagagtgacaacaacgatgccgaagatcgaccatggaggacaagtcatgctgtgtttggaaaatccaccgttaagaagggatagaatgaagcaatgaaggacacaatatttcatgatatatctattgtgagggttggaggagagaacatttgtcctctttctgaagctgatgaagtgggtgttaagggtttatgaaggctggctttggttctctactaaatgctggt

SEQ ID NO: 66978 - DNA, 350 bp, Zea mays
  unsure (1)..(350): unsure at all n locations
gagaacacattntatgacttataaatgttcatttcgagaaagacaggatttgtatcgcatgccaagcatggaagcatagtggcactcatcatccgcataagaacataatgacgaccgacaggccactggagctcctacacatggatctattcggcccgatcgcttacataatcatcggcgggagtaagtactatctaggtattgcggatgattattctcgcttcacttgggtattctntttacaggagaaatctcaaacccaagagaccttaaagggattcttgagacgggctcaaaatgagttcggcttaatgatcaagaaaataagaaacgacaacgggacggagttc

SEQ ID NO: 66979 - DNA, 345 bp, Zea mays
tgcctcatggcaaatcgcgccgcctgggcccatcgctcgatggctacctgcgcggaggccagccaaccggcatggcgcgccgcggcaccagctgcagaagcccgttccgtcttgagggcctttctatgggccagaccggccaaaccctgcctccgcttgctgaaagaaagagcacgatcaagacacacagagaataaaccaaaacagaggtatcctcggatacttacccactccggactagggccaatcatgcctgcggggaggcccctctggcctcggttcccgcaggcactgacgagggttgccctactgacgactccggcgccgaccccacctctggcgccc

SEQ ID NO: 66980 - DNA, 438 bp, Zea mays
  unsure (1)..(438): unsure at all n locations
tgcaagcttggtttcngcaagaacacactgtgatgttgcatagattatcctgctttagctaaacctatggtacctcttcttaacaatcattgataatctccatccattaccatatcttcgaggaatacaggaaaatcgaatgttccccttcagttaccaaaaaacaaatgattgtctttgagagatacagcgaatcgagtttttagttgccctttctaaataacagtgcaaagtactagttaagttgtaatatcttatggtagaagaatcttccagtgaaccatagtgcaaccttgcattcgtttcttggtttggctgaaggttactggaagttatataatctagataattcagataactcatcttccaatctgcctgaccctgtaatgaatgtgcaataaagataccatttttacccaccttaaaagcctctcatta

SEQ ID NO: 66981 - DNA, 277 bp, Zea mays
  unsure (1)..(277): unsure at all n locations
gcgatgaagactactaacgccctnggactataatataggatctatgcacataatcaatgctgaattcattgagttccgcttccactatccaacctttcgtagcttctctgttctcatgataacttcaaaagctgtgatgaaaggacaatatatgtatgctttaaaatatgccaacttcctgatgcattatacacatcaacacttctcaatctgtatggtttcttgataactataactttggacaaatatacagggctggctttgattgccctcattt

SEQ ID NO: 66982 - DNA, 353 bp, Zea mays
  unsure (1)..(353): unsure at all n locations
agcaagcctacacggggcgggccttatcgactcatacagagacactacaccgagactcccttctcggcaagacacccgcccggtctcgtntttatcattttcaatcccacaacttggtacctgacagaagtacatcttatccgatgttgtacccctcacgaccatgatggatccccatcagtttatttgaaacatctattctctgaacatcactttgctaaaccaacctttgtttctagcaactagctaaaatcttacacatagaatcatgagggtaacagtccaggaagaagcccaatggttacactcactcttccctatgctcttcaggaaagagctaaaccaagaaggaa

SEQ ID NO: 66983 - DNA, 395 bp, Zea mays
  unsure (1)..(395): unsure at all n locations
acaagaaacatactacaaagagcatagtctgattctagcagatatacaaatgaagctcgtgctacatgatgagatgcaaagtagatatgatacataaagaanaataaaaaatgacatagaaggacgaagaagcacaagatgcaactaaaaacaaaatagggcccctcagctaaaaaggaaacacacatccaactcccctcagaaatgcacaanagtaaattgatcaaggggtttgatgaggatatctgtaagctgtctatgggtatcaacatggcaaatatatgtcccatttctcataataacctatgagatgaaagcagacatggatgtgcttggtcttagaatgtaacacaaggtttttggcataactaatggaactagtgctatcacaaagc

SEQ ID NO: 66984 - DNA, 389 bp, Zea mays
agctactataatatcatacaacgacaagaaacctccattttctattattacatccatatatcggctatacaccatttacaacaactgaatatgcggtaaacaagccaaatcactaaattaatcaaacttgcatcacaattcatgaaatttataccagtcactaagaagcacaccaagagtcacgtacataaacaacccattagagaataagagctacagatccaaaaaatacaagcatatacatcttcttcttcctattaaacatgatttaattagtccaccaagaaaacagtgaacaacatatatgttatatatgtctacttgatggagtatgacaacatctaactaacaaaacaagttcataagtgttgatgttataacaaaactat

SEQ ID NO: 66985 - DNA, 471 bp, Zea mays
  unsure (1)..(471): unsure at all n locations
ttgtgcagtcctgtcctagacaatggtcttcttgtttattccttgctgaatatggtataatacctgttattatacagctctgggaacatctccttttgaagtcttatatggtcatgctccttctcagattgggtaggattcatgagagcagtgctcagtgccagagttcaagacttgttgtctaaccggcaacatatgttacaacaagtgaagatgcattngcaaagggcccataaccgtatgaataagcaggctgacaaggtgttggaacttgctctcaagtgcaaggggatccaacaaagatgaacaatgacgtaagcagggttctcgcgcgtgtgggtaatagctctgttaatctggactctcacgggcactgtgcgcgggtatttataggtacctgagcgcccagcgcctttgtgtatatgacgcatgtgccctcagctacctaggttatccccagaatattcccat

SEQ ID NO: 66986 - DNA, 249 bp, Zea mays
ctcagttaaggagacctttgatttatttttttgaaaacagggtggcgagtagcagaaggaatgtgtctctctacaaactttacaacgactgcttgagtctccatgattatcagcgaagctatttgctcacggagagactgctgtgcgtgatgatactctgtcactggattctttgagaaaaccaaaccaagacctaaggatcttggacgactctagagtcgatgagtctgaaaaaaacgcacgacgagt

SEQ ID NO: 66987 - DNA, 349 bp, Zea mays
tgctctgagatgctctaaccatcgctgctgggagatgcaaattgcctgctggaaaataaacaattaataatgttgctttggatgtgtcattcaaacataagggaataaccatataagatgaatatggacacataattattgtatcttaaagtatgaaatgtgcaataccttctctgcaaaagcaccttaagttatctcacgacttattttagatttccttcatgtttcttccccttctacaatgacagagaacaagaaagacaattgaattcatagaaatttgagatagctacttcttaatacctaaatacataattgagactacgtcaaaccagtgataataacgcat

SEQ ID NO: 66988 - DNA, 440 bp, Zea mays
  unsure (1)..(440): unsure at all n locations
tcttatcttgcccaaccagattccacgtcactatgtcagtcactgttctcatctctagtgttatttatttgtccgtacccaaactacacccgccgaatggattggctagagtacggggctacccatttattcctagatatgggtaggataacaataagtattattcacttatctctgctcatgtgttacctcttcttttttctgttttattaaagataaagtaaaattatttataagtgggatccaagtcttgattgttgactccacatttacacctacataaccaataaaacatattttttatattttattaaaataaagntaatatataatgtgatatatagaaagtagcaaactattctagccgcagaactagtgtcacccgctactggaatactggatttcttcggtgagctatgacgtgaagaaaggaaaaatgc

SEQ ID NO: 66989 - DNA, 353 bp, Zea mays
agcttcataactcctagtggtacctattgctaccttcggatgcccgaggggctcaaaattgctggaggaagcttcagcagaatgactgccaaggttcttcactctcaaatatgtaggaatgtgctgacttatgttgatgacatcatattgaaaagcacaaaacaagaaaatcatgttgccaatttgcaagagacgtttgccgatttcagacaaactggtctcaagttgaacccagaaaaatgtgttttcagagtgaagaagggcaagtttcttggttgcctggtatcaacaatgggtatcgaagctaatccaagcaagatcgaagctatccttcggatggaaccaccaaattc

SEQ ID NO: 66990 - DNA, 474 bp, Zea mays
  unsure (1)..(474): unsure at all n locations
actagcttctcttgaactaccttgaactgtctatgaagaataccttgcaaggctgtgctctctgccatcccagtatatcttcttattctctcaatgttcctaaatggagtatcaaggccattgacaaaatcatgaggaacttcttattgaaggacctaaaggaggccagaggaggttgttgtctcattgcttgggataaaaatactaagtcttcataattggaaggcctatgcatacctaatttcctcaccccgagctgggctttacaaatgagatgtctatggcttcaaaatacagtcccttcaacatattctcaaaagctagaatctnttttcagactgctgtgtctacacatattggtgatggagccacaacccttttctggaaagataaatggatcatcggtgttctgtggttgaggtagcatcttcagttgctgctgcaatctctaaaaagtttcagagcatacggact

SEQ ID NO: 66991 - DNA, 406 bp, Zea mays
  unsure (1)..(406): unsure at all n locations
agctngctgctatcgccatagccgatatttatttgcatattgctcttcagcgtgctgcccgtataaaatgcgtcgtccacgtgttgacggtcaaagcccgacatctggccggtatccagtcccagcgcccggcaggcgacgatcagataggccgcctgcatggaactgttgcgaaacgctgtntcttcggcaagttgtgggctggaggtaaaccaactgcgggcatcaccgtggggaaacagtagtggtaaccgttcataaaattcactgtcccaggcgacaatagcggtgacgggcgcggtcagggttttttgcagattgccgctggaaagtgccgggcgcagacgttcttttccttctgccgngcgggtaaacacgatccgtgccagagaacagatagctgatg

SEQ ID NO: 66992 - DNA, 414 bp, Zea mays
  unsure (1)..(414): unsure at all n locations
ttgaacccagganatggatcaccaaattcttttgaagtacatctaccaagtaatatgctacaaatataatcaccaaacatatgttcagaagaaacaaaacagttataatacaatcttgatgtatccagctacaccatagtcacagagatggaggaatggttactctgccaattagaacatggtaatcaagtgatatgtgttatctcgccaaaacatatccacagtatcagagcaacagctctggtgtttgttcctacaattgaactatgtagcaatcgcaatcaaattacaaagcattctatttatagtatcacagatctgcatcttacattttgtagatttcctagaaaaatctttgcgttttttacaagtattgtaattcagtcaaatacaatgaanaccttcaccagaaac

SEQ ID NO: 66993 - DNA, 421 bp, Zea mays
  unsure (1)..(421): unsure at all n locations
agaagaggccggtctagatgcatgcttaattgctaagactagcatgggctggctgtggcatcgccgcttagcacatgtggggatgaagaaccttcacaagcttctaaagggagaacacgtgatatgtttgactaatgtacaattcgaaaaagatagaccttgtgcagcttgtcaggcagggaaacaggtgggaggagcgcatcacagcaagaatgtgatgaccacatcaagacccctggagctgctacatatggacctcttcggacccgtcgcctatctaagcatatgaggaagtaaatatggtttagttattgttgatgacttttcccgcttcacttgggtgttctatttgcaggataagtctgaaacccaagggaccctcaagcgcttnctcaggagagctcanaatgagtttgagctc

SEQ ID NO: 66994 - DNA, 385 bp, Zea mays
  unsure (1)..(385): unsure at all n locations
agcttgtggaggttcttcatccncacatgtgctaagcggcgatgccacagccagcccatgcaagtcttagccattaagcatgcatctagaccggcctcttcttttgcaaaatcaaccaaataaagtttgccgtctagtacacccttaaaagctagtgaaccatcacaccttctaaagatagacacatctacatttgtgaatagacaattatatcccatattgcataattaactaacagataacaaattatatccaagcgactcaactaaaaacacattataaatagagtgctcgaatgaaatagcaattttacctaaccctcttaccttgccttggttcccatcaccgaatatgattgaatcttggggatccttgttcttgacat

SEQ ID NO: 66995 - DNA, 367 bp, Zea mays
  unsure (1)..(367): unsure at all n locations
cacaactgtgatgttggaatatataaagactatggctggtaagaacaagaccttcccaagtgagcggctctcatatctatttgtgaggggggactcccattgatcatgtgccctgaatgcaagcagggaaagggcgaatgagctctgttggatgaaaggaaatgataaccaaagaggggtgttctcttataagtcctatgaacacaatcaaagtacatgcccttttgaaaatatgttcactgccatgtttggccttagaaacccacaacctcatgaacatactaacgaaacctactctatcgntttctataatatcaataatcttatgagattcatgtggctgtggaagcatcatgttgagatacac

SEQ ID NO: 66996 - DNA, 449 bp, Zea mays
  unsure (1)..(449): unsure at all n locations
tctaaaatgaaaaccgctgaagctgaaatcggcggagccgaatctatctgngctcgaagccgatgccaccgaagagtcgaacctggaaaccacaattgaggctattgacaatatactcctaaaaatggctgaggaggaagctaccgtggctacagtggatacggcaactgagaaggggaaagaacaaattaatgaaatctcggaagaagaagaattcaactttcaagatttgctcggacaagaattaacagacgccgaanaagaggagttgaaaaaatatgccatatcttgcggatacaaatcaggggctatgctatttagtgnggtcaacgaacggaaactaagatgccttctgaaccgcaccgaggccaaaattgtcagaaccctttccaaaagcattggcttgccgaagctagaagcggacttgtgtcgttatcaacgacaccaca

SEQ ID NO: 66997 - DNA, 485 bp, Zea mays
gatacttaagtcacctgcggcatgcaagcttctaactctacatattgaaatttcacatgtgtggggctgatccatttgctctggccttaatttctccccctttggcattaagcaccaaacgggagacctttttggccctttaacctcattgccttaccaaaatgtcaaataagaacaaaatggcaataagagcacaacaacgaacttgggacaagatacatttataccggaatgcagtggaagctctttctttgtccaagatcacttttccctttcaatattcctttgagactatttcaagaatactcaacaaacatgttagtctcaagggagtcaagttgtagctcatctccccctaaacatgtgcatcatttgcatatggacttgtgaggcgccgggatgacttgtacaacttgagcaccaaatgttagcaatttaaagacaatatagcttaaagtgacatgatcaacgacatagaacacatg

SEQ ID NO: 66998 - DNA, 361 bp, Zea mays
agcttctcacaattctcttttatatcgttgttagaaggctcgagctcctcaaaagacactcggaggtttttatacaactccttgaagacttaaacttttctttttctttgagcatgtaggcatcagcctcacctaacattctaacaagatcatcatatgaatagccatcatcctcaacatgatcaacatcatcatcatcatcatcatctatatcatttaaatcggtgatgatttttaccttggcatctgcctctgccatgaaacaatgaggggatgagaaaagtgaacgggctttcttgatggcaattccgacattaagcttggatgatgtggcatcatcatcatcatacaagctatcatc

SEQ ID NO: 66999 - DNA, 368 bp, Zea mays
  unsure (1)..(368): unsure at all n locations
aactcagcttgatgcattcatggaaagcggcggacgaagaatgtctcctattttattggctcatgccgtaccgacgctcggcatcacgagctgctcgggcggcttcccgccggtctctacgggcttcgcgaactgcagtacctgatcttggagaacaaccccatgggcggcgatccgctgcctcccgagctgggcaacatcctcacgctccatgagctcccgctggccaactccggctacttcggccccataccggacacggtaggtctcctgttcagcctcaccacgctgtcgctggagaacaacaacctcaccgngcggatcccgccggggctcagcctgtttatgcccattgaccacctcaacct

SEQ ID NO: 67000 - DNA, 423 bp, Zea mays
gctctacttaagactaacacgaatgatttggatacgctaaaatttgcaagggatgcctacacaattggtatacacccctcaattaaggatggacttggcttctagagagaagctaagaacttaacaagccataatgctcccattcccgccaaggagaaatggaaggcccctatggctagtaatgtgcaaaagaatcatgcttttatgtattatgatggaagacaaactaaaaatgcttataagagttataatgcttttgatgatattgactctcatgccatgtttgcttctagttcttcctatatgcatgggagatatatgtctaagagaaatgctattcatcatgtgtctagaaagaatgatattcatgctcctatgaaagtagtgaatgaaccttctacaacttattgtgctttgaatact

SEQ ID NO: 67001 - DNA, 207 bp, Zea mays
atgttctagctagctacatatgcatgctggtgaattgatcatctattccagacacgttgcagacagtggatacttgttactcaatgattatactggcacgcattgttgtgtgttttgcgggtgtatgcatagtagtagcacaatgcattggtctactgcatataatctatctatcatggtgcattcagttgcacttgcacctatata

SEQ ID NO: 67002 - DNA, 459 bp, Zea mays
  unsure (1)..(459): unsure at all n locations
agctggacattggattggttcccatgttggtaaccaatgccatccttaatgtcggggcgtctcccattataaaatatgctacgagcaaatttaaaattttcattttcgagctcatgctcagaaattttagtagttaatttagctatgtgatcattttggtggttaatcatggcaaggtgatcatccatagcttcaatattaacatctctacatctagtgcaaatagtaacatgatcaacagtagatgtagatggtttgcaggcattcaattcttctagcttaacatttaatttaatattctcatctctaagacaggaaaatgaatcattgcaaacattcaattnttcaatcttagaaaccaaactagcattctcaattctaagacttgaaatngagtcatgacaaatgctaagctccttagantaaatttcacatttttctacttcctgagcataagca

SEQ ID NO: 67003 - DNA, 343 bp, Zea mays
gtgaccttgaagatggcctgcctcgagtctggcaccgggtagaggcattcttctcagttgaggagactgcccccctccacgctcttgaactccacaagggggctgccccctgacctgaagaggaggttcactgtctcatcggcgcagtacatgacacgaagtgccaacatgttaacggtgaaccgtctagccagctctggcaccgcccacgaagtctcaacatccgagtacacgctccgtctgtggagatcgacgacggtgcgcgaatcataggcggtggccgccgcggacgatgtgggaagggaggcctcatgggatacgaatgatgtgagggatgaaaagg

SEQ ID NO: 67004 - DNA, 325 bp, Zea mays
tttagcacaagttaataaaaaattggttggtattgttgcgcaaaacaatttctaatcccaaattcttctttgaaagccttgtaccaatcttaatggccctaaattgctcgctcctgaagctgatctagggaagactacaccctctttttacctggatctagtaaacctctacctttgtgaatcatgttgtggcttaatataccattctctggatcctccatcagatactcgcccgttatctggtatctgctataccccgtcctaatattggatgttgatctccctaaatcctcttctgacatttctggggttttccccgatatga

SEQ ID NO: 67005 - DNA, 264 bp, Zea mays
agcttcaccggccactgacggagctagccgaatctcttgttgggctcggaggtggttggagtgggcttgccacagcggccgtatctctggcggcaatggccggcggaaatacgcttgccggagctaaagaaccggggcttgcccgtgagggtgaatgccgggccaaaaaaagtgcccccggggaagctttatatgcgccggcgggcacaggcgtgggcgtgggcgcgccgcggactttaacggacacccgggcgaacgcgcgcg

SEQ ID NO: 67006 - DNA, 475 bp, Zea mays
  unsure (1)..(475): unsure at all n locations
actaagcttcaaagggaaacacgtgaaggtctaactatgaactttcaaaaagatagacctgtgcacttgcaagcaggtaaacaggtgggaagctctcatcatgccaaaaatgtgatgacaacatcaagacccctggagttacttcatatggacctcttcggacccgtcgcctatctaagcataggatgaagtaagtatggtcttgttatagttgatgatttttcccgcttcacttgggtattctttntgcaagataaatctgaaacccaaggaaccctcaagcgcttcctaaggagagcccaaaacgagtttgagctcaaagtgaagaagataaggagcgacaatgggtccgaagtcaagaaccttcaagtggaggagtatcttgaggaggaaggaatcaagcatgagttctctgctcctacacaccacagcaaaatggtgtggtagagaggaagaacangacgctactagacat

SEQ ID NO: 67007 - DNA, 461 bp, Zea mays
  unsure (1)..(461): unsure at all n locations
agcttaagagactttnttcacggatcaagctcgttacgaaaaacgatctatgcttcgtcgccgaaggtcttcaagggagaagcggttttccgctgaagctggttgcatgaaatgaccgaaggttcctttccatgaagcttcgacagtataaaccgacttaaagatagaatgactttttagtccatgaaggtctgagtcaatggtgtaagcttttataaggggcatacttgtaattcctcacaggctgcgtcctgtgcctataaatagtgaacagtattcccgtggtggtcacgcattctggtaactgcaatcgcatattctggaattcaaccttttgccaaggcagaggtattattgtattcaatgattanaatatagaagtaaatataatataattcgtctatgaattatttaccctctttggaccttntattnntatttatgtcgtcttacaatatcta

SEQ ID NO: 67008 - DNA, 466 bp, Zea mays
  unsure (1)..(466): unsure at all n locations
caagacccgatcttcactagcgaggtgaatgtttatggattcactacatagcctttacaaagattctcctggtgtgtagctgtccgttaggtttcgccagtcgtacaaacacagtactcctccctaaggtgggtgtaacaccctgaatatgggggtataaaatttcttctctaaatgcctaccaaattcaggtgttacctcttatccctctatagacttcctctatcttcctttcgattagagttatgtcaattaggtgagggattaattatttattttgtcaaaacctatgtgagtcatgaaatgttgcatcatgtcgagccctaaattattctttttgttgatgcacatgtttgaattggtgtgaatttgagtttggttcgaaattgattngaaatccatagagaaaataataagaaaagcaattagaaattcggagataaatagaacacagaattcggctcgt

SEQ ID NO: 67009 - DNA, 371 bp, Zea mays
  unsure (1)..(371): unsure at all n locations
catgcaagcttggatggttcgaccgtgtccaagggcgcctatctttcttacagggacgacgatgggggtatttgccctatatatgagttcatcgacataccatataatggttagggctgtgaatccccattttctaatgtatgagacataaatatcctattactagtttcatatgatggaaaactaggagcaacagatttctccaacgcatgtgttaattttctaattgattcttctaaccctccaatctattggttcattggatcttgctgctgatctacataatgnttaatagattggatgtcgtccgggttacttatgttggggacttgaagtgaagataaaagagatgcgacatctgtctcttcatg

SEQ ID NO: 67010 - DNA, 214 bp, Zea mays
  unsure (1)..(214): unsure at all n locations
cgcactacggtaaacgaatactaaacgcttttgctcttgnccaaatggttctgacgaagagtagcttcatgcactaatgtcaacgccaccacttttagttgattaacattgaatgagatagatgattagctatataaatttaccaacgctaccaatttccaaattgagactcctatctattaatataaacacgtgattagcgcacataggacac

SEQ ID NO: 67011 - DNA, 440 bp, Zea mays
  unsure (1)..(440): unsure at all n locations
agcttgaagccatggtaagtagcatatgtcttaatataccaattgactcaagcctagctacgggtgcataagtttctccgaaatccaaaccttctacttgtgaatatcccttggccacaagtcgggctttgttccttgtcaccacaccatgctcatcttgcttgttgcggaagacccatttggtgcctacaacattttggttaggacgtggaactaaatgccataccttatttctagtgaagttgttgagctcctcttgcatcgccaccacccaatccgaatcttgaagtgcttcctctatcctgtgtggctcaatagaggaaacaaaagagtaatgctcacaaaaatgtgcaacacgagatctagtggttacccccttatgaatatcgtcgaggatggagtcgacggngtgatctcgtaggatggcttggtggactctt

SEQ ID NO: 67012 - DNA, 152 bp, Zea mays
  unsure (1)..(152): unsure at all n locations
ttatgtggaattggcacacgatatgatctctcttgngtgncttgcattgaatgctatacctcttgtaagtgtgttgtaagtgtgaaaacttccatgtcttgaatgtggggtgtgtannctctncntcactattctacttccttcctcttctt

SEQ ID NO: 67013 - DNA, 457 bp, Zea mays
  unsure (1)..(457): unsure at all n locations
agctntaaaggttaatcttcacctaaaagatagattatgaatgctcaaggcaaaggtatggaactagttgcttcaattggtagttgatcaatagtagttcctttcaagtgacattctttcaattggtaattatctattctatggaaagaaatgtcaatatgaatgttaaattccttttggcttaaatttgtaaattggtgcatattgttaattcactcctccatgtgcattaacttaaaaggaatttaacttatgcctttatgcctcataaatgatgatttgtttgcaattcatatctaaagatcatcattcattaaatacttccttgtactactaatatctcttttcaaagttctttttcaactagtattaaaaggaaaagagataacaagataaagaaggaagtctcctcanatgacgaanagaagaatactacgatgacaccatctcacatagt

SEQ ID NO: 67014 - DNA, 460 bp, Zea mays
  unsure (1)..(460): unsure at all n locations
cttcattccaacatgggcaagtcggcgatgccagagccaacccatattagtcttagcaattaaacaagtgtctagttcagcttgattattattaaaatctactaagtatagctgaccatctagcactcccttaaaagctattgaatcatcacttcttctaaagacagtaacatctatatcaataaaaagacagttgtacccattttgcataattgagaaacagaaagcaaattgtaatctaaagaatctacaagaaaaacattggaaatagaatggtcaggagatatagctattttacctaaacctttgaccaaaccttgatttctatccccgaatgtaatagctctttgggggagcttcatttttctcataggaggagaacatccttttctcccctgtcatgtggtttgtgcacccactatcgnatatccaacttgaaccaccggatgcataaacctac

SEQ ID NO: 67015 - DNA, 437 bp, Zea mays
  unsure (1)..(437): unsure at all n locations
agcttgtgaagagtcttcattccaacttgttcttgtcggtgatgctagagccagcccatgttagtcttagcaattaagcaagtgtcgagttcagctctatcaaaatctactaagtatagctgaccctctaacactcccttaaatgctattgaatcatcacttcttctaaagacagtaacacctacatccgtaaaaagacagttgtagcccattttacataattgtgaaactgaaagcaagttataatctaaagaatctacaagaaaaacattggaaatggaatggtcaagtgatatagtaattntacccaatcctttgaccaaaccttgatttccatccccaaatgtgatagctcgttgtggatcttgtgttttctcgtaagaggagaacatcttcttctcccctgtcatgtggtttgtgcacttgctatcgatgat

SEQ ID NO: 67016 - DNA, 469 bp, Zea mays
  unsure (1)..(469): unsure at all n locations
ntagtaggatgtgtattagcaacttgctttccatcttgtcatgcactgcatggcttgtctttttcaaacaccacatcctttaatcctctaaccatatctttctttaacaccttcttgagtgtgctcatcccaacatgtgcaagcctcctatgccaaagccatccaagagaagctttggtgaagagacaagttcttaagtctgcatcttctgaagtgaaatccactaagtagaggttgttgtatctaaatcccttgaataccattgattcatcatccatctttgtcacaataacctctgttggagtgaataagcattgaagtccaagatcacagagttgacccactgataataaattgaagcttaaaggtgcaactaagagaacattngatattgataaatcatttgagattgcaccttgccaagtcttgtactttcttttgattgctccaatgtatttatctgacatca

SEQ ID NO: 67017 - DNA, 453 bp, Zea mays
  unsure (1)..(453): unsure at all n locations
agcttctaaagggagagcacattntatgattaataaatgttcattntgagaaagacaagatttgtagtgcatgccaagcagggaagcaagttggtgcccatcatccacacaagaacatcatgacgactgacaggccactggaactcctacacatggatcttttcggcccgatggcttacataagcatcggcgggagtaagtactgtctagttattgtggatgattattctcgcttcacttgggtgttctttttgcaggaaaaatctcacacccaagagaccttanagggattcttgagacgggctcaaaatgagttcggcttaaggatcaaaaagattagaagcgacaacgggacggagttcaagaactctcanattgaaggcttccttgaggaggagggcatcaagcatgagttctcttctcctacacgccacaacaaaatggtgtagtgga

SEQ ID NO: 67018 - DNA, 456 bp, Zea mays
tgtagttggtagaccaattagtcaactatccgtctagggtggtagaggatatctcagtgcaagacttcctcatcctagtggatattgtggtactcaacatgaagatactactcatccttaagtgacaaatgttgagcaccatcgacacaagcattaatgttgttgttggacaagtccatatccacatcaatggcaaaacatagttgttttatttttggccaaaagttgaataatgaaactaggtgaaaactgtcaaatgccaagttctgcattgcatctgaagcctaaggttgaattgacaccatcggagctgaagatggacaacctcatagcttcaatcaagaattgttttgtcacacatgctttggggtggtaatggttattcaaatgtttcttcacaattgttagggtcgtaaattaatttagttcaaaatgaatagaaatagagcccgatcc

SEQ ID NO: 67019 - DNA, 410 bp, Zea mays
agctttggaaggaggtaggttccatgccttgtatgccacgggagcaccaacatttgaaactttacccctgaggatcatctcaagtcggcttaccaagtcaacagaaggaattctcctattggtaacccgagttgagtcggccagccctcgatacagatatgccggataggccctgtctttcagtggctgaatgtccttgaaaacaaaatcagggaccacagcttcggcagtcagacctccctctttcagtaatccgacttcagttagcaacacacctgcctcagctacttcctgatttgtgggagactcaatccaactcggagtgcggacgtctggctgtctttccgaacgggaggggagagaatttccataattatcaactataaaccactctatacgccaccccttaa

SEQ ID NO: 67020 - DNA, 435 bp, Zea mays
  unsure (1)..(435): unsure at all n locations
cnttaccacggattttagtgtgtgctgttaaacttgctctgaactgttggtttaagttttaagttcaagtaacttgagatcgaggtgcctcagctatttaagttttaagttcaagtatgacttctaggctctagctgtgagaatgatgtttctgaagtgagttcatttttcggtgcagattgttgcaataagggatatcatacctcctgctgttgaaggttgtgctgctcttggtaaattgttggagccacaagattgtgtagctcacattcttctagtcattgtcaattctcccaggtacattgctcccatgttggacctatacagtttttagttgctagaggttgataatttctcggattcgcctcttagttttgcaacttattctttgagggaaactacagttttagagcttcaggcaggattctttattct

SEQ ID NO: 67021 - DNA, 394 bp, Zea mays
agcttagccatgacaattctatgtgaatttttgtcaaccaatcatttttagccaaaagggtgaactaacaattaaatgagggcttgcagatttttgggacagcagcacaacagttacttgttttaatcataacttttcaattattaatccaaacatagcaaactaggactttctggaaagcttaaaatgttctctataactttggtattttcacctcaacctgattcaatacatagcaaggtcaaaaagtgcaatcacagcagctctgtccagatttggacagattcagacttgtgactctaaaaattcataactgaagattcaggcatccaaacaaattgatcctaaactttctggagaggtaataaaatggctacaatttatttataaacat

SEQ ID NO: 67022 - DNA, 435 bp, Zea mays
ctggtataatgaagatcagcacacctgatcatttttgtacaaaatatgctatgataatttcattaaataagaatagctatatagcccctttctttaataatttaatgtatgaattggcttggcgcagactccaaagctaactttattttaccattctcttgttatgaaatatttttcacaacaatcaaatcatgaccattgttaattactttgcaatataaatgcaatgcagtggtgcgccattcttcataacactatctatataacattagagtaatcatcagtcaaatgtcaccaactcatactggtgatggtgcttctcacatcaaaagacgtccaacctaaagccacttgggtcattctgccatacttggcactgattaggcttagatgcacacttcatacaaacgggtgaatcataaaacatgatgagat

SEQ ID NO: 67023 - DNA, 408 bp, Zea mays
  unsure (1)..(408): unsure at all n locations
cttatcgactgatcagtttcacgaacaaaatcaggttactaaacaaaaagtaagagatatctgaacatgcacagagatatcaccatntcaccaagaataaacaaattctgcaacaataagtcatgatatgttttgatggatgaattaattgaccctataattcaacagatttaccattgccagttcgcacttctaacactttgattcaacaatacttgatggaaacaaagggtttccgtttatctataggaatcttcttaagaatcaccttaattaactacatataaacaactacatgagtggaacttgctgaaataaagataaaaatgacaaattctagagtggtcgacattttttaatattgtggctagtgatttatgtatcatgattcaatcagagaagctaact

SEQ ID NO: 67024 - DNA, 453 bp, Zea mays
agcttcggcatggcccactctttcatagttggaaacactttgaaacctaaaaattcttgcactaagtccctagtgccgatatgctccgcgataactctaaattcagccaacgcaatttgggttggaccctctggtgtcatgttgcacaggggtctggtctctccgaagatcaactctagcggactctgcactagcttctccttctcttcgtcaactttgacgtagaaccattcagatttccaaccagctggccacttgcttcggtaactgatcactggaaattttgtagtcttgcggtaggcaaaattgtagcagtcgaagttttcatgtaacccatctcctctagccttggtctggtaatgaagctcatgcactcggcagaaaccttcgacaaatggttccaccccttggcttcggagagcccaaatgtaaacgctaagcctaacgatcgcg

SEQ ID NO: 67025 - DNA, 449 bp, Zea mays
gcttgacccggggaccctcgtcaccggattagttaatcgtgctcaccggagttcaagaacccgccgacgcacgtggaccgggtaagcccctgcaccgttatccaattcgttgcgcgcatggcctctgtgtcaccctgtgaagctcctcgtgcaccctaattgaactataccgccgtgatttggccggagcaagagccgccgacgacccctgccgcctgtgctcgtggccagggtagctccgaccaccttcgacaccgacccgcacaccgacgtgaccgtcgcgacctcccggacgtcactgaccaccccgccggagctctactgccgccggtaagccccaccgccgtaaactatgccgtgggtactgtttaagccggcccaggagcgcgggttagatttcagttaaatccaggtggctttgcgcaatgtcagtgacccaagccaatagt

SEQ ID NO: 67026 - DNA, 444 bp, Zea mays
  unsure (1)..(444): unsure at all n locations
ttaactctcgcgagacctttcncatttctttctaacctatgtttattcattatcgtatgtgatattctatgcatatttactttatttgttcccttgtatggggtactgtttgtttcctaatttgaatggatggatgtatgtatgcttgcaatcgcatagagaacgatccagttgaaaagcccgacgaacccgcaggagaagcccctgagcagcagtcggttggtggaggcaagtgtcctttgacctatctctgtcctattcattctttaattcacctcccgcattacacatttatacctaaggattgactagctttggtatccatgtccttgtttacctattcnggttggattattattgtttaagcttatgctattgctcaactctaatcaatgaacatgatgagaatatccatgatacgttattntcccttctcttattatg

SEQ ID NO: 67027 - DNA, 313 bp, Zea mays
agcttcacggcctaccagggaagctacctatgggcttggattgagcgaaggagggcggggaatggtttggccaccgcggttgccctctggtggctctggcgggtcgcggagaggtccccggagctattggcgagctcttgggagtaccgcgttggacagaggatgccacggggaagatagccgggcactggggcaagctttatagcccgggcgccggccccgtcaccgggcggccgcgggcgcgcgggggttcgcgcacgggcgtgctctgagcgcccccccccccgagtgtcagcccacgtcgaacacgtgt

SEQ ID NO: 67028 - DNA, 451 bp, Zea mays
  unsure (1)..(451): unsure at all n locations
tacggaccttgatactaagcttaggagtaagttatgaaggtatatttcaaatgtctttagtacttcaaccagcatcttgtgcaatgaanaacgaagcccggccttcatgaagctttttaaaaaccactacttcatctactttgggaagaggaacggtactctttcctctagccctcacaatggatatatcatgaaaatattttcccttcatcccttcaatatgtctgtcacggaacctcccaaggtattaggcccacctactgatgtccttgtcctaaggacctcagacagtcatgcacgtacgcttgtggggcgaaggcaaacacgccacccttagctcgacgacctcgtcctccccttgcgcagacgaaggctgaatccatggaacccgccagaacaggccgagagcgccaatcggacggaggcctgttcgacccccttcgctctcgtg

SEQ ID NO: 67029 - DNA, 294 bp, Zea mays
  unsure (1)..(294): unsure at all n locations
agcttctccgccagtctgaacagttcgagcaataaaagctagagcttactgcaaaacttgaagccgaagctcaacaaaattcagacttgagaaaactactgacnagtcttcaagaaaaatgcttggaatttagcaataaatgccttcaacgattaagaaagattttttacttagttggagccagcagtgaaaaattcaccccctcagctgaagatctaccgaaaaccttcgaacatattgagggggagattgacgagctccacgaagtcatagctgggcatggtgacttctgtg

SEQ ID NO: 67030 - DNA, 471 bp, Zea mays
  unsure (1)..(471): unsure at all n locations
tatcccatcgactgcaaaatccagtttctgcaattcacaagtatatatttttagcacataatattatgcagtcccacattcagtataataccattattacctttctgacatgatcattttgttcatggtcaccactctcattcatattcgcgtgatcctgcaaattaacatgtacccaccaacacatttttaagctcaatcataaggcaataacacaaaccaataaatcatttgtatgtacaaccgcaaatcaatatagttgttaaagttattacctcttcaaatgaacgtattggtataggtatttgaacattgtccacacccccttcaagtatattagatacatcttgaatntcctaaaaaattggttcaaagctcagtatacatcagttacaaataaacattcacaataatatgatcaaaaccttggtattcctttcacccaattcaccatctatntcgacgtctcta

SEQ ID NO: 67031 - DNA, 450 bp, Zea mays
  unsure (1)..(450): unsure at all n locations
agcttagtctttctgtattctttctggttcaggctcgccggagagtgtgttcaccgccgttggtggttggggacctgaccttgcaaagaaactaaaagggaggggccttggtgcgaatgtcaaagacacatgcgaatagtgcgcaaggattcttaattagttattcaaacagccagggtgctctgtgcaaagctgacaccgcaggcgcgtttcacctggacgtgggccggatcgggctagataggtcccgttactattcattttttccttttctttttctaccatgcttagggaatttatagaaaattctagaaaaaatgataaaaatatgagaccaattttaccagactcctaaattcctctagtatttaataaaaatagttccaagattnttagtccacaccaggaattatgtattatntaagaaggcctaaacctagtcttttggac

SEQ ID NO: 67032 - DNA, 451 bp, Zea mays
  unsure (1)..(451): unsure at all n locations
gtgatccgactcacagcagcagtatcttcatgcacccaaccgcacccagtttgcagctcagaggaacaatcagcagcaacagcagtatcgccaggcaaatgacaacaggtgtttcacatgcggcaacaccggacattatgccaagaattgccctatgaaccagcagaggcaggggcagactgttaatcagaatcaaggcaagagacaaaaggtgcaagtgaggcaaggcaggctgaacttcaccaccatggctgatattccagagggagcacccgtcatgactggtacctttacagttttgaattatcctgctattatcctctttgattctggcgcatcgcatagatntatcagtgcaaaatttagtgccaagtgtcaattgccttttcaccacaccaatggnggtatcacaatttcaacaccaggaggcagggttgccacctaccaaatc

SEQ ID NO: 67033 - DNA, 462 bp, Zea mays
  unsure (1)..(462): unsure at all n locations
agcttctccttgtcgtcatcaactttgacgtataaccattctgatttccagcctgccggccacttgcttcgatagctgatcacaggaaattttgtagttttccgatatgcaaagttgtaacaaccaaaattttcatgtagcccatcctttctggccttagtttggtagtgtagctcgtgtactcggcagaaaccttcggcaaatggctccactgcttggcttcggagagcccaaatataaacactaagcctaacaatagcgttaggagttagttggtgaaaatagatcccaaatttcttcagcacatcgacaatcatcctattcaaaggaaatctcanaccagctttgaggaaactcttaaaaatcactatttcatatttntgtggcttcggggtaatctcttgtccaccanagcgaatcatctttntctcatcttcgctgaagtagcccgacttcaccatc

SEQ ID NO: 67034 - DNA, 414 bp, Zea mays
ctcctattatagctctacaagttgatgggtgaccctacgaaaattcctcatatttttagaaatataaatctccaaagtcagccctgttcactaattttcagacttagacatatgagaggtatagagtggctttttgcaaataagcccaattctcatccttttgacttggaaatcctcaaatgtgtgaaccttatgatttgggttatccaaataccttggtttttgcacctgcgtccaaaagtgtgccaaatttacatataaccccctagggtttcaactcaaggttttccaggggtctttttaaggttttggcacctctagggtttgggtgccacttaagtccattaaatgtgacatcttatgatatattctcattgagtttgaagttttctcatacttgggccttattatcac

SEQ ID NO: 67035 - DNA, 417 bp, Zea mays
agcttgtgaaggttcttcatccccacatgtgcttagcggcgatgccacaaccagcccatgctcgtcttagcaattaagcatgcatctagaccggcctcttcttttgcaaaatcaaccaaataaagtttgccgtctagtacacccttaaaagctagtgaaccatcacatcttctaaagacagacacatctacatttgtaaatagacaattatatcccatattacataattgactaacagatagtaaattatatccaagagactcaactaaaaacacattagagatagagtgttcatttgatattgcaatcttgcctaagcctttcaccttgccttggttcccatcaccgaatatgattgaatcttgggaatccttattcttgacgtaggaagagaacattctcttttcccccgtcatg

SEQ ID NO: 67036 - DNA, 475 bp, Zea mays
taccgcatttgaagcatgagcgcttgcccttggcttttgtcttgcttggctgtcccttgcgacccttaagcgtcgtcttgaatcttttgatgatgagggccatctcttcatcattaagtccggccgcctcaatttgtgccaccttgctaggtagcgcctccttgcttcttgatgccttgagagcaagggtttgcggctcgttgatcggaccattcaaggcgtcgtccacgtacttcgcctccttgatcatcattcgcccgccaacgaattttccaaggacttcttcgggcgacattttggtgtacctgtgattctcacgaatattattcaccaaatgaggatcaagaacggtaaaggaccttaacatcagtcggacgacgtcgtggtccgtccatcgcgtgcttccgtagctccttaattttgtgataacggtcttgagccggttgtaatgttgagttggcctctcgcccctata

SEQ ID NO: 67037 - DNA, 96 bp, Zea mays
agcagcacacgggtgctaagagagactacttatttaatgcgggcgctcactgaccatttcaatgggaaaactgcgcgccgactgattaagaaaccg

SEQ ID NO: 67038 - DNA, 399 bp, Zea mays
agcttactatggtttggaacctcacacttcattttactatggctcggacactaaaaccttttagtgttggtgtttaaggttagggtttacggattggattcggggtctaagttaccataaaaacgtgtgctatagctcacttgtggcaaaaaatgtcgtaacggcctctccggtctaaaacgtaggtggcaggtccgatacatgaaattgggtctttggccaccgaaacatgtgctacagctcgtgggaggccaacaacaactttaaggtgctctggggaccaaaacgcgggtggtggaacacgtacatacaaatggtcgcttgaccatgaaaacgtgtgctatatcctacaggaggccataaacagcctttgcagtctcagcggccatatcatgggtg

SEQ ID NO: 67039 - DNA, 466 bp, Zea mays
  unsure (1)..(466): unsure at all n locations
tgcagggcatggtagaatttagtgtccaaaccattgttttgttntagtccccttaggcccgtaaggctattttggcctcccgtgacacatgtttttgtcgtcgaacagcgatttcttgcctcccgtctgccacccatgatttgaccattgagactggtaaggctgttttggcctcccgtgagctatagcacacattttcatggcccagcgaccatttttatgtccgcgttccgccacacgtgtttttggccccggagcaccttatagcggttcttggcctcccgcgagctatatcacacattttcgtggccaaacaaccaattttatgtatccgacctgccaccttcgttttagattgaggaggccgttatggcattnttttgccacccgtgagctatatcacacgatnttatggaaacctagaccctaaatcctatccctaaaccgtaaacctaaacatcgacac

SEQ ID NO: 67040 - DNA, 454 bp, Zea mays
  unsure (1)..(454): unsure at all n locations
agctngctacaggccttcttctttttctctatagcaggaaccctattggaacactaccccacttaaaaagaatgagggtagatcttttgaatcttggggatttgaaatccttgaagtacctcataacaagggtgttacagggccttcttctgctattgctgcttgagcaggctgcggagaaatgactgacacatggttgattctgggagaaccttcttcttatcttctcttcactatcttcttttcactgaccctttctttctctttgctcttcccactggaggattctatcaaatagtattaccatcatatagaggaggaaaccaaagatgttgaaccatgtacaacagtcttcaacccaagaatcaccaagcattgtgatcttangggcgagggagtggaaaatggagttgcttgcgatatggcagagggggttttatctggagtgttttgc

SEQ ID NO: 67041 - DNA, 474 bp, Zea mays
  unsure (1)..(474): unsure at all n locations
tntgcttgatgagatcgagaagaagctgactgctatggacctcaagtgggatcagcgcttcgtcgacttcaagcgctccacggatgagcgtctcgtcgtgctggaacagacatgttccgacgtcgagaaatggcggccgtctgtggatgcggctctgaacgacgtcaaactcgagcttcgcaagatgaacaagcagtgggatcaggcgctgctggaacactccggctctgatcagggtctgcttcgtcgtcctgatccgcattccgatcagtcgccgccgatgctccaccctgatggcccagttgggcaccgcgatgatttacacaaccgggagcagggttttgggtcggtcacgacccttatccctggcccggtcaagggtacgcacaatatccctcctccacccncaatcaccccacgctatcatggatcattgntggatcagtttggcagtcgtgcgccgtcttctgagtc

SEQ ID NO: 67042 - DNA, 434 bp, Zea mays
  unsure (1)..(434): unsure at all n locations
agcttctaaagggagaacacgtgatatgtttgactaacgtgcatttcgaaaaagatagaccttgtgcagcttgtcaagcaggtgaacaagtgggaggagcgcatcacggcaagaatgtgatgaccacttcaagacccctggagctgctacatatggacctcttcggacctgtcgcctatctgagcataagagggaagtagtatgggttaattattggtgatgacttttcccgcttcacttgggtgttctttttgcaggataagtctgaaacccaagggaccctcaagcgcttcctcaggagagctcaaaatgagtttgagctcaaggtgaagaagataaggagcgacaacgggtccgagttcagaaccttcaagtggaggagttccttgaggaggaanggatcaagcacgagttctccgcttcctacacaccac

SEQ ID NO: 67043 - DNA, 470 bp, Zea mays
  unsure (1)..(470): unsure at all n locations
tgtacttcctgtggactntgatgggagatagacttgttgtgatctcctaacatcgtattgatggttcagagctagattttccaaactaaacggaggaattcgatcatatatgtgtgggtgagcctgtacttgtatctggagaatgaactactactaactcgtatatgggttcagtacggtgcacacatgggaacagttcgtgcatggcgtggtctgtggttagctgttgcgaatttgctattcctattcaggacgtttgtatatacgtgatatcacctctgacaagtgacaagcaaagcatcggacattcggacccacaaccccagtacaagagagcacggcccatggtgatggagtgcanggcgcgcgggtcctacctttgagtgtcttgagtgtcctggagagagagagagatacagagatgctagccatgcattccaaaagaacgaattgtagaaacttttacgtca

SEQ ID NO: 67044 - DNA, 465 bp, Zea mays
  unsure (1)..(465): unsure at all n locations
agcttcacaataggaaaaaagtctcatcgtagtcaacctttggtcatttactaaaactgggtaagacccatcgagcattgtagtggtcaagagaaccatcaaataggaacttttttgggggtcaaaccatttgctagcgacaacattgactccaagaggtcaaggcaccaaggtataagtgtcatttgcctgaaaggcatcaaactcaaaatacatggttgcttgctagtttggataatctagagcgaaccaaaagatatgtcaaaagcggtgagaggactaccatgttgacattgaggtgatccaccaactatgcgaagctgaatttggcacatatgcccgtaccagtagagccatggtcgcggtgtgcccagtggctcgccttgcaccactgacaacaacctgtgacaaggtgcccccaagggcagcgatgtanggtgggtctagggctggatgaaatactcc

SEQ ID NO: 67045 - DNA, 453 bp, Zea mays
  unsure (1)..(453): unsure at all n locations
agcttgacgaaatttgttcccacgtagactgtttcttggtcttcaaatgcttatccatgatcctagcaaatattcagataaaataatttccataagtgccaaaaggcagaacaatgtcttaagaagcaagaaagacaagctatggcatacttgcaatggtaaaattcacggtggtaaaaatggcatatgactaacagtagatgggtggatagattgatgtgaagtcataacatcaagaagcataacatgtgctagactggcaacagaagatgatcattgtagtacagacacatattactgtcaggtgcaaatgataatctaggagcacacatgaatcanatggaccttccataactggactagatggaatgttgagccacggcaacatgttaactataaatcataaataatctgaataaaatgataacatagacatgtgatggtctgttacat

SEQ ID NO: 67046 - DNA, 442 bp, Zea mays
tataacccactatctcaatcccatcactcattgttttgtggctcaccattcggagtgagtgcacactagctttctctacgaacacaaatctcattgtcccccttcttaaactatgacagttaggttaggataaccacacatgagatacataatctcgcctaagttaatctgatcgtggaccatccggccgtaccaggtgccaaatatggtgctcaacacatgcctccccggccttttggtgaagcatggtgaaccaaaaccacctggtacgatccgcctctttcggtaaacgatagatcccgcaacttgccttgttcccgaaataggaactctagcccaatgcaagtcactggttcttgtgataaggcaatataactatttgatagaactctaatgcacaggggagtttaggaatgaatcctcttcggccatggctaccatg

SEQ ID NO: 67047 - DNA, 426 bp, Zea mays
  unsure (1)..(426): unsure at all n locations
agcttanagcatgatagaacagataactcctcttgattgggaaacatgaaacagggactctcattgttggctgacaagagtatagacagctcttctaaattcagtgcttccagtttgaggggagtcaatttccccaaggacacaagccccccagaaagacccatctctagatttgtgaggttgggcatatctttaatatgcaagtaacgcagattttgtatatggccaattggaaggagagcacttgagttatgcatgtggaacaaacaaagattgacaaggtatgggagtgaagtcagtttgttcatcatccatgtangaaacacattgcctgtatatttaactaacataaaatgctccagagtctcatttggttggaacttctccagcactttctcatctgtatattccaatagttgatcttga

SEQ ID NO: 67048 - DNA, 473 bp, Zea mays
tcagaaataaataaataaataaataatgcttcacgcacctccatggagggctggagtactcgtacatcctgccactgccagagaatatgatgactctgatttgcgcatcacaaagaatggctagctcgtttgccttcttgaacaaccccatccgcctcttggagaaggtaacttggcggtttggtggattctcaatcttcttcagctctacttttccacgccccattggtacagcttggtgcttctactcttctcttctattcaacctacaagaacatatgctgcgaacattgacagtcatgattcaggacaccaaagcacaaccatgataagaaacaaataaatagctcatatgcgtgagagaaggtagaagcaaattacttcaaatcaccaaggccatgaaataaaattaacagacagtttcagtctttcagtttcatgaagatcaaatgaatttaagagctcgagaagat

SEQ ID NO: 67049 - DNA, 383 bp, Zea mays
  unsure (1)..(383): unsure at all n locations
agcttgtgaaggttcttcatccccacatgtgcttagcggcgatgccacaaccagcccatgctagtcttagcaattaagcatgcatctagaccggcctcctcttttgcaaaatcaactaaataaagtttggcgtctagtacacccttaaaagctagtgaaccatcacatcttctaaagacagacacatctacatttgtaaatagacaattatatcccatattacataattgactgacagataataaattatatccaagagactcaactaaaaacacattagagatagagtgctcattaaatattggaatcttggctaaacctttcaccttgccttggntcccatcaccgaatatgattaaatcttgggaatccttatttttgac

SEQ ID NO: 67050 - DNA, 480 bp, Zea mays
  unsure (1)..(480): unsure at all n locations
tattaaaagcccttntctcttccttcatctttctattctctagtgaagaacccaaagcatcacatgacccacatgaaaagacaagtcatgcaacatgttagatgcttatgcaataaccatctaaccactatagttattacacccgagattcatgtcatatgtgatgggacaaatccatcatgcatgcataggacccgagtcctcactcaaaatctatgtagtattaccaaataaaatatccccaccaaaaataggtggtgattcactcttgcataatgattgggttctaggcttgaggtattccacgtcatatcagaaggggtgtagacacaaaacatgattctatcaatgctttggcttctgagctaaaggtaacaatggatgacaactgatcgtgtgtggctcaatggtgaggcctagagatggaacccaacgaatacctaaatcatggtatggatccgctctaccatgatgggtcat

SEQ ID NO: 67051 - DNA, 377 bp, Zea mays
  unsure (1)..(377): unsure at all n locations
agctntaatgcacatattctccccctttgacatcaaacaccaaaaccatattcaagcaagaacatatgatgatgtcaagggacagcggggtgttatgaggagagacacattatcaaaactcccccttacttattgagcatatgcactaccaacatttaagtaagatacaaatacgccaaaagattactacttccttttgtacctttaccatgttgtagtgtacttcccatcttgagagtatttaatctctcgagagcttctccccacttgtgcctgattctttatcctaaccttttcttgttgctaagacaccaaacttagaacaagttatagtattgggcacaagaagaaacttctattctagtgattaccaaaag

SEQ ID NO: 67052 - DNA, 483 bp, Zea mays
  unsure (1)..(483): unsure at all n locations
agcttcattatcaagagagtgtcatcagcatattgaaccatatgtatagtttggccacatctgtcgatcagaggtaattgaagcagggtcaggtgtctggctttattgataatactctgaagaagaactgccgcccagacaaacaacaaatgtgagagaggtgtctgtgttttgggtccgaccgcacacccggggttgcccctcaaggtgtttatatgagtaagacggtgtcgacgactgtagcaaaatggttcgtgccgatcacacgagggacaatagacaagatttacaggttcgggccgcttagaanatgcgtaataccctacgtcctggtgagtatgtaaacgaggttacaaggngggctctctggattgaagacacagagagttaaggtgggtggctgagtaagataaggtcgatcgttctgaaggggtgccccctacgccttatatactcgaccgtggggcagtacatgtggatatg

SEQ ID NO: 67053 - DNA, 458 bp, Zea mays
  unsure (1)..(458): unsure at all n locations
agctntagctatttgccttggtggtctctctttactgagcaatttaaaattgaaatataatatggcattaactacacttccatcaaaaaaggtgtttgagcatttgacaaagcttgacacgttggttgtaacacgttgtttgtgtctcaaatcaatggggggcttacgtgctgctccatctctttcctttttttactgttcggattgtccttttttagagctagcacgtggagcagaactaatgccgttgaaccttgatggagacctccacatccgtggctgcattcttgcagctgattcgttcattaatggcttgccacatctgaaacatctttcctttgatgtctgcagaagctccccatccttatcgattggccacctgacctcccttgaatcattacgtctaaatggtctccctgatctttactctgttgaaggcttgtctgccctgcacctta

SEQ ID NO: 67054 - DNA, 444 bp, Zea mays
  unsure (1)..(444): unsure at all n locations
agctnggaggcgtctattggttgtcgacttggtgtaaactcctccttcttttcttccgtcgccttgaatgcaacgggttgagcttcggatgggtcgccaagctcgttgattttcctcgagccttctatcatgcactcaaaacttacaaaatgcccgataacttcctcgggggtcattttagtatatctaggattaccacgaatcaattgaacttgagtgggatttagaaaaatgagagatcttaaaataacatttaccacttcgtggtcgtcccacttcttgctcccgaggttgcgcacttggtttaccaaagtcttgagccggttgtacatgtgttgtggctcctnccctttgntaagccggaaccgaccgagctccccttcgatcgtttcccgcttggtgatcttggtgagctcatctccctcgtgcgcgggtntgagtaca

SEQ ID NO: 67055 - DNA, 314 bp, Zea mays
  unsure (1)..(314): unsure at all n locations
tttatgcttctcctactgggattccgactcgagtccgaaggtacctgttcacacattatgctccagaaatactgttaaatcctgtttttgaggaccttcgtaagccgaaggcccccaacagtagcccctcacaatattaatttgttttaaaataataaatttagattgcgacatggacgaaggatttaagccgaaggtccgaanaaacaccttccctttgctagaatagcaacattcactgacaggcggngtctttcaattttcaacgcactgggcgtatatataagatcataccgcaagctcatttggcacgc

SEQ ID NO: 67056 - DNA, 460 bp, Zea mays
  unsure (1)..(460): unsure at all n locations
agcttggagtaagcatggtccccagggggcaatcgtatcggaaaccttatgacagccgatttgatcaccacccatacccacagggaaccaagattcccgaattcgcaaaattttcgggtgatcaaggaaagaacacgcgcgaacacataagccaattttagcacaattaagagaattggccaacacagaggcatttcacgtacgtttattttcattatctctaacaggaaccgcgtttgcatggtatgccactttacctcctaattccatttcatcatggggggatctagaacaaaaatttcatgatcattttttctccggtgactatgagttggatttggtagatntagtgtcattgcgacaggcaaaagatgaatcggttaatgattacatccggagattctgagatacaagaaaccgatgcttccaaattaatntagcagaaaaacagctagcagga

SEQ ID NO: 67057 - DNA, 406 bp, Zea mays
  unsure (1)..(406): unsure at all n locations
ntattccagtgcacccaggaccacgaagaataccttcatgcgtatgtccgaaggtttctgcgtctgagggcacaggcgccaacagtgcccaatgaaattgtcattgaggccatgattaagggacttcggctgggacctttagcgcaatactttgccaggaagccaccacaaactttggagaagctgctccagaagatggacgagtatatccgagctgacaatgacttccgccaaagaagggaggaggcattcaggttctctaaaatgaccaggggcttcggaggaagatttcatctgaggcatgtcaggtcaattcataactccactcacagtgatgatagagggagccaacagcaaaggccacaatactcttcacaagcttcggtgcaacagcaaagctctgttc

SEQ ID NO: 67058 - DNA, 335 bp, Zea mays
  unsure (1)..(335): unsure at all n locations
agcttggtcaggtgaacaaatccttcacagcgatcttgcccaaattcgtgaagatntgctcccaatcggcgcttgaacaggggcagaggcaacgggaacacgtgttctaccgtggctgacacccccagttcacgcccgttcgcgcaccgtgccttccagtgcacgcccgcgcgcactcgccggtccacgaccgcacgtgcaccgcgccgtgcctataaagccttcccaggcgcgccccacttcgccccgcactcaccctcaccggccaaccactttcccttagctccggcgagctcaattccgcccgccattgccgccagagcttcggccatcgt

SEQ ID NO: 67059 - DNA, 393 bp, Zea mays
gatggagaaacaaaaatccttggaatcttggctgtcgaactgcttgccgttgtcgactgttagctcggacggtactccgaagcggcaaacgatgttctgccagaagaatttttgggtagtctttgatgtgattgtggaaacagccctcgcttcaatccatttggtgaagtactcgacagctacgaaggcgaacttaaggttcccctgagcggtgggcaggggcccgacgatgtccaggccccagcgctggagaggccatgtatgggcaatcagctttgtatattgcgaggggctgcctgaccgaggggagaacttctggcaggcttcgcaggacctcgtgacccgatttgcggcgcagatcattgcgggccagtaaaacccttgtcggatcac

SEQ ID NO: 67060 - DNA, 430 bp, Zea mays
agcttgccaattcttgtaaaaacaacatttaccggcacagcagctgcagaccatacctgtaacatggccatttgcgtgcttgggattatacatgattggacccttcaagaaagctcagggaggctatacccacgtgctggttgccattgacaagttcaccaaatggatagagtacaagcctattggttctttaacttcagccaaggcagtggagttcatacaagacataatattcaggtttgggataccgaatagcatcataaccgacctgggatccaacttcactagctctaaattctttgatttctgtgaacaacggagtatctagatcaagtacgcatcagtagcacacccaagagccaatggtcaggtggaaagggctaatggaatgatactggaagcactcaggaagaaaagtgttgacaaaaat

SEQ ID NO: 67061 - DNA, 473 bp, Zea mays
  unsure (1)..(473): unsure at all n locations
tatgaagattcttcatcccaacatgtgctagtcggcgatgccagagccagcccatgttagtcttagcaattaagcatgtgtcgagttcagctctatcaaaatctaccaagtatagctgaccctctagcacacccttaaatgctattgaatcatcacttcttctaaagacagtggcacctacatcagtaaagagacagttgtagcccattttgcataattgagatacggaaagcaaattgtaatctaatgagtcaacaagaaaaacattggaaatggaatggtcaggggatatagctattttacccaaacctttgaccaaaccttgatttccatccccgaatgtgatagctcgttggggatcctgattnttctcatatgaggagaacatcttcttctcccctgtcatgtggtttgtgcacccgctgtcgattatccaacttgagcccncggatgcataaacctacacaacaagt

SEQ ID NO: 67062 - DNA, 455 bp, Zea mays
cgcttgccgagccctctgaccctattggatcttaccggaggcccgagatcaacctcaccggacttcggtctttcgccagcgcgcgtggaccgagctatccagtgagtcttcgaccaattcctttcgctcatgtcttctctggcatcccgtggacctccctgacctatttgattgaactatctcgccgtgaccaggccggtctcctcgccgccgacgagcatccccgcctgcgcgcgtggaccgaccgactccggccatctccgacggcgttacgcacaccgttgtgatccccgcgacctccccttcgccctcgaccacttcaccggaacagtcttgccgccggtaagcccctccgccctattcttcgccgcggctactgtttgaggtagacgaatgacctcgggttacggtctgtaaaacccgaggggttttctgtaatgtcagcgactcatgtg

SEQ ID NO: 67063 - DNA, 433 bp, Zea mays
  unsure (1)..(433): unsure at all n locations
taagggagaacacattgtgggactaatttatgtttattntgagaaacatacgatttgtagcgcatgtcatgcanggaagcaagttggtgttcatcatccacataagaacatcatgacgactgataaggcactcgagctcctacacatggacctattctgcccgatagcttacataagcatcggcgggagtaaggactgtctagatattgtggatgatgattctcgcttcacttgggtgaaatttttgcacgaaagatctcatacccaagagaccttacagggattcttaagacgggctcaaaacaaggtcggcttatagatcaagataactagaagcgacaacgggacggagttcaagaactctcacattgaacgcttncttgaggatgagggcatcaagcatgagttctcttcaccctacacgccacaacaa

SEQ ID NO: 67064 - DNA, 460 bp, Zea mays
agcttcggcccaacagcagagttcttttctgtcgccagcgccaaggggcagaggcgccacgggcttctggggaaggtttggagaccaaccaaaaaaaatatattgcctattctgtggtgaagacaagggccatactaccaagatgtgccatgttaccatccagaagcagaaggaaatagcggaagcagcagcgcaacaaaattagccgaaacaagttatgcatactgcttcgtatcactcaccttatattccagaatatgtaggcaaccaccctgcagcttctgttgcttcggcgagccaaccccaagcatcctggcagcaacctccaccgccaccgccgatccaaagaagtcagcagccagaagggagttagcgcactaaccttcagcgagaattcagagaggaatccgaagctcgcacattcaatagcactgtgccagagtcgaagcacatctactga

SEQ ID NO: 67065 - DNA, 468 bp, Zea mays
  unsure (1)..(468): unsure at all n locations
tctaaagggagagcacattntaggattaacaaatgttcattttgagaaagacaggatttgtagcgcatgccangcaagaaagcaggttggagtccatcatccacacaagaacatcatgacgaccgacaggccgcttgagctgctccacatggatctattcggcccgattgcttacttaagcatcggcgggagtaagtattgtcttgtaatagtggatgattattctcgcttcacttgggtattctttttacaggaaaaatctcaaacccaagagaccttaaagggattcttgagacgagctcaaaatgagttcggcttaaggatcaagaaaataagaagcgacaacgggacggagttcaagaactctcaaattgaaggcttccttgaggaggagggcatcaagcatgaattctcttctccctacacacctcaacaaaatggtgtagtggagaggaagaatcgaactct

SEQ ID NO: 67066 - DNA, 452 bp, Zea mays
atcaaatggacgtgaagagtgcctttctcaatggaccaatcaaggaggaggtctatgttgagcacacctccggctttgaagatagtgagtaccctaatcatgtctataaactctctaaggcgctttatgggctcaagcaagccccaagagcatggtatggatgcctaagagatttccttatcgctaatggcttcaaagttggcaaagccgatcctactctctttactaaaaccattacaaatgatttgtttgtatgccaaatttatgttgatgatatcatatttgggtctactaacaaatctgcttgtgaagagtttagtaggataatggtacaaaaattctagatgtctatgatgggggagttgaagtatttcttaggatttcaagtaaagcaactccaagagggcaccttcatcagccaaaccaagtatattcaagacatactcactaag

SEQ ID NO: 67067 - DNA, 371 bp, Zea mays
ctaagctttgtatttacatataatatgttagtgcattaaatttaatatccataaatattaaatataaactcttaaataaaactatattaaaataccaatccccgatgtactcttcgcatcttctcttacaacctttctacctttcttcttatgaacttcaatgtttgcaatttcgaaaggcatttggggctttttcggtttcatcatgtaggtcaatattattaattgttaatattagttgatcgcatctgtagcttattactcttatcattttatatggtatgctccacactgcgtagctttccttgtgacttgtatagggcatggcagaggtctatttatctatctaagacagtcacgcgatgcgattt

SEQ ID NO: 67068 - DNA, 450 bp, Zea mays
  unsure (1)..(450): unsure at all n locations
ttaatcacctgagctgcagctaactagatggagcattgattgttagacctgataatatttctaatttattacctcacatatatgttcatgtgggagccgccagcactgggtctattattttcttacctcacatatatatgcactatacttttatccatgtgacatttttttggtatactcccctttggtgcaaggctgtattatcatttgccaaagcgagcaactggtattcgctatgtattcattggcaagccaatgaatcagagacctaggtaatgttttacctatttgcttatccactttatttggtacaacaaatttcacatgatacaaaacacatttaatggttatgatgtcatgaatttacatattaacaaatgaatntgcagattcaattcctttatcatattcctgtaagctgtttcccttttgaaagattcaaattctcac

SEQ ID NO: 67069 - DNA, 371 bp, Zea mays
  unsure (1)..(371): unsure at all n locations
cccggctgaaagacgtacccatggcagggccgtaaagatggtcgaaaaagaacttggtctgctagatgacgaagaagaggaaccggaagcggaacgtgaagaggaggaagatgaggatgagatcgaagagtccgattagagntatgtaattttattttaattatcatgtcattttattntaattattatgtactttgtaagttttaattcaataaaaactattatgttgtgtgttttctgagcgttgaaataaatccgcgtgaattacttaattctgaaatagaaaagctgacgtggctatagcctgaggctgtagcctgctgcagcctgtgcactggagcancangggcgagagtggaggcgagagctga

SEQ ID NO: 67070 - DNA, 430 bp, Zea mays
  unsure (1)..(430): unsure at all n locations
agcttctaaagggagagcacattttaggactaacaaatgttcattttgagaaagataggatttgtagcgtatgccaagtagggaagcaagttggagttcatcatccacacaagaacatcatgacgacagacaagccgcttaagctactccacatggaactattcagcccgatcgcttatataagcatcagcaggagtaggggtgaaaaccgtttcgaaatttttcggtattttggataccgatttcgaaatttttcgatcggattcactggtaacggtatttttcgataatagaactgattttcagaattttctactggaatcggtgtggtgttttaccgaccgtttccttcggttaccggtttttggttggaaataccggatttgtgtctcggaattntcctgaattgtgtctccgatttttttggaat

SEQ ID NO: 67071 - DNA, 435 bp, Zea mays
  unsure (1)..(435): unsure at all n locations
ctttattgtctccaacacatctagtacactagccatcctttttctcttgagggtcgctgctagaaccttttgtgtcttcggcatctccactcttgtcgaagggcttagaacttctaatgttttcgtcccttcgattctcggttcttcaattttgtcagtcttcggcattgcagccggctctttaatcctctgcgtaagagcaggtcctttggcttcaatagctgaagaagtctcaccgccaaattcaggcactatggccggttcaatgtagcgtggtcggtgagtaaggaccttcagctntttcctcttcggtgcgggctcgcttgaaacagccgatacagcagccttcccagaggttgcaccctttcttttctgccctcgtggcgggtagcgatagtcagggtacacaaatccaatagcatcaaaagccctatt

SEQ ID NO: 67072 - DNA, 292 bp, Zea mays
agcttcgcctccatctatattgggtattgcctttgaatctgtccgacttccttcagctcttctagcagccttttgacttccgtgaacagcaatgggcccttggtccgaaggtatcttcatgcataagtatgttggataaagtattgcttcgaaagcattgagtgtccctcggccaatgattgcattatacgggtattccatgtcgacaatgtcaaaaacaacttactcagttcttgtgttgtggacataaccgaaggtaactggcattgtgattttgccaagtgctacaatc

SEQ ID NO: 67073 - DNA, 479 bp, Zea mays
  unsure (1)..(479): unsure at all n locations
ntatcacaccctttggcacgtactgcttcatcaggatgtcagttggactcanaaacgccgggtcaaccttttctcacctcaccaaaagggtgctcgaaagccaagtaggccacaacattntcacctacgtggacgacatcgtcgtcgcgagcaaaaacaaagaggatcaactggccgacctcgcagagacattcgctaatatgcgggacgcacgacttcggctgaaccccgagaagtgtgtcttcggaattcgccaggggaagatacttagctacctgttgtcacaccgaggaatcaaggccaacccaacgaagatccaggccatcatcaacatgacacccccgtagtcagccagggatgtccagcaactgacaggcagattggccgccttgaacagattcatttccaaatccgcagagcgcagtcttaanagacttcgcttgggaccagagcatgcggtagccttcgagtcgctcaag

SEQ ID NO: 67074 - DNA, 337 bp, Zea mays
agcttatgactatggtgatgagtcccctaataatgagcttccgcatcacacgaccattgtgcgacatgcaactcgggtccccctaccacttagccaaagtggaatttagagttgttgcggagcatattattactcacgatttggtgcaagaatacctggtcaacaaaacattttcaacgtctggtgggtgggggatgtcgaagaaaaatgaagaagggaataaatatgaacttgtacgacttccctaccgctttaaatttcagaaaagcttctgcaagccctatgccgaatggttggaattaatagaaataatgtgcaatgagattcttgggagtta

SEQ ID NO: 67075 - DNA, 326 bp, Zea mays
tttggcgcgcatgccacgcaaggaagcaagttggtgctcatcattcacacacaaatatcatgacgaccgacagggcactggagctcctatacaaggatttattcgggccaaatgcttacataagcattggcgggagtcagtactgtctagctattgcggatcattattcttcgctcacttgggcgttctttctgcacgataaatctcatacccaagagacctctaatgggattttgatacaggctccaaaagagttcgggttacgatcaagaaaattagaagcgacaatgggacggagttcaagaactctctaattgatgctttct

SEQ ID NO: 67076 - DNA, 411 bp, Zea mays
  unsure (1)..(411): unsure at all n locations
gatcttaagtcacctgcggcatgcaagctngcacccaaaggccattttctgttatatactaactaccagatggcacagccagtccaaaaactaacaggcagtcactccatgaactatggtgattcagatcaatggagagggagctcatatagcttctatgagaatgcccaattccacattataaactaatgcacacaatgcagtaactatgttagttacagggaaaataaaaattgagcaaagccatatatagttactaatcgatatcctgcacaacgttgctccttagtaaacagttccaaaaccagcaaaaccttatctcttgcaagattaaccttcatgagcgatctctgcagttactagttgacatcctccccagtaaataaatagcagagatattaacacgaataa

SEQ ID NO: 67077 - DNA, 454 bp, Zea mays
ccgtgatctccatcaagttcaattctatatttattcttggcgcttggagccattggcgtcatcgcaacgactgtgtgttcaatgggcggacgccgagccttgagaatactctcaccctcgctggcgatgagctcatgatgtggtgtagtgccggggcgaataggttgaacctgctttcaactcttgcgtttatgcttgatccgggggatagtcttgtatcatgcccagagtgcgtaagtgtggtagtggtgttgcgtggttggtatgttgtgtcttgtgaggggtgtggtgcgtctgttggtatgctgtttgcggcgtgtgtgagcgcgtgtgttgtaccttcttctatctatctattaatggaatgatacgcagatctcctgcgtgttcgagaaaaaataaaatcttcaccagagcagactactgatgttgatggacgtaccactggtgatgt

SEQ ID NO: 67078 - DNA, 428 bp, Zea mays
  unsure (1)..(428): unsure at all n locations
agcttatgaagattcttcatcccaacatgagctattcggcgatgccatagccaacccatattagtcttagcaactaagcaagtgtcgagttcagctctttcaaaatctactaagtatagctgaccctctaacacacccttaaatgctactgaatcatcacttcttctaaagacagtaacaccagtgttagtaaaaagacagttgtagcccatttgacataattgggatacggaaagcaaattgtaatctaatgaatctacaagaaaaacattggaaatagaatggtcaggagatatagcaattttacccaaacctttgaccaaaccttgatttccatccccgaatgtgatnagctcgtggggatcctgcgttttctcatatgaggagaacatccttttctccccggtcatgtggtttgtgcacccgct

SEQ ID NO: 67079 - DNA, 448 bp, Zea mays
tcttatgctaatagcttcattcgaggaccacttctttctataagaccttcggcgacgaagcacagacccaacaactctgattattcttacttttttttctttctaaagaccaatgtggatttcacactttgaaatcctgtgcctaaagcgatccttaggaaaaggagacctattcttatgaacaaaaaaacaagactattttttatctatatgcctgaatggttgttcttgtgatatatgtctgatttggagttttgattgagtgtgatgagttgtggagtaatgtccacaattacatctgcatatacatatagaaaaaaaacacctataaaagaaataactagataaactagagtatctagcctaacaatatccatcttagcttacaagattcatattctacactcatagatccatcttatcttacaagatactctattaccttagt

SEQ ID NO: 67080 - DNA, 463 bp, Zea mays
  unsure (1)..(463): unsure at all n locations
agcttgtgaaggatnttcatccccacatgtgctaagcggcgatgccacagccagcccatgctagtcttagcaattaagcatgcatctagaccggccttctcttttgcaaaatcaactaaatagagtttgtcgtctaatacacccttaaaagctaatgaaccatcacttcttctaaagacagacacatctatatttgtgaatagacaattatatcccatattacataattgacttacggataacaaattatatccaagcgactcaactaagaatacattagaaatagagtgctcatttgagattgcaatcttgcctaagcctttaaccttgccttgattcccatcaccgaatatgattgaatcttgggaatctttattcttgacgtaggaggtgaacatcnttcttctccncgtcatgtgggttgtgcatccgctgttgataatctagctggatccaccggatg

SEQ ID NO: 67081 - DNA, 464 bp, Zea mays
  unsure (1)..(464): unsure at all n locations
taaggatatgctaatcaccaccttccaaggctttcatactaagccagtcactgctcaggctttgttccagtgcacacaagatcacgaggagtaccttcgggcgtttgtccgaaggttcttgcgtctgagggcacaagcgcctatagtgcccaatgaaattgtcattgaggccatgatcaaagggcttctgccaggacctacggctcagtattttgccaaggaatccccacaaaccctggaaaagcttcttcaaaaaatggatgagtacatccgggctgataatgatttccaccaaagaagggaagaagcatacaagttttctgagatgaccaggggctttggaggaagaatccaccctaggcacatcagatcgatccataattccaactcaagtgatgacagaggaagccagcctcataggccacaacacaacttccaatcttcanggcaacaacaacgctctt

SEQ ID NO: 67082 - DNA, 456 bp, Zea mays
  unsure (1)..(456): unsure at all n locations
agcttcgcattaagttcttgcttttcttgttcaaactgttcagactggcagagaagcttcgtatttaattctgctattttagcttcggcttctaccaataagccttcagttgcctgaagctcgaagttcttcttttcaatagtagctgattgctcttttattttgctctctaaattttcaattataacctcgtgttttttgtcttccagatcctgctgcattttcaaagccttactcaacaacatactctgcacataaacaaccttcgttagaaatgtcttcattattaaaaacaataaaagtcaagggaaaagtagttcaccttgaaattggaataaaataaactaccaacgatatgttgtcgtcggtagcgactatatatccgttccagcttcggaaaaccgatgctctntgatagagtaccgataatcttagctccagtctgatcccggatac

SEQ ID NO: 67083 - DNA, 473 bp, Zea mays
  unsure (1)..(473): unsure at all n locations
tcgtcagatgaagccccaacggacttagtttgacaggctaagtttcagtcattacctttagaattttctctatttcagcatcagaagatgtcgcagaagtcttctcttcttcatcaattgatttttgttctggggttgattcctttcttttcttcgaagttaacactttcgattcaaacttttctttcttcttttttgattgatctttgtcgtctttgatcaaagcgccagctactcttttccttttctgcccttcggcacccttgtcgagtcgctcataatcaggatattcaaagcctatagcatcgagcactgtgtttagccttcgtttcggccgggtgccgaaggctgctgtcatcaattgatcctctttnttagaataattcccaagaatttcagtgcttattacttcgattgtttcaagccattcttggcagggtgctttgaaatatttcttgaacttatagtggtat

SEQ ID NO: 67084 - DNA, 364 bp, Zea mays
agcttcggcgatggttaaaaattttggcagcaaaacagtgcaaatagcaatgaatgctgtggtaacttcacaactacttgtcagtttatatagtgctgcaggtaaaaaggcgaagcggcggaattgttacaccaggcgcgcagtaacttgtacccgctgcgcagtgggccgcaaggatcaaacagtaactctgcaaggtgggaccgacacgcgctcggaagtcggatcgtttctccgcaacgagctcagggaaggtgttttttggaccttcggcttcccgaagctgaagaggcttttttcacgggtcaagctcgttacgaagaacgatctatcaccgcgaaaggggctactgttggggttgtgc

SEQ ID NO: 67085 - DNA, 471 bp, Zea mays
  unsure (1)..(471): unsure at all n locations
ttcttcggtgccatagcaagggtctatggcctccgaatgtgttcaaaaaactcgaagtggaagtgagttcaccggaggtgggcgccaatgttggggacttgttctcaagtgctatgagttaagaacaaggcaacacagagaatgttaaacgataaagtccttcgtcctttgaagcatcatttcccttatgatataacgatcttcagacgaaggtcatgaaggacgaaccttcatcatcacagtatacattaatgaaagacgaagcatatgaaacataaaagatagcatgaataatcatataacatcatcaatttagctnttttatatcatcatagaaaaatagggacaatatcgaattacaaatgtaccttcggcttggaaggagatgaanatacaaatgtgacgcanaagcaaatgcccagtcagcgtgaacagtacgggagtactgttcatctatttatagacgtggga

SEQ ID NO: 67086 - DNA, 463 bp, Zea mays
tcaagcttgcaagagaaggagatgatatgaatctctgggatgcttgagaaagtcaattcaatttttagtaactcaagctatcaatcttaaatgatttatatccaagaatgacccaaagttattttgaattgttatttctaaaactcatatcatctcggggaagatattgatgttgtaggaattaaagaattaatcctatgcagaaaagtcaaggcctacaacatggaggaaaaccaaaggatggtaacaattatgtttataagtgcaagtatcttaaattatcatttattatgtgtcttgtgtagtcacatagataaagaaagcacttcaaatgtttttaaattatgtcaccattccttgaaaaaattcctctcatatggtagattgagtattcatcatttctatattatgacaatctacatgatttatactgttggtagttccccatggcatgttcttcact

SEQ ID NO: 67087 - DNA, 446 bp, Zea mays
  unsure (1)..(446): unsure at all n locations
tattatctntctctagggactctattttccttcaatgagactactacacacataatagtcttgaaaagcggtgttagtctcaaagacttagattatagagtaacctccccataaaggtgtgcatacaagttttgaatacttgtaggagacatgcacattgattttgagatcaaaaggggtaaattatntataatccgtactttagcacatataattcaaaatgacacaattgaaggatgtaactttagaaacaagtaatagtgtcattatctaggaattttaattaagctatgtgtcatgttttattaaacattntaaaagcatgtaggtttgctcaacaagtctgaaattaaaattgagcattctaccatatgatatacctagcgtgcattcctaccaatggacatctcttcggatggtctatgcctcttttatgcagcctatct

SEQ ID NO: 67088 - DNA, 472 bp, Zea mays
  unsure (1)..(472): unsure at all n locations
ggatcttaagcaccgcggctgcagctttctttacaccaaaacaagtcacacccttcattggtgatactttcaggtacacataatctttaacttgaaagtacaagggttgatgtccgttgtctgcataactcttttgtcgagcttgtgcctctttcaagttatgtatgaatcgttgaaccttttcttccatctctttcaccatatcaagcctgaaaaaccacctttctcctggttcaaaccaattcaatggagttcgacactgtcgtccatacaaggcttcaaatggtgccatcttgatactttcttgataactaatgttatatgaaaactctgctaatggtaaacattcagcccatttttgtgggaattccagaacacatgcccgtaacatgtcttcgagtanttgattcactctctcagtctgcctacttgtttgggaatgataggccgaactgtggagcaacttagtacc

SEQ ID NO: 67089 - DNA, 468 bp, Zea mays
ggaccttgaaactaagcttgcaggagtattgtggcccttgttgttggctccctctatcatcactctgagtggagttatgaattgacctgacgtgcctcggatgaaatcttcctccgaagcccctggtcatttcagagaacctgaatgcctcctcccttctttggcggaagtcattgtcagctcggatatactcgtccatcttctggagcagcttctccaaagtttgtggtggcttcctagaaaagtattgtgcggaaggtcccggccgaagtcccttaatcatggcctcaatgacaatttcattgggcactgttggcgcctgtgccatcagacgcagaaaccttcggacatacgcctgaaggtattcttcgtggtcttgggtacactggaataaagcttgagcagtaactggcttcgtctgaaacccttggaagctggttatcaacatatccttcagcttctgccatg

SEQ ID NO: 67090 - DNA, 461 bp, Zea mays
  unsure (1)..(461): unsure at all n locations
agcttggtgccgatggaaaaacaaaaatccttgaaatcttggctgtcaaactgcttgccggtgtcaactggtagctcggaccgtacttccaagcggcgaacaatggtctgcccaaagaatttttgggcagtctttgatgtgattgtggaaaccgccctcgcttcaatccatttggcgaagtattcgacggctacgaaggcgaacttaaggttcccctgagcggtgggcaggggcccgacaatgtccaagccccagcgctgaagaggccatgtatgggcaatcagctttgtgtattgcgaagggttgcctgaccgangagagaacttctggcaggcttcgcaggaccttgtgactcgatttgcggcgcagatcattgcangccagtaaaacccttgtcggatcacctttgcgggcagnggcccttggccccgcgtgcgagccgcacgtgccactgtggacct

SEQ ID NO: 67091 - DNA, 476 bp, Zea mays
  unsure (1)..(476): unsure at all n locations
tactaagcttcactcctcccccatacatctcgtgtcttcgaggtactatcttnctctcctccatcccgaccctctcttcattctcctccgccgacgcgctcgtttcgatatgtctcgtatcgtgttgttagggatccgttcttcccccatgtaattattagtgtttaggtttcatccacgtccgtggttaagagtttatccccctctattcactactatttcagaacgggtttcaatcgatgtactaacgatttacgtttcaaatgtggccttcagatatccgcgacaaatcgggttcttcgtgttgcgtaccaatatccagtactagcaaggtgatgttaacatgaacttgttggttactttaattntcagtgctttaaggggtgtatatactctaattctgtattagntatgactgcatgttaagctagtgtggttaaagcgtcacagatgnggtntaggaaatattggcacgg

SEQ ID NO: 67092 - DNA, 385 bp, Zea mays
  unsure (1)..(385): unsure at all n locations
agcttgtgaaggttcttcatccncacatgtgcttagcggcgatgccacagccagcccatgctagtcttagcaattaagcatgcatctagaccagcctcctcttttgcaaaatcaactaaataaagtttgtcggctagtacacccttaaaagctagtgaaccatcgcttcttctaaagacagacacatctacatttgtgaataaacagttatatcccatattacacagttgactcacagacaacaagttatatccaagcgactcaactaagaacacattaaaaatagagtgctcggatgaaatagcaatttttcctaaccctttcaccttgcctttggttccatcaccggatatgattgaatcttggggatccttggtcttgacgt

SEQ ID NO: 67093 - DNA, 459 bp, Zea mays
  unsure (1)..(459): unsure at all n locations
tggatatttntcatcagaacactatgggtattgnngtgtattatgaaaattcttcttcacgaagcatgaaaagaagggaaggtgttttttcttcaaagactcaaaaaaggtacgtatgtaaaatttcatgcatcgtaaagaattgaaccataaaaaacaagtatattacattcagaagtataaaatattacacatattacatttcagaagtttttacaataacacttagtcttccttaagtacaacttccgcagcttcgttcatgagtngattaacaacttgatccatgatagcttcagccatcttcttaattttgtcgtcttctttcgggtgagggcccggagacgctntattatgatctgaaggaggacaggatatggctacattgttattacaaattgcgaacgaagttttaaataaaaaattacaacacaattaaaaccattagttaatacctat

SEQ ID NO: 67094 - DNA, 455 bp, Zea mays
  unsure (1)..(455): unsure at all n locations
agcttgaagccatggtaagtagcataggcatgtttaatgcgaattgattctagcctagctacgggtgcatgggtttaacttaaatccaaaccttcgacttgtgaatatcccttagccacaagtcggactttgttccttgtcaccacaccatgctcatcttgcttgttgcgtaaaactgatagtcgcctagaggggggggtgaatagggcgaaactgaaatttacaaatataaacacaactgcaagccgggttagcgttagaaatataattaagtccgcgagagagggtacaaaacaaatcgcaagcaaataagagatgtgacacacggnatttgtttaccgaggttcggttctcgcaaacctactccccgttgaggtggtcacaaagaccgggtctctttcaccctttcctctctaaacggccctccgacgagtgagctttttctcaataaaacc

SEQ ID NO: 67095 - DNA, 444 bp, Zea mays
  unsure (1)..(444): unsure at all n locations
taacaatggtggtggtgggggcctccctttcattagagtatattcatttcctgcctacaagaggaatctctttaagttcaacctcattaaataatcttctaaatctacctagcatagctttggttatgctagtgttatttttgtcttcagagctatagatccaattgaagtcaccagccacaaaccaaggaacataactagtagtattgacctgccttaattcactcaaaaaaatcttgcttccaattatcttggtgaggctcataaacactagtaaaccacaaaagcttcattgaacatattttacttggacagaanaagaataattatgaacctttntattaagatncaataatttgctctctgctttctatattaattagtttaagtgggagctttgatcttcatataaaaattcaaaatagaagacaatatttaaataac

SEQ ID NO: 67096 - DNA, 456 bp, Zea mays
  unsure (1)..(456): unsure at all n locations
agctntatatggacgacgatgtcgtactcttcttaattggtctgaacctggtgaaaggtacttcttcaggcctgatatggtgaaagagactgaagaaagagttcaaaggataattcataatttgaagaaagctcaagctcgtcaaaagagttacgtagacaaacggcgaatgcccttatatttccttgaaggagactatgtctacttaaaggtttcaccaatgaagggagtatcgcgtttcgggattaaaagaaagcttgcaccacaatatattggtccttttcttatcctggatagatatgggccagtggcataccgacttcagttacccgaaaccttgtctgctgtgcataatgtgttccacgtgtcccaattgaagaagagtcttctggttcctgatcgaaccgttgaagtgacagatgttgtccttgaaccggacttgacatattctgagca

SEQ ID NO: 67097 - DNA, 286 bp, Zea mays
tcccgggtgcaactcgatggccaactcaatataccggtccgatggcattcctggcaattcatcaagaaagacatctgcatactcacagaccactgggatcttcttcaggggtaactacgtcatagagaaagcacatgactgagaagaaccctgactatgcagaatcaaagtgaaattcccgcacaaaggagaattaacttccacggtacgactggctacatggagcacaacttggtgcaggtcatccaatttgctcctagaataatgtccacagtgtccaatccca

SEQ ID NO: 67098 - DNA, 444 bp, Zea mays
agctttaagacattggagctcgtttgtgtctcttacctctggggtagccgtagtaggtcgaagcaaagccagatctgtcacccattaccaaacgactttgttgttcctgtccaccttaaaggtgaccaggaattttgatttcgcttactggatcagctgctccttgtgctcctcgaactgaagctgttcttcggccggcaaggtttttcaagtcggctctatgaaattgctggtggaaacgtcagaactatcttttgaaccgaccattgagggtcgatctgataggtctgtacgccaattccccaaaggagttgccaaaaagtgtgttggcgccgatcagggcaccaaacactgcgatgagaatcggcggcagtgctttctgtggaggcgcagacggtccatgacctggcgcagagctcgagttcctgcctgatgggtcggatg

SEQ ID NO: 67099 - DNA, 439 bp, Zea mays
  unsure (1)..(439): unsure at all n locations
agaatatttagctcattcctcaacatacaaaagcgggttttgtctaaaggctttgtgaaaatatccgctaattgatcttccgatctcactccttataaaataatatctcctttagcaacatgatctctaaggaagtgatgacggatatcaatgtgcttggtgcgagtgttgtacaggattattggcaattttaacagcactcccattatcacacaacaaatgtaccttttctagaactacaacatagtttagaagagtttgtttcatataaagaatttgtgtgcaacaagcacctgcggcaatgtattccccttcggcgggtgacaaggcaacactatttttctttttagaggtccatgaaagtagtgatctcccaagcaatnggcatcctctggatgtacctttccctatcaatttgcaaccagcataatccgaatcg

SEQ ID NO: 67100 - DNA, 458 bp, Zea mays
  unsure (1)..(458): unsure at all n locations
agctttaccaaatggacgtgaaaagtgcttttctcaatggaccaatcaaggaagaggtctatgttgagcaacctcccagctttgaagatagtgagtaccctaaccatgtgtataaactctctaaggcgctttatgggcttaagcaagccccaagagcatggtatgaatgccttagggatttccttatcactaatggattcaaagtcggcaaggccgatcctactttattcactaaaactcttgaaaatgacttgtttgtatgccaaatttatgttgatgatattatatttgggtctactaacgagtcaacatgtgaagagtttagtaggatcatgacacanaaattcgagatgtctatgatggnggagttgaagtacttcttaggatttcaagtgaagcaactccaagagggcaccttcctaagccaaacgaagtatactcaagatatcctaagcaag

SEQ ID NO: 67101 - DNA, 198 bp, Zea mays
gaaaaaacaccacaaaacacgaccacacaacgaaccaacaaagaaacaccgaagagcaagacaggggaacggcgagggggaacacagcggaccaggaccagcccgccggcgaaacagcacgcccgggcaccgccaagcccaaaaagcgacagcccacccgacccacgccacaagccccaaacacggcccaaggcccgg

SEQ ID NO: 67102 - DNA, 462 bp, Zea mays
agcttagtagacattgcagagtcctttatatcattaggtatgtgggctgcatccaatgcctatctaaactctgtacatttttatgtgttgttgctctattactcagaaaatgaaaatgttggtgtcatggggctgaggaaaaaacacaggatttatgaaataatccttcttgcaacatgctcacaggaaaaacatagacctcctaatttgtagtgttcaacaaaagcaagaaacctccacaacaacaacaattgcaggcaatcttccacctgtcagcatgagctacaaaaacaagctaataactagacaaaacaagctgctgatcaaaaacctcatctatcagaaatatccgatgaagtgagaagtagtgattcctcagcttttatatctgcgtgtgcttgagattgaaccaaggagctgaggctacgcttgtgcctgtgcttgtgcttgtgcatgtgcatg

SEQ ID NO: 67103 - DNA, 250 bp, Zea mays
cggcaatgaatatacaatatataacgacggtcaaaacaatactatgaaatgtgcctgttattatgtcaagactgcatgggtgtcccctgcaagactaataaaaccacgtgctatacaaagggggttgtcgtggctaattgtctacatgatgatcacaaccgtaagaaaaaaacaaaattagggatgtgctgttgaagaatagcatactatcactaccgtaaaataacaaacatccgaccggcagcttatg

SEQ ID NO: 67104 - DNA, 461 bp, Zea mays
  unsure (1)..(461): unsure at all n locations
agcttagcaagtgcgagttctggattagtgaagttctgttcttgggtcacattataaaccaagagggattgactgtagatccgaagaaggtaacagctatcttggactggaaagcaccaaaagatgtccaaggaatcaagagtttcatcagaatggccggttattatcggcgtttcattgaaggtttctccaagatcgccaggccactgatagccttgctggcaaagaaggttgagttcaagtggaccccagcatgccataagtcctttgagacattgaaggagaagttgacaatggcaccagtactgattctgccagatgatcacaagccattctcagtgtattgcgatgcttantacaccaaactgggatgtgtgttgatgcacgaagggagagtagtggcatactcgtcccgacagtngaagattcatgagaagaactactctactcatgatctggag

SEQ ID NO: 67105 - DNA, 473 bp, Zea mays
  unsure (1)..(473): unsure at all n locations
tctcctggacaagcgctgcacttaccgctgagtgcgaagctgccacatataataacaaaggagcccctggcattggtggagtcaatgttgttagatctatcaaatactgtttcagctcttcaaaagccttctgctggactggtccccattgaaagacttcggctgacttcagcacttcgaagaatggtaagtttctctctgctgatctggatatgaatctattgagagatgccaatcttcctgtcaatctttgagcccccttctttgtagttggtggctccatccgaagtatagcttcaatcttacttggattagcttcaattccctttgttgaaaccaagcatccaagagatttccccttctttactccgaagacacattnttctggatttaactntaagccagcttgcctganactggcgaaggtctcctgcagatcagcaatatgattctcctgtttcgtgctttttaca

SEQ ID NO: 67106 - DNA, 458 bp, Zea mays
  unsure (1)..(458): unsure at all n locations
agcttctaaagggagagcacattntatgactaaccaatgttcattttgagaaagacagcatttgtagcgcatgccaagcaggaaagcaagttggtgtccatcatccacacaagaacatcatgatgaccgacaggccgcttgagctactccacatggatctattcggcccgattgcttacataagcatcggcgggagtaatttttgtcttgtaatagtggatgattattctcgcttcacttgggtattctttttgcaggaaaaatctcaaacccaagagaccttaaagggattcttgagacgggctcaaaataagttcggcttaaggatcaagaaaattagaagcgacaacgggacggagttcaagaactcacaaattgaaggcttccttgaggaggagggcatcaagcatgagttctcttctccctacaccccacaacaaaatggtgtagtggagagg

SEQ ID NO: 67107 - DNA, 471 bp, Zea mays
tgtcaagcattatttggtacccatctcttgatgggtccatcaagggtagtcaacaaagatctaggaacacaaacgtcctttgtgttagcactaggtaaactcgttacctttctagcaccagttgcaattttgggttgcctagttacaagagaattaattgacaagctaggagtgggatagttaccaatggaacaatccttgcattgatgtcccttctttcggcatatgtagcaaaggcgatcttcaagtcttgaagatttcttctttccttgtttcttgcttgctacatggttagttagtattttcttttctaaccctatgcctttctgtttcaaatagggacaagacttaattaagtgtcccttctttgagcatttaaaacaaagattatcatccttgttagtaatcaagtcatttttaatatagggacatgacctaatcgagtgtcccttttcaaagcattcactacac

SEQ ID NO: 67108 - DNA, 449 bp, Zea mays
  unsure (1)..(449): unsure at all n locations
tcaagctgtggggtgtagcagaagtgacaccaactgctatgcgttggtgtaagcgcagccatacccaatcgccctcatggaactccacttccagtcggtgcttgtcctagtagcttttcattgtcacctgtgactgaatcaatcgatcacgaatatccaccaagaattcgtcacgtgcctgtagttgtttgccaacagcagccacctgtgatgttcctggatgatagggcagaagagcaggaggttctcggccatataccaccttaaatggagagcatcggagagcagtttggaaggaagtgttgtagcagaattcggcccatggaagccattaaagccactctcttggtctatccnctgccaggcaccgaagatacatggtgataattcgatttaccacttccgaatgtccatcagaatgngggtggaaagctgaactcatgtgcagc

SEQ ID NO: 67109 - DNA, 471 bp, Zea mays
  unsure (1)..(471): unsure at all n locations
ntagtgactagagagagtgatttgtagtgttcatttgatctcttgcgcttggatcgcttcttttctttcgcattctttcttgtgatcaaaacactcacttgtaattgaggcaagaggcaccaattgtgtggtggcccttgcgggaagtttgattcccaagtgatttgagaagagaagctcactcggtcggaaggaccgtttgagtgagggaagggttgaaagagacccgacctttgtggcctcctcaacggggagtaggtttgagagaaccgaacctcggtaaaacaaatccgcgtgtctcacttcattatttgcttgcgatttgttttgcgccctctctcgtggactcgattatatttctaacgctaacccgacttgtagttgtgattattnttgagaatatcagtttcgccctattcaccctcccnctctaggcgactttcaaacacaatgtttngtctacccatagca

SEQ ID NO: 67110 - DNA, 462 bp, Zea mays
  unsure (1)..(462): unsure at all n locations
gcttcagctccatctatattatggattgcttttgaacctgtccagnttccttcggcctttctggcagcttcttgacttccgtgaatagcaataagcccttgatccgaaggtatcttcatgcaaagatatgttgggtgaagaattgcttcaaaagcattgagtgtcccacaaccaatgattgcgttgtaaggatattccatgtcaacgatatcaaacacaacttgttcagtccttgtattattgataaatccgaaggtcactggcatcatgatcttgccgagcgctacaatctgccttcctccgaagccacaaaggggatgtgtagcatcatggatcttatcttcgggctcttgcatctgtctgaaggccttagcaaatataatatccgctgcactacctgtgtcaaccagaacattgtggaccagaaatcctttgataacacaagaaataaccatagcatca

SEQ ID NO: 67111 - DNA, 442 bp, Zea mays
  unsure (1)..(442): unsure at all n locations
ctaagcttatgtncaagatttctttagctctgagctcaggcaccttctgttccaaatgaaatcatcattgaggcaatgattaaggggcttcttccaggcccgacaacccaatacttcgctaaaaaaactccccaatccttaaagaagttattacgtaagatggattaatacatcagtgtagataatgattttcgtcaacataaagaagaagcacagaggcccacagaaaccactggggtcttcaaggaagatttcactgcagacatgtccgatgtgtgcacaacctaagccaaaatgaatataaatctaaagcgcagcagaatagtcagcagaattcatcccaggcacttggatcacaacatccttcgcacgacaactttcattcaccagcactaagaggaagcagagaaggatgatgctttggtggaagggtcaacaacaa

SEQ ID NO: 67112 - DNA, 462 bp, Zea mays
agcttaactaaagtcatctaacgagtcggctagctagagcaacgacatagcccgctaaataacatacacgtcagcttgtctattattatcaaaatccgagacaccacatacactagaacatttttataaacattcatattcacaggtatttttgcacaccgaccaaatcatacgaatcgtaaactactagtctccaactcacaatcaccatgcatttactccccgatcatgaacacatacatgtttatcatacgaacagagcatttcaataattatcctaaaacaattaactccattacacaacttataccacaaacctacttgacttgcttgaagtgtctattcgaatccgtgagcacaatcacacattatatgcgaagcataatttaacgaacacataatacgcatcgattcgattcgacttataaatatcgagaaagcgatgactagtttggcatgtca

SEQ ID NO: 67113 - DNA, 469 bp, Zea mays
tactaagcttccaatataacagtgaaagataagatcgagctgaacataacatatgcaaacatttaaacctcagaaagtgcccatataactcatttgaatgtaggacccaagtaggttctccctggcaagcaggaacttggagttgtctacacctcacaattaggcaaatcatcatcgaaagcaagaaatttataagcacattgctctatctatgttctaccaacaaataaatattgacattttcattcaacaatagccaccggaaaaaacacatgcattgctcaaagtaatgttcagaaagctcagttaaagcccatatatatcattccaatgtatgaccccaagtaggttctccctgaaacgcacggacatggagtgatctacatctaattcaaagggcgattcatcattgcttagtaaaataatttcaaatcaatataataaacaaaagtcagatgccaatacaatg

SEQ ID NO: 67114 - DNA, 455 bp, Zea mays
  unsure (1)..(455): unsure at all n locations
cagcttgacattgtcttcctggtggaagccaattncattcttaatgccagggcgtgctccactatagagcatgcttttagccaatttaaatttttcattttctaagtcatgctcattaattttagcactaagttgagctatgtgatcatttcggtggttaattaaagctaggggatcatggatagcatcaacatttatggctctacatctagtacaaatagtaacatgatcaacactagctgtagatggttcgccagcatttaattcatcaatcttagcattgaaaatgacattttcatttctaagattggaaataaaattatttgcaacatttaaatcttttaccttagaaatttaattatcattctcaatcttaaagctagaaagtgattattcaacttgtcattttagaaatcaactagcttatcattttgaggtgacagagaatatcacaa

SEQ ID NO: 67115 - DNA, 446 bp, Zea mays
  unsure (1)..(446): unsure at all n locations
tacgttntaggccgaacgaggcattttcttgacattttctcatcatgatcccttagtaacttttggtgtagagttcatatagagttgattgagcaagatgacaaggtttggttgaatttcaaaatttgcatttgttcaaacgagcagtttcaagtctgtataagatttatcatttcacgtgagtatttgctttaaacttatagaattctatagaatacacatgatagatggagatgaattatgatttagagaaaataagtcgatttgcataagaattaattagagattgacacaacagagagtccgctagagaatgcagattcatattaaatagtcagacatagattgaagtcgacaaatcggattctgacaccgattggataacacaacaactatcaggagtccaaataaatgagtctggacaagatttgtgagacaagattgac

SEQ ID NO: 67116 - DNA, 228 bp, Zea mays
agcttgaagccatggtaagtagcataggcttattatatacgaatggactcaagcctatctacgggtgcataagtttcaccgaaatccaaaccttcgacttgggagtatcccttggccacaaagtcggctttgttccttgtcaccacaccatgctcgtcttgcttggtgcggaagacccacttggttcctacaacattttgggtaggacgtggaactaaatgccatacc

SEQ ID NO: 67117 - DNA, 458 bp, Zea mays
  unsure (1)..(458): unsure at all n locations
actaagctgccatacctgtcanagcaacagcacatgccagcacatcagctacagaccataccagtaacttggcctttcgcatgctggggattggatatgattggacctttcaagaaagttcaaggagggtacacccatgtattggtggcaattgacaaattcactaaatggatagagttccagcccattgcctctttaacctctgttaaagccgtggaattcatacaaagcataatattcagatttgggataccaaacagtatcatcactgacttgggatccaacttcaccagttcagaattctttgacttctgcgagcaaaagagcattcagatcaagtacgcctctgtagcccatccgagagccaacgggcaggtngagcgagccaacggaatgatattggaggcactcangaaaagggtctttgataagaacgaaaaattcgcaggaaaatggat

SEQ ID NO: 67118 - DNA, 341 bp, Zea mays
  unsure (1)..(341): unsure at all n locations
agcttttgtcattaacattcttagttaatccatggtttccaaggctttggggctccctctccttcacttaacacatgtgataacaagtcatggggcacgagtatggccttggtaacacctgggttgttacactgacggggtggaaccgtgactgcgaaggggagagggaacctgccggggttcgaccgccggtgaaatctcgcggcgattctccgccgagagtccggttttgcgacngtggagtggtggcgaagcacgggcgggggtatggggtcacggaggtggggtcaattngaccggtggaggcctgatgtggccggtccactgcgggtggcgggcac

SEQ ID NO: 67119 - DNA, 408 bp, Zea mays
  unsure (1)..(408): unsure at all n locations
acagcttcgcgcgcacgggaacacgacagttgagcacactgcgatgagactccaggagcttcacagcggccaccatgggagctgcgcggacctggcaaaatctaagcagggagggagcgtgacgcttgagagctgagcaaggccgagcgggagcaaaacgctgggcgcgcagaaaagcgagccaagcgcgcacgcggagttcgacggcggcttgaagaagagagagaggtattgacgcggctgggctgaacagagagagcatgggcgcgcggcatggtgagtgcgccaggaactccggtcgcgagcagagcatagggaggcgcgagggagcatagagctccagcgagctggaggatgacagcgcgcangagcaagcttggttgggctggagcgcgcacgggaggagaa

SEQ ID NO: 67120 - DNA, 347 bp, Zea mays
aacttcccacgcttgccctagagatctgttttttaaaaggaattaagcttacacctagttcctaaataattttggtggttgaattgcccaacacaaataattggactaactagtttgctctaatgtataagttatacaagtgttaaaagttcacaacaagccaattaaagagaccaaagttgggttcaaaatggagagctaaaggcattccgaaaggctccctggtctggcgcaccggactgttcggtggcgcaccggacaatgtcctgtgcaccaggggacctctcgcataactcttcaacctcgggaattattcagagccggcgcgctataattcaccggactgt

SEQ ID NO: 67121 - DNA, 478 bp, Zea mays
  unsure (1)..(478): unsure at all n locations
ctaagcttggtctcctatgcccagaagccgacacggttattttcatcaccttattgaggaccatgtccagctcattgtcgggtcttcggacgaggaggtccagaagctcatcgaggtcctccttgcccacaagatcagccagcggaaagccccttccggccgtctgcggattggaattaagcacgaccagctgggcgctcgaagtantggaggaagaagcagcgccttgactatgagcctcattcgtcggaaccgccataaactccggataggactctacacatctgattaaatcctggatgatagtaatcttgccattaagcttcgcacctgtcatggttccggcacggcggccttctattaggtcttcgatgtcgtacgccaagcatctgatgtatccagcccaggattgaagcctgtcggacgggtcttgggaactcctgataagtcttcgagtatcacggatgatgccctggat

SEQ ID NO: 67122 - DNA, 365 bp, Zea mays
catatatttgttatatgtgaatagattcaagcctaactaccggtgcatatggttcgcccaaatccaaaccttcgacttgtgaatatccttcggccacaagtcgggctttggtacttgacaccacaccacgctcgtattgcttgttgcggaatacccacttggttcctacaacattttgattaagacgtggaaccaaaagccatacctcgttcctagggaaggtgttgaacttctcttgcatcggcaccacaccaatcgaatcttgtagtgcttcctctaacttgtggggctcaatagaggaaacaaaagagtaatgctcacacaaatgtgccacaccagatctatgggctacccccttatgaatg

SEQ ID NO: 67123 - DNA, 481 bp, Zea mays
  unsure (1)..(481): unsure at all n locations
tgcaagagatcaatcgnttgattattgccaaattaagtgtatttattgaaagnaccacaacaacaagcagtaagttgccatgttaagatgcacaatacatatataattaaccataggtataccaacctctatcatcattgtgtgcatgcgtgccttgaagtttaatcaacctaaaccacatatttattggtagcttataaaaaggctagttcaatgagctaactaaacccacgaaggccgggaccaagctaggggagcatgatgatatgatcagacaataaaaaagttaagaaaacacaagccttttctcctctaatcctccaccttctctactatgtgctatcctaaacttgcatcatttgctgccgacaacaagcttaaggacatacgannaaacataatgaatcacagttctagcaagctagaacctcgccaaagcattaatatagttaaccacataaaatgggactagaaccggacg

SEQ ID NO: 67124 - DNA, 454 bp, Zea mays
  unsure (1)..(454): unsure at all n locations
agcttgcaactctggttggggttcttggtttatgaaccttcgtcagcacctgtgcccgccgcatgctgttcgccggttcatcggcgccctgaaccagggcccgccgttgtgctacagctattcgatgaaatgcccaaaagcaaattttgcagagaagcaaacatcaagttcagtgatacttgttctgcgaatctcgtcagttcactggtataaccaccacctcgacagcaatggattgatactctactttcggcaatctatatttgtaattacaaagtatgtcatttaggctttctccaacaatatccactaaacttcgtactctaaaaatatattctttgtcatttacagaacactctcaaaaattttatcatctatatcttctccgtctcgagcaacgtccctaaatatgatcctctatatctccaanattaacctagaatattattctctc

SEQ ID NO: 67125 - DNA, 418 bp, Zea mays
  unsure (1)..(418): unsure at all n locations
tctactgaagcttcngctcaacacgctgaagctgtatctggccttcagagccctacaaggagcaaccttttgaagccgaagcaataaaaattccagaaccagtattagttgaagaaactgacaccgccatccccgaagcacctgccagcacgcgtgattacatgatacgacatgcttcggggaagaagctatctgaagaagaaactcatgaagccatccattatgcaaaggaactaaaatatccgaagggggcaataatattcaatggaacgaatgaagatgacttcttatactgcctgcctgacaacaaagagctatctgtctgccgagaaatggccagaagtattggtttcccgaagcttgaatctggattaagcgccatgacgaaagaagatctcgcagacagtcttgcgtacaa

SEQ ID NO: 67126 - DNA, 461 bp, Zea mays
  unsure (1)..(461): unsure at all n locations
agcttaataggcggagaatatttcactgacatttatgagaatggcggncggcggatggctcacgaaataataaaaaaaagtgaaaaagatactctcgacactatagaagcgacaaaaacagctgaaaaggctgcggagcttgagagacgaataggtattacttaacgatctttacttttgatgtttacttttgcgacttccaaataatttatgttttctaccgcagctgaactatctccttccccagagcccttcgagccactggccgaagcagaggcaaaagaatcatcagaaattattagcatggctgaaaccattatggacgaagtcgttactcaactgctgaccgaagctgcagaacatagtttgaaagaagaagaatatatattgtagaaatattgccaaaatattaatgtaacatttgctggactactgcttgtatattggactcatgagtctta

SEQ ID NO: 67127 - DNA, 357 bp, Zea mays
  unsure (1)..(357): unsure at all n locations
ttgactgaattggagtccncggcttatttcttaccgtgttcatggagagnggcctccatacgatggtccaaagtatgtagctgatccaggcagtcgttggaacaagcgtggatccagaaagagaaagatgcacaagatggttatggatcacatacctggtagtaatatgcggggaagaagaacaccatttcttaccgaccctgaatagtacgagtgtggcaagtgcggtagacttggtcacaattcacgcacctgcagttggcagattagtggggtgtgtattattcgtaaatntaataatttggatattcattactagtatgtatttttattctattatatgaagtatttatttta

SEQ ID NO: 67128 - DNA, 471 bp, Zea mays
  unsure (1)..(471): unsure at all n locations
taccacatctgaagcatgagcgcttcccctctgtcttgtgtcttgcttggttgccccttgcggtcttttagtgccgtcttgaatctcttgatgatgagagccatctcttcatcattaagtccggccgcctcaatttgtgccaccttgctaggtagcatttccttgcttcttgttgccttgagagcaagaggttgaggctcattgattggaccgtttagagcgtcgtcgatgtatctcgcctccttgatcatcatccgcccgcttacgaattttccgagtacctcttcgggcgtcatcatcgtgtacctgggattctcacgaatattgtttacgagatgaggatcaagaacggtaaaggaccttatcattatgcggacgacgtcgtggtccgtccatcgcgtgcttacgtagctccttattttgttgataagggtcttgagccggntgtaagtttgggttggcttctctccc

SEQ ID NO: 67129 - DNA, 451 bp, Zea mays
  unsure (1)..(451): unsure at all n locations
agcttctaaagggagaacacgtgatatgtttgactaacgtgcaattcgaaaaagatagaccttgtgcagcttgtcaagcaggtaaacaagtgggaggagcgcatcacagcaagaatgtgatgaccacttcaagacccctggagctgctgcatatggacctcttcggacctgtcgcttatctgagcataggagggagtaagtatggtctagttattgttgatgacttttcccgcttcacttgggtgttctttttgcaggataagtctgaaacccaagggaccctcaagcgcttcctcaggagagctcaaaatgagtttgagctcaaggtgaagaagataaggagcgacaacgggtccgattcaagaaccttcaagtggaggagttccttgaggangaagggatcaagcacgagttcttcgctccctacacaccacaacagaatggtgtggta

SEQ ID NO: 67130 - DNA, 479 bp, Zea mays
  unsure (1)..(479): unsure at all n locations
acactataaaactaagctttgacaaaaaaaacttattctactattttaaaatcttcaagggagctgatccataatcactttggccttattttctcccctttggcatcaagcaccaaaacgggatcaatcttggcccgttaaccccattgcctcaccaaagtcttcaattaagagcaaatggcaataagatttcatgagatgaacttggaattagttaccctctcatcggagtgcagtggaagtctttcatggtccaagtccaccttttccctttcaatcctccttcgagactaaattatcaaactcaagcacatggttagtctcaaagggtcaagttgtaacacatctccccctacacatgtgcatcactntgcaacggacttgtgaggtccagggagtgtttgtacaactngagcaccataataagcaacataatgcanaaaggaacatgatcaaaagcataactacatgtatgctac

SEQ ID NO: 67131 - DNA, 429 bp, Zea mays
agcttaaacagtaacatgggtgtcaatctttccaagtttgcaatcacggtccgagataactcttttgcacaaagctgacggaagaaatagctcaactctgaaagcggtagccaaacatgcttagggacatagcctcgaaccatcgcaagaagaatccgttcaatccatatgtggaagtcatgactcttcatccctaagactcgcagagtagataagttcaccccctactcaggttagctgcatacccatcagagaacatcaacatcttgatccactaaagtacttccttcctctgggccctgcttaggacaaaatcgaccttaggccttctccatgcctttccaccactaaacggattcatctcttggtttggtctgtcacataacgctgtcagatccacccttgcctttatgttatcctttgacttat

SEQ ID NO: 67132 - DNA, 465 bp, Zea mays
  unsure (1)..(465): unsure at all n locations
tctaaagggagaacacattntaggattaacaaatgttcattntgagaaagacagggtttgtagcgcatgccatgcgggaaagcaagttggaaccaaccatccacacaagaacatcatgacgaccgacaggccgcttgagctactccacatggatctattcggcccgattgcttacataagcatcggcgggagtaagtattgtcttgttattgtggatgattattctcgcttcacttgggtgttctttttacaggaaaaatctcaaacccaagagaccttaaagggattcttgagacgggctcaaaatgagttcggcttaaggatcaagaaaataagaagcgacaacgggacggagttcaagaactctcaaatcgaaggttntcttgaggaagagggcatcaagcatgagttctcttctccctacacacctcaacanaatggtgtagtggagaggaagaatcgaac

SEQ ID NO: 67133 - DNA, 427 bp, Zea mays
  unsure (1)..(427): unsure at all n locations
agctntgatccatggactgaacatcgccatatcactgggcattaagagattgatggtatacggagattcactggtggtcataaatctgataaataaagaatgggattgcttgaatgactctatgggtaagtattgcacagttgtccgaaagctggaagacaaatttgaagggctggaatttcatcatgtggagagagatcgcaacgcggcaacagatgtgttgtcgaaactaagatctagtcggacccaggtcccacctagagttttcgtccaagaagtaccacgcccgagtatttccttagatcgggcagacgagtgcaatgttctaaaccagccagagtcagactctaatgactagagggagccaatcatcagatatataaagaatgaagaggagccggatgacaaaactgcagcagaacgcatc

SEQ ID NO: 67134 - DNA, 413 bp, Zea mays
ctcagcttctctggatggctttggcatatgaagcttgcacatgttgtgattagctcactcaagaaggtattaaagaaagatatggttagaggattaaaggatgtggtatttgaaaaggacaagccatgcagtgcatgtcaagccggaaagcaagttgctaatacacatcccactaaagctttcatgtcaacatcaaggccactggaactacttcatatggatttatttggacctacaaattatgtcagtgccggtggcaacctctactgtttagtgattggtgatgatttctcaagatacacttgggtgttctttctccatgacaaatcttgaagtgcatctatattcaagaaagttgccaagaaagctcaaaatgaatttgatggcagattaagaagattagaagtgacaat

SEQ ID NO: 67135 - DNA, 352 bp, Zea mays
  unsure (1)..(352): unsure at all n locations
atcattnttagccaacagggtgaactaaccatttaatgagtgcttgccgatttttgggaccgcaacccaacaggtacttggtttaatcataacttttcaaatatttatccaaacataacaaactatgactttcttgaaagcttaaaatgttctctacaactttggtattttcaccttaacaagattcacacttagcatgggttaaagtgctaccacaacagaactgttcagatttgggcagaatcagacttgtgaatttaaaaatctcatacttaagattcagacatccaaacaaagcgattttagactttcttgaaagatattaaatgttctacaattatttataacatcg

SEQ ID NO: 67136 - DNA, 474 bp, Zea mays
  unsure (1)..(474): unsure at all n locations
ntgaatgtgtcttggagtggatggctagatcttgtaatgaatgtgtatgagtgaagggcttggatgaaatgaatggaggtggttggggttgtatttatagccaccaaccacttcctagttgttgctcctttcctgccggctgcggatggtccgcgtgtcacacccaggctttaagggacaaagttcggtgcatctcatacatgcgccaagaagacaacatatataataacaaagtgtatatagataaatgtcacagtaacatcaaagtatttattacatagcggaagtcttatacaaaataaaagataaatataaaacgaactaaggatcatccttagcgcaaaagtcaactggggaaacgccacctagatcagttcaaactcctcgctttgtggctccttctgaaccacctatntcttctcctatgggggtgtgagatagcaagggtgagctcacacatgatcatagctcaac

SEQ ID NO: 67137 - DNA, 468 bp, Zea mays
  unsure (1)..(468): unsure at all n locations
agctntaccaaatggacgtgaagagtgcctttctcaatggaccaatcaaggaagaggtctatgttgagcaacctcccggctttgaagatagtgagtaccctaactatgtatataaactctctaaggcgctttatgggctcaagcaagccccaagaacatggtatgaatgccttagggatttccttatagataatggcttcaaagtcggaaaggccgatcctactttatttactaaaactctagacaatgatttgtttgtatgccaaatttatgttgatgatattatatttgggtctactaacgagtctacatgtgaagaatttagtaggatcatgacacaaaaattcgagatgtctatgatgggggagttgaagtatttcttatgatttcaagtaaagcaactccaagaggacaccttcctaagccaaacgaagtatactcaagatattctaaccaagtttggaatga

SEQ ID NO: 67138 - DNA, 465 bp, Zea mays
tcagctccatctatattatggattgcttttgagtcagttcagtttccctcggcccttctggcagcttcctgacttccatgaatagcaatgggtccttgatccgaaggtatcttcatgcaaaggtaagcaggatgaagaattgcttcgaaagcattgagggtgccacgaccaataattgcattgtaagggtattccatgtcaacaatgtcaaacacaacttgctcagttctggtgttgttgatgaatccgaaggtcactggcatggtgatcttgcccagtgctacaatttgtcttcctccgaagccacagagagggtgtgtagcatcatgaatcttatcttctggctcttgcatttgtctgaaggccttagcaaatataatatcagctgcactacctgtatcaaccaagacattgtggaccagaaaccctttgataacgcaagaaataaccatagcatcgttatga

SEQ ID NO: 67139 - DNA, 410 bp, Zea mays
  unsure (1)..(410): unsure at all n locations
agctggtgaagattcttcattccaacatgtgctattctgcgatgccagagccagcccatgttagtcttagcaattaagcaagtgtcgagttcagctctatcaaaatctactaagtatagctgaccctctaacactcccttaaatgctattgaatcgtcacttcttctaaagacagtaacacctacatccgtaaacaaacagttgtagcccattntgcataattgagaaactgaaagcaagttgtaatctaaagaatctacaataaaaacatttgaaatggaatggtcaagtgatatagcaattttacccaatcctttgaccaaaccttgatttccatccncgaatgtgatagctctttggggatcgtggtttttctcataggaggagaacatcttcttctcccctgtcat

SEQ ID NO: 67140 - DNA, 486 bp, Zea mays
  unsure (1)..(486): unsure at all n locations
ctataatactaagcttcgcaactggggctgcagctctgcaaccgctggaccccaatttgatactctctcccttcgggaggcccgaagccagaagaggaaggctgtcagcccgacaccgctagaggatgagctagatcaagaaatcagagacatggagatgcttcatcaacaggtgcagaggaagaaggaaaagatggccaggctagctgacctgcaaaggcagatagacgaagcctctgaagaagttcgtcatcttactcacgatgagcagaaccgaaggcctcagcataaagaccttcatcatgaggatttcttcaacgaagatgactggtatgagaatttccaccatggaaattttgcttttgatgatgcttctgctctgtccactgagctgcaggctacaccttggcctccgtcctacaagccgcctcagcttcccatattcgacggccattcagacctgaagcagttnttgatgagctacga

SEQ ID NO: 67141 - DNA, 454 bp, Zea mays
  unsure (1)..(454): unsure at all n locations
agcttaaccaaataactcagataaatcttctttattatcttctcatgnggggacataaggggaattctgaatttcagaattctgaaattcagaccttgagccaaagatcatggatgttcaccttgatccctaactcgaatcctaatggccccattgacaaaattgtgtctaactaacccctctgtcatgtgccataagatggcattgggacgcgagccctatacacgacaaaaccttggatttgcctcgggtttgggcagggagacagaccggatttcctggctccatatctctgcaaccagtaggcaaaatcccatgacccccacacaagaatggtatctcgtatggaggagaagaggttctgtcactgaccaatgcgagagcatgctcggatgagcgaccacactcgccataacttgggcataacgcacgggcacacttgttctaccctggt

SEQ ID NO: 67142 - DNA, 420 bp, Zea mays
  unsure (1)..(420): unsure at all n locations
actatgggtatgctcttgcccctctctcgtctttgtgtctctccatcctncgccccaggagatcaatgagtggcaccagcaggcctactgggtgccatttatgtcagcaaacgacgaagaagaagaagaagcctacgttgatgatcgtgagcagtttgccccgcttccctaccatggggatccgggtcaatcatcctctcaccctccgccttcctaccctggtccgggacccattcctggtgaccctaggccatccggctctggttaccatcaccaccctccacctcctcctgatcatcgtacatcttcggcatctggtttttctgcggctgatgagccacctagggactccacattcgaggaggacgtgatgaggaccctcttccntgactacacttcataccctccatcatatccttc

SEQ ID NO: 67143 - DNA, 459 bp, Zea mays
  unsure (1)..(459): unsure at all n locations
agctntgcatggagcgaaaggattgctcgttatctttttctagtggcgaggacagaatttcgatcttttttagtggcttacgatgaactggctttgattaaaagaggcccgatggggccggtcatatcctttcatcttgttttgttagcagaagtggccaattggcgagtgggccttagcccaccatgcgtcgccttgctgtcccttcgcgcgcacgggttgcgggtccatcggcgcgcagccaattgggcaccttcgggcttcggcctctcgtctcccgtcccgttccatggaacgggccccagaagctcgagattcccttcatgctggccacgcgcggacgagaattgcatgcgcgtataggagggagcggnggcacggctagggctagacgaanaactcgtagctcgttaactcgctcgactcgactcgatagtggctcgactcgactcgactcgt

SEQ ID NO: 67144 - DNA, 473 bp, Zea mays
  unsure (1)..(473): unsure at all n locations
gaccttagaatactcagcttaactctcgcgagaccttntctcatttctttctatttatgtgtagntcattatcgnatgtgatattctatgcatatttacttcatttgttctctcgtatggtgtactgtttgttccctaatttgaatggatggatgtatgtatgcttgcaatcgcatagagaacgatccggtcgaagagcccgaggaactcgcaggagaagcccctgagcagcagttggttggtggaggcaagtgtcccttgacctatctctgtcctattcattctttaattcacctcccgctttacatatttatgcctaaggattgactagcttttgttatccatgtccttgtttacctatttgggttggattattattgtctagctttatgctattgcttaactctaatcaatgaacattatgagaatatctatgatacgctgttttcccctctcttatttatgatgtatac

SEQ ID NO: 67145 - DNA, 466 bp, Zea mays
  unsure (1)..(466): unsure at all n locations
agcttgtcccatcactcctcatgctcctcctctgccgaggtagggtcccactcgactatccaacccagtggcaagatggacgaccaagtcactctatcaaccatgtcctccagagaacctgtaaaattatgccacaagcaaggctgagtatactaatactcagctagacttatccggtgtgaggagtctactcctctacctctagacatgcagctgtttggttgaggggtttggtttgccaaaagcactagctgagtataaaatcaagttttagctttttcaagttttagtgtgactctcttaagacaaaatatgtacctatccaatcatacatggtatcaaacatttagcaatcaacatctttggccaagtcatcacattntccacttgtactcaatgtagcagcatggatcaagcagtctcattagctgcgagaagcaggcgattcgaatcgagtttcaacctt

SEQ ID NO: 67146 - DNA, 398 bp, Zea mays
tgacccggggacccgcgtcaccggaatagcccattcgtgctcaccggagttcaagaacccgccggcgcacgtggaccgggtaagcccctgcaccgttttccaattccttgcgcgtacggcctctgtgtcaccccgtgaagctcctcgtgcaccctaattgatctatgccgccgtggtttggccggagcaggagccgccgacgactcccgccgcctgtgctcgtggccagggtagctccgaccacctccgacaccgacccgcacatcggcgtgaccgttgcgacctcccggacgtcactgaccaccccgccggagctctactgccgccggtaagccccaccgccgtaaaatgtaccacgggcacttgttaagccggtcagggagcgcgggttagaattt

SEQ ID NO: 67147 - DNA, 411 bp, Zea mays
  unsure (1)..(411): unsure at all n locations
agcttatgaagattcttcatcccaacatgggctagtccgcggtgccagagccaacccatgttagtcttagcaattaagcaagtgtcgagttcatctctatcaaaatctaccaagtatagctgaccctctaacactcccttaaatgctactgaatcatcacttcttctaaagacagtgacacctacattagtaaatagacagttgtagcccatttgacataattgcgaaacggaaagcaagttataatctaaagaatctacaagaaaaacattagaaacggaatggtcaggagatatagcaattttacccaatcctttgaccaaaccttgatttccatccncgaatgtgatagctcgttggggatctttggttttctcgtaggaggagaacatcttcttcttccctgtcatg

SEQ ID NO: 67148 - DNA, 430 bp, Zea mays
  unsure (1)..(430): unsure at all n locations
tgtccgtcggaatcaaacgaagctccagttngaagcccgcttcgtcagaaaaaccttcggaagaagaaagtattaaatttccacattcatcattaaatggccagagtgcgttctaccgccagggttgagcgtgagggggcgaaactgaagcttcggagactgttcccatctccgaagccatgcaacgatccgggctggtgacttcggaaaagatccctagtgatgatgcagaacaagcagaacaagcagaacaagcaatcgctgaagcagaggaagaagatattgaggaaactgatcccgaagatgattaccgcattgccatgccaagcaagcccagccacttggacttcgggaaatctactgtttcaaaggctgatctttccaagatggtaaagtcgggctttttaatgaanatcagaagagctattac

SEQ ID NO: 67149 - DNA, 442 bp, Zea mays
  unsure (1)..(442): unsure at all n locations
agcttagcaatggacttccctatcctgtgtaagtacagtagccatctatgagtaacttccagtggtgtatagtactataatgtgctagcatatcacagtaatcaatagatgctatgggtatactgaaaagatgagaccagaaaacttgaagaggaataaaagggggcaacaaaaagttcacgaggggagggcaaaaccaatgtcatggcatgacaaaatgtattagactgctatccacatatgagcataaatcttggcatataagtataaaataagaataaaagaagagttaacatagaacatcaccattgaaccccaatcttaaacatgtagcttgaccgcgtaagtcttaatcaaaaaatnttatgcatatcgatcgaattgagatcataacacanaaatccaaaatctggtgggcgaagcatcaccacttttgctgact

SEQ ID NO: 67150 - DNA, 438 bp, Zea mays
  unsure (1)..(438): unsure at all n locations
tctaaagggagagcacattttaggattaacaaatgttcattntgagaaagacaggatttgtagcgcatgccaagcagagaagcaaattggtgcccaccatccacataagaacatcatgacgtctgacaggccactggagctcctacacatggacctattcggtccgatcgcttacataagcatcagcgggagtaagtactgtctagttattatggatggctattctcgcttcacttgggtgttctttttgcaggaaaaatcacacccaagagaccttaaaaggattcttgagacgggctcaaaatgagttcggcttaaggatcaagaaaattagaagcgacaacgggacggagttcaagaactctcaaattgaaggcttccttgaggaggagggcatcaagcattgagtctcttctccctacacgccacaacaaaatg

SEQ ID NO: 67151 - DNA, 457 bp, Zea mays
  unsure (1)..(457): unsure at all n locations
gcaagcttaccgnatttgaagcatgagcgcttttccttggctttggtcttgcttggctgtgccttgcgacctttaagagccgtcttgaatctcttgatgatgagggccatcttttcatcattaagtccagccgcctcgatttgtgccaccttgctaggtagcgcctccttgcttcttgttgccttgagagcaaggggttgcggctcgttgatcggaccattcaaggcgtcgtccacgtacctcgcctccttgatcatcattcgcccgctaacgaattttccaaggacttcttcgggcgacattttggtgtacctgggattctcacgaatattattcaccaaatgaggatcaagaacggtaaaggaccttancatcagtcggacgacgtcgtggtccatccatcgcgtgcttccgtagcttcttattttgttgataagggtcttgagccggctgtatg

SEQ ID NO: 67152 - DNA, 467 bp, Zea mays
  unsure (1)..(467): unsure at all n locations
tctaaagggagaacacgtgataggtctaactaacgtgcatttcgaaaaagatagaccttgtgcagcttgtcaagcaggtaaacaagtgggaagtgctcatcacatcaagaaagtgatgactacgtcgagacccctggagctgctgcatatggacctcttcggacccgtcgcctacctaagcatagggggaagtaagtatggtttagtaattgttgatgatttttcccgcttcacttgggtattctttttgcaggataaatctgaaacccaagggaccctcaagcgcttcctcaggagagctcaaaatgagtttgagctcaaggtgaagaagataaggagcgacaacgggtccgaattcaagaatcttcaagtggaggagtaccttgaggaggaagggatcaagctcaagttcttcgctccctacacaccacatcanaatggtgtggtagatagcaagaacaagacgc

SEQ ID NO: 67153 - DNA, 433 bp, Zea mays
  unsure (1)..(433): unsure at all n locations
ctgcagctggagcgttattggtgcgacttggttattctcctncttcttttcttccgtcgccttgaatgcgaccggttgagcttccgatgtagatggatcatcaagctcggtgatcttcctcgagccttcgatcatgcactcaaaacttacaaaatgcccgataacttcctcgggggtcattttagtatatctaggattaccacgaattaattgaacttgagtagggttaaggaaaataagtgatcttagaataaccttaaccacctcgtggtcgtcccactttatgctcccgaggttgcgcacttggttcaccaaagtcttgagtcggttgtacatgtgttgtggctcttccccttgcgaagccggaaccgaccgagctccctctcgatcgttttccgcttggtgaatcttgtgagctcatcttcctcgtgcg

SEQ ID NO: 67154 - DNA, 58 bp, Zea mays
ggtatgtgcccactgcctgactcatgagatgacaccggcatctatttctaacatgtaa

SEQ ID NO: 67155 - DNA, 448 bp, Zea mays
  unsure (1)..(448): unsure at all n locations
tatccacacattaatccttaattcctttnttcccgtctcatggacaaggcatcctctctggatccaagtccatagactaacatagatcctattatcaagatgaatacaatcaatttcggacctcacgcgagtgcaagaaaaatcactcgacttctaccgagatcatgtttagcaaagtagctactcgacctagcatactagtatccatctcaaaaaggaatcctaagttcatgcaactaggagtttcaagcaactcctacacttaagtgcacgatacaatcctacaagcatgcattaagtgtagtaaaatagcatatataaatacggttatgcataaaccgggcttggcttcaatagctggggctacngggaggtcctcgatggcagtgtcgggagcctggctctggtcttcctcttgagtagtccttgctcggggatgaacacgtac

SEQ ID NO: 67156 - DNA, 480 bp, Zea mays
  unsure (1)..(480): unsure at all n locations
tggcaagaacaaataactcanaacctaaaggaagaacattatatgggagtgaacaaaaggttattaaattgggagcaaaaggtacaaagaaaatgaacaggaaatgccagaagtgtggaattgctgatggtcacaacagtaggacatgtttgtcattggaggagaatagagtacggttggctagccttgctggacgtaagagaggacgacctcctggatctaagaacaaggttggaagtaacgctcctcattggaatgagacaacaacatcaaaaaaacacgcaattgatttcgataacagtgagtcagacagtgattagtatgttgtatgtgatatgaacaattcttttttgcaataaacattgcatgtgtcacanatgatttatatacnagtggttgttgaagtctagtaaatgtagtgtatattccttacntaatgttgcataatggtactaataaaacatcgtatacaacttgata

SEQ ID NO: 67157 - DNA, 411 bp, Zea mays
agcttcagagactgatggacacgattcaggtcaatacttcgtctgctcaagggacgcgatctcgcctcgcccgagcccagcctcgggcgggaactatagtcccaggcgaattcacgccttgcccgagggcctcctcaagcaacgggcgcaccctcggctcgcccgaagcccagctcgggcaggctttattgtgaagcaaccttggccaaatcgcctcaccaaccgaccatatcgcaggcgcattcaatgcgaggatcgcctgacgccttatcctgacacacgtgcctcagtcggcaaggtcgaagtgaccgcagtcactttgcccttccactgaccgacctgacaggaaaacagcgccgcttgcccctctccgactgttgtgccacccgtcagggtgaggctgacaacagc

SEQ ID NO: 67158 - DNA, 429 bp, Zea mays
  unsure (1)..(429): unsure at all n locations
tgtataatctactntatcatcactagaatcctcatcactagaagtagaatacttaggggtttctcgaacgcttacctttctcctttgccatgaggcaagtgtggcattcgttggggaagagagaagatttgttgaaggccgaggctgccagtccttcatcatcggagtcgaatgacgagcagtccgagtcccattccttgccaagatgtgcctcgcctttagccttcctatagcttttcttcttctccttcttcccatgtctttcttccccctggtcattttcattatcgggacattgagcaataaaatgacctgtcttaccacatttgaagcaggagcgctttccccttgctttattcttgttggggtactccttatgtccttttaatgctgtcttgaagcgcttgatgatgagagccatctcatctt

SEQ ID NO: 67159 - DNA, 417 bp, Zea mays
agcttgaagccatggtaagtagcatatgcttataatatacgaattgactcaagcctagctacgggtgcatacgtttcaccgaaatccaaaccttcgacttgtgaatatcccttggccacaagtcgagctttgttgcttgtcaccacaccatgctcatcttgtttgttgcggaagacccacttggttcctacaacattttggttaggacgtggaactaaatgccatacctcgttcctcgtgaagttgttgagctcctcttgcatcaccatcacccaatctgaatcttggagtgcttcctctaccctgtgtggctcaatagaggaaacaaaagagtaatgctcacaaaagtgtgcaacacgagatctagtggttacccccttatgaatgtcgccgaggatggtgtcacggtgtgatctc

SEQ ID NO: 67160 - DNA, 426 bp, Zea mays
  unsure (1)..(426): unsure at all n locations
ngacaacaccatttgacattgtacataaaatntctgatatcaagaatatttagttcattcctcaacatgcaaaagcgggtcttatcaagtgtcttagtgaaaatatccgctaattgatcttccgacctcactccttctaaaatgatatctcctttagcaacatgatctctaaggaagtgatgacggatatcaatgtgcttggtgcgagagtgttgtacagggttattagcaattttaacagcactctcattatcacacaacaaaggtaccttttctagaactacgccatagtctagaagagtttgtttcatatataaaatttgtgtgcaacaagcacctgcggcaatgtattcgcttcggtagttgacaaggcaacactattttgctttttggatgtccatganactagtgatctaccaagcagat

SEQ ID NO: 67161 - DNA, 457 bp, Zea mays
agcttcttcgccttttactttcagcagaatcttcgtttatttttcgctgtaagcctcccttatgagcttcttcgccttttactttcagcggaatcaacgtttatttttcgatgtaagctctgcattcccttcggaacgacttttgagcagaaaacttacactgcgctcccttaggaacgactttttactacttcgaagaagttacggtgcgttccttagaacaagtttttgataattcgaaggttctccgtgccaccataaattcttgtccttcggcaactcaagcctatggagaaaatatattttcattatgataataagctaaactgttacaagaatttgaaaaaacaataaaagacacttaaacttcccataattgttctttactacaaagaaagtaaaactgaatgcgaaaatgcaaaaagctactgtcgaggtaggatattttgcagtaaat

SEQ ID NO: 67162 - DNA, 470 bp, Zea mays
tcctctttgtgctctccaaatcaccagccctacgtgccttcacatgtctctatccaaaattccaagcacgggagacacaccacctcactagttagctagcttttcctctatatatatggtcatcaatggtaagatcactttatatagttgctagacacagctagcccctactcgaacgaacagcttcgagcggtcctgttttgctgtgtactaaacgacaccttttttggtttattttagatgggcttggatagagatgcactttggatcggagagaggttaagctaaggtgctagatgtgccttttgtgcgtcatgactcatgaggtcaccgaccttttggttctaaaagtacggggaccaattattcggtcgggccacttaatagatagtagtaaactctaatatgcaaaatgttattgttttctcagcttaaatgtacacgatgttattactcttctctactcttat

SEQ ID NO: 67163 - DNA, 456 bp, Zea mays
  unsure (1)..(456): unsure at all n locations
agcttggatgcagtggagacgtttgcatgcactgttgcatgcgtcggtttagttgcatacttgtatgcggtgtgggggtttaacggttttgtgcgtgtgagactgagcatgttgcatgcatggccacgcgtcgggtcccttgcatgcgcgcaaaggacaggggcggggcacagttgtggtctacattagctttttaatagatagtagagattttaccgtttggtttctacaaactgtccaaacacatgtgttgataagggcatttatttttaacatttaattccacatgccatcgaacacatgctctatcactntatgctcacaagctacagtggaggcatttgcatgcatagttacatgcgccagattacttgcatgcgtcaaggatgaggggtggnggcacggatatggtctacaatagcttcttaatagatagtagagattagtctgacgaca

SEQ ID NO: 67164 - DNA, 472 bp, Zea mays
  unsure (1)..(472): unsure at all n locations
tgccttcgcctcagtatatcacccgcagtccaacggagttgnggtacacgccaatgtgacaaatttcacagctgtcaagaagatgctcctcgacgaaaaaagggcaggtgggccgatttgttacctgaggcggtctgagcgctaaacacgactgagtgcagggcgactgggttcacccctttccgccttctatatggatcggaggccatgaccccacaagaaataaaacatgggtccccgcgaacagtttcgtcagctgtccccgacgtggacgaacccacttcgaaggatctcatcgatggagaccgagtctttgctctacaggctctaaataaatactaagcccagacaaaagcatggcgcgaccacgccgtcatcccgagggaattcagcgaaggggacctcgtactcgtccgaacagctcggacagagtccaagggcaagctggagcccatgtgggagggccctttca

SEQ ID NO: 67165 - DNA, 461 bp, Zea mays
gatcttaagtcacctgccgcatgcaagcttgtacactgatgatgccattgttcttgtccacctggacatgcaagatgcatgcatattgttggacatcaaaattggcggaaggtcggcgacgcctcgattaaattgactcagccgattatccttatctcatgcatgatctaatcacgtgaaatctgttgactatcgtctaagaacggatctagacccgtctatatatatgaagggatacgaccgattgagaaaccccgaacacattctaatcaaactaatctatttacctatatttatctttcatgccgtaggagtagacatagcgtagctttagtttaaatttatttgtgacctgccacaatcatcttccttcgactctacgccaactagagacgccctgggtggcctgtcgatctcggggcacgccttggaactcttctccttgacgagatctcttcccg

SEQ ID NO: 67166 - DNA, 313 bp, Zea mays
acactataaaactcaagcttaccggtgctaggaatctacccggcaaggattctatgaagactctccgggagctcggtctacgtacgccggtggtcgggtaaagtccggcgacatcgatctggtgtctccggcgaggtagagctcgattcctggctctgggagctttacccacgcacctctacgctatccctatggtcacacagtgcgttgaataggtatggttgccatgattctagcggccgctggcactccctgcgtatagcaatcgtcggcgaacctgccctcctgtgactgttgatagccatctgtggca

SEQ ID NO: 67167 - DNA, 469 bp, Zea mays
  unsure (1)..(469): unsure at all n locations
cctgcggcatgcaagcttgttctccctgccaaggtggacgctttgcttctctagctccattccccctgcttgcgtgctgctgcgcagtgccccgttggtgcttgctgggtgctcgacaaaatacgcagcagtcccgacgtcttcgcgcgctgccggctcgctattttgtgaagcccagtggacagcacgccgtcgacgctcaccagttgtttactgtttttacgcagtcccaacgtcgtcgtcgttcacccccggtgagaccgcgacgatccttgttcgattctgtatcgacgttgttttcctgtgattaattgtgtaggtgtgctgttctgtttttgttttgtggaggagaggaaccccgtgttttatgtggaggagaaggcaagccgcccaacactcgtcgatgttcggagcgatgcacaaatcggaatcgccatcgttcttacanacactgatcgagttggttatg

SEQ ID NO: 67168 - DNA, 473 bp, Zea mays
  unsure (1)..(473): unsure at all n locations
aagttatgaatgtttcagatatgaagactgaatctgtctcagttctggacagcaaagncttatagtgatgtggatccttagttaaatattgaatcatcttgatatgtttataaataatatgtagaaaattgtattacctttccagaaagtctaggatcaccttgtttggatgtctgaatctgtagttgtgaatttttgaagttgcaagtctgaatctgttcaaatctggacagaactgttgtgttagcactgttcgaccttgctaagtgtttaatcatgttgtgatgacaataccaaagttgtagagcactttttaagctttccagaaagtcctagtttgatatttttggactaataattaaagagttatgattaaaacaagtgattgctgtattgctttccaaaaaatctgctagctagtatttgattggtagntcacccttctggcttanaattgcttagtagcacttaac

SEQ ID NO: 67169 - DNA, 435 bp, Zea mays
  unsure (1)..(435): unsure at all n locations
agcttctaaagggagaacacgtgatatgtttgactaacgtgcatttcgaaaaagatagaccttgtgcagcttgtcaagcaagtaaacaagtgggaggagcacatcacagcaagaacgtgatgaccacttcaagacccctggagctgctgcatatggacctcttcggacctgtcgcctatctgagcataggagggagtaagtatggtttagttattggtgatgacttttcccgcttcacttgggtgttctttttgcaggataagtctgaaacccaagggaccctcaagcgctttctcaggagagctcanaatgagtttgagctcaaggtgaagaagataangagcgacaacgggtccgagttcaagaaccttcaagtggaggagttccttgaagatgaanggatcaagcacgagttctccgctctctacacaccac

SEQ ID NO: 67170 - DNA, 437 bp, Zea mays
  unsure (1)..(437): unsure at all n locations
tctaaagagagcacattttgggactaacaaatgttcattttgagaaagataggatttatagcgcatgccaagtagggaagcaagttggtgttcatcatccacacaagaacatcatgacaactgacaggccactcgagctcctccacatggacctatttgacccgatcgcttatataagcatcggcgggagtaagtattgtctagttattgtggatgattattctcgcttcacttgggtattctttttacaggaaaaatctcanacccaagagacttttaaaggattctcgagacgggctcaaaatgagtttggcttgaggatcaagaaaataagaagcgacaacgggacggagttcagaagctcacanatagaaggctttcttgaggaggagggcatcaagcatgagttctcttctccctacacgccacaacaaaat

SEQ ID NO: 67171 - DNA, 437 bp, Zea mays
agcttatccaagttgcttaaagatagcttttctttgccacaaaggttatgcagataagagaagacgacccttgttttttcaagttggcaactacatatatctaaaggtttcactaatgaagggagtggccgattatggtgttaaaggaaagttggcaccattatatattggtcctttcttgatactagaacaatatggacctattgcttataaggtacaattaccagaacctctctcaattgtgcataaagtgtttcatgtatcatagttgaagaagtgcctttgagttcctgaacaagtggtggatattctagatgtcaaccttgaaccagacttaacttattttgagtatcccattaagggtctagatcagaaagagagaatcactcgtagtaaaaccatcaagttctacaaatttcagtggcaccaacattctg

SEQ ID NO: 67172 - DNA, 484 bp, Zea mays
  unsure (1)..(484): unsure at all n locations
ggacctataaaactaagcttanggaaaagtataaaagaccccaaaataactttaatacttttatccctgggatccagaaaccctaattggaaccctggaaaaccctaaaaccaaaccctgggggcttatgtgcaaaattagtccacttttgggctaaagtgcaaaaaccaagtcaaataggtttcttaagtcctttggttcacaaatgtgtggacttgtaagccaaatattgagttttggacttaaatgcaaaatggacctcaattaggttctattctaagtctgaaattcagtgttgagggctcaactttggagcattgtatcttgcaaattctagggtttttgccctaggtcaccacatcaaaattgtagcccaattataggagcataactttgcttaagagtgtcagcagagttgttaagaaaatattggagataattaagcctaaagatnggctgtcaggctgattcagtctgaaattca

SEQ ID NO: 67173 - DNA, 183 bp, Zea mays
gcatgcaagctggtgaaggttctccatcccttcatttgctattcggcgatgccacagccaacccgggctagtcttagcaattaagcatgcatctagaccggcttcctttttggcaaatccactaaattaaggttggcggcttatacaccctttaaagcttatggaccatcacttcttcttaag

SEQ ID NO: 67174 - DNA, 381 bp, Zea mays
aacttccacggatgcagcaattctattagtatttattctggcggagtagtaactctgctgggaattactgcttatatagtgtaggcttttttgtcataactgttggatgctatgtactctgacctatgtagtgggcgtcaatgatgaatggctatgtgcatctttttcattagcatcctgatggctcagaattaaccacctatttctgccaaagggccttcctttttaattagtttgcgaaatcctggtttaccacacaaccgatcggtactcgtatgttgtacaagtggaggtctaaatcacaaagacaggggtgaaatgtttccgctttcttttataaaacacttaggtaacatgaattctttctaacttgactatttt

SEQ ID NO: 67175 - DNA, 304 bp, Zea mays
ttgacggactaaaacgagagcctacctgagcacatattttgtccacatttgtaaagggactacaatatgaactgaatttggacacacaacatactgttatatatttatatatcaaaacattaactttgaagtaaaggctacatttgatttactaacatatacatacaggaaaaggtaacacctttcaattgacaataactcacttaaataaataaatatgttcaaaagacccaatttaaaatagaatgtaaaatatacttcgtattatttcacacaaaggacaatttaactacagattcctcaa

SEQ ID NO: 67176 - DNA, 356 bp, Zea mays
aaatactgcggcttgttgtagacctgtccatcttgcttctcctgtacaagcaccacactgagtgtatagtgcgaggctgctacatatataagttatggagccccttacgaaggtggagttagagttgtcaagactatcaaatattgctctaactcttcgaaagccttttgctgagccggaccccattggaaaacttctactgacttcagtatttcaaaaatggtaaattcctctctgctgatctagatatgaatctatttaacgatgccagcccttctggccacctttgggcgcccttctttgtatttggcggctccatacgaaagatagcttcgatcatatttggattagcttca

SEQ ID NO: 67177 - DNA, 261 bp, Zea mays
ttagtaacctatacaaaagttgtgactactgggaataaaccacttgaaaacttgttgaccattaaatcacatcatttggacaggccctttgtgcgataactctccctgtcagactgctaggcatactttgttctttcataatgctcaatctaatacatatcaagattatgtgcacataccaactaacttacgtcaatattcctgtcttcatcagactttgtagacatactgactactattcatgatgcatctccatgactc

SEQ ID NO: 67178 - DNA, 477 bp, Zea mays
  unsure (1)..(477): unsure at all n locations
actaggggctgcactgcnaccactagatgtcgatcatgacacactacgcgaagccagaactcacaanaggaaggctactagtccgacacctcatgaggaagagttggaccaagagatcatggacctcgaagccattcatcaacatgtccagataaaaaatgagaagatgcttcatctcgccaatctttataagaagatcgatgatgccgctgaagaaatgcgtcatcttacccaagatgaccangaccgaaggcctcagcacagggagcttcatcaagatagctcattcaacgaagatgaatggtatgatgactttcatcatgcttactttactcttgatgatgcttctcccctggcagcagaattgcaggctatttcatggccataatcctacaagccacccagttgcccatgtacgatgggcactctgactccaagcaattcttgatgagttatgagggcacaatatcctcatat

SEQ ID NO: 67179 - DNA, 435 bp, Zea mays
  unsure (1)..(435): unsure at all n locations
tggcagttcaggcaacaggatatcttgaacttgaatcccatcctgagaattgctgatttcatcaaaacaggatggatcttgttcatcccgatgggagttgctggttcttctataacaggtgagtcatggtggctagggtacctcacaaatcacaatgcaactggataactaatctcatgtgtactctattacttaaagttctgctacaaggtatatatctgtataacacataagacgcagacgcttcttgcgacccanatgtgtttggagtttacgctgatctattactttctctgttctttgcttgaacattcttagggattggagtatgcgaatataatagcagcatccgatcagctgcntactgctctttgcgcttagctgtatcctcgccggaaaagatgtttctagcacacgttaagcgctgaataaaat

SEQ ID NO: 67180 - DNA, 275 bp, Zea mays
  unsure (1)..(275): unsure at all n locations
tcttagtttatcaaagaaaaattatacagaattggagaaggtgttgtatgctgttntgatggcctccangaagcttcggcactattttcaagcatacaatataattgtcccttcttcacaaccattgaaggatattatgagaaataaagaagctactggaagggttggaaaatgggctgcggaactcaatgaattttgcattgattatgtgcatagatcttcgattcagtcccaagcgttggcagacttcattgctgacttggacgccagggctc

SEQ ID NO: 67181 - DNA, 492 bp, Zea mays
  unsure (1)..(492): unsure at all n locations
acacattntgggactaacagatgttcattntgttaaagacagggtttggagcgcatgtcaagcaaggaagcaagttggtgttcatcatccacacaagaacatcatgacgaccgacaggccgcttgagctactccacacggacctattcggcccgatagcttacataagcatcgtcgtgagtaagtactgtctagttattgtggatgattattctcgcttcacttgggtgttgcttttgcaggaataatcacacactcaagaggccctaaaaggattcttgagacgatctcataatgagttcgaaataaggatcaagaaaataagaagcgacaacgggacggagttcaagaactcacaaatagaaggctttcttgaggaggaaggatcaagcatgagttctcttcttccttacacgccacaacaaattgtggagtggagaggaagaatagaactctacttgacatggcaaggaccatgcttgatgaatacaaa

SEQ ID NO: 67182 - DNA, 464 bp, Zea mays
  unsure (1)..(464): unsure at all n locations
agcatgcacacatagctgatttgaatacctttgatcatatctcntttatatgctatgactaatgtgtcttcaagtctatttcacaccaagtcatatgtatattgaaagggaattggagtcttcggcgaagaaaaaggctttcactccgtaactcatacttcgccatcactccgagcaactctctcttctttggtggagatatgagcatcaaggaaaatgacttcattcttgggggagagagtaaaagctcaaacgcaaaaggaccggatttcgtctttggtataatcttaactcattcatttatgaccaaagaggaggaacttacttcaagggctctaatgattccgtttttggcgattcatgccaaagagggggagaaatgagctcanagcaaatggaccgcaccaccaccaccaaactaaacttagtgctttccanaagactttatcattcaggatcctatt

SEQ ID NO: 67183 - DNA, 415 bp, Zea mays
cttgaaatcagctcgggagaccagacatcgaacatatagttctggagaatttgtccccaagtctatcgatgaagcactagaagaccaatcatgatatgaatccatgtgtggagtctcaagagaaaggtttgtgtgttggcatatatgcttcttcaataagctagctgccaagcgaaacatataagcctgcagatgatctttgagtagccagaatcagcgcttgcaatcagcaactggatgctcctcaaaggccagattatgttgaagttccatctcctctaagagtctgctaagtgaagatatgtagcataagttaagctatacccataacccttctaagccgaatcttgaggacgagaatcctttcaagtgggtagatttgtagcatcccatatattcatatccttgaaatttc

SEQ ID NO: 67184 - DNA, 416 bp, Zea mays
agcttctaaagggagaacactatttatgattaacaaatgttcattctgagaaagacaggatttgtagcgcatgccaggcagggaagcaagttggcactcatcatccgcataagaacataatgacgaccgacagaccactagagctcctacacatggatctattcggcccgatcgcttacataagcatcggcgggagtaagtattgcctagttattggggatgaatattctcgcttcacttgggtattctttttacaggaaaaatctcaaacccaagagaccttaaagggattcttgagacgggctcaaaatgagttcgccttaaggatcaagaaaataagaagcgacaacggaacggagttcaagaactctcaaatcgaaggcttccttgaggaagagggcatcaagcatgagttc

SEQ ID NO: 67185 - DNA, 392 bp, Zea mays
  unsure (1)..(392): unsure at all n locations
cgcctcatgagtaccgctgatatggacgcggattacatgcttctctactcttacaagaccttcgttccgaatctcgggacgagattctattaaggggggagggctgtaacaccccacgtgtttatatttcgctcgacaacgagtaccgatttaagcacgtaagatcagtgaataagacggacactacggtctaactatcttcacctatcgcgaatntaatatcgcatctgttccgtctgtcgcgagtgcgacggcgtttttatctttatctgtccgcgctcttcctaaatctctgtgatgatcggaatatagctgttccgaatatcagtgcgtccgatgagtatttataaatccatcgcgcgccaatacgaattcagaagtccgaactcact

SEQ ID NO: 67186 - DNA, 265 bp, Zea mays
tttaatctcaattttactaacgaaatggaaaagagctcattcttgtgatacaaccttgcatgcctttttccagggctcttactctaactgggaggaacaccgatctcatcacatggtatggatgagagttgataccaataagaaccaagcccttcatcctgactagtctgctgacatcggatgaaaacctgagggcactttgacaccactcaaacattatgcaactccttgttcctcttctaactgacaaggtgtcgccagcttg

SEQ ID NO: 67187 - DNA, 324 bp, Zea mays
acagctttaataaacaaccacagacttagggtagagaaaatgttgttctagagacatggatgaatcggatggtacaccttttttaatatttcgctaagtgcggtgtattacatcgcctgaggtggaagagctgcaatatatcatgatcgttagtcaaacccttgcggacgtgacattctggcatctagaaccatgtcttaagacattctataagagtaaggggaattgacgctacgacgtggagtctaaatacatgtctctattttcatcgtacaatgaagtatgtcgtccgagatgggaagctacagtacatcgtgatcgtat

SEQ ID NO: 67188 - DNA, 372 bp, Zea mays
  unsure (1)..(372): unsure at all n locations
ccaagccacctgaggcatgcaagtctttgatgttaaaagctagatatgggctgtctgatgctggcttcnatgcgcncntgagtattgtcacagacactgcttcaaaggagaacaaagtgcctgctaacacgtactatgcaaacaaactaatcagtccactcactatgggcgtggagaagatccacgcgtgtagaaatcactgtatcctttatcgaggtgatgattataaaaacttggagagctgcccaaagtgtggtgcaagtaggtacaagacgaataaagactatcgagaggaagagtgtgttgcatctatgtctaaagggaagaagcgatagatagccaataagaagacttcaaatccacgagcaaaga

SEQ ID NO: 67189 - DNA, 427 bp, Zea mays
  unsure (1)..(427): unsure at all n locations
atcactgggcgtagagagatctgtggtgtatggagattctctggtagtcatcagtcagataaacaaggaatgggattgttcaagtgattcaatgggaaaatactgcgccgtcgtccgaaagctataagataaattcgagggtctggagtttcatcatatagaaagagatcggaacacggcggccgatatactgtccaagctcggatccagtcggactcaggtcccgcccggngtcttcgtgcaagatattctccatccgagcatctcgacggatcatatagaagagtgcaacatcctagatcaacccgagtcagactctgatgactggagacaaccgactattaagtatataaagaatgaagaagaaccagatgacaagaactcggcagagcgcattgccagacaatcagcttactatacactcatt

SEQ ID NO: 67190 - DNA, 382 bp, Zea mays
tggggctttaggggaaggattggatatcatctctataacacattactgcttattctatggagagatccagggccataccaccagtatgtgccgcgtcaccatccagaagccgaatgagatagctaaagcgtcagcgctacaatatcacgtgaagcaaagcatgcatactgcttcgtatcattcgccttatattccagaatatgtaggctaccacactgcagcttctgttctttggaagccaaccccagcatcttggagcagctccaccgcaccgccatgcaggaggacagcagcaaaaggagtcgacaatcccttcgaggacttcaagaaagtcaagctcccagcaatacactggccaaatcaagccattattgataatatc

SEQ ID NO: 67191 - DNA, 390 bp, Zea mays
gagaatcggccgaagcgccaaaaccgatggtgatatcggaacatgagaaaaccgcgatggccgaagtgccgtagcgacctgccaaaactaaggagaaaactgccaaaaaactattaccaatgagctcggcagagcaaccaataacccttagcccgccatacgagctagagctaccgaatgtgtgcaatattcctgcattacctccaaaaggaggagaatggccacgtactaaacactgttatggaatcttcaaaaatacaaaaccctgcttcagcgcctgatagaaaggatgacactccaaagatatctagcgaagctggtttgttactagatactgccaaagctgggccatcagctcccatcaacgcatatgctttggaagctcttctt

SEQ ID NO: 67192 - DNA, 377 bp, Zea mays
  unsure (1)..(377): unsure at all n locations
actatatanactcaagctcaaataatangnngtgatatgcctccttaaagatagagagagattctggatttctaactcggcctttngtgctaactgggccttggagctaattcaaggtcatccattggaagcgtgccactgtgactcttggcctgtttggccacaagccaacagcagttcactttcctgctaaagataaggaagtggatcgatctttcttttttttcacgagcactattgctgtcgccttctgacgttaaatcccagagaccaatgaccaattggttccatttcatccatgtgcccccgaagttttcagcctgagaattccgtggaggcttgcagcacagcaacagtacccagacgcgtctcgacgt

SEQ ID NO: 67193 - DNA, 476 bp, Zea mays
  unsure (1)..(476): unsure at all n locations
ctaagctcgctcgatattaaattccttgattgcatctaggactagtctaaccttgnttatataaccgccaacaaagcgagtgagaaagcttaactcgggtcaaacctgacaagtcttagttttaagcttttagcacttaaattcttacnttttatgcaattattggttcttgaaatatgcatgaggtactgcacttatggggagtattcanaactcaaaatattcatgaaaacccctagtgcaaaccaaaatgcaaatttcaccatntgcctatgttctctataaattatctagcctatggcgaaatatgttgaaaagtatatgagggtgccaatacctatcccaacaagtgttattttcagtgattataagttgngatttggtttggtgggagttagatagaaaaactcaaatttntgtcaaactctcctctgtctgggctcacctgacagtccggtgtgcaccggacacttgac

SEQ ID NO: 67194 - DNA, 307 bp, Zea mays
atttgtagcgcatgccaagcatggaagcaagtcggagctcatcattctcataagaacatatcgacgaccgacaggccactggagctcctgtacatggatctatttggcccgatcgcttacataagcatctgctggagtaaagactgtctagtattggggacgatatactcgctcacttgggtatttcttctcaagaaatatctcaaacccaagagaccttataaggattcttgagacgggctcaaaatgagatctgcttaacgagtaagtaaataagaagcgacaacgggacggagttcaagaactc

SEQ ID NO: 67195 - DNA, 335 bp, Zea mays
  unsure (1)..(335): unsure at all n locations
ccatcattcacaccagaacattatgacaagtgacaggccactggagctcctttacatggatctattctgcccgaatgcttacataagcatcggcgggagtaaagattgtctttgtatagtggatgattaatctcgcttcacttgggtattctttgtgcaagagaaatctcaacccaagagacttaataggatttctgagacgggctcaatatgagttctgcttatggatcaagaaattagaagcgactatgggaccgagttcaagaactctcaaatcgaaagcttncttgaggaggagggcatcaagcatgagttctcttctcctatacgcacaa

SEQ ID NO: 67196 - DNA, 348 bp, Zea mays
  unsure (1)..(348): unsure at all n locations
tattttgtccncgctggtgctaagtgccgaataactgcaccactctaaaccctgcgcgataagcctggacaagcttttggctggacaatctatgaggaacccgcgggttgttttgaaacataaagccgatggaagctgccctattctcaatcgcctttttctccgcgtcctggatagacttgaaaataaaaacatttgcgtgctctggcgccggtagcatgatcaagattcttaaaggatcacttatattcaatgactgattactctttattgatcaaaatattggtcgcgagttgtgtatgctgcagtgatataagtcgtcgcaaatgaagcatcccgattgataac

SEQ ID NO: 67197 - DNA, 425 bp, Zea mays
  unsure (1)..(425): unsure at all n locations
agatctttgatcttctccaaattatcaatgacatcagagtcagagggacccaaagaaactccaagnttacaagctaaatctatcatatcatcattattagaatcaagccaagaaaaggaattagaacacatacctttattgaggaaggcatccttggcttctgctctgtatatcgctttatcagccaccttcacatcatcattcttctccaatctagaacttttcctgacgccatcagccgtgttagcaggcaagtccagaggcgttttgttcttctcatcaagaaccatctcatcattggggggaatcgagatcatagcaccaattttcgattgaaaatcagttggatcttcctccatatacttagcgaattctttcaattcttgagagctaaacagatcgtctttatttggatcaaaatccac

SEQ ID NO: 67198 - DNA, 409 bp, Zea mays
tggtacatactttcctggcacagagattcttcctgtcatgaacatatcttttcataacaattttagaaatataccactactgtcattttgcgactgcttttatcacattgctactgctggggtttgtgggactaaatggatgtacaactcatacatcatcaaggcccaagatgtcatctgcatgctcacgagtcacaagaatttgttatccacaatgaagaggtatgagtgtaccatcggtatgcagaacactgaatttatttctacagccatagtgaacactctcttaattggcctgttcttttacagtcatagcgaacacaatataccttcagcacaactataacagtttgtcccattcagatattcctcgccatgcactttcatgtcatcttcgccacctgcctgc

SEQ ID NO: 67199 - DNA, 293 bp, Zea mays
gaatgctgtggttacttcacacctactctgtctgtcataatgagctgcatgaaagaatgctaaacgccataatttttacaccatgcggacaccctctagcgctctctgcgaggtggatctcatggactaacactaactctgtatggtgggacccgctcctgctgagaaaataaatcgtttctccgccaccagctcacggaaggaggttttggaccttcggctccctgaacttataagatttttttacggatcacgctgttctaaaaacgatcttcaccgtgaaggggctctgt

SEQ ID NO: 67200 - DNA, 480 bp, Zea mays
  unsure (1)..(480): unsure at all n locations
ctgagggngcttgagagagncaattcaattcttattaactcaagttatctatcttcaangaacctcatattcaagattgacccacagttatttcaaattattatgtctaaagctcatatcatcaccgngaagatattgatgttgtaggaaataaagaattattctatgtggaaaaatcaaggcctacaacatggaggaaagccaaaggatggtaacactcatgttcttaagcgcaagcatcttaaattatgatctctcatgtgtcttgtgtagtcacatagaaaaagaagcacctttaatgtctctataattatgtcaccattctttggagaaattcctctcatatggtagatagcataatcatcatttctatactatggcaatctacatgcttacatcattacagataccccatagcatgctttacactaattatcttattgccatgattctagatatagagagatanttccagttctt

SEQ ID NO: 67201 - DNA, 232 bp, Zea mays
acatagcacatcataaggtgctgttacgctctcaactatctgaagagcaagagaaaaccttgatgagggttttgttcaatatcaaagatgtttttgcatggtcagacaatgatctatgcggagctaatacggatgttattgagcattcgctcaatgtctatccatccttcagacccacaaagcaaaagcttctgaaaatgttctatgataatgccgaaggtgctcgcaacga

SEQ ID NO: 67202 - DNA, 225 bp, Zea mays
  unsure (1)..(225): unsure at all n locations
ttaattaaaaagttatctaagtctaaggggattataatccaagttaaaacttggattgaatttatcacgactctcaaaattgactctgatatatgtaccatcgngaggggttgtttcacatccaacagatcaacatgcaatggagtaaacttgagggtgggctatcgatgattcttcctaggttctctataattaacatgggataaaaaccatggagagatcttc

SEQ ID NO: 67203 - DNA, 417 bp, Zea mays
  unsure (1)..(417): unsure at all n locations
ctgatttgaattggntggggcatgcaacttaatatggtatcatttgcttatgtctngagctcgcatctttaaataaaataatagttgctcattcctatattccacgcgagagatacaaaataggctcaatatggaaggaatgttggaatataatataagtgaataggtcacctcttcctaccaggttaagatatctcttcatcaatactatatcatatcaacatatttaatgctcacaagactctcaactacttacattacaagcaggagaattataattcacagagagtattagtctattgttatattaaaaacgtggaacatagacaaacttctcgtgttccgcctcaatgttggagatatctatatgactatataatgcctattatcttgccgacgggcatggtgaatttctcg

SEQ ID NO: 67204 - DNA, 359 bp, Zea mays
cagccggcaacgtgtcacagcatctagactttcttttataagaccgatctatgcgcatcgagcgggatcaactgacaccatatctgacagcgcgcccactcggaaggaccaaatgccgcaccacttaccccatactgatcttctgacagaaaacaaactattaccccgtccgactactggccaaccccagagtaaactaacaacagaaggacgagctcctcgagttcacctctgcccaaaaggagctctgactcaccgactcaggctctgctcaactcagcttggagaaggatctgctcaccgacccaggctagctcagctcggcttggagaggtatccctacccgacctagcctcgct

SEQ ID NO: 67205 - DNA, 457 bp, Zea mays
  unsure (1)..(457): unsure at all n locations
cctgcagcatgcaagcttgagaaggatcttatccnctcatgttctaacggcgangccacagtcagcctatgctagtcttagcgattaatcatgcatctaaaccggcctcctcttttgcaaaatcaactaaataaagtttgccgtctaatacacccttaaatgctagtgaaccatcacttcttctaaagacagacacatctacatttgtaaatagacaattatatcccatattacataattgactgacagatagtaaattatatccaagagactcaactaaaaacacattagagatagagtgctcattggatattgcaatcttgcctaaacctttcaccttgccttgggtcccatcaccgaatatgattgaatctgggaatcctattcttgantaggaggtgacatcttctctcctcgtatatggttgtgatccgctgcgatatccacttgacgccga

SEQ ID NO: 67206 - DNA, 415 bp, Zea mays
  unsure (1)..(415): unsure at all n locations
caatgaacggtgcggtaacttctcaccaactcgtctgtttatatagtcctacaggtgaagaaggcgaaccgccgagacgcacatactggctgatcgatggatcgataagcgccgtgaattttatattcgtctttaataacaagctcagggaaggtgttttcggaccttcgtcatccagaagccttcatggttttcgtggatcgagctcgttatgaaaaanagatctagcaccgcgatggggctactgctgagggtcttcttccctgccgaaggtcctcgagatgaagatattatctgagagcgataatgaaaaatgctgaagctacgaccgaaggacgacagcttctgcttaaggtggcggcgaatgtcaagcatgatgccgagtcgaagaggaaaatactagttaatccttgat

SEQ ID NO: 67207 - DNA, 461 bp, Zea mays
  unsure (1)..(461): unsure at all n locations
gagctaaaaattgagtgagcggttgtatttggccataaagcgtgctaaatgagtttgcggtatggccgtatttatacgctcggtgcgttgaaaattcaaagaccccacttgtcagtgaatgttgctattctacgcaagggaaggtgtttcttcggaccttcggcgtaaagccttcgtccaggtcgcaatctgaattcgttattataaacaaattaatattgtgaggtgctactggtgggaaccttcggcatccaaggtcctcaaaaacangatttaacagtatttctggagtacaatgtgtgaacaggtatccacagacaagtcggcattactgtagaccggaataatacgaatgttgacacagagccgaaggtgtgagcacgaaagcttcggcgtgacagctaagaatggaaccgacttatagatgataatgctattcagaccttgatagactactatag

SEQ ID NO: 67208 - DNA, 388 bp, Zea mays
  unsure (1)..(388): unsure at all n locations
tggaagctaaatacatcgagccagtggcttaccccacgtggctctccaatgttgtgatggtgcaaaataaaagcggataatggcgcatgtgcatatacttcaccagtctcaataaggcctgcccaaaggacaatatcccgttgccacggatcgacaaaatagtcnatagcgcggccggatgcgaggtcatgtccctcctcgactgcttctccggctatcaccagatatacatgaaggaggaagacaaggctagcaccagctttataacacccttcggcacttattgctttgtcagaatgccggagggtctcaagaatgccggatccaacttctccatactcaccaaaacaatgctcgaggggcaggtcngcagaaatatattcacata

SEQ ID NO: 67209 - DNA, 402 bp, Zea mays
ataaaacaagcatataactcagactaatgccatatgtaatgatatcagcaatgaacagtagccattctaagacatggtaacatgtgaaatagccacacaggtccatttcataattaaacatggcttgcagatgaagaaggcagattaaacaaataaacataattatttatcttaaagtattgctctcacaatagcgggttgctgtaataaacagccctccaacgctaataggtgatcagagatcctcgactaacgtgacagccctatcttaccaaatcagggttttagatctgatgtataagcctaataatcacatctaaatactaatagcgaggagctgtgtactacataaaataacagaatttaacacatggtaacagtctctacaaagagagaattaat

SEQ ID NO: 67210 - DNA, 410 bp, Zea mays
  unsure (1)..(410): unsure at all n locations
gctctatacagtgaatgtctaagacgaaggggaaccgtcttaagttatatgactcaagacccagatattctggtcatattatagntattgatagggataaatgaattatatacaggctggaactgtgcatataaaaggtgaacagtacccctatactgtcacgcgctcttctgaatcgcgcattngcatttgtttttgttcacgctggtattttgctttccttcgaccgaagtacattttaatttgtatatttttatatgaatagaatgagtaatataaaatatggtcaaatatttactatttatcttctcatattgttggttatgaagataacttataacttgtcgaatcatttatctgagaaaaatgtcgagacaagacatacactacattcatgtgctgtcttatat

SEQ ID NO: 67211 - DNA, 453 bp, Zea mays
atgcaagctggggaagattcttcatcctaacatgttctattccgcgatgccagagccaccccatattagtcttagcaattaagcaagtatcgagttcagctctattgaagtcaactaagtatagctgaccctctaatactcccttaaatgctactgaatcatcacttcttctaaatacaataacacctatatctgtaaaaagacagatgtagcccatattgcataattgagaaacagaaagcaaattgtaatctaaagagtctacaagataaatattggaaatagaatggtcaggcgatatagcaattttaccatgtcctttgaccaaatctcgatttccatccccgaatgtgatcgctctttggggatcttcgtttatctcgtacgaggagaacatactttctccctatcatgtggtttgtcatccgcttcaattatccacttgacccctgg

SEQ ID NO: 67212 - DNA, 372 bp, Zea mays
  unsure (1)..(372): unsure at all n locations
agcttctaaagggagaacacattntatgactaaccaatgttcatnttgagaaagacaggatttgtagcgcatgccaagccgggaagcaagttggcactcatcatccacacaagaacattatgacaagtgacaggccactggagctccttcacatggatctattcggcccgatcgcttacatatgcatcggcaggagtaagtattgtctagttattgtggatgattattctcgcttcacttgggtgttcttnttgcaggaaaaatctcaaacccaagagaccttaaagggattcttgagacgggctcaaaatgagttcggcttaaggatcaagaaaattagaagcgacaacgggacggagttcaagaactctc

SEQ ID NO: 67213 - DNA, 466 bp, Zea mays
gtagctcacgtgttgtggcctccctcttatacttttatgtgaatgtatgagcaaaatttcagctcaatcaagttcgtgtgattgtttataccttttgaaactttggttgaggttgctggtagcactccaatggcattgattgttcgaaatcgttacaggagcacacccagagattgtggtcacaaaaaacgagctggcaattccactatattttgtgcattgctattttgtacgtactatattacctacaagatcaccttggatctgagggataatcgggggtgaagctgaagccactaataatatattattctgaccatatcgcaaggagggcaatgtcaaccctgtgacattccaagtgacaggagtgtcattttgactatcatcttcgtcgcacgcagacgcatagttatcagtagtggctttgacttattagtgacccatatcacgattcacgacagatcga

SEQ ID NO: 67214 - DNA, 386 bp, Zea mays
ccccgaagatgtccgaagataataagactgctgctgagacgaaactgagcctcgacgaagagaaaaatatggggtttcttatagcgatgtcaaagactaacacagaaaaaatcaccaacgagattctggaaggcttgtctgaggatactggtgacagtgacagctatgatgtggacagtggtggggaagactccgaagatcgtccctggcgaccaagccattcagtttatggtaaatcaactatcaaagaaaatcatcttgtttatatgagaggaaggtatttccgggatttgtccattgtgagggcggacgaaagggaaaaaactttgccacatccctgagagaatgaatgtgtattgtacccgagctcttttgaaagctggact

SEQ ID NO: 67215 - DNA, 423 bp, Zea mays
  unsure (1)..(423): unsure at all n locations
actaagccggacacaaataactggttaagcttggtatcanatcattactggctngaagagatcttgattgataagaccctcaagagtgatgtggtggatgtgtcaacgcaaggaggaggtatgattatcttactaaagtttatagatagtaatttggtgctccacacattcgggaggaaaggacgacgatacccttaacaggctctgcaattgcatttataggatttgaggtcatgattataattctatgcaaagctatgtattgtgctgcccctataaataggggcacattgcccatgcacggngtagcaatccacataattatgtatcgaatngctctgcatccgaagcttcaggatttacctacctttgagcatccttctgaaacacctacggtatatttggtactagatgtaatcacat

SEQ ID NO: 67216 - DNA, 403 bp, Zea mays
  unsure (1)..(403): unsure at all n locations
taaaaanagaatcgcagtaaagtgaaacagacatgtgactacccgatttttattccctggatcaatcaagcgttaaatgcttgcctacttcacgatgtagcgtctcaatggacgagggttgtacttaacccctctcaagggatccacagaccaacatgaataccacggttttttatcttatctcaagtttacgccattgtgaggaatctccacactttggagtctctcacgccttacacaaattgatcttcaatgaactctagagtaagggggagtagaacccacacaagaaacaaaatacagcacacatgctacaagtgagaaggagcaaagaacacatgcggagtcaactccactttgttgatctaaactatcaagcttaagtgacgcggtttgtgcttag

SEQ ID NO: 67217 - DNA, 424 bp, Zea mays
cacacgtcggcaaaatagcctcaccgcccaacacaagcaatgtgagaccacaggtttcacccgtgaacaactctagatgcatgctgcaacgtggcaaaacacaacatcgcgcgagtctccgacccacccagtggggctaagcagatgccatcacgcctgacatcatgcatgctcgtatgagctagcagtagcagaacagaaaagtcctgtacaggcctgttacggttactgcggttagaggcaagtgcgatgaggaacacaaggaagacgaaagctctagctggggtaggtgctacgtacgtacgtacacacgtactgctgtcgtgtgtattgtttgacacgacaagtaaagctataggctcgctaactgactaatataatattatactgaacccgtctacatatactaaaccttcggtcgttt

SEQ ID NO: 67218 - DNA, 479 bp, Zea mays
  unsure (1)..(479): unsure at all n locations
agcttggacgataaataggaaagcgcgctctttcagtntctgcataataaccgagacgtattcgcatggcaacctgcggatatgccgggagtcccgagagaactggccgagcacaaactaaaggtctacccccaggcgaggccaatccggcaaaaacttcgttgtttcatgcccgacaagagggaagccattcgcgttgagctggctcgcttggtcgcgggtgggtttattagagaggtgttacatcccaagtggttagctaaccctgttcttgtactcaaaaagaataaagtagattggtgcatgtgcgtcgactatacggatctcaacaagcactgtccaaaggatcccttcaggctctctaggatagaataggtggtagattctaccgctggatggtctgggttggctttcctggattggtactccggatatcatcagaattagcttggcaaagaagacgaagaaaaaacagttgt

SEQ ID NO: 67219 - DNA, 405 bp, Zea mays
tgagctcttgcgctcggattgttcttttctttctcaatctttcttgagaacaaactcacttgtaattgagacaagagacaccaattatgtggtggtccttgcgggaactttgtgttccaattgtttgagaagaagaagctcactcggtcgagggaccgtttgagagagggaaagggttgaaagagacccggtctttgtgaccaccttaacggggagtatggttgcaagaaccgatcctcggtaaaacaaatccgcgtgtacactcattattcgcttgcgattagtttgcaccctctctcttaactcgatatatcttaacgctacccggcttgtattgtattaatttataattcagattcgcctattccccctcctaggcgatttagacaccttggctgatgacac

SEQ ID NO: 67220 - DNA, 378 bp, Zea mays
agagtgttgtcttactcctccccgctcttgttcgtccctttttttcctctgtcgcgtggcaaatcttgtcttagctcgatcttttgatgtgctttcgcctattacctcatgtacctttgtaatcactagatctttccatgatgcttatcttatgcctaccttttgaattatcatctttcccatctcgatttgagaagggtgttttacctatcctgaccttggttgcattctctcccttgtcggttacaatcattgctttagctccatcctttattatgctcatgcccctaccctccatgtcttattattccccttgcctttggttggccttagaggaaagaccaccatttaattaaaaggaacgtataaaaacgagat

SEQ ID NO: 67221 - DNA, 496 bp, Zea mays
  unsure (1)..(496): unsure at all n locations
tatctcggcgtgctgcccgcatttggtttatggaagtatctgtatcactgccgtcctgnngatggccgggggcaacatcagttggtcggaggtgccagtttggagatgcgtcgtgggcggaaaaccgagtatctcgaaatacccctcanagacagcattaaaggttggcgtctggagtggtttatagttgataactatggaaattctctcccctcccggtcaggaagacagccagacgttcgtactccgagttggactgagtttcccacggatcaagaggtggccgangcaggcgtgttgctttccgaagtcggattactgaaagagagaggtctgactgctgaagctgtggtcacggantttgttttcaagaacattcagccgttgaaagacagggcttattcggcatatctttatcgagggctggccgactcaacccgagttaccaataggagaaattccttctgtgactttggtagccgacttgagatgatcc

SEQ ID NO: 67222 - DNA, 167 bp, Zea mays
cgagcgcactttagcccagggcctattctttttataaacagcctgcacctaacctaagcacgcacctatcacaaacgggatgtaaaacaatcagccttgaacaaccacagacctccctcagacaactcacctgcttctgtaaaagattacacaacttaagatcacta

SEQ ID NO: 67223 - DNA, 445 bp, Zea mays
  unsure (1)..(445): unsure at all n locations
gcattgaagcatgatcgcttncccttggtcttagtcttgctctgttgttcattgcgaccctttagcaccgtcttgaatctcttgataatganggccatttcttcatcgtngagtccagccgcctcaatttgtgccaccttgctaggtagcgcctccttgcttcgtgntgccttgagagcgagaggttgcggctcgttgatcggaccattcaaggcgtcgtccacatatctcgcctccttgatcatcattcgcccgctaacaaatttcccaagaacttcttcgggcgacatcttggtgtacctgggattttcacgtatattggtcaccaagtgaggatcaagaacggtatatgaccttatcattatgcggacgacgtcgtggtccgtccatcgcgtgctcccgtagcttcttatcttgttgataagggtcttgacccgattgtatg

SEQ ID NO: 67224 - DNA, 327 bp, Zea mays
  unsure (1)..(327): unsure at all n locations
tggccgaagccncttgatcatggcctcgatgacaaatttcattgggcaccggtggtgcctgtgcccttagacgcaagaaccttctgacatatgcctgaagggatttcttcgggccctgagtgcactggaacagaacctgagcaatgaccggcttcgtctgaaatccttggaagctggataacaacaaatcccttagctatctgcatgaagtgatcgtgcctggtcgaagggaggaataccaggtttgagccacacttctgacagncattacgaaagatatggtcatgactgaagccatgccaccatacgaagaaactgttgcttcgt

SEQ ID NO: 67225 - DNA, 441 bp, Zea mays
  unsure (1)..(441): unsure at all n locations
ctaagctctgtaggcggaccagtgcaattcaggtggatgtatcctatagaaatggctttgtataagctcaagccgnnctgtcgcaacaaggctatagtngaagggtgtattaccgaggcttttgcccttaaggagatatctcaattcccaaccaagtatttcactcgagccaacaatgtgtttgcgccttcagtgcgactttatgtcaaaaatgaatcaccccaaagcacccttcaatattttgcgaatccgggtaaagcaatcggaaaagggagtgtacatcacattgaaggatcagatttgaacacgctaatgctatatattgacagcacacacaaggcgttcgagtaagtcttcctcataattacgtccattntctcatctcataanttctataagtgtgtaatctccatggttctaatatgtccagcatgtttgatg

SEQ ID NO: 67226 - DNA, 423 bp, Zea mays
  unsure (1)..(423): unsure at all n locations
catggtccatctgttgggcttttattttccaaaatgctctctaacttttgagagcacaactttattactagtatggtaactcagctggcactgattcccactaccgcaggatgccgtgaacagcggttgaggattgagacttgagaagaagcttcacccgaaccgcgagatattgaaattcaccgtcgtcgagacgaaaattggtgcgcggtgtcgagcggccattgaccgcgcctaatgcgcactcatttgcgttgcgtcgtaataattcgtagccaagaattggaacaacaacagatctgatgctntgctttgctcctagcctcctattagtatgcgctgtggccgatgacaagagaaatattatagggtgagaaagccttcttatcaaagaacatacaattgtttcctcgcacttctgct

SEQ ID NO: 67227 - DNA, 432 bp, Zea mays
  unsure (1)..(432): unsure at all n locations
tatttactcagntatcaatcctcaatgatctatatccaagaatgacccacagttattttgaattggtatatctaaaaactcatatcatctccgggaagatattgatgttgtangaattaatgaattaatcctatgccanaaagtcgaggcctacaacatggaggaaagccaaaggatggtaacatctatgtttttaaatgcaagtatattaaatcatcatttcttatgtgtcttgtgaggcaccatagaaaataaagcacttcaactgttttaacttatgcaccattctttgaagaaatcctctatatggtagattgacactcatcatttcttacataatcactacatgtttaaagggtgaagaatccatggatgtttacactattatctattttgcctgatgctgattaagattattcatgtcctaaaaat

SEQ ID NO: 67228 - DNA, 467 bp, Zea mays
  unsure (1)..(467): unsure at all n locations
agcttntaaaanatactaggactctgcctttacattctatgagcagcttgatcgacaagttgctgaacttgttacacgcatggacgtactggaggctcgttccccaccaccaactccagccctagctcactctcctgtggacgacgacgatgacgatgatatttatgcaccgctgcgacaacgcctcgcacgtaatcgacaaggtatgggaggtaatggtagatgtcgtcatcataatcctgaaccagaccatgatccatntgctaagattaagttttctattccaccgttcatgggttcttatgatgttgaagcttacttagactgggagatgacggtagaacaaaaatttaattcccatcttgttcctgagcagcatagggttagacaagccactagtgaatttagagaatttgctatcattnggtggaatggaacttgtaacacacgtgctgcccacanacatg

SEQ ID NO: 67229 - DNA, 475 bp, Zea mays
  unsure (1)..(475): unsure at all n locations
tcagcttgtcattcttcagcttcatcatcctgcacatattatatcagaatgagaaaggtgcagaattcaaggagaaggtaaaagtaacaagtataagtttctcactggcttaaggtggctccgagcttcgtcaccagccatttttcgcccgccgtttatccgaatctggatcataaacctgtttcctatgcttcgggctaggcttgggatgtcaaccaaatctgccggtgacaagctgaagtttggcctatntatcaatttcccgtgcgtgcagccagccttcatgaaagcggtagtcgtgccccaagaaagtagcaaggcgcagaaatcagcatgcccagcaataacttcgtcaagtgcatcaacttcgccctcaatgtattccaaggtgcttggcangttttcagctgaatgtgtaaacttatcagagctggctctaattgagtgaaacacatacttcagccgctgcacacat

SEQ ID NO: 67230 - DNA, 347 bp, Zea mays
ggcaactcgggcagcgtacggcaaatagcgcatttcaatttggcttcggccagttgtttttgaaagatttcaatctcatttcttttgatttcacactgagccctgaagttagcttcatccccctttactttgtccaccaatgtaagtagaattttgtctttttccaaagcttcggtcctcagcttgataacctctgttcgaaggttggtgagagcaatagtgcaactctcgtcttcggcattcttttgcgcacttaacgcgtggctaagtattaaacctatactgaaaaatgaatgggttaatataagaacacaagactaattcaaaattcataaacttccaataca

SEQ ID NO: 67231 - DNA, 427 bp, Zea mays
  unsure (1)..(427): unsure at all n locations
tcaacattttatttctttagcatagccatgccttacgccatatgttgtggtgntgcatcgagcaggccatgtttaagtgtacttgatcattanctttttcctttcgtacctgttgagcgatcatcacacacttatatttatgagaaacttcatgctctgttttcagtgtaaaatgatagatgttgtagttgatgtgggtgatggggctacccacatcgttccagtcactgatggttatgtaattgggagcagtatcagatctattccaattaaaggaaagaagcatggacatcaaggacatataggtatggagggtgcgactcattanttcttcaattcactcatgcatgaaggtttttctctcagtnttgtgttctaatcatgtagcgaaagcctatgcacatctnntttattcccgccgaacact

SEQ ID NO: 67232 - DNA, 426 bp, Zea mays
  unsure (1)..(426): unsure at all n locations
agcttgacaaatgccctatgtgtggtctcttttatatggggtgacgtcgaaggaaagaagattccacagaatgtgttacgccattttccgtcgatacctatgctacagaggatgtntgtgaacaaagaaacagcagaacaagcacagtggcacaagctgaagggaaatcctaacgaaaatgaaatgagtcacccagctgatggtgaggcatggcaagattttgatagaaaatatctcaaatttgcataagatgccagaaaccttagacttggcttagcaactgatgggtttaaccccttttcggaagaaacactaaatacagcatgtggcctgtacttgttgtgccatacaacctttcaccttgggcgtgcatggaggaagtcacatttatgatggctctacttattcctggcctacatcacctgg

SEQ ID NO: 67233 - DNA, 476 bp, Zea mays
cttcggataacccatgatgtccatcatttcatggcagacattaatattctttctgttaggaacgaagattatgaagtcattctctgcatcaccttcgtacactagagatcctcgaggatacttcagaaccctagcgtaatgtcgagcctccggcaatttgcctctagtcaactgttttcccgaagcgtgactgaagatgaattcaagatctccggtccaagctgcttcgggtatcagcactgatattatctctggccactctacttactgctctatggccaatatcgaatgttaaccttaagcactaggagcagacttacgtcatagctcttcaactcttacttggctttgacacttaaaggagccgggtcctatcttcaatgctcacacagtgctaaacgaggcattctttcctttctaacagccttctgaacggtagtaatctgcagtccttcaccaccaaaacttaaatttcg

SEQ ID NO: 67234 - DNA, 359 bp, Zea mays
  unsure (1)..(359): unsure at all n locations
atcactcaatcaaacttgtactcctagaatagatttataactttgttatagtggccataaactatagctctatggatagagcagcaaagagctcctaagctgcacccaaaacatacaaattcagactctgaatttgcactaagtctgaaatctgacaaccctantttacaccaaatttcacacctagttccaggcaactaatagtggtagagttcaagtagtaattggtgtgagcttcactgacctgagatgattatggaacaagcttcatatatgccagcaactccctataatgttctggctatggtggggtaaagaattgtgagcatggtcaccactggcacttgattctctggaca

SEQ ID NO: 67235 - DNA, 169 bp, Zea mays
atagctttgcaaacctaaaagctaattttttttttatgaaaaaaaagttgagcttttactccttaaggtcacctatcccacttactgggcatcaggtatatatagtatgctttaattaaataacaaaaaataaattctttttgtcgctcactacattgtactacctatt

SEQ ID NO: 67236 - DNA, 226 bp, Zea mays
ggactaagcacgagctgcactggacgtcggccctatttgtaggggagaaaagagtaccaccgcctcgttttcacagcatatcgccaagacgactgtcagaaacactgggtgcgccatcacactcgactgtagaaccttcacagtttttggcgaccgggtgcccctaaagcctttgcagggcattacagaaacacctctatagttacaatcttatggtgcggggggt

SEQ ID NO: 67237 - DNA, 449 bp, Zea mays
  unsure (1)..(449): unsure at all n locations
agctttggctccatctatattgtggattgcttttgagtctgtccaatttccttcagcctttctggcagcttcctgacttccatgaatagcaatgggctcttgatccgaaggtatcttcatgcatagatatgctggatgaagaattgcttcgaatgcattgagtgttccacgaccaataattgcattgtaggggtattccatgtcaacaatatcaaacacaccttgttcagttcttgtattatggacaaatccgaaggtcactggcattatgatcttgccaagtgctacaatctgccttcctccgaaaccacagagagggtgtgtagcatatggatcttatcctctagctcttgcatctgtctgaaggccttagcanatatgatatccgctgcactgcctgtatcaaccagaacattatggactagatatcccttgatgacacaagatat

SEQ ID NO: 67238 - DNA, 413 bp, Zea mays
  unsure (1)..(413): unsure at all n locations
tgtggaggttcttcatccncacatgtgctaagcggtgatgccacatctagcccatgcaagtcttagccattaagcatgcatctagaccggccccctctcttgcaaaatcaactaaataaagtttgccgtctagtacacccttataagctagtgaaccatcacgtcttctaaagacagatacatctacanttgtaaatagacaattatatcccatattacataattgactaacagatagtaaattatatccaagagactcaactaaaaacacattagagatagagtgttcattngatattgcaatcttgcctaagcctttcaccttgccttggttcccatcaccgaatatgattgaatcttgggaatccttattcgtgacgtaggaggtgaacatcttcttcntccncgcatat

SEQ ID NO: 67239 - DNA, 452 bp, Zea mays
cccagagccacctgcggcatgcaaacttgcaataagtgaagtaaggcaacatgataatgactattacttgtgaagaaattggatgacaaatggtgtcatttatggagggtgcaaaggtggttggtgataaatcttctacccaagcaaacccatcaacctcaagtcatccaattcttgaagaagttgtacaaccacaagagatgccaagtattgtggaagatgaacaagaagtggttgctagtgaagatactcttgaacaagaggataatgataatcaaatacaaagacaacctctggtgcctcatcctcgagtgcaccaaggcattcaacgggatcatcccgtggacaacatccttggtagcatcaggagaggggtaactgttggggacttgttctcatatgctataagtcaagaacaatgcatcacataacatattaaacgtctaagtcct

SEQ ID NO: 67240 - DNA, 444 bp, Zea mays
  unsure (1)..(444): unsure at all n locations
ctcaagcttcgcacctctgaactaactcggctgcatcactcttcgatggtgttctttanaatcctgacctgaagaccttcccgactagtgttctggatgctacatgtattccacattgcccagcatggacctcctccagaagtcgtttcccagtagatgagagaatgcacttcatgaggacgcctgatgcacctcttctgtacaatgtctccccaatgagtgtgtaatgagccgactgtctggcaatgcgctcggctgaaatctggcctctggtcctcttattctaatatacttgatgattggcttctcagtcatcagagctgactcgggtgactatatattacactcattgctgatccatgaatctcggtgtatattcttgccaaaactcaagggacctgagtcactggatctactggacacaattggtgtggttcatctctt

SEQ ID NO: 67241 - DNA, 282 bp, Zea mays
  unsure (1)..(282): unsure at all n locations
gaccaanacgagatcactggtgaccgtaacgttttttttctcatggggacctcaggaacagattgccggatccaccacttatagaataggaacactccttaggtctctcattataacattgcgcaaatttgttaccgtctttgagaataatatgctacggatatcttgaagataagatttggtttatttgtacccacacttagtcttaacttgcatatattcgcatcactcttatgtaccgctaacatagcctacagtacatataatgatgaacatttacgc

SEQ ID NO: 67242 - DNA, 437 bp, Zea mays
ttaaactaagctctaagggagacacgtgacaggttcgactaacgtgcacattgtatatatatagaccttgcgcagcttgtcaagcagggtaacaagagggaagagcacatcacagcaagaatgtgatgaccacttcaagacctctggagctgatgcatatggacctcttcggacccgtcgcctatctgagcataggaggaagtaagcatcggctacgtattgtggatgagttttcccgcttcacttgggtgttctttttgaaggataagtctgaaacccaaggtaccctcaatcgctgtcttaagagagctcaacatgagtatgagctcaacgtgaagaatataagatgcgacaactggtccgaattcaataatcttcatgtggacgagattcttgatgatgacgagatcaagcacgaagttctcgttccctacaca

SEQ ID NO: 67243 - DNA, 438 bp, Zea mays
  unsure (1)..(438): unsure at all n locations
cctgcagcatgcaagcttgacacaaattgtcgcagacttctctgatttttgtcagcncatgcacatcagcagaaagaatccggcacatagagaaaaatgccacaattccatgggccaagcgggcacccatccctcagtcacgacctctaccatgaccacgaccatgtggcgtgggagatccgctaccaggggagggacacgaggcaccggctgcagcatcaggaccagcaggcggaccaacagatgtatgtgcacgggagctggaaggggctatcctcaagcgccctgctggattgttgggatcaatccagaaaggggtatatgattgatgtctaatacctttatcatatcgaaactgcgtcacaacttctatacttcttatgatgataggtgcatgtcacatcccttaagtggacagaggcagcatggataatttct

SEQ ID NO: 67244 - DNA, 284 bp, Zea mays
gaagatggcgaaagactggctgtaatgacaaaaagaaccgagcgacggaaagaaagagagatgaatcagaccgataagtatgattattaatatcatgcattattaatatagacttgaatttattcaaaaaatatgtgtggttcgacgtaataaatccggatattatctgaaaaaactgcgggttaccgagtgacctgtgacctggctgacacaggcaaggagcaactactggaggcaaggagtgcctgctacctattctcatgacattaggtttgcactattgt

SEQ ID NO: 67245 - DNA, 387 bp, Zea mays
gaccttatcactgagctgcagctggagcgaagagggtgtctactcttggtatattcctcctacatctcctctgacgccttaaatgcgaccggttgtgcttccgacgtggaggggccagtcagcttcgtgatcttccttgagcctttgatcataaactcaaagctcacaaaattcccgattactttcttcggagtcattagagtatatctaggattgccacgaattaattgtacttgagtagggttaaggaaaataagtgatattagaataaccttaaccacctcgtggtcatcccacttcttgctcccgaggttgcgcacttgattcaccaaggttttgagccggttgtacatgtactgtggctcgtccccttggcgtagacggaag

SEQ ID NO: 67246 - DNA, 384 bp, Zea mays
  unsure (1)..(384): unsure at all n locations
tagaccttgcgcagctggtcaagcagggaaacaggtgggatgctctcatcacaccaaaaatgtgatgacaacattcagacccctggagctgctacatatggacctcttcggacccgtcgcctatctgagcatangaagaagtaaagatggtctagttatcgatgaagacctttcccgcttcacttgggtgttctttttgcaggacaagtctgaaacccaagggaccctcaagcgctttctcaggagagctcataatgagtntgagcttcaggtgaagaagatatagagcgacaaccggtccgagttcaagaacctttaagtggaagagttcctgaggaggaagggatcaacacgagtctccgctcctacacacacactaaatgg

SEQ ID NO: 67247 - DNA, 478 bp, Zea mays
  unsure (1)..(478): unsure at all n locations
gagatctntcaagatatggcttcacactgacatggttgcctttttgctgctgncgagacattggagaacccatccttgagggaaaacccttggcgggtggtagcatgtctatgatagctactgccagttatgaggtgagcatactacgtcaccatgaaatatacgatttttttagtttaatcactgcaagaagaaaaaattatgtgttcggttggtgtatttgaaaatgattatatcagtgttataaactggaaactggatgggccaaagtggtgttagctctgtttcttgttggttggtaaatgtccgaacaacaatccccttgttgataagtggaactggatgtgccatagtgctgctagttttnttttgcacttgataattgattatagaagcccctaatctatggatgtgtattgattactatgcagccgcaattggatgcggcacgatcctgtttattgatgcaactattctg

SEQ ID NO: 67248 - DNA, 385 bp, Zea mays
cgatacccgtgccccaatcttaactattgacaagggatattgttgaggaccgctcttataaaaagttcgacccaaggcgtctttattgtcctaaaaatacttccgaaagtaatggcagtctctgtgttgctgactcggctataagatcagcatattcattttctccacgacgtatattcttaacagaaaatcctttgaaggtagccttattcctttgtactgtatctaaatattttcaagcttcggatctcttgctttgcagctcttgtcaatatgaccagaaataacttgtgaattaatttaataatggccttctgattccattgcttaacttctaaatccaaatcgagctcgactcacatattgtagtccactgaataaattt

SEQ ID NO: 67249 - DNA, 420 bp, Zea mays
  unsure (1)..(420): unsure at all n locations
acctctgagncacctgcngcatgcaagcttcagagttacatgctatggcgacattttatatatcccanacaattggtattcgacacaagctttaggctatcttgtatagtattatctttctaatgtatggccaaaagaaggttactcgatgcatcaacatattaccatgcagaatcggagacttttgaagttattttttgccttcaaagtgtgaaacctactcgatgacagatccatatnttttccaactactggaaaatttatcttcatgttattataatctcttctattgtttaagattcaaaatcaagctgactttacatatctgagttaaagtngagactcattcaactcagctatattgtgtttgaaagaaaaacaaatcaattgaacaatttaagatgagataactgagcgagc

SEQ ID NO: 67250 - DNA, 483 bp, Zea mays
  unsure (1)..(483): unsure at all n locations
tcccctgcacaccgaagataccgagatctcgggcgtcatggcactatattatngccccagcagcaaacattggtggctccaagcgctatattctttatgtccctgggcccacatgtcggggcccagcacctttgtgcatgccccccttcagctataaaaggggaggcatgcgacgttacacataagctcggggaggacatccaagcttagcctcacaagttcatacaagctctcaagcaatacatcacacagtggagtanggtgttatgctccgtccgcccgtaccactctaaatccttgtgtgctcttgtgttcttcccacttttccaactaacaagaaaaacgcctangcccctcctcatcttangaattaaggcgggtgcactccgccacccggccggagaattgctctccgacaaacatgatgtgaacacttatgatacgaatgtgtcattatgaatatgatgttggactggtgatact

SEQ ID NO: 67251 - DNA, 427 bp, Zea mays
  unsure (1)..(427): unsure at all n locations
tgcggcatgcaagcgagncnctgaactgaatgctgctaccctcnattctgatgnaggtaagcccattagctccatctccacatatcctaaactctctctttctatgatattcacgttcggtgcatgcatctgggtggtgttcttatgctttcctgttgcacataggttaatagggataccatattgaatatttgcatttacttgtatatcacttgttttctttgtgtggtactcaaggctatctactaaaaagtaaatccgctgctaattcaatgcttggatagttgcctcacagaagaagaaaaaaactgctggcaaaatgtttgcttaatgctcccaatgagatttgntagtcactttcctgcaccccttttatgtgactgaacgaaacttaggcatctgagctacctgcatcatgtatctgtac

SEQ ID NO: 67252 - DNA, 448 bp, Zea mays
atacttaccctccgatgagcatattatgtgaacacaggcgcataactcctataacatgtactatccattgcctgtaaatatcacatacagaactacacatagctgacagctaatcatcgattgattattcgcaaacaaacaattacaaatgtctgcatatatggactgacattgctatgaaatttaccaatccccactgatgggctcataaactctacatatgctatcactgagaattctttcgcactataaaaatgttagataggtcctaacgtcaactaatgggccaactgcacaagcagcataatgtgtactaatcaatgcctacatcggatccttgaatatcttcactacaccttctatgttgttttcttcccacatagtctagatctgaagagacggagcaagcattctaaatgtgactctctgtgactactccatctgatca

SEQ ID NO: 67253 - DNA, 418 bp, Zea mays
  unsure (1)..(418): unsure at all n locations
agctgtatatggacgattgtgccgttctttattgaataggncngaaccatgagaaaggtggttnttcatgcctgatatggtgaaagagatagaataataagttcancgaattatacattattttgaaagaagcacaagctctacaacagagttatgtatacaaacgacgccaacccttgtactttcaagttgaagactatgtgtatctgaaagtatcaccaatgaagggcgtatctcatttcggggtaaaagggaagcttgcaccccgggacattggtcttgttcctatccttgaaaggagtggaccagtggcataccgactccactacccgaaacattgttgtagtgcacaatgtgtccatgatccaataaagaatgcttgcgttcctatcgaatattgatggaggatgtatcttga

SEQ ID NO: 67254 - DNA, 473 bp, Zea mays
  unsure (1)..(473): unsure at all n locations
gcttacggggtgttgacgagttgactcgtgcaaggaattgaatatcatctcaccgnggagctcggtctacgttcaacagcggtcgggtgaagtccggcgaccgtggactggctactccagcgaggcaaagttcgattccttgctcggggagcttcaccgaggcatgcacggtctactccgagggtcgaacgcggctgggagaggctctgctggccagtctactgaggcgggtgtttgggtggccgcgggcactccgtgtgcggagcaatgccggagatctggtgctccagtgaggtcgagcgcgtgcggaggagtacggtctacgtctctaggggatttatatgcgcgggcgcgggcaacggcgccggctcggctttggcgtgacgcggagcatgctgaggcgcgcgtcaggcgtgctctggctagctcaaagcacgtcgaacacgtggctcttntgttctgttcttgtctac

SEQ ID NO: 67255 - DNA, 422 bp, Zea mays
  unsure (1)..(422): unsure at all n locations
aatgatattaaattcaattggtcttcttagtgtaangaatcttttgagcaattgaaggtattattaaccactgctccggtattggctcaaccggatatcaataagccctttgatgtgtattgtgacgcatcangcagtggtctcggctgtgtgttaatgcaagaaagccgagtaattgcgtatgcttcaaggcagntgcgccgacatgaggaacattatcctactcatgatctggagctagctgcggtggttcatgccctaaagatctggcgtcattatctgctgggtaatgtctgtcatatntatacagaccatacaagcttgaagatatcttccccagtctaattgaatatgagacaaggcgnggctcgagctgatcaagattatgaattaaaaatcatatcatccagcaagcaatgtat

SEQ ID NO: 67256 - DNA, 398 bp, Zea mays
gggctttggtggtagatttggtgattcacctcagacaaatttactgtctattctgcggtgaagacaagggccataccctcaggatgtgccatgttaccatccagaagctaaaggagattacagaatctgcagcgcatctgagtctgccgaagcaagtcatgcatactgctttcgaccattcgccttacattccagaatatgtaggcaatcacctctgcaattctgttgctttggccagccaacctccaacatcttggcaacagcctccacctgcaccactaactcaacaaggttctcatccataatggatgcagcacactcacctccatctggatttcagagaggagttcgaaacttccacatgcaatagcactgtgctataggcaagctatatactg

SEQ ID NO: 67257 - DNA, 478 bp, Zea mays
  unsure (1)..(478): unsure at all n locations
aatatactaagctgaaaagtgaggtgctcactcatcttgtgggcagatgttgattcttggcaatagaccttgccatgagaatcgtctataggatgttcctcanaatgaatgaagatgacgcgaagaacaagattgaagaagaagaaaataatcgatggagaccagacgacgaatccacctcttcacaaggctcgtctttcaaattcacttctcatatgtgctctgtcgctaatgggagtgacagtgatagcgaaagtgaggatgatgaggagcatgatagtgataatgaagatgaggatgatcttcaacaattcttcgctcaactaagcaagaaacatggatgagcttgctcaaactcatgaaaagagcagaagaacataatgaaatgggtcataagccagaagatttcttatcagaaaactgaagatttagagaacttgaccaaagagcatgagaagcgtaagtgctctcatgatga

SEQ ID NO: 67258 - DNA, 392 bp, Zea mays
gcagcttatacaggaggatagaggccagagctctaccatatgttataatagaaggggaactatacaatccgggggtctgttctccgttactcaagtgtttatccaaagccgaaggtatagaattgatgaaggaaatacacgcaggcctatgtggatctcacattggatctacgcctttgcttggaaaagtctttcgtcaaggatatttttggccaaaggcagattcggatgcagcagaattagttcaaaagtgcgaaggttgtcagaaatgtgcaagagataaaaaacaaccttcgtctttaactcagttaatacaacccacttgtgccgtgcaaaggtggggccttgatttgtaggtccattaccaccagcacaagggaacttaagatatg

SEQ ID NO: 67259 - DNA, 489 bp, Zea mays
  unsure (1)..(489): unsure at all n locations
ctaagctcgngatggcttccaagcttggagaaatccgggatgaatctattgttttattcagccaatccaaggaaacttctaacttgatgcacagtggttggcgggttccactctagaatatccttgaccttgctgggatcaaccacaattccgtttgaagacaatacgtgtcccaaatattggatttactccatccaaaacacgcacttgctaaatttagcatataattgatgttcccttaagcgcgttaatacgatccgtacgtgctgagcatgcttctcttcattcttggaatatatcaagatatcatcaatgaagaccaccacaaatttgtccaactcgagcataaataccgagttcattagatatgtgaagtggacaggagcattcgttaatccgaaagacataaccaaatattcgaataatccataccgtgtagtaaatacggtcttgggtatatcttcaggtcggatgcagatctaatgatag

SEQ ID NO: 67260 - DNA, 407 bp, Zea mays
ctgcagcttggcccacctgcggctcgcatcttttcttgattgtgttttacgggccactggcggtaccctgaaactagggtaccccttactactgtatgaagacatagtacccacgccgctatctttagtcgcgtagtaaaagagttgtatgtgggaccaggccatgactcgcccatcctcggtcgaccactttgggccagcaacagcacctgaccccaccacatgggcgggtccgggaccgtcacgttgtcagagaaagtgatatactttcaaggtatcaacagtgagtccggacccccatgggagagtgtcggacccctgccgaacccctggattacagtcccgacctccaactattctaggacccccacgtgtttggatcggacccctggaatgggatcccgact

SEQ ID NO: 67261 - DNA, 443 bp, Zea mays
  unsure (1)..(443): unsure at all n locations
agcttcgacaccctggccgtgttaatggatttatttctgngcgncaaaacattaatccttttcccctttggcgtaacaaagatggccgaagtaacaatctttcttttctttccctgctttcacgagggataacaatagtgtgggtatacaaaaccaattacatcaataactctgtttaatctcctcttgcctcgtccttcgaaggctaatgtcatggcatcatcttcagcccttgtgtaggcccaaagcaattcgtcactagtcgcctcaatacgatccagccagtcatcgttgggctcatccaattgatctctgtatctgaagccaccttgactggacccggcagcagcttccatcggcatctcctagccacttacaagaggccatactctataagcaatatgctcctggactaagtctcttgtgccaataaaagtgcatac

SEQ ID NO: 67262 - DNA, 386 bp, Zea mays
  unsure (1)..(386): unsure at all n locations
aaagctgagcancagntccctctggataagatgctgtgtttatttctgaaaactctcgaaatataccgtcatcagcttactcccgaagctatcatcaatatggggagttttatttgggccaaggggagccaaaggttagaaccaaatgcaaaatgcttctgcaacatgcatgaattgtcttatgagtcgaatgccaccgaataagagcaatatcacaacaacttccggtggtacggcttcataacccgctctgaggtgagcaacccaggtccaacatttcacaagagataggccggggcctggatgcacgagtggntctatgtgaaaaatgatctggttgaaagggagacatcaacgggattatccaatgtcctatatgggctcac

SEQ ID NO: 67263 - DNA, 370 bp, Zea mays
  unsure (1)..(370): unsure at all n locations
agcttcttccgaccaccagcttctttatgcttatgcgccagnggcttcagcggaagattctgggatcaacccataagaatatcttgcttattctgtggtgaaaacaaaggtcatactaccaggatgtgtcatgttaccattcataagcaaaaagagatagtcgaagctgccgtgcaacatgctctaccgaagcaggtcatgcacactgcttcgtatcattcgccctacatcccagaatatgtgggcaaccatcctgcactctctgctgcttcggcaagtcagccttcagcttcctggcaacagcccccgtctccacctccgttgtaacaaggccatgcaccaaaaaggagccaatatgctccacatcaaa

SEQ ID NO: 67264 - DNA, 413 bp, Zea mays
  unsure (1)..(413): unsure at all n locations
tcatactcgcgcaagnngaggccggaacaacaactgtantttatatttgangtgctcgcctccaggtgcggtgaatagaatccctgctcctgctccctgcagctcagcgagccgtcaaatacattcgccatacttctgcaggttctggaatatctggtacttgctgctcagtccactcagatacgatatcaaccagtgcttgagttctgatggcagtgcgaggtcggaactcgatgtcatgagatcccagctcacaagcccactaggctattccgctaatggcctccttgctgtgaagaatattccctatcggaaaaccagtaactactatgactctgtggtcatcaaagtattgacttaactcgcgggcagctagaagtactgcatataatatcttctgaacttgaggatac

SEQ ID NO: 67265 - DNA, 331 bp, Zea mays
ctgcagctgcaacttatatagaaatgttgtgtacttgtgcgagacaccgctctctggcaacatggtgaggtgatggatttagcatttgtcttttcccaattggtttgagttttgcggtgcattactatttaccctatacggttcataagactaaccattcctttccggcttttatggtggagccggaaagtattcgcccccacgggtatgggacgctgtattaatgggctggtgcatgtatattgcaatgggaagtgttgctgagatggatgagggtttaagtaacaatcctcctcaaacatccctgtgtcggactgtccaagtggataca

SEQ ID NO: 67266 - DNA, 435 bp, Zea mays
  unsure (1)..(435): unsure at all n locations
cataanatcagctctaaggagaacacggaacggcaaccaagacatttctttataatagacctgccagctagcaagcagggaaacaagtgggaggagcgcatcacagcaagaacgtgatgaccacttcaagacccccggagctgctgcatatggacctcttcggacccgtcgcctatctaagcataaggggaagaaagtatggtctagttattggtgaagactgttcccgcttcacttgggtgttctttctgcaggataaatctgaaacccaacggaccctcaagcgctctctcaagaaggctcaaaatgaagttgagctcaaagtgaaaaagataaagagcgacaacgggtccgagttcaagaaccttcaagttgaggagttccttgaagaagaanggatcaagcacgagttcgtcgctccctacacaccacagc

SEQ ID NO: 67267 - DNA, 372 bp, Zea mays
  unsure (1)..(372): unsure at all n locations
agcttcagncttagtgttagactctttcttttttagncatagagagacagggtagtttgctatatcctatgcatttatgtttgtcatgatgaactatgtttggtttggatctttgtaatgactgtcaccagagtgtgggtatcccctgcattttggtttacctgttatatgttaatggagttagctatatggttgggaaatcctttattccactctcctctttatctgagaagctgtgtggtctgtgttggagatcagtgaagatgctcatctgttcagtgctgttgaaggattctattctctttccttatgctgcaagatttgccagatcagttctgatgtgtggtgcattctgcacatgcaaagacaggc

SEQ ID NO: 67268 - DNA, 467 bp, Zea mays
  unsure (1)..(467): unsure at all n locations
tgacatngnctccctgtnggaagccaatgccatcatttattgtttggcgtctcccactatagagcatacttctagcaaatntataattttcattatctaagtcatgctcattaattntagcactaagttgagctatgcgatcactttgttgtttaattaaagctaggtgatcatggatagcatcaacattaatgtctctacatctagtacaaatggaaacctggctaacagtagatgtaaagggtttgcaagcatttaattcattaatcttagcatataacatggctttctcatttctaaaatngtaaatagaatcattgcaaacatttatatccttagccttagcaattaaattatcattctcaatcttaaggctagagagtgattcgttcaacttgtcaatcttagcaattaagctatcattatcattcttaagataacaatngaatcaatcacaaacattaact

SEQ ID NO: 67269 - DNA, 355 bp, Zea mays
  unsure (1)..(355): unsure at all n locations
ctatanatactcagctttatgtgctcctggtatacgagtgaatgtcagccttcgttctgtttcttttattagcacgttctggaaacctccccgtgcgagggaggagctgtcnatatctttttgttgacagacttgtctatttttntgcagaggtcttcctaaccgctgcgggtctgcctcgcgtcgccactgcaccgacccgctacagccccactagcctgactccaccaccaccctaggtataacctttatttccgcatcatggtcgtagatcacgtaaccctcttacacgtcctccgttcgacagagatacggtgtagatatgcacatctcttcatatctacacatgtatcag

SEQ ID NO: 67270 - DNA, 422 bp, Zea mays
  unsure (1)..(422): unsure at all n locations
gcaagcttgagctgtgactgccttcgnctggattcttctgaaacttgtcattagcatatccttgagcttctgccataaagtaatagttcctggccgaagagaagaataccacgtntgggccacatttcgaactgccatgatgaaggacttggccatgacagctgcattgccttcgtatgaagatatagttgcttcataactcatcaaaaactgcttcggatctgaatgcccatcatacatggggagttgaggtggcttgtatgataggggccatgggatagctcgcagttatgttgccaagggagaagcatcatcaaaagtataggtatcatgattaaaatcatcatatcatccatcgtcgttgaacaagccctcttgatgaagctccctgtgttggggccttcgatcttgctcgtcttgag

SEQ ID NO: 67271 - DNA, 388 bp, Zea mays
  unsure (1)..(388): unsure at all n locations
gcatgagttctcttctccctactctcttcatcataacggggtagtagagaggaagaatcgaactctactggacatggcaagaaccatgcttgatgagtacaagacaccggaccggttttgggccgaagcggtcaacaccgcctgctacgccatcaaccggttatatcttcaccgaatcctcaagaagacatcatatgaactcctaaccggtaaaaagcccaatatttcatattttagagtttttggtagcaaatgcttcattcttattaaaagaggtagaanatcaaaaattgctcctaaaactgtagaaggtntttacttggtatgactcaacacaagggcatatagggtctntacaagncactgactagtgaagtctctggacgtg

SEQ ID NO: 67272 - DNA, 246 bp, Zea mays
gcgcctcaaattagcctatcacatcatctcttcttcataacgggctatagcttggcgccgaaccaatcggcataatttcaagtatgtccccgacccaccaccgaaggaagtacattgacgcatgaaatgatacacttattgcagcatgggtaaaccgcgatttccaccgccattactctcttgaaaaagcatcagctgggaccaatacccactgacccgctgaaatgctctgaaaaaatctctgtt

SEQ ID NO: 67273 - DNA, 472 bp, Zea mays
  unsure (1)..(472): unsure at all n locations
actaagctncagctncatctttattatggattggctttgagtcagaccagattttctatgttcttctagcagcttcctgacttccatgaatagcaatgggtccttgatccgaatgtatcttcatgcaaaggtaagcaggatgaataattgcttcgaaagcattgatggtgccacgaccaataatngcattgtaagggtattccatgtcaacaatgtcaaacacaacttgctcanctctggtgctgttgatgaatccgaacgtcactggcatggtgattttgcccagtgctacaatctgtcttcctccgaagccacagagagggtgagtagcatcatgaatcttatcttctggctcttgcatctgtctgaaggccttagcanatataatatcagctgcactgcctgtatcaacctaaacattgtcgaccatataacctttgataacgcaagacatatccataccatcgttatg

SEQ ID NO: 67274 - DNA, 426 bp, Zea mays
  unsure (1)..(426): unsure at all n locations
tcttccatctctttcaccatatcaggcctgataacccacctttctacaggttcagaccaatataagggggtacgacaccgtcagccatacaatgcttcaaatggtgccatcttaatactttcttaataactattgttatacaaaaactctgcaagtggtaaacagtcatcccatttccacagaaattctagaacacatgcccataacatgtcttcgagtatttcattttctctctcagtctgtccacttgtttgaggatgataggtcaaactgtggagcaactcaatacccagagctttggggagttcttcccagaacttggatataaattgtggcccgtggtcctacactattgtctntgtaactccgtgaaaacttaaatactggcaatgtaaagatctgcatatgtggccactgatacttgac

SEQ ID NO: 67275 - DNA, 476 bp, Zea mays
  unsure (1)..(476): unsure at all n locations
agcttggtcagcagnccaacatcagtcatgtttcttcaaccatatgaagaatctacatttgtcggagcccatgtcttccgtattctatcagaagaatcaaaagaggttaaaccaaaaaaatataatagctcgtttggatgtcgatattagagcatagaattgagaattggaatcacctttcctaaattatgtcgtttggttgcacacaaaattgagatttggaaccagagactcaattccctggaattggactataactagaaactcctcccaataccgaacgtcacccctctgtattgcatggaattagaccgcacaattccaaaccccaatccagcgacatcgaaataatagaattggaatcacatattatttcaataccatgactgattaggtattgaactcaattcaattccatgcccttcaatatcgacatccaaacgaagcatanagcatcataggcagatttagtggag

SEQ ID NO: 67276 - DNA, 455 bp, Zea mays
  unsure (1)..(455): unsure at all n locations
tgctaggcgcgangtgcctcactccgagcgatgccccttgtatgatcatgaagaggaatccatcgaacacctgttggcttcttgcatctttgcccgacaattttggtttcaactgcttcggtcaattgggcttcagtcccttgcccgtgggcatggggaacgttttgaaaactggtggaggactcgaagttctcaacttgtagggttgcatcaaaagggctttaattccttagttattctaggggcttgggttatttggaaacatagaaatagatgcgtgtttgatggggcgacgctcctagctgctaaagaggaggtcttangatggtgtttagcaggagctaaggggctgacctttctctcaggttttgaccctgtcccggattgataaatagctctcacgcagagaatatgtgaccttgctcctaggctttttcaatgtatacccaggatga

SEQ ID NO: 67277 - DNA, 487 bp, Zea mays
  unsure (1)..(487): unsure at all n locations
tctgctcatctnccggcagacataaatctccttgctgtctggcatacaatacaagaaatcttcttctccgctgccggtgaatatcaatgccccctttggatatttcaattttcgggcatagtattatgcctctcacttttcttcttcagataacctttttcctgaagcatgtcatacaaaataatcaagtacttcggaagatgcttcgggagtaggagtggcagttttttcaggcaacaattgttctgtagcttctttttcccgttctatttctccgatattcaaggattgcctagcttcggtctcggcctggctctttgcagcctcggcttcggttagtcttgtctcagactgtgtctttggagcttcggcagctttccttggagtagagcttgtcattattgtctctagcgcatctaatanggtgaccattcttttcctcttatgggtcgctgtaagaccttnntgttgcctttgcactgtcact

SEQ ID NO: 67278 - DNA, 465 bp, Zea mays
  unsure (1)..(465): unsure at all n locations
agctttatgccactgttgccagatttgagtggtgaactgcgtncctctgtctgacactatcttctttggcgcaccatgaagacaaaagatcctagacatataccattctgccaatactgcactgttgtagttggtcttgacaagtatgaagtgggctgacttggtcaagcggtccaccactacccaaatagaatcgtagccggctcgagtgcgaggcaatccgactatgaaatccataccaatttcatcccatttccactgagggatctgcatcggttgcaacaatccagcacgtctctggtgctcttgcttaattcttcggcaactatcgcacatagccacatgctctgcgatttccctcttcattccgtaccaccagaatttcttcttcagatcctgatacatcttctcactgccagggtgaatcgaataggctgtctcatgagcttncttgagaatcaactc

SEQ ID NO: 67279 - DNA, 443 bp, Zea mays
  unsure (1)..(443): unsure at all n locations
agcttcataacccctagtgggacctatttctatccttcgatacctgaggggctcaaaatgctggaggaagcttcagcagaatgactgccaaagttctcatctctcagattggtagaaatgtcgtgacatatgttgatgacatcatagtgaaaagcacgaagcaagaacatcatgttgccgatttatgagaaacatntgctaatttcagaagagttgttctcaagctaaatccagaaaaatgtgtctctggagtgaagaaaggaaagtttcttggttgtttggtatcaacaaaggggattgaagctaatccaagtaagatagaagctatacttcggatggagcccccgaagtcacgaaaaggtgctcagaggttgacaggaaggctggcatcattgaatagatttatntcaagatcagcagagaggaacttgccattctttgaa

SEQ ID NO: 67280 - DNA, 384 bp, Zea mays
  unsure (1)..(384): unsure at all n locations
ccctaaagaagataaatataatatcaattagaaattccaggacaaaggaaaactttaattctgcccacgtcagcccaaaccagcctagtagcgcgcgcccgcgccgcctgtcagcggtggatctcgcgcccgccttttcccttacccgctctcaccgccatgtgggtcagtcctatcggcgccgtgcctagttagctcgttggccttctgcctctctgcccagagnggtcgtcttgtcagtgcgctggcccgttgtgcgttcgcgcgtctgtgccgctgtttgctgggcaccgttcgtcagccctctccccctactctaactcgcgggccgcgcgcccacgctcgcgcgaatactggtcaccacccacgcgcncaacccctact

SEQ ID NO: 67281 - DNA, 357 bp, Zea mays
  unsure (1)..(357): unsure at all n locations
ctcaagctntatgcgcacagacatctagctatgataacgagatgcacagtcatctactaggccgctagctaacgggaacaacgtgcatatacgagatgactgataaacataagttactgaagcacagctttaaggcctaagcaactaattattaaacatctcatatattctccacgaattaacacgcaacaagacctactacattaacttcagccgagatagacaaccgtactaaatatgaacgagacgtgacgtgatcttgagcggactatcacctacatagcacagggcacaagcaccagttcagagcatccgatgcatctcttgctttcacctaattttgtagtgccttctctg

SEQ ID NO: 67282 - DNA, 472 bp, Zea mays
  unsure (1)..(472): unsure at all n locations
agggagaacacgtgatagggtttactaatgtgctattcgaaaaagatagaccttgtgcagcttgtcaagcaggcaaacaggtgggaagctctcatcacaccaaaaatgtgatgaccacatcaagacctttggagatgcttcacatggacctcttcggacccgtcgcctatctaagtataggaggaagtaagtatggtcttgttatagttgatgacttttcccacttcacttgggtattctttntgcaggataaatctgaaacccaagggaccctcaagcgcttcctaaggagagctcaaaacgagtttgagctcaaggtgaaaaagataaggagcgacaatgggtccgagttcaagaaccttcaagtggaggagtaccttgaggaggaagggatcaagcacgagttctccgctccctacacaccacaacaaaatggtgtggtagagagaaagaacacgacgcttatagacat

SEQ ID NO: 67283 - DNA, 483 bp, Zea mays
  unsure (1)..(483): unsure at all n locations
ctaagctgtcctcaaagatactccncctanatgagtattctcctttagatagagtttttctccncctctagagatgaagaaaagctccctctgatagagatcttatgaaaaagcatgtgaaaattagaggtgcaagacatgatttgaaaagactaacttcccttatgcataggtaacagtatatgagttaaccacttatgcatttttagcaacatggaagtatatgatatgaaatatagtctaatcaaatattggagaagacatgtaaatgatactagatgtagtctcaaaagataccgattganattcaatggcgagcttgagagacatgagagttcttggagatcttgcagtggaagattgttgtctttctccggggacctcattntccttacaatgagactatcacatgaaatagacttgaacaggtgtagtctcaaagtattagattatagagtaacctcctcctgaagatgtgcatac

SEQ ID NO: 67284 - DNA, 430 bp, Zea mays
  unsure (1)..(430): unsure at all n locations
agctgcagcttncaagtgtagttctggatcagttttttctgttttgggtatattacaaaccgagttggattagctgtggatccaaagaatgtatcagctatttggactagaaagcaccgaaagatgtccgaggaatcaagagtttaattggaatggccgtgttggagacttgttctcaaatgctatgagttaagaacaaggcaacacaacatattaaatgttaatgtcctttgtccttcgaagcattatttcccttaggatataacgatcttcggacgaaggtcatgaaagacgtaccatcatcgtcacataatatgttaatganagacaaagcatatgaaacatgaaagataacatgaataatcatataatatcattcatatatctttattatataatcttgaataaataaagacaatatntaattaca

SEQ ID NO: 67285 - DNA, 518 bp, Zea mays
  unsure (1)..(518): unsure at all n locations
ctaagcttcctagggtctacatcgcaatccgcataatcagaatacataccattgtgtatatgcanctcgaccatgtgagttaccttcacctgacggaagatcgagcactctcgttcctatcaagtggtattcaaagactcacgtattaccgtcaggcttaccctagcttagtttaggttgttcatcctataactccagataattgccatacaacataaaaaattctgctgtcctagaacccttgtttagcctgtgcaatttcgttttcagtttggctttgttcaattcgtgtcaaagcgcgagtcatgttgctggttatggttgtatcttcngacgagntcaactgcaacttctgcgctatgccatccaccattacccagatcacaagttgatccaccccattaatcgacttgccctcgctagccgccttgtgtgacttctcgccgcgccatacctacatagtgtgcgagccagcttgagtcttctgcctgcatagctaccattcttattcatctgga

SEQ ID NO: 67286 - DNA, 309 bp, Zea mays
tgaataattaagccatccatgtaatcttgatggtgctcactccaatgaaattaactgtcctctcgctcatataagggtccagagcattctgaacgccgcaccacaaacagaggtacacaaagtttaaataagggcatttccttcaatggcagcacgcatatactttgtgactggagtcaacaggcttacatacccaaatatatggcggggttgtgagaccgtaataggacacatttgaaaattctccagatacgccaccctgcctctgaattttctgcaataaacatcaggcaccaacagcatacaatc

SEQ ID NO: 67287 - DNA, 376 bp, Zea mays
  unsure (1)..(376): unsure at all n locations
gcagcagcacttaccagcacagcaactgtataccatacccgtaacatggccatttgcgtgctgaggactggacatgattagaccattcaagaaagctcaaggaggttacactcacgtgctggttgccattgacaaattcactaaatggatagagtacanacctattgcttctctgacttcagctaacgcagtggaattcatacaagatataatattcaggttcggaataccaaatagcattataactgacctgtgatccaatctcactagctcagaattctttgatctctgcgaacaaagaaacatccagatcaaatatgcatcagtatcacactcaagagccaacggtcaggtagaaagggctaatggaatgata

SEQ ID NO: 67288 - DNA, 423 bp, Zea mays
ctgacagggcattctttacataaaaccattctgtcatccaggccttcggccatctattactaaaagttggcacgtgacagcttgacccggaccgagaaactaaactgtagcagccaaaattattgtgatactggtccttaccccaaggttatgttttgtatgataattctgtgttattgtagaagctatttgcatcaggcttcatgttagaaatatgccctagagataatcatagagatgagcatatttctttgtatccatgatatatatattgcttaattgaatatccatggaaggcaccttgtattgattagcaatatgtgaattggttgtagattctttactatatggttattactaatgatgtccctagccagagcgatgactgcacatgattagttgtgactactttcacagtcatga

SEQ ID NO: 67289 - DNA, 523 bp, Zea mays
  unsure (1)..(523): unsure at all n locations
tgngagngagngtatgaaactaaatgatatcggtgatgacaatatttcttgtttaaagaaacttaaagagcttagagtcgaatgatgcaacatacacatgattcacctactacagacataaaagaaaactctaacaatatgtttgttttaaagaaacttaaggagcttagagtcgaatgatgcaacaaacaaatgatccacctactacaaacaaaaaagaaaactctacagagttctgtacatccacgataaaccttgaaaatccagtgtgaagaatacanacaaaatcctaatacaatctacgcatacaaagaacagttgtacgacacttcgacgcctactatgggatgaattatgactctctaaaaactatctctaaactaggctactaataaatccgtataacaaaacctatgcaaataacttaactagaatatgcaaactagattttttctatgtgttgcgatatctaccagcaaagaaagtatgcaacctatgttntaatcctatataatctacacta

SEQ ID NO: 67290 - DNA, 236 bp, Zea mays
ttttttttttgcccccccccaaaaacccctacatctggcgcacctggcttgtttaaaaaaaatttgggccaaatagcttctctttgaacctcagttggtcccccaaaagcccggcaaaaactcccgtggttccaagaatcaaggatttaatttgttagtgctttactccggggggatttccccttagcccagggaaccaatattggccctttgagtacccccccccccgagcctcg

SEQ ID NO: 67291 - DNA, 255 bp, Zea mays
gcagcttagcgaagaattttgttttttcttaaagagaagactacttagtgagaattatttaagggcccaactgtaaccacttggtgatcacaagagacccttgctatttatacggttggtcttagctgcatcaataaatggttttcgattaagaaggggagactcttggttgcttatatcaacaaacggaattgaggccacccaactaatatcgaatctatacttcgaatgggccaccagtacaacaaagggggc

SEQ ID NO: 67292 - DNA, 118 bp, Zea mays
  unsure (1)..(118): unsure at all n locations
tctgcacaaaaaacacagaagaaangcggggctttttcggagcctctcccctgcaacaatgccagagaacatgggggccgcggaactgccttgagaaaaacaccgcagacggaaagaa

SEQ ID NO: 67293 - DNA, 476 bp, Zea mays
  unsure (1)..(476): unsure at all n locations
agcttatgtaaaaaccacatcatttaggaatatgtgactaaccacacactaccaactctaggctaggcaatgacttcattcaaaccaatagataagtggtccaacaatggctccacaaacatgcatcgaggagagaatcatcagatcctcaacatattaatacataatcaatggatcaagaaaatcaaagattttattctacaattagcatgactaacatgcaaccactttaaaccacatctaggctntgtgtctactaaaacacacgatagaagagagacatgtaagccattctggctatgtaaagacttcccccaaaatccatataaaagtaccaatattcatttctttcagaactggtttctcgacataaacaatcattctttgcanagatagatggagctatccaccaaccgcccaacaacttaaattcaaattaatggttaccttgtaacccaaaacatgcaattcacact

SEQ ID NO: 67294 - DNA, 387 bp, Zea mays
  unsure (1)..(387): unsure at all n locations
cgtctagtggctttcacaccgcgtgtagctacatcagtattatatacttggttcgggagcatatagcctctaaagttggccccttgttagcgagtgggagatgccgaaggagactgatgttagctcaagcgaaggtggtttggtttatctganatatacctatcgttataggaatcaatttggtgagcctgatgaatggcatgaggccattgaggcaactagtgacaagatgttgggggcttataccaaagctgaagacgaagctatggatactacctttggttcctangaaagagaagaatgaatagagtgtctgatatcattggattcgtttacctgactattgtttccctacacggaaaaggggggtaaaaagaaaaagtgtgc

SEQ ID NO: 67295 - DNA, 334 bp, Zea mays
  unsure (1)..(334): unsure at all n locations
atgggatgaaccaagtgtaaattccacacggaccatacgtgttaccttaagcttaccactgtctttgaaccattggatgtntaagggtgtggatgtggaaacgtttacatcccaagcatctctaccatggtggtgcttgctatagttgtgcagcttcctccatcaattataatacgacaagatcgttccaaaactacacatatagttnggaacaaattgtgtcgctggttttgctcagctataataatttgggcactcaagacacgtcttacaacgaggctctcatagtagtcagcatgttcagccccaatatgctctacatcatcatgctcct

SEQ ID NO: 67296 - DNA, 241 bp, Zea mays
tcgccagggctggcacctattggccagggcgtgatcaagtagccattagacgcatctaggtgcacatgacccacaccctgggcgcctccatgataaaacccctaccgcacaagaacacggtttgtcaataagtcactctcctattgttgcaaccgcgtctaataaacccccgcttctgtctcgaacccaccatatgagtcgacttaaccaaattagactgaatcagactgtcactgtctgc

SEQ ID NO: 67297 - DNA, 309 bp, Zea mays
  unsure (1)..(309): unsure at all n locations
agctttacttagtngattttgctaaagaattggcttttctanatgcatgcttaatggctaagacttgcatgggctggctgtggcatcgccgcttagcacatgtggggatgaagaaccttcaaagctttctaagggagaacacgtgatagggctaaccaatgttcattttgaaaaagatagaccttgtgcagctngtctagcacggaaacaggtgggaggctctcatcacaccaaaaatgtgatgacaacatcaagacccctggagctgctacatatggacctcttctgacccgtcgcctatctgagcat

SEQ ID NO: 67298 - DNA, 345 bp, Zea mays
  unsure (1)..(345): unsure at all n locations
actggcggagccaacgtctgagttgagctgccgacgccatcatccgagctgatgtctntgggggtcagctggccgatgccttcgggtggccggacgagccgcctgctcgggctggattctcgaagaaaaccctgtcggcgatggcccgggtgtggtgctgatgaccgtcttcagagtgtgggccctccgaccgcgtcgncgttcgaggctaagtcagacctcttccaaagtgtagatgatgccgagggtgctgctgctcccttcgatgtcgacgttcgagccacaggatcaggatagcctgtactgtgtgtgtgtcttctgcgaccgccgaggactgaacacact

SEQ ID NO: 67299 - DNA, 344 bp, Zea mays
ataagcatgcgtctagacatggctcctcttttgcgaaagcaactaaataaagttcgccgtctaatacacccttaaaagctaatgaaccatcacttcttctaaagacagacacatctatatttgtaaatagacgattatatcccatattacataattgactaacagatagtgaattatatctcagagactcaactaaaaacacattatagatagagtgctcatttgatattgcaatcttgcctaaacctttcaccttgccttggttcccatcaccgaatatgattgaatcttgggaatccttattcttgacgtaggaggtgaacattctcttcttcccccgcata

SEQ ID NO: 67300 - DNA, 404 bp, Zea mays
  unsure (1)..(404): unsure at all n locations
tcaataatccaacacacagtggagtagggtattacgctcctgtggcccgaaccactctaagtcctcgcgtgttcgtgtgtttgatgatcgcttaacaagacaggcaaaacgcttaagccccctcctcatcataggatttaaggcgggtgcactccgccatccggccggagattccctctccgacatttggcgcaccaggtagggggctaggcttgaagttnttgcttgttttctcactcagcatgatggtgcaaatcgttgagcaccgcgtcgagactctggtggatttcgtggtggaggaagaagtngtttcttccacgccatatgttcccaaccgccctatgtcgggcactgccgttgtgcacgctgcacggcagcatacagctgcgcaagcattccggact

SEQ ID NO: 67301 - DNA, 410 bp, Zea mays
  unsure (1)..(410): unsure at all n locations
agcttcgagcaccgacactcttttatttatgccganntatcttgccccggcgcggtctcgaatacatcctaaggccccttcgtcgattccaccaaagagcatagctcctggctggtagccacatgatataccatattcctgtagctccttctttttagcctcggataattcttgatcgaccaggttccgaaggtcgaagtctctttnttccgaagcagcatcagcaatcttcctctctttgccaggcactgtggccatgaccttctctgtagccgcagctgtttcttccgcagtcatatccaagagcagtttatcaattccagacagtgtactctcaaggttggtggcttcggcggcagctgcagcttcggcaatagcctcggcgcttgaataggtgttattttggatgc

SEQ ID NO: 67302 - DNA, 357 bp, Zea mays
  unsure (1)..(357): unsure at all n locations
catgtagaggcatggtcaacatatctgcttattgattgcgggtgctaacataagcaatttctatatccccctgttggtggtgatctctcacaaagtgagaccggatgtctatgtgcttactgcggctgtgtacaaccgcattatccgccatgcggagtgcactctctttataacatatgagagggactttgctgaacttgtatccataatgcctaagggtttgcctcatacacaataattgtgcgcaacaatggcttgtatcaatactcancttccgtggcggaacaagctactcgagtttgttctcttaagcccataacaccagcgatcttctccaaatgggcaagtccctgatgt

SEQ ID NO: 67303 - DNA, 403 bp, Zea mays
  unsure (1)..(403): unsure at all n locations
gcttagcattattagctgaggcttatctttcagcgactgctgatcgctgagttttaacatccgtggtgctcagccatcagagttgtccgataataatgctagttagctaagtagntagtagtaatagatccatcaacgaaggtaagtgtcaccaataaagcacgattttttcggtcagttagcaccagaacccaacccaaataacagagccttctggaagttctggtccgttcttcagtggagataaggtaattatgtccctctcactagtgagatgtgcgataactgattaccaagcatgcttcatggttttaaacttttctgtagtgcatggggtacgccgatttaactatgatgctactggttgttatatactgccctgaaacagaaggaacatgatggt

SEQ ID NO: 67304 - DNA, 502 bp, Zea mays
cgtgccaaattatggtgagctgctaagatctatgttgtatatgtttctgacagtgcgttgaccttatatattttgatgttgtgtgttgaccatataatttctgatgctatatccaaataattcatatggtgtcacagcgtgtaatgtagaacgcatcaccaattcacataaatactttacataaaaattacattcgcattgaggaataaaacaattttagttaaatactgtcactaccacattcaacttctttgccgagtgtctcaaagaaagataaaaaagtcttctctgtgaatacaaaacaagttacatgcgcgcaggtgcgtggcggtttttttttgatagggtgagacaaaagacttgccactccaatataccaatatattagaaagagaagaacttacaggaaattacaggaaaccgaattgacttcatgactactgacaaactactgacagacctctagccaacgaacactgaaaaaccaacaactctttgccac

SEQ ID NO: 67305 - DNA, 351 bp, Zea mays
agctttggctttgtgctcttcggcttcgtcatactgtacatattaaagtgttataaggaaaattcaagtttaaagaaaaaggtaagcataaggtatgattttattaccggcttaagatgacttcgagcttcgtcaccagctaagcttcgtccacccttcgtccatactagctttataaatctatttcctatgctacgggcaagactgggaatatcaatcaaatctgctggtgataagctaaagtttggtctattgacaatcttcccatgtgtgcaaccagattttaggaaggcaacagctgtgccccgagaagctaccagggcacagaaatcgtcgtgttcagctataatc

SEQ ID NO: 67306 - DNA, 382 bp, Zea mays
cactcctccctagaaaggtcggtcatcaacgccaatatttttatcccagggacatacaagctggccgacgatccaagcgaggtctacagaaaacgcctcggaaacaatcaacaacatacgtcgcttctaccccttgaaaagattgcaaggcccgatcataatacactccgaccctctgttaccataccatataaacaaagggcctcaacctgtgtcaaaggaaatggaaccaagccctttgcgcctccggcaaaagaccccggaacccttcccctccggggggccctaagaaagggaggggaaacatccccctcttaccgtacaaaaagcggtttccctccgggaaaaaaatattttttcctaacaccaaagaaaaagaaat

SEQ ID NO: 67307 - DNA, 352 bp, Zea mays
agcttgaactagtaattctcaaatttgtgtcaataatccatcattctcttgtaaaggatcacccggttgatcaagttgtgggtgacatgcatatgggtgttcaaactcactctcgtattgcttcattttgtgaacatttctcttttatatcttgtgttgaacctaaccgtgtagatgaagctctacttcatgtggattgggtgaatgcaatgcatgaggaattaaacaacttcacctgtaataaagtttgggagcttgttgacccaaggatcacaatgttattgataccaaatgggtgtttcgcaacaagcaataatgaagatggattggtagtgaggaagaaggcaagatt

SEQ ID NO: 67308 - DNA, 315 bp, Zea mays
cttgaacgtgtgtaggtaccacatatgcggcgtgacgcctaaccgtttgggtgctcggtggcttaacacagaagaaagggaggaaggaccgaacgggacagacttaaccggtggtgggtgctcgttgcctgccaacaaattccagttagaaccgattggaccaaggatgaaacatggcattcacttgatctggattttgaggtggaacttgagatctggtgactgggtacgaggtgggcggccaccgtatgcctcaagacaatatccgtcgggccgaggaacatgccgaggtgcgctaccaaaggcgggatgcgc

SEQ ID NO: 67309 - DNA, 344 bp, Zea mays
agcttcatcacactttgaagaccaattgaacttattattattcttcaataaacttgtaattggctttacaagcttcgaaaaatctggtatgaatctgcggtaatatccagccagtccaaggaaatttcggacctgatgaacagtggtcgggggtttccactccaaaatgtccttgactttgctgggatctaccgcaattccccttgcagatagtacatgtcccaaaaactgaatttcctccagccaaaacccgcatttgctaaacttggcatataactgatggtctctcaagcgcgttaacatgatccgtaaatgttgggcgtgctcctcttcattcttggaat

SEQ ID NO: 67310 - DNA, 314 bp, Zea mays
tggaaattgaaactaggtgtgcactacacgcatcaatgtcaaattcttttcacctagaacaaattacaacatattcttcacaagaattagatttatttgccacttctaatttagcatttaaatcatttggtgacaccttctaaagtagaaatggtgttatgacaaagtagataattcaccagagagcattttattccttttaatttctagagcaagagaattttgtgcactaacaaatttatcatgctcctcatataaaagatctttttgttttttctagtaatctattcttgtcatttaaagcatcaatcaac

SEQ ID NO: 67311 - DNA, 343 bp, Zea mays
agcttgacaagctaataaggattggcctgttgcaactcattagtagtgtggagggcttgcaattgcagtcaactcctgaaagttttcagattaatctgctgaggctgagggctgtgcaaagccaattccaacaggtgatcgtgatcgccacaaggtaaattatttgatcctttggcctcggctgttagaaaggttggattctttgatgtgtcatattgatccatccaaactgtattatttgtgcagcatgctcgtcctgcgccaagttctgatgagcgagaactcgagggccactcctctggaactggaaaatgccatctcagaactcgtcaaggctctcgcg

SEQ ID NO: 67312 - DNA, 329 bp, Zea mays
aggccttaaaactaagctggtctgggaacaaatcccttgcagtgatcttgcccaaattctcgaagatttgctcccaatcggcgcttgaacaggggcagaagcaacgggaacacgtgttcgaccgcggctgacacccctggttcacgcccgttcgcgcaccgcgccttcccagtgcacgcccgcgcgcactcgccggtccacgaccgcccgtgcaccgcgccgtgcctataaaagccttcccgggcgcgcctctcttcgccccgcactcaccctcaccgagcagccaccgttccttagctccggcgagcttatttccgcccgccattgcc

SEQ ID NO: 67313 - DNA, 347 bp, Zea mays
agcttctgttttccccccgtgtggacaggaaaagccagctccactttcttgagaagaaaaaagtttgcaagccacaccttttgctgcaatgtttaagcagccattgactcgaaccatcgcagcagatttggcccgatgtttgtcaaacctagggcgtgctgctgatagatcctctctagtctagctaggtgctttgagtggctcaaggattttgtcatgtcgtcccagcaagaaatgcttctctgggtgcagagcgtgcggttaatgctgaagaaacagacatgattagaagggacaagatcagacttggcagttttagtggcgtatgctccggtatacagttcatc

SEQ ID NO: 67314 - DNA, 310 bp, Zea mays
tttatcactctccattcagcattgatgtatgcatcatgcatgtataggagagaagaataagattccattattacgagcttgttcatcacgtcccacgaattctgacatatataagtaggaagcaggggaaactccctacatgtcgtaccaaagtcatacgatgtgtaagatattttttttagatgttgtttgtgtcgtgcttcaaactctatgactatgattgtcggataccataattaaaggtacccccaatacttttaagcatggctggaaaacatctttaaaacagactgtaaagaccggttagcgc

SEQ ID NO: 67315 - DNA, 377 bp, Zea mays
acccgggatcttaagtcacctgcagcagcaagcttaggggagaataaagtgataatcctgtatgtaattgattagaaccagagagatctctcacttcagttgtagaggttgttagggctgatcacattcattttatgttctagcactttggttgttgaaactgcacttttgttgttttgctttgtagctgtaatttgtactgctttctcaacatatgaagcaacaggcagatgccttaatcactgccaaaaatatacccagtttctcaattgtggttttctagtctaacagttttgaagagccaatctagttttctctgatgtctacccatcaactcttgggtgccatttggttcacaaaatgtaacgtaaatggta

SEQ ID NO: 67316 - DNA, 314 bp, Zea mays
tgtgaaggatctacatacgcacatgtgctaagcggctatgccacagccagcccatgctagtcttagcaattgagcgtgcgtctagaccgacctcttcttttgcaaaatcaactaaatagagtttgccgtctaatacaccctttaaagctaatgaaccatcacttcttctaaagacagacacatctacatttgtgaatagacaattgtatcccatattacataattgacttacggataacaaattatatccaagcgactctactaagaatacattagaaatacagtgctcatttgagattgcagtcttgcctaag

SEQ ID NO: 67317 - DNA, 351 bp, Zea mays
agcttgaactttacacttatactactccgttctctaatatttgtcgcccgctagttcatttttaaccaaacacgacaaataaaaaagaacggaggaagtattacacaagcaaaagcattatttatttatctcatgaacatagacgtgtgttaaattcctccgcttgatttcatgtgataatttgattactatccaatcttatgggttcatattgataatgtagacgagtaatgttttatcacattattaacttaaaactagtgaggattgaaaatggactgagatttatgttggtagcataacctaaaatgcttctgagtatcactagttagcttctttttcatgtgcctc

SEQ ID NO: 67318 - DNA, 311 bp, Zea mays
tcatcaccaatttctttccctttctccgacgctgctgtcttagcctcttcggcggcggaggtagcttcttctgcagccatgtctagcaatattttgtcaatatgtttgattgtgctctccaaattcaaatcttcagccgaggcagcttcggcagccgcgacctccgaaggtgtaatttcaatatctgtcccttccacaaccgctggtgttttctgagctgaagctcttggcggtgtcttgtcaattacttctgtcacagtgataattctttgtctctttgctttgattattttcttcgatttttcgggctc

SEQ ID NO: 67319 - DNA, 337 bp, Zea mays
agcttactccgcattacgatgatcgagttattttttcgatatgacgtatgatgtgttgctttgcgtaatgatgtgatgatatgatgcaaaatgatgctgatgccgaaaacacacacccacacacccacactggaatacacaaactctgtattcccttaaaaaggacttttgagcttcttcaccgtttatttttcagtgttcaccggttatttttcggtgtaagatctgcatccccttaggaacgccttttgaacttctttgccttttatttcggcgggataagttctgcatccccttaagaacgtcttttgaacttcttcgccttatatttcggcga

SEQ ID NO: 67320 - DNA, 315 bp, Zea mays
  unsure (1)..(315): unsure at all n locations
tggtgttngcatacctggcatcaattatgaactctttttctaattaaaatttgaaacaaccttatatttaccatataaatacaaggtttcagatttttaaaatggggtactatctttatgccctatttgaaatgcgagacttttctcatttctgatgtgctttccaagggtagatgaactaatttatttgtgaaatccgcatatgatttctataaaaatcctatgttccaaaggggtcctaaatgaagtttattatgcctacatatctgaagtaactataaaaaggcacaaatacattacataatatggaacaaa

SEQ ID NO: 67321 - DNA, 341 bp, Zea mays
agcttcaaagcaccaagctgagactgaagctgggccttcagagcccgccaaggtgaaatccttggaaaccaaagaaacagaagcagcagaacaaatgttggctgaagaaactggcactgccgcccccgaagcattttctgaagctttcaattatattttacgacatgcttcggggaaagagttgactgaaaaagaaaagcaagaggctcagttctatgcccaaaaactgaaatatccaaagggagcgttgatattcaacggcagcggagaagaagacttcttgcattgtctccctgacagcaaggagatttctgtctgtcgggagatgagcaagagcttcc

SEQ ID NO: 67322 - DNA, 309 bp, Zea mays
ttaccaaatggacgtgaaagtgccttcctcaatggaccaatcaatgaggaggtctatgttgagcaacctcccgactttgaagatagtgagtatcctaaccatgtctataaacactctaaggcgctttatgggctcaagcaagccccaagagcatggtatgaatgcctaagagatttccttaacgctaatggcttcaaagtcggaaaagccgatcctactctctttactaaaacactcaaatgatttgtttgtatgccaaatttatgttgatgatatcatatttgggtctactaacgaatctacatgtga

SEQ ID NO: 67323 - DNA, 344 bp, Zea mays
agctttcaccctttttgtgtccaatccgcccgtgactgatagcaatttgggtcttagagtgcgaccctctgctgaagaagtccgtactttggttgcttcgctcgaggagattcctgatgatgaacggcaggtttattttgaagtgcccctgaaccctagtgatgcagacataaatgacatgcttgatctgctagctgaggattcatctgatgctgctcctgatggtacgttggcagtggtgccccttccagaggttgatacaactttggatgtcccgaaacctgtcagtactcgcccgaggcgccctagccgaactagtcagcctgagccttctgctgatgagg

SEQ ID NO: 67324 - DNA, 312 bp, Zea mays
tctaaagggagaacacgtgataggtttgactaatgtgcatttcgaaaaagatagaccttgtgcagcttgtcaagcaggtaaacaagtgggaggagcgcatcacagcaaaaatgtgatgaccacgtcaagacccctggagttactacatatggacctcttcggacccgtcgcctatctaagcataggaggaagtaagtatggtctagttattgttgatgacttttcccgcttcacttgggtattctttttgcaggataaatctgaaacccaagggaccctcaagcgcttcctaaggagagctcaaaatgagtt

SEQ ID NO: 67325 - DNA, 343 bp, Zea mays
agcttcgcgagagagggaacgaatccctttctcttgagaggtctagtgttgtggagaggaggttggccctgaggtgttttttgttgatgttgggtgagtcgtctgggtgagctttcgaagcttgccttgggaaggccctgggcatctccttttataggtataaggaggtgacccagctgtacatatgggggtgtagctatgcgctaacgtggacgacggagaagtgcttgagccctgttgaagcgtggccagcggcgcggccccaggtcctgacccctgtagcggcgcggtcggctccgccgagttgaagccgagctctgtagcgtcgtggccggcggtacgg

SEQ ID NO: 67326 - DNA, 309 bp, Zea mays
tcgcacctctgaactaactcggctgcatcactcttcgctgttggccaatagaatcctgacctgaagaccttcccgactagtgttctggatgctgcatgtattccacattgcccagcatggacctcccccagaagtcgcttcccagtagatgggagaatgcacttcatgaggacgcctgatgcaccccttctgtacaatgtctccccaatgagtgtgtagtgagccgactgtctggcaatgcgctcggctgaattcttgtcatctggttcctcttcattctttatatacttgatgattggccttctccag

SEQ ID NO: 67327 - DNA, 338 bp, Zea mays
agcttgagataagtatagttagggatgaccatgaactttacataacacaaccttccaaagttagagtggtaggtttcacggaagccagtcacttcgaatgtgagggtctccattcgaaagtttgaggcacaccaaaggtgacgggcagattgatccatcctagcgacattgcttgctttcccggcacaatgccatggaacaggcctcacatttatcgcaagccgtctctaccgatgcccatggcgtcgatggtggcagaatagaggatgttgagcccaattccttcgttatccacaccgagactaaaagggaaatgacatttaccattttctctaaat

SEQ ID NO: 67328 - DNA, 307 bp, Zea mays
ttcttccgcggcatgacgaaggtgatgcttgccgaatgtgttcaaaactcaaaaaatggaagtgagttcaccggaggtgggcgccaatgttggggacttgttcccaaatgcttcgagttaagaacaaggcaacataaaaagtgttaaatattaaagtccttcgtccttcaagacattatatcccttcggatataatgaattccggacaaaggttatgaaagaaaaaaccttcgtaaacacaatggatgataaggaacaattcatatacgaaatacgaaaaataatatagatattatcatcaacttat

SEQ ID NO: 67329 - DNA, 347 bp, Zea mays
agcttgaaaaagagaaggatgacctcaacctttttttttctagataaaggaaacagtggttcaaatgtgtttggatgcgcaaggcgtgcatgaccgtgttgccgtgctaaagttggaattatcagttgcgaagacttatcgcgaaaagctagaaactaatacgcgggctagcatggatcaagcccattcattgtttgttgaggcctattgtgaactgggtgtaacgacgcccttcgataggtctaggaagagctaggcacctgctttcttggctggttacaagaggagcttgcaagtcttccacacattgtgacggggctgatggcctatgcttccctcgttaccta

SEQ ID NO: 67330 - DNA, 126 bp, Zea mays
tttaagcattggaattcataggtttttctctcctttagtgcattcaccagtgcgaatatctcctaaataaactatgtttttgattatgaaccctttttgcaataataagaacactctaacagttgt

SEQ ID NO: 67331 - DNA, 350 bp, Zea mays
agcttgtgccttaaaacaagaggatacaagaagttggagtgcttttgtgatggattttacgaatcacttgaagcgttggtacttttgtgaatgattttgtaaagtgtttgcaaatatgtgcaaaacataataacatgtgtaggttttgtgaatgattttgttgtggtgcttgttgatggtttatgtgatgtggatctatcattgtgcaatactaattaaatttgtatatctatgtgattatgtgtataaaaattggtgatttgtgatgcttttgtatatataacagttgttgaatgctaattaatggtatattatcattattaacgactataactaggggtaactttctg

SEQ ID NO: 67332 - DNA, 316 bp, Zea mays
tcacgctgtgtatagattaccaccctcttaatgaggtgactatcaagaacaagtatcccttgcctcgtattgatgttctttttgaccagttggtcagagccaaagtgttttccaagatagaccttcactccggctaccatcagatcaagatacgggcaagcgatattcctaagacggctttctcaaccagatatgggctatatgaattcttggtgatgtctttcgggctgactaatgcaccagcatatttcatgtatctaatgaattctgttttcatgcccgaattggacaagttcatagtggttttcatcgatga

SEQ ID NO: 67333 - DNA, 342 bp, Zea mays
agcttgagccgaggcattgcctcaccggagaatcattttcaccctcgccggactttggtcttccgccgccgcgcgtggaccgagctaaccagtgagtcttcgtctaattccttgcactcacatcttccctggcatcctgtgaagctctctgaccagttcaattgaactatcgcgccgtgagtaggccggactcctcgccgccgacgagcatctccgcctgcgcacgtggaccggccgactccaaccatccccgacggcgacccgcacatcgatgtgatccccgagacctcccctacgtcctcgaccacctcaccggagcaatctcaccgccggtaagcccct

SEQ ID NO: 67334 - DNA, 314 bp, Zea mays
tatgaagattcttcatcccaacatgggctagactgcggtgccagagccaacccatgttagtcttagcaattaaacatgtggcgagctcagctctatcaaaatctactaagtatagctgaccctttaacacacccttaaatgctattgaatcatcacttcttctaaagacagtgacacctacatcagtaaaaagacagttgtagcccatttgacataattgggaaacagaaagcaagttgtaatctaaagaatctacaagaaaaacattggaaatagaatggtcaggagatatagcaattttacccaatcctttg

SEQ ID NO: 67335 - DNA, 342 bp, Zea mays
agctttcaccctttttgtgtccaatccacccgtgactgatagcaatttgggtcttagagtgcgaccctctgatgaagaagtcagtactttggttgcttcgctcggggagattccagatgatgaacggcaggtttattttgaagtgcctctgaaccctagtgatgccgacataaatgacatgcttgatctgttagctgaggattcatccgatgctgctcctgatggtacgttggcaatggtgcccctcccggaggttgatacaactttggatgtcccgaaacctgtcagtactcgcccgaggcgtcctagccgaaccagtcagcctgagccttctgctgacga

SEQ ID NO: 67336 - DNA, 335 bp, Zea mays
cgtgacctataaaactaagcttaagctctttgacaataaattactgtacccagttttaacatagatgcaagaattaatgtttgagaagttaaactaagtatgaagcagggttaatgcatgaacatgctttctattcctttttatacaagatatgcaaagaaagtatgaaaaaagaagattgaggtacaagttaaaatgaaaggaaattgttttacccttttgtaccttcgcatagagatgctctcttcattgtgctttgtccttagtcttagtcgcttaagacctatactcaagacaatatatggaaatattttgcacaagagagagttctacaa

SEQ ID NO: 67337 - DNA, 348 bp, Zea mays
agcttgtacaagctgataatatcatatggatcactcttgtccacacattattaataccctagttaaccttgacgatatgatgcttgttcgtttcttgtcttttatacgtcttcgtttacgtaagtctcacttattaagcatgcattgcatctatgcatatcatttaggtatatattatgggggttgatggatcaattggtgggttatgaagtcaaaacaaaggatcatatgtaatggtgtgatcaagttcaaaagatggaaatgatcggatcacgtcccaaagatggaagaatactaacatagtataaagatgctttaccgaggcaaggcttggtgcatacccctatt

SEQ ID NO: 67338 - DNA, 317 bp, Zea mays
tcccctgcacgccggtgctacccagatctcggatgttatggcacaagaagattgctccagcaacaaacattattagctccaagtactacatctcttatgttcctgggcccacatgtcggggctcaacactcttgtacatgccccctttagctataaaaggggaggcatgcaacgttacaaagggagggacacacaaacccaacttagactctcagttctcaagcttccacagcaatccaacatatagtggagtagggtgttacgctccggcggcccgaaccactctaaactctcgcgtgttcatgtgcttgatgttc

SEQ ID NO: 67339 - DNA, 350 bp, Zea mays
agctcctaaaaggagaacgcaggataggtttatctaagtgccaattcgaaaaagatagaccttgtgcagcttgtcaagcacggaaacaggtgggaggctctcttcacaccaaatatgtgatgacgacatcaagacccttggagatgctgcatatggacctttttggacccgtcgcctatctgagcataggagggagtaagtatggttcagttattgttgatgatttttcccgcttcacttgggtgttccttttgcaggataagtctgaaacccaagggactctcaaacgcttcctcaggagagctcaaattgagtttgagctcaaagcgaagaagataaggaccgacaac

SEQ ID NO: 67340 - DNA, 322 bp, Zea mays
aaactacgcttcaagaaccaggcacaaactaaagctgggccttcatatcctgccaaggtgaaatccttggaaaccgaagaaacagaaatagcagagccaattttggttgaagaaactggtactgctgcccccgaagcaccctccaaagccctcgattatattgtacgacatgcttcgggaaaaagattatctgaagaagagatttttgaggctaatcactatgcccgagaactgaagtatccaaagggggccttagtattcaatggcacagacgaagatgacttcttatactggctcccagacaacaaagaattatctgtct

SEQ ID NO: 67341 - DNA, 355 bp, Zea mays
agcttgaggagcaaaaatttaattaagtctttttcatctcaagaatcattccttaaccatatcatgcacctcaaagtgagaaaaatgcccaaaccctagaataaccctaattaagccacttaagtgccaaaggggaaattggtaaaaaggctataaaaaacatggaatcatggcttgggccaattataaaagttttaatacattaaataagctacaaaaaatagtaagagagtttgccaaaacagaattttcaaaattttcaaataagcccttccagtggaggccttctatagaaatctgaatttcagatttctgaaattcagcctctcacccaaactcgagcgtgttcaccttg

SEQ ID NO: 67342 - DNA, 331 bp, Zea mays
gaccttaaaactcaagcttgagaactctctcatatcctctggaaaagcttgattattctgtagttctgggtactcattcctaatatcatccaacatctcttccattcggtctacatcctggtccccatctaactcaatagtatggtccacctctccatgctcatgccataccagatagttcggcataaagccatgtttgaaaacatgatacgagagctccacttttttcaaccgaaccaagttccgacattttatacacgttcacctcgctaaacgagcatcaccagcaaatgtgagtgccacaaattcatctgcaactctcacccatgca

SEQ ID NO: 67343 - DNA, 340 bp, Zea mays
agcttgttgttgcacattaggaacgcatcatattatcagacacacagatgatgtagaccatttagattagccagcagcagcggcatacaatcatcaggtgttacatcgctctaacctctttttttttggggggcgaatcgtttacatcattctaactgtgcagacgagggctgcagtagtggtcctgatgatccatcttcctttcgagctagctttgcttcgggtgtttggttcttgctacttctgtaaacatagtgcttaatcctcttccagcccttatcctcttcgatcttagccataatacacatttgccaatcaatatgttggccaataatgggga

SEQ ID NO: 67344 - DNA, 329 bp, Zea mays
gacctattaatactcaacttctaagggagaacacgtgataggtttgactatcgtactattcgaaaaagatagaccttgtgcagcttgtcaagcaggtaaacaagtgggaggagcacatcacagcaagaatgtgatgaccacttcaagacccctggagctgctgcatatggacctcttcggacccgtcgcctatctaagcataagaggaagtaagtatggtctagttattgttgatgacttttcccgcttcacttgggtgttctttttgcaggataagtctgaaacccaagggaccctcaagcgcttcctcaggagaactcaaaatgagt

SEQ ID NO: 67345 - DNA, 336 bp, Zea mays
agcttgtaattagaataatagtattataacagctggctctttgttcttttgctatactcacaaattttaacggctctaaacaggcatcaacagtaaccatggagcaaaacggctcttccattcctctgtttcactcccagttgccggctcccggctctacctcgtcggcaatggatcctccaccgtcggacccgacgttgtttgtccaaccccacgagttcgtcgccaacctccatggtgaactccgcagagcagacagtgggcggctggccgcagtagcaccgggcggaccggcggagtcgttcccgacggcggccacgaactccgtagcggtgg

SEQ ID NO: 67346 - DNA, 309 bp, Zea mays
  unsure (1)..(309): unsure at all n locations
tctttcaagggttntatgtcaagaatatttcacgaggagaaaatgagcatactgatctgctagccaagtcagcggcacaggggctgcctttaccttcggaagtattctttgagacaataagagcaccttcggtggaacttcttgaaagagcagtgctcaatatatctcctgttcatagtgaagattggagaaccgagattatatcttttctccaaggcaactgtctttcagatgacaaagcttataataagagaatataggcaagagctcaaccatatgtaataatagaaggggaattatacaaacacg

SEQ ID NO: 67347 - DNA, 344 bp, Zea mays
agcttgaaaatagtgccgaagcttcctgtagccatcaagacagcatacagtaccttctccaactctgggtaatttttctttgataaactaagaacctcggatacaaaatatattggggcatgcctcttaacttggccttcaaacttctcctgaacaagtgctgcacttaccgctgagtgcaaagctgccacatataataacaaaggagcccctggcgtaggtggagttaatgttgtgagatctatcaaatactgcttcagctcttcgaaagccttctgctggattggtccccattgaaagacttcggctgtcttcagcacttctaagaatggtaagtttctctc

SEQ ID NO: 67348 - DNA, 310 bp, Zea mays
cgaagaaagcagagaaaaactgccacctgtgggaccctcatgcatggttttttccttcactcccttgacgtgcatttgaggaaaactacttgggccccacacatgcatgtgcatgcacccttctgcacgcacaattccctgcatgtgtcgacatccaaaacaaaactccctcatgacgatcttctatggctgcaaactccgtaacccttcatgtgatttaactccgaccaatcacgtgcgccacttcgtaaataatctatgagctattagttattcaatatattctgtgttacgattcagtttcgattca

SEQ ID NO: 67349 - DNA, 345 bp, Zea mays
agcttgaattgcatcaaagatttgtctttttttctggaattctgtttgttagccacatttccttttatctactgatggatatattcaaattttgaatattttaacattaaattttattttgttagttacggaacagaatgatcattgcattctggaaaaaattaacaagcttgtgcataaataaaagtataaaaagggggcttgtacagatttacgtagagagggagctcaatttgaatgctgttaacttttattgtgtagatctccatttcggaagatgaagatccacgtcaagttgatgcagagatcaaatctgctactgttaattatgctctatatgatggc

SEQ ID NO: 67350 - DNA, 308 bp, Zea mays
tagtgcttttgatgctatcttgggtcatgattggcttaagtcccatggtcctatttagtgtgactagaacatgaagatgatgtattttttgatcaatgggagcatgttatgcttaagggtgatggagctatggatatatacgaagatttggaactctttgctcttcactttagaattggttgaaaagtaatgatggatgggcttttgtgtcattatgaaccatcacattccttacgcaacacaaccttctcaaactaatactgatcatattataaatgaatttctagatgtattttttgcctcaaagc

SEQ ID NO: 67351 - DNA, 335 bp, Zea mays
agcttgtggaggaccagatcatcatagcatataagtttctggatgagaagtggtcacccaagttttgttgatgaagcaccagaagaccaatcaagtaagggacccatgtgggagtttgcaagagaaaggtttgtgtgttggcatcgatgcttcttcaataagctagttgccaagcgaaagccagaagcctgaagatgatcttgagtagccagaatcagtgtttgccatcagcaaccggatgctcctcaaaggccggattttgttgaggttccatctcctcgaagagttgcaaagtgaagatatgtagctgaagtaaagctatacccataaccctt

SEQ ID NO: 67352 - DNA, 305 bp, Zea mays
ttagtgttaagtgagagtgatttgttgtgttcttttgagctcttgcacttggattgctttcttctttctcattctttcttgagatctatactcgcttgtaaccgaggcaagagacaccaattgtgtggtggtccttgcggggaagttttgttcccggttgatttgagaagagaaagctcactcggtccgagggaccatttgatagagggaagaggttgaaaaagacccagcctttgtggcctcctcaatggggagtaggtttgcgagaaccgaacctcggtaaaacaaatccgtgtgtcacactc

SEQ ID NO: 67353 - DNA, 349 bp, Zea mays
agcttggattgcggaatctgtagcacaacttgttttattgaaccctcttgaagctattgaatatgcccattctctatcttatccccacctctcaagaagtttttttatggatctcttggatctattaccggacttcttggttaggtgtatagggtagttttattatactatgtttttcgactaatcgataacgacgatattatattagttttctaatccataatattgctatataacccttgacttcttctaatcttgttttctagctattgaattgccttccttaggcaatatctaccttgatatattgaactctttacctctatatttctctccttgataaagcttt

SEQ ID NO: 67354 - DNA, 317 bp, Zea mays
  unsure (1)..(317): unsure at all n locations
ctaaagccatggccagnagcataagccaataatatgctatttgtactaatcctagctacaggtgcataggtttcaccgaaatccaaaccttcaacttgggagtatcccttggccacaagtcgggctttgttccttgtcaccacaccatgctcatcttgcttgttgcggaaaacccatttggttcctacaaacattttggttaggacgtggaactaaatgccatacctcatttctagtgaagttgttgagctcctcttgcatcgacaccacccaatctgaatcttggagtgcttcctctaatctgggaggctcaataa

SEQ ID NO: 67355 - DNA, 353 bp, Zea mays
agcttggtgccaataaagaagcagaaatatctgaagtctttgctgtcaaattgcttgccattgtcaactgtgagcttggacgggactctgaaccggcaaacaatattttgccagaagaatttctgggcagtctttgatgttatcgtggatactgccctcgcctcgatccatttggtaaaatactcgacggcgacgaaggtgaacttgaggttcccttgggccgtgggtaggggcccgacaatgtccaggccccagcgctgaaggggccacgtgtgggcgattagctttgtgaattgcgaagggcgtcccgagcgtggagagaatttctggcaggcttcgcaagaccttgtgac

SEQ ID NO: 67356 - DNA, 316 bp, Zea mays
atcccgagaagtgtgtctttggggttccccgaggctttcttctggggttcattgactccgagccgggcattgatgccaacccggagaagatcgcggccatcaccagcatggggcccatcaaggacttgaaaggcgtacaaaaagtcatgggatgtcttgcgagctctgagccgattcatctaacgcctcggcgaaagaagcttgcctctgtaccaccttttgatgaaagccgaatgcttcacttggtaccccttaggccgaagaagccctttggaacctaaaagcgcttcttaagaacgcccccatcttggtgccc

SEQ ID NO: 67357 - DNA, 338 bp, Zea mays
agcttatccgcaaggaccccgcgaaacttcatatttggatttctcagaaacgcgtcctccactattcgtcaaggctgaagatccccttgaagcagatgaatggattcgggttatcgagcagaagtttgggctcctccgatgcacggagactcagaagcccttatttgcggcgcagcagttgcgaggccctgccagcacctggtggggaaattatgtggctatccagcctgccggccatcaagttacctaggacgagtttaaactggcattttgggagcactacattccagaaggggtgctccatatgaaacaagaagaatttatgaagcttaaacaag

SEQ ID NO: 67358 - DNA, 315 bp, Zea mays
tgaaggccaagtcaaaaagcaagccccaatatactttgtatctgaagttcttagtttatcaaagaaaaattatacagaattggagaaggtgctgtatgctgttttgatggcctccaagaagcttcggcactattttcaagcatacaatatagttgttccttcttcacaaccgttgaaggatattatgagaaatagagaagctactggaagggttggaaaatgggctgcggaactcaacgaattttgtattgattatgtgcatagatcttcgattcagtcccaagcgttggcagacttcattgctaactggacgcc

SEQ ID NO: 67359 - DNA, 338 bp, Zea mays
agcttgagcggtgaccggcttcgtttgaaacccttggaaactggtaatcagcatgtccttcagcttctgccatgacgtgattgttcctggccgaagagaggagtaccaggtttgtgcaacattcttaacagccatgacgaaagacttcgccatgactgcagtattgccaccatacgaagatatggttgcttcgtagctcatcaaaaattgcttcgggtctgagtgtccgtcgtacatgggaagctggggtggcttgtaagacggggggccaaggtgtagcttgcagctctgctgacagaggagaagcatcatcaaaagcaaaatttccatgatggaaa

SEQ ID NO: 67360 - DNA, 314 bp, Zea mays
tcacatctctggactaactcggcagcatcactcttcgctgttggccagtagaaaccagatctgaaagccttcccggccagaggtctagatgctgcatgtgctccacattgcccgtcatggatttcatctaacagtttcttcccaatagccgagtgaatgcacttcatgaggacttttgtgcacctcttctgtacagtatgccccctatgatggtgtaatgggatgactgccttgcgatgcgttccgctgctgccttgtcatccggttcttcttcatttttatgtacctgatgataggctctctccagtcattgg

SEQ ID NO: 67361 - DNA, 344 bp, Zea mays
gcttctactgcttcacctgcatattcatttttattatgtaaccgaccttgatggattgcattgggatatttttaaggaactcttggatttggtatattttttgagcttttagacttttgagatgagcctaatatagagatatttggaacataaatactacaagccgttggagatggtcttaaaaatagttttttgttaaattgtctagaatcacaaccaaacatgtcaagaatatgcttgtgcacggtgtcgacagggccgaccccaaggggtgccgtgggtgcggccccacccgacccaaaaaatagagggccccctagccactagacactagcatttttttg

SEQ ID NO: 67362 - DNA, 314 bp, Zea mays
tgaaggactgcttctgcaggagagcttccgagcgtgatgactctttctgtccacggagtcgctttatccgagcgcaagttacttatcgcaaaaagtgatgagtgaggtatccgtatcccggaagcgtaagaatccctcggctcggtcagccttggctgcttacgtgtacctcgtcgttttcaaagatccgctttcccaagtaatcaagtagcacgaaaaaaatcctgctaaaaagagatcctttttcgaggaaaaattcgacgcagagggggtctccccccttttaacccccgaaggaggggcggtctttgccc

SEQ ID NO: 67363 - DNA, 350 bp, Zea mays
agctttaatacacaaattctccccctttgacatcaaacaccaaaaaccatactcaagcaagaacataggatgatatcgagggacagcagggtgtcaaggaggaaaaacgactatcaaaactcccccttacttattgaacatatgcactatcaacatcttggtaagatacatatatgcaaaaagattaatacttccttttgtacctttaccatgttgtagtgtacttcccatcttgaaagtatttaatttctcgagagcttctccacacttgtgcctgattctttctcctaactttttcttggtgctaaaacaccaaacttagaacaagttatagtattgggcacaagaag

SEQ ID NO: 67364 - DNA, 313 bp, Zea mays
  unsure (1)..(313): unsure at all n locations
tctaacgggagaacacattgtaggattaacaattgtttattntgagaaagacaggatttgtagcgcatgccaagctgggaagcaagttggtgttcatcatccacacaagaacatcatgacgactgacaggccactggagctcctacacatggatctattcggctcgattgcttacataaacatcggcgggagtaagtactgtctagttattgtggatgattattctcgcttcacttgggtgttcttcttgcaggaaaaatcttaaacccaagagaccttaaagggattcttgagacgagctcaaaatgatttc

SEQ ID NO: 67365 - DNA, 350 bp, Zea mays
agcttgccaattcttatcaaagcagcagcatttaccagcacagcaactgcaaaccataccagtgacatggccacttgcgtgctggggactagacatgattggacccttcaaaaaagctcagggaggttatactcacgtgttggttgccatcgacaaattcactaaatggatagagtacaaacctattgcttctctgacttctctgacgcatattcaagtttggaataccaaatagcatcataactgacctggggtccaatttcactagctctaaattctttgatttctgtgaacaacggagcatccagatcaaatatgcgtcagtagcacacccaagagctaacggacag

SEQ ID NO: 67366 - DNA, 312 bp, Zea mays
tttcagaaagtcctagtttactatttttggatgcatattttgtgagttacgaacaaaacatttgactactgtgctgctgtctagaaaaaatctgcgcgtggtaaattgattgtttggggtcattcttgtttggcttgatagaattagttaaattttgattattgaagactggttgaatatagtggtgatagtaatccatgctatgctttagtagtattatattctttattaatgaccggttaaataccttagataaatatttattagtgcaatataattcatcttcatgtgggtatatatattccttgttga

SEQ ID NO: 67367 - DNA, 340 bp, Zea mays
agcttctttcatcctcctcatcctcatttgtgctttcactatcattttcattagccacacaacatatgtgggaattgaaatgggaagacaaaccttttggagaggtggattcatcgtttggtctccaacgttcattttcttattcttcctttaaagggttagattcacaaagactaaatgaagtagaagcatcatatgaactaacatgtttggactcatcaaatctatttttaattctagtccaaatatcatgcgcatcatgaataggttcatcatatctaattatgaaggcatgataatcttctttgctaagaaaattacctaagatgtcaaaagcaag

SEQ ID NO: 67368 - DNA, 310 bp, Zea mays
tcgggtctctggctttatagctcttgtcaacatgacctgaaataacttgggaatcagttttaagaattacccttctgattcccattgcctttaacttccgaagacccaagagcaaagcttcgtactcagcaatattatttgtgcaactaaaatcaagtcttgccgcataacaagttttaactttggaaggtgaaatcaacacagcagccgctcctgctccaaaggttccccaagacccatcgcaaaacattgtccatgcttcggcgtctttatttgtttcttcctcctgagcccctggcgtccagtcagc

SEQ ID NO: 67369 - DNA, 338 bp, Zea mays
agcttcgagtttagttctgatatttttgcttcagcttccgccagtaagccttcggctgcctggagctcaaagttctttttctcaaaagcatctgattgctcttttattttgttttccaaatttccgattataatttcatgctttttatcttcaagatcttgctgcatttgcaaggctttgctcaacaacatactctacacaaatacaaccttcgtcagtcatgtttttattagaagcaataaaggttaagaaacaagtcattcaccttgaagttggaataaaataaactaccaacgacatgttgtcgtcggtagcggctgatgtctgactccagcttc

SEQ ID NO: 67370 - DNA, 312 bp, Zea mays
ctgtgaagattcttcatcccaacgtgggctagtgggcgaagccagagccaacccatgttagtcttagcaattaagcatgtgtcgagttcagctctattaaaatcaactaagtatagctgaccctctaacactcccttaaatgttattgaatcatcacttcttctaatgacagtaacacctacgttagtaaatagacaaatgtagcccatattgcataattgagaaatagaaagcaaattgtaatctaagaaatctacaagaaaaacattggaaatagaatggtcaggtgatatagcaattttacccagtcct

SEQ ID NO: 67371 - DNA, 347 bp, Zea mays
agcttgtgaaggttcttcatccccacatgtgctaagcggcgatgccacagccagcccatgctagtcttagctattaagcatgcatctagaccggcctcttcttttgcaaaatcaactaaataaagtttgccgtctaatatgcccttaaaagctagtgaaccatcacttcttctaaagacagacacatctacatttgtaaatagacagttatatcccatattgcataattgacttacagatagtaaattatatcccagagacttaactaaaaacacattagaaattgagtgctcatttgagattgcaattttacctaacccttttaccttgccttgattcccatcacc

SEQ ID NO: 67372 - DNA, 312 bp, Zea mays
  unsure (1)..(312): unsure at all n locations
tcttgctgattntgatgatctcatggcatcatatgaatcttagttcagtgcttacaagttgtggttggatgaggatgctcaagccagttatattcttgctgatagtgtggaggatcaatttgttgcaaggattgtccattttcatcagtctcgcaagatgtagtcttctcttcatgatcactatgagcataattgtcactctgcttaccttgctgctattcgtcaggtggattacaaaatggatgagctccacagccaaatgtctgtagtttggcatcattgtgatgctcttagtccgcagttgtccctcgg

SEQ ID NO: 67373 - DNA, 348 bp, Zea mays
agcttgaagccatggtaagtagcatatgctattaatatatgaattgactcaagcctagctacgggtgcataggtttcaccaaaatccaaaccttcgacttgggagtatcccttggccacaagtcgagctttgttccttgtcaccacaccatgctcatcttgctatttgcggaagacccatttggttcctacaacattttgattaggacgtggaactaaataccatacctcattcctagtgaagttgttgagctcctcttgcatcgccaccacccaatccgaatcttgtagtgcttcctctaccctgtgtggctcaatagaggaaacaaatgagtaattgtcacacccg

SEQ ID NO: 67374 - DNA, 336 bp, Zea mays
agctaggatgttcttacgaagcatggatattctcacgaagcataaatattcttctttacgaagcatgaaaagaagggaaggtgttttttcgccgaaggctcaaaaacggtatgtatataaaagtttcatgcatcgcaaagaagtaaattgcaaaatagtttacatattagattcaaaactgtacacctcaaatattacagacttagttcagcaaatgttacattaatcgcctaaaaacgtttttacaataactactattcttccttcagaaccttctccgcaacttcgttaagcaatttgttaacgacttcgtcaacaacagattcagctatatta

SEQ ID NO: 67375 - DNA, 304 bp, Zea mays
tcaaccgaggtacttcgggccctatcgcgtctcaaatctcatcaacgacgtcgagttctcctagaacttcctcctcgcaccaagctccatgacgtttttcatgttggcctcttgaagaaatgggtgggctcccctccagcagctccgcccccacttcccaacattcatcatgtcgtggcgcctgaaccagaccaggtcgtgcgcgcctgcatggctcgaggcgtccggcaagcgctcgtccactagaaggtctaatctactgcatcggcgacgtgggaagacctggactccttctgcaacaagt

SEQ ID NO: 67376 - DNA, 354 bp, Zea mays
agcttgtgaaggttcttcatccccacatgatctttacggcgatgccacagccagcccatgctagtcttagcgattaagcatgcatctagaccggcctcctcttttgcaaaatcaactaaatagagtttgtcgtctaatacacccttaaaagctaatgaaccatcacttcttctaaagacagacacatctacatttgtgaataaacaattatatcccatattgcataattgactaacggataacaaattatatccaagtgactcaactaaaaacacattagaaatagagtgctcggatgaaatagcaatctttcctaaccctttcaccttgccttggttcccatcactgaatatg

SEQ ID NO: 67377 - DNA, 148 bp, Zea mays
acaatactcagcttttgggaattgggagaggatttgatcacttgggtgtgtcttgttattgtatgcctagctcttgtaactggttggaaatcgtaaaactctcatgccctgaatggtgggtggtttcacccttcacccccttcgcacc

SEQ ID NO: 67378 - DNA, 352 bp, Zea mays
agcttatgaagattcttcatcccaatatgggctattcggcggtgccatagccaacccatgttagtcttagcaattaagcaagtgtcgagttcagctctaccaaaatctaccaagtatagctgaccctctaacactcccttaaatgctattgaatcatcacttcttctaaagacagtgacacctacatcagtgaatagacagttgtagcccatttgacataattgagatacagaaagcaaattgtaatctaaagaatctacaagaaaaacattggaaatagaatggtcaggagatatagcaattttacccaatcctttgaccaaaccttgatttccatccccgaatgtgatag

SEQ ID NO: 67379 - DNA, 334 bp, Zea mays
gacctataaaactaagcttaataaaccagcagggtctgcttcgtcacgttttagtcagcatggtcaaagttccctccaggccccctatgttgcaagcaaccaacctccagccaatgcttgttggcactgtggagaccccagtcactacaagaataattgccctcagttgaaaacattcgtgcctacctactccaactcgatgaatggccccaagagtgccccagcacccgcctccaaggcaccctcctccaacaaccagctaagcaagacccagtatcatggcaggacacgagtaaaccacgtcgacgctcaagaggctcaacaagcccccgga

SEQ ID NO: 67380 - DNA, 341 bp, Zea mays
agcttcgcgagagagggaacgggtcccaggtctcttgataagtctagcgttgcggagtggagttcgatgtttgagtgagttcatctctatcgtccttgacgcctccgcctcttctttttctttttttccctctgagaaggccctggcatccccttttatagatacaaggggatggtccagctgtacatatgtgtaaacctagtatagagttcccatggcatatcattgagaatattaaaggaaccctttgggttgtgtgatttaatcataagacatgttttcttgcaaataaatactaaatacaaacatatgaactcgtgcatcatgctggacttcttttg

SEQ ID NO: 67381 - DNA, 314 bp, Zea mays
tctaaagggataacacattttgggacttacaatgttattttgagaaagacaggatttgtagcgcatgtcaggccgggaaacaagttggtgttcatcatccacacaaaaacataatgaaggccgacaagccgcttgagccactccacatggacctatttccgccccattgcttacataaacatcgggggggagtaaagtattggcttgtaattgtggatgattattctcgcttcacgtgggtgttctttttgcaggaaaaatcacaaacccaagagactttaaagggattcttgagacgggctcaaaatgagttc

SEQ ID NO: 67382 - DNA, 343 bp, Zea mays
agcttgacaatgaggagatggcgctcgtcatctatagcttccgccaaatcctcaaacaaaggagggggaaagactacaagttccgctccaagaaggtttgctacaaatgtggtaagcccggtcattttattgctaaatgtcctatatctagtgacagtgaccgaagtgacgacaagaagggaagacgaaaggaaaagaagaggtattacaagaagaagggcggcgatgcccatgtttgtcgcgagtgggactccgacgagagctcaagcgactcctccgacgacgaggacgccgccaacatcgccgtcaccaagggactcctcttccccaacgtcggccacaa

SEQ ID NO: 67383 - DNA, 319 bp, Zea mays
tttgaacgtactaagtacatgccgagaaaaaggaaatttgtttacctagtacctgagtgaagccgggcgcggactttatcccttatgcgaactgagactgggtctcccatgctatctatggggggtacaagtgcggtcactggacgacggcagcccgggtcagtggaaccattgtatgccaaagcggggaaggcctggacgcgaacgggggaattcatgggggatgggatttaatgtgtgggggcagaagaccctgacatgccctgtggttaagtttaccttgcaagggtaaaactcgatttgaaatcgtctttctttt

SEQ ID NO: 67384 - DNA, 352 bp, Zea mays
agctttgaaactcatggatacacaatcaatataatcaaatttggcttttaagatataggcatccaatcagccatcagctgtcgtctatcaaatgaagttgtctcccaaagaacccaaagcaagagaatcttgctattactgcaaaaatgaaggacatattattcaccaatgctccaagaagtgtctagaccaactagagaagaagattgagaagcaagacctatgcaatagttcagaagacccaccatttataagtatgatgatgatggtcgcttgattagtatacattatggagaaaagaagtagggaagttccttaagtttggaggagttcattgagaactaagaacctc

SEQ ID NO: 67385 - DNA, 315 bp, Zea mays
taatggttcaaaatcaagaacttcaagtgcaacttgattaatgcaagaacttcaccacttcacctttagtggtagattctaaagatagcttctcaaactctaacacatgtaaacattgttcaaaatatcatgcttcttactatttgactaaccatgcaaggaagaacagctcaaaggtagaggtcaagcaaatatttaagaaatggtctagcaatgatgagtcaaagaaagttgaacccaagtacaaacctttgaaacccaacaaagggaaaaaggggcttgggtacagcacatacaaagtgaaccctatcatag

SEQ ID NO: 67386 - DNA, 349 bp, Zea mays
agcttgcttctttgccgagtgccattgtttttatactcggcaaagaggctttaccggtgcccaggtgtgccttctttggagtgctatgaccttgacactctgcaaagtacctctttgccgagtcttacactctacaaagtgaccagaataccccgttttaatttgtttttgctatcccatccaaacaaacaaaagatatattatataatcatcacatatacatcacagatatcacataatcttcacatacataatagagaccacatatataacaaaaaccacaaatctcacaagtttttcacaaacatgtctatgttcataccaagtttcaccaatataagtattacca

SEQ ID NO: 67387 - DNA, 312 bp, Zea mays
taaagccatggtatctagcataggcaagtaatattcttattgactcaagcctagctacagatgcataagtttcatcaaaacccaaacattcgacttgtgaataacctttggccacaagtcgggctttgtttcttgtcaccacaccatgctcatcttgcttgttgcggaatacccacttggtacctacaacattttgattaggacatggaactaaatgtcatacctcattccttgtgaagttgttgagctcctcttgcattgccagcactcaatccggatcttttagtgcatcctccaccctatatggctcaa

SEQ ID NO: 67388 - DNA, 351 bp, Zea mays
agcttgattaagagttagaacaatgaaatctaatgagtagagaggagagctcttgtgaagcacaatagacacaataaggacaagcacaagagacacgaggatttatcccgtggttcggccaagtacaaaacttgcctactccacgttgtggcgtcccaacggacgagagttgcactcaactcctctcaagtgatccaatgatcaacttgaataccaggtgttcttctttacttttctctttcccgtttgcgaggaatctccacaacttggagtctctcacccttacaataagaatcacaataaagcactagagtaagggagggaagcaacacactcaaatccacagcaaat

SEQ ID NO: 67389 - DNA, 310 bp, Zea mays
tgtcgtgggaccgtccgcatccgtacgccattcgccatccgtggagcctcaccggaatccgcgtccaacgctgagcctcgtccgcaccgcgaccgaatccctccatttaccacaaggttgaagacaacccgaatatttttataactccaaaatcatgttttaaattaattcatgaatttggtaattattcattgtgatttggaattcatatatgtaaacgattgattttaagtgtttgtgcgatgaattagtgaatggtttttagacgtgatattggtttacgatttctttaaaatttgggattggaaag

SEQ ID NO: 67390 - DNA, 338 bp, Zea mays
agcttcgtcagctgagagaaaattactctgttatgtaagaactgatctcagttctccaatcttcactatagacaggggatatgttgaggactgctctttcaagaagctcgaccgaaggtgcttttattgtttcgaaaaatacttccgaaggtaagggcagcccctgtgctgctgacttggctaataaatgagcatattcattttctccaggaggaatatttttaacagggaatccttcgaaggaagcctcaatccttcggactgtatctaaatatttttcaagcttcggatctcttgctttgtagctcttgtcaatatggccagaaataacttgggaa

SEQ ID NO: 67391 - DNA, 311 bp, Zea mays
tgtgcgttgttggaacttgctctcctgtgcattattatccaacgggggagtgaaagtaatgcgaacaatgttttaactcgagatggcgattgctctgttaatccagcctctcaagggcactgtatgggtgtatttataggtgcctgagtgcccaccgtctcgatgtaaggacacatgtacccttcagcacctggactatccccggaatattcccataaaggaggattacagactgtcattacagaaaaaccattacaaatcgggcccgtaacacacttctctgtgcggagcctgttacaatgggctgaatc

SEQ ID NO: 67392 - DNA, 332 bp, Zea mays
agcttgtgaacagtacaagtacagacgatagtaggctgcttcggctgatcagccgaagcccatgcttctatgtgaagacatagcagagcagaaggtactgctggagtctcaactatctgaagagcaggagaaaactttgataaggtttttattcaacaacaaagatgtttttgcttggtcggccaatgatctctgtggtgtcaacagagacgtcattgaacattcactcaatgtcgacccatccttcaggccaagaaagcaaaggcttcggaaaatgtctgatgataaagccgaaggtgctcggaatgaagtaaaaaggcttctcagtcctg

SEQ ID NO: 67393 - DNA, 328 bp, Zea mays
  unsure (1)..(328): unsure at all n locations
ggaccttanaaactcagcttcttggcaaagatgtttgtttctaactagttgtgcgctctggttaattcagnncatgccagtatggttggcttcccattgctagcagattattaatgtcgattatgttctcttatcatgaaatctgattatactttgttgcttcctcgcttatgcaattttcaaaggagatgctggtccaaattttatatacgaatgttacaggtgtaattgaaagggaaatgtgcccttgggccatttctaagtattttggtgattgagtgccaacacaagtgcttaaatgtaaatctatgcccatgaatgaacaagt

SEQ ID NO: 67394 - DNA, 346 bp, Zea mays
agcttgacaacgaggaaatggcgctcgtcatctttagcttccgccaaatcctcaagcaaaggagggggaaagattacaagccccgctccaagaaggtttgctacaagtgtggtaagcccggtcactttatagcaaaatgtccactatctagtgacagtgacaggggcgacgacaaaaaggggagaagaaaggagaagaagaggtactacaagaagaagggcgacgatgcccatgtttgtcgcgagtgggactccgacgaaagctctagcgactcctccgacgacgaggacgccgccaacatcgccatcaccaagggacttctcttccccaacgtcggccacaagtg

SEQ ID NO: 67395 - DNA, 330 bp, Zea mays
ggacctataaaactaagcttctaaagggagaacacgtgataggtttgactaacgtgcatttctaaaaagatagaccttgtgcagcttgtcaagcaggtaaacaagtgggaggagcacatcacagcaagaacgtgatgaccacttcaagacccctggagctgctgcatatggacctctttggacctgtcgcctatctgagcataggaggaagtaagtatggcttagttattgttgatgacttttcccgcttcacttgggtgttctttttgcaggaaaaatccgaaacccaagggactctcaaacgcttcctcaggagagctcaaaatgagt

SEQ ID NO: 67396 - DNA, 347 bp, Zea mays
agcttgatggttagaatgacatcattctctttcaaatctttcatctcgaaattgctcgatagaagatttttaacttcctcaatcacattgagatttgatccaaagatcaaaatgtcatcaacgtaaagacacagcataacagactcacccccaccataccgatagtatacacacgtgtcagattcatttacaacaaagccagctgttgtaagagtattatcaaacttttcatgccattgcttaggtgcttgttttaggccatacaatgattttatcaacctgcacaccttgttctcttgaccatccgcaatgaacccttctggctgatccaaatagatctcctcatc

SEQ ID NO: 67397 - DNA, 307 bp, Zea mays
  unsure (1)..(307): unsure at all n locations
nttcctaatccattcattggggaatccatgggaaacatataggtggggaggaaaggacctttagaacagaggtgttgaggttgagctcttggaggatggcctacctgagggcggcgatggtggccatgtcgtcatcatgagagcacctataggggggtgaataggtgatcctgtaacacttaaaatttaggccacaaaaacttggttaagtgttagcacaataaccggcaagtggctatagaggaacaaaacaccataaccaacaagatcaattccagagatggcacagtggttaaccctttggttc

SEQ ID NO: 67398 - DNA, 331 bp, Zea mays
agcttttatatttcttcgacagattgtgaataggattaagaaagagtgccctcatgtaccccttatgttgtatataaatggaaatggaggtttacttgagcgcatgaaggacacaagagttgatgttattggccttgactggacagtggacatggctgatggaaggaagcgccttggtaatggaattagtgtacaagggaatgtggatccagcatttctgttctcaccattaccagtactgattgatgaaattcataggttagttaagactaaaaaaatcatttaatttatgttattttgggtttttggctaatgctcatgtgcaattcat

SEQ ID NO: 67399 - DNA, 306 bp, Zea mays
tatataaatctaatttcaaaatggttcgtacaacatttattcacgggaacggagataaggagctgtaagtattctcagactcattattctaattccacgtgaatgggagtggattagggtggactttgacttctatagatttaaatcggctcaataccatccagtatagaactaatttacaccataaatcatcttaatctatgtggattgaggtgaataagagtcttaatctatgtggatcgagtgaacgtatagaattaatttacaccataaattatcttaatctatgtggattgagatgaataa

SEQ ID NO: 67400 - DNA, 352 bp, Zea mays
agcttctaaagggagaacacgtaataggtctaacaaatgttactttcgaaaaagatagaccttgtgcagcttgtcaagcaggtaaataggtgggaagctctcatcataccaaaaatgtgatgaccacatcaagacctctggagttgcttcatatggatctcttcggacacgtcgcctatctaagcataggaggaagtaagtatggtcttgttatagttgatgatttttcccgcttcacttgggtattctttttgcaggataagtctgaaacccaagggactctcaagcgcttcctaaggagagctcaaaatgagtttgagcttaaggtgaagaagataaggagcgacaacgg

SEQ ID NO: 67401 - DNA, 316 bp, Zea mays
tctaaagggagaacacgtgataggttggactaacgttcaattctaaaaagatagaccttgtgcagcttgtcaagcaggtaaacaagtgggaggagcacatcacagcaagaatgtgatgaccacttcaagacctctggagctgctgcatatggatctcttcggacccgtcgcctatctgagcataggagggaataagtatgggctagttattgtagatgatttttcccgcttcacttgggtgttctttttacaggataaatctgaaacccaagggaccctcaagcgcttcctcaagagagctcaaaatgagtttgag

SEQ ID NO: 67402 - DNA, 353 bp, Zea mays
agcttaacgtactctaatgtcgcttcctgtttttttaaaagttaaaccaaagtaaagcaagatgcatacgaacacgcaagttccagagtcagggcaaaaacaaacttgttagagtatatatatcgtactttagccaaagagtcattgtagcgtgccatgtatccagggaagagatttagcctgctctttgagatgtcagcgttagcgtcaagatacttcccagtgagaaccccaccagccaacggggagtatgcaagcagtccaacgttgcagttattcgggtggcaaacttcaacaagatcaactgtgatgaaacaaaatatggttaaaagccagctgttggccgcattggt

SEQ ID NO: 67403 - DNA, 326 bp, Zea mays
ttaaaactaagcttacctaatgttccctaggatcggtacacgtgatgcttcatttttagggcaactggtcctgatgaaaggcaacttatatgttctctctcaagttcacaccattgttgtaaagaaggcacctgatgggttagaaaggacaagttattaacttaatatgctatgacaaattaagatgttttaccacttaaatgcagaagtcttcaatttataaccttccagaaaacattgatgtcaattttatggcatgaaactagccggtaaaagtaagttttagtttagatttaacttttactttacagtcagtgatagatgca

SEQ ID NO: 67404 - DNA, 340 bp, Zea mays
agcttgtgaagattcttcatcccaacatgggtttttctgcggagccagagccaacccatgttagtcttaccaattaagcatgtgtcgagttcagctctatcaaaatctactaagaatagctgaccctctaacacacccttaaatgctattgaatcatcacttcttctaaagacagtgacacctgcatcagtaaatagacagttggagcccattttgcataactgagatacagaaagctaattgtaatctaatgaatctacaagaaaaacattggaaatggagtggtcaggtgatatagcaatttacccaatcctttgaccaacccttgatttccatcccc

SEQ ID NO: 67405 - DNA, 311 bp, Zea mays
tgacgacgaagattgtcgtcagtcttccgctgacgccttgccatctcatgcacatcagtagaaatattccggctcatagagaaaaatgccgcaatcccatgggccaagcgggcacccatccctcggccacgaccacgaccacgaccacgaccacgtggcgtgggaaatccacggccaggggagggacgcgaggcaccggtagccgcagaaggaccagccgaggtttgtgcacgggagctggaaagggcttttcttaagcgccctgctggatttgttgggatcaatccagaaaggggtataagattgatgtc

SEQ ID NO: 67406 - DNA, 342 bp, Zea mays
agcttgaaaaatacctagacacagtccgaatgttctaatcttccttcgaaggattctctgttaagaatatccctcgagggcaaaatgaacatgctgatttgttagccaggtctgcagcacaggggctgccgctaccttcggatgtattcttagaaacaataaaggcaccttcggtggagttacttgaaagagcagttcttactatttcccctgtgtacagtgaagattggagaactgaaataatttcttaccttcagggcaacttcctatcagatgacgaagcttataataaaagaatagaggcaagagctcgtccggatatcattatataaggggagttat

SEQ ID NO: 67407 - DNA, 329 bp, Zea mays
gaccttaaaactaagctttcctcttcggtagcttcgcttcagcaattgctttcttgtcttgagacatcttatctccggaactgacgaaaatatgtccttaaatccgaagctcggaaaacttaagaaacaaagcaactgttggaaagcaagagctaagaaatcaagcaaagcaaagtaagcgtaccaaatatgctcggggtgagttcttatttatacgcccagcgcactccaagttggagggccaaggttgtcattgactgttgctattctaacaaagggaaggtgttttttcggaccttcggcttaaggccttcgtccatatcgcaatc

SEQ ID NO: 67408 - DNA, 346 bp, Zea mays
agctttaatgcctctccaaaccttgcactatctttagtcttgtacaattggtggtgggtctatgaaattagggtgccaccagttttccttgactagataggtttgtatcggatacaaactgcagaaagggttggttaacttaaacaaagtcagcttaatggttaaggactttgaggcataaggttgggagccgagacatatagatgtcacccaacaacaggagtcatatatatgatatgattagcaaggagttgcttaccgatctaccttgtcttctagcggtgatgctaaagctcactagtagacttgttagttgtgggttctgaatcactaagtatcaatcgag

SEQ ID NO: 67409 - DNA, 330 bp, Zea mays
gaccttaaaactaagctatgacgtcatcgtaagcatcgcttccatcctatcgtagctctcttcatgtgactgaactttcggtacaatacgaggaggtgggtcctcatcgtggtgcacccacacctcatagatatgcatataaccggtcttacaaaaatctatcgacataggccttctatcaagaaaataaatgttccgacacttgctacaagggcgactaagatcggttccagtctctgaacgagcaaaagcatgcttgagaaacgcgtcagtcttggcaacctactcacttgatagagcactttttttcttccaaactttatacatcca

SEQ ID NO: 67410 - DNA, 347 bp, Zea mays
agcttcggtatccttgcttgtcccttttttttgtagcccctgacgtccagttagcgatgaagtctactaacgcctgggattgaattgaagatctgtgcacgtagtaaatggtgaattcattaagctccgcggcccactttccaacccttccagtagcttctctgttcctcataatatccttcagaggctgtgacgagggaacaattatatggtaagcttgaaaataatgccgaagcttcctggaggccattaatacaacatacaacactttctccaattctatgtaatttttctttgataagcttaatacttcgaagacaaaatatactgggacttgctttttaatt

SEQ ID NO: 67411 - DNA, 312 bp, Zea mays
taacaaacactactgaccactgctttattctcgcatataatacccaccatactttctgaaagggaaacgtgcccttgggccatttctatatcgttttggtgattaaatgcacaacacattatatttgaactaacatgatgttgagcaaaaaaggcagagctcggaagaagacttagtgaaaatctatatggttcaagcaaaaatgtatgttctggacactgagtcaattgatttgtgtgctaatcatatttgtctaagtgttagggaggactcatctaagtcaagtcccaaagaaataaaagaagacaaaga

SEQ ID NO: 67412 - DNA, 346 bp, Zea mays
agcttgtaagttataacaataaaagatttttttatgaacatacaagaatagaagtgtataacatgaggtatataactgtagcatacattgtaaaattaggaaataaatatttatcagtagcattcatgtcaatgttgttctcttcctcctcttcttctaacgtggcctccattttgtacacaaattcatactcatccatgaattactagtggcgtactacatgttggtttaggcatgcgactactaagcaaaagtagtgcaggcatgcggctactaagcaaaaataattagtgctacgagctagtagcgcgtactgcagcctgtaggctaaaatctcacacaaatc

SEQ ID NO: 67413 - DNA, 325 bp, Zea mays
ccttgaaactccccttatactcggctgcgttgttagaggccgggaatagcttctggagagcatacttgaggtgctcgcctccaggtgcagtgaagagaatacctgctcctgctccctgcagcttcagcgagccatcaaaatacattcgccatacttctgccgtttctggattgtctggaacttgctgttctgtccactctgatacgaaatcaaccaatgcttgagtcttgatggcagtgcgaggtcggaactcgatatcatgggatcccaactcgcaagcccacttggctattcggccaatggcttccttgttgtgaaaaatgtc

SEQ ID NO: 67414 - DNA, 338 bp, Zea mays
agctttatctcctttgcattttgcccctaatttcctagcaatcactttcttatcctttctacaaattgtaaaggaagcattgcaagcatgataaattgtagaaggttcattacttgctttcctaggtgcatgaacaacatttctcctaggcatatgatgaataacatttttcctaggcatatcatgcacaatagaagaactagaggcaggcatagcatatgaatcataagaataattcctataagcatttctagagaattttctatcactataaatgaaagcatgattcttttgaacactattagccatagaggccttccctttctccttggcggaga

SEQ ID NO: 67415 - DNA, 307 bp, Zea mays
taagagtagctggccttgttgtcggttgcatatgctgctgctgctgctgtgtcacttgcgccatattttcttgatgcagctgatgccgctttccttgaattaacttgttttcattctgttcctgctgctgctggttgtattgtgcttcatggtgctcctgctcctcctccttgcgcttcctgttcctccttttagattccgttggcggatgctgtgaaacccatgttgagagattttctgacctttgtttcttttcatatccactcatcaaatatttaatttctgccatgatagcactgcgttgctt

SEQ ID NO: 67416 - DNA, 338 bp, Zea mays
tgcttgcaagatcagctctgatatgttattttttttgcaaatgatagaaaacatgcgcagaggatgaaggcgtgctcaacatgagcaggcattcccgtaggatgaggcaccctgttgggggcttgttctcaactgctatgaattaagaacaaggcatcataaagtgttaaatgtcaatgtccttcgtccatggaacattattcccttgaggataatgggccttggacgaaggctgataagagcataattacgaagtttaaatctttttaataaaatttctgttaaaattataaggtgacataaaaagattttaaagggattaatacatcaaagacaaa

SEQ ID NO: 67417 - DNA, 304 bp, Zea mays
tctctcttttgtatttgtacagttcacaaacttcgacttcatctatattctgaattgcttttgagtctgtccaatttccttcagctttcctggcagcttcctgactcccatgaacagcaatgggcccttgttccgaaagtatcttcatgcatagatatgctggatgaagtattgcttctaaagcattaagtgtcccacgaccaatgattgcattgtaaggatattccatgttaacaatgtcaaacacaacctgttcaatccttgtgttgtgaacaaagaaccaggttaccggcattgtgatttt

SEQ ID NO: 67418 - DNA, 346 bp, Zea mays
agcttcagcagcctcttcagctcgggatggtgctccacttcgggagtcttgagttcatgtcccgcgacggcagctacgacatggtactcctcccctcgcagcagacaacaatgacggtcgtcggctcgcccggcggaggcaaactcgatgacggcatctccccgcggcagaagaggaacatccgggtttgccccgccaccctcctcgctggaggaggagaagatggagcaaccgtggctagggcagaggcggcacctcgtcggttgtcggaccagagcgagccgacgacgccggcacccctacgggggacatgtcgggtgttgtcctcgcacctgagacaacgacg

SEQ ID NO: 67419 - DNA, 307 bp, Zea mays
tgcacttgtccattcacttatctcttgctttgcctttgcaagttcaaagttttcattagcttcggcaagctttttccgaagatctttgacttcggctgtatgcactgcggactgtgaaaaaagtttggcttcgctgacctttactctgtctattaaggaaagtagaactttatccttttctagggattcattccttagtttgataacctctgtctgaaggttcccaagggctatttggcagctttcgtcttcagcaatcttttgtgcccttaaagcattgctcaagattaagccctacaaaaaaggg

SEQ ID NO: 67420 - DNA, 304 bp, Zea mays
agccccattcaggagagggaggtttgtttttttactcagcacgaacacccaaaatcccagatgggacggtgttagaagggatcaataaaccaatgatattatttgtcgcgctacaacaatctcttgcttcaggcaatgcgccgtccaacttcaggagcaatggcacctttcctgaggagttccctctgtcacataaagacctgactgtctcatgacttcagaaattggagctgtatcgggggcctagggctcctcttcttgaccagtcacccttgcagaagaacgcactctggccatctgatgg

SEQ ID NO: 67421 - DNA, 305 bp, Zea mays
tctaaagggagaacacattgtaggactaacaaatgttcattttgagaaagacaggatttgtagcacatgccaagcaggaaagcaagttggcactcatcatccgcataagaacataatgacgaccgacaggccactggagctcctgcacatggatctattcggcccgatcgcttacataagcatcggcgggagtaagtactgtctagttattgtggatgattattctcgcttcacttgggtattctttttacaggaaaaatctcaaacccaaaaaaccttaaagggattcttgagacgggctcaaa

SEQ ID NO: 67422 - DNA, 351 bp, Zea mays
agctttgggcacgcatctgaatttcagttctttttattattcgcagacagtatggccataccgaaaggaccaatcaaattcttgaagacatgttgagagcctgtgcgttgcaagatcagtccggatgggataagagattgccttatgcggagttttcctataacaacagttaccaggccagtttgaagatgtcaccatttcaggcgctctatggaaggaggtgcagaactccgttgcaatgggatcagcctggagagaatcaagtgtttggaccacacattttgcttgaagccgaatagaacattaagatggtccgagagaatctgaagatagcacattcgaggcagtgaa

SEQ ID NO: 67423 - DNA, 312 bp, Zea mays
ggtcgacgtttgttagatgtcgaagaggatgatagactctatttccaccacaatcaccaatagtgccaccatgtgcgcgattgtggttgttgtttccacgcccttgactagcagcattagcagaggcttggtgacctccatgaagtaaatccatcctggcgtcgaagctgagaatctatcaagtcatgccataatgtacgagatgagttcattatcatcaacgattttctttgtagatgccatctcatctgtaagagatttcatcttggcaatatattaagctattatgatattacctttcttgtagttgga

SEQ ID NO: 67424 - DNA, 346 bp, Zea mays
  unsure (1)..(346): unsure at all n locations
agcttgcaagaactgttctgatgtgtgattgttttcttcagatgncanaaaacaggcacagaggaggaaggcgtgctcattatgagcaggcacccccgcaggatgaggcaccccgttagctgttgcccccaccgcccctaatgaccatcgagcagatgttcctaatgcagactcaggcagtttaagccatcggtcagactctggccgccattcagcagcagtagcagtagccaccaccttatccttaaatgcctcagatgcccagggacaagcatgttgaattcatgagaggtcatcccccagcattcgctcactcttctgaccccatggatgctgaagattggct

SEQ ID NO: 67425 - DNA, 311 bp, Zea mays
  unsure (1)..(311): unsure at all n locations
gggntgcaccgcgaggccagcccaggacgggggtcgatcgttcgcggtgggtggactcagctgggccgcgccacgacgccgagctagaccgctagccggccagccggcccaggaaaggggggaggcgcgagggggccgcatgagaaggggggacgcaccagatcgactggcaagggggaagaaagaggagggaaaaggaaagggtttttcccatttttaatctattttctaaaagcatgctttcaccaattcactcaataaacaaaaaatgcatggtccggcatggtgcaacaaccaaaaagatttaaccc

SEQ ID NO: 67426 - DNA, 342 bp, Zea mays
agcttctaaagggagaacacgtgataggtcttttctatgtttatttcgaaaaagatagaccctgtgcagcttgtcaagcagggaaacaggtgggaagctctcatcacaccaagaatgtgatgacaacatcaagacccctggagctgctacatatggacctcttcggacccgtcgcctatctgagcataggaggaagtaagtatggtctagttatcgttgatgacttttcccgcttcacttgggtgttctttttgcaggataagtctgaaacccaagggactctcaagcgcttcctaaggagagctcaaaatgagtttgagctcaaggtgaaaaagataagga

SEQ ID NO: 67427 - DNA, 313 bp, Zea mays
ttgctcagagtgcagtgaactagctagcaatgccaacataatgcttttaactagcaatgcctgcattaccccctggtggtgctgttatggcgatggcaactcgcattaccaaccattcgaactccgtgggcgcgcccgcatgtgatggtgactttaatttggatcaaagcatcactctcccttaattaaatggcaagctaagctcgaatcatgagcattagtttatcaggccaactccgaaagcagcagcccaatctgaaatacattgcatctgatgaaatgtggaattcttgcaaaaaaaattctactacct

SEQ ID NO: 67428 - DNA, 314 bp, Zea mays
tctagtagaagatcaatggccacacaacccctatttttgtcgtttatcgccatgaacgaccattttcaataataccgaaggctaaaagattcggatttttgcccaagaaatggtctccaccagaaatccaataatgtcatctttggcaaggaaacatatgtggggtgaggtgtacgagcctcttgtcgatgatcaatggccacacaatccccatttttgtcgaaaatagccatgaacgaccattttcaatgacactgaaggctaacacctacggattttttaccaagaaatggtctccaccataaatccaagaa

SEQ ID NO: 67429 - DNA, 346 bp, Zea mays
agctttatcttgttgatttcacaacaagtaatgtgacgcctgagacttgtttagtggcaaagtccgacaagggttggctatggcatcgccggctagcccatgtcggtatgaggaatttggccaaacttcaaaaggataatcacatcattggactaacaaatgttgtatttgaggaagatagggtttgtggcgcatgccaagcaggaaagcaacatggagtcccacatcaatcaaagaatgtggtcacaacaaagaggccattggagcttcttcacatggacctcttcggacctgtggcctacattagcattggtggtagtaagtatggtttagtcattgttgatga

SEQ ID NO: 67430 - DNA, 314 bp, Zea mays
taccatataattgttccctcgtcacaacctctgaaggacattattatgtacagaagaactactataaggggtggaaagtgggccgcgaaactcaatgaattcaccattgactacgtgcatagatcttcaattcaatcccaagcgctagcagacttcatcactgactggacgccaggggctcacgaaaaaaggacaagcaaggatacccaaacttggacggtgttctgcgatggttcttggggaacctttggtgtaagaacaactgcggtcctagtggcacctttaaaagtcaaaacatgttttgcagtcaaact

SEQ ID NO: 67431 - DNA, 345 bp, Zea mays
agctttaaactttaacaacttaagcatgtgtttaaaatatattttccttgtggcaaacaacgaaactattacatgaaatttaaaaaatgtcctttattacgcagaaaataaaactgaatggaaaagactactatcaaggtaggatatttgtcaatagatgtgcttcgactctggcacagtgctattgactgtgcgagcttcggactgttctctgaagtccctttggtgttgagcatattggcccccttctggctgctggccttgttgcagcggtggtggaggcggatgctgttgccaggaagcttgaggttgactcgccgaagcaacagaaactgcagggtggtt

SEQ ID NO: 67432 - DNA, 309 bp, Zea mays
tctaaagggagaacacgtgataggtttaactaatgttcttattcgaaaaaaatagaccttgtgcagcttgtcaagcaggtaaacaagtatgaggagcacatcacaccaaaaatgtgatgacaacatcaagacctttggagatgcttcacatggacctcttcggacccatcgcctatctaagtataggaggaagtaagtatgggcttgttatagttgatgacttttcccgcttcacttgggtattctttttgcaggaaaaatctgaaacccaagggaccctcaagcgcttcctaaggagagctcaaaacg

SEQ ID NO: 67433 - DNA, 345 bp, Zea mays
agcttgaagccatggtaagtagcataggccaataatattcgaattgactcaagcctagctacgggtgcataggtttcaccgaaatccaaacctttgacttgggagtatccctttgccacaagtcgtgctttgttccttgtcaccacaccatgctcgtcttgcttgttgcggaacacccatttggttcctacaacattttgattaggacgtggaaccaaatgccatacctcgttcctagtgaagttgttgagctcctcttgcatcgccactacccaatccgaatcttggagtgcttcctctaccctgtgtggctcaatagaggaaacaaaagagtaatgctcacaa

SEQ ID NO: 67434 - DNA, 311 bp, Zea mays
tctaaagggagaacacattttaggactaacaaatgttcattttgagaaagacaggatttgtagcgcatgccaagcaggaaagcaagttggcactcatcatccgcataagaacataatgacgaccgacaggccactggagctcctgcatatggatctattcggcctgatcgcttacataagcatcggcgggagtaagtactgtctagttattgtggatgattattctcgcttcacttgggtattctttttacaggaaaaatctcaaacccaagagaccttaaagggattcttgagacgagctcaaaatgagt

SEQ ID NO: 67435 - DNA, 340 bp, Zea mays
agcttaactcgggctcaaatttgacaagtcttatttttaagctttttagtacttaaattcttatttattatgcaattgttggttcttgagatatgcatgaagcactgcactttgggggagtattcaaaactcaaaacatcaataaaacccctagtgcaaagccgcaatgcaaatctcaccatttgggtattttctctaaaaattatctagcctacgacaaaatattttgaaaattatgggaaaatatatgagggtaccaatacctgtcccaacaggtgttcttttgtgtgcttataagttgggatttggtttggttcaaaattagatagaaaatgtgaaa

SEQ ID NO: 67436 - DNA, 311 bp, Zea mays
tgaggctgctattagcggctactggtgacaacatattttttgcagtctgtttattcaaattttaaggtaaaattctttttgcctaagtttatgttatatttgtgatgaatcaagattttctgatgtcagtttatttcaatagagcatgctgctaagcaaggcactgaggatgcaacaagacctctaagacaagaaaaatgaaatcataattgagggcttggagagtaagatcaaggattaagaagcttctctaaagaaggacttcctacttcaagaaacagaaggcttgcttgcagaaattcaagctgaaa

SEQ ID NO: 67437 - DNA, 344 bp, Zea mays
  unsure (1)..(344): unsure at all n locations
agcttttaatgttatttataagccttgggtaaagtttggtatgatttggaccatgtttggtacctanaacccaaaaccctagtctcatgccctatgaacttcactatagactccaaaaaccctagtttcccagagatccgggaaggaaaattatattcaagacctaagataatatacttttattatctttgcgttttcatgagcattcatgattatatatggctatatatagaaagcgaggaagagaaagaagttgaagaagcgaggactacgccaccaccacctgaagaacctcaggcaggaaactgcttttactttgcatctgtggagcagagcctgactca

SEQ ID NO: 67438 - DNA, 312 bp, Zea mays
ttcatctttctttttacaaacaaagctggacatccccaaagccaagtacttgggcggataaaacccttgtccaacaattcttgcaattgcttcttcaattctgccaactcagcgggtggcacccggtaaggtctcttggaaataggagccgttcccggttgcaactcgatggcgaattcaatatcccggtctggtggcattcctggtaattcatccaggaaaacatccacatactcacagactactggaatcttcttcaggggtaactccatcatagcaaaagcacatgatcaagtcaaatcttggctgggc

SEQ ID NO: 67439 - DNA, 343 bp, Zea mays
agcttgcttggcttaatgcagttctccaaagctaactttaaaaaaaaataccatgttgttcacaacaataaaatcatgataatagtaaagtactttgaaatatgaatgcaaaagtaaccattattataacactatctacataactttagagtaataatcagtcaaatggcaccaactttaaaatgtaactgtgtttctaccatcaaacatcacattgataatattagagaaagaaggcgctgatgtttcagtggttacctaaaaatccagtaatgtccagcaagcaccactcagcaacacaaatcaaattcaaacgtctgttcaaagtaatagagaaaacatt

SEQ ID NO: 67440 - DNA, 306 bp, Zea mays
tgaaaatttaaaattgtgttgttggtatttattatggtttgggtttgcttttggcccttcaaattctccccctttagaataaaacaccaaaaaggaatacattagcaacacattggaggctaaaattttgtgaaaggaattgattaaaaaacttgaccctcatattacatagataagcctctctatgtgtacacatacatatggtggatggcaaagcatatgcatagctagagttttaagcacaaaaggagtttaatttatataatgcatatataaagcatgtaatatacaaattaaaaggaaacg

SEQ ID NO: 67441 - DNA, 338 bp, Zea mays
agcttagccttaggcgcaacagtaaactcctcctcgcccgaccttgggcctcgacctcaggaggaggtctccacctcgccagaccccagggctcggcccccgcctcggcctcggaagatggtcttcgcctcgcccgaccccagggtttggtctcaacctcggcctcggaaggaggactccgcctcgcccgaccctagggctcggcctcaacctcggcctcggaaggtggtctccgcctcgcccgacccagggctcgacctctaccttgacctcgggaagaatcgcgtcctcgctcgaccccggcctcagcctcaggaggagtctccgcctcgcccgat

SEQ ID NO: 67442 - DNA, 305 bp, Zea mays
tacgtcccatcttgtggcagtgagagaaccctctctcacggcgtgaagacagtgcgcccgtgttccggtcctcgaacggctcgcgcacgcgcaacggccgtcccgtgaaccactcgccctgtcacattaactccgaggcgggacaagtggcgcctctggcagggggagcgagcgacgcttcgcctccgccataatgaccgcgtcaaaaaaggtacgtcgcgtcattcgattgcgtatccttttccttctcctctttctctctcttacaacagggaccgggaaagggggataccccgaaaaggacc

SEQ ID NO: 67443 - DNA, 349 bp, Zea mays
agcttgtgaagattcttcattccaacatgagcaagtcggcaacgctagagccagcccatgttagtcttagcaattaagcaagtgtctagttcagcattgttatcattgaaatcaactaaatatagctgaccatctaacactcccttaaaggctatcgaatcatcacttcttccaatgacgataacaccaatatcagtaagtagacagttgtagcccattttgcataattgagaaacagaaagcaagttgtaatctaaagaatctacaagaaaacattagaaatagaatggtcaggagatatagcacttttatccaatcttttgaccaaaccttgatttccatccccgaa

SEQ ID NO: 67444 - DNA, 326 bp, Zea mays
aaatggaacccaaaaaactagggcgacaacaaatggaataatacttatctcctttctcccctttaaatcaaacttttccctccaaaggtggctaacttaagtgcgaagaaacaattcgaaggatcctactagaataaatacttgcaaaaactgctgggatcgaaagtaatatttattaacaaccacaaagtggtttttttgagattaactccaatcttaaaaaaaaggtttttaataccccccctttcaatcccgctttcatttaagaaacaaaccaagtgtaccagaatcggtaacctttccggccttttctcaaggaaaacaaa

SEQ ID NO: 67445 - DNA, 346 bp, Zea mays
agcttggaggcgtcgatgggtgttctactcgatgtagactcctccttcttctcctccgtcgccttaaatgcgactggttgtgcttcggacgtggagggatcatcaagctcgttgatcttccttgagcctttgatcatgaactcaaagctcacaaaattcccgatcacttcctcgggagtcattagtgtatatctaggattgccacgaattaattgaacttgagtagggttaaggaaaataagtgatcttagaataaccttaaccatttcatggtcatcccattttttgctcccgaggttgcgcacttgattcaccaaggttttgagccggttgaacatgtcttgtg

SEQ ID NO: 67446 - DNA, 314 bp, Zea mays
taaagccgaagtccagaccagctcagaattgaaaaaagcattatcaagccttcaagacaaatgcttgaactttggcaataattgtattggacgattaaagaagatattttactctgttggagccagcagtgggaagtttaacccttcggcggaaaatttaccccaagccttcgatcatattgaagctgaaatcgaagagcttgacgaagttatagccgggcacggcgacttctgtgcctgggtagcttctcggggtaccgctgctgcatttttgaaggccggctgcgaacatggaaaggttgtcaacaggccca

SEQ ID NO: 67447 - DNA, 357 bp, Zea mays
  unsure (1)..(357): unsure at all n locations
cgcttatcaaaatcaccataccgagagcccattactttcctctgtagatacggtcgtgacntgagcgagctcttgcgactagctccttcctttaaaaacaaaagtgggttcgaaaacctaaccaccttaggaacaccacttgatagcccttcccgatatctctattgttcccctccaaaaacacagcctcccaacaagaaaggctcctcccaccaatatgttccatctaagacaggggtgaggttcccgcgtgaatcttgtgagagggatgggcatttggttgctttctactttaggaggaacagagatgagcgacagggttctgagtctagtggaaggaacataaactgccctttc

SEQ ID NO: 67448 - DNA, 316 bp, Zea mays
tctaaagggagaacacgtgataggtttgacttacgttcaattctaaaaagatagaccttgtgcagcttgtcaagcaggtaaacaagtgggaagagcgcatcacagcaagaatgtgatgaccacttcaagacccctggagctgctgcatatggacctcttcggacccgtcgcctatctgagcataagaaggagtaagtatggtctagttattgtagatgacttttcccgcttcacttgggtgttctttttgcaggataagtctgaaacccaagggaccctcaagcgcttcctcaggagagctcaaaatgagtttgag

SEQ ID NO: 67449 - DNA, 348 bp, Zea mays
agcttgccgccgatgaagacagcggggactgttttgtctctccctcccagcatcttgagcagggcgcgctccatgtccttgcccctggggtcgctgtacagctcgtgcaccagcgcgttcacgcccatgttcgccatcaacctcgtcaccgtgtggctcatgcagcagctgctcagagtgaacaccaccaccgcgcgctccgacgcgatcttcatcacgcgctgcattaagtaacaatctctccttgcttgcttttggttctggtttggctctctctgtccaatgcaagctaactcactctgtcgtccctctcaattgacttttctctctctctctctctctctctct

SEQ ID NO: 67450 - DNA, 306 bp, Zea mays
  unsure (1)..(306): unsure at all n locations
nttccttgtcgtcatcaaccttaacatagaaccactctgatttccagcctgctgcccatttgcttcggtagctaattacaggaaactttgtagatctccgataggcgaagttatagcaaccaaaattgtcgtgcaatccatcctttctaaccttcgtttgataatgcaactcgtgaactcggcaaaagctgtccgcaaatggttccactgcttggcttcggagtgcccaaatataaacaataagtctgacgatagcattaggggtcagctggtgaaaatagataccgaaccttttcaatacctatg

SEQ ID NO: 67451 - DNA, 343 bp, Zea mays
agcttgataaagtgatggcctaactatcagtgaaattatcattatcttagtgatgccctaactatgggcgagattatcattagcattattattctaatgtcatatcttatgtaaacgagaccgaacatattgttgttgggtgctgatgagacgaagaaaacacatctattcgagccgatgaagcctggcgaacacgtgactaggcaccaatgaggcgaaagtcatccccttcataaaaaacaacatgtttaccaaccaacgtgacaatgaagtagtcatgattgagttttggcaattctaaagccactcacatcctacaccttacactcatcatgacaaccac

SEQ ID NO: 67452 - DNA, 309 bp, Zea mays
tgtggcgccctcgggcgtcttgtcacagccgaagtaccaagtctcccacttggaagtctcggggccaaacccttcgggcgtggtagcgtcgcagagattgctgataccgcgccgagtgtagtaaggccacgtcccgagcctcttccagctggtccaatgaatcctctcggctggtctggttgctttggtcgtcgtaagcctttgtcctcggggaaccgtattccaagtctgtgggtaagatggcctcagccccatagactaggaaaaacagcgagaagcccgtggcccgactcggcgtcgtccttaaac

SEQ ID NO: 67453 - DNA, 339 bp, Zea mays
agcttagcatttttatggagagaatatcttttagcctttgacgagcttcgctttgctctctcgctctttttagaagtttgagcatgaccgccttatcttcttgacttaatgagcgaagagttgcatgaagcttttttcatcatcctcatcctcatttgtgcttccactatcattttcattagccacacaacatatgtgggaatcgaaatgggaagacacaccttttggagaggtggattcatcgtttggtctccatcgttcattttattcttcttccttgcaagggttagtatcataaagactaaagtaagtggaagcaacaaatgaactaacatgttt

SEQ ID NO: 67454 - DNA, 310 bp, Zea mays
  unsure (1)..(310): unsure at all n locations
ttccataaagtcctagtttactaattntcgatgcatattttgtgagttaggagcacaataattaaccgctgtgttgttgtctagaaatatgcaagcattaagttgctctcttgaagttgctcttgtttagctaagttttgtttaggctataggaacactatatgaattgcattaatatatacattcattgaagtacttgcatatgtcaatattgatttggtgtctagaaagctttgtccgaggtatataggaccgtctactatcttaaccgaggtggcagctgggcttatcacttgcaattggcggaatc

SEQ ID NO: 67455 - DNA, 343 bp, Zea mays
agcttgccttcgcttcagatctatcacccgcatttctttcggagttgtggaacgcgccaatggaaaaatcttcacagtcgtcaaaaagatgctcctcgacgaaaaaagggcaagtgggccgatttgttacccgaggcggtctgggcactaaacacgactgagtgcagggcgaccgagttcactcctttccgccttctatacggatcggaggctatgaccccacaagaaataaaatatgggtccccgcgaatagttccttcagccgtccccgacgtggacgaggccacttcaaaggatctcatcgatggagaccgagtctttgccctacaagcactaaacaaat

SEQ ID NO: 67456 - DNA, 310 bp, Zea mays
tctatagggagaacatgtgatagggttaactaacgttctattcgaaaaagatagaccttgtgcagcatgtcaagcaagtaaacaggtgggaggagcacatcacagcaagaatgtgatgaccacatcaaggcccctggagctgctacatatggatctcttcggacccgtcgcctatctaagcatagggggaagtaagtatggtctaattattgttgatgacttttcccgcttcacttgggtgttctttttgcaggataagtctgaaactcaagggaccctcaagcgcttcctaaggagagctcaaaatgag

SEQ ID NO: 67457 - DNA, 341 bp, Zea mays
agctttattgagactggtaaagtctatgctctttctccattttccatttttctttaggaccattcggacattgacaagacaagtggggtaataaaatggctcgatgaactttgcctccagtagacggtggacttccgccttcgctgcttcagttttctcatcagacatttttcgtaacttatgtttcttagggcatacagtggggtcggtgcccaagctatgcttaatgatggtgcgaatgacatcgacaaggtccagggcagaccatgcgaatacatctttattatggttcagacaggacaagagtctttcttcttttgcttcaatgaagtcttcgctga

SEQ ID NO: 67458 - DNA, 305 bp, Zea mays
tgaagccatggtaagtagcataggcaagtaatatgctaattgaatctagcctagctatgggtgcataggtttcaccaaagtccaaaccttcgacttgtgaatatcccttggccacaagtcgggctttgttccttgtcaccacaccatgctcatcttgtttgttgcggaatacccacttggttcctacaacattttggttaggacgtggaactaaatgccatacctcattcctagtgaagttgttgagctcctcttgcatcgccactacccaatccgaatcttgaagtgcttcctctaccctgtgt

SEQ ID NO: 67459 - DNA, 339 bp, Zea mays
agcttgccaaggcttaaaccgatgacccccttcaccggaaaagcgcaatcgtgctcgctggagttcagaaccccgccggcgcacgtggaccgggtaatcctctactccattcttcgattccttgtgcacatagcctctacgtcaccccatggagctcatcgtgccatttgattgaactagatcgccgtggtttagccggaacacccgccgccgacgagatcacccgcttgcgcatgtggaccggccgattccggccacctccgccgtcgagccgtacaccgctgtaactgccaggacctcccggagccaaccccgcccctcgtcggacctctctcgccg

SEQ ID NO: 67460 - DNA, 306 bp, Zea mays
tcacactggataccacctgctaggacgatcagaggaattgtgagcgaaagacaagattcgacacgaaagccaagcaggaaagcaagttggcactcatcatccacacaagaacatcatgactagtgacaggccattggagctcctacacatggatctattcggtccgattgcttacataagcatcggcgggagtaagtactgtctagatattgtggatgattattctcgcttcacttgggtattctttctacaggaaaaatctcaaacccaagaaaccttaaagggattcttgaaacgaactcaaaa

SEQ ID NO: 67461 - DNA, 339 bp, Zea mays
  unsure (1)..(339): unsure at all n locations
agctttatatggacgtcggngtcgaactcttcttaattggtctgaacctggagaaaggtacttctttaggcctgatatggtgaaagaggtcgaagaaaaggttcagaaaattattcataatatgaagaaagctcaaactcgacaaaagagtcatgcagaccaacgacgacaacccttatgctttctagtagacgattatgtctacttaaaagtttcaccaatgaaagatgtatcgcgtttcgggggttaaagggaagcttgcacccaggtacattggtccattcttggtgattgagcaatgtggaccagtggcgtaccgactccagctacccgaaacat

SEQ ID NO: 67462 - DNA, 302 bp, Zea mays
tatgaaggttcttcatcccaacatgtgcgagacgactatgccaaagcccgcccatattagtcttagctattaagcatgcatctagatcgacattctctttcgaaaaatcaactaaatcagcggatgatgtcgacatgattaagatggtgaaccatacaagtagggagggggatgaggaacaacaaatccgtatggtagattgtggcggtgaaatacctgctgatgaagaggaaggaagtaagtgggatgtggttgtcaacaaaagaggtaggaagaaaacgacaacgaaaggccctatggga

SEQ ID NO: 67463 - DNA, 346 bp, Zea mays
agcttcttcaccatgttatcacggtaatcgtgagaaggttgagcatgacactttcccttcaaaaaggttaagctccttcttagccttccaacttcttccttgagctctttattttcttgtgtgatagaaatatcactaattcctgaaatttctagctcaatggaagattggcttgcttgataacaacaattgttagcacatggtaatatagtttcaatttcaacacatgtgcacatgtgaggttggtatgatttcaaattagttaacacaacctcatgagccatttctaacatgatatgtgaatccataaatttattatgagagcatacaagcatatcatgttttt

SEQ ID NO: 67464 - DNA, 316 bp, Zea mays
tcgtcatctgaaagaaagttaccctgaagcaaagagatgatctcagttctccagtcttcactataaacaggggatatgttgaggaccactctttcaagaagctcaaccgaaggtgcttttattgtttcgaaaaatacttccgaaggtaagggcagcccctgtgctgctgacttagctaataaatcagcatattcattttctccacgagcaatatttttaacagaaaaaccttcaaaggaagcctcaatccttcggaccgtgtctaaatatttttcaagcttcggatctcttgctttataacttttatcaatatgac

SEQ ID NO: 67465 - DNA, 346 bp, Zea mays
agcttggtgccaatggagaagcagaaatccttgatttcttggctgtcaaactgcttgtcgttgtcaactgtgagttcggacggtactccaaagcggcaaacaatgttttgccagaagaatttctgtgcagtctttgatgttattgtggatacggccctcgcctcgatccatttggtaaaatactcgacaacgacaaaggtgaacttgaggttcccctaagccgtgggcaggggcccgacaatgtccaggccccagcgctggagaggccatgtgtgggcgatcagctttgtgaattgcgaagggctgcctgatctaggagaaaacttctggcaggctttgcaggacc

SEQ ID NO: 67466 - DNA, 315 bp, Zea mays
tcttcattaaaactaggtcttctgcttttatagtagattttccaaattcaacatgactgggcttgtttggactcaagataccatcgtcttcctcatcatcactaccagcttcggcatcaacatttttagctttggcattagcactgtctttatctgcaaaagatccttctccctcctaaacaaccagtccagaacgcctcataaactccaaaattggagttgtctcagtggttccggtcttttcaccctcacttgtcagtctagcagtagacctaatcctaaccatttgagttcttaagccgaagctaactttcg

SEQ ID NO: 67467 - DNA, 344 bp, Zea mays
agcttatctggagaagcagcccacatccagtcctgaaggcaaatcagatgtttgaacaaaatcagtgcttagccaaatctagaaaccacaaccactcgaacgctgactcagatggtagagccatcacaccaatggtgctaccatcagtaaaataatcaaatcaatttgttttgccttactaatacagtacccttcgaataattgtttataagcaattgaacttgctgcccaatgtattatagtcttggccggtctaaacatttacctcagtctccttcgctcccgcgccgctctgacctcggacccggcctcgctgtcctctcctttatcctccgtcggtcctc

SEQ ID NO: 67468 - DNA, 315 bp, Zea mays
tcggaatcccatgttcctcatcattttccggcaaacggatatctctttattgtccgataggcaatagagaaaatcatcttcattagtcccgctgtacaccatggatccttgtggatactttaaatccctggcatattgtctagcttcggcaatctgctcttccgacaattgcttccctaaagcatgtcaaacgaaaaactccacctctttagcaggttcttcgggagcaggagacttaaatttctcaagtacacttcctttttccaaggttagagcagcagccctcgaaagatatgcttcggtaggaactgaggg

SEQ ID NO: 67469 - DNA, 348 bp, Zea mays
agcttctcctaaaaggaaaaacaaagaaattccatagttaattaggtaagcctaataagagatacaaaaagactgttgtgagcacaatactcatgacaacagcacaactgcaaccttttattgcttggtgataatttggttaatttataaggttacaaaatgtctgatactgcataccagtgttcgtatggcggaacgccgaacagaagtaatactatgtctcataaagggccacagccggggtgtcagtgtagctagaccgtaagggttttcaatagatgttagttcgtcttcttgctcagcaatctgagttgcttcgtttagatcaaattctcccttttcccctga

SEQ ID NO: 67470 - DNA, 316 bp, Zea mays
taaagccatggtaagtagcataggcaagtaatatgcgaattgactcaagcctagctacgagtgcataggtttcaccgaaatccaaaccttcgacttgtgaatatcacttggccacaagtcgggctttgttccttgtcaccacaccatgctcatcttgtttgttgtggaagactcacttggttcctacaacattttggttaggacgtggaactaaatgtcatacctcattcctagtgaaattgttgagttcctcttgcattgccaacactcaatccgaatcccttaatgtgtcttctaccctgtatggctcaataaa

SEQ ID NO: 67471 - DNA, 347 bp, Zea mays
agcttgagactgtgaaactttgcagaaattattaaatacattgggactaatatgcatgaaatatcgcagggaatgatccaaaaggtgaactttttcttaacccatccagtatatctaaagtttgcttggttttcttaccatcaaactgatcacccttttttttgtcttaactataaagtgcaatcaattagccactttattcaaaaaaggtattcttgttaatgacacaatgacatcttcaattaaacacctgcacattttctctaactctcaaacaacatataaggagatgtgagctctcccatgttctatatggaaaaaaaactgaaatactcgtgctctcattt

SEQ ID NO: 67472 - DNA, 306 bp, Zea mays
tattgatagattggatttcctttatgttttggtgactatgatgcttttgatgcttttattaaaacttctcataattctatcaattacaatgtctctaggcaaacaacaaagatatggaaaagtactttaaagaataacatgctaaaattgttgaaaagttgaaatctgtttcttctattgctttaacctctgactaggtgagagcccgtgcgttgcaacggaagtaacaatagaactgaaaacggatggagagtgcaaacatcactataatatacaaaatccggacaagtacatagctttcgttca

SEQ ID NO: 67473 - DNA, 343 bp, Zea mays
agcttcttgtgagtttgttatatcctaatagtcgtagtatagtttattagacatgcagcaggtcgttgttaattgtctttgtgtataccataccatctacgaagccaaataaacaaaaaaaaattatccagataggaacacacggtggggaagcaaagccattaaaaaaagccgggatagaatccatcggtgctgcttctaaagtaccaaccgatcgaggaaggtactgctaatgcgagagatttcacattcatttatgttttaagtttgtgtctggttgagctttttaaaaaaaacataatacatcctaaaattcgcaggatactttatatttgcttttcgc

SEQ ID NO: 67474 - DNA, 310 bp, Zea mays
  unsure (1)..(310): unsure at all n locations
ntatcaaaaggatgtgaagagtgccttactctttggtccaatcaaggaggagggctatgttgagcaacctcccgacttttaagatagtgagtatcctaaccatgactataaactctctaaggcgctttatgggctcaagcaagccccaagagcatggtatgaattcctaagagattttcttatcgctaatgggctttaaagtcggaaaagccgatcctactctattcactaaaactattgcaaaagatttgtttgtatgccaaatttatgttgatgatatcatatttggggctactaacaaatccacttt

SEQ ID NO: 67475 - DNA, 341 bp, Zea mays
agcttcggcgggacagcagaaaaggaaaccgtcttttagatgaaaaggctatttagacctcggtggattactatagaattactaccaaatgtaaagggcatgggtgtaattttacatgggctgtgtcccgtgcctataaataggtgaacagtgcccccgtactgttcacgctaacttggcatttgcttttgcgtcacgcttgtactttcaccttctttcaagccgaaggtacatttgtaatttgatattatttctacttttctataataataatacagaaataacttgatgataatacataattatttatgtttcatatgattccttctctattattatat

SEQ ID NO: 67476 - DNA, 328 bp, Zea mays
gacctatgaatactaagctttaagggagaacacattttacgattaacaaatgttcattttgagaaagacaggatttgtagcgcatgccaagcacggaagcaagttggtgctcaccatccacataagaacatcatgatgaccgacaggccactggagctcctacacatggatctattcggctcgatcgcttacataagcatcggcgggagtaagtactgtctagttattgtggatgattattctcgcttcacttgggtgttctttttgcaggaaaaatcctacacccaagagaccttaaagggattcttgagacgggctcaaaatgagt

SEQ ID NO: 67477 - DNA, 342 bp, Zea mays
agcttctatgggtcacagggccgcgacttgtttatccacgacagcccgagtgcccgtggtttcggcgttcgacggtggcggcgaatttcctttctggcggtgcgtggcggcgtctggtggtggcgagaaactggggataaagaaagtagaggggaaaggggcgcgtgcgcgacctacttgtacccagtccaggcgagaggccgggtcaatccgcgcccgcgaattcgtgatggaggaatcgtgccgaccgtgttccacggcatggtgggcggatctgataaatgtggggggggggttagtagtgggccccatccgtcagtagccgccgaagtggggaggaac

SEQ ID NO: 67478 - DNA, 275 bp, Zea mays
  unsure (1)..(275): unsure at all n locations
ctcaagcttctctatcgcttgcgatagctaccttccatctattccttcttcctttntacttgctgatggagcatctccatattcctgatctcttggtccaagtcctcctcctggggcgttggactggtggccttcctcttctggctttgggcctttgcagcccctgtcgctgaagctttctttggcggcaagacgaaggtcgatgcttgccgaaggtgttcgaaactcaaaaagtggaagtgagttcaccggaggtgggcgccaatgttggggac

SEQ ID NO: 67479 - DNA, 338 bp, Zea mays
agctttatcaaatggacgtgaaaagtgcctttcttattggaccaatcaaggaagaggtctatgttgagcaacctcccggctttgaagatagtaagtaccctaactgaaagggagttaggcttacacctagttcctatataattttggtggttgaattgcccaacacaaatctttggactaactagtttgctctagtgaataagttgtacaggtgtcaaaggttcacatcaagccaattaaaaggaccaaggttgggttcaaatagagtgcaaaaggcatcccggacgcctccctggtctggcgcaccggactgtccggtgcaccagggggcctcgcgc

SEQ ID NO: 67480 - DNA, 307 bp, Zea mays
tgagcttcttgatctcttccctaagcctctcattggttatcaccaactaattataaaaatctttgttttctatggaaagtattcccttattgggagcattagtcaaggatttctttaatttctcggtctctagtgacatgacttcaaatttttcaaccaaatctccatgaaggggagaatgatcaacagtgctcaaatcatcacatgagattactacatctatatctatactatagataaagcattagtttcaacggtcgttccgcgtcatttttttacaaataacctctcacatctatttaaaatc

SEQ ID NO: 67481 - DNA, 343 bp, Zea mays
agcttctaaagggagagcacattttgggactaacaaacgttcattttgagaaagacggggtttgtagcgcatgtcaagcagggaagcaagttggtgttcatcatccacacaagaacatcatgacgaccgacaggccgctttagctactccacatggacctattcggcccgatagcttacataagcatcggcgggagtaagtattgtcttgtaattgtggatgattattttcgcttcacttgggtgttctttttgcaggaataatctctaacccaagagaccttaaagggattcttgagacgggctcaaaatgagttcggtttaaggatcaaaaagattagaag

SEQ ID NO: 67482 - DNA, 308 bp, Zea mays
  unsure (1)..(308): unsure at all n locations
ntgtcgagtgcttcagacactcggcaaaacagttgttttcggtagtgttggtatgttgtataaccctacaaaaatgggaatttagttccaaattttgtgaacttcagacatgttcttactctgtaattaaagaataattgtatgcttcttgatgagtagcaaatttccttttcatgcatgtccaatgcctgcaatttattcactaaagtaaataattgtcacatcatatctttggttgatttcatgcgctactgcaaaataggtgaacaatgctgtcggtacattggccatggggcactattatgatg

SEQ ID NO: 67483 - DNA, 339 bp, Zea mays
agcttgtcaagcatattttggtacccatcgtttgatgggtccatcaaggttagtcaacaaagatctaggaacccaaaagtcctttgtgttagcgcttggtaaactcattacctttctagcacaagttgcaattttgggttgcctagttacatgtgaaataattgacaagctagaagtggggttgttaccaatgggacaatctttgcattgatgtcccttctttcggcatatgtagcaaagacgatcttcaagttttgaggatttcttctttccctgtttcttgcttgctacatggttaattaatattttcttttctaacactatgcctttttgtttcaa

SEQ ID NO: 67484 - DNA, 304 bp, Zea mays
tctaaagggagaacacgtgataggtttgactaacgtgcatttcgaaaaagatagaccttgtgcagcttgtcaagcaggtaaacaagtgggaggagcgcatcacagcaagaatgtgatgaccacttcaagacccctggagctgctacatatggatctcttcggacccgtcgcctatctgaacataggagggagtaagtatggtttagttattgttgatgacttttcccgcttcacttgggtattctttttgcaggataagtctgaaacccaagggacccttaagcgcttcctcaggagagctcaa

SEQ ID NO: 67485 - DNA, 338 bp, Zea mays
agcttcggtaagacgtcgcatcagtgactggtggccgtcgtcctctgagagcttcgcctgggtgtcaacaggcgtggagaagggcttgcagacggacatgccagcccgctccagaatgtcgatggcgtactgacgctagtgcaggaagagaccctggggccgacgttcggcagtgatgctgaggaagtgatggagaggccccaggtccttcatcacaaactctcgctggagtgcggtgatcatgctctgtaggagttcggaggtggatgtcgtgagcacgatgtcgtcgacgtagaggaggaggtagacgatgtcctcgccccgccggtagatgaaga

SEQ ID NO: 67486 - DNA, 306 bp, Zea mays
tggcaactaccttgccggatttgttagtcaaaacataatatgcatcaaaagtcttaaatgaaatggcatgttcatttgatgcattaagaattttcttcttaagcaacctaacaccggttggttgcctagagctagatgtctcactcttatacataaaagcgtggttagaaccagattgagacttcctagaataaattttcctaattttgtcctcgggataaccggcagggtataaaatgtaaccctcgttatcctgaggcatgggagccttgcccttaacaaaatttgacaatcttttaggagggg

SEQ ID NO: 67487 - DNA, 476 bp, Zea mays
  unsure (1)..(476): unsure at all n locations
ccttgaaactaagctatgaagatctccatcccacatgggctagtcagcggtgctttatcctacccatgttagtcttagcaattaagcaagtgtcgagttcgactctatcaaaatctactaactatagctgaccctctaacactcccttaaatgctactgaatcatcacttcttctaaagaaagtaacacctatatccgtaaaaagacagttgtagcccattttgcataattgagaaaccgagagcaagttataatctaaagaatctacaagaaaaacattggagatagaatggtcaggtgatatagcaatcttacccaatcctttgaccaaaccttgatttccatcctcgaatgtgactagctctttgggatcttggttnttctcatacgacgagaacatcttcttcttccctgtcatgtggntcgtgcacccgctatcgatgatccaacttgagcccccggatgcatatatctac

SEQ ID NO: 67488 - DNA, 480 bp, Zea mays
gtccacttgaattaatcttcggagagacacgacctcgtttgatcatgacacccgaaggtccaacacaacaagcaatgagtgaattcagaattattgcagagcatatcagcacaagggacctgattcaagagtttttagctttcaaagtttttcccagtttaaaagaatgggaaatgccgaagctacaaggggaaaagaaagaaggtgaacttgtacgtttaccttactacttcaagtttaagaaatactttaaaacaccttgccaagagtggctggaaacgaatgaagcgatgtgcaatgaaatacttggcaattattccaaaaaagaagatcaattgatgaccgctgccttcggcacccgtccgaagcgaaggctaaatcgagtggtggacgccttgggcttcgattatcctgattattgaaatctgaacaaaggtgctggtggccaaaaaagaaaaaggataactgaggccatgaatg

SEQ ID NO: 67489 - DNA, 443 bp, Zea mays
  unsure (1)..(443): unsure at all n locations
tagggctggagagcgcgcnccttggattgagagaatagctaattatcttnctggttggaaagctggccttctataccttgctgggagaatcacncttgtcaaatctgtcatgtctgctatcccagcttatctagtcattgcccacagctatacaaggctgatgtgagcaatccagctatataaggctgagcgccattgaaaacacgtcattgcggtgtgcccacataatccaagcctccacgatcaccaacgagttaaagccatctctgaggtccttagatagtacctcagtcgatctactccaccaagcttcaaaattgatatctttcatcccgcgggcaagggcggacaagccgacacattggaggagaagaaccaaaatagcctcgcgaggacacagganacaagcaagtgatgaagagacctctcttcctcgtcacata

SEQ ID NO: 67490 - DNA, 492 bp, Zea mays
  unsure (1)..(492): unsure at all n locations
acctatgatactcagctgaccacagacatgatatcgcctggctaggaaaggattttaatcaccaggacactgtgcatttatccttggtgtccaaatcatggtggtggaaaaccattggggattgacgaagcagttgcagcaagtaatttgagggcagaacttggtttggctaaagaccaattcaatgtgacattgctacaagatcgtttaaggaaaggggaggatgatgaccttaccatcagatgtttcttccttatcttattcaactgtctgttgtttccaactgctagctggggcataacaaaccatgaagtgcttctgactaaagaaatgcacagnttccacgagaccgattggtgccagcttatatttaatgacctttgtgaagcggcgaagaagtggcgtaaccgaagcaccacanacgtatccacgacgatatacggatgctaaattgtngtccttgtaagtatagagtttgccttatgtacatat

SEQ ID NO: 67491 - DNA, 477 bp, Zea mays
  unsure (1)..(477): unsure at all n locations
tatgaagattcttcatcccaacatgggcaagtcggcgataccatatccaacccatattagtcttagcaattaagcaagtgttaagttcaaccttgttttcattaaaatcaactaaatatagctgatcctctaacactcccttaaatgctattgaatcatcactccttctaaagacagtaacacctacatctgtaaatagtcagctgtagcccactttgcataagtgagaaacggaaagcaaattgtagtctaaagaatctataagaaaaacattggaaatagaatggtcagctgatatagcaattttaacccaaaccttgaccaaaccttgatttccatccccgaatgtgatagcgcgttggtgatcttcatttttctcatacgaggagaacatctttntctcctctgccatgtggtttgtggcacccgctatcgatacncaacttgaaccactggattcataaacctacaaaacaa

SEQ ID NO: 67492 - DNA, 507 bp, Zea mays
  unsure (1)..(507): unsure at all n locations
tgtggacccgtagcctatcaagtggaattgccacctcacatgtcagcagtccataatgtgttccatgtatctcagctgcggaaatgcgttcgtctacccactgaagtactcccagaaccagacattgagatagaaccagatttatcctaccaagagtaccccgtcaaggtgctagatcaaaaggaaagatcaactcgggcaaggtcggtcagaatgtacaaggttcagtggagtcaccattcagcagaagaagctacatgggagaccgaggattttctacgctctcgcttccccgactttctacccaaaggagtcggtatgtaaccccaaaaccccacccccacctgcccttngaatccaattataagaaaaacttagataacaaggatagtctaagttgtggatntaacttaagaagggcttccttctgaagttgcaaagaggatgacattcgaagagcagttaacaagagaaacttgagtgtatacgagaaacagcaccaccaca

SEQ ID NO: 67493 - DNA, 474 bp, Zea mays
tgtgaagattcttcattccaacatgggctagtcggcggtgcttaatccaacccaagttagtcttagcaactaagcaagtgtcgagttcagctctttcaaaatctaccaagtacagctgaccctctagcactctcttaaaagctattgaatcgtcacttcttctaaagacagtaacaccagtatcagtaaaaagacagttgtagcccattttacataattgggatacggaaagcaaattgtaatctaaagaatctacaagaaaaacattggaaatagtatggtcaggtgatatagcaattctacccaaaccttcgaccaaaccttgatttccatccccgaatgtgatcgctctttggggatcttggttcttctcgtatgaggagaacattcttttctccccgggcatgtgggttgtgcacccgctgtcgagtattcaacttgagcccccggatgcataaacctacaaaacaaatt

SEQ ID NO: 67494 - DNA, 488 bp, Zea mays
  unsure (1)..(488): unsure at all n locations
cccctgcgagacctttccccgtttctgtctaaccttatctaatgcgatatcgaatgtcatactttatgcatatttactttatttgttctcttgtatggtgtactgtttgtttcctaatttgaatggatgaatgtatgtgtgcttgcaatcgcatagagaacgatccggttgaagagaccaaggaactcgcaggagaagcccctgagcagcagtcggttggtggaggcaagtgtcctttgacctatctctgtcctattcattatttaattcacctcccgcattacacatttatacctaaggattgactagcttttgttatccatgtccttgtttacctacttgggtcggattattattggttagctntatgctattgctccactctaatcaatgaacatgatgagaattatnntatgatacgctgtttccnctctnttattaagatgttatacttgtgaccttcaagggggctcgagcggnttctcgag

SEQ ID NO: 67495 - DNA, 481 bp, Zea mays
  unsure (1)..(481): unsure at all n locations
actcagctgagcgngactggnncatctgcaccctgggaactggtgttagcatgtccttcagcttttgccatgatgtgattgttcctggctgaagagaggagtaccaggtttgtgcaacattcttgactgccatgatgaaggatttcgccatgactgcagtattgcaccatatgaagatatggttgcttcgtagctcatcaaaaattgcttcggatctgagtgtccgtcatacatggggagcggaggtggtttgtaagacaggggccaaggtgtagcctatagttcagctgacagaggagaagcatcgtcaaaggcaaaatttccatggtggaaatcctcataccagtcatcctcgttgacgaagccctcttggtgaagctctctgtgctggggccttcggttttgctcatcctgagcaagatgacgaacttcttcagaggcttcgtctatctgcctttgcaggtcagctagccgagccatc

SEQ ID NO: 67496 - DNA, 507 bp, Zea mays
  unsure (1)..(507): unsure at all n locations
agattaagccgngccaaagaatcctcagatcaatctgttattggcctgttcgtttgcttgccaaataatttttcttgcaaaaaaataactatattcccatatgcttctaactntcatggtcaataccaggaaaggaaagattatcacgcaacagcaaacagaaatgaatcctccaaatcctccacctgttgaaatcgatcaagtggttgctgcccaaagactggtaatacaacaattgacagacctagtgaccgagatgcaaaatcagataagacaaggacgcgaggaaatacgtcaggtccgccaagaaataagccaagcgcgattggaaagacaacgacaacaacaaccttcaccaccaccaccaactccaccaagctacataaacatatatataaagtactactatttgtaagatctagatgttactctagctagtagatgatatgcataatatttagaaggaataagagggctaatcgaccccatgtgttgctaataaaagat

SEQ ID NO: 67497 - DNA, 447 bp, Zea mays
actaagcttgtcatcatcctcaaagaatagcatgcaactatagggacacttgtctatcttctcatatgtcatcccaagaccagccaacatcttctttgcgaagtacatattctttggcaacttatgattctccgggagaacctcgcccataagttggacgatgtcgttgtaagcactgtttgaaatgttgcgcttcgactttatcgccattagtcttgtgagagtcccaagaactgacatctgagtgtgctcgtgcagtctctcttctcccgcggcgagtagccggaagaattcttgagcatcgcgtggaagctgccccggctcctcagcgttcatttcaacctccctaccaagatcatgcaacatatcgtccatcctatcatgatcgtcatcaagctccacctccgcgtcaacgtgtctaatagactctccatgccggtaccatac

SEQ ID NO: 67498 - DNA, 396 bp, Zea mays
cttcagctcttgccatgaagtgatggttcctggcctaagggaggagtaccaccgttgtgcaacgctcctgacagccatgacgaaggactttgccatgaccgctgtgttgccaccatacgaagatatagttgcctcatagctcatcaagaattgcttctggtctaaatgaccgtcatacatatggagctgaggtggcttataagactgtggccaacgtgtagcctgcagctctgctgacaggggagaagtgtcatcaaaagcaaaatttccatgatggaaatcttcataccagttgtcctcgttgtagaaaccatcttgatgaagctgtttgcgcggcggcctgtgaatctggtcatcttgaccaggcgtcgaagctcttcagaggctcgatctatc

SEQ ID NO: 67499 - DNA, 481 bp, Zea mays
  unsure (1)..(481): unsure at all n locations
cgtttcttagtcccnccgacatgatctttttctctcgcggntaagcgttagaacgaggattatgctctgataccaattgaaagttgcctagaggggggtgaataggcaagttaaaactttttcaacaaaaactagaagcaaactgggtaaaactgaattgatctcgagattcacccagttaactttggaaatgagatgttctaaatgatccacagggttcaaagtagtagatctgagaagggcacttctcaaaatccacacaccaaaaagatataaacaaatcttccacgcaatggtgagagaacgaagaacataaacaaacacaatgagcaagaacacaagagacacaagatttatcccgaggttcggtcacaccaccaaggtgccctacttcctcgttgaggcgcccacaaagagccgggtctctttcaaccctaatcctccctttgtcgaccacaaaggtcaagcccacacaataatc

SEQ ID NO: 67500 - DNA, 453 bp, Zea mays
  unsure (1)..(453): unsure at all n locations
ttctgatattttgatccctcggttgatccttatacttcttccattttntctgtcgatggcgcttcggccatctcgttggtttctggtaacaaaatacttgcttcttccaattctattcttgttggcgcttcggccatttctgcgacttctggcagcaaaggtggcttggttggcttttcagcttccgtggccgaagaggtctctccggtgaactcatgcaccgangctggttcaatatagcgtggccgatgtgtgaggacctttatcctttttcttttcggtgctggctcactaagagcagttgcagcttcttctttcgcagaggttgtgctttttcttttctgccctcgaatgggataacgatagtcatggtagacgaacccgactgcgtcaaacacccggttcagtcttttcttttttcagcctctgaaggctgctgacagtgcagnatct

SEQ ID NO: 67501 - DNA, 458 bp, Zea mays
  unsure (1)..(458): unsure at all n locations
cttcatccncacatgtgctaagcggcgatgctatatccagcccatgctagtcttagctattaagcatgcatctagaccgacctcttcttttgcaaaatcaactaaataaagtttgccgtctaatacacccttaaaagctagtgaaccatcacttcttctaaagacagacacatctatatttgtaaaaagacaattatatcccatattgcatagttggctaacagatagcaaattgtagccaagagactcaactaaaaacacattagagatagagtgctcattagaaattgcaattntacctaacccttttacctttccttgattcccatcaccgaatataattgaatcttgggaatccttattcttgacgtaggaggtgaacatcttcttctcccncgtcatatggtttgtgcatccgctatcaataatccagcttgaacccccggatgcataaacct

SEQ ID NO: 67502 - DNA, 509 bp, Zea mays
  unsure (1)..(509): unsure at all n locations
tctacagggagatcatatgttaggactaaccgatgtcntgtttttataaagacacaccttgtgtagcgtgccaagcagggaataaggtgggaagcactcatcacagcaaaaatgtgatgacgacgtcaagaccactggaacttcttcgtatggatctcttcggtcccgttgcctatctcaacatcgggggaagtaagtatgatcttgtaatagttgatgatttttcccacttcacttgggtattctttttgtaggacaaatcagaaacccaagggaccctaaagcgcttcttaaggagagctcagattgagtttgagctacaggtgaagaagataagaagcgacaatgggtccaagttcaagaaccttcaagttgaagagtttcttgaggaggaaggcatcaagcacgagttctctgctccctacacatcacaacanaatggtgtggtacacgatgctaatcgacatggcgagaacaatgcttggagagtacatgacgcctgagcggat

SEQ ID NO: 67503 - DNA, 431 bp, Zea mays
  unsure (1)..(431): unsure at all n locations
aagcttgccgatagttctgaggtggtgcgtctgctatttatataccgcgcanagaggaagcgtgctctcacgagcagccgctcccangatgagggccccacagcacacctgccgccccgccacgtgcaattgacagatgtctgatgcgactcggcagttcaagccatcggtcagactctggccgcattatcagcagcagcagctcaacagcagcaagcaccacctcacctcagatgcctcagatcctagagacaacgtgctgaattcatgaaggtcatcacaacgtcgtcactctttgaccctggatgctgaaatgctgccactgggagcggagtcatccgtcaggcgagaccggagaagcttgttggccccgctgtgagagacagccagtctgggggagtttactcgcaccatgccaccacccatactgg

SEQ ID NO: 67504 - DNA, 496 bp, Zea mays
  unsure (1)..(496): unsure at all n locations
taaagccatggtangtagcataggccaataatatacgaattgactcaagcctagctatgggtgcataggtttcaccgaaatccaaaccttcgacttgggagtatcccttggccacaagtcgagctntgttccttgtcaccacaccatgctcatcttgcttgttgcggaagacccatttggttcctacaacattttgattatgacgtggaactaaatgccatacctcattcctagtgaagttgttgagctcctcttgcattgccactacccaatccgaatcttgaagtgcttcctctaccctgtgcggctcaatagaggaaacaaaagagtaatgttcacaaaaatgagcaacacgagatcgagtggttacccccttatgaatatcgccgaggatggtgtcgacggggtgatctcgttggattgcttggtggactcttgggtgtggcgacctttgttcctcatcctccttgtcttnctcatttgcatctcccccttg

SEQ ID NO: 67505 - DNA, 477 bp, Zea mays
  unsure (1)..(477): unsure at all n locations
taagtagcataggcaagtaaaatgcgaattgattctagcctagctacgggtgcataggtttcaccgaaatccaaaccttcgacttgtgaataccccttggccacaagtcgggctttgttccttgtcaccacaccatgctcatcttgcttgttgcggaaaacccacttggttcctacaacattttggttaggacgtggaactaaatgccatacctcattcctagtgaagttgttgagctcctcttgcatcgccaccacccaatctgaatcttgaagtgcttcctctatcctgtgtggctcaatagaggaaacaaaggagtaatgttcacaaaaatgagcaacacgagatcgagtagttacccncttttgaatgtcgccgaggatggtgttcacggcgtgatctcgttggattgcttggtggactctcgggtgtggcgggcttggaacttgntcatcttnctcatcttgatcatgggca

SEQ ID NO: 67506 - DNA, 441 bp, Zea mays
  unsure (1)..(441): unsure at all n locations
ngaagccatggtaagtagcataggccaataatatacgaattgactcaagcctagctacgggtgcataggtttcaccgaaatccaaaccttcgacttgggagtatcctttggccacaagtcgagctttgttccttgtcaccacaccatgctcatcttgcttgttgcggaatacccatttggttcctacaacattttgattaggacgtggaactaaatgccatacctcattcctaagtgaagttgtgagctcttcttgcatcaccaccacccaatccgaatcttgaagtgcttcctctaccttgtgtggctcaatggaggaaacaaacgagtaatgctcacaaaaatgtgcaacacgagatctagtgattacccccttatgaatgtcgccgaggatggtgtcgacggggtgatctcgttggattgcttggtggactcttgggt

SEQ ID NO: 67507 - DNA, 435 bp, Zea mays
  unsure (1)..(435): unsure at all n locations
tcctcacgattcagatatcacanaagtatcttcccctcattgcattgatctgcccttgtttaatagttgattttccgaagacaacatggctcgatctccatggccaattttcagcatcttcatttccactttccacatcgaagctctcactatcgctagttttcagatattctagctaacatctcattggtgatcttctgcacgttggttctttccatggtttcgtaaaatccagccagcgctgggtcaatgatcttcttctcatcagccatatggacaatggttgctagaatgccgaagctcaatatccaatcaaattcgacgaagtaaggaaggttaaaatgacaaacacaatacgagcaactcaaatagcacgaagaatactcacaacacatgcttctatttatatactcagaatcctacagattgggggtc

SEQ ID NO: 67508 - DNA, 453 bp, Zea mays
tactaagcttctgtaacaacaacctcatcttctttgggtgtaggggcgatgttgttctctccaactctcacaatagacatatcatgaaaatatcttcccttcatggcatcaatctgactctatttgatggacgactttccgaagatggtatgacttggccgccagggccgatcttcggcatcttcattcccactttccacatcatagttatcgctatcgtcagaatcttcagacaaatcagctagtatttcgtttgtaatcttctctgtgtttgttttttccatagcttcgtaaaatccagctagagtagggtccataaccatcttttcctcaaacatcttcttctcttcagacatctaacgagcacttgtgtaaatcacgaagttcacaaatcaagcgagatctgacggcaagaaaattaaaatttgagaaaatagcacaagcgattgaaat

SEQ ID NO: 67509 - DNA, 454 bp, Zea mays
  unsure (1)..(454): unsure at all n locations
ggctctgccgagtgtcgtacggagggacttggcaagaagtctctttgtctagtgccagaactcggctctcgacaaagataacggccgtcaactntagacggcggctgacggccctttgccgagtgttgctattcgccgagtgcttagcactatgcaaagatgtctttttgccgagtattttcttatgtcgagagtcttgctctcgataaacatgatcggtaccgagaacagagactttgccgagtacccgaaaaaaaacactcggcaaagagccggannctgatactggtattcacttttttgtgaagaggggccaatctgttcacttaacagcagtcagaaagggttgatcaactcgcgtatgggaatcgagatttatatgggcgtgctgtacgtggactttggcgcggcgtgttacgcgatcgaactggtattctnctacgtaaatagtcag

SEQ ID NO: 67510 - DNA, 483 bp, Zea mays
  unsure (1)..(483): unsure at all n locations
tatgaagattcttcatcccaacatgtgctagtcggcgatgcctgagtctgtccatgttagtcttagcaattaagcaagtgtcgagttcagctctatcaaaatctaccaagtatagctgaccctctaacactcccttaaatgctattgaatcatcacttcttctaaagacagtgacacctacatcagtaaaaagacagttgtagcccatttgacataattgagaaatagaaagcaaattgtaatctaaggaatcaacaagaaaaacattggaaatggaatggtcaggagatatagctattttaccaagacctttgaccaaaccttgatttccatccccgaatgtaatagctcgttggggatcttggttnttcttataggaggagaacattttcttctcccctgtcatgtggtttgtgcacccgctgtcgataatccaacttgagccccggatgcataaacctacannaacaagttagttcttca

SEQ ID NO: 67511 - DNA, 481 bp, Zea mays
  unsure (1)..(481): unsure at all n locations
tatagantnactaagctcatgaagattcttcatcccaacatgggctagtcgacggtgccagagccaacccatgttagtcttagcaatcaagcatgtgtcgagctcagctctatcaaaatctactaagtatagctgaccctctaacacacctttaaatgttattgaatcatcacttcttctaaagacagtgacaccaatatcagcaaagagacagttgtagcccatttgacataattgtgaaacagaaagcaagttgtaatctaaagagtctacaagaaaaacattggaaatagaatggtcaggagatatagcaattttacccaatcctttgaccaaaccttgatttccatccccgaatgtgatagctcgttggggatcttggttnttctcatatgaggagacacatgctttctcccctgtcatgtggnttgtgcacccgctgtcgagtatccaacttgagcccncggatgcataaacctac

SEQ ID NO: 67512 - DNA, 419 bp, Zea mays
  unsure (1)..(419): unsure at all n locations
agatggcgctcgtcatcaagagcttctgctttatttatagcacaggagggggaaggactacaagtcccgctccaagaaggtgtgctacaagtgtggtaagcccggtcattatattgctaaatgtcctatatctagtgacagtgaccgaggcgacgacaataaggggagaagaaaggaaaagaaaagatactactagaagaagggcggcgatgcccatgtttgtcgggaatgggattccgacgaaagctcaagcgactcctccgacgacgaggacgccgccaacatcgccgtcaccaagggactcctcttccccaacgtcggccacaagtgcctcatggcaaaggacggcaaanagaagaagttaaatccaactcctccactaaatatgaatcttctagtgatgataatgctagtgataa

SEQ ID NO: 67513 - DNA, 421 bp, Zea mays
  unsure (1)..(421): unsure at all n locations
tctccttttctnggctcatattttctgactgtgtgagtaatttattctntaaactgtcattttcggcttggacctcagccaaggagccttccatagactgaataacaaagtctttcttttctagggcaccttcgtgttctttagctatgatttcaaggtcttgaatggtgaagtacttcttcttcagaacagcttcgtgattntcaactttttcttctaaatccttgatgatagctttattcttctcttcttcaagatcttgttgcatttttagcactttacttaatagtatactctgccaaaacaaccttcgtcagataacgacatataaataaaaataataataaaataataataatattttttaccttagaattagcatagagcatgctaccggcgatatagtgtcgctggtacctgc

SEQ ID NO: 67514 - DNA, 383 bp, Zea mays
  unsure (1)..(383): unsure at all n locations
cacgacacgaagaccaccctcagacagatctgttgtctaacgtcgcaaacaaggagataggggcgtatctctgttgcgccaccggaggaccagcccatacttcctggttaaatggattcctactttgatctacatggagctacacgccatgccctttgggtggagcagagacgatcccgctgcctcaggggccactcacataaagaaatggatagcactactatgcgatcgagatgccttccttgnggagggacacgaggcggnngactagccccgganaatgccaagcgctaccacaacaactgccaaagcgaacacgagatcgacgaggacaactgggtgtgacttcgcttccaccaaccgacgcatttgcaggagtcttg

SEQ ID NO: 67515 - DNA, 445 bp, Zea mays
  unsure (1)..(445): unsure at all n locations
tcgtcagttggagccttaatggacttagcttcgtaggcatggtttcattcattacctttaaaatatcctccacgtcgctggtagaaggctgtgtgggggtcccctcttcttctggtgatttgcgcttcggagcagatatttttccttttttgagaatcttcttctcctttgctggtctttcttcgtccgtgatcggagtttcggctattctttttcttttaaggccctcggcacccttggtcaataggtcatagacaggggatncgaagcctaggggcgcaagcactcggttcaaccttcgtttcggtcgggcaccgaaggctgctgtcattaattgatcctctcttttggagtaattccccaggattntcgtgcacatcacctcaacagtgtctaaccattctttgcacggctttntgaagaacttcttgaacttgaagtaata

SEQ ID NO: 67516 - DNA, 473 bp, Zea mays
  unsure (1)..(473): unsure at all n locations
tcttcaccatgtgatcacngntatcttgagaaggttgatctatgcacttcccttttagttgtgtcaagctcattgttagcctctcattttcttccttgagcttttgatatgtatcatcatttgttcctgcaagttctagctcaaaagaagatttgcttgtcgacgaacaacaagcattagcacatggtaatatagtatcaatttgaatacatgtgcatgagtgagggttgtgagattttaaattttctatcacaacctcatgagcaatgtttaatatgatatgatcatctctaagattttcatgagagcataggagcatatcatatttttcttgaaaagctagatcttcaattgttagcttttctactcggtccttgagcaaagtattcctatctactaattgagcgatacaatgtgaagcgttatcttgcttcaattgaaatagttcatacctttggaccaaatcaacatga

SEQ ID NO: 67517 - DNA, 489 bp, Zea mays
  unsure (1)..(489): unsure at all n locations
cagcaggacattgtatgcaggtggcagcagtgtgatgatctggcatggcactatgaagcccatggagtcagtcacttcatctccagcttagaccaaattaacaacaccatcgagcaatttgcattccagccaagcacaattttattagtcacccacacaaatcctggacagggaactgaatcgaaaggaattcgagttgtagaggaaaccactcgctgctactgctagaaaacaagcatgatcatgaaaagtgatatggacaatttccaaaattatgagaaagccacttaccccttttgctgctgcagacatgatgaggtttggccagagttcacttttcagaagaagtaccaaacttggcttccagtatccaaaaaaactatctattgcagtaggacagtcaagaggagcaaactacacgcataaaanatgaggttggaactntggaagggagaaataaacacggcatgcaaaaattgcacatgaagc

SEQ ID NO: 67518 - DNA, 481 bp, Zea mays
  unsure (1)..(481): unsure at all n locations
cctctctcatttcttctccctaaccatggcagacaacttctatttcatcatcgccccacctagacatcggcgtgattagacattcagcattgaaacgaaaatgtgctagatagtcatntttatctgttttggtgattaaatgttcaacacaccactttagactaataagtttatggagtgtttggtttgaggaatcactacattcaagatgaggtggngcatcatgagtctattcttcaaatttaatggaatgaccgcattcctcatattagtactaactaattataaggaatggggtggtgatggatcaactcatttcattccacaaaccanacaaaaagtggggagtgagaagatggactagcttatntctcaaaccaaacacctcattaatatgagtacgagcatangtntaattgaaggcactaagtccattgagctaaaatagaggctacaaagtacaacttgtggtaaaatagta

SEQ ID NO: 67519 - DNA, 292 bp, Zea mays
  unsure (1)..(292): unsure at all n locations
acaagtgggaggagcacatcacagcaagaacgtaatgaccacttcaagacccctggagctgctgcatatggacctcttcngacctgtcgcctatctgagcatangaggaaagaagtatgggttagttattgttgatgaactttcccgcttcacttgggtgttctttttgcaggaaaaatccgaaacccaagggactctcanacgcttcctcaggagagctcanaatgagnttgagctcaaagtgaaaaagataagaagcgacaacgggtccgagttcaagaaccttcaagtg

SEQ ID NO: 67520 - DNA, 483 bp, Zea mays
  unsure (1)..(483): unsure at all n locations
tagcgtaggcaagtaatatacgaattgtcttaagtctagctacgggtgcataggttttaccaaaatccaaaccttcgacttgtgaatatcccttggccacaagtcgggctttgttccttgtcaccacaccatgctcgtcttgcttgttgcggaagacccacttggttcctacaacattttgattaggacgtggaactaaatgccatacctcgttcctagtgaagttgttgagctcctcttgcatcgccaccacccaatccgaatcttgtagtgcttcctctaccatgtgtggctcaatagaggaaacaaaagagtaatgctcacaaaaatgtgcaacatgagatctagtggttacccncttatgaatgtcgccgaggatggtgtcgacggggtgatctcgttggattgcttggtggactcttgggtgtggcggcctgggtcttcgtcctccttggcttgatcatnttgcatctccccttgatc

SEQ ID NO: 67521 - DNA, 423 bp, Zea mays
  unsure (1)..(423): unsure at all n locations
ccttgatactcaagctttagcgttggttccaaaccttggcttctcgcagcccagacataaatccccattcttataatagcttcgggagtgagttgatgaaggtagatttggaatgttttcagtacctcaataacaaaattgctcacggggaatcgaagcccagccttgaggaggcttcggaaaatcacaacttcatcctcttcaggggtgggagaagtcttttccccggcgtcagctctcacaataaacatgncncggaagnancgcccccncanaaaacaangngactctgcttgatgggtgttttcccaaatactgactgacttggtcgccactgtcgatcttcggcctcttccccatcactttccacatcatagctgccgctgtcatcagtatcttcagacaaaccttcaagaatctcct

SEQ ID NO: 67522 - DNA, 477 bp, Zea mays
  unsure (1)..(477): unsure at all n locations
tctaaagagagagcacattntnggactaacaaatgttcattttgataaagacaggatttgtagcgcatgtcaagcagggaagcaagttggtgttcatcatccacataagaacatcatgacgactgatagtccgcttgagctactcgacatggatctattcggcccgatagcttacataagcatcagcgggagtaagtattgtcttgttattgtggatgatttttctcgcttcactcgggtattctttntgcaggataaatcccaaacccaagagactntaaagggattcttgagacgggcacaaaatgagttcggattgagaataanaaagataagaagcgacaacgggacggagttcaagaactctcaaatagaaggatttcttgaggatgagggcattaagcatgagttctcttcttcctacacaccacaacaaaatggtgtagtggagaagaagaataaactctacttgacatg

SEQ ID NO: 67523 - DNA, 419 bp, Zea mays
ctcagctttgagaagaacaagaaccttcggctacaaagaatgtatatatgtctgaaaagcgaacgattggtagcacgatgcaagctattgaaaagatgcctccttcggccatcgtatctaagatagcacctactgcaagtaccgatgccactgctgaagcaaacacatctgcctaagctacaggtgccaccgaagctatcaacctatctaccgaagctgcagctgccaccgaagctaccaacctagatgctaccttgtatggattgataaattgttattggatatgggcacataagaaacagttacagctgcggaacatgtcatggccccagtgcctgacaaaggaaagaaaattgctgaagctaattcggctgaagaaagttttgagcttcggaacctgatcggataggaactatctg

SEQ ID NO: 67524 - DNA, 424 bp, Zea mays
  unsure (1)..(424): unsure at all n locations
ctcagctttaagggaaacaggaancgcaactatgtcattttttataaagaccttgtgcagttgcaagcaggtcaacaggtgggaggagcgcatcacagcgagaatgtgatgaccacggtaagacccctggagctactgcatatggaccttttcggagcccgcgcctatctaagcatanggggaagtaagtatggtttagttattgttgatgatatttcccgctatacttgngtgtacttttagcaggataagtctgaaacccacaggaccctcaaacgcttcctcaggagagctcagaatgagtttgagctcagagtgaaaaagataataagcgactgcgggtccgagttcaagaactctcaagtggaggagttccttgaagatgaagggatcaagcacgagttcttcgctctctacacaccac

SEQ ID NO: 67525 - DNA, 518 bp, Zea mays
  unsure (1)..(518): unsure at all n locations
ctcagcttcgaggcacaggataacacacatgcaagcaagagcaggctattaccacctacatgtgtcctgcagatttacatactatgctagtagcaagacctcgggcagcacatgctaggttcctgctagtctagagagatagagagagagagactagagagcaaatcgagctaggataagcaaaaaattcccaagctagcaaatgattctaaaccgaagaggcaaaaaaaattacaagccacatggcttagaaactactacctctattttcttttatttaacgcatgatagttcaattttacactagcaaacgtcaaataaaaaagatcagagggagtacgaaacaagatattccatacaaccatctaataccataatcaccaaataaaagatcaaaaagttgcaacaaaataaacaagatcacatggctagaaattaagtttgagattgagcatttgtggagagagctctctcatctatgaatatcattaanactgagttgcggaataagacaggag

SEQ ID NO: 67526 - DNA, 505 bp, Zea mays
  unsure (1)..(505): unsure at all n locations
tcttaccatgtgatcacggntatcttgagaagggtgagcaatgcacttcccttttagttgtgtcaagctcatctttagcctctcattntcttctttgagctttcgatatgtatcatcttttgttcctgcaaattctagcttaaaggaagatttgcttgtcgacggacaacaagcattagcacatggtaatatagtttcaatttgaatacatgtgcatgagtgagggtgttgggaatttaagttttctatcacaacctcatgagcaatgtttaatatgatatgatcatccataggattttcattagaatattgaagcatatcatatttatcttgaanagctagattttcaacttttagagtttctacttggtccttaagcaaggcattcctatgtactaattgagcgatacaaattaaagagttctcttgctcaattgaaatagtttcataccgttggaccaaatcatcatgagagcactttagcttcctcatgtctttagtcaac

SEQ ID NO: 67527 - DNA, 477 bp, Zea mays
  unsure (1)..(477): unsure at all n locations
tggagatatgagtcatcccttcacatctctggtgtggagttatgagaagntagatccacgtttgcagagatgcttcttgtattgcagtttgtttccaaaaggtcatagatatcaatctgatgaattggttcacctctgggtggcagaaggatttgttggttcatgcaattggagtaggagaacattggaagagattgggatggattacttcaatgatatggtctctgggtctttcttccaattggtttctaaaggatgttattcgtactataccatgcacgacatccttcatgatttggcagagtcactctctagagaagactgcttcagattagaagatgataatgtgacagaaataccatgcactgttcgacatctatctgttcgtgttgaaagtatgcaaaagcataagcaaattatctacaagctacatcatttancgcactgtatctgcattgatcgactaatggataatgc

SEQ ID NO: 67528 - DNA, 502 bp, Zea mays
  unsure (1)..(502): unsure at all n locations
tctanaggggagaacacatttgngactaacaaatgttctttttgagaaagacagggtttgtagcgcatgtcaggcagggaagcaagttggtgttcatcatccacacaagaacatcatgacgactgacaggccactcgagctcctacacatggatctattcagcgagattgcttacataagcatcagcgggagtaagtactatctagttattgtggatgactattctcgcttcacttgggtgttctttntgcaggaaaaatctcatacccaagagaccttanagggattcttgagacgggctcaaaatgagttcgacttaaggatcaaaaagattacaagcgacaacgggacggagttcaagaactctcaaattgaaggattccttgaggaggagggcatcaagcatgagttctcttcttcctacacgccacaacanaatggtgtagtagagaggaagaatcgaactctattggacatggcaagaaccatgctngatgagtac

SEQ ID NO: 67529 - DNA, 465 bp, Zea mays
  unsure (1)..(465): unsure at all n locations
ggcattggatatctaaattctagtgttgcatctatgacttgtctattctatttgagatagccgccaacanagcgagtgaaaaagcttaactcaggctcaaacttgacaagttctagctnttaagctntttagtacttgaattccctttactatgcaattgttggtttttgagatgtgcacgtggtactgcacttaggaggagtattgtaatacctactctgtgagaaaaaaatcaaaaaggagaaattatttcttttatctctatgtgtgtgttgtctccattcaccatcccatgtgaaaacctcatttaaacaaataaataaataacaaaagacacccaaaaataatacatgcatcatgctgggatcttatnttgtgtgcattttgtgacaacatataataatttgaaaagaaatatattaattcccaaatggggatttaaatcctaaaggagattctaggatt

SEQ ID NO: 67530 - DNA, 507 bp, Zea mays
  unsure (1)..(507): unsure at all n locations
tccgcagaagcgagagctgacatcttcgtggattccaaaacaacctctaatacactagtcggtctcctttttttggagtcagctgcagaaacacttgatggcttcgacagttctattgtagttgctgggctcagtaccttcagcagttctactgccttatctaattntggctctttggtcggatctgtacaagttttgattggcatgacaggacctgattctgtggcagaaggggcagnttctacaccttcaataagctntggcacatcggccgtctcaatgcgtctcggtctacgtgtcaagaccttcactttcttcgccttcgacgcactagaggatgccgaaacagcaattttcctttttctcacttgtttccgaacatganaacagtaatcagggtagacaaacccgataacatcaaaaaccatgtttagcctctntntccctcgagcgccgaaggcaaccattatagtttcgtcttcagccttcgagtagggctcaagtatc

SEQ ID NO: 67531 - DNA, 452 bp, Zea mays
  unsure (1)..(452): unsure at all n locations
taccgacacagcatatcggcggagtttattctattctaacttcaaggtaaaaactnttctttgacttttcattggttttaacaacgaagggtgttgctgacgaagcttgcttctacacaaagtatgttgttaagcaaagctttgaggatgcaataggaccttgacgacnaaaaacatgagatcataatngaaggtttagaaggaaaaataaaagatcaagcagctgctcttgaaaagaaagatttcgaacttcagacaatggatggcttactggcagaagctaaaggcaaaattgcaaagttggataaggagcttctctcanaatcagaaagcttcgaacaagaaaagcagaaatttgatacaaagtttgaggctgaggtcgaanaaagttcannatttgcaaaatcattgaaagaacttcaagatanatgtctagagttcagcaaccgatg

SEQ ID NO: 67532 - DNA, 399 bp, Zea mays
  unsure (1)..(399): unsure at all n locations
tcacatatctcacttggaaaacatagcctaatcatgtttttgaggaccttcggaagccgaaggcccccaacagtatcccctcgcaatattaatttataaatgataaattcatattgcgatatggacgaaggccctaagtctaaggtccgaanaaacaccttccctttgctagaatagcaatagtcattgacaagcgggaccctccagttntcaacgcactaggtgtataaataagagctcactacgtgtttatttggcacgctcttcttgccatctgcgctngctcactcgactnttagcccttgcgcaacaacacttgcttggctttttaaatatttaagcttgngtttcagagcactttctcagcattctcgaagatgtctgatgataacaaagttg

SEQ ID NO: 67533 - DNA, 421 bp, Zea mays
  unsure (1)..(421): unsure at all n locations
gtctagcagtatttgatcaatatgttcaattgtgctctccacgttcaaatcttcagctgaggcagcttcggcagcttctgcagctgcggcctccgaaggtgcaatttcaatatctgtcccctctgcagctgccggtgttntctgggctgaagctcttggcggcgtcttgtcaattacctctgtcacagtgacaattctttgtttctttgccttgattgttttcttcgacttttcgggctccttgtccttctgaagaaactctgtcagttgagggcccagtggacttagcttcgtaggtaaggattcagtcattaccttcagaatttcctcaacgacagcagcagaaggtgatgcgggggtttcttctgcttcngatatttgttgcttcggagaagaagtattctcttctttgattttcttc

SEQ ID NO: 67534 - DNA, 458 bp, Zea mays
ctcagcttcgacctctggctaactcggcggcgtcacttttcgctgttgtgtcttagaatcccgacctgaagactttcccgactagtgtcttggatgctgcgtgtattccacattgtccagcatgaacctcatccataagttgcttcccagtagacgatagaatgcatttcatgaagatgcttgatgcgccccttctgtatagtgtctccccaatgagtgtgtagtgagccgactgtctggcgatgcgctcagctgcatttttatcgtctggctcctcttcattctttatatatctgatgatcggccttctccagtcattagagcttgactctggctgattcacgatataacattcttctgcctgatccattgagatgcttggttgtggtatttcttgtacaaagactccgggtgggacttgagttcgactggatcctagcttggacaatacatcgact

SEQ ID NO: 67535 - DNA, 506 bp, Zea mays
  unsure (1)..(506): unsure at all n locations
cttgaagtatntgaaagggcaagncaaactgaaccgacgtctttctttatgggntgagtttatcgaaacatttccatacattgtgaaatataagaaaggtaacgacaatgtggtcgctgatgccttgtctcgaatgaatgtgttgctgaatcaactagaggtcaaagttttatgtcttgaaaatctgaaagaaatgtataatgatgatcccgaattttcagaaccatacaatcattgtaaagatgganaaggttgggaaaaatatcatatacatgatggattcttgtttatagctaacaaactttgtgtaccaaattcttcggttagattgctgttattgcaggagtcacatggaggtggtctaacaggtcattctggataaaagaagacttatgaaatgctcagtgatcatttccattggcccaagatgaggagagacatcatcagaattgtggagcgatgtgtcacctgtcacaaagctaagtcataattgaaccctcatggtt

SEQ ID NO: 67536 - DNA, 481 bp, Zea mays
  unsure (1)..(481): unsure at all n locations
tgcagtaagcacatgttcaacacttagcacatatgtctgtcctttaattgngttgtcatccaaactaccaaaacccacaacaaagctttcagttaggtttggaacctaggttgcacaactctttgtggtagaggtagcaacacaattagtcaaaaactattatttcacatagatagtttatttattgcttaggtttttatgaggcaaaaattagaggcttcagtttgtggaatatgtttcctaattcccttcttataggcaccatagtctctttagttggtatcaaagcatatgcctcaacttgaaccttttggcttaaccattgttgagtagatgctatttagagagggaagtatagatacctctatgcctcgacactttgaggacactaccttcccctattgaagtgctagaatagaatgcaacttagaagctattgatctacgtatttagaaatccactcatgggaaaacccctaaat

SEQ ID NO: 67537 - DNA, 492 bp, Zea mays
  unsure (1)..(492): unsure at all n locations
tggatattcttcatcagaacactatggatattggtgtgataaatgaaaattcttcttcacgaagcatgaaaagaagggaaggtgttttttcgtcaaagactcaaaaatggtacgtatgtagaatttcatgcatcgtaaagaattgaatcataagaaacaagtatattacattcagggttacaagatattacacatattacatttcagatgtttttataatagcacctagtcttccctaagtactacttccgcagcttcgttcaggagttgattgacaactcgatccatgatagcttcagccatctttttaatttcatcgtcttcctttgggtgagggcccgaagacgctntagtaggatctgagggaggacaggatacggctacattgctattacaaattgcgaacgaagtttaaaatcacaaattacagcacaataaanaccattagttaatacctatttgcccttcgggctctgcagctttctcaacagc

SEQ ID NO: 67538 - DNA, 480 bp, Zea mays
  unsure (1)..(480): unsure at all n locations
agtcaagaggcacgccccaatatattttgtattctaggttcttagtttatcaaagaaaaattatacacagttggagaaggtactgtatgctgtcttgatggcctccacgaagcttcggcactatttccaagcttacaacataattggtccttcttcacaacctctgaaggatattatgaggaaccgagaagctactggaaggattggaaaatgggctgcagagctcaatgaattttgtattgaatatgttcatagatcttcgattcagtcccaggcgttggcagacttcattgctgactggacgccaggggctcaggaggaagaaacgaataaagacaacgaagcatggacagtgttttgtgatggatcttgnggaaccttcggagcgggagcggcttgctgtgtggtttcaccttccaaagtcaaaacttggtatgcggcaaaactttgatttagttgcacaaataacattgccgagta

SEQ ID NO: 67539 - DNA, 489 bp, Zea mays
  unsure (1)..(489): unsure at all n locations
ctcagcttcgacctctgactaactcggctgcatcattcttcgctggtggcctatataatcccatcctgaagaccttcccgactagtgttctggatgctgcatgtattccacattgcccagcatggacctcctccagaagtcgcttcccagtagatgggagaatgcacttcatgaggacgcctgatgcaccccttctgtacaatgtctccccaatgagtgtgtagtgagccgactgtctggcaatacgctcggccgaattcttgtcatctggttcctcttcattctttatatacttgatgattggccttctccagtcatcagagcctgactcaggttgatctataatattacactcttctgtttgatccattgagatgctcggctgtagtatttcttgcacaaagactccaggtgggacctgagttcgactggatcctagcttggataatatgtcngccgctgtgtccgatctcttctacatgatgaaac

SEQ ID NO: 67540 - DNA, 469 bp, Zea mays
  unsure (1)..(469): unsure at all n locations
atctttggtgcttcttcaccctgagccgctggcgtncaattctcaatgaagtctgntaacgcctgngattgaattgaggatctgtgtacataattaatggtgaattcattaagttcagcggcccattttccgatccttcctgtagcttctctgttcctcattatgtctttcaggggtcgtgatgaaggcactattatatgacatgcttgaaagtaatgcctaagcttcctagaggccatcaataccgcatacagtaccttctccaattctgtgntaatttttctttgataggttgagtacttcggagatgaagtgtaccggtgcttgtctttttacttggccatcttgcttctcctgtacgagtgccgcactaaccgcagcatgggaaacagccacatacagaagtagtggagttcctgatgaaagtggagttagagttgtcaagtctatcagatacctgtttaactct

SEQ ID NO: 67541 - DNA, 498 bp, Zea mays
  unsure (1)..(498): unsure at all n locations
actaagctaatgccctaagaaattatccaacttgtaagggcaaagctcttatctttcacgataacgagggttacattntatatcctgctggttatcctgagcacaaaattatgagaattcatgctacgaagtctcattctgtttctcaccatgcttatatgtataagaatgaggcatctagtactaagcaatcaatccatgttaaattgcctaaaaagaaatctcctactgcatcaaatgagcctattggttcatttaagactttngatgcttcttatgtgctaactaacaaatcaggcaaagtagttgccaaatatgttgggggcaaacacgagggctccaagacttttgtttgggtacccaaggtacttgtttctaatgtgaaaggacccaagaccgtttgggtacctaagaacaaggcctaaacttgttntgtaggtttatgcatctggnggctcaagttggatcattgatagcggatgcacaaaccacatgact

SEQ ID NO: 67542 - DNA, 499 bp, Zea mays
  unsure (1)..(499): unsure at all n locations
tgtgcgaagtcctgccttcgcgctngatctgcatagccgcgatcctgtcgnctttgtgcgtgaggcggaagatggggcggtgcggatcgttggtcggtacgtgccgaggacagagggccaacgtagctgggatattcgcgggtcgaatgaccgcttgaacagggtttttgagttgaatcgtctgccatatggcggntatcccggccaagacgatgtggatcgtcgcgggaagaaaccggtggtagagtctggagacgaccccgcgccggcggccgccccgtcctctaagaagaggaaactaggtactgctatggaaggacttgnggtttccgatggttttgctagaagaatgatgaggacatgcgcggccccggggggaaggatgtcttcgcccgagcctccggagtcttcggcgcgtatgctgagggttaccggnnggtggtggcctaagaatgttcctatcccccgcgcggncngcgaggactnttttacatctcgt

SEQ ID NO: 67543 - DNA, 416 bp, Zea mays
tcagcttatgccctcctaaagatatctaactttgtaagggtgatgctctcatgcctcaagataacgagggttatatattatatcctgctggttatcctgagaataagattacgagaattcatgctaagaagactcattctgtttctcaccatgcttttatttataagaatgaggcttctagctctatgcgttctacacatgttaaaatgcctaataagaaatctcccattgcatcaaatgatcatagcatttcatttaatacttttgatgcttcttatgtgctcactaacaaatcacgcaaagtagttgccaaatatgttgggggcaaatacaaaggctcaaagacttgtgtttgggtacccaacgtgcttgtttctaatgtcaaaggacccaagaccgtgtgggtacctaagaac

SEQ ID NO: 67544 - DNA, 492 bp, Zea mays
  unsure (1)..(492): unsure at all n locations
aactcagcttctaaggaaacacgtgaaggtctaaccaagttctattcttaaagatagaccttgngcagcttgtcaagcagggaaacaggtgggaggagcgcatcacagcaagaatgtgatgaccacttcaagacccctggagctgctgcatatggacctcttctgacccggagcctatctaagcatagggggaagcaagtatggtctaattattgttgatgacttttcccgcttcacttgngtgttctttntgcaggataagtctgaaacccaatggaccctcaagcgcttcctcaggagggctcaaaatgagtttgagctcaaagtgaagaagataatgagcgacaacgggtccgaattcaagaaccttcaagtggaggagttccttgatgaagaaaggatcaagcacgagttctccgctccctacacaccacagcaaaatggtgtggtagagaggaagaacaggacgctcattgacatggcgaggacgat

SEQ ID NO: 67545 - DNA, 505 bp, Zea mays
  unsure (1)..(505): unsure at all n locations
tggtgccgatggagaagcagaaatccttgagatcttggctatcttattgcttgccgntgtcgactgtgagttcggacgggactccaaagcggcaaacaatattttgcgagaagaatttctgggctgtcttcgttgttatcgtggatacagccctcgcctcaatccatttggtgaaatactcaacggcaacgaaggtgaacttgaggtttccctgagccgtgggcaggggtccgacaatgtccaggccccagcgctgaagaggccacgtgtgggcgattagcttcgtgaattgcgaagggcttcccgagcgtggagaaaatttctgacaggcttcacaggaccttgtgacccgatttgcggcgcanatcatggcgggccagtagaaaccttgacgaatcacctttgccgctagggccctaggccctgcgtgggagccgcaagtcctggtgtggacttcgcacagaatttggacgccttcggtctcggtgacacacttaagcatcgg

SEQ ID NO: 67546 - DNA, 484 bp, Zea mays
  unsure (1)..(484): unsure at all n locations
tgttcccggttggattngagaagagaagctcactcggtctctggtgaccgtngagagagggtaagggttgaaagagacccggcctttgtggcctcctcaacggggagtatgtttgcgagaaccgaacctctgtaaaacaaatccgcgtgtcacactcttcattcgcttgcgatttgtcttgccccctctctctctgactcattattatttctaacgctaacccggcttgtagttgtgattaattttgtaaatttcagtttcgccctattcaccccccctctaggcgacttttagatccaacaattggtggacaagaatctgacagtggttctgctggtttgacaggaaaaaggcctcttggccgtgattctagtaaatcagagagaaagatagctgcgtcatcatcgtcgacggaatacttaagctgttngcacgatttaactganaaacaaattcagcactgcatagaanagggtgagaagca

SEQ ID NO: 67547 - DNA, 447 bp, Zea mays
  unsure (1)..(447): unsure at all n locations
tccttgcgcacttgntatgtcaaacaaatgttgcttggtgtctatntgcgcaaaccctatcaaggccatgtgtctttccataaatcctgtcccgaaccttcataacctttctggtgctcatcctaatcgatctcatgcgactacctctcttttcacctggatctggagatctttttcttgtgaatcatgttgtggctctatcatccgaatctctggatccttcattgatactgccccattatctggntatctgctataacctgttctcaagtaccggatgtcgatcaatctaattgaaagtcgcctagagggggggtgaatagggcgaaactgaaatttacaaatataaacacaactacaagccgggttagcgttagtaatgaataaacgagtccgcgagagagggtgcaaaacaaatcccaagcgaataagctagtgagacacgga

SEQ ID NO: 67548 - DNA, 471 bp, Zea mays
  unsure (1)..(471): unsure at all n locations
ctaagcttatccacaaccttattcctaagaatgactggatctcttgtcgttattttcggtgcaccgctattattggtgaagttctgcattcctacgaacgtttttgaacttcttcgcctttatttcgacggattcgcgtgacttttcgcgcttcccttatatttcggcggatctaactctgcattcctaagaacgacttttgagcagaaacttacgctgcgctcctttgaacggcttttgaagcttcgacaaacttacgctgcgctctttaaaacgacatttgagctcggtaaacttttactgcgattttagttctgattcctgaggaatatctcttgtagcttggcattctcgaagtctgtgaaaaggtatatttcattttacatanacaaagctagtacaagaaattaaaanaaataacaagaaaactacggttacattgattggtcttattaaaaagaatacaacagt

SEQ ID NO: 67549 - DNA, 502 bp, Zea mays
  unsure (1)..(502): unsure at all n locations
tccataggtactacatcgcaatccgcataatcagaatacatactcaatggagaaatgcactcgtaccatgtgtgttaccttaaccttgtctgaatcattgatccactgaatgtggtatggatgtggtcgtggacgtgtggtcagaccaagcttcttgaccaaatctgaactcaccaaattattgcagcttccagcatcaataataacacgtgcacgccgattctcgatggcgaagaaagtctggaacaaattatggcgttgctgcttctctgatgattcaggctgagcactaagaacacgctacaccatgatgcttcgaaggttcaccgtagcatcaacaccaagcatatcatcatcattagcagcaacatcactggagtcatcatcgtcatcctcaccgtcggaagcactaatgtagccatcatccgtagcaatgtatgttcgctgactcgggcaatccttcttcacgtgaccaatcccatgacagcggtggcanacaata

SEQ ID NO: 67550 - DNA, 444 bp, Zea mays
  unsure (1)..(444): unsure at all n locations
tgcgccgtcaaacgcttcaggcttaatgacatcagaactggaagccattatacgaattgggtttctggagtggtgtaaacttagagaaataagtgacatgcttccttcatatttaaataaaataaatattctaattccgaataaaacaagcatataactcagatgaatgccatatgcaattataccagcaatgaacagtagcaatttcagtaattgaaaatatgaaatatagctactcatgtccatttgtaaattaaacataccttgtagatgaagaaggcagattaaacaaataaacatgattgtttatcttaaaatattgctctcaaaatagcgggttactgcattagacagccctccaacgcaaaaagggtgatcaaagatcctcgactaacgtgacggtcctatcttaccaaatcacggttntagatcagatattataag

SEQ ID NO: 67551 - DNA, 394 bp, Zea mays
  unsure (1)..(394): unsure at all n locations
actccacagattcttgtaaatatattgtttctatcccttgacgattntagttggccatatatagccaaccatgggtgttctctatgcgacttgtaaaatagttgttgaataattagacaaattgcagattaaattccgaatataaatcatgaccaaatcagaagaactgaagtaaaaagctaaatcagatgatgcgtactgattagacatactgatagatggcgcgcgccagaatcagcagggtcgacgacgtcgaagcacgcggctcagctatgaagagaggcgaaagcgagactgtgatgatctgaaaggaagtcgcgcccccgcaaggcgaggggccggatttcggcggaccattcacgcgcatgtcgcgcccgcgcccttcgccccgacc

SEQ ID NO: 67552 - DNA, 443 bp, Zea mays
  unsure (1)..(443): unsure at all n locations
taggggacagnggacacangangactacaccgacatcgattctgtcttctacgaagacacggcgtacaaccaagacactcgagtggggacacaagtggaggcagcaccgatcttggaccgagtggtactggttaaaacttgttactcaattcgaaatgcacaaaatatgacatctatgtaatgccaatatgattgaattcttttgcagggcaacacactgaaacggtcggtacaagacatcgagcgcttctgttcgacaatcggcaacaacaacacgcgtaccttcctggacataagctnttaaaacaccttgctatccaaaattcgatacatgatgttgcttagcatgtnnttggcccacagcgcttagccaaccgcctacgcagatgcggcactcgttgtggctgatgaccaccgtgccatgggacatacacgttcctttc

SEQ ID NO: 67553 - DNA, 495 bp, Zea mays
  unsure (1)..(495): unsure at all n locations
ttgtggtctctcaagatgggttgatgttgaatgaaagaagattccacagaaagtgttacgccattttccgttgatacctatgctacagaggatgtttgtgaacaaagaaacagcagaacaagcacagtggcacaagctgaagggaaatcctaaggaaaatgaaatgagtcacccagctgatggtgaggcatggcaagattntgatagaaaatattccaaatttgcaaaagatgccagaaaccttagacttggcttagcaactgatgggtttaaccccttttcggaaaaaaacactaaatacagcatgtggcctgtacttgttgtgccatacaacctttcaccttgggcgtgcatggaggagtcaaatttcatgatggctntacttattcctggtcctacatcacctggaaaggacttcgatattnttttagagcctcttatagaagaattacttgagctttggacaggtgtacctacttacgatgctctaactgg

SEQ ID NO: 67554 - DNA, 497 bp, Zea mays
  unsure (1)..(497): unsure at all n locations
aagcttctctcgaaggtgtttctgtcaagaatattccaagaggtgaatatgatcatgcagatctgctagccaaatcagcggctcatgggctccctctaccttcagaagtattntttgaaacaataaaggcaccttctggtgaactcatggagagaacagagcttgctatttctctagtatatagtgaagattggaggactgaaattatatctttcctccaaggtaattgtctttcggatgacgaagcttataataagagaatggaagcaaggacaagacaatatgtgataatagaaggggaattatataaacatggagtctgttctccactcctcaagtgtttatcaagagctgaaggtattgaattaatgaaggagatacatgcangtctgtgtaaatcccatatcgggtctaggcccttgctgggaaaagtatttaaataaggattttactggccgaaagcatcttcngatgcagcagagctagttcaaaaatgt

SEQ ID NO: 67555 - DNA, 481 bp, Zea mays
  unsure (1)..(481): unsure at all n locations
tatcggcgacgacccagctatctaaagtggcttagtgcgacatggttaatggcctgaggcatggcacaaccgcggtgaagggcacaaactccggtaacggccgcttggccatgtcgctggcgcaagtaaatgggtgacaacatggctatagggttctgagttcatccgaggtgaagatttttcctgggtgatcctaatccatgccacagagggcacgaatcgcggcgccggcgcaaatccgggcgcacggttcaccgacggcaagggggatggacctatgatatttttgcgtactgtaccatcagagtctccttcagttgttctgacatagcttcttcagaggtgttttccttcaatttttgtgtaacatgttaccaatcggattacaacaaagttgttaacttatgaacatgctntaattcgatcatagggactntggtcattcactcactcgatcaagcaaaatcagcttttaaactca

SEQ ID NO: 67556 - DNA, 330 bp, Zea mays
  unsure (1)..(330): unsure at all n locations
cgcatacatcangaatgctgatgaccacataccgacccctggagctgctacatatggacctcttctgacccggcgactatctgagcataagaggaagtgagtatggactagatattggtgatgacattatcacgatcactcgcgtatactatttgcatgataagtctgatacccaatggaccctcaagcgctctctaaggagagctcagaacgagtttgagctcatggtgaagaagataacaagcgacaatgggtcccagttcaagaaccctcgaatggaggagattcttgaggaggaagggatccatcgctatttctacgctccctaca

SEQ ID NO: 67557 - DNA, 470 bp, Zea mays
  unsure (1)..(470): unsure at all n locations
ngaatctggattaagcgccatgacgaaagaagatctcgctgtttgtcttgcgtacaacagcctgaaggtataggaattaaacacttgaaaaatccccttatttttacgcaactcattccttttttcttatatgaattctttttcgtatatggcctgatcctaagcaacgcactaagagcccaaaagagcgccgaagatgaaagctatgaaattgcgtttaataatctacgctccgaagttatcagactgagaaacgaagctttggaaaaagataaaattctgcttacactggtagataaagcgaaaaaagacgaagctgcttcaaaggcccaggccgaagctcacaaacgcgagattaaagatcttcagaaacagctggctagagctaaagatgagcgcgcgcttgacgaaacgaaacgagaacttatgtgatttatggtcagcacattggaatcaaaagttaatgagct

SEQ ID NO: 67558 - DNA, 497 bp, Zea mays
  unsure (1)..(497): unsure at all n locations
ctaaagctctctatgggcttaagcaagctccacgcgcttgttatgaaaggcttanggatatcttgctttccaaagacttcaaaatcgggaaggttgacactactctattcactaaaagaattggcaaaaacttatttgtttgtcaaatctatgttgatgatattatttttggatctactaatgaattattttgtgaggagttcggaaaaatgatgtcaagagaaattgaaatgtctatgataggagaattgagcttctttcttggccttcaaatcaaacaattgaaagatggaatttttataagtcaatcaaaatatttgaaggacatgctcaagaagtttggtttagaaaatgctaagactatcaagactccaatggcaacaaatggtcatctagacttagatgaaggaggtactatggttgatcaaaaactttatcgttcaataattggtagtttgctttatattaccgcatctangcccgatgtctatgttagt

SEQ ID NO: 67559 - DNA, 471 bp, Zea mays
  unsure (1)..(471): unsure at all n locations
ntanatgaagatgagaaagaactaccaaaagagaagaatatttctaagaagagaaaagtatcatctccaaagcgaaaagtatccaacgaagaagagactcccgcatcacactctgccactgacgtggaagagattttgaaggtaatgactgaatccctgcctgtgaagctaagtccattaggacctcaactgacaaagctttttcagaaggaaaaggagcccganaaaacgaagaaaacaactaaaacaaagagacaaagaatcatcgcagtgaccgaagtcattgacaagacaccactgagagcttcagctcagaagacaccagcggctgaggaaatatcaaatgttgaggtcgcaccttcggcaatcgtggctaccgaagctacctcacccgaagatttgaacttggaaaccacaatcaaacatatcgacaaaatactgctagacatggccgcagaagaagctactact

SEQ ID NO: 67560 - DNA, 489 bp, Zea mays
  unsure (1)..(489): unsure at all n locations
ctatgaacatgtnntgaatattgtacaaagacagttcatctttcttataaatacatgaacaataccctatataaaggatctcttggaggcggcaaaccctcattgaccgggcttccgaagctaccttcgaggttcttattcttaaaaatccaaaggtatgcttgtaattacttaatataaggaaagatggaataaagtgctaaagcattcgggatgagttccatataatgtttcacattgtatttttcatatcatttcattaatgcttctctntaaaaacattcatcctttgttctaacacttcaaagaagtgttatatcataggacgaaggtcttgatattcaacttgtgttgccttgcgtttcgatacctttaggggattgatatcaagtaccaacattggcgcccgccttctgtgaacgtcatttaatgaccacaacacagctctgtcatgccaccaaagaagacagcagtgactagcttcgtcct

SEQ ID NO: 67561 - DNA, 504 bp, Zea mays
  unsure (1)..(504): unsure at all n locations
tctattaagatgggaaggaatgtgacatcagctagtactagagtggcccaatgagtctccaagaaaaacttatgcttcttctcatcttcagcaacctcctcaggagcatatttggacagctggatgaatntatctctgtattcactcactgacatgcttctctgcctgatggaaaggaactccttattcttaatcttcatcaaaccagtaagaatatgatagtttctgaaattatatgagaactctgcccatgcgatggtgtcagcagcgacatgaacaacacaataataatcccaccagtcagcagaggggctagtaaggtgtaacacccctggtgtactggcactaaaacttgagcatgacatcatatgcattgacatttcattntgtttgttacacctagaatgcatncactangtaaaatttcanaacaagtgtgatgtggtggcttgatgtattcttaaccctagtgtanggtacttaaccctgngatanggcatatgg

SEQ ID NO: 67562 - DNA, 451 bp, Zea mays
  unsure (1)..(451): unsure at all n locations
tactaagcttgccgatcagttgatggggtgcgttctgcagatgtttataacangcgtanaggaggaaggcgtgctcagcaggagcgagccgctccgcatgatgaggtgccccagcagcagcacctgccagccccgcccccgatgtcgattgagcagatgtttctgatgcagactcangcaggtcaggccatcggtcagactttggccgccattcagcagcagcagcagcagcaacagcagcaagcaccaccccagcctcagatgcctcagatgcctagagataagcgtgctgaattcatgagaggtcatccaccaacgttcgctcactcttctgaccccatggatgctgaagaatggctgcgcactgtggagcangagttgcataccgctcagtgcgatgacagagagaaagttctgtatggtccccgtctgttgagaggagcatcccagt

SEQ ID NO: 67563 - DNA, 368 bp, Zea mays
  unsure (1)..(368): unsure at all n locations
gaaacgcacaaatttcagagaaattgtatatgaatttcacatgaatcgctttgtgaaatttcacaagaaagcataataaatatgggaaacctgcattccaaaggggccccaaaatggcataaatggatttatgcaacaacaccaaaantttatttatctatatatgtatgaggaaggcaatacggtatcaaatatacataacatcatatgtaaaaaatagatattatggcatatatcttttgcaggatgaagctaaatccactatgtttgcgatgttaattagttggacatcaatgtgatagctatggtctacctattacgntaaccatggattaaataaccatttagccaatttaattattcttagc

SEQ ID NO: 67564 - DNA, 464 bp, Zea mays
  unsure (1)..(464): unsure at all n locations
gctggactctgcgctatgacgaaagacgatcttgtggatattcttgcatataatagcctgaaggtgtgagnaatgtatatttggaaatttacaatttttgaatcattcttttattcttatagtaattcttttttcatatagggtttaatactgagcaacgctttgagagcgcaaaagaatgctgaagacgagagctataatattgctttcaacaacctacgagtagaggttatcaagctgaggaacgaagctttggaaaaagataaaattctgcttacactagtgggtaaaataaaggaagacaaagctacctctaagactcaagctgaagcccaaaaacgcgaaattcaggatcttcagaaacaactggccagagctaaagaagaacgcatactagaagaaacaaaacgagaacttagtgatcaatgggcannatcattggaaataaatgttgaagagcttcg

SEQ ID NO: 67565 - DNA, 118 bp, Zea mays
tcaacggtcgaatccaatggcagtgatgacattgtatttgctctctgactgtccggtgtgcaccggactgtccggtgcgccatcgtgcaaacaacccatccaacagtcaagtttggtg

SEQ ID NO: 67566 - DNA, 391 bp, Zea mays
acccattcctcaacatgcaagagcgggtcttatcaagtggcttatcgaaaatatcccgtaattgatcttgcgacctcactccttctaaaatgatatctgctttagcaacatgatctctaaagaagtgatgacggatatcaatgtgctaggtgcgagagtgttgtacacgattattagcaattttaacagcactctcattatcacacagcacaggtaccttttctagaactacgccatagtctagaagagattgttcatatataaaatctgtgtgcaacaagcacctacggcaatgtattccgcttctgcagatgacaaagcaacactattttgctttttggatgtccatgaaactactgatctaccaagcatatggcatcgcccagaagta

SEQ ID NO: 67567 - DNA, 439 bp, Zea mays
  unsure (1)..(439): unsure at all n locations
ggtgcagagtccgctggaactaatcttcggagaaacccgacctcattgcaacatgacgccagaaggtccaacccaacaagcgttggctgaattcagaattattgcagagcatatcagtacaagagacctggttcaagagttcttggctttcagggtttttcctactttaaaagaatgggaaatgccgaagctaaagggggagaagaaagaaggggaacttgtgcggttaccttactactacaagtttaagaaatactttaaaacaccttgccaagagtggctggacacagttgaaataatgtgcaatgaaatactcggtaattactccaaaaaagaagaccagttgatgactgcggccttcggtacccgtccgaagtgaagactgaatcgagtgctggacgccctgcgttntgaataccctgactacganaatctgaat

SEQ ID NO: 67568 - DNA, 461 bp, Zea mays
  unsure (1)..(461): unsure at all n locations
tcgaaacttcagccgtcccaataggctgtggcctgctgctcatgatcttgactctctntggcttcggcgcactagaagaggttgaggtggcaattttccttttccctccttgccttcaaacagggaaacaatagttaggatacacaaacccgatcacatcaaaaactctattcagactccttttccctcgagcaccgaaggcaacggtcatggcctcgtcctctgccttcgtgtaggctcccaacagctcatcactggttgcctcaatagcatctaaccaatcatcatttggttcgtcgaactaacttctatactggaaggtgtatctaagataaaacaaaccaccctggttggagccagcagcagtttccttcggcatctcccactcactcacaagaggccataccttgaaagcaatgtgttcctgtaccanatccctagtactgatatagctacacacg

SEQ ID NO: 67569 - DNA, 506 bp, Zea mays
  unsure (1)..(506): unsure at all n locations
tagtatatngactactccanatgcatcatcgaggtagaacctatctttgctcggttnttgccccactgtacatgcaaatagcggtgtcttcagaacaacaatgtttcttttcatgatatcatcaatattttcaaacatgtcctcatctgacctgtcatcaccgatgcataatacaaaatatgcttgccgccatttctccatcatcaacgtgagtatcttctcagctacaagacctttgctaacaccctaccgccaaggaagacaatttaagaagttaatagctatgcgaaaatgcatgtcagaatgaagaatcatgagaaggtagtatcatataaaaacatgtctgtatgtttgtctgttgaaggcaaaaaacatctgacaaatcattagtcaaataacaaggacccttggaagaactggaagtggaaatactaaacctgaggtttcactgtgacaatgaactgtgcactcttaattgcgagccgttcatatgctaatacactttc

SEQ ID NO: 67570 - DNA, 510 bp, Zea mays
  unsure (1)..(510): unsure at all n locations
tgtgcaaagtcacacttcanaaggatgaacaagattgagcaatgatacgattaattaatctcgcttagatgaacattattctagttntaaaaaaaaggagcccggccagaatatgcttgacttatgactctaccaagccaaagatcccctgcaagggcctgttgtaaatttagagaaataagtgacatgctttctacatatttaaatagattaaatattctaattccgaataaaacaagcatataactcagacaaatgccatatgtaattatagcagcaatgaacagtagcaattctaagcatgtaaacatgtaaaatagctacacaggtccatttgaaaattaaacatggcttgcagatgaagaaggcagattaaacaaataaacataattgtttatcttaaagtattgctctcaaaatagcgggttgctgcgcaagacagccctccaacgctaaagggtgatcaaagatcctcgactaacgtgacagtcctatcttaccaaaacatgg

SEQ ID NO: 67571 - DNA, 61 bp, Zea mays
gttcatatcactcaccctacataccagaatatgggggtaaccaccctgcagcttctggtgc

SEQ ID NO: 67572 - DNA, 351 bp, Zea mays
  unsure (1)..(351): unsure at all n locations
agcccatgtctagtctagcagtgcagcatgcctctagaccggccaactcctttgccaaatcaagttaatatagtttgccgcctactacaccctctaaagctaatgaaccatcacttcttctaaagacagacacatttataattgtgaattaacaggtctattccatattacaaagttgagtcacaggccacgaagtgtatccaagtgactcaactatgaacacattataaatagagcgctcggatgaaatagcaagctttgctaaccctntcaccttgcctcggttcccatcaccgaatgtgactgaatcttagggatccttgttcttgatgtatgaagtgaacatactct

SEQ ID NO: 67573 - DNA, 411 bp, Zea mays
  unsure (1)..(411): unsure at all n locations
gcttaaggcctgccgccgatcccgcatgtcattgttctacccccagcgcagtcgttntacgaacggtcgacggtgcggaccggagttcatatgccaccaggcaattctctctctctctcctgattcctcgagtgctcagaggtttcgcaatgtacttggatggccagggtgaggcggtagcaacttcttatatactgtcggcagggaaagcctgctctatccgcgcaagccagcggatcccaagcgaatcacccagaaattttgagttcgttgcgcggttagttgccagggctttcgccagtaacgatgaacgcgcgagtccgctgttagaccatgccgcagagaaaggatgccagtgctgcagctagcgaccacccaggcgagccaagtgtagaggataggctacgtgcg

SEQ ID NO: 67574 - DNA, 296 bp, Zea mays
  unsure (1)..(296): unsure at all n locations
tttcaacatttgcgtaatgaggactctatggagaagcactcgtagtgaaaccctggccattaacctcggaagtgaatacgggtctaacttacccgggctagaaggaatcacgactcatggggtaagatgcgccacctctgcagagtggtatactgatatatcagccgtgctcaccggtatgagcagactggactcctcacatgataattgaacttgaagatggaaataaatcgagatccgatgatctaccantggttngctctaagtgtttcacttaagtggtnttgatatactct

SEQ ID NO: 67575 - DNA, 394 bp, Zea mays
  unsure (1)..(394): unsure at all n locations
ctgcagcttctaagggagaacacgtgatangtcttatttatgttacttctcaaaaagatagaccttgtgcagcttgtccagcagggaaatatgtgggaagctctcatcatgccaaaaatgtgatgacaacatcaagacccctggagttacttcacatggacctcttcggacccgtcgtctatctaagcataggaggaagtaagtatggtcttgttatagatgatgatttttctcgcttcacttgggtattctttttgcaggataaatctgaaacccaagggacccttattcgcttcctaatgagagctcaaaacgagtttgagcttaaggtgaaaaagataaggagcgactatgggttcgaattcaagaacctttcagtggacgaatatcttga

SEQ ID NO: 67576 - DNA, 354 bp, Zea mays
gcaaatcaactaagtaaagctggcctctaatacacccttacaagctagtgaaccatcacttcttttaacgacagacacatctacatttgggaatagacaattatatcccatattgcataattgactaacagataacaaattatatccaagagactcaactaacaacacattagatatagagtgctccgatgaaatagctaatttacctaaaccttataccttggcctgattcccatcaccgaaagttattgaatcttgggaatccttgtctttgacgtacgaggagaacatctactcttctccccgcaaatggattggctccgctgcgaaatcccactgaacccggatgcaaac

SEQ ID NO: 67577 - DNA, 379 bp, Zea mays
  unsure (1)..(379): unsure at all n locations
gcttgccttcgcttcagtctatcatccgttgttctcggggtcgtggagcgcgccaatgggaaaatattcacatctgtcaaaaagatgcttctcgatgaaagaaaaggcagatggatcgatttattaccagaggcagtctgggcgctaaacacaaccgagtgcagagcgaccgggttcactcctttccgccttctatacggatcggaggcaatgaccccgcaagaaataaagcatgggtccccgcgtacagtttcgtcagccgtccccgacgtggatgagccaacttcaaaagatctcattgacggagaccgggtcttcgtcctacaggccctanacaaatatcaagcccagaccanagcatggcgcgaccgcgcagtca

SEQ ID NO: 67578 - DNA, 454 bp, Zea mays
  unsure (1)..(454): unsure at all n locations
agcttctaggtttggtttattcagtcccatgtgtttntcttaagtatgacattggaaagtatttgcaaggatctccatcctttggcttgagacattaattgggtatatgttggacttatggtaattaacgtggagaccgggtgattctacaaaagagtttaacattgcctttataaggaatagttgttttgggcatggttccattaccatgatcgtgtcatctgtatattgtataatgggagaatcatgtctgcagccagtcttatgagggagctgaagaaggccattttcctttgctttgttgaacatggattgcacaaggtcggctgctatgataaagagaagaataattaattgttattctatgacaatgaattgtaataatttgtgtaggatggaaatgcacccacgacgaaattcttgataaagatgttgaagcacgatgaatcttaag

SEQ ID NO: 67579 - DNA, 433 bp, Zea mays
actaacaatactaagctttggaagtggtggcgatataagtctttgtgaatcatggatggttatcaaatgcgagacttgatggtggctagtgtcattcatatccatgttatctggtctcatcgagttagttttattattcaaataactgctgaatgagtcaataatataatggttgtacgcagtaaaatgcaaaagccggaactgttgtgtacattataataaaatggctcgacgctcgtgcacccaccaatcttatggaatatgactatgtcatatactagaggcctctagattcacagcactcagatctcgcaccatccccatgctcgaagtattaccatatggcgttgtaatattctgttcaaaatgtggattagctatgtgatgtctatatagtaatctaagataacattaaaaggcatggatgtagtac

SEQ ID NO: 67580 - DNA, 409 bp, Zea mays
attccactacattgactaggttcaacagtgatattccatttcatacacacttttctacagggggtgggagaattggggaggaaaaagtaatggcctccaccacgggctttataatttggttgtggggaaaggaactgcttataaacttgcaacaaagagcgtgaaagcatgcataagagatgacacctgcttctttcttaaaaaaaaacatgggtggtctctatgttttattttatcatcaaaactaaatgcccacttcatgcatgctataagaattgataaatgttatgccctctcactgatgatgtttttagaagtgcacattacctagaaacatcaatataaaaccaagggagtattgaaggaaaaactatttataaagaacctcggcacatgcatagatgatgct

SEQ ID NO: 67581 - DNA, 358 bp, Zea mays
  unsure (1)..(358): unsure at all n locations
tcnggnctctggccttgctgctgttatacacatttttcttttaacttgcgaatcagtttaaggattgcccttcttattcccattgcctttagcttctgaagcccccgaagaagagcttcatactcggcaatgttacttgtacaactgaaggctaactatattgcataacatgtgctgactatagaaggtgcatttacgatagtagctgctcctgctccgaacgtcccccaagattcatcgcagaatatcgtccatgcttcagcataatttgtagcttcttcatcctgatccgatagcatccaatcagcgatggagtctactaatgcctaagattgaattgagaatctgtgcacgtact

SEQ ID NO: 67582 - DNA, 420 bp, Zea mays
  unsure (1)..(420): unsure at all n locations
agcttgctttatgctaacttcaaggttactatatattttgctattttattactattaccgttatcttttagggcgggctctaacgaagatcatttcgacagagcatattatttagcaagggtctgaaaatgccacacgatctggaggaagagaaaaacaaagctgtcattcaagatttggctgaaaaaatggaaaatcacgaagcctatctgaaaaagaaagactttacaatccaagaccttgagatcatggttaaagagcacgaatgtgcattatataagaacgattttgttatttataccatggagggctctttggctgaagtccaaacttgaaaatgacaantaaagaatgaatggctccgaccatcatcaaaattctagcaagataaaaatattttgagcccgcctgaagctgagt

SEQ ID NO: 67583 - DNA, 466 bp, Zea mays
  unsure (1)..(466): unsure at all n locations
agcttgtgaaggttcttcatccccacatgtgctaagcggcgatgccacagccagcccatgctagtcttagctattaagcatgcatctagaccggcctcttcttttgcaaaatcaactaaataaagtttgccgtctaatacacccttaaaagctaatgaaccatcgcttcttctaaagacagacacatctacgtttgtaaatagacagttataccccatgttgcataattgactaacagatagcaaattatatcccaaggactcaactaaaaacacattagaaattgagtgctcatttgatattgcaattttacctaatccttttaccttgccttgattcccatcaccaaatataattgattcttgggaatccttattcttgacgtaggaggtgaacatcttcctctcccncgtcatatggttggtgcatccgctatcaataatccagctggaacccccggatgcat

SEQ ID NO: 67584 - DNA, 381 bp, Zea mays
ttactacgatcggcaccaccgtcaagtctcctaccagctcttggattgggccctccttcgtcttcggcagcgggcagcttcttcaatgcccaggaccaccacgggcaagctcaagcctcgctttgtggggccctaccgcgtcgtcgagctcatcaacgacgtcgctgtttgcctggccttgccgccaggggcgcgcctccatgatgtgttccacgtgggtgtcctcaagaagtttgtcggcgttccaccagcgtccccgcctgccttaccaatcatccacaacggcgccgtggtccctgagccgctgcaggttactcaagcacgcttggcgcgaggcgtgcgtcaagttctcgtccactggaggagcgagaccggcgagtc

SEQ ID NO: 67585 - DNA, 348 bp, Zea mays
aaagacctcacgataggcccaagggcccaataaaacgtaagggcatcccttcatgggcctagggaagaacgaccagcgaagcaagatcgacataaggccggatcggagcaagcccggatggcccaacgacattgggccagcaaccacaacagaaacctgacatttccgcgctatagccctgtacaacggaaccaggcgaggataaagtcggtagaactataagaaagaagattcaatcacgtcactatctcttacgtgcgcattggtatcaccgtcgcatgtattgcctcacggtcgaatatataaggcctatggggcaccccttcaaatcgaactactactcagcca

SEQ ID NO: 67586 - DNA, 379 bp, Zea mays
  unsure (1)..(379): unsure at all n locations
agcttcacaaatcgcaactttttttcctttttactcgggnacgcaagactatctgcgagatcgtccttcgtcatggcacaaaggccagcttcgagcttctgaaaacccatacttttggccatctcccggcagacggataattctttgttgtccgggaggcagtacaaaaaatcatctttatccgtaccgattaacactaaagcccccttcggatacttcagttctcgggcatagagtttaacttcaaaaatttcttcttcggataatctctttttcgaagcctgtcgaatgatataatcaaaatcttcgaagagtgcttcaggcgcaagggattcgacctctttggccgactcttctcaaagcttattaatatctgagt

SEQ ID NO: 67587 - DNA, 426 bp, Zea mays
  unsure (1)..(426): unsure at all n locations
tgggctatatgagcgagcagcgaagaggttttcccgaatgtgntaaccggcttcagcataaaaaaagctttgtacataacacgacgaatgaaaagaggtccaaaacttgagctataatatagaaaaaggaaagacaatgatgccattggcgtatttgtaaatcgtgtgtaaaccttatggcattcttgtaattttatatgaagttaaacaacttccttataaatatgtaaaccttatggcattcttgtaattttatatgaagataaacaacttctttataaatatgtaaacagtgtcatacataaattcacctttcgagggccctaaacttcattatccttaaccttccaagtatctttgagccgaatcccgtgtaaagcccaacgtaccatcgtatatttatcttatacgcttgaaaatgaaatg

SEQ ID NO: 67588 - DNA, 444 bp, Zea mays
agcttctaaagggataacacgtgataggttttactaacgtgcaattcgaaaaagatagatcttgtgcagcttgtcaagcaggtaaataggtgggaggatcgcatcacagcaaaaatgtgatgaccacatcaagacccctggagctgctacatatggacctcttcggacctgtcgcctatctaagcataggaggaagtaagtatggtttagttattgttgatgacttttcccgcttcacttgggtgttctttttgcaggacaagtctgaaacccaagggaccctcaagcgcttcctaaggagagctcaaaatgagtttgagctcaaagtgaaaaagataaggagcgacaacgggtccgagttcaagaaccttcaagtggaggagtttcttgaggaggaggggatcaagcacgagttctccgctccctacacaccacagcaaaatg

SEQ ID NO: 67589 - DNA, 354 bp, Zea mays
tctagatatgtcgaggtgacaaatgatgagggtgaattgtgttttactaaattgcagaagagtcgaccattggcagccaccaccaataatggtgtgttggcaagttcatatgttgacgatgacaaagtagtggactattacggtgttcttcataacattgtatagttgactttcgatggccccaaagaacttaaagtcttgttcttcgagtgcgactggtttgatgcccatagcgggactcgtgtcgacaagcatggttatgtcaacgtgaagcatatctctatgattcctagccgtatgagccatcttgtccttgcggatcatgcaaaacaggtgtactacctgccatatcct

SEQ ID NO: 67590 - DNA, 465 bp, Zea mays
  unsure (1)..(465): unsure at all n locations
agctngaagccatggtaagtagcataggcttgtttaatgtcgaatgattctagcctagctacgggtgcataggtttcaccgaaatccaaaccttcgacttgtgaatatcccttggccacaagtcgggctttgttccttgtcaccacaccatgctcatcttgtttgttgcggaagacccacttggttcctacaacattntggttaggacgtggaactaaatgccatacctcgttcctagtgaagttgttgagctcctcttgcatcgccaccacccaatccgaatcttgtagtgcttcctctaccctgtgtggctcaatagaggaaacaaaagagtaatattcacaaaaatgagcaacacgagatctagtagttacccccttttgaatatcaccgaggatggtgttaacggngtgatctcgttggattgcttggtggactcttgggtgtggcggtcttggttcttca

SEQ ID NO: 67591 - DNA, 376 bp, Zea mays
tgaacctaaatatggctatgtcctactaaattgtttcttatacataaaacaattggtttctattcatgttgttagagcaacaccttaattttggcgtgtcctctgccatcgacccctgcgcatgcgccactcgctttggtgctccccgagttcttgtccggtcaaaccagaagccgttctctcgttcatcggttcaggtgtgagtctgccgccgaccacagctcacccttgacttgaggtgttcagctgttggcacgcacgcactacgcagtgcggtctgatacggcgatgcagtagtgctaaccttgtcgttgccgttttatagaaagataataaagagcagtacagttgctgcgacggcgatgcttgagagcac

SEQ ID NO: 67592 - DNA, 452 bp, Zea mays
  unsure (1)..(452): unsure at all n locations
agcttcgcacctctgaactaactcggctatatcacactttgctggtggccaatagaatcctgacctgaagaccttctcgactagtgtcctggacgctgcatgtattccacattgcccggcatggacctcctccaggagtcgcttcccagtagacgagagaatgcacttcatgaggacgcctgatgcaccccttctgtataatgtctccccaatgagtgtgtagtgagccgactgtctggcaatgcgctcggctacatttttgtcatctggttcctcttcattctttatatacctgatgattggccttctctagtcatcagagtctgactcgggttgatctataatattacactcttctgcttgatccattgagacgctcggctgtagtatntcttgcacaaagactccaggtggaacctgagttcgactggatcctaacttggacaatacat

SEQ ID NO: 67593 - DNA, 379 bp, Zea mays
tgacaacaattaacgattctatcattcatgtcagcacagcagtctgcatttgacaatcaagttagatgaattgctatgcaaattcaaggtaattactgtcgattctgtgacaaaatgactcacgaatattgaatttgtatgcttgcccatctttggtttgctgctggtgaatttaaggagtggaactaaagcaaaagggagttcaaatgacagtatcatctgcatgtagcccgagcaaggcattagttaacatatacggagctaataaccttaattgacatgagtaatgagattaaacattatagaactattaaagttttgatgtatagaagagtacaacagtatagttcactgattaccgatgcaatgataataactg

SEQ ID NO: 67594 - DNA, 443 bp, Zea mays
  unsure (1)..(443): unsure at all n locations
agctnttagttntgaagcttcggctntgattatatttntttagtgtctccgaagatgtctgaagataaaaagactgctgctgagatgaagctgagcctcgacgaagagaaaaacttggggtttcttatagcgatgtcaaaaaccaatacagaaaaaatcaccaaggaaattctggagggtttgtctgaagatactggtgacagtgacagttatgatgtggacagtggtggtgaagactccgaagatcgtccctggcgaccaagccattcagtttatggtaaatcaactatcaaagagaatcatcttgtgaacatgagaggaaggtatttccgggatttgtctattgtgagggccgacgaaggggaanaaacttgtccacaccctgaagaagatgaagtcgtagtgtaccgaagctntttgaaagctggactgcgatttcctta

SEQ ID NO: 67595 - DNA, 394 bp, Zea mays
  unsure (1)..(394): unsure at all n locations
ctaagctcggaatagtgccgaagctctctggaggccatcaagacagcatatagtatcttctccaactctgtataattcttctttgataaactaaggacctcggaaacaaaatatattggagcctgcctttngacttgaccatcaagcttctcctgaacaagtgctgcacttaccgccgagtgcgaagctgccacatataacaataaaggagcccctggcattggtggagtcaatgttgctagatctatcaaatactgtttcagttcttcgaaagccttttgctggattggtccccattgaaagacttcggccgacttcagcacttcgaagaatggntaatatctctctgccgatctggatatgaatctattgagagatgccaaacacttctgtc

SEQ ID NO: 67596 - DNA, 467 bp, Zea mays
  unsure (1)..(467): unsure at all n locations
agcttatgaagaatcttcataccaacatggtgctttcggtgtgccagagccaacccatgttagtcttagcaattaagcaagtatcgagttcagctctatcaaaatctactaagtatagctgaccctctaatactcccttaaatgctactgaatcatcacttcttctaaagacagtaacacctatatctgtaaaaagacagttgtagcccattntgcataattgagaaacagaaagcaaattgtaatctaaagaatctacaagaaaaacattggaaatagaatggtcaggagatatagcaattntacccaatcctttaaccaaaccttgatttccatccccgaatgtgatagctcgttggggatcttggtttntctcataggaagagaacatccttntctcccctatcatgtgggttcttcacccgctatcgatgatccaacttgagcccccagatgcataaacctac

SEQ ID NO: 67597 - DNA, 464 bp, Zea mays
agcttcttgtaatggatagggatgtcttattattttaaagggagatctccatgtttgcaaccaaacaaatcctagttagagtttaaggagtcttgagcatccccaaagcaaatcaactcacttttatagaaatttattgtgagtcctgaaatttgctcgaaggcacaaagcaatagcttcatgttgcgagctttatctaagacattgtccaaaaataggatggtgtcgtctgcatattgtaagatagatatgcctccatcacataagtgcggcactaccccactgatttgcccttgatccttagctcttttaactaagaccgagagcatgtctgctacaatattaaataggataggtgacaaaggatccccttgtctaagaccctttctatgttgaaagaaattcccaacatcatcattcacgttgactgcaacgcctgcacccgaaatatatgatcttaccca

SEQ ID NO: 67598 - DNA, 335 bp, Zea mays
tagaaactcaagctgccgacgagattggcactcgattgagacgtctattctcgtttcattgcttgggatcggaaagccgaagcttgagcccgcgtggaggagcttagcacggccattgataacttgcatgtgtactgcaatacattacatgaggaagctcaagaattgtattcgcgattgcactccgacataccaacctaccctatcgtgatgtgaactggaccgtttggaacaccagatgaagcatttggtggggaactggagctttgcaagcgcgctccataaatgaaccatgcctgaccaatgagaccatacatcccacaacgaagctacta

SEQ ID NO: 67599 - DNA, 445 bp, Zea mays
  unsure (1)..(445): unsure at all n locations
agcttatcgaagaaaaattatacagaattggagaaggcgctatatgctgtgttgatggcctccacgaagcttcgacattattttcaagcatatcatataattgttccttcatcgcaacctttgaaagacataatgaggaatagagaagctactgggaggatcagaaaatgggttaccgagctcaatgaattttctattgactatgtacacatgtcctcaattcagtcccagacgttagcggatttcatcgctgattggacgccaggggctcaggaagaagtaacaaaagacgccgaagcctggacagtcttctgtgatggttcttggggaaccttcgacgtaggagccgctgctgtcctagtagcgccctctaaagtcagaacatgctatgcagcangactggatttagctgtcaaataacattggtggtacgaagcccttctgt

SEQ ID NO: 67600 - DNA, 431 bp, Zea mays
  unsure (1)..(431): unsure at all n locations
tacccatgatgaggcatatggccagttaaaaggttctctgtcatcatgcccacatcggctcggtccttaagcgactcagatggagacactacaccgagacttccttcttgtggaagtcacccgcccggtctcgtctttatcatttacaacccaaagtttggtacctgacagaggtacatcttttcatatgttgaacccatcatggccttgatggattcaccatcaagtcttttctttgaaaacttcccatcccatatgaagcatcatcttttgtttaaaacaaaacattttgttttctaaagcaaagctaatcatcagaaaactttaaggaaaacaagtatcaaggaatggtaattagtttcaaggaaggaaatgcagcaattgtttagcacancaactctatcacctaatgcatcatctcaagtgataaa

SEQ ID NO: 67601 - DNA, 405 bp, Zea mays
  unsure (1)..(405): unsure at all n locations
agctttgatcacatacaaagtttggttatttatattctcaaagntgngctgtcagtcactctactgactaaatataggtcaccagtgacattggccagactttngggtcgaattagagtaagatctattgctcgattgagggtagttgctataacagaattgtagctggtatgaaaaaattcgagatctaggcattgcaattcgacctgtcagtcactttgaatcagggcttcaatggtacaataaccagatcagagcgccagatcagttaagtcaccgccggcgaccgtgcgcttggattcgcgcccgccgcggtgattcgtgcttgacgcagttggataacgcagagggagtaagatatatcacccagtggatgaactccggtcgccgtgtccgcttaactca

SEQ ID NO: 67602 - DNA, 266 bp, Zea mays
  unsure (1)..(266): unsure at all n locations
tatatactgcttactatcctgagcaccaaaataggaaaaatcatgctaggaaacctcatactatttttaccgggttttagtataaaatgaggcttctaactcagggataccactcatgttaaactacctagaaagaaaattcctgttgcatcacatgaacataatggttcttttaagacttttgatgcatcatatgttntaactaacaaattaggcaaagtatgtgccaaatattgttggggcaaacacaagatcttaaaacttgt

SEQ ID NO: 67603 - DNA, 406 bp, Zea mays
  unsure (1)..(406): unsure at all n locations
acaccattngacattttatattatatttctgagatcaagaatatttagttcattcctcaacatgcaaaatcgggtcttatcaagtggcttagtgaaaatatccgctaattgatcttccgacctcactccttctaaaatgatatctcctttagcaacattatctctaaggaagtgatgacggatatcaatgtgcttggtgcgagagtgttgtacaggattattagcaattttaacagcactctcattatcacacaacaaaggtaccttttctagaactacgccatagtctagaagagtttgttttatatataaaatctatgtgcaacaagcacctgcggcaatgtattccgcttcggcagttgacaaggcaacacnntatttgttttggatgtcatgaactagtgat

SEQ ID NO: 67604 - DNA, 436 bp, Zea mays
  unsure (1)..(436): unsure at all n locations
ttatcacatggacgtgaagagtgccttcctcaatggacttttcaatgaggaggtctatggtgagcaacctcccggctatgaagacagtgagtaccctaaccattgttataggctctctaaggcgctctatgggctcaagcaagcccccagagcatggtatgaatgccttagagatttccttattgcaaatggcttcaaagtcggcaaagccgatcctactttattcactaaaactcttgacaatgatttgttagtatgccaaatttatgttgatgatattatatttgggtctactaacaaatctacatgtgaagatattagtaggatcatgacacaganattcgagatgtctatgatggtggagatgaagtatttcttacgattccaagtaaagcaactccaagaaagaccttcattagcccaacaagtacactca

SEQ ID NO: 67605 - DNA, 466 bp, Zea mays
  unsure (1)..(466): unsure at all n locations
agctnttcaattgagattcatagnccatcttttcatctttntcctcctcagaaagatttgtagactcacttttgatgtccaatctgttcagatttattttcagagtattaattttcctcttattttttccttcttcattgatattccaacccttcaaagctctcttaagtcttttaactttttctttccaaatatcaatattattcttacttctaactggaagagtccagctattcatcactatatctttaaactttggtctaagtttccagctgagttcatatctaaactcacgggaattctttnttttcttcagtctgaagaacaagaggcacatgatcagacagagatctatcaagacctctaacggtagcattatgaaacatcaagtcccaatcagggtttaccagaaacctgtcaagtttttcaaaagtaggattactcctattattngaccaggtatata

SEQ ID NO: 67606 - DNA, 410 bp, Zea mays
agcttttaaatggtgtgagttctcttatatagtcttaattctattcattctaggagtattgtggggcgcggccggtatattctaatgagctttcttcgttttacagcatgcatcgcaatggctatgaacaggagcgcagttgtatgaacaatcatgtaccattgggtgtatcgccgtatcggtacttgtgctgcatgctcaggcccctgctgctgcctttgttgtatgcgtgtgtcatgagtcaaatgactcatgacctccatgcagatgtccataatatcacatacatatacgtactcattcgcccaggcgggcagccttacaccgatgtctacttgaggtcgcgcaggcgcatggtcgtcgccggtagcctcaacagcgctgtgcggcatgcaatgcacgaatattca

SEQ ID NO: 67607 - DNA, 321 bp, Zea mays
ttcagcaccaaagatatagggctacatttcttctacatatcgactatagtgactgagctcatttgataactagatcatgggtgaattccacccccaagatggctttattacactgtaagtctgaatttcaaataaaccaacctgacagagcaacttcgggcttattaatttcagaatcccttatggtaccaaggcatgagttctataacatagttactcttcttccatagatctacaatattgatgtggtgacctatggcaaattctcaatactttggaagatccattgctcaaagttgaaccctcaacacttaatttcag

SEQ ID NO: 67608 - DNA, 423 bp, Zea mays
  unsure (1)..(423): unsure at all n locations
agctntgaatcaaatatgtattttatttgttttcatttctttgcaatgcatgaaatttacacacataccggttttgagccttcggcgaaaaaacaacttcccttcttttcatgcttcgtaaagaaaaagatccatgctttgtaaaaagagatcccttcttgtgacaaggctgatgactgaatttcccgaaacttacttcgtgccttagcaccttttcattttgacgaagtgttttccgaagattagcttcgtattcaattcgtgtcattgatgcaatatgatgtatgatgtgatgttatgcgaaatgatatgatgatatgatgcaaaatgatgaggatgccgaagacacacaccgacacgcccacacttgaacacacaagctctgcattccctaggaaacgacttggagtcttcttcaccgtt

SEQ ID NO: 67609 - DNA, 468 bp, Zea mays
  unsure (1)..(468): unsure at all n locations
agcttgcttggatttcttctgaccgccacattgtctcatgcctagacttcgggagcgcatgcttgtcctgtcggtgagttcaagcagccagccgattcgcaagcgtcttgaatccagctattattaaactgtgtccagcatgtacatgacggtataaaatattattntacactttaaattgcattatttatatatattagatatcattntatttttttgtagttntgagcatccatgtgtattttttggatcataaagcttatttgtttggctttattccgtactagcttctacaatttctgtttttaattcgaagtaaacgatcatataaactcctattntggtgccttggtggtgatgttttctctaacccaccactttgctagtttgctttgccatataaacatcatcgcctgactttcggtgtcacagggtggtgactagtgtaggtagtgctaagatgtcacg

SEQ ID NO: 67610 - DNA, 405 bp, Zea mays
taggccttgagcttgccaaagaacctctgtttgtctggttgcgcccatgcccaaacttggacgaggcagtagcggacctaaaacaaagttctaggtagggcactaaagagataaaaataggtggactaactaaggacaaggcactaggacggagcagccgtatcggcgcgtcgttctggcgagtcatcgaatattttcttgcgacggcgcggtgggactctaatgagttagcgagggacatgtgatgtcaggcaaggtgcgctgcagcgggcgggttaagtcaccgacttactggtctgtcgatgaccgaagaagcgagtgagcttgtgctaaggaagagaaacatatgactcatgtgaagagtggaccgagcagtgaagcatctagagaaaaatagatcaaaac

SEQ ID NO: 67611 - DNA, 431 bp, Zea mays
  unsure (1)..(431): unsure at all n locations
agctngaagganaaggtangcacaatgtattatttcttactagttcaagatgactctgagcttcgtctccagccttttctcgcccgccttttgtccatatcatctttacaaatctattagaaatgcttcgggcgaggtcaggaatattatctaaaattgatggtgatagagtgaaattgggcctattaacaatttttccatggtcgcagccagctttcagaaaagctgcagcagtgccccgagaagctacccaggcatagaagtcaccgtgcccggctataacttcgtcaagctcatcaatttcaccctcaatatgttcgaaggtctttggtaaatcttcagttgacggngtgaacttcccactgctggccccgactgagtagaagaattttctcagtcgttgaatacatttattgctaaactccaaacat

SEQ ID NO: 67612 - DNA, 456 bp, Zea mays
  unsure (1)..(456): unsure at all n locations
ttctgagtgatcgtggggatgtctgtgctgtttctggtgcgagaggagtttcagctatcttggagaaggcgggttgcaatcatgttaaaaccctagctcaggtcgaagctgccttctccgtggaagacacaaaggatcccttggccgaagcaagtttattgggcggcaaaattttcactgatatttgggaaaatggcggccgagaaatggcccatgaaataatgaagaagagagaaaaagatatccacgactctcaagaagcagcaaagaaagctgagaaagctgcagaacttgagagacggataggtattggttaatggcttgcaccttcgctgtttgttttcgtggcttcgaactgattgatttttctatcgcagctgagctacatnctncaccgggagccgtcgacccnctgtgcgatccggagacanagaaagcgatagaaattattaatat

SEQ ID NO: 67613 - DNA, 438 bp, Zea mays
  unsure (1)..(438): unsure at all n locations
agcttcggcagaaggaagaagtagtcttttttgttttgctatgtaaaagcttcggcagaaggaagaagtagtcttttatgttttgctatgtaaaagcttcggcagaaggaagaagtagtcttttatgttttgctatgtaaaagcttcggcagaaagaagtagttttttatgttttgctatgtgaagaacagctctggcaaaaagaggaagcggcagtttaggcttcgttgtgtacgaaaagaagggaaggtgtttnttcgccttcggctcanaatactgatttcgtccacatcaaagcgactcaatcgaagggtgagaatatattacaaggtatgtacaaagttccttgaggacagatcaattgtatttacaaaacttggtacanaagtatcctgagtnttttctatggacattttactgatcttatcagcttcactt

SEQ ID NO: 67614 - DNA, 437 bp, Zea mays
agcttccccggcttctgaagatagaggacatatcttcgtgctctctggtaagataatttccacagatctcattgcacttttcctctatcaacctaaaccatccagccgaaggagctttgtacgaagattgttccataaaactgaaagctagagtaacaagttcttcattttttacttcacctccttcggtagtttccacccggtccaagtcgaataaattttataggaaagtgcctcttaaatcaaatctcgagacccaatcttcttaataattgtatcaaaggctttgtaacactctttagcagcgtcacttagtttgcacttcagccgattcagaccgaagctaatccttaaaggacccataggcactcctttgaagtcatcgcgttgttcagagtcaacttcgacatataaccactcttttgtccattccccat

SEQ ID NO: 67615 - DNA, 149 bp, Zea mays
gcgcgcaattaacgcgaagagagcggcacagacaccgtccagagaggccagaacaccgccccgcccagcatggcaagctgagaacagcataagcacggcaaccgcccaccacacacgacacgacacaccctacccagctaagcaagcag

SEQ ID NO: 67616 - DNA, 431 bp, Zea mays
  unsure (1)..(431): unsure at all n locations
agcttactcctncctgagaagggccattctttatctcctagatnttgaagcccggagcatacaagctggccaacgatcgaggcgaggtctacaacaacacttggaacatgcaacagctacgtcgcttctaccattaagatgtttcaagtcgttcatatacctcgttgttttctttacatacataaataaagtctaaccgtcaaggaaggatcagacttgcctcggcaaagcctgaccctccctcgggggctagaaggggggaaccccctctgcatcaaaattttcctcggaaaagttttctacccaaacgactttcgtgctttccgactatatcgataacagaatcctgcaagcgagtaagagcgcacgtaagcggcgaggccgaccgagctganggactactacgcctctgggatacggatacctcactc

SEQ ID NO: 67617 - DNA, 394 bp, Zea mays
  unsure (1)..(394): unsure at all n locations
ctcangcttgaccaaatggacgtgaagagggcctctactcaatgagactaatcttttgatttaatctatgctgagcaaccaccccgctatgaagatagagagtaccctaaccatgtttataaaccctctaaggcgctttatgggcttaagcaagcccccagagcatggtatgaatgtcttacacagttccttatcactaatggattcaaagtttgaaaggccgatcctactttattcactaaaactcttgtaaatgacttggttgtatgccacagatatgtggatgaaatcataattggatctactatacgaatctacatgtgaacaatttacttcgattatgacacacacaattgatactgctatgatggcggagttgacatatactttatga

SEQ ID NO: 67618 - DNA, 388 bp, Zea mays
cgaaaaagagagaccttgtgcagcttgtcaagcacgtaaacaagtgggaggagcgcatcacagctagaatgtgatgaccacatcaagacccttggagctgctgcatatggacctcttcagacccgtcgcctatttgagtataggaggaagcaagtatggtctaattattgttgatgacttttaccgcttcacttgggtattctttttgcaggataagtctgaaacccaagggaccctcaagcgcttcctaacgagagctcaaaatgagtttgagctcaaggtgaagaagataaggagcgacaacgggtccgacatctagaatcttcaagtggaggagttcctcgaggacgaggggatcaagcatgaggtctccgctcctacacacctc

SEQ ID NO: 67619 - DNA, 512 bp, Zea mays
  unsure (1)..(512): unsure at all n locations
attatttttaatccccccccaggacntttgtgctcgtgcagcggaacaaaaaccaactgggaaacactgcgctgcgatgtgactcttttatcatcattatgagaggagcagtggatggacctgacatgcctcggataggatcttcctccgaagcccctggtcatatcggaaaatctgaaggcctcctcccttctctggcgaaagtcattgtcagcacgaatgtactcgtccattttgtggagcagcttcttcacggtctgaggaggcttcctagcaaagtatagagcagcaggtccaggacgaagtcccttgatcatggcttcagagacacattcattgggcaccgttggtgcctgcgccctccaacgcaagaatcttctaacatacgcctgaaggtattcttgatgatcctgagtacactggaacaaagcttgagcagtgaccggctttatctgaaatccttgaaagcttgtcaataacatatccttcagcttctgccatgaagtgatcgt

SEQ ID NO: 67620 - DNA, 371 bp, Zea mays
  unsure (1)..(371): unsure at all n locations
agcttaccgcagttgaagcatgagcttttctcttggtcttaancttgctcggctgtccattgcgaccctttagcaccgtcttgaatctcttgataatgagggccatttcttcttcattaagaccggccgcctcaatttgcgccaccttgctgggtagcgcctacttgttccctgtggctttgagagcaaaaggttgcggctcgttgatcggtccattcaagggcgtcgccacataccttgccttcttgatcatcattcgcccgctgacgaagtttcctaggacttcttcgggcgacattttggtgtacctgggattctcacgaatattattcaccaaatgaggatcaagaacggtaaaggacctgagcatt

SEQ ID NO: 67621 - DNA, 364 bp, Zea mays
tgactagtgagagagattagcagtgttctttctatctcttgcgctaggatagcatccttctttcttgattccttattgcgatcaaactcacttgtaattgaggcaagagacaccaatcttgtggtggtccttgtaggaactttgtgatcccagtgattgagaagagaaagctcactcggtccgagggaccgtttaatagaggggaacggttgaaagagacccgagctttgtgaccacctgaacagcgagtaagttagcgagaacccaacctcagtcaaacaagaacgtgtgtctcaccgctttactcgcttgcgattagttcttacgccctcgagaggactcgtttatatctctaacgctaacc

SEQ ID NO: 67622 - DNA, 465 bp, Zea mays
  unsure (1)..(465): unsure at all n locations
gatccttgagtcacctgcggcatgcaagcttcgcagatgaagccccaagtttctttttngacaggcaaagnttcagtcattacctttagaatttcctctatttcagcatcagaagatgtcgcacaaatcttctctttttcatcaattgatttttgttccgggattgattcctttcttttcttcgaggtcaacactttcgattcaaacttttctttcttcttttttgattgatcttcgtcgtctttgatcaaagcgtcagctactcttttccttttctgcccttcggcacccttgtcgagtcgctcataatcaggatattcaaagcctatagcatcaagcactctgtttagccttcgtttcggccgggtgccgaaggctgctgtcatcaattgatcctcctttntagaatagttcccaagaatttcagtgcacattacttcgattggttcngcccttcttggcagg

SEQ ID NO: 67623 - DNA, 339 bp, Zea mays
  unsure (1)..(339): unsure at all n locations
gctacattntatatcttgctaattatcctgagcacaaaattatgagaattcatgctaggaaacctcacactgcttctcatcatgcatttatgcataaaaatgaagcttctagctctaggcaatcaactcatgttaaagtgcctataaagaaactcctactgcatcaaatgagcataacatttcatttaagacttttgatgcatcatatgtgcttactaacaaatcangcaaaatagttgccaaatatgttgggggcaaacacaagagtccaaagacttgttgttgggtacccaaagtgcttgtttctaacatcaaaggacccaagactggttgggtacc

SEQ ID NO: 67624 - DNA, 383 bp, Zea mays
  unsure (1)..(383): unsure at all n locations
agcnttgatccaaaccgggacacgcatagtgaataccgaggtcggccagtgaggtagttacctgtcggcgattgatggcgcgaaggtagctgtccacgcgacgcggcggatcaccaacatcggcgaagaatctccacgacaccgtgaacccctcccttccaattgcgccctcgtacaacttctacgtgagcaacccaagctttgggttaccagattggtgcctgagtcatgttaccggcggctatctatggtggcggcgatgggattcctccccctatctttttctttggcggcgctgatgggtttgggtagctagtgtggcgcaattcaacggagaggagacaagggtagaccttggcggctagttttatcaccacccgggg

SEQ ID NO: 67625 - DNA, 465 bp, Zea mays
tgacattgtctccctgttggaagccaatgccattcttaatgccattgcgtctcccactatagagcatgcttctagaaaatttaaaattttcatttttcaagtcatgctcattgattctagcagttaatgtagctatgtgatcattttgttgtttacttaaagcaaggtgatcatgagtagcatctacattaacatctctacatctagtgcaaatagaaacatgatcaaccgtagatgtagaggagttgcaatcatttaattcaacaatcctagcatataagatagcattctcatctctaagattggtaatagcatcattgcaaacatttaaatctttagccttagcaattaattattcattctcaatcttaaggctagcaagagatccattcaacatgtcaatcttagcaattatactagcattatcatgtctaagataacaattgaatcatcacagacatttga

SEQ ID NO: 67626 - DNA, 458 bp, Zea mays
  unsure (1)..(458): unsure at all n locations
agcttgtgcaatggtggcttcgacgtcttcttctatcgctntccaggaagcctctttcactcccttccttcggagggtcttgagtgcaggagccgctcangcctccttaatgatgtcttttaggctagcccacgtttgaacaaggaaatcatgtccttcttgatcttttgttgttctgtagtcaccaataatcaggcttcttcttaatctactagatatatgctctaatgacactattattataaagatacaacatagatgttgtgatcttatgctattggtagcgctgccggtttgtgattcatgaatgtgcggctatcatgtctcagcaggcaacacacatctgcacagtaggagcaagcatgatntaaaagtgctagtatttgaagcaaataacctatatgcgtacctggacgtcaaatgctctacaactaaaacatgatgacaatatatgtcat

SEQ ID NO: 67627 - DNA, 386 bp, Zea mays
  unsure (1)..(386): unsure at all n locations
tctccctcttcttctcgtcagctntcacgtanaaccattcattcgtccagccagtcggacacttagtgcgataaccaatcacatgagccttggtatcctttcggtatgcaaagttgtagcatccaaagttcttgtgtagcccgtcatctttagcttttgtctgatagtggacttcgtgcacccgataaaacccttcagtgttggcacatttcccttggcttcagagagcccatatgtacacactaagtctaactatggcattgggggtgagttgatgaaggtaaatctcaaacttctttagaacctcaccaatcatctcgtatatgggagaccgaagtcctgctctgaagaacttttgaagatacgacttcatcatcttttggtct

SEQ ID NO: 67628 - DNA, 452 bp, Zea mays
agcttgccaatacttgtcaaatcttcttcttatgccaacacagcaactacagaccataccagtaacctggcctttcgcatgctggggactggatatgattggacctttcaagaaagctcaagggggatatactcatgtattggtggcgattgacaaattcactaaatggatagagttcaagcccattgcttctttaacctctgctaaggccgtgaattcatacaagacataatattcagattcaggataccaaacagtatcatcactgacttaggatccaacttcaccagctcagaattcttcgacttctgcgagcaaaagagcattcagatcaagtacgcatctgtagcgcatccaagagccaacgggcatggtgagcgagccaacggaatgatattggaggcactcatgaaaaaggtcttcgataagaatgaaaaattctcatgaaagtg

SEQ ID NO: 67629 - DNA, 315 bp, Zea mays
  unsure (1)..(315): unsure at all n locations
ttgcttggtgtaagacgagtgccttttgtacattcagcagaaagccgtcgtcaaaggttaattggcactcctcacctgtaatggtactcgataaacgcatgatgggctttccttctacctgactcgatcgagcatgagtgcatggcaaatcatggaaacatatataagcaacgtcttcacggcacaatgtcaactccacgtagtgtntataaaaagcgatggtgtgtcatgaaaaccaaaaaaattaatacctgatgaatttcagccgtgtaggaatgtgtccgttatatttcctgcagttcaagtcaatcctat

SEQ ID NO: 67630 - DNA, 463 bp, Zea mays
  unsure (1)..(463): unsure at all n locations
agcttgaacattcccatcaatacatacattacatggaggtgcaatagtgacgtaaattatgaaatagtatccacattcatgcagcctttctactgattagtaacttagtagtaagtggtgattggaagtgcaggtgcaacacagctacataatagtgatgattgaacaatctagttagttctccacacttttgacaagtagtggtgctaagagaagtgtgggcatcgcataagagatattatgaatcttgagacaggcagtcctgagagtgaaatcctaaacgattcaccacctccaaatggactaaattattgacaggaacaccatatgcagaananaaaagaagaatccacttactgttcggtttgtgaaagcttcaaaagattcgccttcctggcgtgtgccattccaataggtaaagagaggttcaaaaccttctcgatgtcatcaagctcactttgtc

SEQ ID NO: 67631 - DNA, 351 bp, Zea mays
  unsure (1)..(351): unsure at all n locations
tggttatgattgtgcacgctcataattgtggttgcactgtaactgtagngtttcccctgtttggttgtggaaatctttatgcaggcttaaacaatgttcaaagtactatctaatacattgattaggcgatgtagatttacacaaggtgatgaacaaaaaaagtgaagatattctcatctctttctaccagcaaggttcaagaaagcactaagcgctgagcgagcggtatggtggtgaaaatgcttaagcgtgattaatcgtgcttaatcatttttgttaaaaaaagaaaaaaatacatgatattgtgccaccctgcagcagcccttaacccccacttctctcttatgagtc

SEQ ID NO: 67632 - DNA, 473 bp, Zea mays
  unsure (1)..(473): unsure at all n locations
agcttcgtctatctgtctcagaagaacagctagacgagccatcttctccttcttgcgttgcacctgttgctgaatgatctccangttttggatctcctgatccaagtcatcctccggaggtgttggactaacagccttcctcttctggcttcgagcctctctaagagaaaggacatcctgattgggatccagcggctgtaaagtaccagcccctgtcgctgaagcttttttcggcggcatgacgaaggtgatgcttgccgaaagtgttcaaggctcacaaaatggaagtgagttcactggaggtgggcgccaatgttggggacttgttctcaagtgctatgaattaagaacaaggcaacacanaatgttaaatgttaatatccttcgtccttcgaagcattatttncctaaggatataatgattttcggacgaagggtatgaaggacataccttcatctgcataaaatataat

SEQ ID NO: 67633 - DNA, 435 bp, Zea mays
  unsure (1)..(435): unsure at all n locations
ntggatctctctaacgttggtggactgcttccattaggacactgcttttttacatttgatggatccacctctatcccttntgtagtcaagatgtgcccgagaaaagctatcttctctagccaaaactcgcattttctaaacttggcatagagttgatgcactctgagtctcccaaggacaatccagagatggtgctcatgatcttcctggctcttggagtagatgaggatgtcgtaaataaagactacgacaaacttatcaacctcttcatgaatagtttgttcatgaggttcatgaataacgcgggtgcattggttaggccaaagggcattactctaaactaatattggccataccgggtaacgaaggttggtctttggatatctgcctctttgattcttaactgacgatatcctgatcttagatcaatctttg

SEQ ID NO: 67634 - DNA, 474 bp, Zea mays
  unsure (1)..(474): unsure at all n locations
agcttcagcattcgggtccattccttggcttctaatggcccatatgaagacgctgagcctaacgatagcgttaggggtcagctgatgaagatagatatcataattatccaaaacttccccaatcatctcgttcaagggaaactgcaatcccgctctgaaaaagctcttgaaaaccactactttgtcgtttttgggctctggagtggtttcttctctggcacaacgaataagtttcttcttagtttctccgaagtaacccatcttcatcatcatgggtacatcagcctcagacacagtagatntttcaaagtccaagtggctgggttttgatggggtcagagtgttgtagtcttcctcttcttcatcagcattntcttcttccatgtcagcttgttcagcttcggcagtaggtgcaccttcgtcaataactacctccatcacaaccaatcccgattgcctataacttcagaaatc

SEQ ID NO: 67635 - DNA, 472 bp, Zea mays
tgtggacccgtagcctatcaagtggaattgccacctcacatgttgtcagttcacaatgtgttccatgtatctcagctgcggaaatgcgttcgcctacccactgaagtactaccggaaccagaaattgagatagaaccggacttatcttaccaagagtaccctgtcaaggtgctagatcaaaaagagagatcaactcgggcaaggtcgatcagaatgtataaagttcagtggagtcaccattcagcagaagaagctacatgggagactgaggattttgtacgctctctcttccccgactttctacccaaaggagtcggtatgtaaccccaaaaccccacccccacctgccctttgaattcaattataagaaaaacttagatagcaaggatagtctaagttgtggatttaactcaagaagggctctcttctgaagatgcaaagaggatgacattcgaagagcaggtaataagag

SEQ ID NO: 67636 - DNA, 464 bp, Zea mays
  unsure (1)..(464): unsure at all n locations
agcttgtgcagtctgcanagcatctatcanaaaaacatttctttgcaaatagcctgaaacccgtgaaggagaatcgtgtgcatggcccattagagaatatctctgtgcatctgagtccaagagaggccttctttacagagaagaggagagtgaaaatcgaggacagccttggtgaaatctgtggtgagctaatatgcccgtatccacctggtatcccagttctgattccaggcgaggtagtaacccatgattcactgtcctacttgatgagcgttagacaccaaggcatcacgatcagtggagcggctgatgctgagctaaattccattctggtgtgcgacttatgatgattgccctattngttgtcacaagactgtgtngtcgcagagataccgtgggtgggagagatcaagtatgggttatgccaagtcaagagcacaatgtattgtccgcttgatggatgt

SEQ ID NO: 67637 - DNA, 275 bp, Zea mays
attcatcattcacaccagaacattatgaccaccgacaggccgcttgagctacttcacatggatctattcggccccgatggttacctaaacatcggcgggaagtaatattggcttggaataatggatgattattctcgcttcacttgggtgttctttttacaggaaaaatctcaaacccaagaaaccttaaaaggattcttgagacgggctcaaaatgagtttggcttaaggatcaagaaaataagaagcgacaacgggacggagttcaagaactc

SEQ ID NO: 67638 - DNA, 495 bp, Zea mays
  unsure (1)..(495): unsure at all n locations
ccggattcttnagtcacctgcggcatgcaagcttataaatttactttcacactttttaataacacgatactatgctcaacaggagtaattggacttcaataagacaatccacctaaccaaactaccttgattaacctcacatacaacaatacctcctattattgcacttgaacaatttgtacctagtgatgtcataggatgaattcaaagtagtagacatacatgatctatcaaaccatcattcatataaaaaaatctccatctgatgcaacaaccacatcattatagagatagatgactaacaaacataaacaacttccagttaaacattgactntgtttaagataaagcggtccatataataattcaacaagcatgcatagagaactgatcatataananaactaccatatatcatcggcgattaaaaacaatataaaacgggttgtccatatcgtccacatgactaagcctccacaattaannaatatgcat

SEQ ID NO: 67639 - DNA, 449 bp, Zea mays
  unsure (1)..(449): unsure at all n locations
ntaatcacgtcttggattaaacttttctttntcttattctattttgatccttacaaggttttctcagtaactggcttccaaacaacctcaaactnttaccaagtgttcaacatcggataacaagcctctccaaaaaattccatgatttttggtgctcaactcttatttctaaaattccaatagtttttccaagagcacccttaattcacttaaaattttctgatagatctaaaaattctaaaatcaattttatcaggaactttacattattgtaaatcccacaaaaaaatttttttttgctatttttgatagctntttcaatctgccagctaaataataaagggaaatcacgaatagtgcctgtgctgaaaccgacccaagacgatccagcaacggtgaatccccgcgcccgcagatccaacttttcatggaggcccttgccgattcag

SEQ ID NO: 67640 - DNA, 442 bp, Zea mays
  unsure (1)..(442): unsure at all n locations
gcttctaaagggagagcacattntgagacttacaaatgttcatttngagaaagacagggtttgtatcgcatgtcaatcaaggaagcaaattggtgcccaccatccacacaagaacatcatgacgaccgacatgccgcttgagctactccacatggatttattccgcccgatagcttacatgagcatcggcgggagtaagtattgtcttgtaattgtggatgattattctcgcttcacttgggtgttctttttgcaggaaaaatcacaaacctaagagaccttaaagggattcttgagatgagctcanaatgagttcggcttaagaaataaaaagattataagcgacaatgggacgaagttcaagaactctcaaatagaaggctttctcgaggagganggcatcaagcatgagttctcttctcctacacaccacaacanaatg

SEQ ID NO: 67641 - DNA, 465 bp, Zea mays
  unsure (1)..(465): unsure at all n locations
tgtgaatgtcttgccgaagcaacagaagctgcatgtttattacccacgtactctggtatacagggagagtagcacgaagcagtgtgtaaaacctgtttcggctgattttgccacgcttctgcttcggcaatctctttttgcttctggatggtgacctggcatgttcttgtagtgtggcccttgtcctcaccacagaataagcagtagagtttcctgtgctgatccccatatcttcctccgaagcccctaccgcctctgcctcttggagctggtggcctgaaagagctctgctgctgccctgaagactgtgagctttgttgtggcctctgaaactggctttctttgtcatcactctatctagagatgngaattgatctgacatgcctatggtggattcgtcctccgaagcccctagtcacctcagaaaacctataagcttcttcccttctctggtggaagcattat

SEQ ID NO: 67642 - DNA, 477 bp, Zea mays
  unsure (1)..(477): unsure at all n locations
taacatgtgtgcaccacacgtaagatattagacttgtctatgtcaaggtactagttcatatccttctttatagtacgactgaagtaaacaaagtcctaaactactaagtgtcttaactttaatcaacacttagaattagtcactccttaaccttaacattcatcctttaaaaataagaaaactattattcagggcatgagaaccttgatttcctagatcatcaccatcattgtgacctaactcaaatgtctctataaaacacatattagccacaataatcttgtattttcattaaagcaaaacctagtaaagtccttggtggtcacttgttctcaaatactgcgaatgaagaccaaggcaacacaattgttaaatattaatgaccttcgtnctccgaagcattacctcctctcagatattatgatcatctgacgaaggtcgtgaaggacatgccttcatcatttgtaatactcaaaa

SEQ ID NO: 67643 - DNA, 316 bp, Zea mays
gcaagcttgtgaagaatcttcatcccaacatgggcttgtccgcggggccagagccaacccatgttagtcttatcaattaagcatgtgtcgaggtcaactctatcaaagtctactaagtatagctgaccctctaacacacccttaaatgctattgagtcatcacttcttctaaagacagggacacctacatcagtaaaaagacagttgtagcccatttgacataattgggaaacagaaagccagttgtaatctaaggaatcaacaagaaaaacattggaaatagaatggtcaagagatataacaattttaccaagtc

SEQ ID NO: 67644 - DNA, 456 bp, Zea mays
  unsure (1)..(456): unsure at all n locations
ttgaagaaattcttagcgaccgcgcagatatttgcgccttcgccggtgcccgaggggttgcagcattctggagaaaaatggttgtgaacacgttaaggctgcagccaaggcagaaaccgtcttctccatagacaacgctatggagccttcgaccgaagctactttgataggcagaaaattctattccgatgtttggatgaagggcggccacgagatagccgaagaggctataaagaaaaatgaaaaagaatctcatgagacccgagaagaagccaagcgagccgaagaagctgttgagcgcgcaagacgtatatgtattattactgaattntagctntggtgtttatttttggcttcagaataacgactttgtcttttccatagctgaactttcaccgccacctgagccatatgatcccgaggccgatctagccatgaaaagcagcatagaaacaa

SEQ ID NO: 67645 - DNA, 425 bp, Zea mays
  unsure (1)..(425): unsure at all n locations
agctnttcatatgaacagatctcgacagacatgtatgtacaacaagtgcagctttcaagacggtttatgcaggtttggggtgtcgtaatagaaaccaggagaggaagtcttggactttgcggtagattttgacctattaatagtgttgagaatctcatttagtgacctgtatacacagcagaggcagcaggcagcaaatatgttccttggtgaacatgaacagaagatgccccttgcaaatcagtcacccaagcatggtcagggagtgcttttgaagctgtgcacttgttaactctacatttatttaggaactaaagtaaaaggcagggtgcaatattttcaattctctgcccatgaatccaactgtccgacagagtgtaagcaccatcgccaacctcagagcatactttcatagagaagacaat

SEQ ID NO: 67646 - DNA, 478 bp, Zea mays
  unsure (1)..(478): unsure at all n locations
tctatagggagagcacactttgggactaacaaatgttcattttgagaaagacaggatttgtagcgcatgtcaagcagggaagcaagttggtgttcatcatccacacaagaacatcatgacgactgacaggccactcgagttactccacatggacctattcggcccgatcgcttacataagcatcggcgggagtaagtactgtctagttattgtggatgattattctcgcttcacttgggtgttctttttgcaggaaaaatcacaaacccaagagaccttaaagggattcttgagacaagctcaaaatgagttcggcttaaggataaaaaagattataagcgacaacgggacggagttcaagaactcacaaatagaaggctntcttgaggatgagggcatcaagcatgagttctcttcttcctacacaccacaacanaatggtgtagtggagaggaagaatagaactctacttgacatg

SEQ ID NO: 67647 - DNA, 461 bp, Zea mays
  unsure (1)..(461): unsure at all n locations
gacccggatcttaagcgacgcggctgcagcttgaagttaaanaaatttctatccttcttaataaagaagcgtcagtaaaattaccaaatcattcatttaataaaacaaccaggcggggagctgcaagttaaagattgtaaacaagggtcaaaagtgaccagccagtcatgtagaatcacaccaacgacgacgactcatgtacacaaccaagaagagaagggtgaatgggacgacgacgatgcctcctgcacacatncagcacacgcgccatgttcgtcatcaatggttagggtaggtaagatgctgagatcacaagatgaccggcaatgaaggtttngttttgatttcatagcacgtgtctcagtgtcgaggacccttgtagctggactaacagaagaattgtataagtccataatttggtgtgataatactagcatctaaatgatgtaattgatatagca

SEQ ID NO: 67648 - DNA, 339 bp, Zea mays
  unsure (1)..(339): unsure at all n locations
tatcaagttagctntccaatgcaaccagtcccacgtcatttgaagattcctagaagaagttattgccaaaatactgaagactgcgcagaagtcaaacagccacacggaaatcaactctgcagatctcccgaagaggctccttcacattatctcgtgaaaatacttttgttttgtgtttatacctcgctaaggctggttgttactagtataaataccccctatgtctatgatgtaaggcagcttatgataatctaaaacagaacccctttgttcagctgtgtgctaacaaatattgagagtgatctctacccctttgctcttgtgaattccttcgcggga

SEQ ID NO: 67649 - DNA, 436 bp, Zea mays
agcttgttacagaggcaagaatatacttgtatgtgttgatgatgaagagcctcaagaaactgcttccaatgatgtgtcagggagctcagtgttactgaacttgcacgatcaccgtcatggactggagatgcagaatggaagtaatttgttgaagcaagagaataaacctgccaatgggatggaatttcctccaagcagtgtcaatggcctcgctttccatcttgatgtttctgaactcagcggaacaaagcaactatatcagaggatagagaattccatggaaagggcttttcttctcccttcggcttcgtcaaagcttaaaagtgcgaacggagattatggaataatagaattacatgtgaggcagtcgatggtcgatgacacggcaaagcataaaggcatcacagctgaaacttgtctccagggacactagagc

SEQ ID NO: 67650 - DNA, 436 bp, Zea mays
tcgagaggagaggaggccagcgcaaacccttattaaatttctccttcgtcgacgacttatcgtctcaagtagcagtcgcgtgatgaatccgggggcgtgcacataaaaccctccctcgattaaccctaattccttttctcttcggggatactcctttcaccgagtctcttctggttctcggcgtgtgctcgtgtgcagatttgactccatgtcggcggcgctcgcggtgacggacgaagtggccctgccgatccgggcggggggggatctaacggccgccgccgaggtctcgcgggaggaggtcgccgtcatcacccagtgcgcggcgctcggtgagcttagctggtttcgcccccgtcttgccctctttccattatttcttctattatctttccttgaggcgaccatggcaagttgccaagttcgtgcttgggat

SEQ ID NO: 67651 - DNA, 409 bp, Zea mays
gcttgcccggttgcaatggattccaatttttttatgttgcgattctcaacgggtgcgcgatcctgttttgattatggtggagacgaagctgaccaccaggtgccacatgtgcatgacacaatgtggtggaagaggctcgagctggcgacccggacccgttgcacaaccagacaatttcacgcgcaaggagactgatgtctggtcccgccagccggtgcaagagggcggtgtgggccacgcgcgggttggagcaaggacgaagcgcgcataagactatgtgggcctcgtgggtgagaatagtcttgggccaggcagggaaaaagatcccaaagcgcacggtcttatcccctctgtctcttcgttttctttattcgtactaatctctagtccgtgattcgagtgggtattt

SEQ ID NO: 67652 - DNA, 369 bp, Zea mays
  unsure (1)..(369): unsure at all n locations
agttttattaaactatattggccaagcttctattatctttattgtagcatatttagcatatttcaatgtttataattggcctaagccatgcatttatattttcatgggcttttacccctttctttatctctacttagatagcttgattagggttggtgttagggtttcaacatttttccctttttttaaaatcttatttgtttggaacatgattctttagatatacacttagtagagcttttattcttaagttaatttgatgcttcatgctcaatctggctcacatgaaatgttgattcttgggttagcactgagagaaaccctaagtgacactgnggtgtcacagccttccctncttataggaatctc

SEQ ID NO: 67653 - DNA, 445 bp, Zea mays
agcttgtgaaggttcttcatccccacatgtgtttatttgtgatgccacagccagcccatgctagtcttagcaattaagcatgcatctagaccggcctcctcttttgcaaaatcaactaaataaagtttgccgtctaatacacccttaaaagctaattaaccatcacttcttctaaagacagacacatctatatttgtaaatagacaattatatcccatattacataattgactaacagatagtaaattatatccaagagactcaactaaaaacacattagagatagagtgttcatttgatattgcaatcttgcctaagcctttcaccttgccttggttcccatcaccgaatatgatttgaatctgggaatccttggttttgacgtaagaagagaacatcctcttttccccccgcatgtgggtcgtgcatccgctgtcgataattc

SEQ ID NO: 67654 - DNA, 454 bp, Zea mays
  unsure (1)..(454): unsure at all n locations
tcacatgtctcgtatgattcanaatcaaacgaagttatttctctatcaaaatgaagcttcttcatgcgattctcacttatatgacccaaacgacagtgccacatgtaggtaggacttaaatcattaggccgaggccttntagcactaatattacagataggtgcatcatcaagatttaaaatgaataacccattcataatggatgcaaaagccacaaacatgccattcttagggatcacacaaccattgttttcactcgcaaatgaataaccatccttcatcaaacatgaaggagacataatgtttcgactcatactangaactagataacaattatttaactccaaaataaatcctgatgggaggtggagttgcatcgtcccgacggtcaacgcagcaactctttgcatattgcctacccggaaatcaacttctcctcttttcacgcttctag

SEQ ID NO: 67655 - DNA, 493 bp, Zea mays
  unsure (1)..(493): unsure at all n locations
gagtcacctgcggcatgcaagcttctaagggagaacacgtgataggtttatttttcgtgcatttcgaaaaagatagaccttgtgcagcttgtcaagcagggaaacaggtgggaagctctcatcacaccaaagatgtgatgaccacatcaagacccttggagatacttcatatggacctcttcggacccgtcgcctatctaagcataggaggaagtaagtatggtcttgttatagttgatgattnttcccgcttcacttgngtattctttttgcaggacaaatctgaaacccaagggaccctcaagcgcttcctcaggagagctcaaaatgagtttgagctcaaggtgaagaagataaggagcgacaacgggtccgagttcaagaaccttcaagtggaggagttccttgaggaggaggggatcaagcacgagttcttcgctccctacacaccacagcanaatggtgtggtagagatgaagaacatgacgctcat

SEQ ID NO: 67656 - DNA, 435 bp, Zea mays
  unsure (1)..(435): unsure at all n locations
agcttctaaagggagagcacattntangattaactttttgttcatttgagaaagacaggatttgtagcgcatgccacgcggngaagcaagttggagtccatcatccacacaagaacatcatgacgaccgacaggccgcttgagctactccacatggatctattcngcccgattgcttacataagcatcggcgggagtaagtattgtcttgtaatagtggatgattattctcgcttcacttgggtattctttttacaggaaaaatctcaaacccaagagactntaaagggattcttgagacgggctcaaaatgagttcggcttaaggatcaagaaaataagaagcgacaatgggacggagttcaagaactctcatattgaaggcttccttgatgaggaaggcatcaagcatgagttctcttctccctacacacctc

SEQ ID NO: 67657 - DNA, 346 bp, Zea mays
  unsure (1)..(346): unsure at all n locations
gctggccaccatgctcttctcggtaagggactcgatgctgtctcctgaccttagcatcgtgctcgcgccctatcgccgccaatagggtgtgacggttcgacactatctggcgatgtggagacataaacgccattcatgttgagacgagaatcgtgtctcgcatcattggagtcgacaccgcgtcgagtgcaccacttgcgtcgatgatgaagagcacactacatgtggnctggcttgaacgctgatacactagtcctgatgcggaagcacttctttgcctgctcaaggaacatagtatcatttgatctgcatggcctgccgagaacaatctgttgaagatgtcgct

SEQ ID NO: 67658 - DNA, 442 bp, Zea mays
  unsure (1)..(442): unsure at all n locations
agcttggctaagtcataagaatactctcaattattgtcaaatggacacaaggtgaaaagcccaaacttattttttgatgtgcgggtctgtggcgcaccggaccaagtacatagagaaggtgttctctacgtttctgtggattgttgcaccggatcacttgcacagagagggcataattcagagcatgtgtggcttcattgaaccaatctgatggtgcaccagaccacttatacagaacgattgtttttgaagaactcgagcacatggcgcattggactagtccgatgtgcataagacttgttagattcaacgactagtttccactccaacgattattccaatggttagttgatgtagctgcacacgtggcacagtctggtggtgcaccggaccggtctggtgacacctaacaaggcatacttttcattgatntcacatacta

SEQ ID NO: 67659 - DNA, 403 bp, Zea mays
tcttgtagctgctgccaagaacgagatgagaacagcgttcctctatctgacactatcttctttggcacaccatgaaggcagactattcgtgagatgtataactcagctaacggtgctccggtgtatgttgtcttcacaggtatgaaatgggccacctctgttaagcggtccacaaccacccagatggaatcatagccggcccgcgtgcgaggtaagcccactataaaatccatcccgatctcatcccactatcactgaggaatccgcaaaggctgcaacaatccggcgggcctctgatgctctgcattggttctctgacagctatcacagatgggacatattctgcgatctctcttttcatgccataccaccgaaaccttgttttaagtcctggacatcctct

SEQ ID NO: 67660 - DNA, 423 bp, Zea mays
agccttattggtagaactttgggtgtgtctgtattctgcttgtatatatgatcttgagctaaagcttatttggtagaattttgggtgtgtttggtttatattttggtcgcagattttgcccataaaaggcaaaccaaaggattcaatttagtgcatagaactgaaagtacctttggacctaattatagtggtttcagatagaagaactttctaaatatatgcaaaaaatataatggcttttagcgggtgtctatcaaacggcttatatttggtctacaggtgaccatagaaatttttcacgactcacagcccacaaccgttcttttcacaagcacatctaaggatgtaaatggtatgtatattatccatctatattccaattcgatctatctaagagggctaagaattgatctatatctgata

SEQ ID NO: 67661 - DNA, 212 bp, Zea mays
  unsure (1)..(212): unsure at all n locations
tcctacgactccccccaagcgctgtgtctgctcgacaaaaacgcnctagaacgcaaaaccttgttatttcgcgagcactacaaccagggcgctacttatggctcaacaaaccctcgggacttgaaacacctaatattcgtatacagatggaagaacattacctcaggaaaatccttcagaaactaaaagagatagcaatgccttgcatataa

SEQ ID NO: 67662 - DNA, 371 bp, Zea mays
  unsure (1)..(371): unsure at all n locations
agcttctaaagggagagcacatnttattgattattanatgnncattnngagaaagacaggatttgtagcgcatgccaagctaggaagcaagttggtgcccatcatccacataagaacatcatgacgactgacaggccactggagctcctacacatggatctatatcggcccgatgcttacataagcatcggcgggagtaagtactgtctagttattgtggatgattattctcgcttcacttgggtattctttttgtaggaaaaatctcatacccaagagaccttaaagggattcttgagacaggctcaaaatgagttcggcttgaggatcaaaaagattagaagcgacaatgggacggagttcaagaactc

SEQ ID NO: 67663 - DNA, 447 bp, Zea mays
agagtcagttcttctgcacagaattattgatgtgtctattatcttataaacgtacgaagtacattcctgagaaaatggaagccaacaaggcatatcgcttcaggaaagataatatggaattaatctggtttacagatcgcatagtagtgccaaaagatgttgaagtccgccaacaaattttggatgaagctcatcttagtcgatattccattcgtcctgtgagtactaacatgtatctagacttacagcagcattattggtggactaaaatgaagaatgatatcgcacgctatgtggccaaaagtgacacttgcaggcgggtcaaggccatacatatgaaggctgcttggtcattacaatcattgcctatcccaacctacacatgggtagatattggtatggatttcattgtgtgattactcaggacagctcattgatttgattcta

SEQ ID NO: 67664 - DNA, 439 bp, Zea mays
  unsure (1)..(439): unsure at all n locations
ttagagncacctgcggcatgcaagctncgngaaaacattctccgaatttaatcnttgttgatcaanannagatctccttgtgacttagcacgaatttcactttttcaaagcattcttccgaagatcaatatagcgtccccttcttgtgccatatgcaacatgatgtatgacgcttatgctatgcgaaatgatgtgatgatgatatgttatgcagaatgatatttgtcccgaagatacacaacacatctctcgaataaaacacaatctttttatatcagcgctgacttttcgctgtagcctcccttaagagcatcttcaccttttacttcagcggtatcagcgtatatttttcgctgaaagctctgatttccttaggaacgactttggagcttcctctccttatactttcagcggattaagcattgactttacgctgtat

SEQ ID NO: 67665 - DNA, 248 bp, Zea mays
cacacgagacggaaggcaacatggcacaaccaggaggcaaggcccctgcataccaaagaaaagcaaaaacccccaggaaaccccaatgaccgcgaaccccggcctagcccagagctgcgccgaaaaagaagaggccccgaaccaggagacacagagccgtcgcaaacccccacacaaatagagagcgggagaccaccgcccggagaacacccgacccggcattcaaaaacaaagccctccgctcgcaa

SEQ ID NO: 67666 - DNA, 416 bp, Zea mays
agcttttgttcggcgacgaagcaatatctttatattaagcaagaatgggttcaataagaaccctagcttcgatagaagatgaaagtggctgccaagtaacaaaatataccatagaagggaccaggcttcaagccatatagcacatcaacaaataccaggccgaaacaataaaatggcatcacagaaaagttagattgaaaaacatcaagccagttcatttagtgcttcgaagagtggctaaccctgatacagtagggaagcttcagctcaaatgggaaggccctttattggtggtatcttcgtcaagacccggttcttacagactgaaggatatgaacggcaacgacatacccaggtcttggaatgaggatgagcttcggcgatattatgtgtaattgatgtaattttcttatttt

SEQ ID NO: 67667 - DNA, 421 bp, Zea mays
tctcaaactcttcatcactaagcctcccaacaagaaggctaagcctgaggaagcagccaagatggcagagtaggacactaccgccgaagactttcccaagccaacggatgcctcgaaaaaacttaacggcatgcgcaagttcatctacggagggctttccctcatcatcacattcatcatcactatcatcactagaggatgggatactcgttttacctcttatcataaggcatttgtacgagtccttggaggatcatcttcgcttgaagagtcatcccaagtcttgacacttgtgagtgccttgcatttgctcgtctttgtgggtttggccatattggacagatgtccctgaagtggcccttctcccacaagcgaagcaatcgctctttctttgatttttctgtcaatgtaaaaagaatcc

SEQ ID NO: 67668 - DNA, 417 bp, Zea mays
agcttcctagctcaatctccctctatctcttccaatgccacctgctcatacccgaagccagcagccagaagggcaccagcacgcccaacaacagcgcgacttcaaggaggagtccgaagctcgtacagtcaatagcactgtaccagaatcgaagcatatatactgaggaatatcctactttggatgtactttcatcttttatgccactttattttgtgtgacaaactagtaatttcaatttcttgtaataattatgcgtgcaccagaatgaaatatatcttccccatggagttacggagctcgaaaaacgtctctaaggaaacaaagtaaatttcgatgttcaaaagtcgttcctaatggaatcagaaccaaaaattacgatcagaagttcaaaagtcattcctaagggagcgcagt

SEQ ID NO: 67669 - DNA, 457 bp, Zea mays
tactaagcctggcctacaccaaaccgacccgcattcttttacatttatggctcaacaatagtgggaaggtctaggttaccaagctggtaccaattaatattgctattggcttatatcgtgatgtatgtgactgtgaatgtgagcctatggatgcttgtaatattcttgtaggtagaccatggcaatttgattcagattgtatgcatcatggtagatcaaatcaatattctctcatacaccatgataagaaaattattttgcttcccatgtcccctgatgctattgtgcgtgatgatgttgctaaaactaccaaagcttaaactgagaacaacagaatatttaagttgttggtataaccaagatgggataaaatgaatggaattgtttgcttgcacaacactgatgttatgaatatttgctccacactgtggcctgccttgtatgcaggtgcttgatt

SEQ ID NO: 67670 - DNA, 461 bp, Zea mays
agcttgtgggtgtacccctattcatcgattctatgggcaattcactatatgccattagaaaatatactcattttttatgtgttaccggtcccacatatcatacacacaaaagagcgggtataaaatctggtgacatgcacagaagttttctttagattctagccttgctgctgcttcaaacagcataccacttgtatcctactagttagctttgggtggggatggcgggatgctgccaatggcaacctcgggttgttgcatggacctatagatggttgatgcattgttagttgtgcacaaattactgtagcaacagctattgtgtttcacacagttcactatcatcctttgtaatggtagtcaggacaggagtatattctaatatgatatctgttctatatctgtttcttgcgagtctgcaactttgtaatggtgatccctgatactgtatgtgtcaatct

SEQ ID NO: 67671 - DNA, 261 bp, Zea mays
tcgagcgccacgcatgacgctggacacttctgttcgccgttgtcctggagctgatgaccatggggcagcagtccgcggcgtatagtggtggacctgctcctggccgcgtcccctgctgcagcgtctccgcaccaggagctcgcggccgacatcctccgctgctgcggctgcgtcatcgacgcgctcatggccgccgccgccaggacgaggagatctctcgggcgggcgccacatgcgagcgaggagaggttgggcgtggga

SEQ ID NO: 67672 - DNA, 459 bp, Zea mays
  unsure (1)..(459): unsure at all n locations
gcaagctngagataatatatgtgtcatggttttatacgtttctttctctagntaattgtgatgtaatattgtgttgcgtaaatatccaaaatgtttgtcgtctttttagtgatgtaatgttgtgcgctcgacgatacgtagttagctaacgctagtgggtgtggttgcttgtaatgtctcgctacttagtgtttaattcgctagcgtgtacttaaattatcttgtgctgtttcattatattcatacatatgcatattgcatctcatttangaccgagagatgatgatcgagccattgatgtggtgccaaccacaagatgcagttggtggacgacctggagaatggtggacttacccagtagatactcgccaagcgagtacctcctccagcaaacactacctaagtgtaaaaaagaagccccggtttatgcataccgtatatatgctatttactgactta

SEQ ID NO: 67673 - DNA, 441 bp, Zea mays
  unsure (1)..(441): unsure at all n locations
tctaaagggagaacacgtgataggcttaactaatgtgctattctaaaaagtcagaccttgtgcagcttgtcaagcaggcaaacaggtgggaggatctcatcacaccaaatatgtgatgaccatatcaagacccttggagatgcttcatatggacctctttggacccgtcgcctatctaagtataggaggaagtaagtatggtcttgttatagttgatgatttttcccgcttcacttgngtattctttttgcaggataaatctganacccaagggaccctcaagcgcttcctaaggagagctcataacgagtttgagctcaaggtgaaaaagataaggagcgacaatgggtccgagttcaagaaccttcaagtagaggaataccttgaggaggaatggatcaagcacgagttcttcgctcctacacaccacacaaaatggcg

SEQ ID NO: 67674 - DNA, 479 bp, Zea mays
  unsure (1)..(479): unsure at all n locations
tggacagtacatcagccgncgtgttccgatctctttctatattatgaaactccagaccttcgaatntatcttctagctttcggacggcggcgcagtatcttcccattgaatcacttgaacaatcccattccttgtttatctgactgatgactaccagagaatctccgtacaccatcagtctcttgacacccagtgatatagcgatgtttaatccgtgtatcaaggcttcatactcggctgcgttgttagaggccgggaatagcaattggagagcgtacttgaggtgttcgcctccaggtgcagtgaagagaattcctgctcctgcttcctgcagcttcagcgagccatcacaatacattcgccatacttctgcggnttctggattatccggcactagctgttctgtccactctgatacgaagtcgaccagtgcttgaattttgatggcagtgcgaggtcggaactcgatatcatgtgac

SEQ ID NO: 67675 - DNA, 451 bp, Zea mays
  unsure (1)..(451): unsure at all n locations
agcttctaaagggagagcacattntaggatttataaactgttcatttgagaaagacaggatttgtagcgcatgccaagcagggaagcaagttggtgttcatcatccacataagaacatcatgacgactgacaggccactggagctcctacacatggacctattcggcccgattgcttacataagcatcggcgggagtaagtactgtctagttattgtggatgattattctcgcttcacttgggtattctttttgcaggaaaaatctcaaacccaagagaatttaaagggattcttgagacgagctcaaaacgagttcggcttgaggatcaagaaaattagaagcgataacgggacggagttcaagaactctcaaattgaaggcttccttgaggaggagggcatcaagcatgagttctcttctccctacacgccacaacaaaatggtgtagt

SEQ ID NO: 67676 - DNA, 294 bp, Zea mays
  unsure (1)..(294): unsure at all n locations
actggttaaaaaagctctgacatagcaggtatgggcgacatctactgaacgtctagtgctaacacacgaatgtggcgatggatcatcttttgctctatatgtcggagccatacctgcagaaataagcacggtcactcaacagtgcatagcatccgactaacaccaagttaagactataacggaacggttccctgcngcctacaaaccaactaacaagctgggacaccatctataaagagtacaagaactatctatcaacaccgacagatacggcagtgaccagggaggcgtata

SEQ ID NO: 67677 - DNA, 469 bp, Zea mays
  unsure (1)..(469): unsure at all n locations
agcttgtgaagattcttcatcccaacatgggcttgtctgcgatgccagagccaacccatattagtcttagcaattaagcaagtatcgagttcagctctattaaaatcaactaagtatagctgaccctctaatactcccttaaatgctactgaatcatcacttattctaaagacagtaacacctatatccgtaaaaagacaattgtagcccattttacataattgagaaactgaaagcaagttgtaatctaacgagtctacaagaaagacattggaaataaaatggtcaggtgatatagcaattttaccaagtcttttgaccaaaccttgatttccatccccgaatgtgatagctctctggggatcttcgtttttctcataggaggagaacatcctttntcttcccagtcatgtggtttgtgaacccgctatcaatgatccaactngagcccncggatgcatatacctac

SEQ ID NO: 67678 - DNA, 284 bp, Zea mays
  unsure (1)..(284): unsure at all n locations
cagcatgtcaggcaggtaaacacgtgggaggagtgcaacacagccagaatgtgatgaccacatcaagacccctcgaaccgctacataaggaccacttcggacccgtcgcctatctaagcataggaggaagcaagcacggcgtagttattggtgatgactattcctgcttcacttgagttntctccttgcaggataagtctgaaacccaagggaccctcaagccgctcctcaggagagctcaaaacgaagttgagctcaccgtgaagaagaaaaggagcgacaac

SEQ ID NO: 67679 - DNA, 426 bp, Zea mays
  unsure (1)..(426): unsure at all n locations
agctnggaggcgtcgattggatgtctactttgtgtttactcctccttcttttcctcagtcgccttgaacgcgatgggttgtgattcggacgtggtgggttcgtcaagctcattgatcttccttgagccttcgatcatgcactcaaaacttacaaaattcccgataacttcctcgggggtcatcttagtatatctaggattaccacgaattaattgaacttgagtagggttaaagaaaataagcgatcttaaaataaccttaaccacctcgtggtcgtcccactttatgctcccgaggttgcgcacttggttcaccaaggtcttgagccggttgacatgtgttgtggctctcccctttgcgaaccggaaccgaccgagcttcccctcgatcgtttcccgcttggtgatctttgtgagctcatcttcc

SEQ ID NO: 67680 - DNA, 422 bp, Zea mays
  unsure (1)..(422): unsure at all n locations
agctatanggtaaaagtcataaaatgttctcttatattaaacttgaatcacttctatacccctgtgataccagaaaccctaattggaaccctgaaagctctaagtccaaaccctatgggcttatgtgcaaaaatgatgaacctttggactaaagtataaaaactactatgtttggacatataaagtcatttggttcacaaatatgtgaatgtacaagccaaaccctgagatttggacttaagtgcaaaatggacctcatttgagttctacactaagtcagaaattcagtgttaaaggctccactctatggcttcgtaatttgcaaagcatagggttcttgccctaggtcaccacaccagatttgaagatctatcataggagaacaactttgcttaatgtgataagcatagttgttaagagta

SEQ ID NO: 67681 - DNA, 237 bp, Zea mays
ccccccagggttgtctctgccccaaaaaacccccaagccgtgacaacacattatcccaagaaccccacacgacaagaccacacagacagagagacaaacagcagcctacacaaaacgaaggcaacaagaaagaaaacccacaagggaagcacacgccacaaacaccccggaaacccaagaaacactcaaacgagacaagcaacaacagacaaaataaaccaaaaacggaggaagacg

SEQ ID NO: 67682 - DNA, 468 bp, Zea mays
  unsure (1)..(468): unsure at all n locations
agctgtgaagattcttcattccaacatgttctattcggcgatgccagagccagcccatgttagtcttagcaattaagcaggtgtcgagtttagctctatcaaaatctactaagtatagctgaccctctaacactcccttaaatgctactgaatcatcacttcttataaagacagtaacacctatatccgtaaaaaagacagttgtaacccattttacataattgcgaaactgaaagcaagttataatctaaagaatctacaagaaaaatatttgagatggaatggtcagatgatatagcaattntacccaatcctttgaccaaaccttgatttccatccccgaatgtgatagctcgntggggatctttggtttctcgtaagaggagaacatctccttctcccctgtcatatggtttgtgcacccgctatcgatgatccaactcgagcncccggatgcataaacctaca

SEQ ID NO: 67683 - DNA, 400 bp, Zea mays
  unsure (1)..(400): unsure at all n locations
tctttcgaagggttntctgtcaagaatattccagatgttataacgagcacgctgatctgctagccaagtcagcggcacaggggctgcctctaccttcggaagtattctttgagacaataagagcaccttcggtggaactttttgaaagagtagtgctcaatatatcccctgttcatagtgaagattggaggactgagattatatcttttctccaaggtaactgcctttcagatgatgaagcttataataagagaatggaggcaagaacaagaccatatgtaataatagaaggggagttatacaaacatggagtccgctctccacttctcaagtgtctatccagaaccgaaggtataaagctgatgaaggaaatacatacaggcttgtgtggatctcacat

SEQ ID NO: 67684 - DNA, 401 bp, Zea mays
  unsure (1)..(401): unsure at all n locations
agctntaccaaatggacgtgaagagtgctcctctaacggaccaatcaaggaggaggtctatgttgagcaatcttccggctttgaagatagtgagtaccctaaccatgtttataaactatctaaggcgctttatgggctcaagcaagccccaagagcatggtatgaatgccttaaaaatattcttattggtaatggcttcaaagtcggaaagggcgatcctactttattcaactaaactctttgaaatgacttgtttgtatgccaaatttatgntgatgatattatatttgggtctactaacgagtcttcatgagaagaatttagtaggatcatgacacacaaatttcagatgtctatgatggtggagttgaagtactatctggatttcaagtgaatcaact

SEQ ID NO: 67685 - DNA, 332 bp, Zea mays
ataccataccagggagctactgcgactttacatggacagtccgctgtcattcctgaatgcacacgcgacatgaagcgttcgatggtaacctcccactgtgccagatacaacccaatctatgattcatcctcaagagcagtctctattacagcaatctgagtcagtggttgccgaccccactggactgccacccactcgagagtgtgagcacactattcccttagtggatggagcccaaccggcgcgtgtgaaagcctatcggtaccctcctcaactgaaggatgaaaatgaacaggagatcgccgacatgctgcaacaaggtgtcatccaaa

SEQ ID NO: 67686 - DNA, 465 bp, Zea mays
  unsure (1)..(465): unsure at all n locations
agcttaatccgganaaatgtgtctntggtgtgctagccaggaagntgctcgggttcattgtcagccaccgaggaatcgaagctaacccggaaaaaatcgaagctatcatgaggatggaagcaccacgatcacaaaagaaagtgcagaggcttacgggatgcatggcagctntaagcaggttcatatcaaggttaggagaaaaaaggcctaccattctataaattgctcaagaaggtggacaagttccagtggacctcagaggctcaggaagctcttgatgcactgaagaagttcttgactacaccgccagtgctaaagccgccacgccgagccatgccagaccagccggcagaagatctgctgttatacatcttctgcacgactcacgtggtgagcaccacgttagtagtcgagcgggcagaggaatgacacacatatctagtacaacatcccgtctatttcatc

SEQ ID NO: 67687 - DNA, 381 bp, Zea mays
  unsure (1)..(381): unsure at all n locations
agcttatctcggcgtgctgccgcattntgttttatggaaatatctgtatcactgccgtcctgngatggccggggggcaacatcaattggtcggaggtgccagtttagaaatgcaccgagggcggaagaccgagtatctcgagatacccctcaaagacagcattaaaggttggcgtctggagtggtttataacggataattatggaaattctctcccttcccgctcaggaagacagccagatgttcgtactccaagttggactgagtctcccacggaccaagaagtggccgaggcaggcgtgttgcttactgaagttggattactgaaagagagaggtctgactgccgaagctgtggtcacagattttngtntcaaaaacat

SEQ ID NO: 67688 - DNA, 471 bp, Zea mays
  unsure (1)..(471): unsure at all n locations
gcgacactatantaaactccagcttccttgacctcgtatggcccaatgtagcgaggagctaatttgcccttgatcccgaatctctggacacccttggtgggtgataccttaagatagacatgatcccccacctcaaactgtagaggcttccgcctcttaccatgatagctcctttgcctggcctgagcagcttctaagttcttggtaataaccctgacctttgcctctgcctcgagtaccaagtctggcccaaaaatttccctttctccttcttgagaccaatttagtggggtcctacaccttctcccatataatgcctcaaaaggtgccatcttcagactggactgatagctattattgtaagaaaactctgccaaggacagacacttgtcccagtcctttccatagtgtagtgcacatgctcgccacatgtcttccaaaatctgatcaccctttcggctggccatctgt

SEQ ID NO: 67689 - DNA, 361 bp, Zea mays
gcttgtgaaggttcttcatcttctcatgtgctaagcggcgatgccacagccaacccatgctagtcttagcaattaagcatgcatctagaccggcctcttcttttgcaaaatcaactaaataaagtttgccgtctaatacacccttaaaagctagtgaaccatcacttcttctaaagacagacacatctacattggtaaataaacagttatatcccatatgacataattgactaacagatagcaaattatatccaagactctctactaaaaatacattagagatagaatgctcattagaaatggcaattctacctaacccttttaccttgccttgattcccatcaccgaatataattgaatc

SEQ ID NO: 67690 - DNA, 471 bp, Zea mays
  unsure (1)..(471): unsure at all n locations
taactgcagctgaagaagtccagctgcttttcaacaatatcactctcagtttctcaaacctaacaacgttcaaccatagaacgttcaagagatttttggttttcaaaatagcttctgaaatagaggcttgagctttggcaaacaccaaccttctttttggatcccccctttatagtacgacgattcctatactcaagttaaataaaatataattaagtaaactccttgagtaattggcgtctcgtgtgatttctccatggcgttgcttcataaggatcacaaacatctttgtctcaccttttgaagcaaacacaactcaaaccctgtgactcgtacgatatcaccatatatgagttcanatcatggcttcaagtcaccggactgatgcatcaacatgttataactcttcatagctgattagttcatcgacttagtgcaagtactctcttcttttacttacgcatggtacct

SEQ ID NO: 67691 - DNA, 427 bp, Zea mays
agcttcggcatagtggcatgtctatgactaaagactacaccgacttaaagatgaaatgaccgattgatccatgagagtctgtgtcataattgtaatcttttgtaaagggcatgaatataatatctcacaggctgtgccctatgcctataaatagatgaacaatatccccgtactgttcacgctggcttgtattcactcgcacgtcactctcggattctcacattctgtcaagccgaaggtataaatgtaattcaatattatccatgtttattcatgattatataataaaaatgcttgaatgatatcatatgattattcatgttttctatgtgtcatatgattctgctttccattgtatattgagatgatgaaggtacgttcttcatgaccttcgtttgaagatcattatatcctaacggaaataatg

SEQ ID NO: 67692 - DNA, 423 bp, Zea mays
  unsure (1)..(423): unsure at all n locations
tctatagggagaacacattntgggactaacatttgttctatttgagaaagacatggtttgtagcgcatgtcaggcaaagaagcaagttggtgttcatcatccacacaagaacatcatgacgactgacaggccactcgagctcctacacatggatctattcggcccgatagcttacataagcatcagcgggagtaagtactgtctagttattgtggatgactattctcgcttcacttgggtgttctttttgcaggaaaaatctcatacccaagagaccttaaaggtattcttgagacgagctcaaaatgagtntggcttgaggatcaaanagattagaagcgataacgggacagagttaagaactctcaaatcaaggctntcttgggaggagggatcanacatgagttctctctccctacactc

SEQ ID NO: 67693 - DNA, 442 bp, Zea mays
  unsure (1)..(442): unsure at all n locations
gattcccaacattagaagatgggtctttaatactgtcgaaggatgaattggtcgacagtttaacatataatagtataaaggtgtgaaaatcaatttttgtacttaaaaacgaattttttcatttgttttatgcttaatactatgctccttgtgcagggcttgatacttagcaatgccctcagggcacaaaaaattatcaaagacgaaggatgcactatagccctgaacaaccttcgttcggaagtaattaaactaaggaacgaaggtcttgaaaaagataaaatattaatttcattggtgagcaaaataaaagaagacgaggctagttccaaggcacaagctgaggcccagaanaatgaaattgaagaccttcggaaacagctagctgaagccaaattaaaatgcgacattgccgaagctgatcgagatgccagtgagtact

SEQ ID NO: 67694 - DNA, 473 bp, Zea mays
  unsure (1)..(473): unsure at all n locations
tggcctcagagaaatccacgagaataggtgacaaatcgttgtttaccaagtctacaagttccacacacaagatagaactagactatgataaccaacgaatcgaagcacttttgaagaacacatcaagaacacacgatatagcctgaggttcacccacaccacaaatatgtcctactcctcgttgaggtgcccacaaagggccaggtctctttcaaccctaatcctcctcaagccgaccaccaaggtcaaggcaatctcttctcaacttagctcaaagagcaagtgatacaaacttcttgaggtcatccacaaatttggagacttccangcaacctctatccttgaaggaacataatgttccaagtgtaacaaatccacacaagaattaagttttcaacgagctcaagagaaagagatggagaatagtgcaatgaaatcaccaactagttcaccaaacttcaccttcaccacat

SEQ ID NO: 67695 - DNA, 387 bp, Zea mays
agcttaaagccatggtaagtagcataggcctatttatgtgaattgactcaagcctagctacgggtgcataggtttcaccgaaatccaaaccttcgacttgggagtatccctttgccacaagtcgtgctttgttccttgtcaccacaccatgctcatcttgcttgttgcggaagacccatttggttcctacaacattttgtgtaggacgtggaaccaaatgccatacctcatttctagtgaagttgttgagctcctcttgcatcgccaccacccaatccgaaacttggagagcttcctctaccctgtgtggctcaatagaggaaacaaaagagtaatgttcacaaaaatgagcaacccgagatctagtagttaccctcttatgaatgt

SEQ ID NO: 67696 - DNA, 478 bp, Zea mays
tctattctagtgattaccaaaagataccaagtgaagctctctactaaggctaccaattgaaaaatcatcactgtcatagctccatgatatttaaagataagcatctaggatcaccaactattatagagcacgagcaacctttatatacgtaattactcacaactttagataccaattactcgacttgtggaggtacccaagtcctgatcgctccatttcttgctcatcttcccttttccaccttgagactatataggatcactcaaaaaacagttagtctcaaaagacacaagttatgtgtgctccccctaaagttgtgcatcaagtatttgaatgacttgcaccttgcacattctagcatcctcagaagtaaaggggaatcataccttggtctaggcataatatatcaattacatcacaaagagataccaattgaatagatgagataatacaccttatgactagtggagacaatgca

SEQ ID NO: 67697 - DNA, 375 bp, Zea mays
  unsure (1)..(375): unsure at all n locations
agcttcngctatggataagaattatggcagcttaatcttgcaanaacaacgaatgctggggtaacttcacacctacccgtctgtttatatagtgctgcaagtaagaaagtgaatcgtcatgatgtttacaccaggcaaacaggtgctcgcacccgctgaacggtgggccgcaaaaaccagaacagtgaacctgcattgtgggaccgctacacgctcgaaagctgtatcgtttctcgacaacgagctcagggaaagtgttnttcggaccttcagcttcctgaagcctaagagactatttttcacggatcaagctcgttacgagaaacgatctatcaccgcgaaggggctactgttgtgaccatgcttcgtcgccga

SEQ ID NO: 67698 - DNA, 463 bp, Zea mays
agcttccaccgcttatggagccaacatgtcttattgttatggagccaaaattgtgccaatgcaacatgtcttattttgaaatggaaagttgtgccaccaggttatgaagccaacatgtcttattgttgcttaccaactaaccgtgatagcttttctggcacaatatagcaatgcggggcatcagactcaagaaatcagtattgaggtcagcagatcagcatctcttgattggttaggaaacctattaatatcttgtcttgtaaacaggtttgcagcactgcacagacagaggagcccaaatcatcatccgctgcagtttgcagtttcatcagttgatcaatcttcaagctcatgctaggtccgtgcctgtgcgttgccacgggagtaaaaaaattagtatgaaacatatatatgaaacaataaacatcatcatgatatataaaatccgcggtataaaatatca

SEQ ID NO: 67699 - DNA, 428 bp, Zea mays
  unsure (1)..(428): unsure at all n locations
tcgcctcgggcaaactaataccagaatatgataacatgctttgggagtggagagatggcgagagtagcgtgtaccctccgtggcaagaggctggacggtggtgtatctatgctctcgattggcgtgaacctgatctggtcttaagaaccccggtggcgagttgacatatgcaagggttaagtgctacatatgtcgtgtgattagagatcctcagttgagtattaatcgattcggatcgccgtaacttcgcagacataaagacttggtcaatgacctacacgtagaattctagtgaatatgaagggttgataagaaattggctagtataggtcaagtgattgaactacggtagaaagaactctatatgcatgtaactctacttaacctgacanataaaactagaattttaaggatccactgttagtaag

SEQ ID NO: 67700 - DNA, 441 bp, Zea mays
  unsure (1)..(441): unsure at all n locations
agctttaggtggcacattgattcccataggtactaacttcgtagagaggcagcaactatctgagcccttgaccccttacgtacaacagggagtacttgtctgaaatctcccccaaacacaatagtcttcccaccaaagggcagaccagggcgtcccatgatatcacgcatgatgttgtccaacgcttcaattgattgtctcttagccattgatgtcttgtcccaaataatgagcgacgctttctgtagcaactttgatgtcccactttgtttcgtaaaggtacatatagcaccatcatcaatagtaagtggtaccttgaagcgtgaatgggcagttctcccaccaggcattatgaaagctgcaaccccagttgtagctgttgcaactgcaatcttngtctgactacgtagcaccgcaagcaatgcctttatacagatagtc

SEQ ID NO: 67701 - DNA, 436 bp, Zea mays
  unsure (1)..(436): unsure at all n locations
ntaccaaatggatgtgaagagtgccttcctaacggaccgatttatgaggaggtctatgttgagcaacctcccggctttgaagatagtgagtaccctaaccatgtctataggctctctaaggcgctttatgggctcaagcaagccccaagagcatggtatgaatgccttagagatttccttattgctaatggcttcaaagtcggcaaggccgatcctactttattcactaaaactcttgacaatgatttgtttgtatgccaaatttatgttgatgatattatatttgggtctactaacgaatctacatgtgaagaatttagtaggatcatgacaaagaaattcgagatgtctatgatgggggaagttgaagtatttctaggaatccaagtcaagcaactccaagagggcaccttcattagccaaacgaagtatactc

SEQ ID NO: 67702 - DNA, 416 bp, Zea mays
  unsure (1)..(416): unsure at all n locations
agcttgtgaaggttcttcatccncctatgtttaagcggcgatgccacagccagcccatgctagtcttagctattaagcatgcatctagaccggcctcttcttttgcaaaatcaactaaataaagtttgccgtctaatacacccttaaaagctagtgaaccatcacttcttctaaagacagacacatctacatttgtaaaaagacaattatattccatattgcataattgacttacagataataaattatatcccagagactcaactaaaaacacattagaaattgagtgctcattagaaattgcaattttacctaacccttntaccttgccttgattcccatcaccgaatgataatgaatcttgggaatccttattcttgacgtaggatgtgaacatcttcttctccccgtatatg

SEQ ID NO: 67703 - DNA, 424 bp, Zea mays
tcacaggctactggcggagctagccgaagcactgttcttgtccagaggatggctggagtgggctggccacgatggccgaagctctggcggcaatggcgggcggaattgagctcgccggagctaagggaaagtggctggccggtgagggtgagtgcggtgcgaagtggggcacgcctgggaaggctttataagcgctgcgcggtgcacgggcggtcgtggaccggcgagtgcgcgcgggcgtgcactgggaggcgcggtgcgcgaacgggcgtgaaccggtggtgtcagccacggtcgaacacgtgttcccattgcctctgcccctgttcaagcaccgattgggagcaaatcttcgcgaatttgtgcaagatcgctgtgaaggatttgttcacctgaccaagctttgtcttttgtgtatggacgt

SEQ ID NO: 67704 - DNA, 433 bp, Zea mays
agcttgagtcgaggacgactcaaatgcttttatgtgataatgatgaaaacatccacactactgatgcatctataccaatacaagtaccaatttctggtcccattactcgcgctcgtgctcgtcaactcaaccatcaggtgattacactcttgagttcatgtccatcatatttagaccatggagacccgtgcactcttgttttgcttatgaatcacggagaagaccgaaagggaaaagggattgaacatgctggattctgactgcagaagaacaccaacttgtgacggtcaccacggtcagatgcgggctcggattggaatgttcaagcacaacatggaaagcttatcaagtctactttcatatggatccggaattataatcatatctgttctgaggccgccgtaatcattgttttattaccgagacatttcct

SEQ ID NO: 67705 - DNA, 471 bp, Zea mays
  unsure (1)..(471): unsure at all n locations
gacctatanaaactcaagcttcgtcatctgnaagaaatntaccctgaaggtaagatattatctcggttctccaatcttcgctaataacaggagatatattatgaactgctctttcaagaagttccaccgaaggtgctnttattgtttcgaagaacacatccgaatgtaaaggcagcccctgtgctgctgacttagctagcagatcatcatgctcattttgatctcgagggatattcttgacagaaaacccttcgtaggaagcttcgactcttcgaaccatatccagatattntttaagcttcggatccttaatcttacaacttttgtcaatatgacccgaaacaacctgggaatcatttttaagtatggcccttctgattcccattgctcttaactctccgaagacctagaaccaatgcttcgtactcagcaatgttatttgagccaatataatcaagctctgccgcatac

SEQ ID NO: 67706 - DNA, 459 bp, Zea mays
  unsure (1)..(459): unsure at all n locations
agcttgatcaaaagtggtcatggactgttcttgcagaccaataagagcagacaaggcaggagaaggaaccccactactaccaccgctagcgacgagctgccgactgtttttccgaattaatggagtttcattctcttcctcctcatcttccacagcagcagcgcagacagcatcctcattagggtcagcaacaggcggagcacacccattgggatcaacgtcagctagaccagtcgcagtcatttcttcagcagtaggagctgaggtgctggcgtcctcatcaaagctagacactcgccggaggcgtcttcttttccttttctgatcatcagcaaaaggctcgggctgactggttcggctaggacgcctcgggcgaatattggcaggtttcgagacatccaaggtcgcaacaacctctggaggcggcaccactggcagtgtaccatcangaacagtatc

SEQ ID NO: 67707 - DNA, 478 bp, Zea mays
  unsure (1)..(478): unsure at all n locations
ggacacataaaactcagcttataccatctcttctatgcaagcttgtaagcattgtttggtacccatcgcttgatgggtccatcatggttagtcaacaaagatctaggaacccaagagtcctttgtgttagcacttggtaaactcattacctttctaacacaagttgaaattttgggttgcctagttatatgagaattaattgacaagctaggagtggaattgttaccaatgggacaatccttgcattggtgtcccttctttcggcttatgtagcataggcgatcctcaagtcttgaagatttcttctttccttgtttctttcttgctacatggntagtgaatattttcttttctaacaccatgcctttttgttttgaatatggacaagaattaataaggtgtcccttctttgacatntaaaacaaagttatcatccttgtaatatcagccattttaaataggacatgactaataaggc

SEQ ID NO: 67708 - DNA, 409 bp, Zea mays
  unsure (1)..(409): unsure at all n locations
agcttatgaagattcttcattccaacatggtctagtcggcggggccagagccaactcatgttagtcttagctattaagcaagtgtcgagttcagctctatcaaaatccaccaagtatagctgaccctctaacactcccttaaaagctattgaatcatcacttcttctaaagacagtgacacctacatcagtgaatagacagttgtagcccatttgacataattgagatacggaaagcaaattgtaatctaaagaatctacaagaaaaacattggaaatggaatggtcaggagatatagctattttacccaaaccttngaccaaaccttggtttccatccccgaatgtgatagctcgttggggatctttggttttctcgtaagaggagaacatcttcttctcccctgtca

SEQ ID NO: 67709 - DNA, 460 bp, Zea mays
  unsure (1)..(460): unsure at all n locations
ntgatggttgcctttagctgtttctggattgcaacctgtatccttttctcctccgcatcaaccttcttctcggcatcagccttcttcacaacttcttcagctgcagccattctcttaatctcagcttcttcagcctcagcctttctcttaatctcagcttcttcggcctcagcctttctcttaatctcagctttttcgggctcagcctttctattatcctcagcttcttcttccttcttcttctcagcttcttcagctgcagcctttctcttgatctcagctacttcggcctcagcctttctcttattctcagcttctacttccttcttcttctcagcttcttcagcagcagcctttctcttgatctcagctacttctgcctcagcctttctcttattctcagcttcatctgccttcttctatcagcttttcggcttaggctatctctctcaggctcctc

SEQ ID NO: 67710 - DNA, 428 bp, Zea mays
  unsure (1)..(428): unsure at all n locations
agcttgaggctgtgtatagattaccgccctcttaatgcggngactatcaagaacaagtatcctttgcctcgtattgatgttctttatgaccagttggtcggagccaaagtgttttccaagatagaccttcgctcaagctaccatcagatctagatacgagcaagcgatattccgaagacggctttctcaaccagatatgggctatatgaattcttggtgatgtctttcgggctgactaatgcaccagcatatttcatgtatctgatgaattctgttttcatgcctgaactggacaaattcgtagtggttttcattgatgatatcttggtgtactcaaagaatgaagaagagcatgtcgggcatttgcatgtagtgcttcaacgtctgcgagagcaccacctttatgccaaagtgtcaaaatgtgattt

SEQ ID NO: 67711 - DNA, 340 bp, Zea mays
tggcgcacccccctagtacgagatcgatcggattaatcttatcatcgtcgagctaccgacattgcgcgccacatgccaaaacgctagacttcatccaggtgactcactggatgcatgtccggcgaacaccgaagcaactggcaccgtgaaagtcactttttccacccgctgagcttgcctacactctccggtcgccaaaattgctcggccgaatttaataccgtcgctcgatacgcctatatattgagagacaccctagctccgcagggcgagaaactattcagccaccatgaattagcctcgatcattcactaacgcccacgaatcttgagttcttccc

SEQ ID NO: 67712 - DNA, 425 bp, Zea mays
  unsure (1)..(425): unsure at all n locations
agctnntaagctcttgacaataagattacttcatccagntttaacaaagatgcataaatgcaggaatgtaatgtttgagaggttaaactaagtatgaagcagggaaaaatgcatggacatgctttctctttcttttatacaagatatataaagaaagtatagaaaggaaaatntatgtacaagtttgaatgaaatgaagtagttttacccttttgtaccttcacatagagacgctctcttcattgtgcattgtccttagtcttagttgcttaagacctatactcaagacaatatatggaaatattttgcacaagagagttctacaactagtgatccttttccagctaatgtagatcaaataaatggatacaaattgatagaggaacatgattctctttaacttatgatataagagaattgatgaa

SEQ ID NO: 67713 - DNA, 433 bp, Zea mays
  unsure (1)..(433): unsure at all n locations
agctntaacacaacacccgggttctaatattacgcgtcgctaagaggattaggccccaacagataaacttgaagagaaataactgatcaaaaataaagggttaacaagatatctcaacaagaacccatgtccctggtggggagaagtaaaaattacagcaatgcaaggtataaaataactcttagccttgttcatttgcaaaatgcatgcaggaaccaatatgccacaataccatcaggacttgaaactcgcactgtccaaatttgtctagattctcaggaagcattgggttgtagtagcctgtagtttttcaattgtatacagattggtggtatagcacgaaatgttatgtatcgtatgtgggttggtgtgataggggtgaaaaggaaaacggacaggatcttgtaagatgaaaccactatactatcgtgta

SEQ ID NO: 67714 - DNA, 380 bp, Zea mays
  unsure (1)..(380): unsure at all n locations
tctaaagggagaacacgtgatagggtttactaacgtgctattcgaaaaagatagaccttgtgcagcttgtcaagcatggaaacatgttggaagctctcatcacaccaaaaatgtgatgacaacatcaagacctctggagctgctgcatatggacctcttcagacccgtcgcctatctgagcatatgaggaagtaagtatgggctagatattgttgatgactnttcccgcttcacttgcgtggtctttttgcacgataagtctgaaaccctagggacccttaagcgcttcctcaagagagctcaaaatgagtttgagctcatgtgaagaagaaacgagcgaaacgggccgaattcaaaatcttcaagtgaggagtccttga

SEQ ID NO: 67715 - DNA, 446 bp, Zea mays
  unsure (1)..(446): unsure at all n locations
agctttggatattgcaagatctcactgatttctgttactatggctcanaaatcgtgaaaaacaagtgatgtgtttgtcttggtggtagaggtataaatatagcatgtaatgaatgtggaagatgtttccattcatagtgctagtcaggataacttaaagcgtgatagtgtttgtcccttgtgtttttgcaaacaacagctcaatgtgctacagacatatcgcaagtcacaaattaaagaaaatggcaaaaaaatgctgcctctgctagtaagaaatctgctaatcgtaagtaactggaccaaaaatgtacaatagttgttgcactcataagaaacaacaattttcaaacagataatgtgtgctatgaacatagaggcaagtggcagaatttttagtgccgatatacaattncacaattcaaaaatagtaaatataaatggagaact

SEQ ID NO: 67716 - DNA, 461 bp, Zea mays
tatgaagggtattcatcccaacctatgctagacagcgattcctaagctatcccatgtcggtcttagcaagtagacatgcatctaaatcggcattctctttagtacaatctactaaataaagctcgccgttagatatacctttaaaagctaatgaaccatcacttcttctaaatacagctacatcaatatttgtaaataaataattatagcccatgtgacatatctgactaacagaaagcaaattatacccaagcgattctacaaaaagacattagaaattgaatgctcggtagtaatcgctatttgacctatcccctttaccttgccttgatgcccatctctaaacatgatcgtgtcattagaatccttgttcttgacgtaggaggtgaacatgttcttcttccgcgtcatgtggtatgtgcatctgctatcaatgatccagcttgagccccgtgatgcat

SEQ ID NO: 67717 - DNA, 388 bp, Zea mays
  unsure (1)..(388): unsure at all n locations
agcttgattctttattgtattacagcattgctttttattacgtggttagctgagaacatcaacattatcaatgtacttatatcaaactttgctttctgaacttcatactcattccagcttgttgaacagctgttatgagcttgagattattggccatccatgccctgttctttaacaatctagttcaaaaaggttacacaatcagaaataaatctatgagatgtgactctggggtccaaagattntagacttggtagaactaaaccgaatacatgagatgtgacttcgacactactataaatgaggaagatgttagtttggaaggtcaagtagtggctaagaaggatacctttgagtatttaagatcaatgctatagagagacaggga

SEQ ID NO: 67718 - DNA, 467 bp, Zea mays
cttgcatggatctacagcactgtgtcaacccatcaaagcttcttttgacgacattgaaatgctcacgagctctctgacgttgatgagcaaaggcgagaatacatcgaagtattttgcacaataagatagacgatgaatgcaaggttaacaaccaacacaacacacaagcttgagcgaagcaatgcaccccggacatcagtaatgtagaaagatagtataagatacccgctgataagcatcagaaataccgtaacaatccagctaatcacctgatgagagcgtagaatgaatcaatacagcacatttggatgagcagtgttactaaactagttcaaatgagcttcataccagcagacaaattatagcaaagtaggcaaacataacatctacaatcgcttcataggtatgcaaaccatatatagatataccgagtcccaatgacacggcaatggtatatgtgataacat

SEQ ID NO: 67719 - DNA, 468 bp, Zea mays
agcttctaaagggagaacatgtgttaggactaaccaatgtctgctttgagaaatacagaccttgtgcagcgtgccaggcagggaagcaggtgggaactactcatcaaagcaagaacatgatgacaacatcaagaccattagaactcctccatatggatctctttgggtctgtcgcttatcttagcatcgagggaagtaagtatggtcttgtaattgttgatgacttttcccgcttcacttgggtattctttttgcaggataaatcagaaacccaaagtacactaaagcgcttcctaaggagagcccaaaatgagtttgagctcaaggtaaagaagatcagaagcgacaatggatctaagttcaagaatcttcaaatagaagaatatattgaagagtaaggcatcaagcatgagttctccactccctacacaccacaacaaaatggtgtagtagagaggaagaacatga

SEQ ID NO: 67720 - DNA, 466 bp, Zea mays
tatcagcaacataagcataaaagagaaaagctgcttcttctatcaacttatgcgtatgcttttgtgtgaagatatagctgaacatcaagtgttggtgggatcctctctatctgatgaacaatagaagaccttgctaagattcttgtttaacaacaaagatgtttttgcttggacagctaatgatctctatggtgtcgatagagatattattgagcactcactcaatgtggacccggcactacaccaaaatcatacacttcctacggtgttttaacttcctacaacttttataacaaaccgtaggaaataaataacttccgagaggcaactggtacctctagtaaataaacataacttcatacagtattttattataactgtcggaagtaaaaaaccgaggaaggtattaacttctacgcctctcttgaagtatgtttatctgtgaccagcaaacaatactacttct

SEQ ID NO: 67721 - DNA, 471 bp, Zea mays
  unsure (1)..(471): unsure at all n locations
agcttcgngaaatattctccgaagttatatttatgttttgtgttgcctctccaatgaagctacactttgtctcgatttatcttgtgccttagcacgattttttctttttcaaaatattctccgaagatcaacactgtatccccttcttgttccacatgcaatatgttgtatggtgcttatgttatgcaaaaatgatgtgatgatgttatgttatgcaaaatgatatttgtgctgcagatacatgtccctgtaatagagcacacatactttntatatcagcgttgacttttcgttgtaagcctcccttatgagcttcttcgccttttactttcagcggaatcagcgtttattnttcgctgtaagcctcccttatgagcttcttcgccttttactttcagcggaatcagcgtttatttttcgctgtaagcctcccttatgagcttcttcgccttttactntcagcggaatcac

SEQ ID NO: 67722 - DNA, 345 bp, Zea mays
ctgaggagggcctctcggtcatgtcgaaggaagatcttgctgttattcttgcatacaacagtatataggatcaataggtatgttaactttaaagctgaaattgaagcattttatcgtcatgcttaatgctctcttttacttgcaaggcttaattcttagtaatgccttgagggcacaaaagaacaccgaagatgaaagctacaccataacacttaacaaccttcgctcataggtgattgaactaacaaacagaggactagacaaagacacaatattggattcacattcgagtaaaaaaaagaagacgaagcttagtacaatgctcatgtcgtagcccaaaaagcc

SEQ ID NO: 67723 - DNA, 380 bp, Zea mays
agctttagaatgattcaatgtctgaatatttagtgctcgtactgattgtttttgcatgattctgcatatgatttctagccaatgtctaactccgtggtaagcactgaaccaactatgcagtcattttgaagcctatagagatatgcctaaaataatagagctgagagagaaattcaagaacatcaagaaaaatcccttagctgaattatctgtctcccgcggttggcagtagttgctactgacgcacgcaacccatggtaaattgactacaagcaagtttctagagtattctgaaattggcatgagttgtagattatgcaaaaaatccaacagcgacaatagtagaggaaaatatatttcactttggaaagaatcccaca

SEQ ID NO: 67724 - DNA, 335 bp, Zea mays
cttcatatttggttccgactgctgtatacctatatcccgcttcacaatgaaggtggatgtccgaaggcgaagttgcatctataactcaagttcaacacatgtgtgtggccgcactacttttgttatctccactattgggcgatctttgtattttatgactatccatcatgctcagttgttcttgtccatactacccggtaccgacgttttcgacgaagaatactctatatcgctctcgtgaacgggtatgtgcaccacccttctagcagtaaggcttcataacttcctatcaatatctgttgaccgctctgacatcaacgctataacttctttga

SEQ ID NO: 67725 - DNA, 315 bp, Zea mays
agcttcagcaacgtgaacacatttttttgtttatgtgctagagcacctgattgtgaccaagacgcctggctcactcaccattctatgacatatagagggcactgactgccacattaggatttatgctgttccactgatagctgtaggactcagaacttctgatgatatggacccctcagctgcttatattacctgctcaatgaaacctgagaggggcgcccctcgaatctgtgacgcttctgacaacgaaatgtgcgaagatctgaacgtactttggggcacttctgacggggtgcaactctggaacacggctgg

SEQ ID NO: 67726 - DNA, 253 bp, Zea mays
tggtatccgcgaccgccgtggatctttctctgcaccattgtctcgagatcaagcatgggatcgcggagcatgttaccttgctcttcggatctccacggggggcctatgctcgggccattgggcaccatcctacagattgctcgccgtaccatcgatacactagcaatccgcctcacctcggggcgcagcgatgaaccgttatcgctcagcacccttcgcatgtacgccaggccccactatcgtgtagcttcgc

SEQ ID NO: 67727 - DNA, 461 bp, Zea mays
  unsure (1)..(461): unsure at all n locations
agctngagacagacattagccgctaccgatgacagcacatcgtcgatagtttattctattccaatttcaaggtaaaaaacttttcttcaactttttattgtctttaacaacgaaggtattttctaacgaaggttgcttgtgcacagagtatgctgtcgagtaaagctttgagaatgtaacaagatcttgaagataaaaaacataaagttataattgagggtttagaaagcaaaataaaagatcaagcagcttctcttgaaaagaaggatttcgagcttcaaacaacagaaggtttattagcaaaagctgaatctaaaattgcaaagttaaatacggagcttctctcanagtcagaaagcttcgaacaagaaaagaagaaagttaatgcacaatttgagactgaggtcaagaaaagttcanatnntgcaaaatcattgacagagcttcanaacaaatgtctg

SEQ ID NO: 67728 - DNA, 420 bp, Zea mays
gcctgctgcccatttgcttcggtagctgattacagggaactttgtggttttccgaaaagcaaaattatagcaaccaaaattgtcatgcaatccatcttttctagccttcgtctgatagtgcagctcgtgaactcgacaaaagctgtccgcaaacggctccaccgcttggcttcggagggcccagatataaacactaagcctaacgatggcgttaggagtcaactgatgaaaatagataccaaacctcttcagtacctctgcaataattccatgtagggggaatcttaatccagcctttagaaagctcttgaaaatgactatttcatccttcttcgggcttgggatagtttcttcctccccgaagcgtagtagcttcttctgactttcactgaaataacccgactttaccatcttggagag

SEQ ID NO: 67729 - DNA, 458 bp, Zea mays
  unsure (1)..(458): unsure at all n locations
agcttgccaattcttatcagagcagttacttttaccagcatagcaactgtagaccatacccataacatggccatttgcatgctggggactggacatgattggacccttcaagaaagctcagggaggatacactcacatgctggtcgccattgacaaatttaccaaatggatagaatacaaacccattgcttctctgacttcagccaaggcagtggagttcatacaagatataatattcaggtttgggataccgaataacatcataaccaacctgngatccaatttcactagctctgaattctttgatttctgtgaacaacgaagcatccagatcaaatatgcatcagtagcacatccaatggccaacggtcaggtagaaatggctaatggaatgatactggaagcactcaaaaagaaagtcttctacaagaatgaatagttcgcatgaaaatggatca

SEQ ID NO: 67730 - DNA, 451 bp, Zea mays
  unsure (1)..(451): unsure at all n locations
agcttctaaagggagaacacattntatgattaacaaatgttcattttgagaaagacaggatttgtagcgcatgtcaagccgggaagcaagttggaacccaacatccacacaagaacatcatgacgaccgacaggccactggagctactccatatggatctattcggcccgattgcttacataagcatcggcgggagtaagtattgtcttgtaatagtggatgattattctcgcttcacttgggtattctttttacaggaaaaatctcaaacccaagagaccttaaagggattcttgagacgggctcaaaatgagttcggcttaaggatcaagaaaataagaagcgacaacgggacggagttcaagaactctcaaattgaaagctttcttgaggaagagggcatcaagcatgagttctcttctccctacanctcacaacanaatggtgtagt

SEQ ID NO: 67731 - DNA, 433 bp, Zea mays
agctttcatccttctttttcacaaactatgtcgaacaaccccaaggtgaagtagttgggcggatgaaaaccttgtctaacaattcttgcaatttcttcttcaattcagccaattcagcgggtggcatccggtaaggcctcttggtcattcctggttgcaactcgatggcgaattcaatatcccggtctggtggcattcctggcaattcattaggaaaaacatctgcatactcacagaccactggaatcttcttcaagggcaactctatcatagcaaaagcacatgatcgagtagaatcttggctgggtagatacaccacaaggtcttcgaaggtaagagaacagatctccaaagctctggcagctgcgtccaacaccactcggtgttgagtcatccagtcggctctgagaacgatgtccataccctctaatcc

SEQ ID NO: 67732 - DNA, 375 bp, Zea mays
  unsure (1)..(375): unsure at all n locations
nntgttgcgtncctcctctcctccgccaaccggcgccttatgtcctccttctcggcctccgcagccgccagcctcttcaccagcctgcggctcttcttttctgcagccgacttgtcccgaacaacatccacatgctgcgctcggaggcgctcgatcctgcccttgagtcgttgcctctcggcagcgaactccgaagacaaggcacccgacgcaacatggtcggcgaaggcggtcgcctgccatagaaaaaacatcagattcgcaaccacatcaaaacaacgaaccaacaaagtctaagacgacttacatgcttcagctgctgggacacaatggccgccacgtccctagcggcgctggtcaacaaaatctcgccgc

SEQ ID NO: 67733 - DNA, 368 bp, Zea mays
agcttcagctccatctatgttatgaattgcttttgagtctcgccagtttccttcggcccttctggcagcttcctgacttccatgaatagtaatgggcccttggtccgaaggtattttcatgcaaagatatgctggatgaagaattgcttcaaaagcattgagagtaccacgaccaatgattgcattgtaagggtattccatgtcaacaatatcaaacacaacttgttcagtccttgtgttgttgataaatccttgtgttgttcagtaccatgaccaatgataaatccgaagcattgagagtccttgttcagtccttgtgttgttcagtaccacgaccaatgatattttatgggtgtagtgggtatata

SEQ ID NO: 67734 - DNA, 409 bp, Zea mays
  unsure (1)..(409): unsure at all n locations
agcttgatgaatggggcatggaaatgaaggccatggggtatgaacccactactgaggtggtgatgtttgatgtcgaaaatgaggagaaggaaaacacactagtgcatcacagcgagaagattgccatcgcattcagtctcatcactactgaaccaggagagaccattagggtcaccaaaaacctccgagtttgcactgactgccactctgccatcaagctcatatcgaggataacctgtcgtgaaattgttgtacgagataacaatagattccattgctttagagatggtcattgttcttgcaatgactactggtagtagacctacatgttgcagttgcgagcggcatggagagctggaagcatgtccagtccatttttgttngatgtaaaacttttatcacctagaat

SEQ ID NO: 67735 - DNA, 416 bp, Zea mays
  unsure (1)..(416): unsure at all n locations
tcggtttacgagtgatcaaagcaggcggagacagtaagaagtcgtgttcttcaaatcgcctgcaagctggacctgngatctttgggttgattacctcgggtccactaaaagagtaaaagacctcacaaaaggcccaagggcccaataaatcgtaaggtcattctttcgtgggcctggggagggacaaccagcaaagcagatcggcatggggctggattggtgcaagcctggatggcccacaacgtcgagcgagcgaccacaacagagatccgactttcccgcgctggagcccccatgcaacggagccatgcgaggataagtcggcagaactatatggagataaactcgaacagttcactatcntttagttacacgttgttatcaaatccaagtgtattgccccacggtcgagtata

SEQ ID NO: 67736 - DNA, 402 bp, Zea mays
  unsure (1)..(402): unsure at all n locations
tctaaagggagaacacgtgataggtctaactaatgttcttattcttaaaagatagaccttgtgcagcttgtcaagcatggaaacaagtgggaggctctcatcacacccaaaatgtgatgacgacatcaagacccttggagatgctgcatatggacctttttggacccgtcgcctatctgagcataggaggaagtaagtatggtttagttattgttgatgacatttcccgcttcacttgcgtgttctttttgcaggaaaagttcgatacccaagggaccctcatacgctttctcatgagagctcaaaatgagtttgagctcnaagtgaagaagataatgagcgacaacggattcgagttcagaaccttcatgtgacgagttctttaagagaagggataagcac

SEQ ID NO: 67737 - DNA, 385 bp, Zea mays
ttcgatcatactcttgttattagtgaccccatttttattatacctgttcacatatttcactcggaaaacattatcaaatcgtgattttgaggaccttctgatgccgaaggtccccaacagtattccctcgcaatattaatttgctgaaatgatacatttatattgtgacatatacgaaggctttgagccgaacgtccgaaaaaacaccttcctatgctataatagcaacagtctttgacaagcgggaccctccagatttcgacataatgggtgtattaatagggactcgccacaatttatttggtacgctctcttgccatctgttttgcctgctcaaataacattgtgcccacaaatattaacctgcctccctagtattaagctt

SEQ ID NO: 67738 - DNA, 451 bp, Zea mays
  unsure (1)..(451): unsure at all n locations
acaacgaagagatgactcttatcataaagcgctgtctgtttatttctctagcaaggaaggggaaggagtacaaaccacgctccagaaggtttgctaccgatgtggtaagtccgatcactatattgctaaatgtccatatgcaagttataatgacagggacgacgatatgaaagagaagaagaagatggagaagtactactacaagaatggtggngaggcgcacatgggaagggagtgggactccgatgagagctccaccgactcctactccgacgaggacgccaccaacattgccatcaacaaaggccttattcttctcaacgtcgggcacaagtgtctcatggacaatgagggcaaaaagaagaatgtatactctacaaacaccttaaatatactactatcgatgatgacgcgtgctctagtgaaaagaatgatgaattgtctccttttt

SEQ ID NO: 67739 - DNA, 462 bp, Zea mays
  unsure (1)..(462): unsure at all n locations
taatgaggacagtggatgcacgttttctcgatggctaacatgtttaactctaagaaaacattggttggcaatagataggagtatttaaaacacataaaatgtgcaagttgtcaagctcttttacatgatccccttcaccttcttgacttccatgttctacgacctcaagccttgtcaggcttggtttctttaagctcctctaagccgccaacaataggctcctcaacccccaccccatctaaaaaacaccctctccctatttgtcttgcttggccaccctgctcagcaacaatcattaatccatggattcataaggaaagaaccaagttcctgtccatggacaagtggtctacgacattgtggggggtgcaaaagggacaccgcacaagtatgcacatcggtaggcatctangtaaaggtcatgagcggttgtgtgcaagctgtgcaacatgatgtggaata

SEQ ID NO: 67740 - DNA, 357 bp, Zea mays
ggccaagccctctgacccgaccggacttcaccggaggctctatatcatccttaccggacttcggtcttccgccgacgtgcgtggaccgagctatccagtgagtcttcgcccaattcctttcgctcatagcttctctggcatcccgtggacctctctgacctatttgattgaactatctcgccgtgaccaggctggtctcctctccgccgatgagcatacccgcctgcgcgcgtggaccgaccaactccggccatctccgtcgacgtatcgcacaccgttgtgatccccgcgacctccccttcatactcgaccacttcaccggaacagtctcgccgccggtaagcccctacgcccttt

SEQ ID NO: 67741 - DNA, 245 bp, Zea mays
aacaagtgggatgagcccatcacagcaagaatgtgatgaccacttccagacccctggagatgctgcatatggatctcttcacacccgtcgcctatctgagcataggaggaagtaagtatggcctagttattgttgatgactattcccgcatcacttgggtgttctttttgcaggataagtctgaaaccacagggaccctcaagcgctttctcacgagagctcataatgagtttgagctccaagta

SEQ ID NO: 67742 - DNA, 402 bp, Zea mays
cttaactcatcaacattaaagataagcatatagcatatgtatacctgcctgacgatttaatactggttcagccattcattgaaccacaaaatttcacggaaaacaataaaccgcaccccacgctttggcaacgagcatcggtgctgaaaatctgggcggaaagcgagaaagactctgactctctgctcgcggccgcagcccatcaggacagaactaccaagaaccatctatacaagcaagcaacctaggattactcaccacgaaaacaagaaatggaaccgccaccttcggatggatcacccctcctctccaccacgccgagggagcggcggcggtggcggcggccgtggatcccgctggaagtggccgcgaaacctcagaaaaaacaacccgctggccctt

SEQ ID NO: 67743 - DNA, 392 bp, Zea mays
tgcaccagcagcgccacgacgtgacgcgaaccagccgttctatatacgctgggagaagaggcctcgagaagaagtacacgccgccggaccaccatcctctcgcgcccgaggaggacctcgtggaggcgagcgcacgctggacgacatcctcgacgcccagtgcccgtaccacaaggacatgcgccacacccttcgaaattgccgggatttcaagcactccgtcgggcacggtcgacccttacaacctctaccgcctcctccgccgaggggaggacctgatgaaccacaacagccccgtcggcaggaggaggggggaggaggagctatcccgcgcgttgacagggaggtcaacgttatcttctgcggacatgggtcgcatgagaacaaaagac

SEQ ID NO: 67744 - DNA, 434 bp, Zea mays
  unsure (1)..(434): unsure at all n locations
tcagctccatctatgntatggattgctgttgagtcagttttattgccttcggcccttcttgcagcttcctgacttccatggatagcaacgggtccctgatccgaaggtatcttcatgcaaagataggcacgatgaatgattgcctctaaagcattgaaggtaccacgaccaataattgcattgtaagggtattccatgtcaacaatgtcaaacacaacttgctcagttctagtgttgttgatgaacccaaaggtcaccgacatggtgatcttgcccagtgctacaatctgtcttcctccgaagccacagagaggatgtgtagcatcatgaatcttatcttctggctctcgcatttgtctgaaggccttagcaaatataatgtcagcttgactggctgtgtcaaccaagacatagtggaccagaaatcctttgat

SEQ ID NO: 67745 - DNA, 387 bp, Zea mays
tcaacttcgtggttgatcgatccaattgggccttctgtgtcaccccttatgaagttctcctcacttgagaatgcgccaacgttggcgaagctggttcttattttcttaacacattctatggatttttcaaagcaccttttctttgatgcacgaagctcttcaacgtttttttccaaatgatttgcccattgttcactaatttctcgttttgtttcttcaagtgtgcgttcctctttagctctagctagttgcttccgaagatcttcaatttcacgcctctgagcctcagcttgagctttgaaagtagcttcgtcttcttttattctattcaccaatgaatataatattttatctttttcgagaccttcgttccttagttcaattact

SEQ ID NO: 67746 - DNA, 440 bp, Zea mays
tgaagccatggtaagtagcatgagccaacataattctatttttctcaagcctagctacaggtgcatatgattcaccgaaatccaaaccttctacttgtgaatatcccttggccacaagtcgggctatgttccttgtcaccacaccatgctcatcttgctttgtgcggaaaacccacttggttcctacaacattttgattaggacgtggaaccaaatgccatacctcgtttctagtgaagttgttgagctcctcttgcatcgccaccacccaatccgaatattgaagtgcttcctctaccctgtgtggctcaatagatgaaacacaagagtaatgtctcacaaaatgtgcaacacgagatctagtggttacccccttatggatgtctccgaagatggtgtccaccgggtgatctccattgattgcttggtggactcttggg

SEQ ID NO: 67747 - DNA, 373 bp, Zea mays
tgctggacgtcaccctcgtacctgagacgacggtgcagttagtctccgacatgacattatcgccgctcgtcgaccaagaggtaccgaccgatccccatcccacgtcatttggattcagcctcaacccgcctagcgacttcgctttggcgggcgctctcgtagaggcaagtccaaaccctctggggtttcgtatgcggtcaccttgtgaccggctgacggacgtctcgacctacgggccctctgggtccgaggaagacgacgagcccagcatctgttgggatttctctagacttggcaaccccagtgccatgcgggacttcatgaccgcatgcgactactgcctttccgactgttccgacggtagccgtagcct

SEQ ID NO: 67748 - DNA, 480 bp, Zea mays
  unsure (1)..(480): unsure at all n locations
tgtctaaactcanatgtgcaggtgagaagcaaagcaattctattactttagaaaaaagatcgggtcatgtaagccacaatcaagtgggatgccgagacccattgacccaagaataacagtgtatatgaagttccatgagatcagaatagagatgacatcaacaatcagcgctcaattattgtcaaacaaataacaatgcatttgaataaaccaataaacataacatggagggagacctcatagtatttaaattggtgtatgagagttggacagaagaggcgatgaacctcgttctaggattgtctaactgcagtgcaggttagtgcctataccgcccacaaaggaaccagatgaaggccacaatcaaccaattaacatatgtataaattctaatcaacatggcaaaacacaagctgacaagccattaaaaanttcacccatgcatgccctgcccagtctgcacgtagtcaccatgcaagt

SEQ ID NO: 67749 - DNA, 443 bp, Zea mays
taagcttgccttacggaaaacctttggacctgtgatgctttcttttcttatcacgagaagatttaaaaatgccactaggagtgaggaggggatgagagattctcgcgttgttggcgatcttctcaagaaggggccggccctggacaggtgccggcggtgcggccgcaacgggcctacgagaaccaggggccccctatacgtgtatgtgtatatatatagaaaatgtttatgtagattacaacacaaagattgataaaaggccaaagcccatcaacttacagtatgcatgcttgtttaagctcgattacttggcttctcgtggacgcttgaactgcaatcctctttggcttctcatggaagcctacactcacgttgtccatgctactacaattgtctgcaccagcagtagcagctagcagtgacagaccggagggatcaccttg

SEQ ID NO: 67750 - DNA, 446 bp, Zea mays
  unsure (1)..(446): unsure at all n locations
nngacaacaccattgacattntacataaaatttctgagatcaagaatatttagttcattcctcaacatgcaaaagcgggtcttatcaagtggcttagtgaaaatatccgctaattgatcttccgacctcactccttctaaaatgatatctcctttagcaacatgatctctaaggaagtgatgacagatatcaatgtgcttggtgcgagagtgttgtacatgattattagcaattttaacagcactctcattatcacacaacaaaggtaccttttctagaactacgccatagtctagaagagtttgtttcatatacaaaatttgtgtgcaacaagcacctgcggcaatgtattccgcttcggcagttgacaaggcaacactgttntgctttntggatgtccatganactagtgatctaccaagcagatggcagtccccagaagtact

SEQ ID NO: 67751 - DNA, 398 bp, Zea mays
tgactgtccaaaatcaagaacttcaagtgcaacttgaaaattgcaagaacatcaatgtttcatctttattgattgaatctaagtctagctcctcaaataataccatttgcaaacattgtgtcaaataccatggttcttgttgtttgactaaccatgcaaggaagaaaagcccacaggttaaggttaaagaaatattgaagagatgctctatcaattatgggttaaagaaagttgaacccaagtacaagtccttaaagcccaacaatgggagaaaggggcttgggtacaactcacataaggtaaaccctagcatatagcataaggggtggagatcccccaagttcatagagggaaccgccctatatgatgccttgtggaggattcattcctcaaatgac

SEQ ID NO: 67752 - DNA, 460 bp, Zea mays
  unsure (1)..(460): unsure at all n locations
actcagcttctaagggagaacacattntatgattaacaaatgttctttttgagaaagacaggatttgtagcgcatgccaagcaggaaagcaagttggctcacatcattcacacaagaacatcatgacgaccgacaggccacttgagctactccacatggatctattcggcccgattgcttacataagcatcggcgggagtaagtactgtctagttattgcggatgattattctcgcttcacttgggtattctttgtacaggaaaaatctcaaacccaagagaccttaaagggattcttgagacgggctcaaaatgagttcgacttatggatcaagaaaattaaaagcgacaacgggacggagttcaagaactctaaatcgaaggcttccttgtgaggagggaatcaagcatgagttctcttctccctacacaccttcacaaaatggtgtagtggagagga

SEQ ID NO: 67753 - DNA, 401 bp, Zea mays
  unsure (1)..(401): unsure at all n locations
ggaccttaaaactcagcttgtatgaacctanatttggctatgtcttactaatttgcttctcagacataaaacaattggtttctattcatgttgttagagcaacaccttaattttggcgtgtcctctgccatcgacccctgcgcatgcgccactcgctttggtgctccccgagttcttgtccggtcaaaccagaagccgttctctcgttcatcggttcaggtgtgagtctgccgccgaccacagctcacccttgacttgaggtgttcagctgttggcacgcacgcactacgcagtgcggtctgatacggcgatgcagtagtgctaaccttgtcgttgccgttttatagaaagataatatagagcagtacagttgctgcgacggcgatgcttgagagcacaaa

SEQ ID NO: 67754 - DNA, 380 bp, Zea mays
tgtggattatataatagtatagatacgaagatgtttctctctgatgcgccccaacagatgtcacaaccacatgcccagtagtgaggggccgaggctggatactgatgtgacaaaacggttagaaaacactagaaccaattttcttttcatttttttctcaaaatcaaaatagaaaatgataactctggaaacaaaaatgacatcagcaatttagaaacatcgacaatgaaagtttgatgtgaaaaaagtcagtcacaatcaaaatctaaaatatgattgataaaattcacaacatattctctcactttacttaaaaattcacacaagacatacatccacatagaaaatagtaataatatataattgttgggggccttcgg

SEQ ID NO: 67755 - DNA, 466 bp, Zea mays
  unsure (1)..(466): unsure at all n locations
gacactatgaaactaagctaataggggaaaanattcactgacatatgggaaaatgttctatctacgaatggcccatgaaataataaagaanaacgaaaaagatattcacaacgcttgagaagcaacgaaggcaactgaaaaagctatggaactcgaaaggcggataggtattgcttaatggcttttaactatgttgtttattattgtgacttcgaactgatttacgttttctaccgcagctgaactatctcctcccccagagcccttcgagtcactggccgacccataggcaaaggaatcatcagaaattattaacatggcagaaactattgtagacgaagtcgttacccaactgctgaccgaagctacatataaaattttgaaagaagaagaatagctattgtaaaacattgctagaatattaatgtaacatttgctggactatgctcgtaatattggtgctcat

SEQ ID NO: 67756 - DNA, 359 bp, Zea mays
  unsure (1)..(359): unsure at all n locations
tgggaacatggngcttttccccatttccgtgtcttccatgctaagtaaaatttatttgtatacaatcgtattaatctgttcatgtgagttttttatttgtttggacgtaaggaattgttttgtgttccaaacgggcctttggtgtgctgccggtggttgtagaaattgagttatagcgtgggtgggtaacgaaggaaggccctgtttggaaatggatttttctcataccatagtattttgataccatggtatacagtatgacgtgacataataccacaatttaagcaaaaattgagtaaaacgacagtatttgtccataggtagcactgtttggtagcacagtatttggcttatataaa

SEQ ID NO: 67757 - DNA, 336 bp, Zea mays
  unsure (1)..(336): unsure at all n locations
ggcatggcatatntaaataacttggattgtatttanggcttgtctaacctagttgagctaaccgccaacaaagcgagtgaaaaagcttaaatcgggctcaaacgtgacaagtcttagttttaagcttttagtacttaaattcctacttactatgaaattgttggttcttgagatatgcttgaggcactacacttagggggagtactcaaaactcacatcattcatgaaaacccctagtgcaaagccaaaatgcaaatctcaccatttgcctattttctctaaaaattatctagcctatggcaaaatattgttaaaattatgaaaaagaaatatatg

SEQ ID NO: 67758 - DNA, 451 bp, Zea mays
  unsure (1)..(451): unsure at all n locations
tatgaagattcttcattccaacatgggctagtctgcggtgccagagccaacccatgttagtcttagcaattaagcaagtgtcgagttcagctctatcaaaatctactaagtatagctgaccctctaacactcccttaaatgctattgaatcatcacttcttctaaagacagtgacacctacatcagtgaatagacagttgtagcccatttgacataattgtgaaacagaaagcaaattgtaatctaatgaattaacaagaaaaacattggaaatagtatggttaggtgatatagcaattttacccaatcctttgaccaaaccttgatttccatccccgaatgtgatagctcgttggggatcttgngttttctcatatgaggagaacatctctttctcccagtcatgtggtttgtgacccgctgtcgagtatccaacttgagcccccggatg

SEQ ID NO: 67759 - DNA, 392 bp, Zea mays
ggcatcccaggcggggggccaggtactaaggaagagtcttcatcatcgcacacaacaagaacaggcgttacacagataagtgttaaatgttgtattgaagacaatatttatttgtttacaaaagcaggggaaggcctgtgggccggttctaaagaacggatgcccattccatagggtggtccggagcctatgtggccggttagcctggttccgtacccaaaatcctgcacactccaccactctgtggcgggcatcctagtatttaaaactaaagtcctgtgggtccgacaacctggaggtccagctctgaagaacgggcacttgtctcctgtggggtccagaaaacttgtagccgctcagcctggtcccgtaccgtgagcttgcatactcca

SEQ ID NO: 67760 - DNA, 433 bp, Zea mays
  unsure (1)..(433): unsure at all n locations
ggcatgacanaaacgtgaatgccataaatctgactcattatataaatgaatagaattcaccattttattacacacatcatgcagtgataagcggaacaagcctccgcagtcatatcctttaccaacaaaagtaccatgtttcgacacaacacatttattagactcaagagacaacttgtatccatctcgacatagcatagaagcgctaacgagattcttcttgatagagggcacatgctgcacgctcttcaatggcaccgtatttcccgaagtaaacttcagaatgaccgtaccaacaccaagaacatgagcacgcgacccattttccattaacaaggcgtcagacctcccgaccttgttggaggagaacatagaggcatcaacacacacatgaatgtttgcaccactgccattcaccactcatgttgaatac

SEQ ID NO: 67761 - DNA, 355 bp, Zea mays
ctaagctcacccatggcaacctggctctaatgttgtacatgtatgatttagagaaatggatgcaatcacttatcttcttagtcaaaagaatgtttcttgtcttgtttccattttatcgataacattttcaagattacatgttggcttgttttcatttgtctaacctatttgctcattccagttcttaaaaccactttcctatttttctgcactgtatgatgatgttagctctcttttgcaaagttgattgcatgcacatgtggaacttgccgctttttattggactttgcttgcttgccgcttacttcacgctaaatgcaatggtcttattatgcacgtatgcagcaggagaata

SEQ ID NO: 67762 - DNA, 388 bp, Zea mays
  unsure (1)..(388): unsure at all n locations
tagaacacaataatgaaccactatgagaaaatgcaacagtaattttcatgtaaaaataaaaagataatgctaatcaatacaacaacattttataatgtataacatggagtatcgatggctacccctggcctgcttatactaacaaacttggtttaaagtgtaaccaatttttcattacaggtgtgtgcatcctgcgtcccctctcctatgcatattctatcatccttcatagcaataaaatggaccagcacatgtgtgttcatcttgcatcactgttcagaaagaaaacaaagaaaactgtaactcaacacatacgatggtacctgtggtatgtggaggtgcagtcctgtanggatgatagccacgggctaggtgtaccatggatgga

SEQ ID NO: 67763 - DNA, 432 bp, Zea mays
  unsure (1)..(432): unsure at all n locations
tgcacttacgaccaaaccgcacccgcgtccatatcttattttatggcttaacaatagtggtaaggtcgaggtaaccaagctggtacgaattaatttcgctattggttcatatcgtgatgttgatgactgtgatgttgtgcctatggatgcttgtaatattctgctaggtagaccatggcaatttgattcagatagtatgcatcatggttgatcaaatcaatattctctcatacaccatgataagaaaattattttgcttcccatgtaccctgaggctattgtgcgtgatgatgttgctaaagctaccaaagctaaaactgagaacaacatgaatattaaagctgttggtaataacaaagatgggataataatgaaaggacaatgtatgcttatgacaanaactgataataatgaataatttgcttcacttct

SEQ ID NO: 67764 - DNA, 394 bp, Zea mays
  unsure (1)..(394): unsure at all n locations
ttacactacacatgaccccactgtaagtgaactcgtgcatattatttctcgttatgtaataaagattatgacattcgtctctatacactgagtcattatatatgtgaattttattctatcgcacatataagatgtatttgaattgaccttanatccgagtgtgacagaactagtatcagagtaatgttgactgtaggacgtaacctagatagcattggacaaacctttatctatttattttctactctgattcttctatactttccttaatcctagctcattttttggtgctatactatggttactttcnaccttttctattgtaaagacaatcactacggtggccaggctagtaacaggactcatgctcatnnccgggtcaagatcttttacc

SEQ ID NO: 67765 - DNA, 404 bp, Zea mays
  unsure (1)..(404): unsure at all n locations
ccctccttcctcagatagctttttccccgaagcatgtcgtatgatgtaatcatgcatgccggcaggtgcttcggggatgacggtgcccgtttcttcaattaatattggttccggaattattactgcttcggcttcaaaaggttgttctttgaagggctctgaaggcccancttcagcttcagcttgttgagccgaagcttcagtagaaccttcagcaacatcaacactctnttttgaaattgtacttgaagacttaatcgtctccaagacgtctagtacatttaccattcttttcctttttggggtcactaatggccccttttggtgttttgctgtcccaacgattgctgtaggactcaaaacttctaatgttttggagccctcagttgcttctcttaccttct

SEQ ID NO: 67766 - DNA, 373 bp, Zea mays
tactaagcttcttgttctttgaaaaacttcgcagctctggccttatcggacatagcttgacacgcaaaggtttagtcattaccttcagaatctcttccacttaggcaacatgaacgtgttacaggagctaactactctcggaccgatgttattggttttagagatgctcgctttggagagacaactatccttttacttggagcagctaccttcagctcagggcttaatttttcagaaataactttttcctttttacacaaatggtgctgtcattgtcaaaggcgccgactatactttttctctttgggccttcggaatctccggccacatgctcataatcaggatagtcaaaaatcaaagcattctagcaccc

SEQ ID NO: 67767 - DNA, 374 bp, Zea mays
  unsure (1)..(374): unsure at all n locations
tctaaagggagatcacattntaggattaacaaatgttcattntgagaaagataggatttgtagcgcatgccaagcaaggaagcaagttggtgctcaccatccacacaagaacatcatgacgactgacaggccactggagctcctacacatggatctattcggcccgatagcttacataagcatcgacggaagtaagtactgtctagttattgtggatgattattctcgcttcacttgggtattctttttgcaggaaaaatctcatacccaagagaccttaaagggattcttgagacgggctcaaaatgagttcggcttaaggatcaagaaaattagaagcgacaacggggcggagttcaagaactcacaaatcg

SEQ ID NO: 67768 - DNA, 418 bp, Zea mays
  unsure (1)..(418): unsure at all n locations
ntaagagactagagctcgtttgtattgcttacctcangggtagctgtagtaggacggagcgcagcccagatctatcacccgctgtcgaacaactttgttatttctgtccaccttgaagttggccaggaattatgcttttgcttcctagatcagctgcttcttgtgctcctcgaactggagctgtttgtcaaccgacaaggtttcccaagtcggctctatgatattgccggtggaaatgtcatagctatcttttgaaccgaccattgagggctgatctgataggtctataagcgatgtccccagcagagtcgccaaaaagtgtgttggcgccaatctgggcgtcaatcacttgtgtgagaatcggcgatagtgctctctgtggaggcacggacagaccgcggtcagggccggacggaca

SEQ ID NO: 67769 - DNA, 428 bp, Zea mays
  unsure (1)..(428): unsure at all n locations
tgtgacacatttncttntccattacttagtctatagctttaatatgggacaagattctntttaaggggaatggatgtaacacccctggtgttaccaaaactaaaatctggcatgacatcatatgcattggcatctttgtattgtaatacacctaanatgcattcactagaatcaaaaacagtctaagtccgatgttgtgatcaatcgagtgtggaaaacctagtttgagaaactttagttntgatccaaaagtggatatgtgatctggcaatattttgcctaaaagtcaaaataccaagttatagagttttctaaaccaaacatttttcatgtgtagagaattccaagatttgtaggaaaaaaaggagagaaactcgaagttaagtttgtgtggacttaaggttatattgctgaaactattaaccact

SEQ ID NO: 67770 - DNA, 427 bp, Zea mays
tctaaagggggaacatgtgttaggtctaaccaatgtatctttcataaaagatagaccttgtgcagcttgtcaagcacgtaaacaagtgggaagtactaatcacagcaagaacatgatgaccacgacaagacctctagagctacttcatatggacctcttcggacccgtcgcctacctcagcatcgggggaagtaagtatggtcttgttattgttgatgatttttcctgcttcacttgggtattcttcttgcaggataaaacagaaacccaagggacccttaagcgcttcctaaggagagctcaaaacaaatttgagctcaaggtgaaaaagataagaagcgacaacgggtccgagttcaagaaccttcaagtggaggagtaccatgaggaggaaggaatcaagcacaagttctcttgctcctacaca

SEQ ID NO: 67771 - DNA, 435 bp, Zea mays
  unsure (1)..(435): unsure at all n locations
tctaaagggagaacacgtgataggattagctaatgtgcaattctaaaaagatagaccttgtgcagcttgtcaagcaggtaaccaagtgggaggagcgcatcacagcatgaatgtgatgaccacatcaagacccctggagctgctacatatggacctcttcggacctgtcgcctatctaagcatacgaggaagtaagtatggtctagttattgttgatgacttttcccgcttcacttgggtattctttttgcaggataagtctaaaacccaagggaccctcaagcgcttcctaaggagagctcaaaatgagtntgggctcaaggtgaagaagataatgagcgacaacgggtccaagttcaagaaccttcaagtggaggagttccttgaggaggaagggatcaagcacgaggtcttcgcttcctacacaccacaaca

SEQ ID NO: 67772 - DNA, 414 bp, Zea mays
  unsure (1)..(414): unsure at all n locations
tagtgaggagattagtgaatcataatcgacagctgtgactcattacatctagggagagccacctacagcacacaccacttgcattatgcttctcttggtcaagcgaaagtctatggcttgttactcttggtgattggcatcacctacaccgcttggtggcgtttggagctccgagatcaccgtgaaaatcttgccggtgaccccactcaagtctgtaagcggtctcgagggatccaccgctcctgagtggcaaaggatcatctagtaatgagcacttggttcttgctaggaccaanggggagcgatacccttgcgcgggtgctccaaccaggactagtggagagtgccgactcttctatacctccgtaaaaattggaggagtcttctaaactctgctttacattccgcacttaa

SEQ ID NO: 67773 - DNA, 439 bp, Zea mays
  unsure (1)..(439): unsure at all n locations
tactaagctngcatacaactggcaatctcgtagcctttgaagtacttttctatatgttcctcatgctcttgctcattctgggaatatataaggatatcatctatgaacacaactacgaatatgtcgaggtagtccatgaacacactgttcatcggatacatgaagtacgctggcgcattcgtcaattcgaatgacataaccatgaactcatatagtccatacttggtgatgaatgctgtctttggtatgtctgagggtcggattctcagctgatggtaacctgaccttagatctatctttgagaacacactggctcctctcaactgatcaaataagtcttcaattctgggcagggggtacttgttcttgacagtaacttcattcaaagatctgtaatcgatgcacatcctcttcgtgccatccttctacacaaacaaca

SEQ ID NO: 67774 - DNA, 348 bp, Zea mays
ttaccttgattcccaaaagtcagcatatccttgagagtctttttctttgacgggtaagacttgcgaaagtacactctatactcatggttatcaaacccatgttgttgtacgtgatgaaacggatgcgttctgatgtctctgttccaaggtggttcccaagcagaaggatgaacactaaaacttatttgcggagggcggtttgcctcccatagatgtaataaccaggtgcgcactcaagtacccggatatgtaataactactctttctatatttttgtatgaatataaaatatgttattgtaatcctttctgcttactctctactccgatgatgtgtaatgtctgcgtg

SEQ ID NO: 67775 - DNA, 439 bp, Zea mays
  unsure (1)..(439): unsure at all n locations
acactatnaatactcacctntcatgacttgtgttagtacgcacgctaccatgtttactctgatgagaagaatagagacaggttcaggaggggcctcaacaccaagctccgtgaccgtctcaacatagtcaggcccacagctacaacgagttggtcaacttggccatctcatatgaggattgcatcactgctcaccatgcagagaaaaagaggaagacgcctatggcaggaccatccgcacagcctcagcgcttcaggatcgtgtccaacactcagagtagaggacctcgacagcagccaacgcgatgggtaattcggccacagcagcagtaggcacccaaccgcgctcaagccccagctcagaggaacaacaaccaacaacagccagtgtactggccaggaaatggcgacagatgtttaccctgtgcaacactggacac

SEQ ID NO: 67776 - DNA, 458 bp, Zea mays
  unsure (1)..(458): unsure at all n locations
taaggaaagtactaccacttctttataatgtataagaactgattctaagtttaacttgggcaaacaaggtcagtttcgaaatctgtacagaatctggacagattccaagactagacttgagaaaatcataactcccaaactactagacctatggtcatgaaattntacacaagtaagatgaagaagttggctacaactttttatatacaacacctctaccgaaaacatggtgtaattcattgaactagcggcataaccaaaactggtcatgtagtcccaaacagcaagcaatagatttattcaggttctatactcttctaagattaagcgttcatcgaaggactaataactttacgttcttcattacgagacacttatagccaacataagggtagaagcaatatgcttacttttaaatcaatttagcctgatctacatatgcagcagaatcaattagt

SEQ ID NO: 67777 - DNA, 433 bp, Zea mays
tgcccttcaagcgaccggtaaaggcaactgaggagtcctcccttctaaggatcttcacatccacatccgaaaataagcaattataacccattccacacagttgtgaaacagacaacaaattatagcttaaggaatctactaataaaacatttgaaagtgattgttggtcagatataggaattttaccaataccaatcaccttactcttgccactatctccaaacacaatttcttgtgcttcttgagttagttgcaatgtatgaaacatgtctttctccctggtcatgtgatttgtacatccactgtcaagcacccaacttgacccaccagaggagtagacctgcaaaacaagtttaggctatgcttttaggtacccaaattgaattgggtcctacagtgttatttatagccttgggtacccacacacttcttt

SEQ ID NO: 67778 - DNA, 460 bp, Zea mays
tctaaagggagaacacgtgataggtctaactaatgttactttcaaaaaagatagaccttgtgcagcttgtcaagcaggtaaacaagtatgaggagcgcatcatagcaagaatgtgatgaccacatcaagacctctggagctgctacatatggacctcttctgacccgtcgcctatctaagcataggaggaagtaagtatggactagttattgttgatgacttttctcacttcacttgggtattctttttgcaggataaatctgaaacccaaggaaccctcaagcgcttcctaaggagagctcaaaacgagtttgagctcaaggtgaagaagataatgagcgacaatgggtccgagttcaagaaccttcaagtggaggagtaccttgaggaggaagggatcaagcacgagttctccgctccctaaacaccacaacaaaatggtgtggtaaatatgaagaac

SEQ ID NO: 67779 - DNA, 426 bp, Zea mays
tacaatgatgcctcccattcccataaaaacaccacctgtattttgaggccgaaaactaagagtcatttgtccagtggtttcaaagcccaaatcactctagagtagtgtatcctctatgctttctttgtgatcttgacgtttttcaccatcaaccctcaaccgtctgatcaccaagtcctctggcacctccatttgacttgattgactactaccttgacttgatcaactcagtcttacttatcaacgactccagctgtcagtcacctacagccagtcctacaaattctctagtccctaattcatgcctcgacgttcgtacttcaccgctcttagtccatcgttacaaacctgtttgacctttatcttcaccgtcgaccaccgtctctgctcacacatatgcaccacaagtcaagagacaaatcgtat

SEQ ID NO: 67780 - DNA, 431 bp, Zea mays
tgtgaacaatacatattcagaagggagaaagcagcttctttatatcagccgaagcccatgctcttatgtgaggacatagcagatcagaaggtgttgttgggctctcaattatccgaagaacaagagaaaaccttgataaggtttttgttcaacaacaaagatgtttttgcatggtcagccaatgatctctgcggagttaatagggatgttattgagcactcgctcaatgttgatccatccttcagacccagaaagcagaggcttcggaaaatgtcagatgataaggccgaaggtgctcgtaacgaagtcaaaagactcctcagtgcaggagttatcagagaagtaaagtacccagaatggctagcttacactgtcatggtaaaaaaggccaatggcaagtggcgaatgtgtattgattttacagatcttaa

SEQ ID NO: 67781 - DNA, 450 bp, Zea mays
  unsure (1)..(450): unsure at all n locations
tgacaacgaggagatggcgctcatcatcaatagcttntatcatatcctcaagcaaaggaggggaaagaactacaaatcccactccaagaaagtgtgctaccggtatggtgagtcccgccactttattgctaaatgttctatctctagtgaaagtgacagggacgacgacaagaaggggaagaagaaggataagaataggcactacaagaagaagggcggcgatgcccaaatatgtctggaatgagactccgatgagagctccaccgactcctcctccgaagaggacgccaccaacatcgccatctacaagggccttctctttcccaatgtcggccacaagagtctcatggctaaggaaggcacaaagaagaaggtacaatctagagccacccctaaatacacaacatctagtgatgatggtagctctagtgatagtgaagataatctaat

SEQ ID NO: 67782 - DNA, 402 bp, Zea mays
gggcaccaacagtttcctttaataatatatttgaccagctcgagatctttgtctcttgaaggcaaacaatggaagcgccagtggatagaattgtatgccttacgctttctctcttagcatggtcgttcaacccccgcacattccaagagaaaatagtgcatttcggattcataaagataaaaaaaccactctagatgagacagaatgaagccaccaaacaaatcccagccaggaaccctgctgcagcgaaccaccagtgaaagataatttcgaacaagggatcgtcgaactagaacaaagcccagatccaaacgacaatctgagattacatggatacaaaggcatgccatggaccctaaagcacttgccagacgcgctaaaaccagcagaaaataaatagag

SEQ ID NO: 67783 - DNA, 452 bp, Zea mays
aactaagctcgcacgagcttgaaccgaggacccgcgccaccggaatatcttttcttgctcgccggagttcggaaccccgccggagcacgtggactgggtaagcctctgcaccattttccaattcgttgcgcgcatggcctctacatccccccgtggatgtgacaccccagtgtcactcaaggttcttccttaagctagccccaacccatgatcacatgcaatctcaataaaagcgtgaacattgaaaatgagaacaaagaattaagttgaagtctacttaaactcttcatgagttcaaaaaaaaggagaaaaacacttaaaccctagttaaccctaagtgaactatttatgcataaagggtaaatgggagaaacccttgcgagaagaatacaattttgaagaacaccaacttattaagctttaagtcacttgataactaacacaacataata

SEQ ID NO: 67784 - DNA, 394 bp, Zea mays
  unsure (1)..(394): unsure at all n locations
ntaccaaatggacgtgaagagtgccttcctcaacggaccgatcaatgaggaggtctatgttgagcaacctcccggctttgaagatagtgagtaccctaaccatgtctataggctctctaaggcgctntatgggctcaagcaagccccaagagcatggtatgaatgccttagagatttccttattgctaatggcttcaaagtcggcaaggccgatcctactttgttcactaaaactcttgacaatgatttgttcgtttgccaaatttatgttgatgatatcatatttgggtctactaatgaatctacatgtgaagaatttagtaggatcatgacacaaaaattcgagatgtctatgatgggggagttgaagtattttctaggatttcaagtcaag

SEQ ID NO: 67785 - DNA, 299 bp, Zea mays
aaaattccttatggagagaaggaatactctgatctataggccaagttagcaacacaggggctgcctttaccttcggaagtattgtttgaaacaataaaagcaccttctgtcgagcttcttgaaagaacggttcttatcagatcccctgcctatagtgaagattggacaactgacatcatatcttgccttcagggtaattttctatcagatgacgaagcttattacatgatgatagaagcaagagctcgaccatatgtcataatagaaggggaattatgcaacgaggggtcttgtccccg

SEQ ID NO: 67786 - DNA, 388 bp, Zea mays
  unsure (1)..(388): unsure at all n locations
tagcaaatcacagtgcacaagagctaaaaaaatgaattatctatagtggttggccagaaagcgtgcaaaatgagtatgcggtatggccgtatttatacgctcggtgcgttgaaagctgatagaccccacttgtcattgaatgttgctattctagcaaagggaaggtgtgttttcggaccttcggcgtaaagccttcgtccatatcgcaatctaaatttattatttcgaacaaattaatattgcgaggggctactgttggggaccttcggcgtccgaaggtcctcaaaaacaggatttaacagtatttctgcagtacaatgtgtaaacaggtatcctctgactaaagtcgacattgtatnggacccgaataatacgaaggttgactcat

SEQ ID NO: 67787 - DNA, 430 bp, Zea mays
  unsure (1)..(430): unsure at all n locations
tcttcctaagaagaccctggagcgcggtgctcgcggaagttatgctttgtgggatggccctcaccccgaaccctgaatcttcaattatcatctatgcactcgaaacctatacccagcatgcgctctgtctcgcgcactcgtgagctgtgagacagctccggctgctgctgctccttacccttatctgtgttggaggggcgaccgcggcgccgcagcggcgggacgggattggagtcgatgtcccccgaggaatccatcgtggggaggggattgacagctgtcgatcggtgggtgcgtggtggcaactggacgagtttggaggcggncgtggggccagctgcaagattaatgtataggtgtgtaacagccctcgcagatccgatgatgatgtcctgaaaataaacgttacgccgttgcggttcaccttcat

SEQ ID NO: 67788 - DNA, 390 bp, Zea mays
  unsure (1)..(390): unsure at all n locations
tcanaactaaaagcttataaaaacacagtgcacaagagcttataattgagtgagcgggagtggttggccagaaagcgtgcaaaatgagtttgcggtatggccgtatatatacgctcggtgcgttgaaaattgaaagaccccacttgtcattgaatgttgctattctagcaaagggaaggtgttttttcggaccttcggcgtagaagccttcgtccatatcgcaatctaaatttattatttcaaacaaattaatattgcgaggggctactgttggggaccttcggagtccgaaggtcctcaaaaacaaggatttaacagtatttctgtagtgcaatgtgtgaataggtaccctcggactaaaatctgcattgcagtagactggaataatac

SEQ ID NO: 67789 - DNA, 414 bp, Zea mays
  unsure (1)..(414): unsure at all n locations
ntgattataaaaaaactgatgtgctacatcaactttgaagtcccaggctgccatagttgctttcaatactgtttggacacattttggaatgagggatctcgttcaggaattattagcttttaagacatggtcactagcggctaagtaggatatgccgaagatgtctgaaaaagatgcttcagacgttgagcctacgctggtcaggcttcgttacaagtgtaattttaaagatgaatatggagaacctagtgatgggtggttagattgtattgaagcgaaatgtaatgaaatagttggtaattatagcaaacttgaagacaaagctttacaactggcttttgcgactcgaaaaaggcatcgattgaaccgtgtcttcgatgctattggcttcttctatccttgactatcccacat

SEQ ID NO: 67790 - DNA, 365 bp, Zea mays
tctaataaaacaagacgactatagttgtagcaaaagcatgtgttttaaaactacaaggttgtgacgtccaaacaccttatcattcgaaaaccaaaatatttaaaaaatcatggtatatactatgcatccgaatagggccataaacattcgtctctttttctattgtataacccctttcatgaaactatattgcaaggtgatttaccaatgtcgcaacttactcttcatcaaatcttcttgtgtaacctgtgttaattttgtgaatcgaagcaacaagaaaattgtttcacagccatattctatcactttagttaattttccctgacaaagctgaccatgaaaatagctatccaaaggaaaagctc

SEQ ID NO: 67791 - DNA, 478 bp, Zea mays
  unsure (1)..(478): unsure at all n locations
actaagcttctaagggagaacacattntaggattaacaaatgttcattntgagaaagacaggatttgtagcgcatgccaagcagggaagcaagttggcacccatcatccacacaagaacatcatgactagtgacaggccactggagcttctacacatagatctattcggcccgatcgcttacataagcatcggcgggagtaagtactgtctagttattgtggatgattattctcgcttcacttgggtattctttttactggaaaaatctcaaacccaagagaccttatagggattcttgagacgggctcaaaatgagttcggcttaacgatcaagagaataagaagcgacaacgggacggagttcaagaactctcaaattgaaagctttcttgaggaagagggcatcaagcatgagttctcttcttcctacactccacaacanaatggtgtagtggagaggaagaatcaactctattg

SEQ ID NO: 67792 - DNA, 328 bp, Zea mays
tgtgaggcaacacatgagtagtgctattattacatgtgcgtcccgacgtaaggctcatatactgatgacatgcaacagtgagacacgacaactacatagtttgttgtctctttttactttaagtgacgaaagctatatcatattgctttactttacactatggtctgacgatggcctagactacctggtggctgtatctgatttcctagatgcctaatcctatctctgttatgcaacccacacagtgtgacatcgtggcctcctacatcactgaatggcacgtgaacaactgctacagggggtgtatatgcgcccaccttgcatgatc

SEQ ID NO: 67793 - DNA, 424 bp, Zea mays
acttgtcttaggctcatcttccatcctcatccagagtggatgatatcctgtatagcaatccaagaggctcatgagctacgaataactgctgcatccacgacggagtctattcttggctataggaacatcatccttctgacatgccttaataaggtccataaaaacaatgcacattctacatattccattggtcatcttcaccatcacaatattggctaaccatactagatatgctaccttcctaattactccgacaatcacgagtactttgacttcattatagcaccttcggcgtaggaccaaaagcgtatataaaataaatccatcccatgaatacattgcgaatgaatagaaattcagaatctaaactctactgatgtgaaaacataacaaacttgaaccaagattattagaaagaaacaac

SEQ ID NO: 67794 - DNA, 459 bp, Zea mays
tcatactcggctgcgttgttagaggccgggaatagcaactggagagcatacttgaggtgatcgcctccaggtgcagtgaagagaatccctgctcctgctccctgcagcttcagcgagccatcaaaatacattcgccatacttctgcggtttctggattatccggaacttgctgttctgtccactctgatacgaaatcggccagtgcttgagttttgatggcagtgcgaggtcggaactcgatatcatgggatcccaactcgcaagcccacttggctattcggccaatggcttccttgttgtgaagaatgtcccctattggaaaaccagtaactactatgactctgtgatcgtcaaagtagtgacgcagcttgcgggcagttagaagtactgcatataatagcttctgaactcgaggatattttttcttcgatgggcctagaacttcactgatgaagtag

SEQ ID NO: 67795 - DNA, 375 bp, Zea mays
tactaagcttagccattgtcatgattctatttcaagtcttagaactaataatgctagtttaatttctaagattgacaaattgaatgtttgcaataattctatttcctgtcttagagatgagaatgccatattgaatgctaagatagaagaattaaatatttgctaaccatctacatctactgttgagcatgtttccatttgcactagatatagagatattaatgtagaagctattgatgatcacattgctatgattaaacaacaaaatgatcacatagctaagttaaatgctaaaaatgctgagcatgaacttgaaaaatgaaaagtttaaatttgctagaagcatgctctataatgggagacgccctggcatta

SEQ ID NO: 67796 - DNA, 383 bp, Zea mays
  unsure (1)..(383): unsure at all n locations
aactcangctatgttacaatgcacgcaacacacgaggaaacctttcttcgtatgaccgaacgatcttgcgtatgagggcacaagcgccaatagtgcccaatgaaattgtcattgacgtcatgatcaaggggcttcggccagacctacacccataacttgctaggaaaccccctcagaccctagagaaattgcttcaaaagatggatgaatacattcgcgctgataatgaacttcatcaacgaagggaggaagcctacaagttctctgagatgaccacgggcttcggagggagaatccacccaccgcacgtaagatcaatacactccactcacacatacgacagacgaagtcactagcataagccacaatattcctcgcaagct

SEQ ID NO: 67797 - DNA, 443 bp, Zea mays
tcttcctacttaaaggactggctattcccgctattggtaatgtcagatcaatttcgttctgggatgatcagtggagtcagagcatcccgaggcataattttccagagctactctcctttgtcaaaaactcaaaattgactattaaagaggccaaggagcaggagcagtttgatggtttctttcatttacctatctctgaacaagcgtatgatcaatttctggtgctgaagggatcttgggagcaaatcgttctgaatgatgctcacgaccgttggaggtacatttgggggtcggacaaattctcatcccacaaagtttacagaatttccatgggccagatgcagactcaccctatctacagactaagttggaaaagcaaatgtcagcctaagcatagagtcttctactggctgtggctcaaaaataggcgtaacaccagaaat

SEQ ID NO: 67798 - DNA, 414 bp, Zea mays
  unsure (1)..(414): unsure at all n locations
tgtgaaggttcttcatccncacatgtgctaagcggcgatgccacagccagcccatgctagtcttagcgattaagcatgcatctagaccggcctcctcttttgcaaaatcaactaaataaagtttgccgtctagtacacccttaaatgctagtgaaccatcacttcttctaaagacagacacatctacatttgtaaatagacaattatatcccatattacataattgactgacagatagtaaattatatccaagagactcaactaaaaacacattatagatagagtgctcattggatattgcaatcttgcctaaacctttcaccttgccttggttcccatcaccgaatatgattgaatcttgggaatccttattcttgacgtangaggtgaacatcttcttctcccccgtcatat

SEQ ID NO: 67799 - DNA, 433 bp, Zea mays
tctgctcatctcccgacagacagaaatttccttgctgtttgggatacaatacaagaagtcttcttctccactgccattgaatattaacgcccccttcggatatttcagtttttgggcgtagtgctgggcctcttgctcttctttttctgatagttttttccccgaagcatgacgaacaatataatcacgaactttgggggatgcttcaggggcaatgacaccggtttcttcaacaaaagttggctttgttattatttctgcctcactttccaaggattttatctttgcaggctttgagggcccagcttcggcttcagtctcttgccctggagctttataatcagaaattgcagttgttgttttacgaatgacagcaagcctcttcggaggtgtgcttgaagatttgatcgtgtccagtacatctagcacatta

SEQ ID NO: 67800 - DNA, 423 bp, Zea mays
  unsure (1)..(423): unsure at all n locations
ctcgtaatagagacagaccaagatttgtaattagaaccatcgcctaaaagaagttctacagttacctcttgtgacgacatcgttatctccggacggctaagcccacactggagaggcctagctccgataccaattgaaagttccctttgacccgggaacaggatctggatgtcgcctagagggggggggtgaataggcgaataaaacttattactttaaaacttaaattcttactctactcgaagacttagtacgccgtggagtgagaagactcttcgagtatgttgcagcggaatcagagatcttgtctcaaaaatgtcctgcacttcanataaagcttataccacagataagtatttgagtgcagatataaagacgagtaagacagagagtcacgatactatacagaacagagcacacaga

SEQ ID NO: 67801 - DNA, 460 bp, Zea mays
ctaattgtgttgccatcaatcaccaaacagggggatatttatagctctcttctggttttggtggtttggatgacaacccaattaaaggactaacaagtgtgctaagtgttgaacaagtgcttaatgcaaagctaacagggttcaacacaagtgaacaagtgtgatggtccaaagactggattatctatagataatggacatcacaagtaagatggacattgcttaagtgagactcggtgtgcgtaactcagagacaatcgatcaagccaaggatggaggcaagaagaggttctaggtaccgagtgcacgggagaatgtcaaggagactatgaactcaaagccaggggtgaagaagaagacttgcaagtcaaagtcgatcgagttacgaagagttatggtgcatcaaggatcactacataatgacatgacttacaaccaatgatgtaacatctacaattat

SEQ ID NO: 67802 - DNA, 326 bp, Zea mays
tgagaaaaggagtaaaggacctcctgctgctgcatggcatatgtcactcacgacctgtaagtttttccaagtctttagtgccattactaggtttcacaaatatggtttagtaaagttattcaagtgggctaacgtaaaaaaaataacacaagacaaaaaagaaatacccaaaacaaattaggcgatgttttaccaagacaaaataaataatttatgtgaaggaaaatgttatttcattaattaatgtcaaatggcaataaagagataaagtggacacaagacttgtcgttcttgatcccgttgtagtcacagactcaagcagaaaa

SEQ ID NO: 67803 - DNA, 423 bp, Zea mays
tactaagcttaaaagcagctaggccatgtgctagctagagagcgacgtctatgcattattgatgatggatcaacctacactacacacggctggcctgtattctgtgtaccaaacgagaatcagtggatcgtcgatgagtcatgagtgcacgatccctctctctcgtcacgttggttcaattaagcagctaccagcagtcaactgactgcacactctaatccaaacacggccagccttttgttcgtgcaaggaaagcgatcgacgacggtgatcggccggggaacgaaggtacgtgcaggatatatggcccggtagtgcatgtgtcatgtgtgtgtgccgagatcgtgtgtgcatgtgtgggtccggtccagaggttgcaaagacatcagatcgttggtgctgcactgcacgcacgcgttccac

SEQ ID NO: 67804 - DNA, 444 bp, Zea mays
  unsure (1)..(444): unsure at all n locations
atactcaagcttgtaacctattctctgcctattggaagggtcgaattgcacctattatgtcttnccgtgcttcatgaccctcccctcgacgacatcattcagatcaagtgcaactcgtccctgagcaatcagaaacatatcatgaaagtgcgccacgacaaatacctgctaccaataccttggaggatgactctggtgtgtagcatccggtacctaaaaacttcaaaatggaaacaagagaccagattacgtgaccaccggaaaaatctgtatatctgcgacgactcatcccgcgttacatgataatatgaggctcacacattgttgcttgcgctggcatggacatggagagggccataacaccaagaacctgcggctcgaatactgttctctgcctatagagcccacatgttgccttcacagatggagccctaatgtggcgtg

SEQ ID NO: 67805 - DNA, 301 bp, Zea mays
catgcaacagattggggttggacagatctggagggacatgataatgtgtgtctatcttgctatcgatccaccgacaacaagctcatagctgcggctgtgtttcatgataaataaactcatcatataaggcggcttagaccaggtgatgcactgttttcaatgctgatcatattggtcatggatgttcttggacacttatttataaaggcagaagaggcacgcttatttgtataattggcacacagaagacatcttctcagagtatccatttatgcagatgatgtagccctattattacacc

SEQ ID NO: 67806 - DNA, 330 bp, Zea mays
tagtaatgagctaaacatcttagattctcggagctttgattgttacattgcacacatagctcatctatataccattgatcatgtctctttcatttggtacaaatgcatatatcttattcttcttgtgccaaagctaagactaatgtgcttccaagagtatttctatccttagtcttagattgaaagggaaatggaatattccgcaaaggaaaaacttccactacaactatgtcggtatcatttatcctttgccctactcataaactctcactcagattctttaaaaggaggagaaaaataatatgcatctcaagtttcttcatttttggc

SEQ ID NO: 67807 - DNA, 415 bp, Zea mays
tcccacaggagggagcgagcggcctcacgctagcgctgtctctttccttcccgcacggccaaccctctataagagggccctggtacttccttttatcggcgcaaggagaggatccatgtgtacaatgggaggagcaacagtgtgctaacgtgtctagcggaggagagctatcgccctaaatacatgccatcgttgaatccgcagaggtatttggacactgttacagtggtgtcatggtcgactgaggaacgctggagcatggcggaatgacaactgtccgtgctgtcgagttcttgctgacgtccttttgcttctgtaatggggctgagtagcaccgacattctataacgtgccgggcgccatcattacttgtctgcgaagctagccatatgggacgcctgtcttgttccccgta

SEQ ID NO: 67808 - DNA, 465 bp, Zea mays
tctaaagggagaacacgtgataggtttgactaacgtgcatttcttaaaagatagaccttgtgcagcttgtcaagcaggtaaacaagtgggaggagcacatcacagcaagaatgtgatgaccacctcaagacctctggagctgctgcatatggacctcttcggacccatcgcctatctaagcataggaggaagtaagtatggtttagttattgatgatgacttttcccgcttcacttgggtgttctttttgcaggataagtctgaaacccaagggaccctcaagcgcttcctcaggagagctcaaaatgagtttgagctcaaggtgaagaagataaggagcgacaacgggtccgagttcaagaaccttcaagtggaggagtatcttgaggaggaagggatcaagcacgagttctccgcttcctacacaccacagcaaaatggtgttgtatagaggaagaacaagac

SEQ ID NO: 67809 - DNA, 378 bp, Zea mays
  unsure (1)..(378): unsure at all n locations
tgaaggccaagtcaaanagcaagccccaatatactttgtattctaagttcttagnttatcaaagaagaaatatacagaattggagaaggtgctgtatgctgttatgatggcctccaggaagcttcggcactattttcaggcatacaatatagttgttccttcttcacaaccgttgaaggatattatgagaaatagagaagctactggaagggttggaaaatgggctgcggaactcaatgaattttgtattgattatgtgcatagatcttcgattcagtcccaagcattggcagacttcattgctgactggacgccaggggctcatgaagaagaagcgagtaaagatgccgaagtctggacaatattatgtgatggatc

SEQ ID NO: 67810 - DNA, 381 bp, Zea mays
  unsure (1)..(381): unsure at all n locations
cctacgcttctaaagggagagcacattttgggactaacaaatgtttattttgagaaagatagggtttgtagcgcatgtcaagcagggaagcaagttagtacccaccatccacacaaaaacatcatgacgacagacaggccactgtagttactccacatggatttattctgcccgatagcttacataagcatcggcgggagtaagatctgtcttgtaattgtggatgattattctcgcttcacttgggtattcttnttgcaggaaaaatctcaaacccaagagaccttaaaggggtccttgagacgagctcataataagttcagattaaggatcaaaaagattataagcgacaacgggacgaagttcaagaactcacaaata

SEQ ID NO: 67811 - DNA, 308 bp, Zea mays
ccagctgtcccatctaataactgcaggaggacacttgttcttttggataggtccggaacagatgctcctgctggcaggaagacctccaccatatccactcatatcaaatcaacgaaatacatcggataacttcttggtgaataacatctgctagctcttttgatagccatgagacctgatacgttactcccatcatgccttatgtaagggctggctcacacaatacaagccaaggagtgtccctgcctgtattataagataacaccgatccaccgaccctggcatatcattctagcgacatggaccta

SEQ ID NO: 67812 - DNA, 393 bp, Zea mays
tgttgggaagttgttcgtcaacacgcagcatgcttctatctggcgcgccaactatcagcgtttcgaccccggtgggtccctggaccgacgagtgaattgtcaccgcgtgtcccagcccatatgggtcggcgcgagacggagcacgaacgggggaagagaacaggcaaaggggaatcccgcggccttcgtgttgccctgcgcccaggtcgggtgcgcttgcagtatggggttacaagcgtccgcgtgggagagagcgagagccttacgcgccggcccgttcttccgcgcgggcaacctcctcgtacgagagccctggaccttccttttataggcgtaaggagagggtccacgtgtacaatggggggtgtagcagtgtgctaacgtgtctaacac

SEQ ID NO: 67813 - DNA, 347 bp, Zea mays
tctaaagggagaacacgtgataggtttgactaacgttttattcgaaaaagatagaccttgtgcagcctgtcaggcaggtaaacaagtgggaggagcacatcacagcaagaatgtgatgaccacttcaagacccctggagctgctgcatatggacctcttcggacccgtcgcctatctgagcataggagggagtaagtatgctctagttattgttgatgacttttcccgcttcacttgggtgttctttatgcaggataagtctgaaacccaagggaccctcaagcgtttcctcatgagagctcataatgagtttgagctcaaggtgaagaagataaggagcgacaacg

SEQ ID NO: 67814 - DNA, 451 bp, Zea mays
  unsure (1)..(451): unsure at all n locations
tagcanaagaaatttctagaatcaagaatatngagctcatgcctaagtctggtaaaagattgttcatcaagtggcttggtaaagatatcggctaattgatctttagtattaatgtaagaaatctcgatatcccccttttgttggtgatccctaaganaatgataccgaatggctatgtgcttagtgcggctatgctcgacgggattgtcggccattttaattgcactctcattgtcacatagcaaagggactttggttaatttgtaaccgtagtcccgcagggtttgcctcatccaaagcaattgcgcgcaacaatgtcctgcggcaatgtactcggcttctgcggtggaaagagncgaccgaattttgctttttgangcccatgacaaccaggatcttctcaagaattggcaggtccgatgtgctcttctattgatcttacacccgccaa

SEQ ID NO: 67815 - DNA, 388 bp, Zea mays
gaccttaaaactaagcttagcagctgttcgacccgcacgaggcatcccttctccttcaacaacctgacgggctcagccatccatgtaaccacagatccttacaccgagttcgtgcatccactctcagatacaacaaatcgaatatgcccagtggctgcattcatgtggcctcctaccaaaccatggctcgctgccacaccaaacagcatctccctcagagcccgagcctgctccagtgcgcgagtgaggtccgcatcataaccctatccctccacgagcagcgcccctatgatgtcgaaaccgtgtggcagcaacccccggaattagtctgcggaaggcatacaagtatatggacatcgataggacgtaggcggaatcatgagttgtt

SEQ ID NO: 67816 - DNA, 463 bp, Zea mays
  unsure (1)..(463): unsure at all n locations
ngacatcaacaatcatangtntaatctctatttatatatgattttagtcttttttacaatttacgagctagtatagaaactctattttttttcaagagatttctatttttccaaggaaaaattatatttcttggaacgatagaaatctcttgaaaaaatagagttcccaaattagctctagatgtgcgaaagcacgacgcgatggaaattgcggatccgagaaactgatgttttaatataatagagaagtgtccacacgattgttatgattttcatttatactctgttatgatttttatttatacttaagtatagcacataaaacataaagatatgtatgttctatttgttacgtgggtatgaatgtgagtttaatgccaatgaatatgggttgaatcttcctttatacataatcttagtatgtaatattattacaatctaaatgtgtgaagcaccacgatga

SEQ ID NO: 67817 - DNA, 401 bp, Zea mays
tcttgctagatagaaacacaatttgagagcttggattatcatgttcgttgtgctacacacatagacaatatggctgtaaatgatggcttgcaaccaatcgatgaacttataagtaaccttagggaaacagtaaaatatttcaagagatcacctagtacaatgtacaagttcatggatgtttgcaaggagaatgctgtaatatgtggaaaacggctctctattgatgttaaaacaacgtggagttcaacatatagaatgttggatactagcattgactatagggctgtatttggttactatgctgaaaaagaacataactatatgtgggagccattctaatcacaatgggacatgtatgacaagatagaccaatcttatgacaatggcttgagcaaccactg

SEQ ID NO: 67818 - DNA, 402 bp, Zea mays
  unsure (1)..(402): unsure at all n locations
cgtgccttanaacaagaggatacacgacgttggagtgcttatgtgaaggtctttgcgaatcacttgaagcgttagtactttttgtgaatgatttgtaaagtgtttgcaaatatgtgcaaaacataataacatgtgtaggttttgtgaatgatattgttgtggtgcttgttgatggcttatgtgaagtggatctatcattgtgcaatactaattaaatttgtatatctatgtgattatgngtataaaaattggtgatttgtgatgcttttatatatataacacttgttgaatgctaattaatggtatattatcattattaacgactataatctngggcaacttttctgttggttgctaaatgtatagtataacgactcaccaattgttgctaaatctattata

SEQ ID NO: 67819 - DNA, 379 bp, Zea mays
  unsure (1)..(379): unsure at all n locations
tatctctatatttgaaaaggggagaaataattaacaaatggggaatcataagacaaacatatgatgtctaaagttgatgagtgcatactatgtcatgagtatcacgtttattttatgacacactgcaccccacgaatagtatgatataagttgtcttcactctttgacctaaatatgtgcttttggcatatgagtacaaaagtgttattttctgaaatgcacatgtctatgaggaggaaactatcataggattcaaaatcttatttatcaaatcttatgtaagctntaaatgtgttgtcatcaatcaccaaaaagggggagaatgaaagtgcattcatcccttttgtgagttttggtgaattggatacaacacattaaa

SEQ ID NO: 67820 - DNA, 375 bp, Zea mays
aaccaaccaaacagagaaaagcaagacccgagaatgtttattataaggggacctgtacaagcgaggagtctgtactccactactcaaatgcctatccacagccgaagggataaaattgatgaaggacatacacgcacacaccgggggaactcacaacggatctaggactccgctgggaaaagattctcgccaaggagattaatggccaaaagcacgctccgatgccacggaattagtacacaagcgcgaacgctgtcagaaatgcgcaagagatcaaaaacaaccttcttccctaacccagttgagacaacccacttggccatagcaaacgaggggcctcgaattgttaggcccgctaccaccagcacaaggaaa

SEQ ID NO: 67821 - DNA, 292 bp, Zea mays
tataacacgaggatagaagcaagagctcgaccatatgttattatttatcgggaatcataccagcgtggggtttgatccccgatgctcaagtgtttatccagaaccgaacgcatataattaatgaaggaaatacatgcaggcctgtcggcgttaccagacaagggggtccctaatccgaccagtgagtgtgctgcgtgccctaccccacatgggtctagcgcgtgggcgatcgcggaggggggagaagcgaggcggtcggtaccatcgtgagagaggtggaagtaccccgtct

SEQ ID NO: 67822 - DNA, 421 bp, Zea mays
  unsure (1)..(421): unsure at all n locations
ctgtaagcaaggcaagagaaactaatggtgtggtagtacttgcgggtctaagagacccgggagattaaggaagaagcctcactcagtctatgtgaccgtctgagagagggaaagggttgaaagagacccggtctttgtgaccacctcagcggcgactatgttctttggaaccgaacctcggtaaaacaaatcaccgtgtcatccgccttactttcttggttgatttgtttttcccctctctcccagactcggattttattctaacgctaaccccggcttgtagtgtgtttaaagttgtaagttatagttttcgcctatccacccncctctaagcgactttcaattgatatcagagctcggtacttcattagagtctaaccattctaagtgatgtcggaggatccgccagaaggagatggaa

SEQ ID NO: 67823 - DNA, 286 bp, Zea mays
ttacggtcatggagtcactatagaggcgagcgattttgccgactatattccgggctctgatgatgacatagaataggttcctgctggttcattgtcagctgattctggtggtgatcctatgccaagcacttcattgacttctcacgatttgtgagttccttcatttctctccaacctctaggtactgtgaaatattctagtcctgacttttacacacgatgaactgctgtcattacactcctctgttctcaatatcatgcattggtggattggatggctagtcagt

SEQ ID NO: 67824 - DNA, 363 bp, Zea mays
tcatactcggttgcattgatagaggccgggaatattaactggagggcgtacttgaggtgttcgcctccaagtgcggtgaagagaatccctgctcctgctccctgcagctatagcgagccatcaaaatacattcgccatacttctgcagtttctggattatccggtacttgctgttctgtccactctgatacgaaatcaaccagtgcttgagtattgatggcagtgcgaggtcggaactcgatgtcgtgggaccccagctcgcaagcccacttggctattcggccaatggctttcttgttgtgaagaatatcccctattggaaaaccagtgactactattgacttgtggtcgtcaaagtagtga

SEQ ID NO: 67825 - DNA, 454 bp, Zea mays
agaagttcggacatttatgggcactattgaaataatgtgtggtgaatgcgatggttcaagtggtcttgtaagagacccatcccacatatgtgttgaataaacactttttcgctatataatatatctggcaaatggcatgaattacaatatgcagttaataggattctgaagatccatcatgagatcctaggaggactcatatctttgaagtataaatatgcaacatataaatctcgtaccgaataatacattcctgacgaaggaacactctcctgtgtagagagaatatctcctatgagattatagctccttaatggaacctttccagaagaaataaagtatgtgttaaacaccaaagtttgataatcctatacagggataaagacccatcatacccgaaaaggaatagatgatgtcccaaggacttgaagtcaccgaataagcacatgtgcat

SEQ ID NO: 67826 - DNA, 418 bp, Zea mays
  unsure (1)..(418): unsure at all n locations
ctaatgcacaatttcttgcatcaacaccatatgagacatatgatgcatatgatcaatattatcaacaacaataactcatcctttcttatccaagcgttcctttcacgtcgaggtgagctttaatgcacaatttctccccctttgacatcaaacaccaaaagcaagaacatatgatgatgtcaagggacagcaggatattaagcatggaaaaaatgcaacgcactaacactactcccccttacacattaaacatatggaccacaagcatttgaggaaaattaagatacaaatatgcaaaagatcaatacctncttttgtacctttaccatgttgcgaatgtacttttatcttgagagttaaatctctatgagggctcttcacacttgtgcctgatacttattctaacttttcttgtgct

SEQ ID NO: 67827 - DNA, 431 bp, Zea mays
  unsure (1)..(431): unsure at all n locations
agcttccccatgaccaccttcaggacagccgatgcattcatctcaccgacaactgtgcccatggtcatggagcggctctagctgttgtgaatcgtaatggagtgaagtaatgtaaatattgattttgcgattcaatgtatgtgtcgaactcctgaagtcttttggctgagtgccagtgcatttcatggaaggtgggagtcaagtcaagctgtcttggtcagccacctttaataacaatgcaaaaaaaagttaggtagactgctttcctttccattatttcacatcttnttcctttttgttcttttggaggaaacctcaacctcaaaaattcattaatcctaaagctttctctaaccatcaaatgaaatattttcaaaatagcaactgtgaatgaaggacagacctgacgcaatggtgacaggccttttcat

SEQ ID NO: 67828 - DNA, 432 bp, Zea mays
  unsure (1)..(432): unsure at all n locations
cttcttacaaacagagctggtcatctctcaatgcgaagggcttgggcgaataaaacccttatctagcaactcttgcaattgcttcttcaattctgccaactcagcgggtggcattcggtagggcctcttggaanatggggtcgttcccggctgcaactcgatggcgaattcaatatcctggtccgggggcattcctggcaattcatcaggaaagacatctgcatactcacagaccacctggatcttcttaggggtaacttcatcatagagaaagcacatgactgagaagaaccctgactaggcagaatcaaagtgaacatttcgcagaaaggagaattaacttccacggtacgactggctacatcaagcacaacttggtgcaaggtcatccaatttgcccctagaataatgtccacattttccaatcccaac

SEQ ID NO: 67829 - DNA, 431 bp, Zea mays
  unsure (1)..(431): unsure at all n locations
agcttgcttggcacagatcatcatcagtgggctctatgctgacctctcatagcctttggtgtgctccttaaggactctagtttatagcttccgctgtgagatcttgtaaaactctgattaaatctaatatatttgagttgtggtaatcatcgtggctctctcgagggcgtaaagtgcatgattcgatccttaccaaattgtggtgaaatcgaggtcctgtgggattctcgatggactaccggacttgacctatttttgggttaagttgggcgggttcggcacactatctaccttaccatgtgttntattgatgggttacatgatcacattaagtctgttgtacttctgcaacgaccctcttcttgggatactgttgggttgtggctcaattgcggaagaaatggtaaacatgccagaggaaagacacagga

SEQ ID NO: 67830 - DNA, 483 bp, Zea mays
  unsure (1)..(483): unsure at all n locations
agctanaaaaatctggttgaatctgcgataatacccatcttgtccaagaaaactccggacttggtgaacagttgttgggggtgtccactctataatatctttgaccttgctaggatctaccgcaattcccttagccgataacacgtgccccaaaaattgaatttcttccagccagaacgcgcacttgctgaacttggcatatagttggtgttcccttaggcgcgtcaatacaatccgtaaatgctgagcatggtcttcttcattcttggaatatatcaagatatcgtcgatgaagactaccacgaacttgtccaactcgggcatgaacaccgagttcatcaaataggtgaagtgggcaggagcatttgtgagcccgaaagacattaccaagtattcaaacaatccataccgcgtagtaaacgcggtcttcgtatatccccgggccgaatacggatntgatgatagcccgacctgagatcaatt

SEQ ID NO: 67831 - DNA, 478 bp, Zea mays
  unsure (1)..(478): unsure at all n locations
agcttgtaatgaacatgcctctactttttatattaaaaatgangtngcaagtcttaatgctcaacttaatgcttacaaagataattatgctaaactaaaatttgctagggatgcctacaccattggtagacacccctcaattaaggatggacttggtttccaaaaggggaccaagaactttacaagccatagcacctcctatcttaacaaggagaaagggaaggctcctattgctagtagttctcacaagaaccatgtctatttttataggaaaagtactaatgttactcatcatgataagtgtcataatcattctgttcttcctgtgtgtcatgaagatgtaattagntcccatgccatgtttgcaactagctcctcttatgctcatggtagaaataggcctatgcgtaatcatgttggttcttatgtgcctatgaaagaatccactggtccaacttctatttatcatacatgtgac

SEQ ID NO: 67832 - DNA, 311 bp, Zea mays
  unsure (1)..(311): unsure at all n locations
agcttgntgacttctcatcagcaaagagaaatatgtttatatattcaaaaccttgtagtttggtcaaaataaatagtttagaggatgaaatgtacacgcatattttgctagctgagtaaaaaattgctggatgtgctttattcagtccacaatacaatctacattcggattggatgaattcgagctgcacaagatcattaattctaaggacaacacaaagtatgagcaatgacttacctcataagnacacagcagaaggccatgaatggcctgtaccgataatataatttcagaaatcaatattgaaatcg

SEQ ID NO: 67833 - DNA, 439 bp, Zea mays
  unsure (1)..(439): unsure at all n locations
agcttaataattgngcattgaattaaggctctacttttgttctatttgcaaaanttcaggtagatcttgattcaacccatgttgaacttggagatggggaagacactcaaggtgcatttcatttgctctgaatctaatccttgctcatgtcccatcaagaacttattgttttcctttcccctcctgtgtttntccagtctttgatcttaaatggtccatgatccactggtatcaagtaaccaggctctctctctcttccttctaaaacgttattntgatacccgaagttttcgactaaattccacaacgagtgctgaaagaaaataagtgtgctattagggaaaaatgaagtagactttgttaaggcacatacatagatgtataattatacaacacaattntatttggtaatatttgaattggctaccgactgttcatg

SEQ ID NO: 67834 - DNA, 398 bp, Zea mays
  unsure (1)..(398): unsure at all n locations
acccggatcttaagtcacctgangcatgcaagcttcatcaaaataactacgctctgtttatatatatcgggcacacagcaacacatgaaccgggacttggcgcgacaacggtgttgacatgagcagcgaggcaatggcgacgagcgacaacatcttgctctactacagcaagcagaatgtagtagtgggcgctatgggctgggcatggagcacggcacggcaagagtggagcttctgacgtggtgtaaatactgggcgaggcacggcgtgacgtctaacaacaactcgcgcgaagcgagtatcggtgcagctattcttggcgactcagaagaccactcaacagcgtgcggcgaggatctccgatgaggggagaacaggcactgtgttggggcacaaca

SEQ ID NO: 67835 - DNA, 485 bp, Zea mays
agcttgaagtataacttcacccagtcagagttgtacatgatacaaaggcgatggcttgagcttattaaggactatgaattggaaattcattatcacccgggcaaggccaatgtagtggcagatgcacttagccgtaaggtttcctgtcactgtcttacggtgaagacctctgacaatacactatgccaggagatggagaagttaaacctggaaatgatccaacaaggagccttaagtcagctaaagcttgagtcagtccttttacaaaggataatggatgctcaaaaggataatgagggtatgaaacacatccatgagaagatagaggctggaaaagccaaatgcttcagaaaggatgatcaaggcattgtatggttcaacaaccgcatagttgtgctgaagaatgaatagctccccgagccaaatttagatgaagcacatcttagtcgctattctattcatcccagaagcactaagatgtatca

SEQ ID NO: 67836 - DNA, 480 bp, Zea mays
agcttactaaagtgagtccttactttccatcttttaatgccatcttaagtattaatagactctatttgcatctagtctaatttcacatcaaatcaagacaacattagttttatccatagtgttcacatcttgactctaggttgtagaaaagtgaccaagtcttcataaccgcgaaggtacggcgatccgaatcgattatactcagctgaggatctccaatcacacgacatatgtagcacttaacccttgcatatgtcaacccgccaccggggttcttaagaccggatcaggttcacgcaaaccgagagcacagctacaccaccgtccagcctcttgccacagagggtacacgctactctcgccaccgctccacgcccatttcgtgttatcttattccggccttagtctgcccgaggcaaggcttacccatgacgaggcatgtgaccagttaaagggtcctcggtcagcacgcctacatac

SEQ ID NO: 67837 - DNA, 357 bp, Zea mays
tgcaagcttacttgattccccaccaatctcggagctcgttctctatatcatgcattatcgacctggtcggccgccggccaccgcggcggtgtcttctcgggcgaccaccaatccgtggcccaggtaatcccaactccaatttgaaaggcgcaaaacgaccatgggatgaagatgaagccagaggaaggaaacttaccctccattataccgtagagccatccacccgcgactgggcatggaatcgcggtggagcatatacgtcggcgagcaataattcgccccatggtgcaactaccagctcaatcgtgcatgccgcgagggtcacatgcccttgcgacacttcctaccccgcacctg

SEQ ID NO: 67838 - DNA, 391 bp, Zea mays
ctgccgctgcagcttgccatcttcttgattacgatggtgtcgtccttgtcactagcccacgaacaacctttcgctacatattcttggctcttacccgcaattcaacgggtggtactgttaagactgcaccttgtgatattcatggtgtggaactgtgaaagcaactggcccttgatcttaacctttactgaattgagatctgtgctgtgactgaaactgaactgggtggctctaaaatgctgaacaggtactttcccttgatcgtcaacctatacagcacatgtacgccatctacaaactgcagatacatatggtggagcatcctggcgataggagggtttgactgactaagcaacatgctgttctctcaacgcgccaatctgtgccctct

SEQ ID NO: 67839 - DNA, 330 bp, Zea mays
  unsure (1)..(330): unsure at all n locations
tcatgtggagctgtgtatgctaatcctatttatccgaacggtaaggtgcttgatgaagactgctggtcatatgacgatcactgctggaaggaggtgatacagantttcttcactaaaacaatggtgttgcttgacttggtggtttatgtttgttcatcataaacttcctggtatagctcttctaaataagtactatatactatcctgcacgattggtatctagttntcaaaacactgtcgaaacgagaggctcttgcttttgaacaanacaaggctggacgttgtaactgtttgccgtcattatatttggactccgggcggcgtntattc

SEQ ID NO: 67840 - DNA, 479 bp, Zea mays
  unsure (1)..(479): unsure at all n locations
agctntccananagtcttggatcactatctttggtggtctgaagattaagttatggatgtttaaagtctgaagactgaatctgtccagttctggacagcacagccttcatagtgtatttcaccctagatacatgttaaaccagccagtgatgtttataaataatttgtagaacattntattagctttccagaaagtctaagatcactttgtttggatgcctgaatcttcagttatgaatttttaaagtcataagtctgaatctgtccaaatctggacagcgctgttgtgttaacaccttntgaccttgctaagtgtttaatcatgttgtgatgacaataccaaagttgtagagaacattntaagctttccagaaagtcctagtttgctatgnttggattaatatttgaaaagttatgactaaaacaagtgactggtgtattgctgtccacaaattctgctagtgcttatttgattggta

SEQ ID NO: 67841 - DNA, 419 bp, Zea mays
  unsure (1)..(419): unsure at all n locations
agctngtggaggttcttcatccncacatgtgctattcttgtatgccacagccagcccatgcaagtcttagccattaagcatgcatctagaccggcctcttcttttgcaaaatcaactaagtaaagcttgccgtctagaatacccttaaaagctagtgaaccatcacatcttctaaagacagacacatctatatttgtaaacaaatagttatatcccatattgcataattgactaacagatagcaaattatatccaagagactctactaaaaacacattagagatagagtgctcatttgagaaatgcaatttacctaacccttttaccttgccttgattcccatcaccgaatattattgaatcttgngaatccttattcttgacgtaggaggtgaacatcttcttctcccccgtcatatg

SEQ ID NO: 67842 - DNA, 481 bp, Zea mays
  unsure (1)..(481): unsure at all n locations
agcttgctacaggccttcttctttttctccaaagtatgaactntactggaacactaccccacttaaaaagaatgaggatagaactcttgaatcttgnggatttgaactccttgaagtacctcataacaagggtgttacggggccttcttctgctgatgttgcttgaccaggctgcggagaaataactgacacaaggttgattctgggagaaccttcttcttatcttctcttcactatcttctcttcactatcttcttttcactgaccctttctttctcttttgctcttccactggaggattctatcaaagagtattactatcatacactagaggaaaccaaagactatgaaccatgtacaacagtcttcaacccaagaatcaccaagcattatgatcttaagggcgatggagtggaaaatggagttgcttgctatttggcagggnggtttacctggagtgtgcttttgttgggatgggagt

SEQ ID NO: 67843 - DNA, 286 bp, Zea mays
  unsure (1)..(286): unsure at all n locations
tgatcatataacacatgactgctgacgggtacgccgtcctgcctatgatgcgcggttcgaagtgttcaccaaacacgaaagagaaacagcttttattagatcctttttctaagagaaagatacagatacggggtgtcccacatttagtctcaagggacgaacaactaaagtgtgtaagacgactttctaaagaagttacattgactatccaaggatgttgacaacactggtatgttagatgagataagatacttangacatgaactgggatcccaaagagactgta

SEQ ID NO: 67844 - DNA, 435 bp, Zea mays
  unsure (1)..(435): unsure at all n locations
agcttctngctaaataacaagcaccacatgcatttttntcagtactaaagtatcccttactgtttcataaatataacttttttcagaaggaaatattgattcgcaaccaatactcagacactaatatatatatacactaatagcagaaattaaaaggcttacatccttcttttcctgtggtaacaggaaaggatcccgaacactaagcccagcaactacagtaagtatatgatctatgcatcgaanaactgcacccattatgagcatctttcccaactttggatcaactggaagcatggaaaggtatcgtcctgcanaattgaataaggaaatctaagattcagttctaaatgtttctccggagcatgcangttaccaacatacactgcataccaagatcagtaaggttctcatttncatctaatgctccaatca

SEQ ID NO: 67845 - DNA, 450 bp, Zea mays
  unsure (1)..(450): unsure at all n locations
agctnggagtaaatcggaagaacagagaagacctccatgtcgtagatgtcaaaaactgggtcgctgaacgaaacaaaccgtacggccggcgtattctatctgattagtacacggcatatatgcaactcaagtagttaatgcaaggaagtattaccgagataatgcttttacatgacgtctcacctgcagaggctccaccttctgtccctgatccgtccactggtattagcatggagtgatttctgaacatccatcctgttgaagtangtctcgacgtagctggagtagcacgggtcgtaccccgagtacatcctcaaccgcctcttggactgctgcttgctctgaaattatttgcacacccagtcagtcatcttagcttgctgctgctaatgtgtatcaacatggtcgatcgagttgttccttaccgatgcgctgctgtcatcagcacta

SEQ ID NO: 67846 - DNA, 427 bp, Zea mays
  unsure (1)..(427): unsure at all n locations
aataaatgtaagattatgttattcttctttcgcattntcttcatctccgatgttctgtaatgtctacaagatgggtgagacgttcctggtgaggtaaggaaagataccgaacttgtcaagtagttcacgggcacctacagggttgtctgatgtccgttggacaaggacaactgtaggtgggcctgattacttgggaggttccgtcacaggattgatgggaggaataaccgcagcagcagaattctgactcttccgcttgggtgccatcacaatctcgtcggcggactgagcggaagcaaaatcaaaggaaaacagaggaagttcggaggcaaaaagtgaggctagggcttataatgcaaaagcgtgcggcgatgtaatacaaatggggttgtctcgggtcagacaccattgtgcttagtcatcactc

SEQ ID NO: 67847 - DNA, 446 bp, Zea mays
  unsure (1)..(446): unsure at all n locations
gcttgagcagngactggcttcgtctaaaaccctttgaatcttgttatcagcatatccttcaacttttgccatgaggtgattgtccctggcctaagggaagagtaccaagtctgtgcaacgctcctgacagccatgacgaaggactntgccatgaccgtcgtgttgccaccgtacgaaggtatggttgcctcatagctcatcaagaattgtattgggtctgaatgaccatcatacatggtgagctgaggcggcttgtaagactgtggccaaagaacagcctgcagttctgttgacaagggagaagcatcatcaaaagcaaaatttccgtgattgaaatctgcataccagtcatcctcgttgagaaactctcttgatgaactctctgccgggggtctttgattctggtcatctgncgagatgtcaagctcttaaaggcttcatctatc

SEQ ID NO: 67848 - DNA, 485 bp, Zea mays
  unsure (1)..(485): unsure at all n locations
tgcaagcttctaaagagagaacacgtgataggtttaacttacgttctattcgaaaaagatagaccttgtgcagcttgtcaagcaggtaaacaagtgggaggagcgcatcacagcaagaatgtgatgaccacttcaagacccctggagctgctgcatatggacctcttcggacccgtcgcctatctgagcataggaggaagtaagtatggtttagttattgttgatgacttttcccgcttcacttgggtattctttttgcaggataagtctgaaacccaagggaccctcaagcgcttcctcaggagagctcanaattgagttgagctgaaggtgaagaagataagaagcgacaacgggtccgagttcaagaaccttcaagtggaggagttccttgaggaggaagggatcaagcacgagttctctgctccctacacaccacagcanaatggtgtggtagagaggaagaacaggacgctaatcgatat

SEQ ID NO: 67849 - DNA, 485 bp, Zea mays
  unsure (1)..(485): unsure at all n locations
agctnngtctgggctcatcttcattcttcatccatatctgatgataacctgagtaatagtttaaaagactcatgagctccgaagtagctatcgcaactataagggagtctattctaggcagaggaaactcatcctttaggcacgccttgttgagatctatgaaatcaatacacattctccattntccgttagccttattngccattacgatattggctaaccattctgaatatgtcacttctctgattactctagcacttaggagtcatntgactttcattcttgctccttcgttttgtcatccgacatcttctgaagcttctgcttccttggtctgatggtgggatctacattgagaaaatgctcgatgatatctctattgacaccacacagatcactggctgactaggcaaagacatctcttttgttaataagaacattgacagagtcttttcttgtccttagataactgggatcaaacaaca

SEQ ID NO: 67850 - DNA, 482 bp, Zea mays
  unsure (1)..(482): unsure at all n locations
agcttctaaagggagaacacatgttgggactatctttatgttcatttgagaaagacaggatttgtagcgcatgtcaagcagggaagcacagtggtgttcaacatccacataagaacatcatgacaactgacaggccactggaacttctacatatggatctattcggcccgattgcttacataagcatcggcgggagtaagtactgtctagttattgtggatgactattctcgcttcacttgggtgttctttttgcaggagaaatctcatacccaagataccttaaagggattctcgagacgggctcaaaacgagttcggcttaaggatctataaaataagaagcgacaacgggacgaagttcaagaactcacaaatcagaggcttccttgaggaggagggcatcaagcatgagttctcttcttcctacacgccacaacanaatggtgtagtggagaggaagaatataactctattggacatg

SEQ ID NO: 67851 - DNA, 412 bp, Zea mays
  unsure (1)..(412): unsure at all n locations
cccatgttagtcttaacaattaagcaagtgtcgagttcagctctatcaaaatctaccaagtatagctgaccctctaacactcccttaaatgctattgaatcatcatttcttctaaagacagtgacacctacatcaataaaaagacagttgtagcccatttgacataattgtgaaacggaaagcaaattgtaatctaaagaatctacaagaaaaacattggaaattgaatggtcaggagatatatgcaatttacccaaaccttngaccaaaccttggtttccatccccgaatgtgatagctcgttggggatcttggtttttctcgtaggaggagaacatcttcttctcccctgtcatgtggtttgtgccccgctatcgatgatccaactngagccctcggatgcataaaccta

SEQ ID NO: 67852 - DNA, 465 bp, Zea mays
  unsure (1)..(465): unsure at all n locations
tgcatctcgcagaaattgctcgagctgtgtgtcctgacccncagcattgactgggaccacagctagctcccacaggttgtcaacgcgagacgcangcacaggggcgttgtcatcttgcggcatgccgaggtggttgtcctcgccgtgatccccctgatcgatgtggaaacactcgcggcttgggtcgcaaccctcgtcaccgaggctcttggtcgatggacggtggcgaagtcgcgttggggacggactgcaccgttatctcatgtatgaggctaacgcccagcaagtcctttgcgagggtgctggcgtcatcagtccgcttggggttggcacgttgcggngaattgacacccgtcgatgtcccaggtgcgaggacaacaaccgacatggcccccgcaggggtgccggcgttgtcgactcgctctggcctgacagctgacgaggtgccgcctctttgcatggcat

SEQ ID NO: 67853 - DNA, 414 bp, Zea mays
  unsure (1)..(414): unsure at all n locations
agcttcngccttcggaggccgaaggttgttatatctataccgccgaagagtgccaaagagccttcggcgttgtctgctcttttataggaacaagggacttagtacaagagcatattgccttcanggtgtggccgcttgcggagaaatgggaaatgccacaagaaaccattaaagaggccgacgaaggtggacttgtcaggtttaagtacacttttaaatttggagataaatttattgagccagatgatgagtggttgaaaagcattgacaatttaagtgatgagctgcttgggacatactcgaaggccgaagatactgcaatgtcagcagccttcggaggccgaaaaaagaaaaggctgaatcgggtatttgatgccatcgggtttgtctaccctgactattgctaccccattc

SEQ ID NO: 67854 - DNA, 386 bp, Zea mays
agcttcggcattgtccactctctcatatttggtataacgctgaaggccaggaattcctgcactaaatctctagtgccaatatgttctgcaataattttgaattcgcccagtgcagcccaagttggaccttctactgccattttgcatcggggtcttgtttctccgaatattatttcaagagggctctgaaccagcttctctttgtcttcgtcaactttgacataaaaccattctgatttccagcctgccggccatttgcttcggtagctgatcacgggaaactttgtggtttttcgataagcaaaattatagcaaccaaaattgtcatgcaatccatcttttccggccttagtttgataatgcagctcatgaactcgacagaagct

SEQ ID NO: 67855 - DNA, 479 bp, Zea mays
agcttgtcaatacttatcaaaacagcttcatctattatcacagcaactacaaaccatacctgtaacatggccattcgcgtgctatggactggatatgattggacccttcaagaaagctcaaggaggatacactcatgcactggttactattgacaaattcactaagtgcatagagtacaagcccattgcttctttaacttcagctaaggcagtggaattcatacaagacataatattcaggttcggaattccgaatagcatcataactgacctgtgatccaatttcactagttcagagttcttcgatttctgcgaacaaaaaagcatccagatcaaatatgcatcagtggcacacacaagagccaacgggcaggtagaaagagccaacgaaatgatattggaagcactcagaaagaaagtctttgacaagaatgagaagttcacacgaaagtgggtcacagagttgtcgtatgtggtct

SEQ ID NO: 67856 - DNA, 429 bp, Zea mays
gcttcggcatctttacttgcttcttcctcctgattccttgtcgtccagtcagcgatgaagtctgctaacgcctgggactaaatcgaagatctatgcacataatcaatgctgaactcgttgagttccgcagcccactttccaatccttccagtagcttctctgtttctcataatatccttcaaaggctgtgatgaaggaacaattatatggtatgcttgaaaataatgtcgaagcttcctggaggccattaagacggcatacaacaccttctccaattctgtatagtttttctttgataaactaagaacttcgaagacgaagtatactggagcctgttttttcaattgtccttcaagcttctcctggacaagcgccgcacttactgcagagtgcgaagctaccacatacaacagcagaggagcccctggc

SEQ ID NO: 67857 - DNA, 470 bp, Zea mays
  unsure (1)..(470): unsure at all n locations
tgcaagctgtgaggttcttcatccccacatgtgcttagtgtttatgccacagccagcccatgctagtcttagcaattaagcatgcatctagaccggcctcctcttttgcaaaatcaactaaataaagtttgccgtctaatacacccttaaaagctaatgaaccatcacttcttctaaagacagacacatctacatttgtgaataaacagttatatcccatattacaaagttgactaacagacaacaagttatatccaagcgactcaactaaaaacacattagaaatagagtgctcggaagaaatagcaattnttcctaaccctttcaccttgccttggttcccatcaccgaatatgattgaatcttggggatccttgttcttgacgtaggaagagaacatcctcttttcccccgtcatgtggtttgtgcatccgctgtcgataatccagctggagcccccggatgcataa

SEQ ID NO: 67858 - DNA, 489 bp, Zea mays
  unsure (1)..(489): unsure at all n locations
agcttcttngtggagactcgttctcaagtgctatgtatttatatcaangcaacataaagtgttaaatgtcaacgtccttcgtccatgaaacattattcccttgaggataatgggtcttggacgaaggttgatgagagtaaaattacgaagcttagatcttcgtaataaaatttcaatagatattgcaagatgacataaaataaaaggtacaaaagaggtaaaccagtcatagatgaattatattatattttcttaatatatccaatcattgaatacaataatacctctgccttgacaaaaggttgaattccagaatatgcgaatgcagttgctagaatccgtgaacagtaaaggaatactgttcactatttataggcacagggcgcagcctgtgagggattacaagtatgccccttataaaagtttacaacattgactcagacctttatggactaaaaggtcattctatctttaagtcgggttataaca

SEQ ID NO: 67859 - DNA, 441 bp, Zea mays
  unsure (1)..(441): unsure at all n locations
agcttgtcaagcangtaaacaagtgggaggagcgcatcactatttagaatgtgatgaccacttcaagacctctggagctcgtgcatatggacctcttcggacccgtcgcctatctgagcataggagggagtaagtatggtctagttattgtagatgatttttcccgcttcacttgggtgttctttttgcaggataagtctgaaacccaagggaccctcaagcgcttcctcaggagagctcacaatgagtttgagcttaaagtgaagaagataaggagtgacaacgggtccgagttcaagaaccttcaagtggaggagtntcttgaggaggaagggatcaagcacgagttcttcgctccctacacaccacagcanaatggtgtggtagagaggaagaacaggacgctaatcgacatggcgaggactatgcttggagagttca

SEQ ID NO: 67860 - DNA, 464 bp, Zea mays
  unsure (1)..(464): unsure at all n locations
agcttgccttcgcttcagtctatcatccgcagttctctgtgtcgtggagcgtgccaatgggaaaatcttcacagctgtcaagaagatgctcctcgatgaanaaaaggcagatggaccgatttgttaccggaggcagtctgggcgctaaacacaactgagtgcagggcgaccgggttcactcctttccgccttctatacggatcggaggcaatgaccccgcaagaaataaagcatgggtcgcccgcgtacagttcatcaggcatccctgacgtggacgagccaacctcanaagatctcattgacggagaccgggtcttcgccctacaggccctaaacaaataccaagcccagaccaaagcatggcgcgaccacgcagtcatcccgagggagttcagcgagggggacctcgtactcatccgaacagctcggacggagtccaagggcaagttggagcccaagtggga

SEQ ID NO: 67861 - DNA, 450 bp, Zea mays
  unsure (1)..(450): unsure at all n locations
agcttctgtnatatacacgaattatcattctatttatataccttgggtaaggagcagtatcacaatcaatttggctgctacagtttcgtttctcggtccgggtcaagctgccccgtgccaacctttcggaaaagatggcccgacgactggatgacagaatggttttatgtgaagaatgatctgacaatacgagaagatatcaaaggtataattatgcgccctattnggcaaagcttctgccttcggaggccgaaggttgaaatgaatgaagctgccgaagaatgccagagggccttcggcgcagtctgctcttttattggaacgagagacttagtacaagagcatattgccttcatggtatggccgctcgcggagaaatgggaaatgccacaagataccgctaaagaggccgacgaaggtggacttatcaggtngaagtacacttttaaa

SEQ ID NO: 67862 - DNA, 483 bp, Zea mays
agcttgccctggctcggatccggcgccctgcgtttatctctgacctccctccctgtctttccccgagctcgcgctcaacctgctcgccggtccctcatcgcccagctcggatttcgcttggtcgcaagtcgttccccgcgcgcgcccatcttcctgttgttgcgttggccggagtttcctgctcgctcggccggccatggtggccgcgcaagtctcctgaccgtgggaagctctggcccacgccactgttgtggccgggatatggcgcgttcctgcgcccggtcttcgtctctatcacgccgatctgcgctcgtccgtggccgtcgaccccgcctagctctttgctcgccatagccctggtcgtcgcatcgctgtgcgcaacggaagcgtggtgggtattggtcgcgggcaatggtggacgacgcgagatctatgcacgctgtcgtttcattatgcccagcgtcatgccttttgacaagtcgt

SEQ ID NO: 67863 - DNA, 458 bp, Zea mays
agcttgaagctgggctctgcgctctgacgattgtctatcttgcggatagccttgcatataatagtctgaaggtatgagaatcgtatatttggaaatttgtaattcttgaatcattcttttattcttatactaattcttttttcatgtagggtttaatactgagcaacgctttgagagcgcaaaagaatgccgaagatgagagctataatattgctttcaacaacctacgaacagaggttattaagctgagtaacgaagctttggaaaaagataaaattctgcttacactggtggataaagtaaaggaagacgaagctacctctaaggctcaagctgaagcccaaaaacgtgaaattcaggatcttcataaacagctggccagagctaaagaagaacgcatacttgaagaaacaaaacgagaacttagtgatcaatgggcgaatcatttggaaataaat

SEQ ID NO: 67864 - DNA, 308 bp, Zea mays
  unsure (1)..(308): unsure at all n locations
gcttggactnagtcgtcccagttggagatcttgtcttgttgcaggtgctccaaccangcgcgagcggtgtctgataggaacagggggaggttgcggatgatgaagttgtcatcgttcgttccacctagttggcaggccatacggtagttcgcgagccacagttccggtctcgtctcccncgagtactttgtgatagtagtcgggggtcggaaccgggtcgggaacggtgcccgtcagatggcccggctgaatgcctgcggaccgggcggttcgggcgagggactcctatcctccccgctgtcgtagcg

SEQ ID NO: 67865 - DNA, 481 bp, Zea mays
  unsure (1)..(481): unsure at all n locations
agctngcaccacggcaggcgtgttcgttgcatttattggtctgtgaagcttcgtactgtacgacacatagtgctggaattaataattgactccaaacgttgccgatcctcttgcaacttgccgtggaatgtatatggtttatggttaaacctggttcgacccgcttcagcttggtatgaataatgccgagtcagtcatgacccgttgaagcttcgaaatgggttgtgctggtccatatgttcagggacatgcccaagcacgacacgtttagagataatcgtatcggaccgacccgacgacatggtaggcttaaacgaactatgccgactagtggcccgaaccaacaataaactagaacataagtacacatatttaacataattcatgagacataataacatattagatacaaatattaagaccaacgggattaatctatcaattcacaagataatatcatattagtagctattacaacata

SEQ ID NO: 67866 - DNA, 370 bp, Zea mays
aacttggggtggctggagtgggctggccacaaaagccgaagctctggcggcaatggcgggcggaaatgagctcgccggagctaaagagaggtggctggccggtgaatgtgagcgccgggtgaaatgaggcgcgcccggcgaggctttatatgcgcgggcgagcgcggccgagggcggggctctgacaagcgcttcgggcgtgcgcggcgaacgccaatgcgcgctctggcgcctggcacagcgtcgagcacgaggcaacgtagagagaggtcaagttcaagcacggattgggcccaaatctttgagattaaggccatgatcccgttgagagatctcttcctctcaggtccctttgtcgtttgtgtgtgga

SEQ ID NO: 67867 - DNA, 459 bp, Zea mays
  unsure (1)..(459): unsure at all n locations
agcttctacctcctctgcctctgggtgttggtggtctgaaagaacatctgtgtgttcttgatgattgagagttgtgttgatgcccttgagtatgacttcccctctcttcacttgagctaggattatggatcgtcctgacatgccttggggtggagtcttcctacaaagccattggtcatttcagagtatttgtaggcttcttcccttttttgccggaagttgttgttggctctaatgtacttgtccatcttctatagaagcttctccagagattgtggnggcttcctagcgaaatactgcaccattggtcctggtcgtagccccttgatcatagcttcaataacaatctcatttggtaccattagcgcctaagatctgagacgcagaaatcttcagacatacacctgcaagtattcctcatgatcctgtgtgcattggaatagagctngagcactcact

SEQ ID NO: 67868 - DNA, 475 bp, Zea mays
  unsure (1)..(475): unsure at all n locations
agcttaagatgtcnggccccaacggggtcatcattcgttttttccacataccgacacgcgtacgaatgcgacgtggagtgcgtggagtacgccgaggccctcgccgaatccgaggccctcatcgccgacctggagagcctctccaaggaggcgctagacgtgaagcgccatgccggcaacttctagctagcagagacggtcaaatctgtccctcttgaccccagcaacaacacctccaagcagatccggatcggctccgagctcgaccccaaataggaagaagtgctcatcgactttctccacgcaaacgccgacgtcttcatgttggagtccctcggacatgcccggcataccgagggaagtcgccgagcactcgctggacatccgagctggagcccgacccgtgaagcagcctctgcgccgattcgacgaagaanagcgcagagccatatgcgaggagatccacaagctgatg

SEQ ID NO: 67869 - DNA, 426 bp, Zea mays
  unsure (1)..(426): unsure at all n locations
atgcccttctggctgctagatatgagccaaggtaggtgtcaatggtggtgatggtggtaactgaacccatgcagcttgagaatgacttgccgaagcaactgatgtcatgggttgctggttgcccacatattcacggatatatggcgaatagcatgaggcagtatgcaagacctgcttcggctgattctgtcgtgcttcggcttcagcgatctccttctgcctttggatcgtgactaggcacgtccttgttgtgtgtcccttatcctccncacagaataagcagaacaatctcttgngttgagtgctgaaccttcctctgaagcttcttccncctatgcctcccgaagatcatgaagcttgctggctgccttgggtgtggtttgtcctgtcatcatttgtgatgggattattgattgttctaacatg

SEQ ID NO: 67870 - DNA, 420 bp, Zea mays
  unsure (1)..(420): unsure at all n locations
agcccatgctagtcttagcaattaagcatgcatctagaccggcctcctcttttgcaaaatcaactaaataaagtttgccgtctaatacacccttaaaagctagtgaaccatcacttcttctaaagacagacacatctacatttgtaaatagacaattatatcccatattgcataattgactaacagatagtaagttatatccaagagactcaactaaaaacacattagagatagagtgctcatttgaaatagcaattttacctaatccntttaccttgccttgattcccatcaccgaatattattgaatcttgggaatccttggttttgacgtaggaggtgaacatcttcttctcccccgtcaaatgggttgtgcatncgctgtcgataatacagcttgaacccncggatgcataaacct

SEQ ID NO: 67871 - DNA, 443 bp, Zea mays
  unsure (1)..(443): unsure at all n locations
tcttccgtcgccttgaaagcaacgggttgagcttctgatgtgtcgccaagctcgttgattttcctcgagccttctatcatgcactcaaaacttacaaaatgcccgatgacttcctcgggggtcattttagtatatctaggattgccacgaatcaattgaacttgagtgggattaagaaaaataagagatcttaaaataacatttaccacttcgtggtcgttccacttcttgctcccgaggttgcgcacttggtttaccacagtcttgagccgcgtgtacatgtgttgtggctcctcctctttgtgaagccggaaccgaccgagctcccnctcgatcgtttcccgcttggtgattntggtgagctcatctccctcgtgcgcggttttgagtacattccaaacctccttggcgttcttaacccttgactgtgtatattcccttac

SEQ ID NO: 67872 - DNA, 485 bp, Zea mays
  unsure (1)..(485): unsure at all n locations
gcaaagcttgaagcctcgntgaagtgcagatcatccatggttttctatcatttcgcgccatcattattcactgttgtatttatactacacacaggccgtgccagaccaagttagatagatatatcagatgagctgcctgattcacacaatataattggcttaacatatgaaaggaggtgctgagccacgctagctagctcattcttttctcctatatcacagatattcaaactgtactatgaactctgttagaatgagcaataaactaagcagacagaagttaaaatagaagtaacagaatattagaagtggcgccgttgccggngatcccggcccccgggtcgcccgcgtgacaggcgggagtctcacaccactgcaacgactgggatgcttanggttatttgggaggaagagtaatggagaggattgaaggggctagaatattccactatctcaatttaaatagtgagggatatagcaccctc

SEQ ID NO: 67873 - DNA, 494 bp, Zea mays
  unsure (1)..(494): unsure at all n locations
cctgcggcatgcaagcttctaagggagaacacgtgaanggttgataatttacaattcgaaaaagatacaccttgtgcagcttgtcaagcaggtaaacacgtgggaggagcgcatcacagcaagaatgtgatgaccacttcaagacccttggagctgctgcatatggacctcttcggacccgtcgcctatctgagcatagggggaagtaagtatggtctagttattggtgatgacttttcccgcttcacttgggtgttcttcttgcaggataagtctgaaacccaagggaccctcaagcgcttcctaaggagagctcaaaatgagtttgagctcaaggtgaagaagataaggagcgacaacgggtccgagttcaagaaccttcaagtggaggagttccttgaggaggaagggatcaagcacgagttcttcgctctctacacaccacagcaaaatggtgtggtagagaggaagaacacgacgctaatctacatggc

SEQ ID NO: 67874 - DNA, 318 bp, Zea mays
  unsure (1)..(318): unsure at all n locations
tagcaatgaatgctgtggtaacttcacacctactcgtctgtttatatagtactgcaggtaagaaggcgaagcgccaggatttttacaccatgcggacacccgcttgcactcgctgtgcggtggaccgcagagaccaaacagtaactctgcaaggtgggaccgctacgcgctgggaaattgaatcgtttctcgacaacgagctcagggaaagtggtttttggaccttcngctccccgaagcttaagagactttnttcacggatcaagctcgttacgaaaaacgatctatcaccgcgaaaggggctctgtgggcctatgc

SEQ ID NO: 67875 - DNA, 468 bp, Zea mays
  unsure (1)..(468): unsure at all n locations
atgcaagcttctncttgtcgtcatcaactgtgacgttgattcattctgatttccagcctgccggccacttgcttcgatagctgatcacaggagatattgtagttttccgatatgcacagttgtaacaaccaaaattttcatgtagcccatcctttctggccttagtttggtagtgtagctcgtgtactctgcagagaccttcggcaaatggctccactgcttggcttcggagagcccaaatataaacactaagcctaacaatagcgttaggagttagntggtgaaaatagatcccaaattttttcagcacatcggcaatcatcctattaaaggaaatctcaaccacctttgaggaaactcttaaaaatcagtatttcatctgtttgtggctgtngggtaatttcttctccaccaaagcgaatcatctntntctcatcttcgctgaagtagcccgacttcaccatcttt

SEQ ID NO: 67876 - DNA, 477 bp, Zea mays
  unsure (1)..(477): unsure at all n locations
agcttctcctgttcggaataatctacggtattctttatattctatttantatagngggagatgaacctttggcacctgtagaacatataatctagagcaaactagttagtccaattatttgtgttgggcaattcaaccaccaaaattaattaggaactaggtgtaagcctaattccctttcaatctccccctttgtggtgattgatgccaacacaaaccaaagcaaatataaaagtgtatatttgaactagtttgcataattgtaagtgcaaaggttacttaacaatgcgccaatataaattcttgcatggagtggtttcttcattttaacattttggaccacgctcgcaccatatgttttgtttctgcacattcttctgtgaatccttttcaaagtcctcttgcanataatcaaaggtaaatgaataagatttcgaaagcatcttaagattgaaattctcccctatttaaatgttt

SEQ ID NO: 67877 - DNA, 461 bp, Zea mays
agcttccccatctctctgtttatttatcgttagttttatttctctgcacttagaacaatgatgactacttttgctaaactccgatgatgatgtaataagtttaatactctttaatgtgtggttttatgctttattgtacttgctctgtgactcaccatcgagtgagactgtggtacttgatcctgtctgtggcctcgtcggactagatccgagggattgacgggttattcccatttagggcttgttcgtttttgtgttaatccatgtggatgggatgggactgagtcggatttaatccatagcaagtcaaaatccatcccaattcccacccaatacactccaatccacatggaatatcaataaccgaacaaggccttaagtgtggtctagcctataaggcgggacttgggcacttaagttggaataattcgggcagttcttccacacttatatcccaatta

SEQ ID NO: 67878 - DNA, 456 bp, Zea mays
  unsure (1)..(456): unsure at all n locations
acttaacgacgagctgcactggacggttaggaggtcttttttctaatcagacactggggctatggcccttcaaagtaaaacatgttatgctgtaaactggatttcagatgcacaaataatattgctgagtacgaagcacttctattggggcttcggaaactaacggccatgggagtaagaagggctatcctaaagactgattctcaagttattgctggccatgtggataaaagcaccaaggcacgagatccgaagcttgtaaaatatctggatgaagatcgaaggttggaagcttccttcgaagggttttccatcaacaatactccacgaggtgaaaatgagcatgcacatttgctagccacatcagcggctcacgggctactcctaccctccgaagactttttgaaacaaanaagcaccctacttgagctcatgggagagcagtcttactatttc

SEQ ID NO: 67879 - DNA, 455 bp, Zea mays
  unsure (1)..(455): unsure at all n locations
agctntattcccaaattcataaactttaagtttacttttcctgtaccttcaggctgntgtacgcaaggctgttcgcgaggtcatcctttgacatggcggaaaggccaacttcgagctttggaaatcccaagctnttagccatctcccggcatacaaatatctctttgttgtccaggagacagtacaagaaatcatcttcgtctgtgccattaaacaccaaggccccctccgaatatttcagtttccgggcgtaatgtttggcttctaagatttcttcttcggataatctttttcctgaagcatgtcgaataatgtaattagtatcttcggacggagctttgggagcaggagctttagtntttctatcacgacttgcctcgctgtcatactggtattcggagtttgttgctcagccttatcctcangcgcagcaggcttcgtctcaatgggcactg

SEQ ID NO: 67880 - DNA, 465 bp, Zea mays
  unsure (1)..(465): unsure at all n locations
gcttatgaagattcttcatcccaacatgggctattcttgtttgccagagccaacccatgttagtcttagcaattaagcaagtgttgagttcagctctatcaaaatctactaagtatagctgaccccctagcactcccttaaatgctactgaatcatcacttcttctaaagacagtaacacctatatccgtaaaaagacagttgtagcccattttgcataattgagaagcagaaagcaaattgtaatctaaagaatcaacaagaaaaacattggaaatagagtgggcaggagatatagcaattntacccaatcctttgaccaaaccttgatttctatccccgaatgtgatagctctntggggatcatggnttttctcgtaggaggagaacatcttcttctnctctgtcatgtggtttgtgcacccgctatcgatgatccaacttgagccaccaaatgcataaacct

SEQ ID NO: 67881 - DNA, 438 bp, Zea mays
  unsure (1)..(438): unsure at all n locations
taaaggctatgggaacttcacacctacccgtctgtntatatagtgctgcacgtgggaaggtgaatcgtcaagccgctcgcacccgctaaacagtcgcccgcactcactgaacggtggaccatagtgcccaagaaggtgaatcaccagatcgcgcgtacccgttgtatggggggaccacctttcactcgggatatttaaatcgtttctcgacaacgagctaagggaagggtttttcggaccttcggcataccgaagcctgagagaatatttcacggttcgagctcgttacgaanaacaatctggcaccggaaggtgttactgttgggggtctgcttcgtcgccgaatgccccataagaagatacaccttcggaagattgacacatagccgaagctatcaatcagagagcttcggagtatactttcagatgcaccgactt

SEQ ID NO: 67882 - DNA, 506 bp, Zea mays
  unsure (1)..(506): unsure at all n locations
agcttctaaagggagagcacatcttgggactaacttatgttcattatgagaaagacagggtttgtagcacatgtcaagcacggaagcaagttggtgttcatcatccacacaagaacatcatgacgactgacaggccgcttgagctactccacatggacctatttggcccgatagcttacataagcatcagcggaagtaagtattgtctagttattgtggatgattattctcgcttcacttgggtgttctttntgcaggataaatcacaaacccaagagaccttatagggattcttgagacgagctcaaaatgagctagggctaacgatcacaaagattagaagcgacaatgggacggatttcaagaactcacagatagaagacttgcttgacgatgagggcatcaagcatgagttctcttctccctacacgccacaacaaaatggtgtagtggagaggaagaatataactgtacttgacatggcgaggaccatgcttgatgagtac

SEQ ID NO: 67883 - DNA, 498 bp, Zea mays
  unsure (1)..(498): unsure at all n locations
gtcacctgangcatgcaagcttgtcaagccatatttggtacccatcgcttgatgttctcataaggttagtcaacaaagatctagaaacccaagagtcctttgtgttagcacttggtaaacttattacctttctagcacaagttgcaattctaggttgcctagttacatgagaaataattgacaagctagaggtggggttgttaccaatgggacaatccttgcattgatgtcccttctttcggcatatgtagcaaaggcgatcttcaagtcttgaagatttcttctttcctttgttctttcttgctacatggttagtcaatattttcttttctagcactatgcctttntgtttcaaatatggacaagtcttaattaagtgtcctttctttgagaatctaaaacaaagtttatcatccttgttaataatcaagtcattnttaatatagggacatgacctaattgagtgtnccttttcaaagcattcactacacttcttac

SEQ ID NO: 67884 - DNA, 476 bp, Zea mays
  unsure (1)..(476): unsure at all n locations
agcttggagtatatgttctctgatactttttagtatatntagttggaccactctaagccatcattagataacctaaaactataagtataataactatatgtttacttaagaataattgagcattccacctttcccttgtgagattgtgcatatcatatcattacatgagcatgtatttctagttgacttgtagagcacctagaagaagaatttgaagtggaagtggaagaggagcctgttcctccacctgatacttctccaactgaggttatcgccgaaggtcctccagaaggtgctccattcggatttgctgctaactgcaatatccttatagaagagcccgactctcctcctcacaaaggcaagccccggtgcatttaccacctacttgctgtttaaaactttatcacttatatgctgcttaggggaggaattaatgataacccttgctgataacttcttgatattgatatcat

SEQ ID NO: 67885 - DNA, 381 bp, Zea mays
gcttcagctccatctatgttatggattgctttttatgttttccaattaccctcggcctttcttgcagcttcctgacttccatggatagcgatgggtccctgatccgaaagtatcttcatgcaaagataggcaggatgaagaattgcttccaaagcattgagggtgccacgaccaataattgcattgtaagggtattccatgtcaacaatgtcaaacacaacttgctcagttctagttgttgtgatgaaccccaaggtcactgacatggtgatcttgcccaatgctacaatctgtcttcctccgaagccacagagaggatgtgtagcatcatgaatcttatcttctggctcttgcatctgtctgaagccttaacaaatatat

SEQ ID NO: 67886 - DNA, 483 bp, Zea mays
  unsure (1)..(483): unsure at all n locations
tgcaacttgctttgctattattncactttctttcttaacttgnggntgacaggttgaactacgacgagtaaaaacctcagcaatttcatttgtattaatgaaccttgaatctaaggtaataatgaatccaaggacaatttctcgcttgttgtcaggtattcttaatgagacttatcattctttattaacatactgcaggtagttgttgcaaaagatattggaaggcagatgttatcttatggttacaactaagtctgcatgctagtgctaggtacttcagtgttaattntgcaggtgtagtaaaatattgatcctttntcctgcgttgtttccataacaacacanatcctattggctacttcctttaacgtatggaagaattactatagatgatgttgcaacatttgctagtaagatgctagctnggcaatccacaatggttagcttaagagactacatgacacgattcactaatttgtatgt

SEQ ID NO: 67887 - DNA, 320 bp, Zea mays
  unsure (1)..(320): unsure at all n locations
agcttctaaagcgagaacacgtgataggcgtctcttctctttntagaangacaaccgaatgcgaaccatgtacgtgccangatcagttattcacgtacacagcagctacataatatggacatcatcacacagcgctcaaaatagtattaataacggaaatagtccattacatcatacgtctgagacgtccatatagttcttacaataaatcaaagtgcggaaaagaaacgtatattacgcggccttcacaggcagtcgactggaggttgccgataacccacacctagaactcgtagtagtcttggaactacctgaagtct

SEQ ID NO: 67888 - DNA, 492 bp, Zea mays
  unsure (1)..(492): unsure at all n locations
agcttagtccccaattttgcccacaaagttctccttatatgactaagaanattagcatcacgatcagaaacgattgtgttgggtacaccatgcaagcgaacaatttcacgaaagaacaaatcagcaatatgagtagcatcgtcagttctatgacatggtatgaaatgtgccatcttagaaaatctatcaacaaccacaaacacactatcatgtcccttcctagtcctaggcaatcccagcacaaaatccatagaaatatcttcccaaggagcactatgaacgggtagaggcaaatacaaaccgtgtggatttaaccgtgacttcgcctttngacatgtcgtgcaacgagcaacaaatctcaccacatctcttctcatcttgggccanaagaaatgaccagcaagtatgtcctccgttntctttgctccaaaatgtcccattaagccacctccatgtgcttcctgtaacaacaacaaacgaacggagctagct

SEQ ID NO: 67889 - DNA, 384 bp, Zea mays
  unsure (1)..(384): unsure at all n locations
agcttcacatgtctcgtatgattcataatctaactaagttaanagcccatcagaatgaagcttcttcatgcgattctcacttatatgacccaaacgacagtgccacatgtaggtaggacttaaatcattaggtcgaggccttttagcactaatattacagataggtgcatcatcaagatttaaaatgaataacccattcataatggatgcaaaagccacaaacatgccattctttgagatcacacaaccattgttttcactcgcaaatgaataaccatccttcatcaaacatgaaggagacataatgtttcgactcatactangaactagataacaattatntaactccaaaataaatcctgatgggaggtggagttgcatcgt

SEQ ID NO: 67890 - DNA, 472 bp, Zea mays
  unsure (1)..(472): unsure at all n locations
agcttcgactcttcgaaccatatccagatattttttatgcttcggatccttagccttacaactgttgtcaatatgacccgaaacaacctgggaatcagttttaagtatggcccttctgattcccattgcttttaacttccgaagacctagaaccaatgcttcgtactcagcaatgttatttgtgcaattaaaatcaagttttgccgcataacaaattttgactttggaaggtgaaaccaacacagcagccgctcctgctccgaaggttccccaagatccatcacaaaacactgtccaggcttcgttgtctttattcgtttcctcctcctgagcccctggcgtccaatcagcaataaagtctgccagcgcctgtgactgaatcgaagatctatgaacatattcaatacaaaattcattgagctctgcagcccattntccaatccttncagtagcttctcgattcctcataata

SEQ ID NO: 67891 - DNA, 438 bp, Zea mays
  unsure (1)..(438): unsure at all n locations
agctngccttcgcttcagtttatcacccgcagtcttatgtagttgtggagcgcgccaatggaaaaatcttcacagtcgtcaaaaagatgctcctcgacgaaaagaagggcagatggaccaaattattacccgaggcggtctgggcactaaacacgactgagtgcagggcgaccgggttcactcctttccgccttctatacggatcggaggccatgaccccacaagaaataaaacatgggtccccacgaacggctctgtcagccgtccccgacgtggacgagccaacttcaaaggatctcatcaacggagaccgagtcttcgccttacaggcactaaacaaataccaagcccagacaaaagcatggcgcgaccactcagtcatcccgagggagttcagcgaaggagacctcgtactcgtccgaacagctcgaacagagt

SEQ ID NO: 67892 - DNA, 498 bp, Zea mays
agcttcacacctctgaactaactcggctgcatcattcttttctgttggccaatagaatcctgacctgaagaccttcccaactagtgttctggaggctgcatgtattccacattgcccagcatggacctcctctagaagttgcttcccagtggacgggagaatgcacttcatgagaacacctgatgcaccccttctgtataatatctccccaatgagtgtgtagtgagccgactgtctggcaatacgctctgccgagttcttggcatctggttcttcttcattctttatatacttaatgatcggccttctccagtcgtcagagtctgactcaggttgatttatgatgttgcacttcttctgttgatccattgagatactcggctgtagaatttcttgcatgaagattccaggtgggacctgagttcgactggatccgagcttggatagtacatcagctgctgtgttacaatcccctttcacatgatgaaattccagacc

SEQ ID NO: 67893 - DNA, 500 bp, Zea mays
  unsure (1)..(500): unsure at all n locations
cctgcggcatgaagcttatcataacctaatttgataatatatggagatgcatttataagaatcacaagatgcatggggaagagtaactatgtactccctccatccagaanagaatgtgattctagcacagtaccaaattaaagtatcttgagtttaactaattatatgtaaaaaaagtatcaaaatttaagatatcaaataaaaaactcaacctgcggagggtaagacagcctctggatattgtgttaagagaagacctctcacacaagtcgagaaaacccccaaacctctgccccacccatgcacagcggcatcgtagcctgtgtgagaacgaccacgaccagggccggaccttagacttgtgctttggtgtgggatggacaagggggtttttttagccccaacctataattcgctcccacgggtagaggccccagcctataactcagaccacctaaccaatccagctagaggccctttcgcaatatatcaaataagta

SEQ ID NO: 67894 - DNA, 480 bp, Zea mays
  unsure (1)..(480): unsure at all n locations
agcttcaagaaaacatataacgccaataataatacattttataagtttcaagaagttcaacatagcagcaacagttgcacatacattatcttaatatagcagcaacagttatacataacttaatatagcaacaacaattatacattagcttaatgcatttcttaagattagttttgattgtagcgttcccacatttgcatggcaatctgatctcgaagtatgcttccagtatgatcttgtaagttaagacactccacgtcatttggatagttcccatctccttcgggtaggtcgatatgatcacttnggtggatataagtaggttgctcatctagccaccccttatctccatntaagcctctaattatgttatgaaagacagttgcagctgctgggattttatctgagatttatgggatatgtgacccactttaggatttgaaaatctttttagaaccccataccttctaatatggttct

SEQ ID NO: 67895 - DNA, 475 bp, Zea mays
  unsure (1)..(475): unsure at all n locations
tgcaagcttgtgttacaagaatgaaagtgggagcgctgctctatttctgatcttgaatgtggatgacatattattgactgggaatgacattcctatgctggagtccgtcaaggcttcactgaaaagagtttttctatgaaggacttatgggaagcagcatatatcttgggcataaggatctatagagataggtcgaagaggcttatacgattaagtcaagatacctacattgacaagggtttgaaacggntcaacatggaacagtccaagatagggttcatacctatgtcacatggtaaacaccttagccagatgcaatgtcctgcaacggctaatgagctggagcgcatgagtaaaggaccatacgcctcagcaatnggttcaatcatgtatgccatgataagtacacgcccagatgtttcatactctataagtgctacgagtagataccacgctgatccacgtgaggatcact

SEQ ID NO: 67896 - DNA, 376 bp, Zea mays
  unsure (1)..(376): unsure at all n locations
agcttcngctcggtcagggggtagctctcctctgtggatatatngcangtacggggtctgccagttttgatcatgcgtgaccccgcttcgctcccnccgacgtgcagcgtctcgccctcgggggccgagggtacctcaagctgaaccgagggtgcctcgggccgagccgagggtgcctcagactgtgccgagggtacctcgggccgagccgagggtgcctcagactgtgtcgagggtacctcgagatgggccgagggggcctcangctcatgcgtgtcgtctatcttgacggagggtngatgcagatctcgggagaagacgtccggnggaaccgttgtccgccccgaggcttatttagctagctcgtccgcaatct

SEQ ID NO: 67897 - DNA, 181 bp, Zea mays
ccttcggcccttctggccagctactgactctcatgaatggccatagggccttggtcccaaggtatctttatgcaaagatatgctggatgaagaattgcttcgaaggcattgacagtaccacgaccaatgatggcattataagggtattccatatcaacaatgtcgaacacaacttgtgcag

SEQ ID NO: 67898 - DNA, 475 bp, Zea mays
  unsure (1)..(475): unsure at all n locations
ngcgagaaatgggaaaggtaaaggcgacaactatctttagccaacnaaggatggagttgcgaggaagaggaaaaggtgataaacatcaaggtaagatatataggcgataagggcaaggtgataacgatgaaaagcataaccatgggcagagttaaggcaagactaacaaagtggagaaaacaaacaagggtaagataggtaagattccaacaaaatggttgaagtaaagaaaattaattaccgagtggagttacaaggagacaacgagatcaccaaggatgtgcganataagatgaatgctcatggatcaccgangaacaatggtggtcaagggcatgttaactgaagtgtttataaacaaacattanggtataaagataagcaaatataaaagataagagtatgcaataccccaaggatacgggcataccaagacaagggaatagaaaaggccaaaggataacagcttcacaac

SEQ ID NO: 67899 - DNA, 459 bp, Zea mays
  unsure (1)..(459): unsure at all n locations
agcttgtgaaggttcttcatccccacatgtgctaagcggtgatgccacagccagcccatgctagtcttagctattaagcatgcatctagaccggcttcttcttttgcaaaatcaactaaataaagtttgccgtctaatacacccttaaaagctagtgaaccatcacttcttctaaagacagacacatctacatttgtaaatagacagttataccccatgttgcataattgactaacagatagcaaattataaccaagagactctactaaaaacacattagagatagagtgctcattagaaaatggcaatttacctaacccttgtaccttgccttgattcccatcaccgaatacaatngaatcttgggaatccttattcttgacgtaggaggtgaacatcttcttctcccccgtcatatggtttgtgcatccgctgtcgataatccagcttgaacccccg

SEQ ID NO: 67900 - DNA, 483 bp, Zea mays
  unsure (1)..(483): unsure at all n locations
agcttcttcttatacctaggatcaagaaagcatgctatagcaagactcaaactagaacagctccaatatttctcaaacttgtcactcatagatattgccattgttctaatagttaaatcttcatccacacaccatttatcaagcagttcctttatctcacagaaacctctatagaatatatttgcagttggatacgaagttccggacagcaactcagtaagatcataaaaactttgcaagcactgaaaaacttttacagccatggcccattcactatcagaaggacaaatgttgttatacttntgacggttggcttgttttagcctaatgaaagctgctttgtagtgcaaggcatccctaagcatcaaatatgttgaattccacctagttgaaacatcaagctgtatgccctttgatgtgtctaacccacactcggcagcacgcttcatgagttcctnccattggtagggagaacccttaaca

SEQ ID NO: 67901 - DNA, 292 bp, Zea mays
  unsure (1)..(292): unsure at all n locations
agctagctctatgttatgtggtagaccatggcaatttgttttgacactcngcatcatggtgaaacaaaacactactctcttatgcataatgagacaaagcttgctttgcaccccatgttccccgatgctatattgtaggatgaagttgctagagcttgcaaatagataaatttattctgttcataataaaaatctacgtgctgcgaaggagttggtgctacataacattgacaagtctcaatctgcttaagtgaggaagacagatattcaactgacaagtggctgttttctt

SEQ ID NO: 67902 - DNA, 473 bp, Zea mays
  unsure (1)..(473): unsure at all n locations
atgcaagcttatgcagattcttcatcccaacatgggctattctgcgatgtctgtaccaacctatgntagtcttagcaatgaagcaagtgtcgagttcagctctattgaaatcaactaagtatagctgaccctctaacactcccttaaatgctactgaatcatcacttcttctaaagacagtaacacctaaatctgtaaaaagacaattgtagcccattttacacaattgagaaatggaaagcaaattgtaatctaaagaatctacaagaaaaacattggaaatggaatggtcacgtgatatagcacatttaccaagtcttttgacaaaccttgatttcattcccgaatgtgatagctctttggggatcattatttttctcgtaggaggagaacattcttttctcccagtcatgtggntggtgcacncgctatcaattatccaacttgagcccacggatgcataaacctacaaa

SEQ ID NO: 67903 - DNA, 500 bp, Zea mays
  unsure (1)..(500): unsure at all n locations
ttaagtcacctgcggcatgaagcttctaagggagaacacattntaggactaacatatgttctatttgagaaagacaggctctgtagcgcatgccaagcagganagcaagttggtgcccatcatccacacaagaacatcatgacgaccgacaggccgcttgagctgctccacatggatctattcggcccgattgcttacataagcatcggcgggagtaagtattgtcttgtaatagtggatgattattctcgcttcacttgggtgttctttttgcaggaaaaatcacaaacccaagaaaccttaaagagattcttgagacgagctcaaaacgagttctgcttaaggatcaagaaaattagaagcaacaacgggatggagttcaagaactctcaaatcgaaggctttcttgaggaggagggcatcaagcatgagttctcttctccctacacgccacaacanaatggtgtagtggagaggaagaatcatactctattggacat

SEQ ID NO: 67904 - DNA, 370 bp, Zea mays
  unsure (1)..(370): unsure at all n locations
agctngcttctgccatggttcaacggcggattatttcaccatagcatgcgtatcttggcaaagtcactgtgtacggtcgcttctctgctccatatcctaccttnntgctgtgagttccaagtcgagatatggtcggngtagggagatagagagggaagaagtttgctgtgtcagctatgtccgaaccgagacaaaagtggtgtcaagtcgtgtctagcgccctatggtaggtgtcatctctttccagggtgttctatggttaatttggcgccactttgtcaattgggtcgaagggtttcgaaaattggataaggtgaacatgtggaatctctgtgcaagggttagtttttgtacttatgcaaaaactgaa

SEQ ID NO: 67905 - DNA, 494 bp, Zea mays
  unsure (1)..(494): unsure at all n locations
gcttctatagggagagcacactttgggactaactcttgttcattntgagaaagacaggatttgtagcgcatgccaagcagggaagcaaattggtgttcatcattcacacaagaacatcatgacaactgacaggccactggagctcctccacatggatttattcggcccgatagcttacataagcatcgacgggagtaagtactgtctagttattgtggatgattattctcgcttcacttgagtattctttttgcaggaaaaatcacaaacccaagagacattgaagggattcttgagacgggctcaaaatgagttcggcttaaggatcanaaagattagaagcaacaacggaacggagttcaagaactctcanattgaaggctntcttgaggatgagggtatcaagcatgagttctcttctcccgacatgccacaacanaatggtgtagtggagaggaagaatagaactctacttgacatggcaaggaccatgc

SEQ ID NO: 67906 - DNA, 464 bp, Zea mays
  unsure (1)..(464): unsure at all n locations
agctngaaggacanactaataagcaagccccagtgtactgtctccgaagttctcagtttatcaaagaagaactatacagaattggagaaggtgctatatgttgtcttaatggcctccaggaagcttcgacactactttcaagcatatcatataattgttccttcatcacagcctttgaaggatattatgaggaacagagaagctactggaaggattggaaagtgggctgcggaactcaacgaattcagcattgattatgtgcatagatcttcgattcagtcccaagcgttagcagacttcatcactgactggacgccacgggctcaggaggaagaagcaagtaaagatgccgaagcttggacagtgttctgcgacgattcttgtggaacctttggggcaggtgcagctgctgtttagttgcaccttcccaaagtagaaacatgtatgcagtgaaacttgatttc

SEQ ID NO: 67907 - DNA, 420 bp, Zea mays
  unsure (1)..(420): unsure at all n locations
agcttgtgaaggttcttcatccncacatgtgtctttgctgngatgccacagccagcccatgctagtcttagctattaagcatgcatctagaccggcctcttcttttgcaaaatcaactaaataaagttttgccgtctaatacacccttaaaagctaatgaaccatcgcttcttctaaagacagacacatctacatttgtaaatagacagttataccccatatgacataattgactaacagatagcaaattatatccaagactctctactaaaaatacattagagatagaatgctcattagaaattggcaatttacctaaaccttttaccttgccttgattcccatcaccgaatacaattgaatcttgggaatccttatttttgacgtaggaggtgaacatcttcttctcccctgtcatat

SEQ ID NO: 67908 - DNA, 145 bp, Zea mays
  unsure (1)..(145): unsure at all n locations
tgcaagcttatcaagaaacatatacagaatnggtgatatgtgtgtctgctgtcttaatggcctccaggaagcttcggcattatattcaagcattccatataattgttccttcatcacagcctctgaaggatatcatgaggaacag

SEQ ID NO: 67909 - DNA, 414 bp, Zea mays
agcttagaggaaacaatcacacattggggtgagcaattagcagccacccagaatgcaactgtcaggacaaagacaagccgcgaaacttgcagtctcaggaaattcagatgcatacagctgcatccaccatccatggcttctctgtcggtgaaaagtgaaataaaaaaaaggcaggcatctcaggtcagaattcgctgcggctactacaagtggagtactggtgaggcaccgcacaacacaaggccaccagagtcatcagttacattacatggggttcaacagtcaacacctgcttagcctcgcgctgatacaggtcaaagcaccccttcgttctccttcagctcaccgtgtaccaaaaccagccaggcacaggcacaggcccggcatatactcctagttgtacagtacctacca

SEQ ID NO: 67910 - DNA, 256 bp, Zea mays
cattttgggactaacccatgttcattttttaaagacgggtttgtagcgcatgtcaagcacggaagcaagttggtgttcatcatccacacaagaacatcatgactaccgacaggccgcttgagctactccacatggacctattcggcctgatcgcttacataagcataggcgggagtaagtattgtcttgtacttgtggatgattattctcgcttcacttgggtgttctttttgcaggaaaaatctcagacccaaga

SEQ ID NO: 67911 - DNA, 330 bp, Zea mays
acatcaaggatcactacataaggacgtgacttacaaccaatgaggtaacagctacagctatcttgtgtaagttataaggctcaagaccaagctctaaaaaggagatcaaggtcactataaggagaacaaatgtcaaaaccataactggaagcagcccaaaagagctaagttcaccctgatctttagattgggttgttcctatgtttggagatgttctatgtgatcattgcaggacgttggagctaataaatgttaatacagatctagtcaagccgacttgatgatttatgagctcaacatcaaagcttaagcatgtgaaatgctatggat

SEQ ID NO: 67912 - DNA, 274 bp, Zea mays
tgggcattttattgctaactgtccccataatgatagtgtcctttttagggaaacaagaaggaaaagaagaagcattactagaaggcaaaaggcgaggcgcatctaagcaaagagtgggactcggattgctcctcgtccgactccgacaatgaaggactcgccgccaccgcctttaacaaatcaaccctcttccccaacgagcgtcacacatgccttatggcaagggagaagaaggtatgtactcgcaactctacctatgcttcttcaagtgagg

SEQ ID NO: 67913 - DNA, 414 bp, Zea mays
  unsure (1)..(414): unsure at all n locations
agctntcaaggaattctgtgatcaaattggcacaaagattcatttcgcgtcactcggacatccagagtcaaatggactagtcgaaagagcaaatggtattataatgacgggaatgatgaagctaatcttcaatcagcccagaggtaagtggccagatgagttgattaaagtggtgtggagccacaatacgaccgtatcaagatcaacaggttntacgccattcaagttattatttggtgacgaagctataaccccagaagaagctaaagcggtgtcaataagaacagcagcttcggcagaagacgaagctgattatcacatggcaaaagacactatagaagggaccagacttcaggctatggaaaatatcaataaatatcaagccgaaacaataaaatggcatgacaggaaagt

SEQ ID NO: 67914 - DNA, 274 bp, Zea mays
tcaaaaggggacatcttcagactggcctgataactattattatatgagaactcaacataaggtagactcttatcccaacttcctccatgctgaagggcacaagctctcaacatatcttacaaaacttgattagtcctttcagtctgtccatcagtctgaaggtgataggttgtactaaaattcaactttgtattcatgttctcatgaaagcttctccgaaatcttgaggtgaactgtgaacctcgatcagacacgatcttctttggtactccat

SEQ ID NO: 67915 - DNA, 435 bp, Zea mays
  unsure (1)..(435): unsure at all n locations
agctntgcaggagaaggagatggtatgaagctttggggtgcctaagagagtcaattcaatttttattaactcaagctatcaatcttcaatgatccatacatccaagattgacccaaaagtcattttaatcattatgtctaaaactcatatcatctcagggaagatattgatgttgtaggaattaaagaattaatcctatgccaaaaagtcgaggcctacaacatggaggaaagccaaaggatggtaacaattatgcttttaagtgcaagtatcttaaaattaccatttcttatgtgtcttgtgtagtcacgtagaaaaaggaagcacttcaaatgtttttaaattatgtcgccattctttgaagaaattcctctcatatggtagattgcatattcatcatttccatactatggcaatctacatgcttgaaattat

SEQ ID NO: 67916 - DNA, 277 bp, Zea mays
ccttgtgaacagtacaaattcaaaaggagaaagcagcttctgcatatcaaccgaagcccatgctcttatgtgaggacttagcaaaacagaaagtgttgttgggctcccaattatccgaaaaacaggaaaaaaccttgataaagtttttgttcaacaacaacgatgtttttgcatggtcagccaatgatctttgcggagttaacagggatgttattgaacactcgctcaatgttgacccatccttcagacccagaaagcagaggcttcggaaaatgtc

SEQ ID NO: 67917 - DNA, 420 bp, Zea mays
agcttgtgagtgggtgaaggtgtctctgaatgtgtcaaaccactgcactcaccaaccttcccaaagagagcgacactcccatccttagtagcaaagcctaaccccggtctgccagttcccctcttgaactgactgaccatcatgcccaactggggctcactgcacgacacccaactcaagatagatctaaggtatgtgttttcttccttgattcttgtcttggcgcgtctgcaagactcaagggcagattgcaaaccctcacaaagtgcacactacacaggtgtaggggcactcactgagctagccttctcaagcaaagctatcctagcgtctctctctgctagctcagattgcatgccaggacaaacggtacacgcacccaataggatagacctagatctcaactcgtcgcgctcatct

SEQ ID NO: 67918 - DNA, 259 bp, Zea mays
gggcttccgttccctttgagtaaatttttggttgaagtgctgaatacgtaccaaatcttccttcatcagatcacccccgaagccataataaggatggggatttttgtctgggcagtaaggagtcaagggctagagccaagcacaaaatgcttctgcagtatgcacgaacttctatatgagacgaaagccatgggtaaagaacagtaccacaacaactttggttgttatggatttatcgctcgccccaacgcaagccacc

SEQ ID NO: 67919 - DNA, 428 bp, Zea mays
  unsure (1)..(428): unsure at all n locations
agctnttccatctggtgatagcttcaacgtttactcttatcttctttggatctgncttcatcctgtgtcttcgtcataaggaataggcttatctcctgaaggcgaagcttcctgtaatagcttatgctgaaaacaaatggttaattatgtttttgaggaccttcggaaggagaatgcccccgacagtagcccctcacagtgctgatttgttcctttataacaaatttagactgcgacgtgaacgaaggcctttagacgaaggtccaaaaaacaccttcccttcgctagaatagcgaatgtcactgacctgtgggacccaccaacttatggngctctagacatataaataggagcttgcattgtaaacacttttgtgccatntcagctgcttgcattgcgctcgtcttttttaacgtacttgctttgtc

SEQ ID NO: 67920 - DNA, 271 bp, Zea mays
tctaaagggagagcacattttaggattaacaaatgtttattttgagaaaaacaggatttgtagcgcatgccaagcaagaaagcaagttgggacccatcatccacacaaggaacatcatgacaaccgacaggccactggagctcctacacatggatctattcggcccgacagcttacataagcatcggcaggagtaagtaccgtctagttattgtggatgattattctcgcttcacttgggtattctttttgcaggaaaaatctcataccca

SEQ ID NO: 67921 - DNA, 444 bp, Zea mays
agcttctccttgtcctcatcaaccttgacatagaaccattctgatttccagcctgccggccatttgcttcggtagctaattacaggaaattttgcggttttccggtaggcaaaattgtagcaaccgaagttttcatgaagcccatcttttctggcctttgtttgataatgcaattcatgaactcgacagaaactgtcagcaaaaggctccactgcttggcttcggagggcccaaatataaacgctaagcctaacaatagcgttaggagttaactggtgaaggtagatgccaaacctcttcaatatctccgcaacaatctcgtgaacagggaatcttaacccagcctttaaaaagcttttgaagatgacaacctcgtccttctctggcttcggggtggtctcttctcccccgaagcgaagtagcttcttctgatcttcactgaaa

SEQ ID NO: 67922 - DNA, 269 bp, Zea mays
tagaaagttgttatagaaaataaacaatcacaaattacttgtcaaactgtgagccacaaacaatgaaagaacatacctgctccgtttcattccggaggccaagacgtcgagtttcttcaaatcctttgtgttgaaaggttgcctttcaatgcaatagaaaaaagaaggatgctatgaagcccaataacggcagtaaagaaaagtaacagtaacagcaatgaagaattgaagagaattgcaggatgccataaataatttgaagtactgca

SEQ ID NO: 67923 - DNA, 394 bp, Zea mays
  unsure (1)..(394): unsure at all n locations
gaagcttggaggccatgttaagactctgtgtccctatctatnntcgtatctgaggtccttagtttatcgacaaaaaaatatatgcgaatggataatgtactatatgcatgttagatggccttcaagaagcttccgcattatattcaagctaacaacataattgttccttcttcgcaccctctgcaggatattatgaaacaccgagaagctactggaacgagtggaaaatgggctgcacagctcaatgaattttgtattgattatcgtcatagatcctagattcagttccaggcgttatcagacttcattgctgactggacaccacggtctcatgaggaacaaacatatagctatgtcgaaacttggacagtgttttgcgaagggttttgacgaa

SEQ ID NO: 67924 - DNA, 269 bp, Zea mays
tcgggaatcacatgctcctagccatctctcggcagacatatatttctttattgtctgggaggcaatacaagaagtcgtcatcatctgtcccattgaacactacggccccctttggatattttagttctcgggcataatggttagcttcaaagatctcttcttcagataatttctttcccgaagcatgtcgaataatatagtcgtgcattttggaagatgcttcgggggtggcagtgtcaatttcctcgactaaaatttgctctgttatt

SEQ ID NO: 67925 - DNA, 434 bp, Zea mays
agcttggcaaaagcactacataacttttataatcaccaaggagtgattccaggtttaatcaaatcaaacattacagttttcaaaatctgttctgacagaggacagaacacagcaaccagtttgtaaaattcataactcttgaactatcaggcctatggttatgaaattttaacacaagcaagatcagaaaagcatctataactttcttataacgattatgaacagattgtaacataaaattaggcaaacaatgcagtttctgaaatatgtacagaatttggacagattcagttactgaatttgtaaaaagcataactcctaacctgtcagacctatggctgtcaaattttaacaccagcaagataataaagttatctaccacttttctatagcacatatctacagaaaatacaatttagttcatcaaacataca

SEQ ID NO: 67926 - DNA, 271 bp, Zea mays
tcaatgggttttcaacctctgggtctagtttttgtaataaatgattaattagattgtaataaattagctttgaggagctattttagtcaaatactccctccgtcccaaaatagtattgattttagctctaaatttttatgtctatattcaactagatgatgatgaatatagaaatatatatagaacacatacataaagtattatatgaaactattaattatttaaaacaaattttaatttgtgacggatggagtacattttactacaattt

SEQ ID NO: 67927 - DNA, 400 bp, Zea mays
agcttgagttccccatctttgacggtgtcgttgatcctctcaactggctcaaccaatgcaaacaattcttttgtgggcagcgcaccctagtttcgaattgcacgtggctcgcctcataccatctcatcgtcgccgcacaaacttggtactacacgcttgagcaggatgaagggatgtcctcgtgggagcgcttttgagaattgtgctccctgtgttttgggccagcacttcgtggcaccaggatggctgagctcgcacgccttccattcacgtctacactccaaaactacgccaaccgctttaacgccatgctgtgccatgctcgtaacctctccgcgattcctggtaaatttctacacgaattcctctaaattcctagattcaaagaggccatactgat

SEQ ID NO: 67928 - DNA, 268 bp, Zea mays
tgcacacatagctcttttgaatacctttgatcatatctcttttatatgctatgactaatgagttttcaagtttatttcaaaccaagtcataggtatattgaaagggaattggagtcttcggcgaagacaaaggcttccactccgtaactcatacttcgccaacactccgagcaactctctcttctttgggggaaaatgagcatcaaagaaaaaaacttcatccctggggaagagagtaaaagctcaaaagcttcgctttttggtataa

SEQ ID NO: 67929 - DNA, 429 bp, Zea mays
  unsure (1)..(429): unsure at all n locations
agcttctcaccacgtcgtccctagccgcaccagctcaccaatcgccgccgtagctcctcaaccggtgatcaccggaggaagcgccacggcgaaagccatatcttccacgcgccagtaccattgttctctccgaccgccagcacatcccggtaaaattgggcgccaccgccgttagaggctataaattgccgccaccatccgctcctttaggtagttacgcaaccagtgaagcaactcgtgcttcgaatcaccccctagagctcgcanatttctcgtttcccccaaattggttttccgccgccgcgatgaacacctccccgtggtcagaccagttcgggtcagctccttccctctgctcccttgttntagcatctctgtgtactggtgatgctcaccaactcgcgcaattgagctaggatcccatgaatc

SEQ ID NO: 67930 - DNA, 269 bp, Zea mays
tgacaatgaggagatggcgctcgtcatcaatagcttccgccaaatcctcaaacaaaggaaggggaaagactacaagtcccgctccaagaaagtttgctacaaatgtggtaagcccggtcattttattgctaaatgtcctatgtctagtgacagtgaccgaggcgacgacaagaaggggagaagaaaggagaagaagaggtactacaggaagaagggcggcgatgcccatgtttgtcgcgagtgggactccgacgagagctcaagcgact

SEQ ID NO: 67931 - DNA, 407 bp, Zea mays
gcaagctgtaacccctactgcaagcacctcggtgcatgataatataagcctcattcctactcttgggttccatcttgcatcaacccatctggacaggggctcgcggcacaaaattcactattcggtttggttgagggtcccccggatccgaaacgccgacagttggcgtgccacgtatgggtcgctgcgtgtaaacaatactttcccgttgagttccagatggacaatactcagtagcctcttcagcccaagacagtgctccgctttgggagcctcgagttcgtgttccccgatggcagctacgacatggtacttctccccccgcaacacgacaacaacggcagtcgtcggctctcccagcggaggtgaactttgcgacgacatctcctcgtggcggaagaacactt

SEQ ID NO: 67932 - DNA, 226 bp, Zea mays
caacaccatctcccagcttcccactgccacattatccttcgctggcttgctctctcctgggataccctgctcggtcaccccgcctgtgccctctgccgtcgcctgccccaaccggatcacgcacacccacaccaatgtcacccaatgtcccctgcaccgcttctcaatgtctccagctccccacctccccatcgtggccagagcagatctgcttgtggaagacacc

SEQ ID NO: 67933 - DNA, 426 bp, Zea mays
agcttcctccagcattcttgagcccctcatgcatccgaaggtaacaatatgttccactgggggttatgaagctggtttttggctcatcctccttcttcatccaaatttgatgataacctgaataacaatccaacagactcataagctctgacgaagctgctgcatcaactagggaatctatccttggcaatggaaactcgtccttcggacaggccttgttgagatcagtaaaatcaatacacatcctccatttaccattggcctcttttaccataacagtgttagccagccattctgggtattttacctctctgataactccggcactgaggagtcttttcacttcattctgagcaccttcggccttatcatcagacatcttccgaagcctctgctttctgggtctaaaggatggatcaacattga

SEQ ID NO: 67934 - DNA, 273 bp, Zea mays
tgtgagacaaagcaccaatcaagtttttcgagaagcgggtgacgttgcatatttgaccaagtgtatacttgtcctttgagtggaatttcctgtaaccccagttgactgattgctagattaaaactcatcattttgaggtgatccccacccggtttgttgcggttatcatgggatctgatcatattaaagtcaccgaggaagatccataatttgttataatcaatctcaatgctcgaaaaccaagaaagaaattcatctctcctatgaggagta

SEQ ID NO: 67935 - DNA, 409 bp, Zea mays
  unsure (1)..(409): unsure at all n locations
agctntanaagaaagtattgaatatatcatctatcatgcttcgggaganagactctctaaggaagaagaacgagaagcccaacactatgcctagatactgaaatatcctaagggggcattaatgttcaacggcagcggagaagaagattttttgtactgtctcccggatagcaaagagatatctgtttgccgggagatgggtagaagcttcggattcccaacgttagaagatgggctctcattactgtcgaaggatgaattggctgacatattgacatataatagtataaatgtgtgaaatcaatctttgttattaaaaacgaattatttcatttgcttatacttaatactatactcctcttgcagggcttgatccttagcaatgccctcagggcatagaaaaatatcc

SEQ ID NO: 67936 - DNA, 273 bp, Zea mays
tgttctcttttgttgggtagaccttgggaatatgatactgatgcacgtcaccatggtaggagtaatacatacacttttaggcataaagataaaaacattactttgctacctttgactcttgctgaaattgtacaagctgataaaaatagagctgcaagtactcataaggaaccaactaatgagacaaaaatcagcaacaacttaaatttaaagctcatgtcatgcttgctactaaatctgatcttcttgaaactcatgctactgatgcttgtt

SEQ ID NO: 67937 - DNA, 453 bp, Zea mays
  unsure (1)..(453): unsure at all n locations
agctntgaagtatntgaaagggcaagccaaactattccgtcgccatgccaaatgggttgagtttatcgaaacatttccatacattgtgaaatataagaaaggtaaggacaatgtggtcgttgatgccttgtctcgaaggaatgtgttgttgaatcaactagaggtagaagttttgggtcttgaaaatttgaaagaaatgtataatgatgatcctgaattttcagaactatacaatcattgtaaagatggaaaaggatgggaaaaatatcatatacatgaatggattttatttagagctaacaaactttgtgtaccaaattcttcggttagattgcttttgttgcaggagtcacatggaggaggtctaacaggtcattttggacaaaagaagacttatgaactgctcagtgatcatttctattggcccaagatgaggagagacgtcatcagatt

SEQ ID NO: 67938 - DNA, 275 bp, Zea mays
ttgttctagtgcacgcaagaccacgaagaatacctccatgtgtatgtccgaaggttcttgcgtttgagaacacaagcgcccacagtgccccatgaaattgtcattgaggccatgatcaaagggcttcgaccaggacctacggctcaatacttcgccaggacaccccctcagactctggagaagctgcttcagaaaatggatgagtacatccgggccgataatgatttccgccagaaaagggaagaagcttataggttttctgagatgactagggc

SEQ ID NO: 67939 - DNA, 438 bp, Zea mays
agcttagtggtccaaaggtagctagcaagtggtacccatataagagtatattagtctgggtggctccatgataatgacaccaatctagagttctgtattgcacctgctagagtccaatgaatcaagcttaccaaagttttagtttaaaacagacagtttaaccttcattcagaaatcagaagcactgaacccggtaacagttcttctgaagatttttttctctcatacaggaaatattggcaaacattcatttcaggttatcaaacatctaaggaatacaatgctatgaatcttgctaccaagcagatagagaattgttattaccgaaaaataggttattctaaatgcagcatgtgattcagtccaacgataggaaaaaatccaggcacacttttttcatacttcatgtccggtccaaattggggtcttccaatttga

SEQ ID NO: 67940 - DNA, 275 bp, Zea mays
tctaaagggagaacatgtgataggtctaaccaatgttcatttcgaaaaagatagaccttgtgcagcttgtcaagcagggaaacaagtgggaggctctcatcacaccaaaaatgtgatgacaacatcaagacccctggagctgctacatttggacctcttcggacccgtcgcctatctgagcataggaggaagtaagtatggtctagttattgttgatgacttttcccgcttcacttgggtgttctttttgcaggataagtctgaaacccaaggga

SEQ ID NO: 67941 - DNA, 385 bp, Zea mays
agcttgtgaaggttcttcatcttcacatgtgctaagcggcgatgccacaaccagcccatgctagtcttagcaattaagcatgcatctagaccggcctcctcttttgcaaaatcaactaagtaaagattgtcgtctaatatacccttacaagctagtgaaccatcacttcttctaaagacagacacatctacatttgtgaataaacaggtatatcccattttgcataattgactaacggatagcaaattatatccaagagactcaactaaaaacacattacaaatagagtgctcatttgatattgcaattttgcctaagcctttcaccttgccttgattcccatcaccgaatatgaatgaatcttggggatccttggtcttgacat

SEQ ID NO: 67942 - DNA, 250 bp, Zea mays
gtactagcgctgattttattaagctgttgctaatcacgaccactgtttctttttggatgcagccgctcatcactcatgagtagaggccaggattggacatcattgaaaaaaaactgtcgtgttgtcgtgatcattgtacaggtattggggtttgagctcggcagctttcttctcaggactgtcagaagtttaatgactaaagttccgaaatgttccgatatcaattacgagtacttattaaatatagtct

SEQ ID NO: 67943 - DNA, 432 bp, Zea mays
agcttatcgctgacgctatcgttgagaagcgagctgccaaagagcgcaggaggaaggtgaagaacgaccctagagcaggagcaggtattttttgttgcatatagcataatattattgtttgcaagcacccaccatacaagttgcaatttgcccagacacatcaatatgtgtttacaatcattttttaaatttgtatgcaggagcaagaactagttcaattgcaccggaggaccaatctagaggaggtgatggtgaagaaattatacagagtcccgttgcaattgacactagagcaggagcaggtattttttattgcatatagtataatattattgttgcaaccacccaccatacaagttgcaattttgcccatatacatcactttgtgctttcaatcacttttttaaaattgtatggaggatcaggaactac

SEQ ID NO: 67944 - DNA, 269 bp, Zea mays
tgtcactgttgaagatattgtccgtcagcattgggccacatatgggcgccattattactcacgatatgactatgaggtacttcctttttttcacatgtgccttgcatatatgtaccacatgtttcagatatatatcattctaaatacattagtttgtttgtgaagaatgtcgatgctggggctgctaaagagctgatggcaaacctagtaagcatgcagtcatcactttctgatgttaacaagtaagtggaactttttcaaatgtacat

SEQ ID NO: 67945 - DNA, 420 bp, Zea mays
agcttggtttcctatacaagatgtgtttttatctaaaagaatatctttggagtggttcttcgacagtctatgaaaccatcctttttatttgatactgaaagggaattaggcttacacctagtccctaattaattttggtgggtgaattgcccaacacaaacaattggactaactaagtttgcccaagtttatagattacacaggtgtaaaaggttcacactcagccaataaaaagaccaagttttggattcaacaaaggagcatagtgggaaccgaaggccctctggtctgagagcaccggactgtccggtgcaccagaggactccagctccaactcgccaccttcggaaatttccagaggcgacttcgctataattcaccggactgtccggtgtacatcggacagtgttcggtgcgcca

SEQ ID NO: 67946 - DNA, 287 bp, Zea mays
ctatagaaaacccaagctcgtgaaggttcttcatccccacagagctaagctgttattccacagccagcccaagctaatcttagcaattaagcatgcatctagaccggcctcctcttttgcaaaatcaactaaataaaggttgtcgtctaatacacccttaaaagttagtgaaccatcacttcttctaaagacagacacatctacatttgtaaatagacaattatatcccatattgcataattgactaatagataacaaattatatccaagagactcaactaaaaaca

SEQ ID NO: 67947 - DNA, 442 bp, Zea mays
  unsure (1)..(442): unsure at all n locations
agctntagacccaatcttagactcacaagctcatacaagctcacgagcaatacatcacacagtggagtagggtgttatgctccagcggcccgaaccactctaaatccttgtgtgttcttgtgttcttcccattttcccaactaacaagtgaaacgcctaagccactcctcatcttaagatttagggcaggtgcactccgccacccgaccagagatttgctctccgacagttgtgctcaattattatggatgaaacaaactctattggattatgtgatcatttttaagaatgtgcctctcatgtgtgataatgagagtgcggtaaaattggctacaaatctggtccaacactcaagaactaagcatattgatatatgtcatcacttcttgagggatcatgttggaaagggagatatatctatatattcaattggcatggatga

SEQ ID NO: 67948 - DNA, 271 bp, Zea mays
tctaaagggagaacacattttaggattaacaaatgtttattttgagaaagacaggatttgtagtgcatgccaagcggggaagcaagttggagtccatcatccacacaagaacatcatgacgaccgacaggccgcttgagctactccacatggatctattcggcccgattgcttacataagcatcggcgggagtaagtattgtcttgtaatagtggatgattattctcgcttcacttgggtattctttttacaggaaaaatctcaaacccaa

SEQ ID NO: 67949 - DNA, 434 bp, Zea mays
  unsure (1)..(434): unsure at all n locations
agcttgcattgcatatttaaattccttgtattgcatctaggacttgtctaacctagttgagataaccgccaacaaagcgagtgaaaagcttaactcgggtcaaacctgacaagtcttagttttaagcttttagcacttaaattcttactttttatgcaattattggttcttgaaatatgcatgaggtactgcacttagggggagtattcaaaactcaaatcactcatgaaaacccctagtgaaagccaaaatgcaaatttcaccatttgcctattttttctaaaaattatctagcctatggcgaaatattttgaaaagtatatgagggtgccaatacctgtcccaacaagtgttattttgtgtgattataagttgggatttggtttggttgggggttagatagaanaatatcaaattttccaaactctcctctg

SEQ ID NO: 67950 - DNA, 272 bp, Zea mays
tgtgtaggaaagatgtttgacaaacaaagatctgatatgaaaatcagatccttttgccattgtatatgtgcgaccattatcggacaaaatgaacaaaagtaaatcaattgtaagtttagttgcttgtttgtgagctctgacttttggagttatttctaaccacttgtttaactactttacataacaatgatttgaaccctagaacactttgagtttagtgttgaagatgctgacacacagaatgtaaccgtgaagacttatgatgatgattt

SEQ ID NO: 67951 - DNA, 268 bp, Zea mays
tcacgaagaggaaccttcggccatcttatacaaacagcttcagccgaagaccgcttcttcctataagaccttcggcgacgaagcataggcccaacacccatgttgggatgaagaatcttcataagcttctaaagggagagcacattttaggattaacaaatgttcattttgagaaagacaggatttgtagcgcatgccaagcaaggaagcaagttggtgcccatcatccacataagaacatcatgacgactgacaggccactggagct

SEQ ID NO: 67952 - DNA, 410 bp, Zea mays
agcttctcctcggcgagggcggcgtcgctggccttgccctcgagctcctactgccacttttgcagcctctccacagccttggtctgctggacccgctgggcttccaggatctggtccagggcactcagcttggcccggaactctgttgtgagggcctcccgctgagacacgacctcctccctcctggtcacattcttctccctccgggacgcctctagctccctggcgcacaccttttggaggtccctcttgtactccttgtggtcttgctcgagttgggaccgctcggagaggaattgtcgggacgccaacttggtgcgctcctccaattgggtgcgccagtcgctgaggcgctggtgctcagcctcaagcgccccccaactcccataagattgctgccctagtgtcgc

SEQ ID NO: 67953 - DNA, 268 bp, Zea mays
tcaagcccttagattcagtgatggtaatcggcctgccttgctctgtttagactcactatcttagctttcccttttgcctccctcaatcttgttgttcctctctttctggttgtttttttggtatagtttgagacctctttgcacaggcttctcttcttttatattaataaaattcttttacaatatatgtgtgtgggggtctcccctgctgtatctttcactaaaaagagttgaaatatatgcatgggcattcaagacatactttatg

SEQ ID NO: 67954 - DNA, 446 bp, Zea mays
  unsure (1)..(446): unsure at all n locations
agcttcgtatttntctcagattcaatcttaagtcttgctttcagagcttcgttttcctgtttgaacttattaaagtttccttcacaagtgcttaagcgtctgacaggtctttgcttaacttcttggtctgagcttgtgcttcggcaagggacccttcggctgcacatagcattttgtatttctccttcaaagagtcttggagttctttgaccttatcctctaagcccttgataatgatttcatttttcctgtcttcgtcgtcttgttgcatctttaaagctttgctcagtagtaaactctgtaaaagcaggtccacacttagaatatttaagctaatgcatacacatcaggggtaacttaaaagatagtacttactttaaagttggaataaaacaggctccctatgatatgttggtgcctgtaacaactgatattcctttcaagct

SEQ ID NO: 67955 - DNA, 263 bp, Zea mays
  unsure (1)..(263): unsure at all n locations
gtaggaccaaacactcgcacttttngggatgaaatcgtattatttacaaagaaaaaagcaccactcattggagtgaaaaagtggaaagatatagagctcaatgttagatcttctatagcctctgacgtactgctatgtgaaatttctttacttgagccctaacagttagctagaactattagtgggctactattcctaaattactagacaattaaccttctctttatattaaaactgaaacagcgaaagtgggagtttccaag

SEQ ID NO: 67956 - DNA, 407 bp, Zea mays
  unsure (1)..(407): unsure at all n locations
agcttatgttatgggttcaatgtcaatataacaagatcatatgtattaaatagaacatggagtgaccgcccagaaaacagtgcaaccatgagtgttattatggctctgactttggtaattagcttaatatgcttagtgcttagcaaccttttctaaaacaatgggcaagagggtggtcattggtgtagctcagttgggtgtgcccagggttgtcaccatcctaacttgaaaccttagcggngtactttgtattaactgtattatgtgaaaacataatagtggatcactcgtcattcacctcggaagtgaatacgggtcttatcaacccaggctagagggatacacatcatatcggtaaagttatgccacctctgcagagtataaaactgatatatcagttgtgctca

SEQ ID NO: 67957 - DNA, 272 bp, Zea mays
ttctcaccatatatagcatgcttaatgaaacttcgtagaatgatgcagtttaatacgaaaacttggtcaccaagcagactgttgaccttctgaccagtcagcactaaagtatgtcggatgcctttctggtagatttgattaagtcggctttagaagcattggaaactagacttcaagagctttccaaaaagtacttatgggccttcatagcttttgggaatcaaaagatatgactgtttcttctggacggttctgttgcgctggactgactc

SEQ ID NO: 67958 - DNA, 452 bp, Zea mays
  unsure (1)..(452): unsure at all n locations
agctggtggcgccctcaggcgtcttgtcgtagcataagcaccaaatctcccacttggaagcctcggggccgaacccttcgggcgtggtagcgtcgcaaagactgctgatacctcgccgagtgtagtaaggctacgtcctgagcctcttccagctggtccagtgaatcttctcggctggtctggttgttttggtcgtcgtatgcctttgtcctcggggaaccgtattctaagtccgtgggtaggacggcctcggccccatagactagaaaaaacggcgagaaacccgtggccccggctcggcgtcgtcctcagactccaaaccatcgaggatagctcttttatccaccgcttgccaaatttgttgaggtngttgtagatcctcggttttagtccttgcaaaatcatgccattggcacgcttcacctgcccatttgtcattgggtgagctaccg

SEQ ID NO: 67959 - DNA, 274 bp, Zea mays
tctccttgtcctcatcgaccttgacatagaaccattctgatttccagcctgccggccatttgcttcggtagctaattacaggaaactttgcggttttccggtaggcaaaattgtagcaaccgaagttttcatgaagcccatcttttctggcctttgtttgataatgcaattcatgaactcgacagaaactgtcagcaaaaggctccactgcttggcttcggagggcccaaatataaacgctaagcctaacgatagcgttaggagttaactggtg

SEQ ID NO: 67960 - DNA, 451 bp, Zea mays
  unsure (1)..(451): unsure at all n locations
agcttacccatgacgaggcatgtggccagttaaagggttctagatcagcaggccaacaatcgttgcggtccttaaacgacacagacgggcgacctatcctactcaacatctggtctcaatttaaattatttctgaaaacctggtacctatcagaggtaccctgctaaaatgatgaagtcatcaaggcctttgataccttcatcactccaagccctttttctttgtaaaaacatgattcatacatcaaaacattttgttcctagtctataatcaaactaagcacatctagctttttaaatcaggtatcaaggatgataatcaacagttcaaggaagttatgcagcaacagtttaatcattcaactcctatcacctaatgcagcagataagtgataaaaattntagaacaacaaggaggtggcaaatgcaccggngcttgcctgggataaaca

SEQ ID NO: 67961 - DNA, 274 bp, Zea mays
tgccaatacttgtcaaagcaacaacatctaccagcacagcatctgcagaccataccggtgacttggcccttcgcatgctgggattagatatgattggacctttcaagaaagctcaaggaggatacactcacgtgttggtagaaatcgacaaattcactaaatggatagagttcaaacccattgcttctttaacctcagctaaagccgtggaattcatacgagacataatattcaggtttggaataccgaacagtatcataaccgacttggggtc

SEQ ID NO: 67962 - DNA, 436 bp, Zea mays
agcttgaatggacagtttgtcttggttatcctttatttggagaattatatcttttcagtactgctgatgattattttgcttccatgctcattctgaaatcaggcacgtcctgctgtaatcgacgctcttagtatggtggacttatctggaaggactggtattgtttcagaatcatcacctggtgtattccttcacgttactgtgaagtacattattggaaaatgcagtctttttagttattacttattagttgtgattcattgattgatgaaagtgctgcacctctaaacatgctgatcattgtcaatacattcagtttactgaaaaccttgtatcgcttacaatgtgtccttattgggatcctaacaacatccagggtgataaacccaataggacagattatcatgtatgattttgcactttatgcattttatgt

SEQ ID NO: 67963 - DNA, 275 bp, Zea mays
  unsure (1)..(275): unsure at all n locations
tgagttttgagggccctatattgcataagaccagngactctctcaattaaggactttgccacccacatctgtctaggtctactcttgcttggtggacctaggaatgtaaccttaacctttccatttgcaacctttcttaaaacatagtgagcattgaaagcaaatggtcttgagtgcttangcaagggagttggtggtttggctttgcagttgtgggccaagtgaccttcatttccacactcaaagcatttgataggcttgtgagtctgctttgg

SEQ ID NO: 67964 - DNA, 423 bp, Zea mays
  unsure (1)..(423): unsure at all n locations
agcttaccgcatttgaagcactaacgctttctcttggctntggtcttgcttggctatcccttgcgacctttaagcgccgtcttgaatcttttgatgatgagggccatctcttcatcattaagtccggccgcctcaatttgtgccaccctgctaggtagcgcctccttgcttcttgttgccttgagagcaaggggttgaggctcgttgatcggtccattcaaggcgtcgtccacgtatcttgcctccttgatcatcatccgcccgcttacgaattttccgagtacctcctcgggcgtcatcttcgtgtacctgggattctcacgaatattggtcacgagatgaggatcaagaacggtaaatgaccttagcattaggcggacgacatcgtgatccgtccatcgcgtgctttcgtagctccttatt

SEQ ID NO: 67965 - DNA, 267 bp, Zea mays
tctaaagggagaacatgtgataggtctaaccaatgtttttttccaaaaagatagaccttgtgcagcttgtcaagcagggaaacaggtgggaagagcgcatcacagcaagaatgtgatgaccacttcaagacccctggagctgctgcatatggacctcttcggacccgtcacctatctgagcataggaggaagtaagtatggtttagttatggttgatgacttttcccgctttacttgggtgttctttttgcaggataagtctgaaac

SEQ ID NO: 67966 - DNA, 435 bp, Zea mays
agcttgttggaatatagtgttgtatttcacatgatcacctattcacccccctctaggtgctctcagttgggctattaactatgacaacaattccataattttccacacctctggctagggatggcaatgggaaaccgaagtcctatacctgatgggtaaaatccctattagggcacgagtatggctatttttaataccgatgagtattttgttgggtcatttgttatacccatcgatcatggtgggcatgggtatgttttctcttgccccgtacctgctacccgatacaaaagccgctaacatatgacatgtgggtccggattaaggagcgtgttctctctcatgcataagcttgtatgatgttgaatttaatggtgaatgctgttgacattgtgataaagttatgatgggttcaattacatttgtcacgatagt

SEQ ID NO: 67967 - DNA, 270 bp, Zea mays
ttatcaaatggacgtgaagagtgccttcctcaatgaaccaatcaaagaagaggtctatgttgagcaacctccaggctttgaagatagtgagtaccctaaccatgtttataaactctctaaggcgctttatgggctcaagcaagccccaagagaatggtatgaatgccttagagatttccttatcactaatggattcaaagtcggaaaggccgatcctactttatttactaaaactcttgacaatgatttgttcgtatgccaaatttatgc

SEQ ID NO: 67968 - DNA, 430 bp, Zea mays
agcttgcggccggagcgaaggtgagtcactggagttcgctcaatgtggcatttactggggtagagtcccggggtggtaactaaccatctcgcatgacactttgcgacatggtaacatggtgagtaacgtggtgtatccggggtaacggcgaccatcacggcgacggcagcacgaccacgtcgacgagcaagtgggtacggcgaagctgactctatccactccccttcggatctttttaccccctgcgactatccactcgccacagagcacaattcgtagcaccggtgcggatcacggcgcgaagatcaccggcggcgagattcactgaacgtggcgatcttgtttagtccactgttcaccactgaacatcgccccgagctgcttgacaaacaaggtttgggagcaatttactccaaaaattgtacagcac

SEQ ID NO: 67969 - DNA, 269 bp, Zea mays
tgtcgaagtggtcgaatgagttcaccgaagtgggcgccaatgatggtccttgttctcagttgctatacaccaagaacaaagcaacacaatcgttattgattagggaccttcgtccttcgaagcattatctcccttagggtataatgatctctagacgaagatcatgaaggacataccttcatctctttagtgagaatatgtgaataaagacatatgggacacaaaaagaatataatcaatcattccaaatcattatatttttcatttct

SEQ ID NO: 67970 - DNA, 442 bp, Zea mays
agcttaactaaagtcatctaagagtcggctagctagaacaacgataccgcccgctagacagcatacacgtcgacttgcctattattatcacaattcgagacaccacatacactacaacatttttataaacattcatattcacaagtattttgcacaccgaccaaatcatacaaatcgtaaactactagtctccaactcacaatcaccatgcatttactccccgatcatgaacacatacatgtttatcatacgaacagagcatttcaataattatcctaaaacaattaactccattacacaacttataccacaaacctacttgacttgcttgaagtgtctactcgaatccgtgagcacaatcacacattatatgcgaagcataatttaacgaacacataatacgcatcgactcgattcgacttataaatatcgagaaagcgat

SEQ ID NO: 67971 - DNA, 271 bp, Zea mays
tctcgtataagggatgatgcacacagtacgccgcgcgacacgggcgcactgtttgacaatggattggacaggtgcgccgtctgcagggtggccctgacgccgcctgccagcggagtggacaggacgcaacaaatgctgagggggcacatcgcttgtcagcagggtggacaggcgacgcgtcctttccgtaataaatgcagagtccgcgcggtctaggggccttacgttaggctccgcccgctgacttatgtcatgggcaacgagccatgtg

SEQ ID NO: 67972 - DNA, 435 bp, Zea mays
agcttctagagggagagcacattttaggattaacaaatgttcattttgagaaagacaagatttgtagcgcatgccaagcagggaagcaagttggtgctcatcatccacacaagaacatcatgacgactgacaggccactggagctcctacacatggatctattcggcccgatagcttacataagcatcggcgggagtaagtactgtctagttattgtggatgattattctcgcttcacttgggtgttctttttgcaggagaaatctcatacccaagaaaccttaaagggattcttgagacgggctcaaaacgagttcggcttaaggatcaagaaaataagaagcgataacggaacggagttcaagaactcttaaattgaaggcttccttgaggaggagggcatcaagcatgagttctcttctccctacacgccac

SEQ ID NO: 67973 - DNA, 272 bp, Zea mays
tcccggatccagtgtattgatgtacaatgctatttttttctcgtcttggtcaaactgctacgtgtacgtgacatactactagtgactgtgtatgtttgctcttgttcccaatcttcgcaactaccagcaactgcaaaaagaaggtaccgtactactagcactacagtaaactaacaaaaatccgacggtcaatttatctccgacggagatggttcaacgccatggggaggagtacgattggaggagccagccaatcgacccgcaggcagcct

SEQ ID NO: 67974 - DNA, 413 bp, Zea mays
agcttgccgtctaatacacccttaaaagctagtgaaccatcacatcttctaaagacagacacatctatatttgtaaacaaacagttatatcccatattgcataattgactaacagatagcaaattatatccaagagactctactaaaaacacattagagatagagtgctcatttgagattgcaattttacctaacccttttaccttgccttgattcccatcaccgaatattattgaatcttgggaatccttattcttgacgtaggaggtgaacatcttcttttcccccgtcatatggtttgtgcatccgctgtcaataatccagcttgaacccccggatgcataaacctgcaaggcaaatttaggcttgggtcttaggtacccaactcatgttgggtcctgcaaggttagcac

SEQ ID NO: 67975 - DNA, 268 bp, Zea mays
tgccagtacctgtcaaaacaacagcacctgccagcacatcaactgcaaaccataccagtaacttggccttttgcatgctggggattggatatgattggacctttcaagaaagctcaaggaggatacacccatgtattggtggcaattgacaagttcactaaatggatagagtttcagcccattgcctctttaacctctgctaaagccgtggaattcatacaaagcataatattcagatttgggataccaaacagtatcatcactgact

SEQ ID NO: 67976 - DNA, 415 bp, Zea mays
  unsure (1)..(415): unsure at all n locations
agcttttggatatatttntttatacaaaaaataacaattacaactttatttattattctatgtaaatcgatgcttctgcctagtgcggatcctatgtgcaataaaccatatactttaggtcgtggaaaataatttttgcaagacacataaaatagtaaattcatttttttgggaaagaacatggctcttacaaaaatataggcacgacggcagcttggacgacgtgacgcgattatattgaagccagccacacatatggacatggggtgtttgaacgatgaagatccatgagacatccaggaacgaacagtggcttgcttcttttcccaatgtatacaacactttcttcgtttcttctctactgcaccaacgacacgcacagcgggtcggaacggcaccgacggaatcttgctgg

SEQ ID NO: 67977 - DNA, 268 bp, Zea mays
tgagaccgagcgagcagaaattagggcgcgcgtgcatgggaactccacggcggggtcccgacaggggaagacggagcgttcgcgcatccaaggagagagagaagtgcgagagcgagcagcgggcacggccatggagatggggactggacgacccgatggagcagcagcggccagccatggccggacccgaaggggccagcgcccaatccgagcagcgcgtcgagggcagaacggcagcagggagatggatggtcggcactggagctgc

SEQ ID NO: 67978 - DNA, 449 bp, Zea mays
  unsure (1)..(449): unsure at all n locations
agctntnttaatttcatactagcgtacttgtatactaaaaaagctgtttagaatggtatacgaactttgaccaatggccttctggaactttggtattctttgtggctgcaccccagcagctcccatctcatccatgatccttgttgcatcttgcaacttcctacgatggcatgtactcgacagttccattttctggcattttctactgatccacatgaacagaactgctacagtccgacacatacaatttcgcatgctagatctattgattctctcattattactcgggcatgtactcctcattattagtaatgttttcatttctttgagtgtagagatggattaaaaacagagtgaatggtactattgcataactgtgcacttaaatcattctctgattntgtagacaattcttgtctataatatgtaattgtgtctgcaatggatca

SEQ ID NO: 67979 - DNA, 272 bp, Zea mays
  unsure (1)..(272): unsure at all n locations
ntaagagctttggtcgtgcagaccattttaacatgtaaccgaagaaaggcatcagagagttaactgtggtcgtccaagcttgttggactacatctttgaacccggcaatgtgtacccagtaagattcaaaacggaaccccttatagaaattacaaggagagtggccctgcattaataacggagagtggtccgaagtcatggaacacaatgcctgcaaattagccgctggatagagcccatgccactcagtagttgccatcaatctatcaatc

SEQ ID NO: 67980 - DNA, 442 bp, Zea mays
  unsure (1)..(442): unsure at all n locations
agctntggatcgatatcatgcgtgaggaatgttactgactggaataaagcaaagccctcatgacatcttcaccaaggatacaagaggaaaagacagcattactattagcttgctccctagtacaaatatataggcttaaaggcataaatgtaatttgccaaagttgtactttacatagggctgacaatgggctataatttttgcactataagatttaaggatcgaagcgggttaggatcgggctttatttctagtcatttttgaactataatttatttagggccttgacattttgtgaagaactatttggatcacgatccattaccacccctaactttacacctataaatggaggaatagtggcatgcattangcacactttatgggctaagaaaagtcatttcgctctgcttacaaagatgtatatctcttaccttcgcat

SEQ ID NO: 67981 - DNA, 273 bp, Zea mays
tatgtggatgacgtggtgatcaagatagaaaactcagaatatttaattgaagatttacagctggtcttcaacagtctgcggtgatatcgatggaagcttaatcctgaaaagtgtgtctttggaataccagcagggaaattgctcgggtttatcgtcagccaccggggaattgaggctaatccagaaaagatcgaggctatcatgagaatggaggcaccacgatcacagaagaaagtacaaaggcttactggatgcatggcatccctaagcagg

SEQ ID NO: 67982 - DNA, 419 bp, Zea mays
  unsure (1)..(419): unsure at all n locations
agcttgtggaggttcttcatccncacatgtgctaagcggcgatgccacagccagcccatgctagtcttagctattaagcatgcatctagaccggcctcttcttttgcaaaatcaactaaataaagtttgccgtctaacacacccttaaaagctagtgaaccatcacttcttctaaagacagacacatctacatttgtaaatagacagttataccccatattgcataattgactaacagatagcaagttatatccaagagactctactaaaaacacattagaaatagagtgctcatttgaaattgcaattntacctaacccttttaccttgccttgattcccatcaccgaatataattgaatcttgggaatctttattcttgacgtaggaggtgaacatcttcttctcccccgtcatatg

SEQ ID NO: 67983 - DNA, 275 bp, Zea mays
tatcaatcattgcatccatagcagttagcttgggttctgggacacccctactcattcccaacttagtttcattgcctgaaagtggagattatcaataatcaatctcctggtaaagctgaaatttaaaataaatccatgtcacaaaatctgattcatatataaaaagggtaagactgaaaaaaaaattgtcagttactctgcatattactataataccattgaaactaagtttgtaggaggtgtgtgagcaaaaaaaaaattaataataatgtgtt

SEQ ID NO: 67984 - DNA, 427 bp, Zea mays
  unsure (1)..(427): unsure at all n locations
agcttgtgatttatccaatttaaaacaagcaccatctcttaacatagattntctatggataaactcaacaaaagagatggcattagtagcacaagcactagtttcttatttagcaaccctttatatgtggaagacaagcgtgttgctaaaatagagaaatctcataatatggactaaatttcccttgagccctcatgcacaatatattttgaatgacatggataatatgcatggttgttcaatgaagtctaaagggctgacttaatccatattatggtgagtgtctaatatagaagaatcaaatccaaattaactagagagaatacatcacataattntggattggtgaccatatgataatantcattcatcttccaatttggaccattatttcataatcaacaactgatatatatcctcaagtact

SEQ ID NO: 67985 - DNA, 274 bp, Zea mays
ttacaatgctcttccaccaaaaagaaccaacacttctattgctttgagacctcgagttagatagtaattgttccagatcagatgcacccaaggtaagtcgctatggttgaaaaaattatgcaagaatttaattagaagagcctcgttctgagattccaagcgaagaactcccagcccaccattcactttcctctgagtgaccgaattccaagcaatcaaaggtggcttcttggagttaatgtcatttcctctccacagacagtgctttctgaaa

SEQ ID NO: 67986 - DNA, 446 bp, Zea mays
catgctatctatataacaggacgtgaaaagtgcctttctcaatggaccaatcaaggaagaggtctatgttgagcaacctcccggctttgaagatagtgagtatcctaaccacgtctataggctctctaaggcgctttatgggctcaagcaagccccaagagcatggtatgaatgccttagagattttcttattgctaatggcttcaaagtcggaaaggccgatcctacactctttactaaaactcttgaaaatgacttgttcgtatgccaaatttatgttgatgatattatatttgggtctactaacgagtctacatgtgaagagtttagtaggattatgacacagaaattcgagatgtctatgatgggggagttgaagtattttctaggatttcaagtcaagcaactccaagagggcaccttcatttgccaaacgaagtatactc

SEQ ID NO: 67987 - DNA, 265 bp, Zea mays
caagtcaactcaagaaagccgggaacaacctatgaaccaaacttgttttcttgctaacttcttcttgaatctcgagggcgagattcctatcaagggggttagatttgtaacaccatgaatttgggggtataaaatttttctctaatatccatcaaattcaggtgttacctttatcctcctcttccttttttgctcttttcgtttcaatgtagtaggagttatttggatgtcatgtattaataaaaccctaaaggtatgatggttg

SEQ ID NO: 67988 - DNA, 432 bp, Zea mays
agcttgttgtgaaatatgttgttgcctactctaaaaggaaaataatgaaaaagagtgtgtgggaaccaaaggctattactaacatacaaggacccaaatcaatttgggtacctaaaagcatagcctacatttgtggttgcaggtctactcctccggtggatcaagatgggtgcttgatagtggatgtacaaatcacatgaccgagaagaagtacttgtttcatagcttacatctaacccaagagtcacaagagatagtgtttggggatagtggtaagggagaagttattggtattggtaacattcctatctcaaacaaccaatcactctctaatgttctactagttgattccttgagttataatctgctatcagtttcacaactgtgtggaatgggttttaattgtttatttacaaatacatgtatgaaatt

SEQ ID NO: 67989 - DNA, 268 bp, Zea mays
tcatgcaactctacgctcgcctaaaccaagaagataatgtggtcatgctcaaacttctaaaaagagcgagagagcaaagcgaagctcgtcaaaggataaaaaatgttctctccataaaaatgctacactttgacgagttgactaaagaacatgaggagctaaagtgctctcatgttgatttggtccaaaggtatgaaactatttcaattgagcaagataacgctttacattgtatcgctcaattagtaaataggaatgccttgcttaa

SEQ ID NO: 67990 - DNA, 442 bp, Zea mays
  unsure (1)..(442): unsure at all n locations
agcttaaagccatggtaagtatcatatgcatgtaatatgcgaattgactcaagcctagctacgggtgcatagatttcaccgaaatccaaacctttgacttgtgaatatcccttggccacaagtcgggctttgtttcttatcaccacaccatgctcatcttgcttgttgcggaagacccatttggttcctacaacattttggttaggatgtggaacaaaattccatacctcattcctcgtgaagttgttgagttcctcttgcattgccaacacccaatccgaatctcttaatgcatcctctaccctatatggctcaatagaggaaacaaaagagtaatgttcacaaaaatgagcgacttgagatcngagttgtacccccttatgaatatcaccgaggatggagttcacggggtgatctctttgaatcgctcgatggactcttg

SEQ ID NO: 67991 - DNA, 269 bp, Zea mays
tacctgactccttcttctccaccggcacaatattggagacccactctgcgtatctgcaaggtctaataaaattagcttctagcagccggtggatttcgtccttgattcgtgggagaagatctggacgaaatgttctagctttctgcttgaaaggtctgaaaccaggcttaataggcagccgatgttcgacaatttctcggcttagtccaggcatttcagtgtaattccaagcaaaacaatctgaatattccttcaatagaccgatcatc

SEQ ID NO: 67992 - DNA, 432 bp, Zea mays
  unsure (1)..(432): unsure at all n locations
agcttcataaacacagactgagacaaaactatccgaagccgaagctgcaaagagtcaggccaagaccgaagctgggccttcagagcccgccaaggagaaatccttggaaactggagaaaaggaaatggaaaaagaagctgtaaaacaaattctgcctgaaaaaactgtcacttctactcccgaagcatcttccgaagtacttgattatattgtacgacacgcttcgggaaaaagattatctgaagaagagatttttgaagctaaacactatgcccgagaactgaagtatccgaaaggggccttagtgttcaatggcacagacgaagatgacttcttatactgcctcccagacaacanagaattatctgtctgccgggagatggctagaagtatggggttcccgaagcttgaagctggcctctgtgctatgac

SEQ ID NO: 67993 - DNA, 271 bp, Zea mays
tgtactgaattggagtccccgggttatttcttaccgtgaccagggagagtggcctccatacgatggtccaaagtatgtagctgatccaggcagtcgttggaacaagcgtggatccagaaagagaaagaggcacaagatggttatggatcagatacctggtagtagtaggcggggaagaagaacaccatttcttaccgaccctgaatagtacgagtgtggcaagtgcggtagacttggtcacaatacacgcacctgcagttggcagattagt

SEQ ID NO: 67994 - DNA, 435 bp, Zea mays
  unsure (1)..(435): unsure at all n locations
agcttcttgctaaatggtccttctctattctgaattttnttaaattcaaagttgacagcctgttcttgttggtcctcatcatgataataaaattgctcgacacaagatatgaaggcttcattcattttgggctcatcaaagattgatgggttagcatagctatagtgtggattcagcaaaaaagctgtcaaatgcaatggagaatcaagtcttccattcatcttcttctcaattacagccataacatctttgaatcgagactcaacattgccaaaggcctctttgacctctctctttgcctttagtagctctccataaaggaaacccatggatggcttcacatccccatcaaccaaacggaggactttgaccaatggctcaaaaacagccaacattagcttcacatccttccaaaaggctggactcaatatagta

SEQ ID NO: 67995 - DNA, 268 bp, Zea mays
tttgtactggtggaccagaatgaagagggagatagcccattatgtatcagaatgtgacacctgtaagaggataaaggcaagccacttgaagtccgctggagctttgcaaccactgtccgtaccttcgtggaagtgggacgacatcagcatggatttcattgtgggtctacccaacacctctcgtcatcatgattcgatttgggttattgtggaccgattgacgaaagtggcacattttcttcctgtgcacaccactgataaggctcag

SEQ ID NO: 67996 - DNA, 431 bp, Zea mays
agcttaagcatgtgaaatgctatagaagtaataattaagagaaggtatgtttctagacttagtacattggtttttgtgtactaatatacttgtctaagtgttagaaacagaaggaagaagaaaaggaaagaggtgcaaatggtttggctgtgtacagccaagactcagctcagtctggcacaccggactgtccggtgcgccaggttgaactccggtgaacaggccgctctcgggaggagtctggcgacgtacggctataattcaccggactgtccggtggtgcaccggactgtccggtgagccaacggtcggctgggccaacggtcggccgcgcaatccgcgcgtgacgcgtggacgagccaacggtcagataggggcaccggactgtccggtgtgcaccgaacagtgtccggtgcgccaacggctccagg

SEQ ID NO: 67997 - DNA, 271 bp, Zea mays
tggacagtacatcagccgccgtgttccgatctctttctatatgatgaaactccagaccttcgaatttatcttctagctttcggacggcggcgcagtatcttcccattgaatcacttgaacaatcccattccttgtttatctgactgatgactaccagagaatctccgtataccatcagtctcttgacacccagtgatatagcgatgtttaatccgtgtatcaaagcttcatactcggctgcgttgttagaggccgggaatagcaattggag

SEQ ID NO: 67998 - DNA, 433 bp, Zea mays
  unsure (1)..(433): unsure at all n locations
agcttgtggaggttcttcatcctcacatgtgctaagcggcgatgccacaaccagcccatgcaagtcttagcaattaagcatgcatctagaccggcctcttcttttgcaaaatcaaccaaataaagtttgccgtctagtacacccttaaaagctagtgaaccatcacatcttctaaagacagacacatctacatttgtaaatagacaattatatcccattttgcataattgactaacagataacaaattatatccaagcgactcaactaaaaacatattagaaatagagtgctcagatgaaatagcaattttacctaacccttttaccttgccttggttcccatcaccgaatataattgaatcatggtgtcggngaccataattaggggtaccctcaagacgcctaattctcagctggtaacccccatcagcat

SEQ ID NO: 67999 - DNA, 267 bp, Zea mays
tgccaattcttatcaaaagcacaacatttacccgcacagcagctgcagaccattcctgtaacatggccatttgcatgctgggggctggacatgatcggacctttcaagaaaggttagggaggccatactcacgtactggttgccattgacaaattcacaaaatggatagagtacaagcccattgcctctttgacctcagccaaggcagtggaattcatataagacataatatttaggtttgggataccaaatagcatcattaccgac

SEQ ID NO: 68000 - DNA, 421 bp, Zea mays
  unsure (1)..(421): unsure at all n locations
agcttcttcattgaaactntgcacacctggttggtaccaaattttccccgtcaaatgcatattattttctaacttcatattagtccaaattggtacaccacacatgtgttttggacttttggtcgtaccttctttattgtgaatggtcattagttatttttaagctaatgaccttctagtttcagcattcttttaggccttcgttggagtgattgctgctgtgttctaatttatttttgtcatttcagtttcctcttttgtacaattttccatcaaagttcattaatttcaatgagtatggtgcaacctatgttttctgatttcacattntgtgtctggcagggtcaatacgcttatccaaatattgacccatactatggaagcctttatgcagcagcttacggtggacagccattggtaa

SEQ ID NO: 68001 - DNA, 268 bp, Zea mays
tgtcaactcaaaggctcggctaaacaattaggtcacctattagcattcctgtttagatgcactaagaacgattttaactcatgtagcaataactggaccttaatcttttaactcttttaactggtaagtgataactagttaaaaggctcatgtttagatgcactaagtttaatgcacctagcaactagatctaaatgaatcttagcctttttttgaagaactaagtaactatttggcatcactttaatttgaatgccgcattaaggat

SEQ ID NO: 68002 - DNA, 434 bp, Zea mays
  unsure (1)..(434): unsure at all n locations
agctntacaaagcacttaaagaaaagagaatgggaatgagaaagcaatccaagcaacacgagcaacaaaaagaacacaaaacaccctctctcaagccactaagcaattgagttgattntgaggcttggagaggatttgatctttggaatgtgtcttggagtgaatgctattgctcttttattgaatgttgggttcagaaaacttggatgccattgaaggagggtggtgggggtatttatagcctccaaccacttcctagccgttcgctggttttgctatcgatgggcacaccggacagtccggtggtgcatcggataagtactgttcactgttcggtgtgtgccacatcaacacgcccgctgggggttggagcggttgaccgttggaaccctttgtcctgtagctgcactggataatcccggggcacaacggac

SEQ ID NO: 68003 - DNA, 184 bp, Zea mays
ccagtcccgccgccggggtgctttgtttgggaaagaaaagccggaagcgtcgatctcacatcggacggctgggaatagaaacaacgcataccgcttcgatagattgatcccggtggttgggaatggggatcgggccgattcctgggtttgccgcgggttaattaaaatctgggaccaccaggat

SEQ ID NO: 68004 - DNA, 282 bp, Zea mays
  unsure (1)..(282): unsure at all n locations
agcttgttgntctgctccatgcgcctaggggtcccttttatagccccaaggcagctagaagccattggatatcaatttggtaggcaattcttgccttctgtcgagtggtgcaccgaacagtccggtgcaccaccggacagccactgtagcggtccggtgcgtgatcttctttcatatcaggcgcagccgaccgctggtcctcgggatccgttggcgcaccggacactgtccggtgggggtacccaaccgaccgtngacaccggccacgtgtctcgcgttgat

SEQ ID NO: 68005 - DNA, 273 bp, Zea mays
tgcttttgaaataaatgtaatttatgtaatcgcttccgcatttctttatctccgatgttctgtaatgtctgcaagacgggtgaaacgttcctggtaaggtaaggaaagataccgaacttgtcaagtgacttaggaacatctacagggtgtctgatgtctgttggacaaggacaactgtaggtgggcccaattacttgggaggttccgtcccagctggtatcggagcgtagcccttctttgcagatattatgaggcatcttcaaaaaggatttt

SEQ ID NO: 68006 - DNA, 441 bp, Zea mays
  unsure (1)..(441): unsure at all n locations
agcttagtcggtgctntacaatatctcacttcaactcgaccagatatttcctatgatgttcaacaagtctgcctttttatgcatgctcctcgtgacactcacatggctttgctgaagcggatcttacgctatgtgcgcgtcacactggactacggtcttcattcccaatcttgatgctgatatgggctggatgtccagatcctcgacgttccacatccggttattgtgtatttctgggtgacaatcttattgcttggtcctccaagcggcaacatacagtttctagatccaatgcaggcgtggcaaatgctgtggcggaaatgtgccggttgcgtcagttgatgactgagctttctcatccaccttgtcgtgcatctgtggtattctgtgaaaatgtcagtgtgatgtatctagcctccaaccctgtgcaacatcaacata

SEQ ID NO: 68007 - DNA, 273 bp, Zea mays
tatcaagaatcaaagactcttttgcagaaaagcttactatgagtggatccttaagaattcattttacttgtcaggataagtaattacctgcatctagattcctttctaatcttagatcaagcacttggcctatactagccatccttttatcaccccttcagttcgcttcttgctacgtgtaggtaagtgaccaagtcttcatgtccgagaaataacggtgatccgaatcgattaatacccagctggagatctccaaccacacgacatatgtag

SEQ ID NO: 68008 - DNA, 448 bp, Zea mays
agcttaataatacatcctttattcgattatacaacagcaacctaagcgtcgtgttacccaatgtgtacatcttttctcgttgcgagtgtaaccatatcacggcatacacccgcacacctcaaacaattatctcacgccaccactaccataatacaccacggcacacacgcacatacgtgtactaattcaatcctcacatcacatgtatttccaaacttactcatcacataaaacaagcatgacacacgtgtttaccaaaacgtgaatgcgaccttgccacagcataaaatcaaaacattttatacccacatctagtcaaacaccactatacatcacatcgaccaaaacgtaattagacaaactacaaatcgcacacatcaacaacctcttgttctccaatcgcaaacgtgatcctaccaatgcgtagtaccgaaacatattacacaca

SEQ ID NO: 68009 - DNA, 274 bp, Zea mays
tattttcggggtcgtgcccgggcctcagttttcggcccgtgcgccatgggcgaacccctcattttcggcccagacgcaaggccgaacagccatgccgcccgtcgccttgcgcctccgtgccgttttccctccgttccgccatgcccttcacccaagacatacatattaccttcggtgtctttccacacgcttggacttagcttatttccggggccatgcccgaacctcggttttccgcccctgcgccatgggcgaacccctcgttttcggccca

SEQ ID NO: 68010 - DNA, 423 bp, Zea mays
agcttctcctggacaagcgttgcacttaccgctgagtgcgaagctgccacatataataacaaaggagcccctggcgttggtggagttaatgttgttagatctattaaatactgtttcagctcttcaaaagccttctgctggattggtccccattgaaagacttcggctgacttcagcacttcgaagaatggtaagtttctctctgccgatcgggatatgaatctattgagagatgccaaccttcctgtcaatctttgagcccccttctttgtagttggtggctccatccgaagtatagcttcaattttgcttggattagcttcaattccctttgttgaaaccaagcatccaagaaatttccccttctttactccgaagacagcattttctggattcaactttaaaccagcttgtctgaaactg

SEQ ID NO: 68011 - DNA, 269 bp, Zea mays
  unsure (1)..(269): unsure at all n locations
cccnagattaatattatgtaagttcatccctgttttaaattttaggtcacaataaaatgaattgatctatgattatgtacttgtaaataacacttagggaaataataatctattttcaaataaagttaatgtatgttataatttatgttacactttgaattcattattcattatgtagtattcagtcctcttaagatgtgctccaatgtttttacatgtttggtgtgatgttcatttgcactttccaaacgtattgaatgcatgctcgc

SEQ ID NO: 68012 - DNA, 439 bp, Zea mays
agcttgccaatacttgtcaaagcaacagcacgtgcccacacagcaactacaaaccataccagtaacctggcctttcgcatgctggggactggatatgattggacctttcaagaaagctcaagggggatatactcatgtattggtggcgattgataaattcactaaatggatagagttcaagcacattgcttctttaacctctgctaaggccgtggaattcatacaggacataatattcagattcgggataccaaacagcatcatcactgacttaggatccaacttcaccagttcagaattcttcgatttctgcgagcaaaagagcattcagatcaagtacgcatctgtagcacatccaagagccaacgggcaggttgagcgagccaacggaatgatattggaagcactcaagaaaaaagtcttcgataagaattgaaaa

SEQ ID NO: 68013 - DNA, 269 bp, Zea mays
tctaaagggagagcacattttaggactaaccaatgttcattttgagaaagacaggatttgtagcgcatgccaagcagggaagcaagttggcactcatcatccacacaagaacataatgacgactgacaggccactggagctcctacacatggatctattcggcccgatcgcttacataagcatcggcgggagtaagtactgtctagttattgtggatgattattctcgcttcacttgggtattcttcttacaggaaaaatctcaaaccc

SEQ ID NO: 68014 - DNA, 441 bp, Zea mays
  unsure (1)..(441): unsure at all n locations
agcttaaggaaagtactaccacttatttatattttataagatctgattcgaagtttaacttgggcaaacaaggtcagtttcgaaatctgtacagaatctggacagattccaagactagaattgagaaaatcataactcccaaactactagacctatggtcatgaaattttacacaagtaagatgaagaagttggctacaactttttatatacaacacctccaccgaaaacatggtgtaattcattgaactagcggcataaccaaaactggtcatgtagtcccaaacagcaagcaatagatttattcaggttttatactcttctaagattaagcgttcatcgaaggactaataactntaggttcttcattacgagacacttagagccaacattaaggtagaagcaatatgtttactntttaaatcattntaagcctgatctc

SEQ ID NO: 68015 - DNA, 266 bp, Zea mays
tggattgctcctccatgcgcctagggacctttttatatctcccaaggcagctaggagccgttggaggccaatcaaggaagtccaaagttgccttctgtcgggtggcgcaccggacagtccggtgcgccaccggacagtccctgtaaatggtcccgtgcccaactccttccttttctggcgtaaatgactgttgcagctcctgggcaattggcgcaccggaacattcggtgccccctgcccatcgttggcgcgggccatgcttttct

SEQ ID NO: 68016 - DNA, 437 bp, Zea mays
  unsure (1)..(437): unsure at all n locations
agctntgaaatagttaaaatacctgagtagcttcatccgaaggatcctttgtgttatccacagtaaaaatatcctctgtttgggttgcagctttaacgtgttcgcagccagttttttccaaaatggctgcaacccctctggcaccagaaaaagcgcaaaaaatcacctcggtcgctgaggatctcttcaaaatctccagcttcttcaccaatacattcgataatccctttgggatcgcctctaataaatttttgctcggatgagtaggcacccacctttgcaacactatctttcagcttcttggcacaatctaaggatttttcgtaatatctttcttttgattcccgaagatcctctatgttcttttgtaatcttgcgctagtccactcacttatctcctgctttgccttagccacttcgaaatcttcattcttctc

SEQ ID NO: 68017 - DNA, 276 bp, Zea mays
actcagcttaccctagtgataaataacgtagtcctgtatatatatgtatgcatgcatgtatgcattaaagtcggttacttattaaacaaatacgtattaaacaaatacgtgacgcacataaatcttttagtctttcagcggttttctaaacgtctctataaattttcatcggggctggaggccgtgcgacggcaacgtctggctaagacgcgtacacgggagctggtggtttgttctccttccctttcgttcgcttccctgctcggacagatcaaa

SEQ ID NO: 68018 - DNA, 428 bp, Zea mays
agcttgtgaaggttcttcatccctacatgagctaaacggcgatgccacagccagcccatgctagtcttagcaattaagcatgcatctagaccggcctcttcttttgcaaaatcaactaaataaagtttgtcgtctaatacacccttaaaagctaatgaaccatcacttcttctaaagacagacacatctacatttgtgaataaacagttatatcccatattacaaagttgactcacatacaacaagttatatccaagcgactcaactaggaacacattagaaatagagtgctcggatgaaatagcaatttttcctaaccctttcaccttgccttggttcccatcaccgaatatgattgaatcttggggatccttgttcttgacataggaagagaacatcctcttttcccccgtcatgtggtttgtgca

SEQ ID NO: 68019 - DNA, 272 bp, Zea mays
tgctcgacaaatgggatggtgagaggttttgggtgtactttgggtacggtattcctaggtacacgacaacatccaactcatcttttgtaaatcttctagttcattttagtccctacaacatattgtaaaaatgatccatctacctagcatcatatacatatgattcactagaagtataagtctctcttcccttatttttcttgtatttcaagtacttcttgtcggttctagaccaatgcctaaggttgtcacaatagaagcatttatctttg

SEQ ID NO: 68020 - DNA, 432 bp, Zea mays
  unsure (1)..(432): unsure at all n locations
agcttgacattgtctaccttttggaagccaatgccatccttaatgcgagggcgtctcccactatagagcatgcttctagcaaatttaaatntttcattntctaagtcatgctcattaatcttagcactaagttgagctatgtgatcattttgttgtttaattaaagctaggtgatcatgaatagcatcaacattaatatctctacatctagtacaaatagtaacatgctcaatggtagatgtagagggtttgcaaacatttaattcatcaatcttagcatgtaacatgacattttcatttctaagattggaaataacatcattgcaaacatttaattctttcgccttagcaattaattnttcattctcaattntaaggctagaaagagatgcattcaacttgtcaatcttagtaatcaaactagcattatca

SEQ ID NO: 68021 - DNA, 267 bp, Zea mays
tcggggcagcagcaaagctcttaccggccgccagcttctagggcagaggcgccaggggcttcggaggaagatttggggatcagccaaggagaatctactgtctattctatggtgaggacaagggccataccaccaggatgtgccatgttaccatctagaagcaaaaggagatagcagaagttgcagcgcaacagagtcagccgaagcaagtcatgcatactgcttcgtaccattcaccttatattccagaatatgtgggcaaccacc

SEQ ID NO: 68022 - DNA, 427 bp, Zea mays
  unsure (1)..(427): unsure at all n locations
agcttgctctatgttatttggtagaccatggtaatttgataaggacaccgtgcatcatggtaaaacaaatcactactcttttatgcataatgagaagaagcttgtattgcaccccatgtcccccgatgctattttgaaggatgaagttgctagagcttgcaaagagaaaaataaatctgttcataataaaaatctacgtgctgcaaaggagttggtacaacataagagtgacaattctaaatctactcaagtgaggaagacagaaatacaactgaaaagtgcttgttttcttgcttccaaatctgatttgcttgaattaaatgatngtgcttcaatctgctatgtatttattcgcaaggatgctttgtctcacttaacacataccatctactttgccttctactgtcactaatcttttgcaggaata

SEQ ID NO: 68023 - DNA, 265 bp, Zea mays
  unsure (1)..(265): unsure at all n locations
tttgccaccggaaccatttcttcgngnttcttttcaacatgcccaatccactactttaggtacaaaactcatgtttggggtggttttgcgcaatttcgttgtcacacgttaccctttctgaaaacgggtgtcggggtgcatacaaagcaccagtttttgccaccggaaccattttttcgtttttcgcaacaaacatgcccaatccactaatttaggtccaaaactcatgtttggggtggtttcgcgcaatttctttgccacacgt

SEQ ID NO: 68024 - DNA, 421 bp, Zea mays
  unsure (1)..(421): unsure at all n locations
gcttaaggcgatacagagcanagctgtgaagtactcgtgactgtcatatctatatagatcttgtgttggactataacgtccttgaggttaagtggttcggctctaattatctagaactaaattgaaaatatataatagctctataaataaggggatattgatcccaccgaccatatctctcaaacactttatttattntcatccttgctagatttttcctccctctagtctattgaaatccgcatatgatttagacactagtattcgttcatctatatatgcaatatgatctagtagatgggtaaatgcataaatcacatgcacctcccatccaactcaattagataattatacgaactaggtaaagctcaccgtatacctccttgtcccatgttttgactgaaacaattagtaanacata

SEQ ID NO: 68025 - DNA, 268 bp, Zea mays
ctatttttgcgacggaaaaactgcaccttataaaccgtttttttctaaaccttttgggtaaattgtatgaccttttgctaatgtttggtaactatggtggtaactactctacagataatgggccatcccatgagtcactgtttgctgctccaaatcttctgctggagaacataatattgttgttcaaggagaagtttgagctctgcgtggacaaactaaattttgaattgcttttgccaaatttctacatggttcgcacactgtcaaa

SEQ ID NO: 68026 - DNA, 446 bp, Zea mays
gcttgccttcgcctcggtataccacccacaatccaacggtgtcgtcgagcgcgccaatgacaagattttcactgccatcaagaaaagacttctcgatgacaagaagggtaaatgggccgaccaactacctgaagtagtttgggccctaaacatgaccgaatgtcgggcaaccggattcacaccttttcgtctattatatggatcagaggccatgacaccgcaggagataaagcatgggtcaccccaaacaagcacatcagcagtccccaacgtcgacgaaccaacgtctaaagacctcatcgacggagaccgcgtcctcaccctgcaggccctcaacaaattgaaagggaaatgtgcccttaggccatttctaagtattttggtgattgagtgccaacacaagtggatttatgcaaagtgatggacaaagtgcaaatcaagtaaaa

SEQ ID NO: 68027 - DNA, 255 bp, Zea mays
  unsure (1)..(255): unsure at all n locations
ctcataatgccgcgggccacttttttttctaaccnagncgnncttgctagcctctgcttgaaactcgaaggcgagattcctgttaagggggttagatctgtaacaccctgaatttaggggtataaaatctcttttctaatatcccccaaactcacgctggtactctctcattcctctgatttccttatactttcccaaaaatggagaattatttctgttttataccggcataatcctcggaaaataaaaccctaa

SEQ ID NO: 68028 - DNA, 450 bp, Zea mays
  unsure (1)..(450): unsure at all n locations
agcttgacccttgcactcaaacgaagcatcatctctgattctgcttcgtcgcanaaagagcttcggaaaaaaggtcattagtttcaaataacttctagaaattcataatcaaatggccagagtgcgctccactgccaggttgatcgtgagggagatgagaccgaagccactgaaactgtcccaatttccgaagcaatgaggcggtctgggctggcaacatcagaggatacatctgccgccgaagtaaaacaagctgatgttgaagaagatgaatttgaagatgagtacggtgcaacgccatctaaacccaaccacttagagtttgggaagtctactattaccgaaggtgatatggctaagctactgaagctaggctattntagtgaagacaaaaggggcctgatccgcttcgggagagatgaaagtaccccgaagccagaaaaagatgag

SEQ ID NO: 68029 - DNA, 273 bp, Zea mays
tgtaatatgattgtgaaccccacgttctcttgagaacatcttttgtggttcgccaacttttggaacatcgtgagtctgtgaagaaggttaattatatcatgacaataacgaagctattacaaaaaattgaaaacaacaaaagaactaggcttttgaatgattatttcttattaaaaaaaatgatgacgaatgcaaaaactattttaaaggtaggatatctcttagtagatgtgcttcaattctggcacagtactattgactgtgcgagcttcg

SEQ ID NO: 68030 - DNA, 420 bp, Zea mays
  unsure (1)..(420): unsure at all n locations
agcttctcctgaacaagtgctgcacttaccgctgagtgcgatactgccacatataataacaaaggagcccctggcgtaggtggagttaatgttgttagatctatcaaatactgtttcagctcttcaaaggccttctgctggattggtccccattgaaagacttcggctgacttcagcacttcgaagaatggtaagtttctctttgctgatctggatatgaatctattgagagatgccagccttcctgtcaatctttgagccctcttttttgtacttggtagctccattcgaagtatagcttcgattttacttgggttggcctcaattcccttntgtgaaactangcaaccaagaaatttccccttctttactccgaagacacatttttccggattcaactttagaccagcctgtctaaaa

SEQ ID NO: 68031 - DNA, 272 bp, Zea mays
tgagagctgagagtctaagtcccagttcagtctgtgtgttctcttgtgaagttgcatgcctccccttttataactaaaggggcacgtacaaaggtactgagccccgacatgtgggcccaggaacataacggatgtagtgcttggagctactaatgttcgctgctggagcaatcttcttgcgtcctgacatctgagatctgcgtaatatcggcgtgcaggggaagcttctcgtataagtgatgatggacacagtgcaccccgcagcacgggcg

SEQ ID NO: 68032 - DNA, 439 bp, Zea mays
  unsure (1)..(439): unsure at all n locations
agcttgtcaagcatattttggtacccatcgcttgatgggttcatcaaggttagtcaacaaagatctaggaacccaaaagtcctttgtgttagcacttggtaaactcattacctttctagcacaagttgcaattttgggttgcctagttacatgagaaataattgacaagctagaggtggggttgttaccaatgggacaatccttgcactgatgtcccttgtttcggcatatgtagcaaaggcgatcttcaagtcttgaagatttcttctttccttgtttcttgcttgctacatggttagtgaatattttcttttctaacataatgcctttttgttttaaatggcgacaatacctaattaagtgtccctgctttgagcatttaaaacaatgtttatcatccttgttaataatcaaatcattntttatataaggacatgac

SEQ ID NO: 68033 - DNA, 274 bp, Zea mays
tctaaagggagagcacattttgggactaacaaatgtgcatttttgtgaaagaaaggatttgtagcgcatgccaagcagggaagcaagttggtgttcatcaaccacataagaacatcttgacgactgacaggccactcgaactcctccacatggacctatttggcccgatcgcttacataagcatcgacaggagtaagtactgtctagttattgtggatgattattctcgcttcacttgggtatttttttacaggaaaaatctcaaacccaagag

SEQ ID NO: 68034 - DNA, 439 bp, Zea mays
  unsure (1)..(439): unsure at all n locations
agcttgtggaccaggtggttttggctatgttctcctatcctccccgttgtcgtagcgtcccccacgcctgtggtggtaacctcggcgcaccttctcgttgaggtgggatcgacggccgcggcggtggtgctcgttgccgaggcgacccggggccgcaggtgccgtgtcccgcgtgcgcccggtgtggaccgaggcttcccgcatgaatcgggaagtcacggcgcgatgctccggggagtacccctgccttcgggaggcaaagctttcggcccgtcggaccgcgacatcctccaggagattcttgagctcttcctggatacgccgcccctcggtggtggatggttccggcatcgctcggagtagtattgctgctgctgccaggttctggccgaccccactggaagccggnggcagccttgccctggcattgtcggtgatg

SEQ ID NO: 68035 - DNA, 265 bp, Zea mays
tcactcccccagtggtgttatcctggggatgtttttttgtttggctttgcctttcttgtcatacaaagcctttccaaggcgagccacttcttgctttaattgttcattttcctttgcaacctcatcagaacatttctctacaacaatattctcaacaatgacttggttgcaggagttagaatcatcaattaaatcaaagcaggaagtagaagcatctttcttaattatttcaggtatttcaactaaagatgctgctggggtgcta

SEQ ID NO: 68036 - DNA, 437 bp, Zea mays
  unsure (1)..(437): unsure at all n locations
agcttggaggtgaatcagaaagtttctgaccctcagaagctttaattgatccaccaagcttttgttgctcctcaatgatcatctgcaagtatattccttgtgctttaattgttagttgcagttgtctttgaacctgaaaacataacttatttagacaagcaaaagaaagttggcaaggaaaatttagattgatcttgaagctaaaaaggactcataaactacaagcaataagacaaaacaggagaactgccaacaatagattattgacaactaagcattactacaaccatgagaagaaaccactgttaggtgtaacgtgacagttaataagtgaatattgagaatgggccanaatatcagcttgtagaagtagccccaactaagtaggacttctggtcatagtaggattgtcggtaactaaaatgatgtaaaaacag

SEQ ID NO: 68037 - DNA, 268 bp, Zea mays
  unsure (1)..(268): unsure at all n locations
tcgcatctctgaactaactcggctgcatcgntttttttttttgccaatagaatcctgacctgaaaaccttcccgactagtgttctggatgctgcatgtactccacattgccctgcatggacttcctccagaagttgcttcccggtggacgggagaacgcacttcatgaggacgcctgacgcgccccttctatacaataactccccaatgagcgtatagtgagctgattgcctagcaatgcgctctgccgagttcttgtcatctggttc

SEQ ID NO: 68038 - DNA, 439 bp, Zea mays
  unsure (1)..(439): unsure at all n locations
agctntttatgaaatttaatattattactttacacatctatttactctntgtcgacacgggtgcagaanagactgcatacatactaatctaaccggccggctcgtctatttatatagatggaaagattgaagataaatttaatatagtaaatacaatggatatgaacttaataagatcctctaatataaatacaaaccttgatctcttaacgaagacaatggtcgcagcatagttatgtgcataataatatatagcccttactaacgtcacggtctcggaatgaaattgaagggatcaactacaggaggagggtcgcggtatagggaatgctgggggcancatggtcgtgagggaaggagatgagagatggtctaaatattatcgtttattgggtntgagtgggtaatggagatgatgatccgatcgttgatttgatgg

SEQ ID NO: 68039 - DNA, 271 bp, Zea mays
taaaggatactattcaactaaagtaagatggagtttattatagaccaaggtatgaaaacttcctctccttcagttgttttaatattctatccttagtgggatgcaccatagtataggttaaattccttgcaatataaaatgttcaatagtgcatataactttgacatcaactatatgtgtgcactaatttaaatgaatttagtctatccttttgggtttcaataatgatgattcattttccatccacatataaggatcatcatttgtgaaa

SEQ ID NO: 68040 - DNA, 438 bp, Zea mays
agcttagaaaaatccggaatgaatcggcggttgttactagccagtccaaggaaacttcggacttgatgtacagtggttgggtgtttccactccaaaatatccttgactttgctgggatccaccgcaatccccttggtagataatacatgtcccagaaattgaatctcctccagccagaatgcgcacttactgaacttagcatataattggtgttcccttaagcgcgttaatacgatccgcaattgctgagcatgctcctcttcattcttggagtatattaagatatcgtcaatgaataccaccacaaacttgtccaactcgggcataaataccgagttcatcagatatgtgaagtgggcagaagcatttgtcagtccgaaagacataaccagatattcaaataatccataccgcgtggtgaatgcggtcttcggtata

SEQ ID NO: 68041 - DNA, 271 bp, Zea mays
tgtcaagccctcggacccggccagacttcaccggaggtttcgagatcgacctcaccggacttcggtcttccgccgccgcgcgtggaccgagctatccagtgagtctccgcccaattccttgcgctcatatcttctctggcatcccgtgaacctccctgacccatccaattgaactatctcgccgtgatcaggccggactcctcgccgccgacgagcatccccgcctgcgcgcgtgaaccgaccgactccggccatctccgacggtgtcccg

SEQ ID NO: 68042 - DNA, 421 bp, Zea mays
  unsure (1)..(421): unsure at all n locations
agctntgtatggacgacggtgttgtactctgttaaactggtctgaaccaggtgaaagatgtttcttcaggcctgatatggtaaaggaaatagaagaaaaagttcaacgaataatacataatttgaaagaagcccaagctcgtcaaaagagttatgcagacaaacgacgcaaacccttgtactttcaagttgaagattatgtctacctgaaagtctcaccaatgaagggtgtatcacgtttcggggtaaaagggaagcttgcaccccggtacattggtccttttcctatctttgaaagatatggatcagtagcataacggctccaattacccgaaacattgtctgctatgcatagtgtgttccacgtatctcaattgaagaagtgtcttcgggttccagatcgaaccgttgaagtgatggat

SEQ ID NO: 68043 - DNA, 288 bp, Zea mays
  unsure (1)..(288): unsure at all n locations
tatattaaactcaagctcatcatgtttttcttgcaaagctagattttcaatatttatcttttctaccgngttcttgagcatagcatttttattttctaattgagcaatatatgatgaatgattaatagctttaatttgctcaattgaaatgtcttcatacctttggaccaaatcatcatgagagcactttagcttctcattctctttggtcaacttctccaagtctttgattttttcgatgaggatatattcttgcttatgaagcatttccttttgttcttccgctct

SEQ ID NO: 68044 - DNA, 423 bp, Zea mays
  unsure (1)..(423): unsure at all n locations
agcttaaagccatggtaagtagcataggccaataatatgcgaattgactcaagcctagctacgggtgcataggtttcaccgaaatccaaaccttcgacttgggagtatcctttggccacaagtcgagctttgttccttgtcaccacaccatggtcatcttgcttgttgcggaaaacccatttggtccctacaacattttggttaggacgtggaactaaatgccatacctcatttctagtgaagttgttgagctcctcttgcatcgccaccacccaatccgaatcttggagtgcttcctctaccctgtgtggctcaatagaggaaaccaaagagtaatgctcacaaaaatgtgcaacacaagatctagtagttacccncttatgaatgtcgccgaggatggtgtcgacggggtgaatctcgtgg

SEQ ID NO: 68045 - DNA, 268 bp, Zea mays
taaagatattattcaactaaagtaagataaagttgtttttaggccaaggtatgaaaacttcctctccttcagttgttttagtattctatccttagtgggatgtaccatagtataggttaaattcctcgcaatataaaatgttcaatagtgcatataactttgacatcaactatatgtgtgcactaattttagggaatttagtctatccttttgggtttcaataatgatgattcatttgtcatccacatataaggatcatcatttgtga

SEQ ID NO: 68046 - DNA, 429 bp, Zea mays
  unsure (1)..(429): unsure at all n locations
agcttcgacacaaccaacttattttgttntgcagacttcgcttgcggctactcgttttgctgctgttgaaaagaagcccttccatttcttacattgctggtccatattgaaggatcaacctaaatggatggaccagcacatgagcactcaaaatcctccacccaacccaattgctacccaatcaaatactattgactgtgacgctgctgaagaatcagctccttcaagctttacttccaaaaggccgcttggtcgtgattcagcaaaggaaaaggcaaagaagcaaagatcagaaaacacatcatccactgattcggagtgaaagtcgcctagagggggggtggataggcgaaacctgaanattaaaactttatcccccaactagactctttgattagtggttagaacaagatgaacaattatcggagt

SEQ ID NO: 68047 - DNA, 270 bp, Zea mays
tcggcagaaagaagaagtagttctttatgttttgctatgtgaagaaaagctttggcaaaaagaggaagcgaccgtttaggcttcgttgtgaacgaaaagaagggaaggtgttttttcgccttcggctcaaaatactgatttcgtccacatcaaagcgactcaatcgaagggtaaggatatattacaaggtatgtacaaagttccttgagaacagttcaattgtatttacaaaacttgttacaaaagtatcctgagttttttcctatagta

SEQ ID NO: 68048 - DNA, 436 bp, Zea mays
  unsure (1)..(436): unsure at all n locations
tgctactgggttgaggtcctacacactatcgcctacctnctcaattggcttccatccatggcaggtcaccaccccacaccctccgcctttttcggcacaagcacaaccccctcctactcgcacctttgcgttttcgggtgtgcctactattccaacatctccaccaccgctcctcataagcttgtcccatgtgctgccttttcctcgggtactcccataagttgtacatgtgccttgatctcaccactcaccgtgtgatcgtatcccaccatgtggtgtttgacaaggtcgtcttccctcttgtcggctcgtcatcccctagacctcgacaccctcctggatgtcgacccgatggacgtcccttgtcttcctttacctgccaatctgtctgctgctcaccaaccgcagtcccgccaacaccatccatgccacgtgg

SEQ ID NO: 68049 - DNA, 216 bp, Zea mays
accgaaaggaccaatcaaatttcttgaagaaatgttgagaacctgtgcgttgccaagaacagtccggatgggacaagagattgccttatgcagagattttctattacaatagctaccaagccagtttgaagatgtcaccatttcaggcgctctatggaaggagttgcaaaactccgctgcaatgggatcagcctggagagaaacaagtgtttgggc

SEQ ID NO: 68050 - DNA, 463 bp, Zea mays
  unsure (1)..(463): unsure at all n locations
agcgacgcggctgcagcttgtggttttgttattggtagctccaagttgtgatgtatattgttgcttcttgtaagacgtattgtgatctatgaattgaaacttgtgtctgtcataattttggttattggatatgtcaattttgtgaaatatgtcatgtaagcatttgtacgattgaatgagattgctcaaaaaatgggctataaattttgacaatataaaatggtattcatagaaacttacaaatttaatttaataaggctgcaaatttagccgcactagcacgtgccattttataaattatgacaacaaagttcgtcattgaaaagtgccatgtcatattgataaacgtcataactatttaccacatcagctccatatcanccagtgatatgattntatgacaaaatctggtcaacatggtaagacccaagctaattattagtgacatttttcttaagagtat

SEQ ID NO: 68051 - DNA, 274 bp, Zea mays
tattcaaaggtttagatagaactaaaattgacaagatcaatgaattaattgatgctttgaatgagaagaatagattgttagagaagcaagaggatcttttatatgaagagcatgataaatttgttagtgcgcaaaattctcttgctttaaaagttaaaagaaatgaaatgctttcatgtgaattatctacatgccatgaatctatttctagcttaaagagtattaatgatgatttaaatactaagttagaaatagctaataaatcaagctcttg

SEQ ID NO: 68052 - DNA, 442 bp, Zea mays
  unsure (1)..(442): unsure at all n locations
agcttgtgaaggttcttcatccncacatgtgctaagcggcgatgccacagccagcccatgctagtcttagctattaagcatgcatctagaccggcctcttcttttgcaaaatcaactaaataaagtttgtcgtctaatacacccttaaaagctagtgaaccatcacttcttctaaaaacggacacatctacatttgtaaatagacagttgtatcccatatgacataattgactaacagatagcaaattatatccaagactctctactaaaaatacattagagatagaatgctcattagaaattggcaatttacctaacccttttaccttgccttgattcccatcaccgaatataattgaatcttgggaatccttattcttgacgtaggaagtgaacatcttcttctccccatcatgtggtttgtgcatccgctatcaataat

SEQ ID NO: 68053 - DNA, 274 bp, Zea mays
tggaaaaatctagaataaattggcggtaataaccagctttttcaatgaaacttcggacttgatgtacagtggttggtggtttccactctaaaatatccttgactttgctgggatcaaccgcaatccccatggcagacaatacgtgtcccaaaaattagatctcctccagccaaaatgcgcatttactgaatttagcatataactgatgcccccttaagcgcgttaatacgatccgcaaatgccgagcatgctcctcttcattcttggaatatat

SEQ ID NO: 68054 - DNA, 430 bp, Zea mays
  unsure (1)..(430): unsure at all n locations
agcttattagggttttatgcctgtgacatccatggaaagaatggcgacgatccgatccgactgatgaggtatgatgtcagtcttctgatgctaactaaatgggtgcccgtgcgttgcaacgagagtatataatatcacgataaatgtgtgttatattgctagaaaaaaatattttgtaatttatttgtaatcctagccatacataaattttgtgatagttaggtgcatgagccgtgtaacgacatataaaatatacgacaaaatgttagtgcacaatgattacataagaacgaacatcatatttattatcgaccttaatatcgcacaaattcttttataacaatcatctagtatactctacgcttcaggccacacgcacgaactgttgtctactatnctgcaaccaacacaagcctagtgcaataatctc

SEQ ID NO: 68055 - DNA, 272 bp, Zea mays
tctaaagggagaacatattttaggattaacaaatgttcattttgagaaagacaggatttgtagcgcatgccaagcagggaagcaagttggctctcatcatccgcataagaacataatgacgaccgacaggctactagagctcctgcacatggatctattcggcccgatcgcttacataagcatcggcgggagtaagtactgtcttgttattgtggatgattattctcgcttcacttgggtattctttctacaggaaaaatctcaaacccaag

SEQ ID NO: 68056 - DNA, 429 bp, Zea mays
agcttaatgcccacaagaaactgtataattttgttagggttatgctcccatggttcacgataacgaaggttacattttatatcctgttgggtatcccaaacataaaattaggagaattcattctataaagtctcattctggctctcatcatgcttttatgtataagaatgagacatctaattctaggcattcttcccttgtaaaatgtctaaaaagaaaactcctactgcatcaaatgaacccattgtttcattcaagacttttgatgcttcatatcgtttaactaacaaatcaagccaagtagctgtcaaatatgttgggtccaaacacaatggctcaaagactagtgtttgggtacccaaggtgcttgtatctaatgtgaaaggaccttatactgtttgggtacctaagaacaaagcctaaacttgt

SEQ ID NO: 68057 - DNA, 275 bp, Zea mays
ctaaagggagaacacgtgataagtataactaatgtacttttctaaaaagaaaaaccgtgtgcagcttgtcaagcaaggaaacaggtgggaggctctcatcacaccaaaaatgtgatgacaacatcaagacctttggagatgcttcatatggacctcttcggacccggcgactatctaagtatatgaggaagtaagtatggccttgttatagctgatgatttttcccgcttcacttgggtattcttcttgcaggataaatctaaaacccacgggac

SEQ ID NO: 68058 - DNA, 435 bp, Zea mays
  unsure (1)..(435): unsure at all n locations
agcttcggcttcgctgctgatccattcaattttgccctcaggatcgcctcttatgatgttgtcctcgcttgaatatgcgccaacgttggtgaagctagtttttattttcttcacgcagtccatagatttttcaaagcatctttccttagatatgtgaagttcttcaacgttcttatctaaatgatttgtccattgttcgctaatccctcgtttagcttctgcaactgcgcacttctctttagattcggccagttgcttccgaaggtcttcaatctcaattttttgggcttcagattgggttntaaagttagcatcatccttctttactttatccaccaatgtaagcagaattttatctttttccaaagncttgttcctcagcttaataacctctgttcgaaggttggtgaaagcaatagtgtagctctcgtcttc

SEQ ID NO: 68059 - DNA, 269 bp, Zea mays
ttttgggacttaaaaatggattcactatgaaaatttttgttcttggaaaatgcaagggggactgcacttaaggggagtattcaaaactcaatttgctcaggaaccccttaggcaaaacccaaggggcaatctcacccatttgactattttctctaaaaactatctagcctatggaaaaatattttgaaaaaatgagaaaatatgtgaggggaccaatacctgtcccaacaagggttcttttgggtgcttataaattgggatttggtttg

SEQ ID NO: 68060 - DNA, 443 bp, Zea mays
  unsure (1)..(443): unsure at all n locations
agctntatcaaatggacgtgaagagtgcctttctcaacggaccaatcaaggaagaggtctatgttgagcaacctcccggctctgaagatagtgggtaccctaaccgtgtttataaactctctaaggtgctttatgggctcaagcaagccccaagagcatggtatgaatgccttatagatttccttatagataatggcttccaagtcggaacggccgatcctactttattcactaaaactcttgaaaatgacttgtttgtatgccaaatttatgttgatgatattatatttggatctactaacgagtctacatgtgaagaatttagtaggatcatgacacaaaaattcgagatgtctatgatgggggagttgaagtatttcttatgatttcaagtaaagcaactccaagagggcaccttcattagccaaacanagtatactcaa

SEQ ID NO: 68061 - DNA, 270 bp, Zea mays
ttgacaattttacaaattggctagaagtggtgcttatcataaagattagaaagcactctgctatcaaatttctttaaggcattatatcccacattgaggtatcaaacagggtgacttctgatataatacccaattcactagtgctctatttgatgagtactttgaagacatggcatcgagctttgttttatctcacttcattagtacatcatcattgaagcaatgggtaggccaagtgagaatgctgaaagcatctaaggccttgagact

SEQ ID NO: 68062 - DNA, 438 bp, Zea mays
  unsure (1)..(438): unsure at all n locations
agcttttccaaagtttgtggtggcttcctggcgaaatactgtgtcgntggtcctggtcggatccatttgatcataacttcgataacaatctcattcggcaccattggcgcctgggcccttagacgcaaaaaccttcggacatacgcttgcaagtattcctcatggtcctgcgtgcactggaacagagcttgggcagttactggcttcgtctggaagccctgaaaactagttacaagcatgtctcttagtccaactcctcctgtggtgttgggctggtggccttccttttctgggttcggccttctctcagagagagcccctcttggttgatgcccagcagctaagggcagcccctggcgctattgccttcttcggtggcatgacgaaggtaaatgcttgagatgttgtcgaaagtgggtcgttgagttcactggaggg

SEQ ID NO: 68063 - DNA, 269 bp, Zea mays
tactagttcatggttgtacacaagtaagtctgctcactactctttctttctgggtatattaagttttcatcttggaagaggatttgaaaatattaggcccctctttggtgcaagttatttttattatggttggcaattaagaatagattttggacaactaactgcttgttaaagcatggactttcacatcctagtgtttgccctctttgggactaggataaagagttaattcagcacattctattgagatgtgtcttctctcaggagac

SEQ ID NO: 68064 - DNA, 420 bp, Zea mays
  unsure (1)..(420): unsure at all n locations
agctntctcaaagtccaacttgagaataatttcatctaattttttcctatgtagctcatgcaaagactcatgtaatacaattaccccttcaagaatattacgaccaggcataaacgcagtctgagagggtttaataattcgaccagaccaagttcatagtcctgcccccgcccgcatggctgcaagatccaggcagacatcccaccgcaaaatccagctccaaccttccatgcggccgcccgagctccactgctggcgctcacaagatcgagcgacatccgacattctaggttggagcatcgtagcctaggcctagctcttgtgtgttcgcctgcatcaagtaacgatagacagaatcctaattcccaaaagatgaggtcatcctaagatggtgagtgtgtttcttgctctagttntctt

SEQ ID NO: 68065 - DNA, 269 bp, Zea mays
tctaaagggagaacacgtgataggtttgactaatgtgcattttgaaaaagatagaccttgtgcagcttgtcaagcaggtaaacaagtaggaggagcgcatcacagcaagaatgtgatgaccacttcaagacccctggagctgctgcatatggacctcttcggacccgtcgcctatctgagcataggagggagtaagtatggtttagttattgttgatgacttttcccgcttcacttgggtgttctttttgcaggataaatctgaaaccc

SEQ ID NO: 68066 - DNA, 80 bp, Zea mays
gatttactaactttatttaggcgagcgctactgtccgctttctatagggaaactgtctgaatcttgattatgtaattgcc

SEQ ID NO: 68067 - DNA, 429 bp, Zea mays
agcttgccctcaacaaatgatatcactagatgtattttaaattaagccatgaaggataccacttgtagatcatgaaagataccatgagtaggagttcctcaaaagattatttctcctaaatgagtattctcctttggaaagagtttttctccccctttagagatgaagaaatactccccttgacagagatcctctacttaggaaaaagcatgtgaaaattagaggtgcaagacatgatttgaaaagactgacttcccttatgcataggtaacagaatatgagttaactacttatgcatttttagcaacatggaagcatatgatatgaaatatagtctaatcaaatattggagaagacatgtaaatggtactgaatgtagtctcaaaagataccaattgaagaccaattgtaggtcaatggcgagcttga

SEQ ID NO: 68068 - DNA, 267 bp, Zea mays
tctcctggacaagtgctgcactcaccgctgagtgcgaatctgccacatataataacaaaggagcccctggcgttggtggagtcaatgttgttaaatctatcagatattgcttcaactcctcgaaggctttttgttggcttggtccccattgaaagacttcggctgatttcagcacttcgaagaatggtagattcctttctgctgatctggatataaatctattaagagatgccaacctccctgttaatctttgggcccccttttttg

SEQ ID NO: 68069 - DNA, 458 bp, Zea mays
  unsure (1)..(458): unsure at all n locations
catgccagctntggacaaaatcctataccaatgcttatgatgatcagatatcttcttttttatcaggctaatcaatgtcctattactagactcggcctgtccattggcctaagcataatacggagatgaattgagtaatttaattctatataattcagcaaactcacgtacctcctttgacataaaagaagccccctggtctgtagtcaaagtctggggaataccgaacctatgaataatatgttcagttacgaactcaattacctccctatgtgtcatgttctttagagcaacgacctcagtccatntggtaaagtagtcagtggcaactatcacgaatcgatgcccttttaatgaagaaggatgaatttctccaataaagtccaatccccatcctttgaaaggccaaggtttaatgataggatgtaattcggctgcggggaccaactgtatgtcat

SEQ ID NO: 68070 - DNA, 271 bp, Zea mays
  unsure (1)..(271): unsure at all n locations
tgctctgtttgattctacttgcaacgcggccacacggtccctacaatagcaacgtcacatggtggttgccattgtcacgtcgagctctccctctccaccaactaacagttcctgacggtggagcagaaattcattaagagcatatagggattcacaagtggtacatgtattttgnctttctttctttcttagtattatataaactacatactgtatttggacatgcattgtttattctctgcaatcggttaaccctggactgcttgcaact

SEQ ID NO: 68071 - DNA, 444 bp, Zea mays
  unsure (1)..(444): unsure at all n locations
acatacgacgaacgangaggaagctaatgttagcnttgaaagaacacacannaannnataaaaggtgtgtggtttctccttgcctgggagagttatggttgtttgtatgttgtcggacaatgaatangggcagaggaagcctttgtaatctttctataggtggaatgtgcagcttatgcgaagaaaanaataatccgggaggggcangnnaananannnnaannactataaagactgattacgtcactggccatgtttgcgtcactggccatgtttgattacgtaaactaccacccaccactactaagcaattccccttcgtttgaacccctatgtagccctctcaacccctgttttttttaaacaagtaattaatgtggacaattttcttgcttaatacacctcctacttatgggtgtttgttcgagaatataatatgtctaa

SEQ ID NO: 68072 - DNA, 290 bp, Zea mays
gaccttaatatactaacttggggtgcttgagcagattaactcaatgcttatctcatgctatcaatcttacattgtctatcctttaagattgacccaaagatgaattgagttgttatatcactaacttcatattcacctctagcaagaacttgtgttgtagggaaaaaagattaacctttgtgggaatcaagcaaaaggcctacaactaagtgatatccaaaagatggtaacaattaaatcttaagtacacattgtttttaattagtatattcctttgtgtcttttgtagc

SEQ ID NO: 68073 - DNA, 433 bp, Zea mays
agcttaggcaacagcctctcaactgaagtaccatttccattctcatgttgagccatggccctggcctcatgctgtttgtcattttccactgcaggtggcctgctgcttggtgacatggcagacttaccacgctcactttcaatggaagcatctgcacaacttaatgagatcagtaattgccatttggcccttgctagggacaatatttatatgaaaattccagtactgccatgaaaagatttaccttcatatttgttcgaatcagtaacattctttgcagtatattgccggccagtttctctccgtgaagaccactgctcaattggacgaattaccaggttccttgggttctctctagggatgaaaaaagcatctgcctttggtgtgctggagattttcatcatcagcaagaatggacctattgaataacaaa

SEQ ID NO: 68074 - DNA, 274 bp, Zea mays
tcttgcatcaggcttcagaccttggcttctcacggcccacacgaatatatttagccttataattgcctcgggagtaagttgatgaagatagacttcgaagattttcagtacctccacgacgaagctactcaagggaaatcgtagcccagctttcagaaagcttcggtatactacgacttcattttcttcagggtgtggacaagtcttctctccttcatcggccctcacaatggacaaatcccgaaaataccttcctctcatgttgacaagatga

SEQ ID NO: 68075 - DNA, 438 bp, Zea mays
  unsure (1)..(438): unsure at all n locations
agctttagatgagcacagatagtgatgtcacacttgttgtgttcttgaatgggctccttcccattntttgagtgctactttgatgtcccttctgcagaaccgacaaccttattgccttcttcacctgaatcactgctaaaacttttattctctaaagtagcacccataatggtgctaaaacccaccatcacaacttcaccagcagagaccttactcaatgggaaaaaggtggtaaacctagatcaccttcaatcaaaagaactttcgtagtaagctcagtctcttatcacgatctgatgaccttatttgtacggctagatctgcatgattaactaaagatgagtctagttggagaagtactaaaataaatctattaatatatttcatcgcggggaacttaatacaaagtcagcatcacaacattgatacatagccttc

SEQ ID NO: 68076 - DNA, 277 bp, Zea mays
tatgtcgagtgcatgagctgcattaccagcacgaaggcttattattagacgagttgcatgaaaactttggctgttataacttcgcatatcgcaaggatatgaaagccccggtgctttgctatcgcaccaagtggccaaccggttggaaaagtgagtcgttctatgtcaaggccgatgagaagaagagggagaagttgaagacactaatgatgagcccgctgagtttaagcttcgggttgactaggcccctgtgccgcatgacgtcggggtcaccatg

SEQ ID NO: 68077 - DNA, 418 bp, Zea mays
  unsure (1)..(418): unsure at all n locations
agcttactaattgctgttgccctgaggcattcgtgatctgagtatggagctgtgctaatgctggaatggtgcttgatgttactgggtttgcttgcagtagttctagttctagtacaagtttacatttttttttgttactccaagttcactatcttcatataagcgttgacccctggccttttgtttgctggtgggtgtatacgctcaatcttggctttgaaaccagtcggacactgttactttagctgatttgtggttgtcgtaatttttctgtgaggctgtttcattttagatttgcaataaacctgcccaagtctgtttgaggcgattgctctccaatctagctaatttacttaagcttagttaacacaaattaaatttgnngttttagttcctatttgctatatgttatttttat

SEQ ID NO: 68078 - DNA, 273 bp, Zea mays
ccttgaaggccaagtcaaaaagcaagccccaatatacttcgtatcagaagttcttagtctatcaaagaaaaaatatacggaattggagaaggtactgtatgctgttttgatggcctccaggaagcttcggcattattttcaagcttacaatataattgttccttcttcacaaccattgaaggacatcatgagaaaccgagaagctactggaaggattggaaaatgggctgcagagctcaatgaattttgtattgattatgtgcataggtcttc

SEQ ID NO: 68079 - DNA, 443 bp, Zea mays
  unsure (1)..(443): unsure at all n locations
agcttggctaaaacaatntaaataaaaccctaaacaagcctctcaagtgggaattcattaggaaattctgaaattcagaattctgaaantcagaccttgagccaaagatcaagcgtgttcaccttgatccctaactcaaatcctaatggccccattgacaaaaacgtgcataactaacctctctgtcttgtgccagaagatggcattgggaagcgtgccttggacacgtcaaaccaaagatcttctccctatgtgcggcagtgagacaaaccagatttctcccctctctatctcttaatccagtcagcaaaacctgctagcctccacacacaaacgacaaaggaacctgagaggaagagatctctcaacgggatcatggccataatatcaaagatttgggggccaatccgcgcttgaacttgacctctctctgcgctgcctcg

SEQ ID NO: 68080 - DNA, 258 bp, Zea mays
cacattttaagaataacaaatgtttattttgagaaagacaggaattgtagcacatgccaaacaaggaaacaagttggtgcccatcatccacataagaacatcatgacgaccgacaggccactggagctcctacacatggatctattcggcctgattgcttacataagccgggggctcaagctggattatcgacagcggatgcacaaaccacatgacgggggagaagaagatgttcacttcctacatcaagaacaaaga

SEQ ID NO: 68081 - DNA, 443 bp, Zea mays
  unsure (1)..(443): unsure at all n locations
agcttctaaagggagaacacattntgggactaacaaatgttcattttgagaaagacaggatttttagcgcatgtcaggcagggaagcaagttggtattcatcatccacacaagaacatcatgacgactgacaggccacttgagctcctacacatggacctattcggtccgatagcttacataagtatcggcgggagtaagtactgtctagttattgtggatgactattctcgcttcactggggtgttctttttgcaggaaaaatctcatactcaagaaaccttaaagggattcttgagacgagctcaaaatgagttcgacttaaggatcaagaagataagaagcgataacgggacggagttcaagaactcacaaattgaaggcttccttgaggaggaggggatcaagcatgagttctctctctcctacacgccacaacaaaat

SEQ ID NO: 68082 - DNA, 271 bp, Zea mays
taagcacgtcatcatttctaaacatgtagataagaagttaaagttgtatttgattcgttacatgcacatgctttatgtttttgttatttatgtaaagtgctaataaaaatatagaataacaattagtgtttttatatcaatatattttatcatagtgcttctgcatctcaatatgtcttatcattatattttatcaaagtgctaataaaaatatagaataacaatccgtggattctgatacttctgaatggagatgtgtgttgtgtaatgg

SEQ ID NO: 68083 - DNA, 421 bp, Zea mays
  unsure (1)..(421): unsure at all n locations
agcttaatatgataaatagagtccttgggttatagtttgacatgttntggacattgtttgatcccaaaaccccaaaaccctagtttcttagaataaaattgcctaaccctactagggtgttaacctagaagaccctagtaacgtaggtgtaccatgaaggaaagttgtattcaagatacaacttaatgtatcactagtataactgcatattcataacatcacatgagcattcatgtttatatatggttatgtatagaaaacgaagaagaagtaagtgtcgaagaaggagagactgcaccaccaactgagatcccacctacaggaatagtttttattttgatatctgtggaacagatcccgaattccctacaacacaaggcangccccagngcatttaccttttccttgtgattttaaactc

SEQ ID NO: 68084 - DNA, 287 bp, Zea mays
actataaaatacccaagctttgttgagatcagtaaaatcaatgcacattctccatttaccattggccttcttcaccataactgtattggctaaccattctgggtattttacttctctgatgactccaacactaaaaagtcttttcacttcattccgagcacctttggctttgtcgttagacattttccgaagcctttgctttctgggtctgaaggatggatcgacattgagcgaatgttcaatgacatccctgttgacaccacagagatcgttggctgaccatgcga

SEQ ID NO: 68085 - DNA, 422 bp, Zea mays
  unsure (1)..(422): unsure at all n locations
agcttagttggtggaaaattctntactgacatctgggaaaatggcggtcgaggtatggcccacgaaataataaaaagagcgaanaagatactcacgatgaaagggaagcaacgaaggcagctgaaaaggctgcggaactcgaaaagcggataggtattgcttaatagcttttaactttattttttatttttgtgacttctaatcttatttacgttttctactgcagccgaactatctcctcccctagagcctttcgagtcattgatcaagccagaggcaaaggaaccggcagaaatcattaatatggctgaaagcattttggacgaagtcgttactcaactactgaccgaagctgcagacgaagttttgaaggaagaataatagatattgtaaaaacattggtagaataccaatgtaacatt

SEQ ID NO: 68086 - DNA, 270 bp, Zea mays
tgtggcgccctcgggcgtcatgtcgcagccgtaataccaagtctcccacttggaagcctcggggccgaacccttcgggcatggtagcgtcgtagagactgctgataccacaccgagtgtagtaaggccacgtcccgagcctcttctagctggtccaaggaatcttctcagctggtctggttgcttcggtcgtcgtacgccttcgtccttagggaaccatattccaagtccggggtaagatagcctcggccccatagactaggaaaaatgg

SEQ ID NO: 68087 - DNA, 436 bp, Zea mays
  unsure (1)..(436): unsure at all n locations
agcttgtccgagctattttcttgagcagcttactgagcaaacccctgagccttcttatgtttctgcataacctagtcctcttcttgagctctaaaagaggaagagggtggtctgagtcgatgaatgaatgatgatgtgcctccttcctcagctctaagcatgcatcgttccaagtgctcataatctaattctacattgngacacctnccaatacttaagggtattaattggatctagtgatgactaagacaatgaataacaatccttcaatttggtccactaccaagcccatggcttgtgatgactcaacctctagattcgattccttgatggactcgatcatcctccgcagcaccgaaaagaatgtccttcaagagatctacaaggtattnttcttaattatcctatctttcattcataagaagaagtctgagtg

SEQ ID NO: 68088 - DNA, 228 bp, Zea mays
ttttgagaaagacagaccttgtgcagcgtgccaagcagggaaacaggtgggaagcaatcatcatagcaaaaatgtgatgacgacgtcaagaccactggaacttcttcatatggatctcttcggtcccgttgcctatctcagcattgggggaagtaagtatggtcttgtaatagttgatgatttttcctgcttcacttgggtattctttctgcaggacaaatcagaaac

SEQ ID NO: 68089 - DNA, 427 bp, Zea mays
  unsure (1)..(427): unsure at all n locations
agcttgtggaggaccagatcatcgaagcgtatatgtntctggatgagaagtggtcacccaagttccgttgatgaagcaccagaagactaatcaaganaggaatccatgtgggagttcgcaagagaaaggtttgcgtgttggcatcaatgcttcctcaataagctagctgccaagcgaaagctagaggcctgaagatgatctttgagtagccagaatcagtgtttgcaatcagcaaccagatgctcctcaaaggtcggattttgttgaagttccatctcctcgaagagtttgcaaagtgaagatatgtagctgaagtaaagctatacccataacccttctaagccgaatctcgaggacgagattccttttaagcggtgtagatntgtagcatcccaaanattcaaatcctgaaattttctcanactcc

SEQ ID NO: 68090 - DNA, 290 bp, Zea mays
acactatagccacctcaagcttcaactctatctatgttatggattgccttttaatctgtccaattcccttcggcccttctggcagcttctttagtcccatggacagcaatgggcccttgtttcgaaagtatcttgatgcataaatatgctggatgaagcattgcttcgaaagcattgagtgtccctcgaccaatggttgcattgtagggatactccatgtcaacaatgtcaaagataacttgttcagtccttgtgttgtggacatagccgaaggtaactgacattgtgat

SEQ ID NO: 68091 - DNA, 511 bp, Zea mays
catgatactaagctactcctcctgggaggggccgttcatcatcaccaagatttcttagtccgggacatacaagctggccaacgatcaaggcgaggtctacaacaacgcttggaacatccaacagctacgtcgcttctacccttaagatgtttcaagtcgttcatatacctcgttctctttacatacataaataaagtctaaccgtcaaggaagggtcagccttgcctcggcaaagcccgaccctccctcgggggctagaaggggggaaccacctctgtgtcaaaattttcctcggaaaagtcttttgccagaacgtctttcgcgcttttcaactgcttcgatagcgggatcctaaaaacgacgagagtacatgtaagcggcaaggccgaccgagctgagggactcctacgcctttgggatacggatacctcactcatcaccttccgcgataagtaactcacgctcggataagcgattctgctaccgaacgagtcctaacgcttcgaaactt

SEQ ID NO: 68092 - DNA, 435 bp, Zea mays
  unsure (1)..(435): unsure at all n locations
tggatcgaagcagccaagagtctgctcagtctgggtgcaccggtctgtccggtggtgcaccggactgtccggtgatgcaccggactgtgtccggtgcgtcaggctggcgtctgtcaactggctgctctcgggacttcgacggcggcgtacggctataaatcactggactatccggtgagccaacagtcggcccggccaacggtcggccgcgtaatccgctcgcgacgcgtggcagagccaatggtcagaagggggcaccagactgtccggtgtgcaccggacactgtncggtgcgccaacggctccaaagcgccaacggtcggcttcaccaaataaggaaagaaatccgcaccggacagtgtccggtggtgcaccggactgtccggtgcgccaggcaacagaaggcaagaattgccttcttgaaatgctctcaac

SEQ ID NO: 68093 - DNA, 506 bp, Zea mays
  unsure (1)..(506): unsure at all n locations
gacctctgatactcaagctgcggaatggaaggagagaggggatgggccgagctcnattcctacgcagcggccatggagatgtgcgccgagggagcaggggggcacgacgcggcaccagggagaagctcggctgccatggcgagcgcaggggcgagctagagggggagaggctgtgggtgcgtcgcgagtagagggagctgggaaccgcggcgagggagctcggctacgcggctggaggagtaccagggaagaacgacgccatgggaggagaggacccgggcgcgcgggagctggagagcgagtcatacgcgtgacgcatggaggagcagaccgcacgtagtagatagaagaggagcggctggtggaaagaaaatcatgggaagagcggcgtgnggataagcccctgggatattntcttcttttaccaattacttgttggtagtactaattacagtagtctggtttggttcggacaggatgtaaatggaccgaactaaacggacttc

SEQ ID NO: 68094 - DNA, 490 bp, Zea mays
  unsure (1)..(490): unsure at all n locations
ngccttgagctaaatgaatgacctagacgaggtgcttaggaccattatgtaaaagaattcaagatgagatcaggaggtgaaggatagcccgaaggcaaaggtataagctaagggttagtttggaagtccaaaaatcgaaggtgataggaggggctaaaatcccttcctctactttaatccccaccgattntgtgacccctaaactagtcctaagagtttatttggagcaaggggattggaggatattgagggctagtttgagagtcgaaacctcgggaggattggatgggctaaaatctcttccttattcaattgaataaccaagagctaaaataaccactattttgggacggngaggctattggatagaaagtgattntagcccttattctcctcggatgcccttactcctaaacatgtcctanaggtttgctnttgtcagtcaaggagtggccaaatntatgataaataactatactataaaagtaaa

SEQ ID NO: 68095 - DNA, 494 bp, Zea mays
  unsure (1)..(494): unsure at all n locations
gggatgttctntatgaagtatggatattctcacaaagcatattcttctttacgaagcatgaaaaaaagggaaggtgttttttcgccgaaggctcaaaaacgatatgtacataaagtttcatgcatcgcaaagaactgaattaaaaaacaacttacatattagattcaaaactatacacattaaatattacagacttagttcagcaaatgttacattgataacctaaaaatatttctacaataactactattcttccttcagaactttctctgcaacttcgttaagcaatttgttaacaacttcatcaacaatagcttcggccgtattgataatttctattgctttctttgtttctgggtcggccagtgggtcgaatggctctggtggaggaggtaattcagctgcggtagaaaacatcaattagttcgaggccacgaaaataaaacgatgaagatagaggccattagataatacctatccgtctctcgagttct

SEQ ID NO: 68096 - DNA, 473 bp, Zea mays
  unsure (1)..(473): unsure at all n locations
tcggcatttggttcaaagccttggcttcgaacaactcattataagatccctatatacactatagcgtttggagtatgctggtgaaggtatatgttaaaccttttcaaaacgacaactatcatcttatgcaacagaaatctaagtctagctttcagaaagcttcggaaaacgacaacttcatcttcctttggtttcgacactaagtcatcaccccctagtagaacccattcaacgttgtcaatataatcaaccgagtgagtacctcaatatgtcctcctttaatctccgacttcccgaagtccacatgacttggattggtaggttggatgatagtactaccctcctcaataccaatttcattgttgtccttgtctagtccttcagacgaatccgcagaagcagaattggcttatgaagcagtcacctctattgtctcanacaattcttcaaccttcagctctgagacatccgaa

SEQ ID NO: 68097 - DNA, 490 bp, Zea mays
  unsure (1)..(490): unsure at all n locations
ngaagccatggtaagtagcataggcaagtaatatgtgaattgactcaagcctagctacgggtgcataggtttcaccgaaatccaaaccttcgacttgtgaatatcccttggccacaagtcgggctttgttccttatcaccacaccatgctcatcttgcttgttgcgaaagacccacttggttcctacaacattttggttaggacgtggaactaagtgccatacctcattccttgtgaagttgttgagctcctcttgcatcgccagcacccaatccggatcttgaagtgcttcctctaccctgtgtggctcaatagaggaaacaaaagagtaatgttcacaaaaatgagcaacacgagatcgagtggttacccncttatgaatatcgccgaggatggtgttcacgaggtgatctcgttagattgcctggtggactcttgagtgtggcggtcttggaccctcagcatcttccttgtcttgatcattagcatc

SEQ ID NO: 68098 - DNA, 481 bp, Zea mays
  unsure (1)..(481): unsure at all n locations
cgactntcggttgcatcatagggatcggaggagaggttttaaagtaaggataaaaatggacggtaagatttacactataaaatgtaaggatcaaatcgagttaggatcgggtcctatttctatttatttttaaactaaaaataatttagggtcctaacaatttgtgaagaaacatttggatcataatccattaccaactctaattaaaagggcttctatttaattttgattaggaagagatttaattctgttcaatccccttctaaccgaatagggaaaagcgcaggctataagaagagcgacagttacatttataataacaatgttcgccacaacacaacttgtacgtgtttatctaggcctatccccttctagttgctagcttcctttcgtacaaacctgctcgatcgttcattcatttcttcaaggaaactccagttntttntagtaccgatcgagctcagctagtagccggacgaca

SEQ ID NO: 68099 - DNA, 486 bp, Zea mays
ctggtcggccaaacttcttcctttctttcgaacacagatggtatatttctccctagaggactgaagcacgtcgttcccaaacctccttgaaagcggacattgcctgaagatggaataactatttccttgttaagaaatatattgtctttgtgccgcttgcaagggcatctgataatgttagctaataacatggagaacatatgatccatgaactcttttgttttggctacccactcaacagaatgtcgtccatttcttagttcggccattgtacatccatttatgattttcaaccataaccgaactatgtcataaaaacctcattcaactatcttaggtgttctccacccaagagtattggtactacatctataggcaagcatagatcctaaacccacacaagattgctcaacataacacagatgtatgacaagtatatatgatccaaagccaagtttagcaacataacctcactgctatctagct

SEQ ID NO: 68100 - DNA, 490 bp, Zea mays
  unsure (1)..(490): unsure at all n locations
tcagacaaaatcttatgtcaatgtttaggattatcatatatcttctttnttatcaaattaatcaatgtcctattactagactcggcctgtccattggcctgagcataatatggagatgaattaagcagcttaattctgtataattcagcaaattcacgtacctcatttgacataaaagaagtaccttgatctgtagtcaaggtctggggaatgctgaatctatgaataatatgctcagttatgaactcaattacctccttgtgcgtcatgttctttagagcaacggcttcagtccatttggtgaaatagtcagtggcaactaacacaaaccgatgcccctttgatgatgaaggatgaatttccccaataaagtctaatccccatcctctgaacggccaaggcttgatgataggatgtaattcggttgcagggaccaactgtgggtcgcccgaattttgacacacttggcaaccctttgagtacttgaaac

SEQ ID NO: 68101 - DNA, 488 bp, Zea mays
tggtgaagggaaaccttccagcgctgagccaggactgtctgttcctgccggctccaaggacgaatcgtctgaaatgctggaaataatagggcaagagaaaatcgaatcggccagagcaccgaagcattctgccgaagccacagagaaaacagccgaagtgccagagctaggagaatcggcaggattgcaaaaaatccttagcccgccaccagagccggagttgccgaaggtgcctagagctcctataataactcccaagaggaggaggatggttagtgtgctggacactgttttagagtcgacaagagtgtcaactcctgctcctgcaaaggagactgctaaagctgctacagttcgcgttgaaaccgaagctgggtcctcagtgcccattgaaatagagcatgctggaactgggcggagtattgaacaaggaccttcagaacgttggtctggtttggagaaagaagacgcgctcaaagcacctaatg

SEQ ID NO: 68102 - DNA, 470 bp, Zea mays
  unsure (1)..(470): unsure at all n locations
tgtgaaggttcttcatccccgcatgtgctaagcggcgatgtctcatccagcccatgctagtcttagcaattaagcatgcatctagaccggcctcttcttttgcaaaatcaactaagtaaagcttgtcgtctaatacacccttaaatgctagtgaaccatcacttcttctaaagacagacacatctacatttgtaaaaagacaattatatcccatattgcatagttgactaacagatagcaaattgtaaccaagagactcaactaaaaacacatttgaaatagagtgctcattagaaattgcaattntacctaacccttttaccttgccttgattcccatcaccgaatataattgaatcttgngaatccttactcttgacgtaggaggtgaacatcttcttctcccccgtcatatggtttgtgcatccgctgtcgataatccagcttgaacccncggatgcataaacctgc

SEQ ID NO: 68103 - DNA, 457 bp, Zea mays
  unsure (1)..(457): unsure at all n locations
tcaatccactatgcttatccctatgcaaaacccagacctaatatttattatcataaaccactaagagccacgtataaccaagagaccctaagttactaactgacttagttttctttcacttagcataatgattattacatcctgcataatcatagcatacatattcttattcattgcattcgatagattgcaacctcgctgacggagagtacgtcctcgtgccggagcaaggagttgctcatgaggtagccccggatccagcaccagagcctgcccctgaggatctgcctgccccagctttggaaggcaagccctggttttatgcataacctgttttatatgatattntactacacttaatgattgtaggaatgtattgtgcacttaagtgtaagagttgattgaaaccctagttgcatgaactcangaatccttctgtgatggatactagtatgct

SEQ ID NO: 68104 - DNA, 462 bp, Zea mays
  unsure (1)..(462): unsure at all n locations
actaagcttagcagaatgacaccaaggccttattctcaaaaggcatgtttgtctgacctatgttgatgatatcatagtgaanagcacgaagcangaaaatcacattgctgatttgcatgagacatttgccaattttaggcaagcaggcctgaaattaaatccagaaaagtgtgtttttggagtgaagaagggcaagttccttggttgtttggtatcaacgaagggaattgaagccaacccgagcaagattgaagctatccttcggatggagccaccaacttcaaaaaagggggctcaacgattggcaggaaggcttgcgtcatggaataggttcatatcaagatcagcagagaggaatataccattctttgaaattctaaagtcagccgaagttntttagtggggtccggcttagtaaaagggctttgaagaattaaagcaatacttgatagatctgacaac

SEQ ID NO: 68105 - DNA, 504 bp, Zea mays
  unsure (1)..(504): unsure at all n locations
cctatgatactaagcttcggaacccatacttctagccatctcnagtagacagataattctttgttctctgggaggcaatacaagaagtcatcttcatctgtgccattgaacactaaggcccctttcaggtacttcagttctcgggcatagtgtttagcttcaaaaatttcttcttcagataatctttttcccgaagcgtgtcgaataatataatcaaggacttcgaaagacgcttcgggagtaggtgcgacagctntttcaagcaaaatctgttttatagcttcttctcccgctgccttttctccagtttccgaggatttctccttgacggactctgaaggcccagcttcggcattggcctggctcagtgtagctttggtttcggttacctttgcctcggtttcaatctgcgcctttgaagccttggcaattntccctggagtagagcttgaagcttttattgtctctagcacatctagtacactangccatccttttctcatg

SEQ ID NO: 68106 - DNA, 450 bp, Zea mays
  unsure (1)..(450): unsure at all n locations
ggctcgtaaggtaacgagctggctcggttcaactcgttaaggaaccgagccagagaaccagctcggctcgtctgcgagctcgaactggctcgtttagcttgcgagacacaacaaaaaaacaatatgcatatttactatataacaaagctggttcaaaacgacgcatatgggcctatccacgtcatcccttaattcttcagccgtcggatcgtttccaaatggttgcgatgaacgtttcaccctcgaacagatcgcctcaacaggcagactgcggccacgggagacttccagagagcacggctcagtcaaaaggggattatggaggggcggtgtcttgttcgtcggcagtggcgtgtcccacttttccccatgccatgggcccttcccctcctcatgctcacctttcgtccttctncgggatgttggccgtcgatgccccacaagcgtgct

SEQ ID NO: 68107 - DNA, 491 bp, Zea mays
  unsure (1)..(491): unsure at all n locations
tcgacttagcggcgaanaatgaaaccgacttanagttgtttatgatatctagtcctcgatagattgtccttaagtcaatagtaaacataaagggcatggatgtaattntacacaggctgcgtcctgtgcctataaatagatgagcagtaacaccatattgttcacgctgacttgtattcactcgcacgtctgtcacacccggttttaaggaacaaagccaggtgcatctcatacatgcgccaagaagacaacatatataataacagagtgtatagagataaatgtcataaaacatcagagtatttattacatagcggaagacttattacaaaataaaaggataaacataaaacgaactaaggatcgtcggcgccaatgtccactgagaaacgccacctagatcagatcatactcctcgccttgtggctcctcctgaaccacctgctcttctcctgtgggggggtgtgagacagcangagtgagctcacata

SEQ ID NO: 68108 - DNA, 493 bp, Zea mays
  unsure (1)..(493): unsure at all n locations
tcggctttaagagcacattntcaccatttctgaagagatgtctcaagataagaaagctattgctgaaacgaagctgagcgaggaggagaagcttcttaaggaaaaaacagctggattcatcgagtcaactgcaaagaccaacacagaaaagattacaaaagaaattctagaaggcttatctgaagataccgatgacagcgatagttatgatgtggaaagtgggggcgaagactcagaagatcggccgcgaccaagtcacgcagtcttcggaaaatcgaatatcaggcaaagtcatcttgataacatgagaggaaggtatttccgagacatatccatcgtgagggctgaccacggagacatgactgttcctgctcctgaagagaatgaagtcgtaatttaccgaagcttcttcaaggttgggcttcggttccncctaagcagttttgtggttgaagttntaaagatataccagaattttcttcaccagattact

SEQ ID NO: 68109 - DNA, 448 bp, Zea mays
  unsure (1)..(448): unsure at all n locations
ntatcaaatggacgtgaagagtgccttcctcaatggaccatttcttgaagaggtctatgntgagcaacctcccgganttgaagatagtgagtaccctaaccatgtttataaactctctaaggcgctttatgggctcaagcaagccccaagagcatggtatgaatgccttagagattttcttatcactaatggattcaaagtcggaaaggcctatcctacactcttcactaaaactcttgaaaatgacttgtttgtatgccaaatttatgttgatgatattatatttgggtctactaacgagtctacatgtgaagaatttagtaggatcatgacacanaagttcgagatgtctatgatgggggagttgaagtatttcttacgatttcaagtgaagcaacttcaagagggcaccttcctaagccaaacaaagtatactcaagatattcta

SEQ ID NO: 68110 - DNA, 469 bp, Zea mays
  unsure (1)..(469): unsure at all n locations
tgccaatacctgtcanagcaacagcacatgccagcactgttctatcttaccataccagnaactnggcccttcgcatgctgnggactggatatgattggacctttcaagaaagctcaaggaggatatacccatgtattggtagcgatcgacaaattcactaaatggatagagttccagcccattgcttctttaacctctgctaaagccgtggaattcatacaaagcataatattcagattcgggataccaaacagtatcatcactgacttgggatccaacttcaccagttcagaattctttgacttctgcgagcaaaagagcattcagatcaagtacgcatctgtagcacatccaagagccaacgggcaggttgagcgagccaacggaatgatattggaggcactcangaaaagggtcttcgataagaaatgaaaattcgcaggaaaatggataagagaactgccttatg

SEQ ID NO: 68111 - DNA, 491 bp, Zea mays
  unsure (1)..(491): unsure at all n locations
attacggacctatgaaactcagcttatgcaactgctgcannaaaatgagaagtaaattgtgtgccactgtccgatactatcttcattggaataccatgcaagcacacaatccgagacatgtataatgctgccaacaccacactgttataggtggtcttgactggtatgaaatgggctgcctttgttaaacggtccactactacctagatggagtcataaccagctcaagtgcggngcagaacgactataaagtccatcccaatcgcatcccatttccattgaggaatctgcaacgactacaacaaacctgcgggtctctgatgtcctgccttgatcctctgacaactgtcgcatctggccacatactatgctatctctcttttcatactgtaccaccagaatctcttcttcaggtcttggtacattntctcgctactaggatgtatagaatatgttgtctcatgagcttccttgagaatcagttcctgaat

SEQ ID NO: 68112 - DNA, 487 bp, Zea mays
  unsure (1)..(487): unsure at all n locations
ntatcaaatggacgtgaagagtgccttccttaatggtcctttcaagaaggaggtctatgttgagcaacctcccagctntgaagatagtgagtaccctaaccatgtctataaactctctaaggcgctntatgggctcaagcaagccccaagagcatggtatgaatgcctaagagattttcttatcgctaatggcttcaaagtcggaaaagccgatcccactctctttactaaaacaattgtgaatgatttgtttgtatgccaaatttatgttgatgatattatatttgggtctactaacaaatctacatgtgaagagtttagtaggatcatggtacaaaaatttgagatgtcaatgatgggggagttgaagtatttattatgatttcaactcaagcaactccaataggggaccttcattagccaaacgaagtacattcaagacatacttaccaagtttggaatgaaggatgccaagcccatcacaaca

SEQ ID NO: 68113 - DNA, 470 bp, Zea mays
  unsure (1)..(470): unsure at all n locations
taacccaatgacagtgtaaccaacaggaataaaacagaatgtgtttctgctggaagttgagaactaatttaacctgctttgataactacagcttctgtgcagttactgagcattgagcaccatatctttacaatacgatatctcttgaaataccatgtcttgaaattgtatgacactcaataccatatcactttacctttagtgggcatcttctcaggatccttcattccatgttctctccaattggatagtgcattgtgttctgtcttttgggtgcctgtttctaacctacgaaacatgctttttgacctggttatttatacctgactntgcagttcttgggaaatctgaggagcctccgagattcatacactgcaatggctgctggttcactgtcggcttctaatgagccttcatctgtgaccaagattatttcagactgcgaatctgcactcaccttcttgaatcac

SEQ ID NO: 68114 - DNA, 496 bp, Zea mays
tatcaaccgcgtctgtaaccaagcgatgtggtcgaaccgtcggtgttgtcgtggaagctccagcaacctcaagtatgccacgccgtggctctttactgcacagtagtaactgtggcacgcctaggcttaccatctcagaaccgctgcaccgatgaacgccgcgactgagccaccagtgaccttcttcatctccggccgccaccacgccatgcccaaattaggagccaccacccttggatactataaattggtgccccagcctgcttcgctaagtagttgtgcacccagtgaaccagccctcaccttcaatcgtcccccacagctccccaatttgagatttcccccaaatcagtcaagaattccgccgtgtgtgagctcgccgtggccagctctccataggtccgatcacgccctcctcgctcttgtttctgcactcttgtgtgctattgatgcttctcaacccgaccaattgagctagaacacgtaggatcaccat

SEQ ID NO: 68115 - DNA, 471 bp, Zea mays
  unsure (1)..(471): unsure at all n locations
atttttgatatgcaagacacctatttatcatctcgnggatcagataaaaatattatggccactatatttacatcatatgtttcagttggagcgatacttgggagtattaaaaggttatgtgcgaaatcgcgctcacccagagggttcaatcatggagggatacactacagaagaagtgattgagagctgtatagattacatcagtgatggaacaatgataggtgtgcctgtacctaaacatgagggtaaactatgtgggagagggagaatgggcaagaaaagttttcgcgttgaggattacaagctagtacattgtgctcatggtagtgtactacaacatctcacgatagccgagccttacatagaggaacacctggatgagcttcgtaaagaaaatcagaaccgcacagaggactggatcatganggagcacaaacatcgtttcagcgaatggttaatggacaaaaatat

SEQ ID NO: 68116 - DNA, 492 bp, Zea mays
  unsure (1)..(492): unsure at all n locations
tgtcagctatatataatngatatttgttgatgcaattagtgtgttatctcntacaatattttgttggctacaaaattcagtgccttttggattccaatggatccatagtggttgatgttttgtatgctgcttgtatgcacaaggttccacaaagcttctatgattcataccaaaaaagctgctattttgtatggcatgttccacaaggttaccgaagaagctgttgttttgtatgttgcttctatggtaacctgaaacctatgtttgcacaaggttcgaacaacaacttctatggttgagcacaattccatggttcaaacatgagcttctatgtcacatagtttggttcagatttaacatagacttaaaacttgtgctcaacacatatctatntaatgctatctattcaattagctataatgaaacanattntgacatcaatgactcagtgtttgctttcanaatttgagatattagttggcagttcaacac

SEQ ID NO: 68117 - DNA, 488 bp, Zea mays
  unsure (1)..(488): unsure at all n locations
tctaaagggagaagcacatttgngactaaccaatgttcattntgttatttacatggnttgtagcgcatgtcaagcaggaaagcaagttggtgttcatcatccacacaagaacatcatgacgaccgataggccacttgagctgctccacatggacctattcggcccgatcgcttacataagcatcggcgggagtaagtactgtctagttattgtggatgattattctcgcttcacttgggtgttctttntgcaggaaaaatcacaaacccaagagacgttaaaaggattcttgagacgagctcaaaatgagttcggcttaaggatcaaaaagattagaagcgataacgggacggagttcaagaactcacaaatagaaggcttccttgaggaggaggtcatcaagcatgagttctcctctccctacacaccacaacaaaatagtgtagtggagaggaagaatagaactctattggacatgacaagaacta

SEQ ID NO: 68118 - DNA, 480 bp, Zea mays
  unsure (1)..(480): unsure at all n locations
ngcaccacgatatatnggtccttttcttattctggaaagttatgggccagngacataccgactccaactacccgaaacattgtctgctgtgcataatgtgttccacgtgtcacaattgaagaagtgtcttcgggttcctgatcaaaccgttgaagtgacagatgttgtccttgaaccggacttgacatactctaagcaccctatacgagtcttggatcaaaaggacagggttacccggagaaaaaccctcaagttctataagatacagtggaaccagcattctgaagatgaggctacatgggaaactcaagactttctagaaaagaatttcccaggctttttagcctcttgtaaactgtaaagcctgtataactgtgaatacagaagtgacccccacatcacccctgccttgtaccaganataaggaaataaaagtatgccgcgtttccttttccattacttaccctangactnttaatc

SEQ ID NO: 68119 - DNA, 491 bp, Zea mays
  unsure (1)..(491): unsure at all n locations
ggtcgtctaatacacccttaaaggctagtgaaccatcacttcttctaaagacagacacatctacatttgtaaaaagacaattatatcccatattgcatagttgactaacagatagcaaattatatccaagagactctactaaaaacacattagagatagagtgcttatttgagattgcaattttacctaacccttttaccttgccttgattcccatcaccgaatattattgaatcttgggaatccttattcttgacgtaggaggtgaacatcttcttctcccccgtcatgtggtttgtgcatccgctgtcaataatccagcttgagcccccggatgcataaacctgcaaggcaaatttaggcttgggtcttatgtacccaactcatgttgggtcctacaaggttagtgcaaatatccttagggacccaaatggcaagtttgtctcccttgcattnttgccctaacttcctagcaactattntcctatcctt

SEQ ID NO: 68120 - DNA, 415 bp, Zea mays
  unsure (1)..(415): unsure at all n locations
nntagtacattggtttgtgtactaatatactngtctaagttttataaacagatagaagaagaaaagagaagagttggctgtgtatagccaagaggctgtttcggtctggggcaccggactgtccggtggtgcaccgaacagtgtccggtggtgcaccggacagtgtctggtgcgccaggttgcctcgagcgaagtggccgctctcgggaattcgccgacgacgtacggctaanattcaccggactgtccggtgtgcaccggactgtccggtgagccaacggtcggccgggccaacggtcggccgcgcgatctgcgcgggacacgtggccgagccaacggtcggaaggtggcaccggactgtccggtgtgcaccggacatgtccggtgcgccaacggctcccacatctgcaacggt

SEQ ID NO: 68121 - DNA, 503 bp, Zea mays
gacctataaaactaagctgaataggagggcagctggacaagatagcaatgccccatattgtatcatccttttcagatcttggtaacctcaccttattggccttggcattctccaaacttgatgaggactcattttcatgcctcttgacgttgcatggtctacgtgggctttgggttgataaggcttatgaagggaagaggcttcactttaatgctatgtcttttccaaatcttcgacagcttgcaatatcagatgcaccgcagctcaacagcgttgtaatcgaacgaagcgcactgcaaagccttgttcagctgacacttgtagattgtccagaactgaaggccctgcctgatggcattgagcatcttagaacacttgagaaattatatctgcgaggagcatccaaagagctcacaaagctatttcagtgcaatgaagaaacacatgagtccaatgggaatcttgagaagatcggtcatatccgaagggtacttgttatccat

SEQ ID NO: 68122 - DNA, 473 bp, Zea mays
  unsure (1)..(473): unsure at all n locations
tggtgatcttctntgatcctttaatcatacattcaaagctcacaaaattcccgataacttcctcgggggtcattgatgtatatctaggattaccacgaattaattgaacttgagtggggttaaggaagatgagtgatctaagaataaccttaaccacctcgtggtcatcccatttcttgctcccgaggttgcgcacttggttcaccaaggttttgagccggttgtacatatcttgtggctcctccccttggcgaagacggaagcgaccgagctccccctcgatcgtctcccgcttggtaatcttggtgagttcatcaccctcgtgcgtggtcttgagtaagtcccaaatctcctttgcattcttcaacccttgcactntgttgtattcctccttgcttagagaggcaaggagtatggttgtagcttgagagttgaagtgcttcgattgggccacttcgtcctcatcatagtct

SEQ ID NO: 68123 - DNA, 465 bp, Zea mays
ggacacttaaaactaagctggcggacgtcgccctcgtacctgagacgactgtgcagtcattcctcgacgtgacttcatcgccactcgtcgaccaaaaggtaccggccgattcccatcctacgtcatttggattcagcttccacccgcctagcgacctcgctttggcggacgctctcgtagaggcgggttcaaaccctctggggtttcgcatgcggtcgccttgggaccggctgacggacgtctcgacctacgggccctctgggtccgaggaagacgacgaccctagcatctgttgggatttctctggacttggcaaccccagtgccatgcgggacttcatgaccgcatgtgacttctgcctctccgactgttccgacggtagccgcagcctcgacgacgaggactggcggccaagccgcgaatgtttccacgtcgatctatggggtccctccgaaagaatcatct

SEQ ID NO: 68124 - DNA, 496 bp, Zea mays
  unsure (1)..(496): unsure at all n locations
tctnagggagaacacgtgataggtctaaccaatgttactttcgaaaaagatagaccttgtgcagcttgtcaagcaggtaaacaagttggaggagcgcatcacagcaagaatgtgatgaccacatcaagacccctggagctgctacatatggacctcttcgtacccgtcgcctatctaagcataggaggaagtaagtatggtctagttattgttgatgacttttcccgcttcacttgggtgttctttttgcaggataagtctgaaacccaagggaccctcaagcgcttcctaaggagagctcaaaatgagtttgagctcaaggtgaagaagataaggagcgacaacgggtccgagttcaagaaccttcaagtggaggagtttcttgatgaggaagggatcaagcacgagttctccgctccctacacaccacaacaaaatggtgtggtagagaggaagaacagaacgctcatcgatatggcgaggacgatgcttggag

SEQ ID NO: 68125 - DNA, 489 bp, Zea mays
  unsure (1)..(489): unsure at all n locations
tgcttacttggtaagatgaccaaggcgcccttcacgggtttacctgagaggacgttagatntattggaactcatacatactgatgtgtgcggaccaatgagtacgacagctaggggaggattccaatacttcataaccttcactgatgattttagtagatatgggtatgtctacttaatgaaacacaagtctgaatccttagaaaagttcaaagagtttcagaatgaagtagaaaatcagcgtggcaagaaaattaaagcactgcgatcagatcgtggtggtgaatatttgagtcatgagtttagcaatcatctaaagagttgtggaattgttccacagcttacgccgcctggaacgcctcataggaatggcgtgtctgagcgacgtaatcggactttattggatatggttcgatcaatgatgagccagtcggacctacctttgtcgttntgnggatacgctctagaaacagcagctttcacactaaat

SEQ ID NO: 68126 - DNA, 470 bp, Zea mays
  unsure (1)..(470): unsure at all n locations
ctcaagctgggacccctgngtggaagccccacggtcgagctntctgatgactttcttgctgttgcgctcggaggacctggaattntctcttgatgtgccctttctcttcctcttttgctctttccacttgaatagctcttcctggaaaggagagagaaactgtggaagtcttggctggcgaggatggtcttaagctcgggtcttaaccctctcagaaaacgggccattttcctggcctcggtgctgacatcctctggcgcgtagcgggccagctctgtgaacttgtgcacatattcactgactgttctcccgccttgagttagctcccggaactcatcctccttgagttgaactatcccctggggtacgtggtgctcacggaaggctgcttcgaattctgcccatgtagcatctctaacggcttcactgaaagtgttccaccatgctaaagccattcctgaaagctgatg

SEQ ID NO: 68127 - DNA, 444 bp, Zea mays
  unsure (1)..(444): unsure at all n locations
ntccgcaagcgcgctggcgtcgtccgcttgctcgggattggcgtgtctcggngagacagcgctcgtcttcgtctcaagcgcgaagtcgattcccggtgcgcccccgttggggtgccggcgtcgtcgacttgctcgacagccgacgaggcgctgcctcctgcttggccttggctgccttgccttcccctccgtcggcggggaagaaggcgggacgaggtcgaaggttgttcttccaccacgcggngaagacatcgtcgattccgccgccgacgggcgggctgtcggccgccattgtcgtcgtcgcgcggcggnggaaggagtatcatgtcgtagctgccgtcgaaggacatgaactcaagactcccgaaacggagcaccgtcccgggttggagaggttgctggagactgcccatctggagcttgacgggaagctgttcgtcaaca

SEQ ID NO: 68128 - DNA, 455 bp, Zea mays
tctctggcatgtctctatatcattccgaagagtagtggctggtctcctgatgccgaagcgagaccagatggggcgttgaataattccttttatatattccctctcaattaaattattcttaatataaaaccactcctccatccaggccccaggccacctttttcgaaaagttggaaccgggtaacttacatcggggcagggcacgaagccataacaaccaaagttgttgtgatactgctccttgctagtagccttcgtctcgtacaacagctcgtgcatgttgcagaagaattttgcgcttggctccagcccctggcttcttacggcccaaataaaaacccccatcctaataatgtctttggagtaatttgatgtagaaaaatttcaaaggtcttcagcacttcgaccaggaatctgcttaatgggaaacgaagccctgccttcataaaactcct

SEQ ID NO: 68129 - DNA, 492 bp, Zea mays
  unsure (1)..(492): unsure at all n locations
taatgccnctcctanaagaatgtccaactttgtaatggcaaagctcccatggttcatgataacgagggttacattttgtaccctgccggctatcccgaacacaaaattaggagaattcactctaggaagtttcactctggtcctaatcatgcttttatgtataagagtgagacatctagttctatgtaatcaacccatgctaaattgcctaagaagaaaactcctaaagcatcaaatgatcataatgtttcattcaaaacttttgatgcttcttatgtgctaactaacaaatcagacaaggtagttgccaagtatgttgggtgcaaacacaagggataaaaaacttgtgtttgggtatccaaagttcttgtatctaatgtcaaaggacccacaactgtttgggtacctaaaatcaagaactaaatctgttntgtaggtttatgcatccggaggctcaagttggataatcgacagcgggtgcacaaaccatat

SEQ ID NO: 68130 - DNA, 481 bp, Zea mays
  unsure (1)..(481): unsure at all n locations
ggtggacccgtagcctatcaatgggaatagccacctcacatgtcagcagttcataatgtgttccatgtatctcagctgcagaaatgtgttcgcctacccactgaagtgctgccagaaccagacattgagatagaaccagacttgtcctatcaagagtaccccgtcaaggtattagatcagaaggagagatcaactcgggcaaggtcgatccgaatgtataaggttcagtggagtcaccactcagcagaagaagctacatgggagactgaggattttctacgctctcgcttccccgactttctgcccaaaggagtcggtacgtaccccaaaaccccacccccacctgccctttgaattcaattataagaaaaacttagataacaaggatagtctaagttgtggatttagcttanaaagggcttccttctgaagttgcaaagagaatgacattcgaagagcagttaacaagagaaacttgagt

SEQ ID NO: 68131 - DNA, 483 bp, Zea mays
  unsure (1)..(483): unsure at all n locations
acacataaaactaagcttctgtaactaccacttcgtcagcttcaggcagagggactttactttcccctccagccctcacaattgagatatcacgaaagtacctccccctcattgcatcaatatgcccttgtttaatagttgatttcccgaagacaacatggcttggtctccagggctgatcttcggcatcttcattcccactttctacatcgaaactttcactatcgctggagttctcagatatcctagccaacatcttgtttgcaatcttttctgcattggtttttccatggcttcataaaacctggacagtgccaaatcaacaatcttcttctcatcagccattaagttgatggttgttgaaatgctgaagcttgcaattcaaataaactcgacaaaacaagaaagtttaaaaagacgagtgcgatgcaagcaactaanatggcacaagaaatgcttacaatccaagctcctatntatatg

SEQ ID NO: 68132 - DNA, 445 bp, Zea mays
tgagaaatatctagatacagtccgaaggatggaggctttcttctaaggtttctctgtaaaaaatattcctcgtggagaaaatgaatatgctgatctattggccaagtcagcagcccaggggctgcctataccttcggaagtattcttcgaaacaataaaagcaccttcggtcgagcttctcgaaagagcaatccttaacatatcccctgtttatagcgaagattggagaactgagatcatctctttccttcagggtaattttctttcagacgacgaatcttataacacaagaatagaagcaagagctcgaccatatgtcataatagaaggggagttatacaagcgtggggtctgttccccattgctcaagtgtttatccagatccgaaggtatagaattaatgaaggaaatacatgcaggcctgtgtggatctcacattggatct

SEQ ID NO: 68133 - DNA, 488 bp, Zea mays
  unsure (1)..(488): unsure at all n locations
tctggtagaatatatgaagccattataccggagatccagtacattccggtagtatgtgaagttccagatgtattttcggaagaattgcctggactggcccctgaaagagatgtagaattcgtaattgagctaaagcccggtgcgggttccatcttccgaagatcgtaccgtatgccccctaatgagttggcggaattgaagattcaattacaagatctactgaataagggattcatccggccaagctcgtccccatggggttgccccgccaattttgttaagaagaaggatcaaaccttgtgaatgtgcgtggattatcgacccctgaatgaggtcaccatcaagaataagtaccctcttccaaggattgacatcttatttgatcaactgactggngcgagggtattttccaaaattgatcttaggtcgggctatcatcaaatccgtatccggcccgaggatataccgaagaccgcgtttactacgcg

SEQ ID NO: 68134 - DNA, 490 bp, Zea mays
  unsure (1)..(490): unsure at all n locations
ttgaccttcgtcatgccgccgaagaagtcatcatgtacatgggctgcattgcagccactagacgttaatcaagatacgttatgcgaagctaggagccagaaaaggaaggctaccagtccaacacctcgggaggagaagttggaccaagaaatcaaggaccttgaagccattcatcaataggtccagaagaagaaagaaaagatgctntgtcttgccgatcttcagaggaagattgatgaggccactgaagaaatgcgtcatctcacccaagatgaccaagatcgaaggcctcaacacagagagcttcgtcaagacaattcgtacaacgatgatgaatggtatgatgatttccatcatggcaattntgcttttgatgatgcttctcctctagcagcagaattgcaggctaccccatggcctccgtcatacaagccaccccagcttcctatgtatgatgggcacttagacccgaagcaatttataatgagct

SEQ ID NO: 68135 - DNA, 493 bp, Zea mays
  unsure (1)..(493): unsure at all n locations
tggtgccaatggagaagcananatccttgaagtcttggcttgtttactgcttgccgntgtcaactgttagttcggacagtactccgaagcggcaaacaatgttntgccaaaagaatttctgtgcagtctttgatgttattgtggaaactgctctcgcctcgatccatttggtaaagtattcgacagcgacgaaggtgaacttgaggttcccctgagccgtgggtaggggcccgacgatgtccaggccccagtgctggagaggccatgtgtgagcgatcagttttgtgaattgcgaggggctgcctgatcgaagagaaaacttatggcaggcttcgcaggacctcgcaacccgatttgcggcgcagatcattgcgggccagtagaaaccttggcggatcacctttgcggctagggccctcggccttgcgtgagagccgcaagtaccactgtggacttcgcgcangaattggacgccttctgtctctgtgacaca

SEQ ID NO: 68136 - DNA, 477 bp, Zea mays
  unsure (1)..(477): unsure at all n locations
actaagctntgcggcttgaattctatggaatgggttgaatggttcatcatttactntccaactaagattgatgtagcaaatagtaacctataatctagaaatttggtatcccaaagaaaaacttttcgaggggagtgctcaccacggagtgatggaaccataatttcttgctcaactgcttcagaagttggccaagtaccagacggactctctgtgctacctgaacagttatttgttgcacctgcaccaccaatacatgaaaagttacaattggctctactggcatttatttttgtatgcaggtcatagtgattatgaaacctgaaaaaataccagcactaagagattgagcaagagtatcgtcccacggcggccgtgcagttcccctgcgctttcgagaaaaaaaaatcgtcccacgacggcactgccacattcacatttgtgtttctcacagtagcagtatccataggcatgaca

SEQ ID NO: 68137 - DNA, 360 bp, Zea mays
actagcttgctagcaactatacaaaggcacaccatgtagtgaagatgcaagtacggtccctcgggcagagctggacggggtatctggctttatttggggaacccgctggtttaaaaacccgagcgagtacatatgcaggttaaggctacatatgtcgggatggagatcccactcatattaatcattcgatcgccgtcttctcaatataaacttggcactgcctacacgtacattcagtaacttaggtgataaaacggtagtgcggtaagtgttgactaggtaaaagaacttagtacatgtatacttatatgctataaacggattttagatcatttagaagcatttgcaatgggctttata

SEQ ID NO: 68138 - DNA, 414 bp, Zea mays
  unsure (1)..(414): unsure at all n locations
ngacactgtatgctatccgctcatgtgctgtgcggagatgccactggatgaccatgctacacatgaaacagaagcatgcatctagaccggcctcctcttttgcaaaatcaactaaataaagtttgccgtctaatacacccttaaatgctagtgaaccatcacttcttctaaagacagacacatctacatttgtaaatagacagttataccccatgttgcataattgactaacagatagcaaattatatccaagagactctactaaaaacacattagagatagagtgctcattagaaattgcaattttacctaacccttttatcttgccttgattcccatcaccgaatataattgaatcttgggaatctttattcttgacgtaggaggtgaacatcttcttctcccccgtcatat

SEQ ID NO: 68139 - DNA, 492 bp, Zea mays
  unsure (1)..(492): unsure at all n locations
tntaaagggagaacatgtgatangtctaactaatgttcatttcttttaagatagaccttgtgcagcttgtcaagcagggaaacaagtgggaggctctcatcacaccaaaaatgtgatgacaacatcaagacccctggagctgctacatatggacctcttcggacccgtcgcctatctgagcatatgaggaagtaagtatggtctagttattgttgatgatttttcccgcttcacttgggtgttctttntgcaggataagtctgaaacccaagggaccctcaagcgcttcctaaggagagctcaaaatgagtttgagctcaaggtgaagacgataaggagcgacaacgggtccgaattcaagaaccttcaagtggaagagttccttgaggaggaggggatcaagcacgagttctccgctccctacacacctcagcaaaatggtgtggtagagaggaagaacaggacgctcatagatatggcgaggactatgct

SEQ ID NO: 68140 - DNA, 484 bp, Zea mays
  unsure (1)..(484): unsure at all n locations
tcttctgcctnttagcttcttcgatagcttcgngagcttttttaccaaagagcaatntgtgtcacacctgngttttatggacccgggcgcgaacataatcaccaggtgtgctgggaccaagtcttacacatatgatgaatcatggtacagaaacaaatgtcacatctttactatataataggagttctatacaaaataaataaataattacatcgaaaggagacaatgatccagcaacccaaagttgactgggagacgacgacctagacctctcacgaacacattgcaacatcctccatgtgcctcatcctgtggtacctgttcttgacctatgggggtgtgagacagtaagggtgagctcacaactttcatcgctcaacaagttatggggaataatgtgcatgaactcgccaaaggtgggagctcatgtaaagtgtaaggcttaccatagagaatggtaaagctgaacattgtgttaaagtag

SEQ ID NO: 68141 - DNA, 478 bp, Zea mays
  unsure (1)..(478): unsure at all n locations
tattntcggggtcgtgcccgggcctcagttttcggtccgttctccatgggcgaacccctcattttcggcccagacgcaaggccgaacagccatgccgcccgtcgccttgcgcctccgtgccggtttccctccgttccgccatgcccttcacccaagacatacatattaccttcggagtctttccacacgcttggacttagcttatttccggcgccatgcccgaacctcggttttccgcccctgcgccatgggcgaacccctcgttttcggcccaaacgcaaggccgaacagccatgccgccccgtcgccatcctgcccttcacccaaggcatacgtcgcagcttccgtgtccttgcacacgcttggacttggctatttttttggtcgtgcacgaacccacggcggtcttcggtcacgctgcgccttggccgtttccgtccggaagaccggtgcctctctcccgtgggttcgaaaccta

SEQ ID NO: 68142 - DNA, 465 bp, Zea mays
  unsure (1)..(465): unsure at all n locations
ggaggctgngtatagattaccgccctcttaatgcggtatttatcatgaacaagtatcctttgcctcgtattgatgttctttntgaccagctggtcggggccaaggtgttttccaagatagaccttcgctctggttaccatcagatcaaaatacgagcaagtgatatttcgaagacgacattctcaaccagatatgggctatatgaattcttggtgatgtcattcgggctgacaaatgcaccagcatatttcatgtatctgatgaattctgttttcatgctggaattggacaagttcgtggtggttttcatcgatgacattctggtgtagtcaaagaacgaagaagaacatgccgggcatttgcatgtagtgcttcaacgtctgcgagagcaccacctttacgccaagttatccaagtgtgattnttggctaaaggaaatcaaattcttgcgtcacactatctctc

SEQ ID NO: 68143 - DNA, 482 bp, Zea mays
  unsure (1)..(482): unsure at all n locations
tatcaagtcagctntctaacgcatctagccgcacgtcatttggttattcctangagaagttattatcaaaatactaaagactgcgcagaagtcaaacagccacacgaaattcagctctgcatatctctcgaagaggctccttcacattagaacgtgaaaatacttttgtttcgtgtttatacctctctaaggctggttgttactagtataaatacccccctatgtctgtgatgtaaggcatcttatgataatctaaaaatagaacccttttgttcagctgtgtgctaacaaatatttatagtgatctctacccctttgctcttgtgaattcctttgcgggattgcagaaacggcggcttcatccgctcccaagtggtgctcctactcccttcgaggtctcctcgattgattgtaggctgtgttggttggttctttgagagttgcggtgggcgaatcctcgattcaagttgccgggtaaagat

SEQ ID NO: 68144 - DNA, 480 bp, Zea mays
  unsure (1)..(480): unsure at all n locations
atggaatgccggatctcggcatgccctcggagacatgttgcgtcaattatggaatataatcgacgatctgccatggtgcaaccggttctattatgttgcaagaagtaattgttatacccacanngattgcactttccatctgcccttggcctggtgtgtgggaatatgtgagggtcaatgtcatcaagctcgttgttgaggagctgagggtccctgagtacctgcagttcaaggaacaacttatggaagaagggtatgtttttgcagccatcctccttgattttagtattgttgtccttattatgttgggttccacatagatcctggaatagtagaattttgtatcctttgtaattcaacctttcatgcacgatcactcattgaagcagcatttgttcacacgaatctcttaactgcaccacttccctcatttgaaactctttggatctttgaagaccattagatgaattcttatattca

SEQ ID NO: 68145 - DNA, 485 bp, Zea mays
  unsure (1)..(485): unsure at all n locations
tatgaagattcttcatcccaacatgggctagtcggcggtgccagatccaacccatgttagtcttagcgattaagcatgtgtcaagttcagctctatcaaaatctactaagtatagctgaccctctaacacacccttaaatgctattgaatcatcacttcttctaaagacagtgacgcctacatcagtaaaaagacagttgtagcccatttgacataattgggaaacagaaagcaagttgtaatctaaagaatcaacaagaaaaacattggaaatagaatggtcaggagatatagcaattttaccaagtcctttgaccaaaccttgatttccatccccgaatgtgatagctcgttggggatcttggtttttctcatatgaggagaacatccttttctccccggtcatgtggtttgtgcacccgctgtcgagtatccaacttgagcccncggatgcataaacctacaaaacaatattagttcttgac

SEQ ID NO: 68146 - DNA, 501 bp, Zea mays
  unsure (1)..(501): unsure at all n locations
ctaagctgantatgtngctctccaacatcagtgagagagcgtgctctacacgtttgtcgatctttatcgacccttattaggtaccaactgttggttgctaaaggttagagaccgaccgtcagtcgctaaatccttttgtagcaacggtcggttggtcgctaaaagtctagaaatttaacaacttatgattggtctctatagatgtcgtcngggactagcggtgggtcgctatagagcaaggatcactatcaaatcttatagcctgaacgtacttgtagatgttagtgactaaaaattaattaaaacaagtaaacattgatcgctaaattgtagtaaagaaaaaaagaattgtagatatgaaaaaaagaattatagataagataacgaattgtcaaagaagaattttaaggttttaaaccttgaatatatngactcatatctattgacttaaacatgaatgacataaccaactcgactacccttggtctttngtctattgcg

SEQ ID NO: 68147 - DNA, 477 bp, Zea mays
  unsure (1)..(477): unsure at all n locations
tctanagggagagcacattntaggattaacaaatgttcattntgagaaagacaggatttgtagcgcatgccaggcgggaaagcaagttggagtccatcatccacacaagaacatcatgacgaccgacaggccgcttgagctactccacatggatctattcggcccgattgcttacataagcatcggcgggagtaagtattgtcttgtaatagtggatgattattctcgcttcacttgggtattctttttgcaggaaaaatctcaaacccaagagaccttaaagggattcttgagacgggctcaaaatgagttcggcttgagaatcaagaaaattagaagcgacaacgggacggagttcaagaactctcanattgaaggcttccttgaggaggagggcatcaagcatgagttctcttctccctacacaccacaacaaaacggtgtagtggagaggaagaatcgaactctattggacat

SEQ ID NO: 68148 - DNA, 493 bp, Zea mays
  unsure (1)..(493): unsure at all n locations
actcagcttacaacagggntaatagcctcatgtgtttgcatttatttttcattntcaacaagaagattgtcatgatcaaatttcatttgagtatagtcttccttgatctttactagtctactttgcaactccctattagcttcatttaatttgacatatttttccttagcatcttttatggagtttgtgagctcatttacagttgatgacatagttttattttcttcttttatttcatcactagcctttataactatgtcatacttggcatttaaagattcattttaatttttcaacctatcacatttagcttttgactttctaatgatttgagtatattctttaagtaagtcagctaactcatcatatgaaggtgaagcaaattcttcatcactatcactatcactatcatcatcaatattaatatcattttgtacctttcgttcacccctagccatgaggcatangtgagaagtggatgatggcgatggcg

SEQ ID NO: 68149 - DNA, 507 bp, Zea mays
  unsure (1)..(507): unsure at all n locations
acggacctataaaactcagctactcctcctgngaagggccgctcatcatcgccaatattttgaagcccgggacatacaagctggccaacaatcaaggcaaggtctacagcaacgcttggaacatcgaacagctacgtcgcttttatccttaaaatgtttcaagtcgttcatgtatctcgctttctttacatgcataaataaagtctaaccatcaaggaaggatcagccttgcctcggcaaagcccgaccctccctcgggggctagaaggggggaaccccctctgcatcaaaattttcctcagaaaagttttctatcaaaacgactttcgtgcttttcgactatatcgataacggaatcctaaaaacgacgagaggaacacgtaaacggcaaggccgatcgagccgagggactcctacgcctccgggatacggatacctcactcatcaccttccgtganaagtaactcacgctcgaataagcgattctgctaccgaacaagtcctaat

SEQ ID NO: 68150 - DNA, 473 bp, Zea mays
  unsure (1)..(473): unsure at all n locations
ggtgctcctagactcaatagaagtagaacatagatctctgtattgaacgaaccanaatcttggaaaatataaaccctctgacttcttgactgaggtcctctgttttaggatcttctagaggaacacctgaaaaggaaagaaataacagtgcttaatcagtggattgcagggctccgtcagccagagaaataatattttgtacttaaataaactatttcacagaaaggagtagactgtagggtttttccctttctgctcgctgcatttccacgcaatacatatttacttgttaactcgatactgatttttcattttcagaaagaactaaacagaaaccaatgtgctgtctggtgcaaagaaaacagctagtcgaattacccttctttatagcagtgtcatccatagctctgtattccatgttntntanggcaagctccaccccataaccactcaaggtgactgcatctacagca

SEQ ID NO: 68151 - DNA, 438 bp, Zea mays
  unsure (1)..(438): unsure at all n locations
cttcttgaatctgtaagggtaaatgcatcaaaagtttataacatgttttcttaagngnngagnctatgatgagcatcgcgtttatattatgacatattgcacttcacaaattctatgatatagatatgttctcattgacctcattatgtgcatttggcatttaaggccaaaatatgtattcctctcaaggcacatatttagggggagcaattctctacacattaaatccttgagactaaccattcttcaagtatatgttgtgcttagtctcaaattgaaagggaaatggagttttgagcaaagggagcgcttccacttcatattcgttcggtatcaatcacccttgctaaaactcatgtacttcaattacatatctatattgaaaaaggctcacaatttccccatttggtgcttaatgccaaaggtggagaaagcatt

SEQ ID NO: 68152 - DNA, 456 bp, Zea mays
  unsure (1)..(456): unsure at all n locations
ntggctggattggttacagagagagacacaagaatctcttcttgattatagctcaacctgacggttctgagttcagtgttgagaattgccttgtgttgggttaaccaattcatacccaaaattacatctatatcctgacctttcagaacaatcatgttagcaggaaagttccgtccggccattgttactggcacttcataggccacttctctagtaaaaatgtgtcccccaggtgaatgaattttaaatccctcttttgattcatggcatgcaatatgatgttgctccacaaatttcttactaatgaatgtatgcgaagctccagaatcaaaaagaataattgcagggtgactggccacgggaaacgtacccatcatcaccggctctccttccggtgtagtggccacttgggtgtaatatacacgccccgtcttctttgtatttttccccacagta

SEQ ID NO: 68153 - DNA, 462 bp, Zea mays
  unsure (1)..(462): unsure at all n locations
ggtgaaggttcttcatccncacatgtgctaagcggcgatgccacagccagcccatgctagtcttagctattaagcatgcatctagaccggcctcttcttttgcaaaatcaactaaataaagtttgccgtctaatacacccttaaaagctagtgaaccatcacttcttctaaagacagacacatctacatttgtaaatagacagttatatcccatatgacataattgactaacagatagtaaattatatccaagactctctactaaaaatacattagagatagaatgctcattagaaattgcaattttacctaatccttttaccttgccttgattcccatcaccgaatataattgaatcttgggaatccttattcttgacgtaggaagtgaacatcttcttctcccccgtcatatggtttgtgcatccgctgtcgataatccagcttgaacccccggatgcat

SEQ ID NO: 68154 - DNA, 493 bp, Zea mays
  unsure (1)..(493): unsure at all n locations
tgacaatgaggagatggcgctcgtcatcaagagcttccgtttatcctcaaacaaaggagggggaaagactacaagtcccgctccaagaaggtttgctacaaatgtggtaagcccggtcattttattgctaaatgtcctatgtctagtgacagtgaccgaggcgacgacaagaaggggagaagaaaggagaaaaagaggtactacaggaagaagggcggcgatgcccatgtttgtcgcgagtgggactccgacgagagctcaagcgactcctccgacgacgaggacgccgccaacatcgccgtcaccaagggacttctcttccccaacgtcggccacaagtgcctcatggcaaaggacggcaaanagaagaaggttaaatccaactcctccactaaatatgaatcgtctagtgatgataatgctagtgatgaggaggataatttgtgtattctctttgccaatcttaacatggagcanaaagaanaactaaatg

SEQ ID NO: 68155 - DNA, 410 bp, Zea mays
tgctcacaccttcggcgctgtatcaaccttcgtattattcttgtctgctgcgataccgacttgagtctgaagatgcctgctcacacattaaactgcagaaatactgttaaatactgtttttgaggaccttcgtgagccgaatgcccgcaacagtatcctctcgcaatattaatttgtataaaacaataaatttatattgcgacatggactaaggctttacgccgaatgatctaaaaaacaccttccctttgctacaatagcaacattcactgacaagcggtgtctttcaattctcaacgcactaggcgtataaatacggtcataccgcaaactcatgttgcacactctcttgccatctgctctcgctgactagatatttagctgttgcgcactaagatgtgctgagcttt

SEQ ID NO: 68156 - DNA, 470 bp, Zea mays
  unsure (1)..(470): unsure at all n locations
atactaagcttaaccatctccgttggtaagccttacacttcacgtgagctcctttcttttgcgagttcatgcacattattccccacaacttgttgagcgatgaacgtatgtgagctcactcttgttgtctcacaccccccccccacaggtcaagaacaggtaccgcangatgaggcgcgtgaaggatgctgcgatgtgttcgtgagaggtctangtcgtcgtctcccagtcaactttgggttgctggaccgctgtctccttataatgtaattatttacttattttgtatagaactcctgttatgtagtaaagatgtgacattcgatcctgtgccatgattcatcatatgtgtgagacttggtcccagcacacctggtgattatgtttacgcccgggctttggacccctaaaacccgggtgttacacccgaggaagttatcgggaattttgtgagctntgaatgcatgatc

SEQ ID NO: 68157 - DNA, 492 bp, Zea mays
  unsure (1)..(492): unsure at all n locations
ntatcanatggacgtgaagagtgccttcctcaatggaccaatctttgatgaggttnatgtngagcaacctcccggctttgaagatagtgagtatcctaaccatgtctataggctctctaaggcgctntatgggctcaagcaagccccaagagcatggtatgaatgccttatagatttccttattgctaatggcttcaaagttggcaaagccgatcctactttattcaccaaaacacttgataatgatttgtttgtatgccaaatttatgttgatgatattatatttgggtctactaacaaatctacatgtgaagaatttagtaggatcatgacacagaaattcgagatgtctatgatgggggagttgaagtattttctatgatgtcaagtcaaacaactccaagagggcacattcatttgccaaacaaagtatactcaagacattctaagcaagtttggaatgaaggatgccaagcccatcaagactcccat

SEQ ID NO: 68158 - DNA, 393 bp, Zea mays
  unsure (1)..(393): unsure at all n locations
ncgtattacaaaccacttgagataaatgacctttttctcttaggtctgagtcaatgttgtaaacttttataaggggcatacttgtaatccctcacaggctgcgccctgtgcctataaatagtgaacattattcctttactgttcacggattctggtaactgcaatcgcatattctggaattcaaccttttgtcaaggcagaggtattattgtattcaatgattggatatattaagaaatataatataattcgtctatgacttgnttacctctattgtatctctcattttatgtcatcttgcaatatctattggaatgttattacgaagatctaagcttcgtaagttgactgtcatcaaccttcgtccaagatacattatcctcaacggaataa

SEQ ID NO: 68159 - DNA, 483 bp, Zea mays
  unsure (1)..(483): unsure at all n locations
tatgaagattcttatcccacatgggctagtcggttgtgccagagccaacccatgttagtcttagcaattaagcatgtgtcgagttcagctctatcaaaatctactaagtatagctgaccctctaacacacccttaaatgctattgaatcatcacttcttctaaagacagtgacacctacatcagtaaagagacagttgtagcccattttgcataattgagatacataaagcaaattgtaatctaatgaatctacaagaaaaacattggaaatagaatggtcaggagatatagcaattntacccaatcctttgaccaaaccttggtttccatccccgaatgtgatcgctcgttggggatcttggtttttctcgtaggaggaggacatctttttctcccctgtcatgtggttggtgcacccgctgtcgagtatccaacttgagcccncggatgcataaacctacaaaacaagtntagttcttgac

SEQ ID NO: 68160 - DNA, 471 bp, Zea mays
  unsure (1)..(471): unsure at all n locations
ggagcatgaccgccttatcttcttggtttaggcgagcgtatatttgcacaaagcttctntcttcctcctcatcctcatttgtgcttccgctatcatttgcattagccacacaacacatgtgggaatcgaaatgggaagacaaaccttttggagaggtggattcatcgtttggtctccaccgttcattntcttcttcttccttgcaagggttagtatcacaaataccaaaggaagtagaagcacaaaatgaactatcatgtttggacttattaaatttgcttttaattctagtccaaatatcatgcacatcacaaatgggtttgtcatattttattatgaaggcatgataatcttctttgctaagggatntacttaagatgtcataggctagatagtttaagcgaatacatcttanatcttcttcggaggcattttccctagcatagttaggaggaataatactcttgtcta

SEQ ID NO: 68161 - DNA, 471 bp, Zea mays
  unsure (1)..(471): unsure at all n locations
cgacaatgaggagatggcgctcgtcatcaagagcttccgctcatattctcaaacaaagaagggggaaagaatacatgtcccgctccaagaaggcttgctacaaatgtggtaagcccggtcatcttattgctaaatgtcctatgtctagtgacagtgaccgaggcgacgacaagaaggggagaagaaaggagaagaaaaggtactacaagaagaatggcggcgatgcccatgtttgtcgggaatgggattccgacgaaagctctagcgactcctccgacgacgaggacgccgccaacatcgccgtcaccaagggactcctcttcccaaacgtctgccacaagtgcctcatggcaaaggacggcaaaaagaagaaggtaaatctaactcctacactaaatatgaatactctagtgatgataatgctagtgatgaggaggataatntgcgttccctctttgccaaccttaacat

SEQ ID NO: 68162 - DNA, 471 bp, Zea mays
  unsure (1)..(471): unsure at all n locations
ntaccctgcaatctgngctataagttggntacgttatgtgtgctntatgcagtttgaccatttccagcatttgcgtaatgaggactctagggagaagcctcgtagtgagaccctggccattcacctcggaagtgaatacgggtctagcgaacccaggctagaagggaatcgtgactcatgggtaatgatgcgccacctctgcagagtgtaaaactgatatatcagccgtgctcacggttaagagcagcctagactccacacatgataattgaacttgaagatggaaataaatcgagatccgatgatatgccaatggtttgcttaagtggtttcacttaagtggttttgatatactctattacacctttatgtaatgggaatgcttgagatttacacttattagtaagacaggtggttgtaaaataatgttgaccaactaanatgcttactgctcaaacctagcctcacctt

SEQ ID NO: 68163 - DNA, 472 bp, Zea mays
  unsure (1)..(472): unsure at all n locations
tcgacttcgntggttatccattgaatgacttcatcatgatttccacgaataaatttctgctgggaggaatatgctccaactttagagctgatctttaaatttctagcgcattccatggatatttgataacattttcctttggcggcacgaagctcatcgacattcttttgcgctcttgacctttcaatttcacatatttcatgcttcaccacttcaacattgaagttctcagttgcttcgtcaactttcttctttagctcttgcattttggcttcatgagctttggcttgagcagtaagcctggcttccctagatttcaattttttcactaaggagagtaggatcttatccttctaaagagcttcatttcttaatgtaataacttctaaacgaaggtttccaagcgctattcggcagctctcatcctgtgcatctttctgggctntcaaagccttgcttatnatcaagccct

SEQ ID NO: 68164 - DNA, 403 bp, Zea mays
  unsure (1)..(403): unsure at all n locations
ntgttcctatccacacaggaccatgaggaatatttgcatgcgtatgtccgaaggtttctgcgtctcagagtgtaagcgccaacggtgccaaatgagattgttattgaagctatgatcaagggacttcgaccaggaccaacaacacaatatttcgctaggaagcccccacaaactttggagaagcttctacagaagatggacgagtacatcagggccgataatgactttcggcagagaagagaagaagcctacatatactctgagatgaccaggggcttcggagggagactccaccctatgcatgtcaggacgatccaaaatcctagctcaagcgacgacaggggaaatcatactctatggcatcagcacagcgcccaatcatcatggacacaacatagctcct

SEQ ID NO: 68165 - DNA, 496 bp, Zea mays
  unsure (1)..(496): unsure at all n locations
tactaagcttntcgataagggatgatggacacagtgcgccgcgcagcttggtcgctctgtttgacaatggactggacaggcacggcgtctgtaggaaggccctggcaccgcctgccagcggagtgaacaggacgcaacaaatgctgagggggcacatcgcatgtcagcagggtggtcaggcagcgcgtcctttccataataaatgtagagaccgcgcggcctagtggccatacatcaggctccgctcgctggcttacatcacgggcaacaagccacgcggcagcatcgggtctccgcctgagcggtgagcccgagcacacaggataaggtctggacatgtgtcagtaccggacccctacttacgccagggtatcccctgtcctgggacctcgttgtggtccggaccttactcggagggatctggaccccatccaagggacccggcatgcttacttgggagtcccagaccgtaatcggtggtccgggctatgcatac

SEQ ID NO: 68166 - DNA, 491 bp, Zea mays
  unsure (1)..(491): unsure at all n locations
tctntcttacttctcatcctcatttgtgcttgcgctatcatttgttttagccacacaacacatgtgggaatcaaaatgggaagacaaaccttttggagaggtggattcattgtttggtctccaccgttcattttcttcttcttccttgcaagggttagtatcacaaatactaaaggaagtagaagcacaaaatgaactatcatgtttggacttaataaatttgcttttaattctagtccaaatatcatgcatatcacaaatgggtttgtcatattttattatgaaggcatgataatcttctttgctaagggatttacttaagatgtcataagctagaatagttaagcgtatacatcttaaatcttcttcggaggcattttccctagtatagttaggaggaagtaatactctcgtctaaaattgttctaattgtgggtctaccgctctaaaagcatttatcactttagtagaccatgaatcataattagaac

SEQ ID NO: 68167 - DNA, 471 bp, Zea mays
  unsure (1)..(471): unsure at all n locations
tatgctgctntacttaagcaaaagttggcttctgcccagatcagaatgaaaatacaggctggcaagaagtggactgatagagaattccaagttggtgaatntgtgttggtaaaacttcagccatatgtgcgaactacagttattagtcgaccttgccctaaattggctntgaaatattttggtcctttcaagattcttcagaagattggattggtggcttacaaacgggaacttccaccttcctcccaaattcacccagtgttccatgtttcacaactcaaggctcttactcctactcctgcgtattcagacttgactcagattgcggacttgtctggagtggatgtgaaacctatgaagatactggaaaggaggttggtgcgtcgtggcaatcatccagctgtccaagtgaaagtgttgtggtctcattttgctgatgcagtgactacatgggaggactatgatgtgctc

SEQ ID NO: 68168 - DNA, 423 bp, Zea mays
  unsure (1)..(423): unsure at all n locations
ttagtacttanattcttatttactatgccattgttggttcttgagatatgcatgtggtactacacttagggggagtattcaaaactcaaattgttcataaaaacctctagtgcaaagccaaaatgcaaatctcaccatttgactattttctctaaaaattaactagcctatggcaaaatactttgaaaattatggaaaaatatatgagggtgccaatacctgtcccaacaggtgttcttttgtgtgattataagttaggatttggtttggttaaaaactagatagaaaatttgaaaaaaaaaatcaaagttccctctgtctgggctcacccaacagtccggtgcactgtgacggtgcaccggtcgcgcgcgcgcagatcccctttctgttgtgcgctgtccggtggttcaccggatagctact

SEQ ID NO: 68169 - DNA, 421 bp, Zea mays
  unsure (1)..(421): unsure at all n locations
ntaactctcgcgagaccttttgccatttctttctttcttggtganggcattatcgnatgtgatattctatgcatgttcactttatttattcccttgtatggagtactgtttgcttcctaatttgaatggatgaatgtatgtatgcttgcaatcgcatagagaacgatccggttgaagagcccgaggaactcgcacgagaagcccttgagcaccagtcggttggtggaggcaagtgtcccttgacctatctctgtcctattcattctttaattcacctcccgctttacacatttatgcctaaggattgactagctctggttatacatatacttgtttacctattcgggttggattattattgtttagctttatgctattgctcanactctaatcaatgaacatgatgagattatctatgata

SEQ ID NO: 68170 - DNA, 489 bp, Zea mays
  unsure (1)..(489): unsure at all n locations
ngacagatgatccgaagctcagataatccgaagctctatgatgttaaagctgaagaccttgctgaaaaagttctagagaaaatcttgcaatatcgttgtaaaaatatttgtaatttaagaatcaaatactaattctgtaaatttgtacataccttgtaatatatttttaccttttcgtccatgtatgaattgctttgatgtggacaaaactagtattttttgagccaaaggcgaaaaacaccttcccttcttttcgtacacaatgaagcataaaactacttctttttctttttagccgaagccttatctttatagccgaagcatatgcctgtgtctgtatgttatgatgatgatgatgatcctatgtatgtctaaatgcatgtttatgtatgcaatgtatgatgtaatgtatcgtgcanatgaatgcccgaacacacatccgaagcttcatgcacaaccttcattccctaaggaatgactganatctct

SEQ ID NO: 68171 - DNA, 419 bp, Zea mays
  unsure (1)..(419): unsure at all n locations
tttggtacctacggctaaagcataccacgacaaatgttaatctggagacaattgttaagacaagcagatattcattagtaaaaaaggacctttggctaaggcacacccccaacaatagcccatcatggaattagtttgttttccataacgagcttagactgcagaaacaacgaagggcttatgccgaaggtccaaacaacaccttccctgagcatgttattgaaaacagaataatacaaatataagcggcccacaaggttgtgagttgggctaagcggctcctcggcttctacatcaacatgtctatataagactgctggcccaagtaattagcacgacatttactgcttgaaccaaactgctaccaccacattatctgcctccaaaggtcgcataacattctttctttntacgagctt

SEQ ID NO: 68172 - DNA, 488 bp, Zea mays
tcacgcgtgagggacgacgttggagactcgtcctttaaaaggtagagatagagaaatagagtattttaaaaagaaaaaagcactataattgcatatccgaagttctattaggcacgacagtggaaactcatcctttaagggcttgttcggttctaccacaatccatatggattgagggggattgatgggggtttcaatcccagtaagtcaaaatcccctccaatccgtatcaatcccctccaatccatatggattgaaaataaccgaacaggccctaaaggagtaaagaaataaactaatttttaaaaagaaaaagcactattattacatttccgaagttttattattataggaaatatttggttcttgactaactatactacagcttagaggtgttaaatgcactagagctagctgttagcggttaaaattacgcggagacattcaagcactatagctaatagttcaattactagttattcttaata

SEQ ID NO: 68173 - DNA, 483 bp, Zea mays
  unsure (1)..(483): unsure at all n locations
tctgccatgacgtgattgttcggttgtccctagttggagagaagagtaccatgtatgggccacactntggactgccatgacgaaggacttcgccatgactgcggtattgcccccgtccgaagatatagttgcttcatagctcatcagaaactgcttcggatctgagtgcccatcatacgtggggagctgaggtggcttgtatgatggagaccatggggtagcctacagttctgctgatagaggagaagcatcatcaaaagaaaattttccgtgatggaaatcgtcataccaatcatcatcattgtaggaatggtcctgacgaagctctccttgtggaggtcttcggtcctggtcatcttgagtgagatgacgtatttcttcagcagcttcatcgatcttcttctgtagatcggaaagacgaagcattntctctcttttcctttcgacccgttgatggatagcttcaagatcccttatctcatg

SEQ ID NO: 68174 - DNA, 444 bp, Zea mays
  unsure (1)..(444): unsure at all n locations
ntattgtgaccaacaattctatttaatctatttatagatctagttgactggaatacaaatcaacttacccttatgacatccgacttgaaaccgtgaaatcgacgacgcctttcagctgagcattttaccgaaaatagggtgagtgctgcgtcgaatcgcacttcatctttatctgcatcgagtattctccgaccacgtactgatttattttcttctgcgcctaatcttctcagagcttggcgtagacgaggatgacgatcgacgacttgtttgagcttttgtcgagcacttggtgaatatcaccctgctagcttcgtcttcacccgattcttgnggtttcttggggatgcacgaacgacgacgaccttcgattgaagtcttcgaccgagcacttgataagcgatgcacagggaccttgcttatttntgcctaacgtttgggatt

SEQ ID NO: 68175 - DNA, 426 bp, Zea mays
  unsure (1)..(426): unsure at all n locations
aatatttccaccaggtttcttcaatctgatgcaacatctacttgttcacctaccatatgaagctaaggtaggaggtcctgtgcaatatagatggatgtatcacatcgaaaggacactaaagaagctacgtgcaatggttggtaataagagacgagttgaagggtgcatcgctgaagaattcaaatacaaagagatagcatcgttcatgggcatgtancttgtagaggaacataatgtcaatgcccctacgttgcggtatcatgtcgacgagccccctatcagtgatattgagatttttcaatggaggggcaaaactgtaggacccagcacaacatactgtttcaccaatgtcgaatggaagactgctttactctacatgtataacaacatggaagagatgaagcagtttctcatgtaagtgtaaac

SEQ ID NO: 68176 - DNA, 340 bp, Zea mays
aaatcagtgcttagccaaatctagaaaccacaaccactctaacgctgactcatatggtagatccatcacaccaatggtgctaccatcagtaaaataatagaatcaatttgttgttccttactgatacagtacccttcgaataattgtttataagacaatgaacttgctgcccaatgtattatagtcttggtcagtctaaacatttaccttagtctccttcactcccgcgccgctctgacctcatacccggcctcgctatcctctcctttatactacgtcggtcctccaactacaccagtggtcgcgacattcatagtatttccacaccatgcatactcat

SEQ ID NO: 68177 - DNA, 491 bp, Zea mays
  unsure (1)..(491): unsure at all n locations
agcttaaagccatggtaagtagcataggcaagttatatgctaattgactcaagcctagctacgggtgcataggtttcaccgaaatccaaaccttcgacttgtgaataccccttggctacaattcgagctttgttacttgtcaccacaccatgctcatcttgctttttgcggaagacccacttggttcctacaacattttgattaggacgtggaactaaatgccatacctcgttcctagtgaaatngttgagctcctcttgcattgccaccacccaatccgaatcttgtagtgcttcctctaccctgtgtggctcaatagaggaaacaaaagagtaatgctcataaaaatgtgcaacatgagatctagttgttacccncttatgaatgtcgccgaggatggtgtcgacggggtgatctcgttggattgcttggtggactctggggtgangcngnctgggaacttgtcatcttcctcatcttgatcatgggca

SEQ ID NO: 68178 - DNA, 431 bp, Zea mays
  unsure (1)..(431): unsure at all n locations
gcctcatgtgtntngcaagataaaagttcattctctacaagaagaatgtcatgatcaaatttgaattgagtatagtcttccttgatcttaactagtctattgtgcaactccctattagcttcatttaatttgtcatatttttccttagcatcttttaaggagtttgtgagctcatttacagttgatgacatagttttattttcttcttttatttcatcactagcctttataactatgtcatacttggcatttaaagattcattttcatttttcaacctatcacatttagcttttgactgtctaatgatttgagtatattctctaagtaagtcagctaactcatcatatgaaggtgaagcaaattcttcatcactatcactatcactatcatcatcaatattaatatcattntgtacctgtcgttcaccctt

SEQ ID NO: 68179 - DNA, 447 bp, Zea mays
  unsure (1)..(447): unsure at all n locations
cactaacttggaaaaacctttaataaatcttctatagtatcctgccaatccaagaaaacttctgatcttggacacattctttgggtgcttccaatttaagatttcgcttatctttcctaggtccactttaattccaccatccgtaatgatatgccctaagaaagcaacttccttcaaccaaaaatcacacttcgagaactttgcgtataagttgttggcacgaagcttttgaggaactagcctagatgatcttcatgtggttcttcattcggagagtatatcaatatgtcgtcaatgaatacgaccacaaactgatccagatattccatgaatactntattcatcaagttcataaagtatgctggtgcattagtcagtccaaacgatatgaccaanaactcgtataatccatatctcgtcgtgaaggctatcttcggtacatcttct

SEQ ID NO: 68180 - DNA, 428 bp, Zea mays
  unsure (1)..(428): unsure at all n locations
atgtggcaccccgtccaatccctagatcttctgttcttactcctatcaactctctagaaccatatattgttcctcacagaccaacacgagtcttctgtgcgcactttgtactcactcatgcgcacccgataatacttctcggtcggacacccatcccaaatttctgcatgccaagcacgcttaacctggatgttctttccagatacgcttccgaaacagaagatgctncttgttgatatgatcactctattaattctattaagcctcgtgccatgatataccatcccaatggccatgatatcacagttaataaccccatgccctagcactatggatcatgataagtgaaaaccttctaataggggcctgacgatggcccatctaacacacaatctcatatggctcatggtcatacctacgacatatca

SEQ ID NO: 68181 - DNA, 455 bp, Zea mays
  unsure (1)..(455): unsure at all n locations
agcttgcacctagtcgcaccagcataccaaattaaatttcttctgaagtggtagtttgtgtgcggctggtcgttgacatatattagatacccttgctgatcccattcatcaatataatcacggtggtgggtctcgaagtccgtgaccttctgcctctgtctgtcgaacctgcaaaagttagacacatatattagtaactcattgcatatttgaaataatagttagaataacaagtggaccaagtcactcacttgtgaaagtctattgaaggtgagaaggggctcaccgaaactcctgtcgcaatccgaactatcgagccactctgtggggcaagtggtactcaacaacataaaaacaaatgaggggacacctcattaggtagatgttcttgtctattgagcacacgctgcttgtcggcgtttcgaccccggngggtccctggaccgacgagtaaa

SEQ ID NO: 68182 - DNA, 321 bp, Zea mays
accctttagcttaccgatgatggtatacttgcctttgcctttatcgactgtatatggccgaatcaggactgtcttgacctcgaattcaatcatgctcattgtaaatggctctgtatccacctgcatttcctgaaatttaatcgtccttcgttaatggccgattgaatctgtcgtcgaaatacattacaatcattagtggcatgagaaaatgaattatgccatttacagtacgcacgacgttttatctcgacggtggatggaacagtgggatttattttagtaattgcattcttgagtaattcgtcatatattctatcacac

SEQ ID NO: 68183 - DNA, 309 bp, Zea mays
gatctctaagtcacctgcggcatgcaagctggtgccatggagaagcagaaatccttgaagtcttggctgtcaaactgcttggcgttgtcaaccgtgagttcggacggtactccgaagcggcaaacaatgttttgccagaagaatttctgtgtagtctttgatgttactgtggaaacagcccttgcctcgatccatttggtaaaatactcgacagcgacgaaggtgaacttgaggttcccctgagccgtgggcaggggccctacgatgtcaggccccagcgctggagggccatgtgtgggcgatcagttt

SEQ ID NO: 68184 - DNA, 410 bp, Zea mays
  unsure (1)..(410): unsure at all n locations
agcttaccacatttgaagcatgagcgcttcctcttgtgtttggtcttgcttggctgccccttgcgcccctttagcgccatcttgaatcttttgatgatgagggccatctcttcatcattaagtccggccgcctcaacttgcgccaccttgctcggtagcacctccttgctcctcgttgccttgagagcaatgggttgaggctcatgaataggaccgttcaacgcgtcgtccacgtatctcgcctccttgatcatcattcgcccgcttacgaacttcccaagaacttctttgggcgacatcttggtgtacctaggattntcacgaatattgttcaccaaatgaggatcaagaacggtaaaggaccttagcattaggcggacgacgtcgtggtccgtccatcgcgtgctccc

SEQ ID NO: 68185 - DNA, 301 bp, Zea mays
  unsure (1)..(301): unsure at all n locations
ctcaagaacatatgatgatgtcaatggacaacacggtgttaatgatgataaacacactatcaaaactcccccttattcattaaaaatatgcactaccaacatttgagtaagatacatatacgcaaaaagatcaataacttcttttgtacctttatccatgtgtggtgtacttcccatcttgaaagcattaatctctcgggagcttctccacacttgtgcctgattcttatcctaaccaatntcttaacttacagaggtacccaatgtctgattctccatttcttgctcatctctctttttc

SEQ ID NO: 68186 - DNA, 361 bp, Zea mays
  unsure (1)..(361): unsure at all n locations
gcttgtgaagattcttcattctaacatgggctatttggcgatgccagagccaacccatattagtcttagcaattaagcaagtatcgagttcagctttattaaaatcaactaagtatagctgaccctctaatactcccttaaatgctactgaatcatcacttcttctaaagacaataacacctatatccggaaaaagacagttgtagcccattttacataattgagaaacagaaagcaaantgtaatctaaagaatctacaagaaaaacattggaaatggaatggtaggtgatatagcaattttaccaagtcctttgaccaaaccttgatttccatccccgaatgtgatagctctttgggga

SEQ ID NO: 68187 - DNA, 501 bp, Zea mays
  unsure (1)..(501): unsure at all n locations
agctngctctatagtgggagacgccctgtcattttgatggcattggattccaaaagggggacaatgttaaacttaatgcccctcctaaaagattgtttaattntgtaaagggcaaggctcccatgcctcaggataacgagggttacattntataccctgccggttatcccgagagcaaaattaggagaattcattctaggaagtctcactctggccctaatcatgcttttatgtataagggtgagacatctagctctaggcaatcaacccgtgctaaattgcctagaaagaaaactcctattgcatcaaatgatcataatatttcatttaaaacttttgatgcatgctatgttntaactaacaaatccggcaaggtagttgccaaatatgttagggacaaacacaagggctccaagacttgtgtttggtacccaaagttcttgatctaatgccaaaggacccacaactggttgngtacctaanatcaagaactgaacttgt

SEQ ID NO: 68188 - DNA, 366 bp, Zea mays
  unsure (1)..(366): unsure at all n locations
cttaagncacctgcggcatgcaagcttgacatatgacttacaaaagcgacattgtttatattgtctnctatattaatcatcgtgacaacagaatcttgtgaacatcttcttccagcctcgatcaacttctgccttcgccttgccgtattattgtgaccaagctaatgcctttatccttttcttgatctatcctgaaggtaactagcgccgaagcacctgcaacacctagagatgtgtcgagaaacaaaggttaactgtgtttttgaggactttacgaagacgaatgcctccaacagttattattggcatcccaaagggattacatgatttagaccnttgcatgtgcgtaacatgtgtttgatatta

SEQ ID NO: 68189 - DNA, 221 bp, Zea mays
actcattatggctgatttcgcccttgtaatttgccaaaaacaatcttgtaccggctcgcactctttttctcccggagggtgaggtttttaacgaagcggagccatgtaatatatgtgtgaaaaatgccccgcaaaaacatgcgtcgaaaaagactggacgacggtcttcgacattcgaccaataccatgtcccgcgaggctatcgctatccaccctccgtg

SEQ ID NO: 68190 - DNA, 502 bp, Zea mays
  unsure (1)..(502): unsure at all n locations
agcttgaaatattcagtctatgaactcatgtttagcgaagatttatctcatgcaagatctaattagaataaaagaacactttgagagaagaggtagatcagtagtgaccttatagccatgtggtggaggaatcaagcaattaaaatgcctttcagtcgatcctactagacagattgctacggccagaattgtccacgtattttggacagcctgagagtttcaattgtaggactcattaacagtaaatgcatacttaatggcttatagacatccacagaaaaaaaaggacagtaccttgtgaaggtggaaagacatatccccaacctcaacggtgacatcgctaggaagtcctgttgtgcataacctanaaggttcacaagcagaaaaacaatcgaaattcagataaatntgtatattcagtaagaactggaaaatgagactccttatggtaaanaacaatgatgggtggccacctagtggttaatgtcaatttcaaattatt

SEQ ID NO: 68191 - DNA, 270 bp, Zea mays
  unsure (1)..(270): unsure at all n locations
caagaagtcttcttctccactgccattaaatattaacgcccactttggatatttcagtttttgggcataatgctgggcctcttgttcttctttttctgataattttttccccgaagcatgacgaanaatataatcacgaattttgggggatgcttcgggggcaacaacactagtttcttcaaaagttggcttttgtattttctctgcctcacttttcaaagtttntgcgggctctgaaggcccaacttcngcttcaatctcttgctctgg

SEQ ID NO: 68192 - DNA, 461 bp, Zea mays
  unsure (1)..(461): unsure at all n locations
tgcggcatgcaagcttcggtcctgttaaacctccaatggcacttgcccgggctctggtcctgtgaaggctgcaacccacgagcgcgaggacatattggagatggaaggtggtgagctacgcaccaatgcgcacgcatggtcgtgggcctgctcgatgtctgcgcgggtggagctgcgggagtggcgagtggcgacgacacaacgaggcgcacaggatatcatccttgtcttggtggcgttagcttcgtactggacgtagggcgcaggctttccgtgtggctcggacatgagatttggagtggagagtgtttccatggactgggccgctgtgaggcttcttcttgaatgaanaatccattcngtctctcttccttttaaaagttcanactgctacgtgtngcttgacagaaagtagtacatatgcaaaanaatagcgtattattatcaatgatgaatactat

SEQ ID NO: 68193 - DNA, 214 bp, Zea mays
  unsure (1)..(214): unsure at all n locations
tatactnttattatctttgcattttcatgagcattacatgaacattcatgaatatatatggctatatatatatatagagaaaatgatgaagagatagaagtngaagaagcaaggactacaaccaccgcaccttgagaacctctgcaggaaaattgcttttacttgacatctgttgagcagagcctgactcacctatcacacaacgcatgccccg

SEQ ID NO: 68194 - DNA, 458 bp, Zea mays
  unsure (1)..(458): unsure at all n locations
caagttcttccatttattggctgaatgcccttgtgtcaaagcatcccatgcatattaacttgcacttactgaataaggggatataccttattacaattccacgtctaaattaatgacactgaatgaattttggtttatgtgcatatctgacagctgtttttgttacagcatataaaatggacttgaatgcatcactcttcttagaaacgtaaaacttgactaccatcaaacactttctaactctgccttgagggaagcatagcacgattgaaaggacaatgcaaacaccaaacacaaagggccagaaaagaagtcctcaacgaaatgtttgagtttctgtgaattgatcgatatgcatcctagagtntgtngaaaaagatacgtgccattatatttcccanagttctcaatctatcatgcctacaagtctagctgcatatgcatncttagccacttac

SEQ ID NO: 68195 - DNA, 371 bp, Zea mays
  unsure (1)..(371): unsure at all n locations
tgctggagtagctggtttgttcagcgaanaaggcttccaccctagtgggtggagggattgtgggattcatctatgattctagattaactgttgtccttgttcgaccatctatggttagagatagataggtaagatagatttgcagataagacaaatagttaggtacaagacacatgacttttaggttgagatcttttgggtcacaatagctcaattgggtaaagtaatcctaccaatcattattgcactacttctatgttggtacatgctataatgtacctactatactaggttttattgtggatataatcccacaaatatttcaatcaatcaaagaagtgaatcaaacagttatcataagaacaatcatt

SEQ ID NO: 68196 - DNA, 402 bp, Zea mays
  unsure (1)..(402): unsure at all n locations
cttcatccccacatgtgctaagtcggtatgccacagccagcccatgctagtcttagcaattaagcatgcatctagaccagcctcctcttttgcaaaatcaactaaataaagtttgtcgtctagtacacccttaaaagctagtgaaccatcgcttcttctaaagacagacacatctacatttgtgaataaacagttatatcccatattacacagttgactcacagacaacaagttatatccaagcgactcaactaagaacacattagaaatagagtgctcggatgaaatagcaatttttcctaaccctttcaccttgccttggttcccatcaccggatatgattgaatcttggggatccttgttcttgacgtaggaagagaatatcctctnttcctccgtcat

SEQ ID NO: 68197 - DNA, 390 bp, Zea mays
  unsure (1)..(390): unsure at all n locations
ttcgaaaaagtagaccttggcagcttgtcagcggtaaacaagtgggaagtgctcatcacaacaagaacgtgatgactacatcaagacctctggagctattgcatatggacctcttcggacccgtcgcctaccttagcatcgggggaaagaagtatggtcttgttattggtgatgaattttcccgctttactttgggtattcttttgaggataaatctgaaacccaagggaccctcaagcgcttcctaaggagagctcaaaattaatttgagctcaaggtgaagaagataagtagcgacaacgagtccgagttcaagaaccttgcagtggaggagtttcttgaggaggaaggaatcaagcaagagttctncgctccctacacacccacagc

SEQ ID NO: 68198 - DNA, 303 bp, Zea mays
  unsure (1)..(303): unsure at all n locations
cgtgtgtaccaaatgaattcacgatgtgttcttatntatacgcctatggcgttgaaagttaaaatgccccgcttgtcagtgaatgttgctattctatcacagggaaggttgtttttcggaccttctgctcaaggccttcgtccatatcgcaatctgaatttattatttacaaattaatattgcgaggggctacttgtgggggccttcgtcctccgaatgtcctcataaacatgatttgacaatgttttccaagtgaattatatgaacaggtattttcggattcagaactatggatatggatca

SEQ ID NO: 68199 - DNA, 489 bp, Zea mays
  unsure (1)..(489): unsure at all n locations
ggcctatcggatctcgtgtcatggctctatcataacttcaccatatcattngatatatgggcaggaggctatgctaccaggggagattgccgctagctcaaggcgtgtggaattctagaattacctgaaggttgaagattatgccgctctgatgaacggtaacgtcaaggatctcatggaactaaggctttggtcattagaaagaattagagagaaccaaacttaggtgagccacgcatacaacaaaaaggtgagacagaaataatttctggctggaaatctagtatgggaagtagtattgccactcgaaaccaaagatgtgccatacggcaaatggtctccgaactggcatggaccctacagagtcgaacaggtcctaccagggaatgcatatatgctngaacaattaaatggngataaattctaggtggcggtcaacgaccaacacttgaagaagatntcctaagtatgtgggatggctaacagtga

SEQ ID NO: 68200 - DNA, 430 bp, Zea mays
  unsure (1)..(430): unsure at all n locations
ctatgctccctgcatacatgttctgactntcgaatgtgccactatgacatgatccgctcctgcaccgaatgttccctatgatccatcgcataacaccgtccaagcttcgacgtctttgtttatttcttcttcctgagcccctggcgtgcaatcagcaatgaagtctgctaacgcttgggactgaattgaggatctatgcacatagtcaatggtgaattcattaagttctgcagcccatttcccaatccttccaatagcttctctgttcctcataatgtcctttataggctgtgacgaatgaacaattatgcgatatgcttgaaaataatgccaaagctttctggatgccattaacacagcatatagcaccttctccaattcgtgtataattttctgtgatagacttaaaacttcggagacgaagtacact

SEQ ID NO: 68201 - DNA, 368 bp, Zea mays
  unsure (1)..(368): unsure at all n locations
tatggtgagctgtacttgtgttgcttaaacaataataccattttttcaataattttccctttatcccctgcatttatgcaccagataaatttggagctggtatggcaattgttaagaatgatatcagcgggcatatcacaggaagcaaatctttctgcaagaattctatcgtacggttatatcattcaaaggttatcttcccattctttctgctggtaaatagctgggcagctgatggtggcgttaatgttgtctttcagttatctatgctgtgataatcgatattggtagctattattactgatctgcctcttgcttggttcatntgtcacttctggagcccttggagttcaattctttttctttta

SEQ ID NO: 68202 - DNA, 479 bp, Zea mays
  unsure (1)..(479): unsure at all n locations
taatcaccgcagcatgcactgagacgaacaccgggcattctctcattccttgaaaaatgtcaagatttgtgattgtcagaggaagaaacaaacaaaaattcaacacctcctcaaaagcctaaccacgcctacactaaggtaacatccaatgaatgatcaagccacacttcacattaagaggtgtagtgaatgctttaaagaggggcacttgattaggtcatgtccctacattacaaatggcttgattattaacaaggatgatagactctgttttaaatgctccaagaatggacacttgcttagatcttgtccccatttaaaacaaaagggcatagggttagaaaagaaggtttttactaaccatgtagcacgcaacaaacaangaaagaagaaacttcataacttgaaaacgcctatgctacacgtgccgaaagaanggacatcaatgcaaagatttgcccattggtaaccactccact

SEQ ID NO: 68203 - DNA, 282 bp, Zea mays
catcttgggctacttgcagctcatgacgatgatgatccacgtctgacatagtgaagcggtggctcctctccaatatagtcaatgagttactatcgtcacggtataacctatccatattgtcatgagaggccacgagtactcgtttctcctcctacgaacaagaagcatcattcagcacccaatcaacaatatcatggcgaagtcaaccaatggagtttacctcatgcgccatccttttagagtcaagttgggcattgatggaggaattcatagaacgtgcac

SEQ ID NO: 68204 - DNA, 396 bp, Zea mays
  unsure (1)..(396): unsure at all n locations
agcttactaaagtgagtccttacttttatatttttatgccagantaaatattaatagactctgtttgcatctggtctaatttcaccatctcatcaatacaacatcatttttattcatgaggttcacatcctgacttaggttgtagggcagtgaccaagtcttcataaccgcgaaggtacgacgatccgaatcgattatactcagctgaggatctccaatcacacgacatatgtagcacttaacccttgcatatgtcaacccgccaccggtgttcttaagaccagatcaggttcacgcaaaccgagagcacagatacaccaccgtccagcctcttgccacggagggtacacgctactctcgccaccgctccacgcncatttcgtgttatcttattct

SEQ ID NO: 68205 - DNA, 83 bp, Zea mays
aaaaaaaaaaagaaaatatctgtccgcacttataaacccacgcggcacgcacagtttttttcaaaccaggggggagaggaaca

SEQ ID NO: 68206 - DNA, 457 bp, Zea mays
  unsure (1)..(457): unsure at all n locations
acatcaaccaaccaactatagtttatctttgggtggatggcaaaaagagtatttgacaattgacataacgatgcggtcaagtctttagtaatggacaatgaacattgattgtcaaacatatcctctaaaatcacttatttggtgcaagcgtgcaaccaaactattaagagcatccaatctagatccaaccattaagcatacctttttccaatatatgcaatacgtatgttttgaattgtcgaacaccacgtccacttgagtttgtgtccatagcatgaacgctctccagggagcagcggccaacaaatcaaaacaacataagggaactggatgtggtgatgatttntgggacaagataatagattaagttgcggaacaatatataaagaagctcgatgagacgacttatatatcaacggtattgaagacattgatggcgatcaatggacaatcctca

SEQ ID NO: 68207 - DNA, 495 bp, Zea mays
  unsure (1)..(495): unsure at all n locations
agtcacctgcggcatgcaagcttctaagggagncacatttaggactatttatgttcattttgagaaagacagggtttgtagcgcatgccaagcaagaaagcaagttggtgcccatcatccacacaagaacatcatgacgaccgacaggccgcttgacctactccacatggatctattcggcccgattgcttacataagcatcggcgggagtaagtattgtcttggaatagtggatgattattctcgcttcacttgggtgttctttttgcaggaaaaatctcanacccaagaaaccttaaagggattcttaagacgagcacaaaacgagttcggcttaaggatcaagaaaattagaagcgacaacgggacggagttcaagaactccaaaatcgaaggcttccttgaggaggagggcatcaagcatgagttctcttctccctacacgccacaacaaaatggtgtagtggaaaggaagaatagaactctatnggacat

SEQ ID NO: 68208 - DNA, 189 bp, Zea mays
  unsure (1)..(189): unsure at all n locations
accgtgttgttgacaacgtacaatttttattattaccttgngcagcctgtcatgcatgtgatcacgtgggatgagcgcatcacancatgaatatgatgaccacatcaagacccctggagctgcttcatatggacctcttctgacccggcgcctatctaagcatatgaggaagcaagtatggtttagata

SEQ ID NO: 68209 - DNA, 494 bp, Zea mays
  unsure (1)..(494): unsure at all n locations
agcttctaaagggagaaacacatttgggacttactaaatgttcatttgagaaagacaggatttgtagcgcatgttaggcagggaagcaagttggtgttcatcatccacacaaaacatcatgacgactgacaggccactcgagctcctacacatggacctattcggcccgatagcttacataaacatcggcgggagtaagtactgtctagttattgtggatgattattctcgcttcacttgggtgttctttntgcaggaaaaatctcatacccaagaaaccttaaagggattcttgagacgggctcaaaacgagttcggcttaaggatcaagaaaattagaagcgacaacggaacggagttcaagaactctcanattgaaggcttccttgaggaggagggcatcaagcatgagttctcttctccctacactccacaacanaatggtgtagtggagaggaagaatcanactctactggacaaggcaagaaccatgc

SEQ ID NO: 68210 - DNA, 362 bp, Zea mays
  unsure (1)..(362): unsure at all n locations
gcacaaggcttagtatgcacttcggaagtttcaataattttcttcggagttgtgcttgaagacttaattgtttccaaaacatccagcacattaaccatcctttntcttttcagtgtcactgctggacccttttggctctttgctgcctcaatttttgctgaaggacttaaaattnttgatgtctttgtttcttcagtcctcggttcttctattttttactgtgctggcacttcggccagctcttcgattnttggcagtggagttggttctttatcttctgtggccgaagaggtctcaccaataaactcatgcactatggccggttcaatataacgtggccggtgtgtgagaacctttacctt

SEQ ID NO: 68211 - DNA, 477 bp, Zea mays
  unsure (1)..(477): unsure at all n locations
agcttacatagacgaacagcgattactgttgtttcgtatcgtaggggatatacaaaatgatcataaacgtctagtgcatgcgcttgataagtctactacgacaaatctttcttcgcacgaggttgaatggagggaatacacacataattcatcggctacaggttggcacgaccagtcacaacccctttatgggatgccgatggacatgtaccctatgcaacgacagccctccacgcacatcngcgataaatttaccgatctgtgcatgtccggaccgtctgcacatgggcgcggaccgtccgggccagcggcagctgatcctaattttagaagcaaattaccgagacctgcacccaagccgtcacatgccgtacaaaccctagataacccattcggaccgtctgcgtatgacgccagacaacccgaatataatgtcggacggtccggccacatggctgaacagtccgcgcacggagt

SEQ ID NO: 68212 - DNA, 436 bp, Zea mays
  unsure (1)..(436): unsure at all n locations
gccacttgtgaagcttctgcttctaagcgcactttctggtcatcattagcatccattatggcatcatgattgatcgcgctctgagtgagatcagaaaacaggatgttaattcagaaaactgaatcaccgcataaaaaaatgttaggggtgagaaaaggatgcttacatgaatgccctgagcaccaaaaagactcttcaaaatgctcgattcttcgtctgcttggtcagagttatcatccactntactgttaccaccattagatggttcagcttcactggtgcttgacaaagccgaagcaatatgtacctgatcctgttgaccatcatttggaactccaacgttcacatctttggtacaatggccgaatatatttgacgtttcagttgaaccattcccttcatcatcttgtagtgtgaataaatccttcatgtctct

SEQ ID NO: 68213 - DNA, 488 bp, Zea mays
  unsure (1)..(488): unsure at all n locations
agcttatgaagattcttcattccaacatgagctattcggcggngccagagccaacccatgttagtcttagcaattaagcaagtgtcgagttcagctctatncaaaattaccaagtatagctgaccctctaacactcccttaaatgctattgaatcatcacttcttctaaagacagtgacacctacatcagtgaatagacagttgtagcccattttgcataattgagatacagaaagcaaattgtaatctaaagagtctacaagaaaaacattggaaatggaatggtcaggagatatagctattttaccaagacctttgaccagaccttgatttccatccncgaaagtggatagctcgtggggatcttggttttctcatatgaggagaacatcttcttctcccctgtcatgtggtttgtgcacccgctgtcgagtatccaacttgagcccccggatgcataaacctgcanaacaatnttagttcttgac

SEQ ID NO: 68214 - DNA, 300 bp, Zea mays
acagaacaggtgggtaattttcaaactacagatgctgaccttacactgcttaatgctctgatatcactacgttaaacaggaccctattggtaaagacgtgagcctgtgaatattgaatacaatgcagtggattaagaatacagaaacatggaataagggcagagattaaatttaccaacttgccaacctgatcatccgaagatcgtcttggaactggttttgagagaaaattgtttcccgtagtgtgggcacccgcagttcactgacccgatgaaactcaaacattattgattagaccaa

SEQ ID NO: 68215 - DNA, 338 bp, Zea mays
  unsure (1)..(338): unsure at all n locations
agctgtctgcctcgttccagaaatcagtcctctactgactaaagaaaacttagaacatggtggattcaatttaaaacacagcattntcataccatacgctcttgctcagaagccttcccagcaaagcatcgatcgttgattctctttatagcaacatctgaacctctccactttccatggtaaacagtaccaaaggttccagaaccaagttcacgcaattcttcaaggtcactggntcttaatatctggtatcatttatcaacaaagtgggaaataaggataatgcatttaaaagttcgcataanatgtggaataaataataacataacaaaaacctg

SEQ ID NO: 68216 - DNA, 434 bp, Zea mays
gatcagcccgaagcccatgctgctgtgtgaggatatatcagagcagaaggtgctattgggctcgcaattatctgaagatcaagagaaaaccttgataaggtttttattcaacaataaagatgtttttgcatggtcagccaatgatctttgtggagtgaatcgggatgttattgaacattcgctcaatggtgacccatcctttcagacccgcaagcagaggcttcggataatgtctgacgacaaggccgaaggggctcgcaacgaagtaaaaagactcctaagtgcaggagttatcagagaagtgaagtatccagaatggctagctaacactgttatggtaaagaaggccaatggaaagtggagaatgtgtattgatttcacagatcttaacaaggcttgtccgaaggatgagttcccgctgccacggatagact

SEQ ID NO: 68217 - DNA, 450 bp, Zea mays
  unsure (1)..(450): unsure at all n locations
tactatgtctgtcctccagtattcactatgtacatgtgagaatgtgagcactactctttccatgagctcgactgaaggttcttttattgttcaaaaaatacttccaaaggaaaagggagcccatgtgcctctgatttagctagtaaatctgcatgctcattctctccccttgggatatttttacagaataaccttcgatagaagcttccaaccttcggactgcatccaaatacttttcaagcttcgggtctcttgccttactgactttatccacatggcccgagataacttgcgaatcagttttgaggattgcccttcttattcccattgcctttagctcttgaagccccaaagaagagctgtgtactcgacaatgttatttgtacaactgaagtctaactntatngcataacatgttctgactttagaagtgcaactataacaacaact

SEQ ID NO: 68218 - DNA, 485 bp, Zea mays
  unsure (1)..(485): unsure at all n locations
atgcaagcttctaaagggagaacatgtgttaggtctaacatttattaatttcgaaaacgatagaccttgtgcagcttgtcaagcacgtgaacaggtgggaagctctcatcatatcaaaaatgtgatgaccacgtcaagacctttggagttactttatatggacctcttcggacccgtcgcctacctaagcatatgaggaagtaagtatggtcttgttataggtgatgatatttcccgtttcacttgggtattctttttgcaagataaatccgaaacccaagggaccctcangcgcttcctaaggagagctcaaaatgagtttgagctcagggaaagaagaataggagcgacaacgggtccgagttcaagaaccttcaagtggaggagtatcttgaggaggaaggaatcaagcatgagttctccgcttcatacacaccacagcanaatggtgtggtagagaggaagaacatgatgctcatagacat

SEQ ID NO: 68219 - DNA, 411 bp, Zea mays
  unsure (1)..(411): unsure at all n locations
cctcgaagaatcactatagagttggtgataaatgtaaagggcattaatgtaattccacacgggctgcgtcccttgcctataaatagatgaacagtactcccgtactgttcacgctggcttggcattcgctttttgcatcatgccttgtacctttactttccgtcaatccgaaggtacatttantaattggtgttctggatatgataatgcaaataanaacaaattaagaataatatttatattattcttcatatgtggcatataaattcttccttatcatctattgtgcttacgaaggttctttccttcataacctttgtccggaattcattatgtccgaaggggtataatgtcttgaaggacgaaggactntaatatctaacacattntatgttgccttgtcttaattct

SEQ ID NO: 68220 - DNA, 431 bp, Zea mays
  unsure (1)..(431): unsure at all n locations
gcttcacgggctactagcggagctagccgaatctcttgcttttccggaagatggctatggtgggctggccacggtggccgaagctttggcggcaatggcgggcggaattaagctcgccggagctaangggaagtggcttgcccgtgagggtgaatgccgggccaattggggcgcgcctcggaaggctttatangcgcggcgcggtgcaccggcggtcgtggaccggcgagtgcgcgcgggcgtgcactgngaatgcgcggtgcgcgaactgggcgtgaaccggggtgtcagccgcggtcgaacacgtgttcccgttgcctctgcccctgttcaagcgccgattgggagcanatcttcgcgaatttgggcaagatcactgcaagggggattgtcaccagaccaagctttgtcttttgtgtatggacgacgtg

SEQ ID NO: 68221 - DNA, 427 bp, Zea mays
  unsure (1)..(427): unsure at all n locations
gagcacaatctctacttatgaatgtccatgatatatcttacaagagattgtattagtaacacaagcaatagtttcctatttatcaacctctagtatatgaatgacaagaaggttactaacacaagataacctcatgatatgaactaaattacccttacaagcatcatgcataacatcaattgtaaaaaaagatgaaagtagcatgattatttaattaagtgtacatggcaagtttaatttatagcatggtgagtgattaatgtagaagactcaaaaccaatttaaacaagaatgaatacttcacatagtattggttcgatcttctttgaatgtngaatggcacactccatttgggaaacacattctcatgttgtgagactagataaacactcggatagaaacattagtctcacaactctagtcatat

SEQ ID NO: 68222 - DNA, 450 bp, Zea mays
  unsure (1)..(450): unsure at all n locations
gtatctgaaggtcttagttgatcaaagataaattatacagaattggagaaggtgctgtatgctgttttgatggcctccaggaagcttcggcactattttcaagcatacaatatagttgttccttcttcacaaccgttgaaggatattatgagaaatagagaagctactggaagggttggaaaatgggctgcggaactcaatgaantttgattgattattgcatagatcttcgattcagtcccaagcgttggcagacttcattgctgactggacgccaggggctcaggaagaagaaacgagtaaagaatgccgaagttggaacagtatttgcgatggatcttgnggaaccttcggagcaggaagcagctgctgtgtggtcgcaccttctaaagttaatacttggtatgcaacaagacttgatttcagtggcacaaataacattgctgagta

SEQ ID NO: 68223 - DNA, 376 bp, Zea mays
  unsure (1)..(376): unsure at all n locations
tggagtagggtattacgctccggttgtcctaaccactctanatcctcgcgtgttcttgtgttcggtgaccgcttatcaagatatgcgaaacgcttatgccccttcctcatcttatgagttatggcgggtgcactccgccacccggccggagaattccctcttcaacatttacttactcagaactaatgatgatgcactagacactttaagatctataagactgaagttgagaaccagctacacaagaanattaataggctacgggctgatggatgaggtgaatacctttccaacctttntgatgagtactgcaaagagtgtggaatcattcacgataccactgctccatattcacctcagtcaaatggtgtagctg

SEQ ID NO: 68224 - DNA, 431 bp, Zea mays
  unsure (1)..(431): unsure at all n locations
agcttgagccaaagcaaatgtggtgttcctggtacttacaaatattctccagggtctgaagtacaaaaaaatgacaaaaatagtgatgataattcccctcatcagacaagaacaagaaaaatatatcaaaatatgcacttgttggaagccatattagtaccttgctagttttcttgaaagggcatatgcatgctttaagtaatcagcatgggttgaaccacgaggacttcctctttgtttcaaatactcagccctctgcctcttcgcctgttccagtaagataatctctggatgttagaaacagaacacaaggataaaaaaatgtttaacagaacactatgagagttgagaatacataccctttgaagtttggtgccagctgttctttcagttntctcctctctgattctctccggctgcatacagtcatg

SEQ ID NO: 68225 - DNA, 461 bp, Zea mays
  unsure (1)..(461): unsure at all n locations
gagatgtatccatgggggaaaaaatgagtcagtgatgtttataatgatggtggatctcgtggtgaccaaaacgtggtagaactcaaaactctaaaggaataaactaagaccagcaactcgacacaaccgatgcaaccgaaaactcaacaagccctagctaagtagtactagtaaaggctcaatggtctataggattgcgggaaaactaatctactantttttagctctttctggactataggagataagaaaacagtgaagaaaagtaaatctctcaccaataaaccttgctctaattaccaactgatgtgcacccgttgggtgaatgcccgatctttcgatgagagggtatggaataactcgattggtggaggagacgacgttcacggcccgactacagccttccaaagacgttgtgccttagcaaccgatacaccacctcctatggctgtcacgatctt

SEQ ID NO: 68226 - DNA, 444 bp, Zea mays
agcgctgtcgatttcttatcttgtatgtggatgacatattattgattgggaatgacattcctatgctggagtccatcaacgcttcactgaaaaagagtgtttctatgaatgacttatgggaagcagcatatattttgggcataaggatctatatagataggtcgaagaggcttatatgattaagtcaagatacgtacattgacaaagttttgaaacggttcaacatggaacagtccaagataggtgtcatacctatgtcacatggttaacaccttatccagatgcaatgtcctgcgacggctaatgagcgggagcgcatgattaatgtaccatacgcctcatcgattggatcaatcatgtatgccatgataagtacatgccaagatgtgtcatacgctataagtgctacgagtagataccatgctgatccatgtgaggatcact

SEQ ID NO: 68227 - DNA, 502 bp, Zea mays
  unsure (1)..(502): unsure at all n locations
agctngcataagatcaatggaatatcttcttttattctttgcacaacatctatccgtagatttctactacatatttccctgaagaagggccccaactctgccattgcttcatatacatacttcctcaccagtcctctaagggcaacggctatgattctctgtatgaatatgtggcaagaatgtgctttcaattttccaaccacctttgaaccatcttcacttatgtatctggctaggggtatccgcaattcattaggaaactcgatacctttgaggaacttgcanaactcgactttctgatcccttcccaacacatatggagcaggtggagccctgcaggccgagttgccatcnttgtgcaagtgcagttcaagtcttatgcccatatcatacaaatctagccttgcattatgtgtgttcttggacttgcctggtatactaagtagtgtgcaaagaatattntcacatacnattttctctatgtgcatcacatcgagaatat

SEQ ID NO: 68228 - DNA, 229 bp, Zea mays
aacattcctattacctactaaacgactatatctcttgtatttgataagacccatatatactcttttgatggcatcttggttggtataaaaatccgtgacttctgaggcatatttcatcatatagactgaatatgtgtgccatgagaattttaagaatgtgcacataacctaatgtgatctttttgcaatacatgaatgatgaatattgtcctttgaaacagaaatattg

SEQ ID NO: 68229 - DNA, 140 bp, Zea mays
aggttttgacttgtaaactctcttaagcgaatgattaacataactcaggtctatgggcttttcaagctaaacatatatagttcaggacataacagactgctgaaagcttcgtgaaagaaaacagcaacagcatcccaaac

SEQ ID NO: 68230 - DNA, 307 bp, Zea mays
aaattatactttgtggactctgtccaaaccttggtatacattcttacacttgcatcaattgtataagtgccttggtgtgaacgaaattatcattttttatcccaaggtgataaacacccttccttcttttcgacacagcgaagcataaaactgcgtctgtttctttttgtcgaagccttgtctttatagccgaatcaactgcctgtgttatgatgatgatgatcctatgtatgtctaaatgaatggttatgaatgcaaatgtttgatgtaatgttccgcgcaaatgaatgtccatacacacgcatac

SEQ ID NO: 68231 - DNA, 502 bp, Zea mays
  unsure (1)..(502): unsure at all n locations
gacccggatcttaagtcacctgcagctgaagctttatgatctgataaatgtgatagatgttccctagcagataatgacaccaaatttttagagcatgaaccacagcagctaactccagatcatgagtttggtaatgctcttcatgccggcgcaactgccttgaagcatatgctatcactaggccctcttgcattaaaacacagcctagaccactgcctgatgcgtcacaatacacatcaaaggtcttttcaatatccgggtgagccaataccggagcagtggtcaataatactttcagctgctcaaaggcttcattacattntgaagaccaattaaatttagtatcattcttcaataaacttgtgattggtttcacaagcttggaaaaatctggaatgaatcggtggtataaccagccagtccaaggaaacttcngacttgatgtacagtggttgggggttccactccaaatatccttactttgctggatctaccgcatccc

SEQ ID NO: 68232 - DNA, 385 bp, Zea mays
  unsure (1)..(385): unsure at all n locations
gtgctgcacttaccgctgaatgcgaagctgccacatataataacaaatgagcccctggcgttggtggagttaatgttgttaaatctatcagatattgcttcagttcctcgaaggctttntgttggcttggtccccattgaaagacttcaactgatttcagcacttcgaagaatggtaaatttctttctgctgatctggatataaatctattaagagatgccaacctccctgttaatctttgggcccccttttttgtagttggtggctccattcgaagtatagcttcaatnntacttggattagcttctattccctttgttgaaaccaagcatccaagaaatttccccttctttactccgaatacacattnttctggatcaacttt

SEQ ID NO: 68233 - DNA, 487 bp, Zea mays
  unsure (1)..(487): unsure at all n locations
atggaggaagatggctgatcttgcgttagtggaggaggaggcgccttgctcgatgatcttcttggagcctttcatcatcaattcagagctcacgaatttgcctatcacttcctcgggagacattacgttatatcttggatcaccatgaattaattgaacttgagtggggcttacaaatacgagtgatctaagaataaccttgaccatttcatggtcatcccacttggtgctcccgaggttgtgcacctggttcaccacaggttttagcccggtagacatggctccacctcgatcgtttccctcttggtgatcttcgacacctcagctccttcgtgcgctattctgagcacgtaccagatctacttggctctcttcaatccttgcaccttgttatactcctctcgacttatagaggcgacgagtattgcggaggcttgcgagttgaactgtcggatatgggcaactntgtncgaatcatagtcctcat

SEQ ID NO: 68234 - DNA, 289 bp, Zea mays
ctacttgcatattagttgccctcatataaatggtctttcacaatgctattgtccacataacagctaatgcgcattatatgcataaacattccaacagataatggaaatgatatgtgccaacaatacctaatgcattacagatagttacagatgggtgtggagcattagaaactaatgagagcgattacaaattctactttgaatgtgcgcgtgcattgttattaaaacgtcgtttaaacgacgattaagcgtcgtttaaacgctataacgtgattagaggctggaacgt

SEQ ID NO: 68235 - DNA, 477 bp, Zea mays
  unsure (1)..(477): unsure at all n locations
gagatgatatgaagctcttgtgtgcttgagagagtcaattcaatcttcattaactcaagctatcaatctacaatgatctacatatccaagattgactcaaggttatttcaaattattatgtctaaaactcgtatcatctcgggaagatattgatgttgtaggaaataaagaactaatcccatgtcgaanagccaagacctacaacatggaggaaagcccaaggatggtaacaattatgttttcaagtgcaagtatctcaatttatcatttcttatgtgtatcgtgtagtcacatagaanaaggaagcactcaaaatgttcttaaaattatgttaccattctttgaagatgttcctcccatatggtagatggtatattcatcattcttatactatggcaatctacatgttntaaatattaagcaactcatggcatgntttactcttattatctttatatngcccataatctagatata

SEQ ID NO: 68236 - DNA, 463 bp, Zea mays
  unsure (1)..(463): unsure at all n locations
cttgatactntcttgataactggtattgtatgataactccgccaaaggcaaacattcatcccatgttggtgagaagtccaggacacatgcccgcagcatatcttcaagtatttggttcactctctcagtctgtccactggtttgaatatgataggccgaactgtggagtaacttagtacccaaggatttgtgaagtgcttcccaaaacttggctacaaattgatgtccacgatccgacactatggtctttggaacaccatgcagactaagaatacgagcaatgtacaattgggcgtatacagtaaccggngaatttgtttgactggcagaaagtagcaatctttgtagccgatcaatttaaccccatagagtatacnctttatcgtctgtgagtccacattagtcatactgatgcttccatttcatatggattgcaagatgaatggacacagtttatgtgatg

SEQ ID NO: 68237 - DNA, 488 bp, Zea mays
  unsure (1)..(488): unsure at all n locations
gcttgtgaagattcttcatcccaacatgggctattttgttgtgccagagccaacccatgttagtcttagcaattaagcaagtgtcgagttcagctttatcaaaatctaccaagtatagctgaccctctaacactcccttaaatgctattgaatcatcacttcttctaaagacagtgacacctacatcagtgaatagacagttgtagcccatttgacataattgggatacggaaagcananntgtatctaaagattctacaagaaaaacattggaaatagtatggtcaggtgatatagcaattttacccaatcctttgaccaaaccttgatttccatccccgaatgtgatagctcgttggggatcttgattnttctcatatgaggagaacatccttttctccccggtcatgtggttggtgcatccgctgtcgagtatccaacttgagcccncggatgcatanaacctacaaacaagtntagttcttgac

SEQ ID NO: 68238 - DNA, 277 bp, Zea mays
tttttttcacaagaaatttgacacctggaatgacattacatattttcttaaggaaggaaggcctggcatctatattgggatatgaccaacaaggctatgaaaggggcaagacaataggtaagatgtttaatagacatgtttgaaagatggaaatgtgacagaaatcaagaaagctggtgacacagtgtattgagacacggtcgggcagtgtcacaagcgttgatacgacacgttatacgatgtcgggacgatgcggagagcgcccttgcgaatgcac

SEQ ID NO: 68239 - DNA, 413 bp, Zea mays
  unsure (1)..(413): unsure at all n locations
agcttacactacctttaacatctaagatnttcttatatttatattcaaagggcacgtggggttggggttntggattacgtaccgactcctttgggcagaaagtcgtggaagcgagaacgtanaaaatcctcagtctcccatgtagcctcttctactgaatggtgactccactgaaccttatacattctgatcgaccttgcccgcgttgatctctccttttggtccaataccttgacggggtgctctagataagacaagtcttgggtctatctcatttctggttcaggtagcacttcagtgggtaagtaaacatttccttagctgggatacatggaacacatcatgaactgctgacatgtggggtggcaacttcaattgatatgctacgggtccacaagtttccttgatctcat

SEQ ID NO: 68240 - DNA, 368 bp, Zea mays
accgtgttccattatctacagtgatggcgcttggttcctctaatcgacaaacaatattctgccagaaaaacttttgtatggtggacgaagttattgtggctaaaggctgtgcctcaatccatttagaaaaatattccacagccactacaacatatcttaagtttccttgggccggtggtaacggacctaacatgtcaagggcccacctttgcaatggccagatgggttgtatgagctgggttaatgacgaaggattgttttgatctcttgcacatttctgacaaccttcgcactattgaactaattccgctgcatacgaagctaccttcggtcaataaaacccttgacggaaaacttttccaagtaac

SEQ ID NO: 68241 - DNA, 498 bp, Zea mays
  unsure (1)..(498): unsure at all n locations
agcttacacagaacccagatgccaatctttccaagttatcaaccatggtccgagataactcttttgcacaaagttgacgaaagaaatagctcaactctgaaagcgctagccagacatgcttatggacatagcctcgaaccatcgcagaaagaatccgttcaatccatatgtggaagtcatgactcttcatccctaagactcgcatagtagaaaagttcaccccctacccaggttagcttgatacccatcanggaacatcaacatcttgatccattgaagtacttccttcctctaggccctgcttaggatgaaatcggccttatgctttctctatgtctttccaccacttggcggcttcatctcttggttggtctataacataacgtngccagatccactcttgccttaagttatcctttgacttatcaggaatgtccataattggtgcccacagtgcctcgacaacattcttttcagtgtgcatcacgtcaatggtat

SEQ ID NO: 68242 - DNA, 401 bp, Zea mays
  unsure (1)..(401): unsure at all n locations
cttgatacttatacgattggttggtatgcaggtntatgataatatacaatttcttatttgatgaagattctcctgctgaatataagtgagctcagtgttcatattcaaatgcattgattataagatgtttctattcgacgaaaataattctatccacatttttttgtagagactccaaaaaatgattaagaaatctaaggacctagatgccattagagaaatgaagagttgtgtcacgtggattgtacgtatacttaacatgttggctgttaccatgaaaattatgttttgtcataaaaggttgatgcttatcttgtgataatcggtgagctaaacttgctgattttaatttactgatagcatatctggtaacttgttgtcactggtatatgatagtgatg

SEQ ID NO: 68243 - DNA, 218 bp, Zea mays
  unsure (1)..(218): unsure at all n locations
gcttgaggctgactcgccgaagcagcagagactgcatgatggntgcccacatattctgggatgtagggcgaatgatacgaagctgtatgcatgacctgcttcggctgggcttggtgtgctgctgcttcagctatttccttttgcttctgtataagaacatggcacatcctggtagtatggcctttgttctcaccgtagaataagcaaaagattcttct

SEQ ID NO: 68244 - DNA, 436 bp, Zea mays
  unsure (1)..(436): unsure at all n locations
acttatcatagcacacaagaaaggttcagtcattaccttcgatatttctgtaatgtctgcagaggaggacgaataggtgccagcagtcttatctggtacatcttgtaccttcacctcagcatgggccaagattgaggactttcgtattttgagagccataaccttcatctccgctgatttttttttgtttttaacagtcctcttatctttttcaatgaaccgcatggcttgtcttttcaaaatgcttacaaccctctttttctttgctcccccaggtccttcatcaagtccttcgtagtctgggtactcgaagttaagggcgttcatcactcggttcaaccttcgtttnttctgagtgccgaaggcagctatcatcaattgatcctacttcttcgtataattcccaaggatctcattgcacattgtctctatcatt

SEQ ID NO: 68245 - DNA, 444 bp, Zea mays
  unsure (1)..(444): unsure at all n locations
catgtgctagtcggcgatgttcttattcctcccatgttagtcttagcaattgagcaagtgtcgagttcagctctatcaaaactcactaagtatagctgaccctctaacactcccttaaatgctattgaatcatcacttcttctaaagacagtgacacctacatcagtgaataaacagttgtagcccattttgcataattgagatacagaaagcaaattgtaatctaaagaatctacaagagaaacattggaaatagaatggtcacgggatatagcaattttacctaatactttgaccaaaccttgatttccatccacgaatgtgatagctcgttggggatactggttnttctcgtaggaggagaacatcttcttctcccctgtcatgtggtttgtgcacacgctgtcaattacccagcttgagcgccccgatgcataaacctac

SEQ ID NO: 68246 - DNA, 409 bp, Zea mays
  unsure (1)..(409): unsure at all n locations
agcttctacgcatatatagtgtggggttatttttagtattccctctaacgatctatgggtctagaattatcttggtcttgcagtccgggttgccataaggctggcgttcacgccgaggtgagcggtacaggtgctgagtcccgacgggagcgggagaaccattattcaggtgacgacgttccgcgcgctcagcccgcagcagggcgatctcagcacgagccctactcaactcgtctaatgcatggtccagctccgtgtttagcacggcgtctaggttgactgtgttgctcaacctangattgtcctcaccgacaggtgaaacaatcacgccttctgtgctgccagatagaaagcggnggtaatacttcaggtcgagaccgtcagctaccccaccgagaaccgaacagta

SEQ ID NO: 68247 - DNA, 439 bp, Zea mays
atcatgtcatggctgttgactttctgtgttctggcggacctgcctgactgtacgtgtaccggtggtcaagtcatatcatatcagaccattgttctttaacagccataaccaaacagaactgctttcatgcatgcccggctccccatcatatgggccaaatgcatgtcatcgcgcgagttcaatttctactcaatcccacattgccacccttctaccttcgacggttgcaactctgtatttacatggcaaataagaaagaagaaaccttgctacttgctattcagacagtggtcccatcatgcatttgtgcaacccatccagttctggcgttgagattccgactcatgaaaactatgatggccgaataaaaacaaattaaatgacgacggcgtgccattcatattaaacgggccgtgccatccagatacgaagccacctg

SEQ ID NO: 68248 - DNA, 498 bp, Zea mays
  unsure (1)..(498): unsure at all n locations
agcttaccacattgaagcatgagcgcttcctctttgacttggtcttgctgggctgtcccttgcgacccttaagcgccatcttgaaacgcttgatgatgagggccatctcttcatcattgagacctgccgcctcaacttgcgccaccttgctaggtaacgcttccttgctccttgttgccttgagagcaacgggttgaggctcattgattggaccgttcaatgcatcgtccacgtacctcgcctccttgatcatcattcgcccgcttacgaattttccaagaacttcttcgggcgaacatttggtgtacctgggattctcacgaatattattcaccaaatgtggatcaagaacggtaaatgaccttagcattaggcggacgacgtcgtggtccgtccatcgcgtgcttccgtagctccttattntgttgataagggtcttgagccggttgtatgtttgggttggctcctcaccccttataatcgcgaatcttccaagct

SEQ ID NO: 68249 - DNA, 337 bp, Zea mays
  unsure (1)..(337): unsure at all n locations
atacctaatctggtgacaagatactccaccccgtggagcaccacatatggcatggcgtggggtgagtggcgggctctgccagcgcccaacagccaatggcggatccggcgttcaacgagccatggagctcgatgggggcttacggtggtggcgtctgangagcatggtcagacagagctttgctcatggccgctcattctgctcggtgcgatgccgacatggcataatgaagcggaacatgtgatgggtgatccccgactgtcggcgccgtgccggctctttgacggagacaggtggtcgagccgaatacggacagagaggcgggtataagtgtaca

SEQ ID NO: 68250 - DNA, 494 bp, Zea mays
  unsure (1)..(494): unsure at all n locations
agcttctattacatgagtcattggcagtagatatcatttagctcaagcaacattctcaaatttatctcatggtatacagggcttaatcctcatcctcaacaaccttagttcccaaacctttgagaccctccggtgggatctcagcaactgtgaccagagagtagagttcctccttggcgtcttcctcatcgttccggttgcgggcaattctgacacggacacgcctcggcacactgcggataccactgctccagatgtgctttgtgagcttcacgtcaatccggacatcagtagtacccatggccttctgagcgaacttcctgatctccttgatnggcattggtgccttcttcttaaaggtgctgtgtacagttacagattgattagtgatcactanatggcagctcaactacagcctgattnggaatacagcaacagaataaaattgtgttcanaagaaatccaacanacgtcaaatggaacatcaagatgtt

SEQ ID NO: 68251 - DNA, 492 bp, Zea mays
  unsure (1)..(492): unsure at all n locations
agcttctaaaggggaacacattntatgactaaccaacgttcattntgagaaagacaggatttgtactgcatgtcaagcacggaagcaggttggagttcatcatccacacaagaatatcatgacgaccgagaggccgcttgagctgctccacaaggatctattcgtcctgattgcttacataagcatcgacgggagtaagtattgtcttgtaattgtggatgactattctcgctacacttgggtattctttttggagggaaaatcacaaacccaagaaaccttaaagaaattcttgagatgagctaaaaatgagttcagactgagaataagaaagattaaacgcgacaatggaacagagttcaagaattctcanattgaaggagttcttgaggaggagggcatcaagcatgagttctcttctccatacacnacctcaataaacggtgtngtggaaaggaataatagaaatcttatggatatggcgagtaccat

SEQ ID NO: 68252 - DNA, 423 bp, Zea mays
  unsure (1)..(423): unsure at all n locations
tctgcacaccagtttctgagatgatgaataatccatccccgtcaatgattctttgtctcctctttcatcaagtntaattaanatgtcggaaatgtgatacagatcttgttatttcttctcatcattcttgtgcacgatcggagagaagattatagcaatgggtttgtgcaatgtcgactgcttcaaagagcctcctgatagcactgagctttccagaggtagttgagtggaataggaattctggttgctgtcagagtcagtatttttcttttcccttgctgctttagatacaaagaatactacagctgcgtgatggcaatgttaatcatatgatgttcacgaacagagcacagagaaatatatgtcagcttctgattctgttacacatgtatatgttatgtngcttgtaaacacacgtacaca

SEQ ID NO: 68253 - DNA, 480 bp, Zea mays
  unsure (1)..(480): unsure at all n locations
agcttggacagtgttctgcgtcggttcttggtgaaccttctatgcaggtgaggctgctgtcttagttgcaccttccaaagtcaggacatgctatgcagtaaagcttgactttaactgcacaaataatattgctgaatacgaagctttgcttttggggcttcaaaagttaaagttaatggggataagaagggcggtccttaaaaccgactcccaagttatttctggacatgtcgataagagtngcanagcaagagatccgaagcttgagaaatacctggatacagttcgaaggcttgaggcttcattcgaaggggtttttgttaagaatattccacgaggagaaaacgagcacgctgatctgttagccaagtcagcggcacaggggctggctttaccttcggaagtgttttttganaccataagagcaccttcggtggaactcctcgaaagagcagtgctcattatatctcctggtcatag

SEQ ID NO: 68254 - DNA, 495 bp, Zea mays
  unsure (1)..(495): unsure at all n locations
tgcagcttagacnaatttatgccatgtctggattatattatccttttctttataaattaatcaacgtcctattactagactcggcctgtccattggcctgagcataatatggagacgaattaagtagcttaattctgtataattcagcaaattcacgtaccttctttgacataaaagaagtaccttgatctgtagtcaaggtctggggaatgccgaatctatgaataatatgctcagttatgaactcaaatacctncttgtgcgtcatgttctttagagcaacggcttcagtccatttggtgaaatagtcagtggcaactaacacaaaccgatgcccctttgatgatgaaggatgaatttctccaataaagtctaatccccatcctctgaatggccaaggcttgatgataggatgtaattcggctgcagggactaactgtanggtcgccgaatttcgacacacttggcaccccttgtagtacttgaaacaatcag

SEQ ID NO: 68255 - DNA, 449 bp, Zea mays
  unsure (1)..(449): unsure at all n locations
acccggcttcttcaatctaatgcaacatttttttcttcatctcccctatgatgcacgaatggnggggggggcatgtatggacgttggtgctatccaatcgagagatgtctaaagactattcgaaagaaatgtagaaatatatgcgaaatcgaggcttccattgcagaggcatacattctagaggaggtctcaaacttcacaacaacttattatggtgacatactgccgagcgtgcataatccaccccctcgttacaatgatggcgacaatgaatcgaatcttagcatatttcgaggccaactctgatgcgcaagtggctcgaccaccaataccctgacacatgaagagtggcggatatcatgtatatgtttgaccaacttgagaggtacgtatactggacaattcttctgaatctgcgtgatcatggaccactccaggatatgacctct

SEQ ID NO: 68256 - DNA, 475 bp, Zea mays
  unsure (1)..(475): unsure at all n locations
gcttggaaattcttattccacatgggcttgttttctatgccacagcccgcccatgttagtcttagcaattaagccagtgtcgagttcagctctatcaaaatctactaagtatagctgacctctaacactcccttaaatgctattgaatcatcacatcttctaaagacagttacacctatatctataaagagacaggtggaacccattttgcataattgagaaacggaaagccaaatggaatctaaagagtctacgagaaanacattggaaatggaatggcaggagattagcaatttacccaacctttgacaaacctgatttcatccctaagggatactcgtggggatctggttttctcgaggaggaaacatcttcttctccctgcatatggtttggcacccgctatcgatgaccaactngagcccncggatgcataacctactaaacaagttagtttgatttaggacccaacggt

SEQ ID NO: 68257 - DNA, 235 bp, Zea mays
ttttctcacgtgtgagaccgaattttttcccttcttgagctggtcttttatcagaaatcatgcttgggggattctctgagcgatctgctgtaacatgcgggcggctggatatgctgtaagtgacacagctgcctcgactatctgtgcatattaggaccgctgtcttacggctctggaggaggtccggcttgcagcagacagggattacagctgtgcggggagaaacttcagcgtg

SEQ ID NO: 68258 - DNA, 493 bp, Zea mays
  unsure (1)..(493): unsure at all n locations
tgcacaagcgctgcgcttactgtataattcttagctgccacatataataacagaggagcccctggcgtgggtggagttaacgttgttaagtctatcaagtactgtgttaacttctcgaaggctttctggtgagctgatccccattgaaagacttctgccgacttcagcacttcaaagaatggtaaatttctctctggtgatctagatatgaatcgattcagagatgccaggcttcctatcaagccgtgagctcccttctttgtgcttggcggctccatccgaagaatagcttcgatttaattggattagctcgatccccttttgtgaaactaaacaaccaaggaatttccccttctttacttcgaagacacactnttctggatttcaactcaggccagctngcctaaagttagcgaatgtctcctgcagatcagcaatgtgattntcttgcttcgtgctntttactatgatatcatctacataagtagcacat

SEQ ID NO: 68259 - DNA, 422 bp, Zea mays
ccacatgtgctaagcggcgatgccacatttctttctatgctagtcttatcaattaagcatgcatcgagaccggactcttcttttgcaaaatcaactaagtagagctcgccgtctaatacacccttaatagctagtgaaccatcactgtttctaaagacagacacatgtacatgtgtgaatagacagatatatcccatatgacataattgactaacagatagcaaattatatccaagactctccactataaacacattagagatagaatgctcattggagattgcaattgtaactagcccttttaccttgccttgattcccatcaccgaatataattgaatcttgggaatacttattcttgacggatgaggtgaacatcttcttctccccactcatatggtttgtgatccggtggcgataatc

SEQ ID NO: 68260 - DNA, 493 bp, Zea mays
  unsure (1)..(493): unsure at all n locations
ttaagtcacctgaggcatgcaagcttatgaagattcttcatcccaacgtgggcttgtttattatgccagagccaacccatgttagtcttagcaattaagcaagtgtcgagttcagctctattaaaatcaactaagtatagctgaccctctaacactcccttaaatgctactgaatcatcacttcttctaaagacagtaacacctatatccgtaaaaagacagttgtagcccattttacataattgagaaacgganagcaaatggtaatctaaagaatctacaagaaaaacattggaaatagagtggtcaggtgatatagctattttacccaatcctatgaccaaaccttgatttccatccncgaatgtgatagctcgttggggatcttggcttttctcataggaggagaacatctttntctcccgagtcatgtggtttgtgcacccgctgtcgatgatccaacttgagcctccgaatgcataaacctacaaaa

SEQ ID NO: 68261 - DNA, 369 bp, Zea mays
taattttagagcacaactgtcgcgttcgagattgttgccttgaccgcgattgatgtgccggtgccccacccaatgggtcacgcgttgcttcgctaagagggaatgcgatgtggcggagactggcgtgatatatgtggaaatcccgctgccttcgtgttcgtcccgcgcccagttcgggtgcgctcgcaataaggtgttacaggcgtccactcgggtgagggaagcgagcagccccattacagcgcttgtgccgtcctcgttcccgcgcggtcaaccttctataataaggccctgggccttccttttatagtcgtaaagagaggatccacgtgtacaatggcggtgtttcagagtgctacgtgtctatcg

SEQ ID NO: 68262 - DNA, 488 bp, Zea mays
  unsure (1)..(488): unsure at all n locations
agctactacctcgacactacatgctacatannataagtgccatggngnagaacaaatcatgcgcgtctcactttcatctggttctggcttccagcgcagattatggctggatctttatcatgttcatatgaatgtccttgttcgagcatgcctcagcctgacccagacgaaaattcagaaaatgataccttaatatggcagcagcaaggggttcaacttgcattctgtaagcattgagaagacatcacgtggaaaagccttaaaacgatcaacaattcccttttttacaacaataattcgacactacatacaagctatatatctctcanaaagcaatggtgtatagtgcagtggactattggtacacagaaaacagaagtttctgggcgttaacgagtacatgtgaaccttgcttagttctctctacgatctaccggatcagcactagagcccagactagaccacgctctgccaagcaatccatggtc

SEQ ID NO: 68263 - DNA, 465 bp, Zea mays
gtgcttctatcatcgatggtgcaagcctattgttatgtggactaataatcctccctccagtactaaagacatgactctgatgccactgctgacacatgaatagcatgaacatcacgtgcaatctttcacaaagttggatacttgagcccagcatgctgccaccactgaattatatccaactcttgtgtcctatgcaacaatggttcttctatgtacatatacaactctgtccggacgtatgtggatgtaactgttgggtgctctgacatataatcatcgatagtatcaatccaatcttcatctattggcatagtagaagcactacctgtcctattttgagcaccatctgatgtggaacttgccttcatgctatctcggtattctaagactaaattgtcaacaactctttaacttttgacagatccatagtatgcttcaactatgaatcttaaaaagacattcaca

SEQ ID NO: 68264 - DNA, 494 bp, Zea mays
  unsure (1)..(494): unsure at all n locations
agctnggatgtcaaaaatgcatgttgagagtatcggtacctatatgagaacaccgacaacttcaaggagcgctaacaaaatttactcaaaatagtataagattggcaggaaaaaagtaaatagtattttgatatttattggggtcaagaaaaacaatgtggtttgcatcttgcagcaatatcatccttgtaactaacagaaaagtttgtcaagcctcatcaaacaaaagtttgtcaagcccagacccttcttttccntgtgtatcttttctggtgttcttatcactgagattggcaatggtgccaatactttattctggacagataaatggataaatggaaggaaggtttctgatgctccaaggcatacagtataatacgaanaanatagctgccagaagaactgtgcaggaagccttatngaatagaagatggattgcagatattangcgagcattgaccatgggagctctaatagaatatttatacctatgg

SEQ ID NO: 68265 - DNA, 377 bp, Zea mays
ctactacatgtcgtccacaaactgatggtcaatctgttgttgtgaatataactgtctactatgttaagggttgttctaaagaagaatattaagatgtgggaggactctctgcctcatgttgaatttgcttataatcgatcattgcattctactacaaagatgtgcccatttcagagtgtctatggtttgttgcctcgtgctcctattgatttagtgcctttgccatcttctgaaaaactaaattttgatgctactacgcgtgttgaattgatgttaaaactgcatgatactactaaagaaaacatagagcttatgaatgctagatataagtttgctagtgataaaggtagaaaggaattaaatgttgaacctggaga

SEQ ID NO: 68266 - DNA, 509 bp, Zea mays
  unsure (1)..(509): unsure at all n locations
catgcaagcttanaggggctactaagagaacattttatattgtttaatcattngagaaagccaccttgccaagtccttgcacttttccttttgaattgtctccaaatgtgattttatcttgaccatcaacattttcatccagtgaggtgaacatcccggggttgcctgtcatatgttgtgtgcatccactgtcaataacccaatggctcccaccggtcttgtagttcacctacatccacagacaattcaagcttgagttntgagggccctatattgcataggaccagtgactctctcaattaaggactttgccgcccagatttgtctaggtctactcttgtttggtggacctaggaatgtaactctgatctttccatttgcaacctttcttagaacataatgagcattgaaagcaaatggtcttgagtgcttangcaagtgagttggtggtttggctttgcagttgtgggcaaagtgaccttcatttccacactcaaagcatttgatag

SEQ ID NO: 68267 - DNA, 495 bp, Zea mays
  unsure (1)..(495): unsure at all n locations
agcttcttattctttgattgtgctctccatactctctattataannncatncctcttatcctcaaggtcctgttgcatttgcagcgctttactcagcagcatactctgtatagaatagaccttcatcagctaacttcattgattcaaacaaataataaaattttgttttattataagaatcttaccttaaagttggaataaaataaactaccgatgatatgttatcgtcgatagctgctaatatcggcttcaagcttcngaaaccgacactcttcgatagagtgccgattaccttcgccccgatacggtcacgaacacatcccaaggcctcttgattgatcccaccaaagagcatgcctcctagttggtagccacaggaaatgtcgtattcctgtagctccttcttttcagccttagatagttcctgcccgatcaggttccgaagctcanaatcttcttcagccgtagaagctngngcaatttcctgtcccttgt

SEQ ID NO: 68268 - DNA, 285 bp, Zea mays
gaatgagactgatgggatggtttttcattgtgggtaggatatgatcattgtgagcttctccgattacagtcaccgctctccgatcaatctcgagctattttgctcggatttatcctgttgcgatataccggaatgtaccgaccgttatccgtttctgacttttccgctaccgattcgaccgaacaaatatttatgcgggtgaaaactgtgagaggtttcttccgaccgttaccggacgttatcatgcttagtccacactgaccgcattttttcttcaccatgatg

SEQ ID NO: 68269 - DNA, 93 bp, Zea mays
gcatcggtcagacatctggagtcaaatggacttattgaaagagctaatggcattataatgacaggaataatgaagtttatcttcaatcagccc

SEQ ID NO: 68270 - DNA, 459 bp, Zea mays
  unsure (1)..(459): unsure at all n locations
agcttgatgtttagaatgacatcagcttctcctttatctttcatctcgaaattgctcgatagaagatatttaacttcctcaatcacgttgagatttgatccaaagatcaaaatgtcatcaacataaaggcacagcataacagactcacccccaccatactgatagtatacacacgtgtcagattcatttacaacaaagccagctgctggaagagtattatncaaattttcatgccattgcttanggtgcttgtttaggccatacnaatgatttatcaacctgcacaccttggtctcttgaccatccgcaatgaacccttctggctgatccatatagatctnctcatccaactcttcattaaggaaagctgtcttaacatccatctgatgaatgataagaccatgagaggctgccacggctattaatgtgcgaatttagtcaatcgagccactggtgagt

SEQ ID NO: 68271 - DNA, 367 bp, Zea mays
gaactcctcgggcgtggtatcgtcacatggactgctgataccacgccgagtgtagtaatgccatgtcccgagcctctttcagctggtctagtgagtcttctcacttcgtctggttgcttcgggcgtcgtatgccctcgtgctcggtgagccgtattctaagtctgtgggcaagatatccttgtgcccatagactatgaaaaacggtgtgaagcccgtggctcggcttggcgtcatcctcagactctataccaccgaggggagttacttcatccaccgcctgtcgaacttgttgatgtcagtgtagatcctcagcttgagtccctgtagaatcatgccggtggcacgctctatctgtcattcttcatg

SEQ ID NO: 68272 - DNA, 494 bp, Zea mays
  unsure (1)..(494): unsure at all n locations
agcttgtgaagattattcatcccatcatgtgctttcggcgatgccagagccaacccatattagtcttagcaactaagcaagtattgagttcagctctattaaaatcaactaagtatagctgacccttcaatactcccttaaatgctactgaatcatcacttcttctaaagagagtaacacctaaatctgtaaaaagacagttgtagcccattttgcataattgagaaactgaaagcaagttataagctaaagaatctacaagaaaaacattggaaatagaatggtcaggaggtatnagcaatttaccaagtcctttgaccaaaccttgatttccatccncgaatgtgatagctctttggggatcttcngttttctcgtaggaggagaacatccttntctccccagtcatgtggtttgtgcatccgctatcaataatccaacttgagcccncggatgcataaacctacannaacaagttaggccttgttcttagt

SEQ ID NO: 68273 - DNA, 376 bp, Zea mays
ctgccttctctgatgtcatggtgctcttgtgtgtccatcttcccgatgaggcaatgcttagatgacctgttcaatatggatggatgtacccaatataaaagcgactacgcactttgaataactttgtaatgaacacggctatgccggaatgatcaattgctgatgcatatatggcaagtgataccttaacattttgttctatgtacatgaaggatgttgacactatatttaaccacgatgatgatagtggtacagagacgccattgcctaatgacatgtttgatctaagcatggtgctactctcgttggagctactatgactgagtacattgatgatgctatcatgaataatgtagtttggaatgtgcctcataat

SEQ ID NO: 68274 - DNA, 478 bp, Zea mays
  unsure (1)..(478): unsure at all n locations
taactcaattcttatctcaagctatcaatcttacattgtatatcctttaagattgacccaaagatgaattgagttgttatatcactaacttcatattcatctctaccaagaacttgtgttgtagggaataaggattaacctttgtgggaatcaagcaaaaggcctacaaccaagtgatatccaaaggatggtaacaattaattcttaagtgcacaatggcttttaatagtatattcctttgtgtctttggagccacataggaaaaatgaagcacttgagaatgaacttaaaagatnttaccttgctttggaaaggatctaattatatggtagatggcaagttcatatttttatattatgacaatctacatgctntanatnggttgtatgtatcttgtggcatatntcannatgattatcgtattattgccatgacctagacataaagaggattatcccatgttcttaaatgaatagag

SEQ ID NO: 68275 - DNA, 379 bp, Zea mays
  unsure (1)..(379): unsure at all n locations
gctctatggacttaatcaagccccaagagcatggtatgaatgccttatagactctttaattgctaatgctgtcaaggttgggaaagctgatccaactctntttactaagacttgtgacggtgacttatttgtgtgccaaatctatgtcgatgacataatatgtggttctactaaccaaaagtcttgtgaagagtttagcacggtgatgactcaaaagtttgaaatgtcgatgatgggcgagttgaactacttccttgggttccaagtgaagcaactcaaggatggcactttcatctcccaaatgaagtatacgcaagacttgctcaagcggtttgggatgaatgacgccaagcccgccaagactccaatgggaacggac

SEQ ID NO: 68276 - DNA, 390 bp, Zea mays
  unsure (1)..(390): unsure at all n locations
ctttctgcatcctcaaccgaagctattcattttgctcaagcttcgtaacaagaaagagcttcggcaaaggtaaaaaaattcaacttcatcaaaaaacaagaaattcaatcatcagatggctatggtacgctcaacagctatggttactcgcgacggagaggaagccgaaggtgccgaaatcgctccaatctctgaagtgatgaaacggtcanggctggtagtatcggaagatgcacctgccgctgaagctgagcanngtgatgctaangaaatngaatatgaagatgattacagcgtcgtgccatctaaacccagccacctggagtttgggaaatccaccatcaccgaaggtgatatgtctaagctgatgaagttaggctatttcagtga

SEQ ID NO: 68277 - DNA, 408 bp, Zea mays
  unsure (1)..(408): unsure at all n locations
gtgggagaagcactngcagtgggtacttctctcgtactcttcaacgatattttgggagcttcgatagaagcatgagttggaatatttgtagacttcataacaacatccataacactggccatcctccttttcttatgaatcattgttacagcagttgttagcctctgcaacccagttgtggttgggggactcaacaattttgattgctcttctgcctttgagctctttatctcagactcttctactggatcggcactaacttcgaccgtcacaacaggaatcgtctccgaagctaatgtgatagcttcggcctgttcagcaatctctatcctctntgtatcangtattacggctgtcctttntatagaatgtggcctcggcctatgagttaaaattttaaccttcttc

SEQ ID NO: 68278 - DNA, 457 bp, Zea mays
  unsure (1)..(457): unsure at all n locations
aattgactcaagcctagctacgggtgcataggttttcttgttaccacaccatgctcgtcttgcttggtgcggaaaacccacttggttcctacaacattttgattgggacgtggaaccaaatgccatacctcgttcctagtgaaggtggtgagcttctcttgcatcgccaccacccaatctgaatcttgaagtgcttcctctattctgtgtggctcaatagaggaaacanaagagtaatgctcacaaaaatgtgcaacacgagatctagtggttacccccttatgaatgtcgccgaggatggtgtcgacggggtgatctncgtggattgcttggtggactctggggtgtggcggccttggttcttcatcctccttgtcttgatcatttgcatctccccccttgatcattgtcgtcatcttgaggtggctatcttgttgatcttctacttcatcaactt

SEQ ID NO: 68279 - DNA, 411 bp, Zea mays
  unsure (1)..(411): unsure at all n locations
ctgagatcaagaatgtttatttcatttctcaacatgcaaaagcgggtcttatcaagaggcttagtgaaaatatccgctaattgatcttccgacctcactccttctaaaatgatatctcctttagcaacatgatctctaatgaagtgatgacggatatcaatgtgcttggtgcgagagtgttgtacatgattattatcaattttaacagcactctcattatcacacaacatatgtaccttctctagaactacgccatagtctagaagagtttgttcatatataaaaattgtgtgcaacaagcacctgcggcaatgtattccgcttctgcagttgacaatgcaacactatttttgcttttggatgtccatgatactagtgatctaccaagcatatggcatnccccacaagtac

SEQ ID NO: 68280 - DNA, 439 bp, Zea mays
ctgtctgcattgacggtcaagtgaccgattcatctgtcctttcatcttccatgaatccaattacagcattgttcggttagctctcaatctatatggattgagtgtaattggatgtgtctaaattctaacaagttaacagttttctaaatattttctaatctcagtcaatccatatatactgtgaataaccgaacaatgccttaatgtacatagtatttaaaataaaaaggtgaatcaaactcacgcactcttgtagctgatggtctgatggttacgtgtcgatacatggaccgatccgaaacgtacattacgtatacaattcgtatcaaattctcggatatatgcatctgattgccggcgacgctactatctattggacgcatcttgtgtatatatatgcaacagcagctattctgtcacgtgtatatttcttttcaaa

SEQ ID NO: 68281 - DNA, 476 bp, Zea mays
  unsure (1)..(476): unsure at all n locations
agcttgtgaagattcttcatgccaacatgtgtttattttgcgatgccagagccaacccatattagtcttgacaattaagcaagtatcgagctcagctttgtttaaatcaactaagtatagctgaccctctaatacttccttaaaaactactgaatcatcacttcttctaaagacagtaacacctacatctgtaaatagacagttgtagcccattttgcataattgagaaactganagcaagttgtaatctaaagactctacaagaaaaatattggaaatagaatggtcagatgatatagcaattttaccaagctctatgaccaaaccttgatttccatcctccaatgtgatcgctctttggggatcttcgttattctcataggaagagaacattcttttcttccctatcatgtggtttgtgcatacgctatcaattatccaacttgagctcctagatgcataaacctgcaaaacaa

SEQ ID NO: 68282 - DNA, 288 bp, Zea mays
ataataaccgcgggagactaaaggtccaagagccggatgttttttagcccaggcttatagcgaaggtggatgaagtggactatacccatcaactgtgatgaacacactgatcacgacagtagtaacattctgcagagcatgcaggctgcctgcacatgcagctctactgggctgcctgactctgataagaagccgcggatgatggacctcttgcagtgggcggacaagatagctaaacggctgcacggttggaatgctacatgtctaaaccacgctgggagacatcct

SEQ ID NO: 68283 - DNA, 444 bp, Zea mays
  unsure (1)..(444): unsure at all n locations
tcccattcaactagggagcctttgccatctttcttcttggtggaaaatttcttcttcttcttatcatctgcatccttgcccttcttcttcttgttacggaaattcatggcgatgtgatccggttccccacacttcaaacactttctatcattgaaagcatttcttcttgatgtttggcctcttctangttgacccctcttcttcttcaagaaatttgttgaattattacaaatagagccatatctccatcactctcactttcattntcttcatcatcactatcttctttttcaattgccttagaagctntagctntgagagcgattgattcattcttcactttctttgccaaacttatagcatcgacttgagatttcttgaatatatcttgagtaagaatntctcccaatactttggttggagaagtngtagataaatcacttc

SEQ ID NO: 68284 - DNA, 460 bp, Zea mays
  unsure (1)..(460): unsure at all n locations
catttgataaagacaggatntgtagcgcatgtcaagccgggaagcatgttggcacccatcatccacacaagaacattatgacaagtgacaggccactggagctcctacacatggatttattctgcccgattgcttacataagcatcggcgggagtaagtactgtctacttattgtggatgattattctcgcttcacttgtgtattctntctacagganaaatctcatacccaagagactctaaaaggattcttgagacgggctcaaaatgagttcggcttaaggatcaagaaaataagaagcgacaatgggacggagttcaagaactctcacattgaaagcttccttgacgaggacggcatcaagcatgagttctcttcttcctacacgccacaacanaatggtgtagtagagacgaagaatcgaactctattggacatggcacgaaccatgcttgatga

SEQ ID NO: 68285 - DNA, 240 bp, Zea mays
gcttccttattgtcctgatggactttgttccattaatgagggttgttcttgaatcgctaaaacaccgcaaacccagatccagaaaccctacacatcatggggagcaggctgacatctgccaactcttatcaccccatcactaactagactacacttgatctgctgaactatgggatatactgtattgacttgtacttatatccagagaattataccgttccttatatatattggactagg

SEQ ID NO: 68286 - DNA, 352 bp, Zea mays
cctgtatgatcatatgcttatatatacgaattgtctctttcctatctacaggcgcatatgttccaccgatatccttaccttctacttgtgaataccccttggccacgagtctagctttgttccttgtcaccacaccatgctcatcttgcttgttgctgaagacccattctgtttctacatacatttgattatgacagtgtacctaatgccatacctcattccttgtgaagatgttgagctcctcttgcattgccatcacccagtccgaatcttggagtgcttgctctatcctatgtggctcaatagatgaaacaaacgatgaatgttcacaaaaatgtgcaacacgagatct

SEQ ID NO: 68287 - DNA, 447 bp, Zea mays
  unsure (1)..(447): unsure at all n locations
gccccttctcaagctctttcaccatattatcacggttatcttgagaaggttgagcatgacactttcccttcaaaagagttaagctccttcttagtcttccaacttcttccttgagctctttattttcttgtgtgatagaaatatcactaattcctgaaatntctagctcaatggaagattggctttcttgagagcaacnnattgtagcacatgataatatagtttctacttgagtacatgtgcatatgtgaggttggtatgatttcaaattagttaacacaacctcatgagccatttctaacatgatatgtgaatccatanatntattatgagagcacacaagcatatcatgtttttcttgcaaagctagattnntcaatattagcctttctatcgtgttcttgaacatnagaattttaatttctaattgagcaatatatgatgaat

SEQ ID NO: 68288 - DNA, 205 bp, Zea mays
gtcccttgcgacccttaagcacgcgctagaatctattgatgatgagagccatctcttcatcattaagtacggccgtctcaatttgtgccaacttgctatgtaacgcctacttgcttcgtggtgacttgagagacaagtgttgcgactccgtgatcggaccattcgatgcgtcgtccacgtaactcgactccttgatcatcattcg

SEQ ID NO: 68289 - DNA, 433 bp, Zea mays
  unsure (1)..(433): unsure at all n locations
acttaagagaatgaataagaggatgtataatattatccagagggcgaccacanttttcctaacttgcttaagtaacatagttcataagaaaatattgttgaaccccctgttaataaaaaataaatgcaccacttcttatttcataaaaacaacaagaacttagaaaaatcctagaaaataaccctaaagagaaaccaccccaatccttgggataactactgttatgctagtatgaatctatgaaaaatacaagttctgttgtttgatanttttcanatgacaagttagttataagtgccttgttaacatttaactntagaaaatcacaactaaataatcattatgtcactntctgtgatttttggcacagagacctatcattacccatagatattgacaaaaaataattttagtacataaccctcacctaaat

SEQ ID NO: 68290 - DNA, 486 bp, Zea mays
  unsure (1)..(486): unsure at all n locations
agctctgataccaattgatagtcgcctagagggtgggtgaatagggtgaaactgaaatttacaaaattaatctcaactacaagccgggttagtgttagaaatatgatcgagtccgcgagagagggtggaaaacaaatcgcaagcaaataagaagtgtgacacacggatttgttttaccgaggttcggttctcgcaaacctactccccgttgaggaggccacaaaggccgggtctttttcaaccctttccctctctcaaacggtccctcggaccgagtgagctttctcttctcaatcaaacgggaacaaacttccccgcaaggatcaccacacaattggtgtctcttgccttggttacaattgagttgatcgcaagaaagattgaaagaaagcacgattgcaaaaaccaagcgacaagagcgacaaataacacacggatcactttctctctcaagtcactaaccactaatgatctctnttctcaatt

SEQ ID NO: 68291 - DNA, 361 bp, Zea mays
gcgtcaccggagaagccaaatcgcgctcaccgtagttcaagaactcgccggcgcacgtggaccgtgtaaaccccttcaccatttcccgattcgttgcgcgcatgggctctgtgtcatcccgtgaagctcctcgtgcccattaattaaactctcccgccgtggtttggccggagcatgcgccgtcgtcgatccccgccgcctgtgttcgtggccaggggagccccgaccacctctgacgccgacccgcacatcgacgtgaccgtcgcgacctcctaaacatcaccgaccacctcgccggacctgcctcgccgtcggtaagccgcgccaccctattctttcccgcggctactggttcagttaa

SEQ ID NO: 68292 - DNA, 456 bp, Zea mays
  unsure (1)..(456): unsure at all n locations
agcttggtcattatattgctaactgttttgactatgatagngancacgaccacaggaacaaaagggagataaagttgcattacaagaacgccaagggcgaggcacatatcggaaaggagtgggattcggattgctcctcctccgactccgacaatgaaagacttgccgccaccgccttcaacaaatcaaccctcttccccaacgagcgtcacacatgccttatggcaagggagaagaaggtgagtactcgagacaccacttatgtctcttctagtgatgatgagtctagtgatgaggaaatagattactctagcttgttcaagggattggatacaaataagattgataaaatcaatgaattgattgatgccttgaatgagaaggatagactcttatagaaacaagaggatttattgtatgaagaacatgatatattatagaagcacaaaatcctat

SEQ ID NO: 68293 - DNA, 397 bp, Zea mays
gacaagctgcttctgctgtcctgtctaaacccatgctcttatgtgaggatatagcatatcagaatgtgctattgtgatctcaattgtccgaagagcacgagaaaaccttgataaggtttctgtttaacaataaagatgtttttgcttggtcaactaatgatctttgtggagttaacacggatgttattgagcactcgctcaatgttgatccatccttcagacccaggaaacagaggcttcggaagatgtctgatgacaatgccgaatgtgctcggaatgaattgaaaagactcctcagtgccggagttattagataggtaaaatacccagactgtgtggctaacactgctatggtgataaacgccaatggaaatggagaatcgtatcgatttactga

SEQ ID NO: 68294 - DNA, 425 bp, Zea mays
  unsure (1)..(425): unsure at all n locations
agcttagacaactacgggccagcatataaagatgattctgggcactngacgtaatctctggtatggagtgctgttcatatttgagattttcactttatttatatataaaaaaaataaagccacccgggtggaccgcttcaaggcccactggccgagcagcccacctgagcagcaggttttatggcgtctgttgccgcacgtagaggatagtaatcctgctggtggaagaaggtggaggtgtactgcttgtgcgcagcgaggttctcctgcgcttccgtgtctcaccagtgcacctgtgtggtgctctgtctggtctgattattatccaccgtggcctggtgcctgngctccctgctgcgcggtgttcgtcttctcgggctggtgccgtggacgtctccctcggctccgtcagcggctctagtatc

SEQ ID NO: 68295 - DNA, 361 bp, Zea mays
gtgccatgacgaaagatgatctcgcagacagttctctcgttcatcagcctgaatgtacgggaattaaacactcgagaataaacccactatttttgtttacgcaactcattccttttttcttatatgaattcttttttcatatagggcctgatcctaagcaacgcattatgagcgcaaaagagcgccgaagatgaaagttatgaaattgcgtttaataatttacgctccgaagttatcaaactgagaaacgaagctttggaaaaagataaaattctacttacactggtagataaagtgaataaagacgaagctgcttcaaaggcccaggccgaagctcataaacgcgagattaaagatcttc

SEQ ID NO: 68296 - DNA, 389 bp, Zea mays
gcatgtgtcgagttcagcttataaaatcaccaagatagctgaccctcttcacacccttaatgctattgaatatcacttctttaaagacatgacacctacatcagtaaagagacagttgtgggccatttgacataattgagatacagaaagcaaattgtaatctaaagaatctacaagaaaaacattggaaatagtatggtcaggtgatatagcaattttacccaatccttggaccaaaccttgatttccatccccgaatgtgatagctcgttggggatcttggttattctcataagacgagaacatattcttctaccctgtcatgtggtttgtgcacacgctgtcgagtatccaacttgagcacccggatgcatatacctacaaaacaa

SEQ ID NO: 68297 - DNA, 366 bp, Zea mays
ctcatacctgcattttcagtgatggatatattagtatcaatatcaaccttctctcttttgttctggtagagaaagcttaatttttttgctctttattgagtcatgcggcatatactaaattgtaaatatggttctaccgagagatgtgtggttgacctcgcttaaatggttatagatgctgacatgtatttttaatggcatgtttctttatatgacagttctagacttccaagggtcgagttatgtacgaagtatctccaatctttagaggaagaatgtcttctcgacaggttgtatgtacttgctctatcatagagtgagatgaatcattatctacatctatgatctcgtcatatttaatacact

SEQ ID NO: 68298 - DNA, 484 bp, Zea mays
  unsure (1)..(484): unsure at all n locations
agcttcctccctcctttgtcgaaagtcattatctactcggatatattnngccatcttctgaagcagcttctccagggtctgagggggtttcctggcgaagtattgggctgtaggtcctggccgaagccccttaatcatggcctcaataacaatttcattaggcaccgttggcgcctgtgccctcagtcgtaagaaccttcggacatatgcatgatggtattcttcatgatcctgagtgcactggaacaaagcttgagcagtgaccggcttcgtctgaaacccctaaaagctggtgatgagcatgtccttcagctnttgccacgatgtgattgttcctggccgaagagaagagtaccatgtctgtgcaacaattttgactgccatgacgaaggacttcgccatgactgcagtattgccaccatatgaagatatggttgcttcgtagctcatcagaaattgcttcggatctgagtgtccgtcatgc

SEQ ID NO: 68299 - DNA, 319 bp, Zea mays
tggtcgagtgagttcaccggacgtgggcgaccatgttggtctcttgttctcaaatgctatgaatcaagatcatggcaacacacaactgttgatggttaaagaccttcctccttcgaagcattatctaccttaggttgtaatgatcttcggacgaaggtcaccaacgacatacctctgttattttgataaacaagtgtgtgaacaaagacatataacacgcagatggaatttgaataatcatttataatcatcacactattcatatattcatttattttataagcattagcagttatcaacaatatttgaattacatttg

SEQ ID NO: 68300 - DNA, 461 bp, Zea mays
  unsure (1)..(461): unsure at all n locations
gagagagggagagatgtgtaatatatgangccctcctaatccatgaactggctgaggctgtttaaactggagtttagttttagggatcttaacactgaccttagtgtcactcgatgtcacgtcataaatacaatggcgtccatactatttatatttataatataatacttggccgccatgatttatagtgttgatgctatagtcacaatgtcaaaccctggagtctaaacatgataataatttcactaaaaatgtgaacattgaattttttttaaaaaaacacaatacaaatgaaatctgcatgttntaaagatgtttgcagtagtttacccatatggtcaccgaannacgttgtttacattgttttgtagcgtaaactgtactgttcgtagagtgaagtttgatatgaggatgcgaatgagtaactattggagatagcctaaccaatcagaacatgaacg

SEQ ID NO: 68301 - DNA, 403 bp, Zea mays
tatgctgcgcaatcccttatgctgtgacatacttttttttctgcacattacatggaaaaagacaattattgccatttgcatagtgctacagatagcaattgtcccaagagactcaactaataacacatttgatatatagtgctcactacaaattgcgattttacctatcccttttaccttgccttgattcccatcaccgaatatgattgaatcctgggaatccttactcttgacgtaagaggtgaacatcttcttctcccccgtcatatggtttgtgcatccgctgtcgataatccagctcgaacccccggatgcataaacctgcaaggcatatttatgcttgggacttatgtacccaactcttgttgggtcctacaaggttagtcacaattgttttatggac

SEQ ID NO: 68302 - DNA, 495 bp, Zea mays
  unsure (1)..(495): unsure at all n locations
agcttatcaaagagaatagcgacaagagctctttttatataataatagaaggggagttatacaagcatggagtttgttctccattactcaaatgtttatccagaactgaaggtatagagctgatgaaagaaatacatgcaggcctgtgtggatctcacatcagatctaggcctttgntgggtaaagtttttcgtcaaggattctattggccgaaggcagcttcgaatgtagcaaaattagttcanaaatacgaaggtngtcaaaaatgtgcaagagatcaaaaacaaccttcgtctctaactcaattaatacagcccacttggccattgcaaagatggggccttgattngctaggcccacttccaccaacacaagggaatntaagatatgttgtagtggccagtggaatattttctaaatggatngaggcgaagcctttagccacaataacttcggtcactgttcannaagttttctggcaaaatattgtgtgtc

SEQ ID NO: 68303 - DNA, 353 bp, Zea mays
  unsure (1)..(353): unsure at all n locations
gtgcttcgcatatattctcgtgcaacttgtcggttgtctctctgcacatatagaangttgtcatgtatactcctccctttgatgaaagcattctgcgatctggacaccagctgctcaagcctatgttctaatctttctgctagtagctctgttagaaccttcactaagctgtttatcaaactaatcggcctgaaatcatcaaggcagagtgccccctctgtttttggatagagaacaatgtgtgcttcattcgcaagatggagcttataagtgcggcgattattgaatccaatgagagcattgtccaaatgtgtcttatcaatactccagcattctttataaaacaatccaat

SEQ ID NO: 68304 - DNA, 481 bp, Zea mays
  unsure (1)..(481): unsure at all n locations
agcttctaaagggagaacacgtgataggtctatctaatgttcaattcgaaaaagatagaccttgtgcagcttgtcaagcagggaaacaggtgggaggctctcatcacaccaaaaatgtgatgacgacatcaagacccttggagatgctgcatatggacctttttggacccgtcgcctatctgagcataggaggaagtaagtatggtttagttattgttgatgacttttcccgcttcacttgggtgttctttttgcaggaaaagtccgaaacccaagggactctcaaacgcttcctcaggagagctcanaatgagtttgagctcaaagtgaagaagataaggagcgacaacggatccgagttcaagaaccttcaagtggaggagttccttgaagaggaaggaatcaagcacgagttctccgctccctacacaccacagcanaatggtgtggtagagaggaagaacaggacgctcatcgatat

SEQ ID NO: 68305 - DNA, 413 bp, Zea mays
tactacgctcgaacccacagttcctttataaatcttagtccacttattattttgtctcctcgagacaaataatagtggcgctggtggatagaattgttggcctcacactatcccgcttagcacaggcattcatacccctcacattccaagatgaaatatagcagtttgtattcattataagatgaaccctctacttgaacagatattgccacataaaaaatataacatagctaacatttgatgcagactggcaagcttgttcaccaacagtaagatacacatgtcccatgagacacacaaaagttccaaactgaaattactatgatacagatgtacaatgatccaatgattcgaataccacctctatgaccaccatataccatgcgacgacctacagtctatcaaaagaacct

SEQ ID NO: 68306 - DNA, 353 bp, Zea mays
  unsure (1)..(353): unsure at all n locations
agcttgtggaggttcttcatccccacatgttgcttattctgcgatgccacagccagcccatgcaagtcttagccattaagcatgcatctagaccggcctcttcttttgcaaaatcaactaaataaaagttgccgtctaatacacccttaaaagctagtgaaccatcacttctcctaaagacagacacatctacatntgtaaacagacagttatatcccatattgcacaattgactaacagatagtaaattatatcctagtgactctactaaaaacacattagagatagagtgctcattagaaattgcaattttacctaacctttttacctggccttgattcccatcaccgaat

SEQ ID NO: 68307 - DNA, 328 bp, Zea mays
  unsure (1)..(328): unsure at all n locations
ccggacccccttgactggactggactggactggcctgtaccctctgcaaagtcatgttcgatcgatccactgtccgcgcggtggcctccgcctccgtcgtcgttctgaataaagaaggcaatgctgcggcaggaacacatctgccatttttntacaactacactgctctaatatgctactgcctgcgtctggagccagagctagtcagctagctctatggctcgatattntcaagcctcagcagcagttatatatcgtactactgtgtaccacgactgcgacgcgcgcgctcctacatttgtggacctactgtacgagcgaccgaccg

SEQ ID NO: 68308 - DNA, 503 bp, Zea mays
  unsure (1)..(503): unsure at all n locations
tgcaagcttggaagaattgactgaagaacatgttgttattatatgctctcatgttgatnntggccaaatgtatgaaactatttcaatttagcaagacaactccttattatgtatcgctcaattagtcaataggaataccttgcttaaggaccaagtagaaaggctaaacattgagaatctagcttttcaagaaaaacatgatatgtttctatgttctcataaaaatcttatgtatgatcatatcatgttaaagattgctcatgaggttgtgatagaaaacttanaatctcaacaacctcactcatgcacatgtgttcaaattgaaactatattgccatgtgctagtgcttgttgctcgtcagcaagaaaatccttttntgagctngaatntatagtaataaataatgttgcatatcaagagctcaaggaagaaaatgggaggctaagaacgagcttgacacaactganagggaagtgcattgcccaaccttctcaagataacc

SEQ ID NO: 68309 - DNA, 285 bp, Zea mays
tagtctcatggctagtgcttatctcactaaataatagttacatatttctacgtcttagcgtagcatttttaccctacatgctgtgatttgctgtaataaggaagtcctcttgggtgtccaagagatcatccgtttcatgaatagcactaatcagttcataacaattttccttctgttgtatgttaaggacggcaaaaaggatgtgcaagatatcctcctcactactatcattatcctcatcggtagatgtctcatatctatgggaggatctggattgtaccttct

SEQ ID NO: 68310 - DNA, 449 bp, Zea mays
  unsure (1)..(449): unsure at all n locations
agctntntcaccatattatcacgattatcttgttaatgttgagcatgacactttcccttcaaaagagttaagctccttcttagccttccaacttcttccttgagctctttattttcttgtgtgctagaaatatcactaattcctgaaatttctagctcaatggaagattggctttcttgagagcaacatttgttagcacatgataatatagtttctacttgagtacatgtacatatgtgaggttggtatgatttcaaattagttaacacaacctcatgagccatttctaacatgatatgtgaatccataaatntattatgataacagacaagcatatcatgtntttcttgcanagctagaattntcaatattagcctttctatcgtgtttttgaacatagcattnttatnttctaattgccaacatatgatgaatgaataacaacttag

SEQ ID NO: 68311 - DNA, 457 bp, Zea mays
  unsure (1)..(457): unsure at all n locations
agtactgtgnggtacccatcgcttgatgggtgcgtttatatattaaacaaagatctatgaaccgcaaagttctttgtgttatcacttggtaaactagttacctgtctatcacaagttgcaattttgggttgcctatttacatgcgcaatgattgacaagctatatgtggggttgttaccaatgggacaattcttgcattgatgtacctttttccggcatgtgtagcatatgcagttttgaagtcttgagaatatcttctttccttgtttgacgcttgctacatggttagtaaatacttttctttctaaccctatgcctttttgttcaaatggcgacaagatttggttaattgtcccttctttgagcattataacgattgtatcatacttgttataataagcaattttaatgaatgacatgacctatcaagtgtcctttcaagattactaacttgtta

SEQ ID NO: 68312 - DNA, 475 bp, Zea mays
  unsure (1)..(475): unsure at all n locations
agctntccactctctacactcaatacaagagcttagaatacactccaaagacacattcaaagcctccaatcctctccaagtttcataatcaagtcaagtgatcaaaagtgtttagtgacttgagagagggtgatttgtgttttaattgttgctcttgttgtttggttgccttcttcttctccttctaaactttccaagtgttttgtaaagcaagaaagagacacctaattgtgtggtgattcttgcagggtcttagtgacccgtgatattaagaagaagcactcaaccggtctaggtgaccggttgaaagagggaaatggttgaaatagacccgacctttgtggcctcctcgatagggagtaggttctttggaactgaacgtcgagaaacanattgacgtgtccactcgtgttgatcttcaccattnngattgtttctcccctctcctctctctctaaagtttcttactcacatt

SEQ ID NO: 68313 - DNA, 478 bp, Zea mays
  unsure (1)..(478): unsure at all n locations
tctatagggagaagcacatttatgattaacaaatgttcattntgataaagacaggatntgtagcgcatgccaagcatggaagcaagttggtgctcatcatccacataagaacatcatgacgactgacaggccactcgagctcctacacatggatctattcggcctgatagcttacataagcatcggcgggagtaagtattgtctagttattgtggatgactattcttgcttcacttgggtattctttttgcaggaaaaatctcatacccaagagaccttaaagggattctcgagacgggctcaaaacgagttcggcttaaggatcaagaaaattagaagcgacaacgggacgaagttcatgaactcacaaatcgaaggcttccttgaggagganggcatcaagcatgagttctcttctccctacaccccacaactaaatggtgtagtggagaggaagaatagaactctatgggacatg

SEQ ID NO: 68314 - DNA, 228 bp, Zea mays
cccgacactatcccaccatccttgaaaggagtggcgatgctcgcttcctagctctgctgcatattttgggatgggaccggactttcttggttatactttgttcctacaggtgcacgcgagtgcacccgccgtgcgtaacccctgatgcctctgacgagagtattgacttctctgaagacacaacacttttcttgatgactcggccggtctgttgtcccccttgcggct

SEQ ID NO: 68315 - DNA, 485 bp, Zea mays
  unsure (1)..(485): unsure at all n locations
ctaagcttacatcactccangcatcatagtaaccttcgctcaatgcctcctgttctatttcacctcaaaatgggatgttgcaatggcgaaggcctaacagatcccttatcataaggattctgcttcaagctcttgggtccgacctgtgaggctctcgatgcgagaggagagctacttatgcacatgcgaataatgtgccccaaatcgtttgtgtacgacatccaccgcgttcgacaggtaacttttccttctctagctcctccagatgacgttgcattgtaacatagatctctttggcatcatcaaatttggcatgtaccgctgaccaaagatggcatgaacaataaaaacagatgggcgtgggagaagaagaacaggtactatgctcgaggtgaatccataaaggaccctacctttcatagaggacatgagtttctcttctttcttcatccaaccgctcattaactcattatatgacacaactt

SEQ ID NO: 68316 - DNA, 462 bp, Zea mays
  unsure (1)..(462): unsure at all n locations
aagattctttattccaacatgtgctatttttcgatgccagagccagcccatgttagtcttagcaattaagcaagtgtcgagttcagctctatcaaaatctactaagtatagctgaccctctaacactcccttaaatgctattgaatcatcacttcttctaaagacagtaacacctacatccgtaaaaagacagttgtagcccattttacacaattgtgaaactgaaagccaggtattatctaaagatctacaagaanaacattggaaatggaatggcacgtgatatacgcaatttacccaatccttttaccaaaccttgatttccatccncgaatgtgatagctcgttggggatcttggttttctcgtaggaggagaacatcttcttctcccctggcatatggttggtgcacccgctgtcgatgatccaacttgagcccccggatgcataaacctacaaaac

SEQ ID NO: 68317 - DNA, 298 bp, Zea mays
taagctctaaggaaacacgaattgttgactacgttcattctatatattaccttggcacttgtcagcacgtaactgtgtatgaacacatacactgaatgtgatgacccctcagaccctggagctgtgatatggacctcttagacccgtccctatctgacatacgagaagtaattggctgctatagtgatgacttttccgctcactggggtcttttgcggaaaggtgaactaacggacctatgccttctacgagacacaaatgagttggctaaagtaaaaatatgacgacacggtcgagt

SEQ ID NO: 68318 - DNA, 502 bp, Zea mays
  unsure (1)..(502): unsure at all n locations
gcttctaagggagaacacattttaggactatctttatgttcatttgagaaagacagggtttgtagcgcatgtcaagcaggaaagcaagttggtgcccatcatccacacaagaacatcatgacgaccgacaggccgcttgagctactccacatggatctattcggcccgattgcttacataagcatcggcgggagtaagtattgtcttgtaatagtggatgattattctcgcttcacttgnggtgtctnnttgcaggaaaaatctcaaacccaagaaaccttaaagggattcttaagacgagctcaaaacgagttcgtcttaaggatcaagaaaaatagaagcgacaacgggacggagttcaagaactctcaaatcgaaggcttccttgaggaggagggaatcaagcatgagttctcttctccctacacgccacaacanaatggtgtagttgagaggaagaatcgaactctatttggacatggcaggaccatgctngatgagt

SEQ ID NO: 68319 - DNA, 279 bp, Zea mays
atccatttgacgtaatttattacatctcactccttaccgcttcctttcataatgcatcatcaagataggaatataactcactaatggtaactggtgtgtcctacactatgtacaccatatagtcgttaactacgaattttgtcaccctctgtctctcgctctttctagtgactatattgtcatcctcctcatggatgtgcacgtgagaatacacagcatgatctgtaggaatcacactgttcgtgctcatgtggaatcatagtctcatgacttatatca

SEQ ID NO: 68320 - DNA, 479 bp, Zea mays
  unsure (1)..(479): unsure at all n locations
agcttgtgaagattcttcattccaacatgagcaatttatcgatgccagagctagcccatgttagtcttagcaattaggcaagtctctagttcaacattgttatcattgaaatcaactaagtatagctgaccatctaacactcccttaaaagctattgaatcatcacttcttctaaagacggtaacaccaacatcagtaaataaacagttgtagcccattttgcataattgagaaatagaaagcaagttgtaatctaaagaatctacaagaaaaatattagaaatggaatggtcaggagatatagcaattntacccaatcctttgaccaaaccttgatttccatctctaaatgtgatggctctnntgggtatcatcattttctcatatgaggtgaacattantttctcccttgtcatgtggtttgtgcattcgttgtcgattatccaacttattccaccggatgcataaacctacaacac

SEQ ID NO: 68321 - DNA, 451 bp, Zea mays
  unsure (1)..(451): unsure at all n locations
gtactgaagactcttgaacttctttgtgtatctatctatatatagacttcgaaactntntacatcatttggcaaaaattgtaattgacagctgaacaaaatattgtacttatttgtcaataccttgtaatataatcttacctttttgctcatgtgcgaattgcttttgtgtggacgaaaccaatgcttgctatcttttgagccgaatgcgaaaaacaccttcccttcttttcgttcacatcaaagcattgtttcattaaagacgaagcaccttccattcttttgtctgagacgaagcatcttcgtattcaacgaagcattttgtcactgaagacatgcatcttctgtctttcctattaatgtttgtgctctatgtcatgatgatgatcctacgaatgtctaatgaatgtttgtatgaatgcaaaacatgatgtgatgaattatgcatatgt

SEQ ID NO: 68322 - DNA, 417 bp, Zea mays
  unsure (1)..(417): unsure at all n locations
agcttgtggaggttcttcatccncacatgtgcttagcggcgatgccacaaccagcccatgcaagtcttatccattaagcatgcatctagaccggcctcttcttttgcaaaatcaactaagtaaagtttgccgtctagtacacccttaaaagctagtgaaccatcacatcttctaaagacagacacatctacatttgtgaatagacagttatatcccatattgcataattgactaacagatagcannatatatccaagagactctactaaaaacacattagagatagagtgctcatttgagattgcaattntacctaaccctnttaccttgccttgatacccatcaccgaatattattgaatcttgggaatctttattcttgacgtaggaggtgaacatcttcttctcccccgtcata
